United States Patent Application Publication US 2013/0309769 A1 - sequence listing, part 2

SEQ ID NO: 391 - DNA, 5608 bp, Homo sapiens
gcgcctcccaccgccgcactttcactctccgtcagccgcattgcccgctcggcgtccggcccccgacccgcgctcgtccgcccgcccgcccgcccgcccgcgccatgaacgccaaggtcgtggtcgtgctggtcctcgtgctgaccgcgctctgcctcagcgacgggaagcccgtcagcctgagctacagatgcccatgccgattcttcgaaagccatgttgccagagccaacgtcaagcatctcaaaattctcaacactccaaactgtgcccttcagattgtagcccggctgaagaacaacaacagacaagtgtgcattgacccgaagctaaagtggattcaggagtacctggagaaagctttaaacaagtaagcacaacagccaaaaaggactttccgctagacccactcgaggaaaactaaaaccttgtgagagatgaaagggcaaagacgtgggggagggggccttaaccatgaggaccaggtgtgtgtgtggggtgggcacattgatctgggatcgggcctgaggtttgccagcatttagaccctgcatttatagcatacggtatgatattgcagcttatattcatccatgccctgtacctgtgcacgttggaacttttattactggggtttttctaagaaagaaattgtattatcaacagcattttcaagcagttagttccttcatgatcatcacaatcatcatcattctcattctcattttttaaatcaacgagtacttcaagatctgaatttggcttgtttggagcatctcctctgctcccctggggagtctgggcacagtcaggtggtggcttaacagggagctggaaaaagtgtcctttcttcagacactgaggctcccgcagcagcgcccctcccaagaggaaggcctctgtggcactcagataccgactggggctgggcgccgccactgccttcacctcctctttcaacctcagtgattggctctgtgggctccatgtagaagccactattactgggactgtgctcagagacccctctcccagctattcctactctctccccgactccgagagcatgcttaatcttgcttctgcttctcatttctgtagcctgatcagcgccgcaccagccgggaagagggtgattgctggggctcgtgccctgcatccctctcctcccagggcctgccccacagctcgggccctctgtgagatccgtctttggcctcctccagaatggagctggccctctcctggggatgtgtaatggtccccctgcttacccgcaaaagacaagtctttacagaatcaaatgcaattttaaatctgagagctcgctttgagtgactgggttttgtgattgcctctgaagcctatgtatgccatggaggcactaacaaactctgaggtttccgaaatcagaagcgaaaaaatcagtgaataaaccatcatcttgccactaccccctcctgaagccacagcagggtttcaggttccaatcagaactgttggcaaggtgacatttccatgcataaatgcgatccacagaaggtcctggtggtatttgtaactttttgcaaggcatttttttatatatatttttgtgcacatttttttttacgtttctttagaaaacaaatgtatttcaaaatatatttatagtcgaacaattcatatatttgaagtggagccatatgaatgtcagtagtttatacttctctattatctcaaactactggcaatttgtaaagaaatatatatgatatataaatgtgattgcagcttttcaatgttagccacagtgtattttttcacttgtactaaaattgtatcaaatgtgacattatatgcactagcaataaaatgctaattgtttcatggtataaacgtcctactgtatgtgggaatttatttacctgaaataaaattcattagttgttagtgatggagcttaggggcgcagagaagaaaaagtggggaaaaaagaaaagataggaaaaaagaagcgacagaagaagagaaaggctgcccagaaaaggaaaaactagttatctgccacctcgagatggaccacagttcacttgctctcggcgctttgtaaatttgctcgatcctcctccgaggttcaagatgtgagagggtcagacgcctgaggaacccttacagtaggagcccagctctgaaaccagtgttagggaagggcctgccacagcctcccctgccagggcagggccccaggcattgccaagggctttgttttgcacactttgccatattttcaccatttgattatgtagcaaaatacatgacatttatttttcatttagtttgattattcagtgtcactggcgacacgtagcagcttagactaaggccattattgtacttgccttattagagtgtctttccacggagccactcctctgactcagggctcctgggttttgtattctctgagctgtgcaggtggggagactgggctgagggagcctggccccatggtcagccctagggtggagagccaccaagagggacgcctgggggtgccaggaccagtcaacctgggcaaagcctagtgaaggcttctctctgtgggatgggatggtggagggccacatgggaggctcacccccttctccatccacatgggagccgggtctgcctcttctgggagggcagcagggctaccctgagctgaggcagcagtgtgaggccagggcagagtgagacccagccctcatcccgagcacctccacatcctccacgttctgctcatcattctctgtctcatccatcatcatgtgtgtccacgactgtctccatggccctgcaaaaggactctcaggaccaaagctttcatgtaaactgtgcaccaagcaggaaatgaaaatgtcttgtgttacctgaaaacactgtgcacatctgtgtcttgtttggaatattgtccattgtccaatcctatgtttttgttcaaagccagcgtcctcctctgtgaccaatgtcttgatgcatgcactgttccccctgtgcagccgctgagcgaggagatgctccttgggccctttgagtgcagtcctgatcagagccgtggtcctttggggtgaactaccttggttcccccactgatcacaaaaacatggtgggtccatgggcagagcccaagggaattcggtgtgcaccagggttgaccccagaggattgctgccccatcagtgctccctcacatgtcagtaccttcaaactagggccaagcccagcactgcttgaggaaaacaagcattcacaacttgtttttggtttttaaaacccagtccacaaaataaccaatcctggacatgaagattctttcccaattcacatctaacctcatcttcttcaccatttggcaatgccatcatctcctgccttcctcctgggccctctctgctctgcgtgtcacctgtgcttcgggcccttcccacaggacatttctctaagagaacaatgtgctatgtgaagagtaagtcaacctgcctgacatttggagtgttccccttccactgagggcagtcgatagagctgtattaagccacttaaaatgttcacttttgacaaaggcaagcacttgtgggtttttgttttgtttttcattcagtcttacgaatacttttgccctttgattaaagactccagttaaaaaaaattttaatgaagaaagtggaaaacaaggaagtcaaagcaaggaaactatgtaacatgtaggaagtaggaagtaaattatagtgatgtaatcttgaattgtaactgttcttgaatttaataatctgtagggtaattagtaacatgtgttaagtattttcataagtatttcaaattggagcttcatggcagaaggcaaacccatcaacaaaaattgtcccttaaacaaaaattaaaatcctcaatccagctatgttatattgaaaaaatagagcctgagggatctttactagttataaagatacagaactctttcaaaaccttttgaaattaacctctcactataccagtataattgagttttcagtggggcagtcattatccaggtaatccaagatattttaaaatctgtcacgtagaacttggatgtacctgcccccaatccatgaaccaagaccattgaattcttggttgaggaaacaaacatgaccctaaatcttgactacagtcaggaaaggaatcatttctatttctcctccatgggagaaaatagataagagtagaaactgcagggaaaattatttgcataacaattcctctactaacaatcagctccttcctggagactgcccagctaaagcaatatgcatttaaatacagtcttccatttgcaagggaaaagtctcttgtaatccgaatctctttttgctttcgaactgctagtcaagtgcgtccacgagctgtttactagggatccctcatctgtccctccgggacctggtgctgcctctacctgacactcccttgggctccctgtaacctcttcagaggccctcgctgccagctctgtatcaggacccagaggaaggggccagaggctcgttgactggctgtgtgttgggattgagtctgtgccacgtgtttgtgctgtggtgtgtccccctctgtccaggcactgagataccagcgaggaggctccagagggcactctgcttgttattagagattacctcctgagaaaaaaggttccgcttggagcagaggggctgaatagcagaaggttgcacctcccccaaccttagatgttctaagtctttccattggatctcattggacccttccatggtgtgatcgtctgactggtgttatcaccgtgggctccctgactgggagttgatcgcctttcccaggtgctacacccttttccagctggatgagaatttgagtgctctgatccctctacagagcttccctgactcattctgaaggagccccattcctgggaaatattccctagaaacttccaaatcccctaagcagaccactgataaaaccatgtagaaaatttgttattttgcaacctcgctggactctcagtctctgagcagtgaatgattcagtgttaaatgtgatgaatactgtattttgtattgtttcaattgcatctcccagataatgtgaaaatggtccaggagaaggccaattcctatacgcagcgtgctttaaaaaataaataagaaacaactctttgagaaacaacaatttctactttgaagtcataccaatgaaaaaatgtatatgcacttataattttcctaataaagttctgtactcaaatgtagccaccaattgctagaatatggctgtacggcaatgctgagacatcacgctgagcgagagtggacatcctcattttattcctacccttaccgtggatctctcctgtgcttcaccactcagtataatgctggctgagctcttctgacaaataccttccaagatgtgaggaaaacacacgtaggtgcagttgttgaattgtatgatctgccactgaagtaattagtgtgataattacttggattttctcctttaacaaattattgttataaattatattaatatatgtcatgctaataaattatttccatattcctaggaa

SEQ ID NO: 392 - DNA, 4048 bp, Homo sapiens
ccctgcgtcggggggcaagatggcagcccaggctttggcgctgctgagagaggtagcgaggctggaagcgccgctggaggagctacgcgcgcttcactccgtgctgcaggcagtgccgctcaacgagcttcgccagcaagcggcggagctgcgcctcggcccgctcttctccctgcttaacgagaaccatagggaaaagactactttgtgtgtatccattctggagagattgctccaagctatggaaccggttcacgtggcccggaacctcagggttgacctgcagaggggactaattcaccctgatgattctgtaaaaatcctcactctttcccagattggaagaattgttgaaaattctgatgctgttactgagattctaaataatgctgaattactaaaacaaattgtttattgcattggtggagagaatctatctgtagcaaaagcggctatcaaatccctgtcaagaatatcactaacccaagctggactggaggctttatttgaaagcaatctgctggatgatttgaaaagtgtaatgaaaacaaatgacattgttcgatacagggtgtatgagctaattatagagatttcttccgtgtcaccagaatctttaaactactgtaccacaagtggattggtaacccagctcctgagagagctgactggtgaggatgtgttggtcaggtagccacctgtatagaaatggtgacatcactggcatatactcatcatgggcgacaatatcttgctcaagaaggagtaattgaccaaatttctaatataattgttggggcagattcagaccctttctctagcttctatctgccaggattcgtgaagttttttggaaacctggctgtcatggatagtcctcaacagatctgtgagcgttatcctatctttgtggaaaaagtctttgaaatgatagaaagtcaggaccccactatgattggtgtagctgtagacacagttggaatcttgggatccaatgttgaaggaaaacaggttttacagaaaacaggttggtatgacttggccctgttcagggatatcttaatctttgacaggggttcaatatgtaagttcatttgctggtgggttaactacattgtagaaactattttatgggtggcagtcttgttaaccatgaccttgtactcatgtctgaaaatctaataattattacggaaaacctttttttttttttttttgacttttcactggtttaggttttcattggtttaggtttctaccaatcgatttcaaccaaacattgtttcctgtttcccctctatgatgtcttctttgactagatttcatggtacaaagaccacgggctagagtcagaaaggtctggattcatgtccttgggttttctattctttaggaactcgctttgaacgcttgcttatgagaataggacatcaatcaaagaatgccccagtggagctaaaaattagatgtttggatgcaatttcatctcttctgtacttaccacctgagcagcagactgatgaccttctgaggatgacagaatcctggttttcttctttatctcgggatccactggagctcttccgtggcattagtagtcagcccttccctgaactacactgtgctgccttaaaagtgtttacggccattgcaaaccaaccctgggctcagaaacttatgtttaacagtccaggttttgtagaatatgtggtggaccggtctgtggagcatgacaaagcttcaaaggatgccaaatatgaactagtgaaagcacttgccaattccaagacaattgcagaaatctttgggaacccaaattatttgaggctcagaacttacctgagtgaagggccatactatgtgaaacctgtttccacgacagcagtagaaggagccgaatgatttcttctagagctcatgtagaggaccacgttttgaccaaaacttctcctaaggcatttgactccatctatatttcacaaaagagacttcctttccccaagaattatcatggaatgtcagatgttactttgttaccaacactgttatatttctacattgaaatgcaaagtggaactaggagtttggaatgcattaagagcagacaagcttggtcataatagatccagtgtttttcagattcctttcactgccttaatctttgcaacagggtggaagtttttttcttccctcaaaattttcatggacatgcaatcttatctaaaagcctgcttcagggctgggcgcggtggctaacacctataattcccagcactttgggaggccaagatgggcaaatcacttgagtctaggagttcaagaccagcctggccaatatggcaaaaccctgtctctactaaaaatataaaatcagccaggcatggtggcgcacacctataatctcagctactcaggaggctgaggcacgagaatcgcttgagcctgggaggcagaggttgcagtgagctgagatcttgccactgcacaccagcctgggcaacacagcaagactctgtctcaaaaataaatgaataaaataaaaacctgccaccaaattatttctggattctcttcactatctttttttttctttttggtcctttttccatttctgattccactttcaaagtcttggatatattctttgaaaaatgagtagtatggaatattaagattatgttccttatactcagaatactttttatgagctctcttgtttttttgttactattattcctttgaaaaaaagacaaaatatctaaaaaatgtttatagtgttcatgtaattttttttgctgtttaccaatgaactttgccctgttgtggttttgggggatcagaaggattcctaaactgtcatttcatttattggtaggtcatgattgctgagggttttgctttggatttttcatacctataaagtcaatcttgagttgatcagagaaagggaaacttactcctaataaacagactcagaacagaagggacatatgcataaatcaggataccatctcattaatttacaaaggataatctttcttttcattgacaacacctacacccacctgttttccagtgttcttctctctaaacagcaaagccaaagcactctgcacaccaaatcacctgttcagaggtttatgcatgagcatatttcttttaggccgtggtgaagttgataaaccacccctgctttgtaacaaaattattttaaagtgactggaattatctagtccccagattgatcatctcccctggcaacgtgactctgttttttgtgtgtgtttccatgctgactagtcccctactgttaatatcactactaattaggctataaccaggtctttcctggcctgagaaatattctcttaaaatgacctttgttttaatctcattcatgatgttgattttttttcaatgtggtgcaatatatacaataaaatttgtcataactattttaagtgtacagttcagtatattacatatgttcataagttgtacaaccatcaccaccatccatcttcagaattattttcatcttatacaattgaaactgtattcattaaacaataactgtctattccctcttttccccagcctctggcaaccaccattctgcttcatgacattgattttattcacttaacatcagattttggggggatgccctctctcctatgtatggtctacacattctgattttttttttagattgaataaaatttgtaaatcattattttcatttcataagtaaaggaaggaaacacctgcatcttgaagaactagtaggaggcaatcaagtgaagaatacagtggagtagcaaagcaagacagcaggtacacatgaaaacaagagaacatgtttgagaaactacaagtaattcaatatgaccaacgcctaggatttaaagggaaatttttgcaaaattctttatcattattactaataatagctaccatttcttagcattgattttatgttaggcacttggcatgcatttcttactttatcatcataatagccataaaagttacgtatcatttcaca

SEQ ID NO: 393 - DNA, 5080 bp, Homo sapiens
ggaaaggaggaagaaggagattgtgatggagaaagggggtctgtgaaacgtcaggcacagcacaaaggctttgccacgtaattacaggctcctattaagtcgagatctgccctcccaggggtctccaattttcttgtattccctacaaagcctcctctgcatgccagtttgtgccttttgaagtgccagagagcttcttgatccaactgagaaggaaaaaggagcccagcaagaagagggggagagagagaaggggaaaggggggaacccaccagcaccctccgtcggactcttgaagccttttttttttaattcttaatttttttttttactctttacaaaaagtaaagtgagaatcctgctctctaatacatctgcaagacatcaccctctcctcctgaaactttagtcactcctgagaatccacaggagtgcagagaggggggaacacgttttcttgaagatgttttaaagctggaacaagccttcttctgttggtgcttgaactcttgcctgggaataacttttttaacctttaaaaaaaccattcactttgattcttctctcccaccccttcttctctcttcttctgtttgcctaactcccccgccctgctggcctccgctttcctctctcccccttgttattatttttagtctgtgcgtgtggacacttttggagagttggaagggatttttttctcctgacttgaacatagggtgactttttaatattgtattttactgtggattatctctttggaccgcgccggacttggcctcaggaaatcaaccaatgctgcggaaggcggctggtgcacaacgctctgctctacagaagggggtcccccaccctcttttccaattttttttttttggccttcctctccttccctccctcttcctccctctctctctctctctctccactacccccctctttcttccccactcggctcctctcccccctcgcgcccacagcgtttggtgttgattcgagcgggaagaggggggtgggtgggatcggtgggggagaccatgacctccagctacgggcacgttctggagcggcaaccggcgctgggcggccgcttggacagcccgggcaacctcgacaccctgcaggcgaaaaagaacttctccgtcagtcacctgctagacctggaggaagccggggacatggtggcggcacaggcggatgagaacgtgggcgaggctggccggagcctgctggagtcgccgggactcaccagcggcagcgacaccccgcagcaggacaatgaccagctgaactcagaagaaaaaaagaagagaaagcagcgaaggaataggacaaccttcaatagcagccagctgcaggctttggagcgtgtctttgagcggacacactatcctgatgcttttgtgcgagaagaccttgcccgccgggtgaacctcaccgaggcgagagtgcaggtgtggtttcagaaccgaagagccaagttccgcaggaatgagagagccatgctagccaataaaaacgcttccctcctcaaatcctactcaggagacgtgactgctgtggagcagcccatcgtacctcgtcctgctccgagacccaccgattatctctcctgggggacagcgtctccgtacagatcctcgtccctcccaagatgttgtttacacgaggggcttcataacggattctaacggaagacactgaaaagcgccatggctacttattctgccacatgtgccaacaatagccctgcacagggcatcaacatggccaacagcattgccaacctgagactgaaggccaaggaatatagtttacagaggaaccaggtgccaacagtcaactgaggaaaaaaaataattaaacaggcctaagaagaaatcaaaaaccataagacacctatcctgctctgttatttcttcatctgctggggggaaaaagtaaattacaaacaaacaaacaaagcagaactaaaatattgggaccatggcagagaaaagcaggagaggagcaaaatgaaaattagttaacaaatgttcctcctccctctgggataccaccaccacttgtttctgtgtgtgtttattttgtttttctttcattcatgctttgcttaatgtactccaggcttcttcagataggttcagcccacccacccccatgattgtatgaagttttaaaaaaaactacagcagccaaagaaactatatatatatatatatatatatatatccagaatgattgcctctactgtcctcattgacttgtttgaaccttagtgccttaccctgtcctcttcccagttctctttatagaagctctaggagctttcgaaaagccaaagtctttctgaagaatctgtgctggacagacataattccctttctcattgtctccatctttgttggtcatggtaaggtttttccatcagcctctgaaaaaatagttgtgcacaacatctgctcactggactgtctgatccaatgtaattggctgcgtctggctaattctaagcactaaagtctacatctaagctatagatttaagcttgaagctacagattatatcactatcaccaccacccctcaccctatgcaatcaatcaatcaatcatcttaagttaaagatatttgttgtctttgaatgatttgctgtcacagactatttggtagaagaaatatttttcacctgagagaggaagagaaatttctctagtaacacaaagagtgagttctaaaaggcatgcccacatctctttcgtgccttaaggatagtgagatgcacacttatatatatactgtatatatttatatatttatatatatatttcatatatatatataatattgcaagcttaagtttgcaatttcccaaacaatacaaaaagcaaattacacaccctcaccactgttcttatctctatagtgatgaaacattaattagggatcttgctgcttttctttttctacacgaagttttcattaaagccacagaataattgatagggcagctgtttgagaacaggtcccattttcacattagggctttaaatgaattagaaactatttgaggctataaaaatgtccttgagtttggagcctgagctctggtgaaatgctgatacatctgatctatcatgggaattgcagttagagagagtaaggaataccatttagtcatctatccgttcttcacttagcaggaatatgaaagaaaggcacatgtttaagaggaatacctaaaggtttttctaaattccaacatttaaaaggcaattgtgggctatttttattttttaatattttgaaataaagtttagtgtctagggctgggagccaggactgatcttccatttctttttctttgttcccagccatgcttttgtaacttgccaggtggacttgaccaactacattaccatgctgtgcctcagtttacccatttgtaaaatgggattaataatacttacctacctcacaggggtgttgtgaggctctattcatttgctcctttattctttcctgtattctctgtatgtccagcactttgtagccatgggaggaaagggactataaaagtgtacaatgttaatggaatgatacggtacctgaaagccttgttttctagtaagaaaatgctaccttgctgtacatacttataaccttgtatttggaaatgagaaataggtttatattttcagatctctcaaaaatcacatcatttgaccaaagaataatttaagacacatagaacagatttttttaatttatattttcatcctgaccagcttagttctaataatttttagttgtgagtgattaaaaaactttggatcaattttggtcaaacatgccaactttgtagtctgagtgacaggcaaggatttttgggtttaagatgcacttttagcacacatttgtatttcccttggcatatcagattgagctaatggtgatgttatttcaatctaacagccaccaatctgaaattgtatttcaaatgttgattctgtagttctttaaataataatgaagctcatcttatacattttgctttcaccaattgattccttcttcttttagcccactattaaaacatttcttactgaatggttcatgtaggcttgctgaacagcacgcattacttgcttcctgaagagttcccccattcatccatttgtcccattagttgctgtggattatcaagttttgaaggaactgtacatcccaacagactgaaacattctaagtgaaatgagtataatccaagtaactggtgaactttggaggtttggagcttgaagagaatggctaagaagatttgaattatagggagggaacagaaatcatacatgaaaaggttttactgagaaggggaaaaccttagatagagggacatgtgaaacaaaatcatttgaaattttgattcagacatccatttccagtggcaaacagcaaagcctgaacccataaacccaaatgataggtgaagttgggtggttttatccaatgtctcaagcaagcaatgtctgggaatatcatagagtaacaagtgctggtcagccaaagaaacattcactgctggtgaaccaataccataagcatgtattatctaagcacttgatcaagaaatatacatgttgtacaagctctcaattttgttcatttattatcaaatttttaaaatacaagtttggtatgtgatttggaaaagatgccttctggatcttaagccagttgtcagtggaggtcctcagggctgcaaatgtcaagacataaccctgttcctcaccatcatgataccagatacaggtgaatacataggaactatctgcctgtgtcctcaatctcccttcaaacaagatgctgatttgtagggtacttggcaggttaaattaaaccagaagaggtgacttaataaaaaagggaatgacatttagggtataaagatctcataagaaatgtaatatgtaaattatatcttgctttatgttgtaaaatatacattgtttgcgctagaatagaaatgatttcttttcaataaaaagaaagaaggactctaccatgtcttttgttatata

SEQ ID NO: 394 - DNA, 2098 bp, Homo sapiens
attataaatctagagactccaggattttaacgttctgctggactgagctggttgcctcatgttattatgcaggcaactcactttatcccaatttcttgatacttttccttctggaggtcctatttctctaacatcttccagaaaagtcttaaagctgccttaaccttttttccagtccacctcttaaattttttcctcctcttcctctatactaacatgagtgtggatccagcttgtccccaaagcttgccttgctttgaagcatccgactgtaaagaatcttcacctatgcctgtgatttgtgggcctgaagaaaactatccatccttgcaaatgtcttctgctgagatgcctcacacggagactgtctctcctcttccttcctccatggatctgcttattcaggacagccctgattcttccaccagtcccaaaggcaaacaacccacttctgcagagaagagtgtcgcaaaaaaggaagacaaggtcccggtcaagaaacagaagaccagaactgtgttctcttccacccagctgtgtgtactcaatgatagatttcagagacagaaatacctcagcctccagcagatgcaagaactctccaacatcctgaacctcagctacaaacaggtgaagacctggttccagaaccagagaatgaaatctaagaggtggcagaaaaacaactggccgaagaatagcaatggtgtgacgcagaaggcctcagcacctacctaccccagcctttactcttcctaccaccagggatgcctggtgaacccgactgggaaccttccaatgtggagcaaccagacctggaacaattcaacctggagcaaccagacccagaacatccagtcctggagcaaccactcctggaacactcagacctggtgcacccaatcctggaacaatcaggcctggaacagtcccttctataactgtggagaggaatctctgcagtcctgcatgcagttccagccaaattctcctgccagtgacttggaggctgccttggaagctgctggggaaggccttaatgtaatacagcagaccactaggtattttagtactccacaaaccatggatttattcctaaactactccatgaacatgcaacctgaagacgtgtgaagatgagtgaaactgatattactcaatttcagtctggacactggctgaatccttcctctcccctcctcccatccctcataggatttttcttgtttggaaaccacgtgttctggtttccatgatgcccatccagtcaatctcatggagggtggagtatggttggagcctaatcagcgaggtttctttttttttttttttcctattggatcttcctggagaaaatactttttttttttttttttttgaaacggagtcttgctctgtcgcccaggctggagtgcagtggcgcggtcttggctcactgcaagctccgtctcccgggttcacgccattctcctgcctcagcctcccgagcagctgggactacaggcgcccgccacctcgcccggctaatattttgtatttttagtagagacggggtttcactgtgttagccaggatggtctcgatctcctgaccttgtgatccacccgcctcggcctccctaacagctgggatttacaggcgtgagccaccgcgccctgcctagaaaagacattttaataaccttggctgccgtctctggctatagataagtagatctaatactagtttggatatctttagggtttagaatctaacctcaagaataagaaatacaagtacaaattggtgatgaagatgtattcgtattgtttgggattgggaggctttgcttattttttaaaaactattgaggtaaagggttaagctgtaacatacttaattgatttcttaccgtttttggctctgttttgctatatcccctaatttgttggttgtgctaatctttgtagaaagaggtctcgtatttgctgcatcgtaatgacatgagtactgctttagttggtttaagttcaaatgaatgaaacaactatttttcctttagttgattttaccctgatttcaccgagtgtttcaatgagtaaatatacagcttaaacat

SEQ ID NO: 395 - DNA, 3079 bp, Homo sapiens
cagggtttattgttatgtaagttcttgttcagcttcctttgttttctttcacttctgagaatttaactttcgtttctcactcagctcctgtggggaaactcatttgtggagaccagccctctggcttggtgagtgaatctggtttacaccggctcctgccctgccttcactcttctcccctgattcaagactcctctgctttggactgaagcactgcaggagtttgtgaccaagaacttcaagagtcaagacagaaggaagccaagggagcagtgcaatggatttctcagtaaaggtagacatagagaaggaggtgacctgccccatctgcctggagctcctgacagaacctctgagcctagattgtggccacagcttctgccaagcctgcatcactgcaaagatcaaggagtcagtgatcatctcaagaggggaaagcagctgtcctgtgtgtcagaccagattccagcctgggaacctccgacctaatcggcatctggccaacatagttgagagagtcaaagaggtcaagatgagcccacaggaggggcagaagagagatgtctgtgagcaccatggaaaaaaactccagatcttctgtaaggaggatggaaaagtcatttgctgggtttgtgaactgtctcaggaacaccaaggtcaccaaacattccgcataaacgaggtggtcaaggaatgtcaggtaggctccaagatagaggaagagagagcagagagcagaagatggaaaagctgcaggtagccctgcagaggctgataaaggaggatcaagaggctgagaagctggaagatgacatcagacaagagagaaccgcctggaagtgaaggcatggagggaaatatctgtgaaaacgcttcctgctggagtaattatatccagatcgagagacagaagattctgaaagggttcaatgaaatgagagtcatcttggacaatgaggagcagagagagctgcaaaagctggaggaaggtgaggtgaatgtgctggataacctggcagcagctacagaccagctggtccagcagaggcaggatgccagcacgctcatctcagatctccagcggaggttgaggggatcgtcagtagagatgctgcaggatgtgattgacgtcatgaaaaggagtgaaagctggacattgaagaagccaaaatctgtttccaagaaactaaagagtgtattccgagtaccagatctgagtgggatgctgcaagttcttaaagagctgacagatgtccagtactactgggtggacgtgatgctgaatccaggcagtgccacttcgaatgttgctatttctgtggatcagagacaagtgaaaactgtacgcacctgcacatttaagaattcaaatccatgtgatttttctgcttttggtgtcttcggctgccaatatttctcttcggggaaatattactgggaagtagatgtgtctggaaagattgcctggatcctgggcgtacacagtaaaataagtagtctgaataaaaggaagagctctgggtttgcttttgatccaagtgtaaattattcaaaagtttactccagatatagacctcaatatggctactgggttataggattacagaatacatgtgaatataatgcttttgaggactcctcctcttctgatcccaaggttttgactctctttatggctgtgcctccctgtcgtattggggttttcctagactatgaggcaggcattgtctcatttttcaatgtcacaaaccacggagcactcatctacaagttctctggatgtcgcttttctcgacctgcttatccgtatttcaatccttggaactgcctagtccccatgactgtgtgcccaccgagctcctgagtgttctcattcctttacccacttctgcatagtagcccttgtgctgagactcagattctgcacctgagttcatctctactgagaccatctcttcctttctttccccttcttttacttagaatgtctttgtattcatttgctagggcttccatagcaaagcatcatagattgctgatttaaactgtaattgtattgccgtactgtgggctggaaatcccaaatctagattccagcagagttggttctttctgaggtctgcaaggaagggctctgttccatgcctctctccttggcttgtagaaggcatcttgtccctatgactcttcacattgtctttatgtacatctctgtgcccaagttttccctttttattaagacaccagtcatactggctcagggcccaccgctaatgccttaatgaaatcattttaacattatattctctacaaagaccttatttccaaataagataatatttggaggtattgggaataaaaactccaacatataaatttgaggaaggcacgatttcactcataacaatcttaccctttcttgcaagagatgcttgtacattattttcctaataccttggtttcactagtagtaaacattattattttttttatatttgcaaaggaaacatatctaatccttcctatagaaagaacagtattgctgtaattccttttcttttcttcctcatttcctctgccccttaaaagattgaagaaagagaaacttgtcaactcatatccacgttatctagcaaagtacataagaatctatcactaagtaatgtatccttcagaatgtgttggtttaccagtgacaccccatattcatcacaaaattaaagcaagaagtccatagtaatttatttgctaatagtggatttttaatgctcagagtttctgaggtcaaattttatcttttcacttacaagctctatgatcttaaataatttacttaatgtattttggtgtattttcctcaaattaatattggtgttcaagactatatctaattcctctgatcactttgagaaacaaacttttattaaatgtaaggcacttttctatgaattttaaatataaaaataaatattgttctgattattactgaaaagatgtcagccatttcaatgtcttgggaaacaattttttgtttttgttctgttttctttttgcttcaataaaacaatagctggctcta

SEQ ID NO: 396 - DNA, 1849 bp, Homo sapiens
gcaggcaactcactttatcccaatttcttgatacttttccttctggaggtcctatttctctaacatcttccagaaaagtcttaaagctgccttaaccttttttccagtccacctcttaaattttttcctcctcttcctctatactaacatgagtgtggatccagcttgtccccaaagcttgccttgctttgaagaatccgactgtaaagaatcttcacctatgcctgtgatttgtgggcctgaagaaaactatccatccttgcaaatgtcttctgctgagatgcctcacacagagactgtctctcctcttccttcctccatggatctgcttattcaggacagccctgattcttccaccagtcccaaaggcaaacaacccacttctgcagagaatagtgtcgcaaaaaaggaagacaaggtcccggtcaagaaacagaagaccagaactgtgttctcttccacccagctgtgtgtactcaatgatagatttcagagacagaaatacctcagcctccagcagatgcaagaactctccaacatcctgaacctcagctacaaacaggtgaagacctggttccagaaccagagaatgaaatctaagaggtggcagaaaaacaactggccgaagaatagcaatggtgtgacgcagaaggcctcagcacctacctaccccagcctctactcttcctaccaccagggatgcctggtgaacccgactgggaaccttccaatgtggagcaaccagacctggaacaattcaacctggagcaaccagacccagaacatccagtcctggagcaaccactcctggaacactcagacctggtgcacccaatcctggaacaatcaggcctggaacagtcccttctataactgtggagaggaatctctgcagtcctgcatgcacttccagccaaattctcctgccagtgacttggaggctgccttggaagctgctggggaaggccttaatgtaatacagcagaccactaggtattttagtactccacaaaccatggatttattcctaaactactccatgaacatgcaacctgaagacgtgtgaagatgagtgaaactgatattactcaatttcagtctggacactggctgaatccttcctctcccctcctcccatccttcataggatttttcttgtttggaaaccacgtgttctggtttccatgatgcccatccagtcaatctcatggagggtggagtatggttggagcctaatcagcgaggtttctttttttttttttttttcctattggatcttcctggagaaaatacttttttttttttttttttttgagacggagtcttgctctgtcgcccaggctggagtgcagtggcgcggtcttggctcactgcaagctccgtctgccgggttcacgccattctcctgcctcagcctcccgagcagctgggactacaggcgcccgccacctcgcccggctaatattttgtatttttagtagagacggggtttcactgtgttagccaggatggtctcgatctcctgaccttgtgatccgcccgcctcggcctccctaacagctgggatttacaggcgtgagccaccgcgccctgcctagaaaagacattttaataaccttggctgccgtctctggctatagataagtagatctaatacgagtttggatatctttagggtttagaatctaacctcaagaataagaaatacaagtacaaattggtgatgaagatgtattcgtattgtttgggattgggaggctttgcttattttttaaaaactattgaggtaaagggttaagctgtaacatacttaattgatttcttaccgtttttggctctgttttgctat

SEQ ID NO: 397 - DNA, 8150 bp, Homo sapiens
gaggcaggggtgagaccggcggccacccgtgagccctccgcacccgcaccatgcagaagagcgtgcgctacaacgaggggcacgccctgtacctggcctttctggcgcgcaaggagggcaccaagcgcggcttcctgagtaagaagacggccgaggcgagccgctggcacgagaagtggttcgccctctaccagaatgtgctcttctacttcgagggcgagcagagctgccgcccggcgggcatgtacctcctggagggctgcagctgcgaacgaacgcccgcgccacccagggccggcgccgggcagggaggcgtccgagacgcgctggacaagcagtattactttactgttctttttggccatgaaggtcagaagccactggagctgcgctgtgaggaggagcaggatggtaaagagtggatggaggccattcaccaagccagttatgcagacattttgattgagagggaagtattaatgcagaagtacattcatctagttcagatcgtagagacagaaaaaattgcagctaaccaactccgacatcaacttgaagatcaagacacagaaatcgaaaggcttaaatcagagattattgctcttaataaaaccaaagaacgaatgcgaccttaccaaagcaaccaagaagacgaagatccagacatcaagaagattaaaaaggttcagagcttcatgcgaggatggttgtgcagaaggaaatggaagaccatcgtgcaggattacatttgttctcctcatgctgaaagtatgaggaagagaaaccagattgtgttcaccatggtggaggcagagtcagagtacgttcaccagctctacatcctggtcaatggctttctccggcccctgcgtatggccgccagctccaagaagccccccatcagccacgacgacgtcagcagtatttttcttaacagtgaaacaatcatgtttcttcatgaaatatttcatcaaggactaaaggcaaggatagcaaactggcccactttaattttagctgatctgtttgatattttgctccccatgctgaacatttatcaagaatttgtgcgtaatcaccagtacagcctgcaagttctcgccaattgtaagcaaaacagagattttgacaaactcttaaaacagtatgaagccaatccagcctgtgaggggaggatgctggagacattcttgacctatcccatgtttcagatccccagatatatcatcacactccatgagctccttgctcacacaccccatgagcatgtggaaaggaaaagcctggagtttgccaaatcaaagctagaggaactatccagagtaatgcacgatgaagtcagcgacactgaaaacataaggaaaaaccttgccatcgaaagaatgatcgtggagggctgtgacatcttgctggacaccagccaaacgttcatccgccaaggttctcttattcaagtaccttccgttgagagggggaaacttagtaaagttcgcctgggttcgttgtctttgaaaaaggaaggagagagacaatgcttcttatttacaaaacactttttaatatgtacaagaagttcaggagggaagcttcatctgctcaagacaggtggggttctgtctctaatagactgcacattgattgaggagccagatgcaagcgatgatgactctaaaggttctgggcaagtgtttgggcacctggattttaaaatagtggtggagcctcctgacgctgccgccttcactgttgtcttgttagcaccctcacgccaggagaaagctgcctggatgagtgacatcagtcagtgtgtggacaatatacgatgtaatggtttaatgactatagtgtttgaagagaattccaaagtcactgtgccacatatgattaagtctgatgcccgtcttcataaagacgacactgacatttgcttcagtaaaacactcaactcctgcaaagtgccccagatccgttatgccagcgtggagcgcctcttggaacgactgacagacttgcggtttcttagtattgatttcctcaacacctttctgcacacctatcgtattttcactactgccgctgtggtgctggggaaactctccgacatatacaagaggcctttcacctccatccctgtcaggtcattggaattgttttttgctaccagccagaacaacagaggtgaacatttggtggatggcaaatccccacgtctgtgtcgcaaattctcttccccgccaccactggctgtgtccagaacatcttccccagtgagggccagaaagctgtctttgacttctcccttgaactcaaagataggagcattggacctgacaacttccagcagtcccaccaccaccacccagagtcccgctgcgtctccaccaccacacactggtcagataccactggatctcagcagaggcctctcttctccagagcaaagcccgggaacggtagaagagaatgtcgataacccacgcgtggatctgtgtaacaagctaaaacgaagtattcaaaaagcagtcctagagtctgcaccagcggaccgagcaggagtggaaagctcccctgcagcggacaccacagaactttcaccttgcagatccccctcaactcctcggcacctccgctatcgacagcctggaggacagacggcggacaatgcccactgctctgtttcaccggcttctgcttttgcaatagccacagctgcagcaggacatgggagtccaccaggctttaacaacaccgagagaacatgtgataaagagtttattatacggagaacggctaccaatcgagttctgaacgtcctccgtcactgggtctcaaagcacgcacaggatttcgaactcaacaatgaactaaagatgaatgtcctaaatttgctagaagaagttttgcgagacccagaccttcttccccaagaaaggaaagccgccgcgaatatcctcagggccctttcacaagatgaccaagatgacatccacctaaaattagaggatataattcaaatgactgactgcatgaaggccgaatgctttgagtccttgtcggccatggagctggcagaacagatcaccctcctggaccatgtcattttcagaagcattccctacgaggagtttcttgggcaggggtggatgaagctggataaaaacgaaagaactccttacattatgaaaaccagccaacacttcaatgacatgagtaacctggtggcctcccagataatgaactatgctgatgtcagctcccgtgccaacgccatcgagaaatgggtggcagtggcggacatctgccgatgcctgcacaactacaacggcgtgctggagatcacctcggccttaaacagaagtgccatctacaggctgaagaaaacctgggccaaggtctctaagcagacaaaagctctaatggacaaacttcaaaagactgtttcctctgaaggaagatttaaaaatcttagagaaacccttaaaaattgtaaccctcctgcagttccttatcttgggatgtacttgacagacctggcatttattgaagaaggaacaccaaactttactgaggaaggccttgtcaatttctccaaaatgagaatgatatcacacatcatcagagagatacgccagttccagcagacttcctacagaatagatcatcagccaaaggtcgcacagtacttgcttgacaaagaccttatcatagatgaagatacgctatatgagctgtcactaaaaattgaacctcgactccctgcttgaagatctggccttgcccctgagtccacgggatgttcatggaaagcaggacagacagaattgtgtatgccttgcctatcacggtacagcacgaagccaggctcctttctccaccaaagaagatggaaccagactggaattctgtctccagagagaaacccagctgtttgggtcaaagacagatgcttcagacttgggtgggaaggtgaaagatggctatttagaaagctggtggcacgttttacataagggaatgtcagatgggagatgctagttgccattttaacaaagcaggtaaatcggtaaattttaaactctgtccatgttctgttagaactcagggacaaggatccatgaaaaagacctgtgatgtttctctggcgctttactggcctgggcacacctaccaatcttctaggatttgactggttccattacatttccttttggtataagcttcacagaaaagctgacacttcctctacagagatggaccaaaacataagcaatttcagtctacagcatgtgcatggttgtcagtgcattctaaatatttctatgtgaggaatggtaccttctgaaactgcctttccagtctttaggcaatgggataggaaagaaagaatgaaacacaaatggatttgtatgtaacatttccttaattaaatgcagtaggctgtgccccagaggattccagacagtggctggctgaggtgggtggggagcttttccttgagactgttggtcctaagaagccagcccttttggagaggcagctgcaaaaaggtgcacgcccatctcaccgacaaaactgtggaacagaaggccaccaagtgctgtggggaatcatgggtttcagtgctgagtgaaaatctatacctaaaaatcatctctgcaccttgctttgtttgttttctttccccactcatagtactgcaggaatctattctcatttacacagacctttttttaggcttactatgaacattggctgtattttttttaaacagtttagtgaaattttcttttcaaaacccacacttccatatgctgttcgtagatctctttctttaaaaactgatgttgagagatctctgagaatattataagtgcatgggaaatgggcccaaccaccgaacagctcttacattacaaaaccaaatgcaagggttagtcctgctacctgaggctggggaagtgaccttccttttcccaagattgtcagttgttgaagaaatagggctatctcattgtttacctccctcttctcttctcagggagactgctgctttaaaagaaggaagagaaaaaatatagttctatttccctgaacctgttgcacctgacattttctcttagcagcatgaaacttattgatgctgacaatgaaaaatggatctgtctggctgctttccctctttccttgcactttaattatgttgctagagctaacagactaataaattccacctgctggctcttaagactcagtgaaagagctagcattggtaatgcaccatagaggtagagaatgtacactttctgcacggtaagtgccatctctgtatgtaactatatagtgaaatatcaactaagtaaaagaaaatataatatttgaagaccattcccaaaatattttcaatagttcatattagccaacagtgtagcactcaacccaaggagggttccttatggatgctttctttttcttttttaaagttgcttgtttgttctctttagtttcaaataagaggttgacgcatcttgatgcatgatgagaagcatgggctgtttggatcctaacaacgcataacttgtgatttatttctcagtgctccagaaactgagggtttgaaataatatgtatcagttgcaccaaacacctcaaggtcttgcagaagaaaagtaaaggttagctttcatggctcaaaagcatagtcctgaagggtgaactaaaaccgggacaaatctgtgagaggaccacacacatactagtttcgggccaaacaacacgtggaaaggtgcatgcattctactctgccttggagttgccagagtccttcagagggaaagggatggttctgtgtgcactttttctggaagttcggactcatttctttgacccaaatgttccagagacactgcagccattcttattaacaaaaaataagacaggagtttccaaatgctccttcccttttggatcgcagcttttcttcaactagtgacaaagcttttgcgcctatttcctgcaggatgttggaactgccccgcactggtcatattaggcactgtcaattgctatgctgacttttagggggtttttgtttgtttgaaaaacagggtctcaccatgttgcccaggctggtctcgaactcctggactcaagcaatcttcctgcctcagcctctcaagcagctgggactgcaggggtgtgccactcactagcctttcgcatttttgtttgagaattacaccactttctggagtctgcagccttcctggagctgcaagagggcaagagagagagctccacctctgagggagtgtctgttgatgacctgcactattcgtgtgccagctgggagaggaatgcacattttaaaatcccttcaatttggtcaaattaaaaatccccaagagcaatttgcagtgttttttctggtcgttaaagtacccatcctcttctgcctacacacaaagcatgcattcccagctgcatctgcctctagtccattatggagacccatttctaagaggagatgggaggtcaacctctaacagccaagtagcgaacatgtatactgtaaaattaacctagaaaatcagaagaaaaatccaatttcatgctttcgaatgaatgcccacattttgtactgtcaacgaaattatcttggagcttttaggggatgccttttcgttattaactgagacatctagttttgctacagggacaaatctcttacctaatccaatatattatttgacagattcaggcatgaagtaaaacgtcgtcacttttccttagtgcttttctgaaggaatttaaagacggaattttaaacggccattgcaatattttcaagtggctctcataccaagtcccattactgtttgttaaatttcagtacgtcttaaagtactacttataaacaaatgaaactcagagaaactgaatcacctggaagagaaaaatccattatggtcccatgtggagtgaataatgatggatcagcaccctttctctcatgttattgtataagacgagacttttgggccagcagcgattgggcagcttttaaattcttaactgaaaagagtaatgcaatacagggattattcccaataaaattaacttttatttaaaagcaagagattttacttagcttttttttttcaaagtttgattttatccccttgaaaaaaaatctcttcactttaaagtataaaggtttttaaaaatccaattgcaaaatgtattatttttacaactatcgaaaaggcataaaagagaacatactatttatggctgaagggtatagccaggctaatgtgcacagagggaatcaataaataaaactctttttcatttcagtaagaaatcagattgtaagtttaatggctccattatagataccaccgtgtaatagaagacttaagtcaatgaaatctaatcagtgtgtcatttctcagcggccattggtgacttaaaattaagatgaggcagagccaaaatggaaaacagtcattttgttgtaggtataaacacatgaacgattcagaaaattattcatctcagctgccatgcagcatgacattaacattaggattgatagcactagtctgatctgctcaaggaaaataatagttctattatacttaatgatgttggtttttacacagctcatttcatttttcactagaaagccagttatgaaagagagctggcctaggcatcccggccctgagtcctaggcccagtctccaactggaaaaccttaggctggtgtttacacatccctgagcctcagtttcctcatctgcaaaacggtgtgaatagtaatccctgtgctgcttatctcacagggctattgtgaggaccaaatggattagactgtaaactgcaaagtgctgtccgcacatgaggtcatctgattactgtcctcagatctcttttgtagaggatttcaatgtatttctttatcatttgagtgtgtgtgtgatggacgaatatgtgtgtgagtttgagaagcatatcgttcgtgtccagttactttgcaaatttgtggacatttgtgattggacagaggggtttgtgctgtggcctaacacttgccaagtgaggtgtaggttatgcctatatgcaaattaaacttcacctttcttgaa

SEQ ID NO: 398 - DNA, 1599 bp, Homo sapiens
aacatttccaaatcttggcattcttatccacaaagtgaagataataattgtcaattcacaggtgattatgatttaaagagattacttttgaagagttcctaacacattcagtcaacatttaatgatgcttcaggcactgtgttcattgctagtgagcgtatgacacacacagccatacggtcacagagctttcaatgaaaagtaacataattgctcatttcaccaggcccccggcttggggcgccttccttccccatggcgggacacctggcttcggatttcgccttctcgccccctccaggcggtgggggtgatgggccatggggggcggagccgggctgggttgatcctctgacctggctaagcttccaaggccctcctggagggccaggaatcgggccgggggttgggccaggctctgaggtgtgggggattcccccttgccccccgccgtatgagttatgtggggggatggcgtactgtgggcctcaggttggagtggggctagtgccccaaggcggcttggagacctctcagcctgagagcgaagcaggagtcggggtggagagcaactccaatggggcctccccggaaccctgcaccgtcccccctggtgccgtgaagctggagaaggagaagctagagcaaaacccggagaagtcccaggacatcaaagctctgcagaaagaactcgagcaatttgccaagctcctgaagcagaagaggatcaccctgggatatacacaggccgatgtggggctcatcctgggggttctatttgggaaggtgttcagccaaaagaccatctgccgctttgaggctctgcagcttagcttcaagaacatgtgtaagctgcggcccttgctgcagaagtgggtggaggaagctgacaacaatgaaaatcttcaggagatatgcaaagcagaaaccctcatgcaggcccgaaagagaaagcgaaccagtatcgagaaccgagtgagaggcaacctggagaatttgttcctgcagtgcccgaaacccacactgcagatcagccacatcgcccagcagcttgggctcgagaaggatgtggtccgagtgtggttctgtaaccggcgccagaagggcaagcgatcaagcagcgactatgcacaacgagaggattttgaggctgctgggtctcctttctcagggggaccagtgtcctttcctccggccccagggccccattttggtaccccaggctatgggagccctcacttcactgcactgtactcctcagtccctttccctgagggggaagtctttcccccagtctccgtcatcactctgggctctcccatgcattcaaactgaggtgcctgcccttctaggaatggggaacaggggaggggaggagctagggaaagagaacctggagtttgtggcagggcttttgggattaagttcttcattcactaaggaaggaattgggaacactaagggtgggggcaggggagtttggggcaactggttggagggaaggtgaagttcaatgatgctcttgattttaatcccacatcatgtatcacttttttcttaaataaagaagcctgggacacagtaaaaaaaaaaaaaaaa

SEQ ID NO: 399 - DNA, 3286 bp, Homo sapiens
actccgcggtcctggtgccgcgtgcaggtcggtgcgcgcttctcccgaggtggaacgggcggcagtcaagcgccggcgttctctgccgtcaccctttccttgccggccggcacttcggctgcagagttttgcccacgcttcgagacttagggagcagtgcctttcagaatttgcccactcatctggtataactggttctgatggctgggaataaaggaagaggacgtgctgcttatacctttaatattgaggctgttggatttagcaaaggtgaaaagttacctgatgtagtgttgaaaccacccccactatttcctgatacagattataaaccagtgccactgaaaacaggagaaggtgaagaatatatgctggctttgaaacaggagttgagagaaacaatgaaaagaatgccttattttattgaaacacctgaagaaagacaagatattgaaaggtatagtaaaagatacatgaaggtatacaaggaagaatggataccagattggagaagacttccaagagagatgatgccaagaaataaatgtaaaaaagcaggcccaaaacccaaaaaggcaaaagacgcaggcaaaggcacaccactcactaatactgaagatgtgttgaaaaaaatggagggaattggaaaaaagaggtgatggtgaaaaatcagatgaggaaaatgaagagaaagaaggaagcaaagagaaaagtaaagaaggtgatgatgacgatgacgatgatgccgcagaacaggaggaatatgatgaagaagagcaagaagaggaaaatgactacattaattcatactttgaagatggagatgattttggcgcagacagtgatgacaacatggatgaggcaacctattaggcatgaaatttttcaaaaaatatttttatgatgcagcttctgaacatttggacagacttgatttgtattttatttctgataaggaataagtacttgtttctgttgttttggacaaatagttgttaccaaaatattcaaaaccactttgagtttacatactagttaccttaaaaattattccctgacactctgacattccttctaaacacctctgccatctctcttatgtactctcatgggtttttttgtatgatttgaatatgaatgtgcctaaagaatttttgctctcttaatctatgtatacatacttgaacaaatcattcttgcttaactgctgatcttttgtaaaactattgctagtcataatggatttctataacctgaaagttgatataatacagcacgtggagcactttaaaaacaaagaaacttgaaaataattttattttttacctttacatggtgtgttctagactactgcattatgactacataaacctacctgagctcttacaagtacagaattgtgagacagaggttttgtgatggaaaacatacacatagggaaaaataccaaactgagcaatataaatttcacagctcacatcttagccagtacaaagaaactttcacatggggtgaatattataatacttgaatttgagacttaatactgtatatgaattaatcatcccactgtaataactgacatcttcaaatagttgggcttatgaaaaatttgactaagacattttattttatactttatgtaaatgtgaaataagttctggtcatataaatatgtagaatgcatgtgtgtgaactctatgaagtgaagtgtggtggccttttatgtttcagagtactcaagtgtacaattgatttatataaaaatgcaaaatgaactcaggtcattttgaaattaatattaatatttttgttgtttaactttaaagctagctcccctaactttatatattttttgggaaaaaatacctaaaaacctcagcctacaaagactctcagaaatgccaaagattttcaaggaaattcatattatatatttcaaaaatgatttatcaatgttatctaccaaaagaaataattttatttttcccctttggggagatattatcctctaatatgagaatcagatccctagattctatttctacctatactattaaactcaaccttgaacctgagcttggttgtttctgtgccttagtttctccactcgtaaacaatttcctataaaaattgtttaaacaccaaccaaaatttaccatatgtattcattctcttgccttaaagatcacttcttaacttacatttggctctcaccctctaaaaatttgtagtttggagagtaactgaaagcacaattttaagaaacatgttttcctcacaaaatatattgtaatctgattttcctatcttgtattcatgcagaaaattggagaaaatgtgtattgtcttgtgccattctgcaatatgaatttctcaggaaaaagatgtttcaatggcaatactttcttaaataattcaagatgggtgtgaggacctatcttattagtttagtgctgtgttaaccatttgtgaattacttcttgtttaaaggaagttgtcaaaaaattttaagattctaaatggaatacacgaataaagtaagccttagaatagaaacctcacaaaaagttgtcatttgcggttgataattaacataggtgttttattctctcaactccttagtaccagagccaaatacaatttagttttcagaaatcttatcaatattgttctatttacctacttataaatctgcagataaccacttgaaccaggcaaatacactgaagataaaggttatttctttttttagctttgaatttgtcatgaccattttagtcttgcagatagcagggcagccccttggggcaaggatttactctgggaggtaccgttaagagccttctttccccctttgaaagatccttttacaatgttaaagtatactagttgcaagaacaagcaggatttgcaggttgctttaccagcatgagtctcatttttctggcttaaaatctgggactgtgaaattattccataggaaagtgaatgttattttgcagaattagcctcttacataaaagtatttgttgaagtgtctttaaaattgctatcatgagcaaaactggttgctgtaatgcttgtttttctgtatttatttacacattaaattcttacaaaacaaaatgtgttcgtttgttttatagtaagatgttttattttgaacttatttaaatgtttatttgttagagaaaactaatttgttaatatagatcttaactagtaactattaagcagggatgtttgttccaaatattcttgaataaacaatcaccacaaacaa

SEQ ID NO: 400 - DNA, 2271 bp, Homo sapiens
cactcttaactcttgaagtaaataaataatctttgctggcaggactatgctgaatctccttaggcactctctaattagatgtcctaggtcctcccaattcttagtccttttatacctgtttttctccttctcttattccatttagtttttcaattcatacaaaactgtatccaggccatcacctatcattctatacaacaaatgtttcttctaacatccccacaatatcaccccttaccacaagacctcccttcagcttaatctctcccactctaggttcccacgctgcccctaatcccgcttgaagcagccctgagaaacatcgcccattctctctccataccaccccccaaaaattttcgccaccccaacacttcaacactattttatttttcttattaatataagaaggcaggcatgtcaggcctctgagcccaagccaagccatcgcaacccctgtgacttgcacctatacgcccagatggcctgaagtaactgaagaatcacaaaagaagtgaatatgccctgccccaccttaactgatgacattccaccacaaaagaagtgtaaatggctggtccttgccttaactgatgacattaccttgtgaaagtcctcttcctggctcatcctggctcaaaaagcacccccactgagcaccttgagacccccactcctgcccgccagagaacaaaccccctttgactgtaattttcctttacctacccaaatcctataaaacggccccacccttatctcccttcactgactctcttttcggactcagcccgcctgcacccaggtgaaataaacagctttattgctcacacaaagcctgtttggtggtctcttcacacggacgcacatgaaatttagttgtatccataaggcatatggaggagactaattcctcttccaaagacatgtaccagagtcctggagaggctgagggctggaggtggaagaaaggctctgacaggggtcagaatctgttcaggaaacatagcaaatgcctgatacttttaattagagaaaggtttgaatctccacattcatatatttgcagtccagtgacctttcagtttttttatgcccaaagtgtcaagcatgttaatgttaccattgactgcctccctgaaggtgcagctaccaggggaactgccaggacttcaaagcccacaaccaaaagccagaaaacactaccaagtacaagccccggacactggacccagagcacaccctgggcatctgctctgagatcctctccctggacagagacagctgctccttcagaaacagaggagaccctgaacacaggcaggcctcctgagcttccagccagggccacagccacatggttcagtgcctcccacactctcccagccttggctaccaggagggtggccagaactcagtggttgacagctgacagacagacgtgggcttccatatcgtccgtgccctgggctcagaccatcagtgagaaaaaacctggagggtctctctgggaaactcgttcttccccaccgactactgcagggaccgaggaagccatgaacactacaagccttttggcgcctgctgctgagataatggccacacctggcagcccatcccaggccagccctaccttggggagcattcacccatggcacacagactccgagtccaaccaaggcaacagcccccagatatccacaaacaggtgatctctctgcagagtggccattcactgctggtgaagagccagtcctggtcccaagaccccatcaagtttcaaggtgtcctcagccactcttcaaggtgggagctatggcagctgctcctctcaccctggctattcagaggctcaacccatgcctgatggagctgtgccaattcttccagcaatgcctctgcatgagccagaggagtcccaggacagaggacatgagatactgtcttgaatactattcctggtttctgaagaatgcaacatatatctgtcagagggtgaaaagggtgtcccactcgcacaccttaaagcaaaagtgccttgagaatatctgcaagtctgtgtgaggccttgaaaataacactagggcataacaattacttcaggggatacgccatccaccctggctcttgtcccaagtgggctacatttgaagaattcacccaggctccagctagatcatcagttaatttaaagtggttattcttggaagtagcattttttttccctctcctgtgaatctgtgcaaaacattgaaggtagaagttttcttgtta

SEQ ID NO: 401 - DNA, 1628 bp, Homo sapiens
ccttcgcaagccctcatttcaccaggcccccggcttggggcgccttccttccccatggcgggacacctggcttcggatttcgccttctcgccccctccaggtggtggaggtgatgggccaggggggccggagccgggctgggttgatcctcggacctggctaagcttccaaggccctcctggagggccaggaatcgggccgggggttgggccaggctctgaggtgtgggggattcccccatgccccccgccgtatgagttctgtggggggatggcgtactgtgggccccaggttggagtggggctagtgccccaaggcggcttggagacctctcagcctgagggcgaagcaggagtcggggtggagagcaactccgatggggcctccccggagccctgcaccgtcacccctggtgccgtgaagctggagaaggagaagctggagcaaaacccggaggaggcaatggtagtcctttgttacatgcatgagtcagtgaacagggaatgggtgaatgacatttgtgggtaggttatttctagaagttaggtgggcagcttggaaggcagaggcacttctacagactattccttggggccacacgtaggttcttgaatcccgaatggaaaggggagattgataactggtgtgtttatgttcttacaagtcttctgccttttaaaatccagtcccaggacatcaaagctctgcagaaagaactcgagcaatttgccaagctcctgaagcagaagaggatcaccctgggatatacacaggccgatgtggggctcaccctgggggttctatttgggaaggtattcagccaaacgaccatctgccgctttgaggctctgcagcttagcttcaagaacatgtgtaagctgcggcccttgctgcagaagtgggtggaggaagctgacaacaatgaaaatcttcaggagatatgcaaagcagaaaccctcgtgcaggcccgaaagagaaagcgaaccagtatcgagaaccgagtgagaggcaacctggagaatttgttcctgcagtgcccgaaacccacactgcagcagatcagccacatcgcccagcagcttgggctcgagaaggatgtggtccgagtgtggttctgtaaccggcgccagaagggcaagcgatcaagcagcgactatgcacaacgagaggattttgaggctgctgggtctcctttctcagggggaccagtgtcctttcctctggccccagggccccattttggtaccccaggctatgggagccctcacttcactgcactgtactcctcggtccctttccctgagggggaagcctttccccctgtctccgtcaccactctgggctctcccatgcattcaaactgaggtgcctgcccttctaggaatgggggacagggggaggggaggagctagggaaagaaaacctggagtttgtgccagggtttttgggattaagttcttcattcactaaggaaggaattgggaacacaaagggtgggggcaggggagtttggggcaactggttggagggaaggtgaagttcaatgatgctcttgattttaatcccacatcatgtatcacttttttcttaaataaagaagcctgggacacagtagatagacacactta

SEQ ID NO: 402 - DNA, 2284 bp, Homo sapiens
caaccttcccgaggcgtcctgcccgggaagccagttcctgggttctgggctggctaggttggcagcgaatgaggcttaggcatcactgcctgaggccctcacttagcatgtcgacagccacagacttgtctggcggagtttctcctggtgcccacttaagtagtctcaagtttgttcaaagctggactcctcgacttggaaccaggagcagctggagatttgtcaatttagagctcatttgccacgggagacgctcttggtgtccccagcaccgaaggaggcggcttttggtcacaggctcccgagttctcctagctggggctgcggagctggggggagggaagagaggaaaggggagggggtgcctggagaggcggaggctcgcgcgcctgcgcatccagctccagggaccctaggttttctatgggattcccaatctgcagcagagatttacccgagcgtgttgcggcagcggctgggcttgcaaggcgcgatccaagagggatttaagcagcccagagctccagagaaaaagagagcgagagagaaccacacacagagacggcttaagcgtttacccgaattaaatatatatttttaaaaagaactgttgagttttatcattttcgttaagtgaccgtgcgcagcgctgtaactgcaggatggggaagcagaatagcaaactggcccctgaagtgatggaggacctggtgaagagcacagagtttaatgagcatgaactcaagcagtggtacaaaggatttctcaaggactgtccaagtgggaggctaaatctcgaggaatttcagcagctctatgtgaagttctttccttatggagacgcctccaagtttgcccagcatgccttccgaaccttcgacaagaatggggacggcaccattgacttccgagagttcatctgcgctctgtccatcacctccaggggcagctttgagcagaagctgaactgggccttcaatatgtatgacctggatggtgatggcaagatcacccgagtggagatgctggagatcatcgaggctatctacaaaatggtaggcactgtgatcatgatgaaaatgaatgaggatggcctgacgcctgagcagcgagtagacaagattttcagcaagatggataagaacaaagatgaccagattacactggatgaattcaaagaagctgcaaagagcgacccttccattgtattacttctgcagtgcgacatccagaaatgagctgatgtcaatgctatggactgcacaaaagtctcaatgttccattcagtctgcagctattcacacacacacacacacacacacacacacacacacacacacacacaaatattgcttggactacctataaatggacttgcttcttgtgtttgaaacactcgtgtgcatgagaatgtcatttgctaatgaattttaaaagcatatataaaacaaaacaaacaacctgccacaatgtgatatgtgtaatatcatttcataaaaatccctcttcctccaaagcctgggcagaaatgtgctgcaaagagttatatgacttcttgttcatgttttgctaatgctcgtatctccttgattacataatgttagtagcactgagacccccatggtaatgtaacttaattataagctatgtcactaccctcctgtaaaatactattggacagacacagagggacccttggctcctgtgtctggtccacacaccacagaagcttgtattatcagtgaatataaatgtactacatttgcatgccttttgggtttgccttaattcttacctcatttgcatcctatcgatctggaaagagctgttttggatgaatgcagtataaaatgtaaaaaccctgctaaatgacttattgattaagtatatctatctatatatacatatacacaaagatattatttatcgaaagtaaaaaagatggaagtgtattggtttctgtttgaattttcaaaggcttccaatgtggtggcaataaatgtcccaaataaatttataacaattgattttccccctaattcttattttataattttaaaattgcagcagttgctagcaacaacttactaaatctactcttaaatatacaactttggaatttgaagaattaatgacaacaaaagggaaaaaagcaactttccaacttttcatccaggctcccaaaagagggacaacgaacatggcatgtgaaaagtaaaacagatttgttcattccgaaaaaaaaatgttcattctatgacaataaattttatctcagtgtgac

SEQ ID NO: 403 - DNA, 3310 bp, Homo sapiens
gttccattcccgggggattggagtagcgttggagtcaccgacgccatcccctcccgcctctggcgtgcatggagcatgcgcttccttcctcacttcctctgcaggagggagcgagagtaaagctacgccctggcgcgcagtctccgcgtcacaggaacttcagcacccacagggcggacagcgctcccctctacctggagacttgactcccgcgcgccccaaccctgcttatcccttgaccgtcgagtgtcagagatcctgcagccgcccagtcccggcccctctcccgccccacacccaccctcctggctcttcctgtttttactcctccttttcattcataacaaaagctacagctccaggagcccagcgccgggctgtgacccaagccgagcgtggaagaatggggttcctcgggaccggcacttggattctggtgttagtgctcccgattcaagctttccccaaacctggaggaagccaagacaaatctctacataatagagaattaagtgcagaaagacctttgaatgaacagattgctgaagcagaagaagacaagattaaaaaaacatatcctccagaaaacaagccaggtcagagcaactattcttttgttgataacttgaacctgctaaaggcaataacagaaaaggaaaaaattgagaaagaaagacaatctataagaagctccccacttgataataagttgaatgtggaagatgttgattcaaccaagaatcgaaaactgatcgatgattatgactctactaagagtggattggatcataaatttcaagatgatccagatggtcttcatcaactagacgggactcctttaaccgctgaagacattgtccataaaatcgctgccaggatttatgaagaaaatgacagagccgtgtttgacaagattgtttctaaactacttaatctcggccttatcacagaaagccaagcacatacactggaagatgaagtagcagaggttttacaaaaattaatctcaaaggaagccaacaattatgaggaggatcccaataagcccacaagctggactgagaatcaggctggaaaaataccagagaaagtgactccaatggcagcaattcaagatggtcttgctaagggagaaaacgatgaaacagtatctaacacattaaccttgacaaatggcttggaaaggagaactaaaacctacagtgaagacaactttgaggaactccaatatttcccaaatttctatgcgctactgaaaagtattgattcagaaaaagaagcaaaagagaaagaaacactgattactatcatgaaaacactgattgactttgtgaagatgatggtgaaatatggaacaatatctccagaagaaggtgtttcctaccttgaaaacttggatgaaatgattgctcttcagaccaaaaacaagctagaaaaaaatgctactgacaatataagcaagcttttcccagcaccatcagagaagagtcatgaagaaacagacagtaccaaggaagaagcagctaagatggaaaaggaatatggaagcttgaaggattccacaaaagatgataactccaacccaggaggaaagacagatgaacccaaaggaaaaacagaagcctatttggaagccatcagaaaaaatattgaatggttgaagaaacatgacaaaaagggaaataaagaagattatgacctttcaaagatgagagacttcatcaataaacaagctgatgcttatgtggagaaaggcatccttgacaaggaagaagccgaggccatcaagcgcatttatagcagcctgtaaaaatggcaaaagatccaggagtctttcaactgtttcagaaaacataatatagcttaaaacacttctaattctgtgattaaaattttttgacccaagggttattagaaagtgctgaatttacagtagttaaccttttacaagtggttaaaacatagctttcttcccgtaaaaactatctgaaagtaaagttgtatgtaagctgagattttgtatacagaatccttatttcctcatagacttatattttataatcagaatatgttgctttgaaaaagcctctaatggactgaccttaaaactcatccttcttccactgtctcatccacataagcactccccgaagaattaagggggttctgttttcaaggcatgccaagtactaaagcaccttgcagagcgtgtctattacaagatgtcatttccaccagcagttcccttaggggagctgaaataaattcacattttctcaaagtctcatagctttggaggagccatctgcttttttggctgctctttttagctggctttttattaggctcagtgacataaaaaggatccaggtaaatgggtataggatttgctggatttactaacaatttccccctgttcttaacacttcctattagtgacttttcagacattgagtttacttataaagagagatatttatgtactctctaagaagacaaatgaggtcataaacactgcataaagcaaggcaaaaatgtatgccacatctcagttatctaaactagattagatccaagccaagttttctcaacagagagcaaagggccaggcagtaaggtagaaatagagataaaaatcattccttccttgtgatccaaagctggtcgagcagctttcctggaggaaaaggttaatgaacttcaggtccctgcaactcagcccccaccacaaacacagccctggaaacatacagtggcgcaaggtcctcttgaaatgttaatggttaatgttcccaaaccagagaatgctttgaaaatgtatcattcagtgtaaattaattacatacatatttttctatatatttgtttcaaactgtaaaaataacataatatgtaatttgtgtattagtgagaggtgaagccagctggacttcctgggtcgagtggggccttggagaacttttctgtcttacaagaggattgtaaaatgcacccatcagtgctctgtaaaacacaccaatcagcgctctgtagctagcaataggtttgtaaaatgcacccatcagcactctgtaaaacgcaccaatcagcactctgtaaaatgcaccaatcagcaggattctaaaagtagacaatcacagggaggattgaaaaaaagggcactctgatagggcaaaaacggaacatgggaggggacaaataagggaataaaatctggccaccccagccagcagcagcaacctgttcaggtcgcctgccgctgtggaagctttgtccttttgctcttcataataaaccttgctactgttca

SEQ ID NO: 404 - DNA, 2168 bp, Homo sapiens
ggctacgcagcttgctcctggcacgggcaccttgaatctcctcctcacacagatggagaccatgcttgatttcctgaacttgtagtaagaagaaggaaaacacagcacgctggagccaacagagttaagaggaagatttatgagtcatggaaccctccatcagatttggaagaaagtagaatgagcgcagaggtgacagacagccactgaggcccatggacaatctccacctcacgcttctctatcaaacttgaagatttattagtaatatgctgcctttggaagatgaaaacaaactagtgccaaggaggcgtattcttcaatatttggaatagacgtgttctcaagacaatggcttcaaaggtctcctgtttgtatgttttgacagttgtgtgctgggccagcgctctctggtacttgagtataactcgccctacttcttcttacactggctccaaaccattcagccacctaacagttgccaggaaaaacttcacctttggcaacataagaactcgacctatcaacccacattcttttgaatttcttatcaacgagcccaataaatgtgagaaaaacattccttttcttgttatcctcatcagcaccactcacaaggaatttgatgcccgtcaggcaatcagagagacgtggggggatgagaacaactttaaggggatcaagatagccaccctgttcctcctgggcaagaatgctgatcctgttctcaatcagatggtggagcaagagagccaaatcttccatgatatcatcgtggaggactttattgactcctaccataaccttaccctcaaaacattaatggggatgagatgggtggccactttttgttcaaaagccaagtatgtcatgaaaacagacagcgacatttttgtaaacatggacaatcttatttataaattactgaaaccctccaccaagccacgaagaaggtattttactggctatgtcattaatggaggaccgattcgggatgtccgcagtaagtggtatatgcccagggatttgtacccagacagtaactacccacctttctgttcggggactggctacatcttttcagccgatgtagctgaactcatttacaagacctcactccacacaaggctgcttcaccttgaagacgtatatgtgggactgtgtcttcgaaagctgggcatacatcctttccagaacagtggcttcaatcactggaaaatggcctacagtttgtgtaggtatcgccgagttatcactgtgcatcagatctctccagaagaaatgcacagaatctggaatgacatgtcaagcaagaaacatctcagatgttaggatttttaccaatgtaaatatgtttcttttctttttttaagaaatgggacctaaggtgttggtattttccaggtgtcgggggaaatgaactggtgaaggggttttgtaaagtttttgcttcctgctataagttcttttcttggattaccaatttatgaatgttagactctggtcatagaaacaataaatgagttagaagggccagatttcattctcagtcccagagcattgctatttatctcaaaaagtgacttccaaacaactcttaggattgacgtaccgtgcatctgagataaaaatttggttctgggaaactgaaactcacagtaatgtgtcatatcatccctgcaaaaattaatacacaaatagaaaccattttcaaaagcaattcagaaaggatgcacagtcaggaagacacactggatgtgattattaatatcgtgtgtgttgttacattatatttttacatatattcccatgtaatgtgtacagtctttgcagttccaccaagaaatgaacttggtacctgcagagtggctgcagttaaatagatgggagtttaaatttgagaatcaaacattctatgtgtttggaagacaactctgcttgctcatccaaggattaaatctggtcagcaggtggaatgtgtataaaatgctacttaacaaagtaaacaaaagattttttttttctttttttttctttcttttttgttttgctctttcagaacaaacattaaatggtgcctccaaggaaactttgccaaatataatctcacctgcttccttccagacagtgtcgctaagtgcatttcacagtttttggatctggcaggc

SEQ ID NO: 405 - DNA, 2784 bp, Homo sapiens
ccgtgcaccgtgtgtgcgcgcggcgttgaaatgccctgcacgtcggggcagcgggacagatcccagggtgcccagggagtctccaagtgcctcactcctcccgccgcaaacatgacagagaactccgacaaagttcccattgccctggtgggacctgatgacgtggaattctgcagccccccggcgtacgctacgctgacggtgaagccctccagccccgcgcggctgctcaaggtgggagccgtggtcctcatttcgggagctgtgctgctgctctttggggccatcggggccttctacttctggaaggggagcgacagtcacattttgaaaccagtgcagtaatcaggtgtctgagccctttaggtcagctaattagtggcaaactttaaaaaagaaatgttttaagtattgaaatttgtctttctaacaaaatgttactcagaaatgcaacacataagacagaaaaagcagagccactctggttagactatggatggacaggagagaacagagtgccacagtgccatcctcacctctaggccatgcccgggagatcccaacagttctaaggacatagatgaaagccacctatgaggtccaacttcattatacactcgtggcaactcacaagatccagagatgagtggtgtggccacctgttttcctgattactggaccgatgctcttctgcagtgccaggtcccttcccctcttccacactccccacacatctcataacaaaatgccctacagcaccatgggcctgccccatagaatcgttcagggagtactaccattttgagctgaaacaaacatgcacattggccttcctctccacacatgctgctctatatcaagcataccctggtcctgtctgcagtcctttccatatacctaataccatataccatatacctgagacactgcatgcctaatcttgaccaaaggatgaaaacaacttgtgaaactgaggtgccactgcagacgtgttcagctgggagcccaattaaccttctgcctcctcaatttccatttatccatcaatagtgctcaacccagatgcataatagaattgagctttagaaaaagaaagacctatgcccaagcgcccttcccacagcttctgatttgatttgtccagggtgaaacccaggcatggtacccagagagtctacccagatgcttctaaagtacagccagcattgcaaattatggagctattggaataggtgtcagaggcaaccaaagtctttactcttaaggtatttttaaggaaatcattgcattaactgattgttgtatgaatgaagtcatcatatataaatgtattattattaaggactatctcatgtatctctgaaacatatggacactacctcatacactgcccttctaaagataagccctgaattgctcaaaaaagaaagcatcactaactcttatgctcactttcagatttacaatgtccattacaccatgagtatcaatgggaaattacaagatgggtcaatggaaatagacgctgggaacaacttggagacctttaaaatgggaagtggagctgaagaagcaattgcagttaatgatttccagaatgtaagtatatttcatgcatttagagaatttaaccaggcaagcctgcgggacttttctaattcaaggaggagcagcgtttctcacacacatccaaatggtaactgttctttatagcagttgtagtgccactaatccactacatgtagcatattctctctgagaaaggaccagactttgtccttcatatttgcaaaagaaaaaaaggcatcacaggaattcgttttgctggaggagagaagtgctacattaaagcgcaagtgaaggctcgtattcctgaggtgggcgccgtgaccaaacagagcatctcctccaaactggaaggcaagatcatgccagtcaaatatgaagaaaattctcttatctgggtggctgtagatcagcctgtgaaggacaacagcttcttgagttctaaggtgttagaactctgcggtgaccttcctattttctggcttaaaccaacctatccaaaagaaatccagagggaaagaagagaagtggtaagaaaaattgttccaactaccacaaaaagaccacacagtggaccacggagcaacccaggcgctggaagactgaataatgaaaccagacccagtgttcaagaggactcacaagccttcaatcctgataatccttatcatcagcaggaaggggaaagcatgacattcgaccctagactggatcacgaaggaatctgttgtatagaatgtaggcggagctacacccactgccagaagatctgtgaacccctggggggctattacccatggccttataattatcaaggctgccgttcggcctgcagagtcatcatgccatgtagctggtgggtggcccgtatcttgggcatggtgtgaaatcacttcatatatcatgtgctgtaaaataagaactagctgaagagacaaccaaagaagcattaaggcaggttgatgctgataggaccacaaaatatttttacactcaacctgagcggttattcttgacactcttaacagaattttttcaattgttttccagaactttagtatatgcaaatgtactgaaagggtagttcaagtctaaaatgccataacccctttattatttgttattttttatttgcattgctttgccataagtcttcccttgcttgtatcttccaaagctattttgaaataaacatgaaaatttacagtttgccaaaaa

SEQ ID NO: 406 - DNA, 1237 bp, Homo sapiens
agttcactcactttcaaagccagctgaaggaaagaggaagtgctagagagagcccccttcagtgtgcttctgacttttacggacttggcttgttagaaggctgaaagatgatggcaggaatgaaaatccagcttgtatgcatgctactcctggctttcagctcctggagtctgtgctcagattcagaagaggaaatgaaagcattagaagcagatttcttgaccaatatgcatacatcaaagattagtaaagcacatgttccctcttggaagatgactctgctaaatgtttgcagtcttgtaaataatttgaacagcccagctgaggaaacaggagaagttcatgaagaggagcttgttgcaagaaggaaacttcctactgctttagatggctttagcttggaagcaatgttgacaatataccagctccacaaaatctgtcacagcagggcttttcaacactgggagttaatccaggaagatattcttgatactggaaatgacaaaaatggaaaggaagaagtcataaagagaaaaattccttatattctgaaacggcagctgtatgagaataaacccagaagaccctacatactcaaaagagattcttactattactgagagaataaatcatttatttacatgtgattgtgattcatcatcccttaattaaatatcaaattatatttgtgtgaaaatgtgacaaacacacttatctgtctcttctacaattgtggtttattgaatgtgatttttctgcactaatataaattagactaagtgttttcaaataaatctaaatcttcagcatgatgtgttgtgtataattggagtagatattaattaagtcacctgtataatgttttgtaattttgcaaaacatatcttgagttgtttaaacagtcaaaatgtttgatattttataccagcttatgagctcaaagtactacagcaaagcctagcctgcatatcattcacccaaaacaaagtaatagcgcctcttttattattttgactgaatgttttatggaattgaaagaaacatacgttcttttcaagacttcctcatgaatctctcaattataggaaaagttattgtgataaaataggaacagctgaaagattgattaatgaactattgttaattcttcctattttaatgaatgacattgaactgaattttttgtctgttaaatgaacttgatagctaataaaaagacaactagccatcaaaatca

SEQ ID NO: 407 - DNA, 6701 bp, Homo sapiens
ttacatcttatagcacccagtgaattatgatatggggctgcggtttatttgctctggcgacaatatggcttacttgccgtggaatatcccggtatttcagaagtaacatattatttttaaagagggagctttgctttctctaaatcacatggtgcaaagttgggaatacagtggcctgtaaattacaaatattatttacaaactagaaggaaagctgacatgtgtttgtgcctgtgtgacagtttcactaaggaattccaaaactgtggatagcctgttacttgagaaaaatacacggtggcagtcttgcagatgtttttcccgcctgttagccctccaggttcaaaaactgtttggtgcattttaaggcggcagtctcaccagatcgcaggattctagtctaattggcttctaaccttcaatctaaccttgccggcttccttgcaaagcccggtgcaagggcctctttcaaaatgaacccactggtgtgcctagcagtcggtagaagaagcgggagggcgtccggtctgcacgcccgccgcgaggttacaatgctgaacgcatgagatggaagataccaacgggaggccgaggggatccacggcgcccgcgcgggctccggcttcctcctgctctcggcgccgctgggcgaccgcccatgacccgctcttgcgggctctgtccggttgacaggcgaccctgtggcccggggaagcgcgggagggcgccggcggaaagttgaagagcgtttttctcgccgccgcgtgcattaggagctcgacgagtccgccctgggcttcctggtggggctgggcgggcgggggaggggccgcgcagcagcagcggaagccagacctcggcgataagaggctgcacagcgacatgcaacagtcttttcactgcagctgaatgagttgtggcgcccacaatgctcccatgacaaggagctgacaagttccattttccgtcgcgggcatcttggaatcatgactcccacaatgccttgggcacttggtcgacagtggggccgcctctgaaaaaaaaatgtgagaggttggtactaagaagtgcctttcctgacgtctctgctgcttggaaccgcttctagagcagtctctgcttttgccttgcttgctgccagctagactgtgacgacagcacatccaccctccacctctagcccagacacccccatttctacttataatcaagagaaaagctctaagtatctggcattgccctaggctgctttagtgttaaaagaaaagtttgctgaaaaagtaagatatcttctgccaggaaatcaaggaggaaaaaaaaaatcattttctcgattttgctctaaactgctgcatctgtctatgccaaactaatcaataccgattgcaccaccaaactccattgcaaattcagctgtgaggagattccctttcagacaactttgctgaaagcagcttggaaattcggtgtcgaagggtctgccacgttttcatgcttgcattttgggctccaaattggcactgggaaggggttactgagagcacaaggctgataccaggccctacttttaaacgttcatctacttacaatcctagtatttctctaaaaaccaaaacctctttgaattaacagtttcatgctgtgaatttctagtgggagatcttttccttgatattgacgacacaattttccatgtacttttaaagcagggagtggggaaaagtattttgaggggacattttcatcatcagttcagctttttttttttggttgttgctcttttttgggggggttgggtttgttggtttcactgaaacatttaactacctgtaaaatctaaacatggctgttagtgtcacaccaattcgggacacaaaatggctaacactggaagtatgtagagagttccagagggggacttgctcacggccagacacggaatgtaaatttgcacatccttcgaaaagctgccaagttgaaaatggacgagtaatcgcctgctttgattcattgaaacagtcactcaggaaatgttgtttaaggggaaccttctggatccttttcatggcaccatggcaagaagaagctgtatcttatctatggaagataaagcatggagttggctaatggatgctgataggaccatctagttgcaggaaaacaagctcagggctcccactgattctacattatgggccgttgctccagggagaactgcaaatatcttcatccacccccacatttaaaaacgcagttggagataaatggacgcaataacttgattcagcagaagaacatggccatgttggcccagcaaatgcaactagccaatgccatgatgcctggtgccccattacaacccgtgccaatgttttcagttgcaccaagcttagccaccaatgcatcagcagccgcctttaatccctatctgggacctgtttctccaagcctggtcccggcagagatcttgccgactgcaccaatgttggttacagggaatccgggtgtccctgtacctgcagctgctgcagctgctgcacagaaattaatgcgaacagacagacttgaggtatgtcgagagtaccaacgtggcaattgcaaccgaggagaaaatgattgtcggtttgctcatcctgctgacagcacaatgattgacaccaatgacaacacagtcactgtgtgtatggattacatcaaagggagatgctctcgggaaaagtgcaaatactttcatccccctgcacatttgcaagccaagatcaaggctgcccaataccaggtcaaccaggctgcagctgcacaggctgcagccaccgcagctgccatgactcagtcggctgtcaaatcactgaagcgacccctcgaggcaacctttgacctgggaattcctcaagctgtacttcccccattaccaaagaggcctgctcttgaaaaaaccaacggtgccaccgcagtctttaacactggtattttccaataccaacaggctctagccaacatgcagttacaacagcatacagcatttctcccaccaggctcaatattgtgcatgacacccgctacaagtgttgttcccatggtgcacggtgctacgccagccactgtgtccgcagcaacaacatctgccacaagtgttcccttcgctgcaacagccacagccaaccagccccatccttgatgcttctacactgttgggtgcaacatcctgtcctgcagcagcaggaaaaatgatacccataatatctgccgaacatctgactagccacaagtatgttacccagatgtagaattttcatcactaaacaatcatgctaaagaggaaaggacagtgtgcttggttagagtaaaggacgaggtcattagccatattgtatatatcgtcaagcaacacacacaaaagttcctcagccacaagacatccacatattgcatgttaaccagaagaaaagacaacattttccggaaatccactgcacactgttgcctatacactttgtacatttaattgatatttgtgctgaggtgatattcctgtctaaaagaacaacattgtctttcttttctagcacagagttatgcattcaaagatgcatacctagttagtttcctatatattcatgccatcttgaaaagacagactatggtgtaaccatgattctattatgtattggtacgtctgtagaccaagatataattttttaaaaataagtttatttctttcaaggtttacaaataacaaaggtgcaccttgtatttaaaattgccattatagatgagagcgtgcatgcacagtcatttttgtttaagagtaatatttttaatgtaatagattgtaagacgtggtgagggagggatctgacagagatgaatgtgccaagcaaaaccacaactgtgtatattttaaagcacatcatggctttaagtaccatgttgttaaggattctcatgaagtgccatagactgtacatcaaattagagtattatttcttcagtgttattgttttcagagccacattttgttgcatatttgctagtactaatcagtcaaagggcaccattctttttttttttttttgaaaccaaagctgtctcagaaatggccaatttaactttacagtaacaatagacagcacaacacaaactctctcaatacagataaactcacacatactggagatatatatataatagatatatataaaattattttaatgcattgtagtgtaatatttatgcatactatactgtataacatgttattcaaaagggattgccatttctgagacacagtaacaaaaaaatgaggaaattattttgcttctatttatagcctctgtcaaaagtcaaaagactataaatgctttgcaaaaatggtttcacgtttgcttaaatgcttcatcacagtcacattcaaaatagtgactctaaacaaagaagaaagcagcactgtcatcagatgcatgataaaccaaaatatgaaaatgggaaatgtttaattaacctagtaattgggtgggttaagtacatgggtgaattttatatgtgatttttgttttgttttgttttgttcagattaactgcttatagccttagaaagccttttacaaaattaaaaaaaaaatagatgtgcattcagtttttaagaatggaatcatccaaaggaattcctttttttgaggtttggatgttgcagctagtaaaggatatttttgctctgttcagcagttctaaaaattgctgaagtaggggccaggtcactggtagttatagtatggaatgggagaagtgaaagttcagttatagaactttccatacttccaagtttactgcaagtttttatgcttgagagagatgctttctaatataagactgatgtgttgattttactgattgtactgtacatctattaaagccttagattattacattacgggttggaacccataccaatgtaatttcaatcgtgttaagaaagtaatggtgacttcacatgttattgtagttagttacattatagaatattacttatttttcttgttaaaatgtagtttttcatttcctacatttattagattttcattttctattaacaattgaataccatttcagtttatagacttgttttattagattttaccaatgaatttttcaaaatacaaaaaaaagtagtttttccttcataacatactcagttttgaattacatgtagtgtcacatgaatattcgtattgttaactaaatgatttatattttactgatttaatattacagtgtaagaatgtcagtcattgttagttcttgtctagttttcattaaaagaacaaagatcttttatatggatatcttataaatatataatcattgctaagtaagaagttaagttgttgctatcgcaacaatcctggcagacaattgagtaatattttgatgatttattttgtttgtaattagttattataagaagatctagatcctagatattagaataaaatttattttctactgtatccatttcaaatgttaaaatattgtttaatatttttgaaatccctgagtatcaggccttgttataaataagctgcataatcaataaatagaacaagggactttttgttgataatccaaatactcaaagtttacgtaatgaaaattatagcgtgtgtgcaaactcttgagggttgattatgctgcaatttagcatgttggaacgtctagggagaaggttgactttttgcacttctgtatatagtcaaaagagagaaacctgtataatagtaagatcttattttgaataaaaacgtctataattacaaggagttttgttaaggctaatacaatgacagactgagcaaaattgcttgcaaaagtggcacagagttagcactccataccccttcaaacatgttgctttgctttcttgtggacagcttgtagtttgccaggattttttcagctggaaagatacgccatcctttcaaaccctcatgactgacaaaaactccatggggccaaatctgcctgaagatcattaccaaaaatagcaggtacttctaccattaaggtgaaatcatggatcagatattccttacatttttcaaaactactgcatgtttaaaacttcaacaaaaaaagagagaaagaactatactaagaacatatattattcagatcagtttctgccaatttcagtggtttattgttcacaaaaaaatcttcaaaacaagtattgactttcacaaaatttaaatcataaacaggcaaaccaaacagcacactgtagctatagttgttatgtgattgttttttaattgctgtaggatcctgttctttcagcaggtgaaaaataaaacgcagttcaaatttcatggttttaattttcaactcagaagcactcaaaaatgcaaaatgtgataatgggcacttgtttaaaagaattagtgtatccagccttcactccagctggttaaaaatgttgcacttatcagcaaccctaccactttcatctgctgaaaggacaaatgtgcttggttttactattatgtaatcacaacttactttctgcttgtagttgcttaaaattatgtattttgtcttgggctgcaatttgttttatgcttattttattattactgcagtagttgactttgctgtatggaaaaataaagtgaaattgccctaataaaacttctctttcttaagta

SEQ ID NO: 408 - DNA, 1785 bp, Homo sapiens
cttcacctcactttaccttctcctccagcacaggaactaggaactacggagagagaagccaagggagaggaggaggaggaaactaacgattccctgcccacccccacacccagcaccaccaacaggtgggcaagcttgccgagaaaacgcagagggcatcctgtgagcagcaaacacatctgagcctggaaaagacgcagagaagtaaaagatcaaagctgcagtctgattggcaccggctcccattccggctccagcctccaatccgacccccatttcggctgcagcctcggacctagctccggccctcggtctatccggttgcatcctccctccctgttccggatcttatcttgcgccagcgcctactccaggatcccgtagccagacctcaagccatggctggtcccttctcccgtctgctgtccgcccgcccgggactcaggctcctggctttggccggagcggggtctctagccgctgggtttctgctccgaccggaacctgtacgagctgccagtgaacgacggaggctgtatcccccgagcgctgagtacccagacctccgaaagcacaacaactgcatggccagtcacctgaccccagcagtctatgcacggctctgcgacaagaccacacccactggttggacgctagatcagtgtatccagactggcgtggacaaccctggccaccccttcatcaagactgtgggcatggtggctggagatgaggagacctatgaggtatttgctgacctgtttgaccctgtgatccaagagcgacacaatggatatgacccccggacaatgaagcacaccacggatctagatgccagtaaaatccgttctggctactttgatgagaggtatgtattgtcctctagagtcagaactggccgaagcatccgaggactcagtctgcctccagcttgcactcgagcagagcgacgagaggtggaacgtgttgtggtggatgcactgagtggcctgaagggtgacctggctggacgttactataggctcagtgagatgacagaggctgaacagcagcagcttattgatgaccactttctgtttgataagcctgtgtccccgttgctgactgcagcaggaatggctcgagactggccagatgctcgtggaatttggcacaacaatgagaagagcttcctgatctgggtgaatgaggaggatcatacacgggtgatctccatggagaagggtggtaacatgaagagagtgtttgaaagattctgccgaggcctcaaagaggtggagagacttatccaagaacgtggctgggagttcatgtggaatgagcgtttgggatacatcttgacctgtccatctaacctgggcactggacttcgggcaggagtgcacatcaaactgcccctgctaagcaaagatagccgcttcccaaagatcctggagaacctaagactccaaaaacgtggtactggaggagtggacactgctgctacaggcggtgtctttgatatttctaatttggaccgactaggcaaatcagaggtggagctggtgcaactggtcatcgatggagtaaactatttgattgattgtgaacggcgtctggagagaggccaggatatccgcatccccacacctgtcatccacaccaagcattaactccccatcgccagctgatgactcaagattcccaggagttctgctcattctaatgatggcccattctacttgctctggacctgcccccgcatcccctgcctccatcctagtaaagactccttgctatgctgca

SEQ ID NO: 409 - DNA, 5307 bp, Homo sapiens
aggctatctccagccgtggccgatggccgtgccgggggcagagcccgctcccctccgcgcgttgctacgtgcggggatgacatggatccagacgccgtcaactacgggaaggaggaggcgagagttggagcgcgtgggagcgcagaggccggaggagggaaacaccctcccggatccagagcccggcggcggcgaagcagcagctgcggccgcgcccttgccagagccggtgcgtccgcctagccccgctccgcctgaggccgtcagggctcccgaggatggaagattcccaggagacatcgccgtcctccaacaactcctcggaggagctcagctctgctctgcacctgtccaagggcatgtcgatcttcctcgacgtaaagaaattcccaaacgaaattaatactgaggagagcagacaaaaatgatgatggaaaattatcctttgaagaattcaaagcatattttgcagatggtgttctcagtggagaagaattacacgagcttttccataccattgatacacataatactaataatcttgacacagaagagctatgtgaatatttttctcagcacttgggcgagtatgagaatgtactagcagcacttgaagacctgaatctttccatcctgaaggcaatgggcaaaacaaagaaagactaccaagaagcctccaatttggaacaattcgtaactagatttttattgaaggaaaccctgaatcagctgcagtctctccagaattccctggaatgtgccatggaaactactgaggagcaaacccgtcaagaaaggcaatttacatgcaagggccagccaagccagaagtcctgtcgattcaatggcctggaaaacgatcaagccgccgagtccagagacacaacagcttctccccaaacagccctcagtttaatgtcagcggtccaggcttattagaagaagacaaccagtggatgacccagataaatagactccagaaattaattgatagactggaaaagaaggatctcaaactcgaaccaccagaagaagaaattattgaagggaatactaaatctgggctccgtgacagccaacgcagtgaccctcgccccttccttggcagcacatcatgcttgtgcagcggcagatgtctgtgatagaagaggacctggaagaattccagctcgctctgaaacactacgtggagagtgcttcctcccaaagtggatgcttgcgtatttctatacagaagctttcaaatgaatctcgctacatgatctatgagttctgggagaatagtagtgtatggaatagccaccttcagacaaattatagcaagacattccaaagaagtaatgtggatttcttggaaactccagaactcacatctacaatgctagttcctgcttcgtggtggatcctgaacaactagatgttcctagacattttctttatggttccaagtgcaaaacaggtgttcttatctaaaacgtcaattagaaaattatctgcggttgttaatctactgtatatttttgtttggtatatttactaagtgcactctttcaaaacttattctataactttatcaattcatgtgaattttagctcaattttcaaagttcactaatattctcaatatttaatgctaaatgctttgctacattgtaactcacctaaaaccttttagtgacaaaatcctaatatgtggaaaaaagcatatgcataaaggaataatattgtgaaaatgaatctgttatgataaagaaaaaataaagtggaaacttttagagtattacttcatagggcagattttgtaaactgtcgtatactgtaaagggttaaatcagcgttttgtgatttttaagtaactgtgagtgaagtttattcttcaacaatgtctactccatccccaacccaactcacagccctatgactactatctttgcattagttaaaaagttagtatataggcatcaaacaaccttggctgtaacctatagaatctctatccacgtatcaggttatagactggtttttcaaaagtgaacaatcctgtgataagttggagtaccatttagtaatacagcaacattgtgtcatttattagcatcataattctttgttatgtaagttaaatatatcaagaaagaagagactgtttggaaaaatgtggttcaagttttatgctatatagttttggtatgcgatacagacagctaacttttcttatgaaaaatacatatttgcatgtaaacaatgatttcaaaatacttgaaaaataaaattttaacccaaatgaataactaagaaatataaaacaagcacaaaatcttagggaagtcataaaatagtagtgaaagtattagacagaagacatctgttttcgaatttcaacactagaatgactaaaactatctacctatagaactatctgtagatagtatactatctacactctgctcaacaagctcagaaattaaatatttttaataataaaaatctgttctggttataaaccttgctaatgaaaatacaatacatataaaaatgtatagccatgttattttctagtataaattcctttgaaactataagtctttgaggaaaattataaggtaaaattttcctgtttttccccctttgaaaaactcaggaaaaaaggaagattgaactaataaaattttatttcttaaatataaatttgacctaaaatattttctcaaactaattcatgaaacagcaacttttaccaatacctttgtatactctcagttctcattcagtataaataaaattttaaaatcctttcatagttctattagaaataagtagtaaattttgatatattgtacatacacacgtgtgtgtgtgtgtgtgtgtgtgtgtgtgtgtgtgtgtgtgtatttgtgtgcctctggtcaactctaaggatgacagacactgtgtaacaacacctgggtcaactcttttaatttatatacaaagcaaagaacaacattaatggagatgcacaatgattattcaaacaagctatatatatgtacaaaggcaaacagacacataacagtctctgcagactgattgtatatagtaagaaaagatcaaaagactttaaaacctaaatgacttttgacatacaaactcttcttgagaatgtttgttgtaaatggtttcaaaaatacaaattatagccaatcaaaacattgctttggttggtgcatttaagtatccaactcaaaaagcatatcaaatattttgggtactaggcagtttccaaagtagcatggtagtattacttgttaaaagggttctgttttcattaacagtactaagtggaagggatctgcagattccaaactggaataagctctatcatattctgaaacaagaattagaatgacttgagaacgggcaaataacaaagcaaaccaatataattatatggtcattctgaccccagctcttatacaaattatacatgtatttttgtgtatgtttgtgagagttgtatgtatgtgaatgtgtgtgagtgtgtattcacatacacatatatactggaacctatagtagaaaaggaaactagtagggccaaaaaaaaaaagaaaaagaaaaagaaaaaagaaaaaaaaagaaaaaactgggacctaagtataaatatctcatcctaaagtaaacaataagtttatagttaacgaagatttttttctatttaaaaccccattttcctaaagaacaaagtagtaaaataaaaaaaaatttaaaaaattaaaaaataaaaaaaagaggtcactaaaagaccaagatgggaaacgtaacatggaatacaagcttgaatctgggaaacaagctcaaaaaacagtgaaaaaaaaagtactggtttaggagttcaaaattcagtgaaacaaactttttgccaatagacctagggatctaagaaatagaattagggagagtttacacttacttacctatatatcagcagatttttctggaagaaaccctttttttttttttttttaaacagtaacatccagagtgacaaattgcaggagatttaatgtataaaatttctaggaattaaaagcttaaacccaaaaattgttcatccatatataagaaattatcgaattaaaacttaatgtatgtcaattattttcaaatgtctaaattcctttggaaataaaaatatcagttttactttgaaattgctcaacttctgctattcatatggtctgattagtgacataagtagcagccgtttttcaacttcagtttcattcactaccattgtttccaaattatcaatctctgctagtaattatgaatttaagaccatattattatcaaaaacctagagaccaatcatatatctgaaaagaaatacccattaaaaattctgcctcctgtttattgagaactatgcattgaacattctgaatcattctaagcctctggagagactgtaatgatccattcatgagctggtatgaaatcagtgggaagcagaacaacagaaggaactttaaaagcaacaagcaattatgtaccatatatacactgtagcaaatattttatatttgagagtctttacagcttacatttccattccattattacaagtgatgaaaaacaaaaaattgcaagtagtatgcaaattataaatatacagtcttcccacttcactaaccaaattcctactttccagtgttacttcccaatttatgcaggaaacctcctgcaaagctgaaactgattagaaaattctttatattttaaaatagctctttctcatttttagagaagtcaaatagccaaccatcaaaattaagaataaattgaattgtcacagtccattacagttattgttgctagatccacctcatttgcagatgtccaaacttaaattcatctgttcttaaaatgctacttaaaactttggttgttttcctgtaatataaaagaaaaagttaatttatcaattgattgaatacagtttttactaattagtttatcaaaccaaatactgtgaacgtaccaggtgtttacagatttaaatgcatgttaccatagaaactattaaagtaactagaactgtcaaataacaaaacggctcatgtttttaaaatatatgtaactcattttaaaatatattaaattgtattccaaacctgttcttctgtttctgtggcacctaggtttaaaatatgtattaatgtgtaaatcacaagtaaaatgaattctaatgtacaagtttgttttaaaaagtgtatgtcaagcttttatttacacaataaaatgttattaaagatggaaagtcta

SEQ ID NO: 410 - DNA, 6774 bp, Homo sapiens
cggccccagaaaacccgagcgagtagggggcggcgcgcaggagggaggagaactgggggcgcgggaggctggtgggtgtggggggtggagatgtagaagatgtgacgccgcggcccggcgggtgccagattagcggacgcggtgcccgcggttgcaacgggatcccgggcgctgcagcttgggaggcggctctccccaggcggcgtccgcggagacacccatccgtgaaccccaggtcccgggccgccggctcgccgcgcaccaggggccggcggacagaagagcggccgagcggctcgaggctgggggaccgcgggcgcggccgcgcgctgccgggcgggaggctggggggccggggccggggccgtgccccggagcgggtcggaggccggggccggggccgggggacggcggctccccgcgcggctccagcggctcggggatcccggccgggccccgcagggaccatggcagccgggagcatcaccacgctgcccgccttgcccgaggatggcggcagcggcgccttcccgcccggccacttcaaggaccccaagcggctgtactgcaaaaacgggggcttcttcctgcgcatccaccccgacggccgagttgacggggtccgggagaagagcgaccctcacatcaagctacaacttcaagcagaagagagaggagttgtgtctatcaaaggagtgtgtgctaaccgttacctggctatgaaggaagatggaagattactggcttctaaatgtgttacggatgagtgtttcttttttgaacgattggaatctaataactacaatacttaccggtcaaggaaatacaccagttggtatgtggcactgaaacgaactgggcagtataaacttggatccaaaacaggacctgggcagaaagctatactttttcttccaatgtctgctaagagctgattttaatggccacatctaatctcatttcacatgaaagaagaagtatattttagaaatttgttaatgagagtaaaagaaaataaatgtgtatagctcagtttggataattggtcaaacaattttttatccagtagtaaaatatgtaaccattgtcccagtaaagaaaaataacaaaagttgtaaaatgtatattctcccttttatattgcatctgctgttacccagtgaagcttacctagagcaatgatctttttcacgcatttgctttattcgaaaagaggcttttaaaatgtgcatgtttagaaacaaaatttcttcatggaaatcatatacattagaaaatcacagtcagatgtttaatcaatccaaaatgtccactatttcttatgtcattcgttagtctacatgtttctaaacatataaatgtgaatttaatcaattcctttcatagttttataattctctggcagttccttatgatagagtttataaaacagtcctgtgtaaactgctggaagttcttccacagtcaggtcaattttgtcaaacccttctctgtacccatacagcagcagcctagcaactctgctggtgatgggagttgtattttcagtcttcgccaggtcattgagatccatccactcacatcttaagcattcttcctggcaaaaatttatggtgaatgaatatggctttaggcggcagatgatatacatatctgacttcccaaaagctccaggatttgtgtgctgttgccgaatactcaggacggacctgaattctgattttataccagtctcttcaaaaacttctcgaaccgctgtgtctcctacgtaaaaaaagagatgtacaaatcaataataattacacttttagaaactgtatcatcaaagattttcagttaaagtagcattatgtaaaggctcaaaacattaccctaacaaagtaaagttttcaatacaaattctttgccttgtggatatcaagaaatcccaaaatattttcttaccactgtaaattcaagaagcttttgaaatgctgaatatttctttggctgctacttggaggcttatctacctgtacatttttggggtcagctctttttaacttcttgctgctctttttcccaaaaggtaaaaatatagattgaaaagttaaaacattttgcatggctgcagttcctttgtttcttgagataagattccaaagaacttagattcatttcttcaacaccgaaatgctggaggtgtttgatcagttttcaagaaacttggaatataaataattttataattcaacaaaggttttcacattttataaggttgatttttcaattaaatgcaaatttgtgtggcaggatttttattgccattaacatatttttgtggctgctttttctacacatccagatggtccctctaactgggctttctctaattttgtgatgttctgtcattgtctcccaaagtatttaggagaagccctttaaaaagctgccttcctctaccactttgctggaaagcttcacaattgtcacagacaaagatttttgttccaatactcgttttgcctctatttttcttgtttgtcaaatagtaaatgatatttgcccttgcagtaattctactggtgaaaaacatgcaaagaagaggaagtcacagaaacatgtctcaattcccatgtgctgtgactgtagactgtcttaccatagactgtcttacccatcccctggatatgctcttgttttttccctctaatagctatggaaagatgcatagaaagagtataatgttttaaaacataaggcatttgtctgccatttttcaattacatgctgacttcccttacaattgagatttgcccataggttaaacatggttagaaacaactgaaagcataaaagaaaaatctaggccgggtgcagtggctcatgcctatattccctgcactttgggaggccaaagcaggaggatcgcttgagcccaggagttcaagaccaacctggtgaaaccccgtctctacaaaaaaacacaaaaaatagccaggcatggtggcgtgtacatgtggtctcagatacttgggaggctgaggtgggagggttgatcacttgaggctgagaggtcaaggttgcagtgagccataatcgtgccactgcagtccagcctaggcaacagagtgagactttgtctcaaaaaaagagaaattttccttaataagaaaagtaatttttactctgatgtgcaatacatttgttattaaatttattatttaagatggtagcactagtcttaaattgtataaaatatcccctaacatgtttaaatgtccatttttattcattatgctttgaaaaataattatggggaaatacatgtttgttattaaatttattattaaagatagtagcactagtcttaaatttgatataacatctcctaacttgtttaaatgtccatttttattctttatgtttgaaaataaattatggggatcctatttagctcttagtaccactaatcaaaagttcggcatgtagctcatgatctatgctgtttctatgtcgtggaagcactggatgggggtagtgagcaaatctgccctgctcagcagtcaccatagcagctgactgaaaatcagcactgcctgagtagttttgatcagtttaacttgaatcactaactgactgaaaattgaatgggcaaataagtgcttttgtctccagagtatgcgggagacccttccacctcaagatggatatttcttccccaaggatttcaagatgaattgaaatttttaatcaagatagtgtgctttattctgttgtattttttattattttaatatactgtaagccaaactgaaataacatttgctgttttataggtttgaagaacataggaaaaactaagaggttttgtttttatttttgctgatgaagagatatgtttaaatatgttgtattgttttgtttagttacaggacaataatgaaatggagtttatatttgttatttctattttgttatatttaataatagaattagattgaaataaaatataatgggaaataatctgcagaatgtgggttttcctggtgtttccctctgactctagtgcactgatgatctctgataaggctcagctgctttatagttctctggctaatgcagcagatactcttcctgccagtggtaatacgattttttaagaaggcagtttgtcaattttaatcttgtggatacctttatactcttagggtattattttatacaaaagccttgaggattgcattctattttctatatgaccctcttgatatttaaaaaacactatggataacaattcttcatttacctagtattatgaaagaatgaaggagttcaaacaaatgtgtttcccagttaactagggtttactgtttgagccaatataaatgtttaactgtttgtgatggcagtattcctaaagtacattgcatgttttcctaaatacagagtttaaataatttcagtaattcttagatgattcagcttcatcattaagaatatcttttgttttatgttgagttagaaatgccttcatatagacatagtctttcagacctctactgtcagttttcatttctagctgctttcagggttttatgaattttcaggcaaagctttaatttacactaagcttaggaagtatggctaatgccaacggcagtttttttcttcttaattccacatgactgaggcatatatgatctctgggtaggtgagttgttgtgacaaccacaagcactttttttttttttaaagaaaaaaaggtagtgaatttttaatcatctggactttaagaaggattctggagtatacttaggcctgaaattatatatatttggcttggaaatgtgtttttcttcaattacatctacaagtaagtacagctgaaattcagaggacccataagagttcacatgaaaaaaatcaatttatttgaaaaggcaagatgcaggagagaggaagccttgcaaacctgcagactgctttttgcccaatatagattgggtaaggctgcaaaacataagcttaattagctcacatgctctgctctcacgtggcaccagtggatagtgtgagagaattaggctgtagaacaaatggccttctctttcagcattcacaccactacaaaatcatcttttatatcaacagaagaataagcataaactaagcaaaaggtcaataagtacctgaaaccaagattggctagagatatatcttaatgcaatccattttctgatggattgttacgagttggctatataatgtatgtatggtattttgatttgtgtaaaagttttaaaaatcaagctttaagtacatggacatttttaaataaaatatttaaagacaatttagaaaattgccttaatatcattgttggctaaatagaataggggacatgcatattaaggaaaaggtcatggagaaataatattggtatcaaacaaatacattgatttgtcatgatacacattgaatttgatccaatagtttaaggaataggtaggaaaatttggtttctatttttcgatttcctgtaaatcagtgacataaataattcttagcttattttatatttccttgtcttaaatactgagctcagtaagttgtgttaggggattatttctcagttgagactttcttatatgacattttactatgttttgactacctgactattaaaaataaatagtagatacaattttcataaagtgaagaattatataatcactgctttataactgactttattatatttatttcaaagttcatttaaaggctactattcatcctctgtgatggaatggtcaggaatttgttttctcatagtttaattccaacaacaatattagtcgtatccaaaataacctttaatgctaaactttactgatgtatatccaaagcttctcattttcagacagattaatccagaagcagtcataaacagaagaataggtggtatgttcctaatgatattatttctactaatggaataaactgtaatattagaaattatgctgctaattatatcagctctgaggtaatttctgaaatgttcagactcagtcggaacaaattggaaaatttaaatttttattcttagctataaagcaagaaagtaaacacattaatttcctcaacatttttaagccaattaaaaatataaaagatacacaccaatatcttcttcaggctctgacaggcctcctggaaacttccacatatttttcaactgcagtataaagtcagaaaataaagttaacataactttcactaacacacacatatgtagatttcacaaaatccacctataattggtcaaagtggttgagaatatattttttagtaattgcatgcaaaatttttctagcttccatcctttctccctcgtttcttctttttttgggggagctggtaactgatgaaatcttttcccaccttttctcttcaggaaatataagtggttttgtttggttaacgtgatacattctgtatgaatgaaacattggagggaaacatctactgaatttctgtaatttaaaatattttgctgctagttaactatgaacagatagaagaatcttacagatgctgctataaataagtagaaaatataaatttcatcactaaaatatgctattttaaaatctatttcctatattgtatttctaatcagatgtattactcttattatttctattgtatgtgttaatgattttatgtaaaaatgtaattgcttttcatgagtagtatgaataaaattgattagtttgtgttttcttgtctccc

SEQ ID NO: 411 - DNA, 1990 bp, Homo sapiens
caacggctcattctgctcccccgggtcggagccccccggagctgcgcgcgggcttgcagcgcctcgcccgcgctgtcctcccggtgtcccgcttctccgcgccccagccgccggctgccagcttttcggggccccgagtcgcacccagcgaagagagcgggcccgggacaagctcgaactccggccgcctcgcccttccccggctccgctccctctgccccctcggggtcgcgcgcccacgatgctgcagggccctggctcgctgctgctgctcttcctcgcctcgcactgctgcctgggctcggcgcgcgggctcttcctctttggccagcccgacttctcctacaagcgcagcaattgcaagcccatccctgccaacctgcagctgtgccacggcatcgaataccagaacatgcggctgcccaacctgctgggccacgagaccatgaaggaggtgctggagcaggccggcgcttggatcccgctggtcatgaagcagtgccacccggacaccaagaagttcctgtgctcgctcttcgcccccgtctgcctcgatgacctagacgagaccatccagccatgccactcgctctgcgtgcaggtgaaggaccgctgcgccccggtcatgtccgccttcggcttcccctggcccgacatgcttgagtgcgaccgtttcccccaggacaacgacctttgcatccccctcgctagcagcgaccacctcctgccagccaccgaggaagctccaaaggtatgtgaagcctgcaaaaataaaaatgatgatgacaacgacataatggaaacgctttgtaaaaatgattttgcactgaaaataaaagtgaaggagataacctacatcaaccgagataccaaaatcatcctggagaccaagagcaagaccatttacaagctgaacggtgtgtccgaaagggacctgaagaaatcggtgctgtggctcaaagacagcttgcagtgcacctgtgaggagatgaacgacatcaacgcgccctatctggtcatgggacagaaacagggtggggagctggtgatcacctcggtgaagcggtggcagaaggggcagagagagttcaagcgcatctcccgcagcatccgcaagctgcagtgctagtcccggcatcctgatggctccgacaggcctgctccagagcacggctgaccatttctgctccgggatctcagctcccgttccccaagcacactcctagctgctccagtctcagcctgggcagcttccccctgccttttgcacgtttgcatccccagcatttcctgagttataaggccacaggagtggatagctgttttcacctaaaggaaaagcccacccgaatcttgtagaaatattcaaactaataaaatcatgaatatttttatgaagtttaaaaatagctcactttaaagctagttttgaataggtgcaactgtgacttgggtctggttggttgttgtttgttgttttgagtcagctgattttcacttcccactgaggttgtcataacatgcaaattgcttcaattttctctgtggcccaaacttgtgggtcacaaaccctgttgagataaagctggctgttatctcaacatcttcatcagctccagactgagactcagtgtctaagtcttacaacaattcatcattttataccttcaatgggaacttaaactgttacatgtatcacattccagctacaatacttccatttattagaagcacattaaccatttctatagcatgatttcttcaagtaaaaggcaaaagatataaattttataattgacttgagtactttaagccttgtttaaaacatttcttacttaacttttgcaaattaaacccattgtagcttacctgtaatatacatagtagtttacctttaaaagttgtaaaaatattgctttaaccaacactgtaaatatttcagataaacattatattcttgtatataaactttacatcctgttttacctat

SEQ ID NO: 412 - DNA, 6690 bp, Homo sapiens
gcacatccctgcactagtggccgcaaccgaggcgccgcgctccagcagctgctgccgcccagcccggccccgccgccgccccccagccctgcagccccgcagccccggccgcgcccagcccggcgaggacagcaccaggaggcggcccccagcgcggccacaaagacccccggcggcgtctctccgcggaccggtcctacttgaagtccatcatgtccttcggcagagacatggagctggagcacttcgacgagcgggataaggcgcagagatacagccgagggtcgcgggtgaacggcctgccgagcccgacgcacagcgcccactgcagcttctaccgcacccgcacgctgcagacgctcagctccgagaagaaggccaagaaagttcgtttctatcgaaacggagatcgatacttcaaagggattgtgtatgccatctccccagaccggttccgatcttttgaggccctgctggctgatttgacccgaactctgtcggataacgtgaatttgccccagggagtgagaacaatctacaccattgatgggctcaagaagatttccagcctggaccaactggtggaaggagagagttatgtatgtggctccatagagcccttcaagaaactggagtacaccaagaatgtgaaccccaactggtcggtgaacgtcaagaccacctcggcttctcgggcagtgtcttcactggccactgccaaaggaagcccttcagaggtgcgagagaataaggatttcattcggcccaagctggtcaccatcatcagaagtggcgtgaagccacggaaagctgtcaggattctgctgaacaagaaaacggctcattcctttgagcaggtcctcaccgatatcaccgatgccatcaagctggactcgggagtggtgaaacgcctgtacacgttggatgggaaacaggtgatgtgccttcaggacttttttggtgatgatgacatttttattgcatgtggaccggagaagttccgttaccaggatgatttcttgctagatgaaagtgaatgtcgagtggtaaagtccacttcttacaccaaaatagcttcatcatcccgcaggagcaccaccaagagcccaggaccgtccaggcgtagcaagtcccctgcctccaccagctcagagccttagccatccttaaactcatccaaccgattcccatttccgcgggtgcttggcttagtgctgagacgggattccgccgttggtattcaggtccaacactaagactgtgtccatgttagaactcatagaagttaatggaacccctggtagtcagctctctactccgcgctcaggcaagtcgccaagcccatcacccaccagcccaggaagcctgcggaagcagagggacctgtaccgccccctctcttcggatgacttggattcagtaggagactcagtgtaaaagaaacaatggagcaatgtatatggtttgtgattgggtgaaggtttcacatttctgaagcaaaagtcttacagcaaaatacacaaaagagttttgcataccttgaaatgataaaagaccaaatcatccaaaagtaaatatgtatgcattttgttttcgtgatgttcaaccttgaaattgagagatttttaaaaatatctcccacatggatttgattggggagagtttgaacacaaaatgctgagatttttgtacagggcctggctctagatgaatttcatacacggacccaatattgagtacaagaacacactaaccatgtggcaatatagagccagaatttctgcagatggagttttcttcttaattataagtagacatagagatataatttttctgtactttctgtaaagcatattaaaacggcactagcaggcatattttttctaaaggttatattgtttttaaaatttgaattgcttggtttttagaggtacttttattacaaaataataaaaatacttgggtagattttttttctccctagacagtagaaaaagctacttactgttttgtgggttagtacatccgagagaaaaagaaaaattatgacaacgacacatctcataaagactctgaagttaggctttaggaacttgccttgtttttgttgtcaagtaaattttattttttaaagttattttattagaaacagtataaatttagcttaagctatatgccaatatgaagaacttggccaatggcattgctatagattgtataattttttcttacaaagctctcagcatggcggctcctctacgtcacttgcgtccaccaaagtctgcagctcgatggatgagaacgatggccctggagaagaagtgtcggaggaaggcttccagattccagctacaataacagaacgatataaagtcggaagaacaataggagatggaaattttgctgttgtcaaggaatgtgtagaaagatcgactgctagagagtatgctctgaaaattatcaagaaaagcaaatgtcgaggcaaagagcacatgatccagaatgaagtgtctattttaagaagagtgaagcatcccaatatcgttcttctgattgaggagatggatgtgccaactgaactgtatcttgtcatggaattagtaaaggggggagacctttttgatgccattacttccactaacaaatacaccgagagagacgccagtgggatgctgtacaacctagccagcgccatcaaatacctgcatagcctgaacatcgtccaccgtgatatcaagccagagaacctgctggtgtatgagcaccaagatggcagcaaatcactgaagctgggtgactttggactggccaccattgtagacggccccctgtacacagtctgtggcaccccaacatacgtggctccagaaatcattgcagagactggatacggcctcaaggtggacatctgggcagcaggtgtaatcacttatatcctgctgtgtggtttccctccattccgtggaagtggtgatgaccaggaggtgctttttgatcagattttgatggggcaggtggactttccttctccatactgggataatgtttccgattctgcaaaggagctcattaccatgatgctgttggtcgatgtagatcagcgattttctgctgttcaagtacttgagcatccctgggttaatgatgatggcctcccagaaaatgaacatcagctgtcagtagctggaaagataaagaagcatttcaacacaggccccaagccgaatagcacagcagctggagtttctgtcatagcactggaccacgggtttaccatcaagagatcagggtctttggactactaccagcaaccaggaatgtattggataagaccaccgctcttgataaggagaggcaggttttccgacgaagacgcaaccaggatgtgaggagccggtacaaggcgcagccagctcctcccgaactcaactcggaatcggaagactactccccaagctcctccgagactgttcgctcccctaactcgcccttttaataagacccttttactcaaagtcctagcttaaccctttgagactctgagatttttttcccccaaatttgtgtaaaacagtttcatctgatctatctagcgctcaatgcttgaatggcagaactgaaagtgttttcaggtatctttgtagcggtttccctttactgaataagatgacacgtggtgattgtgaagatggtaatttgctgctaatagagtcctcaaagggttaaggccaatttgcaatttttttttaaacttagaagcaatgaatgttttcatcagtcaagctaggatctgcagtatgtaatatagcacttgttaaccctctgagtgcatagaattttattgagaattcttgtttgggaatttttcaggcctttggatgtatacacacatgtttcttgattttactgcagatcaaggggtgttgttagatgctgaaatgtccagaaaagaaggacatttagaatgatatcttgtttgtccttttctgtgggtttagaacgtggcaggtttataacttcgacacacgcacggttctttcttcttcacaatcctattcagaaacagattttttttttcattagagatatgactgtcagttgcagtgagttctgcatcccaagtggagggaattgggtttgtggcaaagagcttgacccaggaaatagatggtgccccccaaattgtctccacatgaagatgtactgatgacgccccagaaatgctgcttccatatcagctgctgctagcgccagcgcagactctcagggagtcaccacagcttgtcttgtgcttggtgagtgagggtctctctactcagtgtcagacatctacaggaaagaaacaactggtggaaaagagcaataaattgcccggtgctctgcagggctggaatttcaaacagaaagagggaataagatcctgtgatttttctcacctgcttttccacgcactgtggtcatcactgtgcaatctacatctagtatgaaatccacacataggagagctggggcacaaggggactggaggcagttgctttgcaagatggctgaggagaaagcacactgggaacacaatccagaatgttctaacaataagttttcagtgaataaaccactggcaagacaattccatgtgcacctttaggttacctatatagtctcctaggaagatcaggatgaaagacctagatgatacccctgaggataaaacctccatcccctaaaatgattttttttaaataccactgtctttagctgtccaggaggtcagagtgttttttctgtctttgggccaagtcctgtctgagacctgtattttcactcttgttaccaaatctatctccctagtgcagtgtctccaggcctgagtttcttctggaacagattccattttagaatggggattcacaggttctgtgcatcaccacagtgctcagagaggattctcctggggtgtcttagaggcaggtgcccaactcaaatgtattcccaaggtttgctgggctctgggatccacgagacaaccagagagggatatctcatgaaatttgcatctggtggctgaacagtacctatgttctctgttttgaatatactttaatacctgagagtcttaaaatttgtgaacaacgtttctatagtcctttattttcaaatgcacattgatcttcacttgctgcatttttactcttcaaccctgaaactatggtctacattaatatggatttttaaatcacatgtcattacttttgcaacaccatcaccaaaattttttgctcttttacatttaggttcatctctgtggtctgtgttgtcctgacatgtaaaaagcatatcgtttattgaggtttttttcccccccttttagagcatccggaagtgataacacgcaaaatcacaaagtagcataaatcagtaaattagttgagttgtttttgggggggaggtgggggtagggggcacagaacaccagaaagagtgttggtgtgtaggtagattccatattaatgaggaacactgaactagttggaaattactgctttctctagaaatataaagcaaagcactattccaaggctatggagtagctctacagcctggcctcaactctaaaagtgtgaagaatgcaatgggcagagacctacctgcagtggactgtcattttcctttctttctctgaattactgctttttctgtgggcattaactatattgctacagcatctagtgtactgagcctgcggtgcatggctcaggccttttcccatcgacgtctagggggactctggaccgtgtgaagctagggggtgtttctcagcacactgcagaagggcagctcagaagaatgcagggcccattcagcatggggatcccagcacatcactgtagaatttgagtgatctatgctgaataaacagtggaatgtgaccagtcaagtagaaatcttgagtaatcagatggaatgcaatctttctaacattaagctaccaagatcctgaatgtcagagatgtactcagagggttaacagacaagcacaaggcatgctgactacattggtgtatccagattgctttgcttttagccagtgctttctaatttttttctcgacattcttgggatagttcaagtttgaaataattaagtggtggtgttctttaaggaatttctataaccaaattgatcttatttttgatttcacttatcatagaacaaatatgtatcattatggcagtgtatctatgtaattatcaatttaatcatcaccaccggtgtttccatattttttcccaagtatttaatatagctctcttatggtggtggcctggtgatggggaccgtctttcttttactgacacatgaccaatcatatggtattttcaagggaattttaagattcatcttttcagtttgatagtagactagttaaggaagaactctttcattacttgcatcgtgtaaatcatctctgtagacatgtgttcatattaatgaacacattttttctcaacattgtagcagaaatcattttattcgtcatgatcaatgaatatgtgatttgctccagatcgttagaaggaaaagtaagatttcagtcatcaaaaatgtttttaccgtagccctcatctaacttacacgtggtgcatattaaaataagcagagaaaaaaaaatgtgaataaactactgaaaac

SEQ ID NO: 413 - DNA, 3760 bp, Homo sapiens
ccctgctcctccgcctgggcggcccggctgcggtgacggctctcgctgcccgactgggggccatgaagccgagtccggccgggacggcgaaggagctggagcctccggcgccggcccgaggcgagcagcgcacggcggagcccgaggggcgctggcgggagaagggcgaggcagacaccgagcggcagcgcacccgggagcggcaggaggccacgctggccgggctggcggagctggagtacctgcgccagcgccaagagctgctggtcaggggcgccctgcgcggcgccgggggtgcgggagccgctgcgccccgcgctggggagctactgggggaggcggcgcagcgcagtcgcctggaggagaagttcttggaggagaacatcttgctgctaagaaagcaattgaactgtttgaggcgaagagatgctggtttgttgaatcagttgcaagagcttgacaagcagataagtgacctgagactggatgtagaaaagacatctgaagagcacctggagacagacagtcggcctagctcagggttttatgagctgagtgatggggcttcaggatccctttccaattcctctaactcggtgttcagtgagtgtttatccagttgtcattccagcacctgcttttgcagccccttggaggcgaccttgagtctctcagatggttgccccaaatctgcagatctcataggattgttggaatataaagaaggccactgtgaagaccaggcctcaggggcagtttgccgttccctctccacaccacaatttaattcccttgatgtcattgcagatgtgaatcccaagtaccagtgtgatctggtgtctaaaaacgggaatgatgtatatcgctatcccagtccacttcatgctgtggctgtgcagagcccaatgtttctcctttgtctgacgggcaaccctctgagggaagaggacaggcttggaaaccatgccagtgacatttgcggtggatctgagctagatgccgtcaaaacagacagttccttaccgtccccaagcagtctgtggtctgcttcccatccttcatccagcaagaaaatggatggctacattctgagcctggtccagaaaaaaacacaccctgtaaggaccaacaaaccaagaaccagcgtgaacgctgaccccacgaaagggcttctgaggaacgggagcgtttgtgtcagagccccgggcggtgtctcacagggcaacagtgtgaaccttaagaattcgaaacaggcgtgtctgccctctggcgggataccttctctgaacaatgggacattctccccaccgaagcagtggtcgaaagaatcaaaggccgaacaagccgaaagcaagagggtgcccctgccagagggctgcccctcaggcgctgcctccgaccttcagagtaagcacctgccaaaaacggccaagccagcctcgcaagaacatgctcggtgttccgccattgggacaggggagtcccctaaggaaagcgctcagctctcaggggcctctccaaaagagagtcctagcagaggccctgccccgccgcaggagaacaaagttgtacagcccctgaaaaagatgtcacagaaaaacagcctgcagggcgtccccccggccactcctcccctgctgtctacagctttccccgtggaagagaggcctgccttggatttcaagagcgagggctcttcccaaagcctggaggaagcgcacctggtcaaggcccagtttatcccggggcagcagcccagtgtcaggctccaccggggccacaggaacatgggcgtcgtgaagaactccagcctgaagcaccgcggcccagccctccaggggctggagaacggcttgcccaccgtcagggagaaaacgcgggccgggagcaagaagtgtcgcttcccagatgacttggatacaaataagaaactcaagaaagcctcctccaaggggaggaagagtgggggcgggcccgaggctggtgttcccggcaggcccgcgggcgggggccacagggcggggagcagggcgcatggccacggacgggaggcggtggtggccaaacctaagcacaagcgaactgactaccggcggtggaagtcctcggccgagatttcctacgaagaggccctgaggagggcccggcgcggtcgccgggagaatgtggggctgtaccccgcgcctgtgcctctgccctacgccagcccctacgcctacgtggctagcgactccgagtactcggccgagtgcgagtccctgttccactccaccgtggtggacaccagtgaggacgagcagagcaattacaccaccaactgcttcggggacagcgagtcgagtgtgagcgagggcgagttcgtgggggagagcacaaccaccagcgactctgaagaaagcgggggcttaatttggtcccagtttgtccagactctgcccattcaaacggtaacggccccagaccttcacaaccaccccgcaaaaacctttgtcaaaattaaggcctcacataacctcaagaagaagatcctccgctttcggtctggctctttgaaactgatgacgacggtttgagtgacatcattggtgtagaaagtttgtgtgtttttttttcttctccctagttgccaaaattaaaaaggtggtgttttcatttttgtataatactttaatggaatgctttttaaaaaaatataaaaccaaggtaaattattgtttcatcttcacgtatggatgctagtgcctttaatggaaggtaaagaatgttttgctagttagaagtacatattgaggttttaatggtggtgatagtgagttttgtggcaccagctgttttttattttaaactttctgagcatccggcaaggtacaggttttgatgttcaagttttattgggataagatcttttgatcccaaggtcaggtggatggaatttttggatttatatttgttccttgagtcttcagggcagtgtctccatgagggttttcctgttgaggggcaccacatacaatagtgtgaagtaggtatgaggggcagtcattgtattctatagtttttttatgtagtctacatttctcagatgtatccccattcggttttattctcagaactgttactagactcatgacttggaggccaaaccttaaatccagagatagcagcctcgatagggaccttaaaaggattcacaaaaacttttgccacacttggtgcctaggccctgttcctaataaccccttctagggccgtttatccaacatttagatgccttcttttccctccctaatttgtagccagtccaacctttcattccttggaggatttagttttgggataaaattttggtccttgggcacagagacattcactattaatgaagtaacccttgggcatgactccaatcccagaattgctcactgagcgctatgccaccgaagcgttgacctgaacatattagtgcaatccagtccagattggacctttgatcctatgtggaagggctgttttttaagaaaaaatttttggtaaacagtattgtgtaaaattgctttttgtataccaatatatgcatgttttgtgcatgagtagtacttgtgttgatactcctgttgatgttaaattactatataatataaacagtatgtgtttttatatatcattgtgtaaatttaatataacatatgcagtaataaaccatttgttttactgctgttaagtttgttatttgggtataaaaccagatgtttacacctgtaaa

SEQ ID NO: 414 - DNA, 744 bp, Homo sapiens
agcgccagtctccgccttgcgagctcagagtgtgcccgctgcgccgccgctgtccgtacctgccgccgccgccaccgccaccatgcccaacttcgccggcacctggaagatgcgcagcagcgagaatttcgacgagctgctcaaggcactgggtgtgaacgccatgctgaggaaagtggccgtagcggctgcgtccaagccgcacgtggagatccgccaggacggggatcagttctacatcaagacatccaccacggtgcgcaccactgagatcaacttcaaggtcggagaaggctttgaggaggagaccgtggacggacgcaagtgcaggagtttagccacttgggagaatgagaacaagatccactgcacgcaaactcttcttgaaggggacggccccaaaacctactggacccgtgagctggccaacgatgaacttatcctgacgtttggcgccgatgacgtggtctgcaccagaatttatgtccgagagtgaaggcagctggcttgctcctactttcaggaagggatgcaggctcccctgaggaatatgtcatagttctgagctgccagtggaccgcccttttcccctaccaatattaggtgatcccgttttccccatgacaatgttgtagtgtcccccacccccaccccccaggccttggtgcctcttgtatccctagtgctccatagtttggcatttgcacggtttcgaagtcattaaactggttagacgtgtctcaa

SEQ ID NO: 415 - DNA, 2866 bp, Homo sapiens
cgccaggacacactgttcgggcgcggctttccccgtccgcggagcggtcttgacactcgcggcggcagcatctacgctcgcagagccgccgatgcgtgtccagtgacccggacagcaaggcccgcgcgcggcgggggcggcggcagacgcctggtcaccgtgaccccgattttggatttaccgcttgggggctggggggatcctggatttaactggcgactgttttgggggacgccggacgccatgttgtggaaaataaccgataatgtcaagtacgaagaggactgcgaggatcgccacgacgggagcagcaatgggaatccgcgggtcccccacctctcctccgccgggcagcacctctacagccccgcgccacccctctcccacactggagtcgccgaatatcagccgccaccctactttccccctccctaccagcagctggcctactcccagtcggccgacccctactcgcatctgggggaagcgtacgccgccgccatcaaccccctgcaccagccggcgcccacaggcagccagcagcaggcctggcccggccgccagagccaggagggagcggggctgccctcgcaccacgggcgcccggccggcctactgccccacctctccgggctggaggcgggcgcggtgagcgcccgcagggatgcctaccgccgctccgacctgctgctgccccacgcacacgccctggatgccgcgggcctggccgagaacctggggctccacgacatgcctcaccagatggacgaggtgcagaatgtcgacgaccagcacctgttgctgcacgatcagacagtcattcgcaaaggtcccatttccatgaccaagaaccctctgaacctcccctgtcagaaggagctggtgggggccgtaatgaaccccactgaggtcttctgctcagtccctggaagattgtcgctcctcagctctacgtctaaatacaaagtgacagtggctgaagtacagaggcgactgtccccacctgaatgcttaaatgcctcgttactgggaggtgttctcagaagagccaaatcgaaaaatggaggccggtccttgcgggagaagttggacaagattgggttgaatcttccggccgggaggcggaaagccgctcatgtgactctcctgacatccttagtagaaggtgaagctgttcatttggctagggactttgcctatgtctgtgaagccgaatttcctagtaaaccagtggcagaatatttaaccagacctcatcttggaggacgaaatgagatggcagctaggaagaacatgctattggcggcccagcaactgtgtaaagaattcacagaacttctcagccaagaccggacaccccatgggaccagcaggctcgccccagtcttggagacgaacatacagaactgcttgtctcatttcagcctgattacccacgggtttggcagccaggccatctgtgccgcggtgtctgccctgcagaactacatcaaagaagccctgattgtcatagacaaatcctacatgaaccctggagaccagagtccagctgattctaacaaaaccctggagaaaatggagaaacacaggaaataaaattggaacgaagaaaggttaggagagtagggaaggaacaggactgcaaaaatccttctccaccgcacagactgggaacccctcctggcctgggggaagagtttgttacctaccttactatttaaagagccttcactggttctgcatcacccgcccctggacttcttagttgtttctctagcgctgagctatctcctaactttggacctattatcagaaggtgacaagtactggctctttattcattaagctttttttttttgaaccccattctttccttctctgaaagtggtgctataagttttagaatcttttaaatacattccctgggccaacagacccacacacttagccattgaaatgtcaaattgatgtgccctagatcaacagatcaacaataccttttttttcagtgttaaggtaatggttggtttttgtgtccgctaaatatttaccttgaaaaaaagaaaagtgtgtatctagcttcttcagagatcaagtcctctggtaggaggcaaaggttctatctgcttagcaactagttaataagtggtatctgacacactctaaaccccgtgttcaaacgggggccttctggttttaggaaacttgtagaaacgaagcctgctgattgatttttttctcctttttttttttttttttttttaactttgaaagttaactcttcaaatgggagactctttgaaatgacatgttcctttaaggtactgaagctttatttgcatatttatttcagatgtttcgagtaaacttgaaaagggtaggcacgaagcaatttgttgctgcttgtcacccccaagtccccgtggaggttctgtattttaagaaacagtgcgttgagtgtacagattttatttatgcgtaatttaatggggtctgtaaatactggtgcacttcttacgacttttttgagacatgggatccaattttaatattaacttttaatggtgatggggtaatctataacacatcataaggttttattcatatatatacagggtattaagaattaagaggatgctgggctctgttcttggcttggaagattctatttaattgaaactctctgttcagaaagcaataactttgtctcgttcctgttgggctgaaccctaaggtgagtgtgcagtacagtgtgtgtgggtgaaatggagatttggaattgaactctctgcctgtaaatgttccccaaataattgttgtgtgtatgatacgtgtataataaaagtattcttgttagaatctgaaa

SEQ ID NO: 416 - DNA, 518 bp, Homo sapiens
acactttgtatggcaagtggaaccactggcttggtggattttgctagatttttctgatttttaaactcctgaaaaatatcccagataactgtcatgaagctggtaactatcttcctgctggtgaccatcagcctttgtagttactctgctactgccttcctcatcaacaaagtgccccttcctgttgacaagttggcacctttacctctggacaacattcttccctttatggatccattaaagcttcttctgaaaactctgggcatttctgttgagcaccttgtggaggggctaaggaagtgtgtaaatgagctgggaccagaggcttctgaagctgtgaagaaactgctggaggcgctatcacacttggtgtgacatcaagataaagagcggaggtggatggggatggaagatgatgctcctatcctccctgcctgaaacctgttctaccaattatagatcaaatgccctaaaatgtagtgacccgtgaaaaggacaaataaagcaatgaatacatt

SEQ ID NO: 417 - DNA, 5063 bp, Homo sapiens
acagaatgtagccacctttcttaacggtccgggaaaccagaggtctctccagctactcagggagcaccgcgcgcggccctgcccccggcacggcccccaggtgcgctccttctccggctgcttgtagcactggtctcactgtccccgccgtcagccaccggttccttatccgtctcattccccattgtggcttggctgagccggtcgccaggcctcgctgtcctcctttgccttcctctctcctcagcggccgtactttgcgccgtacctcacctggcctgcaggtgagcagcagcgcagcacccctgcccggcgagcttaacttgcccagcccggcccctgccggagtggcaccggcacctctccaagacgccctcttccctgcaggatgaagaaccccatgctggaggtggtgtctttactactggagaagctgctcctcatctccaacttcacgctctttagttcgggcgccgcgggcgaagacaaagggaggaacagtttttatgaaaccagctctttccaccgaggcgacgtgctggaggtgccccggacccacctgacccactatggcatctacctaggagacaaccgtgttgcccacatgatgcccgacatcctgttggccctgacagacgacatggggcgcacgcagaaggtggtctccaacaagcgtctcatcctgggcgttattgtcaaagtggccagcatccgcgtggacacagtggaggacttcgcctacggagctaacatcctggtcaatcacctggacgagtccctccagaaaaaggcactgctcaacgaggaggtggcgcggagggctgaaaagctgctgggctttaccccctacagcctgctgtggaacaactgcgagcacttcgtgacctactgcagatatggcaccccgatcagtccccagtccgacaagttttgtgagactgtgaagataattattcgtgatcagagaagtgttcttgcttcagcagtcttgggattggcgtctatagtctgtacgggcttggtatcatacactacccttcctgcaatttttattccattcttcctatggatggctggctaacttcatacccccatgtcagtgtgtgtattctgtatgtaaatatgtttatatttatagagcatcaatcaatataagcattattgagaaaaatgtgacccgtaacactgtgttctggataaaaatgtgattaggaatcacgcaaagtgcttactgtgtaagcccaagaacaaaggctttctgaatcttctcaggcagttcagatttaaagcaccatccaaaccttggaaatacgacagggtgtggtagaattcagcaatatgagaaaaccagcccctaaaatgatagccacaagagattaattgtgtttttttttctcctgtaatccttgtactgttcggctgaatttgaagattggaagacttatattgagaccagtaactttactgtaaatttactttgtttcattgaaaaaacaaattgataaacatattaaactggaagaattttctttattcaaatgaaaacatgtttgatgactggtcaaaaaataagctcataatctatttttttcatgtagtatataagtcaagaatgttttattgtcattatgtgaaaccaatattggcaaatagtactttaatgatgaagtaaatgaccagaaattatagaaatctgtgttttcctgtaaaaatagcactatagtatcacttgaacaatttgatttggctttacttactaggaagcctggaattcattatttttttccttttatgtgccactgtggctactttaaatcactctgagaggtaaatggatataggattgaagttatgtgggtatttggcatgtgtgtgtgaaataaatatgtagatagtcacatatacacagactgagagataaattgttcttgattgctttattatcatcatactagtgtgttcattatagagtatctgtagaggtgaatgtaaaagtaagtccaatctattttcttatgtcattgaatttgtagtgttaacttgcatatatgttattggatgggttgtcttttaaagcatttactaatgtactctgaaatttttaaaagccttcagatttgttttctagtcacttttttccatatcatttctaattatagtttatatccttaaaagaaggatgccacagtagtatgtaaaacccaaacaagtagaacccaagcaaataaaattatttaaaataattttaaagtggcttagtactgccagtcatgtaaattgattctgctgagggtcttataagaattgagatataacaatggtaaaacaagcattcaagcacttttacaaaattaccaaattcttaaaatgaagccacagctagacttgcatttcaggtattaaaattgctttcttaactgtcaagaatcacaaaataacaaatcatattatgagtgaatatggggagggcggggccaatcagtcaatgataatctgaacaaattttaagagcagattttagattaataatgttttatcaccactaatttgcccacaacaaactcagtatttaatttttcaaattaaatattaaattatttaagtattttaaataattaaaacattaaatggcaacaccatagaatataggtgttctctggacctattctaaccacttaaaattatcttaagtatgcatacataaaagcaaccactatgagaactaccgtgttagtggtttttcacttactgtatattacccttgtaggaatagtttaaggaaattcatttcttaaaaatatagtgtcctcaaataattaatttttttgcaaactttagttattacaggcagcaaaaaccactgtctgaaactaaatctgtgttcaaagatgaagacccctcattaaaagccaaggacgttcttaagattggaactgacataattagtcttgacttacttcattaaagcaagattcaattccttgttcatttgagtgttcattatatgccaggcattgaccagttgcaattttatggtccagaattaatattattattcgtaaactagctataatagagtatatacagtgctgtgggaatacaggggaagaagcaattaaatctgctagaagggtaagagaaatctgtatgcaggaggcaatgctagcattaagccaagaaatagtgtgaggtgatcttatcacactgatgtgttcaactgtttatgggaaaaggaaactaggatggttttatttgtgaaatgttctacaacgctagaactgttgaacttcttgggagaaaaggagaatctttgttttgttgtgctgagtttgattagttgcttaaccaagtagaaagaaaagcacatcttcctgatcacagttataaaagaaaccctgaggccgggcgcggtggctcaagcctgtaaccccagcactttgggaggccaaggagggaggatcacaaggtcaggagatcgagaccatcctggctaacacggtgaaaccccatctctactaaaaatacaaaattagctgggcgtggtggccggcgcctgtagtcccagctactcatgaggttgaggcaggagaatggcgtgaaccgaggaggcggagcttgcagtgagtggaaattgcgccactgcactccagcctgggcaacaaagtgagactccatctcaaaaaaaaaaaaaaaaaaaaaaaaaaaaaaagaagaagaaaccctgagccattaatgtgtctcgtaacttgaggaagttcatgaattctctgggcttcatccattaagattcatccttatgctcctgcaagtttcttatatttatgtatttctattctgatttctgaaatgataacctagtagtgtctgatgaagttttttcatgcttattttattctttgtcacagatgaaagaagaataggactaattggggctaagatgaattaatgtaagtgtcagatactaggcaggtgttagggatgaaatgatgaatgaggcatggacctgttcctcagagtttatggcccagtagacataattgtattaggactttctgcagttgacatttgcataaagctgactgactgaaggaacagaaagtgagacagacagatatgaccaaatttatacaaaccatgtaccaacacttgaaagatgggtggatattttccaggaaacagattttgggcaggacattccatgcactggaaatagcatgaacaaatgcatgaaaattgcctacaacatgcctggcacatagctgtgaggtaccctatgagttgttgacttgaaaacatggaactgcacagggcattcaggcaagtgcaagtggttcaggggccagcgcagagcagagtgctgagtaaagatgtcagaaaaggaaagcaatggtctggtacaagtcttgtatagaacaagaagtttagacttttgaacaggcaatcgagatttggggttcagaaagataaatcccaaaagtatggagaacaaaggaactcattttaaaggactagctaagatgctcaatctctaaaaaaaaaaggatctgtattcgtgagagtagagagaaaggttgtttaggaagagtcaacagactttagcaaaatccttttatttgattcatgcataactcctgatggagtgtcaaggaagactcattcacttttctttcctgccagaaagttggttcttgcaaaatagattaacttgatgactatgtgtatattggatactcctaattttagctctgttagatatgtttctttctaaggacaagcaactatgtatagacttgttgtttgaattttttttcagtatatatatgtttcttgtttttctatttttctacttcatactgttaatgtcaaatatcaaaaatgttttccagcaatatcaagttatggcaatggcaaaagtccttgttgtagatgagaagcatataagaaatggttgccaatctttgttttgtatgatctatttagagttttaaccaacctagatctgtcagctaagctaattttatatttggtatacatgcatgtcaaataaagttaattttacatac

SEQ ID NO: 418 - DNA, 2891 bp, Homo sapiens
gctcccttctcaaagcagagccctgaagacttcaatgatgtcaatgaggccacctgtttgtgatgtgcaggcacagaagaaaggcacagctccccatcagtttcatggaaaataactcagtgcctgctgggaaccagctgctggagatccctacagagagcttccactgggggcaacccttccaggaaggagttggggagagagaaccctcactgtggggaatgctgataaaccagtcacacagctgctctattctcacacaaatctaccccttgcgtggctggaactgacgtttccctggaggtgtccagaaagctgatgtaacacagagcctataaaagctgtcggtccttaaggctgcccagcgccttgccaaaatggagcttgtaagaaggctcatgccattgaccctcttaattctctcctgtttggcggagctgacaatggcggaggctgaaggcaatgcaagctgcacagtcagtctagggggtgccaatatggcagagacccacaaagccatgatcctgcaactcaatcccagtgagaactgcacctggacaatagaaagaccagaaaacaaaagcatcagaattatcttttcctatgtccagcttgatccagatggaagctgtgaaagtgaaaacattaaagtctttgacggaacctccagcaatgggcctctgctagggcaagtctgcagtaaaaacgactatgttcctgtatttgaatcatcatccagtacattgacgtttcaaatagttactgactcagcaagaattcaaagaactgtctttgtcttctactacttcttctctcctaacatctcttactggggaaaggagagaccaagggctgcttcatgaaggctgtttctgagctgagctttgaacaatagcatgacgagggtaggtggaggtgggagtcagggaagaggactcacctctgctggagctgacagctgaggagtcatgggaagaaagggaggatagaacagaaggccatgaagtagtggcggatgagactggaaagctgagctggtgagagtgaggaagagccttcaagggagggtgtgactttattttctatggcgcaattcaggtaatgggagtctctccagatgcaacacatgttacagcacaactttaatatgattcgtttggcaatagtataaagattccctctctgccctgcaccagtggacagaaatttcaatgataaaaaaggatgaaaacctcaatatgtgacccatgggaaagatagagatggaatcatactcaggagagatgtgttaagctcaatgcacaacacagaaattaaaagcagtctctattttgatgttcattcttgaccaccttcacatccatttcagctattccaaactgtggcggttacctggataccttggaaggatccttcaccagccccaattacccaaagccgcatcctgagctggcttattgtgtgtggcacatacaagtggagaaagattacaagataaaactaaacttcaaagagattttaggccctcattctctagcctagaaatagacaaacagtgcaaatttgattttcttgccatctatgatggcccctccaccaactctggcctgattggacaagtctgtggccgtgtgactcccaccttcgaatcgtcatcaaactctctgactgtcgtgttgtctacagattatgccaattcttaccggggattttctgcttcctacacctcaatttatgcagaaaacatcaacactacatctttaacttgctcttctgacaggatgagagttattataagcaaatcctacctagaggcttttaactctaatgggaataacttgcaactaaaagacccaacttgcagaccaaaattatcaaatgttgtggaattttctgtccctcttaatggatgtggtacaatcagaaaggtagaagatcagtcaattacttacaccaatataatcaccttttctgcatcctcaacttctgaagtgatcacccgtcagaaacaactccagattattgtgaagtgtgaaatgggacataattctacagtggagataatatacataacagaagatgatgtaatacaaagtcaaaatgcactgggcaaatataacaccagcatggctctttttgaatccaattcatttgaaaagactatacttgaatcaccatattatgtggatttgaaccaaactctttttgttcaagttagtctgcacacctcagatccaaatttggtggtgtttcttgatacctgtagagcctctcccacctctgactttgcatctccaacctacgacctaatcaagagtggatgtagtcgagatgaaacttgtaaggtgtatcccttatttggacactatgggagattccagtttaatgcctttaaattcttgagaagtatgagctctgtgtatctgcagtgtaaagttttgatatgtgatagcagtgaccaccagtctcgctgcaatcaaggttgtgtctccagaagcaaacgagacatttcttcatataaatggaaaacagattccatcataggacccattcgtctgaaaagggatcgaagtgcaagtggcaattcaggatttcagcatgaaacacatgcggaagaaactccaaaccagcctttcaacagtgtgcatctgttttccttcatggttctagctctgaatgtggtgactgtagcgacaatcacagtgaggcattttgtaaatcaacgggcagactacaaataccagaagctgcagaactattaactaacaggtccaaccctaagtgagacatgtttctccaggatgccaaaggaaatgctacctcgtggctacacatattatgaataaatgaggaagggcctgaaagtgacacacaggcctgcatgtcactgt

SEQ ID NO: 419 - DNA, 4690 bp, Homo sapiens
ccctgtgccagccggctgtcgacccaggttaggaagcccgaggtcggggcgttaccccaagggccctcccgcttcccctccgagggcagagaggcgtccgcgcccggacgcactgcgggaacacctggagcgccggcggagctcggctgtccccgcgggagggagcccgacgcgcatccttgggacccggacccggcgcccgcgcctcgggacggatttctgcctcggctgcaggcgcagcgcgcagacctgagcctgccccgcggaaccggggctcgagtcccggcccgagcgcggcgtcggggccagcggagaggggcggaagccgcaagggaccctcggcgcctcggcctggccgcgatgaagtccccgcccctcctcagcccgtgtctctcctggaagagaatggcgggcatctttttcctgccatttatctcatcaggttttgctcctcggtttaagcaggaagagaacttcatgcttggaagagcgcatccgtcccagcctaggtttaattggtctcatctgacccctctggagctgaagaatcgatctgtgggacttggaactgaaagcacaggtcggggtaagccccacttcacactggagggccacaagttcctgatcttcgggggctccatccactatttccgggtgcccagggagtactggagggaccgcctgctgaagctgaaggcctgtggcttcaatactgtcaccacctatgttccgtggaacctgcatgagccagaaagaggcaaatttgacttctctgggaacctggacctggaggccttcgtcctgatggccgcagagatcgggctgtgggtgattctgcgtccaggccgctacatctgcagtgagatggacctcgggggcttgcccagctggctcctgcaagacccccggttactgttgaggacaaccaacaagagcttcattgaagcagttgagaagtattttgaccacctgattcccagagtgattcctctccagcgccaccgcactccagcctgggcgccagagtgagactccgtctcgaaaaaaaacaaaaacccagaaagactgaatatttggatggaagttttaccagaagcacaaatgccgttcacaggcacatgtatgcaacgaggaaagctaatttacaggcatcccattgaactgtgggaaatgctaggaaacttttaagaagcaaggaattataaggtaccgccaggcaggccctgtcatcgcggtgcaagtggagaatgagtatggctcattcaataaggataaaacatacatgccgtatctccacaaggccctgctgagaagagggattgtggagcttctcttgacctctgatggtgagaaacatgtgctgagtggccacaccaaaggaggtacacatttagagttagttcacaggagaacagtgttggccgccatcaatttgcaaaaacttcaccaggatactttcaatcagcttcataaagtccagggagccagtatagatgcaggactgctctcagatgcctcacaagcagcaacttcttcctccttatagttcttatctgtgattcttccataattttgtccttctaagcttctgatgcactgaattatgtaaagtgcattcccttcaccagcttgtgcaccctattctgtaactgataataaatggttggtattgcaacttagtatttgctttggtttgtttttagagagataagccccttctgattatggaatactgggtcggctggttcgacagatggggagataagcaccatgttaaagatgcaaaggaggttgaacatgctgtgtctgaattcatcaaatatgagatctccttcaatgtatatatgttccatggtggaaccaactttggtttcatgaacggggccacatatttcgggaagcactcgggcattgtcaccagctatggcaagtgtcgctggtgtagtagcctctccagcatgggcggtgctggggctttacagaggaggctccggaagcctgttctggcaccactgggttcttgacctataatctatgctgagtactgaagattttcctatctactttccttccttctgtatgttcataatgccccaacaggctgtcattgcagtagacagggctttccgggacttagagctccgcttcacacatctggtatactgccctgttggcttgaacctctgaagagaggcagggtaggaacggtgactgctgtaaaggcacagacctgcacggccgggcgatacagactgagcaaagaaaagagtacccgttgaaggggtgtccactcttttggcttccctgggccacactggaagaagaagaattgtcttgggccacacatgaaatacactaacactaatgatagctgatgagcttaaaaaaaaaacacaaaatgttttaagaaagtttatgaatttgtgttgggctgcattcaaagccatcctgggccgcctgtagcccatgagctgtgggttgaacaagtttgcattagaaagtgaagaagtgggggcaagcccagtgtcatggcttgacactggaagccagtggaaggtgcccaggaagagttgtggggaatgtccttagactggcatcacacacccacgtgggatggaaggtgtcttccttttgtctcactcacggtggccctggccatctcctgccagcggtgctgaaacagggcctcctgcagagactgcatggctggtgactggccctggtgtcttgcagactatgatgcagtgctcacggaggctggagattacacagaaaaatatctgaagcttcaaaaactctttcaatctgtctcaggtactcagcacccatttaacttacgggccagccctcctcatgtggagtctctgttctgtggaaaagtgaggaaggcgtgggtctcccttgtgggcagcagttacaccaagctcctgagaacaagggcaaccttaacttcgaaccctggggttaaaatctgtgtgattttttaaaatcagggtttctaagcattttataagcctcagtttcttcactgaagcataaagatagtaaccttggtctcctgtgatgactgcgaagattgagttactctttgtaaagctcttataccatggatgacatagtaacccccaatatgaaaggaaaagccatgctggataggcatggggggcttagagaaggcagtggtcatctcaggcactttttgccctgtgccccatctccattgcagcaactcccctgccccgagtacccaaacttcctcccaaggctgtgtatccccccgtgagaccgtcgctgtacctcccgctgtgggacgccctatcctacttaaatgagccagtcaggtcgcgtcagcccgtcaacatggagaaccttcccataaacaatgggagcggccagtcctacgggcttgtcctgtatgagaagtccatctgctccggaggccgcctccgtgcccacgctcatgacgtggcacaggtagggccagcaggctgtctgtgtgggaagcaaagtgtttttggatgagacaatgatagggattctgaatgagaataataaggacctgcacattcctgaactcaggctgcgtggtctccatgacctggcctgtcccagcaggactgccgatacctgaggatcctggtggagaatcaaggacgagtcaatttttcatggcaaatacagaatgagcagaaaggaataactggatctgtcagcatcaataactcttccctggagggctttaccatctattccctggagatgaaaatgagcttctttgagaggctccgctctgccacctggaagcctgtcccagacagccaccagggcccggccttctactgtgggaccttgaaggctggcccttctcccaaggacaccttcctgagcctgctgaactggaattatggatttgtgttcatcaatggacgtaaccttgggcgatattggaatattgggcctcagaaaacactgtaccttcctggagtttggcttcatccagaagacaatgaggtcatcttgtttgagaagatgatgagtggctcagatatcaaatctacagacaagcccacgctgtaaaactgtgtctgaacatttttttttttttttgagatggagtctcactttgtcgcccaggctggagtgcagtggcacaatctctgctcactgcaagctcagcctctcgggttcacgccattctcctgcctcagcctccccagcagctgggactacaggtgcacgccaccacgcctggctaattttttgtatttttagtagagatggggtttcaccaagttagccaggatggtcccaatctcctgaccttgtgatctgctctcctcagcctcccaaagtactgggattacaggcgtgagccaccactcccggccgtgaacatattttttgggttgctggagttcatctataagtcatttttgaggaataagatttatgttaagactatcaaacacagtgttgcctacaatagcaaaaatgtgaaaataacaacaacaacaaaacagcagaggaattgttatgtattttgtagtctatctatatgatgcctatttttaggctttaaaaagtcttcaaaatctttaatgactgatttatctagttaaatgcttaatccttagcaggctcttattctttaattaaacgtgcctttgagtagatgtgaataaaataaaaa

SEQ ID NO: 420 - DNA, 3390 bp, Homo sapiens
agaaggggaaacaggaatcgattaggaataaaggattataatccactttccttctgaggaaaagctgggaaccttctcattttgccttatgaaaactaagctgaatcgactgctgccaaacatctattaggcaaaattggcctcttgcccatgatttgactttccagcacagccagttctttttctcctctgcagctgattggctctggagtgtggccagaagcctctctcctgcaattaaaggagtcgggtctctaactgttgatctgtttttttcccttctgagcaatggagcttaccatctttatcctgagactggccatttacatcctgacatttcccttgtacctgctgaactttctgggcttgtggagctggatatgcaaaaaatggttcccctacttcttggtgaggttcactgtgatatacaacgaacagatggcaagcaagaagcgggagctcttcagtaacctgcaggagtttgcgggcccctccgggaaactctccctgctggaagtgggctgtggcacgggggccaacttcaagttctacccacctgggtgcagggtgacctgtattgaccccaaccccaactttgagaagtttttgatcaagagcattgcagagaaccgacacctgcagtttgagcgctttgtggtagctgccggggagaacatgcaccaggtggctgatggctctgtggatgtggtggtctgcaccctggtgctgtgctctgtgaagaaccaggagcggattctccgcgaggtgtgcagagtgctgagaccgggaggggctttctatttcatggagcatgtggcagctgagtgttcgacttggaattacttctggcaacaagtcctggatcctgcctggcaccttctgtttgatgggtgcaacctgaccagagagagctggaaggccctggagcgggccagcttctctaagctgaagctgcagcacatccaggccccactgtcctgggagttggtgcgccctcatatctatggatatgctgtgaaatagtgtgagctggcagttaagagctgaatggctcaaagaatttaaagcttcagttttacatttaaaatgctaagtgggagaagagaaaccttttttttggggggcggtttttttggtttgttgttggttttttttttttttttggcgggaagaaagagttttgctcttgttgcccaggctggagtgcaatgacgtgatctccgctcactgcaacctccacctcgcgggtttaagcgattcttctgcctcagcctccctagtagctgggattacaggtgcccaccaccatgcccagctaatttgtatttttagttgagacagggtttcactacgttggccaggctggtcttgaactcctgatctcaggcaatccacccacctcagcctcccaaagtgctgggatgacaggcgtgagcaaccgcacccagcttaaggtttttttgttttgttttgagacggagttttcgctcttgttgcccaggctggagtgcaatgctgtgatctcagcttaccacaacctccacctcccgggttcaagtgattcacctgcctcagcctcctgagtagctggtattacaggcatgcgtcaccacgccggctaattttgtacttttagtagagatggtgtttccccacgttggtcagtctggtctcaaattcctgacctcaggtgatctgcctgcctcggcctcccaaagtgctgtgattacagacgtcagccaccatgcctggcctgaaaccttttttaggtaaagttgaattccatccttaaaagtttctgttatatcctatttagccattttctattgtctcccaaagaattcacatcaaaaaaacagctttgaactcccccttcaaaggaaacagtcgactttcataattagcatctaccattatccccaaatcttattttattcattgacttgaaattttttccaattgcttttttttttttttttttaaggttaagagcagaggtttactaggccaaagaaagagaatagctctctgttgcagagaggggtcctggagaaatgggttaccccagttgtcttatttaaatggttacccatcagattttaattttatcttctctttgagagcttggtaataagaagcacttaaatcactccaaagaagactttaaaaagggagcagtgaaaaggtcttaataatttattgattgaattaagaaatactagctaattaagaatctgagtctaaacagcacagattttttctttctgcttttaaattgtgttttaaaaaaagagacagggggctgggcgtggtggctcacgcctgtaatcctagcactttgggaggccgaggcgggtggatcacgaggtaggagttaaagaccagcctggccaacatggcaaaaccctactaaagatacaaaaaaaaaaaaaaattagccaggcgtggtggtgggtgcctgtaatcccaggtacttggaaggctgaggcaggagaatctcttgaacccagaaggcgaaggttgcagtgaaccgagatcatgccattgtactctagcctgggtgacaagagcaagactccgtctcaaaaaaaaaaaaaaaaaaaaaaagaagtagagacagggagacagggtctcactgtgttgcctaggccggtcttgaactcctgggctcaagtgattctcccaccttgacctcctaaattgttgggattacaggtgtgagacagtgcacctggccgaaatagctcaagtttctgaaaaacaaatctgaatctatttgttattcttagcgtcactggtctggctttcagaattaacatacaaggttgccacacctagttctgcccagctttatgtcttttattccagtattccaccaaagtttgttttcctgcattccagttctcaagtcttaagataaagattgtacttgacagtttagtatatccataaaactatttgaggtggttaaggttcttgggttcattttccttaatactttgctgaatattgtagattgtaggcaatgaaaaagtctactaaattaggaaaaccttgaataattaggtatcctaggtaagagcccctaaacatcaagcaatctgtgagtctgtaaagaaataaatattttttggattattcttatctaattccacccctgttggaagatgatttctttgttctttgcaactatggaagctgtgaaaatcatcacaagtgcctctgaaagcgagtgttaggttggttagagggtttaatattttctgcaatggtttgtaggaattttaataaatgtagtatattttctgagatgattttgtaaaagtactattttaaatatcaaatcaaccaataaattcacatttgtgttaggaacagaaatatggttta

SEQ ID NO: 421 - DNA, 3768 bp, Homo sapiens
attcaacaggaggaacccgcgggagaggagccccactcccccagcgccgcagccaccgcagccaccgcagcccgtgcgccccgcgccctcgagcgccatggccaaggaaggcgtggagaaggcggaggagacggagcaaatgatcgagaaggaggcaggcaaggagccggcggagggcggcggcggcgacggctcgcaccgcctcggggacgcccaggagatgcgcgcggtggtgctggctggcttcggggggctcaacaagctgcggctcttcaggaaggccatgcccgagcctcaggacggcgagctcaagatccgcgtcaaagcctgtggattaaacttcattgacttgatggtgcgacaagggaatattgacaaccctcccaagactcccctggtgccaggatttgagtgttctgggattgttgaagctctgggggacagcgtgaaaggatatgagattggagaccgtgtcatggcatttgtcaattacaatgcctgggcagaggtggtctgcacaccagtggagtttgtctacaagatcccggatgacatgagcttctccgaggctgctgcattccccatgaacttcgtcacagcctatgtgatgctgtttgaagttgccaacctccgggaagggatgtctgtgctcgtgcactcagctggtgggggcgtgggtcaagctgtggctcagctgtgttccactgtccccaacgtgactgtctttggaacagcctctactttcaagcatgaagcaatcaaagactctgtgacccacctctttgacagaaatgcagactacgtgcaagaagttaaaagaatctctgctgaaggtgtggacatcgttttggattgcctctgtggggacaacactggaaaaggtctcagtcttctcaaacccctgggaacctacattttatatggctcatccaacatggtaactggagagaccaagagcttcttcagctttgcaaaatcatggtggcaggtggagaaggtgaaccccatcaagctgtatgaggagaacaaagtcatcgcggggttttcccttttaaatctgctcttcaaacaaggccgggcgggcctcattcggggagtggtggaaaaactcatagggctctacaaccagaagaagatcaagcctgtggtggactccttgtgggctctggaggaggtgaaggaggccatgcagcggattcacgaccgagggaacattggcaagttaattctggatgtagaaaagaccccaactccactgatggccaatgacagcacagagaccagtgaagcaggggaagaggaggaggaccacgagggagacagcgagaacaaggagcggatgccctttatccagtaactgaggacccaggtgggagaatgtgaaggatggtttggaagatgaggacccggctgagaaaactcttctgtgccccagtgaacaaatgctgtagtccagtgcgtgtcgtgtttgtctgcagtcagctgagctaaaaagctgttgatcactgttgttttttgaagtgccaatcccatgccatgcagtattatgtccctctcctatctgtgtattacacattcccctctcccctgtatcaaaaccatccatctgtgggttcttcttgacagttctagaacagccttgcaaattaatacaagtcccaggcccaatgcctaagagaccagacgtgggcaaagacaagtttggatggaaaggtgttatcacagagccctgtccagctcctagaattcctcaggccagtgacacttttttgctgctggccacccatgcctctgatgagaacacttgccaatttggccagcagaaagagagtaggccggatgttttcatgagcccacaaatttagaaactctcctagtagtactttttctctctccatttaagagacaactacggtcaaaagtttgagccattctcttctaccccttcagtgtctgaccctttcactggctcttatctgtaaacacagggaggcaggtatggatttttcacagtagacaatgggtcaacagcatgagtttgaggacctgctgtgaagatttctcctccaaaatacatctcatgggcaggattcttcctgctccatatctgtttcaattttaagaaagcaccacatacaagacacattcagaagtcattcctgagcattgctggtgtttgcacacttgccacctgcattaccaattctgtaaatttcaattcctggtggaaagtgaccactttgaccatggatttcccaaagaagagttcctttgcagaccataggtggaaaagtcaatgagcatctccttccttgccaaagcatgtcccaacatgtaacaaactctagggatacaaaaggtttatattcagcatctgatgtcagatgtacagttcctcccctcccatatataaaccccggtgtagaatctgcagcgccctgctcttcggaaaccaaggaacaagccacctgctcacacaccttgttcaacttttcagctcctaaggaaccccacccccatgcaatttgactgtgcttgagaggtgaatacagttaccttcgagaaacagagggagctcctcaccccgtccttccagtccttttggctaaaatgcttaactatcactcacaaacaaatgtggagataccaggagctcatttgattcataccccaactttgtgttctgaaaaacatcagagggattttacattgcccagtttctccaccaacaagccttagggtggacccaaccctttccgcaagtggtaggaacgaatgcatcttagcaattacctgatttccaaagtccttttgtagcaaatgtcacctcattcgtggtctttttacctatcctaagcttatgatgatgagttatgtatgccaaatacttatctgaagagtttctcctcattgtgaatgtgtatgtaaaatatgaagacaagaaagggtgctttcatctgaggaaccaaggggtgagagtatcccaaaggaggacaccagcatcatcttttcttcgtactccaggacccaccaatattccagttctgggtcatttagagagataatggggcgtttattcccctattacctttgctaagtgctatattattggctgtttctcccgtaaccatgctgaaaagggggtcttagggagaactgtcatccaagtggcattcctagtaagttgggtagaaatgacattttccagagctgaaggagtgaagagcccttggccatactagggctctccttcccccggggagtgggaactcagccacattcagaattcacatcgcctttgttatgtccagaggagaggcataaaaaggcactctcccccaccacccctaccaaatctgggtttggtttggttttatttaactagcaaagttaatccagtaatcgcaaattactccagatggttaaagaaaaccctttcagaatacagaacgagaaaactagagtttgaccaataagaccaatttctgccatgaagaaccgggggacgcaagttaattgtttaacgtactctcattttaagcaccttctttcctgtctcttgattgttttttctgaaggaagtgtaaagaatgtctcagtctgccttaaaggaactgtgaaggcttctctgtaatttaagcttgatagaagtgaactgaaacattgtctaatgtctttgtggctttagagcttttgttatattgtgcctataaagcaaattatgtttacataaaaatataaataaagtattcagcatagcaaaacctc

SEQ ID NO: 422 - DNA, 11887 bp, Homo sapiens
gcggccgccaggtgctcctggagtgcagcgcctatcgccggggcgtgtgggggccacaccgagcaccagcttctccgacgccgggaagccgctgtcgccgccgctacctctccctgttgccgccgcctcagatctcttcatgccgctgtaagctcggaggccaaggatgcggagtaggcttcccccagcgcttgccgccctgggcgcggccctgctcctgtcttccattgaggcagaagttgacccaccttcagacttgaattttaaaattatagatgaaaatactgttcatatgtcatgggcaaaaccagttgatccaattgtgggttacagaataacggtggaccctacaacggatgggcctactaaagaatttaccctttcagctagtaccactgaaactttattgtcagaacttgtacctgaaacagagtatgtggtgacaataacttcatatgatgaagtagaagaaagtgtaccagttataggacaactaacaattcaaacaggtagttcgacaaagccagtggagaagaaacctggaaaaaccgagatacaaaaatgctctgtcagtgcctggactgatttggttttcctcgtggatggctcttggagtgtgggaagaaataatttcaagtacattttagacttcattgctgctcttgtgtctgcttttgacattggggaagagaagacaagagttggagttgttcaatacagctctgataccaggactgaatttaacttaaatcagtactaccaaagggatgaacttcttgctgcaataaaaaaaattccatataaaggtggcaacacaatgacaggggatgccattgattatttagttaaaaatactttcacggaatctgctggggcaagagttggctttcctaaagtggcaattattattacggatggaaaatcccaggatgaagtggaaattccagcaagagagcttcgtaatgttggagttgaagttttctccttgggcattaaagctgcagatgcaaaagaactcaaacaaattgcctccacaccttcactgaaccatgttttcaatgtggccaactttgatgcaattgtggatattcagaatgagatcatctcccaggtgtgctcaggtgttgatgaacaacttggtgaattggttagtggagaagaagttgttgagcctccttcaaatttgattgccatggaagtctcttcaaaatatgttaagctaaattggaatccatctcctagtccagtgactggctacaaagtcatcctcacaccaatgactgcaggaagccgacagcacgctctgagtgtggggcctcagacaaccacgctcagtgttcgcgacctctcagcagacacagaataccagatcagtgtttccgccatgaagggaatgacatccagtgaacccatttcaataatggagaagactcagccaatgaaagttcaagtggaatgctcacgtggtgtggatataaaagccgatattgtgtttttggttgatggctcctatagcattgggattgcaaactttgttaaagttagagcctttttggaagttcttgtaaaaagttttgaaatttcaccaaatagggtccagattagtcttgtgcaatacagccgggatcctcatactgagttcactttgaaaaaattcaccaaagttgaagatataattgaagcaataaacaccttcccttacagaggaggatctacaaatactggcaaagcaatgacttatgtcagagagaaaatatttgtgcctagcaagggatcaagaagcaatgtgccaaaggtcatgattcttatcacggatgggaaatcatcagatgctttcagagatcctgcgataaaactgaggaattcagatgttgaaatctttgcagttggtgtgaaggatgccgttcgctcagaattggaagctattgcctctcctcctgcagagacccatgtgttcacagtggaagattttgatgcttttcagaggatatcttttgaactcacacagtctatctgccttagaattgagcaagaattggcagctataaagaagaaagcttacgtccctccaaaggatcttagtttttcagaagtgacttcttatggtttcaaaaccaactggtctccagctggagaaaatgttttttcatatcacatcacctacaaggaagcggctggggatgatgaggtcactgtggtggagccagcatcgagcaccagtgttgttctcagcagcctgaagccagagaccttgtatttggtcaatgtgactgcggagtatgaggatggcttcagcattcccttagctggagaggagaccaccgaagaagtaaaaggagcacctcgaaacctaaaggtgacagatgagactacagatagtttcaaaattacttggactcaagctccagggagagttttaagatatcgaattatatatagaccagttgctggtggagagagcagagaagttaccaccccacccaatcagaggaggagaacactggagaacttgattccagacacgaaatatgaagtatctgtaattcctgaatatttctcaggacctggtactccattaactggaaatgcagccactgaagaagttagagggaatccaagagacttaagagtttctgaccctacgacgtctactatgaaattatcttggagtggggcaccaggaaaagtgaaacagtatctcgtcacatataccccagtggcagggggtgaaactcaagaggtcactgtgaggggagatacaaccaatacggtgctgcagggattgaaggaagggacacaatacgccttatctgtgacagccttgtatgcgtctggggctggagacgccctctttggtgaaggaacaacacttgaagaacgtggttctcctcaagatttagttactaaagacatcactgacacatcaattggggcttattggacatctgctccaggaatggttcgcggttacagggtctcatggaaatcactttatgatgatgttgacactggagagaaaaatctgcctgaagatgcaattcatacgatgatagaaaatctgcagccagagaccaaatacagaatttcagtatttgccacttacagcagtggagaaggagaacctttgactggagatgccacaactgaattatctcaagattccaaaaccctgaaagtagatgaagaaacagaaaacacaatgagagttacatggaaaccagcaccagggaaagtcgtcaactaccgtgttgtctatcgccctcatgggagagggaagcaaatggttgctaaggtgccccccacagtcacttcgacagtgttaaagcgacttcagccacagaccacatatgacatcacagttcttcctatttacaagatgggagaaggaaagcttaggcaaggatcaggaacaacagcttctcggtttaagtctcctagaaacctcaaaacatctgacccaaccatgtcaagcttccgagtgacttgggagcctgcccctggggaagtgaagggttataaagtcacattccaccctacgggggatgacagaagactgggggagttagtggttggaccctatgacaacacagttgttttggaggaacttagggctggtaccacctataaagtaaatgtttttggaatgtttgatggaggagaaagctcaccacttgttggacaagaaatgacaaccctttccgacacaactgttatgccaattttatcttctgggatggagtgtctcaccagagctgaggcagacattgtgttgctggtggatggatcatggagcatcggccgggcaaattttagaaccgtgaggagtttcatttctcgtattgtggaagtctttgacattggccccaaaagagtacaaattgctcttgctcagtatagtggggatcccagaacagagtggcagttaaatgcacacagagacaagaagagcttgttgcaagctgtggcaaacttgccgtacaaaggaggcaatactctcacaggcatggctttgaatttcattcgccaacagaacttcaggacccaagctggcatgagacctcgagctcgaaaaattggtgtgctcattactgatggaaaatcacaagacgatgttgaagcaccttcaaagaaactcaaggatgagggagtggagctgtttgctattggtattaaaaatgctgatgaagtcgaattaaagatgattgcaactgatcctgatgatacccatgcatacaatgtggcagattttgagtcactctccaggatagtggatgatctcaccattaatttgtgtaacagtgtcaaaggtccaggtgatttggaagcaccttctaacttagttatttctgagcgaacccatcgttcttttagagtgagctggacaccaccttctgacagtgtggatcgatataaggtggaatactatccagtttctggagggaaacgtcaagaattttatgtgagtcgaatggaaactagcacagtgctgaaagatctgaaacctgaaactgaatatgttgtcaatgtgtattctgtggtagaagatgaatatagtgagcctctgaaggggacagaaaaaaccttgccagtgcctgtagtcagcctgaatatttatgatgttggccctaccaccatgcatgtgcagtggcagcctgtgggaggagctactggctacatcttgtcatacaaacctgttaaggacacagagccaacaagacccaaagaggtgcgtttggggccaacagtgaatgacatgcagctgactgaccttgttcccaacacggagtatgcagtcacagtccaggctgtcctgcacgacctcactagtgaacctgtcactgttcgggaagtcaccttgcctttacccagacctcaggatctgaaactcagagatgtgactcacagcactatgaatgtcttttgggaacctgtgcctggaaaagtgcgtaaatatattgttcgatacaaaacaccagaagaggatgtcaaagaggtaggtagaggtggacagatcagagaccagcacttccctcaaagacctcttctcacagaccttgtacacagtcagcgtttctgcagtacatgacgagggggagtctcctccagtgactgctcaagaaactacccgacccgtgccagccccaacaaacttaaagattactgaagtaacatcagagggtttcagagggacttgggatcatggagcttcagatgtgtctctctacagaataacttgggcaccttttggaagctcagataagatggagaccatcttaaatggagatgaaaacactttggtgttcgaaaacctgaaccccaacaccatctatgaagtttccattactgccatctatcctgatgagtcagaaagtgatgacctgattggcagtgagcgcacactgcctatcttaacaacacaagctcccaaaagtggcccacgaaaccttcaagtgtacaatgcaacatctaacagcctgactgttaagtgggatcctgctagtggtcgtgtgcagaaatataggatcacttatcagccttccacaggggaaggcaatgagcaaacgaccacaataggaggacggcagaacagtgtggtcctgcagaaactgaagccagacactccttacactatcaccgtatcctctctgtatcctgatggtgaaggaggtcggatgacgggaagaggcaagaccaaacctctaaacactgtaaggaacctgagagtgtatgacccttctaccagcaccttgaatgtccgctgggaccatgcagagggaaatcctcgtcagtacaagctcttctatgcaccagcagcaggtggtccagaggaactggtaccaatccccgggaataccaattatgccattcttaggaatctgcagccagatacctcatacactgtgactgtagttcccgtttatactgaaggtgatgggggacgcacatcagatactggaaggacattgatgagaggactggcaagaaatgtccaagtatacaatcctacacctaacagcctcgatgttcgctgggaccctgctccaggacctgtgctgcaatatcgcgttgtgtattctcctgtggatggcacaagaccctcagaatctatagtagtgccaggaaacacgcgcatggtgcatctggagcggctgattccggacacactctattccgtgaaccttgtggctctgtactcggatggagagggaaatcccagccctgcccagggccgaacgctaccacgcagtggaccaaggaacctgagagtctttggtgaaacaaccaatagcctctcggtagcctgggatcatgctgatgggccagttcagcagtacaggatcatctattctcccactgttggtgatccaattgatgaatataccacagtcccaggcagaagaaacaatgtaatactgcagcccctgcaacctgacactccatataaaattactgttattgctgtttatgaagatggagatggtggccatctaacaggaaatggaagaactgtgggactccttcctcctcagaacatacacatctctgacgaatggtatacaagattcagggtgtcctgggatccttcaccttctccagttcttggatataaaatagtatataagccagtgggttccaatgagcccatggaagcctttgttggagaaatgacatcatataccttacacaatctcaatcccagcaccacctacgatgtgaatgtttatgctcaatatgattctggactcagtgtccccttgacagatcaaggcactacattatatttaaatgtaacagatctgaaaacttaccagattgggtgggatacattctgtgtcaaatggtcacctcaccgggcagccacctcctacaggctaaaactaagccctgcagatggaacaaggggacaagaaattacagtgcgtggatcagaaaccagtcactgcttcactggcctttcaccagacactgattatggtgtcactgtttttgtgcagacaccaaatctcgagggaccaggagtctctgttaaagaacataccactgtgaaaccaacagaagcccctacagagccacccacacctcctccccctcccaccattccaccagcccgggatgtatgcaaaggggccaaggcagatattgtgttcttgactgatgcctcctggagcattggggacgataattttaacaaagttgtaaaattcatcttcaatactgtgggaggctttgatgaaatcagtcctgctgggattcaggtttcatttgtgcaatacagcgatgaggtcaagtctgagttcaagctgaacacgtacaatgacaaggccctagcccttggggccctccagaatattaggtacagaggaggaaacacaagaacaggcaaggccctcacgtttatcaaggagaaagtcttgacttgggagagcggcatgaggaagaatgtccctaaggtgttggttgtggtcacggacggtcggtcccaggatgaggtcaagaaggcggctttggtcatccagcagtcagttcacggttcagtgtctttgtagttggtgtggctgatgtcgactacaatgagcttgccaacattgccagcaaaccaagtgaacggcacgtgttcattgtggacgactttgaatcttttgagaagatcgaagacaatcttattacatttgtttgtgaaactgccacttcaagttgtcctctcatttatttggatggctacacctcaccaggttttaaaatgcttgaagcatacaacctgacagaaaagaattttgcttctgtacaaggagtatctttggagtcagggtctttccccagctactcagcatacaggattcagaagaatgcgtttgtgaatcagcctacagcagacctacacccaaatggactccctccttcatacacgattatattattattcagacttctcccagaaactcccagtgacccttttgcaatttggcaaatcacagacagagactacaaaccacaagttggagtgattgcagatccttctagcaagacgttatcattctttaacaaggatacaagaggcgaggtgcaaactgttacatttgacacagaagaagtaaagacattattttatggaagttttcacaaggttcatattgtagtgacctcaaaaagtgttaagatttacattgactgctatgaaattatagaaaaagacatcaaggaagctggaaatataacaactgatggttatgaaattcttggaaaactccttaaaggggaaaggaaatcagccgcattccaaatccagagttttgacattgtctgcagtccagtgtggaccagtagagacagatgctgtgatattccctctaggagagatgagggaaaatgccctgcttttccaaattcttgcacatgtacacaggacagcgttggacctccaggacctccaggccctgcaggaggacctggtgctaaaggtcccagaggtgaaagaggtatcagtggggcaattgggccccctggtcctcgtggagacataggtcctccaggcccccagggtcctccaggccctcagggacccaatggactctctattccgggagagcaaggtcgccaagggatgaaaggtgatgctggagagccaggacttccaggccgaacaggaaccccaggattacctggcccaccaggaccaatgggacctccaggagacagaggcttcactggaaaagacggtgcaatgggacccaggggcccaccagggccgccgggaagcccaggctccccaggagtcacaggaccaagtgggaagccaggaaaacctggagatcatggcagaccaggtccatctgggttgaaaggagaaaaaggtgataggggagacattgcttcccagaacatgatgcgagcagttgcaagacaagtctgtgaacaattgataagtggtcagatgaacagattcaatcagatgctgaatcagattccaaatgattaccagtccagtcgcaaccagccaggcccgccgggtccaccgggacctcctggtagcgcaggagccagaggagaacctgggcctggggggcggccaggcttcccgggcacaccagggatgcagggaccccctggggaacgaggtttgccaggagagaaaggtgaaaggggtactggatcttcaggacctcgggggctgcctggccccccaggtccacaaggagaatccagaacaggtccaccagggtccacaggttcaagaggtccccctggcccccctggccgtcctggaaactcaggtatccgaggacccccaggtcctcctggatactgtgattcttctcagtgtgccagcatcccatacaacgggcaaggctatccaggtacgttgttgccattgtaggaaccccaactcacctgaagtaaagaactttacggaaatgaagttccttaggattgaaggaaggctgatttgaagatgtcttgaagataacaactctttcagttctgattatataataatagtgtttgctatcatagcacacaacattatttcactgttaggattgaattattttcttttttccccatgtttctgcatttaccaaatcacatcataaacctccccttacttctcttgggacttcaaagcatgctagtaattgactttttttttttctttgttccggctaacacattttctaagtcgccagtgctgcttacagtttgaatacatgaaaatcctgtttctgagatgtttgcgcacgtgcttattaggaaatgagtctgtatggaaatctcaccacagataatggttaacgaaccgggtcgacatcacaaaggagggtggagactctttttactaacttgaatgagacaaaagcagtggtgtcagtttataatcctgatgcatttcagtaataatgtagaaaaacattattttaaaaaagttccaacacacagccatgaggagcctcagttttgaaagaggtgcataataaaactactaaccagaggagtctatgccattttaagaaaaacaattaacctggttaaagagaaatgtcttatgtaaataataaactaattgtggcttgtaaatgatttgtatgtgatcctgtcgactaaaatcacttaacaattctacaataagcttctgcatcaaagcctgccgcttgctctatgccggaataacaccaaatggaatctcctcatctcttgcttgttagcgatgtgtctgattcagggcatctgtctttttgttacttttttgtccgtgtcctctcatttgggttttgtaactgcaattttcaaaccaaagtttaaaatcaccttttcttcctgttttgctgtagtcactggtgttcctcacccaccagctgtaactcagtttgtgtgaggtacagccacagaagatgtcatgtactgtatattacctggtgatagttgcttttcaccccccgagttcagtttctaggagccaatgaaacttcccctcacctcctcatctttccaagttgttctttgaattgaggagtttgaaggcataaacagttacttggggatttgcgaaaatcctacttagttactgcgtttacagttctttggcccagtctctgacccttcccaagtatttgtgcaatgattgtgtttactgctggatttttgaaggtttttttttttaagaaagtgccatttcattatttgattatcaccaaattatctggaaataattgggacattgtaacttatctatttatagttatgagattaagactggagtgccatcaccgcgggtgatgatttagcttttgctgtgtgtgtgtgtgtgtgccttccaaatcatgccataattgtaatgttgaatcggacagagccttacgtgcccgagggcggggcctacctgcctgagcgcgagcccttcatcgtgccggtggagcccgagcggacagcggaatacgaggactacggcgcagacgagcctgcagaggagcctcctgagccccaccggcgctggcggcgcgccctgccccacggacccgggcagtgaaccagagatcacgcgccgcgccgcgaggcttgggggaggtgttgaaattctcatttacaggtcagatagagcagtgtacgtcttttctgaggtgtttcttccagcgttgctcatccaggagtaccctttctgattgtagagaaccttgtttctgcaggaagcctagctccaagcacgcagtctgtagacatttttgcctttgcccttgaaatgcttgcaaaatactttgttaacaaaagctgcaaagagagaacatgccgtgtgcctttagttagcacagcgggcagcctcagtgaaactcttaggttaagcagttaagtcctggaacccagagctgctgtgtatttcgagcgggcagtttatcttttgctatacttattttcaattcaattacaccacgattcaaataattcccctcctaaaaccaaaaaggagggaaacgtcaactccattgcaattacttatcttcctcttctatctctgttatacgccggggcatagaatgctcgtatacatctctttaacaaccacaaaccttaagccatgtagatgaagttagtgcatcaacgggatacagttccatattgccttaaacctccttgttttagacacactaacatttataccaaattgcagattattctgcagagagggaattgcatgtttgtgttgtatatttagtatgaacttttttcagaatataatatttcttagttatcaaaagtagttggaaaacatttgcaagactatgaacatagaattgctgcttttatattttaactgcagattgtgaatttcactgccttatattatttatttctgaaacaaaagaggcatttttcaataaaactactgaaaatttga

SEQ ID NO: 423 - DNA, 1967 bp, Homo sapiens
caggagagaaggcaccgcccccaccccgcctccaaagctaaccctcgggcttgaggggaagaggctgactgtacgttccttctactctggcaccactctccaggctgccatggggcccagcacccctctcctcatcttgttccttttgtcatggtcgggacccctccaaggacagcagcaccaccttgtggagtacatggaacgccgactagctgctttagaggttgagatccgtagcattttagtgtccgagaggataattgctaagggagcagagacctcttcacaccttcatgcgcttagacctgcctagaggctcagatggctcagtggcactgctcacagagaacacaggctggaggacatggagtcggggaacggctggcccagtgccaggaccagagtagtcggcatgctgctgagctgcgggacttcaagaacaagatgctgccactgctggaggtggcagagaaggagcgggaggcactcagaactgaggccgacaccatctccgggagagtggatcgtctggagcgggaggtagactatctggagacccagaacccagctctgccctgtgtagagtttgatgagaaggtgactggaggccctgggaccaaaggcaagggaagaaggaatgagaagtacgatatggtgacagactgtggctacacaatctctcaagtgagatcaatgaagattctgaagcgatttggtggcccagctggtctatggaccaaggatccactggggcaaacagagaagatctacgtgttagatgggacacagaatgacacagcctttgtcttcccaaggctgcgtgacttcacccttgccatggctgcccggaaagcttcccgagtccgggtgcccttcccctgggtaggcacagggcagctggtatatggtggctttctttattttgctcggaggcctcctggaagacctggtggaggtggtgagatggagaacactttgcagctaatcaaattccacctggcaaaccgaacagtggtggacagctcagtattcccagcagaggggctgatccccccctacggcttgacagcagacacctacatcgacctggcagctgatgaggaaggtctttgggctgtctatgccacccgggaggatgacaggcacttgtgtctggccaagttagatccacagacactggacacagagcagcagtgggacacaccatgtcccagagagaatgctgaggctgcctttgtcatctgtgggaccctctatgtcgtctataacacccgtcctgccagtcgggcccgcatccagtgctcctttgatgccagcggcaccctgacccctgaacgggcagcactcccttattttccccgcagatatggtgcccatgccagcctccgctataacccccgagaacgccagctctatgcctgggatgatggctaccagattgtctataagctggagatgaggaagaaagaggaggaggtttgaggagctagccttgttttttgcatctttctcactcccatacatttatattatatccccactaaatttcttgttcctcattcttcaaatgtgggccagttgtggctcaaatcctctatatttttagccaatggcaatcaaattctttcagctcctttgtttcatacggaactccagatcctgagtaatccttttagagcccgaagagtcaaaaccctcaatgttccctcctgctctcctgccccatgtcaacaaatttcaggctaaggatgccccagacccagggctctaaccttgtatgcgggcaggcccagggagcaggcagcagtgttcttcccctcagagtgacttggggagggagaaataggaggagacgtccagctctgtcctctcttcctcactcctcccttcagtgtcctgaggaacaggactttctccacattgttttgtattgcaacattttgcattaaaaggaaaatccactgctc

SEQ ID NO: 424 - DNA, 2503 bp, Homo sapiens
ctattaacttgttcaaaaaagtatcaggagttgtcaaggcagagaagagagtgtttgcaaaagggggaaagtagtttgctgcctctttaagactaggactgagagaaagaagaggagagagaaagaaagggagagaagtttgagccccaggcttaagcctttccaaaaaataataataacaatcatcggcggcggcaggatcggccagaggaggagggaagcgctttttttgatcctgattccagtttgcctctctctttttttcccccaaattattcttcgcctgattttcctcgcggagccctgcgctcccgacacccccgcccgcctcccctcctcctctccccccgcccgcgggccccccaaagtcccggccgggccgagggtcggcggccgccggcgggccgggcccgcgcacagcgcccgcatgtacaacatgatggagacggagctgaagccgccgggcccgcagcaaacttcggggggcggcggcggcaactccaccgcggcggcggccggcggcaaccagaaaaacagcccggaccgcgtcaagcggcccatgaatgccttcatggtgtggtcccgcgggcagcggcgcaagatggcccaggagaaccccaagatgcacaactcggagatcagcaagcgcctgggcgccgagtggaaacttttgtcggagacggagaagcggccgttcatcgacgaggctaagcggctgcgagcgctgcacatgaaggagcacccggattataaataccggccccggcggaaaaccaagacgctcatgaagaaggataagtacacgctgcccggcgggctgctggcccccggcggcaatagcatggcgagcggggtcggggtgggcgccggcctgggcgcgggcgtgaaccagcgcatggacagttacgcgcacatgaacggctggagcaacggcagctacagcatgatgcaggaccagctgggctacccgcagcacccgggcctcaatgcgcacggcgcagcgcagatgcagcccatgcaccgctacgacgtgagcgccctgcagtacaactccatgaccagctcgcagacctacatgaacggctcgcccacctacagcatgtcctactcgcagcagggcacccctggcatggctcttggctccatgggttcggtggtcaagtccgaggccagctccagcccccctgtggttacctcttcctcccactccagggcgccctgccaggccggggacctccgggacatgatcagcatgtatctccccggcgccgaggtgccggaacccgccgcccccagcagacttcacatgtcccagcactaccagagcggcccggtgcccggcacggccattaacggcacactgcccctctcacacatgtgagggccggacagcgaactggaggggggagaaattttcaaagaaaaacgagggaaatgggaggggtgcaaaagaggagagtaagaaacagcatggagaaaacccggtacgctcaaaaagaaaaaggaaaaaaaaaaatcccatcacccacagcaaatgacagctgcaaaagagaacaccaatcccatccacactcacgcaaaaaccgcgatgccgacaagaaaacttttatgagagagatcctggacttctttttgggggactatttttgtacagagaaaacctggggagggtggggagggcgggggaatggaccttgtatagatctggaggaaagaaagctacgaaaaactttttaaaagttctagtggtacggtaggagctttgcaggaagtttgcaaaagtctttaccaataatatttagagctagtctccaagcgacgaaaaaaatgttttaatatttgcaagcaacttttgtacagtatttatcgagataaacatggcaatcaaaatgtccattgtttataagctgagaatttgccaatatttttcaaggagaggcttcttgctgaattttgattctgcagctgaaatttaggacagttgcaaacgtgaaaagaagaaaattattcaaatttggacattttaattgtttaaaaattgtacaaaaggaaaaaattagaataagtactggcgaaccatctctgtggtcttgtttaaaaagggcaaaagttttagactgtactaaattttataacttactgttaaaagcaaaaatggccatgcaggttgacaccgttggtaatttataatagcttttgttcgatcccaactttccattttgttcagataaaaaaaaccatgaaattactgtgtttgaaatattttcttatggtttgtaatatttctgtaaatttattgtgatattttaaggttttcccccctttattttccgtagttgtattttaaaagattcggctctgtattatttgaatcagtctgccgagaatccatgtatatatttgaactaatatcatccttataacaggtacattttcaacttaagtttttactccattatgcacagtttgagataaataaatttttgaaatatggacactgaaa

SEQ ID NO: 425 - DNA, 3550 bp, Homo sapiens
ttcaggaaagcagtttccaggaggtgagagtttaagccaaacctgaaagaggttgatttgtaatgatttgcaggggggcactggaggcagccgccaggacttttcacttaggagatcagcatttgccctgatggaaactgggcgatcctgcagggactgacctctgagttatccaaaggccgacctggggaaagactgattttgaggttttaataggggtcgtcgcggccgccgaaccggggggcggggggccggggtgagcgctaagatggccgccccggctcgggctgttttcagatgcttcaagtgttgtgaacagagacttgtttggattatgcatttctcagctagactaaataaatgctagcaatggatacgtgcaaacatgttgggcagctgcagcttgctcaagaccattccagcctcaaccctcagaaatggcactgtgtggactgcaacacgaccgagtccatttgggcttgccttagctgctcccatgttgcctgtggaagatatattgaagagcatgcactcaagcactttcaagaaagcagtcatcctgttgcattggaggtgaatgagatgtacgttttttgttacctttgtgatgattatgttctgaatgataacacaactggagacctgaagttactacgacgtacattaagtgccatcaaaagtcaaaattatcactgcacaactcgtagtgggaggtttttacggtccatgggtacaggtgatgattcttatttcttacatgacggtgcccaatctctgcttcaaagtgaagatcaactgtatactgctctttggcacaggagaaggatactaatgggtaaaatctttcgaacatggtttgaacaatcacccattggaagaaaaaagcaagaagaaccatttcaggaaaaaatagtagtaaaaagagaagtaaagaaaagacggcaggaattggagtatcaagttaaagcagaattggaaagtatgcctccaagaaagagtttacgtttacaagggctcgctcagtcgaccataatagaaatagtttctgttcaggtgccagcacaaacgccagcatcaccagcaaaagataaagtactctctacctcagaaaatgaaatatctcaaaaagtcagtgactcctcagttaaacgaaggccaatagtaactcctggtgtaacaggattgagaaatttgggaaatacttgctatatgaattctgttcttcaggtgttgagtcatttacttatttttcgacaatgttttttaaagcttgatctgaaccaatggctggctatgactgctagcgagaagacaagatcttgtaagcatccaccagtcacagatacagtagtatatcaaatgaatgaatgtcaggaaaaagatacaggttttgtttgctccagacaatcaagtctgtcatcaggactaagtggtggagcatcaaaaggtagaaagatggaacttattcagccaaaggagccaacttcacagtacatttctctttgtcatgaattgcatactttgttccaagtcatgtggtctggaaagtgggcgttggtctcaccatttgctatgctacactcagtgtggagactcattcctgcctttcgtggttacgcccaacaagacgctcaggaatttctttgtgaacttttagataaaatacaacgtgaattagagacaactggtaccagtttaccagctcttatccccacttctcaaaggaaactcatcaaacaagttctgaatgttgtaaataacatttttcatggacaacttcttagtcaggttacatgtcttgcatgtgacaacaaatcaaataccatagaacctttctgggacttgtcattggagtttccagaaaggtatcaatgcagtggaaaagatattgcttcccagccatgtctggttactgaaatgttggccaaatttacagaaactgaagctttagaaggaaaaatctacgtatgtgaccagtgtaactcaaagcgtagaaggttttcctccaaaccagttgtactcacagaagcccagaaacaacttatgatatgccacctacctcaggttctcagactgcacctcaaacgattcaggtggtcaggacgtaataaccgagagaagattggtgttcatgttggctttgaggaaatcttaaacatggagccctattgctgcagggagaccctgaaatccctcagaccagaatgctttatctatgacttgtccgcggtggtgatgcaccatgggaaaggatttggctcagggcactacactgcctactgctataattctgaaggagggttctgggtacactgcaatgattccaaactaagcatgtgcactatggatgaagtatgcaaggctcaagcttatatcttgttttatacccaacgagttactgagaatggacattctaaacttttgcctccagagctcctgttggggagccaacatcccaatgaagacgctgatacctcgtctaatgaaatccttagctgatccaaagacaatggggttttcttcctgtgatttatatatatactttttaaaagactgatgtaccattttaaacttcattttttcttgtgaatcagtgtatactacatttatacattttatatctaacaatttttttttttacaaagtataaatgtatatatcaactgaaggtaactacttttttcatatttggagttttaaacttttggtgtttacctcagactgatgttacctcttttatatttttatgtcttaattggctcggatgatgaacttgtgcaatcttctaccaacaaagttcaagtggcatcattttatatacatgtatctttttcaggtattttctatacaaattcttaatagatggaaaattagactctactttggtcactaatagtctttcatttgtatattgaagttaccttgccccttggagttattgaagtgacatgtcaaggtatcacctaaatattcttcagtcacactcactggtatttctgaggctttgtgtgttaacaggccttgtaattgacattattttggttaatgtaaccccaaaattgctttagtaattgctctttggcatagtcaaactataaatgaaaatggcagctttacaaatagtatatttaagtgaactctggaactatggacatgaaaaaaatgatggctgggatttatgatttttgtctggcagcaaacaggtttgtccagaagtctaataattaagcagtcataaaaagtctgaatttagtaaaccagtgtatgatgttattcaaatagtttaccttgggtatgagttcattttataatgtctgatgacattagatctcttaaaactttatgtattttttttagttcaaaggaatagagtcttgaagagaaaaaattatagggcagaaaagataagtgttcaaaattggcaactggactattattatgtctagcatctcattctaaataactaaagcttgatttactcttgctaggattatgtgactactaggtaggagcctcttaaaacactggccctgagcattaaaaaaaaaaa

SEQ ID NO: 426 - DNA, 461 bp, Homo sapiens
tcagtctccaaaaaggtccgcataattgatatataaggggcttcagtgtgtagcaaagttgcaaaagttaagagttgttgtttgtcttcgatcatgtctggtagaggcaaaggtggtaaaggtttaggaaagggaggcgccaagcgccatcgcaaagtgctgcgtgacaacatacagggcatcacgaagcccgccatccgtcgcttggcccgacgcggcggcgtgaaacgcatttcgggcctcatttatgaggagacccgcggtgttcttaaggtgttcctggagaatgtgatacgggacgccgtaacctacacggagcacgccaagcgtaagacagtcactgcaatggatgttgtctacgcgctcaagcgccagggacgcactctgtacggctttggtggctgagcctcaccccggctttttatttaacagctcacccataaaaggcccttttcagggcc

SEQ ID NO: 427 - DNA, 294 bp, Homo sapiens
atcatggaaatcaggacagtggcagttgggattgtggcaatcaaaggggtggaaagtgaattctatcttgcaatgaatgaggaaggaaaactctatgcaaagaaagaatgcaatgaagattgtaacttcaaaggactaattctggaaaaccattacaacacatatgcctcagctaaatggacacacaatggaggggaaatgtttgttgccttaaatcaaaaggggattcctgtaaggaaaaaaaatgaagaaagaacaaaaacagcccactttgttcctatggcaataacttaa

SEQ ID NO: 428 - DNA, 4826 bp, Homo sapiens
aatccgctgctgccggcgtcgggtgcgctcggcctcgcccgcggccctccttccccggctcccgctcgccgctcgttcactccaccgccgccgccgccgccgccgctgccgctgccgctgccgcacctccgtagctgactcggtactctctgaagatggcagaagctcaccaagctgtggcctttcagttcacggtcactccggacgggattgacctgcggctgagccatgaagctcttagacaaatctatctctctggacttcattcctggaaaaagaagttcatcagattcaagaacggcatcatcactggcgtgtacccggcaagcccctccagttggcttatcgtggtggtgggcgtgatgacaacgatgtacgccaagatcgacccctcgttaggaataattgcaaaaatcaatcggactctggaaacggccaactgcatgtccagccagacgaagaacgtggtcagcggcgtgctgtttggcaccggcctgtgggtggccctcatcgtcaccatgcgctactccctgaaagtgctgctctcctaccacgggtggatgttcactgagcacggcaagatgagtcgtgccaccaagatctggatgggtatggtcaagatcttttcaggccgaaaacccatgttgtacagcttccagacatcgctgcctcgcctgccggtcccggctgtcaaagacactgtgaacaggtatctacagtcggtgaggcctcttatgaaggaagaagacttcaaacggatgacagcacttgctcaagattttgctgtcggtcttggaccaagattacagtggtatttgaagttaaaatcctggtgggctacaaattacgtgagcgactggtgggaggagtacatctacctccgaggacgagggccgctcatggtgaacagcaactattatgccatggatctgctgtatatccttccaactcacattcaggcagcaagagccggcaacgccatccatgccatcctgctttacaggcgcaaactggaccgggaggaaatcaaaccaattcgtcttttgggatccacgattccactctgctccgctcagtgggagcggatgtttaatacttcccggatcccaggagaggagacagacaccatccagcacatgagagacagcaagcacatcgtcgtgtaccatcgaggacgctacttcaaggtctggctctaccatgatgggcggctgctgaagccccgggagatggagcagcagatgcagaggatcctggacaatacctcggagcctcagcccggggaggccaggctggcagccctcaccgcaggagacagagttccctgggccaggtgtcgtcaggcctattttggacgtgggaaaaataagcagtctcttgatgctgtggagaaagcagcgttctttgtgacgttagatgaaactgaagaaggatacagaagtgaagacccggatacgtcaatggacagctacgccaaatctctactacacggccgatgttacgacaggtggtttgacaagtcgttcacgtttgttgtcttcaaaaacgggaagatgggcctcaacgctgaacactcctgggcagatgcgccgatcgtggcccacctttgggagtacgtcatgtccattgacagcctccagctgggctatgcggaggatgggcactgcaaaggcgacatcaatccgaacattccgtaccccaccaggctgcagtgggacatcccgggggaatgtcaagaggttatagagacctccctgaacaccgcaaatcttctggcaaacgacgtggatttccattccttcccattcgtagcctttggtaaaggaatcatcaagaaatgtcgcacgagcccagacgcctttgtgcagctggccctccagctggcgcactacaaggacatgggcaagttttgcctcacatacgaggcctccatgacccggctcttccgagaggggaggacggagaccgtgcgctcctgcaccactgagtcatgcgacttcgtgcgggccatggtggacccggcccagacggtggaacagaggctgaagttgttcaagttggcgtctgagaagcatcagcatatgtatcgcctcgccatgaccggctctgggatcgatcgtcacctcttctgcctttacgtggtgtctaaatatctcgctgtggagtcccctttccttaaggaagttttatctgagccttggagattatcaacaagccagacccctcagcagcaagtggagctgtttgacttggagaataacccagagtacgtgtccagcggagggggctttggaccggttgctgatgacggctatggtgtgtcgtacatccttgtgggagagaacctcatcaatttccacatttcttccaagttctcttgccctgagacggattctcatcgctttggaaggcacctgaaagaagcaatgactgacatcatcactttgtttggtctcagttctaattccaaaaagtaattccactggagctgctgggaaggaaaacgagctcttctgatgcaaaccaaatgaaaaataggcattaatcctgaccttagctcgggatgaaacactgctcttaaaaaaactcagttttccttccagaaaatgtgggtgtttttttttcctagaacagtatctctcccctgtgaagcataaccccactacttccagacttgccctcccttgggggacatctgataaagtctcccctgatgtctccgcatcggcttggatttattaagggatgcaaatcttgttgagttaatgaaggaattagtagggttgtggcttcacacacagtggaatggaaatggtgtgctttctcagtggcaaccgaaggcctagtgcttaagggcatttagcatcatccaagcagggtaaacttttgttttgttaaaagaaaaatgtgttattcaagttggtgtccccagttgtagctaacacatctggaatgcactaaccaaaatgctgtgctttggagacctgcttttgtcaccgtgggtaaccgttcccgtctggtccagtagcctgtgtttgcctctccacatttgaagcaagcaggatgcaaggtcttcagttttactgaccttgtatgtcttcaagtcttcacaacccagtgccttaaaaatgaaaggccctaaatgtaagggagatggagagaaagatttattttgtagagtctttgggtggaattgtgggtatactgttcccttcacaattgactgagtatggataaccgtacataagcatttgctacaccccaccagccccctccccctcagaaacaccagttccttcccaagggcagctgtgccagactcccctcccgggactgccttcttgtcatcataagcaacaaaagaaataacaggcacatgtcataaaaggggagcaagggccgtgatggtcagataattcactcaagaataaaacatgacacgtgcctcaggaggatctctttcccaaagtgacagcaaggagggcagggcatcggccaccaagcggggactagcaagtgaggaaggggagggcagcccaccgtggtgaggagagagtggctccacgaccccaagggatggccttctcctcccacccggtgaggggaaagactcaccagagggtgatggagacagtatgccggctcaccttggtgaccagccaagatgtctcaagtgacagtgctaggtgttcacccagcctgtccttcagataggagtgccttcacgaaagcgtctcatggaccacaaagcaattatgcactgagtcatcttcagtatttaatgcaaaaatgaagcatcatggaatgaaattcccactgtctgtcatgacaagcttagctgtccattgttttaaattgtgtatttatttttttgaccacttggttctagttgggcctgactccttcagagtgctgcaccccgatagtacaacagcgatggctgaactgttggagtcgatggaaggtgcttgccggagaacacgtgcctttttttttttttttttttttgagatggagctgcactccagcctgggcgacagagcgagactccgtctaaaaaaaaaagcaaaaacaaaccaacaacaaaagcccctgactgtccgtcaagcaggcagcggggatgtagctctctctgccctgggcaagaatagcacttcccgttaaaagccagcagccggcgtcagtccctatcagagccagctagatcatgcactgttgaccactgagcaatctgtgttacactagagttcacagggcattttgagtgtagacgtgagtgcttaaacatatttgggtttctctctcaggttttaaatgtttcaaatgtaattgttgctcatcagtgcagttatcaatgcaattttatattccttgaggggagaaagaggggtcttattgtacatgtccaaggggggtgataagagtattatctgtttaatttaattggaacaaaccattgtcttaacgcagccatggtttgaatttgttatcttgggctgaccggtgcatgtaaatacagtatgctctttggatgtaaatcttagaaatgcagtgtgaatgtaggttatcattaataaaacattaaccccagtctgggattataagtcaaggaccaagttcagatacttgagacaaagtggaaagtctcagcatatggaaacaaggccttggaggagaccatggacatcaccaagttcatgtgctgggctggaaagaaaagcctgttgattttcacttgctgtgcatttattcatccattccattgcctcaatgctgagaacagtgcctgacacataaaagatgctcaataaatatgttaaaagtaa

SEQ ID NO: 429 - DNA, 3516 bp, Homo sapiens
ggagaccgcggcgcacttggacttccctctccattcgccagccgcctcgctcccggaccccacggctgcaaactgatctggcgcgcggggaggaggagagcgcaggcgagcgaacccgcgagagagggagagagcgagcgagcaacagcgagagcgagagcgagagagccgggaggcagagggagtagtgaccgccttccggagccgggattcatgcctgtcctcgggaccagcgaaggggactttacggctgagtatgagccaggctgctaggagccaggtacccccacgcctgcagtccccgcgccgtgcccggaatgcgagctgcacgcagggctctcccaagttcccaccgagccgaataaaaagcgtcctcccgcagctctccgccaaagacggacattgactccaggtaaggcggcgccggactccacagaatggagcaagaatgagaggaaaaaggccggcagaaaagcatgaactggaggtttgttgagctcctctacttcctgtttatatggggccgtatctcagtgcagccctcccaccaggaaccagctgggacagaccaacatgtctccaaggaatttgattggctcatttcagacagggggcctttccaccactccaggagctacctatcctttgtggaaagacaccgtcaaggatttacaaccagatataaaatatacagggagtttgcccgttggaaggtgaggaacacagccatcgagaggagagatctggtccgccatccagtgcccctcatgccggagtttcaaaggagcatccgcctgcttggcaggagacctaccactcagcagttcatcgataccatcatcaaaaagtacggcacccacctgctcatctcagccacattgggaggggaggaggctttgaccatgtatatggacaaaagtcgcctcgacaggaagtcagggaatgccactcaaagtgttgaagctctgcaccagctcgcatcatcctactttgttgaccgtgatggtaccatgaggaggcttcatgagatccagatatcaactggagcaatcaaggtcacagagacacgcactgggcctctgggctgtaacagctatgacaatctggactctgtgagttccgtccttctgcaaagcacggagagcaaactgcaccttcaaggtcttcagataatctttcctcagtatctgcaagagaagtttgtccagtcggccttgagctatatcatgtgcaatggggagggggagtacctgtgccagaacagccagtgtcgctgccaatgtgccgaggagtttccgcagtgcaactgccccatcacggacatccagatcatggagtacacgctggccaacatggccaagtcttgggccgaagcttataaggacctggagaattcaggtagagagtctcactcagtgccactgcatgagtggccttgagccaagtctgaaagggagctaatctaactggaattaggactgctgcaagggaaagttcagtgaccctgaccctttcactttggagtgtccagatgcaagtataatagctgtcacagagcaggcactcaataaatctcaactgaataaaattaatgaatagcataatccagtttgtggtcatatgatgtattgtttctgtcgtacccagaagacagaaagaataaatctgcataggaagcctctggagagggaagagtcatgagtttaaatcatttatgaagcgcctccccagcaaccacttcctgaccatcggaagcatccatcagcactggggcaatgactgggacctgcagaaccgctacaagctcctgcagagtgccacggaggcacagagacaaaagatccaacgcactgcccgcaagcttttcggcctcagtgtacgctgtcgccacaatcccaaccaccagctgcctagagagaggacaattcagcagtggcttgcaagggtccagtcactcctctactgtaatgagaatgggttttggggaaccttcctggagagccagcggagctgcgtgtgccacggcagcaccacgctgtgccagcgccccatcccctgcgtgataggcgggaacaacagctgcgccatgtgcagcctggccaacatctccctctgcggctcctgcaacaagggctacaagctgtatcgaggccgctgtgaaccacagaacgtggactcggagcggagcgagcagttcatcagctttgagactgacctggacttccaggacctggagctgaagtacctgctgcagaagatggactcacgcctctacgtccacaccaccttcatcagcaacgagatccgcctcgacaccttctttgaccctcggtggcgcaagcgcatgtccctcactctcaagagcaacaagaaccgcatggacttcatccacatggtgatcggcatgtccatgcgcatctgccagatgcgcaacagcagcctggaccccatgttctttgtctatgtcaacccctttagcgggagccattcggagggctggaacatgcccttcggggaatttggctacccacgctgggagaagatccgtctccaaaacagccagtgctacaactggactcttttgctgggcaatcggtggaaaacatttttcgagacggtccacatctacctacgtagtcggactcggctacctaccctactgcgaaatgagactggccagggccccgtggacctgtcggatccctccaagaggcagttctacatcaagatctcagacgtgcaggtgtttgggtatagcctgaggttcaacgccgacctcctgcgcagtgcagtgcagcaggtcaaccagtcctacacacagggcggccagttctattcctcttcgtcagtgatgctcctcttgttggatattcgggaccgaattaatcgcctggcccctcctgtggccccggggaaaccccagctggacttgttctcctgtatgctgaaacaccgcctgaaactgaccaacagcgagatcatcagggtgaaccacgccttggacctgtacaacacggagatcctcaaacagtcggaccagatgacagccaaactctgctaacccgggactccttgccatggacttttcctgttgttgtacacacacaacagaacaaaatgaagcaaaacaaaacaaaaaaacccacaaaaatttgtaaaatgtaattaatattcaaagaaaaggaggaaaatcttcatttgttggaaatgaaaacgttctagcaactgtataaaagcgttgggcatgtttgttatttctatactcactctgtcatgaagaagggtctcagccttttgtggagcattgagggagttgcttcttaggcctcaggtgctgtattgggggagaagggagaaagcatatgcaatgaattgtaaagatctctgctgtgcaggtgctaagattaaacactaaaaagaaagagagatatatgtaatgtacaactgacactgccatttttcctttttggaggaaatggacatagataaagaagatatttcttcggttaagattta

SEQ ID NO: 430 - DNA, 1509 bp, Homo sapiens
ccgagcggtgccaggccaggtgtgtgcgtccgtcggtctttccgtgcccacgccggagaccagccccggaggccgcctgggcctatccctgtgccaggcaccatgaagcaggagtctgcagccccgaacaccccgcccacctcgcagtcccctacgccgtccgctcagttcccccgaaacgacggcgaccctcaagcgctgtggattttcgggtacggctccctggtgtggaggcccgacttcgcctacagcgacagccgtgtgggcttcgtgcgcggctacagccgccgtttctggcagggagacaccttccatcggggcagcgacaagatgcctggccgtgtggtgacgctccttgaagatcatgagggctgcacttggggcgtggcataccaagtgcaaggggagcaggtaagcaaggccctgaagtacctgaatgtgcgagaggcagtgcttggtggctacgataccaaggaggtcaccttctatccccaagatgctcctgaccaaccactgaaggcattggcctatgtggccaccccacagaaccctggttacctgggccctgcgcctgaagaggccattgccacgcagatcctggcctgccggggcttctccggccacaaccttgaatacttgctgcgtctggcagacttcatgcagctctgtgggcctcaggcgcaggacgagcacctggcagccatcgtggacgctgtgggcaccatgttgccctgcttctgccccaccgagcaggctctggcgctggtgtgaggggctgagcccctgcggggagtgctcatgtggacatcagggccagacacccactccagtgcacaagacagacttgcgaccgcttgagcccactgagcagatatggtgggtggctggaggcttctctttctcagtccctgcctgtctgccagcctgcagctctcctgcttgacactgacttactacttgaaactttatttattgcaccatgttggtgtggtgggcaggtggagggcctgccctggacacaggggccctgctgagcagtggccccatcctggaacttgaccagattccccccagtgctgctgctaaccccacaccacccaggcctccacctccccagggagtctccaagagcctcgatcctctgctcactcagcccagccatccatagccctgggaattccacctgccaaggatcccagcaggctggatgagggatagtagggcatgaggagaaggagccctgtaaggactgaggccccggccagcccttctcctccaccagttccccagagcagagctggagctgatgcctggacacagctgctgagcctggcctgggcctcttacccacttggttgttttcttgtccctctgtctgtctgtctatctacttgtctgtctgggccactcctgcctgtgtgttggtctattcctgggaagctcatcactacaggccctggcaaccttcccagtctgtcccatactgttacccataaaactatctcttta

SEQ ID NO: 431 - DNA, 2704 bp, Homo sapiens
gggagaaacgttctcactcgctctctgctcgctgcgggcgctccccgccctctgctgccagaaccttggggatgtgcctagacccggcgcagcacacgtccgggccaaccgcgagcagaacaaacctttggcgggcggccaggaggctccctcccagccaccgcccccctccagcgcctttttttccccccatacaatacaagatcttccttcctcagttcccttaaagcacagcccagggaaacctcctcacagttttcatccagccacgggccagcatgtctgggggcaaatacgtagactcggagggacatctctacaccgttcccatccgggaacagggcaacatctacaagcccaacaacaaggccatggcagacgagctgagcgagaagcaagtgtacgacgcgcacaccaaggagatcgacctggtcaaccgcgaccctaaacacctcaacgatgacgtggtcaagattgactttgaagatgtgattgcagaaccagaagggacacacagttttgacggcatttggaaggccagcttcaccaccttcactgtgacgaaatactggttttaccgcttgctgtctgccctctttggcatcccgatggcactcatctggggcatttacttcgccattctctctttcctgcacatctgggcagttgtaccatgcattaagagcttcctgattgagattcagtgcatcagccgtgtctattccatctacgtccacaccgtctgtgacccactctttgaagctgttgggaaaatattcagcaatgtccgcatcaacttgcagaaagaaatataaatgacatttcaaggatagaagtatacctgattttttttccttttaattttcctggtgccaatttcaagttccaagttgctaatacagcaacaatttatgaattgaattatcttggttgaaaataaaaagatcactttctcagttttcataagtattatgtctcttctgagctatttcatctatttttggcagtctgaatttttaaaacccatttaaatttttttccttacctttttatttgcatgtggatcaaccatcgctttattggctgagatatgaacatattgttgaaaggtaatttgagagaaatatgaagaactgaggaggaaaaaaaaaaaaaagaaaagaaccaacaacctcaactgcctactccaaaatgttggtcattttatgttaagggaagaattccagggtatggccatggagtgtacaagtatgtgggcagattttcagcaaactcttttcccactgtttaaggagttagtggattactgccattcacttcataatccagtaggatccagtgatccttacaagttagaaaacataatcttctgccttctcatgatccaactaatgccttactcttcttgaaattttaacctatgatattttctgtgcctgaatatttgttatgtagataacaagacctcagtgccttcctgtttttcacattttccttttcaaatagggtctaactcagcaactcgctttaggtcagcagcctccctgaagaccaaaattagaatatccatgacctagttttccatgcgtgtttctgactctgagctacagagtctggtgaagctcacttctgggcttcatctggcaacatctttatccgtagtgggtatggttgacactagcccaatgaaatgaattaaagtggaccaatagggctgagctctctgtgggctggcagtcctggaagccagctttccctgcctctcatcaactgaatgaggtcagcatgtctattcagcttcgtttattttcaagaataatcacgctttcctgaatccaaactaatccatcaccggggtggtttagtggctcaacattgtgttcccatttcagctgatcagtgggcctccaaggaggggctgtaaaatggaggccattgtgtgagcctatcagagttgctgcaaacctgacccctgctcagtaaagcacttgcaaccgtctgttatgctgtgacacatggcccctccccctgccaggagctttggacctaatccaagcatccctttgcccagaaagaagatgggggaggaggcagtaataaaaagattgaagtattttgctggaataagttcaaattcttctgaactcaaactgaggaatttcacctgtaaacctgagtcgtacagaaagctgcctggtatatccaaaagctttttattcctcctgctcatattgtgattctgcctttggggacttttcttaaaccttcagttatgatttttttttcatacacttattggaactctgcttgatttttgcctcttccagtcttcctgacactttaattaccaacctgttacctactttgactttttgcatttaaaacagacactggcatggatatagttttacttttaaactgtgtacataactgaaaatgtgctatactgcatactttttaaatgtaaagatatttttatctttatatgaagaaaatcacttaggaaatggctttgtgattcaatctgtaaactgtgtattccaagacatgtctgttctacatagatgcttagtccctcatgcaaatcaattactggtccaaaagattgctgaaattttatatgcttactgatatattttacaattttttatcatgcatgtcctgtaaaggttacaagcctgcacaataaaaatgtttaacggtt

SEQ ID NO: 432 - DNA, 404 bp, Homo sapiens
actccgccttccacgtgcacccactgcctcttcccttctcgcttgggaactctagtctcgcctcgggttgcaatggaccccaactgctcctgtgccgctgcaggtgtctcctgcacctgcgccagctcctgcaagtgcaaagagtgcaaatgcacctcctgcaagaagagctgctgctcctgctgccctgtgggctgtgccaagtgtgcccagggctgcatctgcaaaggggcatcggagaagtgcagctgctgcgcctgatgtcgggacagccctgctcccaagtacaaatagagtgacccgtaaaatccaggattttttgttttttgctacaatcttgacccctttgctacattcctttttttctgtgaaatatgtgaataataattaaacacttagacttg

SEQ ID NO: 433 - DNA, 5929 bp, Homo sapiens
gcggccgccgcctgccgggcctcccctcgccgcggccggccgccgcgctcccgcccgggcgcccagctatgtactccccgtactgcctcacccagctcagaatcgggcgttgggctttgccgggtgcttcagatcaatgcagacggacactgtgccggggcgagctgacaggagttcacggctgcgatagaacatggagatgtcatgggcgcgacagagcctggcggggataccagcagcccgtcttcccctcctcccgtcctccctcgccccgcatgctcccggcttgccgcctgcaggatgagttccacccgttcatcgaggcactgctgcctcacgtccgcgctttctcctacacctggttcaacctgcaggcgcggaagcgcaagtacttcaagaagcatgaaaagcggatgtcgaaggacgaggagcgggcggtgaaggacgagctgctgggcgagaagcccgagatcaagcagaagtgggcatcccggctgctggccaagctgcgcaaggacatccggcccgagttccgcgaggacttcgtgctgaccatcacgggcaagaagcccccctgctgcgtgctctccaaccccgaccagaagggcaagatccggcggattgactgcctgcgccaggctgacaaggtgtggcggctggacctggtcatggtgattttgtttaaggggatccccctggaaagtactgatggggagcggctctacaagtcgcctcagtgctcgaaccccggcctgtgcgtccagccacatcacattggagtcacaatcaaagaactggatctttatctggcttactttgtccacactccggaatccggacaatcagatagttcaaaccagcaaggagatgcggacatcaaaccactgcccaacggggcacttaagtttccaggactgttttgtgacttccggggtctggaatgtgacggagctggtgagagtatcacagactcctgttgcaacagcatcagggcccaacttctccctggcggacctggagagtcccagctactacaacatcaaccaggtgaccctggggcggcggtccatcacctcccctccttccaccagcaccaccaagcgccccaagtccatcgatgacagtgagatggagagccctgttgatgacgtgttctatcccgggacaggccgttccccagcagctggcagcagccagtccagcgggtggcccaacgatgtggatgcaggcccggcttctctaaagaagtcaggaaagctggacttctgcagtgccctctcctctcagggcagctccccgcgcatggctttcacccaccacccgctgcctgtgcttgctggagtcagaccagggagcccccgggccacagcatcagccctgcacttcccctccacgtccatcatccagcagtcgagcccgtatttcacgcacccgaccatccgctaccaccaccaccacgggcaggactcactgaaggagtttgtgcagtttgtgtgctcggatggctcgggccaggccaccggacagcccaacggtagcggccagggcaaagtcccggggtcatttttgctaccgccgccgcctccagtggccagacctgtgccccttcctatgcctgattccaaatccaccagcactgccccagacggcgccgccttgactcctccatcaccttcattcgcaacgacaggcgcctcctctgccaaccggtttgtcagcatcggaccccgggacggcaactttctgaacatcccacagcagtctcagtcctggttcctctgataagatcgacaaaagaaacaacaaaatgagaagaagaggttcctcgaaaggggggagaagaaattttgagaatggaaaaatcccccagcccagcccagccccaccgaaaagcaaaaattacacgtcgtcagccactcagcccttctctcctccagcccggggacccccgcgggccccagaagcagcccagttctcagagagcccttggaaggggtctcggtggagctgtgcaccagcagccaagcagaaagaaacacgcgacatggactctgtcaagtagaggacagaaagcaagaaaggatgcagaactgccttcctccccctgaccccgccccggccttctggggaaggaacaaagtccccaaacaaagcaaccagcacaattctgaaggggcctggcctccaccctcaccccttcctaggggaaccccaccctccacacagccggagctgccctagggagcctggagggccagcttgtaaagatgatggggtttagatccctcaggctctcccctccagactccgcccttccctccctccctccctccctccctctctgccaaggctccagcttcttcccccagctgctcccgaccaggagggggagagcagcctccacttaccccaccccacccttgggctaaaagcccccaggcgggcagggggtgacccctggagctagttgcgtgtcccagaatggagggtgttctgacaccccaccctgagccgcaagagcagtcctggggccctggacccctctgtacagtccgtaggaaaaagtcggaatgctctcgacggcctcgtcccagcctgggacaggccccctttcccctctctctgcaggccaggagggcctccttcctgccacgagggaggggagtcgggccccaggtcgcccccgcccccagccctgcatgcaggtgccctcgctccgccccatcagttcctgcccctgcccctcatgcagactgccctgctggggccgggccggagggtggagcagaaaggggaccccggagccgagcgaggaggaccaggcagccgccgctgccgcgctaagccaccacctgcgcttaggtaggcgtcctgctcgccgactttcagttccttgggagggtgttgggtgtcgtccttttcaaaagtgttttggagctttctgtgccccccgactttcccccgcctccccgccccccacgtggccacttttctctggattttagctgtaatgtctttactctttatttaggggtggggcattcattgtttgggtcttttgctgttggaatgggaactcctcctccatttgagcaacttgggaacaatttggtaacacaccacaggaagtagctctcccccccagccccctcctccctcaagggagggttggggggcctgtccagagggtcttcagaagcccccctgggagggaggggaggatgagcacgcccagctcccctccagggtgtgacttggcccctctggcttgtctttctgtgccttactcctcctcctgcgtctcccgttcctggccccttcttgagtccttgtgcctctctctttctctctctttcttaattgtatgaaaacacaaagcacaggtcaggatcctctgagagaaaatcaacattgcaccacgtaggggtgggctatgggctgtatttattgtgaatctagtttgtgaggctgtggccccgagctggcggagggagggaagaggagggagtgacgggaggggaggaggtcagcgacctggggccgtagcggcaggcgaacggtgcctgctacccagctggaagccacaaggtggctggctccaggggcggcttttgttggaagttgagtgaagccctccccctgtcctcagcgtgcagccctagaggaccccagggctgaggggcagtggatcctgcgggagtctcccggggcgtggggagtaaggccccgggggtggggggccgggtgggccgggcgtgacgcgcggtcaaagtgcaatgatttttcagttcggttggctaaacagggtcagagctgagagcgaagcagaaggggctccctgtccggcccacgtgccctttccctcgacgacagtcgagggctcgggctctgtgggactgtgggagctagggtctgcggggcgcctgcccgggcgaggtcggaagctgcaggccagctgggcccgggccggagcgtgcccggcggggctgcccgggcgggcagggggtgggggctgctcctttcccaagtggtgttgtgaggggcaatgagggcaacaggagatgtggggacgtgttaggagagaaaaaaaaaaaaacaaaaatatatatgggggaaattaacttttttttttcattgaaccaagtgcaatgcatcagagagttttcctatctttgtatgttaagagattaagaaaaaaaaattctatttttgttgtaatgtcctcgcggctctggggacgctaaaagaaccgggcctgccccgccctgcgcggggataacgaaagctgagtgtttttcccttttttttgttcgtttttagtttttttttttttaagtcgttttcctgcgttgacgaggatgatctggggtttttatttgtttcgtcgttcgttctgtttcggtgggagggctgaaggaaacgttcacattttagagtttaaaaaaaacacctcgacatttaaaaaatcaaccaacacaagatcaaaaaggaaaaggacgagagaaaaattatttttaagataattaaacataaaaccctggtgcttcttacattataaagtacgttttaaagaacccacaaactattatacataagtttatgaatcaattaaatatcctgcacttgttaggaatacgcatatcccttctttgttgagtttaacggaacgggacagcggcgtgcccccggcggctggactgctccggccgcgggtctccccgggcgcccctccctggggcccagcacccctcctcgccccatccccgtccgggtacgggggcgcggcaggggtccccggcccctcccccgcagaggtcaatgccaacgaacaaacgtcccctccctccctccctctccgccccgagcgcccttctttgagccagacgccaacttgaccctcaccagcattatcaggagcgcgctcagcaagttggtagtttcctcccccctttcccggcgcccctcccgcccccattcaacatctctcatcctatccccgaccccctccggggaacaccgggaaggctcgacgctccaggacaggaccagccacgcagacaggtcgatttgcccaggcccgcgcccgcacgcacgcacgcacacggccccgcacacagccccgccccaccccgcaaccagccctgtcgactgccttatacacccgcccccgcgctggccggccgacctagtgccttgttctcacccccgtgctggcggagcggacgccgcgctctgggtcccagaggggccgggtggctcagacgacccaccactcccccaccctgaccgtgctgaacagacccccccacacgagagaaaataaaggagcaataaagtcacgagaactttcgtcccccaatcgagagcccgaggggcaccccagccccgcctctgctcccccccaccccacccaccctcggggcgcccccctccccccgcaagccagcctgggccagccccgcttcggcccctcccgggagatccgtgcgcccgaccagcaccagcatcgcggaccgcaaaggccgcccgtcccgtcaaacaagtttcttcttaggctaagaaacgcagtatatacgagtatctctatatatagtactaatggatttggtgtgcttcccccttagcgtccccctccctctgctcctcctccttcagcctggtctccccctcttctctgccctccacccccgtctctgcactgagatacataagaaacaagggtagtttactgtctgttttgttttctgggttttcagtgtcctagcggaatgcaagtaggcagccagcccgtctgttccctctccgccccgccccgccccgcccccgtcactgcgcttctgttataccatctttgcctgactctctccggcttctccattgaatggctaatgtgtatgtgaaataaagaaataaagaaaaacaaacgcga

SEQ ID NO: 434 - DNA, 5732 bp, Homo sapiens
ctggagtctcccctggtcgggagcctcagccttctggagactgacaccaccctcttactcagagacgaatcgttttgtcgttgccttcacctccctgaccacaagtgctccggggctctttctgagggaggcagctgttctaggcgggaggctggagtctcctgggcctggacgcaccccggggtgtgagtgatgggtatgcctgaaaggaggggaagtggcgcggctttaatcatctgggctagtccccggcgggcctgggggaacagggaaactggaggcggccttaaagcgtcaggatgagacatcgcaagaggagctgcagatactgagcgtgcgccccgggttctcgccgccttctctccgccgagcagcccttcggccaccctttgcccttaaaaatctgcagactgcgcctcctctccgcgggagcgagacctagcaggcccggggctgggcgtgccctcgcctgccacgctgcgcgctgccctcagccgggccgctggggccgtgcagtgcaccgggcacgccgcgccaggctgggggcaggcaccgagcctccgtgggaggtcccgaggcagcttcgcctgctcgccctggctccagccctcacctgccgcagccttagctgagcagccgccgccactgggcgccccccgctccccacttcgccagcgcccgctcctcggctcggcccggggtagtttgtagggacgcagctctccacgtgcgcgactgcgaggctggacgctacgggctcctggaaaggagccagttaccccctgaaacatttcagttgtgaacgttctttcctgctagcttctcccatgaggggaaaacgatgggtttgaaattcacatccctatctgtactttgaagacagacaccagcatttgccacaatgctgtcatccactgactttacatttgcttcctgggagcttgtggtccgcgttgaccatcccaatgaagagcagcagaaagacgtcacactgagagtatctggagaccttcatgttggaggagtgatgctcaagttagtagaacagatcaatatatcccaagactggtcagactttgctctttggtgggaacagaagcattgctggcttctgaaaacccactggaccctggacaaatatggggtccaggcagatgcaaagcttctcttcacccctcagcataaaatgctgcgccttcgtctgccgaatttgaagatggtgaggttgcgagtcagcttctcagctgtggtttttaaagctgtcagtgatatctgcaaaatcctgaatattagaagatcagaagagctttccttgttaaagccgtctggtgactattttaagaagaagaagaaaaaagacaaaaataataaggaacccataattgaagatattctaaacctggagagttctccaacagcttcaggttcatcagtaagtcctggtttatacagtaaaaccatgacccctatatatgaccccatcaatggaacaccagcatcatccaccatgacttggttcagtgacagccctttgacggaacaaaactgcagcatcctcgcattcagccaacccccccagtccccagaagcacttgcggatatgtaccagcctcggtctctggttgataaagccaagctcaatgcaggttggctagactcctcacgctcccttatggaacaaggcatccaagaggatgagcagctgctcttacgatttaaatattattctttcttcgacttgaatcctaaatatgatgctgtccgaataaaccaactctatgagcaagccaggtgggccattctcttagaagaaattgattgcacagaggaagaaatgttgatctttgcagctctacagtaccacattagcaaactgtcgttgtctgctgaaacacaggattttgcaggcgagtccgaggttgatgaaatagaagcggcgctttctaatttggaagtaaccctagaaggtggaaaagcggacagccttttggaggacattactgatatccctaaacttgcagataatctcaaattatttaggcccaagaagttactaccaaaagctttcaaacaatattggtttatctttaaagacacatccatagcatactttaaaaataaggaacttgaacaaggagaaccactagaaaaactaaatcttagaggctgcgaagttgtgcccgatgtaaatgtagcaggaagaaaatttggaatcaagttactaatccctgttgccgatggtatgaatgaaatgtatttgagatgtgaccatgtgagtaaaaccccaaaaatattaagtcacttcacctccactaagcctaagagcaaaacccaaaaatgttttcacaaatttagagcactattgtgtcactcagctattgctttgtaacaaacaatcacagtgtaacaaaatcacaatgacattctaacaataaacatttgccatgcagtggctcacacctgtaatcccagcactttgggaggccaaggtgggcagatcacctgaggtcaggagttcaagaccagtctggccaatatggtgaaacctcatctctactaaaaatacaaaaattggccaggcatggtggtgggtgcctgtaatcccagctacttgggaggctgaggcaggagaatcacttgaacccaggatgcagagtttgcagtgagccaagatggcaccaccgcactccagcctgggtgacagagcaagactctgttcccccagaaaaagaaaaagagaatcaatacgcccaatggatggctgcctgcatgttggcatcgaagggcaaaaccatggcagacagctcctaccagccagaggtcctcaacatcctttcatttctgaggatgaaaaacaggaactctgcatctcaggtggcttccagtctcgaaaacatggatatgaacccagaatgttttgtgtcaccacggtgtgcaaaaagacacaaatccaaacaggtactctggccgcccggatcctggaggcgcaccagaacgtggcccagatgcccctggtcgaagccaagctgcggttcatccaggcgtggcagtcactgcctgagtttggcctcacctactaccttgtcagatttaaaggaagcaaaaaagatgacattctgggagtttcatataacaggttgattaaaattgatgcagccaccgggattccagtgacaacatggagattcacaaatatcaaacagtggaatgtaaactgggaaacccggcaggtggtcatcgagtttgaccaaaacgtctttactgctttcacctgcctgagtgcagattgcaagattgtgcacgagtacattggcggctacattttcttgtccacccgctccaaggaccagaatgaaacactcgatgaggacttgttccacaaattgaccggcggtcaggattgaaacaagcacgcgtgctcggctcacaccaacaaggcaagccaaaggcgcccctccccagagggatccctaacgtgcccagcatgtagattctggactaacagacaacatacattcaccgctggtcacccagatcctcattcaaacccactgctggcacatccctttccttactttgccctgtgctaccagccacggaaggagcctctcttgttttttctataaaatgggtaggcaggagaaaagcaggtgccctaagattgctctaaggcccagcatgtggttacagttctctgacttgcagaacctgccaggtgtatggctacaagttatcctcgtgctgatctgtctcattactaagtcaatggagaagacagaaaggtaaaaatcacgtgtagcaagaacaactcttatttcacaaactcaggtatgaaacgaaacgcctgtccttcatggaactgcttttagctcctgtcttttcaaaatggcagagggagttcctacacacactttttccctggaggccaaggtctaggggtagaaaggggaggggtggggctaccaggtagcagttgacaacccaaggtcagaggagtggccctcagtgtcatctgtccacagtgatacctgccaagatgaccactgacccacatctggtcttagtcattggtctcctcagatttctggggccacctgcaagccccattccattcctacagatctctcagccacctgtaagtcctttgtgaagatgtgggtgacacagggggacaggaaaacccatttctcaacccagatccatgtctccactgcttctactctgggttgggattcaggaagacaggcacagtcctctctgttcatagaaacacctgccagtgtcaaggattccagtcaggtgtctatcccaactggtcagggagagaagggcagacccattctcaaagaccaccatgtccaaggtctgacagctccccactggctgcccccacaggggctttaggctggtctgggtcatggggaagcgtccctcttatcgctggtctgtgttctcctggatttggtatctatgttggtacgactcctggccttttatctaaaggactttggcttttgtaaatcacaagccaataatagacttttttctccccctctgttttttgctgtgtcatctctgccttgagactgccttgagacagtgcttgccttgagagagtgagccaattaacagctgcctgaattgtcattttccattttggtttgttagaggtgggaggggtgggttttgagaaggtcaaaagcaataccagaagtaaagggaaatatcagacaatattttattattttttcatagatgttctgccacacaaagaacttggggtgtaaggataaggcaaaagctccaatcccatttttcagttctcctaggatgcacccctcagggagcctggccagagttccgaggcccgtgagcgtcagctgttgctttattttccatcaaagccctctgagaagtgagacctcagcaattccgggagccacatagagacagacttggcaagggaccccctggttctgagccagtagctgccatctggaaattcctcttttagcctctccttagaggtgaatgtgaatgaagcctcccaggcacccgctgaatttctgaggccttgcttaaagctcagaagtggtttaggcatttggaaaatctggttcacatcataaagaacttgatttgaaatgttttctatagaaacaagtgctaagtgtaccgtatatacttgatgttggtcatttctcagtcctatttctcagttctattattttagaacctagtcagttctttaagattataactggtcctacattaaaataatgcttctcgatgtcagattttacctgtttgctgctgagaacatctctgcctaatttaccaaagccagaccttcagttcaacatgcttccttagcttttcatagttgtctgacatttccatgaaaacaaaggaaccaactttgttttaaccaaactttgtttggttacagttttcaggggagcgtttcttccatgacacacagcaacatcccaaagaaataaacaagtgtgacaaaaaaaaaaaaaaacaaacctaaatgctactgttccaaagagcaacttgatggttttttttaatactgagtgcaaaaggtcacccaaattcctatgatgaaattttaaattaatgggcacctttcaacatcatttgcttccttatctacagttgattcagaaatctgcattttttattcttttatatgacttttaagtaaaagatttatatggatttga

SEQ ID NO: 435 - DNA, 3907 bp, Homo sapiens
agtgatgaactcatgctctgttctgttttctcaaagctgaagtcggctaggtttgcaaagctgtgggctgagcactcaggcaatcacactctcagaaactgcggcggctctggactgcagcctcccaaggctccatgccagacaaagcatgcgtgtcacacttgctacaatagcctggatggtttcttttgtctccaattattcacacacagcaaatattttgccagatatcgaaaatgaagatttcatcaaagactgcgttcgaatccataacaagttccgatcagaggtgaaaccaacagccagtgatatgctatacatgacttgggacccagcactagcccaaattgcaaaagcatgggccagcaattgccagttttcacataatacacggctgaagccaccccacaagctgcacccaaacttcacttcactgggagagaacatctggactgggtctgtgcccattttttctgtgtcttccgccatcacaaactggtatgacgaaatccaggactatgacttcaagactcggatatgcaaaaaagtctgtggccactacactcaggttgtttgggcagatagttacaaagttggctgcgcagttcaattttgccctaaagtttctggctttgacgctctttccaatggagcacattttatatgcaactacggaccaggagggaattacccaacttggccatataagagaggagccacctgcagtgcctgccccaataatgacaagtgtttggacaatctctgtgttaaccgacagcgagaccaagtcaaacgttactactctgttgtatatccaggctggcccatatatccacgtaacagatacacttctctctttctcattgttaattcagtaattctaatactgtctgttataattaccattttggtacagcacaagtaccctaatttagttcttttggactaatacaattcaggaaagaaaaaacccaaaaaccaacctcattcacatatggctttttttttaaccaataacaattaggtgtacttctattttaaaacatttcagaaaaaaatatatgttatagcaatactcttactcaaaagaagaaatttcctaactctatcagataaactcatctttagtataaataagcattatttgcaggttgccacaggtggacttttagtaagtaacctaacccatgtttcagcttctaaatctgcaaaatgagcaaggtacagtagcacatttttaggtgattcttagtaactccagtagccttcattagttaaaaacattattattttttgcatgctgcttcgactctaaatatctggttttccctgtctttttggtttactacttccccagattcagaacagaggagtaactaggggatctgattttagaggccttaattttctgttcatggactgttaaaagtaaaaccaaactttcaaaagggataaacctaaatatttacttgttatcattagagagggaacatcaaatgctgggacatcattactaaccaatagcatcagacactggatttaatggataatcacaatggtcgtaatgtatacaaagacttatataccactttctcgtataaatttttcaaaaaatacaataataatataatttataaagaacactcttctatgaacaaccaccaccaccaaaaaaaaaaaaagccctcagaaaatttctcacaaataaggcaactaatgcctgatatctcaaaatcctttacaaaaggagatagttctagtcaaggagttttgggtatgttacttttttttcttctttttcttttcatctgcctccatcttaagtgcaatttcttcagctgtaagagctcccagtttcttattctttgctttcttaaccttttccttgatgctggccacatcaattttagtttcagtagaagctagacaaattaaaagcacaacacatgtaatactttagattttaccaagtaaaacaaagaatatatgtttaacaaagaatatatgtttaaggcagttaacttcagagtattcttataattgaataattgaaaggtgatcacagtataaaatataaaaacacttgcctaaagcagttagaaatttcttcagattaagataaaacaaatcataaaatactttatatattagtacaagtatacataaaaatggcataaatggcataattgaaccaattactggattcaactatattaagactatttccttaaatcctacttcagactaaattattttacctacattcttttccatattttggaacttctgagtcattattttccatcttgcacattaaaataatttaaaattacatgtatcccttctcaataagtttaatcagctaaccctaagctagaggtcaaaatctacttcctctaatatcaaaacgaaaatttaaagttttccaaatattaattcaatattaattgaatattcaatgaattaattcatttaatgttagattaattcattgaatattaattcaatgaatgactaattaatagtattttaacaagattttggtatatttaacaacattttggtaataaagacaataatttgagagtgtgtggaagtccccctaatagaagccaactatctaatcaatgccaaaagtgtgaacaaaatagagaaaggaagcagtgaaaaagaatgcaactttttcttaccattcaaagtacaggatcacagcataaaagaatcataagataaaacatcaaactacccagcaacctgagaagcacagagtgttaaagcctccaccgtgtggagaaactaaattagggtaactagctattgagtatattgagtaccttcaaagcactcaactgacaggttttacagactggaaattataatacttatgacatttctaccttttatataaccaataatctaccatagaatgtagtatttttaaagctattaacaagcaatatattaaaataataatgtattatatctgtttctgacccagtctatgtacaatattgctggtgagccctctcccttcagtgtgtcactgttcactttggagggttactttaggaagaggataagtgttaccacaggggaaaaaaatgcagaagaggatgcatcagaagaaatggcatgacaatgttttctcttagtgtcttttaaatactaggttagtgcgaaagtgatttctgccatttaaaaaccacaatcactttcgcactaatagctcctgaataagacctgtcagcatcctttagtctaaggtgatgagaaatccatgttaccgatatagaagccaaactctaagccaagatcacataaagagaagaaaaagtacaacttctgataattcctctttgagaggcatgacagcagagctcagggatcttcttgcatttctacagaagatgcactggctgccctgggtttgtatctttcacaacaaagagtcttttccaagcacagaccagaggtcaggagaggactgtcaatccagtttgcactgaaataggcattagctgcctctaaattataaattatctcagccatcccttgtccttaggattagtaattaatgaaatgctaagagaactgatgaaaagatacaactgtttcttaaaaagattcagacaaatttattatgggtttacttttcctaattaataaagacttttacatcatagaaagcattaccttccttaggtttcacaattggtttttccttaggtggaataaatgctttgtttctttcctcttgtctcttactgatggcttctgcttgtttagcctacattaataaataaaaaatatatcagttaaatgtatttatagttaaataattcaagtatctatgaactttgctattcatgtgagccagacataaagtgccgtacctttattgcttcca

SEQ ID NO: 436 - DNA, 4131 bp, Homo sapiens
ggtgcgcgccgcggcttgggggagagttgagcgcttttcccccctcttttttttttttttcctcttcttcttaaacaaaccacaaacggatgtgagggaaggaaggtgtttcttttactcctgagcccagacacctcactctgttccgtctaagcttgttttgctgaacacttttttttaaaaaaggaaaaagaaaaggagttgcttgatgtgagagtgaaatggacgtaagattttatccacctccagcccagcccgccgctgcgcccgacgctccctgtctgggaccttctccctgcctggacccctactattgcaacaagtttgacggtgagaacatgtatatgagcatgacagagccgagccaggactatgtgccagccagccagtcctaccctggtccaagcctggaaagtgaagacttcaacattccaccaattactcctccttccctcccagaccactcgctggtgcacctgaatgaagttgagtctggttaccattctctgtgtcaccccatgaaccataatggcctgctaccatttcatccacaaaacatggacctccctgaaatcacagtctccaatatgctgggccaggatggaacactgctttctaattccatttctgtgatgccagatatacgaaacccagaaggaactcagtacagttcccatcctcagatggcagccatgagaccaaggggccagcctgcagacatcaggcagcagccaggaatgatgccacatggccagctgactaccattaaccagtcacagctaagtgctcaacttggtttgaatatgggaggaagcaatgttccccacaactcaccatctccacctggaagcaagtctgcaactccttcaccatccagttcagtgcatgaagatgaaggcgatgatacctctaagatcaatggtggagagaagcggcctgcctctgatatggggaaaaaaccaaaaactcccaaaaagaagaagaagaaggatcccaatgagccccagaagcctgtgtctgcctatgcgttattctttcgtgatactcaggccgccatcaagggccaaaatccaaacgctacctttggcgaagtctctaaaattgtggcttcaatgtgggacggtttaggagaagagcaaaaacaggtctataaaaagaaaaccgaggctgcgaagaaggagtacctgaagcaactcgcagcatacagagccagccttgtatccaagagctacagtgaacctgttgacgtgaagacatctcaacctcctcagctgatcaattcgaagccgtcggtgttccatgggcccagccaggcccactcggccctgtacctaagttcccactatcaccaacaaccgggaatgaatcctcacctaactgccatgcatcctagtctccccaggaacatagcccccaagccgaataaccaaatgccagtgactgtctctatagcaaacatggctgtgtcccctcctcctcccctccagatcagcccgcctcttcaccagcatctcaacatgcagcagcaccagccgctcaccatgcagcagccccttgggaaccagctccccatgcaggtccagtctgccttacactcacccaccatgcagcaaggatttactcttcaacccgactatcagactattatcaatcctacatctacagctgcacaagttgtcacccaggcaatggagtatgtgcgttcggggtgcagaaatcctcccccacaaccggtggactggaataacgactactgcagtagtgggggcatgcagagggacaaagcactgtaccttacttgagaatctgaacacctcttctttccactgaggaattcagggaagtgttttcaccatggattgctttgtacagtcaaggcagttctccattttattagaaaatacaagttgctaagcacttaggaccatttgagcttgtgggtcacccactctggaagaaatagtcatgcttctttattatttttttaatcctttatggacattgtttttcttcttccctgaaggaaatttggaccattcagattttatgttggttttttgctgtgaagtgctgcgctctagtaactgccttagcaactgtagatgtctcggataaaagtcctggattttccattggttttcataatgggtgtttatatgaaactactaaagactttttaaatggcttgatgtagcagtcatagcaagtttgtaaatagcatctatgttacactctcctagagtataaaatgtgaatgtttttgtagctaaattgtaattgaaactggctcattccagtttattgatttcacaataggggttaaattggcaaacattcatatttttacttcatttttaaaacaactgactgatagttctatattttcaaaatatttgaaaataaaaagtattcccaagtgattttaatttaaaaacaaattggctttgtctcattgatcagacaaaaagaaactagtattaagggaagcgcaaacacatttattttgtactgcagaaaaattgcttttttgtatcactttttgtgtaatggttagtaaatgtcatttaagtccttttatgtataaaactgccaaatgcttacctggtattttattagatgcagaaacagattggaaacagctaaattacaacttttacatatggctctgtcttattgtttcttcatactgtgtctgtatttaatctttttttatggaacctgttgcgcctatttatgaaataataaatataggtgtttgtaagtaaatttgttagtatttgaaagaggtttctttgatgttttaacttttgctggcaaaaaaaaattcacgcttggtgtgaatactttattatttagtttttacagtaacatgaataaagccaaacctgcttttcatttagcagcaaattaaagtaaccagtccttatttctgcatttctttggttgatgcaaacaaaaaactattatatttaagaactttatttcttcatacgacataacagaattgccctccaagtcacacaagctccaagactaaacaaacagacaggtcctctgtcttaaaaaggttacttcttggttctcagctggttctagtcaattctgaaccaccaccccccgccccccgcaaaaaagtaaaagtcaaaccaaacttcctcaagctgcatgcttttcacaaaatccagaaagcatttaagaattgaactaggggctggaagaagtgaaagggaagcatctaaaaatgaaaggtgagtaaccagatagcaaaagaaaagggaaagccatccaaatttgaaagctgttgatagaaattgagattcttgctgtcttttgtgcctctacaagctactactcattccagaattcctgggtcttccaagaggattcttaaggtaccagagatttgctagggaaccaaaagtgcttgagaatctgcctgagggcttgcatagctttcacattaaaaaaagaaaaagctagcagatttactcctttttaggggatcatatcaagaaagttagtctggttggaaaccaagagaatggctgatgtctctttcttggaatatgtgaaataaatttagcagtttaactaaatacaaatatatgcattgtgtaatccactcagaattaaacagacaaaaggtatgcttgctttggaatgattttaggcattgtacaaccttgaatcacttgagcatgtaataactaataaataatgcagatccatgtgattattaaaatgactgtagctgagagctctaattttcctgtcttgaaactgtataagaactcatgtgattaagttcacagtttattgtttgtctgtttagtattttagaaatataccagcactactaattaactaatgtcttttatttattatattatgataaagtaaaaatttcacttgcattaagtctaaactgagaaggtaattactgggaggagaatgagcagctttgactttgacaggcggtttgtgcaggaaagcacagtgccgtgttgtttacagcttttctagagcagctgtgcgaccagggtagagagtgttgaaattcaataccaaatacagtaaaaacaaatgtaaataaaagaaaacacatcatcaataaaactgttattatgcgtg

SEQ ID NO: 437 - DNA, 96 bp, Homo sapiens
ggatcgatgatgagtcctccaaaaaaaacattccttggaaaagctgaacaaaatgagtgaaaactcataccgtcattctcatcggaactgaggtcc

SEQ ID NO: 438 - DNA, 2743 bp, Homo sapiens
ggaaagttgtgacggtcgagcttgagcctggcgggccgcggagcgttcacctgcggccgggaggggggggcgtggccggcgccggctcttgcggccgagcagagttgcggcgtgggaaagagccgctaggagcagaccgcgccgccgccggagccgcgcctgcccaggcccggggagggaggaggcgggcgtcagggtgctgcgccccgctcggcgtccgagcttccggccgggctgtgccccgcgcggtcttcgccgggatgaagcgcccctgcgaggagacgacctccgagagcgacatggacgagaccatcgacgtggggagcgagaacaattactcggggcaaagtactagctctgtgattagattgaattctccaacaacaacatctcagattatggcaagaaagaaaaggagagggattatagagaaaaggcgtcgggatcggataaataacagtttatctgagttgagaagacttgtgccaactgcttttgaaaaacaaggatctgcaaagttagaaaaagctgaaatattgcaaatgacagtggatcatttgaagatgcttcaggcaacagggggtaaaggctactttgacgcacacgctcttgccatggacttcatgagcataggattccgagagtgcctaacagaagttgcgcggtacctgagctccgtggaaggcctggactcctcggatccgctgcgggtgcggcttgtgtctcatctcagcacttgcgccacccagcgggaggcggcggccatgacatcctccatggcccaccaccatcatccgctccacccgcatcactgggccgccgccttccaccacctgcccgcagccctgctccagcccaacggcctccatgcctcagagtcaaccccttgtcgcctctccacaacttcagaagtgcctcctgcccacggctctgctctcctcacggccacgtttgcccatgcggattcagccctccgaatgccatccacgggcagcgtcgccccctgcgtgccacctctctccacctctctcttgtccctctctgccaccgtccacgccgcagccgcagcagccaccgcggctgcacacagcttccctctgtccttcgcgggggcattccccatgcttcccccaaacgcagcagcagcagtggccgcggccacagccatcagcccgcccttgtcagtatcagccacgtccagtcctcagcagaccagcagtggaacaaacaataaaccttaccgaccctgggggacagaagttggagctttttaaatttttcttgaacttcttgcaatagtaactgaatgtcctccatttcagagtcagcttaaaacctctgcaccctgaaggtagccatacagatgccgacagatccacaaaggaacaataaagctatttgagacacaaacctcacgagtggaaatgtggtattctcttttttttctctcccttttttgtttggttcaaggcagctcggtaactgacatcagcaacttttgaaaacttcacacttgttaccatttagaagtttcctggaaaatatatggaccgtaccatccagcagtgcatcagtatgtctgaattggggaagtaaaatgccctgactgaattctcttgagactagatgggacatacatatatagagagagagtgagagagtcgtgtttcgtaagtgcctgagcttaggaagttttcttctggatatataacattgcacaagggaagacgagtgtggaggataggttaagaaaggaaagggacagaagtcttgcaataggctgcagacattttaataccatgccagagaagagtattctgctgaaaccaacaggttttactggtcaaaatgactgctgaaaataattttcaagttgaaagatctagttttatcttagtttgccttctttgtacagacatgccaagaggtgacatttagcagtgcattggtataagcaattatttcatcagttctcagattaacaagcatttctgctctgcctgcaggcccccaggcacttttttttttggatggctcaaaatatggtgctgctttatataaaccttacatttatatagtgcacctatgagcagttgcctaccatgtgtccaccagaggctatttaattcatgccaacttgaaaactctccagtttgtaggagtttggtttaatttattcagtttcattaggactatttttatatatttatcctcttcattttctcctaatgatgcaacatctattcttgtcaccctttgggagaagttacatttctggaggtgatgaagcaaggagggagcactaggaagagaaaagctacaatttttaaagctctttgtcaagttagtgattgcatttgatcccaaaacaagatgaatgtatgcaatgggatgtacataagttatttttgcccatgcctaaactagtgctatgtaatggggttgtggttttgtttttttcgatttcgtttaatgacaaaataatctcttaatatgctgaaatcaagcacgtgagagtttttgtttaaaagataagagacacagcatgtattatgcacttcatttctctactgtgtggagaaagcaataaacattatgagaatgttaaacgttatgcaaaattatacttttaaatatttgttttgaaattactgtacctagtcttttttgcattactttgtaacctttttctatgcaagagtctttacataccactaattaaatgaagtcctttttgactatt

SEQ ID NO: 439 - DNA, 1633 bp, Homo sapiens
gctcagcaaggggtccgtccttctctgtcactgtctcttttgcctgttgtaattctgtctgcctctctgggactctgcctgtctcactctttctgtctgtgcctctcctcactcttgttctttctgcctgaatcacagccctcagtttttctgtcctcatgcatttgtctttgtggctctttccgtctttctgcccttgacaccatcccctctcccagtgcttcccctctgcttccagatcgcttcatgacttaggcagggaaacagaggtcagggcctccttccaggcttccctctgcatcttactgagtatgcaggtcggaagagcctcgggtcctgcctccgcgggtggcctagagccaaaggaaggcggagcccgtcggggcgggattggcccttagggccacctcataaagcctggggcgaggggcacaacggccttgggaaggagccctgctggggccgtccagtcccccagacctcacaggctcagtcgcggatctgcagtgtcatgcctgggagccctcggcccgcgccaagctgggtgctgttgctgcggctgctggcgttgctgcggcccccggggctgggtgaggcatgcagctgcgccccggcgcaccctcagcagcacatctgccactcggcacttgtgattcgggccaaaatctccagtgagaaggtagttccggccagtgcagaccctgctgacactgaaaaaatgctccggtatgaaatcaaacagataaagatgttcaaagggtttgagaaagtcaaggatgttcagtatatctatacgccttttgactcttccctctgtggtgtgaaactagaagccaacagccagaagcagtatctcttgactggtcaggtcctcagtgatggaaaagtcttcatccatctgtgcaactacatcgagccctgggaggacctgtccttggtgcagagggaaagtctgaatcatcactaccatctgaactgtggctgccaaatcaccacctgctacacagtaccctgtaccatctcggcccctaacgagtgcctctggacagactggctgttggaacgaaagctctatggttaccaggctcagcattatgtctgtatgaagcatgttgacggcacctgcagctggtaccggggccacctgcctctcaggaaggagtttgttgacatcgttcagccctagtagggaccagtgaccatcacatcccttcaagagtcctgaagatcaagccagttctccttccctgcagagctttggccattaccacctgacctcttgctgccagctaataagaagtgccaagtggacagtctggccactgtcaaggcagggaaggggccatgacttttctgccctgccctcagcctgttgcccctgcctcccaaaccccattagtctagccttgtagctgttactgcaagtgtttcttctggcttagtctgttttctaaagccaggactattccctttcctccccaggaatatgtgttttcctttgtcttaatcgatctggtaggggagaaatggcgaatgtcatacacatgagatggtatatccttgcgatgtacagtatcagaaggtggtttgacagcatcataaacaggctgactggcaggaatgaaaacaagaa

SEQ ID NO: 440 - DNA, 2131 bp, Homo sapiens
tgagaagggcaaatgctatcattggaaaaactgacaaaagtcccaataggaaaaataaggaagtggagagttactatgtttctaatttttcatgtgcttctatttttttcctacttcagagccattgactaatagttgagtataacacaggttgtgtttccgggctgctgaaacatgacactaatattttcaaagaactgtggaagcctaaaaggaagccaatgagaaataactaaatgagagtttaggactgcagccttcattttcattcaaagatttaaaagtttccataaagtaaaatgttcttctccggccacctgttttcatagttctgtgttttccttcaggcctttctggcttcctatatggcagtaagaaaatgatgtgcttaatgattacaaatttcatatggaatacgaactttcagtttgtacatatgatgcacagagatgcttttgtggttttattggttttcatattacaaacaaagaaactagaaaatgaaaccattccaaaagtggaagtaatttctcactgcccctgtgataaactgtggtcactggctgtggcagcaactattataagatgctctgaaaactcttcagacactgaggggcaccagaggagcagactacaagaatggcacacgctatggaaaactcctggacaatcagtaaagagtaccatattgatgaagaagtgggctttgctctgccaaatccacaggaaaatctacctgatttttataatgactggatgttcattgctaaacatctgcctgatctcatagagtctggccagcttcgagaaagagttgagaagttaaacatgctcagcattgatcatctcacagaccacaagtcacagcgccttgcacgtctagttctgggatgcatcaccatggcatatgtgtggggcaaaggtcatggagatgtccgtaaggtcttgccaagaaatattgctgttccttactgccaactctccaagaaactggaactgcctcctattttggtttatgcagactgtgtcttggcaaactggaagaaaaaggatcctaataagtatgtaaacactgggcccctgacttatgagaacatggacgttttgttctcatttcgtgatggagactgcagtaaaggattcttcctggtctctctattggtggaaatagcagctgcttctgcaatcaaagtaattcctactgtattcaaggcaatgcaaatgcaagaacgggacactttgctaaaggcgctgttggaaatagcttcttgcttggagaaagcccttcaagtgtttcaccaaatccacggcaagtatcatgtgaacccaaaagcatttttcagtgttcttcgcatatatttgtctggctggaaaggcaacccccagctatcagacggtctggtgtatgaagggttctgggaagacccaaaggagtttgcagggggcagtgcaggccaaagcagcgtctttcagtgctttgacgtcctgctgggcatccagcagactgctggtggaggacatgctgctcagttcctccaggacatgagaagatatatgccaccagctcacaggaacttcctgtgctcattagagtcaaatccctcagtccgtgagtttgtcctttcaaaaggtgatgctggcctgcgggaagcttatgacgcctgtgtgaaagctctggtctccctgaggagctaccatctgcaaatcgtgactaagtacatcctgattcctgcaagccagcagccaaaggagaataagacctctgaagacccttcaaaactggaagccaaaggaactggaggcactgatttaatgaatttcctgaagactgtaagaagtacaactgagaaatcccttttgaaggaaggttaatgtaacccaacaagagcacattttatcatagcagagacatctgtatgcattcctgtcattacccattgtaacagagccacaaactaatactatgcaatgttttaccaataatgcaatacaaaagacctcaaaatacctgtgcatttcttgtaggaaaacaacaaaaggtaattatgtgtaattatactagaagttttgtaatctgtatcttatcattggaataaaatgacattcaataaataaaaatgcataagatata

SEQ ID NO: 441 - DNA, 401 bp, Homo sapiens
accacgcctcctccaagtcccagcgaacccgcgtgcaacctgtcccgactctagccgcctcttcagctcgccatggatcccaactgctcctgcgccgccggtgactcctgcacctgcgccggctcctgcaaatgcaaagagtgcaaatgcacctcctgcaagaaaagctgctgctcctgctgccctgtgggctgtgccaagtgtgcccagggctgcatctgcaaaggggcgtcggacaagtgcagctgctgcgcctgatgctgggacagccccgctcccagatgtaaagaacgcgacttccacaaacctggattttttatgtacaaccctgaccgtgaccgtttgctatattcctttttctatgaaataatgtgaatgataataaaacagctttgacttga

SEQ ID NO: 442 - DNA, 6603 bp, Homo sapiens
gaaactggatacatggtttacagcaggtcactaatgttggaaaaagtacagagtccagggaaagacttgcttgtaactttatgaattctggatttttttttttcctttgctttttcttaactttcactaagggttactgtagtctgatgtgtccttcccaaggccacgaaatttgacaagctgcacttttcttttgctcaatgatttctgctttaagccaaagaactgcctataatttcactaagaatgtcttctaattcagatactggggatttacaagagtctttaaagcacggacttacacctattgataacacagaaaatacaggcacaagaaagatgagagagcagcacacaaccatttcgcatctttttcgtcgggcagaaccgccgcggtgcgcaggcaaggagtccttcccggcagctccgcgcagctccggttccgcgtccggggccgcagctagagcgcgctcgggccggagacgcggactgcgcgcgcacgggggacgcgcgctcgggggctcgcgcccgcgcgggcggtcttgggctcctgctgcgcgcagccccagctggccgctgccaaaatagagttgagctgggtcgggagaccacgcacgccgatccctcacagtctcccccacaccccatgggtgaattaaagagggtaaggtaggggaaagagacgctgttgcacttttctctgcaaccctggaagaactgtgtttccagctaccgcacgcgcaactcacatcgcaagggaccgaggcggtacactctgagcgtaaacagagaacacctgcagctctggaatcggtcccaccgcagagggctgggaaccggaggactgtcggtccagcccataaggggctgctggggactaaacctcaagaaaagtaccgaagaaggctctcccctggcctcagcgagactaccccaacatcctaaacctgtgcaggcacttccgggcgccggattccgggataacaaaattccagtcaatttgccgatcgaggaaattgccgctctggctgcttctccttcgccgccacgctcagacagaggtcgcttctgactagctgtgctgggcttccggaccgacacggatcccccatccccgcccgcggtcgccttgtcatgctgcccaaagtggagacggaagccctgggactggctcgatcgcatggggaacagggccagatgccggaaaacatgcaagtgtctcaatttaaaatggtgaattactcctatgatgaagatctggaagagctttgtcccgtgtgtggagataaagtgtctgggtaccattatgggctcctcacctgtgaaagctgcaaggtttgctcacacattgctacctgaaaaatataatgtccaacaccaaaataaaccagtggattacttcttttaagctaaatttaggctccttttttaaagactcaactaaaaatgagggagaaagagagagtcttagggagatgattcttagaagtgtgtgtctgatttagttcaaaaggcaaagaaatttatgctgtttagaaaactttgccagtctcatggttctaaaatactttattgtagtaaagtgatatagctgtagaaagacttccatttctaacagtcctaaatattgattttgcttgacttatatatatttaaagcatcgttgttcttgaaagggaatatgacaaactatttcccaaatacattttaacttcagagtatttctgtgctataagtctaaacattctttatccacagacataaaagcctaaattcccaactgtgtgatttcatcttgatttattccaaaataattttaaggattttttgaaatttatatcataaagaccaagaaatcagattttagtttttaatataataatttttataaatatatgacctatttaagtgcatggattttaatatgtaaaatatgctatattgttaccaaaaatataaattatactttaagaatttaggattttttaagcgaacagtccaaaataataaaaggtacacatgtatagaaaaccagaactgccaaattgacaaaacacagagaaagcgttgtccttactgtcgttttcaaaaatgtctaagtgttggaatgaagctagaagctgtaagggccgaccgaatgcgtggaggaaggaataagtttgggccaatgtacaagagagacagggccctgaagcaacagaaaaaagccctcatccgagccaatggacttaagctagaagccatgtctcaggtgatccaagctatgccctctgacctgaccatttcctctgcaattcaaaacatccactctgcctccaaaggcctacctctgaaccatgctgccttgcctcctacagactatgacagaagtccctttgtaacatcccccattagcatgacaatgccccctcacggcagcctgcaaggttaccaaacatatggccactttcctagccgggccatcaagtctgagtacccagacccctataccagctcacccgagtccataatgggctattcatatatggatagttaccagacgagctctccagcaagcatcccacatctgatactggaacttttgaagtgtgagccagatgagcctcaagtccaggctaaaatcatggcctatttgcagcaagagcaggctaaccgaagcaagcacgaaaagctgagcacctttgggcttatgtgcaaaatggcagatcaaactctcttctccattgtcgagtgggccaggagtagtatcttcttcagagaacttaagggtctcactctgtcgcccagtctggagtgcagtggcacgatcttggctcatggcaacctccacctcctgcattcaagtgattcgcctgcctcagcctcccgagtaggttgatgaccaaatgaagctgcttcagaactgctggagtgagctcttaatcctcgaccacatttaccgacaagtggtacatggaaaggaaggatccatcttcctggttactgggcaacaagtggactattccataatagcatcacaagccggagccaccctcaacaacctcatgagtcatgcacaggagttagtggcaaaacttcgttctctccagtttgatcaacgagagttcgtatgtctgaaattcttggtgctctttagtttagatgtcaaaaaccttgaaaacttccagctggtagaaggtgtccaggaacaagtcaatgccgccctgctggactacacaatgtgtaactacccgcagcagacagagaaatttggacagctacttcttcgactacccgaaatccgggccatcagtatgcaggctgaagaatacctctactacaagcacctgaacggggatgtgccctataataaccttctcattgaaatgttgcatgccaaaagagcataagttacaacccctaggagctctgctttcaaaacaaaaagagattgggggagtggggagggggaagaagaacaggaagaaaaaaagtactctgaactgctccaagtaacgctaattaaaaacttgctttaaagatattgaatttaaaaaggcataataatcaaatacttaatagcaaataaatgatgtatcagggtatttgtattgcaaactgtgaatcaaaggcttcacagccccagaggattccatataaaagacattgtaatggagtggattgaactcacagatggataccaacacggtcagaagaaaaacggacagaacggttcttgtatatttaaactgatctccactatgaagaaatttaggaactaatcttattaattaggcttatacagcgggggatttgagcttacaggattcctccatggtaaagctgaactgaaacaattctcaagaatgcatcagctgtacctacaatagcccctccctcttcctttgaaggccccagcacctctgccctgtggtcaccgaatctgtactaaggacctgtgttcagccacacccagtggtagctccaccaaatcatgaacagcctaattttgagtgtctgtgtcttagacctgcaaacagctaataggaaattctattaatatgttagcttgccattttaaatatgttctgagggttgttttgtctcgtgttcatgatgttaagaaaatgcaggcagtatccctcatcttatgtaagtgttaattaatattaagggaaatgactacaaactttcaaagcaaatgctccatagctaaagcaacttagaccttatttctgctactgttgctgaaatgtggctttggcattgttggatttcataaaaaatttctggcaggaagtcttgttagtatacatcagtctttttcatcatccaagtttgtagttcatttaaaaatacaacattaaacacattttgctaggatgtcaaatagtcacagttctaagtagttggaaacaaaattgacgcatgttaatctatgcaaagagaaaggaaaggatgaggtgatgtattgactcaaggttcattcttgctgcaattgaacatcctcaagagttgggatggaaatggtgatttttacatgtgtcctggaaagatattaaagtaattcaaatcttccccaaaggggaaaggaagagagtgatactgacctttttaagtcatagaccaaagtctgctgtagaacaaatatgggaggacaaagaatcgcaaattcttcaaatgactattatcagtattattaacatgcgatgccacaggtatgaaagtcttgccttatttcacaattttaaaaggtagctgtgcagatgtggatcaacatttgtttaaaataaagtattaatactttaaagtcaaataagatatagtgtttacattctttaggtcctgaggggcagggggatctgtgatataacaaaatagcaaaagcggtaatttccttaatgttatttttctgattggtaattatttttaacagtacttaattattctatgtcgtgagacactaaaatcaaaaacgggaatctcatttagactttaatttttttgagattatcggcggcacaatcactttgtagaaactgtaaaaaataaaagtatctcctagtcccttaattttttcataaatatttctggcttttgagtagtgtatttatattgtatatcatactttcaactgtagacaattatgatgctaatttattgtttcttggtttcacctttgtataagatatagccaagactgaagaaaccaaatatatgtgtttactgtagcatgtcttcaaattagtggaacttagttcagggacatagaagagtcttaatgaattaaaatcattcacttgattaaatgtctgtaaatcttcatcattcctactgtagtttatttaatatctattgtaaattatgtgacttgtagcttcctctggttttcaagtaaactcaacaaggtggagtcttacctggttttcctttccaagcattgtaaattgtataccaaagatattagttattacttctgtgtgtacaaagaggattattttattatgtttattaatcacctctaatactcatccacatgaagggtacacattaggtaagctgggcgttgactcatgcgcagtctcagtcacccgtgttatcttcgtggctcaaaggacaatgcaaaatcgccgatcagagctcatacccaaagcattacagagaacagcagcatcattgccctccccagctgaaaaacaagttggctagaagatacatggagaggaatggtgtggtcaacagttaatgaaacggttctatcatgcatgtgtaatgtggatggagacaattataagatttgactataactatttggagggtctttaacattgccaaaaaaacaaatatgttgatttttattttattttattttttattttaagaggcgggatcttgatctcacatgttgcccaggctggccttgaactcctgggctcaagcattcctcctgcctcagcctcccccatagctgggactaggggtgcatgccagcatacctggctacgttgactcttaaaatctatgttctcttattttaaagatacagtgctccccactgaaaattaaacctaaaaaatgtcacatattggtatgttgttaacctggtagattaaatcatgagaatgattagaaagacgggcaacacagcgggttacatccacactgctgatcacaccaacgacaggagctgataagcaagaaagcgtcacagccagcgtctgttcacccaaggttgacaagtgaagtttctctaatgttgattgttagccgatttgtaacctggcatttacttagcaactgccttatcaattacaggatttgccggtaaaagcagactcaaatataaaggtttttggcttaacttggtttattatagttgctctatgtttgtaaacagacaatctctaatgtctgattatttgtatcacagatctgcagctgccttggacttgaatccatgcaatgtttagagtgtgaagtcagttacttgttgatgttttcttactgtatcaatgaaatacatattgtcatgtcagttcttgccaggaacttctcaacaaaatggaattttttttttcagtatttcaataaatattgatatgcccagcctgataatttttaaaa

SEQ ID NO: 443 - DNA, 2294 bp, Homo sapiens
gtgtgctaaaggaaaccaacagcggcctaggggtgaaaggacagccagggttagatgttctgaggaggcgggagcaaccgagagagcacgtgagcatctgtcctttctacccgttcctctttatctttagtgttcagtagcagcggggatagcccggggcccggtgtatggccacggagttacagtgtccggactccatgccctgtcacaaccagcaagtaaactctgcctcaaccccaagtcccgagcagctgcgacctggcgatctgatcctggaccacgcagggggaaacagagcctccagggccaaggtgattctcctcacggggtacgcccattctagcctgccggccgagctggactctggggcctgcggcggctccagcctcaactcagagggcaacagtggtagtggtgacagtagcagctatgacgcaccagctggcaactccttcctagaggactgcgaactctcccggcagatcggggcgcagcttaagctgctgcctatgaatgatcagatacgggagctacagaccatcatccgtgacaagacagccagtagaggtgacttcatgttttctgcggatcgtttggttttgcctgaggatttattccaaaagagcatagacaactcctgttctgcttttcatcatcagacttgttgtggaagagggattgaatcagctgccatataaagaatgcatggtgaccactccaacagggtacaagtatgaaggagtgaaatttgagaagggaaattgtggggtcagcataatgagaagcggtgaggcaatggaacaaggtttacgagactgctgtcgatccatacgaattggaaagatcctgattcagagtgatgaggagacacaaagagccaaagtatattatgccaaattccccccagacatttaccggagaaaagtccttctgatgtatccaattctcagcactggaaatactgtaattgaagctgtaaaggttcttatagaacatggagttcaacccagtgttatcatcctactcagtctgttctccactcctcatggtgagttcagcatgaggcagtaactagggctccatatagtcctgaggtgggtgccaaatcaatcattcaggagtttccagagatcacaattttaactactgaagttcatcctgttgcacctacacattttggacagaaatactttggaacagactaagttatttaagtaaaataattatcttatgtaatattacaatcatgttttgattttctatttgttttactgattcacttgagggtggcagagaaaaatgtgttaaaatgctttttagttttggaagtgggtatatttgaggttatatctcatttagttatttgtttactgttggcaccgaattcaacaatgaagtatatgcaactcttacaaaacataaattttaataatattctaatgcaaattactgaaccctcagtgcattaaaattatttcctaatttatgagcctcttagtttggaggttgcttgaagccacaaataaaactcaaatgagagtcagttctttgtcccactgtagtttgcattttgtttagtttggttttagctctactaaggtttcacatatgtggctattgccacattcctctactgttttctttctgatactggacatgctagtaacttggagaggagaataaaagaatgtctcctggaattttacattcccattaatgtcctcattcagttggcagacctaggatgtatggttaactctcaggccattatgtttttcatggctcatttcccaaactgcattgttggtaggtgccttgctaagctgtaatgcagtgaagaagatggtggggcatttttagtaattggaactgtaacattaatttacaagattgaaccggggatgtctggatgctgacaagggagagccaagtactgttaatgccatcaatcctctaggaaggaattggtggtttttctgaagtgtgggggaaagggtggtttcttgctggatttcatggccagtaagtaaatttaaatgcttcatttttaatttggatgtttctgctagagacctttgatttggaaattagttattttgcatgtttgtcaactgtatatgtatgaaaatagaaaaaaaccatgctttttgtaaaaacccctaagatttgtatatgttcatctttaggcttctgaaagggagagaaatcatattggaaatcagtgttggtgttctgaaatctgcttgtaaaactctcatctcattttacattgatattaaaacattttaacagtg

SEQ ID NO: 444 - DNA, 2365 bp, Homo sapiens
acccccgagctgtgctgctcgcggccgccaccgccgggccccggccgtccctggctcccctcctgcctcgagaagggcagggcttctcagaggcttggcgggaaaaagaacggagggagggatcgcgctgagtataaaagccggttttcggggctttatctaactcgctgtagtaattccagcgagaggcagagggagcgagcgggcggccggctagggtggaagagccgggcgagcagagctgcgctgcgggcgtcctgggaagggagatccggagcgaatagggggcttcgcctctggcccagccctcccgctgatcccccagccagcggtccgcaacccttgccgcatccacgaaactttgcccatagcagcgggcgggcactttgcactggaacttacaacacccgagcaaggacgcgactctcccgacgcggggaggctattctgcccatttggggacacttccccgccgctgccaggacccgcttctctgaaaggctctccttgcagctgcttagacgctggatttttttcgggtagtggaaaaccagggaaagcagcctcccgcgacgatgcccctcaacgttagcttcaccaacaggaactatgacctcgactacgactcggtgcagccgtatttctactgcgacgaggaggagaacttctaccagcagcagcagcagagcgagctgcagcccccggcgcccagcgaggatatctggaagaaattcgagctgctgcccaccccgcccctgtcccctagccgccgctccgggctctgctcgccctcctacgttgcggtcacacccttctcccttcggggagacaacgacggcggtggcgggagcttctccacggccgaccagctggagatggtgaccgagctgctgggaggagacatggtgaaccagagtttcatctgcgacccggacgacgagaccttcatcaaaaacatcatcatccaggactgtatgtggagcggcttctcggccgccgccaagctcgtctcagagaagctggcctcctaccaggctgcgcgcaaagacagcggcagcccgaaccccgcccgcggccacagcgtctgctccacctccagcttgtacctgcaggatctgagcgccgccgcctcagagtgcatcgacccctcggtggtcttcccctaccctctcaacgacagcagctcgcccaagtcctgcgcctcgcaagactccagcgccttctctccgtcctcggattctctgctctcctcgacggagtcctccccgcagggcagccccgagcccctggtgctccatgaggagacaccgcccaccaccagcagcgactctgaggaggaacaagaagatgaggaagaaatcgatgttgtttctgtggaaaagaggcaggctcctggcaaaaggtcagagtctggatcaccttctgctggaggccacagcaaacctcctcacagcccactggtcctcaagaggtgccacgtctccacacatcagcacaactacgcagcgcctccctccactcggaaggactatcctgctgccaagagggtcaagttggacagtgtcagagtcctgagacagatcagcaacaaccgaaaatgcaccagccccaggtcctcggacaccgaggagaatgtcaagaggcgaacacacaacgtcttggagcgccagaggaggaacgagctaaaacggagcttttttgccctgcgtgaccagatcccggagttggaaaacaatgaaaaggcccccaaggtagttatccttaaaaaagccacagcatacatcctgtccgtccaagcagaggagcaaaagctcatttctgaagaggacttgttgcggaaacgacgagaacagttgaaacacaaacttgaacagctacggaactcttgtgcgtaaggaaaagtaaggaaaacgattccttctaacagaaatgtcctgagcaatcacctatgaacttgtttcaaatgcatgatcaaatgcaacctcacaaccttggctgagtcttgagactgaaagatttagccataatgtaaactgcctcaaattggactttgggcataaaagaacttttttatgcttaccatcttttttttttctttaacagatttgtatttaagaattgtttttaaaaaattttaagatttacacaatgtttctctgtaaatattgccattaaatgtaaataactttaataaaacgtttatagcagttacacagaatttcaatcctagtatatagtacctagtattataggtactataaaccctaattttttttatttaagtacattttgctttttaaagttgatttttttctattgtttttagaaaaaataaaataactggcaaatatatcattgagccaaa

SEQ ID NO: 445 - DNA, 2203 bp, Homo sapiens
caggcgctgacgaggagcccggctgagggaggatgcgccgctgacgcctgcgggagccgcgcgcctggggcgggaggatgctccagaggggcctctggccgtggcgcacgcggctgctgccgacccctggcacctggcgcccagcgcgcccgtggccgctgccgcctccgccccaggttttgcgtgtgaagctgtgtggaaatgtgaaatactaccagtcacaccattatagtaccgtggtgccacctgatgaaataacagttatttatagacatggccttcccttggtaacacttaccttgccatctagaaaagaacgttgtcaattcgtagtcaaaccaatgttgtcaacagttggttcattccttcaggacctacaaaatgaagataagggtatcaaaactgcagccatcttcacagcagatggcaacatgatttcagcttctaccttgatggatattttgctaatgaatgattttaaacttgtcattaataaaatagcatatgatgtgcagtgtccaaagagagaaaaaccaagtaatgagcacactgctgagatggaacacatgaaatctttggttcacagactatttacaatcttgcatttagaagagtctcagaaaaagagagagcaccatttactggagaaaattgaccacctgaaggaacagctgcagccccttgaacaggtgaaagctggaatagaagctcattcggaagccaaaaccagtggactcctgtgggctggattggcactgctgtccattcagggtggggcactggcctggctcacgtggtgggtgtactcctgggatatcatggagccagttacatacttcatcacatttgcaaattctatggtcttttttgcatactttatagtcactcgacaggattatacttactcagctgttaagagtaggcaatttcttcagttcttccacaagaaatcaaagcaacagcactttgatgtgcagcaatacaacaagttaaaagaagaccttgctaaggctaaagaatccctgaaacaggcgcgtcattctctctgtttgcaaatgcaagtagaagaactcaatgaaaagaattaatcttacagttttaaatgtcgtcagattttccattatgtattgattttgcaacttaggatgtttttgagtcccatggttcattttgattgtttaatctttgttattaaattcttgtaaaacagaagtattgtttgaagttctcaactgagatttttactttttggatttttatgacttgctaatgttagaaagggcttgtatgcgtctatcaaagcaacggtggctgctgttagctaaaaatccttgtcagcttgtcccacgtttattctctatgtggaggtgaaagggtctgtgcttggcattcacttccattcttagacttaatttggaatcatccttttaaaaaaatcagagaccaggtcttgccaaatcaaactcctgggctcaagcaaccctcctgcctcaacctcccacggaatcgtcttgtcattaacttctttttttaatatgcagtagttgggagtaagatctttttatcatttatcaaaaaggcataaatgttccaccaaccataaagtatagttggtactttttgaacttcaactgaaacagtgtatataaacgattgcttttgaacctgcaaatcacaagtttcaggtatcgaagccaaaacagttaactttcttcagcctctggcagattattaacaaaacagtattattcagattctatatcatattaataagaattgaaccttgaaagtaacatctgttattctattaatgtgattgtgtgtgaatgggtctgatgactgttggactgtttgtaggaacttaacatggaagatgctgacagaatcagattttgcaggtgttcaacctatagtggctaagaattatgttttctatttcatcctcagaatgccatacaacaattctggaatgctgattttttttaaagtaggaattaaagtcatacacaaaatgtggtaattcatatgtagatgaaatattaaacatttaaatgaccgagtaaaaaacatctatcaattacacaaatgaacaagaatgtgagttagaaaaatgtaataaaatatgaatttcgaatattttattaagggatgatttaattcctggatttcaaaaacctttaaaaacatcaaacaataaactttt

SEQ ID NO: 446 - DNA, 778 bp, Homo sapiens
atatagcagcggcggcggtggcggcggccacaccgggcggcggacacgtggagggacccggcccgcgccttctgcccctgctgccggccgcgccatgcggtgagcgccccaggccgccagagcccacccgacccggcccgacgcccggacctgccgcccagacccgccaccgcacccggaccccgacgctccgaacccgggcgcagccgcagctcaagatggcccgaggcagcgccctcctgctcgcctccctcctcctcgccgcggccctttctgcctctgcggggctctggtcgccggccaaggaaaaacgaggctggaccctgaacagcgcgggctacctgctgggcccacatgccgttggcaaccacaggtcattcagcgacaagaatggcctcaccagcaagcgggagctgcggcccgaagatgacatgaaaccaggaagctttgacaggtccatacctgaaaacaatatcatgcgcacaatcattgagtttctgtctttcttgcatctcaaagaggccggtgccctcgaccgcctcctggatctccccgccgcagcctcctcagaagacatcgagcggtcctgagagcctcctgggcatgtttgtctgtgtgctgtaacctgaagtcaaaccttaagataatggataatcttcggccaatttatgcagagtcagccattcctgttctctttgccttgatgttgtgttgttatcatttaagattttttttttttggtaattattttgagtggcaaaataaagaatagcaatta

SEQ ID NO: 447 - DNA, 5752 bp, Homo sapiens
gcaggcgcagtggttcccgcaggcttgcgcgcgcactcgctgcgggacaagcttctggaagctctttgcggtggcgttggtgctgtttgcggatgctgatgcagtttctgcaggactgtaaactggattcctggaacctttgatattcctggctgtgtatagtgcctgttggtggactgtactgatactcaactagagtgtgaagggactggattcctgcccctgagacacaatgcaagctgtagtgcccttgaacaagatgacagccatctcaccagaacctcaaactctggcctcgactgaacaaaatgaggtcccaagagtggttacttctggggaacaagaagctattttaagaggaaatgctgctgatgcagagtctttcagacagaggtttaggtggttttgttactcagaagtagctggacccaggaaagctctgagtcaactctgggagctctgcaatcagtggctgagaccagacattcacacgaaagaacagattttagagcttctggtgtttgagcagttcctgaccattttgcctggggagatcaggatttgggtaaagtcacaacatcctgagagtagtgaggaagtggtgaccctaatagaagatttgacccagatgcttgaagaaaaaggtgagatttatagatggagggaggaagcgggagacattgcctcaaagtccgaaagtaaattcctcaaaagaaggcaatttactgctaaagaggagtctgaggttagaagttgggactgggtttgaatcagccctgccatttactgtgtgattttgggcaagctgtgtaaactctcagaatgtaaatatttttatctgttaaaaagggattttaatccagtctctcaagattctactgtttcccaagaggagaactcaaaagaggataaaatggtcactgtttgtcccaatactgagtcctgtgaatctataacattgaaggatgtagctgtgaacttttcaagaggagagtggaagaagctggagccttttcaaaaggagctatataaggaagtgctactggaaaacctcaggaacctagaatttctggactttccagtttcaaaattagagttgatttcccagctaaagtgggttgaattgccatggctgctggaagaagtctcaaaaagctcccgactaggaagtgtgatttgataaaggttcaataagagaatgaggctgggtgtggtggctcatgcctgtaatcccagcactttgggaggccaaggcaggtggatcacctgaggtcaggaattgaagaccagcctgaccaacatggagaagccccatctctactaaaaatacaaaattagctgggcgtggtggtacatgcctgtaatccaggctacttgggaggctgaggcaggagaatcgcttgaacctgggaggcagagattgcggtgagccaagatcgcacattgcatccagcctgggcaacaagagcaaaactccgtctcaaaaaaaaaaaaaaatgaatcagctttagataaaataatagaaaggtgcctcagggatgatgatcatggcttgatggaagaatcccagcaatattgtggcagctcagaggaggatcacggtaatcagggaaattcaaaaggaagagtcgcacaaaacaaaactcttgggagtggcagtaggggtaagaaatttgacccagataaaagcccctttggacataatttcaaagaaacttcagacttaattaaacatctgagagtctacttgaggaagaaatctcggaggtataatgaaagcaagaaacccttcagttttcattcagaccttgttctgaaccgcaaggagaaaaccgccggagaaaagtcacggaaatctaatgatggtgggaaagtcctgagtcactcttcagctcttactgaacatcagaaacgtcagaagattcatttgggggataggtcccaaaaatgcagtaagtgtgggataatctttattagaagatcaactctttctaggagaaaaacccctatgtgtgagaaatgtcggaaagattcatgtcaagaagcagccttaaataaagatgagggaaatgagagtggagaaaaaactcataaatgtagtaagtgtggaaaagcctttggctatagcgcctcactcaccaaacatcggagaattcacactggagaaaaaccctatatgtgtaatgaatgtggaaaagcttttagtgatagttcatcgctcacaccacatcatagaactcatagtggagagaaacccttcaaatgtgatgactgtgggaaaggtttcaccctaagtgctcacctcattaaacatcagagaattcatactggagaaaaaccttataaatgtaaagactgtgggagaccctttagtgacagttcatctcttattcaacatcagcgaattcatactggagaaaaaccctatacatgtagcaattgtggaaaatccttcagtcatagctcatccctttccaaacatcagagaattcatactggagagaaaccctataaatgtggcgaatgtggaaaagcctttaggcagaattcatgccttacccggcatcagagaattcacactggagaaaaaccatatttgtgtaatgattgcggaatgacttttagccattttacgtctgtgatttatcatcaaagacttcattcaggagaaaaaccctacaaatgtaaccagtgtgagaaagccttcccaacccattcactgctaagtcgtcatcagagaattcatactggtgtaaaaccttataaatgtaaagaatgtgggaagtccttcagtcagagttcatctcttaatgagcaccaccgaattcatacaggagagaaaccctatgagtgtaactattgtggtgcaacctttagtcgaagctcaatccttgtagaacacctaaaaattcataccggaaggagagaatatgaatgtaacgaatgtgagaagacatttaaaagtaattcaggcctcattagacatcggggatttcactctgcagagtaatcctggaactacattaaagtggggggaatttaattcaaattgtcagttactgaaaccctgggatgtaaacttacagtattgatcagtagctgcagctttcgtaaattggcagttaggaaaaatatccttttgcccattcatccctcttcttttcaaggatggcaacgactggtaaacagtaattagttggtaaagtcactggaaagggaagaatgcaaaatgattctgaggccagacgaattggaaaagctcttttcttcaggggatttctctctgatttcttctactaccatgtagtgtgatggagagaacttgactgcagtcacataacttggattctgtcccagtttgccaaccaacttgctgtatacaccttggacaagtcatttgacctttcagaattttattttcgtcaccagcagaatgaagggatgggattaatgatttttgccttttttggttttttagttttttattggtatcctgataatctctgaagctgtggacataagttatttttttttatttgtcattactttcaagtttctctagtaaaaaatacaataccactattcaggatgctggacttcttttcttttttttttcttttttttttttcaatttttcttttttgggatggagtctcactatgttgcccagactggtcttgaactcctgggctcaagtgatccttccatctcactttcctgagtagctgacattacgggtacactccatcaagcctggttcctaggatgctggacttctagcttagtgagaatgcagtatactttttgaaaacttcgtgcaggaatccctcaaatgctgtaactaggaatgggtcagtgaagttcaaacgacttttccttgagggagtattttaatcggacaagggaactctttttcttttgggcattggccaacaggactgagaagccagagagcttgcacctgagccatctcagccgtgagagtaacagtcctaggaaaatagatgggggctgggggtaaggaaatgtgctgaagacagagctattctggatggattttggtttgcaaaaattctactttaaaacaattttgcctgtagcaagtacatttttttgcaattggagtgtaaacattctgtgtggcaacagttaaaagctgttataacaatttgcttgggtgtgtgtgcatgtgtgtgtgtgtgtgtgtgtgtgtatacattgttgccactatctaaaattagggcatttcatactaaaaacaaagcttgtcttacatacatggagcagtaaaaaagatgcagatgttctctgaggctgaataagaccatgctctgccttcttgtttcaactgttacacagagatgaccagaggatggggccactgcagtgcagttcaagaggctctggttcggggaagagctggatggagtatgaatcccaactctgggggtattagctagtggagtggccataggcaagttacttaacacttctgaacctccttttgtctttcataaaataaaagctactaggatgagttgttttaaggatttcagattatagtctatgtgagatatgtgcaaacatgtacatatttcccctagaagcaatggttttcagccttggtggtgaccttatagaacataaatattgtgaataatgaaaatccactgaatctaataagggacttgtatcggtaagatgtaaagaactcttggccaggtgtggtggctcatgcctataatcccagcactttgggaggccaaggcaggtggatcacctgaggtcaggagttcgagaccaacctggccaacatgacgaaactccgtctctatttaaaatacaaaaattagctgggcatggtggtgcatgcctgtaatcccagctactcgggaggctgaggcaggagaatcacttgaactcgggaggtggaggttgcagtgagccaagatcgcgccactgcactccagcctggatgacagagcaaaaaactgtctcaaaaaaaaaaaaatcttacaacctcacaaataacctagttcaaaaatgggcaaagattttgaacagatatttctccaaagaagatatacaaatggcaaatacatacgttgaaagatccttaatattgttagccatagggaaatgcaagtcaaactcaaatcagaatgaaatatcacttcaaacctactaggatggttataataaaaaagacagacaatagcacgtgttggtgagtatgtagagaagttggaaccctcatacactgcttgtgggaatgtaaagtactgtagccactttgcaaaacagtttgacagctcctcaaaatgttaaacatgaaattatcatatgacccagcaattctactcataggtatatacttaaaagaaatgaaaaatccacacaaaaacctctgcatgaatgttcatagtaacattatacttcatagccagaaagtataagctaatacccatcaggctgggtgtggtggctcacgcctgtaatcctagcactttgggaggccgagttgggaggtttgcttgagcccaggagttccagaccagcctgggcaacatggcgaaaccccatctctactaaaaatataaaaattagttgcgtgtggtggcacatccctatagtcccagctacttgggaggctgaggtggaaggattgcttgagcgagggaggtcgaggctgcagtgagccacgatcacaccactgcactccagcctaggtgacagagtgagatcctgtctc

SEQ ID NO: 448 - DNA, 2692 bp, Homo sapiens
cagtcggctcggaattggacttgggaggcgcggtgaggagtcaggcttaaaacttgttggaggggagtaaccagcctgctcctctcgctctcctcctcgtctgcgccgcgtttcagagagaaaattcctgttccaagagaaaataaggcaacatcaatgaaggagagaagagccagccagaaattatccagcaaatctatcatggatcctaatcagaacgtgaaatgcaagatagttgtggtgggagacagtcagtgtggaaaaactgcgctgctccatgtcttcgccaaggactgcttccccgagaattacgttcctacagtgtttgagaattacacggccagttttgaaatcgacacacaaagaatagagttgagcctgtgggacacttcgggttctccttactatgacaatgtccgccccctctcttaccctgattcggatgctgtgctgatttgctttgacatcagtagaccagagaccctggacagtgtcctcaaaaaggcaagatggtggaaaggtgaaatccaggaattttgtccaaataccaaaatgctcttggtcggctgcaagtctgatctgcggacagatgttagtacattagtagagctctccaatcacaggcagacgccagtgtcctatgaccagggggcaaatatggccaaacagattggagcagctacttatatcgaatgctcagctttacagtcggaaaatagcgtcagagacatttttcacgttgccaccttggcatgtgtaaataagacaaataaaaacgttaagcggaacaaatcacagagagccacaaagcggatttcacacatgcctagcagaccagaactctcggcagttgctacggacttacgaaaggacaaagcgaagagctgcactgtgatgtgaatctttcattatctttaatgaagacaaaggaatctagtgtaaaaaacaacagcaaacaaaaaggtgaagtctaaatgaagtgcacagccaaagtcatgtataccagaggcttaggaggcgtttgagaggatactcatctttttggaatcctgaccttaggttcggcatgtagaccaagtgatgagaagtgaatacatggaagagtttttaagtgtgacttgaaaaatatgccaaaaaatgagagatacaaatgagctagaggaagatgaggggggatgcgagtacctccaagaagaaaaatcacactctgaatggtgcttgcatttttgggttttttttttttgttataatctattcatggatctccactttgatttaatttttaaatgttttaatctcctttacaaaaagtatacgttaatataccgtcctcaagggggaactggcactgtgaccttagcatttagttttctagaggatgtgatctaatttctttctagctcatcattaaaaaggaaattgtatcaggacccatgggatatatccagaggcaaactttatgaggctttgaaatcttgccttcctgaagatagctgagtaggatggttctaaggaaagcctttgcaatcttgcaagatttgtagaccagcactacaaagatcgcatagatcaaataggaaaaaaaatgtcgatttttattcagtctgatggttctgttcttcattgtgattgtcattaaaaagtggtaaattgctcaatgtaatatttttgtgcgctgtttagaagttgtgtgattttttgccatcgttgataaaaatgcaaagtcaaataaaaggtgtcttggtttgatgtcatagaatgatccaaggagagaaaaaaggtagttactgttttcaccagaaaaggtaatgagtgaaggaaagaatagtagcagaaagcacagtttgtgagtaaagctgtctggaattaagttaccaaaaatacaaagcaaaaggactattattttgggttgaagctccaaaactgacagcatctgataatctgttggtttatttcacttttcattaaatgaacattgatgagagaagatgccacttacccaagctttagagaatccctagtggaagattatatgataaactttcagtcctgacataacactagggcatttctagagtgtcattgctaaaacctcactgaacagatgcagccaaggtctgtgttcagcacttggtctctgttgttacgtaaaataataagcatttaaaatagtttacagatatttttgaccagttccttttagagattctttcagagaagaaaccagatctgacctgtttattgttggcgcttgttgaaaacgagctttctttcccatgatagtgcttcgtttttgaagtgttgaagctgtgctccccttaaatcgtggcaggagagattaaggtaattacaacactcagttctatgtcttacaagcactttgtcttgtctctgcaagaaaattcgattccagtcatttcccataaaatacagacattttaccaacataatatgctttgattgatgcagcattatgctttgggcagtattacaaaatagctggcgagtgctttctgtatttaaatattgtaaaaagaaaataagttataactgttataaagcagaacttttgttgcattttttaaactgttgaagtcactgtgtatgtttgtttggtcaatgtttccgcagtatttattaaaacatactttttttttcttcaaataaaaaagtaaccatgtctttgtctaaa

SEQ ID NO: 449 - DNA, 13660 bp, Homo sapiens
gaggcccggaggaactcggagggggagggagagaaaggccgagacggagggagccagcggcggccgaggggctggtccaggcgcggccgctaagaggagaccaagaggcgggggctgcacttgacaaccagcatgccgagatggcacaccttgggcccaccccacctccacatagccttaattacaaatcagaggacaggcttagtgagcaagactggccagcatatttcaaggtcccatgttgtggggttgatacatctcaaattgagtcagaagaggcagaagtggatgtgagagaaagagagacacagagagacagagagccaaagagggcaagagacttgactttaagagactcctgtactgacaactccatgcagttcggaaccagaacgactacggctgaaccagggttcatggggacatggcaaaacgctgatactaacctcttattcagaatgtcccaacaggccatccgttgcacactggtaaactgcacatgtgaatgttttcagccagggaagattaacctgaggacttgtgatcagtgtaaacatggctgggtggcacatgccttggataagctcagcacgcagcacctgtaccaccccacccaagtggagattgtgcagtccaacgtcgtgtttgacatcagcagcctgatgctctatgggacacaagcagtgcctgtgcggctaaagatcctgctggaccgtctcttcagcgtcctgaagcaagaggaggtactgcacatactgcacggccttggctggactctgcgggactatgtccgaggatacatccttcaggatgctgctggcaaggtgctggaccgctgggccatcatgtctcgagaagaggaaatcatcacccttcagcagtttctgcggtttggagaaaccaaatccattgtggagctgatggcaattcaggagaaagaagggcaggccgtggctgtaccatcttcaaagacagactcagatataaggactttcattgagagcaataatcgcaccaggagtcccagcctccttgctcacttagagaacagcaatccttccagcattcatcacttcgaaaacatcccaaacagccttgcatttctgcttccattccagtacataaaccctgtctcagcaccactgctagggttgcctccaaatgggctactgttagagcaaccagggttgaggctgcgggaacccagcctttcaactcagaatgaatataatgagagcagcgaatccgaagtttctcccacaccttataagaatgatcaaacacccaatagaaatgccctgaccagcattactaatgtggagcccaaaaccgagccagcctgtgtctctcccattcagaattctgccccagtcagtgatctaaccaaaactgaacacccaaaaagctcattccggattcatcggatgagaaggatggggtcagcctctaggaaaggaagagtgttctgtaatgcatgtgggaagacattctatgacaaaggtactctcaaaattcattacaatgctgttcacctgaagatcaaacatcgatgcaccattgaaggttgcaacatggtctttagctccctccgaagtcgtaatcgccacagtgcaaaccccaatcctcgccttcacatgcctatgctaaggaataaccgagataaagatttaattcgggccacctcaggagctgccacccctgtcatagcaagtacaaaatcaaatctggcactcacaagccctggccgacccccaatgggttttaccactccccctctagaccctgtcttgcaaaatcctctccctagccagctagtattttctgggctaaagactgtacaaccagttcctccattttatagaagtttactcactccaggggaaatggtgagtcctccaacctccctcccaaccagtcccatcattccaaccagtggtaccatagagcagcaccccccgccaccctctgagccagtagtgccagcagtgatgatggccacccatgagcccagtgctgacctggcacccaagaaaaagcccaggaagtcaagcatgcctgtgaagattgagaaggaaattattgataccgccgatgagtttgatgatgaagatgatgaccccaatgatggtggagctgtggtcaatgacatgagccatgacaatcattgtcactcccaagaggagatgagcccaggcatgtctgtgaaggacttttctaagcataacaggacccggtgcatttcaaggactgaaataaggagggccgacagcatgacttctgaagaccaagaacctgagcgggactatgagaacgagtctgagtcttcggagcccaaactgggcgaggaatccatggaaggggatgagcacattcacagcgaagtgagtgaaaaagtcctgatgaatagtgagaggcctgatgagaaccacagtgagccctctcaccaggacgtcatcaaggtgaaggaagaatttacagaccccacttacgacatgttttacatgagccagtatggactgtacaatggtgggggtgccagcatggccgccttgcatgagagctttacatcgtctctgaattatggcagccctcaaaagttctccccagaaggtgacctatgttctagcccagaccccaaaatctgttatgtgtgcaagaagagtttcaaaagctcctacagtgtgaaacttcactacaggaacgttcacttgaaagagatgcacgtctgcacagtggctggttgcaatgctgcattcccctctcgccgaagccgagacagatactgggagaagagcaatgagcaaaacggtctccttgtatcatggggagagactctgtcaagcctaaagtgagcctcggatcttcctaatgacctcctgctggcccagctggatgcaagacaagctcgtttaagcctctgctgacctttcactcctccactacaagaactgcaccactcatttccaccgtcttcagaactgtgcaccaaatagaccacaaagcttcatggctgacgaatgatttccttttcatgatgcaaagagatttttacaaatttctattgatgagagttaacattaagtctcttgtggcattataacctctgttgcacaaatacaatgcttctatataactcttatttttaccttccttataaaggaacaatctactgttcttgccagcattatcttgaaaattcaggccaaaatatctgagcagaatgcacatactgagtgcaccggtggtatttttcatgaagagaccactttgaaagggtcttcctgatttccacctccctcagaatctatctgaccttctcacagactttattggtgtgaatctttcttatatttaaccatttatttgagatgctcatttttgtagcccatcttttctttttaaaaaacatgggctggtttctacccagaagagggtggtaagactgtacatgtacgttaacattcacttgtataactcagcaaaagattagaaagctgatcttattgtcacaagacacagtgccaacataaacctacatcgtaaactgttgaccaaagaactcgatgacatgggcctggactcgtcgcagccctcccttagcaaggacctccgcgatgaatttttggtgaagatatatggtgcccagcaccccatggggctcgatgtcagggaagacgcctcctctcccgcagggactgaagactcccacctgaacgggtatgggagaggcatggcagaggactacatggtccttgacttgagcaccacctccagcctccagtccagcagcagtatccattcctccagagaatccgacgcaggcagcgatgaggggattcttctcgatgacattgacggggcgagtgacagtggggagtcggcacacaaggccgaggcccctgccctccctggcagcctaggggctgaagtttcaggatctcttatgttcagcagcttgtctgggagcaatggtgggatcatgtgcaacatttgccacaaaatgtacagcaacaaggggaccctgagagtgcactacaaaactgtgcatttgagagaaatgcacaagtgcaaagtcccaggttgcaatatgatgttttcctctgtacgaagccgaaatcggcacagtcagaaccctaatctccacaaaaacattcccttcacttcagtagattagtctcagaatggacactacaaatgccagctctcaccagatggcctacgtgtttgaactgccatagtcagtgtgcgcttatgtacttggggtgtgtgtgtgtgtgtgtgtgtgtgtgcatttatgtatgctctgtggctacatatacacacacgtatttccttgagataaacaagataaacactaggtgcttttgaatttttttcacttccctttatagttttgggaaaggagtgggatctttgatttcagggtgaaaacagagtacccctttaaacacacacacacacacatgcacatacacacacacacacacacacacacacagtgtgcaactagccccagttttgacagaataattcttggtcttccccaaagagacaatttgttgtacccatgactgttgcctgcaaaaataaaagggaaaaaaaagaaaaaagaaacaaaaaggaacttcttatagttgtcttttgtgaactttaaggttttgaaagaatcttcaattaaagcatggcagattcacctgtaaatatttagccttgaggggccattgatgtaaaacaattgtattgatggttgtttaacttttttgtttaatttttacagttacatccagctgttagatatgcaggaaaagatagtttgctggctagctctattcatttatgttagcattaatgcacatttttaaaaaaagaaaaaaacatggtcttgtttttactacctgttagatatagtgctaaagaggtgctggcatgctttacagcacagatctgattttttaaaatgtcctgtactagtacataaatcccgtcatgcactttttttcatacactacaaggggatgtgtaataaccatgcttcttttttatccttaaactattgccatacttcagtaagtgtcttttttaaaaaaaattcacttgtataaaaatggtctggtcagtatagggcacaaatgccaaacaaagtattagtgttaacacaaaactgccaactttgcacaagtttccagaaaagaaaatacaattagtcactcaacataaccacaggccaatttgttggccaccagaaaaccgctttttaaaaaaacacttggtgattctttcaagtgccgaatgttattagaatcaacattgcatccttcttgcttatacgttaagttacataaaaggaaaacaaaattatgtggtgtgaaacagccaaggcatttattcttcagaggcaggataatatttcaggatacaaaagcccaaattacccgctacggaacaaagatgaatacagtaaaagagtcgaacactcatttccaaggccctaacccttatcctttaaaaagaaatcctctgaactgggtcggtctgttgtatggctgtctaatttgttgcaaattctgcagtcgtactataattcaggcctgtttggtagacaaaatcaaaaggcatttaacagcagcagtacttggaagctttgaaaacatgtgctaaacttgaatggagcaacactcctttctgaaaagccagaagaagggggttttaaagcaggatctctcaatgttcagtgttttgtgtttccccacacgatttgtcagagagaaatgaaagcaagcctgaaaccaagcaattgagagtgagaaagaggagagagactattctccaaaccttttttgttttgttttgtttccgatgtttacacatgttgcctgagctggttaaccacatcggcagcctcagctaccacaacatactgactaaatgatgatatttactcaagttcagtctgcagccaaaaccattagggtgtgcattgcagactgttttgttgtcttttttttttcttttttcctttttttttaagtggaggggaaaagaagagataaacaaggaatattttgtcaaacagtacacaataatttaaagagaatgtatttcttttttgcatttaatggcctcagacatttctttcatcagtctaaaagttagaaatatccctttattttaacttttatgtcgtttccatttttcatgtttttgtaattattttttctatgttcacatcagcattcacttccgttaaatttgccaaaggaaactgttaatatgtttctgttgttattattcctgtaggatttattgtacctcacagtatttattgtttcccaaaataagcatcattagttggggattcagtatttttgttgtgaaaatttcagaaacaatagattcttaaagataagctagctatgtctaggagctttatcttttcacctccttcagaggatgctatggggtccattttaattcttcatttgttctacggggaggaaagaccaaaagtatttgcagtacaaaagaaactatatcaaacactatgttaaatgacaagtgtttatggtaaaaagctgaggaattagtaataatcgtttttgttttcttgtactttgaattccccaaagtcttaattgctttattttggtgttgtgttaaattgaacagacagatgttttcctttgttttataccatataagactctgtacagtatgtttgtgaaagattgaactagaataatgaaagtttgtttgcaaacattttggtcctctcagcgttctctgtgttgtgctgttgccccattaccaaatggttagattcaaaaagggtgggaaaagatttttaatatcccaacaaaacattatagaaactctggcttttgcagtgtgcatagactacatgtagttttatgaaaataaatacacatttttatttcagcaactttgaaaagttacactcagttgagttactagaactcatcttgtacaacagcaatgtttagtctgtttaatttaatgtcaaataaaaggtcagatagccctcgtgagtgaattacatagctgtcggcagtcacatcagcaaatgcaccaggcttagaacaaatgtttgttacttgctgcaaaccaagctaatgtgtatagccagttagaaaaagtccagaagtaatgagattctagaagtagagtttcccttgcttggaaacatgaatgtgttcacctgtgttttgtcagagaagtggcaataagtcctggacagctgacactttttaagtatctcccctatttgctactacttttgtgcctcaagtgcccagtcgttacggtggccttctaaatgagtaaataacattttccaatataaagcctatttgcttaaaagggacaggggagtggatggatgtagtacatgcaatggaaaatcataaaatgtacaattcttctgtttccaaagtattgctcgttcttgagtgtgtgcctgagtgtcttgttttgacttaactagaattctagttaagatggtgatcccatggcttatttgcaaacaggaaggataaagagatcagcgttttagtcatggagctcatctttgcccattcctactcatttgctttttcataggagttttttgttgttaaacagtttctctcaagccacatgcattctatgctggctgaaaattaatagtgatgtagatgttcatccgacaagcttttccccatgtgattggttttagccagagtttatcacaggtacaaaattaggcggtatgactgtgcatgttctctagctgatgttgaaacttgtactgtcttgatcatttaaaactatgtttttgtaaatatcaggtttagtccgctttcgggaatatctgcatgctatggaaagagagaaaaaaaggatagataatgaggaatttggtttaaaagtgtgataaaaatccttggcattctttgttctgatattaattgtatttaaataagtcaacccaatgtaactcattccagatcttagtccagctgccctgttcagcctgatgccttttaaaggtttaaaggtgttaatgttttccttttcaacatggcaaacattttttaaaacctttttggcacaatggtgccactgtcctcatagtgttatttctttggtcatgaattttcaggcccttccagtaagaggagaaaggcacttaactggttaacagccccattattatacattgctctaaggaaaaaaaaaaaaaaaaaactttgaatatatcaagaatgggctattccagaggcttctcctcaggagaaactatgcactaggttcccaccaaatacaatgtgacctttttttcccctttctctgtacacaccccagatatgtgccaagcaaatgagaatgagggccgttgacaattaaagcataaagaagctagtcaccagattgagatggacatgctgctaactgctgacagcttgacctgagcagtcctaacttgtatctggtctgttagcattgggttagattgactaacagagtaaataaaattcacctgtcataagacacgctacatctgctatcatcaagaaacaaatcatccagaagaaactttttttcatcctgtggtcacacccttttcttaagagcttcttttttaaaattatgacaaacgaatttcattctttaaaatcacttatcttctcccaaacttgaagtatttaaattaggtggttttgcttttccctctcattgtttattttttggggatggatctaaatgagtaagatgagcaataaaagataccagaaagactggagggatcacagtgttttcatcagaactaagtagagggtcggttcctgccctggttttggggtagctagaaaaggaaatcatgaatgcactggaaatgttggctcgagagaaaagactggcatagctctgcctcgcagtgggtgagagcgtattgatcgtagggacctgcagagttcctatgaccaggtgagtcggctctgaggaaggggttaggaaagcaagtacagctgcatgaaatagctgaagttcctttggggtcaggaagagccgacaattgtggggttttggttgcttttgctttgtttttgagtgggaagtgttgctggaatcccctgagaaccgaaagatgccaggggtcagcaaggctatagaaaaggccagtggtaacacctcgttttcatcctaacagaggagtaggtgcgaatggcaccagcatggatcgttcctttcttgatcattactcatgcttgccactgtagcaacacaacaaagccatgattgtaattaatactaggctaaagaccttgatcaaaatgggagctcatttactgttctatgaggtatgtaagtaacttctcttcacattttccctcagagataaaccacacgtggtagtcttgtttgcgttagtactaaggtcatgtttgatctgtcccagacgagtcgcatatttcctgtagctggagtgttgctcaccataaatggtcattttcaaaaagtattgtgtaattccagctgtacaactgaccagtgagttatctgtcatcactgttgcccacatacccgtccttccttgtgtagtttcatcatcctcatccttcccacatcttgcgcaaaatgattttctgtgctcattcggcaataactatgttattcggcatactgtctttttggcatttgttgaaaaatccaaatgcttttaatccaaaagattaatccaaatcttttttaatccaaatgattttaatccaaatccaaataacaggaggttaaaaaaaaaaaaaaaactaagcatttttacatgtacactgaattggatcagcattattgttcattataatgctatatatatttttggagcaacatactatagttgtcataaaactatctttattcttctcctctaaagtgctgttgtaaattcatttgacctttactgcaggaaaaaaaaaaatcttttttatataggatatgaagaccaaggctcagtctgtaacaaatagtggaccattacaaaagaggaaagaaaaaagccagggctgagcagcaagaagcttcagttcaatttcacctcgtatctttctaataacatacttgtcactttattaccttccagtaatgtgaacgctgctgacaagactgtcacactaacagcagacaacaccctctctgcttcagcccagctctcctggctacttattgccctggccctgaagggacacaaactaatagtgtgctttccagttcagcacttggccatcaaatataaaaggatgcgtaattgcctgtttatccccttgtgaaggagaaattgactacaagggctaggctttcccatcgagttccctgatgtacacacacatccacaatcagtcagtctctctctctctctctctctctctctctctctctctctctctctcccctctctctctccttccctcttattctcccctcctaacatacaagcacatacacacacctactgtatctgtgggaagcccaaggctgcctctcgatgccctctccagctattaagtggacagtaacaagatgacttcttaaataaagggtcagtagagagatgctgtctgtgacggcatcctttgcttctttgaaaacttaagtgttaacaattccatcttgagagtaatgggtgtggccctataattagagcaaattttcctgcaagtcagtggcataagtaagattatattgccccctaatctgtagggaaaagattaaaatatttttcttccccttcaaaaagtgcacatgttgtaaactggttacgcacagtggtcatttttttttcttatccttggcatcaaaccatggacgtaggtgtacaaatgcatctttcaatgacccctccaaatccatagtgtaacatgatagattaacttttgtcaaactggactgacaatctaaaaaagatggcgtcaggcttttgactttaatcgttaaaacaaggaccaccctatgagtaaaaggtaaattctccactttgaagaactttggtaagtacaagtacagggagctttagaaaatcgagtgatggggaccaaaggtacaaaggaagaatacatgaaaatgttatattccaaaatgccctgagcccaaagattggctgctatttttgtatattgaaatactcaaatgatggttggaaagtgactagttagtgactaaatgaagtgcaagatctatcaagcgtcttctttctgggactaggggatgccatgcttccttccaaccttcccgcagcgcatctcagagaagatagttggccccattacaaacagtcacatttcagtaagatattagtcagccaggtaagacacgtgcaggtatcggtatcatcttccatatgaactttagcaaggagagaacagcagcagatttagggatagacaatgtaacaggtctatgttgacaaatctgtgctaaataatttcatgaaccagtgtggggactgggaagaaaagcactttgagcaaggactcttgggttcgagcaaaggcaattagttgacatgatacttcttaagttcctcagtatgtatatgttacaatcgtttatcagacatcttaatagaatcctaattgaaaaaccagttgccaaaattgcacaagttctgctcgctgatactagctttctccccttaactctaaaataccagggatgcttaaggacgtttgtaatagtttttttaatgctttgtttcacttttttaaaaaagaatctttgaagggaaggaagagcagaaagaagtattttaagaaaaatggagagaagtagatagtattgaaagtatatttcttgaagagagagtatctaagtgctataccaagattttatagggcttcctgttgccaaatgtgatgttgagataatgcacagctaagatggcaaatccatcaattattaactggctctgcccacttctgtcatggaatgcaaggattgagaggtgactctggggagaccctgggtgtgtgagagagctccattcatctggccctggatatgtttttcaaaagagagggagaaagcgccagtccctgcaaggtgaactgacctggcactgtttcagtgggagcctcactgcctgccttttccatgctaggagacaaagcatcctctaccccatctgtgaatcggtgctgtggccactgcgagaagcatgattcatgaggtatgatgctcttgagctcccagacaatgtgctgagttaataggttcacttgagatgtatacaccaaggctgtttctttttttaaatctagtccccaatttggagtatttttgcatgtttttgtacagagtaatccattcctctcattgtgtatcttaatctcctctgacttttccattgtctttctcaatcccaccctttgctcttcggatctcaccaaccccccttaaaaaataaatcatgtttgagcaagaaggtagaacacgccctccctcatcttggttttaattgctttggaaacgtgttctaccctgtccagggtttgcataacgtgaattaagtgaatgagatgttctagtattatatcttaacctgataagactatctaagatttctagtatatggtgcatttgctttcctgtgcaaactttggttcagctgccctgcagagaatctcaccattttcctgccagtgccagtataaagaatgcaggagagctaaacctgggtacatgaaggtcagaggggtgaggacggtcgagaaatggggagaagacttgggcttgagacgacctgggcttttcatgtgtagctcactcagcagtatgaggatgactgacacaccagtgggtggtttccaagtgaggcaaatgcccatttcccctctcccctcacaccttgcctggcttcttccatgaagtccttgctgcttttctgcctccccaaaggtgaggggaaggggctggttggggatctgggaaagccagttctctgttctctcctgctggtgatggactaggccttttagaactagcaagatccctcacacagctgggagaacacacacctttcttactccagacccattggtgtgtctccagtaacaaaattattggactcagcctccatatttgacagcaaaagtggccagagggagttgaaatatcttgaagaaaaggaattttcactaagatatgtcctctccctctcccagagtttagctgtttattccttttttttgtttatattgttctcatctgcataaaaccagtctcttgcaataagcctgccgcagaatcaaagtctgtacttcaaaaggtaactgcaccaagggatgggacagtgtgcatcaccctgatctaatcattgtgacgttggtagcttcctaaatactgtatgtaccttgaacaagggttttatttttgttttgttctgttttgctttttgtttttattggtaggctaaggtaattaaattttttaatttgctgttactttggttgtattttctgtactataactgcctacagtatgtcttttgcataaaatgcataagggtttggggatgtaaatggaattttattcatattttgtccaaatacctcttgtaatttgtatcaaaattcttgtacaatttttatattaaagatttatcagtcactga

SEQ ID NO: 450 - DNA, 5495 bp, Homo sapiens
ggctgagttttatgacgggcccggtgctgaagggcagggaacaacttgatggtgctactttgaactgcttttcttttctcctttttgcacaaagagtctcatgtctgatatttagacatgatgagctttgtgcaaaaggggagctggctacttctcgctctgcttcatcccactattattttggcacaacaggaagctgttgaaggaggatgttcccatcttggtcagtcctatgcggatagagatgtctggaagccagaaccatgccaaatatgtgtctgtgactcaggatccgttctctgcgatgacataatatgtgacgatcaagaattagactgccccaacccagaaattccatttggagaatgttgtgcagtttgcccacagcctccaactgctcctactcgccctcctaatggtcaaggacctcaaggccccaagggagatccaggccctcctggtattcctgggagaaatggtgaccctggtattccaggacaaccagggtcccctggttctcctggcccccctggaatctgtgaatcatgccctactggtcctcagaactattctccccagtatgattcatatgatgtcaagtctggagtagcagtaggaggactcgcaggctatcctggaccagctggccccccaggccctcccggtccccctggtacatctggtcatcctggttcccctggatctccaggataccaaggaccccctggtgaacctgggcaagctggtccttcaggccctccaggacctcctggtgctataggtccatctggtcctgctggaaaagatggagaatcaggtagacccggacgacctggagagcgaggattgcctggacctccaggtatcaaaggtccagctgggatacctggattccctggtatgaaaggacacagaggcttcgatggacgaaatggagaaaagggtgaaacaggtgctcctggattaaagggtgaaaatggtcttccaggcgaaaatggagctcctggacccatgggtccaagaggggctcctggtgagcgaggacggccaggacttcctggggctgcaggtgctcggggtaatgacggtgctcgaggcagtgatggtcaaccaggccctcctggtcctcctggaactgccggattccctggatcccctggtgctaagggtgaagttggacctgcagggtctcctggttcaaatggtgcccctggacaaagaggagaacctggacctcagggacacgctggtgctcaaggtcctcctggccctcctgggattaatggtagtcctggtggtaaaggcgaaatgggtcccgctggcattcctggagctcctggactgatgggagcccggggtcctccaggaccagccggtgctaatggtgctcctggactgcgaggtggtgcaggtgagcctggtaagaatggtgccaaaggagagcccggaccacgtggtgaacgcggtgaggctggtattccaggtgttccaggagctaaaggcgaagatggcaaggatggatcacctggagaacctggtgcaaatgggcttccaggagctgcaggagaaaggggtgcccctgggttccgaggacctgctggaccaaatggcatcccaggagaaaagggtcctgctggagagcgtggtgctccaggccctgcagggcccagaggagctgctggagaacctggcagagatggcgtccctggaggtccaggaatgaggggcatgcccggaagtccaggaggaccaggaagtgatgggaaaccagggcctcccggaagtcaaggagaaagtggtcgaccaggtcctcctgggccatctggtccccgaggtcagcctggtgtcatgggcttccccggtcctaaaggaaatgatggtgctcctggtaagaatggagaacgaggtggccctggaggacctggccctcagggtcctcctggaaagaatggtgaaactggacctcagggacccccagggcctactgggcctggtggtgacaaaggagacacaggaccccctggtccacaaggattacaaggcttgcctggtacaggtggtcctccaggagaaaatggaaaacctggggaaccaggtccaaagggtgatgccggtgcacctggagctccaggaggcaagggtgatgctggtgcccctggtgaacgtggacctcctggattggcaggggccccaggacttagaggtggagctggtccccctggtcccgaaggaggaaagggtgctgctggtcctcctgggccacctggtgctgctggtactcctggtctgcaaggaatgcctggagaaagaggaggtcttggaagtcctggtccaaagggtgacaagggtgaaccaggcggtccaggtgctgatggtgtcccagggaaagatggcccaaggggtcctactggtcctattggtcctcctggcccagctggccagcctggagataagggtgaaggtggtgcccccggacttccaggtatagctggacctcgtggtagccctggtgagagaggtgaaactggccctccaggacctgctggtttccctggtgctcctggacagaatggtgaacctggtggtaaaggagaaagaggggctccgggtgagaaaggtgaaggaggccctcctggagttgcaggaccccctggaggttctggacctgctggtcctcctggtccccaaggtgtcaaaggtgaacgtggcagtcctggtggacctggtgctgctggcttccctggtgctcgtggtcttcctggtcctcctggtagtaatggtaacccaggacccccaggtcccagcggttctccaggcaaggatgggcccccaggtcctgcgggtaacactggtgctcctggcagccctggagtgtctggaccaaaaggtgatgctggccaaccaggagagaagggatcgcctggtgcccagggcccaccaggagctccaggcccacttgggattgctgggatcactggagcacggggtcttgcaggaccaccaggcatgccaggtcctaggggaagccctggccctcagggtgtcaagggtgaaagtgggaaaccaggagctaacggtctcagtggagaacgtggtccccctggaccccagggtcttcctggtctggctggtacagctggtgaacctggaagagatctcttggaaaccctggatcagatggtcttccaggccgagatggatctcctggtggcaagggtgatcgtggtgaaaatggctctcctggtgcccctggcgctcctggtcatccaggcccacctggtcctgtcggtccagctggaaagagtggtgacagaggagaaagtggccctgctggccctgctggtgctcccggtcctgctggttcccgaggtgctcctggtcctcaaggcccacgtggtgacaaaggtgaaacaggtgaacgtggagctgctggcatcaaaggacatcgaggattccctggtaatccaggtgccccaggttctccaggccctgctggtcagcagggtgcaatcggcagtccaggacctgcaggccccagaggacctgttggacccagtggacctcctggcaaagatggaaccagtggacatccaggtcccattggaccaccagggcctcgaggtaacagaggtgaaagaggatctgagggctccccaggccacccagggcaaccaggccctcctggacctcctggtgcccctggtccttgctgtggtggtgttggagccgctgccattgctgggattggaggtgaaaaagctggcggttttgccccgtattatggagatgaaccaatggatttcaaaatcaacaccgatgagattatgacttcactcaagtctgttaatggacaaatagaaagcctcattagtcctgatggttctcgtaaaaaccccgctagaaactgcagagacctgaaattctgccatcctgaactcaagagtggagaatactgggttgaccctaaccaaggatgcaaattggatgctatcaaggtattctgtaatatggaaactggggaaacatgcataagtgccaatcctttgaatgttccacggaaacactggtggacagattctagtgctgagaagaaacacgtttggtttggagagtccatggatggtggttttcagtttagctacggcaatcctgaacttcctgaagatgtccttgatgtgcatctggcattccttcgacttctctccagccgagcttcccagaacatcacatatcactgcaaaaatagcattgcatacatggatcaggccagtggaaatgtaaagaaggccctgaagctgatggggtcaaatgaaggtgaattcaaggctgaaggaaatagcaaattcacctacacagttctggaggatggttgcacgaaacacactggggaatggagcaaaacagtctttgaatatcgaacacgcaaggctgtgagactacctattgtagatattgcaccctatgacattggtggtcctgatcaagaatttggtgtggacgttggccctgtttgctttttataaaccaaactctatctgaaatcccaacaaaaaaaatttaactccatatgtgttcctcttgttctaatcttgtcaaccagtgcaagtgaccgacaaaattccagttatttatttccaaaatgtttggaaacagtataatttgacaaagaaaaatgatacttctctttttttgctgttccaccaaatacaattcaaatgctttttgttttatttttttaccaattccaatttcaaaatgtctcaatggtgctataataaataaacttcaacactctttatgataacaacactgtgttatattctttgaatcctagcccatctgcagagcaatgactgtgctcaccagtaaaagataacctttctttctgaaatagtcaaatacgaaattagaaaagccctccctattttaactacctcaactggtcagaaacacagattgtattctatgagtcccagaagatgaaaaaaattttatacgttgataaaacttataaatttcattgattaatctcctggaagattggtttaaaaagaaaagtgtaatgcaagaatttaaagaaatatttttaaagccacaattattttaatattggatatcaactgcttgtaaaggtgctcctcttttttcttgtcattgctggtcaagattactaatatttgggaaggctttaaagacgcatgttatggtgctaatgtactttcacttttaaactctagatcagaattgttgacttgcattcagaacataaatgcacaaaatctgtacatgtctcccatcagaaagattcattggcatgccacaggggattctcctccttcatcctgtaaaggtcaacaataaaaaccaaattatggggctgcttttgtcacactagcatagagaatgtgttgaaatttaactttgtaagcttgtatgtggttgttgatcttttttttccttacagacacccataataaaatatcatattaaaattc

SEQ ID NO: 451 - DNA, 2116 bp, Homo sapiens
acagtgagcttccttatttgaagcaggactcaattcttggttaaaagctatggtatttgagctagttaaacacatatctctctcccattccatagggaatgagctgggctgtcctttctccccacgttcacctgcacttcgttagagagcagtgttcacatgccacaccacaagatccccacaatgacataactccattcagagactggcgtgactgggctgggtctccccaccccccttcagctcttgtatcactcagaatctggcagccagttccgtcctgacagagttcacagcatatattggtggattcttgtccatagtgcatctgctttaagaattaacgaaagcagtgtcaagacagtaaggattcaaaccatttgccaaaaatgagtctaagtgcatttactctcttcctggcattgattggtggtaccagtggccagtactatgattatgattttcccctatcaatttatgggcaatcatcaccaaactgtgcaccagaatgtaactgccctgaaagctacccaagtgccatgtactgtgatgagctgaaattgaaaagtgtaccaatggtgcctcctggaatcaagtatctttaccttaggaataaccagattgaccatattgatgaaaaggcctttgagaatgtaactgatctgcagtggctcattctagatcacaaccttctagaaaactccaagataaaagggagagttttctctaaattgaaacaactgaagaagctgcatataaaccacaacaacctgacagagtctgtgggcccacttcccaaatctctggaggatctgcagcttactcataacaagatcacaaagctgggctcttttgaaggattggtaaacctgaccttcatccatctccagcacaatcggctgaaagaggatgctgtttcagctgcttttaaaggtcttaaatcactcgaataccttgacttgagcttcaatcagatagccagactgccttctggtctccctgtctctcttctaactctctacttagacaacaataagatcagcaacatccctgatgagtatttcaagcgttttaatgcattgcagtatctgcgtttatctcacaacgaactggctgatagtggaatacctggaaattctttcaatgtgtcatccctggttgagctggatctgtcctataacaagcttaaaaacataccaactgtcaatgaaaaccttgaaaactattacctggaggtcaatcaacttgagaagtttgacataaagagcttctgcaagatcctggggccattatcctactccaagatcaagcatttgcgtttggatggcaatcgcatctcagaaaccagtcttccaccggatatgtatgaatgtctacgtgttgctaacgaagtcactcttaattaatatctgtatcctggaacaatattttatggttatgtttttctgtgtgtcagttttcatagtatccatattttattactgtttattacttccatgaattttaaaatctgagggaaatgttttgtaaacatttattttttttaaagaaaagatgaaaggcaggcctatttcatcacaagaacacacacatatacacgaatagacatcaaactcaatgctttatttgtaaatttagtgtttttttatttctactgtcaaatgatgtgcaaaaccttttactggttgcatggaaatcagccaagttttataatccttaaatcttaatgttcctcaaagcttggattaaatacatatggatgttactctcttgcaccaaattatcttgatacattcaaatttgtctggttaaaaaataggtggtagatattgaggccaagaatattgcaaaatacatgaagcttcatgcacttaaagaagtatttttagaataagaatttgcatacttacctagtgaaacttttctagaattatttttcactctaagtcatgtatgtttctctttgattatttgcatgttatgtttaataagctactagcaaaataaaacatagcaaatggcatcactgtgtttgacttcttgtgaaatttctgtactttgtatataaaatacataaaacaatagattagaaatcaaaagatatctctggcctgca

SEQ ID NO: 452 - DNA, 2609 bp, Homo sapiens
cccgtgctccctccctccctccctctttccctccctcctctcctctccctctcctctcctgctatagagggctccgacagcagttcccagccagcgtgttcagcctgcctgcctgcctgcctctgtgtgtgtgtgagcgtgtgtgcgtgcgtctactttgtactgggaagaacacagcccatgtgctctgcatggacgttactgatactctgtttagcttgattttcgaaaagcaggcaagatgtccagcacaccacatgaccccttctattcttctcctttcggcccattttataggaggcatacaccatacatggtacagccagagtaccgaatctatgagatgaacaagagactgcagtctcgcacagaggatagtgacaacctctggtgggacgcctttgccactgaattttttgaagatgacgccacattaaccctttcattttgtttggaagatggaccaaagcgatacactatcggcaggaccctcatcccccgttactttagcactgtgtttgaaggaggggtgaccgacctgtattacattctcaaacactcgaaagagtcataccacaactcatccatcacggtggactgcgaccagtgtaccatggtcacccagcacgggaagcccatgtttaccaaggtatgtacagaaggcagactgatcttggagttcacctttgatgatctcatgagaatcaaaacatggcactttaccattagacaataccgagagttagtcccgagaagcatcctagccatgcatgcacaagatcctcaggtcctggatcagctgtccaaaaacatcaccaggatggggctaacaaacttcaccctcaactacctcaggttgtgtgtaatattggagccaatgcaggaactgatgtcgagacataaaacttacaacctcagtccccgagactgcctgaagacctgcttgtttcagaagtggcagaggatggtggctccgccagcagaacccacaaggcaaccaacaaccaaacggagaaaaaggaaaaattccaccagcagcacttccaacagcagcgctgggaacaatgcaaacagcactggcagcaagaagaagaccacagctgcaaacctgagtctgtccagtcaggtacctggggctaggagcgatcccgaactgcagcctcaaccctgggagggatggagacctgtgtcattcaacagcagtgaccccttctggccaatttaaggagaagcattgaggggccctgaaaggagtcacttccagtcctcctcagaggatgtgatggtggtaggagagccaactctgatgggaggtgagtttggggacgaggacgaaaggctaatcactagattagaaaacacgcaatatgatgcggccaacggcatggacgacgaggaggacttcaacaattcacccgcgctggggaacaacagcccgtggaacagtaaacctcccgccactcaagagaccaaatcagaaaaccccccaccccaggcttcccaataagatgatcggcaccagaatccactgtcaataggcccgtgggtgatcattacaattgcaaatctttacttacaggagaggaaacagaagagataaaaacttttccatgcaaatatctatttctaaaccacaatgatctgattttctttcttctttctttttttctaattgagaggattattcccagtaagcttccatgaccctttcttggaggccttcacaggtaatacagatactggcactgattgtaattaaaatgagagaaaactctagcgcatcttctggcacggttttaacaacgtgtttgtgttgaatttcctttttatgcatcaaacgaaggccatattgtccataaatgctcagtgctcaggatctcattaatatgccgaacctaactacagatgactttttaatattgtaaaatattttctgctttttgacttgcatctgagagtttcttgtttcagtaaaaaaagaaaagacaaaaaaatcagctttggaaagtaatttaaatgtaccttattttttttttctttatgttttctttcattgggcaacagctaagagggcccagcaaggtaatttatggttgagctgatgtcaattggttcttgtcttgagtcgactcaatttagcccaagtgctgaaacaagaaatgtcatttttttcatcaaagacaccagggcagatttttaagtaaagaaagacaattggacccttaagaatttatgcatttgtaaagttgctgttgatccaaatattttcaagccatgtaatccattggttttgtgggcagtttaataaacctgaacctttgtgtgttttctaattgtacctgagttgaccatcctttctttttatagtatatttcttgtatgatattttgtaaagctctcacctggttcttttatggggacttttcgtttttgggcaactccagtgtatttatgtgaaactttataagagaattaatttttccatttgcatattaatatgttcctccacacatgtaaaggcacagtggctccgtgtgttaaaaaacagctgtattttatgtatgctttactgataagtgtgccaataataaactgtgttaatgaccaaa

SEQ ID NO: 453 - DNA, 1052 bp, Homo sapiens
cggaacacgctgggaggagggtggaaggcaacctcggggaaactgggaaaggcggcctggacttcgggaacaccgcgtacctgcgggggcacagccccacccgagcgaacgggctccaaaggggaggtcccgcggtgcccaccgcgcagagctcagggggtggtgcgcccggcccttctgcggcgcacagcccagcccaggaacgcgggcggtgcggactcagcgggccgggtgcaggcgcggagctgggcctctgcgcccggcccgacctccgtctataaatagagcagccagttgcagggctccattctgctttccaactgcctgactgcttgttcgtctcactggtgtgagctccagcatcccctttgctcgaaatggaccccaactgctcttgcgccactggtggctcctgcacgtgcgccggctcctgcaagtgcaaagagtgcaaatgcacctcctgcaagaagagtgagtgcggggccatctccaggaatctggggctgtggctcaggttgggagggaactcaaggctggccctgagtgcatccttctggggaactgggctttctttgccctcattgcccgtgtcattccctctccaggctttctgccctaaattcagatggggcaggacagcatttttctcgtgggacacaaaccccaactgtaccccctatggtttcagaacagagctgtgccagacgaaaaaaagcatcctctgggtctgggttctgagctcgagccaggcttgctattagggcagggaggtgcccggtcaagtctactgccacctctcactctccccttcttccccaggctgctgttcctgctgccccgtgggctgtgccaagtgtgcccagggctgcgtctgcaaaggggcatcggagaagtgcagctgctgtgcctgatgtgggaacagctcttctcccagatgtaaatagaacaacctgcacaacctggatttttttaaaaatacaacactgagccatttgctgcatttctttttatactaaatatgtgactgacaataaaaacaattttgactttaa

SEQ ID NO: 454 - DNA, 92 bp, Homo sapiens
ggatcgatgatgacctcaatacatgcattccttggaaagctgaacaaaatgagtgaaaactctataccgtcgtcctcgtcaaactgaggtcc

SEQ ID NO: 455 - DNA, 92 bp, Homo sapiens
ggatcgatgatgacttaaagatttatctaatttaaatctgaacaaaatgagtgaccaaaacacttctgtaccacttctgtgagctgaggtcc

SEQ ID NO: 456 - DNA, 4801 bp, Homo sapiens
aggcaacgcgggaggcccagcgggaaggcaggaggcggcggcggaggaggagctctactgagccgcaactgtggcgacagcaaccggagtcgcagccgccgccacctgcacctggcgcctagcccacgtccagcgcctgcccggccgccgcttcccgccaccctgccctgcccacccgccaggtactaccattaaagataccttcttctcagcaaatctatgataaaaaatataagtaacagaagaagaaataactgttatttgtcaagtgacaagcttttaatgtcagaatggctcacctaaagcgactagtaaaattacacattaaaagacattaccataaaaagttctggaagcttggtgcagtaatttttttctttataatagttttggttttaatgcaaagagaagtaagtgttcaatattccaaagaggaatcaaggatggaaaggaacatgaaaaacaaaaacaagatgttggatttaatgctagaagctgtaaacaatattaaggatgccatgccaaaaatgcaaataggagcacctgtcaggcaaaacattgatgctggtgagagaccttgtttgcaaggatattatacagcagcagaattgaagcctgtccttgaccgtccacctcaggattcaaatgcacctggtgcttctggtaaagcattcaagacaaccaatttaagtgttgaagagcaaaaggaaaaggaacgtggggaagctaaacactgctttaatgctttcgcaagtgacaggatttctttgcaccgagatcttggaccagacactcgacctcctgagtatgttgaagaatatttattgtttattctttatcaccaggctttgcaggggagagaggggtgagctaaggaagttatctgttttttagctactctaaggcagaaaatcagcaaatactgtttatttaacctgttgtatttattttttgcttataatgattgaggctacatatccctatttatgcttggtgaggcagtgcagatatgaaaagttattagcttggaaattagaaaactgaattctagatctgactgctatccacaaggaaattctttattcctaaatactgtggttttctcatctatttagggggaattattggacaatttgtataggaagtagaaggtagaggaattgtttccatttctctgtatttctttagaataaaaatgtttaaaaacatgccaagattttggaactgttggataatattttatatatgtgtaaagcaattcacagactttgtgattactttgactcaaagtttttgagtacctaattatatttcagaatgccctattttttatgtattgaacaaaaatttaagcgctgccctcccctgcccaccaccagtgtcataatagtttttcataatgaagcgtggtccacgttgcttagaactgtccacagtgtgctctattcttcacctgcaatactgctgaaggaaatcattttggtggatgatgctagtgtagatgtgtaatcccagcattttgggaggctgaggcctgcaaatagcttgagttcaggagttccagaccagcctgggcaacatgatgaaaccccgtctctaaaaaaaaaaaaaaagaaaaagtacttacatgataaactagatgaatatgtaaaacaattttctatagtaaaaatagtcagacaaagagaaagaaaaggtctgatcactgctcggttgctaggagcaacagtcgcaacagctgaaacgctcacatttttagatgctcactgtgagtgtttctatggttggctagaacctctgttggccagaatagctgagaactacacggctgtcgtaagtccagatattgcatccatagatctgaacacgtttgaattcaacaaaccttctccttatggaagtaaccataaccgtggaaattttgactggagtctttcatttggctgggagtcgcttcctgatcatgagaagcaaagaaggaaagatgaaacctacccaattaaaacacccacttttgcaggaggacttttttccatatcaaaagaatattttgagtatattggaagctatgatgaagaaatggaaatctggggaggtgaaaatatagaaatgtctttcagagtatggcaatgtggtgggcagttggagattatgccttgctctgttgttggacatgtttttcgcagcaaaagccctcatagctttccaaaaggcactcaggtgattgctagaaaccaagttcgccttgcagaagtctggatggatgaatacaaggaaatattttataggagaaatacagatgcagcaaaaattgttaaacaaaaagcatttggtgatctttcaaaaagatttgaaataaaacaccgccttcagtgtaaaaattttacatggtatctgaacaacatttatccagaggtgtatgtgccagaccttaatcctgttatatctggatacattaaaagcgttggtcagcctctatgtctggatgttggagaaaacaatcaaggaggcaaaccattaattatgtatacatgtcatggacttgggggaaaccagtactttgaatactctgctcaacatgaaattcggcacaacatccagaaggaattatgtcttcatgctgctcaaggtctcgttcagctgaaggcatgtacctacaaaggtcacaagacagttgtcactggagagcagatatgggagatccagaaggatcaacttctatacaatccattcttaaaaatgtgcctttcagcaaatggagagcatccaagtttagtgtcatgcaacccatcagatccactccaaaaatggatacttagccaaaatgattaagtgttccttaaaattaagttgaaaaaggaaatattctttctcataaaactgtgactaggcatacactgtagtttttgaaaattatgcaaaagcagctaaatgtaacttattccaagtgcatttttcttatttatatctttatgtagcactactacagaaattctgcaagtttctgtttcaaagcacaataactagtaataccaaagactatttcaaaatgtccagatgtaggggaagagatgtttacagtatgatgaaaataattttccaagtaaagtgatgtttgtgtgttttgtacacttagggatatatatatatagctacattcacacactcacaatttaaaatatttcccctagttttttggggggataggaagaaagatttgttactgtatttttttaactacataaaaatagatcaataaatgtcagcattggcctctgtgtacaaaccaagagcttttacagatccagaatttattagtttaaaatgcaggtgaacttttttttgcgtttggtttacttgtctgtcaaatgtttccttaaacatgaaactgaataaggagaagagtatttttaacacttaaatttcttggcaaattttaaaacattttttagtctgtaatacactccacttgaagcacttaagtcttccttaaatgacttttcttaagtaatgatactgtgtgttttcccaaagcacttttaaaaaaatttttataaattactatctgttgaaaaggtgtccttttcctttcttctagtatttttttcttaccaaaattcactaatcttgaatgtttgtgatattaaatttcaaatgcagaatacttgactcatttaaagctaaattttgttactgattcaattataattgtaatggatttttgactttgtaatggattcttttcatcaaaaagccttatttttttatctatgtggaaaacacaataaaaaatcctcaacactattgtaatcatttggttaagtttttttcctcttttgggtaaaatctgtaattgataataggtgggggaaaatgaattttgtatgctgaatttctaagcgcctattgtttgtaaaaccatcagatatttcttatggcacaaaaaatgaggaatagcaaaattcctgtgttcaatatttagaaaattttgtattaatttctgataaagttccttaagcatctgatagaatgatgttttaaaaaaatttgacgcttgcttaggagatttaccactttttttttttgtttttcgtcattttatatttagatctcctgtattcttgttcccgaagtaaaatacgatcggtttcatattttaaatctggcagagcctcagctgtacgaaaaagagcatatactggttattgaccctatcttctcattgtttgtttgtaagtttgaatttgtattaaaaagcctgcattctgagctggacatggtggctcagcttctaatcccagcactttggtaggcaaaggtgggaggatcatttgagctcaggagttccagaccagcctgggcaacatagcaaaatctcatctctacaaaaagtaaaaattaaaaaatgaaattaaaaataaaattacctaggtgtggtggcacgcatctgtagttccagctatacaggaaggtgaggcagaagcattgcttgagcttgggagatcgaggctacagtgagctatgattacaccactgcacttcagtctgtgtgactgagcaagactctttcaaaaaaaaaaaaaaaagcctacattctccagttgattatttcaactaatgtgtattatgtgcctaattttctatcagaagttgtattagcccgttttcacactgctgttaaagacatacctgagactgggtaatttataaagaaaaataggttcgatggactcacaggtccgcgtggctggggaggcttcacaatcatggcggaaggtgaaaggcatgtcttacgtggagg

SEQ ID NO: 457 - DNA, 2412 bp, Homo sapiens
gagacaggaaggtggcaaaggaaggagcccatttgcatgacaataattgagccaagaatagaaagccacagggatgcaagggtgaggctggcggctgagctgggctaaacctcacaaatcagactacccagctctgctccgcaggggaagggagactgagccctgggccaggcttggcagagagggaagcgggaggacacgaccccagggcattgtgggaacactggccaggctggactttgccttcctcctcgtcctttagccgggagcctgtctttgcttgcctttgcctttgaggctctgtggctgtggggctgagtggcatcatggcggctcagaaagatctctgggacgccattgtgattggggcggggatccagggctgcttcactgcataccacctggccaaacacaggaagaggatcctcctgctggagcagttctttctaccacactcccgaggaagctcccatggacaaagccggataatccgaaaggcgtacctggaagacttttacacccggatgatgcatgagtgctatcagatatgggcccagctggagcacgaggctggaacccaattgcacaggcagactggattactgctgctgggaatgaaagagaatcaagaattaaagacaatccaggccaatctgtcgaggcagagggtagaacaccagtgtctttcatctgaggaactgaagcaacgtttcccaaatattcggttgcccaggggagaagtggggctcttggacaattccggaggagttatctatgcatataaggccctcagagccctgcaggatgcaattcgacagctaggaggcatagtgcgtgacggagagaaggtggtggagataaacccagggctactggtcacggtgaaaaccacctccaggagctaccaagctaagagcttggtcatcacagcaggtccttggaccaaccagctcctccgtcccctgggcattgagatgcctctccagaccctgcggatcaacgtgtgttactggcgagagatggttcctgggagctatggtgtgtcccaggcctttccgtgcttcctgtggctgggcttgtgtccccaccacatctacggactgcccacaggagagtacccagggctgatgaaggtcagctatcaccacggcaaccacgcagaccctgaggagcgggactgccccacagcacgcacagacatcggagacgtccagatcctgagcagctttgtcagagatcacttacctgatctgaagcccgagcctgctgtcattgagagctgcatgtacacgaatacccctgatgagcagttcattctcgatcgccacccaaagtatgacaacattgtcattggtgctggattctctgggcacgggttcaagctggcccctgtggtggggaagatcctgtatgaattaagcatgaaattaacaccatcttatgacttggcaccttttcgaatcagccgtttcccaagcctgggcaaagcccacctttgacctctggccagaagcctcccttctgtgcacaggagccagtttcacagatggagaagatgtctcagatgaagggagtgtccctgagatatcatccttttcttctgcctcgcctgaatcccccataaacaccagatgattgagtctaccttctttccttggcccgctccctttttcttctgcctcacttgaatcccccgtaaacaccagacgattgagtctaccttcttttcttggccacctccccattcacaactactttctcgctcccagaaggttgatcagatattctacaatcacagagtagcaaggacgtttgagatgggtatatcagtaagaagagggcacaagaactggctctggagaccaaagcagttgttaaaaattctctttgctgggggccgggtgtggtggctcacacctgtaatctcggcactttggggggctgagacaggcggatcacctgaggccaggaattcaagaccagcctggccaacatggtgaaaccctatctccactaaaaatacaaaattagctgggtgtggtggcgcatgcctgtaatcccagctacttgggagactgaggcaagagaatcacttgaacccgggaggtggaggtggcagtgagccgagattgcgccattgcactccagcctgggcaaaaagagtgagactctgtctcaaaaaaaaaacaaaacaaaaaaaacctctttgctggtatatttgaagagcttgggatggatttgactaaatctgccccgaggagggtgaacaaggtgatctcagagatcactactgctcttggagttccttctcctaaagctaaggccagcctccatcacaaatgcccataaaatctggctcgtctttgatgaacaataaatatttgttgaacaaataaataactgccctgcatt

SEQ ID NO: 458 - DNA, 4636 bp, Homo sapiens
gatccccgcccctgctgcccgccacgtccctcacgtaccactcggcagaggcgcggggaaacctggcgtactggctgtggcttctctagcgggactcggcatgaggctggcgcggctgcttcgcggagccgccttggccggcccgggcccggggctgcgcgccgccggcttcagccgcagcttcagctcggactcgggctccagcccggcgtccgagcgcggcgttccgggccaggtggacttctacgcgcgcttctcgccgtccccgctctccatgaagcagttcctggacttcggatcagtgaatgcttgtgaaaagacctcatttatgtttctgcggcaagagttgcctgtcagactggcaaatataatgaaagaaataagtctccttccagataatcttctcaggacaccatccgttcaattggtacaaagctggtatatccagagtcttcaggagcttcttgattttaaggacaaaagtgctgaggatgctaaagctatttatgaaaggcctagaagaacatggttgcaggtctctagtttatgctgtatggcctgcaagatgatctttacagatactgtgatacggatcagaaaccgacacaatgatgtcattcccacaatggcccagggtgtgattgaatacaaggagagctttggggtggatcctgtcaccagccagaatgttcagtactttttggatcgattctacatgagtcgcatttcaattagaatgttactcaatcagcactctttattgtttggtggaaaaggcaaaggaagtccatctcatcgaaaacacattggaagcataaatccaaactgcaatgtacttgaagttattaaagatggctatgaaaatgctaggcgtctgtgtgatttgtattatattaactctcccgaactagaacttgaagaactaaatgcaaaatcaccaggacagccaatacaagtggtttatgtaccatcccatctctatcacatggtgtttgaacttttcaagaatgcaatgagagccactatggaacaccatgccaacagaggtgtttacccccctattcaagttcatgtcacgctgggtaatgaggatttgactgtgaagatgagtgaccgaggaggtggcgttcctttgaggaaaattgacagacttttcaactacatgtattcaactgcaccaagacctcgtgttgagacctcccgcgcagtgcctctggctggttttggttatggattgcccatatcacgtctttacgcacaatacttccaaggagacctgaagctgtattccctagagggttacgggacagatgcagttatctacattaaggctctgtcaacagactcaatagaaagactcccagtgtataacaaagctgcctggaagcattacaacaccaaccacgaggctgatgactggtgcgtccccagcagagaacccaaagacatgacgacgttccgcagtgcctagacacacttgggacatcggaaaatccaaatgtggcttttgtattaaatttggaaggtatggtgttcagaactatattataccaagtactttatttatcgttttcacaaaactatttgagtagaataaatggaaactgaattccatttgtgcccgttaaacctcctaaaggatgaaattgcacctattttacacttatattttcacagttaattgaacatatttttaaacaactgtagttttgggcaacttttcactttgtggtagacttcagaagtgtggaaatcttcgggtttctataggaaactagttttttttttttaagaaatactttcatttatgtttgctagaaacattttctaaatgatagtgattagctggttagccatcttcctgttatttggaggagttctgccatcttttattcggtagtgacagctgtaatatggtcttcatgtttatcagtgacttgactacaagtaaagcagaaaacagttggcctgtaatcacagaaccagccacccttcggcgtctacatgcattgtcttagctctgaggttaatttaccatttttaaattttattgtaaagaagtgtaatgactagctctctgtggatctatgccaaaatcatgggccatcttttctaagtgtacttctgattaatgcaaggggaaatttttatactgaaaacaaacaaacaaactagcagctactaaaatagagaagaaattgagggcaaagtaatatgtctccaaaactgaactgattgcttgttgagattacctagaaagcttttggaaaaaaatagagcttttctgcatcctactccagatacactgaatcggaatccctagggctagagcctagaaatctcactttttaaaatgcttccaaggtaagtctgatgcctaccctaggttgggaaccactctttcaaagtaaacagtgatgacacagcatttgctaaagtaacatctgtaggttttggtttccacctatttaaagtcagatttatagactcgaggagacagaaactgaatcccacacctggtgcaattagaagcataattagaagcagaagaacaaaatgccacgtaaccaaagcatcagagccatcattgcacgtgtctttttttcttttttcttttttttttttcaagacagggtctcgctcttttgcccaggatggagtacagtggcatggtcaaggctcactgcagcttcaatcttctgggctcaagtaatccttccacctcagcctcccatatagctggaactacagttgtgcactaccacacccagctaattttttgatttcttgtggagatgaggtctcagtatgttcccaggctagtgttgaactcctgagctcaagaaatcctcctgcctgagtctctgaaagtgctgggattacaggcgtgagccaccacacatggcctattgcacaagtcttgacaaacaacatatattttctaaaactatccagatttcattatcagggaaaagtttgcttaggtttattacagcagtccttggcatttgtatggtaatttgtactttacaaatactttgatatattataactctattggtctttgaaacaaagcgatacagtgtaggtggtatcattctctttctcactcagtgtggcccagagttgctcagaattggagcagagcctgagacgtatctgcagatcctgtcatcagctggcaagtccaggagactgtgtcatttagagactgtgttgttagttatccctcaacatcttctaaggtggcaggaaataatattggaaataacattttaaagtaaaaattttaaagtttaaagaagagttttgccacttaaacaggggagctttgtctggaaaatacactgagttgaaacacttcatccttggaaggattatataagatgaacagttgtgataaatgtgtagattagagggatgtgaatgggcagttagtccagtgccctcatttaagaggccaagatcctgattcagaggaggcatcctttgcccagagctgcttagctaatctgaccaaatgttgggaaaaatgtctcacctaacccactattccttaattatggattttgtgaaaaacaatagaacatgttaatgagtaatttatattagttcgatgtattacaattttttagctttaaattacagttttcttataatgttgaaatgttttagaatcctttgaatctaagtatttgtttcctaaatgaaacatttgtacaacatttgatgtttttacttatgaaatattctcctcccccaagaaaatttaaactttttctctctatttaaaagctaagaaatgttttaaaggaaaaatgaaattatcttcctttagcttatttttaaggtaaaacagctttttactctgttattgtggtaatggacagaatattacatacaaaaatattctgggagagctttttcctagttggttttaaatcattgtgccacctgaaaggtttttagattttataggagctaatttgtccaccagcattaatgtaacacagtgtagttatgaaaatatattgaaggacaggaagtggacacgaagtgatttttgtaacctgagcagttaatgaatgtgccaacattttctaggaagggacagcaagaatattctgctctgtagttaaaatactggctggcttttgatgtcttcatgcttaattgtgatcactttcttgcactgtgatgtttttacgtgaatatgttgaagtagaagtctaccatattattttataaaatgttttctgtatggcaataaactgaaaacatggatcaacccttcttttgaaaataaactgagtcaatttagccttttaaaaatatagtcatctcttttaaatagaatcctcttccaccatcaaggctcaacattttgtaagcatccaaaaaattggtaattagggggcttgcactaaatttcactatcttcagtagagaggaactgtttggaacttagatttccaatgtgtatattctaatggagaaagcaagaggtagagtttgtatgtttgacttaccttagatttttattttccatacatactgcaaatgattgacttgttgcataaatgaagatcttctgttgtgtgcttttcaaacactgtaaataaatttgaaatttgaa

SEQ ID NO: 459 - DNA, 5664 bp, Homo sapiens
gccagagcagcggggccgggcgcgcagggcctggccggagcccccactcccaggagtttcctctgcagagccccgcgccccccgcgccgggatttcagcccgatcccctcctctccctgcgcccagcctctccccagcatgtaaagtcttctgtctctcctcggagttggcggaggcggcaactttccattctcgccgccgggggccgggcagcagcgggcgcgcgggtcagcgctcagcacggcgggcagcgccgcgctgcgcaccgccgccgaccatgagcgaggacagccgcggagacagccgcgccgagagcgccaaggacctggagaagcagcttcgcctgcgcgtgtgcgtgctcagcgagctccagaagaccgagcgggactatgtgggcacgctggagttcctggtgtcggcattcttacacagaatgaaccagtgtgcagcatcaaaagttgacaaaaatgtgacagaagaaacagtgaagatgttgttctcaaacattgaagacatccttgcagtacataaagaattcttaaaagtcgtggaagaatgcttacaccccgaacctaatgctcaacaagaagtgggaacctgctttcttcactttaaagacaagtttcgtatctatgatgaatattgtagtaaccatgagaaggcacaaaaattacttcttgaactcaacaaaataagaacaatccggacatttcttttgaactgcatgctgcttggaggacggaagaacacagatgttcccttggaaggatatttagtaacaccaatacaaagaatatgcaagtaccctcttattttgaaggagttgctgaagcggactccacggaaacacagtgactatgcagcagtgatggaagccctccaagccatgaaagctgtctgttccaacataaacgaggccaagagacagatggagaagttagaagttttagaggaatggcagtctcacattgaaggctgggaggggtccaacatcactgacacctgcactgaaatgctaatgtgtggagtcttactgaaaatttcttctggaaatattcaagaacgggtgttttttcttttcgataatcttttggtgtactgcaaaagaaaacacagacggttgaagaacagcaaggcatctacagatggacatcggtacctttttcgtggccggatcaacacggaggtgatggaagtggagaatgtggatgatggcaccgctgatttccatagcagtggacacattgttgttaatggatggaagatacataacacagcaaaaaataaatggtttgtttgtatggcaaaaacacctgaagagaagcatgaatggtttgaagctattttgaaagaaagagaacggcggaaaggtttaaaattaggaatggagcaagatacctgggtcatgatctctgaacagggtgagaaactttataaaatgatgtgcagacaaggaaatctgatcaaagaccgaaagagaaaactgactacgttccctaaatgctttcttggaagcgaatttgtgtcatggctgttggaaattggagagattcacaggcctgaggaaggcgtgcacttgggacaagcattattagaaaatggaatcattcaccatgttactgataaacatcaattcaaaccagaacagatgttatatagatttcgctatgatgatggaacattttatccaagaaatgagatgcaggacgtgatttcaaagggtgtaagattatattgtcgtcttcatagcctttttactccagtgataagagataaagattaccatttaaggacctacaaatctgtggtcatggccaacaaactgatagactggttaattgcacagggagattgccgcaccagagaagaggcaatgatatttggcgttggactctgtgacaatggatttatgcaccatgtccttgaaaaaagcgaattcaaagatgaacccctacttttccgttttttttcggatgaggaaatggagggatcaaatatgaaacatcgacttatgaaacatgacttaaaagttgtggaaaatgttatagctaagtcattattgattaaatccaatgaaggcagctatggctttggattagaagacaaaaataaagttccaataataaagttggtagaaaagggatctaatgctgagatggctggcatggaagtcgggaaaaagatttttgctattaatggtgacctagtttttatgagacctttcaatgaagtggattgcttcctgaaatcgtgtttaaacagcagaaaacctctaagagttcttgtgagcacaaagccaagagagacagtgaaaattccagattcagctgatggacttggcttccagatccggggatttggcccttctgttgtgcatgctgtaggaagaggaactgtggctgcagcagctggtcttcaccctggacagtgcattatcaaggtgaatggaatcaatgtcagcaaagagacacatgccagtgtcattgcacacgttacagcctgcaggaagtacaggcggccaacgaagcaagattccatacaatgggtttataatagcattgagagtgctcaagaagaccttcaaaaatctcactccaagccccctggagatgaagcaggggatgcttttgactgtaaagtagaagaggttattgacaaattcaacactatggccatcattgatgggaagaaggagcatgtgagtctgacagtggacaatgtccacctggaatatggtgtcgtgtatgagtacgacagcacagctggcatcaagtgcaatgtggtggaaaagatgattgagcccaaaggtttcttcagcttaactgccaagattcttgaagccctggctaaaagtgatgagcattttgtacaaaactgtaccagcctaaattctctaaatgaagtgattcctactgaccttcagagtaaattcagtgccctttgcagtgaaagaattgaacacctatgtcagagaatatccagttataaaaaggttcaagcttcagaaaggttttacaatttcacagcacggcatgctgtctgggagcacagttttgatcttcacagtgtaagcagcacatttccagtacctgtgactatggagttcctcctgctgcctcctcctctcttaggaatatcccaggatggaagacagcactgcattcctgaggaccttccttctcaagaaatgctcttagcagagagggcccctgtctgattcttaccctttggaacagttcaggcacccttagacacagtacacagcccttcctagttttctcgtgtactgaagaatagggcctggcctacttttaaacaggccaaatctaaaatctccccactgcacagcagtgatttctgccctaccaactgccatgtcaatgtgatggaagtttcttatcccaaaacatcaacctctttgggaagtgcatttggtgttcagttggatagcaggaagcataattctcatgataaagaaaacaaatcttcggagcaagggaaactgagccctatggtgtacattcagcacaccatcacaaccatggcggccccttcaggtctgtctctgggacagcaggatggccatggtctcaggtatctgctaaaagaagaagacttagaaacccaagacatctatcagaaactgctgggcaaacttcagactgcactgaaagaggtggagatgtgtgtttgtcaaatagatgaccttctgtcttcaataacatattctcctaaattagaacgtaagacatcagagggcataataccaacagacagtgacaatgagaagggagaaagaaacagcaaacgggtatgttttaatgtagcaggagatgaacaggaagattctggtcatgacaccatcagcaacagagactcttacagtgactgcaacagcaataggaattccatcgcctccttcaccagcatctgcagcagccagtgcagctcgtatttccacagtgatgaaatggactcaggtgatgaacttcccttaagtgttcgcatatctcatgataaacaggacaagatacatagttgccttgagcatcttttcagccaggtggattcaattaccaatctcctaaaagggcaggctgttgtgagggcctttgaccaaaccaagtatctcactccaggccgaggattgcaagaatttcaacaggaaatggaaccaaagctgagttgtccaaaaaggctacggcttcatatcaagcaagatccttggaatcttcccagcagcgtccggactcttgctcagaacatcaggaaatttgttgaagaggtaaagtgtaggctactcctggctcttcttgaatattcagatagtgagacacagctccgtagagacatggttttctgccagactcttgtggccactgtctgtgccttctctgagcagctcatggcggccttgaaccagatgtttgacaacagcaaggaaaatgagatggaaacttgggaagccagcaggaggtggctggaccagatagcgaatgcaggtgttctttttcactttcagtcacttctgtcaccaaacttgacagatgaacaagccatgttagaagatacactggttgcactatttgatttggaaaaggtttccttttactttaaaccatcagaagaggaacctctggttgcaaatgttcctcttacatatcaagcagaaggaagtcggcaagctctgaaagtttacttctacattgatagttatcattttgaacaacttcctcaacggctgaaaaatggaggagggtttaaaattcatcctgttctttttgcacaagcactagagagcatggaaggatattattacagagacaatgtttctgtggaagaatttcaagctcagataaatgcagcctcactggaaaaggtcaaacagtacaaccagaagctcagggcattctacttggacaagtcaaattcaccaccaaactccacatccaaagctgcctatgtagataagctaatgaggcctctcaacgctttggatgaactttaccgactggtagcctcgtttatcagatccaagcgcacagctgcctgtgcaaacacagcttgcagtgcttctggggttggactgctgtcagtttcctcggagctgtgcaacaggctgggcgcctgccacatcatcatgtgcagcagcggtgtgcatcggtgcaccctgagcgtgacgctggagcaagccatcattctggccagaagccacggactgccacctcgttacatcatgcaggctacagatgtgatgcggaagcagggagcaagagttcagaacacagcgaagaatttgggagtcagagaccggactccacagtctgcaccaaggctgtacaagctgtgcgagccacctcccccagctggagaagaatgaaaagaactcccaagaaaccaggcaggcagaagctcctgaatgctggactagacaaactacatgctggctaaacattctccactgaagatacatcaatgcttttttttttttttttttctgtaaatctttcttcccattgcaaacaagtagtgatcagtttatactttgatatttatgctggaaatggatagaagttcaatcagacagttcagcttcacgaactgatgtctctctgtattgacattaagtattcacttttagagtaaaatccatccctgggacat

SEQ ID NO: 460 - DNA, 2621 bp, Homo sapiens
aactagcccagccgcgcggagcgcctgggagaggagaaggagccgacctgccgagatggaggcgaccggcacctgggcgctgctgctggcgctggcgctgctcctgctgctgacgctggcgctgtccgggaccagggcccgaggccacctgccccccgggcccacgccgctaccactgctgggaaacctcctgcagctacggcccggggcgctgtattcagggctcatgcggctgagtaagaagtacggaccggtgttcaccatctacctgggaccgtggcggcctgtggtggtcctggttgggcaggaggctgtgcgggaggccctgggaggtcaggctgaggagttcagcggccggggaaccgtagcgatgctggaagggacttttgatggccatggggttttcttctccaacggggagcggtggaggcagctgaggaagtttaccatgcttgctctgcgggacctgggcatggggaagcgagaaggcgaggagctgatccaggcggaggcccggtgtctggtggagacattccaggggacagaaggacgcccattcgatccctccctgctgctggcccaggccacctccaacgtagtctgctccctcctctttggcctccgcttctcctatgaggataaggagttccaggccgtggtccgggcagctggtggtaccctgctgggagtcagctcccaggggggtcagacctacgagatgttctcctggttcctgcggcccctgccaggcccccacaagcagctcctccaccacgtcagcaccttggctgccttcacagtccggcaggtgcagcagcaccaggggaacctggatgcttcgggccccgcacgtgaccttgtcgatgccttcctgctgaagatggcacaggaggaacaaaacccaggcacagaattcaccaacaagaacatgctgatgacagtcatttatttgctgtttgctgggacgatgacggtcagcaccacggtcggctataccctcctgctcctgatgaaataccctcatgtccaaaagtgggtacgtgaggagctgaatcgggagctgggggctggccaggcaccaagcctaggggaccgtacccgcctcccttacaccgacgcggttctgcatgaggcgcagcggctgctggcgctggtgcccatgggaataccccgcaccctcatgcggaccacccgcttccgagggtacaccctgccccagggcacggaggtcttccccctccttggctccatcctgcatgaccccaacatcttcaagcacccagaagagttcaacccagaccgtttcctggatgcagatggacggttcaggaagcatgaggcgttcctgcccttctccttagggaagcgtgtctgccttggagagggcctggcaaaagcggagctcttcctcttcttcaccaccatcctacaagccttctccctggagagcccgtgcccgccggacaccctgagcctcaagcccaccgtcagtggccttttcaacattcccccagccttccagctgcaagtccgtcccactgaccttcactccaccacgcagaccagatgaaggaaggcaacttggaagtggtgggtgcccaggacggtgcctccagcctcaacagtgggcatggacagggttaatgtctccagagtgtacactgcaggcagccacatttacacgcctgcagttgttttccggagtctgtcccacggcccacacgctcacttgactcatgctgctaagatgcacaaccgcacacccatacacaactacaagggccacaaagcaactgctgggttagctttccacagacataaatatagtccatctgcaatcacaagcacatagccaggtaacccaccaactcccctggatctgcagcccacacgtgggagtctggctgtcaccttcacaagccacagaaacggccacacatgttcacagctcacacgccctctccattcatcgaacttctcagtgtccctgtccctggtgcctggcacagggaacagcatgccccctccggggtcatgccacccagagactgtcgctgtctatggccccaactcatgctccctctcttggctacaccactctcccagcctgtgaccaccgatgtccacacacccccaaccacttgtccacacagctacccacgtacgacatcgtcctggctccccagagtatcttcccactgagacacgccgcccccacagaggcacagtccccagccacctctgcaactgcagccctcagtcacccctttttaagcaccctgattctaccaaatgcaaacacatctgggtctgcgattatgcacagagactttggacatacgaggaccctcagaccggaggaacacctgcccaaccccaacacgtgcttatgtaaccacgtggaaagcggcccctgctgcccctccacacacacatacacactcactgatctacagcccctgttcggcgtcagagtccccactagacccagtggaaggggttagagaccaagtaggggccagtttccaattcaccctgtcagggagtgagccggatctgacgttccttgtgacttaagggtccggcttgggaattaaagtttgtttctggcctttagccta

SEQ ID NO: 461 - DNA, 8227 bp, Homo sapiens
acagcgctctcgacacggagcacccttctagcttcttcgtctccaggactgacgctcaggctcctctctcgccttagcccaacttgctttcccgcctcgcaaactccggtttccctccactcccaactcttttcactacacgtttcccctcctctatctcccacgccacgaaccccgatccccagactcctctctcccgccctcctccttcctctctcctcccttcaactcttcatccgcttccacctcagactctgcgcgcacccaattcagtcgcccgctcccgttcggctcctcgaagccatggcgggacctgggggctggagggacagggaggtcacggatctgggccacctgccggatccaactggaatattctcactagataaaaccattggccttggtacttatggcagaatctatttgggacttcatgagaagactggtgcatttacagctgttaaagtgatgaacgctcgtaagacccctttacctgaaataggaaggcgagtgagagtgaataaatatcaaaaatctgttgggtggagatacagtgatgaggaagaggatctcaggactgaactcaaccttctgaggaagtactctttccacaaaaacattgtgtccttctatggagcatttttcaagctgagtccccctggtcagcggcaccaactttggatggtgatggagttatgtgcagcaggttcggtcactgatgtagtgagaatgaccagtaatcagagtttaaaagaagattggattgcttatatctgccgagaaatccttcagccaaaagtcatatttctgggaacgggttgtagtgattccagcctaaagaaagaattgtgtctgaaacatcaaaattaagctgtttctcttatcaaaagtttttccaaaaatactaagaactgtaccaggcttagctcaccttcacgcacaccgagtaattcaccgggacatcaaaggtcagaatgtgctgctgactcataatgctgaagtaaaactggttgattttggagtgagtgcccaggtgagcagaactaatggaagaaggaatagtttcattgggacaccatactggatggcacctgaggtgattgactgtgatgaggacccaagacgctcctatgattacagaagtgatgtgtggtctgtgggaattactgccattgaaatggctgaaggagcccctcctctgtgtaaccttcaacccttggaagctctcttcgttattttgcgggaatctgctcccacagtcaaatccagcggatggtcccgtaagttccacaatttcatggaaaagtgtacgataaaaaatttcctgtttcgtcctacttctgcaaacatgcttcaacacccatttgttcgggatataaaaaatgaacgacatgttgttgagtcattaacaaggcatcttactggaatcattaaaaaaagacagaaaaaaggaatacctttgatctttgaaagagaagaagctattaaggaacagtacaccgtgagaagattcagaggaccctcttgcactcacgagcttctgagattgccaaccagcagcagatgcagaccacttagagtcctgcatggggaaccctctcagccaaggtggctacctgatcgagaagagccacaggtccaggcacttcagcagctacagggagcagccagggtattcatgccactgcaggctctggacagtgcacctaagcctctaaaggggcaggctcaggcacctcaacgactacaaggggcagctcgggtgttcatgccactacaggctcaggtgaaggctaaagcctctaaacctctacaaatgcagattaaggcacctccacgactacggagggcagccagggtgctcatgccactacaggcacaggttagggcacctaggcttctgcaggtacagtcccaggtatccaaaaagcagcaggcccagacccagacatcagaaccacaagatttggaccaggtaccagaggaatttcagggtcaagatcaggtacccgaacaacaaaggcagggccaggcccctgaacaacagcagaggcacaaccaggtgcctgaacaagagctggagcagaaccaggcacctgaacagccagaggtacaggaacaggctgccgagcctgcacaggcagagactgaggcagaggaacctgagtcattacgagtaaatgcccaggtatttctgcccctgctatcacaagatcaccatgtgctgttgccactacatttggatactcaggtgctcattccagtagaggggcaaactgaaggatcacctcaggcacaggcttggacactagaacccccacaggcaattggctcagttcaagcactgatagagggactatcaagagacttgcttcgggcaccaaactcaaataactcaaagccacttggtccgttgcaaaccctgatggaaaatctgtcatcaaataggttttactcacaaccagaacaggcacgggagaaaaaatcaaaagtttctactctgaggcaagcactggcaaaaagactatcaccaaagaggttcagggcaaagtcatcatggagacctgaaaagcttgaactctcggatttagaagcccgcaggcaaaggcgccaacgcagatgggaagatatctttaatcagcatgaggaagaattgagacaagttgataaagacaaagaagatgaatcatcagacaatgatgaagtatttcattcgattcaggctgaagtccagatagagccattgaagccatacatttcaaatcctaaaaaaattgaggttcaagagagatctccttctgtgcctaacaaccaggatcatgcacatcatgtcaagttctcttcaagcgttcctcagcggtctcttttggaacaagctcagaagcccattgacatcagacaaaggagttcgcaaaatcgtcaaaattggctggcagcatcagaatcttcttctgaggaagaaagtcctgtgactggaaggaggtctcagtcatcaccaccttattctactattgatcagaagttgctggttgacatccatgttccagatggatttaaagtaggaaaaatatcaccccctgtatacttgacaaacgaatgggtaggctataatgcactctctgaaatcttccggaatgattggttaactccggcacctgtcattcagccacctgaagaggatggtgattatgttgaactctatgatgccagtgctgatactgatggtgatgatgatgatgagtctaatgatacttttgaagatacctatgatcatgccaatggcaatgatgacttggataaccaggttgatcaggctaatgatgtttgtaaagaccatgatgatgacaacaataagtttgttgatgatgtaaataataattattatgaggcgcctagttgtccaagggcaagctatggcagagatggaagctgcaagcaagatggttatgatggaagtcgtggaaaagaggaagcctacagaggctatggaagccatacagccaatagaagccatggaggaagtgcagccagtgaggacaatgcagccattggagatcaggaagaacatgcagccaatataggcagtgaaagaagaggcagtgagggtgatggaggtaagggagtcgttcgaaccagtgaagagagtggagcccttggactcaatggagaagaaaattgctcagagacagatggtccaggattgaagagacctgcgtctcaggactttgaatatctacaggaggagccaggtggtggaaatgaggcctcaaatgccattgactcaggtgctgcaccgtcagcacctgatcatgagagtgacaataaggacatatcagaatcatcaacacaatcagatttttctgccaatcactcatctccttccaaaggttctgggatgtctgctgatgctaactttgccagtgccatcttatacgctggattcgtagaagtacctgaggaatcacctaagcaaccctctgaagtcaatgttaacccactctatgtctctcctgcatgtaaaaaaccactaatccacatgtatgaaaaggagttcacttctgagatctgctgtggttctttgtggggagtcaatttgctgttgggaacccgatctaatctatatctgatggacagaagtggaaaggctgacattactaaacttataaggcgaagaccattccgccagattcaagtcttagagccactcaatttgctgattaccatctcaggtcataagaacagacttcgggtgtatcatctgacctggttgaggaacaagattttgaataatgatccagaaagtaaaagaaggcaagaagaaatgctgaagacagaggaagcctgcaaagctattgataagttaacaggctgtgaacacttcagtgtcctccaacatgaagaaacaacatatattgcaattgctttgaaatcatcaattcacctttatgcatgggcaccaaagtcctttgatgaaagcactgctattaaagtgagtatgcattgatcaatcagcagactctgaaggagactacatgtcctatcaagcctatatacgaatactggcaaaaatacaggcagctgatccagtgaaccggtttaagagaccagatgagctccttcatttgctgaagctcaaggcaaggaacttgaagacagcaaacagaatgcagggtatttccaacacttgatcataagccagtgacagttgacctggctattggttctgaaaaaagactaaagattttcttcagctcagcagatggatatcacctcatcgatgcagaatctgaggttatgtctgatgtgaccctgccaaagaatcccctggaaatcattataccacagaatatcatcattttacctgattgcttgggaattggcatgatgctcaccttcaatgctgaagccctctctgtggaagcaaatgaacaactcttcaagaagatccttgaaatgtggaaagacataccatcttctatagcttttgaatgtacacagcgaaccacaggatggggccaaaaggccattgaagtgcgctctttgcaatccagggttctggaaagtgagctgaagcgcaggtcaattaagaagctgagattcctgtgcacccggggtgacaagctgttctttacctctaccctgcgcaatcaccacagccgggtttacttcatgacacttggaaaacttgaagagctccaaagcaattatgatgtctaaaagtttccagtgatttattaccacattataaacatcatgtataggcagtctgcatcttcagatttcagagattaaatgagtattcagttttatttttagtaaagattaaatccaaaactttacttttaatgtagcacagaatagttttaatgagaaatgcagctttatgtataaaattaactatagcaagctctaggtactccaatggtgtacaatgtcttttgcacaaactttgtaacttttgttactgtgaattcaaacattactctttggacagtttggacagtatctgtattcagattttacaacatggagtaaagaaacctgttatgaattagattacaagcagccttcaaaagaattggcactgggataagatttttcagaaaaagaaaaacatcggcaaactgtgtgtgatttttccaaagctatataaagaaccaaaggtttagtcaagaaacaaaaatcttaaagattattataacccagactaaggttgaacaacctgcatgcccagagaaaactatggcgacaaaggggaaaaggccaccactcgttttctcactgattcatgccaattaagcctacagttaaagaccagttttgttcttttcacccatttttaagctggttttctcctgataagaagaaaggaagaaagccccagacgcttggtttttctcagaacccccaaaagatgtgcaatagctgttgttacaaaccaccaaataatacagttgtgagcctgaatacaggactgaactcctatacacgtgtactgtagaatgagtattttttaataccttaaggtaggcgtcaaattctactccccaaagcagagatagattgatttatcaaaattattatctggccaacagtgtgactatcagacagcatcaaatatttgcccaatccaagattagactacacaaaagcttccttccagtattaaacaaaaagaattaaacataactatgaaaaaactttgctaatatctgtgtttttcagatttcattttttgtaaaatcagaaattaatctaaacatattcagtgataagttcatgtgtaacgacttaatgttaaaggttaaaaaaaagatttcacaaaatatacaactttcaccatatatataagcctgcaaaattagagtagtgaaagtcatgctagtccatcacccaaatatgttatagacgccatagacaggtgatgtttggtcacctatggtaactgctacctgatgaagagcataatttctgcatatccatcctcaataccatggtaaattctggggcaatagagaagcaacagaactgccacaaagtatacctcaatataattcctctagttctgcttctaaaatctgaggacagtgctagtgggaaaataattttcaaactacctggttaaccaaaatacaaaagcagctgactatgtgtgatttcataatagcacatttcttgacacttagtgctagaaatgaagatttggattttcctaacaacttacatcaagaatgtagtgtagctcattattgagaatttaggaaagcctgaatccattaattaaggaaataaatgtgactcacatttcttttactgtgacacaataatgtgatcctaaaactggcttatccttgagtgtttacaactcaaacaactttttgaatgcagtagttttttttttttaaaaacaaacttttatgtcaaattttttttcttagaagtagtcttcattattataaatttgtacaccaaaaggccatggggaactttgtgcaagtacctcatcgctgagcaaatggagcttgctatgttttaatttcagaaaatttcctcatatacgtagtgtgtagaatcaagtcttttaataattcattttttcttcataatatttactcaaagttaagcttaaaaataagttttatcttaaaatcatatttgaagacagtaagacagtaaactattttaggaagtcaacccccattgcactctgtggcagttattctggtaaaaataggcaaaagtgacctgaatctacaatgatgtcccaaagtaaccaagtaagagagattgtaaatgataaaccgagctttaaaggataaagtgttaataaagaaaggaagctgggcacatgtcaaaaagggagatcgaaatgttaggtaatcatttagaaaggacagaaaatatttaaagtggctcataggtaatgaatatttctgacttagatgtaaatccatctggaatctttacatcctttgccagctgaaacaagaaagtgaagggacaatgatatttcatggtcagtttattttgtaagagacagaagaaattatatctatacattaccttgtagcagcagtacctggaagccccagcccgtcacagaagtgtggaggggggctcctgactagacaatttccctagcccttgtgatttgaagcatgaaagttctggcaggttatgagcagcactagggataaagtatggttttattttggtgtaatttaggtttttcaacaaagcccttgtctaaaataaaaggcattattggaaatatttgaaaactagaaaatgatggataaaagggctgataagaaaatttctgactgtcagtagaagtgagataagatcctcagaggaaacagtaagaagggataatcattaagatagtaaaacaggcaaagcagaatcacatgtgcacacacacatacacatgtaaacattggaatgcataagttttaatattttagcgctatcagtttctaaatgcattaattactaactgccctctcccaagattcatttagttcaaacagtatccgtaaactaggaataatgccacatgcattcaatgggatcttttaagtactcttcagtttgttccaagaaatgtgcctactgaaatcaaattaatttgtattcaatgtgtacttcaagactgctaattgtttcatctgaaagcctacaatgaatcattgttcaaccttgaaaaataaaattttgtaaaaca

SEQ ID NO: 462 - DNA, 4976 bp, Homo sapiens
gcgtcggcggggcgcggaggaaccgcggcggcggcggcggcggccgcatccttgccgcccgccccggcccagccgcgtcccggagccgtcgggcatggagccgtggaagcagtgcgcgcagtggctcatccattgcaaggtgctgcccaccaaccaccgggtgacctgggactcggctcaggtgttcgaccttgcgcagaccctccgcgatggagtcctgctctgccagctgcttaacaacctccgggcgcactccatcaacctgaaggagatcaacctgaggccgcagatgtcccagtttctctgtttgaagaacataaggacatttctcacggcctgttgtgagacgtttggaatgaggaaaagtgaacttttcgaggcatttgacttgtttgatgttcgtgactttggaaagtcagaaaccaggatgcaacatctgtgccttgagcctctgctgctagatagcaacctaatgttgtaggggtgtgatgccgtggaccccttcttgaacccccaagctcgtcttgcatttggggctctagcatgcagctgcctgattgcccttgcagagcccacctccctgttatagaaacattatcacgactttctcgaacacctatagcattggccacaggaatcaggcccttcccaacagaagaaagcattaatgatgaagacatctacaaaggccttcctgatttaatagatgaaacccttgtggaagatgaagaagatctctatgactgtgtttatggggaagatgaaggtggagaagtctatgaggacttaatgaaggcagaggaagcacatcagcccaaatgtccagaaaatgatatacgaagttgttgtctagcagaaattaagcagacagaagaaaaatatacagaaactttggagtcaatagaaaagtatttcatggcaccactaaaaagatttctgacagcagcagaatttgattcagtattcatcaacattcctgaacttgtaaaacttcatcggaacctaatgcaagagattcatgattccattgtaaataaaaatgaccagaacttgtaccaagtttttattaactacaaggaaagattggttatttacgggcagtactgcagtggagtggagtcagccatctctagtttagactacatttctaagacaaaagaagatgtcaaactgaaattagaggaatgttccaaaagagcaaataatgggaaatttactcttcgagacttgcttgtggttcctatgcaacgtgttttaaagtaccaccttctcctccaggaactggtcaaacataccactgatccgactgagaaggcaaatctgaaactggctcttgatgccatgaaggacttggcacaatatgtgaatgaagtgaaaagagataatgagacccttcgtgaaattaaacagtttcagctatctatagagaatttgaaccaaccagttttgctttttggacgacctcagggagatggtgaaattcgaataaccactctagacaagcataccaaacaagaaaggcatatcttcttatttgatttggcagtgatcgtatgtaagagaaaaggtgataactatgaaatgaaggaaataatagatcttcagcagtacaagatagccaataatcctacaaccgataaagaaaacaaaaagtggtcttatggcttctacctcatccatacccaaggacaaaatgggttagaattttattgcaaaacaaaagatttaaagaagaaatggctagaacagtttgaaatggctttgtctaacataagaccagactatgcagactccaatttccacgacttcaagatgcataccttcactcgagtcacatcctgcaaagtctgccagatgctcctgaggggaacattttatcaaggctatttatgttttaagtgtggagcgagagcacacaaagaatgtttgggaagagtagacaattgtggcagagttaattctggtgaacaagggacactcaaactaccagagaaacggaccaatggactgcgaagaactcctaaacaggtggatccaggtttaccaaagatgcaggtcattaggaactattctggaacaccacccccagctctgcatgaaggaccccctttacagctccaggccggggataccgttgaacttctgaaaggagatgcacacagtctgttttggcagggcagaaatttagcatctggagaggttggattttttccaagtgatgcagtcaagccttgcccatgtgtgcccaaaccagtagattattcttgccaaccctggtatgctggagcaatggaaagattgcaagcagagaccgaacttattaatagggtaaatagtacttaccttgtgaggcacaggaccaaagagtcaggagaatatgcaattagcattaagtacaataatgaagcaaagcacatcaagattttaacaagagatggcttttttcacattgcagaaaatagaaaatttaaaagtttaatggaacttgtggagtactacaagcatcattctctcaaggaagggttcagaaccttagatacaactctgcagtttccatacaaggagccagaacattcagctggacagaggggtaatagagcaggcaacagcttgttaagtccaaaagtgctgggcattgccatcgctcggtatgacttctgtgcaagagatatgagagagttgtccttgttgaaaggagatgtggtgaagatttacacaaagatgagtgcaaatggctggtggagaggagaagtaaatggcagggtgggctggtttccatccacatatgtggaagaggatgaataaattcaaatcccgtgttgcaccctgcaccaaaaatttcagagaagggataaatagaagcctgcacagcatcgtgaattaactgaagtgtttaaaaagctgcatttctggctgttcaacatcctccctccttagcccctcctaagtcttaatgctgagatttctaaagatgctggtactgacagattaatggcttgcctagagctgtgcaagaaacagcctgccagtctgtcattgtcagggaccagggcaaaaccaagagctgttcttcccagaagagccctgcaaacacattggttcgtgcttccctttacttcttctggtcagataccatgaatgccagtcatcagtaaatcttaatacacttttgctttattctcacatgccattcaccagattatttgatggtacaaagaagcagaagtgtaattttccttttcccagcatgacgaaaaattggagttctgccatttgagcagcttactggaaagatccagccttacttgtcttaaattgtccaacaaggtgactcattgcccggcaaacacttttaccctcagatgttactcatgatattataaaatatgaggccagtgctcaggtttgcatcataagtgagctatccctgaagggttttaattacttatttggtgtcctgattatatttgcaaacttctttataaaaggtgaaaaaagcacacaaaagagagggtgtcttcatattaaaccttcacaaccttcatgatttcataggattattttggaaatatagcacttgactttatgaaaggatctgggctaggtatattaagggtagttgccaataacctgaagaagctggcattgtttacagaaacagatcaagggctataatttatgtcattttatagcagcagtatctattaatacatgccttttcctcccatccacctcccccgcacacacacaaagatgacctgggacatgatttttttattcccacattttcttggagcacaaacaactttgttgaggattttggaaggaaagcacaactgggtcctttattcatttctgggacagaaagagggtcagtggacttttgtgggcctccagcttctctcagagtctccccctctgcagcccatcctgggagtgtattaactggagggaagatgggtcttgcagtacatttgttttgcccagccatcactcttttttgtgaggagcctaaatacattcttcctggggtccagagtccccattcaaggcagtcaagttaagacactaacttggccctttcctgatggaaatatttcctccatagcagaagttgtgttctgacaagactgagagagttacatgttgggaaaaaaaagaagcattaacttagtagaactgaaccaggagcattaagttctgaaattttgaatcatctctgaaatgaagcaggtgtagcctgccctctcatcaatccgtctgggtgccagaactcaaggttcagtggacacatccccctgttagagaccctcatgggctaggacttttcatctaggatagattcaagacctttacctcagaattatgtaaactgtgattgtgttttagaaaaattattatttgctaaaaccatttaagtctttgtatatgtgtaaatgatcacaaaaatgtattttataaaatgttctgtacaataaagttacacctcaaagtgtactcttggaatggattctttcctgtaaagtcttatctgcgactctgtctcgggaatgttttgtctgttgccgtcagccgaactttgttatggagggagcagcctcacacaagcagaaacactcctgtggatggtattgtagcatgtattgtttattttagtcaatagaccctctccttataaatggtgtttagtcttcctgttgcatttcatgggcctgggggtttcctagcagaggatattggagcccctttttgtgacattaccaattacatctttgtccacgtttaatactttgttttggaaaatttaaatgctgcagatttgtgtagagttctaataccaaagacagaagtaaatgttttccatatactttgtcttgcctgtatgcagccctcgtgtaatacggtgaattagagtggtatttcactttgtattattttgtaaatatgtcaatataataaatagtgactaaattgat

SEQ ID NO: 463 - DNA, 1423 bp, Homo sapiens
cagtcacatttcagccactgctctgagaatttgtgagcagcccctaacaggctgttacttcactacaactgacgatatgatcatcttaatttacttatttctcttgctatgggaagacactcaaggatggggattcaaggatggaatttttcataactccatatggcttgaacgagcagccggtgtgtaccacagagaagcacggtctggcaaatacaagctcacctacgcagaagctaaggcggtgtgtgaatttgaaggcggccatctcgcaacttacaagcagctagaggcagccagaaaaattggatttcatgtctgtgctgctggatggatggctaagggcagagttggataccccattgtgaagccagggcccaactgtggatttggaaaaactggcattattgattatggaatccgtctcaataggagtgaaagatgggatgcctattgctacaacccacacgcaaaggagtgtggtggcgtctttacagatccaaagcaaatttttaaatctccaggcttcccaaatgagtacgaagataaccaaatctgctactggcacattagactcaagtatggtcagcgtattcacctgagttttttagattttgaccttgaagatgacccaggttgcttggctgattatgttgaaatatatgacagttacgatgatgtccatggctttgtgggaagatactgtggagatgagcttccagatgacatcatcagtacaggaaatgtcatgaccttgaagtttctaagtgatgcttcagtgacagctggaggtttccaaatcaaatatgttgcaatggatcctgtatccaaatccagtcaaggaaaaaatacaagtactacttctactggaaataaaaactttttagctggaagatttagccacttataaaaaaaaaaaaaaggatgatcaaaacacacagtgtttatgttggaatcttttggaactcctttgatctcactgttattattaacatttatttattatttttctaaatgtgaaagcaatacataatttagggaaaattggaaaatataggaaactttaaacgagaaaatgaaacctctcataatcccactgcatagaaataacaagcgttaacattttcatatttttttctttcagtcatttttctatttgtggtatatgtatatatgtacctatatgtatttgcatttgaaattttggaatcctgctctatgtacagttttgtattatactttttaaatcttgaactttataaacattttctgaaatcattgattattctacaaaaacatgattttaaacagctgtaaaatattctatgatatgaatgttttatgcattatttaagcctgtctctattgttggaatttcaggtcattttcataaatattgttgcaataaatatccttgaacaca

SEQ ID NO: 464 - DNA, 7453 bp, Homo sapiens
ccggagcggccggggccacgatggagcgcgacggctgcgcggggggcgggagccgcggcggcgagggcgggcgcgctccccgggagggcccggcggggaacggccgcgatcggggccgcagccacgctgccgaggcgcccggggacccgcaggcggccgcgtccttgctggcccctatggacgtgggggaggagccgctggagaaggcggcgcgcgcccgcactgccaaggaccccaacacctataaagtactctcgctggtattgtcagtatgtgtgttaacaacaatacttggttgtatatttgggttgaaaccaagctgtgccaaagaagttaaaagttgcaaaggtcgctgtttcgagagaacatttgggaactgtcgctgtgatgctgcctgtgttgagcttggaaactgctgtttagattaccaggagacgtgcatagaaccagaacatatatggacttgcaacaaattcaggtgtggtgagaaaaggttgaccagaagcctctgtgcctgttcagatgactgcaaggacaagggcgactgctgcatcaactacagttctgtgtgtcaaggtcaggtgagaaaagttgggtagaagaaccatgtgagagcattaatgagccacagtgcccagcagggtttgaaacgcctcctaccctcttattttctttggatggattcagggcagaatatttacacacttggggtggacttcttcctgttattagcaaactaaaaaaatgtggaacatatactaaaaacatgagaccggtatatccaacaaaaactttccccaatcactacagcattgtcaccggattgtatccagaatctcatggcataatcgacaataaaatgtatgatcccaaaatgaatgcttccttttcacttaaaagtaaagagaaatttaatcctgagtggtacaaaggagaaccaatttgggtcacagctaagtatcaaggcctcaagtctggcacatttttctggccaggatcagatgtggaaattaacggaattttcccagacatctataaaatgtataatggttcagtaccatttgaagaaaggattttagctgttcttcagtggctacagcttcctaaagatgaaagaccacacttttacactctgtatttagaagaaccagattcttcaggtcattcatatggaccagtcagcagtgaagtcatcaaagccttgcagagggttgatggtatggttggtatgctgatggatggtctgaaagagctgaacttgcacagatgcctgaacctcatccttatttcagatcatggcatggaacaaggcagttgtaagaaatacatatatctgaataaatatttgggggatgttaaaaatattaaagttatctatggacctgcagctcgattgagaccctctgatgtcccagataaatactattcatttaactatgaaggcattgcccgaaatctttcttgccgggaaccaaaccagcacttcaaaccttacctgaaacatttcttacctaagcgtttgcactttgctaagagtgatagaattgagcccttgacattctatttggaccctcagtggcaacttgcattgaatccctcagaaaggaaatattgtggaagtggatttcatggctctgacaatgtattttcaaatatgcaagccctctttgttggctatggacctggattcaagcatggcattgaggctgacacctttgaaaacattgaagtctataacttaatgtgtgatttactgaatttgacaccggctcctaataacggaactcatggaagtcttaaccaccttctaaagaatcctgtttatacgccaaagcatcccaaagaagtgcaccccctggtacagtgccccttcacaagaaaccccagagataaccttggctgctcatgtaacccttcgattttgccgattgaggattttcaaacacagttcaatctgactgtggcagaagagaagattattaagcatgaaactttaccctatggaagacctagagttctccagaaggaaaacaccatctgtcttctttcccagcaccagtttatgagtggatacagccaagacatcttaatgcccctttggacatcctataccgtggacagaaatgcaagcgacagtttctctacggaagacttctccaactgtctgtaccaggactttagaattcctcttagtcctgtccataaatgttcattttataaaaataacaccaaagtgagttacgggttcctctccccaccacaactaaataaaaattcaagtggaatatattctgaagctttgcttactacaaatatagtgccaatgtaccagagttttcaagttatatggcgctactttcatgacaccctactgcgaaagtatgctgaagaaagaaatggtgtcaatgtcgtcagtggtcctgtgtttgactttgattatgatggacgttgtgattccttagagaatctgaggcaaaaaagaagagtcatccgtaaccaagaaattttgattccaactcacttctttattgtgctaacaagctgtaaagatacatctcagacgcctttgcactgtgaaaacctagacaccttagctttcattttgcctcacaggactgataacagcgagagctgtgtgcatgggaagcatgactcctcatgggttgaagaattgttaatgttacacagagcacggatcacagatgttgagcacatcactggactcagcttctatcaacaaagaaaagagccagtttcagacattttaaagttgaaaacacatttgccaacctttagccaagaagactgatatgttttttatccccaaacaccatgaatctttttgagagaaccttatattttatatagtcctctagctacactattgcattgttcagaaactgtcgaccagagttagaacggagccctcggtgatgcggacatctcagggaaacttgcgtactcagcacagcagtggagagtgttcctgttgaatcttgcacatatttgaatgtgtaagcattgtatacattgatcaagttcgggggaataaagacagaccacacctaaaactgcctttctgcttctcttaaaggagaagtagctgtgaacattgtctggataccagatatttgaatctttcttactattggtaataaaccttgatggcattgggcaaacagtagacttatagtagggttggggtagcccatgttatgtgactatctttatgagaattttaaagtggttctggatatcttttaacttggagtttcatttcttttcattgtaatcaaaaaaaaaattaacagaagccaaaatacttctgagaccttgtttcaatctttgctgtatatcccctcaaaatccaagttattaatcttatgtgttttctttttaattttttgattggatttctttagatttaatggttcaaatgagttcaactttgagggacgatctttgaatatacttacctattataaaatcttactttgtatttgtatttaaaaaagaaaaatattcctatcctgctcactggtaattaacataggtttaaaatggcttcaaatgtggccctatagacggttaaaattgtaccttatcttggcaaaacttcagagcaccagtcagtgcatgcaaggtgccattttttattgagatgcttagaatgtttctttctgtgcacaagacttaccctaccagcagcagagccattctctgttgagtggttcattttgaagttccacagattgaagagaacatgccaccaatcacctcacatcttcttggtggacatgataaatgacacaatgaacttgatttctttactaccttgactgtagctttttatccctacctgtgaaccttcaaagactgcattaacttttaggctacataggtccaattgaggtataatatcagtacaccaaagatttttatatgtccttcgtgtgaccattcttcaacggcctaagggccagctgcaaagacttttggaaaatacaatttacaactcaaaattatttaataatttaggaagttgctttttttttttttttttttcagtcctgcagtttcctgaagctctgtatatgatatttttttcagcctgcttctctctgttgttcagattaggtaattttattcttctgtctcgaagctcactgattctttattctgtctaatctgttctgctgttgagcccatttattcctgatttttatattttagttattgtatgttttatttctaaaatttccattcagtttttctttatatcttctatttgctgagaatttctgtctctttgctgagactttctacgttttcatttgtttcaagtgcatttatacttgcttgttgaagaatttttatgatggctgctgtaaaatccttatcagataattccaacatctgtcacctcattgtttgcatctactgatggtcttttttccattcggaaacattttcctgtttcttggtgtgtggaatgattttttattgaaacctggatatttttaggtattatgttatgagactatgggtcttatttaaaccttctgctttagccaactttctcagataccaccacagcaggggaattgggagcactgcttcattattaccaggtgtggctaggagtccaggttccccagtcagcctccctttatactgagtaacagggtcccctcattactactgggcaaggtgagaattcagtttcccattaggtctttattgattcttccctggctggaatgtgcagcggcaccttttggtgcaccctgggaatctccactaatgctatgggacagagtgaccaggaagagcttcattacaccaggtgggaatgaaattcccagtagcctacacagccttctccgacaccactctggagttgtattcttccagcacacaaacatacacaatttaactcaaagcatcttagcagagcttaattaaatggatagatgcctgttccctttgctggataccaagaatacaaaagtcagggagttggggcacctctttacagcttggtgagagtgtaagtctggactccccactcagcatttgctggtatgggtggggccatggtgtttttccatggtgtttggttggagtacagccttttttacccttgcttggctacccttttctggtcctttggcaggagagagcaggactctcttagggcttttttttcccctgcatttattgacatttccaggttgctgactttttcagctccaagttggaaatatatgagctgaaaagaaaatgtagggaactcatcacagtgttgttacttgggccccaatgttcctagcctattttctgtctactattcagagtcttgctgtgttttaatataatatccaggatttttatatgcatttagcagaaggatgtctactctgcctttgtagaagtgtctcactgatttttacatatttttccagcacacaaacatacacaatttaactcaaagcatcttagcagagcttaattaaatggatagatgtctgttccctttgctggacgccaagaatacaaaaaagaacaagtgacaattttctctgtcttagggagaagagacagcagaagtgtaaatgatccctaaagagtgatagatgttatcatgaagccacaggaggggtgccaggctgcacaaaagagacactggatgcttcttggtagtagaggcagtggcttcccagccttggggctaaggcttgtagggtgaattggaacttttcagatgagcaaggcaaagaagggaccttctaacattccttggatggaacatttttgacattttcccatttacagctacttatattttctacaagtgtcactgtgaccaacttatgtacacatactttttcttgcttagttataataatctgttcttaaagaaaatgtcagtctctacattctatgctgactgttaaggaaagagcacccacatctgctcctacttagctttttttctgtggttcttacacagtattcctttttttcttttcttgaaagagactcctcctttcttttcttttcttgaaagagttttaaacagataagatggcaaaagtgactgatctctactcccccagtttgaatggtaaatttgaatggtaaattcccatgaacatatatggaaatgtctttatcctactttctccaataaaggctgttcttagcttttcaaatgcaaagtgaaacctttatttatcttgatttcttttttttttttttttttttttttttttttgagatgctctgtcacccaggctggagtgcagtggcaagatcttggctcactgcaagctccgcctcccaggttcacgccattctcctggctcagcctcccgagtaactgggactacaggcacctgccgtcacgcctggctaattttttgtatttttagtagagaatggagtttcaccgtgttagccaggatggtctcgatctcctgaccttgtgatctgcccgcctcggcctcccaaagtgctgggattacaggctcgagccactgcctccagcctatcctgatttctactgtcatgcctcacatcagtccttttttttttttttgagacagagtctcgctctgtggcccaggctagactgcagtggcatgatctcggctcactgcaacctccacctccggggttctagcaattctcctgcctcagcctcctgagtagctgggattataggcgcatgccacacctggctttttgtattttagtggagatggggtttcactgtgttgctcaggctggtcttgatctcctgagctcagacaatccccccgccttggcctcccaaagtgctaggattataggcgagagctgctgtgtgcttcttaagtgaggtaagtaacttccatagaaaatttccatcagttcattcatgaaagaacaaagaacctggcaaaacttaaaaaaacgtttccaagaatcagataaaagaggacaaaccttagggagaagaaggcagctgctcatttccagcaggggaagtagctgcatagagtacaaggactggtaggcctgttggctgttcctgtttaaggagacaagatgggcatggaacagggaccaccccctcctctgggagaagctgttacccccttcacttttcctcctctgtcattacccacaatcactctccttctttgcgctatggtaggtgtttacccatcataggaatgggcatttgaactttgaaactgaatgtggtgattacacttcatgctgaagcttttcacatgagtgctttcataagcattaagtaaaattttataatgactgcagtccaaggacattttccctggtttttggccagtctaaatattgtaagagagagagaagaaaagtgtacggaatataattgtctctaagctaagaaatgtggatgttcaaataaaacatacgtacagaa

SEQ ID NO: 465 - DNA, 5873 bp, Homo sapiens
atttcctcccagcctcgtgcgggaaatggctttaattctgacggcagggctgtgagggactagcgggaacccgagccttttgtcaaggaactgcggcgtcggtggccagtcatccccgccgccgcggagccgctgcactgctgggggatctcccagcagctctgacgagcgcgggctgcagcatgggcagaaaacgctgccctgcagattagctgggtggattttttaagcgcaccccaccccccaaacccataaaataacaaaaccaacccgcagtggccgaccggagatagctaagatgccgcgcaggagaaaggtttctggtgatgatgtagcatccgaggctcttaggaaatcggggctgcaagcactggcccctgcttggggatggtgggaccctcgcccggagcgtaacgcctgacagtttccacctggatgtttgaggttgtgtagatgtggccggcacccttgagagtggagctagggggtgcagactgagcagtgaacagaaggagccttggacagggctgggccagcctcccgagttccaggagcgaattgcaaacccaccgggaaaatgagcgaagagacggtccccgaggctgcctcgccgccgcccccgcaggggcagccttactttgaccgcttctcagaggacgaccccgagtacatgcgccttcgcaaccgggcggcggacctgcggcaggacttcaacctgatggagcagaagaagcgcgtcaccatgatcctgcagagtccctctttcagggaggagctggaaggcctcatccaggagcagatgaagaaggggaacaactcctccaacatctgggccctgcgacagatcgcggacttcatggccagcacctcccacgcagtcttcccgacatcttccatgaatgtctccatgatgacgcctatcaatgacctccacacagctgactccctgaacctggccaaaggggagcggctcatgcggtgcaagatcagcagtgtctaccgactcctggacctctatggctgggcccagctgagtgacacctatgtcacgttgagagtcagcaaggagcaggaccacttcctgatcagccctaagggagtttcttgcagtgaagtcacagcgtccagcctggtgagtacaatcaaggtgaacattctgggagaggtggtggagaagggcagcagctgcttcccagtggacaccacaggcttctgtctgcactcggccatctatgcagcgaggcccgacgtgcgctgcatcatccacctgcacacaccggccacagcagcggtgtcggccatgaagtggggcctcctgcctgtctcccacaatgccctgctggtgggggacatggcctattatgacttcaatggggaaatggagcaggaagccgatcggatcaacctgcagaagtgccttggacccacctgcaagatcctggtgctaagaaaccatggagtggttgctctgggtgacacggtagaggaggcattttacaagatcttccacctgcaggctgcatgtgagatacaggtgtcggctctgtccagtgccgggggagtggagaacctcatcctcctggagcaggagaagcaccggccccatgaggtgggctccgtgcagtgggccgggagcacctttgggcctatgcagaagagtcggctgggggagcatgagtttgaggccctcatgaggatgctggacaacctgggctacagaacaggttacacgtatcgccacccctttgttcaagagaaaaccaaacacaaaagtgaggtggagattccagccacggtcacagccttcgtgtttgaggaggacggtgccccggtgcccgccctgcgacagcatgcccagaagcagcagaaggagaagacccgctggctcaatacgcccaacacctacctgcgggtcaatgtggccgatgaggtccagaggagcatgggcagcccccgacccaagaccacgtggatgaaggctgacgaggtggagaaatccagcagtggcatgccgattcgcatcgaaaacccaaaccaatttgtgcctctctatactgacccccaggaagtactggagatgaggaacaagattcgagaacaaaaccgacaagatgtgaagtcagcggggcctcagtcccagctcctggcgagcgtcattgccgagaagagccgaagcccggtagagcagaggctgcccctgactggcggggaaacgtgtttgccttcggggtcttctgtgcctggggctgggttgcaggacccctgagtcctcatacccaccttcccctgtgatcttgggtgccggtgctcttgctgcaaaatggaggccaacctcacaggggtgctgtgaggaccagggaggacaatgtctgatggcccctgtgggcactgggctggagaacagcagcccagcctgcctgcaggagtgatgcggccggcttccgtacctcctgccatggaactccactctgtcctcccttactaccccgtgaagtggggactcataggcttggggctggagactcccaggtgccccaggtgtgcccagccctgagagtctctgacctctgagcctggtatgacatcatccaaccagagctctggaaagatgatcatgtacccatagagaaggggtatatagacaggacccatgctcctacaggatgggaagggacaatattacccacacaaacccacattgagttagaaagtattgtaattgtttttgtgcttgagatagaacagtgttttgtctagtgcttagcaaaaggggtgaagttcagaattctggcatgtgtttgaaatcactgctgctccttgcaaggtagcaatgggcatgacattttccttagcagtaaaaattggggaaatacaggaaatgttcctctctgcagggcaaattgtgatgatgcaatgatttcaggtcaagactgcagcccacagggtgggtgcccattggcaggagaagtgtgaaagttgtatcatcacacttacctccccccaaccccaactcagccaagatggggaacactgaatatcccgcagggtcaagtatagaaatagccatgttctggcgggaggtgagagttcattacaatgagcaacactgttaaaaaaacaaacaaaaatctcccctgccatttataccaagtgctcttctcggagtccctcttcttgggtttttggtcttggattctcggttgactccatgattccctacattaggcctactgtggcctcccttttggaaggggcccaggggcagaagacctggcgggccagggcagggaggactggcagcctccaggctcacctccctttggcttcactctctttgctcctcagcttcagagcactgcatcctcaaaggccaagatgaggatgctgaattaggaaaaaaggctgtggagtctgaattttagttcctatcttgggctagaggggtcaaagaattcctgaagcttatgtaagggccggctggtcagctccctagaaccacgggctccacagaggtggcaaaacccagtgattttgccagtatccctgcagggacctgcggtacaggcaggttgaagatctgagactcaggaaccttggcccctttgtcacttacaactgtgtgtgaaacaggactaacagtttggactgagagcactgaagctgctgtgtgttgtgcatataacttaatgctgtgtgttgtggcttgcactgctgtgggggcggggagggcagtggtggggaatggctggcatgaagcttgcttgagccaatgctatgcttgctgggctttggctgactggctttgggccaccaactgtatttgcatagtgatggcttggaagtgtccatagaagggattgcaataaaggtgtgtcttccttctgtctacagagagccagctgatgtccaagggagacgaggataccaaagacgattcagaggagacggtgcccaaccccttcagccaactcactgaccaggagttggaggagtacaagaaagaggtggagaggaagaaactagaacttgatgctcctggctggttctcttcaagacaggacaggaacgagagccaggctctggtccggccgtgtgcgagttcttcagcgttgccctccacatctggagtaacatattggagagaaagaaactgccccagaagagcctggctcacctgcaaagtctgcacctgcttctccagtgcagagcccagcgaaggaggcagagacaaagagccctttagtctctccttccaagtctttagaggaaggtactaagaagacagaaacaagcaaagccgccaccacagagcccgaaacaacccagccggaaggggtggtggtcaacgggagggaggaggagcagacggcagaggaaatcctcagcaaaggcctgagccagatgaccaccagtgctgacacggatgttgatacctctaaggacaaaaccgagtcggtcaccagcggccccatgtccccagagggctcaccttccaagtctccctcaaagaagaaaaagaaattccgaaccccctccttcctgaaaaagagcaaaaagaaggagaaagtggagtcctgattcatgacacccttgggctccctcctgcctcctctctctcctccccttcccttctcccatctctgtccctgcaagcacagggctaaggagggatagagtaggaccctggaccacattcggaaggggaacttagagatcacccgaccaacccttcgttttacagttgcccaagagaaatcaggtgacttgcccaaggtcacacagctagttagcggcagagcctgcactcgaattcaggtctcctgacttccagtccagtgctccttctactacacaacactgcctagttgtgggctgcctttgtttggatgctgtccaccaatctgagcctagggcaagaaggccagaaatgggccgtgagctctcacaggctcagactaaatcagaggtcaaggcttcccctgagtaaggtccatttcttcccaggaatccaatctcctgtggatggagctatctctacatttaaaaatctcttctcttttccactttgggtccctgccctgctgctcaaagtgactagccaaattgacccctccaacagaaagtaatctttgttcccaagggctgatggcttagcttgtactaccccaaacattaaccctgagctttcttcatggaacctcttgaatgatggatggaagagctataagaggtggtaggcataggggcaagccatgtaagctgaggattggggatggtttcatcaacataagaggccaggaacttgacccctttgaattgtgcatctcaggcacttcaaaactaaaaccaaatttagcataggaaaaagttgtttaatgctcagggcagaaatttggggaagttgaaatcctctgttggctttgggttgtataaggaggatcaaaacaacagaggaaatgctgactttctagctttgcatgacacctggagcaatgcactgtacctgcctcactcctgtccagtggtcaggtttcccctgaccttccctcacccccagaaacacttgcttacagaccgaaactggcatcttactcttggcaccttgacttgcaccctctgaggttccaactcagtcattctttgtccagcagaggagaatcagaaatgagcccttcaggattaatcctcttgcaccagctctcagagaaatgctgggtatccctgtccttgtccctatctgtccatcctggggcctggtaatggccacagttattgttttaaatgccaacactgtcttctcatgttcttccgtggggcattgattaatgagcatttgttggctcctaaaaattagacaatccattctcttgaaa

SEQ ID NO: 466 - DNA, 92 bp, Homo sapiens
ggatcgatgatgacttttatacatgcattccttggaaagctgaacaaaatgagtgaaaactctataccgtcatcttcgttgaactgaggtcc

SEQ ID NO: 467 - DNA, 67 bp, Homo sapiens
ggatcgatgatgagaataattgtctgaggatgctgagggactcattccagatgtcaatctgaggtcc

SEQ ID NO: 468 - DNA, 5343 bp, Homo sapiens
tttctccttccctccacgggccgggtgagaaagtagccgggggctatcccgacccggcggttcttggggagggggccgaacaagaaaagggaggagatggagataacttccccggatttagcttttttgtctttgtttttgttctcaccacttccatcggatgactggagagtaaaagggaacccggagcggggtggcgagcagcgctttgagaaaatgcaggagtgtgtttggagacgcgtaaagttgcctttcaagctctggcctccgggcacgcgatgctccgcggcgggctgactcagggctgccttgggcctccctgccaccctcctggaaatgatgcaagtcctgactgtcacctggatccctgcagcccagcctggaatgcgtctggattaggggaaagacgagaaacgacactccaggtgttgcacggcccaccaaagcgggaagatagggcagttgctcagaccaaatactgtatctagtgcttctgctcctatcttcaatcgtggggttctttttaatgcaaagtgtcacaaggccaggaattcccatgtgtgctcagttggcccacagcatcattgtgcctaggaaactgcttcaatttatcaagtcctctgggctgggaatctcactgaattccaaacggcggaaagaggaaactttcccaacccgatgtgggtgtgacgcgagccaggggccccagggacactgtcccagagcacaccgtccccctttaacagcaactggagcttggattcgctcttatattgtacagtcctttcgaccattgccctggagcacccgcacacgcgcacgcatctccggccgcgctcacacacactcatacacacgcacgcaaacgcgtggccgccgccaggtcggcaactttgtccggcgctcccagcggcgctcggcttcctcctgtagtagttgagcgcaggccccgcctcccggccgtgttgtcaaaagggccggggtctcggattggtccagccgccgggacaacacctgctcgactccttcattcaagtgacaccagagcttccagggatatttgaggcaccatccctgccattgccgggcactcgcggcgctgctaacggcctggtcacatgctctccggagagctacgggagggcgctgggtaacctctatccgagccgcggccgcgaggaggagggaaaaggcgagcaaaaaggaagagtgggaggaggaggggaagcggcgaaggaggaagaggaggaggaggaagaggggagcacaaaggatccaggtctcccgacgggaggttaataccaagaaccatgtgtgccgagcggctgggccagttcatgaccctggctttggtgttggccacctttgacccggcgcgggggaccgacgccaccaacccacccgagggtccccaagacaggagctcccagcagaaaggccgcctgtccctgcagaatacagcggagatccagcactgtttggtcaacgctggcgatgtggggtgtggcgtgtttgaatgtttcgagaacaactcttgtgagattcggggcttacatgggatttgcatgacttttctgcacaacgctggaaaatttgatgcccagggcaagtcattcatcaaagacgccttgaaatgtaaggcccacgctctgcggcacaggttcggctgcataagccggaagtgcccggccatcagggaaatggtgtcccagttgcagcgggaatgctacctcaagcacgacctgtgcgcggctgcccaggagaacacccgggtgatagtggagatgatccatttcaaggacttgctgctgcacgaaccctacgtggacctcgtgaacttgctgctgacctgtggggaggaggtgaaggaggccatcacccacagcgtgcaggttcagtgtgagcagaactggggaagcctgtgctccatcttgagcttctgcacctcggccatccagaagcctcccacggcgccccccgagcgccagccccaggtggacagaaccaagctctccagggcccaccacggggaagcaggacatcacctcccagagcccagcagtagggagactggccgaggtgccaagggtgagcgaggtagcaagagccacccaaacgcccatgcccgaggcagagtcgggggccttggggctcagggaccttccggaagcagcgagtgggaagacgaacagtctgagtattctgatatccggaggtgaaatgaaaggcctggccacgaaatctttcctccacgccgtccattttcttatctatggacattccaaaacatttaccattagagaggggggatgtcacacgcaggattctgtggggactgtggacttcatcgaggtgtgtgttcgcggaacggacaggtgagatggagacccctggggccgtggggtctcaggggtgcctggtgaattctgcacttacacgtactcaagggagcgcgcccgcgttatcctcgtacctttgtcttctttccatctgtggagtcagtgggtgtcggccgctctgttgtgggggaggtgaaccagggaggggcagggcaaggcagggcccccagagctgggccacacagtgggtgctgggcctcgccccgaagcttctggtgcagcagcctctggtgctgtctccgcggaagtcagggcggctggattccaggacaggagtgaatgtaaaaataaatatcgcttagaatgcaggagaagggtggagaggaggcaggggccgagggggtgcttggtgccaaactgaaattcagtttcttgtgtggggccttgcggttcagagctcttggcgagggtggagggaggagtgtcatttctatgtgtaatttctgagccattgtactgtctgggctgggggggacactgtccaagggagtggcccctatgagtttatattttaaccactgcttcaaatctcgatttcactttttttatttatccagttatatctacatatctgtcatctaaataaatggctttcaaacaaagcaactgggtcattaaaaccagctcaaagggggtttaaaaaaaaaaaaccagcccatcctttgaggctgatttttcttttttttaagttctattttaaaagctatcaaacagcgacatagccatacatctgactgcctgacatggactcctgcccacttgggggaaaccttatacccagaggaaaatacacacctggggagtacatttgacaaatttcccttaggatttcgttatctcaccttgaccctcagccaagattggtaaagctgcgtcctggcgattccaggagacccagctggaaacctggcttctccatgtgaggggatgggaaaggaaagaagagaatgaagactacttagtaattcccatcaggaaatgctgaccttttacataaaatcaaggagactgctgaaaatctctaagggacaggattttccagatcctaattggaaatttagcaataaggagaggagtccaaggggacaaataaaggcagagagaagagacagaactaaaaatacgaggaaaggagagtgaggattttcattaaaagtctcagcagtgggtttcttgggttatttaaaacatcacctaaataggccttttcttcctaattggccatcaaattaaagcctatcctttctcaagcaggagctggtattgtagggagtggccgggtattctgggctgggctcttctggagtagggggtcagcaaacattgtctgcaaagggccagatactgaatccagtactttcagtttggcgagccgtgaggtctctgtcgaaactactcaactctgccgtcctagcacaaaagcagccatagacaacacacaaacgagagggcttggctcccttccaggaagatttatttaacaggctcccagctgaatttcactcacaggacacagtttactgatctctgttctagtgagtgggtcaaaaagcatatgcatccttatccgtcaactcatcagctcttcctcaaggcaacctgaggccagacaccaagaaaccaagcgtatctgctctaaaatgacttgttcctggggaatgccttcaaccaaaacacagctagtatttctatgccccaaatccaatcccagtctttcatgatccatgccggcggttgggtggggaggggaatcattggttgggggaagggaggaaaccccacctccagcccccgccaccgggctccctgggcacccagcaagatctggggctgcagagaacagaagagctggtgcacttaatccagctctgcccttggggggaggaggacctgtgtgtcaggctctgccatgggaacgagtgtaaaccgtggctgtctcctgcagtgagccaccgcggcaggcacgttgactgttttactgacatcactcaaaagctaaagcaataacattctcctgcgttgctgagtcagctgttcatttgtccgccagctcctggactggatgtgtgaaaggcatcacatttccattttcctccgtgtaaatgttttatgtgttcgcctactgatcccattcgttgcttctattgtaaatatttgtcatttgtatttattatctctgtgttttccccctaaggcataaaatggtttactgtgttcatttgaacccatttactgatctctgttgtatatttttcatgccactgctttgttttctcctcagaagtcgggtagatagcatttctatcccatccctcacgttattggaagcatgcaacagtatttattgctcagggtcttctgcttaaaactgaggaaggtccacattcctgcaagcattgattgagacatttgcacaatctaaaatgtaagcaaagtagtcattaaaaatacaccctctacttgggctttatactgcatacaaatttactcatgagccttcctttgaggaaggatgtggatctccaaataaagatttagtgtttattttgagctctgcatcttaacaagatgatctgaacacctctcctttgtatcaataaatagccctgttattctgaagtgagaggaccaagtatagtaaaatgctgacatctaaaactaaataaatagaaaacaccaggccagaactatagtcatactcacacaaagggagaaatttaaactcgaaccaagcaaaaggcttcacggaaatagcatggaaaaacaatgcttccagtggccacttcctaaggaggaacaaccccgtctgatctcagaattggcaccacgtgagcttgctaagtgataatatctgtttctactacggatttaggcaacaggacctgtacattgtcacattgcattatttttcttcaagcgttaataaaagttttaaataaatggc

SEQ ID NO: 469 - DNA, 134 bp, Homo sapiens
ttgcacagtgaacacccaagtgtgctttatagttcccttggctttgaccctgtgctagagcattgcctgctcttctcctctgcattaaaaggaatatttatccttttaaatgtattcagaaagccagcacatta

SEQ ID NO: 470 - DNA, 6971 bp, Homo sapiens
tgcagagagaaagagcccagatcgaggctgctcgggtcctttctccccccgcctccctctagcgccgcgccccctggcccccagccccagcctgcggcgggacctccggggtcgaaggttctggcccgctcgcgcccctcgccgcccccgcgcgcccccagcgctcctccagccggctcgggccgctcggctatggatcgcctgctcgccgggcgctgaaggcatccccgggatccggagcgcagcccgggaaagagaaatgcacagcggtattgatgagtagatccttggattcagaggttggctgaaacgcaccatgcctgcttccatcttttgctctgtaaagttgtgaattgctcatgcctatagggaggaaggatggcacatgggattccttctcaaggcaaagttaccataacggtggatgagtacagctcaaaccccacccaggcattcacgcactacaacatcaaccagagcagattccagcctccacatgtacatatggtcgaccccatcccatatgacactccaaaaccagcgggccacacgcggtttgtctgcatctcagacacacactccagaacagatggtatccagatgccttatggggacatccttctccacacaggcgatttcaccgagctgggactgccctcagaggttaagaagtttaatgactggttaggaaacctgccatatgaatataaaatagtgattgctgggaatcatgaactgacatttgataaggaattcatggcagaccttgttaaacaggactactaccgtttcccctctgtgtccaaattgaaaccagaggactttgacaatgttcagtccctcctgacaaacagtatttacttacaagattcggaggtaacagtgaagggattcaggatatacggtgcaccttggaccccgtggtttaatggatggggctttaacctacccagaggtcagtctctgctggacaagtggaacctcatccctgagggcattgacatactcatgacacatggacctcctctaggttttcgagactgggttccaaaggagcttcaaagagtgggctgtgtggagctgttaaacacggttcagaggcgagtccggcccaagctccatgtgtttggtggaatccatgaaggttatggcatcatgaccgacggttacacaacgtacatcaatgcctcgacgtgtacagtcagctttcaaccgaccaaccctccaattatatttgaccttccaaacccacagggttcctgaagctctaaatgccctattggaatgtgagggaaggtctataaactgccatttttctaattataaacttacattctcttacttatttacaaaccctgtgagttctttttgtaaattgttggaacacaaatgatgctagaggttgtgcttcttattttattttattttaaatggggcatccatttgaaatcagaggaacattgtgaatttgtaaaatgacttctgttttctcaaaggccatgccattgtaaattgttagtgttcgccaaaggacagccaagctttcttttaaaaagtgataaaagtcttattttaatatgctttaagctgaaagaaaaaaaaataagaaacaggcagtgttttaaaaaccaacacagatttgcacaactgtttaagagtattgtttgaaatattttaattttcaatgttttgttgttgttgttttcttggtaatgcttcttttttgcagatgtggtcccaatttatagcaatcttctcaacagaagtaggcatggaaaagacttcttttcatactctcactataaagaaagctgcattgagaagaaaatggctgtcatttaaaggatggtttaactagtgagattcctattgtggttatacaaggtctcattgtttgtttgtttcttttaaattatttcagctttaaaaatacagaaatggaatctgtcaagagcaggtatttcatacggttaaaaaaatgaacatgcagactccttttcaatatgggtttatatatataagtattttttgtgtattatgactacgttaggagtttattattgtcaaggacagtacaactgcaaagggatgctgtatagcaacacatcagaagtcggaaggaactgacacattctctcagagctcaaggtcttaaagagcttgagttaaatctaggtacagttacaggcatgtatagacttaaatggatgcaatggaagctaactaaaataaggcttagttgtcctttctatttaaataccccaagttgtcttcttacttcctctcccctctcccattttgcactgtgtgtcgatgcaatcttcgctagcacaaaatattgtcgctaatagtcatttctgttttcccattgtaaatgctgttgagctttattctattttatgttactttgttaatgaaatttaggaaagcagttgtttctttaaatttattgtgatattctatatctagcggcctttatatgcaaataaaattgcaagatttttaaataaaccctgtgagcatctccaaggcactgaggacaaaaatatgttctctgccttcaaaaacttcctagtctagaggaaactggcatagacacaattaattgatgatctgatgaattagcattgtgtgagctacaatcctggcatgaatcaagaactagagaggcacacaggaaggaaggaagatgcctctccttggtgaagacaaagaaggcatgaggaggaggcgacagggaagctcacctggtggacaacaggaaagactgcggaggagggctctgctggaagaggaaacagactggggaggtggggccagtgcataaagggccactgcaggaaggggttgtaggagaaaaggaaagacagatcagtcactgatgaccccctccaccccaggtctgcagacagagctgattccttctctaagcctcggcatcccctaccaacagtccctcctgctccttctctcccaagtcctctaaacagcttcatgcccaaaccacaaagagaacattctcaggcctaaggcaggccttcccagcacagaatgtttggagccctctgtgggagagcggctggcccccttaactgtcccccttccctccgggagccaaggcaggcactgtgcacctgcccctgaattgtgtgcggcagttgccggcctggagctgagtgacacagcaggtgcctccagcctgaagacaattccatatttcaatggagcgtcgccaccaaagcttattatctagggcaataaagtttaggattagggggattcaggatgattgtgtgattctccacaaagcttatcttctaatagaccagctgctttattaggccgcccccacccgcaccaggcccttcccaaagcatcccaagtcccaggcagccgacgggggccttgaaggcggcagtggtagacagctgggggtatcatatcaccctcagtctccatctgcgattattaaattacgggcggcttccagctgggcacaccccagctcccaccttcctcctacaaagccagcatcatcgtcaggcatctgccaaggacacgatgtggctgcctctcccctgctgatccctactgttgaactctaaaagggccaggtctgggtatttacttgctattagggctgtcactgtcacagtgtggaatgcagtggagtggaggcctggagagagggggggaccatggaaatttctgttgcaaatggggctttgctgggactgttcactataaacaaaaaaagaagatggaatcatgcaccacagaacctcaaagaagctggcatgcttaccaagctcccacatatttctcccaaaatgaaattcattaacgttgagtgttctagggaccacctccacatgctccctgatcccattgctccgttccttttctgatgggagcagagcatgggatggtgtctctccaaccccgtgtggtcagcagcactgaggctactctcgtttcctatccctccctgacagtctcctttatcctcagcccctgacagactatctgttcagagtaggaatttatcaataagtactgataagcatgctgaaaggaatatgggggactgggaatatgcctgaaacataatgaatgtttcaaagaaatgaaacgttctgaaaatggaattttcaaagattctgacaagcacacagcatctgcttgcagattttaggaaaacttagtcatagaattattcagagttcacatttcagccatggggatgttgtgtgcctgttgacagcagaggtccctgtagacgtttgttttttactgtgtctatgtgtgattcactaatgagagagtggcttagatgctcagagtaattaattgtagtattgagataatagtggctttgaaatccagctgtgcttatatgcgtgcacgctgtgcagttagatgctcccaggttcagatctgcttccatcactactaactatgtggccttgttttctgatctgcaagccatggattgtattgcttactttgcgggactgtggtaaacgttaggcatatatgaggcaagtgcaatgcccaacatttggcagatgcttaataagtgttggctattattattactactactactactattgcttttgctattgctattatgtgtgacctgtataataatcctactaatatgagtgaaggcaagaatcatggactatgcacccagcataatcaggagggtttgactgttgtgaatgaattcaagggcaggacaagcagcgacaagagttactgaagttcatctgatttgagttctgttcattcatttatttgggatccaaattctgaaccccagctctgtgctagacactgttctaggtgctgggaaaacagtcatgtgttagtctgtttttgctgccataaaggaatccctgagactgggtattttataaagaaaagaggtttatttaaatcacagttctgcaagcctaacacctggtggaagctgccaaggcttacagcttataccctctcaagcagcaccctaatctataccttgagccaagactggaattggagctgccatgatgcaggaagcagtgtcccaaggatgtgcagagcagtggggtcctgaatgtggccccccaaaccattcttttctcctaggcctctaggcctgtgatgggggggtggccttgaaaatctctgaaatgccttcaaggcctttttcccattgtcttggttattagcacttggctcccctttagccatgctaatctgtctagcaagtggttgctccacagcctgctcatatttcactcctgaaaatgttctttccttctccaccacacaaccagtttgtgaattttccaaacttttatgctctgcttcccttttaattatcaatttcccagcctcagatattcctttatagtaatgcaaatggactaacagaagcaatgaataagaaggggtcctggcccctctacaactcatcttctattgagaaagaaagaagaaaaaatgaaaataagttaaaaaaactcaaattttgataaaccctatgaagaaaataagaaatgggatagaagttagctggcatggcagggtggagtgggtgagtgacattaaggagggtgacaacagagaaactttctgataaaaaacccagtaagtaaaggtctaagtgatgtggatgaggcagccacttgaagacctgggacaaaagtgttcaggcagagaatatagcaggtacagagctttttgtataagaaggtagcaaaaaggccagtatagccagagaacagaggaggtaaggagaaagataggggatgaggcaggtgctaactcatcaacatccttgcaggccttgatgagagttaagatttcattataattgcaataagaagacagtggaaggttttttggcgggggtgggggtggtcaatgacatgattggattgatatgttggaaaagcccatctggcgactgtgttcagtaacagtgtgcttgcatgaagatccctcacagcagcagacaacacaaatgccccctcccacccatcatgaaaatttggaaagccaagccaataggaaactgaagctacaaagacccagcccctagaaagcaatataaacaagaccagaaaaagcatgtgttcaggacaagttcacattgaagtaaaaccatattgacattgattgcattccctacctgcttaggggttttgcttcacctaaactagtaccttgagaatctgtaaaagcttacaatttgagaaaagcaagagatgacacctgattatcctttgaattggcttccatgtctgtggctgttttccctaagttcctgtcccttacacacacgttacaaaactttgtctcaattctttgcttttaaaggatttgactttaacaaattcacattgggtacttgcttagtaggaaaggaaataatgactctcaccccctatgttataaaacttttaggagtattacacacaggcacatacagggcacactggtatggcttgtcattttgtgacaaattcttgtcagtttgtggtctggtggaaagcatatggaattagcaatcaagaaaggtgagatttagttctggctctgcttctaactagcaatgcaatcttggacaagagatttattctttcaagtctcagtttcatcttgtcatatggacatagagtgatacttccttttaaaagaacctgggtatcctggccaggcgcggtggctcatgcctcccagcactttgggaggccgaggcgggtggatcacaaggtcaggagatcgagaccatcctggccaacatggtgaaaccccgtctctactaaaaatacaaaaattagttgggcgtggtagtcccagctactcgggagactgaggcaggagaatttcttgaaccctggaggcggaggtagcagtgagccccgaggtcgtgccactgaactccagcctggcaacagagcgagactctgtct

SEQ ID NO: 471 - DNA, 5751 bp, Homo sapiens
cagtgccgtttaacctttattgtggtggagtccaccccgctgtgggcctcagataaccctgtacaaaggggaatggagattgcctgtatccacctagattcataagctgccctgaggcgatcttggcatcaagaaagacagcattgaggcacatctcaccatcagcttcagaggatgtcagcctttgatatgtcccatggggttttttcccagggaaccaatctgtccttttgaagaaaagacaaagataggaacgatggtagaggaccaccggtcaaattcttaccaggattcagtgacgtttgatgatgtggctgtggagttcaccccagaggagtgggctttactggacacaactcagaaatacctctacagagatgtgatgctggagaactacatgaacctggcctctgtggatttctttttctgcttaacttcagaatgggaaatacaacctagaaccaaacggtcatcacttcagcagggttttttgaagaatcaaatattcactgggatacaaatgcagacaagaagctacagtggatggaaactctgtgagaattgtggagaggtcttcagtgaacagttttgccttaagacacacatgagagctcagaatggagggaacacttttgagggtaattgttatggaaaagacagcatcagtgtgcacaaggaagcctctattggacaagaactttccaaatttaatccatgtggaaaagtcttcaccttaactccaggccttgctgtgcatcttgaaattctcaatggaagacaaccctacaaatgtaaggaatgtggaaaaggctttaagtattttgcaagccttgataatcacatgggaatccacattggagagaaactctgtgaatttcaggaatgtgagagagccatcacaacttcctcacacttaaagcagtgtgtagcagttcatactggaaagaaatccgaaaagactaagaactgtgggaaatccttcactaatttttctcaactttctgcacatgcaaaaactcataaaggagagaagtcctttgaatgtaaagaatgtggaagatcctttagaaattcctcatcctttaatgttcacattcaaattcacactggaataaaaccacacaaatgtacggaatgtgggaaagccttcactagatcaactcaccttactcaacatgtaagaactcacactggaataaaaccctatgaatgtaaggaatgtggccaagccttcactcagtacacgggccttgctatacacatacgaaatcacactggagagaaaccctatcagtgtaaggaatgtgggaaagccttcaatagatcttcaacgcttactcaacatagaagaattcacacaggagagaagccttatgaatgtgttgaatgtgggaagaccttcattacttcttcccatcgtagtaaacatttgaaaactcacagtggagaaaggtaaatgcaagatatgtgggaaagaatttctgtattcctcaccccacctgtgaactcctaccagagagaaaccttttgtatgtaaagaatttgggaaagcatttgctctttcctcatgcctaagtatgcatgaaagaattcacactggggagaaatactatgaatgtaaggatatgagtgttgttaccatttagcccattggttgccatctttaattattggcagtgcaaagatcatcagattagtcctaaatgccttttggaggttgtaatggctcacagattggccttagatgcatcccgagggtctgaaattaaacctacaggttctgaatacaacatcatggttacctgagtctgggcatctgtgaagaagggtcatggatggtgaggtcagtactgcaggctgcctcaccttggtgattagattcctaagatcatagcattaacaagttctgtacgagataaatcatgcagattgatcccagcccctgttggttagtggctgccagtgtggcacattcatgtcaaaatttaccagaagccaagatgatgtaggccccagaggtggattgttaaaaagatgctcctccaaggttctcttctgttcccatggatcctgcagagcatgtcaggagtgaaaccatccataactgccagtgccctttcacagctgattatttctatgtccccttcttgtaaaataagaagtgtgacaaccttgactgttctgttctgtcttctctgtccattttaggtggcacaatgtaagtggcagtgtctcttatagtataatccagtctctcttctcacttctgttaagatggctgatatagtccatgaatcccactcatgatctctttatcaaatgattgttcagccacactttgaggattctcttcagtacaagttttctaatttttgcagtatggataggctgagaattttccaaatctccaagttctggttcctttttccttaacaatttcttctgcaattcaggtctccttttgcatttttgccgagaccagctgggtcgtggagaccctaacccagtggctctagaggaattaagacaaagacacagaaatatagtgcagagtgggaatcggggctcacagccttcagagctgagcttgaacagagtttgacccacatatttattgacagtaagcctgtgataaacattattcctatagattgtagatcagctataagtattccttatgagaaagaaagggacaggctctggcttgttatctgcaacaggaatatgtccttaaggcacaaatcactcatgctattgtttgtggtttaggaatgccttgagcagttttccagttttctgccctgggtgggccaggtgttgcttgccctcattctggtaaaccagcagcctccagcatgggcgtcatagccatcacgagcatgtcacagtgctgcagagattttgtttatggccagtttctcattgcctgtttatggccagatttggggggcctgttcccagcacattttcctgtaagcactcaggaataatgaagcttcctgtgtcctttaacactttaattacagatcttagtgatacataccattttatctgtctcaagctctaccttccgtaaaatgctagaatacagttctgccaagttcttcaccactttatatcaagggttgtcttttcttcatttcccaatagcatgttcctcattccccaatgacacctcaccagaataacccttaccaaccttatttccagcttgcacatcagaatttttccagcctctactcatttgtcagtttcaaagctgcttcacatttttagtttttttgtttgtttttaattgcagtacctcacttctcagtaccaatatctgccttagtcagctcagacaaccataagagaataccgcagaccaaatggcttagaaattaatttaattttaaatcaatgaggttaaaaacacaggattttttttttttttttttttttttttttgagatggagttttgctcttgttgcccaggctggagtgcaatggtatgatcttggctcaccgcaacctccacctcctgagttccagtgattctcctgcctcaccctcagtagctgggattattggcatgcaccacaaaccttagctaagtttgtatttttagtagagacagggtttctccatgttggttaggctgatctccatgttggtcagatctgacctttggtgatccacctgccttggcctcccaaagtgctgggattacaggcctgagccaccgtatctggcccaaaacacaaatttatattctcacatatctggaggctggaagtctgagatcagagtgccagcatggtcaacctctagtgagagctctcttcctggcatgtaagtgcccacttcctcatgttttcacacgatggagaccaacaaataggtcggtcggtctcccccctccccgcccccttctcttttcacatacagtcacattgaggtttggaacttcatatgaaatttggggggtcactgtgtgtgtgtgtgtgtgtgtgtgtatgtgtatatatatatacatatatatacacatatgtatgtatacctaactcctaaagtggaacagtaagagtcattatttatagattatctgattctctatgtggaaagagaaaagaatcatattaagtactttggactgaacaatgacccccaaaattcgtatgatgatgaagctctctctaaatattttcttgctttactggactgattttaacccgctgcacaacaccaactaaaagtagtaataccagcatacttgtctttgcagttctggtgagatatgcactctattttgttggtttggctgtaggcttttatttcttttttattttttgaagaggttatgtcctgtcagggaaccagccccgatattcacataggttcttttctattttccctaagtgtcagccaacttgagaaataaagggacagagtacaaaagagagaaattttaaagctgggtgtccggggcagacatcacatgtcggtaggttccgtgatgccccacaagccgcaaaaaccagcaagtttttattagggattttcaaaaggggagggagtgtgcaaataggtgtgggtcacagacatcaagtactttacaaggtaatagaatatcacaaggcaagtggaggcagggcgagatcacaggaccaaggtgaaattaaaattgctaatgaagttttgggcaccattgtcattgataacatcttatcaggagacggttttgagatcaactggtctgactaaaatttattaggtgggaatttcctcttcctaataagcctgggagtgctatgggagactggggtctatttcacccctgcagtctcgaccataagagatggctacacccaggggggccagttcagagacccactcccaggtgtgcattctctttctcaaggatgttccttgctgagaaaaagaattcagtgatatttctcccatttgcttgtgaaagaagagaaatgtggctttgttccacctggctcaccggcggtcagaatttaaggttatctctcttgtttcctaaacattgctgttatcctgttcttttttcaaggtgcccagatttcatattgctcaaacacacatgctgtataatttgtgcagttaatgcaattattacagggtcctgaggtaatatacatcctcctcagctgacaggattgagagattaaagtaaagacaggcataggaaatcacaagggtattgactggggaagtgataagtgtccatgaaatctttacaatttatgtttagagattgcagtaaagacaggcataagaaattataaaagtattaatttggggaactaataaatgtccatgaaaccttcacaatccatgtttttctgccatggcttcagccagtccccccgtttggggtccctgacttcctgcaacaatgtcctgcaggaaaagttttttctttatatccagtttttacatgatgaattatttcccaatatttcatagtttatgaggctgaattcctcttgaatttattaaatgcttccttcacatcctctgtgatgatcatgtttatttactgataaaactcaatacctagaactgcacctagctcatgatggtacctaataaatacttcaatgaaatgatgtggtgatgcatgcctatagttttagctacttgggagggtggcctgagcccaggggttctagaccagcttaggcaacatagcaagaccccatctcaaaaaaaaaaacaaaaacaaaacaaaaaaaaaa

SEQ ID NO: 472 - DNA, 1599 bp, Homo sapiens
tccgagaaagagacggagagagagggaagaaaaagacagatagatagatattggggggaaggagaaaaaaggagaagagagggaagagaggacagcggagagagagcaccagagagagagggagagagagagagagcgctagagagagggagcgagcatgtgcgatgagcaatagctgtggaccttacagttgctgctaactgccctggtgtgtgtgagggagagagagggagggagggagagagagcgcgctagcgcgagagagcgagtgagcaagcgagcagaaaagaggtggagagggggggaataagaaagagagagaaggaaaggagagaaggcaggaagaaggcaagggacgagacaaccatgctgtgctgtatgagaagaaccaaacaggttgaaaaaaatgatgacgaccaaaagattgaacaagatggtatcaaaccagaagataaagctcataaggccgcaaccaaaattcaggctagcttccgtggacacataacaaggaaaaagctcaaaggagagaagaaggatgatgtccaagctgctgaggctgaagctaataagaaggatgaagcccctgttgccgatggggtggagaagaagggagaaggcaccactactgccgaagcagccccagccactggctccaagcctgatgagcccggcaaagcaggagaaactccttccgaggagaagaagggggagggtgatgctgccacagagcaggcagccccccaggctcctgcatcctcagaggagaaggccggctcagctgagacagaaagtgccactaaagcttccactgataactcgccgtcctccaaggctgaagatgccccagccaaggaggagcctaaacaagccgatgtgcctgctgctgtcactgctgctgctgccaccacccctgccgcagaggatgctgctgccaaggcaacagcccagcctccaacggagactggggagagcagccaagctgaagagaacatagaagctgtagatgaaaccaaacctaaggaaagtgcccggcaggacgagggtaaagaagaggaacctgaggctgaccaagaacatgcctgaactctaagaaatggctttccacatccccaccctcccctctcctgagcctgtctctccctaccctcttctcagctccactctgaagtcccttcctgtcctgctcacgtctgtgagtctgtcctttcccacccactagccctctttctctctgtgtggcaaacatttaaaaaaaaaaaaaaaaagcaggaaagatcccaagtcaaacagtgtggcttaaacattttttgtttcttggtgttgttatggcaagtttttggtaatgatgattcaatcattttgggaaattcttgcactgtatccaagttatttgatctggtgcgtgtggccctgtgggagtccactttcctctctctctctctctctgttccaagtgtgtgtgcaatgttccgttcatctgaggagtccaaaatatcgagtgaattcaaaatcatttttgttttcctccttttcaatgtgatggaatgaacaaaaaggaaaaaattcaaaaaacccagtttgttttaaaaataaataaat

SEQ ID NO: 473 - DNA, 1497 bp, Homo sapiens
aaggcgattgtcatatgatagctaagaagtggcacattaatgaagcgccgctacaggggtcttttctgctcctgtcaccgcttaaaactatcagatggttcgagggaggacatggaggcagccacctagctcagcggagacgcggagcccacagcagcgccctccggagccctaacacgtcgctgccaccatccgcgccgggactccgcagccgagctcggccgcccgcaggacgctccaggagcgtcgcggaccgggcggcacgggacgctgcggggctgagctcaagagcccaggttcgcgccgagtccaaccggacccggacgctgcgcgcggagtgcgcgtcgagtgcgcgccgagagagaagcggcgcgcagcggcgtcctcccggatgcggacgcgcaacttgaagcaactttaagtcccagatccgagcagtccgccggcccgcgcggacccagagcaagaagagggcgaggaagaagatgcctcggcccggccgcaacacgtacagcgaccagaagccgccctactcgtacatctcgctgaccgctatggccatccagagctctcccgagaagatgctgccgctgagcgagatctacaagttcatcatggaccgcttcccctactacagggagaacacgcagcgctggcagaacagtctgcgccacaacctctccttcaacgactgcttcatcaagatcccgcggcggccggaccagccaggcaagggcagcttctgggcgctgcacccaagctgcggggacatgttcgagaacggcagcttcctgcggcgccgcaagcgcttcaaggtgcttaagtccgaccacctggcgcccagcaagccagccgacgcggcgcagtacctgcagcagcaggccaagctgcggctcagcgcgctggcggcctcgggcacgcacctgccacagatgcccgccgccgcctacaacttgggcggcgtggcgcagccctcgggcttcaagcaccccttcgccatcgagaacatcatcgcgcgggaatacaagatgcctggggggctggccttctccgccatgcagccggtgcccgctgcctacccgctccccaaccagttgactaccatgggcagctcgctgggcaccggctggccacacgtgtatggctccgccggcatgatcgactcggccacccccatctccatggcgagtggcgactacagcgcctacggcgtgccgttgaagccgctgtgccacgcggcgggccaaacgctgcccgccatccccgtgcccattaagcccacgccggccgccgtgcccgcgctgcctgcgctgccagcgcccatccccaccttgctctcgaactcgccgccctcgctcagccccacgtcctcgcaaacagccaccagccaaagcagccccgccacccccagcgaaacgctcaccagcccggcctccgccttgcactcggtggcggtgcactgacccgcaggagcccacgccccctctcgttctcctc

SEQ ID NO: 474 - DNA, 4867 bp, Homo sapiens
cagtcgccggagaagcatcatgccgaggaggaagcagcaggcgccccggcgcgcagcagcctatgtttccgaagagttaaaggctgctgccctggtggacgaaggtttagacccagaggagcatacggcagatggagagccctcggccaagtacatgtgcccggagaaggagctcgccagggcctgccccagctaccagaactccccggccgccgagttttcctgccatgaaatggacagcgagtcacacatcagtgagaccagtgaccgaatggctgactttgaaagcggctccatcaagaacgaagaggagaccaaggaggtcacggtcccactggaagacacgactgtgtcggatagcctggagcagatgaaggccgtgtacaacaacttcctctccaactcctactggtccaacctcaacctcaacctgcaccagccctcctcggagaagaacaacggcagcagcagcagcagcagtagcagcagcagcagctgtggcagcgggagcttcgactggcaccagagcgccatggctaagacgctgcagcaggtgtcacagagccgcatgctcccggagcccagcctcttcagcaccgtgcagctgtaccggcagagcagcaagctctatggctccatcttcacgggggccagcaagttccgctgtaaggactgcagcgctgcctacgacaccctggtggagttgacggtgcacatgaacgagacggggcattaccgcgacgacaaccatgagaccgataacaacaaccccaagcgctggtccaagcctcgcaaacgctccttgctggaaatggaagggaaggaagacgcccagaaggtgctgaagtgcatgtactgtggccactcctttgagtccctgcaggatttgagtgtccatatgatcaaaacaaaacactaccaaaaagtgcctctgaaggaacccgtcactcctgtcgccgccaaaatcatccctgccactcggaagaaagcttccctggagctggagctccccagctccccagattccacaggtggaacccccaaagccaccatctcagacaccaacgatgcacttcagaagaactccaacccttacatcacgccaaataatcggtacggccaccagaatggggccagctatgcatggcactttgaggcccggaagtcgcagatcctgaagtgcatggagtgtgggagctcgcatgacaccctgcaggagctcactgcccacatgatggtcactggccacttcatcaaggtcaccaactctgctatgaaaaaggggaagcccattgtggagacgcctgtcacacctaccatcacaaccctgctggatgagaaggtccagtccgtgcccctggcagccaccaccttcacgtccccctccaatacacctgccagcatctccccaaaactgaatgtggaggtcaagaaggaagtcgacaaggagaaagcggtcactgacgagaaacctaagcaaaaagacaagcctggcgaagaagaggagaagtgtgacatctcttccaaataccattacttgactgaaaatgacttagaagagagtcccaagggggggcttgatatcctcaaatccttggaaaacacagtgacatccgcaatcaacaaggcccagaacggcactcctagctgggggggctatcccagcatccatgccgcctaccaacttcccaacatgatgaagttgtccctgggctcgtcggggaagagcacgcccctgaaacccatgtttggcaacagtgagattgtctccccgacgaaaaaccagaccctggtctctccacccagcagccagacgtcccccatgcccaagacaaactttcatgccatggaggagctggtgaaaaaggtcactgagaaagttgccaaagtggaggagaagatgaaggagccggatgggaagctttccccgcccaagcgggccactccctccccatgtagcagcgaagtcggggaacccatcaagatggaggcatccagcgatgggggcttccgcagccaggagaacagccccagccccccgcgggatgggtgcaaggatgggagccccctcgctgagccggtggagaatggcaaggagctggtgaagcccctagccagcagtttgagtggcagcacggccatcatcaccgaccacccgcctgaacagccttttgttaaccctttgagcgccctgcagtcagtcatgaacattcacctgggcaaggccgccaagccctccctgcctgccctggaccccatgagcatgcttttcaagatgagcaacagcctggcggagaaggctgctgtggccaccccgccgcccctgcagtccaagaaggcagaccacctcgaccgctatttctaccacgtcaacaacgaccagcccatagacttgacaaaagggaagagtgacaaaggctgctccttgggttcagtgcttctgtcacccacgtccacagccccggcaacctcctcatccacggtgacaacggcaaagacatctgccgtcgtatcattcatgtcaaactcgccgctacgcgagaatgccttgtcagatatatccgatatgctgaagaacttgacagagagccacacgtcaaaatcctccactccttccagcatctccgagaagtctgacattgacggggccactctggaggaggctgaggagtcgacgcccgcccagaagaggaagggccgccagtcaaactggaacccccagcacctcctgatcctccaggcccagtttgccgccagcctccggcagacctcagaagggaagtacatcatgtcagacctgagcccccaggagcggatgcatatctccaggttcaccgggctgtccatgaccaccatcagccactggctggccaacgtgaaataccagcttcgaaggacaggtggaacaaagttcctcaaaaacttggacactggccaccccgtcttcttttgtaacgattgtgcgtcccaaatcaggactccttccacgtacatcagtcacctagagtcacacttaggcttccggctacgggacttatccaaactgtccaccgaacagattaacagtcagatagcacaaaccaagtcaccgtcagaaaaaatggtgacgtcctcccccgaggaagacctggggacttcctatcagtgcaaactttgcaatcggacctttgccagcaagcacgctgttaaacttcaccttagcaaaacacacgggaaatctccggaagaccaccttctgtatgtctctgagttagagaagcagtagcatttgcttttgatagaaaggactgcagtttgctttgagggaaactgtggaaggcaccttcaggccccctctgacttgttgttcttggcacatgttcttattttaactgcagagaatcactctgggctggactgttttgtataactgtacagtgtttaatagaggtgcataatcagctgttgttactggtaaaatatgaaggttaaaatgcagtggtaagtgtttggaactttgtgtaaacgggatttagttgtgagcatcctcccgatgcttcaagctgcatgcattaacagacagtttaattaagcatttataacggaatcaggcacaccttttccacgagactcgagtgtgctggcatttctcaccctttcatctttagccctctgagtactttgaagcacttttgcattaatttggttaaaaaataaaataaaataataataatgtatgaagctctgttttttaaactccttaccagcttagttataatgaataatatgaacctccatttatgcaggtctgcaggggtataacacgccttgaaatttaaaagaatattattttcacattgaaacatagatgtatatattgtatagatttcagactctcttatgaaaaaaaatgtgattgtggttaaatgacctttttcttgcatttatagcaacagtgttttatgcacctgctatgctctgggcataagctgtgcctatgtatagtgtatatttctttttttcttttttttaaggtctatgggttttgttttttacatgcaaacattgtaaattatacagaagataccacagatagcatttataaagtatacagaaacattatctgaaagcaaagtatgatagtttgttttgctatacagtacatctatattgatagaggttcatgtttaaattatacatatttattagcatcatattgtcatttgttttgagcagtctgaataaacgagaccgggaaagacatccctggcaggcatcagaactattttgcacatgatttttaaaggtatttattagaaatcaaagaacactcaaaataaactcagtgctcaaagggttaagtctatttgaaaaggttaaaaaaaagaacaaaaaaaaaaaaagaacttgtactgtatttcctaaacattgataaagcctttaaaatgtttgtactgtaatactttgcttaaaagtcatgaggcattctgtgatccaacctctttcacttatttataagccctcttggttgctattccatattgtaggatgcctttctatttcaattggtaactttctgttttgttcttcctaattattctcccaagatcccacactgcagctttatctttaggcttatgaaaggtaacccgtggttaccggctctccaagtgattctgttcttctccatttttggcagttaatttgcagaagtaactgacagctgacaccatatgagaacctttgtataaaatattggcatgtaaacagcacagacaccgtaacacactctgtgccctgtttggttgttgacaatgaagcaccattatgtgactcttcatataacccttttttctacggcagcattaaaattgtctttttgctataa

SEQ ID NO: 475 - DNA, 2564 bp, Homo sapiens
agctcgcccaccgcccgccccagcagtggctgcaccatgcacgtgaacggcaaagtggcgctggtgaccggcgcggctcagggcataggcagagcctttgcagaggcgctgctgcttaagggcgccaaggtagcgctggtggattggaatcttgaagcaggtgtacagtgtaaagctgccctggatgagcagtttgaacctcagaagactctgttcatccagtgcgatgtggctgaccagcaacaactgagagacacttttagaaaagttgtagaccactttggaagactggacattttggtcaataatgctggagtgaataatgagaaaaactgggaaaaaactctgcaaattaatttggtttctgttatcagtggaacctatcttggtttggattacatgagtaagcaaaatggaggtgaaggcggcatcattatcaatatgtcatctttagcaggactcatgcccgttgcacagcagccggtttattgtgcttcaaagcatggcatagttggattcacacgctcagcagcgttggctgctaatcttatgaacagtggtgtgagactgaatgccatttgtccaggctttgttaacacagccatccttgaatcaattgaaaaagaagaaaacatgggacaatatatagaatataaggatcatatcaaggatatgattaaatactatggaattttggacccaccattgattgccaatggattgataacactcattgaagatgatgctttaaatggtgctattatgaagatcacaacttctaagggaattcattttcaagactatgatacaactccatttcaagcaaaaacccaatgaacagcttatgtgttagccatagctgaaaataagcacaaatagcttatattcagatcctatcttcatttgaatatagcttttaaatgaaatgttacagtttgaagttttccttcatgcacttggtgataaacgttttctaaatttttagttaagtatatggataaaaagttatgaactattaaaaatgtgatgtggaccaaaggctaggttgtaatcttgatagtctaaaaaatgatcaaaacaaatgattttcaaggaatattcaatattctgcctttcagaaagtgtatttatatctgtgcttcataaatattaatgttcttcagaacatcattttaaaggagatacttgaattgttatttaaatcaaaccagatgtaaaacactcacatacaagttcatactttaaaagaggaaagctacttaacaatgacaaatatttcacaataataatttttacttatataccatctttcaactgaacatttcagttcttccaagagcttcttagagtagtatattttgggggcagtcaaggaataaactacagtgtaaacatatcccagatgaaaactgctgtatggaaaaatgacagaaagtaactgattgacactgttgattcacagttcagcctcctatctgggaaagacatttctttcctctgctcactttaagaacttttaccgactccaaaaatctcaggaattaaacttttaacagttacagcaataaagaatagttagtactccaaaaatattatatttaagatgctcaacaagaaaaaaatgcaaatgtaatatttttttcaaattacttctttattgacttgtccaaatttcaaaagtgcctacccttcaataaaacttttttattctgatctccataaattacttagtcttctatgtatagctatcaaggaaataaaaccaattttgccacagccacaactgtaaatgtttttgtacccatgctgaaactcataacaacacagacataaaaatagctgtgaggttttgctttttttgttgtcagctatcttaagaatcattaaatacacctgctttgggtaaaactctttgcaagcagtaattaacactagtaacagtgaaagcacaagatttccaaatcagtcgttttctcaaaaaaatatcgtataagtgactcatcctgtctgctaactccagacctcccagcttgaagccaaatctttccatgtgagattgatatggatttcctagaagtactggaatgttgtcatatcttgccctattttaattctgctatagaaaacaattgccttcacttttaaggagtaatttgaatattaataactctggtctagattttcatataatgtattaaagacaaagtagtgaacatcaatgaacatctgatagagataaactgtaatcaggcataagcttgtttgtatgttctggcagtgactaatcagtaaatgatgtcggtttgcccagtatcacttatcttctgtatttttcctctgtcgtgtaaatagtataaccttttcatttatggacaattttttggactagtagccttcaatatacattctgctttgaattaattttttcaaatcaataaattatgtagacatttaaaatcaaatatcaagtagaattgaaaaatgtgagttacataagttaaaaacttactttaaatcttaccttctataggtagctctaaataaattcatatggttatatggca

SEQ ID NO: 476 - DNA, 3362 bp, Homo sapiens
ccttactcgctggcgcccaagtgggaagccagcagctgcccgctccctcctccccacatccccgctacttgcccagttcccgaagcgaagcgcaggctgcgagccagccgggccgagtccacaactttgcagcctcgggcagggcgagagccggcgtccggggctcctcttgtcggcgaccagagctcgggaatgtaatcgaggatgctggccctgcggctgctcaacgtggtggcccccgcctacttcttgtgcatctccctggtgaccttcgtgctgcagctcttcctcttcctgcccagcatgcgcgaggaccccgcggccgcccggctcttctcgcccgccctgctccacggggcgctcttcctattcctctcggccaacgccctgggcaattacgtccttgtcatccagaactccccagacgacctgggggcctgccagggggcctcggccaggaagactccatgcccctcacctagcacccacttctgccgagtgtgcgccagagtcaccctgaggcacgaccatcactgtttcttcaccggcaactgcatcggcagcaggaacatgcgcaacttcgtcctgttctgcctctacacctccctggcctgcctctactccatggtggccggcgtggcctacatctccgctgtcctttccatctccttcgcccaccccttggccttcctcacgctcctgcccacctccatcagccagttcttctccggagctgtcctgggttctgaaatgttcgtcatcctcatgctctacctctggttcgccatcggcctggcctgcgccggcttctgctgccaccagctgctgttgatcctccgcgggcagacccgccaccaggtgcggaagggggtggcagtgagggcccggccctggcgcaagaacttacaagaggtcttcggaaagaggtggctgctgggcctgctggtccccatgttcaatgtcggaagtgagagctccaagcagcaggataagtagtagacactcccgtcatttatctctctgtctctgtcttgactcctcctgagcataaaaccatggcagccttgtctccacccatgactcactacaaccttgtgctggtaaggtcctagcatcttcccctcaccttccacccatgagaacagcgtgagctggtggatcatgacaaggaggaaaaatgtccccccaggcatttctaggctcctcacgagccagccaggtggctgctagctgttaggctgcctctgctttctttccgtccccttgggatccctgctttccccctcttcctggctcatccattctccaccgtgtctcattcatcactgctgtctgctagagcccttcctctcagcccccatgttgggagaggggagtggattcttgctgctggtatgagactccctgggacctagaggctggcaaatgtttaaaatcaccacgtgtaagaggcagccaagtcagctctgccaactgctaggggagttgggaaagagtgggtgtgtgtccgcatcccctctgtaggaaaaagaacttagtagcttgctgctccctcaccaccccccaccaggttcaagaccctttttctgggagacagcaatcaatggcctgctttttccaaatgttattccctgtccaccctgccccatctggccggcccagcccagtccaggacctggctggatgcttcctgtccctggaactcttccagcctttctacttgatctccagcccccaggtctttgccagatgatgggaaggcaaggaagaagggacagggaaagataattactgataaatgaaggggatattcgactgtataaccatatggaagtgtgtgtgtgtgtgtgtgtgtgtgtgtgagagagagagagagagagatgggtggtggtgagaagtgttgttagaaacatataggaataatgcctaggggaaagggagaagtgagagggacaattgggttcatttatgccctatacaaagggcattccagcagctgaaactcttcaatgtttgaatggctgcctgtgaaggtagtgagtgccccatcactggaggtattccagcagagtctaggcagtcgtctgccaggcatgctgtggaagggatttctgtacagggtcattctaggtgagcttacacattccttccaaccccaaggttctgatgtcctggttgtgattgctggacccagaggcaagatctgcagagatgcctgtgagatatttgctttcctagaggggagtgtgggcatgggaggggtctgaaaatcaggacccaacccagccactgaagagagagtctctgcagagacagggctacctgggtggttgaggggactgacatttgaggacagggagatggagcagtgtcattgtcagtggcagggcatggggggcagtggtgagctaaggctgaggagtggagatgaccagaatataagggtgcaattcccagaccatccctgcgcatctgactgactccggtggaggcactgctgtgtgttttctgaaacctagaggaccagacccctcctgactgggtcccaaagccaatatgacatccatgcaggcagcagtgctgaatccatgccctgcaatgtccaaccgccaactgcagtgacccgctgatagctgcgcaacagcctgggttcttgagcagagattgggaggactttactgtggttctgccttcacaccccctagagagctaatgtagtattggctccacctgctcacatttctccctcccatactcattccttcactcatccatcctacgtatatttattgagtgccaactacgttcccagcctcttccaggcactggcaatgcagtgatgaacaggatgacaagattcatgccatcaggggcaccttgtcactgccgtctgtgcactgattcacactccctgcaaaatggtcactctgccatcttggtggttggtggggcaggtcatttggaaataaagaatgtgatagagatggctgaagaggggaagcctaggctgcctcaatggaggagtcgctgggggcattttcacccacaattctggccatacttaagcaatgggagggagagggaggaggggaagatctgggcaattttggccttgactctttcctggctccagagctcaagcttagaagccagccctgctatttccagcctcctgaaggctcagcacggtgaggcctgacatcctggggaagggcaacagggagacctacaggatgttggctgcttgcagactggtcaatgggggatgacggtggggaggttgccagatgtgagacttgagtagcatttgtacacatggccctgtattgtccttgaagaacatcaataaaatatatggtttt

SEQ ID NO: 477 - DNA, 4295 bp, Homo sapiens
agaggcaggtgagcgcgatgcagccggcgccgggtctggggctcggggactcctccctgcaccgctacctggacggcgacttctggagcctcaagaacgagctgcgcggactcctcggcggcgcccgctcttccggcaaaggtatgatttaagcttggatgaaatgagagctttgacagttcagagagtgaagtttgccatggacctgcctctgttaaaacgtgcaggtcaggatctgacaggacagagaggtctgtttacagaagtccctctatgtagattggcacctgaatgcagttgtcatctgtgatagccacagggattacttgaaagcggggcatggcagggagtgagctggacctgccctgggattccagtgcagctggaatcatggcagagaaaacaaagaattttgtcagccgaagccttgtcataggagaagtcctctccatggcggacatggccacaggagtgaagtgcggaataatttattggctatttggtggtgctatcaggaatctcggaagccctgaacatgttactaagtggtttcagccactccaggagcagaaatacactgggatgtttgcaatgaccgagaggggccatgggagcaacgcgagagggatccagaccgaagccacctttgacctctctgcccaggagtttgtaattgacacgccgtgtgaaaatgcggagaagatgtatattggaaatgccatgtacgggaattatgcagctgtctttgcccagctcatcatagatggaagatctcaagggccccactgtttcatcgttcctgtccgggatgaaaacggaagcttgtacccaggagtcacagctattgatatgatgtacaaggagggtctgcatggtgtggacaatgggatattaatatttgacaaggttcggatacccagggagaacctgctggataagtttggttccgtggctccagatggacagtaccattcgcctattaggaacaagagtgcaagattcaatgccatgctggcagcactgaccccttcgagattagctgtggctttccaagctatgggtgccatgaagcttgggttgacgatagccattcgctatagccacaggtccagaatcatctcccagaactgctgttcagctccagctggtctttattgagcccctcttgtggaccaggctaatttcctgaaaactggtttttgctaacgtttcttacgcttgctcgtgaaatcagccacttaactgttctgggttttcccgtggcagatccctataggcttctcactgcactatcccaaactttttatctgagaatgttgtgtggcaagatgtctgcagagtgccgcttaggagatgctggcctggcgtccacgggtctgctgtgtatgtctctccaggcagatggcctgtctctgcctggcaaggacgatctggggtggaaaaactctgatctgaaagtgaaatcattgactccgttaccatgttctgaattcccagatctccctgatatggaaagtgaaaattggcttctattacacaatgcatcaaaattcttttgtataggaccagaccactgatatcaagggcagtgcactgactttcagttcctctgcatcccttggtcatgttcccacctttcaatgggaacagagaataaaaattccagctctagggcccagcctagtggccacctctcacggacaggcacccggctgctcagtgttatccaattactagaggccattcctagcatttcaacttggggaattaatttactattactttatttttatctttagagacagagtcttgctctgtcacccagactagagtgtagtggcatgatcatagctcactgcagccttgaactcctgagctcaggcaatcctcctgccacagccacctgagtagctggaactataggcatgtgccatcatgcccaactaattttatttttatttcagttgtagagatggagccttaccctgttgcccaggctggtctctgactcctggtctctagtgatcctcctgccttggcctcccaaagtgctaggattataggtgtgagccaacatgctgtccccattattgactgttaccctaaagtgtgtgttgcctttctagtttgagtagaaagtccagcattatctttttggataatatccaggttttgctgtttctttctttatttttcataatgagaacatttgctctcttgctgacattggagggcgtctgtttacctctcctgtaggcacacaaaattcccaacgtttatttgaagaaaaagacaattatttgagtaatttgaataaataaacattttaagtgattcccccggaggcagtttgggcccaaaaccaaggaagaggtgaagatcattgagcaccaaacacagaccctgcggctgatgccccacctggccacagccttggccctgaccttcgtcagcaggtatgctggggccctcctggatgaggatgtcttccagggaaaggagctggtcaacagtcgctcgctgcaggctctggtggcggggctgaaggcctacagcacctgggagaacatccgctgcctgcaggactgccgcgagtgcactggaggcatgggttacatgatggaaaatcgaatctcaggcttaaagtgtgacacagatgtgtttgccacttttgaaggtgacgatgttgttatgcttcaggttgtggggcgggaactgctggcccaatacaccaaacagtatgaagaaaaaccactctttggcctgctccaaaactgggctgaatctgtgggggacaagctgagaaccagtttcctggcatttaacatggacacagttgatgatctcgcctttctgttgaaagcagtgaaatttcgtgaaagggttcttcagcggggtttggtggccagaatttattataaggtaaagaccaagaaggaggattttttccatgcctggaactcgtgtctgcaccacgtggcttctctgtccctggcacacactcaccgaggtcagttggctcctgttgaatatttgtaattgagtgactcagttaccttagagcagttctccctagcagtgaagagctgtcctgaccaagaggaccagactttgttaatgaagttcttttgttttcccccaccccttagttttgtctgttgtatggaaccaagctggtgtttcaggagcgggcctggtatttagaacataaatacttgactcccatggccagcacgaggatcaggaatcaggagagatgctgaaacacaaacaggtataagactcagtctccacatgaagggagctcatatccaaggacacaaaaccactttaaaaacataaatactggccaggtgcagtggctcatgcctgtaatcccagcactatgggaggctgaggcgggcagatctcctgagctcaggagttcgacaccatcttgggcaacatggtgaaaccctgtctactaaaatacaaaaaaattagctgggcgtggtggcatgtggctgtagtcccagctactcgggaggctgaggcacgagaatcgcttgagccctggagttggaggttgcagtgagcagagattgcgccactgtactccagtttggactacagagtgagactccatctcaaaacaaaacaaaacaacaacagcaaaaaacaacaaaacaaaacacaaatactctcacagggcatggaggttttcgaatgaacttggccataagaataaattcagagttgacagaacagacgtcttaggaataaatgccattcttatgctagaccttgaagagtagaaaattaagagatggtggcccaattgagaggggaaaatgcagttgaaacttcagacagggttgataaagtgaggacgatcatagacatggagtacttagacatattaataaacaataaagactttacctgtctaatggaaaacctggagaagtcgtcaggaaccagactacagtggaccctggagaaccttgaagaacatttttccttttcaggaaaacggaggttacagagaaaagtatatgtaatgatgctacagtaatgtatttctgtataacaaatgactccaaacttacgacttaaaacaaccaccacttttgctggatttgtgcgactcggtgaaggatgatgcccggagggtgatctcgacctttaacattccacacacctacctccacgcaccaatcgccggaatctccaacccgcgggccgcgtgggctttctaccctgcaccgctgcagccgcggccacgggaagaggcgcgctcccggcggcccaagctg

SEQ ID NO: 478 - DNA, 5043 bp, Homo sapiens
gggcatttttggtcgaagagagctgaagtaatgagaagacatcatggaggcccagtcccacagctccacgaccactgaaaagaaaaaagttgagaattccatagtgaagtgctccactcgaacagatgtgagcgagaaagccgttgcctccagcaccacttctaatgaggatgaaagtcctggacagacttatcacagagagagaagaaacgcaatcactatgcagccacagaatgtccaggggctcagcaaagtcagtgaggaaccttcaacatcgagtgacgagagggcctcattgatcaagaaagagatccatgggtccctgccacacgtggcggagccctctgtgccgtaccgcgggacggtgtttgccatggaccccaggaatggttacatggagccccactaccaccctcctcatcttttccctgccttccatcctcctgtaccaattgatgccagacatcatgagggccgttaccattacgatccatctccgattcctccattgcatatgacttccgccttatctagtagccctacgtatccggacctgcccttcattaggatctccccacaccggaaccccactgctgcttccgagtctcccttcagccctccacatccctacattaatccctacatggactatatccgctccttgcacagcagcccatcgctctccatgatctcagcaacccgtgggctgagccctacagatgcgccccatgcaggagtcagcccagcagaatactatcatcagatggccctgctaactggccagcgcagcccctatgcagacattattccctcagctgccaccgccggcacgggggccatccacatggaatatcttcatgctatggatagcaccagattctccagccccaggctgtcagccaggccgagccgaaaacgtacactgtccatatcaccactctccgatcatagctttgaccttcagaccatgataaggacgtctcccaactccttggtcacgattctcaataattcccgtagcagctcttcagcaagtggctcctatggtcacttatctgcaagtgcaatcagccctgccttgagcttcacctactcttccgcgcccgtctctctccacatgcatcagcagatcctaagccgacaacagagcttaggttcagcctttggacacagccctccactcatccaccctgccccaacttttccaacacagaggcctattccagggatccctacggttctgaaccccgtccaggtcagctccggcccttctgagtcctcacagaacaagcccacgagtgagtctgcagtgagcagcactggtgacccgatgcacaacaagaggtccaagatcaaacccgatgaagacctccccagcccaggggctcgggggcagcaggaacagcccgaaggaacaacccttgtcaaggaggaaggggacaaagatgaaagcaaacaggagcctgaagtcatctatgagacaaactgccactgggaaggctgcgcgagggagttcgacacccaagagcagcttgtgcaccatataaataacgaccatattcatggagagaagaaggagttcgtgtgcaggtggctggactgctcaagagagcagaaacccttcaaagcccagtatatgttggtagtgcatatgagaagacacacgggcgagaagcctcacaaatgcacttttgaaggttgcacaaaggcctactcgagactagaaaacttgaaaacacacttgagatctcacactggagagaaaccatacgtctgtgagcacgaaggttgcaacaaggctttctcaaatgcctctgatcgcgccaaacaccaaaacagaacgcattccaatgagaaaccatatgtgtgcaaaatcccaggctgcactaagcgttacacagacccaagctccctccggaaacatgtgaagacagtgcatggcccagaggctcatgtcaccaagaagcagcgaggggacatccatcctcggccgccacccccgagagattccggcagccattcacagtccaggtcgcctggccgaccgactcagggagcccttggtgagcagcaggacctcagcaacactacctcaaagcgggaagaatgcctccaggtgaaaaccgtcaaggcagagaagccaatgacatctcagccaagccctggtggtcagtcttcatgcagcagccaacagtcccccatcagcaactattccaacagtgggctcgagcttcctctgaccgatggaggtagtataggagacctcagtgccatcgatgaaaccccaatcatggactcaaccatttccactgcaaccacagcccttgctttgcaagccaggagaaacccggcagggaccaaatggatggagcacgtaaaactagaaaggctaaaacaagtgaatggaatgtttccgcgactgaaccccattctaccccctaaagcccctgcggtctctcctctcataggaaatggcacacagtccaacaacacctgcagcttgggtgggcccatgacgcttctcccgggcagaagcgacctctctggggtggacgtcactatgctgaacatgctcaacagaagggacagcagcgccagcaccatcagctcggcctacctgagcagccgccgctcctcagggatctcgccctgcttctccagccgccgctccagcgaggcgtcacaggccgagggccggccgcagaacgtgagcgtggccgactcctacgaccccatctccaccgacgcctcgcgccgctccagcgaagccagccagagcgacggcctgcccagcctgctcagcctcacgcccgcccagcagtaccgcctcaaggccaagtacgcggctgccacaggagggccgccgccgacgcccctgcccaacatggagaggatgagcctgaagacgcgcctggcgctgctcggggatgccctcgagcctggcgtggccctgcctccagttcatgccccgaggaggtgcagcgacgggggagcccacggctacgggcggcgccacctgcagccgcacgatgcgccgggccacggcgtgaggagggccagcgacccggtgcggacaggctccgagggcctggccctgcctcgtgtgccgcgcttcagcagcctcagcagctgcaaccccccggcgatggccacgtccgcggagaagcgcagtctcgtgcttcagaattacacgcggcccgagggcggccagtcccgaaacttccactcgtccccctgtcctcccagcatcaccgagaacgtcaccctggagtccctgaccatggacgctgatgccaacctgaacgatgaggatttcctgccggacgacgtggtgcagtatttaaattcccagaaccaagcagggtacgagcagcacttccccagcgccctcccggacgacagcaaagtgccccacgggcccggtgactttgacgcgcccgggctgccagacagccacgctggccagcagttccatgccctcgagcagccctgccccgagggcagcaaaaccgacctgcccattcagtggaacgaagtcagctccggaagcgccgacctgtcctcctccaagctcaagtgtgggccgcggcccgctgtgccgcagactcgcgcctttgggttctgcaacggcatggtcgtccacccgcagaaccccttgaggagcgggcctgctgggggctatcagaccctcggggagaacagcaacccctacggtggcccagagcacttgatgctccacaacagccccggaagtggcaccagtggaaacgccttccatgaacagccctgtaaggccccgcagtatgggaactgtctcaacaggcagccagtggcccctggtgcactcgacggtgcctgtggtgccgggattcaagcctcaaagctgaagagcacccccatgcaagggagcgggggccagctgaatttcggcctgccggtagcgccaaatgagtcagctggcagcatggtgaatggcatgcagaaccaggacccagtgggacaggggtacctggctcaccagctcctcggcgacagcatgcagcacccgggggcaggccgccccggtcagcagatgcttgggcagattagtgctacctcacacatcaacatctaccaagggccagagagctgcctgccaggggctcacggcatgggcagccagccgtcaagcttggcagttgtcaggggctaccagccatgtgccagctttgggggcagcaggcgccaggctatgccgagggacagccttgctctgcagtcaggacagctcagtgacacaagtcagacctgcagggtgaatggtatcaagatggagatgaaagggcagccccatccgctgtgctctaatctgcagaattactctggtcagttctatgaccaaaccgtgggcttcagtcagcaagacacgaaagctggttcattctctatttcagacgccagctgcctgctacaggggaccagcgccaaaaactctgagttactttccccaggtgctaatcaggtgacaagcacagtggacagcctcgacagccatgacctggaaggggtacagattgacttcgatgccatcatagacgatggggaccactccagcctgatgtcgggggccctgagcccaagtatcattcagaacctttcccatagctcctcccgcctcaccacgcctcgggcgtccctcccattcccagcgctgtccatgagcaccaccaacatggctatcggggacatgagttctttgctgacctccctagcggaagaaagcaaattccttgcagttatgcaataggctttaggaaaaaaagactgcaaccaacggaaatcaataggagttgaagagattaaactgactttgttttggctgtttttttagttctgtatgtattttagcaatctcatctcacctaactgagatgtgtttcaattatattccttttatggaaaaggactctgaaaaaccctaaagtattctagggagaaactgtcttccatttcagttttgaatcagtattgttacactcaaaccaccctctttttaaaaaaaaa

SEQ ID NO: 479 - DNA, 2886 bp, Homo sapiens
gctcgggcgcggggcgttcttggtgcgccgggccgtggtgagtccgggctcccgtggccgcgtgctgggaggagactggagcccggttaggaagaatggagttggcgactcgctaccagcagatccctaaagaagtggctgacatctttaacgcccccagtgatgatgaagagtttgttggcttccgagatgatgttcccatggaaaccctctcgtcagaggagagctgcgatagttttgactcactagagtcagggaaacagcaggatgtgcgctttcattccaaatacttcacagaagagctaagaagaatttttatagaggacactgactcagagactgaggattttgcaggatttacgcagagtgatctgaatggaaagactaacccagaagtaatggtcgtggagtcagatttgagtgatgatggcaaagcatctttggtgagcgaggaagaggaagatgaagaagaagataaggctacccctagaagaagcaggtctagaagaagtagtattggtcttcgagtagcctttcagttccccaccaagaagctggccaacaaaccagataaaaacagttcttccgagcagttgttttctagcgcacgcttacagaatgagaaaaaaacaattcttgaaagaaagaaagactgtagacaggtgatacaaagggaagattctacctctgagtctgaggatgactctcgggatgagagccaggagagttcagatgctttgctgaaaaggaccatgaacatcaaggagaacaaagccatgcttgcccagttattggcggaattgaactcgatgccagatttcttcccagtacgaaccccaacctcagcttctaggaagaagacagtgaggcgggccttctcggagggacagatcacgcggcgtatgaacccaacccggagtgcgcggcctcctgagaagtttgctctagagaacttcactgtctcagccgctaaatttgcggaagagttttacagcttccgaagaaggaagacaattggggggaaatgccgggagtacagacgacgtcaccgtatatcttcttttcggccagtggaggatatcaccgaagaggacttagaaaatgttgccataactgttcgagataaaatctatgataaagttctgggtaacacgtgccatcagtgtcgacaaaagaccatcgacaccaagacagtgtgtcggaaccagggttgctgtggtgtgcgaggacagttctgtggaccatgcctgcggaaccgctatggggaggatgtcagatcggcattgctggacccggattgggtgtgtcccccctgtcgtgggatctgcaattgcagctactgtcggaagcgtgacggccgctgtgccacaggaatcctcattcatctggccaagttttatggttatgacaatgttaaggaatatctggagagcttacaaaaggagctggtagaagacaattaagaggaaaacaaacagaaccagccacctcaccatagagtactccaacaagacatgcataccattggtgcctaagaaagatttttttacagttgtgtttttatacagaaattctttgtagaaattactattttttgttaaagattgtttatatgcttacaaagatttctcaggaagacagcagagcagaggaatctatatagatgtatgcacagacctgtctgtatgctgaactttgttaaaaatatctgccagttattaaaaagcacagtttaaatggggtggggttaaagttcaggtaagtaagttagagagaaaacattgtatgatcagctcctgcacttgatctatctatctttggcttcccaaacagtaactcactccaggccaagtgtgccttagcacgagtgaccacagtttaatagaccacacacatcgtttaacctgctcttggtcattggaaatttacactgaacaaagtgcaattaactgtagaacagttttatttttattaaaacttgactgaacaaaaggggaccatcaacattgtagacactggacactggaggccttacagagtgctagcctcttccttcaggactcacctggggcctgctgcttttatattttgaaagagtttaagggctaataatttaatttgttgtttgttaaaaattaaaatctccgttctttccggctgcattgcttttgcatgttcacatatgatgtacttttatgatgtacttttttttttttgagatggagtcttgttctgttgcccaggagggagtgcagtggtgcaacctcggctcactgcaacctttgcctcctaggttcaagtgattctcctacctcctgagtaactgggattacagtcgtgtgccaccacgctcagccctgagttagtttctagtatttttttctgactttcactctaaggatagcgttgaaaaaagaatgcacgtgtgagttactaaaaagttagaataatgtgcatgggaacagtgcagcaacatgctagaaaatcctcactgcactccagcagaggctagaggaatgccagtgttaccttacgcttctagaagcagagccactccagccagaacccattttgcagtcttctcttcgctcttcagcctgaaggtccagatgtagctggggcctctcagtttggttctatacacagggcactcgtaggtctgtttggtttcttgtctgtccacgggggtggcttttgcaaagatgaccggcatagggcatgccagctccttgagacgggcttcaacaatggttcctgcttgggtgtcccagcgggcgcctatggcaaaaacacagcggttgcaattgtgtggcagcttgctactaatgataatgatcaagtaagttgtttgatgcaataaacattcaacattctggttttgtcata

SEQ ID NO: 480 - DNA, 2463 bp, Homo sapiens
cagcccagaggaccccaggcgaccagagtccaggctgaggcccgaggtggctcaccagctgttcagatgcttccagtatcaggaggacatggggccacgggcgtccctgagccggctccgggagctctgcggccactggctgcggccggctctgcacaccaagaaacagatcctggagctgctggtgctggagcagttcctgagtgtgctgcctccgcacctcctgggccgcctgcaggggcagccgctcagggatggggaggaggtggtgctgctgctcgagggcatccaccgggagcccagccacgcggggccgctggattttagttgtaatgctggcaagagttgtccccgtgcagacgtcaccttggaggaaaaggggtgtgcttcccaggtccccagccacagccccaagaaggaattgcctgcggaagagccttcagtgctgggcccatcggatgagcctccccgaccccagccaagggctgcccagcctgctgagccgggacagtggaggcttcccccaagttcaaagcagccgctgagcccggggccccagaagacattccaggccctgcaagaaagcagtccccagggcccctcaccatggccagaggagagttcccgagatcaggagctggcggctgtgctggagtgcctgacctttgaggatgtgccagagaataaggcgtggcctgcacaccccctgggattcggaagcagaaccccagacaaggaggaatttaaacaagaagagcccaaaggggctgcctggcccactcccatcttagcagagtcccaggcagatagtcctggggtgccgggagagccttgcgcccagtcgctcggacggggcgctgcggctagcggccctggtgaagatgggtcccttcttggcagcagtgaaattttggaggtcaaagtggctgagggcgtccccgagcccaatccggagttgcagttcatctgcgcggactgcggggtgagcttcccgcagctgtctcgcctgaaggcgcaccagctgcgctcgcacccggctgggcgctccttcctgtgcctttgctgcgggaagagcttcggccgcagctccattctcaagctgcacatgcgcactcacacggacgagcggccgcacgcctgccacctgtgcggccaccgcttccgccagagctcgcacctgagcaagcacctgctgacccactcctccgaacccgccttcctgtgcgcagagtgcggccgcggcttccagcgccgcgccagccttgtgcagcacctgctggcgcacgcccaggaccagaagccgccctgcgctcctgagagtaaggccgaagcgccgccactgaccgatgtcctgtgctcccactgcggccagagcttccagcgccgctccagcctcaagcgccacctgcggatccacgccagggacaaggaccgccggtcctccgaaggctccggcagccgccgccgggactccgaccggaggcccttcgtgtgcagcgactgcggcaaggccttccggcgcagcgagcacctggtggcccaccggagggtgcacacgggcgagcggcccttctcctgccaggcttgcggccgcagcttcacgcagagctcgcagctggtcagccaccaacgggtgcacacgggcgagaagccctacgcctgtccgcagtgcgggaagcgctttgtgcgccgggccagccttgcccgccacctgctgacccacggtggccctcggccccaccactgcacccagtgcgggaagagtttcggccagacccaggatctggcccgccaccagcgcagccacacgggcgagaagccctgccgctgcagcgagtgcggtgagggcttcagccagagcgcccacctggcgcgccaccagcgcatccacacaggggagaagccccacgcctgcgacacctgcggccaccgtttccgcaatagctccaacctggcccgccatcgccgcagccacacgggcgagcggccctacagctgtcagacgtgcggtcgcagcttccggcgcaacgcgcatctgcggcggcacctggctacccatgcggagcccgggcaggagcaggccgagcccccgcaggagtgcgtggagtgcgggaagagcttcagccgcagctgcaatctgctgcgacacctgctggtgcacacgggcgccaggccctactcctgcacgcagtgtggccgcagcttcagccgcaactcccacctgctgcgccacctgcgcacccacgcccgcgagacgctgtactagcttggcccgccttccgccagccgcgccctgcgccacctacccggggtcctccacagcggaggcctgcaggaatgtcccttcccaccacaccccacttccctctccttccactttcacagctgtccttccctggccgaggcattgctttctggcctcagctatgtaattaaaacgcccgaagtaaaatggccttctcc

SEQ ID NO: 481 - DNA, 3038 bp, Homo sapiens
gcggagcccacggagcccacggagcccacggaggagcccacggaggagccccagcgtccgaacgggcagaccccctcgagccgcgaaggagcccgagaagcagccacgatgtgcgggaatctttgcctacatgaactacagagtcccccggacgaggaaggagatcttcgaaaccctcatcaagggcctgcagcggctggagtacagaggctacgactcggcaggtgtggcgatcgatgggaataatcacgaagtcaaagaaagacacattcagctggtcaagaaaagggggaaagtcaaggctctcgatgaagaactttacaaacaagacagcatggacttaaaagtggagtttgagacacacttcggcattgcccacacgcgctgggccacccacggggtccccagtgctgtcaacagccaccctcagcgctcagacaaaggcaacgaatttgttgtcatccacaatgggatcatcacaaattacaaagatctgaggaaatttctggaaagcaaaggctacgagtttgagtcagaaacagatacagagaccatcgccaagctgattaaatatgtgttcgacaacagagaaactgaggacattacgttttcaacgttggtcgagagagtcattcagcagttggaaggtgcattcgcgctggttttcaagagtgtccactacccaggagaagccgttgccacacggagaggcagccccctgctcatcggagtccggagcaaatacaagctctccacagaacagatccctatcttatacaggacgtgcactctggagaatgtgaagaatatctgtaagacacggatgaagaggctggacagctccgcctgcctgcatgctgtgggcgacaaggccgtggaattcttctttgcttctgatgcaagcgctatcatagagcacaccaaccgggtcatcttcctggaggacgatgacatcgccgcagtggctgatgggaaactctccattcaccgggtcaagcgctcggccagtgatgacccatctcgagccatccagaccttgcagatggaactgcagcaaatcatgaaaggcaggtgtaacttcagtgcgtttatgcagaaggagatcttcgaacagccagaatcagttttcaatactatgagaggtcgggtgaattttgaaaccaacacagtgctcctgggtggcttgaaggaccacttgaaggagattcgacgatgccgacggctcatcgtgattggctgtggaaccagctaccacgctgccgtggctacgcggcaagttttggaggaactgactgagcttcctgtgatggttgaacttgctagtgattttctggacaggaacacacctgtgttcagggatgacgtttgctttttcatcagccagtcaggcgagaccgcggacaccctcctggcgctgcgctactgtaaggaccgcggcgctctcaccgtgggcgtcaccaacaccgtgggcagctccatctctcgcgagaccgactgcggcgtccacatcaacgcagggccggagatcggcgtggccagcaccaaggcttataccagtcagttcatctctctggtgatgtttggtttgatgatgtctgaagaccgaatttcactacaaaacaggaggcaagagatcatccgtggcttgagatctttacctgagctgatcaaggaagtgctgtctctggaggagaagatccacgacttggccctggagctctacacgcagagatcgctgctggtgatggggcggggctacaactatgccacctgcctggaaggagccctgaaaattaaagagataacctacatgcactcagaaggcatcctggctggggagctgaagcacgggcccctggcactgattgacaagcagatgcccgtcatcatggtcattatgaaggatccttgcttcgccaaatgccagaacgccctgcagcaagtcacggcccgccagggtcgccccattatactgtgctccaaggacgatactgaaagttccaagtttgcgtataagacaattgagctgccccacactgtggactgcctccagggcatcctgagcgtgattccgctgcagctgctgtccttccacctggctgttctccgaggatatgacgttgacttccccagaaatctggccaagtctgtaactgtggaatgaggctgagaccgtgacaagaccatcaccacctttcatctgattccagacctgtcccaacagcagggatgctacatgggaagagaagtggacatcccacatgttctgcgtgctcctgtagagcttgacagcttccacgtgccttctacccaagtgcttttgcttacagcagatactgtttctctgtgtcctgaagtcgccagaggagaagggaatcattgtttacacatggggatcagagcagacttctccactactgtgcaatagagatacagctctcttcagagtaactgtgaaccttttataaccaacactagagttagttttaaaagacaagatatttataatgacgactgtatagcttttaagttatttttctagtatgtggctttctgtagccgtggtaacggccaaactgttcatcctagctacccatgctctgtgtccaggcttgctcctggcaggtggcattcatctcagatgtgagcacaaggcattggccctctggactcctttctccttttctttcctctctaggctgctcctgaatcctgttctctgacatccgtggagcccctcctgcatccacctatgcctcctataagtccagttgaaatctcagcctccttcaacattttcttctcgtgtgtggcccacatccctccacttctccaacttctgtttaatctgatcacggctctttttaagccctggcagcattttggtccctgctccttgcccatagtaaaacagcttgaaatatcccatgcaagagagtagtttcaagtgggcaactctgctctctatttaaaagcgtgcacaatcaaaagtactatgcaattttaggacaataaagaacatacagtttttttgtgtg

SEQ ID NO: 482 - DNA, 1307 bp, Homo sapiens
cttcccggccagacggcgggcaagacagctgggtgtacagcgtcctcgaaaccacgagcaagtgagcagatcctccgaggcaccagggactccagcccatgccatggcggattctgagcgcctctcggctcctggctgctgggccgcctgcaccaacttctcgcgcactcgaaagggaatcctcctgtttgctgagattatattatgcctggtgatcctgatctgcttcagtgcctccacaccaggctactcctccctgtcggtgattgagatgatccttgctgctattttctttgttgtctacatgtgtgacctgcacaccaagataccattcatcaactggccctggagtgatttcttccgaaccctcatagcggcaatcctctacctgatcacctccattgttgtccttgttgagagaggaaaccactccaaaatcgtcgcaggggtaaaggccatgggagcagctctgaagcacagagcgaagggtttgaggagccagggaccatttctgcctttgcttctggcagaaatcgtgtgacccacagcaagtcacacttgtcctcagacatggaggaaagtctggcccaggacttggttttgcctcccaaggtcttcatttgctgtgaagggaagtcccttgtcagagtactgggcctaatcgctacgtgcctctttggctatgatgcctatgtcaccttccccgttcggcagccaagacatacagcagcccccactgaccccgcagatggcccggtgtaggcgaacttccctcatttctctctgcaatctgcaaataactcctccattgaaataactcctccccaccccaacaacaacattcccagcagaccaactcccaccccctctttgaggtaaaagtgcctttattgggagacttttgtcttccagcctgccaatcaaccctcctgggtgtggccaccatatgtgtgtgcctaggtcctccttctgcacgatccaataggagacaccagttctgactgaaccatgcccccacctaagtcacaaaatgagggaagtggggagttagatttcagagtccaggccctaggttgggacccactccaaataatctcctcggtgtgggtggtggttctatagagggataaatgaataataaacattgttaaaatatacgataatgaataaagtaatcctttcatcaaatgtgggtaaatttcaagcatcaggagggggaaatggagtggaaacagctggggcaaggaggcaaagaagccaggcctgttttacaacaaatattaaattacttcaataatacaaacgag

SEQ ID NO: 483 - DNA, 793 bp, Homo sapiens
taggctgcgttggggcctttttttcgcatcctgcttcgtcaggtttataccactttatttggtgtgctgtgttagtcaccatgtctgaaacagtgcctcccgcccccgccgcttctgctgctcctgagaaacctttagctggcaagaaggcaaagaaacctgctaaggctgcagcagcctccaagaaaaaacccgctggcccttccgtgtcagagctgatcgtgcaggctgcttcctcctctaaggagcgtggtggtgtgtcgttggcagctcttaaaaaggcgctggcggccgcaggctacgacgtggagaagaacaacagccgcattaagctgggcattaagagcctggtaagcaagggaacgttggtgcagacaaagggtaccggagcctcgggttccttcaagctcaacaagaaggcgtcctccgtggaaaccaagcccggcgcctcaaaggtggctacaaaaactaaggcaacgggtgcatctaaaaagctcaaaaaggccacgggggctagcaaaaagagcgtcaagactccgaaaaaggctaaaaagcctgcggcaacaaggaaatcctccaagaatccaaaaaaacccaaaactgtaaagcccaagaaagtagctaaaagccctgctaaagctaaggctgtaaaacccaaggcggccaaggctagggtgacgaagccaaagactgccaaacccaagaaagcggcacccaagaaaaagtaaattcagttagaagtttcttctagtaacccaacggctcttttaagagccacctacgcatttcagga

SEQ ID NO: 484 - DNA, 3039 bp, Homo sapiens
gtgcgaatccggtgccggcaagcggctggcgatgctggaggttcgctagccgaagcggctgcatctggcgccgcgtctgccccgcgtgctcggagcggattctgcccgccgtccccggagccctcggcgccccgctgagcccgcgatcacttcctccctgtgaccaaccggcgctgcaggttagagcctggcaatgccgtttgggtgtgtgactctgggcgacaagaagaactataaccagccatcggaggtgactgacagatatgatttgggacaggtcatcaagactgaggagttttgtgaaatcttccgggccaaggacaagacgacaggcaagctgcacacctgcaagaagttccagaagcgggacggccgcaaggtgcggaaagctgccaagaacgagataggcatcctcaagatggtgaagcatcccaacatcctacagctggtggatgtgtttgtgacccgcaaggagtactttatcttcctggagctggccacggggagggaggtgtttgactggatcctggaccagggctactactcggagcgagacacaagcaacgtggtacggcaagtcctggaggccgtggcctatttgcactcactcaagatcgtgcacaggaatctcaagctggagaacctggtttactacaaccggctgaagaactcgaagattgtcatcagtgacttccatctggctaagctagaaaatggcctcatcaaggagccctgtgggacccccgagtatctgggcaagcaggggccccagaggtggtaggccggcagcggtatggacgccctgtggactgctgggccattggagtcatcatgtacatcctgctttcaggcaatccacctttctatgaggaggtggaagaagatgattatgagaaccatgataagaatctcttccgcaagatcctggctggtgactatgagtttgactctccatattgggatgatatttcgcaggcagccaaagacctggtcacaaggctgatggaggtggagcaagaccagcggatcactgcagaagaggccatctcccatgagtggatttctggcaatgctgcttctgataagaacatcaaggatggtgtctgtgcccagattgaaaagaactttgccagggccaagtggaagaaggctgtccgagtgaccaccctcatgaaacggctccgggcaccagagcagtccagcacggctgcagcccagtcggcctcagccacagacactgccacccccggggctgcaggtggggccacagctgcagctgcgagtggagctacctcagcccctgagggtgatgctgctcgtgctgcaaagagtgataatgtggcccccgcagaccgtagtgccaccccagccacagatggaagtgccaccccagccactgatggcagtgtcaccccagccaccgatggaagcatcactccagccactgatgggagtgtcaccccagccactgacaggagcgctactccagccactgatgggagagccacaccagccacagaagagagcactgtgcccaccacccaaagcagtgccatgctggccaccaaggcagctgccacccctgagccggctatggcccagccggacagcacagccccagagggcgccacaggccaggctccaccctctagtaaaggggaagaggctgctggttatgcccaggagtctcaaagggaggaggccagctgagtaggcagcctggtgagggggggcaggggatgggcaggagggtgggagagtggatgaggggcttctcactgtacatagagtcactggcatgatgccctcgctcccccatgcccccacatcccagtggggcataactaggggtcacgggagagcagtctcgtctcctgtgtgtatgtgtgtgagtggtgggcaggccagtggcagggccggccccagcccctgcatggattccttgtggcttttctgtcttttgctagcttcaccagtttctgttccttgtgggatgctgctctagggatactcagggggctcctgctctccttccccttcccttcttgcctcaccattcccctaggcaggccctgcaggtcccacactctcccaggccctaaacttgggcggccttgccctgagagctggtcctccagcgaggccctgtcagcggtcttaggctcctgcacatgaaggtgtgtgcctgtggtgtgtgggctgctctaggagcagatacaggctggtatagaggatgcagaaaggtagggcagtatgtttaagtccagacttggcacatggctagggatactgctcactagctgtggaggtcctcaggagtggagagaatgagtaggagggcagaagcttccatttttgtccttcctaagaccctgttatttgtgttatttcctgcctttccgagtcctgcagtgggctgccctgtaccctgaacctcatgagcctctaagggaaaggaggaacaattaggacgtggcaatgagacctggcagggcagagtacaagcccagcacccagtgtcccagccttactgggtccttaccctgggccaaacagggagggctgatacctccttgctcttcctagatgcccacctcctacaatctcagcccacaagtcctctccaccctagggggcttgctgcatggcaataactcataatctgatttggaggtttgccctttacaggggcagattttctgctcagttcaacaatgaaatgaagaggaactccctctttctacagctcacttctatcagaggcccaggtgcctcagagccacattgagttgctttttctgggatgaggaagtagggttaaactccccagtttcctgagggaggctcctgacaggtgccctttgtcagaccctaccacagcctggataggcagccacattggtcctcgcccttgctcggcactccgtggtggtcctgcccttctccctgcatgcctgtgggtctgctctggtgtgtgaaggtcggtgggttaactgtgtgcctactgaacctggcaaataaacatcaccctgcaaagcc

SEQ ID NO: 485 - DNA, 3513 bp, Homo sapiens
tcagtagctgaggctgcggttccccgacgccacgcagctgcgcgcagctggttcccgctctgcagcgcaacgcctgaggcagtgggcgcgctcagtcccgggaccaggcgttctctcctctcgcctctgggcctgggaccccgcaaagcggcgatggagcggaggtcgcggaggaagtcgcggcgcaacgggcgctcgaccgcgggcaaggccgccgcgacccagcccgcgaagtctccgggcgcacagctctggctctttcccagcgccgcgggcctccaccgcgcgctgctccggagggtggaggtgacgcgccaactctgctgctcgccggggcgcctcgcggtcttggaacgcggcggggcgggcgtccaggttcaccagctgctcgccgggagcggcggcgcccggacgccgaaatgcattaaattaggaaaaaacatgaagatacattccgtggaccaaggagcagagcacatgctgattctctcatcagatggaaaaccatttgagtatgacaactatagcatgaaacatctaaggtttgaaagcattttacaagaaaaaaaaataattcagatcacatgtggagattaccattctcttgcactctcaaaaggtggtgagctttttgcctggggacagaacctgcatgggcagcttggagttggaaggaaatttccctcaaccaccacaccacagattgtggagcacctcgcaggagtacccttggctcagatttctgccggagaagcccacagcatggccttatccatgtctggcaacatttattcatggggaaaaaatgaatgtggacaactaggcctgggccacactgagagtaaagatgatccatcccttattgaaggactagacaatcagaaagttgaatttgtcgcttgtggtggctctcacagtgccctactcacacaggatgggctgctgtttactttcggtgctggaaaacatgggcaacttggtcataattcaacacagaatgagctaagaccctgtttggtggctgagcttgttgggtatagagtgactcagatagcatgtggaaggtggcacacacttgcctatgtttctgatttgggaaaggtcttttcctttggttctggaaaagatggacaactgggaaatggtggaacacgtgaccagctgatgccgcttccagtgaaagtatcatcaagtgaagaactcaaacttgaaagccatacctcagaaaaggagttaataatgattgctggagggaatcaaagcattttgctctggataaagaaagagaattcatatgttaatctgaagaggacaattcctactctgaatgaagggactgtaaagagatggattgctgatgtggagactaaacggtggcagagcacaaaaagggaaatccaagagatattttcatctcctgcttgtctaactggaagttttttaaggaaaagaagaactacagaaatgatgcctgtttatttggacttaaataaagcaagaaacatcttcaaggagttaacccaaaaggactggattactaacatgataaccacctgcctcaaagataatctgctcaaaagacttccatttcattctccaccccaagaagctttagaaattttcttccttctcccagaatgtcctatgatgcatatttccaacaactgggagagccttgtggttccatttgcaaaggttgtttgtaaaatgagtgaccagtcttcactggttctggaagagtattgggcaactctgcaagaatccactttcagcaaactggtccagatgtttaaaacagccgtcatatgccagttggattactgggatgaaagtgctgaggagaatggtaatgttcaagctctcctagaaatgttgaagaagctgcacagggtaaaccaggtgaaatgtcaactacctgaaagtattttccaagtagacgaactcttgcaccgtctcaatttttttgtagaagtatgcagaaggtacttgtggaaaatgactgtggacgcttcagaaaatgtacaatgctgcgtcatattcagtcactttccatttatctttaataatctgtcgaaaattaaactactacatacagacacacttttaaaaatagagagtaaaaaacataaagcttatcttaggtcggcagcaattgaggaagaaagagagtctgaattcgctttgaggcccacgtttgatctaacagtcagaaggaatcacttgattgaggatgttttgaatcagctaagtcaatttgagaatgaagacctgaggaaagagttatgggtttcatttagtggagaaattgggtatgacctcggaggagtcaagaaagagttcttctactgtctgtttgcagagatgatccagccggaatatgggatgttcatgtatcctgaaggggcttcctgcatgtggtttcctgtcaagcctaaatttgagaagaaaagatacttcttttttggggttctatgtggactttccctgttcaattgcaatgttgccaaccttcctttcccactggcactgtttaagaaacttttggaccaaatgccatcattggaagacttgaaagaactcagtcctgatttgggaaagaatttgcaaacacttctggatgatgaaggtgataactttgaggaagtattttacatccattttaatgtgcactgggacagaaacgacacaaacttaattcctaatggaagtagcataactgtcaaccagactaacaagagagactatgtttctaagtatatcaattacattttcaacgactctgtaaaggcggtttatgaagaatttcggagaggattttataaaatgtgcgacgaagacattatcaaattattccaccccgaagaactgaaggatgtgattgttggaaatacagattatgattggaaaacatttgaaaagaatgcacgttatgaaccaggatataacagttcacatcccaccatagtgatgttttggaaggctttccacaaattgactctggaagaaaagaaaaaattccttgtatttcttacaggaactgacagactacaaatgaaagatttaaataatatgaaaataacattttgctgtcctgaaagttggaatgaaagagaccctataagagcactgacatgtttcagtgtcctcttcctccctaaatattctacaatggaaacagttgaagaagcgcttcaagaagccatcaacaacaacagaggatttggctgaccagcttgcttgtccaacagccttattttgttgttgttatcgttgttgttgttgttgttgttgttgtttctctactttgttttgttttaggcttttagcagcctgaagccatggtttttcatttctgtctctagtgataagcaggaaagagggatgaagaagagggtttactggccggttagaacccgtgactgtattctctcccttggatacccctatgcctacatcatattccttacctcttttgggaaatatttttcaaaaataaaataaccgaaaaattaa

SEQ ID NO: 486 - DNA, 549 bp, Homo sapiens
catctgtcccgctgcgtgttttcctcttgatcgggaactcctgcttctccttgcctcgaaatggaccccaactgctcctgctcgcctgttggctcctgtgcctgtgccggctcctgcaaatgcaaagagtgcaaatgcacctcctgcaagaagagtgagtgcagggccttccctgcgaatctgggggatgggccaagttagagcagggaacccagagctctgcaggcaggggcaggccaatgaccagcttccccaaacccctccttcaacacctgattcagaatcagacctcaaattgccttaaaaatgggctgctgctcctgctgccctgtgggctgtgccaagtgtgcccagggctgcatctgcaaagggacgtcagacaagtgcagctgctgtgcctgatgccaggacagctgtgctctcagatgtaaatagagcaacctatataaacctggattttttttttttttttttttgtacaaccctgacccgtttgctacatctttttttctatgaaatatgtgaatggcaataaattcatctagacta

SEQ ID NO: 487 - DNA, 1020 bp, Homo sapiens
gctgccggctggatgttcgatttcctctgcctctctctttgcggagctttccgcgagggccgctccgaggacttccgccggacccgcaacagcgcagaggctattattcatgggctatccagtctaacagcttaccagttgagaacaatatacatatgtcagtttttgacaagaattgcagcaggaaaaacccttgaggcacagttcgaaaatgatgaacgaattacacccttggaatcagccctgatgatttggggttcaattgaaaaggaacatgaccaacttcacgaagaaatacagaatttaattaaaattcaggctacagctgtttgtatggaaaatggcaactttaaagaagcagaagaagtctttgaaagaatatttggtgatccaaattttcatatgcctctcaaaaacaaattgcttatgataatctctcaggaagatacatttcattccttttttcaacacttcaggtacaaccacatgagggagaaaattaagagttatgtgaattatgtgttaagtgaaaaatcatcaacctttctaatgaaggcagcagcaaaagtagtagaaagtaaaagaacaagcacagtaacttctcaagataaacctaatggtaatgatgttgaaatggaaactgaagctaatttggatacaagaaaaagtctcacaagaatcttttcttatctaagttgcaacatggaacccagcaacaagaccttaataagaaataaagaagatacaaaaaagaaaaaagaaagcagaagagccactgaaagcagaatacctgtttcaaagagtcaaccggtaactcctgaaaaatatcgagctagaaaaagacaggcatggctttgggaagaagacaagaatctgagatctggcgtgaggaaatacggagagggaaactggtctaaaatactattgcattataaattcaacagctggacaaatgtcatgttaaaagacagatggaggaccatgaagaaactaaaattgatttgctcagacagcgaagac

SEQ ID NO: 488 - DNA, 3989 bp, Homo sapiens
ggccggcggccacgtgacccaccgcggcggggccggcggcccagaaatagcagcggcggcggttccgcccgcgggcggcgcgagcgaggggcagaggcgagagacgccggcggggcgcgggcgcggcggccccggaggatgctgctgagccccggcactgcctggctgcgagcacatgatggcgatacgggagctcaaagtgtgccttctcggggacactggggttgggaaatcaagcatcgtgtgtcgatttgtccaggatcactttgaccacaacatcagccctactattggggcatcttttatgaccaaaactgtgccttgtggaaatgaacttcacaagttcctcatctgggacactgctggtcaggaacggtttcattcattggctcccatgtactatcgaggctcagctgcagctgttatcgtgtatgatattaccaagcaggattcattttataccttgaagaaatgggtcaaggagctgaaagaacatggtccagaaaacattgtaatggccatcgctggaaacaagtgcgacctctcagatattagggaggttcccctgaaggatgctaaggaatacgctgaatccataggtgccatcgtggttgagacaagtgcaaaaaatgctattaatatcgaagagctctttcaaggaatcagccgccagatcccacccttggacccccatgaaaatggaaacaatggaacaatcaaagttgagaagccaaccatgcaagccagccgccggtgctgttgacccaagggccgtggtccacggtacttgaagaagccagagcccacatcctgtgcactgctgaaggaccctacgctcggtggcctggcacctcactttgagaagagtgagcacactggctttgcatcctggaagacctgcagggggcggggcaggaaatgtacctgaaaaggattttagaaaaccctgggaaaacccaccacaccaccacaaaatggcctttagtgtatgaaatgcacatggaggggatgtagttgcatttttgctaaaaaaaaaaaaaaacctttaaaaattgttggatgtgtacaaaagtcttactgccttattatgtgtatgggattctaaagtggcattccacttggatttcctgtgctacctatccaaattccagtaactacttcagtgtcattgcctttgttacctaaccaaccttcactgaaaggcaaatttagttcaggaggttagtttttagctagctttggaagtaagcctttatttattactttttggaggaaatcagagaagtgtcaatggaccgtcactcagactgagacttgagttattacagaagccaggaaaagtgtattagaaactgttgtctacaccacttttaattggtgaacaatttttctaagttatggtcatatatacccaaacaaaccaaatcaaactaaattactgcatataattttgggattgggtggcctagtttgaaagagtgatttaagtaatcactatgtaagtggtgagagatgcaggacatacacattattcaagagaccacctgacatgcatctcctccgcaggaatacattcgtcctctcttagagaagtttaacgcacatagtattattttactaagagaatatctcttggtgtcatatctaggggaagagaattaactagaattaaatttaatgtttgaatctaaatcattgggcaaacttctaataataacaattaataataggttacaggaaagccagccagaggaagtgtcagcactttaaaattctagaccccaaaaaactacaaaatcagaaaaagtatttttatgtttctagcttgaggagaagggctttagggctaaccagaggtctgaccctagaatgccaaggaactgagaatgggctccgatgaaaaccttccttttcagattccctgtctgctcaattaaagatgtttgaatccaaaggaagtcaaggaagaaaaagcatggaaaggaagagaactgattcctactgaaaattcaaattctattaccattctaactttcataaaaagttgggatcaagaagcagctgatttcctgccagggcttatattagggggtgattcttaaaggacattaggattggtgctcagaaatggttaatcatgctgtgtgctagccagggccagctggtaccttctttgccatgagcattcaagggacggctaacctttattgacaatctatatcgcaaaagtcaggaaagaggttgtgagctgattggattaaagacctggcacttcagtaactcagcacgcttccacttcactcaacttaagagagttcattgacagtgttaggatgtgaaggctgggaaacacttattttgcttcaagagttccacttggctctcccaaataggtacctcaaaaactgttagcaagcggcatttggatgtcttgacaggggctttgcagggatttttagggttttttccacattgtccacattaatggttggcatgattgtgcttgcaggccaagaaatgatcataccccttgccaaaggtaaaaaaaaaaaaaaaaaaatgagttgaaaattgaagtgacctctttccagctgagttgcaggcttattttgtaacctttcctcatccagttttccctgagaacctgggtttatctctagatagctgttcaggttttttagctgaggggtaagtatcctagctgagagttttgcatctttgggctgggtttgcagtggttgtgttttgcataaaatgtctagtctttgccacagatagtgagctacccactaatgagcccatggttttatttcagaagcacatgagggtgtgaaaccactctgttacctttctgtattgtcttagctattcaagccagtcagaggataatatatatattctcatcagcactcagagtagtcagtgaagagagtagatcacacttgggcacaccaggattcacataaacattgtatcttctctgtggatgctcaggccttgtctacaatgaggctttacaaccttcctttgttttggctcgggattacttcctggctgtctaataattgaaccataaccatgtaatattatgtaaaggcctggaaattactgttgctaaaaaaagtcatgtagtttcatgtagtgtagcatccttggcatcgttttccaaaatttgttccttctcccttttttttttctttcgtgtgtggcatgagtgtgtatctgtgtaaatatgattgtatatgtgttactccgatatgtaatccatttcactggctgagtttggcccctagccatgtgttaatataaagtaggcatggcttcccaatggaaatctctgagaatgacagtggagttgtgcaagcattttacattgccacataattgacttgccattttatggttaaaaacggcacattaggcagttgaatatgacgttaccttgcagactaaaaggttgaaggcccgaaactaacttttagctaacaataagggctgtgccccaatggaaactgagttcattttctgagaaaggtttggatgactgaaatatttcctctacagtcaaggactttggcatgtggtggctgaaactgagcttttttgtgtgggctccagttctcactgttctgcaatgctcatggcaagttgaatggtgagctagcttataaattaaagagctctgaactgtattcagaccgactgggtatctagcttactgttttaacatcattgttgaaaccagaccctgtagtccagtggtgctgccctgttgtgcaaactgctcctttttctcgtgtttttgtaaagagcttccatctgggctggacccagttcttgcacatacaagacaccgctgcagtcagctaggacctttccgccatgtattctattctgtagtaaagcatttccatcaacaatgcctaattgtatctgttatttttggtttaacacacactgattcatactaataaatattttcagtttta

SEQ ID NO: 489 - DNA, 92 bp, Homo sapiens
ggaccaatgatgacttccatacatgcattccttggaaagctgaacaaaatgagtgggaactctgtactatcatcttagttgaactgaggtcc

SEQ ID NO: 490 - DNA, 6488 bp, Homo sapiens
aaaaaccaccgaattgagctctgtcagaggcgctttcggcttccaagggggaagtgctgggctataattaatgtttttattaaatttggagggaagtttttgcagcctttcgcctagcgtggccttcagtcccgttaggtgcaaagcaagtctcgttgatcgccattgctagttttgcacacgtttgcgaatcagagctgcccggggtacaccgaccgcgcagggaaacatcgagagtgtaaataaatacatcgcctcttgttcggatttttgctactaccgaaaatatgtaaattgtgaactctgttggctctctttggatccaggttgatagaagtccagatcctgaggaaatctccagctaaatgctcaaaatataaaatactgagctgagatttgcgaagagcagcagcatggatggattttatgaccagcaagtgccttacatggtcaccaatagtcagcgtgggagaaattgtaacgagaaaccaacaaatgtcaggaaaagaaaattcattaacagagatctggctcatgattcagaagaactctttcaagatctaagtcaattacaggaaacatggcttgcagaagctcaggtacctgacaatgatgagcagtttgtaccagactatcaggctgaaagtttggcttttcatggcctgccactgaaaatcaagaaagaaccccacagtccatgttcagaaatcagctctgcctgcagtcaagaacagccctttaaattcagctatggagaaaagtgcctgtacaatgtcagtgcctatgatcagaagccacaagtgggaatgaggccctccaacccccccacaccatccagcacgccagtgtccccactgcatcatgcatctccaaactcaactcatacaccgaaacctgaccgggccttcccagctcacctccctccatcgcagtccataccagatagcagctaccccatggaccacagatttcgccgccagctttctgaaccctgtaactcctttcctcctttgccgacgatgccaagggaaggacgtcctatgtaccaacgccagatgtctgagccaaacatccccttcccaccacaaggctttaagcaggagtaccacgacccagtgtatgaacacaacaccatggttggcagtgcggccagccaaagctttccccctcctctgatgattaaacaggaacccagagattttgcatatgactcagaagtgcctagctgccactccatttatatgaggcaagaaggcttcctggctcatcccagcagaacagaagtggtgctgtatgtttgaaaagggccccaggcagttttatgatgacacctgtgttgtcccagaaaaattcgatggagacatcaaacaagagccaggaatgtatcgggaaggacccacataccaacggcgaggatcacttcagctctggcagtttttggtagctcttctggatgacccttcaaattctcattttattgcctggactggtcgaggcatggaatttaaactgattgagcctgaagaggtggcccgacgttggggcattcagaaaaacaggccagctatgaactatgataaacttagccgttcactccgctattactatgagaaaggaattatgcaaaaggtggctggagagagatatgtctacaagtttgtgtgtgatccagaagcccttttctccatggcctttccagataatcagcgtccactgctgaagacagacatggaacgtcacatcaacgaggaggacacagtgcctctttctcactttgatgagagcatggcctacatgccggaagggggctgctgcaacccccacccctacaacgaaggctacgtgtattaacacaagtgacagtcaagcagggcgtttttgcgcttttccttttttctgcaagatacagagaattgctgaatctttgttttatttctgttgtttgtattttatttttaaataataatacacaaaaaggggcttttcctgttgcattattctatggtctgccatggactgtgcactttatttgagggtgggtgggagtaatctaaacatttattctgtgtaacaggaagctaatgggtgaatgggcagagggatttggggattactttttacttaggcttgggatggggtcctacaagttttgagtatgatgaaactatatcatgtctgtttgatttcataacaacataagataatgtttattttatcggggtatctatggtacagttaatttcacgttgtgtaaatatccacttggagactatttgccttgggcattttcccctgtcatttatgagtctctgcaggtgtacaaaaaaaccccaatctactgtaaatggcagtttaattgttagaaatgactgtttttgcaccacttgtaaaaaggtatttagcgattgcatttgctgtttgttgttttattttgctttatatatgacttgcagaggataaccataaaatgggtaattctctctgaagttgaataatcaccatgactgtaaatgaggggcacaattttggactctggcgccaaactgagtcataggccagtagcattacgtgtatctggtgccaccttgctgtttagatacaaatcataccgtcttttaaatattttgaagcccatttcagttaaataatgacatgtcatggtcctttggaatcttcatttaaatgttaaatctggaatcaaaatgaagcaaaaaatatctgtctccttttcactttcttcagtacataaatacattatttaatcaataagaattaactgtactaaatcatgtattatgctgttctagttacagcaaacactctttaagaaaaatatccaatacactaaataggtactatagtaatttttagacatggtacccattgatatgcatttaaaccttttactgctgtgttatgttgataacatatataaatattagataatgctaatgcttctgctgctgtcttttctgtaatattctctttcatgctgaatttactatgaccatttataagcagtgcagttaactacagatagcatttcaggacaaaatagatgactcaaaccatttattgcttaaaaaatagcttacgccatgctatgctataagcagcttttatgcacattgacaaatgaagagtaagcttcagcttgctaaaggaaactgtggaaccttttgtaacttttggtgatatggaaaattatttacaaaccgtcaaagaatatgaggaagttgctgtatgacatagtgctggcactgatattatccatcatctctttttggacacttctgtaaatgtgattggattgtttgaaagaagatttaaagtttcaaagttttttgttctgtttttgctttgcatttggagaaaatattgaaagcagggtatgttgtttcattcaccttgaaaaaaccatgagtaaatggggatatagaatctctgaatagctcgctaaaagattcaagcaagggacatgaattttgttccatctatcaataatatccagaagaacaacttttttaaagagtctatagcaaaaagcaaaaaaaaaaaaaaattctaaacacaaagtcaaaataaacctattgtaaaagcatttcgtgatgagcatgaaaaagattgtttaaagatgatccccccagctacccattttccaaaactacacagatcacagctcatttctctaagtggagcagttatcaagaaacccaaacaccaaaattgctactcttcacatttaatcctacaaaaagtactccaatttcaaaatatgtatgtaacctgcgatttcaatgattgttgttcatatacatcatgtattattttggcccattttgggcctaaaaaagaaaactatgccttaaaaatcagaaccttttctccccactatgcttatgtggccatctacagcacttagaataaaaacagatgttaaaatattcagtgaaagttttattggaaaaaggaattgagatatataattgagatttggtgaaattgaaggagaaaatttaagtgagtctttaaaatatattctgaatgaaaactgtattgaggattcatttttgttccttttttttctttttctcttttctcctttttcttctttttaatagtctagttttagtcagtcagtgaggaagaattgggccatgctaacgttatcacaagagaacaatggcagaaatggtattagttatataatatttaaggacaaactatatgttttgctgttttaacgtagtgactcactgaactaaatacataattgaccaacattaagtgtatttccaatacagaagggttgaaaatattacattataaactcttttgaaaaatgtatctaaaattttttaagttctgttttgattccactttttggttgagtttttatgtttttgttttcaggtagattaataaatctggcagctgatttctgcaagattcttgtgttttgaatttctcattgaattggctactcaaacatagaaatcatttgttaatgatgtaatgtcttctctcagcttttatcttcactgctgtttgctgtctcttgatgatgacatgttaatacccaatagattaattgcaacaaacacttatactcaaataactaagtaaaaataatttttcttgttatgtccatgaaaagtgcttcagaataaaaatccacaagactgacagtgcagaacatttttctcaaatcatgggcggatcttggaggtctagtttcccgtagatgctgtaaccaattaccacaacttcagtaatttacacaaatttatcttatagttctggaggcagaagttcaaaagaagccttaagagactaaaaccaagatgtccttaggtctggttccttctggaggctccaggggagattcttccagctttcacttctagagtctgctgacattccttggctcctggctacatcacttcaatctctgcttccatggtcacatactcttctactatagtcaaatttccttcctgcctcttataaggatgcttgtgattacatttaggggatgctcagataatccaggacaatctctccatctcaagatccttaacttaatgacgtgtgccaagtccctttggctagataattattcataggtcccagggattaggacatggatgtaaggggtgagggcagggctgttattcagaacaccgcacggaggaggaagactgtgtagcaaagactctaattgatttactcaggaacagtggagttctgctgagggatctaggatttgaaagtactagagtttgcttttatttaccactgagatattttccccttattctgcataaataattttgaaaactttctatattaaatttcaactattccactaaaatgtctggtaatcacatcaagcctttagattattcaaatccttccccagcccccaggaaaacactaagtcatgaaacagaaaaacagaaggtatgataataatagtaataacagttaaatcagtggtctaatccagattttattttttaatacatttcttttggtgttaatatgggttactatgtgatcttatcatttgctagtgattattacttattaggtaagaacaatgtgtaaaatatgtctattactcaaaagaacaattgcaaaatgagtcaacttatctttatataaccaggaaagaaatatattgccagaagctacagaattttgccagatgatagggatttctaaaatgagccactttgtctatcatgcagccttttcagagcttgtaatgagaaaacattacagaggagaaggtcatttggatgtttgttacttggaatcctagaaaacaaaaactaaaatttaaaaataagaagtgagtaagctattttccatttgcgatttggtatggagaagagaggaaatagaattattaaaaaaatacaaattgggtaaaagtgatggtggaaaaaatataaagaaggcaaatgtacatattaagcaattctactaagaattggaaaaatcaagtttcaaaaagatggtaatagttgggcatgatactagaaaatttcacccagtttattcagagctcaactagtacttttaggacttctttttttatatacatgagactcactttgacatacttaaaaaaaaaacagtttatggaaagtacagtttaagaggagaatttgattagactaagtggatatctttatagaaatattaatgatttcagaattttcagttacaagtgtatataccgtggctattgtttatggattcatatgtaaggtagggtcttttttgcatatagactccagtattagttactttcattctaaaattatatttatgcttctatggggaagaaaatttttaattcacttggttgtattaaaattatacttacggtttgagaaaacatgctatgaaaatcatgattatagcaaattaaatatgctcaaaatttaaatctaaaataaaagcccagaaactgaaaa

SEQ ID NO: 491 - DNA, 399 bp, Homo sapiens
acaccttccagttgcctgactgcctcttcacctttcccatgggaactccagcgtctcctttgctcaaaacggaccccaacagctcctgcaccactggcggctgctggccctgtgctggctcctgcaaatgcaaagagtgcaaatgcacctcctgcaagaagatctgctcctgctgccctgtgggctgtgccaagtgtgcccagggctgcatctgcaaaggggcaacagagaagtgcagctgctgtgcctgatgtggggacagccctgctcccagatgtaaatgaagcaacttggatacaaacctggattttttttttcatatgaccctgagccatttgctacattcctttttctataaatatgtaaataacagtaaaacacttttgacttaaaaaaaaa

SEQ ID NO: 492 - DNA, 1496 bp, Homo sapiens
ggccaccgcagcggacagcgccaagtgaagcctcgcttcccctccgcggcgaccagggcccgagccgagagtagcagttgtagctacccgcccagaaactagacacaatgtgcgacgaagacgagaccaccgccctcgtgtgcgacaatggctccggcctggtgaaagccggcttcgccggggatgacgcccctagggccgtgttcccgtccatcgtgggccgcccccgacaccagggcgtcatggtcggtatgggtcagaaagattcctacgtgggcgacgaggctcagagcaagagaggtatcctgaccctgaagtaccctatcgagcacggcatcatcaccaactgggatgacatggagaagatctggcaccacaccttctacaacgagcttcgcgtggctcccgaggagcaccccaccctgctcaccgaggcccccctcaatcccaaggccaaccgcgagaagatgacccagatcatgtttgagaccttcaacgtgcccgccatgtacgtggccatccaggccgtgctgtccctctacgcctccggcaggaccaccggcatcgtgctggactccggcgacggcgtcacccacaacgtgcccatttatgagggctacgcgctgccgcacgccatcatgcgcctggacctggcgggccgcgatctcaccgactacctgatgaagatcctcactgagcgtggctactccttcgtgaccacagctgagcgcgagatcgtgcgcgacatcaaggagaagctgtgctacgtggccctggacttcgagaacgagatggcgacggccgcctcctcctcctccctggaaaagagctacgagctgccagacgggcaggtcatcaccatcggcaacgagcgcttccgctgcccggagacgctcttccagccctccttcatcgggtatggagtcggcgggcattcacgagaccacctacaacagcatcatgaagtgtgacatcgacatcaggaaggacctgtatgccaacaacgtcatgtcggggggcaccacgatgtaccctgggatcgctgaccgcatgcagaaagagatcaccgcgctggcacccagcaccatgaagatcaagatcatcgccccgccggagcgcaaatactcggtgtggatcggcggctccatcctggcctcgctgtccaccttccagcagatgtggatcaccaagcaggagtacgacgaggccggcccttccatcgtccaccgcaaatgcttctagacacactccacctccagcacgcgacttctcaggacgacgaatcttctcaatgggggggcggctgagctccagccaccccgcagtcactttctttgtaacaacttccgttgctgccatcgtaaactgacacagtgtttataacgtgtacatacattaacttattacctcattttgttatttttcgaaacaaagccctgtggaagaaaatggaaaacttgaagaagcattaaagtcattctgttaagctgcgtaaa

SEQ ID NO: 493 - DNA, 92 bp, Homo sapiens
ggatcgatgatgacttccatatatacattccttggaaagctgaacaaaatgagtgaaaactctatactgtcatcctcgtcgaactgaggtcc

SEQ ID NO: 494 - DNA, 9533 bp, Homo sapiens
tcgagcggggtccagagggtggaaccggtgaatttttcaacttccaagttttgcaacgaaagaaagcaagagagggagggaaaaaaaagagcctagagcagaaaagagaggagtttggagccgagcgggagagcgggatttatcgtttggaatttttcaggagatcgttttgatacccctgggctctgggcagcggcggcaacagcagcctccacgctcggccgggtcagacgcggggcgaggcgggcgggcgggcggccgggcgccgaagacccggcgcgggcggcggcggctgctgctgccggggaccacgcgccgcgagcctcttccgccccagagatcagcgctcgcgccccctccctcaccccggcctctcccttctcccccatcccaccccgcccccaccccggccctctcccgcgcgcgccccgccacccgcgcgcactcgctcacgctgcccctcgcgcacacacatggtcggctcgcggcaaagtttcgcctgcgatcaccactccgggatcctgccgcagtgcttggggctgtaaccttgaactttcccagcgcggtgacacattctccccgctctccctcccgcccgcccgctcgccctcctgcgccctcccgcgcccccctccccgccttttttgaaaaagcattttaccaccaaccaccaccccaatccaacccacaccgaaccttcgcgcaccccctacaccccaacaacaacaacaactgcaaaatagaaaacaaatccccaaacccaggcgaaaagcagccaacaccggcggcggcggcggcctcggcaagcacggccagcgcgctcggactgcaagagggttaaaagtgtagattggatttcacccctggaaatctagcacgccgagtgaacttgaatctttggctatttaaggaggactgggtttgttgtgaagttgcggtgatccagcgcagagccccgtcctgattgatcgcatcgcggggctcagatgactgtaaaatgaatagatgaaattcttgcttctcgaagattttcttgggcatctcccggaaagtgcgttttaaggcgaagtcatgatgtattctcccatctgtctcactcaggatgaatttcacccattcatcgaggcacttcttccacatgtccgtgcaattgcctatacttggttcaacctgcaggctcgaaaacgcaagtactttaaaaagcatgagaagcgaatgtcaaaggatgaagaaagagcagtcaaagatgagcttctcagtgaaaagcctgaaatcaaacagaagtgggcatccaggctccttgccaaactgcgcaaagatattcgccaggagtatcgagaggactttgtgctcaccgtgactggcaagaagcacccgtgctgtgtcttatccaatcccgaccagaagggtaagattaggagaatcgactgcctgcgacaggcagacaaagtctggcgtctggatctagtcatggtgatcctgttcaaaggcatccccttggaaagtaccgatggagagcggctcatgaaatccccacattgcacaaacccagcactttgtgtccagccacatcatatcacagtatcagttaaggagcttgatttgtttttggcatactacgtgcaggagcaaggtaagaatttcttttcttcaaataaatgcatcaagatatagatgtccttgcattaccaacaatccatagtaaaacaatcattttacaaagccgcataccaaaagtagactgaagtttgagctgtcacagatggtaggtcatttccaaacttggcctggtgggaggaaaaatggcctgcagatagccaggtgacagactgttacctgaggtttgttatataaatgtgggacttaataaactgctatgagctttattattcaaaaaaaatgaacagcacactgaggaggacacaaaagaagtagacagaatctctgcctctgcttaggagtatgcaatttagttggggcgacaaaacttaaatgctagaaccaataaaagaagattacaaagcaactcgcaaattctggacaatcaggaagtccaagccacaatgatcctgccaagaatcctccaggttaccttgaggatagttttgtaaaatctggagtcttcaatgtatcagaacttgtaagagtatccagaacgcccataacccagggaactggagtcaacttcccaattggagaaatcccaagccaaccatactatcatgacatgaactcgggggtcaatcttcagaggtctctgtcttctccaccaagcagcaaaagacccaaaactatatccatagatgaaaatatggaaccaagtcctacaggagacttttacccctctccaagttcaccagctgctggaagtcgaacatggcacgaaagagatcaagatatgtcttctccgactactatgaagaagcctgaaaagccattgttcagctctgcatctccacaggattcttccccaagactgagcactttcccccagcaccaccatcccggaatacctggagttgcacacagtgtcatctcaactcgaactccacctccaccttcaccgttgccatttccaacacaagctatccttcctccagccccatcgagctacttttctcatccaacaatcagatatcctccccacctgaatcctcaggatactctgaagaactatgtaccttcttatgacccatccagtccacaaaccagccagcctaacggcagtggtcaagtagtagggaaagtgcctggccatttcactcctgtcttggcaccctctccccatcccagtgcagtgcgacctgtgaccctgagcatgacagatactaaacccatcactacatccactgaaggtgaggcagcttcacctacagcaaccacctacacagcctcaggcacatctcaagccaatcgatatgtgggactaagcccaagagacccatccttcctacatcagcaacagctgaggatttgtgactggaccatgaatcaaaacggcaggcatttataccccagtaccagtgaggatacattgggaattacttggcaaagtcctggtacctgggctagcttggttcctttccaagtgtcaaataggacacccatcttaccggccaatgtccaaaattacggtttgaacataattggagaacctttccttcaagcagaaacaagcaactgagggaaaaagaaacacaacaatagtttaagaaattttttttttaaataaaaaaaaaggaaaagaggaagactggacaaaacaacacaaaggcagaaaggaaagaaactgaagaaagaagataatagaccagcaattgcagcacttacaatcactaattcccttaaggttgaaactgtaatgacataaaaagggtcgatgatatttcactgatggtagatcgcagcccctgcaacgtagcctttgttacatgaagtccgctgggaaatagatgttctgtctctatgacaatatattttaactgactttctagatgccttaatatttgcatgataagctagttttattggtttagtattcttgttgtttacgcatggaatcactattcctggttatctcaccaacgaaggctaggaggcggcgtcagaggtgctgggtgacagagccatgagccagccattttataagcactctgatttctaaaagttaaaaaaaatatatgaaatctctgtagcctttagttatcagtacagatttattaaatttcggcccttaacccagccttttccagtgtgtaacccagtttgaaatcttaaaaaaagaaaaaatgaaaaaaaaaggaaaaaaagaaaaaaggaaaaaaacagtttgaacacaaaggctctatggaagaaatgcctctatgtaggtgaagtgttctctctgcatgcaacagtaaaaattaatataatattttccccacaaaagaaacacttaacagaggcaagtgcaatttataaatttatatctaaaggggaatcatgattataagtccttcagcccttggactctaaattgaggggattaaaaagaatttaaaataattttgaacgaatttattttcccctcagtttttgagggcattaaaaaggcattaaatcaagacaaatcatgtgcttgagaaaaataaaattaatgaaaacacagcacttatgttggtttagctgcagcctccttggaggtagaatttatttatttaaaattactggttgcatcaagaacccatagggtgtacaaaaggttctataaaatctgcattatagagacaaagaggcaggcaaatccatgtcacaagggtaaagcttacagtttacaaactgggaacgccagggtgtaggatataaaaacgcactcttgagaaaacaaatgtaatcagggtgctgaaaacttgcatggtgctttcagacattagccttgttcaacaaatttcttgtattgacagatccatagtgtgcatgggcagacacattttgcctctatgtctcttaaaattttaattaaaaatactctttccagtaatcctaatttgcacgaagatataatgtccacattacgtgccttgccttgaaatctaaaaaacaaaaaacaaaaaaaaaaaaacaaaaaaatacaacaaagtgacatcactacacttgttttgctgcatttattatcattttaaatctttaccatttttatgacaaaatattttgtactccagacgaagaaaaatgtgtgacatcatggattttttagacagttatacctttatctcacatttataaagcatatcatggctgtgtatagttgccgcttaaaaattgtaatcgaccagcaatattttcagtattttggtgtttttttctattaacctttcatgtttttcatcttccaattaatatttgggggggaggggtttcaaatttatacgaattatgcaataccaagttttgcctatgtaggtagtgcttttagctgtattggttattataggtaagtacacagatttaaaaaaaaaataatgtatgcttttttgtttgtttgtttgttttaattgaccaaagtgggtactgctatttttgcagtgtgatgaggtccttttgtgtactgagagatggacaggggattttttttaatatacatatatatatattctggggtgggtgggaggatttttaacactttgcagtgtagctgtgaagcagtgcaccctgagatgggcctgggctgcaaagcgactgttctgcctactgtgacaaacttcaacttacacaggttcccctctctaacttcccacctgggttgcaagctgaactcattactggttttcataacaacacaatagtaagaacaagcaaacacaacaaattctcctggaggcagacttggcttaaaaaggcagacttggcttggtgatagtttttcttgaaagttccagatccacagtggagagtgagcctgtctcatatttggcaaaaatatttgttgaaatgtccacataggggatgttggatgtttaacacttttgagagtttaacacatgaatattctttctcctagaaaacacattagacctgttggagggagtctcccgtattccttttctgccacttttcgtccccatttcatttcattaatgataggatatgatttacctgtgacttactacttcaaatggatggcagtgcacttggatttttttttaatatccagaagattgaacagagggttgctattgttgaatgtatttggactgatagattaaaatcaaagttcaatttttaaggaacaaaaaagtaaatcctgttttcattttatctccccttttaaaactgagaaccagagcagaagggaaatatagaattttaagcaattaatcttcctgtggatgaattaaacccattagatgctgatgggatttttttaaggaatggtaccttaactatatatttgatttcgtttcccctgagggctagaggctgaatggaggctggttttattttgcctttccctcaccgcccagtcccattgagtgtattcattactagaaggaaaatctttcagaattggtgacacatggtaggctgtcttaaggagtcccctggcccccttcccctaggccatggcctaataaaataaactgtcaattgttctcacagcatatcatttaataatgaatactttagaacaatgcttatgggctggagaattgtatttgattagcccattcagtttgatagcccaaatgctgaacagcacagcgggatcctagcagtgcaagttcaaaagtaagtccaatcatttctgtgatactcgccctggtagcaaacagatcatctcagccaagctcttcatgtatctttgacctattaggtgaacaaatgaacctcacaggacacacagtattttttaaaggcagactcgctctcttttttgccagtgagcagttctagctaaccaagttacacactgtgggtattcctgcctgcctcttgaatacaaaggcctagttcaagtgttgctttttttatttcaaatcaattttttcttctttcctttttgagataaaactattaaaagtactactatatatataaaatctcaaatcaacttttcggcctcctcctcgtgtaccaggaagtatattctgacgaagggccccacttttgcaggtcttgcacgcccctcccttacccagaactgcagagcttcaggatggcgaaggtcacccaagggcatgagtagggagtggtgtctccaaccatcagttccgtggcactgttcagcctttgtgtgctgccctgccacccaccactcacagtgcctctgaagcgtgttacccctggagtgacgtgagcatttgaggcttgtctaaggaaaaaaataaaaggcagtgaaggagactgtacataaagacatggcaaaaatcttaattatagcaatatagttatcgggtaatgttcgggtgggcagctccattaaaaaatatgtgaatgaatctgtgaagctgcaagtagcgagaagagcgaaaggtcttcttaatgaaccgcctaccttgtagacagtaatttgtacactgtatagttttgttaagaattttttttaaattaaaattcccatgtttgtaaagctaactttttaacaattataatggaactatatgttgtttccatttttaaagtaaacaagaatattccttgtttagagactggacttgagttaaaactctccagtctcttaagttatgtattaaaaagaaaatctgtccatgttaggagttatttcacagattcctgtgcttgaaaagcataggatactaatcctttaaaaaagtgtaaatggagaaaagttatattttatgaaggttattttgttgtatttagtattggaaaagttggtttccagagcatttcagaatgtcgaagcaccactgtctttttattagtatatacggcctttagcaaaagtttttgtgattgttacgtgatggtatttaaggttaagtttcacagagcattcaggataggcagaaaactaaaacagtgctatgtctcacataacgtgtcctcagggagcagaatcttggatttgtgacttgtagcttcataaggactcaacgaaagagattgcacagggacatcttcagcggtgtgacagcaggacatgttctttacctagattcaaattctatgtactgtgtgaaatgatgaaggctgcagaaagttatcccatattcagtgtacagtattcatttttaatgaaacaactctacaatattgctggcagataggccccaagcatgacattcaatatagtttacatgttcctgtcaaggtcttttgttaacattaaccagctgcatgctttctggactttaagaaattgggtttctatagaaaactttttttttttttttttttttaatgtgcaggctattcaagttcaatagtaaaagctcaaaaatgaatgttctactccatgctgaaggagctgaaagctgccttcttcatattttgcactttctggtagttcccctgttttttctaattccctaaaattgtgtgggtggagtggagccctgcagttggggggtaacatggaccactgattttgccctttgaccctgcacaatgacctttgcatcagccaaactcattgccatgacaactctttgtactgtgtccgtgccacagatctgttggtcacattgttaatagtaaaggggacaagttggagacggtcaatttttacattttttgttgcaattttttcttcaatggttgtaagtagtttttttttttttttaataataaaagggttcactagttaatactctagaaatatctgtgtgttgcaattcaaatgtatgttgagattgtgaaaagcgcttcagtgccactagcttaccggtacactagactaagcccttgatgacttattgcatgatacagtaccaggaacaacaggtggcctaaatacatgaaaagcagtgtaagctagtgacactaaagccagtcttgtattactgtatttttgacagaatggttttgaaaactgtgctacagggactgatgtggcaaatatatctctttatgcagaaggaagtctttttttttcttttttttttttttaagaagtatggctttttatgcatccttcatcgagggcattgaagttgcatggactgataaaagttgatgcaaaacaagaaagaaacaaacaaaaaaaaaaaaccagcaaaatgtttaccaaaaaactcaaacaaatgagcagtgcctgttcaatttcacagtctctgttgagttcagttgtaaatatgtttcaaatgacattttcttgggaaaaaaaatctctacaacattgtagaatgtgaggggtaactacatcccaggcataggtttctcaaagctgcagtagattatgtcttcatcaagctgttaatttgtgcttatatcatatagaacttttagcatcctgggaagagctgcccccacctcaatgatatttctctgagaacaacttttgtaggactgtgtgtttctttagatacatttagtacaactgtaggtgacgagtagtcagttattgcttgctagctacacaccagggttgatccattttaaaacttttggcattttgtcctcatgggccataaatacagaaccttgtattttaattaaatttttttacaaaaggaggcacatgcacaatctccatgtaacaaacctttagcagtaggatgtattatacgacagttacttaatttctagagttcaggcctctgggatcaaccccagactgggccagaatgttagtgaaggttttattgtgcccggttggaggataacgttctttgggtactttttgtgggttgcaaatgaactcaattgccacaagttttaaactggtgtaaatcaagcttgacttaatgtgattgttactgttatatccagcctatactgctagcagctgctcatactgcagtcaattactggaagcggatatatttcctatgcaaaaactgtttaaacaataaaatgagctatgctacaga

SEQ ID NO: 495 - DNA, 8528 bp, Homo sapiens
ataatctatcccagatcctttcccagagagaaacttggcgatcacgttttcacatgatgctcacgctcagggcgcttcaattatccctccccacaaagataggtggcgcgtgtttcagggtctctcgtctctctcctacagaaaagaaaaagaaaaaaatgtcattagaagaggcgtaacacgtcagtccgtccccaggtttgtgtttcctggagtggccgaaagagatcagttctaacctgctctgcaggaataacggtcctgcctcccgacactcttggcgaggtttttgtacagtttgctccgggagctgtttcttcgcttccacctttttctcccccacacttcgcggcttcttcatgctttttcttctcaccatttctggccaaaactacaaacaagacttcgcagatcgagcctgcgtgctgccgaagcagggcgccgagtccatgcgaactgccatctgatccgctcttatcaatgaagcagccgatcatggcggatggcccccggtgcaagaggcgcaaacaagccaatcccaggaggaaaaacgtggtgaactatgacaatgtagtggacacaggttctgaaacagatgaggaagacaagcttcatattgctgaggatgacggtattgccaaccctctggaccaggagacgagtccagctagtgtgcccaaccatgagtcctccccacacgtgagccaagctctgttgccaagagaggaagaggaagatgaaataagggagggtggagtggaacacccctggcacaacaacgagattctacaagcctctgtagatggtccaggtaagtgtctaaaatcacttggcctcttcctgtaccatcttcacatcttcaactaatctgttccacctagcagatcgcccacaaccaaataattaaaatatttctttccattgagcccttgcagaatagagataccaaagctggtgacagattatgaagtgatagtaatgttatcacattgcggcagttacatcttaggaagggattatatttcagttttgatgcaagtcaaacatgaaccacactttcaacacataacatgaggtatttgcaccacatttacaatgtgcaaattatgtaacatgatcaagatctatactttcatgataggaaatggaagcaaatgtaaaaactcacaacatatatatgtatataaaaatattttgtgtggaaattatgtagcatttcaaaccaaataactgtcagtttaatgtagcttcagtgtctgtctgacacctcctattggaattcaatcgtttaatgattcccttttgttaagtgtgaatgtgatttcacacttttacctggtcaggtagctttcttattatttatcagctaagtacttgataatgattcctgctgtttggtgggactctcaagggaagtaaaaatggtcccaggccaactataataaaactaaggtaaattatattcaaactaaaacttccgacaacactgtgcaaacgggaaatgtcttggtctaaaattcacttatgacggagaatcgctaaggtatgaaatgtttaacaaaatacaagaaatcttattcctgtgaactttctctgctcatctttacatggtaaagtggcctggaaaatttgtttaaatgacctctctaattcagacctcatgtcaccttcatctctattcccaggacccactgagagttatcattgtttaccccaccttgttttttctttgacaacataagcaacaaaagcatttttataaataggtgaagtggctgggaaggagtctacctatatgctgttgtgatgtcgcagactataaaccatcaaacataggcagaataattgtttggtatactggaaggaggataataaaagcacttccactacgaaagaaaattaaatgtgagatgaaagaaaaagaaaaaagactgatggcaatttgagtacagtgtatttgtttttcgttttcctaacatactgtgccaagttttctactctttccgtttccaattttgctttcggtgaaggtttctcgaatctcagcaatcccacacataaacatttatcgttatatccattaagccttaaggttttagattttcaactatgagggagaactcagccaaagatgcttgaaagataaatacgtttaattaggggcagaggatgatcattaaaggaagtctgactgctgcagaagtcattaacaatcttaaatgaaatttttatttttatgatagccatttacatgtataataagagccaatgattcttgggagcagtgtgacagaaacagagtgtggcgagaactcatgtaagacatactatttaaatgagctggtgttagctattcatatttgttaatgaactagatatgcagggctataagaatgaatgttctgatgctttaaattttaatatctagaaatcaagggtaaggaccaattactagaatttccacccttagaagaataattaataacaatgtaacaaatgtacagccccaaacctcttttaaaaaagtttaatttaaaaaatttaatatcaatagttgaaaaacagccaaacagcaatgtcaagctgtagtagtttgtgattgtggcagctttttgtgttggtcatggatcataattctaaacgttttaatatacagtaatccatatgaatgcattgcagaccctgttatcacctgtagttaatggtgcctgtgatacaagtgaacaggctgttctttgctcttacctttatggtaaataaaccagcattctggagtcacaataattaaataaaatgtaaatccctaatctcatttggctatttggaccaagaaacttacccggctattacctgtctagttctaatgattactaatgatttattgttctttttttttattgttctaaaagtgctctgatgtggtgccttgatgtctaatgaaaagaaattggtcttaaaaagctactcattgtttatcctgactctgagataacacatttttcttctgataaaatatttttcttatttattgttcaaaacacacaatatagacaataactctaattctggtgcagttttatttagtagtgttttatccccggtgcctggctgtctacagtcatacctcagcacatagctttactctgagataagccctctctcctttgctctttctcccatgctttctggagtttgtctgcaggatgcaggttttgaactgaagagcgcagtggagttcttactgtgcctttccggttccagcacaatcaaagttttgtgtttggaattgtccttgacattctttcgtcccacaatggggtggacacagtgtgctggaaaccatgacatcattatcattgacacagacttaaataaatcacctgcatcttggcctctttctgcttattcaaggattcttcatcttaaggaagaaagtgctctttatttttacaaatcttcatcccaggggtgactggaagacgcaaacttttacaagtgttttaaaaataaatatactatgtggttttagacacagtatgctgagtcagaggtgtcttagagaatgtttaaggttagacataaggcagaaagacagccagattgcctttaattcggaggcaatattcctaaactgtgtatcattatgtccttctgaatatggattcacttgaaacttaattaaataggcatatacataacatttcaaatacatacctgaaaaggcttagtagtgtttcattttcacacattgagcttgatattcaaaaaaaaaaaaaaaaaagaaatgaaggaagactatgacactatggggccagaagccacgatccagaccgcaattaacaatggtacagtgaagaatgcaaattgcacatcagattttgaggaatactttgccaaaagaaaactggaggaacgcgatggtcatgcagtcagcatcgaggagtaccttcagcgcagtgacacagccattatttacccagaagcccctgaggagctgtctcgccttggcacgccagaggccaatgggcaagaagaaaatgacctgccacctggaactccagatgcttttgcccaactgctgacctgcccctactgcgaccggggctacaagcgcttgacatcactgaaggagcacatcaagtaccgccacgagaagaatgaagagaacttttcctgccctctctgtagctacacgtttgcctaccgcacccagctcgagcggcatatggtgacacacaagccagggacagatcagcaccaaatgctaacccaaggagcaggtaatcgcaagttcaaatgcacagagtgtggcaaggccttcaaatataaacaccatctgaaagaacacctgcgaattcacagtggtgaaaaaccttacgagtgcccaaactgcaagaaacgtttctcccattctggttcctacagttcgcacatcagcagcaagaaatgtattggtttaatctctgtaaatggccgaatgagaaacaatatcaagacgggttcttcccctaattctgtttcttcttctcctactaattcagccattacccagttaagaaacaagttggagaatggaaaaccacttagtatgtctgaacagacaggcttacttaaaattaaaacagaaccactagacttcaatgactataaagttcttatggctacacacgggtttagtggcactagtccctttatgaatggtgggcttggagccaccagccctttaggagttcatccatctgctcagagtccaatgcagcacttaggtgtagggatggaagcccctttacttgggtttcccaccatgaatagtaatttaagtgaggtacaaaaggttctacagattgtggacaatactgtttccaggcaaaaaatggactgcaaggctgaagaaatttcaaagttgaaaggttatcacatgaaggatccatgctctcaacctgaggaacaaggagttacttctcctaatattccgcctgtcggtcttccggtagtgagtcataatggtgccactaaaagtattattgactatacgttggaaaaagtcaatgaagccaaagcttgcctccagagcttgactactgactcaaggagacagatcagtaatataaagaaagagaagctacgtactttaatagatttggtcactgatgacaaaatgattgagaaccacaacatatccactccattttcatgccagttctgtaaagaaagttttcctggccccatccctttgcatcagcatgaacgttacctttgtaagatgaatgaagagatcaaggcggtcctgcagcctcatgaaaacatagtccccaacaaagccggagtttttgttgataataaagccctcctcttgtcatctgtactttctgagaaaggaatgacaagccccatcaacccatacaaggaccacatgtctgtactcaaagcatactatgctatgaacatggagcccaactccgatgaactgctgaaaatttccattgctgtgggccttcctcaggaatttgtgaaggaatggtttgaacaacgaaaagtctaccagtactcaaattccaggtccccatccctggaaagaagctccaagccgttagctcccaacagtaaccctcccacaaaagactctttattacccaggtctcctgtaaaacctatggactccataacatcaccatctatagcagaactccacaacagtgttacgaattgtgatcctcctctcaggctaacaaaaccttcccattttaccaatattaaaccagttgaaaaattggaccactccaggagtaatactccttctcccttaaatctttcctccacatcttctaaaaactcccacagtagttcatacactccaaacagcttctcttctgaggagctccaggctgagcctttagacttgtcattaccaaaacaaatgaaagaacccaaaagtattatagccacaaagaacaaaacaaaagctagtagcatcagtttagatcataacagtgtttcttcctcatctgaaaactcagatgagcctctgaacttgacttttatcaagaaggaattttcaaattcaaataatctggacaacaaaagcactaacccagtgttcagcatgaacccatttagtgccaaacctttatacacagctcttccacctcaaagcgcatttccccctgctactttcatgccaccagtccagaccagtattcctgggctacgaccatacccaggactggatcagatgagcttcctaccacatatggcctacacctacccaactggagcagctacttttgctgatatgcagcaaaggagaaagtaccagcggaaacaaggatttcagggagaattgcttgatggagcacaagactacatgtcaggcctagatgatatgacagactccgactcctgtctgtctcgcaaaaagatcaagaagacagagagtggcatgtatgcatgtgacttatgtgacaagacattccagaaaagcagttcccttctgcgacataaatacgaacacacaggaaaaagaccacatcagtgtcagatttgtaagaaagcgtttaaacacaagcaccaccttatcgagcactcaaggcttcactcgggcgagaagccctatcagtgtgataaatgtggcaagcgcttctcacactcgggctcgtactcgcagcacatgaatcacaggtattcctactgcaagcgggaggcggaggagcgggaagcggcggagcgcgaggcgcgcgagaaagggcacttggaacccaccgagctgctgatgaaccgggcttacttgcagagcattacccctcaggggtactctgactcggaggagagggagagtatgccgagggatggcgagagcgagaaggagcacgagaaagaaggcgaggatggctacgggaagctgggcagacaggatggcgacgaggagttcgaggaggaagaggaagaaagtgaaaataaaagtatggatacggatcccgaaacgatacgagatgaagaagagactggagatcactccatggacgatagttcggaggatgggaaaatggaaaccaaatcagaccacgaggaagacaatatggaagatggcatgtaataaactactgcattttaagcttcctatttttttttccagtagtattgttacctgcttgaaaacactgctgtgttaagctgttcatgcacgtgcctgacgcttccaggaagctgtagagagggacagaaggggcggttcagccaagacagatgtagacggagttggagctgggtattgttaaaaactgcattatgcaaaaattttgtacagtgttaaggcctaaaaactgtgtggttcagagactaattcctgtgtttaatagcatttatactttaagcacaactagaaaattgtaagaattgcactctacttatgtatcactacaaactttaaaaaactatgtctaatttatattaatacattttaaaaaggtgcccgcactaccatacatcagtatttttattattattattgttattcctttttaatttaatgtgctcgcactacaatgcatcagtattatgattcctctgtactttcctttcgctattcatcaatttcccattttttttttcagcttaagtaaccacacaattttaggcctcaatttttttttttttctgtgaaggaacttgaagtgatgcatgtgtgaatttaagataccgaagtcttaaagtgacctggacgtgaaggaaaaagtaagatgagaaataaagaaagcctttgtaaggtggttttaaaagccttatatgcaaaccttttaatctgtgtttctgcaagtgccatccttgtacagtgttaagagggtaacatgggttacctttgcaccagcttcagtgttaagctcaccctgttctttgaagcacccatgtcagtattagaagaataggcagcagttccttagtttacatatgtttgtgcaattattttctgtacttttttgttcattaattttgtcagtattacaccaaactgtttttgcaacaaaaaaattttttttgcattcatttaattttaggtcaaataacattttatttatgtggctcattttatatttcctaattttatttatttcatactgtagtgtacagtattatagttcttcaatatatagatatattttagtaaaaaaggaacatgacgttgatcatttgggcaaattttacgtaaagagaagagcatttattgtgttttggaacattaattgtgagatgggatttttcaattttattattttatttttgtttttttccaattactggaaattccaaatttgggaacttttgatacgatcttgtgaaaacactgtattttcgactgaaaattccactttcttcatcttgttttttagctaaaaagagggactgttaaatacaatgtatgataccatgacaaaaatctttcctgaattgtctttgtaaaagtattattgaattttcaatttgtaatttcttttgaaaatgaccatgctcgaataaaaatgtagccaaactaa

SEQ ID NO: 496 - DNA, 1308 bp, Homo sapiens
aggggtagggatggttcagccccgccccgctagggcggggcctgcgcctgcgcgctcagcggccgggcgtgtaacccacgggtgcgcgcccacgaccgccagactcgagcagtctctggaacacgctgcggggctcccgggcctgagccaggtctgttctccacgcaggtgttccgcgcgccccgttcagccatgtcgtccggcatccatgtagcgctggtgactggaggcaacaagggcatcggcttggccatcgtgcgcgacctgtgccggctgttctcgggggacgtggtgctcacggcgcgggacgtgacgcggggccaggcggccgtacagcagctgcaggcggagggcctgagcccgcgcttccaccagctggacatcgacgatctgcagagcatccgcgccctgcgcgacttcctgcgcaaggagtacgggggcctggacgtgctggtcaacaacgcgggcatcgccttcaaggttgctgatcccacaccctttcatattcaagctgaagtgacgatgaaaacaaatttctttggtacccgagatgtgtgcacagaattactccctctaataaaaccccaagggagagtggtgaacgtatctagcatcatgagcgtcagagcccttaaaagctgcagcccagagctgcagcagaagttccgcagtgagaccatcactgaggaggagctggtggggctcatgaacaagtttgtggaggatacaaagaagggagtgcaccagaaggagggctggcccagcagcgcatacggggtgacgaagattggcgtcaccgttctgtccaggatccacgccaggaaactgagtgagcagaggaaaggggacaagatcctcctgaatgcctgctgcccagggtgggtgagaactgacatggcgggacccaaggccaccaagagcccagaagaaggtgcagagacccctgtgtacttggcccttttgcccccagatgctgagggtccccatggacaatttgtttcagagaagagagttgaacagtggtgagctgggctcacagctccatccatgggccccattttgtaccttgtcctgagttggtccaaagggcatttacaatgtcataaatatccttatataagaaaaaaaatgatctcttatcaattagcactcactaatgtactactaattgagcaacctacgcactcagttgactacgtaaatctgtcaggtcttttgtgatttcctctgatgcaggagaggaaaaattgtaattgatgaaaataatgaatgaaaatcaacagatgaataaatggttctttataagtg

SEQ ID NO: 497 - DNA, 2081 bp, Homo sapiens
accatcatctgcaaatagcataagcagcagcacatcttcaaatcatagcggccacactccagagcccccactcccaccggttggaggtgacctcgccagccgactgtccagtgatgaaggggagatggacggagccgacgaatccgagaagctagactgtcagttctccacgcaccaccccagacctctggcgttttgctcatttgggagtcgcctcatgggacgagggtactatgtgtttgatagaagatgggatcgttttcgattcgcactaaactccatggtagaaaaacacctgaattcacagatgtggaagcacagaaacccgagccacagggcatcaggtccctcccccctgttcaggacttgcctaaccaatctgctgtcactgagcaacattggggctgcctgggtgtcaactctggagagcgtagcaccccgctaccctctcaacctcgctgcccaaaccccaggccccggcgggcccgaacctggagggatggcagccgatgggggcgtggaagacattaggaagaaaaggaacggccaagactcttttttctttaacaagcatttaactctgcatcaggagccgccaacacagtattctctttcagccaggaagatccctcctgcggcagatagccccctgccctcgccagcagcccacatcaccacccccgttccagcatccgttttgcagcctttcagcaaccccagtgctgtgtatcttccttcagctcccatcagctcgaggctcacctcttcttacataatgacatcagccatgctctcaaacgcagctttcgtgacatcgccggacccgagcgccctcatgtcccacaccacagctttccctcatgtggccgcaaccctcagcatcatggactcaaccttcaaggccccatccgccgtgtccccgataccagccgtcatcccttccccatcccacaagccatccaaaaccaaaaccagcaaatcctcaaaagtcaaagacctgtccacccgtagcgacgagtctccaagtaacaaaaaaaggaagccacagtcttcgacttcctcctcctcctcctcctcctcctcttccttgcagacatccctctcgtctccactgtcagggcctcacaaaaagaactgtgttttgaatgccagttctgctttgaactcctatcaggcggcccctccctataacagcctgtctgtgcacaactcaaacaatggggtgagcccactcagtgccaaactggagccctcaggacggacctcgctgcccggcggccccgcggacatagtgagacaggtgggcgcggtgggaggcagcagtgactcctgtcccctctctgtgccctcccttgcgctccacgcaggggacctctctctggcctcacacaatgctgtgtcttctctgcccctctcttttgacaaatcagaaggaaaaaagcgtaagaactcgagttctagtagcaaagcctgtaaaatcactaaaatgcctggtatgaatagcgttcacaaaaagaacccgcccagccttctcgcaccggtgcccgatcccgttaacagcacctcctctcggcaggtaagggacctcctggcaccgccttcaccggctctggggggcagggggagctgggcagcgcccctgcttagccgggcggctccgacaggtaacacaagcttgattcctgttctcgttttccccgaaggcagttttcaccctctgctttgagagcactttactgaacaagtacttgataccacgctcactatgtgctagacactgttctcggcactttacggttattacctcactgagtcctcacgacaccccagtgcagtgagtgcagttatcactttacagatgagtaaactgaggcacagagagattctgagttccccactccacatcggtcagttttatcttttgaggttctgagaacattgtcattaaagagttctgttgctaagttgggaaaaatagcagcctagctttgtcacaatccagtccttcaagtatatccagcccaggacacagccgacagaagaacacaaacagaacgggcaggataaggactcttccataa

SEQ ID NO: 498 - DNA, 95 bp, Homo sapiens
ggatcgatgatgagtcccctataaaaacattccttggaaaagctgaacaaaatgagtgagaactcataacgtcattctcatcggaactgaggtcc

SEQ ID NO: 499 - DNA, 438 bp, Homo sapiens
gccccctcccctgactatcaaagcagcggccggctgttggggtccaccacgccttccacctgccccactgcttcttcgcttctctcttggaaagtccagtctctcctcggcttgcaatggaccccaactgctcctgcgccgctggtgtctcctgcacctgcgctggttcctgcaagtgcaaagagtgcaaatgcacctcctgcaagaagagctgctgctcctgctgccccgtgggctgtagcaagtgtgcccagggctgtgtttgcaaaggggcgtcagagaagtgcagctgctgcgactgatgccaggacaacctttctcccagatgtaaacagagagacatgtacaaacctggattttttttttataccaccttgacccatttgctacattccttttcctgtgaaatatgtgagtgataattaaacactttagacc

SEQ ID NO: 500 - DNA, 83 bp, Homo sapiens
ggatcgatgatgacttaaaaaaatggaaaccttggaaatctgaacaaaatgagtgaccaagacacttctgtgagctgaggtcc

SEQ ID NO: 501 - DNA, 1757 bp, Homo sapiens
ggcgcttccgcaggaagaaggaagcggcgccgccatcgcctcccggcgctccctccccgactcctaagtccttcggccgccaccatgtccgcctcggctgtcttcattctggacgttaagggcaagccattgatcagccgcaactacaagggcgatgtggccatgagcaagattgagcacttcatgcctttgctggtacagcgggaggaggaaggcgccctggccccgctgctgagccacggccaggtccacttcctatggatcaaacacagcaacctctacttggtggccaccacatcgaagaatgccaatgcctccctggtgtactccttcctgtataagacaatagaggtattctgcgaatacttcaaggagctggaggaggagagcatccgggacaactttgtcatcgtctacgagttgctggacgagctcatggactttggcttcccgcagaccaccgacagcaagatcctgcaggagtacatcactcagcagagcaacaagctggagacgggcaagtcacgggtgccacccactgtcaccaacgctgtgtcctggcgctccgagggtatcaagtataagaagaacgaggtcttcattgatgtcatagagtctgtcaacctgctggtcaatgccaacggcagcgtccttctgagcgaaatcgtcggtaccatcaagctcaaggtgtttctgtcaggaatgccagagctgcggctgggcctcaatgaccgcgtgctcttcgagctcactggcctttcaggcagcaagaacaaatcagtagagctggaggatgtaaaattccaccagtgcgtgcggctctctcgctttgacaacgaccgcaccatctccttcatcccgcctgatggtgactttgagctcatgtcataccgcctcagcacccaggtcaagccactgatctggattgagtctgtcattgagaagttctcccacagccgcgtggagatcatggtcaaggccaaggggcagtttaagaaacagtcagtggccaacggtgtggagatatctgtgcctgtacccagcgatgccgactcccccagattcaagaccagtgtgggcagcgccaagtatgtgccggagagaaacgtcgtgatttggagtattaagtctttcccggggggcaaggagtacttgatgcgagcccactttggcctccccagtgtggaaaaggaagaggtggagggccggccccccatcggggtcaagtttgagatcccctacttcaccgtctctgggatccaggtccgatacatgaagatcattgagaaaagtggttaccaggccctgccctgggttcgctacatcacccagagtggcgattaccaacttcgtaccagctagaagggagaagagatgggggcttgaacacggggcttccttacagccccggatgcagattttagagggagggcaggtgcgggctgtgtgtgtctgtgtgagggcaggtcctggacttggcagtttcttgctcccagcacccgccccttcctcacctcttccttattccataggctgggagagaaactctctctgcttccctcgcccttggagctttccccatccccctgattttatatgaagaaatagaagaggggcttgaagtcctcctcgcgagtgccttcttgcaattacctgccttagcgggtgttgcgggtccctccttcacagccgctgagcccagaggtcccgctggcccctcctctgaattttaggatgtcattaaaaagatgaatcta

SEQ ID NO: 502 - DNA, 1331 bp, Homo sapiens
gcctctggggttttatattgctctggtattcatgccaaagacacaccagccctcagtcactgggagaagaacctctcataccctcggtgctccagtccccagctcactcagccacacacaccatgtgtgaagaggagaccaccgcgctcgtgtgtgacaatggctctggcctgtgcaaggcaggcttcgcaggagatgatgccccccgggctgtcttcccctccattgtgggccgccctcgccaccagggtgtgatggtgggaatgggccagaaagacagctatgtgggggatgaggctcagagcaagcgagggatcctaactctcaaataccccattgaacacggcatcatcaccaactgggatgacatggagaagatctggcaccactccttctacaatgagctgcgtgtagcacctgaagagcaccccaccctgctcacagaggctcccctaaatcccaaggccaacagggaaaagatgacccagatcatgtttgaaaccttcaatgtccctgccatgtacgtcgccattcaagctgtgctctccctctatgcctctggccgcacgacaggcatcgtcctggattcaggtgatggcgtcacccacaatgtccccatctatgaaggctatgccctgccccatgccatcatgcgcctggacttggctggccgtgacctcacggactacctcatgaagatcctcacagagagaggctattcctttgtgaccacagctgagagagaaattgtgcgagacatcaaggagaagctgtgctatgtggccctggattttgagaatgagatggccacagcagcttcctcttcctccctggagaagagctatgagctgccagatgggcaggttatcaccattggcaatgagcgcttccgctgccctgagaccctcttccagccttcctttattggcatggagtccgctggaattcatgagacaacctacaattccatcatgaagtgtgacattgacatccgtaaggacttatatgccaacaatgtcctctctgggggcaccaccatgtaccctggcattgctgacaggatgcagaaggagatcacagccctggcccccagcaccatgaagatcaagattattgctcccccagagcggaagtactcagtctggatcgggggctctatcctggcctctctctccaccttccagcagatgtggatcagcaagcctgagtatgatgaggcagggccctccattgtccacaggaagtgcttctaaagtcagaacaggttctccaaggatcccctcgagactactctgttaccagtcatgaaacattaaaacctacaagcctta

SEQ ID NO: 503 - DNA, 3055 bp, Homo sapiens
caggaccatggaactcagcgtcctcctcttccttgcactcctcacaggactcttgctactcctggttcagcgccaccctaacacccatgaccgcctcccaccagggccccgccctctgccccttttgggaaaccttctgcagatggatagaagaggcctactcaaatcctttctgaggttccgagagaaatatggggacgtcttcacggtacacctgggaccgaggcccgtggtcatgctgtgtggagtagaggccatacgggaggcccttgtggacaaggctgaggccttctctggccggggaaaaatcgccatggtcgacccattcttccggggatatggtgtgatctttgccaatggaaaccgctggaaggtgcttcggcgattctctgtgaccactatgagggacttcgggatgggaaagcggagtgtggaggagcggattcaggaggaggctcagtgtctgatagaggagcttcggaaatccaagggggccctcatggaccccaccttcctcttccagtccattaccgccaacatcatctgctccatcgtctttggaaaacgattccactaccaagatcaagagttcctgaagatgctgaacttgttctaccagactttttcactcatcagctctgtattcggccagctgtttgagctcttctctggcttcttgaaatactttcctggggcacacaggcaagtttacaaaaacctgcaggaaatcaatgcttacattggccacagtgtggagaagcaccgtgaaaccctggaccccagcgcccccaaggacctcatcgacacctacctgctccacatggaaaaagaagagaaatccaacgcacacagtgaattcagccaccagaacctcaacctcaacacgctctcgctcttctttgctggcactgagaccaccagcaccactctccgctacggcttcctgctcatgctcaaataccctcatgttgcagagagagtctacagggagattgaacaggtgattggcccacatcgccctccagagcttcatgaccgagccaaaatgccatacacagaggcagtcatctatgagattcagagattttccgaccttctccccatgggtgtgccccacattgtcacccaacacaccagcttccgagggtacatcatccccaaggacacagaagtatttctcatcctgagcactgctctccatgacccacactactttgaaaaaccagacgccttcaatcctgaccactttctggatgccaatggggcactgaaaaagactgaagcttttatccccttctccttagggaagcggatttgtcttggtgaaggcatcgcccgtgcggaattgttcctcttcttcaccaccatcctccagaacttctccatggccagccccgtggccccagaagacatcgatctgacaccccaggagtgtggtgtgggcaaaatacccccaacataccagatccgcttcctgccccgctgaaggggctgagggaagggggtcaaaggattccagggtcattcagtgtccccgcctctgtagacaatggctctgactccccgcaacttcctgcctctgagagacctgctacaagccagcttccttcccctccatggcaccagttgtctgaggtcacattgcaagtgagtgcaggagtgagattatcgaaaattataatatacaaaatcatatatatatatatgttcttgttttttgagacagagtctcacactgttgcccaggctggagtgcagtggcgtgatctcggctcactgcaacctccacccccggggatcaagcaactctcctgcctcagcctccctagtagctgggattacaggcatgcactaccacgcttggctaatttttgtatttttagtagagatggggtttcactgtgtaggccaggctggtctcgaactcctgaactcaagtgattcacccaccttagcctcccaaagtgctgggattacaggcgtgagtcaccgtgcccagccatgtatatatataattttaaaaattaagctgaaattcacataacataaaattagctgttttaaagtgtaaaatttagtggcgtgtggttcattcacaaagctgtacaaccaccaccatctagttccaaacattttctttttttctgagatggagtctcactctgtcacccaggttcgagttcagtggtgccatctctgtccactgcaacctccacatcctgggttcaagtgattctcctgcctcagcctctggaggagctggtatcacaggcgtcccccaccacgcctggctaaattttgtatttttaggtggtcttgaactcctgatgtcaggtgattctcctagctccaaatgttttcattatctctcccccaacaaaacccatacctatcaagctgtcactccccataccccattctctttttcatctcggcccctgtcaatctggtttttgtcactatggacttaccaattctgaatatttcccataaacagaatcatacaatatttgattttttttttttttttgaaactaagccttgctctgtctcccaggctggagtgctatggtgcaatttttgttcactgcaacctctgccttccaagatcaagagattctccagtctcagctcccaagtagctgggattacaggcatgtactaccatgcctggctaattttcttgtagttttagtagggacatgttggccaggctggtggtgagctcctggcctcaggtgatccacccacctcagtgttccaaagtgctgatattacaggcataatatgtgatcttttgtgtctggttgctttcatgttgaatgctatttttgaggttcatgcctgttgtagaccacagtcacacactgctgtagtcttccccagtcctcattcccagctgcctcttcctactgcttccgtctatcaaaaagcccccttggcccaggttccctgagctgtgggattctgcactggtgctttggattccctgatatgttccttcaaatctgctgagaattaaataaacatctctaaagcctgacctccccacgtc

SEQ ID NO: 504 - DNA, 2914 bp, Homo sapiens
ggccaagagcgctgtcaagaagacccacacgcccccctccagcagctgaattcctgcagctcagcagccgccgccagagcaggacgaaccgccaatcgcaaggcacctctgagaacttcaggatgcagatgtctccagccctcacctgcctagtcctgggcctggcccttgtctttggtgaagggtctgctgtgcaccatcccccatcctacgtggcccacctggcctcagacttcggggtgagggtgtttcagcaggtggcgcaggcctccaaggaccgcaacgtggttttctcaccctatggggtggcctcggtgttggccatgctccagctgacaacaggaggagaaacccagcagcagattcaagcagctatgggattcaagattgatgacaagggcatggcccccgccctccggcatctgtacaaggagctcatggggccatggaacaaggatgagatcagcaccacagacgcgatcttcgtccagcgggatctgaagctggtccagggcttcatgccccacttcttcaggctgttccggagcacggtcaagcaagtggacttttcagaggtggagagagccagattcatcatcaatgactgggtgaagacacacacaaaaggtatgatcagcaacttgcttgggaaaggagccgtggaccagctgacacggctggtgctggtgaatgccctctacttcaacggccagtggaagactcccttccccgactccagcacccaccgccgcctcttccacaaatcagacggcagcactgtctctgtgcccatgatggctcagaccaacaagttcaactatactgagttcaccacgcccgatggccattactacgacatcctggaactgccctaccacggggacaccctcagcatgttcattgctgccccttatgaaaaagaggtgcctctctctgccctcaccaacattctgagtgcccagctcatcagccactggaaaggcaacatgaccaggctgccccgcctcctggttctgcccaagttctccctggagactgaagtcgacctcaggaagcccctagagaacctgggaatgaccgacatgttcagacagtttcaggctgacttcacgagtctttcagaccaagagcctctccacgtcgcgcaggcgctgcagaaagtgaagatcgaggtgaacgagagtggcacggtggcctcctcatccacagctgtcatagtctcagcccgcatggcccccgaggagatcatcatggacagacccttcctctttgtggtccggcacaaccccacaggaacagtccttttcatgggccaagtgatggaaccctgaccctggggaaagacgccttcatctgggacaaaactggagatgcatcgggaaagaagaaactccgaagaaaagaattttagtgttaatgactctttctgaaggaagagaagacatttgccttttgttaaaagatggtaaaccagatctgtctccaagaccttggcctctccttggaggacctttaggtcaaactccctagtctccacctgagaccctgggagagaagtttgaagcacaactcccttaaggtctccaaaccagacggtgacgcctgcgggaccatctggggcacctgcttccacccgtctctctgcccactcgggtctgcagacctggttcccactgaggccctttgcaggatggaactacggggcttacaggagcttttgtgtgcctggtagaaactatttctgttccagtcacattgccatcactcttgtactgcctgccaccgcggaggaggctggtgacaggccaaaggccagtggaagaaacaccctttcatctcagagtccactgtggcactggccacccctccccagtacaggggtgctgcaggtggcagagtgaatgtcccccatcatgtggcccaactctcctggcctggccatctccctccccagaaacagtgtgcatgggttattttggagtgtaggtgacttgtttactcattgaagcagatttctgcttccttttatttttataggaatagaggaagaaatgtcagatgcgtgcccagctcttcaccccccaatctcttggtggggaggggtgtacctaaatatttatcatatccttgcccttgagtgcttgttagagagaaagagaactactaaggaaaataatattatttaaactcgctcctagtgtttctttgtggtctgtgtcaccgtatctcaggaagtccagccacttgactggcacacacccctccggacatccagcgtgacggagcccacactgccaccttgtggccgcctgagaccctcgcgccccccgcgcccctctttttccccttgatggaaattgaccatacaatttcatcctccttcaggggatcaaaaggacggagtggggggacagagactcagatgaggacagagtggtttccaatgtgttcaatagatttaggagcagaaatgcaaggggctgcatgacctaccaggacagaactttccccaattacagggtgactcacagccgcattggtgactcacttcaatgtgtcatttccggctgctgtgtgtgagcagtggacacgtgaggggggggtgggtgagagagacaggcagctcggattcaactaccttagataatatttctgaaaacctaccagccagagggtagggcacaaagatggatgtaatgcactttgggaggccaaggcgggaggattgcttgagcccaggagttcaagaccagcctgggcaacataccaagacccccgtctctttaaaaatatatatattttaaatatacttaaatatatatttctaatatctttaaatatatatatatattttaaagaccaatttatgggagaattgcacacagatgtgaaatgaatgtaatctaatagaagc

SEQ ID NO: 505 - DNA, 4838 bp, Homo sapiens
attggatcaaacatgtcacaagagtcggacaagtaagtggatcacacgcgccggctgctgctactactaccactttgggctgatggcaactgtaataaaagactagtggccttagtgcccatgcccagtgaccctccattcaatacccgaagagcctacaccagtgaggatgaagcctggaagtcatacttggagaatcccctgacagcagccaccaaggccatgatgagcattaatggtgatgaggacagtgctgctgccctcggcctgctctatgactactacaaggttcctcgagacaagaggctgctgtctgtaagcaaagcaagtgacagccaagaagaccaggagaaaagaaactgccttggcaccagtgaagcccagagtaatttgagtggaggagaaaaccgagtgcaagtcctaaagactgttccagtgaacctttccctaaatcaagatcacctggagaattccaagcgggaacagtacagcatcagcttccccgagagctctgccatcatcccggtgtcgggaatcacggtggtgaaagctgaagatttcacaccagttttcatggccccacctgtgcactatccccggggagatggggaagagcaacgagtggttatctttgaacagactcagtatgacgtgccctcgctggccacccacagcgcctatctcaaagacgaccagcgcagcactccggacagcacatacagcgagagcttcaaggacgcagccacagagaaatttcggagtgcttcagttggggctgaggagtacatgtatgatcagacatcaagtggcacatttcagtacaccctggaagccaccaaatctctccgtcagaagcagggggagggccccatgacctacctcaacaaaggacagttctatgccataacactcagcgagaccggagacaacaaatgcttccgacaccccatcagcaaagtcaggagtgtggtgatggtggtcttcagtgaagacaaaaacagagatgaacagctcaaatactggaaatactggcactctcggcagcatacggcgaagcagagggtccttgacattgccgattacaaggagagctttaatacgattggaaacattgaagagattgcatataatgctgtttcctttacctgggacgtgaatgaagaggcgaagattttcatcaccgtgaattgcttgagcacagatttctcctcccaaaaaggggtgaaaggacttcctttgatgattcagattgacacatacagttataacaatcgtagcaataaacccattcatagagcttattgccagatcaaggtcttctgtgacaaaggagcagaaagaaaaatccgagatgaagagcggaagcagaacaggaagaaagggaaaggccaggcctcccaaactcaatgcaacagctcctctgatgggaagttggctgccatacctttacagaagaagagtgacatcacctacttcaaaaccatgcctgatctccactcacagccagttctcttcatacctgatgttcactttgcaaacctgcagaggaccggacaggtgtattacaacacggatgatgaacgagaaggtggcagtgtccttgttaaacggatgttccggcccatggaagaggagtttggtccagtgccttcaaagcagatgaaagaagaagggacaaagcgagtgctcttgtacgtgaggaaggagactgacgatgtgttcgatgcattgatgttgaagtctcccacagtgaagggcctgatggaagcgatatctgagaaatatgggctgcccgtggagaagatagcaaagctttacaagaaaagcaaaaaaggcatcttggtgaacatggatgacaacatcatcgagcactactcgaacgaggacaccttcatcctcaacatggagagcatggtggagggcttcaaggtcacgctcatggaaatctagccctgggtttggcatccgctttggctggagctctcagtgcgttcctccctgagagagacagaagccccagccccagaacctggagacccatctcccccatctcacaactgctgttacaagaccgtgctggggagtggggcaagggacaggccccactgtcggtgtgcttggcccatccactggcacctaccacggagctgaagcctgagcccctcaggaaggtgccttaggcctgttggattcctatttattgcccaccttttcctggagcccaggtccaggcccgccaggactctgcaggtcactgctagctccagatgagaccgtccagcgttcccccttcaagagaaacactcatcccgaacagcctaaaaaattcccatcccttctctctcacccctccatatctatctcccgagtggctggacaaaatgagctacgtctgggtgcagtagttataggtggggcaagaggtggatgcccactttctggtcagacacctttaggttgctctggggaaggctgtcttgctaaatacctccagggttcccagcaagtggccaccaggccttgtacaggaagacattcagtcaccgtgtaattagtaacacagaaagtctgcctgtctgcattgtacatagtgtttataatattgtaataatatattttacctgtggtatgtgggcatgtttactgccactggcctagaggagacacagacctggagaccgttttaatgggggtttttgcctctgtgcctgttcaagagacttgcagggctaggtagagggcctttgggatgttaaggtgactgcagctgatgccaagatggactctgcaatgggcatacctgggggctcgttccctgtccccagaggaagccccctctccttctccatgggcatgactctccttcgaggccaccacgtttatctcacaatgatgtgttttgcttgactttccctttgcgctgtctcgtgggaaaggtcattctgtctgagaccccagctccttctccagctttggctgcgggcatggcctgagctttctggagagcctctgcagggggtttgccatcagggccctgtggctgggtctgctgcagagctccttggctatcaggagaatcctggacactgtactgtgcctcccagtttacaaacacgcccttcatctcaagtggccctttaaaaggcctgctgccatgtgagagctgtgaacagctcagctctgagtcggcaggctggggcttcctcctgggccaccagatggaaagggggtattgtttgcctcactcctggatgctgcgttttaaggaagtgagtgagaaagaatgtgccaagatacctggctcctgtgaaaccagcctcaggagggaaactgggagagagaagctgtggtctcctgctacatgccctgggagctggaagagaaaaacactcccctaaacaatcgcaaaatgatgaaccatcatgggccactgttctctttgaggggacaggtttaggggtttgcgttcgcccttgtgggctgaagcactagctttttggtagctagacacatcctgcacccaaaggttctctacaaaggcccagatttgtttgtaaagcactttgactcttacctggaggcccgctctctaagggcttcctgcgctcccacctcatctgtccctgagatgcagagcaggatggagggtctgcttctagctcagctgtttctccttgaggttgcggaggaattgaattgaatgggacagagggcaggtgctgtggccaagaagatctccgagcagcagtgacggggcaccttgctgtgtgtcctctgggcatgttaacccttctgtggggccaaaggtttgcatcgtggatccagctgtgctccagtctgtcccctcctcctccactctgactgccacgccccggaccagcagcttggggaccctccagggtactaatggggctctgttctgagatggacaaattcagtgttggaaatacatgttgtactatgcacttcccatgctcctagggttaggaatagtttcaaacatgattggcagacataacaacggcaaatactcggactggggcataggactccagagtaggaaaaagacaaaagatttggcagcctgacacaggcaacctacccctctctctccagcctctttatgaaactgtttgtttgccagtcctgccctaaggcagaagatgaattgaagatgctgtgcatgtttcctaagtccttgagcaatcatggtggtgacaattgccacaagggatatgaggccagtgccaccagagggtggtgccaagtgccacatcccttccgatccattcccctctgcatcctcggagcaccccagtttgcctttgatgtgtccgctgtgtatgttagctgaactttgatgagcaaaatttcctgagcgaaacactccaaagagataggaaaacttgccgcctcttcttttttgtcccttaatcaaactcaaataagcttaaaaaaaatccatggaagatcatggacatgtgaaatgagcatttttttcttttttttttttaacaaagtctgaactgaacagaacaagactttttcctcatacatctccaaattgtttaaacttactttatgagtgtttgtttagaagttcggaccaacagaaaaatgcagtcagatgtcatcttggaattggtttctaaaagagtaaggcatgtccctgcccagaaacttaggaagcatgaaataaatcaaatgtttattttccttcttatttaaaatcatgcaaatgcaacagaaatagagggtttgtgccaaatgctatgaacggccctttcttaaagacaagcaagggagattgatatatgtacaatttgctctcatgtttt

SEQ ID NO: 506 - DNA, 5341 bp, Homo sapiens
cagagctgccccgcgcgctctgctacgggcccgctgggcttccgcgccttctagcttccggagcccactttgatcggggccataatacctattgagatcccctcttctgtcttgtaccttcgccactggcatcggatttgcagaagcgtgcgtgggatcagaggaccgccctccccacaacaaccggcccctgcatcttagcagccgttggaagccccagctcttttaccgccaagttcatccttgggagacagaagacgcgtgatctcctctccgctgctcttggggtctccttgcagccctggccaggcggattcatcctcaggacctaaagttgcccaaggagctcctgctctgccagaggagggtggagagggcggtgggaggcgtgtgcctgagtgggctctactgccttgttccatattatttggtgcacattttccctggcactctgggttgctagccccgccgggcactgggcctcagacactgcgcggttccctcggagcagcaagctaaagaaagcccccagtgccggcgaggaaggaggcggcggggaaagatgcgcggcgttggctggcagatgctgtccctgtcgctggggttagtgctggcgatcctgaacaaggtggcaccgcaggcgtgcccggcgcagtgctcttgctcgggcagcacagtggactgtcacgggctggcgctgcgcagcgtgcccaggaatatcccccgcaacaccgagagactggatttaaatggaaataacatcacaagaattacgaagacagattttgctggtcttagacatctaagagttcttcagcttatggagaataagattagcaccattgaaagaggagcattccaggatcttaaagaactagagagactgcgtttaaacagaaatcaccttcagctgtttcctgagttgctgtttcttgggactgcgaagctatacaggcttgatctcagtgaaaaccaaattcaggcaatcccaaggaaagctttccgtggggcagttgacataaaaaatttgcaactggattacaaccagatcagctgtattgaagatggggcattcagggctctccgggacctggaagtgctcactctcaacaataacaacattactagactttctgtggcaagtttcaaccatatgcctaaacttaggacttttcgactgcattcaaacaacctgtattgtgactgccacctggcctggctctccgactggcttcgccaaaggcctcgggttggtctgtacactcagtgtatgggcccctcccacctgagaggccataatgtagccgaggttcaaaaacgagaatttgtctgcagtggtaagggagaaggaagaaggtcaccagtcatttatggctccttcttgtagtgttttgcactgccctgccgcctgtacctgtagcaacaatatcgtagactgtcgtgggaaaggtctcactgagatccccacaaatcttccagagaccatcacagaaatacgtttggaacagaacacaatcaaagtcatccctcctggagctttctcaccatataaaaagcttagacgaattgacctgagcaataatcagatctctgaacttgcaccagatgctttccaaggactacgctctctgaattcacttgtcctctatggaaataaaatcacagaactccccaaaagtttatttgaaggactgttttccttacagctcctattattgaatgccaacaagataaactgccttcgggtagatgcttttcaggatctccacaacttgaaccttctctccctatatgacaacaagcttcagaccatcgccaaggggaccttttcacctcttcgggccattcaaactatgcatttggcccagaacccctttatttgtgactgccatctcaagtggctagcggattatctccataccaacccgattgagaccagtggtgcccgttgcaccagcccccgccgcctggcaaacaaaagaattggacagatcaaaagcaagaaattccgttgttcagctaaagaacagtatttcattccaggtacagaagattatcgatcaaaattaagtggagactgctttgcggatctggcttgccctgaaaagtgtcgctgtgaaggaaccacagtagattgctctaatcaaaagctcaacaaaatcccggagcacattccccagtacactgcagagttgcgtctcaataataatgaatttaccgtgttggaagccacaggaatctttaagaaacttcctcaattacgtaaaataaactttagcaacaataagatcacagatattgaggagggagcatttgaaggagcatctggtgtaaatgaaatacttcttacgagtaatcgtttggaaaatgtgcagcataagatgttcaagggattggaaagcctcaaaactttgatgttgagaagcaatcgaataacctgtgtggggaatgacagtttcataggactcagttctgtgcgtttgctttctttgtatgataatcaaattactacagttgcaccaggggcatttgatactctccattctttatctactctaaacctcttggccaatccttttaactgtaactgctacctggcttggttgggagagtggctgagaaagaagagaattgtcacgggaaatcctagatgtcaaaaaccatacttcctgaaagaaatacccatccaggatgtggccattcaggacttcacttgtgatgacggaaatgatgacaatagttgctccccactttctcgctgtcctactgaatgtacttgcttggatacagtcgtccgatgtagcaacaagggtttgaaggtcttgccgaaaggtattccaagagatgtcacagagttgtatctggatggaaaccaatttacactggttcccaaggaactctccaactacaaacatttaacacttatagacttaagtaacaacagaataagcacgctttctaatcagagcttcagcaacatgacccagctcctcaccttaattcttagttacaaccgtctgagatgtattcctcctcgcacctttgatggattaaagtctcttcgattactttctctacatggaaatgacatttctgttgtgcctgaaggtgctttcaatgatctttctgcattatcacatctagcaattggagccaaccctctttactgtgattgtaacatgcagtggttatccgactgggtgaagtcggaatataaggagcctggaattgctcgttgtgctggtcctggagaaatggcagataaacttttactcacaactccctccaaaaaatttacctgtcaaggtcctgtggatgtcaatattctagctaagtgtaacccctgcctatcaaatccgtgtaaaaatgatggcacatgtaatagtgatccagttgacttttaccgatgcacctgtccatatggtttcaaggggcaggactgtgatgtcccaattcatgcctgcatcagtaacccatgtaaacatggaggaacttgccacttaaaggaaggagaagaagatggattctggtgtatttgtgctgatggatttgaaggagaaaattgtgaagtcaacgttgatgattgtgaagataatgactgtgaaaataattctacatgtgtcgatggcattaataactacacatgcctttgcccacctgagtatacaggtgagttgtgtgaggagaagctggacttctgtgcccaggacctgaacccctgccagcacgattcaaagtgcatcctaactccaaagggattcaaatgtgactgcacaccagggtacgtaggtgaacactgcgacatcgattttgacgactgccaagacaacaagtgtaaaaacggagcccactgcacagatgcagtgaacggctatacgtgcatatgccccgaaggttacagtggcttgttctgtgagttttctccacccatggtcctccctcgtaccagcccctgtgataattttgattgtcagaatggagctcagtgtatcgtcagaataaatgagccaatatgtcagtgtttgcctggctatcagggagaaaagtgtgaaaaattggttagtgtgaattttataaacaaagagtcttatcttcagattccttcagccaaggttcggcctcagacgaacataacacttcagattgccacagatgaagacagcggaatcctcctgtataagggtgacaaagaccatatcgcggtagaactctatcgggggcgtgttcgtgccagctatgacaccggctctcatccagcttctgccatttacagtgtggagacaatcaatgatggaaacttccacattgtggaactacttgccttggatcagagtctctctttgtccgtggatggtgggaaccccaaaatcatcactaacttgtcaaagcagtccactctgaattttgactctccactctatgtaggaggcatgccagggaagagtaacgtggcatctctgcgccaggcccctgggcagaacggaaccagcttccacggctgcatccggaacctttacatcaacagtgagctgcaggacttccagaaggtgccgatgcaaacaggcattttgcctggctgtgagccatgccacaagaaggtgtgtgcccatggcacatgccagcccagcagccaggcaggcttcacctgcgagtgccaggaaggatggatggggcccctctgtgaccaacggaccaatgacccttgccttggaaataaatgcgtacatggcacctgcttgcccatcaatgcgttctcctacagctgtaagtgcttggagggccatggaggtgtcctctgtgatgaagaggaggatctgtttaacccatgccaggcgatcaagtgcaagcatgggaagtgcaggctttcaggtctggggcagccctactgtgaatgcagcagtggatacacgggggacagctgtgatcgagaaatctcttgtcgaggggaaaggataagagattattaccaaaagcagcagggctatgctgcttgccaaacaaccaagaaggtgtcccgattagagtgcagaggtgggtgtgcaggagggcagtgctgtggaccgctgaggagcaagcggcggaaatactctttcgaatgcactgacggctcctcctttgtggacgaggttgagaaagtggtgaagtgcggctgtacgaggtgtgtgtcctaaacacactcccggcagctctgtctttggaaaaggttgtatacttcttgaccgtgtgggactaatgaatgcttcatagtggaaatatttgaaatatattgtaaaatacagaacagacttatttttattatgagaataaagactttttttctgcatttggaaaaaaaaaaaaa

SEQ ID NO: 507 - DNA, 2075 bp, Homo sapiens
agtagcattggggctggcgcgcgcggcgaatctcaacgctgcgccgtctgcgggcgcttccgggccaccagtttctctgctttccaccctggcgccccccagccctggctccccagctgcgctgccccgggcgtccacgccctgcgggcttagcgggttcagtgggctcaatctgcgcagcgccacctccatgttgaccaagcctctacaggggcctcccgcgccccccgggacccccacgccgccgccaggaggcaaggatcgggaagcgttcgaggccgagtatcgactcggccccctcctgggtaaggggggctttggcaccgtcttcgcaggacaccgcctcacagatcgactccaggtggccatcaaagtgattccccggaatcgtgtgctgggctggtcccccttgtcagactcagtcacatgcccactcgaagtcgcactgctatggaaagtgggtgcaggtggtgggcaccctggcgtgatccgcctgcttgactggtttgagacacaggagggcttcatgctggtcctcgagcggcctttgcccgcccaggatctctttgactatatcacagagaagggcccactgggtgaaggcccaagccgctgcttctttggccaagtagtggcagccatccagcactgccattcccgtggagttgtccatcgtgacatcaaggatgagaacatcctgatagacctacgccgtggctgtgccaaactcattgattttggttctggtgccctgcttcatgatgaaccctacactgactttgatgggacaagggtgtacagccccccagagtggatctctcgacaccagtaccatgcactcccggccactgtctggtcactgggcatcctcctctatgacatggtgtgtggggacattccctttgagagggaccaggagattctggaagctgagctccacttcccagcccatgtctccccagactgctgtgccctaatccgccggtgcctggcccccaaaccttcttcccgaccctcactggaagagatcctgctggacccctggatgcaaacaccagccgaggatgtacccctcaacccctccaaaggaggccctgcccctttggcctggtccttgctaccctaagcctggcctggcctggcctggcccccaatggtcagaagagccatcccatggccatgtcacagggatagatggacatttgttgacttggttttacaggtcattaccagtcattaaagtccagtattactaaggtaagggattgaggatcaggggttagaagacataaaccaagtctgcccagttcccttcccaatcctacaaaggagccttcctcccagaacctgtggtccctgattctggagggggaacttcttgcttctcattttgctaaggaagtttattttggtgaagttgttcccattctgagccccgggactcttattctgatgatgtgtcaccccacattggcacctcctactaccaccacacaaacttagttcatatgctcttacttgggcaagggtgctttccttccaataccccagtagcttttattttagtaaagggaccctttcccctagcctagggtcccatattgggtcaagctgcttacctgcctcagcccaggattctttattctgggggaggtaatgccctgttgttaccccaaggcttcttttttttttttttttttttgggtgaggggaccctactctgttatcccaagtgctcttattctggtgagaagaaccttacttccataatttgggaaggaatggaagatggacaccaccggacaccaccagacactaggatgggatggatggttttttgggggatgggctaggggaaataaggcttgctgtttgttctcctggggcgctccctccaacttttgcagattcttgcaacctcctcctgagccgggattgtccaattactaaaatgtaaataatcacgtattgtggggaggggagttccaagtgtgccctcctctcttctcctgcctggattatttaaaaagccatgtgtggaaacccactatttaataaaagtaatagaatcagaa

SEQ ID NO: 508 - DNA, 6584 bp, Homo sapiens
tttctgtactctgggtgactcagagagggaagagattcagccagcacactcctcgcgagcaagtcagaagaaagccccgagatcacagagacccggcgagatcacagagacccggcctgaaggaacgtggaaagaccaatgtacctgttttgaccggttgcctggagcaagaagttccagttggggagaattttcagaagataaagtcggagattgtggaaagacttgacttgcagcattactctactgactggcagagacaggagaggtagatgtccacgcccacagaccctggtgcgatgccccacccagggccttcgccggggcctgggccttcccctgggccaattcttgggcctagtccaggaccaggaccatccccaggttccgtccacagcatgatggggccaagtcctggacctccaagtgtctcccatcctatgccgacgatggggtccacagacttcccacaggaaggcatgcatcaaatgcataagcccatcgatggtatacatgacaaggggattgtagaagacatccattgtggatccatgaagggcactggtatgcgaccacctcacccaggcatgggccctccccagagtccaatggatcaacacagccaaggttatatgtcaccacacccatctccattaggagccccagagcacgtctccagccctatgtctggaggaggcccaactccacctcagatgccaccaagccagccgggggccctcatcccaggtgatccgcaggccatgagccagcccaacagaggtccctcacctttcagtcctgtccagctgcatcagcttcgagctcagattttagcttataaaatgctggcccgaggccagcccctccccgaaacgctgcagcttgcagtccaggggaaaaggacgttgcctggcttgcagcaacaacagcagcagcaacagcagcagcagcagcagcagcagcagcagcagcagcagcaacagcagccgcagcagcagccgccgcaaccacagacgcagcaacaacagcagccggcccttgttaactacaacagaccatctggcccggggccggagctgagcggcccgagcaccccgcagaagctgccggtgcccgcgcccggcggccggccctcgcccgcgccccccgcagccgcgcagccgcccgcggccgcagtgcccgggccctcagtgccgcagccggccccggggcagccctcgcccgtcctccagctgcagcagaagcagagccgcatcagccccatccagaaaccgcaaggcctggaccccgtggaaattctgcaagagcgggaatacagacttcaggcccgcatagctcataggatacaagaactggaaaatctgcctggctctttgccaccagatttaagaaccaaagcaaccgtggaactaaaagcacttcggttactcaatttccagcgtcagctgagacaggaggtggtggcctgcatgcgcagggacacgaccctggagacggctctcaactccaaagcatacaaacggagcaagcgccagactctgagagaagctcgcatgaccgagaagctggagaagcagcagaagattgagcaggagaggaaacgccgtcagaaacaccaggaatacctgaacagtattttgcaacatgcaaaagattttaaggaatatcatcggtctgtggccggaaagatccagaagctctccaaagcagtggcaacttggcatgccaacactgaaagagagcagaagaaggagacagagcggattgaaaaggagagaatgcggcgactgatggctgaagatgaggagggttatagaaaactgattgatcaaaagaaagacaggcgtttagcttaccttttgcagcagaccgatgagtatgtagccaatctgaccaatctggtttgggagcacaagcaagcccaggcagccaaagagaagaagaagaggaggaggaggaagaagaaggctgaggagaatgcagagggtggggagtctgccctgggaccggatggagagcccatagatgagagcagccagatgagtgacctccctgtcaaagtgactcacacagaaaccggcaaggttctgttcggaccagaagcacccaaagcaagtcagctggacgcctggctggaaatgaatcctggttatgaagttgcccctagatctgacagtgaagagagtgattctgattatgaggaagaggatgaggaagaagagtccagtaggcaggaaaccgaagagaaaatactcctggatccaaatagcgaagaagtttctgagaaggatgctaagcagatcattgagacagctaagcaagacgtggatgatgaatacagcatgcagtacagtgccaggggctcccagtcctactacaccgtggctcatgccatctcggagagggtggagaaacagtctgccctcctaattaatgggaccctaaagcattaccagctccagggcctggaatggatggtttccctgtataataacaacttgaacggaatcttagccgatgaaatggggcttggaaagaccatacagaccattgcactcatcacttatctgatggagcacaaaagactcaatggcccctatctcatcattgttcccctttcgactctatctaactggacatatgaatttgacaaatgggctccttctgtggtgaagatttcttacaagggtactcctgccatgcgtcgctcccttgtcccccagctacggagtggcaaattcaatgtcctcttgactacttatgagtatattataaaagacaagcacattcttgcaaagattcggtggaaatacatgatagtggacgaaggccaccgaatgaagaatcaccactgcaagctgactcaggtcttgaacactcactatgtggcccccagaaggatcctcttgactgggaccccgctgcagaataagctccctgaactctgggccctcctcaacttcctcctcccaacaatttttaagagctgcagcacatttgaacaatggttcaatgctccatttgccatgactggtgaaagggtggacttaaatgaagaagaaactatattgatcatcaggcgtctacataaggtgttaagaccatttttactaaggagactgaagaaagaagttgaatcccagcttcccgaaaaagtggaatatgtgatcaagtgtgacatgtcagctctgcagaagattctgtatcgccatatgcaagccaaggggatccttctcacagatggttctgagaaagataagaaggggaaaggaggtgctaagacacttatgaacactattatgcagttgagaaaaatctgcaaccacccatatatgtttcagcacattgaggaatcctttgctgaacacctaggctattcaaatggggtcatcaatggggctgaactgtatcgggcctcagggaagtttgagctgcttgatcgtattctgccaaaattgagagcgactaatcaccgagtgctgcttttctgccagatgacatctctcatgaccatcatggaggattattttgcttttcggaacttcctttacctacgccttgatggcaccaccaagtctgaagatcgtgctgctttgctgaagaaattcaatgaacctggatcccagtatttcattttcttgctgagcacaagagctggtggcctgggcttaaatcttcaggcagctgatacagtggtcatctttgacagcgactggaatcctcatcaggatctgcaggcccaagaccgagctcaccgcatcgggcagcagaacgaggtccgggtactgaggctctgtaccgtgaacagcgtggaggaaaagatcctcgcggccgcaaaatacaagctgaacgtggatcagaaagtgatccaggcgggcatgtttgaccaaaagtcttcaagccacgagcggagggcattcctgcaggccatcttggagcatgaggaggaaaatgaggaagaagatgaagtaccggacgatgagactctgaaccaaatgattgctcgacgagaagaagaatttgacctttttatgcggatggacatggaccggcggagggaagatgcccggaacccgaaacggaagccccgtttaatggaggaggatgagctgccctcctggatcattaaggatgacgctgaagtagaaaggctcacctgtgaagaagaggaggagaaaatatttgggagggggtcccgccagcgccgtgacgtggactacagtgacgccctcacggagaagcagtggctaaggacttcattaaatctagaggcagttgagcatgggagccgtctgtatgttgaattagggctcgcactcttgcgcaacacgtcaccagtcggaaactgggggtttgcttctgtgatttatttcattattgtgctggtaaaaggtttggaagggaattctttttgggggtagtactttagcattgtgtagcaagttttggggttttttttgtgtgtgaccccccagcccccagcgctgagtttgagtcagttgagccagtttagtaaataattttttaaaataaaagaacagtttaaaatctccatgaataattttacttacatgcaggagtaatcttactctactctttatgtgcgaaaagcattgggaagtgtttagtgaattgatttccattagaaaaagacccttagaaatcacagaacataaagcactgcatatggatgtgtttggggtctttggggaggagggaagatgttttgtagctctctgcattcctgcataaaaccttagtttgaggggaataatgctgatgaagagactagcagctcgctgctttgctggcttgttaattttatccccactaactgtgatttctgatagccggcctgctgatagtggtaagtgctgctggctctggtttaaagcaagcgtttgcaggccatcgaagacggcaatttggaggaaatggaagaggaagtacggcttaagaagcgaaaaagacgaagaaatgtggataaagatcctgcaaaagaagatgtggaaaaagctaagaagagaagaggccgccctcccgctgagaaactgtcaccaaatccccccaaactgacaaagcagatgaacgctatcatcgatactgtgataaactacaaagataggtgtaacgtggagaaggtgcccagtaattctcagttggaaatagaaggaaacagttcagggcgacagctcagtgaagtcttcattcagttaccttcaaggaaagaattaccagaatactatgaattaattaggaagccagtggatttcaaaaaaataaaggaaaggattcgtaatcataagtaccggagcctaggcgacctggagaaggatgtcatgcttctctgtcacaacgctcagacgttcaacctggagggatcccagatctatgaagactccatcgtcttacagtcagtgtttaagagtgcccggcagaaaattgccaaagaggaagagagtgaggatgaaagcaatgaagaggaggaagaggaagatgaagaagagtcagagtccgaggcaaaatcagtcaaggtgaaaattaagctcaataaaaaagatgacaaaggccgggacaaagggaaaggcaagaaaaggccaaatcgaggaaaagccaaacctgtagtgagcgattttgacagcgatgaggagcaggatgaacgtgaacagtcagaaggaagtgggacggatgatgagtgatcagtatggacctttttccttggtagaactgaattccttcctcccctgtctcatttctacccagtgagttcatttgtcatataggcactgggttgtttctatatcatcatcgtctataaactagctttaggatagtgccagacaaacatatgatatcatggtgtaaaaaacacacacatacacaaatatttgtaacatattgtgaccaaatgggcctcaaagattcagattgaaacaaacaaaaagcttttgatggaaaatatgtgggtggatagtatatttctatgggtgggtctaatttggtaacggtttgattgtgcctggttttatcacctgttcagatgagaagatttttgtcttttgtagcactgataaccaggagaagccattaaaagccactggttattttatttttcatcaggcaattttcgaggtttttatttgttcggtattgtttttttacactgtggtacatataagcaactttaataggtgataaatgtacagtagttagatttcacctgcatatacatttttccattttatgctctatgatctgaacaaaagctttttgaattgtataagatttatgtctactgtaaacattgcttaatttttttgctcttgatttaaaaaaaagttttgttgaaagcgctattgaatattgcaatctatatagtgtattggatggcttcttttgtcaccctgatctcctatgttaccaatgtgtatcgtctccttctccctaaagtgtacttaatctttgctttctttgcacaatgtctttggttgcaagtcataagcctgaggcaaataaaattccagtaatttcgaagaatgtggtgttggtgctttcctaataaagaaataatttagcttgacaaa

SEQ ID NO: 509 - DNA, 333 bp, Homo sapiens
gcggagggaagctcatcagtggggccacgagctgagtgcgtcctgtcactccactcccatgtcccttgggaaggtctgagactagggccagaggcggccctaacagggctctccctgagcttcggggaggtgagttcccagagaacggggctccgcgcgaggtcagactgggcaggagatgccgtggaccccgcccttcggggaggggcccggcggatgcctcctttgccggagcttggaacagactcacggccagcgaagtgagttcaatggctgaggtgaggtaccccgcaggggacctcataacccaattcagactactctcctccgccc

SEQ ID NO: 510 - DNA, 1012 bp, Homo sapiens; identical to SEQ ID NO: 53

SEQ ID NO: 511 - DNA, 4120 bp, Homo sapiens; identical to SEQ ID NO: 68

SEQ ID NO: 512 - DNA, 14385 bp, Homo sapiens
gcagacctaaaggagcgttcgctagcagaggcgctgccggtgcggtgtgctacgcgcgcccacctcccggggaaggaacggcgaggccggggaccgtcgcggagatggatcgcgggccggcagcagtggcgtgcacgctgctcctggctctcgtcgcctgcctagcgccggccagtggccaagaatgtgacagtgcgcattttcgctgtggaagtgggcattgcatccctgcagactggaggtgtgatgggaccaaagactgttcagatgacgcggatgaaattggctgcgctgttgtgacctgccagcagggctatttcaagtgccagagtgagggacaatgcatccccaactcctgggtgtgtgaccaagatcaagactgtgatgatggctcagatgaacgtcaagattgctcacaaagtacatgctcaagtcatcagataacatgctccaatggtcagtgtatcccaagtgaatacaggtgcgaccacgtcagagactgccccgatggagctgatgagaatgactgccagtacccaacatgtgagcagcttacttgtgacaatggggcctgctataacaccagtcagaagtgtgattggaaagttgattgcagggactcctcagatgaaatcaactgcactgagatatgcttgcacaatgagttttcatgtggcaatggagagtgtatccctcgtgcttatgtctgtgaccatgacaatgattgccaagacggcagtgacgaacatgcttgcaactatccgacctgcggtggttaccagttcacttgccccagtggccgatgcatttatcaaaactgggtttgtgatggagaagatgactgtaaagataatggagatgaagatggatgtgaaagcggtcctcatgatgttcataaatgttccccaagagaatggtcttgcccagagtcgggacgatgcatctccatttataaagtttgtgatgggattttagattgcccaggaagagaagatgaaaacaacactagtaccggaaaatactgtagtatgactctgtgctctgccttgaactgccagtaccagtgccatgagacgccgtatggaggagcgtgtttttgtcccccaggttatatcatcaaccacaatgacagccgtacctgtgttgagtttgatgattgccagatatggggaatttgtgaccagaagtgtgaaagccgacctggccgtcacctgtgccactgtgaagaagggtatatcttggagcgtggacagtattgcaaagctaatgattcctttggcgaggcctccattatcttctccaatggtcgggatttgttaattggtgatattcatggaaggagcttccggatcctagtggagtctcagaatcgtggagtggccgtgggtgtggctttccactatcacctgcaaagagttttttggacagacaccgtgcaaaataaggttttttcagttgacattaatggtttaaatatccaagaggttctcaatgtttctgttgaaaccccagagaacctggctgtggactgggttaataataaaatctatctagtggaaaccaaggtcaaccgcatagatatggtaaatttggatggaagctatcgggttacccttataactgaaaacttggggcatcctagaggaattgccgtggacccaactgttggttatttatttttctcagattgggagagcctttctggggaacctaagctggaaagggcattcatggatggcagcaaccgtaaagacttggtgaaaacaaagctgggatggcctgctggggtaactctggatatgatatcgaagcgtgtttactgggttgactctcggtttgattacattgaaactgtaacttatgatggaattcaaaggaagactgtagttcatggaggctccctcattcctcatccctttggagtaagcttatttgaaggtcaggtgttctttacagattggacaaagatggccgtgctgaaggcaaacaagttcacagagaccaacccacaagtgtactaccaggcttccctgaggccctatggagtgactgtttaccattccctcagacagccctatgctaccaatccgtgtaaagataacaatgggggctgtgagcaggtctgtgtcctcagccacagaacagataatgatggtttgggtttccgttgcaagtgcacattcggcttccaactggatacagatgagcgccactgcattgctgttcagaatttcctcattttttcatcccaagttgctattcgtgggatcccgttcaccttgtctacccaggaagatgtcatggttccagtttcggggaatccttctttctttgtcgggattgattttgacgcccaggacagcactatctttttttcagatatgtcaaaacacatgatttttaagcaaaagattgatggcacaggaagagaaattctcgcagctaacagggtggaaaatgttgaaagtttggcttttgattggatttcaaagaatctctattggacagactctcattacaagagtatcagtgtcatgaggctagctgataaaacgagacgcacagtagttcagtatttaaataacccacggtcggtggtagttcatccttttgccgggtatctattcttcactgattggttccgtcctgctaaaattatgagagcatggagtgacggatctcacctcttgcctgtaataaacactactcttggatggcccaatggcttggccatcgattgggctgcttcacgattgtactgggtagatgcctattttgataaaattgagcacagcacctttgatggtttagacagaagaagactgggccatatagagcagatgacacatccgtttggacttgccatctttggagagcatttattttttactgactggagactgggtgccattattcgagtcaggaaagcagatggtggagaaatgacagttatccgaagtggcattgcttacatactgcatttgaaatcgtatgatgtcaacatccagactggttctaacgcctgtaatcaacccacgcatcctaacggtgactgcagccacttctgcttcccggtgccaaatttccagcgagtgtgtgggtgcccttatggaatgaggctggcttccaatcacttgacatgcgagggggacccaaccaatgaaccacccacagagcagtgtggcttattttccttcccctgtaaaaatggcagatgtgtgcccaattactatctctgtgatggagtcgatgattgtcatgataacagtgatgagcaactatgtggcacacttaataatacctgttcatcttcggcgttcacctgtggccatggggagtgcattcctgcacactggcgctgtgacaaacgcaacgactgtgtggatggcagtgatgagcacaactgccccacccacgcacctgcttcctgccttgacacccaatacacctgtgataatcaccagtgtatctcaaagaactgggtctgtgacacagacaatgattgtggggatggatctgatgaaaagaactgcaattcgacagagacatgccaacctagtcagtttaattgccccaatcatcgatgtattgacctatcgtttgtctgtgatggtgacaaggattgtgttgatggatctgatgaggttggttgtgtattaaactgtactgcttctcaattcaagtgtgccagtggggataaatgtattggcgtcacaaatcgttgtgatggtgtttttgattgcagtgacaactcggatgaagcaggctgtccaaccaggcctcctggtatgtgccactcagatgaatttcagtgccaagaagatggtatctgcatcccgaacttctgggaatgtgatgggcatccagactgcctctatggatctgatgagcacaatgcctgtgtccccaagacttgcccttcatcatatttccactgtgacaacggaaactgcatccacagggcatggctctgtgatcgggacaatgactgcggggatatgagtgatgagaaggactgccctactcagccctttcgctgtcctagttggcaatggcagtgtcttggccataacatctgtgtgaatctgagtgtagtgtgtgatggcatctttgactgccccaatgggacagatgagtccccactttgcaatgggaacagctgctcagatttcaatggtggttgtactcacgagtgtgttcaagagccctttggggctaaatgcctatgtccattgggattcttacttgccaatgattctaagacctgtgaagacatagatgaatgtgatattctaggctcttgtagccagcactgttacaatatgagaggttctttccggtgctcgtgtgatacaggctacatgttagaaagtgatgggaggacttgcaaagttacagcatctgagagtctgctgttacttgtggcaagtcagaacaaaattattgccgacagtgtcacctcccaggtccacaatatctattcattggtcgagaatggttcttacattgtagctgttgattttgattcaattagtggtcgtatcttttggtctgatgcaactcagggtaaaacctggagtgcgtttcaaaatggaacggacagaagagtggtatttgacagtagcatcatcttgactgaaactattgcaatagattgggtaggtcgtaatctttactggacagactatgctctggaaacaattgaagtctccaaaattgatgggagccacaggactgtgctgattagtaaaaacctaacaaatccaagaggactagcattagatcccagaatgaatgagcatctactgttctggtctgactggggccaccaccctcgcatcgagcgagccagcatggacggcagcatgcgcactgtcattgtccaggacaagatcttctggccctgcggcttaactattgactaccccaacagactgctctacttcatggactcctatcttgattacatggacttttgtgattataatggacaccatcggagacaggtgatagccagtgatttgattatacggcacccctatgccctaactctctttgaagactctgtgtactggactgaccgtgctactcgtcgggttatgcgagccaacaagtggcatggagggaaccagtcagttgtaatgtataatattcaatggccccttgggattgttgcggttcatccttcgaaacaaccaaattccgtgaatccatgtgccttttcccgctgcagccatctctgcctgctttcctcacaggggcctcatttttactcctgtgtttgtccttcaggatggagtctgtctcctgatctcctgaattgcttgagagatgatcaacctttcttaataactgtaaggcaacatataatttttggaatctcccttaatcctgaggtgaagagcaatgatgctatggtccccatagcagggatacagaatggtttagatgttgaatttgatgatgctgagcaatacatctattgggttgaaaatccaggtgaaattcacagagtgaagacagatggcaccaacaggacagtatttgcttctatatctatggtggggccttctatgaacctggccttagattggatttcaagaaacctttattctaccaatcctagaactcagtcaatcgaggttttgacactccacggagatatcagatacagaaaaacattgattgccaatgatgggacagctcttggagttggctttccaattggcataactgttgatcctgctcgtgggaagctgtactggtcagaccaaggaactgacagtggggttcctgccaagatcgccagtgctaacatggatggcacatctgtgaaaactctctttactgggaacctcgaacacctggagtgtgtcactcttgacatcgaagagcagaaactctactgggcagtcactggaagaggagtgattgaaagaggaaacgtggatggaacagatcgaatgatcctggtacaccagctttcccacccctggggaattgcagtccatgattctttcctttattatactgatgaacagtatgaggtcattgaaagagttgataaggccactggggccaacaaaatagtcttgagagataatgttccaaatctgaggggtcttcaagtttatcacagacgcaatgccgccgaatcctcaaatggctgtagcaacaacatgaatgcctgtcagcagatttgcctgcctgtaccaggaggattgttttcctgcgcctgtgccactggatttaaactcaatcctgataatcggtcctgctctccatataactctttcattgttgtttcaatgctgtctgcaatcagaggctttagcttggaattgtcagatcattcagaaaccatggtgccggtggcaggccaaggacgaaacgcactgcatgtggatgtggatgtgtcctctggctttatttattggtgtgattttagcagctcagtggcatctgataatgcgatccgtagaattaaaccagatggatcttctctgatgaacattgtgacacatggaataggagaaaatggagtccggggtattgcagtggattgggtagcaggaaatctttatttcaccaatgcctttgtttctgaaacactgatagaagttctgcggatcaatactacttaccgccgtgttcttcttaaagtcacagtggacatgcctaggcatattgttgtagatcccaagaacagatacctcttctgggctgactatgggcagagaccaaagattgagcgttctttccttgactgtaccaatcgaacagtgcttgtgtcagagggcattgtcacaccacggggcttggcagtggaccgaagtgatggctacgtttattgggttgatgattctttagatataattgcaaggattcgtatcaatggagagaactctgaagtgattcgttatggcagtcgttacccaactccttatggcatcactgtttttgaaaattctatcatatgggtagataggaatttgaaaaagatcttccaagccagcaaggaaccagagaacacagagccacccacagtgataagagacaatatcaactggctaagagatgtgaccatctttgacaagcaagtccagccccggtcaccagcagaggtcaacaacaacccttgcttggaaaacaatggtgggtgctctcatctctgctttgctctgcctggattgcacaccccaaaatgtgactgtgcctttgggaccctgcaaagtgatggcaagaattgtgccatttcaacagaaaatttcctcatctttgccttgtctaattccttgagaagcttacacttggaccctgaaaaccatagcccacctttccaaacaataaatgtggaaagaactgtcatgtctctagactatgacagtgtaagtgatagaatctacttcacacaaaatttagcctctggagttggacagatttcctatgccaccctgtcttcagggatccatactccaactgtcattgcttcaggtatagggactgctgatggcattgcctttgactggattactagaagaatttattacagtgactacctcaaccagatgattaattccatggctgaagatgggtctaaccgcactgtgatagcccgcgttccaaaaccaagagcaattgtgttagatccctgccaagggtacctgtactgggctgactgggatacacatgccaaaatcgagagagccacattgggaggaaacttccgcgtacccattgtgaacagcagtctggtcatgcccagtgggctgactctggactatgaagaggaccttctctactgggtggatgctagtctgcagaggattgaacgcagcactctgacgggcgtggatcgtgaagtcattgtcaatgcagccgttcatgcttttggcttgactctctatggccagtatatttactggactgacttgtacacacaaagaatttaccgagctaacaaatatgacgggtcaggtcagattgcaatgaccacaaatttgctctcccagcccaggggaatcaacactgttgtgaagaaccagaaacaacagtgtaacaatccttgtgaacagtttaatgggggctgcagccatatctgtgcaccaggtccaaatggtgccgagtgccagtgtccacatgagggcaactggtatttggccaacaacaggaagcactgcattgtggacaatggtgaacgatgtggtgcatcttccttcacctgctccaatgggcgctgcatctcggaagagtggaagtgtgataatgacaacgactgtggggatggcagtgatgagatggaaagtgtctgtgcacttcacacctgctcaccgacagccttcacctgtgccaatgggcgatgtgtccaatactcttaccgctgtgattactacaatgactgtggtgatggcagtgatgaggcagggtgcctgttcagggactgcaatgccaccacggagtttatgtgcaataacagaaggtgcatacctcgtgagtttatctgcaatggtgtagacaactgccatgataataacacttcagatgagaaaaattgccctgatcgcacttgccagtctggatacacaaaatgtcataattcaaatatttgtattcctcgcgtttatttgtgtgacggagacaatgactgtggagataacagtgatgaaaaccctacttattgcaccactcacacgtgcagcagcagtgagttccaatgcgcatctgggcgctgtattcctcaacattggtattgtgatcaagaaacagattgttttgatgcctctgatgaacctgcctcttgtggtcactctgagcgaacatgcctagctgatgagttcaagtgtgatggtgggaggtgcatcccaagcgaatggatctgtgacggtgataatgactgtggggatatgagtgacgaggataaaaggcaccagtgtcagaatcaaaactgctcggattccgagtttctctgtgtaaatgacagacctccggacaggaggtgcattccccagtcttgggtctgtgatggcgatgtggattgtactgacggctacgatgagaatcagaattgcaccaggagaacttgctctgaaaatgaattcacctgtggttacggactgtgtatcccaaagatattcaggtgtgaccggcacaatgactgtggtgactatagcgacgagaggggctgcttataccagacttgccaacagaatcagtttacctgtcagaacgggcgctgcattagtaaaaccttcgtctgtgatgaggataatgactgtggagacggatctgatgagctgatgcacctgtgccacaccccagaacccacgtgtccacctcacgagttcaagtgtgacaatgggcgctgcatcgagatgatgaaactctgcaaccacctagatgactgtttggacaacagcgatgagaaaggctgtggcattaatgaatgccatgacccttcaatcagtggctgcgatcacaactgcacagacaccttaaccagtttctattgttcctgtcgtcctggttacaagctcatgtctgacaagcggacttgtgttgatattgatgaatgcacagagatgccttttgtctgtagccagaagtgtgagaatgtaataggctcctacatctgtaagtgtgccccaggctacctccgagaaccagatggaaagacctgccggcaaaacagtaacatcgaaccctatctcatttttagcaaccgttactatttgagaaatttaactatagatggctatttttactccctcatcttggaaggactggacaatgttgtggcattagattttgaccgagtagagaagagattgtattggattgatacacagaggcaagtcattgagagaatgtttctgaataagacaaacaaggagacaatcataaaccacagactaccagctgcagaaagtctggctgtagactgggtttccagaaagctctactggttggatgcccgcctggatggcctctttgtctctgacctcaatggtggacaccgccgcatgctggcccagcactgtgtggatgccaacaacaccttctgctttgataatcccagaggacttgcccttcaccctcaatatgggtacctctactgggcagactggggtcaccgcgcatacattgggagagtaggcatggatggaaccaacaagtctgtgataatctccaccaagttagagtggcctaatggcatcaccattgattacaccaatgatctactctactgggcagatgcccacctgggttacatagagtactctgatttggagggccaccatcgacacacggtgtatgatggggcactgcctcaccctttcgctattaccatttttgaagacactatttattggacagattggaatacaaggacagtggaaaagggaaacaaatatgatggatcaaatagacagacactggtgaacacaacacacagaccatttgacatccatgtgtaccatccatataggcagcccattgtgagcaatccctgtggtaccaacaatggtggctgttctcatctctgcctcatcaagccaggaggaaaagggttcacttgcgagtgtccagatgacttccgcacccttcagctgagtggcagcacctactgcatgcccatgtgctccagcacccagttcctgtgcgctaacaatgaaaagtgcattcctatctggtggaaatgtgatggacagaaagactgctcagatggctctgatgaactggccctttgcccgcagcgcttctgccgactgggacagttccagtgcagtgacggcaactgcaccagcccgcagactttatgcaatgctcaccaaaattgccctgatgggtctgatgaagaccgtcttctttgtgagaatcaccactgtgactccaatgaatggcagtgcgccaacaaacgttgcatcccagaatcctggcagtgtgacacatttaacgactgtgaggataactcagatgaagacagttcccactgtgccagcaggacctgccggccgggccagtttcggtgtgctaatggccgctgcatcccgcaggcctggaagtgtgatgtggataatgattgtggagaccactcggatgagcccattgaagaatgcatgagctctgcccatctctgtgacaacttcacagaattcagctgcaaaacaaattaccgctgcatcccaaagtgggccgtgtgcaatggtgtagatgactgcagggacaacagtgatgagcaaggctgtgaggagaggacatgccatcctgtgggggatttccgctgtaaaaatcaccactgcatccctcttcgttggcagtgtgatgggcaaaatgactgtggagataactcagatgaggaaaactgtgctccccgggagtgcacagagagcgagtttcgatgtgtcaatcagcagtgcattccctcgcgatggatctgtgaccattacaacgactgtggggacaactcagatgaacgggactgtgagatgaggacctgccatcctgaatattttcagtgtacaagtggacattgtgtacacagtgaactgaaatgcgatggatccgctgactgtttggatgcgtctgatgaagctgattgtcccacacgctttcctgatggtgcatactgccaggctactatgttcgaatgcaaaaaccatgtttgtatcccgccatattggaaatgtgatggcgatgatgactgtggcgatggttcagatgaagaacttcacctgtgcttggatgttccctgtaattcaccaaaccgtttccggtgtgacaacaatcgctgcatttatagtcatgaggtgtgcaatggtgtggatgactgtggagatggaactgatgagacagaggagcactgtagaaaaccgacccctaaaccttgtacagaatatgaatataagtgtggcaatgggcattgcattccacatgacaatgtgtgtgatgatgccgatgactgtggtgactggtccgatgaactgggttgcaataaaggaaaagaaagaacatgtgctgaaaatatatgcgagcaaaattgtacccaattaaatgaaggaggatttatctgctcctgtacagctgggttcgaaaccaatgtttttgacagaacctcctgtctagatatcaatgaatgtgaacaatttgggacttgtccccagcactgcagaaataccaaaggaagttatgagtgtgtctgtgctgatggcttcacgtctatgagtgaccgccctggaaaacgatgtgcagctgagggtagctctcctttgttgctactgcctgacaatgtccgaattcgaaaatataatctctcatctgagaggttctcagagtatcttcaagatgaggaatatatccaagctgttgattatgattgggatcccaaggacataggcctcagtgttgtgtattacactgtgcgaggggagggctctaggtttggtgctatcaaacgtgcctacatccccaactttgaatccggccgcaataatcttgtgcaggaagttgacctgaaactgaaatacgtaatgcagccagatggaatagcagtggactgggttggaaggcatatttactggtcagatgtcaagaataaacgcattgaggtggctaaacttgatggaaggtacagaaagtggctgatttccactgacctggaccaaccagctgctattgctgtgaatcccaaactagggcttatgttctggactgactggggaaaggaacctaaaatcgagtctgcctggatgaatggagaggaccgcaacatcctggttttcgaggaccttggttggccaactggcctttctatcgattatttgaacaatgaccgaatctactggagtgacttcaaggaggacgttattgaaaccataaaatatgatgggactgataggagagtcattgcaaaggaagcaatgaacccttacagcctggacatctttgaagaccagttatactggatatctaaggaaaagggagaagtatggaaacaaaataaatttgggcaaggaaagaaagagaaaacgctggtagtgaacccttggctcactcaagttcgaatctttcatcaactcagatacaataagtcagtgcccaacctttgcaaacagatctgcagccacctctgccttctgagacctggaggatacagctgtgcctgtccccaaggctccagctttatagaggggagcaccactgagtgtgatgcagccatcgaactgcctatcaacctgccccccccatgcaggtgcatgcacggaggaaattgctattttgatgagactgacctccccaaatgcaagtgtcctagcggctacaccggaaaatattgtgaaatggcgttttcaaaaggcatctctccaggaacaaccgcagtagctgtgctgttgacaatcctcttgatcgtcgtaattggagctctggcaattgcaggattcttccactatagaaggaccggctcccttttgcctgctctgcccaagctgccaagcttaagcagtctcgtcaagccctctgaaaatgggaatggggtgaccttcagatcaggggcagatcttaacatggatattggagtgtctggttttggacctgagactgctattgacaggtcaatggcaatgagtgaagactttgtcatggaaatggggaagcagcccataatatttgaaaacccaatgtactcagccagagacagtgctgtcaaagtggttcagccaatccaggtgactgtatctgaaaatgtggataataagaattatggaagtcccataaacccttctgagatagttccagagacaaacccaacttcaccagctgctgatggaactcaggtgacaaaatggaatctcttcaaacgaaaatctaaacaaactaccaactttgaaaatccaatctatgcacagatggagaacgagcaaaaggaaagtgttgctgcgacaccacctccatcaccttcgctccctgctaagcctaagcctccttcgagaagagacccaactccaacctattctgcaacagaagacacttttaaagacaccgcaaatcttgttaaagaagactctgaagtatagctataccagctatttagggaataattagaaacacacttttgcacatatattttttacaaacagatgaaaaaagttaacattcagtactttatgaaaaaaatatatttttccctgtttgcctatagttggaggtatcctgtgtgtctttttttacttatgccgtctcatatttttacaaataattatcacaatgtactatatgtatatctttgcactgaagttgtctgaaggtaatactataaatatattgtatatttgtaaattttggaaagattatcctgttactgaatttgctaataaagatgtctgctga

SEQ ID NO: 513 - DNA, 1690 bp, Homo sapiens
tgctgcatggggtcaagcactctggtcggtcccatggagctctgcactgtagcttcccttccacaggccccgcagggcgccccctgcctctgaggatgagtcactgcagcagccgcgccctgaccctgctgagcagcgtgtttggtgcgtgtggcctgctcctggtaggcatcgcggtcagcactgactactggctgtacatggaagaaggcacagtgctaccgcagaaccagaccaccgaggtcaagatggccctgcacgccggcctctggcgagtctgcttctttgcaggtcgggagaaaggtcgctgtgtggcctcagaatattttcttgaaccggagatcaatttggtgacggaaaacacggagaatattctgaagacagtgcgcacggccacccccttccccatggtcagcctcttcctcgtgttcacggccttcgtcatcagcaacatcggccacatccgcccgcagaggaccattctggcttttgtctctggcatcttcttcatactatcgggcctctccttggtggtgggcttggttctttacatctccagcatcaacgacgaggtcatgaacaggcccagcagctctgagcagtattttcattatcgctacgggtggtcttttgccttcgccgcttcctccttcctactcaaagaggtgacgtccgtgggacctagactctagagttctgaatggagagaggggggccggcgtgatgtccgtgtacctgttcaccaagcgctacgcggaggaggagatgtaccgtccacacccggccttctaccgcccgcgtctcagcgactgctccgactactcgggccagttcctgcagcccgaggcgtggcgccgcggccggagcccctccgacatctccagcgacgtgtccatccaaatgacgcagaactaccctcccgccatcaagtacccggaccacctgcacatctccacctcgccctgctgaggcccgcccctcggagctccccctgcctcctcctcctcctcgtcttaggggggtctccctgcaatgcagcgcccccttccgtcctcgggactcctcgctcccacccggaggaggctgcgccagctttaggccccgccctcctcccaatggctccgcccacagactcccttatttcaatggccgcgccctcttttcccgacctctccttttcattggtccctctcactcccaaatgactcctccccttcgttggcccgcccctttcctctggcccctcctctccaagaaaattagctcctccctcgttctccacctgctctgagctgggagcagccagaggcggtgcaagcgcccagctccccagagctccccaacctcggacctcaccgcaggggcgctgggctggagagcaggttcgggcagccgtcgggaataccgaccatcctcttctcccttctaacctgggcttcctttttccctgcctaatctcacctcctgacctgctgggtcctccggtgcagtgggagggccggcttgctccacccgcagccccggggtggcgtagggaagggggctggaagccacgggtacggttaacctggcccttccctccccatctcccctacttccctggaaggtcccattctttctcaccggctgggctcttttctgcttcctgaaggttacctgccttttagggggctcttgtctaaaggatctt

SEQ ID NO: 514 - DNA, 1634 bp, Homo sapiens
ggggcggggggcgggggccgcgaggggggaggcggtacgaaaagggcggcgcgcgcggcggcggcggcagctccccggcagcggcggtggagagcgcagcgcgcagcccggtgcagccctggctttcccctcgctgcgcgcccgcgccccctttcgcgtccgcaaccagaagcccagtgcggcgccaggagccggacccgcgcccgcaccgctcccgggaccgcgaccccggccgcccagagatgaccgcgaccgaagccctcctgcgcgtcctcttgctcctgctggctttcggccacagcacctatggggctgaatgcttcccggcctgcaacccccaaaatggattctgcgaggatgacaatgtttgcaggtgccagcctggctggcagggtcccctttgtgaccagtgcgtgacctctcccggctgccttcacggactctgtggagaacccgggcagtgcatttgcaccgacggctgggacggggagctctgtgatagagatgttcgggcctgctcctcggccccctgtgccaacaacaggacctgcgtgagcctggacgatggcctctatgaatgctcctgtgcccccgggtactcgggaaaggactgccagaaaaaggacgggccctgtgtgatcaacggctccccctgccagcacggaggcacctgcgtggatgatgagggccgggcctcccatgcctcctgcctgtgcccccctggcttctcaggcaatttctgcgagatcgtggccaacagctgcacccccaacccatgcgagaacgacggcgtctgcactgacattgggggcgacttccgctgccggtgcccagccggcttcatcgacaagacctgcagccgcccggtgaccaactgcgccagcagcccgtgccagaacgggggcacctgcctgcagcacacccaggtgagctacgagtgtctgtgcaagcccgagttcacaggtctcacctgtgtcaagaagcgcgcgctgagcccccagcaggtcacccgtctgcccagcggctatgggctggcctaccgcctgacccctggggtgcacgagctgccggtgcagcagccggagcaccgcatcctgaaggtgtccatgaaagagctcaacaagaaaacccctctcctcaccgagggccaggccatctgcttcaccatcctgggcgtgctcaccagcctggtggtgctgggcactgtgggtatcgtcttcctcaacaagtgcgagacctgggtgtccaacctgcgctacaaccacatgctgcggaagaagaagaacctgctgcttcagtacaacagcggggaggacctggccgtcaacatcatcttccccgagaagatcgacatgaccaccttcagcaaggaggccggcgacgaggagatctaagcagcgttcccacagccccctctagattcttggagttccgcagagcttactatacgcggtctgtcctaatctttgtggtgttcgctatctcttgtgtcaaatctggtgaacgctacgcttacatatattgtctttgtgctgctgtgtgacaaacgcaatgcaaaaacaatcctctttctctctcttaatgcatgatacagaataataataagaatttcatctttaaatgagtaagagaaa

SEQ ID NO: 515 - DNA, 5707 bp, Homo sapiens
gcgaagcgagtggctgcagagggctgcatcctgccgtccccagccccccacaaccgtacagccgtgcccaggtttccgcttagggaaccaggaggtccaggccctttctgccagcagccgggcgtgcaagcccccgacagagagaaatcttaaagatagctagagccacgggggctcgggcagccagcgctgcagggagatagcagcgcgcagcccgcagaggcgctgcggcccgtgcagccccggaggcccctcgcggagaaggcggcggcggaggagaggccgagttaccgcccgccgcccgcgcccccccaaccccgccgccgccgccgccgccgccactgccccccctccccgcggcgccgcatcttgaatggaaacatggcggtgccggctcggacctgcggcgcctctcggcccggcccagcgcggactgcgcgcccctggcccggctgcggcccccaccctggccccggcacccggcgcccgacgtccgggcccccgcgcccgctgtggctgctgctgccgcttctaccgctgctcgccgcccccggcgcctctgcctacagcttcccccagcagcacacgatgcagcactgggcccggcgtctggagcaggaggtcgacggcgtgatgcggatttttggaggcgtccagcagctccgtgagatttacaaggacaaccggaacctgttcgaggtacaggagaatgagcctcagaagttggtggagaaggtggcaggggacattgagagccttctggacaggaaggtgcaggccctgaagagactggctgatgctgcagagaacttccagaaagcacaccgctggcaggacaacatcaaggaggaagacatcgtgtactatgacgccaaggctgacgctgagctggacgaccctgagagtgaggatgtggaaagggggtctaaggccagcaccctaaggctggacttcatcgaggacccaaacttcaagaacaaggtcaactattcatacgcggctgtacagatccctacggacatctacaaaggctccactgtcatcctcaatgagctcaactggacagaggccctggagaatgtgttcatggaaaaccgcagacaagaccccacactgctgtggcaggtcttcggcagcgccacaggagtcactcgctactacccggccaccccgtggcgagcccccaagaagatcgacctgtacgatgtccgaaggagaccctggtatatccagggggcctcgtcacccaaagacatggtcatcatcgtggatgtgagtggcagtgtgagcggcctgaccctgaagctgatgaagacatctgtctgcgagatgctggacacgctgtctgatgatgactatgtgaatgtggcctcgttcaacgagaaggcacagcctgtgtcatgcttcacacacctggtgcaggccaatgtgcgcaacaagaaggtgttcaaggaagctgtgcagggcatggtggccaagggcaccacaggctacaaggccggctttgagtatgcctttgaccagctgcagaactccaacatcactcgggccaactgcaacaagatgatcatgatgttcacggatggtggtgaggaccgcgtgcaggacgtctttgagaagtacaattggccaaaccggacggtgcgcgtgtttactttctccgtggggcagcataactatgacgtcacaccgctgcagtggatggcctgtgccaacaaaggctactattttgagatcccttccatcggagccatccgcatcaacacacaggaatatctagatgtgttgggcaggcccatggtgctggcaggcaaggaggccaagcaggtgcagtggaccaacgtgtatgaggatgcactgggactggggttggtggtaacagggaccctccctgttttcaacctgacacaggatggccctggggaaaagaagaaccagctgatcctgggcgtgatgggcattgacgtggctctgaatgacatcaagaggctgacccccaactacacgcttggagccaacggctatgtgtttgccattgacctgaacggctacgtgttgctgcaccccaatctcaagccccagaccaccaacttccgggagcctgtgactctggacttcctggatgcggagctagaggatgagaacaaggaagagatccgtcggagcatgattgatggcaacaagggccacaagcagatcagaacgttggtcaagtccctggatgagaggtacatagatgaggtgacacggaactacacctgggtgcctataaggagcactaactacagcctggggctggtgctcccaccctacagcaccttctacctccaagccaatctcagtgaccagatcctgcaggtcaagtgtaagctggggcacctcgaaaattttgagttcctgctccccagcagctttgagtctgaaggacacgttttcattgctcccagagagtactgcaaggacctgaatgcctcagacaacaacaccgagttcctgaaaaactttattgagctcatggagaaagtgactccagactccaagcagtgcaacaacttccttctgcacaacctgatcttggacacgggcatcacgcagcagctggtagagcgtgtgtggagggaccaggatctcaacacgtacagcctactggccgtgttcgctgccacagacggtggcatcacccgagtcttccccaacaaggcagctgaggactggacagagaaccctgagcccttcaatgccagcttctaccgccgcagcctggataaccacggttatgtcttcaagcccccacaccaggatgccctgttaaggccgctggagctggagaatgacactgtgggcatcctcgtcagcacagctgtggagctcagcctaggcaggcgcacactgaggccagcagtggtgggcgtcaagctggacctagaggcttgggctgagaagttcaaggtgctagccagcaaccgtacccaccaagaccagcctcagaagtgcggccccaacagccactgtgagatggactgcgaggttaacaatgaggacttactctgtgtcctcattgatgatggaggattcctggtgctgtcaaaccagaaccatcagtgggaccaggtgggcaggttcttcagtgaggtggatgccaacctgatgctggcactctacaataactccttctacacccgcaaggagtcctatgactatcaggcagcctgtgcccctcagccccctggcaacctgggtgctgcaccccggggtgtctttgtgcccaccgttgcagatttccttaacctggcctggtggacctctgctgccgcctggtccctgttccagcagcttctctacggcctcatctaccacagctggttccaagcagaccccgcggaggccgaggggagccccgagacgcgcgagagcagctgcgtcatgaaacagacccagtactacttcggctcggtaaacgcctcctacaacgccatcatcgactgcggaaactgctccaggctgttccacgcgcagagactgaccaacaccaatcttctctttgtggtggccgagaagccgctgtgcagccagtgcgaggctggccggctgctgcagaaggagacgcactgcccagcggacggcccggagcagtgtgagctagtgcagagaccgcgataccggagaggcccgcacatctgcttcgactacaacgcgacagaagatacctcagactgtggccgcggggcctccttcccgccgtcgctgggcgtcctggtctccctgcaactgctgctcctcctgggcctgccgccccggccgcagcctcaagtcctcgtccacgcctctcgccgcctctgagcaccctgccccaccccacctccactcccacctcacccggcctcttcgcctttcccaccctcctgccccacactccccgccttagagcctcgtccctccctcactgaaggacctgagctggccaggccctgagagtctggtctgcgccttgggatggggagtcccaaagcgggacgccgcaggtgtttggcacccaaatcacatctcacctccgaactgttcaagtgtccccagacccttcttgcctgctgggctccccccagtgggatgggacagggaggccacacgcactggtgccaaaaccaggcctctgctgccgcccttcctggaggctgcctatgttgggggggaccctgcctcagctgacccggcctctctgccccacccaagcccaaacttggtttctgtgagaatagtggaggaaggtgagatggccagtttgaagcctgtgcctcccagcttaaatcctagcaggagagaggctctggggcagcccccatgggctcctgcccctttcaggcctacagccacatccccaagcccaccaggtgtcaggatagtcacagtgataccagttcagacactaccccatatacacctggaacattgaggatggaaactggactcacattcgacataccccactgggcacacgcacaaacacacacactatggggtggggtgggtgtaggggcttacaaagccttacacagggcgaggggttggtgggagggttggcacctgcacactccatctcctgctcaccacctgcctctaatctgagctgcagcctggctggtcctcccatttctaaagctgaatgtcaaacagtgccaaatgctggggcagggggtgaagaaccctctgtcccacccctagccaccagtgtcctccaagtgccccctcacctctccaggtgctcattgtaaccatttctcactagtgtcaggcccccagtgggaccacatgccactgcctgcacctttcggcagaggaacccccaccagacatcaccctttgccttagcaggggtgactttgtctctcctggctgggccatccttccgccaatctggcccttacacactcaggcctgtgcccactccctatctccttcccacccctacacacacactccctgcttgcaggaggccaaactgtccctcccttgctgaacacacacacacacacacacacacaggtggggactgggcacagctcttcacaccattcattctggtcatttcccccaaaggcatcccagcctgggggccagtggggaactgagggcaaggggatatagtgatggggctcagatggactgggaggagggggagggtgatgcattaattaatggcttcgttaattaatgtcatgttgcttgtcgctttctcagtgtgtgtgtgtggtccatgcccactgctggtgccagggtgggtgtccatgtgcacccggcctggatgccagctgtgtccttcgggggcgtgcgtgtaactgtagtgtagtcaggtgctcaatggagaatataaacatatacagaaaaatatatattttaagtttaaaaaacagaaaaacagacaaaacaatccccatcaggtagctgtctaacccccagctgggtctaatccttctcattacccacccgacctggctgcccctcaccttgggctgggggactggggggccatttccttttctctgccctttttttgttgttctattttgtacagacaagttggaaaaacaacagcgacaaaaaagtcaagaaactttgtaaaatatcgtgtgtgtgattccttgtaaaatattttcaaatggtttattacagaagatcagttattaaataatgttcatattttcacttcaaa

SEQ ID NO: 516 - DNA, 2216 bp, Homo sapiens
ggctggctttcggtttctctgctcacctccggataaatcacggggtctcccgcgccgctcatggcgcctcccgtccgtctcgagcgtccctttccttcccggcgctttcctgggttgcttctggcggccctggtgttgctgctgtcctccttctccgatgggggtctcttctccgagaagccgggagcctgttgggcagccggcgcccggtctccccttctgctgcggaggatccctgctggcggtcgtggtgctgctcgcgctgccggtggcctgggatcaatgcaatgtcccggaatggcttccatttgccaggcctaccaacctaactgatgactttgagtttcccattgggacatatctgaactatgaatgccgccctggttattccggaagaccgttttctatcatctgcctaaaaaactcagtctggacaagtgctaaggacaagtgcaaacgtaaatcatgtcgtaatcctccagatcctgtgaatggcatggcacatgtgatcaaagacatccagttcagatcccaaattaaatattcttgtcctaaaggataccgactcattggttcctcgtctgccacatgcatcatctcaggcaacactgtcatttgggataataaaacacctgtttgtgacagtgatgacattagggagtgaggcctttggaaggtgatgagatcatgagagcagagctgtcacgaatgggattagcgtcctaataaaagaggcccagaagagctcctttgcccctcctgccatgggaagaaatgctgaatctgccagagaggaattatttgtgggctaccccccaccatcgccaatggagatttcactagcatcagcagagagtattttcactatggatcagtggtgacctaccactgcaatcttggaagcagagggaaaaaggtgtttgagcttgtgggtgagccctccatatactgcaccagcaaagatgatcaagtgggcatctggagtggcccagcccctcagtgcattatacctaacaaatgcacgcctccaaatgtggaaaatggaatattggtatctgacaacagaagcttattttccttaaatgaagttgtggagtttaggtgtcagcctggctttggcatgaaagggccctcccatgtgaagtgccaggccctgaacaaatgggagccagagttaccaagctgctccagggtatgtcagccacctccagatgtcctgcatgctgagcgtacccaaagggacaaggacaacttttcacccgggcaggaagtgttctacagctgtgagcccggctacgacctcagaggatctacgtatttgcactgcacaccccagggagactggagccctgcagcccccagatgtgaagtgaaatcctgtgatgacttcctgggccaacttcctaatggccatgtgctatttccacttaatctccagcttggagcaaaagtggattttgtttgtgatgaaggatttcaattaaaaggcagctctgctagttactgtgttttggctggaatggaaagcctttggaatagcagtgttccagtgtgtgaacgtaaatcatgtgaaactcctccagttccagtgaatggcatggtgcatgtgatcacagacatccatgttggatccagaatcaactattcttgtactacagggttctgattaaaaggcaggtctgctagtcattgtgtcttggctggaatgaaagccctttggaatagcagtgttccagtgtgtgaacttaacaaatcttttgtccaaatcctccagctatccttaatgggagacacacaggaactccccttggagatattccctatggaaaagaagtatcttacacatgtgacccccacccagacagagggatgaccttcaacctcattggggagagcaccatccgccgcacaagtgaacctcatgggaatggggtttggagcagccctgcccctcgctgtgaacttcctgttggtgctggttcacatgatgctcttatagttggcactttacttggtacgatcatctttattttaatcatcattttcctctattggataattttcaagcacagaaaaaggggaccttccttgacaaagtactatacagctgaagaacatctcgaatacaattttggttggaaaggagccaattgatttcaacagaatcagatctgagcttcataaagtctttgaagtgacttcacagagacgcagac

SEQ ID NO: 517 - DNA, 3499 bp, Homo sapiens
aagagcccgcggtggcgctgccaggggatgctagcccgagagcgagcagaggagcagcgcacccgcacgagccttggaccctttggaaccgaaagcacgcccgtcctcagagtcccgtcctcaaagtcccatcctcgccatggcacccggagagaagatcaaagccaaaatcaagaagaatctgcccgtgacgggccctcaggcgccgaccattaaagagctgatgcggtggtactgcctcaacaccaacacccatggctgtcgccgcatcgtggtgtcccgcggccgtctgcgccgcctcctctggatcgggttcacactgactgccgtggccctcatcctctggcagtgcgccctcctcgtcttctccttctatactgtctcagtttccatcaaagtccacttccggaagctggattttcctgcagtcaccatctgcaacatcaacccctacaagtacagcaccgttcgccaccttctagctgacttggaacaggagaccagagaggccctgaagtccctgtatggctttccagagtcccggaagcgccgagaggcggagtcctggaactccgtctcagagggaaagcagcctagattctcccaccggattccgctgctgatctttgatcaggatgagaagggcaaggccagggacttcttcacagggaggaagcggaaagtcggcggtagcatcattcacaaggcttcaaatgtcatgcacatcgagtccaagcaagtggtgggattccaactgtgctcaaatgacacctccgactgtgccacctacaccttcagctcgggaatcaatgccattcaggagtggtataagctacactacatgaacatcatggcacaggtgcctctggagaagaaaatcaacatgagctattctgctgaggagctgctggtgacctgcttctttgatggagtgtcctgtgatgccaggaatttcacgcttttccaccacccgatgcatgggaattgctatactttcaacaacagagaaaatgagaccattctcagcacctccatggggggcagcgaatatgggctgcaagtcattttgtacataaacgaagaggaatacaacccattcctcgtgtcctccactggagctaaggtgatcatccatcggcaggatgagtatcccttcgtcgaagatgtgggaacagagattgagacagcaatggtcacctctataggaatgcacctgacagagtccttcaagctgagtgagccctacagtcagtgcacggaggacgggagtgacgtgccaatcaggaacatctacaacgctgcctactcgctccagatctgccttcattcatgcttccagacaaagatggtggagaaatgtgggtgtgcccagtacagccagcctctacctcctgcagccaactactgcaactaccagcagcaccccaactggatgtattgttactaccaactgcatcgagcctttgtccaggaagagctgggctgccagtctgtgtgcaaggaagcctgcagctttaaagagtggacactaaccacaagcctggcacaatggccatctgtggtttcggagaagtggttgctgcctgttctcacttgggaccaaggccggcaagtaaacaaaaagctcaacaagacagacttggccaaactcttgatattctacaaagacctgaaccagagatccatcatggagagcccagccaacagtattgagatgcttctgtccaacttcggtggccagctgggcctgtggatgagctgctctgttgtctgcgtcatcgagatcatcgaggtcttcttcattgacttcttctctatcattgcccgccgccagtggcagaaagccaaggagtggtgggcctggaaacaggctcccccatgtccagaagctccccgtagcccacagggccaggacaatccagccctggatatagacgatgacctacccactttcaactctgctttgcacctgcctccagccctaggaacccaagtgcccggcacaccgccccccaaatacaataccttgcgcttggagagggccttttccaaccagctcacagatacccagatgctggatgagctctgaggcagggttgagaagacagatctagtcaggaccaccagccatggtctaaggacatggatcgggtgcccccagacgtgtgcacaggggaccctctgccccactctgggcttttcagatactctgaccaaaaagcctgctttaaaccgcaagatggggcctgggcatgcgcaggaggagccatcgggtactacgcagcaacactcacaactgtccaggctgagataaatcccgggacctgaactattagcacgtcactagagactgggagccgaggcagtggtgctggcccaagtgaaggccagagtgaggactgatgcagctctttacgggtcttgagagggaaggactcttccaaagccccaaagccgagggtttcacccacactgccagcctgggttggggcccaaggatgtgaccttgagtgtcaaggctggacagctactgccagatgccaaagataggagaaagtgccagccctgaagctggagccgtttgtgaataaactgttcttcatcattgacactggagaaaggtgtcctccatgccctcaggcagcagagaactggcccagagcccttggagtgttggtggagatcagagtgccgtggtggaggtctgggactatgtcagagtgtcctcactttggggcatgggtgggtccaggagatggatttagttattcaattttgtggatgaataaattgaggcacagaaagattaagttaccggcccaaggtgacacagtgaggaggtggcagagctaggatttgaacccagacaatctgacttcatgattttgcatccaattcgtgtctgtgccttttaaagggtgaggtctgtgtcactttgggtggggagggggagcatggtgggccatgctctgggcagctgttccaagacagagctgacccttccattaccaatggcctgtccctcaccaacaagccaactgccacagatgacccacttcataccacattcacatctttccacctgaaatggctaacaggtattaaatccttggttggtgtttaaagccaacccaagaacagggtgttaggtactgttttaagcacctagataggttagcataggggactgcaaatggtgttccgcaaagcaaatcctgtttttgaccatgaactaagaattttattttattttattttttattttttgtagaaataggatctcactatgttgcccaggctgttcttgaactcctggcctcaaatgatcttcccacttcagcctcccaaagtgcagggattacaggcacaagccaccgtgcccagccaagaatttttatttttgcttttaaatagcaaaagaagaagattctgtgactcatgaaaatgatatgagattcgaattccagtgtctataaataaagttttattggtacacagc

SEQ ID NO: 518 - DNA, 4842 bp, Homo sapiens
acccgcgcgaggtaggcgctctggtgcttgcggaggacgcttccttcctcagatgcaccgatcttcccgatactgcctttggagcggctagattgctagccttggctgctccattggcctgccttgccccttacctgccgattgcatatgaactcttcttctgtctgtacatcgttgtcgtcggagtcgtcgcgatcgtcgtggcgctcgtgtgatggccttcgtccgtttagagtagtgtagttagttaggggccaacgaagaagaaagaagacgcgattagtgcagagatgctggaggtggtcagttactaagctagagtaagatagcggagcgaaaagagccaaacctagccggggggcgcacggtcacccaaaggaggtcgactcgccggcgcttcctatcgcgccgagctccctccattcctctccctccgccgaggcgcgaggttgcggcgcgcagcgcagcgcagctcagcgcaccgactgccgcgggctccgctgggcgattgcagccgagtccgtttctcgtctagctgccgccgcggcgaccgctgcctggtcttcctcccggacgctagtgggttatcagctaacacccgcgagcatctataacataggccaactgacgccatccttcaaaaacaactgtctgggaaaaaaagaataaaaagtagtgtgagagcagaaaacgtgattgaaacacgaccaatctttcttcagtgccaaagggtggaaaagaaaggatgatatgatgaacctagcctgttaatttcgtcttctcaattttaaactttggttgcttaagactgaagcaatcatggtgaacctgaggaatgcggtgcattcattccttgtgcacctaattggcctattggtttggcaatgtgatatttctgtgagcccagtagcagctatagtaactgacattttcaatacctccgatggtggacgcttcaaattcccagacggggtacaaaactggccagcactttcaatcgtcatcataataatcatgacaataggtggcaacatccttgtgatcatggcagtaagcatggaaaagaaactgcacaatgccaccaattacttcttaatgtccctagccattgctgatatgctagtgggactacttgtcatgcccctgtctctcctggcaatcctttatgattatgtctggccactacctagatatttgtgccccgtctggatttctttagatgttttattttcaacagcgtccatcatgcacctctgcgctatatcgctggatcggtatgtagcaatacgtaatcctattgagcatagccgtttcaattcgcggactaaggccatcatgaagattgctattgtttgggcaatttctataggtgtatcagttcctatccctgtgattggactgagggacgaagaaaaggtgttcgtgaacaacacgacgtgcgtgctcaacgacccaaatttcgttcttattgggtccttcgtagctttcttcataccgctgacgattatggtgattacgtattgcctgaccatctacgttctgcgccgacaagctttgatgttactgcacggccacaccgaggaaccgcctggactaagtctggatttcctgaagtgctgcaagaggaatacggccgaggaagagaactctgcaaaccctaaccaagaccagaacgcacgccgaagaaagaagaaggagagacgtcctaggggcaccatgcaggctatcaacaatgaaagaaaagcttcgaaagtccttgggattgttttctttgtgtttctgatcatgtggtgcccatttttcattaccaatattctgtctgttctttgtgagaagtcctgtaaccaaaagctcatggaaaagcttctgaatgtgtttgtttggattggctatgtttgttcaggaatcaatcctctggtgtatactctgttcaacaaaatttaccgaagggcattctccaactatttgcgttgcaattataaggtagagaaaaagcctcctgtcaggcagattccaagagttgccgccactgctttgtctgggagggagcttaatgttaacatttatcggcataccaatgaaccggtgatcgagaaagccagtgacaatgagcccggtatagagatgcaagttgagaatttagagttaccagtaaatccctccagtgtggttagcgaaaggattagcagtgtgtgagaaagaacagcacagtcttttcctacggtacaagctacatatgtaggaaaattttcttctttaatttttctgttggtcttaactaatgtaaatattgctgtctgaaaaagtgtttttacatatagctttgcaaccttgtactttacaatcatgcctacattagtgagatttagggttctatatttactgtttataataggtggagactaacttattttgattgtttgatgaataaaatgtttatttttgctctccctcccttctttccttccttttttcctttcttccttcctttctctctttcttttgtgcatatggcaacgttcatgttcatctcaggtggcatttgcaggtgaccagaatgaggcacatgacagtggttatatttcaaccacacctaaattaacaaattcagtggacatttgttctgggttaacagtaaatatacactttacattcttgctctgctcatctacacatataaacacagtaagataggttctgctttctgatacatctgtcagtgagtcagaggcagaacctagtcttgttgttcatataggggcaaaaatttgacattgtcagaatgttgtgttggtatttactgcaatgtctgtccctaaacatagtggtattttaacatagcagctggttaaccgggactacagaagtggaaggataatgagatgtaatacaccaaatagcttttcacttcttaaggacagtgttcaaattctgattattacaacaagcaaactgaaattagtgttttcattctggtccttagtaaattcctaattctatgattaaactgggaaatgagatcccagagttatttcccaacccaggattcaacatcaattgggttttgatctcagcatcctggaaatttgtgtgcttcacacaaagtgaaattagtattttgagccttattaaaatattttcttaattatggtacctctgtctataggacttaatttagcagtccatttttgagtaaaacttgtattggaagtatagatggtagaaactttggaagttttacttgattaaggactacagaattgggcccttagaatgtgaaaaaaaaaagtaattaaaaagacacttttaccgaactcgggattacagaaacacggagtttccatttggattttaaacaaaatttatgtcattttcagatccttccaaactctctagtgcaggaaaaggctgcagctaatttgtgaaagtggcaagctcttcattgcactgcagttatttaccagaagtttaaatctttgttaaaatatagtgttgtgttacaataagtgttggccatcatttcattcgtgggcctgctgctctctaagaattcagtagcattttaatagtttctaaaccatgaaaagttttcaagcattgctaaagtcaggccattcagtctatgctgtgtgcagagtatacaagtgtttctagtaacagtatttccatacgtgcccatttcacacaactgtggataaattttggaagaattcatgatgctagttcttacgcttgacagttacttacacacctgagaatgtgcctctcagtatcttaaaattggttaatgaaaaatctgaatttctaaaacccttggtctgtgttctcaacacacagtatagataaatccaatagtctgccacaagggcagtggaagagctgctgtatttgaggaaactcatacagtctctatttgatttgcaacactgccaaacatcagtcaattgcttgagcatgcccaaatataacatgaaagtcaagtctacctgccttgcctgttaggtctgttgaagtgcatgttaaaataattatatgaagcagaatgagatgatttaattcttaccgaaatgaaaatggctgaagaaacacagcatgcatttagcatgagttctgcacatacagatggtgtcctgcatgtatgccatgtatgttgcatgaatccatcgatttgtattaatgtagggcagaatagctgatagaagaaggactgaagaaaatccttcagcaatccttaaaaagaccatgcattcagatctgaagtagtgtgagtgttagaaaaaactggaaacatctgatttctgaactatcagggcaagctcatagcacatgttttacaaagaaacaaaatataaatcacagatttccaaaagtactagcaataagttgaatgataatagctcacagcacatttgttaatgattcttgtgtcatcaagtagtagtacttaatagtacccaacctggtaattatcctcaagttgtgtgctattcgtaagttctgtgcagtttggtatgaaacaaatatactcatttggatataaatcttacccttcaatgttaaatctacaaacttttataaatgttttaaagaagtccatgtgataattgtaaaggtgatgaatttaccatcaaacaaatcattttgatgtattattatatatgtatatctgtgtaagacacgtgcaacagactgccttatattattttctgtaattcttctcctttgtcaaatggtattttttgtgaatggttgcaaagtgttgtcttattcctaattcctgtatgttatccactacaggttttatgagacttcctattaatttattaaatttattaaatgttg

SEQ ID NO: 519 - DNA, 3345 bp, Homo sapiens
cttctttaaatttctttctaggatgttcacttctccacaatgaatgagtgtcactatgacaagcacatggactttttttataataggagcaacactgatactgtcgatgactggacaggaacaaagcttgtgattgttttgtgtgttgggacgtttttctgcctgtttatttttttttctaattctctggtcatcgcggcagtgatcaaaaacagaaaatttcatttccccttctactacctgttggctaatttagctgctgccgatttcttcgctggaattgcctatgtattcctgatgtttaacacaggcccagtttcaaaaactttgactgtcaaccgctggtttctccgtcaggggcttctggacagtagcttgactgcttccctcaccaacttgctggttatcgccgtggagaggcacatgtcaatcatgaggatgcgggtccatagcaacctgaccaaaaagagggtgacactgctcattttgcttgtctgggccatcgccatttttatgggggcggtccccacactgggctggaattgcctctgcaacatctctgcctgctcttccctggcccccatttacagcaggagttaccttgttttctggacagtgtccaacctcatggccttcctcatcatggttgtggtgtacctgcggatctacgtgtacgtcaagaggaaaaccaacgtcttgtctccgcatacaagtgggtccatcagccgccggaggacacccatgaagctaatgaagacggtgatgactgtcttaggggcgtttgtggtatgctggaccccgggcctggtggttctgctcctcgacggcctgaactgcaggcagtgtggcgtgcagcatgtgaaaaggtggttcctgctgctggcgctgctcaactccgtcgtgaaccccatcatctactcctacaaggacgaggacatgtatggcaccatgaagaagatgatctgctgcttctctcaggagaacccagagaggcgtccctctcgcatcccctccacagtcctcagcaggagtgacacaggcagccagtacatagaggatagtattagccaaggtgcagtctgcaataaaagcacttcctaaactctggatgcctctcggcccacccaggcctcctctgggaaaagagctgttaagaatgattacctgtctctaacaaagcccatgtacagtgttatttgaggtctccattaatcactgctagatttctttaaaaaattttttttcatagtttaaaagcatgggcagtaaagagaggacctgctgcatttagagaaagcacagaaacgggagaggttcggcgggtccctgcttgtcctatgaactgctcagagctcctgtcagtccagctgggccttctgggttctggcaccatttcgtagccattctctttgtattttaaaaggacgttatgaaagggcttagaccaaaataaatcataatgttacttgagccaccttatatagctgcttggagagtctatgtagttctttctgcatgcattaaaaatgtttagaaatgcttcagcaatggtgtttttttcctcaaagaaaccatggccagtagctaggtgttcagtaggaatcaaagaaaaatcagtaagagctccagattaaacctgatttttaactgaaggaacattctgaggaaaaatacttaaaagtaaaaaaggtcaatgtgaaaaccctttttgacctgaaaaaggccttagtatggtcctccatgcatgtgtgtgtatatgcatgtgtgtgtgtgtgtgtgtgtgtgtctatatatatatatatatatatatatatatatattcctgtttttactgatttttattgattttgttcaaagatatctggggattggattggggaatgcttaatctgactattgaaagaaacatggatccctggagtatttcagatacggggttaccgccccagactgcctcccgccagtccacattagttctcattttccctcatgatggtgaaaaacagtggagagctagtaaagggtttatgcagaaaacaaggagaagagaatgtgaagtttgaagtgcctatggaacatccagctgataatcttgcctagtaagagcaaaagaagccaagagaacaccaacgtttaaggagcaggtagagaaaacccagcaaaaggacagaggaataagaggaccaaagaacaatgttaagaatcaaggagagaggtcaggcacgctggctcatgcctgtaatcccagcactttgggaggctgaggcaggtggatcacttgaggccaggagtatgagaccagcctgggcaatgtggtgaaattgcatctttactaaaaatacaaaaactagccaggcatggtggcacatgcctgtaataccaggtacttgggaagctgaggcataagaatcacttgaacccgggaggtggaggttgcagagtgagccaagatcgcagcactgcactctagtctgggtgacagagcaagactctgtctcaaaaaaaaaaaaaaaaaaaaaaaaagactagagaatgtcagggaacacatgtgtatatttaaacaacttcactttgcatttaaaaactcgaaggacagcgaaggtgaaatcaattcacgggccacctagactttccagtctaggactagagctgtagcaatgatctgttgtgctgtacaagaaaagagaaagaggtgttcatttgagaacagatgtttttatacatcagagtaaaagctgtattgaagagcaggctgaatcccttccatatagaatgaaatatgagcttgaccccagtccttatcttcagttacctccataccaactggtggcatgttggatttagcatgtagaataatttcccatctcttatttttcccaaggttaatggcatccttctggtacctggcttacatgtgaactgaattttgatctgggttctattttgaatttttctccttcagagacctaagtaggcaacatgaaagacaagtagttaagaaagaaaaaatgatgtttcatacacacaggctaccaacgagagttttctatgtaaaacatttagagtgtattctgatttaaaatgagaataacttcaaggtagatattatagtatttatgtagtttgcaaaagaagtttacatttttttgctattgtgatataacatttatgtgcaagaactacttgtaataaaaggatttgagatgtcatgcttctaaatataatagcctaaaatagagaatattatgatttgaaagtgtagatttcacaaactctgtatagtatgtgggtctatctgaagcttttatcgaagctacctataaaataaaattttaaaagatctgt

SEQ ID NO: 520 - DNA, 3234 bp, Homo sapiens
gggtagtgagccggctgagaggcatggagacgcaggaacttcggggggccctggctcttctcctcctttgctttttcacatctgccagtcaggatctgcaggtaattgacctgctgactgtgggcgagtctcggcagatggtagctgtggcagagaagatccggacagccttgctcactgctggggacatctacctcttatccaccttccgcctgccccccaagcagggtggtgtcctctttggcctctattctcgccaagacaacactcgatggctggaggcctctgttgtaggcaagatcaacaaaggtgactgtactggtgcgataccagcgggaggatggcaaagtccacgccgtgaacctacagcaagcgggcctggctgatgggcgcacacacacagttctcctgcgactccgaggtccctccagacccagccctgccctacatctctacgtggactgcaaactgggtgaccaacatgcaggccttccagcactggcccccattcctccagcggaggtcgatgggctggagattaggactggacagaaggcgtatttgaggatgcagggctttgtggaatctatgaaaattattctgggtgggtccatggcccgggtaggagccctgagtgagtgtccattccaaggggacgagtccatccacagtgcagtgaccaatgcactgcactccattctaggggagcagaccaaggcgctggtcacccaactcaccctcttcaaccagatcctggtggagctgcgggatgatatacgagaccaggtgaaggaaatgtccctgatccgaaacaccattatggagtgtcaggtgtgcggcttccatgagcagcgttcccactgcagccccaatccctgcttccgaggtgtggactgcatggaagtgtacgagtacccaggctaccgctgtgggccctgcccccctggcctgcagggcaacggcacccactgcagtgacatcaatgagtgtgctcacgctgacccctgtttcccgggctccagctgcatcaacaccatgcccggcttccactgtgaggcctgtcctcgagggtacaagggcacacaggtgtctggtgtgggcattgactatgcccgggccagcaaacagataaggccataccagtgtcctctgctgtatctgaggagacccaccataggtctggttccacccaaagtctgccccttcaggtctgcaatgacatcgatgaatgcaacgatggcaacaatggtggctgtgacccaaactccatctgcaccaacactgtgggctctttcaagtgtggtccctgccgcctgggtttcctgggcaaccagagccagggctgcctcccagcccggacctgccacagcccagcccacagcccctgccacatccatgctcactgtctctttgaacgcaatggtgcagtgtcctgccagtgtaacgtgggctgggctgggaatgggaacgtgtgtgggactgacacagacatcgatggctacccagaccaagcactgccctgcatggacaacaacaaacactgcaaacaggacaactgccttttgacacccaactctgggcaggaagatgctgataatgatggtgtgggggaccagtgtgatgatgatgctgatggggatgggatcaagaatgttgaggacaactgccggctgttccccaacaaagaccagcagaactcagatacagattcatttggtgatgcctgtgacaattgccccaacgttcccaacaatgaccagaaggacacagatggcaatggggaaggagatgcctgtgacaacgacgtggatggggatggcatccccaatggattggacaattgccctaaagtccccaacccactacagacagacagggatgaggacggggtgggagatgcttgcgacagctgccctgaaatgagcaatcctacccagacagatgcagacagcgacctggtgggggatgtctgtgatactaatgaagacagcgatggggatgggcatcaggacaccaaggacaactgcccacagctgccaaatagctcccagctggactctgataacgatggacttggagatgagtgtgatggggatgatgacaatgatggcatcccagattatgtgcctcctggtcccgataactgccgcctggtacccaatcccaatcagaaggactcagatggcaatggcgttggtgatgtgtgtgaggatgactttgacaatgatgctgtggtcgaccccctggatgtgtgtcctgaaagtgcagaggtaacgcttacggattttcgggcctatcagaccgtcgtcctggatcctgagggtgatgctcagattgacccaaactgggttgtgctcaaccagggcatggaaatcgttcagaccatgaacagtgaccctggcttggcagttggatacacggccttcaatggtgtggactttgaaggcaccttccatgtgaacacagtgactgatgatgactacgcaggctttctcttcagttatcaagacagtggccgcttctacgtagtcatgtggaagcagaccgagcagacctactggcaggctacacccttccgggcggttgcccagcccgggctgcagctcaaggcagtgacatcagtgtctggcccaggtgagcacctccgaaatgccctgtggcatactggccacacccctgatcaggtacgactgctgtggacagacccacgaaatgtgggctggcgggacaagacctcctatcgctggcagcttctgcaccggcctcaagttggctacattcgggtgaagctctatgagggaccccagcttgtggcggattctggggtgatcattgacacatccatgcgaggggggcgtcttggtgtattctgcttctcccaagaaaacataatttggtccaatctccagtatcgatgcaatgacacagtgcctgaggactttgagccattccggaggcagctgctccagggaagggtgtgaggaggaggccaccagattcagaattcagaattttagaccctttggccttggggtccatcctggagaccctgaggtctaagctacagcccctcagccaaccacagacccttctctggctcccaaaaggagttcagtcccagaggggtggtcaccccacccttcaggggatgagaagttttcaaggggtattactcaggcactaaccccaggaaagatgacagcacattgccataaagttttggttgttttctaa

SEQ ID NO: 521 - DNA, 3824 bp, Homo sapiens; identical to SEQ ID NO: 196

SEQ ID NO: 522 - DNA, 6628 bp, Homo sapiens
tcaccatccccaaccccaccggcagtgacgccggctactacgagtgtgaggctgtcctgcgcagcagcagcgtcccctctgttgtccggggcgcctacctctcagtgctggaaccgcctcagtttgtcaaggagccagaaagacacatcactgcggagatggagaaggtggtggacatcccctgtcaggccaaaggtgtgccgccgccctccatcacctggtacaaggacgcagccgtggtggaggtggagaagttgacccgcttccggcagcgcaacgacgggggcctgcagatcagcggcctggtgcccgatgataccggcatgttccagtgcttcgcccgcaatgcagccggcgaggtgcaaacttccacctacctggctgtcaccagcatcgcccctaacatcaccagaggccccctggacagcacggtgatcgatggcatgtcagtggtgctagcatgtgagacctcgggggcgccccgaccagctatcacttggcagaaaggggagcgcatcttggccagtggctctgtgcagctgcctcgcttcacacccctggagtcgggcagcctcctcatcagccccacacacatctccgatgcggggacctacacctgcctggccaccaactctcggggggtcgatgaggcctcagcagacctagtcgtttgggctcggacccgcatcaccaagcccccccaggatcagagtgtcatcaagggcacccaggcctccatggtgtgcggagtgacccacgacccccgagtaaccatcaggtacatctgggagaaggacggggccaccctgggcacggagagccatcctcgtatccgcctggacagaaacggctccctgcacatctcacagacgtggtcgggagacatcggcacgtacacctgccgggtgatctcagcaggaggcaacgactctcgcagtgcccacctgcgagtcaggcaactgccccacgcgcccgagcacccagtggccactctcagcaccgtggaaaggcgagccatcaacctgacgtggaccaagccctttgatggcaacagccccctgatccgctacattctggagatgtcggagaacaatgccccctggactgtactcctggccagtgtggaccccaaagctacctcagtgacagtcaagggcctggttcctgcacgctcctaccagttccgtctttgtgccgtcaacgacgtggggaaaggacagttcagcaaagacaccgagagggtctccctccccgaggagccccccacggcccctccacagaacgtcatcgccagcggtcgaaccaaccagtccatcatgatccagtggcagccgcctcctgagagccaccagaatggaattctcaagggttacatcatcaggtactgcctggccgggctgcccgtggggtaccagtttaagaacatcacggatgctgatgtgaacaacctgctgctggaggatctcatcatttggaccaactacgagatcgaggtggctgcttacaacagcgctgggctgggggtctacagcagtaaagtcaccgagtggacgctgcagggagttcccacggtccctccgggcaatgtgcacgcggaagccaccaattccacgaccatccgcttcacctggaacgcccccagcccccagttcatcaacggcatcaaccagggctacaagctgatcgcctgggagccggaacaggaagaggaggttaccatggtgaccgcccggcctaactttcaagacagcatccacgtgggcttcgtgtctggcctgaagaagttcaccgagtacttcacctcagtgctgtgtttcaccacccccggggacgggccacgcagcaccccgcagctggtgcgcacccatgaggatgtgcctgggcccgtgggacacctgagcttcagtgagatcctggacacatcgctgaaggtcagctggcaagagccgggagagaaaaatggcatcctcacagggtaccggatctcctgggaggagtacaatcgaaccaacacccgtgtgacccactacctgcccaacgtgaccctggagtaccgtgtcacgggcctcaccgcgctcaccacctacaccatcgaggtggccgccatgacctcaaagggccagggccaagtgtccgcctccaccatctcctctggggtgcccccagaactcccagggccccccaccaacctgggcatttccaacatcggcccccgctctgtgaccttgcagttcaggccaggctacgatgggaaaacctccatctcccgctggctggtggaagcccaggtaggcgtggttggggagggagaggagtggttgctgatccaccagctctccaatgagcccgatgcccgctccatggaggtgcccgacctcaaccccttcacctgctacagcttccgcatgcgccaggtgaacatcgtgggcaccagcccccccagtcagccttctagaaagatccagaccctgcaggcaccccctgacatggccccagccaatgtgtctctgcgcacagccagtgagaccagcctgtggctgcgctggatgcctctcccggagatggaatacaatgggaaccctgagtccgtgggctataagatcaagtacagccggtcagacgggcatggcaagacgctgagccacgtggtgcaggaccgtgtggagcgggactacaccatcgaggacctggaggagtggacagagtaccgcgtccaggtccaggccttcaacgccatcgggagcgggccctggagccagacggtggtgggcaggacccgggagtcagttccctcttccggccccaccaatgtgtctgcactggccaccacctccagcagcatgctggtgcgctggagcgaggtccccgaggctgatcgcaacgggctcgtgctgggctataaggtgatgtataaggagaaggactcggacacccagccccgattctggctggtggaaggcaactcgtctcgcagtgcccagctcaccggcttgggcaaatacgtgctctatgaagtccaggtgctggccttcacacgcatcggggacggcagccccagccaccctcccatcctggagcggacgctggatgatgtcccaggaccacccatgggcatcctgttcccagaggtgcggaccacgtctgtgcggctgatctggcagccccctgccgcccccaatggcatcattcttgcttaccagatcacacaccggctcaacaccaccacggccaacaccgccactgtggaggtgctggcacccagcgcccggcagtacacagccacgggcctcaagccagagtctgtctacctgttccgcatcacggcccagacccgcaagggctggggagaagctgccgaggccttggtggtgaccaccgagaagagagaccgtccgcagccccccagcaggccgatggtgcagcaggaggatgtgagagcacgcagcgtgctgctgtcctgggagccagggagcgacgggctctcccctgtgcgctactacaccatccagacccgcgagctgcccagcggcaggtgggcactgcactcggcctccgtgagccacaatgcctccagcttcattgtggacaggctgaagcccttcacgtcctacaagttccgagtgaaggcgaccaatgacattggcgacagcgagttcagcgaggagtcggagtcactgaccaccctgcaggctgcccccgatgaagcacccaccatcctctccgtgacgccccacaccaccacctccgtgctaatccgatggcagccgccagcagaggacaagatcaatggcatcctcctgggcttccggatccgataccgggagctgctctatgaaggactgaggggcttcacgcttcgaggcatcaacaacccaggggccacatgggctgagcttacctccatgtactccatgcggaacctgagccggcccagcctcacgcagtacgagctggacaacctgaacaagcacaggcggtacgagatacggatgagcgtgtacaacgctgtgggtgaggggccctccagccccccgcaggaggtctttgttggggaggcagtgcccacagcagcacctcgtaacgtggtcgtccacggcgccacggccacacagctggacgtgacttgggagccacctccgctggacagccagaatggagacatccaggggtacaagatttatttctgggaagcccagcgggggaacctcacagagcgagtgaagacgcttttcctggctgagaacagcgtgaagctcaagaacttgactggctacacggcctacatggtcagcgtggccgccttcaacgccgctggggatgggcctcggagcacccccacccaaggccagacccagcaagcagcccccagcgctcccagctcggtcaagttcagtgagctgaccacaacctcagtgaatgtgtcctgggaagccccgcagttccccaatggcatcctggagggctacaggctggtgtacgagccctgcagccccgtggatggagtcagcaagatcgtgaccgtggacgtgaaggggaacagccccctgtggctgaaggtgaaggacctggcggagggggtgacctacaggttccgcatcagagccaagaccttcacctacgggccggagatcgaagccaacgtcaccacgggccccggagaaggtgccccaggaccgcctggcgtgcccatcatcgtgcggtacagctctgccatcgccattcactggtccagcggagacccgggcaaagggcccatcacccgctacgtcatcgaggccagaccttcagacgagggactatgggacatcctcatcaaagacatccccaaggaggtgagctcctacacgttcagcatggacatcctgaagccgggcgtgagctatgacttccgggtcatcgcggtcaacgactatggtttcggcacccccagcagcccctcccagtctgtgccagcccagaaagccaaccccttctatgaggagtggtggttcttggtggtcattgccctggtcggcctcatcttcatcctgcttctggtcttcgtgctcatcatccggggccagagcaagaagtacgccaagaagacagactcggggaacagtgccaagtctggagccctaggccacagcgagatgatgagcttggatgaaagcagcttccctgccctggaactcaacaacaggcggctctccgtcaagaactctttctgccgaaagaacggcctgtacaccaggtctccccccaggcccagcccaggcagcctgcactactcggatgaggatgtcaccaaatacaacgacctcatccctgcagagagcagcagcctgacggagaagccctcagaaatctccgactctcagggaagtgacagcgagtacgaggtcgactcaaaccaccagaaggcccactcctttgtcaaccactacatcagtgaccccacatactacaactcgtggcggcgacagcagaagggcatctcgagggcacaggcctacagctacacggagagcgactcgggtgagccagaccacaccaccgtcaccaacagcaccagcacccagcagggcagcctctttcggcccaaggccagtcggactccaacgccccagaacccccctaaccccccaagtcagcagagcaccctctaccgtccccccagcagcctggccccaggctcccgggctcccatagcaggattttcatcatttgtttgacatcagaagaggaaaaagcagaaagagaaatggcaccaaactcctccttcacccctcctctcactgcctgccagaaaacaaaaacaccaagaaaccaagtcaacttttcacctcctgagtttatttttccagagattccagggccagcaaagccggcgttcagaaggagggagaaaaccgtgagaggatgtgtgtggccagcagctcttcagctttgagatggtggggttcactgctcccttgggaattacacggagctggggaagtggctgtgtcactgctatggacacggagtggggcgggcatctggagagagagagggagcggaggctaaggactggaggccgccaggcaggcgtggccgagggaagaaaaagcttctggatgtccagccagctgcccccttccagcccctccaggacccctggacccactgccgctgctctctgcaaaaagaatgggcatcccggaggccacgcctatcttctctctctgctcctccttccctccatgcaccatcactgtggctggcaggcatcggacagcctcatccagaccccctgccctgtcttggcaacctctactgcccatctcccctgctcaacttctccaccaagcatttggtttatttagaaaaaggaagaaaaacaaaaaacaaaaaactaaagggtgagaatttgcttagcgccttccttgttcctgcatattttttaaaatattgaatccaaggaagagagcccaagggtaggggagaaaccccccacaactgacccctgcctccctgtgctggaattgactttcctgagcatggacaaggaaaggtgaagtctggggagcagaggtgtaaataaggcgactggccttggcactgtgggatgattaggtttaacgcattgtgggcaagataagaatga

SEQ ID NO: 523 - DNA, 807 bp, Homo sapiens
actcccaacagagcgcccaagaagaaaatggccataagtggagtccctgtgctaggatttttcatcatagctgtgctgatgagcgctcaggaatcatgggctatcaaagaagaacatgtgatcatccaggccgagttctatctgaatcctgaccaatcaggcgagtttatgtttgactttgatggtgatgagattttccatgtggatatggcaaagaaggagacggtctggcggcttgaagaatttggacgatttgccagctttgaggctcaaggtgcattggccaacatagctgtggacaaagccaacctggaaatcatgacaaagcgctccaactatactccgatcaccaatgtacctccagaggtaactgtgctcacgaacagccctgtggaactgagagagcccaacgtcctcatctgtttcatagacaagttcaccccaccagtggtcaatgtcacgtggcttcgaaatggaaaacctgtcaccacaggagtgtcagagacagtcttcctgcccagggaagaccaccttttccgcaagttccactatctccccttcctgccctcaactgaggacgtttacgactgcagggtggagcactggggcttggatgagcctcttctcaagcactgggagtttgatgctccaagccctctcccagagactacagagaacgtggtgtgtgccctgggcctgactgtgggtctggtgggcatcattattgggaccatcttcatcatcaagggattgcgcaaaagcaatgcagcagaacgcagggggcctctgtaaggcacatggaggtga

SEQ ID NO: 524 - DNA, 4133 bp, Homo sapiens
gagcggcggcggcggggcgctggggcggagactgcgacccggagccgcccggactgacggagcccactgcggtgcgggcgttggcgcgggcacggaggacccgggcaggcatcgcaagcgaccccgagcccgcagcggagccccggagccatggccctgagcgagctggcgctggtccgctggctgcaggagagccgccgctcgcggaagctcatcctgttcatcgtgttcctggcgctgctgctggacaacatgctgctcactgtcgtggtccccatcatcccaagttatctgtacagcattaagcatgagaagaatgctacagaaatccagacggccaggccagtgcacactgcctccatctcagacagcttccagagcatcttctcctattatgataactcgactatggtcaccgggaatgctaccagagacctgacacttcatcagaccgccacacagcacatggtgaccaacgcgtccgctgttccttccgactgtcccagtgaagacaaagacctcctgaatgaaaacgtgcaagttggtctgttgtttgcctcgaaagccaccgtccagctcatcaccaaccctttcataggactactgaccaacagaattggctatccaattcccatatttgcgggattctgcatcatgtttgtctcaacaattatgtttgccttctccagcagctatgccttcctgctgattgccaggtcgctgcagggcatcggctcgtcctgctcctctgtggctggtaggtgtggaatgcctgagtgagttcgtgaggggccccttgcagagtgagctggactcattcagggaattcaggtattggtggtggttggggtgctggggattcttggagaaggcacccactttcctcttgggttctgcttggtcttacattttagtgaatctgacaggtttgggaagatcacaaggctggctggagagggaaggcgagtcacgcattattcttttgctgttccccggagctggcctgttgactatttctttccctgtgtagggatgggcatgcttgccagtgtctacacagatgatgaagagagaggcaacgtcatgggaatcgccttgggaggcctggccatgggggtcttagtgggcccccccttcgggagtgtgctctatgagtttgtggggaagacggctccgttcctggtgctggccgccctggtactcttggatggagctattcagctctttgtgctccagccgtcccgggtgcagccagagagtcagaaggggacacccctaaccacgctgctgaaggacccgtacatcctcattgctgcaggctccatctgctttgcaaacatgggcatcgccatgctggagccagccctgcccatctggatgatggagaccatgtgttcccgaaagtggcagctgggcgttgccttcttgccagctagtatctcttatctcattggaaccaatatttttgggatacttgcacacaaaatggggaggtggctttgtgctcttctgggaatgataattgttggagtcagcattttatgtattccatttgcaaaaaacatttatggactcatagctccgaactttggagttggttttgcaattgggaatggtggattcgtcaatgatgcctatcatgggctacctcgtagacctgcggcacgtgtccgtctatgggagtgtgtacgccattgcggatgtggcattttgtatggggtatgctataggtccttctgctggtggtgctattgcaaaggcaattggatttccatggctcatgacaattattgggataattgatattctttttgcccctctctgcttttttcttcgaagtccacctgccaaagaagaaaaaatggctattctcatggatcacaactgccctattaaaacaaaaatgtacactcagaataatatccagtcatatccgataggtgaagatgaagaatctgaaagtgactgagatgagatcctcaaaaatcatcaaagtgtttaattgtataaaacagtgtttccagtgacacaactcatccagaactgtcttagtcataccatccatccctggtgaaagagtaaaaccaaaggttattatttcctttccatggttatggtcgattgccaacagccttataaagaaaaagaagcttttctaggggtttgtataaatagtgttgaaactttattttatgtatttaattttattaaatatcatacaatatattttgatgaaataggtattgtgtaaatctataaatatttgaatccaaaccaaatataattttttaacttacattaacaaacatttgggcaaaaatcatattggtaatgagtgtttaaaattaaagcacacattatctctgagactcttccaacaaagagaaactagaatgaagtctgaaaaacagaatcaagtaagacagcatgttatatagtgacactgaatgttatttaacttgtagttactatcaatatatttatgcgttaaacagctagttctctcaagtgtagaggacaagaacttgtgtcagttatcttttgaatccataaatcttagctggcattagttttctatgtaatcacctacctagagagagttgtaaattatatgttaacatgttatctggttggcagcaaacactaaagccaataaaggaaaaacagtaaatgttccgaaagcagagaaaagcaaccaaacatattgttatgaactaaaagctttccctttaagatgcatacttgtcttactggatgaagaaaattgagggtacatgtaccttatactgtcaaggttgtttaaacatgataaggttaatcgccatctacttcaagttttagaaaaggaaacaagaagctgaaaacagctgctctgactttaatatctgactatatctttgatctgtttgcaggtcatccaagtgttttctaggaatatatttattttaggttgtctgaaactactattttttagactcctgaaagttgttcacatcaatgtgaagacaaattttaaatgaaaatgaagaatgaaattatgtcttgaatcatatattaagaagtaaaaataatagtgatcaggcagaaaagaaaaatggaacatctaaaaatgtatgtgctaactatatcatccagtgtgcagtgttgtgtatttttctaagcatgacaacattgatgtgccttttcagtgtaacagcaaatactgttagtgaacattgtcaatttatgtcattttgttaagagatatgactggagtgtgcagtgtggaatgtctctaatactacttgtgaatcctgcagttctataatcataaacaaaaattacttagtttcgttaagctaagattgtgtttgtgttaacttcgacatcaaggagcaaagaactttagaacagactcctcaatcttgtgactttcttattctctaggaaagtaacacttcgtttcatgaagcttttctgtggggcttcgattatttcaagtctggtttctaagtgcagtgtgtttgaagcaaacgaacttccaactcacttatttggcattgggcaacttggccaagtctgccactttggaagatggctctggaggaaactctcatatggctaaaaaggcaggctagtttcttacttctacaggggtagagccttaaaaaagaacgtgctacaaattggttctctttgagggtttctggttctccctgcccccaataccatatactttattgcaattttatttttgcctttacggctctgtgtctttctgcaagaaggcctggcaaaggtatgcctgctgttggtccctcgggataagataaaatataaataaaaccttcagaactgttttggagcaaaagatagcttgtacttggggaaaaaaattctaagttcttttatatgactaatattcttggttagcaagactggaaagaggtgtttttttaaaatgtacataccagaacaaagaacatacagctctctgaacatttattttttgaacagaggtggtttttatgtttggacctggtaatacagatacaaaaactttaatgaggtagcaatgaatattcaactgtttgactgctaagtgtatctgtccatattttagcaagtttacttaataaatcttctgaaccatg

SEQ ID NO: 525 - DNA, 2402 bp, Homo sapiens
agcgggggtgcgtccgcgggtggctgccccgcaggtgcgcgcggccggggctggcggcgactctctccaccgggccgcccgggaggctcatgcagcgcggctgggtcccgcggcgcccggatcggggaagtgaaagtgcctcggaggaggagggccggtccggcagtgcagccgcctcacaggtcggcggacgggccaggcgggcggcctcctgaaccgaaccgaatcggctcctcgggccgtcgtcctcccgcccctcctcgcccgccgccggagttttctttcggtttcttccaagattcctggccttccctcgacggagccgggcccagtgcgggggcgcagggcgcgggagctccacctcctcggctttccctgcgtccagaggctggcatggcgcgggccgagtactgagcgcacggtcggggcacagcagggccggggggtgcagctggctcgcgcctcctctccggccgccgtctcctccggtccccggcgaaagccattgagacaccagctggacgtcacgcgccggagcatgtctgggagtcagagcgaggtggctccatccccgcagagtccgcggagccccgagatgggacgggacttgcggcccgggtcccgcgtgctcctgctcctgcttctgctcctgctggtgtacctgactcagccaggcaatggcaacgagggcagcgtcactggaagttgttattgtggtaaaagaatttcttccgactccccgccatcggttcagttcatgaatcgtctccggaaacacctgagagcttaccatcggtgtctatactacacgaggttccagctcctttcctggagcgtgtgtgggggcaacaaggacccatgggttcaggaattgatgagctgtcttgatctcaaagaatgtggacatgcttactcggggattgtggcccaccagaagcatttacttcctaccagccccccaatttctcaggcctcagagggggcatcttcagatatccacacccctgcccagatgctcctgtccaccttgcagtccactcagcgccccaccctcccagtaggatcactgtcctcggacaaagagctcactcgtcccaatgaaaccaccattcacactgcgggccacagtctggcagctgggcctgaggctggggagaaccagaagcagccggaaaaaaatgctggtcccacagccaggacatcagccacagtgccagtcctgtgcctcctggccatcatcttcatcctcaccgcagccctttcctatgtgctgtgcaagaggaggagggggcagtcaccgcagtcctctccagatctgccggttcattatatacctgtggcacctgactctaatacctgagccaagaatggaagcttgtgagggtaaactgtggcttattcttacaaaaagtgtaataaaggagactgacccctgacaacatggtaggcactgtaagacggactctatgttgcccaggctgttatggaactcctgagtcaagtgatcctcccaccttggcctctgaaggtgcgaggattataggcgtcacctaccacatccagcctacacgtatttgttaatatctaacataggactaaccagccactgccctctcttaggcccctcatttaaaaacggttatactataaaatctgcttttcacactgggtgataataacttggacaaattctatgtgtattttgttttgttttgctttgctttgttttgagacggagtctcgctctgtcatccaggctggagtgcagtggcatgatctcggctcactgcaacccccatctcccaggttcaagcgattctcctgcctcctcctgagtagctgggactacaggtgctcaccaccacacccggctaattttttgtatttttagtagagacggggtttcaccatgttgaccaggctggtctcgaactcctgacctggtgatctgcccacccaggcctcccaaagtgctgggattaaaggtgtgagccaccatgcctggccctatgtgtgttttttaactactaaaaattatttttgtaatgattgagtcttctttatggaaacaactggcctcagcccttgcgcccttactgtgattcctggcttcattttttgctgatggttccccctcgtcccaaatctctctcccagtacaccagttgttcctcccccacctcagccctctcctgcatcctcctgtacccgcagcgaaggcctgggctttcccaccctccctccttagcaggtgccgtgctgggacaccatacgggttggtttcacctcctcagtcccttgcctaccccagtgagagtctgatcttgtttttattgttattgcttttattattattgcttttattatcattaaaactctagttcttgttttgtctctccgaa

SEQ ID NO: 526 - DNA, 2803 bp, Homo sapiens
cgggtctgatagtccctacctgtcaggactggtgttaggatgagataatgtttgtgaactgtaaactatataaacgtgtgctactgtgagaactggacaaagaagagagggagtgagagaaattaagggagggctggggctgggaaagaacgaaaagggagtcgcgtatagaggagagcgcgacagtcgcgagccacactttgcaatgaaactctttagactttctgccgggagagcggcccagacgcgccaggtctgtagcaggaggccgcgccgagggcgggtccccagaagcctacaggtgagtatcggttctccccttcccggctttcggtccggaggaggcgggagcagcttccctgttctgatcctatcgcgggcggcgcagggccggcttggccttccgtgggacggggaggggggcgggatgtgtcacccaaataccagtggggacggtcggtggtggaaccagccgggcaggtcgggtagagtataagagccggagggagcggccgggcggcagacgcctgcagaccatcccagacgccggagcccgagccccgacgagtccccgcgcctcatccgcccgcgtccggtccgcgttcctccgccccaccatggctcggggccccggcctcgcgccgccaccgctgcggctgccgctgctgctgctggtgctggcggcggtgaccggccacacggccgcgcaggacaactgcacgtgtcccaccaacaagatgaccgtgtgcagccccgacggccccggcggccgctgccagtgccgcgcgctgggctcgggcatggcggtcgactgctccacgctgacctccaagtgtctgctgctcaaggcgcgcatgagcgcccccaagaacgcccgcacgctggtgcggccgagtgagcacgcgctcgtggacaacgatggcctctacgaccccgactgcgaccccgagggccgcttcaaggcgcgccagtgcaaccagacgtcggtgtgctggtgcgtgaactcggtgggcgtgcgccgcacggacaagggcgacctgagcctacgctgcgatgagctggtgcgcacccaccacatcctcattgacctgcgccaccgccccaccgccggcgccttcaaccactcagacctggacgccgagctgaggcggctcttccgcgagcgctatcggctgcaccccaagttcgtggcggccgtgcactacgagcagcccaccatccagatcgagctgcggcagaacacgtctcagaaggccgccggtgacgtggatatcggcgatgccgcctactacttcgagagggacatcaagggcgagtctctattccagggccgcggcggcctggacttgcgcgtgcgcggagaacccctgcaggtggagcgcacgctcatctattacctggacgagattcccccgaagttctccatgaagcgcctcaccgccggcctcatcgccgtcatcgtggtggtcgtggtggccctcgtcgccggcatggccgtcctggtgatcaccaaccggagaaagtcggggaagtacaagaaggtggagatcaaggaactgggggagttgagaaaggaaccgagcttgtaggtacccggcggggcaggggatggggtggggtaccggatttcggtatcgtcccagacccaagtgagtcacgcttcctgattcctcggcgcaaaggagacgtttatcctttcaaattcctgccttccccctcccttttgcgcacacaccaggtttaatagatcctggcctcagggtctcctttctttctcacttctgtcttgaaggaagcatttctaaaatgtatcccctttcggtccaacaacaggaaacctgactggggcagtgaaggaagggatggcatagcgttatgtgtaaaaaacaagtatctgtatgacaacccgggatcgtttgcaagtaactgaatccattgcgacattgtgaaggcttaaatgagtttagatgggaaatagcgttgttatcgccttgggtttaaattatttgatgagttccacttgtatcatggcctacccgaggagaagaggagtttgttaactgggcctatgtagtagcctcatttaccatcgtttgtattactgaccacatatgcttgtcactgggaaagaagcctgtttcagctgcctgaacgcagtttggatgtctttgaggacagacattgcccggaaactcagtctatttattcttcagcttgcccttactgccactgatattggtaatgttcttttttgtaaaatgtttgtacatatgttgtctttgataatgttgctgtaattttttaaaataaaacacgaatttaataaaatatgggaaaggcacaaaccagaagtcggcatttgtgaaaagtccctccagatttctatcacattggtctctaatttcccaagacttgtattttttttttatttcaaattataacacttttttttcccccagaagtgggtgtttcatgttgctactctggtgtgtcctaagatatcctaactggccagtgtaaatgctattctttctaaataagattatttggaaacttccttcaaactgcaggagggtgagcttgagggaggaagctaaaactagctgcttttatgaaaaagagtgccagtctttggtcatctctaaacaaggcttatcaccaatggagacagaaaactctagttcaagagctgtacctcctttgaatcccagccctactttgaaataagtggtactatttccatttagcctttgagcaaatcacttaatctcaaagcgttgtggctctaagattaaacgacttt

SEQ ID NO: 527 - DNA, 5334 bp, Homo sapiens
ctgtcactgcagcctggcggcctgagcgccgagcctggggctggggccgcggtgctgaggacgcaaatcagccccgtagctgggtggagcctccgggcctgacgtggaccttcactggagaagtgactcagggatcctcccaggatgtctgcctcaccagacgacctgagtacagggggaaggttacagaacatgacagtggatgaatgcttccagtctcggaacaccgtcctccaggggcagccctttgggggtgtccccaccgtgctgtgcctcaacatcgccctgtgggtgctcgtccttgtggtttactccttcctccggaaagctgcgtgggactatgggcgcctggctctgctgatacacaatgacagcctgacctcgctgatctatggggagcagagcgagaagacatctccctcggagacttccttggagatggaacgcagagacaagggattctgttcctggttcttcaacagcataacaatgaaggacgaggatctgattaacaagtgtggggacgacgcacgcatctacatcgtgttccagtaccacctcatcatctttgtgctcatcatctgtatcccctccctgggcatcattttgcccatcaactatactggatctgttctggactggagcagtcactttgctcggaccaccattgtcaatgtctccacagagagcaagctcctgtggctgcatagcctgctgtccttcttctacttcatcaccaacttcatgttcatggctcatcactgcctggggtttgcacccaggaatagccaaaaggtcacaaggacactaatgatcacctatgtgcccaaggacattgaagacccagaactcatcattaagcattttcacgaggcctatccaggcagtgtcgtgacaagagtccacttctgctacgacgtcaggaacctgatcgacttggacgatcagaggcgccatgccatgcggggccggcttttctatacagccaaggccaagaagactgggaaggtgatgatcaggatccacccctgtgcccgcctgtgcttctgcaagtgctggacctgcttcaaggaggtggatgcagagcagtattacagcgagctagaggagcagctaacggacgagttcaacgccgagctcaaccgcgtgccgctcaagcggctggacctgatctttgtcaccttccaggactccaggatggccaagcgtgtccgtaaggattacaagtatgtccagtgtggtgtgcaaccccagcagtcctcagtgaccaccatcgtcaaatcatattactggagggtcactatggccccacaccccaaagacattatttggaaacacctgtctgtccgccgcttcttttggtgggcccgctttatcgcaatcaacaccttcctcttcttcctcttcttctttctcaccacgcctgccatcatcatgaacactatcgacatgtacaacgtcacccgccccatcgagaagctgcagaacccaattgtgacccagttcttcccctctgtgatgctctggggcttcacagtgatactgcctctgattgtctacttctccgccttcctcgaggcccactggaccagatcaagtcagaatctggtcatggtgcacaagtgctacatctttctggtgttcatggtagtcattctgccctctatgggactgaccagtttggatgtctttctccgctggctctttgacatctactatctagagcaagcatccatcaggttccagtgtgtgttcctgccagacaacggcgccttctttgtcaactacgtgatcacggcagctttacttggcacaggcatggagctgctgcgtctggggtcactcttctgctacagcacccgcctcttcttctctagatcagagccagagagagtcaacatcagaaagaaccaggccatagacttccagtttgggcgtgagtatgcgtggatgatgaacgtgttcagcgtggtgatggcgtacagcatcacttgccccatcattgtgccttttgggttgctctacctgtgcatgaagcacttgacggatcgctataacatgtactactcctttgcacccaccaaactgaacgagcagatccacatggctgccgtctcccaggccatctttgcgccactcttgggtctgttctggatgctgttcttctccatcctgcggttgggttctctccacgccatcaccatcttttccctgtccaccctcctcattgccatggtgattgcctttgttggcatttttctggggaagcttcggatggttgccgactacgagcccgaggaggaggagatccagacagtgtttgacatggagccaagcagcacctcctccacgcccacctccctcctgtatgtggccaccgtgctgcaagaaccggagttgaatctgacccccgcctcctccccagccaggcacacctatggcaccatgaacaaccagccggaagagggagaagaagagagtggtctgaggggctttgcgagggagctagactcggcccagttccaggaagggctggaactggagggccagaaccagtaccactgaccgggacctgaggcctccactggcgacttgttgaggggtcaggggagggcctggcaaggggaggcaggagggtggcctggacctccccactacctcctgcagactttgagaagcccacagtggagacatccaccaccccagccatgggccatacgggggtcctgacctgctgcccggctggaactgggggtgctcggcagtgctgaaggagcctgggaagggatgggaggatacaggcaagcacatgtcttgagagaggtggctggagccccggcacagagactgaacgctggggtcccttcctgggaccaagatggagaaggtgttcctaagggaggagacagaaggaggctgccgaaggctctgtggggtcatcaccactctgcatcagctgcccttccaaggagcttctgctgctgctcctcctcccagccccggcccattcctcccctgcagtctgaggaggcaaaggtatgtgcacggggcacattgacaggacacggaggaccacctcatcacagggttccctgcatggggatctgtaaagagaaagtttctgcacccaccagagcaagagccaactgaaagcgtagacctgagaagaggtaactcagccccttcctgctcctctgccctcatcagatgtccccaggagcagcagggcagaggcccttctttctattcttacaagggtagctagagcgtgatcactcagggctcatcaaatgagactcgtgtgcatttttcagaaggaaaccttggttagtccttgctgggtaacacaaagtggggtgagacgacagaagccgaattcatggaaggggggtcttctccccaaaactctgtgtggtgggaaaccagctatacctccccaagccccagggcctaaagagaagacccccgaagccaaagatgtggccacttaaaagcgtctcctgcctcctacccaactgagtgcctgggcccccagcttggccaagatgggcagtacgttagggtaagaaccccatgcttcaaacttaaggactgaccatcacctgcgtcccaagtaggacccttcctcccttctcggggctgcccctgcaccctgccttgaagaccacccaagcggcctccagtgtgggcctggtccagacattgcagatgcttcaaccgtgatgtcgccccaggcctgccaggggtgtggtggaggggaaggccacgtgctccagggagaagccctttctggagaagcaaggctgtcctcccagggctgccactaccagagacctgggggagctgaattccgaacagtgatggtgacactcagcacctttgccacagccggggggaaccggcttctgcctctgggatgggctctcatcaggaccaccgtgcagcccagccagggaggacatgagaagggccagtgggggcctcaatgaaccagaacaagccaagctgaatggggtctgtgtgctccagggccctcttcagccccctcccccaaaggtctgggtccctgccaccaacctactgaaggccggcccccggctcacctcacctgagcacctgcaccaggccccaggcacatggctgccctgaactcagatcacctagaccttgtccctgccccacctttgccccatcctagccccagaagctccaagcttcaccgcaggtgagaaattgtgctcaatgggcagaaactgctatacccccagggcatggcccacattttggcatgagggtgtctttccagagagcttgggttggctggagagaggctgtctttcccattccttgtccagctaggaataaaggggaaatggtcctagcctggcccctacacacccaggtcccacaggccccctccccactggaatttcaccaaccaacaaggggaaagtacgctgttacagcatagcggtcaggcccagcaggagcttggcacatgatggggaggtggccagctccaggccctgcccgaccccatcatgtgtatttggtgtatggggtgtggggggtcacaccagaagctggcctggggtctcttctttgctggacacagctccctggcccctgcccccagcccctgcagcccctgccggactgtggaagccacatatgggaaaagtcctggcagacaatgtggcgggatgactgggggcttctccctctgaacctgggtccagtgtagcctggctctgagagaaggtggtgagcatgtggagaaggttccatagtccactcttaggggaaccagcaaagcctcatggcagttggctccatctggacctcccatggtcactacaggatggtggagcagggggcatcttttagcctccccccgccaccacatccaggccctctcaggcacctcctgcctcagcccacacctgcctcacccattgcccccctccccccacctactgccatcccactcctctgccagccacttcccagccgccccaccccactccatccaccaaatcacctcctgacttaatcctttctggaaggagctgccgcccaggaaccggtattgcctagagcctccaggaggggccctcctcaggcctccagtggccccatgcccacctgcctgaccctccactgcccctggaagcaaagtgcctatcagcagcgttgcgtcctctggggcccccggtcgggggggagggggtgtgggctaaccttggccaccaccacaaaaggaatgtgccagaatgctgaaccttcttgttaatgctatgaccgtgccttgaataaacaagtcctcccaacctc

SEQ ID NO: 528 - DNA, 2949 bp, Homo sapiens
acttgcagcctccttccccccgagcggagctgcggggccggccgggccggggctggaccccgggaacccggacgcggccgcccgggcccgcgggcggggggatcggcgggggggacccgcggggtgaccggcggcaggagccgccaccatggagttccgccaggaggagtttcggaagctagcgggtcgtgctctcgggaagctgcaccgccttctggagaagcggcaggaaggcgcggagacgctggagctgagtgcggatgggcgcccggtgaccacgcagacccgggacccgccggtggtggactgcacctgcttcggcctccctcgccgctacattatcgccatcatgagtggtctgggcttctgcatcagctttggcatccgctgcaacctgggcgtggccatcgtctccatggtcaataacagcacgacccaccgcgggggccacgtggtggtgcagaaagcccagttcagctgggatccagagactgtcggcctcatacacggctcctttttctggggctacattgtcactcagattccaggaggatttatctgtcaaaaatttgcagccaacagagttttcggctttgctattgtggcaacatccactctaaacatgctgatcccctcagctgcccgcgtccactatggctgtgtcatcttcgtgaggatcctgcaggggttggtagagggggtcacataccccgcctgccatgggatctggagcaaatgggccccacccttagaacggagtcgcctggcgacgacagccttttgtggttcctatgctggggcggtggtcgcgatgcccctcgccggggtccttgtgcagtactcaggatggagctctgttttctacgtctacggcagcttcgggatcttctggtacctgttctggctgctcgtctcctacgagtcccccgcgctgcaccccagcatctcggaggaggagcgcaagtacatcgaggacgccatcggagagagcgcgaaactcatgaaccccctcacgaagtttagcactccctggcggcgcttcttcacgtctatgccagtctatgccatcatcgtggccaacttctgccgcagctggacgttctacctgctgctcatctcccagcccgcctacttcgaagaagtgttcggcttcgagatcagcaaggtaggcctggtgtccgcgctgccccacctggtcatgaccatcatcgtgcccatcggcggccagatcgcggacttcctgcggagccgccgcatcatgtccaccaccaacgtgcgcaagttgatgaactgcggaggcttcggcatggaagccacgctgctgttggtggtcggctactcgcactccaagggcgtggccatctccttcctggtcctagccgtgggcttcagcggcttcgccatctctgggttcaacgtgaaccacctggacatagccccgcgctacgccagcatcctcatgggcatctccaacggcgtgggcacactgtcgggcatggtgtgccccatcatcgtgggggccatgactaagcacaagactcgggaggagtggcagtacgtgttcctaattgcctccctggtgcactatggaggtgtcatcttctacggggtctttgcttctggagagaagcagccgtgggcagagcctgaggagatgagcgaggagaagtgtggcttcgttggccatgaccagctggctggcagtgacgacagcgaaatggaggatgaggctgagcccccgggggcaccccctgcacccccgccctcctatggggccacacacagcacatttcagccccccaggcccccaccccctgtccgggactactgaccatgtgcctcccactgaatggcagtttccaggacctccattccactcatctctggcctgagtgacagtgtcaaggaaccctgctcctctctgtcctgcctcaggcctaagaagcactctcccttgttcccagtgctgtcaaatcctctttccttcccaattgcctctcaggggtagtgaagctgcagactgacagtttcaaggatacccaaattcccctaaaggttccctctccacccgttctgcctcagtggtttcaaatctctcctttcagggctttatttgaatggacagttcgacctcttactctctcttgtggttttgaggcacccacaccccccgctttcctttatctccagggactctcaggctaacctttgagatcactcagctcccatctcctttcagaaaaattcaaggtcctcctctagaagtttcaaatctctcccaactctgttctgcatcttccagattggtttaaccaattactcgtccccgccattccagggattgattctcaccagcgtttctgatggaaaatggcggtttcaagtccccgattccgtgcccacttcacatctcccctaccagcagattctgcgaaagcaccaaatttctcaagaccctcttctccctagcttagcataatgtctggggaaacaaccaaaatcgcaattttaacaatatgcctctctacccccgtgcactttttctgacatggttttcaggtctaaatagtggctgctccagtccatgaactcaaaggtttgaagctaccaccattgaactcccccatggtggtttcatgatgccccctccccaattcctcgcactttattctcctgggtggtttcgaactaccctgtttctcagtggccatttgttgtgtccctcaggggcttaatgactcaaaatctgggatccttcccctctcagacacccctctttcagcttagaatttggggaacctatagagaagtcacagaatcccatgaaagggaatggggcaggagccaggggtgttttttcccagtgcagggttgtgtctttgtgtctctgtctctgtgactgtaaatcctgccctgccccactcccaataaaagctttggtgtataggc

SEQ ID NO: 529 - DNA, 1933 bp, Homo sapiens
cccaggaccctggtgggagagtgtgtgcgtcgcgctggagggcgggaggcgggggcgggaggtgccggtcgagggagccccgctctcagagctccaggggaggagcgaggggagcgcggagcccggcgcctacagctcgccatggtgcgccccctgaacccgcgaccgctgccgcccgtagtcctgatgttgctgctgctgctgccgccgtcgccgctgcctctcgcagccggagacccccttcccacagaaagccgactcatgaacagctgtctccaggccaggaggaagtgccaggctgatcccacctgcagtgctgcctaccaccacctggattcctgcacctctagcataagcaccccactgccctcagaggagccttcggtccctgctgactgcctggaggcagcacagcaactcaggaacagctctctgataggctgcatgtgccaccggcgcatgaagaaccaggttgcctgcttggacatctattggaccgttcaccgtgcccgcagccttggtaactatgagctggatgtctccccctatgaagacacagtgaccagcaaaccctggaaaatgaatctcagcaaactgaacatgctcaaaccagactcagacctctgcctcaagtttgccatgctgtgtactctcaatgacaagtgtgaccggctgcgcaaggcctacggggaggcgtgctccgggccccactgccagcgccacgtctgcctcaggcagctgctcactttcttcgagaaggccgccgagccccacgcgcagggcctgctactgtgcccatgtgcccccaacgaccggggctgcggggagcgccggcgcaacaccatcgcccccaactgcgcgctgccgcctgtggcccccaactgcctggagctgcggcgcctctgcttctccgacccgctttgcagatcacgcctggtggatttccagacccactgccatcccatggacatcctaggaacttgtgcaacagagcagtccagatgtctacgagcatacctggggctgattgggactgccatgacccccaactttgtcagcaatgtcaacaccagtgttgccttaagctgcacctgccgaggcagtggcaacctgcaggaggagtgtgaaatgctggaagggttcttctcccacaacccctgcctcacggaggccattgcagctaagatgcgttttcacagccaactcttctcccaggactggccacaccctacctttgctgtgatggcacaccagaatgaaaaccctgctgtgaggccacagccctgggtgccctctcttttctcctgcacgcttcccttgattctgctcctgagcctatggtagctggacttccccagggccctcttcccctccaccacacccaggtggacttgcagcccacaaggggtgaggaaaggacagcagcaggaaggaggtgcagtgcgcagatgagggcacaggagaagctaagggttatgacctccagatccttactggtccagtcctcattccctccaccccatctccacttctgattcatgctgcccctccttggtggccacaatttagccatgtcatctggtggtgaccagctccaccaagcccctttctgagcccttcctcttgactaccaggatcaccagaatctaataagttagccattctctattgcattccagattagggttagggtagggaggactgggtgttctgaggcagcctagaaagtcattctcctttgtgaagaaggctcctgccccctcgtctcctcctctgagtggaggatggaaaactactgcctgcactgccctgtccccggatcctgccgaacatctgggcatcaggagctggagcctgtgggccttgctttattcctattattgtcctaaagtctctctgggctcttggatcatgattaaacctttgacttaag

SEQ ID NO: 530 - DNA, 3067 bp, Homo sapiens
ggcgccgtcttgatactttcagaaagaatgcattccctgtaaaaaaaaaaaaaaaatactgagagagggagagagagagagaagaagagagagagacggagggagagcgagacagagcgagcaacgcaatctgaccgagcaggtcgtacgccgccgcctcctcctcctctctgctcttcgctacccaggtgacccgaggagggactccgcctccgagcggctgaggaccccggtgcagaggagcctggctcgcagaattgcagagtcgtcgcccctttttacaacctggtcccgttttattctgccgtacccagtttttggatttttgtcttccccttcttctctttgctaaacgacccctccaagataatttttaaaaaaccttctcctttgctcacctttgcttcccagccttcccatccccccaccgaaagcaaatcattcaacgacccccgaccctccgacggcaggagccccccgacctcccaggcggaccgccctccctccccgcgcgcgggttccgggcccggcgagagggcgcgagcacagccgaggccatggaggtgacggcggaccagccgcgctgggtgagccaccaccaccccgccgtgctcaacgggcagcacccggacacgcaccacccgggcctcagccactcctacatggacgcggcgcagtacccgctgccggaggaggtggatgtgctttttaacatcgacggtcaaggcaaccacgtcccgccctactacggaaactcggtcagggccacggtgcagaggtaccctccgacccaccacgggagccaggtgtgccgcccgcctctgcttcatggatccctaccctggctggacggcggcaaagccctgggcagccaccacaccgcctccccctggaatctcagccccttctccaagacgtccatccaccacggctccccggggcccctctccgtctaccccccggcctcgtcctcctccttgtcggggggccacgccagcccgcacctcttcaccttcccgcccaccccgccgaaggacgtctccccggacccatcgctgtccaccccaggctcggccggctcggcccggcaggacgagaaagagtgcctcaagtaccaggtgcccctgcccgacagcatgaagctggagtcgtcccactcccgtggcagcatgaccgccctgggtggagcctcctcgtcgacccaccaccccatcaccacctacccgccctacgtgcccgagtacagctccggactcttcccccccagcagcctgctgggcggctcccccaccggcttcggatgcaagtccaggcccaaggcccggtccagcacaggcagggagtgtgtgaactgtggggcaacctcgaccccactgtggcggcgagatggcacgggacactacctgtgcaacgcctgcgggctctatcacaaaatgaacggacagaaccggcccctcattaagcccaagcgaaggctgtctgcagccaggagagcagggacgtcctgtgcgaactgtcagaccaccacaaccacactctggaggaggaatgccaatggggaccctgtctgcaatgcctgtgggctctactacaagcttcacaatattaacagacccctgactatgaagaaggaaggcatccagaccagaaaccgaaaaatgtctagcaaatccaaaaagtgcaaaaaagtgcatgactcactggaggacttccccaagaacagctcgtttaacccggccgccctctccagacacatgtcctccctgagccacatctcgcccttcagccactccagccacatgctgaccacgcccacgccgatgcacccgccatccagcctgtcctttggaccacaccacccctccagcatggtcaccgccatgggttagagccctgctcgatgctcacagggcccccagcgagagtccctgcagtccctttcgacttgcatttttgcaggagcagtatcatgaagcctaaacgcgatggatatatgtttttgaaggcagaaagcaaaattatgtttgccactttgcaaaggagctcactgtggtgtctgtgttccaaccactgaatctggaccccatctgtgaataagccattctgactcatatcccctatttaacagggtctctagtgctgtgaaaaaaaaaatgctgaacattgcatataacttatattgtaagaaatactgtacaatgactttattgcatctgggtagctgtaaggcatgaaggatgccaagaagtttaaggaatatgggagaaatagtgtggaaattaagaagaaactaggtctgatattcaaatggacaaactgccagttttgtttcctttcactggccacagttgtttgatgcattaaaagaaaataaaaaaaagaaaaaagagaaaagaaaaaaaaagaaaaaagttgtaggcgaatcatttgttcaaagctgttggcctctgcaaaggaaataccagttctgggcaatcagtgttaccgttcaccagttgccgttgagggtttcagagagcctttttctaggcctacatgctttgtgaacaagtccctgtaattgttgtttgtatgtataattcaaagcaccaaaataagaaaagatgtagatttatttcatcatattatacagaccgaactgttgtataaatttatttactgctagtcttaagaactgctttctttcgtttgtttgtttcaatattttccttctctctcaatttttggttgaataaactagattacattcagttggcctaaggtggttgtgctcggagggtttcttgtttcttttccattttgtttttggatgatatttattaaatagcttctaagagtccggcggcatctgtcttgtccctattcctgcagcctgtgctgagggtagcagtgtatgagctaccagcgtgcatgtcagcgaccctggcccgacaggccacgtcctgcaatcggcccggctgcctcttcgccctgtcgtgttctgtgttagtgatcactgcctttaatacagtctgttggaataatattataagcataataataaagtgaaaatattttaaaactacaa

SEQ ID NO: 531 - DNA, 6629 bp, Homo sapiens
ctagaaacagcaagtacgctgctcaaccctgcctgaactttcctgtaaacagccactgacagactgcatccctgctgggtggatcctgcgactcctagagggaatggcacttcttgtttttaattagcaaggtgaaaggtgaattaaaactagcagtttggcaagtcagtgcaagaggctgacttctgagaggcttccaggagcccgaagagaggacctccacgggagaagggagtgcgtgtgctcggttttgtttttttctctcttttttttttttttttctgaatgaacagctttgcccaagtgactgaaaaatacagcttcttcctgaatctaccggcgtagttgctgaagagcgctctagacaggacatggctctgaagactcactctttggaatgtcctcttgctcccggcttataaacaactgtcccgaggaaagaaaggttttacatagccaaatacagcctgacaaatggcacttcggaactgtgctttctgatgacaacgcgttcgatttctgacaaagcctctcgcacgctgcccctggagggaagtcctaagtaaaactcagaccctccttaaagtgaggagcgagggcttggacggtgaacacggcagcatggcatccgcggggcacattatcaccttgctcctgtggggttacttactggagctttggacaggaggtcatacagctgatactacccacccccggttacgcctgtcacataaagagctcttgaatctgaacagaacatcaatatttcatagcccttttggatttcttgatctccatacaatgctgctggatgaatatcaagagaggctcttcgtgggaggcagggaccttgtatattccctcagcttggagagaatcagtgacggctataaagagatacactggccgagtacagctctaaaaatggaagaatgcataatgaagggaaaagatgcgggtgaatgtgcaaattatgttcgggttttgcatcactataacaggacacaccttctgacctgtggtactggagcttttgatccagtttgtgccttcatcagagttggatatcatttggaggatcctctgtttcacctggaatcacccagatctgagagaggaaggggcagatgtccttttgaccccagctcctccttcatctccactttaattggtagtgaattgtttgctggactctacagtgactactggagcagagacgctgcgatcttccgcagcatggggcgactggcccatatccgcactgagcatgacgatgagcgtctgttgaaagaaccaaaatttgtaggttcatacatgattcctgacaatgaagacagagatgacaacaaagtatatttcttttttactgagaaggcactggaggcagaaaacaatgctcacgcaatttacaccagggtcgggcgactctgtgtgaatgatgtaggagggcagagaatactggtgaataagtggagcactttcctaaaagcgagactcgtttgctcagtaccaggaatgaatggaattgacacatattttgatgaattagaggacgtttttttgctacctaccagagatcataagaatccagtgatatttggactctttaacactaccagtaatatttttcgagggcatgctatatgtgtctatcacatgtctagcattcgggcagccttcaacggaccatatgcacataaggaaggacctgaataccactggtcagtctatgaaggaaaagtcccttatccaaggcctggttcttgtgccagcaaagtaaatggagggagatacggaaccaccaaggactatcctgatgatgccatccgatttgcaagaagtcatccactaatgtaccaggccataaaacctgcccataaaaaaccaatattggtaaaaacagatggaaaatataacctgaaacaaatagcagtagatcgagtggaagctgaggatggccaatatgacgtcttgtttattgggacagataatggaattgtgctgaaagtaatcacaatttacaaccaagaaatggaatcaatggaagaagtaattctagaagaacttcagatattcaaggatccagttcctattatttctatggagatttcttcaaagcggcaacagctgtatattggatctgcttctgctgtggctcaagtcagattccatcactgtgacatgtatggaagtgcttgtgctgactgctgcctggctcgagacccttactgtgcctgggatggcatatcctgctcccggtattacccaacaggcacacatgcaaaaaggcgtttccggagacaagatgttcgacatggaaatgcagctcagcagtgctttggacaacagtttgttggggatgctttggataagactgaagaacatctggcttatggcatagagaacaacagtactttgctggaatgtaccccacgatctttacaagcgaaagttatctggtttgtacagaaaggacgtgagacaagaaaagaggaggtgaagacagatgacagagtggttaagatggaccttggtttactcttcctaaggttacacaaatcagatgctgggacctatttttgccagacagtagagcatagctttgtccatacggtccgtaaaatcaccttggaggtagtggaagaggagaaagtcgaggatatgtttaacaaggacgatgaggaggacaggcatcacaggatgccttgtcctgctcagagtagcatctcgcagggagcaaaaccatggtacaaggaattcttgcagctgatcggttatagcaacttccagagagtggaagaatactgcgagaaagtatggtgcacagatagaaagaggaaaaagcttaaaatgtcaccctccaagtggaagtatgccaaccctcaggaaaagaagctccgttccaaacctgagcattaccgcctgcccaggcacacgctggactcctgatggggtgagactatctactgtcttttgaagaatttatatttggaaagtaaaaaagtaaaaaaataaatcatccaacttctttgcattacttaaaagagatttctgtaatacaggaatgactatgaaggtgttataataaattattctacatactcatttgactggataaactttacataaaattaactaattttttaaataaatgcattgcttaatggtttctcattatgtttatcaaaaaacaactgtagctgttattttcagtacttggctgcttttctgtgaaaattattattttacttttggaagacaagattattagaatattgaagaaaaattggagacttataatcatggtaaatataaaactaaatatgttttaatatttctgaatttttcttttccatcacaatgtaagatatgcagaatacaagatactttggcattctcatgtgaactttctgtactctttaaggattattttattagtgttgtttaagccatgagtgttaagtagcaggtgtgttgtgagtgctgtaacccatgaaaggaaaaatgtcattctgaggcttgtgcccttcgtaaaatattcattaaagtacattcacactatttttgctttataacacagtctttaattttcactcactgtggaaataaaaactaaggtaacttctcagaaagatatcaaatctcagaaagaatgtcaaatcagatgaagttatagttaggattctaactactgtaaaagatttttgcttccctcttgtggtaaaaaaaattatattctcacacatttcttttttctctacagacggatatctgtttaggaaagatttgaaagcagattatcagtaggtacatggatacatcaagttcatttgcagaaacaaataactgaaataaaaaacatgttaatccttgtatcatactttaatatgaaagtattgtttatagataatttatctcacaagtcaaaaatgaagattttgcagcactgaaaatctattaaagctccaaattttaagtttctaaataatcttcgctgaaatctaaaatatactataacaaccgtgttttatttgtgaaaaaaatattaaagtgatttgctctcaaatatcaaattttcttctctcttttatattaagagacagaaaattgtttcatgagttcacttaactactgagatattcagagcatttttacctctctcttaaatgttataaaaaacaattgtatttttaagaatgtttatttatcaaagtctttccttcttctattaaatatttagcaattacctttctaaaatatgaaattttgtaagatgttttcacctaaataaaaattgaaagcaagtggattacacaggagaaccattatgaacatttatttagatattaatcttaaacagtgtttatttcagttttcaaagttagcttataggttatacatttaagttaaagtgctcataatcacttgcaatttcattgtaaaatgaacaaatacataaatattttaagaaaaatttaagtttattcagataagtcaccatgcttcaaaagatctaagaaatgcaaatatactgaaaattgacatcctctgaaaattccacttgctatttacccaagaatccactggaggtcattactgccattaaataataactgaaaagactatgtagtgaaatgtatttttaaaaactatattcagtaaaagcctgctcaatttggagaaatagaaccacaaacacagatcacaggggccttacaaagtttatgtctgaacaaataagtcaattaagtacactttattgaaaattgccttccattaacacacaagaaagaaagcaggattttctcctgtatctgaattttaaaattaaaaaggcagataagacataaatagttatcattttaattgcaataacacagacaagtagttaatgatgataacaatggtgtaacttgtaaactaaatatttggtaactgaagcaataggcagaggaaaatagcttttctatgacacaagtcataagaagtccatatactgaagagcgtttgattaaaataaagtgactattaaccagaaaagaaacattttacataaaatgctaaaatttattataggaaaataaatcaaacccaaagaaagtttattcaatgctaatttgaaagaaaattgataagaaaactttgagggcccaagtccacaatttggtgagaccactaaattttacatataattatacacacacatatgtacatatatatgtatataatcttgcttcccgcctgtttatggcagtactgaagagaaatgggaaagaagagggagggagagagaaagacgaagggagagagaaagcagtttccaaggatatgtttcatgtcccaccattttctcagtttctccctctctctcccaacacacacacacacacacccctcacatactataaaataaatcttcactgccctatcaaaatacaaataaatcaatctatgctgttctgtccttcttgagaatctaaaacataccacaaaaatacatccccagtcttttgttctgtctgaggttagaattaattcaaattcagaatctgttgtgagaaatgcccaggctttaaaaattaaaaatggatggatcttctctgaactcagggagggcacatacttagatacctacaagacttggaggaattaagagttcacccttcatctcaccaaattttccccatttttctctttcttgtagaaggagagaaaccatgctctctagcaacattgagcaaaaatcataaccactcatctaatttctaagaggcacctccatcgagggccggtctcctgcttctttagacctcttctatctttgttacaggagaggacctgtggatagacttagttttgacataaaacaatgcccattcacctcctccttcagcacaacgtcacccattgggcaagagatccagatttgttaacaaaaaagattttacttcgtgattccacgtctataattctatattgctaattttttcttttgtgtgaattactgaatatttcagagcaaagctatcaacttggagaaacagggattaaaaataaggataaacactaataagagctctagaaaaaagggaacagaaagtctgcctgtttagtaagtggcaattccatacatattttagagttttttctatctaaaattagttaaatacttagaatgtttgtaatgagtgttcgatatttgctataggttttagggttttgtaaatcttcatagtaattataaacatttgtaaaatttgtaaaatactataagtcattttgagtgttggtgttaagcatgaaacaaacagcagctgttgtccttaaaaatgaattgacctggccgggcgcggtggctcacgcctgtaatcccagcactttgggaggccgaggcgggtggatcatgaggtcaggagatcgagaccatcctggctaacaaggtgaaaccccgtctctactaaaaatacaaaaaattagccgggcgcggtggcgggcgcctgtagtcccagctacttgggaggctgaggcaggagaatggcgtgaacccgggaagcggagcttgcagtgagccgagattgcgccactgcagtccgcagtccggcctgggcgacagagcgagactccgtctc

SEQ ID NO: 532 - DNA, 1772 bp, Homo sapiens
ggataaatgtagcgccgcggcgcgggccagcagctctgcgaggggccggagcgcggcggagccatgcagtacccgcaccccgggccggcggcgggcgccgtgggggtgccgctgtacgcgcccacgccgctgctgcaacccgcacacccgacgcccttttacatcgaggacatcctgggccgcgggcccgccgcgcccacgcccgcccccacgctgccgtcccccaactcctccttcaccagcctcgtgtccccctaccggaccccggtgtacgagcccacgccgatccatccagccttctcgcaccactccgccgccgcgctggccgctgcctacggacccggcggcttcgggggccctctgtaccccttcccgcggacggtgaacgactacacgcacgccctgctccgccacgaccccctgggcaaacctctactctggagccccttcttgcagaggcctctgcataaaaggaaaggcggccaggtgagattctccaacgaccagaccatcgagctggagaagaaattcgagacgcagaaatatctctctccgcccgagaggaagcgtctggccaagatgctgcagctcagcgagagacaggtcaaaacctggtttcagaatcgacgcgctaaatggaggagactaaaacaggagaaccctcaaagcaataaaaaagaagaactggaaagtttggacagttcctgtgatcagaggcaagatttgcccagtgaacagaataaaggtgcttctttggatagctctcaatgttcgccctcccctgcctcccaggaagaccttgaatcagagatttcagaggattctgatcaggaagtggacattgagggcgataaaagctattttaatgctggatgatgaccactggcattggcatgttcagaaaactggatttaggaataatgttttgctacagaaaatcttcatagaagaactggaaggctatataagaaagggaatcaattctctggtattctggaaacctaaaaatatttggtgcactgctcaattaacaaacctacatggagaccttaattttgacttaacaaatagtttatgtactgctcttaggttgttttgataaagtgacattatagtgattaaattcttccccctttaaaaaaacagttagtggttttcactatttataaaaaattaattttgaactttttgttaaatttttaagttatagctttaaaggttttaataggaccttcttgaacgacttttctgtaatctgtttatctcccacttaatggaaaggcaaaggggtaccccaaatccagaggtgcctacatttcaggcagccttggagtattttaaaaggaaaacattctttacttttatatgacattcttatactgctgtctcaaatccaaaaacatttcagagctcttgtctcagagatgtgtgttctttttgtcagagatatggttgatgagaatcttaaatgcttgttttgcactatcacttagtacctgtttgaccaaggtgttaaggggatagtacctcccaattcaagcagagaaactgacctgactaaagttaatcgcagatgaactagaagtcacaggttaattaaatgtaagtagattgtagatactgttttatatcaaacaatgtttataatgtgtatatagaattgttcactgtaaaaaaaatggccaaaatgtgttttttttttaataagtaacttgactataaaataaagccgtccgtgggacgactgacctcgttgcaaaaaaaaaaaaaaa

SEQ ID NO: 533 - DNA, 2180 bp, Homo sapiens
agaaaggactttgaagagcaagcggcgttgttcgcctgcggaagcagtgctgccggtctctggacaaatttctcccggaggtggagacaaggaagctccagcttcgctttcccttgtggcccagagtggaacatactgagctgcactgaatcatctggatgcactcgcaactttaggaactggtggcaatttgtaaaaagacagctctggaagttgaagagaccagtggcttcaagcaaaaagtaaattgaaaatgggagatatctttttgtgtaagaaagtggaatcaccaaagaagaatttgagagaatccaaacaaagggaggaggatgatgaagatccagatctgatctatgttggggtggagcatgtacatagagatgctgaagttctctttgtcgggatgatttcaaattcaaaaccagtcgtttcaaacattttgaacagagtcaccccaggctcaaagtcaagaagaaagaaaggccacttccgtcaatatcctgctcacgtgtcgcagcctgcaaatcatgtgacctctatggcaaaagccatcatgcccgtttctctgtctgaggggcgatcgacagatagtcctgtcactatgaagtcttcatctgaacctggttataaaatgagctcaccacaagttgtttctcccaattactcagattcgctccccccagggactcagtgtctagttggagctatggtctctggaggaggcagaaatgagagttctcctgattcaaagcgactttccacttcagatataaacagcagagattccaaaagggttaaactcagggatggaatcccaggggtaccttctttagctgtggtcccttcagatatgtcttctacaataagcacaaatacaccctcacaggggatctgcaactcatcaaaccatgttcagaatggagtaacatttccttggcctgatgctaatggaaaggcacatttcaatcttacagatccagagagagcaaatgagtctggcctggcaatgacagacatttcaagtctagcaagtcaaaacaagacctttgatcccaagaaagaaaatcccatcgtgttacttagcaacttttactatggacagcataaaggagatgggcagccggaacagaagactcacaccacctttaaatgcctcagctgcgtgaaagttctaaaaaatattaagtttatgaatcacatgaagcatcatttggaatttgagaagcagaggaacgacagctgggaagaccacaccacctgccagcactgccaccggcagtttcccactcccttccagctacagtgtcacattgatagtgtacacatcgccatggggccctctgctgtctgtaaaatctgtgaattgtcatttgaaacagatcaggtcctcttacaacacatgaaggaccatcataagcctggcgaaatgccctacgtgtgccaggtttgccattacagatcgtcggtctttgctgatgtggaaacacattttagaacgtgccatgaaaacacaaagaatttgctttgtctgttttgtctcaaacttttcaaaactgcaataccatacatgaatcattgttggaggcacagcagaaggagggtccttcagtgttccaagtgccggctacagtttttgacgttgaaggaggaaatagagcacaaaaccaaggaccatcaaacatttaaaaagccggagcaactgcaagggttccctcgtgaaacaaaagttattattcaaacttcagttcagccaggatcaagtggtatggcttccgttattgttagcaacactgaccctcagtcttctcctgtaaaaactaaaaagaagacggctatgaacactagagattccagactcccttgcagcaaggattctagctgaaaatatgttcgactgacttccaggagttccgaaaggcagaagtgaggctaggccatatgtgcattgtggctgtagatgctagcaagcaatgtcatcaactgtcaggttgtttttcacagtgacatctcatcagctccctattgtcaagaagtagctccaaagtctttgagccctttcccagtcaaatgctcccaacaaggcatcccttattctgacctcagaggtttttcttgtttatgaactttaaataaatggaatcacacaaaaaaaaaaaaaaaaaaaaaaaaaaaaaaaaaaa

SEQ ID NO: 534 - DNA, 4057 bp, Homo sapiens
ggtgcgggctgcgagcgggacccgcggagctgcgctgtcctcgacgcctccgccaggcgcgggccgaggagcctccaagagctggcccggcccccggccgccgccgcccaaccccgggcatctgccccgcgccgttgtccccgcggcttcgggccggcgggaccgccccgtcccttccaggggtgacccgggggtcgcgggtgggacggcgcctgcggccgagtctggggggcgccgggtgtcgggtcgggaagcggccgccgcgactcttgcctcccgggcgtcgttgctccacgggcctgcctccacccgcggggacaggtgccccggctggggtctgttgggaagatggcgaccccgggcatgagctggcagcagcactattacggcggctcggcggccaaattcgcgccctcgccggccaccgcacagctggctgggcacagcatggactacagccaggagatgcacctgaaaatgagcaagaaaatcgcccagctcaccaaggtaatatatgctttaaacactaaaaatgatgagcatgaatctgcaattcaagccctcaaagatgctcatgaagaagaaattcaacaaattcttgctgaaacaagagaaaaaatattgcagtataaaagcaaagtaacagaggagctagaccttagaagaaagattcaagttttagaatcatcattagaagatcacataaaaatgaagcagcaggctttgacagaatttgaagcttataagcacagagttgaggacatgcaactttgtgcagaagcccagcatgtccaacgcatagtgaccatgtctagagaagtcgaagagattagaaggaaatttgaagaaaaattacggagctttggacaacttcaagtacagtttgaaaaagacaaacgattggcattggaagacttgcaagctgctcacagacgggagatacaagagctattgaagtcacagcaggatcacagtgcctcagtaaataaaggccaggaaaaggcagaggaactacacagaatggaggtggagtccctaaacaaaatgcttgaggagctaagacttgaacggaagaaactaattgaggattatgaaggcaagttgaataaagctcagtccttttatgaacgtgagcttgatactttgaaaaggtcacagctttttacagcagaaagcctacaggccagcaaagaaaaggaagctgatcttagaaaagaatttcagggacaagaagcaattttacgaaaaactataggaaaattaaagacagagttacagatggtacaggatgaagctggaagtcttcttgacaaatgccaaaagcttcagacggcacttgccatagcagagaacaatgttcaggttcttcaaaaacagcttgatgatgccaaggagggagaaatggccctattaagcaagcacaaagaagtggaaagtgagctagcagctgccagagaacgtttacaacagcaagcttcagatcttgtcctcaaagctagtcatattggaatgcttcaagcaactcaaatgacccaggaagttacaattaaagatttagaatcagaaaaatcgagagtcaatgagagattatctcaacttgaagaggaaagagcttttttgcgaagcaaaacccaaagtctggatgaagagcagaagcaacagattctagaactggagaagaaagtaaatgaagcaaagagaactcagcaagaatattatgaaagggaacttaaaaacctgcaaagtagattggaagaggaggtgactcaattaaacgaggcccattctaagactttggaagaattagcttggaagcaccatatggcaattgaagctgtccacagtaatgcaattagggataagaaaaaactgcaaatggatttggaagaacaacataacaaagataaactaaacctggaagaggataaaaatcagcttcaacaagagctagaaaacctaaaggaagtactggaagacaagttgaatacagccaatcaagagattggccacctccaagatatggtaaggaaaagtgaacaaggtcttggctctgcagaaggacttattgctagtcttcaggactcccaggaaaggcttcagaatgagcttgacttgactaaagacagcctaaaggagaccaaggatgctctattaaatgtggagggtgagctagaacaagaaaggcaacagcatgaagaaacaattgctgccatgaaagaagaagagaagctcaaagtggacaaaatggcccatgacttagaaattaagtggactgaaaatcttagacaagagtgttctaaacttcgtgaagagttaaggcttcaacatgaagaggataagaagtcagcaatgtctcaacttttgcagttgaaagatcgagagaaaaatgcagcaagagattcatggcagaagaaagtagaagatctcttaaaccagatttccttgctgaaacagaatctggagatacagctttcccagtctcagacttctttgcaacaactgcaagcccagtttacgcaagaacgacagcggcttacgcaagagcttgaagaattagaggagcaacatcagcaaagacacaaatcattaaaagaagcacatgtccttgcatttcaaactatggaagaggaaaaggaaaaggagcaaagagctcttgaaaatcatttacaacagaagcattctgcagagcttcaatcactaaaagatgcacacagagagtcaatggagggcttccggatagaaatggaacaggaacttcagactcttcggtttgaattagaagatgaaggaaaggctatgcttgcttccttgcgctcagaactcaaccatcaacatgcagctgcaattgatttgttacggcataatcatcatcaagaattggcagctgctaaaatggaattagagagaagcatagacatcagcagaagacagagtaaggagcacatatgtagaattacagatctacaagaggaattaagacacagagagcatcacatctctgaattggataaggaggttcagcaccttcatgagaatataagtgccctaaccaaagaactggaatttaaggggaaagaaattctcagaatacgaagtgaatctaaccaacagataaggttgcatgaacaagatttaaacaagagacttgaaaaagagttggatgtcatgacagcagaccacctcagagagaaaaatatcatgcgggcagattttaataagactaacgagctactcaaggaaataaatgccgctttacaagtgtcattagaagaaatggaagaaaaatatctaatgagagaatcaaaaccagaagatatacagatgattacagaattaaaagccatgcttacagaaagagaccagatcataaagaaactaattgaggataataagttttatcagctggaattagtcaatcgagaaactaacttcaacaaagtgtttaactcaagtcctactgttggtgttattaatccattggctaagcaaaagaagaagaatgataaatcaccaacaaacaggtttgtgagtgttcccaatctaagtgctctggaatctggtggagtgggcaatggacatcctaaccgcctggatcccattcctaattctccagtccacgatattgagttcaacagcagcaaaccacttccacagccagtgccacctaaagggcccaagacatttttgagtcctgctcagagtgaagcttctccagtggcttctccagatccccagcgccaggagtggtttgcccggtacttcacattctgaaagaattgtgttggcacagctctgtatagactgttactaagagcatgactttatacagattgttatgtaaataggctttcctatgtcaaacactgtgaatgagaaagtatttgtctctccaacttgaaaatgcactgtatttcctgtgatatttattggaatcattctataaggtactatattatgtgtgtaattataactgttatttttatttgagatggaagagtctttaacctttgtaattactgcataataaattttgttagaatcaaaaaaaaaaaaaaaa

SEQ ID NO: 535 - DNA, 7326 bp, Homo sapiens
cctctgccgctcctccgccccacggctcaggattcgcccaaaatgaggacttccctgcaggcagtggcactctggggacagaaggcccctccccacagcatcactgccatcatgatcactgatgaccagcgaacgattgtgactggaagtcaagagggtcagctctgtctctggaatctctcacatgaactaaagatttcagcgaaagaactcctatttggtcattcagcttcggtaacatgtttggcaagagcaagggacttctctaaacagccctacattgttagtgctgctgaaaatggggagatgtgtgtttggaatgtcaccaatggacagtgcgtggagaaggctacacttccttacaggcacactgcaatctgttattaccactgctcattccggatgacaggagaaggctggcttctttgttgtggagaatatcaagatgtccttataattgatgccaaaactttggctgttgttcacagttttagatcatctcagtttcctgactggatcaactgcatgtgcattgttcactccatgagaattcaagaagattctctcttggtggtatcagtagctggtgagctcaaagtatgggatctttcctcatctatcaacagcattcaggaaaagcaagatgtctatgaaaaagaatccaagtttcttgagtccttgaactgccagacaattcgattttgcacatatactgagagacttctattggtggtattttctaaatgttggaaggtttatgattattgtgatttttcccttctgctgactgaagttagtagaaatgggcagttctttgctggtggagaagtgattgctgctcacagaatcctcatctggacagaagatggtcacagttacatctatcagctgctgaacagtgggctttcaaaaagcatataccctgctgatggaagagtgcttaaagagaccatttatcctcatttactgtgctctacttctgtgcaggaaaataaggaacagagccgtccctttgttatgggctacatgaatgaaaggaaagagcctttttacaaggtacttttctctggagaagtctcaggaagaattactttgtggcacatccctgatgttcctgtatccaagtttgatggttctcctagagagataccagtaactgccacctggactcttcaagataattttgataagcatgatactatgtcacaaagtattattgactatttctctgggcttaaagatggggcaggaactgctgtagtcacttcatcagagtatattccaagtcttgataaactaatatgtggctgtgaagatgggacaattatcattacccaggctttgaatgctgccaaagcaagacttctggaaggtggttctttagtaaaagattctccccctcataaagttcttaaaggccaccaccaaagtgtcacttcattactctatccacatggtctctcttcgaaattagaccaaagttggatgttgtctggggacctggactcatgtgtgatcttgtgggatatctttactgaagaaattttgcataaattctttttggaagctggtccagtaacaagtcttttgatgtcaccagagaagtttaaactaaggggtgagcagataatttgctgtgtgtgcggtgaccattccgtggctctccttcaccttgagggaaagagttgcctcctgcatgcccggaagcacctttttcctgtgaggatgataaaatggcacccggttgagaattttttaattgttggatgtgcagatgactcagtttatatctgggaaattgaaacaggcactttggaaagacatgagacaggagaaagagcacgaattattcttaattgttgtgatgattcacagcttgtgaagtctgtacttcccattgcctcagagacacttaagcacaaaagtatagaacagagatcctccagcccctaccagcttgggccattaccttgccctggtctgcaggtggagtcttcatgtaaggttactgatgccaaattttgcccaagaccttttaatgtcttgcctgtgaagacaaaatggagtaacgttggctttcatattcttctatttgatctggaaaaccttgttgaacttttgctaccaactccactcagtgatgttgactcttccagttcattctatggtggtgaggtcctgagaagagccaagagcacagtggagaagaagacactgacactgagaaaaagtaaaactgcctgtggtcctctttcagcagaggcactagccaagcctattactgaaagcctggcccaaggagataataccatcaaattctcagaagaaaatgatggcattaaaaggcagaagaaaatgaagatctccaaaaaaatgcagcctaagccatcaagaaaagtagatgccagtctcacaatagacacagcaaaattgtttctgtcttgccttttgccatggggagtggataaagatttagattatctttgcattaagcacctcaatattttaaagcttcagggtcctatttctttgggaatttctttgaatgaagataatttctcactgatgttgccaggttgggatttatgcaatagtggaatgataaaagactattcaggagtaaatttattttccaggaaagttttggacttgtcagataaatacacagccactcttccaaatcaggttggaattccaagaggattggaaaataattgtgattctttgcgagagtcagatactatagtttatttgttgagcagactatttttagttaataaattagttaacatgcctttagaattggcatgtagagttggcagttctttcagaatggaaagtatacataataagatgagaggtgctgggaatgacattttaaatatgtcaagcttctacagttgcttacgaaatggtaagaatgaatcccatgtacctgaggctgacctttcacttttgaagctaatttcctgttggagagaccagtctgtgcaggtaactgaagcaatacaagctgttctcttggcggaagttcaacaacacatgaagagtttgggaaagatacccgtcaatagtcaaccagtgtccatggcagagaatggtaactgtgagatgaagcagatgctgccaaagctggaatggacagaagaactagagttacagtgtgttagaaacactttgcctctgcaaactccagtcagcccggtcaagcatgacagcaactcaaactcggcaaacttccaagacgtggaggacatgcctgacagatgtgccttggaagagtctgagagtccaggtgagccaaggcatcattcatggatagcaaaggtctgcccctgcaaggtgtcttaaatggaatctcatcagtaggagctgaatttggacaaattaagaaatccaaaagatgccatttgtttattactgtataaaagcattgttgttattggtcaagttattaggctgtagtggatttgctaatactttagccaacatgtattaaagtgattttaatacatgctgattacaatgcaatacatactgattgaaaatattcatattcatctaattttagaaaaatattgcctagatcattctctattcctgtttcttactttttctgttaatatttccaacagggaatgccagtccacagacacaaatttaatactgctttaaattttctcctatccttttagtccctgaattatataataaacaatgttaaaaccaatgtagtacacaatacttacttacaaatttaatactgcttcaaggtatttaatctaaaattttaccaactttgatttgtctggttaggatattttgttttagtggatatgctttaattcggatcaattactgcagtaaatctcatccctaagcatgaaatgttgtcaacaaatacccagttccatttagttatcaattagcccaaataagagatacaaagtataacagtgaccaaccttgtactgttgagttaatttgaacttctaatgacattgaggctaatgtctttagctcaaggttgatcttgttggccatatagatgtgaactagggaaggggaatcaacttacagcatatcacaattgatccttattaagtataaactcttgtaggtcttttcccagaaagaagcttgactagcaggaattctaaaactgaaatatatcaaacagcataaataggaatagacataaagtgctcttctattaaagcctttggtgatctatttactatgatttatattgtacagttcctcgatttacagaaaatcatcaaaattattaatctacatatcttatgtatataaatattgcctaatccatagaaaaaaggatataaagtattaaatatgtgatatatagctatatctatctatctatgtatctaatagggaagtccaagtcacttcaattgaagaaacatatctctgagcataggagcagcctcaggtcctatggtgggatgcagtggacaggagagggggaaattagaaaagagaactatataattgaaaaagggatataaagcattaaatatatgatatatagctatatctatgtatgtatctaacagagaagttcaagtcacttcaattaaagaaacatttttgagcatgggaccagcctcaggtcttatgctgggatgcagtagacaggagatggggaaattagaaaagagaactgtgtaattgaaatgacgtgggctgcacccttaaggaacttataattaatgatgatctgaataaacataccaggataaagatgtcaaatgagtgtgactcccttaaagtagattaaagtgtgcattctttgtttcctaaaatatgattttactgcttgaaattacatttgagttgaagtttagaaactaacatagcattaatatgaataatcatggaaaattattatcctttgaaaactgattgataaatatattccccctcctttagaaacagtcaaaagccacttcaaacaagtttcaaaataaaggaaggtagcaagttaggcgatggattatattttcttgcttgttgtataccagttgtcaaggacattataaggactcccaaaagcattttgaaggatggcaatatcaaataagtgtatgtcctctcaaatgaggcatttttaattgttaaaatctatttggacgctcaggttatgatatgtttatgaaaaataagcttcattatttttatagctacatcctattattcccttttagaaacaagaataacaataggttttaatagttgccatacttagcatttatcagttctaatgaaaccaatattgaatctctgataaatattttctgatgttactagctatgggaaattagaactggcacaaccctgacattactaagtggaaatgttaggatttttcggcatcgcatgttagaatctctaaaatttaaacattcctgttaaatgactaaggtttgcttttatcaatatgaattctgaaggccaatatcataccattaactatgaaagcttttaattcctaaaaatagttttagagatattcaagcaatgctctcctaatatccatacgcaagtgtgtttatgacacaaattcactagtctgtttaaaaatgaattctttatattgactggtgttccacatatttcagtaatttctgttatgagaggacttgaaatagcaaattgccacacagttaactggatagaccacgtacgtggtgatcataaccacttggtactacacccagaaactcaaaattgtctttctcctgatgagatatgggtgtccttttgtacgtctaggcctaggtaaccagtggagtgattatattagcaaatgtgtttgtatccggagtcttcctgtcattgtaataaaaaatttatttaaaaattttgtcttgtgtttcttttttggtaatcatcttggtgatatttatgaatgtatttgtgtgtgtgtgtgtgtgtgtatacatacatatatatgtgtgtatatatatacacacatatatatacacatatatatgtgtgtatatatatatatatatggcatatcccccaaaggaatatcatattttcatttgcaagccttgattctttgacttgctgttgagtttcacattggctccattgtatattgcaggaaaaagtacctggaaagcctggagggttaaaagcagaggctcctcggcagcgtgtccaggccgtgtgtgcttgctgtgcttgtcagagcctcattccctcccctgtgttggagagctttctcacagggctcatccagaggtgctagaaagcaatgtgagcactattaaacacttcaaatataaggaaaaatgtataatgttagaaacacacagttaaaaagtagccccaggtatcaaacattctgttactattttagaaactaaattaaggctgctttgaacatgatggtattagaaaaatggtagaatacagtttgttaaatattaatattctatctttagatgatagcatttggtgacttttatttcttttctcatacattttttccagtgttctgtatttttaaaatcctttcataattattataatgaacactttagaaaagatactatttctcttccatccttagagggcacattataataattgagtattttaaaattaaattttatgccatgtatttaaaatgaaagttcaggttacattaattccaactgattttaaagccttattttcacagagtggactcattcaattttttaaattttatattcatacattttgattgctcagttatataaaagcggtgttatagactcctttattctccacaaaatgttgtcttatatgtaaagtgccaaaagttgtgtttaatttcctaagaaagtcattgctttgtaaacatttgcataatacttagtgttttttgtaattttaaaaaattagcttaaccaaaagagttgcaaaattaaaacttacttgagtaggtatctttcagacaaagctgcatggcttcatgtacaatagtccccagatcacctcgcactgtagtttgctcaagaaggagcctacagatggcaggtaggagaaggtaaactggaaattaacaggtctgtctgtaagagcatgccactggaaacacccatccaatttgggacccctggaagacagcatgtgtctaatgggaggcctgtcctagtacaactcctttactcttttcaccttcatcttgaccttctcagataccatctttatgtaaaatgttgatgttgtggagtttttgcagtaatttaatttttataaatattgtattaaaatatatttatcttgaaaaaaaaaaaaaaaaaa

SEQ ID NO: 536 - DNA, 2301 bp, Homo sapiens
tccagtgagttgcaagcctaatgctcacctgcagagacagaattcctgagtgaacgaacagagcagctcctcttccatctccagggtctcattctgttgcccaggctggagtgcagtggtgcgatctcggctcacagcaacctctctgcctccagaaatgacctccaccttcaacccccgagaatgtaaactgtccaagcaagaagggcaaaactatggcttcttcctgcgaattgagaaggacaccgagggccacctggtccgggtggttgagaagtgtagcccagcagagaaggctggccttcaagatggagacagagttcttaggatcaatggtgtctttgtggacaaagaagaacatatgcaggttgtggatctggtcagaaagagtgggaattcagtgactttactagttctggatggggattcctatgagaaagcagtgaaaacacgggtggacttgaaagagttgggtcaaagtcagaaggagcaaggtttgagtgataatatactttcccctgtgatgaatggaggtgtgcaaacttggacccagccccggctctgctatctcgtgaaggaaggaggcagctatggcttctctctgaaaactgtccaaggtaaaaagggggtgtacatgactgatattacacctcaaggtgtggctatgagagctggagttctggctgatgatcacttgattgaagtgaatggagagaatgtagaggatgccagccatgaggaagtggttgaaaaggtgaagaagtcaggaagccgtgtcatgttcctgctggtggacaaagaaactgacaagcgtcatgttgagcagaagatacaattcaaaagagaaacagccagtttgaaactgttaccccaccagccccgaattgtggagatgaagaaaggaagcaatggctatggtttctatctgagggcaggctcagaacagaaaggtcaaatcatcaaggacatagattctggaagtccagcagaggaggctggcttgaagaacaatgatctggtagttgctgtcaacggcgagtctgtggaaaccctggatcatgacagtgtggtagaaatgattagaaagggtggagatcagacttcactgttggtggtagacaaagagacggacaacatgtacagactggctcatttttctccatttctctactatcaaagtcaagaactgcccaatggctctgtcaaggaggctccagctcctactcccacttctctggaagtctcaagtccaccagatactacagaggaagtagatcataagcctaaactctgcaggctggctaaaggtgaaaatggctatggctttcacttaaatgcgattcggggtctgccaggctcattcatcaaagaggtacagaagggcggtcctgctgacttggctgggctagaggatgaggatgtcatcattgaagtgaatggggtgaatgtgctagatgaaccctatgagaaggtggtggatagaatccagagcagtgggaagaatgtcacacttctagtctgtggaaagaaggcctatgattatttccaagctaagaaaatccctattgtttcctccctggctgatccacttgacacccctccagattctaaagaaggaatagtggtggagtcaaaccatgactcgcacatggcaaaagaacgggcccacagtacagcctcacattcttcttccaattctgaagatacagagatgtgatgaaaacaagtaatagctttggctgtttatttgatagctgtttctgggtatttaataggaatcctttctcaaggaatgagttgtgacctgtttactgtctctttagaagaaaaactccactggaaaccattcaccatgtgtgattgtcttctgttatcatttgtcttacaggcggctattgcagacggctaatttatgcttaacttaggaagagataaggcaagagctagatttttttcatgtgatcttttccaagcttcaacttaacttaactacatttctctgtatgatgatgtctcttacttctacaggttccttgagcaccaaagatgattcataactctgtataggtgacagctgcttataaaagcatcttagcagataagcctattaaaattgtgcttttgtaacaatgttgtggttgctagaataaataccattaacaaatgccttttgagtatgcttgatagtgcttttgttttggattcactttttatgctttaaccttcatttgcctctagaaacccaaaacacaataaagtacagaataagaccttagtaataaaattcagaattttcttaaa

SEQ ID NO: 537 - DNA, 2010 bp, Homo sapiens
ctccccaccttctctcccgaaggcgaaaatggcagggccaggcgagaacctgggacagcggtggccctagccctgcgatcctcacccctcctgctaggagaggctgcgggctgcccgcggacgatgtggccgcggctgctcccgagcgcatcttcggcccgggtccccgccgccacccctcttctctgctccttccatcccgcccagaggagttgatgccgctgtcgccgccgccgccgctgctgaagccgcggctgatggatgccagggagtgccgcattgcttagcgaccccgcctctgggtttgctgatgatctctctccgccctggagctcagcgctgaagagctaccttattattaatcagaatttccatcgccacccctggcaggcgtatccttcagcagggaccgcaggaacattcacagtgcaggggctgagatgtgcgtgggggttgtttttgttacatcttggaagagaagagaagaggacagtaccaagatcagaaacacccgtgctaggtggaattaggggtgatttgttaggaaagagaaaggacaagaagaggagtgcggagcccttcaggggttcacatctctttaaaggaaaggaaagagggagccaaagtagggtgttgtattttagggggcagaggaagaagtttacaccccccggcccccccagctttgctgggggaaagcaggagcaacagggcacttgattggacaccaagattattaatttcctgtaggggagaggaagcaggcagcaggaggtctgggggctggagtctggtggtggcaaggaccaggtttgctttgggacagtcaacaaggtcttctgagggaaagctcagagataggcagaacaatgactcatttgcaagccggtctctcccctgagaccctggagaaagctcgcctggagctcaatgaaaacccagacacgctgcaccaggacatccaggaggtgagggatatggtcatcaccaggccggacattggctttctgcgcacggatgatgccttcatcttacgcttcttgcgggctaggaagtttcatcactttgaggccttccgcctcctggcgcagtactttgagtaccggcagcagaacctggacatgttcaaaagctttaaggccaccgaccctggcatcaagcaggcactgaaggatggcttccctgggggcctggccaatctggaccactatggcaggaagattctagtcctttttgctgccaattgggatcagagcaggtacacactggtggatattttgcgtgccatcttactttctttagaagccatgattgaagatcctgagcttcaagtgaatgggtttgttttgatcatagactggagtaacttcactttcaagcaagcctctaaactcacaccaagtatgctgcgattagctattgaaggcctgcaggatagtttcccagcgcgatttggaggaattcattttgtcaatcaaccatggtatatccatgccctgtacaccgtgatccggcctttcctgaaggagaaaactcggaaaaggatatttttgcatggtaacaacctgaacagtctacaccaactaattcatcctgagatcctgccctctgagtttggaggaatgctgcctccttatgacatggggacatgggcaagaacactgctagaccatgaatatgacgatgacagcgagtacaatgtagactcctacagcatgcctgtgaaggaagtagagaaggaactctccccaaagtccatgaagagatctcaatcagtagtggatcctacagtactaaaacgcatggataaaaatgaggaagaaaacatgcaaccattgctttctctggactaataacttctctacatccccttcatggattagaaatggaaagtattggttttcagcaacagggacaacactgtagaggaattaccagctggaaaccgacttattcatgttaatgtagcataatatataacaaggcatcaggctttccttggcctgaacc

SEQ ID NO: 538 - DNA, 2889 bp, Homo sapiens; identical to SEQ ID NO: 246

SEQ ID NO: 539 - DNA, 2759 bp, Homo sapiens
agcttgccacaattccctgagatctcccaggtggcagctgcctccccaagacaggctcactcaccatgaccaagctgagcgcccaagtcaaaggctctctcaacatcaccaccccggggctgcagatatggaggatcgaggccatgcagatggtgcctgttccttccagcacctttggaagcttcttcgatggtgactgctacatcatcctggctatccacaagacagccagcagcctgtcctatgacatccactactggattggccaggactcatccctggatgagcagggggcagctgccatctacaccacacagatggatgacttcctgaagggccgggctgtgcagcaccgcgaggtccagggcaacgagagcgaggccttccgaggctacttcaagcaaggccttgtgatccggaaagggggcgtggcttctggcatgaagcacgtggagaccaactcctatgacgtccagaggctgctgcatgtcaagggcaagaggaacgtggtagctggagaggtagagatgtcctggaagagtttcaaccgaggggatgttttcctcctggaccttgggaagcttatcatccagtggaatggaccggaaagcacccgtatggagagactcaggggcatgactctggccaaggagatccgagaccaggagcggggagggcgcacctatgtaggcgtggtggacggagagaatgaattggcatccccgaagctgatggaggtgatgaaccacgtgctgggcaagcgcagggagctgaaggcggccgtgcccgacacggtggtggagccggcactcaaggctgcactcaaactgtaccatgtgtctgactccgaggggaatctggtggtgagggaagtcgccacacggccactgacacaggacctgctcagtcacgaggactgttacatcctggaccaggggggcctgaagatctacgtgtggaaagggaagaaagccaatgagcaggagaagaagggagccatgagccatgcgctgaacttcatcaaagccaagcagtacccaccaagcacacaggtggaggtgcagaatgatggggctgagtcggccgtctttcagcagctcttccagaagtggacagcgtccaaccggacctcaggcctaggcaaaacccacactgtgggctccgtggccaaagtggaacaggtgaagttcgatgccacatccatgcatgtcaagcctcaggtggctgcccagcagaagatggtagatgatgggagtggggaagtgcaggtgtggcgcattgagaacctagagctggtacctgtggattccaagtggctaggccacttctatgggggcgactgctacctgctgctctacacctacctcatcggcgagaagcagcattacctgctctacgtttggcagggcagccaggccagccaagatgaaattacagcatcagcttatcaagccgtcatcctggaccagaagtacaatggtgaaccagtccagatccgggtcccaatgggcaaggagccacctcatcttatgtccatcttcaagggacgcatggtggtctaccagggaggcacctcccgaactaacaacttggagaccgggccctccacacggctgttccaggtccagggaactggcgccaacaacaccaaggcctttgaggtcccagcgcgggccaatttcctcaattccaatgatgtctttgtcctcaagacccagtcttgctgctatctatggtgtgggaagggttgtagcggggacgagcgggagatggccaagatggttgctgacaccatctcccggacggagaagcaagtggtggtggaagggcaggagccagccaacttctggatggccctgggtgggaaggccccctatgccaacaccaagagactacaggaagaaaacctggtcatcaccccccggctctttgagtgttccaacaagactgggcgcttcctggccacagagatccctgacttcaatcaggatgacttggaagaggatgatgtgttcctactagatgtctgggaccaggtcttcttctggattgggaaacatgccaacgaggaggagaagaaggccgcagcaaccactgcacaggaatacctcaagacccatcccagcgggcgtgaccctgagacccccatcattgtggtgaagcagggacacgagccccccaccttcacaggctggttcctggcttgggatcccttcaagtggagtaacaccaaatcctatgaggacctgaaggcggagcttggcaactctagggactggagccagatcactgctgaggtcacaagccccaaagtggacgtgttcaatgctaacagcaacctcagttctgggcctctgcccatcttccccctggagcagctagtgaacaagcctgtagaggagctccccgagggtgtggaccccagcaggaaggaggaacacctgtccattgaagatttcactcaggcctttgggatgactccagctgccttctctgctctgcctcgatggaagcaacaaaacctcaagaaagaaaaaggactattttgagaagagtagctgtggttgtaaagcagtaccctaccctgattgtagggtctcattttctcaccgatattagtcctacaccaattgaagtgaaattttgcagatgtgcctatgagcacaaacttctgtggcaaatgccagttttgtttaataatgtacctattccttcagaaagatgataccccaaaaggaaaaaaaaaaaaaaaaaaaaaa

SEQ ID NO: 540 - DNA, 2232 bp, Homo sapiens
agctcctaggaagcttcagggcttaaagctccactctacttggactgtactatcaggcccccaaaatggggggagccgacagggaaggactgatttccatttcaaactgcattctggtactttgtactccagcaccattggccgatcaatatttaatgcttggagattctgactctgcgggagtcatgtcaggggaccttgggagccaatctgcttgagcttctgagtgataattattcatgggctcctgcctcttgctctttctctagcacggtcccactctgcagactcagtgccttattcagtcttctctctcgctctctccgctgctgtagccggaccctttgccttcgccactgctcagcgtctgcacatccctacaatggctaaaacagcaatggcctacaaggaaaaaatgaaggagctgtccatgctgtcactgatctgctcttgcttttacccggaacctcgcaacatcaacatctatacttacgatgatatggaagtgaagcaaatcaacaaacgtgcctctggccaggcttttgagctgatcttgaagccaccatctcctatctcagaagccccacgaactttagcttctccaaagaagaaagacctgtccctggaggagatccagaagaaactggaggctgcagaggaaagaagaaagtctcaggaggcccaggtgctgaaacaattggcagagaagagggaacacgagcgagaagtccttcagaaggctttggaggagaacaacaacttcagcaagatggcggaggaaaagctgatcctgaaaatggaacaaattaaggaaaaccgtgaggctaatctagctgctattattgaacgtctgcaggaaaaggagaggcatgctgcggaggtgcgcaggaacaaggaactccaggttgaactgtctggctgaagcaagggagggtctggcacgccccaccaatagtaaatccccctgcctatattataatggatcatgcgatatcaggatggggaatgtatgacatggtttaaaaagaactcattataaaaaaaaaaaaacaaaaaaaatcaaaaattaaaaaaaatcaatgcggtctctttgcagaatgttttgcttgatgtttaaaaaataccttggatcttattttgtaaatacttacatttttgttaaaaaatacaagtattgcattatgcaagttatttcataatcttacatgtcctgtaacaggcttttgatgttgtgtctttccactcaaatgaatttgctaggtctgttctttttgaagctccccatgtctaactccattccaaaagaaaaatgaggtcagtagacagtctatggtgctagaaacccaccattgcctaatgacctagaaggctttgttgtctctgagcttgactaagaccatacctagatcacaggtattatgactccacatgaaccttcacatttgttcgctcataatctacttactgcctaaaaactacaaaaccaggctaagaaataccaccagtcatagcatttacttctgcttctcctggattatgtgctacaaatgtgctttggctttagaaagggatggatgagaagacagacctgagaccaatctgggtagaagcaaaaagttgaaccttttaaagtgctgaacacaaatccaaattcgaatggttcaagcagccgtgaaatcgctcttcataaagtgggcttaattctctagtttaagttcttttgatggaatgaattaattaatgtgtcaggtggcttatttgtggatgccatgattgatgatgttcattttaagctcttacctatagtacaagtacatgatgctactgaatatttttccacttggaaactgtgagctggttgttgcattaaaacacacatacaaacaaaatcaaaaacactgcggactttcactcaagctggtctttcttccccagtgtaaggcaatcctgcctactaacaacaccaacaacaaaacactccatctgtgaagctgacgcagttaagggggctaggcagggcatttgtgccaactaagaatcaccagatacccaccataagtacctatcgcagttttgaagtcgtttctccccaactcccaactcctgaaggttgctgcctgcatatttactcttcattagtgctattttcctgtatgtcattgtgagcaagctgtgattaataaagaattggagttctgtgaactaataaaggtttggtctgttaaaaaaaaa

SEQ ID NO: 541 - DNA, 473 bp, Homo sapiens
aggcacagacaccaaggacagagacgctggctaggccgccctccccactgttaccaacatgaagctgctcgcagcaactgtgctactcctcaccatctgcagccttgaaggagctttggttcggagacaggcaaaggagccatgtgtggagagcctggtttctcagtacttccagaccgtgactgactatggcaaggacctgatggagaaggtcaagagcccagagcttcaggccgaggccaagtcttactttgaaaagtcaaaggagcagctgacacccctgatcaagaaggctggaacggaactggttaacttcttgagctatttcgtggaacttggaacacagcctgccacccagtgaagtgtccagaccattgtcttccaaccccagctggcctctagaacacccactggccagtcctagagctcctgtccctacccactctttgctacaataaatgctgaatgaatcc

SEQ ID NO: 542 - DNA, 1374 bp, Homo sapiens
ggacagcttggagatagggcccggaattgcgggcgtcactctgctcctgcgacctagccaggcgtgagggagtgacagcagcgcattcgcgggacgagagcgatgagtgagaacgccgcaccaggtctgatctcagagctgaagctggctgtgccctggggccacatcgcagccaaagcctggggctccctgcagggccctccagttctctgcctgcacggctggctggacaatgccagctccttcgacagactcatccctcttctcccgcaagacttttattacgttgccatggatttcggaggtcatgggctctcgtcccattacagcccaggtgtcccatattacctccagacttttgtgagtgagatccgaagagttgtggcagccttgaaatggaatcgattctccattctgggccacagcttcggtggcgtcgtgggcggaatgtttttctgtaccttccccgagatggtggataaacttatcttgctggacacgccgctctttctcctggaatcagatgaaatggagaacttgctgacctacaagcggagagccatagagcacgtgctgcaggtagaggcctcccaggagccctcgcacgtgttcagcctgaagcagctgctgcagaggttactgaagagcaatagccacttgagtgaggagtgcggggagcttctcctgcaaagaggaaccacgaaggtggccacaggtctggttctgaacagagaccagaggctcgcctgggcagagaacagcattgacttcatcagcagggagctgtgtgcgcattccatcaggaagctgcaggcccatgtcctgttgatcaaagcagtccacggatattttgattcaagacagaattactctgagaaggagtccctgtcgttcatgatagacacgatgaaatccaccctcaaagagcagttccagtttgtggaagtcccaggcaatcactgtgtccacatgagcgaaccccagcacgtggccagtatcatcagctccttcttacagtgcacacacatgctcccagcccagctgtagctctgggcctggaactatgaagacctagtgctcccagactcaacactgggactctgagttcctgagccccacaacaaggccagggatggtggggacaggcctcactagtcttgaggcccagcctaggatggtagtcaggggaaggagcgagattccaacttcaacatctgtgacctcaagggggagacagagtctgggttccagggctgctttctcctggctaataataaatatccagccagctggaggaaggaagggcaggctgggcccacctagcctttccctgctgcccaactggatggaaaataaaaggttcttgtattctca

SEQ ID NO: 543 - DNA, 3582 bp, Homo sapiens
gctgaccaggccggtcccccgggaacaggaaccctggtggacgggtcccagcaggcttcttcggtgcccgagagggagcgggtgcccaagggggtggtccctgtggcaggtcccggggtgggggcgcggcgctccgggaagagccttccgcaggtccccgccccgtcacgtgggcgccggccccggccgctgcggtcggtccgctggttggtcgggcgcttggtccggcagttggtcggtgggccagtggcccgtcgctcgcttctgggctctcatgtttgaaggtgggagggacacgggagcggcccgcacacctgagccgcccggagaggagcctcggccccgtacccagtaagaagaggaggaggccaggcaggcaaaaggagtcatggcttctgatgctagtcatgcgctggaagctgccctggagcaaatggacgggatcattgcaggcactaaaacaggtgcagatcttagtgatggtacttgtgagcctggactggcttccccggcctcctacatgaaccccttcccggtgctccatctcatcgaggacttgaggctggccttggagatgctggagcttcctcaggagagagcagccctcctgagccagatccctggcccaacagctgcctacataaaggaatggtttgaagagagcttgtcccaggtaaaccaccacagtgctgctagtaatgaaacctaccaggaacgcttggcacgtctagaaggggataaggagtccctcatattgcaggtgagtgtcctcacagaccaagtagaagcccagggagaaaagattcgagacctggaagtgtgtctggaaggacaccaggtgaaactcaatgctgctgaagagatgcttcaacaggagctgctaagccgcacatctcttgagacccagaagctcgatctgatgactgaagtgtctgagctgaagctcaagctggttggcatggagaaggagcagagagagcaggaggagaagcagagaaaagcagaggagttactgcaagagctcaggcacctcaaaatcaaagtggaagagttggaaaatgaaaggaatcagtatgaatggaagctaaaggccactaaggctgaagtcgcccagctgcaagaacaggtggccctgaaagatgcagaaattgagcgtctgcacagccagctctcccggacagcagctctccacagtgagagtcacacagagagagaccaagaaattcaacgtctgaaaatggggatggaaactttgctgcttgccaatgaagataaggaccgtcggatagaggagcttacggggctgttaaaccagtaccggaaggtaaaggagattgtgatggtcactcaagggccttcggagagaactctctcaatcaatgaagaagaaccggagggaggtttcagcaagtggaacgctacaaataaggaccctgaagaattatttaaacaagagatgcctccaagatgtagctctcctacagtggggccacctccattgccacagaaatcactggaaaccagggctcagaaaaagctctcttgtagtctagaagacttgagaagtgaatctgtggataagtgtatggatgggaaccagcccttcccggtgttagaacccaaggacagccctttcttggcggagcacaaatatcccactttacctgggaagctttcaggagccacgcccaatggagaggctgccaaatctcctcccaccatctgccagcctgacgccacggggagcagcctgctgaggctgagagacacagaaagtggctgggacgacactgctgtggtcaatgacctctcatccacatcatcgggcactgaatcaggtcctcagtctcctctgacaccagatggtaaacggaatcccaaaggcattaagaagttctggggaaaaatccgaagaactcagtcaggaaatttctacactgacacgctggggatggcagagtttcgacgaggtgggctccgggcaaccgcagggccaagactctctaggaccagggactccaagggacagaaaagtgacgccaatgccccctttgcccagtggagcacagagcgtgtgtgtgcatggctggaggactttggcctggctcagtatgtgatctttgccaggcagtgggtatcttctggccacaccttattgacagccacccctcaggacatggaaaaggagctaggaattaagcacccactccacaggaagaagcttgttttagcagtgaaagccatcaacaccaaacaggaggagaagtctgcactgctagaccacatttgggtgacaaggtggcttgatgatattggcttaccccagtacaaagaccagtttcatgaatctagagttgacggacgaatgctgcaatacctaactgtgaacgatttactcttcttaaaagtcaccagccaactacatcatctcagcatcaaatgtgccattcacgtgctgcatgtcaacaagttcaacccccactgcctgcaccggcggccagctgatgagagtaacctttctccttcagaagttgtacagtggtccaaccacagggtgatggagtggttacgatctgtggacctggcagagtatgcacccaatcttcgagggagtggagtccatggaggcctcattatcctggagccacgcttcactggggacaccctggctatgcttctcaacatccccccacaaaagacgctcctcaggcgccacctgaccaccaagttcaatgccttgattggtccggaggctgaacaggagaagcgagagaaaatggcctcaccagcttacacaccactgaccaccacagccaaagtccggccaaggaaactaggattttcacacttcggaaacataagaaaaaagaagttcgatgaatcgacggactacatttgcccaatggagcccagtgacggtgtcagtgatagtcacagggtctacagtggctaccggggcctcagcccccttgatgcccctgaactggatgggctggaccaggtgggacagattagctgatgcccttgtcacctgccctctgtgcaccctgagagctcacagtaacactgtgtgtgtcaccatataactgcacctcacccccgcacgtgtgcatgactcgcagagaatattccagcaattgtgtacccctgggccagtctctttgaaccctgagggtggccaggatctggagctgcatctctaaggggccaggctttggggaccattgccaaaggtggactcaggaggaaagacacttaaagacacttttacatgtctagtaattcttgatgttcatcttcagcaccagtggaaacacatgaacttcgatgcaggtccagagaccatggacactcccacgaggctcagctctcaggcaccccctacacttcagttgagggaaaagctcaagtgccttaggcccgtggaccacagtcttggctgagatcaaagggatgagcaacagggacttctgccacagtgacaatggaattgtgttgtgccttacttcagaggtggtctcttctttcttgtaataaaagcaatatttatgcggaaagcaaaaaaaaaaaaaaaaaaaaaaa

SEQ ID NO: 544 - DNA, 1815 bp, Homo sapiens
gcagagctctgtgctccctgcagtcaggactctgggaccgcagggggctcccggaccctgactctgcagccgaaccggcacggtttcgtggggacccaggcttgcaaagtgacggtcattttctctttctttctccctcttgagtccttctgagatgatggctctgggcgcagcgggagctacccgggtctttgtcgcgatggtagcggcggctctcggcggccaccctctgctgggagtgagcgccaccttgaactcggttctcaattccaacgctatcaagaacctgcccccaccgctgggcggcgctgcggggcacccaggctctgcagtcagcgccgcgccgggaatcctgtacccgggcgggaataagtaccagaccattgacaactaccagccgtacccgtgcgcagaggacgaggagtgcggcactgatgagtactgcgctagtcccacccgcggaggggacgcaggcgtgcaaatctgtctcgcctgcaggaagcgccgaaaacgctgcatgcgtcacgctatgtgctgccccgggaattactgcaaaaatggaatatgtgtgtcttctgatcaaaatcatttccgaggagaaattgaggaaaccatcactgaaagctttggtaatgatcatagcaccttggatgggtattccagaagaaccaccttgtcttcaaaaatgtatcacaccaaaggacaagaaggttctgtttgtctccggtcatcagactgtgcctcaggattgtgttgtgctagacacttctggtccaagatctgtaaacctgtcctgaaagaaggtcaagtgtgtaccaagcataggagaaaaggctctcatggactagaaatattccagcgttgttactgtggagaaggtctgtcttgccggatacagaaagatcaccatcaagccagtaattcttctaggcttcacacttgtcagagacactaaaccagctatccaaatgcagtgaactccttttatataatagatgctatgaaaaccttttatgaccttcatcaactcaatcctaaggatatacaagttctgtggtttcagttaagcattccaataacaccttccaaaaacctggagtgtaagagctttgtttctttatggaactcccctgtgattgcagtaaattactgtattgtaaattctcagtgtggcacttacctgtaaatgcaatgaaacttttaattatttttctaaaggtgctgcactgcctatttttcctcttgttatgtaaatttttgtacacattgattgttatcttgactgacaaatattctatattgaactgaagtaaatcatttcagcttatagttcttaaaagcataaccctttaccccatttaattctagagtctagaacgcaaggatctcttggaatgacaaatgataggtacctaaaatgtaacatgaaaatactagcttattttctgaaatgtactatcttaatgcttaaattatatttccctttaggctgtgatagtttttgaaataaaatttaacatttaatatcatgaaatgttataagtagacatacattttgggattgtgatcttagaggtttgtgtgtgtgtacgtatgtgtgtgttctacaagaacggaagtgtgatatgtttaaagatgatcagagaaaagacagtgtctaaatataagacaatattgatcagctctagaataactttaaagaaagacgtgttctgcattgataaactcaaatgatcatggcagaatgagagtgaatcttacattactactttcaaaaatagtttccaataaattaataatacctaaaaaaaaaaa

SEQ ID NO: 545 - DNA, 4320 bp, Homo sapiens
agtcttcggggaggagctgcattacacacaggcttcggaggcttccgtggagaagcttggaggtaatggctgtcgtaaatgctagttattttcagagagttctcgaagatttggaataaagccgagccccagaaagacaggtcaaccacagaagtgctgagccaggtaaagaccctgctggacaagcagctggagtgagaatcaagacagctggaccacaggaccagacccagcagtatccatgtaacaggaaaggtccccttgctattcccatcactgggagggggcggagcctcgtcggagccgctcggaagggagctgtacccggccagtattgggggaggggcagcatttcaagaggctgcagctgacaagaagcttcaagcataggttaatatcagagaagcacatgacctgggcaatctgcatgtgatgccaaccaagccttggaaagacagtgcaaccacagaagtgccgagctgggtaaaggccctgctggacaagcagttggagtgagaatcaagacagccggaccacaggaccagacccaccaggatccacatgacagtggtatcttccggtatcatcctattcaaacaacgtgttcaagcatccttggaaaattgaggtggagaacaggccacacaagctgtaaaccctttgtagtcataagacgaaagaggatttgttaagagtattgttttgggtagaacttgcattagcagtgacaaagatagccacctcaacctttggtaataacccttggcacacaaatataaaccataatggagtctgagtatgtcctatgcaactggaaagaccagttgtggccagcaaaagttttgtccagatctgaaacttcatcaaacagtaagaggaaaaaggcattttctctagaagttcaaatactctcactagatgaaaaaattaaattggacagcacagaaacaaagatcctaaataaatctcaaattgaagccattgctgcctcattaggactacagtcagaggacagtgctccacctacagaggaaactgcctatggaagatcactaaaagtggcactgggtattctgaatgagagaacaaatttgagtcaagcaagcacttcagatgaagaggagatcactatgctgtctcaaaatgtaccacaaaaacagtccgattcaccccctcataaaaaataccggaaggatgaaggtgacttaccagggtgtcttgaggaaagggaaaactcagcatgcttgttagcatcttcagagagtgatgattccctgtatgatgataaatcacaagcacccacaatggtcgatactattccaagtgaagtggaaacaaagtcattacaaaactctagctggtgcgagactttcccttcactttcggaagataatgatgaaaaagagaacaagaataagattgatatctcagcagttatgtctgtgcattctgcagtcaaagaggaaagtgcatgtgttaaagatgaaaagtttgctccacctttgtcacctttgtcatcagatatgctcattatgcccaaagctttgaaagaagagagcgaggatacctgcctagagaccctggctgttccctctgaatgctctgctttctcagagaatattgaggatcctggagagggtccctcaaatccatgcttagataccagccagaatcaaccttccatggaatcagagatgggggctgcagcatgccctgggagttgttcaagggaatgcgaggtttcatttagtgcctctaaccctgtctgggattattcacatcttatgagtagtgaaagaaattttcagagactggattttgaagaacttgaggaagaaggtcaagcctctgacaagtcattgcttccaagtcgcattaatctttctctattagatgatgatgaggaagacgaagaacttccacgcttcattttacattatgagacacatccgtttgaaacaggaatgatagtctggtttaaatatcagaaatatccattttggccagcagtgataaaaagtatcagacgaaaagagaggaaagcaagtgtgctttttgttgaggcaaacatgaattctgaaaagaagggcattagagtaaattttagaagattaaagaaatttgattgtaaagagaaacaaatgctagtggacaaagccagggaggattatagtgagagtattgactggtgcatctcactaatttgtgactacagagttagaataggttgtggttctttcacgggctctttgcttgagtattatgctgctgatattagttacccagttaggaaagaaacaaaacaggatactttcaggaacaaatttccaaagctgcataatgaagatgccagggaaccgatggctgtaacttcccagaccaagaaaatgtccttccaaaaaattctccctgaccggatgaaggctgctcgggaccgagccaacaagaacctggtggacttcattgtgaatgcaaagggaacagagaaccatcttctggccattgtaaatggcacaaaaggatccagatggctgaaatcatttttgaatgcaaataggttcacaccctgtattgaaacatactttgaggatgaagatcagttggatgaagtggtgaaatatttacaagaagtctgcaatcaaatagatcaaataatgccaacttggataaaagatgataaaattaaatttatcctagaagttcttctgccagaagcaattatttgttcaatttctgctgttgatgggttagattacgaggcagctgaagcaaagtatctaaaaggaccatgtctaggctacagggaaagagaattatttgatgcaaaaataatatatgaaaagagacgaaaagcaccaacaaatgaagctcactaaatgtgctgaaagttgaaaccatgacagggagctctcatagatactagttgaaaaaagtctctgaacaattctctctaatacatattttctgcaaatgggagcatggataatgtgttcacttttttttgagatctctaggatctgtggttataattacatctttatttccttttcttgcgcttcttcaaagttaattttgtcaacatatttcagcagttctactttcccgtacattttttagaaagcataattcctaaatgattttgaagggaaagtactattttgttttatgacacttttgagtctatgctgtattgttaaatatattgtgcacaattattttaatgttaaaattgcactggtgttagatattaacgaagatgattggaaaaaagtctgaaagatacatcatttctatattccttgcttaatttttataaaatattgggttttcccttaagatagttgaagtatttttcttgccatgcctatttatttttgcaaaaaaattatctgctatatagaaccaaagatagattcgctttgctatatattataactatacttgcttttgcaataaaacaacttgtaattcaaaaatgaagattatctgcatatagtatttatgtgtgtgaataacatcttggcatgcagaaaataattttggctgctttgaacaggattgttcattctacacttccctgaaattccatttttgggagtgtctatccttcaatggctgaatagttccttaaatcagacaagctcctggctatcttcataaccagcagtgagtagatcttcttaatatagctgtctgaccacatgtggaaggcagctagacttattgtatttacagcctggccactctagacatatgaatccaggctgactgcttaagtgcccatctcgtttgatataaactgtagaaaaggcaagcactttgttctgagtcttttatctccaaatacatagttgtctcaaaccaagcaagctttatcaaaatggcttatttgcagaatagttccaatgatataaatgccaactggcaagtcattccaaactgcttgaaggagtagatgaaccagaatctgagaatttggaaataggtcacagaaaaagcctccatttggctaaatatgacaattatctgagtatggttaaatacatacaattaaatgtctgaagccaatgagttgtttattctaacttgaaatatatttttgtgagaataaatgttagaaaagttagtttattttggaaacctgccgtgaaaggaaattctaaaggcttaacatgaaactgtctgcatttctacctgttagacaatggttgctcttgggctcttgttatacagtcatatggctacacgtttatgtaaagtttgcaaaagtttggtgttttgatttataataaaactgttatattattcaaaaaaaaaaaa

SEQ ID NO: 546 - DNA, 6333 bp, Homo sapiens
gtagtctctttggaaacttctgcaggggaaaagagctaggaaagagctgcaaagcagtgtgggctttttcccttttttgctccttttcattacccctcctccgttttcacccttctccggacttcgcgtagaacctgcgaatttcgaagaggaggtggcaaagtgggagaaaagaggtgttagggtttggggtttttttgtttttgtttttgttttttaatttcttgatttcaacattttctcccaccctctcggctgcagccaacgcctcttacctgttctgcggcgccgcgcaccgctggcagctgagggttagaaagcggggtgtattttagattttaagcaaaaattttaaagataaatccatttttctctcccacccccaacgccatctccactgcatccgatctcattatttcggtggttgcttgggggtgaacaattttgtggctttttttcccctataattctgacccgctcaggcttgagggtttctccggcctccgctcactgcgtgcacctggcgctgccctgcttcccccaacctgttgcaaggctttaattcttgcaactgggacctgctcgcaggcaccccagccctccacctctctctacatttttgcaagtgtctgggggagggcacctgctctacctgccagaaattttaaaacaaaaacaaaaacaaaaaaatctccgggggccctcttggcccctttatccctgcactctcgctctcctgccccaccccgaggtaaagggggcgactaagagaagatggtgttgctcaccgcggtcctcctgctgctggccgcctatgcggggccggcccagagcctgggctccttcgtgcactgcgagccctgcgacgagaaagccctctccatgtgcccccccagccccctgggctgcgagctggtcaaggagccgggctgcggctgctgcatgacctgcgccctggccgaggggcagtcgtgcggcgtctacaccgagcgctgcgcccaggggctgcgctgcctcccccggcaggacgaggagaagccgctgcacgccctgctgcacggccgcggggtttgcctcaacgaaaagagctaccgcgagcaagtcaagatcgagagagactcccgtgagcacgaggagcccaccacctctgagatggccgaggagacctactcccccaagatcttccggcccaaacacacccgcatctccgagctgaaggctgaagcagtgaagaaggaccgcagaaagaagctgacccagtccaagtttgtcgggggagccgagaacactgcccacccccggatcatctctgcacctgagatgagacaggagtctgagcagggcccctgccgcagacacatggaggcttccctgcaggagctcaaagccagcccacgcatggtgccccgtgctgtgtacctgcccaattgtgaccgcaaaggattctacaagagaaagcagtgcaaaccttcccgtggccgcaagcgtggcatctgctggtgcgtggacaagtacgggatgaagctgccaggcatggagtacgttgacggggactttcagtgccacaccttcgacagcagcaacgttgagtgatgcgtccccccccaacctttccctcaccccctcccacccccagccccgactccagccagcgcctccctccaccccaggacgccactcatttcatctcatttaagggaaaaatatatatctatctatttgaggaaactgaggacctcggaatctctagcaagggctcaacttcgaaaatggcaacaacagagatgcaaaaagctaaaaagacaccccccccctttaaatggttttctttttgaggcaagttggatgaacagagaagggaagagaggaagaacgagaggaagagaagggaaggaagtgtttgtgtagaagagagagaaagacgaatagagttaggaaaaggaagacaagcaggtgggcaggaaggacatgcaccgagaccaggcaggggcccaactttcacgtccagccctggcctggggtcgggagaggtgggcgctagaagatgcagcccaggatgtggcaatcaatgacactattggggtttcccaggatggattggtcagggggagaaaggaaaaggcaaaacactccaggacctctcccggatctgtctcctcctctagccagcagtatggacagctggacccctgaacttcctctcctcttacctgggcagagtgttgtctctccccaaatttataaaaactaaaatgcattccattcctctgaaagcaaaacaaattcataattgagtgatattaaatagagaggttttcggaagcagatctgtgaatatgaaatacatgtgcatatttcattccccaggcagacattttttagaaatcaatacatgccccaatattggaaagacttgttcttccacggtgactacagtacatgctgaagcgtgccgtttcagccctcatttaattcaatttgtaagtagcgcagcagcctctgtgggggaggataggctgaaaaaaaaaagtgggctcgtatttatctacaggactccatatagtcatatataggcatataaatctattctttttctttgtttttttctttcttcctttctttcaaaggtttgcattaacttttcaaagtagttcctataggggcattgaggagcttcctcattctgggaaaactgagaaaacccatattctcctaatacaacccgtaatagcatttttgcctgcctcgaggcagagtttcccgtgagcaataaactcagcttttttgtggggcacagtactggatttgacagtgattccccacgtgtgttcatctgcacccaccgagccaggcagaggccagccctccgtggtgcacacagcacgcgcctcagtccatcccattttagtctttaaaccctcaggaagtcacagtctccggacaccacaccacatgagcccaacaggtccacgatggatccaccagtcccaccccagccttttcctttcatctgaacagaatgtgcatttttggaagcctccctcactctccatgctggcagagcaggagggagactgaagtaagagatggcagagggagatggtggcaaaaaggtttagatgcaggagaacagtaagatggatggttccggccagagtcgatgtggggaggaacagagggctgaagggagagggggctgactgttccattctagctttggcacaaagcagcagaaagggggaaaagccaatagaaatttccttagcttccccaccatatgtattttctaggatttgagaggaaagagaggaaaatgggggaatgggttgcaaaatagaaatgagcttaatccaggccgcagagccagggaaggtgagtaactttaggagggtgctagactttagaagccagataggaagaatcagtctaaactggccatgctttggaagggacaagactatgtgctccgctgcccaccttcagcctgcaatgagggactgaggcccacgagtctttccagctcttcctccattctggccagtccctgcatcctccctggggtggaggatggaaggaaagctgggacaagcagggaacgcatgattcagggatgctgtcactcggcagccagattccgaaactcccattctccaatgacttcctcaaccaatgggtggccttgtgactgttctttaaggctgaagatatccaggaaagggggcttggacactggccaaggagaccccttcgtgctgtggacacagctctcttcactctttgctcatggcatgacacagcggagaccgcctccaacaacgaatttggggctacgaagaggaatagcgaaaaagcaaatctgtttcaactgatgggaaccctatagctatagaacttgggggctatctcctatgcccctggacaggacagttggctggggacaggagaagtgctcaatcttcatgagacaaaggggcccgatagggccagcagccacaaggccttgacctgccgagtcagcatgccccatctctctgcacagctgtcccctaaacccaactcacgtttctgtatgtcttaggccagtatcccaaacctcttccacgtcactgttctttccacccattctccctttgcatcttgagcagttatccaactaggatctgccaagtggatactggggtgccactcccctgagaaaagactgagccaggaactacaagctccccccacattcctcccagcctggacctaattcttgagaggggctctctcttcacggactgtgtctggactttgagcaggcttctgccccttgcgttggctctttgctgccagccatcaggtgggggattagagcctggtgtaagtgcgccagactcttccggtttccaaagttcgtgcctgcgaacccaaacctgtgagtctcttctgcatgcaggagtttctcctgggcagctggtcactccccagagaagctgggccttcatggacacatggaactaagcctcccaaatgggagttctggctgagcccagggtggggagatcctgggaagggaggcactggaggaagacggcacctcttcccccatggcagggtgtgagggaggcaggtttggaatggtgcgagtatggcaatctaagcaggggtctggtctctttgactccaggctggcctttggccgactgtctgctcacccagagaccttggactccggactatccatggctccgaatctaagtgctgcccactcccatgctcacacccacagaaggtcttcccatcccctttagattcgtgcctcactccaccagtgaggaagatgcctctgtctttcccacgactgccaggagatagggaagcccagccaggactgaccctccttcctccagcctgccctgacccacctggcaaagcagggcacatggggaggaagagactggaacctttctttgacagccaggcctagacagacaggcctggggacactggccccatgaggggaggaaggcaggcgcacgaggtccagggaggcccttttctgatcatgccccttctctcccaccccatctccccaccaccacctctgtggcctccatggtacccccacagggctggcctcccctagagggtgggcctcaaccacctgctcccgccacgcaccggttagtgagacagggctgccacggcaaccgccaagcccccctcaaggtgggacagtaccccggacccatccactcactcctgagagggctccggcccagaatgggaacctcagagaagagctctaaggagaagaaaccccatagcgtcagagaggatatgtctggcttccaagagaaaggaggctccgttttgcaaagtggaggagggacgagggacaggggtttcaccagccagcaacctgggccttgtactgtctgtgtttttaaaaccactaaagtgcaagaattacattgcactgtttctccactttttattttctcttaggcttttgtttctatttcaaacatactttcttggttttctaatggagtatatagtttagtcatttcacagactctggcctcctctcctgaaatccttttggatggggaaagggaaggtggggagggtccgaggggaaggggaccccagcttccctgtgcccgctcaccccactccaccagtccccggtcgccagccggagtctcctctctaccgccactgtcacaccgtagcccacatggatagcacagttgtcagacaagattccttcagattccgagttgcctaccggttgttttcgttgttgttgttgttgtttttctttttctttttttttttgaagacagcaataaccacagtacatattactgtagttctctatagttttacatacattcataccataactctgttctctcctcttttttgttttcaactttaaaaacaaaaataaacgatgataatctttactggtgaaaaggatggaaaaataaatcaacaaatgcaaccagtttgtgagaaaaaaaaaaaaaagccgaaaaaaaaaaaaaaaacacctgaatgcggaagagctcggctcccgtttagcattttgtacttaaggaaataaaaaaccaacaaaggatctcacattttcttaaaaagtgaagattgctgtatactatttattcaacttataatttatgttactccttgatctttgtcttttgtcatgacaaagcatttatttaataaagttatgcattcagttaaaaaaaaaaaaaaaaaaaaaaaaaaaaaaaaaaaaaaaaaaaaaaaaaaaaaaaaaaaaaaaaaaaaaaaaaaaaaaaaaaaaaaaaaaaaaaa

SEQ ID NO: 547 - DNA, 2105 bp, Homo sapiens
ggagcgcgcgctctgggcgccgggacgacactccagccccgggggacccgccgcccagctcccgagggtgcggcagcctctggccactcagccggggccgagagggagctgccgggcgggcaggcgccgcaggcacccggcgggcagggcggggcagggcaagacggccgcctccgcaagtgccacccggcccacccggttctctcccttctgcctgggacgtcagcggacggggcgctcgcgggccggggctgtatggggctcccgcgcgggtcgttcttctggctgctgctcctgctcacggctgcctgctcggggctcctctttgccctgtacttctcggcggtgcagcggtacccggggccagcggccggagccagggacaccacatcatttgaagcattctttcaatccaaggcatcgaattcttggacaggaaagggccaggcctgccgacacctgcttcacctggccattcagcggcacccccacttccgtggcctgttcaatctctccattccagtgctgctgtggggggacctcttcaccccagcgctctgggaccgcctgagccaacacaaagccccgtatggctggcgggggctctctcaccaagtcatcgcctccaccctgagccttctgaacggctcagagagtgccaagctgtttgccccgcccagggacacccctccaaagtgtatccggtgtgccgtggtgggcaacggaggcattctgaatgggtcccgccagggtcccaacatcgatgcccatgactatgtattcagactcaatggagctgtgatcaaaggcttcgagcgcgatgtgggcaccaagacttccttctatggtttcactgtgaacacgatgaagaactccctcgtctcctactggaatctgggcttcacctccgtgccacaaggacaggacctgcagtatatcttcatcccctcagacatccgcgactatgtgatgctgagatcggccattctgggcgtgcctgtccctgagggcctagataaaggggacaggccgcacgcctattttggaccagaagcctctgccagtaaattcaagctgctacatccggacttcatcagctacctgacagaaaggttcttgaaatcaaagttgattaacacacattttggagacctatatatgcctagtaccggggctctcatgctgctgacagctttgcatacctgtgaccaggtcagtgcctatggattcatcacaagcaactactggaaattttccgaccactatttcgaacgaaaaatgaagccattgatattttatgcaaaccacgatctgtccctggaagctgccctgtggagggacctgcacaaggccggcatccttcagctgtaccagcgctgaccccaatgcactgagccctttgcttcttcaagagttgcggccctgatcctctcaagtggccaaaagcttttttaacttttcaatcttcaccttcccttgccaacagagggcactggggtgaattcaagattttcatcgaggtctgttcaatataggacaccccagcttgtccttggctcatccaagaactcttctgtatctaaaacaatacatctcaatcttggccaagggaaaatggactgctttgctggattggcactgagcaactttaggaaatgtcggtggagtgttcagcaagatcagacagcagtccaggtcaaaggcaaacacacacgctccagcccaaatcctcctggtggcacatcctaccccagatgctaaagtgattcaaggactccaggacacctcttaagagcctttctaagaacatgataggcttacttctgctccataataaagtgggagaaaaaagccagaatataacttaagactagataactgcgtacatgatggaccatttttttttttttggctgggtagagaaatcatataaaacgcaggctgtttagcatggagatgactctcagaacactgggagggtctggcacttgatgggggttagttgcttggcagcctgcctgccactgagggaagtcccattagagatgtatcaccaccttgtcaccaacaggatgatgtcaccaggtaataaaccttcatcctca

SEQ ID NO: 548 - DNA, 4478 bp, Homo sapiens
gacgtcggcggttgccgtggagagacccgctcggtcccgaccgagagctggcgtcaggagccgcagggtcacagcgtgtctttgaagctgcctccgccgccaccatgagcggccgaagtcggggtcgaaagtcctcccgcgccaaaaaccggggcaaaggccgcgccaaagcccgagtccgccctgctccggacgacgccccgcgcgacccggacccttcacagtaccagagtctcggggaagacacccaggcggcacaggtgcaggctggcgcggggtggggtggcctggaagccgctgcgtccgcgcagctcctccggctcggggaggaggccgcctgccggctccccctggactgtggcctcgcgctgcgggcccgagctgcgggggaccacgggcaggccgcggccaggcccggcccggggaaggccgcatctctctcggagcgcctggccgcagacactgtcttcgtgggaacagcgggaaccgtgggaaggccgaaaaatgccccccgcgttggaaaccggcgtggccctgccgggaagaaggccccagaaacctgtagcaccgcggggagggggcctcaggtcatagctggtgggaggcagaagaaaggggcggcaggggagaatacctcggtgtcagctggggaggaaaagaaggaagagagggatgcagggtcggggcccccagcgacggaaggcagcatggatacgctggagaacgtgcagctgaagctggagaacatgaacgcccaggcggacagggcctaccttcggctctccaggaagtttgggcagttgcgactgcagcacttggagcgcaggaaccacctcatccaaaatatcccgggcttctgggggcaagcatttcagaaccatccccagctagcatcctttctgaatagccaagagaaagaggtactgagctacttaaacagcttggaagtggaagagctcggccttgccagattgggctacaaaatcaagttctacttcgatcgcaacccgtatttccaaaataaggtgctcatcaaggaatatgggtgtggtccttctggccaggtggtgtctcgttctactccaatccagtggctcccagggcatgatctccagtccctaagccagggaaacccagaaaacaaccgtagtttctttgggtggttttcaaaccacagctccattgagtctgacaagattgtggagataatcaacgaagaattgtggcccaatcccttgcagttctaccttttgagtgaaggggctcgtgtagagaaaggaaaggaaaaagaaggcaggcaaggtccaggaaagcagccaatggagactactcagcctggggtgagccaatccaactgatcctgcacaagtctccctgctacctcctgctgggctgctcctggttgactacatatttggctctctgccttctcttcatgttggcctctgtgtactatagaccctttggactttagttacaagaatatggcatttatgatcatgttcttttgcctcccatagcctcttgcttttctacgttagtgtcacatgttatgtgatcgcacccggactgttcatatgttaagcacacatactttagatgtgtgctccctgttatctacattgcctggaccttgttcttggctctggcctttcctacttgtctttaacatggacactcatgagtcatcctccaggacgaccagtgcatcctcaagctctgctccttcagggccagtgacttgctgggcttcgtgttcatgctggccatgcatgtcatctatgcaagcgtttccattgccactgcagaatgaagccagtgcacatggtattagtcatcagccagaacttcctgttctgtgggtctggggtcaccagctgagatgtcacctgctttatttctggctttggcctgtggtctgtgatacccatcctgcttgatgttctgcagaatggcacttgactgctgggcatgcatgaagttaagggcaagaaacagtatgccatgtgttctgtaccatcatgtgtctcttcttgcttctgggcccttctactggtgaactttcatcaagatctgcgccatgccgtgtcactatcaagccattaagttttgtctgggttgctgtcagccccagttggcttcctggtcaacaaggacctcaagaactgcctgtggaccgaggccccctaccagtgcatgagacacacacctaccctccccagctttccaggaaccctactggctgccagactgatgggcgggctggtatgtgtggacatgtgttcactgtcattatgctgtggctccaggtgagggtgaggactgggcctatatagaatccagataccattgtcaacttcccttattcccgtctaagatgtgagcagagtgccatagtaggggttctgggaagaggtatttctgatttgtgggcctctgcttgcttgacttcaggtcacttatacttcttattttgcttgcctgccttcatccctcatttcctccctctcattcttctttcctccctccctttcctggtagcctcctttcctccccttctgccttccccttccttctttccttattcttttttattttgtttaaatagtaccacagagaaaacaactgaaaaaccacatttttctacatacagctggggaggtagctgagaacttggcactgcgcacacatactaggttgaaagagagttgaggaaaccagaaggccaagtggatctgctggcaaaccctgaacctgtctcctgcgcttgctctacagttctgaagttgaaaatccttttcatgcctagcatctgcttgagttataaaccccaaggcagccatgtcatagactagtgtttactcttgttttgactttgttttaatgcttcctaagacccaagtgcctcctgctgtttcctcctttgtggtagcctctggccatctggacctcaatccccagctttcccactttcagcagtcctttgctctctttgcttctacctcaaatagccccaggagtgggctttagtctccaatatggagcatctcaagcttctcctgggggatggggattgggatgggcagaatctgttttggatctccgggttatttccagtgggtgtaaaagcagagctgggcctttccctctcttatccctgagggtgggtaagaaggactgtatctacacctgttcttccctaccttctcttttgttagggaggcctcattctaagttcctcaagagagtccttggcttaaagctgtagcaagggtgtgctaggtgggggatttggagcaaaaccgtcgagtaggcatgatactggtatggagtgggcctgcaaaatcagacagaaatggcttgagaagccgcagggggagcatgcctgtctctcagtgatagagtatgggagggacctccctagcttggaaaatgagaattgaaggggttatgaacaaataggatgcctagttgaggatgttcccaaagttttgtccaatcttatcattagtagattttataagccacagagacaaaccagaaacggaataatgttactttggatgctttatttttttgttctaggtgtggctttgtacatgcagaagaatgctatatgctgcacattttgcctttaaagtcttacgactttccccattttagtctaatgggaagatacagatgtgcaagtctgcttttttgttttttgttattatttttttttttttgctctgtgttatggacattttcagacatgcacagaagtggagaggatggtccttggaccccatgtgtccatcacctagctgcatcacttatcagctatggtcaacctggtttcatctgtatctctctcttttcacctgtattgtttattgaaaatccaagacactatgccaatgcaaccgtgactactttgggagattggtagtctcttttgatggtgatagtgatggggtgcactatcataatcacatcaggtctgctttttgcttttaatgttaactaatgaagttccagagatgggccttagaaatgtgttttaagaattaacaaggagtctcaaaaagaaatgagagggatgcttcctttcccttgcatctacaaaacaagagagagactgttctgttgtaaaactctttcaaaaattctgatatggtaaggtacttgagacccttcaccagaatgtcaatctttttttctgtgtaacatggaaacttgtgtgaccattagcattgttatcagcttgtactggtctcataactctggttttggaagaataatttggaaattgttgctgtgttctgtgaaaataacctccccaaaataattagtaactggttgttctacttggtaatttgacaccctgttaataacgcaattatttctgtgttcttaaacagtataaatagttgtaagtttgcatgcatgatggaaaaataaaaacctgtatctctgttataaaaaaaaaaaaaaaa

SEQ ID NO: 549 - DNA, 3897 bp, Homo sapiens
cagtttgcaaaagccagaggtgcaagaagcagcgactgcagcagcagcagcagcagcggcggtggcagcagcagcagcagcggcggcagcagcagcagcagcggaggcaccggtggcagcagcagcatcaccagcaacaacaacaaaaaaaaatcctcatcaaatcctcacctaagctttcagtgtatccagatccacatcttcactcaagccaggagagggaaagaggaaaggggggcaggaaaaaaaaaaaacccaacaacttagcggaaacttctcagagaatgctccaaaactcagcagtgcttctggtgctggtgatcagtgcttctgcaacccatgaggcggagcagaatgactctgtgagccccaggaaatcccgagtggcggctcaaaactcagctgaagtggttcgttgcctcaacagtgctctacaggtcggctgcggggcttttgcatgcctggaaaactccacctgtgacacagatgggatgtatgacatctgtaaatccttcttgtacagcgctgctaaatttgacactcagggaaaagcattcgtcaaagagagcttaaaatgcatcgccaacggggtcacctccaaggtcttcctcgccattcggaggtgctccactttccaaaggatgattgctgaggtgcaggaagagtgctacagcaagctgaatgtgtgcagcatcgccaagcggaaccctgaagccatcactgaggtcgtccagctgcccaatcacttctccaacagatactataacagacttgtccgaagcctgctggaatgtgatgaagacacagtcagcacaatcagagacagcctgatggagaaaattgggcctaacatggccagcctcttccacatcctgcagacagaccactgtgcccaaacacacccacgagctgacttcaacaggagacgcaccaatgagccgcagaagctgaaagtcctcctcaggaacctccgaggtgaggaggactctccctcccacatcaaacgcacatcccatgagagtgcataaccagggagaggttattcacaacctcaccaaactagtatcattttaggggtgttgacacaccagttttgagtgtactgtgcctggtttgatttttttaaagtagttcctattttctatcccccttaaagaaaattgcatgaaactaggcttctgtaatcaatatcccaacattctgcaatggcagcattcccaccaacaaaatccatgtgaccattctgcctctcctcaggagaaagtaccctcttttaccaacttcctctgccatgtttttcccctgctcccctgagaccacccccaaacacaaaacattcatgtaactctccagccattgtaatttgaagatgtggatccctttagaacggttgccccagtagagttagctgataaggaaactttatttaaatgcatgtcttaaatgctcataaagatgttaaatggaattcgtgttatgaatctgtgctggccatggacgaatatgaatgtcacatttgaattcttgatctctaatgagctagtgtcttatggtcttgatcctccaatgtctaattttctttccgacacatttaccaaattgcttgagcctggctgtccaaccagactttgagcctgcatcttcttgcatctaatgaaaaacaaaaagctaacatctttacgtactgtaactgctcagagctttaaaagtatctttaacaattgtcttaaaaccagagaatcttaaggtctaactgtggaatataaatagctgaaaactaatgtactgtacataaattccagaggactctgcttaaacaaagcagtatataataactttattgcatatagatttagttttgtaacttagctttatttttcttttcctgggaatggaataactatctcacttccagatatccacataaatgctccttgtggccttttttataactaagggggtagaagtagttttaattcaacatcaaaacttaagatgggcctgtatgagacaggaaaaaccaacaggtttatctgaaggaccccaggtaagatgttaatctcccagcccacctcaacccagaggctactcttgacttagacctatactgaaagatctctgtcacatccaactggaaattccaggaaccaaaaagagcatccctatgggcttggaccacttacagtgtgataaggcctactatacattaggaagtggcagttctttactcgtcccctttcatcggtgcctggtactctggcaaatgatgatggggtgggagactttccattaaatcaatcaggaatgagtcaatcagcctttaggtctttagtccgggggacttggggctgagagagtataaataaccctgggctgtccagccttaatagacttctcttacattttcgtcctgtagcacgctgcctgccaaagtagtcctggcagctggaccatctctgtaggatcgtaaaaaaatagaaaaaaagaaaaaaaaaagaaagaaagagggaaaaagagctggtggtttgatcatttctgccatgatgtttacaagatggcgaccaccaaagtcaaacgactaacctatctatgaacaacagtagtttctcagggtcactgtccttgaacccaacagtcccttatgagcgtcactgcccaccaaaggtcaatgtcaagagaggaagagagggaggaggggtaggactgcaggggccactccaaactcgcttaggtagaaactattggtgcttgactctcactaggctaaactcaagatttgaccaaatcgagtgatagggatcctggtgggaggagagagggcacatctccagaaaaatgaaaagcaatacaactttaccataaagcctttaaaaccagtaacgtgctgctcaaggaccaagagcaattgcagcagacccagcagcagcagcagcagcacaaacattgctgcctttgtccccacacagcctctaagcgtgctgacatcagattgttaagggcatttttatactcagaactgtcccatccccaggtccccaaacttatggacactgccttagcctcttggaaatcaggtagaccatattctaagttagactcttcccctccctcccacacttcccacccccaggcaaggctgacttctctgaatcagaaaagctattaaagtttgtgtgttgtgtccattttgcaaacccaactaagccaggaccccaatgcgacaagtagttcatgagtattcctagcaaatttctctctttcttcagttcagtagatttccttttttcttttctttttttttttttttttttttggctgtgacctcttcaaaccgtggtacccccccttttctccccacgatgatatctatatatgtatctacaatacatatatctacacatacagaaagaagcagttctcacaatgttgctagttttttgcttctctttcccccaccctactccctccaattcccccttaaacttccaaagcttcgtcttgtgtttgctgcagagtgattcgggggctgacctagaccagtttgcatgattcttctcttgtgatttggttgcactttagacatttttgtgccattatatttgcattatgtatttataatttaaatgatatttaggtttttggctgagtactggaataaacagtgagcatatctggtatatgtcattatttattgttaaattacatttttaagctccatgtgcatataaaggttatgaaacatatcatggtaatgacagatgcaagttattttatttgcttatttttataattaaagatgccatagcataatatgaagcctttggtgaattccttctaagataaaaataataataaagtgttacgttttattggtttcaaaaaaaaaaaaaaaaaaaa

SEQ ID NO: 550 - DNA, 4821 bp, Homo sapiens
cacaagggtcaagtagtccagcattctacagtttgtgtgtttgagagaaaaataagcccataaaaacattctaaccttcagattaagggacctgcagcaaagtttgtaactgaccagtttgctgggctggcttgaacagcgggcttacaggagtcctaagcctgtgttctatcttaagtgttttctgcattctctcccagcggatctgattcctgttctgaagaattgaagttgagcatcgttagttaaattcagctgctgcctgactgtataccacagcaaaggctttggaaacatttttcagttaaaacaataatgactttcttggagtgtaatcccagtggaggctgttctacgtatagcctgaaagaatacttaactaccatacgcaattctgcagagaccttgtaaaaatcacactttacaccaaacaactgagtgattctgaattggttgggggaatcttagttgtagatatcaattcaccttcttgaagattcaaccactgctactcagagctgctgctgaaataccatgtctaagaactcagagttcatcaatctgtcatttttattagatcatgagaaggaaatgatcctgggcgtcctaaagagagatgaatatttgaaaaaagtggaggacaagagaataaggaagctgaaaaatgaactcttagaagcaaaacgtagaagtgggaaaactcaacaagaggccagcagagtttgtgttcactgtcacagaaacctgggcctaatctttgaccggggagacccttgtcaggcttgctcactgagggtatgcagggagtgtcgagttgcaggccccaatggcagctggaagtgcactgtctgtgacaaaatcgcgcagctaaggattataactggtgagtggttttttgaagaaaaggcaaaacgtttcaagcaagtcaatgttctcggcactgatgttgtccgacagtccattttaagaagaagtccaggagctgaagaagtacagagccaagagcaaacccgccaggatgcagaaaagtcagacacttcacctgttgctgggaagaaggccagccatgatgggcccaagagaaagggatttcttcttagcaagttcagatcggcaaccagaggagaaatcataactcccaaaactgacactgggcggagctatagcttggacttagacggtcaacattttcggagtttaaaatcacctcctggttcagacaggggaagcactggctcatcagatctcaatgaccaggaacctggtcctaggaccccgaagagcagtcggagcaatggtgtgaccccaggcactcagagttcaccagccccaagcacacgaactgtgacctcagtcatcagtagagagtatggttttgaaaattccatggatttggctgctattgaaggtacctctcaggagctcacaaagagtcaccgcagaaacacttctggcacaccttccatagcagtgtctggaacctctctctcctcagatcagagtcgatctgagttagatttgagtgagtcatttacagaagactcagaggatactgtaagcataagaagcaagtctgtccctggggctttagacaaggactccttggaagagactgaagaaagcattgatgccttagtgtcctcgcagttatctacaaacactcaccgtctggcaagtggcctatcaactaccagccttaacagcatgatgagcgtttacagtgaaacgggagactatggcaacgtgaaagtcagtggtgaaatccttctccatatcagctactgctacaaaactggtgggctgtacatttttgtcaagaattgcagaaatctggccataggagatgaaaagaaacagaggacagatgcttatgtcaagtcatatcttcttcctgacaagtcccggaacaacaagcgtaagaccaaaatcagaacaggcaccaatccagaattcaatgaaacactaaagtacactatcagccatacccagctggaaacaagaactctgcagctctcagtctggcactatgatcgatttggacgtaatagcttcctcggggaagtagagattccttttgactcatggaactttgaaaatccaactgatgagtggtttgtgcttcaacccaaggtggagtttgctcctgatattggccttcaatacaaaggagagctgacagttgttttacgttacattcccccagaagagaacctgatgcttccaccagaacaactccaaggaaataagacttttaaaaagggaaagaagaaggagtcacctgtaatctctggaggaatactagaagtgttcatcaaagaggcaaagaatttgacagcagtgaagtcaggaggcacttctgatagctttgtgaagggctacctgctccctgatgatagcaaagccaccaagcacaaaactctggtaataaaaaagagtgttaaccctcagtggaatcatacattcatgttcagtggcatccatccccaggatataaagaatgtttgcctagaacttactatctgggacaaggaggccttttccagcaacatctttctgggaggagttcgtttgaattctggaagtggtgtgagccatgggaagaacgtggattggatggactctcagggggaagagcagcgcctttggcagaagatggccaacaaccctggaactccctttgagggtgtactcatgcttcgttccagcatgggaaaatgtaggctctaaagggaccagttctccaagaatgaggccaccaggacctatctggctgtcttttcctaccattagcaaactgagacctgggattctgcttccctgccatttctcacctgacagtgttgggacatgaggggagagatgtcagtagtatgaacatttagggtcttgctgagtgcctaaaaaacatatatttccatccaatcaaggccttcttgattggatgatagaaagtgtactacttgtcctgtcaacaagcaaattgtgcaaaggcttatagggtttatgccataaaagaaatggcacaagcctccatttgctaattataagttactttagatttcctcaaatcctttgaagagaaagaggaccactgagaaggtagatcacttgaaaagtcagaagaaaggatactggccaacttttactcaccctaggaatccacatgatctcaagaaggcatggtggagatggttgcttgagcaaggggattgtcctgttattgcagcaaacttgtggattaaccaagtagtatttcaagatggattgacagggctttctatgattactatagaatttatcatctaaatcagtttactttttagaacaaagagagctaaataactacatcagaacgattgatgttgattagaattgacctgggaaaattgggatgtagggtcaccctactgatgacctaagagagctctgttttaaacatttattttataaaatgttctaagccattaactaaaaggaaatgagatataatggtcaattgatataccttttcacattgtgttcactgacgagactagtttaatgaaaaaggaggtactctacctgctattttacttctgttcctcttctgccctgttatgggagagaatcaaagactccatctgctctcttcccccttgttttctccttcactgagtttttcttatctccttttgcagtggttaactattgtcacaataatgctgaatgaaaaaacacaccaaatgtcagtggcttaaaatgaccatcctttttctcacagttatgaagattggctatggcacctctgcttcctgctataggcctgaggttctagggcttcttatgcctcatcctctttaagccaaagggatagccagagcatcttgatggcagaagtgcaataagatgagccccactgctcgggtacattttcagcccctggttgtgtcatgtctactgatatctcattggtcaaaggaagtcagagggccaagatgaagaggcagggaaatatgcactgcccacagtgaagccatgacaagagtgaggatgcaggaaggcatgaagaattggggccaacagttcaatctaccataccttctctcacctggaattccagatgcttgagctacgaaacttagatgcaaagaaagttaaagctagaaggaacctcaggcccagttgctcattttgcagattccaaatgtgaatttcagagagctgagataacttgcccaaggccatatagaggctgtgactaaatctggacttaaatccagactatcaatcttaggccagtgttcttttttcaatatagtccttggcataatgctatgcttattaggtagataaaagggcttatgtcaagaaatttggagcagagtctgattacttgagcatgaacatacccgaccaaggtatgttctggagtcatattctagcctctgagctcattttttcatgcgagttcatataaaatcctcgaaagtttagaaactaggttttagtagtaacggagctagaatcatcttcgggcttattcctgctagttgttccatatttctagatttcatcttgaattttgaaaactgatttaagaatatatttagtattattattagtaagggaatacgcaatccagtttcaattttattcagaagtaggtcacctaattctagaaaatggttattagtctagtgtcgcttagcaaggtacttaaaagaaaatctgcacatatccttgtgctgcccttcttaaaaacagaaaacaaaaagtgtaagatcatcattgcttcccacataggaaaaataaaatgtcttcagacttgatgtgactcaaaaa

SEQ ID NO: 551 - DNA, 1529 bp, Homo sapiens
atcttgagactcgctaagcgtcccagccgcatccctcccgcagcgacggcggcccgggacccgcgggctgtgaaccatgaacacccgcaatagagtggtgaactccgggctcggcgcctcccctgcctcccgcccgacccgggatccccaggacccttctgggcggcaaggggagctgagccccgtggaagaccagagagagggtttggaggcagcccctaagggcccttcgcgggagagcgtcgtgcacgcgggccagaggcgcacaagtgcatacaccttgatagcaccaaatataaaccggagaaatgagatacaaagaattgcggagcaggagctggccaacctggagaagtggaaggagcagaacagagctaaaccggttcacctggtgcccagacggctaggtggaagccagtcagaaactgaagtcagacagaaacaacaactccagctgatgcaatctaaatacaagcaaaagctaaaaagagaagaatctgtaagaatcaagaaggaagctgaagaagctgaactccaaaaaatgaaggcaattcagagagagaagagcaataaactggaggagaaaaaaagacttcaagaaaaccttagaagagaagcatttagagagcatcagcaatacaaaaccgctgagttcttgagcaaactgaacacagaatcgccagacagaagtgcctgtcaaagtgctgtttgtggcccacaatcctcaacatgggccagaagctgggcttacagagattctctaaaggcagaagaaaacagaaaattgcaaaagatgaaggatgaacaacatcaaaagagtgaattactggaactgaaacggcagcagcaagagcaagaaagagccaaaatccaccagactgaacacaggagggtaaataatgcttttctggaccgactccaaggcaaaagtcaaccaggtggcctcgagcaatctggaggctgttggaatatgaatagcggtaacagctggggtatatgagaaaatattgactcctatctggccttcatcaactgacctcgaaaagcctcatgagatgctttttcttaatgtgattttgttcagcctcactgtttttaccttaatttcaactgcccacacacttgaccgtgcagtcaggagtgactggcttctccttgtcctcatttatgcatgtttggaggagctgattcctgaactcatatttaatctctactgccagggaaatgctacattatttttctaattggaagtataattagagtgatgttggtagggtagaaaaagagggagtcacttgatgctttcaggttaatcagagctatgggtgctacaggcttgtctttctaagtgacatattcttatctaattctcagatcaggttttgaaagctttgggggtctttttagattttaatccctactttctttatggtacaaatatgtacaaaagaaaaaggtcttatattcttttacacaaatttataaataaattttgaactccttctgtaaaaaaaaaaaaaaaaaaaaaa

SEQ ID NO: 552 - DNA, 1994 bp, Homo sapiens
catattcagcagggttagcttgtcctcccctccctcttcagcttcccagacactgagtctggaatgaaaattcacctgcctctgagttggctcctaatgggggtgggagtgttacttcggttcccaggttggaagattatctcacccggccccagctatataagctgaccggtgtggaggggcccagcagggccaactccagggattccttccacgacagaaaaacatacaagactccttcagccaacatgatggtactgaaagtagaggaactggtcactggaaagaagaatggcaatggggaggcaggggaattccttcctgaggatttcagagatggagagtatgaagctgctgttactttagagaagcaggaggatctgaagacacttctagcccaccctgtgaccctgggggagcaacagtggaaaagcgagaaacaacgagaggcagagctcaaaaagaaaaaactagaacaaagatcaaagcttgaaaatttagaagaccttgaaataatcattcaactgaagaaaaggaaaaaatacaggaaaactaaagttccagttgtaaaggaaccagaacctgaaatcattacggaacctgtggatgtgcctacgtttctgaaggctgctctggagaataaactgccagtagtagaaaaattcttgtcagacaagaacaatccagatgtttgtgatgagtataaacggacagctcttcatagagcatgcttggaaggacatttggcaattgtggagaagttaatggaagctggagcccagatcgaattccgtgatatgcttgaatccacagccatccactgggcaagccgtggaggaaacctggatgttttaaaattgttgctgaataaaggagcaaaaattagcgcccgagataagttgctcagcacagcgctgcatgtggcggtgaggactggccactatgagtgcgcggagcatcttatcgcctgtgaggcagacctcaacgccaaagacagagaaggagataccccgttgcatgatgcggtgagactgaaccgctataagatgatccgactcctgattatgtatggcgcggatctcaacatcaagaactgtgctgggaagacgccgatggatctggtgctacactggcagaatggaaccaaagcaatattcgacagcctcagagagaactcctacaagacctctcgcatagctacattctgaggcaaacgacagactcttaatcagtaaatgttcactggcattttgaaggcatggcccaagagaagagacactagccataaaatctagtttctatttatcaacgtgttgtgaagatgtacctaatgaagttttgagaaagcacagggttataggtgtttaaatttcctttagtgaaactcttatttatttttatgtattcctgtttatttatttactgccacgctactgatattcagaccttcatgatcatccatctggtgagcagagcttcatttgtatataacactttcagagccttcccacccataggtagttcttaaaccaggtgaaagagcaaagttcaagtgcctacttatgtgtcattcgctcatgtaagagtttttaagagagggctgattatcacagccctcttttctcctgaatttttaatgcagaagtttgaatgaagcaagggaaggcatgtagggacaggaaaggaaacaatggaaggaaagtgattctgtgaaaaggacagtgaagccagctattttacccccaggctggattttttttttttttttttttttttttttttaccgagtacacagagtacccaagtgaagagaacgtcatgagtgtaagtgcaaatcagtggaaggagcggcaaactgggacatgcagaattgaatttgctcaaaaaagatgaaaggaaatgcaaactgtaaatgtataaatgtatattgtattgtatgtacattttatattcataataaaggcaatcaaactcaaaaaaaaaaaaaaaaaaaa

SEQ ID NO: 553 - DNA, 4644 bp, Homo sapiens
acattcacacacaatcaccctttctaacttctgggactctttgcgcaactgctaggatttctcaagtgcatgtggcaacacagcccagctccgggtggaaaccagcagggctctggaggggctcggagaccaggggagctgtcaaggctgcggcggggaccagagaggagcctggcgggggtggctgggtggctgggggaatccccccaacttcccatcgcaggcgcagctctctcggccgcctatttcctccgaaacccgcgctgcggagcagcccagtgcatagagttcaacacttccccttgttgtggaaagtaaaggagcctcactaccacctttttttctttgcgttttcttactgctggtcctgggagccttttccttcggagcagcagccctgtccggcatctgtcttgagctcccagcaaggaaagtccatcagcttgataatggaggagaacaatgactccacggagaacccccaacaaggccaagggcggcagaatgccatcaagtgtgggtggctgaggaagcaaggaggctttgtcaagacttggcatactcgctggtttgtgctcaagggggatcagctctattatttcaaagatgaagatgaaaccaagcccttgggtactatttttctgcctggaaataaagtttctgagcatccctgcaatgaagagaacccagggaagttcctttttgaagtagttccaggaggcgatcgagatcggatgacagcaaatcatgaaagctacctcctcatggcaagcacccagaatgatatggaagactgggtgaagtcaatccgccgagtcatatggggacctttcggaggaggcatttttggacagaaactggaggatactgttcgttatgagaagagatatgggaaccgtctggctccgatgttggtggagcagtgcgtggactttatccgacaaagggggctgaaagaagagggtctctttcgactgccaggccaggctaatcttgttaaggagctccaagatgcctttgactgtggggagaagccatcatttgacagcaacacagatgtacacacggtggcatcacttcttaagctgtacctccgagaacttccagaaccagttattccttatgcgaagtatgaagattttttgtcatgtgccaaactgctcagcaaggaagaggaagcaggtgttaaggaattagcaaagcaggtgaagagtttgccagtggtaaattacaacctcctcaagtatatttgcagattcttggatgaagtacagtcctactcgggagttaacaaaatgagtgtgcagaacttggcaacggtctttggtcctaatatcctgcgccccaaagtggaagatcctttgactatcatggagggcactgtggtggtccagcagttgatgtcagtgatgattagcaaacatgattgcctctttcccaaagatgcagaactacaaagcaagccccaagatggagtgagcaacaacaatgaaattcagaagaaagccaccatggggcagttacagaacaaggagaacaataacaccaaggacagccctagtaggcagtgctcctgggacaagtctgagtcaccccagagaagcagcatgaacaatggatcccccacagctctatcaggcagcaaaaccaacagcccaaagaacagtgttcacaagctagatgtgtctagaagcccccctctcatggtcaaaaagaacccagcctttaataagggtagtgggatagttaccaatgggtccttcagcagcagtaatgcagaaggtcttgagaaaacccaaaccacccccaatgggagcctacaggccagaaggagctcttcactgaaggtatctggtaccaaaatgggcacgcacagtgtacagaatggaacggtgcgcatgggcattttgaacagcgacacactcgggaaccccacaaatgttcgaaacatgagctggctgccaaatggctatgtgaccctgagggataacaagcagaaagaacaagctggagagttaggccagcacaacagactgtccacctatgataatgtccatcaacagttctccatgatgaaccttgatgacaagcagagcattgacagtgctacctggtccacttcctcctgtgaaatctccctccctgagaactccaactcctgtcgctcttctaccaccacctgcccagagcaagacttttttggggggaactttgaggaccctgttttggatgggcccccgcaggacgacctttcccaccccagggactatgaaagcaaaagtgaccacaggagtgtgggaggtcgaagtagtcgtgccaccagtagcagtgacaacagtgagacatttgtgggcaacagcagcagcaaccacagtgcactgcacagtttagtttccagcctgaaacaggaaatgaccaaacagaagatagagtatgagtccaggataaagagcttagaacagcgaaacttgactttggaaacagaaatgatgagcctccatgatgaactggatcaggagaggaaaaagttcacaatgatagaaataaaaatgcgaaatgccgagcgagcaaaagaagatgccgagaaaagaaatgacatgctacagaaagaaatggagcagtttttttccacgtttggagaactgacagtggaacccaggagaaccgagagaggaaacacaatatggattcagtgagcctgctttcgcctgctgtctctgatggctctggcaaggactccagggattctggtgggatatgacttagaaccaggtggctggtcacctggatgtacagaagtctaactggtgaaggaatatcatttacagacattaaacatccatatctgcaatgtgtaccaaagttatatcatgccccataatgctactgtcaagtgttacaactggatatgtgtatatagagtagtttttcaaaagtaaactaaaaatgagaagcatatttcaagaattattttattgcaagtcttgtatttaaatgttaaatcaatatgttgttgcaatttagcttgctttcaagcttcaccccttgcacttaacataagctatttttggcattgtgttatcatcggcttattttatagatcaatatttttatttcccttttttgctgaggaaatgaagataagcaaaaatataaatatatatataaatatatgagttattaaaatcagaagaatactttgtggctgtgctgtttgtgccaatagactttgtcatgaccaaaaagagaaatgtaaatagttttataaaatacagtcgaatcaccaggaacctttgagctgcttttaaaattcttcccctggcaccactcagttttgcttttgcgaggcgatttgacataggaactttgagactccatgagaaagtccctttctgaggcccactgtctaccttgccagatcctcagtgcgtatcgccaatgcaggatgctccttagaaaagaaaaaatggtaaagaatggcatttaacgattcaggctttgaattactctgtccctctggaccgaatctctttaactgctggatagttttagaggaattctcctgctacttaggtactgggaaacaatgcttgctaaaccatgcccacgtgagcacctgtctcccactcaaacctctcccatctcccaacaactgcactttagaataccagcagtgaaatggtattactgtttccctctgagtgaaactgctagagtatatgtcacgtagtgacatttttttctcactcaggctattgccatctgggattctctccctactacagctggcaaagttggtttgcagcaagaagatagtgggagggggccaggctgcaggagaaggagaaaagtttagaagaaacaaaccattttgcttctaattttgacagtatcactttcctgttaaaacatacaataattttaaaaggtgaatgcctaaagttccaattttagcaaatatgggaacctcagcaatgctaattttctagaaaaacccagggctctttggagctagagttttgggagaacagttcttcacaataaggcaatggttttgagaggccaggcaaataatctttctcaccgtagaacaaaaagttacaaaaggcataatcggaaatagagactacatacttgagtttatggggtttgtgttgtttgaaggttcaatgcttgcatgtgtttatttattttcaagagggaaagtggtctgtactgctttcatccttgccactgtcttgcttttattttttactctcccactgagcaagcgtctgtggtcctatggtatcaaccagtatctttatagcaataatttctttaattcccttttctctctctttccaattatttaaccagttacttccacctggacatacgataggaaattcaaactcaaaatatgaaaattgatcttaataactctcccttcatatcttttcacctatttccagtccttatcatagttgataaaaacctcagactcatccagaaagctatatgatgcactagtaaaaaaaacaaagatattcaaactgcttgggttcaaatggtatacaatttgccagctgttactgaaccttctatgcataactttttttttcctctgtgcaattggaataataaaaatactactcccataga

SEQ ID NO: 554 - DNA, 859 bp, Homo sapiens
tgtggacaatgcccgcatcgttctgaagatcgacaatgcctgtcttgcatcagcagatgactttagagtcaaggatgagacagagctgaccatgcaccagtctgtggagagcgacatccatgggctccacaagatcattgatgacaccaatgtcactcagctgcagctagaggcagaggtcaaggctctcaaggaggagttgctcttcatgaagaagaaccacgaagaggaagtaaaaggcctacaatcccagattgccagctctgggttgtccatggaggtagataccccaaatctcaggacctcaccaaaatcatggcagacatccaggcccaatatgactagctggctcgggagaaccaagaggagctggacaagtacgggtctcagcagactgaggagagcaccacaatggtcaccacacagtccgccgaggttggagctgctgagatggcgctcacggaactgagacatacagtccagtccttggagattgacctggactcaatgagaaatctgaaggcaagcttggagagcagcctgaggaaagtggaggcccgctatgccctacagatggagcagatcaacgggatcctgctccacctggagtcggagctggcacagatccgggcagagggacagtgccaggcccaggagtacaaggccctgctgaacatcaaggtcaagctggaggctaagatcgccacctactgccacctgctggaagatggcaaggacttcaatcttggtgatgccctggacaccagcaattccatgcaaaccattcaaaagaccaccatctgccggatagtggatcataaagtgatgtcagacattaagccagcagaagcagggtact

SEQ ID NO: 555 - DNA, 5566 bp, Homo sapiens; identical to SEQ ID NO: 264

SEQ ID NO: 556 - DNA, 2775 bp, Homo sapiens
gttgggaaagagcagcctgggcggcaggggcggtggctggagctcggtaaagctcgtgggaccccattgggggaatttgatccaaggaagcggtgattgccgggggaggagaagctcccagatccttgtgtccacttgcagcgggggaggcggagacggcggagcgggccttttggcgtccactgcgcggctgcaccctgccccatcctgccgggatcatggtctgcggcagcccgggagggatgctgctgctgcgggccgggctgcttgccctggctgctctctgcctgctccgggtgcccggggctcgggctgcagcctgtgagcccgtccgcatccccctgtgcaagtccctgccctggaacatgactaagatgcccaaccacctgcaccacagcactcaggccaacgccatcctggccatcgagcagttcgaaggtctgctgggcacccactgcagccccgatctgctcttcttcctctgtgccatgtacgcgcccatctgcaccattgacttccagcacgagcccatcaagccctgtaagtctgtgtgcgagcgggcccggcagggctgtgagcccatactcatcaagtaccgccactcgtggccggagaacctggcctgcgaggagctgccagtgtacgacaggggcgtgtgcatctctcccgaggccatcgttactgcggacggagctgattttcctatggattctagtaacggaaactgtagaggggcaagcagtgaacgctgtaaatgtaagcctattagagctacacagaagacctatttccggaacaattacaactatgtcattcgggctaaagttaaagagataaagactaagtgccatgatgtgactgcagtagtggaggtgaaggagattctaaagtcctctctggtaaacattccacgggacactgtcaacctctataccagctctggctgcctctgccctccacttaatgttaatgaggaatatatcatcatgggctatgaagatgaggaacgttccagattactcttggtggaaggctctatagctgagaagtggaaggatcgactcggtaaaaaagttaagcgctgggatatgaagcttcgtcatcttggactcagtaaaagtgattctagcaatagtgattccactcagagtcagaagtctggcaggaactcgaacccccggcaagcacgcaactaaatcccgaaatacaaaaagtaacacagtggacttcctattaagacttacttgcattgctggactagcaaaggaaaattgcactattgcacatcatattctattgtttactataaaaatcatgtgataactgattattacttctgtttctcttttggtttctgcttctctcttctctcaacccctttgtaatggtttgggggcagactcttaagtatattgtgagttttctatttcactaatcatgagaaaaactgttcttttgcaataataataaattaaacatgctgttaccagagcctctttgctggagtctccagatgttaatttactttctgcaccccaattgggaatgcaatattggatgaaaagagaggtttctggtattcacagaaagctagatatgccttaaaacatactctgccgatctaattacagccttatttttgtatgccttttgggcattctcctcatgcttagaaagttccaaatgtttataaaggtaaaatggcagtttgaagtcaaatgtcacataggcaaagcaatcaagcaccaggaagtgtttatgaggaaacaacacccaagatgaattatttttgagactgtcaggaagtaaaataaataggagcttaagaaagaacattttgcctgattgagaagcacaactgaaaccagtagccgctggggtgttaatggtagcattcttcttttggcaatacatttgatttgttcatgaatatattaatcagcattagagaaatgaattataactagacatctgctgttatcaccatagttttgtttaatttgcttccttttaaataaacccattggtgaaagtctttttttttctcttcttttaaaataaatcagaattgccgtattgaccaggaaaagattatgtatgcacgtgcaccagggttagtttttaaaagtacatggctccataaaaatgctgtagattacagagtgataaaatatgcaggtttttttgtttttgttttttctgttgtgtgtgtgtctgtatttgtgtacatgtgtgtccttgcactcacacccaaggtggattaaaatacaggcctgcaaactggcctgcactttatcatttggatttgtgctgcttaatgctcagcgaaaaatgtctagtaaaatgaattatggttgtcaggagagaggttatttcgacttttgaaccaattgcacatttctcattacccaagctgtggtgagatcccaggggctgtggtgaacaaatgatgcttttatagatggtccctagcttacaatgattcaatttacaatgcttcaatttaacaatttgttgacttacaatgggtttatcaggatgtaacccaatgcatttcaacttacgatattttcagtttcgaatgggtttatccagatgtaaccccatcgtaaatggcggagcatctgtacttccttcctctggcagagttccttagagcctgtgccaattacttgaaagtttcattctctgccatttacatgtgtgctattagtagaaccaaatttctaagctgtggcgtgctgaaaataaaatgcttatgaagcaaaaaaaaaa

SEQ ID NO: 557 - DNA, 2865 bp, Homo sapiens
gtgacagaagtagtaggaagtgagctgttcagaggcaggagggtctattctttgccaaaggggggaccagaattcccccatgcgagctgtttgaggactgggatgccgagaacgcgagcgatccgagcagggtttgtctgggcaccgtcggggtaggatccggaacgcattcggaaggctttttgcaagcatttacttggaaggagaacttgggatctttctgggaaccccccgccccggctggattggccgagcaagcctggaaaatgcaattgaaacacagagcaccagctctgaggaactcgtcccaagccccccatctccacttcctccccctcgagtgtacaaaccctgcttcgtctgccaggacaaatcatcagggtaccactatggggtcagcgcctgtgagggatgtaagggctttttccgcagaagtattcagaagaatatgatttacacttgtcaccgagataagaactgtgttattaataaagtcaccaggaatcgatgccaatactgtcgactccagaagtgctttgaagtgggaatgtccaaagaatctgtcaggaatgacaggaacaagaaaaagaaggagacttcgaagcaagaatgcacagagagctatgaaatgacagctgagttggacgatctcacagagaagatccgaaaagctcaccaggaaactttcccttcactctgccagctgggtaaatacaccacgaattccagtgctgaccatcgagtccgactggacctgggcctctgggacaaattcagtgaactggccaccaagtgcattattaagatcgtggagtttgctaaacgtctgcctggtttcactggcttgaccatcgcagaccaaattaccctgctgaaggccgcctgcctggacatcctgattcttagaatttgcaccaggtataccccagaacaagacaccatgactttctcagacggccttaccctaaatcgaactcagatgcacaatgctggatttggtcctctgactgaccttgtgttcacctttgccaaccagctcctgcctttggaaatggatgacacagaaacaggccttctcagtgccatctgcttaatctgtggagaccgccaggaccttgaggaaccgacaaaagtagataagctacaagaaccattgctggaagcactaaaaatttatatcagaaaaagacgacccagcaagcctcacatgtttccaaagatcttaatgaaaatcacagatctccgtagcatcagtgctaaaggtgcagagcgtgtaattaccttgaaaatggaaattcctggatcaatgccacctctcattcaagaaatgctggagaattctgaaggacatgaacccttgaccccaagttcaagtgggaacacagcagagcacagtcctagcatctcacccagctcagtggaaaacagtggggtcagtcagtcaccactcgtgcaataagacattttctagctacttcaaacattccccagtaccttcagttccaggatttaaaatgcaagaaaaaacatttttactgctgcttagtttttggactgaaaagatattaaaactcaagaaggaccaagaagttttcatatgtatcaatatatatactcctcactgtgtaacttacctagaaatacaaacttttccaattttaaaaaatcagccatttcatgcaaccagaaactagttaaaagcttctattttcctctttgaacactcaagattgcatggcaaagacccagtcaaaatgatttacccctggttaagtttctgaagactttgtacatacagaagtatggctctgttctttctatactgtatgtttggtgctttccttttgtcttgcatactcaaaataaccatgacaccaaggttatgaaatagactactgtacacgtctacctaggttcaaaaagataactgtcttgctttcatggaatagtcaagacatcaaggtaaggaaacaggactattgacaggactattgtacagtatgacaagataaggctgaagatattctactttagttagtatggaagcttgtctttgctctttctgatgctctcaaactgcatcttttatttcatgttgcccagtaaaagtatacaaattccctgcactagcagaagagaattctgtatcagtgtaactgccagttcagttaatcaaatgtcatttgttcaattgttaatgtcactttaaattaaaagtggtttattacttgtttaatgacataactacacagttagttaaaaaaaatttttttacagtaatgatagcctccaaggcagaaacacttttcagtgttaagtttttgtttacttgttcacaagccattagggaaatttcatgggataattagcaggctggtctaccacctggaccatgtaactctagtgtccttcctgattcatgcctgatattgggatttttttttccagccttcttgatgccaaggggctaattaatattaacaactcccaaagaaacaggcatagaatctgcctcctttgaccttgttcaatcactatgaagcagagtgaaagctgtggtagagtggttaacagatacaagtgtcagtttcttagttctcatttaagcactagtggaattttttttttttgatatattagcaagtctgtgatgtactttcactggctctgtttgtacattgagattgtttgtttaacaatgctttctatgttcatatactgtttacctttttccatggagtctcctggcaaagaataaaatatatttattttaaaaaaaaaaaaaaaaaaaaaaaaaaaaaaaaaaaaaaaaaaaaaaaaaaaaaaaaaaaaaaaaaaaaaaaaaaaaaaaaaaaaaaaaaaaaa

SEQ ID NO: 558 - DNA, 7335 bp, Homo sapiens
tgggggcagcggagggaggggtgggaagcaccatgcagtttgtatcctgggccacactgctaacgctcctggtgcgggacctggccgagatggggagcccagacgccgcggcggccgtgcgcaaggacaggctgcacccgaggcaagtgaaattattagagaccctgagcgaatacgaaatcgtgtctcccatccgagtgaacgctctcggagaaccctttcccacgaacgtccacttcaaaagaacgcgacggagcattaactctgccactgacccctggcctgccttcgcctcctcctcttcctcctctacctcctcccaggcgcattaccgcctctctgccttcggccagcagtttctatttaatctcaccgccaatgccggatttatcgctccactgttcactgtcaccctcctcgggacgcccggggtgaatcagaccaagttttattccgaagaggaagcggaactcaagcactgtttctacaaaggctatgtcaataccaactccgagcacacggccgtcatcagcctctgctcaggaatgctgggcacattccggtctcatgatggggattattttattgaaccactacagtctatggatgaacaagaagatgaagaggaacaaaacaaaccccacatcatttataggcgcagcgccccccagagagagccctcaacaggaaggcatgcatgtgacacctcagaacacaaaaataggcacagtaaagacaagaagaaaaccagagcaagaaaatggggagaaaggattaacctggctggtgacgtagcagcattaaacagcggcttagcaacagaggcattttctgcttatggtaataagacggacaacacaagagaaaagaggacccacagaaggacaaaacgttttttatcctatccacggtttgtagaagtcttggtggtggcagacaacagaatggtttcataccatggagaaaaccttcaacactatattttaactttaatgtcaattgtagcctctatctataaagacccaagtattggaaatttaattaatattgttattgtgaacttaattgtgattcataatgaacaggatgggccttccatatcttttaatgctcagacaacattaaaaaacttttgccagtggcagcattcgaagaacagtccaggtggaatccatcatgatactgctgttctcttaacaagacaggatatctgcagagctcacgacaaatgtgataccttaggcctggctgaactgggaaccatttgtgatccctatagaagctgttctattagtgaagatagtggattgagtacagcttttacgatcgcccatgagctgggccatgtgtttaacatgcctcatgatgacaacaacaaatgtaaagaagaaggagttaagagtccccagcatgtcatggctccaacactgaacttctacaccaacccctggatgtggtcaaagtgtagtcgaaaatatatcactgagtttttagacactggttatggcgagtgtttgcttaacgaacctgaatccagaccctaccctttgcctgtccaactgccaggcatcctttacaacgtgaataaacaatgtgaattgatttttggaccaggttctcaggtgtgcccatatatgatgcagtgcagacggctctggtgcaataacgtcaatggagtacacaaaggctgccggactcagcacacaccctgggccgatgggacggagtgcgagcctggaaagcactgcaagtatggattttgtgttcccaaagaaatggatgtccccgtgacagatggatcctggggaagttggagtccctttggaacctgctccagaacatgtggagggggcatcaaaacagccattcgagagtgcaacagaccagaaccaaaaaatggtggaaaatactgtgtaggacgtagaatgaaatttaagtcctgcaacacggagccatgtctcaagcagaagcgagacttccgagatgaacagtgtgctcactttgacgggaagcattttaacatcaacggtctgcttcccaatgtgcgctgggtccctaaatacagtggaattctgatgaaggaccggtgcaagttgttctgcagagtggcagggaacacagcctactatcagcttcgagacagagtgatagatggaactccttgtggccaggacacaaatgatatctgtgtccagggcctttgccggcaagctggatgcgatcatgttttaaactcaaaagcccggagagataaatgtggggtttgtggtggcgataattcttcatgcaaaacagtggcaggaacatttaatacagtacattatggttacaatactgtggtccgaattccagctggtgctaccaatattgatgtgcggcagcacagtttctcaggggaaacagacgatgacaactacttagctttatcaagcagtaaaggtgaattcttgctaaatggaaactttgttgtcacaatggccaaaagggaaattcgcattgggaatgctgtggtagagtacagtgggtccgagactgccgtagaaagaattaactcaacagatcgcattgagcaagaacttttgcttcaggttttgtcggtgggaaagttgtacaaccccgatgtacgctattctttcaatattccaattgaagataaacctcagcagttttactggaacagtcatgggccatggcaagcatgcagtaaaccctgccaaggggaacggaaacgaaaacttgtttgcaccagggaatctgatcagcttactgtttctgatcaaagatgcgatcggctgccccagcctggacacattactgaaccctgtggtacagactgtgacctgaggtggcatgttgccagcaggagtgaatgtagtgcccagtgtggcttgggttaccgcacattggacatctactgtgccaaatatagcaggctggatgggaagactgagaaggttgatgatggtttttgcagcagccatcccaaaccaagcaaccgtgaaaaatgctcaggggaatgtaacacgggtggctggcgctattctgcctggactgaatgttcaaaaagctgtgacggtgggacccagaggagaagggctatttgtgtcaatacccgaaatgatgtactggatgacagcaaatgcacacatcaagagaaagttaccattcagaggtgcagtgagttcccttgtccacagtggaaatctggagactggtcagagtgcttggtcacctgtggaaaagggcataagcaccgccaggtctggtgtcagtttggtgaagatcgattaaatgatagaatgtgtgaccctgagaccaagccaacatctatgcagacttgtcagcagccggaatgtgcatcctggcaggcgggtccctggggacagtgcagtgtcacttgtggacagggataccagctaagagcagtgaaatgcatcattgggacttatatgtcagtggtagatgacaatgactgtaatgcagcaactagaccaactgatacccaggactgtgaattaccatcatgtcatcctcccccagctgccccggaaacgaggagaagcacatacagtgcaccaagaacccagtggcgatttgggtcttggaccccatgctcagccacttgtgggaaaggtacccggatgagatacgtcagctgccgagatgagaatggctctgtggctgacgagagtgcctgtgctaccctgcctagaccagtggcaaaggaagaatgttctgtgacaccctgtgggcaatggaaggccttggactggagctcttgctctgtgacctgtgggcaaggtagggcaacccggcaagtgatgtgtgtcaactacagtgaccacgtgatcgatcggagtgagtgtgaccaggattatatcccagaaactgaccaggactgttccatgtcaccatgccctcaaaggaccccagacagtggcttagctcagcaccccttccaaaatgaggactatcgtccccggagcgccagccccagccgcacccatgtgctcggtggaaaccagtggagaactggcccctggggagcatgttccagtacctgtgctggcggatcccagcggcgtgttgttgtatgtcaggatgaaaatggatacaccgcaaacgactgtgtggagagaataaaacctgatgagcaaagagcctgtgaatccggcccttgtcctcagtgggcttatggcaactggggagagtgcactaagctgtgtggtggaggcataagaacaagactggtggtctgtcagcggtccaacggtgaacggtttccagatttgagctgtgaaattcttgataaacctcccgatcgtgagcagtgtaacacacatgcttgtccacacgacgctgcatggagtactggcccttggagctcgtgttctgtctcttgtggtcgagggcataaacaacgaaatgtttactgcatggcaaaagatggaagccatttagaaagtgattactgtaagcacctggctaagccacatgggcacagaaagtgccgaggaggaagatgccccaaatggaaagctggcgcttggagtcagtgctctgtgtcctgtggccgaggcgtacagcagaggcatgtgggctgtcagatcggaacacacaaaatagccagagagaccgagtgcaacccatacaccagaccggagtcggaacgcgactgccaaggcccacggtgtcccctctacacttggagggcagaggaatggcaagaatgcaccaagacctgcggcgaaggctccaggtaccgcaaggtggtgtgtgtggatgacaacaaaaacgaggtgcatggggcacgctgtgacgtgagcaagcggccggtggaccgtgaaagctgtagtttgcaaccctgcgagtatgtctggatcacaggagaatggtcagagtgctcagtgacctgtggaaaaggctacaaacaaaggcttgtctcgtgcagcgagatttacaccgggaaggagaattatgaatacagctaccaaaccaccatcaactgcccaggcacgcagccccccagtgttcacccctgttacctgagggactgccctgtctcggccacctggagagttggcaactgggggagctgctcagtgtcttgtggtgttggagtgatgcagagatctgtgcaatgtttaaccaatgaggaccaacccagccacttatgccacactgatctgaagccagaagaacgaaaaacctgccgtaatgtctataactgtgagttaccccagaattgcaaggaggtaaaaagacttaaaggtgccagtgaagatggtgaatatttcctgatgattagaggaaagcttctgaagatattctgtgcggggatgcactctgaccaccccaaagagtacgtgacactggtgcatggagactctgagaatttctccgaggtttatgggcacaggttacacaacccaacagaatgtccctataacgggagccggcgcgatgactgccaatgtcggaaggattacacggccgctgggttttccagttttcagaaaatcagaatagacctgaccagcatgcagataatcaccactgacttacagtttgcaaggacaagcgaaggacatcccgtcccttttgccacagccggggattgctacagcgctgccaagtgcccacagggtcgttttagcatcaacctttatggaaccggcttgtctttaactgaatctgccagatggatatcacaagggaattatgctgtctctgacatcaagaagtcgccggatggtacccgagtcgtagggaaatgcggtggttactgtggaaaatgcactccatcctctggtactggcctggaggtgcgagttttatagctaaggtgctttgaagaggaagccattatggatggatgaaggatagtaatgcaatacctccaccttaatttgggtgcatgtgtatgtgtgtgtgtgtttgtgtgtgacttgtatgcttgtgtgtgtaaatgtgtgtacatatacatatatacatatctacacatacatatatacacatatatgtgtgtatgtagatatgtagactatcctaatgatgtaaagtttaatatttatgtttgaaattatttattgtgatgtaatatttttgtacgtaaaatgattctattatgactgcctttgcatgtagtaatatgacaaagtgatccttcattatcacggtacactattgtttacttttcatctgtaaatgttttattgttacttttttaaaatgaatttttttaaaacaatctagccatcatcaaggtgctataagagttgtataaaagatatttttggcatttctaggcaagtatcagccaataagtatgttagtgatatcacagattgtaccaactattaactatgttaaataagtattcagtttcatgtgatctctgggaaaaaaatatgctgccttggtgctaatattgtatgtatttaaatgatcatccgactcagaaatataaacacttttaatgaaagggaggaacggaaggacaatttccagtgcacagaatcacttggatgaaataagaccagctctttacccttatttttggatatgccttttttggaagagacttagactttatccttattgttgttagtgttgttaatattcgttgcttcagcccacggtgccttggtctctccacaatcaaatggaggatcccccaagcagcttcattacagagtgatattgggaaagtgagatcctctcaccattttgccaagatactctaaaatgacatccaagtttaccagtagaaagacacaggatgcacagaatgggcatgaccttcagctcacgagcacacctggagaaattcagaaccaggttctgaatcatcacgattgccttttgcatgaaaacatcggctggtgatgtgacttctcttcaggccatgagcctaacaccctgccggttttcatgcccgctgcagtaatggacgtttgtgtgaagaaatgaactgtggagtacaaaatgctttgagtctttccgattgctcattaattcacttttttgttacttctttccaaaatggaagtgctgaagccatggtctttctgcccctccaagctgatgaagggaagcctttgccaatggcccatggaagacacttggtttgagaaaccctgcccacttccaaagaccaaagagattaggaaaagcctggcagtattctccaactccaaacaagctctagagtgctccaggaaaagttatattcagtatatgaataagtgttattctccattattaatgtgttctgaaaatatattatgaataaatacatcaccacacccaaaaaaaaaaaaaaaaaaaaaaaaa

SEQ ID NO: 559 - DNA, 1602 bp, Homo sapiens
ggctctgcagaggcagcggttggaggcgcggtgggtgtctgcgggggtctcgcggggcggctgcggtgtttcaccgggaaaggctcgaggagagcgcggctcacgagagataacccagctgtgctccctggaaccttcaatttcaaggcctccctgcctctactaggcgccttagctcactatggggaaccacttgactgagatggcgcccactgcctcctccttcttgccccacttccaagccctgcatgtcgtggtcattgggctggactctgctggaaagacctccctcctttaccgcctcaagttcaaggagtttgtccagagtgtccccaccaaaggcttcaacaccgagaagatccgggtgcccctcgggggatcgcgtggcatcaccttccaagtgtgggacgtcggggggcaggagaagctgcgaccactgtggcgctcttatacccgccggacagacggtctagtgtttgtggtggacgctgcggaggctgagcggctggaggaagccaaggtggagttgcaccgaatcagccgggcctcggacaaccagggcgtgccagtgctggtgctggccaacaagcaggaccagcccggggcactgagcgctgctgaggtggagaagaggctggcagtccgagagctagcagccgccactctcactcatgtgcaaggctgcagcgctgtggacggtctgggcctgcagcagggccttgagcgcctctatgagatgatcctcaagaggaagaaggcagctcggggtggcaagaagagacggtgacccaagccccccctccctttcctcccacctagtaggggtctgcacacttggacagcagggtgggaccagcctgtgacctctcagtcagactggggtgcaggacctgtccacctcaatgaaggagagaggagcatggggtgtcccgttttggtgccacactggggtggggatgggagatgggatgtctttgcatatctctctcatcctctctggagaagtgggcgctgcaggactgtggagacgtaaatgtaaactgtgactctacctcgaccctgtttcttatttttcttctctggctaaaaatttttaattggatgtgtttgggggcggggggatggaagtgacttggagaatgtgtttgggatgaaataactatctccccttcctctgtcccccaactggggagtctccccaggctgcttttctaggaataccagtcacatagtttttatttttgtgtctgtgaaagtgccaagaacccctccccacatttgtagatccatgaccctttttataagctgtgtgtgtcctctgtattattgttattaactattttttagcatttgcctgtaagttattaaagactgataactgtagctcttaccttggtctggggcattttcctctccttatcttgccccagagacaattcaagatttctatatggggttgtggcgcagggggagggagatttatcttgaagctgaatttgcaaagcaagcacttataaaaattagattgtgtgttacgggatggcttgtgaaaattataggggggagtggaaaacccctcaagctaaaaaaaaaaaaaaaaaa

SEQ ID NO: 560 - DNA, 4675 bp, Homo sapiens
cagtagcatcgcccatttgccattcactgcagtagcaaaagtagtactctgtggtgggttaatcggtttgaggcagctccttaaatgaacatttgtgtttcatttttctgttattttcccgaacatgaaaagacgataaaactgaaatggaaaagatctattccagaggggagcttcaccacttcattgacggctttaatgaagagaaaagcaactggatgcgctatgtgaatccagcacactctccccgggagcaaaacctggctgcgtgtcagaacgggatgaacatctacttctacaccattaagcccatccctgccaaccaggaacttcttgtgtggtattgtcgggactttgcagaaaggcttcactacccttatcccggagagctgacaatgatgaatctcacacaaacacagagcagtctaaagcaaccgagcactgagaaaaatgaactctgcccaaagaatgtcccaaagagagagtacagcgtgaaagaaatcctaaaattggactccaacccctccaaaggaaaggacctctaccgttctaacatttcacccctcacatcagaaaaggacctcgatgactttagaagacgtgggagccccgaaatgcccttctaccctcgggtcgtttaccccatccgggcccctctgccagaagactttttgaaagcttccctggcctacgggatcgagagacccacgtacatcactcgctcccccattccatcctccaccactccaagcccctctgcaagaagcagccccgaccaaagcctcaagagctccagccctcacagcagccctgggaatacggtgtcccctgtgggccccggctctcaagagcaccgggactcctacgcttacttgaacgcgtcctacggcacggaaggtttgggctcctaccctggctacgcacccctgccccacctcccgccagctttcatcccctcgtacaacgctcactaccccaagttcctcttgcccccctacggcatgaattgtaatggcctgagcgctgtgagcagcatgaatggcatcaacaactttggcctcttcccgaggctgtgccctgtctacagcaatctcctcggtgggggcagcctgccccaccccatgctcaaccccacttctctcccgagctcgctgccctcagatggagcccggaggttgctccagccggagcatcccagggaggtgcttgtcccggcgccccacagtgccttctcctttaccggggccgccgccagcatgaaggacaaggcctgtagccccacaagcgggtctcccacggcgggaacagccgccacggcagaacatgtggtgcagcccaaagctacctcagcagcgatggcagcccccagcagcgacgaagccatgaatctcattaaaaacaaaagaaacatgaccggctacaagacccttccctacccgctgaagaagcagaacggcaagatcaagtacgaatgcaacgtttgcgccaagactttcggccagctctccaatctgaaggtccacctgagagtgcacagtggagaacggcctttcaaatgtcagacttgcaacaagggctttactcagctcgcccacctgcagaaacactacctggtacacacgggagaaaagccacatgaatgccaggtctgccacaagagatttagcagcaccagcaatctcaagacccacctgcgactccattctggagagaaaccataccaatgcaaggtgtgccctgccaagttcacccagtttgtgcacctgaaactgcacaagcgtctgcacacccgggagcggccccacaagtgctcccagtgccacaagaactacatccatctctgtagcctcaaggttcacctgaaagggaactgcgctgcggccccggcgcctgggctgcccttggaagatctgacccgaatcaatgaagaaatcgagaagtttgacatcagtgacaatgctgaccggctcgaggacgtggaggatgacatcagtgtgatctctgtagtggagaaggaaattctggccgtggtcagaaaagagaaagaagaaactggcctgaaagtgtctttgcaaagaaacatggggaatggactcctctcctcagggtgcagcctttatgagtcatcagatctacccctcatgaagttgcctcccagcaacccactacctctggtacctgtaaaggtcaaacaagaaacagttgaaccaatggatccttaagattttcagaaaacacttattttgtttcttaagttatgacttggtgagtcagggtgcctgtaggaagtggcttgtacataatcccagctctgcaaagctctctcgacagcaaatggtttcccctcacctctggaattaaagaaggaactccaaagttactgaaatctcagggcatgaacaaggcaaaggccatatatatatatatatatatatctgtatacatattatatatacttatttacacctgtgtctatatatttgcccctgtgtattttgaatatttgtgtggacatgtttgcatagccttcccattactaagactattacctagtcataattattttttcaatgataatccttcataatttattatacaatttatcattcagaaagcaataattaaaaaagtttacaatgactggaaagattccttgtaatttgagtataaatgtatttttgtcttgtggccattctttgtagataatttctgcacatctgtataagtacctaagatttagttaaacaaatatatgacttcagtcaacctctctctctaataatggtttgaaaatgaggtttgggtaattgccaatgttggacagttgatgtgttcattcctgggatcctatcatttgaacagcattgtacataacttgggggtatgtgtgcaggattacccaagaataacttaagtagaagaaacaagaaagggaatcttgtatatttttgttgatagttcatgtttttcccccagccacaattttaccggaagggtgacaggaaggctttaccaacctgtctctccctccaaaagagcagaatcctcccaccgccctgccctccccaccgagtcctgtggccattcagagcggccacatgacttttgcatccattgtattatcagaaaatgtgaagaagaaaaaaatgccatgttttaaaaccactgcgaaaatttccccaaagcataggtggctttgtgtgtgtgcgatttgggggcttgagtctgggtggtgttttgttgttggtttttgttgctttttttttttttttttttttaatgtcaaaattgcacaaacatggtgctctaccaggaaggattcgaggtagataggctcaggccacactttaaaaacaaacacacaaacaacaaaaaacgggtattctagtcatcttggggtaaaagcgggtaatgaacattcctatccccaacacatcaattgtattttttctgtaaaactcagattttcctcagtatttgtgtttttacattttatggttaatttaatggaagatgaaagggcattgcaaagttgttcaacaacagttacctcattgagtgtgtccagtagtgcaggaaatgatgtcttatctaatgatttgcttctctagaggagaaaccgagtaaatgtgctccagcaagatagactttgtgttattctatcttttattctgctaagcccaaagattacatgttggtgttcaaagtgtagcaaaaaatgatgtatatttataaatctatttataccactatatcatatgtatatatatttataaccacttaaattgtgagccaagccatgtaaaagatctactttttctaagggcaaaaaaaaaaaaaaaaaaaaaagaacactcctttctgagactttgcttaatacttggtgacctcacaatcacgtcggtatgattgggcacccttgcctactgtaagagaccctaaaaccttggtgcagtggtggggaccacaaaacaaccagggaggaagagatacatcattttttagtattaaggaccatctaagacagctctattttttttttgccactttatgattatgtggtcacacccaagtcacagaaataaaaaactgactttaccgctgcaatttttctgttttcctccttactaaatactgatacattactccaatctattttataattatatttgacattttgttcacatcaactaatgttcacctgtagaagagaacaaatttcgaataatccagggaaacccaagagccttactggtcttctgtaacttccaagactgacagctttttatgtatcagtgtttgataaacacagtccttaactgaaggtaaaccaaagcatcacgttgacattagaccaaatacttttgattcccaactactcgtttgttctttttctccttttgtgctttcccatagtgagaatttttataaagacttcttgcttctctcaccatccatccttctcttttctgcctcttacatgtgaatgttgagcccacaatcaacagtggttttattttttcctctactcaaagttaaaactgaccaaagttactggctttttactttgctagaacaacaaactatcttatgtttacatactggtttacaatgttatttatgtgcaaattgtcaaaatgtaaattaaatataaatgttcatgctttaccaaaaa

SEQ ID NO: 561 - DNA, 1461 bp, Homo sapiens
agatgccccacagcactgctcttccagaggcaagaccaaccaagatgagtgccctgggagctgtcattgccctcctgctctggggacagctttttgcagtggactcaggcaatgatgtcacggatatcgcagatgacggctgcccgaagccccccgagattgcacatggctatgtggagcactcggttcgctaccagtgtaagaactactacaaactgcgcacagaaggagatggagtatacaccttaaatgataagaagcagtggataaataaggctgttggagataaacttcctgaatgtgaagcagatgacggctgcccgaagccccccgagattgcacatggctatgtggagcactcggttcgctaccagtgtaagaactactacaaactgcgcacagaaggagatggagtgtacaccttaaacaatgagaagcagtggataaataaggctgttggagataaacttcctgaatgtgaagcagtatgtgggaagcccaagaatccggcaaacccagtgcagcggatcctgggtggacacctggatgccaaaggcagctttccctggcaggctaagatggtttcccaccataatctcaccacaggtgccacgctgatcaatgaacaatggctgctgaccacggctaaaaatctcttcctgaaccattcagaaaatgcaacagcgaaagacattgcccctactttaacactctatgtggggaaaaagcagcttgtagagattgagaaggttgttctacaccctaactactcccaggtagatattgggctcatcaaactcaaacagaaggtgtctgttaatgagagagtgatgcccatctgcctaccttcaaaggattatgcagaagtagggcgtgtgggttatgtttctggctgggggcgaaatgccaattttaaatttactgaccatctgaagtatgtcatgctgcctgtggctgaccaagaccaatgcataaggcattatgaaggcagcacagtccccgaaaagaagacaccgaagagccctgtaggggtgcagcccatactgaatgaacacaccttctgtgctggcatgtctaagtaccaagaagacacctgctatggcgatgcgggcagtgcctttgccgttcacgacctggaggaggacacctggtatgcgactgggatcttaagctttgataagagctgtgctgtggctgagtatggtgtgtatgtgaaggtgacttccatccaggactgggttcagaagaccatagctgagaactaatgcaaggctggccggaagcccttgcctgaaagcaagatttcagcctggaagagggcaaagtggacgggagtggacaggagtggatgcgataagatgtggtttgaagctgatgggtgccagccctgcattgctgagtcaatcaataaagagctttcttttgacccataaaaaaaaaaaaaaaaaaaaaaaaaaaaaa

SEQ ID NO: 562 - DNA, 6584 bp, Homo sapiens
tgctgccatgtgccgctgccacgggtacccagcctgtcgctaaactttccgggcgccagcccggctctgagtcgcgcttctcagcggagtgacccagggacggaggacccaggctggctggggactgtctgctcttctcggcgggatccgtggagagtcctttccctggaatccgagccctaaccgtctctccccagccctatccggcgaggagcggagcgctgccagcggaggcagcgccttcccgaagcagtttatctttggacggttttctttaaaggaaaaagcaaccaacaggttgccagccccggcgccacacacgagacgccggagggagaagccccggcccggattcctctgcctgtgtgcgtccctcgcgggctgctggaggcgaggggagggagggggcgatggctcggcctgacccatccgcgccgccctcgctgttgctgctgctcctagcgcagctggtgggccgggcggccgccgcgtccaaggccccggtgtgccaggaaatcacggtgcccatgtgccgcggcatcggctacaacctgacgcacatgcccaaccagttcaaccacgacacgcaggacgaggcgggcctggaggtgcaccagttctggccgctggtggagatccaatgctcgccggacctgcgcttcttcctatgctctatgtacacgcccatctgtctgcccgactaccacaagccgctgccgccctgccgctcggtgtgcgagcgcgccaaggccggctgctcgccgctgatgcgccagtacggcttcgcctggcccgagcgcatgagctgcgaccgcctcccggtgctgggccgcgacgccgaggtcctctgcatggattacaaccgcagcgaggccaccacggcgccccccaggcctttcccagccaagcccacccttccaggcccgccaggggcgccggcctcggggggcgaatgccccgctgggggcccgttcgtgtgcaagtgtcgcgagcccttcgtgcccattctgaaggagtcacacccgctctacaacaaggtgcggacgggccaggtgcccaactgcgcggtaccctgctaccagccgtccttcagtgccgacgagcgcacgttcgccaccttctggataggcctgtggtcggtgctgtgcttcatctccacgtccaccacagtggccaccttcctcatcgacatggaacgcttccgctatcctgagcgccccatcatcttcctgtcagcctgctacctgtgcgtgtcgctgggcttcctggtgcgtctggtcgtgggccatgccagcgtggcctgcagccgcgagcacaaccacatccactacgagaccacgggccctgcactgtgcaccatcgtcttcctcctggtctacttcttcggcatggccagctccatctggtgggtcatcctgtcgctcacctggttcctggccgccggcatgaagtggggcaacgaggccatcgcgggctacgcgcagtacttccacctggctgcgtggctcatccccagcgtcaagtccatcacggcactggcgctgagctccgtggacggggacccagtggccggcatctgctacgtgggcaaccagaacctgaactcgctgcgcggcttcgtgctgggcccgctggtgctctacctgctggtgggcacgctcttcctgctggcgggcttcgtgtcgctcttccgcatccgcagcgtcatcaagcagggcggcaccaagacggacaagctggagaagctcatgatccgcatcggcatcttcacgctgctctacacggtccccgccagcattgtggtggcctgctacctgtacgagcagcactaccgcgagagctgggaggcggcgctcacctgcgcctgcccgggccacgacaccggccagccgcgcgccaagcccgagtactgggtgctcatgctcaagtacttcatgtgcctggtggtgggcatcacgtcgggcgtctggatctggtcgggcaagacggtggagtcgtggcggcgtttcaccagccgctgctgctgccgcccgcggcgcggccacaagagcgggggcgccatggccgcaggggactaccccgaggcgagcgccgcgctcacaggcaggaccgggccgccgggccccgccgccacctaccacaagcaggtgtccctgtcgcacgtgtaggaggctgccgccgagggactcggccggagagctgaggggaggggggcgttttgtttggtagttttgccaaggtcacttccgtttaccttcatggtgctgttgccccctcccgcggcgacttggagagagggaagaggggcgttttcgaggaagaacctgtcccaggtcttctccaaggggcccagctcacgtgtattctattttgcgtttcttactgccttctttatgggaaccctctttttaatttatatgtatttttcttaatttgtaactttgttgcattttggcaacaatttacctttgctttgggggctttacaatcctaaggttggcgttgtaatgaagttccacttggttcaggtttctttgaactgtgtggtctcaattgggaaaatatatttcctatacgtgtgtctttaaaaaaaaatgtgaacagtgaacgtttcggttgctgtgactgggaagttgttgggtgtgctttttcagccagcttctccttccactgcttaaagtgtccatgattctttaaggtgagctgcagtttatagccccaggtcatacctaggaggggagcataatgagctcagggcctccccaaagtgacaaggttagggagtgcttagcggttttgtgttcagccttagctttgtttatagagggaggttcagtttcttttctgtagtgcttgtaataattctcactcctaacagcaccatcgttgtgtcttgaataagttagaggtagcattatagaggatctggcataaatatttgcagtagtgagagcctaagcgatggtgattggtggagcttgaattttaggctggtgagatggcagctttgtgcctgagaggtagtgggtggttcttaagcttcagtgatcccctttttttttttttttttttttttttaaggaacttgtgttataattttggtaaaagtataaacccactccctctggacaatacttagcgacagttgctaaagggggctcctttttaaatgtaaggactgaaatggatatacttctaataagtaaatttccaacacttatttgctccaccccctcccccctcccccctccccctttatcatgttaaacagcctttttgcttttcttattcctcctctcctggagagctgtgattagaaaccacacccacccttgaatgaagtgcttgaactgggggagggaggctggctacctgtgaacaaacattggcccaaataagggaaaataagtgttcctggactttggactagtttatagccagatattccaagagcagcaagacgttgctctctgccgtctctgaaaacaaaagagatgcataacatgcttgcacaaccttttaaaatatagatcagtatagtgctacctctatagttttcttcctcttctgagaaagcctgtatattgatgatcacacacacacacactttgcaattagagaatttggtttgctttactaatctgtttaactattccttcattcattatgaacgcttatattgatgaacatacacacagaggtttctttgctattagaaaattctgtttgctttcctaatctgtttaagcattcattcatgaagagtgtggggccattactggggaaggggggtgacagtgcctcagccagcaaaataccaatgaccaggattggggactaaatttaggaagctaaaatggccagagcaattaacatttgagaaaatcctgtctaggaaaacaacttgagtgtaggcatttgtaattcacttataccaaagttggaaaagtaaaatttaagcctaggacaatttttacttcatggatgttaaatagacaaatgcatagttcccagggggaatttaaacactttactggtgggaagaaacctagtattaaagttgtaaggactctcaaaaacttcacatttattaaaatgcactgctcttacccaatttatcctctgaattaaaatttcagtggattctacaaaacctcgtacaaatagctacagaactttgtgcctattttattcctctatttattcttctaggaagaagcctcttcctagaatcttgaaatagatcccttgactgaatgccaattcctctcctgtttttcaaatgagagaaccttttctgatcaccttgaccttttccctcatttcatatgtcttcccagaaagtagacagactgctctgctgccttcagtcattgtgcctcatttgggttgtccctccttctttgtggagaaatctggaaatgatgcacagtgtatccaaaagttgtgggatgaagtggatgaaagtgatttaattcatttttagaatttttttttgttttgttttagcaacatgctgaacaactaatttactttaaaaataagccagttaaaacaaaggacgctaagcccaagtggggggcaatattagtcaggatctttggggtctaattccagaccaactttcagaagcacttctttgtctctgttctcacctctgctgtccctctcttccctcatcccctaagagagacaaagataaaagcccacctgcatccctaagtcttactgagatcagccaccccaggggagagaaactggatctacttacagccaccccctgtttccatccatatacttacttcccccaatttgcatgtgattatggaaacaagtcatgctcatgaaagcaactgtaaaataaaaggttatggagtagttcagcaacttcttcacagccagctttgtggagctggggaggacttagggcccattggagtctcttatgtgtacagcttcagggctgtccctttcagtttgattttaagcaatgcctcacttcatagcttagggggtaaggattccattcaggtaggttgtctaaaggaactaatgggacctctcagtgaattagctgaccagattttaggaaatctttttaatttctatgattttccttctcacattttgaaatggtaaaattgactggaaataatttttcttggtgccttattggttttccttgcaaacctttctcatattttctcatgaccattgccagtgaccaaggcccatgtgtgtgttgtgtgtaattgtgggcatgtacaagcttaaataacgtgccgacagcactgtttcaaagttggtattcattaggctgttgcctcctgggctggagctgcgctaatcctgacaccggctgccaggagaaaacctcatggatcacacaccaaaccttaataacagcatccgtgacctgcactctccagtacagaatgggaaccccagagctaggaaatgtagttgtatattttaatgaactgctaccccagccaaagaagcttctttcacttttgtgctctacagaaagcccaaggggggtaggagggacagagctttgaataactgctttctaacactaaatgtggccaacaggacagagcacatcacacgtataggcaggtgtgagggacagtggctaagaattgcctgctccctctgcatgctctttcttgtttccaaagtccaatcaagtgatcctgggaaacaaatctgtctggattgcggagggtggttctgaaagaactgccaagacgttaaagaagggtgaagagtaggcagaatataagtagctaacctgagtcaagactctcaaaagctagcagcctgatgacaataggatttatttcagccaggatagtgtctgtctgtgagtgcatcattttaagacagtatgacttcatgttgttacaaactatgtatagtatgtatgttttgtgggttgtatatatacataatatatattatatatatatatgagagatttggtgacttttgatacgggtttggtgcaggtgaatttattactgagccaaatgaggcacataccgagtcagtagttgaagtccagggcattcgatactgtttatgatttccatatatgtatagtgcctatcccatgctgtagtcactgttatgttaaatccagaagttacactagagccagcgatactttatttgtagacaatcaatttgaatccatatgttattactggcagatgatacatgattacagttctgaatctgtaacacttacaaaaggaaacccagagcagcttgatgagtttttgtttctgcttcgttcctgggagtcagtagaaacagcagttgtatgtggttatgttagtctcaagatacttaatttgttgaccttacttcagaaaaattttgtatgtattatatttgtgggaaggtaaaataatcatttgagatttttatcaaatatgaagattagttatttatgaaaaacaaagaaatgtctatttttctttgttcccaattaatgtagataaattttaaaatgcattaaagtaatggtaaagacaataaaaagatgctgtagaaaaaaaaaaaaaaaaaaaaaa

SEQ ID NO: 563 - DNA, 2370 bp, Homo sapiens
gcaaatcttcaggggccgtccaggactacagagctgtttcaccctaccttggcttcaatctcttcccccatgctcgaaggtgcggagctgtacttcaacgtggaccatggctacctggagggcctggttcgaggatgcaaggccagcctcctgacccagcaagactatatcaacctggtccagtgtgagaccctagaagacctgaaaattcatctccagactactgattatggtaactttttggctaatcacacaaatcctcttactgtttccaaaattgacactgagatgaggaaaagactatgtggagaatttgagtatttccggaatcattccctggagcccctcagcacatttctcacctatatgacgtgcagttatatgatagacaatgtgattctgctgatgaatggtgcattgcagaaaaaatctgtgaaagaaattctggggaagtgccaccccttgggccgtttcacagaaatggaagctgtcaacattgcagagacaccttcagatctctttaatgccattctgatcgaaacgccattagctccattcttccaagactgcatgtctgaaaatgctctagatgaactgaatattgaattgctacgcaataaactatacaagtcttaccttgaggcattctataaattctgtaagaatcatggtgatgtcacagcagaagttatgtgtcccattcttgagtttgaggccgacagacgtgcttttatcatcactcttaactcctttggcactgaattgagcaaagaagaccgagagaccctctatccaaccttcggcaaactctatcctgaggggttgcggctgttggctcaagcagaagactttgaccagatgaagaacgtagcggatcattacggagtatacaaacctttatttgaagctgtaggtggcagtgggggaaagacattggaggacgtgttttacgagcgtgaggtacaaatgaatgtgctggcattcaacagacagttccactacggtgtgttttatgcatatgtaaagctgaaggaacaggaaattagaaatattgtgtggatagcagaatgtatttcacagaggcatcgaactaaaatcaacagttacattccaattttataacccaagtaaggttctcaaatgtagaaaattataaatgttaaaaggaagttattgaagaaaataaaagaaattatgttatattatctagactacacaaaagtaagccacactatatcttcatgagttgcaaatccatggaaacacagtaaaccagccctgaaacaaagcatttccttgttttcagtggtattagatcttgtttccacatgtctgtctcattcttcactgggccttacaggttagttttaattaactctatggtatttttcttattcttgtttgatcatgttaaaaattggacctaataaaagtattttattcttgcttttccatgcttctctacaggtccaaatactgaatgtctcctttactttttctcttttaaatttttttctagacagggtctcactctgtcacctaggctacagtgcagtggtgtgatcacagctcactgcagcctcgacttcccaggctcaagtgatcctcccagctctcagcctccaaagtagctggcactacaagtgtacacccccacacaaggctaagttttgtattttttgtagagacagggtttcaacatattatccaggctggtgtcgaattcctgggctccagggatccacagtcccccttggcctcccaaagtgttgggattacatgcatgagccactgtgctgggcttcatttacattttaactgtctgttccttgcctagattcacagaaatccaaagctgtatgtagtcaacatggttcacaagtgttggaaaatgtgttttttgttttgttttgttttgtttcgttttgttttgagacagagtttccctctgtcgcccaggctagagtgcaatggcgtgatctcggctcactgcaacctccacctcccagattcaagcaactctctgcctcagcctcccgagtagctgggattacaagcacccaccactacactcagctaattttttgtatttttagtagagccggggtttcaccatcttggccaggctgatcttgaactcctgagctcatgatccacccgcctcagcctcccaaagtgctgggattacaggccccttgttcagccactgcacctggccccttattttgtttttgttttctaatatactttgatgtaatcagcttgagaaagcaacacaatttcaaatcctatcttctagatgcaagcagtgttaaatttgttaataaatttgcttttcacacctttctttaaataaaaggtatatctctc

SEQ ID NO: 564 - DNA, 5270 bp, Homo sapiens
aaagtgattgattcggatactgacactgtaggatctggggagagaggaacaaaggaccgtgaaagctgctctgtaaaagctgacacagccctcccaagtgagcaggactgttcttcccactgcaatctgacagtttactgcatgcctggagagaacacagcagtaaaaaccaggtttgctactggaaaaagaggaaagagaagactttcattgacggacccagccatggcagcgtagcagccctgcgttttagacggcagcagctcgggactctggacgtgtgtttgccctcaagtttgctaagctgctggtttattactgaagaaagaatgtggcagattgttttctttactctgagctgtgatcttgtcttggccgcagcctataacaactttcggaagagcatggacagcataggaaagaagcaatatcaggtccagcatgggtcctgcagctacactttcctcctgccagagatggacaactgccgctcttcctccagcccctacgtgtccaatgctgtgcagagggacgcgccgctcgaatacgatgactcggtgcagaggctgcaagtgctggagaacatcatggaaaacaacactcagtggctaatgaagcttgagaattatatccaggacaacatgaagaaagaaatggtagagatacagcagaatgcagtacagaaccagacggctgtgatgatagaaatagggacaaacctgttgaaccaaacagcggagcaaacgcggaagttaactgatgtggaagcccaagtattaaatcagaccacgagacttgaacttcagctcttggaacactccctctcgacaaacaaattggaaaaacagattttggaccagaccagtgaaataaacaaattgcaagataagaacagtttcctagaaaagaaggtgctagctatggaagacaagcacatcatccaactacagtcaataaaagaagagaaagatcagctacaggtgttagtatccaagcaaaattccatcattgaagaactagaaaaaaaaatagtgactgccacggtgaataattcagttcttcagaagcagcaacatgatctcatggagacagttaataacttactgactatgatgtccacatcaaactcagctaaggaccccactgttgctaaagaagaacaaatcagcttcagagactgtgctgaagtattcaaatcaggacacaccacgaatggcatctacacgttaacattccctaattctacagaagagatcaaggcctactgtgacatggaagctggaggaggcgggtggacaattattcagcgacgtgaggatggcagcgttgattttcagaggacttggaaagaatataaagtgggatttggtaacccttcaggagaatattggctgggaaatgagtttgtttcgcaactgactaatcagcaacgctatgtgcttaaaatacaccttaaagactgggaagggaatgaggcttactcattgtatgaacatttctatctctcaagtgaagaactcaattataggattcaccttaaaggacttacagggacagccggcaaaataagcagcatcagccaaccaggaaatgattttagcacaaaggatggagacaacgacaaatgtatttgcaaatgttcacaaatgctaacaggaggctggtggtttgatgcatgtggtccttccaacttgaacggaatgtactatccacagaggcagaacacaaataagttcaacggcattaaatggtactactggaaaggctcaggctattcgctcaaggccacaaccatgatgatccgaccagcagatttctaaacatcccagtccacctgaggaactgtctcgaactattttcaaagacttaagcccagtgcactgaaagtcacggctgcgcactgtgtcctcttccaccacagagggcgtgtgctcggtgctgacgggacccacatgctccagattagagcctgtaaactttatcacttaaacttgcatcacttaacggaccaaagcaagaccctaaacatccataattgtgattagacagaacacctatgcaaagatgaacccgaggctgagaatcagactgacagtttacagacgctgctgtcacaaccaagaatgttatgtgcaagtttatcagtaaataactggaaaacagaacacttatgttatacaatacagatcatcttggaactgcattcttctgagcactgtttatacactgtgtaaatacccatatgtcctgaattcaccatcactatcacaattaaaaggaagaaaaaaactctctaagccataaaaagacatattcagggatattctgagaaggggttactagaagtttaatatttggaaaaacagttagtgcatttttactccatctcttaggtgctttaaatttttatttcaaaaacagcgtatttacatttatgttgacagcttagttataagttaatgctcaaatacgtatttcaaatttatatggtagaaacttccagaatctctgaaattatcaacagaaacgtgccattttagtttatatgcagaccgtactatttttttctgcctgattgttaaatatgaaggtatttttagtaattaaatataacttattaggggatatgcctatgtttaacttttatgataatatttacaattttataatttgtttccaaaagacctaattgtgccttgtgataaggaaacttcttacttttaatgatgaggaaaattatacatttcattctatgacaaagaaactttactatcttctcactattctaaaacagaggtctgttttctttcctagtaagatatatttttatagaactagactacaatttaatttctggttgagaaaagccttctatttaagaaatttacaaagctatatgtctcaagattcacccttaaatttacttaaggaaaaaaataattgacactagtaagtttttttatgtcaatcagcaaactgaaaaaaaaaaaagggtttcaaagtgcaaaaacaaaatctgatgttcataatatatttaaatatttaccaaaaatttgagaacacagggctgggcgcagtggctcacacctataatcccagtacattggtaggcaaggtgggcagatcacctgaggtcaggagttcaagaccagcctggacaacatggtgaaaccctgtctctactaaataatacaaaaattagccaggcgtgctggcgggcacctgtaatcccagctactcgggaggctgaggcagggagaattgcttgcaccagggaggtagaggttgcagtgagccaagatcgcaccactgcactccagccggggcaacagagcaagactccatctcaaaaaaaaaaaaaaaaaaagaaagaaaagaaaatttgagaacacagctttatactcgggactacaaaaccataaactcctggagttttaactccttttgaaattttcatagtacaattaatactaatgaacatttgtgtaaagctttataatttaaaggcaatttctcatatattcttttctgaatcatttgcaaggaagttcagagtccagtctgtaactagcatctactatatgtctgtcttcaccttacagtgttctaccattattttttctttattccatttcaaaatctaatttattttaccccaacttctccccaccacttgacgtagttttagaacacacaggtgttgctacatatttggagtcaatgatggactctggcaaagtcaaggctctgttttatttccaccaaggtgcacttttccaacaactatttaactagttaagaacctccctatcttagaactgtatctactttatatttaagaaggttttatgaattcaacaacggtatcatggccttgtatcaagttgaaaaacaactgaaaataagaaaatttcacagcctcgaaagacaacaacaagtttctaggatatctcaatgacaagagtgatggatacttaggtagggaaacgctaatgcaggaaaaactggcaacaacacaatttatatcaattctctttgtaggcaggtgataaaaaattcaaggacaaatctcattatgtcattgtgcatcatatataatctcttatgagcgagaatggggggaatttgtgtttttactttacacttcaattccttacacggtatttcaaacaaacagttttgctgagaggagcttttgtctctccttaagaaaatgtttataaagctgaaaggaaatcaaacagtaatcttaaaaatgaaaacaaaacaacccaacaacctagataactacagtgatcagggagcacagttcaactccttgttatgttttagtcatatggcctactcaaacagctaaataacaacaccagtggcagataaaaatcaccatttatctttcagctattaatcttttgaatgaataaactgtgacaaacaaattaacatttttgaacatgaaaggcaacttctgcacaatcctgtatccaagcaaactttaaattatccacttaattattacttaatcttaaaaaaaattagaacccagaacttttcaatgaagcatttgaaagttgaagtggaatttaggaaagccataaaaatataaatactgttatcacagcaccagcaagccataatctttatacctatcagttctatttctattaacagtaaaaacattaagcaagatataagactacctgcccaagaattcagtcttttttcatttttgtttttctcagttctgaggatgttaatcgtcaaattttctttggactgcattcctcactactttttgcacaatggtctcacgttctcacatttgttctcgcgaataaattgataaaaggtgttaagttctgtgaatgtctttttaattatgggcataattgtgcttgactggataaaaacttaagtccacccttatgtttataataatttcttgagaacagcaaactgcatttaccatcgtaaaacaacatctgacttacgggagctgcagggaagtggtgagacagttcgaacggctcctcagaaatccagtgacccaattctaaagaccatagcacctgcaagtgacacaacaagcagatttattatacatttattagccttagcaggcaataaaccaagaatcactttgaagacacagcaaaaagtgatacactccgcagatctgaaatagatgtgttctcagacaacaaagtcccttcagaatcttcatgttgcataaatgttatgaatattaataaaaagttgattgagaaaaa

SEQ ID NO: 565 - DNA, 3974 bp, Homo sapiens
ggggctagggggtggggctgcagccgggacggggccttcggcagggcctgcgggggcgggacggagcggacccgagtgatacccgggagactagcttggccacaggagacaacgttgaggtacagacaggattattcaagatcaggttgtagccattttcaacaaggatcactgatcaaaattttctttttacaaagagatttacaagttaaacatgaagggaaaatactggaatcatttggattctgacaggataaagaatacaatatttcacatttacttgtaatggaacctttgtaagattcatcacttgtcattcacccagttgggaacatggatgttggtttttctcgtactactgttcagacactgtcaagaagccactgcaaaaacatcaaacaaaaaatttctcaatgggaaggaagggctaatggtatatctaatccagaaaagtggtgtccaaaggactttggagtgagatataactgtcaccaagagatccgtcttaagaaaaatcctatagctgagagaaagagcaaaaacttggatgtaaccagccgtgaaaatgtgggtctagatataaatgaaaataccaaaagccatgatcaaagtgagaatgaaaataagaaacatgaatatgacgatacacacttctttaaaaatgaatcagaatccaactgggtatgttctcgggtcaaagaaattgaaagctgtaaagaagatgtcttagatccagagacttcattacctccaggaaacttctatacctcacaaatactgtggaagaaaatagaagcacttcccccagataaactcttaaatttggctttagaacattgtgactcttcagaaaaagaactgaacttcagagttctggatagttcatacggaataaccaagagcttagaaaatatttactctgaacctgaggggcaagaatgtggaccttccataaatcctttgccaaaacctcgtaggacattcagatatttatccgaatctggtgttacgccgtataaagaaagaaactgtgacaaaaaatactgtgaaaataactcttgtgcacaatcttctttggcctcttctcaggaacctgaaccaaagaaatatggtggaaaaatcagaggaagatctaaaaggaaatcctttgaatttgaggatattcagcactttcgaaatcggaactcacagacgattcgtgaagaacttggaagaaattctgggtcagcactttattacacacagtctgaggacaatatctatgaagatatcatatatcccaccaaagaaaatccatatgaagatattccagtgcagcctttacctatgtggagatccccttcagcatggaagctaccacccgctaaaagtgcttttaaagcacccaagcttgtattgaaaatagatgacatatttgaatctaaaagagggaagaagaaggtaaagttacattcttacactggaaaggaattacctccgacaaaaggtgaaaccagtgggaacgaaagtgatgccgagtatctgccaaagaatcgccataaacgcttagcacaactgcaaccgtcttccaagaggaatcctcactaccagaccttggagcgggatcttattgaattacaggagcagcagctgtttgaactttttgtggtggtgtctctacagaagaaaccatcaggaataagctatattccccaggtcatacaacaattccctggcaaggatgatcatggctataagcagtccaaagacatggaagagagacttaaagttattccaaaattttgttttcctgattcaaaggactggatgccaacctcagaactcaagagtgaaacattctcctttgtcttgactggtgaagatggaagccggtggtttggttactgtaagaagctcttgccagtaggcaaaggaaagcgactccctgaggtatactgcatggttagtcgcctaggctgcttcaatcttttttcaaagattctggatgaagtagagaagagaagagaaatgtctccagcccttgtttacccattcatgcgaagtgtcatggaagctcctttcccagctcctggacgcaccatcacagttaagagttacctccctggggctggagatgagtccattgaactctgccgaccactagattcccgattggaacatgttgattttaaatgtctctttaagtgcctgagtgtgtgtcatctcatccgggtctgtgcctctctccttttggagcgtagggtaatctttgttgccaacagcctaagcaccctgtcaaaatgtggccatgctgtggtagctacactgtatccgttcacctggcagcatacctatatcccagtcctgccagcatctatgattgacatcgtgtgctcacctacaccattccttattggaatcctgtcttgctccttaccacagctccaggacctacccattgaagaggtgctgatagttgatctctgtgcagacaagttcttacaggaggtatctgatgaggatgaaattctaccaccaaaacttcaagctgccctgatgcagattttggaagaacgaaatgaaatcttgactcaggagcagaatttttcacaagatgtgacactcaactctctggtgtccgaagcatttgtcaggttttttgtggagttggtaggacattattctttgaacatgactgtcactgagcgtggggagcgtgttttccaaagggaaccattccgtaagtcccacacctcccgaagtgtacgccacttcctggatctcttcatggaaactcagatgtttgcaggattcatccaggaccgagagcttcggaaaagtggagttaaaggtttgtttgagatccgggccatccagtatttggaaacaattcctgagtcggagcccagtgggatgaatagaattttgcggagtcttggaagcaaaatgaaatttctgcaaaagaaatgaaatctctgattgtctccatcctgaatatacaacagaaagtgccaaagaaaatatttttctaagggtcaggatcccatgaagtattctacaaaattcttgaaattttaaaaggttaaagagcgagtcaggctgttagaggaggattctcctgttgctgctgtagtaatcactggagaattgttgggaatggtctggcaccatgccatctttactctgtctccattttttttttatagcagccttttctatgtgattcttgggctcattctctgttttgtgctttgtctgtgaaagtagttgtgtttcacaaggaaaagccttgttgttgttacatttaaaaaatagctcaaagatgagaataatgagagaaatgctgagtttaaggtagtagagagacatgatggaaatggagaacactagccttatacacataattctcatcactgaactatcatggcccctttaaacccatgggctgtttgacctgggctaaggaatagactcatcacatatctccattgttttgccttatattatatctaggggaatctcacttaggaggaagccctacttgtaatattataaggtactgttattaagtaccttataaaattagacatcttgcaactcctcctccaaattatgtggcatttgagtagtttgcttgtgcctcacatgtcaacattaaactttgtggaggctggatgcagtggctcacacctgtaatctccaccactttgggaggctaaggcaggagtttgagggtgggagtttgagactagcctgggcaacatagcaagatcccatctctacaaaaacattttaaaaataagtaaataaatttaaactttgtgaaattatagctaatatgaaaatgtcctttcaagggcatgggagccacctttattttttagtgtccaccatgtgccatgcactgtggtatatgtatgcatatcatctcaaccaatccttaaatcaaccttatgagatagatatttgcatctccattttactaataaactgag

SEQ ID NO: 566 - DNA, 2207 bp, Homo sapiens
ctcttgaagagggctggtatatttgtgcctgctggaggtggaattaacagtaagaaggagaaagggattgaatggacttacaggaaggatttcaagtaaattcagggaaacacatttacttgaatagtacaacctagagtattattttacactaagacgacacaaaagatgttaaagttatcaccaagctgccggacagatatatattccaacaccaaggtgcagatcagcatagatctgtgattcagaaatcaggatttgttttggaaagagctcaagggttgagaagaactcaaaagcaagtgaagattactttgggaactacagtttatcagaagatcaacttttgctaattcaaataccaaaggcctgattatcataaattcatataggaatgcataggtcatctgatcaaataatattagccgtcttctgctacatcaatgcagcaaaaactcttaacaactgtggataattggaaatctgagtttcagctttcttagaaataactactcttgacatattccaaaatatttaaaataggacaggaaaatcggtgaggatgttgtgctcagaaatgtcactgtcatgaaaaataggtaaatttgttttttcagctactgggaaactgtacctcctagaaccttaggttttttttttttttaagaggacaagaaggactaaaaatatcaacttttgcttttggacaaaaatgcatctgactgtatttttacttaagggtattgtgggtttcctctggagctgctgggttctagtgggttatgcaaaaggaggtttgggagacaatcatgttcactccagttttatttatagaagactacggaaccacgaaagacgggaaatacaaagggaaattctctctatcttgggtttgcctcacagacccagaccattttcacctggaaaacaagcgtcctctgcacctctctttatgctggatctctacaatgccatgaccaatgaagaaaatcctgaagagtcggagtactcagtaagggcatccttggcagaagagaccagaggggcaagaaagggatacccagcctctcccaatgggtatcctcgtcgcatacagttatctcggacgactcctctgaccacccagagtcctcctctagccagcctccatgataccaactttctgaatgatgctgacatggtcatgagctttgtcaacttagttgaaagagacaaggatttttctcaccagcgaaggcattacaaagaatttcgatttgatcttacccaaattcctcatggagaggcagtgacagcagctgaattccggatatacaaggaccggagcaacaaccgatttgaaaatgaaacaattaagattagcatatatcaaatcatcaaggaatacacaaatagggatgcagatctgttcttgttagacacaagaaaggcccaagctttagatgtgggttggcttgtctttgatatcactgtgaccagcaatcattgggtgattaatccccagaataatttgggcttacagctctgtgcagaaacaggggatggacgcagtatcaacgtaaaatctgctggtcttgtgggaagacagggacctcagtcaaaacaaccattcatggtggccttcttcaaggcgagtgaggtacttcttcgatccgtgagagcagccaacaaacgaaaaaatcaaaaccgcaataaatccagctctcatcaggactcctccagaatgtccagtgttggagattataacacaagtgagcaaaaacaagcctgtaagaagcacgaactctatgtgagcttccgggatctgggatggcaggactggattatagcaccagaaggatacgctgcattttattgtgatggagaatgttcttttccacttaacgcccatatgaatgccaccaaccacgctatagttcagactctggttcatctgatgtttcctgaccacgtaccaaagccttgttgtgctccaaccaaattaaatgccatctctgttctgtactttgatgacagctccaatgtcattttgaaaaaatatagaaatatggtagtacgctcatgtggctgccactaatattaaataatattgataataacaaaaagatctgtattaaggtttatggctgcaataaaaagcatactttcagacaaacggggaatttcctaaaaaaaaaaaaaaaaaaaaaaaaaaaaaaaaaaaaaaa

SEQ ID NO: 567 - DNA, 2428 bp, Homo sapiens
cccgcccacttccaactaccgcctccggcctgcccagggagagagagggagtggagcccagggagagggagcgcgagagagggagggaggaggggacggtgctttggctgacttttttttaaaagagggtgggggtggggggtgattgctggtcgtttgttgtggctgttaaattttaaactgccatgcactcggcttccagtatgctgggagcggtgaagatggaagggcacgagccgtccgactggagcagctactatgcagagcccgagggctactcctccgtgagcaacatgaacgccggcctggggatgaacggcatgaacacgtacatgagcatgtcggcggccgccatgggcagcggctcgggcaacatgagcgcgggctccatgaacatgtcgtcgtacgtgggcgctggcatgagcccgtccctggcggggatgtcccccggcgcgggcgccatggcgggcatgggcggctcggccggggcggccggcgtggcgggcatggggccgcacttgagtcccagcctgagcccgctcggggggcaggcggccggggccatgggcggcctggccccctacgccaacatgaactccatgagccccatgtacgggcaggcgggcctgagccgcgcccgcgaccccaagacctacaggcgcagctacacgcacgcaaagccgccctactcgtacatctcgctcatcaccatggccatccagcagagccccaacaagatgctgacgctgagcgagatctaccagtggatcatggacctcttccccttctaccggcagaaccagcagcgctggcagaactccatccgccactcgctctccttcaacgactgtttcctgaaggtgccccgctcgcccgacaagcccggcaagggctccttctggaccctgcaccctgactcgggcaacatgttcgagaacggctgctacctgcgccgccagaagcgcttcaagtgcgagaagcagctggcgctgaaggaggccgcaggcgccgccggcagcggcaagaaggcggccgccggagcccaggcctcacaggctcaactcggggaggccgccgggccggcctccgagactccggcgggcaccgagtcgcctcactcgagcgcctccccgtgccaggagcacaagcgagggggcctgggagagctgaaggggacgccggctgcggcgctgagccccccagagccggcgccctctcccgggcagcagcagcaggccgcggcccacctgctgggcccgccccaccacccgggcctgccgcctgaggcccacctgaagccggaacaccactacgccttcaaccacccgttctccatcaacaacctcatgtcctcggagcagcagcaccaccacagccaccaccaccaccaaccccacaaaatggacctcaaggcctacgaacaggtgatgcactaccccggctacggttcccccatgcctggcagcttggccatgggcccggtcacgaacaaaacgggcctggacgcctcgcccctggccgcagatacctcctactaccagggggtgtactcccggcccattatgaactcctcttaagaagacgacggcttcaggcccggctaactctggcaccccggatcgaggacaagtgagagagcaagtgggggtcgagactttggggagacggtgttgcagagacgcaagggagaagaaatccataacacccccaccccaacacccccaagacagcagtcttcttcacccgctgcagccgttccgtcccaaacagagggccacacagataccccacgttctatataaggaggaaaacgggaaagaatataaagttaaaaaaaagcctccggtttccactactgtgtagactcctgcttcttcaagcacctgcagattctgatttttttgttgttgttgttctcctccattgctgttgttgcagggaagtcttacttaaaaaaaaaaaaaaattttgtgagtgactcggtgtaaaaccatgtagttttaacagaaccagagggttgtactattgtttaaaaacaggaaaaaaaataatgtaagggtctgttgtaaatgaccaagaaaaagaaaaaaaaagcattcccaatcttgacacggtgaaatccaggtctcgggtccgattaatttatggtttctgcgtgctttatttatggcttataaatgtgtattctggctgcaagggccagagttccacaaatctatattaaagtgttatacccggttttatcccttgaatcttttcttccagatttttcttttctttacttggcttacaaaatatacaggcttggaaattatttcaagaaggagggagggataccctgtctggttgcaggttgtattttattttggcccagggagtgttgctgttttcccaacattttattaataaaattttcagacataaaaaa

SEQ ID NO: 568 - DNA, 3275 bp, Homo sapiens
gaagtcaagacgtctggaaagaattacccagtcctggcttcgagcagcccattgaaccagagacttgaaacagccccagccaaagacttttctcccaattctgcgcttcctgggttctgctgagtcttccacaggctttttttttttttttttttttttttaagacgaaaaagagattttctgttatcgggggcagaaagactgaagcccaaaaaaaaaaaaaaaaaaaaaagaaaagaaaagaaaaaagaaaagttaatttatttttaaagcataatttttttaagaattagactgaagtgcaacggaaacataaagagaatattagtgaaattattttttaaagtggggaagaatcaaacatttaagactcccctatcctttttaaatgttgtttttaaatttcttattttttttggccggtcgtctcaaattcatctgatctcttattacctcaattttggaaactgcccgccaccgaccctccgggaccacacagacaggctgaggacgactttatgaccaagagctgaacaagatgcattgtgagaggtttctatgtatcctgagaataattggaaccacactctttggagtctctctcctccttggaatcacagctgcttatattgttggctaccagtttatccaaacggataattactatttctcttttggactgtatggtgcctttttggcatcacacctcatcatccaaagcctgtttgcctttttggagcaccgaaaaatgaaaaaatccctagaaacccccataaagttgaacaaaacagttgccctttgcatcgctgcctatcaagaagatccagactacttaaggaaatgtttgcaatctgtgaaaaggctaacctaccctgggattaaagttgtcatggtcatagatgggaactcagaagatgacctttacatgatggacatcttcagtgaagtcatgggcagagacaaatcagccacttatatctggaagaacaacttccacgaaaagggtcccggtgagacagatgagtcacataaagaaagctcgcaacacgtaacgcaattggtcttgtccaacaaaagtatctgcatcatgcaaaaatggggtggaaaaagagaagtcatgtacacagccttcagagcactgggacgaagtgtggattatgtacaggtttgtgattcagacactatgcttgacccagcctcatctgtggagatggtaaaagttttagaagaagatcccatggttggaggtgttgggggagatgtccagattttaaacaagtacgattcctggatctcattcctcagcagtgtaagatattggatggcttttaatatagaaagggcctgtcagtcttattttgggtgtgttcagtgcattagtggacctctgggaatgtacagaaactccttgttgcatgagtttgtggaagattggtacaatcaagaatttatgggcaaccaatgtagctttggtgatgacaggcatctcacgaaccgggtgctgagcctgggctatgcaacaaaatacacagctcgatctaagtgccttactgaaacacctatagaatatctcagatggctaaaccagcagacccgttggagcaagtcctacttccgagaatggctgtacaatgcaatgtggtttcacaaacatcacttgtggatgacctacgaagcgattatcactggattctttcctttctttctcattgccacagtaatccagctcttctaccggggtaaaatttggaacattctcctcttcttgttaactgtccagctagtaggtctcataaaatcatcttttgccagctgccttagaggaaatatcgtcatggtcttcatgtctctctactcagtgttatacatgtcgagtttacttcccgccaagatgtttgcaattgcaacaataaacaaagctgggtggggcacatcaggaaggaaaaccattgttgttaatttcataggactcattccagtatcagtttggtttacaatcctcctgggtggtgtgattttcaccatttataaggagtctaaaaggccattttcagaatccaaacagacagttctaattgttggaacgttgctctatgcatgctattgggtcatgcttttgacgctgtatgtagttctcatcaataagtgtggcaggcggaagaagggacaacaatatgacatggtgcttgatgtatgatcttccatgttttgacgtttgcagtcacacacaacaccttagttcctctaggggctgtacagtattgtggcatcagataatgccaccaaaggagacatatcactgctgctgggacttgaacaaagacatttatatgggtttattttcattctgccaaagtaaaacaatacatcaacaagaagaaactcagatttaacctgttatttctatgaaaatgggatgaattctttgtttatgcactttttccttactgtgcatccgcctgaaagtgttttgccctatatacctcactagccatgctttatgtgggttatcatggaagaaaaggattttggaaactcaaggaaaagttctttcaacctatacaacctaacttatggactgttttgatagatgataattttttttttttaggaaggattttctttttaactttaccaaatgaaatgccaaaggaagttttaaaggccgttggctgtgctgtattttgatataattgtactgtgtttttaaattttgtatgccaatcttaaagacaaattttgcatattctctattttacttttctgccaaaataaacctgttcttccttttttaaaataaaataagttcttaaaaaatttatacttaaaaaatcctgcccaaaatgtgaagcttggttgactgatgttcatgatagaaagaataaaatgtttctctctctctaccttttaaaattgaatagtttatttctgtgaaagaagtatttaaactttcaatattttaactttttgtttttatttcttttagaaaaggccaatatacctatcacactttggaagtaaaaatacacactttcgtgtgtacctaaaaaaaaaatcgttgaaaatcaaggccaaaggtagtgcaattttttcattaagatttaaaaaaaagggaatgatagtctttgaaagaaaacagtaggcatccagcactggacaaaacatgggtatcaaagatgaataatctttggagattctggcagtgttttcccagaacaagtcaagtggaaagtggagaaattatctgtataattttggacacatacaatgcagtt

SEQ ID NO: 569 - DNA, 3150 bp, Homo sapiens
ccacaaagggcacttggccccagggctaggagagcgaggggagagcacagccacccgcctcggcggcccgggactcggctcgactcgccggagaatgcgcccgaggacgacggggcgccagagccgcggtgctttcaactggcgagcgcgaatgggggtgcactggagtaaggcagagtgatgcgggggggcaactcgcctggcaccgagatcgccgccgtgcccttccctggacccggcgtcgcccaggatggctgccccgagccatgggccgcggcggagctagcgcggagcgcccgaccctcgacccccgagtcccggagccggccccgcgcggggccacgcgtccctcgggcgctggttcctaaggaggacgacagcaccagcttctcctttctcccttcccttccctgccccgcactcctccccctgctcgctgttgttgtgtgtcagcacttggctggggacttcttgaacttgcagggagaataacttgcgcaccccactttgcgccggtgcctttgccccagcggagcctgcttcgccatctccgagccccaccgcccctccactcctcggccttgcccgacactgagacgctgttcccagcgtgaaaagagagactgcgcggccggcacccgggagaaggaggaggcaaagaaaaggaacggacattcggtccttgcgccaggtcctttgaccagagtttttccatgtggacgctctttcaatggacgtgtccccgcgtgcttcttagacggactgcggtctcctaaaggtcgaccatggtggccgggacccgctgtcttctagcgttgctgcttccccaggtcctcctgggcggcgcggctggcctcgttccggagctgggccgcaggaagttcgcggcggcgtcgtcgggccgcccctcatcccagccctctgacgaggtcctgagcgagttcgagttgcggctgctcagcatgttcggcctgaaacagagacccacccccagcagggacgccgtggtgcccccctacatgctagacctgtatcgcaggcactcaggtcagccgggctcacccgccccagaccaccggttggagagggcagccagccgagccaacactgtgcgcagcttccaccatgaagaatctttggaagaactaccagaaacgagtgggaaaacaacccggagattcttctttaatttaagttctatccccacggaggagtttatcacctcagcagagcttcaggttttccgagaacagatgcaagatgctttaggaaacaatagcagtttccatcaccgaattaatatttatgaaatcataaaacctgcaacagccaactcgaaattccccgtgaccagacttttggacaccaggttggtgaatcagaatgcaagcaggtgggaaagttttgatgtcacccccgctgtgatgcggtggactgcacagggacacgccaaccatggattcgtggtggaagtggcccacttggaggagaaacaaggtgtctccaagagacatgttaggataagcaggtctttgcaccaagatgaacacagctggtcacagataaggccattgctagtaacttttggccatgatggaaaagggcatcctctccacaaaagagaaaaacgtcaagccaaacacaaacagcggaaacgccttaagtccagctgtaagagacaccctttgtacgtggacttcagtgacgtggggtggaatgactggattgtggctcccccggggtatcacgccttttactgccacggagaatgcccttttcctctggctgatcatctgaactccactaatcatgccattgttcagacgttggtcaactctgttaactctaagattcctaaggcatgctgtgtcccgacagaactcagtgctatctcgatgctgtaccttgacgagaatgaaaaggttgtattaaagaactatcaggacatggttgtggagggttgtgggtgtcgctagtacagcaaaattaaatacataaatatatatatatatatatattttagaaaaaagaaaaaaacaaacaaacaaaaaaaccccaccccagttgacactttaatatttcccaatgaagactttatttatggaatggaatggaaaaaaaaacagctattttgaaaatatatttatatctacgaaaagaagttgggaaaacaaatattttaatcagagaattattccttaaagatttaaaatgtatttagttgtacattttatatgggttcaaccccagcacatgaagtataatggtcagatttattttgtatttatttactattataaccactttttaggaaaaaaatagctaatttgtatttatatgtaatcaaaagaagtatcgggtttgtacataattttccaaaaattgtagttgttttcagttgtgtgtatttaagatgaaaagtctacatggaaggttactctggcaaagtgcttagcacgtttgcttttttgcagtgctactgttgagttcacaagttcaagtccagaaaaaaaaagtggataatccactctgctgactttcaagattattatattattcaattctcaggaatgttgcagagtgattgtccaatccatgagaatttacatccttattaggtggaatatttggataagaaccagacattgctgatctattatagaaactctcctcctgccccttaatttacagaaagaataaagcaggatccatagaaataattaggaaaacgatgaacctgcaggaaagtgaatgatggtttgttgttcttctttcctaaattagtgatcccttcaaaggggctgatctggccaaagtattcaataaaacgtaagatttcttcattattgatattgtggtcatatatatttaaaattgatatctcgtggccctcatcaagggttggaaatttatttgtgttttacctttacctcatctgagagctctttattctccaaagaacccagttttctaactttttgcccaacacgcagcaaaattatgcacatcgtgttttctgcccaccctctgttctctgacctatcagcttgcttttctttccaaggttgtgtgtttgaacacatttctccaaatgttaaacctatttcagataataaatatcaaatctctggcatttcattctataaagtc

SEQ ID NO: 570 - DNA, 1085 bp, Homo sapiens
ggctgggctgagcgcagggagctgcttggcagtgccagagcccaggccccagagccctgctggagaggaggcagactgaggcagcaggccccgccagcaggcgaagcagggagatgtcagactgctacacggagctggagaaggcagtcattgtcctggtggaaaacttctacaaatatgtgtctaagtacagcctggtcaagaacaagatcagcaagagcagcttccgcgagatgctccagaaagagctgaaccacatgctgtcggacacagggaaccggaaggctgcggataagctcatccagaacctggatgccaatcatgatgggcgcatcagcttcgatgagtactggaccttgataggcggcatcaccggccccatcgccaaactcatccatgagcaggagcagcagagcagcagctagagacccctttggccacaccttccaggcactggcctgatgccccgccctggtgctctccccaggctccctcctcagcctcctgcccacccagggccctttactctcttctccctccagaccttcctctgacccttgctgaactggggtccctttgtgagtgtctcagtctagaggtacctccctccctggggggtctcagctcctggagtcgcaggcccttggggcccctctgtgagatctcaatgctgtctggggaccctaagagttttctcacctgttcagtctcatctaaccttccaatgtctgatgttcctgccaaattcctgcctgattctgggtccgtcctgacctccaaaggtcagcttggtgcttgaggtctccctgctcttggtggcagtggtagcagcaacagcagcagcagcagcagcagcagcagcagagacctctccactttcccttagcccctctgctgggtagagaggcactttcagggacttccctccagctgcctcttcatctgggaatgagctaagcaaggctgagcctcctcctgttgcttgaaataatgatgatataaaggctggatttggagtttgtatcccctggtccctctgggatgctcattaaaaccttcccactccttaaaaaaaaaaaaaaaaa

SEQ ID NO: 571 - DNA, 1992 bp, Homo sapiens; identical to SEQ ID NO: 124

SEQ ID NO: 572 - DNA, 1379 bp, Homo sapiens
ggcgggacccaactgattgtcaaaggcggcagattgtagtttttgttttggccggaaaggcttaccatgagttgccagggctgagagagatggagaaggattcgcggcggtgacagattaaattccccagttacattatagacttggaggtgggggatcttctcatcgttagaggccccgatcatgggagataggcggttcggagccagttctgcctaactttgtgttcactgatgttagggctgctagggctgcaaaggtgggcacccctactcgcctaagagctttctcctctcttctctttttcccctttgcctctctccttacatcacctgcccactaagtagacttgtccttgtgtggacgggagccggaaagccttgagaacttattcctcgacccggacatggcacaggagaaaatgaaactaggtttcaagtcgctgccgagttccactaccgcagacggcaacattctgagaagagtcaacagtgcccctttgatcaatggacttggttttaattcacaggtgttgcaagctgacatgttaagaattaggacaaacagaacaacatttaggaatcgacgctctctgttgttgccacctcctccctttcatggttccatcagccgccttcatcaaatcaaacaggaagaagccatggatttaataaatagagaaacaatgtctgaatggaagctacaaagtgagatacagataagtcactcttgggaagaaggcttgaaactggtgaaatggcatttcaatatcaaccaaaaaagattttccaaggcacaaccaacatgctttcttctgatacttcccaactgtcagaaaataatgtgtatctacttccagctacttttgatggaaacgacagcaatgctggatcttctggtaattcgtcagctgaaatcggcactgtcacaaactctcctgtgtcaccttctgatactggttctcatttgttctagtagacaaactttcaactaaatgattcacccatcccaagactttctcaccagtggagaaacacacacatcaagcaaaccaagtcagagcaatgagaattgtactgtataatttaaactatctcctatttatcttttttcctcaatttcctaaaattctatttatctacagaacttgcgtgtataattcttgtgtacatccttaaatttaatgtaataacatgttaaagatgttttccaaatcagaaccatgttgaagatacaagcgtaaattgttaggctgctattttctagaaaatgctgtaccttgactttttaaaataatcttatgaaacataattctgataaaatataattgttcaattaacaaagtaaaatgatgtttgacaattatgtaaaaaaaaaaa

SEQ ID NO: 573 - DNA, 7394 bp, Homo sapiens
ggtgagagctgcgcagcgctggctgctggctggcctcgcggagacgccgaacggacgcggccggcgccggcttgtgggctcgccgcctgcagccatgaccctcgcagcctgtccctcggcctcggcccgggacgtctaaaatcccacacagtcgcgcgcagctgctggagagccggccgctgccccctcgtcgccgcatcacactcccgtcccgggagctgggagcagcgcgggcagccggcgcccccgtgcaaactgggggtgtctgccagagcagccccagccgctgccgctgctacccccgatgctggccatggcctggcggggcgcagggccgagcgtcccgggggcgcccgggggcgtcggtctcagtctggggttgctcctgcagttgctgctgctcctggggccggcgcggggcttcggggacgaggaagagcggcgctgcgaccccatccgcatctccatgtgccagaacctcggctacaacgtgaccaagatgcccaacctggttgggcacgagctgcagacggacgccgagctgcagctgacaactttcacaccgctcatccagtacggctgctccagccagctgcagttcttcctttgttctgtttatgtgccaatgtgcacagagaagatcaacatccccattggcccatgcggcggcatgtgtctttcagtcaagagacgctgtgaacccgtcctgaaggaatttggatttgcctggccagagagtctgaactgcagcaaattcccaccacagaacgaccacaaccacatgtgcatggaagggccaggtgatgaagaggtgcccttacctcacaaaacccccatccagcctggggaagagtgtcactctgtgggaaccaattctgatcagtacatctgggtgaaaaggagcctgaactgtgtgctcaagtgtggctatgatgctggcttatacagccgctcagccaaggagttcactgatatctggatggctgtgtgggccagcctgtgtttcatctccactgccttcacagtactgaccttcctgatcgattcttctaggttttcctaccctgagcgccccatcatatttctcagtatgtgctataatatttatagcattgcttatattgtcaggctgactgtaggccgggaaaggatatcctgtgattttgaagaggcagcagaacctgttctcatccaagaaggacttaagaacacaggatgtgcaataattttcttgctgatgtacttttttggaatggccagctccatttggtgggttattctgacactcacttggtttttggcagcaggactcaaatggggtcatgaagccattgaaatgcacagctcttatttccacattgcagcctgggccatccccgcagtgaaaaccattgtcatcttgattatgagactggtggatgcagatgaactgactggcttgtgctatgttggaaaccaaaatctcgatgccctcaccgggttcgtggtggctcccctctttacttatttggtcattggaactttgttcattgctgcaggtttggtggccttgttcaaaattcggtcaaatcttcaaaaggatgggacaaagacagacaagttagaaagactgatggtcaagattggggtgttctcagtactgtacacagttcctgcaacgtgtgtgattgcctgttatttttatgaaatctccaactgggcactttttcggtattctgcagatgattccaacatggctgttgaaatgttgaaaatttttatgtctttgttggtgggcatcacttcaggcatgtggatttggtctgccaaaactcttcacacgtggcagaagtgttccaacagattggtgaattctggaaaggtaaagagagagaagagaggaaatggttgggtgaagcctggaaaaggcagtgagactgtggtataaggctagtcagcctccatgctttcttcattttgaaggggggaatgccagcattttggaggaaattctactaaaagttttatgcagtgaatctcagtttgaacaaactagcaacaattaagtgacccccgtcaacccactgcctcccaccccgaccccagcatcaaaaaaccaatgattttgctgcagactttggaatgatccaaaatggaaaagccagttagaggctttcaaagctgtgaaaaatcaaaacgttgatcactttagcaggttgcagcttggagcgtggaggtcctgcctagattccaggaagtccagggcgatactgttttcccctgcagggtgggatttgagctgtgagttggtaactagcagggagaaatattaacttttttaaccctttaccattttaaatactaactgggtctttcagatagcaaagcaatctataaacactggaaacgctgggttcagaaaagtgttacaagagttttatagtttggctgatgtaacataaacatcttctgtggtgcgctgtctgctgtttagaactttgtggactgcactcccaagaagtggtgttagaatctttcagtgcctttgtcataaaacagttatttgaacaaacaaaagtactgtactcacacacataaggtatccagtggatttttcttctctgtcttcctctcttaaatttcaacatctctcttcttggctgctgctgttttcttcattttatgttaatgactcaaaaaaggtatttttatagaatttttgtactgcagcatgcttaaagaggggaaaaggaagggtgattcactttctgacaatcacttaattcagaggaaaatgagatttactaagttgacttacctgacggaccccagagacctattgcattgagcagtggggacttaatatattttacttgtgtgattgcatctatgcagacgccagtctggaagagctgaaatgttaagtttcttggcaactttgcattcacacagattagctgtgtaatttttgtgtgtcaattacaattaaaagcacattgttggaccatgacatagtatactcaactgactttaaaactatggtcaacttcaacttgcattctcagaatgatagtgcctttaaaaatttttttattttttaaagcataagaatgttatcagaatctggtctacttaggacaatggagactttttcagttttataaagggaactgaggacagctaatccaactacttggtgcgtaattgtttcctagtaattggcaaaggctccttgtaagatttcactggaggcagtgtggcctggagtatttatatggtgcttaatgaatctccagaatgccagccagaagcctgattggttagtagggaataaagtgtagaccatatgaaatgaactgcaaactctaatagcccaggtcttaattgcctttagcagaggtatccaaagcttttaaaatttatgcatacgttcttcacaagggggtacccccagcagcctctcgaaaattgcacttctcttaaaactgtaactggcctttctcttaccttgccttaggccttctaatcatgagatcttggggacaaattgactatgtcacaggttgctctccttgtaactcatacctgtctgcttcagcaactgctttgcaatgacatttatttattaattcatgccttaaaaaaataggaagggaagcttttttttttctttttttttttttcaatcacactttgtggaaaaacatttccagggactcaaaattccaaaaaggtggtcaaattctggaagtaagcatttcctcttttttaaaaatttggtttgagccttatgcccatagtttgacatttccctttcttctttcctttttgtttttgtgtggttcttgagctctctgacatcaagatgcatgtaaagtcgattgtatgttttggaaggcaaagtcttggcttttgagactgaagttaagtgggcacaggtggcccctgctgctgtgcccagtctgagtaccttggctagactctaggtcaggctccaggagcatgagaattgatccccagaagaaccattttaactccatctgatactccattgcctatgaaatgtaaaatgtgaactccctgtgctgcttgtagacagttcccataactgtccacggccctggagcacgcacccaggggcagagcctgcccttactcacgctctgctctggtgtcttgggagttgtgcagggactctggcccaggcaggggaaggaagaccaggcggtaggggactggtcttgctgttagagtatagaggtttgtaatgcagttttcttcataatgtgtcagtgattgtgtgaccaaggcagcatctagcagaaagccaggcatggagtaggtgatcgatacttgtcaatgactaaataataacaataaaagagcacttgggtgaatctgggcacctgatttctgagttttgagttctggagctagtgttttgacaatgctttgggttttgacatgccttttccacaaatctcttgccttttcagggcaaagtgtatttgatcagaagtggccatttggattagtagccttagcaatgctacagggttataggcctctcctttcacattccagacaatggagagtgtttatggtttcaggaaaagaactttgtggctgaggggtcagttaccagtgaccttcaatcaactccatcacttcttaaatcggtatttgttaaaaaaatcagttattttatttattgagtgccgactgtagtaaagccctgaaatagataatctctgttcttctaactgatctaggatggggacgcacccaggtctgctgaactttactgttcctctgggaaaggagcagggacctctggaattcccatctgtttcactgtctccattccataaatctcttcctgtgtgagccaccacacccagcctgggtctctctacttttaacacatctctcatccctttcccaggattccttccaagtcagttacaggtggttttaacagaaagcatcagctctgcttcgtgacagtctctggagaaatcccttaggaagactatgagagtaggccacaaggacatgggcccacacatctgctttggctttgccggcaattcagggcttggggtattccatgtgacttgtataggtatatttgaggacagcatcttgctagagaaaaggtgagggttgtttttctttctctgaaacctacagtaaatgggtatgattgtagcttcctcagaaatcccttggcctccagagattaaacatggtgcaatggcacctctgtccaacctcctttctggtagattcctttctcctgcttcatataggccaaacctcagggcaagggaacatgggggtagagtggtgctggccagaaccatctgcttgagctacttggttgattcatatcctctttcctttatggagacccatttcctgatctctgagactgttgctgaactggcaacttacttgggcctgaaactggagaaggggtgacatttttttaatttcagagatgctttctgattttcctctcccaggtcactgtctcacctgcactctccaaactcaggttccgggaagcttgtgtgtctagatactgaattgagattctgttcagcaccttttagctctatactctctggctcccctcatcctcatggtcactgaattaaatgcttattgtattgagaaccaagatgggacctgaggacacaaagatgagctcaacagtctcagccctagaggaatagactcagggatttcaccaggtcggtgcagtatttgatttctggtgaggtgaccacagctgcagttagggaagggagccattgagcacagactttggaaggaaccttttttttgttgtttgtttgtttgtttgtttgtttgtttgtttgagacagggtcttgctctgtcacccaggctggggcgcaatggcacgatcttggctcactgcaacctctgcctcctgggttcaagtgattctcctgccacagcctcctgaggagctgggactacaggtgcgtgctaccacgcccagctacttctgtatttttagtagagacggggtttcactgtgttggccaggctggtctcgaactcctgacctcatgatctgcccgcctcagcctcccaaagtgctgggattacaagtgtgagccaccacacctggcctggaaggaacctcttaaaatcagtttacgtcttgtattttgttctgtgatggaggacactggagagagttgctattccagtcaatcatgtcgagtcactggactctgaaaatcctattggttcctttattttatttgagtttagagttcccttctgggtttgtattatgtctggcaaatgacctgggttatcacttttcctccagggttagatcatagatcttggaaactccttagagagcattttgctcctaccaaggatcagatactggagccccacataatagatttcatttcactctagcctacatagagctttctgttgctgtctcttgccatgcacttgtgcggtgattacacacttgacagtaccaggagacaaatgacttacagatcccccgacatgcctcttccccttggcaagctcagttgccctgatagtagcatgtttctgtttctgatgtaccttttttctcttcttctttgcatcagccaattcccagaatttccccaggcaatttgtagaggacctttttggggtcctatatgagccatgtcctcaaagcttttaaacctccttgctctcctacaatattcagtacatgaccactgtcatcctagaaggcttctgaaaagaggggcaagagccactctgcgccacaaaggttgggtccatcttctctccgaggttgtgaaagttttcaaattgtactaataggctggggccctgacttggctgtgggctttgggaggggtaagctgctttctagatctctcccagtgaggcatggaggtgtttctgaattttgtctacctcacagggatgttgtgaggcttgaaaaggtcaaaaaatgatggccccttgagctctttgtaagaaaggtagatgaaatatcggatgtaatctgaaaaaaagataaaatgtgacttcccctgctctgtgcagcagtcgggctggatgctctgtggcctttcttgggtcctcatgccaccccacagctccaggaaccttgaagccaatctgggggactttcagatgtttgacaaagaggtaccaggcaaacttcctgctacacatgccctgaatgaattgctaaatttcaaaggaaatggaccctgcttttaaggatgtacaaaagtatgtctgcatcgatgtctgtactgtaaatttctaatttatcactgtacaaagaaaaccccttgctatttaattttgtattaaaggaaaataaagttttgtttgttaggtt

SEQ ID NO: 574 - DNA, 5480 bp, Homo sapiens
tatatccgtggtttcctgctacctccaaccatgggccttttgggaatactttgttttttaatcttcctggggaaaacctggggacaggagcaaacatatgtcatttcagcaccaaaaatattccgtgttggagcatctgaaaatattgtgattcaagtttatggatacactgaagcatttgatgcaacaatctctattaaaagttatcctgataaaaaatttagttactcctcaggccatgttcatttatcctcagagaataaattccaaaactctgcaatcttaacaatacaaccaaaacaattgcctggaggacaaaacccagtttcttatgtgtatttggaagttgtatcaaagcatttttcaaaatcaaaaagaatgccaataacctatgacaatggatttctcttcattcatacagacaaacctgtttatactccagaccagtcagtaaaagttagagtttattcgttgaatgacgacttgaagccagccaaaagagaaactgtcttaactttcatagatcctgaaggatcagaagttgacatggtagaagaaattgatcatattggaattatctcttttcctgacttcaagattccgtctaatcctagatatggtatgtggacgatcaaggctaaatataaagaggacttttcaacaactggaaccgcatattttgaagttaaagaatatgtcttgccacatttttctgtctcaatcgagccagaatataatttcattggttacaagaactttaagaattttgaaattactataaaagcaagatatttttataataaagtagtcactgaggctgacgtttatatcacatttggaataagagaagacttaaaagatgatcaaaaagaaatgatgcaaacagcaatgcaaaacacaatgttgataaatggaattgctcaagtcacatttgattctgaaacagcagtcaaagaactgtcatactacagtttagaagatttaaacaacaagtacctttatattgctgtaacagtcatagagtctacaggtggattttctgaagaggcagaaatacctggcatcaaatatgtcctctctccctacaaactgaatttggttgctactcctcttttcctgaagcctgggattccatatcccatcaaggtgcaggttaaagattcgcttgaccagttggtaggaggagtcccagtaacactgaatgcacaaacaattgatgtaaaccaagagacatctgacttggatccaagcaaaagtgtaacacgtgttgatgatggagtagcttcctttgtgcttaatctcccatctggagtgacggtgctggagtttaatgtcaaaactgatgctccagatcttccagaagaaaatcaggccagggaaggttaccgagcaatagcatactcatctctcagccaaagttacctttatattgattggactgataaccataaggctttgctagtgggagaacatctgaatattattgttacccccaaaagcccatatattgacaaaataactcactataattacttgattttatccaagggcaaaattatccactttggcacgagggagaaattttcagatgcatcttatcaaagtataaacattccagtaacacagaacatggttccttcatcccgacttctggtctattacatcgtcacaggagaacagacagcagaattagtgtctgattcagtctggttaaatattgaagaaaaatgtggcaaccagctccaggttcatctgtctcctgatgcagatgcatattctccaggccaaactgtgtctcttaatatggcaactggaatggattcctgggtggcattagcagcagtggacagtgctgtgtatggagtccaaagaggagccaaaaagcccttggaaagagtatttcaattcttagagaagagtgatctgggctgtggggcaggtggtggcctcaacaatgccaatgtgttccacctagctggacttaccttcctcactaatgcaaatgcagatgactcccaagaaaatgatgaaccttgtaaagaaattctcaggccaagaagaacgctgcaaaagaagatagaagaaatagctgctaaatataaacattcagtagtgaagaaatgttgttacgatggagcctgcgttaataatgatgaaacctgtgagcagcgagctgcacggattagtttagggccaagatgcatcaaagctttcactgaatgttgtgtcgtcgcaagccagctccgtgctaatatctctcataaagacatgcaattgggaaggctacacatgaagaccctgttaccagtaagcaagccagaaattcggagttattttccagaaagctggttgtgggaagttcatcttgttcccagaagaaaacagttgcagtttgccctacctgattctctaaccacctgggaaattcaaggcgttggcatttcaaacactggtatatgtgttgctgatactgtcaaggcaaaggtgttcaaagatgtcttcctggaaatgaatataccatattctgttgtacgaggagaacagatccaattgaaaggaactgtttacaactataggacttctgggatgcagttctgtgttaaaatgtctgctgtggagggaatctgcacttcggaaagcccagtcattgatcatcagggcacaaagtcctccaaatgtgtgcgccagaaagtagagggctcctccagtcacttggtgacattcactgtgcttcctctggaaattggccttcacaacatcaatttttcactggagacttggtttggaaaagaaatcttagtaaaaacattacgagtggtgccagaaggtgtcaaaagggaaagctattctggtgttactttggatcctaggggtatttatggtaccattagcagacgaaaggagttcccatacaggatacccttagatttggtccccaaaacagaaatcaaaaggattttgagtgtaaaaggactgcttgtaggtgagatcttgtctgcagttctaagtcaggaaggcatcaatatcctaacccacctccccaaagggagtgcagaggcggagctgatgagcgttgtcccagtattctatgtttttcactacctggaaacaggaaatcattggaacatttttcattctgacccattaattgaaaagcagaaactgaagaaaaaattaaaagaagggatgttgagcattatgtcctacagaaatgctgactactcttacagtgtgtggaagggtggaagtgctagcacttggttaacagcttttgctttaagagtacttggacaagtaaataaatacgtagagcagaaccaaaattcaatttgtaattctttattgtggctagttgagaattatcaattagataatggatctttcaaggaaaattcacagtatcaaccaataaaattacagggtaccttgcctgttgaagcccgagagaacagcttatatcttacagcctttactgtgattggaattagaaaggctttcgatatatgccccctggtgaaaatcgacacagctctaattaaagctgacaactttctgcttgaaaatacactgccagcccagagcacctttacattggccatttctgcgtatgctctttccctgggagataaaactcacccacagtttcgttcaattgtttcagctttgaagagagaagctttggttaaaggtaatccacccatttatcgtttttggaaagacaatcttcagcataaagacagctctgtacctaacactggtacggcacgtatggtagaaacaactgcctatgctttactcaccagtctgaacttgaaagatataaattatgttaacccagtcatcaaatggctatcagaagagcagaggtatggaggtggcttttattcaacccaggacacaatcaatgccattgagggcctgacggaatattcactcctggttaaacaactccgcttgagtatggacatcgatgtttcttacaagcataaaggtgccttacataattataaaatgacagacaagaatttccttgggaggccagtagaggtgcttctcaatgatgacctcattgtcagtacaggatttggcagtggcttggctacagtacatgtaacaactgtagttcacaaaaccagtacctctgaggaagtttgcagcttttatttgaaaatcgatactcaggatattgaagcatcccactacagaggctacggaaactctgattacaaacgcatagtagcatgtgccagctacaagcccagcagggaagaatcatcatctggatcctctcatgcggtgatggacatctccttgcctactggaatcagtgcaaatgaagaagacttaaaagcccttgtggaaggggtggatcaactattcactgattaccaaatcaaagatggacatgttattctgcaactgaattcgattccctccagtgatttcctttgtgtacgattccggatatttgaactctttgaagttgggtttctcagtcctgccactttcacagtgtacgaataccacagaccagataaacagtgtaccatgttttatagcacttccaatatcaaaattcagaaagtctgtgaaggagccgcgtgcaagtgtgtagaagctgattgtgggcaaatgcaggaagaattggatctgacaatctctgcagagacaagaaaacaaacagcatgtaaaccagagattgcatatgcttataaagttagcatcacatccatcactgtagaaaatgtttttgtcaagtacaaggcaacccttctggatatctacaaaactggggaagctgttgctgagaaagactctgagattaccttcattaaaaaggtaacctgtactaacgctgagctggtaaaaggaagacagtacttaattatgggtaaagaagccctccagataaaatacaatttcagtttcaggtacatctaccctttagattccttgacctggattgaatactggcctagagacacaacatgttcatcgtgtcaagcatttttagctaatttagatgaatttgccgaagatatctttttaaatggatgctaaaattcctgaagttcagctgcatacagtttgcacttatggactcctgttgttgaagttcgtttttttgttttcttctttttttaaacattcatagctggtcttatttgtaaagctcactttacttagaattagtggcacttgcttttattagagaatgatttcaaatgctgtaactttctgaaataacatggccttggagggcatgaagacagatactcctccaaggttattggacaccggaaacaataaattggaacacctcctcaaacctaccactcaggaatgtttgctggggccgaaagaacagtccattgaaagggagtattacaaaaacatggcctttgcttgaaagaaaataccaaggaacaggaaactgatcattaaagcctgagtttgctttcaaaaaaaaaaaaaaaaaa

SEQ ID NO: 575 - DNA, 1057 bp, Homo sapiens
gtctcagcggctgccaacagatcatgagccatcagctcctctggggccagctataggacaacagaactctcaccaaaggaccagacacagtgagcaccatgggacagtgtcggtcagccaacgcagaggatgctcaggaattcagtgatgtggagagggccattgagaccctcatcaagaactttcaccagtactccgtggagggtgggaaggagacgctgaccccttctgagctacgggacctggtcacccagcagctgccccatctcatgccgagcaactgtggcctggaagagaaaattgccaacctgggcagctgcaatgactctaaactggagttcaggagtttctgggagctgattggagaagcggccaagagtgtgaagctggagaggcctgtccgggggcactgagaactccctctggaattcttggggggtgttggggagagactgtgggcctggagataaaacttgtctcctctaccaccaccctgtaccctagcctgcacctgtcctcatctctgcaaagttcagcttccttccccaggtctctgtgcactctgtcttggatgctctggggagctcatgggtggaggagtctccaccagagggaggctcaggggactggttgggccagggatgaatatttgagggataaaaattgtgtaagagccaaagaattggtagtagggggagaacagagaggagctgggctatgggaaatgatttgaataatggagctgggaatatggctggatatctggtactaaaaaagggtctttaagaacctacttcctaatctcttccccaatccaaaccatagctgtctgtccagtgctctcttcctgcctccagctctgccccaggctcctcctagactctgtccctgggctagggcaggggaggagggagagcagggttgggggagaggctgaggagagtgtgacatgtggggagaggaccagctgggtgcttgggcattgacagaatgatggttgttttgtatcatttgattaataaaaaaaaatgaaaaaagtgaaaaaaaaaaaaaaaaa

SEQ ID NO: 576 - DNA, 3677 bp, Homo sapiens
tcgcggaggcttggggcagccgggtagctcggaggtcgtggcgctgggggctagcaccagcgctctgtcgggaggcgcagcggttaggtggaccggtcagcggactcaccggccagggcgctcggtgctggaatttgatattcattgatccgggttttatccctcttcttttttcttaaacatttttttttaaaactgtattgtttctcgttttaatttatttttgcttgccattccccacttgaatcgggccgacggcttggggagattgctctacttccccaaatcactgtggattttggaaaccagcagaaagaggaaagaggtagcaagagctccagagagaagtcgaggaagagagagacggggtcagagagagcgcgcgggcgtgcgagcagcgaaagcgacaggggcaaagtgagtgacctgcttttgggggtgaccgccggagcgcggcgtgagccctcccccttgggatcccgcagctgaccagtcgcgctgacggacagacagacagacaccgcccccagccccagctaccacctcctccccggccggcggcggacagtggacgcggcggcgagccgcgggcaggggccggagcccgcgcccggaggcggggtggagggggtcggggctcgcggcgtcgcactgaaacttttcgtccaacttctgggctgttctcgcttcggaggagccgtggtccgcgcgggggaagccgagccgagcggagccgcgagaagtgctagctcgggccgggaggagccgcagccggaggagggggaggaggaagaagagaaggaagaggagagggggccgcagtggcgactcggcgctcggaagccgggctcatggacgggtgaggcggcggtgtgcgcagacagtgctccagccgcgcgcgctccccaggccctggcccgggcctcgggccggggaggaagagtagctcgccgaggcgccgaggagagcgggccgccccacagcccgagccggagagggagcgcgagccgcgccggccccggtcgggcctccgaaaccatgaactttctgctgtcttgggtgcattggagccttgccttgctgctctacctccaccatgccaagtggtcccaggctgcacccatggcagaaggaggagggcagaatcatcacgaagtggtgaagttcatggatgtctatcagcgcagctactgccatccaatcgagaccctggtggacatcttccaggagtaccctgatgagatcgagtacatcttcaagccatcctgtgtgcccctgatgcgatgcgggggctgctgcaatgacgagggcctggagtgtgtgcccactgaggagtccaacatcaccatgcagattatgcggatcaaacctcaccaaggccagcacataggagagatgagcttcctacagcacaacaaatgtgaatgcagaccaaagaaagatagagcaagacaagaaaaaaaatcagttcgaggaaagggaaaggggcaaaaacgaaagcgcaagaaatcccggtataagtcctggagcgtgtacgttggtgcccgctgctgtctaatgccctggagcctccctggcccccatccctgtgggccttgctcagagcggagaaagcatttgtttgtacaagatccgcagacgtgtaaatgttcctgcaaaaacacagactcgcgttgcaaggcgaggcagcttgagttaaacgaacgtacttgcagatgtgacaagccgaggcggtgagccgggcaggaggaaggagcctccctcagggtttcgggaaccagatctctcaccaggaaagactgatacagaacgatcgatacagaaaccacgctgccgccaccacaccatcaccatcgacagaacagtccttaatccagaaacctgaaatgaaggaagaggagactctgcgcagagcactttgggtccggagggcgagactccggcggaagcattcccgggcgggtgacccagcacggtccctcttggaattggattcgccattttatttttcttgctgctaaatcaccgagcccggaagattagagagttttatttctgggattcctgtagacacacccacccacatacatacatttatatatatatatattatatatatataaaaataaatatctctattttatatatataaaatatatatattctttttttaaattaacagtgctaatgttattggtgtcttcactggatgtatttgactgctgtggacttgagttgggaggggaatgttcccactcagatcctgacagggaagaggaggagatgagagactctggcatgatcttttttttgtcccacttggtggggccagggtcctctcccctgcccaggaatgtgcaaggccagggcatgggggcaaatatgacccagttttgggaacaccgacaaacccagccctggcgctgagcctctctaccccaggtcagacggacagaaagacagatcacaggtacagggatgaggacaccggctctgaccaggagtttggggagcttcaggacattgctgtgctttggggattccctccacatgctgcacgcgcatctcgcccccaggggcactgcctggaagattcaggagcctgggcggccttcgcttactctcacctgcttctgagttgcccaggagaccactggcagatgtcccggcgaagagaagagacacattgttggaagaagcagcccatgacagctccccttcctgggactcgccctcatcctcttcctgctccccttcctggggtgcagcctaaaaggacctatgtcctcacaccattgaaaccactagttctgtccccccaggagacctggttgtgtgtgtgtgagtggttgaccttcctccatcccctggtccttcccttcccttcccgaggcacagagagacagggcaggatccacgtgcccattgtggaggcagagaaaagagaaagtgttttatatacggtacttatttaatatccctttttaattagaaattaaaacagttaatttaattaaagagtagggttttttttcagtattcttggttaatatttaatttcaactatttatgagatgtatcttttgctctctcttgctctcttatttgtaccggtttttgtatataaaattcatgtttccaatctctctctccctgatcggtgacagtcactagcttatcttgaacagatatttaattttgctaacactcagctctgccctccccgatcccctggctccccagcacacattcctttgaaataaggtttcaatatacatctacatactatatatatatttggcaacttgtatttgtgtgtatatatatatatatatgtttatgtatatatgtgattctgataaaatagacattgctattctgttttttatatgtaaaaacaaaacaagaaaaaatagagaattctacatactaaatctctctccttttttaattttaatatttgttatcatttatttattggtgctactgtttatccgtaataattgtggggaaaagatattaacatcacgtctttgtctctagtgcagtttttcgagatattccgtagtacatatttatttttaaacaacgacaaagaaatacagatatatcttaaaaaaaaaaaagcattttgtattaaagaatttaattctgatctcaaaaaaaaaaaaaaaaaa

SEQ ID NO: 577 - DNA, 4284 bp, Homo sapiens
cggggccgtggccgaggcctgcgcgccgcccggccgcctgcactgcgcgcgcgcccaccccgcgtgggaggcagcgggaggggcccggagaggtgtggagcggcgcggcgggaggctccgtgggcggccacgggagacagcgccggcgggagcgcgcctctcggcctttcctccgcgcccccgcgtccccagccggccgctccgagaggacccggaggaggcaggtggctttctagaagatgaccatagaggaccttccagattttccattagaaggaaatcctttgtttggaagatacccatttatattttctgcttctgataccccagttatcttttccatttctgcagcaccaatgccttcagactgtgaattttctttctttgatcctaatgatgcatcatgccaggaaattctttttgatcccaaaacttcagtttcagaattatttgccattttgagacagtgggttcctcaggtccaacaaaacattgacattattggaaatgagattcttaagagaggttgcaatgtgaatgatagagatggattgacagatatgactcttttacattatacctgcaaatctggagctcatggtattggtgatgtggaaacagctgtaaaatttgcaactcagcttattgacctgggagcagacattagtttgcggagtcgctggacaaacatgaatgctttgcattatgctgcttattttgatgtccctgaacttataagagtgattttgaaaacatcgaaaccaaaagatgtggatgccacttgcagtgattttaattttggaacagctttgcatattgcagcatacaacttgtgtgcaggtgctgtgaagtgcctcttggagcagggagcaaatcctgcatttaggaatgacaaaggacagatccctgctgatgttgttccagacccagtagatatgccgttagagatggctgacgccgcagccactgctaaggaaatcaagcagatgcttctagatgcggtgcctctgtcatgtaacatctcaaaggccatgctcccaaattatgatcatgtcactggcaaggcaatgcttacgtcacttggcctgaagttgggggatcgtgttgttattgcaggacagaaggttggtacattaagattttgtggaacaactgaatttgcaagtgggcagtgggctggcattgaactggatgaaccagaaggaaaaaataatggaagtgttggaaaagtccagtactttaaatgtgcccccaagtatggtatttttgcacctctttcaaagataagtaaagcaaaaggtcgaaggaagaatataacacacactccttctacaaaagctgctgtacctctcatcaggtcccagaaaattgacgtagctcatgtgacgtcaaaagtaaatactggattaatgacatcaaaaaaagatagtgcttctgagtcaacactttcattgcctcctggtgaagaacttaaaactgtgacagagaaagatgttgccctgcttggatctgtcagcagctgctcctctacatcttctttggaacacagacagagctaccccaagaaacagaatgcaatcagcagtaacaagaagacaatgagcaaaagcccttccctttcatccagagccagtgctggtttgaattcctcagcaacatctacagcaaataatagccgttgcgagggggaactccgcctcggagagagagtgttagtggtaggacagagactgggcaccattaggttctttgggacaacaaacttcgctccaggatattggtatggtatagagcttgaaaaaccccatggcaagaatgatggttcagttggaggtgtgcagtattttagctgttctccaagatatggaatatttgctcccccatccagggtgcaaagagtaacagattccctggataccctttcagaaatttcttcaaataaacagaaccattcttatcctggttttaggagaagttttagcacaacttctgcttcttcccaaaaggagattaacagaagaaatgctttttccaaatcgaaagctgctttgcgtcgcagttggagcagcacccccaccgcaggtggcattgaagggagcgtgaagctgcacgaggggtctcaggtcctgctcacgagctccaatgagatgggtactgttaggtatgtgggccccactgactttgcttcaggtatctggcttggacttgagctccgaagcgccaagggaaaaaatgatgggtcagtgggtgacaagcgctatttcacctgtaagccgaaccatggagtcttagttcgaccgagcagagtgacctatcggggaattaatgggtcaaaacttgtggatgagaattgttaagcttctaaaatattaaataagctcaaatatatatatttggtgtaaataaagagtccatggtaaatggtttactttatttagccatattaaaattttgaaaatatagttatcttcttaaaaaccattataacaattcagagagagttctttacaaagccatgaatatgaactatggggaatcatggttcttttaaagcaattttcaaaataagtaccaattaaagctttaggttccaagaagattctgggactcaggaagaaaaagtgccatcaggtgaccagctgttgcatttcttgcttattctgttttgtttttgcacatcataatggatttttcttagtgccctaattgtgaagggtttctctagctttggttatgtgtaatgttcacgtgacctttttttgtcaatcatttttggaatttttctttctttctgtgctttattactaataagtccaatgagtgagtagtagctagatgactagtatgtagttttatattttggtaaaattatttgccctttcagaaatgcctcatctaaagatacatgataattttggagttggaaggggccttagaggctctccagctctgcttcttgcccattgccaaatactgaaatggaagcccgtcttacctggggtcactaactggttggttaactgagctaagaatagactgtgggtctcctcacttgtggcccagtgctctttctgctatacaaaatgtctaatctcagatttttcttctgctgcttgactgcttcatctggatgaactacaaaaaacccatgattaaggtttatgaattcaagtaataattagattttttttgcacagacttacttaacttccttattggatatgtttgtaacacataaacacaaagcacttttcaaacatgatgcacttttatctttgtgaataatttactgtcctttcctcctgggatatgagaaacattttaaaaaacgtatttaacagaagagagcaaataaagatatatcaggaaggatgtattagttatttacttaaatgtttataatatctggattttttttgttttgttactcatagaactggtgttgtttgctgtttttatttctctaattgttgcagagttctgcctgttacaaagctacagaactgtattgtttttattttccttcttgagcacatgttaacaaactaagcttcacattagagtgatgtcataatgtaaaatgtttgcattgtggttaggtattgaagtttatgtcctgtctgtgtaaagattcatcttttattgtaaatatttagactttaccacagaaatattggaacagtttgctttataagattaaaaagcatccttcagaatggagcttgccttgtgcttagaaataatatgttgaactattttgcaatatactattttaaatctaaattctgtcacttcgctgcctttttaaaatagtgtggtatttcaaatattgctagagctattttcctgaaatacatttgcaaaataaggctgctttgtaatcaaggaatatttttattgattgaaggaaatgactgtactgcgattcaaaagtaaacttattttattatacagattatttcttaaaaactctatttataccttaacatgaaatccatgaccacaccaaacttggttattcataatttttcctgttaaatataaaacactgtaagttaaaaacagtaatgccaacattgaatttatttttgaggtcaaagaaccagttgttctctttatatttagatgaggatgattgagtccatatactatgtatgtttacatatactatacatgcacattaggtgttttcatttgtgttttgcttatgaaatgtcatttaaagttcacttcttgagcatcaataaaaagggaagctgtgtggttttggaatggtaaaaaaaa

SEQ ID NO: 578 - DNA, 2468 bp, Homo sapiens
agccaaagtcagaaaccggtgtctgctctactctccctggagcaagcgttgttaccagctatacttccttcaagacccagtgatgctgctgatgaaggtagagacacgtccattaatgagtccagaaatgcaacagatgaatccctacgaaggaggttgattgcaaatctggctgagcatattctattcactgctagcaagtcctgtgccattatgtccacacacattgtggcttgcctgctcctctacagacacaggcagggaattgatctctccacattggtcgaagacttctttgtgatgaaagaggaagtcctggctcgtgattttgacctggggttctcaggaaattcagaagatgtagtaatgcatgccatacagctgctgggaaattgtgtcacaatcacccacactagcaggaacgatgagttttttatcacccccagcacaactgtcccatcagtcttcgaactcaacttctacagcaatggggtacttcatgtctttatcatggaggccatcatagcttgcagcctttatgcagttctgaacaagaggggactggggggtcccactagcaccccacctaacctgatcagccaggagcagctggtgcggaaggcggccagcctgtgctaccttctctccaatgaaggcaccatctcactgccttgccagacattttaccaagtctgccatgaaacagtaggaaagtttatccagtatggcattcttacagtggcagagcacgatgaccaggaagatatcagtcctagtcttgctgagcagcagtgggacaagaagcttcctgaacctttgtcttggagaagtgatgaagaagatgaagacagtgactttggggaggaacagcgagattgctacctgaaggtgagccaatccaaggagcaccagcagtttatcaccttcttacagagactccttgggcctttgctggaggcctacagctctgctgccatctttgttcacaacttcagtggtcctgttccagaacctgagtatctgcaaaagttgcacaaatacctaataaccagaacagaaagaaatgttgcagtatatgctgagagtgccacatattgtcttgtgaagaatgctgtgaaaatgtttaaggatattggggttttcaaggagaccaaacaaaagagagtgtctgttttagaactgagcagcacttttctacctcaatgcaaccgacaaaaacttctagaatatattctgagttttgtggtgctgtaggtaacgtgtggcactgctggcaaatgaaggtcatgagatgagttccttgtaggtaccagcttctggctcaagagttgaaggtgccgtcgcagggtcaggcctgccctgtcccgaggtgatctcctggaagacaagtgccttctccctccatggatctgtgatcttcccagctctgcatcaacacagcagcctgcagataacacttggggggacctcagcctctattcgcaactcataatccgtagactacaagatgaaatctcaataaattatttttgagtttattaaagattgacattttaagtacaacgtttaaggactaattactgtgatggacacagaaatgtagctgtgttctggaactgaatcttacatggtatacttagtgctgctgggtaatttgttggtatattatctggttagtggttaatgcttcctttaaaaataattgagtcatccattcactctttttcagttttatctgtcaatagtagctacatttttaatgggagcaccttttatcccaaagtgctttataaattgagtggactgatatatatcacacccaggtatcactgtgctgtcctttgctgtcagatttagaaatgtttttaagagctatgtgaaaacagacaatattagtttaggtcgggaactgagatattgtaatcaaatagttaacatcaggaagttaatttggctggcaaaattctagggaaacttggccagaaaactggtgttgaaggcttttgctcatataaacaagtgccattgagtttcaaatgaccagcaaatatatttagaacccttcctgttttatgtctgtacctcgtccacccctcaggtaatacctgcctctcacaggtacagctgtttcttggaaatcctccaaccaaatagcagttttcctaacttgattagcttgagctgacagactgttagaatacagttctctggccacagctgatgagggctttctgtactgcacacagattgtgtactgcaccccagtccaggtgactggtacccactcgagttgtgccgtgcacaacctgtccagtatatgcatgtggtggccctactgactggtaatggttagaggcatttatggatttttagctttgaggaaaaaccatgactttttcaaaaaggtattagaaaaaccatttcataactttgtcaaagttaaattataaaaaaaaaaaaaaaaaaaa

SEQ ID NO: 579 - DNA, 2842 bp, Homo sapiens
aatttgcatatcttatatggcctaatggtggcgatcatggcaagttagaagttttctgactcctttcggaggagcctccgggaccccggggagtaacaggtgtctggaggctgaagggtggaggggttcctggatttggggtttgcttgtgaaactcccctccaccctcctctctcgcacccacccaccccctcacccccttctttttccgtccttggaaaatggtgtccaagctcacgtcgctccagcaagaactcctgagcgccctgctgagctccggggtcaccaaggaggtgctggttcaggccttggaggagttgctgccatccccgaacttcggggtgaagctggagacgctgcccctgtcccctggcagcggggccgagcccgacaccaagccggtcttccatactctcaccaacggccacgccaagggccgcttgtccggcgacgagggctccgaggacggcgacgactatgacacacctcccatcctcaaggagctgcaggcgctcaacaccgaggaggcggcggagcagcgggcggaggtggaccggatgctcagtgaggacccttggagggctgctaaaatgatcaagggttacatgcagcaacacaacatcccccagagggaggtggtcgatgtcaccggcctgaaccagtcgcacctctcccagcatctcaacaagggcacccctatgaagacccagaagcgtgccgctctgtacacctggtacgtcagaaagcaacgagagatcctccgacaattcaaccagacagtccagagttctggaaatatgacagacaaaagcagtcaggatcagctgctgtttctctttccagagttcagtcaacagagccatgggcctgggcagtccgatgatgcctgctctgagcccaccaacaagaagatgcgccgcaaccggttcaaatgggggcccgcgtcccagcaaatcttgtaccaggcctacgatcggcaaaagaaccccagcaaggaagagagagaggccttagtggaggaatgcaacagggcagaatgtttgcagcgaggggtgtccccctccaaagcccacggcctgggctccaacttggtcactgaggtccgtgtctacaactggtttgcaaaccgcaggaaggaggaggcattccggcaaaagctggccatggacgcctatagctccaaccagactcacagcctgaaccctctgctctcccacggctccccccaccaccagcccagctcctctcctccaaacaagctgtcaggagtgcgctacagccagcagggaaacaatgagatcacttcctcctcaacaatcagtcaccatggcaacagcgccatggtgaccagccagtcggttttacagcaagtctccccagccagcctggacccaggccacaatctcctctcacctgatggtaaaatgatctcagtctcaggaggaggtttgcccccagtcagcaccttgacgaatatccacagcctctcccaccataatccccagcaatctcaaaacctcatcatgacacccctctctggagtcatggcaattgcacaaagcctcaacacctcccaagcacagagtgtccctgtcatcaacagtgtggccggcagcctggcagccctgcagcccgtccagttctcccagcagctgcacagccctcaccagcagcccctcatgcagcagagcccaggcagccacatggcccagcagcccttcatggcagctgtgactcagctgcagaactcacacatgtacgcacacaagcaggaacccccccagtattcccacacctcccggtttccatctgcaatggtggtcacagataccagcagcatcagtacactcaccaacatgtcttcaagtaaacagtgtcctctacaagcctggtgatgcccacacaccacttacttcgtgcgcaacaacaaggaccctgttttccacaccatcaccctctgggcagctgtcatggaaaagcccagtgacctgaccggcacctgcgagaggtccctgcttacctgacggacgtcctgctggcacctcagacaatccactctcaggaggcgcagcccgaagcccagtttcccttctatgcagtattgccacaatgcctctcccacgatgtcaaggactcctgtctgtcctggaggtgggagacaaggaaccaccgaagaggaagcaagaaagccgtactgtctatgttgtgatccttcatcgaacaaactgatgcgaaaacttgaatctgttactgaaatgaggagagaaggacatgtgctattgaactgagccaaacacactgtaaatatccacagactccctcccctgcccccatcccacatgatcttgagatttcttttaaagaagtaaatttgtccaatggctgtaaactataaactactgtaattaagtgcaatttcccctctgtgtcctctcccctctgccctgtatataatactaaagtgtctattagttttctttgtaaaggtcagagtcaaaatttcaaaagtgatctgtcccctctcccctcatggagaaacatcctaagtgggaagtgaagccccttgtcctctcccgcgggcctggacacttatggggacagcataccttggactgactaccagctaactccagtctcctgacattaagacacacctctggatccctggaggggctgaatgtagtgtgtcagagtaacatgccagcttcctgtgggccaggagctcagccgtgcactccctaagaaaccccagggcagggaaactggctgtttgatagcagaagaaaaagttgcagtctcagaaagccttccattaaaacaatttattttatcactaaaaaaa

SEQ ID NO: 580 - DNA, 897 bp, Homo sapiens
agagactgcgagaaggaggtcccccacggcccttcaggatgaaagctgcggtgctgaccttggccgtgctcttcctgacggggagccaggctcggcatttctggcagcaagatgaacccccccagagcccctgggatcgagtgaaggacctggccactgtgtacgtggatgtgctcaaagacagcggcagagactatgtgtcccagtttgaaggctccgccttgggaaaacagctaaacctaaagctccttgacaactgggacagcgtgacctccaccttcagcaagctgcgcgaacagctcggccctgtgacccaggagttctgggataacctggaaaaggagacagagggcctgaggcaggagatgagcaaggatctggaggaggtgaaggccaaggtgcagccctacctggacgacttccagaagaagtggcaggaggagatggagctctaccgccagaaggtggagccgctgcgcgcagagctccaagagggcgcgcgccagaagctgcacgagctgcaagagaagctgagcccactgggcgaggagatgcgcgaccgcgcgcgcgcccatgtggacgcgctgcgcacgcatctggccccctacagcgacgagctgcgccagcgcttggccgcgcgccttgaggctctcaaggagaacggcggcgccagactggccgagtaccacgccaaggccaccgagcatctgagcacgctcagcgagaaggccaagcccgcgctcgaggacctccgccaaggcctgctgcccgtgctggagagcttcaaggtcagcttcctgagcgctctcgaggagtacactaagaagctcaacacccagtgaggcgcccgccgccgccccccttcccggtgctcagaataaacgtttccaaagtggg

SEQ ID NO: 581 - DNA, 10640 bp, Homo sapiens
atactcagtcacacaagccatagcaggaaacagcgagcttgcagcctcaccgacgagtctcaactaaaagggactcccggagctaggggtggggactcggcctcacacagtgagtgccggctattggacttttgtccagtgacagctgagacaacaaggaccacgggaggaggtgtaggagagaagcgccgcgaacagcgatcgcccagcaccaagtccgcttccaggctttcggtttctttgcctccatcttgggtgcgccttcccggcgtctaggggagcgaaggctgaggtggcagcggcaggagagtccggccgcgacaggacgaactcccccactggaaaggattctgaaagaaatgaagtcagccctcagaaatgaagttgactgcctgctggctttctgttgactggcccggagctgtactgcaagacccttgtgagcttccctagtctaagagtaggatgtctgctgaagtcatccatcaggttgaagaagcacttgatacagatgagaaggagatgctgctctttttgtgccgggatgttgctatagatgtggttccacctaatgtcagggaccttctggatattttacgggaaagaggtaagctgtctgtcggggacttggctgaactgctctacagagtgaggcgatttgacctgctcaaacgtatcttgaagatggacagaaaagctgtggagacccacctgctcaggaaccctcaccttgtttcggactatagagtgctgatggcagagattggtgaggatttggataaatctgatgtgtcctcattaattttcctcatgaaggattacatgggccgaggcaagataagcaaggagaagagtttcttggaccttgtggttgagttggagaaactaaatctggttgccccagatcaactggatttattagaaaaatgcctaaagaacatccacagaatagacctgaagacaaaaatccagaagtacaagcagtctgttcaaggagcagggacaagttacaggaatgttctccaagcagcaatccaaaagagtctcaaggatccttcaaataacttcaggctccataatgggagaagtaaagaacaaagacttaaggaacagcttggcgctcaacaagaaccagtgaagaaatccattcaggaatcagaagcttttttgcctcagagcatacctgaagagagatacaagatgaagagcaagcccctaggaatctgcctgataatcgattgcattggcaatgagacagagcttcttcgagacaccttcacttccctgggctatgaagtccagaaattcttgcatctcagtatgcatggtatatcccagattcttggccaatttgcctgtatgcccgagcaccgagactacgacagctttgtgtgtgtcctggtgagccgaggaggctcccagagtgtgtatggtgtggatcagactcactcagggctccccctgcatcacatcaggaggatgttcatgggagattcatgcccttatctagcagggaagccaaagatgttttttattcagaactatgtggtgtcagagggccagctggaggacagcagcctcttggaggtggatgggccagcgatgaagaatgtggaattcaaggctcagaagcgagggctgtgcacagttcaccgagaagctgacttcttctggagcctgtgtactgcggacatgtccctgctggagcagtctcacagctcaccatccctgtacctgcagtgcctctcccagaaactgagacaagaaagaaaacgcccactcctggatcttcacattgaactcaatggctacatgtatgattggaacagcagagtttctgccaaggagaaatattatgtctggctgcagcacactctgagaaagaaacttatcctctcctacacataagaaaccaaaaggctgggcgtagtggctcacacctgtaatcccagcactttgggaggccaaggagggcagatcacttcaggtcaggagttcgagaccagcctggccaacatggtaaacgctgtccctagtaaaaatacaaaaattagctgggtgtgggtgtgggtacctgtattcccagttacttgggaggctgaggtgggaggatcttttgaacccaggagttcagggtcatagcatgctgtgattgtgcctacgaatagccactgcataccaacctgggcaatatagcaagatcccatctctttaaaaaaaaaaaaaaaggacaggaactatcttactcaatgtattagtcatgtttctctagagggacagaactaataggatacatgtatataaaaaggggagtttattaaggagtattgactcacatgatcacagggttaggtcccacaataggtcatctgcaagcaaggaagccaattcaagtcccaaagctgaagaacttggagtccaatgtttgagggcaggaagcattcagcatgagagaaagatggaggccagaagactacaccagtctagtctttccatgttttgcctgcttttattctggcagtgctggcagctgattagatggtgcccacccagattgaggatggtctgcctttcccagtccactgactcaaatgttaaatctcctttggcagcaccctcacagatgtacccgggaacactttgcatccttctattcaatcaagttgatactcagtattaaccatcacagtccatttgggcaactataccaaattaccatagaccaggtgacttaaacagcagttatttctcacagttccggaggctgggaaatccaacatctaagtggtagcatatctggtgtctggtaaggcatgcttccagatcttaccagatgtcagtcttttgatgttctcacatggcagaaaaagaggatgcaaactctcaagtatatctttaagggcacaaattccattcatgagggctctaccctcatcacctaattacctcccaaaggccccaccttctgatactgtcactttggggatactgtctcccctttgaattctggggggaatacaaacattcagtttgtaacaatagccttatgatttagaggttacttgttcattcacctagacctcaaattgcattttacagctagtcaagtatatctttctctgatttgatagtgtgacctaaaaggggaccattgtttgaaatatcattagagttgcttattattattattattattattattattattattattattattattgagacagagtttcattctgctgcccaggctggagtgcagtggcatcatcttggctcattgcaacctctgccttctgggttcaagcgattctcctgcctcagcctcccgagtagctgggattacaggctcctgccaccacacccggctaatttttgtatttttagtggagacagggtttccaccatgttggccagcgtggtcttgaactcctgacctcaggtgattcaccagcctcggcctcccaaagtgctgggattacaggtgtgagccactgcacctggcctattattatttttaaattttttttttttaattgatcattcttgggtgtttctcacagagggtgatttggcagggtcacaggacaatagtggagggaaggtcagcagataaacaagtgaacaaaggtctctggttttcctaggcagaggaccctgcggccttccgcagtgtttgtgtccctgggtacttgagattagggagtggtgatgactcttaaggagcatgctgccttcaagcatctgtttaacaaagcacatcttgcactgcccttaatccatttaaccctgagtggacacagcacatgtttcagagagcacagggttgggggtaaggtcatagatcaacagcatcctaaggcagaagaatttttcttagtacagaacaaaatgaagtctcccatgtctacttctttctacacagacacagcaacaatctgatttctctatcttttccccacctttcccccttttctattccacaaaaccgccatcgtcatcatggcctgttctcaatgagctgttgggtacacctcccagacggggtggcggctgggcagaggggctcctcacttcccagatggggcggccaggcggacgcgccccccacctccctcccggacgggatagctggccgggcgggggctgaccccccacctccctccccgacggggcggctggccgggcgggggctgacccccacgcctccctcccggacggggcggctgccaggcggaggggctcctcacttctcagacggggtggctgctgggcggagacgctcctcacttcccagacagggtggctgtcgggcggaggggctcctcacttctcagacggggcagctgcgggcggaggggctcctcacttctcagacggggtggccgggcagagaagctcctcacatcccagacgggggggcggggcagaggcgctccccacatctcagacgatgggcggccgggcagagacgctcctcacttcatcccagacggggtggcggccgggcagaagctgtaatctcggcaccctggggggccaaggcaggcggctgggaggcggaggccgtagccagctgagatcacaccactgcactccagcctgggcaacattgagcactgagtggacgagactctgcccgcaatcccggcacctcgggaggccgaggctggcagatcactcgcagtcaggagctggagaccagcccggccaacacagtgaaaccctgtctccaccaaaaaaatacgaaaaccagtcaggcgtggcggcgcccgcaatggcaggcacgcggcaggccgaggcgggagaatcaggcagggaggctgcagtgagccgagatggcagcagtacagtccagcttcggctcggcatcagagggagaccgtggggagagggagaagagagggagggggagagggctatttttaaaattttttaaaattgctgaacaggggtacctctgggcagtgtgtcagaataccactttttaaatattttatgatttatttatttttctatttcttgaggttttaactgatgtgtatctgtatgtctatttgtgtatattttgtcatgatcatgtaacagagtctgaaaagtgtcgaagagacagttttcaggaacaacaagcaattattcctactttccaagttattttgatgccatggtggctcatacctataatctgagtactttgggaggctgaggtggactgatcacttgagcccaggagtttgagaccagcctgggcaacatagcaagactccatctctacaaaaaaagacaaaatttagctgagcgtggtggcgtgttcctgtagtcccagctacttgggaggctgaagtgagtggatcccctgagcccagagaggtcaaggttgtgatgagctgtgatcacaccactgcacttcagcatgggagacagagtgagaccctgtttcagaaaaaataaataaataaaaccaccagcaccacaaacaacaacaaaaagttattttgtacttgttttgagcacaggactcctgagggtatctttgcatttaatattacataggggtgccagtgggaagtaatgtgtatgcttggcctcatgagctaaaaccctgtgttaattatgacagaaggaaagtgtgtgagagagatcttaactacctagcagctctagctgccatcttgaaccatgaagatacgggccacacgtaggggtagctgggtagtgagcagcaagaagccttgttggatgagggcacgaaggagcagaatcactggaatcactgtgtcagccctaattacctacctctggacttttatgtgaggggaaaaaaaattgacagtttatatttatctcaacctagttaacccaagtgatgcattgttatgagattaaaatgtttggaggccgggtgcggtggctcacgcctataatcccagccctttgggaggccaaggcgggcggatcacgaggtcaggagatcaagaccatcctggctaacatgtaaaaccccgtctctactaaaaatacaaaaaattagccaggcgttgtggcggtcgcctgtagtccctgctatttgggaggccgaggcaagagaacggcatgaacctgggaggtggagcttgcagcgagctgagatcttgccactgcactccagcctgggcgacagtgcgagactctgtctcaaaaataaataaataaataaataataaataaaatgtttggaatgttggcttcatccctgggatgcaaggctggttcaacatacgcaaatcaagaaacataattcatcacataaacagaactaaagacaaaaaccacatgattatctcaatagatacagaaaaggccttcaataaaattcaacgttgcttcatgttaaaaactctcaataaactaggtattgatggaaaatatctcaaaataataaccatttatgacaaacccacagccattatcatactgaatgggcaaaagctggaagcattccccttgaaaactggcacaagacagggatgccgtctcaccactcctatttaacatagtattggaagttctggccaagaaaatcaggcaagagaaacaaataaggggtattcaaataggaaaagaggaagtaaaactgtgtttgcagatgacatgatactatatctagaaaaccccattatctccacccaaaagttccttaagctgataagcaacttcagcaaagtctcaggatacaaaatcaatgtgcagaaatcacaagcattctatacaccaacaatacacaagcagagagccaaatcatgaatgaactcccattcacagttgctagaaagagaataaaatacctaggaatacagctaataagatgtgaaggatctcttcaaggagaactacaaaccactgctcaaggaaataagagaggacacaaatgaaaaaacattccattctcgtggataggaagaatcaatatcatgaaaatggccatactacccaaagtaatttataggttcattgctattcccattaaactactattgacattcttcacagaattagaaaaaaactactttaaaattcaaatggaaccaaaaaagagcccgtataaccaagacaacaataagcaaaaagaacaaagctggaagcatcacactacccaacttcaaagtatactgcaaggctacagtagccaaaatggcatggtactggtacaaaaacagacacatagaccaatggaacagaatagagaccagagaaagaagaccacacatctacagccatctgatcatcgacaaacctgacaaaaacaagcaatggggaaaagattccctatttaataaatggtgctgggaaaactggctagccatatgcagaaaattgaaactgaccccttccttacaccttatacaaaaattaactcaagattaaagacttaatgtaaaacctaaaactataaaaaccctagaagaaaatctatttaataccattcaagacataggcacaagcaaaggtttcatgacaaaaacatcaaaagcaattgcaacaaaagcaaaaattacaaatgggatctaattaaactaaagagctcctgcacagcaaaagaaactatcattagagtgaacaggcaacctacagaatgggagaacatttttgcaatctatccatctgacaaaggtctaatatccagaacctacaaggaacttaaaacaaatttacaaggaaaaaaacaaccccatcaaaaagtggacaaaggacatgaacagacacttctcaaaagaagacatttatgtggccaacaaacatataaaaaaaagctcaaccttactgatcattagagaaatgcaaaggagaaccacaatgagataccatctcatgccggtcagaatggtgattattaaaaagtcaaaaaacaacagatgctggcgaggctgtggagaagtaggaacacttttacattgttggtgggaatgtaaattagttcaaccgttgtggaagtgtgtgtggctattcctcaaagatctagaactagaaatactatttgtcccagcaatcccattactgggtatatacccaaaggaatataaaccattttattataaagatacatgcacatttttgttcattgcagcactcttcacaatagcaaagacacaatagcaaatgcccatcaaagatagactggataaagaaaatgtggtacatatacaccatggaatactgtgcagtgcagccattacagcttttggtgatacagtgaatcagatttttcattaattcttttaattggttattactgaacgtgaaaaagtaatgtttgtattgaaatcttgagtctggccatgtttctattttaaattcataaagaattctaacaagaggaattccaagaatgtcataaatggatgtttctccatggatgaaggaactgttttattcacttgctgataattcagcctaatccagtttgacatcatatagataagtagttgaattatggatttaaaatacatatcattttctaactccaaaggtaatacttatttaaatggttttgaaaatatagaaaggcacaatttctttttaaatctgttattctccaccaccactcaatctgtctatcatctatctctccattcattcttccatttgtttatatctgttaatctttgtatgtgttcatgtatagcttttacatgattggaatcataatgcatattccattttgaagtctgcttttttttacacaaaaatatgttgtgaatattttcctatattatgaaatatcattagctgagcttttagaattgactgcatgttttggtaccatttagatatagtttaagatacttagaagttatgtggctttgccactatggatgaatcttatttactcaatattaattacttacaaataacctcacctaaacactactcagccataaaaaggaatgaattaatgacattcacagcaacctggagactattactctaaaggaagtaactgaggaatggaaaaccaaacattgtatgttctcactcataagtgggagataagctatgaggatgcaaaggcataagaaggatacaatggactttggggacttaggggaaagggtgggaggggggtgaaggataaaagaatacaaattgggttcagtgtatactgctcaggtgatgggtgcaccagaatctcacaagtaaccacttaattacttacgcatgtaaccagataccacctgttccccaaacacctatggaaataattttgtttttttttttaaaaaaggaatgagatcatgtcctttgcagggacatggatgaagctggaagccattatcctcagcaaactaacagaggagcaggaaaccaaacaccacatgttctcacttgtaagcggaagctgaacaatgagaacacacggacacagggatgagatcaacacacactggggcctgatgcaggggccgtagcggggagagcatcaggataactagctaatgcatgtggggcttaatacctaggtgataggttgataggtgcagcaaaccaccatgggacacgtttacctatgtaacaaacccgcacatcctgcacttgtatccagaacttaaaatattttaaaaatctttagagaatacaaaaaaaaaaaaaaagattcttcaatgcatacacaataaaattgcagttcagtcaaacattggaagtctttctctgactgtctagttggtatcttcattttcagcttcttcaagatcccactccaaacactgttagctcagccaaattgaacagctcatatctcctacctctggatctttggttctggtgattgtatatttctggaccatctggaaccccagcatatcaccctaccccacatctccacatccccaaaatataaccatacttcaagggcagttcaaataccatctccttctatcctccatgaagtcagttatctcttccattggaattatcgccccctctcctgaacagtactatttcgtgtgaatctcctccaagccttcttttcattttatatctcatgctgtaattcttggaaagtatgctgtagctcaagtgcagaattctcatcagttttatctttatatctctcctaaacactttacctgatgaagagcctggcatacacataaatatatattgaatgaatcagtgatggattgaaaagagaaatgatggatctcctaaattttaacttttataaaatattttgatacattcatgaccttactttagcaagcaatgaacgtgatgtaaactattgttgatatagtttttatattggaagtgtaagtagtttgtggcatgggattgtgacatatcctaggtttcctcatcttctttttattgaaatgtaattcacaagccataaaatttgcccctttaaagtaaatgatgcagtggattttagtatatttacagagttgtgcaatcatcaccactatctaattccagaacatttccatctacctagaaactccataccagtgagctgccactctaatcctcctcttcccccagcctctagaaacaataatccattttctgtctctatgatttgcctgttctagatattttataaaaataaacatgtggcctttcgtgtctgacttccttcacttaaaaaaaaaaaaaaaaaa

SEQ ID NO: 582 - DNA, 2399 bp, Homo sapiens
gatctcagttttatcatgaatgacttctccattgtgattcttgatttccttcatgggttaatttagaggttatgtatgtatgtctgtgtgtgtctgttgctaaggtcaccatggctgaccgggctgctgccgaaagggcctgcaaggatcccaatcccatcattgatggcagaaaggccaacgtgaacctggcatacttaggagcaaaaccaaggatcatgcaaccaggttttgcctttggtgttcaacaacttcatccagcccttatacaaagacctttcgggatacctgcccactatgtctatccgcaggcttttgtgcagccgggagtggtcattccacacgtccagccgacagcagctgccgcctccaccaccccttacattgattacactggagctgcatacgcacaatactcagcagctgctgctgctgccgccgccgctgctgcctatgaccagtacccctatgcagcctctccagctgctgcaggatatgttactgctgggggctatggctacgcagtccagcagccaatcaccgcagcggcacctgggacagctgccgccgccgctgcagcagctgctgccgctgcagcatttggccagtaccagcctcagcagctgcagacagaccgaatgcaatagaccagccatctgatcaaagttgaattgttttctctttccctcccaattttccaatttttagtagctaataagagagttaacattgacttaacagctttaaaaaaaaaaacagccatgctattgtgaagcagagttattattttttttatactccaggtagtgttctagatgagaaagaggtaagaatgaggggaatgggcacaattttggaaatcaatcccaaagagcctgagtaaatgaaaggccactacgaaatgacgccaggagtaacaacggaacttcacttttgtaacgggatttttatttttgctctttttatagtatcagggaagcaaactgccttttacaagttagaaaatgctgtttgaatctagttgaaccagggaatacagagcgagcaatatgtagcttgaattacatttaaaagcagattttttacaaacaaaatggcgaaagcactgattgtcatttttagcagtcacttaaggcctatagaacttttttcaagtcggaaggtcctgttcttactatctcaaaaatgggcatcgaacaatcaatctaggagcgtggcagtgggtaaaatggtggacaggcaccaaagctattttctcatctgtcctgtggatgagtggaactgtggaacaagtgatgtggaattaatgggtgcaacagctgtacagacaatcaataacacacacagttctggaaagaacacatcacttgtgcttgtttgatgagcttgtcacattctaatccctctccccatcctgtttcaattttgggaaacttgtatctgctggtgtcagcaattctgattctgaaataggatcaggcttttactacaacagccttctctttctatttattgtgtcgactcgtggcttatgaataaaggcaggcaaagtttgcagaactgtcttaaggacatttattttttttccctttttaagtaattttacactttagtatctatttcagagtcatatttaaaactatttattagtgactacagtacatgagacaacaaggttactgagattacaattcttcaaaggttaatgataatgtggtttatactgtgccttaatagtaatgctatttaagatatttatttttaagttttactatgctgcactctaaagaaaggaactttagatgtgacactgtaaaattatgtattcatctcatggcataaattatttagtaagtctagatgtagcgtattaaatattaacctattcaactaaagatgttgacttggatttatttaaattcatatgtgcactgtataagagagtactcttacattaacacattttagtttagtttttagatttttttttaaacgatatattgctagtttcatgcttcctcctctgattttgcctgtgtagatttcatttattggtaattcattagtttaacactattatgtagtttttaaatgctgctttacatttttcttctgaaactgcaatacttgcaatttttattcttaaactaaattgaatactattttacactgtattggatttttatacttgaacaatttcatacaagggaagacaggttagcatttttatggactttctccattatcactggatttactttaagtattcccatactagacagtgttatgtaatgtagacatgactctcctgtgcaaattatttattcgttgtgtatattgctttataacatttcagatcttctaatctattcacttgtattaaatataatttttaaaaa

SEQ ID NO: 583 - DNA, 1805 bp, Homo sapiens
tgacgcccccttctcggccgccagccctccacacctcatctgccttgctccacctccctagtgcacccgctccagccccgtctgcccaggagggcgcttggatttccttctccgcggcgcgtatctaacccttcctgcatgtatttcactgcaggctgaagaaagctcagtctcaattgtgtttcctgcctgtcagcctcttgcctcctaaacgtgtaccatttccacttgatgtcatcacgcagaaggggtgaaagagactcggtgacagatacagaaatgaacacacctgtgagtactggatgcctgtgagcttgccattacctgcactgcaaagacacagggcggtggcctctgagaagcagctccttccccttcaccttggccttgcccttcctgctcacggtccaccatggagacgctgtcccaggactctctgctggaatgtcagatctgtttcaattactacagcccccggcgcaggcccaagttgctggactgcaagcacacctgctgttcagtgtgcctgcagcagatgaggaccagccagaaggatgtgcggtgcccctggtgccgcggtgtcaccaagctgcctcccggcttctccgtgtcgcagctcccggacgacccggaggtcctggctgtcatcgccattccacacacttccgaacacaccccggtcttcatcaaacttcccagcaatgggtgctacatgctgcccctgcccatctccaaggagcgtgcgctgctgcccggagacatgggctgccgcctgctgcccgggagccagcagaagtccgtcaccgtggtgaccatccctgctgaacagcagcctctgcaaggtggggctccccaggaggcggtggaggaggagcaggacaggcggggcgtggtgaaaagctccacctggtcgggggtgtgcactgtcatcttggtggcttgcgtcttggtcttcctcctcggcatcgtgcttcacaacatgtcttgcatttctaagcgcttcactgtgatatcctgtggctgaagagggctgcagggaagtctcttgtgggtgccaacttaggggttgagcaggttgatgatgagatcccagtgagaagatggggggcaacactgaccatttggtgctgagcgctggcctctgggttgcctcttgattaccccaagacagacacaaagggcagaaggtgcggtctcaacaagataccaggtgaattgttctgagtgttgatggcaacagcttggaagatgattgcatgcatcctcataatcatgtattcaatggactgtaatttatgatttttcaaaatcatgttacaagatagacatattctacttagacgttaaactgtacaagtgcgtacaatgtgaccttctctaaatgcggtagattcaaacaaagatgctctgtagacaagtagaattaaacctgcgaatccgtgtaaaaattcagtgaagacatgcactgctggcttctttattttttttttctttttattgaaacccagtcttcatttagttgctaaggcttttaatacattttgaatggcaccaaaacaaaataagtcaaaatggacagtcattttatttggaggaaatatttgaacaagtgtctccaatgtgttgtgttttgtcatgaaccttcattttcttcacttgtaattagagcttgctacgtgtttatggaactgaaagctcaacaggggagcaataaaccgagaaatcatgagaaatgtctaatcccatgggaaaacctgtatgccgattttcctcaagccatctcacaaaataagaatttcaaatgt

SEQ ID NO: 584 - DNA, 938 bp, Homo sapiens
gttgactaagtcaataatcagaatcagcaggtttgcagtcagattggcagggataagcagcctagctcaggagaagtgagtataaaagccccaggctgggagcagccatcacagaagtccactcattcttggcaggatggcttctcatcgtctgctcctcctctgccttgctggactggtatttgtgtctgaggctggccctacgggcaccggtgaatccaagtgtcctctgatggtcaaagttctagatgctgtccgaggcagtcctgccatcaatgtggccgtgcatgtgttcagaaaggctgctgatgacacctgggagccatttgcctctgggaaaaccagtgagtctggagagctgcatgggctcacaactgaggaggaatttgtagaagggatatacaaagtggaaatagacaccaaatcttactggaaggcacttggcatctccccattccatgagcatgcagaggtggtattcacagccaacgactccggcccccgccgctacaccattgccgccctgctgagcccctactcctattccaccacggctgtcgtcaccaatcccaaggaatgagggacttctcctccagtggacctgaaggacgagggatgggatttcatgtaaccaagagtattccatttttactaaagcagtgttttcacctcatatgctatgttagaagtccaggcagagacaataaaacattcctgtgaaaggcacttttcattccactttaacttgattttttaaattcccttattgtcccttccaaaaaaaagagaatcaaaattttacaaagaatcaaaggaattctagaaagtatctgggcagaacgctaggagagatccaaatttccattgtcttgcaagcaaagcacgtattaaatatgatctgcagccattaaaaagacacattctgtaaaaaaaaaaaa

SEQ ID NO: 585 - DNA, 101517 bp, Homo sapiens
gagcagtcgtgcattcccagcctcgcctcgggtgtagggattgcatagaaaagcaaaactacacagtcttgactgtgtagttttgtttttaggattagaggctcaccgattcatgtcggagatggtcagaaaaaccaactctccataggacgtcgtttcagaagcaaccttgggcttagtcccaccctttttaggcactcttgagaaatcagagtgcctagaaagatgacaactcaagcaccgacgtttacgcagccgttacaaagcgttgtggtactggagggtagtaccgcaacctttgaggctcacattagtggttttccagttcctgaggtgagctggtttagggatggccaggtgatttccacttccactctgcccggcgtgcagatctcctttagcgatggccgcgctaaactgacgatccccgccgtgactaaagccaacagtggacgatattccctgaaagccaccaatggatctggacaagcgactagtactgctgagcttctcgtgaaagctgagacagcaccacccaacttcgttcaacgactgcagagcatgaccgtgagacaaggaagccaagtgagactccaagtgagagtgactggaatccctacacctgtggtgaagttctaccgggatggagccgaaatccagagctcccttgatttccaaatttcacaagaaggcgacctctacagcttactgattgcagaagcataccctgaggactcagggacctattcagtaaatgccaccaatagcgttggaagagctacttcgactgctgaattactggttcaaggtgaagaagaagtacctgctaaaaagacaaagacaattgtttcgactgctcagatctcagaatcaagacaaacccgaattgaaaagaagattgaagcccactttgatgccagatcaattgcaacagttgagatggtcatagatggtgccgctgggcaacagctgccacataaaacacctcccaggattcctccgaagccaaagtcaagatccccaacaccaccgtctattgctgccaaagcacagctggctcggcagcagtccccatcgcccataagacactccccttccccggtcagacacgtgcgggcaccgaccccatctccggtcaggtccgtgtctccagcagcaagaatctccacatcccccatcaggtctgttaggtctccattgctcatgcgtaagactcaggcatccaccgtggccacaggtcctgaagtgcctcccccttggaagcaagagggctacgtggcctcctcatctgaggctgagatgagagagacaacgctgacaacctctactcagatcaggacagaagagagatgggaagggagatacggtgtccaggagcaagtgaccatcagtggtgctgcgggtgctgccgccagtgtgtcggccagtgctagctacgcagcagaggctgttgccactggtgctaaagaggtgaaacaagatgctgacaaaagtgcagctgttgcgactgttgttgctgccgttgatatggccagagtgagagaaccagtgatcagcgctgtagagcagactgctcagaggacaaccacgactgctgtgcacatccaacctgctcaagaacaggtaagaaaggaagcggagaagactgctgtaactaaggtagtagtggccgccgataaagccaaggaacaagaattaaaatcaagaaccaaagaagtaattaccacaaagcaagagcagatgcacgtaactcatgagcagataagaaaagaaactgaaaaaacatttgtaccaaaggtagtaatttccgcagctaaagccaaagaacaagaaactagaatttctgaagaaattactaagaaacagaaacaagtaactcaagaagcaataagacaggaaactgagataactgctgcatccatggtggtagttgccactgcaaagtccacaaaactagaaacagtcccgggagctcaagaagaaactaccacacaacaagatcaaatgcacctaagttatgaaaagataatgaaggaaactaggaaaacagttgtacctaaagtcatagttgccacacccaaagtcaaagaacaagatttagtatcaagaggtagagaaggcattactaccaaaagagaacaagtgcaaataactcaggagaagatgagaaaggaagccgagaaaactgccttgtctacaatagcagttgctactgctaaagccaaagaacaagaaacaatactgagaactagagaaactatggctactagacaagaacaaatccaagttacccatggaaaggtggacgttggaaaaaaggctgaagctgtagcaacagttgttgctgcagtagaccaggcccgagtcagagagcccagagagcctgggcatcttgaagaatcctatgctcagcagaccactttggagtacggatataaggaacgcatttccgccgcaaaggtagctgagcctccccaacgtccagcctcagaaccccacgttgtccctaaagcagtcaagcctagagtaatccaggctccttctgagactcatatcaaaactactgatcaaaagggaatgcacatatcatcacagatcaagaaaactacagatctaacaacggaaagattagtccatgtggataaacgcccccgcacagctagccctcactttactgtttcaaaaatttctgttcctaagacagaacatggatatgaggcatcaatagccggtagtgctattgccacattacaaaaagagttgtcagccacatcttctgctcagaagatcaccaaatcggtgaaggctcctactgtgaagcccagtgagactagagtaagggcagagcccacacccttgccacagttccccttcgctgacacaccagatacttacaagagtgaagctggcgttgaggtgaaaaaggaagtaggggtgagcatcactggcaccaccgtccgtgaagagcgctttgaagtactgcacggacgcgaagccaaggtaacagaaacagcaagagtaccagcacctgttgaaattcctgttactccaccaactttggtctcgggcttaaaaaatgtgactgtcatagaaggtgaatctgtcaccttggagtgccacatctctggatacccatccccgacagtgacatggtacagggaagactaccaaatcgaaagttccattgacttccagataaccttccagagtggaattgctcgtcttatgattcgcgaagcatttgcggaagacagcgggcgatttacttgcagtgctgtaaatgaggctggaaccgtcagcacatcctgctatctggctgtgcaggtgtcagaagaatttgaaaaggaaaccacagccgtgactgagaaatttactacagaagagaaacgctttgttgagtcaagagatgtggttatgactgatactagcctcacagaggaacaagcagggcctggagaacctgccgcgccttactttattacaaaaccagtggtccagaaactggtggaaggtgggagcgtggtgtttggatgccaagttggcggcaacccaaagccccatgtatactggaaaaaatctggtgttcctctaaccactggatacagatacaaagtgagttacaacaaacaaaccggtgaatgcaagctggtgatttctatgacttttgctgatgatgctggagaatacactattgttgttcgcaataagcatggagaaacttctgcatctgcttccttgcttgaagaagctgattatgagttactgatgaagtcccagcaagaaatgctttatcagacacaagtgactgcatttgttcaagaacctaaagttggagaaacagcacctggatttgtatactctgagtatgaaaaagagtatgaaaaagaacaagccttaattaggaagaaaatggccaaagatactgtagtggtcagaacttatgtagaagatcaggaattccatatttcttcctttgaagagagacttattaaagaaattgaatatagaataataaagactacattagaagaacttcttgaagaagatggagaagaaaagatggcagttgacatttctgaatctgaagctgttgaatcaggatttgattcaagaatcaagaattatagaattcttgaggggatgggtgtcacttttcattgcaagatgtctggatatccattaccaaagattgcttggtacaaagatggcaagcgcatcaaacatggagaaagataccaaatggactttctacaagatggcagagctagtctgcgtatacctgttgttcttccagaagatgaaggaatctacactgcatttgccagcaatattaaaggaaatgcaatttgctcagggaaattgtatgtggagcctgctgcaccacttggagctccgacttacattcccacactagagccagtgagcagaatcagatctctctctccacgttcagtgagcaggtctcctatacgcatgtctcctgcacggatgtcacctgcaaggatgtctcctgcacggatgtcccctgcaagaatgtcccctggacgtaggctggaggagacagatgagtcacaacttgagagactatataaaccagtctttgtgttaaaacctgtttctttcaaatgtttagaagggcaaactgccagatttgacttaaaggttgttggtagacctatgccagagacgttctggtttcatgatggccagcaaattgtcaatgactatacccataaagtagtcattaaagaagatggtactcaatcactaattattgtccctgccacacccagtgattctggggaatggactgtggttgcccaaaacagggcaggcagatcttcaatttcagtgattttaactgtggaagctgtggaacatcaggtaaaaccgatgtttgtagaaaaactgaaaaatgtcaatataaaggaaggttcccgacttgaaatgaaagtcagagctacgggtaaccccaaccctgacattgtatggttgaaaaacagtgacatcattgtgcctcataaatatcccaaaatcagaattgaaggaaccaagggagaagctgcccttaaaatcgattccactgtcagccaagattctgcctggtatactgcgactgctattaataaagctggcagagacactacaagatgcaaagtaaatgttgaagttgagtttgcagagcctgagccagagagaaagttaatcatcccacgggggacatatagagcaaaggagattgcagccccagaactggagcccctccatttgcgatatggccaagagcaatgggaagaaggtgatctctatgacaaagagaaacaacagaaaccatttttcaagaaaaaactcacttccttaagacttaagcgctttgggcctgcccactttgaatgcaggctaacacccattggtgacccaacgatggtggtggagtggctccatgatggaaagccacttgaagcagccaacaggctccgtatgatcaatgaatttgggtactgcagccttgattatggcgttgcatattctagagacagtggtatcattacttgcagagccactaacaaatatggaacagatcacacatctgctacccttattgttaaagatgagaaaagtcttgtggaagaatcccaattgcctgaggggaggaaaggcttacagagaattgaagaattagagagaatggctcatgaaggtgcacttacaggtgtaacaacagatcagaaagaaaagcaaaagccagacattgtcttgtacccagagccagttagagtacttgaaggggagactgcaaggttccgctgcagggtaacaggctaccctcagcccaaagtcaactggtacctcaatggacagctcatccgcaaaagcaaaaggttcagagttcgctatgatggtatccattacctggacatcgtggactgcaaatcatatgacacaggtgaagtgaaggtcaccgcggaaaatcctgaaggtgtgatagagcataaagtgaagcttgagattcaacagagggaagattttaggtctgtccttaggagagctcctgaaccaaggcctgagtttcacgtacatgaaccaggaaagcttcagtttgaagtacaaaaagtggatagacctgttgacaccactgaaaccaaagaagttgtgaagttgaaaagggctgaaagaattacccatgaaaaagtgcctgaagagtcggaagagctgcgcagtaaattcaagcgcagaacagaagagggctattatgaagccattaccgctgtggagctcaagtctcgaaagaaggatgaatcctatgaggaactcctcaggaagacaaaagatgaacttctccactggaccaaagagttaactgaagaggaaaagaaagctcttgccgaagaaggcaaaatcacgattccaacttttaaacctgacaagattgaactaagtcctagtatggaggctccaaaaatcttcgaaagaatccagagccaaacagtgggccaaggatctgatgcacacttccgggtcagagtcgtggggaaaccagaccccgaatgtgaatggtacaaaaatggtgtcaaaattgaacggtctgaccggatctactggtactggcccgaagacaatgtttgtgaattggtcataagagatgtgactgctgaggactctgccagcatcatggtaaaagccatcaacatagctggagaaacctccagtcacgcattcttacttgtccaagccaagcaattgatcactttcacacaggaattacaagatgttgttgctaaggaaaaagacactatggcaacctttgaatgtgaaacttcagaaccatttgtcaaagtgaaatggtataaagatggtatggaggttcatgagggagataaatacaggatgcactctgacagaaaggttcacttcctctccatactgaccattgatacgtctgatgctgaagattacagctgtgtacttgtggaagatgaaaatgtcaaaacgactgctaaacttattgttgaaggtgcagttgttgagtttgtgaaagaacttcaggacatagaagttccagaatcatattcaggagaattagagtgcattgtatccccagaaaatatagaaggaaaatggtatcataatgatgtggagcttaaatccaatggcaaatatacaattacatctcgtcgtggacgtcagaacctcacggtcaaggatgtaaccaaggaggaccagggagaatacagctttgtcatcgacgggaaaaagacaacctgtaaattaaagatgaaaccccgccccattgctatcctacaaggacttagtgaccaaaaagtctgtgagggtgacattgttcagcttgaagttaaagtctccttggaaagtgtggaaggcgtctggatgaaagacggccaagaagtgcagcccagtgacagggttcacattgtgatagacaaacaatctcatatgctgctcattgaagacatgactaaggaagatgctggaaattactctttcaccattccagcccttggcctctccaccagtgggcgtgtctctgtctatagtgtggacgtgataacacctctaaaagatgttaatgtgattgaaggcaccaaggctgtgcttgaatgtaaggtgtcagtccctgatgtgacttctgttaagtggtacttaaatgatgaacaaatcaagcctgatgaccgtgtacaggccattgtgaaaggtactaaacagcgactagtcattaaccgaactcatgcttcagacgaaggaccttacaagctgatagttggcagagttgaaaccaactgtaatctctctgtagaaaaaattaaaattatcagaggtcttcgtgaccttacctgtacagaaactcaaaatgtggtgtttgaggttgagctgtcccactctggaattgatgtcctgtggaattttaaggacaaggaaatcaagcccagttctaaatataaaattgaagcacatggaaaaatatataaattgacagttctaaatatgatgaaagatgatgaaggaaaatacacattttacgcgggagaaaatatgacatctggaaaacttactgtggcaggtggggccatctccaagccactcacagatcagaccgtagctgaatcccaggaagctgtgtttgaatgtgaagttgccaacccagattccaaaggcgaatggttgagggatggcaaacacctaccactgactaacaacatcagaagtgagtctgatggccacaaaaggagacttatcattgctgccaccaaattagatgacattggagaatatacctacaaggtggccacctccaaaacatctgccaaactcaaagttgaagctgtcaaaattaagaagactctgaagaacctcacagtgacagaaacacaggatgctgttttcactgtcgagcttacacaccctaatgtcaaaggtgtccagtggatcaaaaatggagttgtgctggaatccaatgaaaagtatgctatctctgtcaaaggaacaatttactctctgaggattaaaaactgtgccatcgtggatgagtctgtttatggcttcaggcttggaaggcttggagccagtgccagactgcacgtggagactgtcaagatcattaaaaagccaaaggatgtgacagccttggaaaatgccactgttgcctttgaagttagtgtttcccatgacactgttccagtaaaatggttccataagagtgtggaaattaagccaagtgacaaacacagactggtctcagaaaggaaagtccacaagctgatgctgcagaacatctccccctcagatgctggggaatacacagctgtggtcgggcaattggaatgcaaagcaaaactgtttgtggagacattacatattacaaaaaccatgaaaaatatcgaggtgcctgagaccaaaactgcctcttttgagtgtgaggtgtcccacttcaatgtcccttccatgtggctgaagaatggtgtggaaattgagatgagtgaaaagttcaagatagttgtgcagggaaaactccatcagctgatcatcatgaacaccagcacagaggactcggcagaatacacatttgtctgtggcaatgaccaagtcagtgccaccctgacagtcaccccaatcatgattacttccatgctgaaagacatcaacgctgaagaaaaagacactattacttttgaggtgacagtgaactatgaaggcatctcttacaaatggttaaagaatggtgtggaaatcaaatcaactgacaagtgccagatgagaaccaaaaagctcacacactcactgaacatcaggaatgttcactttggggatgctgctgactacacctttgtggctggaaaagcaacatcaacagccacactttatgtggaagctcgtcatatagaatttaggaaacacattaaggacattaaggtactggagaagaagcgagccatgtttgaatgtgaagtttctgaacctgacatcactgtacagtggatgaaagatgaccaggaactgcagatcacagacagaataaagattcagaaggagaaatatgtccaccgccttctgatcccatccacccggatgtctgatgctgggaagtacacagtggtggcaggaggcaacgtgtcaactgcaaaactctttgtagaaggcagagatgttcgcatccgaagtattaaaaaggaggttcaggtcattgagaaacagcgtgctgttgttgaatttgaggtcaatgaagacgatgttgatgcccactggtataaagatggcattgaaatcaatttccaagttcaagaacgacacaaatatgtagtggaaagaagaatccaccgaatgtttatctctgagaccagacagagcgatgcaggagaatacacctttgtggcaggaaggaacaggagttctgtcactctctatgtcaatgctcctgaaccgccccaagttctgcaggagctccagcctgtcactgtgcagtctggcaagcctgcccgcttctgtgccgtgatatccggaagaccacagcccaaaatttcctggtacaaggaagagcagctgctttccactggcttcaagtgcaaatttcttcatgatgggcaagaatacacgcttttgctaattgaagccttcccagaggatgcggcagtctatacctgtgaagccaagaatgactatggtgttgccacaacatcagcttcactctcagtggaagttccagaagttgtgtctcctgatcaggaaatgcctgtttatccacctgccatcatcaccccgcttcaggacactgtcacttctgaagggcagccagcccgttttcaatgccgggtttctggaacagatctaaaagtgtcgtggtacagcaaagacaagaaaatcaagccatctcggttctttagaatgactcaatttgaagacacttatcaactggaaattgccgaagcttatccagaagatgaaggaacttacacgtttgttgctagtaatgctgtaggccaagtatcaagcacagccaacctgagtctggaagctcctgaatcaattttgcatgagaggattgaacaagagattgagatggaaatgaaagctgccccagtgatcaagaggaaaatcgaacccctggaagtagcactgggccacctagccaaattcacctgtgagatccaaagtgctcccaatgtccggttccagtggtttaaagctggccgagaaatttatgagagtgacaagtgttctattcgatcttcaaagtatatctccagccttgaaatcctgagaacccaggtggttgactgcggcgagtatacatgcaaagcttccaatgagtatggcagtgtcagctgtacagccacactaactgtgacagaggcatatccaccaacctttctctccagacctaagtcccttacaacttttgtgggtaaggcagccaagttcatctgcacagtgacagggactcctgtgatagaaaccatttggcagaaagatggtgctgcactctcaccttcacctaactggaggatttccgacgcagaaaacaaacacattttagaactctcaaaccttaccattcaagatagaggagtttattcttgtaaggcttccaacaagtttggagcagacatctgccaagcagagttgatcatcattgataagccacatttcattaaagaattagagcctgtgcagtccgctatcaataagaaggtccaccttgagtgccaagtagatgaagacagaaaagtcacagttacgtggagcaaagatgggcaaaaactccccccagggaaagattataagatctgttttgaagataaaatagcaacacttgagattcctttggccaaactgaaagattcaggaacctatgtctgtacagcttcaaatgaggctggaagcagctcctgctcagccacagtcactgtcagagagccaccatccttcgtgaagaaggtggatccctcttatttaatgctcccaggtgaatcagcacgcctccattgcaagctgaaaggctcacctgtgatccaggttacttggtttaaaaataacaaagaactcagtgaaagtaacacagtccgaatgtattttgtcaattctgaggctatacttgatattacggatgtaaaagttgaagacagtgggagttactcatgtgaagcagtgaatgacgtcggcagtgatagctgcagtactgaaatagttatcaaagaacctccttctttcatcaaaactcttgagcctgcagacatagtgagaggaacaaatgctctacttcagtgtgaagtctcaggcactggaccatttgaaattagctggttcaaagacaagaaacaaattcgaagtagtaaaaaatacagattgttttctcagaagtctcttgtgtgtctggagatcttttcgtttaatagtgcagatgttggtgaatatgaatgtgttgttgctaatgaagtcggcaagtgtggctgcatggcaacccacttactcaaagaacctccaacctttgtaaagaaagtagatgatttgattgcactaggaggacaaaccgttaccctgcaagctgctgtgagagggtcagagcccatttctgtcacatggatgaaaggtcaagaggtcatcagagaagacggaaaaatcaaaatgagcttttccaatggtgttgcagtcttgataatccctgatgttcagattagttttggaggcaaatacacgtgcctggctgaaaatgaagctggaagccaaacatctgttggggaattaatagttaaagaacctgccaaaatcattgagcgagcagaactgatccaggtgacagcaggagatcccgccacactggagtacacagtggcaggcacgccagaactgaagcccaaatggtacaaagatgggagacccttggtcgccagtaaaaaataccgaataagttttaaaaacaatgttgcccagctcaaattttattcagctgagctgcacgacagtggccaatacacatttgagatttccaatgaagtgggcagcagctcctgtgagactacattcactgtattagatcgagacattgctccattttttaccaaacccttgcgcaacgtggatagtgttgttaatggtacctgcagactggactgcaaaattgcaggctccctccccatgagggtgtcctggtttaaggatggcaaagaaatagctgcttctgacagatacaggatagcatttgtggaaggcacagcctctttggagatcatcagagtagacatgaatgatgcagggaatttcacttgtcgagccacaaattccgtgggaagcaaagacagcagtggagccctgattgtgcaagaaccacccagttttgtaactaaacccggctcaaaggatgttctgcctggctcagcagtctgcctgaagagcactttccaaggatctactcctctcacaatcagatggtttaagggcaacaaagagctggtttctggtggaagctgctatattaccaaagaagctttagagagttccctggaactctatttagtaaaaacctctgattcgggcacgtacacatgtaaagtcagcaatgtcgctggaggggtggaatgcagtgcaaacttgtttgtaaaagaacctgccacatttgttgaaaagttagagccatcacagctgttaaagaagggagatgccacccagctagcctgcaaagtaactggtacccctccaattaaaataacatggtttgcaaatgatagagaaattaaggagagcagcaaacacagaatgtcttttgtggagtctactgcagttctaagactgacagatgttggcatcgaagacagtggtgaatatatgtgtgaggcccaaaatgaggctggcagtgaccactgcagtagcattgtaatagtcaaagagtcaccttattttaccaaggaatttaagccaattgaagtcttaaaggagtacgatgtcatgttgctggctgaggtggcaggcactcctccctttgagatcacttggttcaaagataacacaatcctgcgaagtggtagaaagtataagactttcattcaggatcatctggttagcctgcagatcctcaagtttgtagctgcagatgctggcgaataccagtgtcgggtgaccaatgaggtgggcagcagcatctgcagtgccagggtgactttaagagaacccccatccttcataaagaagatcgagagtaccagctccctccggggaggcacagctgccttccaggccactctgaagggctccttgccaattacggtgacttggctaaaagacagcgatgaaatcactgaagacgataatataagaatgacctttgagaacaatgtggccagtttgtacctcagtggcattgaagtcaagcatgatgggaaatatgtctgtcaggccaaaaatgatgcaggaatacaaagatgttctgcattactctcagtaaaagaacctgcaacaatcaccgaggaagctgtgtctatagatgtcacccaaggagacccagccactttgcaggttaaattttcagggactaaggagattacagccaaatggtttaaagatggccaagaactgaccctgggctcaaaatataaaatcagtgtcactgatacagtctcaatactgaagattatttctacagaaaagaaagatagtggagaatatactttcgaggtccaaaatgatgttgggaggagcagctgcaaggctagaattaatgtattagatcttatcatacctccttcattcaccaaaaagctgaagaaaatggacagcattaaaggttctttcattgatttagaatgtatagtggctgggtcacatcccataagcatccagtggttcaaagatgaccaagaaatatcagctagtgaaaagtacaaattctcttttcatgacaatactgccttcttggaaatcagccagctggaaggtacagacagtgggacatacacttgttctgccacaaataaggcagggcacaaccaatgcagtgggcatctgacagtcaaagaacccccttactttgtggaaaagccacagtcacaagatgtcaatcccaacacaagggtacagttaaaggctcttgtgggtggcactgcacccatgacaataaagtggtttaaagataacaaagagttacactcaggagcagcccgctcagtttggaaggatgacacctctaccagtctagagctctttgcagccaaagctaccgattctggaacctacatttgccaactaagcaatgatgttggcacagcaaccagcaaagccactctctttgtaaaagaacctcctcaattcattaagaagcccagtccagtcttagtgctgaggaatggacagtcaacaacatttgaatgccaaataacaggcactcctaaaatccgagtgtcttggtatctagacgggaatgaaataacagccattcagaaacatggcatttccttcattgatggtttagccactttccagatttctggtgccagggtagaaaatagtgggacttatgtgtgtgaagctcgaaatgacgcaggcacggcgagctgcagcattgaactcaaagtgaaagaaccccccacctttatcagagagctgaagcctgtggaggtagtaaaatatagtgacgtggagctggagtgtgaagttacgggaacacctccgtttgaagtcacttggctgaagaataacagggaaattcgaagcagcaaaaaatacacattgaccgacagagtgtctgtgtttaacctccatataaccaagtgtgacccttcagacactggggaataccagtgcattgtatccaatgaaggcggcagctgctcatgcagtactagagttgccctgaaagaaccaccatcattcattaagaagatagaaaataccactactgttttgaaaagttctgccacctttcagagtaccgtggcaggttctcctcctatttctataacctggctaaaggatgatcagattcttgatgaagatgataatgtctatatttcatttgtggacagtgtggccacacttcaaatcagaagtgtggataatggacacagtgggagatatacctgtcaagccaagaatgagtcaggagttgagaggtgttatgctttccttttagtacaagaaccagctcaaatcgtagagaaagctaaatcagttgatgttacggagaaagatcccatgaccttggaatgtgttgtggctggaacaccagaactcaaagtgaaatggcttaaagacgggaaacaaatagttcccagtagatacttttcaatgagttttgaaaataacgtggccagttttagaattcagtcagtaatgaagcaggacagcggtcagtacactttcaaggtggaaaatgacttcggaagcagtagctgtgatgcctacttaagagtgctagatcaaaatattcctccatcattcaccaaaaaattaaccaaaatggataaagttctgggctcttctattcatatggagtgcaaggtgtctggttcacttcccattagtgctcagtggtttaaggatggaaaagaaatatctacaagtgcaaaatacagacttgtgtgccatgagagatctgtgtctctggaagttaataatctggaattagaagatactgcaaattacacatgcaaagtgtcaaatgtagcaggagatgatgcatgcagtggcatcttaactgtgaaagaaccaccaagcttcctagtgaaacctgggcgacagcaagccatacctgattctacagtggaatttaaggcaatactaaaaggaacaccaccatttaaaataaaatggtttaaggatgatgtggaacttgtctcaggtcctaaatgtttcattggcttggaagggtcgactagcttcttaaatctctactcagtggatgcttctaagactggacagtatacttgccatgttaccaatgatgttggtagcgactcttgtactacgatgttgcttgtgacagaaccaccaaagtttgtaaagaaattagaagcctccaaaattgtgaaagcaggtgactcttcacgacttgaatgcaagatagctggatccccagaaatcagagttgtgtggttccgaaatgaacatgaacttccagccagtgataagtacagaatgactttcattgactcagtggccgtcatacagatgaacaatctcagtactgaggacagtggagatttcatttgtgaggctcagaatcccgctggcagcacaagctgcagtaccaaggttatagtaaaagagccacctgtttttagcagcttccctcctatagtagaaacccttaaaaatgctgaagtcagtcttgaatgtgaactttcgggaacaccaccgtttgaggtggtatggtacaaagacaagcggcaactcagaagcagcaagaaatacaagattgcatccaaaaacttccacacaagtattcacattctcaatgtggacacttcagacatcggtgaataccactgcaaagcacagaatgaagtgggaagtgatacttgtgtttgtactgtaaaattgaaagaaccaccaagatttgtctccaaactgaacagcctcactgttgtagccggagagcctgctgaattacaagcatccatagaaggcgcccagcctatttttgtccagtggcttaaagagaaggaagaagtgattagagaaagtgaaaacatcaggattacatttgtggaaaatgttgcaactctacagtttgcaaaagcagagccagctaatgctggaaagtatatctgccaaatcaagaatgatggtggaatgagggagaacatggccacactgatggtcttagagcccgcagtcattgttgagaaggcaggaccgatgacggtgactgtaggagaaacgtgcactctggagtgtaaggtggctggcactccggaactctctgttgaatggtacaaggatggaaagctgttgaccagcagccaaaaacacaaatttagcttctacaacaaaatctcttccttaaggattctctcagttgaaaggcaagatgcaggcacatacactttccaggttcaaaataatgttgggaaaagcagctgcacagctgtggttgatgtttcagaccgagcagttcctccctctttcacacgaagactgaaaaatactggtggggtgttaggtgcttcttgcatcttggaatgcaaagtagctggatcatcacctatttcagttgcctggtttcatgagaaaaccaagattgtcagtggagcaaagtaccaaaccacattttcagataatgtctgcacattgcagttgaattctctggattcctcagatatgggcaattacacatgcgtggctgctaatgtcgctgggtctgatgaatgtcgtgcagtgctaactgtacaagaaccaccctcttttgtgaaagaacctgaacctttggaagtactaccaggcaaaaatgtaaccttcacaagcgttattagaggaacccctccattcaaagtcaactggttcagaggtgccagagaactagtgaaaggagaccggtgcaacatctattttgaagacactgtggcagaactggaattatttaatattgacatatctcagagtggggaatacacctgtgtggtttctaacaacgctggccaagcatcttgcactacccgtctctttgtgaaagaaccagctgcatttttgaagagattaagtgatcattctgtagaaccagggaagtccataattctggagagcacctacactggaacacttccaatttctgtcacttggaaaaaggatggttttaacataactacctctgaaaaatgtaacatagtcacaacagagaaaacttgtatcctggaaattctgaatagcacaaaaagagatgcagggcagtattcctgcgagattgaaaatgaggcaggaagggatgtttgtggagctctggtatctacattagaaccgccttattttgttacggaactggaacctctggaggcagcagttggagattcggtttctttacaatgccaagttgctgggacaccagaaattacagtgtcttggtacaaaggagataccaaattacggccaactcctgaatacaggacctactttacaaacaatgtggccacacttgtttttaataaagtgaacatcaatgacagtggagagtacacatgcaaagcagaaaatagtataggaactgcttcttctaagactgtgttcagaattcaagagcgccaactcccaccttcttttgcaagacaattaaaggacattgaacaaactgtggggttacctgttacactcacttgtcgattaaatggctctgcacccatccaagtgtgctggtatagagatggagtacttttaagagacgatgaaaatctacagacttcatttgtagataatgtggcaactttaaaaattttgcaaactgacttgagtcactctggccagtactcttgctcagcttccaacccacttggaacagcatcttctagtgctagactcacagcaagagaacccaagaaatctcccttctttgacatcaagcctgtatctatagatgttattgctggagaaagtgctgattttgagtgtcatgttactggtgctcaaccgatgcgaatcacttggtcaaaagataacaaggagatccgtcctggaggaaactatacaatcacatgtgtgggaaacactcctcatttgagaattcttaaagtaggcaaaggagactctggtcaatatacttgccaagcaaccaatgatgttggcaaagacatgtgctcagctcagctcagtgtaaaagaacctccaaagtttgttaagaaattagaagcttcaaaagttgcaaagcagggagaatccattcaactggaatgtaaaataagtggctccccagaaatcaaagtttcatggttccgaaatgacagcgaacttcatgaaagttggaaatacaacatgtcattcattaattctgtggcattgcttacgatcaatgaagctagtgctgaagacagcggggactacatttgtgaggctcataatggtgttggtgacgccagctgcagcacagcgttgacagtgaaagcacctcctgttttcacccagaagccttctccagtaggagctcttaaaggttctgatgtgattctccaatgtgaaatttcgggaactcccccatttgaagtagtatgggttaaagatcgaaagcaggttagaaacagcaagaaatttaaaatcacttcaaaacattttgatacaagtcttcatatccttaatcttgaagcctccgatgtcggggaatatcactgcaaagctactaatgaggtgggaagtgacacgtgttcttgctctgtcaagttcaaagaacctccacgattcgtgaaaaagctaagtgacacctcaacccttattggggatgctgttgagttacgggccatagtggagggcttccagccaatttctgttgtctggctgaaagatagaggtgaagtcatcagagagagtgaaaataccaggatttcattcattgataacattgcaaccctccagctggggagtccagaagcatctaattctggaaaatatatatgccaaatcaaaaacgatgctggaatgagagaatgctctgcagtcttgactgtactagaaccagcaagaatcatagagaagcccgaacccatgactgtcactactggaaatccttttgcattagagtgtgtagtgactggaacaccagaactctcagccaagtggttcaaagatggaagagaattgtctgcagacagcaaacatcacattacattcatcaataaagtggcttcccttaaaatcccctgtgccgaaatgagtgacaaaggattatatagctttgaagtgaaaaacagtgttggcaaaagtaactgcactgtatccgtccatgtttctgatcggattgtgcctccttccttcatccgcaagctgaaagacgtgaatgccatcctgggggcctcagttgttttggagtgccgagtctctggctcagccccgatttcagttggctggtttcaggatggaaatgagattgttagtgggcccaaatgtcagtccagcttttcggaaaacgtctgtactttgaatctgagcttgttggagccctccgacacaggcatatacacgtgtgtggctgccaatgtagctggttccgatgagtgctcagcagtcctgactgtgcaagaaccaccatcttttgaacaaacccctgattctgtggaagttttgcctggaatgagcctcacattcaccagtgtcatcagaggcacccctcctttcaaggtcaagtggtttaaaggcagcagggaactggtgcctggggagtcatgcaacatctctctggaagattttgtcacagaactggagttgtttgaggtgcagccattagaaagtggagactattcttgcctcgttacaaatgatgctggcagtgcttcctgtaccacacatctttttgtgaaagaaccagccacctttgtgaaaagattggctgatttcagtgttgagacaggaagccccatagttctcgaggccacatacactggcacacctccaatctcagtgagctggataaaggacgagtatcttatttcacaatctgagagatgcagtattactatgacagaaaaatctaccatactggaaattcttgagagcacaatagaggattatgcacagtacagctgcctgatagaaaatgaggctggtcaagatatctgtgaagctctggtgtctgtcttagaaccaccgtactttattgaacctctggaacatgtggaagcagtcattggagaacctgcaactttacagtgtaaagtggatggaactccagaaattagaatttcttggtataaagaacacacaaagctacgatcagctcctgcatataaaatgcaattcaaaaataacgttgcttccttagtaatcaacaaagtggatcacagtgatgtgggagagtattcatgcaaggcagacaacagtgtgggggcagtcgcttcttcagctgtgcttgttatcaaagcgcgcaaacttccacctttctttgcaagaaaactgaaagacgttcatgagactctaggcttcccagttgcatttgaatgccgcatcaatggctcagaacctcttcaagtgtcttggtacaaggatggggttcttttgaaagatgatgctaatttgcagacatcttttgttcataatgtagcaactcttcagattttacaaactgaccagagccacatagggcagtataattgctctgcttctaatcctcttgggactgcttcatccagtgccaagctcattctctcagagcatgaagtgcctcctttctttgatctaaagcctgtatcagtagatcttgctcttggagaaagtggtacttttaaatgtcatgtaactgggactgcaccaatcaaaatcacttgggccaaagataaccgagagattcgccctggaggcaactacaagatgactttggtagaaaatactgccactctgacagttctcaaagtaggcaaaggcgatgccgggcagtacacctgctatgcaagcaacatcgctggaaaagactcttgttctgctcagctgggtgtacaagaaccacccaggttcattaagaagctagaaccttcaagaattgtgaaacaggatgaattcacaaggtatgaatgcaaaatcggtgggtctccagaaatcaaagttttatggtataaggacgagactgaaattcaagagagcagtaaattcagaatgtcattcgttgactcggtggctgtgctggaaatgcacaatctcagtgttgaagacagtggagactacacctgtgaggcccacaatgcagcaggcagtgccagcagcagcacatccttaaaagttaaagaaccacccattttccgcaaaaagcctcatcctatagagacactgaaaggagctgatgttcaccttgaatgtgagcttcagggcactcccccatttcacgtttcttggtataaagacaagagagaacttaggagcggcaagaagtacaagataatgtctgagaacttcctaaccagtatccacatcctgaatgtcgatgctgcagacattggggaatatcagtgtaaagccacaaatgatgtgggaagcgacacttgcgttggttccatcgctctcaaagcaccaccaagatttgtgaagaagctcagtgacatatctactgtcgttggtaaagaagttcagctgcagactaccattgaaggcgctgaacccatttcagtggtgtggttcaaagataagggagaaatcgttagagaaagtgacaacatatggatttcttattcagaaaacattgcaaccttacagttttcaagagtggaaccagccaatgctggaaaatacacttgtcagatcaaaaacgatgctgggatgcaagagtgcttcgccacgctatccgttctcgagcctgcaacaattgtagaaaagccagaatccataaaagttaccacgggagacacctgtaccttggagtgtacagtagctggcacccctgaactcagtactaagtggtttaaggatggaaaagagctaacaagtgacaacaaatacaaaataagcttcttcaacaaagtatccggccttaagatcatcaatgtagcaccgagtgacagtggggtatacagttttgaggtgcagaaccctgttggcaaagacagctgcacagcttcattgcaggtttcagaccgaaccgttcctccttcattcacaagaaaattgaaagagacaaatggtctatccggctcctcagttgtaatggagtgtaaagtctatgggtcacctccaatctctgtctcctggttccatgaaggaaatgagatcagtagtggaaggaaataccagaccaccctgacagataatacttgtgctttaactgtgaacatgctggaagaatcagacagtggtgactacacatgtatagctactaatatggctggttctgatgaatgtagtgctcctttgactgtgagagaaccaccatcttttgttcagaaacctgatcccatggatgttttaactgggaccaatgtaactttcacaagtatcgtaaaaggaacacctcctttcagtgttagctggttcaaaggtagcagtgaactagtaccaggtgacagatgcaacgtgtctttggaggattcagttgctgaactggagttgttcgatgtagatacatcacaaagtggagaatatacttgcatagttagcaatgaagctggcaaggcttcttgtacaacacatctctacataaaagccccagccaaatttgtgaagaggctgaatgattacagcatagagaaaggaaaacccctgatcctagagggtacattcactggaactcctcccatttcggttacctggaagaaaaatggcataaatgtaactccttctcagaggtgtaatataactacgactgaaaaatcggcaatcctggaaattccaagtagcacagtagaggatgcaggacaatacaactgctacattgaaaatgcctctggaaaagattcctgttcagcacaaatactcatactagaaccaccgtattttgtcaagcagttggagccggttaaggtgtctgttggagattctgcctctctacaatgccagcttgctggaacccctgaaattggggtatcctggtataaaggagatacaaaattgagacccactacgacttacaaaatgcattttaggaataatgttgctacactggttttcaaccaggttgatattaatgatagtggagaatatatctgcaaagctgaaaacagcgtgggagaagtttctgcatcaactttccttaccgttcaagagcaaaaacttccaccatcattttctcgacaattgagagatgttcaagaaacagttggactgccagttgtttttgattgtgccataagtggatcagaacctatctccgtgtcttggtataaagacggcaagccattgaaagacagcccaaatgtacaaacatcatttttagacaatacagccacactcaatatttttaaaactgaccggagccttgcaggccagtattcctgcacagctacaaaccctataggctctgcttcttccagtgccaggctcattctcacagaggggaagaacccacccttctttgacatccgtcttgcccctgtggatgctgtggtgggagaaagtgctgactttgagtgccacgtcacgggcacacaaccgataaaggtcagctgggccaaagacagcagagaaatacgaagtggcggaaagtaccagattagttatctggaaaacagcgcccacctgacagtcctcaaagtagacaaaggagattctggacaatatacctgctatgctgtgaatgaagtgggaaaagactcttgcacagctcagctgaatataaaagagcggctcatcccaccaagtttcactaaaagactctcagagacagtagaagaaacagaagggaattctttcaaacttgagggacgtgtggctggttcccaacctataactgttgcctggtacaaaaataatatagagatacaaccaacttctaactgtgaaataacattcaagaacaacacgttagtgctgcaagtcaggaaagcaggcatgaacgacgctggtttgtacacatgcaaagtgtccaatgatgcaggctctgctctgtgcacgtcttcaatcgtcatcaaagaacctaagaagccacctgtatttgatcagcaccttactccagtaacagtgagtgaaggagaatacgtgcagctcagctgccatgtccagggatctgagccaattaggatccagtggttgaaggctggcagggaaataaagccttcagacagatgcagcttcagctttgctagtgggacagctgtactggaactcagagatgtggctaaagcagattcgggagattatgtgtgtaaagcttcaaatgtggctggaagtgacactaccaaatcaaaagtgaccattaaagacaaaccagctgtggccccagcaaccaagaaagctgcggtagatggaagactcttttttgtgtcagaacctcagagtatcagagtcgtagaaaaaaccactgcgaccttcattgcaaaagttggaggtgacccaatcccaaatgttaaatggacaaaagggaagtggagacagctgaaccaaggaggtcgtgttttcatccaccaaaaaggcgatgaagcaaaactggagattagggacaccacaaaaactgattctgggttataccgatgcgtggcatttaacgaacatggtgaaattgaaagtaatgttaacttacaggtggatgaaaggaagaaacaagagaaaattgaaggcgatcttagagcaatgctgaaaaagactccaatcttaaagaaaggagctggagaagaagaggaaattgatatcatggaacttctcaaaaatgttgatcctaaagaatatgaaaaatatgcccgcatgtatggaatcactgacttccgaggtcttcttcaagcatttgaactgctcaagcaaagccaagaagaagagacacatagactggaaattgaggaaatagagaggtcagagagggacgaaaaggaatttgaggaacttgtatcatttattcagcaaagactgtcacagacagagcctgtcactctgatcaaggacattgaaaatcagacagttttgaaagataatgatgctgtctttgaaattgacattaaaattaattatccagaaatcaagctttcgtggtacaaaggaactgaaaaactggaacccagtgataaatttgaaataagcattgatggtgaccgacatacactcagagtcaaaaactgtcaacttaaagaccagggcaattatcgattggtttgtggtccacacatcgctagcgctaaactaactgtaattgagcctgcatgggaacggcatcttcaggatgtgactctgaaagaaggccagacttgcaccatgacatgccaattttctgtaccaaatgtaaaatctgaatggttcagaaatggcagaatccttaaaccccaaggtagacataaaacagaagtggaacacaaagtccataaattgaccattgcagatgttcgagcagaagaccagggtcagtacacctgcaaatatgaagaccttgaaacttcagcagaactcagaatcgaagctgaaccaattcagtttacaaagcgcatacagaacatcgtggtgagtgagcatcagtctgccacctttgagtgtgaagtgtcctttgatgatgccattgtaacatggtacaaaggaccaacagaactgacagagagccagaaatacaacttcaggaatgatggccgctgccattatatgaccatccacaatgtgaccccagacgatgaaggtgtctactcggtcatcgctcggctggagccaagaggtgaagcaagaagcacggcagagctgtacctaacgacgaaagaaatcaaacttgagctgaagcctcctgatattcctgactccagagttccaatcccaaccatgcctatcagagcagtgccaccagaagaaatccctcctgtggttgctcctcctatcccccttttgctaccaacacccgaagaaaagaaaccaccaccaaaacgtattgaagttaccaaaaaggctgtgaagaaagatgccaaaaaagttgttgcaaagcccaaagagatgacaccacgtgaagagattgtcaagaagcctccacctcctactaccttaattccagcaaaagctcctgaaatcattgatgtatcctctaaagctgaagaagtaaaaataatgactataaccagaaagaaagaggttcagaaagaaaaagaagctgtgtatgagaaaaagcaagcagtccacaaggagaagagagtcttcattgaatctttcgaagaaccttatgacgaactggaggtagaaccatacacagagccatttgaacaaccttattatgaagaaccagatgaagactatgaagagattaaggtagaagctaaaaaagaagttcacgaggaatgggaagaagattttgaagaagggcaagaatactatgaaagggaagaaggctatgacgaaggggaggaagagtgggaagaggcttaccaagaaagggaagtaattcaagttcaaaaggaggtctatgaagaatcacatgagagaaaagttccagccaaagtacctgaaaagaaagcaccaccacctcctaaagttataaagaagccagtaattgaaaaaattgaaaagacttctcgaagaatggaggaagaaaaagttcaagtcaccaaagtacctgaagtttcaaagaagattgttccacaaaaaccttcccggactccagtacaggaagaagttattgaagtgaaagtaccagctgtgcatacaaagaagatggttatttcagaagaaaagatgttctttgcttctcacacagaggaggaggtgtcagtcacagtccccgaggtacaaaaggaaattgttactgaagagaaaattcacgttgccatttccaaaagggttgaaccaccacctaaagtccctgagctacctgagaaaccagctccagaagaagtggcccctgttcctatccctaaaaaagtggagcccccagcaccaaaagttcctgaggttcccaagaaacccgtgccagaggagaaaaagccagttcctgtgcctaagaaggaacctgctgctcccccaaaagtcccagaggtgccaaagaaacctgtccctgaagaaaagattcccgttcctgttgcaaagaaaaaggaagctcccccagctaaagttcctgaagtacagaagggagttgtgacagaagaaaaaataaccattgtaactcaaagagaggaatctccaccaccagcagtgccagaaataccaaagaagaaagttcctgaagaaaggaaacctgttcctcggaaggaggaagaagttccaccaccaccaaaagtgccagctctgcctaagaaacccgtcccagaggagaaagttgcagtgccagttcctgtcgctaagaaagctcctcctccccgagctgaagtctctaagaaaactgttgtagaagaaaagagatttgttgctgaagaaaaactatccttcgcagttcctcaaagagtggaagtcacgcggcacgaagtatctgcagaggaggaatggagttactcagaagaggaggaaggtgtgtccatttcagtttatagagaagaagaaagagaggaggaggaagaagcagaggttacagaatatgaagtgatggaagagcctgaggaatatgttgtggaagaaaagctgcacattatttctaagagagtggaagctgagccagctgaagtgacagagaggcaggagaagaaaattgtactgaaaccaaaaattcctgctaaaatagaggagcctccaccggctaaagttcctgaagcacctaagaaaattgtgccagaaaagaaagttcctgctccagttcctaaaaaggaaaaggtgcccccacctaaagtgccagaagagccaaagaaaccagttccagaaaaaaaggttcctccaaaagtcattaagatggaagaacctctcccagccaaagtgactgagaggcacatgcaaattacccaggaagaaaaagttcttgttgctgtaactaaaaaagaggcgcctccaaaagcaagagtgccagaggaaccgaagagagctgtcccagaagaaaaagttctgaaactcaaacctaaaagagaggaggaaccaccagctaaagtgactgaattcagaaaaagagtggttaaagaagaaaaagtatcaattgaagctccaaaaagagaacctcaacccatcaaagaagtaactataatggaagagaaagaaagggcttataccctagaagaagaagctgtttcagtacaacgggaagaagaatatgaggaatatgaagaatatgattataaagaatttgaggagtatgaaccaacagaagaatatgaccaatatgaagaatacgaggagcgggagtatgaacgatatgaagagcatgaagaatacatcacagaaccagagaagcctatccctgtaaagcctgtcccagaagaaccagttcccacaaaaccaaaggccccaccggctaaagtgctgaagaaagctgtccctgaagaaaaagtaccagtgcccattcctaagaaactcaaacctccaccacccaaagtgcctgaagaaccaaagaaagtttttgaggaaaaaatacgtatttcaattaccaaacgtgaaaaagagcaggtgactgaacccgctgctaaagtgcccatgaagcccaagagggttgtcgcagaagaaaaagtacctgtccctagaaaagaagtagcaccacctgttagagtgccagaagtgcctaaagaacttgaaccagaagaggttgcctttgaagaggaagttgtaacccatgtagaagaatatcttgtagaagaagaagaagagtacattcatgaagaagaggagttcataactgaggaagaagtggtgccagtgataccagtcaaagtgcctgaggtacccaggaaacctgttccagaagagaagaaacctgttcctgttcccaagaagaaggaagctccaccggcaaaagtgcctgaggttcctaagaagccagaggagaaagttcctgtgcttattcctaaaaaggagaagcctccgccagcaaaagttcctgaagtgcccaagaaacctgtgccagaggagaaagtaccagtaccagttcctaaaaaggtggaagctccacctgccaaagtgccagaggtacccaagaagcctgtgcctgagaagaaggtgccagttcctgctcctaagaaagtggaggctccacctgcaaaagtgccagaggtgcccaagaagctcatcccagaagaaaagaaaccaacacctgttccgaaaaaagtggaagcaccaccacccaaagtgccaaagaaacgtgaaccagttccagttcctgtagctctacctcaggaagaggaagttctatttgaagaagaaattgttcctgaagaggaagttctacctgaggaagaggaagttctacctgaggaagaggaagttctacctgaagaagaggaagttctacctgaagaagaggaaattccacctgaggaagaggaagttcctcccgaagaagaatatgtacctgaggaagaagaatttgtacctgaagaagaagtccttccagaagttaaacctaaggtgccagtacctgcaccagtgcctgaaattaagaagaaagtgacagagaagaaagtggtcattcccaagaaagaggaggctccccctgccaaagttcctgaggtgcctaagaaggtggaagaaaaacgaatcattctccctaaagaagaggaagttctaccagttgaagtgactgaggagcctgaagaagagcctatttcagaagaagaaatcccagaagaaccacctagcatagaggaagttgaagaggtggcaccacctagagtgcctgaagtgattaagaaagcagtacctgaagcacctactcctgttcctaaaaaagtggaggcaccaccagctaaagtgtcaaagaaaattcctgaggaaaaagtacctgttcctgttcagaaaaaagaggcacccccagccaaagtgcctgaagtaccaaagaaagtcccagaaaagaaagtccttgtgcctaaaaaggaagctgttcccccagctaaagggagaactgtccttgaagaaaaagtatcagttgccttccgccaagaagtagtagtaaaagaaagactagaattagaagtagtagaagcagaagtggaagaaattccggaagaagaagagttccatgaagttgaagaatattttgaagaaggcgagtttcatgaagtagaagaattcatcaaattagaacaacatagagttgaagaagaacacagagttgaaaaagttcatagggtaatagaagtttttgaggctgaagaagtggaagtatttgaaaaaccaaaagctccacctaaagggcctgagatatctgagaaaatcatccctccaaaaaaaccgcccactaaagttgttcctcgaaaagagccaccagctaaagtaccggaggtgcctaagaaaattgtggtagaagaaaaagtacgtgttcctgaagagcccagagttccaccaactaaagtgcctgaagtgctgccaccgaaggaagtggtcccagaaaagaaagtaccggtgcctcctgccaaaaagccagaagctccacctcctaaagtgcctgaggctcccaaagaagttgttcctgaaaagaaagtgccagtgcctcctcctaaaaagcctgaagtgccacccacaaaagtcccagaggtgccaaaggcagctgtcccagaaaagaaggtgcctgaagctattcctcccaaaccggaaagtcctccccctgaagtgccagaggctccgaaagaagttgttcctgaaaagaaagtgccagcggctcctcctaaaaagcctgaagtcacacctgttaaagtgcctgaggctcccaaagaagttgttcctgaaaagaaagtgccagtgcctcctcctaaaaagcctgaagtgccacccacaaaagtcccagaggtgccaaaggtagctgtcccagaaaagaaggtgcctgaagctattcctcccaaaccggaaagtcctccccctgaagtgttcgaggagcctgaggaagttgccctagaagagcctcctgctgaagttgtggaagagccagagccagcggcgcctccacaagtgaccgtaccacctaagaaacctgtcccagaaaagaaagcacctgctgtcgttgccaaaaaacctgaactaccaccagtgaaagtgcccgaggtgcccaaggaggttgttcctgaaaagaaggtgcctctggtggttcccaaaaagccagaagccccacctgctaaagtgcctgaagttccaaaagaagttgttccagaaaagaaagtagctgttcccaaaaagccagaagtcccaccagcaaaagtgccagaagtgccaaagaaacctgtcttggaagagaaaccagctgttcctgttccagaaagagcggagtctcctcccccagaagtatatgaagaacctgaggaaattgctcctgaagaggaaattgctcctgaagaggaaaagccagttcctgttgcagaagaggaggaaccagaggttccacctccagcagtgcctgaagagcccaagaaatcatcccagagaagaaagttcctgtcatcaaaaaaccagaagcaccgcctcctaaagaacctgaacctgaaaaggttattgagaagccaaaactcaaaccaagacccccacctcctccacctgctccacctaaggaagatgtgaaggagaaaatattccaacttaaagctattccaaagaagaaagttcctgaaaaacctcaggttccagaaaaagtggagcttacacctctgaaagtgcctggaggtgaaaagaaagttcgcaaattacttccggaacgtaaacctgaaccaaaggaagaagttgttctgaaaagcgttctaagaaaaagacctgaagaagaagaacctaaagtagaacctaaaaaactagaaaaagttaaaaaacctgcagtaccagaaccaccacctccaaaacctgttgaagaggttgaagtacctactgttacaaaaagggaaaggaagattcctgaaccaacaaaagtgcctgaaatcaagccagcaatacctctccctgcacctgaaccgaaaccaaagcccgaagcagaagtgaaaacaatcaaaccacctcctgtggaacctgaaccaacccccatcgctgccccagtaacagtgccagtggttggaaagaaagcagaagccaaagcacctaaggaagaggctgccaagccaaaaggtcctatcaaaggtgtacccaaaaagactccttcaccaatagaagccgaaaggagaaagttaaggccaggaagtggtggagagaaacctcctgatgaagccccgttcacctaccagctaaaggctgtgccactgaagtttgtgaaagaaatcaaagacatcatcttgacagaatcagagttcgttggctcttcagcaatctttgaatgtttggtctccccttccactgcaattacaacctggatgaaagacggtagcaatatccgtgagagtcccaagcacaggtttattgcagatggtaaagacagaaagctgcacatcattgatgttcaactttccgatgctggtgaatacacctgtgttttacgtttgggaaacaaagaaaagacctccacggctaaacttgttgtagaagaacttcctgtgcgttttgtaaaaacactggaagaggaagtcacagtggtcaaaggacagccattgtacttgagctgcgagttaaacaaagagcgtgacgtggtctggaggaaggatggcaagattgtggtggagaaacctggccgaattgtgccaggcgtcattggcttgatgcgggctctgaccatcaacgatgcagatgacacagatgctggaacatacacagttactgtggaaaacgccaacaacctggagtgttcatcttgcgtaaaagtagtagaagtcattagagattggctggtgaaacctatacgagaccagcatgtgaaacccaaggggacagctatttttgcctgtgatatagcaaaagatactccaaacattaagtggttcaaaggatatgatgaaatccctgcggaaccaaatgataagactgaaatactgagagatggaaatcatctgtacctcaaaattaagaatgctatgccagaagatattgctgagtatgcagtggaaattgaaggaaaaagataccctgcaaagctgacacttggagagcgtgaagttgaactgcttaaaccaatagaggacgttaccatttatgagaaagaaagtgcaagctttgatgcagaaatctcagaggcagacattcctggacaatggaaactgaaaggagaacttctaaggccctcacctacttgtgaaatcaaagcagaaggtggaaaacgcttcttaactttgcacaaagtcaaactggaccaagctggtgaagtcctctaccaggcccttaatgcaattacaactgccattttgacagtaaaagaaatcgaacttgactttgctgtgcccctgaaggatgtcactgttccagaaaggcgacaggctcgattcgaatgtgtcctcacccgagaggcaaatgttatatggtccaaaggacctgatataattaagtcatctgacaaatttgatatcatcgctgatggaaagaaacatattcttgttattaatgattctcaatttgatgatgaaggggtctatactgctgaggtggagggcaagaagacctcagctcggttgtttgtcacaggtataagactgaaattcatgtcacctcttgaagatcaaacagtaaaagaaggtgaaacagcaacttttgtttgtgaactttctcatgaaaaaatgcatgtagtctggttcaaaaatgatgccaaactccatacaagcagaacagtactcatctcttctgagggcaagactcacaaattggaaatgaaagaagtgacattggatgatatatctcagataaaagctcaagtcaaggagctgagctccacagcacagctgaaggtcttagaggccgatccctacttcactgtgaaattacatgacaaaactgcagtggagaaggatgagattactttgaagtgtgaagtgagcaaagatgtaccagtgaaatggttcaaagatggtgaagagattgtcccttcacccaaatattctatcaaggcagatggcctgcgccgcatcttaaaaatcaaaaaggcggaccttaaagataaaggcgaatatgtgtgtgactgtggcacagacaagaccaaggcaaatgttactgttgaggctcgactaataaaagtggaaaagcctctgtacggagtagaggtgtttgttggtgaaacagcccactttgaaattgaactttctgaacctgatgttcacggccagtggaagctgaaaggacagcctttgacagcttcccctgactgtgaaatcattgaggatggaaagaagcatattctgatccttcataactgtcagctgggtatgacaggagaggtttccttccaggctgctaatgccaaatctgcagccaatctgaaagtgaaagaattgcctcttatcttcatcacacctctcagtgatgttaaagtcttcgagaaagatgaggctaagtttgagtgtgaagtatccagggagcccaaaacattccgttggctaaaaggaacccaggaaatcacaggtgatgacagatttgagcttataaaggatggcactaagcattcaatggtgatcaagtcagctgcttttgaagatgaagcaaaatacatgtttgaagctgaagataagcacacaagtggcaaactgatcattgaaggaatccggctcaaattcctcacccctctcaaagatgtaactgccaaagagaaggaaagtgctgtatttactgtggagttatctcatgataacatccgagttaaatggttcaagaatgaccagcgcctacacaccaccaggtcggtctcaatgcaagacgaagggaaaactcattcgatcacattcaaagacctgtctattgatgacacctcccaaattagagtagaagctatggggatgagttcagaagctaaactcactgtgcttgagggagacccatattttacaggaaaacttcaagattatactggtgtagagaaagatgaagttattctacagtgtgaaattagcaaagcagatgcaccagtgaaatggtttaaggatgggaaggaaataaagccatccaaaaatgctgttattaaggcagatggcaagaaacgcatgctaatcctaaagaaagccttgaaatcagatattggacagtacacctgtgactgtgggacagataagacctcaggaaaacttgacattgaggatcgggaaattaaactggtgcgacccctgcacagtgtggaggtgatggagactgagacagcacgctttgaaaccgaaatctctgaagatgatatccacgccaactggaaactcaagggagaggccctactccaaacacctgattgtgaaattaaggaagaaggcaaaatacactcccttgttttgcacaactgtcgcctggaccagacgggtggggtggatttccaagctgccaatgttaaatctagtgcccacctccgagttaagccacgagtaattggtcttctgaggcctttaaaggatgtcaccgtgactgcaggggaaacagccaccttcgactgcgagctctcctacgaagatatcccagtggaatggtatctcaaagggaagaaactagagcccagcgataaggtggtcccacgttcagaaggaaaagttcatacacttactctgagggatgtaaagttagaagatgctggggaagtccaactaacagcaaaagatttcaaaactcacgccaacctctttgtgaaagaacccccagttgaattcactaagcctcttgaggaccagacggtcgaagagggagccactgcagtgctggagtgtgaagtctccagagaaaatgctaaggtgaaatggttcaaaaatgggacagaaatcctcaaaagcaagaagtatgaaattgttgctgatggcagggtcagaaaacttgttatacatgactgtaccccagaggatattaaaacatacacttgtgatgctaaggattttaagacttcctgtaacctgaatgtcgtgcctcctcatgtggaattcttaagaccactcaccgaccttcaagttagagaaaaagaaatggctcgatttgagtgtgaactttcccgagaaaatgctaaggttaagtggtttaaagatggtgctgaaattaaaaagggcaaaaaatatgacatcatatccaagggagcagtgcgcattcttgtcatcaacaaatgtctactggatgatgaagctgaatattcctgtgaagtaaggacagcgagaacttctggcatgctgacagttctggaagaagaagctgtctttaccaaaaatcttgccaacattgaagttagtgaaacagacactataaaactggtttgtgaagtctccaaacctggcgcagaagtgatttggtataaaggggatgaggagatcattgaaacaggaagatatgaaatactgactgaaggacggaagagaatcctggtcattcagaacgctcaccttgaggatgctggcaactacaactgtcgactcccaagctctcgaaccgatggcaaagtcaaagtacatgaactggctgctgaatttatctcaaagcctcaaaaccttgaaatacttgaaggagaaaaggctgaatttgtctgctctatatcaaaagaaagctttccagtccagtggaagagggatgataagacacttgaatctggagataaatatgacgttattgctgatggtaaaaagagggtcctagttgtgaaagatgccacattacaagatatgggcacttacgttgtcatggtaggggccgccagagcagcagctcacttgacagtcattgaaaaactcaggatcgtagttcctcttaaggacacccgggtgaaggaacaacaggaagttgtcttcaactgtgaagtcaatactgaaggtgccaaagccaaatggttcagaaatgaagaagctatatttgatagttcaaaatacatcattctccaaaaagacctagtctacaccctcagaattagagatgcacacttagatgaccaagccaactataatgtgtctttgaccaatcacagaggtgaaaatgttaaaagtgcagccaatctaatagtagaagaggaagaccttaggattgttgagcctcttaaagatattgaaacaatggagaagaaatctgtcacattctggtgcaaggtgaatcgtctcaatgtaacactgaagtggaccaaaaatggtgaagaagtgccttttgacaaccgtgtctcatacagagttgataagtacaagcacatgttaaccattaaagactgtggcttcccagatgaaggtgaatacattgtcactgctggacaagataaatctgttgctgagcttctcatcatagaagccccgacagaatttgtggaacacttggaagatcagacagtcactgagttcgatgacgctgtcttctcctgccagctctccagagagaaagccaatgtaaaatggtacagaaatgggagagaaatcaaagaaggcaaaaaatacaaatttgaaaaagatggaagtatacacagactcattataaaagattgcaggctggatgatgagtgtgaatatgcttgcggggtagaagacaggaagtctcgtgctagactttttgtggaagaaattcctgttgagatcatcaggcctccacaagatattcttgaagcccctggtgctgatgttgtctttttagcagaactcaataaagataaggtggaagtccaatggctaagaaataacatggttgttgtccagggtgataaacaccagatgatgagtgaaggaaagatacatcgactacagatttgtgatattaagccccgtgaccagggtgaatacagatttattgccaaagacaaagaagccagagctaagcttgaactggcagctgcaccaaaaatcaagacagctgaccaagaccttgtggttgatgttggcaagcctctgacaatggtggtgccatatgatgcctaccccaaagcagaagctgaatggtttaaagaaaatgaacctttatctacaaaaaccattgatactacggctgaacaaacttctttcagaattttagaagccaagaaaggagacaaagggaggtataaaattgtgcttcagaacaaacatggaaaagcagaaggattcatcaatttaaaagttattgatgttcctgggccagtacgtaacttagaagtgacagaaacatttgatggtgaagtgagccttgcttgggaagaacctttaactgatggtggaagcaaaatcataggttacgttgttgaaagacgtgacattaagagaaagacctgggttctggccacagaccgtgcagagagttgtgagtttactgtcactggtctacagaaaggaggagttgagtacctattccgtgtgagtgcaagaaacagagttggcactggtgagccagtagaaactgacaatcctgtagaagcaaggagtaaatatgatgttccaggccctcctttgaatgtaaccatcactgatgtgaatcgatttggtgtctcactgacatgggaaccaccagagtatgatggaggtgctgagatcacaaactacgtcattgaattaagagacaagacttctatcaggtgggatactgccatgactgtgagagctgaagacctgtctgcaactgttactgatgtggtagaaggacaggagtacagtttccgagtgagagcccaaaatcgaattggagttggaaaaccaagtgcagccacacccttcgtcaaagttgctgatccaattgagagaccaagtcctcctgtaaacctaacttcctcagatcagactcagtcatcagttcagctcaaatgggaacctcctctgaaagatggaggaagcccaatattaggctatataattgagcgatgcgaagaaggaaaagataattggattcgttgcaatatgaaacttgtccctgaactgacttacaaggttaccggattggaaaaaggaaataaatatttatatagagtatctgcagaaaataaagctggtgtttcagatccatctgaaattcttggtcctctcaccgctgacgatgcatttgttgaaccaacaatggatttaagtgcatttaaagatggtctggaagttattgtcccaaatcctatcacgatcctggttccaagtacaggctatccaaggccaactgcaacctggtgttttggagataaagtactagaaacaggggaccgggtgaaaatgaagaccttgtctgcctatgccgaacttgtcatttctccaagtgaacgttcagacaagggcatttatacactgaaattagaaaaccgtgtgaaaacaatttctggggaaattgatgtcaatgtaattgctcgcccaagtgcacccaaagaattgaaatttggtgatataaccaaggactcagtacatttgacttgggaaccacctgatgatgatggaggaagtccgttaactggatacgttgttgaaaaacgagaagtcagccggaaaacatggactaaagttatggactttgtgactgatctagaattcacagttcctgatcttgttcaaggaaaagagtacttatttaaagtttgtgctcgtaacaaatgtggccctggagaacctgcatatgttgatgaacctgtaaatatgtcaactcctgcaacggtacctgacccaccagagaatgttaaatggagagatcgaacagccaatagcatcttcttaacatgggatccacctaaaaatgatggtggttcacgcatcaaaggatatatagttgaaagatgtccacgtggttctgataaatgggttgcctgtggagaacctgttgcagaaacaaaaatggaagtgacaggtcttgaggaaggcaaatggtatgcctaccgcgtgaaggccttaaacaggcagggtgctagcaaaccaagcagacccacagaggaaatccaggctgtggacacacaagaggccccagaaatcttcctcgatgtgaagctccttgctggtctcactgtaaaagctgggaccaagattgaacttcctgccaccgtaaccggaaaacctgaacctaaaataacttggacaaaggctgatatgattctgaagcaggacaaaagaattaccattgaaaatgtccctaagaaatccacagtgactattgttgatagtaagagaagtgacactggcacatatatcattgaggctgtgaatgtgtgtggccgggccactgctgtggtggaagtgaacgtcttagataaacccggaccaccagctgcctttgacatcacagatgtaaccaatgagtcatgtcttctaacatggaacccaccacgcgatgatggtggatctaagatcacaaactatgttgtggagagacgagcaactgatagtgaagtgtggcacaagctctcatccaccgtcaaggatacaaacttcaaggccaccaaattaatccccaataaagagtacatcttcagagttgctgcagaaaacatgtatggtgttggtgaaccagttcaggcctctccaataacagccaaatatcagtttgatccacctggtcctccaactcgcctagaaccttctgatatcactaaagacgcagtgactctcacatggtgtgagccagatgatgatggtggcagcccaatcacaggatactgggttgaaagactggatcctgatacagataaatgggttagatgcaataagatgccagtaaaggacacaacatacagagtgaaaggtctcactaataagaaaaaatacagattccgtgtgttggctgaaaatcttgctggacctggaaaaccaagcaaatcaactgaaccaatcttaataaaggatcccatagatcctccatggccccctggaaaaccaactgtaaaagatgtaggcaaaacatcagtaaggttgaattggacaaaaccagaacatgatggaggtgcaaagattgagtcttatgtcattgaaatgctgaagactggaacagatgagtgggtcagagtggcggaaggggttcccaccactcagcacttgctcccagggctcatggaaggacaggaatactcattccgagttagagctgtgaataaggctggggaaagtgaacccagtgaacccagtgaccctgtgctttgccgggagaagctatatcctccatcaccaccacgctggcttgaagttattaatatcacaaaaaatacagcagacctaaaatggacagttcctgagaaagatggagggtcccccatcaccaactacattgtggaaaagagagacgtcaggcgaaaaggctggcaaacagtggataccactgtcaaggacaccaagtgcacagtcaccccactgactgagggctctttatatgtgttccgagttgctgcagaaaatgctataggacaaagcgactacaccgaaattgaggactctgtgctggccaaagacacctttaccactcctggaccaccctacgccctggcagtggttgatgtgacaaaacgacatgttgacctaaagtgggagccacctaaaaatgatggtggaagaccaatacagagatatgtcattgagaagaaagaaaggttaggtacccgttgggtgaaagctggaaagactgcaggacctgactgtaacttcagagtaactgatgtcatcgaaggaacagaggtccagtttcaggttcgggctgaaaatgaagctggagttggccacccaagtgaacccacagaaatcctatccattgaagatccaacaagtcctccctcaccaccccttgacctacatgtgactgatgctgggagaaaacacattgccattgcttggaagcctccagagaaaaatggtggaagtcctatcataggataccatgttgaaatgtgtccagtaggcactgagaaatggatgagagttaattctcgcccaataaaggacttgaaattcaaggttgaagaaggtgttgttcctgacaaagaatatgtcctgagagtgagagcagtcaatgctattggtgtcagcgagccatctgaaatctctgaaaatgtggttgccaaagacccagactgcaagccaacaattgacctggagactcatgacattattgttattgaaggtgaaaagttaagcattcctgttcccttcagagctgtcccagttccaactgttagttggcataaagatggcaaagaagttaaagcaagtgatagattaacaatgaagaatgatcacatctctgcacaccttgaagttcccaagagtgtccgtgcagatgccggaatttataccattacactggagaataagctcggctcagcaacagcctcaatcaatgtcaaagtcataggcctacctggaccatgcaaagatattaaagcaagtgacattaccaagagttcttgtaagttaacttgggaacctccagaatttgatggtggaaccccaattcttcattatgtcctggagcgcagagaagctgggaggagaacatatataccagtcatgtctggtgagaacaaactgtcatggactgtgaaggatctcataccaaatggtgaatacttcttccgtgttaaagcagtcaacaaggttggtggaggagaatatattgaactgaaaaatccagtcattgctcaagatccaaagcaaccccctgatccacctgtagatgtagaggttcataatcctacagcggaggcaatgactattacatggaagccacctttgtatgatggagggagcaagataatgggctacatcatagagaagattgctaagggtgaagaaaggtggaagagatgcaatgaacacctggtaccaatcctgacctatacagcaaaaggacttgaagaggggaaagagtaccaattccgtgtgcgagcagagaacgccgcgggtattagtgaaccttctcgggctactcctccaaccaaagctgtagatcccattgatgcccccaaagtcattctgagaacaagcctagaagtgaaacgaggtgatgaaatagcacttgatgcaagtatttctggatcaccttacccaactattacatggataaaggatgaaaatgttattgtaccagaggaaattaagaagcgtgcagcacccttggttaggagaaggaagggtgaagttcaagaagaagaaccatttgtcctgcctctgacacagcgtttgagtattgacaacagcaaaaagggagaatctcagctacgcgtccgagattctctccgacctgaccatggtctgtatatgatcaaagttgaaaatgaccacggtattgcaaaagctccttgtactgtcagtgtgttagatacaccgggaccaccaatcaactttgtatttgaagatatcagaaagacctcagtcctttgtaaatgggaaccaccccttgatgatggtggcagtgaaatcataaactacactttggaaaagaaagacaagacaaaacccgactcagaatggattgttgtcacttcaacacttagacattgcaaatattcagtaacaaaactgattgaaggaaaagagtacctcttccgtgtaagagctgaaaacagatttgggccaggtccaccatgtgtttcaaagccacttgtggctaaagatccatttggaccacctgatgcaccagataagcccattgtggaagatgttaccagcaacagtatgctagtgaaatggaatgaaccaaaagataatggaagccccattttgggttactggcttgaaaaacgtgaagttaacagtacacattggtctcgtgtcaacaaaagccttctgaatgccttgaaagccaatgtagatggcttattagaaggactcacctatgtcttcagagtatgtgctgaaaatgcagctggacctggaaagttcagtccaccttcagatcccaaaacagcacatgatccaatctctcctcctgggccacctatcccaagagtcactgacacaagctctacaactattgaactagaatgggaacccccagctttcaatggtggtggggaaattgttggctattttgttgataagcagttggttggcacaaatgaatggtcacgctgcacagagaagatgatcaaggtccgtcagtacaccgtcaaagaaatccgagagggtgctgattacaaacttcgggtgagtgctgtcaatgccgcaggggaaggaccgcctggagaaacacaacctgttactgtggctgaaccacaagagcctccagctgtggaactggatgtttctgtcaagggtggaatacaaataatggctgggaagactcttagaattccagctgtggtgactggtcgccctgtacctacaaaagtatggaccaaagaagaaggggagctggataaagaccgtgttgtaatagacaacgttggaaccaaatctgaactaattatcaaggatgcactgcgaaaagaccatggcagatatgtgattacagctacaaatagctgtggttccaaatttgcagcagccagggtagaagtttttgatgtccctggtccagttcttgacttaaaacctgttgtaacaaacagaaaaatgtgtctacttaactggtctgatccagaagatgatggaggaagtgaaataacaggctttatcattgaaagaaaagatgccaagatgcatacttggagacaaccaatagagactgagagatctaaatgtgacatcacaggtctgcttgagggacaagaatataagttccgtgttattgccaagaacaagtttggctgtggccctcctgttgaaataggaccaattcttgcagttgatccactaggtcctccaacatctccagagaggctcacatacactgaaaggacaaagtccactatcacacttgactggaaagagccccgcagtaatggtggcagtcccatccaaggatatatcattgaaaaacggcgtcatgacaaacctgactttgaaagagttaacaagcgactctgcccaaccacatcttttctggttgaaaatcttgatgaacaccaaatgtatgagttccgtgtcaaagctgtcaatgaaattggtgaaagtgaaccatccctacctcttaatgtagtcatacaagatgatgaagtgcctccaactattaagttgcgtctgagtgttcgaggagacactatcaaagttaaggcaggagagcctgtccacatccctgcagatgtgacaggccttccaatgcctaagattgaatggtccaaaaatgaaactgtaattgaaaaacccactgatgcacttcagataaccaaggaagaggtatcccgaagtgaggcaaaaactgagcttagcattcccaaagcggtccgggaggacaaaggcacttacacagttactgcttccaatcgccttggctcagtgttccgaaatgttcacgttgaagtatatgaccgcccatccccaccaagaaatcttgctgttactgacattaaagctgaatcttgctacttgacatgggatgcccctcttgataatggtggcagtgaaatcacccattatgttattgacaaacgtgatgcaagtaggaagaaagcagaatgggaggaagtcaccaacactgctgtagagaaaagatatgggatctggaaacttatccccaatggtcagtatgagttccgagtcagggcagtgaataaatatggaatcagtgatgagtgcaaatcagataaagtagtcattcaagatccttatcgccttcctggacctccaggaaaaccaaaagttttggcacgcaccaaaggatcaatgctagtgagctggactcctcctttggacaatggtggctctccaattactggctactggctggagaaaagagaagagggaagtccttattggtcacgtgttagccgagcaccaataaccaaagtgggattgaaaggcgtggaatttaatgttcctcgtttgcttgaaggcgttaaataccagttcagagccatggcaataaatgctgcaggaattggtcctcccagtgaaccatcagatccagaggttgcaggagatcccatatttccaccggggccaccttcttgcccagaagttaaagataaaacgaagtcaagcatctcactaggatggaaacctccagccaaagatggtggcagcccaatcaaaggatacattgtagaaatgcaagaagaaggtactactgactggaaaagagtaaatgaaccagacaaacttataactacctgtgaatgtgtggtgcctaatctgaaagagctcaggaagtacagattcagagtgaaagctgtcaatgaagctggtgaatctgaaccaagtgatacaactggggagatccctgccactgatattcaagaggaaccagaagttttcattgacattggagcacaggactgtctggtttgtaaagctggctcacagattaggattcctgctgtcatcaagggacgcccaacaccaaaatcatcttgggaatttgatggaaaggcaaagaaagcaatgaaggatggagttcatgacatacccgaagatgcacagctggagactgctgaaaactcctcagtaattattattccggagtgtaaacgatctcatacaggcaaatacagcatcacagccaagaataaagcaggacaaaagactgcaaattgcagagttaaagtcatggatgtaccaggcccacccaaagatctgaaagtcagtgatatcacaaggggtagttgcagactttcatggaagatgccagacgacgatggaggagacaggatcaaaggctatgttattgagaagaggactattgatggaaaagcctggaccaaagtcaatccagactgtggaagcaccacatttgtagtgcctgatctcctctctgaacagcaatatttcttccgtgtgcgagcagaaaaccgttttggtattggcccacctgtggaaaccattcagaggaccactgccagagatccgatatatcctcctgatcctcctattaaactcaagattggcctcatcacaaagaacacagtgcatctgtcatggaaacccccgaagaatgatgggggctcccctgttacccactatattgttgagtgccttgcatgggaccctactgggacaaagaaagaagcctggaggcagtgcaataagcgtgatgtggaagaactgcaatttactgttgaagacctagtagagggtggggaatatgaattccgagtcaaagctgtcaatgctgcaggagtcagcaagccttcagccactgttggccctgtgactgtcaaagaccagacatgcccaccatcaattgatctaaaagaattcatggaggttgaagaaggaaccaatgttaacattgtggccaaaattaaaggtgtgccattcccgacactaacctggtttaaagctcctccaaagaagcctgataacaaagaacctgttctctatgacacccatgtcaacaaactggtggtagatgatacttgcactttagttattccgcagtctcgcaggagtgacactggcttatataccatcacagctgtaaataatctgggaacagcatcaaaggagatgagactgaatgtcctgggtcgtcctggccctccagtgggacccataaaatttgaatctgtttcagcagatcaaatgacactatcttggtttccacctaaagatgatggtgggtctaagattacaaactatgtaattgagaaaagagaagctaacaggaagacatgggtccatgtctccagtgaacctaaggagtgcacgtacacgattcccaaattgctagaaggccatgaatatgtattccgaatcatggcccagaataaatatggcattggagaacctcttgacagtgaacctgaaacagcaagaaacctcttctctgtccctggagcaccagataaaccaacagttagcagcgtgactcgtaactccatgactgtcaactgggaagagccagaatatgatggaggctctcctgtgacagggtactggctggaaatgaaagacaccacttcaaagagatggaagagagttaaccgagatcctatcaaagccatgactttgggtgtttcttataaagtgactggtcttattgaaggttccgactatcaattccgggtatatgcaatcaatgctgctggcgtgggtccagcaagtctgccatcagacccagcgactgctagagatccaattgcccctcctggtcctccatttcccaaagtgacagattggactaaatcatctgcagatctggagtggtctcccccactaaaagatggtggatccaaagtaactggatacatcgttgaatataaagaagaaggaaaagaagaatgggaaaagggtaaagataaagaagtgagaggaacaaagcttgttgtgacaggattaaaggaaggagcattctacaaatttagagttagagcagtcaacattgctggcattggagaacctggagaggtcacagatgtcattgaaatgaaggacagacttgtttcacctgaccttcagctagatgccagtgtcagagatagaattgttgtccatgctggaggggtgatccgaatcattgcctatgtgtctggaaagcctcctccaaccgtcacctggaacatgaatgaaagaaccttacctcaagaagccaccattgagaccacagccattagctcatccatggtcatcaagaactgccagaggagccatcaaggcgtctattctcttcttgccaaaaatgaagccggagaaagaaagaagacaattattgttgatgtattagatgttccaggtcccgttggaacaccattcctagctcacaacctaaccaatgagtcctgcaaactgacatggttttctccagaagatgatggaggctctccaatcaccaattatgtcattgaaaagcgtgaatctgaccgcagagcatggaccccagtgacatatacagttacccgacaaaatgctactgtccagggtctcattcaaggaaaagcctactttttccgaattgcggctgaaaatagtattggcatgggtccatttgttgagacatcagaggcacttgttatcagagagccaataactgtaccagagcgtcctgaagacctggaagtcaaagaagttactaaaaatactgtaactttgacttggaatcctcctaagtatgatggtgggtcagaaattattaactatgtcctagaaagtcggctcattgggactgagaagttccacaaagttacaaatgacaacttgcttagcagaaaatacactgttaaaggcttaaaagaaggtgatacctatgagtaccgtgtcagtgctgtcaacattgttggacaaggcaaaccatcattttgcaccaaaccaattacttgcaaggatgagctggcacccccaacgcttcacctcgacttcagagataagctcacgattcgagttggtgaagcttttgccctcactggccgttactcaggcaaaccaaagcctaaggtttcctggttcaaagatgaagctgatgtgctggaagatgatcgcactcatataaagactacaccagcaacacttgctttagagaagatcaaggccaaacgttcagattccggcaaatactgtgtggttgtggagaacagtacaggctctaggaaaggtttctgtcaagttaatgttgttgaccgtcctggaccaccagtaggaccagttagttttgatgaggtgaccaaagattacatggttatctcttggaagcctcctttagatgatggaggcagtaaaatcaccaattatattattgagaagaaggaagtgggtaaagacgtctggatgccagtgacatctgcaagtgctaaaacaacatgcaaagtttctaaactacttgaaggaaaagattatattttccggatacatgctgaaaatctgtatggaataagtgatcctctggtgtctgattcaatgaaagccaaagatcgtttcagggttcctgatgcacctgatcagccaattgttacagaagttaccaaagactctgcattagtaacctggaataagccacatgatggaggaaaacccatcacaaactacatcctggaaaagagagaaactatgtctaaacgatgggctagagttaccaaagatcctattcatccatacactaaatttagggttcctgatcttctagaaggatgtcagtatgaattccgggtttctgcagaaaatgaaattggtattggagatccaagcccaccatccaaaccagtctttgctaaagatccaattgctaaaccaagtccacctgttaatcctgaagcaatagatacaacatgcaattcagtcgatctaacttggcagccaccacgtcatgatggtgggagcaagattctgggttatattgttgagtaccagaaagttggagatgaagagtggagaagagccaatcacacccctgagtcatgtcctgaaactaaatataaagtcaccggtcttcgggacggtcaaacctataagtttagagtgttagcagtcaatgcagctggtgaatcagatccagctcatgttccggagccagtcctagtaaaagacaggcttgaaccccctgagttgattcttgatgccaacatggcaagagaacaacacattaaagttggtgatactctaagacttagtgccatcatcaaaggagtgccattcccaaaagtaacttggaaaaaagaagacagagatgctccaactaaagcaagaattgatgtgactccagttggtagcaagcttgaaattcgtaatgctgcccatgaagatggtggaatttattctttaacagtggagaatccagctggttcaaaaactgtctcagtaaaagtacttgtattagataaacctgggccacctagagatctggaagtcagtgaaattaggaaagattcatgttaccttacttggaaagaaccactggatgatggtggttctgttattaccaattatgtggttgagaggagagatgttgccagcgcccagtggtcacctctctcagctacatcaaagaaaaagagtcacttcgctaagcatctgaatgaaggcaaccagtacctcttccgagtagctgcggagaaccagtatggacgtggtccttttgttgaaacaccaaaaccaatcaaggctttggatcctctccatcccccagggccacccaaggacctgcaccatgtagatgttgacaagactgaagtctccctagtctggaataagccggatcgtgatggtggttctccaatcactggatatttggtagaatatcaagaagaaggcacccaggactggattaaatttaagactgtgacaaacttagagtgtgtggttactggactacaacaaggaaagacctatagattccgtgtaaaagctgaaaacattgtgggtcttggtctccctgacacaactatcccgatagaatgtcaagaaaaactagtgcctccatccgtggagctagatgtgaaattaattgaaggtcttgtggtaaaggctggaaccacagtcagattccctgctattataagaggtgtgcctgttcctactgcaaagtggacaaccgatgggagtgagattaaaaccgatgagcactacacagttgaaacagacaacttctcatcagtacttaccattaagaactgcttaaggagagacactggggaatatcaaatcacagtttccaatgcagccggtagcaaaacagtagccgtacatcttactgttcttgatgttcctgggccaccaacaggtcctattaatattctggatgttactcctgaacacatgactatctcatggcagccacctaaggatgatggaggaagccctgtgataaattatattgttgagaaacaagatacaaggaaagacacgtggggtgttgtctcttccggaagcagtaagacaaagctgaaaatcccacatctgcagaagggctgtgaatatgttttccgagttagagcagagaataagataggtgttggtcctccccttgactccacacctactgttgctaagcataaatttagtcctccgtctcctcctggtaaaccagtggttactgacattactgaaaatgcagcaacagtgtcttggaccctgccaaaatctgatggtggcagtccaataactggctactatatggaacgtcgagaagtaactggcaaatgggtgagggtcaacaaaacacctatcgctgacctgaagttcagagtgactggactctatgaaggaaatacatatgagtttagagtttttgctgaaaatcttgcaggactaagcaaaccatccccaagttctgatccaataaaagcttgccggcccatcaaaccacctggaccacctattaatcctaaactgaaagacaagagcagagaaacagctgatttggtgtggacaaagcctctcagtgatggtggtagccccattctaggatatgtagtggaatgtcagaaacctggcacagcacaatggaacaggattaataaagatgaactcattaggcaatgtgcctttagggtacctggactaattgaaggaaatgagtacagattccgtataaaggcagctaatattgtaggagagggtgagccaagagaactagcagaatctgtgattgcaaaagatatccttcatcctccagaagtagaacttgatgttacttgtcgtgatgttattaccgtgagagtaggccaaactatccgcattctagctcgagtcaaaggcagacctgaaccagacataacttggactaaggaaggcaaagtattggtccgagaaaagagggtggaccttattcaggatctacctcgtgttgagttacaaattaaagaagctgttagagctgatcatggcaagtatatcatctcagctaagaacagcagtggacatgcccaaggttcagccatcgttaacgtccttgacagacctgggccttgccagaatttgaaggttaccaatgtaaccaaagagaactgtacaatttcttgggaaaacccactagataatggtggctcagaaataacaaacttcatagtagaatatcgcaaaccaaaccagaaaggctggtcaattgttgcatcagatgtcactaaacgattaatcaaggccaaccttttagccaacaatgaatactatttccgagtttgtgcagagaataaagtaggtgttgggccaaccatcgaaacaaaaactcccattctggctattaaccctattgacagaccaggtgagcctgaaaaccttcacattgcagataaaggaaagacatttgtctatctaaagtggcggaggcctgactatgatggtggcagtccaaatctgtcatatcatgttgagagaaggcttaagggctccgatgactgggaaagagtgcataaaggaagcattaaagaaactcactacatggttgacagatgtgttgaaaaccagatttatgagttcagagtgcaaacaaagaatgaaggtggggaaagtgactgggtgaagacagaggaagttgttgtgaaagaagacttacaaaaaccagtacttgatctgaaattaagtggggtcctaactgtcaaagcaggggacaccattaggcttgaggcaggggttagaggcaaaccattcccagaagttgcatggaccaaggacaaagacgctacagacttaacaagatcaccaagggtcaagattgatacccgtgctgattcatctaaattttctcttactaaagcaaagcgaagtgatgggggtaaatatgtagttacggcaactaacacggctggcagttttgtggcctatgccactgtcaatgttttagataagcctggtcctgtgagaaatctgaaaattgttgatgtgtccagtgataggtgtactgtttgctgggatccaccagaagatgatggtggctgtgaaatccaaaattatattctagaaaaatgtgagacaaagcgaatggtttggtctacctattctgctactgtcttgacacctggtactacagtaacacgtctcatagaaggaaatgaatatattttcagagtccgtgcagaaaataaaataggcacagggcctccaacagaaagtaaaccagtcatagccaaaaccaagtatgataaacctggtcgccctgatcccccagaagtcactaaagtaagcaaagaagagatgactgtggtttggaatccacctgaatatgatggtggaaagtctataactggatactttttggagaaaaaggaaaagcattcaacacgatgggtccctgtcaacaagagtgcaatccctgagagacgtatgaaagtacagaatctcctcccagaccatgaatatcagttccgtgtcaaggcagaaaatgaaattggaattggagaaccaagcttgccttcaagaccggtggtggcaaaagaccccatagagccacctggtccaccaaccaatttcagagtggttgatacaaccaaacattccataactcttgggtggggaaaaccagtctatgatggtggtgcaccgatcattggatatgttgtggaaatgagaccaaaaatagcagatgcgtctcctgatgaaggctggaaacggtgtaatgctgcagcacagcttgtacgcaaggaattcactgttaccagcttggatgaaaaccaggaatatgagttcagggtgtgtgcccaaaaccaagttggtattgggcgccctgcagagctaaaggaagctatcaaacctaaagaaatactagaacctccggagattgatttggatgccagcatgaggaaactggtcatagtgagagcaggatgccctattcgtctctttgctatagtgagaggacgaccagcccctaaagtcacttggcgaaaagttggcattgataatgtggtcagaaaaggacaagttgatctggttgacactatggccttccttgtcatccccaattctacccgtgatgactcaggaaaatattccttaacacttgtgaacccagcaggagaaaaggctgtattcgtaaatgtcagagtattagacactcctgggcctgtgtctgatttaaaagtttcagatgtcactaaaacatcatgccatgtgtcctgggcccctcctgaaaacgacggtgggagccaagtgacacattatatcgtggagaaacgtgaggcagacagaaagacatggtcgaccgttaccccagaagttaagaaaacaagcttccatgtaaccaatcttgtccctgggaatgagtattacttcagagtaactgctgtcaacgaatatggccctggcgtcccaacagatgtcccaaaaccagtgcttgcatcagatcctctaagtgagccggatcccccaaggaaattagaagtgactgaaatgaccaagaacagtgccaccttagcctggttacctcccctacgtgatggaggtgctaaaatcgatggctacatcactagttacagagaagaagagcagcctgcagatcgctggacagagtactcagtggtaaaagatctgagccttgttgtcactggcctaaaggaaggaaagaaatacaaatttagagtagcggccagaaatgctgttggagtcagtttgccaagagaagctgaaggagtgtatgaagccaaagaacaactgttgccaccaaagatccttatgccagagcaaataactatcaaagctgggaaaaaactccgaattgaagcccatgtgtatggaaagcctcatcccacctgtaaatggaaaaaaggagaagatgaagttgtcacatccagccacctggcagtgcataaagcagacagctcttcaattctgatcataaaagatgtgactaggaaagacagtggttactacagcctcacagcagagaacagttctgggacagacactcagaaaatcaaagttgtagtcatggatgcccccggcccccctcagcctccatttgacatttctgatatagacgctgatgcttgctccctgtcatggcacatccctctggaggacggaggcagtaacatcaccaattatatagtggagaagtgtgatgtaagccgaggtgactgggtcacggctctagcttcagtcacaaaaacttcctgcagggttggaaagctgatcccaggccaggagtacatcttccgggtccgtgctgaaaaccgatttggcatttcagagcctctcacatctccaaagatggttgcgcagttcccatttggtgttcctagtgaaccaaagaatgcacgagtcaccaaagtcaacaaggactgtatttttgttgcttgggacagaccagatagtgatggagggagccccattattggttatctgattgaacgcaaggaaagaaacagtttgctgtgggtgaaagccaatgatactcttgtccggtcaactgaatatccttgtgctggccttgtagaaggtcttgagtattcattcagaatctatgccctaaacaaagctggatccagcccacccagcaaacccacagaatatgtaactgcaagaatgccagttgatcctcctgggaaacctgaggttattgatgtcaccaagagtactgtatctctgatctgggctcgtccaaagcatgatggaggcagtaaaattattggctatttcgtagaagcttgcaaacttcctggtgataaatgggtacggtgcaatactgcacctcaccagattccccaggaagagtacacagctactggcctagaagagaaagctcagtatcaatttagagctattgccaggaccgcggtaaacattagcccaccttctgaaccttctgatccagtgactatcctcgcagaaaatgtccctcccaggatagacctgagtgtggctatgaaatctttgcttactgtgaaagctggaactaatgtctgcttggatgctactgtttttggtaaaccgatgccaacagtttcttggaaaaaagatggcacactgctaaaaccagcagaaggcataaagatggccatgcagcggaatctgtgcaccttggagctattcagcgtgaaccggaaggactcaggagactataccattactgctgaaaattcaagtggttctaaatcagccaccattaagcttaaagtgttagataaaccgggtcctccagcatctgttaaaatcaacaaaatgtattcagatcgtgctatgctttcttgggaaccgcctcttgaagatggaggctcagaaatcaccaactatattgttgacaaacgtgaaacaagcaggcccaactgggctcaagtctctgcaactgtgcctatcaccagctgcagcgtggagaaacttatagagggccatgagtatcagttccgtatttgtgctgaaaataaatatggagtaggcgatccagtcttcactgaaccagcaattgccaaaaacccatatgacccaccaggacgctgtgatcctcctgttattagcaacataaccaaagatcacatgacagtcagctggaagccaccagcagatgatgggggctcacccatcactggctatttgcttgaaaagcgggaaacccaggctgttaactggactaaggtcaacagaaaacctattatagaaagaacattaaaagcaacaggtcttcaagaaggtaccgaatatgagttccgtgttacagctataaataaagctggaccaggcaaacccagtgacgcatccaaggccgcttatgctcgggaccctcagtatcctcctggcccaccggctttccctaaagtatatgatacaactcgcagctctgtgagtctatcttggggcaagccagcctatgacggcggcagccctatcattggttatctcgttgaagtaaaacgggctgactccgataactgggtgaggtgcaacttaccacagaatctacagaaaacccgctttgaggttactggcctgatggaagacacacaatatcaattccgtgtgtatgccgttaataagattggatacagtgaccccagtgatgtgccagataaacactatcccaaggacatcttaattccacctgagggagaacttgatgcggacttaaggaagacactcatattacgtgctggagttactatgagactatatgtaccagtaaaaggacgcccacctccaaagattacttggtctaaaccaaatgtcaatctaagagacaggattggactggacataaagtcaactgactttgacactttcttgcgctgtgaaaatgtgaacaaatatgatgcaggaaaatatatcttaaccctggagaacagctgtggtaaaaaggaatataccattgttgtgaaagtgcttgatactcctgggccacctgtcaatgtgactgttaaggaaatatccaaagactctgcttatgttacctgggagcctcccattattgatggcggaagccccatcataaactatgtggtacaaaaacgtgatgcagagaggaaatcctggtctacagtgacaactgagtgctccaaaacaagcttcagagtagctaatttggaggagggaaaatcctacttcttccgagtgtttgctgaaaatgagtatggcattggtgatcccggtgaaactcgtgatgctgtcaaagcttcccaaactcctggaccagttgtggacctgaaagtgaggtctgtatctaagtcatcctgtagcattggctggaaaaagcctcacagtgatggtggaagtcggattattggatatgtagttgatttcctgactgaagaaaataagtggcaacgagttatgaaatccttaagcctacagtactctgcaaaagatttgactgaagggaaggaatataccttcagagtgagtgctgagaatgaaaatggagaaggaaccccaagcgaaatcactgttgtggcaagggatgatgttgtggctcctgatcttgacttaaagggtctacctgatttgtgctacttggctaaagaaaacagcaacttccggcttaagatccccataaaaggcaagccagctccatcagtctcctggaagaaaggggaagatcctctagcaactgacactagagtcagtgttgagtcatctgcggttaacacaactcttatagtgtacgattgccaaaaatctgatgctggaaaatacacaatcacacttaagaatgttgctggcaccaaggaaggaactatctccataaaggttgttggcaagcctggcatccccactggaccaatcaaatttgatgaagtcacagcagaagccatgaccttaaagtgggctcctccaaaggatgatggaggttctgaaatcaccaactatatcctagagaagagggattctgtgaacaacaagtgggtgacgtgcgcctcagctgtccagaaaaccacctttagagtaaccagacttcatgagggcatggaatataccttcagggtcagtgccgaaaataaatatggtgtaggggaaggcctgaaatcggagccaattgttgcgagacatccatttgatgtgcctgatgctcccccacctcccaatattgtggatgtcagacacgattcagtatctctaacttggactgaccccaagaaaactggtggttctccaattacagggtatcatctcgagttcaaggaaagaaacagccttttgtggaagagagctaacaagactccgataaggatgagagactttaaagtgacaggattaactgaaggtcttgaatatgaattccgagttatggcaatcaatttagcaggtgtgggcaagccaagcctaccatcagagcctgttgtggcactggacccaattgatcctcctggaaaacctgaggttattaacataacaaggaattcagtgactctcatttggactgaacctaaatatgacggtggtcataagttaactggatatatagtggagaagcgagatctaccttcgaagtcttggatgaaagccaaccatgttaatgtcccagaatgtgcctttactgtaactgaccttgttgagggtggaaaatatgaattcagaattagagcaaagaatacagcaggtgctatcagtgctccatcagaaagtacagaaaccattatttgcaaggatgaatacgaggcaccaacaattgtccttgatcccacaataaaagatgggctaacaattaaagcaggggataccattgttttgaatgccattagcattcttggcaaaccccttccaaaatcaagttggtccaaggcaggaaaagacattagaccatcagatatcactcagataacttcaaccccaacatcttccatgcttactatcaagtatgccactagaaaagatgcgggtgaatataccatcactgctaccaatccttttggcacgaaggtggaacatgtgaaggtaacagtccttgatgtacctggtcccccaggtcctgttgaaatcagtaatgtttctgctgaaaaagcaacacttacatggacacctcccttggaagatggcggctcaccaattaagtcctatatacttgaaaagagagaaaccagccgacttttgtggacagtggtttctgaagatattcagtcttgcaggcatgtggcaaccaaacttatccaaggaaatgagtacatcttccgggtctcagctgtaaaccactatggcaaaggagaacctgtacagtctgaacctgtcaaaatggtagacagatttggtccccctggccctcctgaaaaaccagaggtatcaaatgtcactaagaacactgccactgtcagctggaaaaggccagtggatgatggtggcagcgaaattacaggatatcatgtagaaaggagagaaaagaaaagcctgcgatgggtgagagcaataaaaacaccagtttccgatctcaggtgcaaagtaacaggactgcaagaaggaagcacctacgaattccgtgtcagtgcagaaaacagagcaggaattggtccacccagtgaggcttcagattctgttctgatgaaagatgcagcatatcctccaggaccaccttcaaatccgcatgtcactgatactaccaagaaatctgcttctttggcatggggcaagcctcattatgatggtggacttgaaatcactggctatgtcgtggagcatcaaaaagtaggagacgaggcctggataaaagataccacaggaaccgccctcagaatcactcagttcgttgttcctgatcttcagactaaagaaaaatacaacttcagaatcagtgccatcaacgatgcaggtgttggggagccagcggtgattccagatgttgaaatcgtagaacgggagatggctcctgattttgaactagatgccgagcttcgaagaacacttgttgttagagcaggactcagtattaggatatttgtgccaattaaaggtcgtcctgctcctgaagtgacatggaccaaagataacatcaacctgaaaaaccgagccaacattgaaaatacggaatcatttactcttctgattatcccagaatgtaacagatatgataccggtaaatttgtcatgaccattgaaaacccggctgggaagaaaagtggctttgtgaacgtcagagtcttggacacgccaggcccagtcctcaacctgcggcctacagacatcacaaaggacagtgtcaccctgcactgggacctccctctgatagatggaggctcacgtataacaaactacattgtagagaaacgtgaagcaacacggaaatcttattccacagccaccactaagtgccataaatgcacatataaagttaccggcttgtctgaagggtgtgaatatttcttcagagtgatggcagagaatgaatatggaattggtgagccaacagaaactacagagcccgtaaaagcctctgaagcaccatctccaccagacagccttaacatcatggacataactaagagcaccgtcagcctggcatggcctaagcccaaacacgatggtggcagcaagatcactggctatgtgattgaagcccaaagaaaaggctctgaccagtggacccacatcacaaccgtgaaagggttagaatgtgttgtgaggaatctaactgaaggagaggaatataccttccaagtgatggcagtgaacagcgcggggagaagtgcccctagagaaagcagacccgtcattgtcaaggagcagacaatgcttccagagctggatctccgtggcatctatcagaaactggtcattgccaaagctggtgacaacatcaaagttgaaattccagtgctcggtcgaccgaagcccacagtgacatggaaaaaaggagaccaaattcttaaacagacacagagagttaattttgaaaccacagcgacttcaaccattttaaatatcaatgagtgtgtcagaagtgatagtgggccctatccattaacagcaaggaacattgtaggagaggttggtgatgtcatcaccattcaagtccatgatatcccagggccacctactggaccaatcaaatttgatgaagtttcatctgattttgtaaccttctcttgggacccacctgagaacgatggtggtgtaccaataagcaactatgtagtggaaatgcggcagactgacagtactacctgggttgagttagcaaccaccgttatacgtactacctataaagccacccgccttactactggattagagtatcagttccgtgtaaaagctcagaatagatatggagttggaccaggcatcacatcagcatgcatagttgccaactatccatttaaggttcctggacctcctggtacccctcaggtaactgcagttaccaaggattcaatgacaattagctggcatgagccactttctgatggtggaagccccattttaggatatcatgttgaaagaaaagaacgaaatggtattctctggcagactgtgagcaaagctttagtaccaggcaacattttcaaatcaagtggacttacagatggtattgcttatgagttccgggtgattgcagaaaacatggcaggcaaaagtaagccaagcaagccatcagaacctatgttggctctggatcccattgacccacctggaaaaccagtacctctaaatattacaagacacacagtaacacttaaatgggctaagcctgaatatactgggggctttaaaattaccagttatatcgttgaaaagagagaccttcctaatggacggtggctgaaggccaacttcagcaacattttggagaatgaatttacagtcagtggcctaacagaagatgctgcatatgaattccgtgtgatcgccaaaaatgctgcaggtgccatcagtccaccatctgagccatctgatgctatcacttgcagggatgatgttgaggcaccaaagataaaggtggatgttaaatttaaggacacggttatattaaaagcaggtgaagcattcagactggaagctgatgtttcaggccgcccacctccaacaatggaatggagcaaagatggaaaagagctggaaggcacagcaaagttagaaataaaaattgcagatttctctactaatctggtaaacaaagattcaacaagaagggatagtggtgcctatacccttacagcgactaatcctggtggctttgctaaacacattttcaatgtcaaagttcttgacagaccaggcccacctgaaggacctttggctgtaactgaagtgacatcagaaaagtgtgtactatcatggttccctccactggatgatggaggtgccaaaattgatcattacatagtacagaaacgtgaaaccagcagattggcatggacaaatgtagcctcagaagtccaagtaacaaagctaaaggtcactaaactcttgaaaggcaatgaatacatattccgtgtcatggctgtaaataaatatggagtgggagagccactggaatcagagcctgtgcttgcagtgaatccttatggaccccctgatccgcccaaaaaccctgaagtgacaactattactaaagattcgatggttgtctgctggggacatcctgattctgatggtggaagtgaaatcatcaattatattgtggaacggcgtgataaagctggccaacgctggattaaatgcaacaaaaaaactcttactgatttaagatataaagtgtctggactgacagaaggacatgaatatgagttcaggattatggctgaaaatgctgctggaattagtgcaccaagtcctaccagtccattttacaaggcttgtgacactgtgtttaaacctggaccaccaggtaacccacgtgttctgatacaagcagatcatccatttcaatcgcttggaataaacctatctatgatggtggttcagaaatcactgggtatatggttgagattgccctgccagaggaagatgaatggcagattgtcactccaccagcaggactcaaggcaacttcgtatactatcactggcctcacagagaatcaggaatataagatccgcatctatgccatgaattccgaaggacttggggaacctgcccttgttcctggaactccaaaggctgaagacagaatgctgcctccagaaattgaactggatgctgacctgcgcaaagttgttactataagggcctgctgcaccctgagactttttgttcccatcaaaggaaggcctgcacctgaggtgaagtgggcccgggaccatggagaatctttagataaagctagcatcgaatccacaagctcttacaccctgcttattgttggaaatgtaaacagatttgacagtggcaaatatatactaactgtagaaaatagttcaggcagcaagtctgcatttgtcaatgttagagttctcgatacaccaggccccccacaggatctgaaggtaaaagaggtcactaagacatctgtcacactcacatgggacccacctctccttgatggaggttcaaaaatcaagaactatattgttgaaaagcgggaatcaacaagaaaagcatattcaactgttgcaacaaactgccacaagacttcctggaaggtagaccagcttcaagaaggctgtagctactatttcagggttctcgcagaaaatgaatatggcattgggctgcctgctgaaaccgcagaatctgtgaaagcatcagaacgacctcttcctccaggaaaaataactttgatggatgtcacaagaaatagtgtgtcactctcttgggagaaaccagagcatgatggaggcagccgaattctaggctacattgtggagatgcagaccaaaggcagtgacaaatgggccacgtgtgccacagtcaaggtcactgaagccactatcactggattaattcagggtgaagaatactctttccgtgtttcagctcagaatgaaaagggcatcagtgatcctagacaactgagtgtgccagtgatcgccaaagatcttgtcattccaccagccttcaaactcctgttcaatactttcactgtactggcaggtgaagacctaaaagttgatgttccattcattggccgccctaccccagctgtaacctggcataaagataatgtaccactgaagcagacaactagagtaaatgcagagagcacagaaaataattcactactgacaataaaggacgcctgccgagaagatgttggccattatgtggttaaactgactaactcagctggtgaagctattgaaacccttaatgttatcgttcttgacaaaccagggcctccaactggaccagttaaaatggatgaagtgacagctgatagtattactctttcctggggcccacccaagtatgatggtggaagttctatcaataattacattgttgagaaacgggacacttccacaaccacctggcaaattgtatcagctacagttgcaaggacaacaataaaggcttgcagactgaagactggatgtgaatatcagtttagaattgcagctgaaaacagatatgggaagagtacctacctcaattcagagcctactgtagcccaatatccattcaaagttcctggtcctcctggcactccagttgtcacactgtcctccagggacagcatggaagtacaatggaatgagccaatcagtgatggaggaagtagagtcattggctatcatctagaacgcaaggaaagaaatagcatcctctgggttaagttgaataaaacacctattcctcaaaccaagtttaagacaactggccttgaagaaggtgttgaatatgaatttagagtctctgcagagaacatcgtgggcattggcaagccgagtaaagtatcagaatgttatgtggctcgtgacccatgtgatccaccaggacggccagaggcaatcattgtcacaaggaattctgtgactcttcagtggaagaaacccacctatgacggtggaagcaagatcactggttatattgttgagaagaaagaattacctgagggccgttggatgaaagccagttttacaaatattattgacactcattttgaagtaactggcctagttgaagatcacagatatgagttccgggttatagcccgaaatgccgcaggagtgtttagtgagccttcagaaagcacaggagcaataacagctagagatgaggtagatccaccacgaataagtatggatccaaaatacaaagacacaatcgtggttcatgctggtgaatcattcaaggttgatgcagatatttatggcaaaccaataccaaccattcagtggataaaaggtgatcaggagctttcaaacacagctcgattagaaataaagagcaccgactttgccaccagtctcagtgtaaaagatgcagtacgtgtcgacagtggaaattacatactgaaggccaaaaatgttgcaggagaaagatcagttactgtgaatgtcaaggttcttgacagaccagggccacctgaaggacctgttgttatctcaggagttacagcagaaaaatgcacactagcttggaaacccccacttcaggatggtgggagtgacatcataaattatattgtggaaaggagagaaaccagccgcttagtttggactgtggttgatgccaatgtgcagactctcagctgcaaggttactaagcttcttgaaggcaatgaatatactttccgtataatggcagtaaacaaatatggtgttggtgaacctcttgaatctgagccagtagttgccaagaatccatttgtagtaccagatgcaccaaaagctccagaagtcacaacagtgaccaaggactcaatgattgttgtatgggaaagaccagcatctgatggtggtagtgaaattcttggatatgttcttgagaaacgggataaagaaggcattagatggacaagatgccataagcgtctgattggagagttgcgcctgagagtaactggactcatagaaaatcacgattatgagttcagagtttctgctgagaatgctgctggacttagtgaaccaagccctccttctgcttaccaaaaggcttgtgatcctatttataaaccaggacccccaaacaaccccaaagtcatagacataaccagatcttcagtattcctttcttggagcaaaccaatatatgatggtggctgtgaaattcaaggatacattgttgaaaaatgtgatgtgagtgttggtgaatggacaatgtgcactccaccaacaggaattaataaaacaaacatagaagtagagaagctgttggaaaagcatgaatacaacttccgtatctgtgctattaataaagctggagttggagaacatgctgacgtccctggacctattatagttgaagaaaaattagaagcaccagacattgatcttgacctagaactaaggaaaatcataaatataagggcaggtggctccttaaggttatttgttcctataaaaggtcgtcctacaccagaagttaaatggggaaaggtggatggtgaaatccgagatgcagctataattgatgtcactagcagtttcacctctcttgttcttgacaatgtcaaccgatatgatagtggaaaatatacgcttacattagaaaacagcagtggaacaaagtctgcctttgttactgtgagagttctggacacgccaagtccacctgttaacctgaaagtcacagaaatcaccaaagactcagtatcaattacatgggaacctcctttgttggatgggggatccaaaataaaaaattacattgttgagaaacgtgaagccacaagaaaatcatatgctgctgttgtaactaactgccataagaattcttggaaaatcgatcagctccaagaaggttgcagttattactttagagtcacagctgagaatgagtatggtattggccttcctgcccagactgctgatccaattaaggttgcagaagtgccacaacctcctggaaaaataactgtggatgatgtcaccagaaacagtgtctctctgagttggacaaaacctgaacatgatggtggcagtaaaatcattcagtatattgtggaaatgcaagctaaacacagtgagaaatggtcagagtgtgctcgagtaaagtctcttcaggcagtaattaccaacctaactcaaggggaagaatatctttttagagttgttgctgtaaatgaaaaggggagaagtgatcctcggtcccttgcagttccaatagttgccaaagatctggtaattgagccagatgtaaaacctgcattcagtagttacagtgtacaggttggccaagatttgaaaatagaagtgccaatttctggacgtcctaagccaaccattacctggactaaagatggtctcccactgaagcagaccacaagaatcaatgttaccgattcactggatctcaccacactcagtattaaagaaactcataaggatgatggtggacaatatggaatcacagttgccaatgttgttggtcagaagacagcatccatcgaaattgtaactctagataaacctgatcctccaaaaggacctgttaaatttgatgacgtcagtgctgaaagtattacattatcttggaaccctccattatatacagggggctgccaaatcaccaactacattgttcagaaaagagatacaaccaccacagtatgggatgttgtttctgctactgttgctagaactacactcaaagtgaccaaactgaaaactggtacagaataccaatttagaatatttgccgaaaacagatatggacaaagctttgccttagagtctgatccaattgtagctcaatatccctacaaagaaccaggccctccaggtacaccatttgccacagccatttccaaagactccatggtcatacagtggcatgaaccagtcaacaatggtggaagccccgtcataggttaccacctggagagaaaagaaagaaacagtattttgtggacaaaggtcaacaaaactattattcatgacacccaattcaaagcacagaatcttgaagaaggcattgaatatgaattcagagtgtatgctgaaaatattgttggtgtaggcaaagcaagcaagaattctgaatgctatgtagccagagatccctgtgacccaccaggaaccccagaaccaataatggttaaaagaaatgaaatcactttacagtggaccaaacctgtgtatgatggtggaagtatgattacaggctacattgtagagaaacgtgatttgcctgatggtcgttggatgaaagctagctttacaaatgtcattgaaactcaatttactgtgtcaggtcttactgaagatcaaagatatgaattcagagtcattgcaaagaatgcagctggtgcaataagtaaaccctctgacagtactggaccaataactgccaaggatgaggttgaactcccaagaatttcaatggatccaaaattcagagacacaattgtggtaaatgctggagaaacattcagacttgaggctgatgtccatggaaagcccctacctaccattgagtggttaagaggagataaggaaattgaagaatctgctagatgtgaaataaagaacacagatttcaaggctttacttattgtaaaagatgcaattagaattgatggtgggcagtatattttaagagcttccaatgttgcaggttctaagtcattcccagtaaatgtaaaagtattagatagaccaggacctccagaagggccagtccaggttactggagtcacttctgaaaaatgctctttaacatggtctccaccacttcaagatggtggcagtgacatttctcactatgttgttgaaaagcgagaaaccagtcgacttgcctggactgttgttgcttcagaagttgtgaccaattctctgaaagttaccaaactcttagaaggtaatgaatatgttttccgtataatggctgtcaacaaatatggtgttggagagcctttggaatctgcaccagtactaatgaaaaatccatttgtgcttcctggaccaccaaaaagcttggaagtcacaaatattgccaaagactccatgaccgtctgttggaaccgtccagatagtgatggtggaagtgagattattggttacattgtagagaaaagagacagaagtggcattcgatggataaaatgtaataaacgccgcattacagatttgcgtctaagagtgacaggattaacagaagatcatgagtatgaattcagggtctctgcagaaaatgctgctggagttggggaaccaagtccagctacagtttattataaagcctgtgatcctgtgttcaaacctggcccacctaccaatgcacacattgtagacaccactaaaaattcaatcacacttgcctggggtaaacccatctatgatggcggcagtgagatcttgggatatgtagtagaaatctgtaaagcagatgaagaagaatggcaaatagttactccacagactggcctgagagtcactcgatttgaaatttcaaaactcactgaacaccaagagtataaaatacgagtctgtgccctcaacaaagttggtttaggtgaggctacatcagttcctggtactgtgaaaccagaagataaacttgaagcacctgaacttgaccttgactccgaattaagaaaaggaattgttgtaagagctggtggatctgccagaattcacattccattcaaaggtcgtccaacgcctgagatcacttggtctcgagaggaaggtgaattcacagataaggtccaaattgaaaagggagtaaactatacccaactatcaatagataactgtgatagaaatgatgctggaaaatacattcttaagttggaaaacagcagtggatcaaagtctgcttttgtaactgtgaaagttcttgacactccaggaccaccacagaatttggcagtcaaagaagtgagaaaagattctgccttcctggtatgggagccacccatcattgatggaggggcaaaggtcaagaactatgtgattgacaaacgtgagtcaaccagaaaagcgtatgctaatgtgagtagtaaatgcagcaaaacaagttttaaagtggaaaaccttacagaaggagccatttattacttcagagtcatggctgaaaatgaatttggagttggtgttccagtggaaactgttgatgccgtgaaagctgctgaacctccttccccaccaggaaaggttacactcactgatgtgtcccagaccagtgcatcacttatgtgggagaaacctgaacatgatggcggtagcagagtcctggggtacgttgttgaaatgcagcccaaaggaactgaaaaatggagcattgtggctgaatccaaagtctgtaatgcagttgttactggtttgagttctggacaagaatatcagttccgtgtcaaggcttataatgagaaaggaaaaagcgatccaagagtgttgggtgttcctgtcatagccaaggacttgactatacagcctagtttaaagttaccatttaacacatatagtatccaagctggagaagatcttaaaatagaaattccagttataggccgaccaagacctaacatttcttgggtcaaagatggtgagcctcttaaacagacaacaagagtaaacgttgaagaaacagctacctcaactgttttgcacattaaagaaggtaacaaagatgactttggaaaatacaccgtaacggcaacaaatagtgcaggcacagcaacagaaaatctcagtgttatcgttttagaaaagcctggacctccagttggcccagttcggtttgatgaagttagtgcagactttgtagtcatatcttgggaacctccagcctatactggtggctgccaaataagcaactacattgtagagaagcgagatacaaccaccaccacttggcacatggtatcagcaacagttgcaagaacaacaattaaaataaccaaactgaaaacaggcacggagtaccagtttagaatttttgctgaaaacaggtatggaaaaagtgccccactggattctaaggcagttattgtacaatatccatttaaagaacctggaccacctggaactccttttgtgacatcaatctcaaaagatcagatgcttgtgcaatggcatgagccagtgaatgatggaggcaccaaaattattggctaccatcttgaacagaaagaaaagaacagtattttatgggtcaagttaaataagacccccattcaggacaccaaattcaaaacaactgggcttgatgagggccttgagtatgagttcaaagtttctgctgaaaatattgttggcattggcaagcctagcaaagtgtcagaatgctttgttgctcgtgatccatgtgacccacctggtcgccctgaagccattgttattacaagaaacaatgtcacactgaaatggaagaaacctgcctatgatggtggtagcaaaataacaggttatattgtagaaaagaaagatctacctgatggccgctggatgaaagccagctttaccaacgtattagaaactgaatttacagtgagtggacttgtagaagaccaaagatatgaatttagagtaattgcaagaaatgcagctggaaactttagtgaaccatctgatagtagtggtgccattactgcaagagatgaaattgatgcaccaaatgcctctctggatccaaaatataaagatgtcatcgttgttcatgcaggagagacttttgttcttgaagccgacatccgtggcaaacctatacctgatgttgtttggtcaaaagatggaaaagaacttgaagaaacagctgctagaatggaaattaaatctactattcagaaaacaactcttgttgtcaaagactgtatacggactgatggaggacaatatattctgaaactcagcaatgttggtggtacaaagtctatacccatcactgtaaaggtacttgacaggccagggcctcctgaagggcctctgaaagttactggagttactgcggaaaaatgttacctggcatggaacccacctttgcaagatggtggtgctaatatttcacattacatcattgaaaagagggagacaagccgactctcttggacccaggtttcaactgaggtacaggcccttaactacaaagttactaaacttcttcctggtaatgagtacattttccgtgtcatggctgtgaataaatatggaattggagagcccttggaatctgggcctgttacggcctgtaatccttataagccaccaggtcctccctcaacacctgaagtctcagcaatcaccaaagattctatggtagtaacatgggcacgcccagtagacgacggaggtaccgaaattgagggctacattcttgaaaaacgagataaggaaggcgttagatggaccaagtgcaacaagaaaacattaacggatctgcggctcagggtaactggtcttaccgaaggccattcctatgaattcagagttgctgctgaaaatgcagctggtgtgggagaacctagtgagccatctgttttctaccgtgcgtgtgatgccttgtatccaccaggtcccccaagcaatccaaaagtgacggacacttccagatcttctgtctccctggcatggagtaagccaatttatgatggtggcgcacctgttaaaggctatgttgtagaggtcaaagaagctgctgcggatgaatggacaacctgcactccaccaacaggattacaaggaaagcagttcacagtgaccaagcttaaagaaaacactgaatataacttccgtatttgtgccatcaattctgaaggtgtaggtgaacctgcaactctacctggctcagtggttgctcaggagaggatagagccaccagaaatagaactcgatgctgatctcagaaaggtggtcgttctgcgtgcaagtgctactttacgcttatttgtcactatcaaaggtcgaccagaacccgaagttaaatgggaaaaggcagaaggcattctcactgacagggctcagatagaggtgaccagctcatttacaatgttggtgattgataatgttaccagatttgacagtggtcggtataatctgacattagaaaataatagtggctccaaaacagcttttgttaacgtcagagttcttgactcaccaagtgcccctgtgaatttgaccataagagaagtgaagaaagactcagtgacgttgtcctgggaaccaccacttattgatggtggagctaagattacaaactacattgtcgaaaaacgagaaactacaagaaaagcctatgctaccattacaaataattgcactaaaactactttcagaattgaaaatctacaagaaggatgttcttactacttccgagtcttggcttccaatgaatatgggattggtttgccagctgaaacaacagaacccgttaaagtgtctgaaccacccctcccacctggaagagtaactcttgttgatgtgacccgtaatacagctacaattaagtgggagaaaccagaaagtgatggtggcagcaaaattactggttatgtggttgaaatgcagactaaagggagtgaaaagtggagcacctgcacacaagttaagactctagaagcaactatatctggcttaactgcaggagaagagtatgtcttcagggtagctgcagttaacgaaaagggaagaagtgatccaagacaacttggagtgccagtaattgcaagggatattgaaataaagccttcagttgagcttcctttccatactttcaatgtaaaggctagagaacaacttaagattgatgtgccattcaaaggaagacctcaagctactgtgaactggagaaaagatggtcagactcttaaagagacaactagagtcaatgtttcttcttcaaagactgtaacatcactatctattaaggaagcttcaaaggaagatgttggaacttatgaattatgtgtttcaaacagtgctggatccataacagttcctattactataattgtccttgacagaccaggacctccaggtcctatacgtattgatgaggttagttgtgacagcataaccatttcttggaatcctccagaatatgatggtggctgccaaattagcaattacattgttgaaaagaaagaaaccacctctacaacatggcacatagtttcacaagcagttgcaagaacatccattaaaatagttcgcctgacaacaggaagtgagtatcagttccgtgtttgtgcagaaaaccgctatggaaagagctcctacagtgaatcttcagctgttgttgcagagtatccattcagtcccccaggtcctcctggtactcctaaagttgtgcatgccacaaaatctaccatgcttgtaacctggcaagtgccagttaatgatggaggaagtcgagtaattggctatcatcttgagtataaagaaagaagcagcattctttggtcaaaagcaaataaaatcctcattgctgatactcaaatgaaagtctccggccttgatgaaggactgatgtatgagtatcgtgtatatgctgaaaatattgctggaattggtaaatgcagtaaatcttgtgaaccagtccctgcaagagatccttgtgaccctcctggacaacctgaagtcacaaatatcacaagaaaatcagtgtcacttaaatggtctaaaccacattatgatggtggagctaagatcacaggatacattgttgaacgcagagaactaccagatggccggtggctgaagtgcaattatactaatatacaagaaacatactttgaagtaactgaacttactgaagatcagcgttatgaattccgggtttttgcaaggaatgctgctgactcagttagtgagccatctgaatccactgggcctattatagttaaagatgatgttgagcctccaagagttatgatggatgtcaagttccgagacgttattgttgtcaaagctggagaggtccttaagataaatgcagacattgcagggcgacctctgccagtaatttcctgggccaaggatggtatagaaattgaagaaagagcaagaacagaaatcatctcaacagacaatcatactttgttaacagttaaagactgtataagacgagacactgggcaatatgtactaacactgaagaatgttgccggcactcggtctgtggccgttaattgcaaagtacttgataagcctggtccaccagcaggaccacttgaaataaatggcctcactgctgagaaatgctctctttcctggggacgtccccaagaagatggtggtgcagatatcgactattacatcgtagaaaaacgtgaaacaagccaccttgcatggacaatatgtgaaggagagttacagatgacatcctgtaaagtaaccaagttactcaaaggcaatgaatatatatttagagtaactggtgttaataaatatggtgttggtgagcccctagagagtgtagctataaaggcactagatccatttacagttccaagtccacccacgtctttggaaattacttctgtgaccaaagaatctatgacactttgctggtcaagacccgagagtgatggaggtagtgaaatatctggatatataattgaaaggcgagagaaaaatagcctaagatgggtgcgtgtaaacaaaaaaccagtttatgatctaagagtgaaatcaacaggacttcgggaaggatgtgaatatgaatatcgtgtttatgcagaaaatgctgctggcctaagtcttccaagtgaaacctctcccttaattagggcagaagatccagtgttcctaccatctcctccatccaaacccaaaattgtggactcaggcaagacaactataactattgcctgggttaagccgctgtttgatggtggggccccgataactggatatactgtagaatacaaaaaatctgatgacactgactggaaaacttccattcagagcttacgagggacagaatatacaataagcggactaacaacaggagctgaatatgttttcagagtaaaatctgtcaataaggttggtgctagtgaccccagtgatagctctgaccctcagatagcaaaggaaagagaagaagaacctttatttgatattgacagtgaaatgaggaagaccttgattgtcaaggctggtgcctcatttaccatgactgtgcctttccgaggaagaccagtacccaatgtcttgtggagtaagccagacactgacctccgtactagagcttatgttgataccacagactctcgtacatcactgaccattgaaaatgccaacagaaatgactctggaaagtacacattaacaattcagaatgttttgagtgctgcttcactgaccttagttgtcaaagttttagataccccaggtcctccaaccaacattactgtgcaagatgtaaccaaagagtctgcagtgttatcctgggatgttcctgaaaacgatggtggagcaccagtgaagaattaccacatagaaaaacgtgaggccagcaagaaagcatgggtctctgtgaccaacaactgtaaccgcctctcctacaaagttaccaatttacaagaaggagctatctattacttcagagtctctggagaaaatgagtttggtgttggtataccagctgaaacaaaggaaggagtaaaaataacagaaaaaccaagcccacctgaaaaacttggagtaacaagtatatccaaagacagtgtttccctgacctggctgaagcctgaacatgatggcggaagcagaattgtacactatgtcgttgaagcactagaaaaaggacagaaaaactgggttaaatgtgcagtggcaaagtcaacccatcacgttgtttccggtctgagagagaattctgaatactttttccgagtgtttgctgaaaatcaagctggcctgagtgacccgagagagcttctgcttcctgttcttattaaggagcaactagaaccacctgaaattgatatgaagaatttcccaagtcacactgtatatgttagagctggttcaaaccttaaagttgacattccaatctctggaaaaccacttcccaaagtgaccttatcaagagatggtgtcccccttaaggcaaccatgagatttaataccgaaattactgctgagaacctgaccatcaatctcaaagaaagtgttacagctgacgctgggagatatgaaatcactgctgccaactccagtggtacaaccaaagctttcattaacattgttgtgctagacaggcctggtcctccaactggccctgttgttattagtgatataactgaagaaagtgtgactctcaaatgggagccacctaagtatgacggtggaagtcaagttaccaactacattctactcaaaagagaaacaagtactgcagtgtggactgaagtgtctgcaacagttgcaagaaccatgatgaaagtcatgaaactgaccacaggagaagaataccaattccgcatcaaggcagaaaaccgctttggcatcagtgatcatatagattcagcttgtgtgactgtcaaactaccatacacaacacctggaccaccatctacaccatgggtcactaatgttactcgagaaagcatcactgtgggctggcatgaaccagtgtcaaatggaggcagtgcagtcgtaggctatcacctggaaatgaaagacagaaacagtattttatggcaaaaagccaacaaactggtcatccgcacaactcacttcaaagtcacaacaatcagtgctggacttatttatgaattcagggtgtatgcagaaaatgctgctggagttggaaaacctagccatccttctgaaccagtcttggcaattgatgcttgtgaacccccaagaaatgttcgtatcactgatatttcaaagaactctgtcagcctttcatggcaacaaccagctttcgatggaggtagcaagattacaggctacattgttgagagacgtgaccttccagatggcagatggaccaaggccagcttcaccaatgttactgaaactcaattcatcatctctggcttgactcagaattcccagtatgaattccgtgtctttgctaggaatgctgttggttccattagcaatccatctgaggttgtagggcccattacttgcatcgattcttatggtggtcctgtaattgatttgcctctagaatatacagaagttgtcaaatacagagcaggtacatctgtgaagctcagagctggcatttctggcaaacctgcgcctactattgagtggtataaagatgataaagaattacaaaccaatgcactggtgtgtgttgaaaataccacggacctcgcatctatactcatcaaagatgccgatcgccttaatagtggatgctatgaattaaaactaaggaatgccatgggctcagcctcagccaccatcagagtacagatccttgacaaaccaggcccacctggtggaccaattgaatttaagactgtaactgctgagaagatcacccttctctggcggcctccagctgatgatggtggtgcaaaaatcactcactacattgtggaaaagcgtgagacaagccgcgttgtgtggtctatggtgtctgaacatttggaagagtgcatcattacaaccaccaaaattatcaaaggaaatgaatacatcttccgggtccgagccgtgaacaaatatggaattggcgagccactggaatctgattccgttgtagccaagaacgcatttgttacacctgggccaccaggcataccagaagtgacaaagattaccaagaattcgatgactgttgtatggagcaggccaattgcagatggcggtagtgatataagtggctatttccttgaaaaacgagacaagaagagcctaggatggtttaaagtactaaaagagactatccgtgacaccagacaaaaagtaacaggactcacagaaaacagtgactatcaatacagagtttgtgctgtaaacgctgctggacagggtccattttctgaaccatctgaattctacaaagctgctgatcctattgatcctccaggtccacctgctaagataagaatcgcagattcaaccaagtcatccatcacccttggctggagtaagcctgtctatgatgggggcagtgctgttactgggtatgttgtcgagataagacaaggagaggaagaggaatggactactgtctctaccaaaggagaggtcagaactacagaatatgtggtatccaacctgaaacctggagtcaattactacttccgggtatctgctgtaaactgtgctggacaaggagaacctatagaaatgaatgaacctgtacaagctaaagatatacttgaggcaccagagattgacctggatgtggctctcagaacttctgttattgccaaagctggtgaagatgtacaagtgttgattccctttaaaggcagacctccacctactgtcacatggagaaaagatgagaagaatcttggcagtgatgccagatacagcattgaaaacactgattcatcctcattactcaccattcctcaagttactcgcaatgatacaggaaaatatattctcacaatagaaaatggagttggtgaacctaagtcttcaactgtgagtgttaaagtgcttgacacaccagctgcctgccagaaactacaggttaaacatgtttctcgaggcacagtcactttgctctgggatcctcctctcattgatggaggatctccaataattaattatgtcattgaaaagagagatgccaccaagagaacatggtctgtcgtgtcacacaaatgttctagcacatccttcaagctaatagatttgtcggagaagactccattcttcttcagagttcttgcagaaaatgaaattggaattggggaaccctgtgaaactacagagccagtgaaggctgctgaagtaccagctcctatacgtgatctctcaatgaaagactcaacaaagacatctgtcatcctcagctggaccaaacctgactttgatggtggtagcgtcatcacagaatatgttgtagaaaggaaaggtaaaggtgaacagacgtggtcccacgctggcataagtaagacatgtgaaattgaggttagccaacttaaggagcagtcagtcctggagttcagagtgtttgccaaaaatgagaaaggactgagtgatcctgtcactattgggccaattacagtgaaagaacttattattacacctgaagttgacctgtcagatatccctggggcacaagtcactgtgagaattgggcacaatgtgcaccttgaattaccttataagggaaaacccaaaccatccatcagttggctgaaagatggcttgccactgaaagaaagtgaatttgttcgcttcagtaaaactgaaaacaaaattactttgagtattaagaatgccaagaaggagcatggaggaaaatacactgttattcttgataatgcagtgtgtagaattgcagtccccattacagtcatcacccttggcccaccatcaaagcccaaaggacccattcgatttgatgaaatcaaggctgatagtgtcatcctgtcatgggatgtacctgaagataatggaggaggagaaattacttgttacagcatcgagaagcgggaaacttcacaaactaactggaagatggtgtgttcaagtgttgccagaacgactttcaaagttcctaatctagtcaaagatgctgagtaccagtttagagtgagagcagaaaacagatacggagtcagccaaccacttgtctcaagcattattgtggcaaaacaccagttcaggattcctggtcccccaggaaagccagttatatacaatgtgacttctgatggcatgtcactaacttgggatgctccagtttatgatggtggttcagaagttactggattccatgttgaaaagaaagaaagaaatagcatcctctggcaaaaagttaatacatcaccaatctctggaagagaatatagagccactggactggtagaaggtctggattaccaattccgtgtatatgctgaaaattctgctggcctaagctcacctagtgacccaagcaaatttaccttagctgtttctccagtagacccacctggcactcctgactacattgatgtcacccgggaaaccatcacacttaaatggaacccaccattgcgtgatggaggcagtaagattgtgggctatagcattgagaaacggcaaggaaatgaacgctgggtgagatgcaactttactgacgtcagtgaatgtcagtacacagttacaggactcagtcctggggatcgctatgagttcagaataattgcaagaaatgctgttggaactataagcccgccctcacagtcttctggcattattatgacaagagatgaaaatgttccaccaatagtagagtttggccctgaatactttgatggtctcattattaagtccggagagagccttagaattaaagctttggtacaaggaagaccagtgcctcgagtaacttggttcaaagatggagtggaaatcgaaaagaggatgaatatggaaataaccgacgtacttggatccaccagcctatttgttagagatgctactcgggaccatcgtggtgtatacacagtggaagccaaaaatgcatctggttctgcaaaagcagaaattaaagtgaaagtacaagatacaccaggaaaagtagttgggccaataagattcaccaatattactggggagaagatgactctgtggtgggatgccccactcaatgacggttgtgctcccataacccactacatcattgaaaaacgggaaaccagcagacttgcctgggcactaattgaggataaatgtgaagcccaaagttacactgccattaaactaataaacggcaatgaataccaattccgtgtttctgcagttaacaagtttggtgttggcaggccacttgattctgatccagtggttgctcaaatacaatatactgttcctgatgcccctggcattccagaacctagcaacataacaggcaacagcattaccctgacatgggcaaggccagaatcagatggtggcagtgaaattcaacagtatatccttgaaagaagagaaaagaaaagcacaagatgggtaaaagtgatcagcaaacgaccaatctctgaaacaagattcaaagtcactggtctgacagaaggcaatgagtatgaattccatgtcatggctgaaaatgctgcaggagttggacctgcaagtggcatctcaagactcattaaatgtagagagcccgtcaacccaccaggtcctcccacagtggtcaaagtaacagacacatcaaagacaactgtgagcttagaatggtccaaaccagtgtttgatggtggcatggaaataattgggtatattattgaaatgtgtaaggccgacttaggagactggcacaaggtgaatgcagaggcatgtgtgaaaacaagatatacagtcactgatctacaagcaggtgaagaatacaaattccgagttagtgctatcaatggtgctggaaaaggcgacagctgtgaagtgactggcacaattaaagcagttgaccggttaacagctcctgagttagacatagatgcaaacttcaaacagactcatgttgttagagctggggccagtattcgcctcttcattgcctaccaaggtagacctactcctacagctgtgtggagcaaaccagactctaaccttagccttcgggctgatatccatacaacagattccttcagcaccctcactgtggaaaactgcaacagaaatgatgcagggaaatatacccttactgtggaaaacaacagtggtagtaagtcaatcacattcaccgtgaaagtgctagacactccaggcccacctggcccaattaccttcaaagatgtgacccggggatctgctacattgatgtgggatgcccctcttcttgacggtggtgcccgaatccatcattatgtggtagagaaacgagaggcaagtcgccgtagttggcaggttatcagtgaaaaatgcactcgtcagatcttcaaggtcaatgacctggccgaaggtgttccgtactatttccgtgtttctgcagtaaatgagtatggtgttggtgagccctatgaaatgccagaaccaattgtagccacagaacagcctgctccacctaggagacttgatgttgttgatactagcaaatcctccgcagtcttagcttggcttaaacctgaccacgatggaggcagccggatcactggctacctgcttgaaatgagacaaaagggatctgacttctgggttgaagctggtcacaccaaacagctaactttcacagtagagcgtcttgttgagaaaactgaatatgaattccgtgtgaaggccaagaatgatgctggctatagtgaacccagagaagccttctcttctgtcatcattaaggagcctcaaatcgagcccactgctgacctcactggaattaccaatcagcttataacttgcaaagcaggaagcccatttaccattgacgtaccaatcagtggtcgtcctgcccccaaagtaacatggaaactggaagaaatgagacttaaagagacagatcgagtgagcattacaacaacaaaagacagaaccacactgactgtaaaggacagcatgagaggtgactctggaagatacttcttgaccctggaaaatacagctggtgttaaaacatttagcgtcacagttgtggtcattggaaggccaggtccagtaaccggccccattgaggtctcatctgtctcagctgaatcgtgtgtcctgtcatggggagaacctaaagatggaggaggcactgaaattactaattacatagttgaaaagcgtgaatcgggtacaacagcttggcagcttgtcaattccagtgtcaagcgcactcaaattaaagtcactcatctcacaaaatacatggaatattctttccgtgtcagttcagagaacagatttggtgtcagcaaacctctagaatcagcaccaataattgctgaacatccatttgtcccaccaagcgctcctaccagacctgaggtctaccatgtgtctgccaatgccatgtctattcgttgggaagaaccctaccacgatggtggcagtaaaatcattggctactgggttgagaagaaagaacgtaatacaattctttgggtgaaagaaaacaaagtgccatgcttagagtgcaactacaaagtaactggtttagtagaaggactggaatatcagttcagaacttatgcactcaatgctgcaggtgttagcaaggccagcgaagcttcaagacctataatggctcaaaatccagttgatgcaccaggcagaccagaggtgacagatgtcacaagatcaacagtatcactgatttggtctgccccagcgtatgatggaggcagcaaggttgtgggctacatcatagagcgtaagccagtcagtgaggtaggagatggtcgctggctgaagtgcaactacaccattgtatctgacaatttcttcaccgtgactgctctcagtgaaggagacacttatgagttccgtgtgttagccaagaatgcagcaggcgtaattagcaaagggtctgaatctacaggccctgtcacttgccgagatgaatacgctccacccaaagccgaactggatgcccgattacacggtgatctggttaccatcagagcaggttctgatcttgttctggatgctgcagttggtggcaaacctgaacccaaaattatctggaccaaaggagacaaggagctagatctctgtgaaaaagtctctttgcagtatactggcaaacgagcaactgctgtgatcaagttctgtgacagaagtgacagtggaaaatacactttaacagtgaaaaatgccagcgggaccaaggccgtgtctgtcatggtcaaagtgcttgattcccctggcccatgtggaaagctcaccgtcagcagagtaacacaggagaagtgcactttagcctggagccttccgcaggaagacggaggagcagaaatcactcactacatcgtggaaagacgcgagactagcaggctcaactgggtgattgttgaaggcgaatgcccaaccctatcctatgtcgttaccaggctcatcaagaacaatgagtacatattccgagtgagggcagtaaacaaatatggccctggtgtgcctgttgaatcagagccaattgtagccagaaactcattcactattccatcaccacccggcatacctgaagaagttgggactggcaaagagcatatcatcattcagtggacaaaacctgaatctgatggtggcaatgaaatcagcaactacctagtagacaaacgtgagaagaagagcctgcgctggacacgtgtcaacaaagactatgtggtgtatgataccaggctgaaggtgaccagcctgatggagggttgtgattaccagttccgggtgaccgcagtgaatgcagctggtaacagtgagcccagcgaagcttccaacttcatctcatgcagagaaccatcatatacccctggaccaccttctgctccaagagttgtggataccaccaaacacagcattagtttggcatggaccaaacccatgtacgatggtggtactgacattgtaggatatgttctggaaatgcaagagaaggacactgatcagtggtaccgagtgcataccaatgccacaataagaaatactgaattcactgtgccagaccttaaaatgggccagaaatattccttcagagttgctgccgtgaacgtgaagggtatgagcgaatacagcgaatcaattgctgaaattgagcccgtggaaagaatagaaataccagatcttgagcttgcagatgatctaaagaagactgtgaccatcagggctggggcctccttgcgcttgatggtgtctgtatctggaagaccacctcctgtcataacgtggagcaagcagggcattgaccttgcaagccgggcaattattgacaccactgagagctactcattgctaatagtggacaaagttaatcggtacgatgctggaaaatacacaattgaagctgaaaaccaatctggcaagaaatcagcaacagtccttgttaaagtctatgatactcctggtccctgtccttcagtgaaagttaaggaagtatcaagagattctgtgactataacttgggaaattcccacgattgatggtggagctccagtcaacaattacatcgttgagaagcgtgaagctgctatgagagcattcaaaacagtaactaccaaatgcagcaagacactttacagaatttctggacttgtagaaggaaccatgtactatttcagagtgctgccagaaaatatttatggcattggagaaccttgtgaaacatctgatgcagtactggtctcagaagtgcctttggtgcctgcaaagctagaagtggtcgatgtcaccaaatccactgttacccttgcctgggaaaaaccactctacgatggtggtagccgactcactggatatgttctcgaggcctgcaaagctggcacagagagatggatgaaggttgtcaccttaaaacccacagtcctagagcacactgttacttccttaaatgaaggtgaacaatacttatttagaataagggcacaaaatgagaaaggtgtgtcagaaccaagagagactgtcacagccgtgactgtacaagacctcagagtgttgccaacaatcgatctttctacaatgcctcagaagaccatccatgtcccagctggcagaccagtagagctggtgatacctattgctggccgtccacctcctgctgcttcctggttctttgctggttctaaactgagagaatcagagcgtgtcacagttgaaactcacactaaagtagctaaattaaccatccgtgaaaccactatcagagatactggagaatacacacttgaattgaagaatgttaccggaactacttcagaaaccattaaagttatcattcttgacaagcctggtccaccaacaggacctattaagattgatgaaattgatgctacatcaattaccatttcctgggaaccacctgaattggacggtggtgctccactgagtggttatgtggtagaacaacgtgacgctcatcgtccaggatggctgcccgtttctgaatcagtgactaggtccacgtttaagtttaccagactcaccgaaggaaatgagtatgtgttccgtgtggctgcaacaaaccgcttcgggattggctcttacttgcagtctgaggtcatagagtgtcgcagcagcatccgtattcctggacccccagaaacattacagatatttgatgtttcccgtgatggcatgacacttacttggtacccaccagaggatgacggtggctcccaagtgactggatatattgtggagcgcaaagaagtgagagcagatcgatgggtccgtgtaaataaagtacctgtgacaatgacacggtaccgctccactggccttactgaaggcttagaatatgaacaccgtgtcacagccattaatgcaagagggtctgggaaaccaagtcgtccttccaaacccatcgttgccatggatccaattgctcctccaggaaagccacaaaacccaagagttactgatacaacaaggacatcagtctccctggcctggagtgttccagaagatgaaggaggatctaaagtcacaggctacttgattgaaatgcaaaaagtagatcaacatgaatggaccaagtgtaacaccactccaaccaagattcgagagtatactctaacacacctacctcagggtgcagaatacaggttccgcgtcctagcttgtaatgctggtggacctggtgagcctgctgaggtaccaggaacagtcaaagtcactgaaatgcttgaatatcctgattatgaacttgatgaaagataccaagaaggtatctttgtaaggcaaggtggcgtcatcagacttaccataccaatcaaaggaaaaccattcccaatatgtaaatggaccaaggaaggccaggatattagtaagcgtgccatgattgcaacatctgaaacacacactgagcttgtgatcaaagaagcagacaggggtgattctggcacttatgacctggttctggaaaataaatgtggcaagaaggctgtctacatcaaggtcagggtgataggaagtcccaacagtccagaagggccactggaatatgatgacatccaagtccgctctgtgagggtcagctggagacctcctgctgatgatggtggtgctgacatcttaggctacatcctcgagagacgagaagtgcctaaagccgcctggtataccattgattccagagtccgaggtacatctctggtggtaaaaggcctcaaagagaatgtagaataccatttccgtgtttcagcagaaaaccagtttggcataagcaaacccttgaaatctgaggaaccagtcacaccaaaaacaccattgaatcctccagaacctccaagcaatcctccagaagtactcgatgtaaccaagagttctgttagcttgtcctggtcccggcccaaagatgatggtggttctagagtcacaggctactacatcgaacgcaaagagacatccactgacaagtgggtcagacacaacaagactcagatcaccaccacaatgtacactgtcacagggcttgttcccgatgctgagtatcagttccgcatcatcgcacagaatgatgttggcctgagtgagaccagccctgcttctgaaccagttgtttgcaaagatccatttgataaaccaagccaaccaggagaacttgagattctttcaatatccaaagatagtgtcactctacagtgggagaaacctgaatgtgatggtggtaaagaaattcttggatactgggttgaatatagacagtctggagacagtgcctggaagaagagcaataaggaacgtattaaggacaagcaattcacaataggaggtttgctggaagctactgagtatgaattcagggtttttgctgagaatgagactgggctgagcagacctcgcagaactgctatgtctataaagactaaactcacatctggagaggccccaggaatacgcaaagaaatgaaggatgttaccacaaaattgggtgaagctgctcaactctcatgccagattgttggaaggcctcttcctgacattaaatggtacagatttggtaaagagctcatacaaagccggaaatacaaaatgtcttcagatggacgcacacacactcttacagtaatgacagaggaacaggaagatgaaggtgtttatacctgcatagccaccaatgaggttggagaagtagaaaccagtagtaagcttctcctgcaagcaacaccgcagttccatcctggttacccactgaaagagaaatattatggagctgtgggttccacacttcggcttcatgttatgtacattggtcgtccagtacctgccatgacttggttccatggtcagaaacttttgcaaaactcagaaaacattactattgaaaacactgagcactatactcatcttgtcatgaagaatgtccaacgtaagactcatgctgggaaatacaaagtccagctcagcaatgtttttggaacagttgatgccatccttgatgtggaaatacaagataaaccagacaaacctacaggaccaattgtgatcgaagctctattgaagaactccgcagtgatcagctggaaaccacccgcagatgacggaggctcctggatcaccaactatgtggtggaaaaatgtgaggccaaggagggggctgaatggcaattggtgtcttcagccatctcagtgacaacctgtagaattgtgaacctcacagaaaatgctggctattacttccgggtttcagctcagaacactttcggcatcagtgaccctctagaagtgtcctcagttgtgatcattaagagtccatttgaaaagccaggtgctcctggcaaaccaactattactgctgtcacaaaagattcttgtgttgtggcctggaagccacctgccagtgatggaggtgcaaagattagaaattactaccttgagaagcgtgagaagaagcagaataaatggatttctgtgacaacagaagaaattcgagaaactgtcttttcagtgaaaaaccttattgaaggtcttgaatacgagtttcgtgtgaaatgtgaaaatctaggtggggaaagtgaatggagtgaaatatcagaacccatcactcccaaatctgatgtcccaattcaggcaccacactttaaagaggaactgagaaatctaaatgtcagatatcagagcaatgctaccttggtctgcaaagtgactggtcatccaaaacctatcgtcaaatggtacagacaaggcaaagaaatcattgcagatggattaaaatataggattcaagaatttaagggtggctaccaccagctcatcattgcaagtgtcacagatgatgatgccacagtttaccaagtcagagctaccaaccaagggggatctgtgtctggcactgcctccttggaagtggaagttccagctaagatacacttacctaaaactcttgaaggcatgggagcagttcatgctctccgaggtgaagtggtcagcatcaagattcctttcagtggcaaaccagatcctgtgatcacctggcagaaaggacaagatctcattgacaataatggccactaccaagttattgtcacaagatccttcacatcacttgttttccccaatggggtagagagaaaagatgctggtttctatgtggtctgtgctaaaaacagatttggaattgatcagaagacagttgaactggatgtggctgatgttcctgacccacccagaggagtcaaagttagtgatgtctcacgagattctgtcaacttaacatggactgagccagcctctgatggtggcagcaaaatcaccaactacattgttgaaaaatgtgcaactactgcagaaagatggctccgtgtaggacaggcccgagaaacacgttataccgtgatcaacttatttggaaaaacaagttaccagttccgggtaatagctgaaaataaatttggtctgagcaagccttcagagccttcagaaccaaccataaccaaagaagataagaccagagctatgaactatgatgaagaggtagatgaaaccagggaagtctccatgactaaagcatctcactcttcaaccaaggaactctatgagaaatatatgattgctgaagatcttgggcgtggtgagtttggaattgtccatcgttgtgttgaaacatcctcaaagaagacatacatggccaaatttgttaaagtcaaagggactgatcaggttttggtaaagaaggaaatttccattctgaatattgctaggcatagaaacatcttacacctccatgaatcatttgaaagcatggaagaattagttatgatctttgagtttatatcaggacttgacatatttgagcgcattaacacaagtgcttttgaacttaatgaaagagaaattgtaagttatgttcaccaggtctgtgaagcacttcagtttttacacagtcataatattggacactttgacattagaccagaaaatatcatttaccaaaccagaagaagctctaccattaaaatcatagaatttggtcaagcccgtcagctgaaaccaggggacaacttcaggcttctattcactgccccagaatactatgcacctgaagtccaccagcatgatgttgtcagcacagccacagacatgtggtcacttggaacactggtatatgtgctattgagtggtatcaacccattcctggctgaaactaaccaacagatcattgagaatatcatgaatgctgaatatactttcgatgaggaagcattcaaagagattagcattgaagccatggattttgttgaccggttgttagtgaaagagaggaaatctcgcatgacagcatcggaggctctccagcacccatggttgaagcagaagatagaaagagtcagtactaaagttatcagaacattaaaacaccggcgttattaccacaccctgatcaagaaagacctcaacatggttgtgtcagcagcccggatctcctgtggtggtgcaattcgatctcagaagggagtgagtgttgctaaagttaaagtggcatccattgaaattggcccagtttctgggcagataatgcatgcagttggtgaagaaggaggacatgtcaaatatgtatgcaaaattgaaaattatgatcagtctacccaagtgacttggtactttggcgtccgacagctggagaacagtgagaaatacgaaatcacctacgaagatggagtggccatcctctatgtcaaagacattaccaaattagatgatggtacctacagatgcaaagtagtcaatgactatggtgaagacagttcttatgcagagctatttgttaaaggtgtgagagaagtctatgactattactgccgtagaaccatgaagaaaattaagcgcagaacagacacaatgagactcctggaaaggccaccagaatttaccctgcctctctataataagacagcttatgtaggtgaaaatgtccggtttggagtaactataactgtccacccagagcctcatgtaacatggtataaatcaggtcagaaaatcaaaccaggtgacaatgacaagaagtacacatttgagtcagacaagggtctttaccaattaacaatcaacagtgtcactacagatgatgacgctgaatatactgttgtggcaaggaacaaatatggtgaagacagctgtaaagcaaagctgacagtaaccctacacccacctccaacagatagtaccttaagacccatgttcaaaaggttactggcaaatgcagaatgccaagaaggccaaagtgtctgctttgagatcagagtgtctggcatccccccaccaacattaaaatgggagaaagatggtcagccactgtccctcgggcctaacattgaaattatccatgaaggcttggattattatgctctgcacatcagggacactttgcctgaagacacgggttattatagagtcacagccactaacacagctgggtccaccagctgccaggctcacctacaagtggaacgcctgaggtacaagaaacaggaattcaagagtaaggaggagcatgagcgacacgtacaaaaacaaattgacaaaaccctcagaatggctgaaattctttctggaactgaaagtgtaccactgacacaggtagctaaagaggctctgagagaagctgctgtcctttataaaccggctgtaagcaccaagactgtaaaaggggaattcagacttgagatagaagaaaagaaggaggagagaaaactccggatgccttatgatgtaccagagccacgcaagtataagcagactaccatagaagaagaccaacgcatcaagcagttcgtgcccatgtctgacatgaagtggtataaaaagatacgtgatcagtatgaaatgcctgggaaacttgacagagttgtacagaaacgacccaagcgcatccgcctttcaagatgggaacagttctatgtgatgcctcttccacgcattacagatcaatacagacctaaatggcgtattcctaaactgtcccaagatgatcttgagatagtgagaccagcccgccggcgtacaccttctcctgattatgacttttactaccgacctagaagacgttctcttggggacatctctgatgaagaattactcctccccattgatgactacttagcaatgaaaagaacagaggaagagaggctgcgtcttgaagaagagcttgagttaggtttttcagcttcacccccaagtcgaagccctccacactttgagctttctagcctacgttactcttcaccacaagctcatgtcaaggtggaggaaacaagaaaagacttcaggtattcaacctatcacatcccaacgaaggctgaagctagtacaagttatgcagaactgagggaacggcatgcccaggctgcgtacagacagccaaagcaacggcaaagaatcatggctgagagggaggatgaagagttgcttcgcccagttacgaccacccagcatctctcagaatacaaaagcgaacttgacttcatgtcaaaggaggaaaagtctagaaagaaatcaaggcgacaaagagaagtgacagaaataacagaaattgaggaagaatacgaaatctcaaaacatgctcaaagagaatcatcctcatctgcgtctagactactgagacgacggcgctccctgtctccaacttatattgagttaatgaggccagtgtctgagctgatccggtcacgtccacaaccggctgaggaatacgaagatgacacagaaagaaggtcacctactccagagagaactcgcccacgatcccccagccctgtgtctagtgagagatcactctcgagatttgagaggtctgcaagatttgatatcttttccaggtatgagtccatgaaagctgctttaaaaactcagaagacatcagaaaggaagtatgaagttttgagtcagcagcctttcacactggaccatgcccctcgaatcacactgagaatgcgctcgcacagggtaccatgtggccaaaatacacgttttattttaaatgttcagtctaagccaactgccgaggttaaatggtaccacaatggtgtggaactccaagaaagcagtaagattcattacaccaacacgagtggagtcctcaccctggaaattctggactgtcatactgatgacagtggaacctaccgtgctgtgtgcaccaactacaagggcgaagcttctgactatgcaacgttggacgtgacaggaggggattataccacctatgcttcccaacgcagagatgaagaggtccccagatctgttttccctgagctgacaagaacagaggcgtatgctgtttcatcatttaagaaaacatctgagatggaagcttcgtcttctgtcagggaagtgaaatcacagatgacggagacaagggaaagtctctcctcatatgaacactctgcatctgcagaaatgaaaagtgctgcattagaagaaaagtcactggaagaaaaatccacaaccagaaagatcaagacgactttggcagcaagaattctaacaaagccacggtccatgaccgtctacgagggcgagtctgcaaggttttcttgtgacaccgatggtgagccggtaccaactgtgacctggctgcgtaaaggacaagtgctaagtacttctgcccgccaccaagtgaccaccacaaagtacaaatcaacctttgagatctcttcagtccaggcttccgatgagggcaattacagcgtggtggtagaaaacagtgaagggaaacaagaagcagagttcactctgactattcaaaaggccagggtaactgaaaaggctgtgacatcaccaccaagagtcaaatccccagagcctcgggtgaaatccccagaagcagttaagtctccaaaacgagtaaatctccagaaccttctcacccgaaagccgtatcacccacagagacaaaaccaacaccaacagagaaagttcagcacctcccagtctctgccccaccaaagattactcagttcctgaaagcagaagcttctaaagagattgcaaaactgacctgtgtggttgaaagcagtgtattaagggcaaaagaggtcacctggtataaagatggcaagaaactgaaggaaaatgggcatttccagtttcattattcagcagatggtacctatgagctcaaaatcaataacctcactgaatctgatcaaggagaatatgtttgtgagatttctggtgaaggtggaacgtctaaaaccaacttacaatttatggggcaagcctttaagagtatccatgagaaggtatcaaaaatatcagaaactaagaaatcagatcagaaaaccactgagtcaacagtaaccagaaaaactgaaccaaaagctcctgaaccaatttcctcaaaaccagtaattgttactgggttgcaggatacaactgtttcttcagacagtgttgctaaatttgcagttaaggctactggagaaccccggccaactgccatctggacaaaagatggaaaggccattacacaaggaggtaaatataaactctctgaagacaagggagggttcttcttagaaattcataagactgatacttctgacagtggactttatacttgtacagtaaaaaattcagctggatctgtgtcctctagctgcaaattaacaataaaagctataaaagatactgaggcacagaaagtctctacacaaaagacttctgaaattacacctcagaagaaagctgttgtccaagaggaaatttcccaaaaagccctaaggtctgaagaaattaagatgtcagaggcaaaatctcaagaaaagttagccctcaaagaggaagcttcaaaggttctgatttctgaagaagtcaagaaatcagcagcaacctccctggaaaaatccattgtccatgaggaaatcactaaaacatcacaggcatcagaagaagtcagaactcatgctgagattaaagcattttctactcagatgagcataaacgaaggtcaaagactggttttaaaagccaacattgctggtgccactgatgtgaaatgggtactgaatggcgtagagcttaccaactctgaggagtaccgatatggtgtctcaggcagcgatcagaccctaaccatcaagcaagccagtcacagagatgaaggaatcctcacctgcataagcaaaaccaaggaaggaatcgtcaagtgtcagtatgatttgacactgagcaaagaactctcagatgctccagccttcatctcacagcctagatctcaaaatattaatgaaggacaaaatgttctctttacttgtgaaatcagtggcgagccatcccctgaaatcgaatggtttaaaaacaacctgccaatttctatttcttcaaatgtcagcataagccgctccagaaatgtatactcccttgaaatccgaaatgcatcagtcagcgacagtggaaagtacacaattaaggccaaaaatttccgtggccagtgttcagctacagcttccttaatggtccttcctctagttgaagaaccttccagagaggtagtattgagaacaagtggtgacacaagcttgcaaggaagcttctcgtctcagtcagtccaaatgtctgcctccaagcaggaggcctccttcagcagtttcagcagcagcagtgctagcagcatgactgagatgaaatttgcaagcatgtctgcccaaagcatgtcctccatgcaagagtcctttgtagaaatgagttccagcagctttatgggaatatctaatatgacacaactggaaagctcaactagtaaaatgcttaaagcaggcataagaggaattccgcctaaaattgaagctcttccatctgatatcagcattgatgaaggcaaagttctaacagtagcctgtgctttcacgggtgagcctaccccagaagtaacatggtcctgtggtggaagaaaaatccacagtcaagaacaggggaggttccacattgaaaacacagatgacctgacaaccctgatcatcatggacgtacagaaacaagatggtggactttataccctgagtttagggaatgaatttggatctgactctgccactgtgaatatacatattcgatccatttaagagggcctgtgcccttatactctacactcattcttaacttttcgcaaacgtttcacacggactaatctttctgaactgtaaatatttaaagaaaaaaaagtagttttgtatcaacctaaatgagtcaaagttcaaaaatattcatttcaatcttttcataattgttgacctaagaatataatacatttgctagtgacatgtacatactgtatatagccggattaacggttataaagttttgtaccatttattttatgacattttacaatgtaagttttgaaactaactgttggtaggagaaagtttcttatggaacgaataccctgctcaacatttaatcaatctttgtgcctcaacatactgttgatgtctaagtatgcctcagtgggttgagaaaatccccattgaagatgtcctgtccacctaaaagagaatgatgctgtgcatatcacttgatatgtgcaccaatacctactgaatcagaaatgtaaggcattggtgatgtttgcatttaccctcctgtaagcaacactttaacgtcttacattttctctgatgatgtcacacaaaattatcatgacaaatattaccagagcaaagtgtaacggccaacactttgttcgctcattttacgctgtctctgacataaggagtgcctgaatagcttggaaaagtaacatctcctggccatcccttcatttaaccaagctattcaagtattcctatgccagagcagtgccaactcttggaggtcccagagtgcagccaatgcctttgtgtggtagttctaaattttaattgcacctgaaaaacctgggcacctaagcaatgagccacagcaaaaagtaaagaacaacaacaaaataaagctgttgttaaattttaaacaatattactaattgcccaaaatgtcaatttgatgtagttcttttcatgcaagtataaattcaattgttagttataattgttggacctccttgagatagtaacaacaaaataaagcaagctatctgcacctcaaaa

SEQ ID NO: 586 - DNA, 4870 bp, Homo sapiens
agggcctgtccctctcacttccactcgattgtaatttcatccccgggccggtcgagcctccctccctcccgcggccagcccttccctcccagtcggcctccttcgtcgcccccgcccccgcgaaaagccctgcagcttgcagccggcttcactcgcgcacgccgacctcccggctgcagtcctacctcttggaactacccgtgtttccgggcccagccctcgcagccccccacctcctcgccccggcccggggatccgttggggccgcgtcccccacgcgcccccggagacgccctttccgtgtgcgcccgggacttggtgaaactttgcaggcgccggctgcgaaatggatttaatccgaggcgtcttgctccggctcctgctcctggcttccagcctcggacccggcgcggtgtcgctccgagcggccatccgaaaaccaggcaaggtagggcctcctcttgacatcaagctgggcgcattgaactgtacggctttcagcatccagtggaaaatgccaaggcatcctggaagtcccatccttgggtacactgtcttttactctgaggttggcgcagataaatccctgcaggagcagttgcacagcgtgcctctcagccgggacatcccgaccacggaggaagtgattggagatttgaaaccaggcactgaatatcgtgtgagcatagcagcttacagccaggctggcaaagggcggctgagctctcctcggcatgtcaccactttgtcccaagattcctgcctgcctcctgcagctccccagcagccacatgtcattgtggtttcggattctgaggtggccctgtcttggaaacctggagcgagtgaaggaagcgcccctattcagtactattctgtggaattcatcaggccagatttcgacaagaagtggacctcaatccatgagcggatccagatggactccatggttatcaagggcctcgatccagataccaactaccagtttgccgtgagggcaatgaattcccatggccccagcccccgcagctggcccagtgacatcatccggaccctctgccctgaggaggcgggaagtggccgctatggaccccgttatatcaccgacatgggagctggtgaggatgatgaaggatttgaagacgacttagatttggatatttcctttgaggaggttaaaccacttcctgctaccaaaggagggaataagaaatttttggtggaaagcaagaagatgtctatatctaacccaaagaccatttctaggctcatcccccctacctcagcatctctccctgtgaccacggtggctccccagcccattcccatacagagaaaggggaagaatggtgtggccataatgtcaaggctctttgacatgccttgtgatgaaactctctgctctgctgacagcttctgtgtcaatgactacacctgggggggctcgcgatgccagtgcaccctgggcaaaggtggtgagagctgctcagaagatattgttatccagtatcctcagttctttggccactcctatgtaacgtttgaacctctgaagaattcttatcaggcatttcaaattactcttgaatttagggcggaggcagaggatggcttactgctctactgtggggagaacgaacacgggaggggggatttcatgtccctggctatcatccgacgctccctgcagttcaggtttaattgtggaactggggttgccatcatcgtaagtgagaccaaaatcaaactagggggttggcacacggttatgctctacagagatgggctgaacgggctgctgcagctgaacaatggcaccccagtgacaggccagtctcagggccaatacagtaaaattactttccggacacctctctatcttggtggcgctcccagcgcttactggttggttagagcaacagggacaaaccgaggctttcaaggctgtgtgcagtcgctcgctgtgaatgggaggagaattgacatgaggccctggcccctgggaaaagcactcagtggggctgatgtgggggaatgcagcagtggaatctgtgatgaggcctcgtgcatccatggtggcacctgcacagcaatcaaagccgactcctacatttgcctctgtccccttgggtttaaaggtcgacactgtgaagatgctttcaccttgaccattcctcagttcagagagtctctgagatcttacgctgcaactccctggccactggagccccagcattacctttccttcatggaatttgagatcacatttcggccagactcaggagatggtgtcctcctgtacagctatgacacaggcagcaaagacttcctgtccatcaacttggcagggggccacgtggagttccgctttgactgtggctctgggaccggtgtcctcaggagtgaagatcccctcaccctgggcaactggcacgagcttcgtgtatctcgcacagcaaagaatggaatcttacaggtggataagcagaagatagtggagggaatggcagagggaggcttcacacagattaagtgcaacacagacattttcattggcggagtccccaattatgatgatgtgaagaagaactcgggtgtcctgaagcctttcagcgggagcatccagaagatcatcctgaatgaccgaaccatccatgtgaagcatgacttcacctccggagtgaatgtggagaatgcggcccacccctgtgtgagagccccttgtgcccatgggggcagctgccggcccaggaaggagggctatgactgtgactgccccttgggctttgaggggcttcactgccagaaagcgatcatagaagccattgagatcccgcagtttatcggccgcagttacctgacgtatgacaacccagatatcttgaagagggtgtcaggatcaagatcaaatgtgttcatgaggtttaaaacaactgccaaggatggccttttgctgtggaggggagacagccccatgagacccaacagcgacttcatttccttgggccttcgggatggagccctcgtgttcagctataacctgggcagtggtgtggcatccatcatggtgaatggctccttcaacgatggtcggtggcaccgagttaaggccgttagggatggccagtcaggaaagataaccgtggatgactatggagccagaacaggcaaatccccaggcatgatgcggcagcttaacatcaatggagctctgtatgtgggtggaatgaaggaaattgctctgcacactaacaggcaatatatgagagggctcgtgggctgtatctctcacttcaccctgtccaccgattaccacatttccctcgtggaagatgccgtggatgggaaaaacatcaacacttgtggagccaagtaacaccagctggccttgtccaagggacagagccttctattctgagaatcccaggggccctcagaccctgcctgatgctatatgcagaggcccagggaccaggtgtgtttcctctcaccaagaagaaagtacacactgatgagaaactgagaaccaagacaggcatccctgggtggcctttcctgctgacactccacgagctgacccagcagaattctctgtgtaggaagcatcggactttgtccattgaatatgtagcggctgccagagatcacacatcaatgcaaattccagagcctgtctgctatagctcagtgactgtgttgtgattcatagtacattaaaaagagagagagagagaaagaatcccacagggcactattaaaatacttctctccttccctgactcatgacactcttcctgacagcagaatgactgtgtgaccttgaacttcacatttcccacattggcccttggattgttcggattaaccccttccactcctcactggctggttcactgtgttctgactagtccataaaaataaagatggaaggagatcaaacacagaatcataatcataatgcggcccccttccccagagcttacctcgaatgtgaaatccctacttcttataatgcagagttaaggagctgagcccccatgattttgtagctgtacttttgtatgtgtatatttttatagctgcagattgtccacacagtatacttttggaagtttgggtggatgactctgaattcttgcacacctttcctaaaaatttctcccaagagagacttgtttgggccttttgtggtgtcagtggaatggataggtaacttgggtgggcaacttggggagctgaccattctcttttggtaaatgttgacggctcaagaggatgaatatgaagctttccaagataagcagattaaaaggaacatgtgttaccgaggtaggtcactgtcatttttgttttaagagttggggggagtatctatagtaaacttgaataaaggggacaaagctagaacttattcattcattcattcacttatggagttgttactgattttgcggaggtcaggttcataccaatggacactaatacaatcagtgttcccaaggctgtgcaggggtggggggacatgctgtcaggatggtctgagcatctgggtgagaaccagagaaacaggacttcttccttctgtaccatgagctgtgtccctttactatgcaagcacatgaccccagagacagctggttcactggcagatccccatgatggacttactaagggaaaggtgagatgaacactgcccccaaggagggggtgaaatatgatctaacttatgcaagagcctataattagtcccagtctcgactctacatttgtttgtgcagcattcattcagcaaagacttttggggtttgtgcaaggcacagttttaagcacataatgtaattctaaaagatgaataaactagagaggttca

SEQ ID NO: 587 - DNA, 14121 bp, Homo sapiens
attcccaccgggacctgcggggctgagtgcccttctcggttgctgccgctgaggagcccgcccagccagccagggccgcgaggccgaggccaggccgcagcccaggagccgccccaccgcagctggcgatggacccgccgaggcccgcgctgctggcgctgctggcgctgcctgcgctgctgctgctgctgctggcgggcgccagggccgaagaggaaatgctggaaaatgtcagcctggtctgtccaaaagatgcgacccgattcaagcacctccggaagtacacatacaactatgaggctgagagttccagtggagtccctgggactgctgattcaagaagtgccaccaggatcaactgcaaggttgagctggaggttccccagctctgcagcttcatcctgaagaccagccagtgcaccctgaaagaggtgtatggcttcaaccctgagggcaaagccttgctgaagaaaaccaagaactctgaggagtttgctgcagccatgtccaggtatgagctcaagctggccattccagaagggaagcaggttttcctttacccggagaaagatgaacctacttacatcctgaacatcaagaggggcatcatttctgccctcctggttcccccagagacagaagaagccaagcaagtgttgtttctggataccgtgtatggaaactgctccactcactttaccgtcaagacgaggaagggcaatgtggcaacagaaatatccactgaaagagacctggggcagtgtgatcgcttcaagcccatccgcacaggcatcagcccacttgctctcatcaaaggcatgacccgccccttgtcaactctgatcagcagcagccagtcctgtcagtacacactggacgctaagaggaagcatgtggcagaagccatctgcaaggagcaacacctcttcctgcctttctcctacaagaataagtatgggatggtagcacaagtgacacagactttgaaacttgaagacacaccaaagatcaacagccgcttctttggtgaaggtactaagaagatgggcctcgcatttgagagcaccaaatccacatcacctccaaagcaggccgaagctgttttgaagactctccaggaactgaaaaaactaaccatctctgagcaaaatatccagagagctaatctcttcaataagctggttactgagctgagaggcctcagtgatgaagcagtcacatctctcttgccacagctgattgaggtgtccagccccatcactttacaagccttggttcagtgtggacagcctcagtgctccactcacatcctccagtggctgaaacgtgtgcatgccaacccccttctgatagatgtggtcacctacctggtggccctgatccccgagccctcagcacagcagctgcgagagatcttcaacatggcgagggatcagcgcagccgagccaccttgtatgcgctgagccacgcggtcaacaactatcataagacaaaccctacagggacccaggagctgctggacattgctaattacctgatggaacagattcaagatgactgcactggggatgaagattacacctatttgattctgcgggtcattggaaatatgggccaaaccatggagcagttaactccagaactcaagtcttcaatcctgaaatgtgtccaaagtacaaagccatcactgatgatccagaaagctgccatccaggctctgcggaaaatggagcctaaagacaaggaccaggaggttcttcttcagactttccttgatgatgcttctccgggagataagcgactggctgcctatcttatgttgatgaggagtccttcacaggcagatattaacaaaattgtccaaattctaccatgggaacagaatgagcaagtgaagaactttgtggcttcccatattgccaatatcttgaactcagaagaattggatatccaagatctgaaaaagttagtgaaagaagctctgaaagaatctcaacttccaactgtcatggacttcagaaaattctctcggaactatcaactctacaaatctgtttctcttccatcacttgacccagcctcagccaaaatagaagggaatcttatatttgatccaaataactaccttcctaaagaaagcatgctgaaaactaccctcactgcctttggatttgcttcagctgacctcatcgagattggcttggaaggaaaaggctttgagccaacattggaagctctttttgggaagcaaggatttttcccagacagtgtcaacaaagctttgtactgggttaatggtcaagttcctgatggtgtctctaaggtcttagtggaccactttggctataccaaagatgataaacatgagcaggatatggtaaatggaataatgctcagtgttgagaagctgattaaagatttgaaatccaaagaagtcccggaagccagagcctacctccgcatcttgggagaggagcttggttttgccagtctccatgacctccagctcctgggaaagctgcttctgatgggtgcccgcactctgcaggggatcccccagatgattggagaggtcatcaggaagggctcaaagaatgacttttttcttcactacatcttcatggagaatgcctttgaactccccactggagctggattacagttgcaaatatcttcatctggagtcattgctcccggagccaaggctggagtaaaactggaagtagccaacatgcaggctgaactggtggcaaaaccctccgtgtctgtggagtttgtgacaaatatgggcatcatcattccggacttcgctaggagtggggtccagatgaacaccaacttcttccacgagtcgggtctggaggctcatgttgccctaaaagctgggaagctgaagtttatcattccttccccaaagagaccagtcaagctgctcagtggaggcaacacattacatttggtctctaccaccaaaacggaggtgatcccacctctcattgagaacaggcagtcctggtcagtttgcaagcaagtctttcctggcctgaattactgcacctcaggcgcttactccaacgccagctccacagactccgcctcctactatccgctgaccggggacaccagattagagctggaactgaggcctacaggagagattgagcagtattctgtcagcgcaacctatgagctccagagagaggacagagccttggtggataccctgaagtttgtaactcaagcagaaggtgcgaagcagactgaggctaccatgacattcaaatataatcggcagagtatgaccttgtccagtgaagtccaaattccggattttgatgttgacctcggaacaatcctcagagttaatgatgaatctactgagggcaaaacgtcttacagactcaccctggacattcagaacaagaaaattactgaggtcgccctcatgggccacctaagttgtgacacaaaggaagaaagaaaaatcaagggtgttatttccataccccgtttgcaagcagaagccagaagtgagatcctcgcccactggtcgcctgccaaactgcttctccaaatggactcatctgctacagcttatggctccacagtttccaagagggtggcatggcattatgatgaagagaagattgaatttgaatggaacacaggcaccaatgtagataccaaaaaaatgacttccaatttccctgtggatctctccgattatcctaagagcttgcatatgtatgctaatagactcctggatcacagagtccctcaaacagacatgactttccggcacgtgggttccaaattaatagttgcaatgagctcatggcttcagaaggcatctgggagtcttccttatacccagactttgcaagaccacctcaatagcctgaaggagttcaacctccagaacatgggattgccagacttccacatcccagaaaacctcttcttaaaaagcgatggccgggtcaaatataccttgaacaagaacagtttgaaaattgagattcctttgccttttggtggcaaatcctccagagatctaaagatgttagagactgttaggacaccagccctccacttcaagtctgtgggattccatctgccatctcgagagttccaagtccctacttttaccattcccaagttgtatcaactgcaagtgcctctcctgggtgttctagacctctccacgaatgtctacagcaacttgtacaactggtccgcctcctacagtggtggcaacaccagcacagaccatttcagccttcgggctcgttaccacatgaaggctgactctgtggttgacctgctttcctacaatgtgcaaggatctggagaaacaacatatgaccacaagaatacgttcacactatcatgtgatgggtctctacgccacaaatttctagattcgaatatcaaattcagtcatgtagaaaaacttggaaacaacccagtctcaaaaggtttactaatattcgatgcatctagttcctggggaccacagatgtctgcttcagttcatttggactccaaaaagaaacagcatttgtttgtcaaagaagtcaagattgatgggcagttcagagtctcttcgttctatgctaaaggcacatatggcctgtcttgtcagagggatcctaacactggccggctcaatggagagtccaacctgaggtttaactcctcctacctccaaggcaccaaccagataacaggaagatatgaagatggaaccctctccctcacctccacctctgatctgcaaagtggcatcattaaaaatactgcttccctaaagtatgagaactacgagctgactttaaaatctgacaccaatgggaagtataagaactttgccacttctaacaagatggatatgaccttctctaagcaaaatgcactgctgcgttctgaatatcaggctgattacgagtcattgaggttcttcagcctgctttctggatcactaaattcccatggtcttgagttaaatgctgacatcttaggcactgacaaaattaatagtggtgctcacaaggcgacactaaggattggccaagatggaatatctaccagtgcaacgaccaacttgaagtgtagtctcctggtgctggagaatgagctgaatgcagagcttggcctctctggggcatctatgaaattaacaacaaatggccgcttcagggaacacaatgcaaaattcagtctggatgggaaagccgccctcacagagctatcactgggaagtgcttatcaggccatgattctgggtgtcgacagcaaaaacattttcaacttcaaggtcagtcaagaaggacttaagctctcaaatgacatgatgggctcatatgctgaaatgaaatttgaccacacaaacagtctgaacattgcaggcttatcactggacttctcttcaaaacttgacaacatttacagctctgacaagttttataagcaaactgttaatttacagctacagccctattctctggtaactactttaaacagtgacctgaaatacaatgctctggatctcaccaacaatgggaaactacggctagaacccctgaagctgcatgtggctggtaacctaaaaggagcctaccaaaataatgaaataaaacacatctatgccatctcttctgctgccttatcagcaagctataaagcagacactgttgctaaggttcagggtgtggagtttagccatcggctcaacacagacatcgctgggctggcttcagccattgacatgagcacaaactataattcagactcactgcatttcagcaatgtcttccgttctgtaatggccccgtttaccatgaccatcgatgcacatacaaatggcaatgggaaactcgctctctggggagaacatactgggcagctgtatagcaaattcctgttgaaagcagaacctctggcatttactttctctcatgattacaaaggctccacaagtcatcatctcgtgtctaggaaaagcatcagtgcagctcttgaacacaaagtcagtgccctgcttactccagctgagcagacaggcacctggaaactcaagacccaatttaacaacaatgaatacagccaggacttggatgcttacaacactaaagataaaattggcgtggagcttactggacgaactctggctgacctaactctactagactccccaattaaagtgccacttttactcagtgagcccatcaatatcattgatgctttagagatgagagatgccgttgagaagccccaagaatttacaattgttgcttttgtaaagtatgataaaaaccaagatgttcactccattaacctcccattttttgagaccttgcaagaatattttgagaggaatcgacaaaccattatagttgtactggaaaacgtacagagaaacctgaagcacatcaatattgatcaatttgtaagaaaatacagagcagccctgggaaaactcccacagcaagctaatgattatctgaattcattcaattgggagagacaagtttcacatgccaaggagaaactgactgctctcacaaaaaagtatagaattacagaaaatgatatacaaattgcattagatgatgccaaaatcaactttaatgaaaaactatctcaactgcagacatatatgatacaatttgatcagtatattaaagatagttatgatttacatgatttgaaaatagctattgctaatattattgatgaaatcattgaaaaattaaaaagtcttgatgagcactatcatatccgtgtaaatttagtaaaaacaatccatgatctacatttgtttattgaaaatattgattttaacaaaagtggaagtagtactgcatcctggattcaaaatgtggatactaagtaccaaatcagaatccagatacaagaaaaactgcagcagcttaagagacacatacagaatatagacatccagcacctagctggaaagttaaaacaacacattgaggctattgatgttagagtgcttttagatcaattgggaactacaatttcatttgaaagaataaatgacgttcttgagcatgtcaaacactttgttataaatcttattggggattttgaagtagctgagaaaatcaatgccttcagagccaaagtccatgagttaatcgagaggtatgaagtagaccaacaaatccaggttttaatggataaattagtagagttggcccaccaatacaagttgaaggagactattcagaagctaagcaatgtcctacaacaagttaagataaaagattactttgagaaattggttggatttattgatgatgctgtcaagaagcttaatgaattatcttttaaaacattcattgaagatgttaacaaattccttgacatgttgataaagaaattaaagtcatttgattaccaccagtttgtagatgaaaccaatgacaaaatccgtgaggtgactcagagactcaatggtgaaattcaggctctggaactaccacaaaaagctgaagcattaaaactgtttttagaggaaaccaaggccacagttgcagtgtatctggaaagcctacaggacaccaaaataaccttaatcatcaattggttacaggaggctttaagttcagcatctttggctcacatgaaggccaaattccgagagaccctagaagatacacgagaccgaatgtatcaaatggacattcagcaggaacttcaacgatacctgtctctggtaggccaggtttatagcacacttgtcacctacatttctgattggtggactcttgctgctaagaaccttactgactttgcagagcaatattctatccaagattgggctaaacgtatgaaagcattggtagagcaagggttcactgttcctgaaatcaagaccatccttgggaccatgcctgcctttgaagtcagtcttcaggctcttcagaaagctaccttccagacacctgattttatagtccccctaacagatttgaggattccatcagttcagataaacttcaaagacttaaaaaatataaaaatcccatccaggttttccacaccagaatttaccatccttaacaccttccacattccttcctttacaattgactttgtagaaatgaaagtaaagatcatcagaaccattgaccagatgctgaacagtgagctgcagtggcccgttccagatatatatctcagggatctgaaggtggaggacattcctctagcgagaatcaccctgccagacttccgtttaccagaaatcgcaattccagaattcataatcccaactctcaaccttaatgattttcaagttcctgaccttcacataccagaattccagcttccccacatctcacacacaattgaagtacctacttttggcaagctatacagtattctgaaaatccaatctcctcttttcacattagatgcaaatgctgacatagggaatggaaccacctcagcaaacgaagcaggtatcgcagcttccatcactgccaaaggagagtccaaattagaagttctcaattttgattttcaagcaaatgcacaactctcaaaccctaagattaatccgctggctctgaaggagtcagtgaagttctccagcaagtacctgagaacggagcatgggagtgaaatgctgttttttggaaatgctattgagggaaaatcaaacacagtggcaagtttacacacagaaaaaaatacactggagcttagtaatggagtgattgtcaagataaacaatcagcttaccctggatagcaacactaaatacttccacaaattgaacatccccaaactggacttctctagtcaggctgacctgcgcaacgagatcaagacactgttgaaagctggccacatagcatggacttcttctggaaaagggtcatggaaatgggcctgccccagattctcagatgagggaacacatgaatcacaaattagtttcaccatagaaggacccctcacttcctttggactgtccaataagatcaatagcaaacacctaagagtaaaccaaaacttggtttatgaatctggctccctcaacttttctaaacttgaaattcaatcacaagtcgattcccagcatgtgggccacagtgttctaactgctaaaggcatggcactgtttggagaagggaaggcagagtttactgggaggcatgatgctcatttaaatggaaaggttattggaactttgaaaaattctcttttcttttcagcccagccatttgagatcacggcatccacaaacaatgaagggaatttgaaagttcgttttccattaaggttaacagggaagatagacttcctgaataactatgcactgtttctgagtcccagtgcccagcaagcaagttggcaagtaagtgctaggttcaatcagtataagtacaaccaaaatttctctgctggaaacaacgagaacattatggaggcccatgtaggaataaatggagaagcaaatctggatttcttaaacattcctttaacaattcctgaaatgcgtctaccttacacaataatcacaactcctccactgaaagatttctctctatgggaaaaaacaggcttgaaggaattcttgaaaacgacaaagcaatcatttgatttaagtgtaaaagctcagtataagaaaaacaaacacaggcattccatcacaaatcctttggctgtgctttgtgagtttatcagtcagagcatcaaatcctttgacaggcattttgaaaaaaacagaaacaatgcattagattttgtcaccaaatcctataatgaaacaaaaattaagtttgataagtacaaagctgaaaaatctcacgacgagctccccaggacctttcaaattcctggatacactgttccagttgtcaatgttgaagtgtctccattcaccatagagatgtcggcattcggctatgtgttcccaaaagcagtcagcatgcctagtttctccatcctaggttctgacgtccgtgtgccttcatacacattaatcctgccatcattagagctgccagtccttcatgtccctagaaatctcaagctttctcttccagatttcaaggaattgtgtaccataagccatatttttattcctgccatgggcaatattacctatgatttctcctttaaatcaagtgtcatcacactgaataccaatgctgaactttttaaccagtcagatattgttgctcatctcctttcttcatcttcatctgtcattgatgcactgcagtacaaattagagggcaccacaagattgacaagaaaaaggggattgaagttagccacagctctgtctctgagcaacaaatttgtggagggtagtcataacagtactgtgagcttaaccacgaaaaatatggaagtgtcagtggcaacaaccacaaaagcccaaattccaattttgagaatgaatttcaagcaagaacttaatggaaataccaagtcaaaacctactgtctcttcctccatggaatttaagtatgatttcaattcttcaatgctgtactctaccgctaaaggagcagttgaccacaagcttagcttggaaagcctcacctcttacttttccattgagtcatctaccaaaggagatgtcaagggttcggttctttctcgggaatattcaggaactattgctagtgaggccaacacttacttgaattccaagagcacacggtcttcagtgaagctgcagggcacttccaaaattgatgatatctggaaccttgaagtaaaagaaaattttgctggagaagccacactccaacgcatatattccctctgggagcacagtacgaaaaaccacttacagctagagggcctctttttcaccaacggagaacatacaagcaaagccaccctggaactctctccatggcaaatgtcagctcttgttcaggtccatgcaagtcagcccagttccttccatgatttccctgaccttggccaggaagtggccctgaatgctaacactaagaaccagaagatcagatggaaaaatgaagtccggattcattctgggtctttccagagccaggtcgagctttccaatgaccaagaaaaggcacaccttgacattgcaggatccttagaaggacacctaaggttcctcaaaaatatcatcctaccagtctatgacaagagcttatgggatttcctaaagctggatgtaaccaccagcattggtaggagacagcatcttcgtgtttcaactgcctttgtgtacaccaaaaaccccaatggctattcattctccatccctgtaaaagttttggctgataaattcattattcctgggctgaaactaaatgatctaaattcagttcttgtcatgcctacgttccatgtcccatttacagatcttcaggttccatcgtgcaaacttgacttcagagaaatacaaatctataagaagctgagaacttcatcatttgccctcaacctaccaacactccccgaggtaaaattccctgaagttgatgtgttaacaaaatattctcaaccagaagactccttgattcccttttttgagataaccgtgcctgaatctcagttaactgtgtcccagttcacgcttccaaaaagtgtttcagatggcattgctgctttggatctaaatgcagtagccaacaagatcgcagactttgagttgcccaccatcatcgtgcctgagcagaccattgagattccctccattaagttctctgtacctgctggaattgtcattccttcctttcaagcactgactgcacgctttgaggtagactctcccgtgtataatgccacttggagtgccagtttgaaaaacaaagcagattatgttgaaacagtcctggattccacatgcagctcaaccgtacagttcctagaatatgaactaaatgttttgggaacacacaaaatcgaagatggtacgttagcctctaagactaaaggaacatttgcacaccgtgacttcagtgcagaatatgaagaagatggcaaatatgaaggacttcaggaatgggaaggaaaagcgcacctcaatatcaaaagcccagcgttcaccgatctccatctgcgctaccagaaagacaagaaaggcatctccacctcagcagcctccccagccgtaggcaccgtgggcatggatatggatgaagatgacgacttttctaaatggaacttctactacagccctcagtcctctccagataaaaaactcaccatattcaaaactgagttgagggtccgggaatctgatgaggaaactcagatcaaagttaattgggaagaagaggcagcttctggcttgctaacctctctgaaagacaacgtgcccaaggccacaggggtcctttatgattatgtcaacaagtaccactgggaacacacagggctcaccctgagagaagtgtcttcaaagctgagaagaaatctgcagaacaatgctgagtgggtttatcaaggggccattaggcaaattgatgatatcgacgtgaggttccagaaagcagccagtggcaccactgggacctaccaagagtggaaggacaaggcccagaatctgtaccaggaactgttgactcaggaaggccaagccagtttccagggactcaaggataacgtgtttgatggcttggtacgagttactcaagaattccatatgaaagtcaagcatctgattgactcactcattgattttctgaacttccccagattccagtttccggggaaacctgggatatacactagggaggaactttgcactatgttcataagggaggtagggacggtactgtcccaggtatattcgaaagtccataatggttcagaaatactgttttcctatttccaagacctagtgattacacttcctttcgagttaaggaaacataaactaatagatgtaatctcgatgtatagggaactgttgaaagatttatcaaaagaagcccaagaggtatttaaagccattcagtctctcaagaccacagaggtgctacgtaatcttcaggaccttttacaattcattttccaactaatagaagataacattaaacagctgaaagagatgaaatttacttatcttattaattatatccaagatgagatcaacacaatcttcagtgattatatcccatatgtttttaaattgttgaaagaaaacctatgccttaatcttcataagttcaatgaatttattcaaaacgagcttcaggaagcttctcaagagttacagcagatccatcaatacattatggcccttcgtgaagaatattttgatccaagtatagttggctggacagtgaaatattatgaacttgaagaaaagatagtcagtctgatcaagaacctgttagttgctcttaaggacttccattctgaatatattgtcagtgcctctaactttacttcccaactctcaagtcaagttgagcaatttctgcacagaaatattcaggaatatcttagcatccttaccgatccagatggaaaagggaaagagaagattgcagagctttctgccactgctcaggaaataattaaaagccaggccattgcgacgaagaaaataatttctgattaccaccagcagtttagatataaactgcaagatttttcagaccaactctctgattactatgaaaaatttattgctgaatccaaaagattgattgacctgtccattcaaaactaccacacatttctgatatacatcacggagttactgaaaaagctgcaatcaaccacagtcatgaacccctacatgaagcttgctccaggagaacttactatcatcctctaattttttaaaagaaatcttcatttattcttcttttccaattgaactttcacatagcacagaaaaaattcaaactgcctatattgataaaaccatacagtgagccagccttgcagtaggcagtagactataagcagaagcacatatgaactggacctgcaccaaagctggcaccagggctcggaaggtctctgaactcagaaggatggcattttttgcaagttaaagaaaatcaggatctgagttattttgctaaacttgggggaggaggaacaaataaatggagtctttattgtgtatcata

SEQ ID NO: 588 - DNA, 2120 bp, Homo sapiens
agcccaagatttctagggcattggccgcgctgctgggtgatccctccgggctcaagttgcaagggggcgggccgggccggaggtggagtctcccgccaattgaagcctccgctataaattgaactccctgcactgctgaagcccagatgcctcgccaggccacgtcgcggttggtggtcggagagggcgaggggtcccagggggcttcggggcctgcagccaccatgctccgctccctgctgcttcactccttgaggctctgcgcccagaccgcctcgtgcctcgtgctcttcccgcgcttcctcggcacggccttcatgctctggcttctcgatttcttgtgtatccgcaagcatttcctgggccgccgccgccgggggcagcccgagcccgaagtggagctcaacagtgaaggcgaggaggtgcctcccgatgacccgcccatctgcgtgtccgacgacaaccgcctgtgcaccctggcgtcgctcaaggcggtgtggcatggccagaagttggatttcttcaagcaggcgcacgagggcggtccggcgcccaactccgaggtggttctgcccgacggcttccagagccagcacatcctcgactacgcgcaagggaaccgcccgctggttctcaatttcggcagctgcacctgaccaccgttcatggcgcgcatgagcgccttccagcgcctggtcactaagtaccagcgcgacgtcgacttcctcatcatctacatcgaggaagcgcacccctccgacggctgggtcaccacggactctccctacatcatcccacagcaccggagcctggaggaccgggtcagcgcagcgagggtactgcagcaaggtgcacccggctgcgctctggtcctcgacaccatggccaactccagcagctcggcctatggcgcctacttcgagcgtctctatgtcatccagagtggcactattatgtaccagggcggccgtggccccgacggctaccaggtctctgagctgcgcacttggttggaacgctatgatgagcaactgcacggcgctcggccccggagggtgtaaacatccaacggacaattgactgaacttggtgggctgggccttcgagccttcgaagcccacgtgcaagcgcctcaaaccaagtcacgcttggcgaggccccagtgacactgatgtgctgagccaccatttcagactgagtctgcaccctcagccacatgaacaatctcccctacctccctgggactctgcttctgtaactgtctcattcacacctgcctggctcactggaaatcctcttttgagcgcgggatatggcttgcccttgtccgtgtgcccccaggactttgcctctacagcattttcttacaccccctccccagcgtgccctcagccaagtgctttggcccggtgcttcccgcagctgcacagagaccttggccacgcccgcgcgccctgagcgcagctgggttccaggagactctcagctcagctgagctagttgcctggcacccacctgtcgcgcgcggagagggggttccctgttgcttttgtgtctgtttcctgtccctggtaggggaagtgatgtcgtggatggggaggggtgggcagggtagtttcccccgcttgttttgggtgcacaggagccccactgctgatgacgaactatctctaactggtcttgaccacgagctagttctgaattgcaggggcctcaaagcagcacctaaaccttgagggggagggtgctctgggtttccgtgaggtaaccaccttaaatgggagggaagttggggtgtctgctttgggaccagaggaagatagcttgagaggcattggcgaggttcgcagcgccccagggagagagaaaaagctgagactcctggggaatgacgttggggtgatggagtccggggaaagagaggtggggggagagcctgaggtccccaagtgaggggagtcctaggcagagctgctgattgtggggctgggaggtggagggcccctgattcgaaggccatttggtgagtgttttgctggaaatatttcctgtatataaacttctttcaatctacaataataaaggcttgaggtaaactgcttaaaaaaaaaaaaaaaaaa

SEQ ID NO: 589 - DNA, 1718 bp, Homo sapiens
aagctgcttccagtgaatgctacacacctgcaccatggtttgtccgacatccttagccaagatcaggattggctatgttggtacttacatatcctcatgagaattgtggttctggtactagtttggtaaagaaattattaaacctagctgatgcttgaaggtagttggattaacagaagagaagacaaacttggagtatattctttagtacatttttccccaaagatgttgggttcagttgccacaacactgccattgtcatcttcaaattccagtggaatgcctcttggttactatctgtctagtcctcagattagtagagtaactatatcaacaactggacaattgacttctaaagctactgtaggtagctgttccagagtggaaaacagcttggatgccagccccttctcagttccgaagaaacaggatgaatcacccatgattggggatggagaagattatttcctttctttgtttggtgattcaaagaaacttacagcacactcaaactacactcagaaaactttaaaatacttttctatgattcttgaagaagttggccaatttacctccagttctcttggagatgttgaaatagctgaagtgaatgtcaagggtttgttcgtgaagctcattaactcttcccttgacaaagaaatggcaattggagatcatattctccagcaaaatgtgaatggacaaaccatttctttgtaccgattccttccaaacatcgtaatgcaggcaaattccacagtaacagtgtgggcagcagcatctgaagcaaagcatcaacctccatcagattttctttggaaggaacaagacaagtttagagcaagtcctgattgtataacaatcctgtgcaaaccgaacggtcaagccattgcgtggtacacccctatccactggaagcaagcgtgggaaaaattagatgctgacgttgaatttaacagatgttcagtagtatctccaacattccgaaagcgtgtgtttcagtggacagcatctacagctacaataactaaagaaaaacaagatcaacctaagaaagatatctcaaattatcaggtggaacaagctcaagttcttcttaagagagagaaggaaatcccaccaaccgttttccctaatcgcagcccttggtgccagaatccctatgtctctgcacatccttactgtcctctgattgaaccacacaatacatccaccgctggaggcagattggatagacagcccaggactcggtcaaccagacctaatcgagcctcagggtctaagaaaaagaagacatctgagtcacaaaagcaataagcagtcaactcaacctttaaagtaatctagtccaccctcaaccagctactagaaaagcaaaagagaactcaaatccctgaggcctgctctgcaacctccctgctattccatgagagggtgaagacatcacatttctatatggaaaaaggatccaaaatttgtattgctgtagaattggtgaattatagatgcttgatgaaatcacaagtcctaccactcctgccttccaaatccctgcagaaaacaagcagatggttagtattattcaatggataaaattgctatttgccttagatttctctttttgtaaacaaagttattttgggtacagaactcacaaaagaagagcacgtgcaattgtttaaccattttacattgactgataaatctcttttttccat

SEQ ID NO: 590 - DNA, 5843 bp, Homo sapiens
gagcggacaggcgtggcggccggagccccagcatccctgcttgaggtccaggagcggagcccgcggccaccgccgcctgatcagcgcgaccccggcccgcgcccgccccgcccggcaagatgctgcccgtgtaccaggaggtgaagcccaacccgctgcaggacgcgaacctctgctcacgcgtgttcttctggtggctcaatcccttgtttaaaattggccataaacggagattagaggaagatgatatgtattcagtgctgccagaagaccgctcacagcaccttggagaggagttgcaagggttctgggataaagaagttttaagagctgagaatgacgcacagaagccttctttaacaagagcaatcataaagtgttactggaaatcttatttagttttgggaatttttacgttaattgaggaaagtgccaaagtaatccagcccatatttttgggaaaaattattaattattttgaaaattatgatcccatggattctgtggctttgaacacagcgtacgcctatgccacggtgctgactttttgcacgctcattttggctatactgcatcacttatatttttatcacgttcagtgtgctgggatgaggttacgagtagccatgtgccatatgatttatcggaaggcacttcgtcttagtaacatggccatggggaagacaaccacaggccagatagtcaatctgctgtccaatgatgtgaacaagtttgatcaggtgacagtgttcttacacttcctgtgggcaggaccactgcaggcgattgcagtgactgccctactctggatggagataggaatatcgtgccttgctgggatggcagttctaatcattctcctgcccttgcaaagctgttttgggaagttgttctcatcactgaggagtaaaactgcaactttcacggatgccaggatcaggaccatgaatgaagttataactggtataaggataataaaaatgtacgcctgggaaaagtcattttcaaatcttattaccaatttgagaaagaaggagatttccaagattctgagaagttcctgcctcagagggatgaatttggcttcatttttcagtgcaagcaaaatcatcgtgtttgtgaccttcaccacctacgtgctcctcggcagtgtgatcacagccagccgcgtgttcgtggcagtgacgctgtatggggctgtgcggctgacggttaccctcttcttcccctcagccattgagagggtgtcagaggcaatcgtcagcatccgaagaatccagacctttttgctacttgatgagatatcacagcgcaaccgtcagctgccgtcagatggtaaaaagatggtgcatgtgcaggattttactgctttttgggataaggcatcagagaccccaactctacaaggcctttcctttactgtcagacctggcgaattgttagctgtggtcggccccgtgggagcagggaagtcatcactgttaagtgccgtgctcggggaattggccccaagtcacgggctggtcagcgtgcatggaagaattgcctatgtgtctcagcagccctgggtgttctcgggaactctgaggagtaatattttatttgggaagaaatacgaaaaggaacgatatgaaaaagtcataaaggcttgtgctctgaaaaaggatttacagctgttggaggatggtgatctgactgtgataggagatcggggaaccacgctgagtggagggcagaaagcacgggtaaaccttgcaagagcagtgtatcaagatgctgacatctatctcctggacgatcctctcagtgcagtagatgcggaagttagcagacacttgttcgaactgtgtatttgtcaaattttgcatgagaagatcacaattttagtgactcatcagttgcagtacctcaaagctgcaagtcagattctgatattgaaagatggtaaaatggtgcagaaggggacttacactgagttcctaaaatctggtatagattttggctcccttttaaagaaggataatgaggaaagtgaacaacctccagttccaggaactcccacactaaggaatcgtaccttctcagagtcttcggtttggtctcaacaatcttctagaccctccttgaaagatggtgctctggagagccaagatacagagaatgtcccagttacactatcagaggagaaccgttctgaaggaaaagttggttttcaggcctataagaattacttcagagctggtgctcactggattgtcttcattttccttattctcctaaacactgcagctcaggttgcctatgtgcttcaagattggtggctttcatactgggcaaacaaacaaagtatgctaaatgtcactgtaaatggaggaggaaatgtaaccgagaagctagatcttaactggtacttaggaatttattcaggtttaactgtagctaccgttctttttggcatagcaagatctctattggtattctacgtccttgttaactcttcacaaactttgcacaacaaaatgtttgagtcaattctgaaagctccggtattattctttgatagaaatccaataggaagaattttaaatcgtttctccaaagacattggacacttggatgatttgctgccgctgacgtttttagatttcatccagacattgctacaagtggttggtgtggtctctgtggctgtggccgtgattccttggatcgcaatacccttggttccccttggaatcattttcatttttcttcggcgatattttttggaaacgtcaagagatgtgaagcgcctggaatctacaactcggagtccagtgttttcccacttatcatcttctctccaggggctctggaccatccgggcatacaaagcagaagagaggtgtcaggaactgtttgatgcacaccaggatttacattcagaggcttggttcttgtttttgacaacgtcccgctggtttgccgtccgtctggatgccatctgtgccatgtttgtcatcatcgttgcctttgggtccctgattctggcaaaaactctggatgccgggcaggttggtttggcactgtcctatgccctcacgctcatggggatgtttcagtggtgtgttcgacaaagtgctgaagttgagaatatgatgatctcagtagaaagggtcattgaatacacagaccttgaaaaagaagcaccttgggaatatcagaaacgcccaccaccagcctggccccatgaaggagtgataatctttgacaatgtgaacttcatgtacagtccaggtgggcctctggtactgaagcatctgacagcactcattaaatcacaagaaaaggttggcattgtgggaagaaccggagctggaaaaagttccctcatctcagccctttttagattgtcagaacccgaaggtaaaatttggattgataagatcttgacaactgaaattggacttcacgatttaaggaagaagatgtcaatcatacctcaggaacctgttttgttcactggaacaatgaggaaaaacctggatccctttaatgagcacacggatgaggaactgtggaatgccttacaagaggtacaacttaaagaaaccattgaagatcttcctggtaaaatggatactgaattagcagaatcaggatccaattttagtgttggacaaagacaactggtgtgccttgccagggcaattctcaggaaaaatcagatattgattattgatgaagcgacggcaaatgtggatccaagaactgatgagttaatacaaaaaaaaatccgggagaaatttgcccactgcaccgtgctaaccattgcacacagattgaacaccattattgacagcgacaagataatggttttagattcaggaagactgaaagaatatgatgagccgtatgttttgctgcaaaataaagagagcctattttacaagatggtgcaacaactgggcaaggcagaagccgctgccctcactgaaacagcaaaacaggtatacttcaaaagaaattatccacatattggtcacactgaccacatggttacaaacacttccaatggacagccctcgaccttaactattttcgagacagcactgtgaatccaaccaaaatgtcaagtccgttccgaaggcattttccactagtttttggactatgtaaaccacattgtacttttttttactttggcaacaaatatttatacatacaagatgctagttcatttgaatatttctcccaacttatccaaggatctccagctctaacaaaatggtttatttttatttaaatgtcaatagttgttttttaaaatccaaatcagaggtgcaggccaccagttaaatgccgtctatcaggttttgtgccttaagagactacagagtcaaagctcatttttaaaggagtaggacaaagttgtcacaggtttttgttgttgtttttattgcccccaaaattacatgttaatttccatttatatcagggattctatttacttgaagactgtgaagttgccattttgtctcattgttttctttgacataactaggatccattatttcccctgaaggcttcttgttagaaaatagtacagttacaaccaataggaacaacaaaaagaaaaagtttgtgacattgtagtagggagtgtgtaccccttactccccatcaaaaaaaaaaatggatacatggttaaaggatagaagggcaatattttatcatatgttctaaaagagaaggaagagaaaatactactttctcaaaatggaagcccttaaaggtgctttgatactgaaggacacaaatgtgaccgtccatcctcctttagagttgcatgacttggacacggtaactgttgcagttttagactcagcattgtgacacttcccaagaaggccaaacctctaaccgacattcctgaaatacgtggcattattcttttttggatttctcatttatggaaggctaaccctctgttgactgtaagccttttggtttgggctgtattgaaatcctttctaaattgcatgaataggctctgctaacgtgatgagacaaactgaaaattattgcaagcattgactataattatgcagtacgttctcaggatgcatccaggggttcattttcatgagcctgtccaggttagtttactcctgaccactaatagcattgtcatttgggctttctgttgaatgaatcaacaaaccacaatacttcctgggaccttttgtactttatttgaactatgagtctttaatttttcctgatgatggtggctgtaatatgttgagttcagtttactaaaggttttactattatggtttgaagtggagtctcatgacctctcagaataaggtgtcacctccctgaaattgcatatatgtatatagacatgcacacgtgtgcatttgtttgtatacatatatttgtccttcgtatagcaagttttttgctcatcagcagagagcaacagatgttttattgagtgaagccttaaaaagcacacaccacacacagctaactgccaaaatacattgaccgtagtagctgttcaactcctagtacttagaaatacacgtatggttaatgttcagtccaacaaaccacacacagtaaatgtttattaatagtcatggttcgtattttaggtgactgaaattgcatcagtgatcataatgaggtttgttaaaacgatagctatattcaaaatgtctatatgtttatttggacttttgaggttaaagacagtcatataaacgtcctgtttctgttttaatgttatcatagaattttttaatgaaactaaattcaattgaaataaatgatagttttcatctccattcaga

SEQ ID NO: 591 - DNA, 9127 bp, Homo sapiens
agtgtgagctgagctctttccctgaatgaatccaagtaaccctggccttctgaaatgaccagcagacacacaactgtccagaggctgcccaaagtataaactctggttctaaagtaccatgtccagccaaggaagtcctagtgttgcgctttctacgacgacagtcagttcagttgctgtgcaggctggggactccaaaatcgttatagctgtcataaagtgtggcaaatgggtacaacttcaactggctgaatcacagcccaatcttctagaaattggcagcagtcaagatgaaaccaaaaaacttcttcatgatcatgaacttcttttggccaagctcaaggctttggaagatcgggtatgggaactcttgcaggaagcagacaagacagctgaagagaacaaggatcagagtcaggtctatgatgccatggccgagactctgggtgaagcatgggcagctctggtgtccatgcttgaaagaagaacagagctccttaggttgacttctgaattttttgaaaatgccttagagtttgctattaaaatagaccaagctgaagatttcctccagaatactcatgagtttgagagtgctgagtccttaaaatcacttcttcagcttcatgaacatcatactaaagaactcttggaacggtctttagcccttttaaacaaaagtcaacaactcactgacttcatagaaaaattcaagtgtgaaggacctaatgtgaatcctgagttgactcagggagctcatagcagctgtctgaaggttgaccgccttcttgaacttctacaagacaggagaagacaactagacaagtacttgaagcaacagtggcaagaattgagtcaagttctgcagatatgtcagtgggaccaacaagaaaaccaggttacttgttggtttcagaaaactataagaaatttacaggaacaaagtctaggttcatcactttcagacaatgaggatcgaattcataagcaagaggaactgataataaaagcaaaggaatggaattctgctgttgagaagctgaagagtgaggcactgagaattctgctgtcaaaggactacgtggagaaagaacacctccagctctctcaccagaaactcagtcagcttcaagaagaatttggtcaactcatggtggaaaggaatacctggttaaagaaggcgaatgaattttttaacagtgctaacaaggcatttgatgtacttggaagagttgaagcttaccttaagctccttaaatcagagggtttaagtctggctgttttggcagtgaggcatgaggaattacacagaaaaattaaagactgcacaactgatgctttgcaaaagggacaaaccttaatcagccaagtagactcctgcagctctcaggtgtccggcatccatgagatgatggggtgcattaagagacgagtggatcatctgaccgaacagtgttcagcgcacaaggaatatgctcttaagaaacaacaactaacagcctcagtggagggttacctacggaaggtggaaatgtcaattcagaaaatcagtccagtactttctaatgcaatggatgttggttctacccgttctgaatcagagaagattttgaataaatatctggaactagatatccaagctaaggagacatcacatgaattagaagcagctgcaaaaaccatgatggagaaaaatgaatttgtatctgatgaaatggtatcactttcctctaaagctagatggctagcagaagaattaaacctatttggccaaagcattgactatagatcgcaagtcctgcaaacttacgtggcatttctgaagtcatcagaggaggtagagatgcagtttcagagcttaaaagaattttatgaaaccgaaatccctcagaaggagcaggatgatgctaaagccaagcattgttctgactcggctgagaagcagtggcagctatttttaaagaagagttttataacacaagatctagggcttgagttccttaatttaataaatatggcaaaagagaacgagatattagatgtgaaaaatgaagtgtacctcatgaagaacaccatggaaaaccagaaagcagaacgggaagaacttagcctccttcggctggcatggcagcttaaagccacggaaagcaagcctggaaaacagcagtgggcggcattcaaagagcaacttaaaaagacttctcacaacttaaaacttcttcaggaagcacttatgcctgtgtctgcacttgacctcggagggagcctccagttcattttagatctacgacaaaaatggaatgacatgaagcctcagttccagcaattgaatgatgaggttcagtacattatgaaagaatcagaggagttaactggcagaggagcccctgtaaaagaaaagtctcaacaactgaaggaccttattcacttccatcaaaaacagaaagagagaatccaggattacgaggatatcctgtacaaggtggtccagttccatcaagtcaaggaagagctgggacgtctcatcaaatcaagagagctggagtttgtagagcagccgaaggaactgggtgatgcccatgatgtgcagattcacctccggtgctctcaggaaaagcaagcccgtgtagaccatctccacagactggccctttccttaggagtcgacatcatctcatcagtgcagcggcctcactgctctaatgtttctgcaaagaacctacagcagcagctggagctccttgaggaggacagcatgaagtggcgtgccaaagctgaggagtatggacggaccctgtcccgtagtgtggagtactgcgccatgagagacgagataaatgagctcaaagactcattcaaagatatcaaaaagaaattcaataatttgaagtttaattacactaagaaaaatgaaaaatctcggaatctgaaggcgcttaaatatcaaattcagcaagttgatatgtatgctgaaaaaatgcaggctttgaaaaggaaaatggaaaaagttagtaataaaacctctgattctttcttaaattatccaagtgataaagttaatgtccttttggaagtcatgaaggatttgcaaaaacatgtggatgactttgacaaagttgtgacagattacaagaagaatttggacctgactgagcatttccaggaggtgatagaagagtgtcatttttggtacgaagatgcaagtgccacagttgtaagagttggaaaatattccacagagtgcaagacaaaggaagctgtgaaaattctccaccagcagtttaataagtttattgcaccctcagtgccgcagcaagaagaaaggattcaggaggccactgaccttgctcagcacttatatggtttggaagaaggacagaaatatattgagaaaatagtgacaaaacacaaagaggttcttgaatctgtgactgaattatgtgagtccctcacagagctcgaagaaaaactgaagcagggagatgttttaaagatgaatccgaatttggaagacttccattatgattacattgacttgctaaaggaaccagcaaaaaataagcagacaatattcaatgaagaaaggaataaggggcaggtgcaggtggcagatcttttgggcatcaatggaacaggggaagagcgactaccacaagacctgaaggtgtccactgacaaggagggtggcgtccaggacctgctcctgcctgaagacatgctctcaggggaagaatatgagtgtgtctcacctgatgacatctccttgcctcctctcccaggaagccctgagtcccctcttgcaccatctgacatggaggtggaagagcctgtcagctcctccctcagccttcacataagcagctatggggtgcaggctgggaccagcagcccaggggatgcccaggaatctgttcttccaccacctgttgcctttgcggatgcatgcaatgataagagagaaacattttcaagtcattttgagaggccttacctccagttcaaagctgagcccccactaacctccagaggattcgtggaaaagagtactgccttacacagaatcagtgctgaacatccagagagcatgatgagtgaagtgcatgagagagctttacagcagcaccctcaggctcagggtggtttgctagaaacacgggagaaaatgcatgctgataataacttcactaaaacccaagataggctgcatgcttcctctgatgcattctcgggcctcaggtttcaatcaggcaccagcaggggctatcagaggcaaatggttcctcgagaagagattaaaagcacatcagcaaagagcagcgtggtcagcctagctgaccaggcacctaatttctccaggctcctgtctaatgtaactgtcatggaaggttctccagtgactttggaagttgaagtaacaggatttccagagcctacactgacatggtacaagaagggccagaaattgtctgcagatgggcacttacaggttttacacaaggagacaaggcattcggtgttcattccaaaggtatgcaaggcagacgcaggcctctatgtggctcgggcccaaaactctagcggcgctctctcttccaatgtcatcctccacgtgacaggtaactgcaggctgccaatcacaagagtaaactggataaccctgtgtgtcgtctatgttagtgtgtccctaatgtactggctcctcacacaataactgtggtgttggcaccaatggacatcattctcatgtgcctaaagaaaagtgccgccgtttatcttcctgcacctcctgcaaagcatctcccaccaagtgtatctccagtctgatcaccatacttgtttggctaataccactgctaggtgaaataatcaaattttctggagcgtttaatatatttgagaagcttggtaaattatctgtagtggataagaacagatttttgtactctagaaacagatgttttcaacataatatgcagcaaaattattctatgcctattccctcctaatttaagggcgtgcagatgaaggctgacatcggcatagaaatgtgctaaatttcaaatatggttgttcaataatatatttttaattgtattttaaaacatccctttgtagggaatatcagtagaactattgaattgatgttgtatttttgcattagctgtcctttaattttgctttccatgtcttgatcttgttaccgaaatgcattctgtgtaatttcaacgtagactacgttcctgagtctgatgatgtcattgtaaataatcattcctcatgttgctctcacgggtttgacattggaggatagatgtgccatcaactttaaatagagtttccatcttttgtcagctctgcatgtcatacagcaagatggaacacaggttgcaagaaagaaccaacgttattcctgacattctattgatgtgttttgagcagcaatgtgtaaccaggtgtttctgcttctaatcttgattctgctgatgaccatttttatactttatggcaaagcctcattgcctcagtttcctgtctggaaaatgagttcatcatctacctcttgggcaattgagagttttcattttgtgtcttttaaacatctggaaaatggaaaacactgagggctaaggataatgatattgtttaatgtaatttgtcatcagaccggcctcctgctcactatttctttttttttagatgctgtttttttagaatattaaattaaaggagtgctgttaatatgtaatcttcaactagttccatggaggaaagtgatgttttatgaattagagcttaaattcctatctaatttctgaagactgcattcttttcaaagacttgaaattaaactcaggaggatacattttgtttgttctagggggaaacgtaatagaatggtatgagatgaattctatccttttacaataattattactataatattgaagtattctatgcctttctgaaacactttattcagaaaagatcattttttggcttccttttaaaaataagcttgaagtagggaagcatttgcttcttagattttaaatgtagtcttattatgctgaggaaaatctttagttgaaagaataattcattacagatttttgatgaagggaagaaattaattatgttgctggaagactgtctacaaataatcaaaatatttaaatgtaatgtattcaagttgttattaaaaagttactgaatgttatctgaagatgtgaaatgtgtagtcaagtaaaaagttggcgtatactttcttgggctgcatatccaatttaattaaaaaattaaatctcagtttccttctaaattttgatagaactatattaaaagcttgtatacacagcattctaggaaatttctcttaactatcttttttttgttttttttgttttttttttttttttttgagaaagagtcttgctctcttgcccagtgcagtggtgccatcttggctcactgcaacctccacctccgggttcaagcaattctcctgcttcagcctcctgagtagctaggattacaggcatgcctacctaatatttacatttttagtagaaaccaggtttcaccatgttggccaggctgggcctcagcctcccaaagtgccaggattacaggtatgagccaccatagccggcctcttgtatcctttttgtccaatttcaaataatgtgtgaatcttgcctaactgctgttgcccacgttgaagctaaagagtaaaaacctattcatgaacaaagaaggcaggtgagacccggtaacaaactgtctctcttcccactttctctttcttattaatttggcaggatctcccttcccattttgtcaacatggttgaatttgtgtgttggggttgttagggcatgggaattcctggtttgctttctctattgcatgcttgttcatgttaactctttggggagcagaatgagatacatatgcatccatggttatgatggaaaaaagcatgcaaaatccatttttagagagagagagaaagagaaaggtgggggtgggggagcacaaagatcagaagagtactatgctgatattcaagatatagtacagatagctttctgtgtacctatccatctacctattcatctgggctattgattgactcccacagcagtaaagaataattacgcagttattcttctggttatgttttaatttcaaaaagttaagtgtgattttcctttttgctgggatttctgtcttgagcaaataattattcttatgaaagtatcaattgcagttactggttaaaaatgtaagacctaggaaatttaagtgttgtttctattttaaggtatatacataatttataaccatttacttctagagaaaatcctgaatggttagtaatatcaaaacattttcaacaagaaaactaaaatgaaaagaaagtttaaaaattacatgtgttacagctcttttagaatttgtctagcaggttttctggtgaaaattaaactcaagattttcaccagaaaacgttttaaaacttctaaactcttaaacaaattataaatacttgatactttgaagaactgcaaaacaaaatgtttttaagttttcataaggcaaaatcattgagttttccagctttgattttccaataaaaggatgtataaatatttggtggtagtttttcacactcaattccaagagaaatttactgtaggaatctgtacatttgaatctctgaatattctatgatatttaaaatatttgaacaagatgcagaaaattttttagctatattaatcaataatggtaacctctatcactcataatcaagacacatacttaaaatagatgactacaagacccttctaactgctttgctcaaatttaaatttcctcaagtagttcatagaccctttacaacctggcctcccctctctggcctcggtttgatcccctcctattacccccaacccctagtaaagtgacatttaacttcagggttttaacatatcatgctcttctctccagccctttcttcctataactctcttactatcttcaccaccctatcttcatgtgacttaactcttgcttatgttccagttctgctgagacacaacttcccctgggaagcctcctgacccatcaagtccagagtagatggtcctgccatgtgcactgtcagcacctgcactgcccagccacgcccctgaatatacacaaaggaatcgcaggtttgagcatcagtctcctctggctaggctgtaagaaccttatcagcaggattcatgacagccctgttgtcattgtattgccagtacctaagacacagtcacactcagtaaactcttttgaattgaattgttgccaaaggtaaacaaagataaacctagcttgtttttctcccctttttagagggaggagaggggaaatgtaaaaagacaaagatgattctcccttcttatagacaggagtcaatccgaatcaggccctaacaatgaagcactcatgaaaatctctcacctcatctgcaaaacttgtgtgagaaccctccagaccctctgggctagaccctgattgaaaatttgaatttaaaaatagatgctggctccacggactaaaataatagtaaggaggaaagaggaaaggtccaggattgttgttcctggatcaatattgttccaacattttaaagtgttccaacattttaaaacatatgtacttaggcataaatcatcatccggtatgaggaactggatgcctccactctctatgactaaatccaaactgtcaaaaccagaatttatgtacttctttagaacactacgtaaatgatcaatatttaattgtagctggggctcagtagtctgggctgtgaacagatcttatttgaaaccagtatttcatacaaacttgtaaatataaagaaagccaaatccaagaacttaagagtatttgaattccaaatgaagaaaggaaagaatatcttattttgttctgctttatgtttgtctttattcatgaccatttcttactaaaaatcaccatctgaagcttttgaaactcctgttgtatgcacagcattttaagtgcagccatgaaataagttagttgaaacaaaataaaatatctccttccagta

SEQ ID NO: 592 - DNA, 5559 bp, Homo sapiens
agagtccagccgggggtgccgcacccactggggagtggggagggaggacacataggaaatgcctggggctggagtctctttggctctctgccagcaagaaacttaaacgtcctggcttgctcaacccgagtgtccctaaactgtccagacttttgcccgtccattgccactatctctccccactctgggtgtcctacccaaggcgctgtctatgcgtgcccagggcctgtcctgcggatacccagctcgccccttgcagccctttttagagcatctcgcgggctctggcatcaccaagcgcacagccccgggctgcgctcccctaaggtgggtccctcagatccggggctgtccattaaccaggctggcccaaagaggcgcagacactcgaacccgggaaaacttattttattctcggttcccggggttgcagctgccagcggctgagacagtgcgtccgctttgtctctctgcactccccgcagcccccctctcccgcttcctctcccgattaactcccccgacacgctcttctctagctcctctcctcctcccactccttctcctcctcttcctcctcctacaccacaggccgcgctaatgcgcttcctccctcccccggtgtcggtctctttgcatacgcgccccctcccctccccgccgcgccacttatagcggggcgcacggcggcggggcgcagactgctctggcagccggagaggaggcggtgcggcggtggcgctgcggagacccggtccagacgcctggcggccgccggcacacaaggcgctttctagctccctcccccgagcgcacagcccgcctccttccgcggcgcctgcagtggcaggcttgctctgccctaccgtgacgcgctccggagacgctctgcgggtcctggacaccgggtccgcggcgtggggacgacagacggaggcgaacgccatcggtagccggtccgcgagccatcgttcggggcgcagtcctctccccggctggccctcctttctccggggcattcgccaccgcttccctgggctgagacgaccggttcgtcgcctccttgcccgtgaccgtcgctagaactcagttgtgcgttgcggccagtcgccactgctgagtggaaacaaaatgtcagtcagtgtgcatgagaaccgcaagtccagggccagcagcggctccattaacatctatctgtttcacaagtcctcctacgctgacagcgtcctcactcacctgaatcttttacgccagcagcgtctcttcactgacgtccttctccatgccggaaataggaccttcccttgccaccgggcagtgctggctgcatgcagtcgctactttgaggccatgttcagtggtggcctgaaagagagccaggacagtgaggtcaactttgacaattccatccacccagaagtcttggagctgctgcttgactatgcgtactcctcccgggtcatcatcaatgaagaaaatgcagaatcgctcctggaagctggtgacatgctggagtttcaagacatccgggatgcatgtgcagagttcctggaaaagaacctgcatcccaccaactgcctgggcatgctgctgctgtctgatgcacaccagtgcaccaagctgtacgaactatcttggagaatgtgtctcagcaacttccaaaccatcaggaagaatgaagatttcctccagctgccccaggacatggtagtgcaactcttgtccagtgaagagctggagacagaggatgaaaggcttgtgtacgagtctgcaattaactggatcagctatgacctgaagaagcgctattgctacctcccagaactgttgcagacagtaaggctggcacttctgccagccatctatctcatggagaatgtggccatggaggaactcatcaccaagcagagaaagagtaaggaaattgtggaagaggccatcaggtgcaaactgaaaatcctgcagaatgacggtgtggtaaccagcctctgtgcccgacctcggaaaactggccatgccctcttccttctgggaggacagactttcatgtgtgacaagttgtatctggtagaccagaaggccaaagaaatcattcccaaggctgacattcccagcccaagaaaagagtttagtgcatgtgcgattggctgcaaagtgtacattactggggggcgggggtctgaaaatggggtctcaaaagatgtctgggtttatgataccctgcacgaggagtggtccaaggctgcccccatgctggtggccaggtttggccatggctctgctgaactgaagcactgcctgtatgtggttggggggcacacggccgcaactggctgcctcccggcctccccctcagtctctctaaagcaggtagaacattatgaccccacaatcaacaaatggaccatggtggccccactccgagaaggcgttagcaacgccgcagtagtgagtgccaaacttaagttatttgctttcggaggtaccagtgtcagtcatgacaagctccccaaagttcagtgttacgatcagtgtgaaaacaggtggactgtaccggccacctgtccccagccctggcgttacacagcagcagctgtgctggggaaccagatttttattatggggggtgatacagaattctctgcctgctctgcttataaattcaacagtgagacttaccagtggaccaaggtgggagatgtgacagcaaagcgcatgagctgccatgctgtggcctctggaaacaaactctacgtggttggaggatactttggcattcagcgatgcaagactttggactgctacgatccaacattagacgtgtggaacagcatcaccactgtcccgtactcgctgattcctactgcatttgtcagcacctggaaacatctgccttcttaaatgcagtacattctaaagagagtgagcatgagctcactccatcactcgatgagataatatgagatttctacttcggagaggccaagtctaatgaagagaaaaaaaggaaaagaagttgcaagactcgaataaaatctgctgcaccttgtaaatgctctaactggacatgaaggaaaggggcgagggaggggggtgggatttttggtgcaagtagcacatggtttaaatatgaatgaacaaacctgtgatctagtccttgtcttgtaattgtggattaatgtcaatgttaatcagcccctcaaagggagagaaaagctggaccttttcccttgctgtaccatattcagcatttgatttccatgggccccaccatttatgtgtagaatttgaaatggttgtcacctctctctgaggacagagcttgaagcctccacaccagctgctgctggagattcaaagcccaactgtgggtccgagagggaagctggctgggctggctgaagaatgaagaccactggactctccgttaatctctaaggggtctgctccccaggaacgtttctgaacaatggggactttgttggtagccatttggtagatgttcttttctatttataagtgactttaaactttcccttggctgttaagaagtttgttatagatttagctatttattgttcgatgcctgcatgctgaaacaatgcctacagctgtcttcacatgtatggacgtgtgtgaatggttgtacgttttgcacattttgtggctgttgagatgtgctttgctgcacaaacatgaaaatttttgagttacaatttggagcataactggagggtgggttggggaggggtggatttttaaaatgtcaagacagggaaggatgacaaaatggaaatttaaatgacatcctagaggtagagaaaccgtggagatcgcttttctcagactcaccaacttttaatgggatttcatggggtttggttgtgctgatagggtaaggggaggctgctttctgcccttctccccactcccatctgatttacttaattcagtctcagctgctgaaatttggaaaggaccaaattgctttacagtttttttctttgtgtagtatcttgaaatcctggaaaattctatggaatagttctgtatatagggcacaagtaaaggcattgtccaaagtttatttatttatttattaccctaagaatgctttgccataaccacatttaatgggaaaaacggcagtatcacagatgtaaattaactcaccagatttactgggcctgaactcattctcttcttgctatatgatttagcaagttctagaaggtctccaagacaataattacattggcacaatgtatacttcagtgctcacccgtaggcaaatctctttttaaaaaactctttggtgcacaagtaacacatttggccacaaaacaccaaagaattgtaggcagtggcccctattgagaagttttccggtagagttggaaatcagttgtgaatacattctttgctagttggagtgcttgtttactaagcatgtgccgtcgtaggtattagtgctagtctcagataggtgcttcccctgaggtgcaggggaagaccaaagtttgcaactcgaactgctttcgtccatgtttctcacattgctgtattttagaaaataggggttaagactgataacaaccttttacattgtgactgtgtttgcattgtctaatgacagataaatccttaacatttctctccaccttagtactttagactaattgtgtttgtccgtccatgccatgaatgagtgggctgtagttgggcctaaataaatgagctgttggaagaaaagaatcacagtactttccagcagtcagtccctggttcctagatgtgttctaagcaatgcaaatgtctaattgtcccccagtgggcatagtcagtgtcgtttatattgtagcagttacagctctgtagtttatgatgcaaatctgccaagagagatgtatgtgtcactgcatggcttctgaaagcaggatgaattttctgcagctgtttcaaagttggggtctgttcttgaatcctctattaattactgtgtgtgagccagagggagctgtggtaagggttgggcccccagcctgtagggaactttctggactcccactctttgaatcgatataggcatttggtctcactacttgaccattctcaccctgtgaaacgtcccacactttgaagcaaatacaattcacagcacagtacacacaaaaaccttggcataagacagagaaggttcttcttattttgtgggctggttgctgtagaaacacataacaaagggcagccctccacttctggtataattgtgtagccccttttctttgggcttgacacctgtcttgaataagagtgattagagctgcataatgtccctctcttggctattgaccatgtggttcacgtacaaaactctgtataagttgaaggaaaatgttcatgttcatatgtacttgtttgctatgactacattttgaggttttgtaaaactgttatttttttttttttcacaatgtgaaactgaaggtcaataaattattagagattttctcttcaaaaaaaaaaaaaaaaaaaaaaaaaaaaaaaaaaaaaaaaaaa

SEQ ID NO: 593 - DNA, 2161 bp, Homo sapiens
gcgacggttaaacggggcccaaggcaggggtggcgggtcagtgctgctcgggggcttctccatccaggtccctggagttcctggtccctggagctccgcacttggcggcgcaacctgcgtgaggcagcgcgactctggcgactggccggccatgccttcccgggctgaggactatgaagtgttgtacaccattggcacaggctcctacggccgctgccagaagatccggaggaagagtgatggcaagatattagtttggaaagaacttgactatggctccatgacagaagctgagaaacagatgcttgtttctgaagtgaatttgcttcgtgaactgaaacatccaaacatcgttcgttactatgatcggattattgaccggaccaatacaacactgtacattgtaatggaatattgtgaaggaggggatctggctagtgtaattacaaagggaaccaaggaaaggcaatacttagatgaagagtttgttcttcgagtgatgactcagttgactctggccctgaaggaatgccacagacgaagtgatggtggtcataccgtattgcatcgggatctgaaaccagccaatgttttcctggatggcaagcaaaacgtcaagcttggagactttgggctagctagaatattaaaccatgacacgagttttgcaaaaacatttgttggcacaccttattacatgtctcctgaacaaatgaatcgcatgtcctacaatgagaaatcagatatctggtcattgggctgcttgctgtatgagttatgtgcattaatgcctccatttacagcttttagccagaaagaactcgctgggaaaatcagagaaggcaaattcaggcgaattccataccgttactctgatgaattgaatgaaattattacgaggatgttaaacttaaaggattaccatcgaccttctgttgaagaaattcttgagaaccctttaatagcagatttggttgcagacgagcaaagaagaaatcttgagagaagagggcgacaattaggagagccagaaaaatcgcaggattccagccctgtattgagtgagctgaaactgaaggaaattcagttacaggagcgagagcgagctctcaaagcaagagaagaaagattggagcagaaagaacaggagctttgtgttcgtgagagactagcagaggacaaactggctagagcagaaaatctgttgaagaactacagcttgctaaaggaacggaagttcctgtctctggcaagtaatccagaacttcttaatcttccatcctcagtaattaagaagaaagttcatttcagtggggaaagtaaagagaacatcatgaggagtgagaattctgagagtcagctcacatctaagtccaagtgcaaggacctgaagaaaaggcttcacgctgcccagctgcgggctcaagccctgtcagatattgagaaaaattaccaactgaaaagcagacagatcctgggcatgcgctagccaggtagagagacacagagctgtgtacaggatgtaatattaccaacctttaaagactgatattcaaatgctgtagtgttgaatacttggttccatgagccatgcctttctgtatagtacacatgatatttcggaattggttttactgttcttcagcaactattgtacaaaatgttcacatttaatttttctttcttcttttaagaacatattataaaaagaatactttcttggttgggcttttaatcctgtgtgtgattactagtaggaacatgagatgtgacattctaaatcttgggagaaaaaataatgttaggaaaaaaatatttatgcaggaagagtagcactcactgaatagttttaaatgactgagtggtatgcttacaattgtcatgtctagatttaaattttaagtctgagattttaaatgtttttgagcttagaaaacccagttagatgcaatttggtcattaataccatgacatcttgcttataaatattccattgctctgtagttcaaatctgttagctttgtgaaaattcatcactgtgatgtttgtattctttttttttttctgtttaacagaatatgagctgtctgtcatttacctacttctttcccactaaataaaagaattcttcagtttccctgtaaaaaaaaaaaaaaaaaaa

SEQ ID NO: 594 - DNA, 5180 bp, Homo sapiens
gcagatgcaaaatgtgtctctggccagcaggaggaaggaagaggaagtgagagcagcggcagccggcggtgcagcagccggccgacccagagtgtaagtgcgtgtgctggggcgagcgggagcgggcgaggatgggcacaggatagaggcagagccacccacgccgccgcggccccacgctgggcgacagagcctccagttccccttcaatggtggcgggtcgccggagctctgatcgccgggaacccttgccgctgctgtcctgcgaccccaagcaggtatagacacgtgtggccgtttacgctgtaggatcctcattcccactggctttgaacattttggggacttacaatgccgccacccgcggacatcgtcaaggtggccatagaatggccgggcgcctaccccaaactcatggaaattgatcagaaaaaaccactgtctgcaataataaaggaagtctgtgatgggtggtctcttgccaaccatgaatattttgcactccagcatgccgatagttcaaacttctatatcacagaaaagaaccgcaatgagataaaaaatggcactatccttcgattaaccacatctccagctcagaacgcccagcagctccatgaacgaatccagtcctcgagtatggatgccaagctggaagccctgaaggacttggccagcctctcccgggatgtcacgtttgcccaggagtttataaacctggacggtatctctctcctcacgcagatggtggagagcggcactgagcgataccagaaattgcagaagatcatgaagccttgctttggagacatgctgtccttcaccctgacggccttcgttgagctgatggaccatggcatagtgtcctgggatacattttcggtggcgttcattaagaagatagcaagttttgtgaacaagtcagccatagacatctcgatcctgcagcggtccttggccattttggagtcgatggtgctcaatagccatgacctctaccagaaagtggcgcaggagatcaccatcggccagctcattccacacctgcaagggtcagatcaagaaatccaaacctatactattgcagtgattaatgcgcttttcctgaaggctcctgatgagaggaggcaggagatggcgaatattttggctcagaagcaactgcgttccatcattttaacacatgtcatccgagcccagcgggccatcaacaatgagatggcgcaccagctgtatgttctacaagtgctcacctttaacctcctggaagacaggatgatgaccaaaatggacccccaggaccaggctcagagggacatcatatttgaacttcgaagaattgcttttgatgctgagtctgaacctaacaacagcagtggcagcatggagaaacgcaagtccatgtacacgcgagattataagaagcttgggttcattaatcatgtcaaccctgccatggacttcacgcagactccacctgggatgttggctctggacaacatgctgtactttgccaagcaccaccaagatgcctacatccggattgtgcttgagaacagtagtcgagaagacaagcatgaatgtccctttggccgcagtagtatagagctgaccaagatgctatgtgagatcttgaaagtgggcgagttgcctagtgagacctgcaacgacttccacccgatgttcttcacccacgacagatcctttgaggagtttttctgcatctgtatccagctcctgaacaagacatggaaggaaatgagggcaacttctgaagacttcaacaaggtaatgcaggtggtgaaggagcaggttatgagagcacttacaaccaagcctagctccctggaccagttcaagagcaaactgcagaacctgagctacactgagatcctgaaaatccgccagtccgagaggatgaaccaggaagatttccagtcccgcccgattttggaactaaaggagaagattcagccagaaatcttagagctgatcaaacagcaacgcctgaaccgccttgtggaagggacctgctttaggaaactcaatgcccggcggaggcaagacaagttttggtattgtcggctttcgccaaatcacaaagtcctgcattacggagacttagaagagagtcctcagggagaagtgccccacgattccttgcaggacaaactgccggtggcagatatcaaagccgtggtgacgggaaaggactgccctcatatgaaagagaaaggtgcccttaaacaaaacaaggaggtgcttgaactcgctttctccatcttgtatgactcaaactgccaactgaacttcatcgctcctgacaagcatgagtactgtatctggacggatggactgaatgcgctactcgggaaggacatgatgagcgacctgacgcggaatgacctggacaccctgctcagcatggaaatcaagctccgcctcctggacctggaaaacatccagatccctgacgcacctccgccgattcccaaggagcccagcaactatgacttcgtctatgactgtaactgaagtggccgggcccagacatgccccttccaaaactggaacacctagctaacaggagagaggaatgaaaacacacccacgccttggaaccgtcctttggtaaagggaagctgtgggtccacattcccttcagcatcacctctagccctggcaactttcagcccctagctggcatcttgctcaccgccctgattctgttcctcggctccactgcttcaggtcacttcccatggctgcagtccactggtgggacaagagcaaagcccactgccagtaagaaggccaaagggcccttccatcctagccctctgcaggcatgcccttccttcccttgggcaggaaagccagcagccccagactgcccaaaaacttgcccaccagaccaagggcagtgccccaaggcccctgtctggaggaaatggcctagctatttgatgagaagaccaaaccccacatcctcctttcccctctctctagaatcatctcgcaccaccagttacacttgaattaagatctgcgctcaaatctcctcccacctctctccctgcttttgccttgctctgttcctctttggtcccaagagcagcagccgcagcctcctcgtgatcctccctagcataaatttcccaaacagtccacaggtcccatgcccactttgcgtctgcactgtgatcgtgacaaatcttccctcctcaccagctagtctggggtttcctctccctgccccaggccagaactgccttcttcatttccacccacgctcccagcctcttagctgaaagcacaaatggtgaaatcagtagtctcgctccatctctaatagactaaacctaaatgcctctaggacggactgttgctatccaagcgtttggtgttaccttctcctgggaggtcctgctgcaactcaagttccacaggatggtcaagctgtcagacatccaagtttacatcattgtaattattactggtatttacaatttgcaagagttttgggttagtttttttttttttttttgctttgtttttgtacaaaagagtctaacattttttgccaaacagatatatatttaatgaaaagaagagatacataaatgtgtgaatttccagtttttttttaattattttaatcccaaacatcttcctgaaaataacattcccttaaacatgctgtggaataaaatggattgtgatgatttggggagctggtgttttgatttagtaacttaggttcttgctactcagtcatcagcatcacctgggagcttgttggagatgccagctcttcagctccaccctagacctgctgaattgggtgatgtttatgtacattggtttgaaaaacactgctgtgggaaaccctccaccattgctaggtcaccataggctctgagcatcagtggagaatgttacttctaagaagaccatctcgactcactgagaaaatcagacccactgtatgaaaatatctattccttttacattgctgtctcttgaccatgactttctcttttttctttcttaccatgatataatttatagaatgggtctaattaaagacatcacaactttgagggagcacatttagcaatgaaaagaatgcatacccacagacctgaaataagccagaactaaataaatctaaccgtgggttaataaattataggtcagagcccagcgaaggatgtttcttaagtcatttgcactggaggcattatcaggattgtaaactcccagcactgggagggatgtcagaagggtccaagcatgcagtattaagcgtggcacagcaccagccactctggcctcacagcacaagctgtggaagcatccaggtcatttctctttaccgtcatcaggatgtgcaattacagattgacctgggttgagatgatatggtccagagcactgcatgcattgcaggaaaaaagtcctttgcattcacaggggttccttcttcccatcagagcactcacacctgtgtcaagctgttaattccttgatcattaagcttcgatgttattaacatgtacttgctatcaggagcagttattaatctacccatcatcatgataaaacagtaagtgttaggtcaaaggcagcaaacaaagtcatattatttttttcttatgggttacaagatccaatccatgaaaaagggaactttctggaccaggatctctgaggtcctgagacactgggtttaagaaatgtatctgtcctgtgaccttggttggggagatccagcccctctctcttctggcactccagctttggtgcatttaatagaaagaaaccttttcaggactatgaaaggcagcattctccagctcctccctagaccctcctttggacctgtgagatctgaagagtatgccatctgtttccattcattttgtgaccatgtggggaaggattgttgcccatatttggccacctcaccttctctctccaggctgcccaaggctttttttcccatgcaatgagcctaccacctccaactcatctcctgttgcctgcagtttcctaagcctgggcaactcagccaaatccaaggcagaagtaaagtaggaagactgatgttgtcgtgaagtccaagttgcattctgctattcatattactcaaaataaaactgattacttaatttgaa

SEQ ID NO: 595 - DNA, 2989 bp, Homo sapiens
ggggggagcgcgccgggcgcagggagctgagtggacggctcgagacggcggcgcgtgcagcagctccagaaagcagcgagttggcagagcagggctgcatttccagcaggagctgcgagcacagtgctggctcacaacaagatgctcaaggtgtcagccgtactgtgtgtgtgtgcagccgcttggtgcagtcagtctctcgcagctgccgcggcggtggctgcagccggggggcggtcggacggcggtaattttctggatgataaacaatggctcaccacaatctctcagtatgacaaggaagtcggacagtggaacaaattccgagacgaagtagaggatgattatttccgcacttggagtccaggaaaacccttcgatcaggctttagatccagctaaggatccatgcttaaagatgaaatgtagtcgccataaagtatgcattgctcaagattctcagactgcagtctgcattagtcaccggaggcttacacacaggatgaaagaagcaggagtagaccataggcagtggaggggtcccatattatccacctgcaagcagtgcccagtggtctatcccagccctgtttgtggttcagatggtcatacctactcttttcagtgcaaactagaatatcaggcatgtgtcttaggaaaacagatctcagtcaaatgtgaaggacattgcccatgtccttcagataagcccaccagtacaagcagaaatgttaagagagcatgcagtgacctggagttcagggaagtggcaaacagattgcgggactggttcaaggcccttcatgaaagtggaagtcaaaacaagaagacaaaaacattgctgaggcctgagagaagcagattcgataccagcatcttgccaatttgcaaggactcacttggctggatgtttaacagacttgatacaaactatgacctgctattggaccagtcagagctcagaagcatttaccttgataagaatgaacagtgtaccaaggcattcttcaattcttgtgacacatacaaggacagtttaatatctaataatgagtggtgctactgcttccagagacagcaagacccaccttgccagactgagctcagcaatattcagaagcggcaaggggtaaagaagctcctaggacagtatatccccctgtgtgatgaagatggttactacaagccaacacaatgtcatggcagtgttggacagtgctggtgtgttgacagatatggaaatgaagtcatgggatccagaataaatggtgttgcagattgtgctatagattttgagatctccggagattttgctagtggcgattttcatgaatggactgatgatgaggatgatgaagacgatattatgaatgatgaagatgaaattgaagatgatgatgaagatgaaggggatgatgatgatggtggtgatgaccatgatgtatacatttgattgatgacagttgaaatcaataaattctacatttctaatatttacaaaaatgatagcctatttaaaattatcttcttccccaataacaaaatgattctaaacctcacatatattttgtataattatttgaaaaattgcagctaaagttatagaactttatgtttaaataagaatcatttgctttgagtttttatattccttacacaaaaagaaaatacatatgcagtctagtcagacaaaataaagttttgaagtgctactataataagtttttcacgagaacaaactttgtaaatcttccataagcaaaatgacagctagtgcttgggatcgtacatgttaattttctgaaagataattctaagtgaaatttaaaataaataaatttttaatgacctgggtcttaaggatttaggaaaaatatgcatgctttaattgcatttccaaagtagcatcttgctagacctagttgagtcaggataacagagagataccacatggcaagaaaaacaaagtgacaattgtagagtcctcaattgtgtttacattaatagtggtgtttttacctatgaaattattctggatctaataggacattttacaaaatggcaagtatggaaaaccatggattctgaaagttaaaaatttagttgttctccccaatgtgtattttaatttggatggcagtctcatgcagattttttaaaagattctttaataacatgatttgtttgcctttctagatttctttatctttctgaccagcaacttagggagcagaatttaaattaggaagacaaagggaaagattcatttaaaccatatttttacaaagtttgtcatttgccccaaggtcaaattttaaattcttaattttcattttatttcccattttaggtaaaagtttgcatttaatcttagaattatgttatttttgttagtagtgtggaaacttagagaacttattgtatggtgccttgcaaaaatagagatagaaagattttagcatgcataccaatatagtatattacgcaatatataagcacacctaattaacagattaatatcagtaaaggtattgctgctggaatgaagaaaatgggatacgtttgtttctttttttctattgttacataattgccatgtggacttgtttatgattattgtgtagagtagcatttaagatttaactgtagcaaaaattactttaaccgctgtatttaagttagcatgttaattaattgtgtagacattttggcacaccatcacttttaactatatcataccaatggttttgtgcccataataaaaatggaaaaacctgttgaatgttacgtattggtatctttaatttcaacagtgggtaaactggtttcccagtatacaattcattgaaagcaaaattgattaattatttccatttaatttatacacactcaatacaaaatttaatgttgactttacgtaataaagtataatgcattttcttttttactgtttatgtatagtttacaaaataaagaatcttgtaaccaaa

SEQ ID NO: 596 - DNA, 1929 bp, Homo sapiens
agtttcccgggagagacgaaagcaggaacgagagcggagcggagcacagtccgccgagcacaagctccagcatcccgtcaggggttgcaggtgtgtgggaggtaagcgtgggtccttcttcggggcgtctgcactgccctggagaaaacgtcttccaataggaattacatcaagacacagctaaaagagtccgcgttgggttaggaaaccggtgcaaaacctctcgggtgaaagatttacatttttcgactttaagggcaaaaaagcaaaaggaagcttgactctgggtataaagggcgtggttagtgtttttggtttgagttgcaccagtaaaactgttctgggagatctgaagattgagaaaaatcctgctaattgaggacgaggtggatgttatctggtggatgttataggcttgaaactgttacaatatggctttccttggactcttctctttgctggttctgcaaagtatggctacaggggccactttccctgaggaagccattgctgacttgtcagtgaatatgtataatcgtcttagagccactggtgaagatgaaaatattctcttctctccattgagtattgctcttgcaatgggaatgatggaacttggggcccaaggatctacccagaaagaaatccgccactcaatgggatatgacagcctaaaaaatggtgaagaattttctttcttgaaggagttttcaaacatggtaactgctaaagagagccaatatgtgatgaaaattgccaattccttgtttgtgcaaaatggatttcatgtcaatgaggagtttttgcaaatgatgaaaaaatattttaatgcagcagtaaatcatgtggacttcagtcaaaatgtagccgtggccaactacatcaataagtgggtggagaataacacaaacaatctggtgaaagatttggtatccccaagggattttgatgctgccacttatctggccctcattaatgctgtctatttcaaggggaactggaagtcgcagtttaggcctgaaaatactagaaccttttctttcactaaagatgatgaaagtgaagtccaaattccaatgatgtatcagcaaggagaattttattatggggaatttagtgatggctccaatgaagctggtggtatctaccaagtcctagaaataccatatgaaggagatgaaataagcatgatgctggtgctgtccagacaggaagttcctcttgctactctggagccattagtcaaagcacagctggttgaagaatgggcaaactctgtgaagaagcaaaaagtagaagtatacctgcccaggttcacagtggaacaggaaattgatttaaaagatgttttgaaggctcttggaataactgaaattttcatcaaagatgcaaatttgacaggcctctctgataataaggagatttttctttccaaagcaattcacaagtccttcctagaggttaatgaagaaggctcagaagctgctgctgtctcaggaatgattgcaattagtaggatggctgtgctgtatcctcaagttattgtcgaccatccatttttctttcttatcagaaacaggagaactggtacaattctattcatgggacgagtcatgcatcctgaaacaatgaacacaagtggacatgatttcgaagaactttaagttactttatttgaataacaaggaaaacagtaactaagcacattatgtttgcaactggtatatatttaggatttgtgttttacagtatatcttaagataatatttaaaatagttccagataaaaacaatatatgtaaattataagtaacttgtcaaggaatgttatcagtattaagctaatggtcctgttatgtcattgtgtttgtgtgctgttgtttaaaataaaagtacctattgaacatgtgaaaaaaaaaaaaaaaaaaaa

SEQ ID NO: 597 - DNA, 3822 bp, Homo sapiens
tggctcagccgcggcggtggcgggggcgcaaccagcgggccgaggcggcggcgccagcggcgccttaaatagcatccagagccggcgcggggcagggagtgggctgcagtgacagccggcggcggagcggccggtccacggaggagaattcagcttagagaactatcaacacaggacaatgcaagcccatgagctgttccggtattttcgaatgccagagctggttgacttccgacagtacgtgcgtactcttccgaccaacacgcttatgggcttcggagcttttgcagcactcaccaccttctggtacgccacgagacccaaacccctgaagccgccatgcgacctctccatgcagtcagtggaagtggcgggtagtggtggtgcacgaagatccgcactacttgacagcgacgagcccttggtgtatttctatgatgatgtcacaacattatacgaaggtttccagaggggaatacaggtgtcaaataatggcccttgtttaggctctcggaaaccagaccaaccctatgaatggctttcatataaacaggttgcagaattgtcggagtgcataggctcagcactgatccagaagggcttcaagactgccccagatcagttcattggcatctttgctcaaaatagacctgagtgggtgattattgaacaaggatgctttgcttattcgatggtgatcgttccactttatgatacccttggaaatgaagccatcacgtacatagtcaacaaagctgaactctctctggtttttgttgacaagccagagaaggccaaactcttattagagggtgtagaaaataagttaataccaggccttaaaatcatagttgtcatggatgcctacggcagtgaactggtggaacgaggccagaggtgtggggtggaagtcaccagcatgaaggcgatggaggacctgggaagagccaacagacggaagcccaagcctccagcacctgaagatcttgcagtaatttgtttcacaagtggaactacaggcaaccccaaaggagcaatggtcactcaccgaaacatagtgagcgattgttcagcttttgtgaaagcaacagagaatacagtcaatccttgcccagatgatactttgatatctttcttgcctctcgcccatatgtttgagagagttgtagagtgtgtaatgctgtgtcatggagctaaaatcggatttttccaaggagatatcaggctgctcatggatgacctcaaggtgcttcaacccactgtcttccccgtggttccaagactgctgaaccggatgtttgaccgaattttcggacaagcaaacaccacgctgaagcgatggctcttggactttgcctccaagaggaaagaagcagagcttcgcagcggcatcatcagaaacaacagcctgtgggaccggctgatcttccacaaagtacagtcgagcctgggcggaagagtccggctgatggtgacaggagccgccccggtgtctgccactgtgctgacgttcctcagagcagccctgggctgtcagttttatgaaggatacggacagacagagtgcactgccgggtgctgcctgaccatgcctggagactggaccgcaggccatgttggggccccgatgccgtgcaatttgataaaacttgttgatgtggaagaaatgaattacatggctgccgagggcgagggcgaggtgtgtgtgaaagggccaaatgtatttcagggctacttgaaggacccagcgaaaacagcagaagctttggacaaagacggctggttacacacaggggacattggaaaatggttaccaaatggcaccttgaaaattatcgaccggaaaaagcacatatttaagctggcacaaggagaatacatagcccctgaaaagattgaaaatatctacatgcgaagtgagcctgttgctcaggtgtttgtccacggagaaagcctgcaggcatttctcattgcaattgtggtaccagatgttgagacattatgttcctgggcccaaaagagaggatttgaagggtcgtttgaggaactgtgcagaaataaggatgtcaaaaaagctatcctcgaagatatggtgagacttgggaaggattctggtctgaaaccatttgaacaggtcaaaggcatcacattgcaccctgaattattttctatcgacaatggccttctgactccaacaatgaaggcgaaaaggccagagctgcggaactatttcaggtcgcagatagatgacctctattccactatcaaggtttagtgtgaagaagaaagctcagaggaaatggcacagttccacaatctcttctcctgctgatggccttcatgttgttaattttgaatacagcaagtgtagggaaggaagcgttcgtgtttgacttgtccattcggggttcttctcataggaatgctagaggaaacagaacactgccttacagtcacctcatgttgcagaccatgtttatggtaatacacactttccaaaatgagccttaaaaattgtaaaggggatactataaatgtgctaagttatttgagacttcctcagtttaaaaagtgggttttaaatcttctgtctccctgtttttctaatcaaggggttaggactttgctatctctgagatgtctgctacttgctgcaaattctgcagctgtctgctgctctaaagagtacagtgcactagagggaagtgttccctttaaaaataagaacaactgtcctggctggagaatctcacaagcggaccagagatctttttaaatccctgctactgtcccttctcacaggcattcacagaacccttctgattcgtaagggttacgaaactcatgttcttctccagtcccctgtggtttctgttggagcataaggtttccagtaagcgggagggcagatccaactcagaaccatgcagataaggagcctctggcaaatgggtgctcatcagaacgcgtggattctctttcatggcagaatgctcttggactcggttctccaggcctgattccccgactccatcctttttcaggggttatttaaaaatctgccttagattctatagtgaagacaagcatttcaagaaagagttacctggatcagccatgctcagctgtgacgcctgaataactgtctactttatcttcactgaaccactcactctgtgtaaaggccaacagatttttaatgtggttttcatatcaaaagatcatgttgggattaacttgcctttttccccaaaaaataaactctcaggcaagcatttctttaaagctattaagggagtatatacttgagtacttattgaaatggacagtaataagcaaatgttcttataatgctacctgatttctatgaaatgtgtttgacaagccaaaattctaggatgtagaaatctggaaagttcatttcctgggattcacttctccagggattttttaaagttaatttgggaaattaacagcagttcactttattgtgagtctttgccacatttgactgaattgagctgtcatttgtacatttaaagcagctgttttggggtctgtgagagtacatgtattatatacaagcacaacagggcttgcactaaagaattgtcattgtaataacactacttggtagcctaacttcatatatgtattcttaattgcacaaaaagtcaataatttgtcaccttggggttttgaatgtttgctttaagtgttggctatttctatgttttataaaccaaaacaaaatttccaaaaacaatgaaggaaaccaaaataaatatttctgcatttcaggtgaaaaaaaaaaaaaaaaaa

SEQ ID NO: 598 - DNA, 2602 bp, Homo sapiens
ttgcgacgctcgggtctgggtccgggtccggacgtgcaacagaagccgtcagtggccccgctggctaaaaaagggcaagcatcggaggctcgagccagcggccgcggcgcttcccgacagttcctaattcggggcgctacgccggccccaccacctgttcccggcagccaatggggccgcggggggcggccggggcggagcgcggctacaaaaggcctcgggccccgcgcgcccgcccaccccgctccgggcgcgctctcgggaaggcttggaccgacgcggcccagaggccaggaacattccgcgcgtggaccagccgggccagggcgatgctgcgggtgcggtgtctgcgcggcgggagccgcggcgccgaggcggtgcactacatcggatctcggcttggacgaaccttgacaggatgggtgcagcgaactttccagagcacccaggcagctacggcttcctcccggaactcctgtgcagctgacgacaaagccactgagcctctgcccaaggactgccctgtctcttcttacaacgaatgggaccccttagaggaagtgatagtgggcagagcagaaaacgcctgtgttccaccgttcaccatcgaggtgaaggccaacacatatgaaaagtactggccattttaccagaagcaaggagggcattattttcccaaagatcatttgaaaaaggctgttgctgaaattgaagaaatgtgcaatattttaaaaacggaaggagtgacagtaaggaggcctgaccccattgactggtcattgaagtataaaactcctgattttgagtctacgggtttatacagtgcaatgcctcgagacatcctgatagttgtgggcaatgagattatcgaggctcccatggcatggcgttcacgcttctttgagtaccgagcgtacaggtcaattatcaaagactacttccaccgtggcgccaagtggacaacagctcctaagcccacaatggctgatgagctttataaccaggattatcccatccactctgtagaagacagacacaaattggctgctcagggaaaatttgtgacaactgagtttgagccatgctttgatgctgctgacttcattcgagctggaagagatatttttgcacagagaagccaggttacaaactacctaggcattgaatggatgcgtaggcatcttgctccagactacagagtgcatatcatctcctttaaagatcccaatcccatgcatattgatgctaccttcaacatcattggacctggtattgtgctttccaaccctgaccgaccatgtcaccagattgatcttttcaagaaagcaggatggactatcattactcctccaacaccaatcatcccagacgatcatccactctggatgtcatccaaatggctttccatgaatgtcttaatgctagatgaaaaacgtgttatggtggatgccaatgaagttccaattcaaaagatgtttgaaaagctgggtatcactaccattaaagttaacattcgtaatgccaattccctgggaggaggcttccattgctggacctgcgatgtccggcgccgaggcaccttacagtcctacttggactgaacaggcctgatggagcttgtggctggcctcagatacacctaagaagcttaggggcaaggttcattctcctgctttaaaaagtgcatgaactgtagtgctttaaacaatcatctccttaacaggggtcgtaagcctggtttgcttctattacttttctttgacataaagaaaataacttctgctaggtattactctctactcctaaagttatttactatttggcttcaagtataaaattttggtgaatgtgtaccaagaaaaaattagtcacctgagtaacttggccactaataattaaccatctacctctgtttttaattttctttccaaaaggcagcttgaaatgttggtcctaatcttaattttttttcctcttctatagacttgagaatgtttttctctaaatgagagaaagacttagaatgtacacagatccaaaatagaatcagattatctctttttttctaaaggagagaaagacttagaacatacacagatcctaagtagaaccaggtaattgtctctttttctaataaggaatttgggtaatttttaattttttgttttttaaaaaataacctagactatgcaaaacatcaaagtgaattttccatgaatgtttttaatattctcatctcaacattgtgatatatgctactaaaaaccttttcatatacatcttacctcatttcaagtgaattattttaatctttttctctctttccaaaaatttaggaatgtttagtgtaattggatttcgctatcagttcccatccttaagttttgatattcaatatctgatagatacactgcatctttggtcatctaagatttgtttacaaatgtgcaaattatttagagcatagactttataagcattaaaaaaaactaatggaggtaaaacctaaatgcgatgtgaaataattttagtgttgataccgtatgtgtatttttattctaataaacttttgtgttccagattgaaaaaaaaaaaaaaaaaa

SEQ ID NO: 599 - DNA, 3993 bp, Homo sapiens
gaggaggccgggcgcgcccggaaaagtggtttgcctgacggcgagaggcagaggtgccctcggtgatagaggaaacatggccgagtatacgcggctgcacaacgccttggcgctaatccgcctccgaaacccgccggtcaacgcgatcaggtaacgggctcggtcgcctccagcccggggaccgtgcgggccttagccgccctctggctccggaggctttgactctcccccgtcggtttaaaccgagaaggacactcaagagttgagcaactgtacgactttactccgtgacataaaagaaggactacagaaagctgtaatagaccatacaataaaagccattgtgatttgtggagcagagggcaaattttctgcaggtgctgatattcgtggcttcagtgctcctaggacatttggccttacactgggacatgtagtagatgaaatacagagaaatgagaagcccgtggtggcagcaatccaaggcatggctttcggagggggactagagctggccctgggctgtcactataggattgcccacgcagaggctcaagttggcttaccagaagttacactgggacttctccctggtgcaagaggaacccagcttctccccagactcactggagttcctgctgcacttgacttaattacctcaggaagacgtattttagcagatgaagcactcaagctgggcattctagataaagttgtaaactcagacccggttgaagaagcaatcagatttgctcagagagtttcagatcaacctctagaatcccgtagactctgcaacaagccaattcagagcttgcccaacatggacagcatttttagtgaggccctcttgaagatgcggaggcagcaccctgggtgtcttgcacaggaggcttgtgtccgtgcagtccaggctgctgtgcagtatccctatgaagtgggcatcaagaaggaggaggagctgtttctatatcttttgcaatcagggcaggctagagccctgcaatatgctttcttcgctgaaaggaaagcaaataagtggtcaactccctccggagcatcgtggaaaacagcatcagcgcggcctgtctcctcagttggtgttgttggcttgggaacaatgggccgaggcattgtcatttcttttgcaagggccaggattcctgtgattgctgtagactcggacaaaaaccagctagcaactgcaaacaagatgataacctctgtcttggaaaaagaagcctccaaaatgcaacagagcggccacccttggtcaggaccaaaacccaggttaacttcatctgtgaaggagcttggtggtgtagatttagtcattgaagcagtatttgaggaaatgagcctgaagaagcaggtctttgctgaactctcagctgtgtgcaaaccagaagcatttttgtgcactaatacttcagccctggatgttgatgagattgcttcttccactgatcgtcctcacttggtcattggcacccacttcttttcgccagctcatgtcatgaagttgttagaggttattcccagccaatactcttcccccactaccattgccactgttatgaacttatcaaaaaagattaaaaagattggagtcgttgtaggcaactgttttggatttgtggggaatcgaatgttgaatccttactacaatcaggcatatttcttgttagaagaaggcagcaaaccagaggaggtagatcaggtgctggaagagtttggttttaaaatgggaccttttagagtgtctgatcttgctgggttggatgtgggctggaaatctagaaaggggcaaggtcttactggacctacattgcttccaggaactcctgcccgaaaaaggggtaataggaggtactgcccaattcctgatgtgctctgtgaattaggacgatttggccagaagacaggtaagggttggtatcaatatgacaagccattgggtaggattcacaaacctgatccctggctttccaaattcctatcacggtatagaaaaacccatcacattgaaccacgtaccattagccaggatgagatccttgaacgctgcttatattcacttatcaatgaagcattccgtatcttgggagaagggatagctgctagcccagagcacattgatgttgtctatttacatggatatggatggccaaggcacaagggcgggcccatgttctatgcttccacagttgggttgcccacagttctagagaaattgcagaaatattacaggcagaaccctgatattccccaactggagccaagtgactatctaaaaaaactggcttctcagggaaaccctcccctgaaagaatggcaaagcttggcaggctcccctagcagtaaattgtgattcagtcttccagattatgcctcacatgctagcatcaggtaatgctgactgaatttcagtgaaattaaatcaaaaatccaaagtaagattgttctgaaatacaaagcaaaataaataatcattagaatcttctgtgtaacgactctaatggtcaaatctttaggaatgtgcttcctatgcctctgaatctgtccttatcagataaattcaatgcatgaacttgtgtgaatataataccataatagctaatgaaagaggctcaggcataagttgagattctcaaatgcttttatcattggataaatgtgtcatcaattaataaatgataaatgcagctaagtcatacattcattttgactcctttcaatgtcacacacatagtattgatcagaaatcttatgaatcatacatacactcaacaaacattaaagttgtaggaaaaagacagttggaaattggtaagggaactgagtacttcaaaccagcacagggaacttaggttagtgtggcaagcctttcctcttctggtctttcctcttctgtttatggagaaataatagaaagtagtaagtcgttaacttagtgtaagaagggtcttagagaacatctaaccttctaggatttcccaattctgtgatagagtaatgacaccagttttcctgtcatgacaagcctctgtgatgttacatatggaaatggttgaatcttgaaaaatctaaaattgttgcaaaacatattttgtatgattttgttgtaagagttcttctctttttactttttgccttgtgtagttaaaaattaaggggctggtcaatacaaaaacttgtacacaaatatttatagcagaattattcataatggccaaaagctgaatacaacccaaatgtctatgaactaatgaatagataaaccaaatctggtatatccatacaatggactatattattcagccataaaaagaaataaagggccaggcacagtggctcacacctgtaatcccagcactttgggaggctgaggcaggaggattgtttgaggccagaaatttgagaccagcctgggcaacatagcaaaaccctgtctctacaaaaaatactttccgtacattagtggttgcctaaggctagaattgggggtgatgaatggggagtacaggattcatctaatgggtacaggatttctttatggttcatgaaaatggtctaaacttattgtggtaatggtcacataacaatatattaaaaaccattgagttgtatattttaagtgggtgaattatatggtatgtgaattatatctcaataaagttgttagtaaataaatggggctgaagatgttatccttcattgtggtgtaaatgaactttcacaatattttcacctgtgaacccaaataaaatgattaaagttctgatggaaaaatcttgaatggagtataagttttccgttgttaaaaagcaaacaaaaaaccaacaaaaaatccaagtgtgccttgaattgtacagagcacaattattatgtttgaaatgtgtactacttaattttatataatttggtttgtgaaattaaagacatcaataaaaatgattcctgaaagtagtaaaaaaaaaaaaaaaaaaaaaa

SEQ ID NO: 600 - DNA, 4813 bp, Homo sapiens
ggtcgccgcggtgctgctgctcagtgggagcgggtcttcgcaactgtctccgcgtggcgcgcgcctctagccgcccttcccctggcggctacggccggagggagcggaggcgagcgggagtcgggctccatggagagcggcggacaactgggcagaggcggagctttcatctcggcaccctggttccagtgacccgcgctagcgtcccgtcccgcccgcgtcggagcggccgccggccccgggactgaccggcctcgccgcacctcccgcaccgactagcgctcccgggcgctcctgcgcccgactcgccctcgcccccactccccggcggggtggcggcggccgggcccccacggcggcggccggagcagcagcagcagcagcaggagcccgcctctatgatgaagttcaagcccaaccagacgcggacctacgaccgcgagggcttcaagaagcgggcggcgtgcctgtgcttccggagcgagcaggaggacgaggtgctgctggtgagtagcagccggtacccagaccagtggattgtcccaggaggaggaatggaacccgaggaggaacctggcggtgctgccgtgagggaagtttatgaggaggctggagtcaaaggaaaactaggcagacttctgggcatatttgagcagaaccaagaccgaaagcacagaacatatgtttatgttctaacagtcactgaaatattagaagattgggaagattctgttaatattggaaggaagagagagtggttcaaagtagaagatgctatcaaagttctccagtgtcataaacctgtacatgcagagtatctggaaaagctaaagctgggttgttccccagccaatggaaattctacagtcccttcccttccggataataatgccttgtttgtaaccgctgcacagacctctgggttgccatctagtgtaagatagagagaactgggtaggcctctcccaccatgtgcagtctcatggggagaggcttctttcgtttcctcgtcaaacatctgattgacgcttgcaaactgtctgaatttgccatgcaaggttttcaaacaatttgcatgtttttcagatgctttcaaatctttttttaaaaaaatagtgtaaaatattttaataagccaaagccatgtggaatttttgtttagatgccttaactgtgccacaccccacaaccccctatattattttggttgtctatttctcacagcatattttcagttttttgtccatttgacatcagtctgtggtttattttgtcatcagattacttgtgggtatacctaccccaaaattgttttctcattcacagcattagcatattcagcaaatccatctgtggtgggaattaaaaatattattggtattaaagaaatccattcaccccaaaacttgttttacaggattacaattttaattcaaaatttccagatttgggctatttctgtatgatccaataacttattttgtcacagggcttaatttgccatttttggggatttgtcgactcattttgtctgaattttcacaactggtattatgtcactagctacctgatacggctatttcccttataactcaatagtaccttaacacaaagtataactctgtagagttggtgaatattttagggaaatattagcaaaatgcatgtagtaaagacatcttatgaaaactgtattcatggaatttgatttagcatgctcagttgccagttcccattatcgatactctttctttgcagaataccttagaaccgttatttccctcagtgtagattgctcttaaaatgtattcagttatttagtggcccccacaggagtggagtcttgaaatctaattctaaatgccagtcagtgatgatcgcatcacagttgagtgaaatggccttcctgttcagctgttagagactgaagattgttagggcaccttagaatgtctcatcttttctaggttgtcaacaggtactatttgtcacataactaactttcgaggcactggaacatacctgaactaagaattaaatcttttactttatactcacttaaaatcaagaatcccatctaaaacacataggtaccttatctgaaactcttgcacttccccaaccagggcagaaatgaggtgggagaagtttgactaaaatgagggatgggggaaagtaaaagatgtttttttttttttgagactcgctttgtcacccaggctggagtgcaatggcacaatctcaactcaccgcaacctccgcctcccgggttcaagcgattctcctgcctcagcctcccgagtagttgggattacaggcgcctgcctccatgcctggctaattttgtatttttagtagagacagggtttcttcatgttggtcaggctggtctcaaactcctaacctcgtgatccgcctgcctcgacctcccaaagtgctgggattacaggcatgagccaccatgcccagccaaagatcatttttttatatagacttcagccctttgtaaatattgtaactggggagtatagagtagaaaaaaagtatagttaaaacatttgttctacaaattaacctttaaaaatataattactgctaaaaatagagtgctgttacacttaaggaaaattagtgccattttggaaatgagatcttgtgccataaatacagctgaactgaatataaatgttcacaaattaatgctgtcaaaggaatgagtaaagcagaaaaacttttaaccagcaacatttcaagtacgtagtgtgatcaaacatgatcatccagaatttttatatttttttctttgtacagaggttacatattctgggtgttcttttataaaggaaacattttaaatcccacaaattgacactttctatcttcaatggactaagatttttttggtcagtaatctctgaaatttccttaaattatatacttaacatagcagagaaactggattgtttttgtatataagactgcttccacctgaaatgctgtcataagtactgggggggtgggggagtgcccatcttgtacatgatattcttagaggtaataaggtaatgatgcatgaatttattttataaactcttggactatgtatttgacatgtaaaatatgtacagtattaacgtcaaccatctctttaaagttagcctataaatattgttgtataattttctttggtcagaaacacttggactgaatagtgacactcggtaaggattttcagtgccatttagcaaaacgtctttagtctatgcaactagcaaaaatctgcataatgcaacaacacagttttcacacttcaaattttacatgaggggttcttcacgattctcctggaacccagtctagcaaaatgagaggaaaggccctagggagatttatttctgttaaatagttaactctgctgagtatgacaaatagtgtctactatctcaaccctccaaaatttgcagagtgttgggactgtcatttgtgattttttttttttttttttggtggggtagttgaataaaattgggcagctaaatttttcagttccatgtgcctcccaaataaaaaacagaaaataagtagtttttgtgaattgacttgcagacaaagtagaaactgtgctgcatgatgttattttgtaaacagatgacattttctgaccaggcacatgccatccaattttctgtcaatcacactgttgtataaagcagcagaactgaaggggaaaaatgattgttgtatacactgaattgctttgcatggtctcatttgagataattgatgtaagaatcctgacttttttatatttggaaacatcaaataaaaatggaaaaaatgatcatggctttaaaaaaaaaacaaaaacacacacacatgaactcagatttgcaaaccaggtttctgaaactttgggtaaggtgtatgcttttaactttgaaatgtataaacacccagcggaaacgtatacctttcagtgcatagtgcattgtgtgcttaccctgggttgtttaaacttgtgttcaaatattccccctccaagtgaaagcctgtcgggaattccacagtaacacctttactgttctcccattgatgatcatatacgttacctcttcctagcggtacatttgtatgatccttactactggaattaccgggttaaaaggaaatgcttaccactaagatgtcagtattctcctcatggatattttcagtctcaatgttgccagtctaatagtatagtatgtggttgctttactgctgttctccccacccccgtggagttgtgtcattattttaatgaatgtgagctcttgacttactctagaattctaatacagatactttctgcactagtatcacttttattattgcagttccatttaaaagcataactggctaagtcaccgccccacccgccgcattacatttcctaaaacatactgctgccaaagaccaactgtagaatccttaagtcctgttcaagtgtcacttcattttttattaggggtttcttagttggagggcatgagaaacttggccctttccaatgttgtcttcacattggagtataagaattctctataggactctttaatttttttttttttttggtagagatggggtcttgctgtgttgcccaggctggtctcaaactcctaggcttaagcagtcctccagcctcagccttctcaaagtgctaggatgattggcatgagccacctcgtctggcctgcaggtctttttaagcatttgctgttcaataataagcatcttctttatgcctagtatttgtgataagagcacaaaacaa

SEQ ID NO: 601 - DNA, 782 bp, Homo sapiens
gggctccctgcctcgggctctcaccctcctctcctgcagctccagctttgtgctctgcctctgaggagaccatggcccagtatctgagtaccctgctgctcctgctggccaccctagctgtggccctggcctggagccccaaggaggaggataggataatcccgggtggcatctataacgcagacctcaatgatgagtgggtacagcgtgcccttcacttcgccatcagcgagtataacaaggccaccaaagatgactactacagacgtccgctgcgggtactaagagccaggcaacagaccgttgggggggtgaattacttcttcgacgtagaggtgggccgcaccatatgtaccaagtcccagcccaacttggacacctgtgccttccatgaacagccagaactgcagaagaaacagttgtgctctttcgagatctacgaagttccctgggagaacagaaggtccctggtgaaatccaggtgtcaagaatcctagggatctgtgccaggccattcgcaccagccaccacccactcccaccccctgtagtgctcccacccctggactggtggcccccaccctgcgggaggcctccccatgtgcctgcgccaagagacagacagagaaggctgcaggagtcctttgttgctcagcagggcgctctgccctccctccttccttcttgcttctaatagccctggtacatggtacacacccccccacctcctgcaattaaacagtagcatcgcctccctctgaaaaaaaaaaaaaaaaaaaaaaa

SEQ ID NO: 602 - DNA, 2348 bp, Homo sapiens
ttccttcctagtcgcggggagtctgagaaagcgcacctgttccgcgaccgtcacgcacccctcctccgcctgccgcgatgtaccgctacctggccaaagcgctgctgccgtcccgggccgggcccgctgccctgggctccgcggccaaccactcggccgcgttgctgggccggggccgcggacagcccgccgccgcctcgcagccggggctcgcattggccgcccggcgccactacagcgagttggtggccgaccgcgaggacgaccccaacttcttcaagatggtggagggcttcttcgatcgcggcgccagcatcgtggaggacaagttggtgaaggacctgaggacccaggaaagcgaggagcagaagcggaaccgggtgcgcggcatcctgcggatcatcaagccctgcaaccatgtgctgagtctctccttccccatccggcgcgacgacggctcctgggaggtcatcgaaggctaccgggcccagcacagccagcaccgcacgccctgcaagggaggtatccgttacagcactgatgtgagtgtagatgaagtaaaagctttggcttctctgatgacatacaagtgtgcagtggttgatgtgccgtttgggggtgctaaagctggtgttaagatcaatcccaagaactataccgaaaatgaattggaaaagatcacaaggaggttcaccatggagctagcaaagaagggctttattggtcctggcgttgatgtgcctgctccagacatgaacacaggtgagcgggagatgtcctggattgctgatacctatgccagcaccatagggcactatgatattaatgcacacgcctgtgttactggtaaacccatcagccaagggggaatccatggacgcatctctgctactggccgtggtgtcttccatgggattgaaaacttcatcaatgaagcttcttacatgagcattttaggaatgacaccagggtttagagataaaacatttgttgttcagggatttggtaatgtgggcctacactctatgagatatttacatcgttttggtgctaaatgtattgctgttggtgagtctgatgggagtatatggaatccagatggtattgacccaaaggaactggaagacttcaaattgcaacatgggtccattctgggcttccccaaggcaaagccctatgaaggaagcatcttggaggtcgactgtgacatactgatcccagctgccactgagaagcagttgaccaaatccaacgcacccagagtcaaagccaagatcattgctgaaggtgccaatgggccaacaactccagaagctgataagatcttcctggagagaaacattttggttattccagatctctacttgaatgctggaggagtgacagtatcttactttgagtggctgaagaatctaaatcatgtcagctatggccgtttgaccttcaaatatgaaagggattctaactaccacttgctcctgtctgttcaagagagtttagaaagaaaatttggaaagcatggtggaactattcccattgtacccacggcagagttccaagacagtatatcgggtgcatctgagaaagacattgtgcactctgccttggcatacacaatggagcgttctgccaggcaaattatgcacacagccatgaagtataacctgggattggacctgagaacagctgcctatgtcaatgccattgaaaaagtcttcaaagtgtacagtgaagctggtgtgaccttcacatagatggatcatggctgacttcctcactaacctcttcacgtgtaacttctgcagacctaccacaagtttacatgtaaccacagaaatccctttctctcctgactcattactaatggataccattctcaacaagtcaatccaaatcagcccgttaaggagaaagaaattaatatacaagctgagtgtgaaagtagaaatcacctacaccagagagctattttggtattttgcctttaaataaaaagcctcctccatatggctgtgcagccttgctctgtggcttttcccagcacaatcagtgctagtgctggggaagggacagtcaagagcagtcagttgcttacttattttgctctggatgagtctgggacacgctgtaactttaacacatttaagaagaaggtgtgtggccttttcagaaggtggcatggtcctcaagtgagttcttagtattttatatcagcaaaataactcaattttgcagattgcaaacaaatataaaagctgtttctgtttatgaattttattcttttagaatagaataagtacatgctgctgtaataaaattgcctttaatcacttaaaaaaaaaaaaaaa

SEQ ID NO: 603 - DNA, 2867 bp, Homo sapiens
gcagacgaggcagggggaggtttgcactcggcgtggcgcgggtgagccgcgtgctctcgggcacccggccgccagttcggatgcttccgatcctcggggagccggggcgctgcgccggagtcacttcagcccatgttgttcaggtgacacccggggaagagcagactccagtgtgcaaaacgtttcggggtttccgggccagcggttccgggcgcgcctcgcgggcggcggcgcagaactacaacccccaggctccctggcgtggcggcacgtgggcccgagccgggcggccgcggatataaagcgcggcggcggctgccgggcggagcggctgcacggacaagagcggaggcctggaaggggaaactgaagcagaaagaggttacttaatgggctcaaggtcacctacctgacctaccagcagctcaatggccttcccaaagaagaaacttcagggtcttgtggctgcaaccatcacgccaatgactgagaatggagaaatcaacttttcagtaattggtcagtatgtggattatcttgtgaaagaacagggagtgaagaacatttttgtgaatggcacaacaggagaaggcctgtccctgagcgtctcagagcgtcgccaggttgcagaggagtgggtgacaaaagggaaggacaagctggatcaggtgataattcacgtaggagcactgagcttgaaggagtcacaggaactggcccaacatgcagcagaaataggagctgatggcatcgctgtcattgcaccgttcttcctcaagccatggaccaaagatatcctgattaatttcctaaaggaagtggctgctgccgcccctgccctgccattttattactatcacattcctgccttgacaggggtaaagattcgtgctgaggagttgttggatgggattctggataagatccccaccttccaagggctgaaattcagtgatacagatctcttagacttcgggcaatgtgttgatcagaatcgccagcaacagtttgctttcctttttggggtggatgagcaactgttgagtgctctggtgatgggagcaactggagcagtgggcagtacctataactacctgggaaaaaagacaaaccagatgttggaggcttttgaacaaaaggacttctctttagccctgaactatcagttttgtatccagagatttatcaactttgttgtcaaactaggttttggagtgtcacagaccaaagccatcatgactctggtctctgggattccaatgggcccaccccggcttccactgcagaaagcctccagggagtttactgatagtgctgaagctaaactgaagagcctggatttcctttctttcactgatttaaaggatggaaacttggaagctggtagctagtgcctctctatcaaatcagggtttgcaccttgagacataatctaccttaaatagtgcatttttttctcagggaattttagatgaacttgaataaactctcctagcaaatgaaatctcacaataagcattgaggtaccttttgtgagccttaaaaagtcttattttgtgaaggggcaaaaactctaggagtcacaactctcagtcattcatttcacagatttttttgtggagaaatttctgtttatatggatgaaatggaatcaagaggaaaattgtaattgattaattccatctgtctttaggagctctcattatctcggtctctggttcctaatcctattttaaagttgtctaattttaaaccactataatatgtcttcattttaataaatattcatttggaatctaggaaaactctgagctactgcatttaggcaggcactttaataccaaactgtaacatgtctcaactgtatacaactcaaaatacaccagctcatttggctgctcagtctaactctagaatggatgcttttgaattcatttcgatgtcaccacttttcgctctttaaaaacactgggtcaggtgaggacttgtttcagttcctataactaagtaaagggcggctttctcataacaaaggaaaaagtcttccccaaagatgaatttaagtctccacttttttctatacagaaaactcaaaactcaaagtttcaaagaaccaaaggactcttcctctgggcaccacaaacttccccttcctccactgagaagactgtctctcccgcaggaccctgaattattgaaatcgaaggctgacttcctttctgcagtgagcccaggggctaatgttattatcctgtcacacttgcaactagtgacttttgtttagtgatagaagatttggggaggacccaaaggactcagaactttctctccatacctccttttactcttttctttctgtgtaatgtatcaacaactgtttaatctcccttctaacaaaccttgatataagctttctgatatcaaagtatattgacagttaacccttactgattttaaacttgactatccagtctgttaattacctaagattttgttttcatttcatctctaattgttttgatcattggcagagaaagagtatttgaaattcatatcagttttgctccttattttaatctctttgaattaaaaataaaactttttcaaaatggaaatttgaaattataagtagacttcaattatctttgctaatcctctctttaattagtcagctagttaaaagttgttatattcatatatcctcaaccctctttttgcctttgtagcttttaatttcctgaaagaagaaaatgagttgttcgtttttggttctgaggatgtgatatccgtacttactgatactaaagccaaatttaaattctaaaattaattcttgggtatccaataaacaaagaactatttttcta

SEQ ID NO: 604 - DNA, 3015 bp, Homo sapiens
agtttagcgtaaaccgggaagcggatcgcgtggagtgaaagtcaccgcagcggagatggacaaaccatgtgggtgccctccaggtgtgtgcgaccatgaaatgggagactagcaggacccacgttggccaaccgtggacctggtccctccagtaggagtcgtgagccagctgaatttgaatgcaaagatggagcaagggccgactggagtcacactgacatccacccccataacatggggacagatcaagaaaacaaagcaggaagctgagaaaatgctggagcatccatgtgcttggccatgttagcagtagtgtcctgtgaggattgatttccaaaaactcctgttacatgaggaagacaccaagaagagcaaagaaaaggagccagggtggctcttcctcagctatctcttccaaatgcatgacaaggaagttctcatcaagaaggcaaggcaatacagaagtgttccacacagggacattgcaaagacaagcaagtcatcacactggagatttttccttccaggaaattgagaaagattttcaggactttgagtttcagtggcaagaagatgaaagaaatggccatgaagcactcatgacagagataaaaaagttgacaggtaatacagactgatatgatcaaaggcatgctggaaacaaacctattaaagatcagcttggatcaagctttcattcacatctgcctgaactgcatatattgcagagcaaagggaaaattgatagtcaagatgagaagtctgtcaatgatgcttcctcagtttcagcatcccaaagaatttcttgtattcctaaaacccatatttctaataagtatgggaataatttcctccaggaagcacacatgagagaaaaatctttccaatgtaatgagagtggcaaagcctttaattgtagctcactgttaaaaaaatgtcagataatccatttaggagagaaaaaatataaatgtgatatatgtggcaaggtctttaatcagaagcgataccttgcataccatcatagatgtcacactggtgagaaaccttacaagtgtaatcagtgtggcaagaccttcagttacaagtcatcccttgtaattcacaaggcaattcatactggagagaaacctcacaagtgtaatgaatgtggcaaggtttttaatcaaaaagcatatcttgcaagtcatcatagacttcatactggagagaaaccttacaaatgtgaagaatgtgacaaagtttttagtcgctaatcacaccttgaaagacataggagaattcatactggagagaaaccgtacaaatgtaaggtttgtgacaaggctttcagacgtgattcacacctggcacaacatattgtaattcacactggagagaaaccttacaagtgtaatgagtgtggcaagacctttgttcaaaattcatctcttgtaatgcataaggtcattcatactggagagaaatgttacaagtgtaatgaatgtggcaaggtttttaatcacaaatcaaaccttgcatgtcatcatagacttcatactggagagaaaccttacaagtgtaatgaatgtggcaaggtttttaattgaaaatcaaaccttgaacatcatcatagagttcatatcggagaaaaaccttacaaatgtgaagaatgtgacaaagttttcaatttcaattcacgccttgaaatacataggagagttcatactggagagaaaccatagaaatgtaaggtttgtgacaaggcattcgggtgtgattcacacctggcacaacatactagaattcacactggagagaaaccgtgcaagtgtgatgagtgtgacagagccttcagtggtcagtcaacacttattcaccatcaagcaatccatgtcatagggaaactttactaatgtaatgattgtcacaaagtcctcagtaatgctacaaccattgcaaattattggagaatgcataatgaagtgagaacttacaagtgttataaatgtggcaaatttttcagacttcgttcataccttgcagtttatcagcgaactcatactggagagaaaccttacaaatgtgatgattgtggcaaggtcttcagtcaagcttcatcttatgcaaaacacaggtgaattcatacaagaaagaaacctcacaagggtgatgattgtgtcaaagcctttatttcaggttcatgcctcattacacatcagagaatccatactagacagagatcttacaaaagtcatatgtgtggcaagatctttagtctgaggtcactccttgcaggacatcaggaaattcatttttgaggtaataatttcaaatgcaatgagtatagcaaaccatcaagcacaattgatgttagattcaaatcagcattgagttcagtttgagttgacttaacattgagttcaagtatttgttgagattaaagtgtttatgttaagaggattaggccaggtgcggtggctcacacctgtaatcccagcactttgggaggccaagacaggtagatcacttgagatcaggagtttgagagcagcctggccaacagaggtgagcacctttcccagtctgttttttgtttcttcaacaaaaactgatagagatttttatgggtattgtgttgaatcaaaatcacattgggttatgtaatcatttaacagtattaatttttccaaaacatcaatatgggttatatctttatatatgtttttaatcattttgatcaatgtttgtagatttcaatgtatgaatttctcacttctttccatttattcctatttcttactttaagttctctagcaaatggaagtgtttttaaattttcatttaaaattgtttattgttaatgtatgaaaattcaacgaatttttggtgctgatattgtattgtgcaaatctactgatgtgtttattagtcacagtagtattttggttgactctttgtgattttctacacagaagatcatgtcatctacaaaaaatataattttactttttctgaaaaaaaaaaaaaaaaaaa

SEQ ID NO: 605 - DNA, 802 bp, Homo sapiens
accaccatgaatctacttctgatccttacctttgttgcagctgctgttgctgccccctttgatgatgatgacaagatcgttgggggctacatctgtgaggagaattctgtcccctaccaggtgtccttgaattctggctaccacttctgcggtggctccctcatcagcgaacagtgggtggtgtcagcaggtcactgctacaagtcccgcatccaggtgagactgggagagcacaacatcgaagtcctggaggggaatgaacagttcatcaatgcagccaagatcatccgccaccccaaatacaacagccggactctggacaatgacatcctgctgatcaagctctcctcacctgccgtcatcaattcccgcgtgtccgccatctctctgcccactgcccctccagctgctggcaccgagtccctcatctccggctggggcaacactctgagttctggtgccgactacccagacgagctgcagtgcctggatgctcctgtgctgagccaggctgagtgtgaagcctcctaccctggaaagattaccaacaacatgttctgtgtgggcttcctcgagggaggcaaggattcctgccagggtgattctggtggccctgtggtctccaatggagagctccaaggaattgtctcctggggctatggctgtgcccagaagaacaggcctggagtctacaccaaggtctacaactatgtggactggattaaggacaccatagctgccaacagctaaagcccctggtccctctgcagtctctataccaataaagtgaccctgctctcac

SEQ ID NO: 606 - DNA, 4841 bp, Homo sapiens
agcacatcgctgcgggctcacaaagcggccagacgctcggcggcggcgtgtggcaggagcgcaggggcgcgagccggcgatcagccttcccggcgaccgtgccgcgggagctcgagcaactcggactaggggacccgggccggcccccaagatgccggcgatcgcggtgttggcggcggccgccgcggcgtggtgcttcctccaagtcgagagccggcacctggacgcgctcgccggaggcgcgggccccaaccacggcaatttcctagacaatgaccagtggctgagcaccgtctcccagtacgaccgggacaagtactggaaccgctttcgagacgatgattatttcagaaactggaatcccaacaagccctttgaccaagccctggacccatccaaggacccctgcctgaaggtaaaatgcagccctcacaaagtgtgtgtgacccaggactaccagaccgccctgtgtgtcagccgcaagcacctgctccccaggcaaaagaaggggaacgtggcccagaaacactgggttggaccttcgaatttggtcaagtgcaagccctgtcccgtggcacagtcagccatggtctgcggctcagatggccactcctacacatccaagtgcaaattggagttccatgcttgttctactggcaaaagcctcgccaccctctgtgatgggccctgtccctgtctcccagagcctgagccaccaaagcacaaggcagaaaggagtgcctgcacagacaaggagttgcggaaccttgcctcccggctgaaggattggtttggagctctccacgaggatgcgaacagagtcatcaagcccaccagctccaacacagcccaaggcaggtttgacactagcatcctgcccatctgcaaggactccctgggctggatgttcaacaagttggacatgaactatgacctcctgcttgacccttcagagatcaatgccatctacctggataagtacgagccctgtatcaagcctcttttcaactcgtgtgactccttcaaggatggcaagctttctaacaatgagtggtgctactgcttccagaagcctggaggtctcccttgccagaatgaaatgaacagaattcagaagctgagtaaggggaaaagcctgttgggggccttcatacctcggtgtaatgaggagggctattacaaagccacacagtgccacggcagcacggggcagtgctggtgtgtggacaaatatgggaatgagttggctggctccaggaaacagggtgctgtgagctgtgaagaggagcaggaaacctcaggggattttggcagtggtgggtccgtggtcctgctggatgacctagaatatgaacgggagctgggaccaaaggacaaagaggggaagctgagggtgcacacccgagccgtgacagaggatgatgaggatgaggatgatgacaaagaggatgaggtcgggtacatatggtagtgcccacaagaaagaggacacaagttttgcacaaaattgcaagtcacttcctattcctgcatttgtatctaagactccaaggcaccaaggtctcttctccattgttgctctctatacccgacctaaggtttggaagacaactgcttgttcccagaggattctgattttgcatatgtttgtatgggagaaagggtgttgtgttttttttttgttgttgtttattttttggatagggaagtcattggcttaattagagcctccttcctttctgtgagatttttccaacaagcatgtgatttacgtggaattctgacagtgcagggagccccaaccctcttaaatgtcaaagaccctttttgattacccacactggtggttattacagcatggttcccagccttacagtgtctaagtgcttctcttgtgtcctgtagatgttgtgaaaaagaaaaaaacaaaaaatacaccacactgtactttttccccctgcccccgttactgccggtgattattattaaaaattagtttttttcacatcattatatctggcttcctataaacaacagccttaattcagtcaagactccctttggggaattcattttattaaaaattggtgtctggatacttccctgtacatgcataaatatgcatgcatgtacagaaagactgtatgtgtgtgccttgcacacacacccatacctctcagaaaaagtgtttgggtatcttaaaaactcgaaaaacaatgataaatttctcagcttgtccagacctggaacaaaatttctggaataagaaatttgtattaaagtccttttttgcactaacagttggctcttgtagcctgcaggctgaggaagtctcttctctgtgcatcagcagagttactgaaagcctctgattgagaaaaaacctccgtctgcctaaatcacttttctcgcagaagccatgcgactcccacacgacacgggcagcttcacaagccatctctttcatttctgcttgaagccccttggctgcagcaatcctgtctgccataggtttcttccttccttacctactcaagggctttttctaaggcatgcacacatatctcctgttctctgagagtaccatggtgttccttaaaagaagaaaatttctaattctgaactcaatgttttgcttttactccctttctactgacaaatcatgataagggcacaaaagctgtacagatttttttttttaaccactcaatcccaaatggaggcctacaaagaacatcgtaataacacatggaagcaaaccctgggtttttaagagcaaattctgtccccccctcactcccccaagtgacaagatactaatgaagaaagttcttcaccatagtgtttgttttaactaaactcattggagtctagttccaaatttggtagggtcatcatctctacattccttaggatttctctccctatcaagctggcccagatacaagtaccaaacagtagtctctgaagttcccccatttccttcagtaccagtctataagctactgtccgccactgattttcatttatcagggtgtcctaatcagaatcagccacccaagcaagcctctctggcccacatatctatctcttgccttcccccatgaacttcagcctgtccacacaaaagccacataaactcaagcaagaaatatgttcagccaaaacatgattatagtggcagctgaccaatcccccatcccaaattgaccatttagatgtaccaactcaccttaaattagcatgttccaatccagtcggcattgcctgaatacagtagcatcatacctatagttggtcttagataagaaatgaactacttgatatagcaaagtcctttggcttcgtaaataaccctgaggttttgtacttactttccccataggaagacagaccataggcaaactctgttttgggatctcaactccatcacctttgtttcaatattttttttctctcttgaacaaaactgagataatttagaaaacaggtgcttaattgcaataaaattactatgaagtatattaaaaatcacgacattgtaaaatctcactttagatcatcaaagaaaaccattgttactatctcctttgagcttaggaaaatgtacaagagaacaaattaaaattgaaaaattgatttcacttagaaaaacttctaggaacagggtgaaccactgattttaatttgcctaattatcttatgacaagtatcaaattaagatgacacttaaagatccttagcattaacttaatgatggagaagagtgctcaatagacagttcccagtaaggtaatgagatgccattttcagagacattctaagaagatattttgattcattaaaacattaaataaaaagccctcctcagattggaacccccaaatcgatggagccacattaataatacttttcatgcctcactttgacatgacagcattcgatttttttaaagatctttaatactttccatgagtactaaagattgtaatgagttaccttatccttagaagtagaatgtttgctttcttcttcttggaaatagtcctccaaaaagtccacttgtaccagtgacaagaagtcacttgtatagtgaccaagtacacataaaatactgattataaaaatattgtaataaaccacttcctcatttgatacaggtattaagctgaatcctcactaattcacttttgaaaagttcttaatgaacagttttattcttattccatgaacagctcttttaatacaatttccttggtatccaacttaaatcccagaattttgttccaccatggttagttatttgccatatgaatgtattcttgtttctaccaatattctaggcatgagaataccttaatactgagttggagattttgtatctgtttctcctcctttacgcccattttcctacccacagcagcaaatgacaacgtgtctgtccaggtctgtccccctgctcatcccaggatgccactcacatttttttcttcttgttaccttgaccacgctgtacagtaacatccaagagcccattctacagtgggtggttttggtctttttataactttttctcaaagtcactgatgtttgttcctgttaaatgtatagcattgtaatgagagcccatcaaatcctgagtgtcagtttgttgtccctattgtagatgaaatagtgatgtagcaaaaacctagtaaattctgaatgcttttccacgtagacttatctggaatgtgaacacaactctttggttaatagtaaatgcttaactgtagtcctgagtaggtgcatttctgtctgtctcaataaattttactttgtctgcaaaaaaaaaaaaaaaa

SEQ ID NO: 607 - DNA, 7449 bp, Homo sapiens
ctgtctacggcagctattccagaggcaacaactgcttccctctgttctcatctccccattggtggctggcgacccgaatttgggaatggggagattgcccacctgttatctttgagcagactaatctcttgtaagcagaagtgccattcggagtctccagagccctgtggcttggggctgggaatgtccccctgacttcaggctttcctaagtgtattgcttttctctgagaatggtctaggtttttaattttttaattgtaagaatctgtaatacagcatttttatttcggtcttattcgttgtgctcaaaggcaggaaacaactattaatttgccttctcgaatcttaatagttataagattcattctctttcattgctctgctaggcataaaacacacttcgaacatgggtaactcattcgactgtggagttcttttaattcttatgaaagatttcaaatcctctagaagccaaaatgggacacagtaaacagattcgaattttacttctgaacgaaatggagaaactggaaaagaccctcttcagacttgaacaagggtatgagctacagttccgattaggcccaactttacagggaaaagcagttaccgtgtatacaaattacccatttcctggagaaacatttaatagagaaaaattccgttctctggattgggaaaatccaacagaaagagaagatgattctgataaatactgtaaacttaatctgcaacaatctggttcatttcagtattatttccttcaaggaaatgagaaaagtggtggaggttacatagttgtggaccccattttacgtgttggtgctgataatcatgtgctacccttggactgtgttactcttcagacatttttagctaagtgtttgggaccttttgatgaatgggaaagcagacttagggttgcaaaagaatcaggctacaacatgattcattttaccccattgcagactcttggactatctaggtcatgctactcccttgccaatcagttagaattaaatcctgacttttcaagacctaatagaaagtatacctggaatgatgttggacagctagtggaaaaattaaaaaaggaatggaatgttatttgtattactgatgttgtctacaatcatactgctgctaatagtaaatggatccaggaacatccagaatgtgcctataatcttgtgaattctccacacttaaaacctgcctgggtcttagacagagcactttggcgtttctcctgtgatgttgcagaagggaaatacaaagaaaagggaatacctgctttgattgaaaatgatcaccatatgaattccatccgaaaaataatttgggaggatatttttccaaagcttaaactctgggaatttttccaagtagatgtcaacaaagcggttgagcaatttagaagacttcttacacaagaaaataggcgagtaaccaagtctgatccaaaccaacaccttacgattattcaagatcctgaatacagacggtttggctgtactgtagatatgaacattgcactaacgactttcataccacatgacaaggggccagcagcaattgaagaatgctgtaattggtttcataaaagaatggaggaattaaattcagagaagcatcgactcattaactatcatcaggaacaggcagttaattgccttttgggaaatgtgttttatgaacgactggctggccatggtccaaaactaggacctgtcactagaaagcatcctttagttaccaggtattttactttcccatttgaagagatagacttctccatggaagaatctatgattcatctgccaaataaagcttgttttctgatggcacacaatggatgggtaatgggagatgatcctcttcgaaactttgctgaaccgggttcagaagtttacctaaggagagaacttatttgctggggagacagtgttaaattacgctatgggaataaaccagaggactgtccttatctctgggcacacatgaaaaaatacactgaaataactgcaacttatttccagggagtacgtcttgataactgccactcaacacctcttcacgtagctgagtacatgttggatgctgctaggaatttgcaacccaatttatatgtagtagctgaactgttcacaggaagtgaagatctggacaatgtctttgttactagactgggcattagttccttaataagagaggcaatgagtgcatataatagtcatgaagagggcagattagtttaccgatatggaggagaacctgttggatcctttgttcagccctgtttgaggcctttaatgccagctattgcacatgccctgtttatggatattacgcatgataatgagtgtcctattgtgcatagatcagcgtatgatgctcttccaagtactacaattgtttctatggcatgttgtgctagtggaagtacaagaggctatgatgaattagtgcctcatcagatttcagtggtttctgaagaacggttttacactaagtggaatcctgaagcattgccttcaaacacaggtgaagttaatttccaaagcggcattattgcagccaggtgtgctatcagtaaacttcatcaggagcttggagccaagggttttattcaggtgtatgtggatcaagttgatgaagacatagtggcagtaacaagacactcacctagcatccatcagtctgttgtggctgtatctagaactgctttcaggaatcccaagacttcattttacagcaaggaagtgcctcaaatgtgcatccctggcaaaattgaagaagtagttcttgaagctagaactattgagagaaacacgaaaccttataggaaggatgagaattcaatcaatggaacaccagatatcacagtagaaattagagaacatattcagcttaatgaaagtaaaattgttaaacaagctggagttgccacaaaagggcccaatgaatatattcaagaaatagaatttgaaaacttgtctccaggaagtgttattatattcagagttagtcttgatccacatgcacaagtcgctgttggaattcttcgaaatcatctgacacaattcagtcctcactttaaatctggcagcctagctgttgacaatgcagatcctatattaaaaattccttttgcttctcttgcctccagattaactttggctgagctaaatcagatcctttaccgatgtgaatcagaagaaaaggaagatggtggagggtgctatgacataccaaactggtcagcccttaaatatgcaggtcttcaaggtttaatgtctgtattggcagaaataagaccaaagaatgacttggggcatcctttttgtaataatttgagatctggagattggatgattgactatgtcagtaaccggcttatttcacgatcaggaactattgctgaagttggtaaatggttgcaggctatgttcttctacctgaagcagatcccacgttaccttatcccatgttactttgatgctatattaattggtgcatataccactcttctggatacagcatggaagcagatgtcaagctttgttcagaatggttcaacctttgtgaaacacctttcattgggttcagttcaactgtgtggagtaggaaaattcccttccctgccaattctttcacctgccctaatggatgtaccttataggttaaatgagatcacaaaagaaaaggagcaatgttgtgtttctctagctgcaggcttacctcatttttcttctggtattttccgctgctggggaagggatacttttattgcacttagaggtatactgctgattactggacgctatgtagaagccaggaatattattttagcatttgcgggtaccctgaggcatggtctcattcctaatctactgggtgaaggaatttatgccagatacaattgtcgggatgctgtgtggtggtggctgcagtgtatccaggattactgtaaaatggttccaaatggtctagacattctcaagtgcccagtttccagaatgtatcctacagatgattctgctcctttgcctgctggcacactggatcagccattgtttgaagtcatacaggaagcaatgcaaaaacacatgcagggcatacagttccgagaaaggaatgctggtccccagatagatcgaaacatgaaggacgaaggttttaatataactgcaggagttgatgaagaaacaggatttgtttatggaggaaatcgtttcaattgtggcacatggatggataaaatgggagaaagtgacagagctagaaacagaggaatcccagccacaccaagagatgggtctgctgtggaaattgtgggcctgagtaaatctgctgttcgctggttgctggaattatccaaaaaaaatattttcccttatcatgaagtcacagtaaaaagacatggaaaggctataaaggtctcatatgatgagtggaacagaaaaatacaagacaactttgaaaagctatttcatgtttccgaagacccttcagatttaaatgaaaagcatccaaatctggttcacaaacgtggcatatacaaagatagttatggagcttcaagtccttggtgtgactatcagctcaggcctaattttaccatagcaatggttgtggcccctgagctctttactacagaaaaagcatggaaagctttggagattgcagaaaaaaaattgcttggtccccttggcatgaaaactttagatccagatgatatggtttactgtggaatttatgacaatgcattagacaatgacaactacaatcttgctaaaggtttcaattatcaccaaggacctgagtggctgtggcctattgggtattttcttcgtgcaaaattatatttttccagattgatgggcccggagactactgcaaagactatagttttggttaaaaatgttctttcccgacattatgttcatcttgagagatccccttggaaaggacttccagaactgaccaatgagaatgcccagtactgtcctttcagctgtgaaacacaagcctggtcaattgctactattcttgagacactttatgatttatagtttattacagatattaagtatgcaattacttgtattataggatgcaaggtcatcatatgtaaatgccttatatgcacaggctcaagttgttttaaaaatctcatttattataatattgatgctcaattaggtaagattgtaaaagcattgattttttttaatgtacagaggtagatttcaatttgaatcagaaagaaatatcattaccaatgaaatgtgtttgagttcagtaagaattattcaaatgcctagaaatccatagtttggaaaagaaaaatcatgtcatcttctatttgtacagaaatgaaaataaaatatgaaaataatgaaagaaatgaaaagatagcttttaattgtggtatatataatcttcagtaacaatacatactgaatacgctgtggttcattaatattaacaccacgtactatagtattcttaatacagtgctcactgcatttaataaatatttaataaatgatgaatgatagaagtttccatctacaatatatgttcctaaatggagcacagatgttcaaactatgctttcattttttcactgatatattaatttttgtgtaatgaatgccaacagtatattttatatgatttacttatgtgaggaaacatgcaaagcattaggaaatttatttcctaaaaacagttttgtaaaattagtattgagttctattgagtattataagatagcttacattttcaaaatggaaattgtcggtcatatttctagaactttaaagaaaaaagaatgttatattagttttctaaaactcaactatctttagtcatgttcaaaaatctattgctagatcatagtagatactggttttctattaactcaaaacctacattgacaagtttaacattgagaagaatcttaacaaaaatatggatatgaattcagtagatatcttaaattcaataaaatcactggaagtttttcatgataacttattttaagatgccttaaaaatcttaaagtcacaaaaggaaaaaggtttttaacatttacatgagttaacattttttcatagaacttatttcctagatagaattttttactgttttttactgttttcttaagaaaacagttaaatcattatgcattcagttggaagaaagtagtggcaagaattctttcattgctatataatattcagtggctcatttatacctaataaaataatggtattttaaaataatgctactttcaaagtagcatttttttagttagtttacaggttacatacccaaaaccttaactatgactaagaaattaaagaagaaaaccagcaaactaaaacttctgggcagcaaaaatatataaatgcttcagatgtcaaatacccatgcttgaaagctcgtgtaatttactttaagattatctgcctgctcttcttcaaagctgaccttgctttagaaatagttttaactagcttagttttctggtttccaaaactaaaatagattaaatcctacaaatttaaggacagttgtgacagtaatctgaccactatctataaatacattggacattggtttccaaatctccctttcttcttcagttccttccttgttcaatatatacccttctctaaactgtgcgggtaaaaggaatgactgtccttgagagaaccattagtttatcaaaggtttatgtagttttgttgctgtaccctaactttgatattcagggaggtaggaaaggtaacagaaaaccagcatatttaatcaaagcaagaagtaatcgctgacagttaaatgtgaccaaaaaaattaaaagttcacaatttttttaatgtagccatttggggttatctctagtaaggcagatacccacgttggtaaatttttaggatattgtgttgcactagaaaactaagtggttcatatttctaatgaggaagattaatgaaagaacattgttatattctgcgtggtatattttaaagtttaagaaggcatgttaaacattatttcctctatggtagttaaaatacagaattagatttttaacaggtgtcatttgactaaacgtttcggtagaatgcttcatacttgagtgatgctggataaggtattgtatttcaacaatggactatgccttggtttttcactaatcaaaatcaaaattactctttaacatgataaatgaatttaccagtttagtatgctgtggtattttaataagttttcaaagataattgggaaaacatgagactggtcatattgatgaatattgtaacatgtgaattgtgatccatttctgatatgtcttgaactactgtgtctagtgggcaaatgtcattgttacctctgtgtgttaagaaaataaaaatattttctaaaggtctgt

SEQ ID NO: 608 - DNA, 508 bp, Homo sapiens
atccctgactcggggtcgcctttggagcagagaggaggcaatggccaccatggagaacaaggtgatctgcgccctggtcctggtgtccatgctggccctcggcaccctggccgaggcccagacagagacgtgtacagtggccccccgtgaaagacagaattgtggttttcctggtgtcacgccctcccagtgtgcaaataagggctgctgtttcgacgacaccgttcgtggggtcccctggtgcttctatcctaataccatcgacgtccctccagaagaggagtgtgaattttagacacttctgcagggatctgcctgcatcctgacgcggtgccgtccccagcacggtgattagtcccagagctcggctgccacctccaccggacacctcagacacgcttctgcagctgtgcctcggctcacaacacagattgactgctctgactttgactactcaaaattggcctaaaaattaaaagagatcgatattaaaaaaaaaaaaaaaaaa

SEQ ID NO: 609 - DNA, 3920 bp, Homo sapiens
ggcttagggactcaggctgcccagacctgaagcggtgtgcggccatggaccgcggagctgccgcagcccagggcactgccccgcctcaggatggagagcagcccgctgagtctccagagcctccgccgccttggccgccgccgccaccaccaccggctccgccgccggctccgccgctgctctccgaggcttcgccagaacccataccagagccctgtccagagcttgctccaggtccctgtccagaggcgacctcagaatcagccacagaactgtacacagaaccgaccccagaaccagccacagagccggcctcagaaccggccccagaacctgccacagagccggccccagaacctgccacagagccggccccagaaccggccccagaacctgccacagagtctgccccagagccgactccagaacctgccctagagtcggtcccagagccggccccagagctgactccagaagttgccccagagctggccccagagccgaccccagaacctgtgacagagctggccccagagttctgccctgaggcggctccagagttccgtccaagtccagcaccatgtctattgcaatgtccggtggacactcgagagagaggtctaaagacctcgccatcgccatcgccatcgccatcgcccagaacgccaatgtcgtggtccagaataaagaaaatattgaaggaaggacctatgctgaagaactgtaactctttcaagagatggaagcttagatattttctggttcaaggacagaagctctactttgcacaccatcccgcgtttgcacactttgaaacgattgatctgtctcaagccactgtggcagaaagcagctgtagaaacctttgccacagtttttgtgttattacaccacaacgaaaaatcactctggctgcacccaaccggaaagacatggaagaatggattaacatcataaaaaccatccaacagggagaaatttataagatacctgcagcagaaaacaacccttttcttgttggaatgcattgttggtactccagttacagccaccggacccagcactgcaatgtttgtcgagagagcattcctgccttatctagagatgccatcatctgtgaagtgtgcaaagtgaaatctcacagattgtgtgctttgagagcaagcaaagactgcaagtggaatacattgtctatcactgatgacctccttctgcctgcagatgaagtaaacatgccccatcaatgggtagaaggaaacatgcctgtcagctctcagtgtgcagtgtgtcatgagagctgtggcagttatcaaagacttcaagacttccgctgcctgtggtgtaattctacggtgcatgatgactgtaggagacggttttccaaggaatgttgcttcagaagccatcgctcatcagtcattcctcccactgctctaagcgaccccaaaggcgatggccaattagtagtatcttcagacttctggaatcttgattggtcatcagcctgttcatgtcccttgctcatcttcatcaactccaaaagtggcgatcatcaggggatcgtcttcctccgaaaattcaagcaataccttaacccatctcaagtgttcgacttattgaagggtggacctgaagcagggctgtctatgttcaagaactttgctcgctttcgcattctggtttgtggtggagatggcagcgtgagctgggtcttatctctgattgatgcctttggattacatgaaaagtgtcagttggcagtcatcccacttggaaccggcaatgatctggctcgtgttctgggctggggtgcattctggaacaaaagcaagtcacctctggacatcctcaacagagtggagcaggctagtgtgaggatcctagacagatggagtgtgatgattcgtgagactcccagacaaaccccgctgctaaaaggacaggttgaaatggatgtaccacgatttgaggctgctgccatccaacacttagaatctgcagccaccgagttgaacaaaatcctgaaggccaagtaccccacagagatgatcatcgcaaccagattcttgtgttcagctgtggaagattttgtggttgatattgtaaaggcctggggtcagataaaacagaacaacactgcaatagtgtctgtgattttgaaaagtgacttaatgtatgataggctcagtgtcctgatcgatgtcctggctgaggaggcagcagctacttctgctgaaaaaagtgctacagaatatgcagacagcagcaaggcagataggaagcccttcattcctcaaatagaccacatagccaagtgcaagttggagctggctacaaaggcccagagtctccagaaatccttgaaactcatcatatttcaagttgaacaagctctggatgaggaaagcagacagacaatatctgttaagaactttagttcaactttcttcctggaagatgacccagaagatattaaccagacaagcccacgacgccgttctcgtcgtggcactttgtcttctatatcttctctcaaaagtgaggacctggacaaccttaacttggatcacttacattttacacctgaatctatacgcttcaaagaaaaatgtgtcatgaacaactacttcggaattggactggatgctaaaatttctctggacttcaacaccagaagagatgaacacccagggcaatacaatagccgccttaagaacaagatgtggtatggccttctgggaaccaaagaacttttgcagcgctcttacaggaaactggaagaacgagtgcatttggagtgtgatggagaaaccatctccttgccaaacctgcaaggcattgtagtgctcaacattaccagctatgctggaggtatcaacttctggggaagcaacacagcaaccacggaatatgaggctcctgcaatcgatgatgggaaactggaggtggtggcaatctttggttctgtgcagatggcaatgtcccgtatcatcaacctgcatcatcatcgcattgcccagtgccatgaggtgatgataaccattgatggtgaagaaggtatcccagtgcaggtggatggggaggcctggattcagagaccaggccttatcaaaattagatacaagaacgctgcccagatgctgacaagagatcgggactttgagaactcaatgaaaatgtgggaatacaagcatactgaaattcaagctgcccctcaaccccagctggacttccaggactctcaagagagcctctctgacgaggagtatgcccagatgcagcacttagctcggcttgcagaaaacctcatcagcaaacttaatgacctgagcaagatccaccagcatgtgtctgtcctcatgggttctgtgaatgccagcgctaacatcctgaatgatatattttacggccaagacagtggcaatgagatgggtgcagcttcctgtattcccattgaaactctaagcagaaatgatgccgtagatgttacatttagtcttaaaggtctctacgatgacaccacagctttcctggatgaaaagctgctgagaagtgctgaggatgagactgcactacaaagcgccctggatgccatgaataaggagttcaaaaagctatctgagattgactggatgaatccaatctttgttccagaggaaaaatcttcggacactgacagtagaagcctcaggctgaaaattaagttccccaaattgggaaagaaaaaggtagaagaggaacgcaagcctaaatcaggccagagtgtccagagttttattggcaatttatggcaccgcagacatcgtgaagatgaagcagagggtgatgatcctctaacaccatcgagatctcaactgtagcccttgaaagctggaagaactcacaacattgagaattctactaaaaaaactctcaaaacc

SEQ ID NO: 610 - DNA, 5253 bp, Homo sapiens
ctttggaggttcagagctgcaagaagatggggactggtgtcggggcgccagcgcctgacccgctggggttgcggccggggtggagagtgctgctggccgccagttgttccggagacggtgcaaacggacggggaaagtgtcggggtctggctcgcaaaatttatctccgcatctcttcccacaacacttgcaccctctgccccccaaaatctttctggagacacagaaaagggtcaaccgagtcgccctactaagagcaaggatgcccacgtctgtggccggtgctgtgccgagttctttgaattatcagatcttctgctccacaagaagaactgtactaaaaatcaattagttttaatcgtaaatgaaaatccagcctccccacccgaaaccttctcccccagcccccctcctgataatcctgatgaacaaatgaatgacacagttaacaaaacagatcaagtggactgcagcgacctttcagaacacaacggacttgacagggaagagtccatggaggtggaggccccggttgctaacaaaagcggcagcggcacttccagcggcagccacagcagtaccgccccaagcagcagcagcagcagcagcagcagcagcggcggcggcggcagctcctccacaggtacctcagcgatcacaacctctctacctcaactcggggacctgacaacactgggcaacttctccgtaatcaacagcaacgtcatcatcgagaacctccagagcaccaaggtggcggtggcccagttctcccaggaagcgaggtgcggcggggcctctgggggcaagctggccgtcccagccctcatggaacaactcctagctctgcagcagcagcagatccaccagctgcaattgatcgaacagattcgtcaccaaatattgctgttggcttctcagaatgcagacttgccaacatcttctagtccttctcaaggtactttacgaacatctgccaaccccttgtccacgctaagttcccatttatctcagcagctggcagcagcagctggattggcacagagcctcgccagccaatctgccagcattagtggtgtgaaacagctacccccaatccagctacctcagagcagttctggcaacaccatcattccatccaacagcggctcttctcccaatatgaacatattggcagcggcagttaccaccccgtcctctgaaaaagtggcttcaagtgctggggcctcccatgtcagcaacccagcggtctcatcatcgtcctcaccagcttttgcaataagcagtttattaagtcctgcgtctaatccacttctacctcagcaagcctccgctaactcggttttccccagccctttgcccaacatcggaacaactgcagaggatttaaactccttgtctgccttggcccagcaaagaaaaagcaagccaccaaatgtcactgcctttgaagcgaaaagtacttccgatgaggcattcttcaaacacaagtgcaggttctgcgcgaaggtctttgggagtgacagtgccttgcagatccacttgcgttcccataccggagagaggccattcaagtgcaacatctgcgggaacaggttctccaccaaggggaatctgaaagtccactttcagcgccacaaagagaaataccctcatatccagatgaacccctatcctgtgcctgagcatttggacaatatccccacgagtactggcatcccatatggcatgtccatccctccagagaagccagtcaccagctggctagacaccaaaccagtcctgcctactctgaccacttcagtcggcctgccgttgcccccaaccctcccaagcctcatacccttcatcaagacggaagagccagcccccatccccatcagccattctgccaccagccccccaggctcagtcaaaagtgactccgggggccctgagtcagccacaagaaacctaggtgggctcccagaggaagccgaagggtccactctgccaccctctggtggcaaaagcgaagagagtggcatggtcaccaactcagtcccgacggcgagcagtagcgtcctgagctccccagcggcagactgcggccccgcgggcagtgccaccaccttcaccaaccctttgttgccgctcatgtccgagcagttcaaggccaagtttccttttgggggactcctggactcagctcaggcatcagagacgtccaagcttcagcaactggtagaaaacattgacaagaaggccactgaccccaatgagtgcatcatctgccaccgggttctcagctgccagagcgccttgaaaatgcactacaggacacacactggggagaggccctttaagtgtaagatctgtggccgggctttcaccacgaaagggaatcttaaaacccactacagtgtccatcgtgctatgcccccgctcagagtccagcattcctgccccatctgccagaagaagttcacgaacgctgtggtcctgcagcagcacatccgaatgcatatgggaggccagatccccaacaccccagtccccgacagctactctgagtccatggagtctgacacaggttcctttgatgagaaaaattttgatgacctagacaacttctctgatgaaaacatggaagactgtcctgagggcagcatccctgatacacctaagtctgcagacgcctcccaagacagcttatcctcttcgcctttgcccctcgagatgtcgagcatcgctgctttggaaaatcagatgaagatgatcaatgctggcctggcagagcagctacaggccagcctgaagtcagtggagaatgggtccatcgagggggatgtcctgaccaatgattcatcctcagtgggtggtgacatggaaagccaaagtgctggcagcccagccatctcagagtctacctcttccatgcaggctctgtccccgtccaacagcacgcaggagttccacaagtcacccagcattgaggagaaaccacagagagcggtcccaagcgagtttgccaatggtttgtctcccaccccagtgaatggtggggctttggatttgacatctagtcacgcagagaaaatcatcaaagaagattctttggggatcctcttcccttttagagaccggggtaaatttaaaaacactgcttgtgacatttgtggcaaaacatttgcttgtcagagtgccttggacattcactatagaagtcataccaaagagagaccatttatttgcacagtttgcaatcgtggcttttccacaaagggtaatttgaagcagcacatgttgacacatcagatgcgagatctgccatcccagctctttgagcccagttccaaccttggccccaatcagaactcagcggtgattcccgccaactcgttgtcatctctcatcaagacagaggtcaacggcttcgtgcatgtttctcctcaggacagtaaggacacccccaccagtcacgtcccgtctgggcctctgtcttcctctgccacatccccagttctgctccctgctctgcccaggagaactcccaagcagcactactgcaacacatgtggcaaaaccttctcctcatcgagtgccctgcagattcacgagagaactcacactggagagaaaccctttgcttgcactatttgtggaagagctttcacgactaaaggcaatcttaaggtacacatgggcactcacatgtggaatagcacccctgcacgacggggtcggcggctctctgtggatggccccatgacatttctaggaggcaatcccgtcaagttcccagaaatgttccagaaggatttggcggcaagatcaggaagtggggatccttccagcttctggaatcagtatgcagcagcgctctccaacgggctggcgatgaaggccaacgagatctccgtcattcagaacggtggcatccctccaattcctggaagcctcggcagtgggaacagctcacctgttagtgggctgacgggaaacctggagaggctccagaactcagagcccaatgctcccctggccggcctggagaaaatggcaagcagtgagaacggaaccaacttccgcttcacccgcttcgtggaggacagcaaggagatcgtcacgagttaaagcagctcgggctggagacatagcattcattcctgttcagaatgcgacctatggtggcctcctactccttgccccccaccccgccccgccccttccttctgttccccagatctatgaactacaacattatgaagacattcttttgtaccttgttcaactttagagttctaagaaagcttatttattagcgatataaccttgctttgcaaacagaatgcaagcgttaactttggtcttctgtattttggactaaatactaattgactagagtgctgtaaacttgctgtaacatttatggcaattgcaagttgccctgctaggcagttgtaatctggcattaacttattttctatatccagtttaatatgaatctggtgttgatgcaatgcctcagtgatgcattagatctctaataaagtctgtatatacatgtacactttgatcctgctggaaaattttatcagcaaacacattgtctaatctttcaaaacagatttaaggaaaggactgaaagtacagactgaacagtgtggttctttgaaaggtttggttttttaatttttattctaaaattcaacctttttttttgtcgatttaaccatttccattttgaactgctatttgtattgtgctttttacttgagtcgtcttcaatgttaataagtttctgtacagtaataagcacgcagaattctttagagaaaaagaaaacaagcgttgttttggtagttgaaactgagacgtaacattttgccttgtaggtatattcacgatagaaaatgtgtgctggaatttcacaatgctgctaagtatagcatcttgaacaaccttcagtggagaaaatgtagatgctcttgtatatacaataagaaatatcactttcattcaaatgtacatatgttccttacaagagcaaatgcttcttcttgatcaagagagcaggtatagtgtttgtttattttgtcttaggtatggaagaaaaaaattggactgttacatgcactttcttggaaagttgaaaggaaagggggggtccaatttctttaacatttaatacttactaacaacagagatactgtaattttactcaagtaatcaaatacattttttttgcaacagataaaacaaaatactgtg

SEQ ID NO: 611 - DNA, 4633 bp, Homo sapiens
gaaagcgcccggaacgctgtgcgcgcgccttcggggaggaggggctgtctgggctcggggcgcggcggcagtcagctctatgttcgcggtcttaacctctcctctggccgagtccttgcaagaagtgaattacccgaccctgcaaaacacttactattttggagtttaaagtatgtcatcatggcaaagtttcggagaaggacttgcatcattttggcactttttattctatttattttctctctgatgatgggtttaaaaatgctgagaccaaatacagctacttttggagctccttttggacttgaccttcttccagaacttcatcaacgaactattcatttggggaaaaattttgatttccaaaagagtgacagaatcaacagtgaaacaaataccaagaatttaaaaagtgttgaaatcactatgaaaccttccaaagcctctgaacttaacttggatgaactaccacctctgaacaattatctacatgtattttattacagttggtatggaaatccacaatttgatggtaaatatatacattggaatcatccagtgttagagcattgggaccctagaatagccaagaattatccacaagggagacacaaccctccagatgacattggctccagcttttatcctgaattgggaagttacagttctcgggatccttctgtcatagaaactcacatgagacaaatgcgctcagcttcaattggtgtactagccctctcttggtacccacctgatgtaaatgatgaaaatggagaacctactgataacttggtacccactattttggataaagctcataaatataacctaaaggttacttttcacatagaaccatatagcaatcgagatgatcaaaacatgtacaaaaatgtcaagtatattatagacaaatatggaaatcatccggccttttacaggtacaagacgaagactggcaatgctcttcctatgttttatgtctatgattcctatattaccaagcctgaaaaatgggccaatctgttaaccacctcagggtctcggagtattcgcaattctccttatgatggactgtttattgcccttctggtagaagaaaaacataagtatgatattcttcaaagtggttttgatggaatttacacatattttgccacaaatggctttacttatggctcatcacatcagaattgggctagcctaaaattattttgtgataaatacaacttaatatttatcccaagtgtgggcccaggatacatagataccagcatccgtccatggaacacgcaaaacactcggaaccgaatcaatgggaagtattatgaaattggtctgagtgccgcacttcagacacgccccagcttaatttctatcacctcttttaatgagtggcatgaaggaactcagattgaaaaagctgttcccaaaagaaccagtaatacagtgtacctagattaccgtcctcataaaccaggtctttacctagaactgactcgcaagtggtctgaaaaatacagtaaggaaagagcaacttatgcattagatcgccagctgcctgtttcttaatgcattgattaaagtttaatagttatcaaaatcacctaatttttaaaaatagctttcgttttgagttctggaaagaaaactgtcaaaatcagtatatactattagttatatttaaaaatatttttttaaattctttacagataatattatacttgttacccttcacaataccacatgagaaaatatctgagacaaaatgtatacaaatatattccttatggcataatttattgcatttctgactgaaatcaaaattctgatttgatggcaattgaattttcattttacaatagataaatgcttgtgctacctaaagcacttagcacacagttaaattatatttacatcctagacccaaataaataggattgtgtgtatatttgggatatctattgaagaaaaaaagaaaaccccttaaagataatgtacatgcttcatgtcatgtctttaaaataatttaatcaactttattgtcttagtatttagactctggataactctacaataatgaggaaattcttaagaataacaaaatcactgtaccttcctctcaattttgctgtgaacctgaaatggctttaaattaatactcttattttttatttaatttaattacataaattaaaccttaccatgaccaaattgtgttaggacggcctgctatctacagcacagtgtgtcatttgcagatttgtggttacctataccacgctaggtgttttgacatgtttagtgtttctgctttacagtgctgaattccatattttagaagctatgaaagtccttttatgaaaaagttactgattgcttctcagttattaggaaaacagttgtttcacaattattatgtagatatgatgcccaaatatcatttttagtatatcttgtcgatctttaagttgttactattgtgttattcatgtctttaaatcagataccaaatattttttaggaaagaaaaatgttattactgtcattaggttgtcttttaatactttaagttattttgacgaaaagtaatagagaaaatttacttagcattttagattctagagacatggaaatgaaaattattttatgtctagagtaggtcctgaagtttggctttacattaagtttagcactgtatcagaatgaagaaactaatattttacataaaaactaatactttcaattttttatatagtaatatccccattttgtaaatgttagacttttatcatacctgtaagttaaaatacttgttatcaataacttgtcatgttgtgacaaattgatcacttgtgtacgaaaaataaatctccttaaaaactaaataaaatgcactgtattcttacagttaatgtttataactatagtaaaaaattaatatatatcctattacataaatgttatttcttaggtgttccattaagaagagcaatagaataatgctaaaaaataatgcctataaatcttcagagtataaagacatccattcagaaacaaaaattagcactaaattttttataaaatagaccagatgacaaaatttattttatttttaaacagtggttttgacacaaattatgttattgaaaagcattattaatgtttaatttatttaaaattttggaatttgccatttctcagagaatgatcaggccttaggaaattaatacagtagtagtaatcattttctaggggaaaataaaagaataaatcactatactgatattttgatacaagcaagcacttacatggtaatcactatatagatccaacctgtggattttcttcttatgtccatttaactagaatatattattttaggtataatttacaaatgtcacacctaataatcttttataatataccatatttcattaaagttttgttagagaagtatctaccacagaggagtttttgtcattgtgtacgttgtgtatttgaacccaccatgacagaaagtaaattttaggaaatagttatgagattaagggaaaatctataaaaacaaggttagcatattctcaacacagataccaccactttctttttcccattatagacatggtgaatccacacagcatacttcatctctgagctttgttgtgattcctcaacacattaccctaaccagccagcagtaacagatttcagagtaagataaagcagattctgtcttcattgcaaaaagttattctcaatggaagaatggcatctgatctcataattactagtttatattaatatagtttttttctccctttttaataaaataattacagtcatccctcagtgtctgtgggggattggttccagttacccctatagataccaaaatctgcagatgctcaagtccctgatataaactggcatagtagttgcatataatctatgcacatcctcctgtatacattaagtcatctctagattatttataacacttaatacaatgtaaatgctatgtagttgttataccatactggttagtgaataattacatgaaaaaaaagagtctgtacatcttcagagtttcagtcggcaatttcttggccatggatgtagaacctacagataaggtgagccaactgcattaggaaataactctaataattctgttaattcttagagaggaaaactttcaaaatcttcctcaggtatttattacaactgcctttaccattttagttgtaacacagtttaaattgttatgataacaagtaaataagagcaaagaatgtatttcttaattcaaaactatacgtttgaattcaatatggtataacttaaagtggtataatacatacaatgcatgaatcataatggattcttttataagttattaatttttatggtttaatcagtctaattgttttgactgttatagaaaccaaatattttactgtttcttttaaggactaatattgtcaaaaactgctgttattaacttcacttgagttgtttaacttccttctgttttaagattgtaattaaaaattactattttgttatatggaatggttaatttttacctaataaaaacatagatgaaatacattgtaaaaaaaaaaaaaaaaaa

SEQ ID NO: 612 - DNA, 5190 bp, Homo sapiens
tctgggggctcggctttgccgcgctcgctgcacttgggcgagagctggaacgtggaccagagctcggatcccatcgcagctaccgcgatgagaggcgctcgcggcgcctgggattttctctgcgttctgctcctactgcttcgcgtccagacaggctcttctcaaccatctgtgagtccaggggaaccgtctccaccatccatccatccaggaaaatcagacttaatagtccgcgtgggcgacgagattaggctgttatgcactgatccgggctttgtcaaatggacttttgagatcctggatgaaacgaatgagaataagcagaatgaatggatcacggaaaaggcagaagccaccaacaccggcaaatacacgtgcaccaacaaacacggcttaagcaattccatttatgtgtttgttagagatcctgccaagcttttccttgttgaccgctccttgtatgggaaagaagacaacgacacgctggtccgctgtcctctcacagacccagaagtgaccaattattccctcaaggggtgccaggggaagcctcttcccaaggacttgaggtttattcctgaccccaaggcgggcatcatgatcaaaagtgtgaaacgcgcctaccatcggctctgtctgcattgttctgtggaccaggagggcaagtcagtgctgtcggaaaaattcatcctgaaagtgaggccagccttcaaagctgtgcctgttgtgtctgtgtccaaagcaagctatcttcttagggaaggggaagaattcacagtgacgtgcacaataaaagatgtgtctagttctgtgtactcaacgtggaaaagagaaaacagtcagactaaactacaggagaaatataatagctggcatcacggtgacttcaattatgaacgtcaggcaacgttgactatcagttcagcgagagttaatgattctggagtgttcatgtgttatgccaataatacttttggatcagcaaatgtcacaacaaccttggaagtagtagataaaggattcattaatatcttccccatgataaacactacagtatttgtaaacgatggagaaaatgtagatttgattgttgaatatgaagcattccccaaacctgaacaccagcagtggatctatatgaacagaaccttcactgataaatgggaagattatcccaagtctgagaatgaaagtaatatcagatacgtaagtgaacttcatctaacgagattaaaaggcaccgaaggaggcacttacacattcctagtgtccaattctgacgtcaatgctgccatagcatttaatgtttatgtgaatacaaaaccagaaatcctgacttacgacaggctcgtgaatggcatgctccaatgtgtggcagcaggattcccagagcccacaatagattggtatttttgtccaggaactgagcagagatgctctgcttctgtactgccagtggatgtgcagacactaaactcatctgggccaccgtttggaaagctagtggttcagagttctatagattctagtgcattcaagcacaatggcacggttgaatgtaaggcttacaacgatgtgggcaagacttctgcctattttaactttgcatttaaaggtaacaacaaagagcaaatccatccccacaccctgttcactcctttgctgattggtttcgtaatcgtagctggcatgatgtgcattattgtgatgattctgacctacaaatatttacagaaacccatgtatgaagtacagtggaaggttgttgaggagataaatggaaacaattatgtttacatagacccaacacaacttccttatgatcacaaatgggagtttcccagaaacaggctgagttttgggaaaaccctgggtgctggagctttcgggaaggttgttgaggcaactgcttatggcttaattaagtcagatgcggccatgactgtcgctgtaaagatgctcaagccgagtgcccatttgacagaacgggaagccctcatgtctgaactcaaagtcctgagttaccttggtaatcacatgaatattgtgaatctacttggagcctgcaccattggagggcccaccctggtcattacagaatattgttgctatggtgatcttttgaattttttgagaagaaaacgtgattcatttatttgttcaaagcaggaagatcatgcagaagctgcactttataagaatcttctgcattcaaaggagtcttcctgcagcgatagtactaatgagtacatggacatgaaacctggagtttcttatgttgtcccaaccaaggccgacaaaaggagatctgtgagaataggctcatacatagaaagagatgtgactcccgccatcatggaggatgacgagttggccctagacttagaagacttgctgagcttttcttaccaggtggcaaagggcatggctttcctcgcctccaagaattgtattcacagagacttggcagccagaaatatcctccttactcatggtcggatcacaaagatttgtgattttggtctagccagagacatcaagaatgattctaattatgtggttaaaggaaacgctcgactacctgtgaagtggatggcacctgaaagcattttcaactgtgtatacacgtttgaaagtgacgtctggtcctatgggatttttctttgggagctgttctctttaggaagcagcccctatcctggaatgccggtcgattctaagttctacaagatgatcaaggaaggcttccggatgctcagccctgaacacgcacctgctgaaatgtatgacataatgaagacttgctgggatgcagatcccctaaaaagaccaacattcaagcaaattgttcagctaattgagaagcagatttcagagagcaccaatcatatttactccaacttagcaaactgcagccccaaccgacagaagcccgtggtagaccattctgtgcggatcaattctgtcggcagcaccgcttcctcctcccagcctctgcttgtgcacgacgatgtctgagcagaatcagtgtttgggtcacccctccaggaatgatctcttcttttggcttccatgatggttattttcttttctttcaacttgcatccaactccaggatagtgggcaccccactgcaatcctgtctttctgagcacactttagtggccgatgatttttgtcatcagccaccatcctattgcaaaggttccaactgtatatattcccaatagcaacgtagcttctaccatgaacagaaaacattctgatttggaaaaagagagggaggtatggactgggggccagagtcctttccaaggcttctccaattctgcccaaaaatatggttgatagtttacctgaataaatggtagtaatcacagttggccttcagaaccatccatagtagtatgatgatacaagattagaagctgaaaacctaagtcctttatgtggaaaacagaacatcattagaacaaaggacagagtatgaacacctgggcttaagaaatctagtatttcatgctgggaatgagacataggccatgaaaaaaatgatccccaagtgtgaacaaaagatgctcttctgtggaccactgcatgagcttttatactaccgacctggtttttaaatagagtttgctattagagcattgaattggagagaaggcctccctagccagcacttgtatatacgcatctataaattgtccgtgttcatacatttgaggggaaaacaccataaggtttcgtttctgtatacaaccctggcattatgtccactgtgtatagaagtagattaagagccatataagtttgaaggaaacagttaataccattttttaaggaaacaatataaccacaaagcacagtttgaacaaaatctcctcttttagctgatgaacttattctgtagattctgtggaacaagcctatcagcttcagaatggcattgtactcaatggatttgatgctgtttgacaaagttactgattcactgcatggctcccacaggagtgggaaaacactgccatcttagtttggattcttatgtagcaggaaataaagtataggtttagcctccttcgcaggcatgtcctggacaccgggccagtatctatatatgtgtatgtacgtttgtatgtgtgtagacaaatatttggaggggtatttttgccctgagtccaagagggtcctttagtacctgaaaagtaacttggctttcattattagtactgctcttgtttcttttcacatagctgtctagagtagcttaccagaagcttccatagtggtgcagaggaagtggaaggcatcagtccctatgtatttgcagttcacctgcacttaaggcactctgttatttagactcatcttactgtacctgttccttagaccttccataatgctactgtctcactgaaacatttaaattttaccctttagactgtagcctggatattattcttgtagtttacctctttaaaaacaaaacaaaacaaaacaaaaaactccccttcctcactgcccaatataaaaggcaaatgtgtacatggcagagtttgtgtgttgtcttgaaagattcaggtatgttgcctttatggtttcccccttctacatttcttagactacatttagagaactgtggccgttatctggaagtaaccatttgcactggagttctatgctctcgcacctttccaaagttaacagattttggggttgtgttgtcacccaagagattgttgtttgccatactttgtctgaaaaattcctttgtgtttctattgacttcaatgatagtaagaaaagtggttgttagttatagatgtctaggtacttcaggggcacttcattgagagttttgtcttggatattcttgaaagtttatatttttataattttttcttacatcagatgtttctttgcagtggcttaatgtttgaaattattttgtggctttttttgtaaatattgaaatgtagcaataatgtcttttgaatattcccaagcccatgagtccttgaaaatattttttatatatacagtaactttatgtgtaaatacataagcggcgtaagtttaaaggatgttggtgttccacgtgttttattcctgtatgttgtccaattgttgacagttctgaagaattctaataaaatgtacatatataaatcaaaaaaaaaaaaaaaa

SEQ ID NO: 613 - DNA, 1490 bp, Homo sapiens
agatatccgcccctgacaccattcctcccttcccccctccaccggccgcgggcataaaaggcgccaggtgagggcctcgccgctcctcccgcgaatcgcagcttctgagaccagggttgctccgtccgtgctccgcctcgccatgacttcctacagctatcgccagtcgtcggccacgtcgtccttcggaggcctgggcggcggctccgtgcgttttgggccgggggtcgcctttcgcgcgcccagcattcacgggggctccggcggccgcggcgtatccgtgtcctccgcccgctttgtgtcctcgtcctcctcgggggcctacggcggcggctacggcggcgtcctgaccgcgtccgacgggctgctggcgggcaacgagaagctaaccatgcagaacctcaacgaccgcctggcctcctacctggacaaggtgcgcgccctggaggcggccaacggcgagctagaggtgaagatccgcgactggtaccagaagcaggggcctgggccctcccgcgactacagccactactacacgaccatccaggacctgcgggacaagattcttggtgccaccattgagaactccaggattgtcctgcagatcgacaatgcccgtctggctgcagatgacttccgaaccaagtttgagacggaacaggctctgcgcatgagcgtggaggccgacatcaacggcctgcgcagggtgctggatgagctgaccctggccaggaccgacctggagatgcagatcgaaggcctgaaggaagagctggcctacctgaagaagaaccatgaggaggaaatcagtacgctgaggggccaagtgggaggccaggtcagtgtggaggtggattccgctccgggcaccgatctcgccaagatcctgagtgacatgcgaagccaatatgaggtcatggccgagcagaaccggaaggatgctgaagcctggttcaccagccggactgaagaattgaaccgggaggtcgctggccacacggagcagctccagatgagcaggtccgaggttactgacctgcggcgcacccttcagggtcttgagattgagctgcagtcacagctgagcatgaaagctgccttggaagacacactggcagaaacggaggcgcgctttggagcccagctggcgcatatccaggcgctgatcagcggtattgaagcccagctgggcgatgtgcgagctgatagtgagcggcagaatcaggagtaccagcggctcatggacatcaagtcgcggctggagcaggagattgccacctaccgcagcctgctcgagggacaggaagatcactacaacaatttgtctgcctccaaggtcctctgaggcagcaggctctggggcttctgctgtcctttggagggtgtcttctgggtagagggatgggaaggaagggacccttacccccggctcttctcctgacctgccaataaaaatttatggtccaagggaaaaaaaaaaaaaaaaaaaa

SEQ ID NO: 614 - DNA, 705 bp, Homo sapiens
agcaagctgtcctgtgagccgccagcatggatgacatctacaaggctgcggtagagcagctgacagaagagcagaaaaatgagttcaaggcagccttcgacatcttcgtgctgggcgctgaggatggctgcatcagcaccaaggagctgggcaaggtgatgaggatgctgggccagaaccccacccctgaggagctgcaggagatgatcgatgaggtggacgaggacggcagcggcacggtggactttgatgagttcctggtcatgatggttcggtgcatgaaggacgacagcaaagggaaatctgaggaggagctgtctgacctcttccgcatgtttgacaaaaatgctgatggctacatcgacctggatgagctgaagataatgctgcaggctacaggcgagaccatcacggaggacgacatcgaggagctcatgaaggacggagacaagaacaacgacggccgcatcgactatgatgagttcctggagttcatgaagggtgtggagtagatgctgaccttcacccagagctgcctatgcccagcctccaactccagctgagtcctggggttggggagggggtcggggtcccaggacctgagcctggccatgtcctcaaccccaaatcccccgactccctccccagatctgtcctgggggatgcaaataaagcctgctctcccaaggtctgctaaaaaaaaaa

SEQ ID NO: 615 - DNA, 2252 bp, Homo sapiens
ataaatatcagagtgtgctgctgtggctttgtggagctgccagagtaaagcaaagagaaaggaagcaggcccgttggaagtggttgtctacttgcaatatgtgctctgggctggacgcggtggctcacgcttgtaatcccagcactttgggaggccaaggcaggcggatcacgaggacaaccccagcaatgtggagaagcctggggcttgccctggctctctgtctcctcccatcgggaggaacagagagccaggaccaaagctccttatgtaagcaacccccagcctggagcataagagatcaagatccaatgctaaactccaatggttcagtgactgtggttgctcttcttcaagccagctgatacctgtgcatactgcaggcatctaaattagaagacctgcgagtaaaactgaagaaagaaggatattctaatatttcttatattgttgttaatcatcaaggaatctcttctcgattaaaatacacacatcttaagaataaggtttcagagcatattcctgtttatcaacaagaagaaaaccaaacagatgtctggactcttttaaatggaagcaaagatgacttcctcatatatgatagatgtggccgtcttgtatatcatcttggtttgcctttttccttcctaactttcccatatgtagaagaagccattaagattgcttactgtgaaaagaaatgtggaaactgctctctcacgactctcaaagatgaagacttttgtaaacgtgtatctttggctactgtggataaaacagttgaaactccatcgcctcattaccatcatgagcatcatcacaatcatggacatcagcaccttggcagcagtgagctttcagagaatcagcaaccaggagcaccaaatgctcctactcatcctgctcctccaggccttcatcaccaccataagcacaagggtcagcataggcagggtcacccagagaaccgagatatgccagcaagtgaagatttacaagatttacaaaagaagctctgtcgaaagagatgtataaatcaattactctgtaaattgcccacagattcagagttggctcctaggagctgatgctgccattgtcgacatctgatatttgaaaaaacagggtctgcaatcacctgacagtgtaaagaaaacctcccatctttatgtagctgacagggacttcgggcagaggagaacataactgaatcttgtcagtgacgtttgcctccagctgcctgacaaataagtcagcagcttatacccacagaagccagtgccagttgacgctgaaagaatcaggcaaaaaagtgagaatgaccttcaaactaaatatttaaaataggacatactccccaatttagtctagacacaatttcatttccagcatttttataaactaccaaattagtgaaccaaaaatagaaattagatttgtgcaaacatggagaaatctactgaattggcttccagattttaaattttatgtcatagaaatattgactcaaaccatattttttatgatggagcaactgaaaggtgattgcagcttttggttaatatgtctttttttttctttttccagtgttctatttgctttaatgagaatagaaacgtaaactatgacctaggggtttctgttggataattagcagtttagaatggaggaagaacaacaaagacatgctttccatttttttctttacttatctctcaaaacaatattactttgtcttttcaatcttctacttttaactaataaaataagtggattttgtattttaagatccagaaatacttaacacgtgaatattttgctaaaaaagcatatataactattttaaatatccatttatcttttgtatatctaagactcatcctgatttttactatcacacatgaataaagcctttgtatctttctttctctaatgttgtatcatactcttctaaaacttgagtggctgtcttaaaagatataaggggaaagataatattgtctgtctctatattgcttagtaagtatttccatagtcaatgatggtttaataggtaaaccaaaccctataaacctgacctcctttatggttaatactattaagcaagaatgcagtacagaattggatacagtacggatttgtccaaataaattcaataaaaaccttaaagctgaaaaaaaaaaaaaaaaaaaaaaaaaaaaaaaaaaaaaaaaaaaaaaaaaaaaaaaaaaaaaaaaaaaaaaaaaaaaaaa

SEQ ID NO: 616 - DNA, 6330 bp, Homo sapiens
tgacgcccccgaacccagctgcagaagctgccgccacctccaatgcacaaggtgtctcatctgaaaagaaacctgagccccagggaggcggcgcggagcgaccctggcagagctggcgcaaacagggcgagaggtcgctgggcagcgttcgaggaccagagggagctcggccacagaagaccccagtgatctgatcccgggatcccggctccaagctctcctcgcattttacagatttcacccccgcgactatctccccaaaacggagcctttatatcaagagaaggtgcgggagctggggcaaccaggactttctcgggcacccaagatgcgctccattaggaagaggtggacgatctgcacaataagtctgctcctgatcttttataagacaaaagaaatagcaagaactgaggagcaccaggagacgcaactcatcggagatggtgaattgtctttgagtcggtcacttgtcaatagctctgataaaatcattcgaaaggctggctcttcaatcttccagcacaatgtagaaggttggaaaatcaattcctctttggtcctagagataaggaagaacatacttcgtttcttagatgcagaacgagatgtgtcagtggtcaagagcagttttaagcctggtgatgtcatacactatgtgcttgacaggcgccggacactaaacatttctcatgatctacatagcctcctacctgaagtttcaccaatgaagaatcgcaggtttaagacctgtgcagttgttggaaattctggcattctgttagacagtgaatgtggaaaggagattgacagtcacaattttgtaataaggtgtaatctagctcctgtggtggagtttgctgcagatgtgggaactaaatcagattttattaccatgaatccatcagttgtacaaagagcatttggaggctttcgaaatgagagtgacagagaaaaatttgtgcatagactttccatgctgaatgacagtgtcctttggattcctgctttcatggtcaaaggaggagagaagcacgtggagtgggttaatgcattaatccttaagaataaactgaaagtgcgaactgcctatccgtcattgagacttattcatgctgtcagaggttactggctgaccaacaaagttcctatcaaaagacccagcacaggtcttctcatgtatacacttgccacaagattctgtgatgaaattcacctgtatggattctggcccttccctaaggatttaaatggaaaagcggtcaaatatcattattatgatgacttaaaatataggtacttttccaatgcaagccctcacagaatgccattagaattcaaaacattaaatgtgctacataatagaggagctctaaaactgacaacaggaaagtgtgtaaagcaataaagcacattttgaaacaaacaatatgcacttcttttctgaagatgcttccgaagatttgaaaataggatccaaaacacggctgggtttcagcatccaccaatgaactgaaaggtgaataaaggacgttcatgagaaatcgactaccagctgatgaaatacctgcaaagtgctctaaaaattaaatattttgactttaagggtcctagtaagtgccacttccactaagaatacagtttgaatgtataatcagtagtgtttacaagatccaacagtgcactcatcattagttaacaaagcaaatatgttcatcactgtcaggctgcccacagcaacaccaagcatattagaagaggaaccccaggaacgcaactcagaccttgggaaattaaaccatccttgtcagcagaagccaagatggaagcagtttgagcaatgaaatccgtaagattaaacaactcaagtaaatgcttcagtcaggactctgagtctgatcatgaattttatgttttaatttatgttttttttttgtcttctggaatctcttttggtttggatattgggatgcttagaaatcctttctgagatgcatatgagtgaggaaataaactttaagtaattatttttaaagttcttatactttttaaaagctatcacacaaagacttttttttttttttttgtctcgctctgttgcccaggctggagtacagtggcgcgatctcagctcactgcaagctccgcctcccaagttcactccattctcctgcctcagcctccggagtagctgggactgcaggcgcctgccaccacgcctggctaattttttgtatttttagtggagacggattttcaccgtgttagccaggatggtctcaatctcctgacctcgtgatccacccgccttggcctcccaaagtgctgggattacaggcgtgagccaccgtgcctggccgacatttttaaaaaagttttattttgcacggctctaaacctccatgttattttccagtggtgtagaaggtaccagctaaagtgaaccactatgtaatattaggccattctaaaggaaagatgttccatgtcatcagagatggtaaaataggccgggaaaaaaaaatctttggtaccaaagattacacttgtgtttctacacagcaaaccatttttctttcatgaaaataatatattattaacatgaatatattattttgctattaatgtgaaagttgtctctaaatattttttaattttcaaactcatactttattttcatttgaaatgtttttcacaccttttgcattacataataattttgtggaagcattttgccctttagaataaatattagattgatatagctgaaatgtgacttccagttctttgatattccccttgttattcaaatagaaatatggaaatgctttatatattactgttaaatttcttagtgcagaaataacattattaatagagtattgttttcaaaacagagatgattaatttcaagaggtttaacagtgaaattgtgtcaatattttgcatttaaaatgaatttaattgaccgatattttctgtagttaaatttagtcacaatatcacatatgttcttcaagaaacacatgaaattattaataaagtaattaaaaaatttttaatgtataacagaattgaccaataggccagttttctggtaacttatgatagtagattgtttctttagaaactgggcagaagctctgcattctcacttgtactttgatttcttatttcttgggcaggcaatttgaggaaagaagaaatggcatggggaatatatatgttttgtttcttagggaaaacagtctgagaaatgaataaaaagcatgaagtacgtgtgtgtgtgtgtgtgttaccatggaaaaggatattcacagtagtacagttctcaatatttttaattagatgtcatatttttttaatatagtaaaaccttgggatatagaatattacatcttttgagaatgtatgtgtctctaagtaagtaaaatctaatgcgtataggagactgatagctaaaaatgaatggaacattaatgtacttttataattaaacctcttatctatcagaaattgtaagagaatagatacatgttttgaatgtaaagttgaaaagtctggtttacttaataaattgaaagtgatttataaaatctaaatttggactacttgcaaatgataagctattctagtagcctttagtttaaatccaacagaaatctagaagtcacaagcaaatatcttaaaggtaaaatccatctgggcactcatttaaagtatatcttaaaaaagcagcagcaaggtaccttgccatttttagcatattttcttcctttttcttttttcttttttttttttttttgagatggagtctcactctgtcacacaggctggaatgcagtgatgccatctcagctcactgcaacctccacctcctgggttcaagtgattctcgtgcctcagcctcccaagtagctggggttacaggcgcccaccaccacactcggctaattttgtgtttttagtagagacaaagtttcaccatgttggccaggctggtcttgaacttcctgacctcaggttatccacccacctcagcctcccaaagtgctgggattacaggtgtgagccaccgcagccggaccatttttagtatattttcagtaaatacatttaaacaatgttaaggccacagcacacatatctcagccattcattgttctgtgcattgatgtttatctcatagatgcattgagtagtgcctttttagctttttcacattactttgtcaccatatcctttgtgttctctaaatacattgcccacttccaaaaatgttcagcatgaaaaaaagggcttcagtgtcgattgagattgcttttgttcatctcagggatttcaatagtcaagaatgaattcagttaaaggtatttagggttcaaagaagacaaactgtacaagcccatttcattccttgttgtatacctttccatctgccctcccattttaactatctactgtggcctttttatggaaacagagcaagatcaatgaaggctaatggcaagaataagaaaaagagttgagatttaaccaatagcggagcataaaggatcatgacaaaatcaaattataaaagcatacttgaaataggtggagctttttcttttgaaaatatatattcacaattttaatattttaatttattttttactatttaaccctgtacttggcaatgctcaggcagctgattgtgaaatattcttgtcctttacagaacatggttgttattgtgctgttgacatgaatagaccatggaaacattttcatcattattattcagcctgtgctgtagttaatgttaagttgctgaaataaaaagtgagcaagtaatagattttcttggcaaatctaatgattcagcccacaggactgttgaaactactgcggaagtttttctatctgaaagaaggtgctgggcattcaaatgtgttcatgtattgtatatcatatgaattgtatatcaattactaatgggaatttctacatatatgcttacaaaagcaatttatttaagtaatgctaggggtagtgtacataccaattagttattcagctactatacagaaaaaggatgaacaaattaatttatttctaattgagccagttagacataatgcatataacgtgatatttggttcatgaaagagttgttttcatgtggttattgtagggagtatatataattgtggaaggggtatgggaagagttgtgtatagttagttgttatctctacaagtttgaaagttttcccatcaaacattatcaatataccaatgttttaaaaattgagtgagggttattatttgtatttgatgaaagaaaatccaaataaagcccacctagaaatagatattttattatatatgtgctatagatatacctatatagtacaaatagacatgtgtgatgcatatatacaatgttatatatgtgtatatgtctgtatacacactgagtctgtaatatgtatacactaaatttgtgttatgctaacatcttcagggtctgcactgtgaactcccctggagataagtaagtccactttagaataaagaagttcttttgagacttcagttactaacgtgctttaagaggtatctactttataactgaattctatgtcgttcatacgtagagttacagtaagggtctagtatgtccaaatcttaataataaagaagaaaagtaaaggcttcaagctagcaatgtattcgaattacagttttcagattgtggctccaggccttgtgtttctcatttaagtagcaccttttaataaaaaccgtttctttgtgtaggcaaaagcacaagtgtttcaaatgtaaatagcaggaaaaaaaaagagtttacagagatagcattgctgcacagaataattgctactgagtatttcttatagaatttgtggaactgaaagatgaggtttattctgtcaagttcaagttcattctgttcaacactgttttcttattgtttgtgtatagcaaccgggtattattgttttatcatttgtaaaattgtaaaataaattaatccctttttttcactgtttctcttatctcatatatccaagcccttggttatactttgtatgtcaatgttaggtgatcatttttaacaagctttggcttgtgctttgcttttccactccccttagccctagtggttggcaattaggcaaaccatttatttttaagtgtatacatgggaatatgaacaatgtcaaaaaccccatgaatattaggaaatccttaacgatattttgtgtagcacattctgtttgcggttgagggaataaagtatttcacaagtgaaaaaaaaaaa

SEQ ID NO: 617 - DNA, 5242 bp, Homo sapiens
gccgcggcggtggcggagactgtggctttaagagcgtgccgggagcccgagccccagccgggccgcgcttcgccgctgcgcaccccagcggagccaagccccacgctggccggacagggccgcctgtcgccgggctgctgagaactagccctagacctctgcgtgagggttcttctgccgaagacatcaccagtgtgtggagcctgccacacccacccgctgccaaaccacggcctttacctgtgtcttccggtgtttcccgtgcgacccatcctgtgggagtgcctcgtgggctgccccagagttcaccccacactcagcagcaccaatggtgaagatgacaagatcgaagactttccaggcatatctgccctcctgccaccggacctacagctgcattcactgcagagctcacttggccaatcatgatgaactaatttccaagtcattccaaggaagtcaaggacgagcatacctctttaactcagtagttaatgtgggctgtgggcctgcagaagagcgagtgttgctaacaggactgcatgcagtcgcagacatttactgtgaaaactgcaaaaccactctgggctggaaatacgaacatgcttttgaaagcagccagaaatataaagaaggcaaatacatcattgaactagcacacatgatcaaggacaatggctgggactgattggacagcatctacccaacccagtgtccacgtgaacgccattcaaccgaacattcttcccaagcgtgagagagtgactgacacttggttccatccatttaggggccttgccatccggggcatcctcccaccctgacgccatctttctggtgaccggcctctaaatcgctgtctctctgtctctttgctttgtatctgtttgtgagttgatcctggcttctctctctgttctagttttggctgaaaacaaaacaacaaaaggaacagatccttgaccgcatggcggcagcccaccttggtaagggccccagggcccatgcgagagctgcctgatggcctcttgtcaggagagcagtggcacgggggcgtgaggaagagggaaaggggaaactctaagggtcctggcgcggggaaggggtggaagggtggaggtaggaacaaaattgcgccgctcctggagacctgataacttaggcttgaaataattgacttgtctaaaaggacaaagagaaaaaaaaaatacctcatgactgcattctctctgactagaagcttctgttcctgacaccaaatgtgccaggttagcaaatgagcacaagatgtggccctgattctagttggtggggcaagggcctggttctcctgggctgagtgggggagtgtcctggcagcagcgagtgacctgggcagtggccaggtgggtgcgatgactctgatgcctcactcagtctctgggcaatcatcatctttgcctctagccaccgtagataaggtgtgaagggactgctgtttgcaatgggcttaccatccaaatatcccaaaggctttgaccagcaaccaagtaaaatcagtaattgaggagagcagggcacaaaggggctgcagtttgggagctcctgaagaaatggctcagatattgagtcagagaaataaaaagtaggatcagttagcaattctaactgcccttccttctgacccctcataagaggagtgtggtgagggaggggactgggtaggggtcatcccaggaggaggggtttacattggaaccagttcaggttcggtgcatctttcctcttcggttttacagtggcttccgtgggatcgtcaatttcttgttcttagagtttcgggtgtttttctccagtcttgttactgtagactgtagaaagcacgggccccaggctctgagcttagtaataacctggctggtagattcctcatgcccctaattgtcccacttaggcctgaatgtcttgcatggagagaaatctcctgtcagtgtggtccagcagcagggaggagttctgcccaaattccgatatcaccccttcccccatccaagcatccttcgattagggaagtggagagcacatccctgtaaggcccataagagaaagaggagtttgttacatttaatcaacactgtgaagtctgttctacagcaattcagccattacacagtatatgactgaaactcatttaactgggttaatttcatttcttagactgaatatattattgttaagatacgtgtgcgtgttaggtaattctcagcatctcctccaagtaggccgaccttctcggaaaattcaccctaaaagtctcacaaaagaatgagttcatggggagattctgtaaagtgatgaactgagatgaaagcagccaacagcccaggagcttttcagaatagcgtctgcagcagaaccagtttccattcagagcgcgtccttggtggaaatgcttttttgtgtgtctccacgcgctgatggtggaatgggagccccaagacgtgtgggcttagaaatcaacttttgttccccaaggcttcttgtccagatctttccagtgctttcatagccctgggagatcaagttgttctccccactttactgcaaggtagactgaagttcagaagaaatactgaatttctgctcccagaagaatagtttctctggctcacaggcccaagttctcaatgaaatcgttttttaactttcacattcctaagctggcttcccggcacagaagccatggatttcccctctctcccttccccctcctcaaggaaatagtcttcctttatggattttcattggactctttcctcagcgattgtcctggctgtttattgatagtccttcccataagaaaatggggttaaacatggggtaggtattttgtctttcaaactacaaatggaatgtggtgacataaactagacatggggtgccctcaagtttccaaggggaccaatgtgccactgttcttccttggggatgaggcctttgactgttggatggatcagagcaggctccagtcagaccctggttctgaatgttttttttttcggtgactatccagtgagccttcagtgggtgcaaggcgccatacttgctgtgagagagctgagtagagtgttggtttttccataactacagggggaaaaaaagtcattaggctttccctttgtgtcagtgaaaccaaaagtgcttcttacaacgttcgctctgttcatgggttgtctatctaacattgagcagcattggagaggccacagctgagctatggagatgctaaattaactcatggcctcagtcagttcattctttaatttcctcaccaaattattgacttagagcataaccaaagacctcattcattcaccccaggtgggttggggtaattggagtttgttggtgaagtttgggggcggggtgttgggagtagagacagggtaaggggacgtgagaaaggaaaaggcatgaagttctatacctcagccagcagctgccttcgtttggaactgaagtccagccagcagactctctagctccatctcccctgtgccaccctaggtcatatgaccttggccaccttggagtagacccagacccctcgggacccgggacattagtctcaggctgctgatggattgatttgacatgaaccaaacacagccaaactcgatacccacaagctgtcagctgaacctgactgagtgttcttcctgagttcacgaggataggctagagtgcatttttactggtggatcagtgtgtgcgaaagagatgaccctttataaagagattttcaagtggatatatataaaagaaacagttgcttgtaaaatatacttttgtaaataatatttaattttttaaataatatatttggtgctgttttctcagatcccctgagagcactttttattttccttttaaattctatggtttcctttgcatttcttgaagtatattttaagggaaacagtgatcaccaatacatgttttcagttttttttttttttaaggtctctatcactttaatctggatcaaggctttgaagcaatgcctctctgcattttttccccagtggaacagactctgcagtacattaatcaggttgagaattgaaatattttcttgcatcagtattggctagaaaagaaaataaataaaaccaagttaatttagtagtaacaacttacagtgattcttcctgttggaagaatttccaacaaatcagaatcacgtttttagttgtgcgtgtgcgcgcacacgtgtgtaaaaagcactttcgattgtgcctcctgttttctcgagtggggacactttaactacagtttacacctcgggcgcataaagtttttcttctctttctctctggttgtttctgtttctgagtggaccaacagcagaacccacgaggatttgttttgagtatggagctgttgcgggtttgctcctttttcttgctttgcgtgctcagtttttacagactgtaaaggagatgtgttgtttgtgaagatggagcagagtcaaatctgtgcttctaactgagatgagagtgtattaatcacgtatcgcagggctccagctgttttagaagccacatcatgttaaacattaactggtttggattaaaagaacattaatattataatacacatatcttagtggtaaacagctttttttttttaaggtcagattgcctcaggtttagaaagaggctgagaaatcaaatcttgaacacaatcaacttacatattttaaaggaatctgcctcaaatgagaaaatatgctagttatctagatagaggaaagagatatttacttttttaaaaattaaaatagttatgaaatctggcagaaaaggtaaagcctagaagaaactatgaaagctattctcatgttaccaaattctatctgcgcatatgtttttgtataacatttcggtgacagtgggagtcggttccctttcccaacctgcagagactatcttccaatacagaatctgtctatttatgcttgtgtttacaaactgtatttgttgggtttgggtttttgttttctttggtggcatttttcaggtcactttgcttctataacaaaggtaattgttttcaaataatttgtcttcaccttttcctgtatttgtacatagtgattcagtattagagaaaagtgcattgtttctgtcatatttccaatctgtgttggtgctcatttgagaaaataaaagttttcaaatattaactcttaaaaaaaaaa

SEQ ID NO: 618 - DNA, 2567 bp, Homo sapiens
caatgacaggcggcaggcggtgaccgccgcagggcctgcggagaccgtccgcctggctcgcccgagctcgcccgctgtccgccagcccgcgggagggaggagagaagcgaagcgtttccgcggttggctactcagtgtcttggtctcaagttgcctcattgcggctggcgttcccaatacagacgcatcgtttcttttttaatactccctaagaaagggaataaccttcaagctggcgggagcaatggttcacataaagaaaggcgagctgacccaggaggagaaggagctactggaagtcatcgggaaaggtactgtccaagaagctggaacattattatccagcaagaatgttcgtgtcaactgtttggacgagaatggaatgactcctctaatgcatgcagcatataaaggaaaactcgatatgtgcaaattactactgcgacatggagccgatgtaaattgtcatcagcatgaacatggatacacagccctcatgtttgctgcactttctggtaataaagacatcacatgggtaatgttagaagctggtgctgagacagatgttgtcaactctgtgggaagaacagcagctcagatggcagcctttgtgggtcaacatgattgtgtgaccataatcaacaatttctttcctcgagagagactggattattacactaagccccagggactggataaagagccaaaactgcccccaaagttggcaggcccgctgcacaaaattatcaccacaacgaatcttcatcctgtcaagatcgtgatgcttgtaaatgagaatcctctgctgacagaagaagcagccctgaataaatgctacagagtgatggatttgatttgtgagaaatgtatgaagcaaagagacatgaatgaagtattggctatgaagatgcattacataagctgtatctttcagaaatgcattaacttcttaaaagatggagagaataaactggacaccttgatcaaaagcttgttaaaaggccgagcttctgatggctttccagtgtatcaagaaaagatcattagagaaagtatcagaaaatttccttactgtgaagctacactcctccagcagctggttcgaagcattgctcctgttgaaattggttctgatcccactgcattctccgtccttacccaagccatcactggccaggtgggttttgtggatgtggaattttgcactacctgtggagaaaagggagcaagtaaaagatgttcagtttgcaaaatggtaatatattgtgatcaaacctgccagaaaacacactggtttactcataagaaaatctgtaagaatctgaaggacatttacgaaaagcaacagttggaggctgccaaagaaaagagacaagaggaaaaccacggcaaacttgatgtcaattctaactgtgttaatgaagagcaaccagaggctgaagtaggtatctctcaaaaggattccaatcctgaagattccggggaaggaaagaaagaatctcttgaaagcgaagctgagttggaaggcttacaggatgctcctgcagggccacaggtgtctgaggagtaaaagccagagcaagtgccagtgtggatgatcctcaccctgcaagaagctggaaaactcctaggaatgcattgtcctcaccttgttatacctgcgtggcaccatggcaggattccacatttcatagaatacaggttttcaagcaaacccctgttgaccatgccctaatttcctattgatttctgttctataattgaatggatattcctatggaaaattttttgtttcaaaatacaggaaaaacattcctattacctttctgaggctggctttccagcaattgtttcaaaggaaaatagatccccttaaagaaaaaatacaggctttagggaacaaagggacaagcagaacaggtgtggaagagagattttcaggaagggaaaaatttatagctacagagggtagttagaaaaatcataacttatatgtgaataaaatacatataagcagcatttacggtagtggcattctacttattaagatgcaatgaaatgaagaaaggctttatgttcaaggacctttgccatagttcagctaattgtagttttatatagaaatgatcctgaacactctgaacttgacgtagtcctgcggtgatattctatctgcagtatttgtacctccagaatggcagatccctcagcaggaacaaaggcatattgacggttctctcagcgtatgcattaaaaaaggtacttcctgaaacttttgattcaataatgactaaacatactatgtacacaattactgtaaggctaattcacgtgccatactccacctgaaagcctgagttatcttgctataagcttttcatggagcacttcctttccagaaactgatttgtaactcatttagagaatgtcctggcgtcggtttttagcatatgtggtatttaaacagagctagaatgtgatgtctgaagataatgctgcatttctgggtttcttgtgtggattttaaaataaattgtgcctacaaatataaacaaaaaaaaaaaaaa

SEQ ID NO: 619 - DNA, 2792 bp, Homo sapiens
caccctcaggcactacagctagactccgagcttactgggcagtcatctgattcgaccaacatcagttcgcagggcttaagcccagtcccttacggcggcctggggagggaccaggcccaagtatataaagctccctgagggtccgcgttggctttgcgcctgtgagtgtgattcaagaacgtcccagtgcccttggctcctttcggagtgtgaccccgtgcttgcacgggacacgttacccagctcgggtgagaagggtatcttccgggaacctcgcctttaatagcacaacgagcgcagagtccactggatctgcgagaagaaaccgcgctaactagtttgtccctacggccgcctcgtagtcactgccgcggcgccttgagtctccgggccgccttgccatggctgcccgtggtgtcatcgctccagttggcgagagtttgcgctacgctgagtacttgcagccctcggccaaacggccagacgccgacgtcgaccagcagagactggtaagaagtttgatagctgtaggactgggtgttgcagctcttgcatttgcaggtcgctacgcatttcggatctggaaacctctagaacaagttatcacagaaactgcaaagaagatttcaactcctagcttttcatcctactataaaggaggatttgaacagaaaatgagtaggcgagaagctggtcttattttaggtgtaagcccatctgctggcaaggctaagattagaacagctcataggagagtcatgattttgaatcacccagataaaggtggatctccttacgtagcagccaaaataaatgaagcaaaagacttgctagaaacaaccaccaaacattgatgcttaaggaccacactgaaggaaaaaaaaagaggggacttcgaaaaaaaaaaaagccctgcaaaatattctaaaacatggtcttcttaattttctatatggattgaccacagtcttatcttccaccattaagctgtataacaataaaatgttaatagtcttgctttttattatcttttaaagatctccttaaattctataactgatcttttttcttattttgtttgtgacattcatacatttttaagatttttgttatgttctgaattcccccctacacacacacacacacacacacacacacacacgtgcaaaaaatatgatcaagaatgcaattgggatttgtgagcaatgagtagacctcttattgtttatatttgtaccctcattgtcaatttttttttagggaatttgggactctgcctatataaggtgttttaaatgtcttgagaacaagcactggctgatacctcttggagatatgatctgaaatgtaatggaatttattaaatggtgtttagtaaagtaggggttaaggacttgttaaagaaccccactatctctgagaccctatagccaaagcatgaggacttggagagctactaaaatgattcaggtttacaaaatgagccctgtgaggaaaggttgagagaagtctgaggagtttgtatttaattatagtcttccagtactgtatattcattcattactcattctacaaatatttattgaccccttttgatgtgcaaggcactatcgtgcgtcccctgagagttgcaagtatgaagcagtcatggatcatgaaccaaaggaacttatatgtagaggaaggataaatcacaaatagtgaatactgttagatacagatgatatattttaaaagttcaaaggaagaaaagaatgtgttaaacactgcatgagaggaggaataagtggcatagagctaggctttagaaaagaaaaatattccgataccatatgattggtgaggtaagtgttattctgagatgagaattagcagaaatagatatatcaatcggagtgattagagtgcagggtttctggaaagcaaggtttggacagagtggtcatcaaaggccagccctgtgacttacactgcattaaattaatttcttagaacatagtccctgatcattatcactttactattccaaaggtgagagaacagattcagatagagtgccagcattgtttcccagtattcctttacaaatcttgggttcattccaggtaaactgaactactgcattgtttctatcttaaaatactttttagatatcctagatgcatctttcaacttctaacattctgtagtttaggagttctcaaccttggcattattgacatgttaggccaaataattttttttgtgggaggtctcttgtgcgttttagatgattagcaataatccctgacctgttatctactaaagactagtcgtttctcatcagttgtgacaacaaaaatggttccagatattgccaaatgccctttagaggacagtaatcgcccccagttgagaaccatttcagtaaaactttaattactattttttcttttggtttataaaataatgatcctgaattaaattgatggaaccttgaagtcgataaaatatatttcttgctttaaagtccccatacgtgtcctactaattttctcatgctttagtgttttcacttttctcctgttatccttgtacctaagaatgccatcccaatccccagatgtccacctgcccaaagtctaggcatagctgaaggccaagctaaaatgtatccctctttttctggtacatgcagcaaaagtaatatgaattatcagctttctgagagcaggcattgtatctgtcttgtttggtgttacattggcacccaataaatatttgttgagtgaatgaaaaaaaaaaaaaaaaaa

SEQ ID NO: 620 - DNA, 2688 bp, Homo sapiens
atagagctgatgtatccagaggttatgttgctagaggtgagatcagttacctacgtgcaactgaaatttcaaacttctgttcagcagggacgtgagtggacaatggtgactgatagttggaaatatcagcaaacatcttaaattttatactcaaatgaatgagcaatgaaccaggagaataggtccagttttttttggctccttgtaatttttacctttttacttaaaattacagcatctttttcaatgagtgcctatgtgactgtgacttattacaatgaaaccagcaactacactgcaatagagacatgtgaatgtggcgtttatggattagcttcaccagtggctaatgctatgggagtggtaggcatccctaagaacaataactaccaagcttgtgaccacaacactgagtttagtaatactaagaagccctggattgcgctgatagaaagaggtaattgtacattttcagaaaaaattcaaacagcgggcagaagaaatgctgatgctgttgtgatttacaatgctccagagactggcaatcagacgatacagatggcaaattttggtgcagtagacattgttgcaatcatgatcggcaatctgaaaggcacaaaaattctgcaatctattcaaagaggcatacaagtgacaatggtcatagaagtagggaaaaaacatggcccttgggtgaatcactattcaatttttttcgtttctgtgtccttttttattattacggcggcaactgtgggctattttatcttttattctgctcgaaggctacggaatgcaagagctcaaagcaggaagcagaggcaattaaaggcagatgctaaaaaagctattggaaggcttcaactacgcacactgaaacaaggagacaaggaaattggccctgatggagatagttgtgctgtgtgcattgaattgtataaaccaaatgatttggtacgcatcttaacgtgcaaccatattttccataagacatgtgttgacccatggctgttagaacacaggacttgccccatgtgcaaatgtgacatactcaaagctttgggaattgaggtggatgttgaagatggatcagtgtctttacaagtccctgtatccaatgaaatatctaatagtgcctcctcccatgaagaggataatcgcagcgagaccgcatcatctggatatgcttcagtacagggaacagatgaaccgcctctggaggaacacgtgcagtcaacaaatgaaagtctacagctggtaaaccatgaagcaaattctgtggcagtggatgttattcctcatgttgacaacccaacctttgaagaagacgaaactcctaatcaagagactgctgttcgagaaattaaatcttaaaatctgtgtaaatagaaaacttgaaccattagtaataacagaactgccaatcagggcctagtttctattaataaattggataaatttaataaaataagagtgatactgaaagtgctcagatgactaatattatgctatagttaaatggcttaaaatatttaacctgttaacttttttccacaaactcattataatatttttcataggcaagtttcctctcagtagtgataacaacatttttagacattcaaaactgtcttcaagaagtcacgtttttcatttataacaattttcttataaaaacatgttgcttttaaaatgtggagtagctgtaatcactttattttatgatagtatcttaatgaaaaatactacttctttagcttgggctacatgtgtcagggtttttctccaggtgcttatattgatctggaattgtaatgtaaaaagcaatgcaaacttaggcgagtacttcttgaaatgtctatttaagctgctttaagttaatagaaaagattaaagcaaaatattcatttttactttttcttatttttaaaattaggctgaatgtacttcatgtgatttgtcaaccatagtttatcagagattatggacttaattgattggtatattagtgacatcaacttgacacaagattagacaaaaaattccttacaaaaatactgtgtaactatttctcaaacttgtgggatttttcaaaagctcagtatatgaatcatcatactgtttgaaattgctaatgacagagtaagtaacactaatattggtcattgatcttcgttcatgaattagtctacagaaaaaaaatgttctgtaaaattagtctgttgaaaatgttttccaaacaatgttactttgaaaattgagtttatgtttgacctaaatgggctaaaattacattagataaactaaaattctgtccgtgtaactataaattttgtgaatgcattttcctggtgtttgaaaaagaagggggggagaattccaggtgccttaatataaagtttgaagcttcatccaccaaagttaaatagagctatttaaaaatgcactttatttgtactctgtgtggcttttgttttagaattttgttcaaattatagcagaatttaggcaaaaataaaacagacatgtatttttgtttgctgaatggatgaaaccattgcattcttgtacactgatttgaaatgctgtaaatatgtcccaatttgtattgattctctttaaatataaaatgtaaataaaatattccaataaaagtttgtgtctggtgttagtttaaaaaaaaaaaaa

SEQ ID NO: 621 - DNA, 8516 bp, Homo sapiens
gagtagctccagcggccacgctgaggcgagggtgacacaccatgctcacggcccctggagaccgtcgtgctggcgagccgtgctccgtagctccccggtccgcctcggcagcggtcagagtcgcctacaggagttgagccgcccgcgccagaaggttttggcgaagctcttggagaggcgtcgagcacagtagggcggcgggggtgcgttgagcgctcgggggtcaggcagtcggccgggatcgccgctggggagcgtttccgaggcgaggaggaggaggaggagatgctgctcctcttctccccctccccaggctccttctacagctccttcagcccacgcccgcagccgcttgtgggagaagtggtggtggctctcggcgcccgcggcggctgccggcggcccgccccgacgccgcgtccctgcagccctcgcccggcgctccagtagcaggacccggtctcgggaccagccggtaatatgcacgtgtcactagctgaggccctggaggttcggggtggaccacttcaggaggaagaaatatgggctgtattaaatcaaagtgctgaaagtctccaagaattattcagaaaagtaagcctagctgatcctgctgcccttggcttcatcatttctccatggtctctgctgttgctgccatctggtagtgtgtcatttacagatgaaaatatttccaatcaggatcttcgagcattcactgcaccagaggttcttcaaaatcagtcactaacttctctctcagatgttgaaaagatccacatttattctcttggaatgacactgtattggggggctgattatgaagtgcctcagagccaacctattaagcttggagatcatctcaacagcatactgcttggaatgtgtgaggatgttatttacgctcgagtttctgttcggactgtgctggatgcttgcagtgcccacattaggaatagcaattgtgcaccctcattttcctacgtgaaacacttggtaaaactggttctgggaaatctttctgggacagatcagctttcctgtaacagtgaacaaaagcctgatcgaagccaggctattcgagatcgattgcgaggaaaaggattaccaacaggaagaagctctacttctgatgtactagacatacaaaagcctccactctctcatcagacctttcttaacaaagggcttagtaaatctatgggatttctgtccatcaaagatacacaagatgagaattatttcaaggacattttatcagataattctggacgtgaagattctgaaaatacattctccccttaccagttcaaaactagtggcccagaaaaaaaacccatccctggcattgatgtgctttctaagaagaagatctgggcttcatccatggacttgctttgtacagctgacagagacttctcttcaggagagactgccacatatcgtcgttgtcaccctgaggcagtaacagtgcggacttcaactactcctagaaaaaaggaggcaagatactcagatggaagtatagccttggatatctttggccctcagaaaatggatccaatatatcacactcgagaattgcccacctcctcagcaatatcaagtgctttggaccgaatccgagagagacaaaagaaacttcaggttctgagggaagccatgaatgtagaagaaccagttcgaagatacaaaacttatcatggtgatgtctttagtacctccagtgaaagtccatctattatttcctctgaatcagatttcagacaagtgagaagaagtgaagcctcaaagaggtttgaatccagcagtggtctcccaggggtagatgaaaccttaagtcaaggccagtcacagagaccgagcagacaatatgaaacaccctttgaaggcaacttaattaatcaagagatcatgctaaaacggcaagaggaagaactgatgcagctacaagccaaaatggcccttagacagtctcggttgagcctatatccaggagacacaatcaaagcgtccatgcttgacatcaccagggatccgttaagagaaattgccctagaaacagccatgactcaaagaaaactgaggaatttctttggccctgagtttgtgaaaatgacaattgaaccatttatatctttggatttgccacggtctattcttactaagaaagggaagaatgaggataaccgaaggaaagtaaacataatgcttctgaacgggcaaagactggaactgacctgtgataccaaaactatatgtaaagatgtgtttgatatggttgtggcacatattggcttagtagagcatcatttgtttgctttagctaccctcaaagataatgaatatttctttgttgatcctgacttaaaattaaccaaagtggccccagagggatggaaagaagaaccaaagaaaaagaccaaagccactgttaattttactttgtttttcagaattaaattttttatggatgatgttagtctaatacaacatactctgacgtgtcatcagtattaccttcagcttcgaaaagatattttggaggaaaggatgcactgtgatgatgagacttccttattgctggcatccttggctctccaggctgagtatggagattatcaaccagaggttcatggtgtgtcttactttagaatggagcactatttgcccgccagagtgatggagaaacttgatttatcctatatcaaagaagagttacccaaattgcataatacctatgtgggagcttctgaaaaagagacagagttagaatttttaaaggtctgccaaagactgacagaatatggagttcattttcaccgagtgcaccctgagaagaagtcacaaacaggaatattgcttggagtctgttctaaaggtgtccttgtgtttgaagttcacaatggagtgcgcacattggtccttcgctttccatggagggaaaccaagaaaatatctttttctaaaaagaaaatcacattgcaaaatacatcagatggaataaaacatggcttccagacagacaacagtaagatatgccagtacctgctgcacctctgctcttaccagcataagttccagctacagatgagagcaagacagagcaaccaagatgcccaagatattgagagagcttcgtttaggagcctgaatctccaagcagagtctgttagaggatttaatatgggacgagcaatcagcactggcagtctggccagcagcaccctcaacaaacttgctgttcgacctttatcagttcaagctgagattctgaagaggctatcctgctcagagctgtcgctttaccagccattgcaaaacagttcaaaagagaagaatgacaaagcttcatgggaggaaaagcctagagagatgagtaaatcataccatgatctcagtcaggcctctctctatccacatcggaaaaatgtcattgttaacatggaacccccaccacaaaccgttgcagagttggtgggaaaaccttctcaccagatgtcaagatctgatgcagaatctttggcaggagtgacaaaacttaataattcaaagtctgttgcgagtttaaatagaagtcctgaaaggaggaaacatgaatcagactcctcatccattgaagaccctgggcaagcatatgttctagatgtgctacacaaaagatggagcatagtatcttcaccagaaagggagatcaccttagtgaacctgaaaaaagatgcaaagtatggcttgggatttcaaattattggtggggagaagatgggaagactggacctaggcatatttatcagttcagttgcccctggaggaccagctgacttggatggatgcttgaagccaggagaccgtttgatatctgtgaatagtgtgagtctggagggagtcagccaccatgctgcaattgaaattttgcaaaatgcacctgaagatgtgacacttgttatctctcagccaaaagaaaagatatccaaagtgccttctactcctgtgcatctcaccaatgagatgaaaaactacatgaagaaatcttcctacatgcaagacagtgctatagattcttcttccaaggatcaccactggtcacgtggtaccctgaggcacatctcggagaactcctttgggccatctgggggcctgcgggaaggaagcctgagttctcaagattccaggactgagagtgccagcttgtctcaaagccaggtcaatggtttctttgccagccatttaggtgaccaaacctggcaggaatcacagcatggcagcccttccccatctgtaatatccaaagccaccgagaaagagactttcactgatagtaaccaaagcaaaactaaaaagccaggcatttctgatgtaactgattactcagaccgtggagattcagacatggatgaagccacttactccagcagtcaggatcatcaaacaccaaaacaggaatcttcctcttcagtgaatacatccaacaagatgaattttaaaactttttcttcatcacctcctaagcctggagatatctttgaggttgaactggctaaaaatgataacagcttggggataagtgtcacgggaggtgtgaatacgagtgtcagacatggtggcatttatgtgaaagctgttattccccagggagcagcagagtctgatggtagaattcacaaaggtgatcgcgtcctagctgtcaatggagttagtctagaaggagccacccataagcaagctgtggaaacactgagaaatacaggacaggtggttcatctgttattagaaaagggacaatctccaacatctaaagaacatgtcccggtaaccccacagtgtaccctttcagatcagaatgcccaaggtcaaggcccagaaaaagtgaagaaaacaactcaggtcaaagactacagctttgtcactgaagaaaatacatttgaggtaaaattatttaaaaatagctcaggtctaggattcagtttttctcgagaagataatcttataccggagcaaattaatgccagcatagtaagggttaaaaagctctttcctggacagccagcagcagaaagtggaaaaattgatgtaggagatgttatcttgaaagtgaatggagcctctttgaaaggactatctcagcaggaagtcatatctgctctcaggggaactgctccagaagtattcttgcttctctgcagacctccacctggtgtgctaccggaaattgatactgcgcttttgaccccacttcagtctccagcacaagtacttccaaacagcagtaaagactcttctcagccatcatgtgtggagcaaagcaccagctcagatgaaaatgaaatgtcagacaaaagcaaaaaacagtgcaagtccccatccagaagagacagttacagtgacagcagtgggagtggagaagatgacttagtgacagctccagcaaacatatcaaattcgacctggagttcagctttgcatcagactctaagcaacatggtatcacaggcacagagtcatcatgaagcacccaagagtcaagaagataccatttgtaccatgttttactatcctcagaaaattcccaataaaccagagtttgaggacagtaatccttcccctctaccaccggatatggctcctgggcagagttatcaaccccaatcagaatctgcttcctctagttcgatggataagtatcatatacatcacatttctgaaccaactagacaagaaaactggacacctttgaaaaatgacttggaaaatcaccttgaagactttgaactggaagtagaactcctcattaccctaattaaatcagaaaaaggaagcctgggttttacagtaaccaaaggcaatcagagaattggttgttatgttcatgatgtcatacaggatccagccaaaagtgatggaaggctaaaacctggggaccggctcataaaggttaatgatacagatgttactaatatgactcatacagatgcagttaatctgctccgggctgcatccaaaacagtcagattagttattggacgagttctagaattacccagaataccaatgttgcctcatttgctaccggacataacactaacgtgcaacaaagaggagttgggtttttccttatgtggaggtcatgacagcctttatcaagtggtatatattagtgatattaatccaaggtccgtcgcagccattgagggtaatctccagctattagatgtcatccattatgtgaacggagtcagcacacaaggaatgaccttggaggaagttaacagagcattagacatgtcacttccttcattggtattgaaagcaacaagaaatgatcttccagtggtccccagctcaaagaggtctgctgtttcagctccaaagtcaaccaaaggcaatggttcctacagtgtggggtcttgcagccagcctgccctcactcctaatgattcattctccacggttgctggggaagaaataaatgaaatatcgtaccccaaaggaaaatgttctacttatcagataaagggatcaccaaacttgactctgcccaaagaatcttatatacaagaagatgacatttatgatgattcccaagaagctgaagttatccagtctctgctggatgttgtggatgaggaagcccagaatcttttaaacgaaaataatgcagcaggatactcctgtggtccaggtacattaaagatgaatgggaagttatcagaagagagaacagaagatacagactgcgatggttcacctttacctgagtattttactgaggccaccaaaatgaatggctgtgaagaatattgtgaagaaaaagtaaaaagtgaaagcttaattcagaagccacaagaaaagaagactgatgatgatgaaataacatggggaaatgatgagttgccaatagagagaacaaaccatgaagattctgataaagatcattcctttctgacaaacgatgagctcgctgtactccctgtcgtcaaagtgcttccctctggtaaatacacgggtgccaacttaaaatcagtcattcgagtcctgcggggtttgctagatcaaggaattccttctaaggagctggagaatcttcaagaattaaaacctttggatcagtgtctaattgggcaaactaaggaaaacagaaggaagaacagatataaaaatatacttccctatgatgctacaagagtgcctcttggagatgaaggtggctatatcaatgccagcttcattaagataccagttgggaaagaagagttcgtttacattgcctgccaaggaccactgcctacaactgttggagacttctggcagatgatttgggagcaaaaatccacagtgatagccatgatgactcaagaagtagaaggagaaaaaatcaaatgccagcgctattggcccaacatcctaggcaaaacaacaatggtcagcaacagacttcgactggctcttgtgagaatgcagcagctgaagggctttgtggtgagggcaatgacccttgaagatattcagaccagagaggtgcgccatatttctcatctgaatttcactgcctggccagaccatgatacaccttctcaaccagatgatctgcttacttttatctcctacatgagacacatccacagatcaggcccaatcattacgcactgcagtgctggcattggacgttcagggaccctgatttgcatagatgtggttctgggattaatcagtcaggatcttgattttgacatctctgatttggtgcgctgcatgagactacaaagacacggaatggttcagacagaggatcaatatattttctgctatcaagtcatcctttatgtcctgacacgtcttcaagcagaagaagagcaaaaacagcagcctcagcttctgaagtgacatgaaaagagcctctggatgcatttccatttctctccttaacctccagcagactcctgctctctatccaaaataaagatcacagagcagcaagttcatacaacatgcatgttctcctctatcttagaggggtattcttcttgaaaataaaaaatattgaaatgctgtatttttacagctactttaacctatgataattatttacaaaattttaacactaaccaaacaatgcagatcttagggatgattaaaggcagcatttgatgatagcagacattgttacaaggacatggtgagtctatttttaatgcaccaatcttgtttatagcaaaaatgttttccaatattttaataaagtagttattttataggggatacttgaaaccagtatttaagctttaaatgacagtaatattggcatagaaaaaagtagcaaatgtttactgtatcaatttctaatgtttactatatagaatttcctgtaatatatttatatactttttcatgaaaatggagttatcagttatctgtttgttactgcatcatctgtttgtaatcattatctcactttgtaaataaaaacacaccttaaaacatgaacaagccaaaactgtgtgcagacaaaaaaaaaaaaa

SEQ ID NO: 622 - DNA, 1560 bp, Homo sapiens
gactttgctccagcagcctgtcccagtgaggacagggacacagtactcggccacaccatggggcgcccactgcacctcgtcctgctcagtgcctccctggctggcctcctgctgctcggggaaagtctgttcatccgcagggagcaggccaacaacatcctggcgagggtcacgagggccaattcctttcttgaagagatgaagaaaggacacctcgaaagagagtgcatggaagagacctgctcatacgaagaggcccgcgaggtctttgaggacagcgacaagacgaatgaattctggaataaatacaaagatggcgaccagtgtgagaccagtccttgccagaaccagggcaaatgtaaagacggcctcggggaatacacctgcacctgtttagaaggattcgaaggcaaaaactgtgaattattcacacggaagctctgcagcctggacaacggggactgtgaccagttctgccacgaggaacagaactctgtggtgtgctcctgcgcccgcgggtacaccctggctgacaacggcaaggcctgcattcccacagggccctacccctgtgggaaacagaccctggaacgcaggaagaggtcagtggcccaggccaccagcagcagcggggaggcccctgacagcatcacatggaagccatatgatgcagccgacctggaccccaccgagaaccccttcgacctgcttgacttcaaccagacgcagcctgagaggggcgacaacaacctcaccaggatcgtgggaggccaggaatgcaaggacggggagtgtccctggcaggccctgctcatcaatgaggaaaacgagggtttctgtggtggaaccattctgagcgagttctacatcctaacggcagcccactgtctctaccaagccaagagattcaaggtgagggtaggggaccggaacacggagcaggaggagggcggtgaggcggtgcacgaggtggaggtggtcatcaagcacaaccggttcacaaaggagacctatgacttcgacatcgccgtgctccggctcaagacccccatcaccttccgcatgaacgtggcgcctgcctgcctccccgagcgtgactgggccgagtccacgctgatgacgcagaagacggggattgtgagcggcttcgggcgcacccacgagaagggccggcagtccaccaggctcaagatgctggaggtgccctacgtggaccgcaacagctgcaagctgtccagcagcttcatcatcacccagaacatgttctgtgccggctacgacaccaagcaggaggatgcctgccagggggacagcgggggcccgcacgtcacccgcttcaaggacacctacttcgtgacaggcatcgtcagctggggagagggctgtgcccgtaaggggaagtacgggatctacaccaaggtcaccgccttcctcaagtggatcgacaggtccatgaaaaccaggggcttgcccaaggccaagagccatgccccggaggtcataacgtcctctccattaaagtgagatcccactcaaaaaaaaaaaaaaaaaaaaaaaaaa

SEQ ID NO: 623 - DNA, 2096 bp, Homo sapiens
cccagtcttgctgtctttcaatggggcagccactgctcagttgctgccattcagaaatatgaacccagtatcaccagaacttttgatttttcaagagaaaccaagattccagatttgtaggtgatatcttccatttttcagataaaacaaaggaaccagaaccacatccactgatcggatttgcctggggaggaggggtgctctctcctttgatcttctcttctggaagagatggaccaaaagcctctccagcaataatccgaaatgattcttgaagactatctttccagcttgtcacatatgcaaggtgtatttacaggagacagcaatggaaacctggtcagttgagcaggtctgcagttggttggtggagaaaaatttaggagagctagttcatagatttcaagaggaagaagtaagtggggccgctcttcttgcacttaatgatcggatggttcagcaactggtaaagaaaattgggcaccaggctgttctgatggatttaattaaaaaatacaagcagaacactcaaggactgaagtccccagaaaaccccaaaaaggcagccctggtcatgcaaacagaagcagctcgagattacagggatgaagagtcctccagtccagccaggcatggggagcagatgccatctttctatccagctgaaaaccttgataatggactaattgaccaaagagtattgaaacagagaagaaatgtgaaacaaattctagcaagaagcaaagcattacagtggacgaagtcctatgttttaccagagtttccctatgatgtcaaatgcatgttagcagagcagaagtgcccggatcacagcatgaggataaggatcattgagtttctccaggccgacatgactaagtatctggaaggctcactgtaccccagcacccagcagtacaatgacgtggttaatgccctgctgcaggcccaccctttcctggatgaggatggctgtggcttctttttatggaaacgagccctcaaagatcgctttaaatatgttcgaagacccatagaagatgatgagcaagtgattagaaataagtgtaaatttggacaccgaagaggccagacaaggaaatctcttgctgatataagatttgatgaaattaaacttgtccagataaaagaagaagctgtttgttttgattctgagctagatgaacatattaagtggttccagcaagaatacgtgaaaacagaaaaggactggagagaaattgacaagagaatgagccaaactttggaaataagaagaaagatgattggcagccgaacacctctgaaggacattcttaaactgtttcctttcttgaagtgcccttatcagatgttcagagaattccaacttcttacaagaacagatatttataagaaaacaaggcacattttggaatcctattcagaaaatatactgacttctttttcagtggtggacaatccaatcaatattgtattgcaagaaaaaatgaaacattacacagatgaagacatgttgaaatacatgaagatgacagccacatgtttactcctcccagatgtttttggggatgatcccagcctttttgtcatcatgaatgaacaggtgcaagtgtccacacctgtgttggaagttaaaaaccctttcaacatggaggtctgcgaattttctttatatttagaaagggagaggctcacaaaggtggacgactgtgttacagccttggctgcgctagtagctgcctttcatgtatttaggattgagtgtccaagaagactgtcccaaactttcaacttcctagaaacgctgattttcgatatgcacagtccttattttccttctttgaaagaaaaggaaaacgaagtaggatttcagcacccactcacttaatagcatgccaaatattgtactggaatttacctctgggaaaactgaagcttcataagaaattgttttgatttagggttgtggtagaggtaggtatgagaaaatcatcttgtatttatagatgctaatgaatttcaatgctttctatctttacacttagatattaagttctttgtgaaattctgtaataaaattctacttcattaaa

SEQ ID NO: 624 - DNA, 5606 bp, Homo sapiens
gggcctctgggggcggccccggggcgggccacgctggtgtgagggctgcaggcgcagctccggagcgcctagagcgcggcgcggggcgggagcttggtggagcaggagcggctgggcatcctcctgagactccggggtcagacgcccactccagcgctttctgcgcagcacaggcaccctcgcctgtcacgcctccctctcctcttcccgtctcccagcgtggatgagggcgcctgcagatcccggctagggcacggaccgcctaggccgagatttctttaaagactcgtgcagcacatcattatcgctggatgcccggacatgtaatacacctgacagcatgtgaagtgctcagaatggggcaggatgtcacctggaatcagcactaagtgattcagactttccttacttttaaatgtgctgctcttcatttcaagatgccgttgcagctctgataaatgcaaactgacaaccttcaaggccacgacggagggaaaatcattggtgcttggagcatagaagactgcccttcacaaaggaaatccctgattattgtttgaaatgctgaggacgttgctgcgaaggagacttttttcttatcccaccaaatactactttatggttcttgttttatccctaatcaccttctccgttttaaggattcatcaaaagcctgaatttgtaagtgtcagacacttggagcttgctggggagaatcctagtagtgatattaattgcaccaaagttttacagggtgatgtaaatgaaatccaaaaggtaaagcttgagatcctaacagtgaaatttaaaaagcgccctcggtggacacctgacgactatataaacatgaccagtgactgttcttctttcatcaagagacgcaaatatattgtagaaccccttagtaaagaagaggcggagtttccaatagcatattctatagtggttcatcacaagattgaaatgcttgacaggctgctgagggccatctatatgcctcagaatttctattgcattcatgtggacacaaaatccgaggattcctatttagctgcagtgatgggcatcgcttcctgttttagtaatgtctttgtggccagccgattggagagtgtggtttatgcatcgtggagccgggttcaggctgacctcaactgcatgaaggatctctatgcaatgagtgcaaactggaagtacttgataaatctttgtggtatggattttcccattaaaaccaacctagaaattgtcaggaagctcaagttgttaatgggagaaaacaacctggaaacggagaggatgccatcccataaagaagaaaggtggaagaagcggtatgaggtcgttaatggaaagctgacaaacacagggactgtcaaaatgcttcctccactcgaaacacctctcttttctggcagtgcctacttcgtggtcagtagggagtatgtggggtatgtactacagaatgaaaaaatccaaaagttgatggagtgggcacaagacacatacagccctgatgagtatctctgggccaccatccaaaggattcctgaagtcccgggctcactccctgccagccataagtatgatctgtctgacatgcaagcagttgccaggtttgtcaagtggcagtactttgagggtgatgtttccaagggtgctccctacccgccctgcgatggagtccatgtgcgctcagtgtgcattttcggagctggtgacttgaactggatgctgcgcaaacaccacttgtttgccaataagtttgacgtggatgttgacctctttgccatccagtgtttggatgagcatttgagacacaaagctttggagacattaaaacactgaccattacgggcaattttatgaacaagaagaaggatacacaaaacgtacccttatctgtttccccttccttgtcagcatcgggaagatggtatgaagtcctctttggggcagggactctagtagatcttcttgtcagagaagctgcatggtttctgcagagcacagttagctagaaaggtgatagcattaaatgttcatctagagttaatagtgggaggagtaaaggtagccttgaggccagagcaggtagcaaggcattgtggaaagaggggaccagggtggctggggaagaggccgatgcataaagtcagcctgttcaaagtgctcagggacttagcaaaatgagaagatgtgacctgtgccaaaactattttgagaattttaaatgtgaccatttttctggtatgaataaacttacagcaacaaataatcaaagatacaattaatctgatattatatttgttgaaatagaaatttgattgtactataaatgatttttgtaaataatttatattctgctctaatactgtactgtgtagtgtgtctccgtatgtcatctcagggagcttaaaatgggcttgatttaacattgtttttgtgttatttttgcttgaaacaacgcacacattttcaacaaccaaaaaatgacaatttctagtttagttaatttctacaaatcatcttatgttattagcaaggttaagacatcttttttaaaaaaattatagcttctaccaagagaaacactcaatttttctagagatttgcctctatcttcctttcctcagtcttcccagactgctatcaagctgtgtaaaaatttactttcactggaccctaaattattgtctctgctatctgactgccagtaattagtgcagaaaactaagacaggatgatacaggtttgaggggctggggagtgggaggggggagaaaaggaatgtatttaaacaatttccgatgcccatgatgagtttaaaaaccagcattgacaccatccccaaaattaaggctgtcgcttattgaatccacttgtgtccaacctcccaggattgttttatcctaatgtcacctgtatattcatttgaaaggacttggccctgttcttgggtcttcccgttacctgccccctgggtggtaagtttcctcctttctcaaccttccacgaggaggaaagaagtgtgcagtcattccacatggcctgttggaaggcctggggagggaactttgggtttgggacagatttttttttttgtttttggtatcattcacagcatacgatttttactctctccatcttcaccataagacagataatttggggttgctataatgctgtcacacatctcaaagtacattcaaatcttaaaaagaaattctcgtacttttgccatgttgatactgttcagcaaacaagctaccaggaactgtgaggctttgtcatttagcattagactttaaacaagaattaaaatcatgtgctgtatttttaaaatctagccaaattaaatagtacatgagaaattcagagtattagacagttttaaggcattcaactgagaaaactttatttgtcaaagtcagaaaacattttcatcttattgagagatatgtttttaaacttttatcatcatttgtaaatgtggaagttggtggattgctgtgtttttgcatgattagcatgggagtctgttggagcaagaggaacatgcttgttttgaaaactcgagatgatgagggtggtacatgcagtgtgttctctctttattggcttctaaaccagttttgtcctttaatgcatgtcaaatatttctcccatgcttctcttagcagaaaagtttttacctataagacagggcaccttttaactctaaaactagtgatactcagtgacatagactttgtcttataaacattttttcattttttattttgaaaaattgcaaatctacagcaaaagtaaaacagtagagtgaacaccatgtaaccctcacctggtgttaacattgtaccctatttgctttaagttgtatgtatttctgaacttggcaaaattggaaattaaaatttttaaaaattacaaatatacaaagttatttatcttagcacatttattatgtgtgactgcatctgatttatatttaaattggcaggttttgagggatttttttcttcatcataaatgtaaacataggattttagagtctatttccccaagcgccacattataactgtaaacttaccatcttctatgtagctgtgatatctcatctttctaaaatggaacttgttaaaaagtgttcaaacactatccctaatgcctgcggcagaatttatatacgatccattcattggggctcaaagtatcttttagacttttaaggacaatttacagcaaatgaaatttatgatgctgtgacaagaaatttaaagaatcaaaacgatggtttgaaaaggaaacctatgatacatgcaggagaagcaaaacccaagtgattggtgagaaatatagaaattatttaaattactttatagtaattattaaacactaatttttgtactgtcattgaaggtgttttatagagaaatctgagaaatcacattcacaaattagaagtcaaacatggccaggcacagtggctcacacctgtaatcttcaggatttcaagaccagcctagccaacatgacgaaaccccatctctactgaaaatagaaaaaaaaaattagccaggcttgcacctgtaatcccagttacctgggaggctgaggcaggagaatctcttgagcccaggaggcggaggttgcagtgagctgagatgccaccaccacaccagcctgggtgacagagtgaaactcgtatctccaaacaaacaaacaaaaagtccttaaacatatgtgaacaaaaattttgtgatggaaggattctagttaatgagtattgcatcaagatttacatctttcttactaaggaaaagagttaataaaaattgttctttattttacaggcagttactgaggctcttcccagatctcagtaaacagccactcagccttgaaaatggagtgttgttgtttctaaacatatatttatgtcatttattaagtacagttcacttaaataacataagtagattttctcttgtagtgatttgggtaggaagaggccatgtttcagttcgttttctctgtagggtcgattgaattggaccttttcagttgttcagaaaaataaaaataatttctcatattaaatacagacgctcctcaacttatgatgtgggtaggtcccagtaaacccattataatttgaaaatatcacattgaaaatgcatttaatatctcttacctgaaatcataacttagccaagcctaccttaaatgttctcagaacatttagcctgcagttgggcaaaaccatttaacacaaagcctattttataatgaagtgttgaatagctcatgttatttactgaatactgttgtgaaagtgaaaaacaatgattgtatgggtactcaaagtataatttctactgaatgcatatcacttgtgcactgttgtaaagctgaaaaaccgttaagcctctacgatttttaagtaagttggggaccatcagtttaaaataaatgcaatactatttcatgataaacatggtcactgtaagttttactcttttgaatgagggtgcgacagaatgcagttagaatcagttcatatcaccattaaaatcatccattcagaaaccaaaaaaaaaaaa

SEQ ID NO: 625 - DNA, 1487 bp, Homo sapiens
gaatccacttgccggaagtgcctttccagtggacctgggctgttgttgcggttgttttccttctctccgtgcaacgctggcaagtctcaaagtcgccacagaaacatgcccctgattcagtgcctctgcttagctgtaacatgttaatcagaactacctggcatcttcctgaacaagactttcaataggggccagtatgcttcgcttcatccagaagttttctcaagcatcttcaaagatactgaagtactctttcccagtgggactaagaaccagcagaacagatatactttctctcaagatgtctctccagcaaaacttttccccatgtccaaggccttggctttcctcatcatttccagcgtatatgagcaagacacagtgctatcatacatccccctgcagctttaaaaagcagcagaagcaagcacttctagccagaccctcaagcaccatcacttacctaactgacagcccaaagccagcattatgtgtaactctggcaggactaatccccttcgttgctccaccactggtcatgctgatgacaaaaacttatattcccatattagcttttactcagatggcttatggagccagtttcctatctttcttgggtgggatcagatggggttttgctctaccagaaggtagtccagccaaaccagactaccttaatttagctagcagtgcagctcctcttttcttttcatggtttgccttccttatttctgaaagacttagtgaagccatagtcacagtaataatgggtatgggagtagcattccaccttgaactttttctcttaccacattatcccaactggtttaaagccctgaggatagtagtcactttattggccactttttcatttataatcactttagtagttaaaagtagttttccagaaaaaggacataagagacctggtcaagtataaaaaatataaaagtctgggaagtgaggagcacctctgcccagctgctgccccgtctgggaagtgaggagcgcctctgcctggccgcctgaccatctgggaagtgtgacaagcgcctctgcccggccgctgtgcaaccttccacgtgtgaagtgacagccttgtgtgtgatcttttctgtcttccccaagtttgcattttcgacattaaagtttactttttagttaaaagttttaaaaatatatatatataaatacactgtagataacatttgtatgccagctacacctttttctacttctgtttggctttttttccccacaccaatggtaatttatcttcacagattgttcttcatttctagaaattgttacttcatggtaattacttgagcaaaagcttgaaaatccctgacaagtacttttcatctcatagtatattagttttcactcagtcattttatgaataatatagttatccacttaaacatttcaatattttaaccatcttgaaaattaaagattaaaaatccccaaaaaaaaaaaaaaaa

SEQ ID NO: 626 - DNA, 3595 bp, Homo sapiens
tttggaaacgtcacactgtggaggaaaagcagcaactagggagctggtgaagaaggatgtctcagcagtgtttactaggcctccaacactagagcccatcccccagctccgaaaagcttcctggaaatgtccttgttatcacttcccctctcgggctgggcgctgggagcgggcggtctcctccgcccccggctgttccgccgaggctcgctgggtcgctggcgccgccgcgcagcacggctcagaccgaggcgcacaggctcgcagctccgcggcgcctagcgctccggtccccgccgcgacgcgccaccgtccctgccggcgcctccgcgcgcttcgaaatgagggtcctgggtgggcgctgcggggcgctgctggcgtgtctcctcctagtgcttcccgtctcagaggcaaactttttgtcaaagcaacaggcttcacaagtcctggttaggaagcgtcgtgcaaattctttacttgaagaaaccaaacagggtaatcttgaaagagaatgcatcgaagaactgtgcaataaagaagaagccagggaggtctttgaaaatgacccggaaacggattatttttatccaaaatacttagtttgtcttcgctcttttcaaactgggttattcactgctgcacgtcagtcaactaatgcttatcctgacctaagaagctgtgtcaatgccattccagaccagtgtagtcctctgccatgcaatgaagatggatatatgagctgcaaagatggaaaagcttcttttacttgcacttgtaaaccaggttggcaaggagaaaagtgtgaatttgacataaatgaatgcaaagatccctcaaatataaatggaggttgcagtcaaatttgtgataatacacctggaagttaccactgttcctgtaaaaatggttttgttatgctttcaaataagaaagattgtaaagatgtggatgaatgctctttgaagccaagcatttgtggcacagctgtgtgcaagaacatcccaggagattttgaatgtgaatgccccgaaggctacagatataatctcaaatcaaagtcttgtgaagatatagatgaatgctctgagaacatgtgtgctcagctttgtgtcaattaccctggaggttacacttgctattgtgatgggaagaaaggattcaaacttgcccaagatcagaagagttgtgaggttgtttcagtgtgccttcccttgaaccttgacacaaagtatgaattactttacttggcggagcagtttgcaggggttgttttatatttaaaatttcgtttgccagaaatcagcagattttcagcagaatttgatttccggacatatgattcagaaggcgtgatactgtacgcagaatctatcgatcactcagcgtggctcctgattgcacttcgtggtggaaagattgaagttcagcttaagaatgaacatacatccaaaatcacaactggaggtgatgttattaataatggtctatggaatatggtgtctgtggaagaattagaacatagtattagcattaaaatagctaaagaagctgtgatggatataaataaacctggacccctttttaagccggaaaatggattgctggaaaccaaagtatactttgcaggattccctcggaaagtggaaagtgaactcattaaaccgattaaccctcgtctagatggatgtatacgaagctggaatttgatgaagcaaggagcttctggaataaaggaaattattcaagaaaaacaaaataagcattgcctggttactgtggagaagggctcctactatcctggttctggaattgctcaatttcacatagattataataatgtatccagtgctgagggttggcatgtaaatgtgaccttgaatattcgtccatccacgggcactggtgttatgcttgccttggtttctggtaacaacacagtgccctttgctgtgtccttggtggactccacctctgaaaaatcacaggatattctgttatctgttgaaaatactgtaatatatcggatacaggccctaagtctatgttccgatcaacaatctcatctggaatttagagtcaacagaaacaatctggagttgtcgacaccacttaaaatagaaaccatctcccatgaagaccttcaaagacaacttgccgtcttggacaaagcaatgaaagcaaaagtggccacatacctgggtggccttccagatgttccattcagtgccacaccagtgaatgccttttataatggctgcatggaagtgaatattaatggtgtacagttggatctggatgaagccatttctaaacataatgatattagagctcactcatgtccatcagtttggaaaaagacaaagaattcttaaggcatcttttctctgcttataataccttttccttgtgtgtaattatacttatgtttcaataacagctgaagggttttatttacaatgtgcagtctttgattattttgtggtcctttcctgggatttttaaaaggtcctttgtcaaggaaaaaaattctgttgtgatataaatcacagtaaagaaattcttacttctcttgctatctaagaatagtgaaaaataacaattttaaatttgaatttttttcctacaaatgacagtttcaatttttgtttgtaaaactaaattttaattttatcatcatgaactagtgtctaaatacctatgtttttttcagaaagcaaggaagtaaactcaaacaaaagtgcgtgtaattaaatactattaatcataggcagatactattttgtttatgtttttgtttttttcctgatgaaggcagaagagatggtggtctattaaatatgaattgaatggagggtcctaatgccttatttcaaaacaattcctcagggggaacagctttggcttcatctttctcttgtgtggcttcacatttaaaccagtatctttattgaattagaaaacaagtgggacatattttcctgagagcagcacaggaatcttcttcttggcagctgcagtctgtcaggatgagatatcagattaggttggataggtggggaaatctgaagtgggtacattttttaaattttgctgtgtgggtcacacaaggtctacattacaaaagacagaattcagggatggaaaggagaatgaacaaatgtgggagttcatagttttccttgaatccaacttttaattaccagagtaagttgccaaaatgtgattgttgaagtacaaaaggaactatgaaaaccagaacaaattttaacaaaaggacaaccacagagggatatagtgaatatcgtatcattgtaatcaaagaagtaaggaggtaagattgccacgtgcctgctggtactgtgatgcatttcaagtggcagttttatcacgtttgaatctaccattcatagccagatgtgtatcagatgtttcactgacagtttttaacaataaattcttttcactgtattttatatcacttataataaatcggtgtataattttaaaatgcatgtgaatatctttattatatcaactgtttgaataaaacaaaattacataatagacatttaactcttcaaaaaaaaaaaaaaaa

SEQ ID NO: 627 - DNA, 10788 bp, Homo sapiens
atttattggtctgcaaatccggagaccttgcggcctcactggtcctccttccctctgagctatctccacacccagccttcgatcagaaggagatttagaagcagagctgcccgcagcgaatacttttaatgcccgggccgggaagaaagcgggttaggatctgatcccgctgagtagaggacccaggagcctcccgccccgcgtgctctgtagcgcgggggcgcgctgcgcgctgcgcctgggcggctggcgggggcggcgtgggcgcggtgatgcaggtgtgacacccgccggcgcctgcctccgcccggatcgcccagctccgcgttagccggagctgcacgcggggctgccggggcggacgctgctctgcctgcatccggaggcggccgccagcggatttgccacccagggatgatagtctacttgggaatgatggcgggcgccttcatcctgggaggcctggctgataagctgggaaggaagcgagtcctcagcatgtctctggccgtcaatgcctccttcgcctccctctcttccttcgtgcagggatatggagccttcctcttctgccgactcatctcaggcatcggtattgggggtgctctaccgattgtttttgcctatttttctgaattcttgtctcgggagaagcgaggagaacacctcagttggctgggcatcttctggatgactgggggcctgtacgcatctgccatggcctggagcatcatcccacactatggctggggcttcagcatggggaccaattaccacttccatagctggagagtgtttgtcatcgtctgtgctctgccctgcaccgtgtccatggtggccctgaagttcatgccagagagcccaaggtttctgctagagatgggcaaacatgatgaagcctggatgattctcaagcaagtccatgacaccaacatgagagctaaggggaccccagagaaagtgttcacggtttccaacatcaaaactcccaagcaaatggatgaattcattgagatccaaagttcaacaggaacctggtaccagcgctggctggtcagattcaagaccattttcaagcaggtctgggataatgccctgtactgtgtgatggggccctacagaatgaatacactgattctggccgtggtttggtttgccatggcattcagttactatggactgacagtttggtttcctgatatgatccgctattttcaagatgaagaatacaagtctaaaatgaaggtgttttttggtgagcatgtgtacggcgccacaatcaacttcacgatggaaaatcagatccaccaacatgggaaacttgtgaatgataagttcacaagaatgtactttaaacatgtactctttgaggacacattctttgacgagtgctattttgaagacgtaacatcaacagatacctacttcaaaaattgtaccattgaatcaaccatcttttacaacacagacctctacgagcacaagttcatcaactgtcggtttatcaactccaccttcctggagcagaaggagggctgccacatggacttggagcaagataatgacttcctgatttacctcgtcagcttcctgggcagcctgtctgtcttacccgggaacatcatttctgccctgctcatggatagaattggaaggctcaagatgattggtggctccatgctaatctctgcagtctgctgcttcttcctgttttttggcaacagtgagtctgcaatgatcggctggcagtgcctgttctgtgggacaagcattgcagcctggaatgctctggatgtgatcacagtggagctgtatcccaccaaccagagagcaacagccttcggcattctcaatggattatgcaaatttggcgccatcctgggaaacaccatctttgcttcttttgttgggataaccaaagtggtccccatccttctggctgctgcttctctggttgggggtggcctgattgcccttcgactgccagagactcgagaacaggtcctgatgtgaacaacctatgggaaaaggaaaggtcgagagaatcttgtccaggacactgaaatgcatccacacttcctgcctatcacggtccggaggacaccttggatagcacgggaggagaagttgactttgtgacccctagtttaggacccacttcagctgtcaatatgtttgtaactcaggtgactgatttgggggtgccctgagccacccttagaatcacagagctgcgtgtttaacttcaagtcttcccagtccaaggcagggagaggattctccagtgagtgcacacactatgcgaggagcaagcatttctctaagtcaagtgcaaggacttaacttgcgtttgaaaaggaattagagggtcagaaacacccaggttcctccagaaagctccttggagcccaacaacttaacaaatcaacttggctggaagttagagtcattatatgaagattgggcttgaagtatatatttttgcatttaaaagtatcacctatcatattttccactcgaaaattgacatagtagcattgaggatactctgatctagaaagccaagtatttgagcaacatctatagagatctacttttctcctatgtctcctaggctttccatgataattaggtaatacatttaagaaggatatttatttctgttttgctctattcaaagaaacggaatgggatagttattctgtaaactaagtttgtatataactttatttgggtttaatttccacaactggtatctgcaaatattgccagcattttagccatattttgggagaacttggtgtttgaggtcccaggaaatgaggtctgatcaaatgaaatgcaagcacaatttcttacagccatttaactttctgttgggaggatgaattaacaaactcacattgtgcagtctgcttaatccaggcacttttctttgtgcaggtgtagtgagtagttacttctctcccttacacagatgacttgtgaaactcaagctcaccatcttcagtgctggcattttactttgccactacccaaaaacaatgtgagatgtgttcagtggcctctggtactctttgcaggcaagaatcaaacaacatggggactgagggaaggatggggaagtgtagccacagttcttccaaatgtaaatactttttgtttgttctagtggtaaaatgcaaatgcaatccatatttgttaggatggtcaggtctcatgagaaatctatgctatgtgtccagagcttttgaaacagagtccattggagtgggagttagggagtgtagtggatgccaaatatgtttttcttcagtgcttaagagaactgtttcctgaagtccagctttgaacataaacaggggtgtgggttgggggaggagcttaggacaaacctctctgatgaaggtcagcaatagactgaagtcttgactgcatggaagaggaaaaacatcagaactgtctgacaatggaggggacagtgagctacgcacaactgccagcggaggtgaacttgcacctgcccaggccggatgaacatcagcctgcaagaactagttgtttgagttgatttgcagtgctctcaatgggcaagtgccacattttccctggcagagatctccaaaaatttaaaacagaataataatggctatatcgagtgttttctcagtattggagaaatgcttaggtcctatgatagcttcgggacatctttctgtaattttcctcaattaacgggttggtaggggtaaatcttatgacacctttccaccgtcgatttgagatcagttttaatggttaaaatgtttactctccttctgtcaaccctcacctttttatttacacccctccctttttttctgtacagggagagaagacatattgactctgactggacaccctgattcctccaaatatatataccactgtgtattaatctttctctcagtgttttataggagtactaacatttattgctctgtcaataatgaaaggctcgatgtaatatagctgtaatttactttccatatgaatacagtggctaggttcataaaagagaattgtgtgagtctgggattaccacatctaaaacattattctttaatgggataatacaattcattgagcagctaccacttaaaaaacttgcaggacagttagagcctgcatttctagttaagatggatcttgtaaatttaaaattggattaacattggagtgctggggtggctgcaataatttgggggctaactccatttggtttccaagatctcacttctgcattatctttatggctctttaaaccagccacctagccaatcaagggcaattcccatctcatccatcactcaggtctttgtaaagggtgcagccaagctctgcagacttttgcaggattgtctagcctgagtaccgggctacttcttaaatgccgtcactcctgctgagataaatgcgtctttaaaaatagtctctgtggcaggtcactgggggacaatgtacagcattctggccatccacttctttttcacttcatgttctaccccaagagactcccgatgtcggctgtggagggttaaagggatgaggctttcctttgtttagcaaatctgttcacagttcttgatgatgtattttatgatgcccagcttggaaatagttgctttccatagtctcaactgtattgtgtcatctcctgatgctgatttttgatcttttgttttattaaaaataattagtgaaagaggtgtgcctatctgtgaagtttgtagtacatcatcctgaggtcatgtaacaagtaaaccccaacccagcgttccctcctacgttgtgttagttcattaaaactaaataataaaaataactgtaagaaaaccttaaggactggggttagagattattttcaggcactaaggtctcttctgtattccaaaattgattgaatcagctgggagaaacattgagaatcgcttccttcaacttttattttgcaacatggggaccttgagaggttaaacgatgtggcccagattacatgtaatgtgaggagtgggcgagaaggcctaaggtgatgctctcatgacagttctggggaagcctgcagtttggggaatgggacaatgtgacaaatactcgccattccctgagaccattcattgactattcccttgatggctttactataatgagaggaagcatcagtttaaacataaaaagattagtatttatccatccatttattcattcagcaaatccttattgagccctgaccatgggccagtctctctgccaagccctggggacacagtgatgaaaaaactggccacagtttctgcttcctgcctcattccacttgcagtgagcggatattaaattggccataaacaccgagtacgatgaccttacaatccgcaaactgcacctttcatgtgtaaaaggattgctactactttacttgtcagctgtggatttccaaatgtggtggctccctcttatttttttttctttgaggagtgtaccaattttttatctttataaaccaggtaagggaaatgatgcccttgcccattttctacagacctaatcgatttttacctaatcagttttacagaaagggttacatggaagaagagataggggccaggaatgcaagagggacattggtgagtggggtaagaatccccgtagccctgggaaaggtgtctccacttccacatctggcttttctagggggcatctgtgctaactgacctgggattatgttggatggcatatgactgcaaattcaaagaaaccaatttataataagtttatagtaagttaaaggtttgttttactctcatgtgaagggaatctggaggaaggaaagccagggctggagtggctgcctttgatcatgggagcacactccttctgcccgatcattgggagcacactccttctgcctgatcgttgggagcacactcctgcctgatcatgggcgcacgttccttctgcctgatcgttgggagcacactccttctgcctgatcatgggagcacactccttctgcctgatcattgggagcacgctccttctgcctgatcgttgggagcacactctttctgcctgatcgttgggagcacaccccttctgcctgatcattgggagcacactccttctgcctgatcatgggcacacgctccttctgcccgatcatgggcacacgctccttctgcccgatcgttgggagcacactccttctgcccaatcattgggctcacgctccttctgcccgatcgctgggctcacgctccttctgcccgatcttgggcgcacgctccttctgcccgatcgttgggcgcacgctccttctgcccgatcgttgggcgcatgctccttctgcccgatcgttgggagcacgctcattctgcccgattgttgggagcacgctccttctgcccgatcgttgggcgcacgctccttctgcccgatcgttgggcgcacgcttcttctgcctgatcgttgggcgcacgctccttctgcctgatcgttgggcgcacgctccttctgcctgatcgttgggagcacgctccttctgcctgattgttggaagcacgctccttctgccttcagactccttgatttttagtgcagtttccatcactgaggctgcctcatgggctgagatggctgttgaagcactgaacctcacatccacaattcaggcaggaagcagaaggaagggcaatgggcaaaggggctgtgccttgcagccgatccagcctccctttgctgcagaggaggcagggaaatgcggtatttactgggaacattgctgcccctcctccaaattgagggtcttggctcgaaggacaaaagccagaaaggataggtggattagtgcttcttaaacttttgcgtgcatcagaatcacccagaaagatgttaaaactcactcttcaaggccccatccccagagattcggattctggggatttggaatctggggtggggtctgaagaatctgcattttttaacaaactcccaggtgacatagatggcatcaattctcaagccatattttgagtagcactgacactcttccaataggtggtactttgacttgtcagggaagttctattgctctgataacttaaaaccaacccaaccagaagctcacaaaaactagcagcctgtgaaaaatgatcaccattttcctagagctccgagacaactagtggtagtgcaacagtaacccaaaaatgtcaatgaaaatatttccttccccagaaactgcttggtttcactcaggtcctgtccttatgggcctgtgtctggttgcagggcttgaagtatttcggaagctcagcagaggttgaaccctttcccctgggggttggtgatctttgttttggccatttccacctggtgaagattttcatagacaaatatgcttgtggcatcctgtaattcattgtgccttatgatggacctctgattctataagcttccccctagctagggatgcacgggggtgatcaagacatgactagatgtgaacctgacctgcagacagtccacctgaacgtgcctggaaatgtctcccgaaaaggatgaaaagcctcctcctttagacaaggaagacagagtggagcaaatttctctacatagatctcattcgaaaacaaatttacagaatgcagaatggctactgtgtgtcttgtgctatgctaggtctctctctctctaagtggactctgaccctgtccaaaacattgtgcttttgcatgtagctgtgtcgcatttaggcccagctctaagaaccgtttggaaataaatcacatagagcctttgattgtgaggcaggcttaaagtacattttgtttgatttgcagaggcatggtgaggaatttatatgcatggctgttgtggcagcagcgagatttccaaaaagatgaatgatgaaatgaaacagactgaagctatctcacaaatgttaaatggagaaataaaagttgttatagtcattgctaattacagaatgagcaagagatttatttagcaggaccatactatgccccctggaaggttcagtttatgagctggagcacaaggatttactgtcatttcacctgaaaacacacatttagctgtccatttacctttaatcctacaggcttaaaatactttaaaatttcagagaccattaatatgtattcctttagaaagcaaaggtctttcagaagctgtcctctaccaaagttaatgtggtcaccacatttgatgattttgctaggtagggaggtttatttaatcacagctactgtcactcaggaggatgagccatttaaaaatggtggccctgtcctccacttcttacctaccatatataatctcagtaattcagatttctctaaatcagcattagtgatcatttcaatagggtatgaacaaaaggcctataaaaatagctttccaattcgccaccaaaaatgcaaaaatgacaagtaagtgaggtaacgcatgagctaaatagcttgatttagtcactctaaaatgtgggtgtgtatatatacatacatatatatacacacacacattatgttatacaccataaatatatagaagttttacttgtcaattaaaactataaataaagtggctttccagaaaaattagatattggactctatcacaaaggaattgcataaaaatacttacaaacataactataagcaattgatgagcaaattacaaatgactgttttttattaaaacattcctccaaaagaacggcaaagcaaatcccatagacacccaaaatactaaaagtgacaaaacaatacttctttaaaaatgtattttatgatctatttattgatattctaatggttttaagaaggataattttccaaaacctaaatgctacacattttacagtggcaatatcaaccttatcatgagctaaagatttgcaatcagaacattggtagagtgcattgctgagttataacaagtgtctcaggacgaggatatttggtaggtatccttaaatatatagatgcttaccagtaggtttaatagaagatttctgaaaggtagcgcaagtttttatttcattatttttatttttatttttttgagacagagtctcactctgtcatctaggctggagtgcagtggtgcaatcttggcttgctgcaatctccacctcccaggttcaagcgattctcccacctcagcctcccgagtagctgggattacaggcatgcgccaccatgcctggctaatttttgtatttttagtagagacggggtttcgccatgttggccaggctcgtctcgaactcctggcctcaagtgatctgcccgcctcagcctcccaaagtgctgggattacaaatgtgagctactatgcctggtcccaacttcttaaaattaaattttggggaagttcatggagatatttttgacatgtaaaagtagaaaacaaaccatccatagtgtgtgcatatatacacacaaggtttggtttaatatacttgctgtgcactagtcagttttgattcaggttacataagggataaaatatagaaagacattttaaagtttgaaatatgtgctaagtagttagagatttggcagttttgccacatttcaaatgggccaaacattaaaataacttatccatgaatttcaggtttcaaggaaggaggaatatctgactatttttttttgtgtgtgagatttggtctcagctttttggtccatctgaatcctggaagtccccaactctaccagaccaaaagggtgtctctattttttgttgttacttctctgttcttgatgtaatgagttaagtagatgaaagagattaaggtgcagggaagggctcttaaaagtttaatgtttcagctttccatagtcattcatacttgtgaatcttcttcctcttctacttcaaagtagccaaaacttggaaagttcaaattaatctttgggctccaaagagcaattctgaaggattaacaggtttcattctctccagtgggaggtggcctagacaggtgccggttttggggagaggtgagagtacccagatgtgggtgactatttcctgttcttccctgaaagtcaggccagtggtctcgaatcattcccacagcaactgctacaaaagtgactatcttaatcctttggctagatgggatacctcttctaccttttcagaggtgagctgttgagtagtaatgtccgctacaacaccacgctcccggaatggtggttcctaagagcaaagtcagttaatacaatttctccaggtatccagctatctccaggtgtgcggtcctgtgaagcactctaagaactgtaaaaaatatttcataggtatagaaggcatttgtaatactgttggttcaaatgtgctgacatgtagccagtggaggaagatgtttctttggaagcctgccatctttctgtaacgcaccttcaacctgagataattaagagtcattacgtttcccagtcccatgtcacattgaccagtcctgtggtcctatggctaagcggaggacacggccacaagctgtgagtcatgaaaaggagggtgcaggtgataggcaaagggacccattagccagtttacaatgactggcaactgaccagatagagcttaccgtatgtccatgtagagttgctcatattagtctgtaaataattctatgcatagtgaatgcagcttctgaattattaaactgatgctataaatgtgaactgacaaaacccaaaaaaaaaaaaaaaaaaa

SEQ ID NO: 628 - DNA, 4072 bp, Homo sapiens
acaccgccctcccgccagactcccggcggctcctcctccctctcccaaacccactcccaaagctaagtgcaggcttccccgttccagccagaagcgctgcgtgagcctccacacgtagccgcaggcagctccttaaatagcgtccgcgctgagcaaacagtccagacgtggggcccaggagggcgagctgaggcgaccgcaccgggcgcgcagcggcggcgggtcagccggcggccaatagccagggcgcggcccgccccgtcgcctcccctcggggagcctataaggcctccgcagcgccccgggcgcctgctgctccgtgcctccaccgacgacctcactcagctgcgttacgcgccgctccggctgccggccgcgcgccttgcccgccggctcccgcccgcaatcggcggctcagggcggacccgggtctctgcgttctcgcgagaagcgcggcgctgcggggccgtgggcgcctgagcccgcgcggccctcgagggccgaatatggggggatgcacggtgaagcctcagctgctgctcctggcgctcgtcctccacccctggaatccctgtctgggtgcggactcggagaagccctcgagcatccccacagataaattattagtcataactgtagcaacaaaagaaagtgatggattccatcgatttatgcagtcagccaaatatttcaattatactgtgaaggtccttggtcaaggagaagaatggagaggtggtgatggaattaatagtattggagggggccagaaagtgagattaatgaaagaagtcatggaacactatgctgatcaagatgatctggttgtcatgtttactgaatgctttgatgtcatatttgctggtggtccagaagaagttctaaaaaaattccaaaaggcaaaccacaaagtggtctttgcagcagatggaattttgtggccagataaaagactagcagacaagtatcctgttgtgcacattgggaaacgctatctgaattcaggaggatttattggctatgctccatatgtcaaccgtatagttcaacaatggaatctccaggataatgatgatgatcagctcttttacactaaagtttacattgatccactgaaaagggaagctattaacatcacattggatcacaaatgcaaaattttccagaccttaaatggagctgtagatgaagttgttttaaaatttgaaaatggcaaagccagagctaagaatacattttatgaaacattaccagtggcaattaatggaaatggacccaccaagattctcctgaattattttggaaactatgtacccaattcatggacacaggataatggctgcactctttgtgaattcgatacagtcgacttgtctgcagtagatgtccatccaaacgtatcaataggtgtttttattgagcaaccaaccccttttctacctcggtttctggacatattgttgacactggattacccaaaagaagcacttaaactttttattcataacaaagaagtttatcatgaaaaggacatcaaggtattttttgataaagctaagcatgaaatcaaaactataaaaatagtaggaccagaagaaaatctaagtcaagcggaagccagaaacatgggaatggacttttgccgtcaggatgaaaagtgtgattattactttagtgtggatgcagatgttgttttgacaaatccaaggactttaaaaattttgattgaacaaaacagaaagatcattgctcctcttgtaactcgtcatggaaagctgtggtccaatttctggggagcattgagtcctgatggatactatgcacgatctgaagattatgtggatattgttcaagggaatagagtaggagtatggaatgtcccatatatggctaatgtgtacttaattaaaggaaagacactccgatcagagatgaatgaaaggaactattttgttcgtgataaactggatcctgatatggctctttgccgaaatgctagagaaatgactttacaaagggaaaaagactcccctactccggaaacattccaaatgctcagccccccaaagggtgtatttatgtacatttctaatagacatgaatttggaaggctattatccactgctaattacaatacttcccattataacaatgacctctggcagatttttgaaaatcctgtggactggaaggaaaagtatataaaccgtgattattcaaagattttcactgaaaatatagttgaacagccctgtccagatgtcttttggttccccatattttctgaaaaagcctgtgatgaattggtagaagaaatggaacattacggcaaatggtctgggggaaaacatcatgatagccgtatatctggtggttatgaaaatgtcccaactgatgatatccacatgaagcaagttgatctggagaatgtatggcttcattttatccgggagttcattgcaccagttacactgaaggtctttgcaggctattatacgaagggatttgcactactgaattttgtagtaaaatactcccctgaacgacagcgttctcttcgtcctcatcatgatgcttctacatttaccataaacattgcacttaataacgtgggagaagactttcagggaggtggttgcaaatttctaaggtacaattgctctattgagtcaccacgaaaaggctggagcttcatgcatcctgggagactcacacatttgcatgaaggacttcctgttaaaaatggaacaagatacattgcagtgtcatttatagatccctaagttatttacttttcattgaattgaaatttattttggatgaatgactggcatgaacacgtctttgaagttgtggctgagaagatgagaggaatatttaaataacatcaacagaacaacttcactttgggccaaacatttgaaaaactttttataaaaaattgtttgatatttcttaatgtctgctctgagccttaaaacacagattgaagaagaaaagaaagaaaaaacttaaatatttatttctatgctttgttgcctctgagaataatgacaatttatgaatttgtgtttcaaattgataaaatatttaggtacaaataacaagactaataatattttcttatttaaaaaaagcatgggaagatttttatttatcaaaatatagaggaaatgtagacaaaatggatataaatgaaaattaccatgttgtaaaaccttgaaaatcagattctaactggatttgtatgcaactaagtatttttctgaacacctatgcaggtcttatttacagtagttactaagggaacacacaaagaattacacaacgttttcctcaagaaaatggtacaaaacacaaccgaggagcgtatacagttgaaaacatttttgttttgattggaaggcagattattttatattagtattaaaaatcaaaccctatgtttctttcagatgaatcttccaaagtggattatattaagcaggtattagatttaggaaaacctttccatttcttaaagtattatcaagtgtcaagatcagcaagtgtccttaagtcaaacaggttttttttgttgttgtttttgctttgtttccttttttagaaagttctagaaaataggaaaacgaaaaatttcattgagatgagtagtgcatttaattattttttaaaaaactttttaagtacttgaattttatatcaggaaaacaaagttgttgagccttgcttcttccgttttgccctttgtctcgctccttattctttttttggggggagggttatttgcttttttatcttcctggcataatttccattttattcttctgagtgtctatgttaacttccctctatcccgcttataaaaaaattctccaacaaaaatacttgttgacttgatgttttatcacttctctaagtaaggttgaaatatccttattgtagctactgtttttaatgtaaaggttaaacttgaaaagaaattcttaatcacggtgccaaaattcattttctaacaccatgtgttagaaaattataaaaaataaaataattttagaaaaaaaaaaaaaaa

SEQ ID NO: 629 - DNA, 1475 bp, Homo sapiens
gcgtggcaggagaggcggggccaattttgctgagctttctcgcgggcttgcagctgcggcaagtgctggcggcggctgctcgcgcaagtcagctggcgtgggaactaccctttgtagctgagaacggcttgtttattgctacaaagactctattgacattggtagcttcagcggcagcagcttcttacggtataaagctgttgcttcctgaagaggctacaagcatccttccctaggactgctgtaagctttgagcctctagcaggagacatgcctcggggacgaaagagtcggcgccgccgtaatgcgagagccgcagaagagaaccgcaacaatcgcaaaatccaggcctcagaggcctccgagacccctatggccgcctctgtggtagcgagcacccccgaagacgacctgagcggccccgaggaagacccgagcactccagaggaggcctctaccacccctgaagaagcctcgagcactgcccaagcacaaaagccttcagtgccccggagcaattttcagggcaccaagaaaagtctcctgatgtctatattagcgctcatcttcatcatgggcaacagcgccaaggaagctctggtctggaaagtgctggggaagttaggaatgcagcctggacgtcagcacagcatctttggagatccgaagaagatcgtcacagaagagtttgtgcgcagagggtacctgatttataaaccggtgccccgtagcagtccggtggagtatgagttcttctgggggccccgagcacacgtggaatcgagcaaactgaaagtcatgcattttgtggcaagggttcgtaaccgatgctctaaagactggccttgtaattatgactgggattcggacgatgatgcagaggttgaggctatcctcaattcaggtgctaggggttattccgccccttaagtagatctgaggcagacccttgggggtgtaaaagagagtcacaggtaccccaaggagtagatgccagggtcctaagttgaaaatgatgtcgattgggggcgggggacactgtatttgatatttgtgatcagtgatcattgttcaactgcgaaatagagtgtttgcttttgataatggaaaattgtattcgttttaaaattccgtttgttgagaataacaatatgtttaaaaatataattgaacaaatttttttctttgtttcctgtcattgacatttagtataacagttttgctaacgttctaaaatgaagtcgttccatcataatctatgatcttgtacagcacttatagaaataagctgttcttttgaagttgaaatacccagtaaaatgttgaagaaggatggaggatttcttcatatctgacgtttctgaaaccctttgtgtctgctgttgtgtgaagattgacatttaccatgattttccttagttactgcagaacatagagaaaaataaaagcctaacgaatagtaaaaaaaaaaaaaa

SEQ ID NO: 630 - DNA, 2267 bp, Homo sapiens
gcgggagggtcagggccagggtgagcgcccgactccgagctgtccccgctcccggcgcggcgctccgctctcagccacctcacggctgccaggagtgcgcgggagtttgccccggagcgcggggaagtttcctccgaagctgcgctcctggaacagcagcacctgcaagcgcccggcagcggcccgcgaggttactttatggaattgggctcttagagaacaagaaaagactgaagttttacgggaaaacaaatcatgtggtcttcagattctgaaataaggagaaatgcagccatctgaaatggtcatgaaccccaaacaagtcttcctctctgtgctgatatttggagtagctgggctactcctcttcatgtatttgcaagtctggattgaagaacaacatacagggagagtggagaagagaagagaacaaaaagtaacttcaggatggggaccagtgaagtacttgcggcctgtacccagaatcatgagtacagaaaaaatccaggaacatatcaccaaccagaaccccaagtttcacatgcctgaggatgtacgagaaaaaaaggaaaatcttctactcaattctgagagatctactaggctcttaacaaagaccagtcattcacaaggaggggatcaagctttaagtaagtccacagggtcaccaacagagaagttgattgaaaaacgtcaaggagctaagactgtttttaacaagttcagcaacatgaattggccagtggacattcaccctttaaacaaaagtttagtcaaagataataaatggaagaaaactgaggagacccaagagaaacgaaggtctttccttcaggagttttgcaagaaatacggtggggtgagtcatcatcagtcacatctttttcatacagtatccagaatctatgtagaagataaacacaaaatcttatattgtgaggtacctaaggctggctgttccaattggaaaagaattctgatggtactaaatggattggcttcctctgcatacaacatctcccacaatgctgtccactacgggaagcatttgaagaagctagatagctttgacctaaaagggatatatacccgcttaaatacttacaccaaagctgtgtttgttcgtgatcccatggaaagattagtatcagcctttagggacaaatttgaacaccccaatagttattaccatccagtattcggaaaggcaattatcaagaaatatcgaccaaatgcctgtgaagaagcattaattaatggatctggagtcaagttcaaagagtttatccactacttgctggattcccaccgtccagtaggaatggacattcactgggaaaaggtcagcaaactctgctatccgtgtttgatcaactatgattttgtagggaaatttgagactttggaagaagatgccaattactttttacagatgatcggtgctccaaaggagctgaaatttcccaactttaaggataggcactcttccgatgaaagaaccaatgctcaagtcgtgagacagtatttaaaggatctgactagaactgagagacaattaatctatgacttttattacttggactatttaatgtttaattatacaactccatttttgtagtttgcattcattttctaaaaccctgtatatacttaatgatgataagttcaaatcagctgtaatttttctataattctctgtatgacagaaatttaaccaagtgcagttgtcttgatttaatgtagatttttaccaaatagtatgacaccaattggcacaaagttataggaaaatcacctacaggagatgtaaacaacttgagttgctctaaaatgtttggaaaagagctgcttttgcattatgaattatattgttgaagcaataacctagccagctgttgcattagctaaagcagcctcttgcaatggtaggaaaaaaggatctcaaatagcatgagtgtatgtctatatcctgaaatttattgtctaaaatgcatgaatatatttttagcagtctgtggcatattaatcaaactgttgaattgttttcttacaccctggaaatctttctatcaactataatgataaatccattttgaagtgatattttggacttaggcattttactttagattggaaggcattatgtgatttacaatatgagaatatagcagaaaaaccagatgaggctgtggctttttatattcaacagccaataaaaaatgcacaacatgctaagatcaaagcaaaaaaaaaaaaaaaaaaaaaaa

SEQ ID NO: 631 - DNA, 6936 bp, Homo sapiens; identical to SEQ ID NO: 341

SEQ ID NO: 632 - DNA, 1535 bp, Homo sapiens; identical to SEQ ID NO: 140

SEQ ID NO: 633 - DNA, 1374 bp, Homo sapiens; identical to SEQ ID NO: 542

SEQ ID NO: 634 - DNA, 3634 bp, Homo sapiens
ggacgggacggagccggggcagccagaagaggtgggaaaagcggaggaggacgcccaggaggaggcggcggcggcggccgggaagtgaaaggtctcgcaaagttcagcggcggctgcgggcgccgagccccgggctagcggcagacgagcccgcagggccgctccgcggggcagcgcagccaggccggctatggtcccggggctcccgccgccccccaggtgcccgggacccgccaggccggtgcgcgagggtcaccccacctccccgcgcggtcccggcccctggctcccagctgccggcgaccgctgaccgagcccggcgccccaggaggaggaagaaaccagggccccgttccctcccgaggacggcggcgcttcatcccgcagcccagaggtctcggctccctccggcacccgcccggcccggctgctcccggctcctcccggccatggggagctgcgcgcggctgctgctgctctggggctgcacggtggtggccgcaggactgagtggagtagctggagtgagttcccgctgtgaaaaagcctgcaaccctcggatgggaaatttggctttggggcgaaaactctgggcagacaccacctgcggtcagaatgctaccgaactgtactgcttctacagtgagaacacggatctgacttgtcggcagcccaaatgtgacaagtgcaatgctgcctatcctcacctggctcacctgccatctgccatggcagactcatccttccggtttcctcgcacatggtggcagtctgcggaggatgtgcacagagaaaagatccagttagacctggaagctgaattctacttcactcacctaattgtgatgttcaagtcccccaggccggctgccatggtgctggaccgctcccaggactttgggaaaacatggaagccttataagtactttgcgactaactgctccgctacatttggcctggaagatgatgttgtcaagaagggcgctatttgtacttctaaatactccagtccttttccatgcactggaggagaggttattttcaaagctttgtcaccaccatacgatacagagaacccttacagtgccaaagttcaggagcagctgaagatcaccaaccttcgcgtgcagctgctgaaacgacagtcttgtccctgtcagagaaatgacctgaacgaagagcctcaacattttacacactatgcaatctatgatttcattgtcaagggcagctgcttctgcaatggccacgctgatcaatgcatacctgttcatggcttcagacctgtcaaggccccaggaacattccacatggtccatgggaagtgtatgtgtaagcacaacacagcaggcagccactgccagcactgtgccccgttatacaatgaccggccatgggaggcagctgatggcaaaacgggggctcccaacgagtgcagaacctgcaagtgtaatgggcatgctgatacctgtcacttcgacgttaatgtgtgggaggcatcagggaatcgtagtggtggtgtctgtgatgactgtcagcacaacacagaaggacagtattgccagaggtgcaagccaggcttctatcgtgacctgcggagacccttctcagctccagatgcttgcaaaccgtgttcctgccatccagtaggatcagctgtccttcctgccaactcagtgaccttctgcgaccccagcaatggtgactgcccttgcaagcctggggtggcagggcgacgttgtgacaggtgcatggtgggatactggggcttcggagactatggctgtcgaccatgtgactgtgcggggagctgtgaccctatcaccggagactgcatcagcagccacacagacatagactggtatcatgaagttcctgacttccgtcccgtgcacaataagagcgaaccagcctgggagtgggaggatgcgcaggggttttctgcacttctacactcaggtaaatgcgaatgtaaggaacagacattaggaaatgccaaggcattctgtggaatgaaatattcatatgtgctaaaaataaagattttatcagctcatgataaaggtactcatgttgaggtcaatgtgaagattaaaaaggtcttaaaatctaccaaactgaagattttccgaggaaagcgaacattatatccagaatcatggacggacagaggatgcacttgtccaatcctcaatcctggtttggaataccttgtagcaggacatgaggatataagaacaggcaaactaattgtgaatatgaaaagctttgtccagcactggaaaccttctcttggaagaaaagtcatggatattttaaaaagagagtgcaagtagcattaagatggatagcacataatggcacttgtctatgtacaaaacacaaactttagagcaagaagacctcagacaggaaactggaattttttaaagtgccaaaacatatagaaatgtttgaatgcatgggtcttatctaacttatctcttctggacccatgtttaaatacagttttatttcatgaagagaaatgaaaacccctacactgatatctgttttctatgggactgattctgaaattcttaactattaagaatattttaatagcagcatgacatttagcagtaatccattaagggcagtacctctaacaaggacgccttccagcttcagcgatgttacttacgtttgatgctacttaaagtaatgaatgacgttttaaggaatccctaaccctactatcagaaaaggtgtttgttaaagagccttctcttgtgtgttacgcatgaactttggtctgtaggtgttaaatggaacctctccatgtgtatatagtatttccttgtataaagcactttactacctaccacttgtgttgtgaacgtttggtgactgctgttgaaagaaggaaaagggtgtgtgagaaagcctactgaagcagcagcactgccactacatgtggacaaaagtgaccatataaaagaagttgtgctatttaactctgaatacttggagaaactaggtgaagatgcaaccagaaaggagaatatgtatgcgtgaagtctcagctttgagctggaggctagattccaagatgacagccatgatgaaactttttaaaaaactaaaccagaagagactttaaaataagagaaagaaatcataaatgtagacatatgcttggctaaaggggaaatggactttaaattttaaagagctcatttgcaatgcacttgtatacacttcaaaaattattgtagacacagaatttgttatatttttgtgcttagtatttaaacctgaacattgaaacagttttcctccttgtctttcttaacagtaatagtcattatatttacctgttttttaacacaatgtatgtgatagtcaaaaaatcacagtttttcattattattcatcttctgtacccacgcataaccactatacatagtttcttttgtacttgaatatacaaaacatgaacacagtgccatatgaataatttcacatacagaacctttttttctctgaagtcctgtggacttgcaaatatatatatatattgctttgttaatttgtttttatatttcatatatgtaataaaggaatatgatctgaaaaaaaaaaaaaaaaaaaa

SEQ ID NO: 635 - DNA, 2350 bp, Homo sapiens
gcagtgtcactaggccggctgggggccctgggtacgctgtagaccagaccgcgacaggccagaacacgggcggcggcttcgggccgggagacccgcgcagccctcggggcatctcagtgcctcactccccaccccctcccccgggtcgggggaggcggcgcgtccggcggagggttgaggggagcggggcaggcctggagcgccatgagcagcccggatgcgggatacgccagtgacgaccagagccagacccagagcgcgctgcccgcggtgatggccgggctgggcccctgcccctgggccgagtcgctgagccccatcggggacatgaaggtgaagggcgaggcgccggcgaacagcggagcaccggccggggccgcgggccgagccaagggcgagtcccgtatccggcggccgatgaacgctttcatggtgtgggctaaggacgagcgcaagcggctggcgcagcagaatccagacctgcacaacgccgagttgagcaagatgctgggcaagtcgtggaaggcgctgacgctggcggagaagcggcccttcgtggaggaggcagagcggctgcgcgtgcagcacatgcaggaccaccccaactacaagtaccggccgcggcggcgcaagcaggtgaagcggctgaagcgggtggagggcggcttcctgcacggcctggctgagccgcaggcggccgcgctgggccccgagggcggccgcgtggccatggacggcctgggcctccagttccccgagcagggcttccccgccggcccgccgctgctgcctccgcacatgggcggccactaccgcgactgccagagtctgggcgcgcctccgctcgacggctacccgttgcccacgcccgacacgtccccgctggacggcgtggaccccgacccggctttcttcgccgccccgatgcccggggactgcccggcggccggcacctacagctacgcgcaggtctcggactacgctggccccccggagcctcccgccggtcccatgcacccccgactcggcccagagcccgcgggtccctcgattccgggcctcctggcgccacccagcgcccttcacgtgtactacggcgcgatgggctcgcccggggcgggcggcgggcgcggcttccagatgcagccgcaacaccagcaccagcaccagcaccagcaccaccccccgggccccggacagccgtcgccccctccggaggcactgccctgccgggacggcacggaccccagtcagcccgccgagctcctcggggaggtggaccgcacggaatttgaacagtatctgcacttcgtgtgcaagcctgagatgggcctcccctaccaggggcatgactccggtgtgaatctccccgacagccacggggccatttcctcggtggtgtccgacgccagctccgcggtatattactgcaactatcctgacgtgtgacaggtccctgatccgccccagcctgcaggccagaagcagtgttacacacttcctggaggagctaaggaaatcctcagactcctgggtttttgttgttgctgttgttgttttttaaaaggtgtgttggcatataatttatggtaatttattttgtctgccacttgaacagtttgggggggtgaggtttcatttaaaatttgttcagagatttgtttcccatagttggattgtcaaaaccctatttccaagttcaagttaactagctttgaatgtgtcccaaaacagcttcctccatttcctgaaagtttattgatcaaagaaatgttgtcctgggtgtgttttttcaatcttctaaaaaataaaatctggaatcctgcttttttgctctactagtacctctgtcacactagtcttatcaaaaaccagttcttaagatcaatgttaagtttattagttaatgtaaatttctcatcctcgaaaagggtgaacataaatgcctttaaggagtatatctaaaaataaacattaggatatctaagtttgatgtaattgtttcaggaaggaaaaaagaaaagcattctggaatgagcctacttcaagtaatcttagtttctaaaactaacagttaatattttcaattccagtatatcactttaagtagaaggggatgtccaagtaattttggttttctaactgttgaatcataagcttgacctgcccccagaggctttttggatgtttttatctgtgttttgccatctctttacactcctcgacattcagtttaccttaatcttcacatttttacaccttgggaagtggcaagcatcgctgggtttaagataaaggagtcacaaaaactaatcaaaataaaatttgcattatgacaacttttaataca

SEQ ID NO: 636 - DNA, 2678 bp, Homo sapiens
atactgctgggattacaggcgcccgccaccacgcccggctaattttttgtatttttagtagagacggggtttcactgtgttggcaaggatggtctctatctcctgacctcgtgatatgcccgcctccgcctcccaaagtgctgggattacaggcttgagccaccgcgtctggcctatttatttattattttcgagacggagtgttgctcttgtggcccaggctggagtgcaacggcgggatttcggctcactgcaacctctgcctcccgggttcaagcaattctcctgcctcagcctcctgagtagctgggattacaggcaggcaccaccacacccggctaattttgtatttttagtagaaacggggtttctccatgttggtcagtctggtttcgaactcccagcgtcaggtcatctgcctgcctcggcctcccaaagtgctgggattacaggcgtgagccaccgcgcccagccacttctgtatttttaaaaaagtggtaaggaagtggaggattaaatgatttgcccaaagtctcacagtaatttgtagagctgagattgaaattcgggtgaaacttcacatatcacattctttttatcagatggcagtttctggatttactcttggtacctgcatacttctgttgcacattagttatgtggctaattatcccaatggaaaagtaacacagtcatgccatggaatgattcctgaacatggtcatagtccacagtctgttcctgttcatgacatttacgtgagtcagatgacattcaggccaggagatcagattgaagttactttgtcagggcatccatttaaaggctttctcctagaagcgcgtaatgctgaggatctgaatggccctcctattggctccttcacattgattgacagtgaagtgtcacaacttttgacctgtgaagatatacagggatcagcagtgagtcacagaagtgcatctaaaaaaacagaaattaaagtctactggaatgctccaagcagtgctccaaatcacacacagtttctagtcacagttgttgagaagtataaaatctactgggtgaagattcctggtcctataatttcacaaccaaatgcatttccttttacaacacctaaagctacagtagtacctttgccaacgttacctcccgtttcccacttaaccaaaccattcagtgcctcagattgtgggaacaagaagttctgtattaggagtcctttgaactgtgacccagagaaggaggcttcctgtgtcttcttgtccttcacaagagatgaccaatcggtgatggttgaaatgagcggccccagtaaaggctatttatcctttgcattgtctcatgatcagtggatgggtgatgatgatgcttatctgtgtattcatgaagatcagactgtgtacatccagccttcccatttaacggggcgaagtcaccctgtaatggactccagggatacccttgaggatatggcttggaggttggcggacggtgttatgcagtgttctttcagaagaaacattacccttcctggagttaagaatagatttgatctaaacacaagctattacatatttctagcagatggtgcagctaatgatggtcgaatttacaagcactctcagcaacctttgattacctatgaaaaatatgatgtgacagactctccaaagaacataggaggatcccattctgtactccttctgaaggttcatggtgccttaatgtttgtggcatggatgactactgttagcataggtgtactggttgcccggttcttcaagccagtttggtcaaaagctttcttgcttggtgaagcagcttggtttcaggtgcatcggatgctcatgttcaccacaactgtcctcacctgcattgcttttgttatgccgtttatatacaggggaggctggagtaggcatgcaggttaccacccatacctcggctgtatagtgatgactttggcagttcttcagcctcttctggcagtcttcaggccacctttacatgacccaagaaggcaaatgtttaactggactcattggagtatgggaacagctgctagaataatagcagtggcagcgatgttcctgggaatggatttaccaggactgaatcttcctgattcatggaaaacctatgcaatgaccggattcgtagcctggcatgttgggactgaggttgttctggagttgaaatattggatgatgacagaattcagatccttcagtcatttactgcagtggaaacagagggtcatgcttttaaaaaggcagtgttggcaatttatgtctgtgggaatgttacttttctcatcatatttttatctgcaatcaaccatctatgagcaagcaaagaccttggcttttgcaggccaagtgataattatcatcaaaccaaagaaacttgaagcctgtcctgactgcctggagcatatttgtgaattctcacttggaagactggggtcatgtctgtagaggaattctgaagtccagcctttagagaacaacattcaagagggtcatatagactataaattaatgtcatgccctatatgtaattctgggtcttaaaggaaagattgtacttcaggagaagtaactctcaaatatttcatgccaagattttaagaatgttggtatttaagaaaataaatagtgatttggaaaatc

SEQ ID NO: 637 - DNA, 2209 bp, Homo sapiens
gagagcgggaccggcctcagctccaacacagcctccactgtgattaaaaataaaaattgctagagcagccctcactcgccacatctactttgatagctggctatttggaatttaaaggatatttgactttttctaacctcccatgaggctgtaagttccactgctccaaacccacccaccaaggactctgaacctgtccaccccgggcgcatcaagatcttccagctgggtacccccgatttgggccgactttgcacctccaaacaaccttagcatgatgtcttatcttaagcaaccgccttacgcagtcaatgggctgagtctgaccacttcgggtatggacttgctgcacccctccgtgggctacccggggccctgggcttcttgtcccgcagccaccccccggaaacagcgccgggagaggacgacgttcactcgggcgcagctagatgtgctggaagcactgtttgccaagacccggtacccagacatcttcatgcgagaggaggtggcactgaaaatcaacttgcccgagtcgagggtgcaggtatggtttaagaatcgaagagctaagtgccgccaacaacagcaacaacagcagaatggaggtcaaaacaaagtgagacctgccaaaaagaagacatctccagctcgggaagtgagttcagagagtggaacaagtggccaattcactcccccctctagcacctcagtcccgaccattgccagcagcagtgctcctgtgtctatctggagcccagcttccatctccccactgtcagatcccttgtccacctcctcttcctgcatgcagaggtcctatcccatgacctatactcaggcttcaggttatagtcaaggatatgctggctcaacttcctactttgggggcatggactgtggatcatatttgacccctatgcatcaccagcttcccggaccaggggccacactcagtcccatgggtaccaatgcagtcaccagccatctcaatcagtccccagcttctctttccacccagggatatggagcttcaagcttgggttttaactcaaccactgattgcttggattataaggaccaaactgcctcctggaagcttaacttcaatgctgactgcttggattataaagatcagacatcctcgtggaaattccaggttttgtgaagacctgtagaacctctttttgtgggtgatttttaaatatactgggctggacattccagttttagccaggcattggttaaaagagttagatgggatgatgctcagactcatctgatcaaagttccgagaggcatagaaggaaaaacgaagggccttagaggggcctacaaaccagcaacatgaaatggacaaaccaatctgcttaagatcctgtcatagttttagatcattggttatcctgatttgcaaagtgatcaaaagcattctagccatgtgcaaccaaacaccaccaaaaataaaatcaaacaaaactaagttgtgaaggaagggagggaaggtcatagccttcttaagcagaggtgttccattgttttagccaatccttggttgaatcttaggaatgaacagtgtctcaagctcattcacgtttcatgaccaactggtagttggcactgaaaaaacttttcagggctgtgtgaattgtgtgactgattgtcctagatgcactactttatttaaaaaataatgttcataaggagtcaatatgtagtttaagagacaatcagtgtgtgtcttataaatggtacatctgtggtttttaatctgtgctagacttcaaaactgtgatctcctgttattgtatgcaaccttgaactccacctctgcaggggttcttctgtgattaaataggttataattataagcaaaattcagagcaactgagtactgatctaaaaagattacctttggctggaggtgagctgcactgaaactttacgacaaaatgtctctggacaaagagagtcagagaagagaagcaaaaggacactaattcatctgtaatttactgttggtaagcctagcagtaaagagacattggtcaattgctctgaccctgatgaattattaaactgagatcattgtcgtttatgcttgcagatgttaaatggaaaagttatatatgcataaaccttttcttcctggatttggcagatatgtataattatattaaaatggttctagcacaaaaaaaaaaaaaaa

SEQ ID NO: 638 - DNA, 4258 bp, Homo sapiens
agtgacgcagcaggaggaaactgctcgggctgcaagcagtcttccaggctttgcggctgccaaaggaataattgagacgtctgagttgagcaggtggaatgtcagaagactgagaacattgttccttcttcatactgctgctctgttgccagagaatcccaatttacactcaaagcttctttgattaagtgctaggagataaatttgcattttctcaaggaaaaggctaaaagtggtagcaggtggcatttaccgtcatggagagcagggatcataacaacccccaggagggacccacgtcctccagcggtagaagggctgcagtggaagacaatcacttgctgattaaagctgttcaaaacgaagatgttgacctggtccagcaattgctggaaggtggagccaatgttaatttccaggaagaggaagggggctggacacctctgcataacgcagtacaaatgagcagggaggacattgtggaacttctgcttcgtcatggtgctgaccctgttctgaggaagaagaatggggccacgccttttatcctcgcagcgattgcggggagcgtgaagctgctgaaacttttcctttctaaaggagcagatgtcaatgagtgtgatttttatggcttcacagccttcatggaagccgctgtgtatggtaaggtcaaagccctaaaattcctttataagagaggagcaaatgtgaatttgaggcgaaagacaaaggaggatcaagagcggctgaggaaaggaggggccacagctctcatggacgctgctgaaaaaggacacgtagaggtcttgaagattctccttgatgagatgggggcagatgtaaacgcctgtgacaatatgggcagaaatgccttgatccatgctctcctgagctctgacgatagtgatgtggaggctattacgcatctgctgctggaccatggggctgatgtcaatgtgaggggagaaagagggaagactcccctgatcctggcagtggagaagaagcacttgggtttggtgcagaggcttctggagcaagagcacatagagattaatgacacagacagtgatggcaaaacagcactgctgcttgctgttgaactcaaactgaagaaaatcgccgagttgctgtgcaaacgtggagccagtacagattgtggggatcttgttatgacagcgaggcggaattatgaccattcccttgtgaaggttcttctctctcatggagccaaagaagattttcaccctcctgctgaagactggaagcctcagagctcacactggggggcagccctgaaggatctccacagaatataccgccctatgattggcaaactcaagttctttattgatgaaaaatacaaaattgctgatacttcagaaggaggcatctacctggggttctatgagaagcaagaagtagctgtgaagacgttctgtgagggcagcccacgtgcacagcgggaagtctcttgtctgcaaagcagccgagagaacagtcacttggtgacattctatgggagtgagagccacaggggccacttgtttgtgtgtgtcaccctctgtgagcagactctggaagcgtgtttggatgtgcacagaggggaagatgtggaaaatgaggaagatgaatttgcccgaaatgtcctgtcatctatatttaaggctgttcaagaactacacttgtcctgtggatacacccaccaggatctgcaaccacaaaacatcttaatagattctaagaaagctgctcacctggcagattttgataagagcatcaagtgggctggagatccacaggaagtcaagagagatctagaggaccttggacggctggtcctctatgtggtaaagaagggaagcatctcatttgaggatctgaaagctcaaagtaatgaagaggtggttcaactttctccagatgaggaaactaaggacctcattcatcgtctcttccatcctggggaacatgtgagggactgtctgagtgacctgctgggtcatcccttcttttggacttgggagagccgctataggacgcttcggaatgtgggaaatgaatccgacatcaaaacacgaaaatctgaaagtgagatcctcagactactgcaacctgggccttctgaacattccaaaagttttgacaagtggacgactaagattaatgaatgtgttatgaaaaaaatgaataagttttatgaaaaaagaggcaatttctaccagaacactgtgggtgatctgctaaagttcatccggaatttgggagaacacattgatgaagaaaagcataaaaagatgaaattaaaaattggagacccttccctgtattttcagaagacatttccagatctggtgatctatgtctacacaaaactacagaacacagaatatagaaagcatttcccccaaacccacagtccaaacaagcctcagtgtgatggagctggtggggccagtgggttggccagccctgggtgctgatggactgatttgctggagttcagggaactacttattagctgtagagtccttggcaaatcacaacattctgggccttttaactcaccaggttgcttgtgagggatgagttgcatagctgatatgtcagtccctggcatcgtgtattccatatgtctataacaaaagcaatatatacccagactacactagtccataagctttacccactaactgggaggacattctgctaagattccttttgtcaattgcaccaaaagaatgagtgccttgacccctaatgctgcatatgttacaattctctcacttaattttcccaatgatcttgcaaaacagggattatcatccccatttaagaactgaggaacctgagactcagagagtgtgagctactggcccaagattattcaatttatacctagcactttataaatttatgtggtgttattggtacctctcatttgggcaccttaaaacttaactatccttccagggctcttccagatgaggcccaaaacatatataggggttccaggaatctcattcattcattcagtatttattgagcatctagtataagtctgggcactggatgcatgaattccactccttccagaaccaactgcattggttttccatgaccttaaggcagtagttctcaactggggggcaattttgcactgaagagagcatttggcagagtctgaagaagtttttggtgtcacagctttgtggggagcatgctatggcatttagtgggtaaagaccagggatgctgccaaacctgccttgcacaggacagcccctgcaacaaagaattatccagacaaaaatatcaatggtgctgaggttgagaaaacctgacttaaggggctgggatgcttttgaactagcttaaggcccaggactgtggagtgtgtggaccaccccacagaggagggactcagatttatttactcttgctggatctgtagtgatggagttccttctggtgtcagccccacaggaggctcccaggcctccctcacttcccatacccagtctaggagctccttctggctcccaagcacccagagctttcctccgccttttagttttggttcctccactggaatgtaggctcctcacgggcgatggctgtcttttcttgactttgtatcttcactgccaagcaaaaagtctgccaagtgggaatgtttaataaatattcattgaataatgaatgaaccatcttcgtacatgaataataatactgtcttacgtttttctggtgctttataatgtatacattacatctgagtattttattttatttaattttcaaaacaatcctttaaggtcaacattgttatccttattttgctgatgaggaaactaaggttagaaacattttgatttcctctaggacgtatagctaggaagtgttactatcttgatttgaacaaattttctggtgctaagtctgatgttctttccatgaatcattgtggtggttgagatggagctttgtaatgggaataaaacagtaccttaggttctttctgaaaaggaggtatctagcaatggataaatagataccactgaatgaaattaaatgttgattaggaacaaatttaaggcttaaaaaatactttatgagcagcaagattgctttaacttttaaaatgaagctttggttctctgatttgtaatgagcacctggatatgtcaattaaaatgcccatttgtgaagcttactcaataaaactttaaattgtcttaaaaaaaaaaaaaaaaaa

SEQ ID NO: 639 - DNA, 4425 bp, Homo sapiens
ctcgctccctgacttccgggtcgcggtgcttgaagggagtgttccgtcgtttccgttgccggctgtttgcagtggggaaaccgaggcagctcctgctccccctagttcttccgctcctgtgaggaaaaaaaaatgtttatttctttgtgggagttcttctatgggcacttttttcgattttggatgaaatggctattacgacagatgactgggaagtgtgaattgcagcgaatatttgatacctatgtaggtgcacaaaggacacacaggatagaaaattccttgacatactccaagaataaggttttacagaaggcgacacatgttgttcagagtgaagtggacaaatatgtagatgatattatgaaggaaaagaatattaaccctgagaaggatgccagttttaaaatatgcatgaagatgtgcttactgcagataactggttataaacagctgtatttggatgtagaaagtgtgaggaaaaggccatatgattctgataacctacagcatgaagagctactcatgaagctttggaatcttctaatgcccacgaagaagttaaacgctagaatctccaagcagtgggctgaaattggttttcagggtgatgatcccaagacagacttcagaggcatgggcatacttgggttaatcaatcttgtgtatttcagtgaaaattacactagtgaagctcatcagattctttcccgttcaaatcatccaaaattagggtattcttatgcaatagttggaatcaatcttacagagatggcttatagcttactgaagagtgaagctttgaagtttcatctctataaccttgttcctggtataccaacaatggaacactttcatcagttttactgttatcttgtctatgaatttgacaagttttggtttgaagaagaaccagaaagcattatgtatttcaatttgtatagagagaagtttcatgaaaagattaaaggacttttactggattgtaatgtagcacttactttaaaagtataaatcatccactgtatcttctatttctaccacattttgcacattcaacagaatttatatgttgtaataggaattatctgatcaattacactcttatatataatttcctacaaaaatatttcagaaattctatttaagaaagctagtggacaatcagtgtatgtttacaattgtttatacactgttctccaaaggtaccttatccttccaaagatcccctctgtagagtcatgcgaactacagtttggaacttgggacttagcccgttggtgtaaaagtataaatcaggtatttgtattaaattgattaaaatgtgtaaaatcaattttcgtttttatgtgttatagggtcaagttggtatctttttcaaagctctttaagatttttttggtttttagtttggaaatggctgtttttaattttgtctgatttttatttctaggttaattaacagcaagtgtttctttatggttttctttgtttgcatcttaattacatgtcataacgttgcttcattagtagcaaatagagcagagatacagcagagagaataaagaattagggcctccttttgggtttctgtgattattgagcataactgatgagagaatgacagtattggtgactagcttttttgtttttaaataacacactttaaaatgccacagtgttatttgaaagcttaaaggcattttctcatcttcagtatttgctttttatcagttgtagaaaagaaccttagtgttttcttctctacctatgtatgcttatgaaaccgctctacctacatatgaaacttctctacctatgtatgtttacgaaaagagatgtatttgccaagaaaatcttgattatataaaagacaaaaagattataaaagacagtttctgtttaagtaaaactgtctttgaaacttaagaaagcttaagttttaaaaaaatctcagttaaacatcattggtttatttgacttactgttaactcttgcttctctttgactccatggtgtttttagataaccatgtatgaactttatgttaatggtttgtgggatactaaaatagcttgaagatgacttgatgactgtgcattttatatagttttattctcctaaaatctcaggagggcagcaagtgctgtcaacgattatatagtgatgagatttttatgggaatgatttcttcttggtgcgttttacacatttgtactgatagcaaaactaaagtttaaagcagcaaagtttaagttctccttaaatcctacagaaaccaaccttttaaggacataatttcatctaaaacatgacgatatttagcacaccttttaatgtgggtatatatcaagtgtttaaggactggctagtatgtgatagagcaagacctgagactttataagtatttgctcgtgtctgttgacagacctctttctttcaaacttgttagaagagtggtaagacatatccaattggaaaataagatgcagtgttgtatagcacatacatttaaagtgcttgcgttaaaattagtttctcaataagataaaattattttaaaaatttggttcactttattacaatagtggcaatttagcttttcagtattacaggaatttaaaaattggtttcttgtaggggacatctcaactttgggaatatcttcacttaatttttaaaaaatattttcatgctttattgtccagctatacaatatgtcgcaaaatcctgacaagttcattgtattaaggtattaactattacatggaaagcaattctgttcatcttttgatgtttgtgttgaaaatgcttatctttgtgttttgatcttccaacagctgagagcttgaactgatttaaacatttgtcaatatacttaagaatgctttaagtaaagaaggggaaaattttaagtaagttttttcccttctaggaagaaaaactatgatgatgttaagaaaatgtcattatagagcttgctcaataatatgttctttaaatccacctccatttgtacattataggtatcattctgtttttgcttaaaataatctgcaaccatttcagatagttttacagcaaattgatctaaaagccactaataaattctagggtttgagtctagaagccaagcaaactgtcaccaatgtcagttgtaaattagaatgcaacatgaggcttcagactcatgacaatgatatacatgaaaacaaaaatataattgtgtctaccttcctactttcccttttgacatatgtagttggaattttacatagtcttaaaatccatatttagaatcttacctgtttctataataattagtaaaatgccaaagtagtgatagaatattgtggcattgaagtagccgaaaaattgttagttttagcatcaaaaaagtaaatagatgttgaaatgaatttttgtatgtgccaggttgaagagagtgtgccagtgacaggaagtagtctaaaaaattaacagttatggttttaataggatctgaaagacaatctttaaagaaatgggagaaattgggggtatcagtgaacctataccaacctctctttgtacataaatatggtgatgtagctagatataaaaatcagtgtcttactggcaccatttacagtttagaaaacaatctttttcttaaaaatgcccatctgatttctatttttaggagctacttggatttgtatgtattttttctacgtgaaaatatatgtactcttcacttttgttccagtactataattgctcatgcactctttctcccctttgagaacattcagtgaaatacaacttcatcaaagatttgctcaaaggagaagaatcgcatgagtgtgaaaagtagatgctcgtagccagaacagaaaaggttacacatgatcatggcacagaagataggaggtttgacttggtgggccataatgtttattatcctttttgaaataacagggaccagcagcagttttctcaggataaatgctctaccccacttctctatgaacaggtgtggggaggcttactttccattttcatatttatacacctctctacaaaagcaatttttaatgaaggttagtggaattgttaaaaatctgagaggaatgatgactggaggtgtttggggtttttttctgtattcattttttaatgagaaaagttttaaatgtagtacaggttagacccaactactaccttactattataggacgattctatgtttctgttaaagtattcaagtagctttctctgggggaaaaagtaccacttggacacttaaaggaattgggatttttgtctactttggataaggcagttgacttcttaagtaaaagcaatagtgtaaaatgtcattttgtttggaatgttaagtgagcaaataaaaaacatgttgaaattgtaaaaaaaaaaaaaaaa

SEQ ID NO: 640 - DNA, 3066 bp, Homo sapiens
ttccttttatgcgaacacaagtatatgaggggttgtgtaaaaattatttttctcttgctgtactacaaagagatagaatcaaactgctttttttcgacatactggtttttctttctgtttttcttctctttcttctatttcttgtggatattatggctaataacacaacaagtttagggagtccatggccagaaaacttttgggaggaccttatcatgtccttcactgtatccatggcaatcgggctggtacttggaggatttatttgggctgtgttcatttgtctgtctcgaagaagaagagccagtgctcccatctcacagtggagttcaagcaggagatctaggtcttcttacacccacggcctcaacagaactggattttaccgccacagtggctgtgaacgtcgaagcaacctcagcctggccagtctcaccttccagcgacaagcttccctggaacaagcaaattcctttccaagaaaatcaagtttcagagcttctactttccatccctttctgcaatgtccaccacttcctgtggaaactgagagtcagctggtgactctcccttcttccaatatctctcccaccatcagcacttcccacagtctgagccgtcctgactactggtccagtaacagtcttcgagtgggcctttcaacaccgcccccacctgcctatgagtccatcatcaaggcattcccagattcctgagtagggtggcttttggtttttgtttctttcttgtcttgtcttttattgaaaggaaatcaaaaataggctaaacagaattttgagggcatggcccaaataactcatgagttccaagttgaaacatggttgtgcaagttggacattacaatgtaaaacacattttcttcaaacacgttttcccttttgtttcaaaaaatgtaatattttcccccaagcgttttatatttatgtattttgtattcaatgtgaggcttattaaaaatagtgattctaatgtaagaatcagctaagatgcattatatatattttaattaaaattaaaacttcagatatttgtggattacaatcctcatttacttccaatgtgactaaaaagagaaaaaaaatcactgtgtcactttaaagaaaaatcttctaagggatttggattttactttctttagaatgacaagtgaatcatattgacattttacaatcttagatttttctttttttttcttttgagacagggtcttgatccgtcgcccaggcgggagttgcagtagcatgatcaggactcactgcagcctctatctcccaggctcaagtaatcctcccatcttagtgccccaagtagctgggactacaggggtgcactaccacaccgggttgaatttttttttaattttagtagagatgaagtgtcactatgttaccaaggctggtctcaaactcctaaactcagatgatcctcctgcctcggcctcccaaagtgctggaattagcctggccaatcttggatttttaatggaatatgtgggcacaaaatgacagaacataggacattctaaagttccttgatttgatcattataagaagtgtgggactcaagcacaggaaactgaactcttttggtgtcattggatgtttcatttttgacactaattttttctggacaaactctttatgtgtttttcccaagaatagttatctacttcctggaggcaaaatccttggatttactaacatgatgatttaccttttcttcaccgttgtcgttacattgttagaaaagcaacaggaaaaaatccaattcatttgacctaaaaacaagcctcaagtttaaaaccaagctcacgtttttcttaagggaaaaattttctttcttaaacttacatctagcaacttggaaagcactttctctggggatcttcttttgtaactttgcagacaaataagtatgagtcactggggagagagtttgttattgaaatagatgttgcccatgaagaattctccttcctggattgactcttaatcatcaggcatcattcctggtttgcttctctacgaatctcaattccaacttctctgcagagtctgtacagtgattaagccatgccagatggtctttggtgcacacagttatttaagaatccacttccacaggtggctgcccttgtaaggaagaatgcatccctaaatgtggccaccagagagttccagtgggcagatgtctgtggctgcccttctcatttaaggacatgagttcactggagtattactcaaaaagtctgtggttcatttccagtattgtgaatatttagtttatgtggccgtttctttgtttctttgaacagtgggattttcagtgaaaaagtaccctctttttcatttcctattgcagtggtcacagctaatagtgtctgaacatggttcaagaataagagattccatgtagcattttctttattattttcatttcccttatattatccatcattccttaaggacaattattcttaataatgcttatagaaaatgttctctaattaaacatgccaaaaggaaaaagtaagagaaagagggagcaagaagaaaatggaagaaaaagggaaaaaagctaaccggataaccaatttgttataagttggttttcaacaaagaaatttagcagccaagtaaggtttcaagggaatattaacttggtatcagggctacttttttttttttttttttacttgcatgtcatccttaatgtctaacatgaaaaatcagcaaagagtatggtttttatcaagaatttgtgttgggagtaaaaactgctttatagctcccaaattaggaagagaagagcagaaatcctctggggcatttaaccatctggcagaattgttgctgcacccttatcccagttataagacagtcaaaatgactatttcctaaatattgtgagtgtatgaaatgtgaaattaaagcaaaaactggagacttttaatgtatttctttaatttgaaatgttttgtggattgtgaaataaaaataaatttatgtcaagttttattcaaaaaaaaaaaaaaaaaaaaaaaaa

SEQ ID NO: 641 - DNA, 6947 bp, Homo sapiens
ggtgcatttgcatgttgcggagtgattagtgggtttgaaaagggaaccgtggctcggcctcatttcccgctctggttcaggcgcaggaggaagtgttttgctggaggatgatgacagaggtcaggcttcgctaatgggccagtgaggagcggtggaggcgaggccgggcgccggcacacacacattaacacacttgagccatcaccaatcagcataggaatctgagaattgctctcacacaccaacccagcaacatccgtggagaaaactctcaccagcaactcctttaaaacaccgtcatttcaaaccattgtggtcttcaagcaacaacagcagcacaaaaaaccccaaccaaacaaaactcttgacagaagctgtgacaaccagaaaggatgcctcataaagggggaagactttaactaggggcgcgcagatgtgtgaggccttttattgtgagagtggacagacatccgagatttcagagccccatattcgagccccgtggaatcccgcggcccccagccagagccagcatgcagaacagtcacagcggagtgaatcagctcggtggtgtctttgtcaacgggcggccactgccggactccacccggcagaagattgtagagctagctcacagcggggcccggccgtgcgacatttcccgaattctgcaggtgtccaacggatgtgtgagtaaaattctgggcaggtattacgagactggctccatcagacccagggcaatcggtggtagtaaaccgagagtagcgactccagaagttgtaagcaaaatagcccagtataagcgggagtgcccgtccatctttgcttgggaaatccgagacagattactgtccgagggggtctgtaccaacgataacataccaagcgtgtcatcaataaacagagttcttcgcaacctggctagcgaaaagcaacagatgggcgcagacggcatgtatgataaactaaggatgttgaacgggcagaccggaagctggggcacccgccctggttggtatccggggacttcggtgccagggcaacctacgcaagatggctgccagcaacaggaaggagggggagagaataccaactccatcagttccaacggagaagattcagatgaggctcaaatgcgacttcagctgaagcggaagctgcaaagaaatagaacatcctttacccaagagcaaattgaggccctggagaaagagtttgagagaacccattatccagatgtgtttgcccgagaaagactagcagccaaaatagatctacctgaagcaagaatacaggtatggttttctaatcgaagggccaaatggagaagagaagaaaaactgaggaatcagagaagacaggccagcaacacacctagtcatattcctatcagcagtagtttcagcaccagtgtctaccaaccaattccacaacccaccacaccggtttcctccttcacatctggctccatgttgggccgaacagacacagccctcacaaacacctacagcgctctgccgcctatgcccagcttcaccatggcaaataacctgcctatgcaacccccagtccccagccagacctcctcatactcctgcatgctgcccaccagcccttcggtgaatgggcggagttatgatacctacacccccccacatatgcagacacacatgaacagtcagccaatgggcacctcgggcaccacttcaacaggactcatttcccctggtgtgtcagttccagttcaagttcccggaagtgaacctgatatgtctcaatactggccaagattacagtaaaaaaaaaaaaaaaaaaaaaaaggaaaggaaatattgtgttaattcagtcagtgactatggggacacaacagttgagctttcaggaaagaaagaaaaatggctgttagagccgcttcagttctacaattgtgtcctgtattgtaccactggggaaggaatggacttgaaacaaggacctttgtatacagaaggcacgatatcagttggaacaaatcttcattttggtatccaaacttttattcattttggtgtattatttgtaaatgggcatttgtatgttataatgaaaaaaagaacaatgtagactggatggatgtttgatctgtgttggtcatgaagttgttttttttttttttaaaaagaaaaccatgatcaacaagctttgccacgaatttaagagttttatcaagatatatcgaatacttctacccatctgttcatagtttatggactgatgttccaagtttgtatcattcctttgcatataattaaacctggaacaacatgcactagatttatgtcagaaatatctgttggttttccaaaggttgttaacagatgaagtttatgtgcaaaaaagggtaagatataaattcaaggaagaaaaaaagttgatagctaaaaggtagagtgtgtcttcgatataatccaatttgttttatgtcaaaatgtaagtatttgtcttccctagaaatcctcagaatgatttctataataaagttaatttcatttatatttgacaagaatatagatgttttatacacattttcatgcaatcatacgtttcttttttggccagcaaaagttaattgttcttagatatagttgtattactgttcacggtccaatcattttgtgcatctagagttcattcctaatcaattaaaagtgcttgcaagagttttaaacttaagtgttttgaagttgttcacaactacatatcaaaattaaccattgttgattgtaaaaaaccatgccaaagcctttgtatttcctttattatacagttttctttttaaccttatagtgtggtgttacaaattttatttccatgttagatcaacattctaaaccaatggttactttcacacacactctgttttacatcctgatgatccttaaaaaataatccttatagataccataaatcaaaaacgtgttagaaaaaaattccacttacagcagggtgtagatctgtgcccatttatacccacaacatatatacaaaatggtaacatttcccagttagccatttaattctaaagctcaaagtctagaaataatttaaaaatgcaacaagcgattagctaggaattgttttttgaattaggactggcattttcaatctgggcagatttccattgtcagcctatttcaacaatgatttcactgaagtatattcaaaagtagatttcttaaaggagactttctgaaagctgttgcctttttcaaataggccctctcccttttctgtctccctcccctttgcacaagaggcatcatttcccattgaaccactacagctgttcccatttgaatcttgctttctgtgcggttgtggatggttggagggtggaggggggatgttgcatgtcaaggaataatgagcacagacacatcaacagacaacaacaaagcagactgtgactggccggtgggaattaaaggccttcagtcattggcagcttaagccaaacattcccaaatctatgaagcagggcccattgttggtcagttgttatttgcaatgaagcacagttctgatcatgtttaaagtggaggcacgcagggcaggagtgcttgagcccaagcaaaggatggaaaaaaataagcctttgttgggtaaaaaaggactgtctgagactttcatttgttctgtgcaacatataagtcaatacagataagtcttcctctgcaaacttcactaaaaagcctgggggttctggcagtctagattaaaatgcttgcacatgcagaaacctctggggacaaagacacacttccactgaattatactctgctttaaaaaaatccccaaaagcaaatgatcagaaatgtagaaattaatggaaggatttaaacatgaccttctcgttcaatatctactgttttttagttaaggaattacttgtgaacagataattgagattcattgctccggcatgaaatatactaataattttattccaccagagttgctgcacatttggagacaccttcctaagttgcagtttttgtatgtgtgcatgtagttttgttcagtgtcagcctgcactgcacagcagcacatttctgcaggggagtgagcacacatacgcactgttggtacaattgccggtgcagacatttctacctcctgacattttgcagcctacattccctgagggctgtgtgctgagggaactgtcagagaagggctatgtgggagtgcatgccacagctgctggctggcttacttcttccttctcgctggctgtaatttccaccacggtcaggcagccagttccggcccacggttctgttgtgtagacagcagagactttggagacccggatgtcgcacgccaggtgcaagaggtgggaatgggagaaaaggagtgacgtgggagcggagggtctgtatgtgtgcacttgggcacgtatatgtgtgctctgaaggtcaggattgccagggcaaagtagcacagtctggtatagtctgaagaagcggctgctcagctgcagaagccctctggtccggcaggatgggaacggctgccttgccttctgcccacaccctagggacatgagctgtccttccaaacagagctccaggcactctcttggggacagcatggcaggctctgtgtggtagcagtgcctgggagttggccttttactcattgttgaaataatttttgtttattatttatttaacgatacatatatttatatatttatcaatggggtatctgcagggatgttttgacaccatcttccaggatggagattatttgtgaagacttcagtagaatcccaggactaaacgtctaaattttttctccaaacttgactgacttgggaaaaccaggtgaatagaataagagctgaatgttttaagtaataaacgttcaaactgctctaagtaaaaaaatgcattttactgcaatgaatttctagaatatttttcccccaaagctatgcctcctaacccttaaatggtgaacaactggtttcttgctacagctcactgccatttcttcttactatcatcactaggtttcctaagattcactcatacagtattatttgaagattcagctttgttctgtgaatgtcatcttaggattgtgtctatattcttttgcttatttctttttactctgggcctctcatactagtaagattttaaaaagccttttcttctctgtatgtttggctcaccaaggcgaaatatatattcttctctttttcatttctcaagaataaacctcatctgcttttttgtttttctgtgttttggcttggtactgaatgactcaactgctcggttttaaagttcaaagtgtaagtacttagggttagtactgcttatttcaataatgttgacggtgactatctttggaaagcagtaacatgctgtcttagaaatgacattaataatgggcttaaacaaatgaataggggggtccccccactctccttttgtatgcctatgtgtgtctgatttgttaaaagatggacagggaattgattgcagagtgtcgcttccttctaaagtagttttattttgtctactgttagtatttaaagatcctggaggtggacataaggaataaatggaagagaaaagtagatattgtatggtggctactaaaaggaaattcaaaaagtcttagaacccgagcacctgagcaaactgcagtagtcaaaatatttatctcatgttaaagaaaggcaaatctagtgtaagaaatgagtaccatatagggttttgaagttcatatactagaaacacttaaaagatatcatttcagatattacgtttggcattgttcttaagtatttatatctttgagtcaagctgataattaaaaaaaatctgttaatggagtgtatatttcataatgtatcaaaatggtgtctatacctaaggtagcattattgaagagagatatgtttatgtagtaagttattaacataatgagtaacaaataatgtttccagaagaaaggaaaacacattttcagagtgcgtttttatcagaggaagacaaaaatacacacccctctccagtagcttatttttacaaagccggcccagtgaattagaaaaacaaagcacttggatatgatttttggaaagcccaggtacacttattattcaaaatgcacttttactgagtttgaaaagtttcttttatatttaaaataagggttcaaatatgcatattcaatttttatagtagttatctatttgcaaagcatatattaactagtaattggctgttaattttatagacatggtagccagggaagtatatcaatgacctattaagtattttgacaagcaatttacatatctgatgacctcgtatctctttttcagcaagtcaaatgctatgtaattgttccattgtgtgttgtataaaatgaatcaacacggtaagaaaaaggttagagttattaaaataataaactgactaaaatactcatttgaatttattcagaatgttcataatgctttcaaaggacatagcagagcttttgtggagtatccgcacaacattatttattatctatggactaaatcaattttttgaagttgctttaaaatttaaaagcacctttgcttaatataaagccctttaattttaactgacagatcaattctgaaactttattttgaaaagaaaatggggaagaatctgtgtctttagaattaaaagaaatgaaaaaaataaacccgacattctaaaaaaatagaataagaaacctgatttttagtactaatgaaatagcgggtgacaaaatagttgtctttttgattttgatcacaaaaaataaactggtagtgacaggatatgatggagagatttgacatcctggcaaatcactgtcattgattcaattattctaattctgaataaaagctgtatacagtaaaa

SEQ ID NO: 642 - DNA, 817 bp, Homo sapiens
gctggccgtgggagaggcttaaaacaaacgccggaagcaactcccagccccataaagatctgtgaccggcagccccagacctgcctgccttcctgacttctgttccagagcaaaggtcattcagccgcttgaatcagccttttccccccacccggtccccaactttgtttacccgataaggaaggtcagcattcaaagtcaagaagcgccatttatcttcccgtgcgctctacaaatagttccgtgagaaagatggccgggaactcgatcctgctggctgctgtctctattctctcggcctgtcagcaaagttattttgctttgcaagttggaaaggcaagattaaaatacaaagttacgcccccagcagtcactgggtcaccagagtttgagagagtatttcgggcacaacaaaactgtgtggagttttatcctatattcataattacattgtggatggctgggtggtatttcaaccaagtttttgctacttgtctgggtctggtgtacatatatggccgtcacctatacttctggggatattcagaagctgctaaaaaacggatcaccggtttccgactgagtctggggattttggccttgttgaccctcctaggtgccctgggaattgcaaacagctttctggatgaatatctggacctcaatattgccaagaaactgaggcggcaattctaactttttctcttccctttaatgcttgcagaagctgttcccaccatgaaggtaatatggtatcatttgttaaataaaaataaagtctttattctgtttttcttgaaaaaaaaaaaaaaaaaaa

SEQ ID NO: 643 - DNA, 3196 bp, Homo sapiens
agagacgcagctaggcctgcacggctgtggagagatcctgccacgggccttgttcaccatgtcggtgctggatgcgctttgggaggatcgggatgtccgtttcgacctgtccgcgcagcaaatgaaaacaagacctggagaagtccttattgattgtttagattccattgaagacaccaaaggaaataatggagatagaggtagactcttggtaacaaatttaagaattctctggcactctttggcattatcaagagtcaatgtttctgtcggttacaattgcatattgaatattacaacaaggactgctaactctaaattacgaggccaaactgaagctctctatatactaacaaaatgtaacagtactcgttttgaatttatatttacaaatttggttcctggaagccctagactttttacttctgtgatggcagtacacagagcttatgaaacttctaaaatgtatcgtgattttaaattaagaagtgcactaattcagaacaagcaactaagactgttgccacaagaacatgtatatgataaaataaatggagtttggaatttatccagtgatcagggcaatttaggaaccttttttattaccaatgtgagaattgtgtggcatgcaaatatgaatgatagttttaatgtcagtataccatatctgcaaattcgttcaataaagattagagattcaaaatttggtttagctcttgtcatagaaagctctcagcagagtggtggatatgttcttggctttaaaatagatcctgtggaaaaactacaagaatcagttaaggaaatcaattcacttcacaaagtctattctgccagtcccatatttggagttgattatgagatggaagaaaagccccagccgctcgaagctctgacagtcgaacaaattcaagatgatgtagaaatagactctgatggtcacacggatgcttttgtggcttattttgctgatggcaataagcaacaagatcgtgaacctgtattttcagaagaactggggcttgcaatagagaaattgaaggatggattcaccctacagggactttgggaagtaatgagttgattgaccttgagttgagatggatttctattaaagatatctctagtttaaagatactagtcacctgccataagtcatggaatagtttttatatttacagcttttatatttaaaacttgtaagagtttttttaatgattgaggaaaaagtcatttagaaaacttcagttttcggccagcgcgtcgagggaggggccagcgacacatggcctagtaaccgtccggccgcggcgctggcttaagccatggctgagggtagctggattcctcaggcccgggcgctcctacagcagtgcctgcacgcccggctgcaaattcgcccagccaatggggacgttgcggcccagtgggtggaggtccaaagaggactggtgatctacgtgtgctttttcaagggagctgataaagaacttcttcccaaaatggccgaagctggactgtactgctgccatctctggctcactgcaacctccctgcctgattctcctgcctcagcctgccgagtgcctgcgattacaggcgcgcgccgccacacctgactggttttcgtatttttttggtggagacggggtttcgctgtgttggccgggctggtctccagctcctaaccgcgagtgatccgccagcctcggcctcccgaggtgccgggattgcagacggagtctggttcacttagtgctcaatggtgcccaggctggagtgcagtggcgtgatctccgctcgctacaacctccacctcccagctgcctgccttggcctcccgaagtgccaagagtgcagcctctgcccggccgccaccccgtctgggaagtgaggagcgtctctgcctggctgcccattgtctgggacgtgagcagcccctctgcctggctgcccagtctggaaagtgaggagcgtctctgcccggccgccatcccatctaggaagtgaggagcgcctcttcccacccgccatcccatctaggaagtgaggagcttctctgcctggccgcccatcgtctgagatgtggggagcacctctgcccggccgcgaccccatttgggaggtgaggagcaactctgcccagccgccccgtctgagaagtgaggagaccctccgcctggcaaccgccccgtctgataagtaaggagcccctctgcccagcagccgccccgtctgagaagtgaggagcccctctgcccagcagccaccctgtctgggaagtgaggagcgtctccgcccggcagccacccagtccgggagggaggtgggggggtcagtcccccgtccggccagccgccccgtccgggaggtgaggggcgcctctgcccagctgcccctactgggaagtgaggagcccctctgccccgccagccaccccgtccgggagggaggtgggggggtcagccccccgcccggccagccgccccgtccgggagggaggtgggggatcagccccccgcccggctagccgccccgtccgggaggcgaggggcgcctctgcccggctgcccctactgggaagtgaggagcccctctgcccggccagccgccccgtccaggagggaggtgggggggtcagccccccgcccggccagccgcccggtccgggagggaggtgggggggtcagccccccgcccggccagccgccccgtccgggaggttaggggcgcctctgcccggccgcccctactgggaagtgaggagcccctctgcccggccaccaccccgtctgggaggtgtacccaacagctcattgagagcgggcgatgatgacagtggcggctttgtggagtggaggtggggggaaggtggggaaaagattgagaaatcggatggttgccgtgtctgtgtagaaagaagtagacatgggagacttttcattttgttctgtactaagaaaaattcttaccctaaaacttaaagtataataaaaaaaaaaaaacttcagttttctaaaaattatatttaaaattgtaatcaaaatgtacctagtttataaatgtttattttgtacttaatacctgtaaagtcttagttttcagacattaagtgactgtatcatgttcggtttaataaagaatttatgcagcaccaaaaaaaaaaaaaaaaaaaaaaaaaaaaaaaaaaaaaaaa

SEQ ID NO: 644 - DNA, 5010 bp, Homo sapiens
ccccgggagcccagccagagcgagcgccggggccgggcgcgcaggagtgaaaaggaggcggcggccgcagctgcgagcaacagatccggacgccgcgagctgacccgctctgctgttgggcgatttttttttaattgcagaaaaatttattaaattggaaaatcttgcgtttttcaatggcgctggccccgggtcagcgggcgattttctctgcatcaagatgggctttgccgtttccgtagtgggcaccagtggtggcctgattgtcagtcttctcccggcatttttaaggccaggagccgagcgctgcttgtaggcgaataccctacagagcggtttggctttttaaattactgttattattttgggcagagaacagtcggtctggtgcaccccgtcctcgctgcagaagaggctgcgagtccgaggtgggtctctcggaaggtgaaattccttctggggtgagcgagccccggccccgcgcgcagtccagcggccccgcgtgtgtgccctcgccctgccggagccgggaaaatggaggctgtgattgagaaggaatgcagcgcgctcggaggcctcttccagaccatcatcagcgacatgaaggggagctatccagtttgggaagatttcataaacaaagcaggaaagctgcagtcccagcttcggacaacagtagtagcagcagctgccttcttggacgcctttcagaaagtggctgacatggccaccaacacacgtggtgggaccagggagattggatctgctctcaccaggatgtgcatgaggcacagaagcattgaagccaagctgaggcagttttcgagcgctttaattgattgtctgataaacccacttcaagaacagatggaagaatggaagaaagtggccaaccagctggataaagaccacgcaaaagaatataagaaagcccgccaagagataaaaaagaagtcctcggatacgctgaaactgcagaagaaagcaaaaaaagggagaggtgatatccagcctcagttggacagtgctctccaagatgtcaatgataagtatctcttattggaagaaacagaaaagcaggctgtccggaaggctttgattgaagaacgtggccgattctgtaccttcatctctatgctgcggccagtgattgaagaagaaatctcaatgctaggggaaataacccaccttcagaccatctcggaagatctaaaaagcctgaccatggaccctcacaaactgccctcctcaagtgaacaggtgattctggacttgaaaggttctgattacagctggtcgtatcagacgccaccctcttcccccagcaccaccatgtccagaaagtccagtgtctgcagcagcctgaacagtgtcaacagcagtgactcccggtccagcggctcccactcgcattcccccagctcacattaccgctaccgcagctccaacctggcccagcaggctcctgtgaggctgtccagcgtgtcctcccatgactcaggattcatatcccaggatgccttccagtccaagtcaccatcccccatgccgccagaggcccccaaccagttgtctaacgggttttctcactatagtttatcaagtgagtcccacgtggggcccacgggtgcaggccttttccctcattgcctgcctgcctcccgcctgctccctcgggtcacctctgtccaccttccagactacgctcattattacaccattgggcccggcatgttcccgtcatctcagatccctagctggaaggactgggctaagcctgggccctatgaccagcctctggtgaacaccctgcagcgccgcaaagagaagcgagaaccggaccccaacgggggaggacccactaccgccagcggcccacctgcagcagctgaggaggctcagagaccacggagcatgactgtatcggctgccaccaggcctggtgaggagatggaggcttgtgaggagctggccctggccctgtctcggggcctgcagctggacacccagaggagcagccgggactcgcttcagtgctccagcggctacagcacccagacaaccaccccctgctgctctgaggacaccatcccttcccaagtttcagattatgattatttctctgtaagtggtgaccaggaggcagatcagcaggagttcgacaagtcctccaccattccaagaaacagcgacatcagccagtcctaccgacggatgttccaagccaagcgtccagcctcaactgctggcctccccaccaccctgggacctgctatggtcactccaggggttgcaactatccgacggaccccttccaccaagccttctgtccgccggggaaccattggagctggtcccatccccatcaagacacccgtgatccctgtcaagaccccaaccgtcccagacctcccaggggtgttgccagcccctccagatgggccagaagagcggggggagcacagccctgagtcgccatctgtgggtgagggcccccaaggtgtcaccagcatgccctcctcaatgtggagcggccaagcttccgttaaccctccacttccaggcccgaagcccagtatccctgaggagcacagacaggcaattccagaaagtgaagctgaagaccaggaacgggaacccccaagtgccactgtctccccaggccagattccagagagtgaccctgcagacctgagcccaagggatactccacaaggagaagacatgctgaacgccatccgaaggggcgtgaaactgaagaagaccacgacaaacgatcgctcagcccctcgcttttcttaggttcacaagaaatgcgccggtggggaatgaactgtttcattaataaaacctaatttgtcttgatccattccactctataataaaacaaaagattttgtaggcaactcggaatatagctcttttgaaagtactcgacacctttagataagaattaaaaccaacctatgtaactgacataatcttgatcttttaatttgtaaatattgacaattttctttctgcacattttaatcttagtttcccttttgatttttctgaaggtgccaaattccatttaacttttttacaagtctttgtaaaattttaaatgcataaagggggttggggcaggggaaccacgaagtagttaattttagaaaaggatttactatacttcactcttctttttttttccccacaagcttttgtagatgcattgtagtagtctagcttagaagcaaatgcaagttattttaatgtacaaactaaatgggtaagaggtaaaatcttcatttaaatatactatgttctggatgaaaagagcaggagtaacaattgatgagcaatattcagagtgaagtaaatctggaaatggtagactgtgttgggattggggggagggccatgggaggggtacatcgtcaacatagccgatcctgttacatttaagagtagcctcgtaggttgaatttcttctggtagcttcatggtaaatgcatccgaataagccatactggattgcagtgtttgtttctgtagggtgtttaaggacttgacttcctttctcccatgattcctctggactgcacacagcacccacaaccagccccatgcatgctgctgcctctgggcagtcgtagaatctcccacttcagtttctcgttgattgtactcacctttatggaatccaaatacatccaaaagggtaaggcagttttaaaaatgtgaaaacatttaaaaatgataatagcagggaattcttagattatagtaaatgccttttacttaactgtgcccagcaggctgggtgcgttaaaaagcccaagtattttgaaaaaactcgaacagatttgacaagggtagccagcttggagtctagcaacttgccaatgtgtttaccaatctgggggcttgtttttcttttcttctttcaaataaatggcagttaactggctttacagtaaacattgaagagaggaggatttgtttattgtcactgggaatctgaccactatactgtcctttttttgtattctgggtaaatgttttttggaaaagatttgtcttttctaagtggaagttaaatttgttatactgcccatcccctaaagccaacagagatttgtagatttaaagggatcacatttgaagacaatagtgtttaagaaagcaagcaagtcccttagcagtcaggtcataacagggcacatttctgaccgaaccctctcaaggcagaggaggagtttggtgggtttcatacaccctgcagattcctgttggctctaaccctcaattacctaatcttatgctttaacacataactgcattggatgtgagagtaacgtaccgtatggtcattgttctatatattaacattgaacactgctgcgattgctcaaggacattttatgttacggctttaaagcaaaggcatgattattagaaactatttaagcttttttctttgaaaaacaagctccttttacagaatataaacaacagtagtgcctgtggtttagcccaccaatcttgatgactaaaagtagctgatgcattgtgcatatgatgcttgagatggtttttgcaaaagcagaaatcgctgcaaggtaatcacaatagataaaagtggtattttaaacctttgaaataaatggatgtaactgtaccttggtacagcttttcacttgtttagtttttaaacgttagtataatctgaataaataaaatgttgccaaattcaatgtagaaagaatgtgacaacacaccttgggtagttctgcttgtgtttttgcatattgtaaaagcagtgtcacagctaaaaagaaagaaatcgtttctaacagtaaattattgtgctttagttgctagtttgtactgagagttgacctctccctgtgcagttttttgttctaaacttgtataaataacaattgtgtaatgtgtctccctcctacattgtaacaattgcttcagcctacgttataaataaagaaccactagattaaaaaa

SEQ ID NO: 645 - DNA, 1678 bp, Homo sapiens
gagcaaacagagcagcagaaaaggcagttcctcttctccagtgccctccttccctgtctctgcctctccctcccttcctcaggcatcagagcggagacttcagggagaccagagcccagcttgccaggcactgagctagaagccctgccatggcacccctgagaccccttctcatactggccctgctggcatgggttgctctggctgaccaagagtcatgcaagggccgctgcactgagggcttcaacgtggacaagaagtgccagtgtgacgagctctgctcttactaccagagctgctgcacagactatacggctgagtgcaagccccaagtgactcgcggggatgtgttcactatgccggaggatgagtacacggtctatgacgatggcgaggagaaaaacaatgccactgtccatgaacaggtggggggcccctccctgacctctgacctccaggcccagtccaaagggaatcctgagcagacacctgttctgaaacctgaggaagaggcccctgcgcctgaggtgggcgcctctaagcctgaggggatagactcaaggcctgagacccttcatccagggagacctcagcccccagcagaggaggagctgtgcagtgggaagcccttcgacgccttcaccgacctcaagaacggttccctctttgccttccgagggcagtactgctatgaactggacgaaaaggcagtgaggcctgggtaccccaagctcatccgagatgtctggggcatcgagggccccatcgatgccgccttcacccgcatcaactgtcaggggaagacctacctcttcaagggtagtcagtactggcgctttgaggatggtgtcctggaccctgattacccccgaaatatctctgacggcttcgatggcatcccggacaacgtggatgcagccttggccctccctgcccatagctacagtggccgggagcgggtctacttcttcaaggggaaacagtactgggagtaccagttccagcaccagcccagtcaggaggagtgtgaaggcagctccctgtcggctgtgtttgaacactttgccatgatgcagcgggacagctgggaggacatcttcgagcttctcttctggggcagaacctctgctggtaccagacagccccagttcattagccgggactggcacggtgtgccagggcaagtggacgcagccatggctggccgcatctacatctcaggcatggcaccccgcccctccttggccaagaaacaaaggtttaggcatcgcaaccgcaaaggctaccgttcacaacgaggccacagccgtggccgcaaccagaactcccgccggccatcccgcgccacgtggctgtccttgttctccagtgaggagagcaacttgggagccaacaactatgatgactacaggatggactggcttgtgcctgccacctgtgaacccatccagagtgtcttcttcttctctggagacaagtactaccgagtcaatcttcgcacacggcgagtggacactgtggaccctccctacccacgctccatcgctcagtactggctgggctgcccagctcctggccatctgtaggagtcagagcccacatggccgggccctctgtagctccctcctcccatctccttcccccagcccaataaaggtcccttagccccgagtttaaa

SEQ ID NO: 646 - DNA, 1023 bp, Homo sapiens
actggtgacgtagatctcatgtgaccaggagtcgacgtgtgcagaagtcctggtaatctggtccttgttcccgtctggataccagcttccttcagcagcgcaggcggtggtccctgaggcccgtggaaggagtcaaacttgcgggaattttgcagaagtcattgtattcaaagaagaataagcaagaaagaaaagaaggaaggaagagaggtagacagatacaagatgaaatcctgtcaaaaaatggaaggaaaaccagaaaatgagagtgaaccaaagcatgaggaagagccaaagcctgaggaaaagccagaagaggaggagaagctagaggaggaggccaaagcaaaaggaacttttagagaaaggctgattcaatctctccaggagtttaaagaagatatacacaacaggcatttaagcaatgaagatatgtttagagaagtggatgaaatagatgagataaggagagtcagaaacaaacttatagtgatgcgttggaaggttaatcgaaaccatccttacccctatttaatgtagtttaccttgatttttatctgatattaacaataccatatagcttgctttttattagcatttcctgatattcctttgtccatatttctacttataacctgttgctattaatggttttagatgtatctcttgttatctgcatctcattgtttattgtattttgaaccaatctacaagtctctgtcttttaataaaagaactttacacatttgtaaaaaagaggttcttggtaagatataaaatggaaaaaggctaagtaatatgtgaatatcatatttttgaaaggtaaaaagtacatttgtatattacatatatggacataacttgtgaaggatgaaagaaagtacagcctctcggtggtgggattatgaatgatttttctccttttgcttgtttgtattttctatattcctaaaattaacacacattattattgctagaataataaaagttttataaaaaagaagcaacaaaaaaaaaaaaaaa

SEQ ID NO: 647 - DNA, 1197 bp, Homo sapiens
atggaggacgactcactctacttgggaggtgagtggcagttcaaccacttttcaaaactcacatctcctcggcccgatgcagcttttgctgaaatccagcggacttctctccctgagaagtcaccactctcatgtgagacccgtgtcgacctctgtgatgatttggctcctgtggcaagacagcttgctcccagggagaagcttcctctgagtagcaggagacctgctgcggtgggggctgggctccagaatatgggaaatacctgctacgtgaacgcttccttgcagtgcctgacatacacaccgccccttgccaactacatgctgtcccgggagcactctcaaacgtgtcatcgtcacaagggctgcatgctctgtactatgcaagctcacatcacacgggccctccacaatcctggccacgtcatccagccctcacaggcattggctgccggcttccatagaggcaagcaggaagatgcccatgaatttctcatgttcactgtggatgccatgaaaaaggcatgccttcccgggcacaagcaggtggatcatcactctaaggacaccaccctcatccaccaaatatttggaggctactggagatctcaaatcaagtgtctccactgccacggcatttcagacacttttgacccttacctggacatcgccctggatatccaggcagctcagagtgtccagcaagctttggaacagttggtgaagcccgaagaactcaatggagagaatgcctatcattgtggtgtttgtctccagagggcgccggcctccaagacgttaactttacacacctctgccaaggtcctcatccttgtattgaagagattctccgatgtcacaggcaacaagattgccaagaatgtgcaatatcctgagtgccttgacatgcagccatacatgtctcagcagaacacaggacctcttgtctatgtcctctatgctgtgctggtccacgctgggtggagttgtcacaacggacattacttctcttatgtcaaagctcaagaaggccagtggtataaaatggatgatgccgaggtcaccgcctctagcatcacttctgtcctgactcaacaggcctacgtcctcttttacatccagaagagtgaatgggaaagacacagtgagagtgtgtcaagaggcagggaaccaagagcccttggctctgaagactaa

SEQ ID NO: 648 - DNA, 1814 bp, Homo sapiens
atgggccacgggcccccaccgccgcccgccgggaggaccgagcctaagagggcagccgcctgaaggaacgcgacggcggcgcccgcagtatttttcagtgctgtacaagcgtcttgaattactctggtagcttttccagaaagacccatgacttcaccacatttctcgagttacgatgaaggtcctctggatgtcagcatggcagccacaaacctggagaaccagctgcacagcgcacagaagaacctcctgttccttcagcgggagcatgccagcacgctcaaggggctgcactccgagatcaggcggctgcagcagcactgcacagatttaacatatgagctgacagtcaaaagttcggaacagacaggagacgggacttctaaaagcagtgaattaaagaaaagatgtgaagagctggaagcccaactgaaagtgaaagagaacgaaaatgctgagttgttgaaagaactggagcagaaaaacgcgatgatcacagtgctggagaacaccatcaaggagcgagagaagaagtacctggaggagctgaaggccaagagtcacaagctgaccctgctgtctagcgagctggagcagcgggccagcaccatcgcctacctgacctcccagctgcacgccgccaagaagaagctcatgagctccagcgggacctcagatgccagcccgtcagggagccccgtgctggccagctacaagccagcgccccccaaagacaagctacccgaaacgcctcgccgccgcatgaaaaagagcctctcagcccccttgcacccggaatttgaagaggtctacagattcggggcagagagcaggaaactccttttgcgggaaccagtggatgctatgcccgaccccaccccatttctgctggctagggagtccgccgaggtccacctcatcaaagagaggcccctcgtcatcccccccatcgcctccgaccgaagcggcgagcagcacagcccggcccgcgaaaagccgcacaaggcccacgtcggggtggcacatcggatccaccacgccaccccgccgcaggcccagcccgaggtgaagaccctggcggtcgaccaggtgaacggaggcaaggtggtgaggaagcactcagggacggacagaactgtgtgaagcccgccgtgccccaccccgcgctgtccatgcactgtgagcaccactgggaaatctcagccacaccttttctgtttaatcccatgcatgccaaacacttttcacacctaccgacccattctccttctgcttctcttgccctcttcttcacaccaaaatatgatcgtgtccctgccgcagaatatgtatttcctaattgctgtggccaagcgcctgtgtgccgaatcgcttgcttctgatcccgctccgtgtaacctaagtgcgctgcaggcaaagcccaggccacggctgcgtcactactgatgttcacgatgccacacagtcacacacctaattcattctcaagtcggagcaacacataccaaccttgaccttatcctcaagctccagggcagcctggccgagcagcccctgctccctcctggagacccttgtcacctcccgagctcctcctggagacccctgtcacctcctgaccaacctttcccagggcggcaccgatcaccgagcagccgtgcgtgtatctcaaggaactaaataagatgacgctactcctcatagcaccacaacctgaatgtgtgttcatatttttttgttagttttatccaaaatgtttaagatcccaacaaactttattttctaaacctgccaaaaaaaaaaaaaaaaaaaaa

SEQ ID NO: 649 - DNA, 2718 bp, Homo sapiens
cagggtaacgctgtcttgtggacccgcacttcccacccgagacctctcactgagcccgagccgcgcgcgacatgagccacgggaagggaaccgacatgctcccggagatcgccgccgccgtgggcttcctctccagcctcctgaggacccggggctgcgtgagcgagcagaggcttaaggtcttcagcggggcgctccaggaggcactcacagagcactacaaacaccactggtttcccgaaaagccgtccaagggctccggctaccgctgcattcgcatcaaccacaagatggaccccatcatcagcagggtggccagccagatcggactcagccagccccagctgcaccagctgctgcccagcgagctgaccctgtgggtggacccctatgaggtgtcctaccgcattggggaggacggctccatctgcgtcttgtacgaggaggccccactggccgcctcctgtgggctcctcacctgcaagaaccaagtgctgctgggccggagcagcccctccaagaactacgtgatggcagtctccagctaggcccttccgcccccgccctgggcgccgccgtgctcatgctgccgtgacaacaggccaccacatacctcaacctggggaactgtatttttaaatgaagagctatttatatatattatttttttttaagaaaggaggaaaagaaaccaaaagttttttttaagaaaaaaaatccttcaagggagctgcttggaagtggcctccccaggtgcctttggagagaactgttgcgtgcttgagtctgtgagccagtgtctgcctataggagggggagctgttagggggtagacctagccaaggagaagtgggagacgtttggctagcaccccaggaagatgtgagagggagcaagcaaggttagcaactgtgaacagagaggtcgggatttgccctgggggaggaagagaggccaagttcagagctctctgtctcccccagccagacacctgcatccctggctcctctattactcaggggcattcatgcctggacttaaacaatactatgttatcttttcttttatttttctaatgaggtcctgggcagagagtgaaaaggcctctcctgattcctactgtcctaagctgcttttcttgaaatcatgacttgtttctaattctaccctcaggggcctgtagatgttgctttccagccaggaatctaaagctttgggttttctgaggggggggaggagggaactggaggttattggggttaggatggaagggaactctgcacaaaacctttgctttgctagtgctgctttgtgtgtatgtgtggcaaataatttgggggtgatttgcaatgaaattttgggacccaaagagtatccactggggatgttttttggccaaaactcttccttttggaaccacatgaaagtcttgatgctgctgccatgatccctttgagaggtggctcaaaagctacagggaactccaggtcctttattactgccttcttttcaaaagcacaactctcctctaaccctcccctcccccttcccttctggtcgggtcatagagctaccgtattttctaggacaagagttctcagtcactgtgcaatatgccccctgggtcccaggagggtctggaggaaaactggctatcagaacctcctgatgccctggtgggcttagggaaccatctctcctgctctccttgggatgatggctggctagtcagccttgcatgtattccttggctgaatgggagagtgccccatgttctgcaagactacttggtattcttgtagggccgacactaaataaaagccaaaccttgggcactgttttttctccctggtgctcagagcacctgtgggaaaggttgctgtctgtctcagtacaatccaaatttgtcgtagacttgtgcaatatatactgttgtgggttggagaaaagtggaaagctacactgggaagaaactcccttccttcaatttctcagtgacattgatgaggggtcctcaaaagacctcgagtttcccaaaccgaatcaccttaagaaggacagggctagggcatttggccaggatggccaccctcctgctgttgccccttagtgaggaatcttcaccccacttcctctacccccaggttctcctccccacagccagtcccctttcctggatttctaaactgctcaattttgactcaaaggtgctatttaccaaacactctccctacccattcctgccagctctgcctccttttcaactctccacattttgtattgccttcccagacctgcttccagtctttattgctttaaagttcactttgggcccacagacccaagagctaattttctggtttgtgggttgaaacaaagctgtgaatcactgcaggctgtgttcttgcatcttgtctgcaaacaggtccctgcctttttagaagcagcctcatggtctcatgcttaatcttgtctctcttctcttctttatgatgttcactttaaaaacaacaaaacccctgagctggactgttgagcaggcctgtctctcctattaagtaaaaataaatagtagtagtatgtttgtaagctattctgacagaaaagacaaaggttactaattgtatgatagtgtttttatatggaagaatgtacagcttatggacaaatgtacacctttttgttactttaataaaaatgtagtaggataaaaaaaaa

SEQ ID NO: 650 - DNA, 7802 bp, Homo sapiens
ctccccgccagtccgggcgaacgcggccgggcccttggggaccgagtctcggcgccgccggggaacgggcgcgggccgcgccacagccggagcggggcagggccccgccaccgccttcttccgccggccccgccgccggccatgcattcttccggctcctctgactcccaaagccccggctggggcccggccagcccgagaaagacaggacggagtccagtgtgagaatggctataactttggaagaagctccgtggctgggctggctcttggtgaaagcactgatgaggtttgccttcatggtcgtcaacaacctggttgctattccatcctacatctgctatgtaattatacttcagccccttcgagtgctggacagtaagcggttctggtatatcgaaggaatcatgtataaatggcttttaggaatggtagcttcctggggatggtatgctggatatacagtgatggaatggggagaagatattaaagcagtttcaaaagatgaagcagtgatgttggtgaatcatcaggcaacaggagatgtgtgcacactgatgatgtgcctccaggacaaaggactggttgttgctcagatgatgtggttgatggatcatatttttaagtacacaaactttggaattgtttctctagttcatggagacttctttataagacagggaagatcttatcgtgaccaacagctgctgcttctcaagaagcacttagaaaataattacaggagcagagatcgaaaatggattgttttgtttccagaagggggcttcctcaggaagaggcgagaaacaagtcaggcatttgccaagaaaaataacttgccatttcttacaaatgttactctgccaaggtctggggcaacaaaaattattttgaatgcacttgtagcacaacagaaaaatggaagtccagcaggaggagatgctaaagaattagacagcaaatcaaaaggcctccagtggataatagatacaacgatagcttatcccaaagctgaacctatagatattcaaacctggatccttggatacaggaaaccaacagtcacacatgtacattacaggatctttccaattaaagatgtacccctggagactgatgaccttaccacttggctctatcagcggtttgttgaaaaagaagacctcttatcacatttttatgaaacaggagcttttccaccttccaagggccataaggaagctgtttccagggagatgaccctcagcaacttgtggatatttctcatacagtcttttgcatttttgtcaggctatatgtggtacaacatcattcagtatttttaccattgcctgttttaggaattgacgtggacttgtcaaggtcaccgtaggagttcagactttctttcataagtgtgcattattttacatgtgcaaatcagaatatatttaaaaaaaagcaaaagaaattcaatggatggattaatatttatccccctttgggatattttaaaatctactaaaatgaggattagtaatataatgacctgctaatatattttaagaacatgttttaaaaagatacactctatcacatatttaagcaaacatcacatttggagaagaggaaatcataaaatcatcctagaagactatctgagagaaattctgttgccaccagttatacttgacaatttagttgaagctcagaaagttatattcatccctcttagctgtagtctatattagggcagttctctagaacgcccacatttccaccaactcagtaaacttgaggggagctggttggcacctcgtgaagaactctttccctgtcgtttgcagtaacaaactccagtctgttgcagtaacaaactccagtctgttgcagtaacaaactctagaatattgacattctctgtgggggaaaagcagtgtccactggaccccttctggtactggatgtgttctttacaaaggctagctcagtccaacactgtgtttacatacactcgtgcttttccttatctgacttctcattttgtatcagaggcatatcataaattgataattttgcaaaatgcacttttttgagatgcagatatagcaaaggattagtaatatagcctgaaaacaaatgggagcatagcagtgtgtgaggttctcgagaactgtcttgtctctgtgtgtttatttgcctgccagtgctctccagcgccatcctgccctggacaccaccctgacgtgatgcctctattgcagctcagaggctttattttttccattttgacattggcactaaatgcatttggggatggttaaaacaaattactatagaacatttaaatgatcagtttaaggggaaataggctagtttatagaaaaataagagctagtggcttataatggtgacaggttctcatgtggcacccctaggacctgtgcagacagtagtctgttgaatcattacatcaaggagctgcccctgtcagggtgagtgtaattaggaacgataccagcacataaggctccccccaatctcttccagttgctttttcttttttcttttttttttagacaggtcttactctgtcacccaggctgtagtgcagtggcataatctcagctcactgcagtctctgcctcccgggttcgagcgattctcctgcctcagcctcccgagtagctgggactacaggcacccaccatcatgcttggctaatttttgtatttttagtagagatggggtttcaccatgttggccaggctggcctcgaactcctgacctcaggtgatctgcccacctcggcttcctaaagtgctgggattgcaggcgtgagccaccacgcccggcctccagttgcttttgaagagggtaaagtcaagtttctatttctagaaaacattttttagaaatttgttgcgatgtttgtacaatttacctcataagagaaccacacccttctccaaaagtgctggtactgcatcagtgagatgagtagggtttttgtttgggattgtaagactattaagatcctagtaagtcagtggtagtttactgtgatgtgagcattgtagattcccccgttgtcactaatcacacaacaattttgagaagtaggctataaaacaaaaaaaggttgctgttttctatttttaaataaaccaaaaaaaaacagaaaagatgtgaattttccccagttatgtgggaaaggtaaagcaacaccaaataaaagcccacagcagcttcatctttacgataactcagtgcatatgtgaaagagaatgatgcattaactgaaatacctcattgaatattatactactactggtaaaatgcagaagacagtgttaatgtgtttggtttggggactggttgttataaaatgcaatttttttttaaatctaagcatttcattatgtgttctacagtgtcggtgaataaatgaaaccaatctcaatttagaggtatggatgatgacagaaagcccaatagaagcttaatgatgcttctgtttgaggcccagcaagcaccactaaattactggatgaaatgaaattgttcacttgagggattagtcaaccatctgggggagaagttgctcactgtcaaatacagcatgcacggtcctagctgatagaccttttcctcattgctacagcaagccacagggtagagtgaccagttctcctatccaaaaataaatgcgaacatgcatacataaatgtggctgagggccacttttgccatcactgtgctccaaaggaacatgatattgttaaatatactgtacacattaaactattctataagatgctttacttttcaagtacggtgtcattttcacagtctccagggtgacaaatgccaatagatatgtgagttaatttttttaaatatctccgtgagttgtaaatagatgtgtatttgatctgccctatccttctttgattctttaacatgttctctctcttctgtttgcaaaatatgtttgaaagcattggtagtgctttccttatcagtaactggagttctcctgcttgcactagagaaggtaaagagagaatcagtattcttatatggcaatctggggaagcagcaatatgccactgtacaaaactgaagaaaagttcctaatttgtactttgtgaagggagatgaaaggacgtttaaagtatatatattttgtcaagaggaaagaagataaaactatgccagttttatatcaatagcttgtagaagctcagctcttcttggtcttggctagactgcctagattcccacagcagacaaggttgagaatccattgctggaatcttggtattgatgagttacagtgatggaacatgtgcttggccacaggcaggtccagtcactgcaaaagtgaccaagccagcaggtcacccttaacttcagaaacaattattggtggtgaactgtacttaaattgcagagaaacctgtaagtaatggaaggtaaagaaaaattacagaatggaaaataatattttgggcaagcaaacaaattcactgagaattccaaaagtatattaaaaaagaagatagctatgagttcagatctatcttattggtctttaatattacaaccaatccttaactttccactataaaggaaggattactagattgattactttctggatagataatctggtaataaatgataggtaaatcaaaaattacttttatttaggagtttgaattcttactctcatcagacattttttttctagggacgcttactaattaaatgatttaagttgtttcttaggggttttttgcctatatatttatgactgtgttaatgagtagtgaaatgatgcggaaagacagctatcaggaagaggaaatacagaagcctgaataatctatgggttagaaaagcatccctgaataatcaaaaattggcagtattggcattgttctcaagcctttttatgaaaatgaaatctgaaatcaccaaatgtaaacctgggaacattattctagtgttgctgtcttggattcatgttaagaagcgtcttcattctttgctcatgttgcccacttcttgtggatttgtctgagtgttttttgacaatcacttccttaaagactcttctgaactagttggacctggttaatcatagagagtagcctttaatcatggatagtcttcttggattatttttatatttgaaaagaaaatgttttatttgcactactgagtaggaagagttaattgttttctttgttctttttttgaagtcattacacaggacttcactccagagttaccattatgagtgtgttcagctctggtccacagaggatggataaaaatggtttgttatgtttttttgctctgcagtgctatgagccttatatctgttaatatgaaggacaaagtcaaaagcagcagtggatagcaggaagggtagagactaatatgtttgggaccaaaaccatctaagttagagatttccagatcacagaggggctgggcattctctggagcagtcattggttggtgctttattgtaatcattttgcgccaatccccaacaattaggaactggaccctgggaataagctgagggtgctgaactgttggggaagggtgactgtagccacatggaagataaaatatgggtttttctgcaaaatttccatctgagggtttttacatttaatatttttttaagacagtttaaagagcaaacgttttttaagtgtattctagttgcaaagtatgcacacatatcttgaatggctttatttttattgtgtaaaactgttgaacacatgactgtgatgcacaaattctttacgtgtaaggagtctatgcattttacagtaacttattttatgatcgggtgatgagacagttatactttcaactgccattatttttattaagtgctttcattttctttacagttattataaaattgtatttattttatacagatgggttttcattttcctgatgctgtaatgtttacttcagcttgttgacctttctttgtgttatctgcatgttgtaacgtgtgataagaatgaatgtaaaggctgtggcaactgtaattaatttttgtaaagggctggtcacacgtggatctggtttatgaatgcatttgggatgattttggtaaccagatcaccttttcagaaatttagatgtgaacaccaaaagaagcattttctcaacaaaaattaatagctggttctattttttttaaacctagaaaaaataaagttgatttttttcaattaaagtgcttttaattcttagcagtggggatggggcatgtgtgttttaccagagctatttgggcattaatatctgcaggcaagtacttaaagcacactgtggcagttggatgctgaaggcaaactgaaaaaccaaatgaaaaaacatcagacttccttctttggtttaaaaatatttccccctttctccccattctcccaatccagtggtgtgctggtaaatgtttagcagttcactcttctgggagaaaattatgtattcaactatacatgtttgttataaattttgctgatagcaagaacatataacacaattaacaaataataagatacaaatactttattgtaaatcccatatagccagttgattctcacagtatacttagttgctcaggaaagaactaaaatgcttttttaaaaggatacttaattgctttttgctcaactcctacagtcaacctatgattgattgtctttcaactgtgatttgaaaaatggcagactgtccaaatctaactcatttcccaataaatttattatcattcaatctgatacgtgatctactgttaaaactgtttcttaccatggtacatattagactcattaagccgaaaccacttttagctttaacattaattgtaaatttatatgattcaattttcataaccaatgcttaacaactgcaggcaaaattctaaaatgtgaccactgggtcttgggaatcagtaggggctgtatccagcacaccactgccccatcctttttttcttaactattagtgttgaataaacttctcatagttaatctacttgctgaactcaggaaattcctatcactgaccctggccagggctttaaagggtaggaaaagcattaatgtcagtcctacacagcgaacttttgatttagaagaatgtgacagaaagaaaacatttactgaaatacatgggaagcttgcatatttctaaagttgtctttatacttttcatttctcaaagctaagtaaactgtggtataggcatctctaagatgttagcatttaaaacatcaattgttttattgatgtttaaacaattgtttaaatcccactgaaaaatttaaatattaaaatatcttgcacagtctaccaaatgagttaaatcgttacagtcgtgtctacctcttatttttctatctgtatttaggctgctgttttggtgagattctaatttctttttcccctggaactactttctgtggaagacaaggaacagactggggacagaggcctgaaaacaaattggaagcactcagagatctattgctgaccagccctattcctcatgagttggcggggggaaagccattgtttttaatttccacttaatatgaaaatgcttgtttttaaaatgttttttcctgctgaacaaatgtatttttaaaaggaaaaaaattctcttttggctctaagaagtcagctgtatgagcaggcgtgaccatatcataacatgctgatatgatagaaatcaataaatttttacctctcaggaaaaaaaaaaaaaaaaaaaaa

SEQ ID NO: 651 - DNA, 2402 bp, Homo sapiens
gcccgcgccggctgtgctgcacagggggaggagagggaaccccaggcgcgagcgggaagaggggacctgcagccacaacttctctggtcctctgcatcccttctgtccctccacccgtccccttccccaccctctggcccccaccttcttggaggcgacaacccccgggaggcattagaagggatttttcccgcaggttgcgaagggaagcaaacttggtggcaacttgcctcccggtgcgggcgtctctcccccaccgtctcaacatgcttaggggtccggggcccgggctgctgctgctggccgtccagtgcctggggacagcggtgccctccacgggagcctcgaagagcaagaggcaggctcagcaaatggttcagccccagtccccggtggctgtcagtcaaagcaagcccggttgttatgacaatggaaaacactatcagataaatcaacagtgggagcggacctacctaggcaatgcgttggtttgtacttgttatggaggaagccgaggttttaactgcgagagtaaacctgaagctgaagagacttgctttgacaagtacactgggaacacttaccgagtgggtgacacttatgagcgtcctaaagactccatgatctgggactgtacctgcatcggggctgggcgagggagaataagctgtaccatcgcaaaccgctgccatgaagggggtcagtcctacaagattggtgacacctggaggagaccacatgagactggtggttacatgttagagtgtgtgtgtcttggtaatggaaaaggagaatggacctgcaagcccatagctgagaagtgttttgatcatgctgctgggacttcctatgtggtcggagaaacgtgggagaagccctaccaaggctggatgatggtagattgtacttgcctgggagaaggcagcggacgcatcacttgcacttctagaaatagatgcaacgatcaggacacaaggacatcctatagaattggagacacctggagcaagaaggataatcgaggaaacctgctccagtgcatctgcacaggcaacggccgaggagagtggaagtgtgagaggcacacctctgtgcagaccacatcgagcggatctggccccttcaccgatgttcgtgcagctgtttaccaaccgcagcctcacccccagcctcctccctatggccactgtgtcacagacagtggtgtggtctactctgtggggatgcagtggctgaagacacaaggaaataagcaaatgctttgcacgtgcctgggcaacggagtcagctgccaagagacagctgtaacccagacttacggtggcaactcaaatggagagccatgtgtcttaccattcacctacaatggcaggacgttctactcctgcaccacagaagggcgacaggacggacatctttggtgcagcacaacttcgaattatgagcaggaccagaaatactctttctgcacagaccacactgttttggttcagactcgaggaggaaattccaatggtgccttgtgccacttccccttcctatacaacaaccacaattacactgattgcacttctgagggcagaagagacaacatgaagtggtgtgggaccacacagaactatgatgccgaccagaagtttgggttctgccccatggctgcccacgaggaaatctgcacaaccaatgaaggggtcatgtaccgcattggagatcagtgggataagcagcatgacatgggtcacatgatgaggtgcacgtgtgttgggaatggtcgtggggaatggacatgcattgcctactcgcagcttcgagatcagtgcattgttgatgacatcacttacaatgtgaacgacacattccacaagcgtcatgaagaggggcacatgctgaactgtacatgcttcggtcagggtcggggcaggtggaagtgtgatcccgtcgaccaatgccaggattcagagactgggacgttttatcaaattggagattcatgggagaagtatgtgcatggtgtcagataccagtgctactgctatggccgtggcattggggagtggcattgccaacctttacagacctatccaagctcaagtggtcctgtcgaagtatttatcactgagactccgagtcagcccaactcccaccccatccagtggaatgcaccacagccatctcacatttccaagtacattctcaggtggagacctgtgagtatcccacccagaaaccttggatactgagtctcctaatcttatcaattctgatggtttctttttttcccagcttttgagccaacaactctgattaactattcctatagcatttactatatttgtttagtgaacaaacaatatgtggtcaattaaattgacttgtagactgaaaaaaaaaaaaaaaaaaaa

SEQ ID NO: 652 - DNA, 4814 bp, Homo sapiens
gaattctagaggcggcggagggtggcgaggagctctcgctttctctcgctccctccctctccgactccgtctctctctctctctctctctctcccctccctctctttccctctgttccattttttccccctctaaatcctccctgccctgcgcgcctggacacagatttaggaagcgaattcgctcacgttttaggacaaggaagagagagaggcacgggagaagagcccagcaagatttggattgaaaccgagacaccctccggaggctcggagcagaggaaggaggaggagggcggcgaacggaagccagtttgcaattcaagttttgatagcgctggtagaagggggtttaaatcagatttttttttttttaaaggagagagactttttccgctctctcgctccctgttaaagccgggtctagcacagctgcagacgccaccagcgagaaagagggagaggaagacagatagggggcgggggaagaagaaaaagaaaggtaaaaagtcttctaggagaacctttcacatttgcaacaaaagacctaggggctggagagagattcctgggacgcagggctggagtgtctatttcgagctcagcggcagggctcgggcgcgagtcgagaccctgctcgctcctctcgcttctgaaaccgacgttcaggagcggctttttaaaaacgcaaggcacaaggacggtcacccgcgcgactatgtttgctgatttttcgccttgccctctttaaaagcggcctcccattctccaaaagacacttcccctcctccctttgaagtgcattagttgtgatttctgcctccttttcttttttctttcttttttgttttgctttttccccccttttgaattatgtgctgctgttaaacaacaacaaaaaaacaacaaaacacagcagctgcggacttgtccccggctggagcccagcgccccgcctggagtggatgagcctctccatgagagatccggtcattcctgggacaagcatggcctaccatccgttcctacctcaccgggcgccggacttcgccatgagcgcggtgctgggtcaccagccgccgttcttccccgcgctgacgctgcctcccaacggcgcggcggcgctctcgctgccgggcgccctggccaagccgatcatggatcaattggtgggggcggccgagaccggcatcccgttctcctccctggggccccaggcgcatctgaggcctttgaagaccatggagcccgaagaagaggtggaggacgaccccaaggtgcacctggaggctaaagaactttgggatcagtttcacaagcggggcaccgagatggtcattaccaagtcgggaaggcgaatgtttcctccatttaaagtgagatgttctgggctggataaaaaagccaaatacattttattgatggacattatagctgctgatgactgtcgttataaatttcacaattctcggtggatggtggctggtaaggccgaccccgaaatgccaaagaggatgtacattcacccggacagccccgctactggggaacagtggatgtccaaagtcgtcactttccacaaactgaaactcaccaacaacatttcagacaaacatggatttactttggccttcccaagtgatcacgctacgtggcaggggaattatagttttggtactcagactatattgaactccatgcacaaataccagccccggttccacattgtaagagccaatgacatcttgaaactcccttatagtacatttcggacatacttgttccccgaaactgaattcatcgctgtgactgcataccagaatgataagataacccagttaaaaatagacaacaacccttttgcaaaaggtttccgggacactggaaatggccgaagagaaaaaagaaaacagctcaccctgcagtccatgagggtgtttgatgaaagacacaaaaaggagaatgggacctctgatgagtcctccagtgaacaagcagctttcaactgcttcgcccaggcttcttctccagccgcctccactgtagggacatcgaacctcaaagatttatgtcccagcgagggtgagagcgacgccgaggccgagagcaaagaggagcatggccccgaggcctgcgacgcggccaagatctccaccaccacgtcggaggagccctgccgtgacaagggcagccccgcggtcaaggctcaccttttcgctgctgagcggccccgggacagcgggcggctggacaaagcgtcgcccgactcacgccatagccccgccaccatctcgtccagcactcgcggcctgggcgcggaggagcgcaggagcccggttcgcgagggcacagcgccggccaaggtggaagaggcgcgcgcgctcccgggcaaggaggccttcgcgccgctcacggtgcagacggacgcggccgccgcgcacctggcccagggccccctgcctggcctcggcttcgccccgggcctggcgggccaacagttcttcaacgggcacccgctcttcctgcaccccagccagtttgccatggggggcgccttctccagcatggcggccgctggcatgggtcccctcctggccacggtttctggggcctccaccggtgtctcgggcctggattccacggccatggcctctgccgctgcggcgcagggactgtccggggcgtccgcggccaccctgcccttccacctccagcagcacgtcctggcctctcagggcctggccatgtcccctttcggaagcctgttcccttacccctacacgtacatggccgcagcggcggccgcctcctctgcggcagcctccagctcggtgcaccgccaccccttcctcaatctgaacaccatgcgcccgcggctgcgctacagcccctactccatcccggtgccggtcccggacggcagcagtctgctcaccaccgccctgccctccatggcggcggccgcggggcccctggacggcaaagtcgccgccctggccgccagcccggcctcggtggcagtggactcgggctctgaactcaacagccgctcctccacgctctcctccagctccatgtccttgtcgcccaaactctgcgcggagaaagaggcggccaccagcgaactgcagagcatccagcggttggttagcggcttggaagccaagccggacaggtcccgcagcgcgtccccgtagacccgtcccagacacgtcttttcattccagtccagttcaggctgccgtgcactttgtcggatataaaataaaccacgggcccgccatggcgttagcccttccttttgcagttgcgtctgggaaggggccccggactccctcgagagaatgtgctagagacagcccctgtcttcttggcgtggtttatatgtccgggatctggatcagattctgggggctcagaaacgtcggttgcattgagctactgggggtaggagttccaacatttatgtccagagcaacttccagcaaggctggtctgggtctctgcccaccaggcggggaggtgttcaaagacatctccctcagtgcggatttatatatatatttttccttcactgtgtcaagtggaaacaaaaacaaaatctttcaaaaaaaaaatcgggacaagtgaacacattaacatgattctgtttgtgcagattaaaaactttatagggacttgcattatcggttctcaataaattactgagcagctttgtttggggagggaagtccctaccatccttgtttagtctatattaagaaaatctgtgtctttttaatattcttgtgatgttttcagagccgctgtaggtctcttcttgcatgtccacagtaatgtatttgtggtttttattttgaacgcttgcttttagagagaaaacaatatagccccctacccttttcccaatcctttgccctcaaatcagtgacccaagggagggggggatttaaagggaaggagtgggcaaaacacataaaatgaatttattatatctaagctctgtagcaggattcatgtcgttctttgacagttctttctctttcctgtatatgcaataacaaggttttaaaaaaataataaagaagtgagactattagacaaagtatttatgtaattatttgataactcttgtaaataggtggaatatgaatgcttggaaaattaaactttaatttattgacattgtacatagctctgtgtaaatagaattgcaactgtcaggttttgtgttcttgttttcctttagttgggtttatttccaggtcacagaattgctgttaacactagaaaacacacttcctgcaccaacaccaataccctttcaaaagagttgtctgcaacatttttgttttcttttttaatgtccaaaagtgggggaaagtgctatttcctattttcaccaaaattggggaaggagtgccactttccagctccacttcaaattccttaaaatataactgagattgctgtggggagggaggagggcagaggctgcggtttgactttttaatttttcttttgttatttgtatttgctagtctctgatttcctcaaaacgaagtggaatttactactgttgtcagtatcggtgttttgaattggtgcctgcctatagagatatattcacagttcaaaagtcaggtgctgagagatggtttaaagacaaattcatgaaggtatattttgtgttatagttgttgatgagttctttggttttctgtatttttccccctctctttaaaacatcactgaaatttcaataaatttttattgaaatgtctaaaaaaaaaaaaaaaaaaaaaaaaaaaaaaa

SEQ ID NO: 653 - DNA, 7992 bp, Homo sapiens
cgctgggcaacgtgggcaacgcggcgggcggcgggctcgcgcggcgggaggggcagcggcggcgcgcccgggctctacctcccgggctctgcctcccgggctctgcctctcgggcacttgcctggctcctgcgcgttcctgggcatcggctctgcagctgacacacagtagcggggacacccgacgccgctagcgacaggcgcgcggacggctggtcccagagggacgctgcgcttggggacgccggcgagactcgccaggagccaagaggaaacaggaatcattcaaactggattttaaaatcattgcaaatcagtgatggatcagaagttgcagagtgcaatcccgagtaaaagtcttcaaaaaattttgcttcaggtaacagaggaaggaaaattgatctaccaccttaaaaccctgatctagaaaaaatatatattcatgataggaagttataactaagaaaatttatttgcctcttaatgctcctgaatgaaaggaattatccctttgttctttgggaggacttgtgtatctgagattgttgtaataatcagtcattttattaaaaccttgacatgatcaccagggaggaaaaatagagcaatagtcaaaacctgtgtgttagtccaagatgacttctgaagaaatgacagcttctgttctcatacctgtgactcagagaaaagtggtttctgcccagtcggctgcagatgaaagtagtgaaaaggtctcagacatcaatatttcaaaagcacatactgtcagacgaagtggggagacttctcataccatctcacaactgaacaaacttaaagaagaaccttctggaagcaacttgccaaagattctctcaatagcgagggagaaaatagtgagtgatgagaacagtaatgaaaaatgttgggagaaaatcatgccagattctgcgaaaaaccttaacattaactgcaacaacatattgagaaaccatcagcatggccttcctcagagacaattttatgaaatgtacaactctgttgctgaggaagacttgtgtttagaaactggaattccttctccactggaaagaaaggtgttccctggaattcaactggaactagacagaccttccatgggcattagtcctttaggaaatcagtcagtgatcatagagacaggcagagcacaccctgacagcagaagggcagtatttcattttcattatgaagttgacagaagaatgtcagacactttctgtaccctatcagaaaacttaattttagacgattgtggaaattgtgtaccactacctgggggtgaggagaagcaaaagaaaaactatgtggcatatacctgtaaactgatggaattggccaaaaattgtgataataagaatgagcagctgcagtgtgatcattgtgacaccttgaatgataaatacttttgctttgaaggctcttgtgagaaggttgacatggtatattcaggtgatagcttttgtaggaaagactttactgacagtcaagctgccaagacctttttgagccattttgaggacttccctgataattgtgatgatgtagaagaagacgcttttaaaagcaaaaaggagcgatccactttgttagtcaggagattctgtaaaaatgacagagaagttaagaaatctgtgtatactggaacaagagcaattgtgagaactctgccttctggccacattgggctgactgcatggagttacatagatcagaagagaaatggtcccttactgccttgtgggagagtaatggaacccccgtcaacagtggagataaggcaagatgggagccaacgtctgtcagaagcccagtggtatcctatctacaatgcagtgagaagagaagaaacagaaaatacagttggatctctactccatttcctcaccaagctcccagcctccgagacagcccatggaaggataagcgttggtccatgcttaaagcaatgtgtccgagacactgtatgtgagtatcgcgccaccctccaaaggacttcaatatcgcagtacatcaccggttctctcctagaagcaaccacgtctttgggagcaagaagtggccttctcagtacttttggaggatccactggacgaatgatgctgaaagaacgccagccaggcccctctgtggccaattccaatgccctcccttcaagttcagctgggatcagcaaggagctgatcgatctgcagcctctcatccagttcccagaggaagtcgccagcatcctgatggagcaagagcagactatttaccgcagggtcttgccagtcgactacctttgcttcttaacacgggacttgggcactcctgaatgccagagctccttgccctgcctcaaagcatccatctcagcgtcgattcttaccactcagaatggagagcacaatgcccttgaagatctggtgatgaggtttaatgaggtgagctcctgggtgacatggctgatcctcacggcaggctccatggaggagaagcgagaagtcttttcatatttggtgcatgtggccaaatgctgctggaacatgggcaactacaacgctgtcatggagttcttggctggcctcaggtcaagaaaagttttaaaaatgtggcagttcatggaccagtctgatattgagaccatgaggagcctgaaggatgctatggcccagcatgagtcctcttgtgagtacagaaaggtggtgacacgtgccctgcacatccctggctgtaaggtggttccattctgtggggtgtttctgaaggagctctgtgaagtgcttgacggcgcctccggtctcatgaagctttgcccgcggtacaattcccaagaagaaactttagagtttgtagcagattacagtggacaagataatttcttacaacgagtgggacaaaatggcttaaagaattcggagaaggagtccactgtcaacagcatctttcaggtcatccggagctgcaatcgaagtctggagacagacgaggaggacagccccagtgaaggaaacagctccaggaaaagctccttgaaggataaaagccgatggcagtttataattggagatttgttggattcagacaatgacatctttgagcaatccaaagaatacgactctcatggttcagaggactcacagaaggccttcgaccatgggacggagctcatcccttggtacgtgctgtccatccaagccgatgtgcaccagttcctgctgcagggggccacggtcatccactacgaccaggacacacacctctctgcccgctgcttcctccagcttcagcccgacaatagcaccttgacctgggtaaagcccacaactgcctccccagccagcagtaaagcaaaacttggtgtacttaataacacagctgagcctggaaaattcccactactgggtaatgctggattaagtagcctgacggaaggggtcttggatctttttgcagtgaaggctgtatacatgggccaccctggcattgatatacacactgtgtgtgttcagaacaaactgggtagcatgttcctgtcagagactggtgtgacattgctctatgggcttcagaccacagacaacagattattgcacttcgtggcaccaaagcacacagctaaaatgctcttcagcggattattggaactcactagagctgtgagaaagatgaggaaattccctgaccaaagacagcagtggctgcggaaacagtacgtcagcctttatcaggaggatggacggtatgaaggcccaactttggctcacgctgtggagttgtttggtggcagacggtggagtgctcgaaaccccagccccggaacatcagcaaagaatgctgagaagcccaatatgcagagaaacaataccctgggcataagcactaccaagaaaaagaagaaaatcctcatgaggggtgagagtggagaggtaactgacgatgagatggcaacccgaaaggccaagatgcacaaagagtgtcgaagccggagtggttctgatcctcaagacattaatgaacaagaagaatcagaggtgaatgccatcgctaaccctccaaaccccctcccttccagaagagcccactctttgaccacagctgggtcccccaacttggctgccgggacgtcatctcccatcaggccagtgtcctcccctgtgctgtcttcttcaaacaagagcccatccagtgcttggagcagtagtagctggcacgggcggatcaaaggcggcatgaagggatttcagagcttcatggtttcagatagcaacatgagttttgttgaatttgttgagctgttcaaatcattcagtgtcaggagccgcaaggacctgaaggatctgtttgatgtctatgcagtgccctgcaaccgatctggctccgagtcagccccactctacaccaacctgacaattgatgaaaacaccagcgatcttcagcctgacctagatctgttgaccagaaatgtctcggatttggggttgttcattaagagtaaacagcagctatcggacaaccagaggcagatatctgatgccattgctgctgcaagcattgtgacaaatggcactgggattgagagcacatctctgggcatttttggggtgggcatacttcagctcaacgatttcctcgtgaattgccaaggagaacactgcacttatgatgaaatcctcagcatcatccagaagttcgagcctagcatcagtatgtgtcatcagggactaatgtcatttgaagggtttgccaggtttctgatggataaagaaaattttgcctcaaaaaatgatgagtcacaggagaacattaaagaactgcagctacccctctcatactattacatcgaatcttcgcacaatacctacctcacgggccatcagctcaaaggagaatcctcggtagaactctacagccaggtccttttgcaaggctgtcgaagtgtagaattggactgctgggacggagacgatgggatgcccatcatttatcatggacatacgctgacaaccaagatccccttcaaggaagtggttgaagccattgatcgcagtgccttcatcaactctgacctgccaatcatcatatcgattgagaaccactgttcattgcctcagcaacgaaaaatggcagaaattttcaagactgtgtttggagaaaagctggtgactaaattcttatttgagactgatttctcagatgatccaatgcttccttcacctgaccaactcagaaagaaagttcttcttaaaaacaagaagctaaaagcccatcagacgccagtggatatcttaaagcaaaaggctcatcagttagcatctatgcaagtgcaggcttataatggtgggaatgccaacccccgacctgccaataatgaggaagaggaagatgaggaggacgaatatgattatgactatgaatccctttctgatgacaacattctggaagacagacctgaaaataaatcatgtaatgacaagcttcagtttgaatataatgaagaaatcccaaagaggataaagaaagcagataactctgcttgcaacaaaggaaaggtttatgatatggaactgggagaagaattttatcttgatcagaataaaaaggaaagcagacagattgcaccagagctttctgaccttgtaatctattgtcaagcagtaaaatttccaggactgtcaactctaaatgcatctggctctagcagaggaaaagaaaggaaaagcaggaagtccatttttggcaacaatccgggcagaatgagcccaggggagacagcatcatttaacaaaacatctggaaaaagttcctgtgaaggcattcgacagacctgggaggaatcttcttcccctctcaacccaaccacgtccctcagtgctatcattagaactcccaaatgttatcatatctcgtcgctgaatgaaaatgccgccaaacgtctgtgtcgcaggtattctcagaaactgacccagcacaccgcctgtcagctgctgagaacttaccctgctgccacccgcatcgactcttccaacccgaaccccctcatgttctggctccatgggatacagcttgtggcactcaactaccagactgatgatctccctttacatttaaatgctgcaatgtttgaggcaaatggtggttgtggttatgtattgaaacctccagttctgtgggacaagaactgccccatgtatcagaagttttctccactagaaagagatctggacagcatggatcctgcagtctattctttaactattgtctctggtcagaatgtgtgccccagtaatagcatgggaagcccgtgcattgaagtcgacgtcctgggcatgcctctggacagctgccatttccgcacaaagcccatccatcgaaacaccctgaaccccatgtggaacgagcagtttctgttccacgttcacttcgaagatcttgtatttcttcgttttgcagttgtggaaaacaatagttcagcggtaactgctcagagaatcattccactgaaagctttaaaacgaggatatcgacatcttcagctgcgaaaccttcacaatgaagtcttggagatttctagtttattcattaacagcagaaggatggaagaaaattcctctggcaataccatgtcagcctcttcgatgtttaatacagaagaaagaaaatgtttgcagactcacagagtcacggtgcatggggtcccagggccagagccctttaccgttttcactattaatggaggcaccaaggcaaagcagcttctgcagcaaattctgacaaatgaacaagacatcaaacctgttaccacagactattttttgatggaagaaaaatattttatatctaaagaaaagaatgaatgtaggaaacaaccattccagagagccattggtccagaagaggagatcatgcaaattttaagcagctggtttccagaagagggatacatgggcaggattgtcttaaaaacccagcaggaaaacctagaagagaaaaacattgttcaagatgacaaagaggtgatcttgagctcagaggaggagagtttctttgtccaagtgcatgatgtttctccagagcaacctcgaacagtcatcaaagcaccccgcgtcagcactgcacaggatgtcattcagcagaccttatgcaaagccaaatattcctacagcatcctgagcaaccccaatccaagcgactatgtgcttttggaagaggtggtgaaagacactaccaacaagaagactaccacaccaaagtcctctcagcgggtccttctggatcaggagtgtgtgtttcaagcccaaagcaagtggaaaggtgcaggaaaattcatccttaagctaaaggagcaggtgcaggcatctcgagaagataaaaagaaaggcatttctttcgcaagtgaactcaagaagctcaccaagtcaactaaacagccccgaggacttacatcaccttctcagctcttgacctcagaaagtatccaaaccaaggaggagaaacctgtgggtggcttgtcctccagtgacacaatggattaccgacagtgactaagggcagcatgtttaacccaggtgaagatctttaagcaagaagttaaagagtgaacatggtggaaaaaatataattattttcatcagacttaaactggaaattgatgatttctgaactgaagccttcacacatgtgagatccatgctgaggagaagcaaaatggcacagggctagttgccaccaaccaatttactgatgaatgaagcccaggggactgccattttataaatgtcagcagttggaaaaatcgtcacgaattgacttagagcaagggtcagcaagcttgtctgtaaagggccaaacagtaaatattttagggctgggggccataaaatatgttgcaaccacccaattctgccattgtagtgcaaaagcagccatagacaacacatacatgaacgaacgtggctgtattccaataaaactttatttatggacactgaaa

SEQ ID NO: 654 - DNA, 1490 bp, Homo sapiens; identical to SEQ ID NO: 613

SEQ ID NO: 655 - DNA, 2750 bp, Homo sapiens
attgtttcctactccattttctctggggcaatagcagaataggagcaagccagcactagtcagctaactaagtgactcaaccaaggccttttttccttgttatctttgcagatacttcattttcttagcgtttctggagattacaacatcctgcggttccgtttctgggaactttactgatttatctcccccctcacacaaataagcattgattcctgcatttctgaagatctcaagatctggactactgttgaaaaaatttccagtgaggctcacttatgtctgtaaagatgggaaaaaaatacaagaacattgttctactaaaaggattagaggtcatcaatgattatcattttagaatggttaagtccttactgagcaacgatttaaaacttaatttaaaaatgagagaagagtatgacaaaattcagattgctgacttgatggaagaaaagttccgaggtgatgctggtttgggcaaactaataaaaattttcgaagatataccaacgcttgaagacctggctgaaactcttaaaaaagaaaagttaaaagtaaaaggaccagccctatcaagaaagaggaagaaggaagtggatgctacttcacctgcaccctccacaagcagcactgtcaaaactgaaggagcagaggcaactcctggagctcagaaaagaaaaaaatcaaccaaagaaaaggctggacccaaagggagtaaggtgtccgaggaacagactcagcctccctctcctgcaggagccggcatgtccacagccatgggccgttccccatctcccaagacctcattgtcagctccacccaacagttcttcaactgagaacccgaaaacagtggccaaatgtcaggtaactcccagaagaaatgttctccaaaaacgcccagtgatagtgaaggtactgagtacaacaaagccatttgaatatgagaccccagaaatggagaaaaaaataatgtttcatgctacagtggctacacagacacagttcttccatgtgaaggttttaaacaccagcttgaaggagaaattcaatggaaagaaaatcatcatcatatcagattatttggaatatgatagtctcctagaggtcaatgaagaatctactgtatctgaagctggtcctaaccaaacgtttgaggttccaaataaaatcatcaacagagcaaaggaaactctgaagattgatattcttcacaaacaagcttcaggaaatattgtatatggggtatttatgctacataagaaaacagtaaatcagaagaccacaatctacgaaattcaggatgatagaggaaaaatggatgtagtggggacaggacaatgtcacaatatcccctgtgaagaaggagataagctccaacttttctgctttcgacttagaaaaaagaaccagatgtcaaaactgatttcagaaatgcatagttttatccagataaagaaaaaaacaaacccgagaaacaatgaccccaagagcatgaagctaccccaggaacagcgtcagcttccatatccttcagaggccagcacaaccttccctgagagccatcttcggactcctcagatgccaccaacaactccatccagcagtttcttcaccaagaaaagtgaagacacaatctccaaaatgaatgacttcatgaggatgcagatactgaaggaagggagtcattttccaggaccgttcatgaccagcataggcccagctgagagccatccccacactcctcagatgcctccatcaacaccaagcagcagtttcttaaccacgttgaaaccaagactgaagactgaacctgaagaagtttccatagaagacagtgcccagagtgacctcaaagaagtgatggtgctgaacgcaacagaatcatttgtatatgagcccaaagagcagaagaaaatgtttcatgccacagtggcaactgagaatgaagtcttccgagtgaaggtttttaatattgacctaaaggagaagttcaccccaaagaagatcattgccatagcaaattatgtttgccgcaatgggttcctggaggtatatcctttcacacttgtggctgatgtgaatgctgaccgaaacatggagatcccaaaaggattgattagaagtgccagcgtaactcctaaaatcaatcagctttgctcacaaactaaaggaagttttgtgaatggggtgtttgaggtacataagaaaaatgtaaggggtgaattcacttattatgaaatacaagataatacagggaagatggaagtggtggtgcatggacgactgaccacaatcaactgtgaggaaggagataaactgaaactcacctgctttgaattggcaccgaaaagtgggaataccggggagttgagatctgtaattcatagtcacatcaaggtcatcaagaccaggaaaaacaagaaagacatactcaatcctgattcaagtatggaaacttcaccagactttttcttctaaaatctggatgtcattgacgataatgtttatggagataaggtctaagtgcctaaaaaaatgtacatatacctggttgaaatacaacactatacatacacaccaccatatatactagctgttaatcctatggaatggggtattgggagtgcttttttaatttttcatagtttttttttaataaaatggcatattttgcatctacaacttctataatttgaaaaaataaataaacattatcttttttgtgaaaggaaaaaaaaaaaaaaaaaa

SEQ ID NO: 656 - DNA, 1867 bp, Homo sapiens
cgccgctctgggagccgctgctggtcccggccttgcggcctgcgggggaggctgcccggaggaggcagcggcggcggcagcgcgtcctcggtccccaggaccacggcttctttcctgccagatctatccatctggccatccatccgtgggggtctgcaatggccacctttagccgccaggaatttttccagcagctactgcaaggctgtctcctgcctactgcccagcagggccttgaccagatctggctgctccttgccatctgcctcgcctgccgcctcctctggaggctcgggttgccatcctacctgaagcatgcaagcaccgtggcaggcgggttcttcagcctctaccacttcttccagctgcacatggtttgggtcgtgctgctcagcctcctgtgctacctcgtgctgttcctctgccgacattcctcccatcgaggcgtcttcctatccgtcaccatcctcatctacctactcatgggtgagatgcacatggtagacaccgtgacatggcacaagatgcgaggggcacagatgattgtggccatgaaggcagtgtctctgggcttcgacctggaccggggcgaggtgggtacggtgccctcgccagtggagttcatgggctacctctacttcgtgggcaccatcgtcttcgggccctggatatccttccacagctacctacaagctgtccaaggccgcccactgagctgccggtggctgcagaaggtggcccggagcctggcactggccctgctgtgccttgtgctgtccacttgcgtgggcccctacctcttcccgtacttcatccccctcaacggtgaccgcctccttcgcaacaagaaacgcaaagccaggtggctgcgagcctacgagagtgctgtctccttccacttcagcaactattttgtgggctttctttccgaggccacggccacgttggcgggggctggctttaccgaggagaaggatcacctggaatgggacctgacggtgtccaagccactgaatgtggagctgcctcggtcaatggtggaagttgtcacaagctggaacctgcccatgtcttattggctaaataactatgttttcaagaatgctctccgcctggggaccttctcggctgtgctggtcacctatgcagccagcgccctcctacatggcttcagtttccacctggctgcggtcctgctgtccctggcttttatcacttacgtggagcatgtcctccggaagcgcctggctcggatcctcagtgcctgtgtcttgtcaaagcggtgcccgccagactgttcgcaccagcatcgcttgggcctgggggtgcgagccttaaacttgctctttggagctctggccatcttccacctggcctacctgggctccctgtttgatgtcgatgtggatgacaccacagaggagcagggctacggcatggcatacactgtccacaagtggtcagagctcagctgggccagtcactgggtcacttttggatgctggatcttctaccgtctcataggctgaggcacatctgtggaccctcataaccctcttaagacccctctcagggtgccactgatgggggatgagggaaggccctctctctactccttgaccccctccatccttgacccccaacacctcaacacacacacacacacacacacacaaaatcacaccattttcatgcctgtcaatccccaccccaccacaaggcaggaagggggtggtgcctgctggggcctagagggggatgcttggggaaacagagaaggggagatccagggcctccccgccttccttcttcctttttatatacaatttgttattgtcaaataaaagtaggaaatattcaataggct

SEQ ID NO: 657 - DNA, 831 bp, Homo sapiens
aggcacactctaccaccatgaatccactcctgatccttacctttgtggcagctgctcttgctgccccctttgatgatgatgacaagatcgttgggggctacaactgtgaggagaattctgtcccctaccaggtgtccctgaattctggctaccacttctgtggtggctccctcatcaacgaacagtgggtggtatcagcaggccactgctacaagtcccgcatccaggtgagactgggagagcacaacatcgaagtcctggaggggaatgagcagttcatcaatgcagccaagatcatccgccacccccaatacgacaggaagactctgaacaatgacatcatgttaatcaagctctcctcacgtgcagtaatcaacgcccgcgtgtccaccatctctctgcccaccgcccctccagccactggcacgaagtgcctcatctctggctggggcaacactgcgagctctggcgccgactacccagacgagctgcagtgcctggatgctcctgtgctgagccaggctaagtgtgaagcctcctaccctggaaagattaccagcaacatgttctgtgtgggcttccttgagggaggcaaggattcatgtcagggtgattctggtggccctgtggtctgcaatggacagctccaaggagttgtctcctggggtgatggctgtgcccagaagaacaagcctggagtctacaccaaggtctacaactatgtgaaatggattaagaacaccatagctgccaatagctaaagcccccagtatctcttcagtctctataccaataaagtgaccctgttctcactgtcaaaaaaaaaaaaaa

SEQ ID NO: 658 - DNA, 619 bp, Homo sapiens
tctgcagagagaatggccagcaggaaggcggggacccggggcaaggtggcagccaccaagcaggcccaacgtggttcttccaacgtcttttccatgtttgaacaagcccagatacaggagttcaaagaagccttcagctgtatcgaccagaatcgtgatggcatcatctgcaaggcagacctgagggagacctactcccagctggggaaggtgagtgtcccagaggaggagctggacgccatgctgcaagagggcaagggccccatcaacttcaccgtcttcctcacgctctttggggagaagctcaatgggacagaccccgaggaagccatcctgagtgccttccgcatgtttgaccccagcggcaaaggggtggtgaacaaggatgagttcaagcagcttctcctgacccaggcagacaagttctctccagctgaggtggagcagatgttcgccctgacacccatggacctggcggggaacatcgactacaagtcactgtgctacatcatcacccatggagacgagaaagaggaatgaggggcagggccaggcccacgggggggcacctcaataaactctgttgcaaaattggaaaaaaaaaaaaaaaaaaaaaaaa

SEQ ID NO: 659 - DNA, 5625 bp, Homo sapiens
acctagcgccccctcccccgggagcgcggaggagcattaataaacctctaagccgaggagaaaactctggctggggcagtgcgctgagcgccggaggagcgtaggcagggcagcgctggcgccagtggcgacaggagccgcgcgaccggcaaaaatacacgggaggccgtcgccgaaaagagtccgcggtcctctctcgtaaacacactctcctccaccggcgcctccccctccgctctgcgcgccgcccggctgggcgcccgaggccgctccgactgctatgtgaccgcgaggctgcgggaggaaggggacagggaagaagaggctctcccgcgggagcccttgaggaccaagtttgcggccacttctgcaggcgtcccttcttagctctcgcccgcccctttctgcagcctaggcggcccgggttctcttctcttcctcgcgcgcccagccgcctcggttcccggcgaccatggtgacgatggaggagctgcgggagatggactgcagtgtgctcaaaaggctgatgaaccgggacgagaatggcggcggcgcgggcggcagcggcagccacggcaccctggggctgccgagcggcggcaagtgcctgctgctggactgcagaccgttcctggcgcacagcgcgggctacatcctaggttcggtcaacgtgcgctgtaacaccatcgtgcggcggcgggctaagggctccgtgagcctggagcagatcctgcccgccgaggaggaggtacgcgcccgcttgcgctccggcctctactcggcggtcatcgtctacgacgagcgcagcccgcgcgccgagagcctccgcgaggacagcaccgtgtcgctggtggtgcaggcgctgcgccgcaacgccgagcgcaccgacatctgcctgctcaaaggcggctatgagaggttttcctccgagtacccagaattctgttctaaaaccaaggccctggcagccatcccacccccggttccccccagtgccacagagcccttggacctgggctgcagctcctgtgggaccccactacacgaccaggggggtcctgtggagatccttcccttcctctacctcggcagtgcctaccatgctgcccggagagacatgctggacgccctgggcatcacggctctgttgaatgtctcctcggactgcccaaaccactttgaaggacactatcagtacaagtgcatcccagtggaagataaccacaaggccgacatcagctcctggttcatggaagccatagagtacatcgatgccgtgaaggactgccgtgggcgcgtgctggtgcactgccaggcgggcatctcgcggtcggccaccatctgcctggcctacctgatgatgaagaaacgggtgaggctggaggaggccttcgagttcgttaagcagcgccgcagcatcatctcgcccaacttcagcttcatggggcagctgctgcagttcgagtcccaggtgctggccacgtcctgtgctgcggaggctgctagcccctcgggacccctgcgggagcggggcaagacccccgccacccccacctcgcagttcgtcttcagctttccggtctccgtgggcgtgcactcggcccccagcagcctgccctacctgcacagccccatcaccacctctcccagctgttagagccgccctgggggccccagaaccagagctggctcccagcaagggtaggacgggccgcatgcgggcagaaagttgggactgagcagctgggagcaggcgaccgagctccttccccatcatttctccttggccaacgacgaggccagccagaatggcaataaggactccgaatacataataaaagcaaacagaacactccaacttagagcaataacggctgccgcagcagccagggaagaccttggtttggtttatgtgtcagtttcacttttccgatagaaatttcttacctcatttttttaagcagtaaggcttgaagtgatgaaacccacagatcctagcaaatgtgcccaaccagctttactaaagggggaggaagggagggcaaagggatgagaagacaagtttcccagaagtgcctggttctgtgtacttgtccctttgttgtcgttgttgtagttaaaggaatttcattttttaaaagaaatcttcgaaggtgtggttttcatttctcagtcaccaacagatgaataattatgcttaataataaagtatttattaagactttcttcagagtatgaaagtacaaaaagtctagttacagtggatttagaatatatttatgttgatgtcaaacagctgagcaccgtagcatgcagatgtcaaggcagttaggaagtaaatggtgtcttgtagatatgtgcaaggtagcatgatgagcaacttgagtttgttgccactgagaagcaggcgggttgggtgggaggaggaagaaagggaagaattaggtttgaattgctttttaaaaaaaaaagaaaagaaaaagacagcatctcactatgttgccaaggctcatcttgagaagcaggcgggttgggtgggaggaggaagaaagggaagaattaggtttgaattgcttttttaaaaaaaaagaaaagaaaaaaaaagacagcatctcactatgttgccaaggctcatctcaagctcttgggctcaagagatcctcccacctcggcctcctgagtagctgggactgcaggtgtgtgtcatcatgaccaatgtgaattgcttttgaagctggttcatgggcatgtaggccaccgaagcaattttagaccacagtaagtcaagcttttttccctccgatgatcactgggtggttgcagcattttttgcataaacctgcctaagacttgtctatcgtctgtgatcaatatgccatattacactaaggtgctcctggaaaattgggtgcagttcaaattttcctacagcaaatcatttggcaaggccagccattggggaaaccagacaactagagataaccctgaaatgaatccttttgtaaattgaagcaccatcttttctttttttgcataaattggaggttttaattttagggcagttacctgaagtgaaatataccaacaatttcttgtgttctttaaattcctagttaggtgaatatttttgaaggtcctcttttgaataaagaggggaatggacaccacatttcaggtcttctcgaagtgtggaagggcaagagagcatcagtgagctgatggtggattgcttacatcggattccattggtatgaatttcccaaactggaaatcaaagcgccagggtggggttggggctgactgctggtgagggggctggccgctggctcccgtgacgtgcgtcatgggcacgcaggcgccattttgaatctatcgtcggcacgtgggtgccattttgaatccttagttgggcctttctaaatggagaatggctttggagggagacacgttttctgtggggagggtttgggggggagggaggagggaacaagctacatgctattttgtttgtagtattgtggaacagtcttgttatggagtgccagcttagaggttgttgcaaacttgtctagaagtgagagcatggttttttttagccctttgagagtctacatctaatgaacattcttgctcacccataaataacgtcaagcctcaatgtcaccgtcacgttgggatactctttctcatctggcatcctagacaggacaaggttggttacctttccttccatgaaccatgaacctgtgacggcatcattcatcctgacttcaccaagctccgcctgtgggtgaggccagagctcccactggcaatttttagaagagccagaggctccctgcttcctctagaaataacagttcagggtgaagcatggagggtttcagttcccagacaatggaaccatttagagacaacacagttggacatttccactttttccttgattcctggaagtccagtgggttctgcagctgaaaaagccctgggtcccagcagcagagagacaggacagaggggatgcttgggcggggagggacggtaacctgcagaacagattccatttttatagaacgagtacacgtttgctaaaacagtcctgctttcccagactggattcccaccacagggacagtcggaactcaggactagctccagcgacatctttcctccgaattcaagccttctatcacaatgtcaaaacagctatttataaagccattttcattgtacttgataacagcacgagtcccaaaacttttagaaataaaataggacattggcttgattgaaaagagggactttttaaaaattgttctttcgtcagaagccttttggatgacttacaatagctctgatgaagataccaccccagcgtcagtccaataggtcagtgagtttcaacaggcatccatccctcccatgaagggattctggtgatgggaagtttctgtaatgacaggaaagcattgaccctcattgattgtcaactttggtattagccatgaaagacaggatgctcattgggtgttctgtagagtgaggaatgctgcctattccctcccagaacgtctgacccaggggtgtgtgttgaggagccctgggggaaatggaccaagttttcccacagagcagtattaggctgaagagcaggtgactggtaggccccagctcccatcattccctcccaaagccattttgttcagttgctcatccacgctggattccagagagttttccaatttgggaagccatgagaaaggtttttaaatcttgggaagatggagagagggacataggatagttgactccaacatgacaggaagaggctggagattgggaattggccatcaaccaagcctgtagtagtaaagccatggtcccgcattggaattacttggggaacttatacagttctgatacccaggctctcctagaccagttcaaccaattctaggtgggggactcaggcatcagtgtgtttcgtagctccccgggtgttttccctgtgcagccgagcttgggaaactgccatgctttttggatgtcaaggcgctgttggaggctgggtgtgacagcacagagccaggttgtcttgtggaaaccacagccacgggtttgccactggctcagcatggcctcactgccagtcccagcctggctgagggacaagatggtttctcttgggagttcctgagtggagcacccttccaggctttttgaaagccagctgatctgtggagccttgttaagggactcaatacggtgtttggatattgatgtttttccttgagactgtcttgtccatcaataaagatggaggatgtctcctctttgaaccccgcttccccaccagtactctctctcccttagagtttatgagttattcaaggaggagacttcttaaagacagcaacgcaattcttgtaacttgtgtaaatagccccatctttcagagtgataccatttctacatttgataatgcctgtattcctgtaggatgtatatagtttaggggattttttttttgtttggttttgttttttagaagtcaatatgtctggttttatttattgcttgaaaaagatcatttgaaaaaaataaatacattttcaaccactaaaa

SEQ ID NO: 660 - DNA, 3595 bp, Homo sapiens; identical to SEQ ID NO: 626

SEQ ID NO: 661 - DNA, 1053 bp, Homo sapiens
aatgagtttcttactgaacaactttctaaaccacaaattaaattcaataccttaaaagataagttccttaagacaagagatactctcagaaaaaagtcattggctttagaaactgtacataacaacctaagccaaacacagcagcaaataaaggaaatgaaagagatgtatgaaaatgcagaagctaaagagaataattccactggaaagtggagctgtgtagaagagagaatatgtcaactccaacatgaaaatccgtgcattgaacagcaactagatgatgttcatcagaaagagtatcataaagagataataactaatatccaaagaagctttattgagagtggagacctcatgctagaagagaaaaataagaaggtaatgaatgaatgtgatcatttaaaagaaagtctctttcaatatgagagagagaaagcagaaagagtagtggttgtgagacaacttcaacaagaagcggctgacagcctaaaaatattaactacgttagagtctccactggaaggtatgtcacattatcacattaatttggatgagacacaggccccaaagaagaaattatttcaagtgaaaagtcaatttgatgatcttatggcagagaaggaagctgtatcttcaaaatgtgtcaatttggctaaagagaatcaagtttttcaacaggagttattatctatgaaaaaagcacaacaggaatgtgaaaaatttgaggaggataaaaagatgttggaagaagaaatattaaatcttaagacacatatggaaaacagtatggtagaacttagtaaactacaagaatataaatcagagctagatgaaagggcaatgcaggcagtagaaaaattagaagaaatacatttacaggaacaagcacaatataaaaaacaattagagcagttaaacaaggatacagcttcactaaataagaaggaactcacacttaaagatgtggaatgtaaattctacaaaatgaaaactgcttatgaagaggttacaactgagttagaagaatataaggaagcctttgcagcagcattg

SEQ ID NO: 662 - DNA, 4542 bp, Homo sapiens
ggtaggcgcgcccagacctgagacgggttgggactgggctgcgtcacgcgcgggctctaagcgcccggggccccgcccagtggccggcacagccaatcgcagcgcgggaaggcggtgggggcggggaaggccgcctggaaacttaaatcccgaggcgggcgaacctgcaccagaccgcggacgtctgtaatctcagaggcttgtttgctgagggtgcctgcgcagctgcgacggctgctggttttgaaacatgaatctttcgctcgtcctggctgccttttgcttgggaatagcctccgctgttccaaaatttgaccaaaatttggatacaaagtggtaccagtggaaggcaacacacagaagattatatggcgcgaatgaagaaggatggaggagagcagtgtgggaaaagaatatgaaaatgattgaactgcacaatggggaatacagccaagggaaacatggcttcacaatggccatgaatgcttttggtgacatgaccaatgaagaattcaggcagatgatgggttgctttcgaaaccagaaattcaggaaggggaaagtgttccgtgagcctctgtttcttgatcttcccaaatctgtggattggagaaagaaaggctacgtgacgccagtgaagaatcagaaacagtgtggttcttgttgggcttttagtgcgactggtgctcttgaaggacagatgttccggaaaactgggaaacttgtctcactgagcgagcagaatctggtggactgttcgcgtcctcaaggcaatcagggctgcaatggtggcttcatggctagggccttccagtatgtcaaggagaacggaggcctggactctgaggaatcctatccatatgtagcagtggatgaaatctgtaagtacagacctgagaattctgttgctaatgacactggcttcacagtggtcgcacctggaaaggagaaggccctgatgaaagcagtcgcaactgtggggcccatctccgttgctatggatgcaggccattcgtccttccagttctacaaatcaggcatttattttgaaccagactgcagcagcaaaaacctggatcatggtgttctggtggttggctacggctttgaaggagcaaattcgaataacagcaagtattggctcgtcaaaaacagctggggtccagaatggggctcgaatggctatgtaaaaatagccaaagacaagaacaaccactgtggaatcgccacagcagccagctaccccaatgtgtgagctgatggatggtgaggaggaaggacttaaggacagcatgtctggggaaattttatcttgaaactgaccaaacgcttattgtgtaagataaaccagttgaatcattgaggatccaagttgagattttaattctgtgacatttttacaagggtaaaatgttaccactactttaattattgttatacacagctttatgatatcaaagactcattgcttaattctaagacttttgaattttcattttttaaaaagatgtacaaaacagtttgaaataaattttaattcgtatataaaggtgggcctttttttaatgcattggctttttgtgtagtcaggaaatataattaagctctgaaataataacttcatgtgccaatggtatgttaggagaaagatgctagcagaaagctggcttcctggctcttgagtagttataaaaatacagactttatatcagctgcccagttactgtgtgttacccaactcctgaatctaccaaaatttgataaacaatttggaaggacaaacctacattttttttttttatgagacggagtctctctcactctgtcaccaaggctggagtgcagtagtgtgatctcagctcactgcaacctctgcctcccgggtttaagcaattctctgcctcagcctcccgagtagctgggattacaggcgcgtgccaccacgcctagtgtatttttagtagagagagggtttcaccatcttggccaggctggtcttgaactctcgacctcgtgatccacctgcctcagcctcccaaagtgttgggattacagatgtgagccactgcgcccagcccctaaattgttttagtaaagaagaaagcagttgactttttagaaaaggaaatgtcttcttcctttgacacataacctcaagatggttaggttacgtgataaaaagtgaagctgcttgttactggagcctctctgaattgctggtgaccactttgcagtctgaggaagacgcaggtgcaagtaagttaccaagggtattttgttttcattccaagtctctgatgacatattccacctagctcttctagaaaagcttatttgttaactagtgttagcaaaaataaatggtgtggttaacaaatctcaggcatttgacagtagctggagaaatttgttcaaggtccacaagagatgaggctgggctacaaaaagaggcctctggccgaagatggataagagatcacaagtgaaaggtcagaagtcactaggccagactctggctacctaatccctgaattaaaaataaactcaaaatggggggaaaaaggctaagcatatagttacacaggtagtaaatacaaataaaacgatatttttgcatatttaaaatactggaagaaagtacaccaaacttgtgggtgaattatgggtggttatttaactcgtttagtgaaaagcatgtatttttatgagcaggagaaaatagtaaagatatacccacattctgcaggctaaaggagagccctgtgtgtgttttaaaagcccatgtttccagtcaaataaaaaattaccggggatgagctggtgaaatttaatcgaaaggtgatccattgtgaatgcaatgggagggaaggggcatgtgggactgtgtatcccaaaaaccctttgatagcctatgtccacagccatctctggaaaatccagtctaccatattcagtcttgagttttctctgagaaaggattccttcgtctttgcagcagcaggctaagttggtactctccacagattcttggaacaacaacccaggctctaaggaaacatctaggcactaaattgaatgaaagagtgatggctttttattcaaataaaaaaatttcaaatctgtcaaaacagcacccctcggaaaactaaaatagagatatttcaagattttataattttcaaagacctttgaaatattttaaacttgtgaaaagttacaaacctgatgtgttgtctaaaagcgtttttcaaacaagccagtagacttgaaaaatctagtctgaagcacagacttaaccaatatttgctggggatatgcccccaaatctggccataaacaaaatctctgcagtactgtgacaggttcatgatggccatgacgccatgctgaaggtttaccggaatgagagcaaggaacacctggaccacccagggcgggaaaacggcttaaaggcgttcctaaactacaaacaatagcatgagcgatctgtgccttaaggacatgttcctgctgcagataactagccagaccccatgcctttgtttcgtttgggaaggaatacttttagttaatctataatctatagaaacaatgtttatcactggcttgctgtcaataaacatgggtaaatctctgttcggggctctcagctctgaaagctgtgagtcccctgatttcccactctgcatgctatatttctgggtgtgtgtctttaatttctctagcgcctctgggttagggtctccatgaccaagctggtctcggcaaatatttcctatactcgaacatctaaattgtttgttttcttacttgaattgcaaaggaagtaaggaagggtgagatagaaatcactgagcatattaagagggaggagtttgctgatgtgggagtgtagttatgacacttgggcatcatactagaggctatggacttagcaataaggaaacatccactcagccctatgtgtggttcatgtgtatgttttgcctatgaaagttgaaactgttttctaaatgttatttccttttgtaactgataaaatttctaaaaagcaaagaagaaacttttctgtattaaaaataacaaacattagtaaatgtatatatacagtcatgtgttgcttaatgatggggatacattctgagaaatgtgtcttgggtgatttcatcgtgacgtgaacatcatagagtacactgacacaaacctagatggtatagcctattacacacctaggctatatggtacagcctgttgctcctaagctacgcacctgtgcaacacatcactgtgctgagtactgtacacagttgtaacacagtggtaagtattcgtgtatctgaacagaaaagtacagtaaaaatataggatcataattttatgggaccactatcatatatgcagtcactgaccaaaacatcacacagcacatgacttgtgtgtatggatatctcaattgtaaacaatttcacaaatgttcattatctctttttaagtaagttaataagtaaaactattactaagctgcaaaaaaaaaaaaaaaaa

SEQ ID NO: 663 - DNA, 2632 bp, Homo sapiens
aaaaaccaggaagttaaaagtggatgcagaagcgagcacagacggggctaggggtttcagagaaagtaattgagagtgctggcaacagcagctgaaatatagagaagttgtaggattaactttttcgcccaaagcagcttcagcccacgttttattcccatcgagggagggagaatgggtgccgctgagtgggcgggggagtggtccctgaaaggaggtggagtgctacagcccctccccgttggctctcgctgtttgtccgttgttggtttatactaatttgacaacagccgcctgttgagtctcctccagatcgcagctgaaggatctgttgagcgcttcaggaaaggcggacaggcgacactaacaggtgaagatctcgggagaccatgactaagaaaagaattgctgtgattgggggaggagtgagcgggctctcttccatcaagtgctgcgtagaagaaggcttggaacctgtctgctttgaaaggactgatgacatcggagggctctggaggttccaggaaaatcctgaagaaggaagggccagtatttacaaatcagtgatcatcaatacttctaaagagatgatgtgcttcagtgactatccaatcccagatcattatcccaacttcatgcataatgcccaggtcctggagtatttcaggatgtatgccaaagaatttgaccttctaaagtatattcgatttaagaccactgtgtgcagtgtgaagaagcagcctgattttgccacttcaggccaatgggaagtggtcactgaatctgaagggaaaaaggagatgaatgtctttgatggagtcatggtttgcactggccatcacaccaatgctcatctacctctggaaagcttccctggaattgagaagttcaaagggcagtacttccacagtcgagactataagaacccagagggattcactggaaagagagtcattataattggcattgggaattctggaggggatctggctgtagagattagccaaacagccaagcaggttttcctcagcaccaggagaggggcttggatcctgaatcgtgtaggggactacggatatcctgctgatgtgttgttctcttctcgacttacacattttatatggaagatctgtggccaatcattagcaaacaaatatttggaaaaaaagataaaccaaaggtttgaccatgaaatgtttggcctgaagcctaaacacagagctctgagtcagcatccaaccttaaatgatgacctgccaaatcgtatcatttctggcttggtgaaagtgaaaggaaatgtgaaggaattcacggagacagctgccatatttgaggatggctccagggaggatgacattgatgctgttatctttgccacaggctatagctttgactttccgtttctggaagattccgtcaaagtggtcaaaaacaagatatccctgtataaaaaggtcttccctcctaacctggaaaggccaactcttgcaatcataggcttgattcagcccttaggagccattatgcccatttcagagctccaaggacgctgggccactcaggtatttaaaggtctaaagacattgccctcacagagtgaaatgatggcagaaatatctaaagctcaagaggaaattgacaaaaggtatgtggagagccaacgccataccattcagggagactacatagataccatggaagagcttgctgatttggtgggggtcaggcccaatctgctgtctctggccttcactgaccccaagctggcattacacttattactgggaccctgcactccaatccactatcgtgtacagggccctggaaagtgggatggggctcgaaaagctatcctcaccacagatgatcgcatcaggaagcctctgatgacaagagtagttgaaaggagtagttctatgacttcaacaatgacaataggcaagtttatgctagctcttgccttctttgctataattatagcttacttctagttgtcctattgtcactgccctgtttttcattgggaagcttatctacagatgccttcagaatctgacgagattgactctcagtttcatattgcccagaaatctactttaatgtctctttcgaaagcattaattcactttcctttttcctacaatgaaacctgttttccatttgtattaactcatctcccttccactcatgatccgtcactcttccttgtggtaatccctagactgggagctcaggtactcttttagtcatctttgtatgtctttagcagagttcttgacatgtggtaggtgcttaataaatgtttgttgtttatcaaattttatggtagggagagtaagtcagcatcggtataaaatcgcttactccacgtaactcttcttctgatagggtttgattttctattagaagctcaattttagttttttttcatattataactaaatatgtttcctgagagataagagaaataatgttcctacaatagttgtatgtatctaagataagacatatagatgcttaagacattttgtttcacttgctattcactagtgtacttgaaacatggtcatttttagcccttttccttaggaaccatgtctttattttctcaataaagaaattactttcaact

SEQ ID NO: 664 - DNA, 2714 bp, Homo sapiens
tctccgcgtcgcagtcgtgcgccgcgccgccgaccccggccccggccccagacccggctccgtaccccgccgcagcctaggccccggcccccgccccggccccggccccggcgcggccctgggggcggatgcctggatgtggattttgccgtggggccaccaggctgttctcacgtgaacagctttaaggtgggagagaactggaggcaggaactgcgggttatctaccagtgcttcgtgtggtgtggaaccccagagaccaggaaaagcaaggcaaagtcctgcatctgccatgtgtgtggcacccatctgaacagactccactcttgcctttcctgtgtcttctttggctgcttcacggagaaacacattcacgagcacgcagagacgaaacaacacaacttagcagtagacctgtattacggaggtatatactgctttatgtgtaaggactatgtatatgacaaagacattgagcaaattgccaaagaagagcaaggagaagctttgaaattacaagcctccacctcaacagaggtttctcaccagcagtgttcagtgccaggccttggtgagaaattcccaacctgggaaacaaccaaaccagaattagaactgctggggcacaacccgaggagaagaagaatcacctccagctttacgatcggtttaagaggactcatcaatcttggcaacacgtgctttatgaactgcattgtccaggccctcacccacacgccgatactgagagatttctttctctctgacaggcaccgatgtgagatgccgagtcccgagttgtgtctggtctgtgagatgtcgtcgctgtttcgggagttgtattctggaaacccgtctcctcatgtgccctataagttactgcacctggtgtggatacatgcccgccatttagcagggtacaggcaacaggatgcccacgagttcctcattgcagcgttagatgtcctgcacaggcactgcaaaggtgatgatgtcgggaaggcggccaacaatcccaaccactgtaactgcatcatagaccaaatcttcacaggtggcctgcagtctgatgtcacctgtcaagcctgccatggcgtctccaccacgatagacccatgctgggacattagtttggacttgcctggctcttgcacctccttctggcccatgagcccagggagggagagcagtgtgaacggggaaagccacataccaggaatcaccaccctcacggactgcttgcggaggtttacgaggccagagcacttaggaagcagtgccaaaatcaaatgtggtagttgccaaagctaccaggaatctaccaaacagctcacaatgaataaattacctgtcgttgcctgttttcatttcaaacggtttgaacattcagcgaaacagaggcgcaagatcactacatacatttcctttcctctggagctggatatgacgccgtttatggcctcaagtaaagagagcagaatgaatggacaattgcagctgccaaccaatagtggaaacaacgaaaataagtattccttgtttgctgtggttaatcaccaaggaaccttggagagtggccactataccagcttcatccggcaccacaaggaccagtggttcaagtgtgatgatgccgtcatcactaaggccagtattaaggacgtactggacagtgaagggtatttactgttctatcacaaacaggtgctagaacatgagtcagaaaaagtgaaagaaatgaacacacaagcctactgaagtgacacacagacctacctgcaatggaagatgacgacaccaatactacaactggcatcgagatctaaaggacctacttgaccatggcccatgggcctgacagagtaagaattgaacagtacccagtgtccaaaaggtcctgattggaagagaaatagaaggggagggagaagaggctctagtctaagcagttgatgaaagggaaattaaatggtagaaacactctgggtgaggaaggcaggagcaggaaaatgctgacactggtacatatcctatattcctccaaaagattgtgtgggaaagtgtgggggggaggggggtggtggggggggagtgtgcccttgtaaccgtaaaacatctttctccatgggtgtttcagcttcaattgaccaatcacataacagttatatgtttggggggaaaaagaaaagtttctaaaaaatgtagcccattacatatatgggtatgaaagcagaaaagtggaggaggcagggatatcattgacaaacacctttgccagtttctttgtattcgtgattttttgtgctattaaatgcagtattaaaacaagaaaagcccacctgggctagtgaaaggagaggaaataagggggcttgtaaaaggggagccgtcgctccaaaagtagagaagacaagaaatgctgtaagataagcaaccaacgcagacaggcctcagctaagagtatagtgtgtgtgtgttaaaaaaaaaaaaaaaaaaaagaaaaaaaaaagctgtatgatatacttgagcaaatcaatgaacctctttgcgattgttttatcatctgtaaaatgcagataattcctaccttaaagggttattgttaaagataaaatgatataaaaatgtgtcaaagtataaagtaaaaggcttggaactttgtagggactcagtaaacgtttgttggatccaaacctgaaaaaaaaaaaaaaaaa

SEQ ID NO: 665 - DNA, 9657 bp, Homo sapiens
cggggccagggcagcgcggactcgcgtcccgtggagcgttccaggcgggcgcgcggctttctccccagacccaccgagtggcggcggaggcgagatgcgcgggggcgtgctcctggtcttgctgctgtgtgtcgccgcgcagtgccggcagagaggcctgtttcctgccattctcaatcttgccagcaatgctcacatcagcaccaatgccacctgtggcgagaaggggccggagatgttctgcaaacttgtggagcatgtgccaggtcggcccgtccgaaacccacagtgccggatctgtgatggcaacagcgcaaaccccagagaacgccatccaatatcacatgccatagatggcaccaataactggtggcaaagtcccagcattcagaatgggagagaatatcactgggtcacaatcactctggacttaagacaggtctttcaagttgcatatgtcatcattaaagctgccaatgcccctcgacctggaaactggattttggagcgttctctggatggcaccacgttcagcccctggcagtattatgcagtcagcgactcagagtgtttgtctcgttacaatataactccaagacgagggccacccacctacagggctgatgatgaagtgatctgcacctcctattattccagattggtgccacttgagcatggagagattcatacatcactcatcaatggcagaccaagcgctgacgatctttcacccaagttgttggaattcacttctgcacgatatattcgccttcgcttgcaacgcattagaacgctcaatgcagatctcatgacccttagccaccgggaacctaaagaactggatcctattgttaccagacgctattattattcaataaaggacatttctgttggaggcatgtgtatctgctatggccatgctagtagctgcccatgggatgaaactacaaagaaactgcagtgtcaatgtgagcataatacttgcggggagagctgtaacaggtgctgtcctgggtaccatcagcagccctggaggccgggaaccgtgtcctccggcaatacatgtgaagcatgtaattgtcacaataaagccaaagactgttactatgatgaaagtgttgcaaagcagaagaaaagtttgaatactgctggacagttcagaggaggaggggtttgcataaattgcttgcagaacaccatgggaatcaactgtgaaacctgtattgatggatattatagaccacacaaagtgtctccttatgaggatgagccttgccgcccctgtaattgtgaccctgtggggtccctcagttctgtctgtattaaggatgacctccattctgacttacacaatgggaagcagccaggtcagtgcccatgtaaggaaggttatacaggagaaaaatgtgatcgctgccaacttggctataaggattacccgacctgtgtctcctgtgggtgcaacccagtgggcagtgccagtgatgagccctgcacagggccctgtgtttgtaaggaaaacgttgaggggaaggcctgtgatcgctgcaagccaggattctataacttgaaggaaaaaaacccccggggctgctccgagtgcttctgctttggcgtttctgatgtctgcagcagcctctcttggcctgttggtcaggtaaacagtatgtccgggtggctggtcaccgacttgatcagtcccaggaagatcccgtctcagcaagatgcactaggcgggcgccatcaggtcagcatcaacaacaccgcggtcatgcagagactggctcccaagtactactgggcagcccccgaggcctaccttggaaataagctgactgcgtttggcggattcctgaaatacacggtgtcctacgatattccggtagagacggtagacagtaacctcatgtcgcatgctgacgtcatcattaagggaaacggactcactttaagcacacaggctgagggtctgtcattgcagccttatgaagagtacctaaacgtggttagacttgtgcctgaaaacttccaagattttcacagcaaaaggcagattgatcgtgaccagctgatgactgtccttgccaatgtgacacatcttttgatcagagccaactacaattctgcaaaaatggctctttacaggttggagtccgtctctctggacatagccagctctaatgccatcgacctggtggtggccgctgatgtggagcactgtgaatgtccgcaaggctacacagggacctcctgtgagtcgtgcctctctggctattaccgcgtggatggaatactctttggaggaatttgtcaaccctgtgaatgccacggccatgcagctgagtgtaatgttcacggcgtttgcattgcgtgtgcgcacaacaccaccggcgtccactgtgagcagtgcttgcccggcttctacggggagccttcccgagggacacctggggactgccagccctgcgcctgccctctcaccatagcctccaacaatttcagccccacctgccacctcaatgatggagatgaagtggtctgtgactggtgtgccccgggctactcaggagcttggtgtgagagatgtgcagatggttactatggaaacccaacagtgcctggcgaatcttgtgttccctgtgactgcagcggcaacgtggacccctcggaggctggtcactgtgactcagtcaccggggagtgcctgaagtgcctggggaacacagatggcgcccactgtgaaaggtgtgctgacgggttctatggggacgctgtgacagccaagaactgccgcgcctgtgaatgccatgtgaaaggctcccattctgccgtgtgccatcttgagaccgggctctgtgactgcaaaccaaacgtgactggacagcagtgtgaccagtgcttgcatggctattatgggctggactcaggccatggctgccggccctgcaactgcagcgtggcaggctccgtgtcagatggctgcacggatgaaggccagtgtcactgtgtcccaggtgtggcagggaaaaggtgtgacaggtgtgcccatggcttctacgcctaccaggatggtagctgtacaccctgtgactgcccacacactcagaatacctgcgacccagaaactggagagtgtgtctgcccccctcacacacagggtgtgaagtgtgaagaatgtgaggatgggcactggggctacgatgcggaggtggggtgccaggcctgcaattgcagtctcgtggggtcgactcatcatcggtgcgatgtggtcaccggccattgccagtgcaagtcaaaatttggtggccgggcctgcgatcagtgttccttgggttacagagactttcccgactgtgttccctgtgactgtgacctgagggggacgtcgggggacgcctgcaacctggagcagggtctctgcggctgtgtggaggaaaccggggcctgcccttgcaaggaaaatgtctttggtcctcagtgcaacgaatgtcgagagggcaccttcgctctccgcgcagacaaccccctgggctgcagcccgtgcttctgctccgggctgtcccacctctgctcagagctggaggactacgtgaggaccccagtaacgctgggctccgatcagcctcttctgcgtgtggtttctcagagtaacttgaggggcacgaccgagggggtttactaccaggcccccgacttcctgctggatgccgccaccgtccggcagcacatccgtgcagagccgttttactggcggctgccgcagcagttccaaggagaccagctcatggcctatggtggcaaactgaagtacagcgtggccttctattctttggatggcgtcggcacctccaattttgagcctcaagttctcatcaaaggtggtcggatcagaaagcaagtcatttacatggatgcaccagccccagagaatggagtgagacaggaacaagaagtagcaatgagagagaatttttggaaatattttaactctgtttctgaaaaacctgtcacgcgagaggattttatgtctgtcctcagcgatattgagtacatcctcatcaaggcatcgtatggtcaaggattacagcagagcagaatctcagacatttcaatggaggttggcagaaaggctgaaaagctgcacccagaagaagaggttgcatctcttttagagaattgtgtctgtcctcctggcactgtgggattctcatgtcaggactgcgcccctgggtaccacagagggaagctcccagcagggagtgacaggggaccacgccctctggttgctccttgtgttccctgcagttgcaacaaccacagtgacacctgtgaccccaacaccgggaagtgtctgaactgtggcgataacacagcaggtgaccattgtgatgtgtgtacttctggctactacgggaaggtgactggctcagcaagtgactgtgctctgtgtgcctgtcctcacagccctcctgccagttttagtcccacttgtgtcttggaaggggaccacgatttccgttgtgacgcctgtctcctgggctatgaaggaaaacactgtgaaaggtgctcctcaagctattatgggaaccctcaaacaccaggtggcagttgccagaagtgtgactgcaacccgcacggctctgtccacggtgactgtgaccgcacatctgggcagtgcgtttgcaggctgggggcctcggggctccggtgcgatgagtgtgaaccgaggcacattctgatggaaacagattgtgtttcctgtgatgatgagtgtgtaggtgtgctgctgaatgacttggatgagattggtgatgccgttctttctctgaacctcactggcattatccctgtcccatatggaattttgtcaaacctggaaaatacaactaaatatctccaggaatctttattaaaagaaaatatgcaaaaggacctgggaaaaattaagcttgaaggtgttgcagaagaaacggacaacctgcaaaagaagctcactaggatgttagcgagtacccaaaaggtgaatagggcaactgagagaatcttcaaggagagtcaagacctggccatagccattgagaggctgcagatgagcatcacagaaattatggaaaagacaactttaaatcagactttggatgaagatttcctactacccaattctactcttcagaacatgcaacagaatggtacatctttgctagaaatcatgcagataagagacttcacacagttgcaccaaaatgccacccttgaactcaaggctgctgaagatttattgtcacaaattcaggaaaattaccagaagccgctggaagaattggaggtattgaaagaagcagcaagccacgtcctttcaaagcacaacaatgaactaaaggcggctgaggcgctcgtgagggaagctgaggcaaagatgcaggaaagcaaccacctgctgctcatggtcaatgctaatctgagagaattcagtgataaaaagctgcatgttcaagaagaacaaaatctgacctcagagctcattgtccaaggaagaggattgatagatgctgctgctgcacaaacagatgctgtacaagatgctctagagcacttagaggatcaccaggataagctacttttatggtctgccaaaatcaggcaccacatagatgacctggtcatgcacatgtcccaaaggaacgcagtcgacctggtctacagagctgaggaccatgccgctgagttccagagactagcagatgttctgtacagtggccttgaaaacatcagaaatgtgtccctgaatgccaccagtgcagcctatgtccattacaacatccagagcctgattgaagaatcggaggaactggccagagatgctcacaggactgtgactgagacgagcctgctctcagaatcccttgtttctaacgggaaagcggccgtgcagcgcagctccagatttctaaaagaaggcaacaacctcagcaggaagcttccaggtattgcattggaactgagtgaattgagaaataagacaaacagatttcaagagaatgctgttgaaattaccaggcaaaccaatgaatcactcttgatacttagagcaattcctaaaggtataagagacaagggagccaaaaccaaagagctggccacgtctgcaagccagagcgcggtgagcacgctgagggacgtggcggggctgagccaggagctgctgaacacatctgccagcctgtccagggtcaacaccacattacgagagacacaccagcttctgcaggactccaccatggccactctgttggctggaagaaaagtcaaagacgtggaaattcaagccaaccttttgtttgatcggttgaagcctttgaagatgttagaggagaatctgagcagaaacctatcagaaattaaactgttgatcagccaggcccgcaaacaagcagcttctattaaagtcgccgtgtctgcagacagagattgcatccgggcctaccagcctcagatttcctctaccaactacaataccttaacactaaatgttaagacacaggaacccgataatcttctcttctacctcggtagcagcaccgcttctgatttccttgcagtggagatgcggcgagggagagtggccttcctgtgggacctgggctccgggtccacacgcttggagtttccagactttcccattgatgacaacagatggcacagtatccatgtagccagatttggaaacattggttcactgagtgtaaaggaaatgagctcaaatcaaaagtcaccaacaaaaacaagtaaatcccctgggacagctaatgttctggatgtaaacaattcaacactcatgtttgttggaggtcttggaggacaaatcaagaaatctcctgctgtgaaggttactcattttaaaggctgcttgggggaggccttcctgaatggaaaatccataggcctatggaactatattgaaagggaaggcaagtgccgtgggtgcttcggaagctcccagaatgaagacccttccttccattttgacgggagtgggtactctgtcgtggagaagtcacttccggctaccgtgacccagataatcatgctttttaataccttttcacctaatggacttcttctctacctgggttcatacggcacaaaagactttttatccatcgagctgtttcgtggcagagtgaaggttatgactgacctgggttcaggacccattacccttttgacagacagacgttataacaatggaacctggtacaaaattgccttccagcgaaaccggaagcaaggagtgctagcagttatcgatgcctataacaccagtaataaagaaaccaagcagggcgagactccgggagcatcttctgacctcaaccgcctagacaaggacccgatttatgtgggtggattaccaaggtcaagagttgtaaggagaggtgtcaccaccaaaagctttgtgggctgcatcaagaacctggaaatatccagatcaacctttgacttactcagaaattcctatggagtgagaaaaggctgtttactggagcccatccggagtgttagcttcctgaaaggcggctacattgaattgccacccaaatctttgtcaccagaatcagaatggctggtaacatttgccaccacgaacagcagtggcatcatcctggctgccctcggcggggatgtggagaagcggggtgatcgtgaggaagcacacgtgcccttcttttccgtcatgctgatcggaggcaacattgaggtacatgtcaatcctggggatgggacaggcctgagaaaagctctcctgcacgctcccacgggtacctgcagtgatggacaagcgcattccatctccttggtcaggaatcggagaattatcactgtccaattggatgagaacaatcctgtggaaatgaagttgggcacattagtagaaagcaggacgataaatgtgtccaatctgtacgtcgggggaattccagagggagaggggacgtcactgctcacaatgagaagatcgttccatggctgtatcaaaaacctgatcttcaatttggaacttttggatttcaacagtgcagttggccatgagcaagtcgacctggacacctgctggctgtcagaaaggcctaagctggctcccgatgcagaggacagcaagctcttgccagagccccgggcttttccagaacagtgtgtggtggatgcagctctggagtacgttcccggcgctcaccagtttggtctcacacaaaacagccatttcatcttgccttttaatcagtcggctgtcagaaagaagctctcggttgagctaagcatccgcacgttcgcctccagcggcctgatttactacatggctcatcagaaccaagcagactacgctgtgctccagctgcacgggggccgcctccacttcatgtttgaccttggcaaaggcagaacaaaggtctctcaccctgcactgctcagtgatggcaagtggcacacggtcaagacagactatgttaaaagaaaaggcttcataactgtcgacggccgagagtctcccatggtgactgtggtgggagatggaaccatgctggatgtggagggtttgttctacctaggaggcctgccctcccagtaccaggccaggaaaattggaaatatcacccacagcatccctgcctgcattggggatgtgacggttaacagcaaacagctggacaaggacagcccggtgtctgccttcacggtgaacaggtgctacgcagtggcccaggaaggaacatactttgacggaagcggatatgcagctcttgtcaaagagggctacaaagtccagtcagatgtgaacatcacactggagtttcgaacctcctcgcagaatggcgtcctcctggggatcagcactgccaaagtggatgccattggactagagcttgtggacggcaaggtcttgttccatgtcaacaatggtgctggcaggataacagctgcatatgagcccaaaaccgccactgtgctctgtgatggaaaatggcacactcttcaagctaacaaaagcaaacaccgtatcactctgattgttgacgggaacgcagttggcgctgaaagtccacacacccagtctacctcagtggacaccaacaatcccatttatgttggtggctatcctgctggtgtgaagcaaaaatgcctgcgcagccagacctcgttccgcgggtgtttgaggaagctagctctgattaagagcccgcaggtgcagtcctttgacttcagcagagcgttcgaactgcacggagttttccttcattcctgtcctgggaccgagtcctgaacttcaagcagaatcctcagttggaatcattgctaatattttgaggagaagtgtatgtgtgaattaagaatctcttcagttcatatttcatttccaactcaggttaagtgtttctggggagagatgttgtgtttacgttacactaaaaccacatgtgcaacaaatacctccattaaatggtctaaaatgtaaattgaattccctggctctctttttaaacgtatttttaaaaaaatctttatacacattgaatgttctgttgattacttgatagtattttatgtttttcattttgagctttttaaaaaagtatcaatacagatgataacagatca

SEQ ID NO: 666 - DNA, 3220 bp, Homo sapiens
tcactggagaggaggcagggacagacccagcagcacccacctgagcgagaagagcagacaccgtgctcctggaatcacccagcatgttgcaaggtctcctgccagtcagtctcctcctctctgttgcagtaagtgctataaaagaactccctggggtgaagaagtatgaagtggtttatcctataagacttcatccactgcataaaagagaggccaaagagccagagcaacaggaacaatttgaaactgaattaaagtataaaatgacaattaatggaaaaattgcagtgctttatttgaaaaaaaacaagaacctccttgcaccaggctacacggaaacatattataattccactggaaaggagatcaccacaagcccacaaattatggatgattgttattatcaaggacatattcttaatgaaaaggtttctgacgctagcatcagcacatgtaggggtctaaggggctacttcagtcagggggatcaaagatactttattgaacctttaagccccatacatcgggatggacaggagcatgcactcttcaagtataaccctgatgaaaagaattatgacagcacctgtgggatggatggtgtgttgtgggcccacgatttgcagcagaacattgccctacctgccaccaaactagtaaaattgaaagacaggaaggttcaggaacatgagaaatacatagaatattatttggtcctggataatggtgagtttaaaaggtacaatgagaatcaagatgagatcagaaagagggtatttgagatggctaattatgtcaacatgctttataaaaagctcaatactcatgtggccttagttggtatggaaatctggactgacaaggataagataaagataaccccaaatgcaagcttcaccttggagaatttttctaaatggagggggagtgttctctcaagaagaaagcgtcatgatattgctcagttaatcacagcaacagaacttgctggaacgactgtgggtcttgcatttatgtctacaatgtgttctccttattctgttggcgttgttcaggaccacagcgataatcttcttagagttgcagggacaatggcacatgaaatgggccacaactttggaatgtttcatgacgactattcttgcaagtgtccttctacaatatgtgtgatggacaaagcactgagcttctatatacccacagacttcagttcctgcagccgtctcagctatgacaagttttttgaagataaattatcaaattgcctctttaatgctccattgcctacagatatcatatccactccaatttgtgggaaccagttggtggaaatgggagaggactgtgattgtgggacatctgaggaatgtaccaatatttgctgtgatgctaagacatgtaaaatcaaagcaacttttcaatgtgcattaggagaatgttgtgaaaaatgccaatttaaaaaggctgggatggtgtgcagaccagcaaaagatgagtgcgacctgcctgaaatgtgtaatggtaaatctggtaattgtcctgatgatagattccaagtcaatggcttcccttgccatcacgggaagggccactgcttgatggggacatgccccacactgcaggagcagtgcacagagctgtggggaccaggaactgaggttgcagataagtcatgttacaacaggaatgaaggtgggtcaaagtacgggtactgtcgcagagtggatgacacactcattccctgcaaagcaaatgataccatgtgtgggaagttgttctgtcaaggtgggtcggataatttgccctggaaaggacggatagtgactttcctgacatgtaaaacatttgatcctgaagacacaagtcaagaaataggcatggtggccaatggaactaagtgtggcgataacaaggtttgcattaatgcagaatgtgtggatattgagaaagcctacaaatcaaccaattgctcatctaagtgcaaaggacatgctgtgtgtgaccatgagctccagtgtcaatgtgaggaaggatggatccctcccgactgcgatgactcctcagtggtcttccacttctccattgtggttggggtgctgttcccaatggcggtcatttttgtggtggttgctatggtaatccggcaccagagctccagagaaaagcagaagaaagatcagaggccactatctaccactggcaccaggccacacaaacagaagaggaaaccccagatggtaaaggctgttcaaccccaagagatgagtcagatgaagccccatgtgtatgatctgccagtagaaggcaatgagcccccagcctcttttcataaagacacaaacgcacttccccctactgttttcaaggataatccagtgtctacacctaaggactcaaatccaaaagcatgaagcaacagctaagcaagaactaatggctaaattatcaacttggaaaactggaaaatctggatggcagagaaatatactatctatctcaccagtatttgctctcgactcaagaaggttaacattttctgattcatgttagactttgaagagactaaagaaaattttcaagaggaacatatgcctgagaacctttgcatgaatttaaaatttcaattatccattcttataagaaggaagatgattgtaaagaaatatctccgaagttaaaatctgtaataggaattgattcattctctaatgaaaacaaaacataaaaacatcacactaatcttggaggaataagaaaaattgtacatccattaaatgtacaattgattgcaacatcttgattgttttaaccattaacttgtcaaattacaatcacagttaagaaaatgatgtaaaattctgttttgtggatctctttcctagattagcttctgaaatcattattagctatatcatttgaggttttctacaatttggtataactaagaatttaaaaatgttttatcatatatatttgtataattaattactggcatggttaaagtggttttcactttttaaatggagaaaatttcagttaaattaataggataaaccaggttgcgaactggtgacctgtaggccatgtttgcactgcaaatatatttggtctgaatgatattgatattggacacatagtacttttacatgttttgaatgtattgctaatatttaaaaattgagagatcttgcataaacaatagattcccagctttgtcaga

SEQ ID NO: 667 - DNA, 4559 bp, Homo sapiens
aatgctgtgtatttacttgaactcatacatcagaagatagtgatcttaacacattatgtttgggaagtttaaaatatctcttccaaatgcttgatgaaaaaggtgggaggatcacttgagccagggagttgaaggctgcagtgagccctgtttttgccaccacactccagcttggagaggtgaggggctgtcctctggatggcaattgatgaaggatgagtctgtgccctgaaggggagatcagtccagcccagctccccactgctgcctcgtgtgtggtggcttctccaggagagaggattgattcctaaagactcatgttacgtgaggaagcagctcagaagaggaaaggaaaggagccaggcatggctcttcctcagggacgcttgactttccgggatgtggctatagaattctcattggcagagtggaaatgcctgaacccttcacagagggctttgtacagggaagtgatgttggagaactacaggaacctggaggctgtggatatctcttccaaatgcatgatgaaggaggtcttgtcaacagggcaaggcaatacagaagtgatccacacagggacattgcaaagacatgaaagtcatcacattggagatttttgcttccaggaaattgagaaagaaattcatgacattgagtttcagtgtcaagaagatgaaagaaatggccttgaagcacccatgacaaaaataaaaaagttgactggtagcacagaccaacatgatcacaggcatgctggaaacaagcctattaaagatcagcttggatcaagcttttattcacatctgcctgaactccacatatttcagatcaaaggtgaaattggtaatcaacttgagaagtctactaatgatgctccctcagtttcaacattccaaagaatttcctgtaggccccaaacccagatttctaataactatgggaataatcccctgaattcttcattactcccacaaaaacaggaagtacacatgagagaaaaatctttccaatgtaataagagtggcaaagcctttaattgtagctcactcttaaggaaacaccagataccccatttaggagacaaacaatataaatgtgatgtatgtggcaagctctttaatcacgagcaataccttgcatgccatgatagatgtcacactgttgagaaaccttacaagtgtaaagagtgtggcaagaccttcagtcaggagtcatcccttacctgccatcgtagacttcatactggagtaaaacgttacaattgtaatgagtgtggcaagatctttggtcaaaattcagcccttctaattgataaggcaattgatactggagaaaatccttacaagtgtaatgaatgtgacaaggcttttaatcaacaatcacaactttcacatcatagaattcatactggagagaaaccttacaaatgtgaagaatgtgacaaagttttcagtcggaaatcaaccattgagacacataagagaattcatactggagagaaaccatacagatgtaaggtttgtgacacagctttcacgtggcattcacagctggctcgacatagaagaattcatactgcaaagaaaacttataaatgtaatgagtgtggcaagaccttcagtcacaagtcatcccttgtatgccatcatagacttcatggtggagagaaatcttacaaatgtaaggtttgtgacaaggcttttgtgtggagttcacaactggcaaaacatactagaattgactgtggagaaaaaccttacaagtgtaatgaatgtgggaagacctttggtcaaaattcagatcttttaattcataagtcaattcatactggggagcaaccttacaaatgtgatgaatgtgaaaaggttttcagtcgtaaatcaagccttgagacacataagataggtcatactggagagaaaccatacaaatgtaaggtttgtgacaaggcttttgcgtgtcattcctatctggcaaaacatactagaattcatagtggagagaaaccttacaagtgtaatgagtgcagcaagaccttcagtcacaggtcataccttgtatgccatcatagagttcatagtggtgagaaaccttacaagtgtaatgagtgcagcaagaccttcagtcgcaggtcatcccttcattgccatcgtagacttcatagtggtgagaaaccttacaagtgtaatgagtgtggcaataccttccgtcactgctcatcccttatataccatcgtagacttcatactggagagaaatcttacaaatgtacaatttgtgacaaggctttcgtgcgtaattcactcctgtcaagacataccagaattcacactgcagagaaaccttacaagtgtaatgaatgtgggaaggcttttaatcaacaatcacacctttcacgtcatcatagaattcatactggagagaaaccttagaaatgtgaagcatgtgacaaagtttccatttggaaatcacaccttaaagacataggagaatttatactggagagaaagcttacaaatgtaaggtttctgacaagacttgggagtgattcacacctggaacaacatactggacttcacactggagagaaaccttacaagtgtaatgagtgtggcaaagcctttggcaagcagtcaacacttattcaccatcaggcaattcatggtgtagggaaacttgactaatgtaatgattgtcacaaagtcttcagtaatgctacaacgattacaaatcattggagaatccataatgaagagagatcttacaagtgtaataaatgtggcaaatttttcagagatcgttcacatattgcaggtcatcggtgaactcatactggagagaaaccttacaaatgtcatgactgtgccaaggtcttcagtcaagcttcatcctatgcaaaacataggagaatttatacaggagagaaacctcacaagtgtgatgattgtggcaaagcctttgcttcacgttcacacgtcattagacatcagagaatctatactggacagaaatcttacaaatgtcatcagtgtggcaaggtcttcagtccaagatcactccatgcagaacatcagaaaattcatttttgagataaccgttcccaatgaaatgagtatagcaaaccatcaagcattaattgacattggagtcaattcagcattgacttgagtttgtgttgacttaacattgagttcaagcctttattgacattcaagtgtttatgttaagaggatggggccaggtgtggtggctccgacctgtaatcccagcacgtcgggaggccaaggcacataggtcacttgaggtcaggagtttgaaaccagcatggccaacagatgtgagccacttttctcagcctgttttttgtttcttattttctattatttttttgagccagtactttttaaagagatagtacttttttcagttagtactttttgaaagggatatatcatagtaatttttaaaagggatatgaggccaggcacggaggctcatgcctataatcccagcactttgggaggccgaggcaggcagatcacggggtcaggagatcgagactttcctggctaacagggtgaatccctgtctctactaaaaatacaaaaaattagctgggcatggtggctggcgcctgtagtcccagctactccagatgctgaggcaggagaatggcatgaacctgtgaggcggagcttgcagggagtcgagatcgcaccactgggctccagcctgggcgacagagtgagagtctatctcaaaaaaaaaaaaaaaaaaaaggatatcaaagcctcggtacgtggtggctcatccctgcaatcagagtactttggtcgacccatgtgaactggtcacctaaggtcacaatttcaaaagcaccctaacatggtgaaaccccatctctactaaaaatacaaaagttagccgggggtgttggtgtgcacctttagttccagctacttgggaggctggggcatgagaattgcttaaacctaggaggtagaagttgcagtgaaccaaaattgtgccactatactgcagcctgggtggcagagtgagtctccatctcaaacaaacaaaaaataacaaaaaaagacctcaaaaatgcttttcttctcgtataatggacttccttctttttctttctggttcctcttcatttctctctttattttttatttatttatttatttattttgcagtttgagtttgagataaatctaagttataaaagttgtatttcttaatacataatgacttctgaaagatgcctttgcagcatcctataatcagctcacatcattcgtttctgtacttgtatattttccagttattttccggttgaccccagaattcgttagatttttttaaaaaacaatttcaaaatagttgctgttttaaattagttgcatccagttcatatcaatgtctgcatgctttctagtctttgttatttattgaaaacctttggtacctaaacttaagtttgattgtttcagtgtgtacttggtaaatatgtcagtggccttttaactaaacatcaaaatgtactttaa

SEQ ID NO: 668 - DNA, 3342 bp, Homo sapiens
gctaatgaatgaatgtgatcatttaaaagaaagtctctttcagtatgagagagagaaaacagaagtagtagtggttgtgagacaacttcaacaagaagtggctgacagcgtaaaaaaattaacgacgttagagtctccactggaaggtatatcatgttgtcacattaatttggatgagacacaggcctcaaataagaaattatttcaagtgaaaagtcaaatataagaaactcctggaaatgacaataaatatgttaaatgtatttggaaatgaagactttgattgccatggagacttaaaaacagatcaactgaaaatggatattctgattaagaagctaaaacagaagtttgatgatcttacagcacagaaggaagctttatcttcaaaatgtgtcaatttggctaaagacaatcaagttcttcaacaggagtttttatctatgaaaaaagtacaacagcaatgtgaaaaacttgaggaggataaaaagatgttgaaagaagaaatattaaatcttaagacacatatggaaaacaatagggtagaaattagtaaactacaagaatataaattggagctagatgaaaaggcaatgcaggcagtagaaaaattagaagaaatccatttacaggaacaagcacaatatgaaaaacaattagagcagttaaacaaggataatatggcttcactaaataaaaaggaactcacacttaaagatgtggaatgtaaattctcagaaatgaaaactgcttatgaagaggttacaaccgaattagaagaatataaggaagcctttgcagcagcattgaaagctaacaattccatgtcaaaaaagttaacaaaatcaaataagaaaatagcagtgattagcatgaagctcctcatggagaaagagcagatgaaatattttctcagtgctcttcctacaaggcgagacccagagtcaccttgtgttgaaaatcttactagtataggactcaacagaaaatatattccccaaacacccataagaattcctatttcaagcccacagacttcaaataactgcaagaactcctagactgtgatggagctggactgtgtagaacaaataactagagaaacaaagagaattgttgctgtgttgaacacttgctcccgtctacttacttctctataatccactgccatggaatgagtgatttttcttagaagcagaggtggagccactgaggaagcacaggcgagccctccccagcacgtgctcactggtccccaacagaacaaccgctgccgcatccatgaggctcccattgtggtgggttgtgtcaccccacaatgtcactgttgctgagcccccatcgcctctgtgttgtggagcagttagagacacactgtggtgtctgagtggctctgtgtgaaggaccgttttctaggtgagaggcacatctcaacacagctgactgatcagactcaaccattttgcacaccctggtcagaatgaaacattccttgggaactcgggccgtgagaagcatccttcctgatcacctgactgtagaaacatccttatcgcaccctcccgggcaaaggcccaacagcctgactgcaggaacatccttgccatatcctgccgggcagcaagctctaccgcccacgcccctccttcccagtcccatgatcaccccagcctgtgagaggcagttggtgctggcagtaagctggtttcctcctctgcagggttttgctagtaataaaggtgttgctgttgaagccgtcaaaaaaaaaaaaaaaaaaggccagcatcgagtcggccttgttggattctggggcccgaggtcgagcccgccgctgccgccgtcgcctgagggaagcgagaagaggccgcgaccggagagaaaaagcggagtcgccaccggagagaagtcgactccctagcagcagccgccgccagagaggcccgcccaccagttcgcccgtccccctgccccgttcacaatgcagcctgcttctgcaaagtggtacgatcgaagggactatgtcttcattgaattttgtgttgaagacagtaaggatgttaatgtaaattttgaaaaatccaaacttacattcagttgtctcggaggaagtgataattttaagcatttaaatgaaattgatctttttcactgtattgatccaaatgattccaagcataaaagaacggacagatcaattttatgttgtttacgaaaaggagaatctggccagtcatggccaaggttaacaaaagaaagggcaaagcttaattggcttagtgtcgacttcaataattggaaagactgggaagatgattcagatgaagacatgtctaattttgatcgtttctctgagatgatgaacaacatgggtggtgatgaggatgtagatttaccagaagtagatggagcagatgatgattcacaagacagtgatgatgaaaaaatgccagatctggagtaaggaatattgtcatcacctggattttgagaaagaaaaataacttctctgcaagatttcataattgagagaattcctgagttgatagctctaaaggcagatatgctgtatttgcctactttaacccatttttcaacctgtttgttttttaaaaggcttcactaagggttgatatgtaccattgtatggggcaattttaagtcagctaaggcaataaccttatgcatgagcatttcccagactttcatgaagctgttgaggtcctaggcaattaatgcagcagttgcgataaataaaaacatctcacctaagtctccttttcttcataacatagatactgacatgataggaagctctcagcttagggaaagagaataaattttagattatagaacatggattcaaaagtgactggaacaaattggctgacaccttactggtaacctgctattcttctggtgttatccttcaggattgttccactaaaatttatttttcaaaaaatttacttcacattattctatgtaagtgatgacttgtcagtgttccaggtgtatcttagctaaaactagagaatgccctaacttagatggtttttgaagcctatacaattggtattgtttgacccttaagcttttacatctcttagcatggaggacgaagaaagctgtacattgttgcttgagagtctgtacatttagtccagatttgtatttgcactgtcagtatggcaaatgagtgaaaaatgtttaatacactattggattttttatttcctttttttgattcagcttatacccgggctgaaaacctcaatttatgttcatgacagtggggatttttttaaatgtctacattctttctaataaactgttggaagactt

SEQ ID NO: 669 - DNA, 2553 bp, Homo sapiens
ctaaaggccttgcacaacatcagagagttcatactggagagaaccttacacatttcacgagtatggaaagacctttgctcaaaattcagcccttgtaatgcataaggcaattcatactggaaagaaaccttacacatgtaatgaatgtggcaaggtttttagtagaaaagcacaccttgcatgtcatcatagacttcatactgtctaaggtttctaatcaacaatcaaaccttgcacaacatcagagagtttatactggagagaaaccttacaagtgtaatgagtggggcaaagccttaagtgggaagtcgtcacttttttatcatcaagcaatccatggtgtagggaaactttgcaaatgtaatgattgtcacaaagtcttcagtaatgctacaaccattgcaaatcactggagaatccataatgaagacagatcttacaagtgtaataaatgtggtaaaattttcagacatcgatcatatcttgcagtttatcagcgaactcatactggagagaaaccttacaaatatcatgactgtggcaaggtcttcagtcaagcttcatcctatgcaaaacataggagaattcatacaggagagaaacctcacaagtgtgatgattgtggcaaagtcttgacttcacgttcacacctcattagacatcagagaatccatactggacagaaatcttacaaatgtcttaagtgtggcaaggtcttcagtctgtgggcactccatgcagaacatcagaaaattcatttttgagataactgttccaaatacagtgactatagaagatcataaagctttaattgacattagagccaaataggcattgacttgagattgagttgacttaaccttgagtttaagaattaatttacattaaagtgtttatgttaagaagattgggccaggtgggattacaggcgcgagcaccgcgcccggcccctaagttaatatttcaaacaatcgaaggtaaaacaacatattgtgttgggccacctgtactgaacgctgaatcgtttttcctcttaagttgaaaatggttttaatgcaaagcgcctttttttgagcaggtagagtcacgcatccggcaggcggggcgagctcccctctgtctggggcagggtgggggagaggggcagggacctcggtaaaggggtggagtggcgcgctggttgccgcgggcactggcaattagaagggattattaaactaagcaaggtcctgggttgtttgagtggataatggaaactgaaaggtgacgtgcaaaactgcctattactcccaggagtggaggataatttcatatttcatggaaataaactcagggcccggagcggtggctcacacctgtaatcccagcactttgagaggccaaggagggaggatcgcttaagcccaggaattcgaaatcagcctaggcaacatagtaagacctcatctctactaaaaataaaaaaaaacagccaggtgtgttagtccacacctgtggtcccagctgcctcagcttcccgagtagctgggattacaggtatgaaccactatgcccggctaactttgttttttttttttagaaattaaaccttttttcagcttaatgacccaggggtgtatttttgaaggacttgggagctctctttgaaaggcaaacaacaagggaaacagtacctttatctcagtaggaaattaaataattcaaacatcaaataacttcaatttaaggctatggactttgagataattctgagccttgagaggaatgtggtcaggcaacctgagtccagtggaatgcaggtgcaacttctaagagttttcctgtaagtaattaagaagactaagtagccccagagataagacctcctcggatcattgtcccttcttatgtagtgataaagtaaccttccttgaagtgtatctatccgtaatcaatcaagttgctgcagcctatgcactggcccagaataaaaaacgtggtgattctgctaaagcttctctgtctttccctgtgtgtgaaatcttaacgtctctacttgggaacgctgatcccattcatttagagttgatgtttccacgtggctatttccaagctttgccttcaaataaattctgtacttaatcatatattctaaattttattatttactgctgacatcagtttctgtcggattgtaggagcctcaccagagagggcccctgtcgccatgttgtaaaactcacacttgccaaaagttgtgggttagggtttctccccctccctcaggatgacgctagttagctgacacagatggtcacctccattaccaagtagagtcaggatgaactatgtgtgactgttcaactatgtgtcctcttccctgaggactgattagtgtttatcttgaaaacatgtccttaatgggttgtatagaacactgaagcatctgatttcaaactcttagctcttttcctctatttcccatcacattctggtctaaggcttatttattaataaaatgatttttatttctttaaacaaaaaaaactttagagcacactggggtaccggatc

SEQ ID NO: 670 - DNA, 1164 bp, Homo sapiens
gagtctggaccacgcagactcagaacagcactactcacagcagggcctcttgctcgctctagctgctgggaggaaaacggcttgctaatctccacgcccagaaattcagacaagagcattctccttatctcatctgcacaggaagcaggtctaagtgtaatttcacaagcccctgactctgtgtagacacccagctctccagaaaaatgctttgaagacaaaggatacagcatacagtcccgtgtctcggctgagtcatcgcattccttaatagtgtcttctccccgggtttggtggcctgcttctggagtggtcagttctgctgccgacatgcccacccagctcgagatggccatggacaccatgattagaatcttccaccgctattctggcaaggaaaggaagagattcaagctcagcaagggggaactgaaactgctcctgcagcgagagctcacggaattcctctcgtgccaaaaggaaacccagttggttgataagatagtgcaggacctggatgccaataaggacaacgaagtggattttaatgaattcgtggtcatggtggcagctctgacagttgcttgtaatgattactttgtagaacaattgaagaagaaaggaaaataaaggaagttcgtgaatgctaatcaagggctaaataaagtggaaagcagcatccttgaaaatcatcgctctcaggacggggtctgcctggaatagcactgaatgtgtttagtagtgcctttggcttgggggctttggagaaagctgcttgagcccttcccatgctcataaattaggtaaggagcagtgaggaagtgtctacagcaacctcagccaatgtgatgtgcctctacagctgtatgaagtagattctctgattttatcttgaaatccacaacttccacaaaaaagaaaaatcttttaccatttctcattaaaaaagtaatataagtttattgtagggggaaataatcaaatgtaatctcattacccagatataatcactgttaacttcttcattcgaattttccctaggtccatgtatctatatatctatggttcataaaaatgagattacaccaaaaaatatcttttgttatctatatagttccagcttaataaatatacaactgtattattaaaaaaaaaaaaaaaaaa

SEQ ID NO: 671 - DNA, 3039 bp, Homo sapiens
aggcgcagaggagggcggtgttgagaccggcggagcggcgggacccctaggtggcggagggacgctccgggaaagcgaggggcgctacgagctctggcccacgtgacctgccgggggcgggagcagggggcgcgccggcctcctgcggtgcccctgccttggggaggggccgtgaccacccgtctgtcgcccgaggcggccgccgctgcaccttcaccgcgtacccgggacccgcccgcccgcgggagaaatgttgctgaagtgctgctgaaagggccagagatgcaaggatttgggatacattttgaacctttaagctgtctgacattgacctcctttcattattaataaagaagaatcaggagcttaggatgtattaacaccaactcattaatatactaaccggacaatgttctacaaacaattctacattgtaaaggactggattggcacaaaataaaataattttattttattcagcttataatatgactcgatggaggaaaatttgataagcatgagagaagaccattcttttcatgttcgttacagaatggaagcttcttgcctagagctggccttggaaggggaacgtctatgtaaatcaggagactgccgcgctggcgtgtcattctttgaagctgcagttcaagttggaactgaagacctaaaaacacttagcgctatttacagccagttgggcaatgcttatttctatttgcatgattatgccaaagcattagaatatcaccatcatgatttaacccttgcaaggactattggagaccagctgggggaagcgaaagctagtggtaatctgggaaacaccttaaaagttcttgggaattttgacgaagccatagtttgttgtcagcgacacctagatatttccagagagcttaatgacaaggtgggagaagcaagagcactttacaatcttgggaatgtgtatcatgccaaagggaaaagttttggttgccctggtccccaggatgtaggagaatttccagaagaagtgagagatgctctgcaggcagccgtggatttttatgaggaaaacctatcattagtgactgctttgggtgaccgagcggcacaaggacgtgcctttggaaatcttggaaacacacattacctccttggcaacttcagggatgcagttatagctcatgagcagcgtctccttattgcaaaagaatttggagataaagcagctgaaagaagagcatatagcaaccttggaaatgcatatatatttcttggtgaatttgaaactgcctcggaatactacaagaagacactactgttggcccgacagcttaaagaccgagctgtagaagcacagtcttgttacagtcttggaaatacatatactttacttcaagactatgaaaaggccattgattatcatctgaagcacttagcaattgctcaagagctgaatgatagaattggtgaaggaagagcatgttggagcttaggaaatgcatacacagcactaggaaatcatgatcaagcaatgcattttgctgaaaagcacttggaaatttcaagagaggttggggataaaagtggtgaactaacagcacgacttaatctctcagaccttcaaatggttcttggtctgagctacagcacaaataactccataatgtctgaaaatactgaaattgatagcagtttgaatggtgtacgccccaagttgggacgccggcatagtatggaaaatatggaacttatgaagttaacaccagaaaaggtacagaactggaacagtgaaattcttgctaagcaaaaacctcttattgccaaaccttctgcaaagctactctttgtcaacagactgaaggggaaaaaatacaaaacgaattcctccactaaagttctccaagatgccagtaattctattgaccaccgaattccaaattctcagaggaaaatcagtgcagatactattggagatgaagggttctttgacttattaagccgatttcaaagcaataggatggatgatcagagatgttgcttacaagaaaagaactgccatacagcttcaacaacaacttcttccactccccctaaaatgatgctaaaaacatcatctgttcctgtggtatcccccaacacggatgagtttttagatcttcttgccagctcacagagtcgccgtctggatgaccagagggctagtttcagtaatttgccagggcttcgtctaacacaaaacagccagtcggtacttagccacctgatgactaatgacaacaaagaggctgatgaagatttctttgacatccttgtaaaatgtcaaggatccagattagatgatcaaagatgtgctccaccacctgctaccacaaagggtccgacagtaccagatgaagactttttcagccttattttacggtcccagggaaagagaatggatgaacagagagttcttttacaaagagatcaaaacagagacactgactttgggctaaaggactttttgcaaaataatgctttgttggagtttaaaaattcagggaaaaaatcggcagaccattagttactatggatttattttttttcctttcaaacacggtaaggaaacaatctattacttttttccttaaaaggagaatttatagcactgtaatacagcttaaaatatttttagaatgatgtaaatagttaaccttcagtagtctattaaggcattaatacttctctggacatgcgcgtttgagggtggaggggtcctgtaaggtgcttcatcgtctgtgattactgcttgggatgtgttctttggcagcttgtgagattactttacctagtgtttataaagtaggaagttaagtgaatcatagattagaatttaatactcttatggaaataattttttaacatcttaattgacaatggcgtttttttatacataaccatggatgtagtgggaaacaatgttgtttggtaaaaataatgtacttgatcaatgtaaaaaagtatataaaatagtcttactaaaaatctaggtttttttttcctccaaaaaaa

SEQ ID NO: 672 - DNA, 5882 bp, Homo sapiens
gtgatgttatctgctggcagcagaaggttcgctccgagcggagctccagaagctcctgacaagagaaagacagattgagatagagatagaaagagaaagagagaaagagacagcagagcgagagcgcaagtgaaagaggcaggggagggggatggagaatattagcctgacggtctagggagtcatccaggaacaaactgaggggctgcccggctgcagacaggaggagacagagaggatctattttagggtggcaagtgcctacctaccctaagcgagcaattccacgttggggagaagccagcagaggttgggaaagggtgggagtccaagggagcccctgcgcaaccccctcaggaataaaactccccagccagggtgtcgcaagggctgccgttgtgatccgcagggggtgaacgcaaccgcgacggctgatcgtctgtggctgggttggcgtttggagcaagagaaggaggagcaggagaaggagggagctggaggctggaagcgtttgcaagcggcggcggcagcaacgtggagtaaccaagcgggtcagcgcgcgcccgccagggtgtaggccacggagcgcagctcccagagcaggatccgcgccgcctcagcagcctctgcggcccctgcggcacccgaccgagtaccgagcgccctgcgaagcgcaccctcctccccgcggtgcgctgggctcgcccccagcgcgcgcacacgcacacacacacacacacacacacacgcacgcacacacgtgtgcgcttctctgctccggagctgctgctgctcctgctctcagcgccgcagtggaaggcaggaccgaaccgctccttctttaaatatataaatttcagcccaggtcagcctcggcggcccccctcaccgcgctcccggcgcccctcccgtcagttcgccagctgccagccccgggaccttttcatctcttcccttttggccggaggagccgagttcagatccgccactccgcacccgagactgacacactgaactccacttcctcctcttaaatttatttctacttaatagccactcgtctctttttttccccatctcattgctccaagaatttttttcttcttactcgccaaagtcagggttccctctgcccgtcccgtattaatatttccacttttggaactactggccttttctttttaaaggaattcaagcaggatacgtttttctgttgggcattgactagattgtttgcaaaagtttcgcatcaaaaacaacaacaacaaaaaaccaaacaactctccttgatctatactttgagaattgttgatttcttttttttattctgacttttaaaaacaacttttttttccacttttttaaaaaatgcactactgtgtgctgagcgcttttctgatcctgcatctggtcacggtcgcgctcagcctgtctacctgcagcacactcgatatggaccagttcatgcgcaagaggatcgaggcgatccgcgggcagatcctgagcaagctgaagctcaccagtcccccagaagactatcctgagcccgaggaagtccccccggaggtgatttccatctacaacagcaccagggacttgctccaggagaaggcgagccggagggcggccgcctgcgagcgcgagaggagcgacgaagagtactacgccaaggaggtttacaaaatagacatgccgcccttcttcccctccgaaaatgccatcccgcccactttctacagaccctacttcagaattgttcgatttgacgtctcagcaatggagaagaatgcttccaatttggtgaaagcagagttcagagtctttcgtttgcagaacccaaaagccagagtgcctgaacaacggattgagctatatcagattctcaagtccaaagatttaacatctccaacccagcgctacatcgacagcaaagttgtgaaaacaagagcagaaggcgaatggctctccttcgatgtaactgatgctgttcatgaatggcttcaccataaagacaggaacctgggatttaaaataagcttacactgtccctgctgcacttttgtaccatctaataattacatcatcccaaataaaagtgaagaactagaagcaagatttgcaggtattgatggcacctccacatataccagtggtgatcagaaaactataaagtccactaggaaaaaaaacagtgggaagaccccacatctcctgctaatgttattgccctcctacagacttgagtcacaacagaccaaccggcggaagaagcgtgctttggatgcggcctattgctttagaaatgtgcaggataattgctgcctacgtccactttacattgatttcaagagggatctagggtggaaatggatacacgaacccaaagggtacaatgccaacttctgtgctggagcatgcccgtatttatggagttcagacactcagcacagcagggtcctgagcttatataataccataaatccagaagcatctgcttctccttgctgcgtgtcccaagatttagaacctctaaccattctctactacattggcaaaacacccaagattgaacagctttctaatatgattgtaaagtcttgcaaatgcagctaaaattcttggaaaagtggcaagaccaaaatgacaatgatgatgataatgatgatgacgacgacaacgatgatgcttgtaacaagaaaacataagagagccttggttcatcagtgttaaaaaatttttgaaaaggcggtactagttcagacactttggaagtttgtgttctgtttgttaaaactggcatctgacacaaaaaaagttgaaggccttattctacatttcacctactttgtaagtgagagagacaagaagcaaattttttttaaagaaaaaaataaacactggaagaatttattagtgttaattatgtgaacaacgacaacaacaacaacaacaacaaacaggaaaatcccattaagtggagttgctgtacgtaccgttcctatcccgcgcctcacttgatttttctgtattgctatgcaataggcacccttcccattcttactcttagagttaacagtgagttatttattgtgtgttactatataatgaacgtttcattgcccttggaaaataaaacaggtgtataaagtggagaccaaatactttgccagaaactcatggatggcttaaggaacttgaactcaaacgagccagaaaaaaagaggtcatattaatgggatgaaaacccaagtgagttattatatgaccgagaaagtctgcattaagataaagaccctgaaaacacatgttatgtatcagctgcctaaggaagcttcttgtaaggtccaaaaactaaaaagactgttaataaaagaaactttcagtcagaataagtctgtaagtttttttttttctttttaattgtaaatggttctttgtcagtttagtaaaccagtgaaatgttgaaatgttttgacatgtactggtcaaacttcagaccttaaaatattgctgtatagctatgctataggttttttcctttgttttggtatatgtaaccatacctatattattaaaatagatggatatagaagccagcataattgaaaacacatctgcagatctcttttgcaaactattaaatcaaaacattaactactttatgtgtaatgtgtaaatttttaccatattttttatattctgtaataatgtcaactatgatttagattgacttaaatttgggctctttttaatgatcactcacaaatgtatgtttcttttagctggccagtacttttgagtaaagcccctatagtttgacttgcactacaaatgcattttttttttaataacatttgccctacttgtgctttgtgtttctttcattattatgacataagctacctgggtccacttgtcttttcttttttttgtttcacagaaaagatgggttcgagttcagtggtcttcatcttccaagcatcattactaaccaagtcagacgttaacaaatttttatgttaggaaaaggaggaatgttatagatacatagaaaattgaagtaaaatgttttcattttagcaaggatttagggttctaactaaaactcagaatctttattgagttaagaaaagtttctctaccttggtttaatcaatatttttgtaaaatcctattgttattacaaagaggacacttcataggaaacatctttttctttagtcaggtttttaatattcagggggaaattgaaagatatatattttagtcgatttttcaaaaggggaaaaaagtccaggtcagcataagtcattttgtgtatttcactgaagttataaggtttttataaatgttctttgaaggggaaaaggcacaagccaatttttcctatgatcaaaaaattctttctttcctctgagtgagagttatctatatctgaggctaaagtttaccttgctttaataaataatttgccacatcattgcagaagaggtatcctcatgctggggttaatagaatatgtcagtttatcacttgtcgcttatttagctttaaaataaaaattaataggcaaagcaatggaatatttgcagtttcacctaaagagcagcataaggaggcgggaatccaaagtgaagttgtttgatatggtctacttcttttttggaatttcctgaccattaattaaagaattggatttgcaagtttgaaaactggaaaagcaagagatgggatgccataatagtaaacagcccttgtgttggatgtaacccaatcccagatttgagtgtgtgttgattatttttttgtcttccacttttctattatgtgtaaatcacttttatttctgcagacattttcctctcagataggatgacattttgttttgtattattttgtctttcctcatgaatgcactgataatattttaaatgctctattttaagatctcttgaatctgttttttttttttttaatttgggggttctgtaaggtctttatttcccataagtaaatattgccatgggaggggggtggaggtggcaaggaaggggtgaagtgctagtatgcaagtgggcagcaattatttttgtgttaatcagcagtacaatttgatcgttggcatggttaaaaaatggaatataagattagctgttttgtattttgatgaccaattacgctgtattttaacacgatgtatgtctgtttttgtggtgctctagtggtaaataaattatttcgatgatatgtggatgtctttttcctatcagtaccatcatcgagtctagaaaacacctgtgatgcaataagactatctcaagctggaaaagtcataccacctttccgattgccctctgtgctttctcccttaaggacagtcacttcagaagtcatgctttaaagcacaagagtcaggccatatccatcaaggatagaagaaatccctgtgccgtctttttattcccttatttattgctatttggtaattgtttgagatttagtttccatccagcttgactgccgaccagaaaaaatgcagagagatgtttgcaccatgctttggctttctggttctatgttctgccaacgccagggccaaaagaactggtctagacagtatcccctgtagccccataacttggatagttgctgagccagccagatataacaagagccacgtgctttctggggttggttgtttgggatcagctacttgcctgtcagtttcactggtaccactgcaccacaaacaaaaaaacccaccctatttcctccaatttttttggctgctacctacaagaccagactcctcaaacgagttgccaatctcttaataaataggattaataaaaaaagtaattgtgactcaaaaaaaaaaaaaa

SEQ ID NO: 673 - DNA, 5542 bp, Homo sapiens
agaccttgtgacaaaatagaatgttgagtttttgaggaatccaaagtaggccagtattgccagagaacaggagaggaggagagtatggtataagcatgtccagaaataaggagaacttgaagcagaatggctgcaagatgtgggtttatcaactctgatctcaggtgatgaagaggaagatggcaaagccttgctctccacattgactcgaacccaagcagctgccgtgcaaaagagataccatacctatacccaaaccatgaggaaaaaggataagcaatctatcagggatgtcagagacatttttggagtcagtgaatctcctcctcgtgatacctgtggcaaccacactaatcagctggatggcaccaaggaagaaagagagcttccaagagttatcaagacaagtggttccatgccagatgatgcttctctcaacagtactaccctgtctgacgcatcccaggataaagaagggagttttgcggttcccaggagtgactctgtggctatacttgagaccattccagttctaccagttcattccaatggatcaccggagcctggacagccagttcagaatgcgataagtgatgatgattttctggaaaagaacattccaccagaggctgaagagctgtcatttgaagtgtcttattcagaaatggttacggaggctctaaaaagaaataaacttaagaaatcagagattaagaaagaagactatgttttaactaaatttaatgttcagaaaaccagatttggcttaactgaagcaggagatctgtctgctgaagacatgaagaaaatccgccatctctctctgattgaattgactgccttttttgatgcctttggaattcaactgaaaaggaacaaaacagagaaagtaaaaggacgagacaatgggatttttggagttccacttacagtcctcctggacggtgaccgaaagaaagaccctggagtgaaagttcccctggtattacaaaaattttttgagaaagttgaggaatcaggtctggaatctgaaggaatttttcgactttcaggatgtactgctaaagtcaagcaataccgtgaagaacttgatgccaagtttaatgctgataaatttaaatgggacaaaatgtgccatagagaagctgcagtaatgttgaaagcgtttttcagagaactacccacctctctcttccctgtggaatatatacctgccttcatcagtctaatggaaagagggcctcacgtcaaagtacagtttcaagccttacacctcatggtcatggcgctgcctgatgccaacagagatgcagctcaggccctcatgacattcttcaataaagtgattgccaatgaatcaaaaaaccgaatgagtctgtggaacatttctacagtgatggcaccaaaccttttcttcagtagaagcaaacactctgattatgaagaattactgttagcaaacactgcggcccacatcatccgcctaatgcttaagtaccagaagattttgtggaaggttccatctttcttaatcactcaagtaagaagaatgaatgaagccacgatgctattgaagaagcagctcccaagtgtcaggaagctgctcaggaggaagaccctcgagcgggagactgcaagccccaagacttcaaaggtactgcaaaaatcaccctcggcaagacgaatgtctgacgtgccggaaggagtcatacgggtccatgctccacttctctccaaggtgtccatggccattcaactcaacaatcaaaccaaagccaaagacatattggcaaaatttcaatatgaaaacagtcatggttcatcagaatgtattaagattcagaaccaaaggttatatgaaattggaggaaatataggagagcattgcttggatccagatgcttatatattggatgtatatcgtataaatcctcaagcagaatgggtgattaaaccccaacaaagttcttaaaatatcctcgagagagctgctatcatgtattatatgccaaaaagatcctacattttggtagggaaaaaacaacactgtgtttgacgtatttgttcctacagcattctcagtatttctggccctcagcagtgggcattgtaagcatgaactatggaagaggcgccggttcaccaattcaactgaagctttctcatgacttttttttttataaaagtaaaggaaagatgatgtggtccttccagaagaaagaccaatctagaatatggaactctaatcacttctagtatttcaacttcctagcagaaatgaacttggccctagacctagggataagcaatgttctttatgtagccaatgctacgaaacaaaagaggtgaaagagacccttttttatacttaatgtacatatattgactttttgagcaagaatgccagaaatagccttcatttctaccctgcaaaataatccagatctgctttctaaaatgaatcagtttctaaagtgaaacatgcaatatttatgctctgactgactcctgaattggaagaggaagaacttctgtttacagaaaactgtattgttatatatgtcaggctgtgtattgtgactatcagcattctggtgcaaatgaacttttctccatcatcgactgtggaaaattgatacttttaaagcatattcttctatgagcacaggtcctcctagtgaagcttagtttgacaaagggtgtcatatgctttcctaacctgatttgtagttaacattcacagagcctacattttctcattacggttatgatgctcagtatctttccaagtgccaggcacgggcttccttttctgatcaaacataccattttttatatttcacaactatagacagtcacttctgcagtcccaatttaaaaatgcagaactgctttatccaagaatgctgaaaaatactgttctatccaggtttcctaaactataaaagcagattttgcttttgtttgttaatcataggcatggccgagcattgtggattagcctgaggcttaaaatcagatgcatgtctggtaagatgaccactgtctcactatcaagagcctgcagagccattttccagacctgtgattgcccagaacacatagtccccacgtttctaatttggagcaaatctaaaaggtgctgagggattggacagctctgactttcctcgagactatggatatagtccttctcagattagctggaaatggggacagagttctcatttatcccagatatatacattggcttttttggaatctatagattgagattttgatgaatttatattggttttaatgagacccaaatgactctctcttaacaattcaagcagtagacaaagttgctcacaaatacagaaaacatctttttgtctacttcgcaagtctcaaaacgtgataatatttaagcccatttgtagaagaaatcttgtatatactattattacaccttgatatctatacaaaacatcacttgtattaaaatatatagataactttctggcatttagaattttgttccattcatttaatttgttcatctgagaatttttttttttgcctgaaaacccattaaaagaaaacgtgccttctgtataagtttatgtttattcctacattttattcatttttaatgtatgggtaattggtggcacatgactttacataatgactttctagactctgaaaaaaatgcttttatcatttttgcaattcagacaagggtaaacattttactttatgtaattgccacatcccaagatgtaaaacggcagtaatttatgaccacgtatggaagaaattcttcaaatagctaccttacatttctgcgtatatatgaaaactgaatgatatttctcagtgtatttccttgcatttgaatggttcaattctgttgtgtttatgtagaaaattcacaaatctgttcatttaattttttaatttgagaatttttatttcttttgactgaaaacacattagaacctatgagtaaattctgaaggttttaagatttacttcagcttgtcaccagtttcaaataaatccctaataggtaacaagtaaaatacaaattcttgtctactttcatgtggttttaaatggcagggacttcgctgagtcagtaagtataatcactctagtttattcaaggatgtgtggcaactttcaacttccatacgtatatatgtatgtatggaaggccatgtcaatactagtatcattggatataactttgattcttaatcagagggcaaattcattagagaagaatttttagtagatacacagactaatatttgtgtggaggttcttttgaccaattttattcctaagaataaacaaacccctacagttaaaatgcaaagatgcctgtcatctaagtattgaaagaatttttgccttatcaagagttgttttttaaaaatttaataaattcataaaaaagactcatatctttgcaaacaaaagaagggcagatactgggcttctacatgctatccttaagagcttctccccctcacccattcctagtgctcttggtatacacttgggaaaataatgtcctccaggagaaagtgttagagggaactaacattttaggaatgcttattcagaaaaaaatcctagagttgattcattgttttcctccatcctgcaaaagaagatccctttgttaagcagctcacttggaaatatgattcttggagtcaatgatctctaaacaaactggattatcaactatttacaacgtctatacagtataaactacctcacttgcctttcttgggaaaaaaaaaatgaatggactttaacaattgttgttacaaactgtgcctgaatcttattatttaaatcacttcagttagctttcagtgtatgtttaataatatacatttaatgatgaaaaatattttcagcaaagctttaaaaccagaaatactgtgtaactgtgatctatgtggtatactctgagagaattctgtgtcctgctcattgtcttgagtttctaaccatgtgcagatgcaagcgttcaggagtaggaattaatgtccatcttttctttcaggcattttcatctgctgtccacgtatttcacttgactgaaagctcatatgagttaaaatgtcccttcttcctagcgagcatatttcaactgttcttcataaatgtttatgtgccttaaaagactttatgttaaaggattaaatagtttctctgacaggcagtttttaactgttttccacaaataaaaataatatgtcatgggattaaaatgtttgttttcaagcatttttaacagttttacacacttacatacaccttaattaaaaatttttttctgtcagacatttaccaactattttctaaaactaatttgacaaatcatgacactagaaaacgccaatgttttatgtctttgcccatctcaaaagctaatattgattcttctgttccatcagctttcattgttaagtagaatatgtatgttgcattttatccataagaaataaagagaaaaaaactaaaaaaaaaaaaa

SEQ ID NO: 674 - DNA, 2646 bp, Homo sapiens
agtttctcctttgttttacgtttgggaggaggtggcattggaaatagcagagtgcttcgcggtaacaggggttggagtgcaatggtgtgatctcagctcactgcaacccctgcctcccaggctccagcgatcctcccacctcagcctcctgaatagctgaccaccagcacactaggcaaacccaccccactcaccgcctcccttgggaattcagacctaaccatcgctgagctgaaacaaatgtactgaggctggagcctgtgtgaacagaacagaagaggccttcactctagtagtgctcacagtccagcaggtgtttgctgaagacagcttactcagatcactactgcctggaggtggttgatatatcctggtgtaaaccttcaagaagggcacaggcaggaaaacatgagccagcaactgaagaaacgggcaaagacaagacaccagaaaggcctgggtggaagagcccccagtggggctaagcccaggcaaggcaagtcaagccaagacctgcaggcggaaatagaacctgtcagcgcggtgtgggccttatgtgatggctatgtgtgctatgagcctggccctcaggctctcggaggggatgatttctcagactgttacatagaatgcgtcataaggggtgagttttctcaacccatcctggaagaggactcactttttgagtccttggaatacctaaagaaaggatcagaacaacagctttctcaaaaggttttcgaagcaagctcccttgaatgttctttggaatacatgaaaaaaggggtaaagaaagagcttccacaaaagatagttggagagaattcgcttgagtattctgagtacatgacaggcaagaagcttccgcctggaggaatacctggcattgacctatcagatcctaaacagctcgcagaatttgctagaaagaagccccccataaataaagaatatgacagtctgagcgcaatcgcttgtcctcagagtggatgcactaggaagttgaggaatagagctgccctgagaaagcatctcctcattcatggtccccgagaccacgtctgtgcggaatgtgggaaagcgttcgttgagagctcaaaactaaagagacatttcctggttcatactggagagaagccgtttcggtgcacttttgaagggtgcggaaagcgcttctctctggactttaatttgcgtacgcacgtgcgcatccacacgggggagaaacgtttcgtgtgtccctttcaaggctgcaacaggaggtttattcagtcaaataacctgaaagcccacatcctaacgcatgcaaatacgaacaagaatgaacaagagggaaagtagtcctccaacaggatgaagcagattaacagaagagtgatcagtgacaaacatgcctcattgattattgtttctaggaaggaatttctaaatcaatattgcaaccccaaaagcggttataatttggtgttactaagatgctcctacactttgtgataccgttttaaggacatggtgcatttttttttcttttatttgttttatttagaactttttttatttgttttatttagaactttgtgtgttcttaaagtgtgcttccaacaggaaggtcagtgataaattttcaaaagcataaccttcaatatattatctgttggattattggatataagacttattttcatgtactataaatatgaaaataactttgatttttaattgtgtagtttccatttcttagcttttgccttttaaatttatacttcagccaggcatagtgactgatgcctgtaatcccaacactttgttgggaggccaaagcaggaggatagcttgaggccaggagttccagaccagcctgggcaacatagtgagatcctgtctctacaaaaaaaattgtttttatttgtatttatatatttttatttttgtttttgttggtaggcgtctcgctctgtcacccaggctggagtctagtgtcgtgatcttggctcactgcaacctccacctcccgggttcaagtgattctctggcctcagcctcccaagtagctgggactacaggtgtgtgtcaccacgcccggctaatttttgtatttttagtagagatggggtttcaccatgttggccaggctagtctcaaactcctgacctccagtgatctgcccacctcggcctcccaaagtgctgggattacaggtgtgagccactgtgcctggccccccacaacatgtttaaacttagctaggcctggttgcatacgcctgtgttcccagctactcaggaggctgaagcaggaggatagcttgagcccaggagtttgaggctacagtgagctgtgattgcaccactgtactccagactggataacagcaagagcccatcttttaaaaaaagtaaaaattaaaaatatacttcatggttcatgtcatagccctagagaatgaaaaatttgcagtagatagtcaataaatgaatcagtagttaaatattccttaaagtcaactgtatttcattgtgatttttgttttctttttatcattgtatcaaactatatggaaatcatatggttagatgtgattatttgataatgttagtccatttgaatccattttagatatttcacaattaaagaatatgaaacttc

SEQ ID NO: 675 - DNA, 3980 bp, Homo sapiens
ctgacttccgtttccgggggcggcttccggcggcgtgacctgaccgcaagaggccaatggagtgtgggagctgaaagggtcttcgctggcggccggtaactggcggcggttgggaacggccgagtgtggctcttctggtgtttcagcttggggagagaggggtggccttcctcttgcagttgaggccggcgccgagccggacttcaggcggatctcgtggcggagcccatcttgctccctctcccaggcctttacccgctccctaggattcccgggccctgtaggtgggagttgggagacgacagtactgcttttaaagagacagtgttagggatcttggaagcacagccaacatgtgtgacattgaagaagccactaaccaactcctagatgtgaaccttcatgagaaccagaagtctgtacaagtgacagaaagtgacctcggaagtgaatctgagcttctagtcactattggagccactgtacctactggctttgagcaaacagctgcagatgaagtcagagagaaacttgggtcatcatgcaaaatcagcagagaccgtggcaagatatattttgtcatttcagtggaaagtctggcacaggttcattgtctgagatcagttgataacttatttgtggtggttcaggagtttcaagattaccagttcaaacaaacaaaggaagaagttctaaaggattttgaagacttggctggaaaactcccatggtcaaaccccttaaaagtgtggaaaattaatgccagttttaaaaagaaaaaagcaaagcgcaaaaagataaatcagaattcaagtaaagagaagattaataatggacaagaagtcaaaatcgatcagagaaatgttaaaaaagagttcactagccatgctttagattctcatatcttagattattatgaaaatccagccatcaaagaggatgtatcaacattaataggtgatgatttggcatcttgcaaagatgagactgatgaaagctcaaaagaagaaactgagcctcaagtgctgaagtttagagtcacatgcaacagggcaggagagaaacattgctttacctcaaatgaggctgcaagagattttgggggtgctgttcaagattattttaagtggaaggccgacatgaccaactttgatgtggaggttcttttgaacatccatgataatgaagtcattgtgggcattgcattgactgaagagagtctccaccgaagaaatataacacattttggacctacaactcttagatcaactcttgcctatgggatgctcaggctctgtgatcctctaccttatgatataatagtcgatccaatgtgtggaactggggcaataccaatagagggggccactgaatggtctgactgtttccatattgctggtgataataatccactggctgtgaatagagcagcaaataacattgcatctttattgaccaagagccaaattaaagaaggcaaaccctcctggggcttgcccatagatgctgttcagtgggatatctgcaatctgccattgagaactggctctgtggatattattgtaacagatttgccatttggaaaaaggatgggatccaagaagagaaactggaacctttatccagcttgcctacgggagatgagccgtgtctgcacacctaccacaggccgagctgtactacttactcaagacacaaaatgctttaccaaggcgttatctggaatgcgacacgtatggcgaaaggtggatacagtctgggtgaacgttggtggtcttcgtgctgcagtttacgttctgatacgtacacctcaagcttttgttcatccttcagaacaagacggagaaagaggaactctttggcaatgcaaagaatgaagatgactaatagtacttgtacttcccaccactggaaatgttagcataaaagaacttggagaggaaaaaagtattaacaaaactgcagtctgcactctttaaacctgtttaaggctcttcatcctggttagcaaaaggtgtgaatgtaatgtgatggaatttaaaagttttatgagaccaggcacagtggctcacgactgtaattccagcagtttaggaagccgaagtgtgcagatcacctgaggtccggagaccagcctggccaacatggtgaaaccctgtctctactagaaatacaaaaattagccaggtgtggtggcgggcgcctgtaatcccaactactcaggaggctgaggctagagaatcacttgaacccagcaggcggaggttgcggtgagtcgagatcacgccattgcactccagcctgtgcgacaagagcgaaactctgtctcaaaaagattttataagaaagcagagcttttccttgaagctcttttgaagtggtagcttaattagtattttgttgaaaatactttaaagatgcctagtgaaaagcctactaaagtgctgtgagattggggtttagaacattttattttcaggctttatggcctattttccattgtgtcaagtgcaaaactaccctggcccaaaggaagggcagagaacataattacatcttaggccacatttcattctttgcagctttgctaatccagttgctcaagttctttacctcaacctgaaggaatgaagcattattacattttgtgaatggtgttcagcctataagacgaagtctcacaagacctataggaaagtttaccatctgccttaaatattaaaatatccatctgttattcacattaatacacagaatgaaaatagaggtctaggaattatcaaaggtactgcaaaaatactgtatagaacttatttgtaaatagcacatacattgatagatggggtgtgggaccaacaaaccaaattaaaagaaattgtttttctttcagtacactaaggtgtgtgttttcaaaaccaaacacaaacctgtcaagagtatttgttggctagtttcttaaaaggccaagagaaaaaaaatgatatatctttggaaaacttttaatttgggagttatgtgagttgttactttctcctggatcacgattcacatttaattgcttttccagttgcaacaagtccttcttgagagttttgtggaaaatggtgcttccctggaacaaagagtagttgaggtttttttgtggaactcatcatagtattgtttattttggagcctctggctgcaatcagtatagattttcagtatcctattagtattataatagtactcctcttaatactttctgatgtctccattgagaataaaaggacacaatacttttgaaagaagagttcacattagcagcacagccagcaatcctcatctggtttctctgatctcctaccccacacttcataatgaatgggaaataagatgtttatgaaggttttatatcctagactggcctttttaccactatcagaattcacagctgctttgtttatgggccgaacacaaaacttttcacctgatgggagaaaccatttaaacctcaaattaagcaacccacagaaccaggaagttcaaggaccatgtctgttttcaccacgatgtctttccccacccccccaccccccactccaccccccactaagggcagggtattgtatctgccagactgggtatttgttgaacaagcgagtattttcgcctattagcttagtttttaaggaaatcattttttacttgattcatcatagctttaattctattacatactacaataaaaatttgacaagactgatacaaatatgtagtgggcaatagtttgccgtcttcttccctagtatggtgtttttcaatctggtgactagaataggcagtgggctataagcaggattcataaggcctggagctgagttatatgtgacactgccacctattcattgtgtgaccttggttttaaccttcaaagtgggtctcctggactaaaagaatgtgaaaagatggggaaataaatctgtaatctgaacatggaa

SEQ ID NO: 676 - DNA, 1399 bp, Homo sapiens
agtgtgaaatcttcagagaagaatttctctttagttctttgcaagaaggtagagataaagacactttttcaaaaatggcaatggtatcagaattcctcaagcaggcctggtttattgaaaatgaagagcaggaatatgttcaaactgtgaagtcatccaaaggtggtcccggatcagcggtgagcccctatcctaccttcaatccatcctcggatgtcgctgccttgcataaggccataatggttaaaggtgtggatgaagcaaccatcattgacattctaactaagcgaaacaatgcacagcgtcaacagatcaaagcagcatatctccaggaaacaggaaagcccctggatgaaacacttaagaaagcccttacaggtcaccttgaggaggttgttttagctctgctaaaaactccagcgcaatttgatgctgatgaacttcgtgctgccatgaagggccttggaactgatgaagatactctaattgagattttggcatcaagaactaacaaagaaatcagagacattaacagggtctacagagaggaactgaagagagatctggccaaagacataacctcagacacatctggagattttcggaacgctttgctttctcttgctaagggtgaccgatctgaggactttggtgtgaatgaagacttggctgattcagatgccagggccttgtatgaagcaggagaaaggagaaaggggacagacgtaaacgtgttcaataccatccttaccaccagaagctatccacaacttcgcagagtgtttcagaaatacaccaagtacagtaagcatgacatgaacaaagttctggacctggagttgaaaggtgacattgagaaatgcctcacagctatcgtgaagtgcgccacaagcaaaccagctttctttgcagagaagcttcatcaagccatgaaaggtgttggaactcgccataaggcattgatcaggattatggtttcccgttctgaaattgacatgaatgatatcaaagcattctatcagaagatgtatggtatctccctttgccaagccatcctggatgaaaccaaaggagattatgagaaaatcctggtggctctttgtggaggaaactaaacattcccttgatggtctcaagctatgatcagaagactttaattatatattttcatcctataagcttaaataggaaagtttcttcaacaggattacagtgtagctacctacatgctgaaaaatatagcctttaaatcatttttatattataactctgtataatagagataagtccattttttaaaaatgttttccccaaaccataaaaccctatacaagttgttctagtaacaatacatgagaaagatgtctatgtagctgaaaataaaatgacgtcacaagac

SEQ ID NO: 677 - DNA, 1641 bp, Homo sapiens
ctccctgtgttggtggaggatgtctgcagcagcatttaaattctgggagggcttggttgtcagcagcagcaggaggaggcagagcacagcatcgtcgggaccagactcgtctcaggccagttgcagccttctcagccaaacgccgaccaaggaaaactcactaccatgagaattgcagtgatttgcttttgcctcctaggcatcacctgtgccataccagttaaacaggctgattctggaagttctgaggaaaagcagctttacaacaaatacccagatgctgtggccacatggctaaaccctgacccatctcagaagcagaatctcctagccccacagaatgctgtgtcctctgaagaaaccaatgactttaaacaagagacccttccaagtaagtccaacgaaagccatgaccacatggatgatatggatgatgaagatgatgatgaccatgtggacagccaggactccattgactcgaacgactctgatgatgtagatgacactgatgattctcaccagtctgatgagtctcaccattctgatgaatctgatgaactggtcactgattttcccacggacctgccagcaaccgaagttttcactccagttgtccccacagtagacacatatgatggccgaggtgatagtgtggtttatggactgaggtcaaaatctaagaagtttcgcagacctgacatccagtaccctgatgctacagacgaggacatcacctcacacatggaaagcgaggagttgaatggtgcatacaaggccatccccgttgcccaggacctgaacgcgccttctgattgggacagccgtgggaaggacagttatgaaacgagtcagctggatgaccagagtgctgaaacccacagccacaagcagtccagattatataagcggaaagccaatgatgagagcaatgagcattccgatgtgattgatagtcaggaactttccaaagtcagccgtgaattccacagccatgaatttcacagccatgaagatatgctggttgtagaccccaaaagtaaggaagaagataaacacctgaaatttcgtatttctcatgaattagatagtgcatcttctgaggtcaattaaaaggagaaaaaatacaatttctcactttgcatttagtcaaaagaaaaaatgctttatagcaaaatgaaagagaacatgaaatgcttctttctcagtttattggttgaatgtgtatctatttgagtctggaaataactaatgtgtttgataattagtttagtttgtggcttcatggaaactccctgtaaactaaaagcttcagggttatgtctatgttcattctatagaagaaatgcaaactatcactgtattttaatatttgttattctctcatgaatagaaatttatgtagaagcaaacaaaatacttttacccacttaaaaagagaatataacattttatgtcactataatcttttgttttttaagttagtgtatattttgttgtgattatctttttgtggtgtgaataaatcttttatcttgaatgtaataagaatttggtggtgtcaattgcttatttgttttcccacggttgtccagcaattaataaaacataaccttttttactgcctaaaaaaaaaaaaaaaaa

SEQ ID NO: 678 - DNA, 2221 bp, Homo sapiens
aattccctaccctcgacctgtcgatgccccgcggccccgcccgccctcttaagcctggctcagccctcagggcccgcccgaagtctaccgagcccgagtggcctaccgagcccgagtggccccgcagcgtccaggaggcgcccgctccgcggtggcgctcttggaggtggtgtcggagagccgccgagcgtgcggtcccgggatggctctaccccggccaagtgaggccgtgcctcaggacaaggtgtgctacccgccggagagcagcccgcagaacctggccgcgtactacacgcctttcccgtcctatggacactacagaaacagcctggccaccgtggaggaagacttccaacctttccggcagctggaggccgcagcgtctgctgcccccgccatgccccccttccccttccggatggcgcctcccttgctgagcccgggtctgggcctacagagggagcctctctacgatctgccctggtacagcaagctgccaccgtggtacccaattccccacgtccccagggaagtgccgcccttcctgagcagcagccacgagtacgcgggtgccagcagtgaagatctgggccaccaaatcattggtggcgacaacgagagtggcccgtgttgtggacctgacactttaattccaccgccccctgcggatgcttctctgttacctgaggggctgaggacctcccagttattaccttgctcacccagcaagcagtcagaggatggtcccaaaccctccaaccaagaagggaagtcccctgctcggttccagttcacggaggaggacctgcacttcgttctgtacggggtcactcccagcctggagcacccagccagcctgcaccatgcgatttcaggcctcctggtccccccagacagctctggatctgattctcttcctcaaactctggataaagactcccttcaacttccagaaggtctatgcctcatgcagacggtgtttggtgaagtcccacattttggtgtgttctgcagtagttttatcgccaaaggagtcaggtttgggccctttcaaggtaaagtggtcaatgccagtgaagtgaagacctacggagacaattctgtgatgtgggagatctttgaagatggtcatttgagccactttatagatggaaaaggaggtacggggaactggatgtcctatgtcaactgtgcccgcttccccaaggagcagaacctagttgctgtgcagtgtcaagggcatatattttatgagagctgcaaagagatccatcagaaccaagagctccttgtgtggtatggagactgctatgagaaatttctggatattcctgtgagccttcaggtcacagagccggggaagcagccatctgggccctctgaagagtctgcagaaggctacagatgtgaaagatgtgggaaggtatttacctacaaatattacagagataagcacctcaagtacaccccctgtgtggacaagggcgataggaaatttccctgttctctctgcaaacgatcctttgagaagcgggaccggcttcggatccacattcttcatgttcatgagaagcaccggcctcacaagtgttctacatgtgggaaatgtttctctcaatcttccagcctaaacaaacacatgcgagtccactctggagacagaccataccagtgtgtgtattgtactaagaggttcacagcctccagcatactccgcacacacatcaggcagcactccggggagaagcccttcaaatgcaagtactgtggtaaatcttttgcatcccatgctgcccatgacagccatgtccggcgttcacacaaggaggatgatggctgctcatgcagcatctgtgggaaaatcttctcagatcaagaaacattctactcccacatgaagtttcatgaagactactagccctgccaggcacaatgactcacgcctgtaatcccagcactttgggaggcagaggtgggtggatcactcaagtccaggagttcgagaccagcctgggcaacatggtgaaatcctgtctctaccaaaaaaatacaaaaatcagctgggggtggtggcacatgcctgtggttccagccactcaggaggtcgaggtggcaggatggtttgagcacaggagacggaggttgctgtgagctgagatcgccccactgcttttcaacctgggtgacagaaccagaccctgtctcaaaaaaaaaaaaaaaa

SEQ ID NO: 679 - DNA, 2492 bp, Homo sapiens
agtcttagtctgcggtcactgctgaggttttcagaactttccaggcaaaggccagccaggtcctttgcctccaacccactccgcgcctacctcccgcctggggacacccctaggcccaggagatcctactctcccccgagcaccgacgttccaactcgtctgcgcccccgactgctgtccggctcctgtgccaaggggcgcgcgcatcttcccggggccagcaacgctcccaacttctcgactcgccctcctcctccccagagcgagagtggggcgggctgagcccggatccggggtgcactcgagcgttcccagcgctcggcattcaccccgcctcagagccgactttcgaagggggattgagcctcggaggtccaggcgtcttactccaaagctcaagtcggcccccgtcttttctttccacacccctgtgcccgtcgcatgctggccgggtgagcggccgggccgaggattcgggtgcccggggccgcgtcgccccgtcgggtactgagctgagcgcaccatggccggctgctgctgcctgtccgcggaggagaaggagtcgcagcgcatcagcgcggagatcgagcgacagcttcgtcgggacaagaaggacgcgcgccgtgagcttaagctgctgctgctgggaactggtgaaagtgggaaaagcacctttatcaagcagatgagaattatccatgggtctggttacagcgacgaagacagaaaggggttcacgaagctggtttaccaaaacatattcaccgccatgcaagccatgatcagagcgatggacacgctaaggatacagtatgtgtgtgaacagaataaggaaaatgcccagataatcagagaagtggaagtggacaaggtctccatgctctccagggagcaggtggaggccatcaagcagctctggcaagatccaggcatccaggagtgttacgacaggaggagggagtaccagctgtcggactctgccaaatattacctgactgacattgaccgcatcgccacaccatcattcgtgcctacccaacaagatgtgcttcgcgtccgagtgcccaccaccggcatcattgagtatccatttgacttggaaaacatcatctttcggatggtggatgttggtggccaacgatcggaaagacggaagtggattcactgctttgagagtgtcacctccattattttcttggttgctctgagtgaatatgaccaggtcctggctgagtgtgacaacgagaatcgcatggaagagagcaaagccttatttaaaaccatcatcacctacccctggtttctgaattcgtctgtgattttattcttgaacaagaaggatcttttggaagagaaaatcatgtactctcatctaattagctatttcccagaatacacaggaccgaaacaggatgtcagagctgccagagactttatcctgaagctttaccaagatcagaatcctgacaaagagaaagtcatctactctcacttcacatgtgctacagatacagacaatattcgctttgtgtttgctgctgtcaaagacacaattctacagctaaacctaagggaattcaaccttgtctaaaagctgctgcccactcctcccctataacagaagatgtgatttgcaaactccttgttttatttgcaagtgcttctgacatcaccagagccagccccatgccaggaactaaggatgtcatgtagatcgtggggacagagatgggtgatggaacttggaagatatttgagtttaccaacatactttaaaagtccttacatcccaaattgtgtttataattattttcttgacttttggctataagattttgtgtaatttttgaatttggtgttttctagaatttttaaaagccactttgatttagttttaaatatgtttaaaaatagcgattaaaattatgtaagcaaggagcctgttagtttatagatcatgccttcaaacctctagagttaatttgggtgacttttttaaaaataagaatgttaatgggtttgaagctttttattaaaccttgtaatttagagacatttttaattgtgtttctcacctcatgctgaagggtgactcctttaacatgccaccaaagattttttttaaacacttggttctttttgtgtgttaactttctaagccaaattaatggatatataagtatatctaatttagctttgccacagtttgatcaccaagaagccaaagctgacatagagtaaatgggctctagatagcatatatgttttattggtgaaaaatgtgtgtgtgtgcacgtgtgtgtgtgtgtacatttttacccccaatgtatatgaccagatcttaaaaatgtatgaaatggctagaagtccacattgtttgacaaatgttacgtaaccctgccaaagttctgatggccaccacagatttgctgtttgaattatgtatgctgtgcctttctgaggaggctaagaatataccattctgctattaa

SEQ ID NO: 680 - DNA, 2974 bp, Homo sapiens
agaagccccgcagccgccgcgcggagaacagcgacagccgagcgcccggtccgcctgtctgccggtgggtctgcctgcccgcgcagcagacccggggcggccgcgggagcccgcgccccgcccgccgcgcctctgccgggacccacccgcagcggagggctgagcccgccggcggctccccggagctcacccacctccgcgcgccggagcgcaggcaaaaggggaggaaaggctcctctctttagtcaccactctcgccctctccaagaatttgtttaacaaagcgctgaggaaagagaacgtcttcttgaattctttagtaggggcggagtctgctgctgccctgcgctgccacctcggctacactgccctccgcgacgacccctgaccagccggggtcacgtccgggagacgggatcatgaagcgctcggtagccgtctggctcttggtcgggctcagcctcggtgtcccccagttcggcaaaggtgatatttgtgatcccaatccatgtgaaaatggaggtatctgtttgccaggattggctgatggttccttttcctgtgagtgtccagatggcttcacagaccccaactgttctagtgttgtggaggttgcatcagatgaagaagaaccaacttcagcaggtccctgcactcctaatccatgccataatggaggaacctgtgaaataagtgaagcataccgaggggatacattcataggctatgtttgtaaatgtccccgaggatttaatgggattcactgtcagcacaacataaatgaatgcgaagttgagccttgcaaaaatggtggaatatgtacagatcttgttgctaactattcctgtgagtgcccaggcgaatttatgggaagaaattgtcaatacaaatgctcaggcccactgggaattgaaggtggaattatatcaaaccagcaaatcacagcttcctctactcaccgagctctttttggactccaaaaatggtatccctactatgcacgtcttaataagaaggggcttataaatgcgtggacagctgcagaaaatgacagatggccgtggattcagataaatttgcaaaggaaaatgagagttactggtgtgattacccaaggagccaagaggattggaagcccagagtatataaaatcctacaaaattgcctacagtaatgatggaaagacttgggcaatgtacaaagtgaaaggcaccaatgaagacatggtgtttcgtggaaacattgataacaacactccatatgctaactctttcacaccccccataaaagctcagtatgtaagactctatccccaagtttgtcgaagacattgcactttgcgaatggaacttcttggctgtgaactgtcgggttgttctgagcctctgggtatgaaatcaggacatatacaagactatcagatcactgcctccagcatcttcagaacgctcaacatggacatgttcacttgggaaccaaggaaagctcggctggacaagcaaggcaaagtgaatgcctggacctctggccacaatgaccagtcacaatggttacaggtggatcttcttgttccaaccaaagtgactggcatcattacacaaggagctaaagattttggtcatgtacagtttgttggctcctacaaactggcttacagcaatgatggagaacactggactgtataccaggatgaaaagcaaagaaaagataaggttttccagggaaattttgacaatgacactcacagaaaaaatgtcatcgaccctcccatctatgcacgacacataagaatccttccttggtcctggtacgggaggatcacattgcggtcagagctgctgggctgcacagaggaggaatgaggggaggctacatttcacaaccctcttccctatttccctaaaagtatctccatggaatgaactgtgcaaaatctgtaggaaactgaatggtttttttttttttttcatgaaaaagtgctcaaattatggtaggcaactaacggtgtttttaagggggtctaagcctgccttttcaatgatttaatttgattttattttatccgtcaaatctcttaagtaacaacacattaagtgtgaattacttttctctcattgtttcctgaattattcgcattggtagaaatatattagggaaagaaagtagccttctttttatagcaagagtaaaaaagtctcaaagtcatcaaataagagcaagagttgatagagcttttacaatcaatactcacctaattctgataaaaggaatactgcaatgttagcaataagtttttttcttctgtaatgactctacgttatcctgtttccctgtgcctaccaaacactgtcaatgtttattacaaaattttaaagaagaatatgtaacatgcagtactgatattataattctcattttactttcattatttctaataagagattatgtgacttctttttcttttagttctattctacattcttaatattgtatattacctgaataattcaatttttttctaattgaatttcctattagttgactaaaagaagtgtcatgtttactcatatatgtagaacatgactgcctatcagtagattgatctgtatttaatattcgttaattaaatctgcagttttatttttgaaggaagccataactatttaatttccaaataattgcttcataaagaatcccatactctcagtttgcacaaaagaacaaaaaatatatatgtctctttaaatttaaatcttcatttagatggtaattacatatccttatatttactttaaaaaatcggcttatttgtttattttataaaaaatttagcaaagaaatattaatatagtgctgcatagtttggccaagcatactcatcatttctttgttcagctccacatttcctgtgaaactaacatcttattgagatttgaaactggtggtagtttcccaggaaggcacaggtggagtt

SEQ ID NO: 681 - DNA, 1940 bp, Homo sapiens
gccgcactttcactctccgtcagccgcattgcccgctcggcgtccggcccccgacccgcgctcgtccgcccgcccgcccgcccgcccgcgccatgaacgccaaggtcgtggtcgtgctggtcctcgtgctgaccgcgctctgcctcagcgacgggaagcccgtcagcctgagctacagatgcccatgccgattcttcgaaagccatgttgccagagccaacgtcaagcatctcaaaattctcaacactccaaactgtgcccttcagattgtagcccggctgaagaacaacaacagacaagtgtgcattgacccgaagctaaagtggattcaggagtacctggagaaagctttaaacaagtaagcacaacagccaaaaaggactttccgctagacccactcgaggaaaactaaaaccttgtgagagatgaaagggcaaagacgtgggggagggggccttaaccatgaggaccaggtgtgtgtgtggggtgggcacattgatctgggatcgggcctgaggtttgccagcatttagaccctgcatttatagcatacggtatgatattgcagcttatattcatccatgccctgtacctgtgcacgttggaacttttattactggggtttttctaagaaagaaattgtattatcaacagcattttcaagcagttagttccttcatgatcatcacaatcatcatcattctcattctcattttttaaatcaacgagtacttcaagatctgaatttggcttgtttggagcatctcctctgctcccctggggagtctgggcacagtcaggtggtggcttaacagggagctggaaaaagtgtcctttcttcagacactgaggctcccgcagcagcgcccctcccaagaggaaggcctctgtggcactcagataccgactggggctgggcgccgccactgccttcacctcctctttcaacctcagtgattggctctgtgggctccatgtagaagccactattactgggactgtgctcagagacccctctcccagctattcctactctctccccgactccgagagcatgcttaatcttgcttctgcttctcatttctgtagcctgatcagcgccgcaccagccgggaagagggtgattgctggggctcgtgccctgcatccctctcctcccagggcctgccccacagctcgggccctctgtgagatccgtctttggcctcctccagaatggagctggccctctcctggggatgtgtaatggtccccctgcttacccgcaaaagacaagtctttacagaatcaaatgcaattttaaatctgagagctcgctttgagtgactgggttttgtgattgcctctgaagcctatgtatgccatggaggcactaacaaactctgaggtttccgaaatcagaagcgaaaaaatcagtgaataaaccatcatcttgccactaccccctcctgaagccacagcagggtttcaggttccaatcagaactgttggcaaggtgacatttccatgcataaatgcgatccacagaaggtcctggtggtatttgtaactttttgcaaggcatttttttatatatatttttgtgcacatttttttttacgtttctttagaaaacaaatgtatttcaaaatatatttatagtcgaacaattcatatatttgaagtggagccatatgaatgtcagtagtttatacttctctattatctcaaactactggcaatttgtaaagaaatatatatgatatataaatgtgattgcagcttttcaatgttagccacagtgtattttttcacttgtactaaaattgtatcaaatgtgacattatatgcactagcaataaaatgctaattgtttcatggtataaacgtcctactgtatgtgggaatttatttacctgaaataaaattcattagttgttagtgatggagcttaaaaaaaa

SEQ ID NO: 682 - DNA, 3411 bp, Homo sapiens
ccctgcgtcggggggcaagatggcagcccaggctttggcgctgctgagagaggtagcgaggctggaagcgccgctggaggagctacgcgcgcttcactccgtgctgcaggcagtgccgctcaacgagcttcgccagcaagcggcggagctgcgcctcggcccgctcttctccctgcttaacgagaaccatagggaaaagactactttgtgtgtatccattctggagagattgctccaagctatggaaccggttcacgtggcccggaacctcagggttgacctgcagaggggactaattcaccctgatgattctgtaaaaatcctcactctttcccagattggaagaattgttgaaaattctgatgctgttactgagattctaaataatgctgaattactaaaacaaattgtttattgcattggtggagagaatctatctgtagcaaaagcggctatcaaatccctgtcaagaatatcactaacccaagctggactggaggctttatttgaaagcaatctgctggatgatttgaaaagtgtaatgaaaacaaatgacattgttcgatacagggtgtatgagctaattatagagatttcttccgtgtcaccagaatctttaaactactgtaccacaagtggattggtaacccagctcctgagagagctgactggtgaggatgtgttggtcagagccacctgtatagaaatggtgacatcactggcatatactcatcatgggcgacaatatcttgctcaagaaggagtaattgaccaaatttctaatataattgttggggcagattcagaccctttctctagcttctatctgccaggattcgtgaagttttttggaaacctggctgtcatggatagtcctcaacagatctgtgagcgttatcctatctttgtggaaaaagtctttgaaatgatagaaagtcaggaccccactatgattggtgtagctgtagacacagttggaatcttgggatccaatgttgaaggaaaacaggttttacagaaaacaggaactcgctttgaacgcttgcttatgagaataggacatcaatcaaagaatgccccagtggagctaaaaattagatgtttggatgcaatttcatctcttctgtacttaccacctgagcagcagactgatgaccttctgaggatgacagaatcctggttttcttctttatctcgggatccactggagctcttccgtggcattagtagtcagcccttccctgaactacactgtgctgccttaaaagtgtttacggccattgcaaaccaaccctgggctcagaaacttatgtttaacagtccaggttttgtagaatatgtggtggaccggtctgtggagcatgacaaagcttcaaaggatgccaaatatgaactagtgaaagcacttgccaattccaagacaattgcagaaatctttgggaacccaaattatttgaggctcagaacttacctgagtgaagggccatactatgtgaaacctgtttccacgacagcagtagaaggagccgaatgatttcttctagagctcatgtagaggaccacgttttgaccaaaacttctcctaaggcatttgactccatctatatttcacaaaagagacttcctttccccaagaattatcatggaatgtcagatgttactttgttaccaacactgttatatttctacattgaaatgcaaagtggaactaggagtttggaatgcattaagagcagacaagcttggtcataatagatccagtgtttttcagattcctttcactgccttaatctttgcaacagggtggaagtttttttcttccctcaaaattttcatggacatgcaatcttatctaaaagcctgcttcagggctgggcgcggtggctaacacctataattcccagcactttgggaggccaagatgggcaaatcacttgagtctaggagttcaagaccagcctggccaatatggcaaaaccctgtctctactaaaaatataaaatcagccaggcatggtggcgcacacctataatctcagctactcaggaggctgaggcacgagaatcgcttgagcctgggaggcagaggttgcagtgagctgagatcttgccactgcacaccagcctgggcaacacagcaagactctgtctcaaaaataaatgaataaaataaaaacctgccaccaaattatttctggattctcttcactatctttttttttctttttggtcctttttccatttctgattccactttcaaagtcttggatatattctttgaaaaatgagtagtatggaatattaagattatgttccttatactcagaatactttttatgagctctcttgtttttttgttactattattcctttgaaaaaaagacaaaatatctaaaaaatgtttatagtgttcatgtaattttttttgctgtttaccaatgaactttgccctgttgtggttttgggggatcagaaggattcctaaactgtcatttcatttattggtaggtcatgattgctgagggttttgctttggatttttcatacctataaagtcaatcttgagttgatcagagaaagggaaacttactcctaataaacagactcagaacagaagggacatatgcataaatcaggataccatctcattaatttacaaaggataatctttcttttcattgacaacacctacacccacctgttttccagtgttcttctctctaaacagcaaagccaaagcactctgcacaccaaatcacctgttcagaggtttatgcatgagcatatttcttttaggccgtggtgaagttgataaaccacccctgctttgtaacaaaattattttaaagtgactggaattatctagtccccagattgatcatctcccctggcaacgtgactctgttttttgtgtgtgtttccatgctgactagtcccctactgttaatatcactactaattaggctataaccaggtctttcctggcctgagaaatattctcttaaaatgacctttgttttaatctcattcatgatgttgattttttttcaatgtggtgcaatatatacaataaaatttgtcataactattttaagtgtacagttcagtatattacatatgttcataagttgtacaaccatcaccaccatccatcttcagaattattttcatcttatacaattgaaactgtattcattaaacaataactgtctattccctcttttccccagcctctggcaaccaccattctgcttcatgacattgattttattcacttaacatcagattttggggggatgccctctctcctatgtatggtctacacattctgattttttttttagattgaataaaatttgtaaatcattattttcatttcataagtaaaaaaaaaaaaaaaaaaaaaaaaaaa

SEQ ID NO: 683 - DNA, 3999 bp, Homo sapiens
tgattcgagcgggaagaggggggtgggtgggatcggtgggggagaccatgacctccagctacgggcacgttctggagcggcaaccggcgctgggcggccgcttggacagcccgggcaacctcgacaccctgcaggcgaaaaagaacttctccgtcagtcacctgctagacctggaggaagccggggacatggtggcggcacaggcggatgagaacgtgggcgaggctggccggagcctgctggagtcgccgggactcaccagcggcagcgacaccccgcagcaggacaatgaccagctgaactcagaagaaaaaaagaagagaaagcagcgaaggaataggacaaccttcaatagcagccagctgcaggctttggagcgtgtctttgagcggacacactatcctgatgcttttgtgcgagaagaccttgcccgccgggtgaacctcaccgaggcgagagtgcaggtgtggtttcagaaccgaagagccaagttccgcaggaatgagagagccatgctagccaataaaaacgcttccctcctcaaatcctactcaggagacgtgactgctgtggagcagcccatcgtacctcgtcctgctccgagacccaccgattatctctcctgggggacagcgtctccgtacagcgccatggctacttattctgccacatgtgccaacaatagccctgcacagggcatcaacatggccaacagcattgccaacctgagactgaaggccaaggaatatagtttacagaggaaccaggtgccaacagtcaactgaggaaaaaaaataattaaacaggcctaagaagaaatcaaaaaccataagacacctatcctgctctgttatttcttcatctgctggggggaaaaagtaaattacaaacaaacaaacaaagcagaactaaaatattgggaccatggcagagaaaagcaggagaggagcaaaatgaaaattagttaacaaatgttcctcctccctctgggataccaccaccacttgtttctgtgtgtgtttattttgtttttctttcattcatgctttgcttaatgtactccaggcttcttcagataggttcagcccacccacccccatgattgtatgaagttttaaaaaaaactacagcagccaaagaaactatatatatatatatatatatatatatccagaatgattgcctctactgtcctcattgacttgtttgaaccttagtgccttaccctgtcctcttcccagttctctttatagaagctctaggagctttcgaaaagccaaagtctttctgaagaatctgtgctggacagacataattccctttctcattgtctccatctttgttggtcatggtaaggtttttccatcagcctctgaaaaaatagttgtgcacaacatctgctcactggactgtctgatccaatgtaattggctgcgtctggctaattctaagcactaaagtctacatctaagctatagatttaagcttgaagctacagattatatcactatcaccaccacccctcaccctatgcaatcaatcaatcaatcatcttaagttaaagatatttgttgtctttgaatgatttgctgtcacagactatttggtagaagaaatatttttcacctgagagaggaagagaaatttctctagtaacacaaagagtgagttctaaaaggcatgcccacatctctttcgtgccttaaggatagtgagatgcacacttatatatatactgtatatatttatatatttatatatatatttcatatatatatataatattgcaagcttaagtttgcaatttcccaaacaatacaaaaagcaaattacacaccctcaccactgttcttatctctatagtgatgaaacattaattagggatcttgctgcttttctttttctacacgaagttttcattaaagccacagaataattgatagggcagctgtttgagaacaggtcccattttcacattagggctttaaatgaattagaaactatttgaggctataaaaatgtccttgagtttggagcctgagctctggtgaaatgctgatacatctgatctatcatgggaattgcagttagagagagtaaggaataccatttagtcatctatccgttcttcacttagcaggaatatgaaagaaaggcacatgtttaagaggaatacctaaaggtttttctaaattccaacatttaaaaggcaattgtgggctatttttattttttaatattttgaaataaagtttagtgtctagggctgggagccaggactgatcttccatttctttttctttgttcccagccatgcttttgtaacttgccaggtggacttgaccaactacattaccatgctgtgcctcagtttacccatttgtaaaatgggattaataatacttacctacctcacaggggtgttgtgaggctctattcatttgctcctttattctttcctgtattctctgtatgtccagcactttgtagccatgggaggaaagggactataaaagtgtacaatgttaatggaatgatacggtacctgaaagccttgttttctagtaagaaaatgctaccttgctgtacatacttataaccttgtatttggaaatgagaaataggtttatattttcagatctctcaaaaatcacatcatttgaccaaagaataatttaagacacatagaacagatttttttaatttatattttcatcctgaccagcttagttctaataatttttagttgtgagtgattaaaaaactttggatcaattttggtcaaacatgccaactttgtagtctgagtgacaggcaaggatttttgggtttaagatgcacttttagcacacatttgtatttcccttggcatatcagattgagctaatggtgatgttatttcaatctaacagccaccaatctgaaattgtatttcaaatgttgattctgtagttctttaaataataatgaagctcatcttatacattttgctttcaccaattgattccttcttcttttagcccactattaaaacatttcttactgaatggttcatgtaggcttgctgaacagcacgcattacttgcttcctgaagagttcccccattcatccatttgtcccattagttgctgtggattatcaagttttgaaggaactgtacatcccaacagactgaaacattctaagtgaaatgagtataatccaagtaactggtgaactttggaggtttggagcttgaagagaatggctaagaagatttgaattatagggagggaacagaaatcatacatgaaaaggttttactgagaaggggaaaaccttagatagagggacatgtgaaacaaaatcatttgaaattttgattcagacatccatttccagtggcaaacagcaaagcctgaacccataaacccaaatgataggtgaagttgggtggttttatccaatgtctcaagcaagcaatgtctgggaatatcatagagtaacaagtgctggtcagccaaagaaacattcactgctggtgaaccaataccataagcatgtattatctaagcacttgatcaagaaatatacatgttgtacaagctctcaattttgttcatttattatcaaatttttaaaatacaagtttggtatgtgatttggaaaagatgccttctggatcttaagccagttgtcagtggaggtcctcagggctgcaaatgtcaagacataaccctgttcctcaccatcatgataccagatacaggtgaatacataggaactatctgcctgtgtcctcaatctcccttcaaacaagatgctgatttgtagggtacttggcaggttaaattaaaccagaagaggtgacttaataaaaaagggaatgacatttagggtataaagatctcataagaaatgtaatatgtaaattatatcttgctttatgttgtaaaatatacattgtttgcgctagaatagaaatgatttcttttcaataaaaagaaagaaggactcta

SEQ ID NO: 684 - DNA, 2098 bp, Homo sapiens; identical to SEQ ID NO: 394

SEQ ID NO: 685 - DNA, 3111 bp, Homo sapiens
aaatattcttgcttgagtaaaccacagtaagaataaggaagtagtgactgagtgccttgccagtacagcagatgctagaacataatgtagcattactttccccagggtttattgttatgtaagttcttgttcagcttcctttgttttctttcacttctgagaatttaactttcgtttctcactcagctcctgtggggaaactcatttgtggagaccagccctctggcttggtgagtgaatctggtttacaccggctcctgccctgccttcactcttctcccctgattcaagactcctctgctttggactgaagcactgcaggagtttgtgaccaagaacttcaagagtcaagacagaaggaagccaagggagcagtgcaatggatttctcagtaaaggtagacatagagaaggaggtgacctgccccatctgcctggagctcctgacagaacctctgagcctagattgtggccacagcttctgccaagcctgcatcactgcaaagatcaaggagtcagtgatcatctcaagaggggaaagcagctgtcctgtgtgtcagaccagattccagcctgggaacctccgacctaatcggcatctggccaacatagttgagagagtcaaagaggtcaagatgagcccacaggaggggcagaagagagatgtctgtgagcaccatggaaaaaaactccagatcttctgtaaggaggatggaaaagtcatttgctgggtttgtgaactgtctcaggaacaccaaggtcaccaaacattccgcataaacgaggtggtcaaggaatgtcaggaaaagctgcaggtagccctgcagaggctgataaaggaggatcaagaggctgagaagctggaagatgacatcagacaagagagaaccgcctggaagaattatatccagatcgagagacagaagattctgaaagggttcaatgaaatgagagtcatcttggacaatgaggagcagagagagctgcaaaagctggaggaaggtgaggtgaatgtgctggataacctggcagcagctacagaccagctggtccagcagaggcaggatgccagcacgctcatctcagatctccagcggaggttgaggggatcgtcagtagagatgctgcaggatgtgattgacgtcatgaaaaggagtgaaagctggacattgaagaagccaaaatctgtttccaagaaactaaagagtgtattccgagtaccagatctgagtgggatgctgcaagttcttaaagagctgacagatgtccagtactactgggtggacgtgatgctgaatccaggcagtgccacttcgaatgttgctatttctgtggatcagagacaagtgaaaactgtacgcacctgcacatttaagaattcaaatccatgtgatttttctgcttttggtgtcttcggctgccaatatttctcttcggggaaatattactgggaagtagatgtgtctggaaagattgcctggatcctgggcgtacacagtaaaataagtagtctgaataaaaggaagagctctgggtttgcttttgatccaagtgtaaattattcaaaagtttactccagatatagacctcaatatggctactgggttataggattacagaatacatgtgaatataatgcttttgaggactcctcctcttctgatcccaaggttttgactctctttatggctgtgcctccctgtcgtattggggttttcctagactatgaggcaggcattgtctcatttttcaatgtcacaaaccacggagcactcatctacaagttctctggatgtcgcttttctcgacctgcttatccgtatttcaatccttggaactgcctagtccccatgactgtgtgcccaccgagctcctgagtgttctcattcctttacccacttctgcatagtagcccttgtgctgagactcagattctgcacctgagttcatctctactgagaccatctcttcctttctttccccttcttttacttagaatgtctttgtattcatttgctagggcttccatagcaaagcatcatagattgctgatttaaactgtaattgtattgccgtactgtgggctggaaatcccaaatctagattccagcagagttggttctttctgaggtctgcaaggaagggctctgttccatgcctctctccttggcttgtagaaggcatcttgtccctatgactcttcacattgtctttatgtacatctctgtgcccaagttttccctttttattaagacaccagtcatactggctcagggcccaccgctaatgccttaatgaaatcattttaacattatattctctacaaagaccttatttccaaataagataatatttggaggtattgggaataaaaactccaacatataaatttgaggaaggcacgatttcactcataacaatcttaccctttcttgcaagagatgcttgtacattattttcctaataccttggtttcactagtagtaaacattattattttttttatatttgcaaaggaaacatatctaatccttcctatagaaagaacagtattgctgtaattccttttcttttcttcctcatttcctctgccccttaaaagattgaagaaagagaaacttgtcaactcatatccacgttatctagcaaagtacataagaatctatcactaagtaatgtatccttcagaatgtgttggtttaccagtgacaccccatattcatcacaaaattaaagcaagaagtccatagtaatttatttgctaatagtggatttttaatgctcagagtttctgaggtcaaattttatcttttcacttacaagctctatgatcttaaataatttacttaatgtattttggtgtattttcctcaaattaatattggtgttcaagactatatctaattcctctgatcactttgagaaacaaacttttattaaatgtaaggcacttttctatgaattttaaatataaaaataaatattgttctgattattactgaaaagatgtcagccatttcaatgtcttgggaaacaattttttgtttttgttctgttttctttttgcttcaataaaacaatagctggctctaaaaaaaaaaaaaaaaaaaaa

SEQ ID NO: 686 - DNA, 2098 bp, Homo sapiens; identical to SEQ ID NO: 394

SEQ ID NO: 687 - DNA, 4078 bp, Homo sapiens
atgcagaagagcgtgcgctacaacgaggggcacgccctgtacctggcctttctggcgcgcaaggagggcaccaagcgcggcttcctgagtaagaagacggccgaggcgagccgctggcacgagaagtggttcgccctctaccagaatgtgctcttctacttcgagggcgagcagagctgccgcccggcgggcatgtacctcctggagggctgcagctgcgaacgaacgcccgcgccacccagggccggcgccgggcagggaggcgtccgagacgcgctggacaagcagtattactttactgttctttttggccatgaaggtcagaagccactggagctgcgctgtgaggaggagcaggatggtaaagagtggatggaggccattcaccaagccagttatgcagacattttgattgagagggaagtattaatgcagaagtacattcatctagttcagatcgtagagacagaaaaaattgcagctaaccaactccgacatcaacttgaagatcaagacacagaaatcgaaaggcttaaatcagagattattgctcttaataaaaccaaagaacgaatgcgaccttaccaaagcaaccaagaagacgaagatccagacatcaagaagattaaaaaggttcagagcttcatgcgaggatggttgtgcagaaggaaatggaagaccatcgtgcaggattacatttgttctcctcatgctgaaagtatgaggaagagaaaccagattgtgttcaccatggtggaggcagagtcagagtacgttcaccagctctacatcctggtcaatggctttctccggcccctgcgtatggccgccagctccaagaagccccccatcagccacgacgacgtcagcagtatttttcttaacagtgaaacaatcatgtttcttcatgaaatatttcatcaaggactaaaggcaaggatagcaaactggcccactttaattttagctgatctgtttgatattttgctccccatgctgaacatttatcaagaatttgtgcgtaatcaccagtacagcctgcaagttctcgccaattgtaagcaaaacagagattttgacaaactcttaaaacagtatgaagccaatccagcctgtgaggggaggatgctggagacattcttgacctatcccatgtttcagatccccagatatatcatcacactccatgagctccttgctcacacaccccatgagcatgtggaaaggaaaagcctggagtttgccaaatcaaagctagaggaactatccagagtaatgcacgatgaagtcagcgacactgaaaacataaggaaaaaccttgccatcgaaagaatgatcgtggagggctgtgacatcttgctggacaccagccaaacgttcatccgccaaggttctcttattcaagtaccttccgttgagagggggaaacttagtaaagttcgcctgggttcgttgtctttgaaaaaggaaggagagagacaatgcttcttatttacaaaacactttttaatatgtacaagaagttcaggagggaagcttcatctgctcaagacaggtggggttctgtctctaatagactgcacattgattgaggagccagatgcaagcgatgatgactctaaaggttctgggcaagtgtttgggcacctggattttaaaatagtggtggagcctcctgacgctgccgccttcactgttgtcttgttagcaccctcacgccaggagaaagctgcctggatgagtgacatcagtcagtgtgtggacaatatacgatgtaatggtttaatgactatagtgtttgaagagaattccaaagtcactgtgccacatatgattaagtctgatgcccgtcttcataaagacgacactgacatttgcttcagtaaaacactcaactcctgcaaagtgccccagatccgttatgccagcgtggagcgcctcttggaacgactgacagacttgcggtttcttagtattgatttcctcaacacctttctgcacacctatcgtattttcactactgccgctgtggtgctggggaaactctccgacatatacaagaggcctttcacctccatccctgtcaggtcattggaattgttttttgctaccagccagaacaacagaggtgaacatttggtggatggcaaatccccacgtctgtgtcgcaaattctcttccccgccaccactggctgtgtccagaacatcttccccagtgagggccagaaagctgtctttgacttctcccttgaactcaaagataggagcattggacctgacaacttccagcagtcccaccaccaccacccagagtcccgctgcgtctccaccaccacacactggtcagataccactggatctcagcagaggcctctcttctccagagcaaagcccgggaacggtagaagagaatgtcgataacccacgcgtggatctgtgtaacaagctaaaacgaagtattcaaaaagcagtcctagagtctgcaccagcggaccgagcaggagtggaaagctcccctgcagcggacaccacagaactttcaccttgcagatccccctcaactcctcggcacctccgctatcgacagcctggaggacagacggcggacaatgcccactgctctgtttcaccggcttctgcttttgcaatagccacagctgcagcaggacatgggagtccaccaggctttaacaacaccgagagaacatgtgataaagagtttattatacggagaacggctaccaatcgagttctgaacgtcctccgtcactgggtctcaaagcacgcacaggatttcgaactcaacaatgaactaaagatgaatgtcctaaatttgctagaagaagttttgcgagacccagaccttcttccccaagaaaggaaagccgccgcgaatatcctcagggccctttcacaagatgaccaagatgacatccacctaaaattagaggatataattcaaatgactgactgcatgaaggccgaatgctttgagtccttgtcggccatggagctggcagaacagatcaccctcctggaccatgtcattttcagaagcattccctacgaggagtttcttgggcaggggtggatgaagctggataaaaacgaaagaactccttacattatgaaaaccagccaacacttcaatgacatgagtaacctggtggcctcccagataatgaactatgctgatgtcagctcccgtgccaacgccatcgagaaatgggtggcagtggcggacatctgccgatgcctgcacaactacaacggcgtgctggagatcacctcggccttaaacagaagtgccatctacaggctgaagaaaacctgggccaaggtctctaagcagacaaaagctctaatggacaaacttcaaaagactgtttcctctgaaggaagatttaaaaatcttagagaaacccttaaaaattgtaaccctcctgcagttccttatcttgggatgtacttgacagacctggcatttattgaagaaggaacaccaaactttactgaggaaggccttgtcaatttctccaaaatgagaatgatatcacacatcatcagagagatacgccagttccagcagacttcctacagaatagatcatcagccaaaggtcgcacagtacttgcttgacaaagaccttatcatagatgaagatacgctatatgagctgtcactaaaaattgaacctcgactccctgcttgaagatctggccttgcccctgagtccacgggatgttcatggaaagcaggacagacagaattgtgtatgccttgcctatcacggtacagcacgaagccaggctcctttctccaccaaagaagatggaaccagactggaattctgtctccagagagaaacccagctgtttgggtcaaagacagatgcttcagacttgggtgggaaggtgaaagatggctatttagaaagctggtggcacgttttacataagggaatgtcagatgggagatgctagttgccattttaacaaagcaggtaaatcggtaaattttaaactctgtccatgttctgttagaactcagggacaaggatccatgaaaaagacctg

SEQ ID NO: 688 - DNA, 1599 bp, Homo sapiens; identical to SEQ ID NO: 398

SEQ ID NO: 689 - DNA, 3285 bp, Homo sapiens
actccgcggtcctggtgccgcgtgcaggtcggtgcgcgcttctcccgaggtggaacgggcggcagtcaagcgccggcgttctctgccgtcaccctttccttgccggccggcacttcggctgcagagttttgcccacgcttcgagacttagggagcagtgcctttcagaatttgcccactcatctggtataactggttctgatggctgggaataaaggaagaggacgtgctgcttatacctttaatattgaggctgttggatttagcaaaggtgaaaagttacctgatgtagtgttgaaaccacccccactatttcctgatacagattataaaccagtgccactgaaaacaggagaaggtgaagaatatatgctggctttgaaacaggagttgagagaaacaatgaaaagaatgccttattttattgaaacacctgaagaaagacaagatattgaaaggtatagtaaaagatacatgaaggtatacaaggaagaatggataccagattggagaagacttccaagagagatgatgccaagaaataaatgtaaaaaagcaggcccaaaacccaaaaaggcaaaagacgcaggcaaaggcacaccactcactaatactgaagatgtgttgaaaaaaatggaggaattggaaaaaagaggtgatggtgaaaaatcagatgaggaaaatgaagagaaagaaggaagcaaagagaaaagtaaagaaggtgatgatgacgatgacgatgatgccgcagaacaggaggaatatgatgaagaagagcaagaagaggaaaatgactacattaattcatactttgaagatggagatgattttggcgcagacagtgatgacaacatggatgaggcaacctattaggcatgaaatttttcaaaaaatatttttatgatgcagcttctgaacatttggacagacttgatttgtattttatttctgataaggaataagtacttgtttctgttgttttggacaaatagttgttaccaaaatattcaaaaccactttgagtttacatactagttaccttaaaaattattccctgacactctgacattccttctaaacacctctgccatctctcttatgtactctcatgggtttttttgtatgatttgaatatgaatgtgcctaaagaatttttgctctcttaatctatgtatacatacttgaacaaatcattcttgcttaactgctgatcttttgtaaaactattgctagtcataatggatttctataacctgaaagttgatataatacagcacgtggagcactttaaaaacaaagaaacttgaaaataattttattttttacctttacatggtgtgttctagactactgcattatgactacataaacctacctgagctcttacaagtacagaattgtgagacagaggttttgtgatggaaaacatacacatagggaaaaataccaaactgagcaatataaatttcacagctcacatcttagccagtacaaagaaactttcacatggggtgaatattataatacttgaatttgagacttaatactgtatatgaattaatcatcccactgtaataactgacatcttcaaatagttgggcttatgaaaaatttgactaagacattttattttatactttatgtaaatgtgaaataagttctggtcatataaatatgtagaatgcatgtgtgtgaactctatgaagtgaagtgtggtggccttttatgtttcagagtactcaagtgtacaattgatttatataaaaatgcaaaatgaactcaggtcattttgaaattaatattaatatttttgttgtttaactttaaagctagctcccctaactttatatattttttgggaaaaaatacctaaaaacctcagcctacaaagactctcagaaatgccaaagattttcaaggaaattcatattatatatttcaaaaatgatttatcaatgttatctaccaaaagaaataattttatttttcccctttggggagatattatcctctaatatgagaatcagatccctagattctatttctacctatactattaaactcaaccttgaacctgagcttggttgtttctgtgccttagtttctccactcgtaaacaatttcctataaaaattgtttaaacaccaaccaaaatttaccatatgtattcattctcttgccttaaagatcacttcttaacttacatttggctctcaccctctaaaaatttgtagtttggagagtaactgaaagcacaattttaagaaacatgttttcctcacaaaatatattgtaatctgattttcctatcttgtattcatgcagaaaattggagaaaatgtgtattgtcttgtgccattctgcaatatgaatttctcaggaaaaagatgtttcaatggcaatactttcttaaataattcaagatgggtgtgaggacctatcttattagtttagtgctgtgttaaccatttgtgaattacttcttgtttaaaggaagttgtcaaaaaattttaagattctaaatggaatacacgaataaagtaagccttagaatagaaacctcacaaaaagttgtcatttgcggttgataattaacataggtgttttattctctcaactccttagtaccagagccaaatacaatttagttttcagaaatcttatcaatattgttctatttacctacttataaatctgcagataaccacttgaaccaggcaaatacactgaagataaaggttatttctttttttagctttgaatttgtcatgaccattttagtcttgcagatagcagggcagccccttggggcaaggatttactctgggaggtaccgttaagagccttctttccccctttgaaagatccttttacaatgttaaagtatactagttgcaagaacaagcaggatttgcaggttgctttaccagcatgagtctcatttttctggcttaaaatctgggactgtgaaattattccataggaaagtgaatgttattttgcagaattagcctcttacataaaagtatttgttgaagtgtctttaaaattgctatcatgagcaaaactggttgctgtaatgcttgtttttctgtatttatttacacattaaattcttacaaaacaaaatgtgttcgtttgttttatagtaagatgttttattttgaacttatttaaatgtttatttgttagagaaaactaatttgttaatatagatcttaactagtaactattaagcagggatgtttgttccaaatattcttgaataaacaatcaccacaaacaa

SEQ ID NO: 690 - DNA, 4105 bp, Homo sapiens
atgctgggcttcctgtcacgtggtccttcaatgaagctgtgcatgggcctggcatgtgtcttgtccctttggaacacagtgtctggcatcaaaggagaagccaagaaagagaagggaatgacctttttacctacaacagtgtctggccttagagaagaagagaggaaggagaagggggtggcatttcttgctacgacggagctgcccgcaaggtcaatcgatctgtccgcgcttaacctgacagagcttgtgaatgggatgctcagtagagcgttaaaagatagcaagaagttcttctccttgctgagtgtcacttcctacagttccttcgccttccacaagttttctgtagctgtttacaacatttctaacctgaagacagtagaccccgccaaattccccacaaggtattgctactgtttaaacaatcggaccaatgacttatcagattttacagctctactggtagatatcatcggcaattctaccagctacctcacagagatttttaagtcaacctccatcctctcagtgaatcaaagcaatgaatcagattgcatcttcatctgtgtgatgacaggaaagtcaggaaggaatctttctgacttctgggagatagaagaaaaatatcccattatcaattacacatttaccagcggcttgtctggtgttctgggtgcagctaccaggggaactgccaggacttcaaagcccacaaccaaaagccagaaaacactaccaagtacaagccccggacactggacccagagcacaccctgggcatctgctctgagatcctctccctggacagagacagctgctccttcagaaacagaggagaccctgaacacaggcaggcctcctgagcttccagccagggccacagccacatggttcagtgcctcccacactctcccagccttggctaccaggagggtggccagaactcagtggttgacagctgacagacagacgtgggcttccatatcgtccgtgccctgggctcagaccatcagtgagaaaaaacctggagggtctctctgggaaactcgttcttccccaccgactactgcagggaccgaggaagccatgaacactacaagccttttggcgcctgctgctgagataatggccacacctggcagcccatcccaggccagccctaccttgggagcattcacccatggcacacagactccgagtccaaccaaggcaacagcccccagatatccacaaacaggtgatctctctgcagagtggccattcactgctggtgaagagccagtcctggtcccaagaccccatcaagtttcaaggtgtcctcagccactcttcaaggtgggagctatggcagctgctcctctcaccctggctattcagaggctcaacccatgcctgatggagctgtgccaattcttccagcaatgcctctgcatgagccagaggagtcccaggacagaggacatgagatactgtcttgaatactattcctggtttctgaagaatgcaacatatatctgtcagagggtgaaaagggtgtcccactcgcacaccttaaagcaaaagtgccttgagaatatctgcaagtctgtgtgaggccttgaaaataacactagggcataacaattacttcaggggatacgccatccaccctggctcttgtcccaagtgggctacatttgaagaattcacccaggctccagctagatcatcagttaatttaaagtggttattcttggaagtagcattttttttccctctcctgtgaatctgtgcaaaacattgaaggtagaagttttcttgttagaggcctcacaattaatacagtaatgccagactccttgcctgcttcaaaatcatggaaatctagtgttcatgctcaagaaactcctacaatgcttgaggcaatcctgacaatttaaaaactggggatgcgtgggcactctagcctgcacaaaccagttcagccatggagactctgacacaatacctgaggtgacttaaacttgagacttttgaaagacaacaaaagcataaattaatattgaattcatactctagagagattcacatatactgatagttaactaatacatgtacaaccaatcagacttgccatggtatgggatctatataatcttccaagcccccttaagtgggcgataatgaaaactttatcattaggaggaggtttagagagttgtttttattgacatcttgtcttgattcctcttctgtgtgacccactggattcagaggtccccatgagcaccctcaggttcaatgattcatgagtagaactcagaggtagggaaaactgttatatgcacatttagcatttattacaacaaaaggatgcagatgaaaagcagcaaatgtgaaaggcacctctagagagagtccaagagagcccaggcacaagcttccagtggggttgcacagtcagcatctaatcctcccagaaataatgtttaacaacacgtggagtattgtcagccaggaaagctcatccaagttttggtgtccaggggatgtttgggggtatggagtaggtatggagtgccttcatggcctgcatggctaaacttagttattcagtctccagtccctctagaggtcaagctgatactgcacgacctaaggccccaccataaatcacattgttaacataaactatctgtcatggcacgaagccccaggtacaagagacactcatcaggcaggatattccaaggatttacaggggattccccaggagctggtcaaggaccagatgttcctctgaaaggtgcaggatttgagctcatctgtggagtacgtctgtggagtcaactttcttctgcatccccacatactgatttgccaccttcattgtatcagattcctttttcactatattcaggtttgcggttgctccagtatccctatctatgctgagtctccacgtagagcatgtgtgccctctccagtggctctgcacggaccccttatttctcattaccagggacagtttttctcctgatgtgcctggtgctccttctccactctcttgccttaggactctgctgggccatgagtattttttttacccttttgtgacctagggctgcccttgggtgaggaaagtcactttctgttcatcatctaagtagaaaacagtttctgccattggaagacccctgagttccctggcactcctgtgaaccacaaggtgcctggggaggtagaacttggacattggagagaggagcagccagacatttctctttctaatcatatgcagaaagatttctttttattctccagaacacttgaaagactctccaagttatgcaaatgtcaagctcataaatgtatattatcatgacttttgcaaagatgaagaggatacagcaaattttctgggaggcaaagggacttctacctggataggaaccaagcaaactcattaagcatggattaatttgattcaacccttgcgtggatattaattaaggacctttgacaggagagggtcctcaaggttcctcaaagagtaacttatcatcaaggaaggtgaagaatggatggatggcttgggcccaagactggggctattcacttgtggggaaacccatgtgaacccagttaccccatactttgggaataatgactgagcatgactataatctttaagaagctcaaatgcggaatacctctgaggcttatgcaaggatctggcctagcatcaaggacaaaggctcagaggactccttggggccagttttctacagtcataccatcagccacaacagcagcaaaggcagaaggaaaacagggcccaggagtggctgacgactgcctggagtccaactggtctcctggagttcataagaggtttgaccccttctgagctgaatgtgtcctgatttaggggatagctagggcaataagaaagcctcagggggtgctactgatctggaactcctactaattagtgtgtatgtatgtggccaccagtggttagcagatgaggtgaaagagatgggacagtgactgtatctgttctgatgaaggagattgtgcagttacatgcgtaacgtcattaaacttcattcttccaggt

SEQ ID NO: 691 - DNA, 1743 bp, Homo sapiens
ctggggagagtatatactgaatttagcttctgagacatgatgctcttcctttttaattaacccagaacttagcagcttatctatttctctaatctcaaaacatccttaaactgggggtgatacttgagtgagagaattttgcaggtattaaatgaactatcttcttttttttttttctttgagacagagtcttgctctgtcacccaggctggagtgcagtggcgtgatctcagctcactgcaacctccgcctcccgggttcaagtgattctcctgcctcagcctcctgagtagctgggattacaggtgcgtgccaccgtgcccagctaatttttgtgtttttagtagagacggggtttcaccatgttggccatgctggtcttgaactcctgacctcgtgatctgcccacctcggcctcccaaagtgctggaattataggcgtgagccaccgcgcccagcaaagaacttctaaccttcataacctgacaggtgttctcgaggccagggtctctctttctgtcctttcacgatgctctgcatcccttggatgtgccagtttctgggggaagagtagtcctttgttacatgcatgagtcagtgaacagggaatgggtgaatgacatttgtgggtaggttatttctagaagttaggtgggcagcttggaaggcagaggcacttctacagactattccttggggccacacgtaggttcttgaatcccgaatggaaaggggagattgataactggtgtgtttatgttcttacaagtcttctgccttttaaaatccagtcccaggacatcaaagctctgcagaaagaactcgagcaatttgccaagctcctgaagcagaagaggatcaccctgggatatacacaggccgatgtggggctcaccctgggggttctatttgggaaggtattcagccaaacgaccatctgccgctttgaggctctgcagcttagcttcaagaacatgtgtaagctgcggcccttgctgcagaagtgggtggaggaagctgacaacaatgaaaatcttcaggagatatgcaaagcagaaaccctcgtgcaggcccgaaagagaaagcgaaccagtatcgagaaccgagtgagaggcaacctggagaatttgttcctgcagtgcccgaaacccacactgcagcagatcagccacatcgcccagcagcttgggctcgagaaggatgtggtccgagtgtggttctgtaaccggcgccagaagggcaagcgatcaagcagcgactatgcacaacgagaggattttgaggctgctgggtctcctttctcagggggaccagtgtcctttcctctggccccagggccccattttggtaccccaggctatgggagccctcacttcactgcactgtactcctcggtccctttccctgagggggaagcctttccccctgtctccgtcaccactctgggctctcccatgcattcaaactgaggtgcctgcccttctaggaatgggggacagggggaggggaggagctagggaaagaaaacctggagtttgtgccagggtttttgggattaagttcttcattcactaaggaaggaattgggaacacaaagggtgggggcaggggagtttggggcaactggttggagggaaggtgaagttcaatgatgctcttgattttaatcccacatcatgtatcacttttttcttaaataaagaagcctgggacacagtagatagacacacttaaaaaaaaaaa

SEQ ID NO: 692 - DNA, 2014 bp, Homo sapiens
aggcggcttttggtcacaggctcccgagttctcctagctggggctgcggagctggggggagggaagagaggaaaggggagggggtgcctggagaggcggaggctcgcgcgcctgcgcatccagctccagggaccctaggttttctatgggattcccaatctgcagcagagatttacccgagcgtgttgcggcagcggctgggcttgcaaggcgcgatccaagagggatttaagcagcccagagctccagagaaaaagagagcgagagagaaccacacacagagacggcttaagcgtttacccgaattaaatatatatttttaaaaagaactgttgagttttatcattttcgttaagtgaccgtgcgcagcgctgtaactgcaggatggggaagcagaatagcaaactggcccctgaagtgatggaggacctggtgaagagcacagagtttaatgagcatgaactcaagcagtggtacaaaggatttctcaaggactgtccaagtgggaggctaaatctcgaggaatttcagcagctctatgtgaagttctttccttatggagacgcctccaagtttgcccagcatgccttccgaaccttcgacaagaatggggacggcaccattgacttccgagagttcatctgcgctctgtccatcacctccaggggcagctttgagcagaagctgaactgggccttcaatatgtatgacctggatggtgatggcaagatcacccgagtggagatgctggagatcatcgaggctatctacaaaatggtaggcactgtgatcatgatgaaaatgaatgaggatggcctgacgcctgagcagcgagtagacaagattttcagcaagatggataagaacaaagatgaccagattacactggatgaattcaaagaagctgcaaagagcgacccttccattgtattacttctgcagtgcgacatccagaaatgagctgatgtcaatgctatggactgcacaaaagtctcaatgttccattcagtctgcagctattcacacacacacacacacacacacacacacacacacacacacacacaaatattgcttggactacctataaatggacttgcttcttgtgtttgaaacactcgtgtgcatgagaatgtcatttgctaatgaattttaaaagcatatataaaacaaaacaaacaacctgccacaatgtgatatgtgtaatatcatttcataaaaatccctcttcctccaaagcctgggcagaaatgtgctgcaaagagttatatgacttcttgttcatgttttgctaatgctcgtatctccttgattacataatgttagtagcactgagacccccatggtaatgtaacttaattataagctatgtcactaccctcctgtaaaatactattggacagacacagagggacccttggctcctgtgtctggtccacacaccacagaagcttgtattatcagtgaatataaatgtactacatttgcatgccttttgggtttgccttaattcttacctcatttgcatcctatcgatctggaaagagctgttttggatgaatgcagtataaaatgtaaaaaccctgctaaatgacttattgattaagtatatctatctatatatacatatacacaaagatattatttatcgaaagtaaaaaagatggaagtgtattggtttctgtttgaattttcaaaggcttccaatgtggtggcaataaatgtcccaaataaatttataacaattgattttccccctaattcttattttataattttaaaattgcagcagttgctagcaacaacttactaaatctactcttaaatatacaactttggaatttgaagaattaatgacaacaaaagggaaaaaagcaactttccaacttttcatccaggctcccaaaagagggacaacgaacatggcatgtgaaaagtaaaacagatttgttcattccgaaaaaaaaatgttcattctatgacaataaattttatctcagtgtgaaaaaaaaaa

SEQ ID NO: 693 - DNA, 3313 bp, Homo sapiens
gttccattcccgggggattggagtagcgttggagtcaccgacgccatcccctcccgcctctggcgtgcatggagcatgcgcttccttcctcacttcctctgcaggagggagcgagagtaaagctacgccctggcgcgcagtctccgcgtcacaggaacttcagcacccacagggcggacagcgctcccctctacctggagacttgactcccgcgcgccccaaccctgcttatcccttgaccgtcgagtgtcagagatcctgcagccgcccagtcccggcccctctcccgccccacacccaccctcctggctcttcctgtttttactcctccttttcattcataacaaaagctacagctccaggagcccagcgccgggctgtgacccaagccgagcgtggaagaatggggttcctcgggaccggcacttggattctggtgttagtgctcccgattcaagctttccccaaacctggaggaagccaagattgctgaagcagaagaagacaagattaaaaaaacatatcctccagaaaacaagccaggtcagagcaactattcttttgttgataacttgaacctgctaaaggcaataacagaaaaggaaaaaattgagaaagaaagacaatctataagaagctccccacttgataataagttgaatgtggaagatgttgattcaaccaagaatcgaaaactgatcgatgattatgactctactaagagtggattggatcataaatttcaagatgatccagatggtcttcatcaactagacgggactcctttaaccgctgaagacattgtccataaaatcgctgccaggatttatgaagaaaatgacagagccgtgtttgacaagattgtttctaaactacttaatctcggccttatcacagaaagccaagcacatacactggaagatgaagtagcagaggttttacaaaaattaatctcaaaggaagccaacaattatgaggaggatcccaataagcccacaagctggactgagaatcaggctggaaaaataccagagaaagtgactccaatggcagcaattcaagatggtcttgctaagggagaaaacgatgaaacagtatctaacacattaaccttgacaaatggcttggaaaggagaactaaaacctacagtgaagacaactttgaggaactccaatatttcccaaatttctatgcgctactgaaaagtattgattcagaaaaagaagcaaaagagaaagaaacactgattactatcatgaaaacactgattgactttgtgaagatgatggtgaaatatggaacaatatctccagaagaaggtgtttcctaccttgaaaacttggatgaaatgattgctcttcagaccaaaaacaagctagaaaaaaatgctactgacaatataagcaagcttttcccagcaccatcagagaagagtcatgaagaaacagacagtaccaaggaagaagcagctaagatggaaaaggaatatggaagcttgaaggattccacaaaagatgataactccaacccaggaggaaagacagatgaacccaaaggaaaaacagaagcctatttggaagccatcagaaaaaatattgaatggttgaagaaacatgacaaaaagggaaataaagaagattatgacctttcaaagatgagagacttcatcaataaacaagctgatgcttatgtggagaaaggcatccttgacaaggaagaagccgaggccatcaagcgcatttatagcagcctgtaaaaatggcaaaagatccaggagtctttcaactgtttcagaaaacataatatagcttaaaacacttctaattctgtgattaaaattttttgacccaagggttattagaaagtgctgaatttacagtagttaaccttttacaagtggttaaaacatagctttcttcccgtaaaaactatctgaaagtaaagttgtatgtaagctgagattttgtatacagaatccttatttcctcatagacttatattttataatcagaatatgttgctttgaaaaagcctctaatggactgaccttaaaactcatccttcttccactgtctcatccacataagcactccccgaagaattaagggggttctgttttcaaggcatgccaagtactaaagcaccttgcagagcgtgtctattacaagatgtcatttccaccagcagttcccttaggggagctgaaataaattcacattttctcaaagtctcatagctttggaggagccatctgcttttttggctgctctttttagctggctttttattaggctcagtgacataaaaaggatccaggtaaatgggtataggatttgctggatttactaacaatttccccctgttcttaacacttcctattagtgacttttcagacattgagtttacttataaagagagatatttatgtactctctaagaagacaaatgaggtcataaacactgcataaagcaaggcaaaaatgtatgccacatctcagttatctaaactagattagatccaagccaagttttctcaacagagagcaaagggccaggcagtaaggtagaaatagagataaaaatcattccttccttgtgatccaaagctggtcgagcagctttcctggaggaaaaggttaatgaacttcaggtccctgcaactcagcccccaccacaaacacagccctggaaacatacagtggcgcaaggtcctcttgaaatgttaatggttaatgttcccaaaccagagaatgctttgaaaatgtatcattcagtgtaaattaattacatacatatttttctatatatttgtttcaaactgtaaaaataacataatatgtaatttgtgtattagtgagaggtgaagccagctggacttcctgggtcgagtggggccttggagaacttttctgtcttacaagaggattgtaaaatgcacccatcagtgctctgtaaaacacaccaatcagcgctctgtagctagcaataggtttgtaaaatgcacccatcagcactctgtaaaacgcaccaatcagcactctgtaaaatgcaccaatcagcaggattctaaaagtagacaatcacagggaggattgaaaaaaagggcactctgatagggcaaaaacggaacatgggaggggacaaataagggaataaaatctggccaccccagccagcagcagcaacctgttcaggtcgcctgccgctgtggaagctttgtccttttgctcttcataataaaccttgctactgttcaaaaaaaaaaaaaaaaaaaaaaaaaaaaaaaaaaaaaaaaaaaaaaaaaaaaaaaaa

SEQ ID NO: 694 - DNA, 2168 bp, Homo sapiens; identical to SEQ ID NO: 404

SEQ ID NO: 695 - DNA, 1538 bp, Homo sapiens
ccgtgcaccgtgtgtgcgcgcggcgttgaaatgccctgcacgtcggggcagcgggacagatcccagggtgcccagggagtctccaagtgcctcactcctcccgccgcaaacatgacagagaactccgacaaagttcccattgccctggtgggacctgatgacgtggaattctgcagccccccggcgtacgctacgctgacggtgaagccctccagccccgcgcggctgctcaaggtgggagccgtggtcctcatttcgggagctgtgctgctgctctttggggccatcggggccttctacttctggaaggggagcgacagtcacatttacaatgtccattacaccatgagtatcaatgggaaattacaagatgggtcaatggaaatagacgctgggaacaacttggagacctttaaaatgggaagtggagctgaagaagcaattgcagttaatgatttccagaatggcatcacaggaattcgttttgctggaggagagaagtgctacattaaagcgcaagtgaaggctcgtattcctgaggtgggcgccgtgaccaaacagagcatctcctccaaactggaaggcaagatcatgccagtcaaatatgaagaaaattctcttatctgggtggctgtagatcagcctgtgaaggacaacagcttcttgagttctaaggtgttagaactctgcggtgaccttcctattttctggcttaaaccaacctatccaaaagaaatccagagggaaagaagagaagtggtaagaaaaattgttccaactaccacaaaaagaccacacagtggaccacggagcaacccaggcgctggaagactgaataatgaaaccagacccagtgttcaagaggactcacaagccttcaatcctgataatccttatcatcagcaggaaggggaaagcatgacattcgaccctagactggatcacgaaggaatctgttgtatagaatgtaggcggagctacacccactgccagaagatctgtgaacccctggggggctattacccatggccttataattatcaaggctgccgttcggcctgcagagtcatcatgccatgtagctggtgggtggcccgtatcttgggcatggtgtgaaatcacttcatatatcatgtgctgtaaaataagaactagctgaagagacaaccaaagaagcattaaggcaggttgatgctgatgggaccataaaatatttttacactcaacctgagcggttattcttgacactcttaacagaattttttcaattgttttccagaactttagtatatgcaaatgtactgaaagggtagttcaagtctaaaatgccataacccctttattatttgttattttttatttgcattgctttgccataagtcttcccttgcttgtatcttccaaagctattttgaaataaacatgaaaatttacagtttgccaaaaaaaaaaaaaaaaaaaaaaaaaaaaaaaaaaaaaaaaaaaaaaaaaaaaaaaaaaaaaaaaaaaaaaaaaaaaaaaaaaaaaaaaaaaaaaaa

SEQ ID NO: 696 - DNA, 1256 bp, Homo sapiens
atagttcactcactttcaaagccagctgaaggaaagaggaagtgctagagagagcccccttcagtgtgcttctgacttttacggacttggcttgttagaaggctgaaagatgatggcaggaatgaaaatccagcttgtatgcatgctactcctggctttcagctcctggagtctgtgctcagattcagaagaggaaatgaaagcattagaagcagatttcttgaccaatatgcatacatcaaagattagtaaagcacatgttccctcttggaagatgactctgctaaatgtttgcagtcttgtaaataatttgaacagcccagctgaggaaacaggagaagttcatgaagaggagcttgttgcaagaaggaaacttcctactgctttagatggctttagcttggaagcaatgttgacaatataccagctccacaaaatctgtcacagcagggcttttcaacactgggagttaatccaggaagatattcttgatactggaaatgacaaaaatggaaaggaagaagtcataaagagaaaaattccttatattctgaaacggcagctgtatgagaataaacccagaagaccctacatactcaaaagagattcttactattactgagagaataaatcatttatttacatgtgattgtgattcatcatcccttaattaaatatcaaattatatttgtgtgaaaatgtgacaaacacacttatctgtctcttctacaattgtggtttattgaatgtgatttttctgcactaatataaattagactaagtgttttcaaataaatctaaatcttcagcatgatgtgttgtgtataattggagtagatattaattaagtcacctgtataatgttttgtaattttgcaaaacatatcttgagttgtttaaacagtcaaaatgtttgatattttataccagcttatgagctcaaagtactacagcaaagcctagcctgcatatcattcacccaaaacaaagtaatagcgcctcttttattattttgactgaatgttttatggaattgaaagaaacatacgttcttttcaagacttcctcatgaatctctcaattataggaaaagttattgtgataaaataggaacagctgaaagattgattaatgaactattgttaattcttcctattttaatgaatgacattgaactgaattttttgtctgttaaatgaacttgatagctaataaaaagacaactagccatcaaaatcaaaaaaaaaaaaaaaaaa

SEQ ID NO: 697 - DNA, 6404 bp, Homo sapiens
ttacatcttatagcacccagtgaattatgatatggggctgcggtttatttgctctggcgacaatatggcttacttgccgtggaatatcccggtatttcagaagtaacatattatttttaaagagggagctttgctttctctaaatcacatggtgcaaagttgggaatacagtggcctgtaaattacaaatattatttacaaactagaaggaaagctgacatgtgtttgtgcctgtgtgacagtttcactaaggaattccaaaactgtggatagcctgttacttgagaaaaatacacggtggcagtcttgcagatgtttttcccgcctgttagccctccaggttcaaaaactgtttggtgcattttaaggcggcagtctcaccagatcgcaggattctagtctaattggcttctaaccttcaatctaaccttgccggcttccttgcaaagcccggtgcaagggcctctttcaaaatgaacccactggtgtgcctagcagtcggtagaagaagcgggagggcgtccggtctgcacgcccgccgcgaggttacaatgctgaacgcatgagatggaagataccaacgggaggccgaggggatccacggcgcccgcgcgggctccggcttcctcctgctctcggcgccgctgggcgaccgcccatgacccgctcttgcgggctctgtccggttgacaggcgaccctgtggcccggggaagcgcgggagggcgccggcggaaagttgaagagcgtttttctcgccgccgcgtgcattaggagctcgacgagtccgccctgggcttcctggtggggctgggcgggcgggggaggggccgcgcagcagcagcggaagccagacctcggcgataagaggctgcacagcgacatgcaacagtcttttcactgcagctgaatgagttgtggcgcccacaatgctcccatgacaaggagctgacaagttccattttccgtcgcgggcatcttggaatcatgactcccacaatgccttgggcacttggtcgacagtggggccgcctctgaaaaaaaaatgtgagaggttggtactaagaagtgcctttcctgacgtctctgctgcttggaaccgcttctagagcagtctctgcttttgccttgcttgctgccagctagactgtgacgacagcacatccaccctccacctctagcccagacacccccatttctacttataatcaagagaaaagctctaagtatctggcattgccctaggctgctttagtgttaaaagaaaagtttgctgaaaaagtaagatatcttctgccaggaaatcaaggaggaaaaaaaaaatcattttctcgattttgctctaaactgctgcatctgtctatgccaaactaatcaataccgattgcaccaccaaactccattgcaaattcagctgtgaggagattccctttcagacaactttgctgaaagcagcttggaaattcggtgtcgaagggtctgccacgttttcatgcttgcattttgggctccaaattggcactgggaaggggttactgagagcacaaggctgataccaggccctacttttaaacgttcatctacttacaatcctagtatttctctaaaaaccaaaacctctttgaattaacagtttcatgctgtgaatttctagtgggagatcttttccttgatattgacgacacaattttccatgtacttttaaagcagggagtggggaaaagtattttgaggggacattttcatcatcagttcagctttttttttttggttgttgctcttttttgggggggttgggtttgttggtttcactgaaacatttaactacctgtaaaatctaaacatggctgttagtgtcacaccaattcgggacacaaaatggctaacactggaagtatgtagagagttccagagggggacttgctcacggccagacacggaatgtaaatttgcacatccttcgaaaagctgccaagttgaaaatggacgagtaatcgcctgctttgattcattgaaaggccgttgctccagggagaactgcaaatatcttcatccacccccacatttaaaaacgcagttggagataaatggacgcaataacttgattcagcagaagaacatggccatgttggcccagcaaatgcaactagccaatgccatgatgcctggtgccccattacaacccgtgccaatgttttcagttgcaccaagcttagccaccaatgcatcagcagccgcctttaatccctatctgggacctgtttctccaagcctggtcccggcagagatcttgccgactgcaccaatgttggttacagggaatccgggtgtccctgtacctgcagctgctgcagctgctgcacagaaattaatgcgaacagacagacttgaggtatgtcgagagtaccaacgtggcaattgcaaccgaggagaaaatgattgtcggtttgctcatcctgctgacagcacaatgattgacaccaatgacaacacagtcactgtgtgtatggattacatcaaagggagatgctctcgggaaaagtgcaaatactttcatccccctgcacatttgcaagccaagatcaaggctgcccaataccaggtcaaccaggctgcagctgcacaggctgcagccaccgcagctgccatgggaattcctcaagctgtacttcccccattaccaaagaggcctgctcttgaaaaaaccaacggtgccaccgcagtctttaacactggtattttccaataccaacaggctctagccaacatgcagttacaacagcatacagcatttctcccaccaggctcaatattgtgcatgacacccgctacaagtgttgttcccatggtgcacggtgctacgccagccactgtgtccgcagcaacaacatctgccacaagtgttcccttcgctgcaacagccacagccaaccagatacccataatatctgccgaacatctgactagccacaagtatgttacccagatgtagaattttcatcactaaacaatcatgctaaagaggaaaggacagtgtgcttggttagagtaaaggacgaggtcattagccatattgtatatatcgtcaagcaacacacacaaaagttcctcagccacaagacatccacatattgcatgttaaccagaagaaaagacaacattttccggaaatccactgcacactgttgcctatacactttgtacatttaattgatatttgtgctgaggtgatattcctgtctaaaagaacaacattgtctttcttttctagcacagagttatgcattcaaagatgcatacctagttagtttcctatatattcatgccatcttgaaaagacagactatggtgtaaccatgattctattatgtattggtacgtctgtagaccaagatataattttttaaaaataagtttatttctttcaaggtttacaaataacaaaggtgcaccttgtatttaaaattgccattatagatgagagcgtgcatgcacagtcatttttgtttaagagtaatatttttaatgtaatagattgtaagacgtggtgagggagggatctgacagagatgaatgtgccaagcaaaaccacaactgtgtatattttaaagcacatcatggctttaagtaccatgttgttaaggattctcatgaagtgccatagactgtacatcaaattagagtattatttcttcagtgttattgttttcagagccacattttgttgcatatttgctagtactaatcagtcaaagggcaccattctttttttttttttttgaaaccaaagctgtctcagaaatggccaatttaactttacagtaacaatagacagcacaacacaaactctctcaatacagataaactcacacatactggagatatatatataatagatatatataaaattattttaatgcattgtagtgtaatatttatgcatactatactgtataacatgttattcaaaagggattgccatttctgagacacagtaacaaaaaaatgaggaaattattttgcttctatttatagcctctgtcaaaagtcaaaagactataaatgctttgcaaaaatggtttcacgtttgcttaaatgcttcatcacagtcacattcaaaatagtgactctaaacaaagaagaaagcagcactgtcatcagatgcatgataaaccaaaatatgaaaatgggaaatgtttaattaacctagtaattgggtgggttaagtacatgggtgaattttatatgtgatttttgttttgttttgttttgttcagattaactgcttatagccttagaaagccttttacaaaattaaaaaaaaaatagatgtgcattcagtttttaagaatggaatcatccaaaggaattcctttttttgaggtttggatgttgcagctagtaaaggatatttttgctctgttcagcagttctaaaaattgctgaagtaggggccaggtcactggtagttatagtatggaatgggagaagtgaaagttcagttatagaactttccatacttccaagtttactgcaagtttttatgcttgagagagatgctttctaatataagactgatgtgttgattttactgattgtactgtacatctattaaagccttagattattacattacgggttggaacccataccaatgtaatttcaatcgtgttaagaaagtaatggtgacttcacatgttattgtagttagttacattatagaatattacttatttttcttgttaaaatgtagtttttcatttcctacatttattagattttcattttctattaacaattgaataccatttcagtttatagacttgttttattagattttaccaatgaatttttcaaaatacaaaaaaaagtagtttttccttcataacatactcagttttgaattacatgtagtgtcacatgaatattcgtattgttaactaaatgatttatattttactgatttaatattacagtgtaagaatgtcagtcattgttagttcttgtctagttttcattaaaagaacaaagatcttttatatggatatcttataaatatataatcattgctaagtaagaagttaagttgttgctatcgcaacaatcctggcagacaattgagtaatattttgatgatttattttgtttgtaattagttattataagaagatctagatcctagatattagaataaaatttattttctactgtatccatttcaaatgttaaaatattgtttaatatttttgaaatccctgagtatcaggccttgttataaataagctgcataatcaataaatagaacaagggactttttgttgataatccaaatactcaaagtttacgtaatgaaaattatagcgtgtgtgcaaactcttgagggttgattatgctgcaatttagcatgttggaacgtctagggagaaggttgactttttgcacttctgtatatagtcaaaagagagaaacctgtataatagtaagatcttattttgaataaaaacgtctataattacaaggagttttgttaaggctaatacaatgacagactgagcaaaattgcttgcaaaagtggcacagagttagcactccataccccttcaaacatgttgctttgctttcttgtggacagcttgtagtttgccaggattttttcagctggaaagatacgccatcctttcaaaccctcatgactgacaaaaactccatggggccaaatctgcctgaagatcattaccaaaaatagcaggtacttctaccattaaggtgaaatcatggatcagatattccttacatttttcaaaactactgcatgtttaaaacttcaacaaaaaaagagagaaagaactatactaagaacatatattattcagatcagtttctgccaatttcagtggtttattgttcacaaaaaaatcttcaaaacaagtattgactttcacaaaatttaaatcataaacaggcaaaccaaacagcacactgtagctatagttgttatgtgattgttttttaattgctgtaggatcctgttctttcagcaggtgaaaaataaaacgcagttcaaatttcatggttttaattttcaactcagaagcactcaaaaatgcaaaatgtgataatgggcacttgtttaaaagaattagtgtatccagccttcactccagctggttaaaaatgttgcacttatcagcaaccctaccactttcatctgctgaaaggacaaatgtgcttggttttactattatgtaatcacaacttactttctgcttgtagttgcttaaaattatgtattttgtcttgggctgcaatttgttttatgcttattttattattactgcagtagttgactttgctgtatggaaaaataaagtgaaattgccctaataaaacttctctttcttaagt

SEQ ID NO: 698 - DNA, 1779 bp, Homo sapiens
cttcacctcactttaccttctcctccagcacaggaactaggaactacggagagagaagccaagggagaggaggaggaggaaactaacgattccctgcccacccccacacccagcaccaccaacaggtgggcaagcttgccgagaaaacgcagagggcatcctgtgagcagcaaacacatctgagcctggaaaagacgcagagaagtaaaagatcaaagtctgattggcaccggctcccattccggctccagcctccaatccgacccccatttcggctgcagcctcggacctagctccggccctcggtctatccggttgcatcctccctccctgttccggatcttatcttgcgccagcgcctactccaggatcccgtagccagacctcaagccatggctggtcccttctcccgtctgctgtccgcccgcccgggactcaggctcctggctttggccggagcggggtctctagccgctgggtttctgctccgaccggaacctgtacgagctgccagtgaacgacggaggctgtatcccccgagcgctgagtacccagacctccgaaagcacaacaactgcatggccagtcacctgaccccagcagtctatgcacggctctgcgacaagaccacacccactggttggacgctagatcagtgtatccagactggcgtggacaaccctggccaccccttcatcaagactgtgggcatggtggctggagatgaggagacctatgaggtatttgctgacctgtttgaccctgtgatccaagagcgacacaatggatatgacccccggacaatgaagcacaccacggatctagatgccagtaaaatccgttctggctactttgatgagaggtatgtattgtcctctagagtcagaactggccgaagcatccgaggactcagtctgcctccagcttgcactcgagcagagcgacgagaggtggaacgtgttgtggtggatgcactgagtggcctgaagggtgacctggctggacgttactataggctcagtgagatgacagaggctgaacagcagcagcttattgatgaccactttctgtttgataagcctgtgtccccgttgctgactgcagcaggaatggctcgagactggccagatgctcgtggaatttggcacaacaatgagaagagcttcctgatctgggtgaatgaggaggatcatacacgggtgatctccatggagaagggtggtaacatgaagagagtgtttgaaagattctgccgaggcctcaaagaggtggagagacttatccaagaacgtggctgggagttcatgtggaatgagcgtttgggatacatcttgacctgtccatctaacctgggcactggacttcgggcaggagtgcacatcaaactgcccctgctaagcaaagatagccgcttcccaaagatcctggagaacctaagactccaaaaacgtggtactggaggagtggacactgctgctacaggcggtgtctttgatatttctaatttggaccgactaggcaaatcagaggtggagctggtgcaactggtcatcgatggagtaaactatttgattgattgtgaacggcgtctggagagaggccaggatatccgcatccccacacctgtcatccacaccaagcattaactccccatcgccagctgatgactcaagattcccaggagttctgctcattctaatgatggcccattctacttgctctggacctgcccccgcatcccctgcctccatcctagtaaagactccttgctatgctgca

SEQ ID NO: 699 - DNA, 5140 bp, Homo sapiens
agaggccggaggagggagggggggacaccgagcgcggagagcgcggagagcgcggagggaggcgcgcgcgggagcgaacaccctcccggatccagagcccggcggcggcgaagcagcagctgcggccgcgcccttgccagagccggtgcgtccgcctagccccgctccgcctgaggccgtcagggctcccgaggatggaagattcccaggagacatcgccgtcctccaacaactcctcggaggagctcagctctgctctgcacctgtccaagggcatgtcgatcttcctcgacatactgaggagagcagacaaaaatgatgatggaaaattatcctttgaagaattcaaagcatattttgcagatggtgttctcagtggagaagaattacacgagcttttccataccattgatacacataatactaataatcttgacacagaagagctatgtgaatatttttctcagcacttgggcgagtatgagaatgtactagcagcacttgaagacctgaatctttccatcctgaaggcaatgggcaaaacaaagaaagactaccaagaagcctccaatttggaacaattcgtaactagatttttattgaaggaaaccctgaatcagctgcagtctctccagaattccctggaatgtgccatggaaactactgaggagcaaacccgtcaagaaaggcaagggccagccaagccagaagtcctgtcgattcaatggcctggaaaacgatcaagccgccgagtccagagacacaacagcttctccccaaacagccctcagtttaatgtcagcggtccaggcttattagaagaagacaaccagtggatgacccagataaatagactccagaaattaattgatagactggaaaagaaggatctcaaactcgaaccaccagaagaagaaattattgaagggaatactaaatctcacatcatgcttgtgcagcggcagatgtctgtgatagaagaggacctggaagaattccagctcgctctgaaacactacgtggagagtgcttcctcccaaagtggatgcttgcgtatttctatacagaagctttcaaatgaatctcgctacatgatctatgagttctgggagaatagtagtgtatggaatagccaccttcagacaaattatagcaagacattccaaagaagtaatgtggatttcttggaaactccagaactcacatctacaatgctagttcctgcttcgtggtggatcctgaacaactagatgttcctagacattttctttatggttccaagtgcaaaacaggtgttcttatctaaaacgtcaattagaaaattatctgcggttgttaatctactgtatatttttgtttggtatatttactaagtgcactctttcaaaacttattctataactttatcaattcatgtgaattttagctcaattttcaaagttcactaatattctcaatatttaatgctaaatgctttgctacattgtaactcacctaaaaccttttagtgacaaaatcctaatatgtggaaaaaagcatatgcataaaggaataatattgtgaaaatgaatctgttatgataaagaaaaaataaagtggaaacttttagagtattacttcatagggcagattttgtaaactgtcgtatactgtaaagggttaaatcagcgttttgtgatttttaagtaactgtgagtgaagtttattcttcaacaatgtctactccatccccaacccaactcacagccctatgactactatctttgcattagttaaaaagttagtatataggcatcaaacaaccttggctgtaacctatagaatctctatccacgtatcaggttatagactggtttttcaaaagtgaacaatcctgtgataagttggagtaccatttagtaatacagcaacattgtgtcatttattagcatcataattctttgttatgtaagttaaatatatcaagaaagaagagactgtttggaaaaatgtggttcaagttttatgctatatagttttggtatgcgatacagacagctaacttttcttatgaaaaatacatatttgcatgtaaacaatgatttcaaaatacttgaaaaataaaattttaacccaaatgaataactaagaaatataaaacaagcacaaaatcttagggaagtcataaaatagtagtgaaagtattagacagaagacatctgttttcgaatttcaacactagaatgactaaaactatctacctatagaactatctgtagatagtatactatctacactctgctcaacaagctcagaaattaaatatttttaataataaaaatctgttctggttataaaccttgctaatgaaaatacaatacatataaaaatgtatagccatgttattttctagtataaattcctttgaaactataagtctttgaggaaaattataaggtaaaattttcctgtttttccccctttgaaaaactcaggaaaaaaggaagattgaactaataaaattttatttcttaaatataaatttgacctaaaatattttctcaaactaattcatgaaacagcaacttttaccaatacctttgtatactctcagttctcattcagtataaataaaattttaaaatcctttcatagttctattagaaataagtagtaaattttgatatattgtacatacacacgtgtgtgtgtgtgtgtgtgtgtgtgtgtgtgtgtgtgtgtgtatttgtgtgcctctggtcaactctaaggatgacagacactgtgtaacaacacctgggtcaactcttttaatttatatacaaagcaaagaacaacattaatggagatgcacaatgattattcaaacaagctatatatatgtacaaaggcaaacagacacataacagtctctgcagactgattgtatatagtaagaaaagatcaaaagactttaaaacctaaatgacttttgacatacaaactcttcttgagaatgtttgttgtaaatggtttcaaaaatacaaattatagccaatcaaaacattgctttggttggtgcatttaagtatccaactcaaaaagcatatcaaatattttgggtactaggcagtttccaaagtagcatggtagtattacttgttaaaagggttctgttttcattaacagtactaagtggaagggatctgcagattccaaactggaataagctctatcatattctgaaacaagaattagaatgacttgagaacgggcaaataacaaagcaaaccaatataattatatggtcattctgaccccagctcttatacaaattatacatgtatttttgtgtatgtttgtgagagttgtatgtatgtgaatgtgtgtgagtgtgtattcacatacacatatatactggaacctatagtagaaaaggaaactagtagggccaaaaaaaaaaagaaaaagaaaaagaaaaaagaaaaaaaaagaaaaaactgggacctaagtataaatatctcatcctaaagtaaacaataagtttatagttaacgaagatttttttctatttaaaaccccattttcctaaagaacaaagtagtaaaataaaaaaaaatttaaaaaattaaaaaataaaaaaaagaggtcactaaaagaccaagatgggaaacgtaacatggaatacaagcttgaatctgggaaacaagctcaaaaaacagtgaaaaaaaaagtactggtttaggagttcaaaattcagtgaaacaaactttttgccaatagacctagggatctaagaaatagaattagggagagtttacacttacttacctatatatcagcagatttttctggaagaaaccctttttttttttttttttaaacagtaacatccagagtgacaaattgcaggagatttaatgtataaaatttctaggaattaaaagcttaaacccaaaaattgttcatccatatataagaaattatcgaattaaaacttaatgtatgtcaattattttcaaatgtctaaattcctttggaaataaaaatatcagttttactttgaaattgctcaacttctgctattcatatggtctgattagtgacataagtagcagccgtttttcaacttcagtttcattcactaccattgtttccaaattatcaatctctgctagtaattatgaatttaagaccatattattatcaaaaacctagagaccaatcatatatctgaaaagaaatacccattaaaaattctgcctcctgtttattgagaactatgcattgaacattctgaatcattctaagcctctggagagactgtaatgatccattcatgagctggtatgaaatcagtgggaagcagaacaacagaaggaactttaaaagcaacaagcaattatgtaccatatatacactgtagcaaatattttatatttgagagtctttacagcttacatttccattccattattacaagtgatgaaaaacaaaaaattgcaagtagtatgcaaattataaatatacagtcttcccacttcactaaccaaattcctactttccagtgttacttcccaatttatgcaggaaacctcctgcaaagctgaaactgattagaaaattctttatattttaaaatagctctttctcatttttagagaagtcaaatagccaaccatcaaaattaagaataaattgaattgtcacagtccattacagttattgttgctagatccacctcatttgcagatgtccaaacttaaattcatctgttcttaaaatgctacttaaaactttggttgttttcctgtaatataaaagaaaaagttaatttatcaattgattgaatacagtttttactaattagtttatcaaaccaaatactgtgaacgtaccaggtgtttacagatttaaatgcatgttaccatagaaactattaaagtaactagaactgtcaaataacaaaacggctcatgtttttaaaatatatgtaactcattttaaaatatattaaattgtattccaaacctgttcttctgtttctgtggcacctaggtttaaaatatgtattaatgtgtaaatcacaagtaaaatgaattctaatgtacaagtttgttttaaaaagtgtatgtcaagcttttatttacacaataaaatgttattaaagatggaaagtcta

SEQ ID NO: 700 - DNA, 1077 bp, Homo sapiens
agcagtctttgaaacagctgtaacggcatctgtgaaagaagataggttccaggaacggaactgccacttagattgtaaattcctgaaaaacaggacgtttttgcatctcctcccggcttccccatccctaaaccaacgtctgttgaattaaactaccaaacaaaataactgcagtacagcaatggcgatcagaaggtagaacagctgtatggctgcacattcccatcctccaaagccgatttattgcccctgctgcttccctgggcttctgctttcaccacgcagaatcggattcatcaacgttgactctgtggctgagagaagggcccagcagattaccaggatatgcttcacatcaagtaggagttgcaggagctgtatttgatgaaagtactagaaaaatactggttgtacaagatcgaaataaattgaaaaatatgtggaagtttccaggaggcctgtcagagcctgaagaagatattggagacacagcggttcgagaagtttttgaagagactggtataaaatcagaattcaggtccgtcctgagtattcggcaacagcacacaaatcctggagcttttgggaagtcagatatgtatatcatctgccgcctaaagccatattcattcaccataaatttttgccaggaagaatgcttaagatgtgagtggatggatctcaatgacctggcgaagactgaaaatacaactcccatcaccagcagagttgctaggctgctgctgtatgggtacagagaagggtttgacaaaattgacctgactgtggaagaacttccagcagtttacacaggactgttttataaactctatcataaggaactgccagagaattataaaactatgaaaggaattgattaaattcacatttatatgtttagaaacatgtagactaacgaatgacataagaaatagtggacattttggattgattaaacatctgactgtgattttctaatgtatatgatttccatgaagaaattttgtttctaaacatgcacattttaaaagcctcttttcgaataaagcaaatgcgtgaaaaagaaaaaaaaaaaaa

SEQ ID NO: 701 - DNA, 2005 bp, Homo sapiens
caacggctcattctgctcccccgggtcggagccccccggagctgcgcgcgggcttgcagcgcctcgcccgcgctgtcctcccggtgtcccgcttctccgcgccccagccgccggctgccagcttttcggggccccgagtcgcacccagcgaagagagcgggcccgggacaagctcgaactccggccgcctcgcccttccccggctccgctccctctgccccctcggggtcgcgcgcccacgatgctgcagggccctggctcgctgctgctgctcttcctcgcctcgcactgctgcctgggctcggcgcgcgggctcttcctctttggccagcccgacttctcctacaagcgcagcaattgcaagcccatccctgccaacctgcagctgtgccacggcatcgaataccagaacatgcggctgcccaacctgctgggccacgagaccatgaaggaggtgctggagcaggccggcgcttggatcccgctggtcatgaagcagtgccacccggacaccaagaagttcctgtgctcgctcttcgcccccgtctgcctcgatgacctagacgagaccatccagccatgccactcgctctgcgtgcaggtgaaggaccgctgcgccccggtcatgtccgccttcggcttcccctggcccgacatgcttgagtgcgaccgtttcccccaggacaacgacctttgcatccccctcgctagcagcgaccacctcctgccagccaccgaggaagctccaaaggtatgtgaagcctgcaaaaataaaaatgatgatgacaacgacataatggaaacgctttgtaaaaatgattttgcactgaaaataaaagtgaaggagataacctacatcaaccgagataccaaaatcatcctggagaccaagagcaagaccatttacaagctgaacggtgtgtccgaaagggacctgaagaaatcggtgctgtggctcaaagacagcttgcagtgcacctgtgaggagatgaacgacatcaacgcgccctatctggtcatgggacagaaacagggtggggagctggtgatcacctcggtgaagcggtggcagaaggggcagagagagttcaagcgcatctcccgcagcatccgcaagctgcagtgctagtcccggcatcctgatggctccgacaggcctgctccagagcacggctgaccatttctgctccgggatctcagctcccgttccccaagcacactcctagctgctccagtctcagcctgggcagcttccccctgccttttgcacgtttgcatccccagcatttcctgagttataaggccacaggagtggatagctgttttcacctaaaggaaaagcccacccgaatcttgtagaaatattcaaactaataaaatcatgaatatttttatgaagtttaaaaatagctcactttaaagctagttttgaataggtgcaactgtgacttgggtctggttggttgttgtttgttgttttgagtcagctgattttcacttcccactgaggttgtcataacatgcaaattgcttcaattttctctgtggcccaaacttgtgggtcacaaaccctgttgagataaagctggctgttatctcaacatcttcatcagctccagactgagactcagtgtctaagtcttacaacaattcatcattttataccttcaatgggaacttaaactgttacatgtatcacattccagctacaatacttccatttattagaagcacattaaccatttctatagcatgatttcttcaagtaaaaggcaaaagatataaattttataattgacttgagtactttaagccttgtttaaaacatttcttacttaacttttgcaaattaaacccattgtagcttacctgtaatatacatagtagtttacctttaaaagttgtaaaaatattgctttaaccaacactgtaaatatttcagataaacattatattcttgtatataaactttacatcctgttttacctataaaaaaaaaaaaaaa

SEQ ID NO: 702 - DNA, 8463 bp, Homo sapiens
cgccctcctctggagagagaggctggagtgaggctgtgcgaagcgccgcatttcaatgaggacgggccgaggcacatccctgcactagtggccgcaaccgaggcgccgcgctccagcagctgctgccgcccagcccggccccgccgccgccccccagccctgcagccccgcagccccggccgcgcccagcccggcgaggacagcaccaggaggcggcccccagcgcggccacaaagacccccggcggcgtctctccgcggaccggtcctacttgaagtccatcatgtccttcggcagagacatggagctggagcacttcgacgagcgggataaggcgcagagatacagccgagggtcgcgggtgaacggcctgccgagcccgacgcacagcgcccactgcagcttctaccgcacccgcacgctgcagacgctcagctccgagaagaaggccaagaaagttcgtttctatcgaaacggagatcgatacttcaaagggattgtgtatgccatctccccagaccggttccgatcttttgaggccctgctggctgatttgacccgaactctgtcggataacgtgaatttgccccagggagtgagaacaatctacaccattgatgggctcaagaagatttccagcctggaccaactggtggaaggagagagttatgtatgtggctccatagagcccttcaagaaactggagtacaccaagaatgtgaaccccaactggtcggtgaacgtcaagaccacctcggcttctcgggcagtgtcttcactggccactgccaaaggaagcccttcagaggtgcgagagaataaggatttcattcggcccaagctggtcaccatcatcagaagtggcgtgaagccacggaaagctgtcaggattctgctgaacaagaaaacggctcattcctttgagcaggtcctcaccgatatcaccgatgccatcaagctggactcgggagtggtgaaacgcctgtacacgttggatgggaaacaggtgatgtgccttcaggacttttttggtgatgatgacatttttattgcatgtggaccggagaagttccgttaccaggatgatttcttgctagatgaaagtgaatgtcgagtggtaaagtccacttcttacaccaaaatagcttcatcatcccgcaggagcaccaccaagagcccaggaccgtccaggcgtagcaagtcccctgcctccaccagctcagttaatggaacccctggtagtcagctctctactccgcgctcaggcaagtcgccaagcccatcacccaccagcccaggaagcctgcggaagcagaggagctctcagcatggcggctcctctacgtcacttgcgtccaccaaagtctgcagctcgatggatgagaacgatggccctggagaagaagtgtcggaggaaggcttccagattccagctacaataacagaacgatataaagtcggaagaacaataggagatggaaattttgctgttgtcaaggaatgtgtagaaagatcgactgctagagagtatgctctgaaaattatcaagaaaagcaaatgtcgaggcaaagagcacatgatccagaatgaagtgtctattttaagaagagtgaagcatcccaatatcgttcttctgattgaggagatggatgtgccaactgaactgtatcttgtcatggaattagtaaaggggggagacctttttgatgccattacttccactaacaaatacaccgagagagacgccagtgggatgctgtacaacctagccagcgccatcaaatacctgcatagcctgaacatcgtccaccgtgatatcaagccagagaacctgctggtgtatgagcaccaagatggcagcaaatcactgaagctgggtgactttggactggccaccattgtagacggccccctgtacacagtctgtggcaccccaacatacgtggctccagaaatcattgcagagactggatacggcctcaaggtggacatctgggcagcaggtgtaatcacttatatcctgctgtgtggtttccctccattccgtggaagtggtgatgaccaggaggtgctttttgatcagattttgatggggcaggtggactttccttctccatactgggataatgtttccgattctgcaaaggagctcattaccatgatgctgttggtcgatgtagatcagcgattttctgctgttcaagtacttgagcatccctgggttaatgatgatggcctcccagaaaatgaacatcagctgtcagtagctggaaagataaagaagcatttcaacacaggccccaagccgaatagcacagcagctggagtttctgtcatagcactggaccacgggtttaccatcaagagatcagggtctttggactactaccagcaaccaggaatgtattggataagaccaccgctcttgataaggagaggcaggttttccgacgaagacgcaaccaggatgtgaggagccggtacaaggcgcagccagctcctcccgaactcaactcggaatcggaagactactccccaagctcctccgagactgttcgctcccctaactcgcccttttaataagacccttttactcaaagtcctagcttaaccctttgagactctgagatttttttcccccaaatttgtgtaaaacagtttcatctgatctatctagcgctcaatgcttgaatggcagaactgaaagtgttttcaggtatctttgtagcggtttccctttactgaataagatgacacgtggtgattgtgaagatggtaatttgctgctaatagagtcctcaaagggttaaggccaatttgcaatttttttttaaacttagaagcaatgaatgttttcatcagtcaagctaggatctgcagtatgtaatatagcacttgttaaccctctgagtgcatagaattttattgagaattcttgtttgggaatttttcaggcctttggatgtatacacacatgtttcttgattttactgcagatcaaggggtgttgttagatgctgaaatgtccagaaaagaaggacatttagaatgatatcttgtttgtccttttctgtgggtttagaacgtggcaggtttataacttcgacacacgcacggttctttcttcttcacaatcctattcagaaacagattttttttttcattagagatatgactgtcagttgcagtgagttctgcatcccaagtggagggaattgggtttgtggcaaagagcttgacccaggaaatagatggtgccccccaaattgtctccacatgaagatgtactgatgacgccccagaaatgctgcttccatatcagctgctgctagcgccagcgcagactctcagggagtcaccacagcttgtcttgtgcttggtgagtgagggtctctctactcagtgtcagacatctacaggaaagaaacaactggtggaaaagagcaataaattgcccggtgctctgcagggctggaatttcaaacagaaagagggaataagatcctgtgatttttctcacctgcttttccacgcactgtggtcatcactgtgcaatctacatctagtatgaaatccacacataggagagctggggcacaaggggactggaggcagttgctttgcaagatggctgaggagaaagcacactgggaacacaatccagaatgttctaacaataagttttcagtgaataaaccactggcaagacaattccatgtgcacctttaggttacctatatagtctcctaggaagatcaggatgaaagacctagatgatacccctgaggataaaacctccatcccctaaaatgattttttttaaataccactgtctttagctgtccaggaggtcagagtgttttttctgtctttgggccaagtcctgtctgagacctgtattttcactcttgttaccaaatctatctccctagtgcagtgtctccaggcctgagtttcttctggaacagattccattttagaatggggattcacaggttctgtgcatcaccacagtgctcagagaggattctcctggggtgtcttagaggcaggtgcccaactcaaatgtattcccaaggtttgctgggctctgggatccacgagacaaccagagagggatatctcatgaaatttgcatctggtggctgaacagtacctatgttctctgttttgaatatactttaatacctgagagtcttaaaatttgtgaacaacgtttctatagtcctttattttcaaatgcacattgatcttcacttgctgcatttttactcttcaaccctgaaactatggtctacattaatatggatttttaaatcacatgtcattacttttgcaacaccatcaccaaaattttttgctcttttacatttaggttcatctctgtggtctgtgttgtcctgacatgtaaaaagcatatcgtttattgaggtttttttcccccccttttagagcatccggaagtgataacacgcaaaatcacaaagtagcataaatcagtaaattagttgagttgtttttgggggggaggtgggggtagggggcacagaacaccagaaagagtgttggtgtgtaggtagattccatattaatgaggaacactgaactagttggaaattactgctttctctagaaatataaagcaaagcactattccaaggctatggagtagctctacagcctggcctcaactctaaaagtgtgaagaatgcaatgggcagagacctacctgcagtggactgtcattttcctttctttctctgaattactgctttttctgtgggcattaactatattgctacagcatctagtgtactgagcctgcggtgcatggctcaggccttttcccatcgacgtctagggggactctggaccgtgtgaagctagggggtgtttctcagcacactgcagaagggcagctcagaagaatgcagggcccattcagcatggggatcccagcacatcactgtagaatttgagtgatctatgctgaataaacagtggaatgtgaccagtcaagtagaaatcttgagtaatcagatggaatgcaatctttctaacattaagctaccaagatcctgaatgtcagagatgtactcagagggttaacagacaagcacaaggcatgctgactacattggtgtatccagattgctttgcttttagccagtgctttctaatttttttctcgacattcttgggatagttcaagtttgaaataattaagtggtggtgttctttaaggaatttctataaccaaattgatcttatttttgatttcacttatcatagaacaaatatgtatcattatggcagtgtatctatgtaattatcaatttaatcatcaccaccggtgtttccatattttttcccaagtatttaatatagctctcttatggtggtggcctggtgatggggaccgtctttcttttactgacacatgaccaatcatatggtattttcaagggaattttaagattcatcttttcagtttgatagtagactagttaaggaagaactctttcattacttgcatcgtgtaaatcatctctgtagacatgtgttcatattaatgaacacattttttctcaacattgtagcagaaatcattttattcgtcatgatcaatgaatatgtgatttgctccagatcgttagaaggaaaagtaagatttcagtcatcaaaaatgtttttaccgtagccctcatctaacttacacgtggtgcatattaaaataagcagagaaaaaaaaatgtgaataaactactgaaaacacttggtgttttgtgttcaatgagaccttcctgcaacctgctccccatgggtggcagttaacaggcccatcagatattgttgaaagaaagcaatatatccatgaatgaaggctaaaattgcaatcctttaccctttgaggcatatttcagttgaaaacaaaaagaaaagaaaatttggcttagagggtcacagagctcccatatgaccaagtctcaagcacattaaatcatggttgtttactggccaagggcgtccactagacaactctatcccttgcgctgaagctcaatcgtgctgagggagagctttcttaatattactgtgttgctcttagcccttctctgggttaggatctgtcagcatttctatgataaactcctattctcaaaggtttttaatttgaccataaaaatgtgccccaggctgaagtttgctatacagggctgtaccaaagagtgaaggtttacttccttctctttccaacttcttccccattctccaaggaaaagaacaacaaaaaaatctggtatggtccctccttaatagtgatttcagaattttggaaagcaccaagatccaagatggtagttttaatgtagttactcattcgcacacattttttaaatttaatgggtcacctggcatatattgtagataacatatcttttctataatttgtaagtcaataatttttttaactgctacatgatatttttttttgcccaaagattttaaaagacttgaagttggtcagttcaaaactcagatttttctacacattgtctgccatgtccattaggagtttggggaaaatactctcacacagacccttactttgcatgcagtttagagggtaagatacgtgcttcttttggggataaagatttccttacttaattgtcaaatttcatggagccattctagtctgttggggaaaatagtgattaaaagcacttccaaaattaacattttttgacaattcagatatgaaaagaagcaggggaaaataatacactttactcttttcttgcttaaaggcaaacaaatcaatgaaacttgaggacacactaaacatttgataactgcaaatgtgctttaaaaattggttcaatggtgcttacacatgaaacggtaacaaatggggttcctaggacgtcagaaggaatctttagtttgtatgtaattacacactagaggaggaggtgcttttaagccagtcttttatttttaatcatctcaaatatgcaaccatacatgcagtaacattaagggtcgtaaactggtgggaaacaggaacttcagtggagaggcttaaatgcctctggttagagtgggggtttttgtttgtttgtttattgttgggtttcaacactgagcatcatttctgtgatcaagtttctaactggcatgtgttttgatcatgaggtttaccatatcttgcccatacagacaaatgagagatctagtttcattttgttccctaaagaaagaacactctctaaaattaaatcatacctgtaaatttcttcagcatttgtttctgttcaatgaaattgagacccttaatgttgctttaatgtaaaattgaatattttgtctgtgatatactttaataatttaaagtaagtaatagttctaaagtcttcactgttgctactaagagaaaatagaattttaaaggtgatgataaagatgctataatgtcagttcactccagtccaatcaaatgtagtaagaaaaagtccttgaatagttctctagggacaatttctcacttgccattgacattaatctttggtgtattctcagaaaaaataaaaagaaattgaaactggtccaaggttatagtcatatcctcgataacttttgaaaaaaaattttattaggaaattaatactagcctttttcattctggctgaaagaaaattattaaaggattagttgagtgtgaaattcaacagtattttgctcatacatactaaaaaggtgcgtagggacttggcgcatttaaacaagtttctgaaaggtttcaatttgactcaagaaaaaaattcaatatttcttttgaaaatactgaatttatcacttgctgcatggatcagatggcataggttaatctttgattttcagaatcctaatgaaataactttcaaacaatttgtgtccttaattaaaggtggaatgagatccaatttttccccctaatccttcagtttaagctgatacatgtaggttaatgtggaatgaaatcatctgtgatatattatgttcatttatcaactgagcttttttgatgttgcctgtttttatgtaaaacatgttcttaaagttaataaaataatagtacttggtgtatgaactactacataataccttagctgaagggtacgctcctcagttcatttgccatattggagtaaaatttcaccttagttcaattcacaattgacacattcagttcacgaaggaatagcccagctgtgttcttagggggaattctctctatgcaaggctttaaaaattagtcatgcggtcagagtgtagctttcccacatgtcctccatagcacagtgtgtatttcatgagcataattcaaaaacagctatttcaaaaatgtcccttgtcatatattacgttcctgcctgggccactgacttggataaatacaaataaaccaaataccattca

SEQ ID NO: 703 - DNA, 3877 bp, Homo sapiens
ggcggtcgcgcgcaggactcgagggcttctagccaccgtccccgccagcgccgcgccccgccacagggcggcatgagcccacccgcggccgcagccctagcgccctgctcctccgcctgggcggcccggctgcggtgacggctctcgctgcccgactgggggccatgaagccgagtccggccgggacggcgaaggagctggagcctccggcgccggcccgaggcgagcagcgcacggcggagcccgaggggcgctggcgggagaagggcgaggcagacaccgagcggcagcgcacccgggagcggcaggaggccacgctggccgggctggcggagctggagtacctgcgccagcgccaagagctgctggtcaggggcgccctgcgcggcgccgggggtgcgggagccgctgcgccccgcgctggggagctactgggggaggcggcgcagcgcagtcgcctggaggagaagttcttggaggagaacatcttgctgctaagaaagcaattgaactgtttgaggcgaagagatgctggtttgttgaatcagttgcaagagcttgacaagcagataagtgacctgagactggatgtagaaaagacatctgaagagcacctggagacagacagtcggcctagctcagggttttatgagctgagtgatggggcttcaggatccctttccaattcctctaactcggtgttcagtgagtgtttatccagttgtcattccagcacctgcttttgcagccccttggaggcgaccttgagtctctcagatggttgccccaaatctgcagatctcataggattgttggaatataaagaaggccactgtgaagaccaggcctcaggggcagtttgccgttccctctccacaccacaatttaattcccttgatgtcattgcagatgtgaatcccaagtaccagtgtgatctggtgtctaaaaacgggaatgatgtatatcgctatcccagtccacttcatgctgtggctgtgcagagcccaatgtttctcctttgtctgacgggcaaccctctgagggaagaggacaggcttggaaaccatgccagtgacatttgcggtggatctgagctagatgccgtcaaaacagacagttccttaccgtccccaagcagtctgtggtctgcttcccatccttcatccagcaagaaaatggatggctacattctgagcctggtccagaaaaaaacacaccctgtaaggaccaacaaaccaagaaccagcgtgaacgctgaccccacgaaagggcttctgaggaacgggagcgtttgtgtcagagccccgggcggtgtctcacagggcaacagtgtgaaccttaagaattcgaaacaggcgtgtctgccctctggcgggataccttctctgaacaatgggacattctccccaccgaagcagtggtcgaaagaatcaaaggccgaacaagccgaaagcaagagggtgcccctgccagagggctgcccctcaggcgctgcctccgaccttcagagtaagcacctgccaaaaacggccaagccagcctcgcaagaacatgctcggtgttccgccattgggacaggggagtcccctaaggaaagcgctcagctctcaggggcctctccaaaagagagtcctagcagaggccctgccccgccgcaggagaacaaagttgtacagcccctgaaaaagatgtcacagaaaaacagcctgcagggcgtccccccggccactcctcccctgctgtctacagctttccccgtggaagagaggcctgccttggatttcaagagcgagggctcttcccaaagcctggaggaagcgcacctggtcaaggcccagtttatcccggggcagcagcccagtgtcaggctccaccggggccacaggaacatgggcgtcgtgaagaactccagcctgaagcaccgcggcccagccctccaggggctggagaacggcttgcccaccgtcagggagaaaacgcgggccgggagcaagaagtgtcgcttcccagatgacttggatacaaataagaaactcaagaaagcctcctccaaggggaggaagagtgggggcgggcccgaggctggtgttcccggcaggcccgcgggcgggggccacagggcggggagcagggcgcatggccacggacgggaggcggtggtggccaaacctaagcacaagcgaactgactaccggcggtggaagtcctcggccgagatttcctacgaagaggccctgaggagggcccggcgcggtcgccgggagaatgtggggctgtaccccgcgcctgtgcctctgccctacgccagcccctacgcctacgtggctagcgactccgagtactcggccgagtgcgagtccctgttccactccaccgtggtggacaccagtgaggacgagcagagcaattacaccaccaactgcttcggggacagcgagtcgagtgtgagcgagggcgagttcgtgggggagagcacaaccaccagcgactctgaagaaagcgggggcttaatttggtcccagtttgtccagactctgcccattcaaacggtaacggccccagaccttcacaaccaccccgcaaaaacctttgtcaaaattaaggcctcacataacctcaagaagaagatcctccgctttcggtctggctctttgaaactgatgacgacggtttgagtgacatcattggtgtagaaagtttgtgtgtttttttttcttctccctagttgccaaaattaaaaaggtggtgttttcatttttgtataatactttaatggaatgctttttaaaaaaatataaaaccaaggtaaattattgtttcatcttcacgtatggatgctagtgcctttaatggaaggtaaagaatgttttgctagttagaagtacatattgaggttttaatggtggtgatagtgagttttgtggcaccagctgttttttattttaaactttctgagcatccggcaaggtacaggttttgatgttcaagttttattgggataagatcttttgatcccaaggtcaggtggatggaatttttggatttatatttgttccttgagtcttcagggcagtgtctccatgagggttttcctgttgaggggcaccacatacaatagtgtgaagtaggtatgaggggcagtcattgtattctatagtttttttatgtagtctacatttctcagatgtatccccattcggttttattctcagaactgttactagactcatgacttggaggccaaaccttaaatccagagatagcagcctcgatagggaccttaaaaggattcacaaaaacttttgccacacttggtgcctaggccctgttcctaataaccccttctagggccgtttatccaacatttagatgccttcttttccctccctaatttgtagccagtccaacctttcattccttggaggatttagttttgggataaaattttggtccttgggcacagagacattcactattaatgaagtaacccttgggcatgactccaatcccagaattgctcactgagcgctatgccaccgaagcgttgacctgaacatattagtgcaatccagtccagattggacctttgatcctatgtggaagggctgttttttaagaaaaaatttttggtaaacagtattgtgtaaaattgctttttgtataccaatatatgcatgttttgtgcatgagtagtacttgtgttgatactcctgttgatgttaaattactatataatataaacagtatgtgtttttatatatcattgtgtaaatttaatataacatatgcagtaataaaccatttgttttactgctgttaagtttgttatttgggtataaaaccagatgtttacacctgtaaaaaaaaaaaaaaaaaa

SEQ ID NO: 704 - DNA, 782 bp, Homo sapiens
aaggcgcgcagcgctgggcgcaaagcgccagtctccgccttgcgagctcagagtgtgcccgctgcgccgccgctgtccgtacctgccgccgccgccaccgccaccatgcccaacttcgccggcacctggaagatgcgcagcagcgagaatttcgacgagctgctcaaggcactgggtgtgaacgccatgctgaggaaagtggccgtagcggctgcgtccaagccgcacgtggagatccgccaggacggggatcagttctacatcaagacatccaccacggtgcgcaccactgagatcaacttcaaggtcggagaaggctttgaggaggagaccgtggacggacgcaagtgcaggagtttagccacttgggagaatgagaacaagatccactgcacgcaaactcttcttgaaggggacggccccaaaacctactggacccgtgagctggccaacgatgaacttatcctgacgtttggcgccgatgacgtggtctgcaccagaatttatgtccgagagtgaaggcagctggcttgctcctactttcaggaagggatgcaggctcccctgaggaatatgtcatagttctgagctgccagtggaccgcccttttcccctaccaatattaggtgatcccgttttccccatgacaatgttgtagtgtcccccacccccaccccccaggccttggtgcctcttgtatccctagtgctccatagtttggcatttgcacggtttcgaagtcattaaactggttagacgtgtctcaacctttaaaaaaaaaa

SEQ ID NO: 705 - DNA, 2895 bp, Homo sapiens
cgccaggacacactgttcgggcgcggctttccccgtccgcggagcggtcttgacactcgcggcggcagcatctacgctcgcagagccgccgatgcgtgtccagtgacccggacagcaaggcccgcgcgcggcgggggcggcggcagacgcctggtcaccgtgaccccgattttggatttaccgcttgggggctggggggatcctggatttaactggcgactgttttgggggacgccggacgccatgttgtggaaaataaccgataatgtcaagtacgaagaggactgcgaggatcgccacgacgggagcagcaatgggaatccgcgggtcccccacctctcctccgccgggcagcacctctacagccccgcgccacccctctcccacactggagtcgccgaatatcagccgccaccctactttccccctccctaccagcagctggcctactcccagtcggccgacccctactcgcatctgggggaagcgtacgccgccgccatcaaccccctgcaccagccggcgcccacaggcagccagcagcaggcctggcccggccgccagagccaggagggagcggggctgccctcgcaccacgggcgcccggccggcctactgccccacctctccgggctggaggcgggcgcggtgagcgcccgcagggatgcctaccgccgctccgacctgctgctgccccacgcacacgccctggatgccgcgggcctggccgagaacctggggctccacgacatgcctcaccagatggacgaggtgcagaatgtcgacgaccagcacctgttgctgcacgatcagacagtcattcgcaaaggtcccatttccatgaccaagaaccctctgaacctcccctgtcagaaggagctggtgggggccgtaatgaaccccactgaggtcttctgctcagtccctggaagattgtcgctcctcagctctacgtctaaatacaaagtgacagtggctgaagtacagaggcgactgtccccacctgaatgcttaaatgcctcgttactgggaggtgttctcagaagagccaaatcgaaaaatggaggccggtccttgcgggagaagttggacaagattgggttgaatcttccggccgggaggcggaaagccgctcatgtgactctcctgacatccttagtagaaggtgaagctgttcatttggctagggactttgcctatgtctgtgaagccgaatttcctagtaaaccagtggcagaatatttaaccagacctcatcttggaggacgaaatgagatggcagctaggaagaacatgctattggcggcccagcaactgtgtaaagaattcacagaacttctcagccaagaccggacaccccatgggaccagcaggctcgccccagtcttggagacgaacatacagaactgcttgtctcatttcagcctgattacccacgggtttggcagccaggccatctgtgccgcggtgtctgccctgcagaactacatcaaagaagccctgattgtcatagacaaatcctacatgaaccctggagaccagagtccagctgattctaacaaaaccctggagaaaatggagaaacacaggaaataaaattggaacgaagaaaggttaggagagtagggaaggaacaggactgcaaaaatccttctccaccgcacagactgggaacccctcctggcctgggggaagagtttgttacctaccttactatttaaagagccttcactggttctgcatcacccgcccctggacttcttagttgtttctctagcgctgagctatctcctaactttggacctattatcagaaggtgacaagtactggctctttattcattaagctttttttttttgaaccccattctttccttctctgaaagtggtgctataagttttagaatcttttaaatacattccctgggccaacagacccacacacttagccattgaaatgtcaaattgatgtgccctagatcaacagatcaacaataccttttttttcagtgttaaggtaatggttggtttttgtgtccgctaaatatttaccttgaaaaaaagaaaagtgtgtatctagcttcttcagagatcaagtcctctggtaggaggcaaaggttctatctgcttagcaactagttaataagtggtatctgacacactctaaaccccgtgttcaaacgggggccttctggttttaggaaacttgtagaaacgaagcctgctgattgatttttttctcctttttttttttttttttttttaactttgaaagttaactcttcaaatgggagactctttgaaatgacatgttcctttaaggtactgaagctttatttgcatatttatttcagatgtttcgagtaaacttgaaaagggtaggcacgaagcaatttgttgctgcttgtcacccccaagtccccgtggaggttctgtattttaagaaacagtgcgttgagtgtacagattttatttatgcgtaatttaatggggtctgtaaatactggtgcacttcttacgacttttttgagacatgggatccaattttaatattaacttttaatggtgatggggtaatctataacacatcataaggttttattcatatatatacagggtattaagaattaagaggatgctgggctctgttcttggcttggaagattctatttaattgaaactctctgttcagaaagcaataactttgtctcgttcctgttgggctgaaccctaaggtgagtgtgcagtacagtgtgtgtgggtgaaatggagatttggaattgaactctctgcctgtaaatgttccccaaataattgttgtgtgtatgatacgtgtataataaaagtattcttgttagaatctgaaaaaaaaaaaaaaaaaaaaaaaaaaaaaaaa

SEQ ID NO: 706 - DNA, 520 bp, Homo sapiens
acactttgtatggcaagtggaaccactggcttggtggattttgctagatttttctgatttttaaactcctgaaaaatatcccagataactgtcatgaagctggtaactatcttcctgctggtgaccatcagcctttgtagttactctgctactgccttcctcatcaacaaagtgccccttcctgttgacaagttggcacctttacctctggacaacattcttccctttatggatccattaaagcttcttctgaaaactctgggcatttctgttgagcaccttgtggaggggctaaggaagtgtgtaaatgagctgggaccagaggcttctgaagctgtgaagaaactgctggaggcgctatcacacttggtgtgacatcaagataaagagcggaggtggatggggatggaagatgatgctcctatcctccctgcctgaaacctgttctaccaattatagatcaaatgccctaaaatgtagtgacccgtgaaaaggacaaataaagcaatgaatacattaa

SEQ ID NO: 707 - DNA, 4909 bp, Homo sapiens
gcggccctgcccccggcacggcccccaggtgcgctccttctccggctgcttgtagcactggtctcactgtccccgccgtcagccaccggttccttatccgtctcattccccattgtggcttggctgagccggtcgccaggcctcgctgtcctcctttgccttcctctctcctcagcggccgtactttgcgccgtacctcacctggcctgcaggatgaagaaccccatgctggaggtggtgtctttactactggagaagctgctcctcatctccaacttcacgctctttagttcgggcgccgcgggcgaagacaaagggaggaacagtttttatgaaaccagctctttccaccgaggcgacgtgctggaggtgccccggacccacctgacccactatggcatctacctaggagacaaccgtgttgcccacatgatgcccgacatcctgttggccctgacagacgacatggggcgcacgcagaaggtggtctccaacaagcgtctcatcctgggcgttattgtcaaagtggccagcatccgcgtggacacagtggaggacttcgcctacggagctaacatcctggtcaatcacctggacgagtccctccagaaaaaggcactgctcaacgaggaggtggcgcggagggctgaaaagctgctgggctttaccccctacagcctgctgtggaacaactgcgagcacttcgtgacctactgcagatatggcaccccgatcagtccccagtccgacaagttttgtgagactgtgaagataattattcgtgatcagagaagtgttcttgcttcagcagtcttgggattggcgtctatagtctgtacgggcttggtatcatacactacccttcctgcaatttttattccattcttcctatggatggctggctaacttcatacccccatgtcagtgtgtgtattctgtatgtaaatatgtttatatttatagagcatcaatcaatataagcattattgagaaaaatgtgacccgtaacactgtgttctggataaaaatgtgattaggaatcacgcaaagtgcttactgtgtaagcccaagaacaaaggctttctgaatcttctcaggcagttcagatttaaagcaccatccaaaccttggaaatacgacagggtgtggtagaattcagcaatatgagaaaaccagcccctaaaatgatagccacaagagattaattgtgtttttttttctcctgtaatccttgtactgttcggctgaatttgaagattggaagacttatattgagaccagtaactttactgtaaatttactttgtttcattgaaaaaacaaattgataaacatattaaactggaagaattttctttattcaaatgaaaacatgtttgatgactggtcaaaaaataagctcataatctatttttttcatgtagtatataagtcaagaatgttttattgtcattatgtgaaaccaatattggcaaatagtactttaatgatgaagtaaatgaccagaaattatagaaatctgtgttttcctgtaaaaatagcactatagtatcacttgaacaatttgatttggctttacttactaggaagcctggaattcattatttttttccttttatgtgccactgtggctactttaaatcactctgagaggtaaatggatataggattgaagttatgtgggtatttggcatgtgtgtgtgaaataaatatgtagatagtcacatatacacagactgagagataaattgttcttgattgctttattatcatcatactagtgtgttcattatagagtatctgtagaggtgaatgtaaaagtaagtccaatctattttcttatgtcattgaatttgtagtgttaacttgcatatatgttattggatgggttgtcttttaaagcatttactaatgtactctgaaatttttaaaagccttcagatttgttttctagtcacttttttccatatcatttctaattatagtttatatccttaaaagaaggatgccacagtagtatgtaaaacccaaacaagtagaacccaagcaaataaaattatttaaaataattttaaagtggcttagtactgccagtcatgtaaattgattctgctgagggtcttataagaattgagatataacaatggtaaaacaagcattcaagcacttttacaaaattaccaaattcttaaaatgaagccacagctagacttgcatttcaggtattaaaattgctttcttaactgtcaagaatcacaaaataacaaatcatattatgagtgaatatggggagggcggggccaatcagtcaatgataatctgaacaaattttaagagcagattttagattaataatgttttatcaccactaatttgcccacaacaaactcagtatttaatttttcaaattaaatattaaattatttaagtattttaaataattaaaacattaaatggcaacaccatagaatataggtgttctctggacctattctaaccacttaaaattatcttaagtatgcatacataaaagcaaccactatgagaactaccgtgttagtggtttttcacttactgtatattacccttgtaggaatagtttaaggaaattcatttcttaaaaatatagtgtcctcaaataattaatttttttgcaaactttagttattacaggcagcaaaaaccactgtctgaaactaaatctgtgttcaaagatgaagacccctcattaaaagccaaggacgttcttaagattggaactgacataattagtcttgacttacttcattaaagcaagattcaattccttgttcatttgagtgttcattatatgccaggcattgaccagttgcaattttatggtccagaattaatattattattcgtaaactagctataatagagtatatacagtgctgtgggaatacaggggaagaagcaattaaatctgctagaagggtaagagaaatctgtatgcaggaggcaatgctagcattaagccaagaaatagtgtgaggtgatcttatcacactgatgtgttcaactgtttatgggaaaaggaaactaggatggttttatttgtgaaatgttctacaacgctagaactgttgaacttcttgggagaaaaggagaatctttgttttgttgtgctgagtttgattagttgcttaaccaagtagaaagaaaagcacatcttcctgatcacagttataaaagaaaccctgaggccgggcgcggtggctcaagcctgtaaccccagcactttgggaggccaaggagggaggatcacaaggtcaggagatcgagaccatcctggctaacacggtgaaaccccatctctactaaaaatacaaaattagctgggcgtggtggccggcgcctgtagtcccagctactcatgaggttgaggcaggagaatggcgtgaaccgaggaggcggagcttgcagtgagtggaaattgcgccactgcactccagcctgggcaacaaagtgagactccatctcaaaaaaaaaaaaaaaaaaaaaaaaaaaaaaagaagaagaaaccctgagccattaatgtgtctcgtaacttgaggaagttcatgaattctctgggcttcatccattaagattcatccttatgctcctgcaagtttcttatatttatgtatttctattctgatttctgaaatgataacctagtagtgtctgatgaagttttttcatgcttattttattctttgtcacagatgaaagaagaataggactaattggggctaagatgaattaatgtaagtgtcagatactaggcaggtgttagggatgaaatgatgaatgaggcatggacctgttcctcagagtttatggcccagtagacataattgtattaggactttctgcagttgacatttgcataaagctgactgactgaaggaacagaaagtgagacagacagatatgaccaaatttatacaaaccatgtaccaacacttgaaagatgggtggatattttccaggaaacagattttgggcaggacattccatgcactggaaatagcatgaacaaatgcatgaaaattgcctacaacatgcctggcacatagctgtgaggtaccctatgagttgttgacttgaaaacatggaactgcacagggcattcaggcaagtgcaagtggttcaggggccagcgcagagcagagtgctgagtaaagatgtcagaaaaggaaagcaatggtctggtacaagtcttgtatagaacaagaagtttagacttttgaacaggcaatcgagatttggggttcagaaagataaatcccaaaagtatggagaacaaaggaactcattttaaaggactagctaagatgctcaatctctaaaaaaaaaaggatctgtattcgtgagagtagagagaaaggttgtttaggaagagtcaacagactttagcaaaatccttttatttgattcatgcataactcctgatggagtgtcaaggaagactcattcacttttctttcctgccagaaagttggttcttgcaaaatagattaacttgatgactatgtgtatattggatactcctaattttagctctgttagatatgtttctttctaaggacaagcaactatgtatagacttgttgtttgaattttttttcagtatatatatgtttcttgtttttctatttttctacttcatactgttaatgtcaaatatcaaaaatgttttccagcaatatcaagttatggcaatggcaaaagtccttgttgtagatgagaagcatataagaaatggttgccaatctttgttttgtatgatctatttagagttttaaccaacctagatctgtcagctaagctaattttatatttggtatacatgcatgtcaaataaagttaattttacatacaaaaaaaaaaaaaaaaaaaaa

SEQ ID NO: 708 - DNA, 2279 bp, Homo sapiens
gaggccacctgtttgtgatgtgcaggcacagaagaaaggcacagctccccatcagtttcatggaaaataactcagtgcctgctgggaaccagctgctggagatccctacagagagcttccactgggggcaacccttccaggaaggagttggggagagagaaccctcactgtggggaatgctgataaaccagtcacacagctgctctattctcacacaaatctaccccttgcgtggctggaactgacgtttccctggaggtgtccagaaagctgatgtaacacagagcctataaaagctgtcggtccttaaggctgcccagcgccttgccaaaatggagcttgtaagaaggctcatgccattgaccctcttaattctctcctgtttggcggagctgacaatggcggaggctgaaggcaatgcaagctgcacagtcagtctagggggtgccaatatggcagagacccacaaagccatgatcctgcaactcaatcccagtgagaactgcacctggacaatagaaagaccagaaaacaaaagcatcagaattatcttttcctatgtccagcttgatccagatggaagctgtgaaagtgaaaacattaaagtctttgacggaacctccagcaatgggcctctgctagggcaagtctgcagtaaaaacgactatgttcctgtatttgaatcatcatccagtacattgacgtttcaaatagttactgactcagcaagaattcaaagaactgtctttgtcttctactacttcttctctcctaacatctctattccaaactgtggcggttacctggataccttggaaggatccttcaccagccccaattacccaaagccgcatcctgagctggcttattgtgtgtggcacatacaagtggagaaagattacaagataaaactaaacttcaaagagattttcctagaaatagacaaacagtgcaaatttgattttcttgccatctatgatggcccctccaccaactctggcctgattggacaagtctgtggccgtgtgactcccaccttcgaatcgtcatcaaactctctgactgtcgtgttgtctacagattatgccaattcttaccggggattttctgcttcctacacctcaatttatgcagaaaacatcaacactacatctttaacttgctcttctgacaggatgagagttattataagcaaatcctacctagaggcttttaactctaatgggaataacttgcaactaaaagacccaacttgcagaccaaaattatcaaatgttgtggaattttctgtccctcttaatggatgtggtacaatcagaaaggtagaagatcagtcaattacttacaccaatataatcaccttttctgcatcctcaacttctgaagtgatcacccgtcagaaacaactccagattattgtgaagtgtgaaatgggacataattctacagtggagataatatacataacagaagatgatgtaatacaaagtcaaaatgcactgggcaaatataacaccagcatggctctttttgaatccaattcatttgaaaagactatacttgaatcaccatattatgtggatttgaaccaaactctttttgttcaagttagtctgcacacctcagatccaaatttggtggtgtttcttgatacctgtagagcctctcccacctctgactttgcatctccaacctacgacctaatcaagagtggatgtagtcgagatgaaacttgtaaggtgtatcccttatttggacactatgggagattccagtttaatgcctttaaattcttgagaagtatgagctctgtgtatctgcagtgtaaagttttgatatgtgatagcagtgaccaccagtctcgctgcaatcaaggttgtgtctccagaagcaaacgagacatttcttcatataaatggaaaacagattccatcataggacccattcgtctgaaaagggatcgaagtgcaagtggcaattcaggatttcagcatgaaacacatgcggaagaaactccaaaccagcctttcaacagtgtgcatctgttttccttcatggttctagctctgaatgtggtgactgtagcgacaatcacagtgaggcattttgtaaatcaacgggcagactacaaataccagaagctgcagaactattaactaacaggtccaaccctaagtgagacatgtttctccaggatgccaaaggaaatgctacctcgtggctacacatattatgaataaatgaggaagggcctgaaagtgacacacaggcctgcatgt

SEQ ID NO: 709 - DNA, 2959 bp, Homo sapiens
ccctgtgccagccggctgtcgacccaggttaggaagcccgaggtcggggcgttaccccaagggccctcccgcttcccctccgagggcagagaggcgtccgcgcccggacgcactgcgggaacacctggagcgccggcggagctcggctgtccccgcgggagggagcccgacgcgcatccttgggacccggacccggcgcccgcgcctcgggacggatttctgcctcggctgcaggcgcagcgcgcagacctgagcctgccccgcggaaccggggctcgagtcccggcccgagcgcggcgtcggggccagcggagaggggcggaagccgcaagggaccctcggcgcctcggcctggccgcgatgaagtccccgcccctcctcagcccgtgtctctcctggaagagaatggcgggcatctttttcctgccatttatctcatcaggttttgctcctcggtttaagcaggaagagaacttcatgcttggaagagcgcatccgtcccagcctaggtttaattggtctcatctgacccctctggagctgaagaatcgatctgtgggacttggaactgaaagcacaggtcggggtaagccccacttcacactggagggccacaagttcctgatcttcgggggctccatccactatttccgggtgcccagggagtactggagggaccgcctgctgaagctgaaggcctgtggcttcaatactgtcaccacctatgttccgtggaacctgcatgagccagaaagaggcaaatttgacttctctgggaacctggacctggaggccttcgtcctgatggccgcagagatcgggctgtgggtgattctgcgtccaggccgctacatctgcagtgagatggacctcgggggcttgcccagctggctcctgcaagacccccggttactgttgaggacaaccaacaagagcttcattgaagcagttgagaagtattttgaccacctgattcccagagtgattcctctccagtaccgccaggcaggccctgtcatcgcggtgcaagtggagaatgagtatggctcattcaataaggataaaacatacatgccgtatctccacaaggccctgctgagaagagggattgtggagcttctcttgacctctgatggtgagaaacatgtgctgagtggccacaccaaaggagtgttggccgccatcaatttgcaaaaacttcaccaggatactttcaatcagcttcataaagtccagagagataagccccttctgattatggaatactgggtcggctggttcgacagatggggagataagcaccatgttaaagatgcaaaggaggttgaacatgctgtgtctgaattcatcaaatatgagatctccttcaatgtatatatgttccatggtggaaccaactttggtttcatgaacggggccacatatttcgggaagcactcgggcattgtcaccagctatgactatgatgcagtgctcacggaggctggagattacacagaaaaatatctgaagcttcaaaaactctttcaatctgtctcagcaactcccctgccccgagtacccaaacttcctcccaaggctgtgtatccccccgtgagaccgtcgctgtacctcccgctgtgggacgccctatcctacttaaatgagccagtcaggtcgcgtcagcccgtcaacatggagaaccttcccataaacaatgggagcggccagtcctacgggcttgtcctgtatgagaagtccatctgctccggaggccgcctccgtgcccacgctcatgacgtggcacaggtgtttttggatgagacaatgatagggattctgaatgagaataataaggacctgcacattcctgaactcagggactgccgatacctgaggatcctggtggagaatcaaggacgagtcaatttttcatggcaaatacagaatgagcagaaaggaataactggatctgtcagcatcaataactcttccctggagggctttaccatctattccctggagatgaaaatgagcttctttgagaggctccgctctgccacctggaagcctgtcccagacagccaccagggcccggccttctactgtgggaccttgaaggctggcccttctcccaaggacaccttcctgagcctgctgaactggaattatggatttgtgttcatcaatggacgtaaccttgggcgatattggaatattgggcctcagaaaacactgtaccttcctggagtttggcttcatccagaagacaatgaggtcatcttgtttgagaagatgatgagtggctcagatatcaaatctacagacaagcccacgctgtaaaactgtgtctgaacatttttttttttttttgagatggagtctcactttgtcgcccaggctggagtgcagtggcacaatctctgctcactgcaagctcagcctctcgggttcacgccattctcctgcctcagcctccccagcagctgggactacaggtgcacgccaccacgcctggctaattttttgtatttttagtagagatggggtttcaccaagttagccaggatggtcccaatctcctgaccttgtgatctgctctcctcagcctcccaaagtactgggattacaggcgtgagccaccactcccggccgtgaacatattttttgggttgctggagttcatctataagtcatttttgaggaataagatttatgttaagactatcaaacacagtgttgcctacaatagcaaaaatgtgaaaataacaacaacaacaaaacagcagaggaattgttatgtattttgtagtctatctatatgatgcctatttttaggctttaaaaagtcttcaaaatctttaatgactgatttatctagttaaatgcttaatccttagcaggctcttattctttaattaaacgtgcctttgagtagatgtgaataaaataaaaacaagtttcaaaaaaaaaaaaaaaa

SEQ ID NO: 710 - DNA, 3390 bp, Homo sapiens; identical to SEQ ID NO: 420

SEQ ID NO: 711 - DNA, 3784 bp, Homo sapiens
attcaacaggaggaacccgcgggagaggagccccactcccccagcgccgcagccaccgcagccaccgcagcccgtgcgccccgcgccctcgagcgccatggccaaggaaggcgtggagaaggcggaggagacggagcaaatgatcgagaaggaggcaggcaaggagccggcggagggcggcggcggcgacggctcgcaccgcctcggggacgcccaggagatgcgcgcggtggtgctggctggcttcggggggctcaacaagctgcggctcttcaggaaggccatgcccgagcctcaggacggcgagctcaagatccgcgtcaaagcctgtggattaaacttcattgacttgatggtgcgacaagggaatattgacaaccctcccaagactcccctggtgccaggatttgagtgttctgggattgttgaagctctgggggacagcgtgaaaggatatgagattggagaccgtgtcatggcatttgtcaattacaatgcctgggcagaggtggtctgcacaccagtggagtttgtctacaagatcccggatgacatgagcttctcggaggctgctgcattccccatgaacttcgtcacagcctatgtgatgctgtttgaagttgccaacctccgggaagggatgtctgtgctcgtgcactcagctggtgggggcgtgggtcaagctgtggctcagctgtgttccactgtccccaacgtgactgtctttggaacagcctctactttcaagcatgaagcaatcaaagactctgtgacccacctctttgacagaaatgcagactacgtgcaagaagttaaaagaatctctgctgaaggtgtggacatcgttttggattgcctctgtggggacaacactggaaaaggtctcagtcttctcaaacccctgggaacctacattttatatggctcatccaacatggtaactggagagaccaagagcttcttcagctttgcaaaatcatggtggcaggtggagaaggtgaaccccatcaagctgtatgaggagaacaaagtcatcgcggggttttcccttttaaatctgctcttcaaacaaggccgggcgggcctcattcggggagtggtggaaaaactcatagggctctacaaccagaagaagatcaagcctgtggtggactccttgtgggctctggaggaggtgaaggaggccatgcagcggattcacgaccgagggaacattggcaagttaattctggatgtagaaaagaccccaactccactgatggccaatgacagcacagagaccagtgaagcaggggaagaggaggaggaccacgagggagacagcgagaacaaggagcggatgccctttatccagtaactgaggacccaggtgggagaatgtgaaggatggtttggaagatgaggacccggctgagaaaactcttctgtgccccagtgaacaaatgctgtagtccagtgcgtgtcgtgtttgtctgcagtcagctgagctaaaaagctgttgatcactgttgttttttgaagtgccaatcccatgccatgcagtattatgtccctctcctatctgtgtattacacattcccctctcccctgtatcaaaaccatccatctgtgggttcttcttgacagttctagaacagccttgcaaattaatacaagtcccaggcccaatgcctaagagaccagacgtgggcaaagacaagtttggatggaaaggtgttatcacagagccctgtccagctcctagaattcctcaggccagtgacacttttttgctgctggccacccatgcctctgatgagaacacttgccaatttggccagcagaaagagagtaggccggatgttttcatgagcccacaaatttagaaactctcctagtagtactttttctctctccatttaagagacaactacggtcaaaagtttgagccattctcttctaccccttcagtgtctgaccctttcactggctcttatctgtaaacacagggaggcaggtatggatttttcacagtagacaatgggtcaacagcatgagtttgaggacctgctgtgaagatttctcctccaaaatacatctcatgggcaggattcttcctgctccatatctgtttcaattttaagaaagcaccacatacaagacacattcagaagtcattcctgagcattgctggtgtttgcacacttgccacctgcattaccaattctgtaaatttcaattcctggtggaaagtgaccactttgaccatggatttcccaaagaagagttcctttgcagaccataggtggaaaagtcaatgagcatctccttccttgccaaagcatgtcccaacatgtaacaaactctagggatacaaaaggtttatattcagcatctgatgtcagatgtacagttcctcccctcccatatataaaccccggtgtagaatctgcagcgccctgctcttcggaaaccaaggaacaagccacctgctcacacaccttgttcaacttttcagctcctaaggaaccccacccccatgcaatttgactgtgcttgagaggtgaatacagttaccttcgagaaacagagggagctcctcaccccgtccttccagtccttttggctaaaatgcttaactatcactcacaaacaaatgtggagataccaggagctcatttgattcataccccaactttgtgttctgaaaaacatcagagggattttacattgcccagtttctccaccaacaagccttagggtggacccaaccctttccgcaagtggtaggaacgaatgcatcttagcaattacctgatttccaaagtccttttgtagcaaatgtcacctcattcgtggtctttttacctatcctaagcttatgatgatgagttatgtatgccaaatatttatctgaagagtttctcctcattgtgaatgtgtatgtaaaatatgaagacaagaaagggtgctttcatctgaggaaccaaggggtgagagtatcccaaaggaggacaccagcatcatcttttcttcgtactccaggacccaccaatattccagttctgggtcatttagagagataatggggcgtttattcccctattacctttgctaagtgctatattattggctgtttctcccgtaaccatgctgaaaagggggtcttagggagaactgtcatccaagtggcattcctagtaagttgggtagaaatgacattttccagagctgaaggagtgaagagcccttggccatactagggctctccttcccccggggagtgggaattcagccacattcagaattcacatcgcctttgttatgtccagaggagaggcataaaaaggcactctcccccaccacccctaccgaatctgggtttggtttggttttatttaactagcaaagttaatccagtaatcgcaaattactccagatggttaaagaaaaccctttcagaatacagaacgagaaaactagagtttgaccaataagaccaatttctgccatgaagaaccgggggacgcaagttaattgtttaacgtactctcattttaagcaccttctttcctgtctcttgattgttttttctgaaggaagtgtaaagaatgtctcagtctgccttaaaggaactgtgaaggcttctctgtaatttaagcttgattgaagtgaactgaaacattgtctaatgtctttgtggctttagagcttttgttatattgtgcctataaagcaaattatgtttacataaaaatataaataaagtattcagcatagcaaaaccccaaaaaaaaaaaaaaaa

SEQ ID NO: 712 - DNA, 8087 bp, Homo sapiens
gcggccgccaggtgctcctggagtgcagcgcctatcgccggggcgtgtgggggccacaccgagcaccagcttctccgacgccgggaagccgctgtcgccgccgctacctctccctgttgccgccgcctcagatctcttcatgccgctgtaagctcggaggccaaggatgcggagtaggcttcccccagcgcttgccgccctgggcgcggccctgctcctgtcttccattgaggcagaagggatggagtgtctcaccagagctgaggcagacattgtgttgctggtggatggatcatggagcatcggccgggcaaattttagaaccgtgaggagtttcatttctcgtattgtggaagtctttgacattggccccaaaagagtacaaattgctcttgctcagtatagtggggatcccagaacagagtggcagttaaatgcacacagagacaagaagagcttgttgcaagctgtggcaaacttgccgtacaaaggaggcaatactctcacaggcatggctttgaatttcattcgccaacagaacttcaggacccaagctggcatgagacctcgagctcgaaaaattggtgtgctcattactgatggaaaatcacaagacgatgttgaagcaccttcaaagaaactcaaggatgagggagtggagctgtttgctattggtattaaaaatgctgatgaagtcgaattaaagatgattgcaactgatcctgatgatacccatgcatacaatgtggcagattttgagtcactctccaggatagtggatgatctcaccattaatttgtgtaacagtgtcaaaggtccaggtgatttggaagcaccttctaacttagttatttctgagcgaacccatcgttcttttagagtgagctggacaccaccttctgacagtgtggatcgatataaggtggaatactatccagtttctggagggaaacgtcaagaattttatgtgagtcgaatggaaactagcacagtgctgaaagatctgaaacctgaaactgaatatgttgtcaatgtgtattctgtggtagaagatgaatatagtgagcctctgaaggggacagaaaaaaccttgccagtgcctgtagtcagcctgaatatttatgatgttggccctaccaccatgcatgtgcagtggcagcctgtgggaggagctactggctacatcttgtcatacaaacctgttaaggacacagagccaacaagacccaaagaggtgcgtttggggccaacagtgaatgacatgcagctgactgaccttgttcccaacacggagtatgcagtcacagtccaggctgtcctgcacgacctcactagtgaacctgtcactgttcgggaagtcaccttgcctttacccagacctcaggatctgaaactcagagatgtgactcacagcactatgaatgtcttttgggaacctgtgcctggaaaagtgcgtaaatatattgttcgatacaaaacaccagaagaggatgtcaaagaggtagaggtggacagatcagagaccagcacttccctcaaagacctcttctcacagaccttgtacacagtcagcgtttctgcagtacatgacgagggggagtctcctccagtgactgctcaagaaactacccgacccgtgccagccccaacaaacttaaagattactgaagtaacatcagagggtttcagagggacttgggatcatggagcttcagatgtgtctctctacagaataacttgggcaccttttggaagctcagataagatggagaccatcttaaatggagatgaaaacactttggtgttcgaaaacctgaaccccaacaccatctatgaagtttccattactgccatctatcctgatgagtcagaaagtgatgacctgattggcagtgagcgcacactgcctatcttaacaacacaagctcccaaaagtggcccacgaaaccttcaagtgtacaatgcaacatctaacagcctgactgttaagtgggatcctgctagtggtcgtgtgcagaaatataggatcacttatcagccttccacaggggaaggcaatgagcaaacgaccacaataggaggacggcagaacagtgtggtcctgcagaaactgaagccagacactccttacactatcaccgtatcctctctgtatcctgatggtgaaggaggtcggatgacgggaagaggcaagaccaaacctctaaacactgtaaggaacctgagagtgtatgacccttctaccagcaccttgaatgtccgctgggaccatgcagagggaaatcctcgtcagtacaagctcttctatgcaccagcagcaggtggtccagaggaactggtaccaatccccgggaataccaattatgccattcttaggaatctgcagccagatacctcatacactgtgactgtagttcccgtttatactgaaggtgatgggggacgcacatcagatactggaaggacattgatgagaggactggcaagaaatgtccaagtatacaatcctacacctaacagcctcgatgttcgctgggaccctgctccaggacctgtgctgcaatatcgcgttgtgtattctcctgtggatggcacaagaccctcagaatctatagtagtgccaggaaacacgcgcatggtgcatctggagcggctgattccggacacactctattccgtgaaccttgtggctctgtactcggatggagagggaaatcccagccctgcccagggccgaacgctaccacgcagtggaccaaggaacctgagagtctttggtgaaacaaccaatagcctctcggtagcctgggatcatgctgatgggccagttcagcagtacaggatcatctattctcccactgttggtgatccaattgatgaatataccacagtcccaggcagaagaaacaatgtaatactgcagcccctgcaacctgacactccatataaaattactgttattgctgtttatgaagatggagatggtggccatctaacaggaaatggaagaactgtgggactccttcctcctcagaacatacacatctctgacgaatggtatacaagattcagggtgtcctgggatccttcaccttctccagttcttggatataaaatagtatataagccagtgggttccaatgagcccatggaagcctttgttggagaaatgacatcatataccttacacaatctcaatcccagcaccacctacgatgtgaatgtttatgctcaatatgattctggactcagtgtccccttgacagatcaaggcactacattatatttaaatgtaacagatctgaaaacttaccagattgggtgggatacattctgtgtcaaatggtcacctcaccgggcagccacctcctacaggctaaaactaagccctgcagatggaacaaggggacaagaaattacagtgcgtggatcagaaaccagtcactgcttcactggcctttcaccagacactgattatggtgtcactgtttttgtgcagacaccaaatctcgagggaccaggagtctctgttaaagaacataccactgtgaaaccaacagaagcccctacagagccacccacacctcctccccctcccaccattccaccagcccgggatgtatgcaaaggggccaaggcagatattgtgttcttgactgatgcctcctggagcattggggacgataattttaacaaagttgtaaaattcatcttcaatactgtgggaggctttgatgaaatcagtcctgctgggattcaggtttcatttgtgcaatacagcgatgaggtcaagtctgagttcaagctgaacacgtacaatgacaaggccctagcccttggggccctccagaatattaggtacagaggaggaaacacaagaacaggcaaggccctcacgtttatcaaggagaaagtcttgacttgggagagcggcatgaggaagaatgtccctaaggtgttggttgtggtcacggacggtcggtcccaggatgaggtcaagaaggcggctttggtcatccagcagtcagggttcagtgtctttgtagttggtgtggctgatgtcgactacaatgagcttgccaacattgccagcaaaccaagtgaacggcacgtgttcattgtggacgactttgaatcttttgagaagatcgaagacaatcttattacatttgtttgtgaaactgccacttcaagttgtcctctcatttatttggatggctacacctcaccaggttttaaaatgcttgaagcatacaacctgacagaaaagaattttgcttctgtacaaggagtatctttggagtcagggtctttccccagctactcagcatacaggattcagaagaatgcgtttgtgaatcagcctacagcagacctacacccaaatggactccctccttcatacacgattatattattattcagacttctcccagaaactcccagtgacccttttgcaatttggcaaatcacagacagagactacaaaccacaagttggagtgattgcagatccttctagcaagacgttatcattctttaacaaggatacaagaggcgaggtgcaaactgttacatttgacacagaagaagtaaagacattattttatggaagttttcacaaggttcatattgtagtgacctcaaaaagtgttaagatttacattgactgctatgaaattatagaaaaagacatcaaggaagctggaaatataacaactgatggttatgaaattcttggaaaactccttaaaggggaaaggaaatcagccgcattccaaatccagagttttgacattgtctgcagtccagtgtggaccagtagagacagatgctgtgatattccctctaggagagatgagggaaaatgccctgcttttccaaattcttgcacatgtacacaggacagcgttggacctccaggacctccaggccctgcaggaggacctggtgctaaaggtcccagaggtgaaagaggtatcagtggggcaattgggccccctggtcctcgtggagacataggtcctccaggcccccagggtcctccaggccctcagggacccaatggactctctattccgggagagcaaggtcgccaagggatgaaaggtgatgctggagagccaggacttccaggccgaacaggaaccccaggattacctggcccaccaggaccaatgggacctccaggagacagaggcttcactggaaaagacggtgcaatgggacccaggggcccaccagggccgccgggaagcccaggctccccaggagtcacaggaccaagtgggaagccaggaaaacctggagatcatggcagaccaggtccatctgggttgaaaggagaaaaaggtgataggggagacattgcttcccagaacatgatgcgagcagttgcaagacaagtctgtgaacaattgataagtggtcagatgaacagattcaatcagatgctgaatcagattccaaatgattaccagtccagtcgcaaccagccaggcccgccgggtccaccgggacctcctggtagcgcaggagccagaggagaacctgggcctggggggcggccaggcttcccgggcacaccagggatgcagggaccccctggggaacgaggtttgccaggagagaaaggtgaaaggggtactggatcttcaggacctcgggggctgcctggccccccaggtccacaaggagaatccagaacaggtccaccagggtccacaggttcaagaggtccccctggcccccctggccgtcctggaaactcaggtatccgaggacccccaggtcctcctggatactgtgattcttctcagtgtgccagcatcccatacaacgggcaaggctatccaggttccggctaacacattttctaagtcgccagtgctgcttacagtttgaatacatgaaaatcctgtttctgagatgtttgcgcacgtgcttattaggaaatgagtctgtatggaaatctcaccacagataatggttaacgaaccgggtcgacatcacaaaggagggtggagactctttttactaacttgaatgagacaaaagcagtggtgtcagtttataatcctgatgcatttcagtaataatgtagaaaaacattattttaaaaaagttccaacacacagccatgaggagcctcagttttgaaagaggtgcataataaaactactaaccagaggagtctatgccattttaagaaaaacaattaacctggttaaagagaaatgtcttatgtaaataataaactaattgtggcttgtaaatgatttgtatgtgatcctgtcgactaaaatcacttaacaattctacaataagcttctgcatcaaagcctgccgcttgctctatgccggaataacaccaaatggaatctcctcatctcttgcttgttagcgatgtgtctgattcagggcatctgtctttttgttacttttttgtccgtgtcctctcatttgggttttgtaactgcaattttcaaaccaaagtttaaaatcaccttttcttcctgttttgctgtagtcactggtgttcctcacccaccagctgtaactcagtttgtgtgaggtacagccacagaagatgtcatgtactgtatattacctggtgatagttgcttttcaccccccgagttcagtttctaggagccaatgaaacttcccctcacctcctcatctttccaagttgttctttgaattgaggagtttgaaggcataaacagttacttggggatttgcgaaaatcctacttagttactgcgtttacagttctttggcccagtctctgacccttcccaagtatttgtgcaatgattgtgtttactgctggatttttgaaggtttttttttttaagaaagtgccatttcattatttgattatcaccaaattatctggaaataattgggacattgtaacttatctatttatagttatgagattaagactggagtgccatcaccgcgggtgatgatttagcttttgctgtgtgtgtgtgtgtgtgccttccaaatcatgccataattgtaatgttgaatcggacagagccttacgtgcccgagggcggggcctacctgcctgagcgcgagcccttcatcgtgccggtggagcccgagcggacagcggaatacgaggactacggcgcagacgagcctgcagaggagcctcctgagccccaccggcgctggcggcgcgccctgccccacggacccgggcagtgaaccagagatcacgcgccgcgccgcgaggcttgggggaggtgttgaaattctcatttacaggtcagatagagcagtgtacgtcttttctgaggtgtttcttccagcgttgctcatccaggagtaccctttctgattgtagagaaccttgtttctgcaggaagcctagctccaagcacgcagtctgtagacatttttgcctttgcccttgaaatgcttgcaaaatactttgttaacaaaagctgcaaagagagaacatgccgtgtgcctttagttagcacagcgggcagcctcagtgaaactcttaggttaagcagttaagtcctggaacccagagctgctgtgtatttcgagcgggcagtttatcttttgctatacttattttcaattcaattacaccacgattcaaataattcccctcctaaaaccaaaaaggagggaaacgtcaactccattgcaattacttatcttcctcttctatctctgttatacgccggggcatagaatgctcgtatacatctctttaacaaccacaaaccttaagccatgtagatgaagttagtgcatcaacgggatacagttccatattgccttaaacctccttgttttagacacactaacatttataccaaattgcagattattctgcagagagggaattgcatgtttgtgttgtatatttagtatgaacttttttcagaatataatatttcttagttatcaaaagtagttggaaaacatttgcaagactatgaacatagaattgctgcttttatattttaactgcagattgtgaatttcactgccttatattatttatttctgaaacaaaagaggcatttttcaataaaactactgaaaatttga

SEQ ID NO: 713 - DNA, 1852 bp, Homo sapiens
caggagagaaggcaccgcccccaccccgcctccaaagctaaccctcgggcttgaggggaagaggctgactgtacgttccttctactctggcaccactctccaggctgccatggggcccagcacccctctcctcatcttgttccttttgtcatggtcgggacccctccaaggacagcagcaccaccttgtggagtacatggaacgccgactagctgctttagaggaacggctggcccagtgccaggaccagagtagtcggcatgctgctgagctgcgggacttcaagaacaagatgctgccactgctggaggtggcagagaaggagcgggaggcactcagaactgaggccgacaccatctccgggagagtggatcgtctggagcgggaggtagactatctggagacccagaacccagctctgccctgtgtagagtttgatgagaaggtgactggaggccctgggaccaaaggcaagggaagaaggaatgagaagtacgatatggtgacagactgtggctacacaatctctcaagtgagatcaatgaagattctgaagcgatttggtggcccagctggtctatggaccaaggatccactggggcaaacagagaagatctacgtgttagatgggacacagaatgacacagcctttgtcttcccaaggctgcgtgacttcacccttgccatggctgcccggaaagcttcccgagtccgggtgcccttcccctgggtaggcacagggcagctggtatatggtggctttctttattttgctcggaggcctcctggaagacctggtggaggtggtgagatggagaacactttgcagctaatcaaattccacctggcaaaccgaacagtggtggacagctcagtattcccagcagaggggctgatccccccctacggcttgacagcagacacctacatcgacctggcagctgatgaggaaggtctttgggctgtctatgccacccgggaggatgacaggcacttgtgtctggccaagttagatccacagacactggacacagagcagcagtgggacacaccatgtcccagagagaatgctgaggctgcctttgtcatctgtgggaccctctatgtcgtctataacacccgtcctgccagtcgggcccgcatccagtgctcctttgatgccagcggcaccctgacccctgaacgggcagcactcccttattttccccgcagatatggtgcccatgccagcctccgctataacccccgagaacgccagctctatgcctgggatgatggctaccagattgtctataagctggagatgaggaagaaagaggaggaggtttgaggagctagccttgttttttgcatctttctcactcccatacatttatattatatccccactaaatttcttgttcctcattcttcaaatgtgggccagttgtggctcaaatcctctatatttttagccaatggcaatcaaattctttcagctcctttgtttcatacggaactccagatcctgagtaatccttttagagcccgaagagtcaaaaccctcaatgttccctcctgctctcctgccccatgtcaacaaatttcaggctaaggatgccccagacccagggctctaaccttgtatgcgggcaggcccagggagcaggcagcagtgttcttcccctcagagtgacttggggagggagaaataggaggagacgtccagctctgtcctctcttcctcactcctcccttcagtgtcctgaggaacaggactttctccacattgttttgtattgcaacattttgcattaaaaggaaaatccactgctaaaaaaaaaaaaaaaaaaaaaaaaaaaaaaaaaaaaaa

SEQ ID NO: 714 - DNA, 2520 bp, Homo sapiens
ggatggttgtctattaacttgttcaaaaaagtatcaggagttgtcaaggcagagaagagagtgtttgcaaaagggggaaagtagtttgctgcctctttaagactaggactgagagaaagaagaggagagagaaagaaagggagagaagtttgagccccaggcttaagcctttccaaaaaataataataacaatcatcggcggcggcaggatcggccagaggaggagggaagcgctttttttgatcctgattccagtttgcctctctctttttttcccccaaattattcttcgcctgattttcctcgcggagccctgcgctcccgacacccccgcccgcctcccctcctcctctccccccgcccgcgggccccccaaagtcccggccgggccgagggtcggcggccgccggcgggccgggcccgcgcacagcgcccgcatgtacaacatgatggagacggagctgaagccgccgggcccgcagcaaacttcggggggcggcggcggcaactccaccgcggcggcggccggcggcaaccagaaaaacagcccggaccgcgtcaagcggcccatgaatgccttcatggtgtggtcccgcgggcagcggcgcaagatggcccaggagaaccccaagatgcacaactcggagatcagcaagcgcctgggcgccgagtggaaacttttgtcggagacggagaagcggccgttcatcgacgaggctaagcggctgcgagcgctgcacatgaaggagcacccggattataaataccggccccggcggaaaaccaagacgctcatgaagaaggataagtacacgctgcccggcgggctgctggcccccggcggcaatagcatggcgagcggggtcggggtgggcgccggcctgggcgcgggcgtgaaccagcgcatggacagttacgcgcacatgaacggctggagcaacggcagctacagcatgatgcaggaccagctgggctacccgcagcacccgggcctcaatgcgcacggcgcagcgcagatgcagcccatgcaccgctacgacgtgagcgccctgcagtacaactccatgaccagctcgcagacctacatgaacggctcgcccacctacagcatgtcctactcgcagcagggcacccctggcatggctcttggctccatgggttcggtggtcaagtccgaggccagctccagcccccctgtggttacctcttcctcccactccagggcgccctgccaggccggggacctccgggacatgatcagcatgtatctccccggcgccgaggtgccggaacccgccgcccccagcagacttcacatgtcccagcactaccagagcggcccggtgcccggcacggccattaacggcacactgcccctctcacacatgtgagggccggacagcgaactggaggggggagaaattttcaaagaaaaacgagggaaatgggaggggtgcaaaagaggagagtaagaaacagcatggagaaaacccggtacgctcaaaaagaaaaaggaaaaaaaaaaatcccatcacccacagcaaatgacagctgcaaaagagaacaccaatcccatccacactcacgcaaaaaccgcgatgccgacaagaaaacttttatgagagagatcctggacttctttttgggggactatttttgtacagagaaaacctggggagggtggggagggcgggggaatggaccttgtatagatctggaggaaagaaagctacgaaaaactttttaaaagttctagtggtacggtaggagctttgcaggaagtttgcaaaagtctttaccaataatatttagagctagtctccaagcgacgaaaaaaatgttttaatatttgcaagcaacttttgtacagtatttatcgagataaacatggcaatcaaaatgtccattgtttataagctgagaatttgccaatatttttcaaggagaggcttcttgctgaattttgattctgcagctgaaatttaggacagttgcaaacgtgaaaagaagaaaattattcaaatttggacattttaattgtttaaaaattgtacaaaaggaaaaaattagaataagtactggcgaaccatctctgtggtcttgtttaaaaagggcaaaagttttagactgtactaaattttataacttactgttaaaagcaaaaatggccatgcaggttgacaccgttggtaatttataatagcttttgttcgatcccaactttccattttgttcagataaaaaaaaccatgaaattactgtgtttgaaatattttcttatggtttgtaatatttctgtaaatttattgtgatattttaaggttttcccccctttattttccgtagttgtattttaaaagattcggctctgtattatttgaatcagtctgccgagaatccatgtatatatttgaactaatatcatccttataacaggtacattttcaacttaagtttttactccattatgcacagtttgagataaataaatttttgaaatatggacactgaaaaaaaaaa

SEQ ID NO: 715 - DNA, 3476 bp, Homo sapiens
ttcaggaaagcagtttccaggaggtgagagtttaagccaaacctgaaagaggttgatttgtaatgatttgcaggggggcactggaggcagccgccaggacttttcacttaggagatcagcatttgccctgatggaaactgggcgatcctgcagggactgacctctgagttatccaaaggccgacctggggaaagactgattttgaggttttaatagttttcagatgcttcaagtgttgtgaacagagacttgtttggattatgcatttctcagctagactaaataaatgctagcaatggatacgtgcaaacatgttgggcagctgcagcttgctcaagaccattccagcctcaaccctcagaaatggcactgtgtggactgcaacacgaccgagtccatttgggcttgccttagctgctcccatgttgcctgtggaagatatattgaagagcatgcactcaagcactttcaagaaagcagtcatcctgttgcattggaggtgaatgagatgtacgttttttgttacctttgtgatgattatgttctgaatgataacacaactggagacctgaagttactacgacgtacattaagtgccatcaaaagtcaaaattatcactgcacaactcgtagtgggaggtttttacggtccatgggtacaggtgatgattcttatttcttacatgacggtgcccaatctctgcttcaaagtgaagatcaactgtatactgctctttggcacaggagaaggatactaatgggtaaaatctttcgaacatggtttgaacaatcacccattggaagaaaaaagcaagaagaaccatttcaggaaaaaatagtagtaaaaagagaagtaaagaaaagacggcaggaattggagtatcaagttaaagcagaattggaaagtatgcctccaagaaagagtttacgtttacaagggctcgctcagtcgaccataatagaaatagtttctgttcaggtgccagcacaaacgccagcatcaccagcaaaagataaagtactctctacctcagaaaatgaaatatctcaaaaagtcagtgactcctcagttaaacgaaggccaatagtaactcctggtgtaacaggattgagaaatttgggaaatacttgctatatgaattctgttcttcaggtgttgagtcatttacttatttttcgacaatgttttttaaagcttgatctgaaccaatggctggctatgactgctagcgagaagacaagatcttgtaagcatccaccagtcacagatacagtagtatatcaaatgaatgaatgtcaggaaaaagatacaggttttgtttgctccagacaatcaagtctgtcatcaggactaagtggtggagcatcaaaaggtagaaagatggaacttattcagccaaaggagccaacttcacagtacatttctctttgtcatgaattgcatactttgttccaagtcatgtggtctggaaagtgggcgttggtctcaccatttgctatgctacactcagtgtggagactcattcctgcctttcgtggttacgcccaacaagacgctcaggaatttctttgtgaacttttagataaaatacaacgtgaattagagacaactggtaccagtttaccagctcttatccccacttctcaaaggaaactcatcaaacaagttctgaatgttgtaaataacatttttcatggacaacttcttagtcaggttacatgtcttgcatgtgacaacaaatcaaataccatagaacctttctgggacttgtcattggagtttccagaaaggtatcaatgcagtggaaaagatattgcttcccagccatgtctggttactgaaatgttggccaaatttacagaaactgaagctttagaaggaaaaatctacgtatgtgaccagtgtaactcaaagcgtagaaggttttcctccaaaccagttgtactcacagaagcccagaaacaacttatgatatgccacctacctcaggttctcagactgcacctcaaacgattcaggtggtcaggacgtaataaccgagagaagattggtgttcatgttggctttgaggaaatcttaaacatggagccctattgctgcagggagaccctgaaatccctcagaccagaatgctttatctatgacttgtccgcggtggtgatgcaccatgggaaaggatttggctcagggcactacactgcctactgctataattctgaaggagggttctgggtacactgcaatgattccaaactaagcatgtgcactatggatgaagtatgcaaggctcaagcttatatcttgttttatacccaacgagttactgagaatggacattctaaacttttgcctccagagctcctgttggggagccaacatcccaatgaagacgctgatacctcgtctaatgaaatccttagctgatccaaagacaatggggttttcttcctgtgatttatatatatactttttaaaagactgatgtaccattttaaacttcattttttcttgtgaatcagtgtatactacatttatacattttatatctaacaatttttttttttacaaagtataaatgtatatatcaactgaaggtaactacttttttcatatttggagttttaaacttttggtgtttacctcagactgatgttacctcttttatatttttatgtcttaattggctcggatgatgaacttgtgcaatcttctaccaacaaagttcaagtggcatcattttatatacatgtatctttttcaggtattttctatacaaattcttaatagatggaaaattagactctactttggtcactaatagtctttcatttgtatattgaagttaccttgccccttggagttattgaagtgacatgtcaaggtatcacctaaatattcttcagtcacactcactggtatttctgaggctttgtgtgttaacaggccttgtaattgacattattttggttaatgtaaccccaaaattgctttagtaattgctctttggcatagtcaaactataaatgaaaatggcagctttacaaatagtatatttaagtgaactctggaactatggacatgaaaaaaatgatggctgggatttatgatttttgtctggcagcaaacaggtttgtccagaagtctaataattaagcagtcataaaaagtctgaatttagtaaaccagtgtatgatgttattcaaatagtttaccttgggtatgagttcattttataatgtctgatgacattagatctcttaaaactttatgtattttttttagttcaaaggaatagagtcttgaagagaaaaaattatagggcagaaaagataagtgttcaaaattggcaactggactattattatgtctagcatctcattctaaataactaaagcttgatttactcttgctaggattatgtgactactaggtaggagcctcttaaaacactggccctgagcattaaaaaaaaaaa

SEQ ID NO: 716 - DNA, 368 bp, Homo sapiens
atgtctggtagaggcaaaggtggtaaaggtttaggaaagggaggcgccaagcgccatcgcaaagtgctgcgtgacaacatacagggcatcacgaagcccgccatccgtcgcttggcccgacgcggcggcgtgaaacgcatttcgggcctcatttatgaggagacccgcggtgttcttaaggtgttcctggagaatgtgatacgggacgccgtaacctacacggagcacgccaagcgtaagacagtcactgcaatggatgttgtctacgcgctcaagcgccagggacgcactctgtacggctttggtggctgagcctcaccccggctttttatttaacagctcacccataaaaggcccttttcagggcc

SEQ ID NO: 717 - DNA, 3936 bp, Homo sapiens
agttttaattgcttccaatgaggtcagcaaaggtatttatcgaaaagccctgaataaaaggctcacacacacacacaagcacacacgcgctcacacacagagagaaaatccttctgcctgttgatttatggaaacaattatgattctgctggagaacttttcagctgagaaatagtttgtagctacagtagaaaggctcaagttgcaccaggcagacaacagacatggaattcttatatatccagctgttagcaacaaaacaaaagtcaaatagcaaacagcgtcacagcaactgaacttactacgaactgtttttatgaggatttatcaacagagttatttaaggaggaatcctgtgttgttatcaggaactaaaaggataaggctaacaatttggaaagagcaactactctttcttaaatcaatctacaattcacagataggaagaggtcaatgacctaggagtaacaatcaactcaagattcattttcattatgttattcatgaacacccggagcactacactataatgcacaaatggatactgacatggatcctgccaactttgctctacagatcatgctttcacattatctgtctagtgggtactatatctttagcttgcaatgacatgactccagagcaaatggctacaaatgtgaactgttccagccctgagcgacacacaagaagttatgattacatggaaggaggggatataagagtgagaagactcttctgtcgaacacagtggtacctgaggatcgataaaagaggcaaagtaaaagggacccaagagatgaagaataattacaatatcatggaaatcaggacagtggcagttggaattgtggcaatcaaaggggtggaaagtgaattctatcttgcaatgaacaaggaaggaaaactctatgcaaagaaagaatgcaatgaagattgtaacttcaaagaactaattctggaaaaccattacaacacatatgcatcagctaaatggacacacaacggaggggaaatgtttgttgccttaaatcaaaaggggattcctgtaagaggaaaaaaaacgaagaaagaacaaaaaacagcccactttcttcctatggcaataacttaattgcatatggtatataaagaaccagttccagcagggagatttctttaagtggactgttttctttcttctcaaaattttctttccttttattttttagtaatcaagaaaggctggaaaactactgaaaaactgatcaagctggacttgtgcatttatgtttgttttaagacactgcattaaagaaagatttgaaaagtatacacaaaaatcagatttagtaactaaaggttgtaaaaaattgtaaaactggttgtacaatcatgatgttagtaacagtaatttttttcttaaattaatttacccttaagagtatgttagatttgattatctgataatgattatttaaatattcctatctgcttataaaatggctgctataataataataatacagatgttgttatataaggtatatcagacctacaggcttctggcaggatttgtcagataatcaagccacactaactatggaaaatgagcagcattttaaatgctttctagtgaaaaattataatctacttaaactctaatcagaaaaaaaattctcaaaaaaactattatgaaagtcaataaaatagataatttaacaaaagtacaggattagaacatgcttatacctataaataagaacaaaatttctaatgctgctcaagtggaaagggtattgctaaaaggatgtttccaaaaatcttgtatataagatagcaacagtgattgatgataatactgtacttcatcttacttgccacaaaataacattttataaatcctcaaagtaaaattgagaaatctttaagtttttttcaagtaacataatctatctttgtataattcatatttgggaatatggcttttaataatgttcttcccacaaataatcatgcttttttcctatggttacagcattaaactctattttaagttgtttttgaactttattgttttgttatttaagtttatgttatttataaaaaaaaaaccttaataagctgtatctgtttcatatgcttttaattttaaaggaataacaaaactgtctggctcaacggcaagtttccctcccttttctgactgacactaagtctagcacacagcacttgggccagcaaatcctggaaggcagacaaaaataagagcctgaagcaatgcttacaatagatgtctcacacagaacaatacaaatatgtaaaaaatctttcaccacatattcttgccaattaattggatcatataagtaaaatcattacaaatataagtatttacaggattttaaagttagaatatatttgaatgcatgggtagaaaatatcatattttaaaactatgtatatttaaatttagtaattttctaatctctagaaatctctgctgttcaaaaggtggcagcactgaaagttgttttcctgttagatggcaagagcacaatgcccaaaatagaagatgcagttaagaataaggggccctgaatgtcatgaaggcttgaggtcagcctacagataacaggattattacaaggatgaatttccacttcaaaagtctttcattggcagatcttggtagcactttatatgttcaccaatgggaggtcaatatttatctaatttaaaaggtatgctaaccactgtggttttaatttcaaaatatttgtcattcaagtccctttacataaatagtatttggtaatacatttatagatgagagttatatgaaaaggctaggtcaacaaaaacaatagattcatttaattttcctgtggttgacctatacgaccaggatgtagaaaactagaaagaactgcccttcctcagatatactcttgggagagagcatgaatggtattctgaactatcacctgattcaaggactttgctagctaggttttgaggtcaggcttcagtaactgtagtcttgtgagcatattgagggcagaggaggacttagtttttcatatgtgtttccttagtgcctagcagactatctgttcataatcagttttcagtgtgaattcactgaatgtttatagacaaaagaaaatacacactaaaactaatcttcattttaaaagggtaaaacatgactatacagaaatttaaatagaaatagtgtatatacatataaaatacaagctatgttaggaccaaatgctctttgtctatggagttatacttccatcaaattacatagcaatgctgaattaggcaaaaccaacatttagtggtaaatccattcctggtagtataagtcacctaaaaaagacttctagaaatatgtactttaattatttgtttttctcctatttttaaatttattatgcaaattttagaaaataaaatttgctctagttacacacctttagaattctagaatattaaaactgtaaggggcctccatccctcttactcatttgtagtctaggaaattgagattttgatacacctaaggtcacgcagctgggtagatatacagctgtcacaagagtctagatcagttagcacatgctttctactcttcgattattagtattattagctaatggtctttggcatgtttttgttttttatttctgttgagatatagcctttacatttgtacacaaatgtgactatgtcttggcaatgcacttcatacacaatgactaatctatactgtgatgatttgactcaaaaggagaaaagaaattatgtagttttcaattctgattcctattcaccttttgtttatgaatggaaagctttgtgcaaaatatacatataagcagagtaagccttttaaaaatgttctttgaaagataaaattaaatacatgagtttctaacaattaga

SEQ ID NO: 718 - DNA, 5260 bp, Homo sapiens
ggacccgcctcagccaatccgctgctgccggcgtcgggtgcgctcggcctcgcccgcggccctccttccccggctcccgctcgccgctcgttcactccaccgccgccgccgccgccgccgctgccgctgccgctgccgcacctccgtagctgactcggtactctctgaagatggcagaagctcaccaagctgtggcctttcagttcacggtcactccggacgggattgacctgcggctgagccatgaagctcttagacaaatctatctctctggacttcattcctggaaaaagaagttcatcagattcaagaacggcatcatcactggcgtgtacccggcaagcccctccagttggcttatcgtggtggtgggcgtgatgacaacgatgtacgccaagatcgacccctcgttaggaataattgcaaaaatcaatcggactctggaaacggccaactgcatgtccagccagacgaagaacgtggtcagcggcgtgctgtttggcaccggcctgtgggtggccctcatcgtcaccatgcgctactccctgaaagtgctgctctcctaccacgggtggatgttcactgagcacggcaagatgagtcgtgccaccaagatctggatgggtatggtcaagatcttttcaggccgaaaacccatgttgtacagcttccagacatcgctgcctcgcctgccggtcccggctgtcaaagacactgtgaacaggtatctacagtcggtgaggcctcttatgaaggaagaagacttcaaacggatgacagcacttgctcaagattttgctgtcggtcttggaccaagattacagtggtatttgaagttaaaatcctggtgggctacaaattacgtgagcgactggtgggaggagtacatctacctccgaggacgagggccgctcatggtgaacagcaactattatgccatggatctgctgtatatccttccaactcacattcaggcagcaagagccggcaacgccatccatgccatcctgctttacaggcgcaaactggaccgggaggaaatcaaaccaattcgtcttttgggatccacgattccactctgctccgctcagtgggagcggatgtttaatacttcccggatcccaggagaggagacagacaccatccagcacatgagagacagcaagcacatcgtcgtgtaccatcgaggacgctacttcaaggtctggctctaccatgatgggcggctgctgaagccccgggagatggagcagcagatgcagaggatcctggacaatacctcggagcctcagcccggggaggccaggctggcagccctcaccgcaggagacagagttccctgggccaggtgtcgtcaggcctattttggacgtgggaaaaataagcagtctcttgatgctgtggagaaagcagcgttcttcgtgacgttagatgaaactgaagaaggatacagaagtgaagacccggatacgtcaatggacagctacgccaaatctctactacacggccgatgttacgacaggtggtttgacaagtcgttcacgtttgttgtcttcaaaaacgggaagatgggcctcaacgctgaacactcctgggcagatgcgccgatcgtggcccacctttgggagtacgtcatgtccattgacagcctccagctgggctatgcggaggatgggcactgcaaaggcgacatcaatccgaacattccgtaccccaccaggctgcagtgggacatcccgggggaatgtcaagaggttatagagacctccctgaacaccgcaaatcttctggcaaacgacgtggatttccattccttcccattcgtagcctttggtaaaggaatcatcaagaaatgtcgcacgagcccagacgcctttgtgcagctggccctccagctggcgcactacaaggacatgggcaagttttgcctcacatacgaggcctccatgacccggctcttccgagaggggaggacggagaccgtgcgctcctgcaccactgagtcatgcgacttcgtgcgggccatggtggacccggcccagacggtggaacagaggctgaagttgttcaagttggcgtctgagaagcatcagcatatgtatcgcctcgccatgaccggctctgggatcgatcgtcacctcttctgcctttacgtggtgtctaaatatctcgctgtggagtcccctttccttaaggaagttttatctgagccttggagattatcaacaagccagacccctcagcagcaagtggagctgtttgacttggagaataacccagagtacgtgtccagcggagggggctttggaccggttgctgatgacggctatggtgtgtcgtacatccttgtgggagagaacctcatcaatttccacatttcttccaagttctcttgccctgagacggattctcatcgctttggaaggcacctgaaagaagcaatgactgacatcatcactttgtttggtctcagttctaattccaaaaagtaattccactggagctgctgggaaggaaaacgagctcttctgatgcaaaccaaatgaaaaataggcattaatcctgaccttagctcgggatgaaacactgctcttaaaaaaactcagttttccttccagaaaatgtgggtgtttttttttcctagaacagtatctctcccctgtgaagcataaccccactacttccagacttgccctcccttgggggacatctgataaagtctcccctgatgtctccgcatcggcttggatttattaagggatgcaaatcttgttgagttaatgaaggaattagtagggttgtggcttcacacacagtggaatggaaatggtgtgctttctcagtggcaaccgaaggcctagtgcttaagggcatttagcatcatccaagcagggtaaacttttgttttgttaaaagaaaaatgtgttattcaagttggtgtccccagttgtagctaacacatctggaatgcactaaccaaaatgctgtgctttggagacctgcttttgtcaccgtgggtaaccgttcccgtctggtccagtagcctgtgtttgcctctccacatttgaagcaagcaggatgcaaggtcttcagttttactgaccttgtatgtcttcaagtcttcacaacccagtgccttaaaaatgaaaggccctaaatgtaagggagatggagagaaagatttattttgtagagtctttgggtggaattgtgggtatactgttcccttcacaattgactgagtatggataaccgtacataagcatttgctacaccccaccagccccctccccctcagaaacaccagttccttcccaagggcagctgtgccagactcccctcccgggactgccttcttgtcatcataagcaacaaaagaaataacaggcacatgtcataaaaggggagcaagggccgtgatggtcagataattcactcaagaataaaacatgacacgtgcctcaggaggatctctttcccaaagtgacagcaaggagggcagggcatcggccaccaagcggggactagcaagtgaggaaggggagggcagcccaccgtggtgaggagagagtggctccacgaccccaagggatggccttctcctcccacccggtgaggggaaagactcaccagagggtgatggagacagtatgccggctcaccttggtgaccagccaagatgtctcaagtgacagtgctaggtgttcacccagcctgtccttcagataggagtgccttcacgaaagcgtctcatggaccacaaagcaattatgcactgagtcatcttcagtatttaatgcaaaaatgaagcatcatggaatgaaattcccactgtctgtcatgacaagcttagctgtccattgttttaaattgtgtatttatttttttgaccacttggttctagttgggcctgactccttcagagtgctgcaccccgatagtacaacagcgatggctgaactgttggagtcgatggaaggtgcttgccggagaacacgtgcctttttttttttttttttttttgagatggagtttcactcttgttgcccaggctggagtgcagtggtgcaatctcggctcactgcagcatctgccttgcaggttcaagcgattctcctgtctcagcctcccaagtagctgggattacacgcccaacaccatgccctgctaatttttgtatttttagtagagacggggtttcatcatattggtcaggctggtctcgaactcctgacctcaggtgatccacctgcctcagcctcccaaagtgctgggattacaggcatgagccaccatgcgcggcccacatgcatgttttatgtatgtatacttcatgatgtaaaaatcccacctttatgggccaaagattttttttctcctgaaagcaagaaaaaatgaaaacaaaagacaaaaaaaaaaaaaaaagcgtccaggcgcggtggctcatgcgtgtaatcccagcactttgggaggccaaggcgggcggatcacgaggtcaggagatggagaccatcctggctaacacggtgaaaccccgtctctactaaaaattcaaaaaatgagccgggcgtggtggcgggcgcctgtagtcccagctactcaggaggctgaggcaggagaatggcgtgaacccgggaggcggagcttgcagtgagccgagatcgctccactgcactccagcctgggcgacagagcgagactccgtctaaaaaaaaaagcaaaaacaaaccaacaacaaaagcccctgactgtccgtcaagcaggcagcggggatgtagctctctctgccctgggcaagaatagcacttcccgttaaaagccagcagccggcgtcagtccctatcagagccagctagatcatgcactgttgaccactgagcaatctgtgttacactagagttcacagggcattttgagtgtagacgtgagtgcttaaacatatttgggtttctctctcaggttttaaatgtttcaaatgtaattgttgctcatcagtgcagttatcaatgcaattttatattccttgaggggagaaagaggggtcttattgtacatgtccaaggggggtgataagagtattatctgtttaatttaattggaacaaaccattgtcttaacgcagccatggtttgaatttgttatcttgggctgaccggtgcatgtaaatacagtatgctctttggatgtaaatcttagaaatgcagtgtgaatgtaggttatcattaataaaacattaaccccagtctactacaaaaaaaaa

SEQ ID NO: 719 - DNA, 3196 bp, Homo sapiens
cgcggcgcacttggacttccctctccattcgccagccgcctcgctcccggaccccacggctgcaaactgatctggcgcgcggggaggaggagagcgcaggcgagcgaacccgcgagagagggagagagcgagcgagcaacagcgagagcgagagcgagagagccgggaggcagagggagtagtgaccgccttccggagccgggattcatgcctgtcctcgggaccagcgaaggggactttacggctgagtatgagccaggctgctaggagccaggtacccccacgcctgcagtccccgcgccgtgcccggaatgcgagctgcacgcagggctctcccaagttcccaccgagccgaataaaaagcgtcctcccgcagctctccgccaaagacggacattgactccaggactccacagaatggagcaagaatgagaggaaaaaggccggcagaaaagcatgaactggaggtttgttgagctcctctacttcctgtttatatggggccgtatctcagtgcagccctcccaccaggaaccagctgggacagaccaacatgtctccaaggaatttgattggctcatttcagacagggggcctttccaccactccaggagctacctatcctttgtggaaagacaccgtcaaggatttacaaccagatataaaatatacagggagtttgcccgttggaaggtgaggaacacagccatcgagaggagagatctggtccgccatccagtgcccctcatgccggagtttcaaaggagcatccgcctgcttggcaggagacctaccactcagcagttcatcgataccatcatcaaaaagtacggcacccacctgctcatctcagccacattgggaggggaggaggctttgaccatgtatatggacaaaagtcgcctcgacaggaagtcagggaatgccactcaaagtgttgaagctctgcaccagctcgcatcatcctactttgttgaccgtgatggtaccatgaggaggcttcatgagatccagatatcaactggagcaatcaaggtcacagagacacgcactgggcctctgggctgtaacagctatgacaatctggactctgtgagttccgtccttctgcaaagcacggagagcaaactgcaccttcaaggtcttcagataatctttcctcagtatctgcaagagaagtttgtccagtcggccttgagctatatcatgtgcaatggggagggggagtacctgtgccagaacagccagtgtcgctgccaatgtgccgaggagtttccgcagtgcaactgccccatcacggacatccagatcatggagtacacgctggccaacatggccaagtcttgggccgaagcttataaggacctggagaattcagatgagtttaaatcatttatgaagcgcctccccagcaaccacttcctgaccatcggaagcatccatcagcactggggcaatgactgggacctgcagaaccgctacaagctcctgcagagtgccacggaggcacagagacaaaagatccaacgcactgcccgcaagcttttcggcctcagtgtacgctgtcgccacaatcccaaccaccagctgcctagagagaggacaattcagcagtggcttgcaagggtccagtcactcctctactgtaatgagaatgggttttggggaaccttcctggagagccagcggagctgcgtgtgccacggcagcaccacgctgtgccagcgccccatcccctgcgtgataggcgggaacaacagctgcgccatgtgcagcctggccaacatctccctctgcggctcctgcaacaagggctacaagctgtatcgaggccgctgtgaaccacagaacgtggactcggagcggagcgagcagttcatcagctttgagactgacctggacttccaggacctggagctgaagtacctgctgcagaagatggactcacgcctctacgtccacaccaccttcatcagcaacgagatccgcctcgacaccttctttgaccctcggtggcgcaagcgcatgtccctcactctcaagagcaacaagaaccgcatggacttcatccacatggtgatcggcatgtccatgcgcatctgccagatgcgcaacagcagcctggaccccatgttctttgtctatgtcaacccctttagcgggagccattcggagggctggaacatgcccttcggggaatttggctacccacgctgggagaagatccgtctccaaaacagccagtgctacaactggactcttttgctgggcaatcggtggaaaacatttttcgagacggtccacatctacctacgtagtcggactcggctacctaccctactgcgaaatgagactggccagggccccgtggacctgtcggatccctccaagaggcagttctacatcaagatctcagacgtgcaggtgtttgggtatagcctgaggttcaacgccgacctcctgcgcagtgcagtgcagcaggtcaaccagtcctacacacagggcggccagttctattcctcttcgtcagtgatgctcctcttgttggatattcgggaccgaattaatcgcctggcccctcctgtggccccggggaaaccccagctggacttgttctcctgtatgctgaaacaccgcctgaaactgaccaacagcgagatcatcagggtgaaccacgccttggacctgtacaacacggagatcctcaaacagtcggaccagatgacagccaaactctgctaacccgggactccttgccatggacttttcctgttgttgtacacacacaacagaacaaaatgaagcaaaacaaaacaaaaaaacccacaaaaatttgtaaaatgtaattaatattcaaagaaaaggaggaaaatcttcatttgttggaaatgaaaacgttctagcaactgtataaaagcgttgggcatgtttgttatttctatactcactctgtcatgaagaagggtctcagccttttgtggagcattgagggagttgcttcttaggcctcaggtgctgtattgggggagaagggagaaagcatatgcaatgaattgtaaagatctctgctgtgcaggtgctaagattaaacactaaaaagaaagagagatatatgtaatgtacaactgacactgccatttttcctttttggaggaaatggacatagataaagaagatatttcttcggttaagattt

SEQ ID NO: 720 - DNA, 1578 bp, Homo sapiens
aaggtttaaagggcgcctccatggggggcgctcagctggagctaccgagcggtgccaggccaggtgtgtgcgtccgtcggtctttccgtgcccacgccggagaccagccccggaggccgcctgggcctatccctgtgccaggcaccatgaagcaggagtctgcagccccgaacaccccgcccacctcgcagtcccctacgccgtccgctcagttcccccgaaacgacggcgaccctcaagcgctgtggattttcgggtacggctccctggtgtggaggcccgacttcgcctacagcgacagccgtgtgggcttcgtgcgcggctacagccgccgtttctggcagggagacaccttccatcggggcagcgacaagatgcctggccgtgtggtgacgctccttgaagatcatgagggctgcacttggggcgtggcataccaagtgcaaggggagcaggtaagcaaggccctgaagtacctgaatgtgcgagaggcagtgcttggtggctacgataccaaggaggtcaccttctatccccaagatgctcctgaccaaccactgaaggcattggcctatgtggccaccccacagaaccctggttacctgggccctgcgcctgaagaggccattgccacgcagatcctggcctgccggggcttctccggccacaaccttgaatacttgctgcgtctggcagacttcatgcagctctgtgggcctcaggcgcaggacgagcacctggcagccatcgtggacgctgtgggcaccatgttgccctgcttctgccccaccgagcaggctctggcgctggtgtgaggggctgagcccctgcggggagtgctcatgtggacatcagggccagacacccactccagtgcacaagacagacttgcgaccgcttgagcccactgagcagatatggtgggtggctggaggcttctctttctcagtccctgcctgtctgccagcctgcagctctcctgcttgacactgacttactacttgaaactttatttattgcaccatgttggtgtggtgggcaggtggagggcctgccctggacacaggggccctgctgagcagtggccccatcctggaacttgaccagattccccccagtgctgctgctaaccccacaccacccaggcctccacctccccagggagtctccaagagcctcgatcctctgctcactcagcccagccatccatagccctgggaattccacctgccaaggatcccagcaggctggatgagggatagtagggcatgaggagaaggagccctgtaaggactgaggccccggccagcccttctcctccaccagttccccagagcagagctggagctgatgcctggacacagctgctgagcctggcctgggcctcttacccacttggttgttttcttgtccctctgtctgtctgtctatctacttgtctgtctgggccactcctgcctgtgtgttggtctattcctgggaagctcatcactacaggccctggcaaccttcccagtctgtcccatactgttacccataaaactatctctttatctgtgcaaaaaaaaaaaaaaaaaa

SEQ ID NO: 721 - DNA, 2723 bp, Homo sapiens
gggagaaacgttctcactcgctctctgctcgctgcgggcgctccccgccctctgctgccagaaccttggggatgtgcctagacccggcgcagcacacgtccgggccaaccgcgagcagaacaaacctttggcgggcggccaggaggctccctcccagccaccgcccccctccagcgcctttttttccccccatacaatacaagatcttccttcctcagttcccttaaagcacagcccagggaaacctcctcacagttttcatccagccacgggccagcatgtctgggggcaaatacgtagactcggagggacatctctacaccgttcccatccgggaacagggcaacatctacaagcccaacaacaaggccatggcagacgagctgagcgagaagcaagtgtacgacgcgcacaccaaggagatcgacctggtcaaccgcgaccctaaacacctcaacgatgacgtggtcaagattgactttgaagatgtgattgcagaaccagaagggacacacagttttgacggcatttggaaggccagcttcaccaccttcactgtgacgaaatactggttttaccgcttgctgtctgccctctttggcatcccgatggcactcatctggggcatttacttcgccattctctctttcctgcacatctgggcagttgtaccatgcattaagagcttcctgattgagattcagtgcatcagccgtgtctattccatctacgtccacaccgtctgtgacccactctttgaagctgttgggaaaatattcagcaatgtccgcatcaacttgcagaaagaaatataaatgacatttcaaggatagaagtatacctgattttttttccttttaattttcctggtgccaatttcaagttccaagttgctaatacagcaacaatttatgaattgaattatcttggttgaaaataaaaagatcactttctcagttttcataagtattatgtctcttctgagctatttcatctatttttggcagtctgaatttttaaaacccatttaaatttttttccttacctttttatttgcatgtggatcaaccatcgctttattggctgagatatgaacatattgttgaaaggtaatttgagagaaatatgaagaactgaggaggaaaaaaaaaaaaaagaaaagaaccaacaacctcaactgcctactccaaaatgttggtcattttatgttaagggaagaattccagggtatggccatggagtgtacaagtatgtgggcagattttcagcaaactcttttcccactgtttaaggagttagtggattactgccattcacttcataatccagtaggatccagtgatccttacaagttagaaaacataatcttctgccttctcatgatccaactaatgccttactcttcttgaaattttaacctatgatattttctgtgcctgaatatttgttatgtagataacaagacctcagtgccttcctgtttttcacattttccttttcaaatagggtctaactcagcaactcgctttaggtcagcagcctccctgaagaccaaaattagaatatccatgacctagttttccatgcgtgtttctgactctgagctacagagtctggtgaagctcacttctgggcttcatctggcaacatctttatccgtagtgggtatggttgacactagcccaatgaaatgaattaaagtggaccaatagggctgagctctctgtgggctggcagtcctggaagccagctttccctgcctctcatcaactgaatgaggtcagcatgtctattcagcttcgtttattttcaagaataatcacgctttcctgaatccaaactaatccatcaccggggtggtttagtggctcaacattgtgttcccatttcagctgatcagtgggcctccaaggaggggctgtaaaatggaggccattgtgtgagcctatcagagttgctgcaaacctgacccctgctcagtaaagcacttgcaaccgtctgttatgctgtgacacatggcccctccccctgccaggagctttggacctaatccaagcatccctttgcccagaaagaagatgggggaggaggcagtaataaaaagattgaagtattttgctggaataagttcaaattcttctgaactcaaactgaggaatttcacctgtaaacctgagtcgtacagaaagctgcctggtatatccaaaagctttttattcctcctgctcatattgtgattctgcctttggggacttttcttaaaccttcagttatgatttttttttcatacacttattggaactctgcttgatttttgcctcttccagtcttcctgacactttaattaccaacctgttacctactttgactttttgcatttaaaacagacactggcatggatatagttttacttttaaactgtgtacataactgaaaatgtgctatactgcatactttttaaatgtaaagatatttttatctttatatgaagaaaatcacttaggaaatggctttgtgattcaatctgtaaactgtgtattccaagacatgtctgttctacatagatgcttagtccctcatgcaaatcaattactggtccaaaagattgctgaaattttatatgcttactgatatattttacaattttttatcatgcatgtcctgtaaaggttacaagcctgcacaataaaaatgtttaacggttaaacagtcaaaaaaaaaaa

SEQ ID NO: 722 - DNA, 396 bp, Homo sapiens
actccgccttccacgtgcacccactgcctcttcccttctcgcttgggaactctagtctcgcctcgggttgcaatggaccccaactgctcctgtgccgctggtgtctcctgcacctgcgccagctcctgcaagtgcaaagagtgcaaatgcacctcctgcaagaagagctgctgctcctgctgccctgtgggctgtgccaagtgtgcccaaggctgcatctgcaaaggggcatcggagaagtgcagctgctgcgcctgatgtcgggacagccctgctcccaagtacaaatagagtgacccgtaaaatctaggattttttgttttttgctacaatcttgacccctttgctacattcccttttttctgtgaaatatgtgaataataattaaacacttag

SEQ ID NO: 723 - DNA, 5576 bp, Homo sapiens
gcggccgccgcctgccgggcctcccctcgccgcggccggccgccgcgctcccgcccgggcgcccagctatgtactccccgtactgcctcacccaggatgagttccacccgttcatcgaggcactgctgcctcacgtccgcgctttctcctacacctggttcaacctgcaggcgcggaagcgcaagtacttcaagaagcatgaaaagcggatgtcgaaggacgaggagcgggcggtgaaggacgagctgctgggcgagaagcccgagatcaagcagaagtgggcatcccggctgctggccaagctgcgcaaggacatccggcccgagttccgcgaggacttcgtgctgaccatcacgggcaagaagcccccctgctgcgtgctctccaaccccgaccagaagggcaagatccggcggattgactgcctgcgccaggctgacaaggtgtggcggctggacctggtcatggtgattttgtttaaggggatccccctggaaagtactgatggggagcggctctacaagtcgcctcagtgctcgaaccccggcctgtgcgtccagccacatcacattggagtcacaatcaaagaactggatctttatctggcttactttgtccacactccggaatccggacaatcagatagttcaaaccagcaaggagatgcggacatcaaaccactgcccaacgggcacttaagtttccaggactgttttgtgacttccggggtctggaatgtgacggagctggtgagagtatcacagactcctgttgcaacagcatcagggcccaacttctccctggcggacctggagagtcccagctactacaacatcaaccaggtgaccctggggcggcggtccatcacctcccctccttccaccagcaccaccaagcgccccaagtccatcgatgacagtgagatggagagccctgttgatgacgtgttctatcccgggacaggccgttccccagcagctggcagcagccagtccagcgggtggcccaacgatgtggatgcaggcccggcttctctaaagaagtcaggaaagctggacttctgcagtgccctctcctctcagggcagctccccgcgcatggctttcacccaccacccgctgcctgtgcttgctggagtcagaccagggagcccccgggccacagcatcagccctgcacttcccctccacgtccatcatccagcagtcgagcccgtatttcacgcacccgaccatccgctaccaccaccaccacgggcaggactcactgaaggagtttgtgcagtttgtgtgctcggatggctcgggccaggccaccggacagcattcgcaacgacaggcgcctcctctgccaaccggtttgtcagcatcggaccccgggacggcaactttctgaacatcccacagcagtctcagtcctggttcctctgataagatcgacaaaagaaacaacaaaatgagaagaagaggttcctcgaaaggggggagaagaaattttgagaatggaaaaatcccccagcccagcccagccccaccgaaaagcaaaaattacacgtcgtcagccactcagcccttctctcctccagcccggggacccccgcgggccccagaagcagcccagttctcagagagcccttggaaggggtctcggtggagctgtgcaccagcagccaagcagaaagaaacacgcgacatggactctgtcaagtagaggacagaaagcaagaaaggatgcagaactgccttcctccccctgaccccgccccggccttctggggaaggaacaaagtccccaaacaaagcaaccagcacaattctgaaggggcctggcctccaccctcaccccttcctaggggaaccccaccctccacacagccggagctgccctagggagcctggagggccagcttgtaaagatgatggggtttagatccctcaggctctcccctccagactccgcccttccctccctccctccctccctccctctctgccaaggctccagcttcttcccccagctgctcccgaccaggagggggagagcagcctccacttaccccaccccacccttgggctaaaagcccccaggcgggcagggggtgacccctggagctagttgcgtgtcccagaatggagggtgttctgacaccccaccctgagccgcaagagcagtcctggggccctggacccctctgtacagtccgtaggaaaaagtcggaatgctctcgacggcctcgtcccagcctgggacaggccccctttcccctctctctgcaggccaggagggcctccttcctgccacgagggaggggagtcgggccccaggtcgcccccgcccccagccctgcatgcaggtgccctcgctccgccccatcagttcctgcccctgcccctcatgcagactgccctgctggggccgggccggagggtggagcagaaaggggaccccggagccgagcgaggaggaccaggcagccgccgctgccgcgctaagccaccacctgcgcttaggtaggcgtcctgctcgccgactttcagttccttgggagggtgttgggtgtcgtccttttcaaaagtgttttggagctttctgtgccccccgactttcccccgcctccccgccccccacgtggccacttttctctggattttagctgtaatgtctttactctttatttaggggtggggcattcattgtttgggtcttttgctgttggaatgggaactcctcctccatttgagcaacttgggaacaatttggtaacacaccacaggaagtagctctcccccccagccccctcctccctcaagggagggttggggggcctgtccagagggtcttcagaagcccccctgggagggaggggaggatgagcacgcccagctcccctccagggtgtgacttggcccctctggcttgtctttctgtgccttactcctcctcctgcgtctcccgttcctggccccttcttgagtccttgtgcctctctctttctctctctttcttaattgtatgaaaacacaaagcacaggtcaggatcctctgagagaaaatcaacattgcaccacgtaggggtgggctatgggctgtatttattgtgaatctagtttgtgaggctgtggccccgagctggcggagggagggaagaggagggagtgacgggaggggaggaggtcagcgacctggggccgtagcggcaggcgaacggtgcctgctacccagctggaagccacaaggtggctggctccaggggcggcttttgttggaagttgagtgaagccctccccctgtcctcagcgtgcagccctagaggaccccagggctgaggggcagtggatcctgcgggagtctcccggggcgtggggagtaaggccccgggggtggggggccgggtgggccgggcgtgacgcgcggtcaaagtgcaatgatttttcagttcggttggctaaacagggtcagagctgagagcgaagcagaaggggctccctgtccggcccacgtgccctttccctcgacgacagtcgagggctcgggctctgtgggactgtgggagctagggtctgcggggcgcctgcccgggcgaggtcggaagctgcaggccagctgggcccgggccggagcgtgcccggcggggctgcccgggcgggcagggggtgggggctgctcctttcccaagtggtgttgtgaggggcaatgagggcaacaggagatgtggggacgtgttaggagagaaaaaaaaaaaaacaaaaatatatatgggggaaattaacttttttttttcattgaaccaagtgcaatgcatcagagagttttcctatctttgtatgttaagagattaagaaaaaaaaattctatttttgttgtaatgtcctcgcggctctggggacgctaaaagaaccgggcctgccccgccctgcgcggggataacgaaagctgagtgtttttcccttttttttgttcgtttttagtttttttttttttaagtcgttttcctgcgttgacgaggatgatctggggtttttatttgtttcgtcgttcgttctgtttcggtgggagggctgaaggaaacgttcacattttagagtttaaaaaaaacacctcgacatttaaaaaatcaaccaacacaagatcaaaaaggaaaaggacgagagaaaaattatttttaagataattaaacataaaaccctggtgcttcttacattataaagtacgttttaaagaacccacaaactattatacataagtttatgaatcaattaaatatcctgcacttgttaggaatacgcatatcccttctttgttgagtttaacggaacgggacagcggcgtgcccccggcggctggactgctccggccgcgggtctccccgggcgcccctccctggggcccagcacccctcctcgccccatccccgtccgggtacgggggcgcggcaggggtccccggcccctcccccgcagaggtcaatgccaacgaacaaacgtcccctccctccctccctctccgccccgagcgcccttctttgagccagacgccaacttgaccctcaccagcattatcaggagcgcgctcagcaagttggtagtttcctcccccctttcccggcgcccctcccgcccccattcaacatctctcatcctatccccgaccccctccggggaacaccgggaaggctcgacgctccaggacaggaccagccacgcagacaggtcgatttgcccaggcccgcgcccgcacgcacgcacgcacacggccccgcacacagccccgccccaccccgcaaccagccctgtcgactgccttatacacccgcccccgcgctggccggccgacctagtgccttgttctcacccccgtgctggcggagcggacgccgcgctctgggtcccagaggggccgggtggctcagacgacccaccactcccccaccctgaccgtgctgaacagacccccccacacgagagaaaataaaggagcaataaagtcacgagaactttcgtcccccaatcgagagcccgaggggcaccccagccccgcctctgctcccccccaccccacccaccctcggggcgcccccctccccccgcaagccagcctgggccagccccgcttcggcccctcccgggagatccgtgcgcccgaccagcaccagcatcgcggaccgcaaaggccgcccgtcccgtcaaacaagtttcttcttaggctaagaaacgcagtatatacgagtatctctatatatagtactaatggatttggtgtgcttcccccttagcgtccccctccctctgctcctcctccttcagcctggtctccccctcttctctgccctccacccccgtctctgcactgagatacataagaaacaagggtagtttactgtctgttttgttttctgggttttcagtgtcctagcggaatgcaagtaggcagccagcccgtctgttccctctccgccccgccccgccccgcccccgtcactgcgcttctgttataccatctttgcctgactctctccggcttctccattgaatggctaatgtgtatgtgaaataaagaaataaagaaaaacaaacgcga

SEQ ID NO: 724 - DNA, 5167 bp, Homo sapiens
ctggagtctcccctggtcgggagcctcagccttctggagactgacaccaccctcttactcagagacgaatcgttttgtcgttgccttcacctccctgaccacaagtgctccggggctctttctgagggaggcagctgttctaggcgggaggctggagtctcctgggcctggacgcaccccggggtgtgagtgatgggtatgcctgaaaggaggggaagtggcgcggctttaatcatctgggctagtccccggcgggcctgggggaacagggaaactggaggcggccttaaagcgtcaggatgagacatcgcaagaggagctgcagatactgagcgtgcgccccgggttctcgccgccttctctccgccgagcagcccttcggccaccctttgcccttaaaaatctgcagactgcgcctcctctccgcgggagcgagacctagcaggcccggggctgggcgtgccctcgcctgccacgctgcgcgctgccctcagccgggccgctggggccgtgcagtgcaccgggcacgccgcgccaggctgggggcaggcaccgagcctccgtgggaggtcccgaggcagcttcgcctgctcgccctggctccagccctcacctgccgcagccttagctgagcagccgccgccactgggcgccccccgctccccacttcgccagcgcccgctcctcggctcggcccggggtagtttgtagggacgcagctctccacgtgcgcgactgcgaggctggacgctacgggctcctggaaaggagacaccagcatttgccacaatgctgtcatccactgactttacatttgcttcctgggagcttgtggtccgcgttgaccatcccaatgaagagcagcagaaagacgtcacactgagagtatctggagaccttcatgttggaggagtgatgctcaagttagtagaacagatcaatatatcccaagactggtcagactttgctctttggtgggaacagaagcattgctggcttctgaaaacccactggaccctggacaaatatggggtccaggcagatgcaaagcttctcttcacccctcagcataaaatgctgcgccttcgtctgccgaatttgaagatggtgaggttgcgagtcagcttctcagctgtggtttttaaagctgtcagtgatatctgcaaaatcctgaatattagaagatcagaagagctttccttgttaaagccgtctggtgactattttaagaagaagaagaaaaaagacaaaaataataaggaacccataattgaagatattctaaacctggagagttctccaacagcttcaggttcatcagtaagtcctggtttatacagtaaaaccatgacccctatatatgaccccatcaatggaacaccagcatcatccaccatgacttggttcagtgacagccctttgacggaacaaaactgcagcatcctcgcattcagccaacccccccagtccccagaagcacttgcggatatgtaccagcctcggtctctggttgataaagccaagctcaatgcaggttggctagactcctcacgctcccttatggaacaaggcatccaagaggatgagcagctgctcttacgatttaaatattattctttcttcgacttgaatcctaaatatgatgctgtccgaataaaccaactctatgagcaagccaggtgggccattctcttagaagaaattgattgcacagaggaagaaatgttgatctttgcagctctacagtaccacattagcaaactgtcgttgtctgctgaaacacaggattttgcaggcgagtccgaggttgatgaaatagaagcggcgctttctaatttggaagtaaccctagaaggtggaaaagcggacagccttttggaggacattactgatatccctaaacttgcagataatctcaaattatttaggcccaagaagttactaccaaaagctttcaaacaatattggtttatctttaaagacacatccatagcatactttaaaaataaggaacttgaacaaggagaaccactagaaaaactaaatcttagaggctgcgaagttgtgcccgatgtaaatgtagcaggaagaaaatttggaatcaagttactaatccctgttgccgatggtatgaatgaaatgtatttgagatgtgaccatgagaatcaatacgcccaatggatggctgcctgcatgttggcatcgaagggcaaaaccatggcagacagctcctaccagccagaggtcctcaacatcctttcatttctgaggatgaaaaacaggaactctgcatctcaggtggcttccagtctcgaaaacatggatatgaacccagaatgttttgtgtcaccacggtgtgcaaaaagacacaaatccaaacagctggccgcccggatcctggaggcgcaccagaacgtggcccagatgcccctggtcgaagccaagctgcggttcatccaggcgtggcagtcactgcctgagtttggcctcacctactaccttgtcagatttaaaggaagcaaaaaagatgacattctgggagtttcatataacaggttgattaaaattgatgcagccaccgggattccagtgacaacatggagattcacaaatatcaaacagtggaatgtaaactgggaaacccggcaggtggtcatcgagtttgaccaaaacgtctttactgctttcacctgcctgagtgcagattgcaagattgtgcacgagtacattggcggctacattttcttgtccacccgctccaaggaccagaatgaaacactcgatgaggacttgttccacaaattgaccggcggtcaggattgaaacaagcacgcgtgctcggctcacaccaacaaggcaagccaaaggcgcccctccccagagggatccctaacgtgcccagcatgtagattctggactaacagacaacatacattcaccgctggtcacccagatcctcattcaaacccactgctggcacatccctttccttactttgccctgtgctaccagccacggaaggagcctctcttgttttttctataaaatgggtaggcaggagaaaagcaggtgccctaagattgctctaaggcccagcatgtggttacagttctctgacttgcagaacctgccaggtgtatggctacaagttatcctcgtgctgatctgtctcattactaagtcaatggagaagacagaaaggtaaaaatcacgtgtagcaagaacaactcttatttcacaaactcaggtatgaaacgaaacgcctgtccttcatggaactgcttttagctcctgtcttttcaaaatggcagagggagttcctacacacactttttccctggaggccaaggtctaggggtagaaaggggaggggtggggctaccaggtagcagttgacaacccaaggtcagaggagtggccctcagtgtcatctgtccacagtgatacctgccaagatgaccactgacccacatctggtcttagtcattggtctcctcagatttctggggccacctgcaagccccattccattcctacagatctctcagccacctgtaagtcctttgtgaagatgtgggtgacacagggggacaggaaaacccatttctcaacccagatccatgtctccactgcttctactctgggttgggattcaggaagacaggcacagtcctctctgttcatagaaacacctgccagtgtcaaggattccagtcaggtgtctatcccaactggtcagggagagaagggcagacccattctcaaagaccaccatgtccaaggtctgacagctccccactggctgcccccacaggggctttaggctggtctgggtcatggggaagcgtccctcttatcgctggtctgtgttctcctggatttggtatctatgttggtacgactcctggccttttatctaaaggactttggcttttgtaaatcacaagccaataatagacttttttctccccctctgttttttgctgtgtcatctctgccttgagactgccttgagacagtgcttgccttgagagagtgagccaattaacagctgcctgaattgtcattttccattttggtttgttagaggtgggaggggtgggttttgagaaggtcaaaagcaataccagaagtaaagggaaatatcagacaatattttattattttttcatagatgttctgccacacaaagaacttggggtgtaaggataaggcaaaagctccaatcccatttttcagttctcctaggatgcacccctcagggagcctggccagagttccgaggcccgtgagcgtcagctgttgctttattttccatcaaagccctctgagaagtgagacctcagcaattccgggagccacatagagacagacttggcaagggaccccctggttctgagccagtagctgccatctggaaattcctcttttagcctctccttagaggtgaatgtgaatgaagcctcccaggcacccgctgaatttctgaggccttgcttaaagctcagaagtggtttaggcatttggaaaatctggttcacatcataaagaacttgatttgaaatgttttctatagaaacaagtgctaagtgtaccgtatatacttgatgttggtcatttctcagtcctatttctcagttctattattttagaacctagtcagttctttaagattataactggtcctacattaaaataatgcttctcgatgtcagattttacctgtttgctgctgagaacatctctgcctaatttaccaaagccagaccttcagttcaacatgcttccttagcttttcatagttgtctgacatttccatgaaaacaaaggaaccaactttgttttaaccaaactttgtttggttacagttttcaggggagcgtttcttccatgacacacagcaacatcccaaagaaataaacaagtgtgacaaaaaaaaaaaaaaacaaacctaaatgctactgttccaaagagcaacttgatggttttttttaatactgagtgcaaaaggtcacccaaattcctatgatgaaattttaaattaatgggcacctttcaacatcatttgcttccttatctacagttgattcagaaatctgcattttttattcttttatatgacttttaagtaaaagatttatatggatttgaaaaaaaaaaaaaaaaa

SEQ ID NO: 725 - DNA, 3357 bp, Homo sapiens
agaacagtttcatttccggagccaccggaagcagcttgcaaatggcgtctccctcgctggagcggccagaaaaaggcgctggaaaaagtgaatttcgtaaccagaagccgaagccggagaaccaagatgaatcagaactccttacggttcctgatggttggaaggaaccagctttttccaaagaggacaatcccagaggacttttggaggagagcagtttcgcaactttgttcccaaaatacagggaagcttacttgaaagagtgttggccattggtgcagaaagccttaaatgaacatcatgttaatgcaaccctggacctgatcgaaggcagcatgactgtttgtactacaaagaagacttttgatccatatatcatcattagggccagagatctgataaaactgttagcaaggagtgtttcatttgaacaggcagtacgaattcttcaggatgatgttgcatgtgacatcattaaaataggttctttagtaaggaataaagagagatttgtaaaacgaagacaacggcttattggtcccaaaggatctacattgaaggcattggaactcttaactaattgttacattatggttcagggaaacacagtttcagccattggaccttttagtggcttaaaagaggttagaaaagtagtccttgatactatgaagaatattcatccaatttataacattaaaagcttaatgattaagagagagttggcaaaagattctgaattacgatcacaaagttgggagagatttttgccacagttcaaacacaaaaatgtgaataaacgcaaggaaccaaagaaaaaaactgttaagaaagaatatacgccattcccaccaccacaaccagaaagtcagatcgataaagaattggctagtggtgaatactttttgaaggcaaatcagaagaagcggcagaaaatggaagcaataaaggctaaacaagcagaagccatcagtaagagacaagaggaaagaaacaaagcatttattccacctaaggaaaaaccaattgtgaaacctaaggaagcttctactgaaactaaaattgatgtggccagcatcaaggaaaaggttaagaaagcaaagaataagaaactgggagctcttacagctgaagaaattgcacttaagatggaggcagatgaaaagaaaaagaagaaaaaaaagtaacatacccaaaactccttgactagaactatctccttttgtaaaggattttgagatatcaggcattagttgccttatttgtgagaaattttctgagggctttttttttttttggtggtggtggttgttcatagaagagtgttctttataaattatattattattgtattttttgaaaaatttatacgagaaagtggtatataagtctttgtatacattacgaccattgtgattatccattaaatccagtgtctgatgctattggttagtaatgatgtcccagcatttgatgttccctctctaatgataacaagtaaatatttaggtttatcccttttgaaagtttggttttacttttaacagtccatgaacagaaaattaaggcctctaaaatcagatcccctagttactcctctgttctgaatctggggaagtagtaaaccaaaaagacagggaaaaccagatatttagagtcgaagcagcatgcaaaaaataataatgtttttaactaatgaaggctactggagttactaagaatcacctaaaaatgtgctactgtaccttgctcattttgcagatttagaagctgaaacatgggttaggttacttactaaaagtccacctgtggcaacctgcaaataatgcttatttatactaaagatgagtttatctgatagagttaggaaatttcttcttttgagtaagagtattgctataacatatatttttttctgaaatgttttaaaatagaagtacacctaattgttattggttaaaaaaaaagccatatgtgaatgaggttggtttttgggttttttctttcctgaattgtattagtccaaaagaactaaattagggtacttgtgctgtaccaaaatggtaattataacagacagtattagaattactgaattaacaatgagaaagagagaagtgtatctgttacgtggatatatgggccagcctggatatacaacagagtagtaacctgtgaaacaaacatagaatatcctcttagacattgttcctcataatgcactgacagaattcacatagctcttaatgaaacaatttaagattgatgtacgtacgtttgacttggtctcgctgtcggttaactgtaaagttagggggaagaaagaaaaaaaattaaaagggtagacacagttgagagttttattttaaaaagctaagtcttataattatgaccattaacttgctttggctttattgcagtgactttccaagtttaattattcaaaactttttgaactgactgaattaacttggtatttttaagttgactttttacataaactttataaaccttttataaaaaggaaactataccattactataaatggaaaatcattttacacatcatacctagcaggtaataaaatttaaaaaataaaaattaaatattagaatgtgagaaatttattaaaatatagttctaaaaataagtttcttcctgagaagaatgatactgtttatgatgaatccatagtgaaaagacagtgacctctctttcatccagtctagtatatcactaaatcatcattacgatgtttggctatcaagtcattaattactgtcctcctttcactgagctttattcaaattttgacaatcagagcactgggaagaaataaattccacaactgcctttagccttctggatactttcttttataaaatagaaaccttttccacaccagttctgcagcagtcgctattagatgctcgtggtagaacccatcaatcatctggtcctctgggtactggtgagcatccctggtcttcatacctgtgagtgggctttgtggtgaattactgtaaatatgctaccctcacttttcttggcagttatgtcgatgaaatcaagagtgtgatgttctagttatttttttttatatatatttttaaatgttcaatattcaactattgaaacaaatgtacatctgtgaactagctaaaatcatcttatgtaccactaatatgcccagcacattttgtaaaacagtcctgatttggcctccaagggtatttattgaactaccagcagtatctaggagaccacgaaggaataccacgaaggaatttatgctccagtgcttgccataatttgtctgagaaggaatctgttaaataaaagcttttatcctctaa

SEQ ID NO: 726 - DNA, 4131 bp, Homo sapiens; identical to SEQ ID NO: 436

SEQ ID NO: 727 - DNA, 98 bp, Homo sapiens
tggatcgatgatgagtcctccaaaaaaaacattccttggaaaagctgaacaaaatgagtgaaaactcataccgtcattctcatcggaactgaggtcca

SEQ ID NO: 728 - DNA, 2672 bp, Homo sapiens
gcgtggccggcgccggctcttgcggccgagcagagttgcggcgtgggaaagagccgctaggagcagaccgcgccgccgccggagccgcgcctgcccaggcccggggagggaggaggcgggcgtcagggtgctgcgccccgctcggcgtccgagcttccggccgggctgtgccccgcgcggtcttcgccgggatgaagcgcccctgcgaggagacgacctccgagagcgacatggacgagaccatcgacgtggggagcgagaacaattactcggggcaaagtactagctctgtgattagattgaattctccaacaacaacatctcagattatggcaagaaagaaaaggagagggattatagagaaaaggcgtcgggatcggataaataacagtttatctgagttgagaagacttgtgccaactgcttttgaaaaacaaggatctgcaaagttagaaaaagctgaaatattgcaaatgacagtggatcatttgaagatgcttcaggcaacagggggtaaaggctactttgacgcacacgctcttgccatggacttcatgagcataggattccgagagtgcctaacagaagttgcgcggtacctgagctccgtggaaggcctggactcctcggatccgctgcgggtgcggcttgtgtctcatctcagcacttgcgccacccagcgggaggcggcggccatgacatcctccatggcccaccaccatcatccgctccacccgcatcactgggccgccgccttccaccacctgcccgcagccctgctccagcccaacggcctccatgcctcagagtcaaccccttgtcgcctctccacaacttcagaagtgcctcctgcccacggctctgctctcctcacggccacgtttgcccatgcggattcagccctccgaatgccatccacgggcagcgtcgccccctgcgtgccacctctctccacctctctcttgtccctctctgccaccgtccacgccgcagccgcagcagccaccgcggctgcacacagcttccctctgtccttcgcgggggcattccccatgcttcccccaaacgcagcagcagcagtggccgcggccacagccatcagcccgcccttgtcagtatcagccacgtccagtcctcagcagaccagcagtggaacaaacaataaaccttaccgaccctgggggacagaagttggagctttttaaatttttcttgaacttcttgcaatagtaactgaatgtcctccatttcagagtcagcttaaaacctctgcaccctgaaggtagccatacagatgccgacagatccacaaaggaacaataaagctatttgagacacaaacctcacgagtggaaatgtggtattctcttttttttctctcccttttttgtttggttcaaggcagctcggtaactgacatcagcaacttttgaaaacttcacacttgttaccatttagaagtttcctggaaaatatatggaccgtaccatccagcagtgcatcagtatgtctgaattggggaagtaaaatgccctgactgaattctcttgagactagatgggacatacatatatagagagagagtgagagagtcgtgtttcgtaagtgcctgagcttaggaagttttcttctggatatataacattgcacaagggaagacgagtgtggaggataggttaagaaaggaaagggacagaagtcttgcaataggctgcagacattttaataccatgccagagaagagtattctgctgaaaccaacaggttttactggtcaaaatgactgctgaaaataattttcaagttgaaagatctagttttatcttagtttgccttctttgtacagacatgccaagaggtgacatttagcagtgcattggtataagcaattatttcatcagttctcagattaacaagcatttctgctctgcctgcaggcccccaggcacttttttttttggatggctcaaaatatggtgctgctttatataaaccttacatttatatagtgcacctatgagcagttgcctaccatgtgtccaccagaggctatttaattcatgccaacttgaaaactctccagtttgtaggagtttggtttaatttattcagtttcattaggactatttttatatatttatcctcttcattttctcctaatgatgcaacatctattcttgtcaccctttgggagaagttacatttctggaggtgatgaagcaaggagggagcactaggaagagaaaagctacaatttttaaagctctttgtcaagttagtgattgcatttgatcccaaaacaagatgaatgtatgcaatgggatgtacataagttatttttgcccatgcctaaactagtgctatgtaatggggttgtggttttgtttttttcgatttcgtttaatgacaaaataatctcttaatatgctgaaatcaagcacgtgagagtttttgtttaaaagataagagacacagcatgtattatgcacttcatttctctactgtgtggagaaagcaataaacattatgagaatgttaaacgttatgcaaaattatacttttaaatatttgttttgaaattactgtacctagtcttttttgcattactttgtaacctttttctatgcaagagtctttacataccactaattaaatgaagtcctttttgacta

SEQ ID NO: 729 - DNA, 1667 bp, Homo sapiens
gctcagcaaggggtccgtccttctctgtcactgtctcttttgcctgttgtaattctgtctgcctctctgggactctgcctgtctcactctttctgtctgtgcctctcctcactcttgttctttctgcctgaatcacagccctcagtttttctgtcctcatgcatttgtctttgtggctctttccgtctttctgcccttgacaccatcccctctcccagtgcttcccctctgcttccagatcgcttcatgacttaggcagggaaacagaggtcagggcctccttccaggcttccctctgcatcttactgagtatgcaggtcggaagagcctcgggtcctgcctccgcgggtggcctagagccaaaggaaggcggagcccgtcggggcgggattggcccttagggccacctcataaagcctggggcgaggggcacaacggccttgggaaggagccctgctggggccgtccagtcccccagacctcacaggctcagtcgcggatctgcagtgtcatgcctgggagccctcggcccgcgccaagctgggtgctgttgctgcggctgctggcgttgctgcggcccccggggctgggtgaggcatgcagctgcgccccggcgcaccctcagcagcacatctgccactcggcacttgtgattcgggccaaaatctccagtgagaaggtagttccggccagtgcagaccctgctgacactgaaaaaatgctccggtatgaaatcaaacagataaagatgttcaaagggtttgagaaagtcaaggatgttcagtatatctatacgccttttgactcttccctctgtggtgtgaaactagaagccaacagccagaagcagtatctcttgactggtcaggtcctcagtgatggaaaagtcttcatccatctgtgcaactacatcgagccctgggaggacctgtccttggtgcagagggaaagtctgaatcatcactaccatctgaactgtggctgccaaatcaccacctgctacacagtaccctgtaccatctcggcccctaacgagtgcctctggacagactggctgttggaacgaaagctctatggttaccaggctcagcattatgtctgtatgaagcatgttgacggcacctgcagctggtaccggggccacctgcctctcaggaaggagtttgttgacatcgttcagccctagtagggaccagtgaccatcacatcccttcaagagtcctgaagatcaagccagttctccttccctgcagagctttggccattaccacctgacctcttgctgccagctaataagaagtgccaagtggacagtctggccactgtcaaggcagggaaggggccatgacttttctgccctgccctcagcctgttgcccctgcctcccaaaccccattagtctagccttgtagctgttactgcaagtgtttcttctggcttagtctgttttctaaagccaggactattccctttcctccccaggaatatgtgttttcctttgtcttaatcgatctggtaggggagaaatggcgaatgtcatacacatgagatggtatatccttgcgatgtacagtatcagaaggtggtttgacagcatcataaacaggctgactggcaggaatgaaaacaagaaaaaaaaaaaaaaaaaaaaaaaaaaaaaaaaaaaa

SEQ ID NO: 730 - DNA, 1944 bp, Homo sapiens
aatttctcactgcccctgtgataaactgtggtcactggctgtggcagcaactattataagatgctctgaaaactcttcagacactgaggggcaccagaggagcagactacaagaatggcacacgctatggaaaactcctggacaatcagtaaagagtaccatattgatgaagaagtgggctttgctctgccaaatccacaggaaaatctacctgatttttataatgactggatgttcattgctaaacatctgcctgatctcatagagtctggccagcttcgagaaagagttgagaagttaaacatgctcagcattgatcatctcacagaccacaagtcacagcgccttgcacgtctagttctgggatgcatcaccatggcatatgtgtggggcaaaggtcatggagatgtccgtaaggtcttgccaagaaatattgctgttccttactgccaactctccaagaaactggaactgcctcctattttggtttatgcagactgtgtcttggcaaactggaagaaaaaggatcctaataagcccctgacttatgagaacatggacgttttgttctcatttcgtgatggagactgcagtaaaggattcttcctggtctctctattggtggaaatagcagctgcttctgcaatcaaagtaattcctactgtattcaaggcaatgcaaatgcaagaacgggacactttgctaaaggcgctgttggaaatagcttcttgcttggagaaagcccttcaagtgtttcaccaaatccacgatcatgtgaacccaaaagcatttttcagtgttcttcgcatatatttgtctggctggaaaggcaacccccagctatcagacggtctggtgtatgaagggttctgggaagacccaaaggagtttgcagggggcagtgcaggccaaagcagcgtctttcagtgctttgacgtcctgctgggcatccagcagactgctggtggaggacatgctgctcagttcctccaggacatgagaagatatatgccaccagctcacaggaacttcctgtgctcattagagtcaaatccctcagtccgtgagtttgtcctttcaaaaggtgatgctggcctgcgggaagcttatgacgcctgtgtgaaagctctggtctccctgaggagctaccatctgcaaatcgtgactaagtacatcctgattcctgcaagccagcagccaaaggagaataagacctctgaagacccttcaaaactggaagccaaaggaactggaggcactgatttaatgaatttcctgaagactgtaagaagtacaactgagaaatcccttttgaaggaaggttaatgtaacccaacaagagcacattttatcatagcagagacatctgtatgcattcctgtcattacccattgtaacagagccacaaactaatactatgcaatgttttaccaataatgcaatacaaaagacctcaaaatacctgtgcatttcttgtaggaaaacaacaaaaggtaattatgtgtaattatactagaagttttgtaatctgtatcttatcattggaataaaatgacattcaataaataaaaatgcataagatatattctgtcggctgggcgcggtggctcacgcctgtaatcccagcactttgggaggccgaggcgggcggatcacaaggtcaggagatcgagaccatcttggctaacacggtgaaaccccgtctctactaaaaatacaaaaaattagccgggcgcggtggcgggcacctgtagtcccagctactcgggaggctgaggcaggagaatggcgtgaacctgggaggcggagcttgcagtgagccaagattgtgccactgcaatccggcctgggctaaagagcgggactccgtctcaaaaaaaaaaaaaaaaagatatattctgtcataataaataaaaatgcataagatataaaaaaaaaaaaaaa

SEQ ID NO: 731 - DNA, 466 bp, Homo sapiens
cttgccgcgctgcactccaccacgcctcctccaagtcccagcgaacccgcgtgcaacctgtcccgactctagccgcctcttcagctcgccatggatcccaactgctcctgcgccgccggtgactcctgcacctgcgccggctcctgcaaatgcaaagagtgcaaatgcacctcctgcaagaaaagctgctgctcctgctgccctgtgggctgtgccaagtgtgcccagggctgcatctgcaaaggggcgtcggacaagtgcagctgctgcgcctgatgctgggacagccccgctcccagatgtaaagaacgcgacttccacaaacctggattttttatgtacaaccctgaccgtgaccgtttgctatattcctttttctatgaaataatgtgaatgataataaaacagctttgacttgaaaaaaaaaaaaaaaaaaaaaaaaaaaaaaaaaaaaaaaaaaaaaaaa

SEQ ID NO: 732 - DNA, 4916 bp, Homo sapiens
aaaaagtacagagtccagggaaagacttgcttgtaactttatgaattctggatttttttttttcctttgctttttcttaactttcactaagggttactgtagtctgatgtgtccttcccaaggccacgaaatttgacaagctgcacttttcttttgctcaatgatttctgctttaagccaaagaactgcctataatttcactaagaatgtcttctaattcagatactggggatttacaagagtctttaaagcacggacttacacctattgtgtctcaatttaaaatggtgaattactcctatgatgaagatctggaagagctttgtcccgtgtgtggagataaagtgtctgggtaccattatgggctcctcacctgtgaaagctgcaagggattttttaagcgaacagtccaaaataataaaaggtacacatgtatagaaaaccagaactgccaaattgacaaaacacagagaaagcgttgtccttactgtcgttttcaaaaatgtctaagtgttggaatgaagctagaagctgtaagggccgaccgaatgcgtggaggaaggaataagtttgggccaatgtacaagagagacagggccctgaagcaacagaaaaaagccctcatccgagccaatggacttaagctagaagccatgtctcaggtgatccaagctatgccctctgacctgaccatttcctctgcaattcaaaacatccactctgcctccaaaggcctacctctgaaccatgctgccttgcctcctacagactatgacagaagtccctttgtaacatcccccattagcatgacaatgccccctcacggcagcctgcaaggttaccaaacatatggccactttcctagccgggccatcaagtctgagtacccagacccctataccagctcacccgagtccataatgggctattcatatatggatagttaccagacgagctctccagcaagcatcccacatctgatactggaacttttgaagtgtgagccagatgagcctcaagtccaggctaaaatcatggcctatttgcagcaagagcaggctaaccgaagcaagcacgaaaagctgagcacctttgggcttatgtgcaaaatggcagatcaaactctcttctccattgtcgagtgggccaggagtagtatcttcttcagagaacttaaggttgatgaccaaatgaagctgcttcagaactgctggagtgagctcttaatcctcgaccacatttaccgacaagtggtacatggaaaggaaggatccatcttcctggttactgggcaacaagtggactattccataatagcatcacaagccggagccaccctcaacaacctcatgagtcatgcacaggagttagtggcaaaacttcgttctctccagtttgatcaacgagagttcgtatgtctgaaattcttggtgctctttagtttagatgtcaaaaaccttgaaaacttccagctggtagaaggtgtccaggaacaagtcaatgccgccctgctggactacacaatgtgtaactacccgcagcagacagagaaatttggacagctacttcttcgactacccgaaatccgggccatcagtatgcaggctgaagaatacctctactacaagcacctgaacggggatgtgccctataataaccttctcattgaaatgttgcatgccaaaagagcataagttacaacccctaggagctctgctttcaaaacaaaaagagattgggggagtggggagggggaagaagaacaggaagaaaaaaagtactctgaactgctccaagtaacgctaattaaaaacttgctttaaagatattgaatttaaaaaggcataataatcaaatacttaatagcaaataaatgatgtatcagggtatttgtattgcaaactgtgaatcaaaggcttcacagccccagaggattccatataaaagacattgtaatggagtggattgaactcacagatggataccaacacggtcagaagaaaaacggacagaacggttcttgtatatttaaactgatctccactatgaagaaatttaggaactaatcttattaattaggcttatacagcgggggatttgagcttacaggattcctccatggtaaagctgaactgaaacaattctcaagaatgcatcagctgtacctacaatagcccctccctcttcctttgaaggccccagcacctctgccctgtggtcaccgaatctgtactaaggacctgtgttcagccacacccagtggtagctccaccaaatcatgaacagcctaattttgagtgtctgtgtcttagacctgcaaacagctaataggaaattctattaatatgttagcttgccattttaaatatgttctgagggttgttttgtctcgtgttcatgatgttaagaaaatgcaggcagtatccctcatcttatgtaagtgtgaattaatattaagggaaatgactacaaactttcaaagcaaatgctccatagctaaagcaacttagaccttatttctgctactgttgctgaaatgtggctttggcattgttggatttcataaaaaatttctggcaggaagtcttgttagtatacatcagtctttttcatcatccaagtttgtagttcatttaaaaatacaacattaaacacattttgctaggatgtcaaatagtcacagttctaagtagttggaaacaaaattgacgcatgttaatctatgcaaagagaaaggaaaggatgaggtgatgtattgactcaaggttcattcttgctgcaattgaacatcctcaagagttgggatggaaatggtgatttttacatgtgtcctggaaagatattaaagtaattcaaatcttccccaaaggggaaaggaagagagtgatactgacctttttaagtcatagaccaaagtctgctgtagaacaaatatgggaggacaaagaatcgcaaattcttcaaatgactattatcagtattattaacatgcgatgccacaggtatgaaagtcttgccttatttcacaattttaaaaggtagctgtgcagatgtggatcaacatttgtttaaaataaagtattaatactttaaagtcaaataagatatagtgtttacattctttaggtcctgaggggcagggggatctgtgatataacaaaatagcaaaagcggtaatttccttaatgttatttttctgattggtaattatttttaacagtacttaattattctatgtcgtgagacactaaaatcaaaaacgggaatctcatttagactttaatttttttgagattatcggcggcacaatcactttgtagaaactgtaaaaaataaaagtatctcctagtcccttaattttttcataaatatttctggcttttgagtagtgtatttatattgtatatcatactttcaactgtagacaattatgatgctaatttattgtttcttggtttcacctttgtataagatatagccaagactgaagaaaccaaatatatgtgtttactgtagcatgtcttcaaattagtggaacttagttcagggacatagaagagtcttaatgaattaaaatcattcacttgattaaatgtctgtaaatcttcatcattcctactgtagtttatttaatatctattgtaaattatgtgacttgtagcttcctctggttttcaagtaaactcaacaaggtggagtcttacctggttttcctttccaagcattgtaaattgtataccaaagatattagttattacttctgtgtgtacaaagaggattattttattatgtttattaatcacctctaatactcatccacatgaagggtacacattaggtaagctgggcgttgactcatgcgcagtctcagtcacccgtgttatcttcgtggctcaaaggacaatgcaaaatcgccgatcagagctcatacccaaagcattacagagaacagcagcatcattgccctccccagctgaaaaacaagttggctagaagatacatggagaggaatggtgtggtcaacagttaatgaaacggttctatcatgcatgtgtaatgtggatggagacaattataagatttgactataactatttggagggtctttaacattgccaaaaaaacaaatatgttgatttttattttattttattttttattttaagaggcgggatcttgatctcacatgttgcccaggctggccttgaactcctgggctcaagcattcctcctgcctcagcctcccccatagctgggactaggggtgcatgccagcatacctggctacgttgactcttaaaatctatgttctcttattttaaagatacagtgctccccactgaaaattaaacctaaaaaatgtcacatattggtatgttgttaacctggtagattaaatcatgagaatgattagaaagacgggcaacacagcgggttacatccacactgctgatcacaccaacgacaggagctgataagcaagaaagcgtcacagccagcgtctgttcacccaaggttgacaagtgaagtttctctaatgttgattgttagccgatttgtaacctggcatttacttagcaactgccttatcaattacaggatttgccggtaaaagcagactcaaatataaaggtttttggcttaacttggtttattatagttgctctatgtttgtaaacagacaatctctaatgtctgattatttgtatcacagatctgcagctgccttggacttgaatccatgcaatgtttagagtgtgaagtcagttacttgttgatgttttcttactgtatcaatgaaatacatattgtcatgtcagttcttgccaggaacttctcaacaaaatggaattttttttttcagtatttcaataaatattgatatgcccagcctgataatttttaaaaaaaaaaaa

SEQ ID NO: 733 - DNA, 2512 bp, Homo sapiens
acgtctggtgtgggcgggagtgagccaaagtgtgctaaaggaaaccaacagcggcctaggggtgaaaggacagccagggttagatgttctgaggaggcgggagcaaccgagagagcacgtgagcatctgtcctttctacccgttcctctttatctttagtgttcagtagcagcggggatagcccggggcccggtgtatggccacggagttacagtgtccggactccatgccctgtcacaaccagcaagtaaactctgcctcaaccccaagtcccgagcagctgcgacctggcgatctgatcctggaccacgcagggggaaacagagcctccagggccaaggtgattctcctcacggggtacgcccattctagcctgccggccgagctggactctggggcctgcggcggctccagcctcaactcagagggcaacagtggtagtggtgacagtagcagctatgacgcaccagctggcaactccttcctagaggactgcgaactctcccggcagatcggggcgcagcttaagctgctgcctatgaatgatcagatacgggagctacagaccatcatccgtgacaagacagccagtagaggtgacttcatgttttctgcggatcgtttgatcagacttgttgtggaagagggattgaatcagctgccatataaagaatgcatggtgaccactccaacagggtacaagtatgaaggagtgaaatttgagaagggaaattgtggggtcagcataatgagaagcggtgaggcaatggaacaaggtttacgagactgctgtcgatccatacgaattggaaagatcctgattcagagtgatgaggagacacaaagagccaaagtatattatgccaaattccccccagacatttaccggagaaaagtccttctgatgtatccaattctcagcactggaaatactgtaattgaagctgtaaaggttcttatagaacatggagttcaacccagtgttatcatcctactcagtctgttctccactcctcatggtgccaaatcaatcattcaggagtttccagagatcacaattttaactactgaagttcatcctgttgcacctacacattttggacagaaatactttggaacagactaagttatttaagtaaaataattatcttatgtaatattacaatcatgttttgattttctatttgttttactgattcacttgagggtggcagagaaaaatgtgttaaaatgctttttagttttggaagtgggtatatttgaggttatatctcatttagttatttgtttactgttggcaccgaattcaacaatgaagtatatgcaactcttacaaaacataaattttaataatattctaatgcaaattactgaaccctcagtgcattaaaattatttcctaatttatgagcctcttagtttggaggttgcttgaagccacaaataaaactcaaatgagagtcagttctttgtcccactgtagtttgcattttgtttagtttggttttagctctactaaggtttcacatatgtggctattgccacattcctctactgttttctttctgatactggacatgctagtaacttggagaggagaataaaagaatgtctcctggaattttacattcccattaatgtcctcattcagttggcagacctaggatgtatggttaactctcaggccattatgtttttcatggctcatttcccaaactgcattgttggtaggtgccttgctaagctgtaatgcagtgaagaagatggtggggcatttttagtaattggaactgtaacattaatttacaagattgaaccggggatgtctggatgctgacaagggagagccaagtactgttaatgccatcaatcctctaggaaggaattggtggtttttctgaagtgtgggggaaagggtggtttcttgctggatttcatggccagtaagtaaatttaaatgcttcatttttaatttggatgtttctgctagagacctttgatttggaaattagttattttgcatgtttgtcaactgtatatgtatgaaaatagaaaaaaaccatgctttttgtaaaaacccctaagatttgtatatgttcatctttaggcttctgaaagggagagaaatcatattggaaatcagtgttggtgttctgaaatctgcttgtaaaactctcatctcattttacattgatattaaaacattttaacagtgttggctagctgattacttgattaattatactcccatggccccataggaagctgttgtgggcctctgttcaaaagcacagaaaagagcagaaggaaatgtcttagaaagaatcaaagctgatgaaatcagcaaagattgggggaaaggaaggaagcctggtgtagattggattatatttttcctttggggactagaatactagaagaacttcagtatatttttccctttatttttgaatactgtcatataataaattgagattaataaattactcatattacagttcttccatggcaa

SEQ ID NO: 734 - DNA, 2379 bp, Homo sapiens
gacccccgagctgtgctgctcgcggccgccaccgccgggccccggccgtccctggctcccctcctgcctcgagaagggcagggcttctcagaggcttggcgggaaaaagaacggagggagggatcgcgctgagtataaaagccggttttcggggctttatctaactcgctgtagtaattccagcgagaggcagagggagcgagcgggcggccggctagggtggaagagccgggcgagcagagctgcgctgcgggcgtcctgggaagggagatccggagcgaatagggggcttcgcctctggcccagccctcccgctgatcccccagccagcggtccgcaacccttgccgcatccacgaaactttgcccatagcagcgggcgggcactttgcactggaacttacaacacccgagcaaggacgcgactctcccgacgcggggaggctattctgcccatttggggacacttccccgccgctgccaggacccgcttctctgaaaggctctccttgcagctgcttagacgctggatttttttcgggtagtggaaaaccagcagcctcccgcgacgatgcccctcaacgttagcttcaccaacaggaactatgacctcgactacgactcggtgcagccgtatttctactgcgacgaggaggagaacttctaccagcagcagcagcagagcgagctgcagcccccggcgcccagcgaggatatctggaagaaattcgagctgctgcccaccccgcccctgtcccctagccgccgctccgggctctgctcgccctcctacgttgcggtcacacccttctcccttcggggagacaacgacggcggtggcgggagcttctccacggccgaccagctggagatggtgaccgagctgctgggaggagacatggtgaaccagagtttcatctgcgacccggacgacgagaccttcatcaaaaacatcatcatccaggactgtatgtggagcggcttctcggccgccgccaagctcgtctcagagaagctggcctcctaccaggctgcgcgcaaagacagcggcagcccgaaccccgcccgcggccacagcgtctgctccacctccagcttgtacctgcaggatctgagcgccgccgcctcagagtgcatcgacccctcggtggtcttcccctaccctctcaacgacagcagctcgcccaagtcctgcgcctcgcaagactccagcgccttctctccgtcctcggattctctgctctcctcgacggagtcctccccgcagggcagccccgagcccctggtgctccatgaggagacaccgcccaccaccagcagcgactctgaggaggaacaagaagatgaggaagaaatcgatgttgtttctgtggaaaagaggcaggctcctggcaaaaggtcagagtctggatcaccttctgctggaggccacagcaaacctcctcacagcccactggtcctcaagaggtgccacgtctccacacatcagcacaactacgcagcgcctccctccactcggaaggactatcctgctgccaagagggtcaagttggacagtgtcagagtcctgagacagatcagcaacaaccgaaaatgcaccagccccaggtcctcggacaccgaggagaatgtcaagaggcgaacacacaacgtcttggagcgccagaggaggaacgagctaaaacggagcttttttgccctgcgtgaccagatcccggagttggaaaacaatgaaaaggcccccaaggtagttatccttaaaaaagccacagcatacatcctgtccgtccaagcagaggagcaaaagctcatttctgaagaggacttgttgcggaaacgacgagaacagttgaaacacaaacttgaacagctacggaactcttgtgcgtaaggaaaagtaaggaaaacgattccttctaacagaaatgtcctgagcaatcacctatgaacttgtttcaaatgcatgatcaaatgcaacctcacaaccttggctgagtcttgagactgaaagatttagccataatgtaaactgcctcaaattggactttgggcataaaagaacttttttatgcttaccatcttttttttttctttaacagatttgtatttaagaattgtttttaaaaaattttaagatttacacaatgtttctctgtaaatattgccattaaatgtaaataactttaataaaacgtttatagcagttacacagaatttcaatcctagtatatagtacctagtattataggtactataaaccctaattttttttatttaagtacattttgctttttaaagttgatttttttctattgtttttagaaaaaataaaataactggcaaatatatcattgagccaaatcttaaaaaaaaaaaaaaa

SEQ ID NO: 735 - DNA, 1394 bp, Homo sapiens
ccgagggcggggccgggcccgggagcctgtggcttcaggaagaggagggcaaggtgtctggctgcgcgtttggctgcaatgagctcggcctcggggctccgcagggggcacccggcagtgtcaactgttagccacgcagatgccgattgctttgtgtgtgtcttcctgagccatggcgaaggcaatcacatttatgcatatgatgctaaaatcgaaattcagacattaactggcttgttcaaaggagacaagtgtcacagcctggttggaaaacccaagatatttatcattcaggcatgtcggggaaaccagcacgatgtgccagtcattcctttggatgtagtagataatcagacagagaagttggacaccaacataactgaggtggatgcagcctccgtttacacgctgcctgctggagctgacttcctcatgtgttactctgttgcagaaggatattattctcaccgggaaactgtgaacggctcatggtacattcaagatttgtgtgagatgttgggaaaatatggctcctccttagagttcacagaactcctcacactggtgaacaggaaagtttctcagcgccgagtggacttttgcaaagacccaagtgcaattggaaagaagcaggttccctgttttgcctcaatgctaactaaaaagctgcatttctttccaaaatctaattaattaatagaggctatctaattttacactctgtattgaaaatggctttctcagccaggcgtggttactcacacctgtaatcccagcactttgggagtccaaggtgggcggatcacctgaggtcgggagttcgagaccagcctgaccaacatggagaagccccgtctctactaaaaatgcaaaaaaaaatttagctaggcatggcggcgcatgcctgcaatcccagctacttggaaggctgaggcaggagaatcacttgaacccaggaggtggaggctgcggtgagccgagattgcgccattgcactccagcctgggcaacgagtgaaactccgtctcaaaaaaaagaaaatgtctttctcttccttttatataaatatcgttagggtgaagcattatggtctaatgattcaaatgttttaaagtttaatgcctagcagagaactgccttaaaaaaaaaaaaaaaaagttcatgttggccatggtgaaagggtttgatatggagaaacaaaatcctcaggaaattagataaataaaaatttataagcatttgtattattttttaataaactgcagggttacacaaaaatctagctgatttaacttgtattttgtcacttttttataaaagtttattgtttgatgtttttaaaggtttttgaaatccaggaattaaatcatcccttaataaaatattcgaaattc

SEQ ID NO: 736 - DNA, 778 bp, Homo sapiens; identical to SEQ ID NO: 446

SEQ ID NO: 737 - DNA, 3721 bp, Homo sapiens
agtggttcccgcaggcttgcgcgcgcactcgctgcgggacaagcttctggaagctctttgcggtggcgttggtgctgtttgcggatgctgatgcagtttctgcaggactgtaaactggattcctggaacctttgatattcctggctgtgtatagtgcctgttggtggactgtactgatactcaactagagtgtgaagggactggattcctgcccctgagacacaatgcaagctgtagtgcccttgaacaagatgacagccatctcaccagaacctcaaactctggcctcgactgaacaaaatgaggtcccaagagtggttacttctggggaacaagaagctattttaagaggaaatgctgctgatgcagagtctttcagacagaggtttaggtggttttgttactcagaagtagctggacccaggaaagctctgagtcaactctgggagctctgcaatcagtggctgagaccagacattcacacgaaagaacagattttagagcttctggtgtttgagcagttcctgaccattttgcctggggagatcaggatttgggtaaagtcacaacatcctgagagtagtgaggaagtggtgaccctaatagaagatttgacccagatgcttgaagaaaaagatccagtctctcaagattctactgtttcccaagaggagaactcaaaagaggataaaatggtcactgtttgtcccaatactgagtcctgtgaatctataacattgaaggatgtagctgtgaacttttcaagaggagagtggaagaagctggagccttttcaaaaggagctatataaggaagtgctactggaaaacctcaggaacctagaatttctggactttccagtttcaaaattagagttgatttcccagctaaagtgggttgaattgccatggctgctggaagaagtctcaaaaagctcccgactagatgaatcagctttagataaaataatagaaaggtgcctcagggatgatgatcatggcttgatggaagaatcccagcaatattgtggcagctcagaggaggatcacggtaatcagggaaattcaaaaggaagagtcgcacaaaacaaaactcttgggagtggcagtaggggtaagaaatttgacccagataaaagcccctttggacataatttcaaagaaacttcagacttaattaaacatctgagagtctacttgaggaagaaatctcggaggtataatgaaagcaagaaacccttcagttttcattcagaccttgttctgaaccgcaaggagaaaaccgccggagaaaagtcacggaaatctaatgatggtgggaaagtcctgagtcactcttcagctcttactgaacatcagaaacgtcagaagattcatttgggggataggtcccaaaaatgcagtaagtgtgggataatctttattagaagatcaactctttctaggagaaaaacccctatgtgtgagaaatgtcggaaagattcatgtcaagaagcagccttaaataaagatgagggaaatgagagtggagaaaaaactcataaatgtagtaagtgtggaaaagcctttggctatagcgcctcactcaccaaacatcggagaattcacactggagaaaaaccctatatgtgtaatgaatgtggaaaagcttttagtgatagttcatcgctcacaccacatcatagaactcatagtggagagaaacccttcaaatgtgatgactgtgggaaaggtttcaccctaagtgctcacctcattaaacatcagagaattcatactggagaaaaaccttataaatgtaaagactgtgggagaccctttagtgacagttcatctcttattcaacatcagcgaattcatactggagaaaaaccctatacatgtagcaattgtggaaaatccttcagtcatagctcatccctttccaaacatcagagaattcatactggagagaaaccctataaatgtggcgaatgtggaaaagcctttaggcagaattcatgccttacccggcatcagagaattcacactggagaaaaaccatatttgtgtaatgattgcggaatgacttttagccattttacgtctgtgatttatcatcaaagacttcattcaggagaaaaaccctacaaatgtaaccagtgtgagaaagccttcccaacccattcactgctaagtcgtcatcagagaattcatactggtgtaaaaccttataaatgtaaagaatgtgggaagtccttcagtcagagttcatctcttaatgagcaccaccgaattcatacaggagagaaaccctatgagtgtaactattgtggtgcaacctttagtcgaagctcaatccttgtagaacacctaaaaattcataccggaaggagagaatatgaatgtaacgaatgtgagaagacatttaaaagtaattcaggcctcattagacatcggggatttcactctgcagagtaatcctggaactacattaaagtggggggaatttaattcaaattgtcagttactgaaaccctgggatgtaaacttacagtattgatcagtagctgcagctttcgtaaattggcagttaggaaaaatatccttttgcccattcatccctcttcttttcaaggatggcaacgactggtaaacagtaattagttggtaaagtcactggaaagggaagaatgcaaaatgattctgaggccagacgaattggaaaagctcttttcttcaggggatttctctctgatttcttctactaccatgtagtgtgatggagagaacttgactgcagtcacataacttggattctgtcccagtttgccaaccaacttgctgtatacaccttggacaagtcatttgacctttcagaattttattttcgtcaccagcagaatgaagggatgggattaatgatttttgccttttttggttttttagttttttattggtatcctgataatctctgaagctgtggacataagttatttttttttatttgtcattactttcaagtttctctagtaaaaaatacaataccactattcaggatgctggacttcttttcttttttttttcttttttttttttcaatttttcttttttgggatggagtctcactatgttgcccagactggtcttgaactcctgggctcaagtgatccttccatctcactttcctgagtagctgacattacgggtacactccatcaagcctggttcctaggatgctggacttctagcttagtgagaatgcagtatactttttgaaaacttcgtgcaggaatccctcaaatgctgtaactaggaatgggtcagtgaagttcaaacgacttttccttgagggagtattttaatcggacaagggaactctttttcttttgggcattggccaacaggactgagaagccagagagcttgcacctgagccatctcagccgtgagagtaacagtcctaggaaaatagatgggggctgggggtaaggaaatgtgctgaagacagagctattctggatggattttggtttgcaaaaattctactttaaaacaattttgcctgtagcaagtacatttttttgcaattggagtgtaaacattctgtgtggcaacagttaaaagctgttataacaatttgcttgggtgtgtgtgcatgtgtgtgtgtgtgtgtgtgtgtgtatacattgttgccactatctaaaattagggcatttcatactaaaaacaaagcttgtctt

SEQ ID NO: 738 - DNA, 2683 bp, Homo sapiens
cagtcggctcggaattggacttgggaggcgcggtgaggagtcaggcttaaaacttgttggaggggagtaaccagcctgctcctctcgctctcctcctcgtctgcgccgcgtttcagagagaaaattcctgttccaagagaaaataaggcaacatcaatgaaggagagaagagccagccagaaattatccagcaaatctatcatggatcctaatcagaacgtgaaatgcaagatagttgtggtgggagacagtcagtgtggaaaaactgcgctgctccatgtcttcgccaaggactgcttccccgagaattacgttcctacagtgtttgagaattacacggccagttttgaaatcgacacacaaagaatagagttgagcctgtgggacacttcgggttctccttactatgacaatgtccgccccctctcttaccctgattcggatgctgtgctgatttgctttgacatcagtagaccagagaccctggacagtgtcctcaaaaagtggaaaggtgaaatccaggaattttgtccaaataccaaaatgctcttggtcggctgcaagtctgatctgcggacagatgttagtacattagtagagctctccaatcacaggcagacgccagtgtcctatgaccagggggcaaatatggccaaacagattggagcagctacttatatcgaatgctcagctttacagtcggaaaatagcgtcagagacatttttcacgttgccaccttggcatgtgtaaataagacaaataaaaacgttaagcggaacaaatcacagagagccacaaagcggatttcacacatgcctagcagaccagaactctcggcagttgctacggacttacgaaaggacaaagcgaagagctgcactgtgatgtgaatctttcattatctttaatgaagacaaaggaatctagtgtaaaaaacaacagcaaacaaaaaggtgaagtctaaatgaagtgcacagccaaagtcatgtataccagaggcttaggaggcgtttgagaggatactcatctttttggaatcctgaccttaggttcggcatgtagaccaagtgatgagaagtgaatacatggaagagtttttaagtgtgacttgaaaaatatgccaaaaaatgagagatacaaatgagctagaggaagatgaggggggatgcgagtacctccaagaagaaaaatcacactctgaatggtgcttgcatttttgggttttttttttttgttataatctattcatggatctccactttgatttaatttttaaatgttttaatctcctttacaaaaagtatacgttaatataccgtcctcaagggggaactggcactgtgaccttagcatttagttttctagaggatgtgatctaatttctttctagctcatcattaaaaaggaaattgtatcaggacccatgggatatatccagaggcaaactttatgaggctttgaaatcttgccttcctgaagatagctgagtaggatggttctaaggaaagcctttgcaatcttgcaagatttgtagaccagcactacaaagatcgcatagatcaaataggaaaaaaaatgtcgatttttattcagtctgatggttctgttcttcattgtgattgtcattaaaaagtggtaaattgctcaatgtaatatttttgtgcgctgtttagaagttgtgtgattttttgccatcgttgataaaaatgcaaagtcaaataaaaggtgtcttggtttgatgtcatagaatgatccaaggagagaaaaaaggtagttactgttttcaccagaaaaggtaatgagtgaaggaaagaatagtagcagaaagcacagtttgtgagtaaagctgtctggaattaagttaccaaaaatacaaagcaaaaggactattattttgggttgaagctccaaaactgacagcatctgataatctgttggtttatttcacttttcattaaatgaacattgatgagagaagatgccacttacccaagctttagagaatccctagtggaagattatatgataaactttcagtcctgacataacactagggcatttctagagtgtcattgctaaaacctcactgaacagatgcagccaaggtctgtgttcagcacttggtctctgttgttacgtaaaataataagcatttaaaatagtttacagatatttttgaccagttccttttagagattctttcagagaagaaaccagatctgacctgtttattgttggcgcttgttgaaaacgagctttctttcccatgatagtgcttcgtttttgaagtgttgaagctgtgctccccttaaatcgtggcaggagagattaaggtaattacaacactcagttctatgtcttacaagcactttgtcttgtctctgcaagaaaattcgattccagtcatttcccataaaatacagacattttaccaacataatatgctttgattgatgcagcattatgctttgggcagtattacaaaatagctggcgagtgctttctgtatttaaatattgtaaaaagaaaataagttataactgttataaagcagaacttttgttgcattttttaaactgttgaagtcactgtgtatgtttgtttggtcaatgtttccgcagtatttattaaaacatactttttttttcttcaaataaaaaagtaaccatgtctttgtctaaa

SEQ ID NO: 739 - DNA, 12926 bp, Homo sapiens
gaggcccggaggaactcggagggggagggagagaaaggccgagacggagggagccagcggcggccgaggggctggtccaggcgcggccgctaagaggagaccaagaggcgggggctgcacttgacaaccagcatgccgagatggcacaccttgggcccaccccacctccacatagccttaattacaaatcagaggacaggcttagtgagcaagactggccagcatatttcaaggtcccatgttgtggggttgatacatctcaaattgagtcagaagaggcagaagtggatgtgagagaaagagagacacagagagacagagagccaaagagggcaagagacttgactttaagagactcctgtactgacaactccatgcagttcggaaccagaacgactacggctgaaccagggttcatggggacatggcaaaacgctgatactaacctcttattcagaatgtcccaacaggccatccgttgcacactggtaaactgcacatgtgaatgttttcagccagggaagattaacctgaggacttgtgatcagtgtaaacatggctgggtggcacatgccttggataagctcagcacgcagcacctgtaccaccccacccaagtggagattgtgcagtccaacgtcgtgtttgacatcagcagcctgatgctctatgggacacaagcagtgcctgtgcggctaaagatcctgctggaccgtctcttcagcgtcctgaagcaagaggaggtactgcacatactgcacggccttggctggactctgcgggactatgtccgaggatacatccttcaggatgctgctggcaaggtgctggaccgctgggccatcatgtctcgagaagaggaaatcatcacccttcagcagtttctgcggtttggagaaaccaaatccattgtggagctgatggcaattcaggagaaagaagggcaggccgtggctgtaccatcttcaaagacagactcagatataaggactttcattgagagcaataatcgcaccaggagtcccagcctccttgctcacttagagaacagcaatccttccagcattcatcacttcgaaaacatcccaaacagccttgcatttctgcttccattccagtacataaaccctgtctcagcaccactgctagggttgcctccaaatgggctactgttagagcaaccagggttgaggctgcgggaacccagcctttcaactcagaatgaatataatgagagcagcgaatccgaagtttctcccacaccttataagaatgatcaaacacccaatagaaatgccctgaccagcattactaatgtggagcccaaaaccgagccagcctgtgtctctcccattcagaattctgccccagtcagtgatctaaccaaaactgaacacccaaaaagctcattccggattcatcggatgagaaggatggggtcagcctctaggaaaggaagagtgttctgtaatgcatgtgggaagacattctatgacaaaggtactctcaaaattcattacaatgctgttcacctgaagatcaaacatcgatgcaccattgaaggttgcaacatggtctttagctccctccgaagtcgtaatcgccacagtgcaaaccccaatcctcgccttcacatgcctatgctaaggaataaccgagataaagatttaattcgggccacctcaggagctgccacccctgtcatagcaagtacaaaatcaaatctggcactcacaagccctggccgacccccaatgggttttaccactccccctctagaccctgtcttgcaaaatcctctccctagccagctagtattttctgggctaaagactgtacaaccagttcctccattttatagaagtttactcactccaggggaaatggtgagtcctccaacctccctcccaaccagtcccatcattccaaccagtggtaccatagagcagcaccccccgccaccctctgagccagtagtgccagcagtgatgatggccacccatgagcccagtgctgacctggcacccaagaaaaagcccaggaagtcaagcatgcctgtgaagattgagaaggaaattattgataccgccgatgagtttgatgatgaagatgatgaccccaatgatggtggagctgtggtcaatgacatgagccatgacaatcattgtcactcccaagaggagatgagcccaggcatgtctgtgaaggacttttctaagcataacaggacccggtgcatttcaaggactgaaataaggagggccgacagcatgacttctgaagaccaagaacctgagcgggactatgagaacgagtctgagtcttcggagcccaaactgggcgaggaatccatggaaggggatgagcacattcacagcgaagtgagtgaaaaagtcctgatgaatagtgagaggcctgatgagaaccacagtgagccctctcaccaggacgtcatcaaggtgaaggaagaatttacagaccccacttacgacatgttttacatgagccagtatggactgtacaatggtgggggtgccagcatggccgccttgcatgagagctttacatcgtctctgaattatggcagccctcaaaagttctccccagaaggtgacctatgttctagcccagaccccaaaatctgttatgtgtgcaagaagagtttcaaaagctcctacagtgtgaaacttcactacaggaacgttcacttgaaagagatgcacgtctgcacagtggctggttgcaatgctgcattcccctctcgccgaagccgagacagacacagtgccaacataaacctacatcgtaaactgttgaccaaagaactcgatgacatgggcctggactcgtcgcagccctcccttagcaaggacctccgcgatgaatttttggtgaagatatatggtgcccagcaccccatggggctcgatgtcagggaagacgcctcctctcccgcagggactgaagactcccacctgaacgggtatgggagaggcatggcagaggactacatggtccttgacttgagcaccacctccagcctccagtccagcagcagtatccattcctccagagaatccgacgcaggcagcgatgaggggattcttctcgatgacattgacggggcgagtgacagtggggagtcggcacacaaggccgaggcccctgccctccctggcagcctaggggctgaagtttcaggatctcttatgttcagcagcttgtctgggagcaatggtgggatcatgtgcaacatttgccacaaaatgtacagcaacaaggggaccctgagagtgcactacaaaactgtgcatttgagagaaatgcacaagtgcaaagtcccaggttgcaatatgatgttttcctctgtacgaagccgaaatcggcacagtcagaaccctaatctccacaaaaacattcccttcacttcagtagattagtctcagaatggacactacaaatgccagctctcaccagatggcctacgtgtttgaactgccatagtcagtgtgcgcttatgtacttggggtgtgtgtgtgtgtgtgtgtgtgtgtgcatttatgtatgctctgtggctacatatacacacacgtatttccttgagataaacaagataaacactaggtgcttttgaatttttttcacttccctttatagttttgggaaaggagtgggatctttgatttcagggtgaaaacagagtacccctttaaacacacacacacacacatgcacatacacacacacacacacacacacacacagtgtgcaactagccccagttttgacagaataattcttggtcttccccaaagagacaatttgttgtacccatgactgttgcctgcaaaaataaaagggaaaaaaaagaaaaaagaaacaaaaaggaacttcttatagttgtcttttgtgaactttaaggttttgaaagaatcttcaattaaagcatggcagattcacctgtaaatatttagccttgaggggccattgatgtaaaacaattgtattgatggttgtttaacttttttgtttaatttttacagttacatccagctgttagatatgcaggaaaagatagtttgctggctagctctattcatttatgttagcattaatgcacatttttaaaaaaagaaaaaaacatggtcttgtttttactacctgttagatatagtgctaaagaggtgctggcatgctttacagcacagatctgattttttaaaatgtcctgtactagtacataaatcccgtcatgcactttttttcatacactacaaggggatgtgtaataaccatgcttcttttttatccttaaactattgccatacttcagtaagtgtcttttttaaaaaaaattcacttgtataaaaatggtctggtcagtatagggcacaaatgccaaacaaagtattagtgttaacacaaaactgccaactttgcacaagtttccagaaaagaaaatacaattagtcactcaacataaccacaggccaatttgttggccaccagaaaaccgctttttaaaaaaacacttggtgattctttcaagtgccgaatgttattagaatcaacattgcatccttcttgcttatacgttaagttacataaaaggaaaacaaaattatgtggtgtgaaacagccaaggcatttattcttcagaggcaggataatatttcaggatacaaaagcccaaattacccgctacggaacaaagatgaatacagtaaaagagtcgaacactcatttccaaggccctaacccttatcctttaaaaagaaatcctctgaactgggtcggtctgttgtatggctgtctaatttgttgcaaattctgcagtcgtactataattcaggcctgtttggtagacaaaatcaaaaggcatttaacagcagcagtacttggaagctttgaaaacatgtgctaaacttgaatggagcaacactcctttctgaaaagccagaagaagggggttttaaagcaggatctctcaatgttcagtgttttgtgtttccccacacgatttgtcagagagaaatgaaagcaagcctgaaaccaagcaattgagagtgagaaagaggagagagactattctccaaaccttttttgttttgttttgtttccgatgtttacacatgttgcctgagctggttaaccacatcggcagcctcagctaccacaacatactgactaaatgatgatatttactcaagttcagtctgcagccaaaaccattagggtgtgcattgcagactgttttgttgtcttttttttttcttttttcctttttttttaagtggaggggaaaagaagagataaacaaggaatattttgtcaaacagtacacaataatttaaagagaatgtatttcttttttgcatttaatggcctcagacatttctttcatcagtctaaaagttagaaatatccctttattttaacttttatgtcgtttccatttttcatgtttttgtaattattttttctatgttcacatcagcattcacttccgttaaatttgccaaaggaaactgttaatatgtttctgttgttattattcctgtaggatttattgtacctcacagtatttattgtttcccaaaataagcatcattagttggggattcagtatttttgttgtgaaaatttcagaaacaatagattcttaaagataagctagctatgtctaggagctttatcttttcacctccttcagaggatgctatggggtccattttaattcttcatttgttctacggggaggaaagaccaaaagtatttgcagtacaaaagaaactatatcaaacactatgttaaatgacaagtgtttatggtaaaaagctgaggaattagtaataatcgtttttgttttcttgtactttgaattccccaaagtcttaattgctttattttggtgttgtgttaaattgaacagacagatgttttcctttgttttataccatataagactctgtacagtatgtttgtgaaagattgaactagaataatgaaagtttgtttgcaaacattttggtcctctcagcgttctctgtgttgtgctgttgccccattaccaaatggttagattcaaaaagggtgggaaaagatttttaatatcccaacaaaacattatagaaactctggcttttgcagtgtgcatagactacatgtagttttatgaaaataaatacacatttttatttcagcaactttgaaaagttacactcagttgagttactagaactcatcttgtacaacagcaatgtttagtctgtttaatttaatgtcaaataaaaggtcagatagccctcgtgagtgaattacatagctgtcggcagtcacatcagcaaatgcaccaggcttagaacaaatgtttgttacttgctgcaaaccaagctaatgtgtatagccagttagaaaaagtccagaagtaatgagattctagaagtagagtttcccttgcttggaaacatgaatgtgttcacctgtgttttgtcagagaagtggcaataagtcctggacagctgacactttttaagtatctcccctatttgctactacttttgtgcctcaagtgcccagtcgttacggtggccttctaaatgagtaaataacattttccaatataaagcctatttgcttaaaagggacaggggagtggatggatgtagtacatgcaatggaaaatcataaaatgtacaattcttctgtttccaaagtattgctcgttcttgagtgtgtgcctgagtgtcttgttttgacttaactagaattctagttaagatggtgatcccatggcttatttgcaaacaggaaggataaagagatcagcgttttagtcatggagctcatctttgcccattcctactcatttgctttttcataggagttttttgttgttaaacagtttctctcaagccacatgcattctatgctggctgaaaattaatagtgatgtagatgttcatccgacaagcttttccccatgtgattggttttagccagagtttatcacaggtacaaaattaggcggtatgactgtgcatgttctctagctgatgttgaaacttgtactgtcttgatcatttaaaactatgtttttgtaaatatcaggtttagtccgctttcgggaatatctgcatgctatggaaagagagaaaaaaaggatagataatgaggaatttggtttaaaagtgtgataaaaatccttggcattctttgttctgatattaattgtatttaaataagtcaacccaatgtaactcattccagatcttagtccagctgccctgttcagcctgatgccttttaaaggtttaaaggtgttaatgttttccttttcaacatggcaaacattttttaaaacctttttggcacaatggtgccactgtcctcatagtgttatttctttggtcatgaattttcaggcccttccagtaagaggagaaaggcacttaactggttaacagccccattattatacattgctctaaggaaaaaaaaaaaaaaaaaactttgaatatatcaagaatgggctattccagaggcttctcctcaggagaaactatgcactaggttcccaccaaatacaatgtgacctttttttcccctttctctgtacacaccccagatatgtgccaagcaaatgagaatgagggccgttgacaattaaagcataaagaagctagtcaccagattgagatggacatgctgctaactgctgacagcttgacctgagcagtcctaacttgtatctggtctgttagcattgggttagattgactaacagagtaaataaaattcacctgtcataagacacgctacatctgctatcatcaagaaacaaatcatccagaagaaactttttttcatcctgtggtcacacccttttcttaagagcttcttttttaaaattatgacaaacgaatttcattctttaaaatcacttatcttctcccaaacttgaagtatttaaattaggtggttttgcttttccctctcattgtttattttttggggatggatctaaatgagtaagatgagcaataaaagataccagaaagactggagggatcacagtgttttcatcagaactaagtagagggtcggttcctgccctggttttggggtagctagaaaaggaaatcatgaatgcactggaaatgttggctcgagagaaaagactggcatagctctgcctcgcagtgggtgagagcgtattgatcgtagggacctgcagagttcctatgaccaggtgagtcggctctgaggaaggggttaggaaagcaagtacagctgcatgaaatagctgaagttcctttggggtcaggaagagccgacaattgtggggttttggttgcttttgctttgtttttgagtgggaagtgttgctggaatcccctgagaaccgaaagatgccaggggtcagcaaggctatagaaaaggccagtggtaacacctcgttttcatcctaacagaggagtaggtgcgaatggcaccagcatggatcgttcctttcttgatcattactcatgcttgccactgtagcaacacaacaaagccatgattgtaattaatactaggctaaagaccttgatcaaaatgggagctcatttactgttctatgaggtatgtaagtaacttctcttcacattttccctcagagataaaccacacgtggtagtcttgtttgcgttagtactaaggtcatgtttgatctgtcccagacgagtcgcatatttcctgtagctggagtgttgctcaccataaatggtcattttcaaaaagtattgtgtaattccagctgtacaactgaccagtgagttatctgtcatcactgttgcccacatacccgtccttccttgtgtagtttcatcatcctcatccttcccacatcttgcgcaaaatgattttctgtgctcattcggcaataactatgttattcggcatactgtctttttggcatttgttgaaaaatccaaatgcttttaatccaaaagattaatccaaatcttttttaatccaaatgattttaatccaaatccaaataacaggaggttaaaaaaaaaaaaaaaactaagcatttttacatgtacactgaattggatcagcattattgttcattataatgctatatatatttttggagcaacatactatagttgtcataaaactatctttattcttctcctctaaagtgctgttgtaaattcatttgacctttactgcaggaaaaaaaaaaatcttttttatataggatatgaagaccaaggctcagtctgtaacaaatagtggaccattacaaaagaggaaagaaaaaagccagggctgagcagcaagaagcttcagttcaatttcacctcgtatctttctaataacatacttgtcactttattaccttccagtaatgtgaacgctgctgacaagactgtcacactaacagcagacaacaccctctctgcttcagcccagctctcctggctacttattgccctggccctgaagggacacaaactaatagtgtgctttccagttcagcacttggccatcaaatataaaaggatgcgtaattgcctgtttatccccttgtgaaggagaaattgactacaagggctaggctttcccatcgagttccctgatgtacacacacatccacaatcagtcagtctctctctctctctctctctctctctctctctctctctctctctcccctctctctctccttccctcttattctcccctcctaacatacaagcacatacacacacctactgtatctgtgggaagcccaaggctgcctctcgatgccctctccagctattaagtggacagtaacaagatgacttcttaaataaagggtcagtagagagatgctgtctgtgacggcatcctttgcttctttgaaaacttaagtgttaacaattccatcttgagagtaatgggtgtggccctataattagagcaaattttcctgcaagtcagtggcataagtaagattatattgccccctaatctgtagggaaaagattaaaatatttttcttccccttcaaaaagtgcacatgttgtaaactggttacgcacagtggtcatttttttttcttatccttggcatcaaaccatggacgtaggtgtacaaatgcatctttcaatgacccctccaaatccatagtgtaacatgatagattaacttttgtcaaactggactgacaatctaaaaaagatggcgtcaggcttttgactttaatcgttaaaacaaggaccaccctatgagtaaaaggtaaattctccactttgaagaactttggtaagtacaagtacagggagctttagaaaatcgagtgatggggaccaaaggtacaaaggaagaatacatgaaaatgttatattccaaaatgccctgagcccaaagattggctgctatttttgtatattgaaatactcaaatgatggttggaaagtgactagttagtgactaaatgaagtgcaagatctatcaagcgtcttctttctgggactaggggatgccatgcttccttccaaccttcccgcagcgcatctcagagaagatagttggccccattacaaacagtcacatttcagtaagatattagtcagccaggtaagacacgtgcaggtatcggtatcatcttccatatgaactttagcaaggagagaacagcagcagatttagggatagacaatgtaacaggtctatgttgacaaatctgtgctaaataatttcatgaaccagtgtggggactgggaagaaaagcactttgagcaaggactcttgggttcgagcaaaggcaattagttgacatgatacttcttaagttcctcagtatgtatatgttacaatcgtttatcagacatcttaatagaatcctaattgaaaaaccagttgccaaaattgcacaagttctgctcgctgatactagctttctccccttaactctaaaataccagggatgcttaaggacgtttgtaatagtttttttaatgctttgtttcacttttttaaaaaagaatctttgaagggaaggaagagcagaaagaagtattttaagaaaaatggagagaagtagatagtattgaaagtatatttcttgaagagagagtatctaagtgctataccaagattttatagggcttcctgttgccaaatgtgatgttgagataatgcacagctaagatggcaaatccatcaattattaactggctctgcccacttctgtcatggaatgcaaggattgagaggtgactctggggagaccctgggtgtgtgagagagctccattcatctggccctggatatgtttttcaaaagagagggagaaagcgccagtccctgcaaggtgaactgacctggcactgtttcagtgggagcctcactgcctgccttttccatgctaggagacaaagcatcctctaccccatctgtgaatcggtgctgtggccactgcgagaagcatgattcatgaggtatgatgctcttgagctcccagacaatgtgctgagttaataggttcacttgagatgtatacaccaaggctgtttctttttttaaatctagtccccaatttggagtatttttgcatgtttttgtacagagtaatccattcctctcattgtgtatcttaatctcctctgacttttccattgtctttctcaatcccaccctttgctcttcggatctcaccaaccccccttaaaaaataaatcatgtttgagcaagaaggtagaacacgccctccctcatcttggttttaattgctttggaaacgtgttctaccctgtccagggtttgcataacgtgaattaagtgaatgagatgttctagtattatatcttaacctgataagactatctaagatttctagtatatggtgcatttgctttcctgtgcaaactttggttcagctgccctgcagagaatctcaccattttcctgccagtgccagtataaagaatgcaggagagctaaacctgggtacatgaaggtcagaggggtgaggacggtcgagaaatggggagaagacttgggcttgagacgacctgggcttttcatgtgtagctcactcagcagtatgaggatgactgacacaccagtgggtggtttccaagtgaggcaaatgcccatttcccctctcccctcacaccttgcctggcttcttccatgaagtccttgctgcttttctgcctccccaaaggtgaggggaaggggctggttggggatctgggaaagccagttctctgttctctcctgctggtgatggactaggccttttagaactagcaagatccctcacacagctgggagaacacacacctttcttactccagacccattggtgtgtctccagtaacaaaattattggactcagcctccatatttgacagcaaaagtggccagagggagttgaaatatcttgaagaaaaggaattttcactaagatatgtcctctccctctcccagagtttagctgtttattccttttttttgtttatattgttctcatctgcataaaaccagtctcttgcaataagcctgccgcagaatcaaagtctgtacttcaaaaggtaactgcaccaagggatgggacagtgtgcatcaccctgatctaatcattgtgacgttggtagcttcctaaatactgtatgtaccttgaacaagggttttatttttgttttgttctgttttgctttttgtttttattggtaggctaaggtaattaaattttttaatttgctgttactttggttgtattttctgtactataactgcctacagtatgtcttttgcataaaatgcataagggtttggggatgtaaatggaattttattcatattttgtccaaatacctcttgtaatttgtatcaaaattcttgtacaatttttatattaaagatttatcagtcactga

SEQ ID NO: 740 - DNA, 5490 bp, Homo sapiens
ggctgagttttatgacgggcccggtgctgaagggcagggaacaacttgatggtgctactttgaactgcttttcttttctcctttttgcacaaagagtctcatgtctgatatttagacatgatgagctttgtgcaaaaggggagctggctacttctcgctctgcttcatcccactattattttggcacaacaggaagctgttgaaggaggatgttcccatcttggtcagtcctatgcggatagagatgtctggaagccagaaccatgccaaatatgtgtctgtgactcaggatccgttctctgcgatgacataatatgtgacgatcaagaattagactgccccaacccagaaattccatttggagaatgttgtgcagtttgcccacagcctccaactgctcctactcgccctcctaatggtcaaggacctcaaggccccaagggagatccaggccctcctggtattcctgggagaaatggtgaccctggtattccaggacaaccagggtcccctggttctcctggcccccctggaatctgtgaatcatgccctactggtcctcagaactattctccccagtatgattcatatgatgtcaagtctggagtagcagtaggaggactcgcaggctatcctggaccagctggccccccaggccctcccggtccccctggtacatctggtcatcctggttcccctggatctccaggataccaaggaccccctggtgaacctgggcaagctggtccttcaggccctccaggacctcctggtgctataggtccatctggtcctgctggaaaagatggagaatcaggtagacccggacgacctggagagcgaggattgcctggacctccaggtatcaaaggtccagctgggatacctggattccctggtatgaaaggacacagaggcttcgatggacgaaatggagaaaagggtgaaacaggtgctcctggattaaagggtgaaaatggtcttccaggcgaaaatggagctcctggacccatgggtccaagaggggctcctggtgagcgaggacggccaggacttcctggggctgcaggtgctcggggtaatgacggtgctcgaggcagtgatggtcaaccaggccctcctggtcctcctggaactgccggattccctggatcccctggtgctaagggtgaagttggacctgcagggtctcctggttcaaatggtgcccctggacaaagaggagaacctggacctcagggacacgctggtgctcaaggtcctcctggccctcctgggattaatggtagtcctggtggtaaaggcgaaatgggtcccgctggcattcctggagctcctggactgatgggagcccggggtcctccaggaccagccggtgctaatggtgctcctggactgcgaggtggtgcaggtgagcctggtaagaatggtgccaaaggagagcccggaccacgtggtgaacgcggtgaggctggtattccaggtgttccaggagctaaaggcgaagatggcaaggatggatcacctggagaacctggtgcaaatgggcttccaggagctgcaggagaaaggggtgcccctgggttccgaggacctgctggaccaaatggcatcccaggagaaaagggtcctgctggagagcgtggtgctccaggccctgcagggcccagaggagctgctggagaacctggcagagatggcgtccctggaggtccaggaatgaggggcatgcccggaagtccaggaggaccaggaagtgatgggaaaccagggcctcccggaagtcaaggagaaagtggtcgaccaggtcctcctgggccatctggtccccgaggtcagcctggtgtcatgggcttccccggtcctaaaggaaatgatggtgctcctggtaagaatggagaacgaggtggccctggaggacctggccctcagggtcctcctggaaagaatggtgaaactggacctcagggacccccagggcctactgggcctggtggtgacaaaggagacacaggaccccctggtccacaaggattacaaggcttgcctggtacaggtggtcctccaggagaaaatggaaaacctggggaaccaggtccaaagggtgatgccggtgcacctggagctccaggaggcaagggtgatgctggtgcccctggtgaacgtggacctcctggattggcaggggccccaggacttagaggtggagctggtccccctggtcccgaaggaggaaagggtgctgctggtcctcctgggccacctggtgctgctggtactcctggtctgcaaggaatgcctggagaaagaggaggtcttggaagtcctggtccaaagggtgacaagggtgaaccaggcggtccaggtgctgatggtgtcccagggaaagatggcccaaggggtcctactggtcctattggtcctcctggcccagctggccagcctggagataagggtgaaggtggtgcccccggacttccaggtatagctggacctcgtggtagccctggtgagagaggtgaaactggccctccaggacctgctggtttccctggtgctcctggacagaatggtgaacctggtggtaaaggagaaagaggggctccgggtgagaaaggtgaaggaggccctcctggagttgcaggaccccctggaggttctggacctgctggtcctcctggtccccaaggtgtcaaaggtgaacgtggcagtcctggtggacctggtgctgctggcttccctggtgctcgtggtcttcctggtcctcctggtagtaatggtaacccaggacccccaggtcccagcggttctccaggcaaggatgggcccccaggtcctgcgggtaacactggtgctcctggcagccctggagtgtctggaccaaaaggtgatgctggccaaccaggagagaagggatcgcctggtgcccagggcccaccaggagctccaggcccacttgggattgctgggatcactggagcacggggtcttgcaggaccaccaggcatgccaggtcctaggggaagccctggccctcagggtgtcaagggtgaaagtgggaaaccaggagctaacggtctcagtggagaacgtggtccccctggaccccagggtcttcctggtctggctggtacagctggtgaacctggaagagatggaaaccctggatcagatggtcttccaggccgagatggatctcctggtggcaagggtgatcgtggtgaaaatggctctcctggtgcccctggcgctcctggtcatccaggcccacctggtcctgtcggtccagctggaaagagtggtgacagaggagaaagtggccctgctggccctgctggtgctcccggtcctgctggttcccgaggtgctcctggtcctcaaggcccacgtggtgacaaaggtgaaacaggtgaacgtggagctgctggcatcaaaggacatcgaggattccctggtaatccaggtgccccaggttctccaggccctgctggtcagcagggtgcaatcggcagtccaggacctgcaggccccagaggacctgttggacccagtggacctcctggcaaagatggaaccagtggacatccaggtcccattggaccaccagggcctcgaggtaacagaggtgaaagaggatctgagggctccccaggccacccagggcaaccaggccctcctggacctcctggtgcccctggtccttgctgtggtggtgttggagccgctgccattgctgggattggaggtgaaaaagctggcggttttgccccgtattatggagatgaaccaatggatttcaaaatcaacaccgatgagattatgacttcactcaagtctgttaatggacaaatagaaagcctcattagtcctgatggttctcgtaaaaaccccgctagaaactgcagagacctgaaattctgccatcctgaactcaagagtggagaatactgggttgaccctaaccaaggatgcaaattggatgctatcaaggtattctgtaatatggaaactggggaaacatgcataagtgccaatcctttgaatgttccacggaaacactggtggacagattctagtgctgagaagaaacacgtttggtttggagagtccatggatggtggttttcagtttagctacggcaatcctgaacttcctgaagatgtccttgatgtgcagctggcattccttcgacttctctccagccgagcttcccagaacatcacatatcactgcaaaaatagcattgcatacatggatcaggccagtggaaatgtaaagaaggccctgaagctgatggggtcaaatgaaggtgaattcaaggctgaaggaaatagcaaattcacctacacagttctggaggatggttgcacgaaacacactggggaatggagcaaaacagtctttgaatatcgaacacgcaaggctgtgagactacctattgtagatattgcaccctatgacattggtggtcctgatcaagaatttggtgtggacgttggccctgtttgctttttataaaccaaactctatctgaaatcccaacaaaaaaaatttaactccatatgtgttcctcttgttctaatcttgtcaaccagtgcaagtgaccgacaaaattccagttatttatttccaaaatgtttggaaacagtataatttgacaaagaaaaatgatacttctctttttttgctgttccaccaaatacaattcaaatgctttttgttttatttttttaccaattccaatttcaaaatgtctcaatggtgctataataaataaacttcaacactctttatgataacaacactgtgttatattctttgaatcctagcccatctgcagagcaatgactgtgctcaccagtaaaagataacctttctttctgaaatagtcaaatacgaaattagaaaagccctccctattttaactacctcaactggtcagaaacacagattgtattctatgagtcccagaagatgaaaaaaattttatacgttgataaaacttataaatttcattgattaatctcctggaagattggtttaaaaagaaaagtgtaatgcaagaatttaaagaaatatttttaaagccacaattattttaatattggatatcaactgcttgtaaaggtgctcctcttttttcttgtcattgctggtcaagattactaatatttgggaaggctttaaagacgcatgttatggtgctaatgtactttcacttttaaactctagatcagaattgttgacttgcattcagaacataaatgcacaaaatctgtacatgtctcccatcagaaagattcattggcatgccacaggggattctcctccttcatcctgtaaaggtcaacaataaaaaccaaattatggggctgcttttgtcacactagcatagagaatgtgttgaaatttaactttgtaagcttgtatgtggttgttgatcttttttttccttacagacacccataataaaatatcatattaaaattc

SEQ ID NO: 741 - DNA, 2116 bp, Homo sapiens; identical to SEQ ID NO: 451

SEQ ID NO: 742 - DNA, 2560 bp, Homo sapiens
cccttcttccctcccttcctccataccaacctccctccctctctggagctcctgctctctccctctccctcctctcccgtgctccctccctccctccctctttccctccctcctctcctctccctctcctctcctgctatagagggctccgacagcagttcccagccagcgtgttcagcctgcctgcctgcctgcctctgtgtgtgtgtgagcgtgtgtgcgtgcgtctactttgtactgggaagaacacagcccatgtgctctgcatggacgttactgatactctgtttagcttgattttcgaaaagcaggcaagatgtccagcacaccacatgaccccttctattcttctcctttcggcccattttataggaggcatacaccatacatggtacagccagagtaccgaatctatgagatgaacaagagactgcagtctcgcacagaggatagtgacaacctctggtgggacgcctttgccactgaattttttgaagatgacgccacattaaccctttcattttgtttggaagatggaccaaagcgatacactatcggcaggaccctcatcccccgttactttagcactgtgtttgaaggaggggtgaccgacctgtattacattctcaaacactcgaaagagtcataccacaactcatccatcacggtggactgcgaccagtgtaccatggtcacccagcacgggaagcccatgtttaccaaggtatgtacagaaggcagactgatcttggagttcacctttgatgatctcatgagaatcaaaacatggcactttaccattagacaataccgagagttagtcccgagaagcatcctagccatgcatgcacaagatcctcaggtcctggatcagctgtccaaaaacatcaccaggatggggctaacaaacttcaccctcaactacctcaggttgtgtgtaatattggagccaatgcaggaactgatgtcgagacataaaacttacaacctcagtccccgagactgcctgaagacctgcttgtttcagaagtggcagaggatggtggctccgccagcagaacccacaaggcaaccaacaaccaaacggagaaaaaggaaaaattccaccagcagcacttccaacagcagcgctgggaacaatgcaaacagcactggcagcaagaagaagaccacagctgcaaacctgagtctgtccagtcaggtacctgatgtgatggtggtaggagagccaactctgatgggaggtgagtttggggacgaggacgaaaggctaatcactagattagaaaacacgcaatatgatgcggccaacggcatggacgacgaggaggacttcaacaattcacccgcgctggggaacaacagcccgtggaacagtaaacctcccgccactcaagagaccaaatcagaaaaccccccaccccaggcttcccaataagatgatcggcaccagaatccactgtcaataggcccgtgggtgatcattacaattgcaaatctttacttacaggagaggaaacagaagagataaaaacttttccatgcaaatatctatttctaaaccacaatgatctgattttctttcttctttctttttttctaattgagaggattattcccagtaagcttccatgaccctttcttggaggccttcacaggtaatacagatactggcactgattgtaattaaaatgagagaaaactctagcgcatcttctggcacggttttaacaacgtgtttgtgttgaatttcctttttatgcatcaaacgaaggccatattgtccataaatgctcagtgctcaggatctcattaatatgccgaacctaactacagatgactttttaatattgtaaaatattttctgctttttgacttgcatctgagagtttcttgtttcagtaaaaaaagaaaagacaaaaaaatcagctttggaaagtaatttaaatgtaccttattttttttttctttatgttttctttcattgggcaacagctaagagggcccagcaaggtaatttatggttgagctgatgtcaattggttcttgtcttgagtcgactcaatttagcccaagtgctgaaacaagaaatgtcatttttttcatcaaagacaccagggcagatttttaagtaaagaaagacaattggacccttaagaatttatgcatttgtaaagttgctgttgatccaaatattttcaagccatgtaatccattggttttgtgggcagtttaataaacctgaacctttgtgtgttttctaattgtacctgagttgaccatcctttctttttatagtatatttcttgtatgatattttgtaaagctctcacctggttcttttatggggacttttcgtttttgggcaactccagtgtatttatgtgaaactttataagagaattaatttttccatttgcatattaatatgttcctccacacatgtaaaggcacagtggctccgtgtgttaaaaaacagctgtattttatgtatgctttactgataagtgtgccaataataaactgtgttaatgaccaaaaaaaaaaaaaaaaaaaaaaa

SEQ ID NO: 743 - DNA, 519 bp, Homo sapiens
aggaacgcgggcggtgcggactcagcgggccgggtgcaggcgcggagctgggcctctgcgcccggcccgacctccgtctataaatagagcagccagttgcagggctccattctgctttccaactgcctgactgcttgttcgtctcactggtgtgagctccagcatcccctttgctcgaaatggaccccaactgctcttgcgccactggtggctcctgcacgtgcgccggctcctgcaagtgcaaagagtgcaaatgcacctcctgcaagaagagctgctgttcctgctgccccgtgggctgtgccaagtgtgcccagggctgcgtctgcaaaggggcatcggagaagtgcagctgctgtgcctgatgtgggaacagctcttctcccagatgtaaatagaacaacctgcacaacctggatttttttaaaaatacaacactgagccatttgctgcatttctttttatactaaatatgtgactgacaataaaaacaattttgactttaaaaaaaaaaaaaaa

SEQ ID NO: 744 - DNA, 94 bp, Homo sapiens
tggatcgatgatgacctcaatacatgcattccttggaaagctgaacaaaatgagtgaaaactctataccgtcgtcctcgtcaaactgaggtcca

SEQ ID NO: 745 - DNA, 94 bp, Homo sapiens
tggatcgatgatgacttaaagatttatctaatttaaatctgaacaaaatgagtgaccaaaacacttctgtaccacttctgtgagctgaggtcca

SEQ ID NO: 746 - DNA, 3280 bp, Homo sapiens
gcaggcgcggaagtggggcctcgcccctgccgacgtcgcaggctggagctcacctgggagactccaagtggaagccgagcctcggttctgcctctccaggcaacgcgggaggcccagcgggaaggcaggaggcggcggcggaggaggagctctactgagccgcaactgtggcgacagcaaccggagtcgcagccgccgccacctgcacctggcgcctagcccacgtccagcgcctgcccggccgccgcttcccgccaccctgccctgcccacccgccaggtactaccattaaagataccttcttctcagcaaatctatgataaaaaatataagtaacagaagaagaaataactgttatttgtcaagtgacaagcttttaatgtcagaatggctcacctaaagcgactagtaaaattacacattaaaagacattaccataaaaagttctggaagcttggtgcagtaatttttttctttataatagttttggttttaatgcaaagagaagtaagtgttcaatattccaaagaggaatcaaggatggaaaggaacatgaaaaacaaaaacaagatgttggatttaatgctagaagctgtaaacaatattaaggatgccatgccaaaaatgcaaataggagcacctgtcaggcaaaacattgatgctggtgagagaccttgtttgcaaggatattatacagcagcagaattgaagcctgtccttgaccgtccacctcaggattcaaatgcacctggtgcttctggtaaagcattcaagacaaccaatttaagtgttgaagagcaaaaggaaaaggaacgtggggaagctaaacactgctttaatgctttcgcaagtgacaggatttctttgcaccgagatcttggaccagacactcgacctcctgaatgtattgaacaaaaatttaagcgctgccctcccctgcccaccaccagtgtcataatagtttttcataatgaagcgtggtccacgttgcttagaactgtccacagtgtgctctattcttcacctgcaatactgctgaaggaaatcattttggtggatgatgctagtgtagatgagtacttacatgataaactagatgaatatgtaaaacaattttctatagtaaaaatagtcagacaaagagaaagaaaaggtctgatcactgctcggttgctaggagcaacagtcgcaacagctgaaacgctcacatttttagatgctcactgtgagtgtttctatggttggctagaacctctgttggccagaatagctgagaactacacggctgtcgtaagtccagatattgcatccatagatctgaacacgtttgaattcaacaaaccttctccttatggaagtaaccataaccgtggaaattttgactggagtctttcatttggctgggagtcgcttcctgatcatgagaagcaaagaaggaaagatgaaacctacccaattaaaacacccacttttgcaggaggacttttttccatatcaaaagaatattttgagtatattggaagctatgatgaagaaatggaaatctggggaggtgaaaatatagaaatgtctttcagagtatggcaatgtggtgggcagttggagattatgccttgctctgttgttggacatgtttttcgcagcaaaagccctcatagctttccaaaaggcactcaggtgattgctagaaaccaagttcgccttgcagaagtctggatggatgaatacaaggaaatattttataggagaaatacagatgcagcaaaaattgttaaacaaaaagcatttggtgatctttcaaaaagatttgaaataaaacaccgccttcagtgtaaaaattttacatggtatctgaacaacatttatccagaggtgtatgtgccagaccttaatcctgttatatctggatacattaaaagcgttggtcagcctctatgtctggatgttggagaaaacaatcaaggaggcaaaccattaattatgtatacatgtcatggacttgggggaaaccagtactttgaatactctgctcaacatgaaattcggcacaacatccagaaggaattatgtcttcatgctgctcaaggtctcgttcagctgaaggcatgtacctacaaaggtcacaagacagttgtcactggagagcagatatgggagatccagaaggatcaacttctatacaatccattcttaaaaatgtgcctttcagcaaatggagagcatccaagtttagtgtcatgcaacccatcagatccactccaaaaatggatacttagccaaaatgattaagtgttccttaaaattaagttgaaaaaggaaatattctttctcataaaactgtgactaggcatacactgtagtttttgaaaattatgcaaaagcagctaaatgtaacttattccaagtgcatttttcttatttatatctttatgtagcactactacagaaattctgcaagtttctgtttcaaagcacaataactagtaataccaaagactatttcaaaatgtccagatgtaggggaagagatgtttacagtatgatgaaaataattttccaagtaaagtgatgtttgtgtgttttgtacacttagggatatatatatatagctacattcacacactcacaatttaaaatatttcccctagttttttggggggataggaagaaagatttgttactgtatttttttaactacataaaaatagatcaataaatgtcagcattggcctctgtgtacaaaccaagagcttttacagatccagaatttattagtttaaaatgcaggtgaacttttttttgcgtttggtttacttgtctgtcaaatgtttccttaaacatgaaactgaataaggagaagagtatttttaacacttaaatttcttggcaaattttaaaacattttttagtctgtaatacactccacttgaagcacttaagtcttccttaaatgacttttcttaagtaatgatactgtgtgttttcccaaagcacttttaaaaaaatttttataaattactatctgttgaaaaggtgtccttttcctttcttctagtatttttttcttaccaaaattcactaatcttgaatgtttgtgatattaaatttcaaatgcagaatacttgactcatttaaagctaaattttgttactgattcaattataattgtaatggatttttgactttgtaatggattcttttcatcaaaaagccttatttttttatctatgtggaaaacacaataaaaaatcctcaacactattgtaaaaaaaaaaaaaaa

SEQ ID NO: 747 - DNA, 2412 bp, Homo sapiens; identical to SEQ ID NO: 457

SEQ ID NO: 748 - DNA, 4576 bp, Homo sapiens
gatccccgcccctgctgcccgccacgtccctcacgtaccactcggcagaggcgcggggaaacctggcgtactggctgtggcttctctagcgggactcggcatgaggctggcgcggctgcttcgcggagccgccttggccggcccgggcccggggctgcgcgccgccggcttcagccgcagcttcagctcggactcgggctccagcccggcgtccgagcgcggcgttccgggccaggtggacttctacgcgcgcttctcgccgtccccgctctccatgaagcagttcctggacttcggatcagtgaatgcttgtgaaaagacctcatttatgtttctgcggcaagagttgcctgtcagactggcaaatataatgaaagaaataagtctccttccagataatcttctcaggacaccatccgttcaattggtacaaagctggtatatccagagtcttcaggagcttcttgattttaaggacaaaagtgctgaggatgctaaagctatttatgactttacagatactgtgatacggatcagaaaccgacacaatgatgtcattcccacaatggcccagggtgtgattgaatacaaggagagctttggggtggatcctgtcaccagccagaatgttcagtactttttggatcgattctacatgagtcgcatttcaattagaatgttactcaatcagcactctttattgtttggtggaaaaggcaaaggaagtccatctcatcgaaaacacattggaagcataaatccaaactgcaatgtacttgaagttattaaagatggctatgaaaatgctaggcgtctgtgtgatttgtattatattaactctcccgaactagaacttgaagaactaaatgcaaaatcaccaggacagccaatacaagtggtttatgtaccatcccatctctatcacatggtgtttgaacttttcaagaatgcaatgagagccactatggaacaccatgccaacagaggtgtttacccccctattcaagttcatgtcacgctgggtaatgaggatttgactgtgaagatgagtgaccgaggaggtggcgttcctttgaggaaaattgacagacttttcaactacatgtattcaactgcaccaagacctcgtgttgagacctcccgcgcagtgcctctggctggttttggttatggattgcccatatcacgtctttacgcacaatacttccaaggagacctgaagctgtattccctagagggttacgggacagatgcagttatctacattaaggctctgtcaacagactcaatagaaagactcccagtgtataacaaagctgcctggaagcattacaacaccaaccacgaggctgatgactggtgcgtccccagcagagaacccaaagacatgacgacgttccgcagtgcctagacacacttgggacatcggaaaatccaaatgtggcttttgtattaaatttggaaggtatggtgttcagaactatattataccaagtactttatttatcgttttcacaaaactatttgagtagaataaatggaaactgaattccatttgtgcccgttaaacctcctaaaggatgaaattgcacctattttacacttatattttcacagttaattgaacatatttttaaacaactgtagttttgggcaacttttcactttgtggtagacttcagaagtgtggaaatcttcgggtttctataggaaactagttttttttttttaagaaatactttcatttatgtttgctagaaacattttctaaatgatagtgattagctggttagccatcttcctgttatttggaggagttctgccatcttttattcggtagtgacagctgtaatatggtcttcatgtttatcagtgacttgactacaagtaaagcagaaaacagttggcctgtaatcacagaaccagccacccttcggcgtctacatgcattgtcttagctctgaggttaatttaccatttttaaattttattgtaaagaagtgtaatgactagctctctgtggatctatgccaaaatcatgggccatcttttctaagtgtacttctgattaatgcaaggggaaatttttatactgaaaacaaacaaacaaactagcagctactaaaatagagaagaaattgagggcaaagtaatatgtctccaaaactgaactgattgcttgttgagattacctagaaagcttttggaaaaaaatagagcttttctgcatcctactccagatacactgaatcggaatccctagggctagagcctagaaatctcactttttaaaatgcttccaaggtaagtctgatgcctaccctaggttgggaaccactctttcaaagtaaacagtgatgacacagcatttgctaaagtaacatctgtaggttttggtttccacctatttaaagtcagatttatagactcgaggagacagaaactgaatcccacacctggtgcaattagaagcataattagaagcagaagaacaaaatgccacgtaaccaaagcatcagagccatcattgcacgtgtctttttttcttttttcttttttttttttcaagacagggtctcgctcttttgcccaggatggagtacagtggcatggtcaaggctcactgcagcttcaatcttctgggctcaagtaatccttccacctcagcctcccatatagctggaactacagttgtgcactaccacacccagctaattttttgatttcttgtggagatgaggtctcagtatgttcccaggctagtgttgaactcctgagctcaagaaatcctcctgcctgagtctctgaaagtgctgggattacaggcgtgagccaccacacatggcctattgcacaagtcttgacaaacaacatatattttctaaaactatccagatttcattatcagggaaaagtttgcttaggtttattacagcagtccttggcatttgtatggtaatttgtactttacaaatactttgatatattataactctattggtctttgaaacaaagcgatacagtgtaggtggtatcattctctttctcactcagtgtggcccagagttgctcagaattggagcagagcctgagacgtatctgcagatcctgtcatcagctggcaagtccaggagactgtgtcatttagagactgtgttgttagttatccctcaacatcttctaaggtggcaggaaataatattggaaataacattttaaagtaaaaattttaaagtttaaagaagagttttgccacttaaacaggggagctttgtctggaaaatacactgagttgaaacacttcatccttggaaggattatataagatgaacagttgtgataaatgtgtagattagagggatgtgaatgggcagttagtccagtgccctcatttaagaggccaagatcctgattcagaggaggcatcctttgcccagagctgcttagctaatctgaccaaatgttgggaaaaatgtctcacctaacccactattccttaattatggattttgtgaaaaacaatagaacatgttaatgagtaatttatattagttcgatgtattacaattttttagctttaaattacagttttcttataatgttgaaatgttttagaatcctttgaatctaagtatttgtttcctaaatgaaacatttgtacaacatttgatgtttttacttatgaaatattctcctcccccaagaaaatttaaactttttctctctatttaaaagctaagaaatgttttaaaggaaaaatgaaattatcttcctttagcttatttttaaggtaaaacagctttttactctgttattgtggtaatggacagaatattacatacaaaaatattctgggagagctttttcctagttggttttaaatcattgtgccacctgaaaggtttttagattttataggagctaatttgtccaccagcattaatgtaacacagtgtagttatgaaaatatattgaaggacaggaagtggacacgaagtgatttttgtaacctgagcagttaatgaatgtgccaacattttctaggaagggacagcaagaatattctgctctgtagttaaaatactggctggcttttgatgtcttcatgcttaattgtgatcactttcttgcactgtgatgtttttacgtgaatatgttgaagtagaagtctaccatattattttataaaatgttttctgtatggcaataaactgaaaacatggatcaacccttcttttgaaaataaactgagtcaatttagccttttaaaaatatagtcatctcttttaaatagaatcctcttccaccatcaaggctcaacattttgtaagcatccaaaaaattggtaattagggggcttgcactaaatttcactatcttcagtagagaggaactgtttggaacttagatttccaatgtgtatattctaatggagaaagcaagaggtagagtttgtatgtttgacttaccttagatttttattttccatacatactgcaaatgattgacttgttgcataaatgaagatcttctgttgtgtgcttttcaaacactgtaaataaatttgaaatttgaa

SEQ ID NO: 749 - DNA, 5132 bp, Homo sapiens
gcgccgcgctgcgcaccgccgccgaccatgagcgaggacagccgcggagacagccgcgccgagagcgccaaggacctggagaagcagcttcgcctgcgcgtgtgcgtgctcagcgagctccagaagaccgagcgggactatgtgggcacgctggagttcctggtgtcggcattcttacacagaatgaaccagtgtgcagcatcaaaagttgacaaaaatgtgacagaagaaacagtgaagatgttgttctcaaacattgaagacatccttgcagtacataaagaattcttaaaagtcgtggaagaatgcttacaccccgaacctaatgctcaacaagaagtgggaacctgctttcttcactttaaagacaagtttcgtatctatgatgaatattgtagtaaccatgagaaggcacaaaaattacttcttgaactcaacaaaataagaacaatccggacatttcttttgaactgcatgctgcttggaggacggaagaacacagatgttcccttggaaggatatttagtaacaccaatacaaagaatatgcaagtaccctcttattttgaaggagttgctgaagcggactccacggaaacacagtgactatgcagcagtgatggaagccctccaagccatgaaagctgtctgttccaacataaacgaggccaagagacagatggagaagttagaagttttagaggaatggcagtctcacattgaaggctgggaggggtccaacatcactgacacctgcactgaaatgctaatgtgtggagtcttactgaaaatttcttctggaaatattcaagaacgggtgttttttcttttcgataatcttttggtgtactgcaaaagaaaacacagacggttgaagaacagcaaggcatctacagatggacatcggtacctttttcgtggccggatcaacacggaggtgatggaagtggagaatgtggatgatggcaccgctgatttccatagcagtggacacattgttgttaatggatggaagatacataacacagcaaaaaataaatggtttgtttgtatggcaaaaacacctgaagagaagcatgaatggtttgaagctattttgaaagaaagagaacggcggaaaggtttaaaattaggaatggagcaagatacctgggtcatgatctctgaacagggtgagaaactttataaaatgatgtgcagacaaggaaatctgatcaaagaccgaaagagaaaactgactacgttccctaaatgctttcttggaagcgaatttgtgtcatggctgttggaaattggagagattcacaggcctgaggaaggcgtgcacttgggacaagcattattagaaaatggaatcattcaccatgttactgataaacatcaattcaaaccagaacagatgttatatagatttcgctatgatgatggaacattttatccaagaaatgagatgcaggacgtgatttcaaagggtgtaagattatattgtcgtcttcatagcctttttactccagtgataagagataaagattaccatttaaggacctacaaatctgtggtcatggccaacaaactgatagactggttaattgcacagggagattgccgcaccagagaagaggcaatgatatttggcgttggactctgtgacaatggatttatgcaccatgtccttgaaaaaagcgaattcaaagatgaacccctacttttccgttttttttcggatgaggaaatggagggatcaaatatgaaacatcgacttatgaaacatgacttaaaagttgtggaaaatgttatagctaagtcattattgattaaatccaatgaaggcagctatggctttggattagaagacaaaaataaagttccaataataaagttggtagaaaagggatctaatgctgagatggctggcatggaagtcgggaaaaagatttttgctattaatggtgacctagtttttatgagacctttcaatgaagtggattgcttcctgaaatcgtgtttaaacagcagaaaacctctaagagttcttgtgagcacaaagccaagagagacagtgaaaattccagattcagctgatggacttggcttccagatccggggatttggcccttctgttgtgcatgctgtaggaagaggaactgtggctgcagcagctggtcttcaccctggacagtgcattatcaaggtgaatggaatcaatgtcagcaaagagacacatgccagtgtcattgcacacgttacagcctgcaggaagtacaggcggccaacgaagcaagattccatacaatgggtttataatagcattgagagtgctcaagaagaccttcaaaaatctcactccaagccccctggagatgaagcaggggatgcttttgactgtaaagtagaagaggttattgacaaattcaacactatggccatcattgatgggaagaaggagcatgtgagtctgacagtggacaatgtccacctggaatatggtgtcgtgtatgagtacgacagcacagctggcatcaagtgcaatgtggtggaaaagatgattgagcccaaaggtttcttcagcttaactgccaagattcttgaagccctggctaaaagtgatgagcattttgtacaaaactgtaccagcctaaattctctaaatgaagtgattcctactgaccttcagagtaaattcagtgccctttgcagtgaaagaattgaacacctatgtcagagaatatccagttataaaaagttttctcgtgtactgaagaatagggcctggcctacttttaaacaggccaaatctaaaatctccccactgcacagcagtgatttctgccctaccaactgccatgtcaatgtgatggaagtttcttatcccaaaacatcaacctctttgggaagtgcatttggtgttcagttggatagcaggaagcataattctcatgataaagaaaacaaatcttcggagcaagggaaactgagccctatggtgtacattcagcacaccatcacaaccatggcggccccttcaggtctgtctctgggacagcaggatggccatggtctcaggtatctgctaaaagaagaagacttagaaacccaagacatctatcagaaactgctgggcaaacttcagactgcactgaaagaggtggagatgtgtgtttgtcaaatagatgaccttctgtcttcaataacatattctcctaaattagaacgtaagacatcagagggcataataccaacagacagtgacaatgagaagggagaaagaaacagcaaacgggtatgttttaatgtagcaggagatgaacaggaagattctggtcatgacaccatcagcaacagagactcttacagtgactgcaacagcaataggaattccatcgcctccttcaccagcatctgcagcagccagtgcagctcgtatttccacagtgatgaaatggactcaggtgatgaacttcccttaagtgttcgcatatctcatgataaacaggacaagatacatagttgccttgagcatcttttcagccaggtggattcaattaccaatctcctaaaagggcaggctgttgtgagggcctttgaccaaaccaagtatctcactccaggccgaggattgcaagaatttcaacaggaaatggaaccaaagctgagttgtccaaaaaggctacggcttcatatcaagcaagatccttggaatcttcccagcagcgtccggactcttgctcagaacatcaggaaatttgttgaagaggtaaagtgtaggctactcctggctcttcttgaatattcagatagtgagacacagctccgtagagacatggttttctgccagactcttgtggccactgtctgtgccttctctgagcagctcatggcggccttgaaccagatgtttgacaacagcaaggaaaatgagatggaaacttgggaagccagcaggaggtggctggaccagatagcgaatgcaggtgttctttttcactttcagtcacttctgtcaccaaacttgacagatgaacaagccatgttagaagatacactggttgcactatttgatttggaaaaggtttccttttactttaaaccatcagaagaggaacctctggttgcaaatgttcctcttacatatcaagcagaaggaagtcggcaagctctgaaagtttacttctacattgatagttatcattttgaacaacttcctcaacggctgaaaaatggaggagggtttaaaattcatcctgttctttttgcacaagcactagagagcatggaaggatattattacagagacaatgtttctgtggaagaatttcaagctcagataaatgcagcctcactggaaaaggtcaaacagtacaaccagaagctcagggcattctacttggacaagtcaaattcaccaccaaactccacatccaaagctgcctatgtagataagctaatgaggcctctcaacgctttggatgaactttaccgactggtagcctcgtttatcagatccaagcgcacagctgcctgtgcaaacacagcttgcagtgcttctggggttggactgctgtcagtttcctcggagctgtgcaacaggctgggcgcctgccacatcatcatgtgcagcagcggtgtgcatcggtgcaccctgagcgtgacgctggagcaagccatcattctggccagaagccacggactgccacctcgttacatcatgcaggctacagatgtgatgcggaagcagggagcaagagttcagaacacagcgaagaatttgggagtcagagaccggactccacagtctgcaccaaggctgtacaagctgtgcgagccacctcccccagctggagaagaatgaaaagaactcccaagaaaccaggcaggcagaagctcctgaatgctggactagacaaactacatgctggctaaacattctccactgaagatacatcaatgcttttttttttttttttttctgtaaatctttcttcccattgcaaacaagtagtgatcagtttatactttgatatttatgctggaaatggatagaagttcaatcagacagttcagcttcacgaactgatgtctctctgtattgacattaagtattcacttttagagtaaaatccatccctgggacat

SEQ ID NO: 750 - DNA, 2657 bp, Homo sapiens
aactagcccagccgcgcggagcgcctgggagaggagaaggagccgacctgccgagatggaggcgaccggcacctgggcgctgctgctggcgctggcgctgctcctgctgctgacgctggcgctgtccgggaccagggcccgaggccacctgccccccgggcccacgccgctaccactgctgggaaacctcctgcagctacggcccggggcgctgtattcagggctcatgcggctgagtaagaagtacggaccggtgttcaccatctacctgggaccgtggcggcctgtggtggtcctggttgggcaggaggctgtgcgggaggccctgggaggtcaggctgaggagttcagcggccggggaaccgtagcgatgctggaagggacttttgatggccatggggttttcttctccaacggggagcggtggaggcagctgaggaagtttaccatgcttgctctgcgggacctgggcatggggaagcgagaaggcgaggagctgatccaggcggaggcccggtgtctggtggagacattccaggggacagaaggacgcccattcgatccctccctgctgctggcccaggccacctccaacgtagtctgctccctcctctttggcctccgcttctcctatgaggataaggagttccaggccgtggtccgggcagctggtggtaccctgctgggagtcagctcccaggggggtcagacctacgagatgttctcctggttcctgcggcccctgccaggcccccacaagcagctcctccaccacgtcagcaccttggctgccttcacagtccggcaggtgcagcagcaccaggggaacctggatgcttcgggccccgcacgtgaccttgtcgatgccttcctgctgaagatggcacaggaggaacaaaacccaggcacagaattcaccaacaagaacatgctgatgacagtcatttatttgctgtttgctgggacgatgacggtcagcaccacggtcggctataccctcctgctcctgatgaaataccctcatgtccaaaagtgggtacgtgaggagctgaatcgggagctgggggctggccaggcaccaagcctaggggaccgtacccgcctcccttacaccgacgcggttctgcatgaggcgcagcggctgctggcgctggtgcccatgggaataccccgcaccctcatgcggaccacccgcttccgagggtacaccctgccccagggcacggaggtcttccccctccttggctccatcctgcatgaccccaacatcttcaagcacccagaagagttcaacccagaccgtttcctggatgcagatggacggttcaggaagcatgaggcgttcctgcccttctccttagggaagcgtgtctgccttggagagggcctggcaaaagcggagctcttcctcttcttcaccaccatcctacaagccttctccctggagagcccgtgcccgccggacaccctgagcctcaagcccaccgtcagtggccttttcaacattcccccagccttccagctgcaagtccgtcccactgaccttcactccaccacgcagaccagatgaaggaaggcaacttggaagtggtgggtgcccaggacggtgcctccagcctcaacagtgggcatggacagggttaatgtctccagagtgtacactgcaggcagccacatttacacgcctgcagttgttttccggagtctgtcccacggcccacacgctcacttgactcatgctgctaagatgcacaaccgcacacccatacacaactacaagggccacaaagcaactgctgggttagctttccacagacataaatatagtccatctgcaatcacaagcacatagccaggtaacccaccaactcccctggatctgcagcccacacgtgggagtctggctgtcaccttcacaagccacagaaacggccacacatgttcacagctcacacgccctctccattcatcgaacttctcagtgtccctgtccctggtgcctggcacagggaacagcatgccccctccggggtcatgccacccagagactgtcgctgtctatggccccaactcatgctccctctcttggctacaccactctcccagcctgtgaccaccgatgtccacacacccccaaccacttgtccacacagctacccacgtacgacatcgtcctggctccccagagtatcttcccactgagacacgccgcccccacagaggcacagtccccagccacctctgcaactgcagccctcagtcacccctttttaagcaccctgattctaccaaatgcaaacacatctgggtctgcgattatgcacagagactttggacatacgaggaccctcagaccggaggaacacctgcccaaccccaacacgtgcttatgtaaccacgtggaaagcggcccctgctgcccctccacacacacatacacactcactgatctacagcccctgttcggcgtcagagtccccactagacccagtggaaggggttagagaccaagtaggggccagtttccaattcaccctgtcagggagtgagccggatctgacgttccttgtgacttaagggtccggcttgggaattaaagtttgtttctggcctttagcctaaaaaaaaaaaaaaaaaaaaaaaaaaaaaaaaaaaaa

SEQ ID NO: 751 - DNA, 8080 bp, Homo sapiens
acagcgctctcgacacggagcacccttctagcttcttcgtctccaggactgacgctcaggctcctctctcgccttagcccaacttgctttcccgcctcgcaaactccggtttccctccactcccaactcttttcactacacgtttcccctcctctatctcccacgccacgaaccccgatccccagactcctctctcccgccctcctccttcctctctcctcccttcaactcttcatccgcttccacctcagactctgcgcgcacccaattcagtcgcccgctcccgttcggctcctcgaagccatggcgggacctgggggctggagggacagggaggtcacggatctgggccacctgccggatccaactggaatattctcactagataaaaccattggccttggtacttatggcagaatctatttgggacttcatgagaagactggtgcatttacagctgttaaagtgatgaacgctcgtaagacccctttacctgaaataggaaggcgagtgagagtgaataaatatcaaaaatctgttgggtggagatacagtgatgaggaagaggatctcaggactgaactcaaccttctgaggaagtactctttccacaaaaacattgtgtccttctatggagcatttttcaagctgagtccccctggtcagcggcaccaactttggatggtgatggagttatgtgcagcaggttcggtcactgatgtagtgagaatgaccagtaatcagagtttaaaagaagattggattgcttatatctgccgagaaatccttcagggcttagctcaccttcacgcacaccgagtaattcaccgggacatcaaaggtcagaatgtgctgctgactcataatgctgaagtaaaactggttgattttggagtgagtgcccaggtgagcagaactaatggaagaaggaatagtttcattgggacaccatactggatggcacctgaggtgattgactgtgatgaggacccaagacgctcctatgattacagaagtgatgtgtggtctgtgggaattactgccattgaaatggctgaaggagcccctcctctgtgtaaccttcaacccttggaagctctcttcgttattttgcgggaatctgctcccacagtcaaatccagcggatggtcccgtaagttccacaatttcatggaaaagtgtacgataaaaaatttcctgtttcgtcctacttctgcaaacatgcttcaacacccatttgttcgggatataaaaaatgaacgacatgttgttgagtcattaacaaggcatcttactggaatcattaaaaaaagacagaaaaaaggaatacctttgatctttgaaagagaagaagctattaaggaacagtacaccgtgagaagattcagaggaccctcttgcactcacgagcttctgagattgccaaccagcagcagatgcagaccacttagagtcctgcatggggaaccctctcagccaaggtggctacctgatcgagaagagccacaggtccaggcacttcagcagctacagggagcagccagggtattcatgccactgcaggctctggacagtgcacctaagcctctaaaggggcaggctcaggcacctcaacgactacaaggggcagctcgggtgttcatgccactacaggctcaggtgaaggctaaagcctctaaacctctacaaatgcagattaaggcacctccacgactacggagggcagccagggtgctcatgccactacaggcacaggttagggcacctaggcttctgcaggtacagtcccaggtatccaaaaagcagcaggcccagacccagacatcagaaccacaagatttggaccaggtaccagaggaatttcagggtcaagatcaggtacccgaacaacaaaggcagggccaggcccctgaacaacagcagaggcacaaccaggtgcctgaacaagagctggagcagaaccaggcacctgaacagccagaggtacaggaacaggctgccgagcctgcacaggcagagactgaggcagaggaacctgagtcattacgagtaaatgcccaggtatttctgcccctgctatcacaagatcaccatgtgctgttgccactacatttggatactcaggtgctcattccagtagaggggcaaactgaaggatcacctcaggcacaggcttggacactagaacccccacaggcaattggctcagttcaagcactgatagagggactatcaagagacttgcttcgggcaccaaactcaaataactcaaagccacttggtccgttgcaaaccctgatggaaaatctgtcatcaaataggttttactcacaaccagaacaggcacgggagaaaaaatcaaaagtttctactctgaggcaagcactggcaaaaagactatcaccaaagaggttcagggcaaagtcatcatggagacctgaaaagcttgaactctcggatttagaagcccgcaggcaaaggcgccaacgcagatgggaagatatctttaatcagcatgaggaagaattgagacaagttgataaagacaaagaagatgaatcatcagacaatgatgaagtatttcattcgattcaggctgaagtccagatagagccattgaagccatacatttcaaatcctaaaaaaattgaggttcaagagagatctccttctgtgcctaacaaccaggatcatgcacatcatgtcaagttctcttcaagcgttcctcagcggtctcttttggaacaagctcagaagcccattgacatcagacaaaggagttcgcaaaatcgtcaaaattggctggcagcatcagaatcttcttctgaggaagaaagtcctgtgactggaaggaggtctcagtcatcaccaccttattctactattgatcagaagttgctggttgacatccatgttccagatggatttaaagtaggaaaaatatcaccccctgtatacttgacaaacgaatgggtaggctataatgcactctctgaaatcttccggaatgattggttaactccggcacctgtcattcagccacctgaagaggatggtgattatgttgaactctatgatgccagtgctgatactgatggtgatgatgatgatgagtctaatgatacttttgaagatacctatgatcatgccaatggcaatgatgacttggataaccaggttgatcaggctaatgatgtttgtaaagaccatgatgatgacaacaataagtttgttgatgatgtaaataataattattatgaggcgcctagttgtccaagggcaagctatggcagagatggaagctgcaagcaagatggttatgatggaagtcgtggaaaagaggaagcctacagaggctatggaagccatacagccaatagaagccatggaggaagtgcagccagtgaggacaatgcagccattggagatcaggaagaacatgcagccaatataggcagtgaaagaagaggcagtgagggtgatggaggtaagggagtcgttcgaaccagtgaagagagtggagcccttggactcaatggagaagaaaattgctcagagacagatggtccaggattgaagagacctgcgtctcaggactttgaatatctacaggaggagccaggtggtggaaatgaggcctcaaatgccattgactcaggtgctgcaccgtcagcacctgatcatgagagtgacaataaggacatatcagaatcatcaacacaatcagatttttctgccaatcactcatctccttccaaaggttctgggatgtctgctgatgctaactttgccagtgccatcttatacgctggattcgtagaagtacctgaggaatcacctaagcaaccctctgaagtcaatgttaacccactctatgtctctcctgcatgtaaaaaaccactaatccacatgtatgaaaaggagttcacttctgagatctgctgtggttctttgtggggagtcaatttgctgttgggaacccgatctaatctatatctgatggacagaagtggaaaggctgacattactaaacttataaggcgaagaccattccgccagattcaagtcttagagccactcaatttgctgattaccatctcaggtcataagaacagacttcgggtgtatcatctgacctggttgaggaacaagattttgaataatgatccagaaagtaaaagaaggcaagaagaaatgctgaagacagaggaagcctgcaaagctattgataagttaacaggctgtgaacacttcagtgtcctccaacatgaagaaacaacatatattgcaattgctttgaaatcatcaattcacctttatgcatgggcaccaaagtcctttgatgaaagcactgctattaaagtatgcattgatcaatcagcagactctgaaggagactacatgtcctatcaagcctatatacgaatactggcaaaaatacaggcagctgatccagtgaaccggtttaagagaccagatgagctccttcatttgctgaagctcaaggtatttccaacacttgatcataagccagtgacagttgacctggctattggttctgaaaaaagactaaagattttcttcagctcagcagatggatatcacctcatcgatgcagaatctgaggttatgtctgatgtgaccctgccaaagaatcccctggaaatcattataccacagaatatcatcattttacctgattgcttgggaattggcatgatgctcaccttcaatgctgaagccctctctgtggaagcaaatgaacaactcttcaagaagatccttgaaatgtggaaagacataccatcttctatagcttttgaatgtacacagcgaaccacaggatggggccaaaaggccattgaagtgcgctctttgcaatccagggttctggaaagtgagctgaagcgcaggtcaattaagaagctgagattcctgtgcacccggggtgacaagctgttctttacctctaccctgcgcaatcaccacagccgggtttacttcatgacacttggaaaacttgaagagctccaaagcaattatgatgtctaaaagtttccagtgatttattaccacattataaacatcatgtataggcagtctgcatcttcagatttcagagattaaatgagtattcagttttatttttagtaaagattaaatccaaaactttacttttaatgtagcacagaatagttttaatgagaaatgcagctttatgtataaaattaactatagcaagctctaggtactccaatggtgtacaatgtcttttgcacaaactttgtaacttttgttactgtgaattcaaacattactctttggacagtttggacagtatctgtattcagattttacaacatggagtaaagaaacctgttatgaattagattacaagcagccttcaaaagaattggcactgggataagatttttcagaaaaagaaaaacatcggcaaactgtgtgtgatttttccaaagctatataaagaaccaaaggtttagtcaagaaacaaaaatcttaaagattattataacccagactaaggttgaacaacctgcatgcccagagaaaactatggcgacaaaggggaaaaggccaccactcgttttctcactgattcatgccaattaagcctacagttaaagaccagttttgttcttttcacccatttttaagctggttttctcctgataagaagaaaggaagaaagccccagacgcttggtttttctcagaacccccaaaagatgtgcaatagctgttgttacaaaccaccaaataatacagttgtgagcctgaatacaggactgaactcctatacacgtgtactgtagaatgagtattttttaataccttaaggtaggcgtcaaattctactccccaaagcagagatagattgatttatcaaaattattatctggccaacagtgtgactatcagacagcatcaaatatttgcccaatccaagattagactacacaaaagcttccttccagtattaaacaaaaagaattaaacataactatgaaaaaactttgctaatatctgtgtttttcagatttcattttttgtaaaatcagaaattaatctaaacatattcagtgataagttcatgtgtaacgacttaatgttaaaggttaaaaaaaagatttcacaaaatatacaactttcaccatatatataagcctgcaaaattagagtagtgaaagtcatgctagtccatcacccaaatatgttatagacgccatagacaggtgatgtttggtcacctatggtaactgctacctgatgaagagcataatttctgcatatccatcctcaataccatggtaaattctggggcaatagagaagcaacagaactgccacaaagtatacctcaatataattcctctagttctgcttctaaaatctgaggacagtgctagtgggaaaataattttcaaactacctggttaaccaaaatacaaaagcagctgactatgtgtgatttcataatagcacatttcttgacacttagtgctagaaatgaagatttggattttcctaacaacttacatcaagaatgtagtgtagctcattattgagaatttaggaaagcctgaatccattaattaaggaaataaatgtgactcacatttcttttactgtgacacaataatgtgatcctaaaactggcttatccttgagtgtttacaactcaaacaactttttgaatgcagtagttttttttttttaaaaacaaacttttatgtcaaattttttttcttagaagtagtcttcattattataaatttgtacaccaaaaggccatggggaactttgtgcaagtacctcatcgctgagcaaatggagcttgctatgttttaatttcagaaaatttcctcatatacgtagtgtgtagaatcaagtcttttaataattcattttttcttcataatatttactcaaagttaagcttaaaaataagttttatcttaaaatcatatttgaagacagtaagacagtaaactattttaggaagtcaacccccattgcactctgtggcagttattctggtaaaaataggcaaaagtgacctgaatctacaatgatgtcccaaagtaaccaagtaagagagattgtaaatgataaaccgagctttaaaggataaagtgttaataaagaaaggaagctgggcacatgtcaaaaagggagatcgaaatgttaggtaatcatttagaaaggacagaaaatatttaaagtggctcataggtaatgaatatttctgacttagatgtaaatccatctggaatctttacatcctttgccagctgaaacaagaaagtgaagggacaatgatatttcatggtcagtttattttgtaagagacagaagaaattatatctatacattaccttgtagcagcagtacctggaagccccagcccgtcacagaagtgtggaggggggctcctgactagacaatttccctagcccttgtgatttgaagcatgaaagttctggcaggttatgagcagcactagggataaagtatggttttattttggtgtaatttaggtttttcaacaaagcccttgtctaaaataaaaggcattattggaaatatttgaaaactagaaaatgatggataaaagggctgataagaaaatttctgactgtcagtagaagtgagataagatcctcagaggaaacagtaagaagggataatcattaagatagtaaaacaggcaaagcagaatcacatgtgcacacacacatacacatgtaaacattggaatgcataagttttaatattttagcgctatcagtttctaaatgcattaattactaactgccctctcccaagattcatttagttcaaacagtatccgtaaactaggaataatgccacatgcattcaatgggatcttttaagtactcttcagtttgttccaagaaatgtgcctactgaaatcaaattaatttgtattcaatgtgtacttcaagactgctaattgtttcatctgaaagcctacaatgaatcattgttcaaccttgaaaaataaaattttgtaaaacaaaaaaaaaaaaaaaaaaa

SEQ ID NO: 752 - DNA, 4776 bp, Homo sapiens
cggccgcatccttgccgcccgccccggcccagccgcgtcccggagccgtcgggcatggagccgtggaagcagtgcgcgcagtggctcatccattgcaaggtgctgcccaccaaccaccgggtgacctgggactcggctcaggtgttcgaccttgcgcagaccctccgcgatggagtcctgctctgccagctgcttaacaacctccgggcgcactccatcaacctgaaggagatcaacctgaggccgcagatgtcccagtttctctgtttgaagaacataaggacatttctcacggcctgttgtgagacgtttggaatgaggaaaagtgaacttttcgaggcatttgacttgtttgatgttcgtgactttggaaaggttatagaaacattatcacgactttctcgaacacctatagcattggccacaggaatcaggcccttcccaacagaagaaagcattaatgatgaagacatctacaaaggccttcctgatttaatagatgaaacccttgtggaagatgaagaagatctctatgactgtgtttatggggaagatgaaggtggagaagtctatgaggacttaatgaaggcagaggaagcacatcagcccaaatgtccagaaaatgatatacgaagttgttgtctagcagaaattaagcagacagaagaaaaatatacagaaactttggagtcaatagaaaagtatttcatggcaccactaaaaagatttctgacagcagcagaatttgattcagtattcatcaacattcctgaacttgtaaaacttcatcggaacctaatgcaagagattcatgattccattgtaaataaaaatgaccagaacttgtaccaagtttttattaactacaaggaaagattggttatttacgggcagtactgcagtggagtggagtcagccatctctagtttagactacatttctaagacaaaagaagatgtcaaactgaaattagaggaatgttccaaaagagcaaataatgggaaatttactcttcgagacttgcttgtggttcctatgcaacgtgttttaaagtaccaccttctcctccaggaactggtcaaacataccactgatccgactgagaaggcaaatctgaaactggctcttgatgccatgaaggacttggcacaatatgtgaatgaagtgaaaagagataatgagacccttcgtgaaattaaacagtttcagctatctatagagaatttgaaccaaccagttttgctttttggacgacctcagggagatggtgaaattcgaataaccactctagacaagcataccaaacaagaaaggcatatcttcttatttgatttggcagtgatcgtatgtaagagaaaaggtgataactatgaaatgaaggaaataatagatcttcagcagtacaagatagccaataatcctacaaccgataaagaaaacaaaaagtggtcttatggcttctacctcatccatacccaaggacaaaatgggttagaattttattgcaaaacaaaagatttaaagaagaaatggctagaacagtttgaaatggctttgtctaacataagaccagactatgcagactccaatttccacgacttcaagatgcataccttcactcgagtcacatcctgcaaagtctgccagatgctcctgaggggaacattttatcaaggctatttatgttttaagtgtggagcgagagcacacaaagaatgtttgggaagagtagacaattgtggcagagttaattctggtgaacaagggacactcaaactaccagagaaacggaccaatggactgcgaagaactcctaaacaggtggatccaggtttaccaaagatgcaggtcattaggaactattctggaacaccacccccagctctgcatgaaggaccccctttacagctccaggccggggataccgttgaacttctgaaaggagatgcacacagtctgttttggcagggcagaaatttagcatctggagaggttggattttttccaagtgatgcagtcaagccttgcccatgtgtgcccaaaccagtagattattcttgccaaccctggtatgctggagcaatggaaagattgcaagcagagaccgaacttattaatagggtaaatagtacttaccttgtgaggcacaggaccaaagagtcaggagaatatgcaattagcattaagtacaataatgaagcaaagcacatcaagattttaacaagagatggcttttttcacattgcagaaaatagaaaatttaaaagtttaatggaacttgtggagtactacaagcatcattctctcaaggaagggttcagaaccttagatacaactctgcagtttccatacaaggagccagaacattcagctggacagaggggtaatagagcaggcaacagcttgttaagtccaaaagtgctgggcattgccatcgctcggtatgacttctgtgcaagagatatgagagagttgtccttgttgaaaggagatgtggtgaagatttacacaaagatgagtgcaaatggctggtggagaggagaagtaaatggcagggtgggctggtttccatccacatatgtggaagaggatgaataaattcaaatcccgtgttgcaccctgcaccaaaaatttcagagaagggataaatagaagcctgcacagcatcgtgaattaactgaagtgtttaaaaagctgcatttctggctgttcaacatcctccctccttagcccctcctaagtcttaatgctgagatttctaaagatgctggtactgacagattaatggcttgcctagagctgtgcaagaaacagcctgccagtctgtcattgtcagggaccagggcaaaaccaagagctgttcttcccagaagagccctgcaaacacattggttcgtgcttccctttacttcttctggtcagataccatgaatgccagtcatcagtaaatcttaatacacttttgctttattctcacatgccattcaccagattatttgatggtacaaagaagcagaagtgtaattttccttttcccagcatgacgaaaaattggagttctgccatttgagcagcttactggaaagatccagccttacttgtcttaaattgtccaacaaggtgactcattgcccggcaaacacttttaccctcagatgttactcatgatattataaaatatgaggccagtgctcaggtttgcatcataagtgagctatccctgaagggttttaattacttatttggtgtcctgattatatttgcaaacttctttataaaaggtgaaaaaagcacacaaaagagagggtgtcttcatattaaaccttcacaaccttcatgatttcataggattattttggaaatatagcacttgactttatgaaaggatctgggctaggtatattaagggtagttgccaataacctgaagaagctggcattgtttacagaaacagatcaagggctataatttatgtcattttatagcagcagtatctattaatacatgccttttcctcccatccacctcccccgcacacacacaaagatgacctgggacatgatttttttattcccacattttcttggagcacaaacaactttgttgaggattttggaaggaaagcacaactgggtcctttattcatttctgggacagaaagagggtcagtggacttttgtgggcctccagcttctctcagagtctccccctctgcagcccatcctgggagtgtattaactggagggaagatgggtcttgcagtacatttgttttgcccagccatcactcttttttgtgaggagcctaaatacattcttcctggggtccagagtccccattcaaggcagtcaagttaagacactaacttggccctttcctgatggaaatatttcctccatagcagaagttgtgttctgacaagactgagagagttacatgttgggaaaaaaaagaagcattaacttagtagaactgaaccaggagcattaagttctgaaattttgaatcatctctgaaatgaagcaggtgtagcctgccctctcatcaatccgtctgggtgccagaactcaaggttcagtggacacatccccctgttagagaccctcatgggctaggacttttcatctaggatagattcaagacctttacctcagaattatgtaaactgtgattgtgttttagaaaaattattatttgctaaaaccatttaagtctttgtatatgtgtaaatgatcacaaaaatgtattttataaaatgttctgtacaataaagttacacctcaaagtgtactcttggaatggattctttcctgtaaagtcttatctgcgactctgtctcgggaatgttttgtctgttgccgtcagccgaactttgttatggagggagcagcctcacacaagcagaaacactcctgtggatggtattgtagcatgtattgtttattttagtcaatagaccctctccttataaatggtgtttagtcttcctgttgcatttcatgggcctgggggtttcctagcagaggatattggagcccctttttgtgacattaccaattacatctttgtccacgtttaatactttgttttggaaaatttaaatgctgcagatttgtgtagagttctaataccaaagacagaagtaaatgttttccatatactttgtcttgcctgtatgcagccctcgtgtaatacggtgaattagagtggtatttcactttgtattattttgtaaatatgtcaatataataaatagtgactaaattgataaaaaaa

SEQ ID NO: 753 - DNA, 1439 bp, Homo sapiens
agtcacatttcagccactgctctgagaatttgtgagcagcccctaacaggctgttacttcactacaactgacgatatgatcatcttaatttacttatttctcttgctatgggaagacactcaaggatggggattcaaggatggaatttttcataactccatatggcttgaacgagcagccggtgtgtaccacagagaagcacggtctggcaaatacaagctcacctacgcagaagctaaggcggtgtgtgaatttgaaggcggccatctcgcaacttacaagcagctagaggcagccagaaaaattggatttcatgtctgtgctgctggatggatggctaagggcagagttggataccccattgtgaagccagggcccaactgtggatttggaaaaactggcattattgattatggaatccgtctcaataggagtgaaagatgggatgcctattgctacaacccacacgcaaaggagtgtggtggcgtctttacagatccaaagcaaatttttaaatctccaggcttcccaaatgagtacgaagataaccaaatctgctactggcacattagactcaagtatggtcagcgtattcacctgagttttttagattttgaccttgaagatgacccaggttgcttggctgattatgttgaaatatatgacagttacgatgatgtccatggctttgtgggaagatactgtggagatgagcttccagatgacatcatcagtacaggaaatgtcatgaccttgaagtttctaagtgatgcttcagtgacagctggaggtttccaaatcaaatatgttgcaatggatcctgtatccaaatccagtcaaggaaaaaatacaagtactacttctactggaaataaaaactttttagctggaagatttagccacttataaaaaaaaaaaaaaggatgatcaaaacacacagtgtttatgttggaatcttttggaactcctttgatctcactgttattattaacatttatttattatttttctaaatgtgaaagcaatacataatttagggaaaattggaaaatataggaaactttaaacgagaaaatgaaacctctcataatcccactgcatagaaataacaagcgttaacattttcatatttttttctttcagtcatttttctatttgtggtatatgtatatatgtacctatatgtatttgcatttgaaattttggaatcctgctctatgtacagttttgtattatactttttaaatcttgaactttataaacattttctgaaatcattgattattctacaaaaacatgattttaaacagctgtaaaatattctatgatatgaatgttttatgcattatttaagcctgtctctattgttggaatttcaggtcattttcataaatattgttgcaataaatatccttgaacacacaaaaaaaaaaaaaaaa

SEQ ID NO: 754 - DNA, 7442 bp, Homo sapiens
ccggagcggccggggccacgatggagcgcgacggctgcgcggggggcgggagccgcggcggcgagggcgggcgcgctccccgggagggcccggcggggaacggccgcgatcggggccgcagccacgctgccgaggcgcccggggacccgcaggcggccgcgtccttgctggcccctatggacgtgggggaggagccgctggagaaggcggcgcgcgcccgcactgccaaggaccccaacacctataaagtactctcgctggtattgtcagtatgtgtgttaacaacaatacttggttgtatatttgggttgaaaccaagctgtgccaaagaagttaaaagttgcaaaggtcgctgtttcgagagaacatttgggaactgtcgctgtgatgctgcctgtgttgagcttggaaactgctgtttagattaccaggagacgtgcatagaaccagaacatatatggacttgcaacaaattcaggtgtggtgagaaaaggttgaccagaagcctctgtgcctgttcagatgactgcaaggacaagggcgactgctgcatcaactacagttctgtgtgtcaaggtgagaaaagttgggtagaagaaccatgtgagagcattaatgagccacagtgcccagcagggtttgaaacgcctcctaccctcttattttctttggatggattcagggcagaatatttacacacttggggtggacttcttcctgttattagcaaactaaaaaaatgtggaacatatactaaaaacatgagaccggtatatccaacaaaaactttccccaatcactacagcattgtcaccggattgtatccagaatctcatggcataatcgacaataaaatgtatgatcccaaaatgaatgcttccttttcacttaaaagtaaagagaaatttaatcctgagtggtacaaaggagaaccaatttgggtcacagctaagtatcaaggcctcaagtctggcacatttttctggccaggatcagatgtggaaattaacggaattttcccagacatctataaaatgtataatggttcagtaccatttgaagaaaggattttagctgttcttcagtggctacagcttcctaaagatgaaagaccacacttttacactctgtatttagaagaaccagattcttcaggtcattcatatggaccagtcagcagtgaagtcatcaaagccttgcagagggttgatggtatggttggtatgctgatggatggtctgaaagagctgaacttgcacagatgcctgaacctcatccttatttcagatcatggcatggaacaaggcagttgtaagaaatacatatatctgaataaatatttgggggatgttaaaaatattaaagttatctatggacctgcagctcgattgagaccctctgatgtcccagataaatactattcatttaactatgaaggcattgcccgaaatctttcttgccgggaaccaaaccagcacttcaaaccttacctgaaacatttcttacctaagcgtttgcactttgctaagagtgatagaattgagcccttgacattctatttggaccctcagtggcaacttgcattgaatccctcagaaaggaaatattgtggaagtggatttcatggctctgacaatgtattttcaaatatgcaagccctctttgttggctatggacctggattcaagcatggcattgaggctgacacctttgaaaacattgaagtctataacttaatgtgtgatttactgaatttgacaccggctcctaataacggaactcatggaagtcttaaccaccttctaaagaatcctgtttatacgccaaagcatcccaaagaagtgcaccccctggtacagtgccccttcacaagaaaccccagagataaccttggctgctcatgtaacccttcgattttgccgattgaggattttcaaacacagttcaatctgactgtggcagaagagaagattattaagcatgaaactttaccctatggaagacctagagttctccagaaggaaaacaccatctgtcttctttcccagcaccagtttatgagtggatacagccaagacatcttaatgcccctttggacatcctataccgtggacagaaatgacagtttctctacggaagacttctccaactgtctgtaccaggactttagaattcctcttagtcctgtccataaatgttcattttataaaaataacaccaaagtgagttacgggttcctctccccaccacaactaaataaaaattcaagtggaatatattctgaagctttgcttactacaaatatagtgccaatgtaccagagttttcaagttatatggcgctactttcatgacaccctactgcgaaagtatgctgaagaaagaaatggtgtcaatgtcgtcagtggtcctgtgtttgactttgattatgatggacgttgtgattccttagagaatctgaggcaaaaaagaagagtcatccgtaaccaagaaattttgattccaactcacttctttattgtgctaacaagctgtaaagatacatctcagacgcctttgcactgtgaaaacctagacaccttagctttcattttgcctcacaggactgataacagcgagagctgtgtgcatgggaagcatgactcctcatgggttgaagaattgttaatgttacacagagcacggatcacagatgttgagcacatcactggactcagcttctatcaacaaagaaaagagccagtttcagacattttaaagttgaaaacacatttgccaacctttagccaagaagactgatatgttttttatccccaaacaccatgaatctttttgagagaaccttatattttatatagtcctctagctacactattgcattgttcagaaactgtcgaccagagttagaacggagccctcggtgatgcggacatctcagggaaacttgcgtactcagcacagcagtggagagtgttcctgttgaatcttgcacatatttgaatgtgtaagcattgtatacattgatcaagttcgggggaataaagacagaccacacctaaaactgcctttctgcttctcttaaaggagaagtagctgtgaacattgtctggataccagatatttgaatctttcttactattggtaataaaccttgatggcattgggcaaacagtagacttatagtagggttggggtagcccatgttatgtgactatctttatgagaattttaaagtggttctggatatcttttaacttggagtttcatttcttttcattgtaatcaaaaaaaaaattaacagaagccaaaatacttctgagaccttgtttcaatctttgctgtatatcccctcaaaatccaagttattaatcttatgtgttttctttttaattttttgattggatttctttagatttaatggttcaaatgagttcaactttgagggacgatctttgaatatacttacctattataaaatcttactttgtatttgtatttaaaaaagaaaaatattcctatcctgctcactggtaattaacataggtttaaaatggcttcaaatgtggccctatagacggttaaaattgtaccttatcttggcaaaacttcagagcaccagtcagtgcatgcaaggtgccattttttattgagatgcttagaatgtttctttctgtgcacaagacttaccctaccagcagcagagccattctctgttgagtggttcattttgaagttccacagattgaagagaacatgccaccaatcacctcacatcttcttggtggacatgataaatgacacaatgaacttgatttctttactaccttgactgtagctttttatccctacctgtgaaccttcaaagactgcattaacttttaggctacataggtccaattgaggtataatatcagtacaccaaagatttttatatgtccttcgtgtgaccattcttcaacggcctaagggccagctgcaaagacttttggaaaatacaatttacaactcaaaattatttaataatttaggaagttgctttttttttttttttttttcagtcctgcagtttcctgaagctctgtatatgatatttttttcagcctgcttctctctgttgttcagattaggtaattttattcttctgtctcgaagctcactgattctttattctgtctaatctgttctgctgttgagcccatttattcctgatttttatattttagttattgtatgttttatttctaaaatttccattcagtttttctttatatcttctatttgctgagaatttctgtctctttgctgagactttctacgttttcatttgtttcaagtgcatttatacttgcttgttgaagaatttttatgatggctgctgtaaaatccttatcagataattccaacatctgtcacctcattgtttgcatctactgatggtcttttttccattcggaaacattttcctgtttcttggtgtgtggaatgattttttattgaaacctggatatttttaggtattatgttatgagactatgggtcttatttaaaccttctgctttagccaactttctcagataccaccacagcaggggaattgggagcactgcttcattattaccaggtgtggctaggagtccaggttccccagtcagcctccctttatactgagtaacagggtcccctcattactactgggcaaggtgagaattcagtttcccattaggtctttattgattcttccctggctggaatgtgcagcggcaccttttggtgcaccctgggaatctccactaatgctatgggacagagtgaccaggaagagcttcattacaccaggtgggaatgaaattcccagtagcctacacagccttctccgacaccactctggagttgtattcttccagcacacaaacatacacaatttaactcaaagcatcttagcagagcttaattaaatggatagatgcctgttccctttgctggataccaagaatacaaaagtcagggagttggggcacctctttacagcttggtgagagtgtaagtctggactccccactcagcatttgctggtatgggtggggccatggtgtttttccatggtgtttggttggagtacagccttttttacccttgcttggctacccttttctggtcctttggcaggagagagcaggactctcttagggcttttttttcccctgcatttattgacatttccaggttgctgactttttcagctccaagttggaaatatatgagctgaaaagaaaatgtagggaactcatcacagtgttgttacttgggccccaatgttcctagcctattttctgtctactattcagagtcttgctgtgttttaatataatatccaggatttttatatgcatttagcagaaggatgtctactctgcctttgtagaagtgtctcactgatttttacatatttttccagcacacaaacatacacaatttaactcaaagcatcttagcagagcttaattaaatggatagatgtctgttccctttgctggacgccaagaatacaaaaaagaacaagtgacaattttctctgtcttagggagaagagacagcagaagtgtaaatgatccctaaagagtgatagatgttatcatgaagccacaggaggggtgccaggctgcacaaaagagacactggatgcttcttggtagtagaggcagtggcttcccagccttggggctaaggcttgtagggtgaattggaacttttcagatgagcaaggcaaagaagggaccttctaacattccttggatggaacatttttgacattttcccatttacagctacttatattttctacaagtgtcactgtgaccaacttatgtacacatactttttcttgcttagttataataatctgttcttaaagaaaatgtcagtctctacattctatgctgactgttaaggaaagagcacccacatctgctcctacttagctttttttctgtggttcttacacagtattcctttttttcttttcttgaaagagactcctcctttcttttcttttcttgaaagagttttaaacagataagatggcaaaagtgactgatctctactcccccagtttgaatggtaaatttgaatggtaaattcccatgaacatatatggaaatgtctttatcctactttctccaataaaggctgttcttagcttttcaaatgcaaagtgaaacctttatttatcttgatttcttttttttttttttttttttttttttttttgagatgctctgtcacccaggctggagtgcagtggcaagatcttggctcactgcaagctccgcctcccaggttcacgccattctcctggctcagcctcccgagtaactgggactacaggcacctgccgtcacgcctggctaattttttgtatttttagtagagaatggagtttcaccgtgttagccaggatggtctcgatctcctgaccttgtgatctgcccgcctcggcctcccaaagtgctgggattacaggctcgagccactgcctccagcctatcctgatttctactgtcatgcctcacatcagtccttttttttttttttgagacagagtctcgctctgtggcccaggctagactgcagtggcatgatctcggctcactgcaacctccacctccggggttctagcaattctcctgcctcagcctcctgagtagctgggattataggcgcatgccacacctggctttttgtattttagtggagatggggtttcactgtgttgctcaggctggtcttgatctcctgagctcagacaatccccccgccttggcctcccaaagtgctaggattataggcgagagctgctgtgtgcttcttaagtgaggtaagtaacttccatagaaaatttccatcagttcattcatgaaagaacaaagaacctggcaaaacttaaaaaaacgtttccaagaatcagataaaagaggacaaaccttagggagaagaaggcagctgctcatttccagcaggggaagtagctgcatagagtacaaggactggtaggcctgttggctgttcctgtttaaggagacaagatgggcatggaacagggaccaccccctcctctgggagaagctgttacccccttcacttttcctcctctgtcattacccacaatcactctccttctttgcgctatggtaggtgtttacccatcataggaatgggcatttgaactttgaaactgaatgtggtgattacacttcatgctgaagcttttcacatgagtgctttcataagcattaagtaaaattttataatgactgcagtccaaggacattttccctggtttttggccagtctaaatattgtaagagagagagaagaaaagtgtacggaatataattgtctctaagctaagaaatgtggatgttcaaataaaacatacgtacagaa

SEQ ID NO: 755 - DNA, 4033 bp, Homo sapiens
accgcgcagcggccttttgtcagcgcgcagggccaggagagctctcatttcctcccagcctcgtgcgggaaatggctttaattctgacggcagggctgtgagggactagcgggaacccgagccttttgtcaaggaactgcggcgtcggtggccagtcatccccgccgccgcggagccgctgcactgctgggggatctcccagcagctctgacgagcgcgggctgcagcatgggcagaaaacgctgccctgcagattagctgggtggattttttaagcgcaccccaccccccaaacccataaaataacaaaaccaacccgcagtggccgaccggagatagctaagatgccgcgcaggagtttccacctggatgtttgaggttgtgtagatgtggccggcacccttgagagtggagctagggggtgcagactgagcagtgaacagaaggagccttggacagggctgggccagcctcccgagttccaggagcgaattgcaaacccaccgggaaaatgagcgaagagacggtccccgaggctgcctcgccgccgcccccgcaggggcagccttactttgaccgcttctcagaggacgaccccgagtacatgcgccttcgcaaccgggcggcggacctgcggcaggacttcaacctgatggagcagaagaagcgcgtcaccatgatcctgcagagtccctctttcagggaggagctggaaggcctcatccaggagcagatgaagaaggggaacaactcctccaacatctgggccctgcgacagatcgcggacttcatggccagcacctcccacgcagtcttcccgacatcttccatgaatgtctccatgatgacgcctatcaatgacctccacacagctgactccctgaacctggccaaaggggagcggctcatgcggtgcaagatcagcagtgtctaccgactcctggacctctatggctgggcccagctgagtgacacctatgtcacgttgagagtcagcaaggagcaggaccacttcctgatcagccctaagggagtttcttgcagtgaagtcacagcgtccagcctgatcaaggtgaacattctgggagaggtggtggagaagggcagcagctgcttcccagtggacaccacaggcttctgtctgcactcggccatctatgcagcgaggcccgacgtgcgctgcatcatccacctgcacacaccggccacagcagcggtgtcggccatgaagtggggcctcctgcctgtctcccacaatgccctgctggtgggggacatggcctattatgacttcaatggggaaatggagcaggaagccgatcggatcaacctgcagaagtgccttggacccacctgcaagatcctggtgctaagaaaccatggagtggttgctctgggtgacacggtagaggaggcattttacaagatcttccacctgcaggctgcatgtgagatacaggtgtcggctctgtccagtgccgggggagtggagaacctcatcctcctggagcaggagaagcaccggccccatgaggtgggctccgtgcagtgggccgggagcacctttgggcctatgcagaagagtcggctgggggagcatgagtttgaggccctcatgaggatgctggacaacctgggctacagaacaggttacacgtatcgccacccctttgttcaagagaaaaccaaacacaaaagtgaggtggagattccagccacggtcacagccttcgtgtttgaggaggacggtgccccggtgcccgccctgcgacagcatgcccagaagcagcagaaggagaagacccgctggctcaatacgcccaacacctacctgcgggtcaatgtggccgatgaggtccagaggagcatgggcagcccccgacccaagaccacgtggatgaaggctgacgaggtggagaaatccagcagtggcatgccgattcgcatcgaaaacccaaaccaatttgtgcctctctatactgacccccaggaagtactggagatgaggaacaagattcgagaacaaaaccgacaagatgtgaagtcagcggggcctcagtcccagctcctggcgagcgtcattgccgagaagagccgaagcccgtctacagagagccagctgatgtccaagggagacgaggataccaaagacgattcagaggagacggtgcccaaccccttcagccaactcactgaccaggagttggaggagtacaagaaagaggtggagaggaagaaactagaacttgatggagagaaagaaactgccccagaagagcctggctcacctgcaaagtctgcacctgcttctccagtgcagagcccagcgaaggaggcagagacaaagagccctttagtctctccttccaagtctttagaggaaggtactaagaagacagaaacaagcaaagccgccaccacagagcccgaaacaacccagccggaaggggtggtggtcaacgggagggaggaggagcagacggcagaggaaatcctcagcaaaggcctgagccagatgaccaccagtgctgacacggatgttgatacctctaaggacaaaaccgagtcggtcaccagcggccccatgtccccagagggctcaccttccaagtctccctcaaagaagaaaaagaaattccgaaccccctccttcctgaaaaagagcaaaaagaaggagaaagtggagtcctgattcatgacacccttgggctccctcctgcctcctctctctcctccccttcccttctcccatctctgtccctgcaagcacagggctaaggagggatagagtaggaccctggaccacattcggaaggggaacttagagatcacccgaccaacccttcgttttacagttgcccaagagaaatcaggtgacttgcccaaggtcacacagctagttagcggcagagcctgcactcgaattcaggtctcctgacttccagtccagtgctccttctactacacaacactgcctagttgtgggctgcctttgtttggatgctgtccaccaatctgagcctagggcaagaaggccagaaatgggccgtgagctctcacaggctcagactaaatcagaggtcaaggcttcccctgagtaaggtccatttcttcccaggaatccaatctcctgtggatggagctatctctacatttaaaaatctcttctcttttccactttgggtccctgccctgctgctcaaagtgactagccaaattgacccctccaacagaaagtaatctttgttcccaagggctgatggcttagcttgtactaccccaaacattaaccctgagctttcttcatggaacctcttgaatgatggatggaagagctataagaggtggtaggcataggggcaagccatgtaagctgaggattggggatggtttcatcaacataagaggccaggaacttgacccctttgaattgtgcatctcaggcacttcaaaactaaaaccaaatttagcataggaaaaagttgtttaatgctcagggcagaaatttggggaagttgaaatcctctgttggctttgggttgtataaggaggatcaaaacaacagaggaaatgctgactttctagctttgcatgacacctggagcaatgcactgtacctgcctcactcctgtccagtggtcaggtttcccctgaccttccctcacccccagaaacacttgcttacagaccgaaactggcatcttactcttggcaccttgacttgcaccctctgaggttccaactcagtcattctttgtccagcagaggagaatcagaaatgagcccttcaggattaatcctcttgcaccagctctcagagaaatgctgggtatccctgtccttgtccctatctgtccatcctggggcctggtaatggccacagttattgttttaaatgccaacactgtcttctcatgttcttccgtggggcattgattaatgagcatttgttggctcctaaaaattagacaatccattctcttgaaagcaccgtgtcttgaaagaatatttttccttttgatctgactatcgt

SEQ ID NO: 756 - DNA, 94 bp, Homo sapiens
tggatcgatgatgacttttatacatgcattccttggaaagctgaacaaaatgagtgaaaactctataccgtcatcttcgttgaactgaggtcca

SEQ ID NO: 757 - DNA, 67 bp, Homo sapiens; identical to SEQ ID NO: 467

SEQ ID NO: 758 - DNA, 5361 bp, Homo sapiens
tttctccttccctccacgggccgggtgagaaagtagccgggggctatcccgacccggcggttcttggggagggggccgaacaagaaaagggaggagatggagataacttccccggatttagcttttttgtctttgtttttgttctcaccacttccatcggatgactggagagtaaaagggaacccggagcggggtggcgagcagcgctttgagaaaatgcaggagtgtgtttggagacgcgtaaagttgcctttcaagctctggcctccgggcacgcgatgctccgcggcgggctgactcagggctgccttgggcctccctgccaccctcctggaaatgatgcaagtcctgactgtcacctggatccctgcagcccagcctggaatgcgtctggattaggggaaagacgagaaacgacactccaggtgttgcacggcccaccaaagcgggaagatagggcagttgctcagaccaaatactgtatctagtgcttctgctcctatcttcaatcgtggggttctttttaatgcaaagtgtcacaaggccaggaattcccatgtgtgctcagttggcccacagcatcattgtgcctaggaaactgcttcaatttatcaagtcctctgggctgggaatctcactgaattccaaacggcggaaagaggaaactttcccaacccgatgtgggtgtgacgcgagccaggggccccagggacactgtcccagagcacaccgtccccctttaacagcaactggagcttggattcgctcttatattgtacagtcctttcgaccattgccctggagcacccgcacacgcgcacgcatctccggccgcgctcacacacactcatacacacgcacgcaaacgcgtggccgccgccaggtcggcaactttgtccggcgctcccagcggcgctcggcttcctcctgtagtagttgagcgcaggccccgcctcccggccgtgttgtcaaaagggccggggtctcggattggtccagccgccgggacaacacctgctcgactccttcattcaagtgacaccagagcttccagggatatttgaggcaccatccctgccattgccgggcactcgcggcgctgctaacggcctggtcacatgctctccggagagctacgggagggcgctgggtaacctctatccgagccgcggccgcgaggaggagggaaaaggcgagcaaaaaggaagagtgggaggaggaggggaagcggcgaaggaggaagaggaggaggaggaagaggggagcacaaaggatccaggtctcccgacgggaggttaataccaagaaccatgtgtgccgagcggctgggccagttcatgaccctggctttggtgttggccacctttgacccggcgcgggggaccgacgccaccaacccacccgagggtccccaagacaggagctcccagcagaaaggccgcctgtccctgcagaatacagcggagatccagcactgtttggtcaacgctggcgatgtggggtgtggcgtgtttgaatgtttcgagaacaactcttgtgagattcggggcttacatgggatttgcatgacttttctgcacaacgctggaaaatttgatgcccagggcaagtcattcatcaaagacgccttgaaatgtaaggcccacgctctgcggcacaggttcggctgcataagccggaagtgcccggccatcagggaaatggtgtcccagttgcagcgggaatgctacctcaagcacgacctgtgcgcggctgcccaggagaacacccgggtgatagtggagatgatccatttcaaggacttgctgctgcacgaaccctacgtggacctcgtgaacttgctgctgacctgtggggaggaggtgaaggaggccatcacccacagcgtgcaggttcagtgtgagcagaactggggaagcctgtgctccatcttgagcttctgcacctcggccatccagaagcctcccacggcgccccccgagcgccagccccaggtggacagaaccaagctctccagggcccaccacggggaagcaggacatcacctcccagagcccagcagtagggagactggccgaggtgccaagggtgagcgaggtagcaagagccacccaaacgcccatgcccgaggcagagtcgggggccttggggctcagggaccttccggaagcagcgagtgggaagacgaacagtctgagtattctgatatccggaggtgaaatgaaaggcctggccacgaaatctttcctccacgccgtccattttcttatctatggacattccaaaacatttaccattagagaggggggatgtcacacgcaggattctgtggggactgtggacttcatcgaggtgtgtgttcgcggaacggacaggtgagatggagacccctggggccgtggggtctcaggggtgcctggtgaattctgcacttacacgtactcaagggagcgcgcccgcgttatcctcgtacctttgtcttctttccatctgtggagtcagtgggtgtcggccgctctgttgtgggggaggtgaaccagggaggggcagggcaaggcagggcccccagagctgggccacacagtgggtgctgggcctcgccccgaagcttctggtgcagcagcctctggtgctgtctccgcggaagtcagggcggctggattccaggacaggagtgaatgtaaaaataaatatcgcttagaatgcaggagaagggtggagaggaggcaggggccgagggggtgcttggtgccaaactgaaattcagtttcttgtgtggggccttgcggttcagagctcttggcgagggtggagggaggagtgtcatttctatgtgtaatttctgagccattgtactgtctgggctgggggggacactgtccaagggagtggcccctatgagtttatattttaaccactgcttcaaatctcgatttcactttttttatttatccagttatatctacatatctgtcatctaaataaatggctttcaaacaaagcaactgggtcattaaaaccagctcaaagggggtttaaaaaaaaaaaaccagcccatcctttgaggctgatttttcttttttttaagttctattttaaaagctatcaaacagcgacatagccatacatctgactgcctgacatggactcctgcccacttgggggaaaccttatacccagaggaaaatacacacctggggagtacatttgacaaatttcccttaggatttcgttatctcaccttgaccctcagccaagattggtaaagctgcgtcctggcgattccaggagacccagctggaaacctggcttctccatgtgaggggatgggaaaggaaagaagagaatgaagactacttagtaattcccatcaggaaatgctgaccttttacataaaatcaaggagactgctgaaaatctctaagggacaggattttccagatcctaattggaaatttagcaataaggagaggagtccaaggggacaaataaaggcagagagaagagacagaactaaaaatacgaggaaaggagagtgaggattttcattaaaagtctcagcagtgggtttcttgggttatttaaaacatcacctaaataggccttttcttcctaattggccatcaaattaaagcctatcctttctcaagcaggagctggtattgtagggagtggccgggtattctgggctgggctcttctggagtagggggtcagcaaacattgtctgcaaagggccagatactgaatccagtactttcagtttggcgagccgtgaggtctctgtcgaaactactcaactctgccgtcctagcacaaaagcagccatagacaacacacaaacgagagggcttggctcccttccaggaagatttatttaacaggctcccagctgaatttcactcacaggacacagtttactgatctctgttctagtgagtgggtcaaaaagcatatgcatccttatccgtcaactcatcagctcttcctcaaggcaacctgaggccagacaccaagaaaccaagcgtatctgctctaaaatgacttgttcctggggaatgccttcaaccaaaacacagctagtatttctatgccccaaatccaatcccagtctttcatgatccatgccggcggttgggtggggaggggaatcattggttgggggaagggaggaaaccccacctccagcccccgccaccgggctccctgggcacccagcaagatctggggctgcagagaacagaagagctggtgcacttaatccagctctgcccttggggggaggaggacctgtgtgtcaggctctgccatgggaacgagtgtaaaccgtggctgtctcctgcagtgagccaccgcggcaggcacgttgactgttttactgacatcactcaaaagctaaagcaataacattctcctgcgttgctgagtcagctgttcatttgtccgccagctcctggactggatgtgtgaaaggcatcacatttccattttcctccgtgtaaatgttttatgtgttcgcctactgatcccattcgttgcttctattgtaaatatttgtcatttgtatttattatctctgtgttttccccctaaggcataaaatggtttactgtgttcatttgaacccatttactgatctctgttgtatatttttcatgccactgctttgttttctcctcagaagtcgggtagatagcatttctatcccatccctcacgttattggaagcatgcaacagtatttattgctcagggtcttctgcttaaaactgaggaaggtccacattcctgcaagcattgattgagacatttgcacaatctaaaatgtaagcaaagtagtcattaaaaatacaccctctacttgggctttatactgcatacaaatttactcatgagccttcctttgaggaaggatgtggatctccaaataaagatttagtgtttattttgagctctgcatcttaacaagatgatctgaacacctctcctttgtatcaataaatagccctgttattctgaagtgagaggaccaagtatagtaaaatgctgacatctaaaactaaataaatagaaaacaccaggccagaactatagtcatactcacacaaagggagaaatttaaactcgaaccaagcaaaaggcttcacggaaatagcatggaaaaacaatgcttccagtggccacttcctaaggaggaacaaccccgtctgatctcagaattggcaccacgtgagcttgctaagtgataatatctgtttctactacggatttaggcaacaggacctgtacattgtcacattgcattatttttcttcaagcgttaataaaagttttaaataaatggcaaaaaaaaaaaaaaaaaa

SEQ ID NO: 759 - DNA, 134 bp, Homo sapiens; identical to SEQ ID NO: 469

SEQ ID NO: 760 - DNA, 2404 bp, Homo sapiens
aatgcacagcggtattgatgagtagatccttggattcagaggttggctgaaacgcaccatgcctgcttccatcttttgctctgtaaagttgtgaattgctcatgcctatagggaggaaggatggcacatgggattccttctcaaggcaaagttaccataacggtggatgagtacagctcaaaccccacccaggcattcacgcactacaacatcaaccagagcagattccagcctccacatgtacatatggtcgaccccatcccatatgacactccaaaaccagcgggccacacgcggtttgtctgcatctcagacacacactccagaacagatggtatccagatgccttatggggacatccttctccacacaggcgatttcaccgagctgggactgccctcagaggttaagaagtttaatgactggttaggaaacctgccatatgaatataaaatagtgattgctgggaatcatgaactgacatttgataaggaattcatggcagaccttgttaaacaggactactaccgtttcccctctgtgtccaaattgaaaccagaggactttgacaatgttcagtccctcctgacaaacagtatttacttacaagattcggaggtaacagtgaagggattcaggatatacggtgcaccttggaccccgtggtttaatggatggggctttaacctacccagaggtcagtctctgctggacaagtggaacctcatccctgagggcattgacatactcatgacacatggacctcctctaggttttcgagactgggttccaaaggagcttcaaagagtgggctgtgtggagctgttaaacacggttcagaggcgagtccggcccaagctccatgtgtttggtggaatccatgaaggttatggcatcatgaccgacggttacacaacgtacatcaatgcctcgacgtgtacagtcagctttcaaccgaccaaccctccaattatatttgaccttccaaacccacagggttcctgaagctctaaatgccctattggaatgtgagggaaggtctataaactgccatttttctaattataaacttacattctcttacttatttacaaaccctgtgagttctttttgtaaattgttggaacacaaatgatgctagaggttgtgcttcttattttattttattttaaatggggcatccatttgaaatcagaggaacattgtgaatttgtaaaatgacttctgttttctcaaaggccatgccattgtaaattgttagtgttcgccaaaggacagccaagctttcttttaaaaagtgataaaagtcttattttaatatgctttaagctgaaagaaaaaaaaataagaaacaggcagtgttttaaaaaccaacacagatttgcacaactgtttaagagtattgtttgaaatattttaattttcaatgttttgttgttgttgttttcttggtaatgcttcttttttgcagatgtggtcccaatttatagcaatcttctcaacagaagtaggcatggaaaagacttcttttcatactctcactataaagaaagctgcattgagaagaaaatggctgtcatttaaaggatggtttaactagtgagattcctattgtggttatacaaggtctcattgtttgtttgtttcttttaaattatttcagctttaaaaatacagaaatggaatctgtcaagagcaggtatttcatacggttaaaaaaatgaacatgcagactccttttcaatatgggtttatatatataagtattttttgtgtattatgactacgttaggagtttattattgtcaaggacagtacaactgcaaagggatgctgtatagcaacacatcagaagtcggaaggaactgacacattctctcagagctcaaggtcttaaagagcttgagttaaatctaggtacagttacaggcatgtatagacttaaatggatgcaatggaagctaactaaaataaggcttagttgtcctttctatttaaataccccaagttgtcttcttacttcctctcccctctcccattttgcactgtgtgtcgatgcaatcttcgctagcacaaaatattgtcgctaatagtcatttctgttttcccattgtaaatgctgttgagctttattctattttatgttactttgttaatgaaatttaggaaagcagttgtttctttaaatttattgtgatattctatatctagcggcctttatatgcaaataaaattgcaagatttttaaattcgtgctgtttagagggttggatggtggaggatggtagtttcgtcctggggaaggagggatttattcatatgcaacatcagtaatgcctttcagaagaattagaataagtgatttttttccctaattttcaataaatttttattacccaccaaa

SEQ ID NO: 761 - DNA, 5801 bp, Homo sapiens
agtgtgccaccgccatctttaccggctgtggctcagcatggtcagtgccgtttaacctttattgtggtggagtccaccccgctgtgggcctcagataaccctgtacaaaggggaatggagattgcctgtatccacctagattcataagctgccctgaggcgatcttggcatcaagaaagacagcattgaggcacatctcaccatcagcttcagaggatgtcagcctttgatatgtcccatgggttttttcccagggaaccaatctgtccttttgaagaaaagacaaagataggaacgatggtagaggaccaccggtcaaattcttaccaggattcagtgacgtttgatgatgtggctgtggagttcaccccagaggagtgggctttactggacacaactcagaaatacctctacagagatgtgatgctggagaactacatgaacctggcctctgtggatttctttttctgcttaacttcagaatgggaaatacaacctagaaccaaacggtcatcacttcagcagggttttttgaagaatcaaatattcactgggatacaaatgcagacaagaagctacagtggatggaaactctgtgagaattgtggagaggtcttcagtgaacagttttgccttaagacacacatgagagctcagaatggagggaacacttttgagggtaattgttatggaaaagacagcatcagtgtgcacaaggaagcctctattggacaagaactttccaaatttaatccatgtggaaaagtcttcaccttaactccaggccttgctgtgcatcttgaaattctcaatggaagacaaccctacaaatgtaaggaatgtggaaaaggctttaagtattttgcaagccttgataatcacatgggaatccacattggagagaaactctgtgaatttcaggaatgtgagagagccatcacaacttcctcacacttaaagcagtgtgtagcagttcatactggaaagaaatccgaaaagactaagaactgtgggaaatccttcactaatttttctcaactttctgcacatgcaaaaactcataaaggagagaagtcctttgaatgtaaagaatgtggaagatcctttagaaattcctcatcctttaatgttcacattcaaattcacactggaataaaaccacacaaatgtacggaatgtgggaaagccttcactagatcaactcaccttactcaacatgtaagaactcacactggaataaaaccctatgaatgtaaggaatgtggccaagccttcactcagtacacgggccttgctatacacatacgaaatcacactggagagaaaccctatcagtgtaaggaatgtgggaaagccttcaatagatcttcaacgcttactcaacatagaagaattcacacaggagagaagccttatgaatgtgttgaatgtgggaagaccttcattacttcttcccatcgtagtaaacatttgaaaactcacagtggagaaaggtaaatgcaagatatgtgggaaagaatttctgtattcctcaccccacctgtgaactcctaccagagagaaaccttttgtatgtaaagaatttgggaaagcatttgctctttcctcatgcctaagtatgcatgaaagaattcacactggggagaaatactatgaatgtaaggatatgagtgttgttaccatttagcccattggttgccatctttaattattggcagtgcaaagatcatcagattagtcctaaatgccttttggaggttgtaatggctcacagattggccttagatgcatcccgagggtctgaaattaaacctacaggttctgaatacaacatcatggttacctgagtctgggcatctgtgaagaagggtcatggatggtgaggtcagtactgcaggctgcctcaccttggtgattagattcctaagatcatagcattaacaagttctgtacgagataaatcatgcagattgatcccagcccctgttggttagtggctgccagtgtggcacattcatgtcaaaatttaccagaagccaagatgatgtaggccccagaggtggattgttaaaaagatgctcctccaaggttctcttctgttcccatggatcctgcagagcatgtcaggagtgaaaccatccataactgccagtgccctttcacagctgattatttctatgtccccttcttgtaaaataagaagtgtgacaaccttgactgttctgttctgtcttctctgtccattttaggtggcacaatgtaagtggcagtgtctcttatagtataatccagtctctcttctcacttctgttaagatggctgatatagtccatgaatcccactcatgatctctttatcaaatgattgttcagccacactttgaggattctcttcagtacaagttttctaatttttgcagtatggataggctgagaattttccaaatctccaagttctggttcctttttccttaacaatttcttctgcaattcaggtctccttttgcatttttgccgagaccagctgggtcgtggagaccctaacccagtggctctagaggaattaagacaaagacacagaaatatagtgcagagtgggaatcggggctcacagccttcagagctgagcttgaacagagtttgacccacatatttattgacagtaagcctgtgataaacattattcctatagattgtagatcagctataagtattccttatgagaaagaaagggacaggctctggcttgttatctgcaacaggaatatgtccttaaggcacaaatcactcatgctattgtttgtggtttaggaatgccttgagcagttttccagttttctgccctgggtgggccaggtgttgcttgccctcattctggtaaaccagcagcctccagcatgggcgtcatagccatcacgagcatgtcacagtgctgcagagattttgtttatggccagtttctcattgcctgtttatggccagatttggggggcctgttcccagcacattttcctgtaagcactcaggaataatgaagcttcctgtgtcctttaacactttaattacagatcttagtgatacataccattttatctgtctcaagctctaccttccgtaaaatgctagaatacagttctgccaagttcttcaccactttatatcaagggttgtcttttcttcatttcccaatagcatgttcctcattccccaatgacacctcaccagaataacccttaccaaccttatttccagcttgcacatcagaatttttccagcctctactcatttgtcagtttcaaagctgcttcacatttttagtttttttgtttgtttttaattgcagtacctcacttctcagtaccaatatctgccttagtcagctcagacaaccataagagaataccgcagaccaaatggcttagaaattaatttaattttaaatcaatgaggttaaaaacacaggattttttttttttttttttttttttttttgagatggagttttgctcttgttgcccaggctggagtgcaatggtatgatcttggctcaccgcaacctccacctcctgagttccagtgattctcctgcctcaccctcagtagctgggattattggcatgcaccacaaaccttagctaagtttgtatttttagtagagacagggtttctccatgttggttaggctgatctccatgttggtcagatctgacctttggtgatccacctgccttggcctcccaaagtgctgggattacaggcctgagccaccgtatctggcccaaaacacaaatttatattctcacatatctggaggctggaagtctgagatcagagtgccagcatggtcaacctctagtgagagctctcttcctggcatgtaagtgcccacttcctcatgttttcacacgatggagaccaacaaataggtcggtcggtctcccccctccccgcccccttctcttttcacatacagtcacattgaggtttggaacttcatatgaaatttggggggtcactgtgtgtgtgtgtgtgtgtgtgtgtatgtgtatatatatatacatatatatacacatatgtatgtatacctaactcctaaagtggaacagtaagagtcattatttatagattatctgattctctatgtggaaagagaaaagaatcatattaagtactttggactgaacaatgacccccaaaattcgtatgatgatgaagctctctctaaatattttcttgctttactggactgattttaacccgctgcacaacaccaactaaaagtagtaataccagcatacttgtctttgcagttctggtgagatatgcactctattttgttggtttggctgtaggcttttatttcttttttattttttgaagaggttatgtcctgtcagggaaccagccccgatattcacataggttcttttctattttccctaagtgtcagccaacttgagaaataaagggacagagtacaaaagagagaaattttaaagctgggtgtccggggcagacatcacatgtcggtaggttccgtgatgccccacaagccgcaaaaaccagcaagtttttattagggattttcaaaaggggagggagtgtgcaaataggtgtgggtcacagacatcaagtactttacaaggtaatagaatatcacaaggcaagtggaggcagggcgagatcacaggaccaaggtgaaattaaaattgctaatgaagttttgggcaccattgtcattgataacatcttatcaggagacggttttgagatcaactggtctgactaaaatttattaggtgggaatttcctcttcctaataagcctgggagtgctatgggagactggggtctatttcacccctgcagtctcgaccataagagatggctacacccaggggggccagttcagagacccactcccaggtgtgcattctctttctcaaggatgttccttgctgagaaaaagaattcagtgatatttctcccatttgcttgtgaaagaagagaaatgtggctttgttccacctggctcaccggcggtcagaatttaaggttatctctcttgtttcctaaacattgctgttatcctgttcttttttcaaggtgcccagatttcatattgctcaaacacacatgctgtataatttgtgcagttaatgcaattattacagggtcctgaggtaatatacatcctcctcagctgacaggattgagagattaaagtaaagacaggcataggaaatcacaagggtattgactggggaagtgataagtgtccatgaaatctttacaatttatgtttagagattgcagtaaagacaggcataagaaattataaaagtattaatttggggaactaataaatgtccatgaaaccttcacaatccatgtttttctgccatggcttcagccagtccccccgtttggggtccctgacttcctgcaacaatgtcctgcaggaaaagttttttctttatatccagtttttacatgatgaattatttcccaatatttcatagtttatgaggctgaattcctcttgaatttattaaatgcttccttcacatcctctgtgatgatcatgtttatttactgataaaactcaatacctagaactgcacctagctcatgatggtacctaataaatacttcaatgaaatgatgtggtgatgcatgcctatagttttagctacttgggagggtggcctgagcccaggggttctagaccagcttaggcaacatagcaagaccccatctcaaaaaaaaaaacaaaaacaaaacaaaaaaaaaaaaaaaaaaa

SEQ ID NO: 762 - DNA, 1747 bp, Homo sapiens
actgaaggctagagaacaattccgagaaagagacggagagagagggaagaaaaagacagatagatagatattggggggaaggagaaaaaaggagaagagagggaagagaggacagcggagagagagcaccagagagagagggagagagagagagagcgctagagagagggagcgagcatgtgcgatgagcaatagctgtggaccttacagttgctgctaactgccctggtgtgtgtgagggagagagagggagggagggagagagagcgcgctagcgcgagagagcgagtgagcaagcgagcagaaaagaggtggagagggggggaataagaaagagagagaaggaaaggagagaaggcaggaagaaggcaagggacgagacaaccatgctgtgctgtatgagaagaaccaaacaggttgaaaaaaatgatgacgaccaaaagattgaacaagatggtatcaaaccagaagataaagctcataaggccgcaaccaaaattcaggctagcttccgtggacacataacaaggaaaaagctcaaaggagagaagaaggatgatgtccaagctgctgaggctgaagctaataagaaggatgaagcccctgttgccgatggggtggagaagaagggagaaggcaccactactgccgaagcagccccagccactggctccaagcctgatgagcccggcaaagcaggagaaactccttccgaggagaagaagggggagggtgatgctgccacagagcaggcagccccccaggctcctgcatcctcagaggagaaggccggctcagctgagacagaaagtgccactaaagcttccactgataactcgccgtcctccaaggctgaagatgccccagccaaggaggagcctaaacaagccgatgtgcctgctgctgtcactgctgctgctgccaccacccctgccgcagaggatgctgctgccaaggcaacagcccagcctccaacggagactggggagagcagccaagctgaagagaacatagaagctgtagatgaaaccaaacctaaggaaagtgcccggcaggacgagggtaaagaagaggaacctgaggctgaccaagaacatgcctgaactctaagaaatggctttccacatccccaccctcccctctcctgagcctgtctctccctaccctcttctcagctccactctgaagtcccttcctgtcctgctcacgtctgtgagtctgtcctttcccacccactagccctctttctctctgtgtggcaaacatttaaaaaaaaaaaaaaaaagcaggaaagatcccaagtcaaacagtgtggcttaaacattttttgtttcttggtgttgttatggcaagtttttggtaatgatgattcaatcattttgggaaattcttgcactgtatccaagttatttgatctggtgcgtgtggccctgtgggagtccactttcctctctctctctctctctgttccaagtgtgtgtgcaatgttccgttcatctgaggagtccaaaatatcgagtgaattcaaaatcatttttgttttcctccttttcaatgtgatggaatgaacaaaaaggaaaaaattcaaaaaacccagtttgttttaaaaataaataaataaagcaaatgtgccaattagcgtaaacttgcggctctaaggctcctttttcaacccgaatattaataaatcatgagagtaatcaaggtcaaaaaaaaaaaaaaaaaaaaaaaaaaaaaaaaaaaaaaa

SEQ ID NO: 763 - DNA, 1459 bp, Homo sapiens
aaggcgattgtcatatgatagctaagaagtggcacattaatgaagcgccgctacaggggtcttttctgctcctgtcaccgcttaaaactatcagatggttcgagggaggacatggaggcagccacctagctcagcggagacgcggagcccacagcagcgccctccggagccctaacacgtcgctgccaccatccgcgccgggactccgcagccgagctcggccgcccgcaggacgctccaggagcgtcgcggaccgggcggcacgggacgctgcggggctgagctcaagagcccaggttcgcgccgagtccaaccggacccggacgctgcgcgcggagtgcgcgtcgagtgcgcgccgagagagaagcggcgcgcagcggcgtcctcccggatgcggacgcgcaacttgaagcaactttaagatccgagcagtccgccggcccgcgcggacccagagcaagaagagggcgaggaagaagatgcctcggcccggccgcaacacgtacagcgaccagaagccgccctactcgtacatctcgctgaccgctatggccatccagagctctcccgagaagatgctgccgctgagcgagatctacaagttcatcatggaccgcttcccctactacagggagaacacgcagcgctggcagaacagtctgcgccacaacctctccttcaacgactgcttcatcaagatcccgcggcggccggaccagccaggcaagggcagcttctgggcgctgcacccaagctgcggggacatgttcgagaacggcagcttcctgcggcgccgcaagcgcttcaaggtgcttaagtccgaccacctggcgcccagcaagccagccgacgcggcgcagtacctgcagcagcaggccaagctgcggctcagcgcgctggcggcctcgggcacgcacctgccacagatgcccgccgccgcctacaacttgggcggcgtggcgcagccctcgggcttcaagcaccccttcgccatcgagaacatcatcgcgcgggaatacaagatgcctggggggctggccttctccgccatgcagccggtgcccgctgcctacccgctccccaaccagttgactaccatgggcagctcgctgggcaccggctggccacacgtgtatggctccgccggcatgatcgactcggccacccccatctccatggcgagtggcgactacagcgcctacggcgtgccgttgaagccgctgtgccacgcggcgggccaaacgctgcccgccatccccgtgcccattaagcccacgccggccgccgtgcccgcgctgcctgcgctgccagcgcccatccccaccttgctctcgaactcgccgccctcgctcagccccacgtcctcgcaaacagccaccagccaaagcagccccgccacccccagcgaaacgctcaccagcccggcctccgccttgcactcggtggcggtgcactgacc

SEQ ID NO: 764 - DNA, 4995 bp, Homo sapiens
tccctccctgtcctcagcccggcagcggcggcggcggcggcagtggcagtcgccggagaagcatcatgccgaggaggaagcagcaggcgccccggcgcgcagcagcctatgtttccgaagagttaaaggctgctgccctggtggacgaaggtttagacccagaggagcatacggcagatggagagccctcggccaagtacatgtgcccggagaaggagctcgccagggcctgccccagctaccagaactccccggccgccgagttttcctgccatgaaatggacagcgagtcacacatcagtgagaccagtgaccgaatggctgactttgaaagcggctccatcaagaacgaagaggagaccaaggaggtcacggtcccactggaagacacgactgtgtcggatagcctggagcagatgaaggccgtgtacaacaacttcctctccaactcctactggtccaacctcaacctcaacctgcaccagccctcctcggagaagaacaacggcagcagcagcagcagcagtagcagcagcagcagctgtggcagcgggagcttcgactggcaccagagcgccatggctaagacgctgcagcaggtgtcacagagccgcatgctcccggagcccagcctcttcagcaccgtgcagctgtaccggcagagcagcaagctctatggctccatcttcacgggggccagcaagttccgctgtaaggactgcagcgctgcctacgacaccctggtggagttgacggtgcacatgaacgagacggggcattaccgcgacgacaaccatgagaccgataacaacaaccccaagcgctggtccaagcctcgcaaacgctccttgctggaaatggaagggaaggaagacgcccagaaggtgctgaagtgcatgtactgtggccactcctttgagtccctgcaggatttgagtgtccatatgatcaaaacaaaacactaccaaaaagtgcctctgaaggaacccgtcactcctgtcgccgccaaaatcatccctgccactcggaagaaagcttccctggagctggagctccccagctccccagattccacaggtggaacccccaaagccaccatctcagacaccaacgatgcacttcagaagaactccaacccttacatcacgccaaataatcggtacggccaccagaatggggccagctatgcatggcactttgaggcccggaagtcgcagatcctgaagtgcatggagtgtgggagctcgcatgacaccctgcaggagctcactgcccacatgatggtcactggccacttcatcaaggtcaccaactctgctatgaaaaaggggaagcccattgtggagacgcctgtcacacctaccatcacaaccctgctggatgagaaggtccagtccgtgcccctggcagccaccaccttcacgtccccctccaatacacctgccagcatctccccaaaactgaatgtggaggtcaagaaggaagtcgacaaggagaaagcggtcactgacgagaaacctaagcaaaaagacaagcctggcgaagaagaggagaagtgtgacatctcttccaaataccattacttgactgaaaatgacttagaagagagtcccaagggggggcttgatatcctcaaatccttggaaaacacagtgacatccgcaatcaacaaggcccagaacggcactcctagctgggggggctatcccagcatccatgccgcctaccaacttcccaacatgatgaagttgtccctgggctcgtcggggaagagcacgcccctgaaacccatgtttggcaacagtgagattgtctccccgacgaaaaaccagaccctggtctctccacccagcagccagacgtcccccatgcccaagacaaactttcatgccatggaggagctggtgaaaaaggtcactgagaaagttgccaaagtggaggagaagatgaaggagccggatgggaagctttccccgcccaagcgggccactccctccccatgtagcagcgaagtcggggaacccatcaagatggaggcatccagcgatgggggcttccgcagccaggagaacagccccagccccccgcgggatgggtgcaaggatgggagccccctcgctgagccggtggagaatggcaaggagctggtgaagcccctagccagcagtttgagtggcagcacggccatcatcaccgaccacccgcctgaacagccttttgttaaccctttgagcgccctgcagtcagtcatgaacattcacctgggcaaggccgccaagccctccctgcctgccctggaccccatgagcatgcttttcaagatgagcaacagcctggcggagaaggctgctgtggccaccccgccgcccctgcagtccaagaaggcagaccacctcgaccgctatttctaccacgtcaacaacgaccagcccatagacttgacaaaagggaagagtgacaaaggctgctccttgggttcagtgcttctgtcacccacgtccacagccccggcaacctcctcatccacggtgacaacggcaaagacatctgccgtcgtatcattcatgtcaaactcgccgctacgcgagaatgccttgtcagatatatccgatatgctgaagaacttgacagagagccacacgtcaaaatcctccactccttccagcatctccgagaagtctgacattgacggggccactctggaggaggctgaggagtcgacgcccgcccagaagaggaagggccgccagtcaaactggaacccccagcacctcctgatcctccaggcccagtttgccgccagcctccggcagacctcagaagggaagtacatcatgtcagacctgagcccccaggagcggatgcatatctccaggttcaccgggctgtccatgaccaccatcagccactggctggccaacgtgaaataccagcttcgaaggacaggtggaacaaagttcctcaaaaacttggacactggccaccccgtcttcttttgtaacgattgtgcgtcccaaatcaggactccttccacgtacatcagtcacctagagtcacacttaggcttccggctacgggacttatccaaactgtccaccgaacagattaacagtcagatagcacaaaccaagtcaccgtcagaaaaaatggtgacgtcctcccccgaggaagacctggggacttcctatcagtgcaaactttgcaatcggacctttgccagcaagcacgctgttaaacttcaccttagcaaaacacacgggaaatctccggaagaccaccttctgtatgtctctgagttagagaagcagtagcatttgcttttgatagaaaggactgcagtttgctttgagggaaactgtggaaggcaccttcaggccccctctgacttgttgttcttggcacatgttcttattttaactgcagagaatcactctgggctggactgttttgtataactgtacagtgtttaatagaggtgcataatcagctgttgttactggtaaaatatgaaggttaaaatgcagtggtaagtgtttggaactttgtgtaaacgggatttagttgtgagcatcctcccgatgcttcaagctgcatgcattaacagacagtttaattaagcatttataacggaatcaggcacaccttttccacgagactcgagtgtgctggcatttctcaccctttcatctttagccctctgagtactttgaagcacttttgcattaatttggttaaaaaataaaataaaataataataatgtatgaagctctgttttttaaactccttaccagcttagttataatgaataatatgaacctccatttatgcaggtctgcaggggtataacacgccttgaaatttaaaagaatattattttcacattgaaacatagatgtatatattgtatagatttcagactctcttatgaaaaaaaatgtgattgtggttaaatgacctttttcttgcatttatagcaacagtgttttatgcacctgctatgctctgggcataagctgtgcctatgtatagtgtatatttctttttttcttttttttaaggtctatgggttttgttttttacatgcaaacattgtaaattatacagaagataccacagatagcatttataaagtatacagaaacattatctgaaagcaaagtatgatagtttgttttgctatacagtacatctatattgatagaggttcatgtttaaattatacatatttattagcatcatattgtcatttgttttgagcagtctgaataaacgagaccgggaaagacatccctggcaggcatcagaactattttgcacatgatttttaaaggtatttattagaaatcaaagaacactcaaaataaactcagtgctcaaagggttaagtctatttgaaaaggttaaaaaaaagaacaaaaaaaaaaaaagaacttgtactgtatttcctaaacattgataaagcctttaaaatgtttgtactgtaatactttgcttaaaagtcatgaggcattctgtgatccaacctctttcacttatttataagccctcttggttgctattccatattgtaggatgcctttctatttcaattggtaactttctgttttgttcttcctaattattctcccaagatcccacactgcagctttatctttaggcttatgaaaggtaacccgtggttaccggctctccaagtgattctgttcttctccatttttggcagttaatttgcagaagtaactgacagctgacaccatatgagaacctttgtataaaatattggcatgtaaacagcacagacaccgtaacacactctgtgccctgtttggttgttgacaatgaagcaccattatgtgactcttcatataacccttttttctacggcagcattaaaattgtctttttgctataaaaaaaaaaaaaaaaaaaaaaaaaaaaaaaaaaaaaaaaaaaaaaaaaaaaaaaaaaaaaaaaaaaaaaaaaaaaaaaaaaaa

SEQ ID NO: 765 - DNA, 2787 bp, Homo sapiens
agaacgctcagggggcaggtgacacagtcgtgggttccccggcgggcgctggcttgacagtttcctccccgcccactggcaggggagcgccccgccgggctgcacgcgcgcgcgcgcaggggggcataaaagccgcggccgcgcggagacgcggagctcgcccaccgcccgccccagcagtggctgcaccatgcacgtgaacggcaaagtggcgctggtgaccggcgcggctcagggcataggcagagcctttgcagaggcgctgctgcttaagggcgccaaggtagcgctggtggattggaatcttgaagcaggtgtacagtgtaaagctgccctggatgagcagtttgaacctcagaagactctgttcatccagtgcgatgtggctgaccagcaacaactgagagacacttttagaaaagttgtagaccactttggaagactggacattttggtcaataatgctggagtgaataatgagaaaaactgggaaaaaactctgcaaattaatttggtttctgttatcagtggaacctatcttggtttggattacatgagtaagcaaaatggaggtgaaggcggcatcattatcaatatgtcatctttagcaggactcatgcccgttgcacagcagccggtttattgtgcttcaaagcatggcatagttggattcacacgctcagcagcgttggctgctaatcttatgaacagtggtgtgagactgaatgccatttgtccaggctttgttaacacagccatccttgaatcaattgaaaaagaagaaaacatgggacaatatatagaatataaggatcatatcaaggatatgattaaatactatggaattttggacccaccattgattgccaatggattgataacactcattgaagatgatgctttaaatggtgctattatgaagatcacaacttctaagggaattcattttcaagactatgatacaactccatttcaagcaaaaacccaatgaacagcttatgtgttagccatagctgaaaataagcacaaatagcttatattcagatcctatcttcatttgaatatagcttttaaatgaaatgttacagtttgaagttttccttcatgcacttggtgataaacgttttctaaatttttagttaagtatatggataaaaagttatgaactattaaaaatgtgatgtggaccaaaggctaggttgtaatcttgatagtctaaaaaatgatcaaaacaaatgattttcaaggaatattcaatattctgcctttcagaaagtgtatttatatctgtgcttcataaatattaatgttcttcagaacatcattttaaaggagatacttgaattgttatttaaatcaaaccagatgtaaaacactcacatacaagttcatactttaaaagaggaaagctacttaacaatgacaaatatttcacaataataatttttacttatataccatctttcaactgaacatttcagttcttccaagagcttcttagagtagtatattttgggggcagtcaaggaataaactacagtgtaaacatatcccagatgaaaactgctgtatggaaaaatgacagaaagtaactgattgacactgttgattcacagttcagcctcctatctgggaaagacatttctttcctctgctcactttaagaacttttaccgactccaaaaatctcaggaattaaacttttaacagttacagcaataaagaatagttagtactccaaaaatattatatttaagatgctcaacaagaaaaaaatgcaaatgtaatatttttttcaaattacttctttattgacttgtccaaatttcaaaagtgcctacccttcaataaaacttttttattctgatctccataaattacttagtcttctatgtatagctatcaaggaaataaaaccaattttgccacagccacaactgtaaatgtttttgtacccatgctgaaactcataacaacacagacataaaaatagctgtgaggttttgctttttttgttgtcagctatcttaagaatcattaaatacacctgctttgggtaaaactctttgcaagcagtaattaacactagtaacagtgaaagcacaagatttccaaatcagtcgttttctcaaaaaaatatcgtataagtgactcatcctgtctgctaactccagacctcccagcttgaagccaaatctttccatgtgagattgatatggatttcctagaagtactggaatgttgtcatatcttgccctattttaattctgctatagaaaacaattgccttcacttttaaggagtaatttgaatattaataactctggtctagattttcatataatgtattaaagacaaagtagtgaacatcaatgaacatctgatagagataaactgtaatcaggcataagcttgtttgtatgttctggcagtgactaatcagtaaatgatgtcggtttgcccagtatcacttatcttctgtatttttcctctgtcgtgtaaatagtataaccttttcatttatggacaattttttggactagtagccttcaatatacattctgctttgaattaattttttcaaatcaataaattatgtagacatttaaaatcaaatatcaagtagaattgaaaaatgtgagttacataagttaaaaacttactttaaatcttaccttctataggtagctctaaataaattcatatggttatatggcatctctggtgtatactgattgagaaaataattaaactgaagttaggggaggggaaaaaaaaaaaaaaaaa

SEQ ID NO: 766 - DNA, 3408 bp, Homo sapiens
ccttactcgctggcgcccaagtgggaagccagcagctgcccgctccctcctccccacatccccgctacttgcccagttcccgaagcgaagcgcaggctgcgagccagccgggccgagtccacaactttgcagcctcgggcagggcgagagccggcgtccggggctcctcttgtcggcgaccagagctcggaatgtaatcgaggatgctggccctgcggctgctcaacgtggtggcccccgcctacttcttgtgcatctccctggtgaccttcgtgctgcagctcttcctcttcctgcccagcatgcgcgaggaccccgcggccgcccggctcttctcgcccgccctgctccacggggcgctcttcctattcctctcggccaacgccctgggcaattacgtccttgtcatccagaactccccagacgacctgggggcctgccagggggcctcggccaggaagactccatgcccctcacctagcacccacttctgccgagtgtgcgccagagtcaccctgaggcacgaccatcactgtttcttcaccggcaactgcatcggcagcaggaacatgcgcaacttcgtcctgttctgcctctacacctccctggcctgcctctactccatggtggccggcgtggcctacatctccgctgtcctttccatctccttcgcccaccccttggccttcctcacgctcctgcccacctccatcagccagttcttctccggagctgtcctgggttctgaaatgttcgtcatcctcatgctctacctctggttcgccatcggcctggcctgcgccggcttctgctgccaccagctgctgttgatcctccgcgggcagacccgccaccaggtgcggaagggggtggcagtgagggcccggccctggcgcaagaacttacaagaggtcttcggaaagaggtggctgctgggcctgctggtccccatgttcaatgtcggaagtgagagctccaagcagcaggataagtagtagacactcccgtcatttatctctctgtctctgtcttgactcctcctgagcataaaaccatggcagccttgtctccacccatgactcactacaaccttgtgctggtaaggtcctagcatcttcccctcaccttccacccatgagaacagcgtgagctggtggatcatgacaaggaggaaaaatgtccccccaggcatttctaggctcctcacgagccagccaggtggctgctagctgttaggctgcctctgctttctttccgtccccttgggatccctgctttccccctcttcctggctcatccattctccaccgtgtctcattcatcactgctgtctgctagagcccttcctctcagcccccatgttgggagaggggagtggattcttgctgctggtatgagactccctgggacctagaggctggcaaatgtttaaaatcaccacgtgtaagaggcagccaagtcagctctgccaactgctaggggagttgggaaagagtgggtgtgtgtccgcatcccctctgtaggaaaaagaacttagtagcttgctgctccctcaccaccccccaccaggttcaagaccctttttctgggagacagcaatcaatggcctgctttttccaaatgttattccctgtccaccctgccccatctggccggcccagcccagtccaggacctggctggatgcttcctgtccctggaactcttccagcctttctacttgatctccagcccccaggtctttgccagatgatgggaaggcaaggaagaagggacagggaaagataattactgataaatgaaggggatattcgactgtataaccatatggaagtgtgtgtgtgtgtgtgtgtgtgtgtgtgagagagagagagagagagatgggtggtggtgagaagtgttgttagaaacatataggaataatgcctaggggaaagggagaagtgagagggacaattgggttcatttatgccctatacaaagggcattccagcagctgaaactcttcaatgtttgaatggctgcctgtgaaggtagtgagtgccccatcactggaggtattccagcagagtctaggcagtcgtctgccaggcatgctgtggaagggatttctgtacagggtcattctaggtgagcttacacattccttccaaccccaaggttctgatgtcctggttgtgattgctggacccagaggcaagatctgcagagatgcctgtgagatatttgctttcctagaggggagtgtgggcatgggaggggtctgaaaatcaggacccaacccagccactgaagagagagtctctgcagagacagggctacctgggtggttgaggggactgacatttgaggacagggagatggagcagtgtcattgtcagtggcagggcatggggggcagtggtgagctaaggctgaggagtggagatgaccagaatataagggtgcaattcccagaccatccctgcgcatctgactgactccggtggaggcactgctgtgtgttttctgaaacctagaggaccagacctctggggcatataagggagtagggacaacacaagtgccccctcctgactgggtcccaaagccaatatgacatccatgcaggcagcagtgctgaatccatgccctgcaatgtccaaccgccaactgcagtgacccgctgatagctgcgcaacagcctgggttcttgagcagagattgggaggactttactgtggttctgccttcacaccccctagagagctaatgtagtattggctccacctgctcacatttctccctcccatactcattccttcactcatccatcctacgtatatttattgagtgccaactacgttcccagcctcttccaggcactggcaatgcagtgatgaacaggatgacaagattcatgccatcaggggcaccttgtcactgccgtctgtgcactgattcacactccctgcaaaatggtcactctgccatcttggtggttggtggggcaggtcatttggaaataaagaatgtgatagagatggctgaagaggggaagcctaggctgcctcaatggaggagtcgctgggggcattttcacccacaattctggccatacttaagcaatgggagggagagggaggaggggaagatctgggcaattttggccttgactctttcctggctccagagctcaagcttagaagccagccctgctatttccagcctcctgaaggctcagcacggtgaggcctgacatcctggggaagggcaacagggagacctacaggatgttggctgcttgcagactggtcaatgggggatgacggtggggaggttgccagatgtgagacttgagtagcatttgtacacatggccctgtattgtccttgaagaacatcaataaaatatatggttttaaattgga

SEQ ID NO: 767 - DNA, 2373 bp, Homo sapiens
acctgctgggagctggaggaggcgcggagcgaagccggccctgccagccacgcggagaagcagaggcaggtgagcgcgatgcagccggcgccgggtctggggctcggggactcctccctgcaccgctacctggacggcgacttctggagcctcaagaacgagctgcgcggactcctcggcggcgcccgctcttccggcaaaggtatgatttaagcttggatgaaatgagagctttgacagttcagagagtgaagtttgccatggacctgcctctgttaaaacgtgcaggtcaggatctggcagagaaaacaaagaattttgtcagccgaagccttgtcataggagaagtcctctccatggcggacatggccacaggagtgaagtgcggaataatttattggctatttggtggtgctatcaggaatctcggaagccctgaacatgttactaagtggtttcagccactccaggagcagaaatacactgggatgtttgcaatgaccgagaggggccatgggagcaacgcgagagggatccagaccgaagccacctttgacctctctgcccaggagtttgtaattgacacgccgtgtgaaaatgcggagaagatgtatattggaaatgccatgtacgggaattatgcagctgtctttgcccagctcatcatagatggaagatctcaagggccccactgtttcatcgttcctgtccgggatgaaaacggaagcttgtacccaggagtcacagctattgatatgatgtacaaggagggtctgcatggtgtggacaatgggatattaatatttgacaaggttcggatacccagggagaacctgctggataagtttggttccgtggctccagatggacagtaccattcgcctattaggaacaagagtgcaagattcaatgccatgctggcagcactgaccccttcgagattagctgtggctttccaagctatgggtgccatgaagcttgggttgacgatagccattcgctatagccacagccggaggcagtttgggcccaaaaccaaggaagaggtgaagatcattgagcaccaaacacagaccctgcggctgatgccccacctggccacagccttggccctgaccttcgtcagcaggtatgctggggccctcctggatgaggatgtcttccagggaaaggagctggtcaacagtcgctcgctgcaggctctggtggcggggctgaaggcctacagcacctgggagaacatccgctgcctgcaggactgccgcgagtgcactggaggcatggttgtggggcgggaactgctggcccaatacaccaaacagtatgaagaaaaaccactctttggcctgctccaaaactgggctgaatctgtgggggacaagctgagaaccagtttcctggcatttaacatggacacagttgatgatctcgcctttctgttgaaagcagtgaaatttcgtgaaagggttcttcagcggggtttggtggccagaatttattataaggtaaagaccaagaaggaggattttttccatgcctggaactcgtgtctgcaccacgtggcttctctgtccctggcacacactcaccgagttaccttagagcagttctccctagcagtgaagagctgtcctgaccaagaggaccagactttgttaatgaagttttgtctgttgtatggaaccaagctggtgtttcaggagcgggcctggtatttagaacataaatacttgactcccatggccagcacgaggatcaggaatcagttgctggatttgtgcgactcggtgaaggatgatgcccggagggtgatctcgacctttaacattccacacacctacctccacgcaccaatcgccggaatctccaacccgcgggccgcgtgggctttctaccctgcaccgctgcagccgcggccacgggaagaggcgcgctcccggcggcccaagctgggagccaagctctaacgggtgtggcgggaagtgtggtggcccgccagcagctgccacgacgctcgctccaccgacgcccagagctgtggccgaggccgggggctggcacccgctgggccgccactctcggggattttggtggcaaagcggaggtcccgccgaggctggcgaggtgcgcggctggctgctaggaaagagatccagacggtcgcctggtgcgctggatccctgtgccctttccctgaaacccagcctggcctgactgcaacctctcccaacttcagtgccggatcccctagacaatcagggtgggctccccgctgcgagcgcgccccacagccgggtgccgccaaaggtctcctgctgttagcggtgactcacattcccagtgatttagaaaaactgtggtgccgagtgaaag

SEQ ID NO: 768 - DNA, 8228 bp, Homo sapiens
ccgcgggtctatgggaagttcggggacttgacagccgctgccgccgcagggcatttttggtcgaagagagctgaagtaatgagaagacatcatggaggcccagtcccacagctccacgaccactgaaaagaaaaaagttgagaattccatagtgaagtgctccactcgaacagatgtgagcgagaaagccgttgcctccagcaccacttctaatgaggatgaaagtcctggacagacttatcacagagagagaagaaacgcaatcactatgcagccacagaatgtccaggggctcagcaaagtcagtgaggaaccttcaacatcgagtgacgagagggcctcattgatcaagaaagagatccatgggtccctgccacacgtggcggagccctctgtgccgtaccgcgggacggtgtttgccatggaccccaggaatggttacatggagccccactaccaccctcctcatcttttccctgccttccatcctcctgtaccaattgatgccagacatcatgagggccgttaccattacgatccatctccgattcctccattgcatatgacttccgccttatctagtagccctacgtatccggacctgcccttcattaggatctccccacaccggaaccccactgctgcttccgagtctcccttcagccctccacatccctacattaatccctacatggactatatccgctccttgcacagcagcccatcgctctccatgatctcagcaacccgtgggctgagccctacagatgcgccccatgcaggagtcagcccagcagaatactatcatcagatggccctgctaactggccagcgcagcccctatgcagacattattccctcagctgccaccgccggcacgggggccatccacatggaatatcttcatgctatggatagcaccagattctccagccccaggctgtcagccaggccgagccgaaaacgtacactgtccatatcaccactctccgatcatagctttgaccttcagaccatgataaggacgtctcccaactccttggtcacgattctcaataattcccgtagcagctcttcagcaagtggctcctatggtcacttatctgcaagtgcaatcagccctgccttgagcttcacctactcttccgcgcccgtctctctccacatgcatcagcagatcctaagccgacaacagagcttaggttcagcctttggacacagccctccactcatccaccctgccccaacttttccaacacagaggcctattccagggatccctacggttctgaaccccgtccaggtcagctccggcccttctgagtcctcacagaacaagcccacgagtgagtctgcagtgagcagcactggtgacccgatgcacaacaagaggtccaagatcaaacccgatgaagacctccccagcccaggggctcgggggcagcaggaacagcccgaaggaacaacccttgtcaaggaggaaggggacaaagatgaaagcaaacaggagcctgaagtcatctatgagacaaactgccactgggaaggctgcgcgagggagttcgacacccaagagcagcttgtgcaccatataaataacgaccatattcatggagagaagaaggagttcgtgtgcaggtggctggactgctcaagagagcagaaacccttcaaagcccagtatatgttggtagtgcatatgagaagacacacgggcgagaagcctcacaaatgcacttttgaaggttgcacaaaggcctactcgagactagaaaacttgaaaacacacttgagatctcacactggagagaaaccatacgtctgtgagcacgaaggttgcaacaaggctttctcaaatgcctctgatcgcgccaaacaccaaaacagaacgcattccaatgagaaaccatatgtgtgcaaaatcccaggctgcactaagcgttacacagacccaagctccctccggaaacatgtgaagacagtgcatggcccagaggctcatgtcaccaagaagcagcgaggggacatccatcctcggccgccacccccgagagattccggcagccattcacagtccaggtcgcctggccgaccgactcagggagcccttggtgagcagcaggacctcagcaacactacctcaaagcgggaagaatgcctccaggtgaaaaccgtcaaggcagagaagccaatgacatctcagccaagccctggtggtcagtcttcatgcagcagccaacagtcccccatcagcaactattccaacagtgggctcgagcttcctctgaccgatggaggtagtataggagacctcagtgccatcgatgaaaccccaatcatggactcaaccatttccactgcaaccacagcccttgctttgcaagccaggagaaacccggcagggaccaaatggatggagcacgtaaaactagaaaggctaaaacaagtgaatggaatgtttccgcgactgaaccccattctaccccctaaagcccctgcggtctctcctctcataggaaatggcacacagtccaacaacacctgcagcttgggtgggcccatgacgcttctcccgggcagaagcgacctctctggggtggacgtcactatgctgaacatgctcaacagaagggacagcagcgccagcaccatcagctcggcctacctgagcagccgccgctcctcagggatctcgccctgcttctccagccgccgctccagcgaggcgtcacaggccgagggccggccgcagaacgtgagcgtggccgactcctacgaccccatctccaccgacgcctcgcgccgctccagcgaagccagccagagcgacggcctgcccagcctgctcagcctcacgcccgcccagcagtaccgcctcaaggccaagtacgcggctgccacaggagggccgccgccgacgcccctgcccaacatggagaggatgagcctgaagacgcgcctggcgctgctcggggatgccctcgagcctggcgtggccctgcctccagttcatgccccgaggaggtgcagcgacgggggagcccacggctacgggcggcgccacctgcagccgcacgatgcgccgggccacggcgtgaggagggccagcgacccggtgcggacaggctccgagggcctggccctgcctcgtgtgccgcgcttcagcagcctcagcagctgcaaccccccggcgatggccacgtccgcggagaagcgcagtctcgtgcttcagaattacacgcggcccgagggcggccagtcccgaaacttccactcgtccccctgtcctcccagcatcaccgagaacgtcaccctggagtccctgaccatggacgctgatgccaacctgaacgatgaggatttcctgccggacgacgtggtgcagtatttaaattcccagaaccaagcagggtacgagcagcacttccccagcgccctcccggacgacagcaaagtgccccacgggcccggtgactttgacgcgcccgggctgccagacagccacgctggccagcagttccatgccctcgagcagccctgccccgagggcagcaaaaccgacctgcccattcagtggaacgaagtcagctccggaagcgccgacctgtcctcctccaagctcaagtgtgggccgcggcccgctgtgccgcagactcgcgcctttgggttctgcaacggcatggtcgtccacccgcagaaccccttgaggagcgggcctgctgggggctatcagaccctcggggagaacagcaacccctacggtggcccagagcacttgatgctccacaacagccccggaagtggcaccagtggaaacgccttccatgaacagccctgtaaggccccgcagtatgggaactgtctcaacaggcagccagtggcccctggtgcactcgacggtgcctgtggtgccgggattcaagcctcaaagctgaagagcacccccatgcaagggagcgggggccagctgaatttcggcctgccggtagcgccaaatgagtcagctggcagcatggtgaatggcatgcagaaccaggacccagtgggacaggggtacctggctcaccagctcctcggcgacagcatgcagcacccgggggcaggccgccccggtcagcagatgcttgggcagattagtgctacctcacacatcaacatctaccaagggccagagagctgcctgccaggggctcacggcatgggcagccagccgtcaagcttggcagttgtcaggggctaccagccatgtgccagctttgggggcagcaggcgccaggctatgccgagggacagccttgctctgcagtcaggacagctcagtgacacaagtcagacctgcagggtgaatggtatcaagatggagatgaaagggcagccccatccgctgtgctctaatctgcagaattactctggtcagttctatgaccaaaccgtgggcttcagtcagcaagacacgaaagctggttcattctctatttcagacgccagctgcctgctacaggggaccagcgccaaaaactctgagttactttccccaggtgctaatcaggtgacaagcacagtggacagcctcgacagccatgacctggaaggggtacagattgacttcgatgccatcatagacgatggggaccactccagcctgatgtcgggggccctgagcccaagtatcattcagaacctttcccatagctcctcccgcctcaccacgcctcgggcgtccctcccattcccagcgctgtccatgagcaccaccaacatggctatcggggacatgagttctttgctgacctccctagcggaagaaagcaaattccttgcagttatgcaataggctttaggaaaaaaagactgcaaccaacggaaatcaataggagttgaagagattaaactgactttgttttggctgtttttttagttctgtatgtattttagcaatctcatctcacctaactgagatgtgtttcaattatattccttttatggaaaaggactctgaaaaaccctaaagtattctagggagaaactgtcttccatttcagttttgaatcagtattgttacactcaaaccaccctctttttaaaaaaaaaaaaaaaaactgtaagccccgccccctttttagtaaaccgatgtaaatttgtgatgtgcatattcttctttcttttagaagagcagtcaaattaaaggatttgacatgttttgctgttgctcaaaggaaataggagttggtgtgcttgtgaccaaggggttacacttccagcttttaaaattctcctttacatgtgctcagtgttttgttttgtgttttggtttctgttttttattttaattcccacattgggcacaagaatcagaatatggatagctagtttaagaaacttttgtgggtgcactgtagcatagatgacagaatattgatgttccccccatctccaattcagttcagggcattccacagttaaacagaaatgggaacgtggggctcttataaatgaaatgggcgctcacagttttggttttcagctcttcatgtctgtaagtgtgctttgggggaggctatgtctgtatggtcgattctcagttatcacatttgcctctcctcccactaccttcatgaacattcagtgctgtttcgcactgcagttagagagaagggacggacagttggtgacactcagccacattgctacttttatctgttctggtaagaagttagatagatggtagattgaagcaattgggtagaattagttgggggaatatttatgagttgctgtgtttgttgattagttccatctctttcccattttaactgagaattgattatatatagctctaagtatataggtatttaaacaaccccacaagcggctgtatcagtaacatttattaattccactatagtgagggaggatttccattctaaataccttattttgagggatttataaaacttagttgtaaaagagaaagcccacatagtgggaataaattgcttcagccatttttagtatttgagagcactagggaagatgtttagtagctgtgtggatgccttttttcacaccctgtctattgaatgctgcatccattcacgaagttaaatgttacatgcagttagtccttaatgtggactggatctgtacttttgttttggattaaaacatttaaagatttttgaagtgcagctactccccacgtgcatttgatacacataaaagtcatactgtgtgtgcacaaagagtacatggattttccagcatattgctttaaaaaattatataaactgttaaaatattaacacctcaggctacctgctgtattctgtcccattgacccctggaattggatttactgcaagtgattgataattcaattatgtggcttttcccctttaatcttgccatttaaattacagtagaaagacaaaatcaagtaaaataaagtgttagataatagaaagagtgttaagaccagcccacttttctcatgtttatgttctttcatttggaccaagaatctccgcatggaggttgatttgccactggggactttggctaagactattaggtttgctttcaactagatgttcctgagacaagcagagggacactgcaattccccttccatgcctgctgttctcccccatgtaagtcttctttgaaattaacggatgtgtctcctttggaacagccccataacaaaagagaactactgatctgagcataggaaagtagaggctctaccacttttcagttgaaaaagcaagactttctctgtgtttctgaaacaaggcataatgttgtcacagaatcagagatccagtctcacttttccacaaatctccaaatctccagtcttatcttgtgtgctctaatggtttggttcaatccctttccaactcttgttttcaaagcatggggcctgagtgttctccactcctcctaagaaaggagcttgggtggaagggaccatgctgacctcctccatcagagggctcttccagtagtattctcggatgcaacctccatttctcagttaccattatttcctgtatcagctttgtccttcctggagggatgcacagtgatccggcccaccactgttgttgtcttgtgcttctgctctttcctatggtttcaggttattttctgggtttcccctattcttcttttatttctttttttttttatatttgctttcctttctactgcttttagatttgcaggagatgcaagtttcagctcaatgtttggcttctctcaatatggaaatttcagaaggacagaggagaggagggaggaagaagaaagtatactcctccagaatttcagtgatctgttgtggcagtccagtggaaggaaggtcttttgaggtcacttagaagcatctttttgggacatccttttgggatctctgtaggctaggcatctcatatcttgagactcacccccagcctccaagcctctctccatttctctaacctatgcattttagagcgagaggaccgcctcactagtgtcaccatcctgccttttctaaaacatgcaggctcacacattctactcctgcttaatgtctgtgttaaacgttttctaaccatttttgttttatttttctgaaaaagttaacccctcccaactcctcacacattggctcttcctcttgagccacaaagttttgattcttgcgatgtatgtgccttattttatgttaatcttgtcaatgagagggaccagttggtgttgcccaatcagcactccaaggctgtgtgtgcaccagccagagagcgcacggtggtagcagagtcgaggctgtcttgtatcctggtttcatgtgttgttttgaactgataggaggatgttctcttctgacaagttacccttgtgtatcctgcagacatgtaaaataaaatacaagttcatttttttcaccttttttagatttttttaaaaaataaaatgtgtaatcctttttttaaaagaaacacatgtaaatacatttaagtattgtaggcatagcgttcagatgtgactggcccaggcgttcctcggacaagcctgcattccccgtgatcacgcccacctcaagcccaggggctgcagcccagccacagatgaactctacctttgctttcagaaccacttagtccttttgtaacaaagaaaaaaaaatgtttcttacaatgtcaataaaaaattctttgtatggaaaaaaaaaaaaaaaa

SEQ ID NO: 769 - DNA, 2922 bp, Homo sapiens
gtgctccgggcggagcgcgctagctgctcgggcgcggggcgttcttggtgcgccgggccgtggtgagtccgggctcccgtggccgcgtgctgggaggagactggagcccggttaggaagaatggagttggcgactcgctaccagatccctaaagaagtggctgacatctttaacgcccccagtgatgatgaagagtttgttggcttccgagatgatgttcccatggaaaccctctcgtcagaggagagctgcgatagttttgactcactagagtcagggaaacagcaggatgtgcgctttcattccaaatacttcacagaagagctaagaagaatttttatagaggacactgactcagagactgaggattttgcaggatttacgcagagtgatctgaatggaaagactaacccagaagtaatggtcgtggagtcagatttgagtgatgatggcaaagcatctttggtgagcgaggaagaggaagatgaagaagaagataaggctacccctagaagaagcaggtctagaagaagtagtattggtcttcgagtagcctttcagttccccaccaagaagctggccaacaaaccagataaaaacagttcttccgagcagttgttttctagcgcacgcttacagaatgagaaaaaaacaattcttgaaagaaagaaagactgtagacaggtgatacaaagggaagattctacctctgagtctgaggatgactctcgggatgagagccaggagagttcagatgctttgctgaaaaggaccatgaacatcaaggagaacaaagccatgcttgcccagttattggcggaattgaactcgatgccagatttcttcccagtacgaaccccaacctcagcttctaggaagaagacagtgaggcgggccttctcggagggacagatcacgcggcgtatgaacccaacccggagtgcgcggcctcctgagaagtttgctctagagaacttcactgtctcagccgctaaatttgcggaagagttttacagcttccgaagaaggaagacaattggggggaaatgccgggagtacagacgacgtcaccgtatatcttcttttcggccagtggaggatatcaccgaagaggacttagaaaatgttgccataactgttcgagataaaatctatgataaagttctgggtaacacgtgccatcagtgtcgacaaaagaccatcgacaccaagacagtgtgtcggaaccagggttgctgtggtgtgcgaggacagttctgtggaccatgcctgcggaaccgctatggggaggatgtcagatcggcattgctggacccggattgggtgtgtcccccctgtcgtgggatctgcaattgcagctactgtcggaagcgtgacggccgctgtgccacaggaatcctcattcatctggccaagttttatggttatgacaatgttaaggaatatctggagagcttacaaaaggagctggtagaagacaattaagaggaaaacaaacagaaccagccacctcaccatagagtactccaacaagacatgcataccattggtgcctaagaaagatttttttacagttgtgtttttatacagaaattctttgtagaaattactattttttgttaaagattgtttatatgcttacaaagatttctcaggaagacagcagagcagaggaatctatatagatgtatgcacagacctgtctgtatgctgaactttgttaaaaatatctgccagttattaaaaagcacagtttaaatggggtggggttaaagttcaggtaagtaagttagagagaaaacattgtatgatcagctcctgcacttgatctatctatctttggcttcccaaacagtaactcactccaggccaagtgtgccttagcacgagtgaccacagtttaatagaccacacacatcgtttaacctgctcttggtcattggaaatttacactgaacaaagtgcaattaactgtagaacagttttatttttattaaaacttgactgaacaaaaggggaccatcaacattgtagacactggacactggaggccttacagagtgctagcctcttccttcaggactcacctggggcctgctgcttttatattttgaaagagtttaagggctaataatttaatttgttgtttgttaaaaattaaaatctccgttctttccggctgcattgcttttgcatgttcacatatgatgtacttttatgatgtacttttttttttttgagatggagtcttgttctgttgcccaggagggagtgcagtggtgcaacctcggctcactgcaacctttgcctcctaggttcaagtgattctcctacctcctgagtaactgggattacagtcgtgtgccaccacgctcagccctgagttagtttctagtatttttttctgactttcactctaaggatagcgttgaaaaaagaatgcacgtgtgagttactaaaaagttagaataatgtgcatgggaacagtgcagcaacatgctagaaaatcctcactgcactccagcagaggctagaggaatgccagtgttaccttacgcttctagaagcagagccactccagccagaacccattttgcagtcttctcttcgctcttcagcctgaaggtccagatgtagctggggcctctcagtttggttctatacacagggcactcgtaggtctgtttggtttcttgtctgtccacgggggtggcttttgcaaagatgaccggcatagggcatgccagctccttgagacgggcttcaacaatggttcctgcttgggtgtcccagcgggcgcctatggcaaaaacacagcggttgcaattgtgtggcagcttgctactaatgataatgatcaagtaagttgtttgatgcaataaacattcaacattctggttttgtcataaaaaaaaaaaaaaa

SEQ ID NO: 770 - DNA, 2463 bp, Homo sapiens
cagcccagaggaccccaggcgaccagagtccaggctgaggcccgaggtggctcaccagctgttcagatgcttccagtatcaggaggacatggggccacgggcgtccctgagccggctccgggagctctgcggccactggctgcggccggctctgcacaccaagaaacagatcctggagctgctggtgctggagcagttcctgagtgtgctgcctccgcacctcctgggccgcctgcaggggcagccgctcagggatggggaggaggtggtgctgctgctcgagggcatccaccgggagcccagccacgcggggccgctggattttagttgtaatgctggcaagagttgtccccgtgcagacgtcaccttggaggaaaaggggtgtgcttcccaggtccccagccacagccccaagaaggaattgcctgcggaagagccttcagtgctgggcccatcggatgagcctccccgaccccagccaagggctgcccagcctgctgagccgggacagtggaggcttcccccaagttcaaagcagccgctgagcccggggccccagaagacattccaggccctgcaagaaagcagtccccagggcccctcaccatggccagaggagagttcccgagatcaggagctggcggctgtgctggagtgcctgacctttgaggatgtgccagagaataaggcgtggcctgcacaccccctgggattcggaagcagaaccccagacaaggaggaatttaaacaagaagagcccaaaggggctgcctggcccactcccatcttagcagagtcccaggcagatagtcctggggtgccgggagagccttgcgcccagtcgctcggacggggcgctgcggctagcggccctggcgaagatgggtcccttcttggcagcagtgaaattttggaggtcaaagtggctgagggcgtccccgagcccaatccggagttgcagttcatctgcgcggactgcggggtgagcttcccgcagctgtctcgcctgaaggcgcaccagctgcgctcgcacccggctgggcgctccttcctgtgcctttgctgcgggaagagcttcggccgcagctccattctcaagctgcacatgcgcactcacacggacgagcggccgcacgcctgccacctgtgcggccaccgcttccgccagagctcgcacctgagcaagcacctgctgacccactcctccgaacccgccttcctgtgcgcagagtgcggccgcggcttccagcgccgcgccagccttgtgcagcacctgctggcgcacgcccaggaccagaagccgccctgcgctcctgagagtaaggccgaagcgccgccactgaccgatgtcctgtgctcccactgcggccagagcttccagcgccgctccagcctcaagcgccacctgcggatccacgccagggacaaggaccgccggtcctccgaaggctccggcagccgccgccgggactccgaccggaggcccttcgtgtgcagcgactgcggcaaggccttccggcgcagcgagcacctggtggcccaccggagggtgcacacgggcgagcggcccttctcctgccaggcttgcggccgcagcttcacgcagagctcgcagctggtcagccaccaacgggtgcacacgggcgagaagccctacgcctgtccgcagtgcgggaagcgctttgtgcgccgggccagccttgcccgccacctgctgacccacggtggccctcggccccaccactgcacccagtgcgggaagagtttcggccagacccaggatctggcccgccaccagcgcagccacacgggcgagaagccctgccgctgcagcgagtgcggtgagggcttcagccagagcgcccacctggcgcgccaccagcgcatccacacaggggagaagccccacgcctgcgacacctgcggccaccgtttccgcaatagctccaacctggcccgccatcgccgcagccacacgggcgagcggccctacagctgtcagacgtgcggtcgcagcttccggcgcaacgcgcatctgcggcggcacctggctacccatgcggagcccgggcaggagcaggccgagcccccgcaggagtgcgtggagtgcgggaagagcttcagccgcagctgcaatctgctgcgacacctgctggtgcacacgggcgccaggccctactcctgcacgcagtgtggccgcagcttcagccgcaactcccacctgctgcgccacctgcgcacccacgcccgcgagacgctgtactagcttggcccgccttccgccagccgcgccctgcgccacctacccggggtcctccacagcggaggcctgcaggaatgtcccttcccaccacaccccacttccctctccttccactttcacagctgtccttccctggccgaggcattgctttctggcctcagctatgtaattaaaacgcccgaagtaaaatggccttctcc

SEQ ID NO: 771 - DNA, 3011 bp, Homo sapiens
cggagcccacggagcccacggaggagcccacggaggagccccagcgtccgaacgggcagaccccctcgagccgcgaaggagcccgagaagcagccacgatgtgcggaatctttgcctacatgaactacagagtcccccggacgaggaaggagatcttcgaaaccctcatcaagggcctgcagcggctggagtacagaggctacgactcggcaggtgtggcgatcgatgggaataatcacgaagtcaaagaaagacacattcagctggtcaagaaaagggggaaagtcaaggctctcgatgaagaactttacaaacaagacagcatggacttaaaagtggagtttgagacacacttcggcattgcccacacgcgctgggccacccacggggtccccagtgctgtcaacagccaccctcagcgctcagacaaaggcaacgaatttgttgtcatccacaatgggatcatcacaaattacaaagatctgaggaaatttctggaaagcaaaggctacgagtttgagtcagaaacagatacagagaccatcgccaagctgattaaatatgtgttcgacaacagagaaactgaggacattacgttttcaacgttggtcgagagagtcattcagcagttggaaggtgcattcgcgctggttttcaagagtgtccactacccaggagaagccgttgccacacggagaggcagccccctgctcatcggagtccggagcaaatacaagctctccacagaacagatccctatcttatacaggacgtgcactctggagaatgtgaagaatatctgtaagacacggatgaagaggctggacagctccgcctgcctgcatgctgtgggcgacaaggccgtggaattcttctttgcttctgatgcaagcgctatcatagagcacaccaaccgggtcatcttcctggaggacgatgacatcgccgcagtggctgatgggaaactctccattcaccgggtcaagcgctcggccagtgatgacccatctcgagccatccagaccttgcagatggaactgcagcaaatcatgaaaggtaacttcagtgcgtttatgcagaaggagatcttcgaacagccagaatcagttttcaatactatgagaggtcgggtgaattttgaaaccaacacagtgctcctgggtggcttgaaggaccacttgaaggagattcgacgatgccgacggctcatcgtgattggctgtggaaccagctaccacgctgccgtggctacgcggcaagttttggaggaactgactgagcttcctgtgatggttgaacttgctagtgattttctggacaggaacacacctgtgttcagggatgacgtttgctttttcatcagccagtcaggcgagaccgcggacaccctcctggcgctgcgctactgtaaggaccgcggcgctctcaccgtgggcgtcaccaacaccgtgggcagctccatctctcgcgagaccgactgcggcgtccacatcaacgcagggccggagatcggcgtggccagcaccaaggcttataccagtcagttcatctctctggtgatgtttggtttgatgatgtctgaagaccgaatttcactacaaaacaggaggcaagagatcatccgtggcttgagatctttacctgagctgatcaaggaagtgctgtctctggaggagaagatccacgacttggccctggagctctacacgcagagatcgctgctggtgatggggcggggctacaactatgccacctgcctggaaggagccctgaaaattaaagagataacctacatgcactcagaaggcatcctggctggggagctgaagcacgggcccctggcactgattgacaagcagatgcccgtcatcatggtcattatgaaggatccttgcttcgccaaatgccagaacgccctgcagcaagtcacggcccgccagggtcgccccattatactgtgctccaaggacgatactgaaagttccaagtttgcgtataagacaattgagctgccccacactgtggactgcctccagggcatcctgagcgtgattccgctgcagctgctgtccttccacctggctgttctccgaggatatgacgttgacttccccagaaatctggccaagtctgtaactgtggaatgaggctgagaccgtgacaagaccatcaccacctttcatctgattccagacctgtcccaacagcagggatgctacatgggaagagaagtggacatcccacatgttctgcgtgctcctgtagagcttgacagcttccacgtgccttctacccaagtgcttttgcttacagcagatactgtttctctgtgtcctgaagtcgccagaggagaagggaatcattgtttacacatggggatcagagcagacttctccactactgtgcaatagagatacagctctcttcagagtaactgtgaaccttttataaccaacactagagttagttttaaaagacaagatatttataatgacgactgtatagcttttaagttatttttctagtatgtggctttctgtagccgtggtaacggccaaactgttcatcctagctacccatgctctgtgtccaggcttgctcctggcaggtggcattcatctcagatgtgagcacaaggcattggccctctggactcctttctccttttctttcctctctaggctgctcctgaatcctgttctctgacatccgtggagcccctcctgcatccacctatgcctcctataagtccagttgaaatctcagcctccttcaacattttcttctcgtgtgtggcccacatccctccacttctccaacttctgtttaatctgatcacggctctttttaagccctggcagcattttggtccctgctccttgcccatagtaaaacagcttgaaatatcccatgcaagagagtagtttcaagtgggcgactctgctctctatttaaaagcgtgcacaatcaaaagtactatgcaattttaggacaataaagaacatacagtt

SEQ ID NO: 772 - DNA, 1049 bp, Homo sapiens
tccggccccgcccgcgtcagctctgcgcggtgattcactccctccttcgccccggggcccccttcccggccagacggcgggcaagacagctgggtgtacagcgtcctcgaaaccacgagcaagtgagcagatcctccgaggcaccagggactccagcccatgccatggcggattctgagcgcctctcggctcctggctgctgggccgcctgcaccaacttctcgcgcactcgaaagggaatcctcctgtttgctgagattatattatgcctggtgatcctgatctgcttcagtgcctccacaccaggctactcctccctgtcggtgattgagatgatccttgctgctattttctttgttgtctacatgtgtgacctgcacaccaagataccattcatcaactggccctggagtgatttcttccgaaccctcatagcggcaatcctctacctgatcacctccattgttgtccttgttgagagaggaaaccactccaaaatcgtcgcaggggtactgggcctaatcgctacgtgcctctttggctatgatgcctatgtcaccttccccgttcggcagccaagacatacagcagcccccactgaccccgcagatggcccggtgtaggcgaacttccctcatttctctctgcaatctgcaaataactcctccattgaaataactcctccccaccccaacaacaacattcccagcagaccaactcccaccccctctttgaggtaaaagtgcctttattgggagacttttgtcttccagcctgccaatcaaccctcctgggtgtggccaccatatgtgtgtgcctaggtcctccttctgcacgatccaataggagacaccagttctgactgaaccatgcccccacctaagtcacaaaatgagggaagtggggagttagatttcagagtccaggccctaggttgggacccactccaaataatctcctcggtgtgggtggtggttctatagagggataaatgaataataaacattgttaaaatatacgataatgaataaagtaatcctttcatcaaa

SEQ ID NO: 773 - DNA, 781 bp, Homo sapiens
taggctgcgttggggcctttttttcgcatcctgcttcgtcaggtttataccactttatttggtgtgctgtgttagtcaccatgtctgaaacagtgcctcccgcccccgccgcttctgctgctcctgagaaacctttagctggcaagaaggcaaagaaacctgctaaggctgcagcagcctccaagaaaaaacccgctggcccttccgtgtcagagctgatcgtgcaggctgcttcctcctctaaggagcgtggtggtgtgtcgttggcagctcttaaaaaggcgctggcggccgcaggctacgacgtggagaagaacaacagccgcattaagctgggcattaagagcctggtaagcaagggaacgttggtgcagacaaagggtaccggagcctcgggttccttcaagctcaacaagaaggcgtcctccgtggaaaccaagcccggcgcctcaaaggtggctacaaaaactaaggcaacgggtgcatctaaaaagctcaaaaaggccacgggggctagcaaaaagagcgtcaagactccgaaaaaggctaaaaagcctgcggcaacaaggaaatcctccaagaatccaaaaaaacccaaaactgtaaagcccaagaaagtagctaaaagccctgctaaagctaaggctgtaaaacccaaggcggccaaggctagggtgacgaagccaaagactgccaaacccaagaaagcggcacccaagaaaaagtaaattcagttagaagtttcttctagtaacccaacggctcttttaagagccaccta

SEQ ID NO: 774 - DNA, 3028 bp, Homo sapiens
gtgcgaatccggtgccggcaagcggctggcgatgctggaggttcgctagccgaagcggctgcatctggcgccgcgtctgccccgcgtgctcggagcggattctgcccgccgtccccggagccctcggcgccccgctgagcccgcgatcacttcctccctgtgaccaaccggcgctgcaggttagagcctggcaatgccgtttgggtgtgtgactctgggcgacaagaagaactataaccagccatcggaggtgactgacagatatgatttgggacaggtcatcaagactgaggagttttgtgaaatcttccgggccaaggacaagacgacaggcaagctgcacacctgcaagaagttccagaagcgggacggccgcaaggtgcggaaagctgccaagaacgagataggcatcctcaagatggtgaagcatcccaacatcctacagctggtggatgtgtttgtgacccgcaaggagtactttatcttcctggagctggccacggggagggaggtgtttgactggatcctggaccagggctactactcggagcgagacacaagcaacgtggtacggcaagtcctggaggccgtggcctatttgcactcactcaagatcgtgcacaggaatctcaagctggagaacctggtttactacaaccggctgaagaactcgaagattgtcatcagtgacttccatctggctaagctagaaaatggcctcatcaaggagccctgtgggacccccgagtatctggccccagaggtggtaggccggcagcggtatggacgccctgtggactgctgggccattggagtcatcatgtacatcctgctttcaggcaatccacctttctatgaggaggtggaagaagatgattatgagaaccatgataagaatctcttccgcaagatcctggctggtgactatgagtttgactctccatattgggatgatatttcgcaggcagccaaagacctggtcacaaggctgatggaggtggagcaagaccagcggatcactgcagaagaggccatctcccatgagtggatttctggcaatgctgcttctgataagaacatcaaggatggtgtctgtgcccagattgaaaagaactttgccagggccaagtggaagaaggctgtccgagtgaccaccctcatgaaacggctccgggcaccagagcagtccagcacggctgcagcccagtcggcctcagccacagacactgccacccccggggctgcaggtggggccacagctgcagctgcgagtggagctacctcagcccctgagggtgatgctgctcgtgctgcaaagagtgataatgtggcccccgcagaccgtagtgccaccccagccacagatggaagtgccaccccagccactgatggcagtgtcaccccagccaccgatggaagcatcactccagccactgatgggagtgtcaccccagccactgacaggagcgctactccagccactgatgggagagccacaccagccacagaagagagcactgtgcccaccacccaaagcagtgccatgctggccaccaaggcagctgccacccctgagccggctatggcccagccggacagcacagccccagagggcgccacaggccaggctccaccctctagtaaaggggaagaggctgctggttatgcccaggagtctcaaagggaggaggccagctgagtaggcagcctggtgagggggggcaggggatgggcaggagggtgggagagtggatgaggggcttctcactgtacatagagtcactggcatgatgccctcgctcccccatgcccccacatcccagtggggcataactaggggtcacgggagagcagtctcgtctcctgtgtgtatgtgtgtgagtggtgggcaggccagtggcagggccggccccagcccctgcatggattccttgtggcttttctgtcttttgctagcttcaccagtttctgttccttgtgggatgctgctctagggatactcagggggctcctgctctccttccccttcccttcttgcctcaccattcccctaggcaggccctgcaggtcccacactctcccaggccctaaacttgggcggccttgccctgagagctggtcctccagcgaggccctgtcagcggtcttaggctcctgcacatgaaggtgtgtgcctgtggtgtgtgggctgctctaggagcagatacaggctggtatagaggatgcagaaaggtagggcagtatgtttaagtccagacttggcacatggctagggatactgctcactagctgtggaggtcctcaggagtggagagaatgagtaggagggcagaagcttccatttttgtccttcctaagaccctgttatttgtgttatttcctgcctttccgagtcctgcagtgggctgccctgtaccctgaacctcatgagcctctaagggaaaggaggaacaattaggacgtggcaatgagacctggcagggcagagtacaagcccagcacccagtgtcccagccttactgggtccttaccctgggccaaacagggagggctgatacctccttgctcttcctagatgcccacctcctacaatctcagcccacaagtcctctccaccctagggggcttgctgcatggcaataactcataatctgatttggaggtttgccctttacaggggcagattttctgctcagttcaacaatgaaatgaagaggaactccctctttctacagctcacttctatcagaggcccaggtgcctcagagccacattgagttgctttttctgggatgaggaagtagggttaaactccccagtttcctgagggaggctcctgacaggtgccctttgtcagaccctaccacagcctggataggcagccacattggtcctcgcccttgctcggcactccgtggtggtcctgcccttctccctgcatgcctgtgggtctgctctggtgtgtgaaggtcggtgggttaactgtgtgcctactgaacctggcaaataaacatcaccctgcaaagcc

SEQ ID NO: 775 - DNA, 3525 bp, Homo sapiens
tcagtagctgaggctgcggttccccgacgccacgcagctgcgcgcagctggttcccgctctgcagcgcaacgcctgaggcagtgggcgcgctcagtcccgggaccaggcgttctctcctctcgcctctgggcctgggaccccgcaaagcggcgatggagcggaggtcgcggaggaagtcgcggcgcaacgggcgctcgaccgcgggcaaggccgccgcgacccagcccgcgaagtctccgggcgcacagctctggctctttcccagcgccgcgggcctccaccgcgcgctgctccggagggtggaggtgacgcgccaactctgctgctcgccggggcgcctcgcggtcttggaacgcggcggggcgggcgtccaggttcaccagctgctcgccgggagcggcggcgcccggacgccgaaatgcattaaattaggaaaaaacatgaagatacattccgtggaccaaggagcagagcacatgctgattctctcatcagatggaaaaccatttgagtatgacaactatagcatgaaacatctaaggtttgaaagcattttacaagaaaaaaaaataattcagatcacatgtggagattaccattctcttgcactctcaaaaggtggtgagctttttgcctggggacagaacctgcatgggcagcttggagttggaaggaaatttccctcaaccaccacaccacagattgtggagcacctcgcaggagtacccttggctcagatttctgccggagaagcccacagcatggccttatccatgtctggcaacatttattcatggggaaaaaatgaatgtggacaactaggcctgggccacactgagagtaaagatgatccatcccttattgaaggactagacaatcagaaagttgaatttgtcgcttgtggtggctctcacagtgccctactcacacaggatgggctgctgtttactttcggtgctggaaaacatgggcaacttggtcataattcaacacagaatgagctaagaccctgtttggtggctgagcttgttgggtatagagtgactcagatagcatgtggaaggtggcacacacttgcctatgtttctgatttgggaaaggtcttttcctttggttctggaaaagatggacaactgggaaatggtggaacacgtgaccagctgatgccgcttccagtgaaagtatcatcaagtgaagaactcaaacttgaaagccatacctcagaaaaggagttaataatgattgctggagggaatcaaagcattttgctctggataaagaaagagaattcatatgttaatctgaagaggacaattcctactctgaatgaagggactgtaaagagatggattgctgatgtggagactaaacggtggcagagcacaaaaagggaaatccaagagatattttcatctcctgcttgtctaactggaagttttttaaggaaaagaagaactacagaaatgatgcctgtttatttggacttaaataaagcaagaaacatcttcaaggagttaacccaaaaggactggattactaacatgataaccacctgcctcaaagataatctgctcaaaagacttccatttcattctccaccccaagaagctttagaaattttcttccttctcccagaatgtcctatgatgcatatttccaacaactgggagagccttgtggttccatttgcaaaggttgtttgtaaaatgagtgaccagtcttcactggttctggaagagtattgggcaactctgcaagaatccactttcagcaaactggtccagatgtttaaaacagccgtcatatgccagttggattactgggatgaaagtgctgaggagaatggtaatgttcaagctctcctagaaatgttgaagaagctgcacagggtaaaccaggtgaaatgtcaactacctgaaagtattttccaagtagacgaactcttgcaccgtctcaatttttttgtagaagtatgcagaaggtacttgtggaaaatgactgtggacgcttcagaaaatgtacaatgctgcgtcatattcagtcactttccatttatctttaataatctgtcgaaaattaaactactacatacagacacacttttaaaaatagagagtaaaaaacataaagcttatcttaggtcggcagcaattgaggaagaaagagagtctgaattcgctttgaggcccacgtttgatctaacagtcagaaggaatcacttgattgaggatgttttgaatcagctaagtcaatttgagaatgaagacctgaggaaagagttatgggtttcatttagtggagaaattgggtatgacctcggaggagtcaagaaagagttcttctactgtctgtttgcagagatgatccagccggaatatgggatgttcatgtatcctgaaggggcttcctgcatgtggtttcctgtcaagcctaaatttgagaagaaaagatacttcttttttggggttctatgtggactttccctgttcaattgcaatgttgccaaccttcctttcccactggcactgtttaagaaacttttggaccaaatgccatcattggaagacttgaaagaactcagtcctgatttgggaaagaatttgcaaacacttctggatgatgaaggtgataactttgaggaagtattttacatccattttaatgtgcactgggacagaaacgacacaaacttaattcctaatggaagtagcataactgtcaaccagactaacaagagagactatgtttctaagtatatcaattacattttcaacgactctgtaaaggcggtttatgaagaatttcggagaggattttataaaatgtgcgacgaagacattatcaaattattccaccccgaagaactgaaggatgtgattgttggaaatacagattatgattggaaaacatttgaaaagaatgcacgttatgaaccaggatataacagttcacatcccaccatagtgatgttttggaaggctttccacaaattgactctggaagaaaagaaaaaattccttgtatttcttacaggaactgacagactacaaatgaaagatttaaataatatgaaaataacattttgctgtcctgaaagttggaatgaaagagaccctataagagcactgacatgtttcagtgtcctcttcctccctaaatattctacaatggaaacagttgaagaagcgcttcaagaagccatcaacaacaacagaggatttggctgaccagcttgcttgtccaacagccttattttgttgttgttatcgttgttgttgttgttgttgttgttgtttctctactttgttttgttttaggcttttagcagcctgaagccatggtttttcatttctgtctctagtgataagcaggaaagagggatgaagaagagggtttactggccggttagaacccgtgactgtattctctcccttggatacccctatgcctacatcatattccttacctcttttgggaaatatttttcaaaaataaaataaccgaaaaattaaaaaaaaaaaaaa

SEQ ID NO: 776 - DNA, 468 bp, Homo sapiens
accacgcttttcatctgtcccgctgcgtgttttcctcttgatcgggaactcctgcttctccttgcctcgaaatggaccccaactgctcctgctcgcctgttggctcctgtgcctgtgccggctcctgcaaatgcaaagagtgcaaatgcacctcctgcaagaagagctgctgctcctgctgccctgtgggctgtgccaagtgtgcccagggctgcatctgcaaagggacgtcagacaagtgcagctgctgtgcctgatgccaggacagctgtgctctcagatgtaaatagagcaacctatataaacctggattttttttttttttttttttgtacaaccctgacccgtttgctacatctttttttctatgaaatatgtgaatggcaataaattcatctagactaaaaaaaaaaaaaaaaaaaaaaaaaaaaaaaaaaaaaaaaaaaaaaaaaaaaaaaaaaaaaaaaa

SEQ ID NO: 777 - DNA, 2900 bp, Homo sapiens
gcagtacccaagcgagccatttaacatggcggaggatgtttcctcagcggccccgagcccgcggggctgtgcggatggtagggatgccgaccctactgaggagcagatggcagaaacagagagaaacgacgaggagcagttcgaatgccaggaactgctcgagtgccaggtgcaggtgggggcccccgaggaggaggaggaggaggaggaggacgcgggcctggtggccgaggccgaggccgtggctgccggctggatgctcgatttcctctgcctctctctttgccgagctttccgcgacggccgctccgaggacttccgcaggacccgcaacagcgcagaggctattattcatggactatccagtctaacagcttgccagttgagaacgatatacatatgtcagtttttgacaagaattgcagcaggaaaaacccttgatgcacagtttgaaaatgatgaacgaattacacccttggaatcagccctgatgatttggggttcaattgaaaaggaacatgacaaacttcatgaagaaatacagaatttaattaaaattcaggctatagctgtttgtatggaaaatggcaactttaaagaagcagaagaagtctttgaaagaatatttggtgatccaaattctcatatgcctttcaaaagcaaattgcttatgataatctctcagaaagatacatttcattccttttttcaacacttcagctacaaccacatgatggagaaaattaagagttatgtgaattatgtgctaagtgaaaaatcatcaacctttctaatgaaggcagcggcaaaagtagtagaaagcaaaaggacaagaacaataacttctcaagataaacctagtggtaatgatgttgaaatggaaactgaagctaatttggatacaagaaaaaggtctcacaagaatcttttcttatctaagttgcaacatggaacccagcaacaagaccttaataagaaagaaagaagagtaggaactcctcaaagtacaaaaaagaaaaaagaaagcagaagagccactgaaagcagaatacctgtttcaaagagtcagccggtaactcctgaaaaacatcgagctagaaaaagacaggcatggctttgggaagaagacaagaatttgagatctggcgtgaggaaatatggagagggaaactggtctaaaatactgttgcattataaattcaacaaccggacaagtgtcatgttaaaagacagatggaggaccatgaagaaactaaaactgatttcctcagacagcgaagactgattgtgtttgtaaaagcttgatgaaaggacagttaagtattttgatcactgcattttgtttgaaacttgtgtcattgatgtaatttaaaacttttgtttaaagcattacagtatttttctgtgaccatcaattaatgagggtttgtgctaccagagttaaagcatatgctatcattgtattctttaagaaccttattttgataaaatgtaaatttgttgaaccctgccacatttagtatccccacccccaaatcctgttccaatgaaaaaattaaaacctgatacgaaaaaaaaaaaattccagttaacctattttgtgtctgtaggctgacctcaaccctgtaacgtaacccattaaaatgaatttctttttttttaagacagagtttctctctgttgcccaggctggagtgcagtggcgcaatttcagctcactgcaacctctgcctcccaggttcaagtgattctcctgcctcagcctcctgagtagctgggattacaggcacacaccaccacgcccagctaatttttgtatttttagtagaggcggggtttcaccatgctggtcaggatgttctccaactcctgacttcatgatccacccacctcggcctcccaaagtgctgagattacagacgtgagccactgcgtcctgcctaaaatgaattttctagatgattgaataacagtagtcctttgatagaagataatgacttggtttatggccttaatatactacttaattacttaagatgtttattaatagaatgataaatgtacagagtaacctataagcatgacatacttttgctttcagtagtttcatgtaaagaaaaaaacttgaaaatagtaatacctgagtacccatgggaataatagacactggggaggtagggtggggagcgggagcaagagctgaaaaacttacctactggggactgtgctcactacctgggtgacaggatcatacgtaccccaaacctcaacatcacacagtatactcagctaacaaacctgcccatgtgtttcctgaatctaaaataaaaatcgaaataatttttttaaaaaagaaaaagacaatagtattacccatgggacaaaatttgtactattagcaagaatcattttgtgtctcatttagaaacaatttgacttttgttccagtgtttaaactttgacaaaaatggttttgaatagatctttataacctgatgccataaatacaagattctctgataccttcatttaatatatcaatattgggcctaaaacagtattctgtaaagcttaaattggtattaactatgatcatcttgatgtctatgatagataataaacaaggtcatacataccttactaaacaattttggtttttcaccaacattttattctttaaaagatttagactaacagaattatttagcatttcgagtcatgtgctttatttagcaagtgagtaaaaatattggaatattgaagtatttgcataaaaaatcaaatggtggtgttttgtaatctctattgtatttcctattaaggtttcatatattactttcccattgttcctgaatttgttatcctatatataaacagaaacatggatgagtaccatatac

SEQ ID NO: 778 - DNA, 4009 bp, Homo sapiens
ggccggcggccacgtgacccaccgcggcggggccggcggcccagaaatagcagcggcggcggttccgcccgcgggcggcgcgagcgaggggcagaggcgagagacgccggcggggcgcgggcgcggcggccccggaggatgctgctgagccccggcactgcctggctgcgagcacatgatggcgatacgggagctcaaagtgtgccttctcggggacactggggttgggaaatcaagcatcgtgtgtcgatttgtccaggatcactttgaccacaacatcagccctactattggggcatcttttatgaccaaaactgtgccttgtggaaatgaacttcacaagttcctcatctgggacactgctggtcaggaacggtttcattcattggctcccatgtactatcgaggctcagctgcagctgttatcgtgtatgatattaccaagcaggattcattttataccttgaagaaatgggtcaaggagctgaaagaacatggtccagaaaacattgtaatggccatcgctggaaacaagtgcgacctctcagatattagggaggttcccctgaaggatgctaaggaatacgctgaatccataggtgccatcgtggttgagacaagtgcaaaaaatgctattaatatcgaagagctctttcaaggaatcagccgccagatcccacccttggacccccatgaaaatggaaacaatggaacaatcaaagttgagaagccaaccatgcaagccagccgccggtgctgttgacccaagggccgtggtccacggtacttgaagaagccagagcccacatcctgtgcactgctgaaggaccctacgctcggtggcctggcacctcactttgagaagagtgagcacactggctttgcatcctggaagacctgcagggggcggggcaggaaatgtacctgaaaaggattttagaaaaccctgggaaaacccaccacaccaccacaaaatggcctttagtgtatgaaatgcacatggaggggatgtagttgcatttttgctaaaaaaaaaaaaaaacctttaaaaattgttggatgtgtacaaaagtcttactgccttattatgtgtatgggattctaaagtggcattccacttggatttcctgtgctacctatccaaattccagtaactacttcagtgtcattgcctttgttacctaaccaaccttcactgaaaggcaaatttagttcaggaggttagtttttagctagctttggaagtaagcctttatttattactttttggaggaaatcagagaagtgtcaatggaccgtcactcagactgagacttgagttattacagaagccaggaaaagtgtattagaaactgttgtctacaccacttttaattggtgaacaatttttctaagttatggtcatatatacccaaacaaaccaaatcaaactaaattactgcatataattttgggattgggtggcctagtttgaaagagtgatttaagtaatcactatgtaagtggtgagagatgcaggacatacacattattcaagagaccacctgacatgcatctcctccgcaggaatacattcgtcctctcttagagaagtttaacgcacatagtattattttactaagagaatatctcttggtgtcatatctaggggaagagaattaactagaattaaatttaatgtttgaatctaaatcattgggcaaacttctaataataacaattaataataggttacaggaaagccagccagaggaagtgtcagcactttaaaattctagaccccaaaaaactacaaaatcagaaaaagtatttttatgtttctagcttgaggagaagggctttagggctaaccagaggtctgaccctagaatgccaaggaactgagaatgggctccgatgaaaaccttccttttcagattccctgtctgctcaattaaagatgtttgaatccaaaggaagtcaaggaagaaaaagcatggaaaggaagagaactgattcctactgaaaattcaaattctattaccattctaactttcataaaaagttgggatcaagaagcagctgatttcctgccagggcttatattagggggtgattcttaaaggacattaggattggtgctcagaaatggttaatcatgctgtgtgctagccagggccagctggtaccttctttgccatgagcattcaagggacggctaacctttattgacaatctatatcgcaaaagtcaggaaagaggttgtgagctgattggattaaagacctggcacttcagtaactcagcacgcttccacttcactcaacttaagagagttcattgacagtgttaggatgtgaaggctgggaaacacttattttgcttcaagagttccacttggctctcccaaataggtacctcaaaaactgttagcaagcggcatttggatgtcttgacaggggctttgcagggatttttagggttttttccacattgtccacattaatggttggcatgattgtgcttgcaggccaagaaatgatcataccccttgccaaaggtaaaaaaaaaaaaaaaaaaatgagttgaaaattgaagtgacctctttccagctgagttgcaggcttattttgtaacctttcctcatccagttttccctgagaacctgggtttatctctagatagctgttcaggttttttagctgaggggtaagtatcctagctgagagttttgcatctttgggctgggtttgcagtggttgtgttttgcataaaatgtctagtctttgccacagatagtgagctacccactaatgagcccatggttttatttcagaagcacatgagggtgtgaaaccactctgttacctttctgtattgtcttagctattcaagccagtcagaggataatatatatattctcatcagcactcagagtagtcagtgaagagagtagatcacacttgggcacaccaggattcacataaacattgtatcttctctgtggatgctcaggccttgtctacaatgaggctttacaaccttcctttgttttggctcgggattacttcctggctgtctaataattgaaccataaccatgtaatattatgtaaaggcctggaaattactgttgctaaaaaaagtcatgtagtttcatgtagtgtagcatccttggcatcgttttccaaaatttgttccttctcccttttttttttctttcgtgtgtggcatgagtgtgtatctgtgtaaatatgattgtatatgtgttactccgatatgtaatccatttcactggctgagtttggcccctagccatgtgttaatataaagtaggcatggcttcccaatggaaatctctgagaatgacagtggagttgtgcaagcattttacattgccacataattgacttgccattttatggttaaaaacggcacattaggcagttgaatatgacgttaccttgcagactaaaaggttgaaggcccgaaactaacttttagctaacaataagggctgtgccccaatggaaactgagttcattttctgagaaaggtttggatgactgaaatatttcctctacagtcaaggactttggcatgtggtggctgaaactgagcttttttgtgtgggctccagttctcactgttctgcaatgctcatggcaagttgaatggtgagctagcttataaattaaagagctctgaactgtattcagaccgactgggtatctagcttactgttttaacatcattgttgaaaccagaccctgtagtccagtggtgctgccctgttgtgcaaactgctcctttttctcgtgtttttgtaaagagcttccatctgggctggacccagttcttgcacatacaagacaccgctgcagtcagctaggacctttccgccatgtattctattctgtagtaaagcatttccatcaacaatgcctaattgtatctgttatttttggtttaacacacactgattcatactaataaatattttcagttttaccgttaaaaaaaaaaaaaaa

SEQ ID NO: 779 - DNA, 94 bp, Homo sapiens
tggaccaatgatgacttccatacatgcattccttggaaagctgaacaaaatgagtgggaactctgtactatcatcttagttgaactgaggtcca

SEQ ID NO: 780 - DNA, 6824 bp, Homo sapiens
aaggaaaccagcccaatagtggacctaacaccccaataatgggaactggcgactcgaaacacacggtttcagtatccccaggcgccttaacaataagcagcgggttacagaggaaatcgagtctctccgtggcgcttccaggctgaggacccagcgcctaccggccgagcaccccctagggcagaggggcgagggagacccgcgggaaggggcagcaagccgcctgattgacagcccgaaatctgatcttgtgaaagagacgcggagccaatgggaggcagcgatccatcagtttggattggaggcccctggaggagaagtagaggaaaaaccaccgaattgagctctgtcagaggcgctttcggcttccaagggggaagtgctgggctataattaatgtttttattaaatttggagggaagtttttgcagcctttcgcctagcgtggccttcagtcccgttaggtgcaaagcaagtctcgttgatcgccattgctagttttgcacacgtttgcgaatcagagctgcccggggtacaccgaccgcgcagggaaacatcgagagtgtaaataaatacatcgcctcttgttcggatttttgctactaccgaaaatatgtaaattgtgaactctgttggctctctttggatccaggttgatagaagtccagatcctgaggaaatctccagctaaatgctcaaaatataaaatactgagctgagatttgcgaagagcagcagcatggatggattttatgaccagcaagtgccttacatggtcaccaatagtcagcgtgggagaaattgtaacgagaaaccaacaaatgtcaggaaaagaaaattcattaacagagatctggctcatgattcagaagaactctttcaagatctaagtcaattacaggaaacatggcttgcagaagctcaggtacctgacaatgatgagcagtttgtaccagactatcaggctgaaagtttggcttttcatggcctgccactgaaaatcaagaaagaaccccacagtccatgttcagaaatcagctctgcctgcagtcaagaacagccctttaaattcagctatggagaaaagtgcctgtacaatgtcagtgcctatgatcagaagccacaagtgggaatgaggccctccaacccccccacaccatccagcacgccagtgtccccactgcatcatgcatctccaaactcaactcatacaccgaaacctgaccgggccttcccagctcacctccctccatcgcagtccataccagatagcagctaccccatggaccacagatttcgccgccagctttctgaaccctgtaactcctttcctcctttgccgacgatgccaagggaaggacgtcctatgtaccaacgccagatgtctgagccaaacatccccttcccaccacaaggctttaagcaggagtaccacgacccagtgtatgaacacaacaccatggttggcagtgcggccagccaaagctttccccctcctctgatgattaaacaggaacccagagattttgcatatgactcagaagtgcctagctgccactccatttatatgaggcaagaaggcttcctggctcatcccagcagaacagaaggctgtatgtttgaaaagggccccaggcagttttatgatgacacctgtgttgtcccagaaaaattcgatggagacatcaaacaagagccaggaatgtatcgggaaggacccacataccaacggcgaggatcacttcagctctggcagtttttggtagctcttctggatgacccttcaaattctcattttattgcctggactggtcgaggcatggaatttaaactgattgagcctgaagaggtggcccgacgttggggcattcagaaaaacaggccagctatgaactatgataaacttagccgttcactccgctattactatgagaaaggaattatgcaaaaggtggctggagagagatatgtctacaagtttgtgtgtgatccagaagcccttttctccatggcctttccagataatcagcgtccactgctgaagacagacatggaacgtcacatcaacgaggaggacacagtgcctctttctcactttgatgagagcatggcctacatgccggaagggggctgctgcaacccccacccctacaacgaaggctacgtgtattaacacaagtgacagtcaagcagggcgtttttgcgcttttccttttttctgcaagatacagagaattgctgaatctttgttttatttctgttgtttgtattttatttttaaataataatacacaaaaaggggcttttcctgttgcattattctatggtctgccatggactgtgcactttatttgagggtgggtgggagtaatctaaacatttattctgtgtaacaggaagctaatgggtgaatgggcagagggatttggggattactttttacttaggcttgggatggggtcctacaagttttgagtatgatgaaactatatcatgtctgtttgatttcataacaacataagataatgtttattttatcggggtatctatggtacagttaatttcacgttgtgtaaatatccacttggagactatttgccttgggcattttcccctgtcatttatgagtctctgcaggtgtacaaaaaaaccccaatctactgtaaatggcagtttaattgttagaaatgactgtttttgcaccacttgtaaaaaggtatttagcgattgcatttgctgtttgttgttttattttgctttatatatgacttgcagaggataaccataaaatgggtaattctctctgaagttgaataatcaccatgactgtaaatgaggggcacaattttggactctggcgccaaactgagtcataggccagtagcattacgtgtatctggtgccaccttgctgtttagatacaaatcataccgtcttttaaatattttgaagcccatttcagttaaataatgacatgtcatggtcctttggaatcttcatttaaatgttaaatctggaatcaaaatgaagcaaaaaatatctgtctccttttcactttcttcagtacataaatacattatttaatcaataagaattaactgtactaaatcatgtattatgctgttctagttacagcaaacactctttaagaaaaatatccaatacactaaataggtactatagtaatttttagacatggtacccattgatatgcatttaaaccttttactgctgtgttatgttgataacatatataaatattagataatgctaatgcttctgctgctgtcttttctgtaatattctctttcatgctgaatttactatgaccatttataagcagtgcagttaactacagatagcatttcaggacaaaatagatgactcaaaccatttattgcttaaaaaatagcttacgccatgctatgctataagcagcttttatgcacattgacaaatgaagagtaagcttcagcttgctaaaggaaactgtggaaccttttgtaacttttggtgatatggaaaattatttacaaaccgtcaaagaatatgaggaagttgctgtatgacatagtgctggcactgatattatccatcatctctttttggacacttctgtaaatgtgattggattgtttgaaagaagatttaaagtttcaaagttttttgttctgtttttgctttgcatttggagaaaatattgaaagcagggtatgttgtttcattcaccttgaaaaaaccatgagtaaatggggatatagaatctctgaatagctcgctaaaagattcaagcaagggacatgaattttgttccatctatcaataatatccagaagaacaacttttttaaagagtctatagcaaaaagcaaaaaaaaaaaaaaattctaaacacaaagtcaaaataaacctattgtaaaagcatttcgtgatgagcatgaaaaagattgtttaaagatgatccccccagctacccattttccaaaactacacagatcacagctcatttctctaagtggagcagttatcaagaaacccaaacaccaaaattgctactcttcacatttaatcctacaaaaagtactccaatttcaaaatatgtatgtaacctgcgatttcaatgattgttgttcatatacatcatgtattattttggcccattttgggcctaaaaaagaaaactatgccttaaaaatcagaaccttttctccccactatgcttatgtggccatctacagcacttagaataaaaacagatgttaaaatattcagtgaaagttttattggaaaaaggaattgagatatataattgagatttggtgaaattgaaggagaaaatttaagtgagtctttaaaatatattctgaatgaaaactgtattgaggattcatttttgttccttttttttctttttctcttttctcctttttcttctttttaatagtctagttttagtcagtcagtgaggaagaattgggccatgctaacgttatcacaagagaacaatggcagaaatggtattagttatataatatttaaggacaaactatatgttttgctgttttaacgtagtgactcactgaactaaatacataattgaccaacattaagtgtatttccaatacagaagggttgaaaatattacattataaactcttttgaaaaatgtatctaaaattttttaagttctgttttgattccactttttggttgagtttttatgtttttgttttcaggtagattaataaatctggcagctgatttctgcaagattcttgtgttttgaatttctcattgaattggctactcaaacatagaaatcatttgttaatgatgtaatgtcttctctcagcttttatcttcactgctgtttgctgtctcttgatgatgacatgttaatacccaatagattaattgcaacaaacacttatactcaaataactaagtaaaaataatttttcttgttatgtccatgaaaagtgcttcagaataaaaatccacaagactgacagtgcagaacatttttctcaaatcatgggcggatcttggaggtctagtttcccgtagatgctgtaaccaattaccacaacttcagtaatttacacaaatttatcttatagttctggaggcagaagttcaaaagaagccttaagagactaaaaccaagatgtccttaggtctggttccttctggaggctccaggggagattcttccagctttcacttctagagtctgctgacattccttggctcctggctacatcacttcaatctctgcttccatggtcacatactcttctactatagtcaaatttccttcctgcctcttataaggatgcttgtgattacatttaggggatgctcagataatccaggacaatctctccatctcaagatccttaacttaatgacgtgtgccaagtccctttggctagataattattcataggtcccagggattaggacatggatgtaaggggtgagggcagggctgttattcagaacaccgcacggaggaggaagactgtgtagcaaagactctaattgatttactcaggaacagtggagttctgctgagggatctaggatttgaaagtactagagtttgcttttatttaccactgagatattttccccttattctgcataaataattttgaaaactttctatattaaatttcaactattccactaaaatgtctggtaatcacatcaagcctttagattattcaaatccttccccagcccccaggaaaacactaagtcatgaaacagaaaaacagaaggtatgataataatagtaataacagttaaatcagtggtctaatccagattttattttttaatacatttcttttggtgttaatatgggttactatgtgatcttatcatttgctagtgattattacttattaggtaagaacaatgtgtaaaatatgtctattactcaaaagaacaattgcaaaatgagtcaacttatctttatataaccaggaaagaaatatattgccagaagctacagaattttgccagatgatagggatttctaaaatgagccactttgtctatcatgcagccttttcagagcttgtaatgagaaaacattacagaggagaaggtcatttggatgtttgttacttggaatcctagaaaacaaaaactaaaatttaaaaataagaagtgagtaagctattttccatttgcgatttggtatggagaagagaggaaatagaattattaaaaaaatacaaattgggtaaaagtgatggtggaaaaaatataaagaaggcaaatgtacatattaagcaattctactaagaattggaaaaatcaagtttcaaaaagatggtaatagttgggcatgatactagaaaatttcacccagtttattcagagctcaactagtacttttaggacttctttttttatatacatgagactcactttgacatacttaaaaaaaaaacagtttatggaaagtacagtttaagaggagaatttgattagactaagtggatatctttatagaaatattaatgatttcagaattttcagttacaagtgtatataccgtggctattgtttatggattcatatgtaaggtagggtcttttttgcatatagactccagtattagttactttcattctaaaattatatttatgcttctatggggaagaaaatttttaattcacttggttgtattaaaattatacttacggtttgagaaaacatgctatgaaaatcatgattatagcaaattaaatatgctcaaaatttaaatctaaaataaaagcccagaaactgaaaaaaaaaaaaaaaaaa

SEQ ID NO: 781 - DNA, 399 bp, Homo sapiens; identical to SEQ ID NO: 491

SEQ ID NO: 782 - DNA, 1509 bp, Homo sapiens
ccaccgcagcggacagcgccaagtgaagcctcgcttcccctccgcggcgaccagggcccgagccgagagtagcagttgtagctacccgcccagaaactagacacaatgtgcgacgaagacgagaccaccgccctcgtgtgcgacaatggctccggcctggtgaaagccggcttcgccggggatgacgcccctagggccgtgttcccgtccatcgtgggccgcccccgacaccagggcgtcatggtcggtatgggtcagaaagattcctacgtgggcgacgaggctcagagcaagagaggtatcctgaccctgaagtaccctatcgagcacggcatcatcaccaactgggatgacatggagaagatctggcaccacaccttctacaacgagcttcgcgtggctcccgaggagcaccccaccctgctcaccgaggcccccctcaatcccaaggccaaccgcgagaagatgacccagatcatgtttgagaccttcaacgtgcccgccatgtacgtggccatccaggccgtgctgtccctctacgcctccggcaggaccaccggcatcgtgctggactccggcgacggcgtcacccacaacgtgcccatttatgagggctacgcgctgccgcacgccatcatgcgcctggacctggcgggccgcgatctcaccgactacctgatgaagatcctcactgagcgtggctactccttcgtgaccacagctgagcgcgagatcgtgcgcgacatcaaggagaagctgtgctacgtggccctggacttcgagaacgagatggcgacggccgcctcctcctcctccctggaaaagagctacgagctgccagacgggcaggtcatcaccatcggcaacgagcgcttccgctgcccggagacgctcttccagccctccttcatcggtatggagtcggcgggcattcacgagaccacctacaacagcatcatgaagtgtgacatcgacatcaggaaggacctgtatgccaacaacgtcatgtcggggggcaccacgatgtaccctgggatcgctgaccgcatgcagaaagagatcaccgcgctggcacccagcaccatgaagatcaagatcatcgccccgccggagcgcaaatactcggtgtggatcggcggctccatcctggcctcgctgtccaccttccagcagatgtggatcaccaagcaggagtacgacgaggccggcccttccatcgtccaccgcaaatgcttctagacacactccacctccagcacgcgacttctcaggacgacgaatcttctcaatgggggggcggctgagctccagccaccccgcagtcactttctttgtaacaacttccgttgctgccatcgtaaactgacacagtgtttataacgtgtacatacattaacttattacctcattttgttatttttcgaaacaaagccctgtggaagaaaatggaaaacttgaagaagcattaaagtcattctgttaagctgcgtaaaaaaaaaaaaaaaaaaa

SEQ ID NO: 783 - DNA, 1255 bp, Homo sapiens
tggatcgatgatgacttccatatatacattccttggaaagctgaacaaaatgagtgaaaactctatactgtcatcctcgtcgaactgaggtccagcacattactccaacaggggctagacagagaaggccaacatccgtttgttgacatgggttatatcaaggcgtctgttcaggcttagaatgtggtctcttatgggtgatgggggtcacaggagagtggtggctcccacgtataggaaatttcttgtttgaaggactgtcagtgagggtgggtaacacatgcattgtctgcaggactaggtgaatgtccatgtggcctagcaagagttagctggtagcccgcctctggttgccaatttgttcttgagtccttgttctgggttctcaggtcccacggaggaaaacagatctgtgtggttgagaggtgggtacaaggccgcatctttgtcatttgttggctaactttgtccttggttgaggacattagagttttggtcaccaggcatagcctatgtgcctttgtgcccgtgttgtatcccacgtgttttgaggacatgtattttgcacgtaaaggtgagctcctgctccaagctggttctgataccaaaggagtccctggcttatcctaaactcatggtaggttaaagccttcctccttaggggttcagggccgcaaggcttttgtgagtggcattgcaggcgttgaagcagtgatgttgagagggatggtcaatgtcagtgctctttagcaggatggtgtactgcaggggcccccagccccgagacgagcatccctgcatccatgcatttctgcctccatgaacaggggaggccagagacaggcagatagtagataaattgcaggggactggatgacatggccctcgtgacctgtgcacctgtctgtctttctgaagcacgcctgtgttaactctgcacctcccaggtagcactggcatggagggcaggcacatgttggtgagggacaattgttaccttgtgtgagctgcggagataccaggaagcccctggacacaaatggcaaaggctccttcggaagttgttggatcccttctgaatgtaagcacttctttcccagagcactctgagtttcctcatttgcagggacaaatactgtgcgtggatcgatgatgacttccacatatacattccttggaaagctgaacaaaatgagtgaaaactctataccgtcatcctcgtcgaactgaggtccaaaaaaaaaaaaaaaaaaaa

SEQ ID NO: 784 - DNA, 8285 bp, Homo sapiens
gggctgtaaccttgaactttcccagcgcggtgacacattctccccgctctccctcccgcccgcccgctcgccctcctgcgccctcccgcgcccccctccccgccttttttgaaaaagcattttaccaccaaccaccaccccaatccaacccacaccgaaccttcgcgcaccccctacaccccaacaacaacaacaactgcaaaatagaaaacaaatccccaaacccaggcgaaaagcagccaacaccggcggcggcggcggcctcggcaagcacggccagcgcgctcggactgcaagagggttaaaagtgtagattggatttcacccctggaaatctagcacgccgagtgaacttgaatctttggctatttaaggaggactgggtttgttgtgaagttgcggtgatccagcgcagagccccgtcctgattgatcgcatcgcggggctcagatgactgtaaaatgaatagatgaaattcttgcttctcgaagattttcttgggcatctcccggaaagtgcgttttaaggcgaagtcatgatgtattctcccatctgtctcactcaggatgaatttcacccattcatcgaggcacttcttccacatgtccgtgcaattgcctatacttggttcaacctgcaggctcgaaaacgcaagtactttaaaaagcatgagaagcgaatgtcaaaggatgaagaaagagcagtcaaagatgagcttctcagtgaaaagcctgaaatcaaacagaagtgggcatccaggctccttgccaaactgcgcaaagatattcgccaggagtatcgagaggactttgtgctcaccgtgactggcaagaagcacccgtgctgtgtcttatccaatcccgaccagaagggtaagattaggagaatcgactgcctgcgacaggcagacaaagtctggcgtctggatctagtcatggtgatcctgttcaaaggcatccccttggaaagtaccgatggagagcggctcatgaaatccccacattgcacaaacccagcactttgtgtccagccacatcatatcacagtatcagttaaggagcttgatttgtttttggcatactacgtgcaggagcaagattctggacaatcaggaagtccaagccacaatgatcctgccaagaatcctccaggttaccttgaggatagttttgtaaaatctggagtcttcaatgtatcagaacttgtaagagtatccagaacgcccataacccagggaactggagtcaacttcccaattggagaaatcccaagccaaccatactatcatgacatgaactcgggggtcaatcttcagaggtctctgtcttctccaccaagcagcaaaagacccaaaactatatccatagatgaaaatatggaaccaagtcctacaggagacttttacccctctccaagttcaccagctgctggaagtcgaacatggcacgaaagagatcaagatatgtcttctccgactactatgaagaagcctgaaaagccattgttcagctctgcatctccacaggattcttccccaagactgagcactttcccccagcaccaccatcccggaatacctggagttgcacacagtgtcatctcaactcgaactccacctccaccttcaccgttgccatttccaacacaagctatccttcctccagccccatcgagctacttttctcatccaacaatcagatatcctccccacctgaatcctcaggatactctgaagaactatgtaccttcttatgacccatccagtccacaaaccagccagtcctggtacctgggctagcttggttcctttccaagtgtcaaataggacacccatcttaccggccaatgtccaaaattacggtttgaacataattggagaacctttccttcaagcagaaacaagcaactgagggaaaaagaaacacaacaatagtttaagaaattttttttttaaataaaaaaaaaggaaaagaggaagactggacaaaacaacacaaaggcagaaaggaaagaaactgaagaaagaagataatagaccagcaattgcagcacttacaatcactaattcccttaaggttgaaactgtaatgacataaaaagggtcgatgatatttcactgatggtagatcgcagcccctgcaacgtagcctttgttacatgaagtccgctgggaaatagatgttctgtctctatgacaatatattttaactgactttctagatgccttaatatttgcatgataagctagttttattggtttagtattcttgttgtttacgcatggaatcactattcctggttatctcaccaacgaaggctaggaggcggcgtcagaggtgctgggtgacagagccatgagccagccattttataagcactctgatttctaaaagttaaaaaaaatatatgaaatctctgtagcctttagttatcagtacagatttattaaatttcggcccttaacccagccttttccagtgtgtaacccagtttgaaatcttaaaaaaagaaaaaatgaaaaaaaaaggaaaaaaagaaaaaaggaaaaaaacagtttgaacacaaaggctctatggaagaaatgcctctatgtaggtgaagtgttctctctgcatgcaacagtaaaaattaatataatattttccccacaaaagaaacacttaacagaggcaagtgcaatttataaatttatatctaaaggggaatcatgattataagtccttcagcccttggactctaaattgaggggattaaaaagaatttaaaataattttgaacgaatttattttcccctcagtttttgagggcattaaaaaggcattaaatcaagacaaatcatgtgcttgagaaaaataaaattaatgaaaacacagcacttatgttggtttagctgcagcctccttggaggtagaatttatttatttaaaattactggttgcatcaagaacccatagggtgtacaaaaggttctataaaatctgcattatagagacaaagaggcaggcaaatccatgtcacaagggtaaagcttacagtttacaaactgggaacgccagggtgtaggatataaaaacgcactcttgagaaaacaaatgtaatcagggtgctgaaaacttgcatggtgctttcagacattagccttgttcaacaaatttcttgtattgacagatccatagtgtgcatgggcagacacattttgcctctatgtctcttaaaattttaattaaaaatactctttccagtaatcctaatttgcacgaagatataatgtccacattacgtgccttgccttgaaatctaaaaaacaaaaaacaaaaaaaaaaaaacaaaaaaatacaacaaagtgacatcactacacttgttttgctgcatttattatcattttaaatctttaccatttttatgacaaaatattttgtactccagacgaagaaaaatgtgtgacatcatggattttttagacagttatacctttatctcacatttataaagcatatcatggctgtgtatagttgccgcttaaaaattgtaatcgaccagcaatattttcagtattttggtgtttttttctattaacctttcatgtttttcatcttccaattaatatttgggggggaggggtttcaaatttatacgaattatgcaataccaagttttgcctatgtaggtagtgcttttagctgtattggttattataggtaagtacacagatttaaaaaaaaaataatgtatgcttttttgtttgtttgtttgttttaattgaccaaagtgggtactgctatttttgcagtgtgatgaggtccttttgtgtactgagagatggacaggggattttttttaatatacatatatatatattctggggtgggtgggaggatttttaacactttgcagtgtagctgtgaagcagtgcaccctgagatgggcctgggctgcaaagcgactgttctgcctactgtgacaaacttcaacttacacaggttcccctctctaacttcccacctgggttgcaagctgaactcattactggttttcataacaacacaatagtaagaacaagcaaacacaacaaattctcctggaggcagacttggcttaaaaaggcagacttggcttggtgatagtttttcttgaaagttccagatccacagtggagagtgagcctgtctcatatttggcaaaaatatttgttgaaatgtccacataggggatgttggatgtttaacacttttgagagtttaacacatgaatattctttctcctagaaaacacattagacctgttggagggagtctcccgtattccttttctgccacttttcgtccccatttcatttcattaatgataggatatgatttacctgtgacttactacttcaaatggatggcagtgcacttggatttttttttaatatccagaagattgaacagagggttgctattgttgaatgtatttggactgatagattaaaatcaaagttcaatttttaaggaacaaaaaagtaaatcctgttttcattttatctccccttttaaaactgagaaccagagcagaagggaaatatagaattttaagcaattaatcttcctgtggatgaattaaacccattagatgctgatgggatttttttaaggaatggtaccttaactatatatttgatttcgtttcccctgagggctagaggctgaatggaggctggttttattttgcctttccctcaccgcccagtcccattgagtgtattcattactagaaggaaaatctttcagaattggtgacacatggtaggctgtcttaaggagtcccctggcccccttcccctaggccatggcctaataaaataaactgtcaattgttctcacagcatatcatttaataatgaatactttagaacaatgcttatgggctggagaattgtatttgattagcccattcagtttgatagcccaaatgctgaacagcacagcgggatcctagcagtgcaagttcaaaagtaagtccaatcatttctgtgatactcgccctggtagcaaacagatcatctcagccaagctcttcatgtatctttgacctattaggtgaacaaatgaacctcacaggacacacagtattttttaaaggcagactcgctctcttttttgccagtgagcagttctagctaaccaagttacacactgtgggtattcctgcctgcctcttgaatacaaaggcctagttcaagtgttgctttttttatttcaaatcaattttttcttctttcctttttgagataaaactattaaaagtactactatatatataaaatctcaaatcaacttttcggcctcctcctcgtgtaccaggaagtatattctgacgaagggccccacttttgcaggtcttgcacgcccctcccttacccagaactgcagagcttcaggatggcgaaggtcacccaagggcatgagtagggagtggtgtctccaaccatcagttccgtggcactgttcagcctttgtgtgctgccctgccacccaccactcacagtgcctctgaagcgtgttacccctggagtgacgtgagcatttgaggcttgtctaaggaaaaaaataaaaggcagtgaaggagactgtacataaagacatggcaaaaatcttaattatagcaatatagttatcgggtaatgttcgggtgggcagctccattaaaaaatatgtgaatgaatctgtgaagctgcaagtagcgagaagagcgaaaggtcttcttaatgaaccgcctaccttgtagacagtaatttgtacactgtatagttttgttaagaattttttttaaattaaaattcccatgtttgtaaagctaactttttaacaattataatggaactatatgttgtttccatttttaaagtaaacaagaatattccttgtttagagactggacttgagttaaaactctccagtctcttaagttatgtattaaaaagaaaatctgtccatgttaggagttatttcacagattcctgtgcttgaaaagcataggatactaatcctttaaaaaagtgtaaatggagaaaagttatattttatgaaggttattttgttgtatttagtattggaaaagttggtttccagagcatttcagaatgtcgaagcaccactgtctttttattagtatatacggcctttagcaaaagtttttgtgattgttacgtgatggtatttaaggttaagtttcacagagcattcaggataggcagaaaactaaaacagtgctatgtctcacataacgtgtcctcagggagcagaatcttggatttgtgacttgtagcttcataaggactcaacgaaagagattgcacagggacatcttcagcggtgtgacagcaggacatgttctttacctagattcaaattctatgtactgtgtgaaatgatgaaggctgcagaaagttatcccatattcagtgtacagtattcatttttaatgaaacaactctacaatattgctggcagataggccccaagcatgacattcaatatagtttacatgttcctgtcaaggtcttttgttaacattaaccagctgcatgctttctggactttaagaaattgggtttctatagaaaactttttttttttttttttttttaatgtgcaggctattcaagttcaatagtaaaagctcaaaaatgaatgttctactccatgctgaaggagctgaaagctgccttcttcatattttgcactttctggtagttcccctgttttttctaattccctaaaattgtgtgggtggagtggagccctgcagttggggggtaacatggaccactgattttgccctttgaccctgcacaatgacctttgcatcagccaaactcattgccatgacaactctttgtactgtgtccgtgccacagatctgttggtcacattgttaatagtaaaggggacaagttggagacggtcaatttttacattttttgttgcaattttttcttcaatggttgtaagtagtttttttttttttttaataataaaagggttcactagttaatactctagaaatatctgtgtgttgcaattcaaatgtatgttgagattgtgaaaagcgcttcagtgccactagcttaccggtacactagactaagcccttgatgacttattgcatgatacagtaccaggaacaacaggtggcctaaatacatgaaaagcagtgtaagctagtgacactaaagccagtcttgtattactgtatttttgacagaatggttttgaaaactgtgctacagggactgatgtggcaaatatatctctttatgcagaaggaagtctttttttttcttttttttttttttaagaagtatggctttttatgcatccttcatcgagggcattgaagttgcatggactgataaaagttgatgcaaaacaagaaagaaacaaacaaaaaaaaaaaaccagcaaaatgtttaccaaaaaactcaaacaaatgagcagtgcctgttcaatttcacagtctctgttgagttcagttgtaaatatgtttcaaatgacattttcttgggaaaaaaaatctctacaacattgtagaatgtgaggggtaactacatcccaggcataggtttctcaaagctgcagtagattatgtcttcatcaagctgttaatttgtgcttatatcatatagaacttttagcatcctgggaagagctgcccccacctcaatgatatttctctgagaacaacttttgtaggactgtgtgtttctttagatacatttagtacaactgtaggtgacgagtagtcagttattgcttgctagctacacaccagggttgatccattttaaaacttttggcattttgtcctcatgggccataaatacagaaccttgtattttaattaaatttttttacaaaaggaggcacatgcacaatctccatgtaacaaacctttagcagtaggatgtattatacgacagttacttaatttctagagttcaggcctctgggatcaaccccagactgggccagaatgttagtgaaggttttattgtgcccggttggaggataacgttctttgggtactttttgtgggttgcaaatgaactcaattgccacaagttttaaactggtgtaaatcaagcttgacttaatgtgattgttactgttatatccagcctatactgctagcagctgctcatactgcagtcaattactggaagcggatatatttcctatgcaaaaactgtttaaacaataaaatgagctatgctacagactctgaaaaaaaaaaaaaaaaaaaaa

SEQ ID NO: 785 - DNA, 9243 bp, Homo sapiens
atttcatttcttccactaaagcgtttgcggagacttcaaggtataatctatcccagatcctttcccagagagaaacttggcgatcacgttttcacatgatgctcacgctcagggcgcttcaattatccctccccacaaagataggtggcgcgtgtttcagggtctctcgtctctctcctacagaaaagaaaaagaaaaaaatgtcattagaagaggcgtaacacgtcagtccgtccccaggtttgtgtttcctggagtggccgaaagagatcagttctaacctgctctgcaggaataacggtcctgcctcccgacactcttggcgaggtttttgtacagtttgctccgggagctgtttcttcgcttccacctttttctcccccacacttcgcggcttcttcatgctttttcttctcaccatttctggccaaaactacaaacaagacttcgcagatcgagcctgcgtgctgccgaagcagggcgccgagtccatgcgaactgccatctgatccgctcttatcaatgaagcagccgatcatggcggatggcccccggtgcaagaggcgcaaacaagccaatcccaggaggaaaaacgtggtgaactatgacaatgtagtggacacaggttctgaaacagatgaggaagacaagcttcatattgctgaggatgacggtattgccaaccctctggaccaggagacgagtccagctagtgtgcccaaccatgagtcctccccacacgtgagccaagctctgttgccaagagaggaagaggaagatgaaataagggagggtggagtggaacacccctggcacaacaacgagattctacaagcctctgtagatggtccagaagaaatgaaggaagactatgacactatggggccagaagccacgatccagaccgcaattaacaatggtacagtgaagaatgcaaattgcacatcagattttgaggaatactttgccaaaagaaaactggaggaacgcgatggtcatgcagtcagcatcgaggagtaccttcagcgcagtgacacagccattatttacccagaagcccctgaggagctgtctcgccttggcacgccagaggccaatgggcaagaagaaaatgacctgccacctggaactccagatgcttttgcccaactgctgacctgcccctactgcgaccggggctacaagcgcttgacatcactgaaggagcacatcaagtaccgccacgagaagaatgaagagaacttttcctgccctctctgtagctacacgtttgcctaccgcacccagctcgagcggcatatggtgacacacaagccagggacagatcagcaccaaatgctaacccaaggagcaggtaatcgcaagttcaaatgcacagagtgtggcaaggccttcaaatataaacaccatctgaaagaacacctgcgaattcacagtggtgaaaaaccttacgagtgcccaaactgcaagaaacgtttctcccattctggttcctacagttcgcacatcagcagcaagaaatgtattggtttaatctctgtaaatggccgaatgagaaacaatatcaagacgggttcttcccctaattctgtttcttcttctcctactaattcagccattacccagttaagaaacaagttggagaatggaaaaccacttagtatgtctgaacagacaggcttacttaaaattaaaacagaaccactagacttcaatgactataaagttcttatggctacacacgggtttagtggcactagtccctttatgaatggtgggcttggagccaccagccctttaggagttcatccatctgctcagagtccaatgcagcacttaggtgtagggatggaagcccctttacttgggtttcccaccatgaatagtaatttaagtgaggtacaaaaggttctacagattgtggacaatactgtttccaggcaaaaaatggactgcaaggctgaagaaatttcaaagttgaaaggttatcacatgaaggatccatgctctcaacctgaggaacaaggagttacttctcctaatattccgcctgtcggtcttccggtagtgagtcataatggtgccactaaaagtattattgactatacgttggaaaaagtcaatgaagccaaagcttgcctccagagcttgactactgactcaaggagacagatcagtaatataaagaaagagaagctacgtactttaatagatttggtcactgatgacaaaatgattgagaaccacaacatatccactccattttcatgccagttctgtaaagaaagttttcctggccccatccctttgcatcagcatgaacgttacctttgtaagatgaatgaagagatcaaggcggtcctgcagcctcatgaaaacatagtccccaacaaagccggagtttttgttgataataaagccctcctcttgtcatctgtactttctgagaaaggaatgacaagccccatcaacccatacaaggaccacatgtctgtactcaaagcatactatgctatgaacatggagcccaactccgatgaactgctgaaaatttccattgctgtgggccttcctcaggaatttgtgaaggaatggtttgaacaacgaaaagtctaccagtactcaaattccaggtccccatccctggaaagaagctccaagccgttagctcccaacagtaaccctcccacaaaagactctttattacccaggtctcctgtaaaacctatggactccataacatcaccatctatagcagaactccacaacagtgttacgaattgtgatcctcctctcaggctaacaaaaccttcccattttaccaatattaaaccagttgaaaaattggaccactccaggagtaatactccttctcccttaaatctttcctccacatcttctaaaaactcccacagtagttcatacactccaaacagcttctcttctgaggagctccaggctgagcctttagacttgtcattaccaaaacaaatgaaagaacccaaaagtattatagccacaaagaacaaaacaaaagctagtagcatcagtttagatcataacagtgtttcttcctcatctgaaaactcagatgagcctctgaacttgacttttatcaagaaggaattttcaaattcaaataatctggacaacaaaagcactaacccagtgttcagcatgaacccatttagtgccaaacctttatacacagctcttccacctcaaagcgcatttccccctgctactttcatgccaccagtccagaccagtattcctgggctacgaccatacccaggactggatcagatgagcttcctaccacatatggcctacacctacccaactggagcagctacttttgctgatatgcagcaaaggagaaagtaccagcggaaacaaggatttcagggagaattgcttgatggagcacaagactacatgtcaggcctagatgatatgacagactccgactcctgtctgtctcgcaaaaagatcaagaagacagagagtggcatgtatgcatgtgacttatgtgacaagacattccagaaaagcagttcccttctgcgacataaatacgaacacacaggaaaaagaccacatcagtgtcagatttgtaagaaagcgtttaaacacaagcaccaccttatcgagcactcaaggcttcactcgggcgagaagccctatcagtgtgataaatgtggcaagcgcttctcacactcgggctcgtactcgcagcacatgaatcacaggtattcctactgcaagcgggaggcggaggagcgggaagcggcggagcgcgaggcgcgcgagaaagggcacttggaacccaccgagctgctgatgaaccgggcttacttgcagagcattacccctcaggggtactctgactcggaggagagggagagtatgccgagggatggcgagagcgagaaggagcacgagaaagaaggcgaggatggctacgggaagctgggcagacaggatggcgacgaggagttcgaggaggaagaggaagaaagtgaaaataaaagtatggatacggatcccgaaacgatacgagatgaagaagagactggagatcactccatggacgatagttcggaggatgggaaaatggaaaccaaatcagaccacgaggaagacaatatggaagatggcatgtaataaactactgcattttaagcttcctatttttttttccagtagtattgttacctgcttgaaaacactgctgtgttaagctgttcatgcacgtgcctgacgcttccaggaagctgtagagagggacagaaggggcggttcagccaagacagatgtagacggagttggagctgggtattgttaaaaactgcattatgcaaaaattttgtacagtgttaaggcctaaaaactgtgtggttcagagactaattcctgtgtttaatagcatttatactttaagcacaactagaaaattgtaagaattgcactctacttatgtatcactacaaactttaaaaaactatgtctaatttatattaatacattttaaaaaggtgcccgcactaccatacatcagtatttttattattattattgttattcctttttaatttaatgtgctcgcactacaatgcatcagtattatgattcctctgtactttcctttcgctattcatcaatttcccattttttttttcagcttaagtaaccacacaattttaggcctcaatttttttttttttctgtgaaggaacttgaagtgatgcatgtgtgaatttaagataccgaagtcttaaagtgacctggacgtgaaggaaaaagtaagatgagaaataaagaaagcctttgtaaggtggttttaaaagccttatatgcaaaccttttaatctgtgtttctgcaagtgccatccttgtacagtgttaagagggtaacatgggttacctttgcaccagcttcagtgttaagctcaccctgttctttgaagcacccatgtcagtattagaagaataggcagcagttccttagtttacatatgtttgtgcaattattttctgtacttttttgttcattaattttgtcagtattacaccaaactgtttttgcaacaaaaaaattttttttgcattcatttaattttaggtcaaataacattttatttatgtggctcattttatatttcctaattttatttatttcatactgtagtgtacagtattatagttcttcaatatatagatatattttagtaaaaaaggaacatgacgttgatcatttgggcaaattttacgtaaagagaagagcatttattgtgttttggaacattaattgtgagatgggatttttcaattttattattttatttttgtttttttccaattactggaaattccaaatttgggaacttttgatacgatcttgtgaaaacactgtattttcgactgaaaattccactttcttcatcttgttttttagctaaaaagagggactgttaaatacaatgtatgataccatgacaaaaatctttcctgaattgtctttgtaaaagtattattgaattttcaatttgtaatttcttttgaaaatgaccatgctcgaataaaaatgtagccaaactaagaatgtagttaatgagttctgtacttttagagagttttccttcaatgaccattaacatgtaacatgctttatgcttataataatgctaattatgtttttttcatataattttagtttagcaataattttgactggtaccaataactgttttttaaaattccatacctatgtacagcaattttacagcttttctcaactgatcctgattccagattgtgtatttttatgtgaggttatattattcaaatttagtctatttactttacagacatttctacttttgcattacgagtatttagagattatgtgttaaaaattcacttctctgtccaaggggtctttgtgatttattcaaaaaaaagtctaatttcaaaaagacagctattattcagtgttatttataatatgtaaccttttttaaaggattgggatagtttatctcactttttgaaatgcagacagtagtttaccgtttatctgaaactagaaggcgtgggtgggagaggaaaagctaaaagcaaatgctaacaaaaataaccgtgattttctaagacagtttttcagtttttacaagatgaccctaatattcagaatatgaatgtattcgtaggttttacataatgacttttatcaagaaactagattctgcttcttaaatctaattgccaagtgaagaataacagaaaaaacagattaccttatcaaatttacagctcttgaatatacagaactataatatagtagctgtccatgtattttttctactttagaatcaaagaagaaaagcatcattttgctattaaatttgctaaaattttgagtatgatatttccagttggcaagaacaacatatttatatttattccttagccataataccactttcctaaatttcacaaaagtcattctttgcaacttgaaactcaatagaaagtgtgtatgtgtgtgtgtgtatatatatatatatatacacacacacacatacacagaaaggatgtaatgaagatacagtaatagttgagcagacctttttagaaaaacatgtttttagctctatcttcaaactttctggcagagggggtggggggggcagggggaggagtggcatcaaaatgctatgcctcctgttatccacagcctagagtttttatatttggaaagtttagaaaattctatcctcgtttctccttctttgaatggcacaaataaatacactacataaatttttctggtttgaaaggctctaggcgataactttattaattcaacctgaaaatatcaagccattaaattttgtccgggtagaataaatccctgtggcctcttttaaagcaatgtaggtctctgttgcccatggggcatatctgtgtcccaatccacaagagataggaccaacaaacaatgaatgtgcaacctaactctttctccttggaaagaagaaagtgtgcacgaagtagaggagggtgggcagaccctgccttgcccctcctgttacccccttctctgtcatttgttcctaactccatttcataggcaggctcagaatacctgagtctgaaaatatcaggataacacttgtgaattgtgacaatcactacaatgtcccatatctgaggagttttttttaatgctatttatccgctggacacgattgcacattagggctgcataatcctctaactctagggaaaaataaaaacttttgatttgtcttaagattcttctccaaggtcgcaaacaagaaattcccctccacaaccaagagatgtgcattttagtaacatcagatgtgttcttctgttttatcaactacttactcttcccacacgcttagttctaaatctaacctttcccccctcgaatagggggcaggggaggatgaggaaacactggaacaactgaacacccctgcccattttctccaagagccttttgtattctagcatatctgtgcaatcttttcttttttcttcacatgacactgtaagcttaggcctgaaataactgggaagagagatgcgtatcagaatttctccgcaagagctaaacaaaacatacatcttccttagcatgaattggactgggggcggagtgggagggcttggaggaaaggggaaagaagggactatatttgaataaatatgaataaatgtattagatacttttcacaatcagataacttttaaaaaggtcattttttatctttctaataatgtaagccttaataaaagcaaatcttagtcacaaatttgaggagactgcccaataataagtttacatgtatttgaactgaaaaattgttaaccatgcttttgctccaagatgtgtgaggccattcaggggctgtagggccctggatatacacacaaacaagtgtgtgtatatctggagccccacacattgtaataaacacagctgcatttatttgactatgtgatcccatgtacatgtaaaaacattcaaacaaacacactcagcggatttatttattgtgcaatggggcaattattcaaataaacatgctcaatgcaattatttgaatctcacattgcatgttcatcaatcatagcactaaaaaaagagggggaaaaaacaccaaagaattcacatggggaaaaaatatatatatgaaaaccaccttattatagattttatagggcagctgaggttatggctcccttcttaactgtaactcaactattctgtattcaatgacatttgtttctaatgattaattggttcactcacttgatcatataatagcaaactttataaacctgtattgtgtagagatgtgaaatctctatatttcaagagcagaagagttctttctagacaccttacatcaagggacactggtccaattattatcgcttatataagcactcctataaattctgaaaaattttatacatgcaacaaaacattcctacatttgaagacattaagaaaaatcacaggtgactcatctgatcattctatatattaataaatattatgacatatatgtgaacacatcacaaatcatattggtgtaccaagaggcaatttatgcctctcttaagtatgtactgacataacctaatatactaaaatgggaaggggcttttagtcactgaaatatgcatcgtgtaacaaagatgaagaaaatacatggcttgtgcccatcataaaaaaagattcagactgaaggcttagctttggttttttcaattaaattgttaaactgtgcacagtgatttttttttagaacttgagacatttgtgatgttggctgtttaaatctttgttaccttcgctgtgaattgaaattgtacatatttagtaaatcatgcagacaaaacaaactttttagacaatatttttattggagagttttcttttcctgtatccatgttaaaaaaaaaaaagacctcctttcccaaaataaaaatgtcaatactaaatttaaagaagtataaaggaatgattgcttcctttagagcaaaatatttaaataaacatggagataattggcaacatgttctttttgggctagtaggctgtgtccaattttttgggtctgatgtttcagagggcctctgtttcagggttgaagatgatatattaatctcggaattaaacaaatgctattaaataac

SEQ ID NO: 786 - DNA, 1245 bp, Homo sapiens
cgggcgtgtaacccacgggtgcgcgcccacgaccgccagactcgagcagtctctggaacacgctgcggggctcccgggcctgagccaggtctgttctccacgcaggtgttccgcgcgccccgttcagccatgtcgtccggcatccatgtagcgctggtgactggaggcaacaagggcatcggcttggccatcgtgcgcgacctgtgccggctgttctcgggggacgtggtgctcacggcgcgggacgtgacgcggggccaggcggccgtacagcagctgcaggcggagggcctgagcccgcgcttccaccagctggacatcgacgatctgcagagcatccgcgccctgcgcgacttcctgcgcaaggagtacgggggcctggacgtgctggtcaacaacgcgggcatcgccttcaaggttgctgatcccacaccctttcatattcaagctgaagtgacgatgaaaacaaatttctttggtacccgagatgtgtgcacagaattactccctctaataaaaccccaagggagagtggtgaacgtatctagcatcatgagcgtcagagcccttaaaagctgcagcccagagctgcagcagaagttccgcagtgagaccatcactgaggaggagctggtggggctcatgaacaagtttgtggaggatacaaagaagggagtgcaccagaaggagggctggcccagcagcgcatacggggtgacgaagattggcgtcaccgttctgtccaggatccacgccaggaaactgagtgagcagaggaaaggggacaagatcctcctgaatgcctgctgcccagggtgggtgagaactgacatggcgggacccaaggccaccaagagcccagaagaaggtgcagagacccctgtgtacttggcccttttgcccccagatgctgagggtccccatggacaatttgtttcagagaagagagttgaacagtggtgagctgggctcacagctccatccatgggccccattttgtaccttgtcctgagttggtccaaagggcatttacaatgtcataaatatccttatataagaaaaaaaatgatctcttatcaattagcactcactaatgtactactaattgagcaacctacgcactcagttgactacgtaaatctgtcaggtcttttgtgatttcctctgatgcaggagaggaaaaattgtaattgatgaaaataatgaatgaaaatcaacagatgaataaatggttctttataagtg

SEQ ID NO: 787 - DNA, 5423 bp, Homo sapiens
actggccagggccctcatccaggagccaggaaacatctactaccacgagtcgcgttgcccagcgtgtgtcagcctccttatccaaacggcaaggcagcctccccgggatgtagagaagacacggttcaatgtgtagaccttctccctctccagtgtctccagcctccaatcccaggacatcactagtacaggtgaaaacaaaagcctgtctcagcggccatcactctgccagcagcacctcaaagccattcaaaacgcccaaagacaatctacttacctccagcagcaaacagcacacagtctttcctgcgaaaggatcaagggataaaccatgtgttccagttcctgtagtcagtttagagaaaattcctaacctagtgaaggcagatggtgccaatgtcaaaatgaactccacaaccactactgcagtttctgcctcctccacctcgtcctctgccgtctccacccctcctttaattaagcctgtcctgatgtccaagtcagtgccaccttcaccagagaagatcttaaatggcaaaggaattctgccaaccaccatagacaagaaacaccaaaatggcaccaaaaacagcaacaagccttacaggagactttcagagagagaatttgacccaaataaacactgtggagtattggatcccgagacaaagaaaccttgcacaagatccctcacctgcaagacacattcgctaagccatcggagggcagtcccaggccggaaaaagcaatttgacctcctcctggcagaacacaaagcaaagtcccgggaaaaagaagttaaagataaagagcatctcctgacttccacgagggaaatacttccaagccaatccgggccggcacaggattctctgctagggtcttcagggagctctgggccagaaccaaaagttgcatcccctgcaaaatccagaccacccaactctgtacttcctagaccatcatctgcaaatagcataagcagcagcacatcttcaaatcatagcggccacactccagagcccccactcccaccggttggaggtgacctcgccagccgactgtccagtgatgaaggggagatggacggagccgacgaatccgagaagctagactgtcagttctccacgcaccaccccagacctctggcgttttgctcatttgggagtcgcctcatgggacgagggtactatgtgtttgatagaagatgggatcgttttcgattcgcactaaactccatggtagaaaaacacctgaattcacagatgtggaagaagatccctcctgcggcagatagccccctgccctcgccagcagcccacatcaccacccccgttccagcatccgttttgcagcctttcagcaaccccagtgctgtgtatcttccttcagctcccatcagctcgaggctcacctcttcttacataatgacatcagccatgctctcaaacgcagctttcgtgacatcgccggacccgagcgccctcatgtcccacaccacagctttccctcatgtggccgcaaccctcagcatcatggactcaaccttcaaggccccatccgccgtgtccccgataccagccgtcatcccttccccatcccacaagccatccaaaaccaaaaccagcaaatcctcaaaagtcaaagacctgtccacccgtagcgacgagtctccaagtaacaaaaaaaggaagccacagtcttcgacttcctcctcctcctcctcctcctcctcttccttgcagacatccctctcgtctccactgtcagggcctcacaaaaagaactgtgttttgaatgccagttctgctttgaactcctatcaggcggcccctccctataacagcctgtctgtgcacaactcaaacaatggggtgagcccactcagtgccaaactggagccctcaggacggacctcgctgcccggcggccccgcggacatagtgagacaggtgggcgcggtgggaggcagcagtgactcctgtcccctctctgtgccctcccttgcgctccacgcaggggacctctctctggcctcacacaatgctgtgtcttctctgcccctctcttttgacaaatcagaaggaaaaaagcgtaagaactcgagttctagtagcaaagcctgtaaaatcactaaaatgcctggtatgaatagcgttcacaaaaagaacccgcccagccttctcgcaccggtgcccgatcccgttaacagcacctcctctcggcaggttgggaaaaatagcagcctagctttgtcacaatccagtccttcaagtatatccagcccaggacacagccgacagaagaacacaaacagaacgggcaggataaggactcttccataacaagactatgaagccacttccacatcaattccaggccacctaatcccatccgaggaggccatggggaggaggagggaggggagtgggctggggggagagtctgttttctgtgcactccctgtgactctggcctttcttcttctttttttaattgaccaatttttagttaaaaaggcaaaagaaggtgaatttgagatttacagaaaacagttccagtgtttggtttccgctgtctttcctttcatttgccatgtttttacattcttccaaatttggggtcactcccctagctcctgatgctgctactgtaccatccttttgctccagccatgagagcagacattgcagaatgttggttccaggttggcatgctctgaagctcttgaactgtagcacaggcagagccctttttcttcctgtcatctccacccgattccttccatccctacgtctaccactctctgggtcctcactggtcttcaaaggacctggctctcataggatcccctcaggattgtgtgcagggagagggggctttgctggggaggagctgggagtggagagttggagggtgggtggggttccctcatccagtttccacagcccaccatggctggagccaaatgctagaagcgagattgagaacagtggccgtttagtgatgtggtttacctaataccactgtccagctgtgcagctcagaaaggataaaccagtcagggacaggggccagaacaggtttgggaaggtggcagcaagcagagcatggtgggtaggagatgatccctaaaaaaactggagactgtggtggtctgagctggtcaggaatctgcagaatcccttccaggaatcagtgtgccagtgcccacagcagggtgagctaggagggagaaatcccaggaaaaaggtcgtgagaacccagaaagccactccatgaggaggcacggtgaccacagctgctaaaggttcttaggctgccttcctgggctaggaagagccccccagggagagcttccacaaaagggtatgtgtcaaaccttttgtcagaataaataatagcatttcccacccacccccatgccctgggccacagggacttggtgggatcagcacacccatggatcagcttttgctgtcttagagacagccatccccatgaaggaatggtaaggacagccactgctcagtgaagaacagccatttggaagagccacgctggagccctgcagccatagaactattcacactggagttttaaaagaaacagcaataccataagctctagtagggaatcataatcaggaaaggaattcacaacataaaataggtgttctgtgctattaatcatgtaactttgtatatgatgtatagcaaagatactgggaggttttgtttcatccttaaatcagaaatgaatgctagtttcatagctgggcagaaccctcatccccaccccaaagttttccttttctttcccgttcccccaacccaaagatcagactactgttaagtttcaccacacaattggaattgcaaagacgggaggcaaatggagtgattttcatcaatggaattgcactgacagtgagtgtttcttataggattactaaattttttaatataaaatgatttgtttaaaaatcaggagttgatattaagtaccaggacattagttcggatgatttcatttttatttctacagtgttaaaagtgcacttatatgctggtttatttacgtcttgggaaaagagactgcaaattgaagggatgattgttactttttctttttttaaaaaaaaaaggttaaggagattttaagacttataaatgtttaagaaattataaacaaggttagaccctttgaaaaaaagtttagaagatattcttaaagtaaatttttatagtgttaattttgtaataatttatgttttactatattacagagctaactgaccagaatagtttcagaaacaatatgaaacttaggaaagtttaagcaatgtttatatttttaaaatgttctttgaattatgtttttattgtacatttcttcagactgaaaagtatgtacatatctttgttatttttgcacaattttgtcttgttcggtttcagaggtctgttgttttttataatttattttgagttgtaaaacttgcaggagtaaaaacaaaaaacaaaatctccacaacaaaataaccctctgatttataaactcttatagtcaaagagggaaaacaaaggttgagagattaagtggctgcttctgagaaataatgtctcaaggactaaaggagcaattcaataggtttagacattgtagctctctacatcttgaattggaagctggaataaagagcccccacccccccccccaccctcatcgaatgctgcttactttgtcaaaagactggctatgaccaaggtgaggatatttctggaaaactgggcaaaaagggaaagcccacagtattcttccttggcagtcaaccacaggtttactttacaatgatgtattaaaaacttgcagcttgaaaaatggaatgcaaataaaaggttctctttgggtttgtcttaatggagttaaactggagcagcctataaaacatttttagggtgatgtcctctgggtccttctgttctgcacacccactcagtcttctctcccagccccttgactgcacacacccctctttgcctgaagatctcctgacttgtcgccagccatagaggctcgaaagctctggttgtgaagcataacgcaatgcatagacctgtcagccataaaaaaaaaaaaaaaaaaaaaaaagcgacttggataacttgtatgccttcttttgtatcaatgtaccaattgtaaataatgctgatcaacctttgtagagaatagtttatacagcatattctattattgctgattctcagtgaactcttgttttaaaaaaggaaaaaaagaaattttctatttacaccttatattttgttatgctgtcggcccatggcactttaacaaaactctgtgggttttacgtagctggtcagtcatggggtatattaaataactgttgttgcacagac

SEQ ID NO: 788 - DNA, 97 bp, Homo sapiens
tggatcgatgatgagtcccctataaaaacattccttggaaaagctgaacaaaatgagtgagaactcataacgtcattctcatcggaactgaggtcca

SEQ ID NO: 789 - DNA, 456 bp, Homo sapiens
gccccctcccctgactatcaaagcagcggccggctgttggggtccaccacgccttccacctgccccactgcttcttcgcttctctcttggaaagtccagtctctcctcggcttgcaatggaccccaactgctcctgcgccgctggtgtctcctgcacctgcgctggttcctgcaagtgcaaagagtgcaaatgcacctcctgcaagaagagctgctgctcctgctgccccgtgggctgtagcaagtgtgcccagggctgtgtttgcaaaggggcgtcagagaagtgcagctgctgcgactgatgccaggacaacctttctcccagatgtaaacagagagacatgtacaaacctggattttttttttataccaccttgacccatttgctacattccttttcctgtgaaatatgtgagtgataattaaacactttagacctgaaaaaaaaaaaaaaaa

SEQ ID NO: 790 - DNA, 85 bp, Homo sapiens
tggatcgatgatgacttaaaaaaatggaaaccttggaaatctgaacaaaatgagtgaccaagacacttctgtgagctgaggtcca

SEQ ID NO: 791 - DNA, 1756 bp, Homo sapiens
ggcgcttccgcaggaagaaggaagcggcgccgccatcgcctcccggcgctccctccccgactcctaagtccttcggccgccaccatgtccgcctcggctgtcttcattctggacgttaagggcaagccattgatcagccgcaactacaagggcgatgtggccatgagcaagattgagcacttcatgcctttgctggtacagcgggaggaggaaggcgccctggccccgctgctgagccacggccaggtccacttcctatggatcaaacacagcaacctctacttggtggccaccacatcgaagaatgccaatgcctccctggtgtactccttcctgtataagacaatagaggtattctgcgaatacttcaaggagctggaggaggagagcatccgggacaactttgtcatcgtctacgagttgctggacgagctcatggactttggcttcccgcagaccaccgacagcaagatcctgcaggagtacatcactcagcagagcaacaagctggagacgggcaagtcacgggtgccacccactgtcaccaacgctgtgtcctggcgctccgagggtatcaagtataagaagaacgaggtcttcattgatgtcatagagtctgtcaacctgctggtcaatgccaacggcagcgtccttctgagcgaaatcgtcggtaccatcaagctcaaggtgtttctgtcaggaatgccagagctgcggctgggcctcaatgaccgcgtgctcttcgagctcactggccgcagcaagaacaaatcagtagagctggaggatgtaaaattccaccagtgcgtgcggctctctcgctttgacaacgaccgcaccatctccttcatcccgcctgatggtgactttgagctcatgtcataccgcctcagcacccaggtcaagccactgatctggattgagtctgtcattgagaagttctcccacagccgcgtggagatcatggtcaaggccaaggggcagtttaagaaacagtcagtggccaacggtgtggagatatctgtgcctgtacccagcgatgccgactcccccagattcaagaccagtgtgggcagcgccaagtatgtgccggagagaaacgtcgtgatttggagtattaagtctttcccggggggcaaggagtacttgatgcgagcccactttggcctccccagtgtggaaaaggaagaggtggagggccggccccccatcggggtcaagtttgagatcccctacttcaccgtctctgggatccaggtccgatacatgaagatcattgagaaaagtggttaccaggccctgccctgggttcgctacatcacccagagtggcgattaccaacttcgtaccagctagaagggagaagagatgggggcttgaacacggggcttccttacagccccggatgcagattttagagggagggcaggtgcgggctgtgtgtgtctgtgtgagggcaggtcctggacttggcagtttcttgctcccagcacccgccccttcctcacctcttccttattccataggctgggagagaaactctctctgcttccctcgcccttggagctttccccatccccctgattttatatgaagaaatagaagaggggcttgaagtcctcctcgcgagtgccttcttgcaattacctgccttagcgggtgttgcgggtccctccttcacagccgctgagcccagaggtcccgctggcccctcctctgaattttaggatgtcattaaaaagatgaatctaaaaaa

SEQ ID NO: 792 - DNA, 1345 bp, Homo sapiens
gcctctggggttttatattgctctggtattcatgccaaagacacaccagccctcagtcactgggagaagaacctctcataccctcggtgctccagtccccagctcactcagccacacacaccatgtgtgaagaggagaccaccgcgctcgtgtgtgacaatggctctggcctgtgcaaggcaggcttcgcaggagatgatgccccccgggctgtcttcccctccattgtgggccgccctcgccaccagggtgtgatggtgggaatgggccagaaagacagctatgtgggggatgaggctcagagcaagcgagggatcctaactctcaaataccccattgaacacggcatcatcaccaactgggatgacatggagaagatctggcaccactccttctacaatgagctgcgtgtagcacctgaagagcaccccaccctgctcacagaggctcccctaaatcccaaggccaacagggaaaagatgacccagatcatgtttgaaaccttcaatgtccctgccatgtacgtcgccattcaagctgtgctctccctctatgcctctggccgcacgacaggcatcgtcctggattcaggtgatggcgtcacccacaatgtccccatctatgaaggctatgccctgccccatgccatcatgcgcctggacttggctggccgtgacctcacggactacctcatgaagatcctcacagagagaggctattcctttgtgaccacagctgagagagaaattgtgcgagacatcaaggagaagctgtgctatgtggccctggattttgagaatgagatggccacagcagcttcctcttcctccctggagaagagctatgagctgccagatgggcaggttatcaccattggcaatgagcgcttccgctgccctgagaccctcttccagccttcctttattggcatggagtccgctggaattcatgagacaacctacaattccatcatgaagtgtgacattgacatccgtaaggacttatatgccaacaatgtcctctctgggggcaccaccatgtaccctggcattgctgacaggatgcagaaggagatcacagccctggcccccagcaccatgaagatcaagattattgctcccccagagcggaagtactcagtctggatcgggggctctatcctggcctctctctccaccttccagcagatgtggatcagcaagcctgagtatgatgaggcagggccctccattgtccacaggaagtgcttctaaagtcagaacaggttctccaaggatcccctcgagactactctgttaccagtcatgaaacattaaaacctacaagccttaaaaaaaaaaaaaaa

SEQ ID NO: 793 - DNA, 3052 bp, Homo sapiens
caggaccatggaactcagcgtcctcctcttccttgcactcctcacaggactcttgctactcctggttcagcgccaccctaacacccatgaccgcctcccaccagggccccgccctctgccccttttgggaaaccttctgcagatggatagaagaggcctactcaaatcctttctgaggttccgagagaaatatggggacgtcttcacggtacacctgggaccgaggcccgtggtcatgctgtgtggagtagaggccatacgggaggcccttgtggacaaggctgaggccttctctggccggggaaaaatcgccatggtcgacccattcttccggggatatggtgtgatctttgccaatggaaaccgctggaaggtgcttcggcgattctctgtgaccactatgagggacttcgggatgggaaagcggagtgtggaggagcggattcaggaggaggctcagtgtctgatagaggagcttcggaaatccaagggggccctcatggaccccaccttcctcttccagtccattaccgccaacatcatctgctccatcgtctttggaaaacgattccactaccaagatcaagagttcctgaagatgctgaacttgttctaccagactttttcactcatcagctctgtattcggccagctgtttgagctcttctctggcttcttgaaatactttcctggggcacacaggcaagtttacaaaaacctgcaggaaatcaatgcttacattggccacagtgtggagaagcaccgtgaaaccctggaccccagcgcccccaaggacctcatcgacacctacctgctccacatggaaaaagagaaatccaacgcacacagtgaattcagccaccagaacctcaacctcaacacgctctcgctcttctttgctggcactgagaccaccagcaccactctccgctacggcttcctgctcatgctcaaataccctcatgttgcagagagagtctacagggagattgaacaggtgattggcccacatcgccctccagagcttcatgaccgagccaaaatgccatacacagaggcagtcatctatgagattcagagattttccgaccttctccccatgggtgtgccccacattgtcacccaacacaccagcttccgagggtacatcatccccaaggacacagaagtatttctcatcctgagcactgctctccatgacccacactactttgaaaaaccagacgccttcaatcctgaccactttctggatgccaatggggcactgaaaaagactgaagcttttatccccttctccttagggaagcggatttgtcttggtgaaggcatcgcccgtgcggaattgttcctcttcttcaccaccatcctccagaacttctccatggccagccccgtggccccagaagacatcgatctgacaccccaggagtgtggtgtgggcaaaatacccccaacataccagatccgcttcctgccccgctgaaggggctgagggaagggggtcaaaggattccagggtcattcagtgtccccgcctctgtagacaatggctctgactccccgcaacttcctgcctctgagagacctgctacaagccagcttccttcccctccatggcaccagttgtctgaggtcacattgcaagtgagtgcaggagtgagattatcgaaaattataatatacaaaatcatatatatatatatgttcttgttttttgagacagagtctcacactgttgcccaggctggagtgcagtggcgtgatctcggctcactgcaacctccacccccggggatcaagcaactctcctgcctcagcctccctagtagctgggattacaggcatgcactaccacgcttggctaatttttgtatttttagtagagatggggtttcactgtgtaggccaggctggtctcgaactcctgaactcaagtgattcacccaccttagcctcccaaagtgctgggattacaggcgtgagtcaccgtgcccagccatgtatatatataattttaaaaattaagctgaaattcacataacataaaattagctgttttaaagtgtaaaatttagtggcgtgtggttcattcacaaagctgtacaaccaccaccatctagttccaaacattttctttttttctgagatggagtctcactctgtcacccaggttcgagttcagtggtgccatctctgtccactgcaacctccacatcctgggttcaagtgattctcctgcctcagcctctggaggagctggtatcacaggcgtcccccaccacgcctggctaaattttgtatttttaggtggtcttgaactcctgatgtcaggtgattctcctagctccaaatgttttcattatctctcccccaacaaaacccatacctatcaagctgtcactccccataccccattctctttttcatctcggcccctgtcaatctggtttttgtcactatggacttaccaattctgaatatttcccataaacagaatcatacaatatttgattttttttttttttttgaaactaagccttgctctgtctcccaggctggagtgctatggtgcaatttttgttcactgcaacctctgccttccaagatcaagagattctccagtctcagctcccaagtagctgggattacaggcatgtactaccatgcctggctaattttcttgtagttttagtagggacatgttggccaggctggtggtgagctcctggcctcaggtgatccacccacctcagtgttccaaagtgctgatattacaggcataatatgtgatcttttgtgtctggttgctttcatgttgaatgctatttttgaggttcatgcctgttgtagaccacagtcacacactgctgtagtcttccccagtcctcattcccagctgcctcttcctactgcttccgtctatcaaaaagcccccttggcccaggttccctgagctgtgggattctgcactggtgctttggattccctgatatgttccttcaaatctgctgagaattaaataaacatctctaaagcctgacctccccacgtc

SEQ ID NO: 794 - DNA, 3198 bp, Homo sapiens
aggagcacagctgtgtttggctgcagggccaagagcgctgtcaagaagacccacacgcccccctccagcagctgaattcctgcagctcagcagccgccgccagagcaggacgaaccgccaatcgcaaggcacctctgagaacttcaggatgcagatgtctccagccctcacctgcctagtcctgggcctggcccttgtctttggtgaagggtctgctgtgcaccatcccccatcctacgtggcccacctggcctcagacttcggggtgagggtgtttcagcaggtggcgcaggcctccaaggaccgcaacgtggttttctcaccctatggggtggcctcggtgttggccatgctccagctgacaacaggaggagaaacccagcagcagattcaagcagctatgggattcaagattgatgacaagggcatggcccccgccctccggcatctgtacaaggagctcatggggccatggaacaaggatgagatcagcaccacagacgcgatcttcgtccagcgggatctgaagctggtccagggcttcatgccccacttcttcaggctgttccggagcacggtcaagcaagtggacttttcagaggtggagagagccagattcatcatcaatgactgggtgaagacacacacaaaaggtatgatcagcaacttgcttgggaaaggagccgtggaccagctgacacggctggtgctggtgaatgccctctacttcaacggccagtggaagactcccttccccgactccagcacccaccgccgcctcttccacaaatcagacggcagcactgtctctgtgcccatgatggctcagaccaacaagttcaactatactgagttcaccacgcccgatggccattactacgacatcctggaactgccctaccacggggacaccctcagcatgttcattgctgccccttatgaaaaagaggtgcctctctctgccctcaccaacattctgagtgcccagctcatcagccactggaaaggcaacatgaccaggctgccccgcctcctggttctgcccaagttctccctggagactgaagtcgacctcaggaagcccctagagaacctgggaatgaccgacatgttcagacagtttcaggctgacttcacgagtctttcagaccaagagcctctccacgtcgcgcaggcgctgcagaaagtgaagatcgaggtgaacgagagtggcacggtggcctcctcatccacagctgtcatagtctcagcccgcatggcccccgaggagatcatcatggacagacccttcctctttgtggtccggcacaaccccacaggaacagtccttttcatgggccaagtgatggaaccctgaccctggggaaagacgccttcatctgggacaaaactggagatgcatcgggaaagaagaaactccgaagaaaagaattttagtgttaatgactctttctgaaggaagagaagacatttgccttttgttaaaagatggtaaaccagatctgtctccaagaccttggcctctccttggaggacctttaggtcaaactccctagtctccacctgagaccctgggagagaagtttgaagcacaactcccttaaggtctccaaaccagacggtgacgcctgcgggaccatctggggcacctgcttccacccgtctctctgcccactcgggtctgcagacctggttcccactgaggccctttgcaggatggaactacggggcttacaggagcttttgtgtgcctggtagaaactatttctgttccagtcacattgccatcactcttgtactgcctgccaccgcggaggaggctggtgacaggccaaaggccagtggaagaaacaccctttcatctcagagtccactgtggcactggccacccctccccagtacaggggtgctgcaggtggcagagtgaatgtcccccatcatgtggcccaactctcctggcctggccatctccctccccagaaacagtgtgcatgggttattttggagtgtaggtgacttgtttactcattgaagcagatttctgcttccttttatttttataggaatagaggaagaaatgtcagatgcgtgcccagctcttcaccccccaatctcttggtggggaggggtgtacctaaatatttatcatatccttgcccttgagtgcttgttagagagaaagagaactactaaggaaaataatattatttaaactcgctcctagtgtttctttgtggtctgtgtcaccgtatctcaggaagtccagccacttgactggcacacacccctccggacatccagcgtgacggagcccacactgccaccttgtggccgcctgagaccctcgcgccccccgcgcccctctttttccccttgatggaaattgaccatacaatttcatcctccttcaggggatcaaaaggacggagtggggggacagagactcagatgaggacagagtggtttccaatgtgttcaatagatttaggagcagaaatgcaaggggctgcatgacctaccaggacagaactttccccaattacagggtgactcacagccgcattggtgactcacttcaatgtgtcatttccggctgctgtgtgtgagcagtggacacgtgaggggggggtgggtgagagagacaggcagctcggattcaactaccttagataatatttctgaaaacctaccagccagagggtagggcacaaagatggatgtaatgcactttgggaggccaaggcgggaggattgcttgagcccaggagttcaagaccagcctgggcaacataccaagacccccgtctctttaaaaatatatatattttaaatatacttaaatatatatttctaatatctttaaatatatatatatattttaaagaccaatttatgggagaattgcacacagatgtgaaatgaatgtaatctaatagaagcctaatcagcccaccatgttctccactgaaaaatcctctttctttggggtttttctttctttcttttttgattttgcactggacggtgacgtcagccatgtacaggatccacaggggtggtgtcaaatgctattgaaattgtgttgaattgtatgctttttcacttttgataaataaacatgtaaaaatgtttcaaaaaaataataaaataaataaatacgaagaatatgtcaggacagtcaaaaaaaaaaaaaaaaaa

SEQ ID NO: 795 - DNA, 5231 bp, Homo sapiens
agaaagttacctgtggccgcccaagtccgccactttctgctctgtgtctgcccattgccacgatccaggaggactccgcgccgcccggccgcctccgagctcgggccccatgtgaggggcccccccttatcccacctttccggctaggtgagggcgcgagcgggcgagcgagcgagagtggtgaggggggacggaaaagcagaattacctgtagctcttgttctgccatctcgggcgctctcacacaccttcacctgcacagacttgaaagtccagtttcaccagaggctgaggctccaggaaaagcggagcaagttcattggatcaaacatgtcacaagagtcggacaataataaaagactagtggccttagtgcccatgcccagtgaccctccattcaatacccgaagagcctacaccagtgaggatgaagcctggaagtcatacttggagaatcccctgacagcagccaccaaggccatgatgagcattaatggtgatgaggacagtgctgctgccctcggcctgctctatgactactacaaggttcctcgagacaagaggctgctgtctgtaagcaaagcaagtgacagccaagaagaccaggagaaaagaaactgccttggcaccagtgaagcccagagtaatttgagtggaggagaaaaccgagtgcaagtcctaaagactgttccagtgaacctttccctaaatcaagatcacctggagaattccaagcgggaacagtacagcatcagcttccccgagagctctgccatcatcccggtgtcgggaatcacggtggtgaaagctgaagatttcacaccagttttcatggccccacctgtgcactatccccggggagatggggaagagcaacgagtggttatctttgaacagactcagtatgacgtgccctcgctggccacccacagcgcctatctcaaagacgaccagcgcagcactccggacagcacatacagcgagagcttcaaggacgcagccacagagaaatttcggagtgcttcagttggggctgaggagtacatgtatgatcagacatcaagtggcacatttcagtacaccctggaagccaccaaatctctccgtcagaagcagggggagggccccatgacctacctcaacaaaggacagttctatgccataacactcagcgagaccggagacaacaaatgcttccgacaccccatcagcaaagtcaggagtgtggtgatggtggtcttcagtgaagacaaaaacagagatgaacagctcaaatactggaaatactggcactctcggcagcatacggcgaagcagagggtccttgacattgccgattacaaggagagctttaatacgattggaaacattgaagagattgcatataatgctgtttcctttacctgggacgtgaatgaagaggcgaagattttcatcaccgtgaattgcttgagcacagatttctcctcccaaaaaggggtgaaaggacttcctttgatgattcagattgacacatacagttataacaatcgtagcaataaacccattcatagagcttattgccagatcaaggtcttctgtgacaaaggagcagaaagaaaaatccgagatgaagagcggaagcagaacaggaagaaagggaaaggccaggcctcccaaactcaatgcaacagctcctctgatgggaagttggctgccatacctttacagaagaagagtgacatcacctacttcaaaaccatgcctgatctccactcacagccagttctcttcatacctgatgttcactttgcaaacctgcagaggaccggacaggtgtattacaacacggatgatgaacgagaaggtggcagtgtccttgttaaacggatgttccggcccatggaagaggagtttggtccagtgccttcaaagcagatgaaagaagaagggacaaagcgagtgctcttgtacgtgaggaaggagactgacgatgtgttcgatgcattgatgttgaagtctcccacagtgaagggcctgatggaagcgatatctgagaaatatgggctgcccgtggagaagatagcaaagctttacaagaaaagcaaaaaaggcatcttggtgaacatggatgacaacatcatcgagcactactcgaacgaggacaccttcatcctcaacatggagagcatggtggagggcttcaaggtcacgctcatggaaatctagccctgggtttggcatccgctttggctggagctctcagtgcgttcctccctgagagagacagaagccccagccccagaacctggagacccatctcccccatctcacaactgctgttacaagaccgtgctggggagtggggcaagggacaggccccactgtcggtgtgcttggcccatccactggcacctaccacggagctgaagcctgagcccctcaggaaggtgccttaggcctgttggattcctatttattgcccaccttttcctggagcccaggtccaggcccgccaggactctgcaggtcactgctagctccagatgagaccgtccagcgttcccccttcaagagaaacactcatcccgaacagcctaaaaaattcccatcccttctctctcacccctccatatctatctcccgagtggctggacaaaatgagctacgtctgggtgcagtagttataggtggggcaagaggtggatgcccactttctggtcagacacctttaggttgctctggggaaggctgtcttgctaaatacctccagggttcccagcaagtggccaccaggccttgtacaggaagacattcagtcaccgtgtaattagtaacacagaaagtctgcctgtctgcattgtacatagtgtttataatattgtaataatatattttacctgtggtatgtgggcatgtttactgccactggcctagaggagacacagacctggagaccgttttaatgggggtttttgcctctgtgcctgttcaagagacttgcagggctaggtagagggcctttgggatgttaaggtgactgcagctgatgccaagatggactctgcaatgggcatacctgggggctcgttccctgtccccagaggaagccccctctccttctccatgggcatgactctccttcgaggccaccacgtttatctcacaatgatgtgttttgcttgactttccctttgcgctgtctcgtgggaaaggtcattctgtctgagaccccagctccttctccagctttggctgcgggcatggcctgagctttctggagagcctctgcagggggtttgccatcagggccctgtggctgggtctgctgcagagctccttggctatcaggagaatcctggacactgtactgtgcctcccagtttacaaacacgcccttcatctcaagtggccctttaaaaggcctgctgccatgtgagagctgtgaacagctcagctctgagtcggcaggctggggcttcctcctgggccaccagatggaaagggggtattgtttgcctcactcctggatgctgcgttttaaggaagtgagtgagaaagaatgtgccaagatacctggctcctgtgaaaccagcctcaggagggaaactgggagagagaagctgtggtctcctgctacatgccctgggagctggaagagaaaaacactcccctaaacaatcgcaaaatgatgaaccatcatgggccactgttctctttgaggggacaggtttaggggtttgcgttcgcccttgtgggctgaagcactagctttttggtagctagacacatcctgcacccaaaggttctctacaaaggcccagatttgtttgtaaagcactttgactcttacctggaggcccgctctctaagggcttcctgcgctcccacctcatctgtccctgagatgcagagcaggatggagggtctgcttctagctcagctgtttctccttgaggttgcggaggaattgaattgaatgggacagagggcaggtgctgtggccaagaagatctccgagcagcagtgacggggcaccttgctgtgtgtcctctgggcatgttaacccttctgtggggccaaaggtttgcatcgtggatccagctgtgctccagtctgtcccctcctcctccactctgactgccacgccccggaccagcagcttggggaccctccagggtactaatggggctctgttctgagatggacaaattcagtgttggaaatacatgttgtactatgcacttcccatgctcctagggttaggaatagtttcaaacatgattggcagacataacaacggcaaatactcggactggggcataggactccagagtaggaaaaagacaaaagatttggcagcctgacacaggcaacctacccctctctctccagcctctttatgaaactgtttgtttgccagtcctgccctaaggcagaagatgaattgaagatgctgtgcatgtttcctaagtccttgagcaatcatggtggtgacaattgccacaagggatatgaggccagtgccaccagagggtggtgccaagtgccacatcccttccgatccattcccctctgcatcctcggagcaccccagtttgcctttgatgtgtccgctgtgtatgttagctgaactttgatgagcaaaatttcctgagcgaaacactccaaagagataggaaaacttgccgcctcttcttttttgtcccttaatcaaactcaaataagcttaaaaaaaatccatggaagatcatggacatgtgaaatgagcatttttttcttttttttttttaacaaagtctgaactgaacagaacaagactttttcctcatacatctccaaattgtttaaacttactttatgagtgtttgtttagaagttcggaccaacagaaaaatgcagtcagatgtcatcttggaattggtttctaaaagagtaaggcatgtccctgcccagaaacttaggaagcatgaaataaatcaaatgtttattttccttcttatttaaaatcatgcaaatgcaacagaaatagagggtttgtgccaaatgctatgaacggccctttcttaaagacaagcaagggagattgatatatgtacaatttgctctcatgttttaaaaaaaaaaaggtaaatgtaacttaatagttttgtaaatgggagagggggaatctataaactataaatacagttattttattttttgtacatttttaaggagaaaaaataaatattcataacataagagtaaaa

SEQ ID NO: 796 - DNA, 4950 bp, Homo sapiens
cagagcagggtggagagggcggtgggaggcgtgtgcctgagtgggctctactgccttgttccatattattttgtgcacattttccctggcactctgggttgctagccccgccgggcactgggcctcagacactgcgcggttccctcggagcagcaagctaaagaaagcccccagtgccggcgaggaaggaggcggcggggaaagatgcgcggcgttggctggcagatgctgtccctgtcgctggggttagtgctggcgatcctgaacaaggtggcaccgcaggcgtgcccggcgcagtgctcttgctcgggcagcacagtggactgtcacgggctggcgctgcgcagcgtgcccaggaatatcccccgcaacaccgagagactggatttaaatggaaataacatcacaagaattacgaagacagattttgctggtcttagacatctaagagttcttcagcttatggagaataagattagcaccattgaaagaggagcattccaggatcttaaagaactagagagactgcgtttaaacagaaatcaccttcagctgtttcctgagttgctgtttcttgggactgcgaagctatacaggcttgatctcagtgaaaaccaaattcaggcaatcccaaggaaagctttccgtggggcagttgacataaaaaatttgcaactggattacaaccagatcagctgtattgaagatggggcattcagggctctccgggacctggaagtgctcactctcaacaataacaacattactagactttctgtggcaagtttcaaccatatgcctaaacttaggacttttcgactgcattcaaacaacctgtattgtgactgccacctggcctggctctccgactggcttcgccaaaggcctcgggttggtctgtacactcagtgtatgggcccctcccacctgagaggccataatgtagccgaggttcaaaaacgagaatttgtctgcagtggtcaccagtcatttatggctccttcttgtagtgttttgcactgccctgccgcctgtacctgtagcaacaatatcgtagactgtcgtgggaaaggtctcactgagatccccacaaatcttccagagaccatcacagaaatacgtttggaacagaacacaatcaaagtcatccctcctggagctttctcaccatataaaaagcttagacgaattgacctgagcaataatcagatctctgaacttgcaccagatgctttccaaggactacgctctctgaattcacttgtcctctatggaaataaaatcacagaactccccaaaagtttatttgaaggactgttttccttacagctcctattattgaatgccaacaagataaactgccttcgggtagatgcttttcaggatctccacaacttgaaccttctctccctatatgacaacaagcttcagaccatcgccaaggggaccttttcacctcttcgggccattcaaactatgcatttggcccagaacccctttatttgtgactgccatctcaagtggctagcggattatctccataccaacccgattgagaccagtggtgcccgttgcaccagcccccgccgcctggcaaacaaaagaattggacagatcaaaagcaagaaattccgttgttcagctaaagaacagtatttcattccaggtacagaagattatcgatcaaaattaagtggagactgctttgcggatctggcttgccctgaaaagtgtcgctgtgaaggaaccacagtagattgctctaatcaaaagctcaacaaaatcccggagcacattccccagtacactgcagagttgcgtctcaataataatgaatttaccgtgttggaagccacaggaatctttaagaaacttcctcaattacgtaaaataaactttagcaacaataagatcacagatattgaggagggagcatttgaaggagcatctggtgtaaatgaaatacttcttacgagtaatcgtttggaaaatgtgcagcataagatgttcaagggattggaaagcctcaaaactttgatgttgagaagcaatcgaataacctgtgtggggaatgacagtttcataggactcagttctgtgcgtttgctttctttgtatgataatcaaattactacagttgcaccaggggcatttgatactctccattctttatctactctaaacctcttggccaatccttttaactgtaactgctacctggcttggttgggagagtggctgagaaagaagagaattgtcacgggaaatcctagatgtcaaaaaccatacttcctgaaagaaatacccatccaggatgtggccattcaggacttcacttgtgatgacggaaatgatgacaatagttgctccccactttctcgctgtcctactgaatgtacttgcttggatacagtcgtccgatgtagcaacaagggtttgaaggtcttgccgaaaggtattccaagagatgtcacagagttgtatctggatggaaaccaatttacactggttcccaaggaactctccaactacaaacatttaacacttatagacttaagtaacaacagaataagcacgctttctaatcagagcttcagcaacatgacccagctcctcaccttaattcttagttacaaccgtctgagatgtattcctcctcgcacctttgatggattaaagtctcttcgattactttctctacatggaaatgacatttctgttgtgcctgaaggtgctttcaatgatctttctgcattatcacatctagcaattggagccaaccctctttactgtgattgtaacatgcagtggttatccgactgggtgaagtcggaatataaggagcctggaattgctcgttgtgctggtcctggagaaatggcagataaacttttactcacaactccctccaaaaaatttacctgtcaaggtcctgtggatgtcaatattctagctaagtgtaacccctgcctatcaaatccgtgtaaaaatgatggcacatgtaatagtgatccagttgacttttaccgatgcacctgtccatatggtttcaaggggcaggactgtgatgtcccaattcatgcctgcatcagtaacccatgtaaacatggaggaacttgccacttaaaggaaggagaagaagatggattctggtgtatttgtgctgatggatttgaaggagaaaattgtgaagtcaacgttgatgattgtgaagataatgactgtgaaaataattctacatgtgtcgatggcattaataactacacatgcctttgcccacctgagtatacaggtgagttgtgtgaggagaagctggacttctgtgcccaggacctgaacccctgccagcacgattcaaagtgcatcctaactccaaagggattcaaatgtgactgcacaccagggtacgtaggtgaacactgcgacatcgattttgacgactgccaagacaacaagtgtaaaaacggagcccactgcacagatgcagtgaacggctatacgtgcatatgccccgaaggttacagtggcttgttctgtgagttttctccacccatggtcctccctcgtaccagcccctgtgataattttgattgtcagaatggagctcagtgtatcgtcagaataaatgagccaatatgtcagtgtttgcctggctatcagggagaaaagtgtgaaaaattggttagtgtgaattttataaacaaagagtcttatcttcagattccttcagccaaggttcggcctcagacgaacataacacttcagattgccacagatgaagacagcggaatcctcctgtataagggtgacaaagaccatatcgcggtagaactctatcgggggcgtgttcgtgccagctatgacaccggctctcatccagcttctgccatttacagtgtggagacaatcaatgatggaaacttccacattgtggaactacttgccttggatcagagtctctctttgtccgtggatggtgggaaccccaaaatcatcactaacttgtcaaagcagtccactctgaattttgactctccactctatgtaggaggcatgccagggaagagtaacgtggcatctctgcgccaggcccctgggcagaacggaaccagcttccacggctgcatccggaacctttacatcaacagtgagctgcaggacttccagaaggtgccgatgcaaacaggcattttgcctggctgtgagccatgccacaagaaggtgtgtgcccatggcacatgccagcccagcagccaggcaggcttcacctgcgagtgccaggaaggatggatggggcccctctgtgaccaacggaccaatgacccttgccttggaaataaatgcgtacatggcacctgcttgcccatcaatgcgttctcctacagctgtaagtgcttggagggccatggaggtgtcctctgtgatgaagaggaggatctgtttaacccatgccaggcgatcaagtgcaagcacgggaagtgcaggctttcaggtctggggcagccctactgtgaatgcagcagtggatacacgggggacagctgtgatcgagaaatctcttgtcgaggggaaaggataagagattattaccaaaagcagcagggctatgctgcttgccaaacaaccaagaaggtgtcccgattagagtgcagaggtgggtgtgcaggagggcagtgctgtggaccgctgaggagcaagcggcggaaatactctttcgaatgcactgacggctcctcctttgtggacgaggttgagaaagtggtgaagtgcggctgtacgaggtgtgtgtcctaaacacactcccggcagctctgtctttggaaaaggttgtatacttcttgaccatgtgggactaatgaatgcttcatagtggaaatatttgaaatatattgtaaaatacagaacagacttatttttattatgagaataaagactttttttctgcatttg

SEQ ID NO: 797 - DNA, 2234 bp, Homo sapiens
aactggctccgattggctgtggtacagcaggtgccgcgtccggattgatcaaagccaggtgggcggggctgtcgcccagggtgactctcccgggaggcgcgtgcccaggctcagtagcattggggctggcgcgcgcggcgaatctcaacgctgcgccgtctgcgggcgcttccgggccaccagtttctctgctttccaccctggcgccccccagccctggctccccagctgcgctgccccgggcgtccacgccctgcgggcttagcgggttcagtgggctcaatctgcgcagcgccacctccatgttgaccaagcctctacaggggcctcccgcgccccccgggacccccacgccgccgccaggaggcaaggatcgggaagcgttcgaggccgagtatcgactcggccccctcctgggtaaggggggctttggcaccgtcttcgcaggacaccgcctcacagatcgactccaggtggccatcaaagtgattccccggaatcgtgtgctgggctggtcccccttgtcagactcagtcacatgcccactcgaagtcgcactgctatggaaagtgggtgcaggtggtgggcaccctggcgtgatccgcctgcttgactggtttgagacacaggagggcttcatgctggtcctcgagcggcctttgcccgcccaggatctctttgactatatcacagagaagggcccactgggtgaaggcccaagccgctgcttctttggccaagtagtggcagccatccagcactgccattcccgtggagttgtccatcgtgacatcaaggatgagaacatcctgatagacctacgccgtggctgtgccaaactcattgattttggttctggtgccctgcttcatgatgaaccctacactgactttgatgggacaagggtgtacagccccccagagtggatctctcgacaccagtaccatgcactcccggccactgtctggtcactgggcatcctcctctatgacatggtgtgtggggacattccctttgagagggaccaggagattctggaagctgagctccacttcccagcccatgtctccccagactgctgtgccctaatccgccggtgcctggcccccaaaccttcttcccgaccctcactggaagagatcctgctggacccctggatgcaaacaccagccgaggatgtacccctcaacccctccaaaggaggccctgcccctttggcctggtccttgctaccctaagcctggcctggcctggcctggcccccaatggtcagaagagccatcccatggccatgtcacagggatagatggacatttgttgacttggttttacaggtcattaccagtcattaaagtccagtattactaaggtaagggattgaggatcaggggttagaagacataaaccaagtctgcccagttcccttcccaatcctacaaaggagccttcctcccagaacctgtggtccctgattctggagggggaacttcttgcttctcattttgctaaggaagtttattttggtgaagttgttcccattctgagccccgggactcttattctgatgatgtgtcaccccacattggcacctcctactaccaccacacaaacttagttcatatgctcttacttgggcaagggtgctttccttccaataccccagtagcttttattttagtaaagggaccctttcccctagcctagggtcccatattgggtcaagctgcttacctgcctcagcccaggattctttattctgggggaggtaatgccctgttgttaccccaaggcttcttttttttttttttttttttgggtgaggggaccctactctgttatcccaagtgctcttattctggtgagaagaaccttacttccataatttgggaaggaatggaagatggacaccaccggacaccaccagacactaggatgggatggatggttttttgggggatgggctaggggaaataaggcttgctgtttgttctcctggggcgctccctccaacttttgcagattcttgcaacctcctcctgagccgggattgtccaattactaaaatgtaaataatcacgtattgtggggaggggagttccaagtgtgccctcctctcttctcctgcctggattatttaaaaagccatgtgtggaaacccactatttaataaaagtaatagaatcagaaaaaaaaaaaaaaaaaaaaaaaaaaaaaaaaaaaaaaaaaaaaaaaaa

SEQ ID NO: 798 - DNA, 5703 bp, Homo sapiens
tttctgtactctgggtgactcagagagggaagagattcagccagcacactcctcgcgagcaagcattactctactgactggcagagacaggagaggtagatgtccacgcccacagaccctggtgcgatgccccacccagggccttcgccggggcctgggccttcccctgggccaattcttgggcctagtccaggaccaggaccatccccaggttccgtccacagcatgatggggccaagtcctggacctccaagtgtctcccatcctatgccgacgatggggtccacagacttcccacaggaaggcatgcatcaaatgcataagcccatcgatggtatacatgacaaggggattgtagaagacatccattgtggatccatgaagggcactggtatgcgaccacctcacccaggcatgggccctccccagagtccaatggatcaacacagccaaggttatatgtcaccacacccatctccattaggagccccagagcacgtctccagccctatgtctggaggaggcccaactccacctcagatgccaccaagccagccgggggccctcatcccaggtgatccgcaggccatgagccagcccaacagaggtccctcacctttcagtcctgtccagctgcatcagcttcgagctcagattttagcttataaaatgctggcccgaggccagcccctccccgaaacgctgcagcttgcagtccaggggaaaaggacgttgcctggcttgcagcaacaacagcagcagcaacagcagcagcagcagcagcagcagcagcagcagcagcagcaacagcagccgcagcagcagccgccgcaaccacagacgcagcaacaacagcagccggcccttgttaactacaacagaccatctggcccggggccggagctgagcggcccgagcaccccgcagaagctgccggtgcccgcgcccggcggccggccctcgcccgcgccccccgcagccgcgcagccgcccgcggccgcagtgcccgggccctcagtgccgcagccggccccggggcagccctcgcccgtcctccagctgcagcagaagcagagccgcatcagccccatccagaaaccgcaaggcctggaccccgtggaaattctgcaagagcgggaatacagacttcaggcccgcatagctcataggatacaagaactggaaaatctgcctggctctttgccaccagatttaagaaccaaagcaaccgtggaactaaaagcacttcggttactcaatttccagcgtcagctgagacaggaggtggtggcctgcatgcgcagggacacgaccctggagacggctctcaactccaaagcatacaaacggagcaagcgccagactctgagagaagctcgcatgaccgagaagctggagaagcagcagaagattgagcaggagaggaaacgccgtcagaaacaccaggaatacctgaacagtattttgcaacatgcaaaagattttaaggaatatcatcggtctgtggccggaaagatccagaagctctccaaagcagtggcaacttggcatgccaacactgaaagagagcagaagaaggagacagagcggattgaaaaggagagaatgcggcgactgatggctgaagatgaggagggttatagaaaactgattgatcaaaagaaagacaggcgtttagcttaccttttgcagcagaccgatgagtatgtagccaatctgaccaatctggtttgggagcacaagcaagcccaggcagccaaagagaagaagaagaggaggaggaggaagaagaaggctgaggagaatgcagagggtggggagtctgccctgggaccggatggagagcccatagatgagagcagccagatgagtgacctccctgtcaaagtgactcacacagaaaccggcaaggttctgttcggaccagaagcacccaaagcaagtcagctggacgcctggctggaaatgaatcctggttatgaagttgcccctagatctgacagtgaagagagtgattctgattatgaggaagaggatgaggaagaagagtccagtaggcaggaaaccgaagagaaaatactcctggatccaaatagcgaagaagtttctgagaaggatgctaagcagatcattgagacagctaagcaagacgtggatgatgaatacagcatgcagtacagtgccaggggctcccagtcctactacaccgtggctcatgccatctcggagagggtggagaaacagtctgccctcctaattaatgggaccctaaagcattaccagctccagggcctggaatggatggtttccctgtataataacaacttgaacggaatcttagccgatgaaatggggcttggaaagaccatacagaccattgcactcatcacttatctgatggagcacaaaagactcaatggcccctatctcatcattgttcccctttcgactctatctaactggacatatgaatttgacaaatgggctccttctgtggtgaagatttcttacaagggtactcctgccatgcgtcgctcccttgtcccccagctacggagtggcaaattcaatgtcctcttgactacttatgagtatattataaaagacaagcacattcttgcaaagattcggtggaaatacatgatagtggacgaaggccaccgaatgaagaatcaccactgcaagctgactcaggtcttgaacactcactatgtggcccccagaaggatcctcttgactgggaccccgctgcagaataagctccctgaactctgggccctcctcaacttcctcctcccaacaatttttaagagctgcagcacatttgaacaatggttcaatgctccatttgccatgactggtgaaagggtggacttaaatgaagaagaaactatattgatcatcaggcgtctacataaggtgttaagaccatttttactaaggagactgaagaaagaagttgaatcccagcttcccgaaaaagtggaatatgtgatcaagtgtgacatgtcagctctgcagaagattctgtatcgccatatgcaagccaaggggatccttctcacagatggttctgagaaagataagaaggggaaaggaggtgctaagacacttatgaacactattatgcagttgagaaaaatctgcaaccacccatatatgtttcagcacattgaggaatcctttgctgaacacctaggctattcaaatggggtcatcaatggggctgaactgtatcgggcctcagggaagtttgagctgcttgatcgtattctgccaaaattgagagcgactaatcaccgagtgctgcttttctgccagatgacatctctcatgaccatcatggaggattattttgcttttcggaacttcctttacctacgccttgatggcaccaccaagtctgaagatcgtgctgctttgctgaagaaattcaatgaacctggatcccagtatttcattttcttgctgagcacaagagctggtggcctgggcttaaatcttcaggcagctgatacagtggtcatctttgacagcgactggaatcctcatcaggatctgcaggcccaagaccgagctcaccgcatcgggcagcagaacgaggtccgggtactgaggctctgtaccgtgaacagcgtggaggaaaagatcctcgcggccgcaaaatacaagctgaacgtggatcagaaagtgatccaggcgggcatgtttgaccaaaagtcttcaagccacgagcggagggcattcctgcaggccatcttggagcatgaggaggaaaatgaggaagaagatgaagtaccggacgatgagactctgaaccaaatgattgctcgacgagaagaagaatttgacctttttatgcggatggacatggaccggcggagggaagatgcccggaacccgaaacggaagccccgtttaatggaggaggatgagctgccctcctggatcattaaggatgacgctgaagtagaaaggctcacctgtgaagaagaggaggagaaaatatttgggagggggtcccgccagcgccgtgacgtggactacagtgacgccctcacggagaagcagtggctaagggccatcgaagacggcaatttggaggaaatggaagaggaagtacggcttaagaagcgaaaaagacgaagaaatgtggataaagatcctgcaaaagaagatgtggaaaaagctaagaagagaagaggccgccctcccgctgagaaactgtcaccaaatccccccaaactgacaaagcagatgaacgctatcatcgatactgtgataaactacaaagatagttcagggcgacagctcagtgaagtcttcattcagttaccttcaaggaaagaattaccagaatactatgaattaattaggaagccagtggatttcaaaaaaataaaggaaaggattcgtaatcataagtaccggagcctaggcgacctggagaaggatgtcatgcttctctgtcacaacgctcagacgttcaacctggagggatcccagatctatgaagactccatcgtcttacagtcagtgtttaagagtgcccggcagaaaattgccaaagaggaagagagtgaggatgaaagcaatgaagaggaggaagaggaagatgaagaagagtcagagtccgaggcaaaatcagtcaaggtgaaaattaagctcaataaaaaagatgacaaaggccgggacaaagggaaaggcaagaaaaggccaaatcgaggaaaagccaaacctgtagtgagcgattttgacagcgatgaggagcaggatgaacgtgaacagtcagaaggaagtgggacggatgatgagtgatcagtatggacctttttccttggtagaactgaattccttcctcccctgtctcatttctacccagtgagttcatttgtcatataggcactgggttgtttctatatcatcatcgtctataaactagctttaggatagtgccagacaaacatatgatatcatggtgtaaaaaacacacacatacacaaatatttgtaacatattgtgaccaaatgggcctcaaagattcagattgaaacaaacaaaaagcttttgatggaaaatatgtgggtggatagtatatttctatgggtgggtctaatttggtaacggtttgattgtgcctggttttatcacctgttcagatgagaagatttttgtcttttgtagcactgataaccaggagaagccattaaaagccactggttattttatttttcatcaggcaattttcgaggtttttatttgttcggtattgtttttttacactgtggtacatataagcaactttaataggtgataaatgtacagtagttagatttcacctgcatatacatttttccattttatgctctatgatctgaacaaaagctttttgaattgtataagatttatgtctactgtaaacattgcttaatttttttgctcttgatttaaaaaaaagttttgttgaaagcgctattgaatattgcaatctatatagtgtattggatggcttcttttgtcaccctgatctcctatgttaccaatgtgtatcgtctccttctccctaaagtgtacttaatctttgctttctttgcacaatgtctttggttgcaagtcataagcctgaggcaaataaaattccagtaatttcgaagaatgtggtgttggtgctttcctaataaagaaataatttagcttgacaaa

SEQ ID NO: 799 - DNA, 341 bp, Homo sapiens
atagggcggagggaagctcatcagtggggccacgagctgagtgcgtcctgtcactccactcccatgtcccttgggaaggtctgagactagggccagaggcggccctaacagggctctccctgagcttcggggaggtgagttcccagagaacggggctccgcgcgaggtcagactgggcaggagatgccgtggaccccgcccttcggggaggggcccggcggatgcctcctttgccggagcttggaacagactcacggccagcgaagtgagttcaatggctgaggtgaggtaccccgcaggggacctcataacccaattcagactactctcctccgcccatt

SEQ ID NO: 800 - DNA, 983 bp, Homo sapiens; identical to SEQ ID NO: 116

SEQ ID NO: 801 - DNA, 11998 bp, Homo sapiens; identical to SEQ ID NO: 131

SEQ ID NO: 802 - DNA, 15735 bp, Homo sapiens
ggtctaaagggctttatgcactgtctggagggtggggactggcgcgggtagaaaacgggatgcctcgggcgtgggggcaggcttttggccactaggagctggcggaggtgcagacctaaaggagcgttcgctagcagaggcgctgccggtgcggtgtgctacgcgcgcccacctcccggggaaggaacggcgaggccggggaccgtcgcggagatggatcgcgggccggcagcagtggcgtgcacgctgctcctggctctcgtcgcctgcctagcgccggccagtggccaagaatgtgacagtgcgcattttcgctgtggaagtgggcattgcatccctgcagactggaggtgtgatgggaccaaagactgttcagatgacgcggatgaaattggctgcgctgttgtgacctgccagcagggctatttcaagtgccagagtgagggacaatgcatccccaactcctgggtgtgtgaccaagatcaagactgtgatgatggctcagatgaacgtcaagattgctcacaaagtacatgctcaagtcatcagataacatgctccaatggtcagtgtatcccaagtgaatacaggtgcgaccacgtcagagactgccccgatggagctgatgagaatgactgccagtacccaacatgtgagcagcttacttgtgacaatggggcctgctataacaccagtcagaagtgtgattggaaagttgattgcagggactcctcagatgaaatcaactgcactgagatatgcttgcacaatgagttttcatgtggcaatggagagtgtatccctcgtgcttatgtctgtgaccatgacaatgattgccaagacggcagtgacgaacatgcttgcaactatccgacctgcggtggttaccagttcacttgccccagtggccgatgcatttatcaaaactgggtttgtgatggagaagatgactgtaaagataatggagatgaagatggatgtgaaagcggtcctcatgatgttcataaatgttccccaagagaatggtcttgcccagagtcgggacgatgcatctccatttataaagtttgtgatgggattttagattgcccaggaagagaagatgaaaacaacactagtaccggaaaatactgtagtatgactctgtgctctgccttgaactgccagtaccagtgccatgagacgccgtatggaggagcgtgtttttgtcccccaggttatatcatcaaccacaatgacagccgtacctgtgttgagtttgatgattgccagatatggggaatttgtgaccagaagtgtgaaagccgacctggccgtcacctgtgccactgtgaagaagggtatatcttggagcgtggacagtattgcaaagctaatgattcctttggcgaggcctccattatcttctccaatggtcgggatttgttaattggtgatattcatggaaggagcttccggatcctagtggagtctcagaatcgtggagtggccgtgggtgtggctttccactatcacctgcaaagagttttttggacagacaccgtgcaaaataaggttttttcagttgacattaatggtttaaatatccaagaggttctcaatgtttctgttgaaaccccagagaacctggctgtggactgggttaataataaaatctatctagtggaaaccaaggtcaaccgcatagatatggtaaatttggatggaagctatcgggttacccttataactgaaaacttggggcatcctagaggaattgccgtggacccaactgttggttatttatttttctcagattgggagagcctttctggggaacctaagctggaaagggcattcatggatggcagcaaccgtaaagacttggtgaaaacaaagctgggatggcctgctggggtaactctggatatgatatcgaagcgtgtttactgggttgactctcggtttgattacattgaaactgtaacttatgatggaattcaaaggaagactgtagttcatggaggctccctcattcctcatccctttggagtaagcttatttgaaggtcaggtgttctttacagattggacaaagatggccgtgctgaaggcaaacaagttcacagagaccaacccacaagtgtactaccaggcttccctgaggccctatggagtgactgtttaccattccctcagacagccctatgctaccaatccgtgtaaagataacaatgggggctgtgagcaggtctgtgtcctcagccacagaacagataatgatggtttgggtttccgttgcaagtgcacattcggcttccaactggatacagatgagcgccactgcattgctgttcagaatttcctcattttttcatcccaagttgctattcgtgggatcccgttcaccttgtctacccaggaagatgtcatggttccagtttcggggaatccttctttctttgtcgggattgattttgacgcccaggacagcactatctttttttcagatatgtcaaaacacatgatttttaagcaaaagattgatggcacaggaagagaaattctcgcagctaacagggtggaaaatgttgaaagtttggcttttgattggatttcaaagaatctctattggacagactctcattacaagagtatcagtgtcatgaggctagctgataaaacgagacgcacagtagttcagtatttaaataacccacggtcggtggtagttcatccttttgccgggtatctattcttcactgattggttccgtcctgctaaaattatgagagcatggagtgacggatctcacctcttgcctgtaataaacactactcttggatggcccaatggcttggccatcgattgggctgcttcacgattgtactgggtagatgcctattttgataaaattgagcacagcacctttgatggtttagacagaagaagactgggccatatagagcagatgacacatccgtttggacttgccatctttggagagcatttattttttactgactggagactgggtgccattattcgagtcaggaaagcagatggtggagaaatgacagttatccgaagtggcattgcttacatactgcatttgaaatcgtatgatgtcaacatccagactggttctaacgcctgtaatcaacccacgcatcctaacggtgactgcagccacttctgcttcccggtgccaaatttccagcgagtgtgtgggtgcccttatggaatgaggctggcttccaatcacttgacatgcgagggggacccaaccaatgaaccacccacagagcagtgtggcttattttccttcccctgtaaaaatggcagatgtgtgcccaattactatctctgtgatggagtcgatgattgtcatgataacagtgatgagcaactatgtggcacacttaataatacctgttcatcttcggcgttcacctgtggccatggggagtgcattcctgcacactggcgctgtgacaaacgcaacgactgtgtggatggcagtgatgagcacaactgccccacccacgcacctgcttcctgccttgacacccaatacacctgtgataatcaccagtgtatctcaaagaactgggtctgtgacacagacaatgattgtggggatggatctgatgaaaagaactgcaattcgacagagacatgccaacctagtcagtttaattgccccaatcatcgatgtattgacctatcgtttgtctgtgatggtgacaaggattgtgttgatggatctgatgaggttggttgtgtattaaactgtactgcttctcaattcaagtgtgccagtggggataaatgtattggcgtcacaaatcgttgtgatggtgtttttgattgcagtgacaactcggatgaagcaggctgtccaaccaggcctcctggtatgtgccactcagatgaatttcagtgccaagaagatggtatctgcatcccgaacttctgggaatgtgatgggcatccagactgcctctatggatctgatgagcacaatgcctgtgtccccaagacttgcccttcatcatatttccactgtgacaacggaaactgcatccacagggcatggctctgtgatcgggacaatgactgcggggatatgagtgatgagaaggactgccctactcagccctttcgctgtcctagttggcaatggcagtgtcttggccataacatctgtgtgaatctgagtgtagtgtgtgatggcatctttgactgccccaatgggacagatgagtccccactttgcaatgggaacagctgctcagatttcaatggtggttgtactcacgagtgtgttcaagagccctttggggctaaatgcctatgtccattgggattcttacttgccaatgattctaagacctgtgaagacatagatgaatgtgatattctaggctcttgtagccagcactgttacaatatgagaggttctttccggtgctcgtgtgatacaggctacatgttagaaagtgatgggaggacttgcaaagttacagcatctgagagtctgctgttacttgtggcaagtcagaacaaaattattgccgacagtgtcacctcccaggtccacaatatctattcattggtcgagaatggttcttacattgtagctgttgattttgattcaattagtggtcgtatcttttggtctgatgcaactcagggtaaaacctggagtgcgtttcaaaatggaacggacagaagagtggtatttgacagtagcatcatcttgactgaaactattgcaatagattgggtaggtcgtaatctttactggacagactatgctctggaaacaattgaagtctccaaaattgatgggagccacaggactgtgctgattagtaaaaacctaacaaatccaagaggactagcattagatcccagaatgaatgagcatctactgttctggtctgactggggccaccaccctcgcatcgagcgagccagcatggacggcagcatgcgcactgtcattgtccaggacaagatcttctggccctgcggcttaactattgactaccccaacagactgctctacttcatggactcctatcttgattacatggacttttgtgattataatggacaccatcggagacaggtgatagccagtgatttgattatacggcacccctatgccctaactctctttgaagactctgtgtactggactgaccgtgctactcgtcgggttatgcgagccaacaagtggcatggagggaaccagtcagttgtaatgtataatattcaatggccccttgggattgttgcggttcatccttcgaaacaaccaaattccgtgaatccatgtgccttttcccgctgcagccatctctgcctgctttcctcacaggggcctcatttttactcctgtgtttgtccttcaggatggagtctgtctcctgatctcctgaattgcttgagagatgatcaacctttcttaataactgtaaggcaacatataatttttggaatctcccttaatcctgaggtgaagagcaatgatgctatggtccccatagcagggatacagaatggtttagatgttgaatttgatgatgctgagcaatacatctattgggttgaaaatccaggtgaaattcacagagtgaagacagatggcaccaacaggacagtatttgcttctatatctatggtggggccttctatgaacctggccttagattggatttcaagaaacctttattctaccaatcctagaactcagtcaatcgaggttttgacactccacggagatatcagatacagaaaaacattgattgccaatgatgggacagctcttggagttggctttccaattggcataactgttgatcctgctcgtgggaagctgtactggtcagaccaaggaactgacagtggggttcctgccaagatcgccagtgctaacatggatggcacatctgtgaaaactctctttactgggaacctcgaacacctggagtgtgtcactcttgacatcgaagagcagaaactctactgggcagtcactggaagaggagtgattgaaagaggaaacgtggatggaacagatcgaatgatcctggtacaccagctttcccacccctggggaattgcagtccatgattctttcctttattatactgatgaacagtatgaggtcattgaaagagttgataaggccactggggccaacaaaatagtcttgagagataatgttccaaatctgaggggtcttcaagtttatcacagacgcaatgccgccgaatcctcaaatggctgtagcaacaacatgaatgcctgtcagcagatttgcctgcctgtaccaggaggattgttttcctgcgcctgtgccactggatttaaactcaatcctgataatcggtcctgctctccatataactctttcattgttgtttcaatgctgtctgcaatcagaggctttagcttggaattgtcagatcattcagaaaccatggtgccggtggcaggccaaggacgaaacgcactgcatgtggatgtggatgtgtcctctggctttatttattggtgtgattttagcagctcagtggcatctgataatgcgatccgtagaattaaaccagatggatcttctctgatgaacattgtgacacatggaataggagaaaatggagtccggggtattgcagtggattgggtagcaggaaatctttatttcaccaatgcctttgtttctgaaacactgatagaagttctgcggatcaatactacttaccgccgtgttcttcttaaagtcacagtggacatgcctaggcatattgttgtagatcccaagaacagatacctcttctgggctgactatgggcagagaccaaagattgagcgttctttccttgactgtaccaatcgaacagtgcttgtgtcagagggcattgtcacaccacggggcttggcagtggaccgaagtgatggctacgtttattgggttgatgattctttagatataattgcaaggattcgtatcaatggagagaactctgaagtgattcgttatggcagtcgttacccaactccttatggcatcactgtttttgaaaattctatcatatgggtagataggaatttgaaaaagatcttccaagccagcaaggaaccagagaacacagagccacccacagtgataagagacaatatcaactggctaagagatgtgaccatctttgacaagcaagtccagccccggtcaccagcagaggtcaacaacaacccttgcttggaaaacaatggtgggtgctctcatctctgctttgctctgcctggattgcacaccccaaaatgtgactgtgcctttgggaccctgcaaagtgatggcaagaattgtgccatttcaacagaaaatttcctcatctttgccttgtctaattccttgagaagcttacacttggaccctgaaaaccatagcccacctttccaaacaataaatgtggaaagaactgtcatgtctctagactatgacagtgtaagtgatagaatctacttcacacaaaatttagcctctggagttggacagatttcctatgccaccctgtcttcagggatccatactccaactgtcattgcttcaggtatagggactgctgatggcattgcctttgactggattactagaagaatttattacagtgactacctcaaccagatgattaattccatggctgaagatgggtctaaccgcactgtgatagcccgcgttccaaaaccaagagcaattgtgttagatccctgccaagggtacctgtactgggctgactgggatacacatgccaaaatcgagagagccacattgggaggaaacttccgcgtacccattgtgaacagcagtctggtcatgcccagtgggctgactctggactatgaagaggaccttctctactgggtggatgctagtctgcagaggattgaacgcagcactctgacgggcgtggatcgtgaagtcattgtcaatgcagccgttcatgcttttggcttgactctctatggccagtatatttactggactgacttgtacacacaaagaatttaccgagctaacaaatatgacgggtcaggtcagattgcaatgaccacaaatttgctctcccagcccaggggaatcaacactgttgtgaagaaccagaaacaacagtgtaacaatccttgtgaacagtttaatgggggctgcagccatatctgtgcaccaggtccaaatggtgccgagtgccagtgtccacatgagggcaactggtatttggccaacaacaggaagcactgcattgtggacaatggtgaacgatgtggtgcatcttccttcacctgctccaatgggcgctgcatctcggaagagtggaagtgtgataatgacaacgactgtggggatggcagtgatgagatggaaagtgtctgtgcacttcacacctgctcaccgacagccttcacctgtgccaatgggcgatgtgtccaatactcttaccgctgtgattactacaatgactgtggtgatggcagtgatgaggcagggtgcctgttcagggactgcaatgccaccacggagtttatgtgcaataacagaaggtgcatacctcgtgagtttatctgcaatggtgtagacaactgccatgataataacacttcagatgagaaaaattgccctgatcgcacttgccagtctggatacacaaaatgtcataattcaaatatttgtattcctcgcgtttatttgtgtgacggagacaatgactgtggagataacagtgatgaaaaccctacttattgcaccactcacacgtgcagcagcagtgagttccaatgcgcatctgggcgctgtattcctcaacattggtattgtgatcaagaaacagattgttttgatgcctctgatgaacctgcctcttgtggtcactctgagcgaacatgcctagctgatgagttcaagtgtgatggtgggaggtgcatcccaagcgaatggatctgtgacggtgataatgactgtggggatatgagtgacgaggataaaaggcaccagtgtcagaatcaaaactgctcggattccgagtttctctgtgtaaatgacagacctccggacaggaggtgcattccccagtcttgggtctgtgatggcgatgtggattgtactgacggctacgatgagaatcagaattgcaccaggagaacttgctctgaaaatgaattcacctgtggttacggactgtgtatcccaaagatattcaggtgtgaccggcacaatgactgtggtgactatagcgacgagaggggctgcttataccagacttgccaacagaatcagtttacctgtcagaacgggcgctgcattagtaaaaccttcgtctgtgatgaggataatgactgtggagacggatctgatgagctgatgcacctgtgccacaccccagaacccacgtgtccacctcacgagttcaagtgtgacaatgggcgctgcatcgagatgatgaaactctgcaaccacctagatgactgtttggacaacagcgatgagaaaggctgtggcattaatgaatgccatgacccttcaatcagtggctgcgatcacaactgcacagacaccttaaccagtttctattgttcctgtcgtcctggttacaagctcatgtctgacaagcggacttgtgttgatattgatgaatgcacagagatgccttttgtctgtagccagaagtgtgagaatgtaataggctcctacatctgtaagtgtgccccaggctacctccgagaaccagatggaaagacctgccggcaaaacagtaacatcgaaccctatctcatttttagcaaccgttactatttgagaaatttaactatagatggctatttttactccctcatcttggaaggactggacaatgttgtggcattagattttgaccgagtagagaagagattgtattggattgatacacagaggcaagtcattgagagaatgtttctgaataagacaaacaaggagacaatcataaaccacagactaccagctgcagaaagtctggctgtagactgggtttccagaaagctctactggttggatgcccgcctggatggcctctttgtctctgacctcaatggtggacaccgccgcatgctggcccagcactgtgtggatgccaacaacaccttctgctttgataatcccagaggacttgcccttcaccctcaatatgggtacctctactgggcagactggggtcaccgcgcatacattgggagagtaggcatggatggaaccaacaagtctgtgataatctccaccaagttagagtggcctaatggcatcaccattgattacaccaatgatctactctactgggcagatgcccacctgggttacatagagtactctgatttggagggccaccatcgacacacggtgtatgatggggcactgcctcaccctttcgctattaccatttttgaagacactatttattggacagattggaatacaaggacagtggaaaagggaaacaaatatgatggatcaaatagacagacactggtgaacacaacacacagaccatttgacatccatgtgtaccatccatataggcagcccattgtgagcaatccctgtggtaccaacaatggtggctgttctcatctctgcctcatcaagccaggaggaaaagggttcacttgcgagtgtccagatgacttccgcacccttcagctgagtggcagcacctactgcatgcccatgtgctccagcacccagttcctgtgcgctaacaatgaaaagtgcattcctatctggtggaaatgtgatggacagaaagactgctcagatggctctgatgaactggccctttgcccgcagcgcttctgccgactgggacagttccagtgcagtgacggcaactgcaccagcccgcagactttatgcaatgctcaccaaaattgccctgatgggtctgatgaagaccgtcttctttgtgagaatcaccactgtgactccaatgaatggcagtgcgccaacaaacgttgcatcccagaatcctggcagtgtgacacatttaacgactgtgaggataactcagatgaagacagttcccactgtgccagcaggacctgccggccgggccagtttcggtgtgctaatggccgctgcatcccgcaggcctggaagtgtgatgtggataatgattgtggagaccactcggatgagcccattgaagaatgcatgagctctgcccatctctgtgacaacttcacagaattcagctgcaaaacaaattaccgctgcatcccaaagtgggccgtgtgcaatggtgtagatgactgcagggacaacagtgatgagcaaggctgtgaggagaggacatgccatcctgtgggggatttccgctgtaaaaatcaccactgcatccctcttcgttggcagtgtgatgggcaaaatgactgtggagataactcagatgaggaaaactgtgctccccgggagtgcacagagagcgagtttcgatgtgtcaatcagcagtgcattccctcgcgatggatctgtgaccattacaacgactgtggggacaactcagatgaacgggactgtgagatgaggacctgccatcctgaatattttcagtgtacaagtggacattgtgtacacagtgaactgaaatgcgatggatccgctgactgtttggatgcgtctgatgaagctgattgtcccacacgctttcctgatggtgcatactgccaggctactatgttcgaatgcaaaaaccatgtttgtatcccgccatattggaaatgtgatggcgatgatgactgtggcgatggttcagatgaagaacttcacctgtgcttggatgttccctgtaattcaccaaaccgtttccggtgtgacaacaatcgctgcatttatagtcatgaggtgtgcaatggtgtggatgactgtggagatggaactgatgagacagaggagcactgtagaaaaccgacccctaaaccttgtacagaatatgaatataagtgtggcaatgggcattgcattccacatgacaatgtgtgtgatgatgccgatgactgtggtgactggtccgatgaactgggttgcaataaaggaaaagaaagaacatgtgctgaaaatatatgcgagcaaaattgtacccaattaaatgaaggaggatttatctgctcctgtacagctgggttcgaaaccaatgtttttgacagaacctcctgtctagatatcaatgaatgtgaacaatttgggacttgtccccagcactgcagaaataccaaaggaagttatgagtgtgtctgtgctgatggcttcacgtctatgagtgaccgccctggaaaacgatgtgcagctgagggtagctctcctttgttgctactgcctgacaatgtccgaattcgaaaatataatctctcatctgagaggttctcagagtatcttcaagatgaggaatatatccaagctgttgattatgattgggatcccaaggacataggcctcagtgttgtgtattacactgtgcgaggggagggctctaggtttggtgctatcaaacgtgcctacatccccaactttgaatccggccgcaataatcttgtgcaggaagttgacctgaaactgaaatacgtaatgcagccagatggaatagcagtggactgggttggaaggcatatttactggtcagatgtcaagaataaacgcattgaggtggctaaacttgatggaaggtacagaaagtggctgatttccactgacctggaccaaccagctgctattgctgtgaatcccaaactagggcttatgttctggactgactggggaaaggaacctaaaatcgagtctgcctggatgaatggagaggaccgcaacatcctggttttcgaggaccttggttggccaactggcctttctatcgattatttgaacaatgaccgaatctactggagtgacttcaaggaggacgttattgaaaccataaaatatgatgggactgataggagagtcattgcaaaggaagcaatgaacccttacagcctggacatctttgaagaccagttatactggatatctaaggaaaagggagaagtatggaaacaaaataaatttgggcaaggaaagaaagagaaaacgctggtagtgaacccttggctcactcaagttcgaatctttcatcaactcagatacaataagtcagtgcccaacctttgcaaacagatctgcagccacctctgccttctgagacctggaggatacagctgtgcctgtccccaaggctccagctttatagaggggagcaccactgagtgtgatgcagccatcgaactgcctatcaacctgccccccccatgcaggtgcatgcacggaggaaattgctattttgatgagactgacctccccaaatgcaagtgtcctagcggctacaccggaaaatattgtgaaatggcgttttcaaaaggcatctctccaggaacaaccgcagtagctgtgctgttgacaatcctcttgatcgtcgtaattggagctctggcaattgcaggattcttccactatagaaggaccggctcccttttgcctgctctgcccaagctgccaagcttaagcagtctcgtcaagccctctgaaaatgggaatggggtgaccttcagatcaggggcagatcttaacatggatattggagtgtctggttttggacctgagactgctattgacaggtcaatggcaatgagtgaagactttgtcatggaaatggggaagcagcccataatatttgaaaacccaatgtactcagccagagacagtgctgtcaaagtggttcagccaatccaggtgactgtatctgaaaatgtggataataagaattatggaagtcccataaacccttctgagatagttccagagacaaacccaacttcaccagctgctgatggaactcaggtgacaaaatggaatctcttcaaacgaaaatctaaacaaactaccaactttgaaaatccaatctatgcacagatggagaacgagcaaaaggaaagtgttgctgcgacaccacctccatcaccttcgctccctgctaagcctaagcctccttcgagaagagacccaactccaacctattctgcaacagaagacacttttaaagacaccgcaaatcttgttaaagaagactctgaagtatagctataccagctatttagggaataattagaaacacacttttgcacatatattttttacaaacagatgaaaaaagttaacattcagtactttatgaaaaaaatatatttttccctgtttgcctatagttggaggtatcctgtgtgtctttttttacttatgccgtctcatatttttacaaataattatcacaatgtactatatgtatatctttgcactgaagttgtctgaaggtaatactataaatatattgtatatttgtaaattttggaaagattatcctgttactgaatttgctaataaagatgtctgctgatttggttggtgatcattatagtaaatgatccaacaagaaaaggaattgactggggacctttagccgtgtctaaagaagaggcaccactcatatttcctataaaattatctaggaaaggaatccaggccccgctcttgggtccatttttacacattagcacttaattaatgttcaatattacatgtcaatttgattaatggctatgttgataggggccactatgtgttgtatagacatctggacttgactgtagactcctcagataatacagaaggtaggaaaagcaattcagtttggcccttctgtgtgttggcattgtctaaccagaactctctgtttcatgtgtgttctctcactagctgccaagacaacatttttatttgtgatgtctatgaggaaatcccatatcattaagtgccagtgtcctgcattgagtttgtggttaattaaatgagctcttctgctgatggaccctggagcaatttctcccctcacctgacattcaaggtggtcacctgccctagtagttggagctcagtagctgaatttctgaaaccaaatctgtgtcttcataaaataaggtgcaaaaaaaaaaaataccagttaagtaaagcctcaactgggtttttgtttctatgaaaatatcattataatcactatttatttcctaagttgaacctgaatagaaagggaaaccattcttattaagctttttattaggccctgtggctaaatgtgtacatttatattagaatgtactgtacagtccagatcttttctttaattcttattggttttttttttttttttttttttagagatggagtcttgctatattgccaaggctgatcttgaagtcctgggctcaagtgatcctcccacctcagcctcctgagtggttggggttacgggcgtgagccactgtgcctggcttccagctctcctcttaaatagtgggtatagtctgcacaacaggaaccatggcaggaatatacactttcccatagcaaatagcatacctgactctctgtgctaatattgcacatttgttaaacaatgaatgaatggatggatggatggatggatgaatgaatgaaacatatactactgattattttattccagagttctcaaaatatttgttgctgatattttgagtgctgactgtaattactttgattagataaacaactggaaataatgctgctgaaaaagttctaataaatgtgtattttatcaga

SEQ ID NO: 803 - DNA, 2345 bp, Homo sapiens
tgctgcatggggtcaagcactctggtcggtcccatggagctctgcactgtagcttcccttccacaggccccgcagggcgccccctgcctctgaggatgagtcactgcagcagccgcgccctgaccctgctgagcagcgtgtttggtgcgtgtggcctgctcctggtaggcatcgcggtcagcactgactactggctgtacatggaagaaggcacagtgctaccgcagaaccagaccaccgaggtcaagatggccctgcacgccggcctctggcgagtctgcttctttgcaggtcgggagaaaggtcgctgtgtggcctcagaatattttcttgaaccggagatcaatttggtgacggaaaacacggagaatattctgaagacagtgcgcacggccacccccttccccatggtcagcctcttcctcgtgttcacggccttcgtcatcagcaacatcggccacatccgcccgcagaggaccattctggcttttgtctctggcatcttcttcatactatcgggcctctccttggtggtgggcttggttctttacatctccagcatcaacgacgaggtcatgaacaggcccagcagctctgagcagtattttcattatcgctacgggtggtcttttgccttcgccgcttcctccttcctactcaaagagggggccggcgtgatgtccgtgtacctgttcaccaagcgctacgcggaggaggagatgtaccgtccacacccggccttctaccgcccgcgtctcagcgactgctccgactactcgggccagttcctgcagcccgaggcgtggcgccgcggccggagcccctccgacatctccagcgacgtgtccatccaaatgacgcagaactaccctcccgccatcaagtacccggaccacctgcacatctccacctcgccctgctgaggcccgcccctcggagctccccctgcctcctcctcctcctcgtcttaggggggtctccctgcaatgcagcgcccccttccgtcctcgggactcctcgctcccacccggaggaggctgcgccagctttaggccccgccctcctcccaatggctccgcccacagactcccttatttcaatggccgcgccctcttttcccgacctctccttttcattggtccctctcactcccaaatgactcctccccttcgttggcccgcccctttcctctggcccctcctctccaagaaaattagctcctccctcgttctccacctgctctgagctgggagcagccagaggcggtgcaagcgcccagctccccagagctccccaacctcggacctcaccgcaggggcgctgggctggagagcaggttcgggcagccgtcgggaataccgaccatcctcttctcccttctaacctgggcttcctttttccctgcctaatctcacctcctgacctgctgggtcctccggtgcagtgggagggccggcttgctccacccgcagccccggggtggcgtagggaagggggctggaagccacgggtacggttaacctggcccttccctccccatctcccctacttccctggaaggtcccattctttctcaccggctgggctcttttctgcttcctgaaggttacctgccttttagggggctcttgtctaaaggatcttcttgctttctcagctatccttggcttctttttcgtcttcctcctcctttaactctttctctcctttcctcccttcacccgttcgtcccaagcccttgggtgcatcccgccctaggcgcacaccagacggccagaatggggaccctagggtggagggaattcccccacgccatctccgcacctgtgcccgcctctcccccctcgaggccccgtcgagggagggaggggcagtagcgggggtcgacaccccccccaaacctctaagtcttccattttctggctctcctcctcattgacgtccctcttcccccctcagaaccccaactctggcctctttcaagggcccgtccgccccgttggacagattttggggggagaggaggtcaccaggaactcgcccacccccccttattagggaaagaggggcgaggtagcacagtgctgtacacggaaccagaatggcccccggggtggggggaggggggcaggggagggacgggggcttttagtttgcatcttaggtgggaggggggaggggggacccgccgcagttaacctgactttacgcagcgatttttaacgaggctggggggaggggggcactggggtggggacagggtggggtggggggcctggctctgttatttaccgtgtatcatatgtaaatatcgacagaaacttcaataaactttatttcaaaca

SEQ ID NO: 804 - DNA, 1599 bp, Homo sapiens
gaaaagggcggcgcgcgcggcggcggcggcagctccccggcagcggcggtggagagcgcagcgcgcagcccggtgcagccctggctttcccctcgctgcgcgcccgcgccccctttcgcgtccgcaaccagaagcccagtgcggcgccaggagccggacccgcgcccgcaccgctcccgggaccgcgaccccggccgcccagagatgaccgcgaccgaagccctcctgcgcgtcctcttgctcctgctggctttcggccacagcacctatggggctgaatgcttcccggcctgcaacccccaaaatggattctgcgaggatgacaatgtttgcaggtgccagcctggctggcagggtcccctttgtgaccagtgcgtgacctctcccggctgccttcacggactctgtggagaacccgggcagtgcatttgcaccgacggctgggacggggagctctgtgatagagatgttcgggcctgctcctcggccccctgtgccaacaacgggacctgcgtgagcctggacgatggcctctatgaatgctcctgtgcccccgggtactcgggaaaggactgccagaaaaaggacgggccctgtgtgatcaacggctccccctgccagcacggaggcacctgcgtggatgatgagggccgggcctcccatgcctcctgcctgtgcccccctggcttctcaggcaatttctgcgagatcgtggccaacagctgcacccccaacccatgcgagaacgacggcgtctgcactgacattgggggcgacttccgctgccggtgcccagccggcttcatcgacaagacctgcagccgcccggtgaccaactgcgccagcagcccgtgccagaacgggggcacctgcctgcagcacacccaggtgagctacgagtgtctgtgcaagcccgagttcacaggtctcacctgtgtcaagaagcgcgcgctgagcccccagcaggtcacccgtctgcccagcggctatgggctggcctaccgcctgacccctggggtgcacgagctgccggtgcagcagccggagcaccgcatcctgaaggtgtccatgaaagagctcaacaagaaaacccctctcctcaccgagggccaggccatctgcttcaccatcctgggcgtgctcaccagcctggtggtgctgggcactgtgggtatcgtcttcctcaacaagtgcgagacctgggtgtccaacctgcgctacaaccacatgctgcggaagaagaagaacctgctgcttcagtacaacagcggggaggacctggccgtcaacatcatcttccccgagaagatcgacatgaccaccttcagcaaggaggccggcgacgaggagatctaagcagcgttcccacagccccctctagattcttggagttccgcagagcttactatacgcggtctgtcctaatctttgtggtgttcgctatctcttgtgtcaaatctggtgaacgctacgcttacatatattgtctttgtgctgctgtgtgacaaacgcaatgcaaaaacaatcctctttctctctcttaatgcatgatacagaataataataagaatttcatctttaaatgagtaaaaaaaaaaa

SEQ ID NO: 805 - DNA, 5358 bp, Homo sapiens
gccccccctccccgcggcgccgcatcttgaatggaaacatggcggtgccggctcggacctgcggcgcctctcggcccggcccagcgcggactgcgcgcccctggcccggctgcggcccccaccctggccccggcacccggcgcccgacgtccgggcccccgcgcccgctgtggctgctgctgccgcttctaccgctgctcgccgcccccggcgcctctgcctacagcttcccccagcagcacacgatgcagcactgggcccggcgtctggagcaggaggtcgacggcgtgatgcggatttttggaggcgtccagcagctccgtgagatttacaaggacaaccggaacctgttcgaggtacaggagaatgagcctcagaagttggtggagaaggtggcaggggacattgagagccttctggacaggaaggtgcaggccctgaagagactggctgatgctgcagagaacttccagaaagcacaccgctggcaggacaacatcaaggaggaagacatcgtgtactatgacgccaaggctgacgctgagctggacgaccctgagagtgaggatgtggaaagggggtctaaggccagcaccctaaggctggacttcatcgaggacccaaacttcaagaacaaggtcaactattcatacgcggctgtacagatccctacggacatctacaaaggctccactgtcatcctcaatgagctcaactggacagaggccctggagaatgtgttcatggaaaaccgcagacaagaccccacactgctgtggcaggtcttcggcagcgccacaggagtcactcgctactacccggccaccccgtggcgagcccccaagaagatcgacctgtacgatgtccgaaggagaccctggtatatccagggggcctcgtcacccaaagacatggtcatcatcgtggatgtgagtggcagtgtgagcggcctgaccctgaagctgatgaagacatctgtctgcgagatgctggacacgctgtctgatgatgactatgtgaatgtggcctcgttcaacgagaaggcacagcctgtgtcatgcttcacacacctggtgcaggccaatgtgcgcaacaagaaggtgttcaaggaagctgtgcagggcatggtggccaagggcaccacaggctacaaggccggctttgagtatgcctttgaccagctgcagaactccaacatcactcgggccaactgcaacaagatgatcatgatgttcacggatggtggtgaggaccgcgtgcaggacgtctttgagaagtacaattggccaaaccggacggtgcgcgtgtttactttctccgtggggcagcataactatgacgtcacaccgctgcagtggatggcctgtgccaacaaaggctactattttgagatcccttccatcggagccatccgcatcaacacacaggaatatctagatgtgttgggcaggcccatggtgctggcaggcaaggaggccaagcaggtgcagtggaccaacgtgtatgaggatgcactgggactggggttggtggtaacagggaccctccctgttttcaacctgacacaggatggccctggggaaaagaagaaccagctgatcctgggcgtgatgggcattgacgtggctctgaatgacatcaagaggctgacccccaactacacgcttggagccaacggctatgtgtttgccattgacctgaacggctacgtgttgctgcaccccaatctcaagccccagaccaccaacttccgggagcctgtgactctggacttcctggatgcggagctagaggatgagaacaaggaagagatccgtcggagcatgattgatggcaacaagggccacaagcagatcagaacgttggtcaagtccctggatgagaggtacatagatgaggtgacacggaactacacctgggtgcctataaggagcactaactacagcctggggctggtgctcccaccctacagcaccttctacctccaagccaatctcagtgaccagatcctgcaggtcaagttgccaatcagcaaactgaaggattttgagttcctgctccccagcagctttgagtctgaaggacacgttttcattgctcccagagagtactgcaaggacctgaatgcctcagacaacaacaccgagttcctgaaaaactttattgagctcatggagaaagtgactccagactccaagcagtgcaacaacttccttctgcacaacctgatcttggacacgggcatcacgcagcagctggtagagcgtgtgtggagggaccaggatctcaacacgtacagcctactggccgtgttcgctgccacagacggtggcatcacccgagtcttccccaacaaggcagctgaggactggacagagaaccctgagcccttcaatgccagcttctaccgccgcagcctggataaccacggttatgtcttcaagcccccacaccaggatgccctgttaaggccgctggagctggagaatgacactgtgggcatcctcgtcagcacagctgtggagctcagcctaggcaggcgcacactgaggccagcagtggtgggcgtcaagctggacctagaggcttgggctgagaagttcaaggtgctagccagcaaccgtacccaccaagaccagcctcagaagtgcggccccaacagccactgtgagatggactgcgaggttaacaatgaggacttactctgtgtcctcattgatgatggaggattcctggtgctgtcaaaccagaaccatcagtgggaccaggtgggcaggttcttcagtgaggtggatgccaacctgatgctggcactctacaataactccttctacacccgcaaggagtcctatgactatcaggcagcctgtgcccctcagccccctggcaacctgggtgctgcaccccggggtgtctttgtgcccaccgttgcagatttccttaacctggcctggtggacctctgctgccgcctggtccctgttccagcagcttctctacggcctcatctaccacagctggttccaagcagaccccgcggaggccgaggggagccccgagacgcgcgagagcagctgcgtcatgaaacagacccagtactacttcggctcggtaaacgcctcctacaacgccatcatcgactgcggaaactgctccaggctgttccacgcgcagagactgaccaacaccaatcttctctttgtggtggccgagaagccgctgtgcagccagtgcgaggctggccggctgctgcagaaggagacgcactcggacggcccggagcagtgtgagctagtgcagagaccgcgataccggagaggcccgcacatctgcttcgactacaacgcgacagaagatacctcagactgtggccgcggggcctccttcccgccgtcgctgggcgtcctggtctccctgcaactgctgctcctcctgggcctgccgccccggccgcagcctcaagtcctcgtccacgcctctcgccgcctctgagcaccctgccccaccccacctccactcccacctcacccggcctcttcgcctttcccaccctcctgccccacactccccgccttagagcctcgtccctccctcactgaaggacctgagctggccaggccctgagagtctggtctgcgccttgggatggggagtcccaaagcgggacgccgcaggtgtttggcacccaaatcacatctcacctccgaactgttcaagtgtccccagacccttcttgcctgctgggctccccccagtgggatgggacagggaggccacacgcactggtgccaaaaccaggcctctgctgccgcccttcctggaggctgcctatgttgggggggaccctgcctcagctgacccggcctctctgccccacccaagcccaaacttggtttctgtgagaatagtggaggaaggtgagatggccagtttgaagcctgtgcctcccagcttaaatcctagcaggagagaggctctggggcagcccccatgggctcctgcccctttcaggcctacagccacatccccaagcccaccaggtgtcaggatagtcacagtgataccagttcagacactaccccatatacacctggaacattgaggatggaaactggactcacattcgacataccccactgggcacacgcacaaacacacacactatggggtggggtgggtgtaggggcttacaaagccttacacagggcgaggggttggtgggagggttggcacctgcacactccatctcctgctcaccacctgcctctaatctgagctgcagcctggctggtcctcccatttctaaagctgaatgtcaaacagtgccaaatgctggggcagggggtgaagaaccctctgtcccacccctagccaccagtgtcctccaagtgccccctcacctctccaggtgctcattgtaaccatttctcactagtgtcaggcccccagtgggaccacatgccactgcctgcacctttcggcagaggaacccccaccagacatcaccctttgccttagcaggggtgactttgtctctcctggctgggccatccttccgccaatctggcccttacacactcaggcctgtgcccactccctatctccttcccacccctacacacacactccctgcttgcaggaggccaaactgtccctcccttgctgaacacacacacacacacacacacacaggtggggactgggcacagctcttcacaccattcattctggtcatttcccccaaaggcatcccagcctgggggccagtggggaactgagggcaaggggatatagtgatggggctcagatggactgggaggagggggagggtgatgcattaattaatggcttcgttaattaatgtcatgttgcttgtcgctttctcagtgtgtgtgtgtggtccatgcccactgctggtgccagggtgggtgtccatgtgcacccggcctggatgccagctgtgtccttcgggggcgtgcgtgtaactgtagtgtagtcaggtgctcaatggagaatataaacatatacagaaaaatatatattttaagtttaaaaaacagaaaaacagacaaaacaatccccatcaggtagctgtctaacccccagctgggtctaatccttctcattacccacccgacctggctgcccctcaccttgggctgggggactggggggccatttccttttctctgccctttttttgttgttctattttgtacagacaagttggaaaaacaacagcgacaaaaaagtcaagaaactttgtaaaatatcgtgtgtgtgattccttgtaaaatattttcaaatggtttattacagaagatcagttattaaataatgttcatattttcacttcaaa

SEQ ID NO: 806 - DNA, 1837 bp, Homo sapiens
aaactgtgagtttggggattgttgtgtccactaaccggactcagaagggacttccctgctcggctggctttcggtttctctgctcacctccggataaatcacggggtctcccgcgccgctcatggcgcctcccgtccgtctcgagcgtccctttccttcccggcgctttcctgggttgcttctggcggccctggtgttgctgctgtcctccttctccgatcaatgcaatgtcccggaatggcttccatttgccaggcctaccaacctaactgatgactttgagtttcccattgggacatatctgaactatgaatgccgccctggttattccggaagaccgttttctatcatctgcctaaaaaactcagtctggacaagtgctaaggacaagtgcaaacgtaaatcatgtcgtaatcctccagatcctgtgaatggcatggcacatgtgatcaaagacatccagttcagatcccaaattaaatattcttgtcctaaaggataccgactcattggttcctcgtctgccacatgcatcatctcaggcaacactgtcatttgggataataaaacacctgtttgtgacagaattatttgtgggctaccccccaccatcgccaatggagatttcactagcatcagcagagagtattttcactatggatcagtggtgacctaccactgcaatcttggaagcagagggaaaaaggtgtttgagcttgtgggtgagccctccatatactgcaccagcaaagatgatcaagtgggcatctggagtggcccagcccctcagtgcattatacctaacaaatgcacgcctccaaatgtggaaaatggaatattggtatctgacaacagaagcttattttccttaaatgaagttgtggagtttaggtgtcagcctggctttggcatgaaagggccctcccatgtgaagtgccaggccctgaacaaatgggagccagagttaccaagctgctccagggtatgtcagccacctccagatgtcctgcatgctgagcgtacccaaagggacaaggacaacttttcacccgggcaggaagtgttctacagctgtgagcccggctacgacctcagaggatctacgtatttgcactgcacaccccagggagactggagccctgcagcccccagatgtgaagtgaaatcctgtgatgacttcctgggccaacttcctaatggccatgtgctatttccacttaatctccagcttggagcaaaagtggattttgtttgtgatgaaggatttcaattaaaaggcagctctgctagttactgtgttttggctggaatggaaagcctttggaatagcagtgttccagtgtgtgaacgtaaatcatgtgaaactcctccagttccagtgaatggcatggtgcatgtgatcacagacatccatgttggatccagaatcaactattcttgtactacagggcaccgactcattggtcactcatctgctgaatgtatcctctcgggcaatactgcccattggagcatgaagccaccaatttgtcaacaaatcttttgtccaaatcctccagctatccttaatgggagacacacaggaactccccttggagatattccctatggaaaagaagtatcttacacatgtgacccccacccagacagagggatgaccttcaacctcattggggagagcaccatccgccgcacaagtgaacctcatgggaatggggtttggagcagccctgcccctcgctgtgaacttcctgttggtgctggttcacatgatgctcttatagttggtaagttttatgaagtgtttgctgaggaattctgtcatctttaacagtaa

SEQ ID NO: 807 - DNA, 3516 bp, Homo sapiens
aagagcccgcggtggcgctgccaggggatgctagcccgagagcgagcagaggagcagcgcacccgcacgagccttggaccctttggaaccgaaagcacgcccgtcctcagagtcccgtcctcaaagtcccatcctcgccatggcacccggagagaagatcaaagccaaaatcaagaagaatctgcccgtgacgggccctcaggcgccgaccattaaagagctgatgcggtggtactgcctcaacaccaacacccatggctgtcgccgcatcgtggtgtcccgcggccgtctgcgccgcctcctctggatcgggttcacactgactgccgtggccctcatcctctggcagtgcgccctcctcgtcttctccttctatactgtctcagtttccatcaaagtccacttccggaagctggattttcctgcagtcaccatctgcaacatcaacccctacaagtacagcaccgttcgccaccttctagctgacttggaacaggagaccagagaggccctgaagtccctgtatggctttccagagtcccggaagcgccgagaggcggagtcctggaactccgtctcagagggaaagcagcctagattctcccaccggattccgctgctgatctttgatcaggatgagaagggcaaggccagggacttcttcacagggaggaagcggaaagtcggcggtagcatcattcacaaggcttcaaatgtcatgcacatcgagtccaagcaagtggtgggattccaactgtgctcaaatgacacctccgactgtgccacctacaccttcagctcgggaatcaatgccattcaggagtggtataagctacactacatgaacatcatggcacaggtgcctctggagaagaaaatcaacatgagctattctgctgaggagctgctggtgacctgcttctttgatggagtgtcctgtgatgccaggaatttcacgcttttccaccacccgatgcatgggaattgctatactttcaacaacagagaaaatgagaccattctcagcacctccatggggggcagcgaatatgggctgcaagtcattttgtacataaacgaagaggaatacaacccattcctcgtgtcctccactggagctaaggtgatcatccatcggcaggatgagtatcccttcgtcgaagatgtgggaacagagattgagacagcaatggtcacctctataggaatgcacctgacagagtccttcaagctgagtgagccctacagtcagtgcacggaggacgggagtgacgtgccaatcaggaacatctacaacgctgcctactcgctccagatctgccttcattcatgcttccagacaaagatggtggagaaatgtgggtgtgcccagtacagccagcctctacctcctgcagccaactactgcaactaccagcagcaccccaactggatgtattgttactaccaactgcatcgagcctttgtccaggaagagctgggctgccagtctgtgtgcaaggaagcctgcagctttaaagagtggacactaaccacaagcctggcacaatggccatctgtggtttcggagaagtggttgctgcctgttctcacttgggaccaaggccggcaagtaaacaaaaagctcaacaagacagacttggccaaactcttgatattctacaaagacctgaaccagagatccatcatggagagcccagccaacagtattgagatgcttctgtccaacttcggtggccagctgggcctgtggatgagctgctctgttgtctgcgtcatcgagatcatcgaggtcttcttcattgacttcttctctatcattgcccgccgccagtggcagaaagccaaggagtggtgggcctggaaacaggctcccccatgtccagaagctccccgtagcccacagggccaggacaatccagccctggatatagacgatgacctacccactttcaactctgctttgcacctgcctccagccctaggaacccaagtgcccggcacaccgccccccaaatacaataccttgcgcttggagagggccttttccaaccagctcacagatacccagatgctggatgagctctgaggcagggttgagaagacagatctagtcaggaccaccagccatggtctaaggacatggatcgggtgcccccagacgtgtgcacaggggaccctctgccccactctgggcttttcagatactctgaccaaaaagcctgctttaaaccgcaagatggggcctgggcatgcgcaggaggagccatcgggtactacgcagcaacactcacaactgtccaggctgagataaatcccgggacctgaactattagcacgtcactagagactgggagccgaggcagtggtgctggcccaagtgaaggccagagtgaggactgatgcagctctttacgggtcttgagagggaaggactcttccaaagccccaaagccgagggtttcacccacactgccagcctgggttggggcccaaggatgtgaccttgagtgtcaaggctggacagctactgccagatgccaaagataggagaaagtgccagccctgaagctggagccgtttgtgaataaactgttcttcatcattgacactggagaaaggtgtcctccatgccctcaggcagcagagaactggcccagagcccttggagtgttggtggagatcagagtgccgtggtggaggtctgggactatgtcagagtgtcctcactttggggcatgggtgggtccaggagatggatttagttattcaattttgtggatgaataaattgaggcacagaaagattaagttaccggcccaaggtgacacagtgaggaggtggcagagctaggatttgaacccagacaatctgacttcatgattttgcatccaattcgtgtctgtgccttttaaagggtgaggtctgtgtcactttgggtggggagggggagcatggtgggccatgctctgggcagctgttccaagacagagctgacccttccattaccaatggcctgtccctcaccaacaagccaactgccacagatgacccacttcataccacattcacatctttccacctgaaatggctaacaggtattaaatccttggttggtgtttaaagccaacccaagaacagggtgttaggtactgttttaagcacctagataggttagcataggggactgcaaatggtgttccgcaaagcaaatcctgtttttgaccatgaactaagaattttattttattttattttttattttttgtagaaataggatctcactatgttgcccaggctgttcttgaactcctggcctcaaatgatcttcccacttcagcctcccaaagtgcagggattacaggcacaagccaccgtgcccagccaagaatttttatttttgcttttaaatagcaaaagaagaagattctgtgactcatgaaaatgatatgagattcgaattccagtgtctataaataaagttttattggtacacagcaaaaaaaaaaaaaaaaa

SEQ ID NO: 808 - DNA, 4774 bp, Homo sapiens
acccgcgcgaggtaggcgctctggtgcttgcggaggacgcttccttcctcagatgcaccgatcttcccgatactgcctttggagcggctagattgctagccttggctgctccattggcctgccttgccccttacctgccgattgcatatgaactcttcttctgtctgtacatcgttgtcgtcggagtcgtcgcgatcgtcgtggcgctcgtgtgatggccttcgtccgtttagagtagtgtagttagttaggggccaacgaagaagaaagaagacgcgattagtgcagagatgctggaggtggtcagttactaagctagagtaagatagcggagcgaaaagagccaaacctagccggggggcgcacggtcacccaaaggaggtcgactcgccggcgcttcctatcgcgccgagctccctccattcctctccctccgccgaggcgcgaggttgcggcgcgcagcgcagcgcagctcagcgcaccgactgccgcgggctccgctgggcgattgcagccgagtccgtttctcgtctagctgccgccgcggcgaccgctgcctggtcttcctcccggacgctagtgggttatcagctaacacccgcgagcatctataacataggccaactgacgccatccttcaaaaacaactaaaggatgatatgatgaacctagcctgttaatttcgtcttctcaattttaaactttggttgcttaagactgaagcaatcatggtgaacctgaggaatgcggtgcattcattccttgtgcacctaattggcctattggtttggcaatgtgatatttctgtgagcccagtagcagctatagtaactgacattttcaatacctccgatggtggacgcttcaaattcccagacggggtacaaaactggccagcactttcaatcgtcatcataataatcatgacaataggtggcaacatccttgtgatcatggcagtaagcatggaaaagaaactgcacaatgccaccaattacttcttaatgtccctagccattgctgatatgctagtgggactacttgtcatgcccctgtctctcctggcaatcctttatgattatgtctggccactacctagatatttgtgccccgtctggatttctttagatgttttattttcaacagcgtccatcatgcacctctgcgctatatcgctggatcggtatgtagcaatacgtaatcctattgagcatagccgtttcaattcgcggactaaggccatcatgaagattgctattgtttgggcaatttctataggtgtatcagttcctatccctgtgattggactgagggacgaagaaaaggtgttcgtgaacaacacgacgtgcgtgctcaacgacccaaatttcgttcttattgggtccttcgtagctttcttcataccgctgacgattatggtgattacgtattgcctgaccatctacgttctgcgccgacaagctttgatgttactgcacggccacaccgaggaaccgcctggactaagtctggatttcctgaagtgctgcaagaggaatacggccgaggaagagaactctgcaaaccctaaccaagaccagaacgcacgccgaagaaagaagaaggagagacgtcctaggggcaccatgcaggctatcaacaatgaaagaaaagcttcgaaagtccttgggattgttttctttgtgtttctgatcatgtggtgcccatttttcattaccaatattctgtctgttctttgtgagaagtcctgtaaccaaaagctcatggaaaagcttctgaatgtgtttgtttggattggctatgtttgttcaggaatcaatcctctggtgtatactctgttcaacaaaatttaccgaagggcattctccaactatttgcgttgcaattataaggtagagaaaaagcctcctgtcaggcagattccaagagttgccgccactgctttgtctgggagggagcttaatgttaacatttatcggcataccaatgaaccggtgatcgagaaagccagtgacaatgagcccggtatagagatgcaagttgagaatttagagttaccagtaaatccctccagtgtggttagcgaaaggattagcagtgtgtgagaaagaacagcacagtcttttcctacggtacaagctacatatgtaggaaaattttcttctttaatttttctgttggtcttaactaatgtaaatattgctgtctgaaaaagtgtttttacatatagctttgcaaccttgtactttacaatcatgcctacattagtgagatttagggttctatatttactgtttataataggtggagactaacttattttgattgtttgatgaataaaatgtttatttttgctctccctcccttctttccttccttttttcctttcttccttcctttctctctttcttttgtgcatatggcaacgttcatgttcatctcaggtggcatttgcaggtgaccagaatgaggcacatgacagtggttatatttcaaccacacctaaattaacaaattcagtggacatttgttctgggttaacagtaaatatacactttacattcttgctctgctcatctacacatataaacacagtaagataggttctgctttctgatacatctgtcagtgagtcagaggcagaacctagtcttgttgttcatataggggcaaaaatttgacattgtcagaatgttgtgttggtatttactgcaatgtctgtccctaaacatagtggtattttaacatagcagctggttaaccgggactacagaagtggaaggataatgagatgtaatacaccaaatagcttttcacttcttaaggacagtgttcaaattctgattattacaacaagcaaactgaaattagtgttttcattctggtccttagtaaattcctaattctatgattaaactgggaaatgagatcccagagttatttcccaacccaggattcaacatcaattgggttttgatctcagcatcctggaaatttgtgtgcttcacacaaagtgaaattagtattttgagccttattaaaatattttcttaattatggtacctctgtctataggacttaatttagcagtccatttttgagtaaaacttgtattggaagtatagatggtagaaactttggaagttttacttgattaaggactacagaattgggcccttagaatgtgaaaaaaaaaagtaattaaaaagacacttttaccgaactcgggattacagaaacacggagtttccatttggattttaaacaaaatttatgtcattttcagatccttccaaactctctagtgcaggaaaaggctgcagctaatttgtgaaagtggcaagctcttcattgcactgcagttatttaccagaagtttaaatctttgttaaaatatagtgttgtgttacaataagtgttggccatcatttcattcgtgggcctgctgctctctaagaattcagtagcattttaatagtttctaaaccatgaaaagttttcaagcattgctaaagtcaggccattcagtctatgctgtgtgcagagtatacaagtgtttctagtaacagtatttccatacgtgcccatttcacacaactgtggataaattttggaagaattcatgatgctagttcttacgcttgacagttacttacacacctgagaatgtgcctctcagtatcttaaaattggttaatgaaaaatctgaatttctaaaacccttggtctgtgttctcaacacacagtatagataaatccaatagtctgccacaagggcagtggaagagctgctgtatttgaggaaactcatacagtctctatttgatttgcaacactgccaaacatcagtcaattgcttgagcatgcccaaatataacatgaaagtcaagtctacctgccttgcctgttaggtctgttgaagtgcatgttaaaataattatatgaagcagaatgagatgatttaattcttaccgaaatgaaaatggctgaagaaacacagcatgcatttagcatgagttctgcacatacagatggtgtcctgcatgtatgccatgtatgttgcatgaatccatcgatttgtattaatgtagggcagaatagctgatagaagaaggactgaagaaaatccttcagcaatccttaaaaagaccatgcattcagatctgaagtagtgtgagtgttagaaaaaactggaaacatctgatttctgaactatcagggcaagctcatagcacatgttttacaaagaaacaaaatataaatcacagatttccaaaagtactagcaataagttgaatgataatagctcacagcacatttgttaatgattcttgtgtcatcaagtagtagtacttaatagtacccaacctggtaattatcctcaagttgtgtgctattcgtaagttctgtgcagtttggtatgaaacaaatatactcatttggatataaatcttacccttcaatgttaaatctacaaacttttataaatgttttaaagaagtccatgtgataattgtaaaggtgatgaatttaccatcaaacaaatcattttgatgtattattatatatgtatatctgtgtaagacacgtgcaacagactgccttatattattttctgtaattcttctcctttgtcaaatggtattttttgtgaatggttgcaaagtgttgtcttattcctaattcctgtatgttatccactacaggttttatgagacttcctattaatttattaaatttattaaatgttgaaaaaaaaaaaaaaaaaaaaaaa

SEQ ID NO: 809 - DNA, 1738 bp, Homo sapiens
aaactttcctttggctctggacgcgtcgcaggggtcgctggagaggaggcgctccgcccgcccgccgcgtcctccgctgcttctccgcgcccggctggagcccggcgcccggtcgccccgtcgcgctcgaccccgagggcatgcggcagccgcaggggcccccgctcccgggctcggcggcgcgggtgaacgtgagcggatgttcacttctccacaatgaatgagtgtcactatgacaagcacatggactttttttataataggagcaacactgatactgtcgatgactggacaggaacaaagcttgtgattgttttgtgtgttgggacgtttttctgcctgtttatttttttttctaattctctggtcatcgcggcagtgatcaaaaacagaaaatttcatttccccttctactacctgttggctaatttagctgctgccgatttcttcgctggaattgcctatgtattcctgatgtttaacacaggcccagtttcaaaaactttgactgtcaaccgctggtttctccgtcaggggcttctggacagtagcttgactgcttccctcaccaacttgctggttatcgccgtggagaggcacatgtcaatcatgaggatgcgggtccatagcaacctgaccaaaaagagggtgacactgctcattttgcttgtctgggccatcgccatttttatgggggcggtccccacactgggctggaattgcctctgcaacatctctgcctgctcttccctggcccccatttacagcaggagttaccttgttttctggacagtgtccaacctcatggccttcctcatcatggttgtggtgtacctgcggatctacgtgtacgtcaagaggaaaaccaacgtcttgtctccgcatacaagtgggtccatcagccgccggaggacacccatgaagctaatgaagacggtgatgactgtcttaggggcgtttgtggtatgctggaccccgggcctggtggttctgctcctcgacggcctgaactgcaggcagtgtggcgtgcagcatgtgaaaaggtggttcctgctgctggcgctgctcaactccgtcgtgaaccccatcatctactcctacaaggacgaggacatgtatggcaccatgaagaagatgatctgctgcttctctcaggagaacccagagaggcgtccctctcgcatcccctccacagtcctcagcaggagtgacacaggcagccagtacatagaggatagtattagccaaggtgcagtctgcaataaaagcacttcctaaactctggatgcctctcggcccacccaggcctcctctgggaaaagagctgttaagaatgattacctgtctctaacaaagcccatgtacagtgttatttgaggtctccattaatcactgctagatttctttaaaaaattttttttcatagtttaaaagcatgggcagtaaagagaggacctgctgcatttagagaaagcacagaaacgggagaggttcggcgggtccctgcttgtcctatgaactgctcagagctcctgtcagtccagctgggccttctgggttctggcaccatttcgtagccattctctttgtattttaaaaggacgttatgaaagggcttagaccaaaataaatcataatgttacttgagccaccttatatagctgcttggagagtctatgtagttctttctgcatgcattaaaaatgtttagaaatgcttcaaaaaaaaaaaaaaaaaa

SEQ ID NO: 810 - DNA, 3176 bp, Homo sapiens
gggtagtgagccggctgagaggcatggagacgcaggaacttcggggggccctggctcttctcctcctttgctttttcacatctgccagtcaggatctgcaggtaattgacctgctgactgtgggcgagtctcggcagatggtagctgtggcagagaagatccggacagccttgctcactgctggggacatctacctcttatccaccttccgcctgccccccaagcagggtggtgtcctctttggcctctattctcgccaagacaacactcgatggctggaggcctctgttgtaggcaagatcaacaaagtactggtgcgataccagcgggaggatggcaaagtccacgccgtgaacctacagcaagcgggcctggctgatgggcgcacacacacagttctcctgcgactccgaggtccctccagacccagccctgccctacatctctacgtggactgcaaactgggtgaccaacatgcaggccttccagcactggcccccattcctccagcggaggtcgatgggctggagattaggactggacagaaggcgtatttgaggatgcagggctttgtggaatctatgaaaattattctgggtgggtccatggcccgggtaggagccctgagtgagtgtccattccaaggggacgagtccatccacagtgcagtgaccaatgcactgcactccattctaggggagcagaccaaggcgctggtcacccaactcaccctcttcaaccagatcctggtggagctgcgggatgatatacgagaccaggtgaaggaaatgtccctgatccgaaacaccattatggagtgtcaggtgtgcggcttccatgagcagcgttcccactgcagccccaatccctgcttccgaggtgtggactgcatggaagtgtacgagtacccaggctaccgctgtgggccctgcccccctggcctgcagggcaacggcacccactgcagtgacatcaatgagtgtgctcacgctgacccctgtttcccgggctccagctgcatcaacaccatgcccggcttccactgtgaggcctgtcctcgagggtacaagggcacacaggtgtctggtgtgggcattgactatgcccgggccagcaaacaggtctgcaatgacatcgatgaatgcaacgatggcaacaatggtggctgtgacccaaactccatctgcaccaacactgtgggctctttcaagtgtggtccctgccgcctgggtttcctgggcaaccagagccagggctgcctcccagcccggacctgccacagcccagcccacagcccctgccacatccatgctcactgtctctttgaacgcaatggtgcagtgtcctgccagtgtaacgtgggctgggctgggaatgggaacgtgtgtgggactgacacagacatcgatggctacccagaccaagcactgccctgcatggacaacaacaaacactgcaaacaggacaactgccttttgacacccaactctgggcaggaagatgctgataatgatggtgtgggggaccagtgtgatgatgatgctgatggggatgggatcaagaatgttgaggacaactgccggctgttccccaacaaagaccagcagaactcagatacagattcatttggtgatgcctgtgacaattgccccaacgttcccaacaatgaccagaaggacacagatggcaatggggaaggagatgcctgtgacaacgacgtggatggggatggcatccccaatggattggacaattgccctaaagtccccaacccactacagacagacagggatgaggacggggtgggagatgcttgcgacagctgccctgaaatgagcaatcctacccagacagatgcagacagcgacctggtgggggatgtctgtgatactaatgaagacagcgatggggatgggcatcaggacaccaaggacaactgcccacagctgccaaatagctcccagctggactctgataacgatggacttggagatgagtgtgatggggatgatgacaatgatggcatcccagattatgtgcctcctggtcccgataactgccgcctggtacccaatcccaatcagaaggactcagatggcaatggcgttggtgatgtgtgtgaggatgactttgacaatgatgctgtggtcgaccccctggatgtgtgtcctgaaagtgcagaggtaacgcttacggattttcgggcctatcagaccgtcgtcctggatcctgagggtgatgctcagattgacccaaactgggttgtgctcaaccagggcatggaaatcgttcagaccatgaacagtgaccctggcttggcagttggatacacggccttcaatggtgtggactttgaaggcaccttccatgtgaacacagtgactgatgatgactacgcaggctttctcttcagttatcaagacagtggccgcttctacgtagtcatgtggaagcagaccgagcagacctactggcaggctacacccttccgggcggttgcccagcccgggctgcagctcaaggcagtgacatcagtgtctggcccaggtgagcacctccgaaatgccctgtggcatactggccacacccctgatcaggtacgactgctgtggacagacccacgaaatgtgggctggcgggacaagacctcctatcgctggcagcttctgcaccggcctcaagttggctacattcgggtgaagctctatgagggaccccagcttgtggcggattctggggtgatcattgacacatccatgcgaggggggcgtcttggtgtattctgcttctcccaagaaaacataatttggtccaatctccagtatcgatgcaatgacacagtgcctgaggactttgagccattccggaggcagctgctccagggaagggtgtgaggaggaggccaccagattcagaattcagaattttagaccctttggccttggggtccatcctggagaccctgaggtctaagctacagcccctcagccaaccacagacccttctctggctcccaaaaggagttcagtcccagaggggtggtcaccccacccttcaggggatgagaagttttcaaggggtattactcaggcactaaccccaggaaagatgacagcacattgccataaagttttggttgttttctaaaaaaaaaaaaaaaaaaaaaaaaaaaaaaa

SEQ ID NO: 811 - DNA, 3854 bp, Homo sapiens; identical to SEQ ID NO: 230

SEQ ID NO: 812 - DNA, 10796 bp, Homo sapiens
atgtgggggcttttgatctggacactgctagctctgcatcagatccgcgcggccagagcccaagatgatgtgtccccgtatttcaagacagagcctgtgcggacacaggtgcacttggaaggaaaccgcctggtgcttacatgcatggccgagggcagctggccactggagttcaagtggctccacaacaacagggagctgaccaagttctccctggaatacagatacatgatcaccagcctggaccgcacccacgctggcttttaccgttgcatcgtgcggaaccgaatgggggccctgctgcagcggcaaaccgaggtccaggtggcctacatggggagctttgaggaaggtgagaagcaccagagcgtctcccacggagaagcagctgtcatccgtgccccgcgcatcgccagcttcccccagccacaggtgacctggttccgggacggccgcaagatcccgcccagcagccgcatagccatcacgctggagaacacccttgtcatcctgtcaacggtggcccctgacgcaggtcgctactatgtgcaggctgttaacgacaaaaacggggataacaagaccagccagcccatcacgctcaccgtggagaatgtaggggggcctgcagaccccatcgcacccaccatcatcatcccacctaaaaacaccagcgtggtggccggcacctcagaggttaccttggagtgtgtggccaatgccaggcccctgatcaagctacatatcatttggaagaaggacggggtattgctgtcgggcggcatcagtgaccacaaccgccggctcaccatccccaaccccaccggcagtgacgccggctactacgagtgtgaggctgtcctgcgcagcagcagcgtcccctctgttgtccggggcgcctacctctcagtgctggaaccgcctcagtttgtcaaggagccagaaagacacatcactgcggagatggagaaggtggtggacatcccctgtcaggccaaaggtgtgccgccgccctccatcacctggtacaaggacgcagccgtggtggaggtggagaagttgacccgcttccggcagcgcaacgacgggggcctgcagatcagcggcctggtgcccgatgataccggcatgttccagtgcttcgcccgcaatgcagccggcgaggtgcaaacttccacctacctggctgtcaccagcatcgcccctaacatcaccagaggccccctggacagcacggtgatcgatggcatgtcagtggtgctagcatgtgagacctcgggggcgccccgaccagctatcacttggcagaaaggggagcgcatcttggccagtggctctgtgcagctgcctcgcttcacacccctggagtcgggcagcctcctcatcagccccacacacatctccgatgcggggacctacacctgcctggccaccaactctcggggggtcgatgaggcctcagcagacctagtcgtttgggctcggacccgcatcaccaagcccccccaggatcagagtgtcatcaagggcacccaggcctccatggtgtgcggagtgacccacgacccccgagtaaccatcaggtacatctgggagaaggacggggccaccctgggcacggagagccatcctcgtatccgcctggacagaaacggctccctgcacatctcacagacgtggtcgggagacatcggcacgtacacctgccgggtgatctcagcaggaggcaacgactctcgcagtgcccacctgcgagtcaggcaactgccccacgcgcccgagcacccagtggccactctcagcaccgtggaaaggcgagccatcaacctgacgtggaccaagccctttgatggcaacagccccctgatccgctacattctggagatgtcggagaacaatgccccctggactgtactcctggccagtgtggaccccaaagctacctcagtgacagtcaagggcctggttcctgcacgctcctaccagttccgtctttgtgccgtcaacgacgtggggaaaggacagttcagcaaagacaccgagagggtctccctccccgaggagccccccacggcccctccacagaacgtcatcgccagcggtcgaaccaaccagtccatcatgatccagtggcagccgcctcctgagagccaccagaatggaattctcaagggttacatcatcaggtactgcctggccgggctgcccgtggggtaccagtttaagaacatcacggatgctgatgtgaacaacctgctgctggaggatctcatcatttggaccaactacgagatcgaggtggctgcttacaacagcgctgggctgggggtctacagcagtaaagtcaccgagtggacgctgcagggagttcccacggtccctccgggcaatgtgcacgcggaagccaccaattccacgaccatccgcttcacctggaacgcccccagcccccagttcatcaacggcatcaaccagggctacaagctgatcgcctgggagccggaacaggaagaggaggttaccatggtgaccgcccggcctaactttcaagacagcatccacgtgggcttcgtgtctggcctgaagaagttcaccgagtacttcacctcagtgctgtgtttcaccacccccggggacgggccacgcagcaccccgcagctggtgcgcacccatgaggatgtgcctgggcccgtgggacacctgagcttcagtgagatcctggacacatcgctgaaggtcagctggcaagagccgggagagaaaaatggcatcctcacagggtaccggatctcctgggaggagtacaatcgaaccaacacccgtgtgacccactacctgcccaacgtgaccctggagtaccgtgtcacgggcctcaccgcgctcaccacctacaccatcgaggtggccgccatgacctcaaagggccagggccaagtgtccgcctccaccatctcctctggggtgcccccagaactcccagggccccccaccaacctgggcatttccaacatcggcccccgctctgtgaccttgcagttcaggccaggctacgatgggaaaacctccatctcccgctggctggtggaagcccaggtaggcgtggttggggagggagaggagtggttgctgatccaccagctctccaatgagcccgatgcccgctccatggaggtgcccgacctcaaccccttcacctgctacagcttccgcatgcgccaggtgaacatcgtgggcaccagcccccccagtcagccttctagaaagatccagaccctgcaggcaccccctgacatggccccagccaatgtgtctctgcgcacagccagtgagaccagcctgtggctgcgctggatgcctctcccggagatggaatacaatgggaaccctgagtccgtgggctataagatcaagtacagccggtcagacgggcatggcaagacgctgagccacgtggtgcaggaccgtgtggagcgggactacaccatcgaggacctggaggagtggacagagtaccgcgtccaggtccaggccttcaacgccatcgggagcgggccctggagccagacggtggtgggcaggacccgggagtcagttccctcttccggccccaccaatgtgtctgcactggccaccacctccagcagcatgctggtgcgctggagcgaggtccccgaggctgatcgcaacgggctcgtgctgggctataaggtgatgtataaggagaaggactcggacacccagccccgattctggctggtggaaggcaactcgtctcgcagtgcccagctcaccggcttgggcaaatacgtgctctatgaagtccaggtgctggccttcacacgcatcggggacggcagccccagccaccctcccatcctggagcggacgctggatgatgtcccaggaccacccatgggcatcctgttcccagaggtgcggaccacgtctgtgcggctgatctggcagccccctgccgcccccaatggcatcattcttgcttaccagatcacacaccggctcaacaccaccacggccaacaccgccactgtggaggtgctggcacccagcgcccggcagtacacagccacgggcctcaagccagagtctgtctacctgttccgcatcacggcccagacccgcaagggctggggagaagctgccgaggccttggtggtgaccaccgagaagagagaccgtccgcagccccccagcaggccgatggtgcagcaggaggatgtgagagcacgcagcgtgctgctgtcctgggagccagggagcgacgggctctcccctgtgcgctactacaccatccagacccgcgagctgcccagcggcaggtgggcactgcactcggcctccgtgagccacaatgcctccagcttcattgtggacaggctgaagcccttcacgtcctacaagttccgagtgaaggcgaccaatgacattggcgacagcgagttcagcgaggagtcggagtcactgaccaccctgcaggctgcccccgatgaagcacccaccatcctctccgtgacgccccacaccaccacctccgtgctaatccgatggcagccgccagcagaggacaagatcaatggcatcctcctgggcttccggatccgataccgggagctgctctatgaaggactgaggggcttcacgcttcgaggcatcaacaacccaggggccacatgggctgagcttacctccatgtactccatgcggaacctgagccggcccagcctcacgcagtacgagctggacaacctgaacaagcacaggcggtacgagatacggatgagcgtgtacaacgctgtgggtgaggggccctccagccccccgcaggaggtctttgttggggaggcagtgcccacagcagcacctcgtaacgtggtcgtccacggcgccacggccacacagctggacgtgacttgggagccacctccgctggacagccagaatggagacatccaggggtacaagatttatttctgggaagcccagcgggggaacctcacagagcgagtgaagacgcttttcctggctgagaacagcgtgaagctcaagaacttgactggctacacggcctacatggtcagcgtggccgccttcaacgccgctggggatgggcctcggagcacccccacccaaggccagacccagcaagcagcccccagcgctcccagctcggtcaagttcagtgagctgaccacaacctcagtgaatgtgtcctgggaagccccgcagttccccaatggcatcctggagggctacaggctggtgtacgagccctgcagccccgtggatggagtcagcaagatcgtgaccgtggacgtgaaggggaacagccccctgtggctgaaggtgaaggacctggcggagggggtgacctacaggttccgcatcagagccaagaccttcacctacgggccggagatcgaagccaacgtcaccacgggccccggagaaggtgccccaggaccgcctggcgtgcccatcatcgtgcggtacagctctgccatcgccattcactggtccagcggagacccgggcaaagggcccatcacccgctacgtcatcgaggccagaccttcagacgagggactatgggacatcctcatcaaagacatccccaaggaggtgagctcctacacgttcagcatggacatcctgaagccgggcgtgagctatgacttccgggtcatcgcggtcaacgactatggtttcggcacccccagcagcccctcccagtctgtgccagcccagaaagccaaccccttctatgaggagtggtggttcttggtggtcattgccctggtcggcctcatcttcatcctgcttctggtcttcgtgctcatcatccggggccagagcaagaagtacgccaagaagacagactcggggaacagtgccaagtctggagccctaggccacagcgagatgatgagcttggatgaaagcagcttccctgccctggaactcaacaacaggcggctctccgtcaagaactctttctgccgaaagaacggcctgtacaccaggtctccccccaggcccagcccaggcagcctgcactactcggatgaggatgtcaccaaatacaacgacctcatccctgcagagagcagcagcctgacggagaagccctcagaaatctccgactctcagggaagtgacagcgagtacgaggtcgactcaaaccaccagaaggcccactcctttgtcaaccactacatcagtgaccccacatactacaactcgtggcggcgacagcagaagggcatctcgagggcacaggcctacagctacacggagagcgactcgggtgagccagaccacaccaccgtcaccaacagcaccagcacccagcagggcagcctctttcggcccaaggccagtcggactccaacgccccagaacccccctaaccccccaagtcagcagagcaccctctaccgtccccccagcagcctggccccaggctcccgggctcccatagcaggattttcatcatttgtttgacatcagaagaggaaaaagcagaaagagaaatggcaccaaactcctccttcacccctcctctcactgcctgccagaaaacaaaaacaccaagaaaccaagtcaacttttcacctcctgagtttatttttccagagattccagggccagcaaagccggcgttcagaaggagggagaaaaccgtgagaggatgtgtgtggccagcagctcttcagctttgagatggtggggttcactgctcccttgggaattacacggagctggggaagtggctgtgtcactgctatggacacggagtggggcgggcatctggagagagagagggagcggaggctaaggactggaggccgccaggcaggcgtggccgagggaagaaaaagcttctggatgtccagccagctgcccccttccagcccctccaggacccctggacccactgccgctgctctctgcaaaaagaatgggcatcccggaggccacgcctatcttctctctctgctcctccttccctccatgcaccatcactgtggctggcaggcatcggacagcctcatccagaccccctgccctgtcttggcaacctctactgcccatctcccctgctcaacttctccaccaagcatttggtttatttagaaaaaggaagaaaaacaaaaaacaaaaaactaaagggtgagaatttgcttagcgccttccttgttcctgcatattttttaaaatattgaatccaaggaagagagcccaagggtaggggagaaaccccccacaactgacccctgcctccctgtgctggaattgactttcctgagcatggacaaggaaaggtgaagtctggggagcagaggtgtaaataaggcgactggccttggcactgtgggatgattaggtttaacgcattgtgggcaagataagaatgacactttgactgttctctttcttccaatccaggttccatccgtcctctctttaaaggggtagtcagcttcccaaggctggggagtggggcacagctgagggatctccctctgggcagacacgtcactctccactggatagatcctcaccacacacacacacacacacacatctcccatgcacttacaaggaacagggtctagggatcctctccagaacaaactcatctgggccctcctagccagacagcacactcactttcagatctgtgtccctctcactgccacccggcagcctcctaagcacagaggcacaggagcccagaggggtggcccaagtccctggtccagaggctggaatacccagagtttgctcagtcagcctagcacccagtttacaggcaaaaaggcaaagacaccctaacccccagtaacagcttccaggctgggctccgcctggccagggcggggaggggaaggggcaggtcaggaagctcagtccaaagtggacccagcatttgaattgcacgcccagcaggggcaggtcagatgggaccaagtgacaagaatagctgatgggagggaatgcttttacacacacacacacacacacacacacacatacacatacacaatctgctccaaggagtgttctgcaaaaagccacatccagtggccaggatcttcccgtccacttggtacttacggatgccagggtttagggagaagcctttctatctaactccatacattgtccaaggccctctgtgccctcagccagccctgtaaggccagcccaacacctgccccaccgctgagatgggtggcagatggcccacaggggcctgtctgattcagcgtgagccccttcgtggagcagggctccctctgtgcactgtgtacaggcgctgctggccctgcccaagagatgatgctctgttggggtgggtgagcagagttcaaggaagcccaagtaggagatttgggaaacatgccaaggtaagagagagcctggaccactctcctacagccccaagtcagtcactgtgctaatggtgaccgggaagggaagtcagggtctggggcccaaagaacgggcacacccagccatgagtttttcctgaagcacttgacccctgggaaatgtgaacggggagatgctggaagatggctcagcagacaggccagcccagctccagtgtccaaaaagcggtttctccaataaggaggcctgggaagggaagcacaatcttccccaaaggagaaccaagggctgaggttctgcccctccaggaagtaaggtgctctcggggcctccttggacttgtctgggggctgcagtggagtcagctggacacctgctccacccctgccacctccgcccccaccctctgcagcatctggcatctccatggcagcacatctgcagctgccggcctgtgatcgtgccgcacagctttcttttctttcctctcatcttttttttttttttttttttaaataacttcatccctttccctctctgctgagcatttaaccatttaaggaagttcccagtttgcattagggaattatttaagcccagcccagtgagggattatttgggaggaagcaggagtgagtaaaaacattgtgtctgtgtatatattgcacatgaggtcaattttcctttgcctttaatgaatcacctggtgcactaagatattccacccccccactccccacacgctcattcgcacccatgctgacacctacgtgtacatgcgggatggtgcccatgcacgcctgtgcttacacacatgcacacacaaatatgcacagaacacacatctgtatgtgtgttagcaaagagactcctgaactccctctgatggctgaagccatctctcccctgtgaggcacaggtggcctgggttgcttgcacttggggcgtggctgggatctattgtctgagagggtgaggacaccacgcaaatttagacaagcccatgagatcaggctgggcccatggtgaaagtcccacacttagtcaatacccactcatctggaatattgtctccacagccccagccacagctggaagcccaggcctgcagctgtggaactctagattttttcaggacacgtctctttgcccttgtttacatatctactggcacagccgaggctcccaaccgtcctcccagaaacctggccacattagaaaggggtggtgggccctgccctttgtagaaagagtgggaccctttctggcctgtgattttccgtgccagtgatgccagggcccctgcctgtgggactccacccaaagcaggttcacaccaggacacacctggcacctttggcattgcctccttgtgccctaagcaatctcccagtgttgcacccaggagcccatgctgggcacaccagggctttccccttcctggctgcgcctccagagttgacgtcagctccacacccacactgccaagacaaaccaaaaagatgctctgggctccagaaccaccatcctcctagggctccagagagtttgcaaacccaggctgcctccccttctgtccatccctcaccccccggcccccaaaactcctacccccaaacctggcactgccgtgatttagaggaaacaaggacacagcgggggctgcccccacctggtgcacgctgcctcaaggccttctgttgctgcccacgcctccctgggcagtgcttctaaaggtgccagagcctcaccacagtgccactctggctgggcaggggcttccctcagcttcccagagtgcacatctgaaggtgcctaccctgggtgaggggctggtgggcaggaaggtaaaggggagaccatctgagcagccgccacccgctccccagtgcctctgtatggccctatccagggacacccatgggcatgcgcacatggcaatcctgaccaccacctgagcacaggtgccccctcgggaccaccccccttctctttgtttccatcagaataaccaaaagcatttaaacgtgttacctttctccatccatctagactccagaaacaaaaatcaacacaaatctttattttttgatttaaaagatataacaaaaaattatggggagagtattcattatggcaggtgtctgtctgtaagaaaaaaatatatatctctatgtcatatagcgtgttagcaggtttattttttaaatgaaaggtaagaaagaaattgatttgaaatatataccacaagaagtcccgtgtcctgtcaaactgtcagtattttataaataaacttttttttttggaaaaaaaaaaaaaaaaaaaaaaaaaaaaaaaaaaaaaaaaaaaaaaaaaaaaaaaaaaaaaaaaaaaaaaaaaaa

SEQ ID NO: 813 - DNA, 1312 bp, Homo sapiens
ttttaatggtcagactctattacaccccacattctcttttcttttattcttgtctgttctgcctcactcccgagctctactgactcccaacagagcgcccaagaagaaaatggccataagtggagtccctgtgctaggatttttcatcatagctgtgctgatgagcgctcaggaatcatgggctatcaaagaagaacatgtgatcatccaggccgagttctatctgaatcctgaccaatcaggcgagtttatgtttgactttgatggtgatgagattttccatgtggatatggcaaagaaggagacggtctggcggcttgaagaatttggacgatttgccagctttgaggctcaaggtgcattggccaacatagctgtggacaaagccaacctggaaatcatgacaaagcgctccaactatactccgatcaccaatgtacctccagaggtaactgtgctcacaaacagccctgtggaactgagagagcccaacgtcctcatctgtttcatagacaagttcaccccaccagtggtcaatgtcacgtggcttcgaaatggaaaacctgtcaccacaggagtgtcagagacagtcttcctgcccagggaagaccaccttttccgcaagttccactatctccccttcctgccctcaactgaggacgtttacgactgcagggtggagcactggggcttggatgagcctcttctcaagcactgggagtttgatgctccaagccctctcccagagactacagagaacgtggtgtgtgccctgggcctgactgtgggtctggtgggcatcattattgggaccatcttcatcatcaagggattgcgcaaaagcaatgcagcagaacgcagggggcctctgtaaggcacatggaggtgatggtgtttcttagagagaagatcactgaagaaacttctgctttaatggctttacaaagctggcaatattacaatccttgacctcagtgaaagcagtcatcttcagcattttccagccctatagccaccccaagtgtggatatgcctcttcgattgctccgtactctaacatctagctggcttccctgtctattgccttttcctgtatctattttcctctatttcctatcattttattatcaccatgcaatgcctctggaataaaacatacaggagtctgtctctgctatggaatgccccatggggcatctcttgtgtacttattgtttaaggtttcctcaaactgtgatttttctgaacacaataaactattttgatgatcttgggtggaaaaaaaaaaaaaaaaaaaaaaaaaaaaaaaaaa

SEQ ID NO: 814 - DNA, 3885 bp, Homo sapiens
agagccggacggggtaaactgagcggcggcggcggggcgctggggcggagactgcgacccggagccgcccggactgacggagcccactgcggtgcgggcgttggcgcgggcacggaggacccgggcaggcatcgcaagcgaccccgagcggagccccggagccatggccctgagcgagctggcgctggtccgctggctgcaggagagccgccgctcgcggaagctcatcctgttcatcgtgttcctggcgctgctgctggacaacatgctgctcactgtcgtggtccccatcatcccaagttatctgtacagcattaagcatgagaagaatgctacagaaatccagacggccaggccagtgcacactgcctccatctcagacagcttccagagcatcttctcctattatgataactcgactatggtcaccgggaatgctaccagagacctgacacttcatcagaccgccacacagcacatggtgaccaacgcgtccgctgttccttccgactgtcccagtgaagacaaagacctcctgaatgaaaacgtgcaagttggtctgttgtttgcctcgaaagccaccgtccagctcatcaccaaccctttcataggactactgaccaacagaattggctatccaattcccatatttgcgggattctgcatcatgtttgtctcaacaattatgtttgccttctccagcagctatgccttcctgctgattgccaggtcgctgcagggcatcggctcgtcctgctcctctgtggctgggatgggcatgcttgccagtgtctacacagatgatgaagagagaggcaacgtcatgggaatcgccttgggaggcctggccatgggggtcttagtgggcccccccttcgggagtgtgctctatgagtttgtggggaagacggctccgttcctggtgctggccgccctggtactcttggatggagctattcagctctttgtgctccagccgtcccgggtgcagccagagagtcagaaggggacacccctaaccacgctgctgaaggacccgtacatcctcattgctgcaggctccatctgctttgcaaacatgggcatcgccatgctggagccagccctgcccatctggatgatggagaccatgtgttcccgaaagtggcagctgggcgttgccttcttgccagctagtatctcttatctcattggaaccaatatttttgggatacttgcacacaaaatggggaggtggctttgtgctcttctgggaatgataattgttggagtcagcattttatgtattccatttgcaaaaaacatttatggactcatagctccgaactttggagttggttttgcaattggaatggtggattcgtcaatgatgcctatcatgggctacctcgtagacctgcggcacgtgtccgtctatgggagtgtgtacgccattgcggatgtggcattttgtatggggtatgctataggtccttctgctggtggtgctattgcaaaggcaattggatttccatggctcatgacaattattgggataattgatattctttttgcccctctctgcttttttcttcgaagtccacctgccaaagaagaaaaaatggctattctcatggatcacaactgccctattaaaacaaaaatgtacactcagaataatatccagtcatatccgataggtgaagatgaagaatctgaaagtgactgagatgagatcctcaaaaatcatcaaagtgtttaattgtataaaacagtgtttccagtgacacaactcatccagaactgtcttagtcataccatccatccctggtgaaagagtaaaaccaaaggttattatttcctttccatggttatggtcgattgccaacagccttataaagaaaaagaagcttttctaggggtttgtataaatagtgttgaaactttattttatgtatttaattttattaaatatcatacaatatattttgatgaaataggtattgtgtaaatctataaatatttgaatccaaaccaaatataattttttaacttacattaacaaacatttgggcaaaaatcatattggtaatgagtgtttaaaattaaagcacacattatctctgagactcttccaacaaagagaaactagaatgaagtctgaaaaacagaatcaagtaagacagcatgttatatagtgacactgaatgttatttaacttgtagttactatcaatatatttatgcgttaaacagctagttctctcaagtgtagaggacaagaacttgtgtcagttatcttttgaatccataaatcttagctggcattagttttctatgtaatcacctacctagagagagttgtaaattatatgttaacatgttatctggttggcagcaaacactaaagccaataaaggaaaaacagtaaatgttccgaaagcagagaaaagcaaccaaacatattgttatgaactaaaagctttccctttaagatgcatacttgtcttactggatgaagaaaattgagggtacatgtaccttatactgtcaaggttgtttaaacatgataaggttaatcgccatctacttcaagttttagaaaaggaaacaagaagctgaaaacagctgctctgactttaatatctgactatatctttgatctgtttgcaggtcatccaagtgttttctaggaatatatttattttaggttgtctgaaactactattttttagactcctgaaagttgttcacatcaatgtgaagacaaattttaaatgaaaatgaagaatgaaattatgtcttgaatcatatattaagaagtaaaaataatagtgatcaggcagaaaagaaaaatggaacatctaaaaatgtatgtgctaactatatcatccagtgtgcagtgttgtgtatttttctaagcatgacaacattgatgtgccttttcagtgtaacagcaaatactgttagtgaacattgtcaatttatgtcattttgttaagagatatgactggagtgtgcagtgtggaatgtctctaatactacttgtgaatcctgcagttctataatcataaacaaaaattacttagtttcgttaagctaagattgtgtttgtgttaacttcgacatcaaggagcaaagaactttagaacagactcctcaatcttgtgactttcttattctctaggaaagtaacacttcgtttcatgaagcttttctgtggggcttcgattatttcaagtctggtttctaagtgcagtgtgtttgaagcaaacgaacttccaactcacttatttggcattgggcaacttggccaagtctgccactttggaagatggctctggaggaaactctcatatggctaaaaaggcaggctagtttcttacttctacaggggtagagccttaaaaaagaacgtgctacaaattggttctctttgagggtttctggttctccctgcccccaataccatatactttattgcaattttatttttgcctttacggctctgtgtctttctgcaagaaggcctggcaaaggtatgcctgctgttggtccctcgggataagataaaatataaataaaaccttcagaactgttttggagcaaaagatagcttgtacttggggaaaaaaattctaagttcttttatatgactaatattcttggttagcaagactggaaagaggtgtttttttaaaatgtacataccagaacaaagaacatacagctctctgaacatttattttttgaacagaggtggtttttatgtttggacctggtaatacagatacaaaaactttaatgaggtagcaatgaatattcaactgtttgactgctaagtgtatctgtccatattttagcaagtttacttaataaatcttctgaaccatgaaaaaaaaaaaaa

SEQ ID NO: 815 - DNA, 2344 bp, Homo sapiens
ggtgcgtccgcgggtggctgccccgcaggtgcgcgcggccggggctggcggcgactctctccaccgggccgcccgggaggctcatgcagcgcggctgggtcccgcggcgcccggatcggggaagtgaaagtgcctcggaggaggagggccggtccggcagtgcagccgcctcacaggtcggcggacgggccaggcgggcggcctcctgaaccgaaccgaatcggctcctcgggccgtcgtcctcccgcccctcctcgcccgccgccggagttttctttcggtttcttccaagattcctggccttccctcgacggagccgggcccagtgcgggggcgcagggcgcgggagctccacctcctcggctttccctgcgtccagaggctggcatggcgcgggccgagtactgagcgcacggtcggggcacagcagggccggggggtgcagctggctcgcgcctcctctccggccgccgtctcctccggtccccggcgaaagccattgagacaccagctggacgtcacgcgccggagcatgtctgggagtcagagcgaggtggctccatccccgcagagtccgcggagccccgagatgggacgggacttgcggcccgggtcccgcgtgctcctgctcctgcttctgctcctgctggtgtacctgactcagccaggcaatggcaacgagggcagcgtcactggaagttgttattgtggtaaaagaatttcttccgactccccgccatcggttcagttcatgaatcgtctccggaaacacctgagagcttaccatcggtgtctatactacacgaggttccagctcctttcctggagcgtgtgtgggggcaacaaggacccatgggttcaggaattgatgagctgtcttgatctcaaagaatgtggacatgcttactcggggattgtggcccaccagaagcatttacttcctaccagccccccaatttctcaggcctcagagggggcatcttcagatatccacacccctgcccagatgctcctgtccaccttgcagtccactcagcgccccaccctcccagtaggatcactgtcctcggacaaagagctcactcgtcccaatgaaaccaccattcacactgcgggccacagtctggcagctgggcctgaggctggggagaaccagaagcagccggaaaaaaatgctggtcccacagccaggacatcagccacagtgccagtcctgtgcctcctggccatcatcttcatcctcaccgcagccctttcctatgtgctgtgcaagaggaggagggggcagtcaccgcagtcctctccagatctgccggttcattatatacctgtggcacctgactctaatacctgagccaagaatggaagcttgtgaggagacggactctatgttgcccaggctgttatggaactcctgagtcaagtgatcctcccaccttggcctctgaaggtgcgaggattataggcgtcacctaccacatccagcctacacgtatttgttaatatctaacataggactaaccagccactgccctctcttaggcccctcatttaaaaacggttatactataaaatctgcttttcacactgggtgataataacttggacaaattctatgtgtattttgttttgttttgctttgctttgttttgagacggagtctcgctctgtcatccaggctggagtgcagtggcatgatctcggctcactgcaacccccatctcccaggttcaagcgattctcctgcctcctcctgagtagctgggactacaggtgctcaccaccacacccggctaattttttgtatttttagtagagacggggtttcaccatgttgaccaggctggtctcgaactcctgacctggtgatctgcccacccaggcctcccaaagtgctgggattaaaggtgtgagccaccatgcctggccctatgtgtgttttttaactactaaaaattatttttgtaatgattgagtcttctttatggaaacaactggcctcagcccttgcgcccttactgtgattcctggcttcattttttgctgatggttccccctcgtcccaaatctctctcccagtacaccagttgttcctcccccacctcagccctctcctgcatcctcctgtacccgcaacgaaggcctgggctttcccaccctccctccttagcaggtgccgtgctgggacaccatacgggttggtttcacctcctcagtcccttgcctaccccagtgagagtctgatcttgtttttattgttattgcttttattattattgcttttattatcattaaaactctagttcttgttttgtctctccgaaaaaaaaaaaaaaaaaaaaaa

SEQ ID NO: 816 - DNA, 2080 bp, Homo sapiens
gcgggtccccagaagcctacaggtgagtatcggttctccccttcccggctttcggtccggaggaggcgggagcagcttccctgttctgatcctatcgcgggcggcgcagggccggcttggccttccgtgggacggggaggggggcgggatgtgtcacccaaataccagtggggacggtcggtggtggaaccagccgggcaggtcgggtagagtataagagccggagggagcggccgggcggcagacgcctgcagaccatcccagacgccggagcccgagccccgacgagtccccgcgcctcatccgcccgcgtccggtccgcgttcctccgccccaccatggctcggggccccggcctcgcgccgccaccgctgcggctgccgctgctgctgctggtgctggcggcggtgaccggccacacggccgcgcaggacaactgcacgtgtcccaccaacaagatgaccgtgtgcagccccgacggccccggcggccgctgccagtgccgcgcgctgggctcgggcatggcggtcgactgctccacgctgacctccaagtgtctgctgctcaaggcgcgcatgagcgcccccaagaacgcccgcacgctggtgcggccgagtgagcacgcgctcgtggacaacgatggcctctacgaccccgactgcgaccccgagggccgcttcaaggcgcgccagtgcaaccagacgtcggtgtgctggtgcgtgaactcggtgggcgtgcgccgcacggacaagggcgacctgagcctacgctgcgatgagctggtgcgcacccaccacatcctcattgacctgcgccaccgccccaccgccggcgccttcaaccactcagacctggacgccgagctgaggcggctcttccgcgagcgctatcggctgcaccccaagttcgtggcggccgtgcactacgagcagcccaccatccagatcgagctgcggcagaacacgtctcagaaggccgccggtgacgtggatatcggcgatgccgcctactacttcgagagggacatcaagggcgagtctctattccagggccgcggcggcctggacttgcgcgtgcgcggagaacccctgcaggtggagcgcacgctcatctattacctggacgagattcccccgaagttctccatgaagcgcctcaccgccggcctcatcgccgtcatcgtggtggtcgtggtggccctcgtcgccggcatggccgtcctggtgatcaccaaccggagaaagtcggggaagtacaagaaggtggagatcaaggaactgggggagttgagaaaggaaccgagcttgtaggtacccggcggggcaggggatggggtggggtaccggatttcggtatcgtcccagacccaagtgagtcacgcttcctgattcctcggcgcaaaggagacgtttatcctttcaaattcctgccttccccctcccttttgcgcacacaccaggtttaatagatcctggcctcagggtctcctttctttctcacttctgtcttgaaggaagcatttctaaaatgtatcccctttcggtccaacaacaggaaacctgactggggcagtgaaggaagggatggcatagcgttatgtgtaaaaaacaagtatctgtatgacaacccgggatcgtttgcaagtaactgaatccattgcgacattgtgaaggcttaaatgagtttagatgggaaatagcgttgttatcgccttgggtttaaattatttgatgagttccacttgtatcatggcctacccgaggagaagaggagtttgttaactgggcctatgtagtagcctcatttaccatcgtttgtattactgaccacatatgcttgtcactgggaaagaagcctgtttcagctgcctgaacgcagtttggatgtctttgaggacagacattgcccggaaactcagtctatttattcttcagcttgcccttactgccactgatattggtaatgttcttttttgtaaaatgtttgtacatatgttgtctttgataatgttgctgtaattttttaaaataaaacacgaatttaataaaatatgggaaaggcacaaaccagaaaaaaaaaa

SEQ ID NO: 817 - DNA, 5434 bp, Homo sapiens
ctggcttcgcccagccggcgaggaggaggacccgctggcagtctcctcccaggtggggagcgtggagcctgtcactgcagcctggcggcctgagcgccgagcctggggctggggccgcggtgctgaggacgcaaatcagccccgtagctgggtggagcctccgggcctgacgtggaccttcactggagaagtgactcagggatcctcccaggatgtctgcctcaccagacgacctgagtacagggggaaggttacagaacatgacagtggatgaatgcttccagtctcggaacaccgtcctccaggggcagccctttgggggtgtccccaccgtgctgtgcctcaacatcgccctgtgggtgctcgtccttgtggtttactccttcctccggaaagctgcgtgggactatgggcgcctggctctgctgatacacaatgacagcctgacctcgctgatctatggggagcagagcgagaagacatctccctcggagacttccttggagatggaacgcagagacaagggattctgttcctggttcttcaacagcataacaatgaaggacgaggatctgattaacaagtgtggggacgacgcacgcatctacatcgtgttccagtaccacctcatcatctttgtgctcatcatctgtatcccctccctgggcatcattttgcccatcaactatactggatctgttctggactggagcagtcactttgctcggaccaccattgtcaatgtctccacagagagcaagctcctgtggctgcatagcctgctgtccttcttctacttcatcaccaacttcatgttcatggctcatcactgcctggggtttgcacccaggaatagccaaaaggtcacaaggacactaatgatcacctatgtgcccaaggacattgaagacccagaactcatcattaagcattttcacgaggcctatccaggcagtgtcgtgacaagagtccacttctgctacgacgtcaggaacctgatcgacttggacgatcagaggcgccatgccatgcggggccggcttttctatacagccaaggccaagaagactgggaaggtgatgatcaggatccacccctgtgcccgcctgtgcttctgcaagtgctggacctgcttcaaggaggtggatgcagagcagtattacagcgagctagaggagcagctaacggacgagttcaacgccgagctcaaccgcgtgccgctcaagcggctggacctgatctttgtcaccttccaggactccaggatggccaagcgtgtccgtaaggattacaagtatgtccagtgtggtgtgcaaccccagcagtcctcagtgaccaccatcgtcaaatcatattactggagggtcactatggccccacaccccaaagacattatttggaaacacctgtctgtccgccgcttcttttggtgggcccgctttatcgcaatcaacaccttcctcttcttcctcttcttctttctcaccacgcctgccatcatcatgaacactatcgacatgtacaacgtcacccgccccatcgagaagctgcagaacccaattgtgacccagttcttcccctctgtgatgctctggggcttcacagtgatactgcctctgattgtctacttctccgccttcctcgaggcccactggaccagatcaagtcagaatctggtcatggtgcacaagtgctacatctttctggtgttcatggtagtcattctgccctctatgggactgaccagtttggatgtctttctccgctggctctttgacatctactatctagagcaagcatccatcaggttccagtgtgtgttcctgccagacaacggcgccttctttgtcaactacgtgatcacggcagctttacttggcacaggcatggagctgctgcgtctggggtcactcttctgctacagcacccgcctcttcttctctagatcagagccagagagagtcaacatcagaaagaaccaggccatagacttccagtttgggcgtgagtatgcgtggatgatgaacgtgttcagcgtggtgatggcgtacagcatcacttgccccatcattgtgccttttgggttgctctacctgtgcatgaagcacttgacggatcgctataacatgtactactcctttgcacccaccaaactgaacgagcagatccacatggctgccgtctcccaggccatctttgcgccactcttgggtctgttctggatgctgttcttctccatcctgcggttgggttctctccacgccatcaccatcttttccctgtccaccctcctcattgccatggtgattgcctttgttggcatttttctggggaagcttcggatggttgccgactacgagcccgaggaggaggagatccagacagtgtttgacatggagccaagcagcacctcctccacgcccacctccctcctgtatgtggccaccgtgctgcaagaaccggagttgaatctgacccccgcctcctccccagccaggcacacctatggcaccatgaacaaccagccggaagagggagaagaagagagtggtctgaggggctttgcgagggagctagactcggcccagttccaggaagggctggaactggagggccagaaccagtaccactgaccgggacctgaggcctccactggcgacttgttgaggggtcaggggagggcctggcaaggggaggcaggagggtggcctggacctccccactacctcctgcagactttgagaagcccacagtggagacatccaccaccccagccatgggccatacgggggtcctgacctgctgcccggctggaactgggggtgctcggcagtgctgaaggagcctgggaagggatgggaggatacaggcaagcacatgtcttgagagaggtggctggagccccggcacagagactgaacgctggggtcccttcctgggaccaagatggagaaggtgttcctaagggaggagacagaaggaggctgccgaaggctctgtggggtcatcaccactctgcatcagctgcccttccaaggagcttctgctgctgctcctcctcccagccccggcccattcctcccctgcagtctgaggaggcaaaggtatgtgcacggggcacattgacaggacacggaggaccacctcatcacagggttccctgcatggggatctgtaaagagaaagtttctgcacccaccagagcaagagccaactgaaagcgtagacctgagaagaggtaactcagccccttcctgctcctctgccctcatcagatgtccccaggagcagcagggcagaggcccttctttctattcttacaagggtagctagagcgtgatcactcagggctcatcaaatgagactcgtgtgcatttttcagaaggaaaccttggttagtccttgctgggtaacacaaagtggggtgagacgacagaagccgaattcatggaaggggggtcttctccccaaaactctgtgtggtgggaaaccagctatacctccccaagccccagggcctaaagagaagacccccgaagccaaagatgtggccacttaaaagcgtctcctgcctcctacccaactgagtgcctgggcccccagcttggccaagatgggcagtacgttagggtaagaaccccatgcttcaaacttaaggactgaccatcacctgcgtcccaagtaggacccttcctcccttctcggggctgcccctgcaccctgccttgaagaccacccaagcggcctccagtgtgggcctggtccagacattgcagatgcttcaaccgtgatgtcgccccaggcctgccaggggtgtggtggaggggaaggccacgtgctccagggagaagccctttctggagaagcaaggctgtcctcccagggctgccactaccagagacctgggggagctgaattccgaacagtgatggtgacactcagcacctttgccacagccggggggaaccggcttctgcctctgggatgggctctcatcaggaccaccgtgcagcccagccagggaggacatgagaagggccagtgggggcctcaatgaaccagaacaagccaagctgaatggggtctgtgtgctccagggccctcttcagccccctcccccaaaggtctgggtccctgccaccaacctactgaaggccggcccccggctcacctcacctgagcacctgcaccaggccccaggcacatggctgccctgaactcagatcacctagaccttgtccctgccccacctttgccccatcctagccccagaagctccaagcttcaccgcaggtgagaaattgtgctcaatgggcagaaactgctatacccccagggcatggcccacattttggcatgagggtgtctttccagagagcttgggttggctggagagaggctgtctttcccattccttgtccagctaggaataaaggggaaatggtcctagcctggcccctacacacccaggtcccacaggccccctccccactggaatttcaccaaccaacaaggggaaagtacgctgttacagcatagcggtcaggcccagcaggagcttggcacatgatggggaggtggccagctccaggccctgcccgaccccatcatgtgtatttggtgtatggggtgtggggggtcacaccagaagctggcctggggtctcttctttgctggacacagctccctggcccctgcccccagcccctgcagcccctgccggactgtggaagccacatatgggaaaagtcctggcagacaatgtggcgggatgactgggggcttctccctctgaacctgggtccagtgtagcctggctctgagagaaggtggtgagcatgtggagaaggttccatagtccactcttaggggaaccagcaaagcctcatggcagttggctccatctggacctcccatggtcactacaggatggtggagcagggggcatcttttagcctccccccgccaccacatccaggccctctcaggcacctcctgcctcagcccacacctgcctcacccattgcccccctccccccacctactgccatcccactcctctgccagccacttcccagccgccccaccccactccatccaccaaatcacctcctgacttaatcctttctggaaggagctgccgcccaggaaccggtattgcctagagcctccaggaggggccctcctcaggcctccagtggccccatgcccacctgcctgaccctccactgcccctggaagcaaagtgcctatcagcagcgttgcgtcctctggggcccccggtcgggggggagggggtgtgggctaaccttggccaccaccacaaaaggaatgtgccagaatgctgaaccttcttgttaatgctatgaccgtgccttgaataaacaagtcctcccaacctcaaaaaaaaaaaaaaaaaaaaaaaaaaaaaaaa

SEQ ID NO: 818 - DNA, 2993 bp, Homo sapiens
tgtgacagcccccgggccgcctgcacttgcagcctccttccccccgagcggagctgcggggccggccgggccggggctggaccccgggaacccggacgcggccgcccgggcccgcgggcggggggatcggcgggggggacccgcggggtgaccggcggcaggagccgccaccatggagttccgccaggaggagtttcggaagctagcgggtcgtgctctcgggaagctgcaccgccttctggagaagcggcaggaaggcgcggagacgctggagctgagtgcggatgggcgcccggtgaccacgcagacccgggacccgccggtggtggactgcacctgcttcggcctccctcgccgctacattatcgccatcatgagtggtctgggcttctgcatcagctttggcatccgctgcaacctgggcgtggccatcgtctccatggtcaataacagcacgacccaccgcgggggccacgtggtggtgcagaaagcccagttcagctgggatccagagactgtcggcctcatacacggctcctttttctggggctacattgtcactcagattccaggaggatttatctgtcaaaaatttgcagccaacagagttttcggctttgctattgtggcaacatccactctaaacatgctgatcccctcagctgcccgcgtccactatggctgtgtcatcttcgtgaggatcctgcaggggttggtagagggggtcacataccccgcctgccatgggatctggagcaaatgggccccacccttagaacggagtcgcctggcgacgacagccttttgtggttcctatgctggggcggtggtcgcgatgcccctcgccggggtccttgtgcagtactcaggatggagctctgttttctacgtctacggcagcttcgggatcttctggtacctgttctggctgctcgtctcctacgagtcccccgcgctgcaccccagcatctcggaggaggagcgcaagtacatcgaggacgccatcggagagagcgcgaaactcatgaaccccctcacgaagtttagcactccctggcggcgcttcttcacgtctatgccagtctatgccatcatcgtggccaacttctgccgcagctggacgttctacctgctgctcatctcccagcccgcctacttcgaagaagtgttcggcttcgagatcagcaaggtaggcctggtgtccgcgctgccccacctggtcatgaccatcatcgtgcccatcggcggccagatcgcggacttcctgcggagccgccgcatcatgtccaccaccaacgtgcgcaagttgatgaactgcggaggcttcggcatggaagccacgctgctgttggtggtcggctactcgcactccaagggcgtggccatctccttcctggtcctagccgtgggcttcagcggcttcgccatctctgggttcaacgtgaaccacctggacatagccccgcgctacgccagcatcctcatgggcatctccaacggcgtgggcacactgtcgggcatggtgtgccccatcatcgtgggggccatgactaagcacaagactcgggaggagtggcagtacgtgttcctaattgcctccctggtgcactatggaggtgtcatcttctacggggtctttgcttctggagagaagcagccgtgggcagagcctgaggagatgagcgaggagaagtgtggcttcgttggccatgaccagctggctggcagtgacgacagcgaaatggaggatgaggctgagcccccgggggcaccccctgcacccccgccctcctatggggccacacacagcacatttcagccccccaggcccccaccccctgtccgggactactgaccatgtgcctcccactgaatggcagtttccaggacctccattccactcatctctggcctgagtgacagtgtcaaggaaccctgctcctctctgtcctgcctcaggcctaagaagcactctcccttgttcccagtgctgtcaaatcctctttccttcccaattgcctctcaggggtagtgaagctgcagactgacagtttcaaggatacccaaattcccctaaaggttccctctccacccgttctgcctcagtggtttcaaatctctcctttcagggctttatttgaatggacagttcgacctcttactctctcttgtggttttgaggcacccacaccccccgctttcctttatctccagggactctcaggctaacctttgagatcactcagctcccatctcctttcagaaaaattcaaggtcctcctctagaagtttcaaatctctcccaactctgttctgcatcttccagattggtttaaccaattactcgtccccgccattccagggattgattctcaccagcgtttctgatggaaaatggcggtttcaagtccccgattccgtgcccacttcacatctcccctaccagcagattctgcgaaagcaccaaatttctcaagaccctcttctccctagcttagcataatgtctggggaaacaaccaaaatcgcaattttaacaatatgcctctctacccccgtgcactttttctgacatggttttcaggtctaaatagtggctgctccagtccatgaactcaaaggtttgaagctaccaccattgaactcccccatggtggtttcatgatgccccctccccaattcctcgcactttattctcctgggtggtttcgaactaccctgtttctcagtggccatttgttgtgtccctcaggggcttaatgactcaaaatctgggatccttcccctctcagacacccctctttcagcttagaatttggggaacctatagagaagtcacagaatcccatgaaagggaatggggcaggagccaggggtgttttttcccagtgcagggttgtgtctttgtgtctctgtctctgtgactgtaaatcctgccctgccccactcccaataaaagctttggtgtataggctcaaaaaaaaaaaaaaaaaa

SEQ ID NO: 819 - DNA, 1980 bp, Homo sapiens
ccaggaccctggtgggagagtgtgtgcgtcgcgctggagggcgggaggcgggggcgggaggtgccggtcgagggagccccgctctcagagctccaggggaggagcgaggggagcgcggagcccggcgcctacagctcgccatggtgcgccccctgaacccgcgaccgctgccgcccgtagtcctgatgttgctgctgctgctgccgccgtcgccgctgcctctcgcagccggagacccccttcccacagaaagccgactcatgaacagctgtctccaggccaggaggaagtgccaggctgatcccacctgcagtgctgcctaccaccacctggattcctgcacctctagcataagcaccccactgccctcagaggagccttcggtccctgctgactgcctggaggcagcacagcaactcaggaacagctctctgataggctgcatgtgccaccggcgcatgaagaaccaggttgcctgcttggacatctattggaccgttcaccgtgcccgcagccttggtaactatgagctggatgtctccccctatgaagacacagtgaccagcaaaccctggaaaatgaatctcagcaaactgaacatgctcaaaccagactcagacctctgcctcaagtttgccatgctgtgtactctcaatgacaagtgtgaccggctgcgcaaggcctacggggaggcgtgctccgggccccactgccagcgccacgtctgcctcaggcagctgctcactttcttcgagaaggccgccgagccccacgcgcagggcctgctactgtgcccatgtgcccccaacgaccggggctgcggggagcgccggcgcaacaccatcgcccccaactgcgcgctgccgcctgtggcccccaactgcctggagctgcggcgcctctgcttctccgacccgctttgcagatcacgcctggtggatttccagacccactgccatcccatggacatcctaggaacttgtgcaacagagcagtccagatgtctacgagcatacctggggctgattgggactgccatgacccccaactttgtcagcaatgtcaacaccagtgttgccttaagctgcacctgccgaggcagtggcaacctgcaggaggagtgtgaaatgctggaagggttcttctcccacaacccctgcctcacggaggccattgcagctaagatgcgttttcacagccaactcttctcccaggactggccacaccctacctttgctgtgatggcacaccagaatgaaaaccctgctgtgaggccacagccctgggtgccctctcttttctcctgcacgcttcccttgattctgctcctgagcctatggtagctggacttccccagggccctcttcccctccaccacacccaggtggacttgcagcccacaaggggtgaggaaaggacagcagcaggaaggaggtgcagtgcgcagatgagggcacaggagaagctaagggttatgacctccagatccttactggtccagtcctcattccctccaccccatctccacttctgattcatgctgcccctccttggtggccacaatttagccatgtcatctggtggtgaccagctccaccaagcccctttctgagcccttcctcttgactaccaggatcaccagaatctaataagttagccattctctattgcattccagattagggttagggtagggaggactgggtgttctgaggcagcctagaaagtcattctcctttgtgaagaaggctcctgccccctcgtctcctcctctgagtggaggatggaaaactactgcctgcactgccctgtccccggatcctgccgaacatctgggcatcaggagctggagcctgtgggccttgctttattcctattattgtcctaaagtctctctgggctcttggatcatgattaaacctttgacttaaaaaaaaaaaaaaaaaaaaaaaaaaaaaaaaaaaaaaaaaaaaaaaaaaa

SEQ ID NO: 820 - DNA, 2122 bp, Homo sapiens; identical to SEQ ID NO: 191

SEQ ID NO: 821 - DNA, 2103 bp, Homo sapiens; identical to SEQ ID NO: 190

SEQ ID NO: 822 - DNA, 2929 bp, Homo sapiens; identical to SEQ ID NO: 51

SEQ ID NO: 823 - DNA, 3422 bp, Homo sapiens
ccgcggacctgtcagagatacagaggttgtgggggcgggagacagaaagagagagagatccagagaccgagtcttacgttgacacgcagagagaaagacgcagagacagacaaacaaacagataggagagggcggagagaataaagcagaaagacaggaagaggaggtggagttctacagttagtgtggttttagtttttcctaagaagtggcgtggtttggggctttatatccgggaggagcatatgtacgcaaatcctggggcgtttgcaaacccggatccggggcgtctggccccatgcccggccgggcgtttgagggctactgccacgcagcgtttctggagcctgccggctggtgccctggtggcctttatctctgtccccctttgtcctctttatctcaggctctccaggaggccggggggcccactccgcctatcgctcccctcggctacgctgccacttcaatgccccgcaggtcgcgagctgctgttctttcgaaggcgtcggagaaccaggggcgtcccgcgccacctctgactcggagcagcgccgagcactgacgctcccgcccttgggcaaggacgccagtgcgcccgcgcgcgtccctctgcgcggcagcccgtcgcgggccctcaaggggaagcccaggccaggatggccccgggtcgcgcggtggccgggctcctgttgctggcggccgccggcctcggaggagtggcggaggggccagggctagccttcagcgaggatgtgctgagcgtgttcggcgcgaatctgagcctgtcggcggcgcagctccagcacttgctggagcagatgggagccgcctcccgcgtgggcgtcccggagcctggccagctgcacttcaaccagtgtttaactgctgaagagatcttttcccttcatggcttttcaaatgctacccaaataaccagctccaaattctctgtcatctgtccagcagtcttacagcaattgaactttcacccatgtgaggatcggcccaagcacaaaacaagaccaagtcattcagaagtttggggatatggattcctgtcagtgacgattattaatctggcatctctcctcggattgattttgactccactgataaagaaatcttatttcccaaagattttgaccttttttgtggggctggctattgggactcttttttcaaatgcaattttccaacttattccagaggcatttggatttgatcccaaagtcgacagttatgttgagaaggcagttgctgtgtttggtggattttacctacttttcttttttgaaagaatgctaaagatgttattaaagacatatggtcagaatggtcatacccactttggaaatgataactttggtcctcaagaaaaaactcatcaacctaaagcattacctgccatcaatggtgtgacatgctatgcaaatcctgctgtcacagaagctaatggacatatccattttgataatgtcagtgtggtatctctacaggatggaaaaaaagagccaagttcatgtacctgtttgaaggggcccaaactgtcagaaatagggacgattgcctggatgataacgctctgcgatgccctccacaatttcatcgatggcctggcgattggggcttcctgcaccttgtctctccttcagggactcagtacttccatagcaatcctatgtgaggagtttccccacgagttaggagactttgtgatcctactcaatgcagggatgagcactcgacaagccttgctattcaacttcctttctgcatgttcctgctatgttgggctagcttttggcattttggtgggcaacaatttcgctccaaatattatatttgcacttgctggaggcatgttcctctatatttctctggcagatatgtttccagagatgaatgatatgctgagagaaaaggtaactggaagaaaaaccgatttcaccttcttcatgattcagaatgctggaatgttaactggattcacagccattctactcattaccttgtatgcaggagaaatcgaattggagtaatagaaaatggaagatggtgttgttaataaaggcatttaatagataaaaacatctccaaaaaggattttgaagctgatcctatttagttaaaaagataattttgctttcaactgtaggtccagaaaactaattattggcatcagtctgtgaaatagtccattatttgttgttaaaaatgcttcaaaaggttttcagtgtcagtctgagatgcctggtatataggagcctttgggaaatacctatttttcagtattccatgcatattagatatcaccatgaagcaagagacatgcattctataatcatgtagacactcagactcaggggaaaatacaagttatatcctgaaagcctttaaaactctatggtaggatcaaagattcaaatggtttcagagaggttttatttcaattaatttgttctagtgctttcaagagcaagtacatcaaaatgtagaaggtaaaatgtatgcaacactaatataaattattccaagtctttaaggagccaaagaaaaaaaagatttctcacagctttttgttctgttttgtatttcaattaggaacttgcagtattattttgaaaaccattctaaaataataggagttaggaaataaataaagttttgctagccctgctaagttcaggcttagaggcttatcgctaagtataaacttcaccagattccacgaaaagctggatagctttttttctgacttatgttgtggttgcacccctcacaaatggcagaacagtatgtaaagctggtaacacctcggtttcagtgcaccatgtgtttgctttgtgaaggtgaagaatatgttggtttagagaaagaaattggatgtaattttatgcaatttacttttaaagacaaacataactatttagcagagaatattttaataaatgcaaaacaacagctggactgctgtacatcaaggacagattaactggaaaacatatgttccttatgtgtgatcgagagccattcagaaaagacttcctttgtgttcagcctatacttttccatatggtataccttgaaaaaaattagcacaccatggttatttttctaccttttataaaagacagagcctgtttactcatttagaagatagagaaaattggtctaaaattgaacatcctagattcacactcccaagtcacttaaggtgatttgatggtgaggaaaatgattgacaaagcccaacaatgatctcaggaattacattttccaacagaccaaaaaatgttttcatgtagcagcaatgcagatttggtgaatatttaatatatattttagtatgtatttcactttatgactgacaattaaaaaatattgtttggccaaatagtaaacacccttttgaaaccatg

SEQ ID NO: 824 - DNA, 3297 bp, Homo sapiens
gcattcctttggcacaggatgaagaccagctcagctcttcagttgttgatcattgtctattgttctccaaacagtaaaccagtatttcacactgagattgtcggctgcgggtatattccaattccccgtctcctcatgaatatgaagtgaagggctctgaccctggaagtggttctaagcagggcaaaatggggtctcggaagtgtggaggctgcctaagttgtttgctgattccgcttgcactttggagtataatcgtgaacatattattgtatttcccgaatgggcaaacttcctatgcatccagcaataaactcaccaactacgtgtggtattttgaaggaatctgtttctcaggcatcatgatgcttatagtaacaacagttcttctggtactggagaataataacaactataaatgttgccagagtgaaaactgcagcaaaaaatatgtgacactgctgtcaattatcttttcttccctcggaattgctttttctggatactgcctggtcatctctgccttgggtcttgtccaagggccatattgccgcacccttgatggctgggagtatgcttttgaaggcactgctggacgtttccttacagattctagcatatggattcagtgcctggaacctgcacatgttgtggagtggaacatcattttattttccattctcataaccctcagtgggcttcaagtgatcatctgcctcatcagagtagtcatgcaactatccaagatactgtgtggaagctattcagtgatcttccagcctggaatcatttgaataaggacaaaatgttttccattatcaagacatggccatctatctaaatattatatcaactgtgtagacttgagggcaatattgaaatgatggtgctttctgcatttggtgtttatttgtaaaaaatttgcagtcctcactgcacatgcaagtataccacccttccatttagtatgttttttaagtaatatgcatcagaaacttcagaaatacttctgccctttgatcaaacaaatccatttccaagaatctgtactagggaagtaaataagaatatgagagaaacctttatgcaaatatgtatattgcaacattatttaatattctggaaaattggaaacaccccaaaattctaaactcagaggaaggattaagtaaagagtggtacatactgtaaatgttttctgatattaaaaaaaaaattaaataaaaaataaagagtactacatggttgtaaaattacagtcattacaaatgatgtttttaaaattatgaataatgctacatcaaaaagcaggttacaaattcatgtttactatataactatttaaagcaaatgaaacactaatagtcaaagtttaggatgaaaactaaatctaaaaggaaatataacaaaatgccaattatgcttggtttggggcattgatgacccttcttcccacttttctatattttccaagatttctttattgaatatgttttactataaatattttctaaactcatattttcactattaaaatttttttatttttccaaactttaaggcatatgctctttccacattcctcaacattatttgcaaacatcatgaaatgacacttccatcaacattcaatgaggaaagtagtgatatagatgagccaaaaagagttttatataaacttatacaatctaaactcttgctcttcctttctgactcctgagggtgagtgtgatggactagaagaggtagccttaaaataagtgagcagctagggaacatgctcaatgggcaagagaaaatgaccactgaccagtcaatacctgtgtcagggggagttaccagtacctatatttatttttaaagtaattaaaaagtagaacacttacaaattttccacctatacatgccatgtcttcctcggggacagtagccacatcttatatatttcccaccatgcataggacccagcacacagtgaagccagtaggcactcagtgttgaatgctcataccaggttttctgcttcctgtagttaccctgctgagcactgcttccatcacaggtgcactgggcctcaacacttctgccatttccccatttgtctcctccatggacactgtcaacaatggtctgtcaacacctgctctgtgccaaagccagggagtaggctggggggatacggaagagaatatctttctccttgatgcctgctgtgccaacagccccctttaagccttgttcacagcctttgctgaaacaagcatcttgaaagcaagccatgttatacaccgcatgaccttcatgctctgggcccagctgactgaactggggcaggccccagagtcatgggcagcctattgtcttgctaatggcctctgacttagcctggagtaaaacactgtccaaacaagactggtggttattcaagcataagaatttgaactaggaagccaagaatgaagcaaccggaccattaccatcaaaaaatgattaaaggatgaagaaggaagccaacattcagagagtatctggttcatgttaataatggtatcatattaaaaggaagatacatgaacttctactccaaaagctcctaaaactgcctttgcccacaatgaacagtgtaccctaggcctggtttctgttcttggattcctagatagtctttcttctttgtcactgtgctgatcatttcagtaaacccccgactaaatcagtgcagctctgtttattgcaactaaaacgatccaaatgaagtctcccttttctagatgttgggttggagggatgctaagacaaagatgcttaggctccagagttttacagagcttcattcaataacactctactttccaaagaacttaaatatgaggtctgaaggacttggaccaagaggcaaacccaagctacagacaccatgttgtactcagagtgacctctcccctctgacagcccaggatttctctatcaagtccataagctagtcatatctaggaccatcttgttaaaaattctctcaaagtctcctcagccctcttgtaaacagacttctggaaggtccacttcatcagtttgttatatactttcagactgtctatctcttgtttagattcagcatggcaccgtacgttgaatggactgttaatagatgtttgctgaatgactccaccacagcattggacacatcaggggtacagccaaatgcagcatgatacctctatcaggaaaattaaattttaacacagccaccaaatattctatatttgaagagtatatgctaatcatgcaattttaagt

SEQ ID NO: 825 - DNA, 2891 bp, Homo sapiens; identical to SEQ ID NO: 418

SEQ ID NO: 826 - DNA, 4960 bp, Homo sapiens
cagtcaatcagcggcagagctgagaagggcacagccgcgcggcggagggcagagtcagccgagccgagtccagccggacgagcggaccagcgcagggcagcccaagcagcgcgcagcgaacgcccgccgccgcccacaccctctgcggtccccgcggcgcctgccacccttccctccttccccgcgtccccgcctcgccggccagtcagcttgccgggttcgctgccccgcgaaaccccgaggtcaccagcccgcgcctctgcttccctgggccgcgcgccgcctccacgccctccttctcccctggcccggcgcctggcaccggggaccgttgcctgacgcgaggcccagctctacttttcgccccgcgtctcctccgcctgctcgcctcttccaccaactccaactccttctccctccagctccactcgctagtccccgactccgccagccctcggcccgctgccgtagcgccgcttcccgtccggtcccaaaggtgggaacgcgtccgccccggcccgcaccatggcacggttcggcttgcccgcgcttctctgcaccctggcagtgctcagcgccgcgctgctggctgccgagctcaagtcgaaaagttgctcggaagtgcgacgtctttacgtgtccaaaggcttcaacaagaacgatgcccccctccacgagatcaacggtgatcatttgaagatctgtccccagggttctacctgctgctctcaagagatggaggagaagtacagcctgcaaagtaaagatgatttcaaaagtgtggtcagcgaacagtgcaatcatttgcaagctgtctttgcttcacgttacaagaagtttgatgaattcttcaaagaactacttgaaaatgcagagaaatccctgaatgatatgtttgtgaagacatatggccatttatacatgcaaaattctgagctatttaaagatctcttcgtagagttgaaacgttactacgtggtgggaaatgtgaacctggaagaaatgctaaatgacttctgggctcgcctcctggagcggatgttccgcctggtgaactcccagtaccactttacagatgagtatctggaatgtgtgagcaagtatacggagcagctgaagcccttcggagatgtccctcgcaaattgaagctccaggttactcgtgcttttgtagcagcccgtactttcgctcaaggcttagcggttgcgggagatgtcgtgagcaaggtctccgtggtaaaccccacagcccagtgtacccatgccctgttgaagatgatctactgctcccactgccggggtctcgtgactgtgaagccatgttacaactactgctcaaacatcatgagaggctgtttggccaaccaaggggatctcgattttgaatggaacaatttcatagatgctatgctgatggtggcagagaggctagagggtcctttcaacattgaatcggtcatggatcccatcgatgtgaagatttctgatgctattatgaacatgcaggataatagtgttcaagtgtctcagaaggttttccagggatgtggaccccccaagcccctcccagctggacgaatttctcgttccatctctgaaagtgccttcagtgctcgcttcagaccacatcaccccgaggaacgcccaaccacagcagctggcactagtttggaccgactggttactgatgtcaaggagaaactgaaacaggccaagaaattctggtcctcccttccgagcaacgtttgcaacgatgagaggatggctgcaggaaacggcaatgaggatgactgttggaatgggaaaggcaaaagcaggtacctgtttgcagtgacaggaaatggattagccaaccagggcaacaacccagaggtccaggttgacaccagcaaaccagacatactgatccttcgtcaaatcatggctcttcgagtgatgaccagcaagatgaagaatgcatacaatgggaacgacgtggacttctttgatatcagtgatgaaagtagtggagaaggaagtggaagtggctgtgagtatcagcagtgcccttcagagtttgactacaatgccactgaccatgctgggaagagtgccaatgagaaagccgacagtgctggtgtccgtcctggggcacaggcctacctcctcactgtcttctgcatcttgttcctggttatgcagagagagtggagataattctcaaactctgagaaaaagtgttcatcaaaaagttaaaaggcaccagttatcacttttctaccatcctagtgactttgctttttaaatgaatggacaacaatgtacagtttttactatgtggccactggtttaagaagtgctgactttgttttctcattcagttttgggaggaaaagggactgtgcattgagttggttcctgctcccccaaaccatgttaaacgtggctaacagtgtaggtacagaactatagttagttgtgcatttgtgattttatcactctattatttgtttgtatgtttttttctcatttcgtttgtgggtttttttttccaactgtgatctcgccttgtttcttacaagcaaaccagggtcccttcttggcacgtaacatgtacgtatttctgaaatattaaatagctgtacagaagcaggttttatttatcatgttatcttattaaaagaaaaagcccaaaaagcagtaaaatttccatttctccctgttattttagttgccttatctggagagacgtggaggtgattttcttttttttaaattattattaagacagaatgtgagggcacaagcaggcttctgagccacttgtcagattgtattcaaagcatcaatccaagaaggaggttatgtgtacttcatttattggtgatagttggaagagactgcagactactgctttgaatgagttgaattacataagctaagatcactataggtccatttcttgaacccacttatacataaaatgtaacccatttagaaaaagattctggatatcatcccccttgaaagatagaaagcattcaggatgtcccagttatcacatgttcacacttgggtttaggggtgtttttttttaaaaccaggcaggttagctagcccaccctgtgctagttttcatgttcacactgaccctatttgaattaatatcctttgttagagtggtcgagatttcaaacccaattatgtacagggagctgtctgagagctagccagaactggggtacagcctgggctcagggaatagctgtcaacactcgggcaaagtttttgtctgtgcatgtgtatctccatttgttttgggatcccagtttttgttttaagagagtataaggtgtctcatttgagtctttttcttacctagccccctcttatcagtaaaacaaaggacttgccatggttcacagcaatgtgctacgatccaagatatcagccaaggagcccacttaggggagaactaggtgtccagatttttgtatgtgttgtttttcttgggggatggggtggggtgggagtaggtagagctgagaatactacatcttagtggtgacctttagccacgtgggtgaagtggcaaaggccatggccatatctgttgtcccaggccaaagactaacaactgccttgggaatcccttccttgtgtccttaccaaatgatagctcataaaactctgataatgtaacaaatcactttcaaaggagttcccagaagtcttcagaaagactaaaattctgtctcttcctgctttagacagccattaagatcccaactaattttaccgaacctaaaacccacaaagaggttgtttgtgttattgttcaatcttcagttgtaagagtaattctctatttttatattgaaacataattacttgatagctcagggtctacatttcattcaactttttacaccaaattctgcagagtggtcaaaatggaatattgggggctgttgtaaacagaggcttaattttattagaagtagccagttatttattaaagcatgatgttaataaaataggcatattctggctggtgtgtataagtggttttttttttaaaacaaatcagaagacataaaattgaaaaggcactccatttatatataagggaaaatagattgtaaatagctaaggggccttgtgagaacttggaaaatgtgctgatacttagtaactacctcagttgtgaggaatttcctttttagcttagactgctattacttttacttggtagaaatgaatctggtctccaaaatatggctcagagagttatccccatagaccttgttagattgtttttaatttaaaaccttgaactctgcccagctgttttcttccagtcaaattctctaaaccaataacattttccaaattaagtattcttgaaggttcttctgaactcttactgatttgttttctttctttgcattttttcctgttactcttttattatttaaattgtctcttgcttttgaacttcaactatgaaataaacaaatcatagatttttccattcaggtctgactggataactcttggcttctaagcagctggcaagctcacccccactccccaaaaaagaagaaaggcaagttgaatattttaaaaccttaagagtttggagtatgaagtagaataaaagccttgttaggagaagacctgacttttccaaagttaacagcatgtgaagggcttgtgttttacaaagtcatttataaattatttttctttaaaacacatcacctactctgtaccttaaagattttacaactcttagatttatattttatttcaaaaatcgtaactagcacctgttattttgattaaaagacactgcgaagaattgacgtaaatttctaaagtttagttactgagtgttcaaaacctaacagttcacatgaagtaaaaattgtcatttgtgattacagaatcaaaataaaaataggtatgaatggtgcta

SEQ ID NO: 827 - DNA, 5749 bp, Homo sapiens
gcggggggcaggaggagcggctgcggccggcacagcgccagggcgagtgaggcgggtggcgcgggggaggcggcggagtaaagagaggccgccggctgggtccgcgggtcactccgaggcgcgggctgcgggcggcgggcggcgggcgcaccatgccctccttcgacgaggcgctgcagcgggtgggcgagttcgggcgcttccagaggcgcgtgtttttgctgctgtgcctgacgggcgtcaccttcgccttcctcttcgtcggcgtggtcttcctgggcacgcagcccgaccactactggtgccgcgggccaagtgccgcggcgctggccgagcgctgcggctggagcccggaggaggagtggaaccgcacggcgcccgcctcccgcggcccagagccccccgagcgccgcggccgctgccagcgctacctcctggaggcggccaacgacagcgcctccgccactagcgctctcagctgcgcggacccactcgccgccttccccaaccgctcggctccccttgtgccgtgccgcggcggctggcgctacgcccaggcccactccaccatcgtcagcgagtttgaccttgtctgtgtcaatgcgtggatgctggacctcacccaagccatcctgaacctcggcttcctgactggagcattcaccttaggctatgcagcagacaggtatggcaggatcgtcatttacttgctatcctgccttggtgttggcgtcactggggttgtggtggcctttgcaccaaacttccctgtgtttgtgatcttccgcttcctgcaaggtgtatttggaaaggggacgtggatgacttgctacgtgattgtgacagaaatagtaggttcgaaacaaaggaggattgtgggaatcgtgattcaaatgttctttacccttggaatcataattctccctggaattgcctacttcatccccaactggcaaggaatccagttagccatcacgctgcccagctttctcttcctcctttattactgggtggtccctgagtctccccgttggctgattactcggaagaaaggagataaagcattacagatcctgagacgcattgctaagtgcaatgggaaatacctctcatcaaattactcagagatcactgttacagatgaggaagttagtaatccatcctttttagatctggtgagaactccccaaatgaggaaatgcacacttattcttatgtttgcttggttcacaagcgcagtggtgtatcaaggacttgtcatgcgcctgggaattatagggggcaacctctatatagactttttcatctcgggcgtggtggaactgccaggagctctcttgatcttactaaccattgagcgccttggacgacgcctcccctttgcggcaagcaatatagtggcaggggtggcatgccttgtcactgcgttcttaccagaaggaatagcatggttgaggaccacagtggctacattgggaagactagggataaccatggcctttgaaattgtttatttggtaaattcagaattgtacccaacaacattacgaaatttcggagtttcgctctgttcaggtctgtgtgattttgggggaatcatagccccatttctgctctttcggctagcagccgtgtggctagaactacctctgatcatctttggtatcctggcatccatctgtggtggccttgtgatgcttttgcctgaaaccaagggtattgccttgccagagacagtggatgatgtagaaaaacttggcagtccacattcctgtaaatgtggcaggaataagaaaaccccagtttcccgctctcacctttgaggcccccgacaaagacagaaagaaggagctatccaggagctgatcctccttgcaaagctgtgccttgcagagatgcacgtgtgcatttcagctacatcatgccgcgctgttgtaatactgtataaagacctcaatctatccagagtatttttatataatgttggatgagttaggatttgtaatgctgttgaagtttctgggaacacataatatgtagccagtttaacaaagaagctgtcaggtgcacagcccttcctgggtttttttcttgtgttccctgtggtctctgacccattaggctaaagagagacaagagaagcccccaacctgattctcatgacagctccatcaagaatgtgggatgtgccgaccaaggatttgagaaagttgtacagaaatgtgttcatcaaatctggtcaagggactaagctcctagctgaccattcattctgaagattgcatggaggatgaacatctgggaatcctgttaatgagaaggctgaatcacaggcacctgggccaaagggtgtgagcattcatgttctctgctcaccttggtttccgcacaccttcgcaatgtgaacaggtcaggagtccctcccgtccacctcctctgtaacagctggggttccaggcatggtttaggccctgttccagcaataagaaccaatctgctgtacaatctgaggacttggctctgttatttacaaaatgatgctgtggttctgagattatttgggacatttttggctctcctttagtggacacctagagccacagattcccttctttactaaacaaatcccatggattctgatttctgggtcttaggattttaaaagtgaagggatatttttcttatatttgtgagttcagttccgatggtgcccgtggtcaaaagcgaaaaacatggacaattcctattcattcttagcactttgacatgtcttggggaaaagcttacattttaatttaaaagaaagatcaattatatccatgcttaacaggatcagcaggagctttataaatgactttacagagactaataagggatttgatctttctttttttgttatcgaggcttttgaaatgtggaacttgtgtgttctgctttatatgttatattcaatatcttttcagatgcagtctatattttatgctgagttttaaaaatgaaatactttatgcaaacaggcaaaattggtaccaaagggaaacattaaccatgaggaagagcatttttctaaggagaacaggtgacaatatacacatgtgcgctaatcgtaaaatgagcatcttagtctttaaaacacatcagaattgaatacgaataatctatttgtcgatgaaataaacacaactctttgaggatttgagactacattcaccctttattcacagtcacttgcagttttgcttttctctgcatttctctgctgtaagatgactgttgcattgttgaattgtattttgagtggatatttttgtttggtaacaattaaaattttaaatcgtaaaaaatgtacatttgccctttctcttccttctaaacatgtgtctctcccacaggtcattctcctgtgacacgtgtactgcagagtgtttcaaaaccgggcaggcaattagcaatgggaaataagtggtccaccttcaatatttgcttgttgttcatttacatgctcttggcaccaatcctagactcacgtgtgccccagaataacattcagactctcagctggtcttgtgttacacatccatggaccggttcactccatcatatacagctctctgctccgtgtcccctgggctcaagtcaagcagtcggtgacagatttcattcccaataacagaatcggtttgcatgactccccatacatgttgcagctttgaaaacattcatctcagagttaggtataaagacataaaaatgtgtgtcaagccctcgttagctgatgaggtaaatgcatggacaacttcctaggacttctcggctctgccctctgtgaccttgcagcctgctcaggtctttgtgctctgttccttatcaaaaacagcacaaccccctcaatctgcccatttaaaaattggtggagtgaacaaagagcatgaaaatgttgaagaccacaaccaaaatttactcaaatcaaagttaagtacagagtttatttttaacaaatgtcatagctatgtcaccttactacagaatccagcagtcagaaaataacacaaaaaatgccgaggtttggcgtagctggtagctggggacagtgtcttcgtttgattactgccagttatttccagcatgctaaatccctacccacgttccagcctctaggtgagtcagtgcgtcactctgtctcccgtccaattaattatttctcatcactccctcaatccaagtaacaaaccttgaaacacgaacatagacaccaggcttattggggcgtgcacagccaagaccccaagaagtgactccttgtaaaatgtatttgtccttctcaaagcaaaccagaggccctccactgtcaccctaaatagaggtagggaaaaattcatgtgagggttaggctgccagccttttattgtggcatccatctattgtccatatgtatattttcccagtaattgaaattggaaaggaacttatgggcatattactggagcatctgcagtgcttaagtacttagcaaaatctattcagcgaaaccacaccacttagtttctcccaggggtaaaaaaaacccttgtgaatcctgcacacatcccttcctgtgttggtgtttcctttagactggcctagcctgggcatcactgtaaagtatgtgcagttggtctctgtcctgtaccctctacctccttccctgtcggaaaagtcaccactttagtccctggccaccagcacaccccaggagggtgagtggcctgaggtagttacggcacttaaaactcccttgctaccgatctggaactcaagccccaagacatccccttagatgatctgaatacgcattcagggacagatctaggcagtttctaaacaacacttagactggggtctaacgttgacaaatccttctagaatttgcctctttgggactgaagtctaaggggctgagaccaagaagggagagcacaagactaactttggtctcttgaccttttcttaccttgcaactgtcagtgcctccagccaaatgcctagcacagagctcagtggatttgattcttccattcagatactcatagcgattgcacactttattctcaatcacaagaagctggggcttccttgagaaggccagccccaaaggtacctgtgtttaaaagatgaaagaaatggttgctgaacccaaaacatgtttaggaggaaaaccagaagaacagagcagtggcactggacctcctgtctgtccgtgaggctgcagaacacaaggcagctcccaatgccgctggactctctgaccttggagagtgtaaacatcatatatgattctgtgttcctgagatctgggtttaacgatctgggctttgtcatggtgttttacgttcgttgttgtttgtgtactttttgcttttcttttgaaagtatgaaaatgatttttacaatgtaaagagagtctgagaaatgcaattgctattctttttatatactttttcagattttttatatgcttctttactacttacatcataatgcacaattttatatactgattttttcaatcaatgtatatcatgagtttttaaaataatgctacaatcttcataactaatattttaatggggagtgactgcttaattggcatgaggtttccttttgagatgaggaaaatgttctgaaaatatggtgatggttgcacaccattgtgaatgtactgaatgccattcagtggtaccctgcaaaataattaaaatcctaactctta

SEQ ID NO: 828 - DNA, 2005 bp, Homo sapiens; identical to SEQ ID NO: 62

SEQ ID NO: 829 - DNA, 2057 bp, Homo sapiens; identical to SEQ ID NO: 174

SEQ ID NO: 830 - DNA, 1957 bp, Homo sapiens
gggctcttcctcgcggaagtggggaggaggcggttgcggttagtggaccgggaccggtaggggtgctgttgccatcatggctgaccccgacccccggtaccctcgctcctcgatcgaggacgacttcaactatggcagcagcgtggcctccgccaccgtgcacatccgaatggttctccagagagattgtaccttcagcaaacaatatatgaggataccttctgcaccctcagccacactgaatatcatcagattttttcatctccggcaatctggtagatcagggatggtgaacattttctacaaagggccaacctttctgagaaaagtctacagcattctttctctgcaggttctcttaactacagtgacttcaacagtttttttatactttgagtctgtacggacatttgtacatgagagtcctgccttaattttgctgtttgccctcggatctctgggtttgatttttgcgttgattttaaacagacataagtatccccttaacctgtacctactttttggatttacgctgttggaagctctgactgtggcagttgttgttactttctatgatgtatatattattctgcaagctttcatactgactactacagtattttttggtttgactgtgtatactctacaatctaagaaggatttcagcaaatttggagcagggctgtttgctcttttgtggatattgtgcctgtcaggattcttgaagttttttttttatagtgagataatggagttggtcttagccgctgcaggagcccttcttttctgtggattcatcatctatgacacacactcactgatgcataaactgtcacctgaagagtacgtattagctgccatcagcctctacttggatatcatcaatctattcctgcacctgttacggtttctggaagcagttaataaaaagtaattaaaagtatctcagctcaactgaagaacaacaaaaaaaatttaatgagaaaaaaggattaaagtaattggaagcagtatatagaaactgtttcattaagtaataaagtttgaaacaatgattaaatactgttacaatctttatttgtatcatatgtaattttgagagctttaaaatcttactattctttatgatacctcatttctaaatccttgatttaggatctcagttaagagctatcaaaattctattaaaaatgcttttctggctgggcacagtggctcacgcctgtaatcccaccactttgggagaccgaggcaggtggatcacgaggtcaagaggttgagaccatcctggccaacatggtgaaaccccgtctctactaaaaatacaaaaattagctggatgtggtggcacacacctgtagtcccagctagtcaagaggctgaggccagagaatcgcttgaacctgggaggtggaggttgcattgagccaagatcacgccactgcattccagcctggtgacagagcgagactcagtctcaaaaaaaaaaaaaaaatttttcttcctaaattagccacgcatagcagttcgtttgcaattcaaaaataattttatgagtagataagaatatcagtttaccgttgtctagtgattttatctaaattttccctgaattattaagtaatattgatttggctttgattctgaagtagtagagtctttaccattataaactgtaaatctctttttgcttaaaaggaaaaaaatgtaaaagataaattccacagagaattattcagtattacattaaaatgttaatgactttttattttaaattgtactaacattaaaagttggcctgaaagtcagatattatgacaaaatttgacattaattgtttttaaagtatagatttcatttgaaattatagaatggtaatgtggttagaggacaccaaagatactgggtcatcagccattaagtatatctatttcaaaattaaaatatttgggaagta

SEQ ID NO: 831 - DNA, 5811 bp, Homo sapiens; identical to SEQ ID NO: 175

SEQ ID NO: 832 - DNA, 4607 bp, Homo sapiens
gacgcagctgcgggcggcgggcggcgcgcacactgctcgctgggccgcggctcccgggtgtcccaggcccggccggtgcgcagagcatggcgggtgcgggcccgaagcggcgcgcgctagcggcgccggcggccgaggagaaggaagaggcgcgggagaagatgctggccgccaagagcgcggacggctcggcgccggcaggcgagggcgagggcgtgaccctgcagcggaacatcacgctgctcaacggcgtggccatcatcgtggggaccattatcggctcgggcatcttcgtgacgcccacgggcgtgctcaaggaggcaggctcgccggggctggcgctggtggtgtgggccgcgtgcggcgtcttctccatcgtgggcgcgctctgctacgcggagctcggcaccaccatctccaaatcgggcggcgactacgcctacatgctggaggtctacggctcgctgcccgccttcctcaagctctggatcgagctgctcatcatccggccttcatcgcagtacatcgtggccctggtcttcgccacctacctgctcaagccgctcttccccacctgcccggtgcccgaggaggcagccaagctcgtggcctgcctctgcgtgcgtcctttcacgcgtgtcttcgtgttggtgcgcttttcactggtcataaagtgctgctcacggccgtgaactgctacagcgtgaaggccgccacccgggtccaggatgcctttgccgccgccaagctcctggccctggccctgatcatcctgctgggcttcgtccagatcgggaagggtgatgtgtccaatctagatcccaacttctcatttgaaggcaccaaactggatgtggggaacattgtgctggcattatacagcggcctctttgcctatggaggatggaattacttgaatttcgtcacagaggaaatgatcaacccctacagaaacctgcccctggccatcatcatctccctgcccatcgtgacgctggtgtacgtgctgaccaacctggcctacttcaccaccctgtccaccgagcagatgctgtcgtccgaggccgtggccgtggacttcgggaactatcacctgggcgtcatgtcctggatcatccccgtcttcgtgggcctgtcctgcttcggctccgtcaatgggtccctgttcacatcctccaggctcttcttcgtggggtcccgggaaggccacctgccctccatcctctccatgatccacccacagctcctcacccccgtgccgtccctcgtgttcacgtgtgtgatgacgctgctctacgccttctccaaggacatcttctccgtcatcaacttcttcagcttcttcaactggctctgcgtggccctggccatcatcggcatgatctggctgcgccacagaaagcctgagcttgagcggcccatcaaggtgaacctggccctgcctgtgttcttcatcctggcctgcctcttcctgatcgccgtctccttctggaagacacccgtggagtgtggcatcggcttcaccatcatcctcagcgggctgcccgtctacttcttcggggtctggtggaaaaacaagcccaagtggctcctccagggcatcttctccacgaccgtcctgtgtcagaagctcatgcaggtggtcccccaggagacatagccaggaggccgagtggctgccggaggagcatgcgcagaggccagttaaagtagatcacctcctcgaacccactccggttccccgcaacccacagctcagctgcccatcccagtccctcgccgtccctcccaggtcgggcagtggaggctgctgtgaaaactctggtacgaatctcatccctcaactgagggccagggacccaggtgtgcctgtgctcctgcccaggagcagcttttggtctccttgggccctttttcccttccctcctttgtttacttatatatatattttttttaaacttaaattttgggtcaacttgacaccactaagatgattttttaaggagctgggggaaggcaggagccttcctttctcctgccccaagggcccagaccctgggcaaacagagctactgagacttggaacctcattgctaccacagacttgcactgaagccggacagctgcccagacacatgggcttgtgacattcgtgaaaaccaaccctgtgggcttatgtctctgccttagggtttgcagagtggaaactcagccgtagggtggcactgggagggggtgggggatctgggcaaggtgggtgattcctcccaggaggtgcttgaggccccgatggactcctgaccataatcctagccccgagacaccatcctgagccagggaacagccccagggttggggggtgccggcatctcccctagctcaccaggcctggcctctgggcagtgtggcctcttggctatttctgtgtccagttttggaggctgagttctggttcatgcagacaaagccctgtccttcagtcttctagaaacagagacaagaaaggcagacacaccgcggccaggcacccatgtgggcgcccaccctgggctccacacagcagtgtcccctgccccagaggtcgcagctaccctcagcctccaatgcattggcctctgtaccgcccggcagccccttctggccggtgctgggttcccactcccggcctaggcacctccccgctctccctgtcacgctcatgtcctgtcctggtcctgatgcccgttgtctaggagacagagccaagcactgctcacgtctctgccgcctgcgtttggaggcccctgggctctcacccagtccccacccgcctgcagagagggaactagggcaccccttgtttctgttgttcccgtgaatttttttcgctatgggaggcagccgaggcctggccaatgcggcccactttcctgagctgtcgctgcctccatggcagcagccagggacccccagaacaagaagaccccgcaggatccctcctgagctcggggggctctgccttctcaggccccgggcttcccttctccccagccagaggtggagccaagtggtccagcgtcactccagtgctcagctgtggctggaggagctggcctgtggcacagccctgagtgtcccaagccgggagccaacgaagccggacacggcttcactgaccagcggctgctcaagccgcaagctctcagcaagtgcccagtggagcctgccgcccccgcctgggcaccgggaccccctcaccatccagtgggcccggagaaacctgatgaacagtttggggactcaggaccagatgtccgtctctcttgcttgaggaatgaagacctttattcacccctgccccgttgcttcccgctgcacatggacagacttcacagcgtctgctcataggacctgcatccttcctggggacgaattccactcgtccaagggacagcccacggtctggaggccgaggaccaccagcaggcaggtggactgactgtgttgggcaagacctcttccctctgggcctgttctcttggctgcaaataaggacagcagctggtgccccacctgcctggtgcattgctgtgtgaatccaggaggcagtggacatcgtaggcagccacggccccgggtccaggagaagtgctccctggaggcacgcaccactgcttcccactggggccggcggggcccacgcacgacgtcagcctcttaccttcccgcctcggctaggggtcctcgggatgccgttctgttccaacctcctgctctgggacgtggacatgcctcaaggatacagggagccggcggcctctcgacggcacgcacttgcctgttggctgctgcggctgtgggcgagcatgggggctgccagcgtctgttgtggaaagtagctgctagtgaaatggctggggccgctggggtccgtcttcacactgcgcaggtctcttctgggcgtctgagctggggtgggagctcctccgcagaaggttggtggggggtccagtctgtgatccttggtgctgtgtgccccactccagcctggggaccccacttcagaaggtaggggccgtgtcccgcggtgctgactgaggcctgcttccccctccccctcctgctgtgctggaattccacagggaccagggccaccgcaggggactgtctcagaagacttgatttttccgtccctttttctccacactccactgacaaacgtccccagcggtttccacttgtgggcttcaggtgttttcaagcacaacccaccacaacaagcaagtgcattttcagtcgttgtgcttttttgttttgtgctaacgtcttactaatttaaagatgctgtcggcaccatgtttatttatttccagtggtcatgctcagccttgctgctctgcgtggcgcaggtgccatgcctgctccctgtctgtgtcccagccacgcagggccatccactgtgacgtcggccgaccaggctggacaccctctgccgagtaatgacgtgtgtggctgggaccttctttattctgtgttaatggctaacctgttacactgggctgggttgggtagggtgttctggcttttttgtggggtttttatttttaaagaaacactcaatcatccta

SEQ ID NO: 833 - DNA, 4054 bp, Homo sapiens
ggcagagcgcggcgcggggccggcggcgaaggtccggggtggaatcgacgtcgctgcggctgccgacgacccacacccggccggccgcctccgcagacccaccttggccgcgcggcagggggcgcgcagagccccgagggagcgagtccccgcgcgtggcagctcggcggcttctcccttcgggaggtccggctcccggctctccggacccgcctggcgtcctcgcctgcggcggggcggacgacagcggcgcccaggaatggcttcggcgggcagcggcatggaggaggtgcgcgtgtcggtgctgacccccttgaagctggtcgggctggtgtgcatcttcctggcgctgtgtctggacctgggggcggtgctgagcccggcctgggtcacagctgaccaccagtactacctgtcgttgtgggagtcctgccggaaacccgccagcttggacatctggcactgcgagtccacgctcagcagcgattggcagattgctactctggctttactcctgggcggcgctgccatcattctcattgcattcctggtgggtttgatttctatctgcgtgggatctcgaaggcgtttctatagacctgttgcggtcatgctttttgcagcagttgttttacaggtttgcagcctggtcctttacccaatcaagttcattgaaactgtgagcttgaaaatttaccatgagttcaactggggttatggcctggcctggggtgcaactatattttcgtttgggggtgccatcctttattgcctgaaccctaagaactatgaagactactactagaaccaatagtctcaaagtaaaaacaaccaccaccatccaacaaaaggattacgtctgcatcttttctaacttactattttctaaaacacttgtggagcatcaagcagtttgctcagttgatttaatcttttttgccttttggctgtcaacatcataaccagcttttacatccattttagaaatctgcacaaattaagagagctgattagacataggcaaatgctgcaaacttccaatatgttcatatcgtttttcttgacaaatgaagggtctatatgacagcaaccattgtgagaaactagttggaatgagatttgcctcaatctcctattgcctgcaggggagcagttggcataagcaacatttagaagttcctttgcgctgacaaggattccactgttagagcccttaccgcctgcttatcctacccaatgactacattggctgttggttatttgcttgagtgagcccttgaaaaatgaactgcccttcagcatctaatgggagttgtgaatgtaactggttaatgatacacattccaccttcaggaacactctttttaatgggaggttatgctttggcaatcagcgtctccctgggaagagagtcaagacttggagacatgtgcttctcattatgtggttagaaattggtgcctcagccctatctagactggggaaaaattgaggatctctgtttttcctggggcaaacagaaagaaatctgcatgagttgcttttgtaccctttaaatcatttgccaaacattgcagcaaacaagtgtgcgtatgtaacaagcttcactgtttttatagaaggtgaaccattagtataaatggtaataagttgttccctaaccctccacatacatttgcctatcacacgtaaaattaatatttactctagtgaagtggtttgagcactaaccttgtacacattgttaagaggcttagattggtattcatacttatttaccatacaaaagtatggtaccttaaagcttttgctctatgttctttactgtttcactggaaagtgtcaatagagttgcctaagaataaaaattgaaatggtgttaatctgaaaattaatgattctctgtaagcactgtagttgaaaagagagtagcaattaggatgatcattttgtgtaaaattcattaaaatagaaggctgctattttttgcaagtattttaaatgtcttcatttttttaagaaaggaatagcgatagatttatataaatatctaaatgtctcagtagaggagtagaattcatctggttatcacctggtcctctgaagttaactgatgggctaaccgatttgtgcacacacttaggatggatttatgttaagggaattacttactgactgttcaatggaaggaagtattaataatagggaataagtttgcaactaatctcatgctgcaaacttgtgttaattctgtttaatatacaaatttggatagcttaattataaacatatttttatatcaaatatacagttctaatataaaagttataaataattatttttgttaacaaagacactaaaacagtatgttctggttttggccctcttgcagaaagaagcattagaaaaattactttaaaagtagctatatgttactgtattgcaaaatctgttaagagcaggaccacatcgatagtatttaataatttgttttacctcccaaaacacagttcttctttcagcttgtcttaagaatggttgccaaaaacaacagccaaaaaaaaaaaacctattttattatccaaatgctagaaaacacacatgaattttctataaaatcacgaatatgaagtaccaggtttagtcttactttagcaatgatagacaaaagcgaataaatacatcacagacagaaacctttataaaaatatatgattctataaagaatcattagaaattatgagtggaaattctccagaaagatagtattatagagtcttttgaagcaattttttgagaaatagtaaaatctggggcagagtgtcttgcagttaattgcatattgtcagagcagcatgagaaatatgatatttggatagggatttcagcaactaaacattctctgttctgagatctctttattcctgaataatgaaagaatagtactttggtgctgacaccaatgaggcacttctcttggtcctagtagaggatgcagtgtactgttaaaccaatatcatcacatctcgagtcttatcaagttttcattctctgtcaatatgacaagctcaaagtgacagaatatgttataggttgaagcacacatatttgcagtttactgaaaagtagatttcttatgtgacttttttcccttctcagcaaagagccctacactagatttctaccatcactaatatttggaagtatttcattactaacaatctcagtacaacatgaaaattgttgcttctcatctaaaatacaattttgtctatcagaataaacacaagtgaaattttcacctacattaacattatgtctttgcagctttaggtttgttagatgtgttcttaagcataatttttagccacaaacccattgttagatagatatctatggatatagatctacatctatagatatagatatacacacatatatatactcacacacatatagcataaaatactcagcagggctagttattccgatttcttgcacaattatttagctttttgtaagttcaacatgtaaattttaaagacataaatatagagagacttatgtgtttgaatataaatgatatatatggattagcatgtacctgtatattattaaacatgcaatgaactgactggtaagtgacgtctaattgtatggctagcaatgtaatttattcagactgtatttttgtacagagcagtgcactctaacctatgcctctgtgtcctctttaatgcctaaagctgtgcctagaaatttcatctgtcttaaaagtaaaatatacttcatgctgtttatgctattagtttctgtactgctattctatatttattatttttaaatatatgacatgtttactacttaaacatgaattcatggtatcctggttattttttttaagtcatctgggggaaaacctgtttatcactccagtgattttgagtttgcagtttcacaatcagttcttcatttcatgatttttgtagttgacatgaagtcatctatgtggaaaaaaataaaaataaaagtgatttcacggatgtggtttgaa

SEQ ID NO: 834 - DNA, 679 bp, Homo sapiens
cctgagcctcggccggcgtgattaggcctggtttgcgctggagagtggtcttggttgtgagggtcataagatgggaactctcccggcacgtagacatatcccgccgtgggtgaaagttcccgaagacctgaaagatccagaggtgttccaggtccagacgcggctgctgaaagccattttcggcccggacggatctcgaatcccttacatcgagcaggtgagcaaggccatgctcgagctgaaggctctggagtcttcagacctcaccgaggtcgtggtttacggctcctatttgtacaagctccggaccaagtggatgctccagtccatggctgagtggcaccgccagcgccaggagcgagggatgctcaaacttgccgaagccatgaatgccctcgaactaggcccttggatgaagtgaaccagtttccagccaatgcaatgaagccgggttgcagagattaggttgtggccagagctagagtgattccttaagcttgttttaaaatctgctccagcctaaagagttaagggaaaaccatttgttcccttaaagagttaagggaaaacccttggctctgagtcttgttgtgaatatttctttgatgattgttaataaaaagtgttttttcttttttcccatttttaaaaataacaataaagttttaaataagttgat

SEQ ID NO: 835 - DNA, 2491 bp, Homo sapiens
catactccatacctgggatttccgcctcgccgctctccgactgcttccagacatgcaggggccctgggtgctgctcctgctgggcctgaggctacagctctccctgggcatcatcccagttgaggaggagaacccggacttctggaaccgccaggcagccgaggccctgggtgccgccaagaagctgcagcctgcacagacagccgccaagaacctcatcatcttcctgggtgacgggatgggggtgtctacggtgacagctgccaggatcctaaaagggcagaagaaggacaaactggggcctgagaccttcctggccatggaccgcttcccgtacgtggctctgtccaagacatacagtgtagacaagcatgtgccagacagtggagccacagccacggcctacctgtgcggggtcaagggcaacttccagaccattggcttgagtgcagccgcccgctttaaccagtgcaacacgacacgcggcaacgaggtcatctccgtgatgaatcgggccaagaaagcaggaaagtcagtgggagtggtaaccaccacacgggtgcagcatgcctcgccagccggcgcctacgcccacacggtgaaccgcaactggtactcggatgccgacgtgcctgcctcggcccgccaggaggggtgccaggacatcgccacgcagctcatctccaacatggacattgatgtgatcctaggtggaggccgaaagtacatgtttcccatggggaccccagaccctgagtacccagatgactacagccaaggtgggaccaggctggacgggaagaatctggtgcaggaatggctggcgaagcaccagggtgcccggtacgtgtggaaccgcactgagctcctgcaggcttccctggacccgtctgtgacccatctcatgggtctctttgagcctggagacatgaaatacgagatccaccgagactccacactggacccctccctgatggagatgacagaggctgccctgctcctgctgagcaggaacccccgcggcttcttcctcttcgtggagggtggtcgcatcgaccatggtcatcatgaaagcagggcttaccgggcactgactgagacgatcatgttcgacgacgccattgagagggcgggccagctcaccagcgaggaggacacgctgagcctcgtcactgccgaccactcccacgtcttctccttcggaggctaccccctgcgagggagctccatcttcgggctggcccctggcaaggcccgggacaggaaggcctacacggtcctcctatacggaaacggtccaggctatgtgctcaaggacggcgcccggccggatgttacggagagcgagagcgggagccccgagtatcggcagcagtcagcagtgcccctggacggagagacccacgcaggcgaggacgtggcggtgttcgcgcgcggcccgcaggcgcacctggttcacggcgtgcaggagcagaccttcatagcgcacgtcatggccttcgccgcctgcctggagccctacaccgcctgcgacctggcgccccgcgccggcaccaccgacgccgcgcacccggggccgtccgtggtccccgcgttgcttcctctgctggcagggaccttgctgctgctggggacggccactgctccctgagtgtcccgtccctggggctcctgcttccccatcccggagttcccctgctccccacctccagtcgtcctgccggacctccacctggagctgtcacccccggagtcgccacacagacgtcctgccatggaaccttcccctcccggtgcaccctggggaccgagcccttgacaccacgccctttgctttatcttgctcttgaaattttggccccaactccagggactggggatttgtgcctggcagctgcctgcatttcaggaaaagaggaggctcagaccatccagcccccgcccatatcctgaggtggatcaggcaggctctctccccggggacatgaggcacccatacctaggaccccctgcgccttttttagcttcagtcatggcagcacctgagggacacaaggacttgggtgcatcaggacgccttggagaagcgtggcttcctgccaccctgcaacccaccctcccagccaaggaggctgctgtggtggggatccccaggggggctttgacacagtcctctgctgtccctccactgggctaattctacacccctgtgcccctcctaggggcccatgagtcagagaggcttgccccaagtcacagccactcagatgttcgacgccccctaaggtccattccagcacccacctgagttccgaggagcacctgggaagctctgggtgcaggatagcagtccagagtccatggccccgcctaggccatctgggtgctgggcatggatttctcagcaaggaagactcattaccttccctccctgggcctccattcttctgggaaacacaaagcaataataaaaggaagtgttagacaatgt

SEQ ID NO: 836 - DNA, 1972 bp, Homo sapiens
gggtggagcgaggcgcacatcctgggtggagcctgcaaaagttggagaaggtgtggcagtcctcatttctgtggaatctgaagaagcccacgcagattttaattcccactctagattctggcttcatcgttatgaagcatatgatgatcccgtggatagtatctagatcaccatggcgactggacagaagttgatgagagctgttagagtttttgaatttggtgggccagaagtcctgaaattgcgatcagatattgcagtaccgattccaaaagaccatcaggttctaatcaaggtccatgcatgtggtgtcaaccccgtggagacatacattcgctctggtacttatagtagaaaaccactcttaccctatactcctggctcagatgtggctggggtgatagaagctgttggagataatgcatctgctttcaagaaaggtgacagagttttcactagcagcacgatctctgggggttatgcagagtatgctcttgcagcagaccacactgtttacaaactacctgaaaaactggactttaaacaaggagctgccatcggcattccatattttactgcttatcgagctctgatccacagtgcctgtgtgaaagctggagagagtgttctggttcatggggcaagtggaggagttggattagcagcatgccaaattgctagagcttatggcttaaagattttgggcactgctggtactgaggaaggacaaaagattgttttgcaaaatggagcccatgaagtgttcaatcacagagaagtgaattacattgataaaattaagaagtatgttggtgagaaaggaattgatataattattgaaatgttagctaatgtaaatcttagtaaagacttgagtcttctgtcacatggaggacgagtgatagttgttggcagcagaggtactattgaaataaacccacgagacaccatggcaaaggagtcgagtataattggagttactctcttttcctcaaccaaggaggaatttcagcaatatgcagcagcccttcaagctggaatggaaattggctggttgaaacctgtgataggttctcaatatccattggagaaggtggccgaggctcatgaaaatatcattcatggtagtggggctactggaaaaatgattcttctcttatgatgattaattctttcatggatttcctatgtaattagaggtactgtctttcccccagttgtacttaccctatcttttctttaattaacattcgattccatgagcttcttatgtgaaaaaataagatttttctttagagagcagaagcagaagagtaaaatttattgtatagctagcaatatttttttatgccatctgtctcaaatcaaagagtcatcatagtaggaaataacatgttagttgtcatttggcatgagtgtgcattccagtaattcttaattgatatttgattaattccatacctttgattaaaacatgctagttcaaaataagactgctcagtttccaagggttttcaagcctacttacctttataaaggttctctagtctctgattagccatgactgtattggactttgaacattttctgaactaaaaacctctattctaaactaatctcatttggatgtgtaagtcttttgtaaaggcaagaataaataatatccaggacaatttattagttttctcagtattttcccaaatattagaatatttacttcattattggttggctgccaatgaccccatatgttctgtgagaatagtagctttatctttgatataatacatagtctccaaataggtaatacttcgcaattgattagattttcagagtagatttagagttatctgtttttctggtgagggtcaaatatttttgttaattaagctcacaaatttgataaattaagaattatctgcatttgtctcgtaacataataatgtgtaataaagtctatagaaaattaaaa

SEQ ID NO: 837 - DNA, 2090 bp, Homo sapiens
agggtgagggagggggtgggatgggtggggggtaacgggggaaactggggaagtggggaaccgaggggcaaccaggggaagatggggtgctggaggagagcttgtgggagccaaggagcaccttggacatctggagtctggcagggtttgatcccagggcctgggcaacggaggtgtagctggcagcagcgggcaggtgaggaccccatctgccgggcaggtgagtcccttccctccccaggcctcgcttccccagccttctgaaagaaggaggtttaggggatcgagggctggcggggagaagcagacaccctcccagcagaggggcaggatgggggcaggagagttagcaaaggtgacatcttctcggggggagccgagactgcgcaaggctggggggttatgggcccgttccaggcagaaagagcaagagggcagggagggagcacaggggtggccagcgtagggtccagcacgtggggtggtaccccaggcctgggtcagacagggacatggcaggggacacaggacagaggggtccccagctgccacctcacccaccgcaattcatttagtagcaggcacaggggcagctccggcacggctttctcaggcctatgccggagcctcgagggctggagagcgggaagacaggcagtgctcggggagttgcagcaggacgtcaccaggagggcgaagcggccacgggaggggggccccgggacattgcgcagcaaggaggctgcaggggctcggcctgcgggcgccggtcccacgaggcactgcggcccagggtctggtgcggagagggcccacagtggacttggtgacgctgtatgccctcaccgctcagcccctggggctggcttggcagacagtacagcatccaggggagtcaagggcatggggcgagaccagactaggcgaggcgggcggggcggagtgaatgagctctcaggagggaggatggtgcaggcaggggtgaggagcgcagcgggcggcgagcgggaggcactggcctccagagcccgtggccaaggcgggcctcgcgggcggcgacggagccgggatcggtgcctcagcgttcgggctggagacgaggccaggtctccagctggggtggacgtgcccaccagctgccgaaggccaagacgccaggtccggtggacgtgacaagcaggacatgacatggtccggtgtgacggcgaggacagaggaggcgcgtccggccttcctgaacaccttaggctggtggggctgcggcaagaagcgggtctgtttctttacttcctccacggagtcggcacactatggctgccctctgggctcccagaacccacaacatgaaagaaatggtgctacccagctcaagcctgggcctttgaatccggacacaaaaccctctagcttggaaatgaatatgctgcactttacaaccactgcactacctgactcaggaatcggctctggaaggtgaagctagaggaaccagacctcatcagcccaacatcaaagacaccatcggaacagcagcgcccgcagcacccaccccgcaccggcgactccatcttcatggccaccccctgcggcggacggttgaccaccagccaccacatcatcccagagctgagctcctccagcgggatgacgccgtccccaccacctccctcttcttctttttcatccttctgtctctttgtttctgagctttcctgtctttccttttttctgagagattcaaagcctccacgactctgtttcccccgtcccttctgaatttaatttgcactaagtcatttgcactggttggagttgtggagacggccttgagtctcagtacgagtgtgcgtgagtgtgagccaccttggcaagtgcctgtgcagggcccggccgccctccatctgggccgggtgactgggcgccggctgtgtgcccgaggcctcaccctgccctcgcctagtctggaagctccgaccgacatcacggagcagccttcaagcattccattacgccccatctcgctctgtgcccctccccaccagggcttcagcaggagccctggactcatcatcaataaacactgttacagc

SEQ ID NO: 838 - DNA, 4703 bp, Homo sapiens
gggaatatcctctcaagccctgaggtgcagggctgggaaggagtgggtgagcggctgggtcgtggcaggttggtctggggaggctggggaggctggggaggcgggaggagaacggttggccccggcagcggcgtgtcggagggcggatggggctaggaggccgcccggggggtggggtctgcggcgggccggcccccgcgtgcgcgtcgcctcgccgggcatttcaaaagctcgccggcagggcgcggcgctagctccgtgtgcctcgcaggcgtggtgggcgcgtcctggcagccgcccgcttggttctcgcgggatccgggctccggctcgacgccggctctctttttgacgccccgccgccggggttgccatggttcatttcttgcacccgggccacacgccccggaacatcgtccctcctgacgctcagaaggatgccctgggctgctgcgtggtacaggaagaggcatctccctacactttggtcaacatctgcctgaatgtcctgattgctaacctggagaaattgtgttctgaaagacctgatggaacactgtgccttccggagcattggagtttccctcaggaagtagccgagcgatttctcagggtgatgacttggcaaggcaagctgactgacagaacagccagcattttccgaggcaaccaaatgaaactgaagctggtcaatatccaaaaagctaaaatctctacagctgcattcataaaagccttctgccgtcataagctcattgaactgaatgctactgcagtgcacgctgacctcccagttccagacatcataagtggactctgcagcaataggtggatccagcaaaacctccagtgtctcctgttagactcgacaagcatccctcaaaattcaagattactgttctttagtcagctcactggtcttcgcattttaagtgtttttaatgtttgttttcatactgaagacctggctaatgtttctcagttaccaagactggaaagcttagatatctctaatactctagtcactgatatttctgcactgcttacctgtaaggatcgattgaagtctctcacaatgcactatctgaaatgcctggccatgaccaaatcacaaattcttgcagtcattagagaacttaaatgtctgcttcaccttgatatttctgatcacaggcaactcaaatcagacctagcttttcatttgctacagcagaaggatatcctgcccaatgttgtgtcattggatatttctgggggcaattgcatcactgatgaagctgtagaactgtttatacgactgcggcctgccatgcaatttgtgggactattggccacggatgctggctcttctgacttctttactacaaagcaaggcttgagggttgctggaggagccagtatgagtcagatttcagaagcactgagccgatacaggaacagatcatgttttgtgaaggaagccctccacaggctgttcacagagacattttcaatggaggtaaccatgcctgctattttaaagcttgtggctataggaatgaggaatcacccattggatttgcgagtgcagttcacagccagtgcttgcgctctcaacctaacacgccagggcctggccaaggggatgcctgttcgcctgttgtcagaggtcacctgtctacttttcaaggctctgaaaaatttcccccattaccagcagttacagaagaattgtcttctctccttaaccaattccaggattcttgtggatgttccatttgacaggcaaagaaggtttgatgctgccaagtttgtcatgagatggctctgtaagcatgaaaaccccaagatgcaaacaatggcagtgagtgtcacctctattctggctctgcagctctcacctgagcaaacggcacagcttgaagagcttttcatggcagttaaggaacttctagcaatagtaaaacaaaagactactgagaatttagatgatgtcaccttcttgtttactttgaaagcactttggaatcttacagatgggtctccagctgcctgcaagcacttcattgaaaatcaaggattgcaaatcttcatccaagtcttggagaccttttcagagtcagcaatacaaagcaaagtacttggtcttttgaacaacatagcagaagtcagagagctctcttccaagctggtgaccgaagatgtgctgaagcatatcaacagtttactctgtagcagggaaatggaagtcagctattttgctgcaggtatcatagcccacctgacatctgacagacagctttggatatcccgtgacttccagaggcgtactcttctccaagatctgcatgcaaccatacagaattggccaagttcaagttgtaagatgacagcattggtgacctatagatctttcaagacatttttcccgctccttggcaacttctctcaaccagaggttcagctctgggcactatgggctatgtatcatgtctgcagtaaaaatcccagcaaatactgcaaaatgttagttgaagaagaaggattgcagcttttgtgtgatatccaggagcacagtgaggcaacccccaaagcacagcagattgcagcctccattctggatgacttcagaatgcatttcatgaattatcagaggcccactctgtgtcaaatgcccttctgaacctaaggaatttcagaggtgtgtgctcttcctcaatgtcaggtgttctgccctggcagtaattgcacatcagttgtcattggagtttgtgagttggctgtctcattggcctttgattgttgattttatatatgttacaaaaggttggatttgtatgatagctgtaatcccaagtcaagttggactcattctgcagcctttcagcagcaattttgaagactcaaaccgtggactctgggaaggcctgggagcttgtgttggaacagctatgcaagttacttttctctagccttggacaattttttccctttgggagcttgtcatgggagtgggacctgttcactagaagagaaaggaaacctacagggagactttgatatttatattaaatttcctttgttgttatcgtcatgtgaagctatgagaaaagcttgggaagcatatgcttcaaaatgtagtgtttagaaggcagaacccctgttggagagcggggaaaagaatttatttatttatttatttatctatggctgggtatggtggctcacgcctgtaatcccagcactttgggaggccaaggcaggtggattgtctgaactcaggagttcgagatcagccttgccaacgtggtaaaactccgtctctaccaaaaaatacaaaaattagctgagcgtggtggtgtgcacctttactcctagctacttggaggctgaggtgggaggaccacttgagcccaggaggcagaggttgcagtgagctgagattgcaccactgcactccagcctggatgacagagtgagacctcatctcaaatgaatagaggggtggagaaaagagaaatatatttttttacctttttttttttttttttttttgtgacggaatctcgctctgtcgcccaggctggagtgcagtggcacaatctcggctcactgcaacctctgcctcccaggttccagcaattctcctgcctcagcctcctgagtagctgggactacaggcacatgccgccacgcccggctaatttttgtattttttagtagagacagggtttcaccatattggtcaggctggtctcgacctcctgacctcgtgatccacccgtctcggcctcccaaagtgctgggattacaggtgtgagtcactgcacctggcctttttacaattttgggtgtctatctttggcatgtttcctgttatgtgagcatgacatgctgtgtatgtgagtgagcttgtagggcgtggtgggacttaggcatttgcagacagtgtttagatgaaagattacatgtaatgataaatctgaatccctccattttatttgggtggaaccatgaccaaaaatggtaggaagacgaaaggccagaaagagactttgccagagagttcacggagttttcttaccccgcatgctgactaaagaaaacatgggcttttctgaaaccagcttcaactacagtataaactatatcagaagcttacttgataagccttgcggagctgctctgaggaatagtgtgaattccttccttgccttattgttgactgttaatgaacatgttttgtcatttatctgtttaagtttttcagaaaataaaagtaaatttctgttagcacattttaggattagatttttgtgcttttggctggcttggttcagattcttaactagagtaccatgtactgtctttggaaatcaaatgaggaagaagctcattctcttactctaaaccatgttccaaactattaccagagtccaaccagataagcagaatttgtaaccttacttccttccatagtccttaaactgtactgtattttttcacactcttgcatgattccaaaaggatatcttcctgacctgggttctagtacctcagagcattgttatcagatgctagcttattctaatgtgaggatgtgttaggggaactagtgtgttaagtccaattctgtacaagacatcctttcaagttctgtgtcattcacaacaatcctcacgggtaggtgagttttattttcctcacttaacagatgagaaaaa

SEQ ID NO: 839 - DNA, 3432 bp, Homo sapiens
tcggccaccgctcgcttcaatatggctgcccccagggagagacgaggctaccatgaaggagccgagcgcagaccctgagtccgtcacccatggatcgcagcgcggagttcaggaaatggaaggcgcaatgtttgagcaaagcggacctcagccggaagggcagtgttgacgaggatgtggtagagcttgtgcagtttctgaacatgcgagatcagtttttcaccaccagctcctgcgctggccgcatcctactccttgaccggggtataaatggttttgaggttcagaaacaaaactgttgctggctactggttacacacaaactttgtgtaaaagatgatgtgattgtagctctgaagaaagcaaatggtgatgccactttgaaatttgaaccatttgttcttcatgtgcagtgtcgacaattgcaggatgcacagattctgcattccatggcaatagattctggtttcaggaactctggcataacggtgggaaagagaggaaaaactatgttggtgctgtccggagtacacatggcttagaagttccattaagccataagggaaaactgatggtgacagaggaatatattgacttcctgttaaatgtggcaaatcaaaaaatggaggaaaacaagaaaagaattgagaggttttacaactgcctacagcatgctttggaaagggaaacgatgactaacttacatcccaagatcaaagagaaaaataactcatcatatattcataagaaaaaaagaaacccagaaaaaacacgtgcccagtgtattactaaagaaagtgatgaagaacttgaaaatgatgatgatgatgatctaggaatcaatgttaccatcttccctgaagattactaagctttggttctgatgtgtcttggccgtaatgtttctagtaggttttataaagctgctcttcataagagtattttagtttgttgagtgtatcagccattcataagccagtaatgacaagtgcagagcttcaaactataactttgttgcccagaggatgtgcagttgtcatctaagctctcagcagtacccggcttatcctacgacttcacctgaaatgctatagttatccctacttttttaccagtttctcccagaagcacctgcttaataaatcaaagatgtttgaatggtgtcttattctgaaataacctgacctaagacaggtatttagattattttggatacattttgaaaagggatagcataaatattttaagtaaaaagacctttattttaaataatagtggatattttaatgctggaaattagcattatagttgatatgccagaaattatatctttggttgtgatttaaacttatgctataaactaaattaatgatgtaaatacatagttttaaacattcttttagggacatgtaacttttaagtatcacttcaataatacgtattattataggaacaaagatttgggaataattgattacaggtgaggaagtactggaattccagttcaaggagataccatttcatttaggactaaaaggacaagatacaagttcacatgatgggaaaaatcagaaaacctctcgcagacaaagggtatataatggatatgaggcatcaaaaagcatggtatagtcagtgatggggaatagtccagaaaggctgaaacacagcatgtgatgcgagtcaaggtagttgatgcccaactgtgaagggccgttctaatctagcatggaggtagacagtgtttccttaatatggctgcatatcagaattacctaggtcaggacgaggcatggagatgctactttaataggccctgccgcagatcttccaaaccagaatcttaatcctggagtctaggaatctttatttttcacacaactcatccaagtggttctgataaaatcagtccagcacttttagaacccactgataacagacttattcctggagacagcatttgaggaggaattgaagatttttctaatgaaaagaaaaagggtcacatgaacagatgttgcagtgtacctgtgccagggatttcatgtgtacactttataggagaataagcaagagcttaggtaagttatagtccttaccattgggtctaaggcagtttccaggaaagcatggcaactcgttcagctatgtaagttgaactctgtaccacttgggagggaacattcccctagatgacaatgtcagtggcactcgaagttgtgcagtgcacattcttatctaccaacatatacagcagtccttctgggaaggaaatttgggcaggaaagggaactcacagtgtcggaatgcctggagcatttcttctagtctggtggacagaatatgaaagtatctgcctggcagtgcagtaaatgaaaagagaagataaatgaataaaaaaaaaagttataaataacagtaggaaagagagagtgcaggtggaacgagcctatcctgtggtgaaatgacaacacattctgcagttttaaaatctaagaggctcattgacttttcttcattcatttaaattgatctccaagaaaactatgtattttaaagattccataaactgaatatatgaatgagaattaagaagagaggggctgcttcctaatctgtttatataaggtatagtatagtataatctgtttatataaggttagtagagaggagacaccaggtgctggccataaacctaagaagacattgaatcccattcactccttaacattccttaatatacattcatgagctacataacattttaatcatcaatgatggaccatataccatatacgatatggtggccccataagattataatggacctgaaaaattcctattgctagtgatgtggtcattgtaaagctgtagcacaacacattacccacgtttgtggtgacagtcatataaaagtatggtacatataattatgtacagtgcatacataatacttgataatatgttactggtttgtgtctttgctatgctttttatcattattttagggtatactacttaaaatgttaactgtaaaacagcttctgacaggtccttcaggaagtactccagaagaaggcattgttatcatagaaggtgacagcttcatgtgtgttattgcccctgaagaccttccagtggtacaagatgtggaggaggaagacagtgatactgaggattctgaccctgtgtaggcttaggctaatgtgtgtgtttatatcttagtttttcacaaaaaggtttttccaatgttaaaaaaaatatataaaaaagcttatagaataaggatataaagaaatattttgtacagctgtacaataagctaagcattattaccaaagagtcaaaaagttttaagaaattaaagtttataaaccaaatgttcattgtgagccaaggttaatttattgaagaaataaaacatttttaatg

SEQ ID NO: 840 - DNA, 4052 bp, Homo sapiens
tcggcgagccggtgccccatcgggtaccgcacggctgccgcggcggccttaccctgccgcgagcgcctgtgacagcggcgccgctgtgctcgcgaccccggctccgggcctctgccgacctcaggggcaggaaagagtcgcccggcgggatgggcggggaggctgggtgcgcggcggccgtgggtgccgagggccgcgtgaagagcctgggtctggtgttcgaggacgagcgcaagggctgctattccagcggcgagacagtggccgggcacgtgctgctggaggcgtccgagccggtggccctgcgcgcgctgcgcctggaggcccaggggcgcgccaccgccgcctggggcccgagcacctgcccccgcgcctcggccagcaccgcggccctggctgtcttctcggaggtggagtacctgaacgtgcgcctcagcctgcgggagcccccggccggtgaaggcatcattttattacagcctggaaaacatgaatttccatttcgctttcaacttccatctgaacctttggtcacctcgtttactgggaaatatggaagcattcagtactgtgtgcgggcagtgttggaacgacccaaggtacctgatcagagtgtaaagcgggaactccaggttgttagtcatgtcgatgtcaacacaccagcattattaacccctgtattgaaaactcaagagaaaatggttggctgttggtttttcacttctggtccagtctcgctgagtgccaaaattgaaagaaagggatactgtaatggagaagctattccaatctatgcagaaatagaaaattgttcctctcgtctgattgttccaaaggctgctattttccaaacgcagacatatttggctagtggaaaaacaaagaccattcgacacatggtcgccaatgtgcgaggaaaccacatcgcttctgggagcacagacacatggaatgggaaaacgctaaaaatcccacctgttactccatccatcctggattgctgcattatcagagtggactattccttagctgtatacattcacattcctggtgctaaaaaattgatgctcgaactgccattagtgatcggtacaattccatataatggttttggcagcagaaactccagcattgccagccagttcagtatggatatgagctggttgacactgaccctgccagagcagcctgaagcaccaccaaattatgcagatgtggtatcagaggaagaattctctagacacattcctccttaccctcaaccccctaactgtgagggagaagtgtgctgtcctgtgtttgcctgtatacaagaattccggtttcaacccccacctctttattcagaggttgacccacatcctagcgacgtagaagagagccagcctgtttccttcattctctgaacgtatttcagaaatcactgtgttcatcatcaaattagaatgttggttcttttccttctgcctttttgggaaagagacaggaaagattcacttgaaaacataaatgaacgtcaagactgaaggcaatagaaattaaagaatgtgagaaagttctggtgggccggcaggattgccgcacaagtttatatgatggtcgtatatatatccctgttaaaaactgggatgaagatgtgcaaagtcacagaatgtaatggaagtcctgatggttacagagtaagtgaaagggtgcctgcgctgacgtgagagaaaggaatctgtaaacagtggaaacactgtgggagtttcccatggtgaagagtggaacgaaggcgatatgaactgaaggggtgaagacttgattttggagagggcaacaaaacaagggtgtgtgtgcataggagaatggcccactccaaatacgaagtgagatcctgagtctttgggtgcttcatgatttcctaccatattcaggcctaaagacattgaaaaagcatcttttcttgagatcatggtcatatgaggtcctaatgaagtactacagttttcattctttcaagggtagactaaaatatagtttataaatcggcagtacggtattatgaaaccaagaaagggtttcttgaaaagcttgtcggttcaaagaggaaagatgaatttcaatgtgaaaacacgttttgttgagggctgtactttttaccccctttaagtgctttaacaggatatacgtttgattttcctcatatcttatttacctaggagcatgtaagagaaagaagggagagaaaaggttgcatctgcaggatgccttgataactacacagtcccaaataaaaggcctttttctaacctacctctaatggggttatcagatatgtttttaaatctctcgccctgagtactcttcttgggagttgctgctgtttacagccacagtctcatctatcactaaatatgaaactgggccaaggggaaaattcagtaagttagcgttaaatggaagtaaatatatgtatacctaagagaatgtcaaaataaacaccaaaccaaaagaaggtaggagtgccatttttagaaaagacacaactttaattcctgtcaagagacctaggtctactgatggcagtcactgcattgtacattattccagttcttcagtaattctgtttaaactgtgattttctttattgtgttggtgcaatattttattatcatttaacctcaggatattcagaccaacaggattgtgttgctgctgaaagtctgagcagtgttttaccgtccccagcccccctcccacatggtcacatgttcacttgcttttccttccatctgttggttttgtgagctgagagcatctctggacacatggaagggagccagggattcctgtgatacagattttgaaccagcagagtactttggttttcttcatgtcctaagggtttgatccagaaaccctggtgcttcccctgcagaatactgtacttcatttaacagaatgattgatttttctttcaatcagcatgttcaccaaaaatagaaaagttcttctaaggttaaattttgtatttaaaagttagttggccatttgatcagggaattttctacacacattaggcaaatgtatgcttttcatcctctgggcttacctctctcctctgcaatcctggaagcatcgtgcatagttctttcattgtaagccgctatttaaattcccacaatgcaaaactgttagaccagtaattgtgctactgaaattgtcacaaaacgttattccttgatttggtttttaaattttgctttcgtgtgtgtgtctttaaacaggtaatgtgtatttaagtgttgtctaaacagttgatttttactttagaaaagatcatcttcaactgtttattgacttctgagttatatagttcatgccctgccaaggcattgttcgactccatgatactaaaacataatgaaagaaacaaactccagtatggagaagagaaagtttaattatttggttccatctagaaaagcaacaacttaaaggaatccttcactaggattgtcttatcacctttattagataaatcatgaagtgtccctgtgaaattgaagtgaaactatctctgtaggacttaagagaatagctaaaaggtgtgacttgccttattgaaatgatactggcatatctgactgtaagcagtaggttgaagatatcattttatgaatgtggagaattctacattgaaacagaaaatacctgggaatgaagattaaaaatgtagctgctgttatttgcttggttattcccctcttgctcttctttagtttgaaaaaacaaaaacgtggccttggaattttcattttgatgcagaaattttgaaattgaaaatgtgcatgttttggtgcacaaaatccttctgtgggcaaaactttgtttttgttttgcacagtaagaaacaataggcaagcgttatgtttttggtaagttaactatgaaagctttcttatttttattattaaaaatgtaacaatttaacccacaggaaaaaaaattactttgtatgcttgtttgaaccctatgggttcgttttattaataaaattattacactaa

SEQ ID NO: 841 - DNA, 2927 bp, Homo sapiens
gacgtttccgcctcctgcttgaaactaacccctctttttctccaaaggagtgcttgtggagatcggatcttttctccagcaattgggggaaagaaggctttttctctgacttcgcttagtgtaaccagcggcgtatattttttaggcgccttttcgaaaacctagtagttaatattcatttgtttaaatcttattttatttttaagctcaaactgcttaagaataccttaattccttaaagtgaaataattttttgcaaaggggtttcctcgatttggagctttttttttcttccaccgtcatttctaactcttaaaaccaactcagttccatcatggtgatgttcaagaagatcaagtcttttgaggtggtctttaacgaccctgaaaaggtgtacggcagtggcgagaaggtggctggccgggtgatagtggaggtgtgtgaagttactcgtgtcaaagccgttaggatcctggcttgcggagtggctaaagtgctttggatgcagggatcccagcagtgcaaacagacttcggagtacctgcgctatgaagacacgcttcttctggaagaccagccaacaggtgagaatgagatggtgatcatgagacctggaaacaaatatgagtacaagttcggctttgagcttcctcaggggcctctgggaacatccttcaaaggaaaatatgggtgtgtagactactgggtgaaggcttttcttgaccgcccgagccagccaactcaagagacaaagaaaaactttgaagtagtggatctggtggatgtcaatacccctgatttaatggcacctgtgtctgctaaaaaagaaaagaaagtttcctgcatgttcattcctgatgggcgggtgtctgtctctgctcgaattgacagaaaaggattctgtgaaggtgatgagatttccatccatgctgactttgagaatacatgttcccgaattgtggtccccaaagctgccattgtggcccgccacacttaccttgccaatggccagaccaaggtgctgactcagaagttgtcatcagtcagaggcaatcatattatctcagggacatgcgcatcatggcgtggcaagagccttcgggttcagaagatcaggccttctatcctgggctgcaacatccttcgagttgaatattccttactgatctatgttagcgttcctggatccaagaaggtcatccttgacctgcccctggtaattggcagcagatcaggtctaagcagcagaacatccagcatggccagccgaaccagctctgagatgagttgggtagatctgaacatccctgataccccagaagctcctccctgctatatggatgtcattcctgaagatcaccgattggagagcccaaccactcctctgctagatgacatggatggctctcaagacagccctatctttatgtatgcccctgagttcaagttcatgccaccaccgacttatactgaggtggatccctgcatcctcaacaacaatgtgcagtgagcatgtggaagaaaagaagcagctttacctacttgtttctttttgtctctcttcctggacactcactttttcagagactcaacagtctctgcaatggagtgtgggtccaccttagcctctgacttcctaatgtaggaggtggtcagcaggcaatctcctgggccttaaaggatgcggactcatcctcagccagcgcccatgttgtgatacaggggtgtttgttggatgggtttaaaaataactagaaaaactcaggcccatccattttctcagatctccttgaaaattgaggccttttcgatagtttcgggtcaggtaaaaatggcctcctggcgtaagcttttcaaggttttttggaggctttttgtaaattgtgataggaactttggaccttgaacttatgtatcatgtggagaagagccaatttaacaaactaggaagatgaaaagggaaattgtggccaaaactttgggaaaaggaggttcttaaaatcagtgtttcccctttgtgcacttgtagaaaaaaaagaaaaaccttctagagctgatttgatggacaatggagagagctttccctgtgattataaaaaaggaagctagctgctctacggtcatctttgcttaagagtatactttaacctggcttttaaagcagtagtaactgccccaccaaaggtcttaaaagccatttttggagcctattgcactgtgttctcctactgcaaatattttcatatgggaggatggttttctcttcatgtaagtccttggaattgattctaaggtgatgttcttagcactttaattcctgtcaaattttttgttctccccttctgccatcttaaatgtaagctgaaactggtctactgtgtctctagggttaagccaaaagacaaaaaaaattttactacttttgagattgccccaatgtacagaattatataattctaacgcttaaatcatgtgaaagggttgctgctgtcagccttgcccactgtgacttcaaacccaaggaggaactcttgatcaagatgccgaaccctgtgttcagaacctccaaatactgccatgagaaactagagggcaggtcttcataaaagccctttgaacccccttcctgccctgtgttaggagatagggatattggcccctcactgcagctgccagcacttggtcagtcactctcagccatagcactttgttcactgtcctgtgtcagagcactgagctccacccttttctgagagttattacagccagaaagtgtgggctgaagatggttggtttcatgtttttgtattatgtatctttttgtatggtaaagactatattttgtacttaaccagatatatttttaccccagatggggatattctttgtaaaaaatgaaaataaagtttttttaatggaaaaaaaaa

SEQ ID NO: 842 - DNA, 2103 bp, Homo sapiens
aaccgcatctgcagcgagcatctgagaagccaagactgagccggcggccgcggcgcagcgaacgagcagtgaccgtgctcctacccagctctgctccacagcgcccacctgtctccgcccctcggcccctcgcccggctttgcctaaccgccacgatgatgttctcgggcttcaacgcagactacgaggcgtcatcctcccgctgcagcagcgcgtccccggccggggatagcctctcttactaccactcacccgcagactccttctccagcatgggctcgcctgtcaacgcgcaggacttctgcacggacctggccgtctccagtgccaacttcattcccacggtcactgccatctcgaccagtccggacctgcagtggctggtgcagcccgccctcgtctcctccgtggccccatcgcagaccagagcccctcaccctttcggagtccccgccccctccgctggggcttactccagggctggcgttgtgaagaccatgacaggaggccgagcgcagagcattggcaggaggggcaaggtggaacagttatctccagaagaagaagagaaaaggagaatccgaagggaaaggaataagatggctgcagccaaatgccgcaaccggaggagggagctgactgatacactccaagcggagacagaccaactagaagatgagaagtctgctttgcagaccgagattgccaacctgctgaaggagaaggaaaaactagagttcatcctggcagctcaccgacctgcctgcaagatccctgatgacctgggcttcccagaagagatgtctgtggcttcccttgatctgactgggggcctgccagaggttgccaccccggagtctgaggaggccttcaccctgcctctcctcaatgaccctgagcccaagccctcagtggaacctgtcaagagcatcagcagcatggagctgaagaccgagccctttgatgacttcctgttcccagcatcatccaggcccagtggctctgagacagcccgctccgtgccagacatggacctatctgggtccttctatgcagcagactgggagcctctgcacagtggctccctggggatggggcccatggccacagagctggagcccctgtgcactccggtggtcacctgtactcccagctgcactgcttacacgtcttccttcgtcttcacctaccccgaggctgactccttccccagctgtgcagctgcccaccgcaagggcagcagcagcaatgagccttcctctgactcgctcagctcacccacgctgctggccctgtgagggggcagggaaggggaggcagccggcacccacaagtgccactgcccgagctggtgcattacagagaggagaaacacatcttccctagagggttcctgtagacctagggaggaccttatctgtgcgtgaaacacaccaggctgtgggcctcaaggacttgaaagcatccatgtgtggactcaagtccttacctcttccggagatgtagcaaaacgcatggagtgtgtattgttcccagtgacacttcagagagctggtagttagtagcatgttgagccaggcctgggtctgtgtctcttttctctttctccttagtcttctcatagcattaactaatctattgggttcattattggaattaacctggtgctggatattttcaaattgtatctagtgcagctgattttaacaataactactgtgttcctggcaatagtgtgttctgattagaaatgaccaatattatactaagaaaagatacgactttattttctggtagatagaaataaatagctatatccatgtactgtagtttttcttcaacatcaatgttcattgtaatgttactgatcatgcattgttgaggtggtctgaatgttctgacattaacagttttccatgaaaacgttttattgtgtttttaatttatttattaagatggattctcagatatttatatttttattttatttttttctaccttgaggtcttttgacatgtggaaagtgaatttgaatgaaaaatttaagcattgtttgcttattgttccaagacattgtcaataaaagcatttaagttgaatgcg

SEQ ID NO: 843 - DNA, 1597 bp, Homo sapiens
agccttctgggtccgaggctcccacctgctctaagcgcttgacaccctttaaaaaaatgtatttaaagaggctggttcctatccatccgactggaggcatctcagtgcaagagcaaagctaagtcctgcacacgctcctcccctcctcctcctccttctccccccaggttttcccgaatgtatctactccggttacaactagacgcggcccctcccccacctgcctccccccttccttccctcgatcgtggagggagcgttctctgtgccttcccaagtccccgtgggggaccttctatgttggagtggggggagggggggagggtcatataacgaaggccagaaagaacaaattagataatcaaaagaattatagtaattgctttcactttcccccgcccgctcagcggattccctcccccgcccctcccctggtttttctgtctgtcgggaatactcggtctttccgaccccctcccctcccccaggttcctcctctcctctccccttgctcgcgcgttccctctcttcctccgttttctggtgtgctggaacgttcagcggaatatgatgaatgatcacctgtcacagcttgtttattataatgcaggcaatcaattacacatccccaatgctggccggcccgcaggaaatttatatgctcagcacaaaccaatgtgaaaatggaatctcatttgccaaatgtctttctccccgtacagcacgatgattacagtctgtgtttgtttcaacagtcgtgtacaactgacagtgccatcatttactgcctggctcaggtcacgttactctaaggctttatttatggtgttacgaagggcagcacaggaaaaggacaagggtgtctgtcagggatggcactgtgttaaaaagtgggcgtgcaagggccgcattcccgggcagccgctgcaacctcagcccctgggcccttacctccgcagcctctcccagcatccagctacccagactccaaggccccaggcgagagccagctctcggtacctggagctccacaggtcccagaatcggggtggatcagagttcaaattctggttctgctactgtctaattgcgtgctgcagggactcaatctcttcatctgggaaatgggagtaataacccttggcaggaatgttgcgatcctctgggatgtcagaggtgttgatgaatgttagttcccgggacttcggaaagaggtcccgttggaagagatgtgaattggaattcacaccctatattaaaatctcctccaatcttcacctctgagacatggctgtctcaagactgttttgtttcccttcctggtggaattttgcacttttatgtcctgtgtagcagcaggtagtgtggctttgagaaaataaaatggccaccttgctccgctgttctttctttgtaaaaaaaaaaaaaaaaaaaaaaaaacggcatagcaatcttggcctttctagctgtgtgaccccaggccggtcaatccctcctcctctccaagcctcggattcctcccctgagaagtaaagaaaataactcctaaactgcctcccgaggcttgctggcaggatccaaggtgtccagagatgtt

SEQ ID NO: 844 - DNA, 1106 bp, Homo sapiens
cagctgctgcccacaccgcgctcagcgccttcactgccatccccgctgtccttgccgcccccgccatgggcctagagctgtttcttgacctggtgtcccagcccagccgcgccgtctacatcttcgccaagaagaatggcatccccttagagctgcgcaccgtggatttggtcaaagggcagcacaagagcaaggagttcttgcagatcaacagcctggggaaactgccgacgctcaaggatggtgatttcatcttgaccgaaagctcggccatcctgatttacctgagctgtaagtaccagacgccggaccactggtatccatctgacctgcaggctcgtgcccgtgttcatgagtacctgggctggcatgccgactgcatccgtggcacctttggtatacccctgtgggtccaggtgttggggccactcattggggtccaggtgcccaaggagaaggtggaacgcaacaggactgccatggaccaggccctgcaatggctggaggacaagttcctgggggacaggcccttcctcgctggccagcaggtgacactggctgatctcatggccctggaggagctgatgcagccggtggctctcggctatgaactgtttgagggacggccacgactggcagcatggcgtggacgagtggaggctttcctgggtgctgagctatgccaggaggcccacagcatcatcttgagcatcctggaacaggcggccaagaaaaccctcccaacaccctcaccagaggcctatcaggctatgctgcttcgaatcgccaggatcccctgaagggtctgggatgggggccaggagattagcaacaaggattcattctgttacttacttgcccctttttatctttccctcttgccccagtcccttctctccagcttcatgtgaagctctgcacagacaagacactcagtgtccttggcagtgctgctactcctcaggtgcagcatacataaccagtaagagactaaatctgcaatatataaagagctcctacaaatcagtaacatgaagaacactcaaaaattggcaaatgtcatcagtgttttaaacagaataaagattccaaacactttgaataga

SEQ ID NO: 845 - DNA, 1109 bp, Homo sapiens
cagctgctgcccacaccgcgctcagcgccttcactgccatccccgctgtccttgccgcccccgccatgggcctagagctgtttcttgacctggtgtcccagcccagccgcgccgtctacatcttcgccaagaagaatggcatccccttagagctgcgcaccgtggatttggtcaaagggcagcacaagagcaaggagttcttgcagatcaacagcctggggaaactgccgacgctcaaggatggtgatttcatcttgactgaaagctcggccatcctgatttacctgagctgtaagtaccagacgccggaccactggtatccatctgacctgcaggctcgtgcccgtgttcatgagtacctgggctggcatgccgactgcatccgtggcacctttggtatacccctgtgggtccaggtgttggggcccctcattggggtccaggtgcccgaggagaaggtggaacgcaacaggactgccatggaccaggccctgcaatggctggaggacaagttcctgggggacaggcccttcctcgctggccagcaggtgacactggctgatctcatggccctggaggagctgatgcagccggtggctctcggctatgaactgtttgagggacggccacgactggcagcatggcgtggacgagtggaggctttcctgggtgctgagctatgccaggaggcccacagcatcatcttgagcatcctggaacaggcggccaagaaaaccctcccaacaccctcaccagaggcctatcaggctatgctgcttcgaatcgccaggatcccctgaagggtctgggatgggggccaggagattagcaacaaggattcattctgttacttacttgcccctttttatctttccctcttgccccagtcccttctctccagcttcatgtgaagctctgcacagacaagacactcagtgtccttggcagtgctgctactcctcaggtgcagcatacataaccagtaagagactaaatctgcaatatataaagagctcctacaaatcagtaacatgaagaacactcaaaaattggcaaatgtcatcagtgttttaaacagaataaagattccaaacactttgaatagagaa

SEQ ID NO: 846 - DNA, 5107 bp, Homo sapiens
cactcctccccatcctctccctctgtccctctgtccctctgaccctgcactgtcccagcaccatgggacccacctcaggtcccagcctgctgctcctgctactaacccacctccccctggctctggggagtcccatgtactctatcatcacccccaacatcttgcggctggagagcgaggagaccatggtgctggaggcccacgacgcgcaaggggatgttccagtcactgttactgtccacgacttcccaggcaaaaaactagtgctgtccagtgagaagactgtgctgacccctgccaccaaccacatgggcaacgtcaccttcacgatcccagccaacagggagttcaagtcagaaaaggggcgcaacaagttcgtgaccgtgcaggccaccttcgggacccaagtggtggagaaggtggtgctggtcagcctgcagagcgggtacctcttcatccagacagacaagaccatctacacccctggctccacagttctctatcggatcttcaccgtcaaccacaagctgctacccgtgggccggacggtcatggtcaacattgagaacccggaaggcatcccggtcaagcaggactccttgtcttctcagaaccagcttggcgtcttgcccttgtcttgggacattccggaactcgtcaacatgggccagtggaagatccgagcctactatgaaaactcaccacagcaggtcttctccactgagtttgaggtgaaggagtacgtgctgcccagtttcgaggtcatagtggagcctacagagaaattctactacatctataacgagaagggcctggaggtcaccatcaccgccaggttcctctacgggaagaaagtggagggaactgcctttgtcatcttcgggatccaggatggcgaacagaggatttccctgcctgaatccctcaagcgcattccgattgaggatggctcgggggaggttgtgctgagccggaaggtactgctggacggggtgcagaacccccgagcagaagacctggtggggaagtctttgtacgtgtctgccaccgtcatcttgcactcaggcagtgacatggtgcaggcagagcgcagcgggatccccatcgtgacctctccctaccagatccacttcaccaagacacccaagtacttcaaaccaggaatgccctttgacctcatggtgttcgtgacgaaccctgatggctctccagcctaccgagtccccgtggcagtccagggcgaggacactgtgcagtctctaacccagggagatggcgtggccaaactcagcatcaacacacaccccagccagaagcccttgagcatcacggtgcgcacgaagaagcaggagctctcggaggcagagcaggctaccaggaccatgcaggctctgccctacagcaccgtgggcaactccaacaattacctgcatctctcagtgctacgtacagagctcagacccggggagaccctcaacgtcaacttcctcctgcgaatggaccgcgcccacgaggccaagatccgctactacacctacctgatcatgaacaagggcaggctgttgaaggcgggacgccaggtgcgagagcccggccaggacctggtggtgctgcccctgtccatcaccaccgacttcatcccttccttccgcctggtggcgtactacacgctgatcggtgccagcggccagagggaggtggtggccgactccgtgtgggtggacgtcaaggactcctgcgtgggctcgctggtggtaaaaagcggccagtcagaagaccggcagcctgtacctgggcagcagatgaccctgaagatagagggtgaccacggggcccgggtggtactggtggccgtggacaagggcgtgttcgtgctgaataagaagaacaaactgacgcagagtaagatctgggacgtggtggagaaggcagacatcggctgcaccccgggcagtgggaaggattacgccggtgtcttctccgacgcagggctgaccttcacgagcagcagtggccagcagaccgcccagagggcagaacttcagtgcccgcagccagccgcccgccgacgccgttccgtgcagctcacggagaagcgaatggacaaagtcggcaagtaccccaaggagctgcgcaagtgctgcgaggacggcatgcgggagaaccccatgaggttctcgtgccagcgccggacccgtttcatctccctgggcgaggcgtgcaagaaggtcttcctggactgctgcaactacatcacagagctgcggcggcagcacgcgcgggccagccacctgggcctggccaggagtaacctggatgaggacatcattgcagaagagaacatcgtttcccgaagtgagttcccagagagctggctgtggaacgttgaggacttgaaagagccaccgaaaaatggaatctctacgaagctcatgaatatatttttgaaagactccatcaccacgtgggagattctggctgtgagcatgtcggacaagaaagggatctgtgtggcagaccccttcgaggtcacagtaatgcaggacttcttcatcgacctgcggctaccctactctgttgttcgaaacgagcaggtggaaatccgagccgttctctacaattaccggcagaaccaagagctcaaggtgagggtggaactactccacaatccagccttctgcagcctggccaccaccaagaggcgtcaccagcagaccgtaaccatcccccccaagtcctcgttgtccgttccatatgtcatcgtgccgctaaagaccggcctgcaggaagtggaagtcaaggctgctgtctaccatcatttcatcagtgacggtgtcaggaagtccctgaaggtcgtgccggaaggaatcagaatgaacaaaactgtggctgttcgcaccctggatccagaacgcctgggccgtgaaggagtgcagaaagaggacatcccacctgcagacctcagtgaccaagtcccggacaccgagtctgagaccagaattctcctgcaagggaccccagtggcccagatgacagaggatgccgtcgacgcggaacggctgaagcacctcattgtgaccccctcgggctgcggggaacagaacatgatcggcatgacgcccacggtcatcgctgtgcattacctggatgaaacggagcagtgggagaagttcggcctagagaagcggcagggggccttggagctcatcaagaaggggtacacccagcagctggccttcagacaacccagctctgcctttgcggccttcgtgaaacgggcacccagcacctggctgaccgcctacgtggtcaaggtcttctctctggctgtcaacctcatcgccatcgactcccaagtcctctgcggggctgttaaatggctgatcctggagaagcagaagcccgacggggtcttccaggaggatgcgcccgtgatacaccaagaaatgattggtggattacggaacaacaacgagaaagacatggccctcacggcctttgttctcatctcgctgcaggaggctaaagatatttgcgaggagcaggtcaacagcctgccaggcagcatcactaaagcaggagacttccttgaagccaactacatgaacctacagagatcctacactgtggccattgctggctatgctctggcccagatgggcaggctgaaggggcctcttcttaacaaatttctgaccacagccaaagataagaaccgctgggaggaccctggtaagcagctctacaacgtggaggccacatcctatgccctcttggccctactgcagctaaaagactttgactttgtgcctcccgtcgtgcgttggctcaatgaacagagatactacggtggtggctatggctctacccaggcaagtgccaccttcatggtgttccaagccttggctcaataccaaaaggacgcccctgaccaccaggaactgaaccttgatgtgtccctccaactgcccagccgcagctccaagatcacccaccgtatccactgggaatctgccagcctcctgcgatcagaagagaccaaggaaaatgagggtttcacagtcacagctgaaggaaaaggccaaggcaccttgtcggtggtgacaatgtaccatgctaaggccaaagatcaactcacctgtaataaattcgacctcaaggtcaccataaaaccagcaccggaaacagaaaagaggcctcaggatgccaagaacactatgatccttgagatctgtaccaggtaccggggagaccaggatgccactatgtctatattggacatatccatgatgactggctttgctccagacacagatgacctgaagcagctggccaatggtgttgacagatacatctccaagtatgagctggacaaagccttctccgataggaacaccctcatcatctacctggacaaggtctcacactctgaggatgactgtctagctttcaaagttcaccaatactttaatgtagagcttatccagcctggagcagtcaaggtctacgcctattacaacctggaggaaagctgtacccggttctaccatccggaaaaggaggatggaaagctgaacaagctctgccgtgatgaactgtgccgctgtgctgaggagaattgcttcatacaaaagtcggatgacaaggtcaccctggaagaacggctggacaaggcctgtgagccaggagtggactatgtgtacaagacccgactggtcaaggttcagctgtccaatgactttgacgagtacatcatggccattgagcagaccatcaagtcaggctcggatgaggtgcaggttggacagcagcgcacgttcatcagccccatcaagtgcagagaagccctgaagctggaggagaagaaacactacctcatgtggggtctctcctccgatttctggggagagaagcccaacctcagctacatcatcgggaaggacacttgggtggagcactggcccgaggaggacgaatgccaagacgaagagaaccagaaacaatgccaggacctcggcgccttcaccgagagcatggttgtctttgggtgccccaactgaccacacccccattcccccactccagataaagcttcagttatatctca

SEQ ID NO: 847 - DNA, 2513 bp, Homo sapiens
agtgggcgggatagagagcgtgggcgggggggctagcctcgtgcgggctccttaagtagcggctgcgtggcttccctggcacgctactcttacgacgtcacggtcaggtggtgcagagctggacggcaacgacgtcggacgcgccccttcttggaacaatgtcccaccacggaggagctcccaaggcctctacgtgggtcgttgctagtcggcgaagctcgacagtgtcccgagcgccagagaggaggccggcggaggagttgaatcgaacaggtcctgagggatatagtgtcggcagaggtggtcgctggagaggcacctctaggcccccggaggccgtggccgctggtcacgaggaactgccgctgtgttttgctttgaagagccactttgttggcgcggtaatcggtcgtggtgggtcaaaaataaagaatatacaaagtacaacaaacaccacaatccaaataatacaagaacaaccagaatcattagtcaaaatttttggcagcaaggcaatgcaaacgaaagcaaaagcagtgatagacaattttgttaaaaagctagaagaaaattacaattcagaatgcggaattgatactgcattccaaccttctgttggaaaagatggaagcacagataacaatgttgttgcaggagatcggccattgatagattgggatcaaattagagaggaaggtttgaaatggcaaaaaacaaagtgggcagatttaccaccaattaagaaaaacttttataaagagtccactgccacaagtgccatgtcaaaagtagaagcagatagttggaggaaagaaaattttaatataacgtgggatgacttgaaggatggggagaaacgacctatccccaatcctacctgcacatttgatgacgcctttcaatgttatcctgaggttatggaaaacattaaaaaggcaggttttcaaaagccaacacctattcagtcacaggcatggcccattgtgttgcaaggaatagatcttataggagtagcccagactggaacaggaaagacattgtgttatttaatgcctggatttattcatctggtccttcaacccagccttaaaggtcaaaggaatagacccggcatgttagttctaactcccactcgggaattagcacttcaagtagaaggagaatgttgcaaatattcatataaagggcttcggagtgtttgtgtatatggtggtggaaatagagatgaacaaatagaagagcttaaaaaaggtgtagatatcataattgcaactcccggaagattgaatgatctgcaaatgagtaacttcgtcaatctgaagaatataacctacttggttttagatgaagcagacaagatgttggacatgggatttgaaccccagataatgaagattttgttagatgtgcgcccagataggcagacagttatgaccagtgctacatggcctcattcagttcatcgcctcgcacaatcttatttgaaagaaccaatgattgtctatgttggtacattggatctagttgctgtaagttcagtgaagcaaaatataattgtaaccaccgaggaagagaaatggagtcacatgcaaacttttctacagagtatgtcatccacagacaaagtcattgtcttcgtttctcgaaaagctgttgcggatcacttatcaagtgacctaatacttggaaatatatcagtagagtctctgcatggagatagagaacagagagatcgggagaaagcattagagaactttaaaacaggcaaagtgagaatactaattgcaactgatctagcctctagaggacttgatgtccatgacgttacacatgtctataattttgactttccacggaatattgaagaatacgtacaccgaatagggcgcacgggaagagcagggaggactggtgtttccattacaactttgactagaaatgattggagggttgcctctgaattgattaatattctggaaagagcaaatcagagtattccagaggagcttgtatcaatggctgagaggtttaaggcacatcaacagaaaagggaaatggaaagaaaaatggaaagacctcaaggaaggcccaagaagtttcattaatgtcttctgtactagtggggtagagaattcaagattttttagaaatatagtaagacggaagtattggacatgttggcagtatgaagagaccggactgatttgactgattcttaaaataatagtgtttgaaaatatagaatccagtgttttatactttctttaataaaaatagaagtatttaaacttggaagttgtttcctggatttttattaaggagtgtagcattagaatgtttttcttttaatcttttaaactgtctcctgtaattttgctgtatgtcataaggccagtctttcagaatttaatgttcagattttgtcatggcagtgaaaaagatgttttcaaacaaagaatcagcacctgaaaaaatactgttaataaatgttcgtttctgtgataaaaagacaa

SEQ ID NO: 848 - DNA, 987 bp, Homo sapiens
aatataagtggaggcgtcgcgctggcgggcattcctgaagctgacagcattcgggccgagatgtctcgctccgtggccttagctgtgctcgcgctactctctctttctggcctggaggctatccagcgtactccaaagattcaggtttactcacgtcatccagcagagaatggaaagtcaaatttcctgaattgctatgtgtctgggtttcatccatccgacattgaagttgacttactgaagaatggagagagaattgaaaaagtggagcattcagacttgtctttcagcaaggactggtctttctatctcttgtactacactgaattcacccccactgaaaaagatgagtatgcctgccgtgtgaaccatgtgactttgtcacagcccaagatagttaagtgggatcgagacatgtaagcagcatcatggaggtttgaagatgccgcatttggattggatgaattccaaattctgcttgcttgctttttaatattgatatgcttatacacttacactttatgcacaaaatgtagggttataataatgttaacatggacatgatcttctttataattctactttgagtgctgtctccatgtttgatgtatctgagcaggttgctccacaggtagctctaggagggctggcaacttagaggtggggagcagagaattctcttatccaacatcaacatcttggtcagatttgaactcttcaatctcttgcactcaaagcttgttaagatagttaagcgtgcataagttaacttccaatttacatactctgcttagaatttgggggaaaatttagaaatataattgacaggattattggaaatttgttataatgaatgaaacattttgtcatataagattcatatttacttcttatacatttgataaagtaaggcatggttgtggttaatctggtttatttttgttccacaagttaaataaatcataaaacttgatgtgttatctctta

SEQ ID NO: 849 - DNA, 3616 bp, Homo sapiens
acttactgtcattaaaccagtatgatgatggagtggggaatgcctcagtttctcccaccgccgagggcctataggactacagttcccagggccccgtgctgcaggctagcggcctcccgccaatgctggccagtaacctgagcatccctctccaaaaggtcacttcagggctccttgagggacagcaacagggggagcctagagctgctcagcttcggtgggggtggagtgagggctgtggccctgcctcacacaacctccctcacaccacccctgcaatgcagggtcgtgggcccctttctcaaagacatccagtggcctctgctagttgcacctcttccgtcaggggacactgacttggctcctgcaccacagcctgcagggggtcctggttccttttgccacaacacatggcctcccatcctggttcagccactgacagacagctccccaatccagcactctgcctgctccttcttgtatccaaccctccaaaaggcagggacaagggacagaagaccatgtgcaaggcctggaggaagtgggtcagcacaggcctgtgaacaagccaggccagtcttggcggcccaagtggagctcacctctccctcccctctcctctcctccccttgccctcaaaatagctccctgagctgccaggccaagaccctcccattgcaggggaggcggggcgtgctgcccagagccaggctttaaatccccttgaggctggggagctccactccttggctggaggcagtgctgaggccgccgtcccctctaccatcagtccagtccggcccgccctcctgcagccatgtcccggcccctgtcagaccaagagaaaagaaagcaaatcagtgtgcgtggcctggccggcgtggagaacgtgactgagctgaaaaagaacttcaaccggcacctgcatttcacactcgtaaaggaccgcaatgtggccaccccacgagactactactttgctctggcccataccgtgcgcgaccacctcgtggggcgctggatccgcacgcagcagcactactatgagaaggaccccaagaggatctactacctgtctttagagttctatatgggacggacgctacagaacaccatggtgaacctggccttagagaatgcctgtgacgaggccacctaccagctgggcctggacatggaggagctggaggaaattgaggaggatgcggggctgggcaacgggggcctgggccggctggcagcctgctttcttgactccatggcaacactgggcctggccgcctatggctacgggattcgctatgagtttgggatttttaaccagaagatctccgggggctggcagatggaggaggccgatgactggcttcgctacggcaacccctgggagaaggcccggcccgagttcacgctacctgtgcacttctacggccatgtggagcacaccagccagggtgccaagtgggtggacacacaggtggtactggccatgccctacgatacgcccgtgcctggctatcgcaacaatgttgtcaacaccatgcgcctctggtctgccaaggctcccaatgacttcaacctcaaggacttcaatgtcggtggctacatccaggctgtgttggaccgaaacctggcggagaacatctctcgtgtcctgtaccccaatgataatttcttcgaagggaaggagctgcggctgaagcaggagtatttcgtggtggctgccaccctccaggacatcatccgtcgcttcaagtcttccaagttcggctgccgtgatcccgtgcgcacgaacttcgatgccttcccagataaggtggccatccagctcaatgacacccacccctccctggccatccccgagctgatgaggatcctggtggacctggaacggatggactgggacaaggcgtgggatgtgacagtgaggacctgtgcctacaccaaccacacggtgctgcccgaggccctggagcgctggccggtgcacctcttggagacgctgctgccgcggcacctccagatcatctacgagatcaaccagcgcttcctcaaccgggtggcggccgcattcccaggggacgtagaccggctgcggcgcatgtcgctggtggaggagggcgcagtgaagcgcatcaacatggcacacctgtgcatcgcggggtcgcacgccgtcaacggcgtggcgcgcatccactccgagatcctcaagaagaccatcttcaaagacttctatgagctggagcctcataagttccagaataagaccaacggcatcacccctcggcgctggctggttctgtgtaaccccgggctggcagaggtcattgctgagcgcatcggggaggacttcatctctgacctggaccagctgcgcaaactgctctcctttgtggatgatgaagctttcattcgggatgtggccaaagtgaagcaggaaaacaagttgaagtttgctgcctacctagagagggaatacaaagtccacatcaaccccaactcactcttcgacatccaggtgaagcggattcacgaatataaacgacagctcctcaactgcctccatgtcatcaccctgtacaaccgcatcaagagggagcccaataagttttttgtgcctcggactgtgatgattggagggaaggctgcacctgggtaccacatggccaagatgatcatcagactcgtcacagccatcggggatgtggtcaaccatgacccggcagtgggtgaccgcctccgtgtcatcttcctggagaactaccgagtctcactggccgagaaagtgatcccagctgcagacctctctgagcagatctccactgcgggcactgaagcctcaggcaccggcaacatgaagttcatgctcaacggggctctgaccattggcaccatggacggggccaatgtggagatggcagaagaggcgggagaggaaaacttcttcatctttggcatgcgggtggaggatgtggataagcttgaccaaagagggtacaatgcccaggagtactacgatcgcattcctgagcttcggcaggtcattgagcagctgagcagtggcttcttctcccccaaacagcccgacctgttcaaggacattgtcaatatgctcatgcaccatgaccggtttaaagtcttcgcagattatgaagactacattaaatgccaggagaaagtcagcgccttgtacaagaacccaagagagtggacgcggatggtgatccggaacatagccacctctggcaagttctccagtgaccgcaccattgcccagtatgcccgggagatctggggtgtggagccttcccgccagcgcctgccagccccggatgaggccatctgagcctccagaccagaccccaaaccagcccttgagtctgtcacactctcttgggccagccccagcacctcatgcagagggtggggtactggagttagatctctaagcccctcctggaaccctcattttccccactctcaatgtcccagtgtccagcgtgactaaggacacgggcccccttccgtcctcgggctcccggtcccctcctatttatggggtctgaccaactgcacccactccctaataaattcattctccttgggagcctcctta

SEQ ID NO: 850 - DNA, 2610 bp, Homo sapiens
gatcccaggtagtggcgccggtggatccggatcgagggcaggaggctgagacccgcgggagctggccctaaagcaaggacctgagtgcaagtaatttttttgggaagtaataacagaaaataccagcaaggaagaagacagtgaacccaaaagaattgaaaacagcaggatgctgcccatcacagaccgcctgctgcacctcctggggctggagaagacggcgttccgcatatacgcggtgtccacccttctcctcttcctgctcttcttcctgttccgcctgctgctgcggttcctgaggctctgcaggagcttctacatcacctgccgccggctgcgctgcttcccccagcctccccggcgcaactggctgctgggccacctgggcatgtaccttccaaatgaggcgggccttcaagatgagaagaaggtactggacaacatgcaccatgtactcttggtatggatgggacctgtcctgccgctgttggttctggtgcaccctgattacatcaaaccccttttgggagcctcagctgccatcgcccccaaggatgacctcttctatggcttcctaaaaccttggctaggggatgggctgctgctcagcaaaggtgacaagtggagccggcaccgtcgcctgctgacacccgccttccactttgacatcctgaagccttacatgaagatcttcaaccagagcgctgacattatgcatgctaaatggcggcatctggcagagggctcagcggtctcccttgatatgtttgagcatatcagcctcatgaccctggacagtcttcagaaatgtgtcttcagctacaacagcaactgccaagagaagatgagtgattatatctccgctatcattgaactgagcgctctgtctgtccggcgccagtatcgcttgcaccactacctcgacttcatttactaccgctcggcggatgggcggaggttccggcaggcctgtgacatggtgcaccacttcaccactgaagtcatccaggaacggcggcgggcactgcgtcagcagggggccgaggcctggcttaaggccaagcaggggaagaccttggactttattgatgtgctgctcctggccagggatgaagatggaaaggaactgtcagacgaggatatccgagccgaagcagacaccttcatgtttgagggtcacgacacaacatccagtgggatctcttggatgctgttcaatttggcaaagtatccggaataccaggagaaatgccgagaagagattcaggaagtcatgaaaggccgggagctggaggagctggagtgggacgatctgactcagctgccctttacaactatgtgcattaaggagagcctgcgccagtacccacctgtcactcttgtctctcgccaatgcacggaggacatcaagctcccagatgggcgcatcatccccaaaggaatcatctgcttggtcagcatctatggaacccaccacaaccccacagtgtggcctgactccaaggtgtacaacccctaccgctttgacccggacaacccacagcagcgctctccactggcctatgtgcccttctctgcaggacccaggaattgcatcggacagagcttcgccatggccgagttgcgcgtggttgtggcactaacactgctacgtttccgcctgagcgtggaccgaacgcgcaaggtgcggcggaagccggagctcatactgcgcacggagaacgggctctggctcaaggtggagccgctgcctccgcgggcctgagcgtgggcgcgcccctgcggctcccgagggtccaggccccgcccccaaaggaccaggactcgccccaaagatcccgagggcataggccacccccctcgaagttcaggttcagctcctggatgaccaggcaccgctgttgagcagcctggtggtactggccacgcccctcaaggcaaggctcctccccttagggggcctgatcccgccccttgaggcttaggtcccgccccctgacttctcgcacctgtcctgtttgagggaccagggtcgaccctgcccccttgggctcaggccccgcccccaggatcctacggattgaggtcctcaggccacgcccctgcagatccaggtctccaggccttgcccactgagccttcagaggacctaagacccacctatgactcagggcccaccacaccccacccccccccaactggctgaacccctggcaggcttccaaactgaggaaagctggagcctgacgtcagagcttttaactcggacatcaccctcctgaggccctcagctcatacgggcagactgctcaggcgtgaggctggatcgtagggttcgaggctgcttgcttttgttgttgttttgtaaactcagacccttgtaagccccttccttcctcccttgcccaaagatcctttgctgagtgttctgtttttgcagaataaaagcaaaggatgcagacttaccccaccctccacccctagctcagccagatccttacacgtggagcccccagcatgggaatgaggggctctgcaactgagcgaagctgcgggctaggaggctggaaagccatttatcctaggacataaactcagattttgggggtc

SEQ ID NO: 851 - DNA, 1098 bp, Homo sapiens
atgagagaaaaatctttccaatgtaatgagactggcgaagcctttaattgtagctcatttgtaaggaaacatcagataatccatttaggagaaaaacaatataaatttgatatatgtggcaaagtctttaatgagaagcgataccttgcacgccatcgtagatgtcacactagtgagaaaccttacaagtgtaatgaatgtggaaagtccttcagttacaagtcatccctgacatgccatcgtagatgtcacactggtgagaaaccttacaagtgtaatgaatgtggaaagtccttcagttacaagtcatcccttacatgccatcataggtgtcacactggtgagaaaccttacaagtgtaatgaatgtggaaagtccttcagttacaagtcatcccttagatgccatcgtagacttcatactggaataaaaccttacaagtgtaatgagtgtggcaagatgtttggtcaaaattcaacccttgtaattcataaggcaattcatactggagagaaaccttacaagtgtaatgaatgtggcaaggcttttaatcaacaatcacacctttcacgtcatcatagacttcatactggagagaaaccttacaagtgtaatgactgtggtaaggcttttattcatcagtcaagccttgcacgtcatcatagacttcatactggagagaaatcttacaaatgtgaagaatgtgacagagttttcagtcagaaatcaaaccttgagagacacaagataattcatactggagagaaaccttacaagtgtaatgagtgtcacaagaccttcagtcacaggtcatctcttccatgccatcgtagacttcatagtggtgagaaaccttacaagtgtaatgaatgtgggaagacttttaatgtacagtcacacctttcacgtcatcatagacttcatactggagagaaaccttacaaatgtaaggtttgtgacaaggctttcatgtgccattcttatctggcaaaccatactagaattcatagcggagagaaaccttacaagtgtaatgagtgtggtaaggctcacaatcacttgattgattcatcaatcaagccttgcatgtcatcatag

SEQ ID NO: 852 - DNA, 2424 bp, Homo sapiens
acccgcgctcgtacgtgcgcctccgccggcagctcctgactcatcgggggctccgggtcacatgcgcccgcgcggccctataggcgcctcctccgcccgccgcccgggagccgcagccgccgccgccactgccactcccgctctctcagcgccgccgtcgccaccgccaccgccaccgccactaccaccgtctgagtctgcagtcccgagatcccagccatcatgtccatagagaagatctgggcccgggagatcctggactcccgcgggaaccccacagtggaggtggatctctatactgccaaaggtcttttccgggctgcagtgcccagtggagcctctacgggcatctatgaggccctggagctgagggatggagacaaacagcgttacttaggcaaaggtgtcctgaaggcagtggaccacatcaactccaccatcgcgccagccctcatcagctcaggtctctctgtggtggagcaagagaaactggacaacctgatgctggagttggatgggactgagaacaaatccaagtttggggccaatgccatcctgggtgtgtctctggccgtgtgtaaggcaggggcagctgagcgggaactgcccctgtatcgccacattgctcagctggccgggaactcagacctcatcctgcctgtgccggccttcaacgtgatcaatggtggctctcatgctggcaacaagctggccatgcaggagttcatgatcctcccagtgggagctgagagctttcgggatgccatgcgactaggtgcagaggtctaccatacactcaagggagtcatcaaggacaaatacggcaaggatgccaccaatgtgggggatgaaggtggctttgcccccaatatcctggagaacagtgaagccttggagctggtgaaggaagccatcgacaaggctggctacacggaaaagatcgttattggcatggatgttgctgcctcagagttttatcgtgatggcaaatatgacttggacttcaagtctcccactgatccttcccgatacatcactggggaccagctgggggcactctaccaggactttgtcagggactatcctgtggtctccattgaggacccatttgaccaggatgattgggctgcctggtccaagttcacagccaatgtagggatccagattgtgggtgatgacctgacagtgaccaacccaaaacgtattgagcgggcagtggaagaaaaggcctgcaactgtctgctgctcaaggtcaaccagatcggctcggtcactgaagccatccaagcgtgcaagctggcccaggagaatggctggggggtcatggtgagtcatcgctcaggagagactgaggacacattcattgctgacctggtggtggggctgtgcacaggccagatcaagactggtgccccgtgccgttctgaacgtctggctaaatacaaccagctcatgagaattgaggaagagctgggggatgaagctcgctttgccggacataacttccgtaatcccagtgtgctgtgattcctctgcttgcctggagacgtggaacctctgtctcatcctcctggaaccttgctgtcctgatctgtgatagttcaccccctgagatcccctgagccccagggtgcccagaacttccctgattgacctgctccgctgctccttggcttacctgacctcttgctgtctctgctcgccctcctttctgtgccctactcattggggttccgcactttccacttcttcctttctctttctctcttccctcagaaactagaaatgtgaatgaggattattataaaagggggtccgtggaagaatgatcagcatctgtgatgggagcgtcagggttggtgtgctgaggtgttagagagggaccatgtgtcacttgtgctttgctcttgtcccacgtgtcttccactttgcatatgagccgtgaactgtgcatagtgctgggatggaggggagtgttgggcatgtgatcacgcctggctaataaggctttagtgtatttatttatttatttattttatttgtttttcattcatcccattaatcatttccccataactcaatggcctaaaactggcctgacttgggggaacgatgtgtctgtatttcatgtggctgtagatcccaagatgactggggtgggaggtcttgctagaatgggaagggtcatagaaagggccttgacatcagttcctttgtgtgtactcactgaagcctgcgttggtccagagcggaggctgtgtgcctgggggagttttcctctatacatctctccccaaccctaggttccctgttcttcctccagctgcaccagagcaacctctcactccccatgccacgttccacagttgccaccacctctgtggcattgaaatgagcacctccattaaagtctgaatcagtgca

SEQ ID NO: 853 - DNA, 6871 bp, Homo sapiens
ggggctgcgggggagagcgactgcgccaggtccgcgacaaatgaattagacacaattatccacgggagactcggttttcctctctgtaaattacggatattaggaatacttgccgcctggggttgttttgagcactttcattgtttaggtgctgtatttattgggtgtgcgttccctgggagagcccgagggagacggctcctgcaccggccccaagggcctctctgcccgtggagtgcaggagcgaaggggctggcctagctgaccaccagggcccctgctggctctgaccgccctcctatcccaagtaattatttacacgtttcgcgttcgcttatgtattatgtgtaatcatggcacagtatcctgaagccgtcggagtctgtgtgctggtgcaaggtctgggacaaatttaagaagagagaggtgagctggagctgaggggtgggcgcgcaggctaacaggaacgtcacctctggagagtctgagggcagggacgggtgaaaggctcacggccacagcgaaagaaatgctgttatcacccctccgcgaacaccgggcacatccagatgagctgctgagcttcctcctctcttggcctgatatccccgccggatggtagtgcagtcaggtcatacttgggttatctgttttgaccttatttgaaagatggaaaaacaaaattgagtttgaggaggtgagtagttcagatcttgtcattccttagaggcagaactgagattagaagtcaagtctgcagtttcccgagccactgctgcccattttgttactctatatcacagtttctcattaaaagatccttttgaggaattgttagcaagttagaacaaacatttttaaacttgcatttaacatcctatccctttttttagaggtcttttgcattatctaacctcagggcattaatggtgttaacaggtaaacagataaacaatatggcctcagtttttttttttccctacaaggaattttgacaaacccatagtgttttttccttcagattactgttaacttgttaaactcatcttttcatgtttttaatttttctgtgtcacagaacctaaattggtaataaatcaataagaaatatttacattcactcagtgaaaagtgtcatgtctgagctcagcatatatcggagccacacatggacacgtaagtatcttgtgtgtggacctgtataggcaggtgaatctccgaactgcaaggccggcgaaggctctcctgacattcttcctttctaatccttcagctctccttcctccactaagagcggaaaatgaacaaatcccaggaacaagtgtcattcaaggatgtatgtgtggacttcactcaggaagagtggtatctgctggaccctgctcagaagattctatacagagatgtgatcctggaaaattatagcaatcttgtctcagtagggtattgcattactaaaccagaagtgatctttaagatcgagcaaggagaagagccctggatattagaaaaaggattcccaagccagtgccacccagaaaggaaatggaaagttgatgacgtgttagagagcagccaggaaaatgaagatgaccatttttgggagcttctattccacaacaacaaaacagtaagtgtagaaaatggagatagaggaagcaaaactttcaatttgggcacagaccctgtttctttaagaaattatccctataaaatatgtgactcatgtgaaatgaatttgaaaaatatttcgggcttaattattagtaaaaagaactgttccagaaagaagcctgatgagtttaatgtatgtgagaaattgctccttgatattaggcatgagaaaatccctattggagagaagtcttataaatatgatcaaaaaaggaatgccattaattatcaccaggatctcagtcagccaagttttggccaatcttttgagtatagtaaaaatggacaaggcttccatgatgaggcagcattttttacaaataagagatctcagataggagagacagtctgtaaatataacgaatgtggaagaaccttcattgaaagtttaaagctgaatatatctcaaagacctcatttggaaatggagccgtatggatgcagtatttgcgggaagtccttctgcatgaatttaaggtttggacatcagagagctcttacaaaggacaatccttatgaatataatgaatatggggaaatcttctgtgacaattcagctttcattatccatcagggagcttacacaagaaagattctccgtgaatataaagtgagtgacaaaacctgggaaaagtcagctctcttaaaacatcaaatagtacacatggggggaaagtcttatgattacaatgaaaatgggagtaatttcagcaagaagtcacatcttacccagcttcggagagctcacacaggagaaaaaacctttgaatgtggtgaatgtgggaaaaccttctgggagaagtcaaacctcactcaacatcagagaacacacacaggagagaagccctatgaatgtactgaatgtgggaaagccttttgccagaaaccacacctgaccaaccatcagcgaacacatacaggagaaaaaccctatgaatgtaagcaatgtggaaaaacattctgtgtgaagtcaaacctcactgaacatcagagaacacacacaggggagaagccctatgaatgtaatgcatgtgggaaatccttctgccacagatcagccctcactgtgcatcagagaacacacacaggggagaaaccgtttatatgtaatgaatgtggaaaatccttctgtgtgaagtcaaacctcattgtacatcaaagaactcacactggggagaaaccatataagtgtaatgaatgtgggaaaaccttctgtgaaaaatcagctctcactaaacatcagaggactcacacaggggagaagccgtatgagtgtaatgcatgtgggaagacctttagtcagaggtcagtgctcaccaaacatcagagaattcacacaagggtgaaagctctttcaacatcctgaatgttagaagccttcatacacttgtgaaattggttatacagtttcaaaaaaggagatcagagaaagccaaagaatgtcagaaatttgtagaaaatgacttcttgtttgaatatgtaaaagctttcaagaaaaattaaaacttttcattagaaaatttgtactgaggggaattctattcatctaagtaatatggtgaaaatatttatctggaatttatgttgtttagtgttatattccagacgtgataccaaaattttgttgcaaatataatggacaatatttatttatacccatattcacagtggaatctgaagcttataaaagttgaatgacagcagcattaaacatatatgtgaagagtccccgatgtttgtagaccttatgtgagtatgcaaatatataaatttgagtatgcttgatttgtatattggaactcaacatgatcataaggagaagatacgtacccttaattgagtaactactatggtatttgttaatattttctacactaaataccattggtgtctttataggttgacataattatatatgtgtatgtacatatgtttgtgtgtatatgtaaatatatttctacacacatacttaaatatagtgatgtgctagtataacctcatactgacttaaaagttctgattgttaaattttaaggaattttgtgagccagttattaaaagcagtcattatttaaaatatgtaaacttacagttaaaaacaaaggtaataaatactcagcactcatcacttcctaattattttgctacatttcactattacctttgctgttttacttatttaatctgtatgatgaaaatactgtataatagtgtgcactgcacatctgtctcttcccagctccacattcagtgctgtcttggtagcttggacttagtgggagtgtttacaccatggaaattgacaaactataaatcagggttttaattttctcagagaacctgctgtcaaatatttacagcacatcactgtgtatatatgaaaacgtatttggcaatacaaaccacataccccttctatttcctgacataaataaatggctatggccatttacagctgaaccacgtcttcaagaaagaagccaaaaatatttccgtgaggtttttaactacctctgaatctgtcctactctaaatactaccggagtctctttgtaggttggccagtatatgtttttagtgaaatattatttcacaaagaactatatcacgtacctttcctctgactgtttcctggcatatatgcatgaatatggccattattgaactatcacttcagtaaagaagttaaacagtacttttctgaggtttttcagctacctctgggtcattctgtaatgtaaatgttgttaataagaatggtttttacataaattatgcaaaggttaacaagcagtaacactgcactcctcaaaaagtggcggtatgtaatgaaaggcccttttgatatccttgatttttcattgtgtatctgtttgggcacggtctatgtaacactagttctgcgtattagtattttagagtatctctgcctcccttgtcctgttgtttcttttgcccccttggaacacattggtcagcagttctaagagacactgcccacatgatggccattccctacttcatccttgctgagctaaattttatatttttgtgcatccttctcccagatgacttaggtggtaagtccagattagtcaaagctaatcatggaagttccattttaatgattctgttggggtgaacttgggagcaatgagatgtttgggaagtattgtgtagtacttctgggaaagatctccttgatacaacattgtcatgacatgagaagagactctgctgggctttttcatgtctgtaacatggtattggcttatcgtttttatctctgaagggcagtagcctgaagataacagtgcacaaggtgggaaaagccagctcagaggtgacgttgccgagctactctgctctctatacctgttctctactgggactttttataaccctcaataactgttttttatttggtcttagggctgtctgatacttagagctgaaggcattccagctgacacagaggaatatttttctaagtgttaatgttctatatggtaattagggggaagaattatttcttttcacaagttaatatagggatggctgtttgtatcagccatggttctttctggtggaaaacagaattctccaactaaaaatattttaatggcagactgattacagtggtgtgggccagaaacaagggacagtgaaacacccagagacttgtatcagcaggaagccattgccattctgagccttgaagggcaaggagggaaacagtgttaccagagcccagtaagaactgctgtcatgaaggaggggccaccttgtaagagacatcattactaccagaactgtggtgccaaattgctggtgtctctctttggagaaaccaaccagatacatctgctggagagcccaggtgggcacagagaagggtggagagagaatctgggaagagaaatggagaataagcagcacagtgttattcatttctgtaaattcctatgtagaaggctcagtgttagaaataaagttattctactagttgcaagttaagtgtttctgtttgttctgctttcctgttagcataagtaaactccctttggaactacacaggtatgtctctccttcaacatgtgtgaagcagacattatattaaattacattattcatacctccctgtggtgtttcttattgtatgtggtgtaaggtaagcagctctgtattcttccaaataaatagccagttgtccctgcattgagaactgatgtgccttcacaggaaacttggcccgtgtgtttccaggattcttgatgtttcttctgagctccagggtcaggcagtatgattgaagtttctaagccagcatccttggaataaagtagcttttgaggtaataaggagtagtccctaagaacccacgtggaaggtcacacttctgatctgagacctttcagcagagcctcagagcagagtggaaaaggccaggaaagagcatgtctggaactgcctgttcactgaagacattcttggcactcctgtacagttaaataacacttggtgatgtcagcacatgcagaaaccatggcagactgtccagtggatgggctttcaggaagaattaggctgccagcatgagcaaggggcaggcagcacaggagaggacacgtcactgcccactgtgaggactgtgaggacacagtctggggaaggcatcgcctagatggggaacttgtccctgtgctcctccataagcctgctcccttcctgtctactcactgtctttgcagcctgtggagatgcatcattgttcctattctgatgttacaaaaatcaagtgacagtgttgtataaaggtcaaaaaatgggcctagaaaatgtgacttatttaatcatttcatttgttagtggcatactcagaaaataactaattagggctgagctcggtggctcatgcctgtaatcccagcactctgggaggccgacatgggaggactgcttgaatccaggaattcaagaccagcttgggcaacatagtgagacccggtctctacaaaaaaaaagtatctggctgtggtggtgcgcacttgtagttctcctacttaagaggccgagactggaggattacttgagcttcagcccaggagttcaaggctgcagtgagctgtgaatcataccactgtggtacagcccaggcaacagagccagaccctgtctcaaaacaaaaaacaaaaaa

SEQ ID NO: 854 - DNA, 3357 bp, Homo sapiens
ggaggggagaagctggagaacatagacagggatgagaggttttatttatttattgttcctggtcactgtctctttgaggattggtatctctgctccagaaaagatggcagcctctttcttctctgattttggtcttatgtggtatctggaggagctcaaaaaggaggagttcaggaaatttaaagaacatctcaagcaaatgactttgcagcttgaactcaagcagattccctggactgaggtcaaaaaagcatcccgggaagaacttgcaaacctcttgatcaagcactatgaagaacaacaagcttggaacataaccttaagaatctttcaaaagatggatagaaaggatctctgcatgaaggtcatgagggagagaacaggatacacaaagacctatcaagctcacgcaaagcagaaattcagccgcttatggtccagcaagtctgtcactgagattcacctatactttgaggaggaagtcaagcaagaagaatgtgaccatttggaccgcctttttgctcccaaggaagctgggaaacagccacgtacagtgatcattcaaggaccacaaggaattggaaaaacgacactcctgatgaagctgatgatggcctggtcggacaacaagatctttcgggataggttcctgtacacgttctatttctgctgcagagaactgagggagttgccgccaacgagtttggctgacttgatttccagagagtggcctgaccccgctgctcctataacagagatcgtgtctcaaccggagagactcttgttcgtcatcgacagcttcgaagagctgcagggcggcttgaacgaacccgattcggatctgtgtggtgacttgatggagaaacggccggtgcaggtgcttctgagcagtttgctgaggaagaagatgctcccggaggcctccctgctcatcgctatcaaacccgtgtgcccgaaggagctccgggatcaggtgacgatctcagaaatctaccagccccggggattcaacgagagtgataggttagtgtatttctgctgtttcttcaaagacccgaaaagagccatggaagccttcaatcttgtaagagaaagtgaacagctgttttccatatgccaaatcccgctcctctgctggatcctgtgtaccagtctgaagcaagagatgcagaaaggaaaagacctggccctgacctgccagagcactacctctgtgtactcctctttcgtctttaacctgttcacacctgagggtgccgagggcccgactccgcaaacccagcaccagctgaaggccctgtgctccctggctgcagagggtatgtggacagacacatttgagttttgtgaagacgacctccggagaaatggggttgttgacgctgacatccctgcgctgctgggcaccaagatacttctgaagtacggggagcgtgagagctcctacgtgttcctccacgtgtgtatccaggagttctgtgccgccttgttctatttgctcaagagccaccttgatcatcctcacccagctgtgagatgtgtacaggaattgctagttgccaattttgaaaaagcaaggagagcacattggatttttttggggtgttttctaactggccttttaaataaaaaggaacaagaaaaactggatgcgttttttggcttccaactgtcccaagagataaagcagcaaattcaccagtgcctgaagagcttaggggagcgtggcaatcctcagggacaggtggattccttggcgatattttactgtctctttgaaatgcaggatcctgcctttgtgaagcaggcagtgaacctcctccaagaagctaactttcatattattgacaacgtggacttggtggtttctgcctactgcttaaaatactgctccagcttgaggaaactctgtttttccgttcaaaatgtctttaagaaagaggatgaacacagctctacgtcggattacagcctcatctgttggcatcacatctgctctgtgctcaccaccagcgggcacctcagagagctccaggtgcaggacagcaccctcagcgagtcgacctttgtgacctggtgtaaccagctgaggcatcccagctgtcgccttcagaagcttggaataaataacgtttccttttctggccagagtgttctgctctttgaggtgctcttttatcagccagacttgaaatacctgagcttcaccctcacgaaactctctcgtgatgacatcaggtccctctgtgatgccttgaactacccagcaggcaacgtcaaagagctagcgctggtaaattgtcacctctcacccattgattgtgaagtccttgctggccttctaaccaacaacaagaagctgacgtatctgaatgtatcctgcaaccagttagacacaggcgtgccccttttgtgtgaagccctgtgcagcccagacacggtcctggtatacctgatgttggctttctgccacctcagcgagcagtgctgcgaatacatctctgaaatgcttctgcgtaacaagagcgtgcgctatctagacctcagtgccaatgtcctgaaggacgaaggactgaaaactctctgcgaggccttgaaacatccggactgctgcctggattcactgtgtttggtaaaatgttttatcactgctgctggctgtgaagacctcgcctctgctctcatcagcaatcaaaacctgaagattctgcaaattgggtgcaatgaaatcggagatgtgggtgtgcagctgttgtgtcgggctctgacgcatacggattgccgcttagagattcttgggttggaagaatgtgggttaacgagcacctgctgtaaggatctcgcgtctgttctcacctgcagtaagaccctgcagcagctcaacctgaccttgaacaccttggaccacacaggggtggttgtactctgtgaggccctgagacacccagagtgtgccctgcaggtgctcggggctgagaaaaactgattttgatgaggaaacccaggcacttctgacggctgaggaagagagaaatcctaacctgaccatcacagacgactgtgacacaatcacaagggtagagatctgattgcgaggaacctgggctctgactcgaacacctgcaaaggacagggactgggaccgttacttacatgacactgcacccaggagatacaaatcattgatactctgagttgtgagatttctggcaccccattcatagatttgatatgatacacgtggtttttatgtgctctgtggccttggatgagtcactgaaaggccttcatggtctctcggtctcacaaggacctcttaacccctcaataaagtgttacatttctaaacattggaaa

SEQ ID NO: 855 - DNA, 71 bp, Homo sapiens
cctcactgatgagtacgttctgactttcgttcttctgagtttgctgaagccagatgcaatttctgagaagg

SEQ ID NO: 856 - DNA, 75 bp, Homo sapiens
tggaccaatgatgagtaccatggggtatctgaaacaggatttttgattaaacccatatgcaattctgaggtccat

SEQ ID NO: 857 - DNA, 519 bp, Homo sapiens
atgcttcttcgctggtgcagtctacccagattgggttccctttgcaaaacatcccccttcctggagatgatgatgccatcgaagcccgggccagggcctgacctggcaggcacacacctggccagtggctctgaggtccccggggaccgagtcccctgcgagggcaggctgcccgaggccacacctgcccaccttccctactccaggccaccagctggtgtcagattgggccaccgggagagaacaggcctaggagggaatggaaggctggcggggaggctgtcatccagaagcctcctccccagaggtctccaggaggaacctggctcaactggggggcagtggtttacttttcccttttttcttcctttcttttgtcctctcagctgcccacagccagaaagccaggaccacccgaactggacagggagcagggagggaggagtggtcgcacggagcgtacctgattcaacaggaaatcagttattttctaaaacagcccctaccagagcctcctga

SEQ ID NO: 858 - DNA, 72 bp, Homo sapiens
tgtcgggtagcttatcagactgatgttgactgttgaatctcatggcaacaccagtcgatgggctgtctgaca

SEQ ID NO: 859 - DNA, 4764 bp, Homo sapiens; identical to SEQ ID NO: 365

SEQ ID NO: 860 - DNA, 2830 bp, Homo sapiens
ggtcgctggcgcctgtttcctcagagccactttttcctttgtgttgtctggtcgttcactactttgagggaaaagaattttgccgttcgcgttcgattgactccgtccccaagatcctgtagccccacggacctggcgactccaccgtgttcgggtctttctaggaacccaatctgccttcatgaagaaaagacagaggcagaaaggaagatggcttactgcctgacaaattgttatcagtactccgtgacctttgaggatacagctgtggacttcacccaggaggagtggattttactggacccagttcagagaaacttatacagagatgtgatgctggagaattatgagaacgtggccaaagtaggatttcagctctttaaacccagtgtcatctcttggttggaagaagaagagttgagaaccttgcagcaaggagttctccaagactgggcaataaaacatcaaaccagtgtttcagcactgcagcaggagttttggaaaatacaaacttctaatgggatacaaatggacctggtaacctttgacagtgtggctgtggagttcacccaggaagagtggactttactggacccagctcagagaaacctgtacagtgatgtgatgctggagaactacaagaacctgtcctcagtaggttaccagctcttcaaacccagtctgatctcttggctggaggaagaggaagagttgagcacactgccaagagttctccaagaatggaaaatgtgcctgaaaaccaaagggccagccctttggcaagataatttttgtttaaaaacattaaatgggatacagttggcaagaaaccaaaatggagaggaactctatgactgtaagcaatgtgaagatgtcttctgtaaacatccatgccttaagaccaacatgagtactcaaaatagaggcaacacgtctgaatgtattcagtatgcaaaagacctcctttctctatacaataaaacctctaccataaggaaagtttctgtgttcagtaagcatggaaaatctttccgcctgattttaaatgttcaggtccagagaaagtgtacacaagataaatcctttgaaggcactgactatgggaaagccttcatttatcagtcataccttgaagcacacaggaaaactcagagtggagaaaaactcaatgaatggaagcaatgtggggaagcatttactcactccacaagccatgctgtaaatgttgaaacacacattattaaaaacccctatgaatgtaaggaatgtggaaaagattttagataccctacccaccttaataatcacatgcaaacccacattgggataaaaccttataaatgtaagcactgtggcaaaaccttcactgtgccgtcaggctttcttgaacatgtacgaactcacactggagagaagccctatgggtgtaaggaatgtggtaaagcctttggtacatctgcaggccttattgaacatataagatgtcacgccagagagaaaacctttaaatgtgaccactgtgggaaagcctttatttcttacccatctctttttggacatttgagagttcataatggagagaagccatatgagcataaggaatatgggaaggcctttggtacatcctcaggtgttattgaagatagaagaagtaacacaggacagaaacgctttgattgtgaccagtgtgggaaagtctttgtttctttctcatctctttttgctcatttgagaactcacactggtgagaagccctttaagtgttacaaatgtgggaaaccatttacctcttctgcctgtcttcgtattcacatgcgaactcacacagaagagagactctatcaatgtaagaaatgtggtaaagctttcactaagtgctcatatcttaccaaacatttacgaacacacgctggagagaaaccctatgaatgtatgaaatgtgggaaagccttcactgagcgctcataccttactaaacatttacgaagacacagtggagagaagccatatgaatgtaagaaatgtggaaaagccttcacagaacgctcagatcttactaaacatttacgaagacacactggagataagccctatgaatataaggactgtgggaaagcctttgttgtctcctccagtctagttgatcatttaagaactcacactggatataaaccctataaatgtaatgcatgtgaaaaagcttacagtaggtcttgtgtactaactcaacacttaaaaactcatgcagcagagaagacctctgaatgtaacgcatgtggaaattcctttcgaaattccatgtgctttcatgatcgcttaaaaactctcaccaaaataaaaccctataaatgtaaggactgtgggaaagccttcacttgtcattcagatcttactaatcatgtgcgaattcacactggagagaagccctataaatgtaaggaatgtgggaaggccttccgtacatcctcaggacgtattcaacatttaagaactcatatgggagagaaaccctttgaatgtgaccagtgtgggaaagcctttgcttctttctcagctcgtattgcacatttgaaaacacactagagagaagccctgtggatgtgaagaatgtggaaaaacctttgctgtttcctcaagcctaactgaacatgtaaaaattcacaggagaaagtaacactatcaatgtaaggaatgtgagaaagcctgaacagttgaatctttctagatatgtacaaactcacactgtagagaaaccctgtaaatgtaagggatgtaggaaaacactagttcttctctctctctttttttttttttgatgagtctcactctg

SEQ ID NO: 861 - DNA, 5949 bp, Homo sapiens
gctgaggccaggagggcgcactggggattggaggcgagggaagtgcagggcgcatcccaggcggcagggctcccagcatcggcagtcgccatcaccgccagaccgcagagacaggttcggatccgcggtcctcttgcctctttccagggtgtgggaggattctctgagtttggaaatagcgcttccaggcatcactccttcaaatgcaaacgttcaccttctctctaagagaaacttgcatgtggattcagtgccttcgtttgactaaaaattacgatacaaacaatattaacatttactagacttttttttccctactttcctcctataggaaaggaagatgtgctagggcatttacttagatgtgggtcagctggcgctagtttgtttaaggagttcctgctgtgtgccagtagcttttccgggccctagggtccttgctataaatacgttagccctgctgggcttctgaactaagggagctaaatgcttccagcttccttagtgaggcagcacggtgctgtatgcttaaatccaaggccgtggagtctgacctgcgtttttatctaaactgtgtaaggtgctggccctgggtggtttggcctcgatgagtgttaaatcgccatttaatgtgatgtcaagaaataatttggaagcacctccttgtaagatgacagagccatttaattttgagaaaaatgaaaacaagcttccaccacatgagtctttaagaagtcctggaacacttcctaaccaccctaatttcaggctgaaaagctcagagaatggaaataaaaagaacaattttttgctttgtgagcaaaccaaacaatatttggctagtcaggaagacaattcagtttcttcaaacccgaatggcatcaacggagaagtagttggctccaaaggagacaggaaaaaattgccagcaggaaactcagtgtcaccaccaagtgctgaaagtaattcaccacccaaagaagtgaatattaagcctggaaataatgtacgtcctgcaaaatcaaaaaaactaaacaagttggtcgagaattccttgtccataagtaatccagggctcttcacctccttaggacctcctcttcggtccacaacttgccatcgctgtggcctatttggatcgctgaggtgctctcagtgcaagcagacctactattgctccacagcatgtcaaagaagagactggtctgcacacagcatcgtgtgcaggcctgttcagccaaatttccacaaacttgaaaataaatcatctattgaaacaaaggatgtggaggtaaacaataagagtgactgtccacttggagttactaaggaaatagccatttgggctgagagaataatgttttctgatttgagaagtctacaactcaagaaaaccatggaaataaagggtacggttaccgaattcaaacacccaggggacttctacgtgcagttatattcttcagaagttttagaatacatgaaccaactctctgccagcttaaaagaaacatatgcaaatgtgcatgaaaaagactatattcctgttaagggggaagtttgtattgccaagtacactgttgatcagacctggaacagagcaatcatacaaaacgttgatgtgcagcaaaagaaggcacatgtcttatatattgattatggaaatgaagaaataattccattaaacagaatttaccacctcaacaggaacattgacttgtttcctccttgtgccataaagtgctttgtagccaatgttatcccagcagaagggaattggagcagtgattgtatcaaagctactaaaccactgttaatggagcagtactgctccataaagattgtcgacatcttggaagaggaagtggttacctttgctgtagaagttgagctgccaaattcaggaaaacttttagaccatgtgcttatagaaatgggatatggcttgaaacccagtggacaagattctaagaaggaaaatgcagatcaaagtgatcctgaagatgttggaaaaatgacaactgaaaacaacattgtcgtagacaaaagtgacctaatcccaaaagtgttaactttgaatgtaggtgatgagttttgtggtgtggttgcccacattcaaacaccagaagacttcttttgtcaacaactgcaaagtggccgaaagcttgctgaacttcaggcatcccttagcaagtactgtgatcagttgcctccacgctctgatttttatccagccattggtgatatatgttgtgctcagttctcagaggatgatcagtggtaccgtgcctctgttttggcttacgcttctgaagaatctgtactggtcggatatgtagattatggaaactttgaaatccttagtttgatgagactttgtcccataatcccaaagttgttggaattgccaatgcaagctataaagtgtgtactagcaggagtaaagccatcattaggaatttggactccagaagctatttgtctcatgaaaaaacttgtacagaacaaaataatcacagtgaaagtggtggacaagttggaaaacagttccctggtggagcttattgataaatccgagacgcctcatgtcagtgttagcaaagttctcctagatgcaggctttgctgtgggagaacagagtatggtgacagataaacccagtgacgtgaaagaaaccagtgttcccttgggtgtggaaggaaaagtaaatccattggagtggacatgggttgaacttggtgttgaccaaacagtagatgttgtggtctgtgtgatatatagtcctggagaattttattgccatgtgcttaaagaggatgctttaaagaaactcaatgatttgaacaagtcattagcagaacactgccagcagaagttacctaatggtttcaaggcagagataggacaaccttgttgtgctttttttgcaggtgatggtagttggtatcgtgctttagtcaaggaaatcttaccaaatggacatgttaaagtacattttgtggattatggaaacatcgaagaagttactgcagatgaactccgaatgatatcatcaacatttttaaaccttccctttcagggaatacggtgccagttagcagatatacagtctagaaacaaacattggtctgaagaagccataacaagattccagatgtgtgttgctgggataaaattgcaagccagagtggttgaagtcactgaaaatgggataggagttgaactcaccgatctctccacttgttatcccagaataattagtgatgttctgattgatgaacatctggttttaaaatctgcttcaccacataaagacttaccaaatgacagacttgttaataaacatgagcttcaagttcatgtacagggacttcaagctacctcttcagctgagcaatggaagacgatagaattgccagtggataaaactatacaagcaaatgtattagaaatcataagcccaaacttgttttatgctctaccaaaagggatgccagaaaatcaggaaaagctgtgcatgttgacagctgaattattagaatactgcaatgctccgaaaagtcgaccaccctatagaccaagaattggagacgcatgctgtgccaaatacacaagtgatgatttttggtatcgtgcagttgttctggggacatcagacactgatgtggaagtgctctatgcagactatggaaacattgaaaccctgcctctttgcagagtgcaaccaatcacctctagccacctggcgcttcctttccaaattattagatgttcacttgaaggattaatggaattgaatggaagctcttctcaattaataataatgctattaaaaaatttcatgttgaatcagaatgtaatgctttctgtgaaaggaattacaaagaatgtccatacagtgtcagttgagaaatgttctgagaatgggactgtcgatgtagctgataagctagtgacatttggtctggcaaaaaacatcacacctcaaaggcagagtgctttaaatacagaaaagatgtataggatgaattgctgctgcacagagttacagaaacaagttgaaaaacatgaacatattcttctcttcctcttaaacaattcaaccaatcaaaataaatttattgaaatgaaaaaactgttaaaaagttaagtaagttaaatcgtatgttttcgcctcttctgtgatcaccaataggacatcttcaggcatattggcaggatagagctaatggagtgaaacctattgtaaggctgtactttcgtgatttaatgacctgaggtttggtcataatgcttctgctgtttttgtaggtttatctgatcgttttcctttgctactgctaatggaactgaacccccaggggtattccagttgtaatagcctttccttactgttgtttggttctgtgaatgcctatgttattgatatgtggagggacttgtaaaacttgttgtgacataaagcttagcctcagattttttgtctagatctgaaattaactcagagctcacttatgcacattgctgtaaatatgtttagcactttttgcgaggggtatctaaagggccaagaacggaaagtggatctaaagggccaagaacggaaagtgggctgcactgagggtatttttcatttaaaaacaaaacatactccctgcttttggctgtggtgattctagtgtctaaagaacatactggtgagttttaaaccagtgttcctccccaccccacccccatattttaaatgtctgggatcctttgttgtaagatggttctcagaaataaatttttgattaagagccaattagaacttctgatcagggctgggggtggtggctcacgcctgtaatcccagcactttgggaggctgaggcgggcagatcacctgagcccaggcgttcgaagtcagcctggccaagatggcgaaacactgcctctacttaaaatacaaaattagctgggcatggtggtgcacacctgttaacccagctacttgggaggctgagacaggagaatcgcttgaatccaggaggcggcggttgcagtgagccaagactgctattatactccagcctgggtgacagagtgagagtttgtctcaaaaacaaaacaaaacaaaacaaaaaaaaaaaacagcatctcttggaggtaaacccttatgagacaggaaacagcaaaggctagctttaggagagaaagtacagcacctggtgtttttatttatgagaaccttttctttgtccactttctctgtaatgaccttctatccctccgtttttgcctgcctgccattctcctattaggttggtggtttttattttcctctaagttccttccaccaaataaatattacgtaaaaaattcataccaaatcaatgagaatactggcaaggaatacatagggactttctgctatatatgtaactttttattacttaaaggtaccgaaggaaggccaggtgcagtggctcacgcccagcactttgggaggctgaggtgggaggatcccttgaggccaggagttcaaggttacagtgagctatgatagtgccactgcactccagcctgggtgacagattttgtcttaaaaaaaaaaaaaaaaaagttgatatgagttttattttctgtccgtttgaaatattttgtaatattccctgcattctctgtcgtctgcctcttccacataatgtcctttgctttcatgtttgttatcttctttttctgttcactcagaggtcatcaatttctttctctccgtccttaattggattatttttcttttggcctttgggcacagagtctgacctctggaccactctaactggagaaggaactttatgttccctctcctgctgtgtccacaaccttagaaatctgtagctagatttttgttgttatagatagaatttactgtttctgaaacccaaatacagttatcagtttaaggtt

SEQ ID NO: 862 - DNA, 4967 bp, Homo sapiens
gagcggacaggacggcttccgggatttggcggggcctttgtctctagctgctgcgggagctccaggtctagtctttactgctctgtgtattctgctcctagaggcccagcctctgtgactccgttatctgcaggtattgggagatgcacagctaagatgccaggaccacctggaagcctagaaatgggaccactgacatttagggatgtggccatagaattctctctggaggagtggcaatgcctggacactgcacaacggaatttatataggaaagtgatgtttgagaactacagaaacctggtcttcctgggtattgctgtctctaagcctcacctgataacctgtttggagcaaggaaaagagccctggaataggaagagacaggagatggtagccaaacccccagagtcttactgtgttgctcaggctgatcttgaactcctggtctcaagttatcttactgccttggcctccctaaagatgtgggattacagaaataatccactttgccaggctactatgtagcccttcatgtagaactgtgctagtcataatgaatcataacactgtcaccttttattttgaaaagtctttatttttatctgtttttaaagtacactaatcttgaatcaagtattcttggttaggaattttattactgcatcaaaatttgggaagttcttagcctttttcatctacaagtaacctctacattactttttccctacattcttcttctaagagttttttaatgaatatattgatgtacttgatggtgtccaataagttttacatttcatgttttaattttcttttggaattttatatttttgttttatatattttaggatatgccacctcacatgagttaattgttttggttttttagtttatattataattgagtatgccagtatttaactctgtaaaatttaagacagtgtggaacaaagtcaaatatgaatcagccatatgtctactaccaatataacgatctctgtgtttacctgtataaatattttccctgttctttttatgacttgtatatttctggtataggtttgttgcaaatggttatttaatcttgactaggtgagaagtcatagaaattctcctaatttcaacatctatttattcatggatctatattatttttgtgtgggagaaaaacttttctatttaaagataatttacaaacgatcataatctcttttaggtatgtctatttttacttgtcaaaaacacataacatttacaatagaatatttttaaatgtttattttagtcctattatattgacattgttatgcaacatattcctaaaatgtttttatcttgcaaagctaaatatcaatacccattaaaaaactatgaattttacccatttcctggcacttttcaaacaccactctgttttctctaagagtgtaactgcttcatatatctcatacaatctctgtctttttgtgactggctcattttattttgcacaatatcatcaagctttatagttgttagaatattttctgctttttaaatactgggtgatatttaagtattttgtattttagattatatctactgagtaatttggtgacaaatttgcactgcttttacctattggctttcagtaacaatgctgcaataattacaggtatgcaaatgacctatatgatcatatatgtgtaagtttatatatgtgccgcattctgttctactagtgtacgtttttacctttgtactcataccaaattgttacaattctgtagctctgtaatgtgtttcaaaatcagaaactgtaatgccttcaaaattgtttattttattgcagatttttgggtactttattatctcttaagactttatatactttgggggttgctgtttctatttcttcaaaaatgcatgagaaatttgaacaacattgcattaaatctgtaaattacattgagcaggatggacatcttcacaagattaattattttaacatttcaacaagcatgctcaagagtgtattgttttaatttctatgtatttgtgaatttttcagttttttcttcttactgttctatactcatttcattttggtcatagaaagtaatccataaaaatttagttttaaataatttgttaagacttcttttttggtttaccaggttttctatcaaggagaatttcgtatgaggtattgagaaggctgtttatcattatgttgttgagtgttctttatgcctctgttattaataattgttttatactcccttcaagtccggtttctttaccaatattttgtctttttaaaatctttattacagaaagtgaagcattaaaatattctactataattttatatattctcatttcactgaagacctttggccagagcatagcataaaagattcttttcaaaaagtgatactgagaggatatggaaaatgtggacatgagaatttacaattaagaataagttgtaaaagtgtggatgagtctaaggtgttcaaagaaggttataatgaacttaaccaatgtttgagaactacccagagcaaaatatttcaatgtgataaatacgtgaaagtctttcataaattttcaaattcaaacagtcataagaaaagaaatactggaaagaaggttttcaaatgtaaagaatgtggcaaatcattttgcatgctttcacatctaacacaacatataagaattcacactagagagaattcttacaaatgtgaggaatgtggcaaagttcttaactggttctcagagcttattaaacataagggaattcatatgggagagaaaccctacaaatgtgaggaatgtggcaaagcctttaaccaatcctcaacccttattaaacataagaaaattcatattgaagagaaacccttcaaatgtgaagaatgtggcaaagcctttagtttattctcaatccttagtaaacataagataattcatactggagacaaaccttacaaatgtgatgaatgtcacaaagcctttaactggtttgcaacccttactaaccataagagaattcatactggagagaaacccttcaaatgtgaagaatgtggcaaagactttaaccagttttcaaaccttactaaacataagaaaattcatactggagagaaaccctacaaatgtgaagaatgtggcaaagcttttaaccagtttgcaaaccttactagacataagaaaattcatactggagagaaatcctacaaatgtgaagaatgcggcaaagcttttatacagtcctcaaaccttactgaacatatgagaattcatactggagagaaaccctacaaatgtgaagaatgtggcaaagcttttaatgggtgctccagccttactcgacataagagaattcacactagagagaatacctacaaatgtgaagaatgtggcaaaggctttactttattttcaacccttactaaccataaagtaattcatactggagagaaatcctacaaatgtgatgaatgtggcaatgtttttaactggcctgcaactcttgctaatcataagagaattcatgctagagagaaaccctacaaatgtgaagaatgtggcaaagcttttaaccggtcctcacaccttactagacataagaaaattcatactggtgagaaactctacaaacctgaaaaatgtgacaataattttgataacacctaaaacttttctaaacataaaagacaccatcctgttgagaaaccctaaaaatgtgaagaatttgacaaagccttccaatgattgttacacttgcttgtaggtaagataatttatattggagaaaactttataagtgtaaagaatgtgacaaaacttaaccaatactcacatcttattgcacaggaaagcatttttacttgagaaagattgtacaagtataaagaatgtgaaaaagtcattgatatcttttcacatcttactcaacaccagagtttatacttattaaaagcattataaatgcaattactgtcaaaagaaatttcagaaaacataacactttaaagtgaagaagcgtgtttattttgaagacaaacataacaaatataaggagcataggagggttgtagtacctttacttgtattacaaatcttattgtacgcattttgtactagagaaaaacactgaagcagttgctcaaactttgttcaacatcagggaatttatattggagaaaaatcctgcaaatgtaatgaatttggaaaaacattttttttcaaaaactacggcgtagaaaacatgaatttatattgaaatgtgtttttgcagatgcagtaagtatgaaaaatatttaatccaaaattgagtctatgtaaatattaaataatttacagtagaaataactaaggcactgacactttagacattacactaaaacagagtgttgagtataaaaaaatctataagttgttagattatttgtaaataactttaaaaggagtagaagattctttggagagttataattacattgaaagtatactttttttcttgaaaaaattatggcttatttgaaaagtaaataatgatgaaattcaactctcaaattactttatttcattcctattgtattcacatgtgaaagcatgtgataaattgttgctgtgtcagatataggagagattcttttttattagatgggcattatttatggttttttctgtggaagagtatgggcattaaaatgtaaggtttatgatgaaaatctaagtggagaggccctgttagtttacttttcatattgagtgatgcatgaggtaggtgtttggagtaatattctgcatcatagagaaaagcatttttaattttactttaaattaaatgtaattaaattactagtgaatcattttactaattgtacttttatgctataaatgcagtacatttgaaaatttttagattatgtataagcttaattttataattaaacatttctttaaca

SEQ ID NO: 863 - DNA, 2508 bp, Homo sapiens
gcctgaggagctgctgcgagggtccgcttcgtctttcgagagtgactcccgcggtcccaaggctttccagagcgaacctgtgcggctgcaggcaccggcgtgttgagtttccggcgttccgaaggactgagctcttgtcgcggatcccgtccgccgtttccagcccccagtctcagagcggagcccacagagcagggcaccggcatggccaaagccgcggcgatcggcatcgacctgggcaccacctactcctgcgtgggggtgttccaacacggcaaggtggagatcatcgccaacgaccagggcaaccgcaccacccccagctacgtggccttcacggacaccgagcggctcatcggggatgcggccaagaaccaggtggcgctgaacccgcagaacaccgtgtttgacgcgaagcggctgattggccgcaagttcggcgacccggtggtgcagtcggacatgaagcactggcctttccaggtgatcaacgacggagacaagcccaaggtgcaggtgagctacaagggggagaccaaggcattctaccccgaggagatctcgtccatggtgctgaccaagatgaaggagatcgccgaggcgtacctgggctacccggtgaccaacgcggtgatcaccgtgccggcctacttcaacgactcgcagcgccaggccaccaaggatgcgggtgtgatcgcggggctcaacgtgctgcggatcatcaacgagcccacggccgccgccatcgcctacggcctggacagaacgggcaagggggagcgcaacgtgctcatctttgacctgggcgggggcaccttcgacgtgtccatcctgacgatcgacgacggcatcttcgaggtgaaggccacggccggggacacccacctgggtggggaggactttgacaacaggctggtgaaccacttcgtggaggagttcaagagaaaacacaagaaggacatcagccagaacaagcgagccgtgaggcggctgcgcaccgcctgcgagagggccaagaggaccctgtcgtccagcacccaggccagcctggagatcgactccctgtttgagggcatcgacttctacacgtccatcaccagggcgaggttcgaggagctgtgctccgacctgttccgaagcaccctggagcccgtggagaaggctctgcgcgacgccaagctggacaaggcccagattcacgacctggtcctggtcgggggctccacccgcatccccaaggtgcagaagctgctgcaggacttcttcaacgggcgcgacctgaacaagagcatcaaccccgacgaggctgtggcctacggggcggcggtgcaggcggccatcctgatgggggacaagtccgagaacgtgcaggacctgctgctgctggacgtggctcccctgtcgctggggctggagacggccggaggcgtgatgactgccctgatcaagcgcaactccaccatccccaccaagcagacgcagatcttcaccacctactccgacaaccaacccggggtgctgatccaggtgtacgagggcgagagggccatgacgaaagacaacaatctgttggggcgcttcgagctgagcggcatccctccggcccccaggggcgtgccccagatcgaggtgaccttcgacatcgatgccaacggcatcctgaacgtcacggccacggacaagagcaccggcaaggccaacaagatcaccatcaccaacgacaagggccgcctgagcaaggaggagatcgagcgcatggtgcaggaggcggagaagtacaaagcggaggacgaggtgcagcgcgagagggtgtcagccaagaacgccctggagtcctacgccttcaacatgaagagcgccgtggaggatgaggggctcaagggcaagatcagcgaggcggacaagaagaaggttctggacaagtgtcaagaggtcatctcgtggctggacgccaacaccttggccgagaaggacgagtttgagcacaagaggaaggagctggagcaggtgtgtaaccccatcatcagcggactgtaccagggtgccggtggtcccgggcctggcggcttcggggctcagggtcccaagggagggtctgggtcaggccctaccattgaggaggtggattaggggcctttgttctttagtatgtttgtctttgaggtggactgttgggactcaaggactttgctgctgttttcctatgtcatttctgcttcagctctttgctgcttcacttctttgtaaagttgtaacctgatggtaattagctggcttcattatttttgtagtacaaccgatatgttcattagaattctttgcatttaatgttgatactgtaagggtgtttcgttccctttaaatgaatcaacactgccaccttctgtacgagtttgtttgttttttttttttttttttttttttgcttggcgaaaacactacaaaggctgggaatgtatgtttttataatttgtttatttaaatatgaaaaataaaatgttaaacttt

SEQ ID NO: 864 - DNA, 2400 bp, Homo sapiens
aacggctagcctgaggagctgctgcgacagtccactacctttttcgagagtgactcccgttgtcccaaggcttcccagagcgaacctgtgcggctgcaggcaccggcgcgtcgagtttccggcgtccggaaggaccgagctcttctcgcggatccagtgttccgtttccagcccccaatctcagagcggagccgacagagagcagggaaccggcatggccaaagccgcggcgatcggcatcgacctgggcaccacctactcctgcgtgggggtgttccaacacggcaaggtggagatcatcgccaacgaccagggcaaccgcaccacccccagctacgtggccttcacggacaccgagcggctcatcggggatgcggccaagaaccaggtggcgctgaacccgcagaacaccgtgtttgacgcgaagcggctgattggccgcaagttcggcgacccggtggtgcagtcggacatgaagcactggcctttccaggtgatcaacgacggagacaagcccaaggtgcaggtgagctacaagggggagaccaaggcattctaccccgaggagatctcgtccatggtgctgaccaagatgaaggagatcgccgaggcgtacctgggctacccggtgaccaacgcggtgatcaccgtgccggcctacttcaacgactcgcagcgccaggccaccaaggatgcgggtgtgatcgcggggctcaacgtgctgcggatcatcaacgagcccacggccgccgccatcgcctacggcctggacagaacgggcaagggggagcgcaacgtgctcatctttgacctgggcgggggcaccttcgacgtgtccatcctgacgatcgacgacggcatcttcgaggtgaaggccacggccggggacacccacctgggtggggaggactttgacaacaggctggtgaaccacttcgtggaggagttcaagagaaaacacaagaaggacatcagccagaacaagcgagccgtgaggcggctgcgcaccgcctgcgagagggccaagaggaccctgtcgtccagcacccaggccagcctggagatcgactccctgtttgagggcatcgacttctacacgtccatcaccagggcgaggttcgaggagctgtgctccgacctgttccgaagcaccctggagcccgtggagaaggctctgcgcgacgccaagctggacaaggcccagattcacgacctggtcctggtcgggggctccacccgcatccccaaggtgcagaagctgctgcaggacttcttcaacgggcgcgacctgaacaagagcatcaaccccgacgaggctgtggcctacggggcggcggtgcaggcggccatcctgatgggggacaagtccgagaacgtgcaggacctgctgctgctggacgtggctcccctgtcgctggggctggagacggccggaggcgtgatgactgccctgatcaagcgcaactccaccatccccaccaagcagacgcagatcttcaccacctactccgacaaccaacccggggtgctgatccaggtgtacgagggcgagagggccatgacgaaagacaacaatctgttggggcgcttcgagctgagcggcatccctccggcccccaggggcgtgccccagatcgaggtgaccttcgacatcgatgccaacggcatcctgaacgtcacggccacggacaagagcaccggcaaggccaacaagatcaccatcaccaacgacaagggccgcctgagcaaggaggagatcgagcgcatggtgcaggaggcggagaagtacaaagcggaggacgaggtgcagcgcgagagggtgtcagccaagaacgccctggagtcctacgccttcaacatgaagagcgccgtggaggatgaggggctcaagggcaagatcagcgaggcggacaagaagaaggtgctggacaagtgtcaagaggtcatctcgtggctggacgccaacaccttggccgagaaggacgagtttgagcacaagaggaaggagctggagcaggtgtgtaaccccatcatcagcggactgtaccagggtgccggtggtcccgggcctgggggcttcggggctcagggtcccaagggagggtctgggtcaggccccaccattgaggaggtagattaggggcctttccaagattgctgtttttgttttggagcttcaagactttgcatttcctagtatttctgtttgtcagttctcaatttcctgtgtttgcaatgttgaaattttttggtgaagtactgaacttgctttttttccggtttctacatgcagagatgaatttatactgccatcttacgactatttcttctttttaatacacttaactcaggccattttttaagttggttacttcaaagtaaataaactttaaaattcaa

SEQ ID NO: 865 - DNA, 3136 bp, Homo sapiens
gcgcagaacttggggagccgccgccgccatccgccgccgcagccagcttccgccgccgcaggaccggcccctgccccagcctccgcagccgcggcgcgtccacgcccgcccgcgcccagggcgagtcggggtcgccgcctgcacgcttctcagtgttccccgcgccccgcatgtaacccggccaggcccccgcaactgtgtcccctgcagctccagccccgggctgcacccccccgccccgacaccagctctccagcctgctcgtccaggatggccgcggccaaggccgagatgcagctgatgtccccgctgcagatctctgacccgttcggatcctttcctcactcgcccaccatggacaactaccctaagctggaggagatgatgctgctgagcaacggggctccccagttcctcggcgccgccggggccccagagggcagcggcagcaacagcagcagcagcagcagcgggggcggtggaggcggcgggggcggcagcaacagcagcagcagcagcagcaccttcaaccctcaggcggacacgggcgagcagccctacgagcacctgaccgcagagtcttttcctgacatctctctgaacaacgagaaggtgctggtggagaccagttaccccagccaaaccactcgactgccccccatcacctatactggccgcttttccctggagcctgcacccaacagtggcaacaccttgtggcccgagcccctcttcagcttggtcagtggcctagtgagcatgaccaacccaccggcctcctcgtcctcagcaccatctccagcggcctcctccgcctccgcctcccagagcccacccctgagctgcgcagtgccatccaacgacagcagtcccatttactcagcggcacccaccttccccacgccgaacactgacattttccctgagccacaaagccaggccttcccgggctcggcagggacagcgctccagtacccgcctcctgcctaccctgccgccaagggtggcttccaggttcccatgatccccgactacctgtttccacagcagcagggggatctgggcctgggcaccccagaccagaagcccttccagggcctggagagccgcacccagcagccttcgctaacccctctgtctactattaaggcctttgccactcagtcgggctcccaggacctgaaggccctcaataccagctaccagtcccagctcatcaaacccagccgcatgcgcaagtaccccaaccggcccagcaagacgcccccccacgaacgcccttacgcttgcccagtggagtcctgtgatcgccgcttctcccgctccgacgagctcacccgccacatccgcatccacacaggccagaagcccttccagtgccgcatctgcatgcgcaacttcagccgcagcgaccacctcaccacccacatccgcacccacacaggcgaaaagcccttcgcctgcgacatctgtggaagaaagtttgccaggagcgatgaacgcaagaggcataccaagatccacttgcggcagaaggacaagaaagcagacaaaagtgttgtggcctcttcggccacctcctctctctcttcctacccgtccccggttgctacctcttacccgtccccggttactacctcttatccatccccggccaccacctcatacccatcccctgtgcccacctccttctcctctcccggctcctcgacctacccatcccctgtgcacagtggcttcccctccccgtcggtggccaccacgtactcctctgttccccctgctttcccggcccaggtcagcagcttcccttcctcagctgtcaccaactccttcagcgcctccacagggctttcggacatgacagcaaccttttctcccaggacaattgaaatttgctaaagggaaaggggaaagaaagggaaaagggagaaaaagaaacacaagagacttaaaggacaggaggaggagatggccataggagaggagggttcctcttaggtcagatggaggttctcagagccaagtcctccctctctactggagtggaaggtctattggccaacaatcctttctgcccacttccccttccccaattactattccctttgacttcagctgcctgaaacagccatgtccaagttcttcacctctatccaaagaacttgatttgcatggattttggataaatcatttcagtatcatctccatcatatgcctgaccccttgctcccttcaatgctagaaaatcgagttggcaaaatggggtttgggcccctcagagccctgccctgcacccttgtacagtgtctgtgccatggatttcgtttttcttggggtactcttgatgtgaagataatttgcatattctattgtattatttggagttaggtcctcacttgggggaaaaaaaaaaaagaaaagccaagcaaaccaatggtgatcctctattttgtgatgatgctgtgacaataagtttgaacctttttttttgaaacagcagtcccagtattctcagagcatgtgtcagagtgttgttccgttaacctttttgtaaatactgcttgaccgtactctcacatgtggcaaaatatggtttggtttttctttttttttttttttgaaagtgttttttcttcgtccttttggtttaaaaagtttcacgtcttggtgccttttgtgtgatgcgccttgctgatggcttgacatgtgcaattgtgagggacatgctcacctctagccttaaggggggcagggagtgatgatttgggggaggctttgggagcaaaataaggaagagggctgagctgagcttcggttctccagaatgtaagaaaacaaaatctaaaacaaaatctgaactctcaaaagtctatttttttaactgaaaatgtaaatttataaatatattcaggagttggaatgttgtagttacctactgagtaggcggcgatttttgtatgttatgaacatgcagttcattattttgtggttctattttactttgtacttgtgtttgcttaaacaaagtgactgtttggcttataaacacattgaatgcgctttattgcccatgggatatgtggtgtatatccttccaaaaaattaaaacgaaaataaagtagctgcgattggg

SEQ ID NO: 866 - DNA, 3615 bp, Homo sapiens
cgatttcattcctcgctccccacaggtccctctccccaaaatattcccatcttgtcctagcccatcccccagactatctcaaggaccagctgtccccacgcccccgacctccactaggcctgtgccacccgctgcctgcaggaagacgcccggtcccgggccgggttagccccatgggaacggctgccgcagggaccgccgcgtgcggggcgagagggagcccccggtgggggtggcgcagccggcggcggggccgcggcgtggagagcgggcgggagccgcagccgcagcgaggccggcgggcgggagcgcacggaggtggggtcggccaggccggtgcgggctccttgcggcaggtcccaagaggcactgccttgcgtgtgtgcacacgtgtgaggatgtcagcgcctgtgtggccgcgggactcaaggctggcctggctcaagtgaacagcacgtccaggaggcgacctcgtccgcgggtttgcattctggggtggacgagctgggttgctaatggtgtcatgcacccaccggccacccttggcgcgagcgcccccctctggacaccctgctccgtgcgcgctcacagttcgcctgtgcggggccggggccagggtcaggagccggggatagggaggaagagggcctgtggacaagctgagccgggacccctgggacctttgcggaggtggcctgggagcgctcagttcccaggctcaggcttcccgctgacgcctcctggccgcagcgggctccccccgccccaggaatgttcctctcccatccagtccgcctcccctagggcaggccccctgggggctgccgcagccccgcctcgccttcctgggctcccgggagggggcgaggcgggcaggacgcctgggttctctccccccacctcccataccagggagaaattcctccgaggtcccctcaggctctgggttcccaaaataaccctgcgggggaagggaggctgtggagggagggaagcgggaggggcgcagagccgagctgcggggtgctgcaggtgcctctggggagagggcgcgaggagaaggcgccctgcggggggctgggcgccagccagtcctgggatcttggttcgtccccatcctcgtgaagcccctcggccttcccgcgactccgagggtgggccggaagcctctctgcgggtccgtttcccaactggcgggttgcaccatcccgggccagaccgtttaaccccgggagtggccgcgggggacaactccgcccctgtccagcagggggcgtgcccgccccgccccgtttctgcccgcggggccgctcccccgcccgcgactccgcagactcccgctctgcctctcccgggacaggggttcggtccgagcccggtgggaggctcccggagcgcagcctgggcccagcccaccccgcgccggcggccatggcaggcaccctggacctggacaagggctgcacggtggaggagctgctccgcgggtgcatcgaagccttcgatgactccgggaaggtgcgggacccgcagctggtgcgcatgttcctcatgatgcacccctggtacatcccctcctctcagctggcggccaagctgctccacatatatccttcgccggccttgccaaggcccccgccactaccaacaatcccggaaggacaactccaattccctgcaggtgaaaacgtgccacctggtcaggtactggatctccgccttcccagcggagtttgacttgaacccggagttggctgagcagatcaaggagctgaaggctctgctagaccaagaagggaaccgacggcacagcagcctaatcgacatagacagcgtgtgcgtggggggagcacagagggctgggggggcactcagtatcctataccatctgtgcttaataaatgtctgttgaactgaaccctacctacaagtggaagcggcaggtgactcagcggaaccctgtgggacagaaaaagcgcaagatgtccctgttgtttgaccacctggagcccatggagctggcggagcatctcacctacttggagtatcgctccttctgcaagatcctgtttcaggactatcacagtttcgtgactcatggctgcactgtggacaaccccgtcctggagcggttcatctccctcttcaacagcgtctcacagtgggtgcagctcatgatcctcagcaaacccacagccccgcagcgggccctggtcatcacacactttgtccacgtggcggagaagctgctacagctgcagaacttcaacacgctgatggcagtggtcgggggcctgagccacagctccatctcccgcctcaaggagacccacagccacgttagccctgagaccatcaagctctgggagggtctcacggaactagtgacggcgacaggcaactatggcaactaccggcgtcggctggcagcctgtgtgggcttccgcttcccgatcctgggtgtgcacctcaaggacctggtggccctgcagctggcactgcctgactggctggacccagcccggacccggctcaacggggccaagatgaagcagctctttagcatcctggaggagctggccatggtgaccagcctgcggccaccagtacaggccaaccccgacctgctgagcctgctcacggtgtctctggatcagtatcagacggaggatgagctgtaccagctgtccctgcagcgggagccgcgctccaagtcctcgttccatagccaaccagccccacgagttgcaccccaccaccccggcccccggtactggaggagtggacctcggctgccaaacccaagctggatcaggccctcgtggtggagcacatcgagaagatggtggagtctgtgttccggaactttgacgtcgatggggatggccacatctcacaggaagaattccagatcatccgtgggaacttcccttacctcagcgcctttggggacctcgaccagaaccaggatggctgcatcagcagggaggagatggtttcctatttcctgcgctccagctctgtgttgggggggcgcatgggcttcgtacacaacttccaggagagcaactccttgcgccccgtcgcctgccgccactgcaaagccctgatcctgggcatctacaagcagggcctcaaatgccgagcctgtggagtgaactgccacaagcagtgcaaggatcgcctgtcagttgagtgtcggcgcagggcccagagtgtgagcctggaggggtctgcaccctcaccctcacccatgcacagccaccatcaccgcgccttcagcttctctctgccccgccctggcaggcgaggctccaggcctccagcagagatccgtgaggaggaggtacagacggtggaggatggggtgtttgacatccacttgtaatagatgctgtggttggatcaaggactcattcctgccttggagaaaatacttcaaccagagcagggagcctgggggtgtcggggcaggaggctggggatgggggtgggatatgagggtggcatgcagctgagggcagggccagggctggtgtccctaaggttgtacagactcttgtgaatatttgtattttccagatggaataaaaaggcccgtgtaattaaccttca

SEQ ID NO: 867 - DNA, 2019 bp, Homo sapiens
gcccggctcccggcgtggacgccatggtgctgtgcccggtgattgggaagctgctgcacaagcgcgtggtgctggccagcgcctccccacgccgtcaggagatcctcagcaacgcgggtctcaggtttgaggtggtcccctccaagtttaaagagaagctggacaaagcctccttcgctactccgtatgggtacgccatggagaccgccaagcagaaggccctggaggtggccaaccggctgtaccagaaagacctgcgggcccccgacgtggtcattggagcggacacgatcgtgacggtcggggggctgattctggagaagccggtggacaagcaggacgcctacaggatgctgtcccggttgagtgggagagaacacagcgtgttcacaggtgtcgcgatcgtccactgctccagcaaagaccatcagctggacaccagggtctcggaattctacgaggaaacgaaggtgaagttctcggagctgtccgaggagctgctctgggaatacgtccacagcggggagcccatggacaaagctggcggctacgggatccaggccctgggcggcatgctggtggagtccgtacacggggactttctgaacgtggtgggattcccgctgaaccacttctgcaagcagctggtgaagctctactacccgccccgtccggaggacctgcggcggagtgtcaagcacgactccatcccggccgcggacaccttcgaagacctcagtgacgtggaggggggcggctcggagcccactcagagggacgcgggcagccgcgatgagaaggccgaggcgggagaggcgggacaggccacggcagaggctgagtgtcacaggactcgggagaccctgcctccgttcccgacacgcctcctggagctgattgagggctttatgctatccaagggcctgctcaccgcttgcaaactgaaggtgttcgatttgttaaaagatgaagcaccccagaaggctgcggatattgccagcaaagtggacgcctctgcgtgtggaatggagaggcttctggacatctgtgctgccatggggctcctggagaagacagagcaaggttacagtaacacagagacagcgaacgtctacctggcatcggatggcgaatactctctgcacggcttcatcatgcacaataatgacctcacatggaacctctttacatacctggagtttgccatccgagagggaacaaaccagcaccacagggcgttggggaagaaggcggaagatctgttccaggatgcgtactaccagagcccggagacgcggctgaggttcatgcgggccatgcacggcatgacgaagctgactgcgtgccaggtggccacggccttcaatctgtcccgcttctcctccgcctgcgacgtgggaggctgcacgggtgcactggcccgagagctggcccgtgagtaccctcgtatgcaggtgactgtgtttgacctcccagacattatcgagctggccgcccacttccaaccccccggaccgcaggcagtgcagatccacttcgcagcaggtgactttttcagggaccccctccccagcgctgagctgtacgtcctgtgccggatcctgcatgactggccagacgacaaagtccacaagttactcagcagggtcgccgagagctgcaagccaggggccggcctgctgctggtggagacgctcctggatgaggagaagagggtggcgcagcgcgccctgatgcagtcactgaacatgctggtgcagactgaaggcaaggagcggagcctgggcgagtatcagtgcttgctggagctgcacggcttccaccaggtgcaggtggtgcacttggggggtgtcctggatgccatcttggccaccaaagtggccccctgaagcccaggcagcatgttcattatagggatgtcctcccccaggctgcaggtggaccgcccggtccccaagtaccataggacagtcacataggagcgtgtagtcgtgactgaataaagaaagcaaaagcctg

SEQ ID NO: 868 - DNA, 2818 bp, Homo sapiens
ggaatcggggtttctgggtgacggtgatctcggggtgggcaggactccaaaggcccgtcgacccggtggtggactccttgcactgggattggacatatgcaagcgggagatttggggccggcgctcaaaatcggggggcgggggtggactcgggtttggaccccaggatccgatcagcggacccttgattcaacgtgaggtcccgaattgacgtccttccctcaaaacctccgggtctacaaaccaggaccctcaagacccttcagggctccagcgtgacatggctgaagcgcaccaggccgtgggcttccgaccctcgctgacctcggacggggctgaagtggaactcagtgcccctgtgctgcaggagatctacctctctggcctgcgctcctggaaaaggcatctctcacgtttctggaatgactttctcaccggtgtgtttcctgccagccccctcagttggcttttcctcttcagtgccatccagcttgcctggttcctccagctggatccttccttaggactgatggagaagatcaaagagttgctgcctgactggggtggacaacaccacgggctccggggggtcctggcagccgcgctgtttgcctcgtgtttgtggggagccctgatcttcacactgcacgtggccctgaggctgcttctgtcctaccacggctggcttcttgagccccacggagccatgtcctcccccaccaagacctggctggccctggtccgcatcttctctggccgccacccgatgctgttcagttaccagcgctccctgccacgccagcccgtgccctctgtgcaggacaccgtgcgcaagtacctggagtcggtccggcccatcctctccgacgaggacttcgactggaccgcggtcctggcgcaggaattcctgaggctgcaggcgtcgctgctgcagtggtacctgcggctcaagtcctggtgggcgtccaattatgtcagtgactggtgggaggaatttgtgtacctgcgctcccgaaatccgctgatggtgaacagcaactattacatgatggacttcctgtatgtcacacccacgcctctgcaggcagctcgcgctgggaatgccgtccatgccctcctcctgtaccgccaccgcctgaaccgccaggagatacccccgactttgctgatgggaatgcgccccttatgctctgcccagtacgagaagatcttcaacaccacgcggattccaggggtccaaaaagactacatccgccacctccatgacagccaacacgtggctgtcttccaccggggccgattcttccgcatggggacccactcccgaaacagcctgctttccccgagagccctggagcagcagtttcagagaatcctggatgatccctcaccggcctgcccccacgaggaacatctggcagctctgacagctgctcccaggggcacgtgggcccaggtgcggacatccctgaagacccaggcagcggaggccctggaggcggtggaaggggccgctttctttgtgtcactggatgctgagcccgcggggctcaccagggaggacccggcagcgtcgttggatgcctacgcccatgctctgctggccggccggggccatgatcgctggtttgacaaatccttcaccctaatcgtcttctctaacgggaagctgggcctcagcgtggagcactcctgggccgactgccccatctcaggacacatgtgggagttcactctggctacagaatgctttcagctgggctactcaacagacggccactgcaaggggcacccggaccccacactaccccagccccagcggctgcaatgggaccttccagaccagatccactcctccatctctctagccctgaggggagccaagatcttgtctgaaaatgtcgactgccatgtcgttccattctccctatttggcaagagcttcatccgacgctgccacctctcttcagacagcttcatccagatcgccttgcaactggcccacttccgggacaggggtcaattctgcctgacttatgagtcggccatgactcgcttattcctggaaggccggacggagacggtgcggtcttgcacgagggaggcctgcaactttgtcagggccatggaggacaaagagaagacggacccacagtgcctcgccctgttccgcgtggcagtggacaagcaccaggctctgctgaaggcagccatgagcgggcagggagttgaccgccacctgtttgcgctgtacatcgtgtcccgattcctccacctgcagtcgcccttcctgacccaggtccattcggagcagtggcagctgtccaccagccagatccctgttcagcaaatgcatctgtttgacgtccacaattacccggactatgtttcctcaggcggtggattcgggcctgctgatgaccatggttatggtgtttcttatatcttcatgggggatggcatgatcaccttccacatctccagcaaaaaatcaagcacaaaaacggattcccacaggctggggcagcacattgaggacgcactgctggatgtggcctccctgttccaggcgggacagcattttaagcgccggttcagagggtcagggaaggagaactccaggcacaggtgtggatttctctcccgccagactggggcctccaaggcctcaatgacatccaccgacttctgactccttccagcaggcagctggcctctccaaggaataagggtgaaattgccacagctggctgacacaggacaggggcaactggtttggcaaccccacatccaggccaataaagatgtgtgagctggg

SEQ ID NO: 869 - DNA, 5045 bp, Homo sapiens
gcacacaaaagcagcataaattaaccgtcttcgggaagccgagcctctgccagccctgagctgggaagaagcagctacctcggaggcagggcgcgcaggcgggcggcgatgagagggggcgcagccgcagccccgcgctggggagcccaccgctaaccctgcaccccacccacccctgcacaaaagagctggcgggcgctggccacgtcgccctgggtgaccttcctcggatgcagaatccgcccctgcgagcatcctcttcctcctaggctctgaaggcccggggagcgtgagcgatgcccagctgcacccgggcagggctcgcctttgtttgccagtaaggaggagaggctgtctcagctgcagaggggtcatccctgcttcaagccagtgcctcttcccagctcccatggggaccaccgaagccacgctccggatggaaaacgtggacgtgaaggaggaatggcaggacgaagatcttcccaggccactcccagaagagacgggggtggaactgcttggcagcccggtggaagacacatcctatctcctcccaacacgctaaatttcaacggagcgcatcgtaagaggaagacgctggtggccccagagatcaacatttctctggatcagagtgaggggtccctgctgtccgatgacttcttggatacccctgatgacctggatattaacgtggatgacatcgagacccccgatgagaccgactcgctggagttcctggggaatggcaacgaactggagtgggaagacgacacccccgtggccaccgccaagaacatgcccggggacagcgcggatctatttggggacggcacgacggaggacggcagcgccgccaacgggcgcctgtggcggacagtgatcatcggggagcaagagcaccgtatagacctgcacatgatccggccttacatgaaagtggtcacccacggagggtactacggcgaaggcctcaacgccatcatcgtcttcgcagcctgcttccttccagacagcagcctccccgactaccactacatcatggagaacctcttcctgtacgtcatcagcagcttagagctcctggtggctgaggactacatgatcgtgtacctgaacggtgccacgccccggcggaggatgcctggaatcggctggctgaagaagtgctaccagatgatcgaccggaggttgcggaaaaacctgaagtccttgatcatcgtccacccctcgtggttcattcggactgtgctggccatctctcgccctttcatcagcgtcaagttcatcaacaagatccagtacgtgcacagcttggaagacctggagcaactcatccctatggaacacgtccagatcccagactgcgtcctgcaatacgaagaggaaagactgaaggccaggagggagagcgcgaggccccagccggagtttgtgctgcccaggtctgaagagaagccagaggtggcaccagtggaaaacaggtctgctctggtctcagaagatcaggaaacaagcctccagcccctgcacagatcaagctgacatgtcctgaggcgacgtgagcataacaaaggacatggaagaagattccagatgccagaaaacctctgtcagacgcccactggccccagatctcatcctgcctcatcctgagtcccaatcttccaagggtgccagcccctccgttcatctctgaaacccagcatccttttcagctgcttgaaaacattgtattttttttttttaacgatgcagtatttgtgcgttccagaaaagggcccagctctgagcccctcacccttccacactcacgaactctcagccgaggaaggcaagaagcgcagggggtggcccgcgtggcgtcggtggcctccgctcctgctcgcagcctctgtggtcagagctggatacaagattcaagacccttctcttgcttgtcacccgctccaggttggagccacagacacccaccgccaccccggctgggtctgcgtcctttcctgtgcctttccctccagaatgcggcctcagacctagaagctcaacccccctatgagggccacgtcctggggtagctcctgacctccgaccttatgtccaaatttcacacccatggtttttcatttgacccgcccccttctcgctcataatgacacccagctcctttgagaggatcagagcccattgcacaagaagagccgctgccaaccatccttgtcctccgattgcaaaatgacaccccagtaatctagaacattctcaagcccctttaactcagatgtcaagccaccgggcaaaccccgtcaatacctcccaccaaggaatgagatatgtggacctcactgctcccccaacccagcgtcaggctgggacacgccaacgctgttccgggttggaacagcagaggctcagaaactggctctgaaataggcagacctagcaagaggaagatacagggtatcgggcgtttgagtgtttcagaagtcattcgggaagataaatccagtgcgctggccgcagccacctgcattcaaagcttggaccagcgggttcttgttcgggaggcaaatttccctaggaaaaagaagacagacttttctaatgtggtccaaatgcggatcactggtcagatggactctagaagcactgagctccctgtctctggaagtatttaagaaaaggctgggccaggcacgatggctcacgcctgtaatcccagactttgggaggccgaggcaggcggatcacctgaggtgaggagtttgagaacagcctggccaacatggtgaaacctcatctctactaaaaatacaaaaattagccaggcgtggtggcaggtgcctgtaatcccagctacttgggaggctgaggcatgagaatcacttaaacctgagaggcagaggttacagtgagccaagatcgtgccactgcattccagcctgggcgacagagcaagactctgtctcaaaaaaaataaaaaataatcagggcacagtggctcatgcctgtaatcccagcactctgggaggctgaggtgggtggatcacctgaggtcaggagttcaagaccagcctggtgaacatggcgaaaccccgtctctaataaaaatacaaaaattagccgggcatggtggtgcatgcctgtaatcccagctactcgggaggctgaggcaggagaactgcttgaacccaggaggcagaggttgcagtgatccaagatcatgccactgcactccagcctgggcaacaagagcaaaactccgtctcaaaataaaaagaaaagaaaagaatggacagtgtttgcagagagttgctcacgagtttccctctaatcctaaatgtcttcatgtctatcagtctgagcagacggtgagtagggcgggcacattctccaggcccttcttcctagctctgtggttgacctctcagcaagtgctatccaggctgggccaaccagacccacaattaactgagcctcagtgaaagcgtccagtgcatcttgacctgagacagcaaggaattgcatttggggttattccaacgatgatggcagggaactggtggtatttagtgctgaggggcagtgatacagaaagatttgccctgtgggacagggtcctgcgcgagtcccatccccaaaagccagcagctcctgccatgaggaagacggggtttctgagcaggcttatgcctgcaggttcctgtggagccaccggctgtgacgggacacctctgggtctcagcattgccctggggaggctgggacatttagggacatggtagggttttaacatttgtttcccaaatgtcaaatcccgggcacaggggcaagaccctgtcccgaattcccaccccagtgaatggtgtcgctgccaaagccaacacaagatgacaaaagtggctgggtacggtggctcacgcctataatcccagcactttgggagaccgagacaggtggatcacctgaggtcaggagttcgagaccaggctggccaacatggtgaaaccccatctctactaaaaatacaaaaattagctgggtgtggtggcgcgcacctgtagtcccagctactcaggaggctgaggtagaagaatagctggaacccaggaggcagagattgcagtcagccgagattgcaccactgcactccagcctgggagacagagcaagactgactcaaaagaaaaaaaatgacagaagcctgattatcagactgcccggaggagacaggctccagcagatagatgccagccaggcccagctgccacgatttgtcccaggtgaccaaaggcacgcagctccagcatgaatcgttctaacccaacagtgacaagaactgctgggccttaaccgtcatggaagactggggccgcttccaagtcacagacaggagacggggacaggaaagaactcattccacccaatcggacacctaataattgagtgtctacagcagcaatcaagtgacaagtgaggccctacctgacccagaaggtgcctgccggctaaacattctgcccccaccagaaactccagggggtccgcccgttatgccgtggcccacccacgcccctttggatcaccagcagtcacagacaacaggcaggcgaaactgaagaccccaactcagccccagcggaccctccagagcaaaagaggcccccggcgaggccacctgtcggcaggcatgccgaggtcaaacagccggggccaccgttcccagctgggccacgacctgcaccgtccacagatgggctttgagatggatttgtatcagggtggggggtgtggtttggccaaaatgcaatggaccccgacccctcctcgtaaaaggatgttgggtttccctctggtgacacatgggatgcgtcataaaccctcccccaaagtcctggtcagcagcccatccttccaacgatgagttttgcggtttttcagaacagaaatgatcactacgattgacgacggtcgtgatgttaagacgtcgtctccatgagctttggggggacttttatgtggaataaagaaactatcactgagaa

SEQ ID NO: 870 - DNA, 2161 bp, Homo sapiens
cgggccgggacgcagggcaaagcgagccatggctgtctacgtcgggatgctgcgcctggggaggctgtgcgccgggagctcgggggtgctgggggcccgggccgccctctctcggagttggcaggaagccaggttgcagggtgtccgcttcctcagttccagagaggtggatcgcatggtctccacgcccatcggaggcctcagctacgttcaggggtgcaccaaaaagcatcttaacagcaagactgtgggccagtgcctggagaccacagcacagagggtcccagaacgagaggccttggtcgtcctccatgaagacgtcaggttgacctttgcccaactcaaggaggaggtggacaaagctgcttctggcctcctgagcattggcctctgcaaaggtgaccggctgggcatgtggggacctaactcctatgcatgggtgctcatgcagttggccaccgcccaggcgggcatcattctggtgtctgtgaacccagcctaccaggctatggaactggagtatgtcctcaagaaggtgggctgcaaggcccttgtgttccccaagcaattcaagacccagcaatactacaacgtcctgaagcagatctgtccagaagtggagaatgcccagccaggggccttgaagagtcagaggctcccagatctgaccacagtcatctcggtggatgcccctttgccggggaccctgctcctggatgaagtggtggcggctggcagcacacggcagcatctggaccagctccaatacaaccagcagttcctgtcctgccatgaccccatcaacatccagttcacctcggggacaacaggcagccccaagggggccaccctctcccactacaacattgtcaacaactccaacattttaggagagcgcctgaaactgcatgagaagacaccagagcagttgcggatgatcctgcccaaccccctgtaccattgcctgggttccgtggcaggcacaatgatgtgtctgatgtacggtgccaccctcatcctggcctctcccatcttcaatggcaagaaggcactggaggccatcagcagagagagaggcaccttcctgtatggtacccccacgatgttcgtggacattctgaaccagccagacttctccagttatgacatctcgaccatgtgtggaggtgtcattgctgggtcccctgcacctccagagttgatccgagccatcatcaacaagataaatatgaaggacctggtggttgcttatggaaccacagagaacagtcccgtgacattcgcgcacttccctgaggacactgtggagcagaaggcagaaagcgtgggcagaattatgcctcacacggaggcccggatcatgaacatggaggcagggacgctggcaaagctgaacacgcccggggagctgtgcatccgagggtactgcgtcatgctgggctactggggtgagcctcagaagacagaggaagcagtggatcaggacaagtggtattggacaggagatgtcgccacaatgaatgagcagggcttctgcaagatcgtgggccgctctaaggatatgatcatccggggtggtgagaacatctaccccgcagagctcgaggacttctttcacacacacccgaaggtgcaggaagtgcaggtggtgggagtgaaggacgatcggatgggggaagagatttgtgcctgcattcggctgaaggacggggaggagaccacggtggaggagataaaagctttctgcaaagggaagatctctcacttcaagattccgaagtacatcgtgtttgtcacaaactaccccctcaccatttcaggaaagatccagaaattcaaacttcgagagcagatggaacgacatctaaatctgtgaataaagcagcaggcctgtcctggccggttggcttgactctctcctgtcagaatgcaacctggctttatgcacctagatgtccccagcacccagttctgagccaggcacatcaaatgtcaaggaattgactgaacgaactaagagctcctggatgggtccgggaactcgcctgggcacaaggtgccaaaaggcaggcagcctgcccaggccctccctcctgtccatcccccacattcccctgtctgtccttgtgatttggcataaagagcttctgttttctttggc

SEQ ID NO: 871 - DNA, 3190 bp, Homo sapiens
agggcaaagccagctcccgtctcagcctcccgtaggaagatctcccggcctcacctgagcgccccgcagccctgggtacctctgctcccgcccagggtcctatggcccctcctcccagcacccaacactgggaccccacctgtacccaggctggcctccctcccccgcagcttcctttgcagccgccgtccgcgggtctccaggcgtggccacacctcccggggccccgcaagggttaaggcagcagagaggagaggtttgggctgacgtcgctctggctgaaggtggttcccctcagatgaggatgggagagcctggcgagctgaaacccgagctcccgctcagctggggctcggggaggtccctgtaaaacccgcctgcccccggcctccctgggtccctcctctccctccccagtagacgctcgggcaccagccgcggcaaggatggagctgggttgctggacgcagttggggctcacttttcttcagctccttctcatctcgtccttgccaagagagtacacagtcattaatgaagcctgccctggagcagagtggaatatcatgtgtcgggagtgctgtgaatatgatcagattgagtgcgtctgccccggaaagagggaagtcgtgggttataccatcccttgctgcaggaatgaggagaatgagtgtgactcctgcctgatccacccaggttgtaccatctttgaaaactgcaagagctgccgaaatggctcatgggggggtaccttggatgacttctatgtgaaggggttctactgtgcagagtgccgagcaggctggtacggaggagactgcatgcgatgtggccaggttctgcgagccccaaagggtcagattttgttggaaagctatcccctaaatgctcactgtgaatggaccattcatgctaaacctgggtttgtcatccaactaagatttgtcatgttgagcctggagtttgactacatgtgccagtatgactatgttgaggttcgtgatggagacaaccgcgatggccagatcatcaagcgtgtctgtggcaacgagcggccagctcctatccagagcataggatcctcactccacgtcctcttccactccgatggctccaagaattttgacggtttccatgccatttatgaggagatcacagcatgctcctcatccccttgtttccatgacggcacgtgcgtccttgacaaggctggatcttacaagtgtgcctgcttggcaggctatactgggcagcgctgtgaaaatcttctggaggctgggaagtccaagatcaaggcgtcagaagattcattgtctgtccttgaagaaagaaactgctcagaccctgggggcccagtcaatgggtaccagaaaataacagggggccctgggcttatcaacggacgccatgctaaaattggcaccgtggtgtctttcttttgtaacaactcctatgttcttagtggcaatgagaaaagaacttgccagcagaatggagagtggtcagggaaacagcccatctgcataaaagcctgccgagaaccaaagatttcagacctggtgagaaggagagttcttccgatgcaggttcagtcaagggagacaccattacaccagctatactcagcggccttcagcaagcagaaactgcagagtgcccctaccaagaagccagcccttccctttggagatctgcccatgggataccaacatctgcatacccagctccagtatgagtgcatctcacccttctaccgccgcctgggcagcagcaggaggacatgtctgaggactgggaagtggagtgggcgggcaccatcctgcatccctatctgcgggaaaattgagaacatcactgctccaaagacccaagggttgcgctggccgtggcaggcagccatctacaggaggaccagcggggtgcatgacggcagcctacacaagggagcgtggttcctagtctgcagcggtgccctggtgaatgagcgcactgtggtggtggctgcccactgtgttactgacctggggaaggtcaccatgatcaagacagcagacctgaaagttgttttggggaaattctaccgggatgatgaccgggatgagaagaccatccagagcctacagatttctgctatcattctgcatcccaactatgaccccatcctgcttgatgctgacatcgccatcctgaagctcctagacaaggcccgtatcagcacccgagtccagcccatctgcctcgctgccagtcgggatctcagcacttccttccaggagtcccacatcactgtggctggctggaatgtcctggcagacgtgaggagccctggcttcaagaacgacacactgcgctctggggtggtcagtgtggtggactcgctgctgtgtgaggagcagcatgaggaccatggcatcccagtgagtgtcactgataacatgttctgtgccagctgggaacccactgccccttctgatatctgcactgcagagacaggaggcatcgcggctgtgtccttcccgggacgagcatctcctgagccacgctggcatctgatgggactggtcagctggagctatgataaaacatgcagccacaggctctccactgccttcaccaaggtgctgccttttaaagactggattgaaagaaatatgaaatgaaccatgctcatgcactccttgagaagtgtttctgtatatccgtctgtacgtgtgtcattgcgtgaagcagtgtgggcctgaagtgtgatttggcctgtgaacttgggctgtgccagggcttctgacttcagggacaaaactcagtgaagggtgagtagacctccattgctggtaggctgatgccgcgtccactactaggacagccaattggaagatgccagggcttgcaagaagtaagtttcttcaaagaagaccatatacaaaacctctccactccactgacctggtggtcttccccaactttcagttatacgaatgccatcagcttgaccagggaagatctgggcttcatgaggccccttttgaggctctcaagttctagagagctgcctgtgggacagcccagggcagcagagctgggatgtggtgcatgcctttgtgtacatggccacagtacagtctggtccttttccttccccatctcttgtacacattttaataaaataagggttggcttctgaactacaaaa

SEQ ID NO: 872 - DNA, 2208 bp, Homo sapiens
agcccagcgctcctccccgcaaatgatcccgccccaggggcctatcccagtccccccagtgcctttggttgctggagggaagaacacaatggatctggtgctaaaaagatgccttcttcatttggctgtgataggtgctttgctggctgtgggggctacaaaagtacccagaaaccaggactggcttggtgtctcaaggcaactcagaaccaaagcctggaacaggcagctgtatccagagtggacagaagcccagagacttgactgctggagaggtggtcaagtgtccctcaaggtcagtaatgatgggcctacactgattggtgcaaatgcctccttctctattgccttgaacttccctggaagccaaaaggtattgccagatgggcaggttatctgggtcaacaataccatcatcaatggtgaggagccaggtgtggggaggacagccagtgtatccccaggaaactgacgatgcctgcatcttccctgatggtggaccttgcccatctggctcttggtctcagaagagaagctttgtttatgtctggaagacctggggccaatactggcaagttctagggggcccagtgtctgggctgagcattgggacaggcagggcaatgctgggcacacacaccatggaagtgactgtctaccatcgccggggatcccggagctatgtgcctcttgctcattccagctcagccttcaccattactgaccaggtgcctttctccgtgagcgtgtcccagttgcgggccttggatggagggaacaagcacttcctgagaaatcagcctctgacctttgccctccagctccatgaccccagtggctatctggctgaagctgacctctcctacacctgggactttggagacagtagtggaaccctgatctctcgggcacttgtggtcactcatacttacctggagcctggcccagtcactgcccaggtggtcctgcaggctgccattcctctcacctcctgtggctcctccccagttccaggcaccacagatgggcacaggccaactgcagaggcccctaacaccacagctggccaagtgcctactacagaagttgtgggtactacacctggtcaggcgccaactgcagagccctctggaaccacatctgtgcaggtgccaaccactgaagtcataagcactgcacctgtgcagatgccaactgcagagagcacaggtatgacacctgagaaggtgccagtttcagaggtcatgggtaccacactggcagagatgtcaactccagaggctacaggtatgacacctgcagaggtatcaattgtggtgctttctggaaccacagctgcacaggtaacaactacagagtgggtggagaccacagctagagagctacctatccctgagcctgaaggtccagatgccagctcaatcatgtctacggaaagtattacaggttccctgggccccctgctggatggtacagccaccttaaggctggtgaagagacaagtccccctggattgtgttctgtatcgatatggttccttttccgtcaccctggacattgtccagggtattgaaagtgccgagatcctgcaggctgtgccgtccggtgagggggatgcatttgagctgactgtgtcctgccaaggcgggctgcccaaggaagcctgcatggagatctcatcgccagggtgccagccccctgcccagcggctgtgccagcctgtgctacccagcccagcctgccagctggttctgcaccagatactgaagggtggctcggggacatactgcctcaatgtgtctctggctgataccaacagcctggcagtggtcagcacccagcttatcatgcctgtgcctgggattcttctcacaggtcaagaagcaggccttgggcaggttccgctgatcgtgggcatcttgctggtgttgatggctgtggtccttgcatctctgatatataggcgcagacttatgaagcaagacttctccgtaccccagttgccacatagcagcagtcactggctgcgtctaccccgcatcttctgctcttgtcccattggtgagaacagccccctcctcagtgggcagcaggtctgagtactctcatatgatgctgtgattttcctggagttgacagaaacacctatatttcccccagtcttccctgggagactactattaactgaaataaatactcagagcctga

SEQ ID NO: 873 - DNA, 2857 bp, Homo sapiens
gccaggagcccgatcgagatgatgatggttatgcagcccgagggtctgggggccggggaggggcgctttgcgggcggcggcgggggcggcgagtacatggaacaggaggaggactgggaccgcgacctgctgctggacccggcctgggagaagcagcagcggaaaaccttcactgcctggtgcaactcacacctgcgcaaggcaggcacccagatcgagaacatcgaggaagatttccgcaatggcctcaaactcatgctgctcctggaggtcatttcaggtgagaggctgcctaggccagataaaggcaagatgcgcttccacaaaatcgccaacgttaacaaggccctggacttcattgccagcaagggggttaaactggtgtccattggtgctgaagagattgttgacgggaacctgaagatgaccctgggcatgatctggaccatcatccttcgcttcgccatccaggacatctctgtggaagaaacctcagccaaggaaggcttgcttctgtggtgccagaggaagacagcaccgtaccgcaacgtcaacgtgcagaacttccacaccagctggaaggatggcctggccctctgtgccctcatccaccgacaccgccctgacctcatcgactacgccaaactgcgaaaggatgaccccatcggaaacctgaacactgcctttgaggtggcagagaaatacctggacatccccaagatgttggatgcagaagacattgtgaacaccccaaagccggatgagaaggccatcatgacctatgtgtcctgcttctaccatgcctttgccggggctgagcaggcagagacagctgccaacaggatctgcaaggtgctggcagtgaaccaggaaaacgagaagctgatggaggagtatgagaagcttgccagtgagctgctggagtggatccgccgcactgtcccatggctggagaaccgtgtgggtgagcccagcatgagtgccatgcagcgcaaactagaggactttcgggactaccggcgtctgcacaagccgccccgcattcaggaaaagtgccagctggagatcaacttcaacacactgcagaccaagttgcggctcagccaccggcctgccttcatgccctccgagggcaagctggtctcggacatcgccaacgcctggcgggggctggagcaggtggaaaagggctatgaggactggctgctctcggagatccggcgcctgcagcgactccagcacctggctgagaagttccggcagaaggcctccctgcacgaagcctggacccggggaaaggaggagatgctgagccagcgcgactacgattcggctttgctacaggaggtgcgggcgttgctgcggcgccacgaggcctttgagagcgacctggcggcgcaccaggaccgcgtggagcacattgccgcgctggcccaggagctcaatgagctggactaccacgaggcagcctcagtgaatagccgctgccaggccatctgcgatcagtgggacaacctgggcaccctgacccagaagaggcgggatgcgctagagcggatggagaagctcctggagaccattgaccggctgcaactggagtttgcccggcgggccgcgcccttcaacaactggctggatggtgccgtggaggacctgcaggacgtgtggctggtacactctgtggaggagacccagagcctgctgacagcgcacgatcagttcaaggcaacactgcccgaggctgactgagagcgaggtgccatcatgggcatccagggtgagatccagaagatctgccagacgtatgggctgcggccctgctccaccaatccctacatcaccctcagcccgcaggacatcaacaccaagtgggatatggtccgaaagctggtgcccagctgtgaccagacactgcaggaggagctggcacggcagcaggtaaacgagaggctccggcgacagtttgcggcccaggccaatgccattggaccctggatccaggcgaaggtggaggaagtggggcggctggcagcagggctagctggctctctggaggagcagatggctgggctacggcagcaggagcagaacattatcaactacaagactaacattgaccggctggagggtgaccaccagctgctgcaggagagcctggtgttcgacaataagcacaccgtctacagcatggagcacatccgcgtgggctgggagcagctgctcacctccattgcccgcaccatcaatgaagtggagaaccaggtactgacccgagacgccaagggactgagccaggagcagctcaacgagttccgagcatccttcaaccactttgacaggaagcagaatgggatgatggagcctgatgacttccgagcttgcctcatctccatgggctatgacctgggggaagtggagtttgctcgcatcatgaccatggtggaccccaacgcagctggggtggtgaccttccaggccttcatagacttcatgacccgagagacagccgagactgacacgactgagcaagttgtagcttccttcaagatcttggcaggagacaagaactacatcacccccgaggagctgcggcgcgagctccctgccaagcaggccgagtactgcatccgccgtatggtgccctacaagggatccggggccccggctggagccctggactacgtggccttctccagtgccctctatggggagagcgacctttgaccccaaccactgaggttctctatgcaagatggagagaggatgcaccctgtggctgatcccatccgtccctcggagcaagggcctaagagaaaagccagccaagtgcttctgaataaagatccctctctgggtc

SEQ ID NO: 874 - DNA, 1922 bp, Homo sapiens
agcgggtggaaagcgcatgcgcgtcgggcacagcgcgtgcagcctcgtgcagctcttctggtctccggcgcccgcccctcagacgtaatgttgaattaaagaaaatactttatcagaagaagatggccactgcccagttgcagaggactcccatgagtgcactggtatttcccaataagatatcaactgaacaccagtctttggtgttagtgaagaggcttctagcagtttcagtatcctgtatcacgtatttgaggggaatattcccagaatgcgcttatggaacaagatatctagatgatctttgtgtcaaaatactgagagaagataaaaattgcccaggatctacacagttagtgaaatggatgctaggatgttatgatgctttacagaaaaaatatgtaactaaggatggttgttctagctccttagataactcaattgtatacacaaacccagaagatcctcagacaatttcagaatgttaccaattcaaattcaaatacaccaataatggaccactcatggacttcataagtaaaaaccaaagcaacgaatctagcatgttgtctactgacaccaagaaagcaagcattctcctcattcgcaagatttatatcctaatgcaaaatctggggcctttacctaatgatgtttgtttgaccatgaaacttttttactatgatgaagttacacccccagattaccagcctcccggttttaaggatggtgattgtgaaggagttatatttgaaggggaacctatgtatttaaatgtgggagaagtctcaacaccttttcacatcttcaaagtaaaagtgaccactgagagagaacgaatggaaaatattgactcaactatactatcaccaaaacaaataaaaacaccatttcaaaaaatcctgagggacaaagatgtagaagatgaacaggagcattatacaagtgatgatttggacattgaaactaaaatggaagaacaggaaaaaaaccctgcatcttctgaacttgaagaaccaagtttagtttgtgaggaagatgaaattatgaggtctaaagaaagtccagatctttctatttctcattctcaggttgagcagttagtcaataaaacatctgaacttgatatgtctgaaagcaaaacaagaagtggaaaagtctttcagaataaaatggcaaatggaaatcaaccagtaaaatcttccaaagaaaatcggaagagaagtcaacatgaatctgggagaatagtcctccatcactttgattcttctagtcaagagtcagtgccaaaaaggagaaagtttagtgaaccaaaggaacatatataaaaattatttttgttctgcaggcttgcagagttcttctcaccatttaaactgaaggaccctatattatatttccctaactctgaagatgtatatgtagtttaaagcagtttgtacactaaaactaagtttttggctgactgtcatattgtggtccttaatcttgagataaatccaatagaacttttgaataaaagcaaaagtacaaatgtcataattgattcggtaataagtaaaatttcaaaattgattttgttcattacctacttaatatttcctttaaatatatactaactgttaaggccctctaatgccatttttctaaacagtaatgtttactttggtattaaaatttggtatggattcactttttacttatgttaaaattataccatttaactggctcttttgtcattgtgctgttattaaaacaatgttcttcaatattttgacataatgtattaacattttaatatataatgtacaatttaagaattggtgctttacctttactatgcttttttttacaggacaaaaagactgatttttaaagtatggcattttttgcagcataaataaaatattgttcagtacgta

SEQ ID NO: 875 - DNA, 2291 bp, Homo sapiens
cggattgtcagactgctcctccctcttctttagactgccacgaggaaaaagcagatgtgagaactcaaggttcagggctgctcttctaagaaacaagtctgccataatctccatctgtgttggaatctgttaactaatgaactggtctctgtgcaaatcctgagtgctaaagcttccaacaagactgatgctagctcgtgtcaccaggaagatgctacgtcatgccaagtgttttcagcgcctagcaatttttggttctgtgagggcactgcataaagataatagaacagcaacccctcagaatttctccaactatgaatccatgaaacaggacttcaaactggggattccagagtatttcaactttgctaaagatgtcctggaccaatggactgataaggaaaaggctggaaagaaaccttcaaatccagccttctggtggatcaacagaaatggagaagagatgcgatggagttttgaggaactgggatctctgtccagaaaatttgccaatatactttcagaagcctgttccctacaaagaggagatcgggtaattctgattctgcccagggtcccagagtggtggcttgcaaatgtggcctgtctgcgaacagggacagttttaattccaggaaccactcagctgacccagaaagacattctctacagactacaatcttcaaaagcaaactgcattatcaccaatgatgttttagccccagcagtagacgctgttgcatccaaatgtgaaaatctgcactccaagctgattgtatcagagaactccagagaggggtgggggaacctcaaggagttgatgaaacatgccagtgacagccacacctgtgtgaagacaaaacacaatgagatcatggccatattctttaccagtggaacaagtggatatccgaaaatgactgcacacacccacagcagttttggtttaggattatctgtaaatggaaggttctggctagatttgacaccctcagatgtgatgtggaatacctcagatacgggctgggcaaagtctgcatggagtagtgttttttctccgtggatccagggagcatgtgtattcacacaccatttaccccgttttgagccgacttctatcttgcaaacactctccaagtaccccatcacagtcttctgttcagcaccaactgtataccgaatgcttgtacagaatgatataaccagctataagtttaaaagcttaaagcactgtgtgagtgctggggaaccaattacccctgacgtgactgaaaaatggagaaacaagacgggcctggatatctacgaaggatatggacagactgaaacggtgctaatctgtggaaattttaagggaatgaaaattaaacctggctcaatgggaaaaccttctcctgctttcgatgttaaggtttgcacatccccttccaggagaatgtttaacaacccaatctgtacactacctacctaccgcttacccccatataaactttctttgttatgatggtgattccattttacttccatgatactttaatttttataaatatgtgaaaatgattagaaatgattgtagatgtaaatggcaatgttctacctcctggacaagaaggagatattggcattcaagttctacccaaccgaccatttggcctttttactcattacgtagataatccttcaaaaacagcttcaactctacgaggcaatttctatatcactggggacagaggatatatggataaagatgggtatttctggtttgttgcaagagcagatgatgtcatattatcctctggctatcgaattggaccatttgaggtagaaaatgccctgaatgaacacccttcagttgcagagtcagctgttgtcagcagcccagaccccatcagaggagaggtagtaaaggcttttgtcgttctaaatcctgattacaagtcacatgatcaagaacaactaataaaggagattcaggagcatgttaaaaaaactacagcaccttacaaatatcccagaaaggtagaatttattcaagagctgccaaagactatcagtgggaagacaaaaagaaatgaactgaggaagaaagaatggaagacaatttaaagttgtttcattaattaccatatctataaaacaaacatagtatctgtcaatctctagaaaccacaagatgatggagaggtcataaaaactgtggtagtatgcttagaaactgttgatttaaaatatcttgtggttatgatatcagaggctaaattttgaaataaaatatttggcaaattcctcca

SEQ ID NO: 876 - DNA, 3596 bp, Homo sapiens
gcggccgcggtgaagcgcggagggcggcgcgggcaccggggccgggccggggctgcagccgcagcggccatgggggccctgacgagccggcagcacgcgggcgtggaggaggtggacatcccgtctaattccgtgtaccgctacccgcccaagtccggaagctattttgccagccacttcattatgggaggagagaagtttgactcaactcatcctgaaggttacctgtttggagagaacagcgatctgaactttctggggaacagaccagttgtgtttccttacgccgccccacctccccaagaacccgtgaagactctgagaagcctggtcaatatccgaaaggacacactgaggctcgtcaaatgtgctgaggaagtgaagagccctggagaagaggccagtaaagctaaagtccactacaatgttgagttcacctttgacacagatgctcgggtagccatcaccatctattaccaggccacggaagagttccagaatggtattgccagctacattcccaaagacaacagcctccagtcggagactgtgcagtacaagcgaggagtgtgtcagcagttctgcctgccctcccacaccgtggatccctccgagtgggccgaagaggagcttggctttgatttagaccgagaagtttaccctctagtggtacatgccgtggtggatgaaggagacgagtattttggccattgccatgtactgctgggtacttttgagaagcacacagatggaactttctgtgtcaagcccctcaaacagaaacaagtagtagacggggtcagctacctccttcaggagatctatggaattgaaaacaagtacaacacacaagattctaaggtggctgaagacgaagtgagtgataacagtgccgagtgtgtggtgtgtctctcggatgtccgggacaccttgattctgccctgtcgccacctctgcctctgtaacacctgtgcagacacgctgcgctaccaggccaacaactgccccatctgccgactgcccttccgggcactgcttcagatccgagccatgaggaaaaaattgggccccttgtccccaaccagctttaaccccatcatctcatcccagacatctgactctgaagagcatccatcctcagagaatattccaccaggctatgaagtagtatctcttctggaggccctcaacgggcccctcaccccgtccccagcagttcctccacttcacgtgcttggagatggccacctctcaggaatgctcccttcatatggcagtgatggccacctgccccccgtcaggacgatctcgcctcttgaccgcctgtctgacagcagcagtcagggactcaaactcaaaaagagtctctccaaatccacttcccaaaactcttccgtgctgcatgaagaggaagatgagcattcctgcagcgagtcggagacacagctctctcagagaccgtcggttcagcatctcggagagagcgagactccatctcaaaaaaaaaaagaatgtggtgtgactccagaaagtgagaatctcaccttgtcgtcatctggagctattgaccagtcgtcttgcacagggacgcctctgtcatccactatttcctccccagaaggccctgccagcagcagcttggcccagtctgtcatgtccatggcatcctcccagatcagcactgacaccgtctcctccatgtctggctcctacatcgcccctggcactgaagaggagggagaggctctctcttccccccagcctgccagcagggccccctcagaagaaggagaggggctgccagcggagtctccagacagcaactttgctggcctcccagctggagagcaggatgcagagggaaatgatgttatagaggaagaggatggatcacccacgcaggaaggccagaggacgtgcgcatttctaggtatggagtgtgacaataacaatgactttgacatcgcaagcgtgaaagcactggacaataagctgtgctctgaggtctgcttacctggtgcctggcaggctgatgacaatgccgtcagtcggaatgcccagcgccggcgcttgtcatccagcagcctggaggactctgagacgaggccctgtgtgtggggccctttggctgtctgagccccagcctctgcacttgggctcccctcctgccctgcattccatccatcctcactcagctgctgcctactgggcatcctcagcaagatgctggagactttttaccctcctgtgacagctgttacaacctgtaaccacaatccctcacctctcagagggaactggaaccctcctttctccgtgtgacctaaagccactcaatgaactgcagctcacgagaccttttgcagggactctggaatgtcctcacggtatattgatgttcaggtggagctggggtccatgggctaatttcttacacatcttttttctccttagggggtagaacaagaaggcttagagtttggcagctttgttacaaacatccctctggcatttcctggtctctggcacatcataaccaattggaaacctgcagtttggggtagggctggaggatcgctcctgtggaaagggagagccatactgcacggacgtagcgtttccctctacaagcactaggagcacctttctcaaggacaagaaatggtagcaaccaaaaggttggttgaaggaaacaatccttccttctggtggcagagccagtcttctgggcctcacatgcctgtgcggttaagaaggagctcttggccgggcgcggtggctcacgcctgtaatcccagcactttgggaggccgaggcgggtggatcatgagatcaggagatcgagaccatcctggctaacacggcgaaaccccgtctctactaaaaatacaaaaaattagctgggcatggttgcaggcgcctgtagtcccagctacttgggaggctgaggcaggagaatggcctgaacccgggaggcggagcttgcagtgagccgagatcgcgccaatgcactccagcctgggcgacagagaaaaaaaaaaaaaaagaaggagcccttgaatctgagaatcccccagttaagatgatttcccttaaggagcatttctcctgatcaggtgcattcagggaggcctgcaactccatcctaaggtgacatttcaagaaacacatgtgttgaccacctctgtgtgccaagcactgggtgaggagtggtcgtatattaccataattcatcctcactcaattgggaggtggcattcttgtccctgttgcccccatctctacccccttttgttaatggttgagagaaatgtggaccagtgattctcagtttggtgcccaggtccccaaaggaagtgatggagagccttgagctaagttcaggcagcagcatgtggccagcagcagtgtgctgggagcagaggttggaatcagggctcagggccttcacttcaagggccctccccagctactcgggaggctgaggcaggagaatcgcttgaactcaggaggtggaggttgcggtgagccaagatcgtgccactgcactccagcctgggctacaagattgaaaagatcgaaactctgtctcaaac

SEQ ID NO: 877 - DNA, 3050 bp, Homo sapiens
gagcctgcgcaggaggccaataggctgccaatactccttggactccccgccagggccctgctgtcagtgcgcctgcgcgcgggtccggcgccgaggttcttgactgctgtgccggacgccaggtgtagccatgcagcgagccgattccgagcagccctccaagcgtccccgttgcgatgacagcccgagaaccccctcaaacaccccttccgcagaggcagactggtccccgggcctggaactccatcccgactacaagacatggggtccggagcaggtgtgctccttcctcaggcgcggtggctttgaagagccggtgctgctgaagaacatccgagaaaatgaaatcacaggcgcattactgccttgtcttgatgagtctcgttttgaaaatcttggagtaagttccttgggggagaggaagaagctgcttagttatatccagcgattggttcaaatccacgttgatacaatgaaggtaattaatgatcctatccatggccacattgagctccaccctctcctcgtccgaatcattgatacacctcaatttcaacgtcttcgatacatcaaacagctgggaggtggttactatgtttttccaggagcttcacacaatcgatttgagcatagtctaggggtggggtatctagcaggatgtctagttcacgcactgggtgaaaaacaaccagagctgcagataagtgaacgagatgttctctgtgttcagattgctggactttgtcatgatctcggtcatgggccattttctcacatgtttgatggacgatttattccacttgctcgcccggaggtgaaatggacgcatgaacaaggctcagttatgatgtttgagcaccttattaattctaatggaattaagcctgtcatggaacaatatggtctcatccctgaagaagatatttgctttataaaggaacaaattgtaggaccacttgaatcacctgtcgaagattcattgtggccatataaagggcgtcctgaaaacaaaagcttcctttatgagatagtatctaataaaagaaatggcattgatgtggacaaatgggattattttgccagggactgccatcatcttggaatccaaaataattttgattacaagcgctttattaagtttgcccgtgtctgtgaagtagacaatgagttgcgtatttgtgctagagataaggaagttggaaatctgtatgacatgttccacactcgcaactctttacaccgtagagcttatcaacacaaagttggcaacattattgatacaatgattacagatgctttcctcaaagcagatgactacatagagattacaggtgctggaggaaaaaagtatcgcatttctacagcaattgacgacatggaagcctatactaagctgacagataacatttttctggagattttatactctactgatcccaaattgaaagacgcacgagagattttaaaacaaattgaataccgtaatctattcaagtatgtgggtgagacgcagccaacaggacaaataaagattaaaagggaggactatgaatctcttccaaaagaggttgccagtgctaaacccaaagtattgctagacgtgaaactgaaggctgaagattttatagtggatgttatcaacatggattatggaatgcaagaaaagaatccaattgatcatgttagcttctattgtaagactgcccccaacagagcaatcaggattactaaaaaccaggtttcacaacttctgccagagaaatttgcagagcagctgattcgagtatattgtaagaaggtggacagaaagagtttgtatgccgcaagacaatattttgttcagtggtgtgcagacagaaatttcaccaagccgcaggtaggtggcctgttactcacaaactttgcacaattttttatttttaagtaagatggcgatgttatagccccactcataacacctcaaaaaaaggaatggaacgacagtacttcagtccaaaatccaactcgcctccgagaagcatccaaaagcagagtccagctttttaaagatgacccaatgtgaatgtctgtagtcagttgtttacaaactccctctcctgcacaattcatttagaggcttcaatcatagaattctgcaaattaatgacaactcatgctttaattttgtattttgaatgtacacgcatgctgaagctaagtaacttttaatcaaagaaataagatggtattaggcaaatcttactatactatgaaaagcattaccttgcctatttttaatattattaaagcctttctccttcagtagtctattttcttagaataacaactcttttatctattctgaactctattttttttcttttttaagagacaaggttttgctctgttgcccagcttggactcgaactttcctgggctcaagcgaccctcctgcctcagccccccaagtagctgggactaaagtcatgtgccaccacacccagcttactctgaacttttatgacagatgattgttttttgtttttaatgtagaaatgagacaagggtacaaattggaactagaaattgacattgtcattgacaaacatggctaaaaacaaaacatcaaatcctgcccccgtgaagagttccctgtcacctcaagtttgaggatagtcctctaagagtgacctaagcataagtgaaagacacctcccctcacccttctagccccctacaaggtgccaggttggggtaaagagttggagatgatggccaggagtggcctccaacacgctggtgagaggcctgattaggttttggggaagatctgagagctctggcctcttcgtgagtggaacataaagccgcctcttgttgggagatcctaccccagtgacagaggaatcccccaaactaggctgtgccctggctccgtggcggctccagacccgggtagtgcctttgtcccctgaatactcactcccccggtccagagggccttcccactgcccagcctggagaaggcctcccctgacctgctctctcagtatcctggagagctggccaga

SEQ ID NO: 878 - DNA, 1008 bp, Homo sapiens
cctttctttttcacattatctttcttgattgctttttaatagaaaaacaaacaaagacatggatttactgtgcatattagcagatccatactggaaaatgcatggaggtttcatatacaccacttacaggtttccaaagccacaatttccttcatatgttcaaactcttcaggatgcagaaaggcagtgaactcctccggagtagctgtcaggtcaccattgaggtctgcagctttgaatcttctctcatcacgtggcagcatctttttaaaggtgtgatgatctgaagaatcatgaaactctgcggggtttcctaggttttcagctcctcagtagtgacaaagccatacccatcattgtcgattcgatcaacaatcttccctagcctctccttgctctcgtccggggtgagctcgtcgaagttcttggagtcctccttgcccaggaaggcctcgtggtcgtactggaagctctggttgtcctcagggggccgctcgcccagctccgagtcgggccgcaccacgcgctctttgcgcaccgtgggcttggcccgcagaacccgcggcgccagcaccagcgccagcagcagccccagggctaaccccaggcggccaccgcgcgccatcgtcccgaggagagggcggccgggagggagacgctgagcgagcgacaacagcggcagctcgggaatgggggctcggagcgcggcggccaagttttatgttatgtatattttacaagtaaaaaaattttttcacctcagcctgaactgaacactagctgacagacgttttgatttctttgaccatcacggaatcgtggccaagcgcggtggctcacatctgtaatcccaacactttgggaggtcaagatgggcggattgcttgaatccaggtgtttgagatcagcctgggcaacatgacaaaaccctgtttctagtaaaaatacaaaaattaaccaggctcaagccatgaccatgcaccattgcactccagcctaggcgacaga

SEQ ID NO: 879 - DNA, 1237 bp, Homo sapiens; identical to SEQ ID NO: 406

SEQ ID NO: 880 - DNA, 1215 bp, Homo sapiens
ctttgggcctcatcatttacaaaagaagcttgggcccctgacagcatgcatctcctcttatttcagctgctggtactcctgcctctaggaaagaccacacggcaccaggatggccgccagaatcagagttctctttcccccgtactcctgccaaggaatcaaagagagcttcccacaggcaaccatgaggaagctgaggagaagccagatctgtttgtcgcagtgccacaccttgtagccaccagccctgcaggggaaggccagaggcagagagagaagatgctgtccagatttggcaggttctggaagaagcctgagagagaaatgcatccatccagggactcagatagtgagcccttcccacctgggacccagtccctcatccagccgatagatggaatgaaaatggagaaatctcctcttcgggaagaagccaagaaattctggcaccacttcatgttcagaaaaactccggcttctcagggggtcatcttgcccatcaaaagccatgaagtacattgggagacctgcaggacagtgcccttcagccagactataacccacgaaggctgtgaaaaagtagttgttcagaacaacctttgctttgggaaatgcgggtctgttcattttcctggagccgcgcagcactcccatacctcctgctctcactgtttgcctgccaagttcaccacgatgcacttgccactgaactgcactgaactttcctccgtgatcaaggtggtgatgctggtggaggagtgccagtgcaaggtgaagacggagcatgaagatggacacatcctacatgctggctcccaggattcctttatcccaggagtttcagcttgaagagctatcccactattacctttgaaaagcaaaaccacaacagcaaagatgctgattattcagtctgaaaatgttaagtgggtacataacattttcagggaaaggtgacttgaaacgtagttttaaattagaacgatagaggaaatgatattagtctagttattggtacacgtttgagaccttgtctcagctctgccactaactagccgtagaatgttaagttgtaaaacctttctccatctaaagattttcatctataaatgacggacccgacctagatgattgctaaaatcctttccactactaatattccgtgatgcattttctccaagtttgggtaaaagccctccatctaaagaaggaaaa

SEQ ID NO: 881 - DNA, 760 bp, Homo sapiens; identical to SEQ ID NO: 311

SEQ ID NO: 882 - DNA, 1708 bp, Homo sapiens
tataagggctggaggtgctgctttcaggcctggccagcccaccatgcacgcccactgcctgcccttccttctgcacgcctggtgggccctactccaggcgggtgctgcgacggtggccactgcgctcctgcgtacgcgggggcagccctcgtcgccatcccctctggcgtacatgctgagcctctaccgcgacccgctgccgagggcagacatcatccgcagcctacaggcagaagatgtggcagtggatgggcagaactggacgtttgcttttgacttctccttcctgagccaacaagaggatctggcatgggctgagctccggctgcagctgtccagccctgtggacctccccactgagggctcacttgccattgagattttccaccagccaaagcccgacacagagcaggcttcagacagctgcttagagcggtttcagatggacctattcactgtcactttgtcccaggtcaccttttccttgggcagcatggttttggaggtgaccaggcctctctccaagtggctgaagcaccctggggccctggagaagcagatgtccagggtagctggagagtgctggccgcggccccccacaccgcctgccaccaatgtgctccttatgctctactccaacctctcgcaggagcagaggcagctgggtgggtccaccttgctgtgggaagccgagagctcctggcgggcccaggagggacagctgtcctgggagtggggcaagaggcaccgtcgacatcacttgccagacagaagtcaactgtgtcggaaggtcaagttccaggtggacttcaacctgatcggatggggctcctggatcatctaccccaagcagtacaacgcctatcgctgtgagggcgagtgtcctaatcctgttggggaggagtttcatccgaccaaccatgcatacatccagagtctgctgaaacgttaccagccccaccgagtcccttccacttgttgtgccccagtgaagaccaagccgctgagcatgctgtatgtggataatggcagagtgctcctagatcaccataaagacatgatcgtggaagaatgtgggtgcctctgatgacatcctggagggagactggatttgcctgcactctggaaggctgggaaactcctggaagacatgataaccatctaatccagtaaggagaaacagagaggggcaaagttgctctgcccaccagaactgaagaggaggggctgcccactctgtaaatgaagggctcagtggagtctggccaagcacagaggctgctgtcaggaagagggaggaagaagcctgtgcagggggctggctggatgttctctttactgaaaagacagtggcaaggaaaagcacaagtgcatgagttctttactggattttttaaaaacctgtgaaccccccgaaactgtatgtgaaagttgagacatatgtgcatgtattttggaggtgggatgaagtcacctatagctttcatgtattctccaaagtagtctgtgtgtgacctgtccccctccccaaagattaaggatcactgtatagattaaaaagagtccgtcaatctcattgcctcaggctgggttgggggagccccacagctttctggctggccagtggcaatctactggccttgtccagaggctcactggagtggttctctgctaatgagctgtacaacaataaagccattgtctagtt

SEQ ID NO: 883 - DNA, 5080 bp, Homo sapiens; identical to SEQ ID NO: 393

SEQ ID NO: 884 - DNA, 294 bp, Homo sapiens; identical to SEQ ID NO: 427

SEQ ID NO: 885 - DNA, 9533 bp, Homo sapiens; identical to SEQ ID NO: 494

SEQ ID NO: 886 - DNA, 3436 bp, Homo sapiens
tcaatgcactgttcaaggatgtttgagagattttctgtcttgcctgaatacaaaacactgtagggaacctctttgtgcttgactttgcacacacacgggatcttcagggtgggtacatttaaaactgacaagtattgccaaattgccccccaacgtagtttttacaccccacctactactctcagtgaaaaatcaggccctttttattttaagggctaaattgctaatccctgtgtgaaaatgggtgttaacaaaataaaaaataaggaaaatatgcaggcttacccaattttgttatctatacattttacagtctctaatacttagcatagctcctttgggtgtctgcccaccacccttctttctgaacgtggggttccctgggctttccttgtttgacttcagacctggatctaatagggatctggaggtagaatcaagacgaatgttccctttggccttaggtgagtcctttgcatctctgaggccctgttgatgacatccagttctctagacctctgcccaaaccagagcaatccctcctcaaatatgctaagcagaaatgcagacaatataagacacactatatttatattttaggagtttacattaccttcccttctgtttggaaaccaacatctctcaaaattaggtatagttaacacagaataccccaaaataccaccattcttcataattccatttccttatttctggattctttcaagggtaaaaaccttgtttcattcatctttggggcagcatttgcctagtatgtggtaggcgcccagtagattttggataaactgacctgattttctgttaatattccaactggattatttctttctcctcttacagaatgaagatattcaaatgttattttaaacataccctacagcagaaagttttcatcctgtttttaaccctatggctgctctctttgttaaagcttctaaatgtgagacgactctttccgcaaaaagacatttacttggttgagtactccctaagtacctcgccttttgtaagaaacagatacactcatgttaaggatgaagtcaggtatgaagttaactgttcgggtatctatgaacaggagcctttggaaattggaaagagtctggaaataagaagaagggacatcattgacttggaggatgatgatgttgtggcaatgaccagtgattgtgacatttatcagactctaagaggttatgctcaaaagcttgtctcaaaggaggagaaaagcttcccaatagcctattctttggttgtccacaaagatgcaattatggttgaaaggcttatccatgctatatacaaccagcacaatatttactgcatccattatgatcgtaaggcacctgataccttcaaagttgccatgaacaatttagctaagtgcttctccaatattttcattgcttccaaattagaggctgtggaatatgcccacatttccagactccaggctgatttaaattgcttgtcggaccttctgaagtcttcaatccagtggaaatatgttatcaacttgtgtgggcaagattttcccctgaagtcaaattttgaattggtgtcagagttgaaaaaactcaatggagcaaatatgttggagacggtgaaacccccaaacagtaaattggaaagattcacttaccatcatgaacttagacgggtgccttatgaatatgtgaagctaccaataaggacaaacatctccaaggaagcacccccccataacattcagatatttgttggcagtgcttattttgttttaagtcaagcatttgttaaatatattttcaacaactccatcgttcaagacttttttgcctggtctaaagacacatactctcctgatgagcacttttgggctaccttgattcgggttccaggaatacctggggagatttccagatcagcccaggatgtgtctgatctgcagagtaagactcgccttgtcaagtggaattactatgaaggctttttctatcccagttgtactggatctcaccttcgaagcgtgtgtatttatggagctgcagaattaaggtggcttatcaaagatggacattggtttgctaataaatttgattctaaggtggaccctatcttgattaaatgcttggcagaaaagcttgaagaacagcagagagactggatcactttgccctcagaaaagttatttatggatagaaatctcactaccacatcatgatagtaaaatcaggatggaaataagagggtgcctgataaatggagtcagtgtggaattgaataccatactatgcccaatactgtttaaactcagtcctcccatattttaaaaggtgtccaaaattccatacacaagggaaagtgatctagcctttgatgttattagcctgcagttggctaggtttttttaatatttgtttttgcttgtaatctcactgagccaaatcagagatcttaaacattcagtcagtcatcaaacattattgagcacctaactatatgacaggcacttttttagagactgcggcttatcctcatcatagcaacctcggtatctttaagttctccacataacagtcaggattctactgaagaagcttttgaagtttgtggtaatcgtctgatcatataaaccacccatttcagagtagtgtttaagtactgtgaccaacactccacttgtctcttaactcagctttcaagacatttcttaaccatcagagcagaggaggaaagactcactacctcagaaaaatctcaaagaatagtccaatttcctgcttgccaaagcataatctgccttttggtgcattacttggtcaattcagggttgaggagactgttggggggcatttataatgtatgaaagttaaggaagggggtgaggatgtgggttgggacaggtagtacctaaagaggagcgaagggatttatacaacatttttatcatgttacaaaacagtatcatgaatggcctcctttttagttcaactgtttctttaaaatgcatttactgattaaaaataagaactgaccaatagctccaagtgtcacacaccagaacattaagcctaagtcctcaattcataagttatcattctagataagtttctttacaatggaatactttctgtggaatcattataattctgttgtatggaactatcaagctaagagtcactaaactttcttcaaaaggttgtgtgaaatatgacagctttctaaattaatttgtatagtcatttaaaattttttcttctctggcaactgtccaactggaatccagatttaaagtgataaaagctctaagtttcttgcagtctttttctcagcttagttccagagagaaaaaagctaattttcctaaggacacagcaagaatattcattaaggatattttctaaaacccacacttgagaaaaccacccaatga

SEQ ID NO: 887 - DNA, 1314 bp, Homo sapiens
cctggcccgggagggtataagtgcggcccgcgcccctccgagcggcgcgctgggttccggagcgatggccacagccgagtcccgtgcgctccagtttgccgagggcgccgcgtttccagcgtaccgggccccccacgccggcggggcgctcctgccgcccccgagccctgcggcagccctgctccctgcgccgcccgcgggccccggcccagcgacctttgcgggcttcctcggccgggaccccgggccggccccgccgccccccgccagcctgggctcgcctgcgccccccaaaggcgcggccgccccgtcggcgtcgcagcgccgcaagcgcacgtctttcagcgccgaacagctgcagctgctggagctcgtcttccgccggacccggtaccccgacatccacttgcgcgagcgcctggccgcgctcaccctgctccccgagtccaggatccaggtatggttccagaacaggcgtgccaagtctcggcgtcagagtgggaaatccttccaacctttggctaggccggagattatcctcaaccactgtgctcctggaactgaaacgaaatgtctgaagccccagctgcctcttgaggtagatgtgaactgcctgcccgaaccaaacggggttggagggggcatctctgactctagctcccaaggtcagaattttgaaacctgttcccctctctctgaagacattggttcaaagctggactcatgggaggaacacatcttttctgcctttggtaacttttgaggattctgggagaattcgggataagctctgaggagccatgactgacagcctgggagagacacatcagcatactgtcctttctgacttccatgctaaggacatgtccttgttaaccttgatgatggttttgacagcacctctcacatttgaaggtaccccgccactttgtcaatgacgttttaagcccacactcccaccccagagttcccgcattcgtttttacctgtgttctctccaagcctgcacattccattggtctgcatccctatgccttcttgccaggcctgtttttagtttttggactggttgttcagaactcattattttcttcacaagaatgcctcagcttgactcagtttccccttgtgtttgacagctgccattttctcctggtccctccaaggcttataatcttaaagtcactctaccccgtctcttcaaccctcatcctaggtttattactttttaaaattgggcctgtcatcttcacgttcaatcatagctccaatgactctgcatgcagattatttcgacagcccccttgcctctag

SEQ ID NO: 888 - DNA, 2704 bp, Homo sapiens; identical to SEQ ID NO: 431

SEQ ID NO: 889 - DNA, 2116 bp, Homo sapiens; identical to SEQ ID NO: 451

SEQ ID NO: 890 - DNA, 8150 bp, Homo sapiens; identical to SEQ ID NO: 397

SEQ ID NO: 891 - DNA, 3558 bp, Homo sapiens
atcgaagctaaagggctgacagaagggctgtagcggcaagtgtgcgccaacacagctgcacacgcccagacacctgaggcgctgagaggaacttccccgcgatccgccccggctgcacagagcctcttctccccgccggggccccgcccagcctcacttcttttaaaagcagcagccagcagcgcgccggtggcgtgcggctcgaaaggccgggaggacgtcatcgacgcgctgtcgagcctccagcccgcccgggtttccttcgcagtcgcgcaccgacgctcaaacgcgcgctccaacccgcagcctcctcctgcctcaccgcccgaagatggcggctctcaaactcctctcctccgggcttcggctctgcgcctctgcccgcggatctggggcaacctggtacaagggatgtgtttgttccttttccaccagtgctcatcgccataccaagttttatacagatccagtagaagctgtaaaagacatccctgatggtgccacggttttggttggtggttttgggctatgtggaattccagagaatcttatagatgctttactgaaaactggagtaaaaggactaactgcagtcagcaacaatgcaggggttgacaattttggtttggggcttttgcttcggtccaagcagataaaacgcatggtctcttcatatgtgggagaaaatgcagaatttgaacgacagtacttatctggtgaattagaagtggagctgacaccacagggcacacttgcagagaggatccgtgcaggcggggctggagttcctgcattttacaccccaacagggtatgggaccctggtacaagaaggaggatcgcccatcaaatacaacaaagatggcagtgttgccattgccagtaagccaagagaggtgagggagttcaatggtcagcactttattttggaggaagcaattacaggggattttgctttggtgaaagcctggaaggcggaccgagcaggaaacgtgattttcaggaaaagtgcaaggaatttcaacttgccaatgtgcaaagctgcagaaaccacagtggtagaggttgaagaaattgtggatattggagcatttgctccagaagacatccatattcctcagatttatgtacatcgccttataaagggagaaaaatatgagaaaagaattgagcgtttatcaatccggaaagagggagatggggaagccaaatctgctaaacctggagatgacgtaagggaacgaatcatcaagagggccgctcttgagtttgaggatggcatgtatgctaatttgggcataggaatccctctcctggccagcaattttatcagcccaaatataactgttcatcttcaaagtgaaaatggagttctgggtttgggtccatatccacgacaacatgaagctgatgcagatctcatcaatgcaggcaaggaaacagttactattcttccaggagcctcttttttctccagcgatgaatcatttgcaatgattagaggtggacacgtcgatctgacaatgctaggagcgatgcaggtttccaaatatggtgacctggctaactggatgatacctgggaagatggtgaaaggaatgggaggtgctatggatttagtgtccagtgcgaaaaccaaagtggtggtcaccatggagcattctgcaaagggaaatgcacataaaatcatggagaaatgtacattaccattgactggaaagcaatgtgtcaaccgcattattactgaaaaggctgtgtttgatgtggacaagaagaaagggttgactctgattgagctctgggaaggcctgacagtggatgacgtacagaagagtactgggtgtgattttgcagtttcaccaaaactcatgccaatgcagcagatcgcaaattgaaatatggatatttgtaccaggctgcgtgtttttcattttaaacacacaagatttaattgaaaggacatcaataatcataattgtgtatttaacaggtggttttttattagttttcttgtgtttcagactttatgcagccatataaactgttctctaggcatgctgtgacattttaataaaaagcaaaaggagcatttataattatctcatttgttaaggctgagaaggttgtttttataataggtaattatattgaatgcattttcactgaatatggtatgtatgctaaattatatgaacctttccccaagaagggccctagaaattgatgtggctttcctcttaaatattaattattagtcctgaaagaaagataacatatgtgatttttgtggttaggagagttgctgtcatgattgttttttcttcagcctcctctgacttttcttttggggcttcagattttatgattacatcttgtccccctagaacatcccccttcctcccatactgcttttaaacagatgcccaagaaggcaagcaggaatgcctcttgtgggggagggcagggagaaataactagttcaaaccaactatctatctatgctttgcaaagactaaggcgtattataggaagagggctagaaacctaactgattcttctcagttttctcattttaaaacagcccagtattcctttgtatcctcaagggtccttgagaatacttctgttattgagaccctgtgggctacttgtactgtacctcctctcaagccaagaagggctgtgggataatttaccatgaatccttagtagcaatgacagcagagttaaaaaataaaaggtgttttactttcaggctcttgttttggttcagaggagattttaaatattgaatgacacttctacagaacaacggtttttcttctgccaaggctacttcctttaacgaagtgcctttaattcagccttatccaactagggaaaataatgttggacaagtctaggatttgaagagtcagtgaacttttagtgtcagggaataaacatggtgggtagattaggtttgaaaaaaacttccttagaggtatttattctcaatacctgacaggggcccatgggaatgacttcagaagcatcccggataatagatgggtaaaaagtctaggcaccctgaagaacaggtgagacagctggcctctggacagaggtaggcatagtacagtacgatatatcattcctctggtcctaaatatacaaacttattcatgtttttaggtgatgatggtcattgaaactcacttcttttcaggtgtagctacaattgtgtaatgtacaatattagagaaaggacaggctttttatgagtaacacacaccatatataaaacagcctttctggctgaccacatggttaaatgcataccttcccagtactggggggaaaaaatgacccttcttagaatgtgcaagttccatgagagtaatatattgatatgattttgaaaagaattgttgatagttacatcttcaaacttatcattccagtatgcatctttaagataatgtgattctaagtagatgactttatattcttgattgaagagtgctatacatgttaagaaatgcattaaggaatacaataaatattctaaagtgatgta

SEQ ID NO: 892 - DNA, 3907 bp, Homo sapiens; identical to SEQ ID NO: 435

SEQ ID NO: 893 - DNA, 2284 bp, Homo sapiens; identical to SEQ ID NO: 402

SEQ ID NO: 894 - DNA, 1585 bp, Homo sapiens
cccccgtctagatttaaagcgcggctgcgcccggcttctgacgtccattgaatcgcgcgggcggccggcggcgagcgcggggctgcgccgggatcgctgcgccctccgccgctggcctctgcgacgcgcgccgctcgcccgagccacccgccgccgcgccggctccccgcgccgctgcgctcctcgccccgcgcctgcccccaggatggtccgcgcgaggcaccagccgggtgggctttgcctcctgctgctgctgctctgccagttcatggaggaccgcagtgcccaggctgggaactgctggctccgtcaagcgaagaacggccgctgccaggtcctgtacaagaccgaactgagcaaggaggagtgctgcagcaccggccggctgagcacctcgtggaccgaggaggacgtgaatgacaacacactcttcaagtggatgattttcaacgggggcgcccccaactgcatcccctgtaaagaaacgtgtgagaacgtggactgtggacctgggaaaaaatgccgaatgaacaagaagaacaaaccccgctgcgtctgcgccccggattgttccaacatcacctggaagggtccagtctgcgggctggatgggaaaacctaccgcaatgaatgtgcactcctaaaggcaagatgtaaagagcagccagaactggaagtccagtaccaaggcagatgtaaaaagacttgtcgggatgttttctgtccaggcagctccacatgtgtggtggaccagaccaataatgcctactgtgtgacctgtaatcggatttgcccagagcctgcttcctctgagcaatatctctgtgggaatgatggagtcacctactccagtgcctgccacctgagaaaggctacctgcctgctgggcagatctattggattagcctatgagggaaagtgtatcaaagcaaagtcctgtgaagatatccagtgcactggtgggaaaaaatgtttatgggatttcaaggttgggagaggccggtgttccctctgtgatgagctgtgccctgacagtaagtcggatgagcctgtctgtgccagtgacaatgccacttatgccagcgagtgtgccatgaaggaagctgcctgctcctcaggtgtgctactggaagtaaagcactccggatcttgcaactggaatctgcccgtaaaacctgagccattgattcttcagaactttctgcagtttttgacttcatagattatgctttaaaaaaatttttttaacttattgcataacagcagatgccaaaaacaaaaaaagcatctcactgcaagtcacataaaaatgcaacgctgtaatatggctgtatcagagggctttgaaaacatacactgagctgcttctgcgctgttgttgtccgtatttaaacaacagctcccctgtattcccccatctagccatttcggaagacaccgaggaagaggaggaagatgaagaccaggactacagctttcctatatcttctattctagagtggtaaactctctataagtgttcagtgttgacatagcctttgtgcaaaaaaaaaaaaaaaaaaaaagaaaaagaaaaaaagaaaaa

SEQ ID NO: 895 - DNA, 3298 bp, Homo sapiens
ctcttcggggactaactgcaacggagagactcaagatgattccctttttacccatgttttctctactattgctgcttattgttaaccctataaacgccaacaatcattatgacaagatcttggctcatagtcgtatcaggggtcgggaccaaggcccaaatgtctgtgcccttcaacagattttgggcaccaaaaagaaatacttcagcacttgtaagaactggtataaaaagtccatctgtggacagaaaacgactgtgttatatgaatgttgccctggttatatgagaatggaaggaatgaaaggctgcccagcagttttgcccattgaccatgtttatggcactctgggcatcgtgggagccaccacaacgcagcgctattctgacgcctcaaaactgagggaggagatcgagggaaagggatccttcacttactttgcaccgagtaatgaggcttgggacaacttggattctgatatccgtagaggtttggagagcaacgtgaatgttgaattactgaatgctttacatagtcacatgattaataagagaatgttgaccaaggacttaaaaaatggcatgattattccttcaatgtataacaatttggggcttttcattaaccattatcctaatggggttgtcactgttaattgtgctcgaatcatccatgggaaccagattgcaacaaatggtgttgtccatgtcattgaccgtgtgcttacacaaattggtacctcaattcaagacttcattgaagcagaagatgacctttcatcttttagagcagctgccatcacatcggacatattggaggcccttggaagagacggtcacttcacactctttgctcccaccaatgaggcttttgagaaacttccacgaggtgtcctagaaaggatcatgggagacaaagtggcttccgaagctcttatgaagtaccacatcttaaatactctccagtgttctgagtctattatgggaggagcagtctttgagacgctggaaggaaatacaattgagataggatgtgacggtgacagtataacagtaaatggaatcaaaatggtgaacaaaaaggatattgtgacaaataatggtgtgatccatttgattgatcaggtcctaattcctgattctgccaaacaagttattgagctggctggaaaacagcaaaccaccttcacggatcttgtggcccaattaggcttggcatctgctctgaggccagatggagaatacactttgctggcacctgtgaataatgcattttctgatgatactctcagcatggatcagcgcctccttaaattaattctgcagaatcacatattgaaagtaaaagttggccttaatgagctttacaacgggcaaatactggaaaccatcggaggcaaacagctcagagtcttcgtatatcgtacagctgtctgcattgaaaattcatgcatggagaaagggagtaagcaagggagaaacggtgcgattcacatattccgcgagatcatcaagccagcagagaaatccctccatgaaaagttaaaacaagataagcgctttagcaccttcctcagcctacttgaagctgcagacttgaaagagctcctgacacaacctggagactggacattatttgtgccaaccaatgatgcttttaagggaatgactagtgaagaaaaagaaattctgatacgggacaaaaatgctcttcaaaacatcattctttatcacctgacaccaggagttttcattggaaaaggatttgaacctggtgttactaacattttaaagaccacacaaggaagcaaaatctttctgaaagaagtaaatgatacacttctggtgaatgaattgaaatcaaaagaatctgacatcatgacaacaaatggtgtaattcatgttgtagataaactcctctatccagcagacacacctgttggaaatgatcaactgctggaaatacttaataaattaatcaaatacatccaaattaagtttgttcgtggtagcaccttcaaagaaatccccgtgactgtctatacaactaaaattataaccaaagttgtggaaccaaaaattaaagtgattgaaggcagtcttcagcctattatcaaaactgaaggacccacactaacaaaagtcaaaattgaaggtgaacctgaattcagactgattaaagaaggtgaaacaataactgaagtgatccatggagagccaattattaaaaaatacaccaaaatcattgatggagtgcctgtggaaataactgaaaaagagacacgagaagaacgaatcattacaggtcctgaaataaaatacactaggatttctactggaggtggagaaacagaagaaactctgaagaaattgttacaagaagaggtcaccaaggtcaccaaattcattgaaggtggtgatggtcatttatttgaagatgaagaaattaaaagactgcttcagggagagacacacccgtgaggaagttgcaagccaacaaaaaagttcaaggtgatctagaagacgattaagggaaggtcgttctcagtgaaaatccaaaaaccagaaaaaaatgtttatacaaccctaagtcaataacctgaccttagaaaattgtgagagccaagttgacttcaggaactgaaacatcagcacaaagaagcaatcatcaaataattctgaacacaaatttaatatttttttttctgaatgagaaacatgagggaaattgtggagttagcctcctgtggtaaaggaattgaagaaaatataacaccttacaccctttttcatcttgacattaaaagttctggctaactttggaatccattagagaaaaatccttgtcaccagattcattacaattcaaatcgaagagttgtgaactgttatcccattgaaaagaccgagccttgtatgtatgttatggatacataaaatgcacgcaagccattatctctccatgggaagctaagttataaaaataggtgcttggtgtacaaaactttttatatcaaaaggctttgcacatttctatatgagtgggtttactggtaaattatgttattttttacaactaattttgtactctcagaatgtttgtcatatgcttcttgcaatgcatattttttaatctcaaacgtttcaataaaaccatttttcagatataaagagaattacttcaaattgagtaattcagaaaaactcaagatttaagttaaaaagtggtttggacttgggaacaggactttatacctcttttactgtaacaagtactcattaaaggaaattgaatgaaa

SEQ ID NO: 896 - DNA, 2482 bp, Homo sapiens; identical to SEQ ID NO: 389

SEQ ID NO: 897 - DNA, 1308 bp, Homo sapiens; identical to SEQ ID NO: 496

SEQ ID NO: 898 - DNA, 6190 bp, Homo sapiens
cgcccttagccgatcggggcgctcagcccacacgcaccgctgctcggggcttggagatccgcgcaggctgggctcccggacccggcggaccgacgcgcggaggatcgggatccggcgctgtggggctggggtgggcgggggaggctgggcccggggcctctggcgcgacacccgcatgaggacgcgagtgaaatagaccaaggtggaatttccaagggaaaagcttcggggtggttttggtccatttctccagcgaagaagtagacatggcgagcgactccccggctcgaagcctggatgaaatagatctctcggctctgagggaccccgcagggatctttgaattggtggaacttgttggaaatggaacatacgggcaagtttataagggtcgtcatgtcaaaacgggccagcttgcagccatcaaggttatggatgtcacaggggatgaagaggaagaaatcaaacaagaaattaacatgttgaagaaatattctcatcaccggaatattgctacatactatggtgcttttatcaaaaagaacccaccaggcatggatgaccaactttggttggtgatggagttttgtggtgctggctctgtcaccgacctgatcaagaacacaaaaggtaacacgttgaaagaggagtggattgcatacatctgcagggaaatcttacgggggctgagtcacctgcaccagcataaagtgattcatcgagatattaaagggcaaaatgtcttgctgactgaaaatgcagaagttaaactagtggactttggagtcagtgctcagcttgatcgaacagtgggcaggaggaatactttcattggaactccctactggatggcaccagaagttattgcctgtgatgaaaacccagatgccacatatgatttcaagagtgacttgtggtctttgggtatcaccgccattgaaatggcagaaggtgctccccctctctgtgacatgcaccccatgagagctctcttcctcatcccccggaacccagcgcctcggctgaagtctaagaagtggtcaaaaaaattccagtcatttattgagagctgcttggtaaagaatcacagccagcgaccagcaacagaacaattgatgaagcatccatttatacgagaccaacctaatgagcgacaggtccgcattcaactcaaggaccatattgatagaacaaagaagaagcgaggagaaaaagatgagacagagtatgagtacagtggaagtgaggaagaagaggaggagaatgactcaggagagcccagctccatcctgaatctgccaggggagtcgacgctgcggagggactttctgaggctgcagctggccaacaaggagcgttctgaggccctacggaggcagcagctggagcagcagcagcgggagaatgaggagcacaagcggcagctgctggccgagcgtcagaagcgcatcgaggagcagaaagagcagaggcggcggctggaggagcaacaaaggcgagagaaggagctgcggaagcagcaggagagggagcagcgccggcactatgaggagcagatgcgccgggaggaggagaggaggcgtgcggagcatgaacaggaatacatcaggcgacagttagaggaggagcagagacagttagagatcttgcagcagcagctactgcatgaacaagctctacttctggaatataagcgcaaacaattggaagaacagagacaagcagaaagactgcagaggcagctaaagcaagaaagagactacttagtttcccttcagcatcagcggcaggagcagaggcctgtggagaagaagccactgtaccattacaaagaaggaatgagtcctagtgagaagccagcatgggccaaggaggtagaagaacggtcaaggctcaaccggcaaagttcccctgccatgcctcacaaggttgccaacaggatatctgaccccaacctgcccccaaggtcggagtccttcagcattagtggagttcagcctgctcgaacaccccccatgctcagaccagtcgatccccagatcccacatctggtagctgtaaaatcccagggacctgccttgaccgcctcccagtcagtgcacgagcagcccacaaagggcctctctgggtttcaggaggctctgaacgtgacctcccaccgcgtggagatgccacgccagaactcagatcccacctcggaaaatcctcctctccccactcgcattgaaaagtttgaccgaagctcttggttacgacaggaagaagacattccaccaaaggtgcctcaaagaacaacttctatatccccagcattagccagaaagaattctcctgggaatggtagtgctctgggacccagactaggatctcaacccatcagagcaagcaaccctgatctccggagaactgagcccatcttggagagccccttgcagaggaccagcagtggcagttcctccagctccagcacccctagctcccagcccagctcccaaggaggctcccagcctggatcacaagcaggatccagtgaacgcaccagagttcgagccaacagtaagtcagaaggatcacctgtgctcccccatgagcctgcgaaggtgaaaccagaagaatccagggacattacccggcccagtcgaccagctgtgagtgcttttctctccaagaagctacaaaaaagctatagatgagagtacagcagcaatcataagaggggaaaagccatcactgtggcttgggcaggagtcccagaatactggggcacaatttctaatcccacatattttcccattaactctgggggtgaccagcttcacctttccaaaacaaaatgagaacccaatgtttgtatatatgtgtacatacacatatgtacacatatatattcaggactgaacagtctcagtctagctattggttttgaaaaagtttaaattgatttcatctttcttttctagcttctacacgctacaaacatcattttcttagttccatgcagtaactatgtttgtcacagttctatatagagcttttttttttcttgttgcttaagctggagcactgacttgctgagagatgtagctttggtcgtatctaccactcatatgctgaacaaatttttctttcataggatctgacggcattagccaaagaactaagagaactccggattgaagaaacaaaccgcccaatgaagaaggtgactgattactcctcctccagtgaggagtcagaaagtagcgaggaagaggaggaagatggagagagcgagacccatgatgggacagtggctgtcagcgacatacccagactgataccaacaggagctccaggcagcaacgagcagtacaatgtgggaatggtggggacgcatgggctggagacctctcatgcggacagtttcagcggcagtatttcaagagaaggaaccttgatgattagagagacgtctggagagaagaagcgatctggccacagtgacagcaatggctttgctggccacatcaacctccctgacctggtgcagcagagccattctccagctggaaccccgactgagggactggggcgcgtctcaacccattcccaggagatggactctgggactgaatatggcatggggagcagcaccaaagcctccttcaccccctttgtggaccccagagtataccagacgtctcccactgatgaagatgaagaggatgaggaatcatcagccgcagagctctgtttactagcgaacttcttaggcaagaacaggccaaactcaatgaagcaagaaagatttcggtggtaaatgtaaacccaaccaacattcggcctcatagcgacacaccagaaatcagaaaatacaagaaacgattcaactcagaaatactttgtgcagctctgtggggtgtaaaccttctggtggggactgaaaatggcctgatgcttttggaccgaagtgggcaaggcaaagtctataatctgatcaaccggaggcgatttcagcagatggatgtgctagagggactgaatgtccttgtgacaatttcaggaaagaagaataagctacgagtttactatctttcatggttaagaaacagaatactacataatgacccagaagtagaaaagaaacaaggctggatcactgttggggacttggaaggctgtatacattataaagttgttaaatatgaaaggatcaaatttttggtgattgccttaaagaatgctgtggaaatatatgcttgggctcctaaaccgtatcataaattcatggcatttaagtcttttgcagatctccagcacaagcctctgctagttgatctcacggtagaagaaggtcaaagattaaaggttatttttggttcacacactggtttccatgtaattgatgttgattcaggaaactcttatgatatctacataccatctcatattcagggcaatatcactcctcatgctattgtcatcttgcctaaaacagatggaatggaaatgcttgtttgctatgaggatgagggggtgtatgtaaacacctatggccggataactaaggatgtggtgctccaatggggagaaatgcccacgtctgtggcctacattcattccaatcagataatgggctggggcgagaaagctattgagatccggtcagtggaaacaggacatttggatggagtatttatgcataagcgagctcaaaggttaaagtttctatgtgaaagaaatgataaggtattttttgcatccgtgcgatctggaggaagtagccaagtgtttttcatgaccctcaacagaaattccatgatgaactggtaacagaagagcacttggcacttatcttcatggcgttatttctaatttaaaagaacataactcatgtggacttatgccagtctagaggcagaatcagaaggcttggttgaacatatcgctttccctttttcctctccctccgcccctcccagtacagtccatctttcaatgttgcagcctggttgagaaggagagaaaaaggtggcaggaatttccaggagatccccaagaatgctgccttgtctgtggacaaagatggaccatgtgcccttcggaattagggatagaaacaaatattgtgtgctcttaacgattaagctgtgttatggtgggttttcaggtttttaccttttttctttacccctttactctgcaagaatggggaaagaatgcatactgcgaaaatgagtcttttaaattctgtctgcctactagttttaagtatatggtatgttgtaaaatttccaatgatgagagacagcacaataaatgtaccttatctccttaggctgaaggccataactacatagtggagtaatttaagaactctcttgccttcaccaacccaaaaggttgctttttgatagcaactggctaatgaatttttaaaaagagaagaaaaatactagttttcccctcttttgggaaatagattttaaatggctaaactactagccttaaaactactagtctaataaaatcaactaccacttttgtgaatctgacaggccacatttttatatggccctttacagaatggagtgtgttgaacaggatactaacgccattgagttgagctggcctagcgatggagggacactctaacacaactttccctcagctattatgcaacagatcagggaaaaagatgggatgacagatggggtcagacagaaagagcttctgggaaacaagcttacatagtcttttttaaaatgcacaaagcctcccagctaagaggtcacttggtttgggcttcattaggactgagactttgttgagttctttctgggacttggagagtggatgatattcaggctctgaacattcccagcgctctcccgagggtgccactttctcaagatgaaaactgtgactgaaaaaattaataataaatgtttctgagctgcctgtgttctccctgtgtgggtgagagaagggactagactcctaagcctgcctcagatacaagaggcatcattggctccaattttagagaacttgaaagcaaggctttggacaaaattttgagaccctaatcactttaccttcctccaaattacccaacatacggtaaacaacatttgtgcagaagtatgtatgtatttagttcaggttgacttgtgtccttataaactcttactcaaatgatttgaacttt

SEQ ID NO: 899 - DNA, 6008 bp, Homo sapiens
agaagtgtctgacaaaacaaagaaacaaaacctcagtgaaaaatgtgcgcaagaaacatttcacaggatattctcatcttacagatgcacagtgctcattggcatatcaatgagtgttgtgataagagcagatgaaagccttatgccacagtagtgcctgtagcagagaaaggattccctcctccacctcagggcccactgctgctgctctccagcctgcagtttcctctaaggctctggattggctggaagagcaacagagggctgggaaagagcttctatatatacctcaggaggaaaggcatcccagacagttttgaagttttcaaagactggctctgctgttaagaagttgtacttaaagcggaggagctaagccacctgccaaaatgtgcaaaggacttgcagctttgccccactcatgcctggaaagggcaaatatgaggaaaagagtaacctgatgttctgggccaaggagattaagatcaagttgggaattctcctccagaagccagactcagttggtgaccttgtcattccgtacaatgagaagccagagaaaccagccaagacccagaaaacctcgctggacgaggccctgcagtggcgtgattccctggacaaactcctgcagaacaactatggacttgccagtttcaaaagtttcctgaagtctgaattcagtgaggaaaaccttgagttctggattgcctgtgaggattacaagaagatcaagtcccctgccaagatggctgagaaggcaaagcaaatttatgaagaattcattcaaacggaggctcctaaagaggtgaatattgaccacttcactaaggacatcacaatgaagaacctggtggaaccttccctgagcagctttgacatggcccagaaaagaatccatgccctgatggaaaaggattctctgcctcgctttgtgcgctctgagttttatcaggagttaatcaagtagtaatttagccaggctatgaaatcatcctgtgagttatttcctccataataaccctgcatttcccattaatctacatatcttcccacagcagctttgctcagtgatacccacatgggaaaaatcccaggggatgttgcttactctttttgcccacactgctttggatacttatctactgtccgaaggccttctttccccactcaattcttcctgccctgttattaattaagatatcttcagcttgtagtcagacacaatcagaatcacagaaaaatcctgcctaaggcaaagaaatataagacaagactatgatatcaatgaatgtgggttaagtaatagatttccagctaaattggtctaaaaaagaatattaagtgtggacagacctatttcaaaggagcttaattgatctcacttgttttagttctgatccagggagatcacccctctaattatttctgaacttggttaataaaagtttataagatttttatgaagcagccactgtatgatattttaagcaaatatgttatttaaaatattgatccttcccttggaccaccttcatgttagttgggtattataaataagagatacaaccatgaatatattatgtttatacaaaatcaatctgaacacaattcataaagatttctcttttataccttcctcactggccccctccacctgcccatagtcaccaaattctgttttaaatcaatgacctaagatcaacaatgaagtattttataaatgtatttatgctgctagactgtgggtcaaatgtttccattttcaaattatttagaattcttatgagtttaaaatttgtaaatttctaaatccaatcatgtaaaatgaaactgttgctccattggagtagtctcccacctaaatatcaagatggctatatgctaaaaagagaaaatatggtcaagtctaaaatggctaattgtcctatgatgctattatcatagactaatgacatttatcttcaaaacaccaaattgtctttagaaaaattaatgtgattacaggtagaggccttctaggtgagacacttttaaggtacactgcattttgcaaaaaaaaaaaaaaaaagtaatcttttagcaaccccagtattccttcactatttcgcttcctgcattagcaaattttacttacagtcaaaagtgcagatttatactcctgacgtgtctcattcacagctaaataataggccataggacttttggtaggtttaaacttttaattctgtatttcatgattataagtcttgctagaattttttctaatctttagtagatttgattaaataatgattcacagaatttagtaacagaatcaaactaagccatgtatgagggtaatcgagatgaggatattaactcaaaagaaatagggtgatttttaaaggattaataaaattctgaaatgttaagtagaagattacattgtctagtcttgtatttcctccttctgttgctctctttcattcacacactctcagtttctcatatttgtagctcatttatttggttatttcctaagaatattgaaagtgaagcaactatgtgactgtattcttcaggtaaacactgactgcgcttgttggattttccctatttttgtgacttcaagaataatatgccctgctgaatacatgccatttcacattctgaaactgggtagagtggttgggtgttctgccaacaattgctagtggtgtgaattcattcatatttgccagtattgctcacttcaaagaaactccttcatcaagcagtccagagctaggccagatcaatgctacaatcatgaagttctcattgcatgcaattgtgtaggattgacaaggaactcagataaaaatttccagggtgcacttccagaaccagcttcaacatatgtctacattgcccccaagttaataaagtgccaaccctttactctctcatacagccagaaatgttagaaatccaaaatcttggtgcattattttttcataaacgctaaaacatttgaagaaacaatttaattatttaaaattcaagtattttattcacattatttgcaatatccaaatgtttaaaaattcccagataattaactagctattacagatctcacctagagggttgatgttatgaagactccagtggactgtactcacaaattgactggacaccctatgaaagtgggtagacctctcagcggaaaataagaagggcttttacctacagggcaggacagggtcccatgagagcagttctgtggagatataaaaagaatggaagaaggaatgccttatagtgatattgtgacattatatctatatatctacatatatctatctatctatatctacatctatataatcttacatttaaaattgtattcctacacatattagaaactcttctaataaatgaagtaaaaaaattaaaaagaatacaaatattccagccccaaatgagaaatcaaacatattaaaattgttcaagaaaatttctttgaacacttctgaaagtttttggaaacttagaaaagagggaaaaaaatccagtgttactagtaatttccatggtaatacagataaaatacattcttttaattctgggaaattagaaaaagtggggtgatctttccaggaaaaacatgtgtaacatctgcttatcactccagctccctcctcctcctcctctccacgttcccttgagtaaatgtctgggaaagcatgaagcttgatgcaagaaccctgttgtactggcgttttcctcccctgtgaaaacgtaactactgttgggagtgaattgaggatgtagaaaggtggtggaaccaaattgtggtcaatggaaataggagaatatggttctcactcttgagaaaaaaacctaagattagcccaggtagttgcctgtaacttcagtttttctgcctgggtttgatatagtttagggttggggttagattaagatctaaattacatcaggacaaagagacagactattaactccacagttaattaaggacgtatgttccatgtttatttgttaaagcagtgtgaatagccttcaagcatgtgaataatcttccatcttccccgccacacatacacacacacactttttgtttctttcaggtagacaccttttaaaatgcagaactaactgaggcatttcagtaactttgctttcaaatcaataaagtcaaatgtatggaaacattttgtgccctactctccataccccgtgtactcaaattctctactgtatgaattatgctttaagtagaattcagtgccaaggagaacttggtgaaataaattattttaattttttttttatcctttacaaagccatggattttatttggttgatgtgtgctctgtacacaagccatttcaataggatggagctgttaattattttccaaagagtaatagacatgcaaaagtttcaataaaaactgggccattaacaaataaattaataaactaataagcattcccttctaggtttttgccaaactgcctatccaataacaaatttgagaatcgttgtaaaagctagttatatttcagagaaatgattttcattattgaaactgttctccctagcaggccattttccctttttcctgggagtttagcaagtttaggagagaatagtcatgaaaagaaagggaagaaaggggagaagggaagaggttaaaaagtaagtgctcagacctatgaacgtaatccctttgctacaaatatttaagagcagctcagcttggttgaaactgagttttgtcatcttccatatttgcaggaaggtattttctgacttgcaatgcagctagatgtaaaattttattttatcatcctagaaagccttgactagaaaaatgaataaatattgagggtttcctgtccatatctggcttgcatgtgccagaaagcagagaatagaaaatgtaatctccaacatccaagcatcgaaacccaaggggtaggcaattctatgtaggttttggacatgaagtttggtgcatcttggtttatgctggctcaactgctattaaacctctctggcttatagtctcttcattctattagacaagcacgtatcgaacacttgcttcgcacaaggctctttagttaacaatttagcagctactgtttgtgttaaacacacttttcaccaaataggttctgaggcaaacgagagcaatgactatttaaagaaaggctttcccagcatcacttacacatcccaaaactaaaaagatcaactcttccaactgagaaaagactcctggctttgaatggaaacttacagcagagagtcacaggccacggcaacaacaacgacaacaacaaacatttggaatattattctcaactcacgttttaataatacatcttattatttttctagtagagaaactacaaatcagcctcttcaacatttatatacagtttaataagcctcttgcaagttacttgttctctcacctgaggtatttttttcctccccaccttgcccctgttcctcccttcctcttctccctttgcaagaggaaatatttaacatatttgggtccaacttcaataatgtaataattaatacattaaaagcatttaacttcctttctagaaaaatgcacaggctaaggcatagacaaaacaaagagaaatgctgagaaatttgccactggagacaagcaatctgaataaatatttgccaaaagttctttttatgtcatatagtgtcaggatttgaaggagctatttttttttaatgttgcaactagcaactcatcttcggaagacacagccaggagaatgaagtagaagtgaaaggtttataaatccatttgtaagcatttatcccatatattttaaattcaagaaaaattgtgtttatctttagaattttgtattcaatactttatgtactatgtgactcatgcttctggataaataaagcaccaaatatgtatctgtaaccacaatcacacatattatattaaatatatatctatataa

SEQ ID NO: 900 - DNA, 297 bp, Homo sapiens
atcatggaaatcaggacagtggcagttcggattgtggcaatcaaaggggtggaaagtgaattctatcttgcaatgaacgaggaaggaaaactctatgcaaagaaagaatgcaatgaagattgtaacttcaaagaactaattctggaaaaccattacaacacatatgcagcagctaaatggacacacaatggaggggaaatgtttgttgccttaaatcaaaaggggattcctgtaagaggaaaaaaaacgaagaaagaacaaaaaacagcccactttcttcctatggcaataacttaa

SEQ ID NO: 901 - DNA, 5497 bp, Homo sapiens
agttggaaagagaccacagactttgagggaagctcactcaggatctgctctccggcaaagtagtaagtgaggtgctgagagcagaatgagctactttgtggattctgctgggagcagccccgtcccttactcagcgcctcgtcctgcagtggtgaggcaaggacctagcaacacttatgaagatcctcgaatgaactgtggtttccagtccaattatcaccagcaaagaccttgctaccccttttgggatgagatggcaactcaggaagttcctactggtcttgaacactgtgtctcagcgggcgagggccgggcaggaggagcgggcgcggcgcgggcgaggctgggacccgagcgcgctcacttcgccgcaaagtgccaacttcccctggagtgccgggcgcgcaccgtccgggcgcgggggaaagaaaggcagcgggaatttgagatttttgggaagaaagtcggatttcccccgtccccttccccctgttactaatcctcattaaaaagaaaaacaacagtaactgcaaacttgctaccatcccgtacgtcccccactcctggcaccatgaaggcggccgtcgatctcaagccgactctcaccatcatcaagacggaaaaagtcgatctggagcttttcccctccccggatatggaatgtgcagatgtcccactattaactccaagcagcaaagaaatgatgtctcaagcattaaaagctactttcagtggtttcactaaagaacagcaacgactggggatcccaaaagacccccggcagtggacagaaacccatgttcgggactgggtgatgtgggctgtgaatgaattcagcctgaaaggtgtagacttccagaagttctgtatgaatggagcagccctctgcgccctgggtaaagactgctttctcgagctggccccagactttgttggggacatcttatgggaacatctagagatcctgcagaaagaggatgtgaaaccatatcaagttaatggagtcaacccagcctatccagaatcccgctatacctcggattacttcattagctatggtattgagcatgcccagtgtgttccaccatcggagttctcagagcccagcttcatcacagagtcctatcagacgctccatcccatcagctcggaagagctcctctccctcaagtatgagaatgactacccctcggtcattctccgagaccctctccagacagacaccttgcagaatgactactttgctatcaaacaagaagtcgtcaccccagacaacatgtgcatggggaggaccagtcgtggtaggtaaactcgggggccaggactcttttgaaagcatagagagctacgatagttgtgatcgcctcacccagtcctggagcagccagtcatctttcaacagcctgcagcgtgttccctcctatgacagcttcgactcagaggactatccggctgccctgcccaaccacaagcccaagggcaccttcaaggactatgtgcgggaccgtgctgacctcaataaggacaagcctgtcattcctgctgctgccctagctggctacacaggcagtggaccaatccagctatggcagtttcttctggaattactcactgataaatcctgtcagtcttttatcagctggacaggagatggctgggaattcaaactttctgacccagatgaggtggccaggagatggggaaagaggaaaaacaaacctaagatgaattatgagaaactgagccgtggcctacgctactattacgacaaaaacatcatccacaagacagcggggaaacgctacgtgtaccgctttgtgtgtgacctgcagagcctgctggggtacacccctgaggagctgcacgccatgctggacgtcaagccagatgccgacgagtgatggcactgaaggggctggggaaaccctgctgagaccttccaaggacagccgtgttggttggactctgaattttgaattgttattctattttttattttccagaactcattttttaccttcaggggtgggagctaagtcagttgcagctgtaatcaattgtgcgcagttgggaaaggaaagccaggacttgtggggtgggtgggaccagaaattcttgagcaaattttcaggagagggagaagggccttctcagaagcttgaaggctctggcttaacagagaaagagactaatgtgtccaatcatttttaaaaatcatccatgaaaaagtgtcttgagttgtggacccattagcaagtgacattgtcacatcagaactcatgaaactgatgtaaggcaattaatttgcttctgtttttaggtctgggagggcaaaaaagaggtgggtgggatgaaacatgttttggggggggatgcactgaaaatctgagaactatttacctatcactctagttttgaagcaaagatggacttcagtggggaggggccaaaaccgttgttgtgttaaaatttattttattaaattttgtgccagtattttttttcttaaaaatcgtcttaagctctaaggtggtctcagtattgcaatatcatgtaagtttgtttttatttgccggctgaggattctgtcacaatgaaagaaaactgtttatatagaccccattggaaaagcaaaacgctctcactgagatcagggatcccaaattcatgggacttatataagaaggacaattaatgctgatttgggtacaggggaattatgtgtgtgaatgtcatctacaattaaaaaaaattagcacatccctttacttacttgttatcagtggattctcggggtttggacttaatgttgagctaagaagcattaagtctttgaactgaatgtattttgcatccctggttttggacgacagtaaacgtaggagcactgttgaagtcctggaagggagatcgaaggaggaagattgacttggttctttcttagtcctatatctgtagcatagatgacttggaataaaagctgtatgcatgggcattacccctcaggtcctaagaaataagtcctgaatgcatgtcgttccaaactaacactctgtaatttttcttttatgtcttattttccaagagtcctccattttttgcaccccctcaccgccaactctgttattcagtagagagaagtgtacggctttctgattggtgagtgaaaaagtaacttgagacacgacctaagttgaagagtttagacttgctgagttttagaagtgatggaaattaagagagcatttcaataaaatgtgacttggctgtctttggaagagaagtgcaaggctttcctttgaagaatttaaattagtccggtaggatgtcaggtgagactgtgtatgcaaaatgaatggcacaggtgatgccagggcctcttgcttgggtctgatgtcttggcacagggtaagtgaaggttaattccagaagagaggaatgacttgaaggcaaaggaaactaaggaaggaggttcagtgaggaaaataaggttgtccatgagatttgaatagatttttagttcccccaaggtttaaatacaaacatagtcaagcaaggtagtcatctttctgctggttgtgagggggaatctgaaaatggagttttagaggaaaagtcaacatctaactagtgaggaaaagtgcctaatacaattagaatctccctcactctatagttgcccagttgaaaggataaggaggaggggtggcttttatggacttccatgagagaaggaaagaaatatttcaggtaagcttctcagggctggccctttttgggatttggatgagaaattggaagtactaactactttctagcatatctttaagaaaattgattgttatttactcccagatcctcttgcagacccagaattatcaggaacatagctctgtgattcatgagtgtccccatactgatgaattggagcatccatatggaaagcaaaggcagaattatcccagctgtattattttgatcttttggatgcaggtgccttaatgaagctctcaaaatattttaggagctgctcagggagtgttgggtggaactgtttggactacattgttttctcttagattatgtgatttttgttgggcactggcaaaaggtgtgtgtgtgaatgtgtgcatgtgtgtgaatgttgtgtgtgtgtgtgtgtgtgtgtgtgtgtgtgtgtgtgtgtgtgtttgcagacatgcaaaactgcagctgaaataataccttagatttctaggtaagtctttccacatttcaataatgggtaagagtagaaccagggccgggtatcaattattgcttgctgtttgcaaccaggcataaaatcactttctcaaatcatccaccgttcctattaaatttatgccggaaactctccttctgtgagtataactcctgcagttcctatagcagataagatataagaaagtgcctcctagtgctcctccgcccgcttgtttgctaaaattccctttctctctaagtccaccattttcaagatttgtagatagtgtattagttaagacagctttgtcgatctggccagatgttttttctcctttgtccaaaggccagagaccatcccaggaagagtggtgggtggtttatacactggaaatgttgcgtttatgctttttaaaaacacacgttaacttcagaggaaggatgggcaaatctggtctagctgggtgaaacccttattttcccagagatgccttaacctttgttggttttggctttagggttcagagtcacttttgttcccttctccattctggagagggacttcccctacatagagccctgatttttgtggctgtggggattggaggtagcattcaaagatcagatgtgcttttcctcactttggagatgaacactctgggttttacagcattaacctgcctaaccttcatggtgagaaatacaccatctctcttctagtcatgctgtgcatgccgcttactctgttggggtctatataaatttgttgaactcttacctacattccaaagaagtttcaaggaaccataaatatatgtatacatatacatatataaaatatatatattaaaataaaattatcaggaatactgcctcagttattgaacttttttttttaagaatactttttttttaagctgagaagtatagggatgaaaaagatgttatattgtgtttgactattttccaacttgtattttcatataatttatattttttaaaagctgaaaatttagaagcaagatgaaaaaaaggaaaagcaggtgctttttaaaaatcagaactgaggtagcttagagatgtagcgatgtaagtgtcgatgtttttttaaaaaaaaatgcaaaaaaattcttatggcggagttttttgtttgtttattttagtagctgatgctggcacatcattttgctggagagttttttatatactgtagcctgatttcatattgtattttaaactgtgtgaaattaaaaacaaagaatttcattcataa

SEQ ID NO: 902 - DNA, 6971 bp, Homo sapiens; identical to SEQ ID NO: 470

SEQ ID NO: 903 - DNA, 1759 bp, Homo sapiens
ccggagcggacctttggcttggcttgtcagggcttgtccaggagttccgctcctctctccaaccggggtccccctccagcgaccctaaagcttcccagacttccgcttcaattcctgtccgcaccccacgcccacctcaacgtggagcgcagtggtctccgaggagcgccggagctgccccgcctgcccagcggggtcagcacttcgcatcaaggcccaagaaaagcaagtcctccagcgttctgagcacccgggcctgagggaaggtcctaacagcccccgggagccagtctccaacgcctcccgcagcagcccgccgctcccaggtgcccgcgtgcgccgctgccgccgcaatcccgcacgcgtcccgcgcccgccccactttgcctatccccgggactaagacggggaacaccacccagtgtggagcagcccagccaagcactgtcagggaatcctgtgaagcagctccagctatgtgtgaagaagaggacagcactgccttggtgtgtgacaatggctctgggctctgtaaggccggctttgctggggacgatgctcccagggctgttttcccatccattgtgggacgtcccagacatcagggggtgatggtgggaatgggacaaaaagacagctacgtgggtgacgaagcacagagcaaaagaggaatcctgaccctgaagtacccgatagaacatggcatcatcaccaactgggacgacatggaaaagatctggcaccactctttctacaatgagcttcgtgttgcccctgaagagcatcccaccctgctcacggaggcacccctgaaccccaaggccaaccgggagaaaatgactcaaattatgtttgagactttcaatgtcccagccatgtatgtggctatccaggcggtgctgtctctctatgcctctggacgcacaactggcatcgtgctggactctggagatggtgtcacccacaatgtccccatctatgagggctatgccttgccccatgccatcatgcgtctggatctggctggccgagatctcactgactacctcatgaagatcctgactgagcgtggctattccttcgttactactgctgagcgtgagattgtccgggacatcaaggagaaactgtgttatgtagctctggactttgaaaatgagatggccactgccgcatcctcatcctcccttgagaagagttacgagttgcctgatgggcaagtgatcaccatcggaaatgaacgtttccgctgcccagagaccctgttccagccatccttcatcgggatggagtctgctggcatccatgaaaccacctacaacagcatcatgaagtgtgatattgacatcaggaaggacctctatgctaacaatgtcctatcagggggcaccactatgtaccctggcattgccgaccgaatgcagaaggagatcacggccctagcacccagcaccatgaagatcaagatcattgcccctccggagcgcaaatactctgtctggatcggtggctccatcctggcctctctgtccaccttccagcagatgtggatcagcaaacaggaatacgatgaagccgggccttccattgtccaccgcaaatgcttctaaaacactttcctgctcctctctgtctctagcacacaactgtgaatgtcctgtggaattatgccttcagttcttttccaaatcattcctagccaaagctctgactcgttacctatgtgttttttaataaatctgaaataggctactggtaa

SEQ ID NO: 904 - DNA, 5659 bp, Homo sapiens
aagcaccactgcagcagaccttgttaattttttttttttttctttccacacaacagttgtgcctcattatccggtgcctggctcggaatttttttttttttttttctttttggagggtttgaagtttctgtgcttcagtgactgttacagaagaagaggtgttagtgttgccatgaggtcttgattgtctgcatttatgaatgaaactgacctaaatcacctgttacctccagtttccagattgtttgaacttctctggccgcacaatacaggaaggaagactaaagcagcaaagggacctacagcgtctgcagcatgggctggttaactaggattgtctgtcttttctggggagtattacttacagcaagagcaaactatcagaatgggaagaacaatgtgccaaggctgaaattatcctacaaagaaatgttggaatccaacaatgtgatcactttcaatggcttggccaacagctccagttatcataccttccttttggatgaggaacggagtaggctgtatgttggagcaaaggatcacatattttcattcgacctggttaatatcaaggattttcaaaagattgtgtggccagtatcttacaccagaagagatgaatgcaagtgggctggaaaagacatcctgaaagaatgtgctaatttcatcaaggtacttaaggcatataatcagactcacttgtacgcctgtggaacgggggcttttcatccaatttgcacctacattgaaattggacatcatcctgaggacaatatttttaagctggagaactcacattttgaaaacggccgtgggaagagtccatatgaccctaagctgctgacagcatcccttttaatagatggagaattatactctggaactgcagctgattttatggggcgagactttgctatcttccgaactcttgggcaccaccacccaatcaggacagagcagcatgattccaggtggctcaatgatccaaagttcattagtgcccacctcatctcagagagtgacaatcctgaagatgacaaagtatactttttcttccgtgaaaatgcaatagatggagaacactctggaaaagctactcacgctagaataggtcagatatgcaagaatgactttggagggcacagaagtctggtgaataaatggacaacattcctcaaagctcgtctgatttgctcagtgccaggtccaaatggcattgacactcattttgatgaactgcaggatgtattcctaatgaactttaaagatcctaaaaatccagttgtatatggagtgtttacgacttccagtaacattttcaagggatcagccgtgtgtatgtatagcatgagtgatgtgagaagggtgttccttggtccatatgcccacagggatggacccaactatcaatgggtgccttatcaaggaagagtcccctatccacggccaggaacttgtcccagcaaaacatttggtggttttgactctacaaaggaccttcctgatgatgttataacctttgcaagaagtcatccagccatgtacaatccagtgtttcctatgaacaatcgcccaatagtgatcaaaacggatgtaaattatcaatttacacaaattgtcgtagaccgagtggatgcagaagatggacagtatgatgttatgtttatcggaacagatgttgggaccgttcttaaagtagtttcaattcctaaggagacttggtatgatttagaagaggttctgctggaagaaatgacagtttttcgggaaccgactgctatttcagcaatggagctttccactaagcagcaacaactatatattggttcaacggctggggttgcccagctccctttacaccggtgtgatatttacgggaaagcgtgtgctgagtgttgcctcgcccgagacccttactgtgcttgggatggttctgcatgttctcgctattttcccactgcaaagagacgcacaagacgacaagatataagaaatggagacccactgactcactgttcagacttacaccatgataatcaccatggccacagccctgaagagagaatcatctatggtgtagagaatagtagcacatttttggaatgcagtccgaagtcgcagagagcgctggtctattggcaattccagaggcgaaatgaagagcgaaaagaagagatcagagtggatgatcatatcatcaggacagatcaaggccttctgctacgtagtctacaacagaaggattcaggcaattacctctgccatgcggtggaacatgggttcatacaaactcttcttaaggtaaccctggaagtcattgacacagagcatttggaagaacttcttcataaagatgatgatggagatggctctaagaccaaagaaatgtccaatagcatgacacctagccagaaggtctggtacagagacttcatgcagctcatcaaccaccccaatctcaacacaatggatgagttctgtgaacaagtttggaaaagggaccgaaaacaacgtcggcaaaggccaggacataccccagggaacagtaacaaatggaagcacttacaagaaaataagaaaggtagaaacaggaggacccacgaatttgagagggcacccaggagtgtctgagctgcattacctctagaaacctcaaacaagtagaaacttgcctagacaataactggaaaaacaaatgcaatatacatgaacttttttcatggcattatgtggatgtttacaatggtgggaaattcagctgagttccaccaattataaattaaatccatgagtaactttcctaataggctttttttcctaataccaccacctaacagagaacacaggtgaatgcagatgttcactttagcagacttaatgtttcctatgagatttcactgtacaggtttgtctttcttctttgcctgagaaataaaaatgtcatttgccatattgccatctaaaggagaaaaactgcatcagcaaagccattgtattgaactaaaagtttaaaatgaactgcatggatttactaagctgatgaatattccaaaacgtggttggattcaaggatatattttgtctaccggccctcatgtttgtatgtacttgaggagtaaaatgagtaaaatgatactgaatgaaatgttctgtggaaatattaaaaaaaaaaaaaaacataagccatccatcatccagaagaaaaatggaatacactgatctactactgatgtcttctttcagctttgatctaaagatgtattttattaaaactataatttaaatgtaccatgaaaaatatgcagtaaaaattagttgttttctaagctagagtaggatttgtcttacaattattgtgctatgtagtttttgttttaaaaattccaatggtgtgctgctttctttggacattttattttcaattctataagagggatagatgacattgttctagaaacacatatacatcattaagagtgaatctctaaaaccaggatataaattatgctttatttctctgagaaaatcaaacaaatggaagctgttcacacctccccttctttaagcattatctaaattaatttttacttgcataatgttcttagaaaaaaaaacagaacatttaagcaggaaaaaaggaagaaacaagttgatttttaagtgcattttactataatgaatcaatgaagggaaaaggaactgcatatttcatgaaaataataagcattgtcttaatatactgttaatagaaaatgtgtcttaattccgtgcttgaatccctgcatgatatttgagactaagatctctcttatgattctaccaagaattatatctgtgtcacttaatttttttaaaagagagagatcaataactattcagagcaacatgttaaaggcaaagtttccaatcatttacatctgtatcaggtgcctcttacctttccttatttaagacaattatttgtacaagaaacacatgactcttttcatatcaatgggagggacttttctacaaagtattttccaggatgcaacccacatttaaacaatgtaaaattctttgtttcctgcaacaacttacaaaataaggtaaaagactaaaattcaagatttgcttccttcattgtcctaagacgattcgttgagaatcactgactttgagatatttaaaactttcagcattatactgtggtttcttttgcactgcactcacctattcaggactcctcccccaggttcctcatcatgcacaaaaatgcaaagaaaacatcttattagtaattaatgaagcaacattgaaattctaactctagctgtctttggattctaattaactcagcatcaatttctcacctcagactacagtgaatttttatttcctatcagctgaaatatttcacagatggaagctcatgtttcagttttaatgactgccttgaataaacaagttgttgccacttgtttcaaacaaaagcctaaaaataatctacattcaattttaggctccattgactaatatggtgttgcttttggaagtactgtatatcctcacatggaagccaaattgttaaattatttgaaggacacaccactgtacagaaagtagtgtttcaaatataaatcgaagaacaaagagtgctccaaaaaataggtcattcttttattttcataaagtatctaaactgtactaacattcagtgttgtgtttcattctaaatttgcagctgaaataaatttatttgcgatagcagaaatatcttattattcatcctcagaaataaaggatttgaagggatagagattatatgataaatttatagaagactttcagaatttgaatgcattttgtttagtgttatgaaatgacaatagaaaaaagtctcgacttcaattaaaagttacacaaacaaacaaatctacaggcatgtctttatataccatcaggtctaagttttcaaagaaaattgtagatataacttgcagataactcattacagtcataatctctgcccatgtgtattgagagggggcagtttgcacgaaaaagaattattggcccatttaataattcagctttaaatagactttgtcatatgcatgaatcatcagagatgaaactgtttgagagactcatgtgaccttacgaaaattacaacagcagtcttaaagtatgaaaaagatgcatcacagcagagacattatggcccagttgatatcaaatgtaaaatgtaaatgcatgtaaatgcacacttcattttatgtattatttagtaatttgcagtggtatgtgtttaatatttttgctacctacacattaggcaaaaaaaagatgtaaataatttgggagaaaaagaggaagaacagtgtaaaataaaactttctataagtactccatttcaatgtgttcaacatcatcctaaaaggcaagattttcccacgcaggtgacaaggtggtttatgtactatttaagggcggaaggtgcgtgcccgttcaataagcatgttttttgccaggtaggaaatatgttccatatctttacttatcattgcatttcagatgggaactagaaaaactggagagaaaaatgtaatgaaactgctgctgtaaattattccttttagcatgtattcacttgctaaatacacatttcttcaaaata

SEQ ID NO: 905 - DNA, 3760 bp, Homo sapiens; identical to SEQ ID NO: 413

SEQ ID NO: 906 - DNA, 2550 bp, Homo sapiens; identical to SEQ ID NO: 386

SEQ ID NO: 907 - DNA, 11887 bp, Homo sapiens; identical to SEQ ID NO: 422

SEQ ID NO: 908 - DNA, 5508 bp, Homo sapiens
ccgcctcgcgccgagactagaagcgctgcgggaagcagggacagtggagagggcgctgcgctcgggctacccaatgcgtggactatctgccgccgctgttcgtgcaatatgctggagctccagaacagctaaacggagtcgccacaccactgtttgtgctggatcgcagcgctgcctttccttatgaagaagacacaaacttggattctcacttgcatttatcttcagctgctcctatttaatcctctcgtcaaaactgaagggatctgcaggaatcgtgtgactaataatgtaaaagacgtcactaaattgttaagtgtaaagaataagggagttaacgccaaaaataaatgaacaaaaatgccgtcatgtctggcagctcaggtggcaaatcttccaaaagactacatgataaccctcaaatatgtccccgggatggatgttttgccaagtcattgttggataagcgagatggtagtacaattgtcagacagcttgactgatcttctggacaagttttcaaatatttctgaaggcttgagtaattattccatcatagacaaacttgtgaatatagtggatgaccttgtggagtgcgtgaaagaaaactcatctaaggatctaaaaaaatcattcaagagcccagaacccaggctctttactcctgaagaattctttagaatttttaatagatccattgatgccttcaaggactttgtagtggcatctgaaactagtgattgtgtggtttcttcaacattaagtcctgagaaagattccagagtcagtgtcacaaaaccatttatgttaccccctgttgcagccagctcccttaggaatgacagcagtagcagtaataggaaggccaaaaatccccctggagactccagcctacactgggcagccatggcattgccagcattgttttctcttataattggctttgcttttggagccttatactggaagaagagacagccaagtcttacaagggcagttgaaaatatacaaattaatgaagaggataatgagataagtatgttgcaagagaaagagagagagtttcaagaagtgtaattgtggcttgtatcaacactgttactttcgtacattgggctggtaacagttcatgtttgcttcataaatgaagcagctttaaacaaattcatattctgtctggagtgacagaccacatctttatctgttcttgctacccatgactttatatggatgattcagaaattggaacagaatgttttactgtgaaactggcactgaattaatcatctataaagaagaacttgcatggagcaggactctattttaaggactgcgggacttgggtctcatttagaacttgcagctgatgttggaagagaaagcacgtgtctcagactgcatgtaccatttgcatggctccagaaatgtctaaatgctgaaaaaacacctagctttattcttcagatacaaactgcagcctgtagttatcctggtctctgcaagtagatttcagcttggatagtgagggtaacaatttttctcaaagggatctggaaaaaatgtttaaaactcagtagtgtcagccactgtacagtgtagaaagcagtgggaactgtgattggatttggcaacatgtcagctttatagttgccgattagtgatatgggtctgatttcgatctcttcctgatgtaaaccatgctcacccatatcccactatacaaatgcaaatggttgcctggttccatttatgcaagggagccagtactgaattatgccttggcagaggggagactccaaaagagtcatcgcaggaagaagttaagaacactgaacatcagaacagtctgccaagaaggacattggcatcctgggaaagtccgccttttcccttgaccactatagggtgtataaatcgtgtttgcaaaatgtgttatgatgtgtttatattctaaaactattacagagctatgtaaagggacttaggagaaaatgctgaatgtaagatggtcccatttcaatttccaccatgggagagcctaaaaataaattatgacatttagtatctaaggttagaaaaccacgcccacatgctaatatgggtgttgaaaactaggttacttataatgcaaggaatcaggaaactttagttatttatagtataatcaccattatctgtttaaaggatccatttagttaaaatcgggcactctatattcattaaggtttatgaattaaaaagaaagctttatgtagttatgcatgtcagtttgctatttaaaatgtgtgacagtgtttgtcatattaagagtgaatttggcaggaattcccaagatggacattgtgcttttaaactagaacttgtaagacattatgtgaatatcccttgccaattttttttataataagaaaacatctgactaaagtcaaagaatgatttcttatggtttattttgatgaaagttcttttaacatgtcttgaatgtacacataaaggaatccaaagctttccattctaacttaatctttgtgataacattattgccatgttctacaaccgtaagatgacagttttcaatgtagtgacacaaaagggcatgaaaaactaactgctagctttcctttcatttcaaaagtccaagaatttctagtatatttggattttagcttctgttcaaagcaaatccagatgcaactccagtaagtggcctttgctcttttttgtaccaaagagcccagatgattcctacagtccctttcttctctaacatgctgtggttccttaaatatgagtaatttctctaagatataacccaggtgctttgagaagctgcattaaggtgttcaggccctcagatatcacatggtacacttgattagtaataaaaccagagatcaatttaaattgctgataggtcctgtctcagtgtgtggcattgactgttttcaggaaaatagatacagattaatatgagttatgcgtgtaggttgtgtatagattgagaagatagatacttctcaatctagtagtttgatttatttaaccaatggtttcagtttgcttgagcatatgaaaatcctgcttaatgtgcttaagagtataataaatgtgtacttttgtcctcaaacctagtagctgggttttaacactcatggacatggtcttaatcaatggagttaaataaacaaattcagcaagttattaaatctgacatggtaggagaggggagatgtgtcctgcttattaaatgtgttggtccattgaaagttacatggattgccaatttttaaaacactaaagttgaataaaatgcatgaacaatagaaaaatgctgaacattattttggatgctagctgcttggacattaactgtgttatttctgctttgagatgaaaatatatatttatctttgcttattttatcccagatgtgttctgaatatccttcttcataaatcatggaaaactcactgctgagatagtaaaccatgaaatcgccttttcagttggtgccatgtatctgacagttccatcttggaaggtttcaaaattaccttttaaaatgatctcagaagtctgtagattctcaatgatactgaaagctttgcacctctttggtagaaaccaggtctatttagaaaatggctttatgataaatgttgcctcctgagtgataatgaagtgttcctggatattgtattgtaatttaatgtgcttaccacactgccacattttaatgagtcagagaaaaattaatttttcttcaatacaataatagaacaagtagcctattctcttaaaaagtatgtgaaaagaaaattatgaaaaaatatgcatacctaatgaagtattggttttagtaagaattaaatacatttcattgagctttaaagtactttggagaaactttggggcacgttttcctactctaattcaactaaagttataaataaagagaaaaactcattcagaaatcatggattttaaaaatattttactgcagccaagttttcatttcaaaatgtaatttcagtttggagcttttaggcattatgtatatttaaaaaatatattcttcaaaaatgcattttggcatggtgggatggatgttgcaaaagatatccggagcctccagtctgtcattaactgatatggtaaatcacctctcttctttgggtctcaattttttatttatctatatggtaaactcagagatcactccttaggggtgagtcctattgcaatatgaccgacaaagaagacaaaatagcattgaaactaacccatacaaaatatccaactctggattctgtgaataagtatcttgaccataaaaagtcattgctgttcttgtttctaatgtaaatagtgtccattagtaaaagtgaaattcagtcttaagtagggtgaattggatcaccatttacacaagagatggctttttcctttgcttgaataaacattttggatcacctccaaagaatgaaaaccagtagtacgttttagtcatattagtcaggatgagaaactataagatgtgtgtaacatttggaaatgcaccaaagtgagcgtttaaatcttctcattttattgaaaactaagagcagaaaatgtaaaatgctcatgaaggttttgaatgccaaaagatattttagaatcaatttataaaggggtaattcattaattacactttaaaattggaaagtgggataagaaatctaaagtaaaccagcttatctttgaaacaatattattttgaaattggctttaaaataaaaccattcagattgaaattctaattagctcatttgtggagtttgatcacacaattcataatgttgctgctttccattaactagtcttgaaatgcctttgtttgtaaaaataaaataatggtactttcattttataacaaggtgtttttttcaagaaataatccatgctaaaatggatatttgtgatcctgaaatgtttactaagcattgtaaatttatttataactgccatctccaactacatccttatgatgtttttaacaataaaattaaaacaactgttaaactaaaaaccacaccgttttccagtacttgatctctgagctacaatactcactaaatataattttccaatcaaaatattctattctatattctaagggttaatatgtgattatagtgtccacttgccaccatttttttaaatcaatggacttgaaaagtattaatttagatggatgcgcagatataccctcagttcagtcatagattggagtttgcatataataatgtaaatgtatgtcgacactattctaaatagttctattatgactgaaatttaattaaataaaaaaggttgtaaaatgtgatgtgtatgtgtatatactgtatgtgtactttttaaaataggtgtatgtcccaacccttttttatacaggtttgaatttaaaattacatgatatatacatatactttattgttctaaataaagaattttatgcactctcataaa

SEQ ID NO: 909 - DNA, 3536 bp, Homo sapiens
gcggctgccctcccttgtttccgctgcatccagacttcctcaggcggtggctggaggctgcgcatctggggctttaaacatacaaagggattgccaggacctgcggcggcggcggcggcggcgggggctggggcgcgggggccggaccatgagccgctgagccgggcaaaccccaggccaccgagccagcggaccctcggagcgcagccctgcgccgcggagcaggctccaaccaggcggcgaggcggccacacgcaccgagccagcgacccccgggcgacgcgcggggccagggagcgctacgatggaggcgctaatggcccggggcgcgctcacgggtcccctgagggcgctctgtctcctgggctgcctgctgagccacgccgccgccgcgccgtcgcccatcatcaagttccccggcgatgtcgcccccaaaacggacaaagagttggcagtgcaatacctgaacaccttctatggctgccccaaggagagctgcaacctgtttgtgctgaaggacacactaaagaagatgcagaagttctttggactgccccagacaggtgatcttgaccagaataccatcgagaccatgcggaagccacgctgcggcaacccagatgtggccaactacaacttcttccctcgcaagcccaagtgggacaagaaccagatcacatacaggatcattggctacacacctgatctggacccagagacagtggatgatgcctttgctcgtgccttccaagtctggagcgatgtgaccccactgcggttttctcgaatccatgatggagaggcagacatcatgatcaactttggccgctgggagcatggcgatggatacccctttgacggtaaggacggactcctggctcatgccttcgccccaggcactggtgttgggggagactcccattttgatgacgatgagctatggaccttgggagaaggccaagtggtccgtgtgaagtatgggaacgccgatggggagtactgcaagttccccttcttgttcaatggcaaggagtacaacagctgcactgataccggccgcagcgatggcttcctctggtgctccaccacctacaactttgagaaggatggcaagtacggcttctgtccccatgaagccctgttcaccatgggcggcaacgctgaaggacagccctgcaagtttccattccgcttccagggcacatcctatgacagctgcaccactgagggccgcacggatggctaccgctggtgcggcaccactgaggactacgaccgcgacaagaagtatggcttctgccctgagaccgccatgtccactgttggtgggaactcagaaggtgccccctgtgtcttccccttcactttcctgggcaacaaatatgagagctgcaccagcgccggccgcagtgacggaaagatgtggtgtgcgaccacagccaactacgatgatgaccgcaagtggggcttctgccctgaccaagggtacagcctgttcctcgtggcagcccacgagtttggccacgccatggggctggagcactcccaagaccctggggccctgatggcacccatttacacctacaccaagaacttccgtctgtcccaggatgacatcaagggcattcaggagctctatggggcctctcctgacattgaccttggcaccggccccacccccacgctgggccctgtcactcctgagatctgcaaacaggacattgtatttgatggcatcgctcagatccgtggtgagatcttcttcttcaaggaccggttcatttggcggactgtgacgccacgtgacaagcccatggggcccctgctggtggccacattctggcctgagctcccggaaaagattgatgcggtatacgaggccccacaggaggagaaggctgtgttctttgcagggaatgaatactggatctactcagccagcaccctggagcgagggtaccccaagccactgaccagcctgggactgccccctgatgtccagcgagtggatgccgcctttaactggagcaaaaacaagaagacatacatctttgctggagacaaattctggagatacaatgaggtgaagaagaaaatggatcctggcttccccaagctcatcgcagatgcctggaatgccatccccgataacctggatgccgtcgtggacctgcagggcggcggtcacagctacttcttcaagggtgcctattacctgaagctggagaaccaaagtctgaagagcgtgaagtttggaagcatcaaatccgactggctaggctgctgagctggccctggctcccacaggcccttcctctccactgccttcgatacaccgggcctggagaactagagaaggacccggaggggcctggcagccgtgccttcagctctacagctaatcagcattctcactcctacctggtaatttaagattccagagagtggctcctcccggtgcccaagaatagatgctgactgtactcctcccaggcgccccttccccctccaatcccaccaaccctcagagccacccctaaagagatactttgatattttcaacgcagccctgctttgggctgccctggtgctgccacacttcaggctcttctcctttcacaaccttctgtggctcacagaacccttggagccaatggagactgtctcaagagggcactggtggcccgacagcctggcacagggcagtgggacagggcatggccaggtggccactccagacccctggcttttcactgctggctgccttagaacctttcttacattagcagtttgctttgtatgcactttgtttttttctttgggtcttgttttttttttccacttagaaattgcatttcctgacagaaggactcaggttgtctgaagtcactgcacagtgcatctcagcccacatagtgatggttcccctgttcactctacttagcatgtccctaccgagtctcttctccactggatggaggaaaaccaagccgtggcttcccgctcagccctccctgcccctcccttcaaccattccccatgggaaatgtcaacaagtatgaataaagacacctactgagtggccgtgtttgccatctgttttagcagagcctagacaagggccacagacccagccagaagcggaaacttaaaaagtccgaatctctgctccctgcagggcacaggtgatggtgtctgctggaaaggtcagagcttccaaagtaaacagcaagagaacctcagggagagtaagctctagtccctctgtcctgtagaaagagccctgaagaatcagcaattttgttgctttattgtggcatctgttcgaggtttgcttcctctttaagtctgtttcttcattagcaatcatatcagttttaatgctactactaacaatgaacagtaacaataatatccccctcaattaatagagtgctttctatgtgcaaggcacttttcacgtgtcacctattttaacctttccaaccacataaataaaaaaggccattattagttgaatcttattgatgaagaga

SEQ ID NO: 910 - DNA, 1809 bp, Homo sapiens
ggggttggctctaacgaatttgaatgaggagcctcagcgctttcggcgccattttcgagtgatgcctgatctcatcaatctagcgggagagacaggataacctgtccgagagtatagcgccactatgactccgccggaaaaattactttaaaaatcgccaaaaattacttggagcaaagggcagtcggcggagcttcgccaaggctggcgcagtcggttttgacctgtagcagagaaccaattctggagaacagcctcacttctttgattgaatacttacataatgcattggaacatgacatgagattaaggtttaataatgatagaatgaagaccacaataaaagagacctctacttagctcagcaattcttacctttcatttcatgtttttcccttgatgtgaagtcttacctatttgatgaagatgtcttttgaaaggtgtactgcaaggaacaaaatgtttgtaaattctccttttaccaaggtttcttttttaattgatgccaaagagttccaatattgaacatcttaagtctgttacttggattacggattgagtttggagcttactcagaggactacaggagagtatccaggaagtagcaagaaatgtggataattactgtaccttcctcatggaaaaagttttatttaaagtgttatttctcattgaatactatcaaaaaggaaaaaaaaatgacctaaacttttgagatagatttggctctagtaagtatttagttatatcacttgcatatctgggagaagaaataagagactatcatcagtacattcccatctactaaaaaaatttattttacacatgtcaagggattacttataacttccattttattactaatagcttgaacccttttaatgaagacctaactcctccaccagaaatttaagtttatgttcttactttgtttacttataaaatacatctcaggtatttcggatgtcttttttttttctaagcctatatgaaatgaaaaatatattggcaaaataaatgtttaaaccttttacgttaaaattactttgaaagatgaaaagttagtgctgtttttgtctacgttatactgaaattaaatgtttataatttatattttgggtttatgtataaatcatggaatttatgcaaaaatatgagtagtacagattctcctctaattctgtaggactttgaataatgtgatatttttcttataattggacccttgtgttttgaagaaatgccaactgcttgaagaatctccttgttatttgtattatttgctatagggttagatgttgagaaattctgctgacaaaaaattttaagccagttttacactaaatgttcctcagtctgattaatttgttattggatgtattctgtatctttcttttgtaatttgtaacttttatccacttagcacgaatgattctattaaagaaaatcattaggaagtggtagaaactttagaattgcttgaacctgggaggtggaggttgcagtgggctaagatggcaccactgcactccagcctgggtgagagagcaagaccctgcctcagaaaaaaaaaaaaaaaaaatctaagacctgtatatcaaattttgagtttgtttcttcttttgtacctcaatagttacatttatcaaaaagctgagctgttgtaaaattgtggaattcacattggatattcaaaaacatttcttactattaatgacaaccaatagttatggatatttcattttaaacatggttataaaatgtaaacatgacactaataagctcaataaatgtttggcctgtctagta

SEQ ID NO: 911 - DNA, 4062 bp, Homo sapiens
actcatacatacactctggcaatgaggacactgagctcgcttctgaaatttgacaagataaccactaaaatctctttgaattctatgttgttgtgatcccatggctacagaggatcaggagttgacatagatactctttggatttcataccatgtggaggctttcttacttccacgtgaccttgactgagttttgaatagtattggctcagcagattgtttactgtgttcttcttctttttctttttttggtctttcctgctcagcgcccaacccaagttcaaaggctgataagagagaaaatctcatgaggaggttttagtctagggaaagtcattcagtggatgtgatcttggctcacaggggacgatgtcaagctcttcctggctccttctcagccttgttgctgtaactgctgctcagtccaccattgaggaacaggccaagacatttttggacaagtttaaccacgaagccgaagacctgttctatcaaagttcacttgcttcttggaattataacaccaatattactgaagagaatgtccaaaacatgaataatgctggggacaaatggtctgcctttttaaaggaacagtccacacttgcccaaatgtatccactacaagaaattcagaatctcacagtcaagcttcagctgcaggctcttcagcaaaatgggtcttcagtgctctcagaagacaagagcaaacggttgaacacaattctaaatacaatgagcaccatctacagtactggaaaagtttgtaacccagataatccacaagaatgcttattacttgaaccaggtttgaatgaaataatggcaaacagtttagactacaatgagaggctctgggcttgggaaagctggagatctgaggtcggcaagcagctgaggccattatatgaagagtatgtggtcttgaaaaatgagatggcaagagcaaatcattatgaggactatggggattattggagaggagactatgaagtaaatggggtagatggctatgactacagccgcggccagttgattgaagatgtggaacatacctttgaagagattaaaccattatatgaacatcttcatgcctatgtgagggcaaagttgatgaatgcctatccttcctatatcagtccaattggatgcctccctgctcatttgcttggtgatatgtggggtagattttggacaaatctgtactctttgacagttccctttggacagaaaccaaacatagatgttactgatgcaatggtggaccaggcctgggatgcacagagaatattcaaggaggccgagaagttctttgtatctgttggtcttcctaatatgactcaaggattctgggaaaattccatgctaacggacccaggaaatgttcagaaagcagtctgccatcccacagcttgggacctggggaagggcgacttcaggatccttatgtgcacaaaggtgacaatggacgacttcctgacagctcatcatgagatggggcatatccagtatgatatggcatatgctgcacaaccttttctgctaagaaatggagctaatgaaggattccatgaagctgttggggaaatcatgtcactttctgcagccacacctaagcatttaaaatccattggtcttctgtcacccgattttcaagaagacaatgaaacagaaataaacttcctgctcaaacaagcactcacgattgttgggactctgccatttacttacatgttagagaagtggaggtggatggtctttaaaggggaaattcccaaagaccagtggatgaaaaagtggtgggagatgaagcgagagatagttggggtggtggaacctgtgccccatgatgaaacatactgtgaccccgcatctctgttccatgtttctaatgattactcattcattcgatattacacaaggaccctttaccaattccagtttcaagaagcactttgtcaagcagctaaacatgaaggccctctgcacaaatgtgacatctcaaactctacagaagctggacagaaactgttgtaagaaatacctcaaaatgttgaacctctcctagtattcagtattactcatttccatgcctaggtttgtatttgatttctttgttctaaaaagaaaattttatggcctcaaaatgtcctcatttacaaaccaaacatttaatttgtggtcagacaggaacctagaccatacaacaattgggtgggccacctcttttctccctatcataactacagccctctcttcctggtaattggaaggaaagagcggtttagggtggaatatatctgttaatatgcattcttttcttatctgccagaagcaaatttagccaagtcaaagagaagaaaccatagatcatagatgtaaatatatgtacatctggaacccctcaaaaggccctgaaccccctttttttgtgtagcaatatgctgaggcttggaaaatcagaaccctggaccctagcattggaaaatgttgtaggagcaaagaacatgaatgtaaggccactgctcaactactttgagcccttatttacctggctgaaagaccagaacaagaattcttttgtgggatggagtaccgactggagtccatatgcagaccaaagcatcaaagtgaggataagcctaaaatcagctcttggagataaagcatatgaatggaacgacaatgaaatgtacctgttccgatcatctgttgcatatgctatgaggcagtactttttaaaagtaaaaaatcagatgattctttttggggaggaggatgtgcgagtggctaatttgaaaccaagaatctcctttaatttctttgtcactgcacctaaaaatgtgtctgatatcattcctagaactgaagttgaaaaggccatcaggatgtcccggagccgtatcaatgatgctttccgtctgaatgacaacagcctagagtttctggggatacagccaacacttggacctcctaaccagccccctgtttccatatggctgattgtttttggagttgtgatgggagtgatagtggttggcattgtcatcctgatcttcactgggatcagagatcggaagaagaaaaataaagcaagaagtggagaaaatccttatgcctccatcgatattagcaaaggagaaaataatccaggattccaaaacactgatgatgttcagacctccttttagaaaaatctatgtttttcctcttgaggtgattttgttgtatgtaaatgttaatttcatggtatagaaaatataagatgataaagatatcattaaatgtcaaaactatgactctgttcagaaaaaaaattgtccaaagacaacatggccaaggagagagcatcttcattgacattgctttcagtatttatttctgtctctggatttgacttctgttctgtttcttaataaggattttgtattagagtatattagggaaagtgtgtatttggtctcacaggctgttcagggataatctaaatgtaaatgtctgttgaatttctgaagttgaaaacaaggatatatcattggagcaagtgttggatcttgtatggaatatggatggatcacttgtaaggacagtgcctgggaactggtgtagctgcaaggattgagaatggcatgcattagctcactttcatttaatccattgtcaaggatgacatgctttcttcacagtaactcagttcaagtactatggtgatttgcctacagtgatgtttggaatcgatcatgctttcttcaaggtgacaggtctaaagagagaagaatccagggaacaggtagaggacattgctttttcacttccaaggtgcttgatcaacatctccctgacaacacaaaactagagccaggggcctccgtgaactcccagagcatgcctgatagaaactcatttctactgttctctaactgtggagtgaatggaaattccaactgtatgttcaccctctgaagtgggtacccagtctcttaaatcttttgtatttgctcacagtgtttgagcagtgctgagcacaaagcagacactcaataaatgctagatttacacactc

SEQ ID NO: 912 - DNA, 1331 bp, Homo sapiens; identical to SEQ ID NO: 502

SEQ ID NO: 913 - DNA, 3950 bp, Homo sapiens
aaggcttccgggcatgcgcacagcgttgtgcaaatgaatgccttccactgaaccgagaggcactgttatagaagaatggaagaagatacagattatagaatcaggtttagttctttgtgtttctttaatgatcacgttggatttcatggcactataaaaagctcaccaagtgactttattgttattgaaattgatgaacagggacagttagttaataagaccatcgatgagcctattttcaagattagtgaaatacaacttgagccaaataattttcccaaaaaaccaaaactagatcttcaaaatctgtccttagaagatggaagaaaccaagaagttcatactttgattaagtacactgatggtgaccaaaatcatcagtctggttcagaaaaggaagatactatcgttgatggaacttccaaatgtgaagaaaaagctgatgttttaagctcctttttggatgaaaaaactcatgagttactgaataattttgcctgtgatgtaagagagaagtggctttctaaaacagagctaattggactacctcctgaattctcaataggcagaatccttgacaaaaaccagagggctagtttacacagtgccattaggcagaaatttccatttttagtaactgtaggaaaaaacagtgaaattgttgtaaaaccaaatcttgaatataaagaactttgtcatttggtatctgaagaggaagcatttgacttttttaaatatttggatgcaaagaaagaaaattccaaatttacctttaaacctgatacaaacaaagaccacagaaaagctgtccaccattttgtcaacaaaaagtttggaaaccttgtggaaaccaaatctttttctaaaatgaattgcagtgctggtaatccgaatgtggtggtaacagtaagatttcgggaaaaagcacacaaacgtgggaaaaggcctctttctgaatgccaagaaggaaaagttatatatacagcttttaccctacgaaaggaaaacctggaaatgtttgaagcgattggttttttagctatcaaacttggtgttattccttcggattttagttatgcaggccttaaagacaagaaagccatcacctatcaagcaatggttgttagaaaagtgactccagagaggttgaaaaatattgaaaaagaaattgaaaagaaaagaatgaatgtctttaatattcggtctgtagatgattccctgagacttggtcagctcaaaggaaatcactttgatattgtcattagaaatttaaaaaaacaaataaatgattctgcaaacctgagggagagaattatggaagcaatagaaaatgttaagaaaaaaggctttgtgaattactatggaccacagagatttgggaagggaaggaaagttcacacagaccaaattggactagctttgctgaagaatgaaatgatgaaagccataaaattgtttcttacaccagaagacttggatgatcctgtaaatagagcaaagaagtattttcttcaaactgaggatgctaaaggcacactttcattgatgcctgaattcaaagtgcgtgagagagcattgttggaggcattgcaccgctttggcatgaccgaggaaggttgtatccaggcatggttctctttaccccattccatgcgcatattctatgttcacgcatataccagcaaaatttggaatgaggcagtatcttacagacttgaaacctatggagcaagagtagtgcagggtgatttggtctgtttggatgaagacattgatgacgagaatttcccaaatagtaaaattcacctggtaactgaagaggagggatcagctaatatgtatgcaatacatcaggtggttcttccagtacttggatacaatattcagtacccgaagaacaaagtagggcagtggtaccatgacatacttagcagagatggactacagacatgtaggtttaaagtacctactctgaaactgaatataccaggttgctatagacagattttgaaacatccctgtaatctctcataccaactaatggaagatcatgacattgatgtcaaaacgaaaggttcccacattgatgaaacagctttgtctcttttgatctcttttgatcttgatgcttcatgctatgctaccgtttgtctgaaggaaataatgaagcatgacgtttaaaactgatacccttggtataaccatatatatgtcactctttgaaggaaagggggctaaaatgtcttaagcaccttccatgtgttaggaacttcataattgttatctcttttaattttcacagcatcctgagaagttaggatttgatactgtaattttatagaggatatgtaagtgtcagggtccaaatttaaggtccatgtgaccccaaagcctgtgttttttttctattatatgtttcagtgacctttattctgtgtcataaagttacaatcttttaaaaccattaggaatatatataatactgcaagataacatttaagaaaaaaagttgtgaatattcatatcctccagctccttgcttagaacactagtaaaattaggtcgcagtgaagcaaatgttggagagaaagatagatgaagcattttgctaattattattgtccccctttcctgtttttgaaattattgatcagaacaatatacaagggaaatgccatacctctgtttgtgatagataccccagagtagttattacctctttgtgagataagtaatctttgatgaagattgaaatacaatttctcatccaatttttatatcttggcatacgctgaccctcttgaccatttgtaattttttcatattatctaaaacaggtgttagagtcagacagattcattcttagattctagctctgacacttactagtgattttgagtatgttgttgatttttttgtgtgtggttactgatagaatcaagacaattacaacttcataaatgacaaataataggattatctccacattttctgttgctggaggaacaaaacattgtgcccatttgaaaattttaatttttgttggtttaactatcccacattataaatcatccttcaccattttatatcagttaaatatgggtgtgttggggaggaatgactggcatgtagacatgtattgatttaggaagatctgagcatttctttcattgttggtaagatataatgatgaaatttaaaaagcagtatggagcattatatatcagtaatgtgatatatatacttaagccagtttaaccattttgggaaatgttagcattaggaaataaaatccaaaagaaggaagagaagctatatgcaatgcaaaatttgcttattgcaatattttcatatacagacactaaaaacagttttcaaagtccagcattacgtaactaaagtaagtaaaatgatgtgtatcaacttgatggtaaaatatgtagttatttaaaaaagcaatgaacaatttagtttcatgagaaaatgttgccccctaaaagtagaacacatatgttacaactgcaataatactctgaattcatctttcacaaataagagacatgttagcatagtgattaaaagcacagatattggagacaaactaacccagtttgaaccctggcactgccacgtatagcactgcagccttgggaaagttatttaaactcatgggcttcagtttcaacatctgtaaaatgggcatgttaacattgcctacctcataggattactgtgagaattttctaagttaatatatgtaaagcaactttaaaaagtgcctggcacttagttattgttaagtaagtgtctgcagatgcaagtttggaagagaaaagcaaataaatgaaaatcccttcctgttaagatgatggggtatttggattttttttaatactaaaaagttttttttgttatatgttttggcaataaataattctcaatacacaaaa

SEQ ID NO: 914 - DNA, 116 bp, Homo sapiens
atactctggtttctcttcagatcgtataaatctttcgccttttactaaagatttccgtggagaggaacaactctgagtcttaagctaattttttgaggccttgttccgacaaggct

SEQ ID NO: 915 - DNA, 5495 bp, Homo sapiens; identical to SEQ ID NO: 450

SEQ ID NO: 916 - DNA, 2293 bp, Homo sapiens
cagggctggggtaaggccaggaaaattcaacaggcactaaaaatattgtcaagctgctgacagcacagccagaggccccaggcctgggtggcatccagacagccctgtcctttctagacagccccctcctccaggctcagggacctgtctggctgtgagctcccaggaggtcccaggggtgtgacctccctccctccctccctccctcttcccttcaccccaggccagcccagggccagctataaagctggcccagcctggctctcagcacacccagctgcctgagaccctccttcaacctccctagaggacagccccactctgcctcctgctcccccagggcagcaccatgtggcccctgtggctctgctgggcactctgggtgctgcccctggctggccccggggcggccctgaccgaggagcagctcctgggcagcctgctgcggcagctgcagctcagcgaggtgcccgtactggacagggccgacatggagaagctggtcatccccgcccacgtgagggcccagtatgtagtcctgctgcggcgcagccacggggaccgctcccgcggaaagaggttcagccagagcttccgagaggtggccggcaggttcctggcgtcggaggccagcacacacctgctggtgttcggcatggagcagcggctgccgcccaacagcgagctggtgcaggccgtgctgcggctcttccaggagccggtccccaaggccgcgctgcacaggcacgggcggctgtccccgcgcagcgcccaggcccgggtgaccgtcgagtggctgcgcgtccgcgacgacggctccaaccgcacctccctcatcgactccaggctggtgtccgtccacgagagcggctggaaggccttcgacgtgaccgaggccgtgaacttctggcagcagctgagccggccccggcagccgctgctgctacaggtgtcggtgcagagggagcatctgggcccgctggcgtccggcgcccacaagctggtccgctttgcctcgcagggggcgccagccgggcttggggagccccagctggagctgcacaccctggacctcagggactatggagctcagggcgactgtgaccctgaagcaccaatgaccgagggcacccgctgctgccgccaggagatgtacattgacctgcaggggatgaagtgggccaagaactgggtgctggagcccccgggcttcctggcttacgagtgtgtgggcacctgccagcagcccccggaggccctggccttcaattggccatttctggggccgcgacagtgtatcgcctcggagactgcctcgctgcccatgatcgtcagcatcaaggagggaggcaggaccaggccccaggtggtcagcctgcccaacatgagggtgcagaagtgcagctgtgcctcggatggggcgctcgtgccaaggaggctccagccataggcgcctggtgtatccattgagccctctaactgaacgtgtgcatagaggtggtcttaatgtaggtcttaactttatacttagcaagttactccatcccaatttagtgctcctgtgtgaccttcgccctgtgtccttccatttcctgtctttcccgtccatcacccatcctaagcacttacgtgagtaaataatgcagctcagatgctgagctctagtaggaaatgctggcatgctgattacaagatacagctgagcaatgcacacattttcagctgggagtttctgttctctggcaaattcttcactgagtctggaacaataataccctatgattagaactggggaaacagaactgaattgctgtgttatatgaggaattaaaaccttcaaatctctatttcccccaaatactgacccattctggacttttgtaaacatacctaggcccctgttcccctgagagggtgctaagaggaaggatgaagggcttcaggctgggggcagtggacagggaattgggatacctggattctggttctgacagggccacaagctaggatctctaacaaacgcagaaggctttggctcgtcatttcctcttaaaaaggaggagctgggcttcagctctaagaacttcattgccctggggatcagacagcccctacctacccctgcccactcctctggagactgagccttgcccgtgcatatttaggtcatttcccacactgtcttagagaacttgtcaccagaaaccacatgtatttgcatgttttttgttaatttagctaaagcaattgaatgtagatactcagaagaaataaaaaatgatgtttcactctg

SEQ ID NO: 917 - DNA, 705 bp, Homo sapiens
ccccgcaggctgagggcaggtgggaagcaaacccggacgcatcgcagcagcagcagcagcagcagaagcagcagcagcagcctccgcagtccctccagagacatggatccccagacagcaccttcccgggcgctcctgctcctgctcttcttgcatctggctttcctgggaggtcgttcccacccgctgggcagccccggttcagcctcggacttggaaacgtccgggttacaggcagtcggagcagcgcaaccatttgcagggcaaactgtcggagctgcaggtggagcagacatccctggagcccctccaggagagcccccgtcccacaggtgtctggaagtcccgggaggtagccaccgagggcatccgtgggcaccgcaaaatggtcctctacaccctgcgggcaccacgaagccccaagatggtgcaagggtctggctgctttgggaggaagatggaccggatcagctcctccagtggcctgggctgcaaagtgctgaggcggcattaagaggaagtcctggctgcagacacctgcttctgattccacaaggggctttttcctcaaccctgtggccgcctttgaagtgactcatttttttaatgtatttatgtatttatttgattgttttatataagatggtttcttacctttgagcacaaaatttccacggtgaaataaagtcaacattataagcttta

SEQ ID NO: 918 - DNA, 124 bp, Homo sapiens
gtctacggccatatcaccctgaacgcgcctgatctcatctgatctcggaagctaagcagggtcgggcctggttagtacttggatgggagaaattttataaagaacacatgaacactagctggcc

SEQ ID NO: 919 - DNA, 2034 bp, Homo sapiens
tccatattgtgcttccaccactgccaataacaaaataactagcaaccatgaagtgggtggaatcaatttttttaattttcctactaaattttactgaatccagaacactgcatagaaatgaatatggaatagcttccatattggattcttaccaatgtactgcagagataagtttagctgacctggctaccatattttttgcccagtttgttcaagaagccacttacaaggaagtaagcaaaatggtgaaagatgcattgactgcaattgagaaacccactggagatgaacagtcttcagggtgtttagaaaaccagctacctgcctttctggaagaactttgccatgagaaagaaattttggagaagtacggacattcagactgctgcagccaaagtgaagagggaagacataactgttttcttgcacacaaaaagcccactccagcatcgatcccacttttccaagttccagaacctgtcacaagctgtgaagcatatgaagaagacagggagacattcatgaacaaattcatttatgagatagcaagaaggcatcccttcctgtatgcacctacaattcttctttgggctgctcgctatgacaaaataattccatcttgctgcaaagctgaaaatgcagttgaatgcttccaaacaaaggcagcaacagttacaaaagaattaagagaaagcagcttgttaaatcaacatgcatgtgcagtaatgaaaaattttgggacccgaactttccaagccataactgttactaaactgagtcagaagtttaccaaagttaattttactgaaatccagaaactagtcctggatgtggcccatgtacatgagcactgttgcagaggagatgtgctggattgtctgcaggatggggaaaaaatcatgtcctacatatgttctcaacaagacactctgtcaaacaaaataacagaatgctgcaaactgaccacgctggaacgtggtcaatgtataattcatgcagaaaatgatgaaaaacctgaaggtctatctccaaatctaaacaggtttttaggagatagagattttaaccaattttcttcaggggaaaaaaatatcttcttggcaagttttgttcatgaatattcaagaagacatcctcagcttgctgtctcagtaattctaagagttgctaaaggataccaggagttattggagaagtgtttccagactgaaaaccctcttgaatgccaagataaaggagaagaagaattacagaaatacatccaggagagccaagcattggcaaagcgaagctgcggcctcttccagaaactaggagaatattacttacaaaatgcgtttctcgttgcttacacaaagaaagccccccagctgacctcgtcggagctgatggccatcaccagaaaaatggcagccacagcagccacttgttgccaactcagtgaggacaaactattggcctgtggcgagggagcggctgacattattatcggacacttatgtatcagacatgaaatgactccagtaaaccctggtgttggccagtgctgcacttcttcatatgccaacaggaggccatgcttcagcagcttggtggtggatgaaacatatgtccctcctgcattctctgatgacaagttcattttccataaggatctgtgccaagctcagggtgtagcgctgcaaacaatgaagcaagagtttctcattaaccttgtgaagcaaaagccacaaataacagaggaacaacttgaggctgtcattgcagatttctcaggcctgttggagaaatgctgccaaggccaggaacaggaagtctgctttgctgaagagggacaaaaactgatttcaaaaactcgtgctgctttgggagtttaaattacttcaggggaagagaagacaaaacgagtctttcattcggtgtgaacttttctctttaattttaactgatttaacactttttgtgaattaatgaaatgataaagacttttatgtgagatttccttatcacagaaataaaatatctccaaatgtt

SEQ ID NO: 920 - DNA, 2651 bp, Homo sapiens; identical to SEQ ID NO: 384

SEQ ID NO: 921 - DNA, 3008 bp, Homo sapiens; identical to SEQ ID NO: 278

SEQ ID NO: 922 - DNA, 539 bp, Homo sapiens; identical to SEQ ID NO: 272

SEQ ID NO: 923 - DNA, 6603 bp, Homo sapiens; identical to SEQ ID NO: 442

SEQ ID NO: 924 - DNA, 2750 bp, Homo sapiens
gccaagcatacatctctaattttattattttggtcttttcgttggattttccctttcttctttttttcgggttatcgctcagttttgagcagaggtttacattttttaaaaatttgctttccagcccgccttgatcttctaagtgcgagttcatcgtctgagaaaaaaaaaaatctctggttggcgtttttgtttcttttcttttctttcttttctttcctttttttttttttttaatttttttcaagggggaggagattttccacaagaaaaggttgttttcatgtttgggattcaggaaagcatccaacggagtggaagcagcatgaaggaagagccgctgggcagcggcatgaacgcggtgcggacgtggatgcagggcgccggggtgctggacgccaacacggcggcgcagagcggggtgggtctggcccgggctcactttgagaagcagccgccttccaatctgcggaaatccaacttcttccacttcgtcctggccctctacgacagacagggccagcccgtggagatcgagaggacagcgtttgtggggttcgtggagaaggaaaaagaagccaacagcgaaaagaccaataacggaattcactaccggcttcagcttctctacagcaatgggataaggacggagcaggatttctacgtgcgcctcattgactccatgacaaaacaagccatagtgtatgaaggccaagacaagaacccagaaatgtgccgagtcttgctcacacatgagatcatgtgcagccgctgttgtgacaagaaaagctgtggcaaccgaaatgagactccctcagatccagtgataattgacaggttcttcttgaaatttttcctcaaatgtaaccaaaattgcctaaagaatgcgggaaacccacgtgacatgcggagattccaggtcgtggtgtctacgacagtcaatgtggatggccatgtcctggcagtctctgataacatgtttgtccataataattccaagcatgggcggagggctcggaggcttgacccctcggaaggtacgccctcttatctggaacatgctactccctgtatcaaagccatcagcccgagtgaaggatggacgacgggaggtgcgactgtgatcatcataggggacaatttctttgatgggttacaggtcatattcggtaccatgctggtctggagtgagttgatcactcctcatgccatccgtgtgcagacccctcctcggcacatccctggtgttgtggaagtcacactgtcctacaaatctaagcagttctgcaaaggaacaccaggcagattcatttatacagcgctcaacgaacccaccatcgattatggtttccagaggttacagaaggtcattcctcggcaccctggtgaccctgagcgtttgccaaaggaagtaatactcaaaagggctgcggatctggtagaagcactgtatgggatgccacacaacaaccaggaaatcattctgaagagagcggccgacattgccgaggccctgtacagtgttccccgcaaccacaaccaactcccggcccttgctaacacctcggtccacgcagggatgatgggcgtgaattcgttcagtggacaactggccgtgaatgtctccgaggcatcacaagccaccaatcagggtttcacccgcaactcaagcagcgtatcaccacacgggtacgtgccgagcaccactccccagcagaccaactataactccgtcaccacgagcatgaacggatacggctctgccgcaatgtccaatttgggcggctcccccaccttcctcaacggctcagctgccaactccccctatgccatagtgccatccagccccaccatggcctcctccacaagcctcccctccaactgcagcagctcctcgggcatcttctccttctcaccagccaacatggtctcagccgtgaaacagaagagtgctttcgcaccagtcgtcagaccccagacctccccacctcccacctgcaccagcaccaacgggaacagcctgcaagcgatatctggcatgattgttcctcctatgtgaaagaattgccttgaagaattgtattaatgaagaggttggattctgctacagagagtaatctgatacaagtcccagagtggaacttttaactcaggcctttttaagaggaatcacaataactgcagatttttaaacaaacaaaatcaccgaccttgcaaatactgaaattggaagagggatctgcaagtgcagggtgttggttaaagttgtacctcccaagtatttgggggatatatttattctgtattgacaaaagcaaatccactttttctttttcttttttttttttaagcttaattctgcaatcatttgtcttttataaaccgtaaagctctatacaagggacactataaataagactccatgttttaatttatgatgtttttaaagctgtgtaaaggaagaatgaagtggtgatatttacaaaaaagtaaaaaaaaaaaaaaagaaaaaaaggaaaaaaaaaaaagcttgtatgggacagaataggaatgccagttagattttttagaaaaactaagggtcggcttttgcgccttaaagcatatcaaatggtagttagctcagacagtgcattttcaatatctaacttaacatgccaccccttagcagtgcaagcttatttatctcttttgtattgttgtcttaagcaactgtgtaaataaatgcagcctggaaagttaaaacgcga

SEQ ID NO: 925 - DNA, 333 bp, Homo sapiens; identical to SEQ ID NO: 509

SEQ ID NO: 926 - DNA, 5929 bp, Homo sapiens; identical to SEQ ID NO: 433

SEQ ID NO: 927 - DNA, 2169 bp, Homo sapiens
cccgccccgccccgcccggctgctccatggcgctgtgcgaggccgcgggctgcgggagtgccctgctctggcctcgcttgttgctcttcggggactccatcacccagttttccttccagcagggtggatggggagcatcgctggctgacaggctggtcagaaaatgtgatgttctgaatcgtggattttcaggttacaataccaggtgggccaaaattatccttccaagattaatcaggaaaggaaacagtttggacatcccagtagcagttacaattttctttggggccaatgacagtgcactaaaagatgagaatcccaagcagcacattcccctggaggagtacgctgcgaacctaaagagcatggtgcagtacctgaagtccgtggacatccctgagaatcgagtcattctcatcacgccgaccccactttgtgaaacagcctgggaagaacagtgcatcatacaaggttgcaaactaaatcgcctgaactctgttgttggtgaatatgccaatgcgtgtttacaagtggcccaagactgtgggactgacgtacttgacctgtggaccctgatgcaggacagccaggacttctcatcttatttatcagatggactacatttgtctccaaaggggaatgaatttttgttctcgcatctctggcctttgatagagaaaaaggtctcttctctacctttgctgcttccttactggcgggatgtagcagaagcaaaacctgaattaagtctgctgggagatggagaccattagccaatcacaggagacccaaatctgcttgttatctacagaactcaaagttgtcaatacgtagaggtacgcttttttcctcaggcttaaacctttgccactgatattaataataaaagtattagatgatttttcagggaagttttatacttaggtccattgtgtttcgacagtatttattaatgcagatatcagtgctacagctataaaatataccctgagcagcttgttaattctataaatgacaaagactatgtttttaaaaagtcacaattttataaaaatggtttttcttacattcttttgagaactgtttcactcatacatacacccacacaccccactcaaccttgtatcaaattccaaaagtgtaactaaagtataagaatatcatgactagttaaaagatagcaaataccataaggtacaagttcaagtattagtataacaagtatctgagtaacaaatgtccttggaaatggggggtaggaggagatatgattagtcacaggtttggttaactgccctcaaaatttacaagttaaaatgttttggctggtgagcacatttcagttcttaggggaaaaaaagcttttaatggcaatttatagaaatcagaatccaggctaatgatttttatccttcacacagtaaatgcagcccatccagaatcctggagcaataaagtaagaagtaattcaaatatctgcttgtgggtcaataaaaagggtttctgaagtatcaagtcttgtggggacagcccccaaccctaagggcaggtagtattctatctcctggctggctcatcacattcaaaacaacctgttttttttgttgttgttgttgttaagaaatatctcaccctcttattcaatagtgtttgaaaacaggcaatctttgtattttaaatattctaggtttgtagatagtgaattttttttttttttttttttttttgaggcagagtctcactctgtcacccaggctggagtgtagtggcgcaacctcagcctctccaagtgctgggattacaggcatgagccaccactcccagccaatagtgaattttctaagagcatgtatccctatcagtaacagggatacatgaagatacttataaaatacagaaaaactgcccagcaaatcagggccctaaacagttggtagattccataaattcaactggctaccatgtatagccctcactgtaaggtaggtggttaggtttctagagagcattagtcttagaattatgaagagccatattaacccaaatgatttctaaatttagatatatattttccctgctacataaaaactctgggtaataactagaaatagacccacaatttagagacaatgtatactagatttatctcctttgtttttagttgaaggc

SEQ ID NO: 928 - DNA, 4140 bp, Homo sapiens
caggagaagtgaagatgtaacatgttatctgtcgctcctcttagctggcggagagaatttacatttaaagattagcagagtgagaaagagaaatctgccttttgttgtgtggggtgaggaggaggcatctacccctggccttgacgctatctcccatcacctctgctatccagacaggactcaccgagaaagattgatctctgggctggtgaacataatctctgtcccagtcagaaaaggagagaggaaattagcagagcgattggtggagaatgatatctgtcaaaagaaacacttggagagcactgagtttagtaataggtgactgccggaaaaaagggaactttgaatattgtcaagtgaataaattattcggcatttagcttatcattctgaatttcactttttgctttttggtgctctgaaacttgcagagagaggtggagtgctaaggggagggtaggggttgtgatactttgcacacacatccctgtcattgttctgcctaaagagacagggctgggttcaaggccacatgtgctcctgtcatcctccacatttctgctccaagtgcaatccggagtgtcagctctccatctgtctctgcctggcaggcgcacgcgcccagcaccctgcctccggcgatgccgccccagcccctctgatggccctcctctctgctgccactcattccagaacaggaggcatgagcccggaacgcgcttgcttttaggagacagccactttctgtgtggtacgctggattcaaggatgcctgtgctaacattggcttcagcttccagtgcagttgtgctgctgcatataacactaccaaggtagcatctgcctaagccagaaataacaataggatataatataacctagttacaaatgaggtcctgccatctgtgctataccttcttaagtggggtttggatgataaaatcctgatttaaacgtcagtagataagtgtattttattgatagaagatgttgaatttcttctgttcacttgcttttaaaaaagataaaccccacttgaaaaactgaggtgcttaaggagtaaaataatatgttcctggtggcatcctccagatcgtactgagaagcactccacaatgccagactcacctgtggatgtgaagacgcaatctaggctgactcctccaacaatgccacctcccccaactactcaaggagctccaagaaccagttcatttacaccgacaacgttaactaatggcacgagccattctcctacagccttgaatggcgccccctcaccacccaatggcttcagcaatgggccttcctcttcttcctcctcctctctggctaatcaacagctgcccccagcctgtggtgccaggcaactcagcaagctgaaaaggttccttactaccctgcagcagtttggcaatgacatttcacccgagataggagaaagagttcgcaccctcgttctgggactagtgaactccactttgacaattgaagaatttcattccaaactgcaagaagctactaacttcccactgagaccttttgtcatcccatttttgaaggccaacttgcccctgctgcagcgtgagctcctccactgcgcaagactggccaaacagaaccctgcccagtacctcgcccagcatgaacagctgcttctggatgccagcaccacctcacctgttgactcctcagagctgcttctcgatgtgaacgaaaacgggaagaggcgaactccagacagaaccaaagaaaatggctttgacagagagcctttgcactcagaacatccaagcaagcgaccatgcactattagcccaggccagcggtacagtccaaataacggcttatcctaccagcccaatggcctgcctcaccctaccccacctccacctcagcattaccgtttggatgatatggccattgcccaccactacagggactcctatcgacaccccagccacagggacctcagggacagaaacagacctatggggttgcatggcacacgtcaagaagaaatgattgatcacagactaacagacagagaatgggcagaagagtggaaacatcttgaccatctgttaaactgcataatggacatggtagaaaaaacaaggcgatctctcaccgtactaaggcggtgtcaagaagcagaccgggaagaattgaattactggatccggcggtacagtgacgccgaggacttaaaaaaaggtggcggcagtagcagcagccactctaggcagcagagtcccgtcaacccagacccagttgcactagacgcgcatcgggaattccttcacaggcctgcgtctggatacgtgccagaggagatctggaagaaagctgaggaggccgtcaatgaggtgaagcgccaggcgatgacggagctgcagaaggccgtgtctgaggcggagcggaaagcccacgacatgatcacaacagagagggccaagatggagcgcacggtcgccgaggccaaacggcaggcggcggaggacgcactggcagttatcaatcagcaggaggattcaagcgagagttgctggaattgtggccgtaaagcgagtgaaacctgcagtggctgtaacacagcccgatactgtggctcattttgccagcacaaagactgggagaagcaccatcacatctgtggacagaccctgcaggcccagcagcagggagacacacctgcagtcagctcctctgtcacgcccaacagcggggctgggagcccgatggacacaccaccagcagccactccgaggtcaaccaccccgggaaccccttccaccatagagacaacccctcgctagacgtgaactcagaactgtcggaggaaagacaacacaaccaacgcgaaaccaattcctcatcctcagatgctcaaagttgttttttttgtttgtttgtttattagatgaattatcctatttcagtacttcagcaagagagaacctaactgtatcttgaggtggtagtaaaacacagagggccagtaacgggtcgtaatgacttattgtggataacaaagatatcttttctttagagaactgaaaagagagcagagaatataacatgaaatgatagatttgacctcctccctgttattttcaagtagctgggattttaaactagatgacctcattaaccgatgctttaccaaacagcaaaccaagagattgctaattgctgttgaaagcaaaaatgctaatattaaaagtcacaatgttctttatatacaataatggaaaaaaaaaaaagaggaaaaccctcaagggcatgagcattggatacagcagtagacattttaacaagaagatgaatggcgtccgtgggttgctaactgaactttgaagacccgctacaaaacgcgcagatgtgcagcagattggaaggagacacagatgttcggtttttttcctgtttctgaaaagaaataataatatccaggtcaacagaatgaaaaatgaaagatgatttgcaatgggatgtatgaatacagcagcaagaaaaaaaaatgccataatacaaaaggctccatatatatatatatatatatatatatacacacacacacacgcacatatacacacacacacacacacacacacacacacacacacacacacacacacacacacaagtaagagactcagcctgcagttaattagcattctggcagttttgacatcagccagctgccctaaataacccttcaacgtttcttcacttttgcaaggttccacagagtaagacattgggtctattccagctcattcattttatattgaaaaaaataattttaaaaatggtggcttcagctccagcccctttccaaaatttttcaaccccaccctgtttggatttttaattaaaaactagtagttctcttggtgttaaaacacttctgtcctgtgaggtttcccaatggtgtttttcttgtaaatgtgttggacaaatgtgaagatgcattgtagtttaaccatatgcccacatttagtctctttattcctagttggtgagaaacctgtatctttctatgctgcttttatatctgtatgtattagtgatatttctctagtagttaaaaaaaaaaaaaggaaaaaaagactctttttggttgtcctcaag

SEQ ID NO: 929 - DNA, 6944 bp, Homo sapiens
gaccgttgcttggcagacactggatggttatgagcctgaacaagctgaaaaggggcaggaaaagaagtggaggcagcattcttcctatttaaagctgcatcgcttgaaaaaagttttcgcagactgtgctggagctggtgctgaaaaagggggtttgcagaggctgccctggggctggtgctgaaagaagagcccacagctgacttcatggtgctacaataacctcagaatctacttttcactctcaggagaacccacatgtctaatatttagacatgatggcaaactgggcggaagcaagacctctcctcattcttattgttttattagggcaatttgtctcaataaaagcccaggaagaagacgaggatgaaggatatggtgaagaaatagcctgcactcagaatggccagatgtacttaaacagggacatttggaaacctgccccttgtcagatctgtgtctgtgacaatggagccattctctgtgacaagatagaatgccaggatgtgctggactgtgccgaccctgtaacgccccctggggaatgctgtcctgtctgttcacaaacacctggaggtggcaataccaattttggtagaggaagaaagggacaaaagggagaaccaggattagtgcctgttgtaacaggcatacgtggtcgtccaggaccggcaggacctccaggatcacagggaccaagaggagagcgagggccaaaaggaagacctgagagagagggagaggccctcgtggacctcagggaattgatggagaaccaggtgttcctggtcaacctggtgctccaggacctcctggacatccgtcccacccaggacccgatggcttgagcaggccgttttcagctcaaatggctgggttggatgaaaaatctggacttgggagtcaagtaggactaatgcctggctctgtgggtcctgttggcccaaggggaccacagggtttacaaggacagcaaggtggtgcaggacctacaggacctcctggtgaacctggtgatcctggaccaatgggtccgattggttcacgtggaccagagggccctcctggtaaacctggggaagatggtgaacctggcagaaatggaaatcctggtgaagtgggatttgcaggatctccgggagctcgtggatttcctggggctcctggtcttccaggtctgaagggtcaccgaggacacaaaggtcttgaaggccctaaaggtgaagttggagcacctggttccaagggtgaagctggccccactggtccaatgggtgccatgggtcctctgggtccgaggggaatgccaggagagagagggagacttgggccacagggtgctcctggacaacgaggtgcacatggtatgcctggaaaacctggaccaatgggtcctcttgggataccaggctcttctggttttccaggaaatcctggaatgaagggagaagcaggtcctacaggggcgcgaggccctgaaggtcctcaggggcagagaggtgaaactgggcccccaggtccagttggctctccaggtcttcctggtgcaataggaactgatggtactcctggtgccaaaggcccaacgggctctccaggtacctctggtcctcctggctcagcagggcctcctggatctccaggacctcagggtagcactggtcctcagggaattcgaggccaaccgggtgatccaggagttccaggtttcaaaggagaagctggcccaaaaggggaaccagggccacatggtattcagggtccgataggcccacccggtgaagaaggcaaaagaggtcccagaggtgacccaggaacagttggtcctccagggccagtgggagaaaggggtgctcctggcaatcgtggttttccaggctctgatggtttacctgggccaaagggtgctcaaggagaacggggtcctgtaggttcttcaggacccaaaggaagccagggggatccaggacgtccaggggaacctgggcttccaggtgctcggggtttgacaggaaatcctggtgttcaaggtcctgaaggaaaacttggacctttgggtgcgccaggggaagatggccgtccaggtcctccaggctccataggaatcagagggcagcccgggagcatgggccttccaggccccaaaggtagcagtggtgaccctgggaaacctggagaagcaggaaatgctggagttcctgggcagaggggagctcctggaaaagatggtgaagttggtccttctggtcctgtgggcccgccgggtctagctggtgaaagaggagaacaaggacctccaggccccacaggttttcaggggcttcctggtcctccagggcctcctggagaaggtggaaaaccaggtgatcaaggtgttcctggagatcccggagcagttggcccgttaggacctagaggagaacgaggaaatcctggggaaagaggagaacctgggataactggactccctggtgagaagggaatggctggaggacatggtcctgatggcccaaaaggcagtccaggtccatctgggacccctggagatacaggcccaccaggtcttcaaggtatgccgggagaaagaggaattgcaggaactcctggccccaagggtgacagaggtggcataggagaaaaaggtgctgaaggcacagctggaaatgatggtgcaagaggtcttccaggtcctttgggccctccaggtccggcaggtcctactggagaaaagggtgaacctggtcctcgaggtttagttggccctcctggctcccggggcaatcctggttctcgaggtgaaaatgggccaactggagctgttggttttgccggaccccagggtcctgacggacagcctggagtaaaaggtgaacctggagagccaggacagaagggagatgctggttctcctggaccacaaggtttagcaggatcccctggccctcatggtcctaatggtgttcctggactaaaaggtggtcgaggaacccaaggtccgcctggtgctacaggatttcctggttctgcgggcagagttggacctccaggccctgctggagctccaggacctgcgggacccctaggggaacccgggaaggagggacctccaggtcttcgtggggaccctggctctcatgggcgtgtgggagatcgaggaccagctggcccccctggtggcccaggagacaaaggggacccaggagaagatgggcaacctggtccagatggcccccctggtccagctggaacgaccgggcagagaggaattgttggcatgcctgggcaacgtggagagagaggcatgcccggcctaccaggcccagcgggaacaccaggaaaagtaggaccaactggtgcaacaggagataaaggtccacctggacctgtggggcccccaggctccaatggtcctgtaggggaacctggaccagaaggtccagctggcaatgatggtaccccaggacgggatggtgctgttggagaacgtggtgatcgtggagaccctgggcctgcaggtctgccaggctctcagggtgcccctggaactcctggccctgtgggtgctccaggagatgcaggacaaagaggagatccgggttctcggggtcctataggaccacctggtcgagctgggaaacgtggattacctggaccccaaggacctcgtggtgacaaaggtgatcatggagaccgaggtgacagaggtcagaagggccacagaggctttactggtcttcagggtcttcctggccctcctggtccaaatggtgaacaaggaagtgctggaatccctggaccatttggcccaagaggtcctccaggcccagttggtccttcaggtaaagaaggaaaccctgggccacttgggccaattggacctccaggtgtacgaggcagtgtaggagaagcaggacctgagggccctcctggtgagcctggcccacctggccctccgggtccccctggccaccttacagctgctcttggggatatcatggggcactatgatgaaagcatgccagatccacttcctgagtttactgaagatcaggcggctcctgatgacaaaaacaaaacggacccaggggttcatgctaccctgaagtcactcagtagtcagattgaaaccatgcgcagccccgatggctcgaaaaagcacccagcccgcacgtgtgatgacctaaagctttgccattccgcaaagcagagtggtgaatactggattgatcctaaccaaggatctgttgaagatgcaatcaaagtttactgcaacatggaaacaggagaaacatgtatttcagcaaacccatccagtgtaccacgtaaaacctggtgggccagtaaatctcctgacaataaacctgtttggtatggtcttgatatgaacagagggtctcagttcgcttatggagaccaccaatcacctaatacagccattactcagatgacttttttgcgccttttatcaaaagaagcctcccagaacatcacttacatctgtaaaaacagtgtaggatacatggacgatcaagctaagaacctcaaaaaagctgtggttctcaaaggggcaaatgacttagatatcaaagcagagggaaatattagattccggtatatcgttcttcaagacacttgctctaagcggaatggaaatgtgggcaagactgtctttgaatatagaacacagaatgtggcacgcttgcccatcatagatcttgctcctgtggatgttggcggcacagaccaggaattcggcgttgaaattgggccagtttgttttgtgtaaagtaagccaagacacatcgacaatgagcaccaccatcaatgaccaccgccattcacaagaactttgactgtttgaagttgatcctgagactcttgaagtaatggctgatcctgcatcagcattgtatatatggtcttaagtgcctggcctccttatccttcagaatatttattttacttacaatcctcaagttttaattgattttaaatatttttcaatacaacagtttaggtttaagatgaccaatgacaatgaccacctttgcagaaagtaaactgattgaataaataaatctccgttttcttcaatttatttcagtgtaatgaaaaagttgcttagtatttatgaggaaattcttcttcctggcaggtagcttaaagagtggggtatatagagccacaacacatgtttattttgcttggctgcagttgaaaaatagaaattagtgcccttttgtgacctctcattccaagattgtcaattaaaaatgagtttaaaatgtttaacttgtgatcgagacctacatgcatgtcttgatattgtgtaactataatagagactctttaaggagaatcttaaaaaaaaaaaaacgtttctcactgtcttaaatagaatttttaaatagtatatattcagtggcattttggagaacaaagtgaatttacttcgacttcttaaatttttgtaaaagactataagtttagacatctttctcattcaaatttaaagatatctttctcctcttgatcaatctatcaatattgatagaagtcacactagtatataccatttaatacatttacactttcttatttaagaagatattgaatgcaaaataattgacatatagaactttacaaacatatgtccaaggactctaaattgagactcttccacatgtacaatctcatcatcctgaagcctataatgaagaaaaagatctagaaactgagttgtggagctgactctaatcaaatgtgatgattggaattagaccatttggcctttgaactttcataggaaaaatgacccaacatttcttagcatgagctacctcatctctagaagctgggatggacttactattcttgtttatattttagatactgaaaggtgctatgcttctgttattattccaagactggagataggcagggctaaaaaggtattattatttttcctttaatgatggtgctaaaattcttcctataaaattccttaaaaataaagatggtttaatcactaccattgtgaaaacataactgttagacttcccgtttctgaaagaaagagcatcgttccaatgcttgttcactgttcctctgtcatactgtatctggaatgctttgtaatacttgcatgcttcttagaccagaacatgtaggtccccttgtgtctcaatactttttttttcttaattgcatttgttggctctattttaatttttttcttttaaaataaacagctgggaccatcccaaaagacaagccatgcatacaactttggtcatgtatctctgcaaagcatcaaattaaatgcacgcttttgtcatgtcagtggtttttgttttgtgaaattcctttgaccatattagatctatttcatttccaatagtgaaaaggagatgtggtggtatactttgtttgccatttgtttaaaagatacaacggataccttctatcatgtatgtactggcttataaatgaaaatctatctacaacattacccacaaaggcaacatgacaccaattatcactgcctctgcccttaaaaatgtcagagtagtattattgataaaaagggcaagcaatagatttttcatgactgaataaactgtaataataaaacatatgtctcaaagtgtatcacatatgaatttagcctaattgttttcagtttcattctcaatatttagtttacaacatcattttcccctaaactggttatattttgacctgtatatcttaaatttgagtatttatatgcctaaatacatgtgtgagttttgtttgacttccaagtccaaactataagattatataagttcatatagatgaatcagaaatatgtggtaatactattaagtcacaaacactaacaatttccaactatagaaataacagttcttatttggattttgggaatgctaccaata

SEQ ID NO: 930 - DNA, 11729 bp, Homo sapiens
gctgccccgagcctttctggggaagaactccaggcgtgcggacgcaacagccgagaacattaggtgttgtggacaggagctgggaccaagatcttcggccagccccgcatcctcccgcatcttccagcaccgtcccgcaccctccgcatccttccccgggccaccacgcttcctatgtgacccgcctgggcaacgccgaacccagtcgcgcagcgctgcagtgaattttccccccaaactgcaataagccgccttccaaggccaagatgttcataaatataaagagcatcttatggatgtgttcaaccttaatagtaacccatgcgctacataaagtcaaagtgggaaaaagcccaccggtgaggggctccctctctggaaaagtcagcctaccttgtcatttttcaacgatgcctactttgccacccagttacaacaccagtgaatttctccgcatcaaatggtctaagattgaagtggacaaaaatggaaaagatttgaaagagactactgtccttgtggcccaaaatggaaatatcaagattggtcaggactacaaagggagagtgtctgtgcccacacatcccgaggctgtgggcgatgcctccctcactgtggtcaagctgctggcaagtgatgcgggtctttaccgctgtgacgtcatgtacgggattgaagacacacaagacacggtgtcactgactgtggatggggttgtgtttcactacagggcggcaaccagcaggtacacactgaattttgaggctgctcagaaggcttgtttggacgttggggcagtcatagcaactccagagcagctctttgctgcctatgaagatggatttgagcagtgtgacgcaggctggctggctgatcagactgtcagatatcccatccgggctcccagagtaggctgttatggagataagatgggaaaggcaggagtcaggacttatggattccgttctccccaggaaacttacgatgtgtattgttatgtggatcatctggatggtgatgtgttccacctcactgtccccagtaaattcaccttcgaggaggctgcaaaagagtgtgaaaaccaggatgccaggctggcaacagtgggggaactccaggcggcatggaggaacggctttgaccagtgcgattacgggtggctgtcggatgccagcgtgcgccaccctgtgactgtggccagggcccagtgtggaggtggtctacttggggtgagaaccctgtatcgttttgagaaccagacaggcttccctccccctgatagcagatttgatgcctactgctttaaacgtaagtgtttgatacctttttaaaaattacagttttaaaaaaaatgcttcgaagcatgcattgatgttcaactagccgttggagtggattccatgtcttgcagtgtgtgcacggaatggaaacagttcagtgattttcaaaagcaagcaaactgaacagcagtgatatggttaaaaccacaggaattttggcaaatggatttttagaggggtgaggaaatatcaggttaagctgtaactgtgctctgttgtgtccagagccacagagcatttttctaagtattttatattaattgcagtccttaagttttgcaatttgtttattggtgttacaatgccaaggccaactgaggctgagttaaatccttaagattgttgattttgtcttcggtatcactctgtttctttgagatggcaaagaatttaaatttcagtaattacaggtgagtatttgaagctgacatggatactcaaaatgttcaagtcataactaaaaatgaaccatactatcaataaaaatctccatttatgtcaagtaatggaaactaaagaggctacaaccatcgatttgagtatcctcgcagaaactgcatcacccagtttatccaaagaaccacaaatggtttctgatagaactacaccaatcatccctttagttgatgaattacctgtcattccaacagagttccctcccgtgggaaatattgtcagttttgaacagaaagccacagtccaacctcaggctatcacagatagtttagccaccaaattacccacacctactggcagtaccaagaagccctgggatatggatgactactcaccttctgcttcaggacctcttggaaagctagacatatcagaaattaaggaagaagtgctccagagtacaactggcgtctctcattatgctacggattcatgggatggtgtcgtggaagataaacaaacacaagaatcggttacacagattgaacaaatagaagtgggtcctttggtaacatctatggaaatcttaaagcacattccttccaaggaattccctgtaactgaaacaccattggtaactgcaagaatgatcctggaatccaaaactgaaaagaaaatggtaagcactgtttctgaattggtaaccacaggtcactatggattcaccttgggagaagaggatgatgaagacagaacacttacagttggatctgatgagagcaccttgatctttgaccaaattcctgaagtcattacggtgtcaaagacttcagaagacaccatccacactcatttagaagacttggagtcagtctcagcatccacaactgtttcccctttaattatgcctgataataatggatcatccatggatgactgggaagagagacaaactagtggtaggataacggaagagtttcttggcaaatatctgtctactacaccttttccatcacagcatcgtacagaaatagaattgtttccttattctggtgataaaatattagtagagggaatttccacagttatttatccttctctacaaacagaaatgacacatagaagagaaagaacagaaacactaataccagagatgagaacagatacttatacagatgaaatacaagaagagatcactaaaagtccatttatgggaaaaacagaagaagaagtcttctctgggatgaaactctctacatctctctcagagccaattcatgttacagagtcttctgtggaaatgaccaagtcttttgatttcccaacattgataacaaagttaagtgcagagccaacagaagtaagagatatggaggaagactttacagcaactccaggtactacaaaatatgatgaaaatattacaacagtgcttttggcccatggtactttaagtgttgaagcagccactgtatcaaaatggtcatgggatgaagataatacaacatccaagcctttagagtctacagaaccttcagcctcttcaaaattgccccctgccttactcacaactgtggggatgaatggaaaggataaagacatcccaagtttcactgaagatggagcagatgaatttactcttattccagatagtactcaaaagcagttagaggaggttactgatgaagacatagcagcccatggaaaattcacaattagatttcagccaactacatcaactggtattgcagaaaagtcaactttgagagattctacaactgaagaaaaagttccacctatcacaagcactgaaggccaagtttatgcaaccatggaaggaagtgctttgggtgaagtagaagatgtggacctctctaagccagtatctactgttccccaatttgcacacacttcagaggtggaaggattagcatttgttagttatagtagcacccaagagcctactacttatgtagactcttcccataccattcctctttctgtaattcccaagacagactggggagtgttagtaccttctgttccatcagaagatgaagttctaggtgaaccctctcaagacatacttgtcattgatcagactcgccttgaagcgactatttctccagaaactatgagaacaacaaaaatcacagagggaacaactcaggaagaattcccttggaaagaacagactgcagagaaaccagttcctgctctcagttctacagcttggactcccaaggaggcagtaacaccactggatgaacaagagggcgatggatcagcatatacagtctctgaagatgaattgttgacaggttctgagagggtcccagttttagaaacaactccagttggaaaaattgatcacagtgtgtcttatccaccaggtgctgtaactgagcacaaagtgaaaacagatgaagtggtaacactaacaccacgcattgggccaaaagtatctttaagtccagggcctgaacaaaaatatgaaacagaaggtagtagtacaacaggatttacatcatctttgagtccttttagtacccacattacccagcttatggaagaaaccactactgagaaaacatccctagaggatattgatttaggctcaggattatttgaaaagcccaaagccacagaactcatagaattttcaacaatcaaagtcacagttccaagtgatattaccactgccttcagttcagtagacagacttcacacaacttcagcattcaagccatcttccgcgatcactaagaaaccacctctcatcgacagggaacctggtgaagaaacaaccagtgacatggtaatcattggagaatcaacatctcatgttcctcccactacccttgaagatattgtagccaaggaaacagaaaccgatattgatagagagtatttcacgacttcaagtcctcctgctacacagccaacaagaccacccactgtggaagacaaagaggcctttggacctcaggcgctttctacgccacagcccccagcaagcacaaaatttcaccctgacattaatgtttatattattgaggtcagagaaaataagacaggtcgaatgagtgatttgagtgtaattggtcatccaatagattcagaatctaaagaagatgaaccttgtagtgaagaaacagatccagtgcatgatctaatggctgaaattttacctgaattccctgacataattgaaatagacctataccacagtgaagaaaatgaagaagaagaagaagagtgtgcaaatgctactgatgtgacaaccaccccatctgtgcagtacataaatgggaagcatctcgttaccactgtgcccaaggacccagaagctgcagaagctaggcgtggccagtttgaaagtgttgcaccttctcagaatttctcggacagctctgaaagtgatactcatccatttgtaatagccaaaacggaattgtctactgctgtgcaacctaatgaatctacagaaacaactgagtctcttgaagttacatggaagcctgagacttaccctgaaacatcagaacatttttcaggtggtgagcctgatgttttccccacagtcccattccatgaggaatttgaaagtggaacagccaaaaaaggggcagaatcagtcacagagagagatactgaagttggtcatcaggcacatgaacatactgaacctgtatctctgtttcctgaagagtcttcaggagagattgccattgaccaagaatctcagaaaatagcctttgcaagggctacagaagtaacatttggtgaagaggtagaaaaaagtacttctgtcacatacactcccactatagttccaagttctgcatcagcatatgtttcagaggaagaagcagttaccctaataggaaatccttggccagatgacctgttgtctaccaaagaaagctgggtagaagcaactcctagacaagttgtagagctctcagggagttcttcgattccaattacagaaggctctggagaagcagaagaagatgaagatacaatgttcaccatggtaactgatttatcacagagaaatactactgatacactcattactttagacactagcaggataatcacagaaagcttttttgaggttcctgcaaccaccatttatccagtttctgaacaaccttctgcaaaagtggtgcctaccaagtttgtaagtgaaacagacacttctgagtggatttccagtaccactgttgaggaaaagaaaaggaaggaggaggagggaactacaggtacggcttctacatttgaggtatattcatctacacagagatcggatcaattaattttaccctttgaattagaaagtccaaatgtagctacatctagtgattcaggtaccaggaaaagttttatgtccttgacaacaccaacacagtctgaaagggaaatgacagattctactcctgtctttacagaaacaaatacattagaaaatttgggggcacagaccactgagcacagcagtatccatcaacctggggttcaggaagggctgaccactctcccacgtagtcctgcctctgtctttatggagcagggctctggagaagctgctgccgacccagaaaccaccactgtttcttcattttcattaaacgtagagtatgcaattcaagccgaaaaggaagtagctggcactttgtctccgcatgtggaaactacattctccactgagccaacaggactggttttgagtacagtaatggacagagtagttgctgaaaatataacccaaacatccagggaaatagtgatttcagagcgattaggagaaccaaattatggggcagaaataaggggcttttccacaggttttcctttggaggaagatttcagtggtgactttagagaatactcaacagtgtctcatcccatagcaaaagaagaaacggtaatgatggaaggctctggagatgcagcatttagggacacccagacttcaccatctacagtacctacttcagttcacatcagtcacatatctgactcagaaggacccagtagcaccatggtcagcacttcagccttcccctgggaagagtttacatcctcagctgagggctcaggtgagcaactggtcacagtcagcagctctgttgttccagtgcttcccagtgctgtgcaaaagttttctggtacagcttcctccattatcgacgaaggattgggagaagtgggtactgtcaatgaaattgatagaagatccaccattttaccaacagcagaagtggaaggtacgaaagctccagtagagaaggaggaagtaaaggtcagtggcacagtttcaacaaactttccccaaactatagagccagccaaattatggtctaggcaagaagtcaaccctgtaagacaagaaattgaaagtgaaacaacatcagaggaacaaattcaagaagaaaagtcatttgaatcccctcaaaactctcctgcaacagaacaaacaatctttgattcacagacatttactgaaactgaactcaaaaccacagattattctgtactaacaacaaagaaaacttacagtgatgataaagaaatgaaggaggaagacacttctttagttaacatgtctactccagatccagatgcaaatggcttggaatcttacacaactctccctgaagctactgaaaagtcacattttttcttagctactgcattagtaactgaatctataccagctgaacatgtagtcacagattcaccaatcaaaaaggaagaaagtacaaaacattttccgaaaggcatgagaccaacaattcaagagtcagatactgagctcttattctctggactgggatcaggagaagaagttttacctactctaccaacagagtcagtgaattttactgaagtggaacaaatcaataacacattatatccccacacttctcaagtggaaagtacctcaagtgacaaaattgaagactttaacagaatggaaaatgtggcaaaagaagttggaccactcgtatctcaaacagacatctttgaaggtagtgggtcagtaaccagcacaacattaatagaaattttaagtgacactggagcagaaggacccacggtggcacctctccctttctccacggacatcggacatcctcaaaatcagactgtcaggtgggcagaagaaatccagactagtagaccacaaaccataactgaacaagactctaacaagaattcttcaacagcagaaattaacgaaacaacaacctcatctactgattttctggctagagcttatggttttgaaatggccaaagaatttgttacatcagcaccaaaaccatctgacttgtattatgaaccttctggagaaggatctggagaagtggatattgttgattcatttcacacttctgcaactactcaggcaaccagacaagaaagcagcaccacatttgtttctgatgggtccctggaaaaacatcctgaggtgccaagcgctaaagctgttactgctgatggattcccaacagtttcagtgatgctgcctcttcattcagagcagaacaaaagctcccctgatccaactagcacactgtcaaatacagtgtcatatgagaggtccacagacggtagtttccaagaccgtttcagggaattcgaggattccaccttaaaacctaacagaaaaaaacccactgaaaatattatcatagacctggacaaagaggacaaggatttaatattgacaattacagagagtaccatccttgaaattctacctgagctgacatcggataaaaatactatcatagatattgatcatactaaacctgtgtatgaagacattcttggaatgcaaacagatatagatacagaggtaccatcagaaccacatgacagtaatgatgaaagtaatgatgacagcactcaagttcaagagatctatgaggcagctgtcaacctttctttaactgaggaaacatttgagggctctgctgatgttctggctagctacactcaggcaacacatgatgaatcaatgacttatgaagatagaagccaactagatcacatgggctttcacttcacaactgggatccctgctcctagcacagaaacagaattagacgttttacttcccacggcaacatccctgccaattcctcgtaagtctgccacagttattccagagattgaaggaataaaagctgaagcaaaagccctggatgacatgtttgaatcaagcactttgtctgatggtcaagctattgcagaccaaagtgaaataataccaacattgggccaatttgaaaggactcaggaggagtatgaagacaaaaaacatgctggtccttcttttcagccagaattctcttcaggagctgaggaggcattagtagaccatactccctatctaagtattgctactacccaccttatggatcagagtgtaacagaggtgcctgatgtgatggaaggatccaatcccccatattacactgatacaacattagcagtttcaacatttgcgaagttgtcttctcagacaccatcatctcccctcactatctactcaggcagtgaagcctctggacacacagagatcccccagcccagtgctctgccaggaatagacgtcggctcatctgtaatgtccccacaggattcttttaaggaaattcatgtaaatattgaagcgactttcaaaccatcaagtgaggaataccttcacataactgagcctccctctttatctcctgacacaaaattagaaccttcagaagatgatggtaaacctgagttattagaagaaatggaagcttctcccacagaacttattgctgtggaaggaactgagattctccaagatttccaaaacaaaaccgatggtcaagtttctggagaagcaatcaagatgtttcccaccattaaaacacctgaggctggaactgttattacaactgccgatgaaattgaattagaaggtgctacacagtggccacactctacttctgcttctgccacctatggggtcgaggcaggtgtggtgccttggctaagtccacagacttctgagaggcccacgctttcttcttctccagaaataaaccctgaaactcaagcagctttaatcagagggcaggattccacgatagcagcatcagaacagcaagtggcagcgagaattcttgattccaatgatcaggcaacagtaaaccctgtggaatttaatactgaggttgcaacaccaccattttcccttctggagacttctaatgaaacagatttcctgattggcattaatgaagagtcagtggaaggcacggcaatctatttaccaggacctgatcgctgcaaaatgaacccgtgccttaacggaggcacctgttatcctactgaaacttcctacgtatgcacctgtgtgccaggatacagcggagaccagtgtgaacttgattttgatgaatgtcactctaatccctgtcgtaatggagccacttgtgttgatggttttaacacattcaggtgcctctgccttccaagttatgttggtgcactttgtgagcaagataccgagacatgtgactatggctggcacaaattccaagggcagtgctacaaatactttgcccatcgacgcacatgggatgcagctgaacgggaatgccgtctgcagggtgcccatctcacaagcatcctgtctcacgaagaacaaatgtttgttaatcgtgtgggccatgattatcagtggataggcctcaatgacaagatgtttgagcatgacttccgttggactgatggcagcacactgcaatacgagaattggagacccaaccagccagacagcttcttttctgctggagaagactgtgttgtaatcatttggcatgagaatggccagtggaatgatgttccctgcaattaccatctcacctatacgtgcaagaaaggaacagtcgcttgcggccagccccctgttgtagaaaatgccaagacctttggaaagatgaaacctcgttatgaaatcaactccctgattagataccactgcaaagatggtttcattcaacgtcaccttccaactatccggtgcttaggaaatggaagatgggctatacctaaaattacctgcatgaacccatctgcataccaaaggacttattctatgaaatactttaaaaattcctcatcagcaaaggacaattcaataaatacatccaaacatgatcatcgttggagccggaggtggcaggagtcgaggcgctgatccctaaaatggcgaacatgtgttttcatcatttcagccaaagtcctaacttcctgtgcctttcctatcacctcgagaagtaattatcagttggtttggatttttggaccaccgttcagtcattttgggttgccgtgctcccaaaacattttaaatgaaagtattggcattcaaaaagacagcagacaaaatgaaagaaaatgagagcagaaagtaagcatttccagcctatctaatttctttagttttctatttgcctccagtgcagtccatttcctaatgtataccagcctactgtactatttaaaatgctcaatttcagcaccgatggccatgtaaataagatgatttaatgttgattttaatcctgtatataaaataaaaagtcacaatgagtttgggcatatttaatgatgattatggagccttagaggtctttaatcattggttcggctgcttttatgtagtttaggctggaaatggtttcacttgctctttgactgtcagcaagactgaagatggcttttcctggacagctagaaaacacaaaatcttgtaggtcattgcacctatctcagccataggtgcagtttgcttctacatgatgctaaaggctgcgaatgggatcctgatggaactaaggactccaatgtcgaactcttctttgctgcattcctttttcttcacttacaagaaaggcctgaatggaggacttttctgtaaccagg

SEQ ID NO: 931 - DNA, 120 bp, Homo sapiens
atactctggtttctcttcaaatcgtataaatctttcgccttttactaaagatttccgtggagagaaacgagtgtgagtctgaaaccaattttttgaggccttgcgtttcttagcagggct

SEQ ID NO: 932 - DNA, 9046 bp, Homo sapiens
cttgactcaatcctgcaagcaagtgtgtgtgtgtccccatcccccgccccgttaacttcatagcaaataacaaatacccataaagtcccagtcgcgcagcccctccccgcgggcagcgcactatgctgctcgggtgggcgtccctgctgctgtgcgcgttccgcctgcccctggccgcggtcggccccgccgcgacacctgcccaggataaagccgggcagcctccgactgctgcagcagccgcccagccccgccggcggcagggggaggaggtgcaggagcgagccgagcctcccggccacccgcaccccctggcgcagcggcgcaggagcaaggggctggtgcagaacatcgaccaactctactccggcggcggcaaggtgggctacctcgtctacgcgggcggccggaggttcctcttggacctggagcgagatggttcggtgggcattgctggcttcgtgcccgcaggaggcgggacgagtgcgccctggcgccaccggagccactgcttctatcggggcacagtggacggtagtccccgctctctggctgtctttgacctctgtgggggtctcgacggcttcttcgcggtcaagcacgcgcgctacaccctaaagccactgctgcgcggaccctgggcggaggaagaaaaggggcgcgtgtacggggatgggtccgcacggatcctgcacgtctacacccgcgagggcttcagcttcgaggccctgccgccgcgcgccagctgcgaaacccccgcgtccacaccggaggcccacgagcatgctccggcgcacagcaacccgagcggacgcgcagcactggcctcgcagctcttggaccagtccgctctctcgcccgctgggggctcaggaccgcagacgtggtggcggcggcggcgccgctccatctcccgggcccgccaggtggagctgcttctggtggctgacgcgtccatggcgcggttgtatggccggggcctgcagcattacctgctgaccctggcctccatcgccaataggctgtacagccatgctagcatcgagaaccacatccgcctggccgtggtgaaggtggtggtgctaggcgacaaggacaagagcctggaagtgagcaagaacgctgccaccacactcaagaacttttgcaagtggcagcaccaacacaaccagctgggagatgaccatgaggagcactacgatgcagctatcctgtttactcgggaggatttatgtgggcatcattcatgtgacaccctgggaatggcagacgttgggaccatatgttctccagagcgcagctgtgctgtgattgaagacgatggcctccacgcagccttcactgtggctcacgaaatcggacatttacttggcctctcccatgacgattccaaattctgtgaagagacctttggttccacagaagataagcgcttaatgtcttccatccttaccagcattgatgcatctaagccctggtccaaatgcacttcagccaccatcacagaattcctggatgatggccatggtaactgtttgctggacctaccacgaaagcagatcctgggccccgaagaactcccaggacagacctacgatgccacccagcagtgcaacctgacattcgggcctgagtactccgtgtgtcccggcatggatgtctgtgctcgcctgtggtgtgctgtggtacgccagggccagatggtctgtctgaccaagaagctgcctgcggtggaagggacgccttgtggaaaggggagaatctgcctgcagggcaaatgtgtggacaaaaccaagaaaaaatattattcaacgtcaagccatggcaactggggatcttggggatcctggggccagtgttctcgctcatgtggaggaggagtgcagtttgcctatcgtcactgtaataaccctgctcccagaaacaacggacgctactgcacagggaagagggccatctaccgctcctgcagtctcatgccctgcccacccaatggtaaatcatttcgtcatgaacagtgtgaggccaaaaatggctatcagtctgatgcaaaaggagtcaaaacttttgtggaatgggttcccaaatatgcaggtgtcctgccagcggatgtgtgcaagctgacctgcagagccaagggcactggctactatgtggtattttctccaaaggtgaccgatggcactgaatgtaggctgtacagtaattccgtctgcgtccgggggaagtgtgtgagaactggctgtgacggcatcattggctcaaagctgcagtatgacaagtgcggagtatgtggaggagacaactccagctgtacaaagattgttggaacctttaataagaaaagtaagggttacactgacgtggtgaggattcctgaaggggcaacccacataaaagttcgacagttcaaagccaaagaccagactagattcactgcctatttagccctgaaaaagaaaaacggtgagtaccttatcaatggaaagtacatgatctccacttcagagactatcattgacatcaatggaacagtcatgaactatagcggttggagccacagggatgacttcctgcatggcatgggctactctgccacgaaggaaattctaatagtgcagattcttgcaacagaccccactaaaccattagatgtccgttatagcttttttgttcccaagaagtccactccaaaagtaaactctgtcactagtcatggcagcaataaagtgggatcacacacttcgcagccgcagtgggtcacgggcccatggctcgcctgctctaggacctgtgacacaggttggcacaccagaacggtgcagtgccaggatggaaaccggaagttagcaaaaggatgtcctctctcccaaaggccttctgcgtttaagcaatgcttgttgaagaaatgttagcctgtggttatgatcttatgcacaaagataactggaggattcagcactgatgcagtcgtggtgaacaggaggtctacctaacgcacagaaagtcatgcttcagtgacattgtcaacaggagtccaattatgggcagaatctgctctctgtgaccaaaagaggatgtgcactgcttcacgtgacagtggtgaccttgcaatatagaaaaacttgggagttattgaacatcccctgggcttacaagaaacactgatgaatgtaaaatcaggggacatttgaagatggcagaactgtctcccccttgtcacctacctctgatagaatgtctttaatggtatcataatcattttcacccataatacacagtagcttcttcttactgtttgtaaatacattctcccttggtatgtcactttatatcccctggttctattaaaatatccatatatatttctataaaaaaagtgtttgaccaaagtaggtctgcagctatttcaacttccttccgtttccagaaagagctgtggatattttactggaaattaagaacttgctgctgttttaataagatgtagtatattttctgactacaggagataaaatttcagtcaaaaaaccattttgacagcaagtatcttctgagaaattttgaaaagtaaatagatctcagtgtatctagtcacttaaatacatacacgggttcatttacttaaacctttgactgcctgtatttttttcaggtagctagccaaattaatgcataatttcagatgtagaagtagggtttgcgtgtgtgtgtgtgatcatactcaagagtctaaaaactagtttccttgtgttggaaatttaaaaggaaaaaaatcgtatttcactgtgttttcaatttatattttcacaactactttctctctccagagctttcatctgatatctcacaatgtatgatatacgtacaaaacacacagcaagttttctatcatgtccaacacattcaacactggtatacctcctaccagcaagcctttaaaatgcatttgtgtttgcttatttgttttgttcaagggttcagtaagacctacaatgttttgtatttcttgacttattttattagaaacattaaagatcacttggtagttagccacattgagaagtggttatcattgttaatgtggttaatgccaaaaagtggttaatattaataagactgtttccacaccataggcaataatttcttaatttaaaaaatctaagtatattcctattgtactaaatatttttcccaactggaaagcacttgattgtacccgtaagtgtttgagtgatgacatgtgatgattttcagaaagttgttgtttttgtttccatagcctgtttaagtaggttgtaagtttgaatagttagacatggaaattattttataagcacacacctaaagatatctttttagatgataaaatgtacacccccccatcaccaacctcacaacttagaaaatctaagttgtttgatttctttgggatttcttttgttgtgaaacactgcaaagccaatttttctttataaaaattcatagtaatcctgccaaatgtgcctattgttaaagatttgcatgtgaagatcttagggaaccactgtttgagttctacaagctcatgagagtttatttttattataagatgtttttaatataaaagaattatgtaactgatcactatattacatcatttcagtgggccaggaaaatagatgtcttgctgttttcagtattttcttaagaaattgcttttaaaacaaataattgttttacaaaaccaataattatcctttgaattttcatagactgactttgcttttgacgtagaaattttttttctcaataaattatcactttgagaaatgaggcctgtacaaggctgataacctatatgtgatggagatcacccaatgccaagggcagaaagcaaacctagttaaataggtgagaaaaaaaataataatcccagtgccatttgtctgtgcaaagagaattaggagagaggttaatgttacttttttccattttggaaataattttaatcaagtaactcaaatgtgacaaaatttatttttattttttgtggttatattcccaacaacattaaaaaatactcgaggcataaatgtagttgtctcctactctgcttctcttactatactcatacatttttaatatggtttatcaatgattcatgtttccctcaaatagtgatggtttacacctgtcatggaaacaatcctagagagctcagagcaattaaaccactattccatgcttttaagtagttttctccacctttttcttatgagtctcactagattgactgaggaatgtatgtctaaattcctggagaagatgatatggattggaaactgaaattcagagaaatggagtgttcaatagataccacgaattgtgaacaaagggaaaattctatacaactcaatctaagtcagtccactttgacttcgtactgtctttcacctttccattgttgcatcttgaattttttaaaatgtctagaattcaggatgctaggggctacttctttaaaaaaaaaaaaaaaaaagaattcgtctgaaaatgctcaggtttgtaagaatctaatctcacttacataactaagcactccataataagttttattaagtacaaagggagccagaaaaaatgacatttatttcttctagatcagaaaaatttaaattaagccctgccttgctgtttagaaatatgtgggcattgttataatttattcaataaatttatgttcctttgccttcctgtggaaacagttttatcccactaaactaggaattaggggataaatcacaaacaaaaaaaaagttgcagcactgaaaaaaagtaatttattgtttttgcaactggtatgtgaatttgtgtgataaaattatttattcttatttaacaaaaatatgttcaaatttttctatatttaaaatgttttgctgttgtcctactttttaatttatgcttcatgtttgtgtataaagtacacttttacactttgtgagtttacataatatacagcactggttgcttttgtatttttttacagaaagctttctgtgtgaagcaggtgtatatgtatatattcctcatgtattcttattctgatactatcatttttctttccaaggaaattttaatctgtcatgaccaatagtgttcattacttgtgcctatgataataggttttttacatcacattaacactattttttccaagtcacaaataagaaaaacacttattcaatgaaacaaggtgcaagttttaaatttgggtacacaaatagcctagaagcttcctacagacgctaagacacagccaataatcagatcctttcacttcatcgagaaacttggacaagtcgatattgatgtattagatgaaagttgtctacacacaacttctgagggatacaaacgataataaaaccaaatgttgtctgtttctcctttagaaacacctcctaaaattaatatcatttagtctctagtgtctgtaggattctacagatgagcacaaatagattgggtttgtataacaaatgctaatagtcataactgtttctacaaatatggggtgtccattaagagaatgtgatgttttcctactgctgttgaatcccatggggtgattataggacttgaaataggcagagtcacctctgatgacatcagcttgcctctgtgatttcacagtctgatcctggcaacaagacaaagcacccttggacacacagccaatctctggttgtgatatttccccattgattccttccttgttaacaaggtcattttaatggttcaggtgaggacagcagccagattcaaagtccagaatttgtgctgttacatagagttcacactgtcaaataacattgaatttaataatgatcaaatttttctagtagtctttggcagagtgtataatctcattggcatgattggtgaatattactaatctctttataatgaaagatgctttacaaataccttatatttgctaacatttcaaaactactaaataaatgaaatagccatgtgtacagaaatggtcatttaaagctttaatagaaccaaattcaagacaatgtatcatttagacacacagaaaaggaacttgtatgttttccctattatttttctcatttgccaacaatctatagttttaggttatcaaacagatagatcaacttaactggctagtacattgaaaaatcttcctaagaatcctttgttagcataatctatagagataatttctcaaattatatcatcatgatgcatataaactctataatgtataattgtgtttcatttatttaatgtatgagaacatattgaaatacaaaaccatgcattagccaaaaaattggaatacaggtagtgttcagatcagcaaaacattcagtctggtaaatgcctgcctggggctatgatatcattctcaatgcaggttttatggaaaaactaaaagaatatgttgttagatgatgttggttttgaaaaaaaaaagacattaacatacacattagttagcccagttaattgcattctactaatatagttgcacattagcaataattttgctgtctctggtctttattttgtggcttcaactaactggaccatgtggactgtaaaggtcaaatggaaaaaacgagcagtggcccctcatcctgtaaggtactgctacatcagagtgacctaaaagtctaacactgtgaggaaaactgtgatttgtaggaaaaaaaaaaaaaacaaataaaaaacagggcatgctttttaatttttttccactttcctttggcacacccaatgaacaattctaatttttattgaggtgctaacatctttcgtgaccgactgtcaaatgtggtatttttgagttactatttttctacatgattttacagtttgcaagaaagacctctaagctttgtgtcacggtagggcacaacttgatactcaaaatttgaaaaataagcacatccaatgattgttttgaccaacagtggtcagtgacgtaaactgcatgtgcatctgaggacatttaaggggtcattaaaatttgaggagcatcaggccggagtagcagacttttagatgagtcatatttcagcattcactaagtcctcagcattccattcaaactgtcgtgtatatttggcctgattttttttcaagctttgcaataatttatgttattggtaaacacttggtgactatatctcagccttttctttaacaactcacaatatattagaaacacgtctacctatactgagagtatatttacaatagaagaacatactgtatgtgactttgtaaagctagacttttgattaagaaatatataatctctggatgctatttttgcattatacactcaggcacaacgtaaaccttgatggctcatcttgctacaattacgagttgaaaaacactacttacgtatttgtatgacctattagtcagaggaaatcatacatatgctttgtaaatagactttgcagataactaaatagactgaagaaatatgttgcatttgatagaagcaattgcataaatatttggtttctatattagagtctgtgagtaaagtcaagtaataaacctaagtaggtataacagatttttaaaccttgaaacttgctttgatggtagagaaaatcattgaagatttacatactgtatataagatgtaaaatgtacgctgcttattaccctcaattttccagaagcaatggtatataatgcagttgaaaaaccaaaaatcttggaaaactaagacgggtcttgtttaaaatgtctctcagctttggcaaccttcaaatcttaatcaactatttaaagcattactgtgtcttgtagcctgcattccacaacagctctgttattcaggtaaaagacttgaactgagccgtttgggacctatactgtaatattttcattgaggaacaatatcctattttgtaaagcatttccctatgtgtgactttaaactgtaaaattaaacactgcttttgtgggttcagtgggcataataaatataaattgtaaacta

SEQ ID NO: 933 - DNA, 11593 bp, Homo sapiens
ggcttcagccctgcagggaaagaaaagtgcaatgattctggactgagacgcgcttgggcagaggctatgtaatcgtgtctgtgttgaggacttcgcttcgaggagggaagaggagggatcggctcgctcctccggcggcggcggcggcggcgactctgcaggcggagtttcgcggcggcggcaccagggttacgccagccccgcggggaggtctctccatccagcttctgcagcggcgaaagccccagcgcccgagcgcctgagccggcggggagcaagtaaagctagaccgatctccggggagccccggagtaggcgagcggcggccgccagctagttgagcgcaccccccgcccgccccagcggcgccgcggcgggcggcgtccaggcggcatggagaaggacggcctgtgccgcgctgaccagcagtacgaatgcgtggcggagatcggggagggcgcctatgggaaggtgttcaaggcccgcgacttgaagaacggaggccgtttcgtggcgttgaagcgcgtgcgggtgcagaccggcgaggagggcatgccgctctccaccatccgcgaggtggcggtgctgaggcacctggagaccttcgagcaccccaacgtggtcaggttgtttgatgtgtgcacagtgtcacgaacagacagagaaaccaaactaactttagtgtttgaacatgtcgatcaagacttgaccacttacttggataaagttccagagcctggagtgcccactgaaaccataaaggatatgatgtttcagcttctccgaggtctggactttcttcattcacaccgagtagtgcatcgcgatctaaaaccacagaacattctggtgaccagcagcggacaaataaaactcgctgacttcggccttgcccgcatctatagtttccagatggctctaacctcagtggtcgtcacgctgtggtacagagcacccgaagtcttgctccagtccagctacgccacccccgtggatctctggagtgttggctgcatatttgcagaaatgtttcgtagaaagcctctttttcgtggaagttcagatgttgatcaactaggaaaaatcttggacgtgattggactcccaggagaagaagactggcctagagatgttgcccttcccaggcaggcttttcattcaaaatctgcccaaccaattgagaagtttgtaacagatatcgatgaactaggcaaagacctacttctgaagtgtttgacatttaacccagccaaaagaatatctgcctacagtgccctgtctcacccatacttccaggacctggaaaggtgcaaagaaaacctggattcccacctgccgcccagccagaacacctcggagctgaatacagcctgaggcctcagcagccgccttaagctgatcctgcggagaacacccttggtggcttatgggtccccctcagcaagccctacagagctgtggaggattgctatctggaggccttccagctgctgtcttctggacaggctctgcttctccaaggaaaccgcctagtttactgttttgaaatcaatgcaagagtgattgcagctttatgttcatttgtttgtttgtttgtctgtttgtttcaagaacctggaaaaattccagaagaagagaagctgctgaccaattgtgctgccatttgatttttctaaccttgaatgctgccagtgtggagtgggtaatccaggcacagctgagttatgatgtaatctctctgcagctgccgggcctgatttggtacttttgagtgtgtgtgtgcatgtgtgtgtgtgtgtgtgtgtgtgtgtgtgtgtatgtgagagattctgtgatcttttaaagtgttactttttgtaaacgacaagaataattcaattttaaagactcaaggtggtcagtaaataacaggcatttgttcactgaaggtgattcaccaaaatagtcttctcaaattagaaagttaaccccatgtcctcagcatttcttttctggccaaaagcagtaaatttgctagcagtaaaagatgaagttttatacacacagcaaaaaggagaaaaaattctagtatattttaagagatgtgcatgcattctatttagtcttcagaatgctgaatttacttgttgtaagtctattttaaccttctgtatgacatcatgctttatcatttcttttggaaaatagcctgtaagctttttattacttgctataggtttagggagtgtacctcagatagattttaaaaaaaagaatagaaagcctttatttcctggtttgaaattcctttcttccctttttttgttgttgttattgttgtttgttgttgttattttgtttttgtttttaggaatttgtcagaaactctttcctgttttggtttggagagtagttctctctaactagagacaggagtggccttgaaattttcctcatctattacactgtactttctgccacacactgccttgttggcaaagtatccatcttgtctatctcccggcacttctgaaatatattgctaccattgtataactaataacagattgcttaagctgttcccatgcaccacctgtttgcttgctttcaatgaacctttcataaattcgcagtctcagcttatggtttatggcctcgattctgcaaacctaacagggtcacatatgttctctaatgcagtccttctacctggtgtttacttttgttacctaaataatgagtaggatcttgttttgttttatcaccagcacacagattgctataaactgttactttgtgaattacatttttatagaagatattttcagtgtctttacctgagggtatgtctttagctatgttttagggccatacatttactctatcaaatgatcttttctccatcccccaggctgtgcttatttctagtgccttgtgctcactcctgctctctacagagccagcctggcctgggcattgtaaacagcttttcctttttctcttactgttttctctacagtcctttatatttcataccatctctgccttataagtggtttagtgctcagttggctctagtaaccagaggacacagaaagtatcttttggaaagtttagccacctgtgctttctgactcagagtgcatgcaacagttagatcatgcaacagttagattatgtttagggttaggattttcaaagaatggaggttgctgcactcagaaaataattcagatcatgtttatgcattattaagttgtactgaattctttgcagcttaatgtgatatatgactatcttgaacaagagaaaaaactaggagatgtttctcctgaagagcttttggggttgggaactattcttttttaattgctgtactacttaacattgttctaattcagtagcttgaggaacaggaacattgttttctagagcaagataataaaggagatgggccatacaaatgttttctactttcgttgtgacaacattgattaggtgttgtcagtactataaatgcttgagatataatgaatccacagcattcaaggtcaggtctactcaaagtctcacatggaaaagtgagttctgcctttcctttgatcgagggtcaaaatacaaagacatttttgctagggcctacaaattgaatttaaaaactcactgcactgattcatctgagctttttggttagtattcatggctagagtgaacatagctttagtttttgctgttgtaaaagtgttttcataagttcactcaagaaaaatgcagctgttctgaactggaatttttcagcattctttagaattttaaatgagtagagagctcaacttttattcctagcatctgcttttgactcatttctaggcagtgcttatgaagaaaaattaaagcacaaacattctggcattcaatcgttggcagattatcttctgatgacacagaatgaaagggcatctcagcctctctgaactttgtaaaaatctgtccccagttcttccatcggtgtagttgttgcatttgagtgaatactctcttgatttatgtattttatgtccagattcgccatttctgaaatccagatccaacacaagcagtcttgccgttagggcattttgaagcagatagtagagtaagaacttagtgactacagcttattcttctgtaacatatggtttcaaacatctttgccaaaagctaagcagtggtgaactgaaaagggcatattgccccaaggttacactgaagcagctcatagcaagttaaaatattgtgacagatttgaaatcatgtttgaatttcatagtaggaccagtacaagaatgtccctgctagtttctgtttgatgtttggttctggcggctcaggcattttgggaactgttgcacagggtggagtcaaaacaacctacatataaaaagagaaaaagagaaacttgtccatttagctttcataagaaatcccatggcaaagggtaataaaaaggacctaatcttaaaaatacaatttctaagcacttgtaagaacccagtgggttggagcctcccactttgtccctcctttgaagtggatgggaactcaaggtgcaaagaacctgttttggaagaaagcttggggccatttcagccccctgtattctcatgattttctctcaggaagcacacactgtgaatggcagacttttcatttagccccaggtgacttactaaaaatagttgaaaattattcacctaagaatagaatctcagcattgtgttaaataaaaatgaaagctttagaaggcatgagatgttcctatcttaaataaagcatgtttcttttctatagagaaatgtatagtttgactctccagaatgtactatccatcttgatgagaaaactcttaaatagtaccaaacattttgaactttaaattatgtatttaaagtgagtgtttaagaaactgtagctgcttcttttacaagtggtgcctattaaagtcagtaatggccattattgttccattgtggaaattaaattatgtaagcttcctaatatcataaacatattaaaattcttctaaaatattgcttttcttttaagtgacaatttgactattcttatgataagcacatgagagtgtcttacattttccaaaagcaggctttaattgcatagttgagtctaggaaaaaataatgttaaaagtgaatatgccaccataattacttaattatgttagtatagaaactacagaatatttaccctggaaagaaaatattggaatgttattataaactcttagatatttatataattcaaaagaatgcatgtttcacattgtgacagataaagatgtatgatttctaaggctttaaaaattattcataaaacagtgggcaatagataaaggaaattctggagaaaatgaaggtatttaaagggtagtttcaaagctatatatattttgaaggatatattctttatgaacaaatatattgtaaaaatttatactaaggtcatctggtaactgtgggattaatatggtcgaaaacaaatgttatggagaagctgtcccaagcaaactaaattacctgtacttttttcccatttcaagggaagaggcaaccacatgaagcaatacttcttacacatgcctaagaacgttcattgaaaaaataaatttttaaaaggcatgtgtttcctatgccaccaatacttttgaaaaattgtgaaccttacccaaaaccatttatcatgtccattaagtatatttgggtatataattaggaagatatttacatgttccatctccacagtggaaaaacttattgaggctaccaaagtgtgccaagaaatgtaagtccttagagtaattagaaatgctgttttcctcaaaagcatgagaaactagcattttcatttcttatttactccctttctatatcaatgcaattcacaacccaattttaatacatccctatatctcaagcatttctatcttgtactttttcagaaaataaaccaaaaataatcctttggtctctctatcttctgacctttgtaagcaacagaaatgtaaaaacagaaggggtccaatttttacacgtttttttctcaagtagcctttctggggatttttattttcttaatgaagtgccaatcagcttttcaaaatgttttctatttctcagcatttccaggaagtgataacgtttagctaaatgagtagaagtggacttccttcaacatattgttaccttgtctagccttaggaagaaaacaagagccacctgaaaataaatacaggctcttttcgagcatctgctgaaatactgttacagcaatttgaagttgatgtggtaggaaaggaaggtgacttttcttgcaaaagtctttctaaacattcacactgtcctaagagatgagctttcttgttttattccggtatattccacaaggtggcacttttagagaaaaacaaatctgatgaagactaaagaggtacttctaaaagagatttcattctaactttatttttctgcgcatatttaactctttcctagcacttgttttttgggatgattaatagtctctataatgttctgtaacttcaatattttacttgttacctaggttctgaacaattgtctgcaaataaattgttcttaaggatggataatacacccattttgatcatttaagtaaagaaagcctagtcattcattcagtcaagaaaaaatttttgaagtacccagttaccttacttttctagattaaaacaggcttagttactaaaaaggcagtcctcatctgtgaacaggatagtttcgttagaagtataaaactcctttagtggccccagttaaaacacacataccctctctgctgctttcaaattccctagcatggtggcctttcaacattgattaaattttaaaatcctaatttaaagatcaggtgagcaaaatgagtagcacatcagtaattcagtagacaaaacttttgtctgaaaaattgctgtattgaaacagagccctaaaataccaaaagaccaggtaattttaacatttgtggaatcacaaatgtaaattcataagaagctctaattaaaaaaaaaaagtctgaagtatatgagcataacaacttaggagtgtgtctacatacttaacttttgaagttttttggcaactttatatactttttttaaatttacaagtctacttaaagacttcttataccccaaatgattaagttaattttagaggtcacctttctcacagcagtgtcacttgaaatttagtagggaaggatattgcagtatttttcagtttccttagcacagcaccacagaaagcagcttattccttttgagtggcagacactcgacggtgcctgcccaactttcctcctgagtggcaagcagatgagtctcagtaattcatactgaaccaaaatgccacatacactaggggcagtcagaaactggctgagaaatcccccgcctcattcgcccctctgctcccaggaactagagtccagttaaagcccctatgcgaaaggccgaattccaccccagggtttgttataacagtggccagtctgaaccccatttgctcgtgctcaaaacttgattcccacttgaaagccttccgggcgcgctgcctcgttgccccgcccctttggcaggagagaggcagtgggcgaggccgggctggggccccgcctcccactcacctgccggtgcctgaaattatgtgcggccccgcgggctgctttccgaggtcagagtgccctgctgctgtctcagaggcatctgttctgcaaatcttaggaagaaaaatgtccctagtagcaaacgggtgtcttctgtgcataaataagtacaacacaattctccgaaagttcgggtaaaaagagatgcggtagcagctgccctgtgtgaagctgtctaccccgcatctctcaggcgctaagctcagtttttgtttttgtttttgtttttttaaagaaaagatgtataattgcaggaatttttttttatttttttattttccatcattctatatatgtgatggtgaaagatatgcctggaaaagttttgttttgaaaagtttattttctgcttcgtcttcagttggcaaaagctctcaattctttagcttccagtttcttttctctctttttctttgttaggtaattaaaggtatgtaaacaaattatctcatgtagcaggggattttcatgttgagaggaatcttccgtgtgagttgtttggtcacacaaataaccctttctcaattttaggagtttggattgtcaaatgtaggtttttctcaaagggggcatataactacatattgactgccaagaactatgactgtagcactaatcagcacacatagagccacacaattatttaatttctaactctctgtggtccctagaaaaattccgttgatgtgcttaggttaaagttctgaagatacccgttgtacccttacttgaaagtttctaatcttaagttttatgaaatgcaataatatgtatcagctagcaatatttctgtgatcaccaacaactctcagtttgatcttaaagtctgaataataaaacaaatcccagcagtaatacatttcttaaacctcacagtgcatgatatatcttttcattctgatcctgtgtttgcaaaaatatacacatgtatatcatagttcctcactttttattcatttgttttcctattacctgtagtaaatatattagttagtacatggaatttatagcatcagctacccccaggaacagcacctgacaggcgggggattttttttcaagttgttctacatttgcataaattatttctattattattcatgtatgttatttatttctgaatcacactagtcctgtgaaagtacaactgaaggcagaaagtgttaggattttgcatctaatgttcattatcatggtattgatggacctaagaaaataaaaattagactaagcccccaaataagctgcatgcatttgtaacatgattagtagatttgaatatatagatgtagtattttgggtatctaggtgttttatcattatgtaaaggaattaaagtaaaggactttgtagttgtttttattaaatatgcatatagtagagtgcaaaaatatagcaaaaataaaaactaaaggtagaaaagcattttagatatgccttaatttagaaactgtgccaggtggccctcggaatagatgccaggcagagaccagtgcctgggtggtgcctcctcttgtctgccctcatgaagaagcttccctcacgtgatgtagtgccctcgtaggtgtcatgtggagtagtgggaacaggcagtactgttgagaggagagcagtgtgagagtttttctgtagaagcagaactgtcagcttgtgccttgaggcttccagaacgtgtcagatggagaagtccaagtttccatgcttcaggcaacttagctgtgtacagaagcaatccagtgtggtaataaaaagcaaggattgcctgtataatttattataaaataaaagggattttaacaaccaacaattcccaacacctcaaaagcttgttgcattttttggtatttgaggtttttatctgaaggttaaagggcaagtgtttggtatagaagagcagtatgtgttaagaaaagaaaaatattggttcacgtagagtgcaaattagaactagaaagttttatacgattatcattttgagatgtgttaaagtaggttttcactgtaaaatgtattagtgtttctgcattgccatagggcctggttaaaactttctcttaggtttcaggaagactgtcacatacagtaagcttttttccttctgacttataatagaaaatgttttgaaagtaaaaaaaaaaaatctaatttggaaatttgacttgttagtttctgtgtttgaaatcatggttctagaaatgtagaaattgtgtatatcagatactcatctaggctgtgtgaaccagcccaagatgaccaacatccccacacctctacatctctgtcccctgtatctcttcctttctaccactaaagtgttccctgctaccatcctggcttgtccacatggtgctctccatcttcctccacatcatggaccacaggtgtgcctgtctaggcctggccaccactcccaacttgacctagccacattcatctagagatggttcctgatgctgggcacagactgtgctcatggcacccattagaaatgcctctagcatctttgtatgcatcttgatttttaaaccaagtcattgtacagagcattcagttttggctgtggtaccaagagaaaaactaatcaagaatataaaccacattccaggctgctgttttctctccatctacaggccacacttttactgtatttcttcatacttgaaattcattctgctattttcatatcagggtacagacttataagggtgcatgttccttaaaggtgcataattattcttattccgtttgcttatattgctacagaatgctctgttttggtgctttgagttctgcagacccaagaagcagtgtggaaattcactgcctgggacacagtcttataagaatgttggcaggtgactttgtatcagatgttgcttctcttttctctgtacacagattgagagttaccacagtggcctgtcgggtccaccctgtgggtgcagcacagctctctgaaagcaagaaccttcctacctattctaacgtttttgccctctaagaaaaatggcctcaggtatggtatagacatagcaagaggggaagggctgtctcactctagcaaccatccctccattacacacagaaagccctcttgaagcaaaagaagaagaaagaaagaaagcttatctctaaggctactgtcttcagaatgctctgagctgaatgctcttgctcctttcccaagaggcagatgaaaatatagccagtttatctatacccttcctatctgaggaggagaatagaaaagtagggtaaatatgtaacgtaaaatatgtcattcaaggaccaccaaaactttaagtaccctatcattaaaaatctggttttaaaagtagctcaagtaagggatgctttgtgacccagggtttctgaagtcagatagccattcttacctgccccttactctgacttattgggaaagggagaactgcagtggtgtttctgttgcagtggcaaaggtaacatgtcagaaaattcagagggttgcataccaataatcctttggaaactggatgtcttactgggtgctagaatgaaaatgtaggtatttattgtcagatgatgaagttcattgtttttttcaaaattggtgttgaaatatcactgtccaatgtgttcacttatgtgaaagctaaattgaatgaggcaaaaagagcaaatagtttgtatatttgtaataccttttgtatttcttacaataaaaatattggtagcaaataaaaataataaaaacaataactttaaactgctttctggagatgaattactctcctggctattttcttttttactttaatgtaaaatgagtataactgtagtgagtaaaattcattaaattccaagttttagcagaa

SEQ ID NO: 934 - DNA, 2002 bp, Homo sapiens
tataacgtgagggctgaatgcagcccattctctggagaacttcctcacacaccgcagcaaagagaagactgaaagacaaacctgggtgcagccagagaggtccagatagatgagcttgtggcatccattccccaagttcagcctagggactccacgtaccccagctgggtctcattgttccagaactgcattagttaagattacccagacttggatttcaaaggaatactttcattgttccgtctgtaacacgaagtaattggggccagctggatgtcaggatgcgtgtggttaccattgtaatcttgctctgcttttgcaaagcggctgagctgcgcaaagcaagcccaggcagtgtgagaagccgagtgaatcatggccgggcgggtggaggccggagaggctccaacccggtcaaacgctacgcaccaggcctcccgtgtgacgtgtacacatatctccatgagaaatacttagattgtcaagaaagaaaattagtttatgtgctgcctggttggcctcaggatttgctgcacatgctgctagcaagaaacaagatccgcacattgaagaacaacatgttttccaagtttaaaaagctgaaaagcctggatctgcagcagaatgagatctctaaaattgagagtgaggcgttctttggtttaaacaaactcaccaccctcttactgcagcacaaccagatcaaagtcttgacggaggaagtgttcatttacacacctctcttgagctacctgcgtctttatgacaacccctggcactgtacttgtgagatagaaacgcttatttcaatgttgcagattcccaggaaccggaatttggggaactacgccaagtgtgaaagtccacaagaacaaaaaaataaaaaactgcggcagataaaatctgaacagttgtgtaatgaagaagaaaaggaacaattggacccgaaaccccaagtgtcagggagacccccagtcatcaagcctgaggtggactcaactttttgccacaattatgtgtttcccatacaaacactggactgcaaaaggaaagagttgaaaaaagtgccaaacaacatccctccagatattgttaaacttgacttgtcatacaataaaatcaaccaacttcgacccaaggaatttgaagatgttcatgagctgaagaaattaaacctcagcagcaatggcattgaattcatcgatcctgggtctttgagatgaaaccctgcaagtagacttacgtgaatgatttttgctgtgccgcttttttagggctcacacatttagaagaattagatttatcaaacaacagtctgcaaaactttgactatggcgtattagaagacttgtattttttgaaactcttgtggctcagagataacccttggagatgtgactacaacattcactacctctactactggttaaagcaccactacaatgtccattttaatggcctggaatgcaaaacgcctgaagaatacaaaggatggtctgtgggaaaatatattagaagttactatgaagaatgccccaaagacaagttaccagcatatcctgagtcatttgaccaagacacagaagatgatgaatgggaaaaaaaacatagagatcacaccgcaaagaagcaaagcgtaataattactatagtaggataaggtagaaattgttctgattgtaattagttttgtattttctatactggtgttagaaaacatatgtttacatttgattaactgtgttgcctatttatgcagggtaatccagctaaaggaagctttctttaattataagtattattgtgactattatagtaatcaagagaatgctatcatcctgcttgcctgtccatttgtggaacagcatctggtgatatgcaattccacactggtaacctgcagcagttgggtcctaatgatggcattagactttcataatgtcctgtataaatgtttttactgcttttagaaaataaagaaaaaaaacttggttcatgttta

SEQ ID NO: 935 - DNA, 3516 bp, Homo sapiens; identical to SEQ ID NO: 429

SEQ ID NO: 936 - DNA, 949 bp, Homo sapiens
ctctctggctgctccggcatatttgagaaggtctgtttccctggtccttctgggtttccaccaattggcaagaagggatcagcctgtcctagagatctcatctcccagacgccacgtctctcggtttcttcttagatcactcctctgccaaagatcccaacaagacaacatggctcccaagaagcctgagcctaagaaggaggcagccaagccagctccagctccagctccagcccctgcaccagcccctgccccagctcctgaggctcccaaggaacctgcctttgaccccaagagtgtaaagatagacttcactgccgaccagattgaagagttcaaagaggccttttcattgtttgaccggaccccgactggagagatgaagatcacctacggccagtgcggggatgtactgcgggccctgggccagaaccctaccaatgccgaggtgctgcgtgtgctgggcaagcccaagcctgaagagatgaatgtcaagatgctggactttgagacgttcttgcccatcctgcagcacatttcccgcaacaaggagcagggcacctatgaggacttcgtggagggcctgcgtgtctttgacaaggagagcaatggcacggtcatgggtgctgagcttcggcacgtccttgccaccctgggagagaagatgactgaggctgaagtggagcagctgttagctgggcaagaggatgccaatggctgcatcaattatgaagcctttgtcaagcacatcatgtcagggtgaagcagagtcttccaggtgcctggcccttggctttagccataccagggtgagttaaagagaggccccggctgggtgagctgagatggagtcctcgacttatcaccacaccactgccccaaggaccttacaggccctccctgttaataaacagctctaacacggccaggctgggctctgggattctga

SEQ ID NO: 937 - DNA, 1979 bp, Homo sapiens; identical to SEQ ID NO: 260

SEQ ID NO: 938 - DNA, 2772 bp, Homo sapiens
gtctgcgctttgcaaagcatgcagttaggggagcagctcttggtgagctcagtgaacctgcctggcgcgcacttctacccgctggagagtgcgcgaggcggcagcggcgggagcgctggccacctccccagcgcggccccctctcctcagaagttggacttagacaaagcgtccaagaagttttccggcagtctctcctgcgaggcggtgagcggggagcccgcagccgccagcgcaggggcccccgcggccatgcttagtgacaccgacgccggggacgcatttgccagcgctgcggcagtggccaagccggggcccccggacggccgcaagggctccccctgcggggaggaggagctgccctccgccgctgcagccgccgccgccgccgccgccgcggctgcggccactgcgcgctactccatggacagcctgagctccgagcggtactacctccagtcccccggtcctcaggggtcggagctggctgcgccctgctcactcttcccgtaccaggcggcggctggggcgccccacggacctgtgtacccggctcctaacggggcgcgctacccctacggctccatgctgccccccggcggcttccccgcggctgtgtgcccacccgggagggcgcagttcggcccaggagccggtgcgggcagtggcgcgggcggtagcagcggcgggggcggcggcccgggcacctatcagtacagccagggggctccgctctacgggccgtaccctggagccgcagcggcgggatcttgcggaggactggggggcctgggggttccaggttctggcttccgtgcccacgtctacctgtgcaaccggcctctgtggctcaaattccaccgccaccaaactgagatgatcattacgaaacagggcaggcgcatgtttcctttcttgagcttcaacataaacggactcaatcccactgcccactacaatgtgttcgtagaggtggtgctggcggaccccaaccactggcgcttccaggggggcaaatgggtgacctgtggcaaagccgacaataacatgcagggcaacaaaatgtatgttcacccagagtctcctaatactggttcccactggatgagacaggagatttcattcgggaaattaaaactcaccaataacaaaggcgcaaataacaacaacacccagatgatagtcttacaatccttacacaaataccaaccccgactgcatattgttgaagttacagaggatggcgtggaggacttgaatgagccctcaaagacccagacttttaccttctcagaaacgcaattcattgcagtgactgcctaccaaaacaccgatattactcaactaaagattgatcataacccctttgcaaaaggcttcagagacaactatgattcatcccatcagattgtccctggaggtcggtacggcgttcaatccttcttcccggagccctttgtcaacactttacctcaagcccgctattataatggcgagagaaccgtgccacagaccaacggcctcctttcaccccaacagagcgaagaggtggccaaccctccccagcggtggcttgtcacgcctgtccagcaacctgggaccaacaaactagacatcagttcctatgaatctgaatatacttctagcacattgctcccatatggcattaaatccttgccccttcagacatcccatgccctggggtattacccagacccaacctttcctgcaatggcagggtggggaggtcgaggttcttaccagaggaagatggcagctggactaccatggacctccagaacaagccccactgtgttctctgaagatcagctctccaaggagaaagtgaaagaggaaattggctcttcttggatagagacacccccttccatcaaatctctagattccaatgattcaggagtatacaccagtgcttgtaagcgaaggcggctgtctcctagcaactccagtaatgaaaattcaccctccataaagtgtgaggacattaatgctgaagagtatagtaaagacacctcaaaaggcatgggagggtattatgctttttacacaactccctaaagagttattttaacctcaaaaattagctaactttttgcagatggacttggtggtgttttttgttgtcttctttgcctaggttgccaaaaagatgtttgccttccaccttgatgcatcctgttttgtgcaattctctaaaagaaggtgccaaagctttttgattgctgcaggtaactgaaacaaacctagcatttttaaaaaataagattaatggaagactttaaggtattttaaaattcgaagggtatccaaggttctgtatttatttattggggagacactaacccttcaaagaagcaggctgtgaacattgggtgcccagtgctatcagatgagttaaaacctttgattctcatttctatttgtaaattcttaagcaaatagaagccgagtgttaaggtgttttgcttctgaaagagggctgtgccttccgtttcagaaggagacattttgctgttacattctgccaggggcaaaagatactaggcccaggagtcaagaaaagcttttgtgaaagtgatagtttcacctgactttgattccttaacccccggcttttggaacaagccatgtttgccctagtccaggattgcctcacttgagacttgctaggcctctgctgtgtgctggggtggccagtgggactcaggagagagcaagctaaggagtcaccaaaaaaaaaaaaaaaaaaaa

SEQ ID NO: 939 - DNA, 3725 bp, Homo sapiens
tttttctttcctggctgatgatttgtcattctagtcacttcctgccttgtgaccacacacccaggcttgacaaagctgttctgcagatcagaaagaaggggttcctggtcatacaccagtactaccaaggacagcttttttcctgcaagatctgttacctaaagcaataaaaaatggccagaggatcagtgtccgatgaggaaatgatggagctcagagaagcttttgccaaagttgatactgatggcaatggatacatcagcttcaatgagttgaatgacttgttcaaggctgcttgcttgcctttgcctgggtatagagtacgagaaattacagaaaacctgatggctacaggtgatctggaccaagatggaaggatcagctttgatgagtttatcaagattttccatggcctaaaaagcacagatgttgccaagacctttagaaaagcaatcaataagaaggaagggatttgtgcaatcggtggtacttcagagcagtctagcgttggcacccaacactcctattcagaggaagaaaagtatgcctttgtcaactggataaacaaagccctggaaaatgatcctgattgtcggcatgtcatcccaatgaacccaaacacgaatgatctctttaatgctgttggagatggcattgtcctttgtaaaatgatcaacctgtcagtgccagacacaattgatgaaagaacaatcaacaaaaagaagctaacccctttcaccattcaggaaaatctgaacttggctctgaactctgcctcagccatcgggtgccatgtggtcaacataggggctgaggacctgaaggaggggaagccttatctggtcctgggacttctgtggcaagtcatcaagattgggttgtttgctgacattgaactcagcagaaatgaagctctgattgctcttttgagagaaggtgagagcctggaggatttgatgaaactctcccctgaagagctcttgctgaggtgggctaattaccacctggaaaatgcaggctgcaacaaaattggcaacttcagtactgacatcaaggactcaaaagcttattaccacctgcttgagcaggtggctccaaaaggagatgaagaaggtgttcctgctgttgttattgacatgtcaggactgcgggagaaggatgacatccagagggcagaatgcatgctgcagcaggcggagaggctgggctgccggcagtttgtcacagccacagatgttgtccgagggaaccccaagttgaacttggcttttattgccaacctctttaacagataccctgccctgcacaaaccagagaaccaggacattgactggggggctcttgaaggtgagacgagagaagagcggacatttaggaactggatgaactccctgggtgttaaccctcgagtcaatcatttgtacagtgacttatcagatgccctggtcatcttccagctctatgaaaagatcaaagttcctgttgactggaacagagtaaacaaaccgccataccccaaactgggaggcaatatgaagaagcttgagaattgtaactacgcggtagaattggggaagaatcaagcgaagttctccctggttggcatcggtggacaagatctcaatgaaggaaaccgcactctcacactggccttgatttggcagctaatgagaaggtatacactgaatatcctcgaagaaattggtggtggccagaaggtcaatgatgacattattgtcaactgggtgaatgaaacattgagggaagcaaagaaaagttcatccatctctagtttcaaggacccgaagattagtacaagtctgcctgttctggacctcatcgatgccatccaaccaggttccattaactatgaccttctgaagacagaaaatctgaatgatgatgagaaactcaacaatgcaaaatatgccatctctatggcccgaaaaattggagcaagagtgtatgccctgccagaagacctggttgaagtgaaccccaaaatggtcatgaccgtgtttgcctgcctcatggggaaaggaatgaagagggtgtgaggcccaatggggctgggtgggaggcggtgcactcactcctgactgcccggcacagatgctccagggatgattcaagccattccaaagttcaacttggtgacactctataagattccaaaaagcacatattagtgcagccaagtagcctctcctgtatttaacaaaaagtgcttcattctttgcaggaggcccaacctcctatatataggtttctattcttgatttatttgcttcttcgaaaatctagaggaaaagaaagaagttattttccaggtacccttctcgcttttgccattagccaaggatagaagctgcagtggtattaattttgatataatctttcaaaccagcttcatgtggcttcccttttctttgttcaagatgagggccaggaggggaaacatcacacctgccctaaaccctgttcctggaggtcagcatttgatctgttgcaagcccctctttctgtcccctcttcctaccctgcctcccttgactttgctcctcacacttttggaaccatgccttccgggggggcccatctcttctggccgtccttgtctctgggccacttggagtgtgtgataaatcagtcaagctgttgaagtctcaggagtctctggtagcctgcagaagtaagcctcatcatcagagcctttcctcaaaactggagtcccaaatgtcatcaggttttgttttttttcagccactaagaacccctctgcttttaactctagaatttgggcttggaccagatctaacatcttgaatactctgccctctagagccttcagccttaatggaaggttggatccaaggagggtgtaatggagcatcaagccactcggcggcagcatggagctataactaagcatcctttagggttctgcctctccaggcatttagccctcacattagatctagttactgtggtatggctaatacctgtcaacatttggaggcaatcctaccttgcttttgcttctagagcttagcatatctgattgttgtcaggccatattatcaatgtttacttttttggtactataaaagctttctgccacccctaaactccaggggggacaatatgtgccaatcaatagcacccctactcacatacacacacacctagccagctgtcaagggcagaatgaatctatgctggataagaaatggtggaactgcgttatgaagagctaatttactggacaaagaattccaaagcaaaaccagaacagtatgaatttgagcaggtctcataggttgagcaatttccccctaaaccaactgaaggctaaaaagcaacaggccattgtgaaccaatgcaagacgccctctatcatggtgaaaagctccatcaatgaggtatcttctttagtggtggtatgtaatggaacttagccatttttcaaagcaattgaaatgcattgctctggatctgttccttggcagtggactcagaaagccaacatgtggctcctcccagcccataaccagtatttttgctgcttctgaatacaaattggttggttttgacttcagattgaacttactgtagcctcagatgatttcccccctccgcctccaggaagaaagaatgttactgccttaataaaaaatgaaaagagaatgatgctcaaaatctttccaaataaaatgttccctata

SEQ ID NO: 940 - DNA, 6904 bp, Homo sapiens
tcaccacggcggcagccctttaaacccctcacccagccagcgccccatcctgtctgtccgaacccagacacaagtcttcactccttcctgcgagccctgaggaagccttgtgagtgcattggctggggcttggagggaagttgggctggagctggacaggagcagtgggtgcatttcaggcaggctctcctgaggtcccaggcgccagctccagctccctggctagggaaacccaccctctcagtcagcatgggggcccaagctccaggcagggtgggctggatcactagcgtcctggatctctctcagactgggcagccccgggctcattgaaatgccccggatgacttggctagtgcagaggaattgatggaaaccaccggggtgagagggaggctccccatctcagccagccacatccacaaggtgtgtgtaagggtgcaggcgccggccggttaggccaaggctctactgtctgttgcccctccaggagaacttccaaggaggaggggtctcaccagagagggagccgggggagtgcgctcctgcgtccatcctcagaccagcgtgtccctcccaacctctgacccctctgaggccaggggatgggttcggcttcctttggtacctcttttggaagtctcttcagacaaacactggagagaaggcacagcaccctagggtgacatcagtggacaggtctaggatggccgggtatcctgcacagagctagaaggctgcctggcacgggtgaaagcagagctgctccctgaccctctgcccctccctcctccaccctggcctgctttagctttccccagacatggccaacaagggtccttcctatggcatgagccgcgaagtgcagtccaaaatcgagaagaagtatgacgaggagctggaggagcggctggtggagtggatcatagtgcagtgtggccctgatgtgggccgcccagaccgtgggcgcttgggcttccaggtctggctgaagaatggcgtgattctgagcaagctggtgaacagcctgtaccctgatggctccaagccggtgaaggtgcccgagaacccaccctccatggtcttcaagcagatggagcaggtggctcagttcctgaaggcggctgaggactatggggtcatcaagactgacatgttccagactgttgacctctttgaaggcaaagacatggcagcagtgcagaggaccctgatggctttgggcagcttggcagtgaccaagaatgatgggcactaccgtggagatcccaactggtttatgaagaaagcgcaggagcataagagggaattcacagagagccagctgcaggagggaaagcatgtcattggccttcagatgggcagcaacagaggggcctcccaggccggcatgacaggctacggacgacctcggcagatcatcagttagagcggagagggctagccctgagcccggccctcccccagctccttggctgcagccatcccgcttagcctgcctcacccacacccgtgtggtaccttcagccctggccaagctttgaggctctgtcactgagcaatggtaactgcacctgggcagctcctccctgtgcccccagcctcagcccaacttcttacccgaaagcatcactgccttggcccctccctcccggctgcccccatcacctctactgtctcctccctgggctaagcaggggagaagcgggctgggggtagcctggatgtgggccaagtccactgtcctccttggcggcaaaagcccattgaagaagaaccagcccagcctgccccctatcttgtcctggaatatttttggggttggaactcaaaaaaaaaaaaaaaaaatcaatcttttctcaggcctggctggcagagtttggaaggtttttattttggaaaagctgtgcagaaaaaaattcaagaaaatgttgctgtgaaaagagaaaaacaaatcttaagcattaaaaaaaattcaaccaactagctcagaagaggggagaaggccaaggttgagagaagagtcacagcctgtcaggcagatagctggcctccggcgggaaggccatttccctgagcacttgcagaggaagacagggtggtggcaggactggagtggcagtggctcccaaggctctctcctccaacatgtgcatctgccatctgctctgcagtcctgccgcaggattccctagtgaagcagctcaggcctgggggagccgtgtgtatcccagctgtgccggcagcatcataccaatcgtgggggtggtgaaggagccaggggttcattcatggttggtttctgatcaggcatcttgggaatggataatggaggcagccgctttcaggacaggcatgtccaggggctcctcccagcctctaccccgaagtcctcttcccaagtgaccccagtgatgtttccattgagatgcgctcctggctatggcaggcaccttctcaacttatatgtgggaaggggtcccccatgcttgggggacctaggcagctggcttggcccaagagagatgaggatggaggccaaaccaaaggggggcgccaatcccctgtccaacaccttctcaccaaaagctcccgtttggctggaggcagaccctgtggctctgaccagacttctctggcagcaatcctccaccatttgtatcttaagaaggccctcaccctctttgagtggagtcagaggatgcctcagattccagatgtaagcatcagaactgctttctgtcaagagctccctaattttgggaaagaagagcctgtcccacactgtcaggccctgaggtcagcagatctgctcctccttcccgtgcggtacgtctaggtgctgatgagggcagtccagggcgctcttgttctgggacaggctccagtccccttgctccagcaggtctggggcaaggaggtcagaggtggtgggagggcccctgctctctgtttccacttcgtctggatccttgctgctgcaaagtggcactgattctagctctgtcccttcctccttggctttccggctccgatggggccagtggcagggtccactcctacaaacttgattggaagccacattcctctggctcaaatatacttccagcatgtagtaaacagtccagaagacggtgaaacagcctaccagcaccagggtctggggccgaggcaagcacctacgtgaggcactgtttcccgaagcctacagcctttctcagcccaggacaatgagctcagaaagtctttttccttctagggactgcctttttcacccaaactgttccctctgccccctcccccgacaaggcctgtcctgtaagagttaggctagcagggtaggagcaatgctatgaaaccactgctgggacccaggtcttcccagtccttcaccccgcaggtcaccctgagaaacacactaagaactccatcccccagacaggacagtcccatctacccgcagcttgagtcttggccctagtaccttgagggtgttgggggtgatggtgtaaccatcttcctcaggaattttcagccccggtgggcagggcagggcgaagtcatcgtgcaggtattttccactcatggcactctctaacagcctgtggagaagaaaagaggtgaggatgccccactgactatggttcctataccatctgccctcacccattttcctgccttacaggtgaagacagggaagccccacagcaaaaaggagaggcccagactgtgagttcccagcccggggctccatctaccggcttgacgctggaactgggaagcacagctggggttcagagggcgatgggctccctaggcggcccttcccctgtgactggccttccctctgacacatgcggctttacccacctttgtctgtccctgatgtctactgcactccacacagagccatatagggtcagctgccattgccggaggatgccgacctggaatgactcatcccctagggcagcaaggggcagctcgtgagccacgcccctctgtcagccatgccagacagcagaggccctgcccgccctgccacccaaaggggctcaggccacatggtctgctccaggagctgcctcactgtgtcccactgaccccaggttctgcagaagggcctcactgggtgcccttagggatggaaagggttgaaaggctgtactccaaagcagagtcttgcttttctctcccgtattttgggggttcagctgggattagaaaaaaatgtctttccaccaaattaaagaaagctttgaaaaccactggcctagagaatacctaactgactggaggatgggagggtggagctcaatttccagtctataggctgatactaaagatattcacaattcatggatattgtggccttcactgatatggtgaccttccacaagtcacctcaaacctctgggccagtttaaaaaaaatggtgaaatgagtcctgcccttacctgcctaccggggctggccgaaggatggttatacgtaaaaggacttgaaatgtggtttcgacaaggactttttgttgctatcctgaggaaagatggatgggtcactcctccagggaatatgagaggtagtataaatgaacagttgcagagagcaatgcccatttcacggatgggcacactcttggcatcaactctcttggtccaatggcaaccctatatattgcacacgggacactttctgtggggactctgagatgcagagggaccagataacaagcaggaaaggtagggcctggtgtgagggcacgagactcaccgacatccctgatgacaagcctgtaggtccctcgggctctctccccccagcatcgcacagtggagaaggtccagtcattgaagccgttgggatccctgaggaaagaacacagcagaaacaggtggaaggcgtgggccagagagctgaccttcccccagcaacactttcttactgtagtagccgtggaaacaacctgggagggtgccacgagggcttctcaggtgcccctttcccctggggtctcatggaaggaggaaattgtgttaacgtggtgtggtggaaaaagcaagcatggagcgcgcacaggcttggagtcccacggatctaggtttattcttgttctcttgggcacttactagctccatgacttgttttctttttctttctttttttttttggagacagggtctcactctgttatccaagctggagtgcagtggcatgatcacagctcactgcagccttgacttcctgggttcaagtgatcctcccacctcagtctcctgagtagctgggactacaggcatgtaccaccatgctcagctaatctttaaattttttgtagagacagggtctcactttgttgcccaggctggtcttgaactcctgagttcaagtgattctcctgccttgacctcccaaagtgctgggattacaggtgtgagccaccacacccagccagtttcctcatttgtaaaaggaggttacaaagtctaatctagggggttcttagaaggattagagaacatgtatgtgaggtgcagggcctagcgcttgaagaaggtatgtgacgaaaggcttccagccgccagggatagccagtgccacagtagtttaggacagtgccaggatccacttcttccatttcttttccctggaaaggcccttgctgaaaaggttgctcaggcctcgggcgggtgtacatacgagtccatgctgcggggggcgccgatgagggacatcatgccactggggcagaacagcttcagctccaagctgccgcgccgtgggtgagtgatggagactgtcactgccacatgctccagggtcttcagccctgacatctccaggtccatcctgctgactgtagaaagtcaggctgggcagctgggaaaccagcccacaaacacgccttcacttcacccccacgtacacaaagacacacgctcactgaagccacatacaaacatctacggcaaccctaactgggacctcgcctatactagtaaatggaatggagctgctgctctcaagtttacaacgtagcttcgagtgcagttgggaagacgacacatacccaagacacaatataagaatccagcagagcaacttcaatcattcattcatccaaaacattatttactgggtacctcctccatttcaggcactgtactagatgctgggaatataaagataagatgggcgtggtccctgcctcctacctgcaagtggaaaatgatatggtatgggaaatatacataattgataagggaagagaaataagtcagatgggtttaggcacacagcagtgagacacactgaaggaaatgaatacagatcggtagacagggttggtagagggcattctaggcagtggaaaaggcatgaacaaagacgaaatgcacacatctcactgaagatgatgcacagttaatttttaaaaaatgctggtggataaatttcaagcaaattatgtgagtgaaaaaagcaatctcaaaagaagcatatagccaggtgtggtggtgtgcacctgtggtcccactaccggggagggtgaggtgggaggatcgcttgagcctgggaggtggagattgcagtgagccatgctcatgctaccacactccagcctgggcaacagaacaagaccctgtctcaaagaaaaaaaaaaaaagaaaaaggatgcgtagcacacaattccatttaggtgatgttaattgaagtacctgcagtgatacataacagataaatgggtgccaggggccagggacaggggaggggatgggtgtggccagaaaggggtaacacaaaggagtcttgtgataatggaattgttctggatcttggttgtggtggtagttatgcaaggctacatgtgatacaattgcatacagctacacacgcgcatacacaa

SEQ ID NO: 941 - DNA, 1423 bp, Homo sapiens; identical to SEQ ID NO: 463

SEQ ID NO: 942 - DNA, 477 bp, Homo sapiens
atgagcgaggccagccgactgtgctccggctactacagcctcaaccagagcttcgtggagcccttccagtgcccccggcgcggcgagggggcagcgctccagtattgctgcggcttcgccgacctcaagtactgctgcagcgagccgggcagctacttcccctacaagcacagctacatgtggagcctcagcattggtgccttgattggactaggaattgctgcccttgttttactcgcctttgtcatcagtgtctgtgtcctttgctatttatttctgtatacgaaacctcaaagattagacactggccttaagcttcaacacttagaggcttcttccactcaagaaggcaagtcaaatggaaaaaccaaagccctcaattcaaatgcagcatcaaatgcaacaaatgaaacatactatgaagctgatgatataattcaagaaaaaacaatggatgcaacacaaatccacattgct

SEQ ID NO: 943 - DNA, 777 bp, Homo sapiens
ctgattattggacagaatggcatcttgtcaacacctgcggtctcctgcattatcaggaagatcaaggcagctggtggaatcattctaacagccagccactgccctggaggaccagggggagagtttggagtgaagtttaatgttgccaatggaggtcctgcacccgatgttgtctcagacaaaatctaccaaatcagcaaaacgattgaggaatatgctatatgtcctgatctccaaatcgacctatctcgactaggaagacaagaatttgacctagagaacaaattcaaaccattcagagtggagatagtggacccagtggatatctatcttaacctccttcagaccatctttgactttcatgccatcaagagtttgctgactgggcccagccaactgaagattcgcgttgatgcaatgcatggagttatggaaccttatgtgagaaaagttctgtgtgatgagctgggggccccagccaattctgcaataaactgtgttcccctggaagactttggagggcagcaccctgacccaaacctgacatatgcaatgactcttctggaagcaatgaaaggaggagaatatggatttggagctgcatttgatgctgatggggaccgttatatgatcctaggccaaaatggcttctttgtgagcccttctgactccctggccatcattgctgccaacctctcttgcattccatatttccatcagatgggggtccgcgggtttgggaggagtatgccaaccagcatggccctggacaggtaa

SEQ ID NO: 944 - DNA, 5837 bp, Homo sapiens; identical to SEQ ID NO: 170

SEQ ID NO: 945 - DNA, 3824 bp, Homo sapiens; identical to SEQ ID NO: 196

SEQ ID NO: 946 - DNA, 1690 bp, Homo sapiens; identical to SEQ ID NO: 513

SEQ ID NO: 947 - DNA, 3024 bp, Homo sapiens; identical to SEQ ID NO: 182

SEQ ID NO: 948 - DNA, 4884 bp, Homo sapiens; identical to SEQ ID NO: 184

SEQ ID NO: 949 - DNA, 3345 bp, Homo sapiens; identical to SEQ ID NO: 519

SEQ ID NO: 950 - DNA, 7029 bp, Homo sapiens; identical to SEQ ID NO: 179

SEQ ID NO: 951 - DNA, 8159 bp, Homo sapiens; identical to SEQ ID NO: 176

SEQ ID NO: 952 - DNA, 3551 bp, Homo sapiens
agcctctgtgcggtgggaccaacggacggacggacggacgcgcgcacctaccgaggcgcgggcgctgcagaggctcccagcccaagcctgagcctgagcccgccccgaggtccccgccccgcccgcctggctctctcgccgcggagccgccaagatgggggacaagaaagatgacaaggactcacccaagaagaacaagggcaaggagcgccgggacctggatgacctcaagaaggaggtggctatgacagagcacaagatgtcagtggaagaggtctgccggaaatacaacacagactgtgtgcagggtttgacccacagcaaagcccaggagatcctggcccgggatgggcctaacgcactcacgccaccgcctaccaccccagagtgggtcaagttttgccggcagctcttcgggggcttctccatcctgctgtggatcggggctatcctctgcttcctggcctacggtatccaggcgggcaccgaggacgacccctctggtgacaacctgtacctgggcatcgtgctggcggccgtggtgatcatcactggctgcttctcctactaccaggaggccaagagctccaagatcatggagtccttcaagaacatggtgccccagcaagccctggtgatccgggaaggtgagaagatgcaggtgaacgctgaggaggtggtggtcggggacctggtggagatcaagggtggagaccgagtgccagctgacctgcggatcatctcagcccacggctgcaaggtggacaactcctccctgactggcgaatccgagccccagactcgctctcccgactgcactcacgacaaccccttggagactcggaacatcaccttcttttccaccaactgtgtggaaggcacggctcggggcgtggtggtggccacgggcgaccgcactgtcatgggccgtatcgccaccctggcatcagggctggaggtgggcaagacgcccatcgccatcgagattgagcacttcatccagctcatcaccggcgtggctgtcttcctgggtgtctccttcttcatcctctccctcattctcggatacacctggcttgaggctgtcatcttcctcatcggcatcatcgtggccaatgtcccagagggtctgctggccactgtcactgtgtgtctgacgctgaccgccaagcgcatggcccggaagaactgcctggtgaagaacctggaggctgtagaaaccctgggctccacgtccaccatctgctcagataagacagggaccctcactcagaaccgcatgacagtcgcccacatgtggtttgacaaccagatccacgaggctgacaccactgaggaccagtcagggacctcatttgacaagagttcgcacacctgggtggccctgtctcacatcgctgggctctgcaatcgcgctgtcttcaagggtggtcaggacaacatccctgtgctcaagagggatgtggctggggatgcgtctgagtctgccctgctcaagtgcatcgagctgtcctctggctccgtgaagctgatgcgtgaacgcaacaagaaagtggctgagattcccttcaattccaccaacaaataccagctctccatccatgagaccgaggaccccaacgacaaccgatacctgctggtgatgaagggtgcccccgagcgcatcctggaccgctgctccaccatcctgctacagggcaaggagcagcctctggacgaggaaatgaaggaggccttccagaatgcctaccttgagctcggtggcctgggcgagcgcgtgcttggtttctgccattattacctgcccgaggagcagttccccaagggctttgccttcgactgtgatgacgtgaacttcaccacggacaacctctgctttgtgggcctcatgtccatgatcgacccaccccgggcagccgtccctgacgcggtgggcaagtgtcgcagcgcaggcatcaaggtcatcatggtcaccggcgatcaccccatcacggccaaggccattgccaagggtgtgggcatcatctctgagggcaacgagactgtggaggacatcgccgcccggctcaacattcccgtcagccaggttaacccccgggatgccaaggcctgcgtgatccacggcaccgacctcaaggacttcacctccgagcaaatcgacgagatcctgcagaatcacaccgagatcgtcttcgcccgcacatccccccagcagaagctcatcattgtggagggctgtcagagacagggtgcaattgtggctgtgaccggggatggtgtgaacgactcccccgctctgaagaaggccgacattggggtggccatgggcatcgctggctctgacgtctccaagcaggcagctgacatgatcctgctggacgacaactttgcctccatcgtcacaggggtggaggagggccgcctgatcttcgacaacctaaagaagtccattgcctacaccctgaccagcaatatcccggagatcacgcccttcctgctgttcatcatggccaacatcccgctgcccctgggcaccatcaccatcctctgcatcgatctgggcactgacatggtccctgccatctcactggcgtacgaggctgccgaaagcgacatcatgaagagacagcccaggaacccgcggacggacaaattggtcaatgagagactcatcagcatggcctacgggcagattggaatgatccaggctctcggtggcttcttctcttactttgtgatcctggcagaaaatggcttcttgcccggcaacctggtgggcatccggctgaactgggatgaccgcaccgtcaatgacctggaagacagttacgggcagcagtggacatacgagcagaggaaggtggtggagttcacctgccacacggccttctttgtgagcatcgttgtcgtccagtgggccgatctgatcatctgcaagacccggaggaactcggtcttccagcagggcatgaagaacaagatcctgatcttcgggctgtttgaggagacggccctggctgccttcctgtcctactgccccggcatggacgtggccctgcgcatgtaccctctcaagcccagctggtggttctgtgccttcccctacagtttcctcatcttcgtctacgacgaaatccgcaaactcatcctgcgcaggaacccagggggttgggtggagaaggaaacctactactgacctcagccccaccacatcgcccatctcttccccgtcccccaggcccaggaccgcccctgtcagtccccccaattttgtattctggggggaggagccctctcttcctgtggccccaccttggcccccaccccctccactatctcctgccgcccccactctggctggcttctctcccctgccccaaacctctctcctctctcttttctgtgtcagtttctctccctctcctcacccctctatccattcctcccgccccagccacctccctgggctcttttttactccccttcagccccccggctgatgccatctctggttctggacaattatcaaatatatcagtggggagagagaa

SEQ ID NO: 953 - DNA, 3039 bp, Homo sapiens; identical to SEQ ID NO: 484

SEQ ID NO: 954 - DNA, 3499 bp, Homo sapiens; identical to SEQ ID NO: 517

SEQ ID NO: 955 - DNA, 4676 bp, Homo sapiens
tggggccgtcgtgccccgccccagtgcggccggggcgcgggttcgagctgctgctcggcaagcctgggtgtctagggcatgagcggagtgtggggggccggcgggcctcggtgccaggaggcgctcgcggtcctcgcctcgctgtgccgggcccggccgccccctctcgggctggacgtggagacttgtcggagcttcgagctgcagcccccagagcggagtcccagcgcggcaggcgcagaaggaccaggacgccggggttccaggagactctgcaggctccatccctccttattcccccaccccgaccccagtagcgctgggcctaggagcactcgggagttgctcagtggctctgcaccgctggcgcgggaaggggagaaaggggctgccagaggcgggaatttggtccccacgcgctgctccagggacgagaagccagggaccggcggttctgggagcaggcacctctgtcagcctcctcgcagttgtagttattgtgtgtggcgtggccctggtggcagtttttctctttctcttttggaagctgtgctggatgccctggaggaacaaggaggcctccagtccctcttctgctaatccccccttggaagccctccagagccccagcttcagaggcaacatggcggacaagctgaaggaccccagcaccctgggcttcctggaggcggccgtgaagatcagccacacgtccccagatatcccagctgaggtgcagatgtcggtcaaggagcacatcatgcgtcacacccggctgcagcggcaaactacagagccagcgtcatccaccaggcacacgtccttcaagcgccacctgccaaggcagatgcatgtctccagtgtagactatggcaatgagcttccaccagcagcagagcagcccaccagcattggccgcatcaagcctgagctctacaagcagaagtcggtggatggggaggatgccaagtctgaggccaccaagagctgcgggaagatcaacttcagcctacgctacgattacgagaccgagaccctgattgtgcgtatcctgaaggcttttgacctccctgccaaggacttttgtggaagctctgacccttatgtcaagatctacctcctgcctgaccgcaaatgcaagctgcagacccgggtgcaccgcaagaccctgaaccccacctttgatgagaacttccacttccctgtgccctatgaggagctggctgaccgcaagctgcatctcagtgtcttcgactttgaccgcttctcccgccatgacatgattggcgaggtcatcctggacaacctctttgaggcctctgacctgtctcgggaaacctccatctggaaggatatccaatatgccacaagtgaaagcgtggacttgggagagatcatgttctccctttgctacctgcccactgcaggcaggctcaccctcacagtgattaagtgtcggaacctcaaggcgatggacatcacaggctattcagatccctatgtgaaagtgtccttgctctgtgatgggcggaggctgaagaagaagaaaacaaccataaagaaaaacactctcaatcctgtctacaatgaggccatcatctttgacattcccccggaaaacatggatcaagtcagcctgctcatctcagtcatggactatgatcgagtgggccacaatgagatcataggagtctgtcgtgtggggatcactgctgaaggcctgggcagggaccactggaacgagatgctggcatacccccggaagcccatcgcacactggcactccttggtggaggtaaagaaatccttcaaagagggaaaccctcggttgtgatttcattcacgtggatgctgcaagcagagagactgccacctggagttaggatggcagggccgagctgctagcttcgacagtgagagctcgtgcccatctccgaaaccacctccaacaccatgagatgtgcagccaaataacacaaatgggactcagcaatgttctctttgcacttgttcaaccgtctaaacagtgttgtgcagtcgcagtggcggcagcagcggcagccgtccgtcactccagagtcttacctgctcctgtgtaggtcaaagctgagacacttgtcatgtggtcagatctgtcttagtcttttgtgtctcccaaggtgatgtttttgtggtttttcactttttatgggtctgctggtaagaaaagggaaaaaaaaaaagagtaggaaaagacaaagggtggaaagcccagaagttggttctagaaaatacaaggtacagttttttggaaagaggtggattgagtttctgaaatgctgcgtctccagcaagctccacaaccctggaaaaggaggaggcgtggtgggactgcggctgcattttcagtgccctgcaggaatggggtgaatccatggaagagcctttgtgaggtgaattactagtctttgaagctcttcgctggcaggacataaaccacgctgggaccctcagtcccgtgttgaaatcacaagacctctgaggcgcttgtgagccttcagctgatgtgcagggttcctcgctccccttcctcgctggctttccccatgaattgaaaacgtcttgattcctcatgggaacttagtcactttctttaggaatgattcagttcagccgaaactaaacacgccatatgttttctgatgcgccacagttaatgatcacatttgtttgaaaacaggatctttgtcctcagaaataatcttgattgtaaagtaagagagaaacatatgttctggaatgatttctgcattatacatagctttataattccatgaagtatcaagctgctgtttaaaatgcctaaacagattaaagaaaaacctagattaaatgttcttttccaaatggggagttttgaaatccaaatagcagtttgagtccatctttctatgaagagtatgtttttgattgaaaccgagtcagcgtaagcctatttcagcccctttggctctttgacaatattcatcttaaactttagttctataaattactaagtacttcagtgttgtttgtttcagtggttgtgagggtttcttgtttcctttagatctttaccttaggccaaactcagtttaggaaaaaaaaaattgtttgaactattctgtgttgtaatagcacatttctgttgagttaatagtggtcttcccaccaacccctaaaaccaggttgatttgctcaatctcagtttgtataaccccagtaagcgcatggaggtgagtttctacttcgacttgtggcgacacagtgccagtttcctgagctgtgtgtactacttgcaagaggcaagtctgctgaagaaccccttcttttaacagtggaaaatcaagaacagaaaatctgttcacacacctgtgtcttattctttatatatgctacatggtagaggagcagcgaccaataaagtatccctcattttaaaccaagttgtcagatttctctgctgatagaacgctgcatagtatcttctagccctaaaaatgaccaggttgggcatgagttaacaggatattgtggcaaaaggaattttctgcttagaaaagtaaatgtagataaacctaaactccaccctgtactgagccttaggctagggactcatgtgtaaagatgacttttctccccagatatcttgtcattgacaggccttcctagtctggtagtcctacatttgggtgttctcctgagagtgagaaaaaacccaaggtcatgacaagattcctggcaggtgacagacttcattatgattctgactctagactgaccccatcaagatagtcgtttccgtcagtgaacagatgctgaaggccttgccattacaaaggagacaactgagttccctgggtcataaggagtccagaaattagtgtgagaaggtccttctggaagtgaactcaaaattcatgtccagctgtcatcgttaaacccttaggcaggtgagtataacccattctaacctcttggagaagggagtgtgatcaatgtgaatcacaatagtattgctcatctgagacattcctcttatatccaagcagctatctcccatgagtgaacatcccagtggtttcagaaaatcatgtcctgaacagattctagccagccccacaccaccctggccaactgcaaccgctgctgctctagcagtctgggtcaattcctacaggcttgggagcccaccccagggaggcttttatctcctgcagcctcatccccagcaccctcaaggtagactactcctcagcctgaatcatgaatgaaacctgaacatctgccaacttcattatctagcccagtatctcttccctcacagagaagaagaaaatgaaatacaaagttgatccatttgttggctttctctggccggagaaacctctcgggttgttgctgtgagctttgatgaagttgtgataaccagggccatttgcacataggtttttttaaaaaacatgaaaagttcccttctcctttatttagcagtgtttccgggctgaaagacgccctcctccccctctgcgcttacccaggacgttaattaattgcactgtcatttaaaatattatgttgttaattactcgtttgtgtcttcccacccgtgtcacagcctggagtttttattcaattaaatctctgtctcttgccca

SEQ ID NO: 956 - DNA, 4133 bp, Homo sapiens; identical to SEQ ID NO: 524

SEQ ID NO: 957 - DNA, 2913 bp, Homo sapiens; identical to SEQ ID NO: 171

SEQ ID NO: 958 - DNA, 4760 bp, Homo sapiens
gaaaaaaggaacccaaggagataggagagctgttaatttcactcgggacatttcctcgaggctagtttactcggaaagcctcaatgttccctggtagctgcaggatctactttgggggctgccaagtttcctctctcattctttctcctgccccaagagcaggcaggaaggaaagttcctggactgatactcgtctgtttagtaggcgtgggtcctggttgaagtctgtctaggaaaactcctaagtgtagaaatcttcttcgtattaccactgtctctgcactgagatttgggctgctttgcttccagcgtcacacatcataactgaggtcagcgctgcctgagctcgtcccctggatgtccgggtctccccaggcggccacccgccggctcccatcgtgacctccagccgcagcgcctcccacgccggccgccgcgcgaggggagcgctcgggcgcgccgggtgtggttgggggaaggggttgtgccgcgcgcgggctgcgtgctgtgcccactcaaaaggttccgggcgcgcaggagggaagaggcagtgcccgccactcccactgagattgagagacgcggcaaggaggcagcctgtggaggaactgggtaggatttaggaacgcaccgtgcacatgcttggtggtcttgttaagtggaaactgctgctttagagtttgtttggaaggtccgggtgactcatcccaacatttacatccttaattgttaaagcgctgcctccgagcgcacgcatcctgagatcctgagcctttggttaagaccgagctctattaagctgaaaagataaaaactctccagatgtcttccagtaatgtcgaagtttttatcccagtgtcacaaggaaacaccaatggcttccccgcgacagcttccaatgacctgaaggcatttactgaaggagctgtgttaagttttcataacatctgctatcgagtaaaactgaagagtggctttctaccttgtcgaaaaccagttgagaaagaaatattatcgaatatcaatgggatcatgaaacctggtctcaacgccatcctgggacccacaggtggaggcaaatcttcgttattagatgtcttagctgcaaggaaagatccaagtggattatctggagatgttctgataaatggagcaccgcgacctgccaatttcaaatgtaattcaggttacgtggtacaagatgatgttgtgatgggcactctgacggtgagagaaaacttacagttctcagcagctcttcggcttgcaacaactatgacgaatcatgaaaaaaacgaacggattaacagggtcattcaagagttaggtctggataaagtggcagactccaaggttggaactcagtttatccgtggtgtgtctggaggagaaagaaaaaggactagtataggaatggagcttatcactgatccttccatcttgttcttggatgagcctacaactggcttagactcaagcacagcaaatgctgtccttttgctcctgaaaaggatgtctaagcagggacgaacaatcatcttctccattcatcagcctcgatattccatcttcaagttgtttgatagcctcaccttattggcctcaggaagacttatgttccacgggcctgctcaggaggccttgggatactttgaatcagctggttatcactgtgaggcctataataaccctgcagacttcttcttggacatcattaatggagattccactgctgtggcattaaacagagaagaagactttaaagccacagagatcatagagccttccaagcaggataagccactcatagaaaaattagcggagatttatgtcaactcctccttctacaaagagacaaaagctgaattacatcaactttccgggggtgagaagaagaagaagatcacagtcttcaaggagatcagctacaccacctccttctgtcatcaactcagatgggtttccaagcgttcattcaaaaacttgctgggtaatccccaggcctctatagctcagatcattgtcacagtcgtactgggactggttataggtgccatttactttgggctaaaaaatgattctactggaatccagaacagagctggggttctcttcttcctgacgaccaaccagtgtttcagcagtgtttcagccgtggaactctttgtggtagagaagaagctcttcatacatgaatacatcagcggatactacagagtgtcatcttatttccttggaaaactgttatctgatttattacccatgaggatgttaccaagtattatatttacctgtatagtgtacttcatgttaggattgaagccaaaggcagatgccttcttcgttatgatgtttacccttatgatggtggcttattcagccagttccatggcactggccatagcagcaggtcagagtgtggtttctgtagcaacacttctcatgaccatctgttttgtgtttatgatgattttttcaggtctgttggtcaatctcacaaccattgcatcttggctgtcatggcttcagtacttcagcattccacgatatggatttacggctttgcagcataatgaatttttgggacaaaacttctgcccaggactcaatgcaacaggaaacaatccttgtaactatgcaacatgtactggcgaagaatatttggtaaagcagggcatcgatctctcaccctggggcttgtggaagaatcacgtggccttggcttgtatgattgttattttcctcacaattgcctacctgaaattgttatttcttaaaaaatattcttaaatttccccttaattcagtatgatttatcctcacataaaaaagaagcactttgattgaagtattcaatcaagtttttttgttgttttctgttcccttgccatcacactgttgcacagcagcaattgttttaaagagatacatttttagaaatcacaacaaactgaattaaacatgaaagaacccaagacatcatgtatcgcatattagttaatctcctcagacagtaaccatggggaagaaatctggtctaatttattaatctaaaaaaggagaattgaattctggaaactcctgacaagttattactgtctctggcatttgtttcctcatctttaaaatgaataggtaggttagtagcccttcagtcttaatactttatgatgctatggtttgccattatttaataaatgacaaatgtattaatgctatactggaaatgtaaaattgaaaatatgttggaaaaaagattctgtcttatagggtaaaaaaagccaccgtgatagaaaaaaaatctttttgataagcacattaaagttaatagaacttactgatattcctgtctagtggtataatatctcaggaatcttggctgagggtttggaactgtgggtagagtagagggccaggagtccagtaatagaattcttgcaccatttctggaacattctagctctgggaggtcacgtaaccttcttggggtagttcagtggtttagtggtttataatccaggtgtgcgtcagaatcatctgaggaactttgctaaaatacaaaaatctggcctaagtagctccagatctaccttcataaaggaatctgaccactcctggatttggtaatttccaagttctgaaaattttacttaggatttaataactattaacatctgtccctacataggttttctttcctacttatataccttatgttctcttcattctaaccttcatcagtaatagggaaatgttttaattttatttttttagttgaagggtaatgtaccaaaaaatatagttcagtgaattaaaatgaacacacatgtgcaaccatcaattcaggtcaagaaatagaagattgtagcacacaaaagcctactcagccattctcccagtcactacttccttccttacccctgggttatttttgaaatgacacttgatgtatttccctctgttgctgttatgagaacattgctacagccaagtgttgtgtttctgtgtgcataggttgatacttaattatctccccactttttaataaacttttaatttggaaataattttagattgacagaaaagttgcaaagatagtgaggaaagttcctgtctactctttgctcagcttcccttaatgttaacattttatatagcaagatgcatttgtcaaagctaacaagttaacattggtacaatcactgttaattaaactgcacacaatattcagatttcaccacttttccactaatattctttcattgttctaggattcaattcaggagaccacatttcatctagccctcttttttaaaagtaaatacttttcagcacttacaggagttaactgagctggggcatcatggtgtatagacgccctgacactggtcatcttggaattcatttagtttgtcagtgggtgccctgacattctgtcacaacatcaatttgggaacatggcattatatttttatctttgaacttttttctttttggatgacatttgattaatgcgtcatcttggaacacattatcttttttcttggttatgtgatcaggaagattaatcagtttttcctgttcttggtataattcctgcttttcacatacctgtcccttacagttctctatatatacccttcccttattacacagagagaaatatctatctatactttttacacaaaatatacttcaaaagaaacaaaacagccacaattattaactttttaaataaatgagaatttaattatatccta

SEQ ID NO: 959 - DNA, 807 bp, Homo sapiens; identical to SEQ ID NO: 523

SEQ ID NO: 960 - DNA, 2803 bp, Homo sapiens; identical to SEQ ID NO: 526

SEQ ID NO: 961 - DNA, 2216 bp, Homo sapiens; identical to SEQ ID NO: 516

SEQ ID NO: 962 - DNA, 4842 bp, Homo sapiens; identical to SEQ ID NO: 518

SEQ ID NO: 963 - DNA, 4840 bp, Homo sapiens; identical to SEQ ID NO: 186

SEQ ID NO: 964 - DNA, 11574 bp, Homo sapiens
cccctttctccccctcggttaagtccctccccctcgccattcaaaagggctggctcggcactggctccttgcagtcggcgaactgtcggggcgggaggagccgtgagcagtagctgcactcagctgcccgcgcggcaaagaggaaggcaagccaaacagagtgcgcagagtggcagtgccagcggcgacacaggcagcacaggcagcccgggctgcctgaatagcctcagaaacaacctcagcgactccggctgctctgcggactgcgagctgtggcggtagagcccgctacagcagtcgcagtctccgtggagcgggcggaagccttttttctccctttcgtttacctcttcattctactctaaaggcatcgttattaggaaaatcctgttgcgaataagaaggattccacagatcacataccggagaggttttgcctcagctgctctcaactttgtaatcttgtgaagaagctgacaagcttggctgattgcagagcactatgaggactgaacgacagtgggttttaattcagatatttcaagctggtggtccagtacctccaaagatatggaatacactcctgaaatatcctgaaaacttttttttttcagaatcctttaataagcagttatgtcaatctgaaagttgcttacttgtactttatattaatagctattcttgtttttcttatccaaagaaaaatcctctaatccccttttcacatgatagttgttaccatgtttaggcattagtcacatcaacccctctcctctcccaaacttctcttcttcaaatcaaactttattagtccctcctttataatgattccttgcctcgttttatccagatcaattttttttcactttgatgcccagagctgaagaaatggactactgtataaattattcattgccaagagaataattgcattttaaacccatattataacaaagaataatgattatattttgtgatttgtaacaaataccctttattttcccttaactattgaattaaatattttaattatttgtattctctttaactatcttggtatattaaagtattatcttttatatatttatcaatggtggacacttttataggtactctgtgtcatttttgatactgtaggtatcttatttcatttatctttattcttaatgtacgaattcataatatttgattcagaacaaatttatcactaattaacagagtgtcaattatgctaacatctcatttactgattttaatttaaaacagtttttgttaacatgcatgtttagggttggcttcttaataatttcttcttcctcttctctctctcctcttcttttggtcagtgttgtgcgggttaatacaacaaactgtaacaagtgtacctggtatggacttgttgtccgggacgtacattttcgcggtcctgctagcatgcgtggtgttccactctggcgcccaggagaaaaactacaccatccgagaagaaatgccagaaaacgtcctgataggcgacttgttgaaagaccttaacttgtcgctgattccaaacaagtccttgacaactgctatgcagttcaagctagtgtacaagaccggagatgtgccactgattcgaattgaagaggatactggtgagatcttcactactggcgctcgcattgatcgtgagaaattatgtgctggtatcccaagggatgagcattgcttttatgaagtggaggttgccattttgccggatgaaatatttagactggttaagatacgttttctgatagaagatataaatgataatgcaccattgttcccagcaacagttatcaacatatcaattccagagaactcggctataaactctaaatatactctcccagcggctgttgatcctgacgtaggaataaacggagttcaaaactacgaactaattaagagtcaaaacatttttggcctcgatgtcattgaaacaccagaaggagacaagatgccacaactgattgttcaaaaggagttagatagggaagagaaggatacctacgtgatgaaagtaaaggttgaagatggtggctttcctcaaagatccagtactgctattttgcaagtgagtgttactgatacaaatgacaaccacccagtctttaaggagacagagattgaagtcagtataccagaaaatgctcctgtaggcacttcagtgacacagctccatgccacagatgctgacataggtgaaaatgccaagatccacttctctttcagcaatctagtctccaacattgccaggagattatttcacctcaatgccaccactggacttatcacaatcaaagaaccactggatagggaagaaacaccaaaccacaagttactggttttggcaagtgatggtggattgatgccagcaagagcaatggtgctggtaaatgttacagatgtcaatgataatgtcccatccattgacataagatacatcgtcaatcctgtcaatgacacagttgttctttcagaaaatattccactcaacaccaaaattgctctcataactgtgacggataaggatgcggaccataatggcagggtgacatgcttcacagatcatgaaatccctttcagattaaggccagtattcagtaatcagttcctcctggagactgcagcatatcttgactatgagtccacaaaagaatatgccattaaattactggctgcagatgctggcaaacctcctttgaatcagtcagcaatgctcttcatcaaagtgaaagatgaaaatgacaatgctccagttttcacccagtctttcgtaactgtttctattcctgagaataactctcctggcatccagttgacgaaagtaagtgcaatggatgcagacagtgggcctaatgctaagatcaattacctgctaggccctgatgctccacctgaattcagcctggattgtcgtacaggcatgctgactgtagtgaagaaactagatagagaaaaagaggataaatatttattcacaattctggcaaaagataacggggtaccacccttaaccagcaatgtcacagtctttgtaagcattattgatcagaatgacaatagcccagttttcactcacaatgaatacaacttctatgtcccagaaaaccttccaaggcatggtacagtaggactaatcactgtaactgatcctgattatggagacaattctgcagttacgctctccattttagatgagaatgatgacttcaccattgattcacaaactggtgtcatccgaccaaatatttcatttgatagagaaaaacaagaatcttacactttctatgtaaaggctgaggatggtggtagagtatcacgttcttcaagtgccaaagtaaccataaatgtggttgatgtcaatgacaacaaaccagttttcattgtccctccttccaactgttcttatgaattggttctaccgtccactaatccaggcacagtggtctttcaggtaattgctgttgacaatgacactggcatgaatgcagaggttcgttacagcattgtaggaggaaacacaagagatctgtttgcaatcgaccaagaaacaggcaacataacattgatggagaaatgtgatgttacagaccttggtttacacagagtgttggtcaaagctaatgacttaggacagcctgattctctcttcagtgttgtaattgtcaatctgttcgtgaatgagtcggtgaccaatgctacactgattaatgaactggtgcgcaaaagcactgaagcaccagtgaccccaaatactgagatagctgatgtatcctcaccaactagtgactatgtcaagatcctggttgcagctgttgctggcaccataactgtcgttgtagttattttcatcactgctgtagtaagatgtcgccaggcaccacaccttaaggctgctcagaaaaacaagcagaattctgaatgggctaccccaaacccagaaaacaggcagatgataatgatgaagaaaaagaaaaagaagaagaagcattcccctaagaacttgctgcttaattttgtcactattgaagaaactaaggcagatgatgttgacagtgatggaaacagagtcacactagaccttcctattgatctagaagagcaaacaatgggaaagtacaattgggtaactacacctactactttcaagcccgacagccctgatttggcccgacactacaaatctgcctctccacagcctgccttccaaattcagcctgaaactcccctgaattcgaagcaccacatcatccaagaactgcctctcgataacacctttgtggcctgtgactctatctccaagtgttcctcaagcagttcagatccctacagcgtttctgactgtggctatccagtgacgaccttcgaggtacctgtgtccgtacacaccagaccggtaggtatccaagtttctaacacaactttctaactatttttttattattattttcagttgatgtagaactttacaaaatctattgacttcaaagagggatcaaaacaatcatattctacagatgtacccaatagatatatggattcaattaagtttggtagaagatgagaacaaaataactactgatttaggaaaattggatgcagaataataattatagtaggggcaattttgtctgtagatggcagtatgacaattcttgctagagaatatattgaaaaaaacttcaacacaaagggttgtagcactgtcctcagtaccattgtgtgcatgaggatcagaatagtctgggctagatacatcacattaaagcttttcagaatctgataaatagctctaaatactaatgatattgagaagcctagcttcacttgggaaaatctgtggctgttcacagaaattcagcaccaagttattccccccatactctaccaggccttcaggtcctcataaagaaaagtgtcgttttcagattaggaactcaaaattattttggtgcatcaaatctacagtcacacaatataacaagaatgggattagaaaaatgaaagcctactcattctcatctttaagccagagaatgaaatatatatgaggtctctggatagctatttaaatatttgcatatttatgcaaggtattttgagcccttcagaagacattctactgattccaggacatcaactattgaaatctgcagtgagatataactttctaggaacaacaaaattccattccccttccaaaaaatttcaatgattgtgatttcaaaattaggctaagatcattaattttgtaatctagatttcccattataaaagcaagcaaaaatcatcttaaaaatgatgtcctagtgaaccttgtgctttctttagctgtaatctggcaatggaaatttaaaatttatggaagagacagtgcagcacaataacagagtactctcatgctgtttctctgtttgctctgaatcaacagccatgatgtaatataaggctgtcttggtgtatacacttatggttaatatatcagtcatgaaacatgcaattacttgccctgtctgattgttgaataattaaaacattatctccaggagtttggaagtgagctgaactagccaaactactctctgaaaggtatccagggcaagagacatttttaagaccccaaacaaacaaaaaacaaaaccaaaacactctggttcagtgttttgaaaatattcactaacataatattgctgagaaaatcatttttattacccaccactctgcttaaaagttgagtgggccgggcgcggtggctcacgcctgtaatcccagcactttgggaggccgaggcgggtggatcacgaggtcaggagattgagaccatcctggctaacacggtgaaaccccatctccactaaaaatacaaaaaattagcctggcgtggtggcgggcgcctgtagtcccagctactcgggaggctgaggcaggagaatagcgtgaacccgggaggcggagcttgcagtgagccgagatggcgccactgcactccagcctgggtgacagagcaagactctgtctcaaaaagaaaaaaatgttcaatgatagaaaataattttactaggtttttatgttgattgtactcatgctgttccactccttttaattattaaaaagttatttttggctgggtgtggtggctcacacctgtaatcccagcactttgggaggccgaggtgggtggatcacctgaggtcaggagttcaagaccagtctggccaacatccaatgaaggaggttgtgcgatcttgcacccccatgaaagagtctacaactatggagatctggattcatccccaaccacagcggaaatctgaagggaaagtggcaggaaagtcccagcggcgtgtcacatttcacctgccagaaggctctcaggaaagcagcagtgatggtggactgggagaccatgatgcaggcagccttaccagcacatctcatggcctgccccttggctatcctcaggaggagtactttgatcgtgctacacccagcaatcgcactgaaggggatggcaactccgatcctgaatctagtaactttcatacctggactaaagaaagctatccaggtgtggtggtatctgcagaaataactgttcaaccaactgtggaagaggcctctgacaactgcactcaagaatgtctcatctatggccattctgatgcctgctggatgccggcatctctggatcattccagctcttcgcaagcacaggcctctgctctatgccacagcccaccactgtcacaggcctctactcagcaccacagcccacgagtgacacagaccattgctctctgccacagccctccagtgacacagaccatcgcattgtgccacagcccaccaccgatacaggtgtctgctctccaccacagtcctcctctagtgcaggctactgcacttcaccacagcccaccatcagcacaggcctcagccctctgctacagccctcctttagcacaggctgctgcaatcagccacagctctcctctgccacaggttattgccctccatcgtagtcaggcccaatcatcagtcagtttgcagcaaggttgggtgcaaggtgctgatgggctatgctctgttgatcagggagtgcaaggtagtgcaacatctcagttttacaccatgtctgaaagacttcatcccagtgatgattcaattaaagtcattcctttgacaaccttcactccacgccaacaggccagaccgtccagaggtgattcccccattatggaagaacatcccttgtaaagctaaaatagttacttcaaattttcagaaaagatgtatatagtcaaaatttaagatacaattccaatgagtattctgattatcagatttgtaaataactatgtaaatagaaacagataccagaataaatctacagctagacccttagtcaatagttaaccaaaaaattgcaatttgtttaattcagaatgtgtatttaaaaagaaaaggaatttaacaatttgcatccccttgtacagtaaggcttatcatgacagagcgcactatttctgatgtacagtattttttgttgtttttatcatcatgtgcaatattactgatttgtttccatgctgattgtgtggaaccagtatgtagcaaatggaaagcctagaaatatcttattttctaagtttacctttagtttacctaaacttttgttcagataacgttaaaaggtatacgtactctagcctttttttgggctttctttttgatttttgtttgttgttttcagtttttttgttgttgttagtgagtctcccttcaaaatacgcagtaggtagtgtaaatactgcttgtttgtgtctctctgctgtcatgttttctaccttattccaatactatattgttgataaaatttgtatatacattttcaataaagaatatgtataaactgtacagatctagatctacaacctatttctctactctttagtagagttcgagacacagaagtgcaataactgccctaattaagcaactatttgttaaaaagggcctctttttactttaatagtttagtgtaaagtacatcagaaataaagctgtatctgccattttaagcctgtagtccattattacttgggtctttacttctgggaatttgtatgtaacagcctagaaaattaaaaggaggtggatgcatccaaagcacgagtcacttaaaatatcgacggtaaactactattttgtagagaaactcaggaagatttaaatgttgatttgacagctcaataggctgttaccaaagggtgttcagtaaaaataacaaatacatgtaactgtagataaaaccatatactaaatctataagactaagggatttttgttattctagctcaacttactgaagaaaaccactaataacaacaagaatatcaggaaggaacttttcaagaaatgtaattataaatctacatcaaacagaattttaaggaaaaatgcagagggagaaataaggcacatgactgcttcttgcagtcaacaagaaataccaataacacacacagaacaaaaaccatcaaaatctcatatatgaaataaaatatattcttctaagcaaagaaacagtactattcatagaaaacattagttttcttctgttgtctgttatttccttcttgtatcctcttaactggccattatcttgtatgtgcacattttataaatgtacagaaacatcaccaacttaattttcttccatagcaaaactgagaaaataccttgtttcagtataacactaaaccaagagacaattgatgtttaatgggggcggttggggtgggggggggagtcaatatctcctattgattaacttagacatagattttgtaatgtataacttgatatttaatttatgattaaactgtgtgtaaattttgtaacataaactgtggtaattgcataatttcattggtgaggatttccactgaatattgagaaagtttcttttcatgtgcccagcaggttaagtagcgttttcagaatatacattattcccatccattgtaaagttccttaagtcatatttgactgggcgtgcagaataacttcttaacttttaactatcagagtttgattaataaaattaattaatgttttttctccttcgtgttgttaatgttccaagggatttggagcatactggttttccaggtgcatgtgaatcccgaaggactgatgatatttgaatgtttattaaattattatcatacaaatgtgttgatattgtggctattgttgatgttgaaaattttaaacttggggaagattaagaaaagaaccaatagtgacaaaaatcagtgcttccagtagattttagaacattctttgcctcaaaaaacctgcaaagatgatgtgagattttttcttgtgttttaattattttcacattttctctctgcaaaactttagttttctgatgatctacacacacacacacacacacacgtgcacacacacacacatttaaatgatataaaaagaagaggttgaaagattattaaataacttatcaggcatctcaatggttactatctatgttagtgaaaatcaaataggactcaaagttggatatttgggatttttcttctgacagtataatttattgagttactagggaggttcttaaatcctcatatctggaaacttgtgacgttttgacacctttcctatagatgatataggaatgaaccaatacgcttttattaccctttctaactctgattttataatcagacttagattgtgtttagaatattaaatgactgggcaccctcttcttggtttttaccagagaggctttgaatggaagcaggctgagagtagccaaagaggcaaggggtattagcccagttattctcccctatgccttccttctctttctaagcgtccactaggtctggccttggaaacctgttacttctagggcttcagatctgatgatatctttttcatcacattacaagttatttctctgactgaatagacagtggtataggttgacacagcacacaagtggctattgtgatgtatgatgtatgtagtcctacaactgcaaaacgtcttactgaaccaacaatcaaaaaatggttctgttttaaaaaggattttgtttgatttgaaattaaaacttcaagctgaatgacttatatgagaataatacgttcaatcaaagtagttattctattttgtgtccatattccattagattgtgattattaattttctagctatggtattactatatcacacttgtgagtatgtattcaaatactaagtatcttatatgctacgtgcatacacattcttttcttaaactttacctgtgttttaactaatattgtgtcagtgtattaaaaattagcttttacatatgatatctacaatgtaataaatttagagagtaattttgtgtattcttatttacttaacattttacttttaattatgtaaatttggttagaaaataataataaatggttagtgctattgtgtaatggtagcagttacaaagagcctctgccttcccaaactaatatttatcacacatggtcattaaatgggaaaaaaatagactaaacaaatcacaaattgttcagttcttaaaatgtaattatgtcacacacacaaaaaatccttttcaatcctgagaaaattaaaggcgttttactcacatggctatttcaacattagttttttttgtttgtttctttttcatggtattactgaaggtgtgtatactccctaatacacatttatgaaaatctacttgtttaggcttttatttatactcttctgatttatattttttattataattattatttcttatctttcttcttttatattttttggaaaccaaatttatagttagtttaggtaaactttttattatgaccattagaaactattttgaatgcttccaactggctcaattggccgggaaaacatgggagcaagagaagctgaaatatatttctgcaagaacctttctatattatgtgccaattaccacaccagatcaattttatgcagaggccttaaaatattctttcacagtagctttcttacactaaccgtcatgtgcttttagtaaatatgatttttaaaagcagttcaagttgacaacagcagaaacagtaacaaaaaaatctgctcagaaaaatgtatgtgcacaaataaaaaaaattaatggcaattgtttagtgattgtaagtgatactttttaaagagtaaactgtgtgaaatttatactatccctgcttaaaatattaagatttttatgaaatatgtatttatgtttgtattgtgggaagattcctcctctgtgatatcatacagcatctgaaagtgaacagtatcccaaagcagttccaaccatgctttggaagtaagaaggttgactattgtatggccaaggatggcagtatgtaatccagaagcaaacttgtattaattgttctatttcaggttctgtattgcatgttttcttattaatatatattaataaaagttatgagaaataaa

SEQ ID NO: 965 - DNA, 2949 bp, Homo sapiens; identical to SEQ ID NO: 528

SEQ ID NO: 966 - DNA, 3615 bp, Homo sapiens
ccggccagcgggcgggctccccagccaggccgctgcacctgtcagaaacagaaggcagatagagagggagtgagaggcaggagctgagacacagatcctggaggaagaagaccaaaggaagggggcagagacagaaagggaggtgctaggacaaaactcgaaaggtggccctatcagggaagcagaggagaggccgttctagggaagcccagctccggcacttttggccccaactcccgcaggtctgctggctccaggaaaggtggaggagggagggaggagtgggagaatgtgggcgcagggtgggacatgggcatggccaggggcagcctcactcgggttccaggggtgatgggagagggcactcagggcccagagctcagccttgaccctgacccttgctctccccaatccactccggggctcatgaaggggaacaagctggaggagcaggaccctagacctctgcagcccataccaggtctcatggaggggaacaagctggaggagcaggactctagccctccacagtccactccagggctcatgaaggggaacaagcgtgaggagcaggggctgggccccgaacctgcggcgccccagcagcccacggcggaggaggaggccctgatcgagttccaccgctcctaccgagagctcttcgagttcttctgcaacaacaccaccatccacggcgccatccgcctggtgtgctcccagcacaaccgcatgaagacggccttctgggcagtgctgtggctctgcacctttggcatgatgtactggcaattcggcctgcttttcggagagtacttcagctaccccgtcagcctcaacatcaacctcaactcggacaagctcgtcttccccgcagtgaccatctgcaccctcaatccctacaggtacccggaaattaaagaggagctggaggagctggaccgcatcacagagcagacgctctttgacctgtacaaatacagctccttcaccactctcgtggccggctcccgcagccgtcgcgacctgcgggggactctgccgcaccccttgcagcgcctgagggtcccgcccccgcctcacggggcccgtcgagcccgtagcgtggcctccagcttgcgggacaacaacccccaggtggactggaaggactggaagatcggcttccagctgtgcaaccagaacaaatcggactgcttctaccagacatactcatcaggggtggatgcggtgagggagtggtaccgcttccactacatcaacatcctgtcgaggctgccagagactctgccatccctggaggaggacacgctgggcaacttcatcttcgcctgccgcttcaaccaggtctcctgcaaccaggcgaattactctcacttccaccacccgatgtatggaaactgctatactttcaatgacaagaacaactccaacctctggatgtcttccatgcctggaatcaacaacggtctgtccctgatgctgcgcgcagagcagaatgacttcattcccctgctgtccacagtgactggggcccgggtaatggtgcacgggcaggatgaacctgcctttatggatgatggtggctttaacttgcggcctggcgtggagacctccatcagcatgaggaagggcgaggccagtaggaggggctggcaggaaaccctggacagacttgggggcgattatggcgactgcaccaagaatggcagtgatgttcctgttgagaacctttacccttcaaagtacacacagcaggtgtgtattcactcctgcttccaggagagcatgatcaaggagtgtggctgtgcctacatcttctatccgcggccccagaacgtggagtactgtgactacagaaagcacagttcctggggccaggtgcggtcgctcacacctgtaatcccagcactttgggaggccgaggcgggcagatcacgagggtactgctactataagctccaggttgacttctcctcagaccacctgggctgtttcaccaagtgccggaagccatgcagcgtgaccagctaccagctctctgctggttactcacgatggccctcggtgacatcccaggaatgggtcttccagatgctatcgcgacagaacaattacaccgtcaacaacaagagaaatggagtggccaaagtcaacatcttcttcaaggagctgaactacaaaaccaattctgagtctccctctgtcacgatggtcaccctcctgtccaacctgggcagccagtggagcctgtggttcggctcctcggtgttgtctgtggtggagatggctgagctcgtctttgacctgctggtcatcatgttcctcatgctgctccgaaggttccgaagccgatactggtctccaggccgagggggcaggggtgctcaggaggtagcctccaccctggcatcctcccctccttcccacttctgcccccaccccatgtctctgtccttgtcccagccaggccctgctccctctccagccttgacagcccctccccctgcctatgccaccctgggcccccgcccatctccagggggctctgcaggggccagttcctccacctgtcctctgggggggccctgagagggaaggagaggtttctcacaccaaggcagatgctcctctggtgggagggtgctggccctggcaagattgaaggatgtgcagggcttcctctcagagccgcccaaactgccgttgatgtgtggaggggaagcaagatgggtaagggctcaggaagttgctccaagaacagtagctgatgaagctgcccagaagtgccttggctccagccctgtaccccttggtactgcctctgaacactctggtttccccacccaactgcggctaagtctctttttcccttggatcagccaagcgaaacttggagctttgacaaggaactttcctaagaaaccgctgataaccaggacaaaacacaaccaagggtacacgcaggcatgcacgggtttcctgcccagcgacggcttaagccagcccccgactggcctggccacactgctctccagtagcacagatgtctgctcctcctcttgaacttgggtgggaaaccccacccaaaagccccctttgttacttaggcaattccccttccctgactcccgagggctagggctagagcagacccgggtaagtaaaggcagacccagggctcctctagcctcatacccgtgccctcacagagccatgccccggcacctctgccctgtgtctttcatacctctacatgtctgcttgagatatttcctcagcctgaaagtttccccaaccatctgccagagaactcctatgcatcccttagaaccctgctcagacaccattacttttgtgaacgcttctgccacatcttgtcttccccaaaattgatcactccgccttctcctgggctcccgtagcacactataacatctgctggagtgttgctgttgcaccatactttcttgtacatttgtgtctcccttcccaactagactgtaagtgccttgcggtcagggactgaatcttgcccgtttatgtatgctccatgtctagcccatcatcctgcttggagcaagtaggcaggagctcaataaatgtttgttgcatgaa

SEQ ID NO: 967 - DNA, 1723 bp, Homo sapiens
cttggggactgcccagccctcagctgtgttattattcggtgataggtatttgctaattacttccaaaagcctcccatctgtcatcccacccagactgcgcgcttctaattcctcctaccccacatgctgtgcccaatgaaaagtatggtcagcgagcgaaggtttgcaaggagacagacgagggcgaaattaagccaggcggcttccctttaaatcctcgcaaagcagaagggcccctcactctggcagcaggccttggccaaggggcctttagccctgacgacccggggaagagtctcccaaagcagaacgcccggtccggcgcccagaccaaacgcgggggaaccggaagggcgaggcctccacggagaccagcctacagccgcctgcatctgtatccagcgccaggtcccgccagtcccagctgcgcgcgccccccagtcccgcacccgttcggcccaggctaagttagccctcaccatgccggtcaaaggaggcaccaagtgcatcaaatacctgctgttcggatttaacttcatcttctggagctcgcctaggatttgagctggggtgtgtgtctgctcccagctcaagtccctccgagtgccagagaggaaggcagggagaagcggagcacccctctttgggccaaggccaaggaggactgtgcttgccgggattgctgtccttgccattggactatggctccgattcgactctcagaccaagagcatcttcgagcaagaaactaataataataattccagcttctacacaggagtctatattctgatcggagccggcgccctcatgatgctggtgggcttcctgggctgctgcggggctgtgcaggagtcccagtgcatgctgggactgttcttcggcttcctcttggtgatattcgccattgaaatagctgcggccatctggggatattcccacaaggatgaggtgattaaggaagtccaggagttttacaaggacacctacaacaagctgaaaaccaaggatgagccccagcgggaaacgctgaaagccatccactatgcgttgaactgctgtggtttggctgggggcgtggaacagtttatctcagacatctgccccaagaaggacgtactcgaaaccttcaccgtgaagtcctgtcctgatgccatcaaagaggtcttcgacaataaattccacatcatcggcgcagtgggcatcggcattgccgtggtcatgatatttggcatgatcttcagtatgatcttgtgctgtgctatccgcaggaaccgcgagatggtctagagtcagcttacatccctgagcaggaaagtttacccatgaagattggtgggattttttgtttgtttgttttgttttgtttgttgtttgttgtttgtttttttgccactaattttagtattcattctgcattgctagataaaagctgaagttactttatgtttgtcttttaatgcttcattcaatattgacatttgtagttgagcggggggtttggtttgctttggtttatattttttcagttgtttgtttttgcttgttatattaagcagaaatcctgcaatgaaaggtactatatttgctagactctagacaagatattgtacataaaagaatttttttgtctttaaatagatacaaatgtctatcaactttaatcaagttgtaacttatattgaagacaatttgatacataataaaaaattatgacaatgtc

SEQ ID NO: 968 - DNA, 2402 bp, Homo sapiens; identical to SEQ ID NO: 525

SEQ ID NO: 969 - DNA, 1753 bp, Homo sapiens; identical to SEQ ID NO: 198

SEQ ID NO: 970 - DNA, 6174 bp, Homo sapiens
gcgcccagaacgccccggccatgggcatccgaggcatgctgcgagccgcagtgatcctgctgctcatcaggacctggctcgcggagggcaactaccccagtcccatcccgaaattccacttcgagttctcctctgctgtgcccgaagtcgtcctgaacctcttcaactgcaaaaattgtgcaaatgaagctgtggttcaaaagattttggacagggtgctgtcaagatacgatgtccgcctgagaccgaattttggaggtgcccctgtgcctgtgagaatatctatttatgtcacgagcattgaacagatctcagaaatgaatatggactacacgatcacgatgttttttcatcagacttggaaagattcacgcttagcatactatgagaccaccctgaacttgaccctggactatcggatgcatgagaagttgtgggtccctgactgctactttctgaacagcaaggatgctttcgtgcatgatgtgactgtggagaatcgcgtgtttcagcttcacccagatggaacggtgcggtacggcatccgactcaccactacagcagcttgttccctggatctgcataaattccctatggacaagcaggcctgcaacctggtggtagagagctatggttacacggttgaagacatcatattattctgggatgacaatgggaacgccatccacatgactgaggagctgcatatccctcagttcactttcctgggaaggacgattactagcaaggaggtgtatttctacacaggttcctacatacgcctgatactgaagttccaggttcagagggaagttaacagctaccttgtgcaagtctactggcctactgtcctcaccactattacctcttggatatcgttttggatgaactatgattcctctgcagccagggtgacaattggcttaacttcaatgctcatcctgaccaccatcgactcacatctgcgggataagctccccaacatttcctgtatcaaggccattgatatctatatcctcgtgtgcttgttctttgtgttcctgtccttgctggagtatgtctacatcaactatcttttctacagtcgaggacctcggcgccagcctaggcgacacaggagaccccgaagagtcattgcccgctaccgctaccagcaagtggtggtaggaaacgtgcaggatggcctgattaacgtggaagacggagtcagctctctccccatcaccccagcgcaggcccccctggcaagcccggaaagcctcggttctttgacgtccacctccgagcaggcccagctggccacctcggaaagcctcagcccactcacttctctctcaggccaggcccccctggccactggagaaagcctgagcgatctcccctccacctcagagcaggcccggcacagctatggtgttcgctttaatggtttccaggctgatgacagtatttttcctaccgaaatccgcaaccgtgtcgaagcccatggccatggtgttacccatgaccatgaagattccaatgagagcttgagctcggatgagcgccatggccatggccccagtgggaagcccatgcttcaccatggcgagaagggtgtgcaagaagcaggctgggaccttgatgacaacaatgacaagagcgactgccttgccattaaggagcaattcaagtgtgatactaacagtacctggggccttaatgatgatgagctcatggcccatggccaagagaaggacagtagctcagagtctgaggatagttgccccccaagccctgggtgctccttcactgaagggttctccttcgatctctttaatcctgactacgtcccaaaggtcgacaagtggtcccggttcctcttccctctggcctttgggttgttcaacattgtttactgggtataccatatgtattagtcccccagtgctccagaacagcgggagcactgtgctgtgctcctttcagtttcttttgggtttgtttttccctctttcctttgttccttttattttgtggttatttgggcaatccaataagttcatacttctctttataaacatgaggtggggagtaattggaaagaacatgttctagctggaagggaagggattgaggaggagttggaggtatacagcacatggatttcctttcctgctagaagactctcaccttttcaaagacttgtaacaaggaataagcatagaaaagcccctggaaatgtttagaggacagagaagagccaggttgggggatggggcaaggatctgggccttttgcccacaaacatttctggggggcttttctgtcccccttgaggtgtcaacatttctttttcattacatgttttcttctttttttgtttcctcctagggattatgggtcttgttcaccctctgcttagggctttatagaagaaagtcaagctgggttgggctggggttcatagctaaagggctagccatggcttagaagttcagggaacttcctataggaaacttagggagcatttgtaagtgcctttcccccactgtatggcatttgactgtggtgttttgatgcaagcgtggaaggggaatgtgggtggatggggctgcagagtgagacatcagggtgagagagcacatactcagcttgtggggttggcagagggtggggggtgatgtcaggttggaaattacacagttgagctggcctcttcggagggattggaacttgcctatatttctgcttcagaacgcttggcaatagagactcaatacatctgtctaagtcaggagttagctttccgtcagttgctgagttgatcaccagttacagcacttggtgaataagcactaaggttaggataattcacacttgctattttaccatctgatctagactagcagatgaatatctatcgtaagtctatatactaatcctttctatttgtctagtgcatagtaagtgtcaacaagctccctgacccattacatcactggagcctcacaggagccctgtaagccagggaaggcaaagcacattgtccccagtgttccaaggaaaacgaatggagcttatgccgcatgcttgaggacatgcagccagtgagtggtagatccaccccacttgctctttcttgtctttttcctcctgactgtcccaactgaggcatttccttttcttccctccctaaagagggtgctccagagggcccccaccacatcctctagcacctggggcatctctgcaggaataggctggtgaccagccaatgagcgtgacgtgagcagatggagaacacactctctgcccactgagcagggcccctaacggaagtaggattggccagcattccaacttgccaagcagctccacctcactgatggaggttgtgagggagtgaactttgccgagcactcaacatatgccacctcttcctccctatgcagtctctccctcagtcccttacccctctacccactcaccctttaactgtgcttctgtgtttgtgtttctgtatatacctgggtgtatgcatatgcagcagggtgggtgtatgtacatatacaaccatttgagaagctgcatagtgccgtgtctagtggtgtaaatctacattggtgtgtacagaattgtatctacagcatgtggatgcatgcgtgtgtgtgcacatccctgtgaaagtgtggcttatgtatgtgtatgcttgtgtacacatgggtctatgctgagtgcatgtatataagggcatgtctgcatatctatgtttatctgatttgaatgggtgtgaaaggaaatacccctgaaagcatatgtattccctgttggtgacccttctagaaccactataattcccttggcctgctcccatatggtggaggggccctatttggccgggctgcttaactgactgtttctttccaacttcctgttccagggagcagcatctcccagttcccttccactgtttgccctgtccctccatccatctgtgctgtctcctagatagaagactggggaagtgaatgtagtcctaagaagtggtgagctagtgccttgaggtaggaagtggttaatccatggaagaagctgcaagtacagagcatttcactttgtcctagaggaacatgtttcggggtaacaggctggggagtgaggctgaaagaggcattgagaatagacacttgtacagtcacatacacatacacacacacaaatcttgtacaacagttgaaaacaagaaagttaccactggaagagctaaaattgcctctttatttttggataccccatatagagattcaggtggaggggagagcagtgactccatgtctgaagctcccaatgtggctattgaaaggctggcttcctggagcctaagcattggttggttgacgtggatttgggtctccagcaccctggaggtgctttcaaccctgtggtggcaagcagttcatttgggataaagtcataaagggagattggagcagtgtgaagaaaaggagggttttaagatttgtctggaagcaatgcacatgaaggcttcacagcacagaggaagggcagcgaggccagttgtaaatatctctatagatccatatagctagatataatactataccttaaaaaggatatcttgccctgacgtgctgcaatgagagcagttgaactctactgcgactcatactctgtaggttaagtgtcaaaatgaggtggagatttggcagtgacaccctttcgggaacgtgaaccttctgagtttgctatggatttggtcattttagcctgcacgttgccagatctccccttgttgagtcttgtatgtggtctgtcctctgtgtcatttgagtcctcagctgtccccaaccccttcccagcccctccccagcctgcagtcaccccctgtccagcaagctgcctccatcccatccctctcctcacctcacaccaggtaactctggaagtgcagaatgcttggtagtttggagcttgggcagcatctgggatgcaacaacccctattttactcttctacccaccttccatttctttccttcccatcgacttccccgacccaggatcccttctttgccactatcatgggaaggacacccctgtctgtctttctgaagtatcattttattgtggggatgtgtgacacgtttcctaccaagttcttgccagttccatctgccactgtggggtgcctttgcacaggtcatggacgatctgctgggtcttactagagcctgtcaaatgtattcttacaattcatgtcatcttgttaatagcaggacttcaaagtctttgcatatttagagctgagttttgctgagactgtggccattcctaatgaggtttcctcattccatatatataatagctaacccttaaagccattaactaatgaatgcatttattaagctatccactcgcatggtaccctgctgtggtgatgagcagtaactttctagctattccatagcccaacatcaaaggaaatcgtgactcgtcctactagaagtgtagtgtctttgtgtttgttgtgtagtgtcctgtgatcaatataaaatctatattatcagtgttgggttttcaggggagggagggagaggatgttaaagtctctctttgataaacttaaattatgaaatagcccagttgttcagggtcacttctattgactcaatttgtgtgagactttgcactcactatctcgccggccggactgcatgcccagggtcagtagtcagcagagctaaaggtgcccgaatttagcacagctggctgtggtgcctgacatagggcagtaccgggggattcttcagaggtcagccaagtcggtaacattctgtgaagcagattaaatacagtaaaatcaaacaaacggaggtctttggaagtgatgctgggcccaggcagtgaaaatcaagaaaagaggagaaagaccaagacctggatgtcctggacgacctgacccaaaaaggggcacaaagcagcagagcttcaccaggtgactgggtggcttctttgtcctcattaaatgtacatctttgcatgaaaaggaccttgactggtccggactttaacaaagtaaaatatgaagaaacgtaaaattatgcttctgaaaaatatactgaaataaaattttgtaaatagctaaaagaaaaataaataaatataataacaa

SEQ ID NO: 971 - DNA, 1933 bp, Homo sapiens; identical to SEQ ID NO: 529

SEQ ID NO: 972 - DNA, 5707 bp, Homo sapiens; identical to SEQ ID NO: 515

SEQ ID NO: 973 - DNA, 4164 bp, Homo sapiens
cacttgtgctgagctactggctgatccccaaggacatccttctggcctctccttcacacctgggtcccctagccctgcatggagtctcgctctatcacccaggctggagtgcaatggcgcgatcttggctcaccgcaacctccatctcccaggttaaagcgattctcctgcctcagtctcctgagtagctgtgattacaggcgtgcgccatcacacccagctaatttttgtattttttagtagagatggggtttcaccatgttggcctaactcctgacctcgtgatctgcccatcttggcctccgaaagtactgggattacaggtgtgagccactgcacccggcccaaacatttctttttcttttcttttgagacagagtcttgctctgttgcccgtggctggagtgaaatggtgcgattatagttcactgcagcctcaaactcctggccttaagcgatcctcccatcctggcctcccaaagtgctgggattataggcatgagccgcagcaaccactcctcacatttcttgagcatctgtgatgtatcaagccagatgctgggcactgaggttgcagaaggcattgttcctgtcttctaggagccccaggctagcagggaagacggatgtgtatagagttaaccacaataccaggcctcaacttcccgtctgtaacacaggtggaccatgctagattgtcccagcctgccctgtgcttcattagccggtcaacagatccatctcaaatacctcccatgggtactcactgattgctttaacccaaaccatggcactcttgaagactttccctcaggaagctcaaggactatgcatccttctgggtcagaactggacacacagccaccagtgctggacaatggcggcggctcagggacacactggagccctggcccctgcagagctcccagcatggttgggaagagagatgcaaaatgaccacacggcgggtgaggaggagctccctcggtgcggctgggatgagccctagacactctcaatcacccccacgatgaccccttcccagaggtcccctcagtcatctgccctgaaccaagctcttcctgatcctagaccctccaccctccctctatcttccagggcttggtgacattccaggcagaaatttctgacccttttactttggtccctccctccccagcccagtctctggtcaaactggattcctggctgttcccagaacgagctgcctttccccaccttgccacctctgcccttgttctctctgcctgaatgtcctccttcactagcctcgctgccttgcacatctctcctgagggctgtcatcccagaatgagctgcatttgtccagcctggcccaccgtctaccagaacgtcctccttcagcctgtcccactgccttgcaaaacttttctgggggacctgttcacgatgccttctgtagcatactccaagaatccggcgccccctggagttgtgccacacagcacccctttgcagtcaagctccctcagcaccaccacctccaccctggaagagttccccttccctttgaaatctcatgggactttgcacccactctggctttattggaaggctttgtatgtctccacagggtaaacacccatttactggggtgatgatgtctccaggatctagttcatgtttgtcgttggtgactggccccacccagttctgggcaagcaggctggatcccggcaggaacagagcccaccagcctaaacttccatggaggtggagaggggacaggcttctgtctctttttggctgaaggtgcatcatgtccaaggcccctcttctagccaagcagagaagctgggtgataaggatgggtgagagtgggtgatgtaccccggagtcctggcctcccggctcctcactcccctacacgtaactttatccggccaatgccgcaaagactgctggtgaggccagatgcatgagtgatcatactcacaacagtcgtgaaactgccagtgatgaaactggtaaggacaagaaatgacaataatcaaggtggggtttctcgtggacgtttccaagacttcattctcaaattctctccctcagggtccccaccctgtcctcccacctaagcctggaatgagggggcactggcctgtggggaccctggtcttcaggctcccaaacctggctgggtctggttgccccctggccttaacctgtgaacatccagctgtccctgggctgtgattcagtgtctgtctcccgggtgacctcagcatgggctttgaggaaggggagagagtagtttcttctgagactggatagtgactcagggacccggggctggggcctcaaaagtgcctttgttggcctgggctcaggaatccagagaaactggtcaggaggaggccccagtgacaaaaacccctccctctgcccccgcccctctgccagagccatataactgctcaacctgtccccgagagagagtgccctggcagctgtcggctggaaggaactggtctgctcacacttgctggcttgcgcatcaggactggctttatctcctgactcacggtgcaaaggtgcactctgcgaacgttaagtccgtccccagcgcttggaatcctacggcccccacagccggatcccctcagccttccaggtcctcaactcccgtggacgctgaacaatggcctccatggggctacaggtaatgggcatcgcgctggccgtcctgggctggctggccgtcatgctgtgctgcgcgctgcccatgtggcgcgtgacggccttcatcggcagcaacattgtcacctcgcagaccatctgggagggcctatggatgaactgcgtggtgcagagcaccggccagatgcagtgcaaggtgtacgactcgctgctggcactgccgcaggacctgcaggcggcccgcgccctcgtcatcatcagcatcatcgtggctgctctgggcgtgctgctgtccgtggtggggggcaagtgtaccaactgcctggaggatgaaagcgccaaggccaagaccatgatcgtggcgggcgtggtgttcctgttggccggccttatggtgatagtgccggtgtcctggacggcccacaacatcatccaagacttctacaatccgctggtggcctccgggcagaagcgggagatgggtgcctcgctctacgtcggctgggccgcctccggcctgctgctccttggcggggggctgctttgctgcaactgtccaccccgcacagacaagccttactccgccaagtattctgctgcccgctctgctgctgccagcaactacgtgtaaggtgccacggctccactctgttcctctctgctttgttcttccctggactgagctcagcgcaggctgtgaccccaggagggccctgccacgggccactggctgctggggactggggactgggcagagactgagccaggcaggaaggcagcagccttcagcctctctggcccactcggacaacttcccaaggccgcctcctgctagcaagaacagagtccaccctcctctggatattggggagggacggaagtgacagggtgtggtggtggagtggggagctggcttctgctggccaggatagcttaaccctgactttgggatctgcctgcatcggcgttggccactgtccccatttacattttccccactctgtctgcctgcatctcctctgttccgggtaggccttgatatcacctctgggactgtgccttgctcaccgaaacccgcgcccaggagtatggctgaggccttgcccacccacctgcctgggaagtgcagagtggatggacgggtttagaggggaggggcgaaggtgctgtaaacaggtttgggcagtggtgggggagggggccagagaggcggctcaggttgcccagctctgtggcctcaggactctctgcctcacccgcttcagcccagggcccctggagactgatcccctctgagtcctctgccccttccaaggacactaatgagcctgggagggtggcagggaggaggggacagcttcacccttggaagtcctggggtttttcctcttccttctttgtggtttctgttttgtaatttaagaagagctattcatcactgtaattattattattttctacaataaatgggacctgtgcacagga

SEQ ID NO: 974 - DNA, 3632 bp, Homo sapiens
gcggcaagccccgcctcagcccctctggcaggctcccgccagcgtcgctgcggctccggcccgggagcgagcgcccggagctcggaaagatgcggcgcccgcggcggcctgggggtctcgggggatccgggggtctccggctgctcctctgcctcctgctgctgagcagccgcccggggggctgcagcgccgttagtgcccacggctgtctatttgaccgcaggctctgctctcacctggaagtctgtattcaggatggcttgtttgggcagtgccaggtgggagtggggcaggcccggccccttttgcaagtcacctccccagttctccaacgcttacaaggtgtgctccgacaactcatgtcccaaggattgtcctggcacgatgacctcacccagtatgtgatctctcaggagatggagcgcatccccaggcttcgccccccagagccccgtccaagggacaggtctggcttggcacccaagagacctggtcctgctggagagctgcttttacaggacatccccactggctccgcccctgctgcccagcatcggcttccacaaccaccagtgggcaaaggtggagctggggccagctcctctctgtcccctctgcaggctgagctgctcccgcctctcttggagcacctgctgctgcccccacagcctccccacccttcactgagttacgaacctgccttgctgcagccctacctgttccaccagtttggctcccgtgatggctccagggtctcagagggctccccagggatggtcagtgtcggccccctgcccaaggctgaagcccctgccctcttcagcagaactgcctccaagggcatatttggggaccaccctggccactcctacggggaccttccagggccttcacctgcccagctttttcaagactctgggctgctctatctggcccaggagttgccagcacccagcagggccagggtgccaaggctgccagagcaagggagcagcagccgggcagaggactccccagagggctatgagaaggaaggactaggggatcgtggagagaagcctgcttccccagctgtgcagccagatgcggctctgcagaggctggccgctgtgctggcgggctatggggtagagctgcgtcagctgacccctgagcagctctccacactcctgaccctgctgcagctactgcccaagggtgcaggaagaaatccgggaggggttgtaaatgttggagctgatatcaagaaaacaatggaggggccggtggagggcagagacacagcagagcttccagcccgcacatcccccatgcctggacaccccactgccagccctacctccagtgaagtccagcaggtgccaagccctgtctcctctgagcctcccaaagctgccagaccccctgtgacacctgtcctgctagagaagaaaagcccactgggccagagccagcccacggtggcaggacagccctcagcccgcccagcagcagaggaatatggctacatcgtcactgatcagaagcccctgagcctggctgcaggagtgaagctgctggagatcctggctgagcatgtgcacatgtcctcaggcagcttcatcaacatcagtgtggtgggaccagccctcaccttccgcatccggcacaatgagcagaacctgtctttggctgatgtgacccaacaagcagggctggtgaagtctgaactggaagcacagacagggctccaaatcttgcagacaggagtgggacagagggaggaggcagctgcagtccttccccaaactgcgcacagcacctcacccatgcgctcagtgctgctcactctggtggccctggcaggtgtggctgggctgctggtggctctggctgtggctctgtgtgtgcggcagcatgcgcggcagcaagacaaggagcgcctggcagccctggggcctgagggggcccatggtgacactacctttgagtaccaggacctgtgccgccagcacatggccacgaagtccttgttcaaccgggcagagggtccaccggagccttcacgggtgagcagtgtgtcctcccagttcagcgacgcagcccaggccagccccagctcccacagcagcaccccgtcctggtgcgaggagccggcccaagccaacatggacatctccacgggacacatgattctggcatacatggaggatcacctgcggaaccgggaccgccttgccaaggagtggcaggccctctgtgcctaccaagcagagccaaacacctgtgccaccgcgcagggggagggcaacatcaaaaagaaccggcatcctgacttcctgccctatgaccatgcccgcataaaactgaaggtggagagcagcccttctcggagcgattacatcaacgccagccccattattgagcatgaccctcggatgccagcctacatagccacgcagggcccgctgtcccataccatcgcagacttctggcagatggtgtgggagagcggctgcaccgtcatcgtcatgctgaccccgctggtggaggatggtgtcaagcagtgtgaccgctactggccagatgagggtgcctccctctaccacgtatatgaggtgaacctggtgtcggagcacatctggtgcgaggactttctggtgcggagcttctacctgaagaacgtgcagacccaggagacgcgcacgctcacgcagttccacttcctcagctggccggcagagggcacaccggcctccacgcggcccctgctggacttccgcaggaaggtgaacaagtgctaccggggccgctcctgccccatcatcgtgcactgcagtgatggtgcggggaggaccggcacctacatcctcatcgacatggtcctgaaccgcatggcaaaaggagtgaaggagattgacatcgctgccaccctggagcatgtccgtgaccagcggcctggccttgtccgctctaaggaccagtttgaatttgccctgacagccgtggcggaggaagtgaatgccatcctcaaggccctgccccagtgagaccctggggccccttggcgggcagcccagcctctgtccctctttgcctgtgtgagcatctctgtgtacccactcctcactgccccaccagccacctcttgggcatgctcagcccttcctagaagagtcaggaagggaaagccagaaggggcacgcctgcccagcctcgcatgccagagcctggggcatcccagagcccagggcatcccatgggggtgctgcagccaggaggagaggaaaggacatgggtagcaattctacccagagccttctcctgcctacattccctggcctggctctcctgtagctctcctggggttctgggagttccctgaacatctgtgtgtgtccccctatgctccagtatggaagaatggggtggagggtcgccacacccggctccccctgcttctcagccccgggcctgcctctgactcacacttgggcgctctgccctccctggcctcacgcccagcctcctcccaccaccctcccaccatgcgctgctcaacctctctccttctggcgcaagagaacatttctagaaaaaactacttttgtaccagtgtgaataaagttagtgtgttgtctgtgcagctgcaa

SEQ ID NO: 975 - DNA, 3027 bp, Homo sapiens
tcaatcagaaagcccttttcattgcaggagaagaggacaaagatactcagagagaaaaagtaaaagaccgaagaaggaggctggagagaccaggatccttccagctgaacaaagtcagccacaaagcagactagccagccggctacaattggagtcagagtcccaaagacatggggcttgttagagtgctgtgcaagatgtctggtaggggccccctttgcttccctggtggccactggattgtgtttctttggggtggcactgttctgtggctgtggacatgaagccctcactggcacagaaaagctaattgagacctatttctccaaaaactaccaagactatgagtatctcatcaatgtgatccatgccttccagtatgtcatctatggaactgcctctttcttcttcctttatggggccctcctgctggctgagggcttctacaccaccggcgcagtcaggcagatctttggcgactacaagaccaccatctgcggcaagggcctgagcgcaacggtaacagggggccagaaggggaggggttccagaggccaacatcaagctcattctttggagcgggtgtgtcattgtttgggaaaatggctaggacatcccgacaagtttgtgggcatcacctatgccctgaccgttgtgtggctcctggtgtttgcctgctctgctgtgcctgtgtacatttacttcaacacctggaccacctgccagtctattgccttccccagcaagacctctgccagtataggcagtctctgtgctgatgccagaatgtatggtgttctcccatggaatgctttccctggcaaggtttgtggctccaaccttctgtccatctgcaaaacagctgagttccaaatgaccttccacctgtttattgctgcatttgtgggggctgcagctacactggtttccctgctcaccttcatgattgctgccacttacaactttgccgtccttaaactcatgggccgaggcaccaagttctgatcccccgtagaaatccccctttctctaatagcgaggctctaaccacacagcctacaatgctgcgtctcccatcttaactctttgcctttgccaccaactggccctcttcttacttgatgagtgtaacaagaaaggagagtcttgcagtgattaaggtctctctttggactctcccctcttatgtacctcttttagtcattttgcttcatagctggttcctgctagaaatgggaaatgcctaagaagatgacttcccaactgcaagtcacaaaggaatggaggctctaattgaattttcaagcatctcctgaggatcagaaagtaatttcttctcaaagggtacttccactgatggaaacaaagtggaaggaaagatgctcaggtacagagaaggaatgtctttggtcctcttgccatctataggggccaaatatattctctttggtgtacaaaatggaattcattctggtctctctattaccactgaagatagaagaaaaaagaatgtcagaaaaacaataagagcgtttgcccaaatctgcctattgcagctgggagaagggggtcaaagcaaggatctttcacccacagaaagagagcactgaccccgatggcgatggactactgaagccctaactcagccaaccttacttacagcataagggagcgtagaatctgtgtagacgaagggggcatctggccttacacctcgttagggaagagaaacagggtgttgtcagcatcttctcactcccttctccttgataacagctaccatgacaaccctgtggtttccaaggagctgagaatagaaggaaactagcttacatgagaacagactggcctgaggagcagcagttgctggtggctaatggtgtaacctgagatggccctctggtagacacaggatagataactctttggatagcatgtctttttttctgttaattagttgtgtactctggcctctgtcatatcttcacaatggtgctcatttcatgggggtattatccattcagtcatcgtaggtgatttgaaggtcttgatttgttttagaatgatgcacatttcatgtattccagtttgtttattacttatttggggttgcatcagaaatgtctggagaataattctttgattatgactgttttttaaactaggaaaattggacattaagcatcacaaatgatattaaaaattggctagttgaatctattgggattttctacaagtattctgcctttgcagaaacagatttggtgaatttgaatctcaatttgagtaatctgatcgttctttctagctaatggaaaatgattttacttagcaatgttatcttggtgtgttaagagttaggtttaacataaaggttattttctcctgatatagatcacataacagaatgcaccagtcatcagctattcagttggtaagcttccaggaaaaaggacaggcagaaagagtttgagacctgaatagctcccagatttcagtcttttcctgtttttgttaactttgggttaaaaaaaaaaaaagtctgattggttttaattgaaggaaagatttgtactacagttcttttgttgtaaagagttgtgttgttcttttcccccaaagtggtttcagcaatatttaaggagatgtaagagctttacaaaaagacacttgatacttgttttcaaaccagtatacaagataagcttccaggctgcatagaaggaggagagggaaaatgttttgtaagaaaccaatcaagataaaggacagtgaagtaatccgtaccttgtgttttgttttgatttaataacataacaaataaccaacccttccctgaaaacctcacatgcatacatacacatatatacacacacaaagagagttaatcaactgaaagtgtttccttcatttctgatatagaattgcaattttaacacacataaaggataaacttttagaaacttatcttacaaagtgtattttataaaattaaagaaaataaaattaagaatgttctcaatcaaa

SEQ ID NO: 976 - DNA, 4064 bp, Homo sapiens; identical to SEQ ID NO: 193

SEQ ID NO: 977 - DNA, 4193 bp, Homo sapiens
ccgccccccaccggggcggggcgcggcggcggcgggggcagggaaccgggcagcggtggcggtggcggtggcgcgggcggacgaggcggaggcgcccttcgccgggcagaactggttaaagtcctatggctatctgcttccctatgactcacgggcatctgcgctgcactcagcgaaggccttgcagtcggcagtctccactatgcagcagttttacgggatcccggtcaccggtgtgttggatcagacaacgatcgagtggatgaagaaaccccgatgtggtgtccctgatcacccccacttaagccgtaggcggagaaacaagcgctatgccctgactggacagaagtggaggcaaaaacacatcacctacagcattcacaactataccccaaaagtgggtgagctagacacgcggaaagctattcgccaggctttcgatgtgtggcagaaggtgaccccactgacctttgaagaggtgccataccatgagatcaaaagtgaccggaaggaggcagacatcatgatcttttttgcttctggtttccatggcgacagctccccatttgatggagaagggggattcctggcccatgcctacttccctggcccagggattggaggagacacccactttgactccgatgagccatggacgctaggaaatgccaaccatgacgggaacgacctcttcctggtggctgtgcatgagctgggccacgcgctgggactggagcactccagcgaccccagcgccatcatggcgcccttctaccagtacatggagacgcacaacttcaagctgccccaggacgatctccagggcatccagaagatctatggacccccagccgagcctctggagcccacaaggccactccctacactccccgtccgcaggatccactcaccatcggagaggaaacacgagcgccagcccaggccccctcggccgcccctcggggaccggccatccacaccaggcaccaaacccaacatctgtgacggcaacttcaacacagtggccctcttccggggcgagatgtttgtctttaaggatcgctggttctggcgtctgcgcaataaccgagtgcaggagggctaccccatgcagatcgagcagttctggaagggcctgcctgcccgcatcgacgcagcctatgaaagggccgatgggagatttgtcttcttcaaaggtgacaagtattgggtgtttaaggaggtgacggtggagcctgggtacccccacagcctgggggagctgggcagctgtttgccccgtgaaggcattgacacagctctgcgctgggaacctgtgggcaagacctactttttcaaaggcgagcggtactggcgctacagcgaggagcggcgggccacggaccctggctaccctaagcccatcaccgtgtggaagggcatcccacaggctccccaaggagccttcatcagcaaggaaggatattacacctatttctacaagggccgggactactggaagtttgacaaccagaaactgagcgtggagccaggctacccgcgcaacatcctgcgtgactggatgggctgcaaccagaaggaggtggagcggcggaaggagcggcggctgccccaggacgacgtggacatcatggtgaccatcaacgatgtgccgggctccgtgaacgccgtggccgtggtcatcccctgcatcctgtccctctgcatcctggtgctggtctacaccatcttccagttcaagaacaagacaggccctcagcctgtcacctactataagcggccagtccaggaatgggtgtgagcagcccagagccctctctatccacttggtctggccagccaggcccttcctcaccagggtctgaggggcagctctggccagtgctcaccagggccagcagggccctaggctggggtcgtacagctgaagtggtgggtgcattggcctaggctgagcgtggggcagggaattatgggggctgtgccccagggtgggtgtctggcacccagctgccagccttctgtcctgggcaaactactccctacttaagggaataggccaggctccatccggaggcagggaccatgccaggaggagcccctgtggtcacggcatcctgtggtgtccatgaggtaccacagctccactcctggctggaacccagcaccctctgtgggaagccagcactagctctcatcccccatccgggagataccaccagtcctggtccccttttgccaacacctgctggtcagatgtccccctacccccaccccactgtcctccaaggctacaggacccctgcttctgacacagtgagcaacaagcctgggtttccctgctggcagacggcagatccctcaggaaacctgctccacttgtcagggtctcttcggagacccaggatttagggtcacatgctgcaggcagggctgtggcccagctgggtctgacaaggacccagctgtcacatcgtgaatatttaaatgtcctgtcactactgtcccattttgcaaaggctgcttgaggctttaggtgaactagaggtgactgtcttggtgatgaggccagcatagcggccctcccccaggcgacaaggaccaaggtgctgctaaggccactctagcgcccagacaccccagtagctgagctctgctcctatggctacagagctggggcagaagctgaccccatttctggaggaagatccgagtttgtgaccgtcctccactcccctctattgtcactgtccccagctttgctccagtctgtcacttgcagcctggagctcagcctcaccagttaggtgaggcagagatggctgcagggccaacactggcagagcctgggagtccttcggaaggggaccagggcgtctgaagtgctcagtgcccccactactctgaggccgactccagctactctgaggccgactcaatctctcggctggaagcagtgttttcccagagcttggcccttgctgacctcgctcactgggcccatcttcccacactgctcttagaaggacacccctaccggtagcagccccaagctgagggggctccctttttgaccttcactggcccgcccttcactgtctccagcaggagttcctagggcttggcctgccttgctccacagtacggcggaggcagccctgcttgtcactgaggagccctagacaaggccaatgggttcatcaatgcccactggctctctgccaaagccaaaaaggtgtcaggcagtctccagcgtgctggccgggtctcggatgccacccctgctcactgagcctgcatgggccttgcccccgaccctgtggtctctgggattggggtcggcttaccctgtagcacagacagggactcctgctgccctgggagctgtctcaagcaaaatctcttgtcccagaggtgcccatgtgggtccgctgtgtcccctgtcatcatccttgttttttctcattttggccaagggcaggctccctgggacaggcagggaacaactgcggagatattagtgattcataggtttgtacagtgttttatactttgcaaagcactttattagctcacacctgtccactcacatgaaactcgtgttaggccctgggaggccgacggtaactctcaccgtgccctcagatgaagcacagagaggttgttacttgcccgggccatccagtgggctggctgggtcttgtgtccccatctgtggacccctctagggtctgagatgagatgagaagtgtctcctgtatccacctcttcctggcctcccttcccccacttcctggtccctgtccactcctcaggttggtgctctcacttcttgaaagctctaggcacccccgcctcccgccaggctccccattggctcctggcaggccagctgagaatgaacaggagatggaggcaggcagcccaggctgcagaggtgagggatgtggggccaggcccagagggctcagcctagaggcttccaatctcagattctcctgcctgtggtcatctgtttgtccatcaccccaggacagggcagacagaggggcaaagcactgggggccccagagcctagcttcccctcagcctgggggacatcacagcatttcagtgtcagtcacattttaaactgatcagcctttgtataatgttttttaaatcatttctaaataaaacagaaatacagagtg

SEQ ID NO: 978 - DNA, 6628 bp, Homo sapiens; identical to SEQ ID NO: 522

SEQ ID NO: 979 - DNA, 4570 bp, Homo sapiens; identical to SEQ ID NO: 178

SEQ ID NO: 980 - DNA, 4890 bp, Homo sapiens
gcgcccagcctcgccgccgccgagcgcccgacgcgccacgccgcgctgggcagctggagagctggcggcggagcgggccgggagcggcgggggcggcgccgaggccgcgggcggggggaggagggccgcagccccggagaggggaaaaggcgggccggacggcgccagcagccagccccgaggacgcgagcggcagcaggtgtgcacagaggttctccactttgttttctgaactcgcggtcagcaggatggttttctctgtcaggcagtgtggccatgttggcagaactgaagaagttttactgacgttcaagatattccttgtcatcatttgtcttcatgtcgttctggtaacatccctggaagaagatactgataattccagtttgtcaccaccacctgaccagaggacagtcatattgatccctaaattatctgttgtcagttttgccccctcctccaatggtactccagaggttgaaacaacaagcctcaatgaatggagtaatgttactttaagcttactcccttcaaacgaaacagaaaaaactaaaatcactatagtaaaaaccttcaatgcatcaggcgtcaaaccccagagaaatatctgcaatttgtcatctatttgcaatgactcagcattttttagaggtgagatcatgtttcaatatgataaagaaagcactgttccccagaatcaacatataacgaatggcaccttaactggagtcctgtctctaagtgaattaaaacgctcagagctcaacaaaaccctgcaaaccctaagtgagacttactttataatgtgtgctacagcagaggcccaaagcacattaaattgtacattcacaataaaactgaataatacaatgaatgcatgtgctgtaatagctgctttggaaagagtaaagattcgaccaatggaacactgctgctgttctgtcaggataccctgcccttcctccccagaagagttggaaaagcttcagtgtgacctgcaggatcccattgtctgtcttgctgaccatccacgtggcccaccattttcttccagccaatccatcccagtggtgcctcgggccactgtgctttcccaggtccccaaagctacctcttttgctgagcctccagattattcacctgtgacccacaatgttccctctccaataggggagattcaacccctttcaccccagccttcagctcccatagcttccagccctgccattgacatgcccccacagtctgaaacgatctcttcccctatgccccaaacccatgtctccggcaccccacctcctgtgaaagcctcattttcctctcccaccgtgtctgcccctgcgaatgtcaacactaccagcgcacctcctgtccagacagacatcgtcaacaccagcagtatttctgatcttgagaaccaagtgttgcagatggagaaggctctgtccttgggcagcctggagcctaacctcgcaggagaaatgatcaaccaagtcagcagactccttcattccccgcctgacatgctggcccctctggctcaaagattgctgaaagtagtggatgacattggcctacagctgaacttttcaaacacgactataagtctaacctccccttctttggctctggctgtgatcagagtgaatgccagtagtttcaacacaactacctttgtggcccaagaccctgcaaatcttcaggtttctctggaaacccaagctcctgagaacagtattggcacaattactcttccttcatcgctgatgaataatttaccagctcatgacatggagctagcttccagggttcagttcaatttttttgaaacacctgctttgtttcaggatccttccctggagaacctctctctgatcagctacgtcatatcatcgagtgttgcaaacctgaccgtcaggaacttgacaagaaacgtgacagtcacattaaagcacatcaacccgagccaggatgagttaacagtgagatgtgtattttgggacttgggcagaaatggtggcagaggaggctggtcagacaatggctgctctgtcaaagacaggagattgaatgaaaccatctgtacctgtagccatctaacaagcttcggcgttctgctggacctatctaggacatctgtgctgcctgctcaaatgatggctctgacgttcattacatatattggttgtgggctttcatcaatttttctgtcagtgactcttgtaacctacatagcttttgaaaagatccggagggattacccttccaaaatcctcatccagctgtgtgctgctctgcttctgctgaacctggtcttcctcctggactcgtggattgctctgtataagatgcaaggcctctgcatctcagtggctgtatttcttcattattttctcttggtctcattcacatggatgggcctagaagcattccatatgtacctggcccttgtcaaagtatttaatacttacatccgaaaatacatccttaaattctgcattgtcggttggggggtaccagctgtggttgtgaccatcatcctgactatatccccagataactatgggcttggatcctatgggaaattccccaatggttcaccggatgacttctgctggatcaacaacaatgcagtattctacattacggtggtgggatatttctgtgtgatatttttgctgaacgtcagcatgttcattgtggtcctggttcagctctgtcgaattaaaaagaagaagcaactgggagcccagcgaaaaaccagtattcaagacctcaggagtatcgctggccttacatttttactgggaataacttggggctttgccttctttgcctggggaccagttaacgtgaccttcatgtatctgtttgccatctttaataccttacaaggatttttcatattcatcttttactgtgtggccaaagaaaatgtcaggaagcaatggaggcggtatctttgttgtggaaagttacggctggctgaaaattctgactggagtaaaactgctactaatggtttaaagaagcagactgtaaaccaaggagtgtccagctcttcaaattccttacagtcaagcagtaactccactaactccaccacactgctagtgaataatgattgctcagtacacgcaagcgggaatggaaatgcttctacagagaggaatggggtctcttttagtgttcagaatggagatgtgtgccttcacgatttcactggaaaacagcacatgtttaacgagaaggaagattcctgcaatgggaaaggccgtatggctctcagaaggacttcaaagcggggaagcttacactttattgagcaaatgtgattcctttcttctaaaatcaaagcatgatgcttgacagtgtgaaatgtccaattttaccttttacacaatgtgagatgtatgaaaatcaactcattttattctcggcaacatctggagaagcataagctaattaagggcgatgattattattacaagaagaaaccaagacattacaccatggtttttagacatttctgatttggtttcttatctttcattttataagaaggttggttttaaacaatacactaagaatgactcctataaagaaaacaaaaaaaggtagtgaactttcagctaccttttaaagaggctaagttatctttgataacatcatataaagcaactgttgacttcagcctgttggtgagtttagttgtgcatgcctttgttgtatataagctaaattctagtgacccatgtgtcaaaaatcttacttctacatttttttgtatttattttctactgtgtaaatgtattcctttgtagaatcatggttgttttgtctcacgtgataattcagaaaatccttgctcgttccgcaaatcctaaagctccttttggagatgatataggatgtgaaatacagaaacctcagtgaaatcaagaaataatgatcccagccagactgagaaaatgtaagcagacagtgccacagttagctcatacagtgcctttgagcaagttaggaaaagatgcccccactgggcagacacagccctatgggctcatggtttgacaaacagagtggagagaccatattttagccccactcaccctcttgggtgcacgacctgtacagccaaacacagcatccaatatgaatacccatcccctgaccgcatccccagtagtcagattatagaatctgcaccaagatgtttagctttataccttggccacagagagggatgaactgtcatccagaccatgtgtcaggaaaattgtgaacgtagatgaggtacatacactgccgcttctcaaatccccagagcctttaggaacaggagagtagactaggattccttctcttaaaaaggtacatatatatggaaaaaaatcatattgccgttctttaaaaggcaactgcatggtacattgttgattgttatgactggtacactctggcccagccagagctataattgttttttaaatgtgtcttgaagaatgcacagtgacaaggggagtagctattgggaacagggaactgtcctacactgctattgttgctacatgtatcgagccttgattgctcctagttatatacagggtctatcttgcttcctacctacatctgcttgagcagtgcctcaagtacatccttattaggaacatttcaaaccccttttagttaagtctttcactaaggttctcttgcatatatttcaagtgaatgttggatctcagactaaccatagtaataatacacatttctgtgagtgctgacttgtctttgcaatatttcttttctgatttatttaattttcttgtatttatatgttaaaatcaaaaatgttaaaatcaatgaaataaatttgcagttaagatcttt

SEQ ID NO: 981 - DNA, 2018 bp, Homo sapiens
ccggacgggacgtgcgcgctcaaaggttgcccgtctctgacgcccgcatttcctggtctggagccggctgagccacagcagggtcgccgcggggtcccggggccgtgctcccctgcccctcccgggagcgcgcggggcggggcggggcggggcgggaccaggcgggcgagctgggccctcgcccctccctcgggcggtcacctgggcacgggcgctgcaggtgtcggggcctcaaccttgcggagccgacagccatcgatcctcgggtggcctcgaggtggtggcagggccgccccctgcagtccggagacgaacgcacggaccgggcctccggaggcaggttcggctggaaggaaccgctctcgcttcgtcctacacttgcgcaaatgtctccgagcttactcacatagcatattggtatatcaaaatgaaatgcaaggaaccaaaaataacataattgaaggcagtaaaagtgaaattaaataggaagatcatcagtcaaggaagacccactggagaggacagaaaatgaagcagtgttttatcatgtgtatttcagcaggtcttcttgaaatttaactaaaaatatgactgctctctcttcagagaactgctcttttcagtaccagttacgtcaaacaaaccagcccctagatgttaactatctgctattcttgatcatacttgggaaaatattattaaatatccttacactaggaatgagaagaaaaaacacctgtcaaaattttatggaatatttttgcatttcactagcattcgttgatcttttacttttggtaaacatttccattatattgtatttcagggattttgtacttttaagcattaggttcactaaataccacatctgcctatttactcaaattatttcctttacttatggctttttgcattatccagttttcctgacagcttgtatagattattgcctgaatttctctaaaacaaccaagctttcatttaagtgtcaaaaattattttatttctttacagtaattttaatttggatttcagtccttgcttatgttttgggagacccagccatctaccaaagcctgaaggcacagaatgcttattctcgtcactgtcctttctatgtcagcattcagagttactggctgtcatttttcatggtgatgattttatttgtagctttcataacctgttgggaagaagttactactttggtacaggctatcaggataacttcctatatgaatgaaactatcttatattttcctttttcatcccactccagttatactgtgagatctaaaaaaatattcttatccaagctcattgtctgttttctcagtacctggttaccatttgtactacttcaggtaatcattgttttacttaaagttcagattccagcatatattgagatgaatattccctggttatactttgtcaatagttttctcattgctacagtgtattggtttaattgtcacaagcttaatttaaaagacattggattacctttggatccatttgtcaactggaagtgctgcttcattccacttacaattcctaatcttgagcaaattgaaaagcctatatcaataatgatttgttaatattattaattaaaagttacagctgtcataagatcataattttatgaacagaaagaactcaggacatattaaaaaataaactgaactaaaacaacttttgccccctgactgatagcatttcagaatgtgtcttttgaagggctatgataccagttattaaatagtgttttattttaaaaacaaaataattccaagaagtttttatagttattcagggacactatattacaaatattactttgttattaacacaaaaagtgataagagttaacatttggctatactgatgtttgtgttactcaaaaaaactactggatgcaaactgttatgtaaatctgagatttcactgacaactttaagatatcaacctaaacatttttattaaatgttcaaatgaaagcaagaaagtaaaaa

SEQ ID NO: 982 - DNA, 10912 bp, Homo sapiens
cccctttctccccctctgttaagtccctccccctcgccattcaaaagggctggctcggcactggctccttgcagtcggcgaactgtctgggcgggaggagccgtgagcagtagctgcactcagctgcccgcgcggcaaagaggaaggcaagccaaacagagtgcgcagagtggcagtgccagcggcgacacaggcagcacaggcagcccgggctgcctgaatagcctcagaaacaacctcagcgactccggctgctctgcggactgcgagctgtggcggtagagcccgctacagcagtcgcagtctccgtggagcgggcggaagccttttttctccctttcgtttacctcttcattctactctaaaggcatcgttattagagggtgcttaaaaagtacagatcaactggatggatgaatggatggaagaggatggaatatcttaacaaaacacattttccttaagtaaattcatgcatactccaaataaaatacagaatgtgaagtatctctgaactgtgctgttgaatatggtagctactagctacatgaaaatcctgttgtgaataagaaggattccacagatcacataccagagcggttttgcctcagctgctctcaactttgtaatcttgtgaagaagctgacaagcttggctgattgcagtgcactatgaggactgaatgacagtgggttttaattcagatatttcaagggtggtccagtacctccaaagatatggaatacactcctgaaatatcctgaaaccttttttttttcagaatcctttaataagcagttatgtcaatctgaaagttgcttacttgtactttatattaatagctattcttgtttttcttatccaaagaaaaatcctctaatccccttttcacatgatagttgttaccatgtttaggcgttagtcacatcaacccctctcctctcccaaacttctcttcttcaaatcaaactttattagtccctcctttataatgattccttgcctccttttatccagatcaattttttttcactttgatgcccagagctgaagaaatggactattgtataaattattcattgccaagagaataattgcattttaaacccatgttataacaaagaataatgattatattttgtgatttgtaacaaataccctttattttcccttaactattgaattaaatattttaattatttgtattctctttaactatcttggtatattaaagtattatcttttatatatttatcaatggtggacacttttataggtactctgtgtcatttttgatactgtaggtatcttatttcatttatctttattcttaatgtacgaattcataatatttgattcagaacagatttatcactaattaacagagtgtcaattatgctaacatctcatttactgattttaatttaaaacagtttttgttaacatgcatgtttagggttggcttcttaataatttcttcttcctcttctctctctcctcttcttttggtcagtgttgtgcgggttaatacaacaaactgtcacaagtgtttgttgtccgggacgtacattttcgcggtcctgctagtatgcgtggtgttccactctggcgcccaggagaaaaactacaccatccgagaagaaattccagaaaacgtcctgataggcaacttgttgaaagaccttaacttgtcgctgattccaaacaagtccttgacaactactatgcagttcaagctagtgtacaagaccggagatgtgccactgattcgaattgaagaggatactggtgagatcttcactaccggcgctcgcattgatcgtgagaaattatgtgctggtatcccaagggatgagcattgcttttatgaagtggaggttgccattttgccggatgaaatatttagactggttaagatacgttttctgatagaagatataaatgataatgcaccattgttcccagcaacagttatcaacatatcaattccagagaactcggctataaactctaaatatactctcccagcggctgttgatcctgacgtaggcataaacggagttcaaaactacgaactaattaagagtcaaaacatttttggcctcgatgtcattgaaacaccagaaggagacaagatgccacaactgattgttcaaaaggagttagatagggaagagaaggatacctatgtgatgaaagtaaaggttgaagatggtggctttcctcaaagatccagtactgctattttgcaagtaagtgttactgatacaaatgacaaccacccagtctttaaggagacagagattgaagtcagtataccagaaaatgctcctgtaggcacttcagtgacacagctccatgccacagatgctgacataggtgaaaatgccaagatccacttctctttcagcaatctagtctccaacattgccaggagattatttcacctcaatgccaccactggacttatcacaatcaaagaaccactggatagggaagaaacaccaaaccacaagttactggttttggcaagtgatggtggattgatgccagcaagagcaatggtgctggtaaatgttacagatgtcaatgataatgtcccatccattgacataagatacatcgtcaatcctgtcaatgacacagttgttctttcagaaaatattccactcaacaccaaaattgctctcataactgtgacggataaggatgcggaccataatggcagggtgacatgcttcacagatcatgaaattcctttcagattaaggccagtattcagtaatcagttcctcctggagaatgcagcatatcttgactatgagtccacaaaagaatatgccattaaattactggctgcagatgctggcaaacctcctttgaatcagtcagcaatgctcttcatcaaagtgaaagatgaaaatgacaatgctccagttttcacccagtctttcgtaactgtttctattcctgagaataactctcctggcatccagttgatgaaagtaagtgcaacggatgcagacagtgggcctaatgctgagatcaattacctgctaggccctgatgctccacctgaattcagcctggatcgtcgtacaggcatgctgactgtagtgaagaaactagatagagaaaaagaggataaatatttattcacaattctggcaaaagataatggggtaccacccttaaccagcaatgtcacagtctttgtaagcattattgatcagaatgacaatagcccagttttcactcacaatgaatacaaattctatgtcccagaaaaccttccaaggcatggtacagtaggactaatcactgtaactgatcctgattatggagacaattctgcagttacgctctccattttagatgagaatgatgacttcaccattgattcacaaactggtgtcatccgaccaaatatttcatttgatagagaaaaacaagaatcttacactttctatgtaaaggctgaggatggtggtagagtatcacgttcttcaagtgccaaagtaaccataaatgtggttgatgtcaatgacaacaaaccagttttcattgtccctccttacaactattcttatgaattggttctaccgtccactaatccaggcacagtggtctttcaggtaattgctgttgacaatgacactggcatgaatgcagaggttcgttacagcattgtaggaggaaacacaagagatctgtttgcaatcgaccaagaaacaggcaacataacattgatggagaaatgtgatgttacagaccttggtttacacagagtgttggtcaaagctaatgacttaggacagcctgattctctcttcagtgttgtaattgtcaatctgttcgtgaatgagtcagtgaccaatgctacactgattaatgaactggtgcgcaaaagcattgaagcaccagtgaccccaaatactgagatagctgatgtatcctcaccaactagtgactatgtcaagatcctggttgcagctgttgctggcaccataactgtcgttgtagttattttcatcactgctgtagtaagatgtcgccaggcaccacaccttaaggctgctcagaaaaacatgcagaattctgaatgggctaccccaaacccagaaaacaggcagatgataatgatgaagaaaaagaaaaagaagaagaagcattcccctaagaacctgctgcttaatgttgtcactattgaagaaactaaggcagatgatgttgacagtgatggaaacagagtcacactagaccttcctattgatctagaagagcaaacaatgggaaagtacaattgggtaactacacctactactttcaagcctgacagccctgatttggcccgacactacaaatctgcctctccacagcctgccttccaaattcagcctgaaactcccctgaatttgaagcaccacatcatccaagaactgcctctcgataacacctttgtggcctgtgactctatctccaattgttcctcaagcagttcagatccctacagcgtttctgactgtggctatccagtgacaaccttcgaggtacctgtgtccgtacacaccagaccgactgattccaggacatgaactattgaaatctgcagtgagatgtaactttctaggaacaacaaaattccattccccttccaaaaaatttcaatgattgtgatttcaaaattaggctaagatcattaattttgtaatctagatttcccattataaaagcaagcaaaaatcatcttaaaaatgatgtcctagtgaaccttgtgctttctttagctgtaatctggcaatggaaatttaaaatttatggaagagacagtgcagcgcaataacagagtactctcatgctgtttctctgtttgctctgaatcaacagccatgatgtaatataaggctgtcttggtgtatacacttatggttaatatatcagtcatgaaacatgcaattacttgccctgtctgattgttgaataattaaaacattatctccaggagtttggaagtgagctgaactagccaaactactctctgaaaggtatccagggcaagagacatttttaagaccccaaacaaacaaaaaacaaaaccaaaacactctggttcagtgttttgaaaatattgactaacataatattgctgagaaaatcatttttattacccaccactctgcttaaaagttgagtgggccgggcgcggtggctcacgcctgtaattccagcactttgggaggccgaggcgggtggatcacgaggtcaggatattgagaccatcctggctaacatggtgaaaccccatctccactaaaaatacaaaaaattagctgggcgtggtggcgggcgcctgtagtcccagctactcgggaggctgaggcaggagaatggcgtgaacccgggaggcggagcttgcagtgagccgagatggcgccactgcactccagcctgggtgacagagcaagactctgtctcaaaaagaaaaaaatgttcagtgatagaaaataattttactaggtttttatgttgattgtactcatgctgttccactccttttaattattaaaaagttatttttggctgggtgtggtggctcatacctgtaatcccagcactttgggaggccgaggcgggtggatcacctgaggtcaggagttcaagaccagtctggccaacatggcgaaaccccgtctcttctaaaaaatacaaaaatcccagcggcgtgtcacatttcacctgccagaaggctctcaggaaagcagcagtgatggtggactgggagaccatgatgcaggcagccttaccagcacatcccatggcctgccccttggctatcctcaggaggagtactttgatcgtgctacacccagcaatcgcactgaaggggatggcaactccgatcctgaatctactttcatacctggactaaagaaagattttatcagtgggatgagggagaaaataactgttcaaccaactgtggaagaggcctctgacaactgcactcaagaatgtctcatctatggccattctgatgcctgctggatgccggcatctctggatcattccagctcttcacaagcacaggcctctgctctatgccacagcccaccactgtcacaggcctctactcagcaccacagcccaccagtgacacagaccattgttctctgccacagccctccagtgacacagaccatcgcattgtgccacagcccaccaccgatacaggtgtctgctctccaccacagtcctcctctagtgcagggtactgcacttcaccacagcccaccatcagcacaggcctcagccctctgctacagccctcctttagcacaggctgctgcaatcagccacagctcttctctgccacaggttattgccctccatcgtagtcaggcccaatcatcagtcagtttgcagcaaggttgggtgcaaggtgctaatggactatgctctgttgatcagggagtgcaaggtagtgcaacatctcagttttacaccatgtctgaaagacttcatcccagtgatgattcaattaaagtcattcctttgacaaccttcgctccacgccaacaggccagaccgtccagaggtgattcccccattatggaaacacatcccttgtaaagctaaaatagttacttcaaattttcagaaaagatgtatatagtcaaaatttaagatacaattccaatgagtattctgattatcagatttgtaaataactatgtaaatagaaacagataccagaataaatctacagctagacccttagtcaatagttaaccaaaaaattgcaatttgtttaattcagaatgtgtatttaaaaagaaaaggaatttaacaatttgcatccccttgtacagtaaggcttatcatgacagagcgtactatttctgatgtacagtattttttgttgtttttatcatcatgtgcaatattactgatttgtttccatgctgattgtgtggaaccagtatgtagcaaatggaaagcctagaaatatcttattttctaagtttacctttagtttacctaaacttttgttcagataatgttaaaaggtatacgtactctagccttttttggggctttctttttgatttttgtttgtggttttcagtttttttgttgttgttagtgagtctcccttcaaaatacacagtaggtagtgtaaatactgcttgtttgtgtctctctgctgtcatgttttctaccttattccaatactatattgttgataaaatttgtatatacattttcaataaagaatatgtataaactgtacagatctagatctacaacctatttctctactctttagtagagttcgagacacagaagtgcaataactgccctaattaagcaactatttgttaaaaagggcccctttttactttaatagtttagtgtaaagtacatcagaaataaaactgtatctgacattttaagcctgtagtccattattacttgggtctttacttctgggaatttgtatgtaacagcctagaaaattaaaaggaggtggatgcatccaaagcacgagtcacttaaaatatcgacggtaaactactattttgtagagaaactcaggaagatttaaatgttgatttgacagctcaataggctgttaccaaagggtgttcagtaaaaataacaaatacatgtaactgtagataaaaccacatactaaatctataagactaagggatttttgttattctagctcaacttactgaagaaaaccactaataacaacaagaatatcaggaaggaacttttcaagaaatgtaattataaatctacatcaaacagaattttaaggaaaaatgcagagggagaaataaggcacatgactgcttcttgcagtcaagaagaaataccaataacacacacagaacaaaaaccatcaaaatctcatatatgaaataaaatatattcttctaagcaaagaaacagtactattcatagaaaacattagttttctcctgttgtctgttatttccttcttttatcctcttaactggccattatcttgtatgtgcacattttataaatgtacagaaacatcaccaacttgattttcttccatagcaaaactgagaaaataccttgtttcagtataacactaaaccaagagacaattgatgtttaatgggggcggttggggttgggggggagtcaatatctcctattgattaacttagacatagattttgtaatgtataacttgatatttaatttatgattaaactgtaattttgtaacataaactgtggtaattgcataatttcattggtgaggatttcctttgaatattgagaaagtttcttttcatgtgcccagcaggttaagtagcgttttcagaatatacattattcccatccattgtaaagttccttaagtcatatttgactgggcgtgcagaataacttcttaactattaactatcagagtttgattaataaaattaattaattttttttctccttcgtgttgttaatgttccaagggatttggagcatactggttttccaggtgcatgtgaatcccgaaggactgatgatatttgaatgtttattaaattattatcacacaaatgtgttgatattgtggctattgttgatgttgaaaattgtaaacttggggaagattaagaaaagaaccaatagtgacaaaaatcagtgcttccagtagattttagaacattctttgcctcaaaaaacctgcaaagatgatgtgagattttttcttgtgttttaattattttcacattttctctctgcaaacctttagttttctgatgatctacacacacacatacacacacacacacacacacgtgcacacacacacatttaaaggatataaaaagaagaggttgaaagattattaaataacttatcaggcatctcaatggttactatctatgttagtgaaaatcaaataggactcaaagttggatatttgggatttttcttctgacagtataatttattgagttactagggaggttcttaaatcctcatatctggaaacttgtgaagttttgacacctttcctatagatataggaatgaaccaatacgcttttattaccctttctaactctgattttataatcagacttagattgtgtttagaatattaaatgactgggcaccctcttcttggtttttaccagagaggctttgaatggaagcaggctgagagtagccaaagaggcaaggggtattagcccagttattctcccctatgccttctcttcctaagcgtccactaggtctggccttggaaatctgttacttctacggcttcagatctgatgatatctttttcatcacattacaagttatttctttgactgaatagacagtggtataggttgacacagcacacaagtggctattgtgatgtatgatgtatgtagtcccacaactgcaaaacgtcttactgaagcaacaatcgaaaaatggttctgttttaaaaaggattttgtttgatttgaaattaaaacttcaaactgaatgacttatatgagaataatatgttcaatcaaagtagttattctattttgtgtccatattccattagattgtgattattaattttctagctatggtattactatatcacacttgtgagtatgtattcaaatactaagtatcttatatgctacgtgcatacacattcttttcttaaactttacctgtgttttaactaatattgtgtcagtgtattaaaaattagcttttacatatgatatctacaatgtaataaatttagagagtaattttgtgtattcttatttacttaacattttacttttaattatgtaaatttggttagaaaataataataaatggttagtgctattgtgtaatggtagcagttacaaagagcctctgccttcccaaactaatatttatcacacatggtcattaaatgggaaaaaaatagactaaacaaatcacaaattgttcagttcttaaaatgtaattatgtcacacacacaaaaaaatccttttcaatcctgagaaaattaaaggtgttttactcacatggatatttcaacattagttttttttgtttgtttctttttcatggtattactgaaggtgtgtatactccctaatacacatttatgaaaatctacttgtttagacttttatttatactcttctgatttatattttttattataattattatttcttatcttcttttatattttttggaaaccaaatttatagttagtttaggtaaactttttattatgaccattagaaactattttgaatgtttccaactggctcaattggctgggaaaacatgggaacaagagaagctgaaatatatttctgcaagaacctttctatattatgtgccaattaccacaccagatcaattttatgcagaggccttaaaatattctttcacagtagctttcttacactaaccgtcatgtgcttttagtaaatatgatttttaaaagcagttcaagttgacaacagcagaaacagtaacaaaaaaatctgctcagaaaaatgtatgtgcacaaataaaaaaaattaatggcaattgtttagtgactgtaagtgatactttttaaagagtaaactgtgtgaaatttatactatccctgcttaaaatattaagatttttatgaaatatgtatttatgtttgtattgtgggaagattcctcctctgtgatatcatacagcatctgaaagtgaacagtatcccaaagcagttccaagcatgctttggaagtaagaaggttgactattgtatggccaaggatggcagtatgtaatccagaagcaaacttgtattaattgttctatttcaggttctgtattgcatgttttcttattaatatatattaataaaagttatgagaaataaa

SEQ ID NO: 983 - DNA, 1947 bp, Homo sapiens
tccaactcccaccccgggccccggaccgcagctggtcgtagtggccgcggaggacggcagcttttgggggccgggcgggagaagcgtccgttcatccgcggaaccaagctgaggggtccaggctgcggcgcgtggggagcgggcggagcgggggcgggggccgagcgcggggcacccgggggcctcctgtataggcgggcaccatgggctcctgctccggccgctgcgcgctcgtcgtcctctgcgcttttcagctgtccgtggctgtgcagcttgggtgtcctgtgctcggcttaggggcacaggcttgcgggcggacctagggacggcggaggcatcgtgtccttcctgcaggaaggaaggagcttccggcgctttcctgggaggctcgctggggccgcggagataacctgaggtcctgcaacaggctgggggcccaaggaccatcccaggccttggaacagttggtatctttcagtcgccgccctggagaggcaggtgtttgacttcctgggctaccagtgggcgcccatcctggccaactttgtccacatcatcatcgtcatcctgggactcttcggcaccatccagtaccggctgcgctatgtcatggtgtacacgctgtgggcagccgtctgggtcacctggaacgtcttcatcatctgcttctacctggaagtcggtggcctcttaaagcctggcagagatctgcaggtgaatggacaccaccctcctggggccacgtggggtcctttgtcccagcccgaccaaccctccaggctggacagcgagctactgaccttcagcctctcccggcatcgctcctggtggcgtgagcgctggccaggctgtctgcatgaggaggtgccagcagtgggcctcggggccccccatggccaggccctggtgtcaggtgctggctgtgccctggagcccagctatgtggaggccctacacagttgcctgcagatcctgatcgcgaatcccagatggcttgctccacagaggaggaggaacccctggtggctgctggctggacctgggcttctgcagggcttctgggctttgtctgtggctgccaggtggtcagcgtgtttacggaggaagaggacagctttgatttcattggtggatttgatccatttcctctctaccatgtcaatgaaaagccatccagtctcttgtccaagcaggtgtacttccccacaggccagaccccactgagcctgcgtaagtgaggaaacagctgatcctgctcctgtggcctccagcctcagcgaccgaccagtgacaatgacaggagctcccaggccttgggacgcgcccccacccagcaccccccaggcggccggcagcacctgccctgggttctaagtactggacaccagccagggcggcagggcagtgccacggctggctgcagcgtcaagagagtttgtaatttcctttctcttaaaaaaaaaaaagaaaagaaaacatacaaaagaaaaggcaaaaccccacatgcccacctcctctggcaacatgggggtcacagctctgcccccaggctgtcgtctcgtcgaggagcccctccctcaggtgcccacctggggctgctggaccctcgggctgcaagcactgctgctgggatgcagcctccccaggaagtcaatgtgaggcccgagacccctcaagcggtgagggcccctgttgaacatggagggttcctaaccccaaactcgtgccagaagaacccccaccccacccaggagctgaggctgatggagccctagggtgggggctgggcttgaccaggaacagcagagccaggccccaaggcatagggcagggcacatggtggtgacgagcaggcagtactcttgtaaagggggctcttgggcaaacagtcccaaaggctcccccaggtatcatcaagttggtaaataaacaggaacatggccctca

SEQ ID NO: 984 - DNA, 3332 bp, Homo sapiens
ggagcggagcctccgcctggggggccccccatccctggctgtcccccagctgcgcgtccccgccccacccccgcggctgagccaccaccggtgcagtggtctccgcttggcggagcgagccttgagcttcgttccacagcttctttgcatcttggatttcggggcggccccctcccccacctctctctgcctttttgtaccccgctttttttctgcgttctgctcggtttttgtagccgtctgtttttgcaccccatttcgttttgtttctagacggtttggtggggggtgaagctgcattcataccccttcctcttgttattctcccctgctctgacagcaccccttttcatcgcagttggggggcctaggatcggtgcatcttccgccgcgctgccagcaccccgcagcgcgtggtcgtgcaccccggaatctgcagcagctgcatatctgaggggggtctcctttgcccgcgccgccttcgctccccgtgcttttgggtgtgtggagggcttcagcgcgcggcgcccccgcttctccgcaaccccccgccccgcgcccggactcgccccgcgccaccaagatggtcatccagaaagagaagaagagctgcgggcaggtggttgaggagtggaaggagttcgtgtggaacccgaggacgcaccagtttatgggccgcaccgggaccagctgggcctttatcctcctcttctacctcgttttttatgggttcctcaccgccatgttcaccctcaccatgtgggtgatgctgcagactgtctccgaccatacccccaagtaccaggaccgactggccacaccgggcttgatgattcgccccaagactgagaaccttgatgtcattgtcaatgtcagtgacactgaaagctgggaccagcatgttcagaagctcaacaagttcttggagccttacaacgactctatccaagcccaaaagaatgatgtctgccgccctggacgctattacgaacagccagataatggagtcctcaactaccccaaacgtgcctgccaattcaaccggacccagctgggcaactgctccggcattggggactccacccactatggttacagcactgggcagccctgtgtcttcatcaagatgaaccgggtcatcaacttctatgcaggagcaaaccagagcatgaatgttacctgtgctgggaagcgagatgaagatgctgagaatctcggcaacttcgtcatgttccccgccaacggcaacatcgacctcatgtacttcccctactatggcaaaaagttccacgtgaactacacacagcccctggtggctgtgaagttcctgaatgtgacccccaacgtggaggtgaatgtagaatgtcgcatcaacgccgccaacatcgccacagacgatgagcgagacaagttcgccggccgcgtggccttcaaactccgcatcaacaaaacctgaggccccttcctcccaccccatctctctcctgtggatgctcctggaatgtccctgaccctgcctgatccctccctcacccaccccaaaggtatttttgataacagagctatgacttgtctgagcctcacatccttttccttgacttctcaacccagcctgaagtccattgcggttccgtcactcgcctttcccaccaacttctcccaacctcagatcagtcagacagggagctgggctaagatggccacggaggagttaggagcctttctagttctggtttagctgtgagagctatccactctcctgcctgcatatcccctgagagttataggaagtgcccactgacccacccacccacctacaccccccgccacacacacacacaaacgtgcacacgcgtctcatttgacccctttgcttccagagatgaatgtggcactccctccttccattcctaagctctggccaccgtcccttgatctctcatactttctccctgtctacacagtcgccatcttggtgactttgaatttatctggctcctgggcaggtcttctcctcctctccatccctattccctcctctgaaatgcacccctttgtaattgaggacaaggtggttctgtggccttttccctctttgctggcacgttctgcttctcaccctctggtgactctgtgagctgggaaatgagggactggaagtgaggcctgtgttgacccttcctgaaaatcctctagcagcccccgacttcagcagtttctttctttgtttttttgagatggagtttcgctcttgttgcccaggctggagtgcaatggtgcaatctcagctcactgcaacttccgcatcccaggttcaagcgattctcccgcctcaggttcccgagtagctgggactacaggcatgtgccaccatgcccggctaatttctttctttctttttttttttttttgcattttttagtagagatgggggtttctccttgttggtcaggctggtctcgaactcccgacctcaggtgatccacctgcctcggcctcccaaagtgttgggattacaggcgtgagccaccgcgcccggccttcagtttcttcctaggccgttctgtcacccaaatagctgctacccagaggggcggggttgacctaggctgaatatccactttgtttttatggatggctcccttcccccattcgccttcccagaatatccttcaagttccacttcccagggagctctgggggaggggcggccattctggctccgtccccagtggccaccttggaaacatcggctggctttgggactattccacctccttcccctgagcccagatctgcccccaccatcctttctctggcttcttttagcaagttatcaactaatcactaactccttccttttcctctgcatgccagcctgaaaattccaaatctagcctctgaatgtcttggctccatctcttcagacccctttgcctttaaaaaaaaaacaaaaacaaaaacaaaaaaacccataatgcccacagaatgtcaaatgaggggcctcctgcctcctgctctgaatattctgtagctgtagaggcattttaaccctttgtcctccagcatcccttcacttcctcatcctctctaacctcctttttctttttttaatgctgcagcctccacactccacccacaggtggacccttccctttttctctagctggatctgtgtttcttcccttcgggcccccatgttttcctgcacccgccctaccatggtctctctctgcagttatttaatgcctgtgtcagatctactgtaaaaagaggattaagtaaaataaaatgagagcaattatatatataaatatatatcatacacagag

SEQ ID NO: 985 - DNA, 7521 bp, Homo sapiens
gagtctgagagcctgcgggcgggcggcgcgctgcaggcgagcgggcgagcgggcgcgccctgcaggggagcgctccaagatggcgcccaccgcagtcccgcccgccgcatcctcggcgcctttgcagtccggccgcgcctcccgggccccgcgttagggccgccgctgcctccctcgccgccgccgctgccagctgacctgtcctggacgcagcataactaacgaagctgctgcaggatgagaagatggcagcgcggctgcttgcaccaccaggccctgatagtttcaagcctttcacccctgagtcactggcaaacattgagaggcgcattgctgagagcaagctcaagaaaccaccaaaggccgatggcagtcatcgggaggacgatgaggacagcaagcccaagccaaacagcgacctggaagcagggaagagtttgcctttcatctacggggacatcccccaaggcctggttgcagttcccctggaggactttgacccatactatttgacgcagaaatttctttctccacagacctttgtagtattaaacagagggaaaactctcttcagatttagtgccacgcctgccttgtacattttaagtccttttaacctgataagaagaatagctattaaaattttgatacattcatatccttttcggcaaatagtatttagcatgatcattatgtgcactattttgaccaactgtgtattcatgacttttagtaaccctcctgactggtcgaagaatgtggagtacacgttcacagggatttatacatttgaatcactagtgaaaatcattgcaagaggtttctgcatagatggctttacctttttacgggacccatggaactggttagatttcagtgtcatcatgatggcgtatataacagagtttgtaaacctaggcaatgtttcagctctacgcactttcagggtactgagggctttgaaaactatttcggtaatcccagatatgtgacagagtttgtggacctgggcaatgtctcagcgctgagaacattcagggttctccgagctttgaaaactatctctgtaattccaggcctgaagacaattgtgggtgccctgattcagtctgtgaagaaactgtcagatgtgatgatcctgacagtgttctgcctgagtgtttttgccttgatcggactgcagctgttcatggggaaccttcgaaacaagtgtgttgtgtggcccataaacttcaacgagagctatcttgaaaatggcaccaaaggctttgattgggaagagtatatcaacaataaaacaaatttctacacagttcctggcatgctggaacctttactctgtgggaacagttctgatgctgggcaatgcccagagggataccagtgtatgaaagcaggaaggaaccccaactatggttacacaagttttgacacttttagctgggccttcttggcattatttcgccttatgacccaggactattgggaaaacttgtatcaattgactttacgagcagccgggaaaacatacatgatcttcttcgtcttggtcatctttgtgggttctttctatctggtgaacttgatcttggctgtggtggccatggcttatgaagaacagaatcaggcaacactggaggaggcagaacaaaaagaggctgaatttaaagcaatgttggagcaacttaagaagcaacaggaagaggcacaggctgctgcgatggccacttcagcaggaactgtctcagaagatgccatagaggaagaaggtgaagaaggagggggctcccctcggagctcttctgaaatctctaaactcagctcaaagagtgcaaaggaaagacgtaacaggagaaagaagaggaagcaaaaggaactctctgaaggagaggagaaaggggatcccgagaaggtgtttaagtcagagtcagaagatggcatgagaaggaaggcctttcggctgccagacaacagaatagggaggaaattttccatcatgaatcagtcaatgttcactgctcagcatcccaggctcgcccttcctctcccgccacaacagcaagagcagcatcttcagtttcaggggacctgggcggttccgagacccgggctccgagaatgagttcgcggatgacgagcacagcacggtggaggagagcgagggccgccgggactccctcttcatccccatccgggcccgcgagcgccggagcagctacagcggctacagcggctacagccagggcagccgctcctcgcgcatcttccccagcctgcggcgcagcgtgaagcgcaacagcacggtggactgcaacggcgtggtgtccctcatcggcggccccggctcccacatcggcgggcgtctcctgccagaggtgaaaattgataaggcagctaccgatgacagtgctacaactgaggtggaaattaagaagaaaggccctggatctcttttagtttccatggaccaattagcctcctacgggcggaaggacagaatcaacagtataatgagtgttgttacaaatacactagtagaagaactggaagagtctcagagaaagtgcccgccatgctggtataaatttgccaacactttcctcatctgggagtgccacccctactggataaaactgaaagagattgtgaacttgatagttatggacccttttgtggatttagccatcaccatctgcatcgtcctgaatacactgtttatggcaatggagcaccatcctatgacaccacaatttgaacatgtcttggctgtaggaaatctggttttcactggaattttcacagcggaaatgttcctgaagctcatagccatggatccctactattatttccaagaaggttggaacatttttgacggatttattgtctccctcagtttaatggaactgagtctagcagacgtggaggggctttcagtgctgcgatctttccgattgctccgagtcttcaaattggccaaatcctggcccaccctgaacatgctaatcaagattattggaaattcagtgggtgccctgggcaacctgacactggtgctggccattattgtcttcatctttgccgtggtggggatgcaactctttggaaaaagctacaaagagtgtgtctgcaagatcaaccaggactgtgaactccctcgctggcatatgcatgactttttccattccttcctcattgtctttcgagtgttgtgcggggagtggattgagaccatgtgggactgcatggaagtggcaggccaggccatgtgcctcattgtctttatgatggtcatggtgattggcaacttggtggtgctgaacctgtttctggccttgctcctgagctccttcagtgcagacaacctggctgccacagatgacgatggggaaatgaacaacctccagatctcagtgatccgtatcaagaagggtgtggcctggaccaaactaaaggtgcacgccttcatgcaggcccactttaagcagcgtgaggctgatgaggtgaagcctctggatgagttgtatgaaaagaaggccaactgtatcgccaatcacaccggtgcagacatccaccggaatggtgacttccagaagaatggcaatggcacaaccagcggcattggcagcagcgtggagaagtacatcattgatgaggaccacatgtccttcatcaacaaccccaacttgactgtacgggtacccattgctgtgggcgagtctgactttgagaacctcaacacagaggatgttagcagcgagtcggatcctgaaggcagcaaagataaactagatgacaccagctcctctgaaggaagcaccattgatatcaaaccagaagtagaagaggtccctgtggaacagcctgaggaatacttggatccagatgcctgcttcacagaaggttgtgtccagcggttcaagtgctgccaggtcaacatcgaggaagggctaggcaagtcttggtggatcctgcggaaaacctgcttcctcatcgtggagcacaactggtttgagaccttcatcatcttcatgattctgctgagcagtggcgccctggccttcgaggacatctacattgagcagagaaagaccatccgcaccatcctggaatatgctgacaaagtcttcacctatatcttcatcctggagatgttgctcaagtggacagcctatggcttcgtcaagttcttcaccaatgcctggtgttggctggacttcctcattgtggctgtaccattaaatttgtctggcttaatttaatggggacttctgggacctgcagagactgtaaagggcgagggtctctttagtcagccttatagctaatgccctgggctactcggaactaggtgccataaagtcccttaggaccctaagagctttgagacccttaagagccttatcacgatttgaagggatgagggtggtggtgaatgccttggtgggcgccatcccctccatcatgaatgtgctgctggtgtgtctcatcttctggctgattttcagcatcatgggagttaacttgtttgcgggaaagtaccactactgctttaatgagacttctgaaatccgatttgaaattgaagatgtcaacaataaaactgaatgtgaaaagcttatggaggggaacaatacagagatcagatggaagaacgtgaagatcaactttgacaatgttggggcaggatacctggcccttcttcaagtagcaaccttcaaaggctggatggacatcatgtatgcagctgtagattcccggaagcctgatgagcagcctaagtatgaggacaatatctacatgtacatctattttgtcatcttcatcatcttcggctccttcttcaccctgaacctgttcattggtgtcatcattgataacttcaatcaacaaaagaaaaagatagttcggaggtcaggacatcttcatgaccgaagaacagaagaagtactacaatgccatgaaaaagctgggctcaaagaagccacagaaacctattccccgccccttgaacaaaatccaaggaatcgtctttgattttgtcactcagcaagcctttgacattgttatcatgatgctcatctgccttaacatggtgacaatgatggtggagacagacactcaaagcaagcagatggagaacatcctctactggattaacctggtgtttgttatcttcttcacctgtgagtgtgtgctcaaaatgtttgcgttgaggcactactacttcaccattggctggaacatcttcgacttcgtggtagtcatcctctccattgtgggaatgttcctggcagatataattgagaaatactttgtttccccaaccctattccgagtcatccgattggcccgtattgggcgcatcttgcgtctgatcaaaggcgccaaagggattcgtaccctgctctttgccttaatgatgtccttgcctgccctgttcaacatcggccttctgctcttcctggtcatgttcatcttctccatttttgggatgtccaattttgcatatgtgaagcacgaggctggtatcgatgacatgttcaactttgagacatttggcaacagcatgatctgcctgtttcaaatcacaacctcagctggttgggatggcctgctgctgcccatcctaaaccgcccccctgactgcagcctagataaggaacacccagggagtggctttaagggagattgtgggaacccctcagtgggcatcttcttctttgtaagctacatcatcatctctttcctaattgtcgtgaacatgtacattgccatcatcctggagaacttcagtgtagccacagaggaaagtgcagaccctctgagtgaggatgactttgagaccttctatgagatctgggagaagttcgaccccgatgccacccagttcattgagtactgtaagctggcagactttgcagatgccttggagcatcctctccgagtgcccaagcccaataccattgagctcatcgctatggatctgccaatggtgagcggggatcgcatccactgcttggacatcctttttgccttcaccaagcgggtcctgggagatagcggggagttggacatcctgcggcagcagatggaagagcggttcgtggcatccaatccttccaaagtgtcttacgagccaatcacaaccacactgcgtcgcaagcaggaggaggtatctgcagtggtcctgcagcgtgcctaccggggacatttggcaaggcggggcttcatctgcaaaaagacaacttctaataagctggagaatggaggcacacaccgggagaaaaaagagagcaccccatctacagcctccctcccgtcctatgacagtgtaactaaacctgaaaaggagaaacagcagcgggcagaggaaggaagaagggaaagagccaaaagacaaaaagaggtcagagaatccaagtgttagaggagaacaaaaattcagtattatacagatctaaaactcgcaagtgaaagattgtttacaaacttcctgaatattatcaatgcagaacagctgtggagactctaacctgaagatctataccaaacgtcgtctgcttaccacgtaacacagctgcatcttgagcagtgacctgccaagggcaaaggaccccgctccctagacttacagattttctaatgcttgggcaggtggttactgcatgttccacatcagtcaatgcaacttaggacaaaactaaccagatacagaaacagaagagaggctgccgggaccagcatatttccgttgcagccaaatggattttattttttcattttattgattctcagaagcagaaagcatcactttaaaagttcgtttgttcatgcaaactatatttgcattcttacattagttaagctaagcagcaaaaagaaaacacacacacacactcacatttagcccatgtcatttaattgtcagtttctttgacataaagcgcatcttctccacatgggcttcacgtggtttggagatgggtgggggaaaacaatcaggtttcttcaggctgaggaggacttgctcaggccgattccaaacattgtgctcgttcaatgcgtagaaatgatttgcatgatggcatgccgtgatcagaagtcatgcatgagatccatacaccacaggacactactaatctagtcccttgcactgggtcagcctttggacaggacccagccctgcaccgttcactgtatttggagaaaatggtaagagttccataccggctacaattctttgagttcttaaaagtccttcatacaccttctgggtagggaaacaaccaactaattgactaacaccaccaacaacaaaaaacaaacccaatccaacaagcagatggatccgttgcgtgtatatgtttaacagacatctctaacatacagccattgttgcacattttgcaagatgaactatttaatgctgctctgtgtccagtacatgggggagactttgatcccaaatggcttgtactatttatgtcactgtaaaaccaaatcctagggctaaaaaaaaaa

SEQ ID NO: 986 - DNA, 3374 bp, Homo sapiens
ctggtccgtccaggctccttcccatcctcacacccgcgcctttctccctgcggccccggctcgctgctccagctgcccagctctgccgcccccgccccggccctcccccgcccggccgcaccataaagcgcccggccgctgccgcggagcccagcagccagctccccagcaccgcacggcggggacgcgagcgcgcccccgacggcagcccggacgccgagcacgggtcacctgcggcgccggcccgggcgccgaccgaggttcaacgcacggcccggggacccccaggcggggccaacgccgccgtcgcccccggcctcgcggggagcaggaagagccaacatgctggccccgcgcggagccgccgtcctcctgctgcacctggtcctgcagcggtggctagcggcaggcgcccaggccaccccccaggtctttgaccttctcccatcttccagtcagaggctaaacccaggcgctctgctgccagtcctgacagaccccgccctgaatgatctctatgtgatttccaccttcaagctgcagactaaaagttcagccaccatcttcggtctttactcttcaactgacaacagtaaatattttgaatttactgtgatgggacgcttaaacaaagccatcctccgttacctgaagaacgatgggaaggtgcatttggtggttttcaacaacctgcagctggcagacggaaggcggcacaggatcctcctgaggctgagcaatttgcagcgaggggccggctccctagagctctacctggactgcatccaggtggattccgttcacaatctccccagggcctttgctggcccctcccagaaacctgagaccattgaattgaggactttccagaggaagccacaggacttcttggaagagctgaagctggtggtgagaggctcactgttccaggtggccagcctgcaagactgcttcctgcagcagagtgagccactggctgccacaggcacaggggactttaaccggcagttcttgggtcaaatgacacaattaaaccaactcctgggagaggtgaaggaccttctgagacagcaggttaaggaaacatcatttttgcgaaacaccatagctgaatgccaggcttgcggtcctctcaagtttcagtctccgaccccaagcacggtggtgcccccggctccccctgcaccgccaacacgcccacctcgtcggtgtgactccaacccatgtttccgaggtgtccaatgtaccgacagtagagatggcttccagtgtgggccctgccccgagggctacacaggaaacgggatcacctgtattgatgttgatgagtgcaaataccatccctgctacccgggcgtgcactgcataaatttgtctcctggcttcagatgtgacgcctgcccagtgggcttcacagggcccatggtgcagggtgttgggatcagttttgccaagtcaaacaagcaggtctgcactgacattgatgagtgtcgaaatggagcgtgcgttcccaactcgatctgcgttaatactttgggatcttaccgctgtgggccttgtaagccggggtatactggtgatcagataaggggatgcaaagcggaaagaaactgcagaaacccagagctgaacccttgcagtgtgaatgcccagtgcattgaagagaggcagggggatgtgacatgtgtgtgtggagtcggttgggctggagatggctatatctgtggaaaggatgtggacatcgacagttaccccgacgaagaactgccatgctctgccaggaactgtaaaaaggacaactgcaaatatgtgccaaattctggccaagaagatgcagacagagatggcattggcgacgcttgtgacgaggatgctgacggagatgggatcctgaatgagcaggataactgtgtcctgattcataatgtggaccaaaggaacagcgataaagatatctttggggatgcctgtgataactgcctgagtgtcttaaataacgaccagaaagacaccgatggggatggaagaggagatgcctgtgatgatgacatggatggagatggaataaaaaacattctggacaactgcccaaaatttcccaatcgtgaccaacgggacaaggatggtgatggtgtgggggatgcctgtgacagttgtcctgatgtcagcaaccctaaccagtctgatgtggataatgatctggttggggactcctgtgacaccaatcaggacagtgatggagatgggcaccaggacagcacagacaactgccccaccgtcattaacagtgcccagctggacaccgataaggatggaattggtgacgagtgtgatgatgatgatgacaatgatggtatcccagacctggtgccccctggaccagacaactgccggctggtccccaacccagcccaggaggatagcaacagcgacggagtgggagacatctgtgagtctgactttgaccaggaccaggtcatcgatcggatcgacgtctgcccagagaacgcagaggtcaccctgaccgacttcagggcttaccagaccgtggtcctggatcctgaaggggatgcccagatcgatcccaactgggtggtcctgaaccagggcatggagattgtacagaccatgaacagtgatcctggcctggcagtggggtacacagcttttaatggagttgacttcgaagggaccttccatgtgaatacccagacagatgatgactatgcaggctttatctttggctaccaagatagctccagcttctacgtggtcatgtggaagcagacggagcagacatattggcaagccaccccattccgagcagttgcagaacctggcattcagctcaaggctgtgaagtctaagacaggtccaggggagcatctccggaactccctgtggcacacgggggacaccagtgaccaggtcaggctgctgtggaaggactccaggaatgtgggctggaaggacaaggtgtcctaccgctggttcctacagcacaggccccaggtgggctacatcagggtacgattttatgaaggctctgagttggtggctgactctggcgtcaccatagacaccacaatgcgtggaggccgacttggcgttttctgcttctctcaagaaaacatcatctggtccaacctcaagtatcgctgcaatgacaccatccctgaggacttccaagagtttcaaacccagaatttcgaccgcttcgataattaaaccaaggaagcaatctgtaactgcttttcggaacactaaaaccatatatattttaacttcaattttctttagcttttaccaacccaaatatatcaaaacgttttatgtgaatgtggcaataaaggagaagagatcatttttaaaaa

SEQ ID NO: 987 - DNA, 4245 bp, Homo sapiens
caccggcgccgcgtcagcccccaggccgcctgcaggtgtgcgctcagaactagcacgtgtgccggacactatttaagggcccgcctctcctggctcacagctgcttgctgctccagccttgccctcccagagctgccggacgctcgcgggtctcggaacgcatcccgccgcgggggcttcggccgtggcatgggcgccgcgggcctgctcggggttttcttggctctcgtcgcaccgggggtcctcgggatttcttgtggctctcctccgcctatcctaaatggccggattagttattattctacccccattgctgttggtaccgtgataaggtacagttgttcaggtaccttccgcctcattggagaaaaaagtctattatgcataactaaagacaaagtggatggaacctgggataaacctgctcctaaatgtgaatatttcaataaatattcttcttgccctgagcccatagtaccaggaggatacaaaattagaggctctacaccctacagacatggtgattctgtgacatttgcctgtaaaaccaacttctccatgaacggaaacaagtctgtttggtgtcaagcaaataatatgtgggggccgacacgactaccaacctgtgtaagtgttttccctctcgagtgtccagcacttcctatgatccacaatggacatcacacaagtgagaatgttggctccattgctccaggattgtctgtgacttacagctgtgaatctggttacttgcttgttggagaaaagatcattaactgtttgtcttcgggaaaatggagtgctgtcccccccacatgtgaagaggcacgctgtaaatctctaggacgatttcccaatgggaaggtaaaggagcctccaattctccgggttggtgtaactgcaaactttttctgtgatgaagggtatcgactgcaaggcccaccttctagtcggtgtgtaattgctggacagggagttgcttggaccaaaatgccagtatgtgaagaaattttttgcccatcacctccccctattctcaatggaagacatataggcaactcactagcaaatgtctcatatggaagcatagtcacttacacttgtgacccggacccagaggaaggagtgaacttcatccttattggagagagcactctccgttgtacagttgatagtcagaagactgggacctggagtggccctgccccacgctgtgaactttctacttctgcggttcagtgtccacatccccagatcctaagaggccgaatggtatctgggcagaaagatcgatatacctataacgacactgtgatatttgcttgcatgtttggcttcaccttgaagggcagcaagcaaatccgatgcaatgcccaaggcacatgggagccatctgcaccagtctgtgaaaaggaatgccaggcccctcctaacatcctcaatgggcaaaaggaagatagacacatggtccgctttgaccctggaacatctataaaatatagctgtaaccctggctatgtgctggtgggagaagaatccatacagtgtacctctgagggggtgtggacaccccctgtaccccaatgcaaagtggcagcgtgtgaagctacaggaaggcaactcttgacaaaaccccagcaccaatttgttagaccagatgtcaactcttcttgtggtgaagggtacaagttaagtgggagtgtttatcaggagtgtcaaggcacaattccttggtttatggagattcgtctttgtaaagaaatcacctgcccaccaccccctgttatctacaatggggcacacaccgggagttccttagaagattttccatatggaaccacggtcacttacacatgtaaccctgggccagaaagaggagtggaattcagcctcattggagagagcaccatccgttgtacaagcaatgatcaagaaagaggcacctggagtggccctgctcccctgtgtaaactttccctccttgctgtccagtgctcacatgtccatattgcaaatggatacaagatatctggcaaggaagccccatatttctacaatgacactgtgacattcaagtgttatagtggatttactttgaagggcagtagtcagattcgttgcaaagctgataacacctgggatcctgaaataccagtttgtgaaaaaggctgccagtcacctcctgggctccaccatggtcgtcatacaggtggaaatacggtcttctttgtctctgggatgactgtagactacacttgtgaccctggctatttgcttgtgggaaacaaatccattcactgtatgccttcaggaaattggagtccttctgccccacggtgtgaagaaacatgccagcatgtgagacagagtcttcaagaacttccagctggttcacgtgtggagctagttaatacgtcctgccaagatgggtaccagttgactggacatgcttatcagatgtgtcaagatgctgaaaatggaatttggttcaaaaagattccactttgtaaagttattcactgtcaccctccaccagtgattgtcaatgggaagcacacaggcatgatggcagaaaactttctatatggaaatgaagtctcttatgaatgtgaccaaggattctatctcctgggagagaaaaaattgcagtgcagaagtgattctaaaggacatggatcttggagcgggccttccccacagtgcttacgatctcctcctgtgactcgctgccctaatccagaagtcaaacatgggtacaagctcaataaaacacattctgcatattcccacaatgacatagtgtatgttgactgcaatcctggcttcatcatgaatggtagtcgcgtgattaggtgtcatactgataacacatgggtgccaggtgtgccaacttgtatcaaaaaagccttcatagggtgtccacctccgcctaagacccctaacgggaaccatactggtggaaacatagctcgattttctcctggaatgtcaatcctgtacagctgtgaccaaggctacctgctggtgggagaggcactccttctttgcacacatgagggaacctggagccaacctgcccctcattgtaaagaggtaaactgtagctcaccagcagatatggatggaatccagaaagggctggaaccaaggaaaatgtatcagtatggagctgttgtaactctggagtgtgaagatgggtatatgctggaaggcagtccccagagccagtgccaatcggatcaccaatggaaccctcccctggcggtttgcagatcccgttcacttgctcctgtcctttgtggtattgctgcaggtttgatacttcttaccttcttgattgtcattaccttatacgtgatatcaaaacacagagcacggaacgcaattattatacagatacaagccagaaagaagcttttcatttagaagcacgagaagtatattctgttgatccatacaacccagccagctgatcagaagacaaactggtgtgtgcctcattgcttggaattcagcggaatattgattagaaagaaactgctctaatatcagcaagtctctttatatggcctcaagatcaatgaaatgatgtcataagcgatcacttcctatatgcacttattctcaagaagaacatctttatggtaaagatgggagcccagtttcactgccatatactcttcaaggactttctgaagcctcacttatgagatgcctgaagccaggccatggctataaacaattacatggctctaaaaagttttgccctttttaaggaaggcactaaaaagagctgtcctggtatctagacccatcttctttttgaaatcagcatactcaatgttactatctgcttttggttataatgtgtttttaattatctaaagtatgaagcattttctggggttatgatggctttacctttattaggaagtatggttttattttgatagtagcttcctcctctggtggtgttaatcatttcatttttacccttacttggtttgagtttctctcacattactgtatatactttgcctttccataatcactcagtgattgcaatttgcacaagtttttttaaattatgggaatcaagatttaatcctagagatttggtgtacaattcaggctttggatgtttctttagcagttttgtgataagttctagttgcttgtaaaatttcacttaataatgtgtacattagtcattcaataaattgtaattgtaaagaaaacatacaa

SEQ ID NO: 988 - DNA, 1591 bp, Homo sapiens
ggcagggtttggtttgggtgtcttcagatttccttgtcttgaggtcctcacaattactctacagctcagaacaccaactgctgaggctgccttgggaagaggatgatcctaaacaaagctctgctgctgggggccctcgctctgaccaccgtgatgagcccctgtggaggtgaagacattgtggctgaccacgttgcctcttgtggtgtaaacttgtaccagttttacggtccctctggccagtacacccatgaatttgatggagatgagcagttctacgtggacctggagaggaaggagactgcctggcggtggcctgagttcagcaaatttggaggttttgacccgcagggtgcactgagaaacatggctgtggcaaaacacaacttgaacatcatgattaaacgctacaactctaccgctgctaccaatgaggttcctgaggtcacagtgttttccaagtctcccgtgacactgggtcagcccaacaccctcatttgtcttgtggacaacatctttcctcctgtggtcaacatcacatggctgagcaatgggcagtcagtcacagaaggtgtttctgagaccagcttcctctccaagagtgatcattccttcttcaagatcagttacctcaccttcctcccttctgctgatgagatttatgactgcaaggtggagcactggggcctggaccagcctcttctgaaacactgggagcctgagattccagcccctatgtcagagctcacagagactgtggtctgtgccctggggttgtctgtgggcctcatgggcattgtggtgggcactgtcttcatcatccaaggcctgcgttcagttggtgcttccagacaccaagggccattgtgaatcccatcctggaagggaaggtgcatcgccatctacaggagcagaagaatggacttgctaaatgacctagcactattctctggcccgatttatcatatcccttttctcctccaaatatttctcctctcaccttttctctgggacttaagctgctatatcccctcagagctcacaaatgcctttacattctttccctgacctcctgattttttttttcttttctcaaatgttacctacaaagacatgcctggggtaagccacccggctacctaattcctcagtaacctccatctaaaatctccaaggaagcaataaattccttttatgagatctatgtcaaatttttccatctttcatccagggctgactgaaactatggctaataattggggtactcttatgtttcaatccaatttaacctcatttcccagatcatttttcatgtccagtaacacagaagccaccaagtacagtatagcctgataatatgttgatttcttagctgacattaatatttcttgcttccttgtgttcccacccttggcactgccacccacccctcaattcaggcaacaatgaaattaatggataccgtctgcccttggcccagaattgttatagcaaaaattttagaaccaaaaaataagtctgtactaatttcaatgtggcttttaaaagtatgacagagaaataagttaggataaaggaaatttgaatctca

SEQ ID NO: 989 - DNA, 1426 bp, Homo sapiens
ttttaatggtcagactctattacaccccacattctcttttcttttattcttgtctgttctgcctcactcccgagctctactgactcccaacagagcgcccaagaagaaaatggccataagtggagtccctgtgctaggatttttcatcatagctgtgctgatgagcgctcaggaatcatgggctatcaaagaagaacatgtgatcatccaggccgagttctatctgaatcctgaccaatcaggcgagtttatgtttgactttgatggtgatgagattttccatgtggatatggcaaagaaggagacggtctggcggcttgaagaatttggacgatttgccagctttgaggctcaaggtgcattggccaacatagctgtggacaaagccaacctggaaatcatgacaaagcgctccaactatactccgatcaccaatgtacctccagaggtaactgtgctcacaaacagccctgtggaactgagagagcccaacgtcctcatctgtttcatagacaagttcaccccaccagtggtcaatgtcacgtggcttcgaaatggaaaacctgtcaccacaggagtgtcagagacagtcttcctgcccagggaagaccaccttttccgcaagttccactatctccccttcctgccctcaactgaggacgtttacgactgcagggtggagcactggggcttggatgagcctcttctcaagcactgggagtttgatgctccaagccctctcccagagactacagagaacgtggtgtgtgccctgggcctgactgtgggtctggtgggcatcattattgggaccatcttcatcatcaagggattgcgcaaaagcaatgcagcagaacgcagggggcctctgtaaggcacatggaggtgagtgatggtgtttcttagagagaagatcactgaagaaacttctgctttaatggctttacaaagctggcaatattacaatccttgacctcagtgaaagcagtcatcttcagcattttccagccctatagccaccccaagtgtggatatgcctcttcgattgctccgtactctaacatctagctggcttccctgtctattgccttttcctgtatctattttcctctatttcctatcattttattatcaccatgcaatgcctctggaataaaacatacaggagtctgtctctgctatggaatgccccatggggcatctcttgtgtacttattgtttaaggtttcctcaaactgtgatttttctgaacacaataaactattttgatgatcttgggtggaatttttggtgtttaagccagttctttgggtggcggtggggggtggggagtcggtcctggggaatatatgtgatcctttcccggtaaaatatctgaatgttgaatttatcttataaattctagaattcatcagacatatcccgg

SEQ ID NO: 990 - DNA, 3450 bp, Homo sapiens
gtcgggggccgaagcgcctcccgcagggagtccccgtgaggccgcgctgccgcgttacccgcagcggccgggggtccggggagtgcggggctccgagacagagccaggcgccccccagcggtcggcgcgggccccatggctgggccgggcggagcggaaccggtgaggtgaagccccggggccggcagccggaggcgcgtggccggggcgccggctccatgggcagcggcacacggcggcgcgatgatggacgttaacagcagcggccgcccggacctctacgggcacctccgctctttccttctgccagaagtggggcgcgggctgcccgacttgagccccgacggtggcgccgacccggtcgcgggctcctgggcgccgcacctgctgagcgaggtgacagccagcccggcgcccacctgggacgcgcccccggacaatgcctccggctgtggggaacagatcaactacggcagagtcgagaaagttgtgatcggctccatcctgacgctcatcacgctgctgacgatcgcgggcaactgcctggtggtgatctccgtgtgcttcgtcaagaagctccgccagccctccaactacctgatcgtgtccctggcgctggccgacctctcggtggctgtggcggtcatgcccttcgtcagcgtcaccgacctcatcgggggcaagtggatctttggacactttttctgtaatgtcttcatcgccatggacgtcatgtgctgcacggcctcgatcatgaccctgtgcgtgatcagcattgacaggtaccttgggatcacaaggcccctcacataccctgtgaggcagaatgggaaatgcatggcgaagatgattctctccgtctggcttctctccgcctccatcaccttacctccactctttggatgggctcagaatgtaaatgatgataaggtgtgcttgatcagccaggactttggctatacgatttactctaccgcagtggcattttatatccccatgtccgtcatgcttttcatgtactaccagatttacaaggctgccaggaagagtgctgccaaacacaagtttcctggcttccctcgagtggagccagacagcgtcatcgccctgaatggcatagtgaagctccagaaggaggtggaagagtgtgcaaacctttcgagactcctcaagcatgaaaggaaaaacatctccatctttaagcgagaacagaaagcagccaccaccctggggatcatcgtcggggcctttaccgtgtgctggctgccatttttcctcctctcgacagccagacccttcatctgtggcacttcctgcagctgcatcccactgtgggtggagaggacatttctgtggctaggctatgcaaactctctcattaacccttttatatatgccttcttcaaccgggacctgaggaccacctatcgcagcctgctccagtgccagtaccggaatatcaaccggaagctctcagctgcaggcatgcatgaagccctgaagcttgctgagaggccagagagacctgagtttgtgctgtaagcataaccagaacctcaggagttcatcaggcactcgaaaattttccctggggtaatgaagtgaatagatggaggaaaagctgtgaatacttttgcactggagggcctgcacaaggagggtgctgttgagaccagaaaagaggccaccggtatctgtgtgggtgctacaatctccagaccatcacaattggttagcagacaaaatgctgactactgtagaaaaaaaggtcatgattcatgattgaaagcagaacaatggagatgaaataaacaaggcaaaatagaggtggaaacagaaggaagtcatttgctgagtctgcagaatggaatgcagcttctgtcctttcttgggatgtctaaaacatgacaaacagggtgatctgttgtacacactatcttatgagggagatggtgacttctccttttttctgtggatcagtgctattgtgtgttctcagtttaagatagcagatcatctcagcagtaagcacaccaacagaactgagttccagaaaggaagcagtttctggtgctttgcatatgtccaaatccatgcaagtgggagaaagttccagtgcacacttcccatgcttctgagtctaggcgttgtggtgaatatgcaggaatcattcatgagacagaatgtattttgttgtatgacagaaggcttttccaagcaaactgcggtgagcgtagtgttgaatatgttgcatgtccatgttagaaaacagaatccagtcatcagctaatacaaatgatttcccagagcagtgtttgtttcaagcttctgtcaaatagtttggcttttctgcagggtctctgtgatttccccacctatgtacttttctgtgttaactcacttattatggtataactcaggaacaggtctcaggatggagagaagcatacaacatgagcaaagctttttctcgtgctctgaagggtcttgagaggggagtgggatgccttctgtgaggatttttatcgcagtgaagctcaagtggtacccaactgcgttgtaattaacatgattattggcatgtttttgactctcattttctacaaggctgcagtgggcccacccatgggctggcccataactgtatgttatgtggaagaagtgtgggaatgatgggttttccatgaaatgtgatgcttctggagatggggcataaacatgttcattcttgttgagctgcattgtgttaaaccaaattgtgtgaagcgaggtcacctggaccactcttgggaaatgcttcagaacaccagtctgttccttctagagaatttgtttttgtgttctatgtatcttaaatcaaatgtgtgcctaagcaattctgtcctctgattcccacccctacccaccaaaaaatggtagacatgaaaggcaggtgaggaaacagaaaaggtctctttgcagatatatattttttaaatggcactatgtagtaattaagagctaaggagacagaaagacagtagatgagaatagaagagtacctgtacctacaaggggaaaaatgaatgcaattctttatttgataagagtgaactgaaagagaatattattttcctacaataaagcaagctgtcctctcacaggataaagtggaattctgacatggattatggacttcttctaactcccattgacattgcttcttaccagacatggggaaaagctacctttcctgaaaggggaggagggcactgtcctttcagacaaagcttgtacaaattcctgaaccgcaaatttgctgaagtgaccgtatatattatattcataatttaaatgattatttatggtcagatacatattgttaaacttgaaaatgttttattacattacatcaaataaagtttatttgtagctgaaataaagcaacgtaagtaacaatttttaattaaa

SEQ ID NO: 991 - DNA, 3187 bp, Homo sapiens
gaggtagcaacagcgagcgtgccggtcgctagtcgcgggtccccgagtgagcacgccagggagcaggagaccaaacgacgggggtcggagtcagagtcgcagtgggagtccccggaccggagcacgagcctgagcgggagagcgccgctcgcacgcccgtcgccacccgcgtacccggcgcagccagagccaccagcgcagcgctgccatggagcccagcagcaagaagctgacgggtcgcctcatgctggccgtgggaggagcagtgcttggctccctgcagtttggctacaacactggagtcatcaatgccccccagaaggtgatcgaggagttctacaaccagacatgggtccaccgctatggggagagcatcctgcccaccacgctcaccacgctctggtccctctcagtggccatcttttctgttgggggcatgattggctccttctctgtgggccttttcgttaaccgctttggccggcggaattcaatgctgatgatgaacctgctggccttcgtgtccgccgtgctcatgggcttctcgaaactgggcaagtcctttgagatgctgatcctgggccgcttcatcatcggtgtgtactgcggcctgaccacaggcttcgtgcccatgtatgtgggtgaagtgtcacccacagcccttcgtggggccctgggcaccctgcaccagctgggcatcgtcgtcggcatcctcatcgcccaggtaagctggggcaggatctacctgcctggcacggcccctgcccacagcttcagtggctctcggatctgtgcccagcagggcagagtttctcttccgcccagcccccacagccttgcagaggacaactatggtacacaggtccagagaacacagcaccatggcctcccagttgacagcaagatgacttgactcttctcagtccctttcttctcactctaggcttccaaccacagggcccgccttcccccaacatgccgcaggctgttatgcacagtaccctctctccaggaggcttccccttccctgtgtgttcggcctggactccatcatgggcaacaaggacctgtggcccctgctgctgagcatcatcttcatcccggccctgctgcagtgcatcgtgctgcccttctgccccgagagtccccgcttcctgctcatcaaccgcaacgaggagaaccgggccaagagtgtgctaaagaagctgcgcgggacagctgacgtgacccatgacctgcaggagatgaaggaagagagtcggcagatgatgcgggagaagaaggtcaccatcctggagctgttccgctcccccgcctaccgccagcccatcctcatcgctgtggtgctgcagctgtcccagcagctgtctggcatcaacgctgtcttctattactccacgagcatcttcgagaaggcgggggtgcagcagcctgtgtatgccaccattggctccggtatcgtcaacacggccttcactgtcgtgtcgctgtttgtggtggagcgagcaggccggcggaccctgcacctcataggcctcgctggcatggcgggttgtgccatactcatgaccatcgcgctagcactgctggagcagctaccctggatgtcctatctgagcatcgtggccatctttggctttgtggccttctttgaagtgggtcctggccccatcccatggttcatcgtggctgaactcttcagccagggtccacgtccagctgccattgccgttgcaggcttctccaactggacctcaaatttcattgtgggcatgtgcttccagtatgtggagcaactgtgtggtccctacgtcttcatcatcttcactgtgctcctggttctgttcttcatcttcacctacttcaaagttcctgagactaaaggccggaccttcgatgagatcgcttccggcttccggcaggggggagccagccaaagtgacaagacacccgaggagctgttccatcccctgggggctgattcccaagtgtgagtcgccccagatcaccagcccggcctgctcccagcagccctaaggatctctcaggagcacaggcagctggatgagacttccaaacctgacagatgtcagccgagccgggcctggggctcctttctccagccagcaatgatgtccagaagaatattcaggacttaacggctccaggattttaacaaaagcaagactgttgctcaaatctattcagacaagcaacaggttttataatttttttattactgattttgttatttttatatcagcctgagtctcctgtgcccacatcccaggcttcaccctgaatggttccatgcctgagggtggagactaagccctgtcgagacacttgccttcttcacccagctaatctgtagggctggacctatgtcctaaggacacactaatcgaactatgaactacaaagcttctatcccaggaggtggctatggccacccgttctgctggcctggatctccccactctaggggtcaggctccattaggatttgccccttcccatctcttcctacccaaccactcaaattaatctttctttacctgagaccagttgggagcactggagtgcagggaggagaggggaagggccagtctgggctgccgggttctagtctcctttgcactgagggccacactattaccatgagaagagggcctgtgggagcctgcaaactcactgctcaagaagacatggagactcctgccctgttgtgtatagatgcaagatatttatatatatttttggttgtcaatattaaatacagacactaagttatagtatatctggacaagccaacttgtaaatacaccacctcactcctgttacttacctaaacagatataaatggctggtttttagaaacatggttttgaaatgcttgtggattgagggtaggaggtttggatgggagtgagacagaagtaagtggggttgcaaccactgcaacggcttagacttcgactcaggatccagtcccttacacgtacctctcatcagtgtcctcttgctcaaaaatctgtttgatccctgttacccagagaatatatacattctttatcttgacattcaaggcatttctatcacatatttgatagttggtgttcaaaaaaacactagttttgtgccagccgtgatgctcaggcttgaaatgcattattttgaatgtgaag

SEQ ID NO: 992 - DNA, 1223 bp, Homo sapiens
cctcactcccgagctctactgactcccaaaagagcgcccaagaagaaaatggccataagtggagtccctgtgctaggatttttcatcatagctgtgctgatgagcgctcaggaatcatgggctatcaaagaagaacatgtgatcatccaggccgagttctatctgaatcctgaccaatcaggcgagtttatgtttgactttgatggtgatgagattttccatgtggatatggcaaagaaggagacggtctggcggcttgaagaatttggacgatttgccagctttgaggctcaaggtgcattggccaacatagctgtggacaaagccaacctggaaatcatgacaaagcgctccaactatactccgatcaccaatgtacctccagaggtaactgtgctcacgaacagccctgtggaactgagagagcccaacgtcctcatctgtttcatcgacaagttcaccccaccagtggtcaatgtcacgtggcttcgaaatggaaaacctgtcaccacaggagtgtcagagacagtcttcctgcccagggaagaccaccttttccgcaagttccactatctccccttcctgccctcaactgaggacgtttacgactgcagggtggagcactggggcttggatgagcctcttctcaagcactgggagtttgatgctccaagccctctcccagagactacagagaacgtggtgtgtgccctgggcctgactgtgggtctggtgggcatcattattgggaccatcttcatcatcaagggagtgcgcaaaagcaatgcagcagaacgcagggggcctctgtaaggcacatggaggtgagtgatggtgtttcttagagagaagatcactgaagaaacttctgctttaatgactttacaaagctggcaatattacaatccttgacctcagtgaaagcagtcatcttcagcgttttccagccctatagccaccccaagtgtggttatgcctcctcgattgctccgtactctaacatctagctggcttccctgtctattgccttttcctgtatctattttcctctatttcctatcattttattatcaccatgcaatgcctctggaataaaacatacaggagtctgtctctgctatggaatgccccatggggcatctcttgtgtacttattgtttaaggtttcctcaaactgtgatttttctgaacacaataaactattttgatgatcttgggtggaa

SEQ ID NO: 993 - DNA, 2333 bp, Homo sapiens
cgcgggccaccccgctctcctcgccgccgcggcggcaggcgcggggccgcgccgcgaggcctgatccctgcagcgcgggcaggcggcgtcgcagagcggagctagctggatgcgtccggactcctgcaggtgagagtgattttccagtgattgctttggcctgtacaaccagagaacaggattcttcccttctttttggccaccaaatgcctatgtgcaccacacattccagtgtgctgagaagggcagagcttcttggatgatgatggacgtcccaccgggcaggatgaaggcagagcgtgtggcatctccacctcaagggtgcagcctgatcttcctcttctcccttgccagccagcactctgccttctgtatccaccatggtgtttggtgagtttttccatcgccctggacaagacgaggaacttgtcaacctgaatgtggggggctttaagcagtctgttgaccaaagcaccctcctgcggtttcctcacaccagactggggaagctgcttacttgccattctgaagaggccattctggagctgtgtgatgattacagtgtggccgataaggagtactactttgatcggaatccctccttgttcagatatgttttgaatttttattacacggggaagctgcatgtcatggaggagctgtgcgtattctcattctgccaggagatcgagtactggggcatcaacgagctcttcattgattcttgctgcagcaatcgctaccaggaacgcaaggaggaaaaccacgagaaggactgggaccagaaaagccatgatgtgagtaccgactcctcgtttgaagagtcgtctctgtttgagaaagagctggagaagtttgacacactgcgatttggtcagctccggaagaaaatctggattagaatggagaatccagcgtactgcctgtccgctaagcttatcgctatctcctccttgagcgtggtgctggcctccatcgtggccatgtgcgttcacagcatgtcggagttccagaatgaggatggagaagtggatgatccggtgctggaaggagtggagatcgcgtgcattgcctggttcaccggggagcttgccgtccggctggctgccgctccttgtcaaaagaaattctggaaaaaccctctgaacatcattgactttgtctctattattcccttctatgccacgttggctgtagacaccaaggaggaagagagtgaggatattgagaacatgggcaaggtggtccagatcctacggcttatgaggattttccgaattctaaagcttgcccggcactcggtaggacttcggtctctaggtgccacactgagacacagctaccatgaagttgggcttctgcttctcttcctctctgtgggcatttccattttctctgtgcttatctactccgtggagaaagatgaccacacatccagcctcaccagcatccccatctgctggtggtgggccaccatcagcatgacaactgtgggctatggagacacccacccggtcaccttggcgggaaagctcatcgccagcacatgcatcatctgtggcatcttggtggtggcccttcccatcaccatcatcttcaacaagttttccaagtactaccagaagcaaaaggacattgatgtggaccagtgcagtgaggatgcaccagagaagtgtcatgagctaccttactttaacattagggatatatatgcacagcggatgcacaccttcattaccagtctctcttctgtaggcattgtggtgagcgatcctgactccacagatgcttcaagcattgaagacaatgaggacatttgtaacaccacctccttggagaattgcacagcaaaatgagcgggggtgtttgtgcctgtttctcttatcctttcccgacattaggttaacacagctttataaacctcagtgggttcgttaaaatcatttaattctcagggtgtacctttcagccatagttggacattcattgctgaattctgaaatgatagaattgtctttatttttctctgtgaggtcaattaaatgccttgttctgaaatttattttttacaagagagagttgtgatatagtttggaatataagataaatggtattgggtggggtttgtggctacagcttatgcatcattctgtgtttgtcatttactcacattgagctaactttaaattactgacaagtagaatcaaaggtgcagctgactgagacgacatgcatgtaagatccacaaaatgagacaatgcatgtaaatccatgctcatgttctaaacatggaaactaggagcctaataaacttcctaattcagtatggagaa

SEQ ID NO: 994 - DNA, 2268 bp, Homo sapiens
ataaggggcgcttggcgcgcaacgaccccaagccgcagctttgaagcctgagcggccgaactcggcagctccaacccaactcggcttaactccgcctcaccgagcccagtccaagactctgtgctccctaggtttgcaacagctctctgatcatcttcttcaattcctgctaggatgccgtggcaagcatttcgcagatttggtcaaaagctggtacgcagacgtacactggagtcaggcatggctgagactcgccttgccagatgcctaagcaccctggatttagtggccctgggtgtgggcagcacattgggtgcaggcgtgtatgtcctagctggcgaggtggccaaagataaagcagggccatccattgtgatctgctttttggtggctgccctgtcttctgtgttggctgggctgtgctatgcggagtttggtgcccgggttccccgttctggttcggcatatctctacagctatgtcactgtgggtgaactctgggccttcaccactggctggaacctcatcctctcctatgtcattggtacagccagtgtggcccgggcctggagctctgcttttgacaacctgattgggaaccacatctctaagactctgcaggggtccattgcactgcacgtgccccatgtccttgcagaatatccagatttctttgctttgggcctcgtgttgctgctcactggattgttggctctcggggctagtgagtcggccctggttaccaaagtgttcacaggcgtgaaccttttggttcttgggttcgtcatgatctctggcttcgttaagggggacgtgcacaactggaagctcacagaagaggactacgaattggccatggctgaactcaatgacacctatagcttgggtcctctgggctctggaggatttgtgcctttcggcttcgagggaattctccgtggagcagcgacctgtttctatgcatttgttggtttcgactgtattgctaccactggagaagaagcccagaatccccagcgttccatcccgatgggcattgtgatctcactgtctgtctgctttttggcgtattttgctgtctcttctgcactcaccctgatgatgccttactaccagcttcagcctgagagccctttgcctgaggcatttctctacattggatgggctcctgcccgctatgttgtggctgttggctccctctgtgctctttctaccagcctcctgggctccatgttccccatgcctcgggtgatctacgcgatggcagaggatggcctcctgttccgtgtacttgctcggatccacaccggcacacgcaccccaatcatagccaccgtggtctctggcattattgcagcattcatggcattcctcttcaaactcactgatcttgtggacctcatgtcaattgggaccctgcttgcttactccctggtgtcgatttgtgttctcatcctcaggtatcaacctgatcaggagacaaagactggggaagaagtggagttgcaggaggaggcaataactactgaatcagagaagttgaccctatggggactatttttcccactcaactccatccccactccactctctggccaaattgtctatgtttgttcctcattgcttgctgtcctgctgactgctctttgcctggtgctggcccagtggtcagttccattgctttctggagacctgctgtggactgcagtggttgtgctgctcctgctgctcattattgggatcattgtggtcatctggagacagccacagagttccactccccttcactttaaggtgcctgctttgcctctcctcccactaatgagcatctttgtgaatatttaccttatgatgcagatgacagctggtacctgggcccgatttggggtctggatgctgattggctttgctatctacttcggctatgggatccagcacagcctggaagagattaagagtaaccaaccctcacgcaagtctagagccaaaactgtagaccttgatcccggcactctctatgtccactcagtttgacatcgtcacacctaaatgctgtctggtcccctgcacaataatggagagtactcctgaccccagtgacagctagccctcccctgtgatggtggtggtggatactaatacagttctgtacgatgtgaaggatgtgtctttgctatttcttgtctattttaacccgtctgcttctaaatgatgtctagctgcttaccaactttaaaaaatgatattaaaagaaagtagaaaaataaa

SEQ ID NO: 995 - DNA, 1188 bp, Homo sapiens
ccctttaatgagttcttgttttcctgactgcagctctcttcattctgccaaccttttccaactccatgatgatcctgcaggtttcagggggcccctggacagtggctctgacagcattactgatggtgctgctcatatctgtggtccagagcagggccactccagagaattccgtctaccaggaacggcaggaatgctatgcgttcaatgggactcagcgcgttgtggacgggctcatctacaaccgggaggaatacgtgcattttgacagcgcagtgggggagttcctagcagtgatggagctggggcggcccataggcgagtacttcaatagccagaaggactttatggaacggaagcgagccgaggtggacaaggtgtgcagacacaagtacgagctgatggagccactcatccggcagcgccgaggagacgtaaccataactgctgttagggggtgttggacgacgattctttctggctacttcctgctgaaaaggggcgtcgtgtcggggggctgcagttggggctcctcctgaggttgatctaaggcttcttggaagaatggcatgtccatgtgtggctttgtttgcagcaccatttgaagtttgattgcttctaggcaaaaagagataaattttacaagaaggtttaaaatatagggttaccatatgagtattaagattaccacctatagactgtaactatggcagtagagtttgatacctgttacaccaatggattgtaatactggtttgtctccactagatgtcgctgtacattaccagaaacgttaatataaaagcatcatttcctttgagaaaacatgtttcccccttgacttgctattagggcataatttttggtttaggccattctttataacttatgatatgattgggagaaaaacgttattgggtggctaaaataactttggtgttaatcttggcaattcctttcctttaattattaaatttcttaattattaaattctttcatgactttcacagaccctcttacaatgtactcaactttctgacttgtcttaaacaaccagtcatttccttttaggacaagaatttactatacaagatcctttcttatataaaatccctttatttgtaaccttctttccatagcttagagtgcaccatttaccaatcttcaataaaaaagtcctatcaaact

SEQ ID NO: 996 - DNA, 10197 bp, Homo sapiens
gcggcggcggctgcggcggtggggccgggcgaggtccgctgcggtcccggcggctccgtggctgctccgctctgagcgcctggcgcgccccgcgccctccctgccggggccgctgggccggggatgcacgcggggcccgggagccatggtccgcttcggggacgagctgggcggccgctatgggggccccggcggcggagagcgggcccggggcggcggggccggcggggcggggggcccgggtcccggggggctgcagcccggccagcgggtcctctacaagcaatcgatcgcgcagcgcgcgcggaccatggcgctgtacaaccccatcccggtcaagcagaactgcttcaccgtcaaccgctcgctcttcgtcttcagcgaggacaacgtcgtccgcaaatacgcgaagcgcatcaccgagtggccaggggctccggacccactccattcgagtatatgatcctggccaccatcatcgccaactgcatcgtgctggccctggagcagcacctccctgatggggacaaaacgcccatgtccgagcggctggacgacacggagccctatttcatcgggatcttttgcttcgaggcagggatcaaaatcatcgctctgggctttgtcttccacaagggctcttacctgcggaacggctggaacgtcatggacttcgtggtcgtcctcacagggatccttgccacggctggaactgacttcgacctgcgaacactgagggctgtgcgtgtgctgaggcccctgaagctggtgtctgggattccaagtttgcaggtggtgctcaagtccatcatgaaggccatggttccactcctgcagattgggctgcttctcttctttgccatcctcatgtttgccatcattggcctggagttctacatgggcaagttccacaaggcctgtttccccaacagcacagatgcggagcccgtgggtgacttcccctgtggcaaggaggccccagcccggctgtgcgagggcgacactgagtgccgggagtactggccaggacccaactttggcatcaccaactttgacaatatcctgtttgccatcttgacggtgttccagtgcatcaccatggagggctggactgacatcctctataatacaaacgatgcggccggcaacacctggaactggctctacttcatccctctcatcatcatcggctccttcttcatgctcaacctggtgctgggcgtgctctcgggggagtttgccaaggagcgagagagggtggagaaccgccgcgccttcctgaagctgcgccggcagcagcagatcgagcgagagctcaacgggtacctggagtggatcttcaaggcggaggaagtcatgctggccgaggaggacaggaatgcagaggagaagtcccctttggacgcagtgctgaagagagcggccaccaagaagagcagaaatgacctgatccacgcagaggagggagaggaccggtttgcagatctctgtgctgttggatcccccttcgcccgcgccagcctcaagagcgggaagacagagagctcgtcatacttccggaggaaggagaagatgttccggttttttatccggcgcatggtgaaggctcagagcttctactgggtggtgctgtgcgtggtggccctgaacacactgtgtgtggccatggtgcattacaaccagccgcggcggcttaccacgaccctgtattttgcagagtttgttttcctgggtctcttcctcacagagatgtccctgaagatgtatggcctggggcccagaagctacttccggtcctccttcaactgcttcgactttggggtcatcgtggggagcgtctttgaagtggtctgggcggccatcaagccgggaagctcctttgggatcagtgtgctgcgggccctccgcctgctgaggatcttcaaagtcacgaagtactggagctccctgcggaacctggtggtgtccctgctgaactccatgaagtccatcatcagcctgctcttcttgctcttcctgttcattgtggtcttcgccctgctggggatgcagctgtttgggggacagttcaacttccaggatgagactcccacaaccaacttcgacaccttccctgccgccatcctcactgtcttccagatcctgacgggagaggactggaatgcagtgatgtatcacgggatcgaatcgcaaggcggcgtcagcaaaggcatgttctcgtccttttacttcattgtcctgacactgttcggaaactacactctgctgaatgtctttctggccatcgctgtggacaacctggccaacgcccaagagctgaccaaggatgaagaggagatggaagaagcagccaatcagaagcttgctctgcaaaaggccaaagaagtggctgaagtcagccccatgtctgccgcgaacatctccatcgccgcttttgtaaagcaagctcgaggtactgtatctcgcagctcatctgtctccagcgtgaactcacccaggcagcagaactcggccaaggcgcgctcggtgtgggagcagcgggccagccagctacggctgcagaacctgcgggccagctgcgaggcgctgtacagcgagatggaccccgaggagcggctgcgcttcgccactacgcgccacctgcggcccgacatgaagacgcacctggaccggccgctggtggtggagctgggccgcgacggcgcgcgggggcccgtgggaggcaaagcccgacctgaggctgcggaggcccccgagggcgtcgaccctccgcgcaggcaccaccggcaccgcgacaaggacaagacccccgcggcgggggaccaggaccgagcagaggccccgaaggcggagagcggggagcccggtgcccgggaggagcggccgcggccgcaccgcagccacagcaaggaggccgcggggcccccggaggcgcggagcgagcgcggccgaggcccaggccccgagggcggccggcggcaccaccggcgcggctccccggaggaggcggccgagcgggagccccgacgccaccgcgcgcaccggcaccaggatccgagcaaggagtgcgccggcgccaagggcgagcggcgcgcgcggcaccgcggcggcccccgagcggggccccgggaggcggagagcggggaggagccggcgcggcggcaccgggcccggcacaaggcgcagcctgctcacgaggctgtggagaaggagaccacggagaaggaggccacggagaaggaggctgagatagtggaagccgacaaggaaaaggagctccggaaccaccagccccgggagccacactgtgacctggagaccagtgggactgtgactgtgggtcccatgcacacactgcccagcacctgtctccagaaggtggaggaacagccagaggatgcagacaatcagcggaacgtcactcgcatgggcagtcagcccccagacccgaacactattgtacatatcccagtgatgctgacgggccctcttggggaagccacggtcgttcccacacttgaaaaaaacgtgtgcctcttccttctgacctccatggtttctgatgagaaatccactgtcattcgaattgttttcttcctataggtcccacaataggccgtctgcaagctgaggagcaaggagagccagcccgagtctcaaagctgaacttggagtccgatgttcgagggcaggaagcgtccagcacgggagaaagatataggctgggaggtggtaacgtggacctggaaagccaagcagaggggaagaaggaggtggaagcggatgacgtgatgaggagcggcccccggcctatcgtcccatacagctccatgttctgtttaagccccaccaacctgctccgccgcttctgccactacatcgtgaccatgaggtacttcgaggtggtcattctcgtggtcatcgccttgagcagcatcgccctggctgctgaggacccagtgcgcacagactcgcccaggaacaacgctctgaaatacctggattacattttcactggtgtctttacctttgagatggtgataaagatgatcgacttgggactgctgcttcaccctggagcctatttccgggacttgtggaacattctggacttcattgtggtcagtggcgccctggtggcgtttgctttctcaggatccaaagggaaagacatcaataccatcaagtctctgagagtccttcgtgtcctgcggcccctcaagaccatcaaacggctgcccaagctcaaggctgtgtttgactgtgtggtgaactccctgaagaatgtcctcaacatcttgattgtctacatgctcttcatgttcatatttgccgtcattgcggtgcagctcttcaaagggaagtttttctactgcacagatgaatccaaggagctggagagggactgcaggggtcagtatttggattatgagaaggaggaagtggaagctcagcccaggcagtggaagaaatacgactttcactacgacaatgtgctctgggctctgctgacgctgttcacagtgtccacgggagaaggctggcccatggtgctgaaacactccgtggatgccacctatgaggagcagggtccaagccctgggtaccgcatggagctgtccatcttctacgtggtctactttgtggtctttcccttcttcttcgtcaacatctttgtggctttgatcatcatcaccttccaggagcagggggacaaggtgatgtctgaatgcagcctggagaagaacgagagggcttgcattgacttcgccatcagcgccaaacccctgacacggtacatgccccaaaaccggcagtcgttccagtataagacgtggacatttgtggtctccccgccctttgaatacttcatcatggccatgatagccctcaacactgtggtgctgatgatgaagttctatgatgcaccctatgagtacgagctgatgctgaaatgcctgaacatcgtgttcacatccatgttctccatggaatgcgtgctgaagatcatcgcctttggggtgctgaactatttcagagatgcctggaatgtctttgactttgtcactgtgttgggaagtattactgatattttagtaacagagattgcggtaaaaaacggaaacgagaacaatttcatcaacctcagcttcctccgcctctttcgagctgcgcggctgatcaagctgctccgccagggctacaccatccgcatcctgctgtggacctttgtccagtccttcaaggccctgccctacgtgtgtctgctcattgccatgctgttcttcatctacgccatcatcggcatgcaggtgtttgggaatattgccctggatgatgacaccagcatcaaccgccacaacaacttccggacgtttttgcaagccctgatgctgctgttcaggagcgccacgggggaggcctggcacgagatcatgctgtcctgcctgagcaaccaggcctgtgatgagcaggccaatgccaccgagtgtggaagtgactttgcctacttctacttcgtctccttcatcttcctgtgctcctttctgatgttgaacctctttgtggctgtgatcatggacaattttgagtacctcacgcgggactcttccatcctaggtcctcaccacttggatgagttcatccgggtctgggctgaatacgacccggctgcgtgttgccggattcattataaggatatgtacagtttgttgcgttgtattgcgccacccgttggcttagggaagaactgccctcgtaggttggcctacaagtgggcgcatcagttacaatgacatgtttgagatgctgaaacacatgtccccgcctctggggctggggaagaaatgccctgctcgagttgcttacaagcgcctggttcgcatgaacatgcccatctccaacgaggacatgactgttcacttcacgtccacgctgatggccctcatccggacggcactggagatcaagctggccccagctgggacaaagcagcatcagtgtgacgcggagttgaggaaggagatttccgttgtgtgggccaatctgccccagaagactttggacttgctggtaccaccccataagcctgatgagatgacagtggggaaggtttatgcagctctgatgatattcgacttctacaagcagaacaaaaccaccagagaccagatgcagcaggctcctggaggcctctcccagatgggtcctgtgtccctgttccaccctctgaaggccaccctggagcagacacagccggctgtgctccgaggagcccgggttttccttcgacagaagagttccacctccctcagcaatggcggggccatacaaaaccaagagagtggcatcaaagagtctgtctcctggggcactcaaaggacccaggatgcaccccatgaggccaggccacccctggagcgtggccactccacagagatccctgtggggcggtcaggagcactggctgtggacgttcagatgcagagcataacccggaggggccctgatggggagccccagcctgggctggagagccagggtcgagcggcctccatgccccgccttgcggccgagactcagcccgtcacagatgccagccccatgaagcgctccatctccacgctggcccagcggccccgtgggactcatctttgcagcaccaccccggaccgcccaccccctagccaggcgtcgtcgcaccaccaccaccaccgctgccaccgccgcagggacaggaagcagaggtccctggagaaggggcccagcctgtctgccgatatggatggcgcaccaagcagtgctgtggggccggggctgcccccgggagaggggcctacaggctgccggcgggaacgagagcgccggcaggagcggggccggtcccaggagcggaggcagccctcatcctcctcctcggagaagcagcgcttctactcctgcgaccgctttgggggccgtgagcccccgaagcccaagccctccctcagcagccacccaacgtcgccaacagctggccaggagccgggaccccacccacagggcagtggttccgtgaatgggagccccttgctgtcaacatctggtgctagcacccccggccgcggtgggcggaggcagctcccccagacgcccctgactccccgccccagcatcacctacaagacggccaactcctcacccatccacttcgccggggctcagaccagcctccctgccttctccccaggccggctcagccgtgggctttccgaacacaacgccctgctgcagagagaccccctcagccagcccctggcccctggctctcgaattggctctgacccttacctggggcagcgtctggacagtgaggcctctgtccacgccctgcctgaggacactctcactttcgaggaggctgtggccaccaactcgggccgctcctccaggacttcctacgtgtcctccctgacctcccagtctcaccctctccgccgcgtgcccaacggttaccactgcaccctgggactcagctcgggtggccgagcacggcacagctaccaccaccctgaccaagaccactggtgctagctgcaccgtgaccgctcagacgcctgcatgcagcaggcgtgtgttccagtggatgagttttatcatccacacggggcagccggccctcgggggaggccttgcccaccttggtgaggctcctgtggcccctccctccccctcctcccctcttttactctagacgacgaataaagccctgttagaggatgcggctctctctgtccccttcctgtcctgccttcctgggtctcgtaccacacaccagaccctaaaccgcaggctgctgtgtgtggctgagaaggacccaggagtccaaatcccgtgtcctgggactcagcatccagcatgggtgcttggagccgttgtgaggagctctgcgtcctgtggggagcacccttcacgtggccgtgcggcacagagaagcagggcccacctgaaagtgcgccgagacctcgggacggaggggatggggagggggacacagtcgtggcttgtgcagcccgccagtgtcagcgaatgctcactcaggcaagctctgtcctccctggacaccgtcagccccacaggaaccgagctgggaagtgttcttgctgtggttgtgatttttaattgcaacacctctcattcttgtcacttctatatacgtgatgtagaaaaaatggaaaaccagaaaaatggggaaggaaatgttcacataactttaaaaaatcaaacctgtgaaagaaagatgtcagctttttgccacgtgtctttgtggcttatgcgaggagactccctgtgcagccctgtccggtccaggtggacgtagacggcccctggctctgctgctcttgaccaagtgcctgaccgccaggccctcacacccaggctcctgggcactgtggtgtgaggcgaggcctcgggatccatcaccgcaggatgctgtgaaaagtactcgcgatggcagccaggtagcaagcccttgccagtggagagcactggatgtcatggtggcaaacaaggcagccatttgctgtcctcctcccacgagtggaaggggtttccaaggaagccacagggcagctgaccacgtgcttgtgtgaggcattttcagtctgttctgcatatgattctcagggcacactctgtggtatgtgaaataggtttccttccacatacagcagaagagaggcaaaggctggtaggaaggaggaagacattggctgggggcttggatgtggggccgtcagggcaggagggaggaagccccagctggaatgaaactcagagcaagtgaccgagggaggacacggctcctgccactgaggccgggcacctgatgcccagcactgtcctggcgccagacacagggagcaggcagtcaagtgaggtctgacccccatggccacgctcaggagagaaagaccatgctcaggacactgtccaaggtgcacaagatgctgggaggtcccttgtttggtgaagaaagggagcatttagagcagttgatggtggtgtgtcctccgtgttctgaaattccagatgatctgtgttggattcttggcttctaccccatgattctcctcaaagaaattgtgtgtgatgtgtgtgtgtgtgtgtgtgtgtgtgtgtctgtgtcacaggagatgcagtgcctgtacaggtgtgttcagtgtgtggatgtcattaacccatagggctatgcaacaaaagacacatttaatagaagtaaaacacacaagaccgctgcctggtctcggggttcagcatgattgtgaccaaacctttttatagaatttccttacctgaaggcacaacactctgaaactttaaagataacagagtattttattccaatagaataaaccaggaatctcggactgtgcatgtgatcactgtgctcctgttgcaaagtagaaggatgtgtattttgacactgacgttttgtctcttgttccccagcccccagcccatgttatcttgggtgtcgaatgtgtccattccatgcagaaccacagccatttccccaggcagtgttgggtcgagaatccacttttctaaacccacacagcctagctggcttgtctagactcttctaggcattggaattgatgaaaactacagggagcggggaaaggagacattatgtcttgttttcctgactttgggttttgtttctcactgtgtcttctccggctatcatatatgtcccctgaatctcatagtgagctgccaaatttgaagtgcatcacccagttgtctgcatctggaaccagtcaagcagtggctgtagtttgaacaagttatgtgtgcatgtaacatatatacatatatacatatatacaagtatgtgcatgataatgtatatcttcgtactttttgatacaatgtattcatttgttaatttttaattatatttgatataaatcaaaggtttgttgcaaaactttatatttaagaagtgttaaaaaaaaaaaaaagtcccaaccatgcaacacaactgggacctacttaaaaagaaattctgtgattgactagtttgctgcctgagtcatatttatcagccaaactttggattctgctgttgtttctacaatgacattttgtatgaagcaaagtccttgaattaaaataaaaacttagcaaaaaatcaaaaacaaaacccca

SEQ ID NO: 997 - DNA, 1763 bp, Homo sapiens
caccgagcctggctctactgcaggcgctgggggttggggtgggggagaggcccagggcacatgatgccgcccccagcccgcccagcacatgacccaggcaggccggcggggtcctggcacacccgagccgcgtccgcgaacacagcccatggcctccccgcgcctagggaccttctgctgccccacgcgggacgcagccacgcagctcgtgctgagcttccagccgcgggccttccacgcgctctgcctgggcagcggcgggctccgcttggcgctgggccttctgcagctgctgcccggccgccggcccgcgggccccgggtcccccgcgacgtccccgccggcctcggtccgcatcctgcgcgctgccgctgcctgcgaccttctcggctgcctgggtatggtgatccggtccaccgtgtggttaggattcccaaattttgttgacagcgtctcggatatgaaccacacggaaatttggcctgctgctttctgcgtggggagtgcgatgtggatccagctgttgtacagtgcctgcttctggtggctgttttgctatgcagtggatgcttatctggtgatccggagatcggcaggactgagcaccatcctgctgtatcacatcatggcgtggggcctggccaccctgctctgtgtggagggagccgccatgctctactacccttccgtgtccaggtgtgagcggggcctggaccacgccatcccccactatgtcaccatgtacctgcccctgctgctggttctcgtggcgaaccccatcctgttccaaaagacagtgactgcagtggcctctttacttaaaggaagacaaggcatttacacggagaacgagaggaggatgggagccgtgatcaagatccgatttttcaaaatcatgctggttttaattatttgttggttgtcgaatatcatcaatgaaagccttttattctatcttgagatgcaaacagatatcaatggaggttctttgaaacctgtcagaactgcagccaagaccacatggtttattatgggaatcctgaatccagcccagggatttctcttgtctttggccttctacggctggacaggatgcagcctgggttttcagtctcccaggaaggagatccagtgggaatcactgaccacctcggctgctgagggggctcacccatccccactgatgccccatgaaaaccctgcttccgggaaggtgtctcaagtgggtgggcagacttctgacgaagccctgagcatgctgtctgaaggttctgatgccagcacaattgaaattcacactgcaagtgaatcctgcaacaaaaatgagggtgaccctgctctcccaacccatggagacctatgaaggggatgtgctgggggtccagaccccatattcctcagactcaacaattcttgttctttagaactgtgttctcaccttcccaacactgcactgccgaagtgtagcggcccccaaaccttgctctcatcaccagctagagcttcttcccgaagggcctttaggataggagaaagggttcatgcacacacgtgtgagaatggaagagccccctccagaccactctacagctgctctagccttagttgccactaggaagttttctgaggctggctgtaaagtaagtgtaaggtccacatccttggggaagtagttaaataaaatagttatgactgagctctcagcctgacttggattctgtcttaacacttctagcaaaagaaaataaatacatgtacagtta

SEQ ID NO: 998 - DNA, 2929 bp, Homo sapiens; identical to SEQ ID NO: 51

SEQ ID NO: 999 - DNA, 2328 bp, Homo sapiens; identical to SEQ ID NO: 47

SEQ ID NO: 1000 - DNA, 2005 bp, Homo sapiens; identical to SEQ ID NO: 62

SEQ ID NO: 1001 - DNA, 4986 bp, Homo sapiens; identical to SEQ ID NO: 50

SEQ ID NO: 1002 - DNA, 5190 bp, Homo sapiens; identical to SEQ ID NO: 44

SEQ ID NO: 1003 - DNA, 3431 bp, Homo sapiens; identical to SEQ ID NO: 45

SEQ ID NO: 1004 - DNA, 4143 bp, Homo sapiens; identical to SEQ ID NO: 57

SEQ ID NO: 1005 - DNA, 4745 bp, Homo sapiens; identical to SEQ ID NO: 49

SEQ ID NO: 1006 - DNA, 3170 bp, Homo sapiens; identical to SEQ ID NO: 259

SEQ ID NO: 1007 - DNA, 3070 bp, Homo sapiens; identical to SEQ ID NO: 55

SEQ ID NO: 1008 - DNA, 4109 bp, Homo sapiens; identical to SEQ ID NO: 94

SEQ ID NO: 1009 - DNA, 3280 bp, Homo sapiens; identical to SEQ ID NO: 54

SEQ ID NO: 1010 - DNA, 2383 bp, Homo sapiens; identical to SEQ ID NO: 59

SEQ ID NO: 1011 - DNA, 3650 bp, Homo sapiens; identical to SEQ ID NO: 46

SEQ ID NO: 1012 - DNA, 5282 bp, Homo sapiens; identical to SEQ ID NO: 89

SEQ ID NO: 1013 - DNA, 2586 bp, Homo sapiens; identical to SEQ ID NO: 74

SEQ ID NO: 1014 - DNA, 5844 bp, Homo sapiens
caggctcagaggctgaagcaggaggaaggaaggactggaaggaaaaagagacaggttagagggaaagaggcttgggaagaaaacagcagaaaagaaactgctcattacacttacagagaggcaagtaacggtggagatgaggacagagggaaccaagactctgaaagacaaaaaatacaaatagagcgaaagaggaaaaaaatgtcaagaagaacatccatccggagaaatgaagagaatgaaagttttaagctgcagagccgttctgtgcttttccggcacaaaattatatcgctgattttaagcccttttgcatttgccagccgttgacattaagaggcatgtttaacggtgccaacagcatctccttttccttctcctcttcctcttcttcttcttcctcctcctcctcctctttttcctcctcctcgttctcctcccatcagcaagaagacaaaccgaggacagtcttgaaatatcgaaatttcctctttgggatttgccagcgccaagactgtcggaataaaggacgctgactattgtattattgttattttattaattagtcagtggaaagattacagatgaggaaaggggacgcctgtcacccttcctgtgctaagatttaaaaaaaaatgaggctggattgcgggaagctctaaaatgaagcaaaaggagtaagatttttaaagacagaaagccacaggagcccccacgtagcgcacttttatttgtattttttcagatttttttttgtttcgtggtggtgggggaggtgattgggtggctgactggctgcgggaagctacttcctttccttttggagatgattgtgctattattgtttgccttgctctggatggtggaaggagtcttttcccagcttcactacacggtacaggaggagcaggaacatggcactttcgtggggaatatcgctgaagatctgggtctggacattacaaaactttcggctcgcgggtttcagacggtgcccaactcaaggaccccttacttagacctcaacctggagacaggggtgctgtacgtgaacgagaaaatagaccgcgaacaaatctgcaaacagagcccctcctgtgtcctgcacctggaggtctttctggagaaccccctggagctgttccaggtggagatcgaggtgctggacattaatgacaaccccccctctttcccggagccagacctgacggtggaaatctctgagagcgccacgccaggcactcgcttccccttggagagcgcattcgacccagacgtgggcaccaactccttgcgcgactacgagatcacccccaacagctacttctccctggacgtgcagacccagggggatggcaaccgattcgctgagctggtgctggagaagccactggaccgagagcagcaagcggtgcaccgctacgtgctgaccgcggtggacggaggaggtgggggaggagtaggagaaggagggggaggtggcgggggagcaggcctgcccccccagcagcagcgcaccggcacggccctactcaccatccgagtgctggactccaatgacaatgtgcccgctttcgaccaacccgtctacactgtgtccctaccagagaactctcccccaggcactctcgtgatccagctcaacgccaccgacccggacgagggccagaacggtgaggtcgtgtactccttcagcagccacatttcgccccgggcgcgggagcttttcggactctcgccgcgcactggcagactggaggtaagcggcgagttggactatgaagagagcccagtgtaccaagtgtacgtgcaagccaaggacctgggccccaacgccgtgcctgcgcactgcaaggtgctagtgcgagtactggatgctaatgacaacgcgccagagatcagcttcagcaccgtgaaggaagcggtgagtgagggcgcggcgcccggcactgtggtggcccttttcagcgtgactgaccgcgactcagaggagaatgggcaggtgcagtgcgagctactgggagacgtgcctttccgcctcaagtcttcctttaagaattactacaccatcgttaccgaagcccccctggaccgagaggcgggggactcctacaccctgactgtagtggctcgggaccggggcgagcctgcgctctccaccagtaagtcgatccaggtacaagtgtcggatgtgaacgacaacgcgccgcgtttcagccagccggtctacgacgtgtatgtgactgaaaacaacgtgcctggcgcctacatctacgcggtgagcgccaccgaccgggatgagggcgccaacgcccagcttgcctactctatcctcgagtgccagatccagggcatgagcgtcttcacctacgtttctatcaactctgagaacggctacttgtacgccctgcgctccttcgactatgagcagctgaaggacttcagttttcaggtggaagcccgggacgctggcagcccccaggcgctggctggtaacgccactgtcaacatcctcatagtggatcaaaatgacaacgcccctgccatcgtggcgcctctaccagggcgcaacgggactccagcgcgtgaggtgctgccccgctcggcggagccgggttacctgctcacccgcgtggccgccgtggacgcggacgacggcgagaacgcccggctcacttacagcatcgtgcgtggcaacgaaatgaacctctttcgcatggactggcgcaccggggagctgcgcacagcacgccgagtcccggccaagcgcgacccccagcggccttatgagctggtgatcgaggtgcgcgaccatgggcagccgcccctttcctccaccgccaccctggtggttcagctggtggatggcgccgtggagccccagggcgggggcgggagcggaggcggagggtcaggagagcaccagcgccccagtcgctctggcggcggggaaacctcgctagacctcaccctcatcctcatcatcgcgttgggctcggtgtccttcatcttcctgctggccatgatcgtgctggccgtgcgttgccaaaaagagaagaagctcaacatctatacttgtctggccagcgattgctgcctctgctgctgctgctgcggtggcggaggttcgacctgctgtggccgccaagcccgggcgcgcaagaagaaactcagcaagtcagacatcatgctggtgcagagctccaatgtacccagtaacccggcccaggtgccgatagaggagtccgggggctttggctcccaccaccacaaccagaattactgctatcaggtatgcctgacccctgagtccgccaagaccgacctgatgtttcttaagccctgcagcccttcgcggagtacggacactgagcacaacccctgcggggccatcgtcaccggttacaccgaccagcagcctgatatcatctccaacggaagcattttgtccaacgaggtaaggctgaagcgaaaggaccaccatctctcatctcctccatcagaaagcctcctctagcccggcccttgtatctctggtgcactgtatctatttttaggatattagcttatgtgtatcgttgtgggagcagagatgggcggtcaccttctcccactccttcgtgtgtaacctaactttcgcgttgttccaccctttcacatttattttcattccgtccccttggtactttgccaccttggagctccctcctttgctcttccatcctgtcagtcctttcccttctcagtaacctgggcatgaagggaaactgcgtgaagggagagggaaatgtggaggagggacttactttctagcactggcaaaggtcttttttctttgcgtctgtcccaggcattaataaagttggctctattttgctttgtttaacgatgcttttagtcgcgtgtacaagtaagctatagattgtttaactttaactaaacaccagcgagcagagctcagctatctagttgacagacctcgccgagttaacagttctgcattccaggaagccgacatagtaagctctaaggacagtggtcatggagacagtgaacagggagatagtgatcatgatgccaccaaccgtgcccagtcagctggtatggatctcttctccaattgcactgaggaatgtaaagctctgggccactcagatcggtgctggatgccttcttttgtcccttctgatggacgccaggctgctgattatcgcagcaatctgcatgttcctggcatggactctgttccagacactgaggtgtttgaaactccagaagcccagcctggggcagagcggtccttttccacctttggcaaagagaaggcccttcacagcactctggagaggaaggagctggatggactgctgactaatacgcgagcgccttacaaaccaccatatttgacacggaaaaggatatgctagtcaattctacaggacttacctgaagcagcatgatttgcacaaagtcgaccaacaaaagcatcaacttttcaacttcattatcttggccatccagttagtcatgtgtaactgagtattagatttcggatggagtcatcatggccaattataggacctaattgctctcagcaggcctgagaaatgagttgaaatgtgcagaactgtagaaactttagaggcaacagattttgcctccccgatcagtgtgtgcctgtttacagcactatctatctttctctctccaaatgtcactgagccctttagatgtttatattcaccacgagaagccagtcataaagataaaggaaatttgtgcattataaatgcaatatcactgttttaaacttgactgttttatattatttttgtgtgatcaagtgttccgcaagctattccaactttacaagagaaattgtgattatgttcttttcacctgtgggttataaaaaatgttgtattctgaagacccacaaaatatcaaagacattctgtagtttatacaccgtgttgcaaagtgtttactgtactatttcaaagcttctaaataaatataaaatatatatattatattatataattttcctaaaatgtggtacaactcagttggtttttaaatggatgcatacagtccacatcatacaataaaataaaaggtaattcagggtcccaaagacaaacttactaagaaaaaatcattaatagttttctcccaatttccatatcttactcaaccgtgtttttccttgtttaaaagaaaatgatgctctaagctacaaaattttgtcaaaaactcatattgaattttcaatgccaaagatgtagctattgatgttatcagacagagcactgactatgtactatcaaactatctaacaatctgcataagtctgattctatttctatgactttgaatttagaatcacttaaagcttttataaagaatcgataaattcacctgtatttgttgttagaaaaaaactgggtgtctgtacattttgtggtgtaaaatatgtaattgaagattactattttaagaagtcatcagtcatatcactcacacagaattttattttacatagttttgtgacttaattacacatgaatataaaatctataattctatatgaatatatagagatatagaaacatctgaactggtaaagaataactataaaatatgaaagctctaaatttaaaataaatttagagatagaatcatggtacattattgtttcagtattccatgtgaaaattttatagcttaaatgtagtcagtgtttgattaatgaaaaaattcttcatgagtcagccttcaaaagttaagcttgccttttacttttatgtcaacaatattaattattaaatttagtaagacgca

SEQ ID NO: 1015 - DNA, 3722 bp, Homo sapiens; identical to SEQ ID NO: 82

SEQ ID NO: 1016 - DNA, 918 bp, Homo sapiens; identical to SEQ ID NO: 52

SEQ ID NO: 1017 - DNA, 10079 bp, Homo sapiens; identical to SEQ ID NO: 60

SEQ ID NO: 1018 - DNA, 1578 bp, Homo sapiens; identical to SEQ ID NO: 81

SEQ ID NO: 1019 - DNA, 4960 bp, Homo sapiens; identical to SEQ ID NO: 826

SEQ ID NO: 1020 - DNA, 1713 bp, Homo sapiens; identical to SEQ ID NO: 58

SEQ ID NO: 1021 - DNA, 2815 bp, Homo sapiens; identical to SEQ ID NO: 61

SEQ ID NO: 1022 - DNA, 4250 bp, Homo sapiens
agtcgcccagagaagcgggagtgggagaagctttgagagttgcaggggactacttttttccggtcgggcggcgggcctcatgggtgcttgtttaccgggctgggagcagggcattcaaaagctgggtgtcggagcgcactgaagtccaacacgcctgcagagaccgccctaagcctggaggtgtgtctggcttgcatccagaaccacagggtggattctcgccaccgacttggctggatgacggctggctggtggtgagctcccctgcccactggctgacctcaagcagttggccccggtaggtggaggctattcgagggggacaagctggggacgcagcgtcagctcctgccagcgcgcgggtctcctccacctccaagcagtgtggtgcgtgggacgcgcatcttcccggactatccctttccagcgcggtctgtgcggaccccgagcccggcagccaccagggacggagggcggggtgcctttctctgggctcatccgctgtcagccgtgggaactcttaactttatccagagggatctgtgcaggcgggggtgggagaggttctcctcccctggcggttacctccccctcccgggccgcccctcccccgcctcccatggcttcgctttcagagcatcctcactccgcccagttcggtgccagctgcgtgggctccagcttcgatcgttttccttggaatgctccaaaactcagcagcgactaagggaattccattggaatttgccgggcgtgctctcaccccgcacggcacccgcgccgtcagtcctcggatcccatcacttcagcccgaagattgcaactttgcagagacgaagaaatagcatggcatgaaacatggctcagttctattacaaaagaaatgttaatgctccctatagagaccgcatccctctaaggatagtaagagcagaatcagaactctcgccatcagaaaaagcctacttgaatgctgtggaaaagggagattatgccagtgtcaagaaatccctagaggaagctgaaatttattttaaaatcaatattaattgcattgatcctctcggaagaactgctctcctcattgcaattgaaaatgagaacttggagctcatcgaactactcttaagctttaatgtctatgttggagatgctctattacatgctatcagaaaagaagtcgtcggagctgttgagctgttattgaaccacaaaaaacctagtggagaaaaacaggtgcctcctatactccttgataagcagttctctgaattcactccagacattacaccaatcattttggcagcccatacaaataattatgagataataaaactcttggttcagaaaggagtctcagtgcctcgaccccacgaggtccgctgtaactgtgtggaatgcgtgtccagttcagatgtggacagcctccgtcactcacgctccagactcaacatctacaaggccttggccagtccctctctcattgcactgtcaagcgaagatccttttctcacagcctttcagttaagttgggaacttcaggaactgagcaaggtggaaaatgaattcaagtcggagtatgaagagctgtcacggcagtgcaaacaatttgctaaggacctactggatcagacgagaagttccagagaactggaaatcattcttaattaccgagatgacaatagtctcatagaagaacaaagtggaaatgatcttgcaagactaaaattggccattaagtaccgtcaaaaagagtttgttgcccagcccaattgtcaacagctgctggcatctcgctggtacgatgagtttccaggctggaggagaagacactgggcagtgaagatggtgacatgtttcataataggacttctttttcctgtcttctctgtgtgctacctgatagctcccaaaagcccacttggactgttcatcaggaagccatttatcaagtttatctgccacacagcctcctatttgacttttttgttcctgctgctgcttgcctctcagcacatcgacaggtcagacttgaacaggcaaggtccaccaccaaccatcgtcgagtggatgatattaccgtgggtcctgggcttcatatggggagaaattaaacagatgtgggatggcggacttcaggactacatccatgattggtggaatctaatggactttgtaatgaactccttatatttagcaacaatctccttgaaaattgttgcatttgtaaagtacagtgcccttaatccacgagaatcatgggacatgtggcatcccactctggtggcagaggctttatttgctattgcaaacatcttcagttctctgcgtctgatctcactgtttactgcaaattctcacctgggacctctgcaaatatctctgggaagaatgctcctggacattttgaagtttctattcatatactgccttgtgttgctagcatttgcaaatggcctaaatcaattgtacttctattatgaagaaacgaaagggttaacctgcaaaggcataagatgtgaaaagcagaataatgcattttcaacgttatttgagacactgcagtccctgttttggtcaatatttgggctcatcaatttatatgtgaccaatgtcaaagcacagcatgaatttactgagtttgttggtgccaccatgtttgggacatacaatgtcatctctctggttgttctactcaacatgttaatagctatgatgaataattcttaccaactgattgctgaccatgcagatatagaatggaaatttgcacgaacaaagctttggatgagttattttgaagaaggaggtactctgcctactcccttcaatgtcatcccgagccccaagtctctctggtacctgatcaaatggatctggacacacttgtgcaagaaaaagatgagaagaaagccagaaagttttggaacaataggggtaagaacacagcataggcgagctgctgataacttgagaagacatcaccaataccaagtaagttgtccttgtactatgtcttgaaattttcactaaaataaaatgcagtccccccttcagaactgactcaggaggaaatttatttactcattgagtatcaatactcttgttctaaaatgcctcaggaagttatgaggaacctggtgaagcgatacgttgctgcaatgattagagatgctaaaactgaagaaggcctgaccgaagagaactttaaggaactaaagcaagacatttctagtttccgctttgaagtcctgggattactaagaggaagcaaactttccacaatacaatctgcgaatgcctcgaaggagtcttcaaattcggcagactcagatgaaaagagtgatagcgaaggtaatagcaaggacaagaaaaagaatttcagcctttttgatttaaccaccctgattcatccgagatcagcagcaattgcctctgaaagacataacataagcaatggctctgccctggtggttcaggagccgcccagggagaagcagagaaaagtgaattttgtgaccgatatcaaaaactttgggttatttcatagacgatcaaaacaaaatgctgctgagcaaaatgcaaaccaaatcttctctgtttcagaagaagttgctcgtcaacaggctgcaggaccacttgagagaaatattcaactggaatctcgaggattagcttcacggggtgacctgagcattcccggtctcagtgaacaatgtgtgttagtagaccatagagaaaggaatacggacacactggggttacaggtaggaaagagagtgtgtccattcaagtcagagaaggtggtggtggaggacacggttcctataataccaaaggagaaacatgcaaaagaagaggactctagtatagactatgatctaaacctcccagacacagtcacccacgaagattacgtgaccacaagattgtgatacttgaaggaggaagcgtttaccatacacatacgtattttccgtagtgctctgggtgggggaaaatgtttaaattgtattagcaaatgctaacttacactttatagcgtttatcagctgtggcatattacctgtaacatgtttaaataaggcaaaggcaatcaaaaacctttttgttttgtagcctgcttttgctttcacaatttgtcttacaattgtttttgttaataaataaatgcaccttgtattcttgtactgttgcaataacccacagaaacattttagctatctttttcaattaaaacaaatgcaatt

SEQ ID NO: 1023 - DNA, 6237 bp, Homo sapiens; identical to SEQ ID NO: 99

SEQ ID NO: 1024 - DNA, 2547 bp, Homo sapiens; identical to SEQ ID NO: 56

SEQ ID NO: 1025 - DNA, 2890 bp, Homo sapiens; identical to SEQ ID NO: 75

SEQ ID NO: 1026 - DNA, 1047 bp, Homo sapiens; identical to SEQ ID NO: 73

SEQ ID NO: 1027 - DNA, 1110 bp, Homo sapiens; identical to SEQ ID NO: 48

SEQ ID NO: 1028 - DNA, 7179 bp, Homo sapiens; identical to SEQ ID NO: 97

SEQ ID NO: 1029 - DNA, 3665 bp, Homo sapiens; identical to SEQ ID NO: 69

SEQ ID NO: 1030 - DNA, 3422 bp, Homo sapiens; identical to SEQ ID NO: 823

SEQ ID NO: 1031 - DNA, 2157 bp, Homo sapiens
gtccccgccgtgcgcccttcgccgctgagctcgcagcctccggcgcccacctccacctccagtgtcccgcctcgggccgtcgccctccagcggctcgcgagcgtgggagacgtacctgggcaggcactgtccagcccaggcccaggcacagccgtgaggggcgaggcacggggacatcctggcggccaccatggtggccacgtgcctgcaggtggtgggcttcgtcacgagcttcgtgggctggatcggggtcatcgtgaccacctccaccaatgactgggtggtgacctgcggctacaccatccccacctgccgcaagctggatgagctgggctccaaggggctgtgggccgactgcgtcatggccacggggctgtaccactgcaagcccctggtggacatcctcatcctgccgggctacgtgcaggcctgccgcgccctgatgattgctgcctcggtcctgggtctgccggccattttactgctgctgactgttcttccctgcatccggatgggccaggagcccggtgtggctaagtacaggcgggcccagctggctggtgttttgctcattctgctggctctctgcgcccttgttgccaccatctggttccctgtgtgcgcccaccgtgagaccaccatcgtgagctttggctactccctgtatgcaggctggattggtgctgtgctgtgcctcgtgggtggctgtgtcatcctctgctgcgctggagatgcccaggcctttggtgaaaaccgtttctactacactgcgggctctagctccccgactcatgcgaagagtgcccacgtataagagggctgcccggctgcccacagaggtgctgtagatgctgggcccagggccctaggtttgctcgtcacagtgtggggaagcccattcctctgccaggctctaaagccaaaggtctagaaaagcatcctgtctggcattttgtagtcttaacttctccccatttcccccatcttttggttgccttaaaagaaatctctagctcagataatgcccagacatttttttcccttggtgttgcccctattagctcttttcttgggcattcttttgctgtttattaaaaatatattatatatattttgtttctttaaatttcaaatgttttgcaaacatcactgagttaggtgggggtggggaagagaaatacaagatacttttttttttttttttttttttttttttttaaatagggcctcactctgttgctcaggctggagtgcggtggtgtgatctcggctcatgtagcctcaacctccccggctcaagtgatcctcctgcctcagcctcccaagtagctgggactacaggcgttcactactacacccagctaatttttaagttttttatagagatgagggctccctatgttgcccaggttggtctcgaactcctggactcaaagtatcctcccgcctcggcctcccaaagtgttgggattataggagtgagccaccacaccggccaagatgcttttcaaactgatacagatgacaatgggagcctcataaagatggcttttgtttcttcccttcaaggtcatttacttgtacgagacagaaaaagatagcattggggacatgggatgggggagggagggcaatagtggaacgaactttccatgggaaactttcccttttgtaagttgagggccaggggtagggatattttttagtttgtgattttacatttatctgtacatactttttcaagattgatcatttttataaccatggttttcctgaaatcctcaattcatcaatatgaaggaaatgaaccacatagactttatgcaataaataacagtgcaagtgagtataactctaactgatgttccacaaaacatttttgatttcaggtttgtatgatgtagtttttaatcgtacattttcatatgcttcaaactaacacatttttaaagctttcccccacttttctctctatttgtattgttagccatcttgaagtgatgttgtttaacataaattgtactgttgaatttggctttacgggtgtaaacactgatggtatatcagtatctgagaccccaaactctccaaatactgatggtgcattttattcttgaagtgaaatctgtgcaataaaataacagactgtctgcaaaa

SEQ ID NO: 1032 - DNA, 2488 bp, Homo sapiens
ggtaaactgtcatggtgctggcaggaatggctaagggtgatgggcagcgagaacaaccagaggcgctttttgtgtctttttctagttttggcctgttctcaatctggtctgggagacgaatcctgctgacctcctacctctgctggcaaaactcgagtggggtctgggaacttgaaggaaggagttttacagcttcagatctgggtatttatccaaaagacttgaaactggggtcctgaggagatacaaacacttctcagttcattaaagcactattcacagtatccaagaagtgaagtgttcaaccactgagtatgatgttggctctaagtattcatatgaggcctacgtcaaattcatacatgtcgaatatcaaattggggaagagagatgtgggttacaaagctgccatctagaggctagaggctcctttctgcagtgtatataatgcaagtctgcagccagcagagctcacagttgttgcaaagtgctcagcactaagggagccagcgcacagcacagccaggaaggcgagcgagcccagccagcccagccagcccagccagcccggaggtcatttgattgcccgcctcagaacgatggatctgcatctcttcgactactcagagccagggaacttctcggacatcagctggccatgcaacagcagcgactgcatcgtggtggacacggtgatgtgtcccaacatgcccaacaaaagcgtcctgctctacacgctctccttcatttacattttcatcttcgtcatcggcatgattgccaactccgtggtggtctgggtgaatatccaggccaagaccacaggctatgacacgcactgctacatcttgaacctggccattgccgacctgtgggttgtcctcaccatcccagtctgggtggtcagtctcgtgcagcacaaccagtggcccatgggcgagctcacgtgcaaagtcacacacctcatcttctccatcaacctcttcggcagcattttcttcctcacgtgcatgagcgtggaccgctacctctccatcacctacttcaccaacacccccagcagcaggaagaagatggtacgccgtgtcgtctgcatcctggtgtggctgctggccttctgcgtgtctctgcctgacacctactacctgaagaccgtcacgtctgcgtccaacaatgagacctactgccggtccttctaccccgagcacagcatcaaggagtggctgatcggcatggagctggtctccgttgtcttgggctttgccgttcccttctccattatcgctgtcttctacttcctgctggccagagccatctcggcgtccagtgaccaggagaagcacagcagccggaagatcatcttctcctacgtggtggtcttccttgtctgctggctgccctaccacgtggcggtgctgctggacatcttctccatcctgcactacatccctttcacctgccggctggagcacgccctcttcacggccctgcatgtcacacagtgcctgtcgctggtgcactgctgcgtcaaccctgtcctctacagcttcatcaatcgcaactacaggtacgagctgatgaaggccttcatcttcaagtactcggccaaaacagggctcaccaagctcatcgatgcctccagagtctcagagacggagtactctgccttggagcagagcaccaaatgatctgccctggagaggctctgggacgggtttacttgtttttgaacagggtgatgggccctatggttttctagagcaaagcaaagtagcttcgggtcttgatgcttgagtagagtgaagaggggagcacgtgccccctgcatccattctctctttctcttgatgacgcagctgtcatttggctgtgcgtgctgacagttttgcaacaggcagagctgtgtcgcacagcagtgctgtgcgtcagagccagctgaggacaggcttgcctggacttctgtaagataggattttctgtgtttcctgaattttttatatggtgatttgtatttaaattttaagactttattttctcactattggtgtaccttataaatgtatttgaaagttaaatatattttaaatattgtttgggaggcatagtgctgacatatattcagagtgttgtagttttaaggttagcgtgacttcagttttgactaaggatgacactaattgttagctgttttgaaattatatatatataaatatatataaatatataaatatatgccagtcttggctgaaatgttttatttaccatagttttatatctgtgtggtgttttgtaccggcacgggatatggaacgaaaactgctttgtaatgcagtttgtgacattaatagtattgtaaagttacattttaaaataaacaaaaaactgttctggactgcaaatctgcacacacaacgaacagttgcatttcagagagttctctcaatttgtaagttatttttttttaataaagatttttgtttcctaaaaa

SEQ ID NO: 1033 - DNA, 4251 bp, Homo sapiens; identical to SEQ ID NO: 63

SEQ ID NO: 1034 - DNA, 7022 bp, Homo sapiens
gctgcgtggagcggcggagccggagggaagcaaaggaccgtctgcgctgctgtccccgccccgcgcgctctgcgcccctcgtccctggcggtcgctccgaagctcagccctcttgcctgccccggagctgtcccgggctagccgagaagagagcggccggcaagtttgggcgcgcgcaggcggcgggccgcgggcactgggcgcctcgctggggcggggggaggtggctaccgctcccggcttggcgtcccgcgcgcacttcggcgatggcttttccgccgcggcgacggctgcgcctcggtccccgcggcctcccgcttcttctctcgggactcctgctacctctgtgccgcgccttcaacctagacgtggacagtcctgccgagtactctggccccgagggaagttacttcggcttcgccgtggatttcttcgtgcccagcgcgtcttcccggatgtttcttctcgtgggagctcccaaagcaaacaccacccagcctgggattgtggaaggagggcaggtcctcaaatgtgactggtcttctacccgccggtgccagccaattgaatttgatgcaacaggcaatagagattatgccaaggatgatccattggaatttaagtcccatcagtggtttggagcatctgtgaggtcgaaacaggataaaattttggcctgtgccccattgtaccattggagaactgagatgaaacaggagcgagagcctgttggaacatgctttcttcaagatggaacaaagactgttgagtatgctccatgtagatcacaagatattgatgctgatggacagggattttgtcaaggaggattcagcattgattttactaaagctgacagagtacttcttggtggtcctggtagcttttattggcaaggtcagcttatttcggatcaagtggcagaaatcgtatctaaatacgaccccaatgtttacagcatcaagtataataaccaattagcaactcggactgcacaagctatttttgatgacagctatttgggttattctgtggctgtcggagatttcaatggtgatggcatagatgactttgtttcaggagttccaagagcagcaaggactttgggaatggtttatatttatgatgggaagaacatgtcctccttatacaattttactggcgagcagatggctgcatatttcggattttctgtagctgccactgacattaatggagatgattatgcagatgtgtttattggagcacctctcttcatggatcgtggctctgatggcaaactccaagaggtggggcaggtctcagtgtctctacagagagcttcaggagacttccagacgacaaagctgaatggatttgaggtctttgcacggtttggcagtgccatagctcctttgggagatctggaccaggatggtttcaatgatattgcaattgctgctccatatgggggtgaagataaaaaaggaattgtttatatcttcaatggaagatcaacaggcttgaacgcagtcccatctcaaatccttgaagggcagtgggctgctcgaagcatgccaccaagctttggctattcaatgaaaggagccacagatatagacaaaaatggatatccagacttaattgtaggagcttttggtgtagatcgagctatcttatacagggccagaccagttatcactgtaaatgctggtcttgaagtgtaccctagcattttaaatcaagacaataaaacctgctcactgcctggaacagctctcaaagtttcctgttttaatgttaggttctgcttaaaggcagatggcaaaggagtacttcccaggaaacttaatttccaggtggaacttcttttggataaactcaagcaaaagggagcaattcgacgagcactgtttctctacagcaggtccccaagtcactccaagaacatgactatttcaagggggggactgatgcagtgtgaggaattgatagcgtatctgcgggatgaatctgaatttagagacaaactcactccaattactatttttatggaatatcggttggattatagaacagctgctgatacaacaggcttgcaacccattcttaaccagttcacgcctgctaacattagtcgacaggctcacattctacttgactgtggtgaagacaatgtctgtaaacccaagctggaagtttctgtagatagtgatcaaaagaagatctatattggggatgacaaccctctgacattgattgttaaggctcagaatcaaggagaaggtgcctacgaagctgagctcatcgtttccattccactgcaggctgatttcatcggggttgtccgaaacaatgaagccttagcaagactttcctgtgcatttaagacagaaaaccaaactcgccaggtggtatgtgaccttggaaacccaatgaaggctggaactcaactcttagctggtcttcgtttcagtgtgcaccagcagtcagagatggatacttctgtgaaatttgacttacaaatccaaagctcaaatctatttgacaaagtaagcccagttgtatctcacaaagttgatcttgctgttttagctgcagttgagataagaggagtctcgagtcctgatcatgtctttcttccgattccaaactgggagcacaaggagaaccctgagactgaagaagatgttgggccagttgttcagcacatctatgagctgagaaacaatggtccaagttcattcagcaaggcaatgctccatcttcagtggccttacaaatataataataacactctgttgtatatccttcattatgatattgatggaccaatgaactgcacttcagatatggagatcaaccctttgagaattaagatctcatctttgcaaacaactgaaaagaatgacacggttgccgggcaaggtgagcgggaccatctcatcactaagcgggatcttgccctcagtgaaggagatattcacactttgggttgtggagttgctcagtgcttgaagattgtctgccaagttgggagattagacagaggaaagagtgcaatcttgtacgtaaagtcattactgtggactgagacttttatgaataaagaaaatcagaatcattcctattctctgaagtcgtctgcttcatttaatgtcatagagtttccttataagaatcttccaattgaggatatcaccaactccacattggttaccactaatgtcacctggggcattcagccagcgcccatgcctgtgcctgtgtgggtgatcattttagcagttctagcaggattgttgctactggctgttttggtatttgtaatgtacaggatgggcttttttaaacgggtccggccacctcaagaagaacaagaaagggagcagcttcaacctcatgaaaatggtgaaggaaactcagaaacttaactgcagtttttaagttatgctacatcttgacccactagaattagcaactttattatagatttaaactttcttcatgaggagtaaaaatccaaggctttactgctgatagtgctaattggcattaaccacaaaatgagaattatatttgtcaaccttctccttataaataagttcagacatacatttaataacatagggtgacttgtgtttttaggtatttaaataataaaatttcaagggatagtttttattcaatgtatataagacaggtagtgcctgatttactactttatataaaatagtacctccttcagttactgtttctgatttaatgtacggaactttatttgttgttgttgttgttgttgttgttgttgttttaaagcagtccaaatttggaccttagcaatcatgtcttttgtataggtacttaatgttaatacatattacactacagtttacttttcagaatactaaagactttataactgcatgaacttggatttttttaatcactcatatggtagaattttataaacacatacatgataccatccaaattcttgcttttaataacaaaggtacaatattttgttttagtatgaaaatctggtagatcctattacacttctgtttatattaaatccacaatattttattacatttttaacttgtataaattttaggtcaaatccttcaagccaacctatactaaaaattagttccataatcacaaatggctcttttgtgtaattgtttaatttcacctgaatatcataatgcttaaagccatatggagttggaaattatttccaaagcatatttattccattgttttagtctggctatttacagtataaaaaaagcatttttattaaaatactgtgtagttctttgagatagttgcttatgcatatagtaagtattacattcttagagtagagcagagtttttagttagtattaatttattttcctccattcatgtacttttccttatatttccaaaactgttactgagaatgggtcaagatcagtgagaaatctttacagttgacaggaacctggaccccttaccccaactttatgagtaatgcttggaataaaaactcttaaggcaactcactgatttacttctagcaatagcatgatgttacaggaatattacctctgtttaagcaaggtaatgtgtaaaatcagtctcggctgtcagaataacttctaaaaggtatttttataagcagttcaagttactgaaaaccttttaaacctttctgaagttcgttagtataaattacttttctaggattattaataaaagccacataggtggcaagttgtagttttatatggctctgtagagtggtgaaccttctagaggaatatatgatttattcacagttcctcaaggcctggggatgatgatcagttatacctatttttgtgcaattacatcatgttgtacattagaaatggagagtttaatagctctttaactgctgtcctcattaggtaatgataaatatttcccttaaataattgactattttgctgtgttttaaaaatgattgaaatttatcttgccatatctcataatttcatgcacaagttgactgagctaatcttgagaatatattcgtaaaataggagcacatttagttgaggtatacaaggtaggactctagacaaaaccttctattttagctttagtgaatttcaaaagtaatgggtcttggagtatagatttttattagtagcttgaaagagcttaatcatatgcagtaagtatttttattaccaataaatttaaaattttttaagaaaaatatttttatcctagggccaagtgttgcctgccaccaatcagtaagttagtctataacaaattttaccctaacagttttaccacctagtaacagtcatttctgaaaatatgttggatagaaagtcactctttggcaaaagtgttagaatttgcttttgtgccatctattccttttatggcatctatcttgaaagtaatcttgtattggagattgaaagatgctgtaatttagaaattaacatgatatcttaaattacctttatgaaatatagttttgtataatagcatagattttccttcaaaaaatgaacatttatatatctacaaaaatatggagaagagtaatttgaaagcctactttctgaagaaaatggtgggatttttttttatcatgattaaatatcaaaaaattgccctatgaaaactttaaatctctaaaacatttgaaatactaccatatttgtgatttattgagaataaaaatccattttgaaatgtaaaatttttatgatctgattcagttttaagaaaacatgaatgaactagaagatattaaaaacatttgacattggtaagaaatattgatactgatattgatttttatataggtatttatttcagaattgatattttgagaaaaatacatgtgagtcattttttctgtttctcttttctcttaacgattatcactgtaattctgaatctgaaaggtaaaacaattagtcaaaatattattgccatcattctacctgtgttatgaaactacttattcatagttaattctcattaacacttacatttccataaagaaaactcaagtattaataaaagagactttactggcttaagagggctgtgaaagatttttgatagtgaatcatgaccctaagggagagatttgtgtgataaaagtattgtatataatagatcagcgatttttgtaaggcaaacagaatttgtaagttggcagatcttcctaagttgcaaaatgtaatgatgagcttggtggagaagaatgagtcgttcttggaatacctatgtgcagccactacccatctcaatgtcaccttgtttgcattcttggatagcttgtatatgtagtagtttgatgaataatttaaagaaaaacacctaaaatttgaaaaatgattgtaggatcaaaaaaggcagatgaaattacttaatactcagtgttttggagagtattccttttagtttgttggttggctggtttgaacgatagaaatatgcagcatgcaatatatgcttatatttcattttaatttctgatatataatgaacttcttgggagaggtactgaatctttgatgttttttgtcattgttctcaagtgcaatataacaatgtaaccaaatctagataatttcaaagttgtcattaatttagtaagcctaatataaacaaatatttgtattatttttgttagcaggaaagagtgattaagtgaggttatttacccctaaatggtccattctgcattgtatttcaggctggaaatgaattattctttaccagttttgaaacactttgaaatatcctaaggtaacttggaagctgtgtagtatatcaaattaatttgctacctaataacatagaaagtaaatatctttgtggtcacccacattgggtgagacagaaaatgaatctgttctaaaatttgtaatttgctaacttgatttgagttagtgaaaactggtacagtgttctgcttgatttacaacatgtaacttgtgactgtacaataaacataagcatatggtacca

SEQ ID NO: 1035 - DNA, 3982 bp, Homo sapiens
acagctgggagagcgcaggaaggcgccgggaaggaaagccagcccaccagcgtctgggtgggctgcgccgcgcggctggcggaccttcccgggttggagaagtgcgcacgtccgcacctcaccctgcggctgacatctcctgcccaggagatgggcgctgaagcttgagcgcctgagtccctggagccacacctgcgaacaccctttgcttctattgagctgtgcccagccgcccagtgacagaattccagagttataagagacaggaataccagtgagaagtatgagagagtgggtgggagataatgtttagaatctcttttgctgcccgcaatttatgaaaatggcttgaaaatatttatggtcaaagaccgaaatatttcttcaaagaagattagctttgctccattaaaagtaatgagtagaaatattaaaaaaaaaaaaagttttaagtacctgagtatcttgccagcaactgaccaccactgctaaaagtgaggagagacacagctttcatcattgggactgcagtttatttcagaataaatgattcccactgatccacccacttttgccaccccaggatgcaattttctggagagaagattagtgaggacaaagagatcttcaaaaatcaaaaatgaggttcacatttacaagccggtgcttggcactgtttcttcttctaaatcacccaaccccaattcttcctgccttttcaaatcaaacctatccaacaatagagcccaagccatttctttacgtcgtaggacgaaagaagatgatggatgcacagtacaaatgctatgaccgaatgcagcagttacccgcataccaaggagaaggtccatattgcaatcgcacctgggatggatggctgtgctgggatgacacaccggctggagtattgtcctatcagttctgcccagattattttccggattttgatccatcagaaaaggttacaaaatactgtgatgaaaaaggtgtttggtttaaacatcctgaaaacaatcgaacctggtccaactatactatgtgcaatgctttcactcctgagaaactgaagaatgcatatgttctgtactatttggctattgtgggtcattctttgtcaattttcaccctagtgatttccctggggattttcgtgtttttcagaaaattgacaactatttttcctttgaattggaaatataggaaggcattgagccttggctgccaaagggtaaccctgcacaagaacatgtttcttacttacattctgaattctatgattatcatcatccacctggttgaagtagtacccaatggagagctcgtgcgaagggacccggtgagctgcaagattttgcattttttccaccagtacatgatggcctgcaactatttctggatgctctgtgaagggatctatcttcatacactcattgtcgtggctgtgtttactgagaagcaacgcttgcggtggtattatctcttgggctgggggttcccgctggtgccaaccactatccatgctattaccagggccgtgtacttcaatgacaactgctggctgagtgtggaaacccatttgctttacataatccatggacctgtcatggcggcacttgtggtcaatttcttctttttgctcaacattgtccgggtgcttgtgaccaaaatgagggaaacccatgaggcggaatcccacatgtacctgaaggctgtgaaggccaccatgatccttgtgcccctgctgggaatccagtttgtcgtctttccctggagaccttccaacaagatgcttgggaagatatatgattacgtgatgcactctctgattcatttccagggcttctttgttgcgaccatctactgcttctgcaacaatgaggtccaaaccaccgtgaagcgccaatgggcccaattcaaaattcagtggaaccagcgttgggggaggcgcccctccaaccgctctgctcgcgctgcagccgctgctgcggaggctggcgacatcccaatttacatctgccatcaggagctgaggaatgaaccagccaacaaccaaggcgaggagagtgctgagatcatccctttgaatatcatagagcaagagtcatctgcttgaatgtgaagcaaacacagcatcgtgatcactgagccatcatttcctgggagaaagaccatgcatttaaagtattctccatcctcccaggaaccgaacatatcatttgtgaagaattattcagtgaatttgtccattgtaaatctgaagaaagttattcttggtactgttgctttgggagacagtctaggaatggagtctcccactgcaacttgtgaactccatcattcatccaggactgagatgcaaatgtcacagtaatgcaagcaaagtatcaaagaaaaacaatgaaattgacctagttcagatacagggtgctccttgtcaatactgagccatttatacctttgaaatattaaaatcactgtcaatatttttatttttaactctggattttgaattagattatttctgtatttggctatggatctgatttttaatttttttaaatttcagtcaattctgatgttactgagatgttttaccatccttacaatgtaaaccacatgaactacgtgacctctgcaagacaaagcggctttctaatagagagattagtaaatatgtgaagaaaaagacctgcatttggcaggaagatgtatgctttgaatgcaaaagaaatttagagtcaatttgctgaaaacattacatgctcagcttggttttggacaagcctgtccattgggcaggacctagctgttgtaaagaattggtcttaatgttgaatgtattttggttgctgatgtttataaactgagaggtcacaaagaatctatcactaaaaatttttacaaaactgccaaaaatataattcttagtggaagacaatactccctttaaagagagtttgccactcccctaaactccaggatttataaagcaaattactccaaggtttataaagcagattacctcttgcccttgggtgctatctagcagtaaaagataaatttgttgaatattggtaattaaaagactccacataagtccattaactgctttccacccagcttcaaagcttaaaaagagctcaggcttttccaggaagatccaggagggctaattagaaatcaacttgtggttgaccgcttgtttcttgttattaccaaaacaggaggggaaaaaattaactgctccaaatttaaccataaatcaattcatgtttaacgtttctcattaaaatccagtattatattatcatatctctctttacttcccagtataagatttttgaaaatcctgaataaaccagtatcgttactggcacctgaaattaatttgtgaatttgcaacagtaatcagagttaccattatttaatttgtatgctaaatgaggaggtacattgaaaccctccaaatctccagtctcatctatgtcatattttgccactgcctttcagaagtgatttagttgtggaaagataataaattgatttgttatggttacatatttagcgcacccagagaaaattaattatatttctacagagaaaatgaatttgggatactaaagtagtttaagtctcctttactgaatgtaagggggggatcgaaaagaaggtatttttccaatcacagtgttatgtagtattgttctatttttgtttacaaacatggaaaacagagtatttctggcagctgtggtacaaatgtgataatatattgctaaaatattttagatgttattatgctaatatagtaggggttgaagaaaacaaaatagcttattatagaattgcacatagttctgcccaaattatgtgaaatgcttatgcttgtgtatatgtataaattaatacagagtacgttaaaagcaaaaagatgtatatttgcatatttttctaaagaaatatattattcatcttttcattc

SEQ ID NO: 1036 - DNA, 3659 bp, Homo sapiens; identical to SEQ ID NO: 76

SEQ ID NO: 1037 - DNA, 4607 bp, Homo sapiens; identical to SEQ ID NO: 832

SEQ ID NO: 1038 - DNA, 1957 bp, Homo sapiens; identical to SEQ ID NO: 830

SEQ ID NO: 1039 - DNA, 4132 bp, Homo sapiens
cgcgtttcatcatcggcggcggccacttataaaaacttctaggcgcgcactcgctggctcagtctccgctccgcgaatctcctccggccactgccgccgcggtcgcctctcacccgcccggccgctccagcccgaggcgccccgaccccgcgccactccgcgcccggccagccgcccgcagccatggggctcctgcccaagctcggcgcgtcccagggcagcgacacctctactagccgagccggccgctgtgcccgctcggtcttcggcaacattaaggtgtttgtgctctgccaaggcctcctgcagctctgccaactcctgtacagcgcctacttcaagagcagcctcaccaccattgagaagcgctttgggctctccagttcttcatcgggtctcatttccagcttgaatgagatcagcaatgccatcctcatcatctttgtcagctactttggcagccgggtgcaccgtccacgtctgattggcatcggaggtctcttcctggctgcaggtgccttcatcctcaccctcccacacttcctctccgagccctaccagtacaccttggccagcactgggaacaacagccgcttgcaggccgagctctgccagaagcattggcaggacctgcctcccagtaagtgccacagcaccacccagaacccccagaaggagaccagcagcatgtggggcctgatggtggttgcccagctgctggctggcatcgggacagtgcctattcagccatttgggatctcctatgtggatgacttctcagagcccagcaactcgcccctgtacatctccatcttatttgccatctctgtatttggaccggctttcgggtacctgctgggctctgtcatgctgcagatctttgtggactatggcagggtcaacacagctgcagttaacttggtcccgggtgacccccgatggattggagcctggtggctaggcctgctcatttcttcagctttattggttctcacctctttccccttttttttcttccctcgagcaatgcccataggagcaaagagggctcctgccacagcagatgaagcaaggaagttggaggaggccaagtcaagaggctccctggtggatttcattaaacggtttccatgcatctttctgaggctcctgatgaactcactcttcgtcctggtggtcctggcccagtgcaccttctcctccgtcattgctggcctctccaccttcctcaacaagttcctggagaagcagtatggcacctcagcagcctatgccaacttcctcattggtgctgtgaacctccctgctgcagccttggggatgctgtttggaggaatcctcatgaagcgctttgttttctctctacaagccattccccgcatagctaccaccatcatcaccatctccatgatcctttgtgttcctttgttcttcatgggatgctccaccccaactgtggccgaagtctacccccctagcacatcaagttctatacatccgcagtctcctgcctgccgcagggactgctcgtgcccagattctatcttccacccggtctgtggagacaatggaatcgagtacctctccccttgccatgccggctgcagcaacatcaacatgagctctgcaacctccaagcaactgatctatttgaactgcagctgtgtgaccgggggatccgcttcagcaaagacaggatcgtgccctgtcccctgtgcccacttcctgctcccggccatcttcctcatctccttcgtgtccctgatagcctgcatctcccacaaccccctctacatgatggttctgcgtgtggtgaaccaggaggaaaagtcatttgccatcggggtgcagttcttgttgatgcgcttgctggcctggctgccatctccagccctctatggcctcaccattgaccactcctgcatccggtggaactcgctgtgcttggggaggcgaggggcctgcgcctactatgacaacgatgctctccgagacaggtacctgggcctgcagatgggctacaaggcgctgggcatgctgctgctttgcttcatcagctggagggtgaagaagaacaaggagtacaacgtgcagaaggcggcaggcctcatctgaccccaccctgggccactgccctgctccagagagtggaccttgactcttccacacctgcctatactcactaatgttaacacgtcatttcctttttgtatttttaaacaagaaagaaaaccccagtcctcatttgccttccctacctcttcctcccagagtcctccccacagttcctaagggccactgtgtacccgggctgtgtgggccagaactggggggctgagtcttccctggccccttggaagaggcccccagatgcccaggctcacttcagtgttgagtcctccattgaggatgcccactgaggcagccaggcccctcaccagccctggggggaatcctaaacagagagagaaaaagggtatctgcccttcttgccaggcagctccactctcccgctgactgcccacaccctgcagagtggcaggggtgaaaggaagaaggaagtggctgagttattaatagccagagccactgggagactggggagactggctgtaacccccttcacacctgggtttggcatcagcacagactacgggaggggctggctccctccccctcagaccctcacttcctgtacctagaggccattctggatgctgccatgttgggaagtacagtctctgcccattacctgcatgcaggcaccagagcagggactgagaaaccccaaggatgggtcatctaagtgctgtccatatgaaccctggactttctgtccttagatcctcacatgttatccctgtctttctggggtacgtttcaaactgaggaagctacaacacagtgaagacccaaggaaggcctatgaaaaggtcctgatgcccaacctcccaccccttcaatgtggggacgagaccccctcatctcagagtaatgggaagaacctcccacatctccctggcagcagatgaggtggcttcacatgcacttccctgtctggacttcagcccgtattccgaggagtagagaggcagaagagatgtcagcaaagcaagtgatgaagcagagtggatgtccactgtcaccaagctggatggcaagctgcggcccacaaaacagccagtcaggttggctttcctggtttcagacatgctcataccattcccattttctcagcctcttctcactgcctccagagaggtgggtgcctgggttgagagacacagctgctacgtgatagatgttgagagacagaagccaacgaaggaggtcattcatcaacaaatatatttattggagaccgactttgtgcaaagcaatgctaatcagggttctccatggagcttccctcagctcttacctcacctccctccatttacattagggccttctcccagggtgtgctcggtgggcagtgtgggactgggggtgtgggagttggtgagagcaggaggagaggtggggacagcaagaagccacagattggcatgaaggatcctgacctgactatccatgccatccatggcccccagactgactctgcacctggccctttgccagacagctctgtctccccatgtcctctggaacagctgggcatgggtcatggccattcatgacccttaagtgccacccttcttggaagaccccctccagaagcatactggaagccacctctggaaaagcctcatatggtgatatgccaaaatatttatgtcaatgtccaaacaaagtccaatgccatgagactgaagtctttgtggaaaccactgttacagacaagcttatttccaaagccacctcatttccaaacatctcactcaggaagggaggctcaatgtaacctcaggggccagttttagcatttgaaatggttctgcttggaaaatgatgccctgcaactaaccctggtctttcccatggcaatttaaccacatttggaaggcactgccttcagctgagtttatgaacaatgaatgccaaccttcaggttctagaagattggttgcactcccaaacctttattctattatattactattaaaatattctaattttgctattgaggtaa

SEQ ID NO: 1040 - DNA, 3388 bp, Homo sapiens; identical to SEQ ID NO: 80

SEQ ID NO: 1041 - DNA, 1863 bp, Homo sapiens; identical to SEQ ID NO: 102

SEQ ID NO: 1042 - DNA, 2643 bp, Homo sapiens
aggcaaccatgtggttccagctgaattttttttttccctctctctttcttcactcctttttctttccaaacagggaaaagtgttccacgaagcggtagcgccttttcgcctcgcgttttcctccctgaccctggtcccggctcccgtccgggcgccagctggtggggcgagcgccgggagcccatctgcccccaggggcacggggcgcggggccggctcccgcccggcacatggctgcagccacctcgcgcgcaccccgaggcgccgcgcccagctcgcccgaggtccgtcggaggcgcccggccgccccggagccaagcagcagctgagcggggaagcgcccgcgtccggggatcgggatgtccctcctccttctcctcttgctagtttcctactatgttggaaccttggggactcacactgagatcaagagagtggcagaggaaaaggtcactttgccctgccaccatcaactggggcttccagaaaaagacactctggatattgaatggctgctcaccgataatgaagggaaccaaaaagtggtgatcacttactccagtcgtcatgtctacaataacttgactgaggaacagaagggccgagtggcctttgcttccaatttcctggcaggagatgcctccttgcagattgaacctctgaagcccagtgatgagggccggtacacctgtaaggttaagaattcagggcgctacgtgtggagccatgtcatcttaaaagtcttagtgagaccatccaagcccaagtgtgagttggaaggagagctgacagaaggaagtgacctgactttgcagtgtgagtcatcctctggcacagagcccattgtgtattactggcagcgaatccgagagaaagagggagaggatgaacgtctgcctcccaaatctaggattgactacaaccaccctggacgagttctgctgcagaatcttaccatgtcctactctggactgtaccagtgcacagcaggcaacgaagctgggaaggaaagctgtgtggtgcgagtaactgtacagtatgtacaaagcatcggcatggttgcaggagcagtgacaggcatagtggctggagccctgctgattttcctcttggtgtggctgctaatccgaaggaaagacaaagaaagatatgaggaagaagagagacctaatgaaattcgagaagatgctgaagctccaaaagcccgtcttgtgaaacccagctcctcttcctcaggctctcggagctcacgctctggttcttcctccactcgctccacagcaaatagtgcctcacgcagccagcggacactgtcaactgacgcagcaccccagccagggctggccacccaggcatacagcctagtggggccagaggtgagaggttctgaaccaaagaaagtccaccatgctaatctgaccaaagcagaaaccacacccagcatgatccccagccagagcagagccttccaaacggtctgaattacaatggacttgactcccacgctttcctaggagtcagggtctttggactcttctcgtcattggagctcaagtcaccagccacacaaccagatgagaggtcatctaagtagcagtgagcattgcacggaacagattcagatgagcattttccttatacaataccaaacaagcaaaaggatgtaagctgattcatctgtaaaaaggcatcttattgtgcctttagaccagagtaagggaaagcaggagtccaaatctatttgttgaccaggacctgtggtgagaaggttggggaaaggtgaggtgaatatacctaaaacttttaatgtgggatattttgtatcagtgctttgattcacaattttcaagaggaaatgggatgctgtttgtaaattttctatgcatttctgcaaacttattggattattagttattcagacagtcaagcagaacccacagccttattacacctgtctacaccatgtactgagctaaccacttctaagaaactccaaaaaaggaaacatgtgtcttctattctgacttaacttcatttgtcataaggtttggatattaatttcaaggggagttgaaatagtgggagatggagaagagtgaatgagtttctcccactctatactaatctcactatttgtattgagcccaaaataactatgaaaggagacaaaaatttgtgacaaaggattgtgaagagctttccatcttcatgatgttatgaggattgttgacaaacattagaaatatataatggagcaattgtggatttcccctcaaatcagatgcctctaaggactttcctgctagatatttctggaaggagaaaatacaacatgtcatttatcaacgtccttagaaagaattcttctagagaaaaagggatctaggaatgctgaaagattacccaacataccattatagtctcttctttctgagaaaatgtgaaaccagaattgcaagactgggtggactagaaagggagattagatcagttttctcttaatatgtcaaggaaggtagccgggcatggtgccaggcacctgtaggaaaatccagcaggtggaggttgcagtgagccaagattatgccattgcactccagcctgggtgacaaagcaagactccatctcaaaaaaaaaaaaaaa

SEQ ID NO: 1043 - DNA, 3431 bp, Homo sapiens
gggagcaaccgcagcttctagtatccagactccagcgccgccccgggcgcggaccccaaccccgacccagagcttctccagcggcggcgcagcgagcagggctccccgccttaacttcctccgcggggcccagccaccttcgggagtccgggttgcccacctgcaaactctccgccttctgcacctgccacccctgagccagcgcgggcgcccgagcgagtcatggccaacgcggggctgcagctgttgggcttcattctcgccttcctgggatggatcggcgccatcgtcagcactgccctgccccagtggaggatttactcctatgccggcgacaacatcgtgaccgcccaggccatgtacgaggggctgtggatgtcctgcgtgtcgcagagcaccgggcagatccagtgcaaagtctttgactccttgctgaatctgagcagcacattgcaagcaacccgtgccttgatggtggttggcatcctcctgggagtgatagcaatctttgtggccaccgttggcatgaagtgtatgaagtgcttggaagacgatgaggtgcagaagatgaggatggctgtcattgggggtgcgatatttcttcttgcaggtctggctattttagttgccacagcatggtatggcaatagaatcgttcaagaattctatgaccctatgaccccagtcaatgccaggtacgaatttggtcaggctctcttcactggctgggctgctgcttctctctgccttctgggaggtgccctactttgctgttcctgtccccgaaaaacaacctcttacccaacaccaaggccctatccaaaacctgcaccttccagcgggaaagactacgtgtgacacagaggcaaaaggagaaaatcatgttgaaacaaaccgaaaatggacattgagatactatcattaacattaggaccttagaattttgggtattgtaatctgaagtatggtattacaaaacaaacaaacaaacaaaaaacccatgtgttaaaatactcagtgctaaacatggcttaatcttattttatcttctttcctcaatataggagggaagatttttccatttgtattactgcttcccattgagtaatcatactcaactgggggaaggggtgctccttaaatatatatagatatgtatatatacatgtttttctattaaaaatagacagtaaaatactattctcattatgttgatactagcatacttaaaatatctctaaaataggtaaatgtatttaattccatattgatgaagatgtttattggtatattttctttttcgtctatatatacatatgtaacagtcaaatatcatttactcttcttcattagctttgggtgcctttgccacaagacctagcctaatttaccaaggatgaattctttcaattcttcatgcgtgcccttttcatatacttattttattttttaccataatcttatagcacttgcatcgttattaagcccttatttgttttgtgtttcattggtctctatctcctgaatctaacacatttcatagcctacattttagtttctaaagccaagaagaatttattacaaatcagaactttggaggcaaatctttctgcatgaccaaagtgataaattcctgttgaccttcccacacaatccctgtactctgacccatagcactcttgtttgctttgaaaatatttgtccaattgagtagctgcatgctgttcccccaggtgttgtaacacaactttattgattgaatttttaagctacttattcatagttttatatccccctaaactacctttttgttccccattccttaattgtattgttttcccaagtgtaattatcatgcgttttatatcttcctaataaggtgtggtctgtttgtctgaacaaagtgctagactttctggagtgataatctggtgacaaatattctctctgtagctgtaagcaagtcacttaatctttctacctcttttttctatctgccaaattgagataatgatacttaaccagttagaagaggtagtgtgaatattaattagtttatattactctcattctttgaacatgaactatgcctatgtagtgtctttatttgctcagctggctgagacactgaagaagtcactgaacaaaacctacacacgtaccttcatgtgattcactgccttcctctctctaccagtctatttccactgaacaaaacctacacacataccttcatgtggttcagtgccttcctctctctaccagtctatttccactgaacaaaacctacgcacataccttcatgtggctcagtgccttcctctctctaccagtctatttccattctttcagctgtgtctgacatgtttgtgctctgttccattttaacaactgctcttacttttccagtctgtacagaatgctatttcacttgagcaagatgatgtaatggaaagggtgttggcattggtgtctggagacctggatttgagtcttggtgctatcaatcaccgtctgtgtttgagcaaggcatttggctgctgtaagcttattgcttcatctgtaagcggtggtttgtaattcctgatcttcccacctcacagtgatgttgtggggatccagtgagatagaatacatgtaagtgtggttttgtaatttaaaaagtgctatactaagggaaagaattgaggaattaactgcatacgttttggtgttgcttttcaaatgtttgaaaacaaaaaaaatgttaagaaatgggtttcttgccttaaccagtctctcaagtgatgagacagtgaagtaaaattgagtgcactaaacaaataagattctgaggaagtcttatcttctgcagtgagtatggcccgatgctttctgtggctaaacagatgtaatgggaagaaataaaagcctacgtgttggtaaatccaacagcaagggagatttttgaatcataataactcataaggtgctatctgttcagtgatgccctcagagctcttgctgttagctggcagctgacgctgctaggatagttagtttggaaatggtacttcataataaactacacaaggaaagtcagccactgtgtcttatgaggaattggacctaataaattttagtgtgccttccaaacctgagaatatatgcttttggaagttaaaatttaaatggcttttgccacatacatagatcttcatgatgtgtgagtgtaattccatgtggatatcagttaccaaacattacaaaaaaattttatggcccaaaatgaccaacgaaattgttacaatagaatttatccaattttgatctttttatattcttctaccacacctggaaacagaccaatagacattttggggttttataataggaatttgtataaagcattactctttttcaataaattgttttttaatttaaaaaaagga

SEQ ID NO: 1044 - DNA, 7136 bp, Homo sapiens; identical to SEQ ID NO: 87

SEQ ID NO: 1045 - DNA, 882 bp, Homo sapiens
cgggatccaggcgggccatggcggatgtccccggggcacagcgagcggttcctggtgacggcccagagccccgggaccccctggactgttgggcctgcgctgttcttgtaacagcccagaatctgctggtggctgccttcaatcttctcctgctggtgctggtgctagggaccatcttgctacccgctgtcaccatgctgggcttcggcttcctctgccactctcagttcctgcgctcccaggcacccccttgcaccgcgcacctgcgggaccccggtttcacggccctactggtcaccggattcctgctcctcgtgccgctgctcgtgcttgctctggccagctaccgccgcctctgcctgcgcctccgcctagccgattgcctcgtgccctacagccgagccctttatcggcgtcggcgcgccccgcagccgcggcaaatccgggcctcaccagggtcccaggccgttcccacatcaggaaaggtctgggtctaatgaccctcgagtcaagaacaaccctgacggctgccctccctcttattcggcccaaggacttgaagcccggcatcttccgacctgccctgcccccacccctgcctgagcggagtcctagcatccccttgggagcagcagcgtcagtggacccagtgctgagaaaagcccccacatcccggaaaacccactttcctttcacgacccacatctcaatcctgaacatctaggctggaacctgcacacctccccctcagctccgtcgtgaatgggacaacaatctcgtgccctcgttttatggtgcagcttctctagtatttctggggctggggggcggggctggaggggaaggagtgtccacgcatcaataaagatttaacgaactgaa

SEQ ID NO: 1046 - DNA, 12570 bp, Homo sapiens; identical to SEQ ID NO: 85

SEQ ID NO: 1047 - DNA, 366 bp, Homo sapiens; identical to SEQ ID NO: 84

SEQ ID NO: 1048 - DNA, 5996 bp, Homo sapiens; identical to SEQ ID NO: 70

SEQ ID NO: 1049 - DNA, 2958 bp, Homo sapiens
ggggttggaatcccgcttctcctcggcagcagtaggctcgcaagtcgctggggttaggtggggcaagagtttcgccggcgcatcagcgctgcttcggactgtttgcaacgtgtttccagcgagctgggagcggggttgtgactgcgagtcgtctgggggagggggacttgtttttcttttcctctagagacctcggcttgcaactggatcaaacgctgtcgaaaggatgtaaataggcagagcaactgttaccaagaaggccaccacccccacccaaaggcagtgaggagtgtggggcttcgtctgggctcccccgagtctcaacagtaatcaacagtcaggtgttgattgcaacttttcaaggtcagccaccgggagtagcctattccctctaggaaccttggagggcataccttgctgggactcaacttggctgagaaatgcacaagatgccaaaggaggaaggattatagggggcgtgtgtgtgacccccaagaccgatcttccgctatcaccctaatctccggttccccgctacccgggcgggggtgagtatgtgacatgtgcctaactctcagcagcaacttcggcagcaggtgtcgatcctaactaagcaggagctgcggctgccgggtgtgccctcaccaagccatgcgagccccgggcgcgcttctcgcccgcatgtcgcggctactgcttctgctactgctcaaggtgtctgcctcttctgccctcggggtcgcccctgcgtccagaaacgaaacttgtctgggggagagctgtgcacctacagtgatccagcgccgcggcagggacgcctggggaccgggaaattctgcaagagacgttctgcgagcccgagcacccagggaggagcagggggcagcgtttcttgcgggaccctcctgggacctgccggcggccccgggccgtgacccggctgcaggcagaggggcggaggcgtcggcagccggacccccgggacctccaaccaggccacctggcccctggaggtggaaaggtgctcggggtcaggagccttctgaaactttggggagagggaaccccacggccctccagctcttccttcagatctcagaggaggaagagaagggtcccagaggcgctggcatttccgggcgtagccaggagcagagtgtgaagacagtccccggagccagcgatcttttttactggccaaggagagccgggaaactccagggttcccaccacaagcccctgtccaagacggccaatggactggcggggcacgaagggtggacaattgcactcccgggccgggcgctggcccagaatggatccttgggtgaaggaatccatgagcctgggggtccccgccggggaaacagcacgaaccggcgtgtgagactgaagaaccccttctacccgctgacccaggagtcctatggagcctacgcggtcatgtgtctgtccgtggtgatcttcgggaccggcatcattggcaacctggcggtgatgtgcatcgtgtgccacaactactacatgcggagcatctccaactccctcttggccaacctggccttctgggactttctcatcatcttcttctgccttccgctggtcatcttccacgagctgaccaagaagtggctgctggaggacttctcctgcaagatcgtgccctatatagaggtcgcttctctgggagtcaccactttcaccttatgtgctctgtgcatagaccgcttccgtgctgccaccaacgtacagatgtactacgaaatgatcgaaaactgttcctcaacaactgccaaacttgctgttatatgggtgggagctctattgttagcacttccagaagttgttctccgccagctgagcaaggaggatttggggtttagtggccgagctccggcagaaaggtgcattattaagatctctcctgatttaccagacaccatctatgttctagccctcacctacgacagtgcgagactgtggtggtattttggctgttacttttgtttgcccacgcttttcaccatcacctgctctctagtgactgcgaggaaaatccgcaaagcagagaaagcctgtacccgagggaataaacggcagattcaactagagagtcagatgaactgtacagtagtggcactgaccattttatatggattttgcattattcctgaaaatatctgcaacattgttactgcctacatggctacaggggtttcacagcagacaatggacctccttaatatcatcagccagttccttttgttctttaagtcctgtgtcaccccagtcctccttttctgtctctgcaaacccttcagtcgggccttcatggagtgctgctgctgttgctgtgaggaatgcattcagaagtcttcaacggtgaccagtgatgacaatgacaacgagtacaccacggaactcgaactctcgcctttcagtaccatacgccgtgaaatgtccacttttgcttctgtcggaactcattgctgaaggacagtacttggttgggtcagatttatttgtttgattttcatatcccgtgaaagtttttaattcatatttttccttatagggaaaaatgcaaaaaagaaacaataaagaaagaaatattaactactgtagaactgattttacaaattaatatttgtgctttgaaaaaaagtttctatttagttatttaagaagaatgagaaggccaatagttttagattattttatctggtatggtgctaatattttatttgaaaaaagttactgcaacttaacttaaaattgctaacgttttttcttcttttaaaaatacaattattgtatattgattatagcaatgtgattttgtaggttattttatatttgagttgtgattgaaagtatgttgtatatggtattgtgagatgatttgtacttggaagcattcacaaagtagcaccaaataaattacactttattctttaa

SEQ ID NO: 1050 - DNA, 2653 bp, Homo sapiens; identical to SEQ ID NO: 67

SEQ ID NO: 1051 - DNA, 6570 bp, Homo sapiens; identical to SEQ ID NO: 66

SEQ ID NO: 1052 - DNA, 2255 bp, Homo sapiens
agctggacggccccgggaggccgcagaccgccgggctccccgaggacacctcgcaccggaggaggagaggaggcagcgcccggccaggctgggagcacctacggccgcgcgggggcgggagccaggtggcctcggcgcgcccgcctcgcccgggcaccgagcaggaagtggctgcggcgcggcctcctcgcggtgcaacagggcggggaggcggccgcagcccgagccggagcccgagcgccgggagcgagacctcatggcagcggtggcgcccgcgggccccggggactccgcctcggccgccctggacgagctgtcactgaatttcacgtacggggcaccaggcgccggcaacggctccctctcgggcgactggtaccgcaggaaccagattcacctttttggagttttgctggctattttaggaaacttggtgatcagtatttctctaaatattcagaaatattctcaccttcagctggcacaacaagagcacccaaggccatacttcaagagtgtgctgtggtggggtggtgtcctgctgatggccgtgggagagacggggaactttgcagcctatggatttgctcccattactctgatcgctccgttaggctgtgtgtctgttacaggtagtgccattatttctgttacatttctgaaagacaatttgagagcctcagacttactcggtacgacactggcatttgcaggaacatatttactggtgaactttgctccaaatataactcaggcaatctcagcaagaacagtacagtattaccttgtcggatggcagttcctgatctatgtgattttagaaatattaattttctgcattctcctgtatttctataaaagaaaaggaatgaagcatatggtgattctgctaaccctggtggcaattctagcctcattgactgttatttcagtaaaggccgtctcaggcatgatcactttttctgtgatggataaaatgcaactaacttaccccattttctatatcatgtttatcatcatgatagcatcttgtgttttccaagtcaagttcctgaatcaagccacgaaactctacaatacgacaacagtggtgccagttaatcatattttctttacaatcagtgccatcattgcaggtatcatattttatcaggaattccttggtgctccttttctcactgtatttatatatctttttgggtgttttctgtcattccttggtgtatttttggtcacaagaaatcgagaaaaggaacatctgcaacagtcttatattgattttggaaatattcctgacacaaccccagagagaaaggcttggagggaaacaaatgttggacaaaatacaaccagattcacatagcttatcctatggaactttgcctgatggaagtgactcaacaaagagccaaagtggagagaagaaagaggtctaaatgctgagaaggatggctgttggcctgttattcgataccacctttttaaaaaattgcacatgttcaatttgtgtcagcagctcttttataagctaacatgtgctagcattcatttcagtcctttcccccacctcagcgtctatggacaatcggggacttcctaagctctgacagtctaatatttccatggaatgtgatttggagtgttccccacaccctggacctctccctagtgattatctagccagctacaccttactcagagcccggctgctctagcaggaatgttgcacagaaacatacatttgcggtttggccacaggtcgcataggtggcttctcccacgggtagtgtcagttgcttcactttaaaaagtcacttcagccccacaacctcactcccaaaagaaaggtttgagagcgctcattttttttctaagacaccttttataagcctccctataaaaatctcacctttcaagtactaagttagaattgcaagtcatcttttctgaaaactaatgctatcaaagtcctcctttgaaaattaagggtctctttaaaattagaatttataaatggcattcagtgatagtgtacaccaaaattaaaagaccttgactggtgggctttttacgtgtaaggaagaggaagtttaagaagtaggactctgcttgtttcagtagcccatgtactaaaataggaacaatgcagagattagcacagcccctgcacaaggctgacacataaattcatgaagcgttagagacaaaaagtaggactaatgtttgtttattttttaataaaaatctagaatggt

SEQ ID NO: 1053 - DNA, 1260 bp, Homo sapiens; identical to SEQ ID NO: 78

SEQ ID NO: 1054 - DNA, 9266 bp, Homo sapiens
atgactccgggcggtcggagaaggtctgccgggagtacacctgccctctgcctgaagcgtccccaagtgtcccgggcccgcgtcgttgccggatgcacaatgctgacacccttcccgggggcttccagtgtattctgcctcctcttgtgttcccgttgccacccttagctccctgactcttccagccaccttcccctcctccctcttccctgaggtgcctcctcgggcgattccagagcgcccatcttcccagtccgggcaaaacccggagaggtggaatccctcgcccggagcgccccggcggccactgggcatgctccgttgtcaggcaagttcggggctgcaggcagcttgcgcgccgcgcggattccagctgcggtcgcgcgtactcctcctcccaagtagggagcgggcgcatgatggcggccgcggcggcagcggctgcggggagctccagcagcggcggcggcggcggcggcagcggcagcagcagcagcagcagcgacacgtccagcaccggcgaggaggagaggatgcggcgcctcttccagacgtgcgacggcgacggggacggatacatcagcagaaatgacttgctaatggtctgtcgccagctgaatatggaagagtctgtggctgagatcatgaaccagttgggagcagatgaaaatgggaagatttcctttcaggatttcacaagatgccgcatgcagcttgttcgagaaattaggaaggaggaagtagatctttctgcaaagtcagacaactcctgtacaaagaagctgagggatagaattgcttcctggcccacgagcagtgacaacagtttgggtgccttatcagcagccagggagagctgggaatacgactctggtgccagggacctccagagcccggatgtgcagagccagtcagccctccagaagctgctcgagtatggcggaagctctttgcatcagcaggctgctctccacaaactgctcacacagtccccgcacattggcaactctgtaggaggaagctatctagagctggccaacacagaaacttcggcgtgaagtgcagctccgctccggctccctctagctttctttccttctctggaatccgaggcgcggatcttcctcgccccaccgccctagttttttcgggagctcgccggtgccctctagggtgtcggctcgtgctgggaagtgccctccatcctggtaatggggggcggcgaggcaccgtaggagtggcgaggcggcgcccagggtggcactgccccggaacggggcgctgggtgcgcgcgggagggtccccgcgcgggctccgccgctgccgcagctgcgagcgcgccgcgccaccgagcctcctgcagcaatggctcgtccgtgaaacgcgagccacggctgctctttttaagagtgcctgcatcctccgtttgcgcttcgcaactgtcctgggtgaaaatggctgtctagactaaaatgtggcagaagggaccaagcagtggatattgagcctgtgaagtccaactcttaagctccgagacctgggggactgagagcccagctctgaaaagtgcatcatgaattccggagttgccatgaaatatggaaacgactcctcggccgagctgagtgagctccattcagcagccctggcatcactaaagggagatatagtggaacttaataaacgtctccagcaaacagagagggaacgggaccttctggaaaagaaattggccaaggcacagtgcgagcagtcccacctcatgagagagcatgaggatgtccaggagcgaacgacacttcgctatgaggaacgcatcacagagctccacagcgtcattgcggagctcaacaagaagatagaccgtctgcaaggcaccaccatcagggaggaagatgagtactcagaactgcgatcagaactcagccagagccaacacgaggtcaacgaggactctcgaagcatggaccaagaccagacctctgtctctatccccgaaaaccagtctaccatggttactgctgacatggacaactgcagtgacctgaactcagaactgcagagggtgctgacagggctggagaatgttgtctgcggcaggaagaagagcagctgcagcctctccgtggccgaggtggacaagcacattgagcagctcaccacagccagcgagcactgtgacctggctattaagacagtcgaggagattgagggggtgcttggccgggacctgtatcccaacctggctgaagagaggtctcggtgggagaaggagctggctgggctgagggaagagaatgagagcctgactgccatgctgtgcagcaaagaggaagaactgaaccggactaaggccaccatgaatgccatccgggaagagcgggaccggctccggaggagggtcagagagcttcaaactcgactacagagcgtgcaggccacaggtccctccagccctggccgcctcacttccaccaaccgcccgattaaccccagcactggggagctgagcacaagcagcagcagcaatgacattcccatcgccaagattgctgagagggtgaagctatcaaagacaaggtccgaatcgtcatcatctgatcggccagtcctgggctcagaaatcagtagcataggggtatccagcagtgtggctgaacacctggcccactcacttcaggactgctccaatatccaagagattttccaaacactctactcacacggatctgccatctcagaaagcaagattagagagtttgaggtggaaacagaacggctgaatagccggattgagcacctcaaatcccaaaatgacctcctgaccataaccttggaggaatgtaaaagcaatgccgagaggatgagcatgctggtgggaaaatacgaatccaatgccacagcgctgaggctggccttgcagtacagcgagcagtgcatcgaagcctacgaactcctcctggcgctggcagagagtgagcagagcctcatcctggggcagttccgagcggcgggcgtggggtcctcccctggagaccagtcgggggatgaaaacatcactcagatgctcaagcgagctcatgactgccggaagacagctgagaacgctgccaaggccctgctcatgaagctggacggcagctgtgggggagcctttgccgtggccggctgcagcgtgcagccctgggagagcctttcctccaacagccacaccagcacaaccagctccacagccagtagttgcgacaccgagttcactaaagaagacgagcagaggctgaaggattatatccagcagctcaagaatgacagggctgcggtcaagctgaccatgctggagctggaaagcatccacatcgatcctctcagctatgacgtcaagcctcggggagacagccagaggctggatctggaaaacgcagtgcttatgcaggagctcatggccatgaaggaggagatggccgagttgaaggcccagctctacctactggagaaagagaagaaggccctggagctgaagctgagcacgcgggaggcccaggagcaggcctacctggtgcacattgagcacctgaagtccgaggtggaggagcagaaggagcagcggatgcgatccctcagctccaccagcagcggcagcaaagacaaacctggcaaggagtgtgctgatgctgcctccccagctctgtccctagccgaactcaggacaacgtgcagcgagaatgagctggctgcggagttcaccaacgccattcgtcgagaaaagaagttgaaggccagagttcaagagctggtgagtgccttggagagactcaccaagagcagtgaaatccgacatcagcaatctgcagagttcgtgaatgatctaaagcgggccaacagcaacctggtggctgcctatgagaaagcaaagaaaaagcatcaaaacaaactgaagaagttagagtcgcagatgatggccatggtggagagacatgagacccaagtgaggatgctcaagcaaagaatagctctgctagaggaggagaactccaggccacacaccaatgaaacttcgctttaatcagcactcacgcaccggagttctgcccatgggaagtaaactgcagcaggccactggggacagaagggcccatgtacttgttgggaggaggaggaaagggaaggctggcaggtaggtcggcacttggacaatggagtgccccaactcaacccttggggcgactggccatggtgacattgtggactgtatccagaggtgcccgctcttccctcctgggcccacaacagcgtgtaaacacatgttctgtgcctgctcagcagagcctcgtttctgctttcagcactcactctccccctcctcttctggtctggcggctgtgcatcagtgggatcccagacatttgtttctgtaagattttccattgtatcctctttttggtagatgctgggctcatcttctagaatctcgtttctcctctttcctcctgcttcatgggaaaacagacctgtgtgtgcctccagcatttaaaaggactgctgatttgtttactacagcaaggctttggtttccaagtcccgggtctcaactttaagatagaggcggccataagaggtgatctctgggagttataggtcatgggaagagcgtagacaggtgttacttacagtcccagatacactaaagttacaaacagaccaccaccaggactgtgcctgaacaattttgtattgagagaataaaaacttccttcaatcttcattttggaggcagggctgggaagggagcgctctcttgattctgggatttctccctctcagtggagccttattaatatccaagacttagagctgggaatctttttgatacctgtagtggaactaaaattctgtcaggggtttcttcaagagctgagaaacattattagcacttcccgccccagggcactacataattgctgttctgctgaatcaaatctcttccacatgggtgcatttgtagctctggacctgtctctacctaaggacaagacactgaggagatactgaacattttgcaaaacttatcacgcctacttaagagtgctgtgtaacccccagttcaagacttagctcctgttgtcatgacggggacagagtgagggaatggtagttaaggcttcttttttgcccccagatacatggtgatggttagcatatggtgcttaaaaggttaaatttcaagcaaaatgcttacagggctaggcagtaccaaagtaactgaattatttcaggaaggtcttcaatcttaaaacaaattcattattctttttcagttttacctcttctctctcagttctacactgatacacttgaaggaccatttactgtttttttctgtagcaccagagaatccatccaaagttccctatgaaaaatgtgttccattgccatagctgactacaaattaaagttgaggaggtttctgcatagagtctttatgtccataagctacgggtaggtctattttcagagcatgatacaaattccacagccttctgttcgctggaggatactccagccaccagttcggagggcagacagctgtatcctaaaagcaaccactgagaggccagcagtgaggctgcccatctccaaaacgaaacaacagatcaactggtatcagtctagaaggaccagctttggggtgctttgatcactatgaaaatgttcactggtttctgtcaatcatttggtcaaagttagttcctgtgattttttttttttttttttgagatggagttttgctcgtcaccaggctgaagtgcagtggcgtgatcttggctcactgcaacctctgcctcctgagtagctggaattacaggtgcccgccaccatacccagctagtttttttgtatttttagtagagacagggtttcaccatgttggccaggctggtctcgaactcctgaccactgatccacccacctcggcctcccaaagtgctgggattacaggcatgagccaatgtgcctggccattcctgtgattttttagaatttttcacttttcatataaagttgcattttatcatgaggaaaatgttttggctgaaaaacatatgccccaaaaaaaaaaaaatcagttttcactatttttccagcttgcctagggaaacgtcctcccctgagcaaagtgggatgtgcatggctcttttttgtgattaagcaggcatcaaatgggcagttttcattttcactgacacagaaacatgtggctgaagcaggaataaaatcctgcctactgacttctgtctccattcttgctccaggtaaaatcagagaacctccccttctctgagaattcccccaggcagaggcggctccagctcctgttaagggccccagttttactcatgctacctgaccttagttttagtactttcaaatgtgatttgggtaaaaactattttgcaggcaaaagtgttaattttttataaatatgtataataaaaaagctataaaagtttttccttttcttgtatttttcaaatactccccaagacacaatccttgaaggtgaactaggtggcacttgattatgctaattgtgggagctactgaactaaactatactgattaaattaaatgcttgcaggttcctgggtaattttcctttgtgaataacctggcgctacctgaatttttctctaacaaacatctccaatgagggtaaacaatgatcttgattctaatttatatgaggttaaaaaccttcagatttcgtattttgaattgttctccctagtttcctcagtggttacccccttttagtcagtaaccatctctgttcagaattcagtctttggcttttgaagaaatgggcacagagccaaaggacccatttcacagttcccttggaatatatttcccattgttggactgaggcaaacaaaaccaactgtgcaaatcacaagcaaaagagacttctgtccgtagttgcgagtgccatcagtgtgagcttaccagctacaaaaatctgtcatggactggggaacagtatgattccttattgaaactttcatcctcatcggctggcttgtcagcgttctgaagttaatatccatgctgcctgaaacaaatgttatgtttaactagcacttaacttttaaaattgcttaattctcctttcagatgcatgcactaagtcttctctgagcctgcagcaatattttagagggacctcttctaagtcagagccttgacattctactccaaaaggaagtccaaattagagcccataggctttttcttaaaagctgttaaggagtagtaaagaaagttaccactctaaggaaaacatgaaactatctgaaagtcttctggttcctaactggatacagattagattattttaaatgagaaaaaagtgcaccgtagttacccgatcaagattggactgcctgtgtccctggcatgaattaaagaacctccatagttgcttgttcccttctgaaggtgtttcctatggcccacgagaattataaagcaatcactttttaagtctatcagtcaaccttaatagctctcaagagtttcgattatcaagctttaaagtgataacatatcaagatgactattaaaaaataaacatctctgaaagtgtcctttcctccataaggctttaaacaatttgcaaattcttaattgggagtatgtcccaatcattctattaaactatttacagctctacctacttctagattcagcaaacagagctactagttagagtattttgagagccaaaatagtaagagacttctgtaatggttgagatttctgcactgaccttaattagggtaccgccatagggctaccaaagtttttagtgagggctggggaggtggagcataagtaacattttttttctgcagaaggtgatggctttgtagaacactataaaatttttcaggaaaacatacagcaaattttcttatccagtgggaacagcctatttgacaaggaatgatatacaagtttgattcacctttgagcactcttatagagtttacagaagaggcgtaactggttacaaaacaaaagttacgccttcactatccagttcttaaagtttatccacatcctacaaatcttatgttcatgtaggtcaggttaaagtaagctccaaacttgtggccttcagaagcatctcctgtttaacacacctgaaattactctaacttaatacatttgtattctctaagaaataatgctgactgctgtcaccacagcatcactgatctctcagtggctgttaaaatataaacaagtggaaaaaaagtatacaagttgatagcagctgttcatgtattcttgttttgctaatacctgtgtagagaaagacagtttcacatgcagatcaccatacatttttgcttaaaggttacactgggtaaactgtttgtttatcacattacatctgggtgagattttgcatgtgaccaagaggaagaaatcattcagtcccggaaatagcaactgctatgtaaaaccacatccttgactagtacttcatctttccacagtcatccatctgctaatcaggtgaaatatcagctcagcagaacaaagcaagttatacacaaatttcccccacattcacactgatgccgtacttagtaattctggttctaccattcccttttgcactttttgcaagtcaaattcatgtggaaaaatgttctgtttgtagaactcatagtattcacttatagtgctcatgtcaggaatggcaagtgagtaagagcccctgataatctgcttttgttagaacgtaatgcaaagataataaaacatgtccacttcttttctagttctaatcagtttttagacatcaagatttatttactttgcatgagatttgtttcctattatttgaatatgtgctatacacttgaattagaaaaacctgcttgaatgtattgtcagttattaaagcacatgtgactaagtttgcatttgtcagtattgttctactgtttgtactgaaagtctcattttaaaattgctacttaacactgtactataccttgtaattttttagattctccacttgtattctttaaatgtttccagatgcctttagttttagctgctgtaaaatagctactttgcgttatttgatatagaattgttttttaaaaactccatttatttatacagagacatttataatattttacaaacattcttatattctgaataaatatttctaattccacagtgta

SEQ ID NO: 1055 - DNA, 1243 bp, Homo sapiens
gcgatccgggccgggagctgcgggcgcccgggcgcccgaggcttcccggtgcgctccgccaggtcagtcatcgctagagggttattattgacatttactcatcataaaatgtgatgtcagcctaccagctcggagtgcagttcctggtttccagtttacaacattgaccagttgctaacatgttatctctgaggaacttggaatgataaatacagccatacttaaatagaagattcttggccgtgtagataaggaaaataagataaggcaatatttttgaactattctataatagaaatgaggatatatacacaaaatgacccagtgctgttttcttagggtgcatcctttgtttttctggttttggtcttttcatcacaggatggcattagctctgtgtctgcaggtgctgtgcagcctgtgtggctggctctcgctctatatttctttctgccacctgaataagcaccgaagctatgagtggagctgccgcctggtcaccttcacccatggagtcctctctataggcctctccgcttatattggcttcattgatggcccatggccttttacccacccaggctcacccaatacacctctccaagttcatgtcctgtgtctcaccttgggctacttcatcttcgacttgggctggtgcgtctactttcagtctgagggtgccttgatgctggctcatcacacattgagtatcttgggcattatcatggcccttgtgcttggggagtctggcacagaggtcaatgcagtcctctttggaagtgagcttaccaaccccttgctacagatgcgctggtttctccgggaaacagggcactatcacagtttcactggagatgtagtggacttcctctttgtggctctgttcacaggagtgaggattggtgtgggagcttgcctccttttctgtgaaatggtctcccccacgcctaagtggtttgtgaaggctgggggagtagcgatgtatgctgtgtcttggtgtttcatgtttagcatctggcgctttgcatggaggaagagcatcaagaagtaccatgcttggagaagcaggcggagtgaggaacggcagctgaaacacaacggacatctcaaaatacactagccaaggcttgctccagattatggattgggttaagtcagccatgggaaccaggttggaaatatgactgttacataattacacttataacaaacttaggtttcaataaagggctaaatgtattga

SEQ ID NO: 1056 - DNA, 1931 bp, Homo sapiens
atgaccctcttaccgggagacaattctgactacgactacagcgcgctgagctgcacctcggacgcctccttccacccggccttcctcccgcagcgccaggccatcaagggcgcgttctaccgccgggcgcagcggctgcggccgcaggatgagccccgccagggctgtcagcccgaggaccgccgccgtcggatcatcatcaacgtaggcggcatcaagtactcgctgccctggaccacgctggacgagttcccgctgacgcgcctgggccagctcaaggcctgcaccaacttcgacgacatcctcaacgtgtgcgatgactacgacgtcacctgcaacgagttcttcttcgaccgcaacccgggggccttcggcactatcctgaccttcctgcgcgcgggcaagctgcggctgctgcgcgagatgtgcgcgctgtccttccaggaggagctgctgtactggggcatcgcggaggaccacctggacggctgctgcaagcgccgctacctgcagaagattgaggagttcgcggagatggtggagcgggaggaagaggacgacgcgctggacagcgagggccgcgacagcgagggcccggccgagggcgagggccgcctggggcgctgcatgcggcgactgcgcgacatggtggagaggccgcactcggggctgcctggcaaggtgttcgcctgcctgtcggtgctcttcgtgaccgtcaccgccgtcaacctctccgtcagcaccttgcccagcctgagggaggaggaggagcagggccactgttcccagatgtgccacaacgtcttcatcgtggagtcggtgtgcgtgggctggttctccctggagttcctcctgcggctcattcaggcgcccagcaagttcgccttcctgcggagcccgctgacgctgatcgacctggtggccatcctgccctactacatcacgctgctggtggacggcgccgccgcaggccgtcgcaagcccggcgcgggcaacagctacctggacaaggtggggctggtgctgcgcgtgctgcgggcgctgcgcatcctgtacgtgatgcgcctggcgcgccactccctggggctgcagacgctggggctcacggcccgccgctgcacccgcgagttcgggctcctgctgctcttcctctgcgtggccatcgccctcttcgcgcccctgctctacgtcatcgagaacgagatggccgacagccccgagttcaccagcatccctgcctgctactggtgggctgtcatcaccatgacgacggtgggctatggcgacatggtccccaggagcaccccgggccaggtagtggccctgagcagcatcctgagcggcatcctgctcatggccttcccagtcacctccatcttccacaccttctcccgctcctacctggagctcaagcaggagcaagagagggtgatgttccggagggcgcagttcctcatcaaaaccaagtcgcagctgagcgtgtcccaggacagtgacatcttgttcggaagtgcctcctcggacaccagagacaataactgagcgcggaggacacgcctgccctgcctgccatctgtggcccgaagccattgccatccactgcagacgcctggagagggacaggccgcttccgagtgcagtcctggcgcagcaccgactcccacgcacccggggaaggacaccctcactcccacaccccgggaagaacactagaacatcagcagaggggccctgcccctccgcctgcagccgtgaaaggaagctgggtcatcagcccagccccgcccaccccagcccctatgtgtgtttccctcaataaggagatgccttgttcttttcaccatgcaaataacatgcccagcaaaaacttgctttatgggtctgcctggagaaaaaaaaaaaaaatacaaacagcagaaacagcaaaaaaa

SEQ ID NO: 1057 - DNA, 5047 bp, Homo sapiens
gggcagggcggctcggccgcctctttctctcgctgcccccgcccctcctcctcctccctctccccgagtgctagcccgggcggccgccgagcttggcgctctctcgcctcgctgcctcctcccccgcgccgcggaccctctcccctcccttgcgttgcccccctctcccgccgcctcctcccgctctcctctcgctctcctcccgcctccttcttccaggcgcggccagcgggggcaagagcgaggtggctgcgaggaggcgtcactgaaagccctgacttggggaaggctgcgggctcggagccggagacgccgagctggggccgggtgagttgggaatcagactcttgagttgacagctggcctatggtttctgcattttgttaagaagcacctcatgcaagcgagggacctgggactgctcacagccaggtggcatttttctgaagttgttcattaagacttcccagcattcctacagatataaatagaggtgaggccgcaggcggtgctctgggtccgggagcgctgtccccagcatgaacgcggccggcggcgggagtgaatgactgcagctgcgacttccttcccgggccgcccgagcctccttccccaccgactttcttgttttgattaactccgtggactcctgactctttcttcgcccggaacatcaatatgtgtcatgtcattgtcacctgtcgctcgatgctctggaccttgctgagtattgtggtggcttttgccgagctcattgccttcatgagtgcagactggctgatcgggaaagcgaggagccgcggcggcgtggagccggcgggcccgggcgggggctccccggagccctaccaccccaccctgggcatctacgcccgctgcatccggaacccaggggtgcagcacttccagcgggacacgctgtgcgggccctacgccgagagcttcggcgagatcgccagcggcttctggcaggccacagctattttcctggctgtgggaatctttattctctgcatggtggccttggtgtccgtcttcaccatgtgtgtacagagcatcatgaagaaaagcatcttcaatgtctgtgggctgttgcaaggaattgcaggtctattccttatcctcggtttgatactctaccctgctggctggggttgccagaaggccatagactactgtggacattatgcatctgcctacaaacctggagactgctccttgggctgggccttttataccgccattgggggcacagtcctcactttcatctgtgctgtcttctctgcacaagcagaaattgcaacctctagtgacaaagtacaggaagaaattgaagaggggaaaaatctgatctgcctcctttagtttggaagagacaatgccattttctcccttgagtaatcttgtgaaacagtccacagtttcatcatttgagtcaagtggagaactaacctttacctaccaaagccacgttccacggcccgaggcttaaacaggaccaatgagaggccacatccagctacgcaaagttactggacatgcggtctgcagtgcacattataaggaatggaacatgaaaatagtatataatcctagacctggagttgccaagttctgtcagactccatctcccccaggttcaatgaaggataataatctaaatcattagggcagcagtttctctggtaacggaagagaccgtccgccagatctgcaggctgtttctgctccaacactgcttgcttgtgagcatctctgcctcagaatggggttttgggttggagttcttgttttcctctgttctttcaagttgtctccaacgaacagaaaactataaacttactggggacaggatgtgtgctaaagggcacagcaagacactgtcttttgcttagctgaccaaaggggtcagcagggatggcgtggagtcatgctgtggaacttattctaggctgaatcctagggtaaggtggatcaactgaactgtcactccagagattttagaaatttgagtaaagaaacaataaggacctatacaatcatatgagaacaaaaatatgaaatcttgctagtgaagacgtattttttcttcttcccagcagccaggctagcaccagttctggcccagtctcctcttcttctggagatcacatgtttttcttctaaggttaggattgtgctttgactgcgaaaggaaacctcactgtttcctccttccagggactgaggtctccaagctagctgtggcttatgcagatgttcactgggaggacctgccagaatctcggcacttggggggagacctttactcccagtttggtgaccatgctgtagtcagctctatttccaatcccgacagtagcagaatggcattctacaacaaaaagaagctagttatgggagttaagtttttgtagttactggtgttgatcctgaaagcagactgagataacattaaattgctgcaactgaagaactgcagccaagaccttaattccaggaaagcacagaggacaaagttaattcaaaaagaggcgctagatcaaggtcacagcactgcctacacctgtttacaaaaagaatcaaataccactatgaataaggattcaggggtttttaatctactttccataaattaccaatatcactgattcaggaagatagtatctcagaatgaccagagcagcacagaaacaagctactctgacattatgggagcttcaaaattgtatcatgatacagaaacactccttagcactttaagaaagtgagatggaactgccagatttctggaaggagaaaaagtgtaggtatttgggttcattaatctgctcacttgaggactttgttttgaaaaagtaccttctgtggacaaggtattgtgctaccagctatacaaccctgacttcagagtttgcaaccttgccctgagtgaatcatgttaaagctgtctgagtctaaagcaccgtatcttggtgcagaacagataattatacagagatggaatgggacaaccgcagttttactacattctggtgtttggcctatatgagaaaccatcttctcacagattaagggctaagggcaaaaggggtgggaggtgtggaactagccttaatgagtttcccattcctgaaccaaaattcaaagtgagtgagatgtaaatcctgtgattttggtgaagaaaaaaacgggtatcttcatagcagcctaggaaaccttaaccatatctctaacaccacacagaaagaggctggaggagccactggacaaagcttctgtctctgtgtgtacatttataatgttctaaccaagtctcaaaccttgatgaaaaacacaaaatttttccataaacttatcagaagactcacttttctttctttcttggatagagaaaccattttctgacactaggtttacaatctcagtgtccttacaagttaagtcctaagctcacaggatcctccgagcatgtccatcacctgctctttggctaaggtggcagtgtacctctagatcaacctgggaacagtcacaagggagtgtgacttcttggccataataaactcactcgatagtgtttatgttattaatctgaatgcaacagaagacaaaagcacaggcatgcacacacacagaaccccaaaccactaaaaactacctaaacactgacttagtaaatagtaaaaaggtaatgttgggacttttaaaccttgaatccattagccaggcttgggatgaaaggaccatctaaaatcatgctagtctaaaccatgctcttccacacagctgtttaaaaaccactgggtatgaggaatatgctagaaagaaatgttaaaaatagattgttggctcacacttatttttctaataaataggaccattattactaccaggaaagtcttatttattttgcctgaaattggcttaaagaaagtctcatgacgggatgggatgggctgcgcttctcaatgaactctgaggcagaaatatttgccttggattctgtggattctttaaacctgtgtgctaataattcaaacaatgttgcattaattgtataagggtttttgtatagttttcaaacatctgtggtgtaatgatctttgttaaacatatattctgtaaagtgccatagtctttttttatgtgtagcatatttaaaaatatatatgtatattatacatacacaagtttgtgtgaaagatgtgcaataacaaaggtgtatgtatgttttgttgttttgttttggaaactggacaggagtcaaaacagggatgtttgtttctgttttggcaaggagagttccacatttttgccttcatggcttattcagtaacccataattttaatgctacacaaatcttatgtgaagaaaagactggtatgaaatcattttttcctgggtctaaaataatcgctagtgttatgtcaaagttaagcccgcacgccaggcccagttaatgctagtctttcatgtgaaatgtgaagctgccatgttgccttttctcttagtaggataactagtagctggtacataatcactgaggagctatttcttaacatgcttttatagaccatgctaatgctagaccagtatttaagggctaatctcacacctccttagctgtaagagtctggcttagaacagacctctctgtgcaataacttgtggccactggaaatccctgggccggcatttgtattggggttgcaatgactcccaagggccaaaagagttaaaggcacgactgggatttcttctgagactgtggtgaaactccttccaaggctgagggggtcagtaggtgctctggagggactcggcaccacttgatattcaacagccacttgagccaaatataaaattgtatttacagctgatggactcaatttgagccttcaaacttgtagttatcctattatattgtaaactaatacattgtctagcattgatttggttcctgtgcatatgtattttcactatgtgctcccctccccagatcttaattaaaccagattttgcaattcattcttattctttcaa

SEQ ID NO: 1058 - DNA, 2367 bp, Homo sapiens
cccagcaggcagtgcagcctagagacgctgacaaaggagcggaggagcagtcgcagctgctttccgaggaagccggtgttgccgagattgccaaaatgctttggagtttttaactgaatctaagaaaagtccaaaatagatttgagactgtaaaaacagaaactgcagcaagggggattcagtgccaatgcatcaacaaaaaagacaaccagagttagtggaaggaaatcttcctgttttcgtgttccccacggagctcatattttatgcagatgatcagtcaacacataagcaagtgttgacactgtacaatccctatgagtttgccttaaagttcaaagttttgtgtactactccaaataagtatgttgtcgttgatgctgcaggtgcagtaaagcctcagtgttgtgtggatattgtgattcgtcatcgagatgttcgatcctgtcactatggtgtaatagacaaattccgtctccaagtttccgagcaaagccaaaggaaggctttgggaagaaaagaggttgttgctactcttctcccatcagcaaaagaacaacaaaaggaagaagaggaaaaaagattaaaggaacatttaactgaaagtttattttttgagcagtcgtttcaaccaggtaaaaacagagctgtatcctcaggacctagtttactaactgtcttcctgggagtggtgtgcattgcagccctgatgctgcctacactgggggatgtggaatcgctggtgcctctctacctccacttaagtgtgaatcaaaaattagtggctgcttatatcttaggtcttatcacaatggccatacttagaacatgagcaaggatttcaattgacttctgaagtaaatctgtcttgaaaatatgaatgtggactgccttttatctctatttcactccattaacatgcaacaaactattgaatgatttcaaataattgcaaatgtataatatatattttaaattataatttaatttgaaggactgcagaacattattttacagacagcaaggatgcttctgagtgacacctaggaaattatttgaagaaattctttttatatctatacctgttgtgtaagaaactttaaaacatttgttattttctcacctttttttctaattcactttgattgctaggggtcatgtatgcttcgaagttacaggactaaaagagcaaactgaccggcctaaaactaaaatgacatttattccctagctacaaacatcagcgttattatgttaattataccttgccctctatcattataaatggttgccatggtgtttctaaaaataagtgttttaccattaatgtgtagagggcaaacaaagcataaagtactaagggatcatgcttatcctagggtctcacagaagagaggacatatttaattaatcttgtgaattacagaacaggttgtggtccagacaccaagaatcataggggtttttttttaaaaaacctaatagaagtagggtgacctctctctttggtctaagagttctaaaggaaggtaggcatctgtttaattagttggttcaccctggctttacctctggttaatgctttgtgttaataggaaggaaaaatcactttatcttttcttccaagcccctccctgcctgacttacccagactgggattaccagataccaggtgatttatgtggagatgatttttcacctttaaactctaagccaagtgtaagaaactcttgatagctatgtctattttatatcagtcactgagacttttttttaagtttttatttattattaagacaactttgccaaaaaagtcccctaagcacaactatttacatttctttatagcctcttctgatctctaacacatatgcagttttaactgttattttcatagtaactgatcttttgtctaaggatttttacctgaaagcacaatgtattgagtctcttgaaaatcatctttcagatctttttacagaatgaacttatgcactgctactgtagtattctcaaggaatatatgtaaacacaaatgtatgcctgaggttggtttttgcagaaaacagtctctgcttctaaaaacttctatgtctagtcttccataggaaatcctcactgtttaaccatgtgaggagcctaagtcattaaacggatcatgtctgtacattgtgtaatgaatgaaaagcacataaatgtaatctactttgaactttgtaaaaatgatgtgtggaggctattcttgtttctccatctcaagtcctgtgtgtgcacgtgtgtgcaagtgcacatgtgtgtgtgtaataacacattgtaaagaacagaaattactttaaaaaataaacagaaatggagacctgagcttca

SEQ ID NO: 1059 - DNA, 3898 bp, Homo sapiens
tgggaagttcgcgcaagtgcggctctgcagggaggagggagggccgaggggaaggccctcgagagagtggagggcaacagtggccacggttcctctgtacttcgtttcttccctttatagaattgagagattgctgagcctaaatacatgttgctgcattgcctccgagaatggccggacctatccccactctcaccaaaacagagtgtgggactcactgctccctcgcctactcggcggcgcaggtgaggcgcggggccggggccggaccgggaggcggggaccccccgcccccccgcccgcacctgcggggcagccggcgctcaggcgccgcagccgctcagcacctgcggcgccctcagggagccgggcgcggggccctgcgcactcggagctcggctcctctccttccttttcttttttttcggggggaggtgggggctggtttggatgttttccgagagccggggacggtctcaagctattttcgcggagggaagtctttgaaatacgacatctagaagagtggccctcggcgacaatgccgggcgttcccggaccggggcaacgctgggattccggggaagtggaggcagagggagcgggcacggggccggcagccgctccacggagtccccggcaggggcgagcttagctgtccagccgggtcccctgcccaccccggcccgggccgcggtgacagctgagggtccagagagccggcaggaggggaccctgcgcattgtctgccgcgatggggacgtgggcgtgcccgcggaattcacctcctccggggaccagccgcccagggaggagccggcacagaacgctggctcggagcgccggcaccctgggcctttgcgttgtttgtcggctgagcagctggttcccggagcccgtgggcctcctggccaatgcgagtgacagcgaccttctgggtttataataaagggcttgacgcgccggaaagtcccctcgccgctggccaccagccttccagcccttacggcccacgccgtaatcctggtgaccgagaagagagcagagccactgccagaaggaaggggacaagacccagcaggacaccttctttccacgctttccagcctgtgggagcggcaggggcaacagagagaggatctggagccaggattaatgactcatttatgaagcatcttattctgcgaccgaggctcagtggtcagtggcgacgtaaatggctcgactccccgctggcattcgcttcatcatctcattctccagggatcagtggtacagagccttcatttttattttgacatttctgctgtatgcaagttttcacttatctcgaaagcctatcagcatagttaagggtgagctccacaagtactgcactgcttgggatgaagctgacgtcaggttcagcagccagaacaggaagtctgggtccgctgccccccaccagctccctgacaatgagaccgactgtggctgggcaccgtttgataagaacaactatcagcagctgcttggggccctggactactccttcctgtgcgcctatgccgtggggatgtacctcagtggcatcattggggagcgcctgccgattaggtattacctaactttcgggatgctcgccagcggagccttcaccgccctgttcggcttagggtatttctacaacatccacagtttcggattctacgtggtaactcaggtcatcaacgggctggtgcagaccaccggctggcccagcgtcgtcacctgcctcggcaactggtttggaaaaggaaggagaggtttgattatgggggtctggaactcccacacctccgtgggcaacatcttggggtcattgatcgctggctactgggtgtccacatgctggggcctgtccttcgtcgtgcctggagccatcgtggcagccatggggatagtgtgctttctcttcctcattgaacatccgaacgacgtcaggtgctcctccaccctggtgacgcactcaaaaggctatgagaatggtacaaacagattgagactccagaagcaaatcttgaagagcgaaaagaacaagcctctggacccagagatgcagtgcctgctgctctcagatgggaagggctccatccacccgaaccacgtcgtcattctccccggggacggtgggagtggcacggccgccatcagcttcacaggggccttgaaaattccaggcgtgatagagttctcactgtgtctgctgtttgccaagctggtcagctatactttcctcttctggctgcccctgtacatcacgaatgtggatcaccttgatgccaaaaaggcgggggagctctccaccctgtttgacgtgggcggaatctttggtgggatcctggcaggtgtgatctcagaccgactggagaaaagggcctccacctgcggcctgatgctgctgctcgcggcccccacgctctacatcttctccaccgtcagcaagatggggcttgaggccaccatcgccatgctgctgctcagcggagccctggtcagtgggccctacacactcatcaccaccgccgtctccgccgacctggggactcataaaagtctgaaaggcaacgcgcacgccctctccaccgtgacggccatcattgacgggacgggctctgtaggagcagccctgggccccctgctggctgggctcctctccccgtccggctggagcaatgtgttttacatgctgatgtttgcagatgcctgtgccttactgttcctgatccgcctcatacacaaggagctgagctgcccagggtcagctacgggggaccaagttccatttaaggaacagtgacaccccaccccagtcccgtggagggggtctgggcccacccttcacaactgcctttcaaggacagttcagacaaagggccctgcatggaaagagtgacctccctttgccttttgcacacgcacctggaaaagacacagaagccaacctgagaacccctggtgctattttaaaggagacatattgctgaacagcagtgagaaaagtctgcaggaactgctgcctgagccaagccagagaaccgaagacccggccggccctggcctcacaggcgtgtgcccatgcagccacccaaatgcacgcgtgacaacaaggccgggagggtggggggggtgcacaggtagccccgaccctctcaggcattccagccacagaacatcaaagtgagcgagtactgcgctggctgtggcttcagagaacctgtatgtgccacatggaaaaacaggacaccagagcccaccagacagtgccggccagcagagaagcagagagccagcgccacacaacatcaagaaggccgacaaccaggttggaaaccaagacggagctcagacccaccacatcgccccagaggcttttccagcacccatgatgtttcggactgacctaaaaactaattgtcgagaagccaagggtgaggaggcaggaagcacctccggttggaggcacccaggcttgccagccacagagcgccccaaagtcaccgtcatcccagcccctggccttcctgctgccctccggggccatggcactgctgttcagctcaggcacaggggcacagcagaggtttgggaagcggtctccccaccggcactgggattggcgggtccaagcccagcaaccggcttcgctccacaacacacaccacacctgggactgtttttaatacatagcaacagactgggttatttatttaagatgtgtattgtgtcatatgaagtttaagagacataaatggcattttgttatttattaagacaaactccaattgttctctggctgtttttttcagttgtgtctagcaaaatacttatctgccctttgaaataaaatgtttttgtttaaaaaatctcagaacactca

SEQ ID NO: 1060 - DNA, 3780 bp, Homo sapiens; identical to SEQ ID NO: 98

SEQ ID NO: 1061 - DNA, 6377 bp, Homo sapiens; identical to SEQ ID NO: 105

SEQ ID NO: 1062 - DNA, 3165 bp, Homo sapiens; identical to SEQ ID NO: 72

SEQ ID NO: 1063 - DNA, 5143 bp, Homo sapiens
gccggagccgactcggagcgcgcggcgccggccgggaggagccggagagcggccgggccgggcggtgggggcgccggcctgccccgcgcgccccagggagcggcaggaatgtgacaatcgcgcgcccgcgcaccgaagcactcctcgctcggctcctagggctctcgcccctctgagctgagccgggttccgcccggggctgggatcccatcaccctccacggccgtccgtccaggtagacgcaccctctgaagatggtgactccctcctgagaagctggaccccttggtaaaagacaaggccttctccaagaagaatatgaaagtgttactcagacttatttgtttcatagctctactgatttcttctctggaggctgataaatgcaaggaacgtgaagaaaaaataattttagtgtcatctgcaaatgaaattgatgttcgtccctgtcctcttaacccaaatgaacacaaaggcactataacttggtataaagatgacagcaagacacctgtatctacagaacaagcctccaggattcatcaacacaaagagaaactttggtttgttcctgctaaggtggaggattcaggacattactattgcgtggtaagaaattcatcttactgcctcagaattaaaataagtgcaaaatttgtggagaatgagcctaacttatgttataatgcacaagccatatttaagcagaaactacccgttgcaggagacggaggacttgtgtgcccttatatggagttttttaaaaatgaaaataatgagttacctaaattacagtggtataaggattgcaaacctctacttcttgacaatatacactttagtggagtcaaagataggctcatcgtgatgaatgtggctgaaaagcatagagggaactatacttgtcatgcatcctacacatacttgggcaagcaatatcctattacccgggtaatagaatttattactctagaggaaaacaaacccacaaggcctgtgattgtgagcccagctaatgagacaatggaagtagacttgggatcccagatacaattgatctgtaatgtcaccggccagttgagtgacattgcttactggaagtggaatgggtcagtaattgatgaagatgacccagtgctaggggaagactattacagtgtggaaaatcctgcaaacaaaagaaggagtaccctcatcacagtgcttaatatatcggaaattgaaagtagattttataaacatccatttacctgttttgccaagaatacacatggtatagatgcagcatatatccagttaatatatccagtcactaatttccagaagcacatgattggtatatgtgtcacgttgacagtcataattgtgtgttctgttttcatctataaaatcttcaagattgacattgtgctttggtacagggattcctgctatgattttctcccaataaaagcttcagatggaaagacctatgacgcatatatactgtatccaaagactgttggggaagggtctacctctgactgtgatatttttgtgtttaaagtcttgcctgaggtcttggaaaaacagtgtggatataagctgttcatttatggaagggatgactacgttggggaagacattgttgaggtcattaatgaaaacgtaaagaaaagcagaagactgattatcattttagtcagagaaacatcaggcttcagctggctgggtggttcatctgaagagcaaatagccatgtataatgctcttgttcaggatggaattaaagttgtcctgcttgagctggagaaaatccaagactatgagaaaatgccagaatcgattaaattcattaagcagaaacatggggctatccgctggtcaggggactttacacagggaccacagtctgcaaagacaaggttctggaagaatgtcaggtaccacatgccagtccagcgacggtcaccttcatctaaacaccagttactgtcaccagccactaaggagaaactgcaaagagaggctcacgtgcctctcgggtagcatggagaagttgccaagagttctttaggtgcctcctgtcttatggcgttgcaggccaggttatgcctcatgctgacttgcagagttcatggaatgtaactatatcatcctttatccctgaggtcacctggaatcagattattaagggaataagccatgacgtcaatagcagcccagggcacttcagagtagagggcttgggaagatcttttaaaaaggcagtaggcccggtgtggtggctcacgcctataatcccagcactttgggaggctgaagtgggtggatcaccagaggtcaggagttcgagaccagcccagccaacatggcaaaaccccatctctactaaaaatacaaaaatgagctaggcatggtggcacacgcctgtaatcccagctacacctgaggctgaggcaggagaattgcttgaaccggggagacggaggttgcagtgagccgagtttgggccactgcactctagcctggcaacagagcaagactccgtctcaaaaaaagggcaataaatgccctctctgaatgtttgaactgccaagaaaaggcatggagacagcgaactagaagaaagggcaagaaggaaatagccaccgtctacagatggcttagttaagtcatccacagcccaagggcggggctatgccttgtctggggaccctgtagagtcactgaccctggagcggctctcctgagaggtgctgcaggcaaagtgagactgacacctcactgaggaagggagacatattcttggagaactttccatctgcttgtattttccatacacatccccagccagaagttagtgtccgaagaccgaattttattttacagagcttgaaaactcacttcaatgaacaaagggattctccaggattccaaagttttgaagtcatcttagctttccacaggagggagagaacttaaaaaagcaacagtagcagggaattgatccacttcttaatgctttcctccctggcatgaccatcctgtcctttgttattatcctgcattttacgtctttggaggaacagctccctagtggcttcctccgtctgcaatgtcccttgcacagcccacacatgaaccatccttcccatgatgccgctcttctgtcatcccgctcctgctgaaacacctcccaggggctccacctgttcaggagctgaagcccatgctttcccaccagcatgtcactcccagaccacctccctgccctgtcctccagcttcccctcgctgtcctgctgtgtgaattcccaggttggcctggtggccatgtcgcctgcccccagcactcctctgtctctgctcttgcctgcacccttcctcctcctttgcctaggaggccttctcgcattttctctagctgatcagaattttaccaaaattcagaacatcctccaattccacagtctctgggagactttccctaagaggcgacttcctctccagccttctctctctggtcaggcccactgcagagatggtggtgagcacatctgggaggctggtctccctccagctggaattgctgctctctgagggagaggctgtggtggctgtctctgtccctcactgccttccaggagcaatttgcacatgtaacatagatttatgtaatgctttatgtttaaaaacattccccaattatcttatttaatttttgcaattattctaattttatatatagagaaagtgacctattttttaaaaaaatcacactctaagttctattgaacctaggacttgagcctccatttctggcttctagtctggtgttctgagtacttgatttcaggtcaataacggtcccccctcactccacactggcacgtttgtgagaagaaatgacattttgctaggaagtgaccgagtctaggaatgcttttattcaagacaccaaattccaaacttctaaatgttggaattttcaaaaattgtgtttagattttatgaaaaactcttctactttcatctattctttccctagaggcaaacatttcttaaaatgtttcattttcattaaaaatgaaagccaaatttatatgccaccgattgcaggacacaagcacagttttaagagttgtatgaacatggagaggacttttggtttttatatttctcgtatttaatatgggtgaacaccaacttttatttggaataataattttcctcctaaacaaaaacacattgagtttaagtctctgactcttgcctttccacctgctttctcctgggcccgctttgcctgcttgaaggaacagtgctgttctggagctgctgttccaacagacagggcctagctttcatttgacacacagactacagccagaagcccatggagcagggatgtcacgtcttgaaaagcctattagatgttttacaaatttaattttgcagattattttagtctgtcatccagaaaatgtgtcagcatgcatagtgctaagaaagcaagccaatttggaaacttaggttagtgacaaaattggccagagagtgggggtgatgatgaccaagaattacaagtagaatggcagctggaatttaaggagggacaagaatcaatggataagcgtgggtggaggaagatccaaacagaaaagtgcaaagttattccccatcttccaagggttgaattctggaggaagaagacacattcctagttccccgtgaacttcctttgacttattgtccccactaaaacaaaacaaaaaacttttaatgccttccacattaattagattttcttgcagtttttttatggcatttttttaaagatgccctaagtgttgaagaagagtttgcaaatgcaacaaaatatttaattaccggttgttaaaactggtttagcacaatttatattttccctctcttgcctttcttatttgcaataaaaggtattgagccattttttaaatgacatttttgataaattatgtttgtactagttgatgaaggagttttttttaacctgtttatataattttgcagcagaagccaaattttttgtatattaaagcaccaaattcatgtacagcatgcatcacggatcaatagactgtacttattttccaataaaattttcaaactttgtactgtta

SEQ ID NO: 1064 - DNA, 2491 bp, Homo sapiens; identical to SEQ ID NO: 835

SEQ ID NO: 1065 - DNA, 679 bp, Homo sapiens; identical to SEQ ID NO: 834

SEQ ID NO: 1066 - DNA, 2090 bp, Homo sapiens; identical to SEQ ID NO: 837

SEQ ID NO: 1067 - DNA, 1972 bp, Homo sapiens; identical to SEQ ID NO: 836

SEQ ID NO: 1068 - DNA, 5608 bp, Homo sapiens; identical to SEQ ID NO: 391

SEQ ID NO: 1069 - DNA, 3432 bp, Homo sapiens; identical to SEQ ID NO: 839

SEQ ID NO: 1070 - DNA, 4703 bp, Homo sapiens; identical to SEQ ID NO: 838

SEQ ID NO: 1071 - DNA, 744 bp, Homo sapiens; identical to SEQ ID NO: 414

SEQ ID NO: 1072 - DNA, 2131 bp, Homo sapiens; identical to SEQ ID NO: 440

SEQ ID NO: 1073 - DNA, 1189 bp, Homo sapiens
ccttcgcaagccctcatttcaccaggcccccggcttggggcgccttccttccccatggcgggacacctggcttcagatttcgccttctcgccccctccaggtggtggaggtgatgggccaggggggccggagccgggctgggttgatcctcggacctggctaagcttccaaggccctcctggagggccaggaatcgggccgggggttgggccaggctctgaggtgtgggggattcccccatgccccccgccgtatgagttctgtggggggatggcgtactgtgggccccaggttggagtggggctagtgccccaaggcggcttggagacctctcagcctgagggtgaagcaggagtcggggtggagagcaactccgatggggcctccccggagccctgcaccgtcacccctggtgccgtgaagctggagaaggagaagctggagcaaaacccggaggagtcccaggacatcaaagctctgcagaaagaactcgagcaatttgccaagctcctgaagcagaagaggatcaccctgggatatacacaggccgatgtggggctcaccctgggggttctatttgggaaggtattcagccaaacgaccatctgccgctttgaggctctgcagcttagcttcaagaacatgtgtaagctgcggcccttgctgcagaagtgggtggaggaagctgacaacaatgaaaatcttcaggagatatgcaaagcagaaaccctcgtgcaggcccgaaagagaaagcgaaccagtatcgagaaccgagtgagaggcaacctggagaatttgttcctgcagtgcccgaaacccacactgcagcagatcagccacatcgcccagcagcttgggctcgagaaggatgtggtccgagtgtggttctgtaaccggcgccagaagggcaagcgatcaagcagcgactatgcacaacgagaggattttgaggctgctgggtctcctttctcagggggaccagtgtcctttcctctggccccagggccccattttggtaccccaggctatgggagccctcacttcactgcactgtactcctcggtccctttccctgagggggaagcctttccccctgtctctgtcaccactctgggctctcccatgcattcaaactgaggtgcctgcccttctaggaatgggggacagggggaggggaggagctagggaa

SEQ ID NO: 1074 - DNA, 2743 bp, Homo sapiens; identical to SEQ ID NO: 438

SEQ ID NO: 1075 - DNA, 793 bp, Homo sapiens; identical to SEQ ID NO: 483

SEQ ID NO: 1076 - DNA, 2866 bp, Homo sapiens; identical to SEQ ID NO: 415

SEQ ID NO: 1077 - DNA, 1393 bp, Homo sapiens
agccctttgtttatggcctgatctagctaaggcttctagacttcaggagcttaagaatcgtccggagggctgggcgtggcggtgcaggcctgtagtcccacccactccgaaggctgcggagggaggatcaacttgagtctgggaactcagccaggaattcaagaccagcctgggcaacacagtgaggccccctacccacatcctctccgtccccgcaatctccttccatcccagtccttgccttccccagggtgttgctgaaaatgtcagatgcaaatttggatagcagcaagaagaatttcttggagggggaagtagatgatgaggaaagtgtgattttgacactggtgccagttaaagatgacgcaaatatggaacaaatggaaccaagcgtttcttcaacttctgatgtcaaactggagaagcctaagaaatacaatccaggtcatctacttcaaacaaatgagcaatttacagctccacaaaaagctagatgcaaaataccagcccttcccttgccgaccattttgcctcccattaataaggtgtgtcgggacactttgcgggactggtgtcaacaactcggtttgagtactaatggcaagaaaatcgaagtttatctgaggcttcataggcatgcttaccctgaacaacggcaagatatgcctgaaatgtcacaagagaccagattacagcgatgttcgaggaaacgcaaggcagtgaccaagagagcaaggcttcagagaagttatgagatgaatgagagagcagaagagaccaatacagttgaagtgataacttcagcaccgggagccatgttggcatcatgggcaagaattgctgcaagagctgttcagcctaaggctttgaattcatgttccattcctgtttctgttgaggcctttttgatgcaagcctctggcgtcaggtggtgtgtggtccatggcagacttctctcggcagacacaaagggttgggtacgcctgcagtttcatgcaggtcaggcctgggtgcctaccactcacaggaggatgatttctctcttcttgttacctgcctgcattttcccatccccaggcatagaagataatatgttatgccccgactgtgctaagaggaataagaagatgatgaaaagattaatgacagtagagaagtagcagcaacctgtttgaatacaatgtactaaaggagggatgtactttcagatcatgtaacctattacgaaggagtggaagaggagacaatttgaatgaatcctcatgatctacaaaacaaaatcatagtgactaggactccacagtgaagatggttgactagtgacacagccccatctaaagaatccctttctgtatgtctgaaaacccattaaaataaagtcactgcaattggc

SEQ ID NO: 1078 - DNA, 2651 bp, Homo sapiens; identical to SEQ ID NO: 384

SEQ ID NO: 1079 - DNA, 2784 bp, Homo sapiens; identical to SEQ ID NO: 405

SEQ ID NO: 1080 - DNA, 5307 bp, Homo sapiens; identical to SEQ ID NO: 409

SEQ ID NO: 1081 - DNA, 1785 bp, Homo sapiens; identical to SEQ ID NO: 408

SEQ ID NO: 1082 - DNA, 3050 bp, Homo sapiens; identical to SEQ ID NO: 877

SEQ ID NO: 1083 - DNA, 6774 bp, Homo sapiens; identical to SEQ ID NO: 410

SEQ ID NO: 1084 - DNA, 976 bp, Homo sapiens
gaaggaaaaagagcaacagatccagggagcattcacctgccctgtctccaaacagccttgtgcctcacctacccccaacctcccagagggagcagctatttaaggggagcaggagtgcagaacaaacaagacggcctggggatacaactctggagtcctctgagagagagccaccaaggaggagcaggggagcgacggccggggcagaagttgagaccacccagcagaggagctaggccagtccatctgcatttgtcacccaagaactcttaccatgaagaccctcctactgttggcagtgatcatgatctttgggcctactgcaggcccatgggaatttggtgaatttccacagaatgatcaagttgacgacaggaaaggaagccgcactcagttatggcttctacggctgccactgtggcgtgggtggcagaggatcccccaaggatgcaacggatcgctgctgtgtcactcatgactgttgctacaaacgtctggagaaacgtggatgtggcaccaaatttctgagctacaagtttagcaactcggggagcagaatcacctgtgcaaaacaggactcctgcagaagtcaactgtgtgagtgtgataaggctgctgccacctgttttgctagaaacaagacgacctacaataaaaagtaccagtactattccaataaacactgcagagggagcacccctcgttgctgagtcccctcttccctggaaaccttccacccagtgctgaatttccctctctcataccctccctccctaccctaaccaagttccttggccatgcagaaagcatccctcacccatcctagaggccaggcaggagcccttctatacccacccagaatgagacatccagcagatttccagccttctactgctctcctccacctcaactccgtgcttaaccaaagaagctgtactccggggggtctcttctgaataaagcaattagcaaatca

SEQ ID NO: 1085 - DNA, 2221 bp, Homo sapiens; identical to SEQ ID NO: 388

SEQ ID NO: 1086 - DNA, 1628 bp, Homo sapiens; identical to SEQ ID NO: 401

SEQ ID NO: 1087 - DNA, 5043 bp, Homo sapiens; identical to SEQ ID NO: 478

SEQ ID NO: 1088 - DNA, 1106 bp, Homo sapiens; identical to SEQ ID NO: 844

SEQ ID NO: 1089 - DNA, 1967 bp, Homo sapiens; identical to SEQ ID NO: 423

SEQ ID NO: 1090 - DNA, 3365 bp, Homo sapiens
attggctgaggccgataccacgcgccccgatacccggcgcaggagccacctccctgagccccgcggaccacgcctcagtccgcctgcgctcctcagcctgacggtccgcctttcggggctcctcagccttgtcacccgctcttggttttccttttctcttcatctttggctcctttgaccactcgaagccgcgcagcgggttccagcggacctcacagcagccccagaagtggtgcgccaagcacagcctctgctcctcctggagccggtcgggaactgctgcctgccgccatcatgggctccgcaagatggcggcgggcctgctgagggacttgccttcttaaacttcgagggccggagcttccttaggaagtggttccctcctggtccctgtacttggtggggtgggcggggttcgtgggggcctcagcgtggggtgtggggcgtcctgaaggcatggccctgtagctgagggggctgggccggaagtgcctctggtcccctcgcgcctgtcagctgcgggggacttgctgatggcggctccctcgtgtggcggcgacagaaaagctcgcctgacgccatctttgccgcacgagtctactgcaaatcctgaaactccaaactcaaccatctccagagaggccagcacccagtcctcatcagctgcaaccagccaaggctatattttaccagaaggcaaaatcatgccaaacactgtttttgttggaggaattgatgttaggatggatgaaactgagattagaagcttctttgctagatatggttcagtgaaagaagtgaagataatcactgatcgaactggtgtgtccaaaggctatggatttgtttcattttttaatgacgtggatgtgcagaagatagtagaatcacagataaatttccatggtaaaaagctgaagctgggccctgcaatcaggaaacaaaatttatgtgcttatcatgtgcagccacgtcctttggtttttaatcatcctcctccaccacagtttcagaatgtctggactaatccaaacactgaaacttatatgcagcccacaaccacgatgaatcctataactcagtatgttcaggcatatcctacttacccaaattcaccagttcaggtcatcactggatatcagttgcctgtatataattatcagatgccaccacagtggcctgttggggagcaaaggagctatgttgtacctccggcttattcagctgttaactaccactgtaatgaagttgatccaggagctgaagttgtgccaaatgaatgttcagttcatgaagctactccaccctctggaaatggcccacaaaaggcaaacatctaattttaaatctgtggaccgaagcatacaaacggtggtatcttgtctgtttaatccagagaacagactgagaaactctgttgttactcaagatgactacttcaaggataaaagagtgcatcactttagaagaagtcgggcaatgcttaaatctgtttgatcctcctggcttatctagttacatgggaagttgctggttttgaatattaagctaaaaggtttccactattatagaaattctgaattttggtaaatcacactcaaactttgtgtataagttgtattattagactctctagttttatcttaaactgttcttcattagatgtttatttagaaactggttctgtgttgaaatatagttgaaagtaaaaaaataattgagactgaaagaaactaagatttatctgcaaggattttttaaaaattggcattttaagtgtttaaaagcaaatactgattttcaaaaaaatgtttttaaaaacctattttgaaaggtcagaattttgttggtctgaatacaaacatttcacttctccaacaagtacctgtgaacagtacagtatttacagtattgagctttgcatttatgatttctccagaaatttaccacaaaagcaaaatttttaaaactgcatttttaatcagtggaactcaatatatagttagctttattgaagtcttcttatctaaacccagcaaaacagattcaaagcgaacagtccaatcagtgggtcatatgtttattcaaaatattttatcttttagctagaatccacacatatatatcctatttgattagggtagtaattaggataactaaaattctgggcctaattttttaaagaatccaagacaaactaaactttactaggtacataagcttctcaatgagtcaccattcttcttttttgtaaaaacttttttctttgaaatgctaaacttggctgtatgtcaaattgtgcaaaatattggtattaaagaatgctgcaacttttttatgtctcttagaggttaatcagagtatctgaagggaattgtttttataaaaacattgaaatattagttacttgctataaatagatttagtctgttatatttccttttgtaaagtaaaatatgtccagaagagtcaaagtagttagttttggttatttctaaaccacaaaagttgtttaataagtatatcttaagaatgtgctagagttaaaagttagcattgtttctagattagctggtgtcttcattttacattgtgacaaacagctagagcatcagagcccttttgctataccacagtctttcgtttccagcctttgtcactagtctttgaggaggtttgctcctagaactggtgatataaagaatgaaagtagctgtatgagcagagcagttcaagggccaaaccctggaacggtagcaatgggatataatacctttctaagggaaaaagttgtatcagtaccatttgatctgccatggacatgagtttaaagcggctttctggcccttctttcagtgacttcttccctaaaatgtagaaattctaacttaatgtagttactgtgagccatattactagtgccccctagggtctataattccttaaaattttcattctgaatctgaaggagagagtcttttaactttagaattcccaagagggctttattacacctcagaaattgaaagcactatgaatttgtccatttaaaaatgatctgtagtttttttggtgctataacattctgacacatatcattctgtgattaaatctccagcttactataaatgatatctatattctaaagagctacttctaattattccaatatgaccttaaggaaaagtaagggaataaatttttgtctttgttggagtgaagcatttaaaagagtaagggtaaaaaagataaagtcctgaacctttcaaaatggaaaattaattctaaacttagaaatatgcttctgcctattgctgatactgtctttgcatacatgaataaaaataaagtttttttcttcaaaa

SEQ ID NO: 1091 - DNA, 4801 bp, Homo sapiens; identical to SEQ ID NO: 456

SEQ ID NO: 1092 - DNA, 2503 bp, Homo sapiens; identical to SEQ ID NO: 424

SEQ ID NO: 1093 - DNA, 1599 bp, Homo sapiens; identical to SEQ ID NO: 398

SEQ ID NO: 1094 - DNA, 2857 bp, Homo sapiens; identical to SEQ ID NO: 873

SEQ ID NO: 1095 - DNA, 4826 bp, Homo sapiens; identical to SEQ ID NO: 428

SEQ ID NO: 1096 - DNA, 6690 bp, Homo sapiens; identical to SEQ ID NO: 412

SEQ ID NO: 1097 - DNA, 4729 bp, Homo sapiens; identical to SEQ ID NO: 390

SEQ ID NO: 1098 - DNA, 2098 bp, Homo sapiens; identical to SEQ ID NO: 394

SEQ ID NO: 1099 - DNA, 4357 bp, Homo sapiens; identical to SEQ ID NO: 385

SEQ ID NO: 1100 - DNA, 7935 bp, Homo sapiens
ccctctttgttgcggtggccaatagacgcattcggaacatcggcggctgcccgggtgacttggttatatgtcacagaataacattcgagaatgggacatggaatgaggcgacggccccagcaagccccagcagccccagccccagccccaggcccagcagcagcagcagcagcccctgctctcccgccgcccggagaggctctgcagccatgaagccaaccgtcccgaggcaccgccggtaagcagggagcctccgcggagctcccgccgccgctcccccttggtgagtcctgccgcagcgagaggcatggagaaggccgcccccgcggggcgctgatcccctcgccgcgcccgcgcgcacacgccccccgccgccgccgccgctgccgccgccgcgcgcccccagtacctcgctccccgcccaggccccaccatgaccggctccgcggccgacactcaccgctgcccccaccccaaaggcgccaaaggcacccggtcccggagcagccacgcgcggcccgtgagcctcgccaccagcgggggctcagaggaggaggacaaagacggcggggtgctgttccacgtcaacaagagcggcttccccatcgacagccacacctgggagcgcatgtggatgcacgtggccaaggtgcaccctaaggggggagaaatggtgggcgccatcaggaacgccgccttcttggcaaagccttcaataccccaggtcccaaactacaggctgtcgatgacgatcccagactggctccaggcgatccagaattacatgaagaccctacagtatccttccaaccaaggtctgagcacacccagccaggggacaggcatggtgatcgcaagcctggtggcaaatctgtccccagctggtcatcaaaagctctctaagatataatcacacagggacccagttctttgaaattaggaaaatgagaccgctgagtgggttaatggaaacagcaaaagaaatgacccgagagtccttgcctatcaaatgccttgaagctgtcatcctgggcataacccacagctaaaacaagggtctagcttctcccacactttctgttccatttttcaccagactcccggctcttcagcctgagaggaatatggtgcagagaaactgtgatggcatcgacatattggtggtgatgaccacctcccttacacaatagtctcatccctgcacaattttatacattcgagcatcatgccattggaatcacccacaaccctttgaaattgtggggatagacccaggaacagcctttgagcctgatctgccacaatcagatagaagagcaaagatgctccgaagtcctatgggatggatggctgtaagggacagtggaaaaggaaacactgcaagacaggagcttgagagatggtcccaggcaagatcagttaggtccttgagcgctgtgctgagaaatgacttttttccaaaaggcaatgggcaacccagatgaaagctctgaagcagaggtgtggcatgcttaggtatatgctctagagaggtagttctccaaagcacaggctgaaggacagattgggaaaggctgggctggatcagcaaagcccgttgggagctgttacatgagggaatggtgaggctagactcatggccctggggatgggaatggatttcagggaatggttttaagagctatcaaggagatagaatgtataggacttgcaggccaaccagacgcaggagttaatgaggaaggagtcaacgtctccaggtttctgaattgggcaatcgactgcgggattagctggaggaatgagagtggcagagaaaggatatgcgtcaatgcagacctgaactaagacagtgccagtgaaggtggagggaagggatggaggcatacatcatcaccaccactaggggactgcttagatgggaggagttattggagaaaggcagtgactccacatttctggcttgcatgataatgccacaagggaagaacttcaaggagaggatcggatttagggaaagatgagctcagatttggacatgtgaaatttgaggtgccttgtgggatgtcggaatgaggtatttgcaatgtggagctcacaggggaatctgcactggaaatgcgaatttaggagctgtgattaggaggttgtgcttactgttcaataagtgaaaggagaaaaagatcaaagatgaaatcagtattttttggtctagtttggcacaaagagcccatgaaagagacttaagaaggaaagagaggtagaaagaaaaccaggagagaaaggggatggagaggtcagtggaaggacatgtggctcagaattagactggggacaggaggattggtctagtctgttttctgggtctcctggacatctttgtgggaaggagaatctctgtgcctctctgcagtctgtggaacacttgcagccctgatctgaaaccagattgaccacaggtgccttggctgacatttgaaaaatggaaacttgaaccttactgaggcccctccccaaccctcttgtcatcctcctccctgtttcccacaaaggagatgaaacatgtgcctggggaacccagcaggaagctgggaatgggggtcggggcagcagatggctcagggccccaactctttagtggcaggagtcagccacagctgttcagcgaagcctcctgcaagtttaatgggggcagatgattggctggggatttgctggtggaagagatcaacgaaggggaacacaagcccaggcccttcatggggtagacaagctaacttcagactctttgttgaggggtgtctgagtgcctctggatttaggtcattgaaatgaccacctcccttacacaatagtctcatccctgcacaattttatacatttgcgcatcatgccactggaatcacccacgaccttttggaattgtggggatagacccaggaacagcctttgagcctgtccaaatcagagacagtgtgctcgtggttttcctttgttcttatccttctgacatttcagaaaagtgcaggaaggtggagagcttcagttcacgctgctgaactcagggaaatttgactcttgcacacagacaggaaacacagatccgaattcttcttcttttttttttttttttgagacggagtcttggtctgtcgcccaagctggagtgcagcgcaccactgcactccagcctgggtgacagagtgagactgtgtctcaaaaaaatgaaaaaaaaaagaccaccattcctccccagaaatgaaaccccatacccgttaaaaagtactccccatttcccccctccagcccctgcccaccaccgttctactctctgtctgtatgcacttgctactccaggtaccgcagatgagtggaatcataccatatttgtccttttgtattaggctgatttcactcagcatgtcttcaaggctcattctgcacattgcagaatttccctcccttatgaggctgaataaattctattacatgtatacactactacttaaccaatgggcagccttccattgagcggttccccatcagctttaaaacctacttctcaggaaactactttcaccacgttgtgctggggatttactgcaatggccgctatggctcattgggcatgagccgcagggctgagctgatggacaagccattgacttttcggactctgagtgacctcatctttgactttgaggactcttacaagaaatacctgcacacagtcaagaaggtcaagattgggctgtacgtcccccatgagcctcatagcttccagcccattgagtggaagcagctggtcctcaacgtctcaaagatgctgagggctgacataaggaaggagctggagaaatatgccagggacatgagaatgaagggcttgtgcagtcactaagagaaaaggattatgctgacttcaggcctggctatgtttagcacttgtggacttgtcatcttcactctgcaggacctggagtggagattcctgatcaattaaaaccattctgtcatatgtgtgggatgggagcatcagaggaagaacaggctggtttctgaggcaatagagatgggactttgccttcgtgaggagaggaacttgccaagcaaacaaacacagccccggggagactgaggcattgggctgtgttcctctctctacacggcacagggagcacaatgtgaccatctgtatatctgtcttggaagtggtgcccttgctgcttgacagtacaggacgagagaggaatgtgtgtgtctccagcctccttttttagaagtcttcctgctcaatgccttctaaaccatggcatcatgattgggctggggggtggaatgtggtgctagaagaagacctgagggtggaggtcccttaggaaccagggtgattaactcctcacatctccttcagatcctgaaacctgcaagtgcccactctccgacccaagtgagaagccggggaaaatccctgtcccccagaaggagacaggcaagccccccgaggaggctcggccggcgagagaagtcccctgaggccagtgatcccacatctacttcttagaccaaaataacccacttaagcaatgacagattggagatgctggggatgcccaaattcaccagcgataatccgctggcaaatatttgaactatagccatcctgggaaaaaatactgcttttcttaataatagcagcatgctgtgtcacccagcctcttgccatgctggaaccatgtggcacagtgcacagggggcttggttgaatcccaactgtgccacgtgttagctgtgcagctgggcacatccttcctcctcggggagccttggtttcttcatccataaaagagtatcaaatgctgcctgcactgcctgaaaagaaggtggctgatctgagcactctgaatgaagtgggctatcaaatccgaatttagccaagccataccggccagcaagagggtttctgtggtgcttctctctgcactttacccagcatcttcaggaggaactgcaactatttattaagaacttgtgaattttatttttaaggattcacctggaaatagaatctgagtgggtggtaaccattagctttaaaaaattcactaaaaggcaccatgaaaaggctgaagtaataagccccactggggttggactatgtccctcactcaagatcttaaggataaccgtaactgaagttttatatttttccatttacctactttcttttacttgctttgaacattatgcctcaccaatagtaaatgttcatgaaataatctcttgaacttttggtatagtaaggtaactctaacagtattactgtctttttcagcaataacagaaagcaaaaatgggtgggttttttttaagcagttattacctcagcattttgacatcagatatgcaaacttaatggcgttttgtttttttatattctatttgtattctttccccagtatttcccatggggatctccacaagtttggagttttttcctggtgcacacacgtgaggagatttaaggtactatatgcaagtgttttactaaaaagcactgaaattcttctggcaatacaagaaccattttcaggatcttggagttacttccttcttaatctttcttaaagcattcactgatgtttttgttttttcaaaatgaaacaaaaatatcacattgagaagctagtctatgttctgtcactaacatttaaactttgcagactctaacaaaaagcacaagaggtcacgtactattatacaaatttagcggtactggatttacctctgacattaacacactcaggcagagaccaggagtgatcagcaggtcttcagaaccaaaaaacctttctgttcacatttcatctgatttttaaactgaggcaggctttgattcttctgaaggatgccaagaatcaaactaagggaggactcactgttaaagatgtgttctgatgtcttatattaagaccaaatgtgacatgatgtgattatcttccagtactttgcttttaggtaccatttcatgacattttaggaatgagtattggaaaatataaagaattagaaaagcagcactttttttttaatggaaaagtcttcggtccagtgttacaccttatagtgtaattcagtccctaagcacagaatgaatgtctggcctgcatatggtagttacagtgtaacctctggctgcagaccacacaggacaaccctaacagcctagtcttgtatggtgtaaatatcaagagtacagcttcaatttcatttgctttatcttagcaacaatgccaactcaggagagcagacggccgatttcagtgaagtctggtagtcaacagatgttatttcagtctcagtgcatctcctctggctttctttgactgaaggtgtttataggaaggaagttaaaaaaaaaaaaagctcattgagattctttaccaattctttacaagatttctgggggtgacagggaaagcaaaaggacttcaaagcaaaagggtgcacaagagcttacttcaccctgaaaatcagtattattaatgaaaagtactgttttcttaaagaagtcgaatgtcctttagatgaacaagaccaagtatacatctccattagattaaaatgtagcacagggttaaaaattatcagtttaatctctttaagaacagtattatcagagtttaaaatgagttagctctgtttatctacacacagcaaacccattcgcagcctcttggccacatgtattcagatgtttgaaatagtgaatcatttcattttcattctaaaacaatactgacttagccatataccttctgtttgtcaatctgaaacttgcttacatctaataagtagacctcttataacactgcaaccattctaagagttggaatttatttttgccaagtattaagtactgttacatctaaaatacagaatgtcaaatggttgcatagcttgtttcccacaacaaggaggaaaagaacaggaatacaaactctgtaatatgctgataaagaagccttagaactgccaactggcttgatggttcaattagtaagctaatttctcccacacccgctccttgatttttagactaattttcccaaagcaaggtttagtcacacaaacttgaaagtacatttaaaatgttcttagttgtcatcctacttttattgcctatggaatatgctaatttctaaaaaaaatacgggagaggcaccaaacccctaaattctagtgcaataatttaaaaaacaaaaaacaaaacaaaacaaaaaacatgttatatgcacccccctcccaaagctgattttaagactggctagaattcaaaatataaaaaataaaactatgaagtgatttgaaatcggttttaaaaagttgttagtgcaagagaaattttatgtttaagccatcatggcaatatatgcaaagtttaaatgaatgacagaaatcttgattttagactgtatgttgtgctgttttgagtacactttatttcggagatatttagtattttctatacactctgaaatcatgagcatttcactttttctaagtcaattatttcataaggattttattaatagatattggtaaatagaactttggaaatcttaattcagaattcttactatacctgagtcttttgtaagctatagttttatgtacaaccttgtacagtttttttgacatacaattcagaactttgtttattctcttggactttgttctggccaatacattttttttaaatctttaagaagaactgtgattgttttagtgggtatttttctaattaaatgaaaacttgtataatggtattttagagaatgccagtaagtgcatgtttcaagttaatgtttttctcatcacttgtatgtttctaacacagcatgggactttaataaaaccatcctggaaacttaa

SEQ ID NO: 1101 - DNA, 5045 bp, Homo sapiens; identical to SEQ ID NO: 869

SEQ ID NO: 1102 - DNA, 3550 bp, Homo sapiens; identical to SEQ ID NO: 425

SEQ ID NO: 1103 - DNA, 461 bp, Homo sapiens; identical to SEQ ID NO: 426

SEQ ID NO: 1104 - DNA, 1849 bp, Homo sapiens; identical to SEQ ID NO: 396

SEQ ID NO: 1105 - DNA, 2075 bp, Homo sapiens; identical to SEQ ID NO: 507

SEQ ID NO: 1106 - DNA, 4765 bp, Homo sapiens
acccactcccgctgccccgtccggcccgcgccgcttcctcgcagcagctgctcccggctccgcggccgcagcccgcgtggacgctccgagcgccccccgacggacgggaccggctccctggcggtcgggcgagcgggcggcaacgctgcccggccggcagcgctggggttaagtggcccaagtaaacctagctcggcgatcggcgccggagattcgcgagcccagcgccctgcacggccgccagccggcctcccgccagccagccccgacccgcggctccgccgcccagccgcgccccagccagccctgcggcaggaagggagagagcaaacaaaggggtcaggagggaaaataatgcactggcttcctgagcccctgcagaggctgagcagggagagggggccagggccagaggggacagaggctggcggcagacgggccgggacaggcaggtcctaaatggcattgtttgaaggggccggctaattgcacagagcagtctgagcctgagaccccagccctggcctccccactctgtcctgggtgctggcgtctgagccttcgggacagcctgtccacatggaaccaagtcctgagcctccaagcttgtaagaatgcatcctggggccttggcctgagaacacagagccgaaagcatgaagggagacaccaggcatctcaatggagaggaggacgccggcgggagggaagactcgatcctcgtcaacggggcctgcagcgaccagtcctccgactcgcccccaatcctggaggctatccgcaccccggagatcagaggccgaagatcaagctcgcgactctccaagagggaggtgtccagtctgctaagctacacacaggacttgacaggcgatggcgacggggaagatggggatggctctgacaccccagtcatgccaaagctcttccgggaaaccaggactcgttcagaaagcccagctgtccgaactcgaaataacaacagtgtctccagccgggagaggcacaggccttccccacgttccacccgaggccggcagggccgcaaccatgtggacgagtcccccgtggagttcccggctaccaggtccctgagacggcgggcaacagcatcggcaggaacgccatggccgtcccctcccagctcttaccttaccatcgacctcacagacgacacagaggacacacatgggacgccccagagcagcagtaccccctacgcccgcctagcccaggacagccagcaggggggcatggagtccccgcaggtggaggcagacagtggagatggagacagttcagagtatcaggatgggaaggagtttggaataggggacctcgtgtggggaaagatcaagggcttctcctggtggcccgccatggtggtgtcttggaaggccacctccaagcgacaggctatgtctggcatgcggtgggtccagtggtttggcgatggcaagttctccgaggtctctgcagacaaactggtggcactggggctgttcagccagcactttaatttggccaccttcaataagctcgtctcctatcgaaaagccatgtaccatgctctggagaaagctagggtgcgagctggcaagaccttccccagcagccctggagactcattggaggaccagctgaagcccatgttggagtgggcccacgggggcttcaagcccactgggatcgagggcctcaaacccaacaacacgcaaccagtggttaataagtcgaaggtgcgtcgtgcaggcagtaggaaattagaatcaaggaaatacgctggtacccaggcatagcatggtcttgtcctgggcccgcattctctctggaccctcctaccaagccacggctgcagtctaattacctttcacagagaacaagactcgaagacgcacagctgacgactcagccacctctgactactgccccgcacccaagcgcctcaagacaaattgctataacaacggcaaagaccgaggggatgaagatcagagccgagaacaaatggcttcagatgttgccaacaacaagagcagcctggaagatggctgtttgtcttgtggcaggaaaaaccccgtgtccttccaccctctctttgagggggggctctgtcagacatgccgggatcgcttccttgagctgttttacatgtatgatgacgatggctatcagtcttactgcactgtgtgctgcgagggccgagagctgctgctttgcagcaacacgagctgctgccggtgtttctgtgtggagtgcctggaggtgctggtgggcacaggcacagcggccgaggccaagcttcaggagccctggagctgttacatgtgtctcccgcagcgctgtcatggcgtcctgcggcgccggaaggactggaacgtgcgcctgcaggccttcttcaccagtgacacggggcttgaatatgaagcccccaagctgtaccctgccattcccgcagcccgaaggcggcccattcgagtcctgtcattgtttgatggcatcgcgacaggctacctagtcctcaaagagttgggcataaaggtaggaaagtacgtcgcttctgaagtgtgtgaggagtccattgctgttggaaccgtgaagcacgaggggaatatcaaatacgtgaacgacgtgaggaacatcacaaagaaaaatattgaagaatggggcccatttgacttggtgattggcggaagcccatgcaacgatctctcaaatgtgaatccagccaggaaaggcctgtatgagggtacaggccggctcttcttcgaattttaccacctgctgaattactcacgccccaaggagggtgatgaccggccgttcttctggatgtttgagaatgttgtagccatgaaggttggcgacaagagggacatctcacggttcctggagtgtaatccagtgatgattgatgccatcaaagtttctgctgctcacagggcccgatacttctggggcaacctacccgggatgaacaggcccgtgatagcatcaaagaatgataaactcgagctgcaggactgcttggaatacaataggatagccaagttaaagaaagtacagacaataaccaccaagtcgaactcgatcaaacaggggaaaaaccaacttttccctgttgtcatgaatggcaaagaagatgttttgtggtgcactgagctcgaaaggatctttggctttcctgtgcactacacagacgtgtccaacatgggccgtggtgcccgccagaagctgctgggaaggtcctggagcgtgcctgtcatccgacacctcttcgcccctctgaaggactactttgcatgtgaatagttccagccaggccccaagcccactggggtgtgtggcagagccaggacccaggaggtgtgattcctgaaggcatccccaggccctgctcttcctcagctgtgtgggtcataccgtgtacctcagttccctcttgctcagtgggggcagagccacctgactcttgcaggggtagcctgaggtgccgcctccttgtgcacaaatcagacctggctgcttggagcagcctaacacggtgctcattttttcttctcctaaaactttaaaacttgaagtaggtagcaacgtggctttttttttttcccttcctgggtctaccactcagagaaacaatggctaagataccaaaaccacagtgccgacagctctccaatactcaggttaatgctgaaaaatcatccaagacagttattgcaagagtttaatttttgaaaactggctactgctctgtgtttacagacgtgtgcagttgtaggcatgtagctacaggacatttttaagggcccaggatcgttttttcccagggcaagcagaagagaaaatgttgtatatgtcttttacccggcacattccccttgcctaaatacaagggctggagtctgcacgggacctattagagtattttccacaatgatgatgatttcagcagggatgacgtcatcatcacattcagggctattttttcccccacaaacccaagggcaggggccactcttagctaaatccctccccgtgactgcaatagaaccctctggggagctcaggaaggggtgtgctgagttctataatataagctgccatatattttgtagacaagtatggctcctccatatctccctcttccctaggagaggagtgtgaagcaaggagcttagataagacaccccctcaaacccattccctctccaggagacctaccctccacaggcacaggtccccagatgagaagtctgctaccctcatttctcatctttttactaaactcagaggcagtgacagcagtcagggacagacatacatttctcataccttccccacatctgagagatgacagggaaaactgcaaagctcggtgctccctttggagattttttaatccttttttattccataagaagtcgtttttagggagaacgggaattcagacaagctgcatttcagaaatgctgtcataatggtttttaacaccttttactcttcttactggtgctattttgtagaataaggaacaacgttgacaagttttgtggggctttttatacactttttaaaatctcaaacttctatttttatgtttaacgttttcattaaaattttttttgtaactggagccacgacgtaacaaatatggggaaaaaactgtgccttgtttcaacagtttttgctaatttttaggctgaaagatgacggatgcctagagtttaccttatgtttaattaaaatcagtatttgtcta

SEQ ID NO: 1107 - DNA, 5752 bp, Homo sapiens; identical to SEQ ID NO: 447

SEQ ID NO: 1108 - DNA, 1524 bp, Homo sapiens
ctggtggtgatggtgcccgtccccctctccgcaggtctgtgacaagcagggaacaaggcaacggacggcgcaacccagccccggctgacggacgctggcgactcagacatggacagtagctgccacaacgcgactaccaaaatgttagcgactgctccagctcggggcaacatgatgagcacgtccaaacccttggctttctccattgaacgaatcatggcgcgcaccccagagcccaaggccctgccagtcccccacttcctgcagggagccttacccaagggggaacccaagcactctctgcatctcaactcgtcgatcccctgcatgatccccttcgtgcctgtggcctacgacacgagccccaaggcaggagtgacgggctccgagccgcggaaggccagtctggaggccccggcggcgcccgcggcggtgccctcggctcccgcattcagctgcagcgacctgctcaactgcgcactgagtctcaagggcgacctggcccgcgacgcgctgccgctgcagcagtacaagctggtaaggccgcgtgtggtcaaccactcttcattccacgccatgggcgccttgtgctacctgaaccgaggtgacggcccatgccacccggcagccggcgtgaacatccacccggtggcctcctacttcctcagttcccctttgcacccgcagccaaaaacgtatttagccgaaaggaataaactggtggtcccggcggtggagaaatacccttctggagtagctttcaaagacctgtcccaggctcagctgcagcattacatgaaagaaagcgcccagcttctgtcggaaaaaatcgcgttcaaaacctcggatttcagccgaggctctcctaatgccaagcccaaagttttcacttgcgaagtctttaatgcgcactataacttaacccgtcacatgccagtgcacacaggagccagacccttcgtttgcaaagtgtgcggaaaaggtttcaggcaagcaagcaccctgtgcaggcacaagatcattcacacgcaggaaaaacctcacaaatgtaaccagtgtggcaaagcatttaatagaagttccactttaaacactcatacccgaatacacgcgggctacaaaccgtttgtgtgtgaattctgtggcaaagggtttcatcaaaaagggaattacaaaaaccacaagttgacccacagcggggagaagcagttcaagtgcaatatctgcaacaaggctttccaccaggtttacaacctcaccttccacatgcacacccacaacgacaagaagcctttcacctgccccacgtgcggcaagggtttctgcaggaactttgacctcaagaagcatgtccgcaagctgcacgacagcagcctggggctggcccgcacgccagctggcgaaccaggcactgaaccgccgcccccgctaccgcagcagccgccgatgacgctgcctcctctgcagccgccgctgccaaccccggggcccctgcagcccgggctccaccagggccaccagtga

SEQ ID NO: 1109 - DNA, 70 bp, Homo sapiens
gggcaatgatgtaaaggttttacgactgacctttgtaactatgaagttttctacacttgacctgagctca

SEQ ID NO: 1110 - DNA, 518 bp, Homo sapiens; identical to SEQ ID NO: 416

SEQ ID NO: 1111 - DNA, 2208 bp, Homo sapiens; identical to SEQ ID NO: 872

SEQ ID NO: 1112 - DNA, 7453 bp, Homo sapiens; identical to SEQ ID NO: 464

SEQ ID NO: 1113 - DNA, 2365 bp, Homo sapiens; identical to SEQ ID NO: 444

SEQ ID NO: 1114 - DNA, 3417 bp, Homo sapiens
caggctggaagcaagacctgacctgagggagagttcttcagccttaacctaaggtctcatactcggagcactatgacatcgccccagctagagtggactctgcagacccttctggagcagctgaacgaggatgaattaaagagtttcaaatcccttttatgggcttttcccctcgaagacgtgctacagaagaccccatggtctgaggtggaagaggctgatggcaagaaactggcagaaattctggtcaacacctcctcagaaaattggataaggaatgcgactgtgaacatcttggaagagatgaatctcacggaattgtgtaagatggcaaaggctgagatgatggaggacggacaggtgcaagaaatagataatcctgagctgggagatgcagaagaagactcggagttagcaaagccaggtgaaaaggaaggatggagaaattcaatggagaaacagtctttggtctggaagaacaccttttggcaaggagacattgacaatttccatgacgacgtcactctgagaaaccaacggttcattccattcttgaatcccagaacacccaggaagctaacaccttacacggtggtgctgcacggccccgcaggcgtggggaaaaccacgctggccaaaaagtgtatgctggactggacagactgcaacctcagcccgacgctcagatacgcgttctacctcagctgcaaggagctcagccgcatgggcccctgcagttttgcagagctgatctccaaagactggcctgaattgcaggatgacattccaagcatcctagcccaagcacagagaatcctgttcgtggtcgatggccttgatgagctgaaagtcccacctggggcgctgatccaggacatctgcggggactgggagaagaagaagccggtgcccgtcctcctggggagtttgctgaagaggaagatgttacccagggcagccttgctggtcaccacgcggcccagggcactgagggacctccagctcctggcgcagcagccgatctacgtaagggtggagggcttcctggaggaggacaggagggcctatttcctgagacactttggagacgaggaccaagccatgcgtgcctttgagctaatgaggagcaacgcggccctgttccagctgggctcggcccccgcggtgtgctggattgtgtgcacgactctgaagctgcagatggagaagggggaggacccggtccccacctgcctcacccgcacggggctgttcctgcgtttcctctgcagccggttcccgcagggcgcacagctgcggggcgcgctgcggacgctgagcctcctggccgcgcagggcctgtgggcgcagatgtccgtgttccaccgagaggacctggaaaggctcggggtgcaggagtccgacctccgtctgttcctggacggagacatcctccgccaggacagagtctccaaaggctgctactccttcatccacctcagcttccagcagtttctcactgccctgttctacgccctggagaaggaggagggggaggacagggacggccacgcctgggacatcggggacgtacagaagctgctttccggagaagaaagactcaagaaccccgacctgattcaagtaggacacttcttattcggcctcgctaacgagaagagagccaaggagttggaggccacttttggctgccggatgtcaccggacatcaaacaggaattgctgcaatgcaaagcacatcttcatgcaaataagcccttatccgtgaccgacctgaaggaggtcttgggctgcctgtatgagtctcaggaggaggagctggcgaaggtggtggtggccccgttcaaggaaatttctattcacctgacaaatacttctgaagtgatgcattgttccttcagcctgaagcattgtcaagacttgcagaaactctcactgcaggtagcaaagggggtgttcctggagaattacatggattttgaactggacattgaatttgaaaggtgcacttacctaaccattccgaactgggctcggcaggatcttcgctctcttcgcctctggacagatttctgctctctcttcagctcaaacagcaacctcaagtttctggaagtgaaacaaagcttcctgagtgactcttctgtgcggattctttgtgaccacgtaacccgtagcacctgtcatctgcagaaagtggagattaaaaacgtcacccctgacaccgcgtaccgggacttctgtcttgctttcattgggaagaagaccctcacgcacctgaccctggcagggcacatcgagtgggaacgcacgatgatgctgatgctgtgtgacctgctcagaaatcataaatgcaacctgcagtacctgaggttgggaggtcactgtgccaccccggagcagtgggctgaattcttctatgtcctcaaagccaaccagtccctgaagcacctgcgtctctcagccaatgtgctcctggatgagggtgccatgttgctgtacaagaccatgacacgcccaaaacacttcctgcagatgttgtcgttggaaaactgtcgtcttacagaagccagttgcaaggaccttgctgctgtcttggttgtcagcaagaagctgacacacctgtgcttggccaagaaccccattggggatacaggggtgaagtttctgtgtgagggcttgagttaccctgattgtaaactgcagaccttggtgttacagcaatgcagcataaccaagcttggctgtagatatctctcagaggcgctccaagaagcctgcagcctcacaaacctggacttgagtatcaaccagatagctcgtggattgtggattctctgtcaggcattagagaatccaaactgtaacctaaaacacctacgcctctggagctgctccctcatgcctttctattgtcagcatcttggatctgctctcctcagcaatcagaagcttgaaactctggacctgggccagaatcatttgtggaagagtggcataattaagctctttggggttctaagacaaagaactggatccttgaagatactcaggttgaagacctatgaaactaatttggaaatcaagaagctgttggaggaagtgaaagaaaagaatcccaagctgactattgattgcaatgcttccggggcaacggcacctccgtgctgtgactttttttgctgagcagcctgggatcgctctacgaattacacaggaagcgggattcgggtctctaagatgtcttatgaatgcaggtcagagggtcacatgttaacactagagtctgtcgagaggtaggatttgacactggttttctcactatttttgggagattctgcacgagtcacgcacccccttcacatgacgctatgtactttctcacagggataataaagttagagcactctcgttgca

SEQ ID NO: 1115 - DNA, 5949 bp, Homo sapiens; identical to SEQ ID NO: 861

SEQ ID NO: 1116 - DNA, 2271 bp, Homo sapiens; identical to SEQ ID NO: 400

SEQ ID NO: 1117 - DNA, 404 bp, Homo sapiens; identical to SEQ ID NO: 432

SEQ ID NO: 1118 - DNA, 1995 bp, Homo sapiens
aaaacagccggcgcgccgcgcgagtgcagtctgggtctggagcctgagccctgcggaacctcggcgctcggccccaccccgcccgtacctgcacttatttattgttgttatttcttaccgcggagccccgcagtcgggtcctcccgcccgctcccgcgcagcgctagcattctccagtccctcagtcccttcccgcgcggtgcgccgcagccgaggcgatgcgcctcattcagaacatgtgcaccatcgccgagtaccccgcgccgggcaacgccgcggcctccgactgctgtgtgggcgccgccggccgccgcctggtcaagatcgccgtggtgggcgccagcggcgtgggcaagaccgcactggtggtccggttcctcaccaaacgattcatcggtgactatgaaagaaatgcaggtaatctctatactagacaagttcagatagaaggtgaaaccctggctcttcaggttcaagacactccaggtattcaggtccatgagaacagcctgagctgcagtgaacagctgaataggtgcattcgctgggcagatgctgtggtgatcgttttctccatcactgactacaagagctatgaactcatcagccagctccaccagcacgtgcagcagctacacctgggcacccggctgcctgtggtggtcgtggccaacaaagctgacctgttgcacatcaaacaggttgaccctcagcttggactgcagctagccagcatgctaggctgctcattctatgaagtgtctgtcagtgaaaattataatgatgtctacagcgccttccacgtcctctgtaaagaggtcagtcacaaacagcagcctagcagtacacccgagaagcgaagaacctccctcattcccaggcccaagtcacccaacatgcaggacctgaagaggaggtttaagcaagccctctctgccaaagtgaggactgtcacctccgtctgaagcaggaggagcactcaagggggtttggtcttcccaggaagagggcctgaggttctcctagtgcaggaacgttgaatattggcaatgattcctggttccagaaagggctggagcagaagggccaagagggcctgtggaactgctacagaaaaggaagtgttgttctgagcagggggacaggattgatgaggcttgaaagagcccactgagccactctctgaatatgtgaaatgtactctgtgtcttttcctttagagtggggagggggcataatcgtttcggtttctgcattcaactaccttgtaaatggtggtccgttgcagtttcaccaaatgtattgatgtgatttacagtgggaatgaaagaacagattaagcattgataggctttcttttttcccccttttttcttttttctcttttcttctttcttttcctctttttccccaagaggaagaattgcttttctcttaccagtatgatttgtaactctggaacactattcttacagaatgcctttctaacctgaaggatacccagatttctttctttatgtacaagatggaaaatcccctacccctcaaaaacaggttgagtttatgggccagaatattttgtataccagacattggtaagctctcatggtttacaggaaggctctggttccccctcacaggatgagcatgctcagttgggcgtgtgtggaggagctgtgaacttcacgctcttcaaccccagactttgactgtatagttttttgtttttttaactgttccatcaggaaaaaaatgtgtcagttgattttggtgtgacttgtgtaaatggttcatggcaatgacgttgggttgcttcctaggcctggctgagttgtgcctaagggtggctgaaatactaaaacacttatcttacagcaagtgaacaggggctacctgccacatcccctccacagatgcactttaaaaagccactcatgctttggcttaaactgtaattaatttattttatgtacaataaatcgcatttgaaaaaga

SEQ ID NO: 1119 - DNA, 3616 bp, Homo sapiens; identical to SEQ ID NO: 849

SEQ ID NO: 1120 - DNA, 1828 bp, Homo sapiens
acagagcttcaaaaaaagagcgggacagggacaagcgtatctaagaggctgaacatgaatccacagatcagtcagaaatccgatggagcggatgtatcgagacacattctacgacaactttgaaaacgaacccatcctctatggtcggagctacacttggctgtgctatgaagtgaaaataaagaggggccgctcaaatctcctttgggacacaggggtctttcgaggccaggtccaggtgtatttcaagcctcagtaccacgcagaaatgtgcttcctctcttggttctgtggcaaccagctgcctgcttacaagtgtttccagatcacctggtttgtatcctggaccccctgcccggactgtgtggcgaagctggccgaattcctgtctgagcaccccaatgtcaccctgaccatctctgccgcccgcctctactactactgggaaagagattaccgaagggcgctctgcaggctgagtcaggcaggagcccgcgtgacgatcatggactatgaagaatttgcatactgctgggaaaactttgtgtacaatgaaggtcagcaattcatgccttggtacaaattcgatgaaaattatgcattcctgcaccgcacgctaaaggagattctcagatacctgatggatccagacacattcactttcaactttaataatgaccctttggtccttcgacggcgccagacctacttgtgctatgaggtggagcgcctggacaatggcacctgggtcctgatggaccagcacatgggctttctatgcaacgaggctaagaatcttctctgtggcttttacggccgccatgcggagctgcgcttcttggacctggttccttctttgcagttggacccggcccagatctacagggtcacttggttcatctcctggagcccctgcttctcctggggctgtgccggggaagtgcgtgcgttccttcaggagaacacacacgtgagactgcgcatcttcgctgcccgcatctatgattacgaccccctatataaggaggcgctgcaaatgctgcgggatgctggggcccaagtctccatcatgacctacgatgagtttgagtactgctgggacacctttgtgtaccgccagggatgtcccttccagccctgggatggactagaggagcacagccaagccctgagtgggaggctgcgggccattctccaggtgagggcttcctccctctgcctggtgccccatcggcctccccctcctccccgctcccctgtgccttgccttcccctctgctcagagcctcctctgggttccctgctccccacagggcgcccagctccgtccctccctttccttctcacagcctccttctctttcccacctcccgcatccctccctcctctcccgtcattgtcactgtccccaggccacctccctgtgccctctttccactctctcacctcctgctccattcaacccccctgctcttccagaatcagggaaactgaaggatgggcctcagtctctaaggaaggcagagacctgggttgagcagcagaataaaagatcttcttccaagaaatgcaaacagaccgttcaccaccatctccagctgctcacagacaccagcaaagcaatgtgctcctgatcaagtagattttttaaaaatcagagtcaattaattttaattgaaaatttctcttatgttccaagtgtacaagagtaagattatgctcaatattcccagaatagttttcaatgtattaatgaagtgattaattggctccatatttagactaataaaacattaagaatcttccataattgtttccacaaacacta

SEQ ID NO: 1121 - DNA, 7346 bp, Homo sapiens
cttctccctcctgccgccttatgaacagggtgactgtttccccatcggccatgattttaagtttcctgaggcctccccagtcatgctgaactatactgttcctaagagcatctgccccagtcaacttctcatccacagatattaatctcagtcaacctccagatttttagacatattttgaaagtctttcatcaccagatttcaaaggtgttgatagatatctatttttaaacatggaaagatggtggtgcaatggccaatcctgggctcccagctggagaggcggaggcagctccagggggctggaagtggaagcgcagcggcagaaggagagggagagagaaagagagagaggctaattaaaaaaggatactccgagggaagagagcaagggcggtgcgccgccaaggaccaactagcggcggagcttcgatcttgcctaggcgcggagagctcccaacctgggctggaaccttgcccagcacaggtggctgctacaccccatgtaaaaagcggaaaataaaatgaagattttccagcgcaagatgcggtactggttgcttccaccttttttggcaattgtttatttctgcaccattgtccaaggtcaagtggctccacccacaaggttaagatataatgtaatatctcatgacagtatacagatttcatggaaggctccaagagggaaatttggtggttacaaacttcttgtgactccaacttcaggtggaaaaactaaccagctgaatctgcagaacactgcaactaaagcaattattcaaggccttatgccagaccagaattacacagttcaaattattgcatacaataaagataaagaaagcaagccagctcaaggccaattcagaattaaagatttagaaaaaagaaaggatccaaagcccagagtcaaagttgtggacagaggaaatgggagtagaccatcttcaccagaagaagtgaaatttgtctgtcaaactccagcaattgctgacattgtaatcctggtcgatggttcatggagtattggaagattcaacttcagactggttcggcatttcttggaaaacctggttacagcattcgatgtgggctcagagaagacacgaattggtcttgcacagtatagtggtgaccccagaatagaatggcacttgaatgcatttagcacaaaagatgaagtgattgaagctgtccgaaacctcccatataaaggaggaaatacactaacaggtcttgctttgaactacatttttgaaaatagcttcaaaccagaagcaggatcaaggactggagtatccaaaattggcattttaatcacagatggaaaatcccaagatgacattattccaccatctagaaatcttcgtgagtctggtgtagaactgtttgccataggggtgaaaaacgcggatgtgaatgagctgcaggagatcgcctctgaaccagacagcactcatgtgtacaatgttgccgaattcgatctgatgcacacagttgtggagagtctgaccaggactctctgctctagagtggaagaacaggacagagaaattaaagcctcagcccatgccatcactgggccgcctacggagttgattacttctgaagtcactgccagaagctttatggttaactggactcatgccccaggaaatgtggaaaaatacagagttgtgtattatcctaccaggggtggaaaaccagacgaggtggtggtagatggaactgtatcttccacagtgttgaaaaacttgatgtctttaactgaatatcagatagcagtctttgcaatctatgcccacactgctagtgaaggcctacggggaactgaaactacacttgctttaccgatggcttctgaccttctactgtacgacgtgactgagaacagcatgcgagtcaaatgggatgcagtgcctggggcctcaggttacctgatcctttatgctcctctaacagagggcctggctggggatgaaaaagagatgaaaattggagagacccacacagatattgaattgagtgggttgttgcccaatacagaatacacagtcacagtttatgccatgtttggagaagaggccagtgatcctgttacgggacaagaaacaacatcaccttaattattaagagattcactaactcctacaagatctttattgtcaaagaatcagtatgtattgaattaatgaaagaactgggctttgaggttaggaaacatcatgcttcgtggctatggctgtggctttaagtccaccaagaaacctgagaatctccaatgttggctctaacagtgctcgattaacctgggacccaacttcaagacagatcaatggttatcgaattgtatataacaatgcagatgggactgaaatcaatgaggttgaagtcgatcctattactaccttccctctgaagggcttgacacctctcacagagtatactattgctattttctccatctatgatgaaggacagtcagagcctctgactggagtttttaccaccgaggaagttccagcccagcaatacttagaaattgatgaggtgacgacagacagttttagggtgacctggcatcccctctcagctgatgaagggctacacaaattgatgtggattccagtctatggggggaagactgaggaggttgtcctgaaagaagagcaggactcacatgttattgaaggcctggagcccggtacggagtatgaagtttcactattggccgtacttgatgatggaagcgagagtgaggtggtgactgctgtcgggaccacacttgacagtttttggacagaaccagctacaaccatagtgcctaccacatctgtgacttcagttttccagacgggaatcagaaacctagttgtaggtgatgaaactacttctagcctgcgggtaaaatgggacatttctgacagcgatgtgcagcagtttagggtgacctacatgacagctcaaggggaccctgaggaagaagtcataggaacggtctgtataaattcaactgactagaaactctgcagatgttactaacacagctaataagactgtcttcggagatcaatgcaaactttactgctcttttctcagtgactctgccatctccagaaactaatgttctctgttaatctgactccactactggcttcttagtgacctttataaatccaaaacttgctccatgtacaacttgctccaagttaataacctctgaacattgtttcaaatattgcttctcttctgctgccttgcacctgttcgagcaccaaagttgggtcataaaaggccatatgcacttgtgtctgtatatatgtatgtatagacatgtataaaagtttaatatagaaaataatttcttctgcccttggaaatctgataaaaaaacttttaagcaaaggacacagaaaaggtcttctatatggtatagtgaaaatattcttaataaaataccatccgtgttatggtgcctggaagccagaacaacctccttctgaagcctctgcttcctgatactgaatacaaagtcacagtgactcccatctacacggatggcgaaggcgtcagcgtctccgctcctggaaaaaccttaccatcctcggggccccagaacttgcgggtgtccgaggaatggtataaccggttgcgcattacgtgggaccccccatcttccccggtgaaaggctatagaattgtctacaaacctgtcagtgttcctggtccaacactggaaacgtttgtgggagctgacattaacaccatccttatcacaaacctcctcagcggaatggactacaatgtgaagatatttgcctcccaggcctcaggcttcagcgacgccctgacaggcatggtgaaaacattgttcttgggtgttaccaatctccaagccaaacatgttgaaatgaccagcttgtgtgcccactggcaggtacatcgccatgccacagcctatagggttgttatagaatccctccaggataggcaaaagcaagaatccactgtgggtggagggacaaccaggcattgcttctatggacttcagcctgattctgaatataaaatcagtgtttatacaaagctccaggagattgaaggacctagtgtgagcataatggaaaaaacacaatcacttcctacacgaccaccaacttttcctccaaccattccaccagcaaaagaagtatgtaaggcggccaaggctgacctggtatttatggtggatggatcctggagcattggagatgaaaatttcaataagatcatcagctttctatacagcactgttggagccctgaacaagattggcacagatggaacccaagttgcaatggttcagttcactgatgatcccagaacagaatttaaactaaatgcttacaaaaccaaagagactcttcttgatgcaattaaacacatttcatacaaaggaggaaatacaaaaacaggaaaagcaattaagtatgttcgagataccttgttcactgcagagtcaggtacaagaaggggcatcccaaaggttatcgtggttataactgatggaagatcacaagatgatgtgaacaaaatctccagggagatgcaattagatggctatagcatttttgcaattggtgtggccgatgcagattactcggagttggttagcattggcagtaagcccagcgcacgccatgtcttctttgtggatgactttgacgcctttaagaaaatcgaagatgagttaattacttttgtctgcgaaacagcatcagcaacctgtccagtggtacacaaggatggcattgatcttgcaggatttaagatgatggaaatgtttggtttggttgaaaaagatttttcatcagtggaaggggtttctatggagcctggtaccttcaatgtgtttccatgttaccaactccataaagatgccctggtttcccagccaaccaggtacttgcacccagaaggattgccctccgactacacaatcagttttctattccggattcttcctgacactccacaggagccatttgctctttgggagattttaaataaaaattctgacccattggttggggttattttagacaatggtgggaaaactctaacatatttcaactatgaccagagtggggattttcaaactgttactttcgaaggacctgaaattaggaaaattttttatggaagctttcacaagctacacattgttgtcagtgagactttggtcaaagtggttattgactgcaagcaagtgggtgagaaggcaatgaacgcatcagctaatatcacgtcagatggtgtagaagtgctagggaaaatggttcgatcaagaggaccaggtggaaactctgcaccgttccagttacagatgtttgatattgtttgctccacatcatgggccaatacagacaaatgctgtgaacttccaggcctgagagatgatgagtcttgcccagaccttccccattcctgctcctgttctgaaaccaatgaagtggctctgggaccagcgggcccaccaggtggtccaggactccgaggaccaaagggccagcaaggtgaaccgggtccaaagggaccagatggccctcggggtgaaattggtctgccaggacctcagggtccacctggacctcaaggaccaagtggtctgtccattcaaggaatgcccggaatgccaggagaaaaaggagagaaaggagatactggccttccaggtccacagggtatcccaggaggcgttggttcaccaggacgtgatggctcaccaggccagaggggccttccgggaaaggatggatcctcgggacctccaggaccaccagggccaataggcattcctggcacccctggagtcccagggatcacaggaagcatgggaccgcaaggcgccctgggaccacctggtgtccctggagcaaagggggaacgaggagagcggggtgacctgcagtctcaagccatggtgagatcagtggcgcgtcaagtatgcgaacagctcatccagagtcacatggccaggtacactgccatcctcaaccagattcccagccactcctcatccatccggactgtccaagggcctcctggggagcctgggaggccaggctcacctggagcccctggtgaacaaggacccccaggcacaccaggcttccccggaaatgcaggcgtgccagggaccccaggagaacgaggtctaactggtatcaaaggagaaaaaggaaatccaggcgttggaacccaaggtccaagaggcccccctggaccagcaggaccttcaggggagagtcggcctggcagccctgggccccctggctctcctggaccaagaggcccaccaggtcatctgggggttcctggaccccaaggtccttctggccagcctggatattgtgacccctcatcatgttctgcctatggtgtgagagatctgatcccctacaatgattaccagcactgactccccatccagatcagccagagttcacccctgtccaagatgagctggaagccatggaactgtggggccctggagtctgatagcctcaggagaaatttgaagaccaactgcaagaactcttaaggaatcttgtttgagaaaatgttgttatgtggtttgtatgctacttttggggggcagggctcatttcagcagcctaaatctcctccttggataatgttaatattattattattattaacaaaaaatatatatttttaaaaagttcccttaatctatgacatggtagcaatgatttccctttggtgtcttaatggcatgtcagataatttgtttttccagagaagagagctcaaagaggaattgggaaaaataaattgaactctggaatcttctctctcaagtcctaaaatgaacaaacagatatgattgtgtttgagggaaatatgtccctagcaggaaaagaattcaaagaggttcaaagaatatgtcacttactcctacttgctgtaggaataaccttgctgataagaaaaaaagggacaatattggagaaactacctcttgtttaattgatctgtccaactctgagatcacttggtaactggtttcatgtgtatccaaaaatcagcatttggatttaagctttctgaatttggtagtttaagaaacagatttagtttttcagtggttttaactcatgtgaaataatgattttccaccagctctgatgcaaagagatataattttaatgaacgatttatccagcagtgtgttccaggggttgcctctccttatctacggggattactttgtacatgcagataagttttcgcaaacctatttccattttcttttgtaagcaaataaaactttaaaacaa

SEQ ID NO: 1122 - DNA, 3567 bp, Homo sapiens
agttctggccgctgtcccggtgcgcacggacgtggctcgagtttcctctgctctccgctctcgcccgctagctctcctcccttccgctcctgcttctctccgggtctcccgctccagctccagccccacccggccggtcccgcacggctccgggtagccatggaggaccccacgctctatattgtcgagcggccgcttcccgggtaccccgacgccgaggccccggagccttcctccgctggggctcaggcagcggaggagccgtcgggggccggctcagaagagctgatcaagtcggaccaggtgaacggcgtgctggtgctgagcctcctggacaaaatcatcggggccgtagaccagatccagctgactcaagcacagctggaggagcggcaggcggagatggagggcgcagtgcagagcatccagggcgagctgagcaagctgggcaaggcgcacgccaccacgagcaatacggtgagcaagctgctggagaaggtgcgcaaggtcagcgtcaacgtgaagaccgtgcgcggcagcctggagcgccaggcggggcagatcaagaagctggaggtcaacgaggccgagctgctgcggcgccgcaactttaaagtcatgatctaccaggatgaagtgaagctgccggccaaactgagcatcagcaaatcgctgaaagagtcggaggcgctgccagagaaggagggcgaggagctgggcgagggcgagcggcccgaggaggacgcagcggcgctggagctttcgtcggacgaggcggtggaggttgaggaggttattgaggagtcccgcgcagagcgtatcaagcgcagcggcctgcggcgcgtggacgacttcaagaaggccttctccaaggagaagatggagaagaccaaggtgcgtacccgcgagaacctggagaagacgcgcctcaagaccaaggaaaacctggagaagacgcggcacaccctggagaagcgcatgaacaagctgggcacgcgcctggtgcccgccgagcggcgcgagaaactgaagacgtcgcgggacaagttgcgcaaatccttcacgcccgaccacgtggtgtacgcgcgctccaagaccgcggtctacaaggtgccacccttcaccttccacgtcaagaagatccgcgagggccaggtggaagtgctcaaggccaccgagatggtggaggtgggcgccgacgacgacgagggcggcgcggagcgcggggaggccggcgacctgcggcgcgggagcagccccgacgtgcacgcgctgctggagatcaccgaggagtcggacgccgtgctggtggacaagagcgacagcgactgagccgcccccgctgccacccaccccattcctcgctccttccgaacttcctctttcgcattctctctcggctcgagctggctgagatttttctaaattgaaaacacgcccccctccccacacctccaggaactccactcccagtcttagagctgttaggacccgatggggaggcagcccccgcagtggacaacccccgcttggacacagtccgagtggaatgggaagggaatggtcaatccctgtcctggttgtccaagtcgggatctcagaggaaattgcagtgattccacggttaggcccccctgggggggctgccttcccctcagcctctccccacaccacccacccagctgctgtcattccgctcactgagctcttcttcattctcaccctgatccctgggggactcaaagccaaaactgcccaaagaggaaagattgaatcctaaaggggatccctgcccccatgggaggccccctactagaaggacgtgaaagcagcttttgggggaaactgaggcagtggggaagacagagcagaatgagccctcaccctggctgggggtccagcacaggctgtatctgcagagggtcccagaggaacgctggagccaagagaagccctgggaaggaggggtggggaacgacatgcatgtgagggatggcacactgatgtgtttatgcacctgtacacaggagcgcatggccatggctttggaaaggagaatggaaaaatagaagaaggtcggccgggcttggtggcttatgcctgtaaccccagcactttgggaggccgaggtgggcggatcacctgaagtcaggagttcgggaccagcctggcaaacaccccatctctactaagcgaaaacccatctctactaaaattacaaaaattagctgggcatggttgcgcatgcctgtaatcccagctactttggaggctgaggtggggagaattgcttgaacctgggaggtggaggttgcagtgagccaaggtcgcgacactgcactccagcctgggtgacagagtgagactccatctcaacagaaggaaaaaaaaggaaaataggagaaggtggaaatgggtgaagagagaagtcccctcactagctgcatgagaaatctatcttactgtggttctccatgggcagcaggaccatttttcagaatcaagagggaggacagtgtgagaaggcgatgatccaaagaagacagagaggtcagccccacccgatccctcaaatgggctcttggaggcacccccaggggcagcccatttctcaaagtccagaaaattagggtcccagaagggggcagcagcaggctgggagttaggagggagagcagggtgccggccctgccaccaagttgagagctggaggggaggtggggagagaacatcacagagcagccagccctggttcactcctggcagtttcttctcaagctccttccctaggagcatggtggcacgtgcctgtggtctcagctacttgggaggctgaggcgggaggatcgccagagcccaggagtttgaggctgcagtgagctatgagggtgcctctgtgctccatcctaggcaacagagtgatacgctgtttaaaaaggaaaaaatccttccctagagctagtatcctaaagctgcagagctagcccagacctcattggtttccttgtccttggggtgcttttcctgaatctttgcgggtgaagggagtgttgctcccagtccagaggcctgattctgtttggactgggttctcaagacacgaccaggttctcaagacacgagtccccttgttcctccccattaaagggggtttgtcagaagcaagaacagcccctctccccagtcacagcctgaagggaggccccgagagcttcctccttccccccacctgctccttaccttctctgccctgctttttagaactgcagttcattgttttaagggattgggggagggagcctggggacacaaaccttttatacaatacaaagctttgctttttttttttttttcttccttttccctttctcggttctcttctctcctctgaatggctgaagacccctctgccgagggaggttggggattgtgggacaaggtcccttggtgctgatggcctgaaggggcctgagctgtgggcagatgcagttttctgtgggcttggggaacctctcacgttgctgtgtcctggtgagcagcccgaccaataaacctgcttttctaaaa

SEQ ID NO: 1123 - DNA, 3014 bp, Homo sapiens
attcatatcatttttcttctccggccccatggaggaagtgagaaagttggcacagtcacgccgggcttcgcaggaccaggtcactcagtgacagatggacaatgcaagaatgaactccttcctggaataccccatacttagcagtggcgactcggggacctgctcagcccgagcctacccctcggaccataggattacaactttccagtcgtgcgcggtcagcgccaacagttgcggcggcgacgaccgcttcctagtgggcaggggggtgcagatcggttcgccccaccaccaccaccaccaccaccatcgccacccccagccggctacctaccagacttccgggaacctgggggtgtcctactcccactcaagttgtggtccaagctatggctcacagaacttcagtgcgccttacagcccctacgcgttaaatcaggaagcagacgtaagtggtgggtacccccagtgcgctcccgctgtttactctggaaatctctcatctcccatggtccagcatcaccaccaccaccagggttatgctgggggcgcggtgggctcgcctcaatacattcaccactcatatggacaggagcaccagagcctggccctggctacgtataataactccttgtcccctctccacgccagccaccaagaagcctgtcgctcccccgcatcggagacatcttctccagcgcagacttttgactggatgaaagtcaaaagaaaccctcccaaaacaggtcagtcctgctggttggtggatgctccttgattattctggaaggagctggtatgcttaatttccaaggaaattaataatgatcttttttttaaaaggcttttgtatcagactagtgttgtagtgcatggagagggtgcccagaggtgttggggcaaagaagtctcagggattggtgtgttttcaaggattttatacatttgggaaataggaagtatgtgggggtggttattgtgacggtagtgttctgttaatatcttgaggctccattaatcaccggtctgaccatgctaatggtttacatcaggttaacactttacacctcatcactcaccctccacagcccgatttgtgctgagttcttgatcttttctttacctgagtgttgccatgaagcgtgtggggaatctcaagtcgatttaaaaatttttacatttccgtctcatggcttcccactttgccccagggaaagttggagagtacggctacctgggtcaacccaacgcggtgcgcaccaacttcactaccaagcagctcacggaactggagaaggagttccacttcaacaagtacctgacgcgcgcccgcagggtggagatcgctgcatccctgcagctcaacgagacccaagtgaagatctggttccagaaccgccgaatgaagcaaaagaaacgtgagaaggagggtctcttgcccatctctccggccaccccgccaggaaacgacgagaaggccgaggaatcctcagagaagtccagctcttcgccctgcgttccttccccggggtcttctacctcagacactctgactacctcccactgaggcggctccagccccagacaacagcccaggcatctccttgggctgggacttcttacccaaagcacatgcttagcttatctttctttccatttacagtctctttcttcctttctaatcctatctggggagctcctggccaggataatatatttgcagataattctggaccagagacttggtgcggggttaacaccttcatccagattgggtgccagcatacattttctggtgggccttaacatccctcctgcttttaggagaattcacagaacctactgttcctttcagatgaccttttggaaaatagttccctttgccaacagaaacatgccagaaggaatcttctcatcttttatctaactatatgtacagctctcccctcccttgtccttgaaagtaggatatagcgaaaggcgagtccaggagctcaggaagaagagatgcactatatgtttacacaattaattcatcccttaatttaagtcattttcatgtgtgtgagtttgctggttgtaaatactttgtcctaagagatttatctttatacagattttctagaaatgtttaggttactaaaacagggtgggcaaactctctaaactggtacaattttataggtgaaagaaaaaattccctcatttaaacccaatcagatgcctcagagggtagccttgatttgttcttacagttaagaagccctgcagagcacaaacttcagaaacccggcttcctgtgctaagtctttcccaatctctacccctttcttctcgggccaccctctgtttaaaatttgtgctgggttattcagaacctaaaagtattattcaaaccaatttcttccttccacagttatcttagctggatataatgtattttcagctcaattgttaatgtgatggatggcacaatgaatgtatattttgtgttattcgtgaatagtcttttgcatgtcgcacaatgtttgatgtccccaaagtaccacactgagttctatcagttatcctttgtgagcctatgatattccccatttcctgtacaatcatgaacagctctgagatcctggagtgatatgatccagagcagagtttacgggtcttaggatgtctgtaataaataaatatactcaagtttcaggtatgcttaagcatccgtgtatttggctgggctacaatttgttaattcctatgaagttggcacatttcatgaggggaaagggagaagggtggtaaatattttcaaagagatgggccttttcttgaataaaagttaataacagctcctttattataatcaaagctcataatggaaaaaaagactgatgaagaaatttatgaagcagatttatttttgaaacaaacatggatacttcctgggtcaagtgctaaccttttcacctccaactggatgttgacgtatatataaacagaactcccttcaaaagccaaaa

SEQ ID NO: 1124 - DNA, 2621 bp, Homo sapiens; identical to SEQ ID NO: 460

SEQ ID NO: 1125 - DNA, 8227 bp, Homo sapiens; identical to SEQ ID NO: 461

SEQ ID NO: 1126 - DNA, 3615 bp, Homo sapiens; identical to SEQ ID NO: 866

SEQ ID NO: 1127 - DNA, 1563 bp, Homo sapiens
gtgcctcccctagccgcctcctcccagcagtcccccaggagcgagctgcgagatgccccaaatcggacccctccccagttggaaaaaaaacgactcctgacctttcccagcctcctcggtccgctgaggaacccgcagccccgggcctcgagcagactgctgggactgcggggcggccgggcgcggggccagaggcggggcggggcgggtcgggtcgggggcctttaagaggcgcggtcgccgggaccgacacagacgcggacagcgccgggactcgccgccccgggactcgcgcagcccgcagcgctccggctcctcctctcgcgaccgccctccgcagcgatggacggagacggtgacccagcagagagcgtgggccagcccgaggaggcaagcccggaggagcagccagaggaggcgagtgctgaggaggagcggccggaggaccagcaggaggaggaggcggcggccgccgccgcgtacctggacgagctgcccgagccgctgctgctgcgcgtgctggccgcactgccggccgccgagctggtgcaggcctgccgcctggtgtgcctgcgctggaaggagctggtggacggcgccccgctgtggctgctcaagtgccagcaggaggggctggtgcccgagggcggcgtggaggaggagcgcgaccactggcagcagttctacttcctgagcaagcggcgccgcaaccttctgcgtaacccgtgtggggaagaggacttggaaggctggtgtgacgtggagcatggtggggacggctggagggtggaggagctgcctggagacagtggggtggagttcacccacgatgagagcgtcaagaagtacttcgcctcctcctttgagtggtgtcgcaaagcacaggtcattgacctgcaggctgagggctactgggaggagctgctggacacgactcagccggccatcgtggtgaaggactggtactcgggccgcagcgacgctggttgcctctacgagctcaccgttaagctactgtccgagcacgagaacgtgctggctgagttcagcagcgggcaggtggcagtgccccaagacagtgacggcgggggctggatggagatctcccacaccttcaccgactacgggccgggcgtccgcttcgtccgcttcgagcacggggggcaggactccgtctactggaagggctggttcggggcccgggtgaccaacagcagcgtgtgggtagaaccctgagcgaccctgcctccactctcccccagctgcctggaggggcaaaggtcgagggtagataggccttaacttagtccatagcgtcctcaccttccccaagccacacatcctcctcccatcccttgctccgatcccagcccctgagcagggagagagaagttttgttggcataggtttgcttaggtagccggcttctagaatgtagatccgtgagggcgtgagcttggactggacccactgctgattccctgcacctagcacagtgcttgccacaaagtgggctctcaataaatattatttgtccaaggaaggaatgaatgaaaaaatgga

SEQ ID NO: 1128 - DNA, 5758 bp, Homo sapiens
acgcccaggtcgcccgcatcccgctgccgcaggagagagacagcgcgccccggccctgctccccaggcttcgcccgggcgccctcaactctgtccccagagactgagcacctgtcctccgcctcggcctctgctgagagccctctcctctggagcacacaccacccctgcagcccaagaagagtcccagccccacgccggctaccaccatggcggagaccaacaacgaatgtagcatcaaggtgctctgccgattccggcccctgaaccaggctgagattctgcggggagacaagttcatccccattttccaaggggacgacagcgtcgttattggggggaagccatatgtttttgaccgtgtattccccccaaacacgactcaagagcaagtttatcatgcatgtgccatgcagattgtcaaagatgtccttgctggctacaatggcaccatttttgcttatggacagacatcctcagggaaaacacataccatggagggaaagctgcacgaccctcagctgatgggaatcattcctcgaattgcccgagacatcttcaaccacatctactccatggatgagaaccttgagttccacatcaaggtttcttactttgaaatttacctggacaaaattcgtgaccttctggatgtgaccaagacaaatctgtccgtgcacgaggacaagaaccgggtgccatttgtcaagggttgtactgaacgctttgtgtccagcccggaggagattctggatgtgattgatgaagggaaatcaaatcgtcatgtggctgtcaccaacatgaatgaacacagctctcggagccacagcatcttcctcatcaacatcaagcaggagaacatggaaacggagcagaagctcagtgggaagctgtatctggtggacctggcagggagtgagaaggtcagcaagactggagcagagggagccgtgctggacgaggcaaagaatatcaacaagtcactgtcagctctgggcaatgtgatctccgcactggctgagggcactaaaagctatgttccatatcgtgacagcaaaatgacaaggattctccaggactctctcgggggaaactgccggacgactatgttcatctgttgctcaccatccagttataatgatgcagagaccaagtccaccctgatgtttgggcagcgggcaaagaccattaagaacactgcctcagtaaatttggagttgactgctgagcagtggaagaagaaatatgagaaggagaaggagaagacaaaggcccagaaggagacgattgcgaagctggaggctgagctgagccggtggcgcaatggagagaatgtgcctgagacagagcgcctggctggggaggaggcagccctgggagccgagctctgtgaggagacccctgtgaatgacaactcatccatcgtggtgcgcatcgcgcccgaggagcggcagaaatacgaggaggagatccgccgtctctataagcagcttgacgacaaggatgatgaaatcaaccaacaaagccaactcatagagaagctcaagcagcaaatgctggaccaggaagagctgctggtgtccacccgaggagacaacgagaaggtccagcgggagctgagccacctgcaatcagagaacgatgccgctaaggatgaggtgaaggaagtgctgcaggccctggaggagctggctgtgaactatgaccagaagtcccaggaggtggaggagaagagccagcagaaccagcttctggtggatgagctgtctcagaaggtggccaccatgctgtccctggagtctgagttgcagcggctacaggaggtcagtggacaccagcgaaaacgaattgctgaggtgctgaacgggctgatgaaggatctgagcgagttcagtgtcattgtgggcaacggggagattaagctgccagtggagatcagtggggccatcgaggaggagttcactgtggcccgactctacatcagcaaaatcaaatcagaagtcaagtctgtggtcaagcggtgccggcagctggagaacctccaggtggagtgtcaccgcaagatggaagtgaccgggcgggagctctcatcctgccagctcctcatctctcagcatgaggccaagatccgctcgcttacggaatacatgcagagcgtggagctaaagaagcggcacctggaagagtcctatgactccttgagcgatgagctggccaagctccaggcccaggaaactgtgcatgaagtggccctgaaggacaaggagcctgacactcaggatgcagatgaagtgaagaaggctctggagctgcagatggagagtcaccgggaggcccatcaccggcagctggcccggctccgggacgagatcaacgagaagcagaagaccattgatgagctcaaagacctaaatcagaagctccagttagagctagagaagcttcaggctgactacgagaagctgaagagcgaagaacacgagaagagcaccaagctgcaggagctgacatttctgtacgagcgacatgagcagtccaagcaggacctcaagggtctggaggagacagttgcccgggaactccagaccctccacaaccttcgcaagctgttcgttcaagacgtcacgactcgagtcaagaaaagtgcagaaatggagcccgaagacagtggggggattcactcccaaaagcagaagatttcctttcttgagaacaacctggaacagcttacaaaggttcacaaacagctggtacgtgacaatgcagatctgcgttgtgagcttcctaaattggaaaaacgacttagggctacggctgagagagttaaggccctggagggtgcactgaaggaggccaaggagggcgccatgaaggacaagcgccggtaccagcaggaggtggaccgcatcaaggaggccgttcgctacaagagctcgggcaaacggggccattctgcccagattgccaaacccgtccggcctggccactacccagcatcctcacccaccaacccctatggcacccggagccctgagtgcatcagttacaccaacagcctcttccagaactaccagaatctctacctgcaggccacacccagctccacctcagatatgtactttgcaaactcctgtaccagcagtggagccacatcttctggcggccccttggcttcctaccagaaggccaacatggacaatggaaatgccacagatatcaatgacaataggagtgacctgccgtgtggctatgaggctgaggaccaggccaagcttttccctctccaccaagagacagcagccagctaatctcccacacccacggctgcatacctgcactttcagtttctaagagggactgaggcctcttctcagcatgctgcaaacctgtggtctctgatactaactccctccccaacccctgttgttggactgtactatgtttgatgtcttctcttacttactctgtatctctttgtactctgtatctatatatcaaaagctgctgctatgtctctcttctgtcttattctcaagtatctactgatgtatttagcaatttcaaagcatagtctaccttccttatttggggcaatagggaggagggtgaatgtttcttctttctcatctactcgtctcacactgagtggtgttagtcactgagtagaggtcacagagatgacaaaaggaaaaatgggagctagagggttgtgacccttcatacacacacgcacgcacgcacacaaacatgcacacacgcatgcacacacacaaagccttaagcagaagaatgtcttagcatcatgagacagagaaatagactcttcctccctcctctttcacatatagcacaggggaaggtaaaatggaagggctgctaattgagacatataattttcttcatacacccctcaccttaatcaaaggattcaggtgttacttctgccctacaaagtctgccttttgcctccctcttcctgttttcccctggactgagaaatgggttgctcaagggaccatttccctttttcttcaagctccttttgatattccctgccccagagctcatgaccagaacccagagctgatttaaaatattttgaaaaatggaggaggcagactgctcccagcagcctgtcaatggctgctcatctgtccatggagatggttacaggcaggtgtagtcaaaatgattgattccttgggtttgggggtgaataggctgggaaatttctgagccttttttttttgtcacagtgccctcaagttgaagtgatgagctggatttctttcttgttccatactgggcggcatgctcctcccatctccaccccttggtttgggggcttccagctcattggcaaaatctctctagttgccttcctttcaagctggagcctgacttttccccaatgtacattttttttttctccacaaagagttccttctctaatgtccccatctggtattaagtgcactttaaagaaaggggcagggtggattttcaagaggtgggaagctctaaggcttgaccctgaggggtcttctcccagccattctcagcccatatgcagcaccctccatactgaagaggactgttgttttagtttcagacggtcctttccttccacatggtgctaaggtggttttctaggtaactgcagggatggaggtcactagccattccaaaccaggagagaaagtctggtgtcctgatatccagtcttttctaggaggaagaccaagattctccagcggcagggcagcctatcacccaacttctaagtcaggaaaggaagctgagtgggaatgccagctggtaagcgcaggctgcactggcccatgactccttcaaggaaaagaggccctgctccctttacctgctgagctccttttagcagttagggagaactgcagggggaaaaataccagtggagtgtggaataaatccaaagcagtgatttttaaatgtttttcaaaaacaaatcttacatagaaccccaatataaaaaataaagtaatgcagacctgggcagtttgcatttttttttttttttttttttggtggaagaagtctcagcgtctcttaggactgactgttcaaaggctcctcagcaaatgagcccttgaacagtcctaagagaccctgaggattctgtggagtagtttgaaaaccattgttctgaggaagggggtccaatctggctcctctgcactaaagctgcaactcatggaaaagagggcaacggtggggtagacaagccatgctgtctccagacccactagggtggaaggaaggttcctgtgggcctgtggacttaggctaatatttgctgtcagcagggcacttaagaatccagggggttttatgtaatgttgccaccacatggttcttttaaaaacacataaggaaatgtgagggtgtagcgcagatgaggagagagatgacacagagggagcagccttctctttagcaagatgtaagggaaatataattcacttacataaaaaagaaacaacacacacgcaaacccttcaccagaagcttcacactacatcctcctcctcctcctgctccccaccttcaccgcatccctttcagagccagggtcactgcaaggggcacctggcctgcccactcacatctgccaaaatgttgcatgccagcgtggaagacaaaccaaactgcgcaaccccctgtgtgtatttacttggtgtacatagataactttaaaataaaataaattcaatgataactct

SEQ ID NO: 1129 - DNA, 1435 bp, Homo sapiens
cgaggggagcgagaggcgcggagagtttggcaggcagacccagaaatccctggagcgcggcggacccggcggccggaggggcgaccccgcccgatgtaacgcgccccgcccgagccccggcccctgcacgggggggggtgatgtgagcagagcccaggaatgccttatgtggatcggcagaaccgaatctgtgggtttctggacatcgaggagcatgagaacagcggcaagtttctgcggaggtacttcattctggacacccaggctaactgcctcctctggtatatggacaacccccagaatctggcaatgggggcaggagctgttggagctttgcagctgacctacatctcgaaggtgagcatagctaccccaaaacagaaaccaaaaactccattttgctttgttatcaatgccctgtctcagagatatttccttcaagccaatgatcagaaagatatgaaggactgggttgaagccctgaaccaagccagcaagatcaccgttcccaaaggtgggggcctacccatgaccactgaagttctcaagagcttagcagctcctccagccctggagaagaagccacaggtggcctacaagacggagatcattggaggggtggtggtccacacacccatcagccagaacggtggggatgggcaggaagggagtgagcccgggtcccacaccatccttcgaaggtctcagagttacatccccacgtcaggctgccgtgcttccactgggcctcccctcattaagagtggttactgcgtgaagcaagggaatgtgcggaagagctggaaacgtcgcttctttgcacttgatgactttaccatctgctacttcaagtgtgagcaggaccgagaaccactgcgcaccatatttcttaaggatgttctgaagacccatgaatgtctggtcaagtctggtgatctcttaatgagggacaacctgtttgaaataataacaagctccaggaccttctacgtacaggcagacagtccagaagacatgcacagctggattaaggagattggcgcagctgtccaggccctcaagtgccaccccagagaaacgtccttttctagatccatttctttgacccgacctggaagctccagcctttcaagtgggcccaactctatcctgtgcagggggcggccacctttggaggaaaagaaagccctctgcaaagccccctctgtggcctcctcctggcagccctggacacctgtcccccaggctggggagaagctgcttccacctggagacacttcagaggactccttgttcacgcctcgtcctggggagggcagcgcctcctggggtgctgcccagctcccggataaggcacagatcggagccccagcaccccaaggagaagccgtttatgttcaaccttgatgatgaaaacatacggacctctgatgtg

SEQ ID NO: 1130 - DNA, 3513 bp, Homo sapiens; identical to SEQ ID NO: 485

SEQ ID NO: 1131 - DNA, 1300 bp, Homo sapiens
agcaaatgcttccagtcccaggagcacaaacatcacatggtgtgtgggatacaagaggctgctgagaattacaggaagttattccaggaaatattgaacacatcgagggagaaacttgaagcagctaaaagcatattgactgatgagcaagaaagaatggcgatgattcaggaagaggaacaaaattttaaaaagatgattgagtctgagtatagtatgagactccggttgttgaatgaagagtgtgagcagaatctccagagacagcaggaatgcatatctgacttgaacctgagagaaacccttctgaatcaagcgatcaagcttgccaccgagctagaggagatgttccaggaaatgctacagagactgggccgtgtggggagagagaacatggagaaactgaaggagagtgaagccagggcttctgaacaggtccgcagcctcctaaagctcatcgtggagcttgagaaaaagtgtggggaaggcaccttggcattgctcaagaatgcaaaatactctttagaaaggagcaagtcactgctgcttgagcatctggagcccgctcatatcacagacctgagtttatgccacataagaggactcagcagcatgttcagagtactccagagacatttaacattggatcctgaaacagctcatccctgcctggcactatctgaggacctgagaactatgagattgagacatgggcagcaggatggggctggcaacccagaaagattggatttcagtgccatggtgctggctgcggagagcttcacctcagggaggcactactgggaggtggacgtggaaaaggcaaccaggtggcaagtgggcatataccacggctctgcagacgcgaagggcagcacggccagagcttccggagagaaagtcttgctcacggggtcggtgatggggaccgagtggactctctgggtcttcccccctctgaaaaggctcttcctggaaaagaagttggacacagttggcgttttccttgactgcgaacacgggcagatatcattctacaatgtgaccgagatgtccctcatttacaatttctcccattgcgccttccaaggagctctcaggcctgtgttttccctctgtatcccaaatggagacacaagtccagactccctcaccatcttacaacatggtccttcttgtgatgctactgttagcccttaatcttctgtgtgtaaaatccaagaccacgagacaccagaaagttggagaacaagactttgaaagaatttgtgtaaactaacccaataaaaagcgttccagg

SEQ ID NO: 1132 - DNA, 4052 bp, Homo sapiens; identical to SEQ ID NO: 840

SEQ ID NO: 1133 - DNA, 2567 bp, Homo sapiens
ctctcttgcctgccgccatgtgcctttcgccttctgccgtgattgtgaggcctccccagccatatggaagtagttgctggtagtgcccgtggtgcttggttcgaggtggccgttagttgactccgcggagttcatctccctggttttcccgtcctaacgtcgctcgcctttcagtcaggatgtctgcccgtggcccggctatcggcatcgacctgggcaccacctattcgtgcgtcggggtcttccaacatggcaaggtggagatcatcgccaacgaccagggcaatcgcaccacccccagctacgtggccttcacggacaccgagcgcctcatcggcgacgccgccaagaaccaggtggccatgaaccccaccaacaccatcttcgacgccaagaggctgattggacggaaattcgaggatgccacagtgcagtcggatatgaaacactggccgttccgggtggtgagcgagggaggcaagcccaaagtgcaagtagagtacaagggggagaccaagaccttcttcccagaggagatatcctccatggtcctcacgaagatgaaggagatcgcggaagcctacctggggggcaaggtgcacagcgcggtcataacggtcccggcctatttcaacgactcgcagcgccaggccaccaaggacgcaggcaccatcacggggctcaatgtgctgcgcatcatcaacgagcccacggcggcggccatcgcctacggcctggacaagaagggctgcgcgggcggcgagaagaacgtgctcatctttgacctgggcggtggcactttcgacgtgtccatcctgaccatcgaggatggcatcttcgaggtgaagtccacggccggcgacacccacctgggcggtgaggacttcgacaaccgcatggtgagccacctggcggaggagttcaagcgcaagcacaagaaggacattgggcccaacaagcgcgccgtgaggcggctgcgcaccgcttgcgagcgcgccaagcgcaccctgagctcgtccacgcaggcgagcatcgagatcgactcgctctacgagggcgtggacttctatacgtccatcacgcgcgcccgcttcgaggagctcaatgccgacctctttcgcgggaccctggagccggtggagaaggcgctgcgcgacgccaagctggacaagggccagatccaggagatcgtgctggtgggcggctccactcgtatccccaagatccagaagctgctgcaggatttcttcaacggcaaggagctgaacaagagcatcaaccccgacgaggcggtggcctatggcgccgcggtgcaggcggccatcctcatcggcgacaaatcagagaatgtgcaggacctgctgctactcgacgtgaccccgttgtcgctgggcatcgagacagctggcggtgtcatgaccccactcatcaagaggaacaccacgatccccaccaagcagacgcagaccttcaccacctactcggacaaccagagcagcgtactggtgcaggtatacgagggcgaacgggccatgaccaaggacaataacctgctgggcaagttcgacctgaccgggattccccctgcgcctcgcggggtcccccaaatcgaggttaccttcgacattgacgccaatggcatccttaacgttaccgccgccgacaagagcaccggtaaggaaaacaaaatcaccatcaccaatgacaaaggtcgtctgagcaaggacgacattgaccggatggtgcaggaggcggagcggtacaaatcggaagatgaggcgaatcgcgaccgagtcgcggccaaaaacgccctggagtcctatacctacaacatcaagcagacggtggaagacgagaaactgaggggcaagattagcgagcaggacaaaaacaagatcctcgacaagtgtcaggaggtgatcaactggctcgaccgaaaccagatggcagagaaagatgagtatgaacacaagcagaaagagctcgaaagagtttgcaaccccatcatcagcaaactttaccaaggtggtcctggcggcggcagcggcggcggcggttcaggagcctccgggggacccaccatcgaagaagtggactaagcttgcactcaagtcagcgtaaacctctttgcctttctctctctctctttttttttgtttgtttctttgaaatgtccttgtgccaagtacgagatctattgttggaagtctttggtatatgcaaatgaaaggagaggtgcaacaacttagtttaattataaaagttccaaagtttgttttttaaaaacattattcgaggtttctctttaatgcattttgcgtgtttgctgacttgagcatttttgattagttcgtgcatggagatttgtttgagatgagaaaccttaagtttgcacacctgttctgtagaagcttggaaacagtaaaatatataggagcttaaattgtttatttttatgtactactttaaaactaaactgaacattgcagtaatgttaaggacaggtatactttttgcaaacaaatgcataaatgcaaatgtaaagtaaagctgaaattgatctcaaa

SEQ ID NO: 1134 - DNA, 6871 bp, Homo sapiens; identical to SEQ ID NO: 853

SEQ ID NO: 1135 - DNA, 2706 bp, Homo sapiens
cgagcagcgcggtgggtgcggctgtgagacggcaggagacttctgccccgcggtgcacgcgaccctcgagacgacagcgcggctactgccagcagcgaaggcgcctcccgcggagcgccccgacggcgcccgctcgcccatgccgagctgagcgcggcagcggcggcgggatgctggcgctgctggccgccagcgtggcgctcgccgtggccgctggggcccaggacagcccggcgcccggtagccgcttcgtgtgcacggcactgcccccagaggcggtgcacgccggctgcccgctgcccgcgatgcccatgcagggcggcgcgcagagtcccgaggaggagctgagggccgcggtgctgcagctgcgcgagaccgtcgtgcagcagaaggagacgctgggcgcgcagcgcgaggccatccgcgagctcacgggcaagctagcgcgctgcgaggggctggcgggcggcaaggcgcgcggcgcgggggccacgggcaaggacactatgggcgacctgccgcgggaccccggccacgtcgtggagcagctcagccgctcgctgcagaccctcaaggaccgcctggagagcctcgagcaccagctcagagcaaacgtgtccaatgctgggctgcccggcgacttccgcgaggtgctccagcagcggctgggggagctggagaggcagcttctgcgcaaggtggcagagctggaggacgagaagtccctgctgcacaatgagacctcggctcaccggcagaagaccgagagcaccctgaacgcgctgctgcagagggtcaccgagctggagcgaggcaatagcgcctttaagtcaccagatgcgttcaaggtgtccctcccactccgcacaaactacctatacggcaagatcaagaagacgctgcctgagctgtacgccttcaccatctgcctgtggctgcggtccagcgcctcaccaggcattggcacccccttctcctatgcggtgccagggcaggccaacgagatcgtgctgatcgagtggggcaacaaccccatcgagctgctcatcaacgacaaggttgcgcagctgcccctgtttgtcagtgacggcaagtggcaccacatctgtgtcacctggacgacacgggatggcatgtgggaggcattccaggacggagagaagctgggcactggggagaacctggccccctggcaccccatcaagcccgggggcgtgctgatccttggacaagagcaggacaccgtggggggtaggtttgatgccactcaggcatttgtcggggagctcagccagttcaacatatgggaccgcgtccttcgcgcacaagaaattgtcaacatcgccaactgctccacaaacatgccgggcaacatcatcccgtgggtggacaataacgtcgatgtgttcggaggggcctccaagtggcccgtggagacgtgtgaggagcgtctccttgacttgtagccgccttctcctctgtccaggaggccgggatcaggctgttgccatggaagttcagggccatagactgccccacttaaactcttgtcagtctgggctcagggttcccagagctcattccccaggaatctctaagaccagggctggggcagtgtctgtcactggcttgtttgttccctaccaatattctgttgctgtttgaagtagtgccagggtcccctgggaagatgcccccaagacacctgccccaagtgggtggatatctgccttcctgctgcaagtggaggcaggtccagcagcccctcttcagagcccctgtaaatgctatcgcagcctgagtcctgccgccttccagttccttggtgtcccgtgcaccccttctgtctgtcccctttcatggctgtgcagccgtcccgctggagtggccatgtcccttgtgcattgagtgcatccccgctggtgactaagctcgcagcaagcggctaccccccgatctgcaaaagggcctctccctttgtgttctatacattgtgaatcttcccgtctgaagaacgcccagcctgcccagacaaagccccgccttccccaaagcagaggggctgtctgtgtctccagaaaggggacatcgggggggaggggggctcagaaaggagaagggctgtgatctccggtcccttcccccatcatccttccttagactgatgctttgactgaatcatcactagctatggcattaaaaggcctctcttctcatctggtgccaaaggttccgttgcagctttttacaaccatccggtgtggtttggaggatttgttttttttttttcccaacagaaaagaacagccattagaagaaggctcccattttctgatgttccgccccactgtgaagagtgtgctcgttttaaattcatgttgattcttgtaagcactggactgtcttcatcaagtatttccctacagaactcctcaagaaaacagagatcatttggctagagattgtctgagtgactccaagctactcactgtattggacgggagtagtaatttattttaaagataaagtgactaagtggggaaatttataaagctaaatattatatattttatttttcatacatgtttgaagtgcaaatctgtggatattccatttgtaggaccaagtcgacatgcccatcctgacattgtatgctacgagaactcttctgatgatggaatttcgattaaagtgcactgaaagatg

SEQ ID NO: 1136 - DNA, 549 bp, Homo sapiens; identical to SEQ ID NO: 486

SEQ ID NO: 1137 - DNA, 1630 bp, Homo sapiens; identical to SEQ ID NO: 387

SEQ ID NO: 1138 - DNA, 5207 bp, Homo sapiens
cccgccgcggaggccgagcgagcccccagcccagcctggcgactggggaccccggcacatgaggtggacgcccccggggaagacttgggtgcacagccaggcgagaaggtcttgagtcagacagagcaccagccttggggaccctggaccactatcatggagactgcgagcgagcagaactccaattccaccaatgggagttctagctcagggggcagctctcggccccagatagctcaaatgtcactatatgaacgagaagcagtgcaggctctgcaagcactgcagcggcagcccaatgcagctcagtatttccaccagttcatgctccagcagcagctcagtaatgcccagctgcatagcctggctgccgtccagcaggccacaattgctgccagtcggcaggccagctccccaaacaccagcactacacagcagcagactaccaccacccaggcctcgatcaatctggccaccacatcggccgcccagctcatcagccgatcccagagtgtgagctctcccagtgctaccaccttgacccaatctgtgctactggggaacaccacctccccacccctcaaccagtctcaggcccagatgtatctacggccacagctgggaaacctattgcaggtaaaccgaaccctgggtcggaatgtgcctctagcctcccaactcatcctgatgcctaatggggcagtggctgcagtccagcaggaggtgccatctgctcagtctcctggagttcatgcagatgcagatcaggttcagaacttggcagtaaggaatcaacaggcctcagctcaaggacctcagatgcaaggctccactcagaaggccattcctccaggagcctcccctgtctctagcctctcccaggcctctagccaggccctagcggtggcacaggcttcctctggggccacaaaccagtccctcaaccttagtcaagctggtggaggcagtgggaatagcatcccagggtccatgggtccaggtggaggtgggcaggcacatggtggtttgggtcagttgccttcctcaggaatgggtggtgggagctgtcccaggaagggtacaggagtggtgcagcccttgcctgcagcccaaacagtgactgtgagccagggcagccagacagaggcagaaagtgcagcagccaagaaggcagaagcagatgggagtggccagcagaatgtgggcatgaacctgacacggacagccacacctgcgcccagccagacacttattagctcagccacctacacacagatccagccccattcactgattcagcaacagcaacagatccacctccagcagaaacaggtggtgatccagcagcagattgccatccaccaccagcagcagttccagcactggcagtcccagctccttcacacagctacacacctccagttggcgcagcagcagcagcagcaacaacagcaacagcagcaacagcagcagccgcaagccaccaccctcactgcccctcagccaccacaggtcccacctactcagcaggtcccaccttcccagtcccagcagcaagcccaaaccctggtcgttcagcccatgcttcagtcttcacccttgtctcttccacctgatgcagcccctaagccaccaattcccatccaatccaaaccacctgtagcacctatcaagccgcctcagttaggggccgctaagatgtcagctgcccagcaaccaccaccccatatccctgtgcaagttgtaggcactcgacagccaggtacagcccaggcacaggctttggggttggcacagctggcagctgctgtacctacttcccgggggatgccaggtacagtgcagtctggtcaggcccatttggcctcctcgccaccttcatcccaggctcctggtgcactgcaggagtgccctcccacattggcccctgggatgacccttgctcctgtgcaggggacagcacatgtggtaaagggtggggctaccacctcctcacctgttgtagcccaggtccctgctgccttctatatgcagtctgtgcacttgccgggtaaaccccagacattggctgtcaaacgcaaggctgactctgaggaggagagagatgatgtctccacattgggttcaatgcttcctgccaaggcatctccagtagcagaaagcccaaaagtcatggacgagaagagcagtcttggagaaaaagctgaatcagtggctaatgtgaatgctaatactccaaacagtgaactagtagccttgacccccgccccttcagtaccgcctcctacactagccatggtgtctagacaaatgggtgactcaaaacccccacaggccatcgtgaagccccagattctcacccacatcattgaaggctttgttatccaggaaggagcagaacctttcccggtgggttgttctcagttactgaaggagtctgagaagccactacagactggccttccgacagggctgactgagaatcagtcaggtggccctttgggagtggacagcccatctgctgagttagataagaaggcgaatctcctgaagtgcgagtactgtgggaagtacgcccccgcagagcagtttcgtggctctaagaggttctgctccatgacttgcgctaagaggtacaatgtgagctgtagccatcagttccggctgaagaggaaaaaaatgaaagagtttcaagaagccaactatgctcgcgttcgcaggcgtggaccccgccgcagctcctctgacattgcccgtgccaagattcagggcaagtgccaccggggtcaagaagactctagccggggttcagataattccagttatgatgaagcactctctccaacatctcctgggcctttatcagtaagagctgggcatggagaacgtgacctggggaatcccaatacagctccacctacaccggaattacatggcatcaaccctgtgttcctgtccagtaatcccagccgttggagtgtagaggaggtgtacgagtttattgcttctctccaaggctgccaagagattgcagaggaatttcgctcacaggagattgatggacaggcccttttattacttaaagaagaacatcttatgagtgccatgaacatcaagctgggccctgccctcaagatctgcgccaagataaatgtcctcaaggagacctaaggtggccctcttgcacaaaccagcctaaggcagacactctccactgtccaggttataacctggtaccagcagactttgcagggaagaaagagttgttccaatcatgtaaccttctgtaggggattactgagacagggaagagaagtgcaagaattggttgctggtgctacatggcggcagctttgacattttctctgggttctactttattttttaaaatctttacagttctcaccatttcacgtaccttaatccaatctttataaaagaggcagtctagagaactaggactgctcagccttatcccggagtggagcatttagcccaggtcttaattctccaagaggaggaatacatagtatggtaaggcaaggaactgggtggaatgtcaggttgcctgcccaatgggagaggtagggtttttctagcttgtgtgacagaagtagcaaaatctggtccttccccctcccagtgtagctgtggctcagagttttttctttttgttgtcacttactcccttgtgattgaattttttctcctgcatccatggcaggatccccagccagtatagagacttggttggcatcttctgctgcagggactaaaagtatttgactggggcacatgtggctgttgtcattctttctgcatcccactgttcccctccaatttatgttattttctaccctgtttttcagttccatctctgctctgtcctatagctttataaaaccagagtgtgtggggctgaggtcaggagtataagtacctgccttaggcactattccttatataacaaaaatattaaatatttttttcctcagtaaaaggatgaaaattggtttcagttgtcttactctattccagtctttgcccactttcacacaaatgacaaggccaatatgttttgtttgtttgttttttaatcattaagagtttttgtacaaaaagtggttttttttcttcattttaaaacaccagggtgtgggggagggatgcaaacaaataacaaaaaagatgcttttgtaacattattttccctgtttagaaagaaaaaaatcactccaatagtattgaaaagtccaaagatgaaatagtttcattttcttttcctaaggcttataaaaggccccctgcctgttgattccatccctcttttgtgtccagtggagccatgttactcttcagtggcccaggggttcactattaaagaaagatcagtccaggtttctgggcacatggcctaaacaggaagatggaagcatcagaggattaaaaacctttccccacagaaatgtgggcaagaagacacttccctgagccagcagaagggacaggtgcagcagcattccacacccagcgcagaggacagcagagccctcgatgtcccacttctgcttccgttccctttctagaagattgaaaaaaaggtcaaaaccacatgcctgtggagaaagtgcgacatgtttagaaatactggtagggaaccaggagtaagaaaagctttaccagcttttactacaaatggatgaaagacatcaggatcccaccaccgcaaggtaaagtgacttcccttttctggaacccctgtggcacaggagtaccaattttcctttccaacgaactggatttctggataggcattttggctgtatgtggacagataagaccacagtccttagcccaatcccagctatacagtcaccccaatttccacaaatgatgtgatggtaccgtataatcctgtaattgggaaatttcacatttttcctgtcctaatctcagaggtgggagaagcaagtctagaacatctccaggctcagactaaacgagaatacttggactgcaaccaagtaatcactgcaaagtagttccaagcagcaagaaataccagattctcatggaggctactatagggtacagaataacaacatgaaaacaatcaaccctgtataaataatgtttcttggcattttttttttaattaaagaaatccagtgtctcaaaaaaaaaaaaaaaaaaaaaaaaaaaaaaaa

SEQ ID NO: 1139 - DNA, 5063 bp, Homo sapiens; identical to SEQ ID NO: 417

SEQ ID NO: 1140 - DNA, 3357 bp, Homo sapiens; identical to SEQ ID NO: 854

SEQ ID NO: 1141 - DNA, 3038 bp, Homo sapiens; identical to SEQ ID NO: 481

SEQ ID NO: 1142 - DNA, 4967 bp, Homo sapiens; identical to SEQ ID NO: 862

SEQ ID NO: 1143 - DNA, 5110 bp, Homo sapiens
cgagactcagccagaggagtacggattaagtggccgaagaaagaggagtgaggcaggggagcgaggcggacgctccgagcgcatcggactcacctgggccggcggcgaccggcgagtacgagtggactcttgccctccgcagcatgcgccccgcctgctaagtcgccgccgtctcgccctcacctagcaccgccaatcccgcctggatggagtcccctctgggttcccattggctcctgtgagtgcttgggtgtcgggagcctgtttttggcgaggggaaccaacttttgaagttcgcccagaagactgcgttccagccccagttccccggcagcgggacccggcgaagacgcgaccgcggcgcgagtcaccatgggaagcaaaggtgtctaccagtaccactggcaaagccacaatgtcaagcacagtggtgtggacgacatggtgctactgtccaagatcacagagaactccatcgtggagaatctgaagaagagatacatggatgactacatttttacatatataggatctgtattaatctcagtcaaccctttcaagcagatgccatattttggggaaaaggaaattgaaatgtaccaaggagcggcacagtatgaaaacccaccacatatctatgcccttgcagataatatgtacagaaacatgatcattgacagagagaaccagtgcgtcattatcagtggtgaaagtggtgctggaaaaacagtggctgccaaatatatcatgagctacatctccagagtgtctggaggagggaccaaagtccagcacgtgaaggacattatcctgcagtccaacccgctgctggaggccttcgggaacgccaagaccgtccggaacaacaactccagccgatttggaaaatactttgaaatccagttcagtccaggtggggaaccagatggtggaaagatctccaacttccttctggaaaaatctagggtggtgatgaggaacccaggagagcggagttttcacatattttaccagctcatcgagggcgcctctgcagagcagaaacacagccttggcatcaccagcatggactattattactacctgagcctctcgggctcatacaaggttgatgacattgacgacaggcgggagtttcaggaaactctgcacgccatgaatgtgattgggatctttgcagaagagcaaacgctggtgttgcagatagtggcgggtattctccacctgggaaacatcagcttcaaagaagttggcaactacgcggctgtggagagtgaagagtttttagcttttcctgcatatctgctagggataaaccaggaccggttgaaagaaaagctaacaagccggcagatggatagcaagtggggaggcaaatccgaatccatccacgtgaccctcaacgtagagcaggcctgttacacccgggatgcgctcgccaaggccctgcacgcccgggtctttgatttcttggtagattccatcaataaagccatggagaaagaccatgaagaatacaacattggcgtcctagacatctatggctttgaaatattccagaaaaatggctttgaacagttttgtatcaattttgttaatgaaaaactgcagcagatttttattgaactgacattaaaggcagaacaggaagaatatgttcaagagggaataagatggacacccattgagtactttaataataaaatcgtatgtgacctcatagagaacaaagtgaaccctcctggcatcatgagcatcctggatgacgtgtgcgccacgatgcatgcggtgggtgagggggcagatcagacgctgctccagaaacttcagatgcagattgggagtcatgagcacttcaacagttggaaccaaggcttcatcattcatcattatgctgggaaggtatcctatgacatggatggcttttgtgaaaggaaccgggatgtgctttttatggatctcatcgagcttatgcagagcagcgagctgcctttcataaagtctttatttccggaaaatctgcaggctgacaagaaagggcgcccaactactgccggaagcaaaataaagaaacaagccaatgaccttgtgagcaccctgatgaaatgtacgccccactacattcgctgcatcaagccaaacgaaaccaagaagcccagagactgggaggaaagcagggtaaagcatcaagtcgaatatttgggtctgaaagagaacattcgagtgagaagagctggctatgcctatcggcgcatcttccaaaaattcctacagaggtatgccattctgaccaaagccacctggccttcttggcagggagaggagaagcaaggcgtcctgcacctgctgcagtcggtcaacatggacagcgaccagttccagctggggaggagtaaagtgttcatcaaagcccccgagtctctatttcttttagaagagatgagagagagaaagtatgatgggtatgctcgagtgatacagaaatcatggaggaaattcgtggcccggaagaaatacgttcaaatgagagaagaagcctcagacctcttattgaacaagaaggagagaaggagaaacagtattaacaggaactttataggggattatattgggatggaagagcacccagaactccagcagttcgtgggcaagagggagaagattgatttcgcagacacagtcaccaagtatgacaggaggttcaagggtgtaaagcgagacctgctccttaccccaaagtgcttgtacttaatcggacgagaaaaagtcaaacagggcccagacaagggcctggtgaaagaagtcctgaagcggaaaatcgagatagaacggatcttgtctgtgtccctcagtactatgcaggatgacatttttattctccatgagcaagagtatgacagtttgcttgaatctgtcttcaaaactgaattcctaagcctcttagcaaagcgttacgaggagaagacccagaagcaactacctctgaaattcagcaatacgcttgaactgaagttgaaaaaggaaaactggggcccctggagtgcagggggctcccggcaagtgcagttccaccaagggtttggggacctggctgtcctcaagcccagtaacaaagtgctgcaggtcagcatcggacctggactgcccaagaactcccgtcctaccagaaggaacactacccaaaatacaggttattccagtgggactcaaaatgccaactacccagtgagagctgcccctcctcccccaggataccatcagaacggagtcatcagaaaccagtatgtgccatatccccatgctcctggaagccagaggtccaatcagaaaagcctgtacacctccatggcccgcccgcccttgcctcggcagcagtctaccagttcagaccgagtgtcacagacgccagagagcctggatttcctcaaggtcccggaccagggagctgcaggggtcaggagacaaacaaccagtcggcctcccccagcagggggcagacccaagccccagcccaagcccaagcctcaggtgccacagtgcaaggctttgtatgcctatgacgctcaggacacagacgaactcagctttaatgccaatgacattattgatattatcaaagaagatccttctggctggtggacgggtcgactacgaggcaagcagggcctgttccccaacaactatgtgaccaagatctgaggtgcccgtgactctgacacatggggcagaggagctccaggcacagaccaggggaggggatatttaggggctccccttacaatccacaatgagcaattgcttctccaaggcctggagctattctggtaccttccccatggaggacactgaaaaggctgggttggggacagggagtatcactccataagtgatcctaaaaggtagcctcttcataggaacccaggaggacaaaaccaccatgcattaagatttatttattgtatttaaacctggtgagaggacaagtgaggtctgctcagaccttgtaggcttctatcaaaacagcaccctgcttgctcaccaggcctagagaatggctgtaggtggccgctgacaagtgcctttagttgaagagcacatttctttcatctctcttgtccatacctgatagacacattcctctctgccaccttccttcagggaggacccgccctctgcagactgggcttagcgtgagcaggcacttcccatgtacgtgccaagggtaagctggcctgctgagcccagggcgacagaggggcactggtttacactttgccgggaccatcagggccgccaagcaggtcaggggctgggggctgggggctgggctgctggctttgctttctctgggtcttcaattagaatgtggctggcccatattggtttgtgtttaaatgctgtacttactacaagaaggatcttttttcaagctgtacatttataaaaacagatcatatactgtatatataaaaatcttgagatggtagaaacatgtatgaatgtactaagtagtattccactgtactcattcataaggtaggttttcttacaaaactcacaccaggtacttaaagatgtgctctgcttttttccaactacggagtgtcactgctttctaggtcagtccctgcagactcttctcaactctttccctataggaaacttactccgcgtcctgcccccacctcctaaataaataaaggaatcggcgaacaccttcttcttttatgacatttgttatgggttgaattgtgtgcctccaaagaagatgttggagtcccagccaccagtacctcacaatatgaccttatttggaaatagagtctttatggagcaaacaaacaaaactaattaaaatgaagtcattagagtgggtcttaatccaatataatggtgtcctgatgaaaaggggaaatttggacacagagaccaacatgccagaggaaagaccatgtgaaaaggcagggagaagacagccattcacaagccctggacagaggcctggaacagattctccctcacaccctcacaaggaaccagccctgcccaccttggtcttggacttccaacctccagaactgtgaggcaatacatttcgctgtttaagcca

SEQ ID NO: 1144 - DNA, 987 bp, Homo sapiens; identical to SEQ ID NO: 848

SEQ ID NO: 1145 - DNA, 2513 bp, Homo sapiens; identical to SEQ ID NO: 847

SEQ ID NO: 1146 - DNA, 1097 bp, Homo sapiens
gccgtcggagcccttgcacgcctgctctcttgtagcttctctcagcctagcccagcatcactatggtggacgctttcctgggcacctggaagctagtggacagcaagaatttcgatgactacatgaagtcactcggtgtgggttttgctaccaggcaggtggccagcatgaccaagcctaccacaatcatcgaaaagaatggggacattctcaccctaaaaacacacagcaccttcaagaacacagagatcagctttaagttgggggtggagttcgatgagacaacagcagatgacaggaaggtcaagtccattgtgacactggatggagggaaacttgttcacctgcagaaatgggacgggcaagagaccacacttgtgcgggagctaattgatggaaaactcatcctgacactcacccacggcactgcagtttgcactcgcacttatgagaaagaggcatgacctgactgcactgttgctgactactactctgccaatcggctacccctcgactcagcaccacattgcctcatttcttcctctgcattttgtacaaatccacgaattcttctggggtcaggtgccactgaccgggatccagttccagttcccatggtgtatgtggttttttttttttttttttaactgcactcatagggtgctctgaggtcaataaagcagagccaaggccacccagttgcctttttgcctttggtaacataactctgggagtcttggtttatcctgtgtgtcagagagtgggcagaaataacggcctgaaggttactgaggaagaagcactggatgggagactgaaatggacagtctcggagcctgttaatcagctgatcaccttacacatttaataataaaagagctgtacctacacgttgcctttacactgccccccctccatggtcaaatgacctagttcagtcagtgatggggcttccccaggtttggctattgaactgtcacttcaggcccatcctacactgaaagctcttgggtctggctgttctctgtgaaatgctgtagtctctccctttccagaattcaggttcagggcacagaacccaggcttgtaccatggtg

SEQ ID NO: 1147 - DNA, 4838 bp, Homo sapiens; identical to SEQ ID NO: 505

SEQ ID NO: 1148 - DNA, 4295 bp, Homo sapiens; identical to SEQ ID NO: 477

SEQ ID NO: 1149 - DNA, 2886 bp, Homo sapiens; identical to SEQ ID NO: 479

SEQ ID NO: 1150 - DNA, 2609 bp, Homo sapiens; identical to SEQ ID NO: 452

SEQ ID NO: 1151 - DNA, 4949 bp, Homo sapiens
cagccgccggcggcgctagcacctcggagtcgggcggccggagcagcggagcgcagcgcggcgcagggaacggcactgggggtggggagaccagcccggccgagccgagggccaccccctggtcctctgccctcgcgccccgctagggccaggtgcacaaaaagctttaaacaagttaaaatctaggcaacagactccctgaagtgttgactgcccaacttaatcatgactgtgattcaaaaatgttaataaataaaccaaggtgtagatcatggggaattcatatgctgggcaactgaaatctgctcgatttgaggaagctctccacaactccatagaagcctccctcagatgtagtagtgtggtaccacggccaattttttcccagctatacctggaccctgaccagcatcctttctcatctgcagatgtcaaacccaaggtggaggatctggacaaagatttggtaaaccgctacactcaaaatggaagtctggatttttctaacaatctaacagttaatgaaatggaagatgatgaagacgatgaagaaatgtctgattcaaacagcccaccaattccctattcacaaaaacctgccccagaaggatcttgcactacagatggtttttgtcaagcaggaaaggatttgcgtttggtatcactgtgtatggaacaaattgacatcccagcaggattcctcctggtgggggccaagtctcccaatctgcctgaacacatcctagtttgtgctgtggacaagcgatttctaccagatgatcatggaaaaaatgcacttttagggttttctggaaattgtatcggctgtggagaaagaggatttcgatatttcacggaattttccaaccacattaacttgaagctcaccactcagccaaagaagcagaagcacttaaagtactacctagtcagaagctcccagggtgtactgtctaaaggacctcttatctgctggaaagaatgtagaagccgacaatcctctgcttcttgccactctattaagccaagctcttcagtgtcgtcaactgtgaccccagaaaatgggacaactaatggatacaaatcaggattcactcagacagatgctgctaatggaaacagtagccatggagggaagggcagtgcatccagctccactccagcccacacagggaattactctttgtcaccacgacctagctatgcatcaggagatcaagctaccatgttcatttctgggccaccaaagaaacgacaccggggatggtatcctgggtcacctctcccccaacctggcttagttgtacctgtccctacagttcgccctctttcaagaacggagccccttttatctgccccagttccacagaccccactaactggaattttacaacccaggcccattcctgcaggggaaactgtaattgttcctgaaaacctgctgagtaactcaggagttagaccagtaattctgataggctatggcactttaccctatttctatggaaatgttggtgacattgttgtgagtcctctgctggtgaattgctacaagattccacagttggaaaacaaagatttggaaaaattagggttgaccggcagccaatttctgagcgtggaaaacatgattcttctgacgatacagtatcttgtgcggctgggtcctgatcaggtacctctcagggaagaatttgagcaaattatgctgaaagctatgcaagaatttactctgagagaaagagccctgcagataggtgctcagtgtgtccctgtgtcaccaggacaactcccctggcttgctagattaattgccagcgtatctcaagacttggttcatgtggttgtgacccagaactctttggcggagggcatttcagagaccttaaggactctcagtgaaatgagacactatcaaaggctgccagattatgtggtggtaatttgtgcatcgaaaatcagaggaaatgaattttgtgtggtagtgttaggtcagcaccagtcccgagctctggcagagagcatgctcaccacaagtgagtttttgaaagaaattagttatgagcttatcacaggaaaggtcagtttcctggcatcacatttcaaaaccacatcattaggcgatgacctagacaagctgctggaaaaaatgcaacaaagaagaggagacagtgtggttacccctttcgatggagaccttaatgaatgtgtgtcaccccaggaggctgctgctatgattcccacacaaaacctggatttagataatgaaaccttccacatttatcaaccgcagctaacagttgccagaaaactcttatcccaggtgtgtgctatagcggacagtggcagccagagcctggacctcggtcacttcagcaaagtagacttcatcatcattgttcccagatcggaggtgttggttcagcaaactcttcagcggattcgacaatcagtgtcatttcaggctctttgtcacatagcgaacccagtcatgggctagctgatagagtcattaattgcagagaagttctggaagctttcaacctcctggtgctccaggtcagctccttcccatacactctgcagacccaacagtcccgcattagctctagcaatgaggttcactggatacagctggatactggggaggacgtgggctgcgaggagaagctgtactttggcttgagtgagtacagcaagtctctgcagtgggggatcacgagcccacttctgagatgtgacgagacttttgaaaaaatggtgaacacactcttggagaggtaccccaggctgcacagcatggtcgtccgctgctatcttctcatccagcagtactctgaggccctgatggctctcaccaccatggcgtcactccgcgaccacagcacaccagaaacactcagcattatggatgacctcatcagctccccaggcaaaaacaaaagtgggaggggacacatgctcattatcagggtgccctcggtgcagctggcgatgttagccaaggagcggctacaggaggtgcgcgacaaactgggtctgcagtatcggtttgagatcatccttgggaacccggccaccgaactcagtgttgcaactcactttgtggcgcgattaaagagttggagaggaaatgaaccagaagagtggatccctcggacataccaagatttagacggtctaccttgtattgtgatattaactggcaaagatcctcttggagaaacctttcccaggtctttgaagtactgtgacctccggttaattgactcaagctatttaactcgcacggccttggagcaggaggtgggtctggcatgctgctatgtctcaaaagaggtcatccggggacccactgttgccctggacctcagcgggaaggagcaggagagagctgctgtcagtgagaatgactccgatgagctgctcatcgacctggagcggccccagagcaacagcagcgctgtcacagggacctcgggttccatcatggagaatggagtgagctcttccagcacagctgacaagtcccagaagcagtccctgacccccagctttcagagcccagccaccagcttggggctggatgaaggggtctccgccagctcagctggagccggagccggggagactctgaagcaggaatgtgactccctgggcccccagatggcgagcagcaccacctccaagccgtcatcatcatcctcaggacccaggaccctcccatggccgggacagcccatcagaggctgccggggcccacaggcagccctgccaccagtggtgatcctatccaaagcggcctacagtctcctgggctcccagaagagtggcaagctgccatcctcctcctccctgctgccccacgccgacgtggcctgggtgagctccctgcggccactcctgaacaaggacatgagcagtgaggagcagtccctctactacaggcagtggaccttggcccggcagcaccacgctgactatagcaaccagctggacccggcctctggcacccgaaacttccacccccgacggctcctgctgacagggcccccacaggtgggaaagacgggctcctatttacagttcctcaggatcctcttccgcatgctcatcaggctcctggaggtggacgtgtatgatgaggaggagatcaacaccgatcacaatgaaagcagtgaagtgagccagtcagagggagagccctggcctgacatcgagagcttcagtaaaatgccttttgatgtcagtgtgcatgaccccaagtacagtttgatgagcctggtgtatactgagaagctggcaggggtcaaacaagaagtgataaaggaatccaaagttgaagagcccaggaaacgggaaactgtatccataatgctgaccaaatatgcagcctataacacctttcaccactgtgaacagtgccgccagtacatggacttcacctctgcctcccagatgtctgactccacccttcatgccttcacattctcttcttctatgctgggagaagaggttcagctctatttcatcattcccaaatccaaagagagtcattttgtcttcagcaagcagggcaagcacctggagagcatgcggctgcccctggtttcagacaagaatttgaatgcagtcaagagccctattttcactccttccagtggtcgacatgagcacggactcctaaaccttttccacgccatggagggcatcagccaccttcacctcctggtggtcaaagagtatgagatgcctctgtaccgcaagtactggcccaaccacatcatgctggtgcttcccggcatgttcaataatgcaggcgtgggtaaggggcccccctgggatggggagaagggcttcgaagataaactgagctccattcccctggcatgaaactttcagattcccctgcctctagaaattgtcctgccctcctcaccactcttcgg

SEQ ID NO: 1152 - DNA, 1990 bp, Homo sapiens; identical to SEQ ID NO: 411

SEQ ID NO: 1153 - DNA, 3138 bp, Homo sapiens
gctctctcctcctcctcctcctcttcctctctggtctcctccctcctccgggctgggttgcaaatggcttcgttccccgagaccgatttccagatctgcttgctgtgcaaggagatgtgcggctcgccggcgccgctctcctccaactcgtccgcgtcgtcgtcctcctcgcagacgtccacgtcgtcggggggcggcggcgggggccctggggcggcggcgcgccgcctacacgtcctgccctgcctgcacgccttctgccgcccctgcctcgaggcgcaccggctgccggcggcgggcggcggcgcggcgggagagccgctcaagctgcgctgccccgtgtgcgaccagaaagtagtgctagccgaggcggcgggtatggacgcgctgccttcgtccgccttcctgcttagcaacctgctcgacgcggtggtggccactgccgacgagccgccgcccaagaacgggcgcgccggcgctccggcgggagcgggcggccacagcaaccaccggcaccacgctcaccacgcgcacccgcgcgcgtccgcctccgcgccgccactcccgcaggcgccgcagccgcccgcgccttcccgctcggcacccggcggccctgccgcttccccgtcggcgctgctgctccgccgtcctcacggctgcagctcgtgcgatgagggcaacgcagcttcttcgcgctgcctcgactgccaggagcacctgtgcgacaactgcgtccgagcgcaccagcgcgtgcgcctcaccaaggaccactacatcgagcgcggcccgccgggtcccggtgccgcagcagcggcgcagcagctcgggctcgggccgccctttcccggcccgcccttctccatcctctcagtgtttcccgagcgcctcggcttctgccagcaccacgacgacgaggtgctgcacctgtactgtgacacttgctctgtacccatctgtcgtgagtgcacaatgggccggcatgggggccacagcttcatctacctccaggaggcactgcaggactcacgggcactcaccatccagctgctggcagatgcccagcagggacgacaggcaatccagctgagcatcgagcaggcccagacggtggcggaacaggtggagatgaaggcgaaggttgtgcagtcggaggtcaaagccgtgacggcgaggcataagaaagccctggaggaacgcgagtgtgagctgctgtggaaggtagaaaagatccgccaggtgaaagccaagtctctgtacctgcaggtggagaagctgcggcaaaacctcaacaagcttgagagcaccatcagtgccgtgcagcaggtcctggaggagggtagagcgctagacatcctactggcccgagaccggatgctggcccaggtgcaggagctgaagaccgtgcggagcctcctgcagccccaggaagacgaccgagtcatgttcacaccccccgatcaggcactgtaccttgccatcaagtcttttggctttgttagcagcggggcctttgccccactcaccaaggccacaggcgatggcctcaagcgtgccctccagggtaaggtggcctccttcacagtcattggttatgaccacgatggtgagccccgcctctcaggaggcgacctgatgtcggctgtggtcctgggccctgatggcaacctgtttggtgcagaggtgagtgatcagcagaatgggacatacgtggtgagttaccgaccccagctggagggtgagcacctggtatctgtgacactgtgcaaccagcacattgagaacagccctttcaaggtggtggtcaagtcaggccgcagctacgtgggcattgggctcccgggcctgagcttcggcagtgagggtgacagcgatggcaagctctgccgcccttggggtgtgagtgtagacaaggagggctacatcattgtcgccgaccgcagcaacaaccgcatccaggtgttcaagccctgcggcgccttccaccacaaattcggcaccctgggctcccggcctgggcagttcgaccgaccagccggcgtggcctgtgacgcctcacgcaggatcgtggtggctgacaaggacaatcatcgcatccagatcttcacgttcgagggccagttcctcctcaagtttggtgagaaaggaaccaagaatgggcagttcaactacccttgggatgtggcggtgaattctgagggcaagatcctggtctcagacacgaggaaccaccggatccagctgtttgggcctgatggtgtcttcctaaacaagtatggcttcgagggggctctctggaagcactttgactccccacggggtgtggccttcaaccatgagggccacttggtggtcactgacttcaacaaccaccggctcctggttattcaccccgactgccagtcggcacgctttctgggctcggagggcacaggcaatgggcagttcctgcgcccacaaggggtagctgtggaccaggaagggcgcatcattgtggcggattccaggaaccatcgggtacagatgtttgaatccaacggcagcttcctgtgcaagtttggtgctcaaggcagcggctttgggcagatggaccgcccttccggcatcgccatcacccccgacggaatgatcgttgtggtggactttggcaacaatcgaatcctcgtcttctaattgcatttcctaggtttctgtgtttggggtgtgtgtgcgtgtctctctctctctctctctctttctctttctctctctttttgaatttcaaagaagaaacagtctcagggaaatttcttttttcttttttttttttaaagagaacaagaaaagtacaacattgcttaagtcctacctcatctttatttttttacagatgaatgtacttatcttttctgcagggattgagcctgtgaagtgataatttctatctacctcataaatctttacatttccttctgcaacaggccctcttcccctcctcagtggagtttgcatttccctcttcccctgcgtggggcatgatatgcacaagcctggcatctgtatggctgggagggcactggatgtgtgtggtggggtgtattctgtagattgagccaaggaaacacaaaaaaaaactactaagtaaaaaaacaaaaaactata

SEQ ID NO: 1154 - DNA, 2347 bp, Homo sapiens
acagtgcggagaccgcagccccggagcccgggccagggtccacctgtccccgcagcgccggctcgcgccctcctgccgcagccaccgagccgccgtctagcgccccgacctcgccaccatgagagccctgctggcgcgcctgcttctctgcgtcctggtcgtgagcgactccaaaggcagcaatgaacttcatcaagttccatcgaactgtgactgtctaaatggaggaacatgtgtgtccaacaagtacttctccaacattcactggtgcaactgcccaaagaaattcggagggcagcactgtgaaatagataagtcaaaaacctgctatgaggggaatggtcacttttaccgaggaaaggccagcactgacaccatgggccggccctgcctgccctggaactctgccactgtccttcagcaaacgtaccatgcccacagatctgatgctcttcagctgggcctggggaaacataattactgcaggaacccagacaaccggaggcgaccctggtgctatgtgcaggtgggcctaaagctgcttgtccaagagtgcatggtgcatgactgcgcagatgggaaaaaagccctcctctcctccagaagaattaaaatttcagtgtggccaaaagactctgaggccccgctttaagattattgggggagaattcaccaccatcgagaaccagccctggtttgcggccatctacaggaggcaccgggggggctctgtcacctacgtgtgtggaggcagcctcatcagcccttgctgggtgatcagcgccacacactgcttcattgattacccaaagaaggaggactacatcgtctacctgggtcgctcaaggcttaactccaacacgcaaggggagatgaagtttgaggtggaaaacctcatcctacacaaggactacagcgctgacacgcttgctcaccacaacgacattgccttgctgaagatccgttccaaggagggcaggtgtgcgcagccatcccggactatacagaccatctgcctgccctcgatgtataacgatccccagtttggcacaagctgtgagatcactggctttggaaaagagaattctaccgactatctctatccggagcagctgaaaatgactgttgtgaagctgatttcccaccgggagtgtcagcagccccactactacggctctgaagtcaccaccaaaatgctgtgtgctgctgacccacagtggaaaacagattcctgccagggagactcagggggacccctcgtctgttccctccaaggccgcatgactttgactggaattgtgagctggggccgtggatgtgccctgaaggacaagccaggcgtctacacgagagtctcacacttcttaccctggatccgcagtcacaccaaggaagagaatggcctggccctctgagggtccccagggaggaaacgggcaccacccgctttcttgctggttgtcatttttgcagtagagtcatctccatcagctgtaagaagagactgggaagataggctctgcacagatggatttgcctgtgccacccaccagggcgaacgacaatagctttaccctcaggcataggcctgggtgctggctgcccagacccctctggccaggatggaggggtggtcctgactcaacatgttactgaccagcaacttgtctttttctggactgaagcctgcaggagttaaaaagggcagggcatctcctgtgcatgggtgaagggagagccagctcccccgacggtgggcatttgtgaggcccatggttgagaaatgaataatttcccaattaggaagtgtaacagctgaggtctcttgagggagcttagccaatgtgggagcagcggtttggggagcagagacactaacgacttcagggcagggctctgatattccatgaatgtatcaggaaatatatatgtgtgtgtatgtttgcacacttgtgtgtgggctgtgagtgtaagtgtgagtaagagctggtgtctgattgttaagtctaaatatttccttaaactgtgtggactgtgatgccacacagagtggtctttctggagaggttataggtcactcctggggcctcttgggtcccccacgtgacagtgcctgggaatgtattattctgcagcatgacctgtgaccagcactgtctcagtttcactttcacatagatgtccctttcttggccagttatcccttccttttagcctagttcatccaatcctcactgggtggggtgaggaccactcctgtacactgaatatttatatttcactatttttatttatatttttgtaattttaaataaaagtgatcaataaaatgtgatttttctgatga

SEQ ID NO: 1155 - DNA, 7586 bp, Homo sapiens
agatgccaccaccactgccaagcagctgcattcctcgccgggaaattcctccaggcaagagaacgcagagacgcccgcccgcagtccgggggaggacgcttcaccaggtgctggccacgaacaggaggctttcctgggtgtgaggggtgcgccagggtcgcccacccaggagcggcccgcgggaggactaggcgaggcccctaacggagcccccagtgtgtgtgccgaagaaggctccctggggccccgcaacgcccgcagccagccccccaagggcgcgtctgatttgccaggtgagcctccggccgagggcgcagcgcacacggccagctccgcgcaggcagactgcacagcccgccccaagggtcacgcccaccctgctaaggtgctaactttggacatctacttgagtaagactgagggggcacaagtggacgagccggtcgtgattactcccagagcggaagattgcggtgactgggacgacatggagaagaggtccagcggccgtaggtcggggaggcggagggggtcgcagaaatccaccgactcccccggcgcggacgccgagctccctgagagcgctgccagggacgacgcggtgttcgacgacgaggtggcgccaaacgcggccagcgataacgcctcggcggaaaagaaagtgaaatctccgcgggcagccctcgacgggggcgttgcctccgctgcgagcccagagtccaagcccagccccggtaccaaagggcagctccgaggggagtcggaccggagcaaacagccacccccggcttcgtcccccacgaagaggaagggcaggagccgtgccctcgaggccgtgcccgccccgcccgccagcggcccccgggctcccgccaaggagtccccacccaagagggtgcccgatcccagcccagtcaccaagggcactgcggccgagagcggggaggaggcggcgcgggccatcccccgcgagctcccggtcaagagcagctcgctgctgccggagatcaagcccgagcacaagaggggcccgctccccaaccacttcaacggccgggcagagggaggtcgaagcagagagctgggcagagcggccggagcgcctggagcttctgacgccgacggcttgaagcccaggaaccatttcggcgtgggcaggtcgacagtgaccactaaagtgaccctccctgccaagcccaaacatgtggaactaaatcttaaaacccctaagaatcttgacagtttgggaaatgagcacaatccatttagccagccagttcacaaaggcaacactgccaccaaaatctccttatttgaaaacaaacggacaaacagtagcccaagacacactgacattcgaggccaaaggaatactcctgcctctagtaaaacgtttgttgggagggcaaagctgaatttagccaaaaaagccaaagaaatggagcaacctgaaaagaaagtaatgccaaacagtccccagaatggtgtgctggttaaggaaactgctatagaaaccaaagttaccgtctcggaagaagagattctgccagcaaccagaggaatgaatggagactcttctgagaatcaagctcttggtcctcagcctaaccaagatgataaagcagatgtacaaacagatgctggctgcctttcagaaccagtggcttctgctctgattcctgtcaaggatcataagctcttagagaaggaggactcagaggctgcagacagcaaaagccttgtacttgaaaatgtaaccgatacagcacaagacatccccaccactgtggataccaaagatttacctccaacggccatgccaaagccacagcatacattttctgactcacagtcccctgctgagtcatctcctgggccttctctttcactgtctgcacccgctcctggggatgttcccaaagacacatgtgttcaatcacccataagcagtttcccatgcactgatctaaaagtgtcagaaaaccataaaggatgtgttttgcctgtgtctcgtcagaacaatgagaaaatgccacttttagaacttggaggagaaacaacccctcctttgtccacagagcgtagtccagaagctgtgggaagtgagtgtccatccagagtcctcgtccaggtcaggtccttcgtgctccccgtggagagcacccaggatgtgagctcccaggtcatcccagagagctctgaagttagagaagtgcagttgccaacttgtcacagtaatgaacctgaagtggtttccgttgcaagttgtgctcccccacaagaggaagtactgggcaatgaacactctcattgcacagcagagctcgcggcaaaatctggcccacaagtcataccgccagcatcagagaaaactctgcctattcaggctcaaagtcagggcagcagaacacccctgatggctgaatccagtcccaccaactctcccagcagcggaaatcacttagccactcctcaaaggccagatcagactgttacaaatggccaggatagccctgccagccttttgaacatttctgctggtagtgatgatagtgtatttgattcttcttctgatatggaaaaattcactgaaattataaaacagatggatagcgcagtttgtatgcccatgaaaagaaagaaggccaggatgccaaactctcctgctcctcactttgccatgcctcctattcacgaagaccatttagaaaaggtgtttgatcccaaagtgtttacctttggtttggggaagaagaaggaaagtcagccagaaatgtcaccggctttacatttgatgcagaaccttgacacaaaatccaaactgagacccaaacgtgcatctgctgaacagagcgtcctcttcaagtccctgcacaccaacactaatgggaacagtgagcctctggtgatgccggaaatcaatgacaaagagaacagggacgtcacaaatggtggcattaagagatcgagactagaaaaaagtgcacttttctcaagcttgttatcttctttaccacaagacaaaatcttttctccttctgtgacatcagtcaacactatgaccacggctttcagtacttctcagaacggttccctatctcagtcttcagtgtcacagcccacgactgagggtgccccgccctgtggtttgaacaaagaacagtcaaatcttctgcccgacaactccttaaaggtcttcaatttcaactcgtcaagtacatcacactccagtttgaaaagtccaagccacatggaaaaatacccgcaaaaagagaaaaccaaagaagatctggattcacgaagcaacctacacttgccagaaactaaattttctgaattgtcaaaactgaagaatgatgatatggaaaaggctaatcatattgaaagtgttattaaatcaaacttgccaaactgtgcaaacagtgacaccgacttcatgggtcttttcaaatcaagccggtatgacccaagcatttctttttctggaatgtcattatcagacacaatgacacttagaggaagtgtccaaaataaactcaatccccgacctggaaaggtagtgatatatagtgaacccgacgtctctgagaagtgcattgaagttttcagtgacattcaggattgcagttcttggagcctctctccagtgatactcataaaagttgttagaggatgttggattttgtatgagcaaccaaattttgaagggcactccatccccttagaagaaggagaattggaactctctggtctctggggtatagaagacattttggaaaggcacgaagaagcagagtctgataagccagtggtgattggttccatcagacatgtggttcaggattacagagttagtcacattgacttatttactgaaccagaagggttaggaatcctaagttcctactttgatgatactgaagaaatgcagggatttggtgtaatgcagaagacttgttccatgaaagtacattggggcacgtggctgatttatgaagaacctggatttcagggtgttcctttcatcctggaacctggtgaataccctgacttgtccttctgggatacagaagaagcgtacattggatccatgcggcctctgaaaatgatgtcagctcttggaactgctttttcaagagaaggtggccgtaaagttgaattccctacagatccaaaggtagttgtttatgaaaagcctttctttgaaggaaaatgtgtggaactagaaacaggaatgtgtagttttgtcatggagggaggtgaaacagaagaggcgactggagacgatcatttgccgtttacgtcagtggggtctatgaaagttctaagaggcatttgggttgcatatgagaaacctggatttaccggtcatcagtatttgctagaagaaggagaatacagggactggaaagcctggggaggttacaatggagagcttcagtctttacgacctatattaggtgatttttcaaatgctcacatgataatgtacagtgaaaaaaactttggatccaaaggttccagtattgatgtattgggaattgttgctaatttaaaggagactggatatggagtgaagacacagtctattaatgtactgagtggagtatgggtagcctatgaaaatcctgacttcacaggagaacagtatatactggataaaggattttataccagttttgaggactggggaggcaaaaattgtaagatctcttctgttcaacctatatgtttggattctttcactggcccaaggagacgaaatcagattcacttgttttcagaaccacagtttcaaggtcacagtcaaagttttgaagaaacaacaagtcaaattgatgattcattttctaccaagtcttgcagagtttcaggaggcagctgggttgtatatgatggagaaaatttcactggtaatcaatacgtgttggaagaaggccattatccttgtctgtctgcaatgggatgcccgcctggagcaactttcaagtctcttcgttttatagatgttgaattttctgaaccaacaattattctctttgaaagagaagacttcaaaggaaaaaagattgaacttaatgcagaaactgtcaatctccgatccctgggattcaacacacaaatacgctctgttcaggttattggtggcatatgggttacttatgaatatggcagttacagagggcgacagttcctattgtcacctgcagaagtacctaattggtatgaattcagtggctgtcgccaaataggttctctacgaccttttgttcagaagcgaatttatttcagacttcgaaacaaagcaacagggttattcatgtcaaccaatggaaacttagaggatctgaagcttctgaggatacaggtcatggaggatgtcggggccgatgatcagatttggatctatcaagaaggatgtatcaaatgcaggatagcagaagactgctgcctgacgattgtgggcagcctggtaacatctggctccaagctaggcctggccctggaccagaatgctgacagccagttctggagcttgaagtccgatggcaggatttacagcaagttgaagccaaatttagttttagacattaaagggggcacacagtatgatcaaaatcacattatcctcaacactgtcagcaaagagaagtttacacaagtgtgggaagccatggtcctatatacctgaacaaagaaggaagaagaatcttctggaggtccttccagccaccttatttcttaaaaaggacaatgctgatggaagaccagactggaaagtggatcgactcctccttcattgattctaaattcaaccttaaatcatgctgccatgactcagagaacttactcatcgtttcaaaagactatcatagctttaaaccaataatttgtcctcctttcatttcttgcctttcatttttggtagctgcttaaacaggttgcctaattagcagcttttgggtgattttgtaaaatgttatatcaagatttcaagactgtgtacattttaaattatttccaaagatagtgacaggagagaactggaacaaatttaccaactttgtggacctacaaagcccttacactttaaagggtaagacaaaggcttaagtttgaaaggtagagaactgtttagcatctgagaagaaatactttattaggcctgtaattttggttcttggccttaaacactttctggaacctttaaatatgctgcatagcacaatgggaaagccttaggtattcacacatttaaggaactctaaacaaaatactattttcctttagttcatattaaaaattaatacattttaaaaatttaatgtcaaagtctggtaacatttgttagtaggatttgagttattattttttgagacaggatctcaggctggagtgcagtggcacaatcacggctcactgcagcctctacctccccaggctcaggtgatcctcccacctcagcctcccaagtagctgggactataggcacacatcaccaagcccagccaaattttgttttttttttgtagagatggggtttcatcacgttgcccaggctgatctcgaacctctgggctcaagcaattcactcgcctcggcctcccaaaatgctgggattacaggcctgagccactgcgcccagccaggatttgaattattttaactcatccatgggctgccctagaatgtcacaaatgagggttgtttaatgcctttcttatagctgctactggaacactattatgacctaatttatgagccatccttactcatctacaagtgctgaagcaatgttacatacttttttgctaaactcagattttttagcctaatttcttgtcctcctatccacctgcatccacacatggcctgcatggggctgccttccctgcagtgttctgcagccatgcttcagggtatagctgttggtggacagcctcaggtcttgggggcactatagccactaaacgaggtgtgaaaggctcaagaggatgaccagcaattaattatccccagaaagtgaaggaaaagagacctttagggatgttgctggtcaagtcttgatttgaccggagtcaaatcaatcttcaagcaatcttggaatcctcaactgcagtaagcatttcaaaatgcaaacaaactgcttaacaactgacaagacaccagcccatacgctgctcttccaacagtgggttctagctttgaacaaaagtgctaaacatttccttgaatatattcttcctctttttgtcctcatcactcaatactggtgctcttgtcacaggtagaacagcttgtttcttttccatctattcaagtgtgtttctaattctaaaatgctgatcttctctggagtctatggtaggcaattatggtcactggaatagtttgtcttgttttaaaatattattggtgcatgtacaacagcatccaacatatctgtcttgttcctagatatatagctctgattttaggccttttgtgcataccattacaatatggtggggtaagacattctacagtagcctgtgctgaactgatctcttaaataaacttgcttctggttaactatgttgatgaaa

SEQ ID NO: 1156 - DNA, 1052 bp, Homo sapiens; identical to SEQ ID NO: 453

SEQ ID NO: 1157 - DNA, 4991 bp, Homo sapiens
ggtttccggagctgcggcggcgcagactgggagggggagccgggggttccgacgtcgcagccgagggaacaagccccaaccggatcctggacaggcaccccggcttggcgctgtctctccccctcggctcggagaggcccttcggcctgagggagcctcgccgcccgtccccggcacacgcgcagccccggcctctcggcctctgccggagaaacagttgggacccctgattttagcaggatggcccaatggaatcagctacagcagcttgacacacggtacctggagcagctccatcagctctacagtgacagcttcccaatggagctgcggcagtttctggccccttggattgagagtcaagattgggcatatgcggccagcaaagaatcacatgccactttggtgtttcataatctcctgggagagattgaccagcagtatagccgcttcctgcaagagtcgaatgttctctatcagcacaatctacgaagaatcaagcagtttcttcagagcaggtatcttgagaagccaatggagattgcccggattgtggcccggtgcctgtgggaagaatcacgccttctacagactgcagccactgcggcccagcaagggggccaggccaaccaccccacagcagccgtggtgacggagaagcagcagatgctggagcagcaccttcaggatgtccggaagagagtgcaggatctagaacagaaaatgaaagtggtagagaatctccaggatgactttgatttcaactataaaaccctcaagagtcaaggagttttttcttccttcgcagacatgcaagatctgaatggaaacaaccagtcagtgaccaggcagaagatgcagcagctggaacagatgctcactgcgctggaccagatgcggagaagcatcgtgagtgagctggcggggcttttgtcagcgatggagtacgtgcagaaaactctcacggacgaggagctggctgactggaagaggcggcaacagattgcctgcattggaggcccgcccaacatctgcctagatcggctagaaaactggataacgtcattagcagaatctcaacttcagacccgtcaacaaattaagaaactggaggagttgcagcaaaaagtttcctacaaaggggaccccattgtacagcaccggccgatgctggaggagagaatcgtggagctgtttagaaacttaatgaaaagtgcctttgtggtggagcggcagccctgcatgcccatgcatcctgaccggcccctcgtcatcaagaccggcgtccagttcactactaaagtcaggttgctggtcaaattccctgagttgaattatcagcttaaaattaaagtgtgcattgacaaagactctggggacgttgcagctctcagaggatcccggaaatttaacattctgggcacaaacacaaaagtgatgaacatggaagaatccaacaacggcagcctctctgcagaattcaaacacttgaccctgagggagcagagatgtgggaatgggggccgagccaattgtgatgcttccctgattgtgactgaggagctgcacctgatcacctttgagaccgaggtgtatcaccaaggcctcaagattgacctagagacccactccttgccagttgtggtgatctccaacatctgtcagatgccaaatgcctgggcgtccatcctgtggtacaacatgctgaccaacaatcccaagaatgtaaacttttttaccaagcccccaattggaacctgggatcaagtggccgaggtcctgagctggcagttctcctccaccaccaagcgaggactgagcatcgagcagctgactacactggcagagaaactcttgggacctggtgtgaattattcagggtgtcagatcacatgggctaaattttgcaaagaaaacatggctggcaagggcttctccttctgggtctggctggacaatatcattgaccttgtgaaaaagtacatcctggccctttggaacgaagggtacatcatgggctttatcagtaaggagcgggagcgggccatcttgagcactaagcctccaggcaccttcctgctaagattcagtgaaagcagcaaagaaggaggcgtcactttcacttgggtggagaaggacatcagcggtaagacccagatccagtccgtggaaccatacacaaagcagcagctgaacaacatgtcatttgctgaaatcatcatgggctataagatcatggatgctaccaatatcctggtgtctccactggtctatctctatcctgacattcccaaggaggaggcattcggaaagtattgtcggccagagagccaggagcatcctgaagctgacccaggtagcgctgccccatacctgaagaccaagtttatctgtgtgacaccaacgacctgcagcaataccattgacctgccgatgtccccccgcactttagattcattgatgcagtttggaaataatggtgaaggtgctgaaccctcagcaggagggcagtttgagtccctcacctttgacatggagttgacctcggagtgcgctacctcccccatgtgaggagctgagaacggaagctgcagaaagatacgactgaggcgcctacctgcattctgccacccctcacacagccaaaccccagatcatctgaaactactaactttgtggttccagattttttttaatctcctacttctgctatctttgagcaatctgggcacttttaaaaatagagaaatgagtgaatgtgggtgatctgcttttatctaaatgcaaataaggatgtgttctctgagacccatgatcaggggatgtggcggggggtggctagagggagaaaaaggaaatgtcttgtgttgttttgttcccctgccctcctttctcagcagctttttgttattgttgttgttgttcttagacaagtgcctcctggtgcctgcggcatccttctgcctgtttctgtaagcaaatgccacaggccacctatagctacatactcctggcattgcactttttaaccttgctgacatccaaatagaagataggactatctaagccctaggtttctttttaaattaagaaataataacaattaaagggcaaaaaacactgtatcagcatagcctttctgtatttaagaaacttaagcagccgggcatggtggctcacgcctgtaatcccagcactttgggaggccgaggcggatcataaggtcaggagatcaagaccatcctggctaacacggtgaaaccccgtctctactaaaagtacaaaaaattagctgggtgtggtggtgggcgcctgtagtcccagctactcgggaggctgaggcaggagaatcgcttgaacctgagaggcggaggttgcagtgagccaaaattgcaccactgcacactgcactccatcctgggcgacagtctgagactctgtctcaaaaaaaaaaaaaaaaaaaagaaacttcagttaacagcctccttggtgctttaagcattcagcttccttcaggctggtaatttatataatccctgaaacgggcttcaggtcaaacccttaagacatctgaagctgcaacctggcctttggtgttgaaataggaaggtttaaggagaatctaagcattttagacttttttttataaatagacttattttcctttgtaatgtattggccttttagtgagtaaggctgggcagagggtgcttacaaccttgactccctttctccctggacttgatctgctgtttcagaggctaggttgtttctgtgggtgccttatcagggctgggatacttctgattctggcttccttcctgccccaccctcccgaccccagtccccctgatcctgctagaggcatgtctccttgcgtgtctaaaggtccctcatcctgtttgttttaggaatcctggtctcaggacctcatggaagaagagggggagagagttacaggttggacatgatgcacactatggggccccagcgacgtgtctggttgagctcagggaatatggttcttagccagtttcttggtgatatccagtggcacttgtaatggcgtcttcattcagttcatgcagggcaaaggcttactgataaacttgagtctgccctcgtatgagggtgtatacctggcctccctctgaggctggtgactcctccctgctggggccccacaggtgaggcagaacagctagagggcctccccgcctgcccgccttggctggctagctcgcctctcctgtgcgtatgggaacacctagcacgtgctggatgggctgcctctgactcagaggcatggccggatttggcaactcaaaaccaccttgcctcagctgatcagagtttctgtggaattctgtttgttaaatcaaattagctggtctctgaattaagggggagacgaccttctctaagatgaacagggttcgccccagtcctcctgcctggagacagttgatgtgtcatgcagagctcttacttctccagcaacactcttcagtacataataagcttaactgataaacagaatatttagaaaggtgagacttgggcttaccattgggtttaaatcatagggacctagggcgagggttcagggcttctctggagcagatattgtcaagttcatggccttaggtagcatgtatctggtcttaactctgattgtagcaaaagttctgagaggagctgagccctgttgtggcccattaaagaacagggtcctcaggccctgcccgcttcctgtccactgccccctccccatccccagcccagccgagggaatcccgtgggttgcttacctacctataaggtggtttataagctgctgtcctggccactgcattcaaattccaatgtgtacttcatagtgtaaaaatttatattattgtgaggttttttgtcttttttttttttttttttttttggtatattgctgtatctactttaacttccagaaataaacgttatataggaaccgt

SEQ ID NO: 1158 - DNA, 2463 bp, Homo sapiens; identical to SEQ ID NO: 480

SEQ ID NO: 1159 - DNA, 3310 bp, Homo sapiens; identical to SEQ ID NO: 403

SEQ ID NO: 1160 - DNA, 3768 bp, Homo sapiens; identical to SEQ ID NO: 421

SEQ ID NO: 1161 - DNA, 1803 bp, Homo sapiens
gcacaggcaccgcgtggttctcacaaccagcagctcggctcactgagacccggtggtccagacgctgctcctggctggggtggcgctgcagggagaaccgcgagctctcaggggtcggcgggtgacttctttccggaagaaagcgaggaacgcgctctgcggggtgagccggactccccaactccggacgatcagcccaggactgagagccccgaagtccccaaccacaagtaagcggccccagaaggacaagtctaggtcgccgtccagagcgccatggccgcgcccgcccttcgtttgtgccacatcgccttccacgtgcccgccgggcagcccctagcccggaacctgcagcgcctcttcggcttccagcccctggcttcgcgggaggtggacggctggcggcagctagccctgcgcagcggcgacgcggtctttttggtgaacgagggcgcagggtctggagagccgctgtacggcctggatccgcgtcacgccgtgcccagcgccacaaacctgtgcttcgacgtggcggacgccggcgctgcaacccgggagctggcagcgctgggctgcagcgtgcctgtccctcccgttcgcgtgcgggacgcgcagggtgccgccacttacgccgtggtcagctcgcctgccggcatcctcagcctgaccttgctggagcgcgctggctaccgcggacccttcctacccggcttcaggcccgtgtcctctgcgcctggccccgggtgggtcagccgcgtggaccacctgaccttggcctgcacccccggcagctcccccacacttttgcgctggttccacgactgcctgggcttttgccacttgccgctgagcccaggtgaggatcccgagctgggcctcgaaatgacagcagggtttgggcttgggggactgaggcttacagccctgcaggcccagccgggcagcattgtccccactcttgttctggctgagtcccttccgggggcgacgacacgacaggaccaggtggagcagttcctggcccggcacaaggggccaggcctgcagcacgtggggctgtatacgcctaacattgtggaggccactgagggggtggcaactgctggaggccagttcctggctccccctggggcatactaccagcagccaggaaaggagaggcagatccgagctgcagggcacgagcctcatctgcttgctcgacaggggatcctgctagatggtgataaaggcaagtttctgcttcaggtcttcaccaagtccctttttactgaggacactttcttcctggagctgattcagaggcagggggccactggctttggtcagggcaacatcagagctctgtggcagtccgtacaggagcaatctgccaggagccaggaagcctaaggatgcccagggctgggtgcagccagctgtcctgcagctctggggagaccagcacagaactgaggaacatctgcaggaggcccaactagtgaaaggctttgcctccggggggcaggtgtgacttccatttcatcagtgcctgccagaagctgtgtctctcattgggctccaaagaggtgggattttttaaaactaaaacatttcttatatacagtctataataaatatgtaagatacaaagaacaataaaagaattacacactaggaaatagaacataaccaatactttcgagtcctccctgtgtcccgctgtgattctatttcctcccacccactcctcaaatcctgtcattattagccctttgcttttctgtattgtttcactccgtatgtaacataaccctaaataaa

SEQ ID NO: 1162 - DNA, 2016 bp, Homo sapiens
gccggcggatcacctgagtccccgggagaccctgtgcccctaaatcgcggtccactgcgcgcgtcaggtttctagaagcagggtagaacagacggcagacacctagcccaggctggtgttgttactaaacaatggcagctggtgagccaagggtgaccagggccctgaactcggtggcccagctttgagggaagcaaaattgttctcaattgtggaagaggagaatttggacagcagaacaaaaaaggaagacagcctcttggagcagatacatttgtcacaggaagccacatcaaaccctggggcctttgctgggcctctccatctgcccagttactgggaggtagatagccccaggaaggaatccagtcaggcctgggcaccaggccaggagtggataaagctagaaagagacaccacagaagagaagatgtttgaacagctgaagccaatcgaacctagagattgctggagggaggcacgggtgaagaagtctctcctgttcttccagaagccagtcacctttgaggatgtggcagtgaatttcacccaggaagagtgggactgtctagatgccagccagagggtcctttaccaggatgttatgtcggaaacctttaagaatctaacatctgtggccagaatctttctgcataagccagagctaatcaccaagcttgagcaagaagaggaacagtggagagagtttgtccatctcccaaacacagaaggcctttcagaaggcaagaagaaagagcttcgagaacaacatcccagtctgagagatgaggggactagtgatgacaaggtcttccttgcatgcagaggggccggccagtgccccctatctgccccagctgggactatggacaggacccgggtgcttcaagcatcccaggctgggccaccctttttttgctacacctgtggcaaatgtttcagcaggcgctcctacctctatagccaccagtttgttcacaatcccaagctgactaacagctgcagtcagtgtgggaagttgtttcggagccccaagtccctcagctatcacagacgcatgcatcttggggagaggcccttctgttgcacgctctgtgacaagacctactgtgatgcttctggactaagtcgtcaccgccgcgtccatctgggttaccggccccattcatgctctgtgtgtgggaagagcttccgggaccagtctgagctcaaacgccaccagaagatacaccaaaaccaggagccagtggatggaaaccaggagtgtactttgaggattccaggcacccaggctgaattccagacacccatcgccagaagccagaggtccatccaggggcttttggatgtgaaccatgcaccagtggccaggtcccaggaacccatatttagaactgagggtcctatggcccagaaccaggcatctgtacttaagaaccaagcacctgtgaccaggacccaggcacccatcactggaaccctctgtcaggatgccagatccaactctcatccagtgaagccctcaagactcaatgtcttctgttgcccccattgttctttgacttttagcaagaaatcctatctctccagacaccagaaggcccacctcacagagccgcccaactactgcttccattgcagcaagtctttcagctcattttccaggctggtcagacaccagcagacccactggaagcagaagagctacctttgccctatctgtgacctctcctttggggagaaagagggccttatggatcactggaggggctataaaggcaaggacctgtgccagagcagccaccataaatgccgggtgatcctgggccagtggcttggcttctctcatgatgtccccactatggctggggaggaatggaagcatggaggtgatcaatctccccccaggatccatacccccaggagaagaggcctaagagagaaggcctgcaaaggagacaaaacaaaggaggcagtgagcatcttgaaacataaataaatggcctttctgactga

SEQ ID NO: 1163 - DNA, 13660 bp, Homo sapiens; identical to SEQ ID NO: 449

SEQ ID NO: 1164 - DNA, 2610 bp, Homo sapiens; identical to SEQ ID NO: 850

SEQ ID NO: 1165 - DNA, 9386 bp, Homo sapiens
gcgcgtgtgcgtcccagccccgccggccagcgcaggaggccgccgcccgggcgcagagggcagccggtggggaggcatgccgccgctcctggcgcccctgctctgcctggcgctgctgcccgcgctcgccgcacgaggcccgcgatgctcccagcccggtgagacctgcctgaatggcgggaagtgtgaagcggccaatggcacggaggcctgcgtctgtggcggggccttcgtgggcccgcgatgccaggaccccaacccgtgcctcagcaccccctgcaagaacgccgggacatgccacgtggtggaccgcagaggcgtggcagactatgcctgcagctgtgccctgggcttctctgggcccctctgcctgacacccctggacaatgcctgcctcaccaacccctgccgcaacgggggcacctgcgacctgctcacgctgacggagtacaagtgccgctgcccgcccggctggtcagggaaatcgtgccagcaggctgacccgtgcgcctccaacccctgcgccaacggtggccagtgcctgcccttcgaggcctcctacatctgccactgcccacccagcttccatggccccacctgccggcaggatgtcaacgagtgtggccagaagcccgggctttgccgccacggaggcacctgccacaacgaggtcggctcctaccgctgcgtctgccgcgccacccacactggccccaactgcgagcggccctacgtgccctgcagcccctcgccctgccagaacgggggcacctgccgccccacgggcgacgtcacccacgagtgtgcctgcctgccaggcttcaccggccagaactgtgaggaaaatatcgacgattgtccaggaaacaactgcaagaacgggggtgcctgtgtggacggcgtgaacacctacaactgccgctgcccgccagagtggacaggcgctgtcagtactgtaccgaggatgtggacgagtgccagctgatgccaaatgcctgccagaacggcgggacctgccacaacacccacggtggctacaactgcgtgtgtgtcaacggctggactggtgaggactgcagcgagaacattgatgactgtgccagcgccgcctgcttccacggcgccacctgccatgaccgtgtggcctccttctactgcgagtgtccccatggccgcacaggtctgctgtgccacctcaacgacgcatgcatcagcaacccctgtaacgagggctccaactgcgacaccaaccctgtcaatggcaaggccatctgcacctgcccctcggggtacacgggcccggcctgcagccaggacgtggatgagtgctcgctgggtgccaacccctgcgagcatgcgggcaagtgcatcaacacgctgggctccttcgagtgccagtgtctgcagggctacacgggcccccgatgcgagatcgacgtcaacgagtgcgtctcgaacccgtgccagaacgacgccacctgcctggaccagattggggagttccagtgcatctgcatgcccggctacgagggtgtgcactgcgaggtcaacacagacgagtgtgccagcagcccctgcctgcacaatggccgctgcctggacaagatcaatgagttccagtgcgagtgccccacgggcttcactgggcatctgtgccagtacgatgtggacgagtgtgccagcaccccctgcaagaatggtgccaagtgcctggacggacccaacacttacacctgtgtgtgcacggaagggtacacggggacgcactgcgaggtggacatcgatgagtgcgaccccgacccctgccactacggctcctgcaaggacggcgtcgccaccttcacctgcctctgccgcccaggctacacgggccaccactgcgagaccaacatcaacgagtgctccagccagccctgccgccacgggggcacctgccaggaccgcgacaacgcctacctctgcttctgcctgaaggggaccacaggacccaactgcgagatcaacctggatgactgtgccagcagcccctgcgactcgggcacctgtctggacaagatcgatggctacgagtgtgcctgtgagccgggctacacagggagcatgtgtaacatcaacatcgatgagtgtgcgggcaacccctgccacaacgggggcacctgcgaggacggcatcaatggcttcacctgccgctgccccgagggctaccacgaccccacctgcctgtctgaggtcaatgagtgcaacagcaacccctgcgtccacggggcctgccgggacagcctcaacgggtacaagtgcgactgtgaccctgggtggagtgggaccaactgtgacatcaacaacaatgagtgtgaatccaacccttgtgtcaacggcggcacctgcaaagacatgaccagtggctacgtgtgcacctgccgggagggcttcagcggtcccaactgccagaccaacatcaacgagtgtgcgtccaacccatgtctgaaccagggcacgtgtattgacgacgttgccgggtacaagtgcaactgcctgctgccctacacaggtgccacgtgtgaggtggtgctggccccgtgtgcccccagcccctgcagaaacggcggggagtgcaggcaatccgaggactatgagagcttctcctgtgtctgccccacgggctggcaagggccaaacagggcagacctgtgaggtcgacatcaacgagtgcgttctgagcccgtgccggcacggcgcatcctgccagaacacccacggcggctaccgctgccactgccaggccggctacagtgggcgcaactgcgagaccgacatcgacgactgccggcccaacccgtgtcacaacgggggctcctgcacagacggcatcaacacggccttctgcgactgcctgcccggcttccggggcactttctgtgaggaggacatcaacgagtgtgccagtgacccctgccgcaacggggccaactgcacggactgcgtggacagctacacgtgcacctgccccgcaggcttcagcgggatccactgtgagaacaacacgcctgactgcacagagagctcctgcttcaacggtggcacctgcgtggacggcatcaactcgttcacctgcctgtgtccacccggcttcacgggcagctactgccagcacgatgtcaatgagtgcgactcacagccctgcctgcatggcggcacctgtcaggacggctgcggctcctacaggtgcacctgcccccagggctacactggccccaactgccagaaccttgtgcactggtgtgactcctcgccctgcaagaacggcggcaaatgctggcagacccacacccagtaccgctgcgagtgccccagcggctggaccggcctttactgcgacgtgcccagcgtgtcctgtgaggtggctgcgcagcgacaaggtgttgacgttgcccgcctgtgccagcatggagggctctgtgtggacgcgggcaacacgcaccactgccgctgccaggcgggctacacaggcagctactgtgaggacctggtggacgagtgctcacccagcccctgccagaacggggccacctgcacggactacctgggcggctactcctgcaagtgcgtggccggctaccacggggtgaactgctctgaggagatcgacgagtgcctctcccacccctgccagaacgggggcacctgcctcgacctccccaacacctacaagtgctcctgcccacggggcactcagggtgtgcactgtgagatcaacgtggacgactgcaatccccccgttgaccccgtgtcccggagccccaagtgctttaacaacggcacctgcgtggaccaggtgggcggctacagctgcacctgcccgccgggcttcgtgggtgagcgctgtgagggggatgtcaacgagtgcctgtccaatccctgcgacgcccgtggcacccagaactgcgtgcagcgcgtcaatgacttccactgcgagtgccgtgctggtcacaccgggcgccgctgcgagtccgtcatcaatggctgcaaaggcaagccctgcaagaatgggggcacctgcgccgtggcctccaacaccgcccgcgggttcatctgcaagtgccctgcgggcttcgagggcgccacgtgtgagaatgacgctcgtacctgcggcagcctgcgctgcctcaacggcggcacatgcatctccggcccgcgcagccccacctgcctgtgcctgggccccttcacgggccccgaatgccagttcccggccagcagcccctgcctgggcggcaacccctgctacaaccaggggacctgtgagcccacatccgagagccccttctaccgttgcctgtgccccgccaaattcaacgggctcttgtgccacatcctggactacagcttcgggggtggggccgggcgcgacatccccccgccgctgatcgaggaggcgtgcgagctgcccgagtgccaggaggacgcgggcaacaaggtctgcagcctgcagtgcaacaaccacgcgtgcggctgggacggcggtgactgctccctcaacttcaatgacccctggaagaactgcacgcagtctctgcagtgctggaagtacttcagtgacggccactgtgacagccagtgcaactcagccggctgcctcttcgacggctttgactgccagcgtgcggaaggccagtgcaaccccctgtacgaccagtactgcaaggaccacttcagcgacgggcactgcgaccagggctgcaacagcgcggagtgcgagtgggacgggctggactgtgcggagcatgtacccgagaggctggcggccggcacgctggtggtggtggtgctgatgccgccggagcagctgcgcaacagctccttccacttcctgcgggagctcagccgcgtgctgcacaccaacgtggtcttcaagcgtgacgcacacggccagcagatgatcttcccctactacggccgcgaggaggagctgcgcaagcaccccatcaagcgtgccgccgagggctgggccgcacctgacgccctgctgggccaggtgaaggcctcgctgctccctggtggcagcgagggtgggcggcggcggagggagctggaccccatggacgtccgcggctccatcgtctacctggagattgacaaccggcagtgtgtgcaggcctcctcgcagtgcttccagagtgccaccgacgtggccgcattcctgggagcgctcgcctcgctgggcagcctcaacatcccctacaagatcgaggccgtgcagagtgagaccgtggagccgcccccgccggcgcagctgcacttcatgtacgtggcggcggccgcctttgtgcttctgttcttcgtgggctgcggggtgctgctgtcccgcaagcgccggcggcagcatggccagctctggttccctgagggcttcaaagtgtctgaggccagcaagaagaagcggcgggagcccctcggcgaggactccgtgggcctcaagcccctgaagaacgcttcagacggtgccctcatggacgacaaccagaatgagtggggggacgaggacctggagaccaagaagttccggttcgaggagcccgtggttctgcctgacctggacgaccagacagaccaccggcagtggactcagcagcacctggatgccgctgacctgcgcatgtctgccatggcccccacaccgccccagggtgaggttgacgccgactgcatggacgtcaatgtccgcgggcctgatggcttcaccccgctcatgatcgcctcctgcagcgggggcggcctggagacgggcaacagcgaggaagaggaggacgcgccggccgtcatctccgacttcatctaccagggcgccagcctgcacaaccagacagaccgcacgggcgagaccgccttgcacctggccgcccgctactcacgctctgatgccgccaagcgcctgctggaggccagcgcagatgccaacatccaggacaacatgggccgcaccccgctgcatgcggctgtgtctgccgacgcacaaggtgtcttccagatcctgatccggaaccgagccacagacctggatgcccgcatgcatgatggcacgacgccactgatcctggctgcccgcctggccgtggagggcatgctggaggacctcatcaactcacacgccgacgtcaacgccgtagatgacctgggcaagtccgccctgcactgggccgccgccgtgaacaatgtggatgccgcagttgtgctcctgaagaacggggctaacaaagatatgcagaacaacagggaggagacacccctgtttctggccgcccgggagggcagctacgagaccgccaaggtgctgctggaccactttgccaaccgggacatcacggatcatatggaccgcctgccgcgcgacatcgcacaggagcgcatgcatcacgacatcgtgaggctgctggacgagtacaacctggtgcgcagcccgcagctgcacggagccccgctggggggcacgcccaccctgtcgcccccgctctgctcgcccaacggctacctgggcagcctcaagcccggcgtgcagggcaagaaggtccgcaagcccagcagcaaaggcctggcctgtggaagcaaggaggccaaggacctcaaggcacggaggaagaagtcccaggacggcaagggctgcctgctggacagctccggcatgctctcgcccgtggactccctggagtcaccccatggctacctgtcagacgtggcctcgccgccactgctgccctccccgttccagcagtctccgtccgtgcccctcaaccacctgcctgggatgcccgacacccacctgggcatcgggcacctgaacgtggcggccaagcccgagatggcggcgctgggtgggggcggccggctggcctttgagactggcccacctcgtctctcccacctgcctgtggcctctggcaccagcaccgtcctgggctccagcagcggaggggccctgaatttcactgtgggcgggtccaccagtttgaatggtcaatgcgagtggctgtcccggctgcagagcggcatggtgccgaaccaatacaaccctctgcgggggagtgtggcaccaggccccctgagcacacaggccccctccctgcagcatggcatggtaggcccgctgcacagtagccttgctgccagcgccctgtcccagatgatgagctaccagggcctgcccagcacccggctggccacccagcctcacctggtgcagacccagcaggtgcagccacaaaacttacagatgcagcagcagaacctgcagccagcaaacatccagcagcagcaaagcctgcagccgccaccaccaccaccacagccgcaccttggcgtgagctcagcagccagcggccacctgggccggagcttcctgagtggagagccgagccaggcagacgtgcagccactgggccccagcagcctggcggtgcacactattctgccccaggagagccccgccctgcccacgtcgctgccatcctcgctggtcccacccgtgaccgcagcccagttcctgacgcccccctcgcagcacagctactcctcgcctgtggacaacacccccagccaccagctacaggtgcctgagcaccccttcctcaccccgtcccctgagtcccctgaccagtggtccagctcgtccccgcattccaacgtctccgactggtccgagggcgtctccagccctcccaccagcatgcagtcccagatcgcccgcattccggaggccttcaagtaaacggcgcgccccacgagaccccggcttcctttcccaagccttcgggcgtctgtgtgcgctctgtggatgccagggccgaccagaggagcctttttaaaacacatgtttttatacaaaataagaacgaggattttaattttttttagtatttatttatgtacttttattttacacagaaacactgcctttttatttatatgtactgttttatctggccccaggtagaaacttttatctattctgagaaaacaagcaagttctgagagccagggttttcctacgtaggatgaaaagattcttctgtgtttataaaatataaacaaagattcatgatttataaatgccatttatttattgattccttttttcaaaatccaaaaagaaatgatgttggagaagggaagttgaacgagcatagtccaaaaagctcctggggcgtccaggccgcgccctttccccgacgcccacccaaccccaagccagcccggccgctccaccagcatcacctgcctgttaggagaagctgcatccagaggcaaacggaggcaaagctggctcaccttccgcacgcggattaatttgcatctgaaataggaaacaagtgaaagcatatgggttagatgttgccatgtgttttagatggtttcttgcaagcatgcttgtgaaaatgtgttctcggagtgtgtatgccaagagtgcacccatggtaccaatcatgaatctttgtttcaggttcagtattatgtagttgttcgttggttatacaagttcttggtccctccagaaccaccccggccccctgcccgttcttgaaatgtaggcatcatgcatgtcaaacatgagatgtgtggactgtggcacttgcctgggtcacacacggaggcatcctacccttttctggggaaagacactgcctgggctgaccccggtggcggccccagcacctcagcctgcacagtgtcccccaggttccgaagaagatgctccagcaacacagcctgggccccagctcgcgggacccgaccccccgtgggctcccgtgttttgtaggagacttgccagagccgggcacattgagctgtgcaacgccgtgggctgcgtcctttggtcctgtccccgcagccctggcagggggcatgcggtcgggcaggggctggagggaggcgggggctgcccttgggccacccctcctagtttgggaggagcagatttttgcaataccaagtatagcctatggcagaaaaaatgtctgtaaatatgtttttaaaggtggattttgtttaaaaaatcttaatgaatgagtctgttgtgtgtcatgccagtgagggacgtcagacttggctcagctcggggagccttagccgcccatgcactggggacgctccgctgccgtgccgcctgcactcctcagggcagcctcccccggctctacgggggccgcgtggtgccatccccagggggcatgaccagatgcgtcccaagatgttgatttttactgtgttttataaaatagagtgtagtttacagaaaaagactttaaaagtgatctacatgaggaactgtagatgatgtatttttttcatcttttttgttaactgatttgcaataaaaatgatactgatggtga

SEQ ID NO: 1166 - DNA, 4023 bp, Homo sapiens
agcgagcttccccagctagcctgtaggtgggtgtgtttaacagaagaaagcaatgggaacccgcctgtcagccagcctttcgagctaattagctcagcatacaacaaagataagtgagcctgggaagagggccccctgaggggtctttagattctgggaaatgtctgattggcagatgttaaaagggattccttggtaatccagtgcatcaatgagctgcagaaattcagcccaggactgcaagaattcaggcatgaggacactctgtacaggaggctcacacaggcagacccaagatggacagaaccttggaatctctgagacacatcattgcccaagtcttgcctcacagagatccggctctagtcttcaaagacttgaacgttgtgtcaatgttacaggaattttgggaaagcaagcagcagcagaaggctgcattcccaagtgaaggtgtggtggtctatgagtcactgccagctcctgggcctccctttgtgagttacgtgaccctcccagggggaagctgttttggcaactttcagtgctgcttaagtagagccgaggccaggcgggatgcagctaaagtggccctgatcaactccctcttcaatgagctgccctctcgcaggatcaccaaggaattcattatggaaagtgttcaggaagcagtagcctccaccagcggcaccttagatgatgcagatgaccccagcaccagtgttggggcctatcactacatgctggagtcaaacatggggaagactatgctggagtttcaggagctgatgaccattttccaactattgcactggaatggaagcctaaaagcccttcgtgaaacaaagtgttcccgacaggaagtcatctcctactattctcagtattctctagatgaaaagatgcgcagccacatggccctggactggatcatgaaggagcgggactcaccaggaattgtctctcaagagctacgaatggccctgaggcagttggaggaagccaggaaagcaggacaagaactacggttttacaaagaaaagaaagaaatattgagcttagccctgactcagatctgcagtgaccctgacacttcctcacccagtgatgatcagctgagccttacggccctgtgtggctatcactagcaaggccaagccccgggtaccctcagtgatggcagaggccagattaacattaggaatctcagtgcagaggtcctcagaggctccagcatctctagtactacctgaaggctctcctaaccctctccacacattccatttacagagtatgagagtcgtaggacccttacaagacccaacaagccactcgatgcatttttctatcacattctcaatagttccagctcaggatgaaaggatagacacaaaattgtttgaaaaacattttccaggcctggctccaacctaaagcctgactgtcacgtgccttgcttgattttatatatattgtttcaagaatagtccaatatagcattccccaaatgaacagcagccagaattaggtgaagtagcatgatagcagtgtttaaaaatacttaggattaaataaataatatggattgttttaaaaaatatccaaggatcagagtctctttctaagctttgtaagctaagcaatagtttatgtcctactagatacactgcaaactacagtggggattttatctggacatcccaccatcaaagatcttgaaatagtaatagtatgaaaatactagataaaattaatgtttaaaatgtttttgtaacaataatttttaaaacccacactcttccatatatggggataaatatcacctagaaaagtagcctcactcttattcctcaagaattaatatccaatgtttatgagtcttgcaatcaattttgttcatttttaatttgcaaatcgataacctgaactaatttgttcttattttttgccactgcaaacatatatctacagagagaaaaattaatggcattttaaaggttaaaacattttgaaaaattattagcatgtaacaaagaatgcttgcatttgattagtttcaccagcatttgagagaaggaccctttagctctgtttgttgttcaagaacataagcaaccagtagctcaaatgtagtatcattattaagtttaagtcactggaatcttctttaaaggaaggataagacattgccatctctatttaactcatccatatgggtcaatcaactgattagaaaatcaaaaaacaataaaaactttttttttttttttttttttagtagagacgggatttcatcatgttgcccaggctggtcttgaactcctgggctcaagccatctgcctgcctccacctcccaaaatgctgagattacaggtgtgagccaccatgcctggcctaaactaatttttagatagttcctggtcactcaaatttaagaatgtcagcaatgtcaattttaaatgctcataggtctttccatatctgtaacatgaaaatgattattctgcattttattcagtagtccaaattaaagaaaatgtttttctcaatttaaaataatttctttttcttttgtttatgcaagtgcatacatgcttcactgaaagcaaaaccattataattacattaaagtttataaaatatgatattttaacctcatatctaataagtatgtacaaaggtaaccatcactccttaaatccacatgaaaactactgtaactgatcatgtattttggaattagacttgataataaaagattatcatgtatcacatatctcacaccaggggaacaattagctacataattgtcataccttaatatcttttaaaggtaacagtaattttcaacacattttattttaaaatattattttaacaaaagttacattcctctccacaatgaggctaaatgtcacccacgaaagaactttattcccttatattcctgaaaagaaatcagaattaacatttttatgttgaataaattttaaaatttaggaaatgttctatttaaagttaatttctttcataaagccattactctttacattgtcatttccaaaaagccacaatttcccatgctggatgtgatgaaagttaggcacacctttactgcattagcagcctttgacaatgacttcctcaaactgacaccatcttaattagatgcagggacagggatcagatgggacaatatcaaatttactttgtgccctacaagttaaaaactgcacccattctgtaaattgaatatagaggttctcccttggccactgtcagcttttcttgactggccaaaactgcccattcttcctggaatggtatgaaagcttcagcaaaataaataaaagtcagaatctttgctggtccctttaatgctgatttgatagtaaatcaatttcagctgagacataagggctgtcagtctatcatataaacatctttaactatagcctagagaaaagagggttgaagagcaaagcagattttttttttccttttctatatcttgttctgaacaacacactgtgataaaggggactagagtggaagattccctatttaaacacatgaagctctgggtcctagccttttttggttataagccctttgagaatctgataaaagctgtggatcatctcctaggaaaatagaacaaaacatacatattcacattacacagttccagagtatgtggaccccccaaagtccagagattgccctaggggatctttagattcttgtttagaactgttgattttgaacacaacatacactgtcaaactttacatcagggatccaacataactcagacatagcccaggtagcctgtttctaacacaactgtcataatcctgaaatccaaaattgcactgtgtttgacatgagatagtttaagttccacaaaatccaaatttaccatattattgtttttaaaaaagcagtttagagcaaactgtcactaaacttggataaatgggtcagaaagtacagatttaataaagtcgtacctctaatgttca

SEQ ID NO: 1167 - DNA, 1561 bp, Homo sapiens
tcccacccccagcctggggcctctgggagccttggtcctgagcagccaacacaccagcccagacagctgcaagtcaccatggacgctgaagaggcctggcgctgctgctgccgcccgtcaccctggcagccctggtggacagctggctccgagaggactgcccagggctcaactacgcagccttggtcagcggggcaggcccctcgcaggcggcgctgtgggccaaatcccctggggtactggcagggcagcctttcttcgatgccatatttacccaactcaactgccaagtctcctggttcctccccgagggatcgaagctggtgccggtggccagagtggccgaggtccggggccctgcccactgcctgctgctgggggaacgggtggccctcaacacgctggcccgctgcagtggcattgccagtgctgccgccgctgcagtggaggccgccaggggggccggctggactgggcacgtggcaggcacgaggaagaccacgccaggcttccggctggtggagaagtatgggctcctggtgggcggggccgcctcgcaccgctacgacctgggagggctggtgatggtgaaggataaccatgtggtggccgccggtggcgtggagaaggcggtgcgggcggccagacaggcggctgacttcactctgaaggtggaagtggaatgcagcagcctgcaggaggccgtgcaggcagctgaggctggtgccgaccttgtcctgctggacaacttcaagccagaggagctgcaccccacggccaccgtgctgaaggcccagttcccgagtgtggctgtggaagccagtgggggcatcaccctggacaacctcccccagttctgcgggccgcacatagacgtcatctccatggggatgctgacccaggcggccccagcccttgatttctccctcaagctgtttgccaaagaggtggctccagtgcccaaaatccactagtcctaaaccggaagaggatgacaccggccatgggttaacgtggctcctcaggaccctctgggtcacacatctttagggtcagtggccaatggggcacatttggcactagcttgagcccaactctggctctgccacctgctgctcctgtgacctgtcagggctgacttcacctctgctcatctcagtttcctaatctgtaaaatgggtctaataaaggatcaaccacatggggttctgcggtgataatgagcacatagtgaggggtcagcaaatgtcagaagttacctgggacagccgggcacgatggctcacacctgtaatcccagcactttgggaggctgaggcgggaagatcacttgagttcaggagtttgagaccagcctggccaacatggtgaaaccccatctctaccaaaaatagaagaattagctgggtgtggtggcacgcgcctgtaatcccagctacttaggaggctgaggcaggagaatcgcttgaacccaggaagtggaggttgcagtgagctgatggtgccactgcactccagcctgggtgatagagcgagactctgtctccaaagaagaaacaaa

SEQ ID NO: 1168 - DNA, 5906 bp, Homo sapiens
tcggtcctcagaggaggggcccgggcaccctccgtgcgggccgcagcacgccggtctttgagggacccttggactcccggatctgcatgcgagggatgcggtcgaagacgagatgagggagctgacgggaggggaaacggaggggcaggtgaacatggagagagcaggaacagggagagagtagggacagcgactgggagacgcgctccacagaaacccggactgagaggcagcgagaggacgtagtcttgctctgttgcctaggctggagtagagtggtgtgatcttggctcactgcaacctccgcctcccaggttcaagcgattctcctgcctcagcctcccaagtagttgggattacagacagagtctggctctgtcgcccaggcgggaatgcagtggcgcaatcttggctcaccgcaacctctgcctccctggttcaagcaattctcatgcctcagcctcccaagcagctgggactacagagctgaggggccgctgcgggtggagtgcggcggagtcggcctcgcgaccccagcttgatccgccgcctgctgcaccgcgcctccgccgcgttcctgcgcgtcccgagccccgacggccgcgtgagtcccgtccgtgcggggaaggcagggccgggtcggcgccgcctgtggagaggacccggcggccgggcctgcttggagccgggcgcggtggcagcggcggcagcggcggcgacttccgaggcccgggctagacagcgcagggccatggctgaggcggccccggccccgacatctgaatgggactccgagtgccttacatccctgcagccccttcctcttcctacacccccagcagcaaatgaggcacacctgcagacagcagctatctctctgtggacagtggtggccgccgtgcaggctatagagaggaaggtggagatccacagccggcgactcctacacctggaaggtcggacagggacagcagagaagaaactagccagctgtgaaaagacagttaccgagcttgggaaccagctggagggcaagtgggccgtgctgggaaccctgctgcaggagtacgggctgctgcagaggcggctggagaacttggagaacctgctgcgcaacaggaacttctggatcctgcggctccctccaggtattaagggagatatcccaaaggtgcctgtggcatttgatgatgtctccatctacttttccactccagagtgggaaaaattagaagaatggcaaaaggaactttacaagaatatcatgaagggcaactacgagtctctcatctccatggattatgctataaatcaacctgatgtcttatctcagattcaaccagaaggggaacataatacagaggaccaggcagggccagaggaaagtgagattcccacagaccccagtgaagagcctggtatttcaacatcagatattctgtcttggattaaacaagaagaagagcctcaggttggggccccaccggagtccaaggagagtgacgtgtacaaaagcacttatgctgatgaagagcttgtcatcaaagctgaaggccttgctagatcctcgttgtgccctgaggttccagtccctttctcttctccaccagcagcagcaaaggatgctttttcagatgtggctttcaaaagccagcagtctacatccatgacaccttttggacgtccagccactgacctgcctgaagcctctgagggacaagtgacttttactcagttgggtagctatcccctcccacctccagttggcgagcaggtgttctcatgccaccactgtggcaagaatctcagccaagacatgttgctgacccaccaatgtagccatgctactgagcaccccttaccctgtgcccagtgccctaagcactttactccacaggcggacctcagcagcacctcccaggaccatgccagcgagacaccccccacctgcccacactgtgccaggacttttactcacccatcaagacttacctaccatcttcgggtccataacagcactgagcgtcctttcccctgtcctgattgccccaagcgctttgctgaccaggctcgactcaccagccaccggagagctcatgcaagcgaaaggcccttccgctgtgcccagtgcggcaggagcttcagcttgaaaatcagcctcctgctccaccagcggggtcatgcacaagagcgccctttctcctgccctcagtgtggcattgacttcaacggccactcggccctgatccgccaccagatgatccacacaggcgagcgtccttacccctgcactgactgcagtaagagcttcatgcgcaaggagcacctgctgaaccaccggcggctgcacacaggcgagcggcccttcagttgtcctcactgtggcaagagcttcatccgcaagcaccacctaatgaaacaccagcgcatccacaccggggagcggccctacccctgctcctactgtggcaggagcttccgctacaaacagacactcaaggaccacctccgttcaggccacaatggaggctgtgggggtgatagtgacccatcaggtcagccacccaacccaccaggtcccctcataactgggcttgaaacttctggcctgggtgtcaacactgaaggtctagagaccaaccagtggtatggggaagggagtggagggggagttttgtaaatccaaatctctgtggcttcatgcttgtatatgctcacagcagggcacaaaatccaagagaaggtctgtgagccccatccaacacccacagtaattattatctggcacatcaatgaatttggggtcctatacacttgactagagacatgcttgtgttttggaatttcacacccttacaagaataccacattttgaaacccagaaagacctggaaaggagcccagcatgtccatcttttcaaagatacaacaaaagcagaagttacaagaatattgcggagaggttggaaagcaggatttaacctctagttctcttgttctcagagaacagcaggttgatagtagattatgtctctaggtagagacagatacatgagaagagcctccaaaactggaagcccatcataaggcatgagaatgtttaactataaagccttttattagttctttgatagctaagatggttgttggagaaagtgcttaagccactgtttatgttgctgcctcctctctcaaaaccagccaagatctgttcacacacctctgtggctgtctttccctgaaacatggtaactcaagactgcctgcctaggtttcttagattaattattcacataaattttgtttaatattggttgaacaagaaatctgactttaaaagattattaaggagaatattccttaactatactggcttgatttgaaacaggctcttattgccatttaaactgccagaaatctttgccaaggtcctggttaaaaaaattggaaacggttttcttagccccagctttaaaagctagagatctcagagaaatagctggcttaacaatgacagaacagcttaaaatttgtgcctacaccatgttctgagagtcgttcacatcaaattcttatcttttccaagccagtaagttggcttctccattcctggtgtctgatattcttgacaatcatcagcaacaaagatcacagcactttccagaagcatggagcttcagaaagtgccagtgaactcttggtcctcagtagtgagatgataacagtgttataatgcagcttccttgagccatcagagagagtgtatgttcaccctatctggctgtatcccattggcagtggacagattgaggaaattcctagatcactgagagctaagcaccatgcatagacaacagtttgttcttgcctgtgttgcttttagggactttgactaccacatgttcttttcttggggtgatttaatcacctgggagcatctgagtctgctcctaagtggctttgcaactgggcctaagttctgtttcctttatggatctcaaattttcatctgcacaatgaggctgttgaaaggaaaaaaagtgagcctctaggaattattcaaaaaaagtctgtgatacattccttttcctgccaaagttctgtctctgtctttggcttctgtccaggcaaagctaaataagacagcaaagtcaaagcagataaattcttgttgaaacttgactaaaatttatttgatttgttgttttactcccacttggaatcctgaggtagaagacagaatgcagaagtcttacatcttgggcaggaaactggtttattcctatactcttgtttcctctgcttcttcctgaggtctagaacaaggtctggaaatgtttagacaggatattttcttgatgaagtgataaggaaaggacccatttttttgctcatcacctagcccatccttcactctctctagttatgcataacaacactagaagaaggtgttagcccagctaactttgcttctgggaaggctatgtctgaacatgttgctctgtaggataatcacacttagaaaacatctgctccatgacattcacaataccagggaccatgggagacacaagaaatgtgtgtctgctgtcataacttacagtgaaaaagcccaataatacagaacaagacatgatgggcaataccctagcatattgggattaagagctttctagccagaatctggacctataccatgggaaaatttaggggtgctgggaatcccaaagccaaggttctggcttcattggcaacccactaggaacttgaatgtgagattcagctctagtttgcaccttgatttccccagtgaaaagggagaagagccaaagtattgtctaggtgctgagttcccttttctgagtggatttcaagcatttgccagggtatgctggaggagggactcctaaagtaggtgagatgtgggactaggtaacactttaaatacttttttactcaaagatttgccaagaacacagcttattagtgaaagagacctgtggattgaaatggctgcagatagatcccgcagtcccttctgaaaggaactgtgtagccagcagggacctaaactttggcaaaaagtgaacacaattcaaatacgaatgaaggaagagccctcagatggaacgaaaggcgatgtgcaaggccatcccagagagacggaagcaggtgcgatactaagcctcagcccaagaataaaagagagttcaactgttactcttttctttcatcaatcccctatcagttagaactgcaggccagttccaaagagtgtttgcttaagattcaaaagtgggtaagtaaaatggatcagtgggaaggataaggtgtccaacagaaagtgtggaggagaaactcttggcctatcaagtgctcctgagagaaaccatgcaatttaacacttcagttaaagaaatacatgagaactgcttgtcatgaccagacaagataggaaaggggaaaccccagaaacgtgctcttcatctgtcagccttttggaccaagaagctgtcactatcacacataagcaccattcccttagagtggatccaggtgttgactataaccagatttactctttgcttactaggttttccattgtcaccattggatgaacctctggtttagccacagttgtgaaaataaatggaagttggttgattgtctagaaagtgcaagaagatggccctgctccttttctgctgaacatttagtattggaaactcctacttcccttttcattaataatgtgtgcaagtttcctattagcggggaaggtgtggggctctgctgggcttctcttgagcatatctgagaagtgatgttcatgtctatctcaaccaggaccagaccctgtgacttactcggtaataacagtccacacaagcctcgttgatattaaa

SEQ ID NO: 1169 - DNA, 1033 bp, Homo sapiens
ctcctcgccttcctccggctcagccgccgcgccgccgggctgctccttcttcctcctcgggcgcccgcggcgatgttcaaccgcgccgtgagccggctgagcaggaagcggccgccgtcagggcgtctctgggaaggcagtggattgttggtctgcgtggaacttctcaggtggacaccagagcatggaacttaaaatgacagtgtctgttggccacatatgcagtctgaactttgctttgcagacatccacgacagcgatggcagttccagcagcagccaccagagcctcaagagcacagccaaatgggcggcatccctggagaatctgctggaagacccagaaggcgtgaaaagatttagggaatttttaaaaaaggaattcagtgaagaaaatgttttgttttggctagcatgtgaagattttaagaaaatgcaagataagacgcagatgcaggaaaaggcaaaggagatctacatgacctttctgtccagcaaggcctcatcacaggtcaacgtggaggggcagtctcggctcaacgagaagatcctggaagaaccgcaccctctgatgttccagaaactccaggaccagatctttaatctcatgaagtacgacagctacagccgcttcttaaagtctgacttgtttttaaaacacaagcgaaccgaggaagaggaagaagatttgcctgatgctcaaactgcagctaaaagagcttccagaatttataacacatgagcccccaaaaagccgggactggcagctttaagaagcaaaggaatttcctctcaggaccgtgccgggtttatcattgctttgttatttgtaaggactgaaatgtacaaaacccttcaatgggatgtgtgttttattaactgcttcaccagtaaattttgcatgatggctaagctaacataaaaaaagaataataataacttggaagttttagtttacaaaacagagattccttcaacactggacacgtcgagcattttgtagcttaattaaacctcatgtaaggccaaaaaaa

SEQ ID NO: 1170 - DNA, 399 bp, Homo sapiens; identical to SEQ ID NO: 491

SEQ ID NO: 1171 - DNA, 3863 bp, Homo sapiens
gcgcctgcgcgggaggccgcgtcacgtgacccaccgcggccccgccccgcgacgagctcccgccggtcacgtgacccgcctctgcgcgcccccgggcacgaccccggagtctccgcgggcggccagggcgcgcgtgcgcggaggtgagccgggccggggctgcggggcttccctgagcgcgggccgggtcggtggggcggtcggctgcccgcgcggcctctcagttgggaaagctgaggttgtcgccggggccgcgggtggaggtcggggatgaggcagcaggtaggacagtgacctcggtgacgcgaaggaccccggccacctctaggttctcctcgtccgcccgttgttcagcgagggaggctctgcgcgtgccgcagctgacggggaaactgaggcacggagcgggcctgtaggagctgtccaggccatctccaaccatgggagtgaggcacccgccctgctcccaccggctcctggccgtctgcgccctcgtgtccttggcaaccgctgcactcctggggcacatcctactccatgatttcctgctggttccccgagagctgagtggctcctccccagtcctggaggagactcacccagctcaccagcagggagccagcagaccagggccccgggatgcccaggcacaccccggccgtcccagagcagtgcccacacagtgcgacgtcccccccaacagccgcttcgattgcgcccctgacaaggccatcacccaggaacagtgcgaggcccgcggctgttgctacatccctgcaaagcaggggctgcagggagcccagatggggcagccctggtgcttcttcccacccagctaccccagctacaagctggagaacctgagctcctctgaaatgggctacacggccaccctgacccgtaccacccccaccttcttccccaaggacatcctgaccctgcggctggacgtgatgatggagactgagaaccgcctccacttcacgatcaaagatccagctaacaggcgctacgaggtgcccttggagaccccgcatgtccacagccgggcaccgtccccactctacagcgtggagttctccgaggagcccttcggggtgatcgtgcgccggcagctggacggccgcgtgctgctgaacacgacggtggcgcccctgttctttgcggaccagttccttcagctgtccacctcgctgccctcgcagtatatcacaggcctcgccgagcacctcagtcccctgatgctcagcaccagctggaccaggatcaccctgtggaaccgggaccttgcgcccacgcccggtgcgaacctctacgggtctcaccctttctacctggcgctggaggacggcgggtcggcacacggggtgttcctgctaaacagcaatgccatggatgtggtcctgcagccgagccctgcccttagctggaggtcgacaggtgggatcctggatgtctacatcttcctgggcccagagcccaagagcgtggtgcagcagtacctggacgttgtgggatacccgttcatgccgccatactggggcctgggcttccacctgtgccgctggggctactcctccaccgctatcacccgccaggtggtggagaacatgaccagggcccacttccccctggacgtccagtggaacgacctggactacatggactcccggagggacttcacgttcaacaaggatggcttccgggacttcccggccatggtgcaggagctgcaccagggcggccggcgctacatgatgatcgtggatcctgccatcagcagctcgggccctgccgggagctacaggccctacgacgagggtctgcggaggggggttttcatcaccaacgagaccggccagccgctgattgggaaggtatggcccgggtccactgccttccccgacttcaccaaccccacagccctggcctggtgggaggacatggtggctgagttccatgaccaggtgcccttcgacggcatgtggattgacatgaacgagccttccaacttcatcaggggctctgaggacggctgccccaacaatgagctggagaacccaccctacgtgcctggggtggttggggggaccctccaggcggccaccatctgtgcctccagccaccagtttctctccacacactacaacctgcacaacctctacggcctgaccgaagccatcgcctcccacagggcgctggtgaaggctcgggggacacgcccatttgtgatctcccgctcgacctttgctggccacggccgatacgccggccactggacgggggacgtgtggagctcctgggagcagctcgcctcctccgtgccagaaatcctgcagtttaacctgctgggggtgcctctggtcggggccgacgtctgcggcttcctgggcaacacctcagaggagctgtgtgtgcgctggacccagctgggggccttctaccccttcatgcggaaccacaacagcctgctcagtctgccccaggagccgtacagcttcagcgagccggcccagcaggccatgaggaaggccctcaccctgcgctacgcactcctcccccacctctacacactgttccaccaggcccacgtcgcgggggagaccgtggcccggcccctcttcctggagttccccaaggactctagcacctggactgtggaccaccagctcctgtggggggaggccctgctcatcaccccagtgctccaggccgggaaggccgaagtgactggctacttccccttgggcacatggtacgacctgcagacggtgccagtagaggcccttggcagcctcccacccccacctgcagctccccgtgagccagccatccacagcgaggggcagtgggtgacgctgccggcccccctggacaccatcaacgtccacctccgggctgggtacatcatccccctgcagggccctggcctcacaaccacagagtcccgccagcagcccatggccctggctgtggccctgaccaagggtggggaggcccgaggggagctgttctgggacgatggagagagcctggaagtgctggagcgaggggcctacacacaggtcatcttcctggccaggaataacacgatcgtgaatgagctggtacgtgtgaccagtgagggagctggcctgcagctgcagaaggtgactgtcctgggcgtggccacggcgccccagcaggtcctctccaacggtgtccctgtctccaacttcacctacagccccgacaccaaggcaagagggcccagagtcctggacatctgtgtctcgctgttgatgggagagcagtttctcgtcagctggtgttagccgggcggagtgtgttagtctctccagagggaggctggttccccagggaagcagagcctgtgtgcgggcagcagctgtgtgcgggcctgggggttgcatgtgtcacctggagctgggcactaaccattccaagccgccgcatcgcttgtttccacctcctgggccggggctctggcccccaacgtgtctaggagagctttctccctagatcgcactgtgggccggggccctggagggctgctctgtgttaataagattgtaaggtttgccctcctcacctgttgccggcatgcgggtagtattagccacccccctccatctgttcccagcaccggagaagggggtgctcaggtggaggtgtggggtatgcacctgagctcctgcttcgcgcctgctgctctgccccaacgcgaccgctgcccggctgcccagagggctggatgcctgccggtccccgagcaagcctgggaactcaggaaaattcacaggacttgggagattctaaatcttaagtgcaattatttttaataaaaggggcatttggaatca

SEQ ID NO: 1172 - DNA, 3901 bp, Homo sapiens
aggaggagactcaggcaggccgcgctccagcctcaccaggctccccggctcgccgtggctctctgagcccccttttcagggaccccagtcgctggaacatttgcccagactcgtaccaaacttttccgccctgggctcgggatcctggactccggggcctccccgtcctcccctttcccgggttccagctccggcctctggactaggaaccgacagcccccctccccgcgtccctccctctctctccagccgttttggggaggggctctccacgctccggatagttcccgagggtcatccgcgccgcactcgcctttccgtttcgccttcacctggatataatttccgagcgaagctgcccccaggatgaccacgctggccggcgctgtgcccaggatgatgcggccgggcccggggcagaactacccgcgtagcgggttcccgctggaagtgtccactcccctcggccagggccgcgtcaaccagctcggcggtgtttttatcaacggcaggccgctgcccaaccacatccgccacaagatcgtggagatggcccaccacggcatccggccctgcgtcatctcgcgccagctgcgcgtgtcccacggctgcgtctccaagatcctgtgcaggtaccaggagactggctccatacgtcctggtgccatcggcggcagcaagcccaagcaggtgacaacgcctgacgtggagaagaaaattgaggaatacaaaagagagaacccgggcatgttcagctgggaaatccgagacaaattactcaaggacgcggtctgtgatcgaaacaccgtgccgtcagtgagttccatcagccgcatcctgagaagtaaattcgggaaaggtgaagaggaggaggccgacttggagaggaaggaggcagaggaaagcgagaagaaggccaaacacagcatcgacggcatcctgagcgagcgaggtaagcggtggcgccttgggcggcgcacttgctgggtgacttggagggcatcggctagctgacattggtgatctgacggcagccaagcccagctcggatcaaggtcccttcatgcgcggtgtctctgcgcctgagtaacgacatggaactgaaagaccagagggacactaggaatcaaaacaaacatttctattctgcttagtttttctgttttgtaaatctttctttcttaaccactttcagcccctgggattctagaactgtgaattgtgctctgttgtagggggcaggggaagctctcactctgttgccattaaatgtatgagactgggcatctctgagcaattgtagggccggggatagagggtacttgaatcttcagaagttgaagtagcttttatgccctcaggaaaggccctggtctccggagtttcctcgcattaaaggagagagagagagagtactcttttgggcaacggccctccaaaattgcccccacattggctgccttataaatatgtctgtgtgttgactggtcctcagcaccccaatcagatgaaggctctgatattgactctgaaccagatttaccactaaagaggaaacagcgcagaagccgaaccaccttcacagcagaacagctggaggaactggagcgtgcttttgagagaactcattaccctgacatttatactagggaggaactggcccagagggcgaagctcaccgaggcccgagtacaggtctggtttagcaaccgccgtgcaagatggaggaagcaagctggggccaatcaactgatggctttcaaccatctcattcccggggggttccctcccactgccatgccgaccttgccaacgtaccagctgtcggagacctcttaccagcccacatctattccacaagctgtgtcagatcccagcagcaccgttcacagacctcaaccgcttcctccaagcactgtacaccaaagcacgattccttccaacccagacagcagctctgcctactgcctccccagcaccaggcatggattttccagctatacagacagctttgtgcctccgtcggggccctccaaccccatgaaccccaccattggcaatggcctctcacctcaggtaatgggactcctgaccaaccacggtggggtacctcatcagccccagactgattacgcgctctcccctctcaccgggggtctggaacctaccaccacggtgtcggccagctgcagtcagagactagaccatatgaagagcttggacagtctgccaacatctcagtcctactgtccacccacctatagcaccacaggctacagtatggaccctgtcacaggctaccaatatgggcagtatggacaaagtaagccttggactttttagcaggtgcctttcattatctcaagccagatatcgcgtaagtgaactgtccacttggagctaaaactggccctgtttctggtcttcgcagcctagatatgaagaatctgctctgaaaacaaaaaaaaattacccttttgttggggggggtggggcagtggtcccaataggagacaaaggagagtgattgattttcttcctccaatagttggtttcaaatccttttgaacacgttcgacaaaagcagtggagaagaggaagacctggagcaataaaagacaaatgcaacattttaaggcaatggtttcacatggttacatatcaaaacatcccaattctttagtgctgatcatcgaggagctagaacattccatttgcttgtgtgcgtgcgtgcgtgtgtgtgtgtgtgtgtgtattgagatttacccagactggtttgggcaagcagactgttctaaaatataatagaataccctaaagtataacatgtcgatgttcgatgctgatacttctacaactttaaaactgctcatttcatgaagcaagaatggaggaatccttgactcttacacactggaaattgaaataaagataaatgcaaccatttttaggaagctagactagctgtaaaggacctcctaaataaattatttgttactgtatcctcatttgtaatctagttgtcaataaatggcccggacatgtcttgctaacaggatatgggctaccaggaagaaggacttgtttccctttcctgtgtggggagaggtgtgtgacgtttttccagttcacatttatttggtagcccacctgggttggaggaagggcacggtggagagaaagtgacatgcattcacatatctgcttatcagtgtgcaatactgtgtacctcatggatgctttggcaatgcccaaggcgatataagcaaaatcagaagtatatttttgcaggtgcttttattttcacagcccataattcatagtgatagagtgcagtgatgtttgccatttgctggacaaccaacacccgggttgctcctttgattagagaccagatcagataattatgcttttaaactgattacgtttacattcttctcttttctatgaaaggcagggcaagaacagaagtgttcacatggctctcatgtacttttaaattatacaatgatatccaatattaaaagattataggaactgaggtttacatacgtttgtgtggtgacattttagaatgtcaataaatttgctttttgagatgttgagaggaacaagaaggtggaaggcagtgttatttatttctttctattcttggaaccacgaatgaggtaggcacaaatacattccttttagagttaagaactatgacgtagcgagttagtgagactagacatagtaccgaatttagttcatgcattggtcttagagggtgatggaacaagagaagtactatctttgtgttgcagcctcaaccaacaacaatgtgttgtaaaaatgtctttcatgtaaaaagtgcagtaaatatttactatttataatgaataaacagttatgaaaactt

SEQ ID NO: 1173 - DNA, 4811 bp, Homo sapiens
accccgtctcggccatgggcgagcaccccagcccgggccccgcggtggccgcctgcgccgaggcggagcgcatcgaggagctggaacccgaggccgaggagcggctgcccgcggcgccggaggaccactggaaagtcctgtttgatcagtttgaccctgggaacacaggctacattagcacaggcaagttccggagtcttctggagagccacagctccaagctggacccgcacaaaagggaggtcctcctggctcttgccgacagccacgcggatgggcagatcggctaccaggattttgtcagcctagaagccttccttgacctctgacctccctgggactggattgggctccctcttgtgtgctcccacagcaaccatcactctgaactgtgattgctggttactaatctgtcttgagcaccaccgtatccctccctgtgcctgatgagcaacaagcgttccaacagcttccgccaagccatcctgcagggcaaccgcaggctaagcagcaaggccctgctggaggagaaggggctgagcctctcgcagcgacttatccgccatgtggcctatgagaccctgccccgggaaattgaccgcaagtggtactatgacagctacacctgctgccccccaccctggttcatgatcacagtcacgctgctggaggcaaggacaagggttgcctttttcctctacaatggggtgtcactaggtcaatttgtactgcaggtaactcatccacgttacttgaagaactccctggtttaccacccacagctgcgagcacaggtttggcgctacctgacatacatcttcatgcatgcagggatagaacacctgggactcaatgtggtgctgcagctgctggtgggggtgcccctggagatggtgcatggagccacccgaattgggcttgtctacgtggccggtgttgtggcagggtccttggcagtgtctgtggctgacatgaccgctccagtcgtgggctcttctggaggggtgtatgctctcgtctctgcccatctggccaacattgtcatgaactggtcaggcatgaagtgccagttcaagctgctgcggatggctgtggcccttatctgtatgagcatggagtttgggcgggccgtgtggctccgcttccacccgtcggcctatcccccgtgccctcacccaagctttgtggcgcacttgggtggcgtggccgtgggcatcaccctgggcgtggtggtcctgaggaactacgagcagaggctccaggaccagtcactgtggtggatttttgtggccatgtacaccgtcttcgtgctgttcgctgtcttctggaacatctttgcctacaccctgctggacttaaagctgccgcctcccccctgagggctggaggcccaaggtcggggaggggagggaaaagcagcacccacagggagcgcctgcgaggtttcttctcatcaccagctcagctaggccgggcagacaaggacagaagactctgggccactgtaatgtttgtgtttagatttggacacacagtggagacccttttctgaaaggcatctggcggaggagttgatgtggctgctgtcgtttttctcggctgctctgatgacatcgggccagggtgaaggtctggggtggggtgtgagagtggccctccctcacctgggctgggcttcttccatggggccagggggtgccccctcactgctgcggattgagcagcagcttcttcctcctcctctaccctcagagaccctaagagacatgggaaggctcgaaggttgttgcgtccaggcatggcccctctctagctcagaaataattgcaggccatgtggtgtctccttgacacctgctgtgtctggggctccagtaagaagagggcctactggacatgtcagctgtgacctggctgaaaccagggtgccctcctgggctggttggtgtgcaccggggcatgatctgttgtgcctgggttgggcagagcagggagcctgtaggctctaggacccctcttgtgctgggggtacccagtgagagggacccatgcagggggaataaacttcattccaagttccaccctggagaagacagacccaggaccagcttcagacttctccctccctttcttccaggatattggcatctcacacgggtgccccagcctccatgcccagccttgttttagggtctttttctttccttttgctgccctgacactactttgtgcctctctttggttatggagacagtgttttgaaacattcatgcgtgtgtgtgtgtgtgtgcgtatatgtgtgtatgtgatgggaaaggtaactgaggcacgacagcgcctgcagagaaggcatggaggatgcagggggcccatgtgggcatccgtgagaggtggcagaccgtggtgtgctgtggttgctgaatgtccttgctttgacaaagcctgcccccttccttcccatctcctgtcccttccacacctgcccctgagcatcactgaccggtggcagaatggccctgctggagggagagctcaagccctccaaggatccctggatgctgaggtttgccaggttcagctcttgtttccgtctgagatggccttcatatccaaaaaggttccatcctatctcccttaggagagaaagagctttgggggcgcaagagaggctggggtaggaatgttgaggccatgtgtccatttaagttagggggacaggaggctacaggaagaggaattccagtttagttggaaaactttgcctcaggagaattgttgggtgcatggatgaacctcagagggagggcagccagtagcctcggaggcttggatgcgggagagaacatggtggttatcaaatccaccccaccccattacacaggtgagaaaacaagatggagggaatgaccctcctaacaggagctggtgcaggccccgaatggagggcatgaggatgacctttgacaaaagatgacactccctttatcgtgctcttggaattctcaaccactgacagcccagaagaacaaagaacgccaggcctgggaggaggcaggggggctgggcgtgtccagaaacaggggcaggagtgtgggaacggtcttcctccagcctggtgcccatcctggcccttgagtgtagcagggtccagggtcagtcaggccaggcatttggggtcttgggccacagtggcttcccatcctggtgactacatgtaaatgggctcactcactcactggcaggcgaggcccagccataccgcatcttggcccactgctaaatagattgccctggcctcatccacatatgtagttccctaggtcctgctcccctgcaccagtgccatgctgagggccgcagcctgtggcactgtgggcccacgcctttggcggtgttgcgtcagcctggggcgtcttgtgtgtgccctgcccaccgttctctgccctagtgatagaaagatgtagatggaagtcagtgcctcagaggaggaggctctgaggctgtggagctgggctcagggaagaccaggggaggatgcagaaggagtcaggacattgctgcctctgcctgggctgcagccgcactaagctgagcgatgaggtcctttcctggagggatggagaatcccctccagattcctgtcctggcccctggggattctgtggtgtgggtggaatgagcagagtgccacctctgtctggtatgacctggagagggggcttcctctcttaggggtgagaaagcattgaactagaagattctagaaatccctcatagaagcactcagctccctcggggactcccagggaagcttgttactgagaaggacagtggaggcggaatcgtgtctcccaccatgttaagtgtgtcctctgctgccaaggaccctcgtctacaccttagaccaccagccccagctgttctctgtcagcacacccacctccatcccctctcccaaccatgacttccaagcggggccacagggtggggtcatagggtcacttcacctgacccaggcctctccccaggtcaggaggcagctgtctggtcagaggggttctctttgtggcatctggctttctcctcagcaggtcccaccaccctctcagcagcacttccccatggccaaggctggccgtgtcctctgtgcctctttccttgtctgaggtggctgccagcccagggggtggtgtgtaaatcttcaggctggtggaggtaggttggccttttatccacaggatacagaaactgaaagctggggaatccccaaacagcagccatagactcactggctctcattaaacgggagaggaatcacagaaactggggaagggaaaacaaaccttcaaaggagaaatttcgctttaatgacaccattcatcattcgttttttaattaggaaaagctccctaatgaggctcttttgccagctaataggactctcgatttccatgagaaccattcttgcccagaggattaggggagctgttgctcaccacaccaggatcttcccccagcgtccaatttaatttgcaaatacgtaatgcagattccctgggtgccgtgaaagcctttcctggcatcattcatgttgctccccgtgctggctggaaagcacggttctcctctgccttaaaaacagtgcccaacagtgaactgcccctccgaggacttgagtaagtggaaaaaacaaaacacagactgcaatgtttgtttctaagtatttttgtattgtgtacattctgtatatttttgttgtaacatattatttgagcacagattccattaaatattttttttctttttccaagc

SEQ ID NO: 1174 - DNA, 3286 bp, Homo sapiens; identical to SEQ ID NO: 399

SEQ ID NO: 1175 - DNA, 2503 bp, Homo sapiens
aaagctctacagaccagtgtccggagcgttcagaggcggggcggctctcgctgttggcagcggcccggaccaatgggcacgtcgcccgcggcctataagagtccgctgggccgcgggctgcaggcgctagggtcggttagtcgtcgccgtctgaggtgttccctggctttgtctcgccgtcgttgccgccccgtccctgccttcgtgccccccgccttggcccctgcccagccgctctccctgtcctcctccccttaaccacccccacggtttctgccgtcggggcccgggggccgggcggatgatgccgtcggagagcggagctgagcgcagggaccgggcggctgctcaggtggggacggctgcggccacggcggtggccacggcagccccggcaggcggcggccccgacccggaggccttatcggccttccccggacggcacctgagtgggctgagctggccacaggtgaagcgactggacgctcttctgagcgagccgattcccattcacgggcgcggcaacttccccacgctgagcgtgcagccccggcagatcgtgcaggtggtccgcagcaccctggaggagcagggactacatgtgcacagtgtgcggctgcatggttcagctgccagccacgtgctgcaccctgagagtggcctgggctacaaggatctggacctggtgttccgggtggacctgcgcagtgaggcatccttccagctgaccaaggcagtggtgctggcctgcctactagacttcctgccggccggtgtgagccgggccaagatcacgccactgacactcaaggaggcatacgtgcagaagctggtgaaagtgtgcacagactcggaccgctggagcctcatctcactgtccaacaagagcggcaagaacgtggagctcaagtttgtggactcggtgagacgccagtttgaattcagcatagactccttccagatcatcctggactccctgttgctctttggccagtgctcgtccactcccatgtctgaggccttccacccaacggtcacaggcgaaagcctgtacggggacttcaccgaggccctggagcacctgcggcaccgtgtcatcgccacgcgcagtcccgaggagatccgaggtggtggcctcctcaagtactgccacctcctggtgcggggcttccggccccggcccagcaccgatgtgcgcgccctgcagcgctacatgtgctcccgcttcttcatcgactttccagacctggtggagcagcggcgcaccctagagcgctacctggaggcccacttcggtggggcagatgcagcccgccgttacgcctgcctggtgacactgcaccgggtggtcaacgagagcaccgtgtgcctcatgaaccacgagcgccgccagacgctggacctcattgccgcactggcgctgcaggcactggctgagcagggcccagctgccactgccgccctggcctggcgccctccaggcactgacggggttgtgccagccactgtcaattactacgtgacccccgtgcaacctctcctggctcacgcctatcccacctggctgccttgtaactgactcagaccctggccagaagggaagggactgggcctcacggggtggggtggggcctccaagagtgtgtggaggacatgaccagaggcgcagaatgtgccaggaggcccagcactgcagggttgggcctttgattgaacagaccagactttcccgagcacgaggcccctgtgggcttaatgccagcctggggctctcagcaggaggaccctttggttattgcatcacacttttggaccagcatgccggtggggtgcaggcgccatttgtcttggaagtcaatttccttcaggagacaaagcaagtttggggtggtagccttaatgcccagcaccttggattgattcccatggtctaagagggtctttttgactaaggccagcctgtggtgatcccagcagctttggagggcctgcagcccacacactgactgatacatggtatgttacagggacttgtcactttggatcaggctgggccactacagggcctgatgggccaacttgggtaatcactgggaggagggaaactgaggcccgaggcagatacctgggtttggggagggctgggtttagcccggttctctgaactacatacccccagctgtgaagccttcctcttgaggggttgaggtgggcagtatacaggagccaagcagcccagggtgggtcgcagcccaggccccttccagggtgccactcctttcccccttgtgttgcaaggagccctcctgcctgggagcttgttctttggaaggtgctgagcctgaatttgccacagtcaagtcaacgttcccaccccactggcttggttacagggctctcacatggggtaggggagccatactcccacccccttgcgtattcccctgggtttgttgatattttgcactcttaacacctgccaataaagacggtctacactgaa

SEQ ID NO: 1176 - DNA, 438 bp, Homo sapiens; identical to SEQ ID NO: 499

SEQ ID NO: 1177 - DNA, 4690 bp, Homo sapiens; identical to SEQ ID NO: 419

SEQ ID NO: 1178 - DNA, 2448 bp, Homo sapiens
gctctgaccgactggtcccctaaacggtggcggcggtttttggtcgttgggccccgggatttaggaccaacatttgaagacccgaaggggaactgcaaccatgaatgaagaaaatatagatggaacaaatggatgcagtaaagttcgaactggtattcagaatgaagcagcattacttgctttgatggaaaagactggttacaacatggttcaggaaaatggacaaaggaaatttggcggtcctcctccaggttgggaaggtccacctccacctagaggctgtgaagtttttgtaggaaaaatacctcgtgatatgtatgaagatgagttagttcctgtatttgaaagagctgggaagatatatgaatttcgacttatgatggaatttagtggtgaaaatcgaggttatgcttttgtgatgtacactacaaaagaagaagcccaattagccatcagaattcttaataattatgaaattcgaccagggaagtttattggtgtgtgtgtaagcctggataattgtagattatttattggagctattcccaaggaaaagaagaaagaagaaattttagatgaaatgaagaaagttacagaaggagttgtagatgtcattgtttatccaagtgcaactgataagaccaaaaatcgtggttttgcatttgtggaatatgaatctcacagagctgctgctatggcaaggaggaaactaattccaggaacattccaactatggggccacaccattcaggtagattgggctgacccagagaaagaggtggatgaggaaaccatgcagagagttaaagttctttatgtaagaaatttaatgatctcaactacagaggaaacaattaaagcagaattcaataaatttaagcctggtgcagttgaacgggtaaagaaacttagagattatgcttttgttcactttttcaaccgagaagatgcagtggctgccatgtctgttatgaatggaaaatgcattgatggagcaagtattgaggtaacactagctaaaccagtaaataaagaaaacacttggagacagcatcttaatggtcagattagtccaaattctgaaaatctgattgtgtttgctaacaaagaagagagccacccaaaaactctaggcaagctgccaactcttcctgctcgtctcaatggtcagcatagcccaagtccgcctgaagttgaaagatgcacttaccctttttatcctggaacaaagcttactccaattagtatgtattctttaaaatccaatcattttaattctgcagtaatgcatttggattattactgcaacaaaaataactgggcaccaccagaatattatttatattcaacaacaagtcaagatgggaaagtactcttggtgtataagatagttattcctgctattgcaaatggatcccagagttacttcatgccagacaaactctgtactacgttagaagatgcaaaggaactggcagcccagtttacattacttcatttggactacaatttccatcgcagctcaataaatagtctttcccctgttagtgctaccctctcttctgggactcccagcgtgcttccttatacttcaaggccttattcttatccaggctatcctttgtcaccaacaatatcacttgctaatggcagccatgttggacagcggctatgtatctccaatcaggcctccttcttctgaagaaaatactaacattagtatgaaaatttgtgtaaatttgtagtatgaaaacttgcaaattaaaatattgttttattttagaatcgggtttgcatatttggttttaaaaaggtatttattccaaagtactaaacatcagctataattcagaataacatggagttgtagaatttataaaaatgcaaagtttaaaaagttattcagtggtttctcttgataaaggtacagcaaactactattctttttaaacttctaggattttcttctactttctgagtgggcaatagaacctagtcatttatgtttttttttttttttgcataattttactaaatagtatttcacaaatattaaagcacttgaagacaatggttatagtagatttgattaccaaggatcactatctgtactggagattagaacaattatatgaccagaagcatctaaccattatgtaaaaagaaatgatgagacaaaaagattaagatacaaattttgtgcagtactaaagaaaaagcagtctaccattgtggtccttgaaaataactatagatatttttgttatttgttagacacaaattataattttgttgttaatgtatttaagcattttatagttatgctttgtgtttttgatattctttgtattgttaataacaagtgttatgggtttttaatgttgaaatcatgtgttaatttttgtacttgaattcaaattttttgacattaaatatgtgatgcttcta

SEQ ID NO: 1179 - DNA, 2417 bp, Homo sapiens
ggtctcactctgttgctgtcttcacggagagcaggagcagaggctttgagaagccagtgggccttggcctcagccctgccggcagagggtccccaccatgcagctgaagtgccagggtgcttgtgaagtctaagcccttgtctggcatttgtcaggaatataggcgcacacttaagcggcccgggcgggtaccgccgtcccgccatggctctgaggcgcgccctgcccgcgctgcgcccctgcattccccgcttcgtcccgctgtccacggcgccggcctcccgcgagcagcccgcagcgggcccagcggccgtgccaggaggtgggtcggccacggcagtgcggccgccggtgcccgccgtggacttcggcaacgcgcaggaggcgtaccgcagccggcgaacctgggagctggcgcggagcctgctggtgctgcgcttgtgcgcctggcccgcgctgctggcgcgccacgagcagctgctgtatgtttccaggaaacttctaggacagaggctattcaacaagctcatgaagatgaccttctatgggcattttgtagccggggaggaccaggagtccatccagcccctgcttcggcactacagggccttcggtgtcagcgccatcctggactatggagtggaggaggacctgagccccgaggaggcagagcacaaggagatggagtcctgcacctcagctgcggagagggatggcagtggcacgaataagcgggacaagcaataccaggcccactgggccttcggggaccgcaggaatggtgtcatcagtgcccgcacctacttctacgccaatgaggccaagtgcgacagccacatggagacattcttgcgctgcatcgaagcctcaggtagagtcagcgatgacggcttcatagccattaagctcacagcactggggagaccccagtttctgctgcagttctcagaggtgctggccaagtggaggtgcttctttcaccaaatggctgtggagcaagggcaggcgggcctggctgccatggacaccaagctggaggtggcggtgctgcaggaaagtgtcgcaaagttgggcatcgcatccagggctgagattgaggactggttcacggcagagaccctgggagtgtctggcaccatggacctgctggactggagcagcctcatcgacagcaggaccaagctgtccaagcacttggtagtccccaacgcacagacaggacagctggagcccctgctgtcccggttcactgaggaggaggagctacagatgaccaggatgctacagcggatggatgtcctggccaagaaagccacagagatgggcgtgcggctgatggtggatgccgagcagacctacttccagccggccatcagccgcctgacgctggagatgcagcggaagttcaatgtggagaagccgctcatcttcaacacataccagtgctacctcaaggccccatcctgctgatgcctatgacaatgtgaccctggacgtggagctggctcgccgtgagggctggtgttttggggccaagctggtgcggggcgcatacctggcccaggagcgagcccgtgcggcagagatcggctatgaggaccccatcaaccccacgtacgaggccaccaacgccatgtaccacaggtgcctggactacgtgttggaggagctgaagcacaacgccaaggccaaggtgatggtggcctcccacaatgaggacacagtgcgctttgcactgcgcaggatggaggagctgggcctgcatcctgctgaccaccgggtgtactttggacagctgctaggcatgtgtgaccagatcagcttcccgctgggtgagccaggccggctaccccgtgtacaagtacgtgccctatggccccgtgatggaggtgctgccctacttgtcccgccgtgccctggagaacagcagcctcatgaagggcacccatcgggagcggcagctgctgtggctggagctcttgaggcggctccgaactggcaacctcttccatcgccctgcctagcacccgccagcacacccttagcctccagcaccccccgcccccgcccaggccatcaccacagctgcagccaaccccatcctcacacagattcaccttttttcaccccacacttgcagagctgctggaggtgaggtcaggtgcctcccagccctgcccagagtatgggcactcaggtgtgggccgaacctgatacctgcctgggacagccactggaaacttttgggaactctcctcgaatgtgtgggcccaaggcccccacctctgtgacccccatgtccttggacctagaggattgtccaccttctgccaaggccagcccacacagcccgagccccttggggagcagtggccgggctggggaggcctgcctggtcaataaaccactgttcctgc

SEQ ID NO: 1180 - DNA, 3205 bp, Homo sapiens
cccagtacggaacggcgcagcctcgggagcccggtgtggtgctcgcggacaggaagcaggagagtttgccaatagggatgtgacagcggttcccattaagcggtgatggtggttttgggacctgataatcgagctgggagtcagaggcgggatgtgtgcggtgaagggatgttttgatacccccatataaaataatctgtctgtcatgggagcccccacgtcctctgaaatagttcagctctgtctgcatgacttgtcctgggactgaggaaaatttaccaggtacaagaggagtaaagaatgatccctcctccacatggtgcctgctgagacttcttcatctggccttttggaagagcaaaaaatgatgaagtcccaggggttagtatcattcaaggatgtggctgtggatttcacccaggaggagtggcagcaacttgacccttctcagaggaccctgtacagggatgtgatgctggagaactacagccacctggtctcaatggggtatccagtttccaaaccagatgtcatctccaagttggaacaaggagaagagccatggatcataaagggagacatatcaaattggatctatccagatgaatatcaggcagatgggagacaagggaaacaggaagagtaaccttcacaactcccagtcatgtattttggggacagtttccttccatcataagatactgaaaggagtcacaagggatggttcattgtgctccattttaaaagtctgtcaaggtgatggtcagctgcagagatttctagagaatcaagacaaactcttcaggcaggtcacatttgttaacagcaaaacagtgactgaggcatcagggcataaatataatccactggggaaaatatttcaagagtgcatagaaacagatatatcaatacagagattccataaatatgatgcttttaaaaagaacttaaaaccaaatattgacctaccgagttgttataagagcaattcaagaaaaaaacctgatcagagttttggaggtggaaaatcatctagccagagtgagcccaattctaatcttgagaagattcacaatggagtaataccttttgatgataatcagtgtggaaacgtttttagaaatacacaatcccttattcaatatcagaatgtggaaactaaagagaaaagctgtgtatgtgttacatgtggaaaagcctttgctaagaagtcacaactcattgtacatcaaagaattcatactggaaagaaaccatatgattgtggtgcatgcggaaaagccttcagtgagaagtttcatcttgttgtacatcagagaactcatactggggagaaaccttatgattgttctgaatgtggaaaagccttctctcagaaatcgtcccttattatacatcagagagttcacactggggaaaaaccctatgaatgtagtgaatgcgggaaagccttctcccagaaatcacccctcattatacatcagagaatacatactggggaaaaaccctatgaatgtagagagtgtgggaaggccttttcccagaagtcacagctgattatacaccacagagctcatactggagagaagccgtatgagtgtaccgaatgtgggaaagccttctgtgagaagtcccacctcattatacataaaagaattcacactggtgagaaaccctacaaatgtgctcaatgtgaggaagccttcagcaggaagacagaactcattacacatcagttagttcatactggggaaaaaccttatgaatgtactgaatgtggaaagacattctcccgcaagtcacagctcatcatacatcagagaacacatactggagaaaaaccctataaatgtagtgaatgtggcaaagccttctgccagaagtcacatctcattggacatcagagaattcacacaggagaaaaaccttatatatgtactgaatgtgggaaagccttctctcagaagtcccaccttccgggacaccagcgaattcatacaggagagaaaccttacatatgtgctgaatgtggaaaggccttttctcagaagtcagaccttgttttacatcagaggattcatactggggaaagaccctatcaatgtgctatatgtgggaaggccttcatccagaagtcacaactaactgtacaccagagaattcacacagtggtaaaatcataatgaactggccacagaaaagccttagtattagctcaagccttaataattactagaaacccaattaatttgataagcttggggacaacatcccaatagataaaaatttttaagggaatttgtttctagtttggtgatgcctaacttttccagcaaagatgatggaaaatagttatataaatgaagaacatttttaatatggcatgtaaagcttttaaagttatgaactcagtgatcagcacagcaagttaagcatacagaatattgtcaagttgcatattccttatactacaaaatgataatcagccattgtgaaactgctaatattagcttgtcataattatggccataaactaatttttctataaaagacgtggaagaaagcttaagtaaacaataaaataaaacctatacactattttaagaaggggcttgagcatgacccctaaagctacatgtaaagttcttgtacaaaaaatggaatgataggttgatcagattcagtaaagttgatctgtatgcattttcccatctcaagcatataagttgacctgcatctctggaaggaccttgagattgatgcattttgagcaggtctcccttttactcttcccaactgggaacttggagctgaaaaacattggcactgaggccagatggccttgggtttaatcctggctcagtgcctcacagattgtgtgactttaggcaaacatacttctcctagctgagtattttttatcagtaagtacaaatacaatgcagagctcattttcagttaatattagtactttttaaatctttactctctatcttgaagcattagatgttaagactaatgtgtaaaaaccacgtctgagcttgcttttccctctggacactctgcttttgattgcctatccctataagtggctcattttactgtcttctgatcctggtggccttatttttgctatgttaaggttgtgttttttaatacttggatttattttcatatacttacataaaccgtggtgattgcacat

SEQ ID NO: 1181 - DNA, 3074 bp, Homo sapiens
gcctctggctcctcagggcattcccggcggctccgggtttggcaacgaggacgggggagtgcgactgcgtctcgggcagcatggccgagaagcggcacacacgggactccgaagcccagcggctccccgactccttcaaggacagccccagtaagggccttggaccttgcggatggattttggtggcgttctcattcttattcaccgttataactttcccaatctcaatatggatgtgcataaagattataaaagagtatgaaagagccatcatctttagattgggtcgcattttacaaggaggagccaaaggacctggtttgttttttattctgccatgcactgacagcttcatcaaagtggacatgagaactatttcatttgatattcctcctcaggagatcctcacaaaggattcagtgacaattagcgtggatggtgtggtctattaccgcgttcagaatgcaaccctggctgtggcaaatatcaccaacgctgactcagcaacccgtcttttggcacaaactactctgaggaatgttctgggcaccaagaatctttctcagatcctctctgacagagaagaaattgcacacaacatgcagtctactctggatgatgccactgatgcctggggaataaaggtggagcgtgtggaaattaaggatgtgaaactacctgtgcagctccagagagctatggctgcagaagcagaagcgtcccgcgaggcccgcgccaaggttattgcagccgaaggagaaatgaatgcatccagggctctgaaagaagcctccatggtcatcactgaatctcctgcagcccttcagctccgatacctgcagacactgaccaccattgctgctgagaaaaactcaacaattgtcttccctctgcccatagatatgctgcaaggaatcataggggcaaaacacagccatctaggctagtgtagagatgagcgctagccttccaagcatgaagtcggggaccaaattagcctttaactcataaagagagggtagggcttttctttttccatatgtcaattgtggtgttcccagaatgtatagcagttataaaaataggtgaaagaattgttagcttgtaaatactgagagattggtgatttatataaggtaatctgttagtcttaaaatagttaaaagtttgtatttttagattattatgtagtaggttagatccctcttgttttgacttccactgactcattctgaaccccctaagcacccaggccagaggcaagaacctgggctgtaactgccacctgacaccgctgactggctaaatgctttgcagaaagtgatgaccttacaccacaaccagcttctccaggtcatatgtgccttacctccagagagtctttttttttttttttctgagatggagtttcactcttgttgcccaggctggagtgcaatagcatgatctcggctcactgcaacctccgcctcctgggttcaagagattctcctgcctcagcctccccagtagctgggattacaggctcatgccaccatgcccagctaatttttgtattattattattgttttttagtagagacggggtttcaccatgttggccaggctagtcacgaactcctaacctcaggtgatccacccacctctgcctcccaaagtgctgggattacaggcatgagctaccacacctggtttggagagtcttaattaaggaaatttccctaatgttcatttattttctaaatccagaccgtgtttcagaataatccttacttgagagtagccattttcttgcctgtacttgtcagaactagaggaaatagccaagactaatgaaaaagattactctaacccttaaaagacttttaaattcactactagagtggtcattttaaaaatacatccatgttttaacttatttgagccttctttatgagtaaatgattcctccttgttctgtctttcaaaccagctaaatatttgtcacaaaagtgcttttttctcactgttgcctattttcatatatcaggttttaaatagttttaattttttaataaaattttctctacgttctatatgcaattgttatatatctatttgaatagctgaaggactaaaatacttttttaagagataacttcaggaaaccattatattttactatctgcatgctgttaactgtggtacactgtgaaatatgttgattacaaacccattcattacatagtataaggaattcacagtatattgactatatagtgtctaatgatcttgggcagatactgtcaaacttacaatatctatatagatgtaggtctttttaaatttacctagtcattcttctatcatgtatattgatgctgaaagaggaactggtcagctcctctggacaacaaattcttagtctataatattaggagacatcttctgttttgcaaatgtctgtgaatctgagcaacctggcattctgcttactggccagaaagctggcgggtgacatttgtaacatttcctctttgagactctgagttcacctagagaagtctaagcataacagctttctttcccagcacgagcctttatagctctctttagctcaaccactctgtccatccagccaatggatgtcccttcccctgtaccccaatttcaagcttattttaggaagccttgaactaccatgtatcctggctcctagctgagtttattagaggtatggagcagtgcaacttaaactcaagttgcacttacattttgaattttaaaatgatggttttatctgttgtgtgaagtggttcacccttgaggaccaggagcctccatatcctgactgaaaaccttttctgagacttagagtaacagtgcttttggttccttgagttctcctgtctccagataccaaatgaccttgacttttctgccttgtgaattcgtagtccaatcagctgaaattaaatcacttgggagggacgcatagaaggagctctaggaacacagtgccagtgcagaagtttctccaggtggcctccctttccaacaatgtacataataaagtgtatgcactttcactaata

SEQ ID NO: 1182 - DNA, 1066 bp, Homo sapiens
caattgctggggctgcagcgctgcctccgagaccgcgaggtgggtggatcgggtcttcctggaagggtgcgataaggccgggcgaggtgcctgggatgcttctccccttccgcgaggaagagatctaattgggtagggcgggtgtagactagcctgccgagccgcccgctggcacctgcagcctcctgggcgcccgccgggccccggcgagaaagttgttaaagggagcgaggtggttgttcctggggtccgaggcgcgcctctcacgccctgcccaacagaagccgcagtcccgtggggtctggagacgcagtttcctgttaatgacaataaatccctgctccccctgcctcagacatctacgcagcgaaatcgagcctggccttgagggtccacaccgcgagggaagatgcgtgcgcccattccagagcctaagcctggagacctgattgagatttttcgccctttctacagacactgggccatctatgttggcgatggatatgtggttcatctggcccctccaagtgaggtcgcaggagctggtgcagccagtgtcatgtccgccctgactgacaaggccatcgtgaagaaggaattgctgtatgatgtggccgggagtgacaagtaccaggtcaacaacaaacatgatgacaagtactcgccgctgccctgcagcaaaatcatccagcgggcggaggagctggtggggcaggaggtgctctacaagctgaccagtgagaactgcgagcactttgtgaatgagctgcgctatggagtcgcccgcagtgaccaggtcagagatgtcatcatcgctgcaagcgttgcaggaatgggcttggcagccatgagccttattggagtcatgttctcaagaaacaagcgacaaaagcaataactgaaaaagactgtcctgtcagcgatgactttatacatcaagggggtcttgttttgctagagagtttggggtttggtttgtggatttcattgtgatttataataaggcttattttcacagaataaaataaagcaaaacgagggaggattttattgggggaagtgcagc

SEQ ID NO: 1183 - DNA, 778 bp, Homo sapiens; identical to SEQ ID NO: 446

SEQ ID NO: 1184 - DNA, 4131 bp, Homo sapiens; identical to SEQ ID NO: 436

SEQ ID NO: 1185 - DNA, 2168 bp, Homo sapiens; identical to SEQ ID NO: 404

SEQ ID NO: 1186 - DNA, 4966 bp, Homo sapiens
gccggggaaggacagacggacggcgcttcctccttcggcgagcggttcccgggcacctcggcttggcccgggcgcgagtggagcgcgcctggctggccgccggcctcctgaaggtcccgttgcgtaccccctgggctggatatgttcatgttcacgtgaagatggatttactgtacggtctcgtgtggctgctgacagtcctcctggaggggatctctggccaaggagtgtacggcttgagcctgtaccagaatgataagtggaaattagtcctcaaagtaacctcagctgtttcattattgtgtgcctcgagcatctggttattcaagctcctcccacggttcgtattgtgcactcaggcttggcctgtaacattgaagaggagcgctactccgaaagggtctacactatccgggaaggagaaacccttgagttgacttgtctagtcacaggacatccacgtccacagatcaggtggaccaaaacagcaggaagtgcctctgacagattccaagactcaagtgtcttcaatgagactttgaggattacaaatattcagcgacaccaaggaggccggtattactgtaaagcagagaatggcttggggtctccagcgataaagtcaatcagagtggatgtatactatttggatgatccagtagtaactgttcatcaaagtataggtgaagctaaagaacaattttactatgagagaacagtgttcctccggtgtgttgccaattccaatcctcctgttcggtatagctggagacgtggccaggaggtcttgctgcaaggatctgataaaggagttgagatttatgaaccattctttacccagggtgaaacaaagatcttaaaactaaagaatcttcgacctcaggactatgctaattatagctgcattgcttcagtgaggaatgtatgtaatattcctgataagatggtgtcgtttagactgtccaataaaacagcatcaccgtcaattaaactcttggtggatgatcctatagttgtaaatcctggagaggccataacattagtatgtgttacaacaggaggagagcctgcaccttctctcacctgggtcaggtcctttgggactctgcctgaaaagactgttttgaatggaggaactttgaccatacctgccatcacctcagatgatgctggtacttacagctgcattgccaataataatgtgggaaaccctgcaaaaaagtccaccaacatcattgtgagagcattaaaaaaaggacgattttggatcacaccagatccttatcacaaagatgacaacatccagattggccgtgaggtgaaaatatcttgccaagtagaagctgttccttctgaggagctaacatttagttggtttaaaaatggtcgtccattaagaagttctgagcggatggtcattacacagactgatcctgatgtctctccgggaacaacaaacttggacatcattgatttaaaattcacggattttgggacgtacacatgtgtagcatctctgaagggaggaggaatatctgatatcagtatcgatgttaatatatccagcagcacagttccacccaatctgactgttccacaggaaaaatcaccattggtcaccagagaaggagacacaatagaactgcaatgtcaagtaactggcaaacctaaaccaatcatcctttggtctagagcggataaagaagttgcaatgcctgatggatcaatgcaaatggagagttatgatggaacactgaggattgtgaatgtatctagggaaatgtcaggaatgtacagatgtcagaccagccaatacaatggatttaacgtgaaaccaagggaagccttggtgcagctcatcgttcagtatccccctgcagtggaaccagcattcttggaaatccggcaaggacaggatcgaagtgtcactatgagttgcagagtactgagagcctatccaatacgggtgctgacctatgagtggcgcttgggcaataaattattacggacgggtcaatttgactctcaggaatacacagagtacgctgtgaagagtctttccaatgaaaactatggggtttataactgtagcatcataaatgaagctggagctgggagatgcagctttcttgttacaggaaaggcctatgctccagaattctattatgatacctacaatccagtatggcagaacagacaccgtgtttattcttacagtctacagtggacacagatgaatcctgatgcagtggatcggattgttgcataccggttgggcatcaggcaggctggacagcagcgctggtgggagcaggagattaaaataaatgggaatattcaaaagggagaattaattacatataacttgacagagctaattaaaccagaagcttatgaagtccgactgactcctctcaccaaatttggtgaaggagattcaacaattcgtgtgatcaaatatagtgctcctgtaaatcctcatttgagagaatttcattgtggatttgaagatggtaatatttgtttgttcactcaagatgatacagataattttgactggacaaagcaaagtacagcaacaagaaatacaaaatatactcctaatacaggacctaatgctgaccgtagtggctccaaagaaggtttttatatgtacattgagacatcacgacccagattggaaggcgaaaaggctcgacttctcagccctgttttcagcatagctcccaaaaacccttatggacccacaaacactgcatattgtttcagcttcttttatcacatgtatggacaacatataggtgtcttaaatgtttatctacgtttgaaagggcaaacaacaatagagaatccactgtggtcttcaagtgggaataaaggacaaagatggaatgaggctcatgttaatatatacccaattacttcatttcagctcatttttgaaggtatccgaggtcctggaatagaaggtgacattgctattgatgatgtatcaattgcagaaggagaatgtgcaaaacaagacctagcaactaagaattccgttgatggtgctgttgggattttggttcatatatggctttttcccattatcgtcctcatctctatcttaagtcctcgaaggtgaccttatcctggcagaggctataaaagattcaccaggcactggcatgaagaaagagtctttgtaaatggacattgaacaaacaaactaccaaagattcctccactgactactgactcaaaaataaaataataaaaacaaatttttttaagcactggggataaaaagacatcatggaagtataacttattccagactaaacataaaagataatcttgacctgagtagagaagagaccttcaggtgcttttgtggctaaaaagattacagcgtcatctggttgaactctggaaaaaaaaaaaaaaatgaaaaaaagaaaaaaaaaagagctatagaaatccttgtcaaagcacaaagtcatggctggttttgtttcaaatgaatagtttgcttgttaccatggaaacctaatggcctgccaacaaaaacctcactgtaaacagggtacgtgaagagctggcatttattttccttacgagaaggttttcgtagagaattaaataaatgtaggcccttttacctttggctgttacccttccttgaaaataacccgaactcagaattatttaaagcattcatgtttctccccaccttatccccatcccacctttattattattatttttctcccatggctaagctagataactgtatgctgtctctttttgcatgcactactatccaggatggtaaacctgggcttacatgttacacaggcttatcggagtttgcttgcggccacttgaacacccaaactacgtcatctgttccaatgaagaaaccaaaccaccatcttttataaattgccatggaaaccaagtgccttcaatgaaacaagcctgaataattttcaactcagaagcttgcactgctaagagtggtttgtgtaaaactattttataaacaaactacagagcctaaatgtgcaaattacaggcaagacaacaaagccgcttctgaagaagaaaggaccgaagctgctgcgtaagcccatgcagacaagatatttgttgtttaacctcctagacagccatggcctttcggcttattgtccattagaaaatcacttccattgagaccagacatggagcaacactttttttcttccaggttattaaatgggtcaaccagagcaaaaggttattaagaatacttagtgcagaaggtggtaaaacacaaaagtgatttttttactctaacctccatttgaaatgaaattggccctagctttagagggaacaagaaaatgtttgggattgcagtgcatactaactctacagtggaactgggcctgaaaaatctggctttattctaaactctgagggtaatatgcctctgccctttagtcagactctgtgcaaattgtgaaatattattttattattttaccaagattataaaaacacttttacaaaaaaacaaaaacctgtaaaaataattttgagctacctgacgacaaatcatatctttaaccagccagttttccaatgcattgtaaatttcacttaaacctgttggttatgaaaatttgaagatcattttccttaaattatctcagcttttaacttcatttaaaaagacttttgtctaagaagaatattattattatatgttctttcaacaccccaggattaaaaaaactgattatgcaagcaattggaatataagtattaaattatagcatttgcaaatattaatataaaagcacaacaaaatgtagtggaaaatgacaaagcttgttttttaaaacaattctgtagaaatgtttgtgcaaattcagtaattcaacttaaaatataattttacagctatgttcaataaagcctctttccaggtaaggta

SEQ ID NO: 1187 - DNA, 2892 bp, Homo sapiens
gaggaggggcggcgggtggcgggctcgactgcccccagccgaggggcagccccggggccgggcccggcgcgcacccggccagcgcgccctcgccagctgcgctctgagttctgggccagctccccagaggcctaggcgccgccgccgcgagggcgcggggcagacaaaggaggcagacaaaggcgggcgcagcccagcagccgtgcgggcaccgggcgaggcaggcccactcctcccgtaatatcatctctgagggcccttacaggacttccagaccgagtccacgcccctgggggacttgggagcagtaaaatgtagtggcaggaggcacctcggccatcgcccaccccaccagctgggagactcgggcaggttattcacccttctgcacctcgcttgacttatctgtataaagagaacagtcacagtaactgcctcatggagttactcccaggactgagataatccacggacacacttagcccagtgcccagcactcggctggagctccaaaaagccctcttccggcgcctgctaaagcgagagaaatgccctcgggggaagatatgtagcgatccaatggaacgtggagatcaacgttgtgttttcttcgcgcccacccgaagttgaagggaggtggcgcggcgggtctcagcccctcccggacgccgaggcccggcccccgcccctcggagacccgcccccgcatgcggaaccgccctctgcgaggcccggtttgggccgtgcgggaatgggcgtggcctgggcggggcgggcgctaggacccaccggagcgccgtgaacgtcaccgagcggcgccgaggccccgggttgagcgggaggcgcgatcggtccggtcggtggctccccgcggcggggccgggcccgatctcgggcgggaaccgagcgcagagccgggtagcgggaaggatgaccacgctcacacgacaagacctcaactttggccaagtggtggccgatgtgctctgcgagttcctggaggtggctgtgcatctcatcctctacgtgcgcgaggtctaccccgtgggcatcttccagaaacgcaagaagtacaacgtgccggtccagatgtcctgccacccggagctgaatcagtatatccaggacacgctgcactgcgtcaagccactcctggagaaggtgagggtgcactgggctccccagccatctcaccccatgctcacccccgtccctgtgtgctcacagtccaactctgggatggggtgaagctaggactctgtggggtcttcatggctccaatacccagaagcctgttccctgcactctggagaccatcccaacccaggggcaggccccaaggcatgcgggccatgttcagggtgccttgggcctgggagcccgggttggagctggctctaagtaggggctgccccagagggttcggggttcttctcacatccgtcccctgttctccacgctaaacgttctgtctgagctgagcccctcagggtttcttccccatctagtcctgatctcagacttcctgggaccttccctatggggcccgggcattctctcagcctacaccactcatgctggagggtgccggcttctcaaactcgctatctggcctcttggggacccccagcctagcagctgagcagggctgtgagtgggccgtttctcctccttccttgggcaagggggtggaggcagggtggtgtagtcggggtggggtgcctggctctgcagtgggggttcctctctttgcagaatgatgtggagaaagtggtggtggtgattttggataaagagcaccgcccagtggagaaattcgtctttgagatcacccagcctccactgctgtccatcaggtgggctgcccctgcccctcgcccactagctggcatcagctcagactcgctgttgtctcatgtggagcagctgctccgggccttcatcctgaagatcagcgtgtgcgatgccgtcctggaccacaaccccccaggtgtgtccactccccaccctctcttcccttggcatttccatggttatctcgggttggtctgtgttcccaggtccatgtttggctgttctgagactcatctcttcctaaccctgagagtccacctcctctgggaagcttccctgattgattctacctggcttccatctccctattgactggggcttttcttagcacttgctttgccatctgctctgggggtgctgctgagccagcaagggaagtgggaagaggctgggcccagtggctggcaccagggcggtgggggagcctccaccaacctcttgcctctccaggctgtaccttcacagtcctggtgcacacgagagaagccgccactcgcaacatggagaagatccaggtcatcaaggtgagatgagatgggtctgggtctgggcgcaggctctagaaacgtgatgtcgcagttccaggcgggcaggggcactgcctgtgatttcccctggatcctggcggatgagcaggatgtccacatgcatgacccccggctgataccactaaaaaccatgacgtcggacattttaaaggtatgcagctttacgtggaagagcgcgctcataaaggcagctgagggggcacctgccaccccactgatgcccaaactgtcagactttgggggatccccgcctagggcagtgctgcatggctgccctgattccaagtgctcttatcgcctctgtgtgtggatcgcccgccccagcccggggccgctcaggtctgcttggaggatgcctcccccaggagggcagtgagggatgccgcaacctcgacttctcagcctcctggggttccgccggccaacactgtctgtctcaaatactgtgctgtgagttgtttcaataaaggggccccaagggctgggctga

SEQ ID NO: 1188 - DNA, 3377 bp, Homo sapiens
ataacgctacctgccgagcaagccgagtggagggaggcaaaggccaggctgaggatcagggtggcccgggtggcagcggggaggcgctgcatgctggaggctgtgctgagtgcccggtgcaggtgagccggtcctgcggagttgtgccgagtgcctgctgcagtctcatttccagttcctccatgacgtggcaagtgaagacaggaatgaaaggaatgtaaagcagcttttctctgaagagaagaagagagagagacacagccaagaacagagctgcctcctggctctttgggagcctgggaggagaaggagccgggaggggcgctgcggggaagccacctgcggattcactggctgctgctccgcccaggactgctagcaagcacggagggctgccagacctggggctccctgctccgtgcgtcaggttggggaaaccaccgtctgccccagaccctgacccaggacccgcctggaggaagctgggaccgaggctgggccaagatggtgtctgtgtttcgaagcgaggagatgtgtttgtcacaactgtttctccaggtggaagctgcatattgctgtgtggctgagctcggagagctcggattggttcagttcaaagatttaaatatgaatgtgaacagctttcaaaggaaatttgtgaatgaagtcagaaggtgtgaatcactggagagaatcctccgttttctggaagacgagatgcaaaatgagattgtagttcagttgctcgagaaaagcccactgaccccgctcccacgggaaatgattaccctggagactgttctagaaaaactggaaggagagttacaggaagccaaccagaaccagcaggccttgaaacaaagcttcctagaactgacagaactgaaatacctcctgaagaaaacccaagacttctttgagacggaaaccaatttagctgatgatttctttactgaggacacttctggcctcctggagttgaaagcagtgcctgcatatatgaccggaaagttggggttcatagccggtgtgatcaacagggagaggatggcttcctttgagcggttactgtggcgaatctgccgaggaaacgtgtacttgaagttcagtgagatggacgcccctctggaggatcctgtgacgaaagaagaaattcagaagaacatattcatcatattttaccaaggagagcagctcaggcagaaaatcaagaagatctgtgatgggtttcgagccactgtctacccttgcccagagcctgcggtggagcgcagagagatgttggagagcgtcaatgtgaggctggaagatttaatcaccgtcataacacaaacagagtctcaccgccagcgcctgctgcaggaagccgctgccaactggcactcctggctcatcaaggtgcagaagatgaaagctgtctaccacatcctgaacatgtgcaacatcgacgtcacccagcagtgtgtcatcgccgagatctggttcccggtggcagatgccacacgtatcaagagggcactggagcaaggcatggaactaagtggctcctccatggcccccatcatgaccacagtgcaatctaaaacagcccctcccacatttaacaggaccaataaattcacagctggcttccagaatattgttgatgcctatggtgtcggcagctaccgggagataaacccagccccctacaccatcatcactttccccttcctgttcgctgtgatgtttggagactgtggtcatggaaccgtgatgctcctggctgcactttggatgattctgaatgagagacgcttgctctcccagaagacagacaatgaggtgagtaattcctttggatgatttggaacaccttcttccacgggcgctatctgatcctacttatgggcatcttctccatctacacgggtttgatctacaatgactgcttctccaagtccttgaacatctttggctcttcttggagtgtccaacccatgttcagaaacggcacatggaatactcatgtaatggaggaaagtctatatctgcagctggacccagccataccaggagtgtattttggaaatccatacccgtttgggattgatccgatttggaacttggcttcaaacaaactcacatttctgaactcgtataaaatgaagatgtcggtgatcctgggaattgtccagatggttttcggtgtcatcctcagccttttcaatcacatatacttcagaagaactctcaacatcattctgcaatttatccctgagatgatttttatcctgtgtctgtttggatacctggttttcatgatcattttcaaatggtgctgctttgacgtccatgtatctcagcacgcccccagcatcctcatccacttcatcaacatgtttctgtttaactacagtgactcttccaacgcacccctctacaaacatcagcaagaagtccaaagtttctttgtggttatggctttgatttctgtgccgtggatgcttctgattaagccgtttattcttagagccagtcatcggaaatcccagctgcaggcatccaggatccaagaagatgccactgagaacattgaaggtgatagctccagcccttctagccgttctggccagaggacttctgcagatacccacggggctctggacgaccatggagaagagttcaactttggagacgtctttgtccaccaagccatccacaccatcgagtactgcctgggctgcatttcaaacacagcctcctacctgcggctctgggccctcagcctggctcatgcacaactgtctgaagtgctctggactatggtgatgaacagcggccttcagacgcgaggctggggaggaatcgtcggggtttttattatttttgccgtatttgctgtcctgacagtagccatccttctgatcatggagggcctctctgctttcctgcacgccctgcgactgcactgggttgagttccagaacaagttctatgtcggggatggttacaagttttctccattctcctttaaacacatcctggatggcacagccgaggagtaggctgagggctgcacctcccacggtggtcaccatgccaatgaaggaagttcagtcttgtctttgatatcagcccctgcaaggcgctcaatgggaaggttgttcttggctcacctgaagcatgaaactgtgtattatttggacgtcagcctgtggatttgatacgacttaaccacgtcagaggaaggactttggcaagtgatattgtcttcatgtggggtattaattctcaaataataaagtaattgacaaatgaggggagaatgctaaacagatgtcttcttgcaatattttaaatattgtatttgagaaaataaacatctgagtcattca

SEQ ID NO: 1189 - DNA, 9661 bp, Homo sapiens
cagcgactcctctggctcccgagaagtggatccggtcgcggccactacgatgccgggagccgccggggtcctcctccttctgctgctctccggaggcctcgggggcgtacaggcgcagcggccgcagcagcagcggcagtcacaggcacatcagcaaagaggtttattccctgctgtcctgaatcttgcttctaatgctcttatcacgaccaatgcaacatgtggagaaaaaggacctgaaatgtactgcaaattggtagaacatgtccctgggcagcctgtgaggaacccgcagtgtcgaatctgcaatcaaaacagcagcaatccaaaccagagacacccgattacaaatgctattgatggaaagaacacttggtggcagagtcccagtattaagaatggaatcgaataccattatgtgacaattaccctggatttacagcaggtgttccagatcgcgtatgtgattgtgaaggcagctaactccccccggcctggaaactggattttggaacgctctcttgatgatgttgaatacaagccctggcagtatcatgctgtgacagacacggagtgcctaacgctttacaatatttatccccgcactgggccaccgtcatatgccaaagatgatgaggtcatctgcacttcattttactccaagatacaccccttagaaaatggagagattcacatctctttaatcaatgggagaccaagtgccgatgatccttctccagaactgctagaatttacctccgctcgctatattcgcctgagatttcagaggatccgcacactgaatgctgacttgatgatgtttgctcacaaagacccaagagaaattgaccccattgtcaccagaagatattactactcggtcaaggatatttcagttggagggatgtgcatctgctatggtcatgccagggcttgtccacttgatccagcgacaaataaatctcgctgtgagtgtgagcataacacatgtggcgatagctgtgatcagtgctgtccaggattccatcagaaaccctggagagctggaacttttctaactaaaactgaatgtgaagcatgcaattgtcatggaaaagctgaagaatgctattatgatgaaaatgttgccagaagaaatctgagtttgaatatacgtggaaagtacattggagggggtgtctgcattaattgtacccaaaacactgctggtataaactgcgagacatgtactgatggcttcttcagacccaaaggggtatctccaaattatccaaggccatgccagccatgtcattgcgatccaattggttccttaaatgaagtctgtgtcaaggatgagaaacatgctcgacgaggtttggcacctggatcctgtcattgcaaaactggttttggaggtgtgagctgtgatcggtgtgccaggggctacactggctacccggactgcaaagcctgtaactgcagtgggttagggagcaaaaatgaggatccttgttttggcccctgtatctgcaaggaaaatgttgaaggaggagactgtagtcgttgcaaatccggcttcttcaatttgcaagaggataattggaaaggctgcgatgagtgtttctgttcaggggtttcaaacagatgtcagagttcctactggacctatggcaaaatacaagatatgagtggctggtatctgactgaccttcctggccgcattcgagtggctccccagcaggacgacttggactcacctcagcagatcagcatcagtaacgcggaggcccggcaagccctgccgcacagctactactggagcgcgccggctccctatctgggaaacaaactcccagcagtaggaggacagttgacatttaccatatcatatgaccttgaagaagaggaagaagatacagaacgtgttctccagcttatgattatcttagagggtaatgacttgagcatcagcacagcccaagatgaggtgtacctgcacccatctgaagaacatactaatgtattgttacttaaagaagaatcatttaccatacatggcacacattttccagtccgtagaaaggaatttatgacagtgcttgcgaatttgaagagagtcctcctacaaatcacatacagctttgggatggatgccatcttcaggttgagctctgttaaccttgaatccgctgtctcctatcctactgatggaagcattgcagcagctgtagaagtgtgtcagtgcccaccagggtatactggctcctcttgtgaatcttgttggcctaggcacaggcgagttaacggcactatttttggtggcatctgtgagccatgtcagtgctttggtcatgcggagtcctgtgatgacgtcactggagaatgcctgaactgtaaggatcacacaggtggcccatattgtgataaatgtcttcctggtttctatggcgagcctactaaaggaacctctgaagactgtcaaccctgtgcctgtccactcaatatcccatccaataactttagcccaacgtgccatttagaccggagtcttggattgatctgtgatggatgccctgtcgggtacacaggaccacgctgtgagaggtgtgcagaaggctattttggacaaccctctgtacctggaggatcatgtcagccatgccaatgcaatgacaaccttgacttctccatccctggcagctgtgacagcttgtctggctcctgtctgatatgtaaaccaggtacaacaggccggtactgtgagctctgtgctgatggatattttggagatgcagttgatgcgaagaactgtcagccctgtcgctgtaatgccggtggctctttctctgaggtttgccacagtcaaactggacagtgtgagtgcagagccaacgttcagggtcagagatgtgacaaatgcaaggctgggacctttggcctacaatcagcaaggggctgtgttccctgcaactgcaattcttttgggtctaagtcattcgactgtgaagagagtggacaatgttggtgccaacctggagtcacagggaagaaatgtgaccgctgtgcccacggctatttcaacttccaagaaggaggctgcacagcttgtgaatgttctcatctgggtaataattgtgacccaaagactgggcgatgcatttgccctcccaataccattggagagaaatgttctaaatgtgcacccaatacctggggccacagcattaccactggttgtaaggcttgtaactgcagcacagtgggatccttggatttccaatgcaatgtaaatacaggccaatgcaactgtcatccaaaattctctggtgcaaaatgtacagagtgcagtcgaggtcactggaactaccctcgctgcaatctctgtgactgcttcctccctgggacagatgccacaacctgtgattcagagactaaaaaatgctcctgtagtgatcaaactgggcagtgcacttgtaaggtgaatgtggaaggcatccactgtgacagatgccggcctggcaaattcggactcgatgccaagaatccacttggctgcagcagctgctattgcttcggcactactacccagtgctctgaagcaaaaggactgatccggacgtgggtgactctgaaggctgagcagaccattctacccctggtagatgaggctctgcagcacacgaccaccaagggcattgtttttcaacatccagagattgttgcccacatggacctgatgagagaagatctccatttggaacctttttattggaaacttccagaacaatttgaaggaaagaagttgatggcctatgggggcaaactcaagtatgcaatctatttcgaggctcgggaagaaacaggtttctctacatataatcctcaagtgatcattcgaggtgggacacctactcatgctagaattatcgtcaggcatatggctgctcctctgattggccaattgacaaggcatgaaattgaaatgacagagaaagaatggaaatattatggggatgatcctcgagtccatagaactgtgacccgagaagacttcttggatatactatatgatattcattacattcttatcaaagctacttatggaaatttcatgcgacaaagcaggatttctgaaatctcaatggaggtagctgaacaaggacgtggaacaacaatgactcctccagctgacttgattgaaaaatgtgattgtcccctgggctattctggcctgtcctgtgaggcatgcttgccgggattttatcgactgcgttctcaaccaggtggccgcacccctggaccaaccctgggcacctgtgttccatgtcaatgtaatggacacagcagcctgtgtgaccctgaaacatcgatatgccagaattgtcaacatcacactgctggtgacttctgtgaacgatgtgctcttggatactatggaattgtcaagggattgccaaatgactgtcagcaatgtgcctgccctctgatttcttccagtaacaatttcagcccctcttgtgtcgcagaaggacttgacgactaccgctgcacggcttgtccacggggatatgaaggccagtactgtgaaaggtgtgcccctggctatactggcagtccaggcaaccctggaggctcctgccaagaatgtgagtgtgatccctatggctcactgcctgtgccctgtgaccctgtcacaggattctgcacgtgccgacctggagccacgggaaggaagtgtgacggctgcaagcactggcatgcacgcgagggctgggagtgtgttttttgtggagatgagtgcactggccttcttctcggtgacttggctcgcctggagcagatggtcatgagcatcaacctcactggtccgctgcctgcgccatataaaatgctgtatggtcttgaaaatatgactcaggagctaaagcacttgctgtcacctcagcgggccccagagaggcttattcagctggcagagggcaatctgaatacactcgtgaccgaaatgaacgagctgctgaccagggctaccaaagtgacagcagatggcgagcagaccggacaggatgctgagaggaccaacacaagagcaaagtccctgggagaattcattaaggagcttgcccgggatgcagaagctgtaaatgaaaaagctataaaactaaatgaaactctaggaactcgagacgaggcctttgagagaaatttggaagggcttcagaaagagattgaccagatgattaaagaactgaggaggaaaaatctagagacacaaaaggaaattgctgaagatgagttggtagctgcagaagcccttctgaaaaaagtgaagaagctgtttggagagtcccggggggaaaatgaagaaatggagaaggatctccgggaaaaactggctgactacaaaaacaaagttgatgatgcttgggaccttttgagagaagccacagataaaatcagagaagctaatcgcctatttgcagtaaatcagaaaaacatgactgcattggagaaaaagaaggaggctgttgaaagcggcaaacgacaaattgagaacactttaaaagagggcaatgacatactcgatgaagccaaccgtcttgcagatgaaatcaactccatcatagactatgttgaagacatccaaactaaattgccacctatgtctgaggagcttaatgataaaatagatgacctctcccaagaaataaaggacaggaagcttgctgagaaggtgtcccaggctgagagccacgcagctcagttgaatgactcatctgctgtccttgatggaatccttgatgaggctaaaaacatctccttcaatgccactgcagccttcaaagcttacagcaatattaaggactatattgatgaagctgagaaagttgccaaagaagccaaagatcttgcacatgaagctacaaaactggcaacaggtcctcggggtttattaaaggaagatgccaaaggctgtcttcagaaaagcttcaggattcttaacgaagccaagaagttagcaaatgatgtaaaagaaaatgaagaccatctaaatggcttaaaaaccaggatagaaaatgctgatgctagaaatggggatctcttgagaactttgaatgacactttgggaaagttatcagctattccaaatgatacagctgctaaactgcaagctgttaaggacaaagccagacaagccaacgacacagctaaagatgtactggcacagattacagagctccaccagaacctcgatggcctgaagaagaattacaataaactagcagacagcgtcgccaaaacgaatgctgtggttaaagatccttccaagaacatgcaggtttaaatcattgccgatgcagatgccactgtcaaaaatttagaacaggaagctgaccggctaatagataaactcaaacccatcaaggaacttgaggataacctaaagaaaaacatctctgagataaaggaattgataaaccaagctcggaaacaagccaattctatcaaagtatctgtgtcttcaggaggtgactgcattcgaacatacaaaccagaaatcaagaaaggaagttacaataatattgttgtcaacgtaaagacagctgttgctgataacctcctcttttatcttggaagtgccaaatttattgactttctggctatagaaatgcgtaaaggcaaagtcagcttcctctgggatgttggatctggagttggacgtgtagagtacccagatttgactattgatgactcatattggtaccgtatcgtagcatcaagaactgggagaaatggaactatttctgtgagagccctggatggacccaaagccagcattgtgcccagcacacaccattcgacgtctcctccagggtacacgattctagatgtggatgcaaatgcaatgctgtttgttggtggcctgactgggaaattaaagaaggctgatgctgtacgtgtgattacattcactggctgcatgggagaaacatactttgacaacaaacctataggtttgtggaatttccgagaaaaagaaggtgactgcaaaggatgcactgtcagtcctcaggtggaagatagtgaggggactattcaatttgatggagaaggttatgcattggtcagccgtcccattcgctggtaccccaacatctccactgtcatgttcaagttcagaacattttcttcgagtgctcttctgatgtatcttgccacacgagacctgagagatttcatgagtgtggagctcactgatgggcacataaaagtcagttacgatctgggctcaggaatggcttccgttgtcagcaatcaaaaccataatgatgggaaatggaaatcattcactctgtcaagaattcaaaaacaagccaatatatcaattgtagatatagatactaatcaggaggagaatatagcaacttcgtcttctggaaacaactttggtcttgacttgaaagcagatgacaaaatatattttggtggcctgccaacgctgagaaacttgagtatgaaagcaagcatcaataagaagccagaagtaaatctgaagaaatattccggctgcctcaaagatattgaaatttcaagaactccgtacaatatactcagtagtcccgattatgttggtgttaccaaaggatgttccctggagaatgtttacacagttagctttcctaagcctggttttgtggagctctcccctgtgccaattgatgtaggaacagaaatcaacctgtcattcagcaccaagaatgagtccggcatcattcttttgggaagtggagggacaccagcaccacctaggagaaaacgaaggcagactggacaggcctattatgcaatactcctcaacaggggccgtctggaagtgcatctctccacaggggcacgaacaatgaggaaaattgtgatcagaccagagccgaatctgtttcatgatggaagagaacattccgttcatgtagagcgaactagaggcatctttacagttcaagtggatgaaaacagaagatacatgcaaaacctgacagttgaacagcctatcgaagttaaaaagcttttcgttgggggtgctccacctgaatttcaaccttccccactcagaaatattcctccttttgaaggctgcatatggaatcttgttattaactctgtccccatggactttgcaaggcctgtgtccttcaaaaatgctgacattggtcgctgtgcccatcagaaactccgtgaagatgaagatggagcagctccagctgaaatagttatccagcctgagccagttcccaccccagcctttcctacgcccaccccagttctgacacatggtccttgtgctgcagaatcagaaccagctcttttgatagggagcaagcagttcgggctttcaagaaacagtcacattgcaattgcatttgatgacaccaaagttaaaaaccgtctcacaattgagttggaagtaagaaccgaagctgaatccggcttgcttttttacatggctcgcatcaatcatgctgattttgcaacagttcagctgagaaatggattgccctacttcagctatgacttggggagtggggacacccacaccatgatccccaccaaaatcaatgatggccagtggcacaagattaagataatgagaagtaagcaagaaggaattctttatgtagatggggcttccaacagaaccatcagtcccaaaaaagccgacatcctggatgtcgtgggaatgctgtatgttggtgggttacccatcaactacactacccgaagaattggtccagtgacctatagcattgatggctgcgtcaggaatctccacatggcagaggcccctgccgatctggaacaacccacctccagcttccatgttgggacatgttttgcaaatgctcagaggggaacatattttgacggaaccggttttgccaaagcagttggtggattcaaagtgggattggaccttcttgtagaatttgaattccgcacaactacaacgactggagttcttctggggatcagtagtcaaaaaatggatggaatgggtattgaaatgattgatgaaaagttgatgtttcatgtggacaatggtgcgggcagattcactgctgtctatgatgctggggttccagggcatttgtgtgatggacaatggcataaagtcactgccaacaagatcaaacaccgcattgagctcacagtcgatgggaaccaggtggaagcccaaagcccaaacccagcatctacatcagctgacacaaatgaccctgtgtttgttggaggcttcccagatgacctcaagcagtttggcctaacaaccagtattccgttccgaggttgcatcagatccctgaagctcaccaaaggcacaggcaagccactggaggttaattttgccaaggccctggaactgaggggcgttcaacctgtatcatgcccagccaactaataaaaataagtgtaaccccaggaagagtctgtcaaaacaagtatatcaagtaaaacaaacaaatatattttacctatatatgttaattaaactaatttgtgcatgtacatagaattctttctgtattcagatggtgctaattcagactccagactgaattttaattcaagttctttctcaagtctataaataatattaaactgattatttcattctaaataa

SEQ ID NO: 1190 - DNA, 1922 bp, Homo sapiens; identical to SEQ ID NO: 874

SEQ ID NO: 1191 - DNA, 3079 bp, Homo sapiens; identical to SEQ ID NO: 395

SEQ ID NO: 1192 - DNA, 3596 bp, Homo sapiens; identical to SEQ ID NO: 876

SEQ ID NO: 1193 - DNA, 5873 bp, Homo sapiens; identical to SEQ ID NO: 465

SEQ ID NO: 1194 - DNA, 2294 bp, Homo sapiens; identical to SEQ ID NO: 443

SEQ ID NO: 1195 - DNA, 1784 bp, Homo sapiens
gggcgggcgcggccagagcaagtgccaggcgggaacagagggactgggcgcgcctcacaactcaccacctcgcccgctggtccttcctggctcgcctggctctgaagctgcacctggaggggaaacctcagaacagtaggcgggattgcctagtaaatatctcccattcagggaggcccaggtcgtgtgacgtcgacagttgctgggtagatgaggccaacacaggttgcaagaagaggcggggtttagaggcgtgaaactccgcagtgctcagccaagcagggagcaacgctaggaagggcgggcagaaagggcacgctcttgtgggtgactacaggttaggagaccgttgaacctggaggggccctaggatggaccccgtggaaagattcagagactgcgccctctccctggcgccgccttcccctacacgcggcgggtatattctgttgcagttggcccaggacctgtttccaagactctgccccctcgcacttccgtccctcctggttttgtaaagtgatgctcataggaacccccaccccgcgtgacactactcccagctcctggctgacttctagtcttctggttgaagctgcgcctttagatgacacgaccctacccacccctgtttccagcggatgcccgggcctggaggctttcacttcctcctccgagagcggacagatctctgggtgctgggcggtcatggcgctactagatgtatgcggagccccccgagggcagcggccggaatcggctctcccggttgcgggaagcgggcgtcgctcggacccaggacactacagtttctctatgcgatctccagagctcgctttaccccggggaatgcagagcccacagaattcttccagtccctgggtggggacggagaaaggaacgttcagattgagatggcccatggcaccaccacgctcgccttcaagttccagcatggagtgattgcagcagtggattctcgggcctcagctgggtcctacattagtgccttacgggtgaacaaggtgattgagattaacccttacctgcttggcaccatgtctggctgtgcagcagactgtcagtactgggagcgcctgctggccaaggaatgcaggctgtactatctgcgaaatggagaacgtatttcagtgtcggcagcctccaagctgctgtccaacatgatgtgccagtaccggggcatgggcctctctatgggcagtatgatctgtggctgggataagaagggtcctggactctactacgtggatgaacatgggactcggctctcaggaaatatgttctccacgggtagtgggaacacttatgcctacggggtcatggacagtggctatcggcctaatcttagccctgaagaggcctatgaccttggccgcagggctattgcttatgccactcacagagacagctattctggaggcgttgtcaatatgtaccacatgaaggaagatggttgggtgaaagtagaaagtacagatgtcagtgacctgctgcaccagtaccgggaagccaatcaataatggtggtggtggcagctgggcaggtctcctctgggaggtcttggccgactcagggacctaagccacgttaagtccaaggagaagaagaggcctagcctgagccaaagagagagtacgggctcagcagccagaggaggccggtgaagtgcatcttctgcgtgttctctatttgaacaagcatttcccccagggaagtttctgggtgccccactaagtagaataaagaaaaacggttataaatac

SEQ ID NO: 1196 - DNA, 5751 bp, Homo sapiens; identical to SEQ ID NO: 471

SEQ ID NO: 1197 - DNA, 3535 bp, Homo sapiens
actgggccgaccaatcagcgaggagcgcgggcagccggggcggctgctgctctcgtgagaacagaggacccaggccctcggaggagcttcgcggtgccagcctctgcaggtcctctgagggagcaacatcagggctccctcaggttcagaggtcgcctctagcttcccaggccagtcagccacggagcccgtgggcaggaagggcagcaggatggctgccaaggaccagttggaggttcaagttatggccgcccaggaaatggagcttgcaggaaaggatccagtaagtcatgagcatgaggaaagaaaacctgttacagagacaaaggagggagatgtaactgatgagcatggggaaagaggatcttttgctgaaacagatgaacacacgggggttgataccaaggagctagaagatattgcagctgacattaaagagcatcttgctgcaaagagaaaaaggattgaaaagattgcaaaagcttgcagcgaaataaagaacagaattaaaaatgttttgagaacaacacaactaaaaaggcagaaacgtgattatagaatttctctgaagttgccgaatgtccttgaagagttcatcacagatgagcagaaagatgaggaaggagatggagaaaaggaagaacaaattaaaatatttcaagagcaacaaaagaggtggcaacaagatgggaaaggaactgaaagagattgagccaccacacgagcaattcacaaaggtctgttctatttggtaacacaatacgttcttataaaatacaacacatgcataaaaatagaagacaatctgcttgtttctgaatgtatggaaagacattttggttatacattttaaattacttaccattttcactttgaatgtgttgttccagatttaacataagtagtaaataacataaaataacataaaacagtatttttaggattcatgaatagttttgtaggagttatttagaacaggaaaaggtaaattggaaattttacctagaaatatacatcttgtgtataaaaattgataccttatgaacacattaatgaagactttattttcagtttttaggagatcagcgacaaatctttagtggaaggcagaaagtccataagtcctttctggatgtcttttttacttgtgttgtttcaagagttttagttaaataggaagtaggcaaatgtaactactgagtatctcttttgttttctgctgtaatgtaggagtgttttatggcatattcactttcaaaattattagtgactagtaatggttttacatgacaatttgtaatcataagagatggttcagatgtataacagaatgggaaagccagcagattattaacatgttgtgaattgtgaattatctgctgtcgtacagcacattagcaaattgtcatcggacaatgaccgcttcttcatgtagatgtatattatttaggaagcaatggaattcccttctgggaggtaagatattctttttaataaccttgtggaaagacatgttcatatgtcactcctctacactaactgagatgtgttaaataaactgggaaaagagtttgaaaatagaattttcaagcaactcaaagattatctatacacaaaacggttatttatatagaagtcacaagtagagaacatgttgctataatgttccccagaaaccatttattaattggtatgaacatgagactagaaaagttttcctgtcaatgttaatgctacatgttaccacttagggtaggaacttcggtatcatcttggactcttctgagtccattatctttcacatacagttttcatgaggcaagttttactctgcaatggtccttaaatttcttttttttaaattgccactgaggcaaccctagttcaagaactcattcttccttgcttgtactattaaactcttttctgagttctctcttctcttctgagccacccttcattgatcagaaatactatcttcctaaaactcttcccttcctaaaatgcttctagcccttcactcttcccagcctatcagtggtatccacatgtcagttcttagatattcagagactctcccctttacatgaccccctcttaggcttgttttactgccttctgtctttcttcccgcctctccaggttgacagccttctctgaacgacctctccattactctcatgctttgctcatgctcttccctcacaatgcttttaaagtccttttttttttttgatcgattgaaatcttttgccaactaagtggacatcagtctccatttttggctacatgtccgagtgagttgctcttccacagcagttacataagttttgtattattttttttattcgtgcatatttgctcatgtcacaggaatatggaagagattgtgtattcattttttacatcttcctcagcattaacataccactttttagggagtaggaactgttgaactatttgttgagagaatagtatatatttcaaacatagttatgttttctctaacttgatgaggtcatgtcacagaccattttatcccttcagtggaaaccatgttatgtcgactattagtgataacaaatgggtcactatctggtgaaaaaatatggtatttcatgatctaagactaccagtctttttctgtttttgctccatcttgaccataacatattcatcaaaccattttcttcaagcaaagtacatgactgttggacctgctataataatatttcactaaaatctggcattaaaaattttaagtatttggagctccatgtactgattacagtttttaaatttgaaataaatgaccagcatcctttgaatattaaaagctgtttccttttgacatttaatttactctctttaaaatgtgagttgtaaagtgatggtttgtcagtgaactagactttttgttttagagtgtgaggacttggaagagtataatgaaagccctctttttggtgaagagagtcaacttaaaaaataaattgccatgttccaaaataatattgtggtaattgtaagtagtgcatattttatcttaaaaactcaggattgatgtaagcactggaatattttatttgtagaaatgtgtatcgcaattacttaaatttatttttttgaaacagctgcagcaagagttggcacttattcagatgtatcttcaacctctgttattctggtgactgacaaaagaacttgaacctatgttatatgatacatgcataacttgagctacactaaaccacatgacagtgtttagttaattcttgtataaattagtatatctcttctattattagtctgtttgttaaatgccagaccacgtttctatgatctgttgaatgaaccctagacagttctgtgagaaagcagcaattgcacagttacatacacagtcaattaaattttaacattaaagataatttagttttaggtttggcctctgtggatctgtatcagttccaaaatgtggaaagcacgggcatggaaaagtacatttttctctaataaaagaagacaaaccctt

SEQ ID NO: 1198 - DNA, 2968 bp, Homo sapiens
aagccaacctcgctcagcggacgactggccggatcccaacgcgctgccccttgcccagcctgcgagcgcgtggtacgaaggcgcgtctgcatccatgccccagcccggggagctggaggcgctcgcagtcagaggcgagtgatgctaggctgagcgcgtggcggcccgtgtcgtgccccgctgagccaagtgcggaagggcagcggcgcgctccgactctgctcgccgcacgcagggcggggcgcggctggggggcggggggcctggccgcccgctgggagctgcggacgagcaggcgcgctgaggacccgagggaggacacggttaaagcattgctatcaactgtgaacccagagagccctccttagccaacacgctaactccgaagcctcccttacgcccccgaaccaccgaaggcggcgacacctgattcagcgcacaaacacaggtcccttctgtcccggatacaattacgcggcagacacacactcaaactcgcgcggggcagccaagagacgaggggttggttccaagtctttgctattgtgaatagtgccgcaataaacatacgtgtgcatgtgtctttatagcagcatgatttatagtcctttgggtatatacccagtaatgggatggctgggttctagatccctgaggaatcgccacattgacttgcacaatggttgaactagtttacagtcccaccaacagtgtaaaagtgttcctatttctccacatcctctccggcacctgttgtttcctgactttttaatgattgccattctaactggtgtgagatgatatctcattgtggttttgatttgcatttctctgatggccagtgatggtgagcattttttcatgtgttttttggctgcataaatgtcttcttttgagaagtgtctgttcatgattttttttttagacaaagtattagatcagatatttttggggaaaaatgctttgtgattgcttgttttgaatggtgagcattgtattttgttttaagttgttttctggttgttattacagctatgaagtcttacactccatatttcattctcctgtggagtgctgttgggatagcgaaggctgccaaaatcatcatcgtgccgccaattatgtttgaaagccatatgtacattttcaagacgctagcctcagccttgcacgagagaggccaccatacagtgttcctcctctctgaaggcagagacatcgccccatctaatcattacagcctccagcgctacccagggatctttaacagtaccacctcagatgctttcctacagtccaagatgcggaatattttctctgggagattgacagcaatcgaactgtttgacatactggatcactatactaagaactgtgacctgatggttggcaaccatgccctgatccagggtctgaagaaagaaaaatttgacctgctgctggtggaccctaatgatatgtgtggatttgtgatagctcatcttttaggggttaaatatgctgtattttcaactggcctttggtatcctgctgaagtgggtgctcctgctccattagcatacgtcccagagtttaactcactcctcacagaccgcatgaacttgctgcaaaggatgaaaaataccggtgtttacctcatttccagattaggggtcagctttctggttcttcccaaatatgaaaggataatgcagaagtacaacctgctgccagagaagtccatgtatgatttggttcatgggtccagcctgtggatgctgtgtactgacgtagcactggaattcccaagacccactctgcctaatgttgtttatgtaggaggaatcctaaccaaaccagccagcccactaccagaagatctccaaagatgggtaaatggtgctaatgaacatggctttgtcttggtgtcttttggagctggtgtcaagtatctgtcagaagacattgctaacaaactggcaggagctctggggagattgcctcaaaaagtgatttggaggttttctggacccaaaccaaagaatctaggaaacaacactaaactcatagaatggttaccacaaaatgacctgcttgggcattcaaagattaaagccttcctgagccatggtggtttgaacagtatttttgaaactatatatcatggtgtgcctgtagtgggaattccactctttggagaccattatgatactatgaccagagtacaggcaaaaggcatggggatattgctagaatggaagacagttactgaaaaagagctctatgaagcactagtgaaggttatcaataatcccagctaccgtcagagggctcagaagctttcggaaattcacaaggatcaacctggtcaccctgtcaatcgaactatctattggatagattatattattcgtcacaatggagcccatcacctacgtgccgctgtccatcagatctccttttgtcagtattttttactggatattgcctttgtgcttttgcttggtgctgccttgttatactttctcttgtcttgggtgacaaaatttatctacagaaaaatcaaaagtctgtggtctagaaataagcatagcacagttaatggacattaccacaatggaatcctcaatggcaagtacaaaagaaatggccatattaaacatgaaaagaaagtgaaatgagccaacagcccaggtgatagaaataaattggttcactcattgaatttttattgctattatttagtctaacagctactaaaagtaaaacatcagtaaacaattctaacatgcccttatgagatctactaatgaaattctgtggaattaagatggctgtaaaaagcacaaacctaaaatgcagaaatgtattttattcaaatactgatgtagagagttttggcactgaaccttttagaagccttaattatttaaatcaattcagtgactgtgtcagaccttagttttaaatcttgatatgtgcgtgtccc

SEQ ID NO: 1199 - DNA, 1009 bp, Homo sapiens
caagctccttttgatattccctgccccagagctcatgaccagaacccagagctgatttaaaatattttgaaaaatggaggaggcagactgctcccagcagcctgtcaatggctgctcatctgtccatggagatggttacaggcaggtgtagtcaaaatgattgattccttgggtttgggggtgaataggctgggaaatttctgagccttttttttttgtcacagtgccctcaagttgaagtgatgagctggatttctttcttgttccatactgggcggcatgctcctcccatctccaccccttggtttgggggcttccagctcattggcaaaatctctctagttgccttcctttcaagctggagcctgacttttccccaatgtacattttttttttctccacaaagagttccttctctaatgtccccatctggtattaagtgcactttaaagaaaggggcagggtggattttcaagaggtgggaagctctaaggcttgaccctgaggggtcttctcccagccattctcagcccatatgcagcaccctccatactgaagaggactgttgttttagtttcagacggtcctttccttccacatggtgctaaggtggttttctaggtaactgcagggatggaggtcactagccattccaaaccaggagagaaagtctggtgtcctgatatccagtcttttctaggaggaagaccaagattctccagcggcagggcagcctatcacccaacttctaagtcaggaaaggaagctgagtgggaatgccagctggtaagcgcaggctgcactggcccatgactccttcaaggaaaagaggccctgctccctttacctgctgagctccttttagcagttagggagaactgcagggggaaaaataccagtggagtgtggaataaatccaaagcagtgatttttaaatgtttttcaaaaacaaatcttacatagaaccccaatataaaaaataaagtaatgcagacctgggcagtttgca

SEQ ID NO: 1200 - DNA, 532 bp, Homo sapiens
aaatacttaaaatatatataaaataaaacaattatttgccttttttcacctatcagattaacagattatatgtgttaacaaggtggggagaatttacaactcctgatatgttaaaatctttcaggaaggtagtagaaaatatatgtaagatggaaattagcacttttgaccaacaattttagttttagatatttacctataaggatataataggaggtgttcaaagatgcatgtaactcaatgtagtattaattataattgtaaaatagtaaataacatttttgtcaaatcataatgttaggaaaattagtgatggcacatttaaccaattgaattatattcagttctgaataccgtgatgcatgttcaaattaattgatacaaaaatccaacaactttagcagtttgtttaccagttattgagtaccaactgtgttcaacattgttatttcactcatatgaaatgataaatgtatgtgcgtgttatgatacggtcaataaaaccacttttataggaagaatactcacaaaa

SEQ ID NO: 1201 - DNA, 9808 bp, Homo sapiens
ctatctctgtctctctccacagtcaaaaaagccaagtttgatggtgcccaagagaaattcaacacgtacgtgaccctgaaagtgcagaatgtcaagagcacgaccatcgcggtgcggggcagccagcccagctgggagcaggatttcatgttcgagattaaccgtctggatttgggactgacggtggaggtgtggaataagggtctcatctgggacacaatggtgggcactgtgtggatcccactgaggaccatccgccagtccaatgaggagggccctggagagtggctgacgctggactcccaggtcatcatggcagacagtgagatctgtggcaccaaggaccccaccttccaccgcatcctcctggacacgcgctttgagctacccttagacattcctgaagaggaggctcgctactgggccaagaagctggagcagctcaatgctatgcgggaccaggatgaatattcgttccaagatgagcaagacaagcctctgcctgtccccagcaaccagtgctgcaactggaattattttggctggggtgagcagcacaacgatgaccccgacagtgcagtggatgatcgtgacagtgactaccgcagtgaaacgagcaacagcatcccgccgccctattatactacgtcacaacccaacgcctcagtccaccaatattctgttcgcccaccacccctgggctcccgggagtcctacagtgactccatgcacagttacgaggagttctctgagccacaagccctcagccccacgggtagcagccgctatgcctcttccggggagctgagccagggaagctctcagctgagcgaggacttcgaccctgacgagcacagcctgcagggctccgacatggaggatgagcgggaccgggactcctaccactcctgccacagctcggtcagctaccacaaagactcgcctcgctgggaccaggatgaggaagagctggaggaggacctggaggacttcctggaggaggaggagctgcctgaagatgaggaggagctggaggaggaggaggaggaggtgcctgacgatttgggcagctatgcccagcgtgaagacgtagctgtggctgagcccaaagacttcaaacgcatcagcctcccgccagctgccccagggaaggaggacaaggccccagtggcacccaccgaggcccccgacatggccaaggtggcccccaagccagccacgcccgacaaggtgcctgcagctgagcagatccctgaggctgagccacccaaggacgaggagagtttcaggccgagagaggatgaggaaggccaggaggggcaggactccatgtccagggccaaggccaactggctgcgtgccttcaacaaggtgcggatgcagctgcaggaggcccggggagaaggagagatgtctaaatccctatggttcaaaggcggcccagggggcggtctcatcatcatcgacagcatgccagacatccgcaagaggaaacctatcccactcgtgagcgacttggccatgtccctggtccagtccaggaaagcgggcatcacctcggccttggcctccagcacgttgaacaacgaggagctgaaaaaccacgtttacaagaagaccctgcaagccttaatctaccccatctcgtgcacgacgccacacaacttcgaagtgtggacggccaccacgcccacctactgctacgagtgcgaggggctgctgtggggcatcgcgaggcagggcatgcgctgcaccgagtgcggtgtcaagtgccacgagaagtgccaggacctgctcaacgccgactgcctgcagcgggctgcggagaagagctccaagcacggggcggaggaccggacacagaacatcatcatggtgctcaaggaccgcatgaagatccgggagcgcaacaagcccgagatcttcgagctcatccaggagatcttcgcggtgaccaagacggcgcacacgcagcagatgaaggcggtcaagcagagcgtgctggacggcacgtccaagtggtccgccaagatcagcatcaccgtggtctgcgcccagggcttgcaggcaaaggacaagacaggatccagtgacccctatgtcaccgtccaggtcgggaagaccaagaaacggacaaaaaccatctatgggaacctcaacccggtgtgggaggagaatttccactttgaatgtcacaattcctccgaccgcatcaaggtgcgcgtctgggacgaggatgacgacatcaaatcccgcgtgaaacagaggttcaagagggaatctgacgatttcctggggcagacgatcattgaggtgcggacgctcagcggcgagatggacgtgtggtacaacctggacaagcgaactgacaaatctgccgtgtcgggtgccatccggctccacatcagtgtggagatcaaaggcgaggagaaggtggccccgtaccatgtccagtacacctgtctgcatgagaacctgttccacttcgtgaccgacgtgcagaacaatggggtcgtgaagatcccagatgccaagggtgacgatgcctggaaggtttactacgatgagacagcccaggagattgtggacgagtttgccatgcgctacggcgtcgagtccatctaccaagccatgacccactttgcctgcctctcctccaagtatatgtgcccaggggtgcctgccgtcatgagcaccctgctcgccaacatcaatgcctactacgcacacaccaccgcctccaccaacgtgtctgcctccgaccgcttcgccgcctccaactttgggaaagagcgcttcgtgaaactcctggaccagctgcataactccctgcggattgacctctccatgtaccggaataacttcccagccagcagcccggagagactccaggacctcaaatccactgtggaccttctcaccagcatcaccttctttcggatgaaggtacaagaactccagagcccgccccgagccagccaggtggtaaaggactgtgtgaaagcctgccttaattctacctacgagtacatcttcaataactgccatgaactgtacagccgggagtaccagacagacccggccaagaagggggaagttctcccagaggaacaggggcccagcatcaagaacctcgacttctggtccaagctgattaccctcatagtgtccatcattgaggaagacaagaattcctacactccctgcctcaaccagtttccccaggagctgaatgtgggtaaaatcagcgctgaagtgatgtggaatctgtttgcccaagacatgaagtacgccatggaggagcacgacaagcatcgtctatgcaagagtgccgactacatgaacctccacttcaaggtgaaatggctctacaatgagtatgtgacggaacttcccgccttcaaggaccgcgtgcctgagtaccctgcatggtttgaacccttcgtcatccagtggctggatgagaatgaggaggtgtcccgggatttcctgcacggtgccctggagcgagacaagaaggatgggttccagcagacctcagagcatgccctattctcctgctccgtggtggatgttttctcccaactcaaccagagctttgaaatcatcaagaaactcgagtgtcccgaccctcagatcgtggggcactacatgaggcgctttgccaagaccatcagtaatgtgctcctccagtatgcagacatcatctccaaggactttgcctcctactgctccaaggagaaggagaaagtgccctgcattctcatgaataacactcaacagctacgagttcagctggagaagatgttcgaagccatgggaggaaaggagctggatgctgaagccagtgacatcctgaaggagcttcaggtgaaactcaataacgtcttggatgagctcagccgggtgtttgctaccagcttccagccgcacattgaagagtgtgtcaaacagatgggtgacatccttagccaggttaagggcacaggcaatgtgccagccagtgcctgcagcagcgtggcccaggacgcggacaatgtgttgcagcccatcatggacctgctggacagcaacctgaccctctttgccaaaatctgtgagaagactgtgctgaagcgagtgctgaaggagctgtggaagctggttatgaacaccatggagaaaaccatcgtcctgccgcccctcactgaccagacgaggtcagggaacctcttgagaaaacatggcaagggattagaaaagggcagggtgaaattgccaagccactcagacggaacccagatgatcttcaatgcagccaaggagctgggtcagctgtccaaactcaaggatcacatggtacgagaagaagccaagagcttgaccccaaagcagtgcgcggttgttgagttggccctggacaccatcaagcaatatttccacgcgggtggcgtgggcctcaagaagaccttcctggagaagagcccggacctgcaatccttgcgctatgccctgtcgctctacacgcaggccaccgacctgctaatcaagacctttgtacagacgcaatcggcccagggcttgggtgtagaagaccctgtgggtgaagtctctgtccatgttgagctgttcactcatccaggaactggggaacacaaggtcacagtgaaagtggtggctgccaatgacctcaagtggcagacttctggcatcttccggccgttcatcgaggtcaacatcattgggccccagctcagcgacaagaaacgcaagtttgcgaccaaatccaagaacaatagctgggctcccaagtacaatgagagcttccagttcacgctgagcgccgacgcgggtcccgagtgctatgagctgcaggtgtgcgtcaaggactactgcttcgcgcgcgaggaccgcacggtggggctggccgtgctgcagctgcgtgagctggcccagcgcgggagcgccgcctgctggctgccgctcggccgccgcatccacatggacgacacgggcctcacggtgctgcgaatcctctcgcagcgcagcaacgacgaggtggccaaggagttcgtgaagctcaagtcggacacgcgctccgccgaggagggcggtgccgcgcctgcgccttagcgcgggcggtcggccgagcggcactgcgcctgcgcggagggcgctgggcggggagggacggggcttgcgccttggtgggacctccccaggggcggggctcggggggctccacgccaagggtgggctgcgcctacgcccttgactcagctttcccttttggggaattaggaatggaggatgccccgccctctcgggaggccacgcccaagggcgcgacgaaggaaggagccacatccccaacttgaggccacgcccccagcacctagggggcattttgagctgggatgggggaaacctcgtccctatggaggaggccacatcccggggctctggtaccgggaggcaccacctcatgtcccctggaaaagccataagatgggacccagacccctgggaccccagaccaattgccaagtatggaaatctcagctccctcgagggggggccctgggcaaggggtagggctctctggagcgcccctctaggtggcctggggactggagggaccaggatgctggttggagggccccggaataccggagtccctttagatatttgtgcaaaaaataaatggggggaggggggaggatgggatttcaaaagcacatgcgcccttgggcgcccaaaccctgggggccgaggggacggctctggttccccacgctgcccctacttccctttgggagtttgcctctccctctcccccaacaaacccagtcctcatatcatagagttcaacacacccatttgacagatggcaaaactgaggcttaaagagctgcttgagacttggccaaggttccaggtgccataccctctgtgcccctcccttaggcctgtgtgccccatggaagggtgggctgagatcgggatgacctgacacagctccctattgctgctaattccccctcggcctcctccaaggggtgggaattccaggccaagacccctacttcgcctttccttctccggctgccaagcaggacctttgccctcagccctttctcctgggatctccatgggggatgccatgagggcctcccaccacaaaagagaatttgggatcccctggtcccaggtttctccatcccttcttccttttccagaattttccaaataggaaagaacagaaggagaccagaaactctaggggggagaaagagaatgagagaaagagaatgagagagagagaaacacaaacacagtgacacagtgagagcttagtctccaagagcctattcattgattcaaacacccaagccacaggatacctcagatggccctcttgccagctggaagctctttctccaatgagcaaagttacagtgacctggctggagttacctggtgcacataggaccttaggggaaagttcagcgtggactacacttgctctgggatctgcttttccacatgtgtgtatggcacgcctttttctgctggattgggaaggacaagattttgctgtgctagggagaaatgaaaacggggtgagctgagtagctgggtttctggaggatagaacatcagatggggaggctttccgaggtgaagaatgagagggaaccacttactagagagaaaagagctccaggcctggggaacagcacgtgcgaaggccaggagagaagaactgttgaaacaacgagaagggtggcacggctggagctgagccagcaagggggatcgtgaggagccttggggttggggagatctgcagaagcatcagaccaggcagggcctcgtacgcagtcctgaggagttttacttttattctaagacagttggggagctccaggagctgttttaagttggggagagactggattccagcctgcaaaagctgttttgtgaagactaaaaccagtgaggagaggtggaggtgctttggggacactgaaatggattcttggaaagattctgaaggctgtgttgaaaagacacctatagctgtggggacatgactataatcccagcatttggggagaccgaggctggcagatcacttaaggtcaggagtttgagaccagcctggccaacatggcgaaaccccatctctgctaaaaatacaaaaattagctgggtgcagtggtgcatgcctgtagtcccagctactcaggagactgaggcgggagaattgtttgaaccctggaggcagaggttgtagtgagtcgtgatcacacaactgcactccagcctgggcaacagaacaatactccattccctcccctctaccccaccaaaaaaaaaaaaaaatcctgcccttagatgagctctagggctgctgagtacagttgtcccagttgcacagtgcccaagggtttggcattgctaagaaggccacgtgcaaatcctagatattgagtgttgtatgtttgtgacgttggtttcccgacatgtgaatggcccaagtgtctggaagaagtggcgccactttctaatttgcttggagatgttgcatgtcccttaaattcagacaggtgcaggtaactggaggttctgaaccaaaggttaaaatgcaaattctcatacagggttgggaagttgtagccagggataagcttatgtgactgttatatggactgaggagcagatgtgaatttcgaaccatgacatggctgagggtaggggtcgggtggatggatgattcagggttgtaacccatagagcccaaaggggaagtgatctgtgacctggggtgagggtgatctggaagatttttggatggctggaaagaaatggggaagtcgagctgcctgagagagccaagttatttcccaaaagattccttaggagtctttctgttcaagacctccgtgtgtgtgtgtgtgtgtttagggttccccagcaatggcccaggcatgtgaaggaaacaagcttcttcagggaatatttgttgaatgagttttcctgactcccaggctagaactgtttttgcaatttccaccctcttttctttcccccagagaactcctattcgtccttcaaaacccatcacggaaacccctcttggagaaaaccctccttccttcccctcaggactttcccagccaccgtctctcctccagtccagcctgatgccatgggactgggggtttctctgtccagctctgtttctcccagactggggtctgaggactctcaggacccccaactttacctagcacaggctgggcacaagtgggtgacagggagtctacgcctagtggaattatgtattggggcagggtcagtgtgagaatacacatccgcatgcatgtctgtccatgtctgtccgtaccaaccttccccttccacacggacctgggcacataggaggtgtctgagcctgacacatgggacagagagtggacatggctgagacacggacagagaaaagacaaggagtccagggggctgaaagccttttgaaatcaggaagttcctgtattggcagaacaaagcccagagaggagcagggctttcctcaacgccacccagcaagtggacacagagcccggccttggatgacacctccagggttctgaaccctggacctcgctttatgcaaggagctggccccacatttccatgaatcggggaaacagcacaagaaggttggcctgtggcagggcaagggttaaaggggtgacattgagggatgcctcagagtcaaagtcccctgaccaagaggaatagagtagaaaacacagagacagagggtgagatcacgccccgatgaggacggagagagacagagatggagagagacatagaggtggaaatatacagagaaagataaatgcagagaccaaggcagggagtgtcgggggaagtaaagagggtgtcctgaagaaagaaggatctgttcactcttaccagtctgtcctcgaatgatttgcataaaatgaggaggtgcctgtccacacccccaattcctctctcaggccccagagcctgagacctcaccatgcccccatcagagatgcaaaaaactaaacacccaactagaaatccttgggacctctctcggctgggatctcagagcctttctgtcccctacccctaccccatgtgctgtcgattttgcagatggggacaacctggggcctcccggaactctgccaccctggggaagttgggggagggccttagtcccggatcacaaccccgtctgctccccagaatcctttcctaagaatcgttgaggaccaaagttgtctttgctgacacgtgttgcttttctctttgccttttattgtttcagagaaaaatcaagttgactgtgtcaagtaacaccccaccccttacccccgtccagccatagtggctctctggagacacaggtcacaggcggagggtcccctgatcatccccaaccacacagccagggggacttgacccctgtccacccctgtctcgtgctccctcagacccccacaaaccggccaagcagtccggggaggcttcccctccacacaactcttagcatgtgattgcagatgtgaaatcaaaacgttgtttgttttttgttttgttttgattctaccccgtcggtccagtgtctgcacagacgccttcatttctctgtaaatatgtgacttggaacaaatgtttaacacaaacgagaagtggtcatgaatgcatggtgttgagatgttttgcactattctgactttttggtctctgtaaaaatattttattaacagcagacatt

SEQ ID NO: 1202 - DNA, 2314 bp, Homo sapiens
aagagatcctcccaccatcacgaggtcaggagatcgagaccatcttggctaagaagtcctgacggcgctggagctgaggggcagtgcgggatgccccaggaaggctcctaggaagaggggacccacggtgacttcctaaggaagcgcggttcccaggttggggaacacccggcgattctggcggctgcttcctggtggcgcagggagcccgcgtgtttgcgagtgcgtgtgtgtgcgaagttctccggcgccgccgcgccggctgcatcctcgcctccacctcgctcaccccctcctccccgcactttctcggcgctccctccctctcggctcgcacagctcgactccgcgctctcctcgccggccgccgccgcccagcctgcgcccgccgtccccccagtgcctgggcacctgttggaggcagagccaggggtgctgcatgaggggccgcaggggcgatcgcatgaccatcaacatccaggagcacatggccatcaacgtgtgccccgggcccatccggcccatccgccagatctctgactacttcccccggggaccaggacctgaagggggcggcgggggcggcggggaggcccccgcccatctggtccccctggctctggccccccctgcagccctccttggggccaccacgcctgaggatggtgcggaggtggacagctatgactcggatgatgccaccgccctaggcacgctggagtttgaccttctctacgaccgggcctcctgcactctgcactgtagcatcctcagggccaagggcctcaagcccatggatttcaatggcctcgccgacccctacgtcaagctgcacttgctgcctggagcctgtaaggccaataagctaaaaacgaagactcagaggaacacactgaatcccgtgtggaatgaggacctgacttacagcgggatcacagatgacgacatcacgcacaaggtgctcaggatcgccgtctgtgatgaggacaagctgagtcacaatgagtttattggggagatccgcgtgcccctccgccgcctcaagccttcgcagaagaagcattttaacatctgcctcgagcgccaggtcccgctggcgtccccctcttccatgtcagcggcgctgaggggcatctcctgttatctgaaggagttggagcaggcggagcaggggcaggggctgctggaggagcgtggccgcatcctgctgagtctcagctacagctcgcggcgccggggactgctggtaggcatcttgcgctgcgcccatctggctgccatggacgtcaacggttactcggacccctacgtcaagacgtacctgaggcccgatgtggacaagaaatccaagcataagacgtgtgtgaagaagaagactctcaacccagaatttaacgaggagtttttctacgagatagagctctccactctggccaccaagaccctggaagtcaccgtctgggactatgacattggcaaatccaatgacttcattggtggcgtgtccctggggccaggtgcccgaggcgaggctcggaagcactggagtgactgcctgcagcagccggacgcagccctggagcgctggcacaccctgaccagtgagctgccccctgcggccggggctctgtcctcagcctgagtggacagcagtgtcccggcacaggcccatcgagccgggtccagtacccaaccttcgcacgagtgtgttgcacgtttacacagggtgggctgcccccaccctgcactacctatttttgtgagtctccgtgacccgggtctgtctgctcatgaggggctgcggagttctatattcacatatgcaaacctcctgcctgactcgctagtccctgcaaatatgcaaaccccccatcatctgcacacccgggcagtgctcagagcccggccccaggcccccgcgctcctcactcctgcctctccacgctgccccgtccctctcccccaacagggaggaggtcggattaggggaggttcagaggaggagaatgtctcaaaaaaaaaggacaaaaaacaaacccagagccactcctttaatacagaaacttcattgaaaaaacctagccctgtacagctgcccttttaaagaggtggccattgcagggtctctgcctccccagcaggtggcagatgctcccggccactcgtttaaataactgtcccctggagggggccggggtttgaaggcagggcccctgccaccctcctgggggacacccgtgcatgtttacgccttttctggttgtgtcagtggccggagcatggcagctgggcatcaataaacacctccgaggaa

SEQ ID NO: 1203 - DNA, 2830 bp, Homo sapiens; identical to SEQ ID NO: 860

SEQ ID NO: 1204 - DNA, 2411 bp, Homo sapiens
acctggccgccatgcgcctctcctcctccccacctcgtggcccgcagcagctctccagctttggctccgtggactggctctcccagagcagctgctcagggccgacccacacccccaggcctgccgacttctccctggggagcctccctggcccaggccagacatccggcgcccgggagccccctcaggccgtcagcatcaaggaggccgccgggtcctcaaatctgcctgcgccggagaggaccatggccgggttgagtaaggagccaaataccttgcgggccccccgtgtccgcacagccttcaccatggagcaggtccgcaccttggagggcgtcttccagcaccaccagtacctgagccctctggagcggaagaggctggccagggagatgcagctctcagaggtccagataaaaacctggtttcagaatcgccgcatgaaacacaaacggcaaatgcaggacccccagctgcacagccccttctcggggtctctccatgcgcccccagctttctactcaacgtcttctggccttgccaatggcctgcagctgctgtgcccttgggcacccctgtccgggccccaggctctgatgctgccccctggctccttctggggtctctgccaagtggcacaagaggccctggcatctgcgggagcttcctgctgcgggcagcctctggcgtcccacccccctaccccaggccggccttcgctgggaccagccctgtccacggggccccggggcctgtgtgctatgccacagacgggggatgcattttgaggaggcacctctgactcccacactcgcggtcttgctgatcgcacctggctcctacctggaggactcagttgttctgtttacatcctggtggcacctctcaccctgacccacacaaaggttctggagattactggagaatatatataaatatatatatgtacgtatatatgtaaatacacatatacgtatatataaatatatatatacatatgtgtgtgtatatatatatatatttttttttttttttttttttttgagacggagtgttgctctgtcacccaggctggagtgcaatgacgcaatctcggctcactgcaacctccgcctcctgggttcaagcgattctccagcctcagcctcccgagtagctgggattacagacacccgccaccacgcccggctaattttttctatttttagtagaaatggggtttcaccatgttagccaggctggtctcaaactcctgaccctgtgatccgcccgcctcggcctcccaaagtgctgggattacaggcatgagccactgcacccggccctgagaatatatttattaaagccacctcttcactgaaagttaccgaaagagtcggtttaggaaggaaacgaagggtcagtgaacagagtcaaatgcagaagtgggcttgtcatgggtagggctttcggcgtacgataaaaggatcatttgttttttaaaaggggttggaaaaactggttttccagttggaaacagtaaaggttgtaagctttgtgtgtacaaaagaaaacagggaatgcaggtgtgtttatagcgttgtggttcaagtccctcttaacaagaactccaaagctggaaagcaggagggaacaaaggtgaacatgaaggcgaggatgctggggccctgcagtgcgctctaggctgtgcgtgagccgggactgtacccacagcttgctgagggctgctcttcttgggccagggaaagcagggcagccgggacctgcggctgtgcctggactgaagctgtcccgcaggtccccaccctccaacacgtgctcacctgtccccctcctcgcagcagcctcgggacaaaacaatgactcaaggacagcacttctcgcagaaggtctggaagtgcccagaatgggaggcacggaagcccctcccggggaggactcccgcgttgatggaccgttcttggtgcagactcctgactgcgtgcatgaaacctgagacaagtgcaattccttccatgtcgccccagagtgcccaggaggcaggcagtgcggggtgcccaggcagacgggttcagcctgcagaactggaggcgacctgtgaaacccacccgggcaccccaacaggaacagaagcgtggtcctgcggctgcgtccccagcgagtttcactttccccttgctcgtttctcccttgttgtaagtgtttacaactggcatgtgcttttaaacatcaggtaagaggggaacagctgctgtacatcgtcctggcgagtgacaatgtgacagaagcctgggcgaggccctcggagggcagcagctggacaggggctactgggtttggcctggacagcactgatttgtggatgtggatgggggcacgttgtccgtgataaaagtacaagtgcccctcac

SEQ ID NO: 1205 - DNA, 741 bp, Homo sapiens
gccgccccgcgagaagaagagcgggaagaggcggacagcgaggccaagatttcagctgcgggacggtcaggggagacctccaggcgcagggaaggacggccagggtgacacggaagcatgcgacggctgctgatccctctggccctgtggctgggtgcggtgggcgtgggcgtcgccgagctcacggaagcccagcgccggggcctgcaggtggccctggaggaatttcacaagcacccgcccgtgcagtgggccttccaggagaccagtgtggagagcgccgtggacacgcccttcccagctggaatatttgtgaggctggaatttaagctgcagcagacaagctgccggaagagggactggaagaaacccgagtgcaaagtcaggcccaatgggaggaaacggaaatgcctggcctgcatcaaactgggctctgaggacaaagttctgggccggttggtccactgccccatagagacccaagttctgcgggaggctgaggagcaccaggagacccagtgcctcagggtgcagcgggctggtgaggacccccacagcttctacttccctggacagttcgccttctccaaggccctgccccgcagctaagccagcactgagatgcgtggtgcctccaggaccgctgcgggtggtaaccagtggaagaccccagcccccagggagaggaacccgttctatccccagccatgataataaagctgctctcccagctgcctctca

SEQ ID NO: 1206 - DNA, 2203 bp, Homo sapiens; identical to SEQ ID NO: 445

SEQ ID NO: 1207 - DNA, 401 bp, Homo sapiens; identical to SEQ ID NO: 441

SEQ ID NO: 1208 - DNA, 1651 bp, Homo sapiens
ccggaggagtcacgtagctctgcgacatccgcagcctcatttaccagagggagccagggctgcagcctcatctgtttgcggatcagaacccgagctgtgcttgtggctgcggctgctaactggctgcgcacagggagctgtcaccatgcctcactcgtacccagccctttctgctgagcagaagaaggagttgtctgacattgccctgcggattgtagccccgggcaaaggcattctggctgcggatgagtctgtaggcagcatggccaagcggctgagccaaattggggtggaaaacacagaggagaaccgccggctgtaccgccaggtcctgttcagtgctgatgaccgtgtgaaaaagtgcattggaggcgtcattttcttccatgagaccctctaccagaaagatgataatggtgttcccttcgtccgaaccatccaggataagggcatcgtcgtgggcatcaaggttgacaagggtgtggtgcctctagctgggactgatggagaaaccaccactcaagggctggatgggctctcagaacgctgtgcccaatacaagaaggatggtgctgactttgccaagtggcgctgtgtgctgaaaatcagtgagcgtacaccctctgcacttgccattctggagaacgccaacgtgctggcccgttatgccagtatctgccagcagaatggcattgtgcctattgtggaacctgaaatattgcctgatggagaccacgacctcaaacgttgtcagtatgttacagagaaggtcttggctgctgtgtacaaggccctgagtgaccatcatgtatacctggaggggaccctgctcaagcccaacatggtgaccccgggccatgcctgtcccatcaagtataccccagaggagattgccatggcaactgtcactgccctgcgtcgcactgtgcccccagctgtcccaggagtgaccttcctgtctgggggtcagagcgaagaagaggcatcattcaacctcaatgccatcaaccgctgcccccttccccgaccctgggcgcttaccttctcctatgggcgtgccctgcaagcctctgcactcaatgcctggcgagggcaacgggacaatgctggggctgccactgaggagttcatcaagcgggctgaggtgaatgggcttgcagcccagggcaagtatgaaggcagtggagaagatggtggagcagcagcacagtcactctacattgccaaccatgcctactgagtatccactccataccacagcccttggcccagccatctgcacccacttttgcttgtagtcatggccagggccaaatagctatgcagagcagagatgccttcacctggcaccaacttgtcttcctttctctcttcccttcccctctctcattgctgcacctgggaccataggatgggaggatagggagcccctcatgactgagggcagaagaaattgctagaagtcagaacaggatggctgggtctccccctacctcttccagctcccacaattttcccatgatgaggtagcttctccctgggctctccttcttgcctgccctgtctcctgggatcagagggtagtacagaagccctgactcatgccttgagtacataccatacagcaaataaatggtagcaaaacattcta

SEQ ID NO: 1209 - DNA, 2412 bp, Homo sapiens
atggtcccactcacagatttcagcccagtaatggatcattcaagagaaaaagacaatgatttatctgacacagatagcaactactcattggattctctctcatgtgtctatgccaaagccctgatagagccactgaagccagaggagaggaaatgggatttcccagagccagagaactctgaaagtgatgacagccaactatctgaggactcactggctgagaagaggtaccaaagccccaaaaacaggctagggggcaatcgtcccaccaacaaccgtggccaacccaggaccagaactagagcttctgtgaggggcttcactgcagcctcagacagtgacctacttgctcaaactcataggagcttctccttggatagcctgattgatgcagaggaagaactgggggaagatcagcaagaagaacctttccctggttcagctgacgagatacccacagagactttttggcacctggaggactctagtctgcctgtaatggaccaagaggcaatatgcaggcttggtcccatcaactacagaacagcagctaggctggatgccgtcctgccaatgagcagttcgttttaccttgatcctcagttccaaccccattgtgagctccaaccccattgtgagctccaaccccattgtgagctccagccccattgtgagcaggctgaatcacaggtagagccaagctactctgaacaagccgactctctccaaggcatgcagctttcaagagagagcccactgatgtccatggattcctggttttcctgtgactctaagatcaaccccagcagccccccaggaatagtgggttctttatgtccaagtcctgatatgcaggaatttcactcctgtaagggggagaggcctggatactggccaaatactgaggaactaaagccatcagatgcagaaacggttctgccatatagctccaaactgcaccaaggcagtactgagctcctctgcagtgcaagagatgagcacacagcctctgctgctgatacgtctaggctgtctctctggggaattcaaaggcttattcaaccaggagctgatggcacctttcagggcagatgtatccctgacatgacccagcagggcagctctgaagcatcccacaattctagcgtatcaaacgtgctggctgcctctgccaccaccttgactcatgtaggcagcacccatgaaagggattggtctgcccttcagcagaagtacctccttgaactctcttgtcctgttttggaggccataggagcacccaagccagcttacccctaccttgaggaagactctggttccctggcccaagcttctagcaaaggaggagatactctattgccagttggccctagggtatctagcaatctgaatctcaacaactttccagtccatctgtccagaatcaggcgtttgagggcagagaaagaacaggacagtttaaatgccaaattagaaggtgtttcagatttctttagcactagtgagaaagaggcgagttatgacgaaacttattcggcagacttagaatcattgtctgcttctcgatctacaaatgcacaggtctttgcaacagagaacgcgataccagattccatgacagaagcatgtgaagtcaagcagaacaacttggaagaatgccttcagagttgcaggaaacctggactgatgacttcctctgatgaggattttttccagaagaacgcttgtcacagtaatgtcactacagccaccaaagcagaccattggtcccaaggctgggctcctctcaggaaaaatagtgcagtccagccagggcaattaagtcccgacagccactacccactagaggaagagaagacagattgccaggagagctctaaggaagcagttagaagacacataaatgtttcctttgcccttccttcaggtccagagctataccttcactctgctccctggaatccattgtcatcttccctgcagcccccactcttggaaacattctatgtgaccaaaagcagggatgccctgacagaaactgccttagagattccagcttgcagagaagtaagggtaccctccccaccccccagggaagcctggggctttggtcacaaccaccaagctctccaaggtgcttatttgaagaataatttgccagtgctgttacaaaaccagaattctaagattgcctcatctcagcaggtcacagctgagataccagttgatctgaataccagggaagtcatcagagaatcaggtaaatgccctggaaatattacagaagaaagccatgattcagtttattcttctgttactcagaacagacattttctcccctctaccagcacaaaagtatgtgaatttgaaaaccaagttgtaattttaaataaaaaacacagttttccagca

SEQ ID NO: 1210 - DNA, 4109 bp, Homo sapiens
aagggcgaggggcggggcctgcgtcgcgctgcgggcacgtcgccgcgcgtcttcagtatttaatgtctctgtgttccacccgcctgggctagcacgtgggggagctgcggaagcgcggcgctgcgggccgggccgcggggcacagccgggggccggcggcggcgcgcggactccgcatcccgcaccccgatggtagccgaggagctgcccacccttggtggcagaaccgagcactacccagcaaggtgtaattacttcaagcctccaggatggcaatccagttccgttcgctcttccccttggcattgcctgggatgctggcgctcctcggctggtggtggtttttctctcgtaaaaaaggccatgtcagcagccatgatgagcagcaggtggaggctggtgctgtgcagctgagggctgaccctgccatcaaggaacctctccccgtggaagacgtctgtcccaaagtagtgtccacaccccccagtgtcacagagcctccagaaaaggaactgtccaccgtgagcaagctgcctgcagagcccccagcattgctccagacacacccaccttgccgaagatcagagtcctcgggcattcttcctaacaccacagacatgagattgcgaccaggaacacgcagagatgacagtacaaagctggagctagccctgacaggtggtgaagccaaatcgattcctctagagtgccccctttcatccccaaagggtgtactattctccagcaaatcagctgaggtgtgtaagcaagattcccccttcagcagggtgccaaggaaggtccagccaggctaccccgtagtccccgcagagaagcgtagctctggggagagggcaagagagacaggtggggccgaagggactggtgatgccgtgttgggggaaaaggtgcttgaagaagctctgttgtctcgggagcatgtcttggaattggagaacagcaagggccccagcctggcctctttagagggggaagaagataaggggaagagcagctcatcccaggtggtggggccagtgcaggaggaagagtatgtagcagagaagttgccaagtaggttcatcgagtcggctcacacagagctggcaaaggacgatgcggcgccagcacccccagtcgcagacgccaaagcccaggatagaggtgtcgagggagaactgggcaatgaggagagcttggatagaaatgaggagggcttggatagaaatgaggagggcttggatagaaatgaggagagcttggatagaaatgaggagggcttggatagaaatgaggagattaagcgggctgccttccagataatctcccaagtgatctcagaagcaaccgaacaggtgctggccaccacggttggcaaggttgcaggtcgtgtgtgtcaggccagtcagctccaagggcagaaggaagagagctgtgtcccagttcaccagaaaactgtcttgggcccagacactgcggagcctgccacagcagaggcagctgttgccccgccggatgctggcctccccttgccaggcctaccagcagagggctcaccaccaccaaagacctacgtgagctgcctgaagagccttctgtccagccccaccaaggacagtaagccaaatatctctgcacaccacatctccctggcctcctgcctggcactgaccacccccagtgaagagttgccggaccgggcaggcatcctggtggaagatgccacctgtgtcacctgcatgtcagacagcagccaaagtgtccctttggtggcttctccaggacactgctcagattctttcagcacttcagggcttgaagactcttgcacagagaccagctcgagccccagggacaaggccatcaccccgccactgccagaaagtactgtgcccttcagcaatggggtgctgaagggggagttgtcagacttgggggctgaggatggatggaccatggatgcggaagcagatcattcaggagttgcagctccacccccgggaaagcggggcactttgataacgaggtgtcctgggtttttcgagtgctgaccccagcgtagacagttcagaccgctaacttacaggttctgacaggaacagcatggattccgtggatagctgttgcagtctcaagaagactgagagcttccaaaatgcccaggcaggctccaaccctaagaaggtcgacctcatcatctgggagatcgaggtgccaaagcacttagtcggtcggctaattggcaagcaggggcgctatgtgagttttctgaagcaaacatctggtgccaagatctacatttcaaccctgccttacacccagagcgtccagatctgccacatagaaggctctcaacatcatgtagacaaagcgctgaacttgattgggaagaagttcaaagagctgaacctcaccaatatctacgctcccccattgccttcactggcactgccttctctgccgatgacatcctggctcatgctgcctgatggcatcaccgtggaggtcattgtggtcaaccaggtcaatgccgggcacctgttcgtgcagcagcacacacaccctaccttccacgcgctgcgcagcctcgaccagcagatgtacctctgttactctcagcctggaatccccaccttgcccaccccagtggaaataacggtcatctgtgccgcccctggtgcggacggggcctggtggcgagcccaagtggttgcctcctacgaggagaccaacgaagtggagattcgatacgtggactacggcggatataagagggtgaaagtagacgtgctccggcaaatcaggtctgactttgtcaccctgccgtttcagggagcagaagtccttctggacagtgtgatgcccctgtcagacgatgaccagttttcaccggaagcagatgccgccatgagcgagatgacggggaatacagcactgcttgctcaggtgacaagttacagtccaactggtcttcctctgattcagctgtggagtgtggttggagatgaagtggtgttgataaaccggtccctggtggagcgaggccttgcccagtgggtagacagctactacacaagcctttgacccccatgctgcttcctgagagtctttttttgcactgttgaaattgggcttggcactcaagtcaaagatgaacatcggaataacaaacattgtcctctccagaaagtcctttctttctccatactgtagtcctattgagaagacatttcgtctctgagaaaaaaggatggaactatgggttctcttcgcaaagccaaaggatagtgtttaacaagccagctggcttatgctggttctcagctgtttaaaaaaaaaaaaaaaaaggaatagaaacagtttcaaccagattgtcctattccccctgttccattcccctcttcttccttctatctccttccccggcaaaaaccaaacaaactggcagacaggccagggatgtatgttgcttgcttgagagggtttcttttacttcaaaatctttcttcagggagcaagacatgaactgactaattggtatccactacttgtacagcttacataaatgagttgatgatatttaaccagtttttataaacttcatttaggtctctaaacacagactttttaaattgcaactgtaaatatgaaatggtcatcacatctgaccttggtcagtggggaggggaactggtatcctgccaagcctggttgtaatttgtaaccattttctatttgtgcaaactctgtaaatatgtgtttaaacaaatgtaatattttgtacaagatacactggagaacaaagggaactcaagattcttccagccacatgtcacctgtaggtagaagtaaactctgcagtgcagcttctgctcttggcccctctggccagggcccctgtggcttcctgcacactggacaggtgactgtatggtagagactgtgatctgggaactttttgctgtacaaatctgtttaaaaaaaaaaaaaagtaactcattgaattaacttgcagtggtgtgtttgattcttttttagactggcttcagcattgtgcagtttaaaaataagtaagtaacttacataaatcttcaattgtatgaactgca

SEQ ID NO: 1211 - DNA, 760 bp, Homo sapiens; identical to SEQ ID NO: 311

SEQ ID NO: 1212 - DNA, 1215 bp, Homo sapiens; identical to SEQ ID NO: 880

SEQ ID NO: 1213 - DNA, 1979 bp, Homo sapiens; identical to SEQ ID NO: 260

SEQ ID NO: 1214 - DNA, 539 bp, Homo sapiens; identical to SEQ ID NO: 272

SEQ ID NO: 1215 - DNA, 3008 bp, Homo sapiens; identical to SEQ ID NO: 278

SEQ ID NO: 1216 - DNA, 1977 bp, Homo sapiens; identical to SEQ ID NO: 252

SEQ ID NO: 1217 - DNA, 1028 bp, Homo sapiens; identical to SEQ ID NO: 263

SEQ ID NO: 1218 - DNA, 1553 bp, Homo sapiens; identical to SEQ ID NO: 270

SEQ ID NO: 1219 - DNA, 474 bp, Homo sapiens; identical to SEQ ID NO: 249

SEQ ID NO: 1220 - DNA, 5566 bp, Homo sapiens; identical to SEQ ID NO: 264

SEQ ID NO: 1221 - DNA, 3601 bp, Homo sapiens; identical to SEQ ID NO: 279

SEQ ID NO: 1222 - DNA, 4062 bp, Homo sapiens; identical to SEQ ID NO: 911

SEQ ID NO: 1223 - DNA, 3883 bp, Homo sapiens; identical to SEQ ID NO: 257

SEQ ID NO: 1224 - DNA, 2116 bp, Homo sapiens; identical to SEQ ID NO: 244

SEQ ID NO: 1225 - DNA, 1740 bp, Homo sapiens; identical to SEQ ID NO: 240

SEQ ID NO: 1226 - DNA, 3087 bp, Homo sapiens; identical to SEQ ID NO: 247

SEQ ID NO: 1227 - DNA, 6361 bp, Homo sapiens; identical to SEQ ID NO: 269

SEQ ID NO: 1228 - DNA, 2772 bp, Homo sapiens; identical to SEQ ID NO: 938

SEQ ID NO: 1229 - DNA, 2995 bp, Homo sapiens; identical to SEQ ID NO: 329

SEQ ID NO: 1230 - DNA, 6190 bp, Homo sapiens; identical to SEQ ID NO: 898

SEQ ID NO: 1231 - DNA, 6238 bp, Homo sapiens; identical to SEQ ID NO: 254

SEQ ID NO: 1232 - DNA, 3027 bp, Homo sapiens; identical to SEQ ID NO: 245

SEQ ID NO: 1233 - DNA, 7820 bp, Homo sapiens; identical to SEQ ID NO: 267

SEQ ID NO: 1234 - DNA, 3170 bp, Homo sapiens; identical to SEQ ID NO: 259

SEQ ID NO: 1235 - DNA, 5465 bp, Homo sapiens; identical to SEQ ID NO: 284

SEQ ID NO: 1236 - DNA, 5895 bp, Homo sapiens; identical to SEQ ID NO: 261

SEQ ID NO: 1237 - DNA, 744 bp, Homo sapiens; identical to SEQ ID NO: 315

SEQ ID NO: 1238 - DNA, 5416 bp, Homo sapiens; identical to SEQ ID NO: 274

SEQ ID NO: 1239 - DNA, 628 bp, Homo sapiens; identical to SEQ ID NO: 294

SEQ ID NO: 1240 - DNA, 597 bp, Homo sapiens; identical to SEQ ID NO: 368

SEQ ID NO: 1241 - DNA, 1585 bp, Homo sapiens; identical to SEQ ID NO: 894

SEQ ID NO: 1242 - DNA, 5508 bp, Homo sapiens; identical to SEQ ID NO: 908

SEQ ID NO: 1243 - DNA, 3081 bp, Homo sapiens; identical to SEQ ID NO: 238

SEQ ID NO: 1244 - DNA, 7087 bp, Homo sapiens; identical to SEQ ID NO: 326

SEQ ID NO: 1245 - DNA, 5607 bp, Homo sapiens; identical to SEQ ID NO: 301

SEQ ID NO: 1246 - DNA, 4463 bp, Homo sapiens; identical to SEQ ID NO: 256

SEQ ID NO: 1247 - DNA, 5367 bp, Homo sapiens; identical to SEQ ID NO: 296

SEQ ID NO: 1248 - DNA, 113231 bp, Homo sapiens; identical to SEQ ID NO: 295

SEQ ID NO: 1249 - DNA, 2293 bp, Homo sapiens; identical to SEQ ID NO: 916

SEQ ID NO: 1250 - DNA, 2612 bp, Homo sapiens; identical to SEQ ID NO: 277

SEQ ID NO: 1251 - DNA, 4272 bp, Homo sapiens; identical to SEQ ID NO: 242

SEQ ID NO: 1252 - DNA, 1925 bp, Homo sapiens; identical to SEQ ID NO: 248

SEQ ID NO: 1253 - DNA, 2102 bp, Homo sapiens; identical to SEQ ID NO: 298

SEQ ID NO: 1254 - DNA, 10876 bp, Homo sapiens; identical to SEQ ID NO: 361

SEQ ID NO: 1255 - DNA, 800 bp, Homo sapiens; identical to SEQ ID NO: 367

SEQ ID NO: 1256 - DNA, 705 bp, Homo sapiens; identical to SEQ ID NO: 917

SEQ ID NO: 1257 - DNA, 6008 bp, Homo sapiens; identical to SEQ ID NO: 899

SEQ ID NO: 1258 - DNA, 4979 bp, Homo sapiens; identical to SEQ ID NO: 321

SEQ ID NO: 1259 - DNA, 2251 bp, Homo sapiens; identical to SEQ ID NO: 347

SEQ ID NO: 1260 - DNA, 6876 bp, Homo sapiens; identical to SEQ ID NO: 291

SEQ ID NO: 1261 - DNA, 6564 bp, Homo sapiens; identical to SEQ ID NO: 271

SEQ ID NO: 1262 - DNA, 404 bp, Homo sapiens
atgcacacagtcacgtcgcagaagtgcccacccagcttctgcccattgagggtctcaagcagagagcgtgagaagttctgcagatgtatgtggcgcacagcctctacagccgccgactccgactcctcttcaggcaccaggcctggccgtggccgccttctcaccgactccaaggcagcacttccgggcgcttctctttatttttatacagttttattgagatataatttacatgctatccagcccatctatttcaagtgtaccatgcaaggggtttgtatatattcacagagttgtgtatccatcaccatcgttttagaacattcatcactccagaagaaactactacccatcagcagccactgcccatttccctgatctgccccgccctaggaaatccgtaa

SEQ ID NO: 1263 - DNA, 1853 bp, Homo sapiens; identical to SEQ ID NO: 299

SEQ ID NO: 1264 - DNA, 4293 bp, Homo sapiens; identical to SEQ ID NO: 251

SEQ ID NO: 1265 - DNA, 4722 bp, Homo sapiens; identical to SEQ ID NO: 258

SEQ ID NO: 1266 - DNA, 9018 bp, Homo sapiens; identical to SEQ ID NO: 383

SEQ ID NO: 1267 - DNA, 1237 bp, Homo sapiens; identical to SEQ ID NO: 406

SEQ ID NO: 1268 - DNA, 14829 bp, Homo sapiens; identical to SEQ ID NO: 297

SEQ ID NO: 1269 - DNA, 750 bp, Homo sapiens
gggatccccgcctcaggctctcaacctcctctcctgcagctccagctctgtgctctgcctccgaggagaccatggcctggcccctgtgcaccctgctgctcctgctggccacccaggctgtggccctggcctggagcccccaggaggaggacaggataatcgagggtggcatctatgatgcagacctcaatgatgagcgggtacagcgtgcccttcactttgtcatcagcgagtataacaaggccactgaagatgagtactacagacgcctgctgcgggtgctacgagccagggagcagatcgtgggcggggtgaattacttcttcgacatagaggtgggccgaaccatatgtaccaagtcccagcccaacttggacacctgtgccttccatgaacagccagaactgcagaagaaacagttgtgctctttccagatctacgaagttccctgggaggacagaatgtccctggtgaattccaggtgtcaagaagcctagggatctgtgccagggagtcacactgaccacctcctactcccaccccttgtagtgctcccacccctggactggtggcccccaccctgtgggaggtctccccatgcacctgcagcaggagaagacagagaaggctgcaggaggcctttgttgctcagcaggggactctgccctccctccttccttttgcttctcatagccctggtacatggtacacacacccccacctcctgcaattaaacagtagcatcacctc

SEQ ID NO: 1270 - DNA, 2599 bp, Homo sapiens; identical to SEQ ID NO: 281

SEQ ID NO: 1271 - DNA, 492 bp, Homo sapiens; identical to SEQ ID NO: 318

SEQ ID NO: 1272 - DNA, 68 bp, Homo sapiens; identical to SEQ ID NO: 288

SEQ ID NO: 1273 - DNA, 3363 bp, Homo sapiens; identical to SEQ ID NO: 293

SEQ ID NO: 1274 - DNA, 6475 bp, Homo sapiens; identical to SEQ ID NO: 239

SEQ ID NO: 1275 - DNA, 3558 bp, Homo sapiens; identical to SEQ ID NO: 891

SEQ ID NO: 1276 - DNA, 4230 bp, Homo sapiens; identical to SEQ ID NO: 369

SEQ ID NO: 1277 - DNA, 3037 bp, Homo sapiens
tccctcccccctccctgccctcctcctcctcctcccctatgtggtgctcccgggagcccagcccaacactggagcgtctcctgctcgcgcacgccagaagcagctcggggtctctccgccgccccttggccatggccgctgtgccgacggcgcccgctcccctgcgctccaggggcccccgccgctgcagccgcagccgccgcagcttctgagcccaaggggccgccgctgcagccgccgccgccgccgctcgcccgcccggatcccgcctgcggcagttgccgcacaacatgctacctgcggccgccccggcggctcctggaaccccggttcgcggcgatgccagccaccccagcgaagccgccgcagttcagtgcttggataatttgaaagtacaatagttggtttccctgtccacccgccccacttcgcttgccatcacagcacgcctatcggatgtgagaggagaagtcccgctgctcgggcactgtctatatacgcctaacacctacatatattttaaaaacattaaatataattaacaatcaaaagaaagaggagaaaggaagggaagcattactgggttactatgcacttgcgactgatttcttggctttttatcattttgaactttatggaatacatcggcagccaaaacgcctcccggggaaggcgccagcgaagaatgcatcctaacgttagtcaaggctgccaaggaggctgtgcaacatgctcagattacaatggatgtttgtcatgtaagcccagactattttttgctctggaaagaattggcatgaagcagattggagtatgtctctcttcatgtccaagtggatattatggaactcgatatccagatataaataagtgtacaaaatgcaaagctgactgtgatacctgtttcaacaaaaatttctgcacaaaatgtaaaagtggattttacttacaccttggaaagtgccttgacaattgcccagaagggttggaagccaacaaccatactatggagtgtgtcagtattgtgcactgtgaggtcagtgaatggaatccttggagtccatgcacgaagaagggaaaaacatgtggcttcaaaagagggactgaaacacgggtccgagaaataatacagcatccttcagcaaagggtaacctgtgtcccccaacaaatgagacaagaaagtgtacagtgcaaaggaagaagtgtcagaagggagaacgaggaaaaaaaggaagggagaggaaaagaaaaaaacctaataaaggagaaagtaaagaagcaatacctgacagcaaaagtctggaatccagcaaagaaatcccagagcaacgagaaaacaaacagcagcagaagaagcgaaaagtccaagataaacagaaatcggtatcagtcagcactgtacactagagggttccatgagattattgtagactcatgatgctgctatctcaaccagatgcccaggacaggtgctctagccattaggaccacaaatggacatgtcagttattgctctgtctaaacaacattcccagtagttgctatattcttcatacaagcatagttaacaacaaagagccaaaagatcaaagaagggatactttcagatggttgtcttgtgtgcttctctgcatttttaaaagacaagacattcttgtacatattatcaataggctataagatgtaacaacgaaatgatgacatctggagaagaaacatcttttccttataaaaatgtgttttcaagctgttgttttaagaagcaaaagatagttctgcaaattcaaagatacagtatcccttcaaaacaaataggagttcagggaagagaaacatccttcaaaggacagtgttgttttgaccgggagatctagagagtgctcagaattagggcctggcatttggaatcacaggatttatcatcacagaaacaactgttttaagattagttccatcactctcatcctgtatttttataagaaacacaagagtgcataccagaattgaatataccatatgggattggagaaagacaaatgtggaagaaatcatagagctggagactacttttgtgctttacaaaactgtgaaggattgtggtcacctggaacaggtctccaatctatgttagcactatgtggctcagcctctgttaccccttggattatatatcaacctgtaaacatgtgcctgtaacttacttccaaaaacaaaatcatacttattagaagaaaattctgattttatagaaaaaaaatagagcaaggagaatataacatgtttgcaaagtcatgtgttttctttctcaatgagggaaaaacaattttattacctgcttaatggtccacctggaactaaaagggatactattttctaacaaggtatatctagtaggggagaaagccaccacaataaatatatttgttaatagtttttcaagttttgttcactctgttttattgtttgttttattgagaaattcttactcttagagactcatgaattaagaaagagaattctgctaactcagagaacctggttcctatgtaattcagaatatattacatttctcagtaatatttgttttttgaatccacctttatctgagccaatggagatttacttatagcgtattaggagatatttattccattttcttattttaatcaacattctaattatagacacatgggcctgggattgaagtcaccctagctgaaggcctcaccagtgtttcacagaggacacagcccaccccttgcaggaggaggtatctctgagtgtgcagcacagaatcgcatgacccaccttaaccttcctgttgtcatggaaggatgcacggctgctctgtccactgtgattcctagccctctcaagatcactgctttctgaagaatttgcaatgactctggcttctggctgcttatctctggacacccgttctccaccagttgtacagttcatgtaatctacttggcttaattgattttccacttctctcttcctcttctaagatataaacattttaaatgattt

SEQ ID NO: 1278 - DNA, 3801 bp, Homo sapiens; identical to SEQ ID NO: 309

SEQ ID NO: 1279 - DNA, 3917 bp, Homo sapiens; identical to SEQ ID NO: 319

SEQ ID NO: 1280 - DNA, 4123 bp, Homo sapiens; identical to SEQ ID NO: 286

SEQ ID NO: 1281 - DNA, 920 bp, Homo sapiens
ggccctgcaagagctggctgcttagagactgcgagaaggaggtcccccacggcccttcaggatgaaagctgcggtgctgaccttggccgtgctcttcctgacggggagccaggctcggcatttctggcagcaagatgaacccccccagagcccctgggatcgagtgaaggacctggccactgtgtacgtggatgtgctcaaagacagcggcagagactatgtgtcccagtttgaaggctccgccttgggaaaacagctaaacctaaagctccttgacaactgggacagcgtgacctccaccttcagcaagctgcgcgaacagctcggccctgtgacccaggagttctgggataacctggaaaaggagacagagggcctgaggcaggagatgagcaaggatctggaggaggtgaaggccaaggtgcagccctacctggacgacttccagaagaagtggcaggaggagatggagctctaccgccagaaggtggagccgctgcgcgcagagctccaagagggcgcgcgccagaagctgcacgagctgcaagagaagctgagcccactgggcgaggagatgcgcgaccgcgcgcgcgcccatgtggacgcgctgcgcacgcatctggccccctacagcgacgagctgcgccagcgcttggccgcgcgccttgaggctctcaaggagaacggcggcgccagactggccgagtaccacgccaaggccaccgagcatctgagcacgctcagcgagaaggccaagcccgcgctcgaggacctccgccaaggcctgctgcccgtgctggagagcttcaaggtcagcttcctgagcgctctcgaggagtacactaagaagctcaacacccagtgaggcgcccgccgccgccccccttcccggtgctcagaataaacgtttccaaagtggg

SEQ ID NO: 1282 - DNA, 1971 bp, Homo sapiens
acactcagttgcctctggccagtgcagggctcagccagggatggcttctagctgacagtgggaggaattaattcatctgaccggaatattcttttctcttctgggctgttggtttttcaagtgcaacaaagattccatacagctccaaggaaggagccaagaaaaacattctgtgccaaagtgagatcctggaagtgaaaccccggaataaagctgaaaaacgggctccagttgggtgccaggaaatgcaggactggaatgtgacttgacttccggcagcgcgcaggtgctcccgggtcacctgctttgaggtccagcctcctgccctgcctcaggtgaccacatgaccactgtggactttgccctgaaaccttctgggaggagaagaggcctgaccttggcgctggggtccagtgggcattgctctggtccgaggctgctgctcttgacctctgctctgcggctgttttccattggagtagaggctcctcctgtcctgtcctgcctgtggagggaagcaaaccttcccctggaccagagagaggagaaagcggagacaggtagcaacgctgtggactggtgatgacaggctcttcagctccctgcaagtgaccgggcctggggaacagcagggcatggcacaggcacacaggaccccccagcccagggctgcccccagccagccccgtgtgttcaagctggttctcctgggaagtggctccgtgggtaagtccagcttggctcttcggtacgtgaagaacgacttcaagagtatcctgcctacggtgggctgtgcgttcttcacaaaggtggtggatgtgggtgccacctctctgaagcttgagatctgggacacagctggccaggagaagtaccacagcgtctgccacctctacttcaggggtgccaacgctgcgcttctggtgtacgacatcaccaggaaggattccttcctcaaggctcagcagtggctgaaggacctggaggaggagctgcacccaggagaagtcctggtgatgctggtgggcaacaagacggacctcagccaggagcgggaggtgaccttccaggaagggaaggagtttgccgacagccagaagttgctgttcatggaaacttcggccaaactgaaccaccaggtgtcggaggtgttcaatacagtggcccaagagctactgcagagaagcgacgaggagggccaggctctacggggggatgcagctgtggctctgaacaaggggcccgcgaggcaggccaaatgctgcgcccactaggtgcagccactcctgggggctgtggggaagacaccccctgcctgggccatggccagctctaggtggattctgattcactgtcaatgctgggttgctcccgagccctagatgttcctggaagttggccccctttatgaaaaccacttcccacagccagtgggaactgccagaggaagatctggcgtcacatggctcccaggaaagtgctgtgccctatccccactgataccatctgattccccgatgcctgtgcctgttccacctggacggtggccccctcagcctggcagcctctggacagagaggaaggaaggattggaaaagtccccgcagcacagcgacggtgggaagatgccttacgtctgatcttgatgggggcactggcctggagcctgggcccacctgcttctggggggttggggagcaggccagatggaggtggtggtgccaggaagaaatggagcgatgactgactgtggggtgggcccaggatttccacatcttggtgaagttgcccctgggaagggcagctgggggcagtggcgccagttcccttccatggtctcccggctggcaatgtggtgaagctgagtttctgtccaatgagcaggaagattctgagacatttcgcctgagatataagttgtactgcgtatgcagtttttcctccaaaaattaaattgcttttgacaatctg

SEQ ID NO: 1283 - DNA, 1713 bp, Homo sapiens; identical to SEQ ID NO: 58

SEQ ID NO: 1284 - DNA, 688 bp, Homo sapiens; identical to SEQ ID NO: 324

SEQ ID NO: 1285 - DNA, 2148 bp, Homo sapiens; identical to SEQ ID NO: 241

SEQ ID NO: 1286 - DNA, 2035 bp, Homo sapiens; identical to SEQ ID NO: 265

SEQ ID NO: 1287 - DNA, 1424 bp, Homo sapiens; identical to SEQ ID NO: 290

SEQ ID NO: 1288 - DNA, 1858 bp, Homo sapiens; identical to SEQ ID NO: 345

SEQ ID NO: 1289 - DNA, 2918 bp, Homo sapiens; identical to SEQ ID NO: 333

SEQ ID NO: 1290 - DNA, 3965 bp, Homo sapiens; identical to SEQ ID NO: 276

SEQ ID NO: 1291 - DNA, 3418 bp, Homo sapiens
ggacttggaggcggccggcgcaggggccgcgagaggcttcgtcgccgctgcagctccgggggctcccaggggagcgtgcgcggaacctccaggcccagcaggaccccggctgcggcgaggaggaaggagccagcctagcagcttctgcgcctgtggccgcgggtgtcctggaggcctctcggtgtgacgagtgggggacccgaaggctcgtgcgccacctccaggcctggacgctgccctccgtcttctgcccccaataggtgcgccggaccttcaggccctggggtgaattcagctgctcctacatcagcttccggaaccaccaaaaattcaaattgggattttccggagtaaacaagagcctagagccctttgctcaatgctggatttaatacgtatatatttttaagcgagttggttttttcccctttgatttttgatcttcgcgacagttcctcccacgcatattatcgttgttgccgtcgttttctctccccgcgtggctccttgacctgcgagggagagagaggacaccgaagccgggagctcgcagggaccatgtatcagagcttggccatggccgccaaccacgggccgccccccggtgcctacgaggcgggcggccccggcgccttcatgcacggcgcgggcgccgcgtcctcgccagtctacgtgcccacaccgcgggtgccctcctccgtgctgggcctgtcctacctccagggcggaggcgcgggctctgcgtccggaggcgcctcgggcggcagctccggtggggccgcgtctggtgcggggcccgggacccagcagggcagcccgggatggagccaggcgggagccgacggagccgcttacaccccgccgccggtgtcgccgcgcttctccttcccggggaccaccgggtccctggcggccgccgccgccgctgccgcggcccgggaagctgcggcctacagcagtggcggcggagcggcgggtgcgggcctggcgggccgcgagcagtacgggcgcgccggcttcgcgggctcctactccagcccctacccggcttacatggccgacgtgggcgcgtcctgggccgcagccgccgccgcctccgccggccccttcgacagcccggtcctgcacagcctgcccggccgggccaacccggccgcccgacaccccaatctcgatatgtttgacgacttctcagaaggcagagagtgtgtcaactgtggggctatgtccaccccgctctggaggcgagatgggacgggtcactatctgtgcaacgcctgcggcctctaccacaagatgaacggcatcaaccggccgctcatcaagcctcagcgccggctgtccgcctcccgccgagtgggcctctcctgtgccaactgccagaccaccaccaccacgctgtggcgccgcaatgcggagggcgagcctgtgtgcaatgcctgcggcctctacatgaagctccacggggtacgtccccaggcctcttgcaatgcggaaagaggggatccaaaccagaaaacggaagcccaagaacctgaataaatctaagacaccagcagctccttcaggcagtgagagccttcctcccgccagcggtgcttccagcaactccagcaacgccaccaccagcagcagcgaggagatgcgtcccatcaagacggagcctggcctgtcatctcactacgggcacagcagctccgtgtcccagacgttctcagtcagtgcgatgtctggccatgggccctccatccaccctgtcctctcggccctgaagctctccccacaaggctatgcgtctcccgtcagccagtctccacagaccagctccaagcaggactcttggaacagcctggtcttggccgacagtcacggggacataatcactgcgtaatcttccctcttccctcctcaaattcctgcacggacctgggacttggaggatagcaaagaaggaggccctgggctcccaggggccggcctcctctgcctggtaatgactccagaacaacaactgggaagaaacttgaagtcgacaatctggttaggggaagcgggtgttggattttctcagatgcctttacacgctgatgggactggagggagcccacccttcagcacgagcacactgcatctctcctgtgagttggagacttctttcccaagatgtccttgtcccctgcgttccccactgtggcctagaccgtgggttttgcattgtgtttctagcaccgaggatctgagaacaagcggagggccgggccctgggacccctgctccagcccgaatgacggcatctgtttgccatgtacctggatgcgacgggcccctggggacaggcccttgccccatccatccgcttgaggcatggcaccgccctgcatccctaataccaaatctgactccaaaattgtggggtgtgacatacaagtgactgaacacttcctggggagctacaggggcacttaacccaccacagcacagcctcatcaaaatgcagctggcaacttctcccccaggtgccttccccctgctgccggcctttgctccttcacttccaacatctctcaaaataaaaatccctcttcccgctctgagcgattcagctctgcccgcagcttgtacatgtctctcccctggcaaaacaagagctgggtagtttagccaaacggcaccccctcgagttcactgcagacccttcgttcaccgtgtcacacatagaggggttctgagtaagaacaaaacgttctgctgctcaagccagtctggcaagcactcagcccagcctcgaggtccttctggggagagtgtaagtggacagagtcctggtcagggggcaggagtgtcccaagggctggcccacctgctgtctgtctgctcctcctagcccttggtcagatggcagccagagtccctcaggacctgcagcctcgccccggcagaagtcttttgtccaggaggcaaaaagccagagattctgcaacacgaattcgaagcaaacaaacacaacacaacagaattcctggaaagaagacgactgctaagacacggcaggggggcctggagggagcctccgactctgagctgctccgggatctgccgcgttctcctctgcacattgctgtttctgcccctgatgctggagctcaaggagactccttcctctttctcagcagagctgtagctgactgtggcattactacgcctccccacacgcccagacccctcactccaaaatcctactggctgtagcagagaatacctttgaaccaagattctgttttaatcatcatttacattgttttcttccaaaggccccctcgtataccctccctaacccacaaacctgttaacattgtcttaaggtgaaatggctggaaaatcagtatttaactaataaatttatctgtattcctctttc

SEQ ID NO: 1292 - DNA, 2603 bp, Homo sapiens
aaatccgagcctcgcgtgggctcctggcccccgacggacaccaccaggcccacggagcccaccatgccgcgcccggcccccgcgcgccgcctcccgggactcctcctgctgctctggccgctgctgctgctgccctccgccgcccccgaccccgtggcccgcccgggcttccggaggctggagacccgaggtcccgggggcagccctggacgccgcccctctcctgcggctcccgacggcgcgcccgcttccgggaccagcgagcctggccgcgcccgcggtgcaggtgtttgcaagagcagacccttggacctggtgtttatcattgatagttctcgtagcgtacggcccctggaattcaccaaagtgaaaacttttgtctcccggataatcgacactctggacattgggccagccgacacgcgggtggcagtggtgaactatgctagcactgtgaagatcgagttccaactccaggcctacacagataagcagtccctgaagcaggccgtgggtcgaatcacacccttgtcaacaggcaccatgtcaggcctagccatccagacagcaatggacgaagccttcacagtggaggcaggggctcgagagccctcttctaacatccctaaggtggccatcattgttacagatgggaggccccaggaccaggtgaatgaggtggcggctcgggcccaagcatctggtattgagctctatgctgtgggcgtggaccgggcagacatggcgtccctcaagatgatggccagtgagcccctagaggagcatgttttctacgtggagacctatggggtcattgagaaactttcctctagattccaggaaaccttctgtgcgctggacccctgtgtgcttggaacacaccagtgccagcacgtctgcatcagtgatggggaaggcaagcaccactgtgagtgtagccaaggatacaccttgaatgccgacaagaaaacgtgttcagctcttgataggtgtgctcttaacacccacggatgtgagcacatctgtgtgaatgacagaagtggctcttatcattgtgagtgctatgaaggttataccttgaatgaagacaggaaaacttgttcagctcaagataaatgtgctttgggtacccatgggtgtcagcacatttgtgtgaatgacagaacagggtcccatcattgtgaatgctatgagggctacactctgaatgcagataaaaaaacatgttcagtccgtgacaagtgtgccctaggctctcatggttgccagcacatttgtgtgagtgatggggccgcatcctaccactgtgattgctatcctggctacaccttaaatgaggacaagaaaacatgttcagccactgaggaagcacgaagacttgtttccactgaagatgcttgtggatgtgaagctacactggcattccaggacaaggtcagctcgtatcttcaaagactgaacactaaacatatcctttctggaagggagttgatgacattttggagaagttgaaaataaatgaatatggacaaatacatcgttaaattgctccaatttctcacctgaaaatgtggacagcttggtgtacttaatactcatgcattcttttgcacacctgttattgccaatgttcctgctaataatttgccattatctgtattaatgcttgaatattactggataaattgtatgaagatcttctgcagaatcagcatgattcttccaaggaaatacatatgcagatacttattaagagcaaactttagtgtctctaagttatgactgtgaaatgattggtaggaaatagaatgaaaagtttagtgtttctttatctactaattgagccatttaatttttaaatgtttatattagataaccatattcacaatggaaactttaggtctagtttcttttgatagtatttataatataaatcaatcttattactgagagtgcaaattgtacaaggtatttacacatacaacttcatataactgagatgaatgtaattttgaactgtttaacactttttgttttttgcttattttgttggagtattattgaagatgtgatcaatagattgtaatacacatatctaaaaatagttaacacagatcaagtgaacattacattgccatttttaattcattctggtctttgaaagaaatgtactactaaagagcactagttgtgaatttagggtgttaaactttttaccaagtacaaaaatcccaaattcactttattattttgcttcaggatccaagtgacaaagttatatatttataaaattgctataaatcgacaaaatctaatgttgtctttttaatgttagtgatccacctgcctcagcctcccaaagtgctgggattacaggcttgaaagtctaacttttttttacttatatatttgatacatataattcttttggctttgaaacttgcaactttgagaacaaaacagtcctttaaattttgcactgctcaattctgtttttcgtttgcattgtctttaatataataaaagttattacctttacatattatcatgtctatttttgatgactcatcaattttgtctattaaagatatttctttaaatta

SEQ ID NO: 1293 - DNA, 1957 bp, Homo sapiens; identical to SEQ ID NO: 282

SEQ ID NO: 1294 - DNA, 3419 bp, Homo sapiens; identical to SEQ ID NO: 305

SEQ ID NO: 1295 - DNA, 4060 bp, Homo sapiens; identical to SEQ ID NO: 338

SEQ ID NO: 1296 - DNA, 4623 bp, Homo sapiens; identical to SEQ ID NO: 313

SEQ ID NO: 1297 - DNA, 2379 bp, Homo sapiens; identical to SEQ ID NO: 273

SEQ ID NO: 1298 - DNA, 1357 bp, Homo sapiens; identical to SEQ ID NO: 250

SEQ ID NO: 1299 - DNA, 2746 bp, Homo sapiens
gctgcccgggctgcgcggcgtctgcaggcgccaccgctgcctctttccggctgtgaccctcctcgccgccgccgcttggctgcgtcctccgactccccgcgccgccgagaccaggctcccgctccggttgcggccgcaccgccctccgcggccgccccctggggatccagcgagcgcgaatccttggttaggaggaaagggagtggagaggaccgtgctgcctggcgttccccagctgcctttctttctgttttccccccaacggaatctctatgtggtctcctagagcctcgtgcctgcctctcagctagatgctgatatcattcccactcatgtagttgggaaggaagggtgtggcagagataaagggtccacggtcacgcagtatgtggggggtcacacagcctgtatgccaaagtggcacaccctgtgaatatgtagggtcgcacagcctttatgtgtcagtgccagagcctggacccgggtctgtagatgtgtgaaccgtgagctgataccatggatattcaaagatttacatcccatcaatgtttataccttcttgagaagaaatttgtgtcaaagcacactcctcctttcaagactacctcctcgccgtgctgcgtgatagccctagtatcacaaccaaaacacatgatacagaaagaggccagtatctgtgtggcttcaggctcttgtgcgttggccatgaagcaaaggaaggctgttgcatgaaataacctccttctgactccacccttgcatttgtgagatgtaaacagcagtgttaccaagaggtcttccagggaacacgttgcaggtcgtccttggtggaaggaaccatgaactggcatctccccctcttcctcttggcctctgtgacgctgccttccatctgctcccacttcaatcctctgtctctcgaggaactaggctccaacacggggatccaggttttcaatcagattgtgaagtcgaggcctcatgacaacatcgtgatctctccccatgggattgcgtcggtcctggggatgcttcagctgggggcggacggcaggaccaagaagcagctcgccatggtgatgagatacggcgtaaatggagttggtaaaatattaaagaagatcaacaaggccatcgtctccaagaagaataaagacattgtgacagtggctaacgccgtgtttgttaagaatgcctctgaaattgaagtgccttttgttacaaggaacaaagatgtgttccagtgtgaggtccggaatgtgaactttgaggatccagcctctgcctgtgattccatcaatgcatgggttaaaaatgaaaccagggatatgattgacaatctgctgtccccagatcttattgatggtgtgctcaccagactggtcctcgtcaacgcagtgtatttcaagggtctgtggaaatcacggttccaacccgagaacacaaagaaacgcactttcgtggcagccgacgggaaatcctatcaagtgccaatgctggcccagctctccgtgttccggtgtgggtcgacaagtgcccccaatgatttatggtacaacttcattgaactgccctaccacggggaaagcatcagcatgctgattgcactgccgactgagagctccactccgctgtctgccatcatcccacacatcagcaccaagaccatagacagctggatgagcatcatggtgcccaagagggtgcaggtgatcctgcccaagttcacagctgtagcacaaacagatttgaaggagccgctgaaagttcttggcattactgacatgtttgattcatcaaaggcaaattttgcaaaaataacaacagggtcagaaaacctccatgtttctcatatcttgcaaaaagcaaaaattgaagtcagtgaagatggaaccaaagcttcagcagcaacaactgcaattctcattgcaagatcatcgcctccctggtttatagtagacagaccttttctgtttttcatccgacataatcctacaggtgctgtgttattcatggggcagataaacaaaccctgaagagtatacaaaagaaaccatgcaaagcaacgactactttgctacgaagaaagactcctttcctgcatctttcatagttctgttaaatatttttgtacatcgcttctttttcaaaactagttcttaggaacagactcgatgcaagtgtttctgttctgggaggtattggagggaaaaaacaagcaggatggctggaacactgtactgaggaatgaatagaaaggcttccagatgtctaaaagattctttaaactactgaactgttacctaggttaacaaccctgttgagtatttgctgtttgtccagttcaggaatttttgttttgttttgtctatatgtgcggcttttcagaagaaatttaatcagtgtgacagaaaaaaaaatgttttatggtagcttttactttttatgaaaaaaaaattatttgccttttaaattcttttcccccatccccctccaaagtcttgatagcaagcgttattttggtggtagaaacggtgaaatctctagcctctttgtgtttttgttgttgttgttgttgttgttttatataatgcatgtattcactaaaataaaatttaaaaaactcctgtcttgctagacaaggttgctgttgtgcagtgtgcctgtcactactggtctgtactccttggatttgcatttttgtattttgtacaaagtaaaaataaactgttatgagtagtaaaaa

SEQ ID NO: 1300 - DNA, 5053 bp, Homo sapiens; identical to SEQ ID NO: 382

SEQ ID NO: 1301 - DNA, 4221 bp, Homo sapiens; identical to SEQ ID NO: 304

SEQ ID NO: 1302 - DNA, 1968 bp, Homo sapiens
aattttagctgggattatgctgtgattatgtttggcttaacagtaatgaaaataagtttaggctgggtgcggtggctcatgcctgtaatcccagcactttaggaggctgaggcaagcggatcacctgaggtcaggggttcgagacaagcctgaccaagatggagaaaccccgtctctaccaaaaatacaaaattagccgggtgtggtggcgtctgcctgtaatcccagctactggggaagcggaggacaatcgcttgaacccagaaggcagaggttgtggtgagccgagatctcgccattgcactccagcctggacaacaacagcgaaacttcatctcaaaacaataataagtttacaacctctgaatatgtaccaaatggagccaggggtggggagtattaggacaagccccgcactgcagagccccccagctctcactcgtggaccaagtgcatgggacacagccattcggaaagctctttcttttggagtgggtctgggtgttctggttttggtttgcttgttttatcattttgtgacattggcgcctattcttcagtttgcatccctgccttgcttgcttgaagctggagcacaaatgtcccgtcaccctgtaacaacacaagtatgcgtcatgcctgcgaggcttagcttgggaagtggaatctccaggaatctccttcggttgtctgtctgccactttacactgttgctcccatttcggtcactgaggccctgtcccttatcctccagggacatggtgctgtcctatgagctctggctcctttgtgacttttacattgctcctccagatagcagtggcagtggcatttgcaaaaaggctatttgagaacaaataagaaaaaatcttcaaagcgaagatgatagtaaaacagccctcatttttcaaagtccattcttttttctggtccgtgcactgccagctcacttctctggctaaaacccgggggcggcgggggtgtgtgtgggggttagttttgcaaaaagtactgatggcaccgctgtgctccaagttaaccagaacacaagaatcgaaaaagcctgtgagatactggtgctcgtgatcgtaagctccaggtcggggggttttcagatgaacacaaaaagggggctgctcccgtcccaagatgagtgataaatgagtcacttctcatactcgcactcacactcgctccatttcctctgggatgactgtcttccgtcctaccgctgtggctgctgttatttgcctgataaacttctttccctctccctccctctgacacagaaacacacacacacacacacacagacacacacacacacacacagcccgctggatctataagcagtttgtaacaggatgcaccagttctaatcacgtttcaagtcaaatgaaccagtcgcagcttcctaataagtgaatggctgacataaggagttaattcagaagcagctcaatactatggacaatactagtggacaatattagcatactgctcgtacaacaaagataccgtagtctctggtgctgcctcttcaggacgaatttgctgaaagtgagttgtaattagagatgttaaaaaaaacattggctgcgcgcgatggcttactcctgtaatcccagcacttttggaggcgaggcaggtggatgacctgaggttaggagttcgagaccagcctggctaacatggcgaaaccccatctctactaaaaatacaaaaaattagccaggcatcgtggtgggcacctgtaatctcagctacttgggaggctgaggccgaagaatttcttgaacctgggaggtggaggttgcagtgacccgagatcatgccattgcactccagcctgggcaacaagagtgaaattgtgtctcaaataataataataataataataaactgagatttatcattcctcctctctccttttccttgagaacttaataaaaatggaaaatatccatt

SEQ ID NO: 1303 - DNA, 5517 bp, Homo sapiens; identical to SEQ ID NO: 302

SEQ ID NO: 1304 - DNA, 6944 bp, Homo sapiens; identical to SEQ ID NO: 929

SEQ ID NO: 1305 - DNA, 2544 bp, Homo sapiens; identical to SEQ ID NO: 373

SEQ ID NO: 1306 - DNA, 6548 bp, Homo sapiens
aggtctccgcttggagccgccgcacccgggacggtgcgtagcgctggaagtccggccttccgagagctagctgtccgccgcggcccccgcacgccgggcagccgtccctcgccgcctcgggcgcgccaccatggggccccggctcagcgtctggctgctgctgctgcccgccgcccttctgctccacgaggagcacagccgggccgctgcgaagggtggctgtgctggctctggctgtggcaaatgtgactgccatggagtgaagggacaaaagggtgaaagaggcctcccggggttacaaggtgtcattgggtttcctggaatgcaaggacctgaggggccacagggaccaccaggacaaaagggtgatactggagaaccaggactacctggaacaaaagggacaagaggacctccgggagcatctggctaccctggaaacccaggacttcccggaattcctggccaagacggcccgccaggccccccaggtattccaggatgcaatggcacaaagggggagagagggccgctcgggcctcctggcttgcctggtttcgctggaaatcccggaccaccaggcttaccagggatgaagggtgatccaggtgagatacttggccatgtgcccgggatgctgttgaaaggtgaaagaggatttcccggaatcccagggactccaggcccaccaggactgccagggcttcaaggtcctgttgggcctccaggatttaccggaccaccaggtcccccaggccctcccggccctccaggtgaaaagggacaaatgggcttaagttttcaaggaccaaaaggtgacaagggtgaccaaggggtcagtgggcctccaggagtaccaggacaagctcaagttcaagaaaaaggagacttcgccaccaagggagaaaagggccaaaaaggtgaacctggatttcaggggatgccaggggtcggagagaaaggtgaacccggaaaaccaggacccagaggcaaacccggaaaagatggtgacaaaggggaaaaagggagtcccggttttcctggtgaacccgggtacccaggactcataggccgccagggcccgcagggagaaaagggtgaagcaggtcctcctggcccacctggaattgttataggcacaggacctttgggagaaaaaggagagaggggctaccctggaactccggggccaagaggagagccaggcccaaaaggtttcccaggactaccaggccaacccggacctccaggcctccctgtacctgggcaggctggtgcccctggcttccctggtgaaagaggagaaaaaggtgaccgaggatttcctggtacatctctgccaggaccaagtggaagagatgggctcccgggtcctcctggttcccctgggccccctgggcagcctggctacacaaatggaattgtggaatgtcagcccggacctccaggtgaccagggtcctcctggaattccagggcagccaggatttataggcgaaattggagagaaaggtcaaaaaggagagagttgcctcatctgtgatatagacggatatcgggggcctcccgggccacagggacccccgggagaaataggtttcccagggcagccaggggccaagggcgacagaggtttgcctggcagagatggtgttgcaggagtgccaggccctcaaggtacaccagggctgataggccagccaggagccaagggggagcctggtgagttttatttcgacttgcggctcaaaggtgacaaaggagacccaggctttccaggacagcccggcatgacagggagagcgggttctcctggaagagatggccatccgggtcttcctggccccaagggctcgccgggttctgtaggattgaaaggagagcgtggcccccctggaggagttggattcccaggcagtcgtggtgacaccggcccccctgggcctccaggatatggtcctgctggtcccattggtgacaaaggacaagcaggctttcctggaggccctggatccccaggcctgccaggtccaaagggtgaaccaggaaaaattgttcctttaccaggcccccctggagcagaaggactgccggggtccccaggcttcccaggtccccaaggagaccgaggctttcccggaaccccaggaaggccaggcctgccaggagagaagggcgctgtgggccagccaggcattggatttccagggccccccggccccaaaggtgttgacggcttacctggagacatggggccaccggggactccaggtcgcccgggatttaatggcttacctgggaacccaggtgtgcagggccagaagggagagcctggagttggtctaccgggactcaaaggtttgccaggtcttcccggcattcctggcacacccggggagaaggggagcattggggtaccaggcgttcctggagaacatggagcgatcggaccccctgggcttcaggggatcagaggtgaaccgggacctcctggattgccaggctccgtggggtctccaggagttccaggaataggcccccctggagctaggggtccccctggaggacagggaccaccggggttgtcaggccctcctggaataaaaggagagaagggtttccccggattccctggactggacatgccgggccctaaaggagataaaggggctcaaggactccctggcataacgggacagtcggggctccctggccttcctggacagcagggggctcctgggattcctgggtttccaggttccaagggagaaatgggcgtcatggggacccccgggcagccgggctcaccaggaccagtgggtgctcctggattaccgggtgaaaaaggggaccatggctttccgggctcctcaggacccaggggagaccctggcttgaaaggtgataagggggatgtcggtctccctggcaagcctggctccatggataaggtggacatgggcagcatgaagggccagaaaggagaccaaggagagaaaggcaagacaaattggaccaattggtgagaagggatcccgaggagaccctgggaccccaggagtgcctggaaaggacgggcaggcaggacagcctgggcagccaggacctaaaggtgatccaggtataagtggaaccccaggtgctccaggacttccgggaccaaaaggatctgttggtggaatgggcttgccaggaacacctggagagaaaggtgtgcctggcatccctggcccacaaggttcacctggcttacctggagacaaaggtgcaaaaggagagaaagggcaggcaggcccacctggcataggcatcccagggctgcgaggtgaaaagggagatcaagggatagcgggtttcccaggaagccctggagagaagggagaaaaaggaagcattgggatcccaggaatgccagggtccccaggccttaaagggtctcccgggagtgttggctatccaggtaggaagtcctgggctacctggagaaaaaggtgacaaaggcctcccaggattggatggcatccctggtgtcaaaggagaagcaggtcttcctgggactcctggccccacaggcccagctggccagaaaggggagccaggcagtgatggaatcccggggtcagcaggagagaagggtgaaccaggtctaccaggaagaggattcccagggtttccaggggccaaaggagacaaaggttcaaagggtgaggtgggtttcccaggattagccgggagcccaggaattcctggatccaaaggagagcaaggattcatgggtcctccggggccccagggacagccggggttaccgggatccccaggccatgccacggaggggcccaaaggagaccgcggacctcagggccagcctggcctgccaggacttccgggacccatggggcctccagggcttcctgggattgatggagttaaaggtgacaaaggaaatccaggctggccaggagcacccggtgtcccagggcccaagggagaccctggattccagggcatgcctggtattggtggctctccaggaatcacaggctctaagggtgatatggggcctccaggagttccaggatttcaaggtccaaaaggtcttcctggcctccagggaattaaaggtgatcaaggcgatcaaggcgtcccgggagctaaaggtctcccgggtcctcctggccccccaggtccttacgacatcatcaaaggggagcccgggctccctggtcctgagggccccccagggctgaaagggcttcagggactgccaggcccgaaaggccagcaaggtgttacaggattggtgggtatacctggacctccaggtattcctgggtttgacggtgcccctggccagaaaggagagatgggacctgccgggcctactggtccaagaggatttccaggtccaccaggccccgatgggttgccaggatccatggggcccccaggcaccccatctgttgatcacggcttccttgtgaccaggcatagtcaaacaatagatgacccacagtgtccttctgggaccaaaattctttaccacgggtactctttgctctacgtgcaaggcaatgaacgggcccatggccaggacttgggcacggccggcagctgcctgcgcaagttcagcacaatgcccttcctgttctgcaatattaacaacgtgtgcaactttgcatcacgaaatgactactcgtactggctgtccacccctgagcccatgcccatgtcaatggcacccatcacgggggaaaacataagaccatttattagtaggtgtgctgtgtgtgaggcgcctgccatggtgatggccgtgcacagccagaccattcagatcccaccgtgccccagcgggtggtcctcgctgtggatcggctactcttttgtgatgcacaccagcgctggtgcagaaggctctggccaagccctggcgtcccccggctcctgcctggaggagtttagaagtgcgccattcatcgagtgtcacggccgtgggacctgcaattactacgcaaacgcttacagcttttggctcgccaccatagagaggagcgagatgttcaagaagcctacgccgtccaccttgaaggcaggggagctgcgcacgcacgtcagccgctgccaagtctgtatgagaagaacataatgaagcctgactcagctaatgtcacaacatggtgctacttcttcttctttttgttaacagcaacgaaccctagaaatatatcctgtgtacctcactgtccaatatgaaaaccgtaaagtgccttataggaatttgcgtaactaacacaccctgcttcattgacctctacttgctgaaggagaaaaagacagcgataagctttcaatagtggcataccaaatggcacttttgatgaaataaaatatcaatattttctgcaatccaatgcactgatgtgtgaagtgagaactccatcagaaaaccaaagggtgctaggaggtgtgggtgccttccatactgtttgcccattttcattcttgtattataattaattttctacccccagagataaatgtttgtttatatcactgtctagctgtttcaaaatttaggtcccttggtctgtacaaataatagcaatgtaaaaatggttttttgaacctccaaatggaattacagactcagtagccatatcttccaaccccccagtataaatttctgtctttctgctatgtgtggtactttgcagctgcttttgcagaaatcacaattttcctgtggaataaagatggtccaaaaatagtcaaaaattaaatatatatatatattagtaatttatatagatgtcagcaattaggcagatcaaggtttagtttaacttccactgttaaaataaagcttacatagttttcttcctttgaaagactgtgctgtcctttaacataggtttttaaagactaggatattgaatgtgaaacatccgttttcattgttcacttctaaaccaaaaattatgtgttgccaaaaccaaacccaggttcatgaatatggtgtctattatagtgaaacatgtactttgagcttattgtttttattctgtattaaatattttcagggttttaaacactaatcacaaactgaatgacttgacttcaaaagcaacaaccttaaaggccgtcatttcattagtattcctcattctgcatcctggcttgaaaaacagctctgttgaatcacagtatcagtattttcacacgtaagcacattcgggccatttccgtggtttctcatgagctgtgttcacagacctcagcagggcatcgcatggaccgcaggagggcagattcggaccactaggcctgaaatgacatttcactaaaagtctccaaaacatttctaagactactaaggccttttatgtaatttctttaaatgtgtatttcttaagaattcaaatttgtaataaaactatttgtataaaaattaagcttttattaatttgttgctagtattgccacagacgcattaaaagaaacttactgcacaagctgctaataaatttgtaagctttgcatacctta

SEQ ID NO: 1307 - DNA, 801 bp, Homo sapiens; identical to SEQ ID NO: 352

SEQ ID NO: 1308 - DNA, 2493 bp, Homo sapiens; identical to SEQ ID NO: 312

SEQ ID NO: 1309 - DNA, 4296 bp, Homo sapiens; identical to SEQ ID NO: 287

SEQ ID NO: 1310 - DNA, 2116 bp, Homo sapiens
attaacgagtgacagtcttaatgactaacacacctctaacatttcacctctagctcagatgagagagagaatgggacttcttggtactgattgtttttcccatgcctcaattggtttcttttagggagctacaaatttacgtgttcactggtgattgatcttttcatccagcacaatggacagaagtctaaggaacgtccttgtggtttcctttgggttcctgcttctctttacagcctatggaggtctgcagagcctgcagagcagcctgtacagcgaggagggcctgggtgtcacagcgctcagcaccctctatggaggcatgctcctgtcctccatgttcctcccaccgctcctcatcgagaggctgggctgcaaggggaccatcatcctctccatgtgtggctacgtggccttctccgtgggcaacttcttcgccagctggtacactttgatccccacctccatactgctgggactcggggccgccccgctgtggtctgcacagtgcacatacctcacgatcacgggaaacacacatgcagagaaggcgggaaagcgtggcaaagacatggtgaaccagtattttggcatcttcttcctcatattccagtcatccggtgtgtggggcaacttgatctcatcgctggtatttggccagactcccagccaagagacccttccagaagagcagctcacgtcctgtggggccagtgactgcctgatggccaccacaaccaccaacagcacccagaggccctcccagcagctggtctacaccctcctgggcatctacactgggagtggtgtcctggctgtcctgatgatagctgcgttcctccaacccatacgagatgttcagcgggaaagtgaaggagagaagaaatcagtacctttctggtccactttactgtcgactttcaagctatatagagataaacgtctgtgcctcttaattctgctgccgctgtacagtggattgcagcaaggattcctctccagcgaatacacaaggtcctatgtcacctgcaccctgggcatccagttcgtcggctacgtgatgatctgcttctcggccactgacgcgctgtgctccgtgttgtatggaaaggtctcgcagtacacgggcagggctgtgctgtacgtgctgggcgcggtgacccacgtgtcctgcatgattgccctactgctgtggagacctcgtgctgaccatctggcagtgttcttcgtattctctggcctgtggggcgtggcagatgccgtctggcagacacaaaacaatgctctctacggcgttctgtttgagaagagcaaggaagctgccttcgccaattaccgcctgtgggaggccctgggcttcgtcattgccttcgggtacagcatgtttttgtgcgtgcacgtcaagctctacattctgctgggggtcctgagcctgaccatggtggcgtatgggcttgtggagtgcgtggagtccaagaacccgatcagaccccacgctccaggacaggtcaaccaggcagaggatgaagaaatacaaacaaaaatgtgagagcagtgaggtccgaggaggatgaactcagaaagcaccagccagagaattttcttagaagatgcctcaggacatagagcggctcctcatcaccatctcagcacaatttggccattctgaagagatcatgttatttcactcttcatgtattttttttctattctaacaaatttttcgtccaccatcttaacagagatcaagtgtatacatgaaggtatcagttcatttaattttagatgcaaaagaaaaaggtctaacgtacaatcagccaattagaatttgcctgaaatcatagactcaccctagttttattgctgtagttgtttttaagaattggaagcctgcttaaaaaatgtagttgagccccataattttacaaatgggcgaacttttaaacttctaactctacttggatcaaaacctcatacattttacaaaggggtcctgacaagtcagctgactcaacctcacagagtcagggggtgacaaagccagactggggctcaggattcctgaaacgtgtggggtctgcgtttctaaataaagacggttatttaatggacttac

SEQ ID NO: 1311 - DNA, 1940 bp, Homo sapiens
tcctgggctctggggcggcgctgggccgggcgagcgcagtgcagcgcagccgcggggagcgaggagcgcgcggagccggccatgggcaagtcagcagcttccaaacagtttcataatgaggtcctgaaggcccacaatgagtaccggcagaagcacggcgtccccccactgaagctctgcaagaacctcaaccgggaggctcaacagtattctgaggccctggccagcacgaggatcctcaagcacagcccggagtccagccgtggccagtgtggggagaaccttgcatgggcatcctatgatcagacaggaaaggaggtggctgatagatggtacagtgaaatcaagaactataacttccagcagcctggcttcacctcggggactggacacttcacggccatggtatggaagaacaccaagaagatgggcgtggggaaggcgtccgcaagtgacgggtcctcctttgtggtggccagatacttcccagcggggaatgttgtcaatgagggcttcttcgaagaaaacgtcctgccgccgaagaagtaacttgttaaatgtaatgggaaggtggcagacttaagaacgtggatatgaagtgcctagaaccaccacaacctggctgtgcgtctgtccctgtgggtgtatgtgcttgtgtgtgtgatgcatgtgagcgtctctggcacacacacttggacatacagttctgtgtgcgctcattcttattacaggagtgagcaaaggaagcatttaccccgatggttacctagaccacgattatttggattggggggaggggggatccgttttttttttttaattttttgttatttctaagcaaacctcttttgtacttttcttacttctaatatccatccctggactttttgtattccaaatgtttgtgatgctgagaagtgaagttcattttatgtgatcttcatgcgtcgtaatctacttttggtagataattaagattattaaaccctcatttaaatgtgacataaaatacagctttaagcacataaatacaaagcagcttccatcaggaacatggagcaggcagggactccattttacagaattactgagatttctcagttgtaaaacatgatgtcatcctgcatgcctcctggaattctccaatggggtcgccaaacaacaaatggagaaaaaaagttttacttccttgcattcttctacctttaaatagcaaagtaccactaccaccaccacctcttgcccccttccctcttttcttaaacttctggcatttcagagctcagcaggctacccctggtttctggagagttgggctaggcctgaagctccccctcccccacctctgctaggcagcccaggcctggtctgggagacagcccctcaccctgcctgggctcttggccaagcggccttggatggatgaagtcagagaggtggggtgagggtgagcttactcagggcccccagaggaagccctcagcctctgccctccccccacacagggcgggagcccaggcctgttcctggcagctgtggctgcagctgtgctcctgctccctcctggaatgtgcgacaagcccaaatgttccggggaggcggccggggcagggggcttagaagtgctaatatggttctgtgttttgcctgaaacgataccaggttcccctgaatagcaactttacaaggtccatgtgggagggaccaacccagatgccctgctgagtgtccctgaaaccatggcagctccatctgtcaagatggcaggggccggagtgagggggctgctggcttaacagcaggcatctgggcaggccagtcctcaaagcagctcctgaaggtctgtgttgcactgtcaccagtctcaagctatgcctctaatttcaccagggatattgactaagaagacaataaaatctttttctttgtgtaataacctc

SEQ ID NO: 1312 - DNA, 1303 bp, Homo sapiens
gtggcttttccctaacttgacccttctttcagtgggagggaactattgagaggaacaaagagcttataaatacattaggacctggaattcggttgtccagccacaaaggtgacagcatttaacaaagcttagagaaacctccaggagactgctaccatggcagagaagcccaagctccactactccaatatacggggcagaatggagtccatccggtggctcctggctgcagctggagtagagtttgaagagaaatttataaaatctgcagaagatttggacaagttaagaaatgatggatatttgatgttccagcaagtgccaatggttgagattgatgggatgaagctggtgcagaccagagccattctcaactacattgccagcaaatacaacctctatgggaaagacataaaggagaaagccctgattgatatgtatatagaaggtatagcagatttgggtgaaatgatccttcttctgccctttagtcaacctgaggaacaagatgccaagcttgccttgatccaagagaaaacaaaaaatcgctacttccctgcctttgaaaaagtcttaaagagccacggacaagactaccttgttggcaacaagctgagccgggctgacattcacctggtggaacttctctactacgtggaagagcttgactctagccttatttccagcttccctctgctgaaggccctgaaaaccagaatcagtaacctgcccacagtgaagaagtttctacagcctggcagcccaaggaagcctcccatggatgagaaatctttagaagaatcaaggaagattttcaggttttaataaaccagccatagaggtcaagaacatgcaagaccagtattctaaagttttgcaacaattaagtgctttacctaagtgttgattgtgcctgttgtgaagctaatgaactctttcaaattatatgctaattaaataatacaactcctattcacccacttagttaaaattgatttcttctcattaggatctgatgtgaattcagttttccaatctcctcctagccaacaattttcttggaattacaaattcagtaaaaatggaaactataaattatgtggtttgtttgacttttccaagaattgccctgtaacatacaatttgtcatacaatctattaaaatgccaatgtaaaaatgcacctctgacattttcaggtatgcacaggagaagagttaccatcctggataatggcataaagacattttcttcttttcctgaacagtcattttatttctgataaaagcattctttctaatgca

SEQ ID NO: 1313 - DNA, 2179 bp, Homo sapiens
cctcatgttagcgagtggccctcggctcgtctcgcagatcggccaagtacgcggaggccgcgcggtttcaccattaatactcctgaaggacaatagctcatcaagccccaccgaaagccccggacccgtcgcggagcctgggctggcgggggatgaggctgagcaactcctcctagaggtggttatgtggagaaggagcaatcccttctccctcctcctcctccccccgctactatccgcggcccagagaactgccgcttgccgccattgacacgcacagatagaacccaaagaaaggcaaagagtcctgcccggcaccggcgccgcgtgggccaaacctgcgcccgtggaggggcgcgcagagggcaccgggcgccgggagcaggcggcgcagcaccagcattgtgttagtgccgggaggccactgtgtcagcaagctgagagggaaactgaagcaagatgtcgggccggagtgggaagaagaaaatgtccaagctgtcccgttcagctagggcaggtgtcatctttccagtggggaggctgatgcgttatctgaagaaagggacgttcaagtaccggatcagcgtgggcgcccctgtctacatggcggcagtcattgagtacctggcagcggaaattctagaattggccggcaatgccgcgagggacaacaagaaggcccggatagccccgagacacatcttgctggcagttgccaatgacgaggagctcaaccagctgctaaaaggagtgaccatcgccagtggaggcgtcctgcccagaattcaccccgaactgctggccaaaaagcgagggaccaaaggcaagtcggaaacgatcctctccccacccccagagaaaagaggcaggaaggccacgtcaggcaagaagggggggaagaaatccaaggctgccaaaccacggacgtccaaaaagtccaaaccaaaggacagcgataaagaaggaacttcaaattccacctctgaagatgggccaggggatggattcaccattctgtcttctaagagccttgttctgggacagaagctgtccttaacccagagtgacatcagccatattggctccatgagagtggagggcattgtccacccaaccacagccgaaattgacctcaaagaagatataggtaaagccttggaaaaggctgggggaaaagagttcttggaaacggtaaaggagcttcgcaaatcccaaggccctttggaagtcgccgaagccgccgtcagccaatccagtggactcgcagccaaatttgtcatccactgtcacatccctcagtggggctccgacaaatgtgaagaacagcttgaagagaccatcaaaaactgcctgtcagcggcggaggacaagaagctaaagtccgtcgcgttcccgcctttccccagcggcagaaactgctttcccaaacagactgcggcccaggtgaccctcaaagccatctcagcccactttgatgactcgagcgcgtcctcgctgaagaacgtgtacttcctgctcttcgacagcgagagcatcggcatctacgtgcaggagatggccaagctcgacgccaagtagccgccgcactttccagcagggatcggaggacgacccgagtcccaagagtggggttttgctttttaaaaggagagaggaggggtgatggcaggggagtggagggtggccgggcaggtcctgccggcgcagggagccctctgcccttcacactctcctccaaaagagcctccatctgtaaggaagcaggtctccgcgaggggtttctttccatgtgttttcctcctgttgttttagaacttttttaaaaaaacagacctcgttttagatttatagcattgacttttacacacattcacacaagaaaaaaatcctttcaaaattcttaaatcttctgttcctcctttttccaagggaagagggcaaaaagtggcctgggctctgttggtgtgcgtgttccgtggcggagagaagaaaatgggaaagacatctcactggtgcttttctcttttgttttagtgccccccgcccccatccctataatatctgtaactactcctaaaaaggttttgattcaggcttttttttggtttcattttgtttttttaagaaaaagaaaatgaaaggaaaaaaataaaagatccagtgtctttcttacaacata

SEQ ID NO: 1314 - DNA, 1889 bp, Homo sapiens; identical to SEQ ID NO: 255

SEQ ID NO: 1315 - DNA, 2820 bp, Homo sapiens
gagacgctcgctgtttgtatccattgaggagctgcctcgcgcagggggtgtgcgaggctgagtccaagagatagcaaatcgagtcttaaataatccggggagaaagacgcccgggtagatttgaggtgcagccttggagggagggattagaagccgctagactttttttcctcccctctcagtagcacggagtccgaattaattggatttcattcactggggaggaacaaaaactatctgggcagcttcattgagagagattcattgacactaagagccagcggctgcagctgggtgcagagagaacctccggctttacttctgtctcgtctgccccaaccgctagcctcggcttgggtaaggcgaggcggaattaaaccccgctccgagagcggcagcttcgcgcgcggtgcgctcggcctatgcctgccccgaggggcgtctggtaggcaccccgccctctcccgcagctcgacccccatgatagatacgctcagacccgtgcccttcgcgtcggaaatggcgatcagcaagacggtggcgtggctcaacgagcagctggagctgggcaacgagcggctgctgctgatggactgccggccgcaggagctatacgagtcgtcgcacatcgagtcggccatcaacgtggccatcccgggcatcatgctgcggcgcctgcagaagggtaacctgccggtgcgcgcgctcttcacgcgcggcgaggaccgggaccgcttcacccggcgctgtggcaccgacacagtggtgctctacgacgagagcagcagcgactggaacgagaatacgggcggcgagtcggtgctcgggctgctgctcaagaagctcaaggacgagggctgccgggcgttctacctggaaggtggcttcagtaagttccaagccgagttctccctgcattgcgagaccaatctagacggctcgtgtagcagcagctcgccgccgttgccagtgctggggctcgggggcctgcggatcagctctgactcttcctcggacatcgagtctgaccttgaccgagaccccaatagtgcaacagactcggatggtagtccgctgtccaacagccagccttccttcccagtggagatcttgcccttcctctacttgggctgtgccaaagactccaccaacttggacgtgttggaggaattcggcatcaagtacatcttgaacgtcacccccaatttgccgaatctctttgagaacgcaggagagtttaaatacaagcaaatccccatctcggatcactggagccaaaacctgtcccagtttttccctgaggccatttctttcatagatgaagcccggggcaagaactgtggtgtcttggtacattgcttggctggcattagccgctcagtcactgtgactgtggcttaccttatgcagaagctcaatctgtcgatgaacgacgcctatgacattgtcaaaatgaaaaaatccaacatatcccctaacttcaacttcatgggtcagctgctggacttcgagaggacgctgggactcagcagcccatgtgacaacagggttccagcacagcagctgtattttaccaccccttccaaccagaatgtataccaggtggactctctgcaatctacgtgaaagaccccacacccctccttgctggaatgtgtctggcccttcagcagtttctcttggcagcatcagctgggctgctttctttgtgtgtggccccaggtgtcaaaatgacaccagctgtctgtactagacaaggttaccaagtgcggaattggttaatactaacagagagatttgctccattctctttggaataacaggacatgctgtatagatacaggcagtaggtttgctctgtacccatgtgtacagcctacccatgcagggactgggattcgaggacttccaggcgcatagggtagaaccaaatgatagggtaggagcatgtgttctttagggccttgtaaggctgtttccttttgcatctggaactgactatataattgtcttcaatgaagactaattcaattttgcatatagaggagccaaagagagatttcagctctgtatttgtggtatcagtttggaaaaaaaaatctgatactccatttgattattgtaaatatttgatcttgaatcacttgacagtgtttgtttgaattgtgtttgttttttcctttgatgggcttaaaagaaattatccaaagggagaaagagcagtatgccacttcttaaaacagaacaaaacaaaaaaagaaaattgtgctcttttctaatccaaagggtatatttgcagcatgcttgactttaccaattctgatgacatctttacggacactattatcactaagaccttgttatggcgaagtctttagtctttttcatgtattttcctcatgattttttctctttatgtagtttgactatgccttacctttgtaaatatttttgcttgtgttgtcgcaaaggggataatctgggaaagacaccaaatcatgggctcactttaaaaaaagaaagaataaaaaaaccttcagctgtgctaaacagtatattacctctgtataaaattcttcagggagtgtcacctcaaatgcaatactttgggttggtttctttcctttaaaaaaatttgtataaaactggaagtgtgtgtgtgtgagcatgggtacccatttgataagagaaatgcatttgattgtgaagaagggagagttaaattctccattatgttcgtggtgtaaagtttagagctggaatttattataagaatgtaaaaccttaaattattaataaataactattttggctattgaa

SEQ ID NO: 1316 - DNA, 3616 bp, Homo sapiens; identical to SEQ ID NO: 344

SEQ ID NO: 1317 - DNA, 2283 bp, Homo sapiens
cggccgcgagttgtgactggagccacgatgcacggccaggcgcggtgagaagccagcccgtagtgcctcccgaaggagcccgggcgcagggagggtcgccctgaggacacggaggccgccaggcaggccaagggccgaggtgactgggctggggcggtagggaaggagcgagtgcgcctggctgcctccgcacggagttgtccctctctgttttcgattgacacaaacacttctccaaaagcggggaaacctaagcaacaacagcaatcaacaccaagatcttcctcctaccctcccctctttcccttctcccgcggtcggccctcgccccctcccccaggcccagcgcgggcgctcggcgcgtccagacccgcggcgcgatgccggcagtttaggatccaaagcttctctgctccttttgttctttccttcccttttttaaaaaaagaggggggaaatcccagtggtgggcagcctggcacgcacacagtcgccctcataccccgacaaaagcagatgcactttgacttctgacagctctacctcaagccccggagaactcagcggcgctttcctcgcaacccgagctcggcgagtcgtcgtcttcttcttctccgtttttatttatttatttccgttcccgccgccgttctcgctgaccttcactcctccgcgggctctgagcagaagggtcgcattctctcccgcctgagacttcttttcctcgccccgggagctcaggcggcgccgctccagcccggggccccgggactccccggctgcacacttcactgagacgcccccccaggccccgatcagcctcgtttcctccaccctactttgatttcctggtgcgagttttggcttgcacggccgagtgtgtgtcctctttttggagagactggggagctcgtgccgattgtcttcaggagtcatcccctgggctctactttgcccctctctctctctgggcctcatcagaccaaaccaaagaccatggttcactgtgccggctgcaaaaggcccatcctggaccgctttctcttgaacgtgctggacagggcctggcacgtcaagtgcgtccagtgctgtgaatgtaaatgcaacctgaccgagaagtgcttctccagggaaggcaaactctactgcaagaacgacttcttccggtgtttcggtaccaaatgcgcaggctgcgctcagggcatctcccctagcgacctggtgcggagagcgcggagcaaagtgtttcacctgaactgcttcacctgcatgatgtgtaacaagcagctctccactggcgaggaactctacatcatcgacgagaataagttcgtctgcaaagaggattacctaagtaacagcagtgttgccaaagagaacagccttcactcggccaccacgggcagtgaccccagtttgtctccggattcccaagacccgtcgcaggacgacgccaaggactcggagagcgccaacgtgtcggacaaggaagcgggtagcaacgagaatgacgaccagaacctgggcgccaagcggcggggaccgcgcaccaccatcaaagccaagcagctggagacgctgaaggccgccttcgctgctacacccaagcccacccgccacatccgcgagcagctggcgcaggagaccggcctcaacatgcgcgtcattcaggtctggttccagaaccggcgctccaaggagcggaggatgaagcagctgagcgccctgggcgcccggcgccacgccttcttccgcagtccgcgccggatgcggccgctggtggaccgcctggagccgggcgagctcatccccaatggtcccttctccttctacggagattaccagagcgagtactacgggcccgggggcaactacgacttcttcccgcaaggccccccgtcctcgcaggcccagacaccagtggacctacccttcgtgccgtcatctgggccgtccgggacgcccctgggtggcctggagcacccgctgccgggccaccacccgtcgagcgaggcgcagcggtttaccgacatcctggcgcacccacccggggactcgcccagccccgagcccagcctgcccgggcctctgcactccatgtcggccgaggtcttcggacccagcccgcccttctcgtcgctgtcggtcaacggtggggcgagctacggaaaccacctgtcccacccccccgaaatgaacgaggcggccgtgtggtagcggggtctcgcacggtctgcggagttcgtggttgtacagaaatgaacctttatttaagaaaaatag

SEQ ID NO: 1318 - DNA, 3950 bp, Homo sapiens; identical to SEQ ID NO: 913

SEQ ID NO: 1319 - DNA, 7552 bp, Homo sapiens
accggccacagcctgcctactgtcacccgcctctcccgcgcgcagatacacgcccccgcctccgtgggcacaaaggcagcgctgctggggaactcgggggaacgcgcacgtgggaaccgccgcagctccacactccaggtacttcttccaaggacctaggtctctcgcccatcggaaagaaaataattctttcaagaagatcagggacaactgatttgaagtctactctgtgcttctaaatccccaattctgctgaaagtgagataccctagagccctagagccccagcagcacccagccaaacccacctccaccatgggggccatgactcagctgttggcaggtgtctttcttgctttccttgccctcgctaccgaaggtggggtcctcaagaaagtcatccggcacaagcgacagagtggggtgaacgccaccctgccagaagagaaccagccagtggtgtttaaccacgtttacaacatcaagctgccagtgggatcccagtgttcggtggatctggagtcagccagtggggagaaagacctggcaccgccttcagagcccagcgaaagctttcaggagcacacagtggatggggaaaaccagattgtcttcacacatcgcatcaacatcccccgccgggcctgtggctgtgccgcagcccctgatgttaaggagctgctgagcagactggaggagctggagaacctggtgtcttccctgagggagcaatgtactgcaggagcaggctgctgtctccagcctgccacaggccgcttggacaccaggcccttctgtagcggtcggggcaacttcagcactgaaggatgtggctgtgtctgcgaacctggctggaaaggccccaactgctctgagcccgaatgtccaggcaactgtcaccttcgaggccggtgcattgatgggcagtgcatctgtgacgacggcttcacgggcgaggactgcagccagctggcttgccccagcgactgcaatgaccagggcaagtgcgtaaatggagtctgcatctgtttcgaaggctacgccggggctgactgcagccgtgaaatctgcccagtgccctgcagtgaggagcacggcacatgtgtagatggcttgtgtgtgtgccacgatggctttgcaggcgatgactgcaacaagcctctgtgtctcaacaattgctacaaccgtggacgatgcgtggagaatgagtgcgtgtgtgatgagggtttcacgggcgaagactgcagtgagctcatctgccccaatgactgcttcgaccggggccgctgcatcaatggcacctgctactgcgaagaaggcttcacaggtgaagactgcgggaaacccacctgcccacatgcctgccacacccagggccggtgtgaggaggggcagtgtgtatgtgatgagggctttgccggtgtggactgcagcgagaagaggtgtcctgctgactgtcacaatcgtggccgctgtgtagacgggcggtgtgagtgtgatgatggtttcactggagctgactgtggggagctcaagtgtcccaatggctgcagtggccatggccgctgtgtcaatgggcagtgtgtgtgtgatgagggctatactggggaggactgcagccagctacggtgccccaatgactgtcacagtcggggccgctgtgtcgagggcaaatgtgtatgtgagcaaggcttcaagggctatgactgcagtgacatgagctgccctaatgactgtcaccagcacggccgctgtgtgaatggcatgtgtgtttgtgatgacggctacacaggggaagactgccgggatcgccaatgccccagggactgcagcaacaggggcctctgtgtggacggacagtgcgtctgtgaggacggcttcaccggccctgactgtgcagaactctcctgtccaaatgactgccatggccagggtcgctgtgtgaatgggcagtgcgtgtgccatgaaggatttatgggcaaagactgcaaggagcaaagatgtcccagtgactgtcatggccagggccgctgcgtggacggccagtgcatctgccacgagggcttcacaggcctggactgtggccagcactcctgccccagtgactgcaacaacttaggacaatgcgtctcgggccgctgcatctgcaacgagggctacagcggagaagactgctcagaggtgtctcctcccaaagacctcgttgtgacagaagtgacggaagagacggtcaacctggcctgggacaatgagatgcgggtcacagagtaccttgtcgtgtacacgcccacccacgagggtggtctggaaatgcagttccgtgtgcctggggaccagacgtccaccatcatccaggagctggagcctggtgtggagtactttatccgtgtatttgccatcctggagaacaagaagagcattcctgtcagcgccagggtggccacgtacttacctgcacctgaaggcctgaaattcaagtccatcaaggagacatctgtggaagtggagtgggatcctctagacattgcttttgaaacctgggagatcatcttccggaatatgaataaagaagatgagggagagatcaccaaaagcctgaggaggccagagacctcttaccggcaaactggtctagctcctgggcaagagtatgagatatctctgcacatagtgaaaaacaatacccggggccctggcctgaagagggtgaccaccacacgcttggatgcccccagccagatcgaggtgaaagatgtcacagacaccactgccttgatcacctggttcaagcccctggctgagatcgatggcattgagctgacctacggcatcaaagacgtgccaggagaccgtaccaccatcgatctcacagaggacgagaaccagtactccatcgggaacctgaagcctgacactgagtacgaggtgtccctcatctcccgcagaggtgacatgtcaagcaacccagccaaagagaccttcacaacaggcctcgatgctcccaggaatcttcgacgtgtttcccagacagataacagcatcaccctggaatggaggaatggcaaggcagctattgacagttacagaattaagtatgcccccatctctggaggggaccacgctgaggttgatgttccaaagagccaacaagccacaaccaaaaccacactcacaggtctgaggccgggaactgaatatgggattggagtttctgctgtgaaggaagacaaggagagcaatccagcgaccatcaacgcagccacagagttggacacgcccaaggaccttcaggtttctgaaactgcagagaccagcctgaccctgctctggaagacaccgttggccaaatttgaccgctaccgcctcaattacagtctccccacaggccagtgggtgggagtgcagcttccaagaaacaccacttcctatgtcctgagaggcctggaaccaggacaggagtacaatgtcctcctgacagccgagaaaggcagacacaagagcaagcccgcacgtgtgaaggcatccactgaacaagcccctgagctggaaaacctcaccgtgactgaggttggctgggatggcctcagactcaactggaccgcagctgaccaggcctatgagcactttatcattcaggtgcaggaggccaacaaggtggaggcagctcggaacctcaccgtgcctggcagccttcgggctgtggacataccgggcctcaaggctgctacgccttatacagtctccatctatggggtgatccagggctatagaacaccagtgctctctgctgaggcctccacaggggaaactcccaatttgggagaggtcgtggtggccgaggtgggctgggatgccctcaaactcaactggactgctccagaaggggcctatgagtactttttcattcaggtgcaggaggctgacacagtagaggcagcccagaacctcaccgtcccaggaggactgaggtccacagacctgcctgggctcaaagcagccactcattataccatcaccatccgcggggtcactcaggacttcagcacaacccctctctctgttgaagtcttgacagaggaggttccagatatgggaaacctcacagtgaccgaggttagctgggatgctctcagactgaactggaccacgccagatggaacctatgaccagtttactattcaggtccaggaggctgaccaggtggaagaggctcacaatctcacggttcctggcagcctgcgttccatggaaatcccaggcctcagggctggcactccttacacagtcaccctgcacggcgaggtcaggggccacagcactcgaccccttgctgtagaggtcgtcacagaggatctcccacagctgggagatttagccgtgtctgaggttggctgggatggcctcagactcaactggaccgcagctgacaatgcctatgagcactttgtcattcaggtgcaggaggtcaacaaagtggaggcagcccagaacctcacgttgcctggcagcctcagggctgtggacatcccgggcctcgaggctgccacgccttatagagtctccatctatggggtgatccggggctatagaacaccagtactctctgctgaggcctccacagccaaagaacctgaaattggaaacttaaatgtttctgacataactcccgagagcttcaatctctcctggatggctaccgatgggatcttcgagacctttaccattgaaattattgattccaataggttgctggagactgtggaatataatatctctggtgctgaacgaactgcccatatctcagggctaccccctagtactgattttattgtctacctctctggacttgctcccagcatccggaccaaaaccatcagtgccacagccacgacagaggccctgccccttctggaaaacctaaccatttccgacattaatccctacgggttcacagtttcctggatggcatcggagaatgcctttgacagctttctagtaacggtggtggattctgggaagctgctggacccccaggaattcacactttcaggaacccagaggaagctggagcttagaggcctcataactggcattggctatgaggttatggtctctggcttcacccaagggcatcaaaccaagcccttgagggctgagattgttacagaagccgaaccggaagttgacaaccttctggtttcagatgccaccccagacggtttccgtctgtcctggacagctgatgaaggggtcttcgacaattttgttctcaaaatcagagataccaaaaagcagtctgagccactggaaataaccctacttgcccccgaacgtaccagggacataacaggtctcagagaggctactgaatacgaaattgaactctatggaataagcaaaggaaggcgatcccagacagtcagtgctatagcaacaacagccatgggctccccaaaggaagtcattttctcagacatcactgaaaattcggctactgtcagctggagggcacccacagcccaagtggagagcttccggattacctatgtgcccattacaggaggtacaccctccatggtaactgtggacggaaccaagactcagaccaggctggtgaaactcatacctggcgtggagtaccttgtcagcatcatcgccatgaagggctttgaggaaagtgaacctgtctcagggtcattcaccacagctctggatggcccatctggcctggtgacagccaacatcactgactcagaagccttggccaggtggcagccagccattgccactgtggacagttatgtcatctcctacacaggcgagaaagtgccagaaattacacgcacggtgtccgggaacacagtggagtatgctctgaccgacctcgagcctgccacggaatacacactgagaatctttgcagagaaagggccccagaagagctcaaccatcactgccaagttcacaacagacctcgattctccaagagacttgactgctactgaggttcagtcggaaactgccctccttacctggcgacccccccgggcatcagtcaccggttacctgctggtctatgaatcagtggatggcacagtcaaggaagtcattgtgggtccagataccacctcctacagcctggcagacctgagcccatccacccactacacagccaagatccaggcactcaatgggcccctgaggagcaatatgatccagaccatcttcaccacaattggactcctgtaccccttccccaaggactgctcccaagcaatgctgaatggagacacgacctctggcctctacaccatttatctgaatggtgataaggctgaggcgctggaagtcttctgtgacatgacctctgatgggggtggatggattgtgttcctgagacgcaaaaacggacgcgagaacttctaccaaaactggaaggcatatgctgctggatttggggaccgcagagaagaattctggcttgggctggacaacctgaacaaaatcacagcccaggggcagtacgagctccgggtggacctgcgggaccatggggagacagcctttgctgtctatgacaagttcagcgtgggagatgccaagactcgctacaagctgaaggtggaggggtacagtgggacagcaggtgactccatggcctaccacaatggcagatccttctccacctttgacaaggacacagattcagccatcaccaactgtgctctgtcctacaaaggggctttctggtacaggaactgtcaccgtgtcaacctgatggggagatatggggacaataaccacagtcagggcgttaactggttccactggaagggccacgaacactcaatccagtttgctgagatgaagctgagaccaagcaacttcagaaatcttgaaggcaggcgcaaacgggcataaattccagggaccactgggtgagagaggaataaggcccagagcgaggaaaggattttaccaaagcatcaatacaaccagcccaaccatcggtccacacctgggcatttggtgagagtcaaagctgaccatggatccctggggccaacggcaacagcatgggcctcacctcctctgtgatttctttctttgcaccaaagacatcagtctccaacatgtttctgttttgttgtttgattcagcaaaaatctcccagtgacaacatcgcaatagttttttacttctcttaggtggctctgggaatgggagaggggtaggatgtacaggggtagtttgttttagaaccagccgtattttacatgaagctgtataattaattgtcattatttttgttagcaaagattaaatgtgtcattggaagccatccctttttttacatttcatacaacagaaaccagaaaagcaatactgtttccattttaaggatatgattaatattattaatataataatgatgatgatgatgatgaaaactaaggatttttcaagagatctttctttccaaaacatttctggacagtacctgattgtattttttttttaaataaaagcacaagtacttttgagtttgtta

SEQ ID NO: 1320 - DNA, 5103 bp, Homo sapiens; identical to SEQ ID NO: 266

SEQ ID NO: 1321 - DNA, 5793 bp, Homo sapiens; identical to SEQ ID NO: 289

SEQ ID NO: 1322 - DNA, 2889 bp, Homo sapiens; identical to SEQ ID NO: 246

SEQ ID NO: 1323 - DNA, 3276 bp, Homo sapiens
agaggactcccagcggctggagcagaagtgttagcggccagagctcccagacccctacccacagccaggcgggacgcgcacagtccctccacgcggaaagaagtaccttcgccggtcaccggctcctgcagggtgcaaatatatacagagcttcataatcagcccaagaccacatagagcaaacatgaatgatatttcccaaaaggctgagattctgctttcttcatctaaacctgtcccaaaaacctatgtaccaaaacttggcaagggtgatgtaaaggataagtttgaagccatgcagagagccagggaagaaagaaatcaaaggagatctagagacgaaaaacaaagaagaaaagaacaatatattagagagagagaatggaacaggagaaagcaggagattaaagaaatgcttgcttctgatgatgaggaagatgtatcttctaaagtagaaaaggcttatgttccaaaattaacagaggaactgtgaagggtagatttgctgaaatggagaaacaaagacaagaggaacaaaggaagagaacggaggaggaacgaaaacgcagaattgagcaggatatgttagaaaagaggaaaatacagcgtgaattagcaaaaagggctgaacagattgaggacataaacaatacgggaactgaatcagcatcagaggaaggagatgattcactacttataactgtggtacctgtcaaatcatataaaacatctggaaaaatgaaaaagaattttgaggatctagaaaaagaacgtgaagagaaagaaaggatcaagtacgaggaagataaaagaataagatatgaagaacaacgaccatctctcaaggaagcaaagtgtctttcattagttatggatgatgaaatagaaagtgaagcaaaaaaagaatcactttctcccggaaaattgaaactaacttttgaagaactggagcgacaaagacaagaaaaccgaaagaagcaagctgaagaggaagcaagaaaacgtttagaagaagagaagcgtgcttttgaagaagcaaggcggcaaatggtaaatgaagatgaggaaaaccaagacacagcaaaaatttttaaagggtaccgccctggtaaactcaaactcagttttgaagaaatggaaaggcaaagaagagaagatgaaaaaaggaaagcagaagaagaagccagaaggagaatagaggaagaaaagaaggcgtttgctgaagcaaggagaaatatggtagtagatgatgactccccagagatgtataagacaatctctcaagaatttcttacaccgggaaaactggaaattaattttgaagaattattaaaacaaaaaatggaagaagaaaaacgacgaacagaggaggaacggaagcataagctagaaatggagaaacaagaatttgaacaactgagacaggaaatgggagaggaagaggaagaaaatgaaacctttggattgagcagagaatatgaagaactgatcaaattaaaaaggagtggctctattcaagctaaaaacctaaaaagcaagtttgaaaaaattggacagttgtctgaaaaagaaatacagaaaaaaatagaagaagagcgagcaagaaggagagcaattgaccttgaaattaaagagcgagaagctgaaaattttcatgaggaagatgatgttgatgttaggcctgcaagaaaaagcgaggctccatttactcacaaagtgaatatgaaagctagatttgaacaaatggctaaggcaagagaagaagaagaacaaagaagaattgaagaacaaaagttactacgcatgcagtttgaacaaagggaaattgatgcagcactacaaaagaaaagagaagaggaggaggaggaagaaggtagcatcatgaatggctccactgctgaagatgaagagcaaaccagatcaggagctccatggttcaagaagcctcttaaaaacacatcagttgtagacagtgagccagtcagatttacggttaaagtaacaggagaacccaaaccagaaattacatggtggtttgaaggagaaatactgcaggatggagaagactatcaatatattgaaaggggagaaacttactgcctttacttaccagaaactttcccagaagatggaggagagtatatgtgtaaagcagtcaacaataaaggatctgcagctagtacctgtattcttaccattgaaagtaagaattaatcactctttttatcttttattctattaatttttttttccttaaaatcacttttcttcttctcttttttagctgatgactactagctcccctcccctctccctggaactttctctttcactccaactttcttactacatccatcttttctgtggcggggccaaaaaaggaaaccaggagtgccactatgctgacttcttattccttttcataacagtcttcaaagcacagctcatctaaagaatgcctacttcttttccaaataagcatcagatttatcgcctattatgcagtaacagtcaataaaatgtacttatgggggggaattactcaattattctatcagaacctattataaagactgtatttcccatagacgtttacagcaactatgtttaaaaaacaaaaacaaaaaaaaaacacacaaacctaagtagaatacattattttgcatgaaggaatgtcatttctgagctttttacacctaaaattaggctgaaatagctgagataattaatttggaacctatcaatttgagtggactttttctttagtagtacaccattttggttgttgtagtttcaaagtctttctgaagcagatatattgggattggagcggggtggggaaaactgtcactcctttcagaggaaaaggggaggagcatggagaaaaacaaaaattaaaggacttaaagaatggctatacagtgttgagtgttgaggatattaaacatgttatttttcaaacgtatgtaatatatattaaatttataaagcaaatttatgttgtgatcttgcctgaacaaattatattttaatgaaaaaactttctattaatagttcacgcaagagaaaacactttcaacatagtcgaaggcttcaagatctaagtgtatcagacttagggaaaaagtggcacaaccttcgatttaaaattctagtctttaaaatgagtttgtaaataattagctattacgttctattaagttgttttatattttaattttctggaagacaattttattttacaacgtgaacccaaataaagtaacttctgtattt

SEQ ID NO: 1324 - DNA, 263 bp, Homo sapiens
tcgcgcagccggcgctacgtgtgcgcccgggacgcggacgcaagccgccgacggaggaggccttttaactacggcctctccatcgaagaaaaaaatgaaaatgatgaaaactcattaagcagttcctctgacagtagtgaagacaaggatgaaaaaataagtgaagaatgtgatattgaagaaaagactgaagtgaaagaagaaccggagcttcaaacaaaaagggaaatggaagaaagaacagtaactctagaaatccctga

SEQ ID NO: 1325 - DNA, 2950 bp, Homo sapiens
gcttcctagttcggctggttcttctgtcgccggcttcagcagcccgcgcccgggcaggggcctggagcagtatctagcacaaagtagacactcagtaaatatttggaatagaagatgaacaaacccataacaccatcaacatatgtgcgctgcctcaatgttggactaattaggaagctgtcagattttattgatcctcaagaaggatggaagaagttagctgtagctattaaaaaaccatctggtgatgatagatacaatcagtttcacataagatgatgtagcaagaaggccctaaccagatgcagcctctcgatcttggacttcccagcctccagaaccgagatttgaagcattacttcaaactggaaaaagtcccacttctgaattactgtttgactggggcaccacaaattgcacagttggtgatcttgtggatcttttgatccaaaatgaattttttgctcctgcgagtcttttgctcccagatgctgttcccaaaactgctaatacactaccttctaaagaagctataacagttcagcaaaaacagatgcctttctgtgacaaagacaggacattgatgacacctgtgcagaatcttgaacaaagctatatgccacctgactcctcaagtccagaaaataaaagtttagaagttagtgatacacgttttcacagtttttcattttatgaattgaagaatgtcacaaataactttgatgaacgacccatttctgttggtggtaataaaatgggagagggaggatttggagttgtatataaaggctacgtaaataacacaactgtggcagtgaagaagcttgcagcagtaagatggttgacattactactgaagaactgaaacagcagtttgatcaagaaataaaagtaatggcaaagtgtcaacatgaaaacttagtagaactacttggtttctcaagtgatggagatgacctctgcttagtatatgtttacatgcctaatggttcattgctagacagactctcttgcttggatggtactccaccactttcttggcacatgagatgcaagattgctcagggtgcagctaatggcatcaattttctacatgaaaatcatcatattcatagagatattaaaagtgcaaatatcttactggatgaagcttttactgctaaaatatctgactttggccttgcacgggcttctgagaagtttgcccagacagtcatgactagcagaattgtgggaacaacagcttatatggcaccagaagctttgcgtggagaaataacacccaaatctgatatttacagctttggtgtggttttactagaaataataactggacttccagctgtggatgaacaccgtgaacctcagttattgctagatattaaagaagaaattgaagatgaagaaaagacaattgaagattatattgataaaaagatgaatgatgctgattccacttcagttgaagctatgtactctgttgctagtcaatgtctgcatgaaaagaaaaataagagaccagacattaagaaggttcaacagctgctgcaagagatgacagcttcttaaaactttattggaaaagactcttgactttttatatacacctatctcaaccatttttttaactgatttttttcctaaatattcttctttacctttaacaaggcataggctgttgcaggacagtggttattaaagcatgggttgaacttccaaaatataaaaatagagccaccatatcaacacttagccctacccattagtatcacccccagttcttacagtaatccctgagaaatctccttcaagcatcaccaaacacagtttgaaaattacagggttagcaaaaagagcctgggctgtatgtagggtggaaacactctgatctgaagcccagctgactccactactaatttgctgtaaagctttggacatacacttagctgctgtgagccactaataacattgggctaatatctgctgtgcttctctgacaggtagtcatgaaaatcaaatgatgcaaaatatatacaagcactttgtaaattgtaaaatgatacaaaatttaaagtttatagagccagttacaaaatcctattagtcatatatttatagattgtgttcacagcaatcatttaaccacaaataaaatatcccttgatgatactgccataatgatatgtccattattagattatgttacatgacaaagttgaaggaatttggcagatgcagttaaggttcctaaacaactcactttgagactgttgaaagggcctgacctaatcaagtgaacccttgcaagaagaattctccttgtaagccttgaagaagtatgtgagagggccacattggctaaaacctaaaggtggcctctaggagatgagacctaccttccagttgtcagcaagcaggaaaaaaaaattgggacctcagttgcaaccacaaggaactgaattctgccaaaaatctgagtcagcttagaagagtactccaagcttcagatgataaccacagcctgggctgacacctggatttcagctttgcatgatcctcagtatgagaatctatctgttctgtgctggacttctaatatatagaactgtgagataatgggtcacattggctggatgtggtggctcatacctgtaaatcccagcactttgggaggccgaggcaggcagatcacctgaggtcaagagttcaagaccggcctggccaacatggtgaaaccccgtctctactaaaaatacaaaaattagacgagcgtggtggtggacacctgtagtcccagctacttgggaggctgaggcaggagactagctggaaccagggaggtagaggttgcagtgagctgagatcgtgccactgcactccagcctgggtgacagagtgagactccatcataaataaataaataaataaatgggtcacattaagcctttaa

SEQ ID NO: 1326 - DNA, 1710 bp, Homo sapiens; identical to SEQ ID NO: 280

SEQ ID NO: 1327 - DNA, 11593 bp, Homo sapiens; identical to SEQ ID NO: 933

SEQ ID NO: 1328 - DNA, 477 bp, Homo sapiens; identical to SEQ ID NO: 942

SEQ ID NO: 1329 - DNA, 573 bp, Homo sapiens
atggaagaaaaccattcagtgtctcacaaaaagtccaaaaagaagtctaaaaaacataaggaaaaggaccaaataaaaaagcacgacattgagactattgaggaaaaggagaaagatcttaagagagaagaggaaattgccaagctaaataactccagtccaaattccagtggaggagctaaagaggattgcactgcctccatggaaccttcagcaattgaactcccagattatttgataaaatatattgctatcatctcctatgagcaacgccggaattataaagatgacgtcagtgcagagtatgatgagtacagagctttgcatgccaggatggagactgtagctagaagatttatcaaactagatgcacaaagaaagcgcctttctccaggctcaaaagagtatcagaatgttcatgaagaagtcttacaagaatatcggaagataaagcagtctagtcccaattaccatgaagaaaaatacagatgtgaatatcttcataacaagctggctcacatcaaaaggctactaggcgaatttgaccaacagcaggcagagtcatggccctag

SEQ ID NO: 1330 - DNA, 3717 bp, Homo sapiens
gcttccggccgcggccctggcgcgtggtctgcgcgcgcccggccgtgcgtgcggatgcggggaggctgcgtgtgtgcgcagggagagaacgccggccaccttcccgcttccgagctgggtgcgcgccgagcacaggagggtgcaatacctgccttgcgtcgcccgtgccgctccagccaccgtcaaatccgggtagcgacccggggcgtttgcagcggtgccgaggaagaggacgggaacggtgttacgagattgcctgcgtttaggaggtggctgcgttgtgggaaaagctatcaaggaagaaattgccaaaccatgtctttttttctgttttcagagtagttcacaacagatctgagtgttttaattaagcatggaatacagaaaacaacaaaaaacttaagctttaatttcatctggaattccacagagacaaggccactttatgtttcccaggctggactggaacccctgggctcaaatgatcctcctacctaagcctgcagagtagcgaggacttcagttttcttagctccctggacccggttgacctgttggctcttcccgctggctgctctatcacgtggtgctctccgactactcaccccgagtgtaaagtcttgctgctctgttgcccaggctggagtacagtggcaggatctcagctcactgcaatctccgtctctcaggtttaagcagttctcctgcctcagcctcccaagtaggtgggactacaggtagatagtcagatgtcttttgaaaatgtgttttcggtgtggaatattaacccaatctttgataactcttccagaaccttcggctcgcgtgcttctgagctgctgtggatggcctcggctctctggactgtccttccgagtaggatgtcactgagatccctcaaatggagcctcctgctgctgtcactcctgagtttctttgtgatgtggtacctcagccttccccactacaatgtgatagaacgcgtgaactggatgtacttctatgagtatgagccgatttacagacaagactttcacttcacacttcgagagcattcaaactgctctcatcaaaatccatttctggtcattctggtgacctcccacccttcagatgtgaaagccaggcaggccattagagttacttggggtgaaaaaaagtcttggtggggatatgaggttcttacatttttcttattaggccaagaggctgaaaaggaagacaaaatgttggcattgtccttagaggatgaacaccttctttatggtgacataatccgacaagattttttagacacatataataacctgaccttgaaaaccattatggcattcaggtgggtaactgagttttgccccaatgccaagtacgtaatgaagacagacactgatgttttcatcaatactggcaatttagtgaagtatcttttaaacctaaaccactcagagaagtttttcacaggttatcctctaattgataattattcctatagaggattttaccaaaaaacccatatttcttaccaggagtatcctttcaaggtgttccctccatactgcagtgggttgggttatataatgtccagagatttggtgccaaggatctatgaaatgatgggtcacgtaaaacccatcaagtttgaagatgtttatgtcgggatctgtttgaatttattaaaagtgaacattcatattccagaagacacaaatcttttctttctatatagaatccatttggatgtctgtcaactgagacgtgtgattgcagcccatggcttttcttccaaggagatcatcactttttggcaggtcatgctaaggaacaccacatgccattattaacttcacattctacaaaaagcctagaaggacaggatactttgtggaaagtgttaaataaagtaggtactgtggaaaattcatggggaggtcagtgtgctggcttacactgaactgaaactcatgaaaaacccagactggagactggagggttacacttgtgatttattagtcaggcccttcaaagatgatatgtggaggaattaaatataaaggaattggaggtttttgctaaagaaattaataggaccaaacaatttggacatgtcattctgtagactagaatttcttaaaagggtgttactgagttataagctcactaggctgtaaaaacaaaacaatgtagagttttatttattgaacaatgtagtcacttgaaggttttgtgtatatcttatgtggattaccaatttaaaaatatatgtagttctgtgtcaaaaaacttcttcactgaagttatactgaacaaaattttacctgtttttggtcatttataaagtacttcaagatgttgcagtatttcacagttattattatttaaaattacttcaactttgtgtttttaaatgttttgacgatttcaatacaagataaaaaggatagtgaatcattctttacatgcaaacattttccagttacttaactgatcagtttattattgatacatcactccattaatgtaaagtcataggtcattattgcatatcagtaatctcttggactttgttaaatattttactgtggtaatatagagaagaattaaagcaagaaaatctgaagtattgtcttgtttttaaaaaatacagttcctagtgtttttagaagtcacttaatttgtctcatttttccacctggaaattaggaataatgtagaatgcaaggcagtaatttccttttggaaaggactctgaaggcagaaaagaagggagagaacctcatgggcagaatattataaaaagagtgtcatattccagcatttgaattggaaagagaagagtgaagatccaagttgcattattaatctgccctgtgttttttccttttaacaatcagtttgagctgctgctgttatgagtttctcatcaagatgaaagccctaatatgtaaagtcaaatccgatttaaattttgtgcttttatagaaagaaatttcttcatagacgtggtgatatatcatttgttggacctgctaatagtaggtcaaaggggagcactccttgccccctgttcctgggtttatgcagttttctttttagagtttatatagggcaagtggttctttttctctgaattacaggatggaaaaaggtcatatcctttgtcaggaaatataaacttgaaagtatgtagtcagctcttgtaatactcatatttatgattgtcctatatgaaaaacaacttcagttaaaactataatgtgtgattctgtataacaaggtgatgtctgtttcccagggctcagacctaatccagttataataaaatcaattaaatgaaatattctatagaatcgatctatgcccttgttaatctccatccatataggagtcacgttctttaagacagatggtggtagttatttttgtggcatggttagatttgactggttttgcagaagattacagttatgtactgcataatgacatatacaatagtggtcccataaaattataatggagcagaaaatctattgcctcatgatgttttagccgttttaatgtcatagcctagtgcattactcacgtgtctgtggagatgctggtgtaaacaaacctactacactgccagttgtataaaagtacagcacattcagttatgtacagtatgtaatactgataatgacaataaatgacaccggtttgtgtatttactttttataa

SEQ ID NO: 1331 - DNA, 1585 bp, Homo sapiens; identical to SEQ ID NO: 268

SEQ ID NO: 1332 - DNA, 3770 bp, Homo sapiens
cgtttcctcccctcccctccactcggccgtccctccttcctcctccctcctccctcctcctcccgctcctgaagagcgcgccgcgtgggggacggcccggttacttcctccagagactgacgagtgcggtgtcgctccagctcagagctcccggagccgcccggccagcgtccggcctccctgatcgtctctggccggcgccctcgccctcgcccggcgcgcaccgagcagccgcgggcgccgagcagccaccgtcccgaccaagcgccggccctgcccgcagcggcaggatgaatgatttcggaatcaagaatatggaccaggtagcccctgtggctaacagttacagagggacactcaagcgccagccagcctttgacacctttgatgggtccctgtttgctgtttttccttctctaaatgaagagcaaacactgcaagaagtgccaacaggcttggattccatttctcatgactccgccaactgtgaattgcctttgttaaccccgtgcagcaaggctgtgatgagtcaagccttaaaagctaccttcagtggcttcaaaaaggaacagcggcgcctgggcattccaaagaacccctggctgtggagtgagcaacaggtatgccagtggcttctctgggccaccaatgagttcagtctggtgaacgtgaatctgcagaggttcggcatgaatggccagatgctgtgtaaccttggcaaggaacgctttctggagctggcacctgactttgtgggtgacattctctgggaacatctggagcaaatgatcaaagaaaaccaagaaaagacagaagatcaatatgaagaaaattcacacctcacctccgttcctcattggattaacagcaatacattaggttttggcacagagcaggcgccctatggaatgcagacacagaattaccccaaaggcggcctcctggacagcatgtgtccggcctccacacccagcgtactcagctctgagcaggagtttcagatgttccccaagtctcggctcagctccgtcagcgtcacctactgctctgtcagtcaggacttcccaggcagcaacttgaatttgctcaccaacaattctgggactcccaaagaccacgactcccctgagaacggtgcggacagcttcgagagctcagactccctcctccagtcctggaacagccagtcgtccttgctggatgtgcaacgggttccttccttcgagagcttcgaagatgactgcagccagtctctctgcctcaataagccaaccatgtctttcaaggattacatccaagagaggagtgacccagtggagcaaggcaaaccagttatacctgcagctgtgctggccggcttcacaggtgtgaagtggacctattcagctgtggcagtttctcctggagctgctatcagacaaatcctgccagtcattcatcagctggactggagacggatgggagtttaagctcgccgaccccgatgaggtggcccgccggtggggaaagaggaaaaataagcccaagatgaactacgagaagctgagccggggcttacgctactattacgacaagaacatcatccacaagacgtcggggaagcgctacgtgtaccgcttcgtgtgcgacctccagaacttgctggggttcacgcccgaggaactgcacgccatcctgggcgtccagcccgacacggaggactgaggtcgccgggaccaccctgagccggccccaggctcgtggactgagtgggaagcccatcctgaccagctgctccgaggacccaggaaaggcaggattgaaaatgtccaggaaagtggccaagaagcagtggccttattgcatcccaaaccacgcctcttgaccaggctgcctcccttgtggcagcaacggcacagctaattctactcacagtgcttttaagtgaaaatggtcgagaaagaggcaccaggaagccgtcctggcgcctggcagtccgtgggacgggatggttctggctgtttgagattctcaaaggagcgagcatgtcgtggacacacacagactatttttagattttcttttgccttttgcaaccaggaacagcaaatgcaaaaactctttgagagggtaggagggtgggaaggaaacaaccatgtcatttcagaagttagtttgtatatattattataatcttataattgttctcagaatcccttaacagttgtatttaacagaaattgtatattgtaatttaaaataattatataactgtatttgaaataagaattcagacatctgaggttttatttcatttttcaatagcacatatggaattttgcaaagatttaatctgccaagggccgactaagagaagttgtaaagtatgtattatttacatttaatagacttacagggataaggcctgtggggggtaatccctgctttttgtgtttttttgtttgtttgtttgtttgtttttggggggttttcttgccttggttgtctggcaaggactttgtacatttgggagtttttatgagaaacttaaatgttattatctgggcttatatctggcctctgctttctcctttaattgtaaagtaaaagctataaagcagtatttttcttgacaaatggcatatgttttccacttctttgcatgcgtttaagtcagtttatacacaaaatggattttattttttagtttaactgtgtttctccgacagctcacctctctctgaccacccagccatttccttcctgtgctccacgttcttctgtgtgattaaaataagaatattatttttggaaatatgcaactccttttcagagatcaggagggatttatgtagcagctatttttactgcaaaagtaattcactggaaaaaaaatgtaatttgtaagaaagctttatttttatctcagctctatgtaaagttaaagttactgtacagagctgaaggacggggggcggtaggggtcttgatgaaacctcttgaacgaagcacagtttgtcccatctttgttcactcgtgtgtctcaaccatcttaatagcatgctgctcctttttgctcagtgtccacagcaagatgacgtgattcttattttcttggacacagactattctgaggcacagagcggggacttaagatgggaaagagaaagcatcggagccattcattcggagaaaacgttttgatcaaaatggagacttttgtagtcgtttcaaaagagcacctgagtcatgtgtattcccggcctttataaatgacccggtcaagttggtttcaaagtccgacaggcttgtctgtttactagctgcgtggccttggacgggtggctgacatctgtaaagaatcctcctgtgatgaaactgaggaatcgggtggccgggcaagctgggaagagcaaagccagagctgcgctgcctcaatacccacaaaagaccattcccagtatacataagcacaggatgtttttctcaagagggatgtatttatcacttggacatctgtttataatataaacagacatgtgactgggaacatcttgctgccaaaagaatcctaggcagtggctcattgtatgtgaggttgaaccacgtgaaattgccaatattaggctggcttttatctacaaagaaggagtttcatggggttcagcctaacagttatggaaactacagtccttataaaccattggcatggtaataaacagatcttaagtataaaaattttgtaattgggcctttactctctcaataataaagtattttgtttatataaa

SEQ ID NO: 1333 - DNA, 4247 bp, Homo sapiens; identical to SEQ ID NO: 253

SEQ ID NO: 1334 - DNA, 2022 bp, Homo sapiens; identical to SEQ ID NO: 355

SEQ ID NO: 1335 - DNA, 5659 bp, Homo sapiens; identical to SEQ ID NO: 904

SEQ ID NO: 1336 - DNA, 3807 bp, Homo sapiens; identical to SEQ ID NO: 377

SEQ ID NO: 1337 - DNA, 4062 bp, Homo sapiens
cggttctttccggaaattatgactgcagctgttttcactccgctgtgactcagagcgctccgggctgcaggagaggaagcccagcctgttctaccagagaacttgcccaggtcagaggtctgcgtagaagcccttttctgagcatcctctcctctcctcacacctgccactgtcctctgcgttgctgtcgaattaaatcttgcatcaccatggtgcacttctgtggcctactcaccctccaccgggagccagtgccgctgaagagtatctctgtgagcgtgaacatttacgagtttgtggctggtgtgtctgcaactttgaactacgagaatgaggagaaagttcctttggaggccttctttgtgttccccatggatgaagactctgctgtttacagctttgaggccttggtggatgggaagaaaattgtagcagaattacaagacaagatgaaggcccgcaccaactatgagaaagccatctcccagggccaccaggccttcttattggagggggacagcagctccagggatgtcttctcttgcaatgtgggtaacctccaacctgggtcgaaggcggcagtcaccctgaagtatgtgcaggagctgcctctggaagcagatggggctctgcgctttgtgctcccagctgtcctgaatcctagataccagttctctgggtcgtctaaggacagttgccttaatgtgaagactcctatagtccctgtggaggacctgccctacacactcagcatggtcgccaccatagattcccagcatggcattgagaaggtccaatccaactgccccttgagtcctaccgagtacctaggagaggacaagacttctgctcaggtttccctggctgctggacacaagtttgatcgggacgtggaactcctgatttactacaatgaggtgcatacccccagcgtggttttggagatggggatgcctaacatgaagccaggtcatttgatgggagatccatctgcaatggtgagtttctatccaaatatcccagaagatcaaccatcaaatacctgtggagagtttatctttctcatggaccgctcgggaagtatgcagagccccatgagtagccaggatacatctcagctgcgaatacaggcagccaaggaaacactgattttgctgctgaagagtttacctataggctgttatttcaacatctatggatttggctcttcctatgaggcatgctttccggagagtgtgaagtacactcagcaaacaatggaggaggctctggggagagtgaagcttatgcaggccgacctagggggcactgaaatcttggcaccactccagaacatttacaggggaccctccatcccaggccaccccctacagctttttgtctttacagatggagaagttacagacacgtttagtgtaattaaagaagttaggatcaacagacagaaacacaggtaggaagaaaatgtgatttccgggtgattggtgctgagtagtgacacacagactctagtgctacatgatgccggtgttgaccttccttcaagaggaccaaatgatttcagaatttagttttagcagctgaaaatttatttctccctgtaaacgttaaaaacagttttccaaataacatcaacaacacagcaaaaccattgtttcttattctttctaaactacaacgaacacaagaattgaatagtaagatgttaattttttttactataaacatttttagagaagtaaaacatgctgaaaactacacaaattataagcatacaactggactcattatcacagtgaatgcactgtgtgatcgccacataggtaaaaactggaatggtcgtaggcctctccatctgtacccttttccatcatgtcctattccctgtcactacacactaaaactttcctgacttacaataccatgggttatttatgcttgtttttgaatgaaaataaataagttatacagtatgcttgtgtttctcatttggtattggagaaggcacctccaccagcctaataaaaggtattgcccgggcatcagggggcacctcagaatttatcacaggcaaagacaggatgcagtccaaggctctcaggactctgaaacgctctctgcagcctgtggtagaggatgtctctctgagctggcatttgcctcctggtctgtctgctaaaatgctttccccagaacagactgtcatctttaggggtcagagattaatcagctatgcccagctgaccgggaggatgccagcagcagagacaacaggagaagtatgcctcaaatatacactccagggcaagacttttgaggataaggtgacatttcctctacaacccaagcctgatgtcaacctcaccattcaccgccttgctgccaagtccttgctccagaccaaggacatgggcctcagggagactccagcaagtgataaaaaagatgcattgaaccttagccttgagtctggtgtcataagctccttcacagctttcattgctatcaataaggagctcaacaagccggttcaggggcctctggctcatagggacgtcccaaggccaattctgttgggtgcttctgccccattgaagataaaatgccaatcaggttttcgaaaggccttacactctgaccgtcctccttctgcatctcagcccagaggggaacttatgtgttataaggccaagacattccagatggacgattacagtctctgtgggttgataagtcacaaggaccagcacagtccaggctttggagagaatcaccttgtgcagctgatttaccaccaaaatgcaaatggttcctgggatctgaatgaagatctagccaagatcctaggtatgagtttggaagaaataatggctgcacagcctgccgagcttgtggattcctcaggctgggccaccatcctggccgtgatctggctgcacagcaatggtaaggacttgaagtgtgaatgggagcttctggaaaggaaggccgtggcctggatgcgtgcccatgcaggctccaccatgccttcggttgtgaaagctgctattactttcctgaagtcatctgtggatcctgctatctttgccttttgaagataccatccagaaaaagaagtgcctttaatttgctactgtcatttcctctagtatcacttttgctgtgatgatgtgttcttgtgtattataactctttattttttgccataaaagtaaaggatgcttactccacttcgcttctctgctccaggttcactttggatatgatctttcttttcccaacatatgccctcagaaaagtgacagtggtcccagaacctattccctttcttgagggagttcaaaacattcataggcagtaatgttcctcccagggtttccagggaaacaacatgaaaaacaggtgacatgaactacagactaaagattgcagcatttatgttagagaatgcttgaattagagaattttctgcattatctttgtctgttcactttctatcttatatacttatcagggccatactggtaagcttgcgtaggaggagttagagggaagttgaaagccaacatctggatcaatgtaatgtcaagatcacaaagacagagactgcaggggtccactgtgagaggtgacactgttggggaccttcctgattcattcttcttgggctttgctagcctgtacaacctacatgtcttttcttccactgcctgaaagacttgggttgaactataactgttggagagagatgttcctctttaatcatgaaacaccttaagaagtctataatgcaatccttagtcctaccctgaacctatgtgtcctctaagtcaggccctgatctagtgcagtaaagggaagggtgggcttaatgggagctttgcctgggacctgaacctggagcacttaccgcattaggaagaaaggagctccccgtaatcgttcctgacccttgtgtctcatataccctatcctggtggaaatgaccctatttgatatgctgtcccttaaaataacttgtatcaatattaaaatgactatttctaccctttgatgagtaaa

SEQ ID NO: 1338 - DNA, 6936 bp, Homo sapiens; identical to SEQ ID NO: 341

SEQ ID NO: 1339 - DNA, 545 bp, Homo sapiens
atgatgaagttcaagcccaaccagacgcggacctacgaccgcgagggcttcaagaagcgggcggcgtgcctgtgcttccggagcgagcaggaggacgaggtgctgctggtgagtagcagccggtacccagaccagtggattgtcccaggaggaggaatggaacccgaggaggaacctggcggtgctgccgtgagggaagtttatgaggaggctggagtcaaaggaaaactaggcagacttctgggcatatttgagcagaaccaagaccgaaagcacagaacatatgtttatgttctaacagtcactgaaatattagaagattgggaagattctgttaatattggaaggaagagagagtggttcaaagtagaagatgctatcaaagttctccagtgtcataaacctgtacatgcagagtatctggaaaagctaaagctgggttgttccccagccaatggaaattctacagtcccttcccttcggataataatgccttgtttgtaaccgctgcacagacctctgggttgccatctagtgtaagatag

SEQ ID NO: 1340 - DNA, 5190 bp, Homo sapiens
agtataaacaaggaacccgactggttagacagattttgtttttcttcttcccgcgcgctttagctccctgtcctttggtcgcatttgtgggcgcgcggcacgcagccgggaggccgaggactcggagttcacctgcaggaaagtatgcctcagactcctcccttttcagcaatgtttgacagcagtggttacaatcgaaacctctatcagtctgcagaggacagctgtggagggttgtattaccatgacaacaacctcctctctggatccctggaagcactcatccagcacttagtacctaatgtggattactatccagatagaacatacatatttaccttcctactcagttctcggttatttatgcatccgtatgagctaatggccaaagtttgccacttatgtgttgagcaccagagactaagtgatcctgatagtgataagaaccagatgagaaaaattgcacccaaaatccttcaactcctcacggaatggacggaaacatttccctatgattttcgggatgaaagaatgatgagaaacttaaaagatctggctcaccgaatagccagtggcgaagaggttggtaacctgaatttagcgcggctgctggaattcccaggcagagcctgggtgggaaatggtgccgaattatgcatcctaatctccactgcttcctctctgttttgcctttgggcaagccctccacatcacatattggtctatttagtatgtcaagtgagaatgattataccatcccacttcaaagggatatgatctagagttttatgtgattaatttggggctatgttcatgtcaactcatgcacaggatttatgttgcaagtatgttttaattttactttacttttaccttttttcctcccaaaaaggtttgacacagctagttagatgataaatggcatgttagtagacataaacactagtggatacaaagtaaataacattattctattaaccgaggataaatagtagattaataaatcataaatagaaatagacattctgggccatggcagaaagaaaataaatacgctcctgttgagaatgagtagaggaggacaggactgctgtggtatgagtttaagttccaggtaaaagggaaatacagctggtcatgtaatattcactgtcagaaaaggggaagtatagtaattattgagggacttaaatgaaaaatttagaaactttcttctgaagaactttgtatagggtcatagaatgagatcctacaaactgctctttatggtgtttacaacataccttcctggatagaagctgagttcatagattcatgtgtaaattagcaaagataattcttgggggaggagaagactgagaaaatgaggcaagtcttccagtgctcagaagttgatttaaggatagactctagtataggtagagattaaaagtaagtctcttagataggctttcataaatatcacttccctcagttgagcctttgataagcactaactactagctgtgacaaattcaaggttatcctttttgaagcaggaccagagggctggtattctgtgttgagacttgctgggcaaggatgcccttgtagtttccatgttgcaggtcaacttctgggaacaagtcattcaggcacagatacactttcacctggaaaaagtagatgaagcatttggcaatgatgttgcattttattcgtcttaaaatgcattttccattatgaataaccttccttgagaactctttcagtggtgtgctgcaacgtataacttgataccctatcctttttttctgagacagagccttgctctgttcctcaggctagagtgtagagttgcgatcatggctcactgcatccttgacttctctggcttaatcaatcctcccacctcagcttccctagtagctgggactacaggtgcatgcaactgtgcctggctcgttttttctattttttgtagagacaaagcctcactatgttgcccaggctggtctccaacttttgggctcaagcaatccactttgggaggctgaagcaggcagatcacctgaagtcgggagttcaagaccagcctgaccaccatggagaaaccccatttctaccaaagatacacaattagccaggtgtggtggtgcatgcctataatcccagctacttgggaggctgaggcaggagaattgcttgaacccgggaggcagaaattgtggtgagccaagatcgtgccattgcactccagcctgggcaacaagagtgaaactccgcctcaagaaaaaagaattgcaaaataaaaatctttcagcagatatgctggtaaagcattgcttctcacacttggcttatacaaggatcagctgaggagcatccagagcatgtgacacaagtgcactgcagaccaagtcgatcagaatctctggggtggaacccaggctgcccccattcagcggttctgctcattgcttcccagcaggtacccttgtgtggtaccctgaatagaagtggtaatttcttactaaagtattttctgcagggatcccgggaaggggtgaggagaaggtgcatgatgtaggaatgataacatgcatggaatagcagctgaggcatagaataataaatatttttaaatgagttgttggcttttttaagtgaaaagaactttcttgtgcatgtctcatgcctgtgttatccaaaaaatcccattctgtgggaaaattttaaaacattttatttttaatatatcaagtaatataggaatatattcacttagattttgtttaaaaagaattcatacaaagcaaaagaggccaaaaaactccattcaatccagcttctctcttaaaggtaacaagtgttgtcaattttgtgtgtatccttccggcgctgctcctatgtatacaggtgttcacagaaagtagtgtgtatggcttttgtttccatgtatgtttacctagtattcatcaccctgcttgttttctctgtgttatgtcttggaaacccttccatgtcaatgtaggtagctgtatcttctttcagctgctatacagtagtccagtatgtgattgggccatgtttctttttctttttaaaaactattctattggacacaaacaagttaaatttgtttatactgaaaactcaggcgttttctgagaaagacttagcaaagaagattaagtcccttcttcatatcaaactctgtttagtaaagtagtaacatatagttgtgggttgctcttgtaaacaggctttactgactgtgaaacttcaactttgtaacatgtattttctactctgcacttgatcttagccaaaagggtgagaagcgattctaccctggatagtatatgctgtaattaagtatctccaagaaggtgtttattagccattctgagtaatacactgggaaatatttgcataattattagaagtagtatctaactctcatgtagtcatttgttatgacattttggacaaaggactgaataaaacattttaagttggtacagacatacagaaagaatgtccagcaaatgatgcagtgtctgatccgcaagcttgctgcgctcagccagtacgaagaagtcctggcaaaaatcagctccacatccacagatcggctcacagttctcaagaccaagccacagtctatacaaagggatatcattactgtctgcaacgacccttacacgttggcccagcagctgactcatatagagctggagaggctcaattatattgggccagaagaatttgttcaggcgttcgtgcagaaggaccctttggataatgacaagagttgctacagtgaacggaagaaaacacgaaacttagaagcttacgtggaatggtttaatcgcctcagctacttggttgctacagaaatctgtatgcctgttaagaaaaaacaccgagcaagaatgattgagtatttcattgacgtagctcgggagtgttttaacattggcaacttcaactccttgatggcgataatctctggtatgaatatgagcccagtctctcgactaaaaaaaacttgggccaaagtgaagactgcaaaatttgacattcttgagcatcagatggacccttcaagcaatttctataattatcgaacagctcttcgtggggcagcacaaaggtctttaactgctcatagtagtagagaaaagattgtgataccattcttcagtctcttaatcaaagatatttatttcctcaatgagggttgtgccaaccgccttcccaatggccatgtcaattttgagaaattttgggaactggccaaacaagtgagtgaatttatgacatggaaacaagtggagtgtccatttgagagggaccggaagatcttgcagtatctgctcacagtaccagtcttcagtgaagatgctctctacttggcttcttatgagagtgaaggacctgaaaatcatatagagaaagacagatggaagtctttaaggtcgagcctcttaggcagagtttaacacatgggagctgcctgcctgctgctgctgctgcttcctgcagatcatggaggggctggcctttgttttctggcatctcgtaccacgaacactcatgaagaccctgcagtcattggagcacccgggtcagcaaagcacacaagctcactcaagaccagatggagaacttatttcctgcagctgacagatagactcagattttgtgagactgaaatgttcactgaagacacttgagaaagaatcctctaaaaatcccggctctgcacattattcatctcctggaatttccatgtgaatcacagctctgcacctggatggagttttcttttgtgtgtgtgtgttttttttaatttggttgaacatttgctgctaatgggacttgcccagctgagtgctggctctgaggaagcccacgtttcttttgttaacttaaatgaagaaaggagtggagggaggggatctaaaacccccccgtttagatcccaaaccttagctcaatcagtattgccagagaggggtaagactggttggaagctgactgcagactttgtttccccttagtatgtgctgtgttgtaaatttttctcctccctcctcctacaaggttttgagttggctgctggttagcaaactcctttttacccatataagttatttaatataataatgaagctcaacactgtggtaggaaaatagccactag

SEQ ID NO: 1341 - DNA, 3037 bp, Homo sapiens
aaggctcctcagccgagcgccgagcggtcgatcgccgtagctcccgcagcctgcgatctccagtctgtggctcctaccagccattgtaggccaataatccgttatggagcatgcctttaccccgttggagcccctgctttccactgggaatttgaagtactgccttgtaattcttaatcagcctttggacaactattttcgtcatctttggaacaaagggcagttaactgccaccaagtggtggttgtatgccatagctctgtaacatgaacagtgtttccaataaactgtccaccgcaaaacccgttaaaaaatgagtgagctccatgagctgaggagctagcagattgccgggattacaaagacaacgagacaggaccctttccttagcaggatttacaatctctcttttaagagcctgtgccgatggaggtgccaaccgcttatatgatatcaccgaaggagagagagaaagattcctctgacagtatcctccaagacctgacatggacaatgtgtgaaaaagcgctcaacctccaacttgaaactctcctcgaggcccccagccaccagtcatctcatcaggacaccgaaagacacccattactgtggagcttccaagggtcttggcaactcttttatcggaaacgagagctttttgcctgaattcatcaatggagactttgattctattaggcctgaagtcagagaatactatgctactaagggatgtgagctcatttcaactcctgatcaagaccacactgactttactaagtgccttaaaatgctccaaaagaagatagaagaaaaagacttaaagaagaaacagtgaaaggaatactgttcaattccaacatcagctgtgtaaccgaggcatcgtaatacttttatgacaagtttcactacctttttgcctgtgccagtgtacctcaaagggatatggttgatgtgatcgtgacactgggaggccttgctgggcgttttgaccagattatggcatctgtgaataccttgttccaagcgactcacatcactccttttccaattataataatccaagaggaatcgctgatctacctgctccaaccaggaaagcacaggttgcatgtagacactggaatggagggtgattggtgtggccttattcctgttggacagccttgtatgcaggttacaaccacaggcctcaagtggaacctcagaacttgtgactacactaggaccacctggatagccaaggataatcccgtcccaagactaatcagattaatcagacttaatcacatctgtaaagttcctcttgccatgtaacaaatgatgtgcttgcttttggaacattggtcagtacttccaatacctacgacgggtctggtgttgtgactgtggaaactgaccacccactcctctggaccatggccatcaaaagctaacctgttgactggcatccataagtgtgcctctgccttatctcatttctcaacagttcattgctcaacaagaacgattcacctgggtttgcaagaatctaaacctctctaggggaagcccactgggtttaaagatgttagtgtttagataatacaggtaacattataaatgacagatctcaattttatagtagtgggaaagatacatgctaagaaagcaaataagctctattatattcggttggaacctaatgggaatcattccactatacaattcagtactgattattcttcttacattattaatcattccatttatcctagaaaattgtttttaatttgaatcagagaaaactgttgaggttcctcttggagtctagaacatccttaaatgtctaacaacaagggctacctctgagtaccttttagtattagttttctgtatatgatatatattatcttatactgaaaaaaaattcctttcagattggggtgttagaagtgcaccaggtcactctgaccttattactgtctttggtattgtcttaaataaatcaagaatcattgacctaattgttaaatttaaaaataggtagttagcaataggtggaaagagaaatgatgtgaaagataaatgatgattcgtggagccctactcacacattaacccccaaattcaaaagtaagaatgcaaaagtctagagggggtaacagtctgcatcatcatcacaacctaaatggagaaagctgtgcagaggaaacttaagcataaaaattgaattcgtttctgacataccttagactgaaaaactgttggttcatccagaagtgtattcatattaccagaaaatgagtttgtctatggggatacatgaacttcatatactaaggagcctaactccaaagcctgcgttctcatcccagtctgatattcacctaagtttccggacccttttccttagctgtaaaatggaagcggttggactgatggtgtctgaggttctttcccacactgaaattctaaatattgacacttagcagtcatagggctgataatacacacagttactgacttagcctaaacaacctggtgcatcgaaatgtattcacctttcttttgtaaagagaccatcttctatcttctttccacctttctctgttttatgaaaccaactgttgacatacaaaccatgattgaaggagaacctgtccaacatgttttatgtacacaaatccctatgttgctataagaaaagtgaaagtaactgttttcttcttggtgctatgacagtgtgagactcaggttgtctgtagagaatgaaaggagcagtggcccgcgtgattgtggcatttaaggagcagtggcccatgtgactgtggcattttcggcacttttcattactttctgcttgaccggaagttgaggcttagctatgtttccatcttcagtttctgaagactagttatatattccttactagaaatatattcataatatataaaagaaatatatctgtgattttaaaattttgctaccaaagaatgcatgttctgtgtgccctgaaaatgttaccagtgttaataaatggatacttatcaaaaaagaa

SEQ ID NO: 1342 - DNA, 1635 bp, Homo sapiens
gggtggggaagcttagagaccggtgagggagcagagctggggcgcctgtgtacagggatagagcccggcggcagcagggcgcggcttccctttcccggggcctggggccgcaatcaggtggagtcgagaggccggaggaggggcaggaggaaggggtgcggtcgcgatccggacccggagccagcgcggagcacctgcgcccgcggctgacaccttcgctcgcagtttgttcgcagtttactcgcacaccagtttcccccaccgcgctttgggattagtgtgatctcagctcaaggcaaaggtgggatatcatggcatctatctgggtgtgcgaattatggggttggacaccgaggaacagtaagagattatccagactttagcccatcagtggatgctgaagctattcagaaagcaatcagaggaattggaactgatgagaaaatgctcatcagcattctgactgagaggtcaaatgcacagcggcagctgattgttaaggaatatcaagcagcatatggaaaggagctgaaagatgacttgaagggtgatctctctggccactttgagcatctcatggtggccctagtgactccaccagcagtctttgatgcaaagcagctaaagaaatccatgaagggcgcgggaacaaacgaagatgccttgattgaaatcttaactaccaggacaagcaggcaaatgaaggatatctctcaagcctattatacagtatacaagaagagtcttggagatgacattagttccgaaacatctggtgacttccggaaagctctgttgactttggcagatggcagaagagatgaaagtctgaaagtggatgagcatctggccaaacaagatgcccagattctctataaagctggtgagaacagatggggcacggatgaagacaaattcactgagatcctgtgtttaaggagctttcctcaattaaaactaacatttgatgaatacagaaatatcagccaaaaggacattgtggacagcataaaaggagaattatctgggcattttgaagacttactgttggccatagttaattgtgtgaggaacacgccggcctttttagccgaaagactgcatcgagccttgaagggtattggaactgatgagtttactctgaaccgaataatggtgtccagatcagaaattgaccttttggacattcgaacagagttcaagaagcattatggctattccctatattcagcaattaaatcggatacttctggagactatgaaatcacactcttaaaaatctgtggtggagatgactgaaccaagaagataatctccaaaggtccacgatgggctttcccaacagctccaccttacttcttctcatactatttaagagaacaagcaaatataaacagcaacttgtgttcctaacaggaattttcattgttctataacaacaacaacaaaagcgattattattttagagcatctcatttataatgtagcagctcataaatgaaattgaaaatggtattaaagatctgcaactactatccaacttatatttctgctttcaaagttaagaatctttatagttctactccattaaatataaagcaagataataaaaattgttgcttttgttaaaagtaa

SEQ ID NO: 1343 - DNA, 949 bp, Homo sapiens; identical to SEQ ID NO: 936

SEQ ID NO: 1344 - DNA, 3428 bp, Homo sapiens
cagcaactatgaaataatcgtagtatgagaggcagagatcggggcgagacaatggggatgtgggcgcgggagccccgttccggcttagcagcacctcccagccccgcagaataaaaccgatcgcgccccctccgcgcgcgccctcccccgagtgcggagcgggaggaggcggcggcggccgaggaggaggaggaggaggccccggaggaggaggcgttggaggtcgaggcggaggcggaggaggaggaggccgaggcgccggaggaggccgaggcgccggagcaggaggaggccggccggaggcggcatgagacgagcgtggcggccgcggctgctcggggccgcgctggttgcccattgacagcggcgtctgcagctcgcttcaagatggccgcttggctcgcattcattttctgctgaacgacttttaactttcattgtcttttccgcccgcttcgatcgcctcgcgccggctgctctttccgggattttttatcaagcagaaatgcatcgaacaacgagaatcaagatcactgagctaaatccccacctgatgtgtgtgctttgtggagggtacttcattgatgccacaaccataatagaatgtctacattccttctgtaaaacgtgtattgttcgttacctggagaccagcaagtattgtcctatttgtgatgtccaagttcacaagaccagaccactactgaatataaggtcagataaaactctccaagatattgtatacaaattagttccagggcttttcaaaaatgaaatgaagagaagaagggatttttatgcagctcatccttctgctgatgctgccaatggctctaatgaagatagaggagaggttgcagatgaagataagagaattataactgatgatgagataataagcttatccattgaattctttgaccagaacagattggatcggaaagtaaacaaagacaaagagaaatctaaggaggaggtgaatgataaaagatacttacgatgcccagcagcaatgactgtgatgcacttaagaaagtttctcagaagtaaaatggacatacctaatactttccagattgatgtcatgtatgaggaggaacctttaaaggattattatacactaatggatattgcctacatttatacctggagaaggaatggtccacttccattgaaatacagagttcgacctacttgtaaaagaatgaagatcagtcaccagagagatggactgacaaatgctggagaactggaaagtgactctgggagtgacaaggccaacagcccagcaggaggtattccctccacctcttcttgtttgcctagccccagtactccagtgcagtctcctcatccacagtttcctcacatttccagtactatgaatggaaccagcaacagccccagcggtaaccaccaatcttcttttgccaatagacctcgaaaatcatcagtaaatgggtcatcagcaacttcttctggttgatacctgagactgttaaggaaaaaaattttaaacccctgatttatatagatatcttcatgccattacagctttctagatgctaatacatgtgactatcgtccaatttgctttcttttgtagtgacattaaatttggctataaaagatggactacatgtgatactcctatggacgttaattgaaaagaaagattgttgttataaagaattggtttcttggaaagcaggcaagactttttctctgtgttaggaaagatgggaaatggtttctgtaaccattgtttggatttggaagtactctgcagtggacataagcattgggccatagtttgttaatctcaactaacgcctacattacattctccttgatcgttcttgttattacgctgttttgtgaacctgtagaaaacaagtgctttttatcttgaaattcaaccaacggaaagaatatgcatagaataatgcattctatgtagccatgtcactgtgaataacgatttcttgcatatttagccattttgattcctgtttgatttatacttctctgttgctacgcaaaaccgatcaaagaaaagtgaacttcagttttacaatctgtatgcctaaaagcgggtactaccgtttattttactgacttgtttaaatgattcgcttttgtaagaatcagatggcattatgcttgttgtacaatgccatattggtatatgacataacaggaaacagtattgtatgatatatttataaatgctataaagaaatattgtgtttcatgcattcagaaatgattgttaaaattctcccaactggttcgacctttgcagatacccataacctatgttgagccttgcttaccagcaaagaatatttttaatgtggatatctaattctaaagtctgttccattagaagcaattggcacatctttctatactttatatacttttctccagtaatacatgtttactttaaagattgttgcagtgaagaaaaacctttaactgagaaatatggaaaccgtcttaattttccattggctatgatggaattaatattgtattttaaaaatgcatattgatcactataattctaaaacaattttttaaataaaccagcaggttgctaaaagaaggcattttatctaaagttattttaataggtggtatagcagtaattttaaatttaagagttgcttttacagttaacaatggaatatgccttctctgctatgtctgaaaatagaagctatttattatgagcttctacaggtatttttaaatagagcaagcatgttgaatttaaaatatgaataaccccacccaacaattttcagtttattttttgctttggtcgaacttggtgtgtgttcatcacccatcagttatttgtgagggtgtttattctatatgaatattgtttcatgtttgtatgggaaaattgtagctaaacatttcattgtccccagtctgcaaaagaagcacaattctattgctttgtcttgcttatagtcattaaatcattacttttacatatattgctgttacttctgctttctttaaaaatatagtaaaggatgttttatgaagtcacaagatacatatatttttattttgacctaaatttgtacagtcccattgtaagtgttgtttctaattatagatgtaaaatgaaatttcatttgtaattggaaaaaatccaataaaaaggatattcatttagaaaatagctaagatctttaataaaaatttgatatgaaaagcacaatgtgcagaagttatggaaaacctatagaggattacaacaggtaaacgttaaagagaatacattgctgacttatagtgatgtggctaagaagtacatgctttgttgtaaaattgcttgaaagcccattgaaagatgtatctgtttatttacagtctttgaagtaaaagttaccaatgtttgccaa

SEQ ID NO: 1345 - DNA, 2653 bp, Homo sapiens
gacgtcggcccgccggcgccccaccagctccgcgcgggcccgggttggccaccgccgggcccccgcccctcccccggcggtgtcccggccggaaccgatcgtggctggtttgagctggtgcgtctccatggcgacccgccggtgctataagtagggagcggcgtgccgtggggctttgtcagtccctcctgtagccgccgccgccgccgcccgccgcccctctgccagcagctccggcgccacctcgggccggcgtctccggcgggcgggagccaggcgctgacgggcgcggcgggggcggccgagcgctcctgcggctgcgactcaggctccggcgtctgcgcttccccatggggctggcctgcggcgcctgggcgctctgagattgtcactgctgttccaagggcacacgcagagggatttggaattcctggagagttgcctttgtgagaagctggaaatatttctttcaattccatctcttagttttccataggaacatcaagaaatcatgaacaactttggtaatgaagagtttgactgccacttcctcgatgaaggttttactgccaaggacattctggaccagaaaattaatgaagtttcttcttctgatgataaggatgccttctatgtggcagacctgggagacattctaaagaaacatctgaggtggttaaaagctctccctcgtgtcacccccttttatgcagtcaaatgtaatgatagcaaagccatcgtgaagacccttgctgctaccgggacaggatttgactgtgctagcaagactgaaatacagttggtgcagagtctgggggtgcctccagagaggattatctatgcaaatccttgtaaacaagtatctcaaattaagtatgctgctaataatggagtccagatgatgacttttgatagtgaagttgagttgatgaaagttgccagagcacatcccaaagcaaagttggttttgcggattgccactgatgattccaaagcagtctgtcgtctcagtgtgaaattcggtgccacgctcagaaccagcaggctccttttggaacgggcgaaagagctaaatatcgatgttgttggtgtcagcttccatgtaggaagcggctgtaccgatcctgagaccttcgtgcaggcaatctctgatgcccgctgtgtttttgacatgggggctgaggttggtttcagcatgtatctgcttgatattggcggtggctttcctggatctgaggatgtgaaacttaaatttgaagagatcaccggcgtaatcaacccagcgttggacaaatactttccgtcagactctggagtgagaatcatagctgagcccggcagatactatgttgcatcagctttcacgcttgcagttaatatcattgccaagaaaattgtattaaaggaacagacgggctctgatgacgaagatgagtcgagtgagcagacctttatgtattatgtgaatgatggcgtctatggatcatttaattgcatactctatgaccacgcacatgtaaagccccttctgcaaaagagacctaaaccagatgagaagtattattcatccagcatatggggaccaacatgtgatggcctcgatcggattgttgagcgctgtgacctgcctgaaatgcatgtgggtgattggatgctctttgaaaacatgggcgcttacactgttgctgctgcctctacgttcaatggcttccagaggccgacgatctactatgtgatgtcagggcctgcgtggcaactcatgcagcaattccagaaccccgacttcccacccgaagtagaggaacaggatgccagcaccctgcctgtgtcttgtgcctgggagagtgggatgaaacgccacagagcagcctgtgcttcggctagtattaatgtgtagatagcactctggtagctgttaactgcaagtttagcttgaattaagggatttggggggaccatgtaacttaattactgctagttttgaaatgtctttgtaagagtagggtcgccatgatgcagccatatggaagactaggatatgggtcacacttatctgtgttcctatggaaactatttgaatatttgttttatatggatttttattcactcttcagacacgctactcaagagtgcccctcagctgctgaacaagcatttgtagcttgtacaatggcagaatgggccaaaagcttagtgttgtgacctgtttttaaaataaagtatcttgaaataattaggcattgggacgtttttatggtgtgttcattccagacagttcacgaatcccgtatagctcgctctgattctcagagaacaatgagtgggtccacccacacacaggtaggaggacaggtgagacggaagccccatcctcccatgtggacggtgcacatctgctcagcccaccccacatgtccagagttggctgcaaactccttgtccagagcctctggtggtgggacctacttaagtctgacggacctgtcctgtccaggccagtgcccagggaaggtgtgggaggccctttgagcctggcctgcagagaccatccgtgtcccctcccaccttcatgcctgtgagaagttaggaatgtatacggtaccacatttggcagtcagcttattttaataaattcagcaacagcaagtcccta

SEQ ID NO: 1346 - DNA, 1897 bp, Homo sapiens
ctttgggagagaaccttcctcttcttgatcggggattcaggaaggagcccaggagcagaggaagtagagagagagacaacatgttacatctgcaccattcttgtttgtgtttcaggagctggctgccagcgatgctcgctgtactgctaagtttggcaccatcagcttccagcgacatttccgcctcccgaccgaacatccttcttctgatggcggacgaccttggcattggggacattggctgctatggcaacaacaccatgaggcaagggacagagaattactcacctggactccgaatattgaccgccttgcagaggacggcgtgaagctgacccaacacatctctgccgcatctttgtgcaccccaagcagagccgccttcctcacgggcagataccctgtgcgatcagggatggtttccagcattggttaccgtgttcttcagtggaccggagcatctggaggtcttccaacaaatgagacaacttttgcaaaaatactgaaagagaaaggctatgccactggactcattggaaaatggcatctgggtctcaactgtgagtcagccagtgatcattgccaccaccctctccatcatggctttgaccatttctacggaatgcctttctccttgatgggtgattgcgcccgctgggaactctcagagaagcgtgtcaacctggaacaaaaactcaacttcctcttccaagtcctggccttggttgccctcacactggtagcagggaagctcacacacctgatacccgtctcgtggatgccggtcatctggtcagccctttcggccgtcctcctcctcgcaagctcctattttgtgggtgctctgattgtccatgccgattgctttctgatgagaaaccacaccatcacggagcagcccatgtgcttccaaagaacgacaccccttattctgcaggaggttgcgtcctttctcaaaaggaataagcatgggcctttcctcctctttgtttcctttctacacgttcacatccctcttatcactatggagaacttcctcgggaagagtctccacgggctgtatggggacaacgtagaggagatggactggatggtaggacggatccttgacactttggacgtggagggtttgagcaacagcaccctcatttattttacgtcggatcacggcggttccctagagaatcaacttggaaacacccagtatggtggctggaatggaatttataaaggtgggaagggcatgggaggatgggaaggtgggatccgcgtgcccgggatcttccgctggcccggggtgctcccggccggccgagtgattggcgagcccacgagtctgatggacgtgttccccaccgtggtccggctggcgggcggcgaggtgccccaggacagagtgattgacggccaagaccttctgcccttgctcctggggacagcccaacactcagaccacgagttcctgatgcattattgtgagaggtttctgcacgcagccaggtggcatcaacgggacagaggaacaatgtggaaagtccactttgtgacgcctgtgttccagccagagggagccggtgcctgctatggaagaaaggtctgcccgtgctttggggaaaaagtagtccaccacgatccacctttgctctttgacctctcaagagacccttctgagacccacatcctcacaccagcctcagagcccgtgttctatcaggtgatggaacgagtccagcaggcggtgtgggaacaccagcggacactcagcccagttcctctgcagctggacaggctgggcaacatctggagaccgtggctgcagccctgctgtggcccgttccccctctgctggtgccttagggaagatgacccacaataaatgtctgcagtgaaaagctgg

SEQ ID NO: 1347 - DNA, 8153 bp, Homo sapiens; identical to SEQ ID NO: 331

SEQ ID NO: 1348 - DNA, 2359 bp, Homo sapiens
agattcgcacaaacccggaagcgggtcgcgtggagtgacggtcccaccgcggggatatctcttccaaatgcatgatgaaggagttctcatccacagcgcaaggcaatacagaagtgatccacacagggacattgcaaagacatgaaagtcatcacattagagatttttgcttccaggaaattgagaaagatattcataactttgagtttcagtggcaagaagaggaaaggaatggtcacgaagcacccatgacagaaatcaaagagttgactggtagtacagaccgacatgatcaaaggcatgctggaaacaagcctattaaagatcagcttggatccagctttcattcgcatctgcctgaactccacatatttcagcctgaatggaaaattggtaatcaagttgagaagtctatcatcaatgcctccttaattttgacatcccaaagaatttcttgtagtcccaaaacccgtatttctaataactatgggaataattccctccattcttcattacccatacaaaaattgggaagtacacatgagagaaaaatctttccaatgtaatgagagtggcaaatcctttaattatagctaactcttaaggaaatatcagataatccatttaggatagaaacaatataaatgtgaggtatgtgacaaggtctttaatcagaattgattccttgtatgccataatagatgtcacactggtaagaaaccttacagttgttatgagtgtggcaagaccttcagtcagacgtcatcctttacatgctatcgtagacttcatactggagggaaaccttacaagtgtagtgagcataacaagacctttggttgaaattcagcccttgtaattcataaggcaattcatactggagagaatccttgcaagtgtaatgaatgtggcaaggtttttaatcagaaagcacaccttgcacgtcatcatagacttcatactagagagaagccttacaaatgtgaagaatgtgaaaaagttttcagtcgcaaatcacatcttgaaagacaaaacttaaaagaggtggcgttgcccttgtttttgagaatgccctactgtgtaagtggtagtgttctttcttttttttttttttttaagacggagtctcacctgagcgagcctctgcactggccttatttattattgttattaattttttgtttttgagacggagtttcactcttattgcccaggctggagtgcaatggtgcaatcttggctcactgcaccctctgtctgttgggctcaagcgtttctcttgcctcagcctcccaagtagctgggactacaggtgcatgccaccacgcctggttaatttttgtatttatagtggagatggggtttctccatattggtcaggctggtcttgaacccttgacctcaggtcatccacccgcctcggccttccaaaacgctggatttacaggcttgagccacgcgtccggcctgaagtggtattttttagaaagtaactaaaccttttttcagtttaatgacccagggatgtatttctgaaggacttgggagcgatccttttaaggcaaacaagggagatagtacctgtatcttagtaggaaattaaataattcaaacatcaaatgtttcaaattaaaagctaccgacctttaaataattctgagccttgagaggaacgtggtcatgcaacaagagtccagtggcatgcaggcacaaggttttttcttttttgttttttgtttttttttgagacagtctcgctctgtcgcccaagctgaagtgcagtggtgcgatctcagctcactgcaagctccgcctcctgggttcacgtcattttcctgtctcagcctccccagtagctgggactccaggcacccaccaccactcccggctaattttttgtatttttagtacagacagggtttcactgtgttagccaggatggtcttgatctcctgaccttgtgatccacccacctcagcctcccaaagtgctgggattacaggcatgaatgaccgcgcccagccgcaggcgcaacttttttgagttttcctggccaggcgcagtggctcaagcctgtaatcccagcattttgggaggccgaggtgggcggatcacttgaggtcaggagttagaaaccagcctggccaacgtggtgaaaccccgtctccagtaaacatacaaagccattacagggcatggtggggcacgcctgtattcccagctacttgggaggctgaggcaggagaactgcttgatccggggaggtggaagttgcagtgggccaagatcatgccactgcaccccagcctgggcaacagagcaagactccgtaccaaaaaaaaaaaaaaaaaaaaaaaaa

SEQ ID NO: 1349 - DNA, 1708 bp, Homo sapiens; identical to SEQ ID NO: 882

SEQ ID NO: 1350 - DNA, 2525 bp, Homo sapiens; identical to SEQ ID NO: 328

SEQ ID NO: 1351 - DNA, 8571 bp, Homo sapiens; identical to SEQ ID NO: 360

SEQ ID NO: 1352 - DNA, 159 bp, Homo sapiens; identical to SEQ ID NO: 370

SEQ ID NO: 1353 - DNA, 5410 bp, Homo sapiens
actctacccactcaggttgcccagagagcactttaggttctgactcgcgtggggcgcgaggtaccccgtggggcagctaggtgcctccaagaaaccccgccccagaggacccgcacgagttgctgccatttttcgctgaagcccctgccctggggctggtgttcttctctatgattctaccaatcgtcggcatttttttcctcccttctttctttttaggaaggcgctggggtgtgcggcggcaacggcggcggtgaagggatcctcttgtggtatctcctcgtgggttcctgtcttgaaggatttcttctccgcctcaactttatgttcaagtagcgctttgggggttgggttggttttcatagcccccacccccggccctctccttttaaagggtgtgtggagttcagaggatgggtggagagcgggcttggccggaactgaattggtagaggtaaaaggggaacggaggaccttaagctctggccacttcggcccagcgaacccactttatttttgtccaaggaaaagctgcaggggggaggattctttttaggaagtctactctgccggcccctgatttttgggttggatgcttgagagctttgtttcccttgttccgagagtggcccagctgggtctgaatcgactccctcccctttcgaccccctcctcattttccagcccggagaaataggggagtgggggcccaagaacgagaagacgagaacgcgtcgccctgcgctatgtcagaatggggcgggtgtgaggggaacagctctcttgcgatcagctcaggagtatgagcctcccggaggacggcatgagttctggacacttcaggagtcctcagctagtgacatggtcgatatggataaactcataaacaacttggaggtccaacttaattcagaaggtggctcaatgcaggtattcaagcaggtcactgcttctgttcggaacagagatccccctgagatagaatacagaagtaatatgacttctccaacactcctggatgccaaccccatggagaacccagcactgtttaatgacatcaagattgagcccccagaagaacttttggctagtgatttcagcctgccccaagtggaaccagttgacctctcctttcacaagcccaaggctcctctccagcctgctagcatgctacaagctccaatacgtccccccaagccacagtcttctccccagacccttgtggtgtccacgtcaacatctgacatgagcacttcagcaaacattcctactgttctgaccccaggctctgtcctgacctcctctcagagcactggtagccagcagatcttacatgtcattcacactatcccctcagtcagtctgccaaataagatgggtggcctgaagaccatcccagtggtagtgcagtctctgcccatggtgtatactactttgcctgcagatgggggccctgcagccattacagtcccactcattggaggagatggtaaaaatgctggatcaggagcacaaaggccaaggtggatgttctcacatctggactaatcctagaatttgattttaggacagccaggagctattcatgaaagttgaccccacctccatgtctccactggaaattccaagtgacagtgaggagagtacaattgagagtggatcctcagccttgcagagtctgcagggactacagcaagaaccagcagcaatggcccaaatgcagggagaagagtcgcttgacttgaagagaagacggattcaccaatgtgactttgcaggatgcagcaaagtgtacaccaaaagctctcacctgaaagctcaccgcagaatccatacaggagagaagccttataaatgcacctgggatggctgctcctggaaatttgctcgctcagatgagctcactcgccatttccgcaagcacacaggcatcaagccttttcggtgcacagactgcaaccgcagcttttctcgttctgaccacctgtccctgcatcgccgtcgccatgacaccatgtgagccgcacaggtcacactagagaagctgcgctggtatctttcctggtcgtgtgctgaggttgggacaattttttcctctttgacttcagcttgcatatggggttgaagcagcccactgagccaagttgaggagactggaggaaaagagagctggtctcccgtggggctcttcatattctaccttcacttctccactgtccagacccgtttttttcaacctccacatgggttgaattccagtgtggcacccatggctgccttcccatccccccctgctctgaaataggacatttttcctacagtaacaaaacaggaatcaaactcaaggctgtgaacaaacatacgctgctttattctttccaatttttctcttgttttctagaactcttatccatatgtttttaaaataagtacctaaaagtggtttgatagtgtcctaaacgacttttttaacttcctaaatggaaagagcataacaatgtagttgattggtaagatttacagggatttggtttctgagtttgaggcacattcccagtgaataagctgagtcccataccacactcaaaaggttttaataaatctaatcctatttcttcttaaagtttggttttcagacagtgctggtgcttctgcttcttaagttcatcaagggaatgaggagttcttgtccttctcctcctcttttttttcttttccactttctccttcaggattaaagattttgctgcacaattgttatttgttaggttaaatttggacaaatattcaaagcacacatagacatataagtaaggagaaaaatgttccaggagagtaggttgggcagtgacaggaacaaacagacctaggatgatcctgagaacaaatagaggggttcctttacttgtataggatatcaaaagtgctgttaatcacaaacctcattcaaatggcaggctgtcgagacagtgtcttgaggggctggctgtactgtttattttttcgtttacacaaagaagcaattgagtatattgcatgatgagaaatcacacactagggtcatgttatacagaagtaaggggttggaaaaatggaatgttgttcactccatggaattattggcattcattcctgtgtttcaaatgaaacatagatgcttttcatgaaaactgacctacaaaaagcaatttgatgttctgcaactgctatgaaaacctaagccatttattttagctgatagcagattgcataatatactcatttagctgcccaatcagattgttttataatattacctggggtacaaaatcctctgttcctggccctggaccacagatctacctccacatggcatatttcctttctggggtcaggggtaggggagggggctttgcatcacttgaatttagactcagcctctctttaaaagattgtctttatattgaacacctttttcttttcaaccctgcttgaatactttaggttactatttcctgaggctgtccattctcactatattgtagaattctagcaccaagaagggatcccgttaaccatctagtcctatccatccctcatattttacagatgagacaaatacgggtcagatttttttctccagatgtttctttgagcccttatacacctgcacgcttattctcctggggatcacataattttatttatttattttttgagagacggtttcactccatcacccaggctggagtgcagtggcgtaatcttggctcactgcaacctccgcctcctgggttcaagtgattctcctgcctcagcctcccaaatagcttggattacaggtgcgtgccaccacacctagctaagttttgtattattagtagagatggggtttcgccatgttggccaggctggtctcaaactcctgacctcaagtgatccccccacctcggcctcccaaagtgctgggatcacaggtgtgagtcaccacacctggccaggatcacattattaaaccaaattaaagtttatgtgattggttgcaatatttgtctaattttatatgttttcttcaggaaaactttagaactcaaaaatcatttacagctgattaaatagcaagtaaaatgtacttgtggtcattgccgtataacattaggcacacgcttctaacacttctataatatctagattttatttacctcattttaacttgcaatgtctgtctatctcatgaactctccataaatccaagaactgcctgtagttttcaaaatgacatgtgggtttttactgttatcattgttatttcgatagggctttttcctgattttgggtatacaagttccaaacttgcataataattgctaacgcactaggcgatatctagggccagtctgttaaaggggacctctaatgtagctataagacaggttggtaaagatgaactaacataagtttaagctaataattcagtagttgatgcagtatttcacagtagagcccgagcttactcatttttttcaaaatttggatcctgatactcctttttcagagttcagaactgaactgctcccctaagacctcagaatcttttgcattgagacatatgatctatttataaataaaggttatcaaatatcttgttgaactaattaggttgatcaaattaggatcccaaatattggggtccctgacatctgagcctttatctaaaaatgtttctgtaacataatgacagcctttatgtttgttaattgcctatagtaaagaagcaattttaagcctattctcatttccctctcccctacaaaaaatgataaaagctttccaattacttacatatgctctaacaagtgtctcaggattcattaacagaattttatagagtacagtaattcaaatatagcacagtacagagtttaccaaaaacacataaaactttgctagatagacagtgaggtggaaaggaactaaaatgtatctctcttgaatagcatttggggttcaattgaatttgttgtgtttacaacagcaaagcaccgttagcctggacagttgcttatggcatcgatagggttggataatattctgggatttgttgcagcagaattcctctatctgatgatcagcagttgaacataaacttcataattatagtaaaatttaggaaaaactatgagtgtgaagagtatgaactgattgggtagattaggcagagtgcattatgggcaagacaaaggttttcgatattaacttcttttaaaataaactttttattttcaaacagtttcagttttacagaaaaaatgtgaagctagtacagagaggtctcatttaccccacacccagtttctcctgttattagcatctcacattaatatgtggtatatttgttacaattaataaaacacattgatatgttaatatt

SEQ ID NO: 1354 - DNA, 5435 bp, Homo sapiens; identical to SEQ ID NO: 351

SEQ ID NO: 1355 - DNA, 5518 bp, Homo sapiens; identical to SEQ ID NO: 334

SEQ ID NO: 1356 - DNA, 1330 bp, Homo sapiens; identical to SEQ ID NO: 380

SEQ ID NO: 1357 - DNA, 4230 bp, Homo sapiens; identical to SEQ ID NO: 314

SEQ ID NO: 1358 - DNA, 4544 bp, Homo sapiens
atcctcccagaaacccagccggcttcacctctcaccaacagtggctgcgggactttccagcacctagcctgggcattcccacagcccagagggagctcgtcccagacaaccaagaggaaaagaagggaaacaagaaagagatggagacccatcattgtggccaacgaccccacgaagagggaatagcggtccacgcacgggacccagcctccgatcaagcccagcaggcgccgggtgcgcctgtgctgggaggcagagcccacgcccacccggaaccgcgccggccagcgaggtccgtgcgcagccccggctgccgcctgcgcttctccctccacacctcaccgttagcagagggagccggctccggcctcagccagccccagagacaggcccccacagcacagcggcgggctgaagggctcctcgagcgtggccagagcagacgccgaggctaaggaggtgccgagagacagcgagggctgctagcacattgtcacctctcaatactggaactcagaataagaggtctccactgttctgagttatgggagaaagatgggtgtatggtagacagaatagtgcctccccacaacaaagatgtcaacatgttactgtgtgtgttaaaagggactttgtaggtgtgagtaagttgaagatcttgagaagaaaagattatcctgggttttttgggtggggccaatgtcataaaaaggtccagataagaaagaggcagaagagtcagggtcagaggaggagccatcatgataggagcagagaagcagagtcaggagagttgatgctacactgctaactttgaagatgaagaagccacgagctatggaatggagacagcctctgaaaggcaaggagatggatttcctttagagcttccaggaaggagtgcaggcctgctaacagatacgttttagcccagtgagactaatttttagacttctgacttccaggaccgtaagtttgcagaattactctcctatgatggcacagaaatcacaaggatctgacaaccttcaggaaggccaggaaaagagcaagagagagatcctgaagtgcaccaaaagcgcgtgggctccgctggatgagtggctgccccctgaccctgaggaggaaagccagagtctcaccatccccatgctggaagattccaagcaagaaagtattcagcagtggctggactctggattctttgtctctgcaaatgaaaactttcaacaagtcattgaccgcactgtttctttgtatgaacaagggatggttcaaatgactgtgaaagactacatgagatctttgcatcagttttcagaaactcccatcctatccagagggaccagtttcaactcttgctattctactgcaagtgtaccacaaagcattcctgaatggctggaattttgggagatagatccagtggagattctcttggatctggggtttggtgctgatgagccagacatctgcatgcaaatcccagccagattccttggttgtggctcagcagccagaggaatcaacatccgtgtttttcttgaagctcaaaagcagcgaatggacattgagaaccccaacttgtacggtcgtttccgacagctggaaatcctggaccatgtgaccaatgccttctcatctctgctgagtgatgtcagcatcctgccaaacagagctgaagagaaagctggaggagagagtgtgcaaagaacctcagtccaaagctttgaagaagagactggtaatcctcttgacatgacttcaggaactgtaggtgccagggtggacagagcaaatagctgccagtctgacagcagcgggttcctggaggagccgctggaaccgctgcccctccagatgccttccttgccaaacagccagagtcctgctgagaatggaggtagaaagccaagagatcagagccacagcttagtatcatcccaggactgtcagctagagtcggatgggccagattccaaaagtagggcgagcatgtctttttcaagccaagaagcgaatgccttggaacaaagggcctcagtatctgtgatggaggaagagtttctgcttgaggccatggaggggccaccagagctgtatatcccagacatggcctgtgccaagaccaccacgaggggagaatgcccaaggaaagacagccatctgtggcagcttctgccaatgccccatgctgagtatgaggtcaccagacccacagccacttccaaatatgatcatcctctggggtttatggtaacccacgtcacagaaatgcaggacagttttgtgaggcctgagggagctggcaaagtgcaaagccaccacaatgagtctcaaaggtcacctggaaatgatcatactcaagacaagttccttcatgttgactctgaggccccacgagaagaggaaagcagtggattctgtcctcacaccaaccacagcttactcgtaccagaaagctcatcacagtgtatccccaagcacagtgaaatcacaccttatgcaactgaccttgctcaaacatctgaaaagctcattccccacctccataaactgcctggagatcctgcccaggtgaagtcaaggtctggtactttgggtcagatactacctgggacagaagctgagatggaaaaccttcctctaaatactggcagctccaggtctgtaatgacccagatgtcctccagcctggtgtcggctgctcagagggctgtggccttggggactggtcccagaggaacatctttagaatgcactgtgtgtgatcctgttaccgcaacagaaacaagactggggacaaaagcaagacagttaaatgatgcttccattcagacttcagctctaagcaacaagaccttgacacatgggccccagcccctcaccaaatccgtctctctagactcaggcttctctagtatctgcccaatgggcacctgccatgctatacctgcccactgctgcatctgctgtcatcaccaccctcactgccacggggagaggcaaagccctggccctgaaccctcagtctgtaggcactgcctgtgttcactaactggtcaccaggaagcccagttcatgacgactttgaaagcccttcaggacactacagtgagggagctatgttcctgcacagtccatgagatggaagccatgaagacgatatgccaaagtttccgggagtatttagaagaaattgaacagcaccttatgggacagcaggccctcttttccagggacatgtcagaggaggaaagggaggaggccgagcaactgcaaacgttacgtgaggccctgaggcagcaggtggcagagttggaatttcagttaggagaccgggctcagcaaatcagagaagggattttactgcagctggaggttctcacagcagagccacctgaacactattcaaatctgcatcaatataactggatagaagaaagcaatgggcagacttcatgttctaaaatccacccaggcatggccccgaggactgtgtttcctcccgatgatggccaggaggctccctgttcaggtgggacccagttggctgccttcactccacccaccttggagaacagcaccaggatgtctccttcatcatcagcttgggcaaagttaggtccaacccctttgtcaaattgtcctgttggagaaaaggatgcagatgtcttcctctagatcagagcaggtttgttaaccttcatacaaaatataaaggcccagaacagatgtagcaaggaaatttcaattttccccaaggagaagggtctgccaacccattgtcagctatatctctcatattctaccctttggttaaacccaagaggagtttagaatactctaatactcattcagtatagaataactgagcacctagtatgtgcctggcacagagtatgcaacagtgactaaatagtatacggtctctgccctgctagaacttacagtgtagtgggggagatagaattgcaaacaaaaagtatctgagacagacctcagtcaatatagaagtttattttgccaaggttaaggatacacacccagaagacaggtctgtgcctttctccaaagatgattttgaggccttcaacatttagtggggaaagggtgctaatggggaaagaggtgtgggtacataggaggcaaacagttgcatttttttgagtctgatcagcttttctcatgagagaaggggtagaggaactgtcacttatgcattcacctagctcagtggatctgcacttttacagaaggtaaaataaacatagggcagaggaagcaatcagatatgcatttgtctcgggggagcagagggatggctttgagttctgttctttgtcctgtacctattaagagaagctatcaatatactttgtcaggataaaattcaacagaactgttttagactaaagattttagggaccacaaggaatttcccagtgggcaaattgtgagggaggtatttagcttttaaaaaaatctttgtagctatctcatttagaaataaaatgggaggcagattgcctgatgcagctcct

SEQ ID NO: 1359 - DNA, 93 bp, Homo sapiens
gcattagagaggcagaaagagttctttgattccgtaaggagtgaacgggatgatcttagagaagaagtagtcatgctgaaagaggaattaaag

SEQ ID NO: 1360 - DNA, 5209 bp, Homo sapiens
gcggccgcgggctctcgcggggcggcgacgccgcggggaggatgctgcttgccgcgcccgcgtcctcaccgtcctcccgggccgcctgctggggctttgttgtggcccggacgccgcgggccaccccctgaagtcgcctgccgccgccgccgccgcacctagcggacgggcgggcgggcgcgcgtgtgcccaggagtgcgcgcctgtcgcggtggtgggtgcaggactggacccacgggcccattgtgcgcccgcccgcggcagccaggaccatgtgggtgaacccggaggaggtgttgctggccaacgcgctgtggatcaccgagagggccaacccatacttcatcctgcagcggaggaagggccacgccggcgatggaggcggcggcggcggactggcgggcctgctggtgggtacccttgatgttgtgttggactccagcgcccgggtcgctccttaccgaatcttgtaccagactccagactccctggtctactggaccatcgcctgtggtggttccaggaaagaaatcactgaacactgggaatggcttgagcaaaatctcttgcagacactctccatctttgaaaatgagaatgatatcaccacatttgtgagaggaaaaatacagggcatcattgcagaatacaacaaaatcaatgatgtaaaggaagatgatgacacggagaagtttaaagaagccattgtgaaatttcataggctgtttgggatgccagaggaagagaaactcgtcaactattactcttgcagctattggaaggggaaggtcccccgtcagggttggatgtacctcagcattaaccacctttgcttttattcttttcttatgggaagggaagcgaaactggtcatccggtgggtagacatcactcagcttgagaagaatgccaccctgcttctgcctgatgtgatcaaagtgagcacacggtccagtgagcatttcttctctgtattcctcaacatcaacgagaccttcaagttaatggagcagcttgccaacatagccatgaggcaactcttagacaatgagggatttgaacaagatcgatccctgcccaaactcaaaaggaaatctcctaaaaaagtgtctgctctaaaacgtgatcttgatgccagggcaaagagtgagagataccgtgcacttttccggctgcccaaagatgaaaaattagatggccacacagactgcactctctggactccatttaacaaaatgcacattttggggcagatgtttgtgtccacaaattacatctgttttaccagcaaggaggagaacttatgtagcctcattatcccgctccgtgaggtgacaattgtggaaaaggcagacagctccagtgtgctccccagtcccttatccatcagcacccgaaacaggatgaccttcctatttgccaacttgaaagatagagactttctagtgcagaggatctcagatttcctgcaacagactacttccaaaatatattctgacaaggagtttgcaggaagttacaacagttcagatgatgaggtgtactctcgacccagcagcctcgtctcctccagcccccagagaagcacgagctctgatgctgatggagagcgccagtttaacctaaatggcaacagcgtccccacagccacacagaccctgatgaccatgtatcggcggcggtctcccgaggagttcaacccgaaattggccaaagagtttctgaaagagcaagcctggaagattcactttgctgagtatgggcaagggatctgcatgtaccgcacagagaaaacgcgggagctggtgttgaagggcatcccggagagcatgcgtggggagctctggctgctgctgtcaggtgccatcaatgagaaggccacacatcctgggtactatgaagacctagtggagaagtccatggggaagtataatctcgccacggaggagattgagagggatttacaccgctcccttccagaacacccagcttttcagaatgaaatgggcattgctgcactaaggagagtcttaacagcttatgcttttcgaaatcccaacatagggtattgccaggccatgaatattgtcacttcagtgctgctgctttatgccaaagaggaggaagctttctggctgcttgtggctttgtgtgagcgcatgctcccagattactacaacaccagagttgtgggtgcactggtggaccaaggtgtctttgaggagctagcacgagactacgtcccacagctgtacgactgcatgcaagacctgggcgtgatttccaccatctccctgtcttggttcctcacactatttctcagtgtgatgccttttgagagtgcagttgtggttgttgactgtttcttctatgaaggaattaaagtgatattccagttggccctagctgtgctggatgcaaatgtggacaaactgttgaactgcaaggatgatggggaggccatgaccgttttgggaaggtatttagacagtgtgaccaataaagacagcacactgcctcccattcctcacctccactccttgctcagcgatgatgtggaaccttaccctgaggtagacatctttagactcatcagaacttcctacgagaaattcggaactatccgggcagatttgattgaacagatgagattcaaacagagactgaaagtgatccagacgctggaggatactacgaaacgcaacgtggtacgaaccattgtgacagaaacttcctttaccattgatgagctggaagaactttatgctcttttcaaggcagaacatctcaccagctgctactggggcgggagcagcaacgcgctggaccggcatgaccccagcctgccctacctggaacagtatcgcattgacttcgagcagttcaagggaatgtttgctcttctctttccttgggcatgtggaactcactctgacgttctggcctcccgcttgttccagttattagatgaaaatggagactctttgattaacttccgggagtttgtctctgggctaagtgctgcatgccatggggacctcacagagaagctcaaactcctgtacaaaatgcacgtcttgcctgagccatcctctgatcaagatgaaccagattctgcttttgaagcaactcagtacttctttgaagatattaccccagaatgtacacatgttgttggattggatagcagaagcaaacagggtgcagatgatggctttgttacggtgagcctaaagccagacaaagggaagagagcaaattcccaagaaaatcgtaattatttgagactgtggactccagaaaataaatctaagtcaaagaatgcaaaggatttacccaaattaaatcaggggcagttcattgaactgtgtaagacaatgtataacatgttcagcgaagaccccaatgagcaggagctgtaccacgccacggcagcagtgaccagcctcctgctggagattggggaggtcggcaagttgttcgtggcccagcctgcaaaggagggcgggagcggaggcagcgacaagctgcactgcgaggacatcggagaggacacggtcctggtgcggagcggccagggcacggcggcactgccccggagcaccagcctggaccgggactgggccatcaccttcgagcagttcctggcctccctcttaactgagcctgccctggtcaagtactttgacaagcccgtgtgcatgatggccaggattaccagtgcaaaaaacatccggatgatgggcaagcccctcacctcggccagtgactatgaaatctcggccatgtccggctgacacgggcgccttcccgggggagtgggaggagagggaggggagggattttttatgttcttctgtgttgagttttttctttctttcttttaaattaaatatttattagtacctggcttgaagcctagtgttttcataatgtaattcaatgaaaactgttggagaaatatttaaacacctcaatgtaggtacattacactcttgttgcggggaggggatttaccagaatacagtttatttcgtgaattctaaaaaacaaaaagatgaatctgtcagtgatatgtgtgtattataacttattaatcttgctgttgagctgtatacatggtttaaaaaatagtactgtttaatgctaagtaaggcagcagtcatttgtgtattcaggctttttaaataaaattagagctgtaaggaaaatgaaaagccacaaatgcaagactgttcttaaatggaaggcatagtcagcgagggtaaatcctataccactttaggaagtattaaaaatatttttaagatttgaaatatatttcatagaagtcctctattcaaaatcatattccacagatgttccccttcaaagggaaaacatttggggttctaaacagttatgaaagtaagtgatttttacatgattccagaataacacttgtattgaccaatttagacagataccagaccaattttgcatttaagaaattgttctgattatttacgtcaactcattagaattcagtgaaaagtaacagtcttttgtcacagagaatctgaaagtagcagcaaagacagagggctcatgacaggtttttgcttttgctttgcttttgtttttgaaagagtaaaagtactgatgcttctgatactggatgtttagcttcttactgcaaaaacataagtaaaacagtcaactttaccatttccgtattctccatagattgaagaaatttataccacatatcgcatatgaccatctttccatcaaatcaatgtagagataatgtaaactgaaaaaaaatctgcaagataatgtaactgaatgttttaaaaacagaacttgtcactttatataaaagaatagtatgctctatttcctgaatggatgtggaaatgaaagctagcgcacctgcactttgaattcttgcttcttttttattactgttatgattttgctttttacagatgttggacgattttttcttctgattgttgaattcataatcatggtctcatttcctttgcttctttggaatatttctttcaacacattcctttattttattatacattgtgtcctttttttagctattgctgctgttgttttttattctatttacaggatgatttttaaactgtcaaatgaagtagtgttaacctcaaataggctaaatgtgaacaaataaaatacagcaaatactcag

SEQ ID NO: 1361 - DNA, 5232 bp, Homo sapiens; identical to SEQ ID NO: 327

SEQ ID NO: 1362 - DNA, 3436 bp, Homo sapiens; identical to SEQ ID NO: 886

SEQ ID NO: 1363 - DNA, 1536 bp, Homo sapiens; identical to SEQ ID NO: 332

SEQ ID NO: 1364 - DNA, 2971 bp, Homo sapiens
gaggtgctagaagtcggaccggaagtggaagtggtccccgaaggctatttcgccgctggcgtcaggactattttcacgttttaatgccgagaggtctctgtgacgattttggttcttgggtgtctctggggagtccctgggccagaccttcctccagactccagcccacctcttcggagcagctctgctgagttcacagatgaccactaaacttcaggcaccctagacaaaaagggttgagatccagtgtggccatgccagctagttggacctcaccccagaaatcctcagccctggctccagaggatcatggcagctcctatgagggatcagtgtccttcagggatgtggctatcgatttcagcagagaggaatggcggcacctggacctttctcagagaaacctgtaccgggatgtgatgctggagacctacagccacctgctctcagtagggtatcaagttcctaaaccagaggtggtcatgttggagcaaggaaaggaaccatgggcactgcagggtgagaggccacgtcacagctgcccaggagagaaattatgggaccataatcaacatagaaaaatcatcggttataaaccagcttcctctcaagatcaaaaaatttattctggggaaaaatcctatgagtgtgctgaatttggaaagagcttcacctggaagtcacagttcaaggtacatctgaaagttcctacaggagaaaaactctatgtatgtattgaatgtgggagggcttttgtacagaagccagaattcatcacacatcagaaaacccatatgagagagaagccctataagtgcaatgaatgtggaaaatccttttttcaagtatcgtctcttttcaggcatcacagaattcataccggagaaaaactatatgaatgtagtgaatgtgggaaaggtttcccttataactcagatctcagtatacatgagaaaattcatactggagagagacaccatgaatgcactgactgtggcaaagcgttcacacaaaagtccacactcaagattcatcagaaaatccatacaggcgagagatcctacatctgtattgaatgcgggcaggccttcatccagaaaacacaattgattgcacaccgaagaattcatagtggagaaaaaccatatgaatgcaataactgtggcaaatccttcatttccaagtcacaacttcaggtacatcaacgtgttcacacaagagtgaagccctatatatgtaccgaatatgggaaggtcttcagcaataattccaacctcattacacatgagaagattcaaagtagagagaaatcttccatatgtactgagtgtgggaaggcctttacctacaggtcagagttgattattcatcagagaattcacactggagagaaaccttatgaatgcagtgactgtgggagagccttcactcagaagtcagcactcacagtgcatcagagaattcatacaggagaaaaatcgtatatatgcatgaaatgtggactggccttcatccggaaggcacacttgattacacatcaaataattcatactggagagaaaccttataaatgtggtcactgtgggaaattgtttacttccaagtcacaactccatgttcataaacgaattcacacaggagaaaagccctatgtatgcaataaatgtgggaaggcattcaccaaccggtcaaatctcattacacatcagaaaactcatacaggagagaaatcttatatatgttccaaatgtggaaaggccttcacccagaggtcagacttgattacacatcagagaatccatactggggagaagccttatgaatgcaatacttgtggaaaagcctttactcagaagtcaaatcttaatatacatcagaaaattcacactggagagagacagtatgaatgccacgaatgtgggaaagccttcaaccagaaatcaatactcattgttcatcagaaaattcatacaggagagaaaccctatgtatgcactgagtgtggaagagctttcatccgcaagtcaaactttattactcatcaaagaattcatactggagagaagccttatgaatgcagtgactgtgggaagtcctttacctccaagtctcagctcctggtgcatcagccagttcacacaggagagaaaccctatgtgtgtgccgagtgtgggaaagcctttagtggcaggtcaaatctcagtaagcaccagaaaactcataccggagaaaagccctacatttgttctgaatgtgggaagacctttcgacagaagtcagagttgattacacatcacagaattcatactggagagaaaccttatgagtgcagtgactgtgggaagtctttcactaaaaaatcacagctccaagtgcatcagcgaattcacactggagagaagccttacgtgtgtgctgagtgtgggaaggcctttagcaacaggtccaatttgaataaacatcagacaacacacactggagacaaaccctacaagtgtggcatctgtgggaaaggcttcgttcagaaatcagtgttcagtgttcatcagagcagccacgcttgagagaaacagtgtgagaaaacccccctgagggttgggtctgattgtacactgttgcacgcatgcagcagaaaaatatgtatattattgtaaatagaaatgaccacatcagaatgtcacacatggctgttctggagagggcctctgagaaggcactgaatgaggcgagggacccttcctacattgtcaccatccccagtaaaccttgggtcattattcatactgacaaggaaccgagtcaatttggtgaataggaaaagccttctcatgaaaactacaatagaatactgttaccaaattcttcataagaaagatcatattatgggaatgataatcctgtttactgtggattaggtatagtgccaacagtttgaatggtaagacaacataatatatatgatagtgatgaa

SEQ ID NO: 1365 - DNA, 4399 bp, Homo sapiens; identical to SEQ ID NO: 349

SEQ ID NO: 1366 - DNA, 2280 bp, Homo sapiens
gcggcagaggcggtgtccaggcttccgggcgggtagtccttcggctccggagccgcgactgcgctcgcctaggtggtgggcggggagggaaggaagggagcgggcgcaaggcggcggcggcggctgcgggtgaggaacttgttgcgcccgcggctgcgcggtgcccctccctccgctccagttcgtcggggcgggcgcggcggcggcggcgaaggaggagcgcggccggggcgatgcggcgctacctgcgcgtcgtggtgctgtgtgtggcctgcggcttctgctcgctcctttacgctttcagccagctcgccgtgtccctggaagaaggaacgggcggcggtggcgggaagccgcaggccgcggtggcttcctggctcgcgggcggcggacgcggcgccgtgagaggcgccggcgtcgcgggccccgcagcgcatcccggcgtgtcggacaggtgtaaagatttctctctgtgttactggaatccctattggatgctgccctctgatgtttgtggaatgaactgcttttgggaagcggcttttaggtacagtctgaaaatacagcctgttgagaaaatgcatctagctgtagttgcctgtggtgaaagactggaagaaactatgaccatgttgaagtcagctatcattttcagcatcaaacctcttcaattccatatttttgctgaagatcagctacatcatagctttaaaggcagacttgacaactggtcatttctacaaacatttaattatacgttataccccataacctttccaagtgagaatgcagcagagtggaaaaaactctttaaaccatgtgcttcgcagagattgttcttgccgttaatcctgaaagaagttgactcactattgtatgtcgacactgatatcctttttttacgaccagttgatgatatttggtctttactaaagaaatttaattccacacaaattgctgcaatggcaccagaacatgaggaacctcgaataggatggtataatcgctttgctaggcatccatattatggaaaaactggagtaaactctggagttatgttgatgaacatgactcgaatgagaaggaagtatttcaagaatgatatgacaactgtacgactacaatggggagatatacttatgccattgcttaaaaaatacaaactaaacatcacatggggtgatcaagatctattgaatatcgtgttttttcataatccagaaagcctttttgtttttccgtgtcaatggaattatcgaccagatcattgtatatatggaagcaattgccaagaagcagaagaaggaggaatctttattcttcatgggaacagaggtgtttaccatgacgataagcaaccagcatttagagctgtttatgaagcactgagaaattgttcttttgaagatgacaacatccgttccttattaaaacctttagaactggaactacaaaaaacagtgcatacatactgtggaaaaatttacaaaatatttatcaaacaactagcaaaaagtgtaagagatcgttatgccagatcaccaaaggaaaagtgattcttggtgactgcttaatcaaatggatgaaaacaaagaatcagaagataagtgtgaaggaatcgtcttggatgaagtattcaggaaggaattactcatctccagaataattttttttttcctaaagaagttaagtaagcagtattttcaggtaatgaagaataagttaaaatcttgggcctcaacattgaacattttttatctctgatgttttgtaatgttacttgctatcattccagtattgatgaaaatactattgaatgggtttaacctgcagacttctgttgactcatactctcaagagtggtaggggtgtgtagatggagaaaatgtacctcaaacagtgccaacactcaagactgtgagtagagcaataattttatgtcagcactaacctcactttaaaagtgtgagaaaaaagtttgtttacaggagcagaaacaggtctgttgtttctgaagaaatgtgatgtaactgatgtaaccattgacaatctatgtgtgcctttatacatttcatctctgttttaaaatatttttatgacaatcatgtttaaaattatttttagattacaagtaagctgcatgttaaaaattgagctgtgtaaggtagaggaaaaatagtgaaaactttgggattttaatctgtgtgtgcgtgtttgtgtgtgagagagagtgagaaatgtagtgtttcattttgtatgcattaaactgtcttgccaaaa

SEQ ID NO: 1367 - DNA, 5497 bp, Homo sapiens; identical to SEQ ID NO: 901

SEQ ID NO: 1368 - DNA, 4673 bp, Homo sapiens; identical to SEQ ID NO: 320

SEQ ID NO: 1369 - DNA, 2169 bp, Homo sapiens; identical to SEQ ID NO: 927

SEQ ID NO: 1370 - DNA, 68 bp, Homo sapiens
actcttttagtataaatagtaccgttaacttccaattaactagttttgacaacattcaaaaaagagta

SEQ ID NO: 1371 - DNA, 2623 bp, Homo sapiens
tttgtgtggactgagtgttttggccatcccggtccactctcacaggctccgttaagtgacatgaactctcaggaggactgagccagaagcggacagggcaagacgagctgtgcttgaaggaagaggggcagaaaatcgagggtcagggactgagaagctactccggtttagaaaccccagagacacccgtgtagatgggtacatcacggcttctctcccacgttaagacttaataaagaaagcctgatctttgaccagatggcagtaacatttgaagatgtgactattatttttacatgggaggagtggaaattcctggattcttctcaaaaaagactctacagggaggtcatgtgggagaactacacaaatgtcatgtcagtagaaaactggaatgagagctacaaatcccaagaagaaaaattcagatacttagaatatgaaaatttttcctactggcaaggctggtggaatgctggcgcccagatgtatgagaatcagaactatggggaaactgttcaagggacagattccaaagacctcacacagcaagatcgttcccagtgtcaggaatggttaatactctccacacaagtaccagggtatgggaactatgaactgacttttgaaagcaaaagtctcaggaacttaaaatataaaaattttatgccttggcagtccttagaaacaaaaaccactcaagactatggtagagaaatctacatgagtggttcacatggttttcaagggggcagataccgtcttggcatatccaggaaaaacctctccatggaaaaagaacagaagctcatagttcagcattcttatatcccagtggaggaagcccttccacagtatgttggggtgatatgtcaagaagacctactgagagattcaatggaagaaaagtactgtggatgtaataaatgtaaaggaatttattattggaactcacggtgtgttttccacaagagaaatcaacctggagaaaacctctgtcaatgctccatctgtaaagcatgcttctctcagagatcagacttgtatagacatccaagaaaccacataggtaagaagctgtacggatgtgatgaagttgacggtaactttcatcagagctccggagttcactttcatcagagagttcacataggggaggtaccttatagctgtaatgcatgtggtaagagcttcagccagatctctagtcttcacaatcatcaaagagtccacacagaagagaaattctataaaattgagtgtgataaagacctcagtagaaattcattacttcacattcaccagagacttcacataggagagaagccttttaaatgtaatcagtgtggtaagagttttaatcggagttcagtacttcatgttcatcagagagtccacacaggagaaaaaccatataagtgtgatgagtgtggtaagggtttcagccagagctcaaatcttcgaattcatcagttagtacacacaggagagaagtcttataaatgtgaagactgtggtaaaggctttacccagcgctcaaatcttcaaattcatcagagagtgcatacaggagagaaaccttataaatgtgatgactgtggaaaggactttagtcacagctcagatcttcgcattcatcagagagtccatacaggggagaaaccctatacttgtcctgaatgtgggaagggcttcagtaagagttcaaagcttcacactcatcaaagagtacatactggagagaaaccctacaaatgtgaagagtgtggcaagggattcagtcagcgttcacatcttctcattcatcagagagtccatacaggagaaaagccctataaatgtcatgattgtggaaagggttttagtcacagttctaatcttcacattcatcagagggtccatacaggagagaagccttatcaatgtgctaagtgtggtaaaggtttcagtcatagctcagctcttcgaattcatcaaagagtccatgcaggagagaaaccttacaaatgccgtgaatattataagggatttgatcataattcacatcttcacaataatcatagaagaggaaacttataaatattgttcatttagttaacagctttaatcaaagtttacctaacctttaaaccctataaatcctgctgttaaggaaatcttataaataacacaagtaatcccaagcaacatttatagtttcccctatctcccactaagaattatttgcttcaaaaggagatctttagaaaaaaccctatatatttaaaattatagtgtatttttctttacctactataaatataatacagtcataaatatattaaacatttaaggagaaaactcttcattctatttcattctagtctttttttctgtgcattttaatgtgcatgaaattgtgtgttcaattttgtattttcactgtcttcaaaatatttacttaaattttggtttgaattgaaactggttggccaactgttaaacgacatctcttaactcccctaaaaactccctaggaagtaacagaaaagatggaaacacatagaacttaaaactcagttttggccggtagaattcaattgtttatggacaaaagccacctaataaaagataggaaagcatt

SEQ ID NO: 1372 - DNA, 1079 bp, Homo sapiens
tggagctccggttttcagcctctttccgggctacctggtagcaatttgaggctctgtcatcagtttctgctacgtttcaaagatcctggagaagcctagtgttgtgtcaagacgccgatggacccatcacagtttaatccaacctacatcccagggtctccacaaatgctcaccgaagaaaattcccgggacgattcaggggcctctcaaatctcctccgagacgttgataaagaaccttagtaacttgactatcaacgctagtagcgaatctgtttcccctctatcggaagctttactccgtcgagagtctgtaggagcagcagtcctcagggaaatcgaagatgagtggctttacagcaggagaggagtaagaacattgctgtctgtgcagagagaaaagatggcaagattgagatacatgttactcggcggagttcgtacgcatgaaagaagaccaacaaacaaggagcctaagggagttaagaaggaatcaagaccattcaaatgtccctgcagtttctgcgtgtctaatggatgggatccttctgagaatgctagaatagggaatcaagacaccaagccacttcagccataaatcttattcttgcacctttttttcttggtagtaattttatatagcaggttgagaaagctactctatgctagtatagactatacaccaataattttgataatgagttctaggatgtatttttcttgtatctttttcttcctactatgatactagtaattcataagggatctgtgtaatctgaatgtatttgaataactttagctctactgtttgatttgacccaaagaagccaagatgatataagtattcccatgtgtcttagaagcccaaagtcagtgagatgaaacccaacatcaagaaattgaagcaaagttacttatggataaagaaagcattaggtagttgggctatagcataattagattttctggctttcaaaaatttggattgcaatcacagcaaactttgttatttttacagttttcagtacaaaagtgtttatatagaaacaataaagttgacatttgagtaccttttaaaaa

SEQ ID NO: 1373 - DNA, 3933 bp, Homo sapiens
agcaatcctttctttcagctggagtgctcctcaggagccagccccacccttagaaaagatgttttccatgaggatcgtctgcctggtcctaagtgtggtgggcacagcatggactgcagatagtggtgaaggtgactttctagctgaaggaggaggcgtgcgtggcccaagggttgtggaaagacatcaatctgcctgcaaagattcagactggcccttctgctctgatgaagactggaactacaaatgcccttctggctgcaggatgaaagggttgattgatgaagtcaatcaagattttacaaacagaataaataagctcaaaaattcactatttgaatatcagaagaacaataaggattctcattcgttgaccactaatataatggaaattttgagaggcgatttttcctcagccaataaccgtgataatacctacaaccgagtgtcagaggatctgagaagcagaattgaagtcctgaagcgcaaagtcatagaaaaagtacagcatatccagcttctgcagaaaaatgttagagctcagttggttgatatgaaacgactggaggtggacattgatattaagatccgatcttgtcgagggtcatgcagtagggctttagctcgtgaagtagatctgaaggactatgaagatcagcagaagcaacttgaacaggtcattgccaaagacttacttccctctagagataggcaacacttaccactgataaaaatgaaaccagttccagacttggttcccggaaattttaagagccagcttcagaaggtacccccagagtggaaggcattaacagacatgccgcagatgagaatggagttagagagacctggtggaaatgagattactcgaggaggctccacctcttatggaaccggatcagagacggaaagccccaggaaccctagcagtgctggaagctggaactctgggagctctggacctggaagtactggaaaccgaaaccctgggagctctgggactggagggactgcaacctggaaacctgggagctctggacctggaagtactggaagctggaactctgggagctctggaactggaagtactggaaaccaaaaccctgggagccctagacctggtagtaccggaacctggaatcctggcagctctgaacgcggaagtgctgggcactggacctctgagagctctgtatctggtagtactggacaatggcactctgaatctggaagttttaggccagatagcccaggctctgggaacgcgaggcctaacaacccagactggggcacatttgaagaggtgtcaggaaatgtaagtccagggacaaggagagagtaccacacagaaaaactggtcacttctaaaggagataaagagctcaggactggtaaagagaaggtcacctctggtagcacaaccaccacgcgtcgttcatgctctaaaaccgttactaagactgttattggtcctgatggtcacaaagaagttaccaaagaagtggtgacctccgaagatggttctgactgtcccgaggcaatggatttaggcacattgtctggcataggtactctggatgggttccgccataggcaccctgatgaagctgccttcttcgacactgcctcaactggaaaaacattcccaggtttcttctcacctatgttaggagagtttgtcagtgagactgagtctaggggctcagaatctggcatcttcacaaatacaaaggaatccagttctcatcaccctgggatagctgaattcccttcccgtggtaaatcttcaagttacagcaaacaatttactagtagcacgagttacaacagaggagactccacatttgaaagcaagagctataaaatggcagatgaggccggaagtgaagccgatcatgaaggaacacatagcaccaagagaggccatgctaaatctcgccctgtcagaggtatccacacttctcctttggggaagccttccctgtccccctagactaagttaaatatttctgcacagtgttcccatggccccttgcatttccttcttaactctctgttacacgtcattgaaactacacttttttggtctgtttttgtgctagactgtaagttccttgggggcagggcctttgtctgtctcatctctgtattcccaaatgcctaacagtacagagccatgactcaataaatacatgttaaatggatgaatgaattcctctgaaactctactgtgatgatgtcctccaaacacatccttcaggtacccaaagtggcattttcaatatcaagctaccgggatccagtaagattttttctgtttattgcgatcaagagaccagtttgggaggatggcttttgatccagcaaagaatggatggatcactgaattttaaccggacctggcaagactacaagagaggtttcggcagcctgaatgacgagggggaaggagaattctggctaggcaatgactacctccacttactaacccaaaggggctctgttcttagggttgaattagaggactgggctgggaatgaagcttatgcagaatatcacttccgggtaggctctgaggctgaaggctatgccctccaagtctcctcctatgaaggcactgcgggtgatgctctgattgagggttccgtagaggaaggggcagagtacacctctcacaacaacatgcagttcagcacctttgacagggatgcagaccagtgggaagagaactgtgcagaagtctatgggggaggctggtggtataataactgccaagcagccaatctcaatggaatctactaccctgggggctcctatgacccaaggaataacagtccttatgagattgagaatggagtggtctgggtttcctttagaggggcagattattccctcagggctgttcgcatgaaaattaggccccttgtgacccaataggctgaagaagtgggaatgggagcactctgtcttctttgctagagaagtggagagaaaatacaaaaggtaaagcagttgagattctctacaacctaaaaaattcctaggtgctattttcttatcctttgtactgtagctaaatgtacctgagacatattagtctttgaaaaataaagttatgtaaggttttttttatctttaaatagctctgtgggttttaacatttttataaagatataccaagggccattcagtacatcaggaaagtggcagacagaagcttctctctgcaaccttgaagactattggtttgagaacttctcttcccataccacccaaaatcataatgccattggaaagcaaaaagttgttttatccatttgatttgaattgttttaagccaatattttaaggtaaaactcactgaatctaaccatagctgacctttgtagtagaatttacaacttataattacaatgcacaatttataattacaatatgtatttatgtcttttgctatggagcaaatccaggaaggcaagagaaacattctttcctaaatataaatgaaaatctatcctttaaactcttccactagacgttgtaatgcacacttatttttttcccaaggagtaaccaatttctttctaaaacacatttaaaattttaaaactatttatgaatattaaaaaaagacataattcacacattaataaacaatctcccaagtattgatttaacttcatttttctaataatcataaactatattctgtgacatgctaattattattaaatgtaagtcgttagttcgaaagcctctcactaagtatgatctatgctatattcaaaattcaacccatttactttggtcaatatttgatctaagttgcatctttaatcctggtggtcttgccttctgatttttaatttgtatccttttctattaagatatatttgtcattttctcttgaatatgtattaaaatatcccaagc

SEQ ID NO: 1374 - DNA, 4508 bp, Homo sapiens
atcccgcccgcatacagcccgcatcccgccggggaagcgagcccagtccagcgctgcccgtccagtcctcgcccaagatttaaagcccgcaagttttgttcttgagaccagcgactttagctccgatgcgggaaggaaagccgacctccgatttggacatttaaagagctgggcttgaacttcgtgagtttcgctctaaactgcccttgaaatgaagctggacttggagtgcacccacagcagtctgttgtggatggttgctgagctgcgcattcggcattgggcttgctttgtttcctgccaggcccagcattttcttctaccagatcggcaggcttgtgggcttcttcctaggtccctcccctgcactctgaataggaaagctggaagctgtgctttagagaagctttaagacgccgaaagaaaccagaagagtgagcgccagttgtataaaaataaacagccgtatgcctctgctaagtactaactacctcatcaccttttgtgcagacagggcaggttacatttggttttaaggaattaggaatatgtttctttccagcaccttagtaacccacgcgattgtgattcttttctcttcttgactgtgataggtggcatggaatattcacatgggagagccgcatgaggccgcccaccacgcttcctgaaggatgcccgtgtggaagaattttgacgtgccagtgtcctcgttctacagggtgttccattcttccgcaatctcagaaaaatgggactaaaagaaactattttgtaaaataagaagacttccatttttaatgaccaacatgtattaagatggacacctactctacgaaacacgaagttctatggtctcgaagaagcccgtgcctgtttaaaactgatcctaactaaaaacagacttgagtggatatgagaatgttggttagtggcagaagagtcaaaaaatggcagttaattattcagttatttgctacttgttttttagcgagcctcatgtttttttgggaaccaatcgataatcacattgtgagccatatgaagtcatattcttacagatacctcataaatagctatgactttgtgaatgataccctgtctcttaagcacacctcagcggggcctcgctaccaatacttgattaaccacaaggaaaagtgtcaagctcaagacgtcctccttttactgtttgtaaaaactgctcctgaaaactatgatcgacgttccggaattagaaggacgtggggcaatgaaaattatgttcggtctcagctgaatgccaacatcaaaactctgtttgccttaggaactcctaatccactggagggagaagaactacaaagaaaactggcttgggaagatcaaaggtacaatgatataattcagcaagactttgttgattctttctacaatcttactctgaaattacttatgcagttcagttgggcaaatacctattgtccacatgccaaatttcttatgactgctgatgatgacatatttattcacatgccaaatctgattgagtaccttcaaagtttagaacaaattggtgttcaagacttttggattggtcgtgttcatcgtggtgcccctcccattagagataaaagcagcaaatactacgtgtcctatgaaatgtaccagtggccagcttaccctgactacacagccggagctgcctatgtaatctccggtgatgtagctgccaaagtctatgaggcatcacagacactaaattcaagtctttacatagacgatgtgttcatgggcctctgtgccaataaaatagggatagtaccgcaggaccatgtgtttttttctggagagggtaaaactccttatcatccctgcatctatgaaaaaatgatgacatctcatggacacttagaagatctccaggacctttggaagaatgctacagatcctaaagtaaaaaccatttccaaaggtttttttggtcaaatatactgcagattaatgaagataattctcctttgtaaaattagctatgtggacacatacccttgtagggctgcgtttatctaatagtacttgaatgttgtatgttttcactgtcactgagtcaaacctggatgaaaaaaacctttaaatgttcgtctataccctaagtaaaatgaggacgaaagacaaatattttgaaagcctagtccatcagaatgtttctttgattctagaagctgtttaatatcacttatctacttcattgcctaagttcatttcaaagaatttgtatttagaaaaggtttatattattagtgaaaacaaaactaaagggaagttcaagttctcatgtaatgccacatatatacttgaggtgtagagatgttattaagaagttttgatgttagaataattgcttttggaaaataccaaatgaacgtacagtacaacatttcaaggaaatgaatatattgttagaccaggtaagcaagtttatttttgttaaagagcacttggtggaggtagtaggggcagggaaaggtcagcataggagagaaagttcatgaatctggtaaaacagtctcttgttcttaagaggagatgtagaaaaatgtgtacaatgttattataaacagacaaatcacgtcttaccacatccatgtagctactggtgttagagtcattaaaatacctttttttgcatcttttttcaaagtttaatgtgaacttttagaaaagtgattaatgttgccctaatactttatatgtttttaatggatttttttttaagtattagaaaatgacacataacacgggcagctggttgctcatagggtccttctctagggagaaaccattgttaattcaaataagctgattttaatgacgttttcaactggtttttaaatattcaatattggtctgtgtttaagtttgttatttgaatgtaatttacatagaggaatataataatggagagacttcaaatggaaagacagaacattacaagcctaatgtctccataattttataaaatgaaatcttagtgtctaaatccttgtactgattactaaaattaacccactcctccccaacaaggtcttataaaccacagcactttgttccaagttcagagttttaaattgagagcattaaacatcaaagttataatatctaaaacaatttatttttcatcaataactgtcagaggtgatctttattttctaaatatttcaaacttgaaaacagagtaaaaaagtgatagaaaagttgccagtttggggttaaagcatttttaaagctgcatgttccttgtaatcaaagagatgtgtctgagatctaatagagtaagttacatttattttacaaagcaggataaaaatgtggctataatacacactacctcccttcactacagaaagaactaggtggtgtctactgctagggagattatatgaaggccaaaataatgacttcagcaagagtgactgaactcactctaaggcctttgactgcagaggcacctgttagggaaaatcagatgtctcatataataaggtgatgtcggaaacacgcaaaacaaaacgaaaaaagatttctcagtatacacaactgaatgatgatacttacaatttttagcaggtagctttttaatgtttacagaaattttaatttttttctattttgaaatttgaggcttgtttacattgcttagataatttagaatttttaactaatgtcaaaactacagtgtcaaacattctaggttgtagttactttcagagtagatacagggttttagatcattacagtttaagttttctgaccaattaaaaaaacatagagaacaaaagcatatttgaccaagcaacaagcttataattaatttttattagttgattgattaatgatgtattgccttttgcccatatataccctgtgtatctatacttggaagtgtttaaggttgccattggttgaaaacataagtgtctctggccatcaaagtgatcttgtttacagcagtgcttttgtgaaacaattatttatttgctgaaagagctcttctgaactgtgtccttttaatttttgcttagaatagaatggaacaagtttaaatttcaaggaaatatgaaggcacttcctttttttctaagaaggaagttgctagatgattccttcatcacacttacttaaagtactgagaagagtatctgtaaataaaagggttccaaccttttaaaaaagaaggaaaaaactttttggtgctccagtgtagggctatctttttaaaaaatgtcaacaaagggaaaataaactatcagcttggatggtcacttgaatagaagatggttatacacagtgttattgttaaaatttttttaccttttggttggtttgcatcttttttccatattgttaattttataccaaaatgttaaatatttgtattacttgaattttgctcttgtatggcaaaataattagtgagtttaaaaaaaatctatagtttccaataaacaactgaaaaattatcatga

SEQ ID NO: 1375 - DNA, 8558 bp, Homo sapiens
attagaaacaaattttggtcggtgctccctgggctgctggtcttctttaccttccagctgctcacagaacagagagtttctacatacaagcagaagatgtgaaaatattgggaataaataaagtatatgcttataaacaaatggaactatctcctgagtgctgcaagttgtaacgggcaccgctgagcctgtttccctttggagcacttcttatctagaagcagtgtttagtttcttccaaactgggccacttcgtccacctactctgttctgagtaaggaaacagcctccaagcatcagcagagcccagatgagcacgggccgcggagccgcttagcagtctcccgggacccagctccggaggagccgcaagcatgcaccctgggttgtggctgctcctggttacgttgtgcctgaccgaggaactggcagcagcgggagagaagtcttatggaaagccatgtgggggccaggactgcagtgggagctgtcagtgttttcctgagaaaggagcgagacacaacttgcagctactgaatgatatggctggccggctctaccatttcagtgaggttctgcctaatctcttttgattctaaggggtaatgtggctcagccacagcaaggaggctgagttctgatgttctctttccccatacttctatggaagactggaagacagattacttgcagtgatttctggaggcagaagataagcaagtggcctctatgatggtagaaccaagaaagaatgatcattgcccttaagccttcagagatgacagctaaatccagagggaaaataaatagggataagattgtaaaaaaagttgctgctggagaaaaaatagctgctgctgataaagaacctcaataaattcaaacaatgtctgcgtttggccctcaaatgtcatgctggctcattgctcgggagaaagagccgtacaactaccatgtcagaggagatgaggaagcaaagaagtctgactaagggcactgccatggatattcttgcccctgctttggaacaatctatcattggattgtggagaggaagcaaggaggcagctggcagtgtgacaccacgtgctatgactcatgactgttttgcctgatggttggcaacatagtattggcacagttgtgggctctagagtacctgggcctgaatctctattgatatgtgccatttggcaaatttctaaactctaagtcttagctgtctcatatacaaaatgggcataatacatcctccctcatatggttgttgtgaggattaataaaacagtgtttataaagtgcttggcacagtgctgaacacatagcagtaaataaatattagtcattattaatattagctgatgcacatttgggggcaatttcaagaaagaattgattacaatagtaaattcagactatggcatctattgattgttcctttttaaatgaaccattttaaatacagtaaaagccctcctccctggcctctgcttaacttcctttatggagtaagtcgatgtttttccttcctattggaatatacactggccaatgctcagggcacaatggaagctcatgggcaggtaagttacttctggtgaacacttatatttctgcttccacacaacaagttgatcacttaccaaaagttagctgtgtttttgccaagcccatttatggcagttgtactcgttattacaagtaggtaatttaatgtaaatttgtgaaatatgagtataaaaagaaaactattattttcatgaaaactaagttcaatgctttggaaagacttactaaagaaaagttgcttttgaaaactgccatattgttaaaaataaaacaaaactgaaagtggaaatcaaatgtgatgcattaggaatgtaacttacgtgaaaaagagtctgtgaaatcccagggtgtggcctcacgctcaaagaaaaggccttggccttacaacacatcaccagagtggtgaatgaatgtacctttgtgtgttttaggttgaaataaaatgttttatgtatgtataggacgacctggaccaattggaattcaaggcccaacaggtcctcaaggattcactggctctactggtttatcgggattgaaaggagaaaggggtttcccaggccttctgggaccttatggaccaaaaggagataagaagttctccatcccagttctgctcatttatgattctcgccctggtcccatgggagttcctggctttcttggcatcaatgggattccgggccaccctggacaaccaggccccagaggcccacctggtctggatggctgtaatggaactcaaggagctgttggatttccaggccctgatggctatcctgggcttctcggaccacccgggcttcctggtcagaaaggatcaaaaggtgaccctgtccttgctccaggtagtttcaaaggaatgaagggggatcctgggctgcctggactggatggaatcactgcatttattccactgtttgaatctatcagaggcccacaaggagcacccggatttcctggagctgtaggacctgcaggaccaccaggattacaacaagggcaacctccattcttggaggggtcctccagggcctcctggtcctcttggtcctgatgggaatatggggctaggttttcaaggagagaaaggagtcaagttttgtttcctcattggcatgagggtgaagaggccaaagtaagagacagtttatttggggatgttggcctccctggcccagcaggacctccaccatctactggagagctggaattcatgggattccccaaagggaagaaaggatccaagggtgaaccagggcctaagggttttccaggcataagtggccctccaggcttcccgggccttggaactactggagaaaagggagaaaagggagaaaagggaatccctggtttgccaggacctaggggtcccatgggttcagaaggagtccaaggccctccagggcaacagactctcttatgctctcatactttccacttagtggtaactatgtttctgtcacagggcaagaaagggaccctgggatttcctgggcttaatggattccaaggaattgagggtcaaaagggtgacattggcctgccaggcccagatgttttcatcgatatagatggtgctgtgatctcaggtaatcctggagatcctggtgtacctggcctcccaggccttaaaggagatgaaggcatccaaggcctacgtggcccttctggtgtccctggattgccagcattatcaggtgtcccaggagccctagggcctcagggatttccagggctgaagggggaccaaggaaacccaggccgtaccacaattggagcagctggcctccctggcagagatggtttgccaggcccaccaggtccaccaggcccacctagtccagaatttgagactgaaactctacacaacaaagagtcagggttccctggtctccgaggagaacaaggtccaaaaggaaacctaggcctcaaaggaataaaaggagactcaggtttctgtgcttgtgacggtggtgttcccaacactggaccacccggggaaccaggcccacctggtccatggggtctcataggccttccaggccttaaaggagccagaggagatcgaggctctgggggtgcacagggcccagcaggggctccaggcttagttgggcctctgggtccttcaggacccaaaggaaagaagggggaaccaattctcagtacaatccaaggaatgccaggagatcggggtgattctggctcccagggcttccgtggtgtaataggagaaccaggcaaggacggagtaccaggtttaccaggtctgccaggccttccgggtgatggtggacagggcttcccaggtgaaaaggggttacctggacttcctggtgaaaaaggccatcctggtccacctggcctcccaggaaatgggttaccaggacttcctggaccccgtgggcttcctggagataaaggcaaggatggattaccgggacaacaaggccttcccggatctaagggaatcaccctgccctgtattattcctgggtcatacggtccatcaggatttccaggcactcccggattcccaggccctaaagggtctcgaggcctccctgggaccccaggccagcctgggtcaagtggaagtaaaggagagccagggagtccaggattggttcatcttcctgaattaccaggatttcctggacctcgtggggagaagggcttgcctgggtttcctgggctccctggaaaagatggcttgcctgggatgattggcagtccaggcttacctggttccaagggagccactggtgacatctttggtgctgaaaatggtgctccgggggaacaaggcctacaaggattaacagggcacaaaggatttcttggagactctggccttccaggactcaagggtgtgcacgggaagcctggcttactaggccccaaaggtgagcggggcagccctgggacaccaggacaggtgggacagccaggcaccccaggatctagtggtccatatggcatcaagggcaaatctgggctcccaggagcaccaggcttcccaggcatctcaggacatcctggaaagaaaggaacaagaggcaagaaaggtcctcctggatcaattgtaaagaaagggctgccagggctaaaaggccttcctggaaatccaggcctagtaggactgaaaggaagcccaggctctccaggggtcgctgggttgccagccctctctggacccaagggagagaaggggtctgttggattcgtaggttttccaggaataccaggtctgcctggtattcctggaacaagaggattaaaaggaattccaggatcaactggaaaaatgggaccatctggacgtgctggtactcctggtgaaaagggagacagaggcaatccggggccagtcggaatacctagtccaagacgtccaatgtcaaacctttggctcaaaggagacaaaggctctcaaggctcagccggatccaatggatttcctgggccaagaggtgacaaaggagaggctggtcgacctggaccaccaggcctacctggagctcctggcctcccaggcattatcaaaggagttagtggaaagccagggccccctggcttcatgggaatccggggcttacctggcctgaaggggtcctctgggatcacaggtttcccaggaatgccaggagaaagtggttcacaaggtatcagagggtcgcctggactcccaggagcatctggtctcccaggcctgaaaggagacaacggccagacagttgaaatttccggtagcccaggacccaagggacagcctggcgaatctggttttaaaggcacaaaaggaagagatggactaataggcaatataggcttccctggaaacaaaggtgaagatggaaaagttggtgtttctggagatgttggccttcctggagctccaggatttccaggagttgccggcatgagaggagaaccaggacttccaggttcttctggtcaccaaggggcaattgggcctctaggatcccccggattaataggacccaaaggcttccctggatttcctggtttacatggactgaatgggcttccgggcaccaagggtacccatggcactccaggacctagtatcaccggtgtgcctgggcctgctggtctccctggacccaaaggagaaaaaggatatccaggaattggcatcggagctccagggaagccgggcctgagagggcaaaaaggtgatcgaggtttcccaggtctccagggccctgctggtctccccggtgccccaggcatctccttgccctcactcatagcaggacagcctggtgaccccgggcgaccaggcctagatggagaacgaggccgcccaggccccgctggacccccaggtccccctgggccatcctcgaatcaaggcgacaccggagaccctggcttccctggaattcctggacctaaagggcctaagggagaccaaggaattccaggtttttctggcctccctggagagctaggactgaaaggcatgagaggtgagcctggcttcatggggactccaggcaaggttgggccacctggagacccaggatttcccggaatgaaggggaaggcagggccaagaggctcttctggcctccaaggtgatcctggacaaacaccaactgcagaagctgtccaggttcctcctggacccttgggtctaccagggatcgatggcatccctggcctcactggggaccctggggctcaaggccctgtaggcctacaaggctccaaaggtttacctggcatccccggtaaagatggccccagtgggctcccaggcccacctggggctcttggtgatcctggtctgcctggactgcaaggccctccaggatttgaaggagctccagggcagcaaggccccttcgggatgcctggaatgcctggccagagcatgagagtgggctacacgttggtaaagcacagccagtcggaacaggtgcccccgtgtcccatcgggatgagccagctgtgggtggggtacagcttactgtttgtggaggggcaagagaaagcccacaaccaggacctgggctttgctggctcctgtctgccccgcttcagcaccatgcccttcatctactgcaacatcaacgaggtgtgccactatgccaggcgcaatgataaatcttactggctctccactaccgcccctatccccatgatgcccgtcagccagacccagattccccagtacatcagccgctgctctgtgtgtgaggcaccctcgcaagccattgctgtgcacagccaggacatcaccatcccgcagtgccccctgggctggcgcagcctctggattgggtactctttcctcatgcacactgccgctggtgccgagggtggaggccagtccctggtctcacctggctcctgcctagaggactttcgggccactcctttcatcgaatgcagtggtgcccgaggcacctgccactactttgcaaacaagtacagtttctggttgaccacagtggaggagaggcagcagtttggggagttgcctgtgtctgaaacgctgaaagctgggcagctccacactcgagtcagtcgctgccaggtgtgtatgaaaagcctgtagggtggcacctgccactctgccccttgccctcccctgcccctcacaacagtcacctcacaaacctgaatggtctgaagaaggaaggcctgagcccctttgcctgtcaagttgtacattggagtctcatttgggctagactaccggacactcgtcaccccagccctcgggtccatagagatgagcccaccctgctgagatctgctgtcctgtttctgtcaagctggtgctactgtttgatttggatgattgtgtgactattcatggctacctcagaaagatttgatgggccacaactgtcttagactgctagctttctccttaccgtcttgatcggaaagctcttcctaatcgctaatcagtcatttcttcatgtacagaggtcagcacacattatttggcttaaaccagaacccagtgtttccacacttaaattctctaaccgaatattcatggatggctcaagtctgcacagagcaagtcctcactcttcaaggaggcccactgtgtctaggcaggcaagagaattgaaatgaggtgccacccagtagcccagagtgagctttagctctctctagaatgagcaagactgggccccacatggcttagagaggcttgaaggccagcagctgggttgggggtggtggtcattaatggcatatggtcctagacaaaccatctcctccttgccggctccccctccagccagagacagaggatgtggcctggttcaaagtaaagcagaggatgcaacaaatgtggccaagcctatcaaaggaaatgagaatgacagccttttttcctgggccagaagtagaggggtgggtgcgtaaggatgtgtgagttttgcttttgactccaggaacaaaaaggtaaatcccacatcccagtttctcagaagtccctgtttattccaaatgccatccagatgtgtgcaatgtggcaaactgaagctgcacagtgttggtttccttgtattctgaggatgttaaagactttgttaaatggttatccaattgctctttcacaggtagcctattaaactattttaatatgtttttttaaacctcataaaaatctagcacactcttctcttgagcagttagcagacctaaagcaagcctgaattggctatgcagtacattgtattctgtttgggggaatttgttttagccattttctttaattaccagttttccagaacactcttagctatgttgacatgaggcagttccttccaggtgattctgtttccttaagtattatataaactgtgccaatacagacaaagcataatcaatataatctgaattattgttatctttacctcctgagtaataagcatggtgtcagttttgtacatagcaaataaaataaatgaaatctgaacatgtga

SEQ ID NO: 1376 - DNA, 4866 bp, Homo sapiens; identical to SEQ ID NO: 275

SEQ ID NO: 1377 - DNA, 9713 bp, Homo sapiens; identical to SEQ ID NO: 283

SEQ ID NO: 1378 - DNA, 3312 bp, Homo sapiens
ggcagcctatgacatcagacaggaacgcctgggatgccgcgctgctcctggccaacctccgaggaggaggagggtcccgccggctaagagttaattagccccgcacggcgaggggggaggcgccagttttctggggacactggctgccactgtactcctacccaggggagctcacggagagttggatgaattctgggttgttagctgcggtcagctgggctcccgggagcctgttgctggtggagaacagggggcgcctggccaagggaccagcggcttgctgagactcaacatgacactcctggggtctgagcattccttgctgattaggagcaagttcagatcagttttacagttaagacttcaacaaagaaggacccaggaacaactggctaaccaaggcataataccaccactgaaacgtccagctgaattccatgagcaaagaaaacatttggatagtgacaaggctaaaaattccctgaagcgcaaagccagaaacaggtgcaacagtgccgacttggttaatatgcacatactccaagcttccactgcagagaggtccattccaactgctcagatgaagctgaaaagagcccgactcgccgatgatctcaatgaaaaaattgctctacgaccagggccactggagctggtggaaaaaaacattcttcctgtggattctgctgtgaaagaggccataaaaggtaaccaggtgagtttctccaaatccacggatgcttttgcctttgaagaggacagcagcagcgatgggctttctccggatcagactcgaagtgaagacccccaaaactcagcgggatccccgccagacgctaaagcctcagataccccttcgacaggttctctggggacaaaccaggatcttgcttctggctcagaaaatgacagaaatgactcagcctcacagcccagccaccagtcagatgcggggaagcaggggcttggcccccccagcacccccatagccgtgcatgctgctgtaaagtccaaatccttgggtgacagtaagaaccgccacaaaaagcccaaggaccccaagccaaaggtgaagaagcttaaatatcaccagtacattcccccagaccagaaggcagagaagtcccctccacctatggactcagcctacgctcggctgctccagcaacagcagctgttcctgcagctccaaatcctcagccagcagcagcagcagcagcaacaccgattcagctacctagggatgcaccaagctcagcttaaggaaccaaatgaacagatggtcagaaatccaaactcttcttcaacgccactgagcaatacccccttgtctcctgtcaaaaacagtttttctggacaaactggtgtctcttctttcaaaccaggcccactcccacctaacctggatgatctgaaggtctctgaattaagacaacagcttcgaattcggggcttgcctgtgtcaggcaccaaaacggctctcatggaccggcttcgacccttccaggactgctctggcaacccagtgccgaactttggggatataacgactgtcacttttcctgtcacacccaacacgctgcccaattaccagtcttcctcttctaccagtgccctgtccaacggcttctaccactttggcagcaccagctccagccccccgatctccccagcctcctctgacctgtcagtcgctgggtccctgccggacaccttcaatgatgcctccccctccttcggcctgcacccgtccccagtccacgtgtgcacggaggaaagtctcatgagcagcctgaatgggggctctgttccttctgagctggatgggctggactccgagaaggacaagatgctggtggagaagcagaaggtgatcaatgaactcacctggaaactccagcaagagcagaggcaggtggaggagctgaggatgcagcttcagaagcagaaaaggaataactgttcagagaagaagccgctgcctttcctggctgcctccatcaagcaggaagaggctgtctccagctgtccttttgcatcccaagtacctgtgaaaagacaaagcagcagctcagagtgtcacccaccggcttgtgaagctgctcaactccagcctcttggaaatgctcattgtgtggagtcctcagatcaaaccaatgtactttcttccacatttctcagcccccagtgttcccctcagcattcaccgctgggggctgtgaaaagcccacagcacatcagtttgcccccatcacccaacaaccctcactttctgccctcatcctccggggcccagggagaagggcacagggtctcctcgcccatcagcagccaggtgtgcactgcacagaactcaggagcacacgatggccatcctccaagcttctctccccattcttccagcctccacccgcccttctctggagcccaagcagacagcagtcatggtgccgggggaaacccttgtcccaaaagcccatgtgtacagcaaaagatggctggtttacactcttctgataaggtggggccaaagttttcaattccatccccaactttttctaagtcaagttcagcaatttcagaggtaacacagcctccatcctatgaagatgccgtaaagcagcaaatgacccggagtcagcagatggatgaactcctggacgtgcttattgaaagcggagaaatgccagcagacgctagagaggatcactcatgtcttcaaaaagtcccaaagatacccagatcttcccgaagtccaactgctgtcctcaccaagccctcggcttcctttgaacaagcctcttcaggcagccagatcccctttgatccctatgccaccgacagtgatgagcatcttgaagtcttattaaattcccagagccccctaggaaagatgagtgatgtcacccttctaaaaattgggagcgaagagcctcactttgatgggataatggatggattctctgggaaggctgcagaagacctcttcaatgcacatgagatcttgccaggccccctctctccaatgcagacacagttttcaccctcttctgtggacagcaatgggctgcagttaagcttcactgaatctccctgggaaaccatggagtggctggacctcactccgccaaattccacaccaggctttagcgccctcaccaccagcagccccagcatcttcaacatcgatttcctggatgtcactgatctcaatttgaattcttccatggaccttcacttgcagcagtggtagaatgcccaatgcaccagtgctatggaagaccaatggagttccatgggggaaagcacaca

SEQ ID NO: 1379 - DNA, 2604 bp, Homo sapiens
gctactgcgaggagccggcgcagggtggcccgggaggggtgagcagggtgccgctggctgctggggtctgcaggtcaccgagtccccaggagaggggactcctaagaagccacctgcctgtgtttacccggcagcgagcgcgcaggcccccgcgaactcctggcagcgctcaggaaaggccgttgcgcctcgcgaaggaaacagagccgttgaccatggttgcaactggcagtttgagcagcaagaacccggccagcatttcagaattgctggactgtggctatcacccagagagcctgctaagtgattttgactactgggattatgttgttcctgaacccaacctcaacgaggtaatatttgaggaatcaacttgccagaatttggttaaaatgctggagaactgtctgtccaaatcaaagcaaactaaacttggttgctcaaaggtccttgtccctgagaaactgacccagagaattgctcaagatgtcctgcggctttcctcaacggagccctgcggcttgcgaggttgtgttatgcacgtgaacttggaaattgaaaatgtatgtaaaaagctggataggattgtgtgtgattctagcgtcgtacctacttttgagcttacacttgtgtttaagcaggagaactgctcatggactagcttcagggactttttctttagtagaggtcgcttctcctctggtttcaggagaactctgatcctcagctcaggatttcgacttgttaagaaaaaactttactcactgattggaacaacagtgattgaagggtcctaaaaagggaaaatatataaagattatttcatgattgggtagtaaaactattcagctagtcagctaaagtcatttgtagtttgccccacctgccctaaataagaaaccccaaatgtagtctcttttctttctgtgtttcacattcatagcaactgcagctaacaggctgattttctggcctttggagaagtgattcaaaatagtgtagattttctgcatagatcccatttttgtacagaattgaatgggatggaataggtaagcaaaagtagaagcccatttgagttttacatttgattccacaatttggtttcaggtaggcttggtaatagactatataaaccagatttgcctattttgattttcatatggcttttttttctgtaagttttcagaggattttttaaatcacagaatcatactaaatgatatttagcctatcaaaacttccaaaagcccacaccaccagttcctgactcaaatttgaagggtttttagacaggagggtaggattaagtaggtgagtttaattaaagcttaaccctaggtaagagtaaatgagaaatattacggcaataatggaactgcttcactgtttcttggtgacttcctcactctaatgttttaaagaggcaacaaaagcttgtggtgccatttcagtaaccacggtgttgttttagatgcctttataagctcagtttcccctgttcttaagtgttgaatactgtctttaaactagaaaaatgcaaaatattgaactgatatttttgtgtgtagttgattactcttccattgagtgaatgatgaatacctgtgaggataggaaattagttctgagatctagtccctctctgattcacttagtaatctatcctcttttcagtattacatgtgcttaatctcagatgaaccatttcaccatggcagtgttatctcatctctgggcttttctgggaattgaagtatctctccttaaccccaattgtcaagggtagtagctgtatactaccactttgaattattgaaacgggtcaatttacgaagtctgcattggctatggagatatggtttatagtacagcctagagaatgaaactcaccgtccagataaccatgcatgcacccagattttttccaccttggatacctgtcactagggaataataaaggcctgattttttgtcttattccaactaagtagatcattatctctttccttttttatgttaatgagagaatttagcctccactcaacaatgttcaattcagcaaggctttcatatccttgctgtgggtcgtggataaggagcttattcaggtttcctgccctagctattagctccacttcacatgctggagaccggcgtagggacagatgtattcatcctggtgttactgaaaaacaggtgtgatcctgttactgatactataagtgacctaaaatgtcactgttcaaattagccagtgttctaacaaactaaactcttcaaatgcttggaaagatactacaaagccaatctttatagaattgggccaagataaatctatgttgttttgcatggctattgttaagctccaaaggttcactgtgtttctgccgctgtcctggagttgtcaccactgactgggcaaggcttcttgggcatggatgtagaactgttgtccttttcccactaacagttatctttgactctcttgcctgttatgcttacaaaatggtgatggcttatggaaggctgttaaattaatattcctgttaaaggaaattaaagtttgtctatttttgacaataaaacattatatatttttaa

SEQ ID NO: 1380 - DNA, 7739 bp, Homo sapiens
gtaaactctagcggggctagagcaaacattggattagcggcagcagcctgccagcctgcccgaggagtgctgggaccagcgcgctgcacgccgactggcacgatggcctcgtctcaggggaaaaacgagctgaaattagccgactggatggcaactctgccggagagcatgcacagcatccccctcaccaatttagccattccagggtctcatgattccttcagcttctacattgatgaagcctctccagtaggtcctgagcagccagaaactgtccagaattttgtctctgtgtttggaactgtggccaaaaagctcatgcggaaatggttagccactcagacaatgaattttactggccagctaggagctggaattcgttattttgatcttcgaatttccaccaagcccagagaccccgacaatgaactctattttgctcatggtttgttcagtgccaaagtcaatgaaggccttgaggagatcaatgcattcctcacagatcaccataaggaggtagtgttcttggacttcaaccacttttatgggatgcagaaatatcaccatgaaaaactggtccaaatgctgaaagacatctatggaaataaaatgtgcccagcgatttttgcccaggaagttagtttaaagtacctgtgggagaaggactatcaagtgctggtcttctaccatagtccagtggctctggaagtgccctttctctggcctgggcagatgatgccagcaccctgggccaacaccacagaccccgagaaactgatccagtttcttcaagcatccatcactgagagaagaaagaagggatcgttttttatatctcaggtggtgctgacccccaaagctagcactgtggtcaaaggggtggcaagtggcctcagagaaacaatcacagaaagagctcttcctgccatgatgcagtgggtccgcacgcagaagccaggagagagtggcatcaatattgtcactgccgattttgtagaacttggtgactttatcagcactgtcataaagctcaactatgtctttgatgaaggagaagccaacacttgatagcactacttggagtttccatgaataagatggagaaagctcattgtattagggcatactatctgtaaacactctgatcttcctattccactgagtctctgaagggaatagggctggtagtgggtgggaaaaggggaaaaactgtttcttcagtgattacaatcatactcttcattactataaatatttcatttcccatttgatgagcaaaatctacttctagtgttaggaataaaaaaaaaagaccagtaactttgtttttcaaaattagtctttgtaacatagaattcatgagtgtttacttgattaggttctctatttccagcctatgactcctacgctgtctataccctgcaacctttctgctccctctcttgctcgctctttttaatcagatgctgtatgggaatcaaaacaattgaatgcccaacattttgtgtattacattgttgtcttaaaacttactagttttgtgggacttgttataatgctctatagtcatccacagttgggcaatcatagctaatttttggtcatagaaaatctgcatcaaatcagtttccatgcatcagtaatattgaaggtcataatcagtgatttttgttatatgaaaataatagtgtttcacagtatttctatttaaggcagctataaatataggagaaaaatgtttttggagagctgtgaatgccaatttcagagggaaaaatggttgaggggtgaaagagatgtatggcattttaatttggcaatctcttaaataatattgccctgcaagtacccagtaaatggtaaggtacaagtgtgttaaaattgaaaactctgaaaataactctttaaaaagccctcttaatgatgctcttgatgaaagaaaaagacagaaggaaggaaggaaggaaggaaggaaggaaggaaggaaggaaggaaggaaaggaagaaaggaagggagggaggaagggagggaagaagggagggaaggacagaaggaaggacgggaggaaggaaggaagggaggaaggaaggaaggaagagagggagggagggaggaagagagggagggagggaggaagagaggaaggaagaagaaaaagactgcaagctttcctgccaatttgggattttcaaatatttaattctaaattccagattttaaggaagatttttcaagaaactgcaagtttttgacttgaaggaaagaaagaggaaggctggtagaagcagttagagcaatgtgtttgaaattatgtccatgaaatcacagggatctctgaaatatctttaggaaacttgaaatttatgaggtctgaatggacttgtttaaaattggctctgactcctcacttctgagtttcatcctatccgagggatgagattaaggcagaggcaaaagtttcacacaaagtttctgcaacctaacgtttaatagtccgggtctacagggaagaacaatgacacagcttgagcgttacttcctccttcgtgtcattgtgatatttgacaactctaaaaaataaaaaaaaaaaacttagagcacaataatccttgcctatgtacttcacaggaatattgtgaggtgtttataaaattataaaatttgatgaaattcttacaattattaattattttattttcatgtttagaaataatcacaccccaatagtttcctaggataatacagtccatgcaaagtagggtcatagagaaataaaagcatgccctcagcttttaatgaacttaaatgtagcacatatggcttaatctcttagacttagataagggagttcaattcaaaaccatatatgtcaagaccacaaataatcaagagttgatttcaagattataaatactcatgatcagaaaatagtacttattagcaattaaagggaggaaaagaaattgtttatactgaagagaatgtttatgaggagtgtgtatgtacctgtggtataccaaatagcatacatgtacacacaaaaatgtgtgtatacatttgggttgtgtgtatacatcttgccatatacaatatacaaacatatgcccattcctgtgatagcatacaaattcaaacatacagaaacacacacagatatggacacagtacaattcttcttttcaaatgaagacattgataatattaaataatttaattttaagactgaaacccttaatattgtgtgaaaaagagtaataaaacctttgaaagtagagtagatgatcacatcaaagtatttttgtaaaagaattctagtgtaggacttaattatttttaaaatatatttcttctcttctttccattttcccttcccttgtagttttattatctttctgtcttttacacctgctctttatgtgaaaatgtatatgaatccttttaaaatgattaggattattgaaatgtatgtcccgtaaatttggtttttgggcagactttctctctaactggctattcattcatccttcaggaggatcttagccaagaatatttgcaatgacacatgaatttaattttataaatataatggaaaacagatttttcatcatatcatgaataaaatatagaggtaactatgttgtattttcttgaacctagatactttctcatagtgtttgcttagaattaactttgtcctatttgtcaactgggttctggaaaaaaacaaacatgatgaagcttttgaataattgtgcagttttttaactagggaaagctttgtactgctgctaatgatatgcacccagaaaccttgttagacaaaaggcagtttcaagccaatgctatggtttccatgtggacatacagtgcctatgtagcaggcacttagagtaaatggacttgccttaatttataaaggagggaagaggtagaagggaaccatgggtcctccagctagagggggagtttactaaaagggagtccttggaaaggggaatggagagaaggtgcctttgactgtcttctatccattagttctgccctggagcacactggggaagcaggctgcgggccttccaaaagtaaaaaatggtgatatgcaatcgaagcttatccttagcctatgcacatttgtctcagctgggcattgtcttttcagagagcttgtagcacaagggctacacatgggcgccaagatggtggtagatacaccttggtgcactttttgttttacttgtttcttaagactatttcacaagtcctgtgaggcaaaaaaacaaaacaaaacaaaacaaccaaacaaatacaatctaacttttacccaatctacagcaggaaatcaaaggagtgggtggaatgagagaaaatatgcaaagagatcatttttaagtttgatttcctgtctgtaattttcaaggactaatatagcaaatttttcttctgccattatcatttatgtctccctatttaccacacaataatgtaaatgcagagaatgaggaggcatcttttaaaagccttaggatattctatatgatgacctcaatattgactttcagccatactgggaaaacttacttttcatggagtgccacctaacagtgaatgtattagagtataaaatgtttgccatgtatacacctgtatgtgcacatacacacattacacacacacacagaatgcacatttcacacacatatacttattattcaagttgaaactgcactctaatcaatctgagtctattgctgtttcaactcttaaaatcaatatctcctacattagtagatataaacataattcaaatatttaaatatttaagaggagaaaagtaactagaaaaccaatgaaaagtgaggccatcagaaatagaaaatgcctggcacgaacagtctatctaaattctcaatttcacttcaaattagagaatccataatggactagaatataaattacaaacacatacacacatcttcacttaaagttgttttaagttctttgaagttctgacatgtttttagccagggttatttgttcaggttcttccttgttaggattccagactggaaagttggaagtctcaggaaatgcatgtttccatgagttttttagtttcacagttttacagatccaacgacacaatcttttaatctttggtcactcaaccaaacaggagttccgtaggcagagtgctcactttgaattgctaatagaaaataatgcacagtgtcctcaggatatgctaaacaaggtttttaagagcattttattttacagcactttagtcttttcagctagatttcagtgacactatggtgtaaatgctatatctgccataacttattggtggctcctgtgttacatacagttttaaataatgctctaaattgtttgttttcccaatgataatgataaagtgttctgtagaatttgtaaaacatgtcaattgaatctgttgaaaattgtgtaattgttatttcaattgtgatactattttgtaggtaatagttttaaacgtatatttgtatgagtcaaaagtatgtgcttgtatgtggtatgtgtgtgtaagtatataatatcttatcaaaaatcaaacttatcctaaagaaaaagggcacattgtgaccagccttaatttattaacacttttttgttgtttttgcaatttggatttaaaattgaaacagaaattaagtttttgttaaaaatggtgtcttttaattttgtgaggaatgggctttagaacctatctgagttcccacaagcaaactgtccaccttgtgaggtaccccattgcttttcgtaataatcaaacatcaattcatatattaacttcattttcatacagactaatttgttttcatcaacaatagaaccagtacacctttaaagttgaccttcccaacatggcacccatttttctttaatgataaattttccatgaaaaattgtttctccaaaccattactttttaaaattcaatcttcccaagtaagatgaactgccttggtgttaggagagcttttaaaggcccatccatactaggtggttccaacatggttctcttctcgagaaaacaagcatgcaacccacacacttttctggtctgccccacgtgtagaattagtctagcaatagaaaactcatgactgacaaggatctacacatgtggtcatgcttgaagcaaaaattctgtgaccttctttgggcttggatctgattacagaatattaattaactttcttatttcctttctttctccatccttagttattccttttcaatatttagagttgccaggtaaaatacaggatatccagtgaaatttaaatttcagataaacagtatttctttagcatatttctcatatatttaatcagacatactttcactttaaaaaaagtttatctgaaattcaaatgtaactgggtatgtcctatatattttttcctaaatctcacaattctatccacactgcctttctatctttttcagctgggctatctataaggggcgagatctacctccctccatacccttgtgttcagacaccttatgaatatctgcagtcataatgtccttcaagaaagaaaacattggtcagctctaggtcctgcaaatgctttttgaaggacgaactcaaatacagatgggataatcaagtaaatatcttcataggatcaatgccaccatgttcaacacttccctttgccagcctgttgtgaggtccaagtttccccattaatcccttatatagcatttcccagtaactgggacaaccaaaaacacaccgacatattagaaatgctcctgaaaagtggcaacaccgcctaactcagtaccaggacctcttttaaattcaatttcttttttctttcagagagataacaaacgaattcattatttcccccattcacatcttaccacaaattatttttatcaggttaaaactggtcatctacggaattgtagaaaggtgacataggaactgtcttcactgctggaagaataaaagagtctgaggtatagacactgccctggtgacaccttctcagaacattgttgggggacaggggaggcaggcgcaagtaggggatagaatctgaccctgacatgcagctatcacctggcagagagactcgtcaaagcaaattataacgaccagtactatttttttttggaattgaaaacccaagaagccctaaaataagaacagtgagatcaaaggctggtttctaaaacaatgcagaaaatagaaccatgttggaattcctaaattctagctttcaaatactactgtttccaacagtgaatccttgacagagactgaatgcagatggaattttgaaacattttcagtagctacctcctctcctgaaattcctataagtggcagaggaaaatccaaatcctttaatataacatgtccatctcatgactcctgcttacacacatttgtgttgatttgcttcatttctggaggatgggaatttgcagagctggtgacatttccttcattagacaccagaaattcaccagagagagacagatctgtgccttctctttttaggatctggttattgatactttaataaatgtggtgtaaagaaaatccatggctacagtctgtatagaaaatgtgaattttttaaataagattgtgttcttaatgtaaaaaataaaagtttatttgtattcagtgaaatgcctaataaagtcctggtaccaattatcttta

SEQ ID NO: 1381 - DNA, 6046 bp, Homo sapiens
taagttggcgcgtcacctagacgtcagcctcttacctctcggacgtcccgtcccaggagcaaaactctagtgactttgggcccgcccccgtgagagtggagggcggccgatgagggcggttctgaagggaacaagaccaatgagacgagcccggggcggggcgcggggccggagggtggggcgggtggcggcggtggcagtccgaggtctggctccgcgcagtatatgacagtacgtcagcagcgggatggccctagcagtggcggcggctgcagaagcccaagcagccgcggccgcagtggaggctagagccggagcggcggcggcggcggcaccccggggagtttaagatggcggcgggggggacagggggcctgcgggaggagcagcgctatgggctgtcgtgcggacggctggggcaggacaacatcaccgtactgcatgtgaagctcaccgagacggcgatccgggcgctcgagacttaccagagccacaagaatttaattccttttcgaccttcaatccagttccaaggactccacgggcttgtcaaaattcccaaaaatgatcccctcaatgaagttcataactttaacttttatttgtcaaatgtgggcaaagacaaccctcagggcagctttgactgcatccagcaaacattctccagctctggagcctcccagctcaattgcctgggatttatacaagataaaattacagtgtgtgcaacaaacgactcgtatcagatgacacgagaaagaatgacccaggcagaggaggaatcccgcaaccgaagcacaaaagttatcaaacccggtggaccatatgtagggaaaagagtgcaaattcggaaagcacctcaagctgtttcagatacagttcctgagaggaaaaggtcaacccccatgaaccctgcaaatacaattcgaaagacacatagcagcagcaccatctctcagaggccatacagggacagggtgattcacttactggccctgaaggcctacaagaaaccggagctacttgctagactccagaaagatggtgtcaatcaaaaagacaagaactccctgggagcaattctgcaacaggtagccaatctgaattctaaggacctctcatataccttaaaggattatgtttttaaagagcttcaaagagactggcctggatacagtgaaatagacagacggtcattggagtcagtgctctctagaaaactaaatccgtctcagaatgctgcaggcaccagccgttcagaatctcctgtatgttctagtagagacgctgtatcttctcctcagaaacggcttttggattcagagtttattgatcctttaatgaataaaaaagcccgaatatctcacctgacgaacagagtaccaccaacactaaatggtcatttgaatcccaccagtgaaaaatctgctgcaggcctcccgctgccccctgcggctgctgccatccctacccctccaccgctgccttcaacctatctgcccatctcacatcctcctcagattgtaaattctaactccaactcccctagcactccagaaggccgggggactcaagacctacctgttgacagttttagtcaaaacgatagtatctatgaggaccagcaagacaaatatacctctaggacttctctggaaaccttaccccctggttccgttctactaaagtgtccaaagcctatggaagaaaaccattcaatgtctcacaaaaagtccaaaaagaagtctaaaaaacataaggaaaaggaccaaataaaaaagcacgacattgagactattgaggaaaaggaggaagatcttaagagagaagaggaaattgccaagctaaataactccagtccaaattccagtggaggagttaaagaggattgcactgcctccatggaaccttcagcaattgaactcccagattatttgataaaatatatcgctatcgtctcctatgagcaacgccagaattataaggatgacttcaatgcagagtatgatgagtacagagctttgcatgccaggatggagactgtagctagaagatttatcaaactagatgcacaaagaaagcgcctttctccaggctcaaaagagtatcagaatgttcatgaagaagtcttacaagaatatcagaagataaagcagtctagtcccaattaccatgaagaaaaatacagatgtgaatatcttcataacaagctggctcacatcaaaaggctaataggtgaatttgaccaacagcaagcagagtcatggtcctagaactctgcttggaccagaagatgtgaataaacttaagcttatttatttaaaattccaaatgagttgctctagattctaaaaaggtgaaactttggctgttgaaagtttcagtattagtaaacttgagttactttttcttttccattttactttgcttccctgcatttcgaagctgctctttctggtcctccccaccaccccacccccaagacttgtgtttgttaatagaaataatttttttaggtattggggatccattgtctatatttcaaatcagttttttttcctcaaaaacttgtgtttgttattagaaatgattttttagatattggggatccagtgtccacacttaaaagttgtatgtgtttaaaaaacaacaacagtaatgtgcaaggtgaaatgcttttggataaacgtaagcctattttctgacgtttcttaatgcaaactctttgccttaaatggtagaatatttagaaatttgcacaaaattaaaaaaataaacattgtcttggagggttaaaaaatagaaaggtgtatgtgtatagattcacatacacatatgtatatacaggctgacttgatctagaacattaaatccgccctgcaagttaaccccccattgcaatggttgccttaaggtgtttgctagttgtgtacatagtgtggttaatcattagctacactgcttcccacttgattagagcaatgggaagcatactgtggcctaccagcatctggaagtgtgtgctcgatctgtatgtgtgcagaggtggtgtggatgtgagcgtgcatgaaggaaaaaaagctgctactcctagtaggccaaacgctcaggttaaacaactgacgagtgttactgtagggtgtttttttgtttttttgttttttttcttctatcaaattgctacttttgttgtggaagacaaaagcatttccatttcaacgagtttgtcagctttattaatgttgggcaaaaattgatatgtcatgaaaatgaaacagatctatagttttgggacaaaattataaaatgaaatgtgtaggtaacctatttatatactgctataaagtattttttgaagagagatatgcaaagaagctattacctacataagaggtatatttaaagattttttttttcatcctggtgccaggaatataaaaaagagtggatatatttaaccataacatactgtgattcatcaaacagcacaaactttcatttcatggagtttatctgttgacattgatttaaactgtcacttgttttatcatgtgggaacataagttatgtggtcaaaaatataaggattttgaattaatgttgattcaagttgtattgtcttattgtattgtcttttcaaagtgctgccagttgaaaagggaagcattatgtttacaaatctgttttgaaatgtttgccaaaattttggtagtgtctttaataaagatgtttgtctccagcatccagaaaaataaatgaataactttgttgtgtatcactgtaaaccagaaaaatgttggttatctagaaaacttgagagagcatgtagattaacttttctctttggagttctaaaacattaactggaaagattagataatatactaaatgtatacagaagtatacagactatacaaagactgaaacaagtcccttttgcactacaactctataacattaccgcagaaattttggttctatgtagcatggacctcctaaggaattctgtttcttttagcattgagatccctggtgctctttttttacctcagaattggtacaatcattattaaacgttaatttatttcaaactttttaattgaaaaaaggaaagggaaacttaattggggataaattcaggcatcatattattatgatagagtctcctgagtggttcgtctataggtaatgaactcattggtgttatttcttggacatcttggccttttaatcaaagactgtgtgctgctatttgctatgagcaaggtttctcaaaagcaaaaggtgcttggaccatttggatcacctgagttagaatctctaggtatagggcccaagtatctgcattttcacaggtttcttgtaggtgactttctgcaagctaaagtatgagaaccattggcttggatgtagttctaaacttttaggtctgtaaatcttgaaatcttgaactgaaggtcaactattggcttttttttttttttaatgtccatcatgtcagcaggtgcaaatcacttttcccctttgcatgatctgaggcacctcctcagttgtttcactgccaactcttgtttcagaacctgtttacaaacaagccttccagttggtgaatggttagccattggagctcctaccctgtacatcagcacatcttctggtttacaagttgggtaacaatgaaagctggagatgctaaatggaaatccagcattgcatacccttagacctgatcacataccagtaaaagccttaatttagatgttagttgtatgtgttggacagatccttgcaaaagtgtgtctgtctattagttgtaaatttgaaaattataaatctctgaatctgctactatccaagtttcatcccttttgaagatgaggcatgagcctattaaaatatttataatcatttttcgtcccctactgcaagacttttagattcttacaaatgattactacaggaatagtggccacttaatgtcagttactccggtggaagaatttatctagttttttttcttttcttttttggaaggatggtgtgaaaaatagcaagattagagaatgagttgtatagttttttctatcacatttcatctaaaatgatttgaaggacttttgaagatttttaccaacatccttaaatcaactccaggttggatgaacaactgatttaaaacaaactaagagaacattaactagatgtgggctttttaaaatatataggtattgcatttcctaccttgttatttattccactttgaatactttagagggcttaactttcaactctttaaggtagtaatggatagttttatacttgttctcacaaaattgttatggtcagtttatatcattgctccatgcattgattataaaaattcagtattaattttttctgatcttataagctttataggagttttcttttctcttataaagtgtttcaccttatgtaaaacaaatgcctgcttgcatattggaagatgttgaaattagttttagacaaaagtggtccatcaattcagacactctgcttggatgccttacccttttcattagtgcattctttgcttctgaaacttggcagaaactcgttagccagtccactgcctttctgacaatgtgtggagtcacgtatgcttggtatatgcctttactacttttaaagttctacagtttattacttgcccaagtgttactaaatccttttcttatgtgtactggatggagaaaaaattatagccagcactttgagaggaaagttttcagaaacaatattaactggcactactaactgaaggccacaggagatgctatcaatgttatttgtaatctgaagattgaacaaggctgtgaggctcatttcaaactattttgaggtgttaaaatatatatatgctgtttctcagctgttccactcaaaccgtgttaggactctcaaaggtaaaatgtcacaggggcttttcagttgttacagagctcagcagctgtggttgcccctgttctacaccaatttcagttcaataaaaatgttaactttgcaa

SEQ ID NO: 1382 - DNA, 4831 bp, Homo sapiens; identical to SEQ ID NO: 316

SEQ ID NO: 1383 - DNA, 966 bp, Homo sapiens
gcggcggcgggcagcagctgcgctgcgactgctctggaaggagaggacggggcacaaaccctgaccatgaccccccacaggctgctgccaccgctgctgctgctgctagctctgctgctcgctgccagcccaggaggcgccttggcgcggtgcccaggctgcgggcaaggggtgcaggcgggttgtccagggggctgcgtggaggaggaggatggggggtcgccagccgagggctgcgcggaagctgagggctgtctcaggagggaggggcaggagtgcggggtctacacccctaactgcgccccaggactgcagtgccatccgcccaaggacgacgaggcgcctttgcgggcgctgctgctcggccgaggccgctgccttccggcccgcgcgcctgctgttgcagaggagaatcctaaggagagtaaaccccaagcaggcactgcccgcccacaggatgtgaaccgcagagaccaacagaggaatccaggcacctctaccacgccctcccagcccaattctgcgggtgtccaagacactgagatgggcccatgccgtagacatctggactcagtgctgcagcaactccagactgaggtctaccgaggggctcaaacactctacgtgcccaattgtgaccatcgaggcttctaccggaagcggcagtgccgctcctcccaggggcagcgccgaggtccctgctggtgtgtggatcggatgggcaagtccctgccagggtctccagatggcaatggaagctcctcctgccccactgggagtagcggctaaagctgggggatagaggggctgcagggccactggaaggaacatggagctgtcatcactcaacaaaaaaccgaggccctcaatccaccttcaggccccgccccatgggcccctcaccgctggttggaaagagtgttggtgttggctggggtgtcaataaagctgtgcttggggtcgctg

SEQ ID NO: 1384 - DNA, 2137 bp, Homo sapiens; identical to SEQ ID NO: 343

SEQ ID NO: 1385 - DNA, 1908 bp, Homo sapiens; identical to SEQ ID NO: 306

SEQ ID NO: 1386 - DNA, 9806 bp, Homo sapiens
ccaccctcggccactgccacagctgctctgccaataacaaaggcacagcattttccctctgtgcatctccaacatggatgcttttcagggcattttaaaattcttccttaatcagaaaactgttattggctacagcttcatggctctgctgaccgtgggaagtgagcgtctcttttctgttgtggcttttaagtgcccctgcagcactgagaatatgacctatgggctggttttcctctttgctcctgcctgggtgttactgatcctgggattctttctgaacaataggtcgtggagactcttcacaggctgctgtgtgaatcccaggaaaatctttcccagaggccacagctgccgtttcttctacgtcctcggccagatcactctgagctcattggtggctccagtgatgtggctttctgtggctctgctcaatggaactttctatgaatgtgccatgagcgggacgagaagttcaggactcctggaactgatttgcaagggtaagcccaaagagtgctgggaagaacttcacaaagtatcttgtggcaaaactagcatgctacctaccgtcaatgaagaactgaaactctcccttcaggcccagtctcagattctaggatggtgcctgatttgttcagcgtctttcttctctctgctcaccacatgttatgctcgctgccgatctaaagttagctaccttcagctgagtttttggaagacatatgcacaaaaggagaaggagcagttggaaaatacatttctggactatgccaacaagctgagcgagaggaacctgaaatgtttttttgaaaacaagaggccagatccttttcccatgcctacgtttgctgcctgggaggctgcttcagagctgcattctttccaccaaagccagcaacactatagcaccctccacagagtggtggacaatggtctgcaacttagccctgaggatgatgagacgacaatggtccttgtgggtactgcccacaatatgtagctcatccaccatcaatgactcatggtgttgagtggcatgctcattctgtgatcctcctaacgtatcaccagcaacctgtgtgtctctgtattttcttacatttggagtatgtttacaagacaataacacaaaggaaactgctttgaagctctcaagtggaacatcaggatgtgctcaaattgatgctgaggggtgacaaaggtgctcttgcattggtggagaggggctcagtaggcctaaatgttgctccaagatctaagattttatcattcaacagacagactcatgtgagagggctcatcagtctctgtaaatattggttgcagaatttaggggcagaagcaatggcttgtgagtgagcaagttactcttaacataggttgccctacacagtggctcctgcagtgtgatcagcaggagtctctgtcctacaaatctacacttttaaggatgtatgaaattgtggaattcattccctcaggatctgaagatctcagttctcaaaaatcacaagttgcaagaatatgatacctaaaattgaaagtttttcacatgttttcactgtatactgaaaatactcccctggaagcagggctgcatcataatttttgtgggctttatgtacttttgcctttgcgaaccatttcctacattcaaaatagtagtaacaaatatatatatatatatatatatatatatatatatatatatatatatatacacacacacagaaatatatatttataactgcattgataaaaggtgaatatattagcattttcttcaacctaaaagtttatgtattttcttctgattttaaaagaaattaaaaacattttagtgggcccttacaagtattatggtccttaggcacagtgcttactaggccgtgggtatgtcttagtgcgtttgggctactataacaaaatatcatagataggtggcttatacaaaatagaaatttatttctcacagttctggaggctgggaagtccgaggtcaggctgccagcatgctcaggttctggtgagagcaattttccaggttgcaaactgcttgctgacttctcagtgtccttccatggtggaaagtgcaaataagctcccttgagcatttttataaggcactaatcccattcctggaggctccaccttcatgacccaattacttctcaaggctctgcttcttagtactatcagcttgggggttaagatttcaacatatgaaattgggggagacacaaacattcagactatagtagggtaaattgaccttggctaaaggtctggggacactgtccaaagcagtactggcataaaactgcattgcagtcttacatttatcagaaataatgcaaatcttgcattctacaatgtactatatccatgttagtatgtacatatatatgtgtatgtatatatgtacataaattctccttaaatctctgagaagaattgtgctttaaaaaagaactatgttttgtgctgtggctcataccttacagtggtagtctatgtctcttagtttgagaaagctgaatattaacttcttattaacatgaaacatgatggcaaactgaatcctacaagtataggacccagaacatatctatgttattgtcatttacaagaagaaatatgtatttggtctttcttcctattcctggtgcagagctcctaaaacctttgggacctcccaagtgatgtgtctggtagtacgcgaatgagatgactgatagttaggggcttctgaatggcctcagaatagggtctggttgccacgggaaccaaccatgtgtttagagggttggaactttcagccccactcccagaccttggggaaggaagaggggctgaaggttgagtcgatcacaaatggataatgatttaatcaatcatgcctaagaataaagcttcccataaaaatctaaaggacaaggttcagagagcttctgcattgctcaatacatgaggagtggtgagcccaaaggggccgtggaagctccgtgccccttcccccaaacctgttcctgtgcctccatctggctgtttctgagttatattattttataatagactgatgatagtaaataaagccctttcctgagttctgtgagctactctagcaaatggtgaaatctgagaaggaaatcatgggaacctctgctttgtagccacgtcagatagaagatgtgagtaactttggaacctactgcttgtgactggtgtctgaagttgggggagatcttatgggactgagctcttaacctgctggggatctgcacttaatgccgattaatgccagaattgaattgtatgatatccagttggtattggagaattggccagtgtgggagaaaacccacacagttggtggcaaggagtgttcagtgttgagtgtgaatgtcaataaaaaaaggtttgttttttctacgtacaatatctttgggaacttggaggtgcagggtcagacgtctgtgtgtgtatgtggcagggacagaacagggattagggatgtgagggggtagagttttcagaataaagggagagaaaattcagcaaagagttctccttcttaatctttcttgacttaaagtttgtctgcccttaagtgtcttctgagctggaaaaagacatataggaactggccgatgccgatgcctcttttgcagtgtgtgagaggctgaaacagaagttctacagaagtaggttagctgtaaggagctgaggattgaggagtcatatctgggggatattcctgccaccctcaagtccagggactttctgcactcaaaaaacttacgctcatgacaatgactgcctcattcaagaaaacccaagctgactggcaagaagccagcagcctgggtacttgttgctgcagcttagtaagtagcagaagagctcatcctcctcctctggaagaagccacttaacaggttctcatcctgactcctaaattccttaacagtcctttactcaggaataaaacaagtccaagaaaacttatctgtcccacaaatagtcctggaggcagtggagtaagatagggagagcaaattggtgtctgctcttgagtatcttgagggaatgggtatctagaggcagcaggatgaactggctttgatagcagagactttaaaatgtgtggaccattagttgtctttggatgtgctccctagaggctgcgcctgacacagggagctgtgtatacatgatttattaaaaggaaatcctcttaggagaaacatattagcaggataaacacaagaaagaatgcagttacaagtggagtctcaatcaatcccagaggaaattctgggacttcagcctcagcttgacctatgggggggctctggaatgtcagatttctcctgatcccaagtgtgctctggggcttccattgcagccaagagagagcattccccagaaaactccaggtgaggagtctccagtggcccaagggtgatcctccagaggaggttacactgccgaactgggacattggcaccctggatttgaatatctagagagggcacccaatggtcatactaatgtttgccataacagtctcttctaggtctagacttgaagcatatggaagggtccttgggctagagccaacccaagcccaggctgactcccttttaatacttctaattttccctgaagatctggtcttctccctaccaccactaccctattacataagagaaaaggattggagaatgctcttgaaaagaatgtgatgctttcccatacaaggaatatactcaaggaaaaatttcatggcacaaaatgctgattctgtccaatttatcccatgaataaattgtgtacacatatatatatgattcttttgtttttcctgtgcagttccttccttttttcaggctcaaccacttaattcagctttaggatacattcagcttattcatatcaaatataaagtgggagaaaaaaaggtatgtaacaaagattacaaaaataaggcatggcagacaaatcactacataattctatgcattataccttaaagtaatgtattgtaaaatatatgtgtccaaagcaacttttaaaatttttgtatggttttctacttgagacctttaaagcatcactaaaaatgtatacatttaatgagaaaacgatgacattattgattcaaattagttgtttcaaagcctgatgatccactgatttactctaaaaactggttaaagcaatccagaagtcactgggtagcagaaaactgctaccgcttctcacatgatatatttcaagtacttcaactattaactatattattctatttagactttggtggttccgaattctctaaggtaattatcttaattttctaatatttccctctcatttttctctcttattttaaatatcccctgttgtacaagccagaggatattaatttcctttgtgggtagtgcttggacttctctgattttagatcccaaaatcattaagaaaaagctaagaggttggcatgagaggttggatggaaagcatctatctgtgtttgtcagtagctctcgatgttggctgcaaattggaatcacctgggggcctttgacaatcacaatgtctggacccatttcctgagaacctgatgtaacttttctgggttagggcctgaacattgagatttcttttaaaagctttctaagtgattataatgtgcagtcatggtgaagaactactgattttatatggggagtcagtgaaggtggtgaggggctgtgaggttgaaatattggaaatgttatctggatttcaaacagtagagtatgataaaaatttaaaaactggctctccaggaaaaaagagacatcctaatatgatgtatttgccaatataccatgggttttcttgggctgggatgaactttcagaagttttacagtgagcatttttttttttatgaatttaaattggttctagctaagcaattttggagtatctttgatgtacctgggtctctcattttaataaacataacagtggtatgttagtcagggttctccagagaaacagaaccaacagtacaacagtatatatacatacatacatatatatgtgtgtgcatgtgtgtgtgtgtatgcgtgtatatatatatatgctacatatatgaaaggggatttcttgtgggaatatatattatatataacaaaacatgacaaatatataacaaaatatatgtgctatatatattgtgtgtgtatatatatatgaaagaggatttattgtggaaattggctcatgtgattatgaaggctgagaaggcccatgacgtgccacctgtaagctggagaatcagggaaatgtgtagggtggctcaagtcccagtctgagggcctgagaaccaggggagttgatggtacaaatcccagagccaaaggcaaaggaacctgaagtttttatttccaagggccaatagataaggagaatattggtgacccaactccaggagacagagaaaagattggtgacccaactcgagtggagagagagggagagagagagagacagagagcaaatttgcccatcctctccctttttgtcctacccaggccctcaatggattgtatggtgcctgcccaggttaggtgagggcagattttccttactcagtccactgattcaaatgccaatcttttttggaaacacccctacatacatacccagaaataatgctttaataactatctggctaccccttaatccaatcaagttgacatctaaaattaaccagcacatgtgataaattaaatatggttcaatggctccttctggcagatgtagtcgtgttatcctcactttgaatctgaccttatgaaccaataaaatatggcagacatgaggtagattgttaagcagtatcacagtttatgccttggtctcttacaatgttgcaatgctcaacagtctggtaaaagccactatgtaagaactgcaattactcagggactaccaagctctgaagaggcccaagctagccagtgggaggagagagagagagataaaaagagagagagagagagatcccaatggctccaattgtctcagatattctagcttaggggtcaggcatgtgaatgaaggagccattttaaacattcaggccccagtgtacacgacatggagaagaaccaggaagtccaaccaacagtgagaataaaaggccccagatctatggccctaatcaaatcattgcagccatctccaaacatttgacccactccagtggaggctgcaggctttgtagagaagtccttgccatgtcctatccaactccatgaccccaaaaatcatgagcttaaataaatgtttgtggctttaagccactgaattttggggcaatatgaagcgacagaacctgaacactaacatgaaaatcagaatttataaaaagacaaaaattacaggcaaattgtatttatacatttatacattctccctatgcatagagagcattttcttcaatcatgttttctttttctttaggttccagttagcagtatagcatctacagcatgatttgatagatgctgataagtaggtctctaaaatctctccaccaaagctggagattcactttcaattatttttggttaatttttgtttgaaaggaatacaaacatattattgggaggagtaacacattaaactattatttgtcattaatatctacgaaaaaatagcaagtgagggtttcagactaggctggccttcagtaagctggaaagagattgttcttctagtcgtctctcaaaatgttatcttcagactgtcaacatcagtatcacgatgaagcttgttagaaatgcagaatcagacagtatctaaaacctgttgagtcaagcctgcagtttaacgtgatcctagctgattccagttcaagctaaatttgataacactaaggcagtggttctcaaactttagtccatataaaaatcatctggagggcttattaaaatgtggattgctgaactccacccccagggtgtctgattcagtaggtctggggtgaggcaagataatctgcatttctaacaggttctcaggtgatactgatgctgctggtctagggactacatcttgaaaataactgctctacagcacagagcaggctattctggggaaggcaggctgtaagaaactcagaatcctggcctgcactccagatctactgaatcggtcatcagcccgtccaagattttggggtgcctttccattcattcaaggatacctttctattcattcaaggatatattttgtcctttaggaatattttaaagtttacttcacataagttttacatgtttcttgtaaactctatttgtaggtgttttctttgttcctgttgtaaatggtttcttttttccactatatctttctaagtgattgttgtctgagtacgtgaaaagctattgtcttatgcttattaattttatctctctactaattcttttattgtttgtagggcttttcagaatttgaaagtaaacattttgcaacctttgatgacaaaatggatctagacaataaataatgaattctaaactattaggtgaaagcagaatggggtcagacctatgcaatttgaagccactcatctatattagcatcactaaaaatcaaagcagatgctacgtgccttatgatgcaaggcaagaataagtacatagtatcacatgtgaaatattgtttcctaagaagctaaacctaatcaagtatttagacattactgctagtttataggaaacataagcaacaaaaaacaaggcaattagcaccacaaaaaaacaaccaggtacatctagatctaacagaacattccattttacagatgactcagtctccccacagattaacagtattaagaaaggagaataaaggagatataagtgacttaataaccagatatgctatatagaccttatttgtatcctgtttccaacaaccaactgtaacaagatatctttgagatatttaggaaaatatgaatgaatattagatgatttttagagaattattaattttgctatgtgtggtaatggtgtgccgatttatgttttttaaaaagttcttcagttagagatgtatatttaaatatttatgtgtgaactgccatgatgtctagaagtttctttaaaatactctagaaaaaagagtttagggagaaagctgaaagatgaaataagattggcaaaatatggaaactattgaagctggatggtaggtacacggaattcattacattattctctttacatttgtatatgtttgaaaaatttcataaggtacacaacaaaataaatgacatggtcacctcagttattttgctgaagttttgtcaatcaccccctgcttagctggagtttaccttctagtatcattctcagcaaaggctcacaggaatgctattctctgaattcttacatattcagcctgttggcctgttctcgaattgaaggacagcttgtctggttcatactttctctacatgagtgtattgtaagcattacttcattgtcttttgtcattgaatattgctgaggtggccacagcctgatttctgatgccatctctatttctttctttattactaacaagatgttttatcctatattctcattggtttctttatctttcatgtccaaaaatgttaaataggccttcaggtaggtctttttggaacgatttttcctgctacaagtttactctttcattgtggagaatcattttcttatatttcaataaaaaagttggaaaattttcaactta

SEQ ID NO: 1387 - DNA, 3411 bp, Homo sapiens; identical to SEQ ID NO: 330

SEQ ID NO: 1388 - DNA, 2610 bp, Homo sapiens; identical to SEQ ID NO: 292

SEQ ID NO: 1389 - DNA, 5351 bp, Homo sapiens
agtagggagagaggagttgggctgtgccggaggccgaggaccgagagggctcaggtgacccctggaaagcctgggtggctggaaaggagcctagcgcctgcatgaaaggaagaacctgctgggaagtacctgagctcgagctgtgggttccgccgcccttcccctgcgtggtggcttggtggccgcgtctgcgcctcagccctgagaatccggatggcggtgaggtggacttgggcaggcaagagctgcctgctgctggcgtttttaacagtggcctatatcttcgtggagctcttggtctctacttttcatgcctccgcaggagccggccgtgccagggagctggggtcaagaaggctctcagacctccagaaaaatacggaggatttgtctcgaccgctttataagaagccccctgcagattcccgtgcacttggggagtgggggaaagccagcaaactccagctcaacgaggatgaactgaagcagcaagaagaactcattgagagatacgccatcaatatttacctcagtgacaggatttccctgcatcgacacatagaggataaaagaatgtatgagtgtaagtcccagaagttcaactataggacacttcctaccacctctgttatcattgctttctataacgaagcctggtcgactttgctccgtaccattcacagtgttttagaaacttctcctgcagttcttttgaaagagatcatcttggtggatgacttgagtgacagagtttatttgaagacacaacttgaaacttacatcagcaatcttgatagagtacgcttgattaggaccaataagcgagaggggctggttagggcccgtctgattggggccactttcgccactggggacgtcctcactttcctggattgtcactgtgagtgtaattccggttggctggaaccgcttttggaaaggattgggagagatgaaacagcagttgtgtgtcctgttatagacacaattgattggaatacttttgaattctatatgcagataggggagcccatgattggtgggtttgactggcgtttaacatttcagtggcattctgtccccaaacaggaaagggacaggcggatatcaagaattgaccccatcagatcacctaccatggctggaggactgtttgctgtcagcaagaaatattttcagtaccttggaacgtatgacacaggaatggaagtgtggggaggtgaaaaccttgagctgtcttttagggtgtggcagtgtggtggcaaattggagatccacccgtgttcccacgtgggccatgtgttccccaagcgggcaccatatgctcgccccaatttcctacagaatactgctcgggcagcagaagtttggatggatgaatacaaagagcacttctacaatagaaaccctccagcaagaaaagaagcttatggtgatatttctgaaagaaaattactacgagagcggttgagatgcaagagctttgactggtatttgaaaaacgtttttcctaatttacatgttccagaggatagaccaggctggcatggggctattcgcagtagagggatctcgtctgaatgtttagattataattctcctgacaacaaccccacaggtgctaacctttcactgtttggatgccatggtcaaggaggcaatcaattctttgaatatacttcaaacaaagaaataaggtttaattctgtgacagagttatgtgcagaggtacctgagcaaaaaaattatgtgggaatgcaaaattgtcccaaagatgggttccctgtaccagcaaacattatttggcattttaaagaagatggaactatttttcacccacactcaggactgtgtcttagtgcttatcggacaccggagggccgacctgatgtacaaatgagaacttgtgatgctctagataaaaatcaaatttggagttttgagaaatagagcacaacagcactttcgtcatgagctgacagtagtgtcaagaaagtcaaagagccttaagagcctcagtgaagattgtattttattttatcaaaagccacctagcagtcatctgtggagcactggaaagctggggttcattttggtatatcacactgaaactgggtacccagagtgctgctgtttaatatttcacaatgccttacttattggttgttttatataagagttttgtcaatatggtctcttcttaaaagaagttgactatgaattgaaacacacaaaacatttaagtgccagacttaatattaaagaatgtaaaggtccaagtaaaatgaggtatgatttatgttgatgtgtaagttcaccgcacatcccactttttaacaaaactcatgaatgtgcagtttgagccattgctattttgattacatagaatttgtatttcttttttagccagcacattaaattttagattttattttttaatctaatttttttctaatcaaaaagaaaattgagcttaaggcaaaaggcctggttttagagatatgtgtaattggaagagggcatttgtttgagtgtgagtttggaggcctttttaacatgcagacatacccatatttaaatgaaatggggagatatttacattccgtactttgtaaacttgagctattggacttcactgatgtatatattaatacctcagattcctctgattttgtaagctgtcttctctgtgaacgtgtttgtgtgtgtagggcattttctgattgcacttccttaagttatgaatgtactagaaagggactcatccagaatactatgcctccctttgttaatgcttaatcatttaaagtaaacacaattgaagcctctctgaagttaaacccaactatgtttattaaaatgtgtgaaactgaaagtgggctaggttctaccaaggctgtggaactctcctacgagttctgctgatcaggaaatttaagaatttatcttaaaaatgcaaggaaaaaagactgccttggcaattgtgaatggtgctttcaatctcctagcaccgagcctggcacttaggcagctttcagtaagtgggtgaatgaatgactgaatgaatgaatgaatggctcagctgaggaatgtaactttggtcaagttattatgatgtgtttgggcttagttttctcattggtaaaatgtgggtgctggattggatcttaaagatcccttccagctctgaaatgctgattgtacagtatattcttcccagattgactcactgtgcaatctttacaatactttttatcttttcacttttgacataggtaatgttgttgagcagttgagcaatgttcagtccagttgtgaagctggagaagagaaatgggttttaaaaattaagtgaggggaggccgggtgcggtggctcacgcatgtaatcccagcactttgggaggccaaggcaggtggatcacgaggtcaggagatccagaccatcctggctaacatggtgaaacctcgtctctactaaaaatacaaaaaattagccagctgtggtggcgggcgcctgtagtcccagctactcaggaggctgaggcaggagaatggcgtgaacctgtgaggcagagcttacagtgagccgagatcgtgccactgcactccagcctgggcgacagagcaagactctgtctcaaaaaaaaaaaataataataaaataagtgagctgaactcacctgaagtggtttacttctgtgggttaagaagttctagtcagtgttcatagtcgtttcgttttgataattgttgaaccaattttgtttttaaaacctttagactctgaaagtaatattttgactaagaatgtaaatatttccaaactaaattactcgggaagtaaacgctttttttaaaagtatttttactggttttataccaatattatatgcagaaatcacaggatgaatttagaattaaatctcaattagttcactttggcctagatttatgaaaaatgcatgcctcgtaaagagtccactgtattcacgagtaaagttgcttttagtgttcacttgatgacttggagagtaggaattttgcaaaatctgaatttaaggaaattctttaggataaccatttcaaaaaataaaattgctatgcaatcttgaatattttctcttttgcctcgtaaaatgaaaatgcattcacagtttctgtaaattatttagcagccttaaagtttatcaaaaaattgtccagattccacgtgcagcatgcttggccctgcatttaatttaagaaggattaataataatgctctgaatttttcgaaagggattctcctaaacccacccacttctcttgcccaggctgctttttaaaaatatttttttattttttacttatttttaaattttctctttttatttatttttggttttcttgttagccacctgttatatgggagaacgaaaattgttatattttgaaagtacttattacattatttttattttagtatcttgatgctcctgtcaaaagggaaatgaggcttttaaaaataaagtaccttaattctttattgactttttgccctaaattgctaggtgtgacccagcaatcttttaggaagagattttacagtggtgctttatttatatcaataatccagtatagttaggctgttcattcctcataatagagtacataacagaaaagtgggactttcacattttcatatttaggcacgttccaatttaattccaaaaatactctgtaattctacatctaaaaaaaccgattccctaattcgaatttattggtaccaaagctctctttggctatagacaattaagagttgaccttttaagttaatgtatatgcttaaaaacagttttaggaaaatatttggtagacaaagagtttcaactttaaatgttcactatgtcatttagtgtccaactttacggataggttgactatctaaataggcatttttagtcattaaaaaaaatctagtcaccaggaggatccctatgactcaaaataacttgtttgtaaaagaaaatttgtttacttacccattagtaagttcctgcatattcattataagatggcaaatcaaacttttctaggatgaagacagcttatttttaagttgtatagtcttagttggtttagggtctcaattttaattaataaaatacttggtttttatttgcttgtccttttgaattcctgttttaataattttaaaatgagcacaaagaacgttgaagttcagattaatctcttctgaatgatgtttttttcctctgtgatgagttgtttctgacttttttccttttgtatttgtaatgttgattaagatgtaaaataaaaagtgtgcctgattatttttgcaaa

SEQ ID NO: 1390 - DNA, 1554 bp, Homo sapiens; identical to SEQ ID NO: 372

SEQ ID NO: 1391 - DNA, 7303 bp, Homo sapiens
aggaagagatgaactttctggaagcagacccatctatgctttgacctgatcatggaagaccctgagccctataaactcctttgaatccctgtcccgggaacagggacacccaatcaatgcctcacacacagcctggggaatccacagctgagccagccctcctacaacatttcttggacaaagagtactgaaaaatttggtgcggcatgaaaggatgaaagactccgaagggccccagaggcccccgctgtgttttttatctacattgctttcccagaaggttcctgagaagtcagacgctgtgcttcgctgcataatatctggtcagcccaagccagaggtaacttggtataagaatggtcaggccatcgatgggagtggcattatttccaactatgaattctttgagaatcagtatattcatgtgttacatctctcttgctgtaccaaaaatgatgctgctgtctatcaaatctcggctaaaaactcttttggaatgatctgttgttctgcttccgttgaggttgagtgctcatcagagaacccacaattgtctcctaacctggaagatgacagggacaggggttggaaacatgaaacagggacacatgaagaagaaagggcaaatcagattgatgagaaggaacatccttataaggaagaagaaagcatctccccgggcactcccaggtcagctgactcctccccctccaaatccaaccattcactctccctccagtcattgggcaatcttgacattagtgtgtccagttctgaaaatcctttgggtgttaaaggaacaaggcacactggagaggcttatgatccaagtaacacagaagaaattgcaaatgggttgctttttcttaattcaagtcatatttatgaaaaacaagacagatgttgccacaagacagtgcattccatggcatcaaagttcacggatggtgacctgaacaatgatggtcctcatgatgaaggcttacgctctagtcagcaaaatcccaaagtacagaaatacattagcttcagcctcccgctatctgaggcaactgcacacatttacccaggtgacagtgccgtggccaacaaacaacccagcccacagctttccagtgaagactctgacagtgactatgaactttgcccagagataaccctaacctacaccgaggagttttcagatgatgacctggagtatctggaatgttctgatgttatgacggattactctaatgcagtttggcaaaggaacctgctggggactgagcatgtttttttattagaaagcgatgacgaagagatggaattcggtgagcattgcctgggtgggtgtgagcatttcctcagtggaatgggttgtgggtctcgggtgtcgggtgacgctgggcctatggttgccactgctggcttctgtggtcatcactcacaaccccaagaagttggggtgaggagcagcagagtctccaagcacggtccctcatccccacaaacagggatgactctcattttgggacctcaccaggatggaacgtcttcagtgacagaacaggggagatataaactccccactgctcccgaggctgctgaaaatgattatccaggaattcaaggagaaaccagagacagccaccaagcaagagaggaatttgccagtgacaatctgctcaacatggatgaatcagtaagagagacagagatgaagctcttgtctggtgagtcagaaaactcagggatgagccagtgttgggagacggcagctgacaagagagtggggggaaaggacttatggagcaagaggggttcaaggaaatctgccagggtgaggcagccgggaatgaagggaaatcccaagaagccgaatgccaacctgagagaaagtacaacagaaggtacccttcatctctgctctgccaaagaatctgctgagcccccactaacccagagtgataaaagagagacttctcacaccacagcagcagcgactggtcggagttcccatgctgatgcaagagaatgtgctatttcaacccaggcagagcaagaagcaaaaacccttcaaacttcaacagactcagtctccaaagaaggcaacacaaattgcaagggagaaggcatgcaagttaatactctatttgaaacaagccaggttccagactggagtgatcctcctcaggtacaagttcaggaaacagtcagagagacaatctcttgcagccagatgccagctttctcagagcctgctggggaggagtccccattcactgggaccacaacaatttccttctcaaacttaggaggggtccacaaggaaaatgcatcattagctcaacactcggaggtcaaaccctgtacctgtggtccacagcatgaagaaaaacaagacagagatggcaacatacctgacaatttcagggaagacctaaaatatgagcagagcatctcagaagccaatgatgagactatgtccccaggtgtgttctcaaggcatctccccaaggatgctcgtgctgacttcagggagcctgtggctgtctctgttgcttcccctgaacccacagatactgccctcaccctggaaaatgtgtgtgatgagccaagggacagagaagcagtgtgtgcaatggagtgttttgaggctggtgaccaaggaacgtgttttgataccatagattctcttgttgggagaccagttgataaatattcgcctcaagaaatttgctctgtagatacggaactggcagaaggtcaaaacaaagtatctgatttatgttcttctaatgacaagacactggaagtcttttttcagacacaagtgtctgagacttcagtgtctacgtgcaaaagcagcaaggacggcaactcagtcatgtcccctctttttaccagtactttcaccttgaacatttcacacacagctagtgaaggtgccacaggagaaaatctagccaaggtggagaattccacctacccactggcctccacagtacatgctggccaggagcagccaagccccagcaactcaggagggcttgatgaaacacagctcctttcttctgagaacaatcctttagtgcaatttaaagaaggaggtgacaagagccccagtcctagtgccgcagacaccacagccacaccagccagttatagttcaattgtgagttttccttgggagaagccaacaacattaactgctaataatgagtgctttcaagcgaccagggagactgaggacacatcaactgttaccattgccaccgaagtccacccagccaaataccttgctgtgtcaattcctgaggacaagcatgcaggtggcactgaggagaggttccctcgtgcatcccatgaaaaggtttcccaatttccttcccaagtgcagttggatcatattttaagtggtgctaccatcaaatctacaaaagagctactttgcagggcacccagtgtgccaggagtcccacaccatgtcctgcagctcccagagggagagggtttctgcagtaattcccctcttcaggttgataacctgtctggagataagagccagactgtggacagagcagactttaggagctatgaagagaatttccaagaaagaggaagtgaaacaaagcagggggtccagcagcagagcctgtcccagcagggttctctttctgcacctgatttccaacaaagtttgcctacgacatctgctgcacaagaggaaagaaacttggtgcccacggcccactcacccgcaagctctagggaaggagcagggcagcgctcaggttgggggacgagggtctccgtggtggctgaaactgctggggaagaagacagtcaggctctgagcaacgttccatctctctctgatatccttttggaagagtctaaagaatatagacctggaaattgggaggcaggcaacaagctgaagattataactctagaggcttccgcttctgaaatctggccaccacgacaactgacaaattctgagagcaaggcatcagacggtggtctcataattcctgacaaggtctgggctgtacctgatagtctaaaggcagatgctgttgtgcctgaattggccccctctgaaatagcagcattggctcacagtccagaggatgctgagtcagcccttgctgatagcagagaaagccataaaggcgaagagcccaccatcagtgtacattggagaagtctttcttcccggggtttcagccaacccagactcctggagtcatccgtggaccctgtagatgaaaaggagttatctgtcacagattcactgtcagcggcttctgaaactggagggaaggaaaatgttaacaatgtgagtcaagaccaggaggaaaaacaactcaagatggatcacactgccttctttaaaaagtttctgacctgccctaaaatcctagagtcctctgtagatcccattgatgagataagtgtgatagagtacaccagggctggaaaaccagagccctctgaaaccacaccacagggcgccagagaagggggtcaatcaaatgacggaaacatgggccacgaagcggaaatccagccggccattttgcaagttccatgtctccagggaaccattctgagtgaaaatagaatcagcagaagccaagaaggcagtatgaagcaggaggctgaacaaattcaacctgaggaggcaaaaactgccatttggcaagtcctgcaacccagcgaaggcggtgaaagaattccaagtggatgtagcataggccaaatacaagaaagcagtgatgggagcttaggggaggctgagcaaagcaaaaaggacaaagcagaattgatttcccccacttcacctctttctagttgtcttccaataatgactcacgcttctcttggggttgacacgcacaactccacaggccaaattcatgacgtccctgaaaatgacatagttgagcccagaaagcgtcagtatgtgtttcctgtttcacagaaaaggggaactattgagaatgagcgtgggaaacctttgccctcttctcctgatcttaccaggttcccttgtacttcatctcctgaaggaaatgtcacagactttttgataagccacaaaatggaggaacctaaaatagaggtgcttcaaattggggaaaccaaacccccaagctcatctagctcctcagcgaagaccttggcatttatttcaggagaacgtgagttagagaaagcccctaaattactgcaggatccatgtcaaaagggcaccctgggctgtgcgaaaaagtccagggagagagagaagtccctggaagcccgagcaggcaaatcgccagggaccctcacagcagtgacggggtcagaggaggtcaagaggaagccagaagccccaggcagtggacatttagctgagggagtaaagaagaaaattttgtccagggtggcagcactgaggctgaaactggaagaaaaggaaaatatcagaaagaactcagcctttcttaaaaagatgcccaaactcgaaacatcattatcacacacagaagagaaacaagacccaaaaaagccatcttgcaaaagagaaggaagagctccagtattactgaaaaagatccaagctgagatgttccctgaacactctggaaatgtaaaattaagctgccaatttgcagaaattcatgaagattctactatctgctggacaaaagattcaaagtccatagcccaagtgcagagaagtgcaggggacaactccactgtttcctttgccatcgtgcaagccagtccgaaggaccagggactctattactgctgcatcaagaacagctacggaaaagtgactgctgaatttaacctcacagctgaagttctcaaacagctgtcaagtcgccaggatactaaaggatgtgaagagattgaattcagccaactcatcttcaaagaagacttcctccatgacagctactttgggggccgcctgcgtggtcagatcgccacggaggagctgcactttggagaaggggttcaccgcaaagccttccgcagcacagtgatgcacggcctcatgcctgtcttcaaacctggccatgcctgtgtgcttaaggtgcacaatgccattgcctatgggaccagaaataatgatgagctcatccaaaggaactacaaactcgctgcccaggaatgctatgttcaaaatactgccaggtattatgccaagatctacgctgctgaagcacagcctctggaaggctttggagaagtacctgagatcattcctatttttcttatccatcggcctgagaacaatatcccgtatgctacagtggaggaggagctgattggagaatttgtgaagtattccatcagggatgggaaagaaataaacttcttgagaagagaatcagaagctggtcagaaatgttgcaccttccagcactgggtgtaccagaaaacaagtggctgcctcctggtgacggacatgcaaggtgtaggaatgaagctaactgacgttggcatagcaacgctggctaaagggtacaagggatttaaaggcaactgttccatgaccttcattgatcagtttaaagcactacaccagtgtaacaagtattgcaaaatgctgggactgaaatcccttcaaaacaacaaccagaaacagaagcagccgagcattgggaaaagcaaagttcaaacaaactctatgacaataaagaaggcagggcctgagaccccaggcgaaaagaaaacctaacgtccctgggtaacctaatggccactggctagcagcacacaatctcgccagggaaaatctgaggccacacaggagagaatatacagcctgcagagagtgcgtggcaatccttactcccagccgactgtgcgccaagatgcttctaaacccatcacctgctgtcttcactcaaatgatttcagaacaggatttgcgaccaggtttatggggagattgaatcaacgattggtctcaaagacagtccattctttatatacatgtttagcatttttaccaacctcacatcatgtgtatatttgtgtatttgcacatggttgtgctgtcgaggacctggtgctgagaagagtctgttcacagccaaaattcttcccactgtcattcctaacctgggatttctagacacatcctgctgtgatgtaaacagaaatcacgaattcgctcactggatcaagttgttccactggtgtctaatacgctattgttgccggaggtgggttctgtgacgtgaagccatttcccatcattcaacagccagttacaattttctgtttaattaaattcatatttaaacaaaaa

SEQ ID NO: 1392 - DNA, 420 bp, Homo sapiens
acacaatatgaaaaacaattagagcagttaaacaagggtaatacggcttcactaaataagaaggaactcacacttaaagatgtggaatgtaaattctccaaaatgaaaactacttatgaagaggttacaaccaaattagaagaatacaaggaagcctttgcagtagcattgaaagctaacaattccatgtcaaaaaaattaacgaaatctaataagaaaatagcaatgatcagcaccaagctccttatggagaaagagcgggtgaaatattttctcagcactcttcctacaaggcgaggcccagagtcaccttgtgttgaaaatcttactagtataggactcaacagaaaatatattccccaaatgcccgtaagaattcctacttcaaaccctcagacctcaaataactgccagaactac

SEQ ID NO: 1393 - DNA, 8780 bp, Homo sapiens; identical to SEQ ID NO: 363

SEQ ID NO: 1394 - DNA, 6904 bp, Homo sapiens; identical to SEQ ID NO: 940

SEQ ID NO: 1395 - DNA, 3000 bp, Homo sapiens
aggaggctaggtcaggaagggcaagcactggtggcctacccaggacttggcccaaccctctgggtcaggtcaccctcgtcggagtgagcggaccccgctggaattggagcccagtaaggtctatgagtttggtgttttgatcctggctacccatcccttccatcccaggggtggttcaccaggctgagtggagccttatactagggagagaggaagctgaagaactgggctccagagaggacgcccggtgaaggggctccagcctggcagtttctgcgtgttagcatttctagaatagagtgggtgggaactgacccaagtaaagtcccagagactcgaacactgacgcacaggaaagcctcaagtgggaggagaaatgcaaatcccctactgatgatggcgtcagcggctttctcctagggactgtgaggggcgcttctgactttggacttgagcactgcctgggacctgtgctgagagagcgctagcatgtctcagtggaatcaagtccaacagttagaaatcaagtttttggagcaggtggatcaattctatgatgacaactttcccatggaaattcggcatctgttggcccaatggattgaaaatcaagactgggaggcagcttctaacaatgaaaccatggcaacgattcttcttcaaaacttgttaatacaactggatgaacagttaggtcgtgtttccaaagagaaaaacctactcttgatacacaatctaaaaagaattaggaaggtccttcagggaaaatttcatggaaatccaatgcatgtagctgtggttatttcaaactgtttaagggaagagaggagaatattggctgcagccaacatgcctgtccaggggcctctagagaaatccttacaaagttcttcagtttcagaaagacagaggaatgtggagcacaaagtggctgccattaaaaacagtgtgcagatgacagaacaagataccaaatacttagaagatctgcaagacgaatttgactacaggtataaaacaattcagacaatggatcagagtgacaagaatagtgccatggtgaatcaggaagttttgacactgcaggaaatgcttaacagcctcgatttcaagagaaaggaggctctcagtaaaatgacccaaatcatccatgagacagacctgttaatgaacaccatgctcatagaagagctgcaagactggaagcggcggcagcaaatcgcctgcatcgggggtccactccacaatgggctcgaccagcttcagaactgctttacactattggcagaaagtcttttccaactgagaaggcaattggagaaactagaggagcaatctaccaaaatgacatatgaaggtgatcccattccaatgcaaagaactcacatgctagaaagagtcaccttcttgatctacaaccttttcaagaactcatttgtggttgagcgacagccatgtatgccaacccaccctcagaggccgttggtacttaaaaccctaattcagttcactgtaaaactaaggctactaataaaattgccagaactaaactatcaggtaaaggttaaggcatcaattgacaagaatgtttcaactctaagcaaccgaagatttgtactttgtggaactaatgtcaaagccatgtctattgaagaatcttccaatgggagtctctcagtagaatttcgacatttgcaaccaaaggaaatgaagtccagtgctggaggtaaaggaaatgagggctgtcacatggtgactgaagaacttcattccataacgtttgaaacacagatctgcctctatggcctgaccatagatttggagaccagctcattgcctgtggtgatgatttccaatgtcagtcagttacctaatgcttgggcatccatcatttggtacaacgtgtcaaccaacgattcccagaacttggttttctttaataatcctccacctgccacattgagtcaactactggaggtgatgagctggcagttttcatcgtacgttggtcgtggtcttaactcagatcaactccatatgctggcagagaagcttacagtccaatctagctacagtgatggtcacctcacctgggccaagttctgcaaggaacatttacctggtaaatcatttaccttttggacatggcttgaagcaatattggatctaattaagaaacacattcttcccctttggattgatgggtatgtcatgggctttgttagcaaagagaaggaacggctgttgctaaaggataaaatgcctggcacctttttattaagattcagtgaaagccatctcggaggaataactttcacctgggtggaccattctgaaagtggggaagtgagattccactctgtagaaccctacaataaaggccggttgtctgctctgccattcgctgacatcctgcgagactacaaagttattatggctgaaaacattcctgaaaaccctctgaagtacctatatcctgacattcccaaagacaaagccttcggtaaacactacagctctcagccttgcgaagtttcaagaccaacagaaaggggtgacaaaggttatgttccttctgtttttatccccatctcaacaatccgaagtgattcaacagagccacattctccatcagaccttcttcccatgtctccaagtgtgtatgcggtgttgagagaaaacctgagtcccacaacaattgaaactgcaatgaagtctccttattctgctgaatgacaggataaactctgacgcaccaagaaaggaagcaaatgaaaaagtttaaagactgttctttgcccaataaccacattttatttcttcagctttgtaaataccaggttctaggaaatgtttgacatctgaagctctcttcacactcccgtggcactcctcaattgggagtgttgtgactgaaatgcttgaaaccaaagcttcagataaacttgcaagataagacaactttaagaaaccagtgttaataacaatattaacagaaga

SEQ ID NO: 1396 - DNA, 6841 bp, Homo sapiens
agcttagcaggcgacgttgcgggccctgggcgccaggagagcttcccggagtcgaccttcctgctggctgctctgtgaccgcttcccggctctgccctcttggccgaagtgcccgctgccgggcgcgggcctcagacaatacaatggtgggtgaagagaagatgtctctaagaaaccggctgtcaaagtccagggaaaatcctgaggaagatgaagaccagagaaaccctgcaaaggagtccctagagacacctagtaatggtcgaattgacataaaacagttgatagcaaagaagataaagttgacagcagaggcagaggcaactgaattgaagccattttttatgaaggaagttggcagtcactttgatgattttgtgaccaatctcattgaaaagtcagcatcattagataatggtgggtgcgctctcacaaccttttctgttcttgaaggagagaaaaacaaccatagagcgaaggatttgagagcacctccagaacaaggaaagatttttattgcaaggcgctctctcttagatgaactgcttgaagtggaccacatcagaacaatatatcacatgtttattgccctcctcattctctttatcctcagcacacttgtagtagattacattgatgaaggaaggctggtgcttgagttcagcctcctgtcttatgcttttggcaaatttcctaccgttgtttggacctggtggatcatgttcctgtctacattttcagttccctattttctgtttcaacattgggccactggctatagcaagagttctcatccgctgatccgttctctcttccatggctttcttttcatgatcttccagattggagttctaggttttggaccaacatatgttgtgttagcatatacactgccaccagcttcccggttcatcattatattcgagcagattcgttttgtaatgaaggcccactcatttgtcagagagaacgtgcctcgggtactaaattcagctaaggagaaatcaagcactgttccaatacctacagtcaaccagtatttgtacttcttatttgctcctacccttatctaccgtgacagctatcccaggaatcccactgtaagatggggttatgtcgctatgaagtttgcacaggtctttggttgctttttctatgtgtactacatctttgaaaggctttgtgcccccttgtttcggaatatcaaacaggagcccttcagcgctcgtgttctggtcctatgtgtatttaactccatcttgccaggtgtgctgattctcttccttactttttttgcctttttgcactgctggctcaatgcctttgctgagatgttacgctttggtgacaggatgttctataaggattggtggaactccacgtcatactccaactattatagaacctggaatgtggtggtccatgactggctatattactatgcttacaaggactttctctggtttttctccaagagattcaaatctgctgccatgttagctgtctttgctgtatctgctgtagtacacgaatatgccttggctgtttgcttgagctttttctatcccgtgctcttcgtgctcttcatgttctttggaatggctttcaacttcattgtcaatgatagtcggaaaaagccgatttggaatgttctgatgtggacttctcttttcttgggcaatggagtcttactctgcttttattctcaagaatggtatgcacgtcagcactgtcctctgaaaaatcccacatttttggattatgtccggccacgttcctggacttgtcgttacgtgttttagaagcttggactttgtttcctccttgtcactgaagattgggtagctccctgatttggagccagctgtttccagttgttactgaagttatctgtgttatttggaccactccaggctttacagatgactcactccattcctaggtcacttgaagccaaactgttggaagttcactggagtcttgtacacttaagcagagcagaactttttttgtggggctgggtggggggagaagaccgactaacagctgaagtaatgacagattgttgctgggtcatatcagctttatcccttggtaattatatctgttttgtttcttgactctgtccaatcagagaataaacatcatagtttcttggccactgaattagccaaaacacttaggaagaaatcacttaaatacctctggcttagaaattttttcatgcacactgttggaatgtatgctaattgaacatgcaattggggaagaaaaaatgtagaatgatttttgctatttctagtagaaagaaaatgtctgttttccaaagataatgttatacatcctattttgtaatttttttgaaaaaagttcaatgttcagttttccttagtttttaccttgttttctctataggtcatgatttctgtgaagcaaaaagatgccttttaccatgaattcttgagtttacatcaataatattgtatattaaggggatcagaagtaggaaggaaaaaataagagatagcagaggaaaaagaaaaacatttcctcttataacttctgaagtaatttgtaaaaaagatttgtagagtcaatcatgtgtttaaattattttatcacaaacttaacatggaagatattcctttttaactttgtggtaacttctttgaagttatttagaaatatcctttggaacaattattttattgtctaataaatattgacttctcttgaattattttgcagactagtgagtctgtaccataagtattaatcacctccactcatattaaagtgatcattaagaatccagaagctggcttctgcatttgctcagttatacttttaatggtagtatgtttttaggtggaataaattaatatgtgattggtttcaaggaaatgtactctattatgtaatacttccattttataagatgcccatttctaatacaatgtgtgtaggaattatttgtatgtatgaggtatgattgtaaagattgagcattggaaggggtatcagagaccatgtagttcaactttccactcaaagtaagatttatgaattatttaaatgatagttgttacttggaacagccacttgagaggctctcttggtattgtttggaattgttttaaagtcagtttgagtctcacaagaaggtaagtagagtttcttaatagtcacaacttaatttgaaccacaagtatccagcttaatcacgtatcttactcacgataccactggtccagatgagtttaggtaattttcaaacattaaatccaacttcaacggaaacaaatacactcaagggaagttatttttaaaaaggtactctgcatgttcccgcagtaatgttctgcacaacagtattgtaattgtaatggaatcataacctgctaactagtttgctttaatatggcttgtaattcttgacatttttcttaaaattaaaacgaatttttattttgaatttataactgcattttaaatatattggggacagattgcgctgagacctggttatgagcaagccaatcttttgaatctagagaatggaattcttaggtttatatttctgttaagaaatactataaatatgactcttatgagaagactttgttgctctgtagtgtttctgaatactgtatttgttggattgatcaaggctatttttcaaaaagctctctgcttcctgtttgtttgtttgtttgtttttgagacagagtcttgctctgtcgccggggctggagtgcaatggcgtgaactcagctcactgcaacctctgcctccctggttcaagctattctcctgcctcagcctcctgagtagctgggattacagggccacgcctggctaatttttgtatttttagtagagatggggtttcaccctgttggtcaggctggtctcaaactcctgaccttgtgatctgcccacctcagcctcccaaagtgctgggaagacaggcgttagccaccgtgcccggcctctgtttcctgttattagtgattttcctgcccaagattgcaacaacaaatatgtagaactacagactgtttagaatgctgagactgttctaagaaactttcaaaaacagtagcacttcaaggaatggtcactttctatgaaagaaactggtttgatagccataatcttattgctagctgcttttagcaaaagtcttttcttgaaaccaccacctatactctttaaacaaataaaaactaaaatctcttgctaatgtttcaggaagatttattttttctattttgctattgtggcgaaaattattttcagttataggatacttttttccttctgaaaagtaataagcttaaagtttttgtttctgtaagatgtaatgatagtaactattattttgggcatattaaccaacagaacaattatgtagtatgtatatcactttctcattagatctctaacttgaccttctagtacctttatgtgtgaggataaatttgttagatccttttattctcaatcttggataatgatgcaaaatggaattttgttttgtttgttggtagattcacatactaaaactttgcaggtaaagttgcttgcctcatgttagaatttaattagaaaactgaggctgcctttttttttttttttttttttttttaagacagagtcttgttctgtcgcccaggccagttttttttttcttgtacagatggggttttaccatgttgctcaggctggtctcaaactcctggagtcaagggatctatttgcctcagcctctcaaagtgctgggattacaggtgtgagccacggctcctggctccttgctccagaatcagttttttaatggaagatagctcatactttgtttttgtttttaaagagacagggtctcactctgttgcccaggctggtagtagcgtgatcatagctcactgcagtctcaaactcctggactcaaatagtgctctggagtacctagaactacaagtgcctaccaccacacccagctaatttatttgtttttttttttttagagatggggggggtctccctatgttgcccaggctggtctcaaactcttcacctcaagcaaaactcccactgcagaaagctttgggattacaggcatgagccaccatgccaagcccatacttattgttaataaagtttcagtgacttgcttactaatcttatgcaaaatttcatgtaatttatgtaatactacataacaatgctacatatggtatgtatacatacactgtatacacacaaaggtctgttctgggtattttatgtatcttatctctaggctttatggctctgaaatggagggaactggacataaatgtttcaaggaataaagtgaatgttttgtttgtttgtttgttttgagacggagtctcagtcaccaggctggagtgcagtgctgtgatctcagctcactgcaacctctgcctcctgggttcaagcgattctcctgcctcagcctcccgagtagctggcattacaggtgcctgccaccatgtccagctaatttttgtgtttttagtagagatggggtttcaccatgatggtcaggctggtctcgaactcctgacctcatgatccgccagcctcagcctcccatagtgctgggattataggcatgagccatgctcccggccaaagtgaatgttttgggtgaagtttatataaggatttgacttttgtatcattattaaagtttctgtcaggtaatacagtgttggccctctgttgaaataaaatgttacatatcgctgggtgtagtggctcatgcctttaatcccagtactttgggaggccaaggcaggaggattgcttgagctcagaagtttgagaccagcctgggcaacatagcaaaaccttgtcactataaaaaatacaaaaattagccaggcgtggtggtgcacgcctgtagtctcagctactcagtcggctgaggtgggaagatggcttcaagccgggagatggaggcttcagtgacctgtgacctgtgatcacaccacttaattcctcaaaacatttatgtcccagttccctccatttcagagccatgggcaacagagcgagaccctgtctcaaaaaaaaaattacatataagcccggtttaaagagaggataatatgcaaccaccctagttgaaacagagtgtatcacttctttctcaccctaaatttaatgcctagtttgaaaatcagtagacaataataaagttgataagctttaggttggtaggaaagctatgtaatctatatagtgtactaaatccttatatgtttttggtaaaaaaagactttaatagctaatttggacttcagaaaatgggttaatttcacgagtgcatatcacttttgactatattagtcaagcatattattaaagtttaaaaaactctaaaacttctgtactgtttttttcttaagtgctctcttccttatttctacattactacattcacatttctgctgtcaataagccctaatggagtgataaactttaagctagtagatactgcaccatgtcttgtggtggtgttttcttaatgaaatggaagctgtacttcctgtttgtttttaaatacttttgaaacagacagttcatgtaccccatcatttagagatgcagtttgaatttccatggaaaaaggtgccaattttggattgggaaaggagctgaagccccagtcaagactttgccatttggggtaatgcagcagattcctgtgtctgtatctttccagtgtgtgtgttaatccatagtgttctgagcaccagaagggtcatgtaaatctgaagttgttattaaaggtttttctatagtgaaa

SEQ ID NO: 1397 - DNA, 1314 bp, Homo sapiens; identical to SEQ ID NO: 887

SEQ ID NO: 1398 - DNA, 6123 bp, Homo sapiens
cttctgctccggccctgtcctcaaattggggggctgatgtccccatacacctggctctgggttcccctaaccccagagtgcaggactaggacccgagtggacctcaggtctggccaggtcgccattgccatggagacagcaacagtccccagccgcgggttccctaagtgactggttactctttaacgtatccacccaccttgggtgattagaagaatcaataagataaccgggcggtggcagctggccgcactcaccgccttcctggtggacgggctcctggtggctgtgctgctgctgtgagcgggcccctgctcctccatgcccccagctctccggctgggtgggcttggccatggtcagcgtgaacgcgcccctcggggctccagtggagagttcttacggtaagtggggctgggggaagactggacagggcgggactgcggtcagctttgggaggccatgggacacctccccgtgtgtttcttacgggcccaaagctcctcctggagctcctctggaagggcaggaagccccacggaggcaatgtgaccgcttccctaagctctcaagccggggcatggcctgcttggtgcgagaagtgctgggaggggccgagaagccctggggcagaggcttggctcattttgtctgtccagaggccttcctgggaatgcatctcaggggtctttccaaaaccccacagagggtggggcttggaagcaccgtcctgtttcgatgcggggcaaattgaggtccaccaggagaggcttgctgggcctaggtcacgttgctggtgcattatcaagctgggcgtgggaccgggcagctcggtcgctccgcacctccgttggctctggataatggggaggaggtagaaagcgccgcgcagggtggagcgttggaaaatgagaatatcttgtgcggacgtgtgaaactcagatgcagggctagaaagcatgtgttactgagagtgaaaggctcaggctcactccttagggtgacccccacattggaagcaacccaatgtccctcagcagagggaagacgggtaaataaagcgtgagacgtctttacagtggaatgctatcccattgttcaaggaaacaacgcacatctgtgtgtgacagggaagaacctctcagttaaattaagtgaaaacggtacactgaagaactgtgtagttgctgatagcgaaacggatatagatgtatatatgtacacacgcgtatacgtgtacattccacgcatagaaaattcgtggaatgacacaataaaattggtgacaggtttgtttctgaggagggaaattcaagagaatgttttatcttttggggacacattttggattttttaaaagttgggtgccttttataaacctgttcaaatcacacacccgcacagaacttggtctctggaatccagcagacctcggggtctagttgtgactctgtcacacggctcaacattcacgtgcctcttgctttctttctgaagtggagacaggactaggatgtgtcttaagatcatggtggatgccgtggggaacaaggatgtaaagcccttgataccacgtgcattgcaaagacacaatcaacatttatgtcatcaattgctgaggacagagggccagggaatgacagaatcagggcctgatctcctgactctagtcaggaagaatcttctttgctttgacccccatcaaacaggaatatgtgatgcactggaaatggcagaggctgaagaaaccaacagcctgggaacccatcccacacaccagctgtgtgaccttgggcaagacatttcccctctctgaacctatttcctcatctgtaaaatgaagataacaacaggacctatctcccagagagcggggagattagaggagatagcatagaggagattaagggtgaggccacccttaatccacaattttaagacctggagtatagatgccaatggatgacttggttgaacctgtggctaggggaagacattgtctctcaaaggggccagacagcttctggggaaggacagcccaggtcataaggctaagctaggggtgaacagaaggccccacagtgtctcttaaaggatgatacaataatataacctgacagcctttcactgtctcccacgtctctgcaccttgtaggatgtcctcatgtctcttcatctctgctcctgtgtcatactcattatatagcaaacattcagcaattattagaatggttgcttctatcgacaggtaggtgggtgaatggatggatgaatgggttagtgaatgttctactattatctctcagacagctgtttcattttccaaacggctgtctgagataaataatattgtaatctccaaggacagaagaaaaaactaaggttcaagattgcagagagggcactgggaggaggcagtgggagggcggagggcgggggccttcggggtgggcgcccagggtagggcaggtggccgcggcgtggaggcagggagaatgcgactctccaaaaccctcgtcgacatggacatggccgactacagtgctgcactggacccagcctacaccaccctggaatttgagaatgtgcaggtgttgacgatgggcaatgcgattttgttgccgctgcgtctcgccagattgaggcatcccctccgacatcactggagcatatctggaggggtggacagttctccacagggagacacgtccccatcagaaggcaccaacctcaacgcgcccaacagcctgggtgtcagcgccctgtgtgccatctgcggggaccgggccacgggcaaacactacggtgcctcgagctgtgacggctgcaagggcttcttccggaggagcgtgcggaagaaccacatgtactcctgcagatttagccggcagtgcgtggtggacaaagacaagaggaaccagtgccgctactgcaggctcaagaaatgcttccgggctggcatgaagaaggaagccgtccagaatgagcgggaccggatcagcactcgaaggtcaagctatgaggacagcagcctgccctccatcaatgcgctcctgcaggcggaggtcctgtcccgacagatcacctcccccgtctccgggatcaacggcgacattcgggcgaagaagattgccagcatcgcagatgtgtgtgagtccatgaaggagcagctgctggttctcgttgagtgggccaagtacatcccagctttctgcgagctccccctggacgaccaggtggccctgctcagagcccatgctggcgagcacctgctgctcggagccaccaagagatccatggtgttcaaggacgtgctgctcctaggcaatgactacattgtccctcggcactgcccggagctggcggagatgagccgggtgtccatacgcatccttgacgagctggtgctgcccttccaggagctgcagatcgatgacaatgagtatgcctacctcaaagccatcatcttctttgacccagatgccaaggggctgagcgatccagggaagatcaagcggctgcgttcccaggtgcaggtgagcttggaggactacatcaacgaccgccagtatgactcgcgtggccgctttggagagctgctgctgctgctgcccaccttgcagagcatcacctggcagatgatcgagcagatccagttcatcaagctcttcggcatggccaagattgacaacctgttgcaggagatgctgctgggaggtccgtgccaagcccaggaggggcggggttggagtggggactccccaggagacaggcctcacacagtgagctcacccctcagctccttggcttccccactgtgccgctttgggcaagttgcttaacctgtctgtgcctcagtttcctcaccagaaaaatgggaacaaggcaatggtctatttgttcaggcaccgagaacctagcacgtgccagtcactgttctaagtgctggcaattcagcaaagaacaagatctttgccctcggggaggctgtgtgtgtgtgagtatgtatggatgcgtggatatctgtgtatatgcccgtatgtgcgtgcatgtgtatataaagcctcacattttatgattttgaaataaacaggtaatatgaggtcccccagcgatgcaccccatgcccaccaccccctgcaccctcacctgatgcaggaacatatgggaaccaacgtcatcgttgccaacacaatgcccactcacctcagcaacggacagatgtgtgagtggccccgacccaggggacaggcagccacccctgagaccccacagccctcaccgccaggtggctcagggtctgagccctataagctcctgccgggagccgtcgccacaatcgtcaagcccctctctgccatcccccagccgaccatcaccaagcaggaagttatctagcaagccgctggggcttgggggctccactggctccccccagccccctaagagagcacctggtgatcacgtggtcacggcaaaggaagacgtgatgccaggaccagtcccagagcaggaatgggaaggatgaagggcccgagaacatggcctaagggccacatcccactgccacccttgacgccctgctctggataacaagactttgacttggggagacctctactgccttggacaacttttctcatgttgaagccactgccttcaccttcaccttcatccatgtccaacccccgacttcatcccaaaggacagccgcctggagatgacttgaggccttacttaaacccagctcccttcttccctagcctggtgcttctcctctcctagcccctgtcatggtgtccagacagagccctgtgaggctgggtccaattgtggcacttggggcaccttgctcctccttctgctgctgcccccacctctgctgcctccctctgctgtcaccttgctcagccatcccgtcttctccaacaccacctctccagaggccaaggaggccttggaaacgattcccccagtcattctgggaacatgttgtaagcactgactgggaccaggcaccaggcagggtctagaaggctgtggtgagggaagacgcctttctcctccaacccaacctcatcctccttcttcagggacttgggtgggtacttgggtgaggatccctgaaggccttcaacccgagaaaacaaacccaggttggcgactgcaacaggaacttggagtggagaggaaaagcatcagaaagaggcagaccatccaccaggcctttgagaaagggtagaattctggctggtagagcaggtgagatgggacattccaaagaacagcctgagccaaggcctagtggtagtaagaatctagcaagaattgaggaagaatggtgtgggagagggatgatgaagagagagagggcctgctggagagcatagggtctggaacaccaggctgaggtcctgatcagcttcaaggagtatgcagggagctgggcttccagaaaatgaacacagcagttctgcagaggacgggaggctggaagctgggaggtcaggtggggtggatgatataatgcgggtgagagtaatgaggcttggggctggagaggacaagatgggtaaaccctcacatcagagtgacatccaggaggaataagctcccagggcctgtctcaagctcttccttactcccaggcactgtcttaaggcatctgacatgcatcatctcatttaatcctcccttcctccctattaacctagagattgtttttgttttttattctcctcctccctccccgccctcacccgccccactccctcctaacctagagattgttacagaagctgaaattgcgttctaagaggtgaagtgattttttttctgaaactcacacaactaggaagtggctgagtcaggacttgaacccaggtctccctggatcagaacaggagctcttaactacagtggctgaatagcttctccaaaggctccctgtgttctcaccgtgatcaagttgaggggcttccggctcccttctacagcctcagaaaccagactcgttcttctgggaaccctgcccactcccaggaccaagattggcctgaggctgcactaaaattcacttagggtcgagcatcctgtttgctgataaatattaaggagaattca

SEQ ID NO: 1399 - DNA, 3336 bp, Homo sapiens
gaggttcgcgagtctctgggtcgcgacgggaaggagtgaaacacctctctgcgcctgcgcgctccgtgcctgcgaagcaaacccggcctcaccttttcctgcccgaagcagaagattctcgcagtcctggtttctccctccagaagaccccccacccaaatcctctgtagctcctggtagtgccctgacccctgctgccaccgtccttcagagagcaacggaagagcttcccggagggcgaggaaaagagggaaagtagccagcaatgtcgaacgcaatgtataataagatgtggcatcagacccaagaagccctcggtgctttactcgataaagagcctcagaagatgattgaaccacaaagaaatcaggttttcatctttcaaacattagccaccttctacgtaaagtatgtgcagatctttagaaacctagagaatgtctacgaccagttcgtccacccccagaaacgaatactgatcaggaaagtcctggacggggtgatgggccgcatcctggagctgaagaacgagatggtggagctggaactcacggagttccattatttcgatgatatcctgcaggatctcaagctggccccccaacaattagatattcccatacccaagtattttttgaaggagaagttggaagtaataaaaggaagagagaaaattcttgctcaaatattagcggacagcggaatagatacatctgacatgaaataccctgtaaagagtatccctttcgatgaggctgttaaattaatccagattgctgagagggcacggcaaggtcgcctaagggctttattcatgaagcaaatctatctgcaagaatatagagcaaagcaatccaagatgcttggcaagaaagtgacagatacctgggctgctgcactccgcattcagaaggtttggcgacgtttccatcaacgtaaggaaactgaaaaactgagagaagaggagatgatcttcctgggtatgaatccacctcctctctttaatgaagtcagtgctacagtaatccaggctgaaaaggtggaccgcctgcggaatgaggtgcagataaagcatgaagaggactacagggaagccctggttaccatcaagaatgacctaaagttgatagaaggcgtggatatcaaggagaaccttcaagaccagatccggcattggttcatcgaatgcagaaatttaaccgggacatttcctgactaccctgacgttgaagaaggagggtcagctattattttttctgacaagaccatacaacaggttattgaggatatcatagcaaaccaagaggaagaagaaaaaaacaaaaagaagaagaagaaaaaggaaaaacaacccaagaaagccaaaaaacaaaagaaaggaacaaaggagaaaaataaggaagaagacgaaaaatggaaaatgtcaccaagtctttttcttcctgcaatgaaggaaggatgtaacgcatacaaagaaatctggatgaaaaaagatgagtcttggaatttctctcaggactatgatccagaactgatcaaagaggagaaacgaaaagaattacagtcagagatcaggatacaggttgatgagttgatgagacaggaacttaaaaacttaaagctagctgtggacagagaaagggagcgcccagtgaaagcaggaaagaaaaaggacaagaagaaaggaaagaaaggcaaaaagaaagagaagaaggcaaagaaggataaagatctgacagctgacaggaccatcgagtctctgtataaggaactggtggaagaaggattactgatccaggctctgaaagtcaacctctctgattacattggtgagtacagctacctggggactactcttcgccaggtgtccatagaacccatgccctccctcctggatgtcagacagctcatcacattgtacggaatctggccattaggttctgcagcagtgcatgagaaagctcctttggtgaaatcgctactgttagccgggccgtctggggtagggaagaaaatgctggtccatgccatctgcaccgaaacgggagccaacctcttcaacttgtcctcctctaacattgctgggaaataccctggcaaaaatggcctccaaatgatgctgcatgcagtcttcaaggtggctcgacagctccagccctccgtggtgtggattgaagacacagaaaaaaccttctacaaaaaagttcccaacgcagaaaagatgttcactccctctgctggcgaagttgctgcattgcagaaaaacttgaaaaggtccacaagtagaatgaacctaaacgcctgaaaaaacaccttccccaaatcctgaaactcctgaaaccagatgaccggattctgattgtggggaccacacggcgtcccttcgatgctgaactccaatctttctgcaaagtttaccagaaaattattttggtgcccagaccagactatgcttccagatacgttctgtggaagcaaatcattgaacgcaatggaggagtcctcaccagtgccttgaatgtcagctgcctggcgaaggtcactgacggcttcacccaaggacatatagtcgaagtggttaaaggcgtgctcacagatcagagaatccggcggcaaattcataaacctctcactgcagttgagtttattacggcgataaccagcatgaatccagtgtacaaagaggaagaagagagctttaagaactggtatgccaaaactcctctgggtaaaaaacgtgccttggcgataacaggaggcagcacagaaaaggcaaaggacaaagggaaaaggaaataaaagaaagagaaaaaggcaaaaaagaaaaagtaatgcctttctgaagaaccatgcttgagtctctctgggatggagaggaccccaactcgccaaagaaaagattcaccattgcccgcctgaagaagccctcaggggaaggaacttagcagtgtgcaggtgagctgatgccgcaaacccgctaaccactgcatgtgctgttatgcctttcccaggctggacacctagctgggtgttcatcataactttccacagctttaatccacgccaagtttgtatataactgaaattcactcttgacaccctccacagtctttccaagttggactcttcctctcatcagtactagttgtcaaatttaaaatgtgacagttaaagaatattctagtttgacaattagtaagcaatgagtatatcatcagtacactagctttttattaatccatgtacactgtatagtatcttgcatctattttaataaattaattctttgctctagtaatagattttatataatgaaataaaggtgttgtccttgaa

SEQ ID NO: 1400 - DNA, 4392 bp, Homo sapiens
actcactgagccccaggcccaaggataatgatgtgttgtttcttggtagcataatttgtcacacgtacattttttcttcttcttctcttgcagaaagctctgctccctctctctctccctctctctttctctcttttctccctctcctacattttcttgctgttgctaattcatggtgatcaaatgatgtacgacaaaataaattgtaaagagtgactgcctggagttgggaaccagaaggtgttttccccctcccaaggagacagcaaacctttaaaaaggaaggacaattgatttttggggggagcttaagtgagccttgactttgcagctggttgagaacaggttggaggagggtttaaagccaggtgcaccgagtcagctcgccatgtccagatccggggacaggacctccaccttcgaccccagccacagcgacaacctgctgcacggcctcaacctgctgtggaggaagcagctgttttgcgacgtgaccctgacggcccagggccagcagttccattgccacaaggccgtgctggcctcctgctcgcagtacttccgatcgctcttctccagccacccccctctcgggggaggggtcggcggccaggacggcctgggggcccccaaggaccagcagcagccgccgcagcagcagccgtcacagcagcagcagccgccgccgcaggaggagcccgggactccttcttcctcccccgacgacaagctgctgaccagcccccgggccatcaacaacctggtgctgcagggctgctcgtccatcgggctgcgcctggtgctcgagtacctctacacggccaacgtgaccctgtccctggacacggtggaggaggtgctgtcggtcagcaagatcctgcacatcccccaggtcaccaagctctgcgtgcagttcctcaacgaccagatctcggtgcagaactacaagcaggtgtgcaagatcgccgcgctgcacggcctggaggagaccaagaagctggccaacaagtacctggtggaggatgtgctgctgctcaacttcgaggagatgcgcgccctgctggactcgctgccgccccccgtggagtcggagctggcgctcttccagatgtccgtgctgtggctggagcacgaccgcgagacccgcatgcagtatgcgcctgacctcatgaagcgcctccgcttcgccctcatcccggccccggagctggtggagcgggtccagtcagtggatttcatgcgaaccgacccggtctgccagaagctgctgctggacgccatgaactaccacctgatgcccttcaggcagcactgcaggcagagcctggccagcagaattcgctctaacaagaaaatgctgttattggttggagggctgcctcctggaccggaccggctccccagcaatttggttcagtattacgacgatgaaaagaagacatggaaaatactcacaatcacaggaccacaccccatttcagggaagcaggaaagtgcaagctcaccagagttcagaaggaggaaaaccagagaattttcaaacaacacaatgtgactatcataattatactactagacatcaaattatgccatacaacagtgcccaccactgcgttgtggaggtggaaaacttcttgttcgtgttgggtggagaggaccagtggaatccgaatggaaaacacagtacaaattttgtcagccgatatgatcctcgatttaatagctggattcaacttccacccatgcaggaaagaagagccagtttctatgcatgtcggttggacaagcatttatacgtaattggtggaaggaatgaaactggctacttgtccagcgtggagtgctataacctagaaacgaatgaatggcgctatgtgtcctctttgccacagcctctggcggctcatgcgggagcagtgcacaatgggaaaatatacatttcaggcaaggggtgtacacaatggagaatatgtcccatggctatattgctatgacccagtaatggatgtctgggctcgaaaacaagatatgaacacaaaacgtgcaattcacactttggctgtaatgaatgatcgcttgtatgcaattggaggaaatcatttgaaaggtttctcccaccttgatgtaatgcttgtggaatgctatgacccaaaaggtgaccagtggaatatactccaaactcccattttggagggtcgaagtggccctggctgtgcagtgcttgatgacagcatttaccttgtgggaggctacagctggagtatgggggcctacaagtcatctacaatatgctattgtccagagaaaggaacctggacagaactcgaaggagatgtagcagaaccgttggcaggccctgcctgtgtgacagttattctgccctcttgtgtaccatacaacaaataacaccaggaaactctggaatgaacagtatcacattctaggaagcaatggcaggtgacatcactattataataggaacaatgcattctaatggtacaactgccaaaacccacccttggtttctgatgatttataagtaactacaaaagaaagagacctgttcttgaacagatactatgtctataactcagatcgcaccaaacttcctgtggtgacagactcttccatttcagactggttttaacttatcccagctttacaaaaactcttcatgtgaatcttaacttgcaaaaggagaaagataaaatacagaagactggccccagagagacctcagatcagtattgtgcattgtagtctacctgcatgtgatctatgttgacatttcggggatattgtgttcaagaatgattccaaatttgagccaccaaaatacactgcattacagaaattgccacttgattctgtactcttaacctttggctacttcacagactccattggcaacactgttattgaaaatcatgtaagattaaagagaggcattttcgtttctatacaacttcatttcatacaccttctgcccttacagcacctcatgggatcagaaaagagaaagatgttggctcttgtaataaatgctttctaccctataggttctaggctagacagagtcgtcatttctgtgtcctcaattttatctgaaagattaaaacaaaatatattatgtcactattcagttcatggaggtttgtgctttttcatattttgtgatatataagtagtgaacacacatgttatttacttcaaaagacaggattgacaaattcagtcaatactattttagagattctgttagatgatatgtctgacccaaatttaatccataataaaaaaaaatgggagattgttttcaggaattcagggatgaaaagaaagaataatttccattaagtagaattccagttgtctttctgtttctaaaacacagaacttacaagagccacaggagccaattatagcacctgacagaatacttctcctcttcctcaccttcgggtgcctctagacacttgacttacgatcgttattcccccaattcatcatattttgtttgttatcaccagagatgcctgaactcagttaagcgagcaattgctagttgtcttgaggagcatgaggaattcaggagcagaaggtcaggatagcatgagatagtctcaatgtggccaaccaaaaggacaaaactgacaggaatgcacattcgattttcaagccctccagagcttgaacaacaactttaggagtaaataaaagcctaaaatatattttaaccatccagagatggtgttgaatccttcaacaaatgtgtcattcaaaacagtaattagggaaatcccacagatgaaaaatgccttagtgataagctttcatggcagagcacgtcaagataaatgggtatactggaatccgatgccgtttctacagtaaagtgcaatcttcgttgtttttgtatttatttgtatgttcagatccaaaggatccgttgtaaaaatatatatatataaatatatgtatatccagtgcaatcaactgtcatttctttttccttaaaacatatgagtatatagaaagaaaagttacagtactctgtgggaaaatctcagctgacatcatgaatagaatgaggtctgcttcagaaccttttgttgtcaactgtcactgtttcttccaaaagtcacaatttgtacaagaacctttgctttccttagacttgttctgcattttattttttatttctcaccaaaataaaagcatttatgagaattataagtaaagctttctgtatttcagagagacataagttactagaaagtgaaaagtgaataaataagtcacagagaatgtaaattttgtacagtattagaatgtgtaaatgaagcttgcttggaaggggaaaactttaaataaaaactttatgtactaatt

SEQ ID NO: 1401 - DNA, 7110 bp, Homo sapiens
agcagcggcggcagcggcagcccagccgagcgttaggtgctgctctctgcgcggcgttttgcaaaggacttcaccgatctacttttgcagtcgcctcggactgtccatgtgtttacttcccccagcccgaggattcgatatctaggttcctgtgaaatgcaactgagcagccaaagtactttgagaacacggggcggcataaacaccaaaacttttttgtggaaggaaaatgcaataagcaagcttgccgttttccgatgcggtgtggagtgagtgtgtgtcgcgcgtgtccgcactggaggcatatgcttgtgtgtgtacatggggtgtgtttttcggtatgtagggagaaaatgcttgccaaccaccggaaatctcctggaatttattagaaaataatggattataaaaagaaggcaagcaaggagcggatctccccttgagttgcaacccgatttgctgctggctcagtttgttgtgattctttttgttgataggtgtctgatggtattccgataacgttccccccttttcttccccttgagcttttacagtttaaaaaaaggaaacaaaaaccaccccaaaatctccccccccgtttttttcgccccgtcgggatcgccgtttccatccatgtgcttgcgtctcccccgcgttccacttaaactattttaatccttggacccaaggaggaggctgataggggggtggataaaaaaagttcttccaaaatagtgtgcccggggagcaggatgggggatttcgcagcccccgctgctgccgcgaatggcagtagtatttgcatcaacagtagcctgaacagcagcctcggcggggccgggatcggtgtgaataatactcccaatagtactcccgctgctccgagtagcaatcacccggcagccggtggatgcggcggctccgggggccccggcggcggttcggcggccgttcccaagcacagcaccgtggtggagcggctccgccagcgcatcgagggctgccgtcggcaccacgtcaactgcgagaacaggtaccagcaggctcaggtggagcagctggagctggagcgccgggacaccgtgagcctctaccagcggaccctggagcagagggccaagaaatcgggcgccggcaccggcaaacagcagcacccgagcaaaccccagcaagatgcggaggctgcctcggcggagcagaggaaccacacgctgatcatgcttttccagctacaagagactgtgaaaaggaagttggaaggagctcgatcaccacttaatggagaccagcagaatggtgcttgtgatgggaatttttctccgactagcaaacgaattcgaaaggacatttctgcggggatggaagccatcaacaatttgcccagtaacatgccactgccttcagcttctcctcttcaccaacttgacctgaaaccttctttgcccttgcagaacagtggaactcacactcctgggcttctagaagatctaagtaagaatggtaggctccctgagattaaacttcctgtcaacggttgcagtgacctggaggatagcttcaccatcttgcagagcaaagacctcaaacaagaacctctcgatgaccctacttgcatagacacatcagaaacatctctttcaaatcagaacaagctgttctcagacattaatctgaatgatcaggagtggcaagaattaatagatgaattggccaacacggttcctgaggatgacatacaggacctgttcaacgaagactttgaagagaagaaggagccagaattctcgcagccagcaactgagacccctctctcccaggagagtgcgagcgtgaagagcgacccctctcactctcccttcgcacatgtctccatgggatctccccaggcgaggccttcttcttctggtcctcccttttctactgtctccacggccactagtttaccttctgttgccagcactcccgcagctccaaaccctgcaagctcaccagcaaactgtgctgtccagtcccctcaaactccaaaccaagcccacactccaggccaagctccacctcggcctggaaatggttatctcctgaatccggcagcagtgacagtggccggttcagcgtcagggcctgtggctgtgcccagctctgacatgtctccagcagaacagctcaaacagatggctgcacagcagcaacaaagggccaaactcatgcagcagaaacagcaacagcaacagcagcagcagcagcagcagcagcagcagcagcagcagcagcagcagcagcagcagcaacagcactcaaatcagacttcaaattggtctcccttaggacctccctctagtccatatggagcagcttttactgcagaaaaaccaaatagcccaatgatgtacccccaagcctttaacaaccaaaaccctatagtgcctccaatggcaaacaacctgcagaagacaacaatgaataactacctccctcagaatcacatgaatatgatcaatcagcagccaaataacttgggtacaaactccttaaacaaacagcacaatattctgacttatggcaacactaaacccctgacccacttcaatgcagacctgagtcagaggatgacaccaccagtggccaaccccaacaaaaaccccttgatgccgtatatccagcagcagcaacagcagcagcaacagcaacagcagcagcagcagcagcagcagccgccacctccacagctccaggcccccagggcacacctgagcgaagaccagaaacgcctgcttctcatgaagcagaaaggagtgatgaatcagcccatggcttacgctgcacttccatcccacggtcaggagcagcatccagttggacttccccgaaccacaggccccatgcagtcctccgtgcccccaggctcaggtggcatggtctcaggagccagtcccgcaggccccggcttcctgggcagccagccccaagcagccatcatgaagcagatgctcattgatcagcgggcccagttgatagagcagcagaagcaacagttcctgcgggagcaaaggcagcagcagcagcagcagcagcagcagattttggcggaacagcagttgcagcaatcacatctaccccggcagcacctccagccacagcggaatccatacccagtgcagcaggtcaatcagtttcaaggttctccccaggatatagcagccgtaagaagccaagcagccctccagagcatgcgaacgtcacggctgatggcacagaacgcaggcatgatgggaataggaccctcccagaaccctgggacgatggccaccgcagctgcgcagtcggagatgggactggccccttatagcaccacgcctaccagccaaccaggaatgtacaatatgagcacaggcatgacccaaatgttgcagcatccaaaccaaagtggcatgagcatcacacataaccaagcccagggaccgaggcaacctgcctctgggcagggggttggaatggtgagtggctttggtcagagcatgctggtgaactcagccattacccagcaacatccacagatgaaagggccagtaggccaggccttgcctaggccccaagcccctccaaggctgcagagccttatgggaacagtccagcaaggagcacaaagctggcaacagaggagcttgcagggcatgcctgggaggactagtggagaattgggaccattcaacaatggcgccagctaccctcttcaagctgggcagccgagactgaccaagcagcacttcccacagggactgagccagtcagtcgtggatgctaacacgggcacagtgaggaccctcaacccagctgccatgggtcggcagatgatgccatcgctcccggggcagcaaggcaccagccaggcgaggccaatggtcatgtctggcctgagccagggagtcccaggcatgccagcgttcagccagcccccagcacagcagcagatacccagtggcagctttgctccaagcagccagagccaagcctatgagcggaatgcccctcaggacgtgtcatacaattacagtggcgacggagctgggggttccttccctggcctcccggacggtgcagaccttgtggactccatcatcaaaggcgggccaggggacgagtggatgcaggagcttgatgaattgtttggtaacccctaatcaagagaggccccaagatccacaactcgagtggttaaagcttaaaaagtgaaaaagaaacaggatgttgacccatccttgttttttgtttttttgacccacgtaaactgagcaaaactgcagctggctgacaatggaagatccaggtgccaatccacagccccaccaggcctcatttcacctgattttcacacagcaatcgagatgagacgccatgcagatcccggctgcgagagagggagacacccggaggagcaggtgggaagatgaagccggccagagcccctctgcccagcatgccctgtgatcgcctggcccagcaggagctgcttcagccgagagggactattacccaagagaggtatcctcagcccctcctgccccaggtcgggagacagcagctttggagacacaaaagagacagagcctcagccagggagagtgagtcccccagaagaggctgggtggttgcacaggccaggtgcacaggttggaaatgcactgaactctgggtgccgagagatgtaaggctttgagacatgctactgaatttggagggcaggcacgaagaacagtgagattgtcaaaaggagacaaccacagatcctacaggactgtctgtctcctgccccatgatgaccctcaggaattgcaaaggctctgctgtcacaaggagagcaggctgagtttggagcagggtccatccggcagtcctgggacggcttccctctgctggtgcccctggtggcagtccctccaggtggggctggagcctgctggcgcccaatacaaaacccatacatccaggtgggtcacatctacttctggcggccgcagggcagggaaacccctactggaccctgtgtgtctgccagcctggagcctttgtctccagccctgcctttattcctccttgcctccacaccagcctccccttgcttctccttacagactatccaagaagtgaagcttatgtctttagggagccttgggcagagtccacataaatgcaggaagaacttagacaatgcctgaaatgcaaaggcgacactggagtcttctttctctaacgtgtagcgttgaatgaatatctgcctggaaccaagagggctgctctgatgtttgggagtcggttttttgtgagccacatctgatatttctgatatccccaggaaggagtggcctggaggtcactggttcaggctccctttgggcgaaatcctgggagtgatgctctaaaaatccacctttcccatcatccctactcatcagaaagacaaatataaaatcccagagaggtggaggagctaaaaaagcaattgctccaccttacaaatttggatagaaaggagatgtagtttatttcatatgggcaaagtagtcctcttccaaagtcctgtacagttgttctctgcaattgacgcacatctgccctaagcgaaatctgtcagaaggaatcaacaaggctccttgcctcccctcccaatcccccttttggaggacttgtggcttcggtgtcgtcctaagtgagagtggcgtgtgcttttttcctgtcccctcctccctccgtgtcctagacgctggctgccttctgtgcactcccaggcagatcactacggaagagtcggagcctgtggggttggactggccacactcagtcctgagaaggcgagttgccatggaaagctgggggcagaggtgtttttggagaggaggcggcaggcaaacattgcctttgacttgctctccgcgtacccggggttgtagagctgctcaggaaggggcaggatgtaaggccagaggtgcctggtgggtgagaagcccaggcaggggctgggcgccctctccgaagaggtggcagcagggtgaccctgaactccccaaatggggagtgatgccactggggaaactgagtggatcaaagagatgaaaccaaaaaaaagcaaacaaacaaatgagaagacacaaaacataattaccttttcctgaaaggtacaggaaataaatatataagcaatgatgagaaactggaggtggctaatggaagtgagacagacaggggtggggggctccattatcttttaaaagcttcctccaaatgctcagtactgggaccaactaataggtagattttaatatggtggttttgttttggttttgtttttactacggtgctgatgtatatgtaatgtctaaaaaaagttatttgtacataagtttttacaatactgcagatatcactgggtctactatctgtaaaaaatatacatataaatatatatatactgtttgtttaaaatagagtatttttatttcattccttaactcatcatcacagcagtggtattgcacttcagatgacatctaattactaatttgtactgtatgacctctggcaacttgctccattttattcagatttttctagttttctgtttttactttgtacattgagcattgcttatttccttttaagaaatgtacagaacgctgaaatgtagaaatgaagtgatgttgacataccacttttaaagaaaacaaaaacaaaaataaaagattatctgaatcaatccaaagtatagtttattttaagatcctcactggagctccaatcttaattaagcagacatattattcctgggttttaattaactgcagttcttttctcaaaattttgatatcattctttaaacatttatttaatgggagagatcaatcattcccagcctttgcattcaactgcacaactgatgatactttctgaatttactgccgcactctgaaggatgtggcaaagggaagggaggaaagtcaactttgcatggaacatagtgcaatccatttgtagattcagtaccataacaattccatttccaactagttcatctggaggtagggaggctccactggaaaaataaatatttttgtcaaa

SEQ ID NO: 1402 - DNA, 4874 bp, Homo sapiens
actgttgggagaggaatcgtatctccatatttcttctttcagccccaatccaagggttgtagctggaactttccatcagttcttcctttctttttcctctctaagcctttgccttgctctgtcacagtgaagtcagccagagcagggctgttaaactctgtgaaatttgtcataagggtgtcaggtatttcttactggcttccaaagaaacatagataaagaaatctttcctgtggcttcccttggcaggctgcattcagaaggtctctcagttgaagaaagagcttggaggacaacagcacaacaggagagtaaaagatgccccagggctgaggcctccgctcaggcagccgcatctggggtcaatcatactcaccttgcccgggccatgctccagcaaaatcaagctgttttcttttgaaagttcaaactcatcaagattatgctgctcactcttatcattctgttgccagtagtttcaaaatttagttttgttagtctctcagcaccgcagcactggagctgtcctgaaggtactctcgcaggaaatgggaattctacttgtgtgggtcctgcacccttcttaattttctcccatggaaatagtatctttaggattgacacagaaggaaccaattatgagcaattggtggtggatgctggtgtctcagtgatcatggattttcattataatgagaaaagaatctattgggtggatttagaaagacaacttttgcaaagagtttttctgaatgggtcaaggcaagagagagtatgtaatatagagaaaaatgtttctggaatggcaataaattggataaatgaagaagttatttggtcaaatcaacaggaaggaatcattacagtaacagatatgaaaggaaataattcccacattcttttaagtgctttaaaatatcctgcaaatgtagcagttgatccagtagaaaggtttatattttggtcttcagaggtggctggaagcctttatagagcagatctcgatggtgtgggagtgaaggctctgttggagacatcagagaaaataacagctgtgtcattggatgtgcttgataagcggctgttttggattcagtacaacagagaaggaagcaattctcttatttgctcctgtgattatgatggaggttctgtccacattagtaaacatccaacacagcataatttgtttgcaatgtccctttttggtgaccgtatcttctattcaacatggaaaatgaagacaatttggatagccaacaaacacactggaaaggacatggttagaattaacctccattcatcatttgtaccacttggtgaactgaaagtagtgcatccacttgcacaacccaaggcagaagatgacacttgggagcctgagcagaaactttgcaaattgaggaaaggaaactgcagcagcactgtgtgtgggcaagacctccagtcacacttgtgcatgtgtgcagagggatacgccctaagtcgagaccggaagtactgtgaagatgttaatgaatgtgctttttggaatcatggctgtactcttgggtgtaaaaacacccctggatcctattactgcacgtgccctgtaggatttgttctgcttcctgatgggaaacgatgtcatcaacttgtttcctgtccacgcaatgtgtctgaatgcagccatgactgtgttctgacatcagaaggtcccttatgtttctgtcctgaaggctcagtgcttgagagagatgggaaaacatgtagcggttgttcctcacccgataatggtggatgtagccagctctgcgttcctcttagcccagtatcctgggaatgtgattgctttcctgggtatgacctacaactggatgaaaaaagctgtgcagcttcaggaccacaaccatttttgctgtttgccaattctcaagatattcgacacatgcattttgatggaacagactatggaactctgctcagccagcagatgggaatggtttatgccctagatcatgaccctgtggaaaataagatatactttgcccatacagccctgaagtggatagagagagctaatatggatggttcccagcgagaaaggcttattgaggaaggagtagatgtgccagaaggtcttgctgtggactggattggccgtagattctattggacagacagagggaaatctctgattggaaggagtgatttaaatgggaaacgttccaaaataatcactaaggagaacatctctcaaccacgaggaattgctgttcatccaatggccaagagattattctggactgatacagggattaatccacgaattgaaagttcttccctccaaggccttggccgtctggttatagccagctctgatctaatctggcccagtggaataacgattgacttcttaactgacaagttgtactggtgcgatgccaagcagtctgtgattgaaatggccaatctggatggttcaaaacgccgaagacttacccagaatgatgtaggtcacccatttgctgtagcagtgtttgaggattatgtgtggttctcagattgggctatgccatcagtaatgagagtaaacaagaggactggcaaagatagagtacgtctccaaggcagcatgctgaagccctcatcactggttgtggttcatccattggcaaaaccaggagcagatccctgcttatatcaaaacggaggctgtgaacatatttgcaaaaagaggcttggaactgcttggtgttcgtgtcgtgaaggttttatgaaagcctcagatgggaaaacgtgtctggctctggatggtcatcagctgttggcaggtggtgaagttgatctaaagaaccaagtaacaccattggacatcttgtccaagactagagtgtcagaagataacattacagaatctcaacacatgctagtggctgaaatcatggtgtcagatcaagatgactgtgctcctgtgggatgcagcatgtatgctcggtgtatttcagagggagaggatgccacatgtcagtgtttgaaaggatttgctggggatggaaaactatgttctgatatagatgaatgtgagatgggtgtcccagtgtgcccccctgcctcctccaagtgcatcaacaccgaaggtggttatgtctgccggtgctcagaaggctaccaaggagatgggattcactgtcttgatattgatgagtgccaactgggggagcacagctgtggagagaatgccagctgcacaaatacagagggaggctatacctgcatgtgtgctggacgcctgtctgaaccaggactgatttgccctgactctactccaccccctcacctcagggaagatgaccaccactattccgtaagaaatagtgactctgaatgtcccctgtcccacgatgggtactgcctccatgatggtgtgtgcatgtatattgaagcattggacaagtatgcatgcaactgtgttgttggctacatcggggagcgatgtcagtaccgagacctgaagtggtgggaactgcgccacgctggccacgggcagcagcagaaggtcatcgtggtggctgtctgcgtggtggtgcttgtcatgctgctcctcctgagcctgtggggggcccactactacaggactcagaagctgctatcgaaaaacccaaagaatccttatgaggagtcgagcagagatgtgaggagtcgcaggcctgctgacactgaggatgggatgtcctcttgccctcaaccttggtttgtggttataaaagaacaccaagacctcaagaatgggggtcaaccagtggctggtgaggatggccaggcagcagatgggtcaatgcaaccaacttcatggaggcaggagccccagttatgtggaatgggcacagagcaaggctgctggattccagtatccagtgataagggctcctgtccccaggtaatggagcgaagctttcatatgccctcctatgggacacagacccttgaagggggtgtcgagaagccccattctctcctatcagctaacccattatggcaacaaagggccctggacccaccacaccaaatggagctgactcagtgaaaactggaattaaaaggaaagtcaagaagaatgaactatgtcgatgcacagtatcttttctttcaaaagtagagcaaaactataggttttggttccacaatctctacgactaatcacctactcaatgcctggagacagatacgtagttgtgcttttgtttgctcttttaagcagtctcactgcagtcttatttccaagtaagagtactgggagaatcactaggtaacttattagaaacccaaattgggacaacagtgctttgtaaattgtgttgtcttcagcagtcaatacaaatagatttttgtttttgttgttcctgcagccccagaagaaattaggggttaaagcagacagtcacactggtttggtcagttacaaagtaatttctttgatctggacagaacatttatatcagtttcatgaaatgattggaatattacaataccgttaagatacagtgtaggcatttaactcctcattggcgtggtccatgctgatgattttgcaaaatgagttgtgatgaatcaatgaaaaatgtaatttagaaactgatttcttcagaattagatggcttattttttaaaatatttgaatgaaaacattttatttttaaaatattacacaggaggcttcggagtttcttagtcattactgtccttttcccctacagaattttccctcttggtgtgattgcacagaatttgtatgtattttcagttacaagattgtaagtaaattgcctgatttgttttcattatagacaacgatgaatttcttctaattatttaaataaaatcaccaaaaacat

SEQ ID NO: 1403 - DNA, 1629 bp, Homo sapiens
acatccagctgcctgagaccctcctgcagccttctcaagggacagccccactctgcctcttgctcctccagggcagcaccatgcagcccctgtggctctgctgggcactctgggtgttgcccctggccagccccggggccgccctgaccggggagcagctcctgggcagcctgctgcggcagctgcagctcaaagaggtgcccaccctggacagggccgacatggaggagctggtcatccccacccacgtgagggcccagtacgtggccctgctgcagcgcagccacggggaccgctcccgcggaaagaggttcagccagagcttccgagaggtggccggcaggttcctggcgttggaggccagcacacacctgctggtgttcggcatggagcagcggctgccgcccaacagcgagctggtgcaggccgtgctgcggctcttccaggagccggtccccaaggccgcgctgcacaggcacgggcggctgtccccgcgcagcgcccgggcccgggtgaccgtcgagtggctgcgcgtccgcgacgacggctccaaccgcacctccctcatcgactccaggctggtgtccgtccacgagagcggctggaaggccttcgacgtgaccgaggccgtgaacttctggcagcagctgagccggccccggcagccgctgctgctacaggtgtcggtgcagagggagcatctgggcccgctggcgtccggcgcccacaagctggtccgctttgcctcgcagggggcgccagccgggcttggggagccccagctggagctgcacaccctggaccttggggactatggagctcagggcgactgtgaccctgaagcaccaatgaccgagggcacccgctgctgccgccaggagatgtacattgacctgcaggggatgaagtgggccgagaactgggtgctggagcccccgggcttcctggcttatgagtgtgtgggcacctgccggcagcccccggaggccctggccttcaagtggccgtttctggggcctcgacagtgcatcgcctcggagactgactcgctgcccatgatcgtcagcatcaaggagggaggcaggaccaggccccaggtggtcagcctgcccaacatgagggtgcagaagtgcagctgtgcctcggatggtgcgctcgtgccaaggaggctccagccataggcgcctagtgtagccatcgagggacttgacttgtgtgtgtttctgaagtgttcgagggtaccaggagagctggcgatgactgaactgctgatggacaaatgctctgtgctctctagtgagccctgaatttgcttcctctgacaagttacctcacctaatttttgcttctcaggaatgagaatctttggccactggagagcccttgctcagttttctctattcttattattcactgcactatattctaagcacttacatgtggagatactgtaacctgagggcagaaagcccaatgtgtcattgtttacttgtcctgtcactggatctgggctaaagtcctccaccaccactctggacctaagacctggggttaagtgtgggttgtgcatccccaatccagataataaagactttgtaaaacatgaataaaacacattttattctataa

SEQ ID NO: 1404 - DNA, 483 bp, Homo sapiens; identical to SEQ ID NO: 378

SEQ ID NO: 1405 - DNA, 2456 bp, Homo sapiens
atcctttctcccacaagccagttaccccgtttcgcctccttgtgtcccagagcctggagaggagcggagccggcaggagcagcatgttgcagccgctattctaggggcgctgggtgaagtgggctgccctctgccaccctctcccaggtgccaggaggaggtggctgactctatcactcagggcctcaccgaaccatgcccagctggggcccgcaccagccacaccttcccagctgcgctgcccaccgccaggtgatgctgacactgctggttcagggaccacgcttggagaaccactacactagggcaagcaggaagagagtcctccttctggaactgaagcaggcagtgtgaagacccatgtgggggaggtgtgttgtgcatgcctgtgtgtgtatatgtgtgtgtgtgcccctatgtgttcatgcacacatgcccttcactcgccgaggatttgactgctaaaagaaagatctactttttccccagaacaccttaacccgaagcctctctgaccatccagttggcaaagaccctcaggccatgaggactggccaaagacagtgagaggacgtgcaagggtaaattcctgagccccgcagtcttatttcctgccctgacgtccctgcataccagcccaagggttaaccgtaagctgatgcctgtatggcggccttactgatgccacgcaggaacaaagggatgaggactcgactgggatgcctgtctcacaagtcagactcgtgtagtgatttcacagctattcttccagacaaacccaaccgcgctctcaattacttaagaatgtacaaatttacagtgacagaattgcaggaatccaggagattatcgacagaagaagctacgaggtgggcagattcctttgatgtgcttctctctcataagtatggggtggctgcattccgtgccttcttgaagacggagttcagtgaggagaacctggaattctggttggcctgtgaggagttcaagaagaccaggtcaactgcaaaactggtctctaaggcccataggatctttgaggagtttgtggatgtgcaggctccacgggaggtaaacattgacttccagacccgagaagccacgaggaagaacctgcaggagccatccctgacttgctttgaccaagcccaaggaaaagtacacagcctcatggagaaagactcttaccccaggttcctgaggtccaaaatgtacttagatctgctgtcccaaagccagaggaggctcagttagacctcagaagggaactcctggaaatcaccggctttcccctccacttgctgccaagatcatattctaatgtgaaatgtcataggtgttcaaaagcggtggcattgggggtgggaggctgggggtgaggagggaatgaagggccattccaaagtatgacccagctgccggagcttggactctattccatttacccatgtttgtgttttggttagtggtagcgccttgccgctgtcacccttttctgggtcagcaacttgcccttcatataatgccttgggtcacctctgctgagagggcagatttgctgtgctaggctaatctgtaaataatgcaaatgcaattcccaccacctccacaccctcctcggttaggattcctgactctccacttgttgtaaatccctgggaggaatagctgaaagacttgggctcaactctgtgatttgtagtggccagctctgctcactgggatctcacagcttaggagagaggtttctgtggaattccaggtttctagttctgtcattgacaggtgacctctcagagaaggagtgaaatccatggagttgtttgtttcttccatttccattggaccagtgtgaaaaactgtgattacttcccatcttggcctaggaaattcacaagactaccctaaccttacatttccagaaagagtcttgggtgatgttcttcatgacttctgaagtggaactgccattaagaaagatacagcttgcaaatcttcctcaattctacgaagaacttttccagaagtcaagagacgagggcaagtagcaccagtagacttctattcaaaggggtaccatgtaacctgtctgttgctcagtgtcttctctgccctcacctctctgcagcatcatacatcactgatgtcttaggatgacagcttggcaaagggaggtgaattcctatagcatggagtgctcccatggtgcctaatactttccctctgccaggtatggaaaaggtggctgggctcggtgtgcgctccaaccccggtagcattagctgagtcacgcggcgagcacacaacagatttgtagcagctcatctgccatataaaccgcttggctgatggagtcctcattgagttttttcattatcgtgtaaagtggaatcatgtcattcacctttactataaacaaggctgtgagaacataataaacagaacctgaacaa

SEQ ID NO: 1406 - DNA, 656 bp, Homo sapiens
ccctgagggccctttctctttccatctcaggaactcaaacatgaccaggaagatcttcacaaataccagggagcggtggaggcagcagaatgtcaacagcgcctttgccaagctgaggaagctcatccccactcaccctccagacaaaaagctgagcaaaaatgaaacgcttcgcctggcaatgaggtatatcaacttcttggtcaaggtcttgggggagcaaagcctgcaacaaacgggagtggctgctcaggggaacattctggggctcttccctcaaggaccccacctgccaggcctggaggacagaactctgcttgagaactaccaggttccttcacctggtccaagccaccacattccttagtgtggctctggctgtcatctcccagggcagcacttgcccagaaatcactgcctgtggacagacttttgcatgttccagagttgacctgatgataactcgtgaagcatgaattctagcttcctgggaggtggctcagagacagctgcagggagctgaaagaagccatgaggaatgtcacttgtgggccgccaccccccagggatgtcaggtagagcggcctacctctgcctattttaaatccaggttctgcataagacttttggagaaaaaattctaaataaaaaaaaaa

SEQ ID NO: 1407 - DNA, 4612 bp, Homo sapiens
atgcgcgtccacgcctccctataagacaaagcgcggccgacgggctccgagcgcggcccctgggttcgaacacggcacccgcactgcgcgtcatggtgcaggcctggtatatggacgacgccccgggcgacccgcggcaaccccaccgccccgaccccggccgcccagtgggcctggagcagctgcggcggctcggggtgctctactggaagtttgcccaggctggagtgcagtggcatgatctcggctcaccgcaacctcatcttcccgagttcaagccattctcatgtgtcagcctcccgagtagctgggattacaaggtgcacagcaccatgccgggctaattttgtatttttagtagagacagggtttctccatgttggtcaggctgatcttgaactgctgacctcaggtgatccacccacttcggcctcccaaagtgctggcattatagacacgaaccaccgcacccggcctatatgctttcttaatatccattctggatcagtgctgttggaagacaaaattacaacaaatttagttaaagatctaattagcttttattcttgatttgtgaatagggcaacctccgttctacaaaatagaataagagctcgatagggtaatagcacaacagtgggttttgtagggcggcaacaaagaaacagaacaataggtaaaaaagctgattggttaacgtcaagttacattaggttacttttttcctaagggttaaagcagaagcgacttccttattattctgactcaggaagactggaatcttctgatcgcaggaaaagctggtctgtttgagatgcacctccttctttaaagttttagtttgatcaagtggcatatggcatgagtggctgcattttggtttggtctcatcctggggcctagtgcaggggctcagtccaaaacagtgacctctcctgggccaggcatggtggcttctgtcatcccagcactttgggaggctgaggcggcagattgcctgaagccagaagtttgagacctcatctctaaaaaaacccaaaaaacaagccacacacacaccccatattaacattatatatatgtaacatctcccataatttttaacagaggtaacacatgtggacatgtttgtgtatctgtttaatcaatctgttattagtgacatagagttctaaaaaaccttttgtcatacatacaaacaattggaagattattttagcttggaataaactaaatacctgctgctataacaaaatgacaaaaatagcttaaactgggcaatttataaacaacagcaatttatagaattcttatagttctagaggctaagaagtccaagattaaggtgccagcagatttagtgtctgatgaggatcctgtcctcatagacggccatttccttgctctgtcctcatgtggtggaaggggcaaactgctctcttacatctctcttgctcttttttttttttttttttttttttgagatggagcctcgctctgtcacccaggctggtagcgcagtcttggctcactgcaacctctgcctcctggattcaagtgattctcctgcctcagcctcccgagtagctgggatcacaggcgtggaccaccatgcctggctaatttttgtatttttagtagagatggggtttcaccatgttggacaggctggtcttgaatccctgacctcaggtgatctgcccaccttggcctcccaaagttctgggattataggtgtgagccacagtgcccagctccatctctcttacaaggccactaatcctataaatgagggcttgccctcatgacttaatcacatcctaaaggtcccaccccttaatactatcacatttgtgttaagtttcaacattcgtatatttaaacttatgacacgtgtcatataatgtgtcatattacatattatgtgtcataatatggacacattcagaccatagcaaatagtactgtgcatatcatgcagtggatatgctaagttttagagtcaactttgtagaaaataacgtattgatgactagtactttaatatgttctggagtatcgggggaacccgcccccaatatttcaacataggttccattttccataagtgtcggccagctgagaaataaagagagacagtataaagagaggaatgttacagctgggccgccaggggtgacatcacatatcggtaggaccgtgatgcccgcctgagtctcagaccagcaagtttttattaagggtttcaaaaggggagggggtgtaagaacagggagtaggtacaaatatcacaggcttcaaagggcaaaaagcagaactactaataagggtctaacaaagatcacatgcttctgagggaacaggacaaagggcaaaagcagaactactgataagggtccaacaaagatcacagggcaaagggcaaaagcagaaccactgataagggtctatgttcagtgctgcacatattgtcttgataaacatcttaaataacagaaaacagggttcgagagcagagaactggtctgaccacaaatttaccagggtggagtttttccccaccttagtaagcctgagggtactgcagaagaccagggcgtatctcagtccttatctcaaccgcataagacagacattcccagagcagctgtttatagacctccccccagaaatgcattccttccccagagtattaatattaatattccttcctaggaaaagaatttagtgataccttctctacttgcacgcccatttataggctctctgcaagaagaaaaatatgggtgtttttgcctgaccctgcaggcagtcaaaccttatggttgtcttcccttgttccctaaaaatcgctgttattttattttttaaggtgtactgatttcatattgttcaaacacacatgttttacaatcaatttgtacagttaacacaattatcacagtggtcctgaggtgacatacatcctcagcttacgaagataacaggattaagagattaaagacaggcataataaattataaaagtattatttgagaactgatagatgtccgtgaaatcttcaaaacttatgttcctctgccgtggctccagccggtccctccattcggggtccctgacttcctgcaacactggagtttgttgttcactggatgctgacaaatatgagaatgatccagaattagaaaagatccgaagagagaggaactactcctggatggacatcataaccatatgcaaagataaactaccaaattatgaagaaaagattaagatgttctacgaggagcatttgcacttggacgatgagatccgctacatcctggatggcagtgggtacttcgatgtgagggacaaggaggaccagtggatccggatcttcatggagaagggagacatggtgacgctccccgcggggatctatcaccgcttcacggtggacgagaagaactacacgaaggccatgcggctgtttgtgggagaaccggtgtggacagcgtacaaccggcccgctgaccattttgaagcccgcgggcagtacgtgaaatttctggcacagaccgcctagcagtgctgcctgggaactaacacgtgcctcgtaaaggtccccaatgtaatgactgagcagaaaatcaatcactttctctttgcttttagaggatagccttgaggctagattatctttcctttgtaagattatttgatcagaatattttgtaatgaaaggatctagaaagcaacttggaagtgtaaagagtcaccttcattttctgtaactcaatcaagactggtgggtccatggccctgtgttagttcatgcattcagttgagtcccaaatgaaagtttcatctcccgaaatgcagttccttagatgcccatctggacgtgatgccgcgcctgccgtgtaagaaggtgcaatcctagataacacagctagccagatagaagacacttttttctccaaaatgatgccttggggtggggagtggtagggggaagagctcccaccctaaggggcacacactgagttgcttatgccacttccttgttcaaaataaagtaactgccttaatcttatactcatggcttggagttaccttatattcaggtatatgtgatattttgcctggtttgttaaaattgccccatttagattccttctataattgttcttatagataagtaatttatatatgagctgtgttagtattttttcagtgtgagatctctggattctttcacaataaagctgttgaattttaacaggagtattagtacataaattttctactcaacaattccgagataggattatgcctagtttgtcatatcacagaaaaactccaagttaacttcatgttttggaagggcaggtcgtttttaaagtatttctttttttaactggatgaaaaatcttcatgttaggattaattttcttaatcacctccacactgtacagaggaaactcaagccttaaatgtttaagtaaactctgtctcagttttaggattaaaatacccaccggtggtgtgatgatgccatataccgcagggcttgcttctgtcaagtgtgactctatctcagtaattaaaataagtgctgatctactga

SEQ ID NO: 1408 - DNA, 941 bp, Homo sapiens
tcgccccttctcggccgccgtagtttttttttttttttaaagaaaaaacggttacccagcaactagaaaaacaaccggaaccggcggcaccagctcggagagaaaggagggttccataggcagttcttaccaagaagatgtcgattccattctccaacacccactaccgaattccacaaggatttgggaatcttcttgaagggctgacacgcgagattctgagagagcaaccggacaatataccagcttttgcagcagcctattttgagagccttctagagaaaagagagaaaaccaactttgatccagcagaatgggggagtaaggtagaagaccgcttctataacaatcatgcattcgaggagcaagaaccacctgagaaaagtgatcctaaacaagaagagtctcagatatctgggaaggaggaagagacatcagtcaccatcttagactcttctgaggaagataaggaaaaagaagaggttgctgctgtcaaaatccaagctgccttccggggacacatagccagagaggaggcaaagaaaatgaaaacaaatagtcttcaaaatgaggaaaaagaggaaaacaagtgaggacactggttttacctccaggaaacatgaaaaataatccaaatccatcaaccttcttattaatgtcatttcttcctgaggaaggaagatttgatgttgtgaaataacattcgttactgttgtgaaaatctgtcatgagcatttgtttaataagcataccattgaaacatgccacttgaagatttctctgagatcatgagtttgtttacacttgtctcaagcctatctatagagacccttggatttagaattatagaactaaagtatctgagattacagagatctcagaggttatgtgttctaactattatcaaatgaataaatcctctctatcacatcccccaaaaa

SEQ ID NO: 1409 - DNA, 2332 bp, Homo sapiens
gcgtcctgttcccgcctctccagttaaggccgctggtgtgagccggggctctgcgcgagcgagggacgacggaagggacgggcaggtgtgggcgcggggccacgcagcccgacggcgggagtcgcaggtgctgggtgcatgggccagtgaggacgcacagagatccctcgccgcgcggaggaggagcagcgcgggagccaggcgctgccccaagaccctgcctgcgtccgagcgagcggaacctcgcgcttcgcccggggacaatccgaagtccgcgctatggaagaggagaaatatttgcctgagctgatggcagagaaagatagcctggatccatcttttgtgcatgcgtcgcgccttttggcagaagaaattgaaaagtttcaaggttctgatggaaaaaaggaagacgaagaaaagaagtatcttgatgtcatcagcaacaaaaacataaagctctcagaaagagtactgattcctgtcaagcagtatccaaagttcaattttgtggggaaattgcttggaccaagaggaaactccttgaagaggctacaggaagaaacaggtgctaaaatgtctatcctgggcaaaggatcaatgagagataaagctaaggaagaagaactaaggaagagtggggaagccaaatatgcccacttgagtgatgagcttcatgtattaattgaagtgtttgctccacctggggaagcttattcacgtatgagtcatgcattggaagagattaaaaaattcctggttcctgactacaatgatgaaattcgtcaggaacaactacgtgaattatcttacttaaatggctcagaggactctggtcgtggcagaggtattagaggcagagggatcagaatagctcccacagctccttcaaggggccgtgggggtgccattcctcctcccccaccacctggacgaggtgttctcacccctcggggaagcactgtaacccgtggagcgcttccagtgccacctgtagcaagaggtgtccctacccctcgagcccggggggcaccaacagtgccaggatacagggcacctcctcctccagcccatgaagcttatgaagaatatggttatgatgatggctacgggggtgaatatgatgaccagacctatgagacttatgataacagctatgcgacccaaacacaaagtgtgcctgaatactatgactacggtcatggagtaagtgaggatgcctatgacagctacgcaccagaagaatgggccacaacccgctctagcttgaaggcaccaccgcaaaggtcagccagagggggatacagggaacacccctatggtagatattgaaggtccttcccacctgtgacctcacctcaaagacaattcatagcctgtggtctccacataaacagcaacaagacaagtaatagtcctttttttgtttgtttgtttctattctagggataactgctcatgattactcccatatatttctagtatttccctctgtactgttggcgtgacattgacactagtattattttacaaaacagactgaaaaagacattagcaagcatagtctataaacctttcagtaggatgatattctcttggttgtttttcattgttgtgtgtaatcttttttttttctttttcttttttttttttttgaggaaaagcatgaatttgttaacagattttgagtctcaaccaactagcagaaactttgtttagggttgctaaaagactgtaatatgatttttgaactagctgataataaagttgtagataagatgttttaacctgtcttttaatatctgttagttagacaaagatgtttgatattaagtttgtaaatttaattttaatgctgttttaatggggttgaaaacaagcagctactgtatgtatgtagctaactgaatttgttcagtgttttaacctgtatttgttaaaaaagaaaaaaaaacacacataaagttccatgtgtaagcttctctaaataggaaaccacaatttgtcaaatatgtttgccataatttgtcaataaagctgaaaacttttgtaaaaattaaatttggaattacttgttttctagctttaaatgcctgctttatttcttcttcaagagatgcctaaaatgttttctatttaaaaattacaaaaatgaacccaagtctgttttaagatatttgtgtaatacttaaaaatgtattaataacttatggttgttaaataatttaaaagttaacaaactaaactgttacatgaatcatggttagtaaacactaatgtataacatgttaatggaaaaaaatggatttagaataataaatggattttaaactat

SEQ ID NO: 1410 - DNA, 9266 bp, Homo sapiens; identical to SEQ ID NO: 1054

SEQ ID NO: 1411 - DNA, 2136 bp, Homo sapiens; identical to SEQ ID NO: 224

SEQ ID NO: 1412 - DNA, 2136 bp, Homo sapiens; identical to SEQ ID NO: 224

SEQ ID NO: 1413 - DNA, 2880 bp, Homo sapiens; identical to SEQ ID NO: 114

SEQ ID NO: 1414 - DNA, 3187 bp, Homo sapiens
gccggagcggatcgcggagtttcaccgcggacctgtcagagatacagaggttgtgggggcgggagacagaaagagagagagatccagagaccgagtcttacgttgacacgcagagagaaagacgcagagacagacaaacaaacagataggagaggctctccaggaggccggggggcccactccgcctatcgctcccctcggctacgctgccacttcaatgccccgcaggtcgcgagctgctgttctttcgaaggcgtcggagaaccaggggcgtcccgcgccacctctgactcggagcagcgccgagcactgacgctcccgcccttgggcaaggacgccagtgcgcccgcgcgcgtccctctgcgcggcagcccgtcgcgggccctcaaggggaagcccaggccaggatggccccgggtcgcgcggtggccgggctcctgttgctggcggccgccggcctcggaggagtggcggaggggccagggctagccttcagcgaggatgtgctgagcgtgttcggcgcgaatctgagcctgtcggcggcgcagctccagcacttgctggagcagatgggagccgcctcccgcgtgggcgtcccggagcctggccagctgcacttcaaccagtgtttaactgctgaagagatcttttcccttcatggcttttcaaatgctacccaaataaccagctccaaattctctgtcatctgtccagcagtcttacagcaattgaactttcacccatgtgaggatcggcccaagcacaaaacaagaccaagtcattcagaagtttggggatatggattcctgtcagtgacgattattaatctggcatctctcctcggattgattttgactccactgataaagaaatcttatttcccaaagattttgaccttttttgtggggctggctattgggactcttttttcaaatgcaattttccaacttattccagaggcatttggatttgatcccaaagtcgacagttatgttgagaaggcagttgctgtgtttggtggattttacctacttttcttttttgaaagaatgctaaagatgttattaaagacatatggtcagaatggtcatacccactttggaaatgataactttggtcctcaagaaaaaactcatcaacctaaagcattacctgccatcaatggtgtgacatgctatgcaaatcctgctgtcacagaagctaatggacatatccattttgataatgtcagtgtggtatctctacaggatggaaaaaaagagccaagttcatgtacctgtttgaaggggcccaaactgtcagaaatagggacgattgcctggatgataacgctctgcgatgccctccacaatttcatcgatggcctggcgattggggcttcctgcaccttgtctctccttcagggactcagtacttccatagcaatcctatgtgaggagtttccccacgagttaggagactttgtgatcctactcaatgcagggatgagcactcgacaagccttgctattcaacttcctttctgcatgttcctgctatgttgggctagcttttggcattttggtgggcaacaatttcgctccaaatattatatttgcacttgctggaggcatgttcctctatatttctctggcagatatgtttccagagatgaatgatatgctgagagaaaaggtaactggaagaaaaaccgatttcaccttcttcatgattcagaatgctggaatgttaactggattcacagccattctactcattaccttgtatgcaggagaaatcgaattggagtaatagaaaatggaagatggtgttgttaataaaggcatttaatagataaaaacatctccaaaaaggattttgaagctgatcctatttagttaaaaagataattttgctttcaactgtaggtccagaaaactaattattggcatcagtctgtgaaatagtccattatttgttgttaaaaatgcttcaaaaggttttcagtgtcagtctgagatgcctggtatataggagcctttgggaaatacctatttttcagtattccatgcatattagatatcaccatgaagcaagagacatgcattctataatcatgtagacactcagactcaggggaaaatacaagttatatcctgaaagcctttaaaactctatggtaggatcaaagattcaaatggtttcagagaggttttatttcaattaatttgttctagtgctttcaagagcaagtacatcaaaatgtagaaggtaaaatgtatgcaacactaatataaattattccaagtctttaaggagccaaagaaaaaaaagatttctcacagctttttgttctgttttgtatttcaattaggaacttgcagtattattttgaaaaccattctaaaataataggagttaggaaataaataaagttttgctagccctgctaagttcaggcttagaggcttatcgctaagtataaacttcaccagattccacgaaaagctggatagctttttttctgacttatgttgtggttgcacccctcacaaatggcagaacagtatgtaaagctggtaacacctcggtttcagtgcaccatgtgtttgctttgtgaaggtgaagaatatgttggtttagagaaagaaattggatgtaattttatgcaatttacttttaaagacaaacataactatttagcagagaatattttaataaatgcaaaacaacagctggactgctgtacatcaaggacagattaactggaaaacatatgttccttatgtgtgatcgagagccattcagaaaagacttcctttgtgttcagcctatacttttccatatggtataccttgaaaaaaattagcacaccatggttatttttctaccttttataaaagacagagcctgtttactcatttagaagatagagaaaattggtctaaaattgaacatcctagattcacactcccaagtcacttaaggtgatttgatggtgaggaaaatgattgacaaagcccaacaatgatctcaggaattacattttccaacagaccaaaaaatgttttcatgtagcagcaatgcagatttggtgaatatttaatatatattttagtatgtatttcactttatgactgacaattaaaaaatattgtttggccaaatagtaaacacccttttgaaaccatgaaaaaaaaaaaaaaaaa

SEQ ID NO: 1415 - DNA, 3676 bp, Homo sapiens
gagaaaaaaaaggtcaggtaggaagaagaaaaatagactttctgtgactgtatactcttgaaatctcccgcaggttctaagcagggcaaaatggggtctcggaagtgtggaggctgcctaagttgtttgctgattccgcttgcactttggagtataatcgtgaacatattattgtatttcccgaatgggcaaacttcctatgcatccagcaataaactcaccaactacgtgtggtattttgaaggaatctgtttctcaggcatcatgatgcttatagtaacaacagttcttctggtactggagaataataacaactataaatgttgccagagtgaaaactgcagcaaaaaatatgtgacactgctgtcaattatcttttcttccctcggaattgctttttctggatactgcctggtcatctctgccttgggtcttgtccaagggccatattgccgcacccttgatggctgggagtatgcttttgaaggcactgctggacgtttccttacagattctagcatatggattcagtgcctggaacctgcacatgttgtggagtggaacatcattttattttccattctcataaccctcagtgggcttcaagtgatcatctgcctcatcagagtagtcatgcaactatccaagatactgtgtggaagctattcagtgatcttccagcctggaatcatttgaataaggacaaaatgttttccattatcaagacatggccatctatctaaatattatatcaactgtgtagacttgagggcaatattgaaatgatggtgctttctgcatttggtgtttatttgtaaaaaatttgcagtcctcactgcacatgcaagtataccacccttccatttagtatgttttttaagtaatatgcatcagaaacttcagaaatacttctgccctttgatcaaacaaatccatttccaagaatctgtactagggaagtaaataagaatatgagagaaacctttatgcaaatatgtatattgcaacattatttaatattctggaaaattggaaacaccccaaaattctaaactcagaggaaggattaagtaaagagtggtacatactgtaaatgttttctgatattaaaaaaaaaattaaataaaaaataaagagtactacatggttgtaaaattacagtcattacaaatgatgtttttaaaattatgaataatgctacatcaaaaagcaggttacaaattcatgtttactatataactatttaaagcaaatgaaacactaatagtcaaagtttaggatgaaaactaaatctaaaaggaaatataacaaaatgccaattatgcttggtttggggcattgatgacccttcttcccacttttctatattttccaagatttctttattgaatatgttttactataaatattttctaaactcatattttcactattaaaatttttttatttttccaaactttaaggcatatgctctttccacattcctcaacattatttgcaaacatcatgaaatgacacttccatcaacattcaatgaggaaagtagtgatatagatgagccaaaaagagttttatataaacttatacaatctaaactcttgctcttcctttctgactcctgagggtgagtgtgatggactagaagaggtagccttaaaataagtgagcagctagggaacatgctcaatgggcaagagaaaatgaccactgaccagtcaatacctgtgtcagggggagttaccagtacctatatttatttttaaagtaattaaaaagtagaacacttacaaattttccacctatacatgccatgtcttcctcggggacagtagccacatcttatatatttcccaccatgcataggacccagcacacagtgaagccagtaggcactcagtgttgaatgctcataccaggttttctgcttcctgtagttaccctgctgagcactgcttccatcacaggtgcactgggcctcaacacttctgccatttccccatttgtctcctccatggacactgtcaacaatggtctgtcaacacctgctctgtgccaaagccagggagtaggctggggggatacggaagagaatatctttctccttgatgcctgctgtgccaacagccccctttaagccttgttcacagcctttgctgaaacaagcatcttgaaagcaagccatgttatacaccgcatgaccttcatgctctgggcccagctgactgaactggggcaggccccagagtcatgggcagcctattgtcttgctaatggcctctgacttagcctggagtaaaacactgtccaaacaagactggtggttattcaagcataagaatttgaactaggaagccaagaatgaagcaaccggaccattaccatcaaaaaatgattaaaggatgaagaaggaagccaacattcagagagtatctggttcatgttaataatggtatcatattaaaaggaagatacatgaacttctactccaaaagctcctaaaactgcctttgcccacaatgaacagtgtaccctaggcctggtttctgttcttggattcctagatagtctttcttctttgtcactgtgctgatcatttcagtaaacccccgactaaatcagtgcagctctgtttattgcaactaaaacgatccaaatgaagtctcccttttctagatgttgggttggagggatgctaagacaaagatgcttaggctccagagttttacagagcttcattcaataacactctactttccaaagaacttaaatatgaggtctgaaggacttggaccaagaggcaaacccaagctacagacaccatgttgtactcagagtgacctctcccctctgacagcccaggatttctctatcaagtccataagctagtcatatctaggaccatcttgttaaaaattctctcaaagtctcctcagccctcttgtaaacagacttctggaaggtccacttcatcagtttgttatatactttcagactgtctatctcttgtttagattcagcatggcaccgtacgttgaatggactgttaatagatgtttgctgaatgactccaccacagcattggacacatcaggggtacagccaaatgcagcatgatacctctatcaggaaaattaaattttaacacagccaccaaatattctatatttgaagagtatatgctaatcatgcaattttaagtaaaaaaaagctgaatacaaaaaaagctgaatatgtgttttatatcctcgtgaattcaaagtaaaaaggaaaaaaaactcaaaaaccaaatatatgtatgcagtttgagcccaaatttttaattaagtaaccatataattacatgtagacatgtataaaccttgagatatgtaaagaccagaaaaatatttaaaagttaatagttacatcatctgtggtcacaacaccctgaaaatgcctaatattggaaacttaagcaggattgatccaggttattacttggatgggagaccagatgctataggctgaaaaaagaaagcataagtacgcacaagttaatacttaataattatctcctaatgataggactataagttctatctcttttctttacattgttcagtattttcaaatttccctttgaaaatgtgttatgtacttgaattattagaaaaaataaatgtcatttaaaaagcaa

SEQ ID NO: 1416 - DNA, 2279 bp, Homo sapiens; identical to SEQ ID NO: 708

SEQ ID NO: 1417 - DNA, 3714 bp, Homo sapiens
gcctggcaccggggaccgttgcctgacgcgaggcccagctctacttttcgccccgcgtctcctccgcctgctcgcctcttccaccaactccaactccttctccctccagctccactcgctagtccccgactccgccagccctcggcccgctgccgtagcgccgcttcccgtccggtcccaaaggtgggaacgcgtccgccccggcccgcaccatggcacggttcggcttgcccgcgcttctctgcaccctggcagtgctcagcgccgcgctgctggctgccgagctcaagtcgaaaagttgctcggaagtgcgacgtctttacgtgtccaaaggcttcaacaagaacgatgcccccctccacgagatcaacggtgatcatttgaagatctgtccccagggttctacctgctgctctcaagagatggaggagaagtacagcctgcaaagtaaagatgatttcaaaagtgtggtcagcgaacagtgcaatcatttgcaagctgtctttgcttcacgttacaagaagtttgatgaattcttcaaagaactacttgaaaatgcagagaaatccctgaatgatatgtttgtgaagacatatggccatttatacatgcaaaattctgagctatttaaagatctcttcgtagagttgaaacgttactacgtggtgggaaatgtgaacctggaagaaatgctaaatgacttctgggctcgcctcctggagcggatgttccgcctggtgaactcccagtaccactttacagatgagtatctggaatgtgtgagcaagtatacggagcagctgaagcccttcggagatgtccctcgcaaattgaagctccaggttactcgtgcttttgtagcagcccgtactttcgctcaaggcttagcggttgcgggagatgtcgtgagcaaggtctccgtggtaaaccccacagcccagtgtacccatgccctgttgaagatgatctactgctcccactgccggggtctcgtgactgtgaagccatgttacaactactgctcaaacatcatgagaggctgtttggccaaccaaggggatctcgattttgaatggaacaatttcatagatgctatgctgatggtggcagagaggctagagggtcctttcaacattgaatcggtcatggatcccatcgatgtgaagatttctgatgctattatgaacatgcaggataatagtgttcaagtgtctcagaaggttttccagggatgtggaccccccaagcccctcccagctggacgaatttctcgttccatctctgaaagtgccttcagtgctcgcttcagaccacatcaccccgaggaacgcccaaccacagcagctggcactagtttggaccgactggttactgatgtcaaggagaaactgaaacaggccaagaaattctggtcctcccttccgagcaacgtttgcaacgatgagaggatggctgcaggaaacggcaatgaggatgactgttggaatgggaaaggcaaaagcaggtacctgtttgcagtgacaggaaatggattagccaaccagggcaacaacccagaggtccaggttgacaccagcaaaccagacatactgatccttcgtcaaatcatggctcttcgagtgatgaccagcaagatgaagaatgcatacaatgggaacgacgtggacttctttgatatcagtgatgaaagtagtggagaaggaagtggaagtggctgtgagtatcagcagtgcccttcagagtttgactacaatgccactgaccatgctgggaagagtgccaatgagaaagccgacagtgctggtgtccgtcctggggcacaggcctacctcctcactgtcttctgcatcttgttcctggttatgcagagagagtggagataattctcaaactctgagaaaaagtgttcatcaaaaagttaaaaggcaccagttatcacttttctaccatcctagtgactttgctttttaaatgaatggacaacaatgtacagtttttactatgtggccactggtttaagaagtgctgactttgttttctcattcagttttgggaggaaaagggactgtgcattgagttggttcctgctcccccaaaccatgttaaacgtggctaacagtgtaggtacagaactatagttagttgtgcatttgtgattttatcactctattatttgtttgtatgtttttttctcatttcgtttgtgggtttttttttccaactgtgatctcgccttgtttcttacaagcaaaccagggtcccttcttggcacgtaacatgtacgtatttctgaaatattaaatagctgtacagaagcaggttttatttatcatgttatcttattaaaagaaaaagcccaaaaagcagtaaaatttccatttctccctgttattttagttgccttatctggagagacgtggaggtgattttcttttttttaaattattattaagacagaatgtgagggcacaagcaggcttctgagccacttgtcagattgtattcaaagcatcaatccaagaaggaggttatgtgtacttcatttattggtgatagttggaagagactgcagactactgctttgaatgagttgaattacataagctaagatcactataggtccatttcttgaacccacttatacataaaatgtaacccatttagaaaaagattctggatatcatcccccttgaaagatagaaagcattcaggatgtcccagttatcacatgttcacacttgggtttaggggtgtttttttttaaaaccaggcaggttagctagcccaccctgtgctagttttcatgttcacactgaccctatttgaattaatatcctttgttagagtggtcgagatttcaaacccaattatgtacagggagctgtctgagagctagccagaactggggtacagcctgggctcagggaatagctgtcaacactcgggcaaagtttttgtctgtgcatgtgtatctccatttgttttgggatcccagtttttgttttaagagagtataaggtgtctcatttgagtctttttcttacctagccccctcttatcagtaaaacaaaggacttgccatggttcacagcaatgtgctacgatccaagatatcagccaaggagcccacttaggggagaactaggtgtccagatttttgtatgtgttgtttttcttgggggatggggtggggtgggagtaggtagagctgagaatactacatcttagtggtgacctttagccacgtgggtgaagtggcaaaggccatggccatatctgttgtcccaggccaaagactaacaactgccttgggaatcccttccttgtgtccttaccaaatgatagctcataaaactctgataatgtaacaaatcactttcaaaggagttcccagaagtcttcagaaagactaaaattctgtctcttcctgctttagacagccattaagatcccaactaattttaccgaacctaaaacccacaaagaggttgtttgtgttattgttcaatcttcagttgtaagagtaattctctatttttatattgaaacataattacttgatagctcagggtctacatttcattcaactttttacaccaaattctgcagagtggtcaaaatggaatattgggggctgttgtaaacagaggcttaattttattagaagtagccagttatttattaaagcatgatgttaataaaataggcatattc

SEQ ID NO: 1418 - DNA, 5624 bp, Homo sapiens
ctgcgggcggcgggcggcgggcgcaccatgccctccttcgacgaggcgctgcagcgggtgggcgagttcgggcgcttccagaggcgcgtgtttttgctgctgtgcctgacgggcgtcaccttcgccttcctcttcgtcggcgtggtcttcctgggcacgcagcccgaccactactggtgccgcgggccaagtgccgcggcgctggccgagcgctgcggctggagcccggaggaggagtggaaccgcacggcgcccgcctcccgcggcccagagccccccgagcgccgcggccgctgccagcgctacctcctggaggcggccaacgacagcgcctccgccactagcgctctcagctgcgcggacccactcgccgccttccccaaccgttcggctccccttgtgccgtgccgcggcggctggcgctacgcccaggcccactccaccatcgtcagcgagtttgaccttgtctgtgtcaatgcgtggatgctggacctcacccaagccatcctgaacctcggcttcctgactggagcattcaccttaggctatgcagcagacaggtatggcaggatcgtcatttacttgctatcctgccttggtgttggcgtcactggggttgtggtggcctttgcaccaaacttccctgtgtttgtgatcttccgcttcctgcaaggtgtatttggaaaggggacgtggatgacttgctacgtgattgtgacagaaatagtaggttcgaaacaaaggaggattgtgggaatcgtgattcaaatgttctttacccttggaatcataattctccctggaattgcctacttcatccccaactggcaaggaatccagttagccatcacgctgcccagctttctcttcctcctttattactgggtggtccctgagtctccccgttggctgattactcggaagaaaggagataaagcattacagatcctgagacgcattgctaagtgcaatgggaaatacctctcatcaaattactcagagatcactgttacagatgaggaagttagtaatccatcctttttagatctggtgagaactccccaaatgaggaaatgcacacttattcttatgtttgcttggttcacaagcgcagtggtgtatcaaggacttgtcatgcgcctgggaattatagggggcaacctctatatagactttttcatctcgggcgtggtggaactgccaggagctctcttgatcttactaaccattgagcgccttggacgacgcctcccctttgcggcaagcaatatagtggcaggggtggcatgccttgtcactgcgttcttaccagaaggaatagcatggttgaggaccacagtggctacattgggaagactagggataaccatggcctttgaaattgtttatttggtaaattcagaattgtacccaacaacattacgaaatttcggagtttcgctctgttcaggtctgtgtgattttgggggaatcatagccccatttctgctctttcggctagcagccgtgtggctagaactacctctgatcatctttggtatcctggcatccatctgtggtggccttgtgatgcttttgcctgaaaccaagggtattgccttgccagagacagtggatgatgtagaaaaacttggcagtccacattcctgtaaatgtggcaggaataagaaaaccccagtttcccgctctcacctttgaggcccccgacaaagacagaaagaaggagctatccaggagctgatcctccttgcaaagctgtgccttgcagagatgcacgtgtgcatttcagctacatcatgccgcgctgttgtaatactgtataaagacctcaatctatccagagtatttttatataatgttggatgagttaggatttgtaatgctgttgaagtttctgggaacacataatatgtagccagtttaacaaagaagctgtcaggtgcacagcccttcctgggtttttttcttgtgttccctgtggtctctgacccattaggctaaagagagacaagagaagcccccaacctgattctcatgacagctccatcaagaatgtgggatgtgccgaccaaggatttgagaaagttgtacagaaatgtgttcatcaaatctggtcaagggactaagctcctagctgaccattcattctgaagattgcatggaggatgaacatctgggaatcctgttaatgagaaggctgaatcacaggcacctgggccaaagggtgtgagcattcatgttctctgctcaccttggtttccgcacaccttcgcaatgtgaacaggtcaggagtccctcccgtccacctcctctgtaacagctggggttccaggcatggtttaggccctgttccagcaataagaaccaatctgctgtacaatctgaggacttggctgtgttatttacaaaatgatgctgtggttctgagattatttgggacatttttggctctcctttagtggacacctagagccacagattcccttctttactaaacaaatcccatggattctgatttctgggtcttaggattttaaaagtgaagggatatttttcttatatttgtgagttcagttccgatggtgcccgtggtcaaaagcgaaaaacatggacaattcctattcattcttagcactttgacatgtcttggggaaaagcttacattttaatttaaaagaaagatcaattatatccatgcttaacaggatcagcaggagctttataaatgactttacagagactaataagggatttgatctttctttttttgttatcgaggcttttgaaatgtggaacttgtgtgttctgctttatatgttatattcaatatcttttcagatgcagtctatattttatgctgagttttaaaaatgaaatactttatgcaaacaggcaaaattggtaccaaagggaaacattaaccatgaggaagagcatttttctaaggagaacaggtgacaatatacacatgtgcgctaatcgtaaaatgagcatcttagtctttaaaacacatcagaattgaatacgaataatctatttgtcgatgaaataaacacaactctttgaggatttgagactacattcaccctttattcacagtcacttgcagttttgcttttctctgcatttctctgctgtaagatgactgttgcattgttgaattgtattttgagtggatatttttgtttggtaacaattaaaattttaaatcgtaaaaaatgtacatttgccctttctcttccttctaaacatgtgtctctcccacaggtcattctcctgtgacacgtgtactgcagagtgtttcaaaaccgggcaggcaattagcaatgggaaataagtggtccaccttcaatatttgcttgttgttcatttacatgctcttggcaccaatcctagactcacgtgtgccccagaataacattcagactctcagctggtcttgtgttacacatccatggaccggttcactccatcatatacagctctctgctccgtgtcccctgggctcaagtcaagcagtcggtgacagatttcattcccaataacagaatcggtttgcatgactccccatacatgttgcagctttgaaaacattcatctcagagttaggtataaagacataaaaatgtgtgtcaagccctcgttagctgatgaggtaaatgcatggacaacttcctaggacttctcggctctgccctctgtgaccttgcagcctgctcaggtctttgtgctctgttccttatcaaaaacagcacaaccccctcaatctgcccatttaaaaattggtggagtgaacaaagagcatgaaaatgttgaagaccacaaccaaaatttactcaaatcaaagttaagtacagagtttatttttaacaaatgtcatagctatgtcaccttactacagaatccagcagtcagaaaataacacaaaaaatgccgaggtttggcgtagctggtagctggggacagtgtcttcgtttgattactgccagttatttccagcatgctaaatccctacccacgttccagcctctaggtgagtcagtgcgtcactctgtctcccgtccaattaattatttctcatcactccctcaatccaagtaacaaaccttgaaacacgaacatagacaccaggcttattggggcgtgcacagccaagaccccaagaagtgactccttgtaaaatgtatttgtccttctcaaagcaaaccagaggccctccactgtcaccctaaatagaggtagggaaaaattcatgtgagggttaggctgccagccttttattgtggcatccatctattgtccatatgtatattttcccagtaattgaaattggaaaggaacttatgggcatattactggagcatctgcagtgcttaagtacttagcaaaatctattcagcgaaaccacaccacttagtttctcccaggggtaaaaaaaacccttgtgaatcctgcacacatcccttcctgtgttggtgtttcctttagactggcctagcctgggcatcactgtaaagtatgtgcagttggtctctgtcctgtaccctctacctccttccctgtcggaaaagtcaccactttagtccctggccaccagcacaccccaggagggtgagtggcctgaggtagttacggcacttaaaactcccttgctaccgatctggaactcaagccccaagacatccccttagatgatctgaatacgcattcagggacagatctaggcagtttctaaacaacacttagactggggtctaacgttgacaaatccttctagaatttgcctctttgggactgaagtctaaggggctgagaccaagaagggagagcacaagactaactttggtctcttgaccttttcttaccttgcaactgtcagtgcctccagccaaatgcctagcacagagctcagtggatttgattcttccattcagatactcatagcgattgcacactttattctcaatcacaagaagctggggcttccttgagaaggccagccccaaaggtacctgtgtttaaaagatgaaagaaatggttgctgaacccaaaacatgtttaggaggaaaaccagaagaacagagcagtggcactggacctcctgtctgtccgtgaggctgcagaacacaaggcagctcccaatgccgctggactctctgaccttggagagtgtaaacatcatatatgattctgtgttcctgagatctgggtttaacgatctgggctttgtcatggtgttttacgttcgttgttgtttgtgtactttttgcttttcttttgaaagtatgaaaatgatttttacaatgtaaagagagtctgagaaatgcaattgctattctttttatatactttttcagattttttatatgcttctttactacttacatcataatgcacaattttatatactgattttttcaatcaatgtatatcatgagtttttaaaataatgctacaatcttcataactaatattttaatggggagtgactgcttaattggcatgaggtttccttttgagatgaggaaaatgttctgaaaatatggtgatggttgcacaccattgtgaatgtactgaatgccattcagtggtaccctgcaaaataattaaaatcctaactctta

SEQ ID NO: 1419 - DNA, 1912 bp, Homo sapiens; identical to SEQ ID NO: 125

SEQ ID NO: 1420 - DNA, 2072 bp, Homo sapiens; identical to SEQ ID NO: 208

SEQ ID NO: 1421 - DNA, 1831 bp, Homo sapiens
gggctcttcctcgcggaagtggggaggaggcggttgcggttagtggaccgggaccggtaggggtgctgttgccatcatggctgaccccgacccccggtaccctcgctcctcgatcgaggacgacttcaactatggcagcagcgtggcctccgccaccgtgcacatccgaatggcctttctgagaaaagtctacagcattctttctctgcaggttctcttaactacagtgacttcaacagtttttttatactttgagtctgtacggacatttgtacatgagagtcctgccttaattttgctgtttgccctcggatctctgggtttgatttttgcgttgattttaaacagacataagtatccccttaacctgtacctactttttggatttacgctgttggaagctctgactgtggcagttgttgttactttctatgatgtatatattattctgcaagctttcatactgactactacagtattttttggtttgactgtgtatactctacaatctaagaaggatttcagcaaatttggagcagggctgtttgctcttttgtggatattgtgcctgtcaggattcttgaagttttttttttatagtgagataatggagttggtcttagccgctgcaggagcccttcttttctgtggattcatcatctatgacacacactcactgatgcataaactgtcacctgaagagtacgtattagctgccatcagcctctacttggatatcatcaatctattcctgcacctgttacggtttctggaagcagttaataaaaagtaattaaaagtatctcagctcaactgaagaacaacaaaaaaaatttaacgagaaaaaaggattaaagtaattggaagcagtatatagaaactgtttcattaagtaataaagtttgaaacaatgattaaatactgttacaatctttatttgtatcatatgtaattttgagagctttaaaatcttactattctttatgatacctcatttctaaatccttgatttaggatctcagttaagagctatcaaaattctattaaaaatgcttttctggctgggcacagtggctcacgcctgtaatcccaccactttgggagaccgaggcaggtggatcacgaggtcaagaggttgagaccatcctggccaacatggtgaaaccccgtctctactaaaaatacaaaaattagctggatgtggtggcacacacctgtagtcccagctagtcaagaggctgaggccagagaatcgcttgaacctgggaggtggaggttgcattgagccaagatcacgccactgcattccagcctggtgacagagcgagactcagtctcaaaaaaaaaaaaaaaatttttcttcctaaattagccacgcatagcggttcgtttgcaattcaaaaataattttatgagtagataagaatatcagtttaccgttgtctagtgattttatctaaattttccctgaattattaagtaatattgatttggctttgattctgaagtagtagagtctttaccattataaactgtaaatctctttttgcttaaaaggaaaaaaatgtaaaagataaattccacagagaattattcagtattacattaaaatgttaatgactttttattttaaattgtactaacattaaaagttggcctgaaagtcagatattatgacaaaatttgacattaattgtttttaaagtatagatttcatttgaaattatagaatggtaatgtggttagaggacaccaaagatactgggtcatcagccattaagtatatctatttcaaaattaaaatatttgggaagtaaaaaaaaaaaaaaaa

SEQ ID NO: 1422 - DNA, 5826 bp, Homo sapiens; identical to SEQ ID NO: 209

SEQ ID NO: 1423 - DNA, 4543 bp, Homo sapiens
cggcgggcggcgcgcacactgctcgctgggccgcggctcccgggtgtcccaggcccggccggtgcgcagagcatggcgggtgcgggcccgaagcggcgcgcgctagcggcgccggcggccgaggagaaggaagaggcgcgggagaagatgctggccgccaagagcgcggacggctcggcgccggcaggcgagggcgagggcgtgaccctgcagcggaacatcacgctgctcaacggcgtggccatcatcgtggggaccattatcggctcgggcatcttcgtgacgcccacgggcgtgctcaaggaggcaggctcgccggggctggcgctggtggtgtgggccgcgtgcggcgtcttctccatcgtgggcgcgctctgctacgcggagctcggcaccaccatctccaaatcgggcggcgactacgcctacatgctggaggtctacggctcgctgcccgccttcctcaagctctggatcgagctgctcatcatccggccttcatcgcagtacatcgtggccctggtcttcgccacctacctgctcaagccgctcttccccacctgcccggtgcccgaggaggcagccaagctcgtggcctgcctctgcgtgctgctgctcacggccgtgaactgctacagcgtgaaggccgccacccgggtccaggatgcctttgccgccgccaagctcctggccctggccctgatcatcctgctgggcttcgtccagatcgggaagggtgatgtgtccaatctagatcccaacttctcatttgaaggcaccaaactggatgtggggaacattgtgctggcattatacagcggcctctttgcctatggaggatggaattacttgaatttcgtcacagaggaaatgatcaacccctacagaaacctgcccctggccatcatcatctccctgcccatcgtgacgctggtgtacgtgctgaccaacctggcctacttcaccaccctgtccaccgagcagatgctgtcgtccgaggccgtggccgtggacttcgggaactatcacctgggcgtcatgtcctggatcatccccgtcttcgtgggcctgtcctgcttcggctccgtcaatgggtccctgttcacatcctccaggctcttcttcgtggggtcccgggaaggccacctgccctccatcctctccatgatccacccacagctcctcacccccgtgccgtccctcgtgttcacgtgtgtgatgacgctgctctacgccttctccaaggacatcttctccgtcatcaacttcttcagcttcttcaactggctctgcgtggccctggccatcatcggcatgatctggctgcgccacagaaagcctgagcttgagcggcccatcaaggtgaacctggccctgcctgtgttcttcatcctggcctgcctcttcctgatcgccgtctccttctggaagacacccgtggagtgtggcatcggcttcaccatcatcctcagcgggctgcccgtctacttcttcggggtctggtggaaaaacaagcccaagtggctcctccagggcatcttctccacgaccgtcctgtgtcagaagctcatgcaggtggtcccccaggagacatagccaggaggccgagtggctgccggaggagcatgcgcagaggccagttaaagtagatcacctcctcgaacccactccggttccccgcaacccacagctcagctgcccatcccagtccctcgccgtccctcccaggtcgggcagtggaggctgctgtgaaaactctggtacgaatctcatccctcaactgagggccagggacccaggtgtgcctgtgctcctgcccaggagcagcttttggtctccttgggccctttttcccttccctcctttgtttacttatatatatattttttttaaacttaaattttgggtcaacttgacaccactaagatgattttttaaggagctgggggaaggcaggagccttcctttctcctgccccaagggcccagaccctgggcaaacagagctactgagacttggaacctcattgctaccacagacttgcactgaagccggacagctgcccagacacatgggcttgtgacattcgtgaaaaccaaccctgtgggcttatgtctctgccttagggtttgcagagtggaaactcagccgtagggtggcactgggagggggtgggggatctgggcaaggtgggtgattcctcccaggaggtgcttgaggccccgatggactcctgaccataatcctagccccgagacaccatcctgagccagggaacagccccagggttggggggtgccggcatctcccctagctcaccaggcctggcctctgggcagtgtggcctcttggctatttctgtgtccagttttggaggctgagttctggttcatgcagacaaagccctgtccttcagtcttctagaaacagagacaagaaaggcagacacaccgcggccaggcacccatgtgggcgcccaccctgggctccacacagcagtgtcccctgccccagaggtcgcagctaccctcagcctccaatgcattggcctctgtaccgcccggcagccccttctggccggtgctgggttcccactcccggcctaggcacctccccgctctccctgtcacgctcatgtcctgtcctggtcctgatgcccgttgtctaggagacagagccaagcactgctcacgtctctgccgcctgcgtttggaggcccctgggctctcacccagtccccacccgcctgcagagagggaactagggcaccccttgtttctgttgttcccgtgaatttttttcgctatgggaggcagccgaggcctggccaatgcggcccactttcctgagctgtcgctgcctccatggcagcagccagggacccccagaacaagaagaccccgcaggatccctcctgagctcggggggctctgccttctcaggccccgggcttcccttctccccagccagaggtggagccaagtggtccagcgtcactccagtgctcagctgtggctggaggagctggcctgtggcacagccctgagtgtcccaagccgggagccaacgaagccggacacggcttcactgaccagcggctgctcaagccgcaagctctcagcaagtgcccagtggagcctgccgcccccgcctgggcaccgggaccccctcaccatccagtgggcccggagaaacctgatgaacagtttggggactcaggaccagatgtccgtctctcttgcttgaggaatgaagacctttattcacccctgccccgttgcttcccgctgcacatggacagacttcacagcgtctgctcataggacctgcatccttcctggggacgaattccactcgtccaagggacagcccacggtctggaggccgaggaccaccagcaggcaggtggactgactgtgttgggcaagacctcttccctctgggcctgttctcttggctgcaaataaggacagcagctggtgccccacctgcctggtgcattgctgtgtgaatccaggaggcagtggacatcgtaggcagccacggccccgggtccaggagaagtgctccctggaggcacgcaccactgcttcccactggggccggcggggcccacgcacgacgtcagcctcttaccttcccgcctcggctaggggtcctcgggatgccgttctgttccaacctcctgctctgggacgtggacatgcctcaaggatacagggagccggcggcctctcgacggcacgcacttgcctgttggctgctgcggctgtgggcgagcatgggggctgccagcgtctgttgtggaaagtagctgctagtgaaatggctggggccgctggggtccgtcttcacactgcgcaggtctcttctgggcgtctgagctggggtgggagctcctccgcagaaggttggtggggggtccagtctgtgatccttggtgctgtgtgccccactccagcctggggaccccacttcagaaggtaggggccgtgtcccgcggtgctgactgaggcctgcttccccctccccctcctgctgtgctggaattccacagggaccagggccaccgcaggggactgtctcagaagacttgatttttccgtccctttttctccacactccactgacaaacgtccccagcggtttccacttgtgggcttcaggtgttttcaagcacaacccaccacaacaagcaagtgcattttcagtcgttgtgcttttttgttttgtgctaacgtcttactaatttaaagatgctgtcggcaccatgtttatttatttccagtggtcatgctcagccttgctgctctgcgtggcgcaggtgccatgcctgctccctgtctgtgtcccagccacgcagggccatccactgtgacgtcggccgaccaggctggacaccctctgccgagtaatgacgtgtgtggctgggaccttctttattctgtgttaatggctaacctgttacactgggctgggttgggtagggtgttctggcttttttgtggggtttttatttttaaagaaacactcaatcatccta

SEQ ID NO: 1424 - DNA, 4068 bp, Homo sapiens
ggcagagcgcggcgcggggccggcggcgaaggtccggggtggaatcgacgtcgctgcggctgccgacgacccacacccggccggccgcctccgcagacccaccttggccgcgcggcagggggcgcgcagagccccgagggagcgagtccccgcgcgtggcagctcggcggcttctcccttcgggaggtccggctcccggctctccggacccgcctggcgtcctcgcctgcggcggggcggacgacagcggcgcccaggaatggcttcggcgggcagcggcatggaggaggtgcgcgtgtcggtgctgacccccttgaagctggtcgggctggtgtgcatcttcctggcgctgtgtctggacctgggggcggtgctgagcccggcctgggtcacagctgaccaccagtactacctgtcgttgtgggagtcctgccggaaacccgccagcttggacatctggcactgcgagtccacgctcagcagcgattggcagattgctactctggctttactcctgggcggcgctgccatcattctcattgcattcctggtgggtttgatttctatctgcgtgggatctcgaaggcgtttctatagacctgttgcggtcatgctttttgcagcagttgttttacaggtttgcagcctggtcctttacccaatcaagttcattgaaactgtgagcttgaaaatttaccatgagttcaactggggttatggcctggcctggggtgcaactatattttcgtttgggggtgccatcctttattgcctgaaccctaagaactatgaagactactactagaaccaatagtctcaaagtaaaaacaaccaccaccatccaacaaaaggattacgtctgcatcttttctaacttactattttctaaaacacttgtggagcatcaagcagtttgctcagttgatttaatcttttttgccttttggctgtcaacatcataaccagcttttacatccattttagaaatctgcacaaattaagagagctgattagacataggcaaatgctgcaaacttccaatatgttcatatcgtttttcttgacaaatgaagggtctatatgacagcaaccattgtgagaaactagttggaatgagatttgcctcaatctcctattgcctgcaggggagcagttggcataagcaacatttagaagttcctttgcgctgacaaggattccactgttagagcccttaccgcctgcttatcctacccaatgactacattggctgttggttatttgcttgagtgagcccttgaaaaatgaactgcccttcagcatctaatgggagttgtgaatgtaactggttaatgatacacattccaccttcaggaacactctttttaatgggaggttatgctttggcaatcagcgtctccctgggaagagagtcaagacttggagacatgtgcttctcattatgtggttagaaattggtgcctcagccctatctagactggggaaaaattgaggatctctgtttttcctggggcaaacagaaagaaatctgcatgagttgcttttgtaccctttaaatcatttgccaaacattgcagcaaacaagtgtgcgtatgtaacaagcttcactgtttttatagaaggtgaaccattagtataaatggtaataagttgttccctaaccctccacatacatttgcctatcacacgtaaaattaatatttactctagtgaagtggtttgagcactaaccttgtacacattgttaagaggcttagattggtattcatacttatttaccatacaaaagtatggtaccttaaagcttttgctctatgttctttactgtttcactggaaagtgtcaatagagttgcctaagaataaaaattgaaatggtgttaatctgaaaattaatgattctctgtaagcactgtagttgaaaagagagtagcaattaggatgatcattttgtgtaaaattcattaaaatagaaggctgctattttttgcaagtattttaaatgtcttcatttttttaagaaaggaatagcgatagatttatataaatatctaaatgtctcagtagaggagtagaattcatctggttatcacctggtcctctgaagttaactgatgggctaaccgatttgtgcacacacttaggatggatttatgttaagggaattacttactgactgttcaatggaaggaagtattaataatagggaataagtttgcaactaatctcatgctgcaaacttgtgttaattctgtttaatatacaaatttggatagcttaattataaacatatttttatatcaaatatacagttctaatataaaagttataaataattatttttgttaacaaagacactaaaacagtatgttctggttttggccctcttgcagaaagaagcattagaaaaattactttaaaagtagctatatgttactgtattgcaaaatctgttaagagcaggaccacatcgatagtatttaataatttgttttacctcccaaaacacagttcttctttcagcttgtcttaagaatggttgccaaaaacaacagccaaaaaaaaaaaacctattttattatccaaatgctagaaaacacacatgaattttctataaaatcacgaatatgaagtaccaggtttagtcttactttagcaatgatagacaaaagcgaataaatacatcacagacagaaacctttataaaaatatatgattctataaagaatcattagaaattatgagtggaaattctccagaaagatagtattatagagtcttttgaagcaattttttgagaaatagtaaaatctggggcagagtgtcttgcagttaattgcatattgtcagagcagcatgagaaatatgatatttggatagggatttcagcaactaaacattctctgttctgagatctctttattcctgaataatgaaagaatagtactttggtgctgacaccaatgaggcacttctcttggtcctagtagaggatgcagtgtactgttaaaccaatatcatcacatctcgagtcttatcaagttttcattctctgtcaatatgacaagctcaaagtgacagaatatgttataggttgaagcacacatatttgcagtttactgaaaagtagatttcttatgtgacttttttcccttctcagcaaagagccctacactagatttctaccatcactaatatttggaagtatttcattactaacaatctcagtacaacatgaaaattgttgcttctcatctaaaatacaattttgtctatcagaataaacacaagtgaaattttcacctacattaacattatgtctttgcagctttaggtttgttagatgtgttcttaagcataatttttagccacaaacccattgttagatagatatctatggatatagatctacatctatagatatagatatacacacatatatatactcacacacatatagcataaaatactcagcagggctagttattccgatttcttgcacaattatttagctttttgtaagttcaacatgtaaattttaaagacataaatatagagagacttatgtgtttgaatataaatgatatatatggattagcatgtacctgtatattattaaacatgcaatgaactgactggtaagtgacgtctaattgtatggctagcaatgtaatttattcagactgtatttttgtacagagcagtgcactctaacctatgcctctgtgtcctctttaatgcctaaagctgtgcctagaaatttcatctgtcttaaaagtaaaatatacttcatgctgtttatgctattagtttctgtactgctattctatatttattatttttaaatatatgacatgtttactacttaaacatgaattcatggtatcctggttattttttttaagtcatctgggggaaaacctgtttatcactccagtgattttgagtttgcagtttcacaatcagttcttcatttcatgatttttgtagttgacatgaagtcatctatgtggaaaaaaataaaaataaaagtgatttcacggatgtggtttgaaaaaaaaaaaaaaaa

SEQ ID NO: 1425 - DNA, 660 bp, Homo sapiens
gattaggcctggtttgcgctggagagtggtcttggttgtgagggtcataagatgggaactctcccggcacgtagacatatcccgccgtgggtgaaagttcccgaagacctgaaagatccagaggtgttccaggtccagacgcggctgctgaaagccattttcggcccggacggatctcgaatcccttacatcgagcaggtgagcaaggccatgctcgagctgaaggctctggagtcttcagacctcaccgaggtcgtggtttacggctcctatttgtacaagctccggaccaagtggatgctccagtccatggctgagtggcaccgccagcgccaggagcgagggatgctcaaacttgccgaagccatgaatgccctcgaactaggcccttggatgaagtgaaccagtttccagccaatgcaatgaagccgggttgcagagattaggttgtggccagagctagagtgattccttaagcttgttttaaaatctgctccagcctaaagagttaagggaaaaccatttgttcccttaaagagttaagggaaaacccttggctctgagtcttgttgtgaatatttctttgatgattgttaataaaaagtgttttttcttttttcccatttttaaaaataacaataaagttttaaataagttgat

SEQ ID NO: 1426 - DNA, 2499 bp, Homo sapiens
tcatactccatacctgggatttccgcctcgccgctctccgactgcttccagacatgcaggggccctgggtgctgctcctgctgggcctgaggctacagctctccctgggcatcatcccagttgaggaggagaacccggacttctggaaccgccaggcagccgaggccctgggtgccgccaagaagctgcagcctgcacagacagccgccaagaacctcatcatcttcctgggtgacgggatgggggtgtctacggtgacagctgccaggatcctaaaagggcagaagaaggacaaactggggcctgagaccttcctggccatggaccgcttcccgtacgtggctctgtccaagacatacagtgtagacaagcatgtgccagacagtggagccacagccacggcctacctgtgcggggtcaagggcaacttccagaccattggcttgagtgcagccgcccgctttaaccagtgcaacacgacacgcggcaacgaggtcatctccgtgatgaatcgggccaagaaagcaggaaagtcagtgggagtggtaaccaccacacgggtgcagcatgcctcgccagccggcgcctacgcccacacggtgaaccgcaactggtactcggatgccgacgtgcctgcctcggcccgccaggaggggtgccaggacatcgccacgcagctcatctccaacatggacattgatgtgatcctaggtggaggccgaaagtacatgtttcccatggggaccccagaccctgagtacccagatgactacagccaaggtgggaccaggctggacgggaagaatctggtgcaggaatggctggcgaagcaccagggtgcccggtacgtgtggaaccgcactgagctcctgcaggcttccctggacccgtctgtgacccatctcatgggtctctttgagcctggagacatgaaatacgagatccaccgagactccacactggacccctccctgatggagatgacagaggctgccctgctcctgctgagcaggaacccccgcggcttcttcctcttcgtggagggtggtcgcatcgaccatggtcatcatgaaagcagggcttaccgggcactgactgagacgatcatgttcgacgacgccattgagagggcgggccagctcaccagcgaggaggacacgctgagcctcgtcactgccgaccactcccacgtcttctccttcggaggctaccccctgcgagggagctccatcttcgggctggcccctggcaaggcccgggacaggaaggcctacacggtcctcctatacggaaacggtccaggctatgtgctcaaggacggcgcccggccggatgttacggagagcgagagcgggagccccgagtatcggcagcagtcagcagtgcccctggacggagagacccacgcaggcgaggacgtggcggtgttcgcgcgcggcccgcaggcgcacctggttcacggcgtgcaggagcagaccttcatagcgcacgtcatggccttcgccgcctgcctggagccctacaccgcctgcgacctggcgccccgcgccggcaccaccgacgccgcgcacccggggccgtccgtggtccccgcgttgcttcctctgctggcagggaccttgctgctgctggggacggccactgctccctgagtgtcccgtccctggggctcctgcttccccatcccggagttcccctgctccccacctccagtcgtcctgccggacctccacctggagctgtcacccccggagtcgccacacagacgtcctgccatggaaccttcccctcccggtgcaccctggggaccgagcccttgacaccacgccctttgctttatcttgctcttgaaattttggccccaactccagggactggggatttgtgcctggcagctgcctgcatttcaggaaaagaggaggctcagaccatccagcccccgcccatatcctgaggtggatcaggcaggctctctccccggggacatgaggcacccatacctaggaccccctgcgccttttttagcttcagtcatggcagcacctgagggacacaaggacttgggtgcatcaggacgccttggagaagcgtggcttcctgccaccctgcaacccaccctcccagccaaggaggctgctgtggtggggatccccaggggggctttgacacagtcctctgctgtccctccactgggctaattctacacccctgtgcccctcctaggggcccatgagtcagagaggcttgccccaagtcacagccactcagatgttcgacgccccctaaggtccattccagcacccacctgagttccgaggagcacctgggaagctctgggtgcaggatagcagtccagagtccatggccccgcctaggccatctgggtgctgggcatggatttctcagcaaggaagactcattaccttccctccctgggcctccattcttctgggaaacacaaagcaataataaaaggaagtgttagacaatgtaaaaaaa

SEQ ID NO: 1427 - DNA, 2278 bp, Homo sapiens
agtaggatgcggccagcgcaggagctggtggtgaaaaactgatctcgcatgttcagaaactgcacaagctctaccacatcctcgtcaacactgcccttccggctgaggtccgctttgctcaaacattgcgccttccatttcctgaactccgcgctgcgatccatgggtgacggactcagggtctgcgctcggctccttcatggtagcctcgtctctccctgggggcagccatattgaagcgagcggtggccgaaaaggtccaaacttcctcttcgttcttaatttgggaaattctagtgccttcgcctaggggtggagagaggcgcacatcctgggtggagcgaggcgcacatcctgggtggagcctgcaaaagttggagaaggtgtggcagtcctcatttctgtggaatctgaagaagcccacgcagattttaattcccactctagattctgtatctagatcaccatggcgactggacagaagttgatgagagctgttagagtttttgaatttggtgggccagaagtcctgaaattgcgatcagatattgcagtaccgattccaaaagaccatcaggttctaatcaaggtccatgcatgtggtgtcaaccccgtggagacatacattcgctctggtacttatagtagaaaaccactcttaccctatactcctggctcagatgtggctggggtgatagaagctgttggagataatgcatctgctttcaagaaaggtgacagagttttcactagcagcacgatctctgggggttatgcagagtatgctcttgcagcagaccacactgtttacaaactacctgaaaaactggactttaaacaaggagctgccatcggcattccatattttactgcttatcgagctctgatccacagtgcctgtgtgaaagctggagagagtgttctggttcatggggcaagtggaggagttggattagcagcatgccaaattgctagagcttatggcttaaagattttgggcactgctggtactgaggaaggacaaaagattgttttgcaaaatggagcccatgaagtgttcaatcacagagaagtgaattacattgataaaattaagaagtatgttggtgagaaaggaattgatataattattgaaatgttagctaatgtaaatcttagtaaagacttgagtcttctgtcacatggaggacgagtgatagttgttggcagcagaggtactattgaaataaacccacgagacaccatggcaaaggagtcgagtataattggagttactctcttttcctcaaccaaggaggaatttcagcaatatgcagcagcccttcaagctggaatggaaattggctggttgaaacctgtgataggttctcaatatccattggagaaggtggccgaggctcatgaaaatatcattcatggtagtggggctactggaaaaatgattcttctcttatgatgattaattctttcatggatttcctatgtaattagaggtactgtctttcccccagttgtacttaccctatcttttctttaattaacattcgattccatgagcttcttatgtgaaaaaataagatttttctttagagagcagaagcagaagagtaaaatttattgtatagctagcaatatttttttatgccatctgtctcaaatcaaagagtcatcatagtaggaaataacatgttagttgtcatttggcatgagtgtgcattccagtaattcttaattgatatttgattaattccatacctttgattaaaacatgctagttcaaaataagactgctcagtttccaagggttttcaagcctacttacctttataaaggttctctagtctctgattagccatgactgtattggactttgaacattttctgaactaaaaacctctattctaaactaatctcatttggatgtgtaagtcttttgtaaaggcaagaataaataatatccaggacaatttattagttttctcagtattttcccaaatattagaatatttacttcattattggttggctgccaatgaccccatatgttctgtgagaatagtagctttatctttgatataatacatagtctccaaataggtaatacttcgcaattgattagattttcagagtagatttagagttatctgtttttctggtgagggtcaaatatttttgttaattaagctcacaaatttgataaattaagaattatctgcatttgtctcgtaacataataatgtgtaataaagtctatagaaaattaaaaaaaaaaaaaaaa

SEQ ID NO: 1428 - DNA, 73 bp, Homo sapiens
cccagggtctggtgcggagagggcccacagtggacttggtgacgctgtatgccctcaccgctcagcccctggg

SEQ ID NO: 1429 - DNA, 4286 bp, Homo sapiens
gggaatatcctctcaagccctgaggtgcagggctgggaaggagtgggtgagcggctgggtcgtggcaggttggtctggggaggctggggaggctggggaggcgggaggagaacggttggccccggcagcggcgtgtcggagggcggatggggctaggaggccgcccggggggtggggtctgcggcgggccggcccccgcgtgcgcgtcgcctcgccgggcatttcaaaagctcgccggcagggcgcggcgctagctccgtgtgcctcgcaggcgtggtgggcgcgtcctggcagccgcccgcttggttctcgcgggatccgggctccggctcgacgccggctctctttttgacgccccgccgccggggttgccatggttcatttcttgcacccgggccacacgccccggaacatcgtccctcctgacgctcagaaggatgccctgggctgctgcgtggtacaggaagaggcatctccctacactttggtcaacatctgcctgaatgtcctgattgctaacctggagaaattgtgttctgaaagacctgatggaacactgtgccttccggagcattggagtttccctcaggaagtagccgagcgatttctcagggtgatgacttggcaaggcaagctgactgacagaacagccagcattttccgaggcaaccaaatgaaactgaagctggtcaatatccaaaaagctaaaatctctacagctgcattcataaaagccttctgccgtcataagctcattgaactgaatgctactgcagtgcacgctgacctcccagttccagacatcataagtggactctgcagcaataggtggatccagcaaaacctccagtgtctcctgttagactcgacaagcatccctcaaaattcaagattactgttctttagtcagctcactggtcttcgcattttaagtgtttttaatgtttgttttcatactgaagacctggctaatgtttctcagttaccaagactggaaagcttagatatctctaatactctagtcactgatatttctgcactgcttacctgtaaggatcgattgaagtctctcacaatgcactatctgaaatgcctggccatgaccaaatcacaaattcttgcagtcattagagaacttaaatgtctgcttcaccttgatatttctgatcacaggcaactcaaatcagacctagcttttcatttgctacagcagaaggatatcctgcccaatgttgtgtcattggatatttctgggggcaattgcatcactgatgaagctgtagaactgtttatacgactgcggcctgccatgcaatttgtgggactattggccacggatgctggctcttctgacttctttactacaaagcaaggcttgagggttgctggaggagccagtatgagtcagatttcagaagcactgagccgatacaggaacagatcatgttttgtgaaggaagccctccacaggctgttcacagagacattttcaatggaggtaaccatgcctgctattttaaagcttgtggctataggaatgaggaatcacccattggatttgcgagtgcagttcacagccagtgcttgcgctctcaacctaacacgccagggcctggccaaggggatgcctgttcgcctgttgtcagaggtcacctgtctacttttcaaggctctgaaaaatttcccccattaccagcagttacagaagaattgtcttctctccttaaccaattccaggattcttgtggatgttccatttgacaggtttgatgctgccaagtttgtcatgagatggctctgtaagcatgaaaaccccaagatgcaaacaatggcagtgagtgtcacctctattctggctctgcagctctcacctgagcaaacggcacagcttgaagagcttttcatggcagttaaggaacttctagcaatagtaaaacaaaagactactgagaatttagatgatgtcaccttcttgtttactttgaaagcactttggaatcttacagatgggtctccagctgcctgcaagcacttcattgaaaatcaaggattgcaaatcttcatccaagtcttggagaccttttcagagtcagcaatacaaagcaaagtacttggtcttttgaacaacatagcagaagtcagagagctctcttccaagctggtgaccgaagatgtgctgaagcatatcaacagtttactctgtagcagggaaatggaagtcagctattttgctgcaggtatcatagcccacctgacatctgacagacagctttggatatcccgtgacttccagaggcgtactcttctccaagatctgcatgcaaccatacagaattggccaagttcaagttgtaagatgacagcattggtgacctatagatctttcaagacatttttcccgctccttggcaacttctctcaaccagaggttcagctctgggcactatgggctatgtatcatgtctgcagtaaaaatcccagcaaatactgcaaaatgttagttgaagaagaaggattgcagcttttgtgtgatatccaggagcacagtgaggcaacccccaaagcacagcagattgcagcctccattctggatgacttcagaatgcatttcatgaattatcagaggcccactctgtgtcaaatgcccttctgaacctaaggaatttcagaggtgtgtgctcttcctcaatgtcaggtgttctgccctggcagtaattgcacatcagttgtcattggagtttgtgagttggctgtctcattggcctttgattgttgattttatatatgttacaaaaggttggatttgtatgatagctgtaatcccaagtcaagttggactcattctgcagcctttcagcagcaattttgaagactcaaaccgtggactctgggaaggcctgggagcttgtgttggaacagctatgcaagttacttttctctagccttggacaattttttccctttgggagcttgtcatgggagtgggacctgttcactagaagagaaaggaaacctacagggagactttgatatttatattaaatttcctttgttgttatcgtcatgtgaagctatgagaaaagcttgggaagcatatgcttcaaaatgtagtgtttagaaggcagaacccctgttggagagcggggaaaagaatttatttatttatttatttatctatggctgggtatggtggctcacgcctgtaatcccagcactttgggaggccaaggcaggtggattgtctgaactcaggagttcgagatcagccttgccaacgtggtaaaactccgtctctaccaaaaaatacaaaaattagctgagcgtggtggtgtgcacctttactcctagctacttggaggctgaggtgggaggaccacttgagcccaggaggcagaggttgcagtgagctgagattgcaccactgcactccagcctggatgacagagtgagacctcatctcaaatgaatagaggggtggagaaaagagaaatatatttttttacctttttttttttttttttttttgtgacggaatctcgctctgtcgcccaggctggagtgcagtggcacaatctcggctcactgcaacctctgcctcccaggttccagcaattctcctgcctcagcctcctgagtagctgggactacaggcacatgccgccacgcccggctaatttttgtattttttagtagagacagggtttcaccatattggtcaggctggtctcgacctcctgacctcgtgatccacccgtctcggcctcccaaagtgctgggattacaggtgtgagtcactgcacctggcctttttacaattttgggtgtctatctttggcatgtttcctgttatgtgagcatgacatgctgtgtatgtgagtgagcttgtagggcgtggtgggacttaggcatttgcagacagtgtttagatgaaagattacatgtaatgataaatctgaatccctccattttatttgggtggaaccatgaccaaaaatggtaggaagacgaaaggccagaaagagactttgccagagagttcacggagttttcttaccccgcatgctgactaaagaaaacatgggcttttctgaaaccagcttcaactacagtataaactatatcagaagcttacttgataagccttgcggagctgctctgaggaatagtgtgaattccttccttgccttattgttgactgttaatgaacatgttttgtcatttatctgtttaagtttttcagaaaataaaagtaaatttctgttagcacatttaaaaaaaaaaaaaaa

SEQ ID NO: 1430 - DNA, 3353 bp, Homo sapiens
cttttcggccaccgctcgcttcaatatggctgcccccagggagagacgaggctaccatgaaggagccgagcgcagaccctgagtccgtcacccatggatcgcagcgcggagttcaggaaatggaaggcgcaatgtttgagcaaagcggacctcagccggaagggcagtgttgacgaggatgtggtagagcttgtgcagtttctgaacatgcgagatcagtttttcaccaccagctcctgcgctggccgcatcctactccttgaccggggtataaatggttttgaggttcagaaacaaaactgttgctggctactggttacacacaaactttgtgtaaaagatgatgtgcattccatggcaatagattctggtttcaggaactctggcataacggtgggaaagagaggaaaaactatgttggctgtccggagtacacatggcttagaagttccattaagccataagggaaaactgatggtgacagaggaatatattgacttcctgttaaatgtggcaaatcaaaaaatggaggaaaacaagaaaagaattgagaggttttacaactgcctacagcatgctttggaaagggaaacgatgactaacttacatcccaagatcaaagagaaaaataactcatcatatattcataagaaaaaaagaaacccagaaaaaacacgtgcccagtgtattactaaagaaagtgatgaagaacttgaaaatgatgatgatgatgatctaggaatcaatgttaccatcttccctgaagattactaagctttggttctgatgtgtcttggccgtaatgtttctagtaggttttataaagctgctcttcataagagtattttagtttgttgagtgtatcagccattcataagccagtaatgacaagtgcagagcttcaaactataactttgttgcccagaggatgtgcagttgtcatctaagctctcagcagtacccggcttatcctacgacttcacctgaaatgctatagttatccctacttttttaccagtttctcccagaagcacctgcttaataaatcaaagatgtttgaatggtgtcttattctgaaataacctgacctaagacaggtatttagattattttggatacattttgaaaagggatagcataaatattttaagtaaaaagacctttattttaaataatagtggatattttaatgctggaaattagcattatagttgatatgccagaaattatatctttggttgtgatttaaacttatgctataaactaaattaatgatgtaaatacatagttttaaacattcttttagggacatgtaacttttaagtatcacttcaataatacgtattattataggaacaaagatttgggaataattgattacaggtgaggaagtactggaattccagttcaaggagataccatttcatttaggactaaaaggacaagatacaagttcacatgatgggaaaaatcagaaaacctctcgcagacaaagggtatataatggatatgaggcatcaaaaagcatggtatagtcagtgatggggaatagtccagaaaggctgaaacacagcatgtgatgcgagtcaaggtagttgatgcccaactgtgaagggccgttctaatctagcatggaggtagacagtgtttccttaatatggctgcatatcagaattacctaggtcaggacgaggcatggagatgctactttaataggccctgccgcagatcttccaaaccagaatcttaatcctggagtctaggaatctttatttttcacacaactcatccaagtggttctgataaaatcagtccagcacttttagaacccactgataacagacttattcctggagacagcatttgaggaggaattgaagatttttctaatgaaaagaaaaagggtcacatgaacagatgttgcagtgtacctgtgccagggatttcatgtgtacactttataggagaataagcaagagcttaggtaagttatagtccttaccattgggtctaaggcagtttccaggaaagcatggcaactcgttcagctatgtaagttgaactctgtaccacttgggagggaacattcccctagatgacaatgtcagtggcactcgaagttgtgcagtgcacattcttatctaccaacatatacagcagtccttctgggaaggaaatttgggcaggaaagggaactcacagtgtcggaatgcctggagcatttcttctagtctggtggacagaatatgaaagtatctgcctggcagtgcagtaaatgaaaagagaagataaatgaataaaaaaaaaagttataaataacagtaggaaagagagagtgcaggtggaacgagcctatcctgtggtgaaatgacaacacattctgcagttttaaaatctaagaggctcattgacttttcttcattcatttaaattgatctccaagaaaactatgtattttaaagattccataaactgaatatatgaatgagaattaagaagagaggggctgcttcctaatctgtttatataaggtatagtatagtataatctgtttatataaggttagtagagaggagacaccaggtgctggccataaacctaagaagacattgaatcccattcactccttaacattccttaatatacattcatgagctacataacattttaatcatcaatgatggaccatataccatatacgatatggtggccccataagattataatggacctgaaaaattcctattgctagtgatgtggtcattgtaaagctgtagcacaacacattacccacgtttgtggtgacagtcatataaaagtatggtacatataattatgtacagtgcatacataatacttgataatatgttactggtttgtgtctttgctatgctttttatcattattttagggtatactacttaaaatgttaactgtaaaacagcttctgacaggtccttcaggaagtactccagaagaaggcattgttatcatagaaggtgacagcttcatgtgtgttattgcccctgaagaccttccagtggtacaagatgtggaggaggaagacagtgatactgaggattctgaccctgtgtaggcttaggctaatgtgtgtgtttatatcttagtttttcacaaaaaggtttttccaatgttaaaaaaaatatataaaaaagcttatagaataaggatataaagaaatattttgtacagctgtacaataagctaagcattattaccaaagagtcaaaaagttttaagaaattaaagtttataaaccaaatgttcattgtgagccaaggttaatttattgaagaaataaaacatttttaatgaaaaaaaaaaaaaaaaaa

SEQ ID NO: 1431 - DNA, 4074 bp, Homo sapiens
gacaggcctctcggcgagccggtgccccatcgggtaccgcacggctgccgcggcggccttaccctgccgcgagcgcctgtgacagcggcgccgctgtgctcgcgaccccggctccgggcctctgccgacctcaggggcaggaaagagtcgcccggcgggatgggcggggaggctgggtgcgcggcggccgtgggtgccgagggccgcgtgaagagcctgggtctggtgttcgaggacgagcgcaagggctgctattccagcggcgagacagtggccgggcacgtgctgctggaggcgtccgagccggtggccctgcgcgcgctgcgcctggaggcccaggggcgcgccaccgccgcctggggcccgagcacctgcccccgcgcctcggccagcaccgcggccctggctgtcttctcggaggtggagtacctgaacgtgcgcctcagcctgcgggagcccccggccggtgaaggcatcattttattacagcctggaaaacatgaatttccatttcgctttcaacttccatctgaacctttggtcacctcgtttactgggaaatatggaagcattcagtactgtgtgcgggcagtgttggaacgacccaaggtacctgatcagagtgtaaagcgggaactccaggttgttagtcatgtcgatgtcaacacaccagcattattaacccctgtattgaaaactcaagagaaaatggttggctgttggtttttcacttctggtccagtctcgctgagtgccaaaattgaaagaaagggatactgtaatggagaagctattccaatctatgcagaaatagaaaattgttcctctcgtctgattgttccaaaggctgctattttccaaacgcagacatatttggctagtggaaaaacaaagaccattcgacacatggtcgccaatgtgcgaggaaaccacatcgcttctgggagcacagacacatggaatgggaaaacgctaaaaatcccacctgttactccatccatcctggattgctgcattatcagagtggactattccttagctgtatacattcacattcctggtgctaaaaaattgatgctcgaactgccattagtgatcggtacaattccatataatggttttggcagcagaaactccagcattgccagccagttcagtatggatatgagctggttgacactgaccctgccagagcagcctgaagcaccaccaaattatgcagatgtggtatcagaggaagaattctctagacacattcctccttaccctcaaccccctaactgtgagggagaagtgtgctgtcctgtgtttgcctgtatacaagaattccggtttcaacccccacctctttattcagaggttgacccacatcctagcgacgtagaagagagccagcctgtttccttcattctctgaacgtatttcagaaatcactgtgttcatcatcaaattagaatgttggttcttttccttctgcctttttgggaaagagacaggaaagattcacttgaaaacataaatgaacgtcaagactgaaggcaatagaaattaaagaatgtgagaaagttctggtgggccggcaggattgccgcacaagtttatatgatggtcgtatatatatccctgttaaaaactgggatgaagatgtgcaaagtcacagaatgtaatggaagtcctgatggttacagagtaagtgaaagggtgcctgcgctgacgtgagagaaaggaatctgtaaacagtggaaacactgtgggagtttcccatggtgaagagtggaacgaaggcgatatgaactgaaggggtgaagacttgattttggagagggcaacaaaacaagggtgtgtgtgcataggagaatggcccactccaaatacgaagtgagatcctgagtctttgggtgcttcatgatttcctaccatattcaggcctaaagacattgaaaaagcatcttttcttgagatcatggtcatatgaggtcctaatgaagtactacagttttcattctttcaagggtagactaaaatatagtttataaatcggcagtacggtattatgaaaccaagaaagggtttcttgaaaagcttgtcggttcaaagaggaaagatgaatttcaatgtgaaaacacgttttgttgagggctgtactttttaccccctttaagtgctttaacaggatatacgtttgattttcctcatatcttatttacctaggagcatgtaagagaaagaagggagagaaaaggttgcatctgcaggatgccttgataactacacagtcccaaataaaaggcctttttctaacctacctctaatggggttatcagatatgtttttaaatctctcgccctgagtactcttcttgggagttgctgctgtttacagccacagtctcatctatcactaaatatgaaactgggccaaggggaaaattcagtaagttagcgttaaatggaagtaaatatatgtatacctaagagaatgtcaaaataaacaccaaaccaaaagaaggtaggagtgccatttttagaaaagacacaactttaattcctgtcaagagacctaggtctactgatggcagtcactgcattgtacattattccagttcttcagtaattctgtttaaactgtgattttctttattgtgttggtgcaatattttattatcatttaacctcaggatattcagaccaacaggattgtgttgctgctgaaagtctgagcagtgttttaccgtccccagcccccctcccacatggtcacatgttcacttgcttttccttccatctgttggttttgtgagctgagagcatctctggacacatggaagggagccagggattcctgtgatacagattttgaaccagcagagtactttggttttcttcatgtcctaagggtttgatccagaaaccctggtgcttcccctgcagaatactgtacttcatttaacagaatgattgatttttctttcaatcagcatgttcaccaaaaatagaaaagttcttctaaggttaaattttgtatttaaaagttagttggccatttgatcagggaattttctacacacattaggcaaatgtatgcttttcatcctctgggcttacctctctcctctgcaatcctggaagcatcgtgcatagttctttcattgtaagccgctatttaaattcccacaatgcaaaactgttagaccagtaattgtgctactgaaattgtcacaaaacgttattccttgatttggtttttaaattttgctttcgtgtgtgtgtctttaaacaggtaatgtgtatttaagtgttgtctaaacagttgatttttactttagaaaagatcatcttcaactgtttattgacttctgagttatatagttcatgccctgccaaggcattgttcgactccatgatactaaaacataatgaaagaaacaaactccagtatggagaagagaaagtttaattatttggttccatctagaaaagcaacaacttaaaggaatccttcactaggattgtcttatcacctttattagataaatcatgaagtgtccctgtgaaattgaagtgaaactatctctgtaggacttaagagaatagctaaaaggtgtgacttgccttattgaaatgatactggcatatctgactgtaagcagtaggttgaagatatcattttatgaatgtggagaattctacattgaaacagaaaatacctgggaatgaagattaaaaatgtagctgctgttatttgcttggttattcccctcttgctcttctttagtttgaaaaaacaaaaacgtggccttggaattttcattttgatgcagaaattttgaaattgaaaatgtgcatgttttggtgcacaaaatccttctgtgggcaaaactttgtttttgttttgcacagtaagaaacaataggcaagcgttatgtttttggtaagttaactatgaaagctttcttatttttattattaaaaatgtaacaatttaacccacaggaaaaaaaattactttgtatgcttgtttgaaccctatgggttcgttttattaataaaattattacactaatgctaaaaaaaa

SEQ ID NO: 1432 - DNA, 2953 bp, Homo sapiens
atatagagacgtttccgcctcctgcttgaaactaacccctctttttctccaaaggagtgcttgtggagatcggatcttttctccagcaattgggggaaagaaggctttttctctgaattcgcttagtgtaaccagcggcgtatattttttaggcgccttttcgaaaacctagtagttaatattcatttgtttaaatcttattttatttttaagctcaaactgcttaagaataccttaattccttaaagtgaaataattttttgcaaaggggtttcctcgatttggagctttttttttcttccaccgtcatttctaactcttaaaaccaactcagttccatcatggtgatgttcaagaagatcaagtcttttgaggtggtctttaacgaccctgaaaaggtgtacggcagtggcgagaaggtggctggccgggtgatagtggaggtgtgtgaagttactcgtgtcaaagccgttaggatcctggcttgcggagtggctaaagtgctttggatgcagggatcccagcagtgcaaacagacttcggagtacctgcgctatgaagacacgcttcttctggaagaccagccaacaggtgagaatgagatggtgatcatgagacctggaaacaaatatgagtacaagttcggctttgagcttcctcaggggcctctgggaacatccttcaaaggaaaatatgggtgtgtagactactgggtgaaggcttttcttgaccgcccgagccagccaactcaagagacaaagaaaaactttgaagtagtggatctggtggatgtcaatacccctgatttaatggcacctgtgtctgctaaaaaagaaaagaaagtttcctgcatgttcattcctgatgggcgggtgtctgtctctgctcgaattgacagaaaaggattctgtgaaggtgatgagatttccatccatgctgactttgagaatacatgttcccgaattgtggtccccaaagctgccattgtggcccgccacacttaccttgccaatggccagaccaaggtgctgactcagaagttgtcatcagtcagaggcaatcatattatctcagggacatgcgcatcatggcgtggcaagagccttcgggttcagaagatcaggccttctatcctgggctgcaacatccttcgagttgaatattccttactgatctatgttagcgttcctggatccaagaaggtcatccttgacctgcccctggtaattggcagcagatcaggtctaagcagcagaacatccagcatggccagccgaaccagctctgagatgagttgggtagatctgaacatccctgataccccagaagctcctccctgctatatggatgtcattcctgaagatcaccgattggagagcccaaccactcctctgctagatgacatggatggctctcaagacagccctatctttatgtatgcccctgagttcaagttcatgccaccaccgacttatactgaggtggatccctgcatcctcaacaacaatgtgcagtgagcatgtggaagaaaagaagcagctttacctacttgtttctttttgtctctcttcctggacactcactttttcagagactcaacagtctctgcaatggagtgtgggtccaccttagcctctgacttcctaatgtaggaggtggtcagcaggcaatctcctgggccttaaaggatgcggactcatcctcagccagcgcccatgttgtgatacaggggtgtttgttggatgggtttaaaaataactagaaaaactcaggcccatccattttctcagatctccttgaaaattgaggccttttcgatagtttcgggtcaggtaaaaatggcctcctggcgtaagcttttcaaggttttttggaggctttttgtaaattgtgataggaactttggaccttgaacttatgtatcatgtggagaagagccaatttaacaaactaggaagatgaaaagggaaattgtggccaaaactttgggaaaaggaggttcttaaaatcagtgtttcccctttgtgcacttgtagaaaaaaaagaaaaaccttctagagctgatttgatggacaatggagagagctttccctgtgattataaaaaaggaagctagctgctctacggtcatctttgcttaagagtatactttaacctggcttttaaagcagtagtaactgccccaccaaaggtcttaaaagccatttttggagcctattgcactgtgttctcctactgcaaatattttcatatgggaggatggttttctcttcatgtaagtccttggaattgattctaaggtgatgttcttagcactttaattcctgtcaaattttttgttctccccttctgccatcttaaatgtaagctgaaactggtctactgtgtctctagggttaagccaaaagacaaaaaaaattttactacttttgagattgccccaatgtacagaattatataattctaacgcttaaatcatgtgaaagggttgctgctgtcagccttgcccactgtgacttcaaacccaaggaggaactcttgatcaagatgccgaaccctgtgttcagaacctccaaatactgccatgagaaactagagggcaggtcttcataaaagccctttgaacccccttcctgccctgtgttaggagatagggatattggcccctcactgcagctgccagcacttggtcagtcactctcagccatagcactttgttcactgtcctgtgtcagagcactgagctccacccttttctgagagttattacagccagaaagtgtgggctgaagatggttggtttcatgtttttgtattatgtatctttttgtatggtaaagactatattttgtacttaaccagatatatttttaccccagatggggatattctttgtaaaaaatgaaaataaagtttttttaatggaaaaaaaaaaaaaaaaaaaaaaaaaaaa

SEQ ID NO: 1433 - DNA, 2158 bp, Homo sapiens
attcataaaacgcttgttataaaagcagtggctgcggcgcctcgtactccaaccgcatctgcagcgagcatctgagaagccaagactgagccggcggccgcggcgcagcgaacgagcagtgaccgtgctcctacccagctctgctccacagcgcccacctgtctccgcccctcggcccctcgcccggctttgcctaaccgccacgatgatgttctcgggcttcaacgcagactacgaggcgtcatcctcccgctgcagcagcgcgtccccggccggggatagcctctcttactaccactcacccgcagactccttctccagcatgggctcgcctgtcaacgcgcaggacttctgcacggacctggccgtctccagtgccaacttcattcccacggtcactgccatctcgaccagtccggacctgcagtggctggtgcagcccgccctcgtctcctccgtggccccatcgcagaccagagcccctcaccctttcggagtccccgccccctccgctggggcttactccagggctggcgttgtgaagaccatgacaggaggccgagcgcagagcattggcaggaggggcaaggtggaacagttatctccagaagaagaagagaaaaggagaatccgaagggaaaggaataagatggctgcagccaaatgccgcaaccggaggagggagctgactgatacactccaagcggagacagaccaactagaagatgagaagtctgctttgcagaccgagattgccaacctgctgaaggagaaggaaaaactagagttcatcctggcagctcaccgacctgcctgcaagatccctgatgacctgggcttcccagaagagatgtctgtggcttcccttgatctgactgggggcctgccagaggttgccaccccggagtctgaggaggccttcaccctgcctctcctcaatgaccctgagcccaagccctcagtggaacctgtcaagagcatcagcagcatggagctgaagaccgagccctttgatgacttcctgttcccagcatcatccaggcccagtggctctgagacagcccgctccgtgccagacatggacctatctgggtccttctatgcagcagactgggagcctctgcacagtggctccctggggatggggcccatggccacagagctggagcccctgtgcactccggtggtcacctgtactcccagctgcactgcttacacgtcttccttcgtcttcacctaccccgaggctgactccttccccagctgtgcagctgcccaccgcaagggcagcagcagcaatgagccttcctctgactcgctcagctcacccacgctgctggccctgtgagggggcagggaaggggaggcagccggcacccacaagtgccactgcccgagctggtgcattacagagaggagaaacacatcttccctagagggttcctgtagacctagggaggaccttatctgtgcgtgaaacacaccaggctgtgggcctcaaggacttgaaagcatccatgtgtggactcaagtccttacctcttccggagatgtagcaaaacgcatggagtgtgtattgttcccagtgacacttcagagagctggtagttagtagcatgttgagccaggcctgggtctgtgtctcttttctctttctccttagtcttctcatagcattaactaatctattgggttcattattggaattaacctggtgctggatattttcaaattgtatctagtgcagctgattttaacaataactactgtgttcctggcaatagtgtgttctgattagaaatgaccaatattatactaagaaaagatacgactttattttctggtagatagaaataaatagctatatccatgtactgtagtttttcttcaacatcaatgttcattgtaatgttactgatcatgcattgttgaggtggtctgaatgttctgacattaacagttttccatgaaaacgttttattgtgtttttaatttatttattaagatggattctcagatatttatatttttattttatttttttctaccttgaggtcttttgacatgtggaaagtgaatttgaatgaaaaatttaagcattgtttgcttattgttccaagacattgtcaataaaagcatttaagttgaatgcgaccaa

SEQ ID NO: 1434 - DNA, 1597 bp, Homo sapiens; identical to SEQ ID NO: 843

SEQ ID NO: 1435 - DNA, 1136 bp, Homo sapiens
gatcctgccacagctgctgcccacaccgcgctcagcgccttcactgccatccccgctgtccttgccgcccccgccatgggcctagagctgtttcttgacctggtgtcccagcccagccgcgccgtctacatcttcgccaagaagaatggcatccccttagagctgcgcaccgtggatttggtcaaagggcagcacaagagcaaggagttcttgcagatcaacagcctggggaaactgccgacgctcaaggatggtgatttcatcttgaccgaaagctcggccatcctgatttacctgagctgtaagtaccagacgccggaccactggtatccatctgacctgcaggctcgtgcccgtgttcatgagtacctgggctggcatgccgactgcatccgtggcacctttggtatacccctgtgggtccaggtgttggggccactcattggggtccaggtgcccgaggagaaggtggaacgcaacaggactgccatggaccaggccctgcaatggctggaggacaagttcctgggggacaggcccttcctcgctggccagcaggtgacactggctgatctcatggccctggaggagctgatgcagccggtggctctcggctatgaactgtttgagggacggccacgactggcagcatggcgtggacgagtggaggctttcctgggtgctgagctatgccaggaggcccacagcatcatcttgagcatcctggaacaggcggccaagaaaaccctcccaacaccctcaccagaggcctatcaggctatgctgcttcgaatcgccaggatcccctgaagggtctgggatgggggccaggagattagcaacaaggattcattctgttacttacttgcccctttttatctttccctcttgccccagtcccttctctccagcttcatgtgaagctctgcacagacaagacactcagtgtccttggcagtgctgctactcctcaggtgcagcatacataaccagtaagagactaaatctgcaatatataaagagctcctacaaatcagtaacatgaagaacactcaaaaattggcaaatgtcatcagtgttttaaacagaataaagattccaaacactttgaatagagaaaaaaaaaaaaaaaaaaa

SEQ ID NO: 1436 - DNA, 1136 bp, Homo sapiens; identical to SEQ ID NO: 1435

SEQ ID NO: 1437 - DNA, 5101 bp, Homo sapiens
cactcctccccatcctctccctctgtccctctgtccctctgaccctgcactgtcccagcaccatgggacccacctcaggtcccagcctgctgctcctgctactaacccacctccccctggctctggggagtcccatgtactctatcatcacccccaacatcttgcggctggagagcgaggagaccatggtgctggaggcccacgacgcgcaaggggatgttccagtcactgttactgtccacgacttcccaggcaaaaaactagtgctgtccagtgagaagactgtgctgacccctgccaccaaccacatgggcaacgtcaccttcacgatcccagccaacagggagttcaagtcagaaaaggggcgcaacaagttcgtgaccgtgcaggccaccttcgggacccaagtggtggagaaggtggtgctggtcagcctgcagagcgggtacctcttcatccagacagacaagaccatctacacccctggctccacagttctctatcggatcttcaccgtcaaccacaagctgctacccgtgggccggacggtcatggtcaacattgagaacccggaaggcatcccggtcaagcaggactccttgtcttctcagaaccagcttggcgtcttgcccttgtcttgggacattccggaactcgtcaacatgggccagtggaagatccgagcctactatgaaaactcaccacagcaggtcttctccactgagtttgaggtgaaggagtacgtgctgcccagtttcgaggtcatagtggagcctacagagaaattctactacatctataacgagaagggcctggaggtcaccatcaccgccaggttcctctacgggaagaaagtggagggaactgcctttgtcatcttcgggatccaggatggcgaacagaggatttccctgcctgaatccctcaagcgcattccgattgaggatggctcgggggaggttgtgctgagccggaaggtactgctggacggggtgcagaacccccgagcagaagacctggtggggaagtctttgtacgtgtctgccaccgtcatcttgcactcaggcagtgacatggtgcaggcagagcgcagcgggatccccatcgtgacctctccctaccagatccacttcaccaagacacccaagtacttcaaaccaggaatgccctttgacctcatggtgttcgtgacgaaccctgatggctctccagcctaccgagtccccgtggcagtccagggcgaggacactgtgcagtctctaacccagggagatggcgtggccaaactcagcatcaacacacaccccagccagaagcccttgagcatcacggtgcgcacgaagaagcaggagctctcggaggcagagcaggctaccaggaccatgcaggctctgccctacagcaccgtgggcaactccaacaattacctgcatctctcagtgctacgtacagagctcagacccggggagaccctcaacgtcaacttcctcctgcgaatggaccgcgcccacgaggccaagatccgctactacacctacctgatcatgaacaagggcaggctgttgaaggcgggacgccaggtgcgagagcccggccaggacctggtggtgctgcccctgtccatcaccaccgacttcatcccttccttccgcctggtggcgtactacacgctgatcggtgccagcggccagagggaggtggtggccgactccgtgtgggtggacgtcaaggactcctgcgtgggctcgctggtggtaaaaagcggccagtcagaagaccggcagcctgtacctgggcagcagatgaccctgaagatagagggtgaccacggggcccgggtggtactggtggccgtggacaagggcgtgttcgtgctgaataagaagaacaaactgacgcagagtaagatctgggacgtggtggagaaggcagacatcggctgcaccccgggcagtgggaaggattacgccggtgtcttctccgacgcagggctgaccttcacgagcagcagtggccagcagaccgcccagagggcagaacttcagtgcccgcagccagccgcccgccgacgccgttccgtgcagctcacggagaagcgaatggacaaagtcggcaagtaccccaaggagctgcgcaagtgctgcgaggacggcatgcgggagaaccccatgaggttctcgtgccagcgccggacccgtttcatctccctgggcgaggcgtgcaagaaggtcttcctggactgctgcaactacatcacagagctgcggcggcagcacgcgcgggccagccacctgggcctggccaggagtaacctggatgaggacatcattgcagaagagaacatcgtttcccgaagtgagttcccagagagctggctgtggaacgttgaggacttgaaagagccaccgaaaaatggaatctctacgaagctcatgaatatatttttgaaagactccatcaccacgtgggagattctggctgtgagcatgtcggacaagaaagggatctgtgtggcagaccccttcgaggtcacagtaatgcaggacttcttcatcgacctgcggctaccctactctgttgttcgaaacgagcaggtggaaatccgagccgttctctacaattaccggcagaaccaagagctcaaggtgagggtggaactactccacaatccagccttctgcagcctggccaccaccaagaggcgtcaccagcagaccgtaaccatcccccccaagtcctcgttgtccgttccatatgtcatcgtgccgctaaagaccggcctgcaggaagtggaagtcaaggctgctgtctaccatcatttcatcagtgacggtgtcaggaagtccctgaaggtcgtgccggaaggaatcagaatgaacaaaactgtggctgttcgcaccctggatccagaacgcctgggccgtgaaggagtgcagaaagaggacatcccacctgcagacctcagtgaccaagtcccggacaccgagtctgagaccagaattctcctgcaagggaccccagtggcccagatgacagaggatgccgtcgacgcggaacggctgaagcacctcattgtgaccccctcgggctgcggggaacagaacatgatcggcatgacgcccacggtcatcgctgtgcattacctggatgaaacggagcagtgggagaagttcggcctagagaagcggcagggggccttggagctcatcaagaaggggtacacccagcagctggccttcagacaacccagctctgcctttgcggccttcgtgaaacgggcacccagcacctggctgaccgcctacgtggtcaaggtcttctctctggctgtcaacctcatcgccatcgactcccaagtcctctgcggggctgttaaatggctgatcctggagaagcagaagcccgacggggtcttccaggaggatgcgcccgtgatacaccaagaaatgattggtggattacggaacaacaacgagaaagacatggccctcacggcctttgttctcatctcgctgcaggaggctaaagatatttgcgaggagcaggtcaacagcctgccaggcagcatcactaaagcaggagacttccttgaagccaactacatgaacctacagagatcctacactgtggccattgctggctatgctctggcccagatgggcaggctgaaggggcctcttcttaacaaatttctgaccacagccaaagataagaaccgctgggaggaccctggtaagcagctctacaacgtggaggccacatcctatgccctcttggccctactgcagctaaaagactttgactttgtgcctcccgtcgtgcgttggctcaatgaacagagatactacggtggtggctatggctctacccaggccaccttcatggtgttccaagccttggctcaataccaaaaggacgcccctgaccaccaggaactgaaccttgatgtgtccctccaactgcccagccgcagctccaagatcacccaccgtatccactgggaatctgccagcctcctgcgatcagaagagaccaaggaaaatgagggtttcacagtcacagctgaaggaaaaggccaaggcaccttgtcggtggtgacaatgtaccatgctaaggccaaagatcaactcacctgtaataaattcgacctcaaggtcaccataaaaccagcaccggaaacagaaaagaggcctcaggatgccaagaacactatgatccttgagatctgtaccaggtaccggggagaccaggatgccactatgtctatattggacatatccatgatgactggctttgctccagacacagatgacctgaagcagctggccaatggtgttgacagatacatctccaagtatgagctggacaaagccttctccgataggaacaccctcatcatctacctggacaaggtctcacactctgaggatgactgtctagctttcaaagttcaccaatactttaatgtagagcttatccagcctggagcagtcaaggtctacgcctattacaacctggaggaaagctgtacccggttctaccatccggaaaaggaggatggaaagctgaacaagctctgccgtgatgaactgtgccgctgtgctgaggagaattgcttcatacaaaagtcggatgacaaggtcaccctggaagaacggctggacaaggcctgtgagccaggagtggactatgtgtacaagacccgactggtcaaggttcagctgtccaatgactttgacgagtacatcatggccattgagcagaccatcaagtcaggctcggatgaggtgcaggttggacagcagcgcacgttcatcagccccatcaagtgcagagaagccctgaagctggaggagaagaaacactacctcatgtggggtctctcctccgatttctggggagagaagcccaacctcagctacatcatcgggaaggacacttgggtggagcactggcccgaggaggacgaatgccaagacgaagagaaccagaaacaatgccaggacctcggcgccttcaccgagagcatggttgtctttgggtgccccaactgaccacacccccattcccccactccagataaagcttcagttatatctca

SEQ ID NO: 1438 - DNA, 2707 bp, Homo sapiens
agggagcaaattgggcgtttggaaaaagtcccacgcctggaaaggaatacacagtgggggggtggggggcggggcacatcgactacttcaaggcacactcccacggttcagaaaaccgattggctaaaactgggaaagtcccgcccacaacgctcactggccaatggctgcgtgaaatcagtgcgaagtgggcgggatagagagcgtgggcgggggggctagcctcgtgcgggctccttaagtagcggctgcgtggcttccctggcacgctactcttacgacgtcacggtcaggtggtgcagagctggacggcaacgacgtcggacgcgccccttcttggaacaatgtcccaccacggaggagctcccaaggcctctacgtgggtcgttgctagtcggcgaagctcgacagtgtcccgagcgccagagaggaggccggcggaggagttgaatcgaacaggtcctgagggatatagtgtcggcagaggtggtcgctggagaggcacctctaggcccccggaggccgtggccgctggtcacgaggaactgccgctgtgttttgctttgaagagccactttgttggcgcggtaatcggtcgtggtgggtcaaaaataaagaatatacaaagtacaacaaacaccacaatccaaataatacaagaacaaccagaatcattagtcaaaatttttggcagcaaggcaatgcaaacgaaagcaaaagcagtgatagacaattttgttaaaaagctagaagaaaattacaattcagaatgcggaattgatactgcattccaaccttctgttggaaaagatggaagcacagataacaatgttgttgcaggagatcggccattgatagattgggatcaaattagagaggaaggtttgaaatggcaaaaaacaaagtgggcagatttaccaccaattaagaaaaacttttataaagagtccactgccacaagtgccatgtcaaaagtagaagcagatagttggaggaaagaaaattttaatataacgtgggatgacttgaaggatggggagaaacgacctatccccaatcctacctgcacatttgatgacgcctttcaatgttatcctgaggttatggaaaacattaaaaaggcaggttttcaaaagccaacacctattcagtcacaggcatggcccattgtgttgcaaggaatagatcttataggagtagcccagactggaacaggaaagacattgtgttatttaatgcctggatttattcatctggtccttcaacccagccttaaaggtcaaaggaatagacccggcatgttagttctaactcccactcgggaattagcacttcaagtagaaggagaatgttgcaaatattcatataaagggcttcggagtgtttgtgtatatggtggtggaaatagagatgaacaaatagaagagcttaaaaaaggtgtagatatcataattgcaactcccggaagattgaatgatctgcaaatgagtaacttcgtcaatctgaagaatataacctacttggttttagatgaagcagacaagatgttggacatgggatttgaaccccagataatgaagattttgttagatgtgcgcccagataggcagacagttatgaccagtgctacatggcctcattcagttcatcgcctcgcacaatcttatttgaaagaaccaatgattgtctatgttggtacattggatctagttgctgtaagttcagtgaagcaaaatataattgtaaccaccgaggaagagaaatggagtcacatgcaaacttttctacagagtatgtcatccacagacaaagtcattgtcttcgtttctcgaaaagctgttgcggatcacttatcaagtgacctaatacttggaaatatatcagtagagtctctgcatggagatagagaacagagagatcgggagaaagcattagagaactttaaaacaggcaaagtgagaatactaattgcaactgatctagcctctagaggacttgatgtccatgacgttacacatgtctataattttgactttccacggaatattgaagaatacgtacaccgaatagggcgcacgggaagagcagggaggactggtgtttccattacaactttgactagaaatgattggagggttgcctctgaattgattaatattctggaaagagcaaatcagagtattccagaggagcttgtatcaatggctgagaggtttaaggcacatcaacagaaaagggaaatggaaagaaaaatggaaagacctcaaggaaggcccaagaagtttcattaatgtcttctgtactagtggggtagagaattcaagattttttagaaatatagtaagacggaagtattggacatgttggcagtatgaagagaccggactgatttgactgattcttaaaataatagtgtttgaaaatatagaatccagtgttttatactttctttaataaaaatagaagtatttaaacttggaagttgtttcctggatttttattaaggagtgtagcattagaatgtttttcttttaatcttttaaactgtctcctgtaattttgctgtatgtcataaggccagtctttcagaatttaatgttcagattttgtcatggcagtgaaaaagatgttttcaaacaaagaatcagcacctgaaaaaatactgttaataaatgttcgtttctgtgataaaaagaaaaaaaaaaaa

SEQ ID NO: 1439 - DNA, 987 bp, Homo sapiens; identical to SEQ ID NO: 848

SEQ ID NO: 1440 - DNA, 3369 bp, Homo sapiens
acttactgtcattaaaccagtatgatgatggagtggggaatgcctcagtttctcccaccgccgagggcctataggactacagttcccagggccccgtgctgcaggctagcggcctcccgccaatgctggccagtaacctgagcatccctctccaaaaggtcacttcagggctccttgagggacagcaacagggggagcctagagctgctcagcttcggtgggggtggagtgagggctgtggccctgcctcacacaacctccctcacaccacccctgcaatgcagggtcgtgggcccctttctcaaagacatccagtggcctctgctagttgcacctcttccgtcaggggacactgacttggctcctgcaccacagcctgcagggggtcctggttccttttgccacaacacatggcctcccatcctggttcagccactgacagacagctccccaatccagcactctgcctgctccttcttgtatccaaccctccaaaaggcagggacaagggacagaagaccatgtgcaaggcctggaggaagtgggtcagcacaggcctgtgaacaagccaggccagtcttggcggcccaagtggagctcacctctccctcccctctcctctcctccccttgccctcaaaatagctccctgagctgccaggccaagaccctcccattgcaggggaggcggggcgtgctgcccagagccaggctttaaatccccttgaggctggggagctccactccttggctggaggcagtgctgaggccgccgtcccctctaccatcagtccagtccggcccgccctcctgcagccatgtcccggcccctgtcagaccaagagaaaagaaagcaaatcagtgtgcgtggcctggccggcgtggagaacgtgactgagctgaaaaagaacttcaaccggcacctgcatttcacactcgtaaaggaccgcaatgtggccaccccacgagactactactttgctctggcccataccgtgcgcgaccacctcgtggggcgctggatccgcacgcagcagcactactatgagaaggaccccaagaagatctccgggggctggcagatggaggaggccgatgactggcttcgctacggcaacccctgggagaaggcccggcccgagttcacgctacctgtgcacttctacggccatgtggagcacaccagccagggtgccaagtgggtggacacacaggtggtactggccatgccctacgatacgcccgtgcctggctatcgcaacaatgttgtcaacaccatgcgcctctggtctgccaaggctcccaatgacttcaacctcaaggacttcaatgtcggtggctacatccaggctgtgttggaccgaaacctggcggagaacatctctcgtgtcctgtaccccaatgataatttcttcgaagggaaggagctgcggctgaagcaggagtatttcgtggtggctgccaccctccaggacatcatccgtcgcttcaagtcttccaagttcggctgccgtgatcccgtgcgcacgaacttcgatgccttcccagataaggtggccatccagctcaatgacacccacccctccctggccatccccgagctgatgaggatcctggtggacctggaacggatggactgggacaaggcgtgggatgtgacagtgaggacctgtgcctacaccaaccacacggtgctgcccgaggccctggagcgctggccggtgcacctcttggagacgctgctgccgcggcacctccagatcatctacgagatcaaccagcgcttcctcaaccgggtggcggccgcattcccaggggacgtagaccggctgcggcgcatgtcgctggtggaggagggcgcagtgaagcgcatcaacatggcacacctgtgcatcgcggggtcgcacgccgtcaacggcgtggcgcgcatccactccgagatcctcaagaagaccatcttcaaagacttctatgagctggagcctcataagttccagaataagaccaacggcatcacccctcggcgctggctggttctgtgtaaccccgggctggcagaggtcattgctgagcgcatcggggaggacttcatctctgacctggaccagctgcgcaaactgctctcctttgtggatgatgaagctttcattcgggatgtggccaaagtgaagcaggaaaacaagttgaagtttgctgcctacctagagagggaatacaaagtccacatcaaccccaactcactcttcgacatccaggtgaagcggattcacgaatataaacgacagctcctcaactgcctccatgtcatcaccctgtacaaccgcatcaagagggagcccaataagttttttgtgcctcggactgtgatgattggagggaaggctgcacctgggtaccacatggccaagatgatcatcagactcgtcacagccatcggggatgtggtcaaccatgacccggcagtgggtgaccgcctccgtgtcatcttcctggagaactaccgagtctcactggccgagaaagtgatcccagctgcagacctctctgagcagatctccactgcgggcactgaagcctcaggcaccggcaacatgaagttcatgctcaacggggctctgaccattggcaccatggacggggccaatgtggagatggcagaagaggcgggagaggaaaacttcttcatctttggcatgcgggtggaggatgtggataagcttgaccaaagagggtacaatgcccaggagtactacgatcgcattcctgagcttcggcaggtcattgagcagctgagcagtggcttcttctcccccaaacagcccgacctgttcaaggacattgtcaatatgctcatgcaccatgaccggtttaaagtcttcgcagattatgaagactacattaaatgccaggagaaagtcagcgccttgtacaagaacccaagagagtggacgcggatggtgatccggaacatagccacctctggcaagttctccagtgaccgcaccattgcccagtatgcccgggagatctggggtgtggagccttcccgccagcgcctgccagccccggatgaggccatctgagcctccagaccagaccccaaaccagcccttgagtctgtcacactctcttgggccagccccagcacctcatgcagagggtggggtactggagttagatctctaagcccctcctggaaccctcattttccccactctcaatgtcccagtgtccagcgtgactaaggacacgggcccccttccgtcctcgggctcccggtcccctcctatttatggggtctgaccaactgcacccactccctaataaattcattctccttgggagcctccttaaaaaaaaaaaaaaaaaa

SEQ ID NO: 1441 - DNA, 2620 bp, Homo sapiens
agatcccaggtagtggcgccggtggatccggatcgagggcaggaggctgagacccgcgggagctggccctaaagcaaggacctgagtgcaagtaatttttttgggaagtaataacagaaaataccagcaaggaagaagacagtgaacccaaaagaattgaaaacaggatgctgcccatcacagaccgcctgctgcacctcctggggctggagaagacggcgttccgcatatacgcggtgtccacccttctcctcttcctgctcttcttcctgttccgcctgctgctgcggttcctgaggctctgcaggagcttctacatcacctgccgccggctgcgctgcttcccccagcctccccggcgcaactggctgctgggccacctgggcatgtaccttccaaatgaggcgggccttcaagatgagaagaaggtactggacaacatgcaccatgtactcttggtatggatgggacctgtcctgccgctgttggttctggtgcaccctgattacatcaaaccccttttgggagcctcagctgccatcgcccccaaggatgacctcttctatggcttcctaaaaccttggctaggggatgggctgctgctcagcaaaggtgacaagtggagccggcaccgtcgcctgctgacacccgccttccactttgacatcctgaagccttacatgaagatcttcaaccagagcgctgacattatgcatgctaaatggcggcatctggcagagggctcagcggtctcccttgatatgtttgagcatatcagcctcatgaccctggacagtcttcagaaatgtgtcttcagctacaacagcaactgccaagagaagatgagtgattatatctccgctatcattgaactgagcgctctgtctgtccggcgccagtatcgcttgcaccactacctcgacttcatttactaccgctcggcggatgggcggaggttccggcaggcctgtgacatggtgcaccacttcaccactgaagtcatccaggaacggcggcgggcactgcgtcagcagggggccgaggcctggcttaaggccaagcaggggaagaccttggactttattgatgtgctgctcctggccagggatgaagatggaaaggaactgtcagacgaggatatccgagccgaagcagacaccttcatgtttgagggtcacgacacaacatccagtgggatctcttggatgctgttcaatttggcaaagtatccggaataccaggagaaatgccgagaagagattcaggaagtcatgaaaggccgggagctggaggagctggagtgggacgatctgactcagctgccctttacaactatgtgcattaaggagagcctgcgccagtacccacctgtcactcttgtctctcgccaatgcacggaggacatcaagctcccagatgggcgcatcatccccaaaggaatcatctgcttggtcagcatctatggaacccaccacaaccccacagtgtggcctgactccaaggtgtacaacccctaccgctttgacccggacaacccacagcagcgctctccactggcctatgtgcccttctctgcaggacccaggaattgcatcggacagagcttcgccatggccgagttgcgcgtggttgtggcactaacactgctacgtttccgcctgagcgtggaccgaacgcgcaaggtgcggcggaagccggagctcatactgcgcacggagaacgggctctggctcaaggtggagccgctgcctccgcgggcctgagcgtgggcgcgcccctgcggctcccgagggtccaggccccgcccccaaaggaccaggactcgccccaaagatcccgagggcataggccacccccctcgaagttcaggttcagctcctggatgaccaggcaccgctgttgagcagcctggtggtactggccacgcccctcaaggcaaggctcctccccttagggggcctgatcccgccccttgaggcttaggtcccgccccctgacttctcgcacctgtcctgtttgagggaccagggtcgaccctgcccccttgggctcaggccccgcccccaggatcctacggattgaggtcctcaggccacgcccctgcagatccaggtctccaggccttgcccactgagccttcagaggacctaagacccacctatgactcagggcccaccacaccccacccccccccaactggctgaacccctggcaggcttccaaactgaggaaagctggagcctgacgtcagagcttttaactcggacatcaccctcctgaggccctcagctcatacgggcagactgctcaggcgtgaggctggatcgtagggttcgaggctgcttgcttttgttgttgttttgtaaactcagacccttgtaagccccttccttcctcccttgcccaaagatcctttgctgagtgttctgtttttgcagaataaaagcaaaggatgcagacttaccccaccctccacccctagctcagccagatccttacacgtggagcccccagcatgggaatgaggggctctgcaactgagcgaagctgcgggctaggaggctggaaagccatttatcctaggacataaactcagattttgggggtcaaaaaaaaaaaa

SEQ ID NO: 1442 - DNA, 6741 bp, Homo sapiens
gatcgcgtggggagccggtcttggagcagcgggattagcttctaaagtctctttcatctctcctaaggaagaagcctagaagaggaggaagaggaaagaaaaggagtcaggaatgcctcttagatatctcttccaaatgcatgatgaaaaaggtgggaagattacttgagccagggagttgaaggctgcagtgagccctgtttttgccaccacactccagcttgggattgatttctaaagactcatgttacatgaggaagcagctcagaagaggaaaggaaaggagccaggcatggctcttcctcagggacgcttgactttcagggatgtggctatagaattctcattggcagagtggaaattcctgaaccctgcgcagagggctttgtacagggaagtgatgttggagaactacaggaacctggaggctgtggatatctcttccaaacgcatgatgaaggaggtcttgtcaacagggcaaggcaatacagaagtgatccacacagggatgttgcaaagacatgaaagttatcacactggagatttttgcttccaggaaattgaaaaagatattcatgactttgagtttcagtcacaaaaagatgaaagaaatggccatgaagcatccatgccaaaaatcaaagagttgatgggtagcacagaccgacatgatcaaaggcatgctggaaacaagcctattaaagatcagcttggattaagctttcatttgcatcttcctgaactccacatatttcagcccgaagagaaaattgctaatcaagtggagaagtctgtcaacgatgcttcctcaatttcaacatcccaaagaatttcttgtaggcctgaaacacatactcctaataactatgggaataattttttccattcatcattactcacacaaaaacaggaagtacacatgagagaaaaatctttccaatgtaatgagactggcgaagcctttaattgtagctcatttgtaaggaaacatcagataatccatttaggagaaaaacaatataaatttgatatatgtggcaaagtctttaatgagaagcgataccttgcacgccatcgtagatgtcacactagtgagaaaccttacaagtgtaatgaatgtggaaagtccttcagttacaagtcatccctgacatgccatcgtagatgtcacactggtgagaaaccttacaagtgtaatgaatgtggaaagtccttcagttacaagtcatcccttacatgccatcataggtgtcacactggtgagaaaccttacaagtgtaatgaatgtggaaagtccttcagttacaagtcatcccttagatgccatcgtagacttcatactggaataaaaccttacaagtgtaatgagtgtggcaagatgtttggtcaaaattcaacccttgtaattcataaggcaattcatactggagagaaaccttacaagtgtaatgaatgtggcaaggcttttaatcaacaatcacacctttcacgtcatcatagacttcatactggagagaaaccttacaagtgtaatgactgtggtaaggcttttattcatcagtcaagccttgcacgtcatcatagacttcatactggagagaaatcttacaaatgtgaagaatgtgacagagttttcagtcagaaatcaaaccttgagagacacaagataattcatactggagagaaaccttacaagtgtaatgagtgtcacaagaccttcagtcacaggtcatctcttccatgccatcgtagacttcatagtggtgagaaaccttacaagtgtaatgaatgtgggaagacttttaatgtacagtcacacctttcacgtcatcatagacttcatactggagagaaaccttacaaatgtaaggtttgtgacaaggctttcatgtgccattcttatctggcaaaccatactagaattcatagcggagagaaaccttacaagtgtaatgagtgtggtaaggctcacaatcacttgattgattcatcaatcaagccttgcatgtcatcatagacttcatactggagagaaaccttacaaatgtgaagcatgtgacaaagttttcagtcacagatcacgccttaaaagacataggagaattcatactggagagaaaccttacaagtgtaatgagtgtggcaaagcctttagtgaccagtcaacacttaccatcaggccattcatggtgtagggaaacttgactaatgtaatgattgtcacaaagtcttcagtaacgctacaacgattgcaaatcattggagaatccataatgaagagagatcttccgagtgtaataaatgtggcaaatttttcagacatcgttcataccttgcagttcatcagtgaactcatactggagagaaaccttacaaatgtcatgactgtggcaaggtcttcagtcaagcttcatcctatgcaaaacataggagaattcatgcaggagagaaatgtcacaagtgtgatgagtgttgcaaagcctttacttcatgttcacacctcattagacatcagagaatccctactggagagaaatcttacaaatgtcatcagtgtggcaaggtcttcagtccgaggtcactccttgcagaacatcagaaaattcatttttgagataactgttcccaatgcagtgagtatagcaaaccatcaagcattaattgacattggagtcaattcagcattgacttgagtttgtgttgacttaacattgagttcaagccttaattgacatgcaggtgtttatgataagaggattgggccaggtgcagtggatcacgcctgtaatcccagcacattgggaggccaaggcacataggtcacttgaggtcaagagtttgaaacaagcatggccaagagatgtgagccagttttcccagcctgtttattattattttttgagatggagtgttgctcttgctgcccaggctagagtgcaatggtgcgatcttgactcacagcaacctccgcctcctgggttcaagcgattcctctgcctcagcctccctagttgctgggattacaggtatatgccacgacgcctggctaattttttgtatttttagtagggaaagggtttctccatgttggtcaggctggtctcaaactcccgatctcaggtgatccgcccacctcagcctcccaaagtgatgagattacaggcatatgccaccgcgcctggcattgtttcttcttttccttttttttttttttttttttttttgagatagtactttttaaagagatagtacttttttgagatagtacttttttaaagggatataccatagtagttttaaaagggatatcaggctgggtgtggcagctcacgccggtaatcccagcactttgggaggccaaggcaggcagataacaaagtcaggagattgagaccgtcctggctaacacggtgaaacctcgtctctactaaaaatacaaaaacttagccgggcatggtggtgggcacctgtagtctcagctactcagggggctgaggctggacaatggtgtgaacccaggaggcggtgcttgcagggagccgagatcgtgccactgcactccaggctgggcgacagagtgagagtctgtctcaaaaaaaaaaaaaaaaagatatcaaacccggggtgtctcatcccacagcactttggaagactgaagtgagtggatcatctaagatcagagttcaagagcaccctggctaacatggtgaaaccccatctctactaaaaatacaaaagttagccaggggtgggggtgtgcacctttagttccagctacttgggacactgaggcatgagaatcacttaaacctgggaggtagaggttacagcgaatcaaaaccgtgccactgtactgcagcgaggttggcagagtgagtctccatctcaaacaaacaaatgaaaaaaacagacatcaaaaatgcttttgttctcgttgtgtcatagacttcccttttttttccttctggttcctcttcagttctctatttattttttcttttttgcagattgagtttgagatatatcttagttttaatagttttatttcttaacacataatgacttctgaaagatgcctttgcagcatcctgtaatcagctcacatcattcgtttctgtacttgtatattttccagttgttttccggttgaccccaaaattcgtgagatttttttcctacaacaatttcaaaagagttgctgtttgaaattagttgcatccagttcagatcgaggtctgcatgctttctagtctttgttatttattggaaggctgtggtacctactacttaagtttgattgttgcagtgtgtacttggtaaagatgtcagtgaccttttaaataaacatcaaaatgtagtttaagcagttagtctgtttttcagttttctttccttatgtcattttttaaaatcttgagctgggagctatttattgtgtgtttccctcaaggccctgtggtccattctggaaaaatgttgaaacatgggctggagtggcatagagcgctgctccaaaagcacccatgtattcttttcttttttggaaatggagtctcgctctgtcagcttggatggagtgcagtggtgcgatctcagctcactgcaacctctacctccttggatcaagtgatgctcctgcctcagtctcctgaggagctggaattacaggcacccaccagcacacccagctagtttttgtatttttagtagagacagggtttcaccatgtttgtcaggctggtctcaaactcctgacctcgcgatccacccgactcagcctcccactgtgatgggattacaggcatgagctaccacgtcgagactcttttttttttttttttttagatggagttttgcttttgttgctgaggctggagtgcaatggtgcgatctggtgtcactccaatgtcttcctcctgggttcaagtgatttctcctgcctcatcctactgagtagttgggattacaggtgccctccaccactcccggctcattttttgcatttttagtagagacagggtttcatcatgttggcaggctggtcttgaactcctgacttcaggtgatctgcccacctcgacctcccaaaatgctaggattacaagcgtgagccattgtgcctgaccactcatgtattcttgattgaaataatttgcttatttcttagttctacagctgaccctctttcactgtttccaaggtcaatagctgtgtgttcacacttctgcattttataaatgttcctgtgagttttttgtaaggaagaattaactgtcaggaatcaatgtcatcagaaccttgcaaaagaagtttctttagcccaggtttgtgaaagaggtttctctaattttcaaggatgggggtgataagagcaacctttgccattagcccttccaggaccccatgtaagactttagacaccttctcactcatctcagaccttctcagggtaacttggtgaaaatgtcttccgatctgagccccagtgagcctccctgcaacttggcgacgaggggcttgaccagaaaaggtcaacccgagtgtccctgaccgttgaaatgattggcaaaatggagtgcgtgtctgggtgtggcttttttttttttgaggagtgcccagttgtgattagaattttcaatgggatgcagtgccctaaaaatgaaaaacaaaagcagaagaatggaagaaatagaggtagactcagacacagagaccatcttcaaggcctttctctgtatgaggacatcacagcaaaatctaaagcaggtcacgtcaatccctggcagggaaccctccaccggcttcccgtgttccccaggacaaaagcccaacccctcactgtggctccacagccccgtgtgcagggcccctgccagtgtccagcctcctcctggcagcttgccctcatctcatgactccctctgccccagtcacatttgcttttctcttttcccaaacatcaaaacccttcctgtctcaggtcattgtccctgctcttaccctatgtaccctgtccctttctcctccttcaggtctaggctcagagctctctcccatgccctcccacccctggtctcaagctcctgagctcaagtgatctacccacctcggcctcctagagtgctgggatgacaggcatgagccactgcaaccagcctctgcatggggtttcctcaactttaggtctgtgccctgaaggggagctcattccagcccagttcccaactgctgcagcatgtgtgtgtgggcttctccagaaggggagccagagtttccctgtaggagtttatcctccatggtgaggagggccgcaggggggactgtatttgctcagggtgaggtctcctttgtgtcaggcctctgagcccaagctaagccatcgtatcccctgtcacctgcacgtatacatccagatggcctgaagcaactgaagatccacgaaagaagtgaaaatacccttaagtgatgacattccaccattgtgatttatttctgcaccatcttgactgatcaatgtgctttgtaatctcccccacccttcagaaggctctttgtaatcctccccacccttgagaatggacttggtgagatccaccccctgcctgcaaagcattgcccctaactccaccgcctgtcccaaaagctacaagaactaatgataatcccaccatactttgctgactctcttttcacactcagcccgcctgcacccaggtgaaataaacagcctcgttgctcaca

SEQ ID NO: 1443 - DNA, 2423 bp, Homo sapiens
acccgcgctcgtacgtgcgcctccgccggcagctcctgactcatcgggggctccgggtcacatgcgcccgcgcggccctataggcgcctcctccgcccgccgcccgggagccgcagccgccgccgccactgccactcccgctctctcagcgccgccgtcgccaccgccaccgccaccgccactaccaccgtctgagtctgcagtcccgagatcccagccatcatgtccatagagaagatctgggcccgggagatcctggactcccgcgggaaccccacagtggaggtggatctctatactgccaaaggtcttttccgggctgcagtgcccagtggagcctctacgggcatctatgaggccctggagctgagggatggagacaaacagcgttacttaggcaaaggtgtcctgaaggcagtggaccacatcaactccaccatcgcgccagccctcatcagctcaggtctctctgtggtggagcaagagaaactggacaacctgatgctggagttggatgggactgagaacaaatccaagtttggggccaatgccatcctgggtgtgtctctggccgtgtgtaaggcaggggcagctgagcgggaactgcccctgtatcgccacattgctcagctggccgggaactcagacctcatcctgcctgtgccggccttcaacgtgatcaatggtggctctcatgctggcaacaagctggccatgcaggagttcatgatcctcccagtgggagctgagagctttcgggatgccatgcgactaggtgcagaggtctaccatacactcaagggagtcatcaaggacaaatacggcaaggatgccaccaatgtgggggatgaaggtggctttgcccccaatatcctggagaacagtgaagccttggagctggtgaaggaagccatcgacaaggctggctacacggaaaagatcgttattggcatggatgttgctgcctcagagttttatcgtgatggcaaatatgacttggacttcaagtctcccactgatccttcccgatacatcactggggaccagctgggggcactctaccaggactttgtcagggactatcctgtggtctccattgaggacccatttgaccaggatgattgggctgcctggtccaagttcacagccaatgtagggatccagattgtgggtgatgacctgacagtgaccaacccaaaacgtattgagcgggcagtggaagaaaaggcctgcaactgtctgctgctcaaggtcaaccagatcggctcggtcactgaagccatccaagcgtgcaagctggcccaggagaatggctggggggtcatggtgagtcatcgctcaggagagactgaggacacattcattgctgacctggtggtggggctgtgcacaggccagatcaagactggtgccccgtgccgttctgaacgtctggctaaatacaaccagctcatgagaattgaggaagagctgggggatgaagctcgctttgccggacataacttccgtaatcccagtgtgctgtgattcctctgcttgcctggagacgtggaacctctgtctcatcctcctggaaccttgctgtcctgatctgtgatagttcaccccctgagatcccctgagccccagggtgcccagaacttccctgattgacctgctccgctgctccttggcttacctgacctcttgctgtctctgctcgccctcctttctgtgccctactcattggggttccgcactttccacttcttcctttctctttctctcttccctcagaaactagaaatgtgaatgaggattattataaaagggggtccgtggaagaatgatcagcatctgtgatgggagcgtcagggttggtgtgctgaggtgttagagagggaccatgtgtcacttgtgctttgctcttgtcccacgtgtcttccactttgcatatgagccgtgaactgtgcatagtgctgggatggaggggagtgttgggcatgtgatcacgcctggctaataaggctttagtgtatttatttatttatttattttatttgtttttcattcatcccattaatcatttccccataactcaatggcctaaaactggcctgacttgggggaacgatgtgtctgtatttcatgtggctgtagatcccaagatgactggggtgggaggtcttgctagaatgggaagggtcatagaaagggccttgacatcagttcctttgtgtgtactcactgaagcctgcgttggtccagagcggaggctgtgtgcctgggggagttttcctctatacatctctccccaaccctaggttccctgttcttcctccagctgcaccagagcaacctctcactccccatgccacgttccacagttgccaccacctctgtggcattgaaatgagcacctccattaaagtctgaatcagtgc

SEQ ID NO: 1444 - DNA, 4883 bp, Homo sapiens
caattatccacgggagactcggttttcctctctgtaaattacggatattaggaatacttgccgcctggggttgttttgagcactttcattgtttaggtgctgtatttattgggtgtgcgttccctgggagagcccgagggagacggctcctgcaccggccccaagggcctctctgcccgtggagtgcaggagcgaaggggctggcctagctgaccaccagggcccctgctggctctgaccgccctcctatcccaagtaattatttacacgtttcgcgttcgcttatgtattatgtgtaatcatggcacagtatcctgaagccgtcggagtctgtgtgctggtgcaaggtctgggacaaatttaagaagagagagaacctaaattggtaataaatcaataagaaatatttacattcactcagtgaaaagtgtcatgtctgagctcagcatatatcggagccacacatggacacctctccttcctccactaagagcggaaaatgaacaaatcccaggaacaagtgtcattcaaggatgtatgtgtggacttcactcaggaagagtggtatctgctggaccctgctcagaagattctatacagagatgtgatcctggaaaattatagcaatcttgtctcagtagggtattgcattactaaaccagaagtgatctttaagatcgagcaaggagaagagccctggatattagaaaaaggattcccaagccagtgccacccagaaaggaaatggaaagttgatgacgtgttagagagcagccaggaaaatgaagatgaccatttttgggagcttctattccacaacaacaaaacagtaagtgtagaaaatggagatagaggaagcaaaactttcaatttgggcacagaccctgtttctttaagaaattatccctataaaatatgtgactcatgtgaaatgaatttgaaaaatatttcgggcttaattattagtaaaaagaactgttccagaaagaagcctgatgagtttaatgtatgtgagaaattgctccttgatattaggcatgagaaaatccctattggagagaagtcttataaatatgatcaaaaaaggaatgccattaattatcaccaggatctcagtcagccaagttttggccaatcttttgagtatagtaaaaatggacaaggcttccatgatgaggcagcattttttacaaataagagatctcagataggagagacagtctgtaaatataacgaatgtggaagaaccttcattgaaagtttaaagctgaatatatctcaaagacctcatttggaaatggagccgtatggatgcagtatttgcgggaagtccttctgcatgaatttaaggtttggacatcagagagctcttacaaaggacaatccttatgaatataatgaatatggggaaatcttctgtgacaattcagctttcattatccatcagggagcttacacaagaaagattctccgtgaatataaagtgagtgacaaaacctgggaaaagtcagctctcttaaaacatcaaatagtacacatggggggaaagtcttatgattacaatgaaaatgggagtaatttcagcaagaagtcacatcttacccagcttcggagagctcacacaggagaaaaaacctttgaatgtggtgaatgtgggaaaaccttctgggagaagtcaaacctcactcaacatcagagaacacacacaggagagaagccctatgaatgtactgaatgtgggaaagccttttgccagaaaccacacctgaccaaccatcagcgaacacatacaggagaaaaaccctatgaatgtaagcaatgtggaaaaacattctgtgtgaagtcaaacctcactgaacatcagagaacacacacaggggagaagccctatgaatgtaatgcatgtgggaaatccttctgccacagatcagccctcactgtgcatcagagaacacacacaggggagaaaccgtttatatgtaatgaatgtggaaaatccttctgtgtgaagtcaaacctcattgtacatcaaagaactcacactggggagaaaccatataagtgtaatgaatgtgggaaaaccttctgtgaaaaatcagctctcactaaacatcagaggactcacacaggggagaagccgtatgagtgtaatgcatgtgggaagacctttagtcagaggtcagtgctcaccaaacatcagagaattcacacaagggtgaaagctctttcaacatcctgaatgttagaagccttcatacacttgtgaaattggttatacagtttcaaaaaaggagatcagagaaagccaaagaatgtcagaaatttgtagaaaatgacttcttgtttgaatatgtaaaagctttcaagaaaaattaaaacttttcattagaaaatttgtactgaggggaattctattcatctaagtaatatggtgaaaatatttatctggaatttatgttgtttagtgttatattccagacgtgataccaaaattttgttgcaaatataatggacaatatttatttatacccatattcacagtggaatctgaagcttataaaagttgaatgacagcagcattaaacatatatgtgaagagtccccgatgtttgtagaccttatgtgagtatgcaaatatataaatttgagtatgcttgatttgtatattggaactcaacatgatcataaggagaagatacgtacccttaattgagtaactactatggtatttgttaatattttctacactaaataccattggtgtctttataggttgacataattatatatgtgtatgtacatatgtttgtgtgtatatgtaaatatatttctacacacatacttaaatatagtgatgtgctagtataacctcatactgacttaaaagttctgattgttaaattttaaggaattttgtgagccagttattaaaagcagtcattatttaaaatatgtaaacttacagttaaaaacaaaggtaataaatactcagcactcatcacttcctaattattttgctacatttcactattacctttgctgttttacttatttaatctgtatgatgaaaatactgtataatagtgtgcactgcacatctgtctcttcccagctccacattcagtgctgtcttggtagcttggacttagtgggagtgtttacaccatggaaattgacaaactataaatcagggttttaattttctcagagaacctgctgtcaaatatttacagcacatcactgtgtatatatgaaaacgtatttggcaatacaaaccacataccccttctatttcctgacataaataaatggctatggccatttacagctgaaccacgtcttcaagaaagaagccaaaaatatttccgtgaggtttttaactacctctgaatctgtcctactctaaatactaccggagtctctttgtaggttggccagtatatgtttttagtgaaatattatttcacaaagaactatatcacgtacctttcctctgactgtttcctggcatatatgcatgaatatggccattattgaactatcacttcagtaaagaagttaaacagtacttttctgaggtttttcagctacctctgggtcattctgtaatgtaaatgttgttaataagaatggtttttacataaattatgcaaaggttaacaagcagtaacactgcactcctcaaaaagtggcggtatgtaatgaaaggcccttttgatatccttgatttttcattgtgtatctgtttgggcacggtctatgtaacactagttctgcgtattagtattttagagtatctctgcctcccttgtcctgttgtttcttttgcccccttggaacacattggtcagcagttctaagagacactgcccacatgatggccattccctacttcatccttgctgagctaaattttatatttttgtgcatccttctcccagatgacttaggtggtaagtccagattagtcaaagctaatcatggaagttccattttaatgattctgttggggtgaacttgggagcaatgagatgtttgggaagtattgtgtagtacttctgggaaagatctccttgatacaacattgtcatgacatgagaagagactctgctgggctttttcatgtctgtaacatggtattggcttatcgtttttatctctgaagggcagtagcctgaagataacagtgcacaaggtgggaaaagccagctcagaggtgacgttgccgagctactctgctctctatacctgttctctactgggactttttataaccctcaataactgttttttatttggtcttagggctgtctgatacttagagctgaaggcattccagctgacacagaggaatatttttctaagtgttaatgttctatatggtaattagggggaagaattatttcttttcacaagttaatatagggatggctgtttgtatcagccatggttctttctggtggaaaacagaattctccaactaaaaatattttaatggcagactgattacagtggtgtgggccagaaacaagggacagtgaaacacccagagacttgtatcagcaggaagccattgccattctgagccttgaagggcaaggagggaaacagtgttaccagagcccagtaagaactgctgtcatgaaggaggggccaccttgtaagagacatcattactaccagaactgtggtgccaaattgctggtgtctctctttggagaaaccaaccagatacatctgctggagagcccaggtgggcacagagaagggtggagagagaatctgggaagagaaatggagaataagcagcacagtgttattcatttctgtaaattcctatgtagaaggctcagtgttagaaataaagttattctactagttgc

SEQ ID NO: 1445 - DNA, 3690 bp, Homo sapiens
gtgctgggctgttcgtctcttctatgtgctgatttcctgggttactttgggtcttccttttctttctcccttttaccctgtctcctttcttgaggctgatcgatcacagccaggcctctccattctatttacccagcgttttccttctctccagttagtggggtagatgaacgccctgtgtttataaggtgcctcccaggagcctgagacctgtgagaagaatggggggtggaggtgggggagactcgtcacgaagggagaccttggagcttcgagggtgggaatgttcttattagattcttcatctctgttgacacaaacatgtaggagaagctggagaacatagacagggatgaggttttatttatttattgttcctggtcactgtctctttgaggattggtatctctgctccagaaaagatggcagcctctttcttctctgattttggtcttatgtggtatctggaggagctcaaaaaggaggagttcaggaaatttaaagaacatctcaagcaaatgactttgcagcttgaactcaagcagattccctggactgaggtcaaaaaagcatcccgggaagaacttgcaaacctcttgatcaagcactatgaagaacaacaagcttggaacataaccttaagaatctttcaaaagatggatagaaaggatctctgcatgaaggtcatgagggagagaacaggatacacaaagacctatcaagctcacgcaaagcagaaattcagccgcttatggtccagcaagtctgtcactgagattcacctatactttgaggaggaagtcaagcaagaagaatgtgaccatttggaccgcctttttgctcccaaggaagctgggaaacagccacgtacagtgatcattcaaggaccacaaggaattggaaaaacgacactcctgatgaagctgatgatggcctggtcggacaacaagatctttcgggataggttcctgtacacgttctatttctgctgcagagaactgagggagttgccgccaacgagtttggctgacttgatttccagagagtggcctgaccccgctgctcctataacagagatcgtgtctcaaccggagagactcttgttcgtcatcgacagcttcgaagagctgcagggcggcttgaacgaacccgattcggatctgtgtggtgacttgatggagaaacggccggtgcaggtgcttctgagcagtttgctgaggaagaagatgctcccggaggcctccctgctcatcgctatcaaacccgtgtgcccgaaggagctccgggatcaggtgacgatctcagaaatctaccagccccggggattcaacgagagtgataggttagtgtatttctgctgtttcttcaaagacccgaaaagagccatggaagccttcaatcttgtaagagaaagtgaacagctgttttccatatgccaaatcccgctcctctgctggatcctgtgtaccagtctgaagcaagagatgcagaaaggaaaagacctggccctgacctgccagagcactacctctgtgtactcctctttcgtctttaacctgttcacacctgagggtgccgagggcccgactccgcaaacccagcaccagctgaaggccctgtgctccctggctgcagagggtatgtggacagacacatttgagttttgtgaagacgacctccggagaaatggggttgttgacgctgacatccctgcgctgctgggcaccaagatacttctgaagtacggggagcgtgagagctcctacgtgttcctccacgtgtgtatccaggagttctgtgccgccttgttctatttgctcaagagccaccttgatcatcctcacccagctgtgagatgtgtacaggaattgctagttgccaattttgaaaaagcaaggagagcacattggatttttttggggtgttttctaactggccttttaaataaaaaggaacaagaaaaactggatgcgttttttggcttccaactgtcccaagagataaagcagcaaattcaccagtgcctgaagagcttaggggagcgtggcaatcctcagggacaggtggattccttggcgatattttactgtctctttgaaatgcaggatcctgcctttgtgaagcaggcagtgaacctcctccaagaagctaactttcatattattgacaacgtggacttggtggtttctgcctactgcttaaaatactgctccagcttgaggaaactctgtttttccgttcaaaatgtctttaagaaagaggatgaacacagctctacgtcggattacagcctcatctgttggcatcacatctgctctgtgctcaccaccagcgggcacctcagagagctccaggtgcaggacagcaccctcagcgagtcgacctttgtgacctggtgtaaccagctgaggcatcccagctgtcgccttcagaagcttggaataaataacgtttccttttctggccagagtgttctgctctttgaggtgctcttttatcagccagacttgaaatacctgagcttcaccctcacgaaactctctcgtgatgacatcaggtccctctgtgatgccttgaactacccagcaggcaacgtcaaagagctagcgctggtaaattgtcacctctcacccattgattgtgaagtccttgctggccttctaaccaacaacaagaagctgacgtatctgaatgtatcctgcaaccagttagacacaggcgtgccccttttgtgtgaagccctgtgcagcccagacacggtcctggtatacctgatgttggctttctgccacctcagcgagcagtgctgcgaatacatctctgaaatgcttctgcgtaacaagagcgtgcgctatctagacctcagtgccaatgtcctgaaggacgaaggactgaaaactctctgcgaggccttgaaacatccggactgctgcctggattcactgtgtttggtaaaatgttttatcactgctgctggctgtgaagacctcgcctctgctctcatcagcaatcaaaacctgaagattctgcaaattgggtgcaatgaaatcggagatgtgggtgtgcagctgttgtgtcgggctctgacgcatacggattgccgcttagagattcttgggttggaagaatgtgggttaacgagcacctgctgtaaggatctcgcgtctgttctcacctgcagtaagaccctgcagcagctcaacctgaccttgaacaccttggaccacacaggggtggttgtactctgtgaggccctgagacacccagagtgtgccctgcaggtgctcgggctgagaaaaactgattttgatgaggaaacccaggcacttctgacggctgaggaagagagaaatcctaacctgaccatcacagacgactgtgacacaatcacaagggtagagatctgattgcgaggaacctgggctctgactcgaacacctgcaaaggacagggactgggaccgttacttacatgacactgcacccaggagatacaaatcattgatactctgagttgtgagatttctggcaccccattcatagatttgatatgatacacgtggtttttatgtgctctgtggccttggatgagtcactgaaaggccttcatggtctctcggtctcacaaggacctcttaacccctcaataaagtgttacatttctaaacattggaaaaaaaaaaaaaaaaaa

SEQ ID NO: 1446 - DNA, 75 bp, Homo sapiens
tattcctcactgatgagtacgttctgactttcgttcttctgagtttgctgaagccagatgcaatttctgagaagg

SEQ ID NO: 1447 - DNA, 74 bp, Homo sapiens
tggaccaatgatgagtaccatggggtatctgaaacaggatttttgattaaacccatatgcaattctgaggtcca

SEQ ID NO: 1448 - DNA, 7938 bp, Homo sapiens
gcatgcgcgcccgcggcgctccatcccaaacacacacacatttttcccccggacttggaaagtcacccaaagccgccccaagtgcaggcaaacagaccttgctgactgaaggcaaagactcctccatcccacctgccctcccagctgccacggccatcgacccctcctttacaaggggctcctgcaactccccagcagcacgtgttggaatggacttcggaccctggcctcttgggatgcaaaggatgaagtgacacccccagctacatccgaggaggttctaggacctgctacgagagtttgggaccaaggagaagagaatggatcttggaacagctgagggcacccggtgcacggacccgcctgcaggcaagcccgccatggcgcccaaacgcaagggtggcctgaagctgaacgccatctgcgccaagctgagccgccaggtggtggtggagaagcgagctgacgccggctcccacacggagggcagcccatcgcagccccgggaccaagagcgcagtggccctgagtctggggcagcccgggccccccgcagcgaggaagacaagagacgggcagtgatcgagaagtgggtgaacggggagtacagcgaggagccggcacccacacccgtgttggggcggattgcccgcgagggcctggagctgcctcccgagggtgtctacatggtgcagccccaggggtgcagcgatgaggaagaccacgcggaggagccctccaaggacggcggtgccctggaggagaaggattcggacggggcagcctccaaggaggacagcggccccagcaccaggcaggcttcaggagaggcctcctcgctgcgggactacgcggcctccaccatgaccgagttcctcggcatgtttggctatgatgaccagaacacgcgggacgagctggccaggaagatcagctttgagaagctgcacgcgggctccaccccggaggcagccacctcctccatgctgcccacctccgaggataccctcagcaagcgggcgcggttctctaagtatgaggagtacatccgcaagctcaaggctggcgagcagctctcctggccggcccccagcaccaagaccgaggagcgggtgggcaaggaggtggtgggcaccctgcccggcctgcggctgcccagcagcacggcccacctggagaccaaggccaccatcctgcccctgccgtcgcacagcagtgtccagatgcagaacctggtagcccgggcctccaagtacgacttcttcatccaaaaactgaagaccggcgagaatctgcggccccagaacgggagcacctacaagaagccatccaagtacgacctggagaatgtcaagtacctgcacctcttcaaacccggggagggcagccccgacatgggcggggccatcgccttcaagacaggcaaggtggggcgcccttccaagtacgacgtccggggcatccagaagccaggccccgccaaggttccgcccacccccagcctggctcccgcacccctcgccagcgtgcccagtgcccccagcgcccccgggccagggccagagcctcctgcctccctgtccttcaacactcccgagtacctgaagtcaaccttctccaaaacagactccatcaccacggggaccgtctccactgtcaagaacggactgcccacagataaaccagccgtcactgaagatgtaaacatttaccagaaatatattgccaggttctcgggcagccagcactgtggccacatccactgtgcctaccagtaccgcgagcactaccactgccttgaccctgagtgtaactaccagaggttcacgagtaagcaggacgtgatccgccactacaacatgcacaagaagcgcgacaactccctgcagcacggcttcatgcgtttcagcccgctggacgactgcagcgtctactaccacggctgccacctcaatgggaagagcacccactatcactgcatgcaggtgggctgtaacaaggtgtacacgagcacgtctgacgtgatgacccacgagaacttccacaagaagaatacccagctcattaacgacggcttccagcgcttccgagccaccgaagactgtggcacagccgactgccagttctacggacagaagaccacgcacttccactgcaggcgccccggctgcacattcactttcaagaacaagtgtgacatcgagaagcacaagagctaccacatcaaggacgatgcctacgccaaggacggcttcaagaagttctacaagtacgaggagtgcaagtacgagggctgcgtgtacagcaaggctaccaaccacttccactgcatccgcgccggctgcggcttcaccttcacctccaccagccagatgacctctcacaagcgcaagcatgagcgccggcacatccgctcctcgggcgcgctggggctgccgccctcgctgctgggcgccaaggacacggagcacgaggagtccagcaacgacgaccttgttgacttctccgccctgagcagcaagaactccagcctgagcgcctcccctaccagccagcagtcctctgcgtccctggctgccgccactgccgccaccgaggctgggcccagtgccaccaaacctcccaacagcaagatctcggggctgctgccccagggcctgcctggctcaatccccctggccctggccctctccaactcgggcctgcccacccccacgccctacttccccatactggctggccgtgggagcacctccctgcctgtgggcacccccagcctcctgggtgccgtgtcgtctgggtcagcagcctcagccacccctgacacacccacgctggtcgcctcgggagctggagactcagcccccgtggctgccgcctctgtcccggcaccacccgcctccatcatggagaggatctctgcaagcaagggcctcatctcgcccatgatggccaggctggctgcagctgccctcaagccctctgccacctttgacccaggaagcgggcagcaggtcaccccagccaggttccccccggcccaagtgaagccggaacccggtgagagcaccggcgccccaggcccccacgaagcctcccaggaccgcagtctagacctgactgtgaaggagcccagcaacgaatcaaatggccacgcagtcccggcaaattcatctcttttatcctcgcttatgaataagatgtctcagggcaaccctggcctgggcagcctgctgaacatcaaggcggaagcggaggggagccccgctgcggagccctcgcccttcctaggcaaggccgtgaaggcgctggttcaggagaagttggcagagccctggaaggtgtacctgcgcaggtttggtacaaaggacttctgtgacggccagtgtgacttcctccacaaggcccacttccactgcgtggtggaggaatgcggcgcgctcttcagcaccttggacggggccatcaagcacgcaaacttccacttccggacagagggaggagcagcaaaaggaaacacagaggctgcctttccggcctcggccgccgagaccaaacctcccatggccccctcgtcccctccggtccctcctgtcaccacggccacggtgtcctctctggaggggcccgctcccagcccggcctccgtgccctccacccccaccctgctcgcctggaagcagctggcttccaccataccccagatgcctcagatcccagcgtcagtgcctcacctgcccgcctcgcccttggcaacgacttctctagagaacgccaagccccaggtcaaacccggattcctccagttccaggagaacgatccttgcctcgccacggactgcaagtacgccaacaagttccacttccactgtctctttgggaactgcaagtacgtctgcaaaacgtctggcaaggccgaatcccactgcctggaccacatcaaccccaacaacaacctggtgaacgtgcgagaccagtttgcatactactctctgcagtgtctctgtcccaaccagcactgcgagttccgaatgcgtgggcactaccactgcctccgcaccggctgctattttgtgaccaacatcaccaccaagctcccctggcacatcaagaagcatgagaaggcggagcggcgggcagccaatggcttcaaatacttcaccaagcgcgaggagtgtggcaggctaggttgcaagtacaaccaggtgaacagccacttccactgcatccgggagggctgccagttctccttcctcctcaagcaccagatgacctcccacgcgcggaagcacatgcggaggatgctggggaagaacttcgaccgcgtgcccccctcccagggccccccaggcctgatggatgctgagacagatgagtgcatggactacactggctgcagcccaggcgccatgtcctctgagtcatccaccatggaccggagctgctccagcacccccgtgggtaacgagagcaccgcggcagggaacaccatctctatgccgacagcctcgggggccaaaaagcgcttctggatcatcgaggacatgtcgcccttcggcaagcggcggaagacggcgtcctcccggaagatgctggacgagggcatgatgctggagggcttccggcgcttcgacctttacgaggactgcaaggacgcagcttgtcagttctcgctcaaggtcacccactaccactgcacgcgcgagaactgcggctacaagttctgcgggcgcacgcacatgtacaagcacgcgcagcaccacgaccgcgtggacaacctggtgctggacgacttcaagcgcttcaaggcctcactcagctgccacttcgccgactgccccttctcgggcaccagcacgcacttccactgcctgcgctgccgcttccgctgcaccgacagcaccaaggtcacggcgcatcgcaagcaccacggcaaacaggacgtgatcagcgccgcgggcttctgccagttcagctccagcgccgactgcgccgtgcccgactgcaagtacaagctcaagtgctcgcacttccactgcaccttcccgggctgccgccacacggtggtgggcatgtcgcagatggactcgcacaagcgcaagcacgagaagcaggagcgcggcgagcccgcggcagagggccccgcgcccgggcctcccatcagtctggacggctccctgtcgctgggcgccgagccgggctcgctgctcttcctgcagtcggcggccgccggcctgggcctggcgctgggcgacgcgggcgaccccggcccgcccgacgccgccgcccccgggccgcgcgagggcgccgccgccgccgccgccgcagctggggagtcctcgcaggaggacgaggaggaggagctggagctgccggaggaggaggccgaagacgacgaggacgaggacgacgacgaggacgacgacgacgaggacgacgacgaggacgacgacgacgaggacctgcgcaccgactcggaggagtcgctgcccgaggcggcggcggaggcggcgggcgcgggcgcgcggaccccggccttggcggcgctggcggccctgggcgcccccggccccgcgcccactgcagcctcctcgccctagcggcgcccgcgggtggccctggcggcggcctcggcctcggcctcgggagcggcgccgccccgcgcgaagcggcccctgggcagagccccgcgccccgccggtgcttccggaccccgagtccgtctcaggacagaggcggggacccctctggtgctccgcggccgaggacacaggcggcggcggtggccctgctctagggaggccgggtctcttcagggaaacagaaggtgctcttgtcccggggtagggaacctaggagcaggggtcccgggcgaatgcggcgcagctcccggccgctgccccggcgcccctccccgcggccgattcggccccgcgaccattgctcaggactgggacgggcgctgggggccaccgggacccccaccgcgcgccaccagggcggggtggctcctggagccgctggcggggcctccctcatgcagctaggatcctcccccctgcccagggggagacgggcagaaggcagtcagcacgggtgacactacagggaccgtggaggaagcctcacgggagtagcagccgcggagctccagctcagccccaccccagggcccggctgctcccccaggcctgggtcgggtctgtttggcgactccctggccccagcctccgccccagggaaaccgaggctgcgtccaaaacccagagtagcccgctgggggccggggcggggtctcggccaccctggtggtgcaaacaggaaggatgcgcctggttttggctttaatgttcaaaatggaaaaaaatacaagaaagttgtacagtatttttcctgtaaaggttattattctacatagaacaaaaaggaagaaagcaggcgtggtgagagtgcagacccgcctgggcccggcctgaggttggaggctcagtcccgtttatcctgtgggatttggtccagggtttttgtagaggccttaactgtttgaggctgtctgtcttcacaatagcactgatgggagctgcgtgattccaactcttaacttgaattttgtagagacaagaaaaaaggactattactgttgatccaagtttgtagttaatttaacatttgagttctctcttggtgatgcgtgtggctttatagggcttttttttttttccagtttgttttattactttgtttgggatgcttcttcgctggtgcagtctacccagattgggttccctttgcaaaacatcccccttcctggagatgatgatgccatcgaagcccgggccagggcctgacctggcaggcacacacctggccagtggctctgaggtccccggggaccgagtcccctgcgagggcaggctgcccgaggccacacctgcccaccttccctactccaggccaccagctggtgtcagattgggccaccgggagagaacaggcctaggagggaatggaaggctggcggggaggctgtcatccagaagcctcctccccagaggtctccaggaggaacctggctcaactggggggcagtggtttacttttcccttttttcttcctttcttttgtcctctcagctgcccacagccagaaagccaggaccacccgaactggacagggagcagggagggaggagtggtcgcacggagcgtacctgattcaacaggaaatcagttattttctaaaacagcccctaccagagcctcctgaactctgtgggcaccacgtgctgctgtgagcatctgcccagacagtgacccgccacaggccccgggcgtctgtggaaggagttttgtaaaggaaaaaaaaacacacacacacaaacattttttcaatgtagcaaaatcaaacttaaaaaaaaaaaagaagaaaagaagaagatgccgacagtgcggagtctagccttttgtaaacttcatattgcacactaggactataagccattgctagctcattttgaattttaacgtgtaatttttgttttattttctttctgtggggaaacaatgcttgatccaccaatgctctttttaatgttttataactatgtatgtgtatatatataaatatcaaataatatgtatgcacatatgtgtgtgtatatatctatatgtatatacatatatagatatatagagatatatagagaggttttgagacaaaaaaaatacagaacgtgaaacccgagctgaacagcgtgtgctctgattacttgaatctggtctcctcggcacctggttattaagaactgaatatttttccacttgaatttagtgctattagaaatttaatatatgtgttttatttatttgatttttttttttttttttgcatgactgatgcaaggtttgacattttcactcaataaaaactggaaaaaaa

SEQ ID NO: 1449 - DNA, 72 bp, Homo sapiens; identical to SEQ ID NO: 858

SEQ ID NO: 1450 - DNA, 2750 bp, Homo sapiens; identical to SEQ ID NO: 655

SEQ ID NO: 1451 - DNA, 2802 bp, Homo sapiens
ggtcgctggcgcctgtttcctcagagccactttttcctttgtgttgtctggtcgttcactactttgagggaaaagaattttgccgttcgcgttcgattgactccgtccccaagatcctgtagccccacggacctggcgactccaccgtgttcgggtctttctaggaacccaatctgccttcatgaagaaaagacagaggcagaaaggaagatggcttactgcctgacaaattgttatcagtactccgtgacctttgaggatacagctgtggacttcacccaggaggagtggattttactggacccagttcagagaaacttatacagagatgtgatgctggagaattatgagaacgtggccaaagtaggatttcagctctttaaacccagtgtcatctcttggttggaagaagaagagttgagaaccttgcagcaaggagttctccaagactgggcaataaaacatcaaaccagtgtttcagcactgcagcaggagttttggaaaatacaaacttctaatgggatacaaatggacctggtaacctttgacagtgtggctgtggagttcacccaggaagagtggactttactggacccagctcagagaaacctgtacagtgatgtgatgctggagaactacaagaacctgtcctcagtaggttaccagctcttcaaacccagtctgatctcttggctggaggaagaggaagagttgagcacactgccaagagttctccaagaatggaaaatgtgcctgaaaaccaaagggccagccctttggcaagataatttttgtttaaaaacattaaatgggatacagttggcaagaaaccaaaatggagaggaactctatgactgtaagcaatgtgaagatgtcttctgtaaacatccatgccttaagaccaacatgagtactcaaaatagaggcaacacgtctgaatgtattcagtatgcaaaagacctcctttctctatacaataaaacctctaccataaggaaagtttctgtgttcagtaagcatggaaaatctttccgcctgattttaaatgttcaggtccagagaaagtgtacacaagataaatcctttgaaggcactgactatgggaaagccttcatttatcagtcataccttgaagcacacaggaaaactcagagtggagaaaaactcaatgaatggaagcaatgtggggaagcatttactcactccacaagccatgctgtaaatgttgaaacacacattattaaaaacccctatgaatgtaaggaatgtggaaaagattttagataccctacccaccttaataatcacatgcaaacccacattgggataaaaccttataaatgtaagcactgtggcaaaaccttcactgtgccgtcaggctttcttgaacatgtacgaactcacactggagagaagccctatgggtgtaaggaatgtggtaaagcctttggtacatctgcaggccttattgaacatataagatgtcacgccagagagaaaacctttaaatgtgaccactgtgggaaagcctttatttcttacccatctctttttggacatttgagagttcataatggagagaagccatatgagcataaggaatatgggaaggcctttggtacatcctcaggtgttattgaagatagaagaagtaacacaggacagaaacgctttgattgtgaccagtgtgggaaagtctttgtttctttctcatctctttttgctcatttgagaactcacactggtgagaagccctttaagtgttacaaatgtgggaaaccatttacctcttctgcctgtcttcgtattcacatgcgaactcacacagaagagagactctatcaatgtaagaaatgtggtaaagctttcactaagtgctcatatcttaccaaacatttacgaacacacgctggagagaaaccctatgaatgtatgaaatgtgggaaagccttcactgagcgctcataccttactaaacatttacgaagacacagtggagagaagccatatgaatgtaagaaatgtggaaaagccttcacagaacgctcagatcttactaaacatttacgaagacacactggagataagccctatgaatataaggactgtgggaaagcctttgttgtctcctccagtctagttgatcatttaagaactcacactggatataaaccctataaatgtaatgcatgtgaaaaagcttacagtaggtcttgtgtactaactcaacacttaaaaactcatgcagcagagaagacctctgaatgtaacgcatgtggaaattcctttcgaaattccatgtgctttcatgatcgcttaaaaactctcaccaaaataaaaccctataaatgtaaggactgtgggaaagccttcacttgtcattcagatcttactaatcatgtgcgaattcacactggagagaagccctataaatgtaaggaatgtgggaaggccttccgtacatcctcaggacgtattcaacatttaagaactcatatgggagagaaaccctttgaatgtgaccagtgtgggaaagcctttgcttctttctcagctcgtattgcacatttgaaaacacactagagagaagccctgtggatgtgaagaatgtggaaaaacctttgctgtttcctcaagcctaactgaacatgtaaaaattcacaggagaaagtaacactatcaatgtaaggaatgtgagaaagcctgaacagttgaatctttctagatatgtacaaactcacactgtagagaaaccctgtaaatgtaagggatgtaggaaaacactagttcttctctctctct

SEQ ID NO: 1452 - DNA, 4510 bp, Homo sapiens
gctgaggccaggagggcgcactggggattggaggcgagggaagtgcagggcgcatcccaggcggcagggctcccagcatcggcagtcgccatcaccgccagaccgcagagacaggttcggatccgcggtcctcttgcctctttccaggcctcgatgagtgttaaatcgccatttaatgtgatgtcaagaaataatttggaagcacctccttgtaagatgacagagccatttaattttgagaaaaatgaaaacaagcttccaccacatgagtctttaagaagtcctggaacacttcctaaccaccctaatttcaggctgaaaagctcagagaatggaaataaaaagaacaattttttgctttgtgagcaaaccaaacaatatttggctagtcaggaagacaattcagtttcttcaaacccgaatggcatcaacggagaagtagttggctccaaaggagacaggaaaaaattgccagcaggaaactcagtgtcaccaccaagtgctgaaagtaattcaccacccaaagaagtgaatattaagcctggaaataatgtacgtcctgcaaaatcaaaaaaactaaacaagttggtcgagaattccttgtccataagtaatccagggctcttcacctccttaggacctcctcttcggtccacaacttgccatcgctgtggcctatttggatcgctgaggtgctctcagtgcaagcagacctactattgctccacagcatgtcaaagaagagactggtctgcacacagcatcgtgtgcaggcctgttcagccaaatttccacaaacttgaaaataaatcatctattgaaacaaaggatgtggaggtaaacaataagagtgactgtccacttggagttactaaggaaatagccatttgggctgagagaataatgttttctgatttgagaagtctacaactcaagaaaaccatggaaataaagggtacggttaccgaattcaaacacccaggggacttctacgtgcagttatattcttcagaagttttagaatacatgaaccaactctctgccagcttaaaagaaacatatgcaaatgtgcatgaaaaagactatattcctgttaagggggaagtttgtattgccaagtacactgttgatcagacctggaacagagcaatcatacaaaacgttgatgtgcagcaaaagaaggcacatgtcttatatattgattatggaaatgaagaaataattccattaaacagaatttaccacctcaacaggaacattgacttgtttcctccttgtgccataaagtgctttgtagccaatgttatcccagcagaagggaattggagcagtgattgtatcaaagctactaaaccactgttaatggagcagtactgctccataaagattgtcgacatcttggaagaggaagtggttacctttgctgtagaagttgagctgccaaattcaggaaaacttttagaccatgtgcttatagaaatgggatatggcttgaaacccagtggacaagattctaagaaggaaaatgcagatcaaagtgatcctgaagatgttggaaaaatgacaactgaaaacaacattgtcgtagacaaaagtgacctaatcccaaaagtgttaactttgaatgtaggtgatgagttttgtggtgtggttgcccacattcaaacaccagaagacttcttttgtcaacaactgcaaagtggccgaaagcttgctgaacttcaggcatcccttagcaagtactgtgatcagttgcctccacgctctgatttttatccagccattggtgatatatgttgtgctcagttctcagaggatgatcagtggtaccgtgcctctgttttggcttacgcttctgaagaatctgtactggtcggatatgtagattatggaaactttgaaatccttagtttgatgagactttgtcccataatcccaaagttgttggaattgccaatgcaagctataaagtgtgtactagcaggagtaaagccatcattaggaatttggactccagaagctatttgtctcatgaaaaaacttgtacagaacaaaataatcacagtgaaagtggtggacaagttggaaaacagttccctggtggagcttattgataaatccgagacgcctcatgtcagtgttagcaaagttctcctagatgcaggctttgctgtgggagaacagagtatggtgacagataaacccagtgacgtgaaagaaaccagtgttcccttgggtgtggaaggaaaagtaaatccattggagtggacatgggttgaacttggtgttgaccaaacagtagatgttgtggtctgtgtgatatatagtcctggagaattttattgccatgtgcttaaagaggatgctttaaagaaactcaatgatttgaacaagtcattagcagaacactgccagcagaagttacctaatggtttcaaggcagagataggacaaccttgttgtgctttttttgcaggtgatggtagttggtatcgtgctttagtcaaggaaatcttaccaaatggacatgttaaagtacattttgtggattatggaaacatcgaagaagttactgcagatgaactccgaatgatatcatcaacatttttaaaccttccctttcagggaatacggtgccagttagcagatatacagtctagaaacaaacattggtctgaagaagccataacaagattccagatgtgtgttgctgggataaaattgcaagccagagtggttgaagtcactgaaaatgggataggagttgaactcaccgatctctccacttgttatcccagaataattagtgatgttctgattgatgaacatctggttttaaaatctgcttcaccacataaagacttaccaaatgacagacttgttaataaacatgagcttcaagttcatgtacagggacttcaagctacctcttcagctgagcaatggaagacgatagaattgccagtggataaaactatacaagcaaatgtattagaaatcataagcccaaacttgttttatgctctaccaaaagggatgccagaaaatcaggaaaagctgtgcatgttgacagctgaattattagaatactgcaatgctccgaaaagtcgaccaccctatagaccaagaattggagacgcatgctgtgccaaatacacaagtgatgatttttggtatcgtgcagttgttctggggacatcagacactgatgtggaagtgctctatgcagactatggaaacattgaaaccctgcctctttgcagagtgcaaccaatcacctctagccacctggcgcttcctttccaaattattagatgttcacttgaaggattaatggaattgaatggaagctcttctcaattaataataatgctattaaaaaatttcatgttgaatcagaatgtaatgctttctgtgaaaggaattacaaagaatgtccatacagtgtcagttgagaaatgttctgagaatgggactgtcgatgtagctgataagctagtgacatttggtctggcaaaaaacatcacacctcaaaggcagagtgctttaaatacagaaaagatgtataggatgaattgctgctgcacagagttacagaaacaagttgaaaaacatgaacatattcttctcttcctcttaaacaattcaaccaatcaaaataaatttattgaaatgaaaaaactgttaaaaaaaacagcatctcttggaggtaaacccttatgagacaggaaacagcaaaggctagctttaggagagaaagtacagcacctggtgtttttatttatgagaaccttttctttgtccactttctctgtaatgaccttctatccctccgtttttgcctgcctgccattctcctattaggttggtggtttttattttcctctaagttccttccaccaaataaatattacgtaaaaaattcataccaaatcaatgagaatactggcaaggaatacatagggactttctgctatatatgtaactttttattacttaaaggtaccgaaggaaggccaggtgcagtggctcacgcccagcactttgggaggctgaggtgggaggatcccttgaggccaggagttcaaggttacagtgagctatgatagtgccactgcactccagcctgggtgacagattttgtcttaaaaaaaaaaaaaaaaaagttgatatgagttttattttctgtccgtttgaaatattttgtaatattccctgcattctctgtcgtctgcctcttccacataatgtcctttgctttcatgtttgttatcttctttttctgttcactcagaggtcatcaatttctttctctccgtccttaattggattatttttcttttggcctttgggcacagagtctgacctctggaccactctaactggagaaggaactttatgttccctctcctgctgtgtccacaaccttagaaatctgtagctagatttttgttgttatagatagaatttactgtttctgaaacccaaatacagttatcagtttaaggtt

SEQ ID NO: 1453 - DNA, 3050 bp, Homo sapiens
aatcaggcacgcagctggagcggacaggacggcttccgggatttggcggggcctttgtctctagctgctgcgggagctccaggtctagtctttactgctctgtgtattctgctcctagaggcccagcctctgtgactccgttatctgcaggtattgggagatgcacagctaagatgccaggaccacctggaagcctagaaatgggaccactgacatttagggatgtggccatagaattctctctggaggagtggcaatgcctggacactgcacaacggaatttatataggaaagtgatgtttgagaactacagaaacctggtcttcctgggtattgctgtctctaagcctcacctgataacctgtttggagcaaggaaaagagccctggaataggaagagacaggagatggtagccaaacccccagttatatattctcatttcactgaagacctttggccagagcatagcataaaagattcttttcaaaaagtgatactgagaggatatggaaaatgtggacatgagaatttacaattaagaataagttgtaaaagtgtggatgagtctaaggtgttcaaagaaggttataatgaacttaaccaatgtttgagaactacccagagcaaaatatttcaatgtgataaatacgtgaaagtctttcataaattttcaaattcaaacagtcataagaaaagaaatactggaaagaaggttttcaaatgtaaagaatgtggcaaatcattttgcatgctttcacatctaacacaacatataagaattcacactagagagaattcttacaaatgtgaggaatgtggcaaagttcttaactggttctcagagcttattaaacataagggaattcatatgggagagaaaccctacaaatgtgaggaatgtggcaaagcctttaaccaatcctcaacccttattaaacataagaaaattcatattgaagagaaacccttcaaatgtgaagaatgtggcaaagcctttagtttattctcaatccttagtaaacataagataattcatactggagacaaaccttacaaatgtgatgaatgtcacaaagcctttaactggtttgcaacccttactaaccataagagaattcatactggagagaaacccttcaaatgtgaagaatgtggcaaagactttaaccagttttcaaaccttactaaacataagaaaattcatactggagagaaaccctacaaatgtgaagaatgtggcaaagcttttaaccagtttgcaaaccttactagacataagaaaattcatactggagagaaatcctacaaatgtgaagaatgcggcaaagcttttatacagtcctcaaaccttactgaacatatgagaattcatactggagagaaaccctacaaatgtgaagaatgtggcaaagcttttaatgggtgctccagccttactcgacataagagaattcacactagagagaatacctacaaatgtgaagaatgtggcaaaggctttactttattttcaacccttactaaccataaagtaattcatactggagagaaatcctacaaatgtgatgaatgtggcaatgtttttaactggcctgcaactcttgctaatcataagagaattcatgctagagagaaaccctacaaatgtgaagaatgtggcaaagcttttaaccggtcctcacaccttactagacataagaaaattcatactggtgagaaactctacaaacctgaaaaatgtgacaataattttgataacacctaaaacttttctaaacataaaagacaccatcctgttgagaaaccctaaaaatgtgaagaatttgacaaagccttccaatgattgttacacttgcttgtaggtaagataatttatattggagaaaactttataagtgtaaagaatgtgacaaaacttaaccaatactcacatcttattgcacaggaaagcatttttacttgagaaagattgtacaagtataaagaatgtgaaaaagtcattgatatcttttcacatcttactcaacaccagagtttatacttattaaaagcattataaatgcaattactgtcaaaagaaatttcagaaaacataacactttaaagtgaagaagcgtgtttattttgaagacaaacataacaaatataaggagcataggagggttgtagtacctttacttgtattacaaatcttattgtacgcattttgtactagagaaaaacactgaagcagttgctcaaactttgttcaacatcagggaatttatattggagaaaaatcctgcaaatgtaatgaatttggaaaaacattttttttcaaaaactacggcgtagaaaacatgaatttatattgaaatgtgtttttgcagatgcagtaagtatgaaaaatatttaatccaaaattgagtctatgtaaatattaaataatttacagtagaaataactaaggcactgacactttagacattacactaaaacagagtgttgagtataaaaaaatctataagttgttagattatttgtaaataactttaaaaggagtagaagattctttggagagttataattacattgaaagtatactttttttcttgaaaaaattatggcttatttgaaaagtaaataatgatgaaattcaactctcaaattactttatttcattcctattgtattcacatgtgaaagcatgtgataaattgttgctgtgtcagatataggagagattcttttttattagatgggcattatttatggttttttctgtggaagagtatgggcattaaaatgtaaggtttatgatgaaaatctaagtggagaggccctgttagtttacttttcatattgagtgatgcatgaggtaggtgtttggagtaatattctgcatcatagagaaaagcatttttaattttactttaaattaaatgtaattaaattactagtgaatcattttactaattgtacttttatgctataaatgcagtacatttgaaaatttttagattatgtataagcttaattttataattaaacatttctttaacatgttaag

SEQ ID NO: 1454 - DNA, 2551 bp, Homo sapiens
ggaaaacggccagcctgaggagctgctgcgagggtccgcttcgtctttcgagagtgactcccgcggtcccaaggctttccagagcgaacctgtgcggctgcaggcaccggcgtgttgagtttccggcgttccgaaggactgagctcttgtcgcggatcccgtccgccgtttccagcccccagtctcagagcggagcccacagagcagggcaccggcatggccaaagccgcggcgatcggcatcgacctgggcaccacctactcctgcgtgggggtgttccaacacggcaaggtggagatcatcgccaacgaccagggcaaccgcaccacccccagctacgtggccttcacggacaccgagcggctcatcggggatgcggccaagaaccaggtggcgctgaacccgcagaacaccgtgtttgacgcgaagcggctgatcggccgcaagttcggcgacccggtggtgcagtcggacatgaagcactggcctttccaggtgatcaacgacggagacaagcccaaggtgcaggtgagctacaagggggagaccaaggcattctaccccgaggagatctcgtccatggtgctgaccaagatgaaggagatcgccgaggcgtacctgggctacccggtgaccaacgcggtgatcaccgtgccggcctacttcaacgactcgcagcgccaggccaccaaggatgcgggtgtgatcgcggggctcaacgtgctgcggatcatcaacgagcccacggccgccgccatcgcctacggcctggacagaacgggcaagggggagcgcaacgtgctcatctttgacctgggcgggggcaccttcgacgtgtccatcctgacgatcgacgacggcatcttcgaggtgaaggccacggccggggacacccacctgggtggggaggactttgacaacaggctggtgaaccacttcgtggaggagttcaagagaaaacacaagaaggacatcagccagaacaagcgagccgtgaggcggctgcgcaccgcctgcgagagggccaagaggaccctgtcgtccagcacccaggccagcctggagatcgactccctgtttgagggcatcgacttctacacgtccatcaccagggcgaggttcgaggagctgtgctccgacctgttccgaagcaccctggagcccgtggagaaggctctgcgcgacgccaagctggacaaggcccagattcacgacctggtcctggtcgggggctccacccgcatccccaaggtgcagaagctgctgcaggacttcttcaacgggcgcgacctgaacaagagcatcaaccccgacgaggctgtggcctacggggcggcggtgcaggcggccatcctgatgggggacaagtccgagaacgtgcaggacctgctgctgctggacgtggctcccctgtcgctggggctggagacggccggaggcgtgatgactgccctgatcaagcgcaactccaccatccccaccaagcagacgcagatcttcaccacctactccgacaaccaacccggggtgctgatccaggtgtacgagggcgagagggccatgacgaaagacaacaatctgttggggcgcttcgagctgagcggcatccctccggcccccaggggcgtgccccagatcgaggtgaccttcgacatcgatgccaacggcatcctgaacgtcacggccacggacaagagcaccggcaaggccaacaagatcaccatcaccaacgacaagggccgcctgagcaaggaggagatcgagcgcatggtgcaggaggcggagaagtacaaagcggaggacgaggtgcagcgcgagagggtgtcagccaagaacgccctggagtcctacgccttcaacatgaagagcgccgtggaggatgaggggctcaagggcaagatcagcgaggcggacaagaagaaggttctggacaagtgtcaagaggtcatctcgtggctggacgccaacaccttggccgagaaggacgagtttgagcacaagaggaaggagctggagcaggtgtgtaaccccatcatcagcggactgtaccagggtgccggtggtcccgggcctggcggcttcggggctcagggtcccaagggagggtctgggtcaggccctaccattgaggaggtggattaggggcctttgttctttagtatgtttgtctttgaggtggactgttgggactcaaggactttgctgctgttttcctatgtcatttctgcttcagctctttgctgcttcacttctttgtaaagttgtaacctgatggtaattagctggcttcattatttttgtagtacaaccgatatgttcattagaattctttgcatttaatgttgatactgtaagggtgtttcgttccctttaaatgaatcaacactgccaccttctgtacgagtttgtttgttttttttttttttttttttttttgcttggcgaaaacactacaaaggctgggaatgtatgtttttataatttgtttatttaaatatgaaaaataaaatgttaaactttaaaaaaaaaaaaaaaaaaaaaaaaaaaaaaa

SEQ ID NO: 1455 - DNA, 2445 bp, Homo sapiens
ataaaagcccaggggcaagcggtccggataacggctagcctgaggagctgctgcgacagtccactacctttttcgagagtgactcccgttgtcccaaggcttcccagagcgaacctgtgcggctgcaggcaccggcgcgtcgagtttccggcgtccggaaggaccgagctcttctcgcggatccagtgttccgtttccagcccccaatctcagagcggagccgacagagagcagggaaccggcatggccaaagccgcggcgatcggcatcgacctgggcaccacctactcctgcgtgggggtgttccaacacggcaaggtggagatcatcgccaacgaccagggcaaccgcaccacccccagctacgtggccttcacggacaccgagcggctcatcggggatgcggccaagaaccaggtggcgctgaacccgcagaacaccgtgtttgacgcgaagcggctgattggccgcaagttcggcgacccggtggtgcagtcggacatgaagcactggcctttccaggtgatcaacgacggagacaagcccaaggtgcaggtgagctacaagggggagaccaaggcattctaccccgaggagatctcgtccatggtgctgaccaagatgaaggagatcgccgaggcgtacctgggctacccggtgaccaacgcggtgatcaccgtgccggcctacttcaacgactcgcagcgccaggccaccaaggatgcgggtgtgatcgcggggctcaacgtgctgcggatcatcaacgagcccacggccgccgccatcgcctacggcctggacagaacgggcaagggggagcgcaacgtgctcatctttgacctgggcgggggcaccttcgacgtgtccatcctgacgatcgacgacggcatcttcgaggtgaaggccacggccggggacacccacctgggtggggaggactttgacaacaggctggtgaaccacttcgtggaggagttcaagagaaaacacaagaaggacatcagccagaacaagcgagccgtgaggcggctgcgcaccgcctgcgagagggccaagaggaccctgtcgtccagcacccaggccagcctggagatcgactccctgtttgagggcatcgacttctacacgtccatcaccagggcgaggttcgaggagctgtgctccgacctgttccgaagcaccctggagcccgtggagaaggctctgcgcgacgccaagctggacaaggcccagattcacgacctggtcctggtcgggggctccacccgcatccccaaggtgcagaagctgctgcaggacttcttcaacgggcgcgacctgaacaagagcatcaaccccgacgaggctgtggcctacggggcggcggtgcaggcggccatcctgatgggggacaagtccgagaacgtgcaggacctgctgctgctggacgtggctcccctgtcgctggggctggagacggccggaggcgtgatgactgccctgatcaagcgcaactccaccatccccaccaagcagacgcagatcttcaccacctactccgacaaccaacccggggtgctgatccaggtgtacgagggcgagagggccatgacgaaagacaacaatctgttggggcgcttcgagctgagcggcatccctccggcccccaggggcgtgccccagatcgaggtgaccttcgacatcgatgccaacggcatcctgaacgtcacggccacggacaagagcaccggcaaggccaacaagatcaccatcaccaacgacaagggccgcctgagcaaggaggagatcgagcgcatggtgcaggaggcggagaagtacaaagcggaggacgaggtgcagcgcgagagggtgtcagccaagaacgccctggagtcctacgccttcaacatgaagagcgccgtggaggatgaggggctcaagggcaagatcagcgaggcggacaagaagaaggtgctggacaagtgtcaagaggtcatctcgtggctggacgccaacaccttggccgagaaggacgagtttgagcacaagaggaaggagctggagcaggtgtgtaaccccatcatcagcggactgtaccagggtgccggtggtcccgggcctgggggcttcggggctcagggtcccaagggagggtctgggtcaggccccaccattgaggaggtagattaggggcctttccaagattgctgtttttgttttggagcttcaagactttgcatttcctagtatttctgtttgtcagttctcaatttcctgtgtttgcaatgttgaaattttttggtgaagtactgaacttgctttttttccggtttctacatgcagagatgaatttatactgccatcttacgactatttcttctttttaatacacttaactcaggccattttttaagttggttacttcaaagtaaataaactttaaaattcaaaaaaaaaaaaaaaaaa

SEQ ID NO: 1456 - DNA, 3136 bp, Homo sapiens; identical to SEQ ID NO: 865

SEQ ID NO: 1457 - DNA, 2244 bp, Homo sapiens
ggggccgcggcgtggagagcgggcgggagccgcagccgcagcgaggccggcgggcgggagcgcacggaggtggggtcggccaggccggtgcgggctccttgcggcaggtcccaagagggttcggtccgagcccggtgggaggctcccggagcgcagcctgggcccagcccaccccgcgccggcggccatggcaggcaccctggacctggacaagggctgcacggtggaggagctgctccgcgggtgcatcgaagccttcgatgactccgggaaggtgcgggacccgcagctggtgcgcatgttcctcatgatgcacccctggtacatcccctcctctcagctggcggccaagctgctccacatctaccaacaatcccggaaggacaactccaattccctgcaggtgaaaacgtgccacctggtcaggtactggatctccgccttcccagcggagtttgacttgaacccggagttggctgagcagatcaaggagctgaaggctctgctagaccaagaagggaaccgacggcacagcagcctaatcgacatagacagcgtccctacctacaagtggaagcggcaggtgactcagcggaaccctgtgggacagaaaaagcgcaagatgtccctgttgtttgaccacctggagcccatggagctggcggagcatctcacctacttggagtatcgctccttctgcaagatcctgtttcaggactatcacagtttcgtgactcatggctgcactgtggacaaccccgtcctggagcggttcatctccctcttcaacagcgtctcacagtgggtgcagctcatgatcctcagcaaacccacagccccgcagcgggccctggtcatcacacactttgtccacgtggcggagaagctgctacagctgcagaacttcaacacgctgatggcagtggtcgggggcctgagccacagctccatctcccgcctcaaggagacccacagccacgttagccctgagaccatcaagctctgggagggtctcacggaactagtgacggcgacaggcaactatggcaactaccggcgtcggctggcagcctgtgtgggcttccgcttcccgatcctgggtgtgcacctcaaggacctggtggccctgcagctggcactgcctgactggctggacccagcccggacccggctcaacggggccaagatgaagcagctctttagcatcctggaggagctggccatggtgaccagcctgcggccaccagtacaggccaaccccgacctgctgagcctgctcacggtgtctctggatcagtatcagacggaggatgagctgtaccagctgtccctgcagcgggagccgcgctccaagtcctcgccaaccagccccacgagttgcaccccaccaccccggcccccggtactggaggagtggacctcggctgccaaacccaagctggatcaggccctcgtggtggagcacatcgagaagatggtggagtctgtgttccggaactttgacgtcgatggggatggccacatctcacaggaagaattccagatcatccgtgggaacttcccttacctcagcgcctttggggacctcgaccagaaccaggatggctgcatcagcagggaggagatggtttcctatttcctgcgctccagctctgtgttgggggggcgcatgggcttcgtacacaacttccaggagagcaactccttgcgccccgtcgcctgccgccactgcaaagccctgatcctgggcatctacaagcagggcctcaaatgccgagcctgtggagtgaactgccacaagcagtgcaaggatcgcctgtcagttgagtgtcggcgcagggcccagagtgtgagcctggaggggtctgcaccctcaccctcacccatgcacagccaccatcaccgcgccttcagcttctctctgccccgccctggcaggcgaggctccaggcctccagagatccgtgaggaggaggtacagacggtggaggatggggtgtttgacatccacttgtaatagatgctgtggttggatcaaggactcattcctgccttggagaaaatacttcaaccagagcagggagcctgggggtgtcggggcaggaggctggggatgggggtgggatatgagggtggcatgcagctgagggcagggccagggctggtgtccctaaggttgtacagactcttgtgaatatttgtattttccagatggaataaaaaggcccgtgtaattaaccttca

SEQ ID NO: 1458 - DNA, 2149 bp, Homo sapiens
gtggcctcgcggaggcgggcgggggcgtggcctcgcggaggcgggactctggccgcctgttttttttgcagccgcgctgcgcgcaccgcgggctccgggctcagaagtgcggacgcccggctcccggcgtggacgccatggtgctgtgcccggtgattgggaagctgctgcacaagcgcgtggtgctggccagcgcctccccacgccgtcaggagatcctcagcaacgcgggtctcaggtttgaggtggtcccctccaagtttaaagagaagctggacaaagcctccttcgctactccgtatgggtacgccatggagaccgccaagcagaaggccctggaggtggccaaccggctgtaccagaaagacctgcgggcccccgacgtggtcattggagcggacacgatcgtgacagtcggggggctgattctggagaagccggtggacaagcaggacgcctacaggatgctgtcccggttgagtgggagagaacacagcgtgttcacaggtgtcgcgatcgtccactgctccagcaaagaccatcagctggacaccagggtctcggaattctacgaggaaacgaaggtgaagttctcggagctgtccgaggagctgctctgggaatacgtccacagcggggagcccatggacaaagctggcggctacgggatccaggccctgggcggcatgctggtggagtccgtacacggggactttctgaacgtggtgggattcccgctgaaccacttctgcaagcagctggtgaagctctactacccgccccgtccggaggacctgcggcggagtgtcaagcacgactccatcccggccgcggacaccttcgaagacctcagtgacgtggaggggggcggctcggagcccactcagagggacgcgggcagccgcgatgagaaggccgaggcgggagaggcgggacaggccacggcagaggctgagtgtcacaggactcgggagaccctgcctccgttcccgacacgcctcctggagctgattgagggctttatgctatccaagggcctgctcaccgcttgcaaactgaaggtgttcgatttgttaaaagatgaagcaccccagaaggctgcggatattgccagcaaagtggacgcctctgcgtgtggaatggagaggcttctggacatctgtgctgccatggggctcctggagaagacagagcaaggttacagtaacacagagacagcgaacgtctacctggcatcggatggcgaatactctctgcacggcttcatcatgcacaataatgacctcacatggaacctctttacatacctggagtttgccatccgagagggaacaaaccagcaccacagggcgttggggaagaaggcggaagatctgttccaggatgcgtactaccagagcccggagacgcggctgaggttcatgcgggccatgcacggcatgacgaagctgactgcgtgccaggtggccacggccttcaatctgtcccgcttctcctccgcctgcgacgtgggaggctgcacgggtgcactggcccgagagctggcccgtgagtaccctcgtatgcaggtgactgtgtttgacctcccagacattatcgagctggccgcccacttccaaccccccggaccgcaggcagtgcagatccacttcgcagcaggtgactttttcagggaccccctccccagcgctgagctgtacgtcctgtgccggatcctgcatgactggccagacgacaaagtccacaagttactcagcagggtcgccgagagctgcaagccaggggccggcctgctgctggtggagacgctcctggatgaggagaagagggtggcgcagcgcgccctgatgcagtcactgaacatgctggtgcagactgaaggcaaggagcggagcctgggcgagtatcagtgcttgctggagctgcacggcttccaccaggtgcaggtggtgcacttggggggtgtcctggatgccatcttggccaccaaagtggccccctgaagcccaggcagcatgttcattatagggatgtcctcccccaggctgcaggtggaccgcccggtccccaagtaccataggacagtcacataggagcgtgtagtcgtgactgaataaagaaagcaaaagcctgaaaaaaaaaaaaaaaa

SEQ ID NO: 1459 - DNA, 2853 bp, Homo sapiens
cgggacctgaatacccggctagggacacgagagagaggaatcggggtttctgggtgacggtgatctcggggtgggcaggactccaaaggcccgtcgacccggtggtggactccttgcactgggattggacatatgcaagcgggagatttggggccggcgctcaaaatcggggggcgggggtggactcgggtttggaccccaggatccgatcagcggacccttgattcaacgtgaggtcccgaattgacgtccttccctcaaaacctccgggtctacaaaccaggaccctcaagacccttcagggctccagcgtgacatggctgaagcgcaccaggccgtgggcttccgaccctcgctgacctcggacggggctgaagtggaactcagtgcccctgtgctgcaggagatctacctctctggcctgcgctcctggaaaaggcatctctcacgtttctggaatgactttctcaccggtgtgtttcctgccagccccctcagttggcttttcctcttcagtgccatccagcttgcctggttcctccagctggatccttccttaggactgatggagaagatcaaagagttgctgcctgactggggtggacaacaccacgggctccggggggtcctggcagccgcgctgtttgcctcgtgtttgtggggagccctgatcttcacactgcacgtggccctgaggctgcttctgtcctaccacggctggcttcttgagccccacggagccatgtcctcccccaccaagacctggctggccctggtccgcatcttctctggccgccacccgatgctgttcagttaccagcgctccctgccacgccagcccgtgccctctgtgcaggacaccgtgcgcaagtacctggagtcggtccggcccatcctctccgacgaggacttcgactggaccgcggtcctggcgcaggaattcctgaggctgcaggcgtcgctgctgcagtggtacctgcggctcaagtcctggtgggcgtccaattatgtcagtgactggtgggaggaatttgtgtacctgcgctcccgaaatccgctgatggtgaacagcaactattacatgatggcagctcgcgctgggaatgccgtccatgccctcctcctgtaccgccaccgcctgaaccgccaggagatacccccgactttgctgatgggaatgcgccccttatgctctgcccagtacgagaagatcttcaacaccacgcggattccaggggtccaaaaagactacatccgccacctccatgacagccaacacgtggctgtcttccaccggggccgattcttccgcatggggacccactcccgaaacagcctgctttccccgagagccctggagcagcagtttcagagaatcctggatgatccctcaccggcctgcccccacgaggaacatctggcagctctgacagctgctcccaggggcacgtgggcccaggtgcggacatccctgaagacccaggcagcggaggccctggaggcggtggaaggggccgctttctttgtgtcactggatgctgagcccgcggggctcaccagggaggacccggcagcgtcgttggatgcctacgcccatgctctgctggccggccggggccatgatcgctggtttgacaaatccttcaccctaatcgtcttctctaacgggaagctgggcctcagcgtggagcactcctgggccgactgccccatctcaggacacatgtgggagttcactctggctacagaatgctttcagctgggctactcaacagacggccactgcaaggggcacccggaccccacactaccccagccccagcggctgcaatgggaccttccagaccagatccactcctccatctctctagccctgaggggagccaagatcttgtctgaaaatgtcgactgccatgtcgttccattctccctatttggcaagagcttcatccgacgctgccacctctcttcagacagcttcatccagatcgccttgcaactggcccacttccgggacaggggtcaattctgcctgacttatgagtcggccatgactcgcttattcctggaaggccggacggagacggtgcggtcttgcacgagggaggcctgcaactttgtcagggccatggaggacaaagagaagacggacccacagtgcctcgccctgttccgcgtggcagtggacaagcaccaggctctgctgaaggcagccatgagcgggcagggagttgaccgccacctgtttgcgctgtacatcgtgtcccgattcctccacctgcagtcgcccttcctgacccaggtccattcggagcagtggcagctgtccaccagccagatccctgttcagcaaatgcatctgtttgacgtccacaattacccggactatgtttcctcaggcggtggattcgggcctgctgatgaccatggttatggtgtttcttatatcttcatgggggatggcatgatcaccttccacatctccagcaaaaaatcaagcacaaaaacggattcccacaggctggggcagcacattgaggacgcactgctggatgtggcctccctgttccaggcgggacagcattttaagcgccggttcagagggtcagggaaggagaactccaggcacaggtgtggatttctctcccgccagactggggcctccaaggcctcaatgacatccaccgacttctgactccttccagcaggcagctggcctctccaaggaataagggtgaaattgccacagctggctgacacaggacaggggcaactggtttggcaaccccacatccaggccaataaagatgtgtgagctgggaaaaaaaaaaaaaaaaaaaaaaaaaaaaaaaa

SEQ ID NO: 1460 - DNA, 5049 bp, Homo sapiens
accccccaccccctcctccctgcacacaaaagcagcataaattaaccgtcttcgggaagccgagcctctgccagccctgagctgggaagaagcagctacctcggaggcagggcgcgcaggcgggcggcgatgagagggggcgcagccgcagccccgcgctggggagcccaccgctaaccctgcaccccacccacccctgcacaaaagagctggcgggcgctggccacgtcgccctgggtgaccttcctcggatgcagaatccgcccctgcgagcatcctcttcctcctaggctctgaaggcccggggagcgtgagcgatgcccagctgcacccgggcagggctcgcctttgtttgccagtaaggaggagaggctgtctcagctgcagaggggtcatccctgcttcaagccagtgcctcttcccagctcccatggggaccaccgaagccacgctccggatggaaaacgtggacgtgaaggaggaatggcaggacgaagatcttcccaggccactcccagaagagacgggggtggaactgcttggcagcccggtggaagacacatcctctcctcccaacacgctaaatttcaacggagcgcatcgtaagaggaagacgctggtggccccagagatcaacatttctctggatcagagtgaggggtccctgctgtccgatgacttcttggatacccctgatgacctggatattaacgtggatgacatcgagacccccgatgagaccgactcgctggagttcctggggaatggcaacgaactggagtgggaagacgacacccccgtggccaccgccaagaacatgcccggggacagcgcggatctatttggggacggcacgacggaggacggcagcgccgccaacgggcgcctgtggcggacagtgatcatcggggagcaagagcaccgtatagacctgcacatgatccggccttacatgaaagtggtcacccacggagggtactacggcgaaggcctcaacgccatcatcgtcttcgcagcctgcttccttccagacagcagcctccccgactaccactacatcatggagaacctcttcctgtacgtcatcagcagcttagagctcctggtggctgaggactacatgatcgtgtacctgaacggtgccacgccccggcggaggatgcctggaatcggctggctgaagaagtgctaccagatgatcgaccggaggttgcggaaaaacctgaagtccttgatcatcgtccacccctcgtggttcattcggactgtgctggccatctctcgccctttcatcagcgtcaagttcatcaacaagatccagtacgtgcacagcttggaagacctggagcaactcatccctatggaacacgtccagatcccagactgcgtcctgcaatacgaagaggaaagactgaaggccaggagggagagcgcgaggccccagccggagtttgtgctgcccaggtctgaagagaagccagaggtggcaccagtggaaaacaggtctgctctggtctcagaagatcaggaaacaagcatgtcctgaggcgacgtgagcataacaaaggacatggaagaagattccagatgccagaaaacctctgtcagacgcccactggccccagatctcatcctgcctcatcctgagtcccaatcttccaagggtgccagcccctccgttcatctctgaaacccagcatccttttcagctgcttgaaaacattgtattttttttttttaacgatgcagtatttgtgcgttccagaaaagggcccagctctgagcccctcacccttccacactcacgaactctcagccgaggaaggcaagaagcgcagggggtggcccgcgtggcgtcggtggcctccgctcctgctcgcagcccctgtggtcagagctggatacaagattcaagacccttctcttgcttgtcacccgctccaggttggagccacagacacccaccgccaccccggctgggtctgcgtcctttcctgtgcctttccctccagaatgcggcctcagacctagaagctcaacccccctatgagggccacgtcctggggtagctcctgacctccgaccttatgtccaaatttcacacccatggtttttcatttgacccgcccccttctcgctcataatgacacccagctcctttgagaggatcagagcccattgcacaagaagagccgctgccaaccatccttgtcctccgattgcaaaatgacaccccagtaatctagaacattctcaagcccctttaactcagatgtcaagccaccgggcaaaccccgtcaatacctcccaccaaggaatgagatatgtggacctcactgctcccccaacccagcgtcaggctgggacacgccaacgctgttccgggttggaacagcagaggctcagaaactggctctgaaataggcagacctagcaagaggaagatacagggtatcgggcgtttgagtgtttcagaagtcattcgggaagataaatccagtgcgctggccgcagccacctgcattcaaagcttggaccagcgggttcttgttcgggaggcaaatttccctaggaaaaagaagacagacttttctaatgtggtccaaatgcggatcactggtcagatggactctagaagcactgagctccctgtctctggaagtatttaagaaaaggctgggccaggcacgatggctcacgcctgtaatcccagactttgggaggccgaggcaggcggatcacctgaggtgaggagtttgagaacagcctggccaacatggtgaaacctcatctctactaaaaatacaaaaattagccaggcgtggtggcaggtgcctgtaatcccagctacttgggaggctgaggcatgagaatcacttaaacctgagaggcagaggttacagtgagccaagatcgtgccactgcattccagcctgggcgacagagcaagactctgtctcaaaaaaaataaaaaataatcagggcacagtggctcatgcctgtaatcccagcactctgggaggctgaggtgggtggatcacctgaggtcaggagttcaagaccagcctggtgaacatggcgaaaccccgtctctaataaaaatacaaaaattagccgggcatggtggtgcatgcctgtaatcccagctactcgggaggctgaggcaggagaactgcttgaacccaggaggcagaggttgcagtgatccaagatcatgccactgcactccagcctgggcaacaagagcaaaactccgtctcaaaataaaaagaaaagaaaagaatggacagtgtttgcagagagttgctcacgagtttccctctaatcctaaatgtcttcatgtctatcagtctgagcagacggtgagtagggcgggcacattctccaggcccttcttcctagctctgtggttgacctctcagcaagtgctatccaggctgggccaaccagacccacaattaactgagcctcagtgaaagcgtccagtgcatcttgacctgagacagcaaggaattgcatttggggttattccaacgatgatggcagggaactggtggtatttagtgctgaggggcagtgatacagaaagatttgccctgtgggacagggtcctgcgcgagtcccatccccaaaagccagcagctcctgccatgaggaagacggggtttctgagcaggcttatgcctgcaggttcctgtggagccaccggctgtgacgggacacctctgggtctcagcattgccctggggaggctgggacatttagggacatggtagggttttaacatttgtttcccaaatgtcaaatcccgggcacaggggcaagaccctgtcccgaattcccaccccagtgaatggtgtcgctgccaaagccaacacaagatgacaaaagtggctgggtacggtggctcacgcctataatcccagcactttgggagaccgagacaggtggatcacctgaggtcaggagttcgagaccaggctggccaacatggtgaaaccccatctctactaaaaatacaaaaattagctgggtgtggtggcgcgcacctgtagtcccagctactcaggaggctgaggtagaagaatagctggaacccaggaggcagagattgcagtcagccgagattgcaccactgcactccagcctgggagacagagcaagactgactcaaaagaaaaaaaatgacagaagcctgattatcagactgcccggaggagacaggctccagcagatagatgccagccaggcccagctgccacgatttgtcccaggtgaccaaaggcacgcagctccagcatgaatcgttctaacccaacagtgacaagaactgctgggccttaaccgtcatggaagactggggccgcttccaagtcacagacaggagacggggacaggaaagaactcattccacccaatcggacacctaataattgagtgtctacagcagcaatcaagtgacaagtgaggccctacctgacccagaaggtgcctgccggctaaacattctgcccccaccagaaactccagggggtccgcccgttatgccgtggcccacccacgcccctttggatcaccagcagtcacagacaacaggcaggcgaaactgaagaccccaactcagccccagcggaccctccagagcaaaagaggcccccggcgaggccacctgtcggcaggcatgccgaggtcaaacagccggggccaccgttcccagctgggccacgacctgcaccgtccacagatgggctttgagatggatttgtatcagggtggggggtgtggtttggccaaaatgcaatggaccccgacccctcctcgtaaaaggatgttgggtttccctctggtgacacatgggatgcgtcataaaccctcccccaaagtcctggtcagcagcccatccttccaacgatgagttttgcggtttttcagaacagaaatgatcactacgattgacgacggtcgtgatgttaagacgtcgtctccatgagctttggggggacttttatgtggaataaagaaactatcactgagaaaaaaaaaaaaaaa

SEQ ID NO: 1461 - DNA, 2257 bp, Homo sapiens
ataggcagaggccaccctccccgcctccccgcccgctgcgcgcccgccccgccccggctcactttaaaagtttactcgggccgggacgcagggcaaagcgagccatggctgtctacgtcgggatgctgcgcctggggaggctgtgcgccgggagctcgggggtgctgggggcccgggccgccctctctcggagttggcaggaagccaggttgcagggtgtccgcttcctcagttccagagaggtggatcgcatggtctccacgcccatcggaggcctcagctacgttcaggggtgcaccaaaaagcatcttaacagcaagactgtgggccagtgcctggagaccacagcacagagggtcccagaacgagaggccttggtcgtcctccatgaagacgtcaggttgacctttgcccaactcaaggaggaggtggacaaagctgcttctggcctcctgagcattggcctctgcaaaggtgaccggctgggcatgtggggacctaactcctatgcatgggtgctcatgcagttggccaccgcccaggcgggcatcattctggtgtctgtgaacccagcctaccaggctatggaactggagtatgtcctcaagaaggtgggctgcaaggcccttgtgttccccaagcaattcaagacccagcaatactacaacgtcctgaagcagatctgtccagaagtggagaatgcccagccaggggccttgaagagtcagaggctcccagatctgaccacagtcatctcggtggatgcccctttgccggggaccctgctcctggatgaagtggtggcggctggcagcacacggcagcatctggaccagctccaatacaaccagcagttcctgtcctgccatgaccccatcaacatccagttcacctcggggacaacaggcagccccaagggggccaccctctcccactacaacattgtcaacaactccaacattttaggagagcgcctgaaactgcatgagaagacaccagagcagttgcggatgatcctgcccaaccccctgtaccattgcctgggttccgtggcaggcacaatgatgtgtctgatgtacggtgccaccctcatcctggcctctcccatcttcaatggcaagaaggcactggaggccatcagcagagagagaggcaccttcctgtatggtacccccacgatgttcgtggacattctgaaccagccagacttctccagttatgacatctcgaccatgtgtggaggtgtcattgctgggtcccctgcacctccagagttgatccgagccatcatcaacaagataaatatgaaggacctggtggttgcttatggaaccacagagaacagtcccgtgacattcgcgcacttccctgaggacactgtggagcagaaggcagaaagcgtgggcagaattatgcctcacacggaggcccggatcatgaacatggaggcagggacgctggcaaagctgaacacgcccggggagctgtgcatccgagggtactgcgtcatgctgggctactggggtgagcctcagaagacagaggaagcagtggatcaggacaagtggtattggacaggagatgtcgccacaatgaatgagcagggcttctgcaagatcgtgggccgctctaaggatatgatcatccggggtggtgagaacatctaccccgcagagctcgaggacttctttcacacacacccgaaggtgcaggaagtgcaggtggtgggagtgaaggacgatcggatgggggaagagatttgtgcctgcattcggctgaaggacggggaggagaccacggtggaggagataaaagctttctgcaaagggaagatctctcacttcaagattccgaagtacatcgtgtttgtcacaaactaccccctcaccatttcaggaaagatccagaaattcaaacttcgagagcagatggaacgacatctaaatctgtgaataaagcagcaggcctgtcctggccggttggcttgactctctcctgtcagaatgcaacctggctttatgcacctagatgtccccagcacccagttctgagccaggcacatcaaatgtcaaggaattgactgaacgaactaagagctcctggatgggtccgggaactcgcctgggcacaaggtgccaaaaggcaggcagcctgcccaggccctccctcctgtccatcccccacattcccctgtctgtccttgtgatttggcataaagagcttctgttttctttggcttaaaaaaaaaaaaaaaaaa

SEQ ID NO: 1462 - DNA, 2798 bp, Homo sapiens
ctctccctccccagtagacgctcgggcaccagccgcggcaaggatggagctgggttgctggacgcagttggggctcacttttcttcagctccttctcatctcgtccttgccaagagagtacacagtcattaatgaagcctgccctggagcagagtggaatatcatgtgtcgggagtgctgtgaatatgatcagattgagtgcgtctgccccggaaagagggaagtcgtgggttataccatcccttgctgcaggaatgaggagaatgagtgtgactcctgcctgatccacccaggttgtaccatctttgaaaactgcaagagctgccgaaatggctcatgggggggtaccttggatgacttctatgtgaaggggttctactgtgcagagtgccgagcaggctggtacggaggagactgcatgcgatgtggccaggttctgcgagccccaaagggtcagattttgttggaaagctatcccctaaatgctcactgtgaatggaccattcatgctaaacctgggtttgtcatccaactaagatttgtcatgttgagcctggagtttgactacatgtgccagtatgactatgttgaggttcgtgatggagacaaccgcgatggccagatcatcaagcgtgtctgtggcaacgagcggccagctcctatccagagcataggatcctcactccacgtcctcttccactccgatggctccaagaattttgacggtttccatgccatttatgaggagatcacagcatgctcctcatccccttgtttccatgacggcacgtgcgtccttgacaaggctggatcttacaagtgtgcctgcttggcaggctatactgggcagcgctgtgaaaatcttctggaggctgggaagtccaagatcaaggcgtcagaagattcattgtctgtccttgaagaaagaaactgctcagaccctgggggcccagtcaatgggtaccagaaaataacagggggccctgggcttatcaacggacgccatgctaaaattggcaccgtggtgtctttcttttgtaacaactcctatgttcttagtggcaatgagaaaagaacttgccagcagaatggagagtggtcagggaaacagcccatctgcataaaagcctgccgagaaccaaagatttcagacctggtgagaaggagagttcttccgatgcaggttcagtcaagggagacaccattacaccagctatactcagcggccttcagcaagcagaaactgcagagtgcccctaccaagaagccagcccttccctttggagatctgcccatgggataccaacatctgcatacccagctccagtatgagtgcatctcacccttctaccgccgcctgggcagcagcaggaggacatgtctgaggactgggaagtggagtgggcgggcaccatcctgcatccctatctgcgggaaaattgagaacatcactgctccaaagacccaagggttgcgctggccgtggcaggcagccatctacaggaggaccagcggggtgcatgacggcagcctacacaagggagcgtggttcctagtctgcagcggtgccctggtgaatgagcgcactgtggtggtggctgcccactgtgttactgacctggggaaggtcaccatgatcaagacagcagacctgaaagttgttttggggaaattctaccgggatgatgaccgggatgagaagaccatccagagcctacagatttctgctatcattctgcatcccaactatgaccccatcctgcttgatgctgacatcgccatcctgaagctcctagacaaggcccgtatcagcacccgagtccagcccatctgcctcgctgccagtcgggatctcagcacttccttccaggagtcccacatcactgtggctggctggaatgtcctggcagacgtgaggagccctggcttcaagaacgacacactgcgctctggggtggtcagtgtggtggactcgctgctgtgtgaggagcagcatgaggaccatggcatcccagtgagtgtcactgataacatgttctgtgccagctgggaacccactgccccttctgatatctgcactgcagagacaggaggcatcgcggctgtgtccttcccgggacgagcatctcctgagccacgctggcatctgatgggactggtcagctggagctatgataaaacatgcagccacaggctctccactgccttcaccaaggtgctgccttttaaagactggattgaaagaaatatgaaatgaaccatgctcatgcactccttgagaagtgtttctgtatatccgtctgtacgtgtgtcattgcgtgaagcagtgtgggcctgaagtgtgatttggcctgtgaacttggctgtgccagggcttctgacttcagggacaaaactcagtgaagggtgagtagacctccattgctggtaggctgatgccgcgtccactactaggacagccaattggaagatgccagggcttgcaagaagtaagtttcttcaaagaagaccatatacaaaacctctccactccactgacctggtggtcttccccaactttcagttatacgaatgccatcagcttgaccagggaagatctgggcttcatgaggccccttttgaggctctcaagttctagagagctgcctgtgggacagcccagggcagcagagctgggatgtggtgcatgcctttgtgtacatggccacagtacagtctggtccttttccttccccatctcttgtacacattttaataaaataagggttggcttctgaactacaaaaaaaaaaaaaaaa

SEQ ID NO: 1463 - DNA, 2195 bp, Homo sapiens
cccagcgctcctccccgcaaatgatcccgccccaggggcctatcccagtccccccagtgcctttggttgctggagggaagaacacaatggatctggtgctaaaaagatgccttcttcatttggctgtgataggtgctttgctggctgtgggggctacaaaagtacccagaaaccaggactggcttggtgtctcaaggcaactcagaaccaaagcctggaacaggcagctgtatccagagtggacagaagcccagagacttgactgctggagaggtggtcaagtgtccctcaaggtcagtaatgatgggcctacactgattggtgcaaatgcctccttctctattgccttgaacttccctggaagccaaaaggtattgccagatgggcaggttatctgggtcaacaataccatcatcaatgggagccaggtgtggggaggacagccagtgtatccccaggaaactgacgatgcctgcatcttccctgatggtggaccttgcccatctggctcttggtctcagaagagaagctttgtttatgtctggaagacctggggccaatactggcaagttctagggggcccagtgtctgggctgagcattgggacaggcagggcaatgctgggcacacacaccatggaagtgactgtctaccatcgccggggatcccggagctatgtgcctcttgctcattccagctcagccttcaccattactgaccaggtgcctttctccgtgagcgtgtcccagttgcgggccttggatggagggaacaagcacttcctgagaaatcagcctctgacctttgccctccagctccatgaccccagtggctatctggctgaagctgacctctcctacacctgggactttggagacagtagtggaaccctgatctctcgggcacttgtggtcactcatacttacctggagcctggcccagtcactgcccaggtggtcctgcaggctgccattcctctcacctcctgtggctcctccccagttccaggcaccacagatgggcacaggccaactgcagaggcccctaacaccacagctggccaagtgcctactacagaagttgtgggtactacacctggtcaggcgccaactgcagagccctctggaaccacatctgtgcaggtgccaaccactgaagtcataagcactgcacctgtgcagatgccaactgcagagagcacaggtatgacacctgagaaggtgccagtttcagaggtcatgggtaccacactggcagagatgtcaactccagaggctacaggtatgacacctgcagaggtatcaattgtggtgctttctggaaccacagctgcacaggtaacaactacagagtgggtggagaccacagctagagagctacctatccctgagcctgaaggtccagatgccagctcaatcatgtctacggaaagtattacaggttccctgggccccctgctggatggtacagccaccttaaggctggtgaagagacaagtccccctggattgtgttctgtatcgatatggttccttttccgtcaccctggacattgtccagggtattgaaagtgccgagatcctgcaggctgtgccgtccggtgagggggatgcatttgagctgactgtgtcctgccaaggcgggctgcccaaggaagcctgcatggagatctcatcgccagggtgccagccccctgcccagcggctgtgccagcctgtgctacccagcccagcctgccagctggttctgcaccagatactgaagggtggctcggggacatactgcctcaatgtgtctctggctgataccaacagcctggcagtggtcagcacccagcttatcatgcctggtcaagaagcaggccttgggcaggttccgctgatcgtgggcatcttgctggtgttgatggctgtggtccttgcatctctgatatataggcgcagacttatgaagcaagacttctccgtaccccagttgccacatagcagcagtcactggctgcgtctaccccgcatcttctgctcttgtcccattggtgagaacagccccctcctcagtgggcagcaggtctgagtactctcatatgatgctgtgattttcctggagttgacagaaacacctatatttcccccagtcttccctgggagactactattaactgaaataaatactcagagcctgaaaaaaaaaaaaaaa

SEQ ID NO: 1464 - DNA, 2858 bp, Homo sapiens
gccaggagcccgatcgagatgatgatggttatgcagcccgagggtctgggggccggggaggggcgctttgcgggcggcggcgggggcggcgagtacatggaacaggaggaggactgggaccgcgacctgctgctggacccggcctgggagaagcagcagcggaaaaccttcactgcctggtgcaactcacacctgcgcaaggcaggcacccagatcgagaacatcgaggaagatttccgcaatggcctcaaactcatgctgctcctggaggtcatttcaggtgagaggctgcctaggccagataaaggcaagatgcgcttccacaaaatcgccaacgttaacaaggccctggacttcattgccagcaagggggttaaactggtgtccattggtgctgaagagattgttgacgggaacctgaagatgaccctgggcatgatctggaccatcatccttcgcttcgccatccaggacatctctgtggaagaaacctcagccaaggaaggcttgcttctgtggtgccagaggaagacagcaccgtaccgcaacgtcaacgtgcagaacttccacaccagctggaaggatggcctggccctctgtgccctcatccaccgacaccgccctgacctcatcgactacgccaaactgcgaaaggatgaccccatcggaaacctgaacactgcctttgaggtggcagagaaatacctggacatccccaagatgttggatgcagaagacattgtgaacaccccaaagccggatgagaaggccatcatgacctatgtgtcctgcttctaccatgcctttgccggggctgagcaggcagagacagctgccaacaggatctgcaaggtgctggcagtgaaccaggaaaacgagaagctgatggaggagtatgagaagcttgccagtgagctgctggagtggatccgccgcactgtcccatggctggagaaccgtgtgggtgagcccagcatgagtgccatgcagcgcaaactagaggactttcgggactaccggcgtctgcacaagccgccccgcattcaggaaaagtgccagctggagatcaacttcaacacactgcagaccaagttgcggctcagccaccggcctgccttcatgccctccgagggcaagctggtctcggacatcgccaacgcctggcgggggctggagcaggtggaaaagggctatgaggactggctgctctcggagatccggcgcctgcagcgactccagcacctggctgagaagttccggcagaaggcctccctgcacgaagcctggacccggggaaaggaggagatgctgagccagcgcgactacgattcggctttgctacaggaggtgcgggcgttgctgcggcgccacgaggcctttgagagcgacctggcggcgcaccaggaccgcgtggagcacattgccgcgctggcccaggagctcaatgagctggactaccacgaggcagcctcagtgaatagccgctgccaggccatctgcgatcagtgggacaacctgggcaccctgacccagaagaggcgggatgcgctagagcggatggagaagctcctggagaccattgaccagctgcaactggagtttgcccggcgggccgcgcccttcaacaactggctggatggtgccgtggaggacctgcaggacgtgtggctggtacactctgtggaggagacccagagcctgctgacagcgcacgatcagttcaaggcaacactgcccgaggctgaccgagagcgaggtgccatcatgggcatccagggtgagatccagaagatctgccagacgtatgggctgcggccctgctccaccaatccctacatcaccctcagcccgcaggacatcaacaccaagtgggatatggtccgaaagctggtgcccagccgtgaccagacactgcaggaggagctggcacggcagcaggtaaacgagaggctccggcgacagtttgcggcccaggccaatgccattggaccctggatccaggcgaaggtggaggaagtggggcggctggcagcagggctagctggctctctggaggagcagatggctgggctacggcagcaggagcagaacattatcaactacaagactaacattgaccggctggagggtgaccaccagctgctgcaggagagcctggtgttcgacaataagcacaccgtctacagcatggagcacatccgcgtgggctgggagcagctgctcacctccattgcccgcaccatcaatgaagtggagaaccaggtactgacccgagacgccaagggactgagccaggagcagctcaacgagttccgagcatccttcaaccactttgacaggaagcggaatgggatgatggagcctgatgacttccgagcttgcctcatctccatgggctatgacctgggggaagtggagtttgctcgcatcatgaccatggtggaccccaacgcagctggggtggtgaccttccaggccttcatagacttcatgacccgagagacagccgagactgacacgactgagcaagttgtagcttccttcaagatcttggcaggagacaagaactacatcacccccgaggagctgcggcgcgagctccctgccaagcaggccgagtactgcatccgccgtatggtgccctacaagggatccggggccccggctggagccctggactacgtggccttctccagtgccctctatggggagagcgacctttgaccccaaccactgaggttctctatgcaagatggagagaggatgcaccctgtggctgatcccatccgtccctcggagcaagggcctaagagaaaagccagccaagtgcttctgaataaagatccctctctgggtca

SEQ ID NO: 1465 - DNA, 1898 bp, Homo sapiens
gaaggaaagcgcatgcgcgtcgggcacagcgcgtgcagcctcgtgcagctcttctggtctccggcgcccgcccctcagacgtaatgttgaattaaagaaaatactttatcagaagaagatggccactgcccagttgcagaggactcccatgagtgcactggtatttcccaataagatatcaactgaacaccagtctttggtgttagtgaagaggcttctagcagtttcagtatcctgtatcacgtatttgaggggaatattcccagaatgcgcttatggaacaagatatctagatgatctttgtgtcaaaatactgagagaagataaaaattgcccaggatctacacagttagtgaaatggatgctaggatgttatgatgctttacagaaaaaatatctaaggatggttgttctagctgtatacacaaacccagaagatcctcagacaatttcagaatgttaccaattcaaattcaaatacaccaataatggaccactcatggacttcataagtaaaaaccaaagcaacgaatctagcatgttgtctactgacaccaagaaagcaagcattctcctcattcgcaagatttatatcctaatgcaaaatctggggcctttacctaatgatgtttgtttgaccatgaaacttttttactatgatgaagttacacccccagattaccagcctcccggttttaaggatggtgattgtgaaggagttatatttgaaggggaacctatgtatttaaatgtgggagaagtctcaacaccttttcacatcttcaaagtaaaagtgaccactgagagagaacgaatggaaaatattgactcaactatactatcaccaaaacaaataaaaacaccatttcaaaaaatcctgagggacaaagatgtagaagatgaacaggagcattatacaagtgatgatttggacattgaaactaaaatggaagaacaggaaaaaaaccctgcatcttctgaacttgaagaaccaagtttagtttgtgaggaagatgaaattatgaggtctaaagaaagtccagatctttctatttctcattctcaggttgagcagttagtcaataaaacatctgaacttgatatgtctgaaagcaaaacaagaagtggaaaagtctttcagaataaaatggcaaatggaaatcaaccagtaaaatcttccaaagaaaatcggaagagaagtcaacatgaatctgggagaatagtcctccatcactttgattcttctagtcaagagtcagtgccaaaaaggagaaagtttagtgaaccaaaggaacatatataaaaattatttttgttctgcaggcttgcagagttcttctcaccatttaaactgaaggaccctatattatatttccctaactctgaagatgtatatgtagtttaaagcagtttgtacactaaaactaagtttttggctgactgtcatattgtggtccttaatcttgagataaatccaatagaacttttgaataaaagcaaaagtacaaatgtcataattgattcggtaataagtaaaatttcaaaattgattttgttcattacctacttaatatttcctttaaatatatactaactgttaaggccctctaatgccatttttctaaacagtaatgtttactttggtattaaaatttggtatggattcactttttacttatgttaaaattataccatttaactggctcttttgtcattgtgctgttattaaaacaatgttcttcaatattttgacataatgtattaacattttaatatataatgtacaatttaagaattggtgctttacctttactatgcttttttttacaggacaaaaagactgatttttaaagtatggcattttttgcagcataaataaaatattgttcagtacgtag

SEQ ID NO: 1466 - DNA, 2158 bp, Homo sapiens
cggattgtcagactgctcctccctcttctttagactgccacgaggaaaaagcagatgtgagaactcaaggttcagggctgctcttctaagaaacaagtctgccataatctccatctgtgttggaatctgttaactaatgaactggtctctgtgcaaatcctgagtgctaaagcttccaacaagactgatgctagctcgtgtcaccaggaagatgctacgtcatgccaagtgttttcagcgcctagcaatttttggttctgtgagggcactgcataaagataatagaacagcaacccctcagaatttctccaactatgaatccatgaaacaggacttcaaactggggattccagagtatttcaactttgctaaagatgtcctggaccaatggactgataaggaaaaggctggaaagaaaccttcaaatccagccttctggtggatcaacagaaatggagaagagatgcgatggagttttgaggaactgggatctctgtccagaaaatttgccaatatactttcagaagcctgttccctacaaagaggagatcgggtaattctgattctgcccagggtcccagagtggtggcttgcaaatgtggcctgtctgcgaacagggacagttttaattccaggaaccactcagctgacccagaaagacattctctacagactacaatcttcaaaagcaaactgcattatcaccaatgatgttttagccccagcagtagacgctgttgcatccaaatgtgaaaatctgcactccaagctgattgtatcagagaactccagagaggggtgggggaacctcaaggagttgatgaaacatgccagtgacagccacacctgtgtgaagacaaaacacaatgagatcatggccatattctttaccagtggaacaagtggatatccgaaaatgactgcacacacccacagcagttttggtttaggattatctgtaaatggaaggttctggctagatttgacaccctcagatgtgatgtggaatacctcagatacgggctgggcaaagtctgcatggagtagtgttttttctccgtggatccagggagcatgtgtattcacacaccatttaccccgttttgagccgacttctatcttgcaaacactctccaagtaccccatcacagtcttctgttcagcaccaactgtataccgaatgcttgtacagaatgatataaccagctataagtttaaaagcttaaagcactgtgtgagtgctggggaaccaattacccctgacgtgactgaaaaatggagaaacaagacgggcctggatatctacgaaggatatggacagactgaaacggtgctaatctgtggaaattttaagggaatgaaaattaaacctggctcaatgggaaaaccttctcctgctttcgatgttaagattgtagatgtaaatggcaatgttctacctcctggacaagaaggagatattggcattcaagttctacccaaccgaccatttggcctttttactcattacgtagataatccttcaaaaacagcttcaactctacgaggcaatttctatatcactggggacagaggatatatggataaagatgggtatttctggtttgttgcaagagcagatgatgtcatattatcctctggctatcgaattggaccatttgaggtagaaaatgccctgaatgaacacccttcagttgcagagtcagctgttgtcagcagcccagaccccatcagaggagaggtagtaaaggcttttgtcgttctaaatcctgattacaagtcacatgatcaagaacaactaataaaggagattcaggagcatgttaaaaaaactacagcaccttacaaatatcccagaaaggtagaatttattcaagagctgccaaagactatcagtgggaagacaaaaagaaatgaactgaggaagaaagaatggaagacaatttaaagttgtttcattaattaccatatctataaaacaaacatagtatctgtcaatctctagaaaccacaagatgatggagaggtcataaaaactgtggtagtatgcttagaaactgttgatttaaaatatcttgtggttatgatatcagaggctaaattttgaaataaaatatttggcaaattcctccaaaaaaaaaaaaaaaaaaaaaaaaaa

SEQ ID NO: 1467 - DNA, 4915 bp, Homo sapiens
gcggccgcggtgaagcgcggagggcggcgcgggcaccggggccgggccggggctgcagccgcagcggccatgggggccctgacgagccggcagcacgcgggcgtggaggaggtggacatcccgtctaattccgtgtaccgctacccgcccaagtccggaagctattttgccagccacttcattatgggaggagagaagtttgactcaactcatcctgaaggttacctgtttggagagaacagcgatctgaactttctggggaacagaccagttgtgtttccttacgccgccccacctccccaagaacccgtgaagactctgagaagcctggtcaatatccgaaaggacacactgaggctcgtcaaatgtgctgaggaagtgaagagccctggagaagaggccagtaaagctaaagtccactacaatgttgagttcacctttgacacagatgctcgggtagccatcaccatctattaccaggccacggaagagttccagaatggtattgccagctacattcccaaagacaacagcctccagtcggagactgtgcagtacaagcgaggagtgtgtcagcagttctgcctgccctcccacaccgtggatccctccgagtgggccgaagaggagcttggctttgatttagaccgagaagtttaccctctagtggtacatgccgtggtggatgaaggagacgagtattttggccattgccatgtactgctgggtacttttgagaagcacacagatggaactttctgtgtcaagcccctcaaacagaaacaagtagtagacggggtcagctacctccttcaggagatctatggaattgaaaacaagtacaacacacaagattctaaggtggctgaagacgaagtgagtgataacagtgccgagtgtgtggtgtgtctctcggatgtccgggacaccttgattctgccctgtcgccacctctgcctctgtaacacctgtgcagacacgctgcgctaccaggccaacaactgccccatctgccgactgcccttccgggcactgcttcagatccgagccatgaggaaaaaattgggccccttgtccccaaccagctttaaccccatcatctcatcccagacatctgactctgaagagcatccatcctcagagaatattccaccaggctatgaagtagtatctcttctggaggccctcaacgggcccctcaccccgtccccagcagttcctccacttcacgtgcttggagatggccacctctcaggaatgctcccttcatatggcagtgatggccacctgccccccgtcaggacgatctcgcctcttgaccgcctgtctgacagcagcagtcagggactcaaactcaaaaagagtctctccaaatccacttcccaaaactcttccgtgctgcatgaagaggaagatgagcattcctgcagcgagtcggagacacagctctctcagagaccgtcggttcagcatctcggagaggaatgtggtgtgactccagaaagtgagaatctcaccttgtcgtcatctggagctattgaccagtcgtcttgcacagggacgcctctgtcatccactatttcctccccagaaggccctgccagcagcagcttggcccagtctgtcatgtccatggcatcctcccagatcagcactgacaccgtctcctccatgtctggctcctacatcgcccctggcactgaagaggagggagaggctctctcttccccccagcctgccagcagggccccctcagaagaaggagaggggctgccagcggagtctccagacagcaactttgctggcctcccagctggagagcaggatgcagagggaaatgatgttatagaggaagaggatggatcacccacgcaggaaggccagaggacgtgcgcatttctaggtatggagtgtgacaataacaatgactttgacatcgcaagcgtgaaagcactggacaataagctgtgctctgaggtctgcttacctggtgcctggcaggctgatgacaatgccgtcagtcggaatgcccagcgccggcgcttgtcatccagcagcctggaggactctgagacgaggccctgtgtgtggggccctttggctgtctgagccccagcctctgcacttgggctcccctcctgccctgcattccatccatcctcactcagctgctgcctactgggcatcctcagcaagatgctggagactttttaccctcctgtgacagctgttacaacctgtaaccacaatccctcacctctcagagggaactggaaccctcctttctccgtgtgacctaaagccactcaatgaactgcagctcacgagaccttttgcagggactctggaatgtcctcacggtatattgatgttcaggtggagctggggtccatgggctaatttcttacacatcttttttctccttagggggtagaacaagaaggcttagagtttggcagctttgttacaaacatccctctggcatttcctggtctctggcacatcataaccaattggaaacctgcagtttggggtagggctggaggatcgctcctgtggaaagggagagccatactgcacggacgtagcgtttccctctacaagcactaggagcacctttctcaaggacaagaaatggtagcaaccaaaaggttggttgaaggaaacaatccttccttctggtggcagagccagtcttctgggcctcacatgcctgtgcggttaagaaggagctcttggccgggcgcggtggctcacgcctgtaatcccagcactttgggaggccgaggcgggtggatcatgagatcaggagatcgagaccatcctggctaacacggcgaaaccccgtctctactaaaaatacaaaaaattagctgggcatggttgcaggcgcctgtagtcccagctacttgggaggctgaggcaggagaatggcctgaacccgggaggcggagcttgcagtgagccgagatcgcgccaatgcactccagcctgggcgacagagaaaaaaaaaaaaaaagaaggagcccttgaatctgagaatcccccagttaagatgatttcccttaaggagcatttctcctgatcaggtgcattcagggaggcctgcaactccatcctaaggtgacatttcaagaaacacatgtgttgaccacctctgtgtgccaagcactgggtgaggagtggtcgtatattaccataattcatcctcactcaattgggaggtggcattcttgtccctgttgcccccatctctacccccttttgttaatggttgagagaaatgtggaccagtgattctcagtttggtgcccaggtccccaaaggaagtgatggagagccttgagctaagttcaggcagcagcatgtggccagcagcagtgtgctgggagcagaggttggaatcagggctcagggccttcacttcaagggccctccccagctactcgggaggctgaggcaggagaatcgcttgaactcaggaggtggaggttgcggtgagccaagatcgtgccactgcactccagcctgggctacaagattgaaaagatcgaaactctgtctcaaacaaaaaaaaaaaaattcaaggctgtttccaaggcagcctcaaaaagagcctggtgcccagggggtccttcgtttctgtgtggctgcagaggccaggagtgcagtgactgtctcactgcctagtggttgtggctcacatcctgccctgatggagaggggggcctgtcgtccaaccctctctgaaaaactgcagtagactttaccatttcaggccccacctaatgttctttccttccttccccctacattcttcccgcccctttcatagttaagatgcataagctgagcaataaccccacttcctgatttccctgaaatatgagcccagaagcagcaggtgacagggagcttcccttaccctggggtggtggcacacagaccacctcctgtcctgtcccctgcaggtagtattcacagtgtggtgttacctgggaggagggaggaaggagctgagatgaaggagattcaggtaaacagtagccacagtggccaggacccccttcctgaggatccctgtccttcctcgcagcaggtgcttagtcctctcctagggagaagcacggaaagattcctcaaggcctcagtcccatgtccaaggcatacctaggttagaaatgtcctttacttgtttctcagttactatttctcctcttcctccctccccctgccttctcttggctgtcatttagctctctggcccacagaaatactccatccaaggagctggtcctcagtcagcctgatgaggacaggtcagtggccaacccttttgccccagtccttcatctggagacagtcacatagtcacgtcaacagttcacccaaagagaagaggtggggcctggcttctcccacagggcacagcctaactatggagacccagggctccttcctgctgcactaggcctgtgctctccctattgccttcaggtggtgtgatcccggcttcctcacagagcccttttttccttctgcccagctccatcccaccagagtttctacccccgctgaggcatctcctgggcacagaccaccacactctaagccggctggcctgggagttagggtcctgcccacctcacctgggagttggggtcctgcccacctggagtttagcacgctggtcgctcactttgctttggtctgcacacctggtgtgtgcatgtgtatactgcttgtgccatctgtgtacccctctccctggagtacacttgtggtcacactacagtggggacatcaagaatgcaatatttatggattgctgcatgattcttaaaaatgaataaaactgtttacaagggaaggagagctaactgcaaagtgaaaaaaaaaaaaaaaaaaaaaaaaa

SEQ ID NO: 1468 - DNA, 3189 bp, Homo sapiens
attgcgcctgcgcagggagcccaaggcaagagccgctaggctgccctgcccgaagggctcaactgtcagtgagcctgcgcaggaggccaataggctgccaatactccttggactccccgccagggccctgctgtcagtgcgcctgcgcgcgggtccggcgccgaggttcttgactgctgtgccggacgccaggtgtagccatgcagcgagccgattccgagcagccctccaagcgtccccgttgcgatgacagcccgagaaccccctcaaacaccccttccgcagaggcagactggtccccgggcctggaactccatcccgactacaagacatggggtccggagcaggtgtgctccttcctcaggcgcggtggctttgaagagccggtgctgctgaagaacatccgagaaaatgaaatcacaggcgcattactgccttgtcttgatgagtctcgttttgaaaatcttggagtaagttccttgggggagaggaagaagctgcttagttatatccagcgattggttcaaatccacgttgatacaatgaaggtaattaatgatcctatccatggccacattgagctccaccctctcctcgtccgaatcattgatacacctcaatttcaacgtcttcgatacatcaaacagctgggaggtggttactatgtttttccaggagcttcacacaatcgatttgagcatagtctaggggtggggtatctagcaggatgtctagttcacgcactgggtgaaaaacaaccagagctgcagataagtgaacgagatgttctctgtgttcagattgctggactttgtcatgatctcggtcatgggccattttctcacatgtttgatggacgatttattccacttgctcgcccggaggtgaaatggacgcatgaacaaggctcagttatgatgtttgagcaccttattaattctaatggaattaagcctgtcatggaacaatatggtctcatccctgaagaagatatttgctttataaaggaacaaattgtaggaccacttgaatcacctgtcgaagattcattgtggccatataaagggcgtcctgaaaacaaaagcttcctttatgagatagtatctaataaaagaaatggcattgatgtggacaaatgggattattttgccagggactgccatcatcttggaatccaaaataattttgattacaagcgctttattaagtttgcccgtgtctgtgaagtagacaatgagttgcgtatttgtgctagagataaggaagttggaaatctgtatgacatgttccacactcgcaactctttacaccgtagagcttatcaacacaaagttggcaacattattgatacaatgattacagatgctttcctcaaagcagatgactacatagagattacaggtgctggaggaaaaaagtatcgcatttctacagcaattgacgacatggaagcctatactaagctgacagataacatttttctggagattttatactctactgatcccaaattgaaagacgcacgagagattttaaaacaaattgaataccgtaatctattcaagtatgtgggtgagacgcagccaacaggacaaataaagattaaaagggaggactatgaatctcttccaaaagaggttgccagtgctaaacccaaagtattgctagacgtgaaactgaaggctgaagattttatagtggatgttatcaacatggattatggaatgcaagaaaagaatccaattgatcatgttagcttctattgtaagactgcccccaacagagcaatcaggattactaaaaaccaggtttcacaacttctgccagagaaatttgcagagcagctgattcgagtatattgtaagaaggtggacagaaagagtttgtatgccgcaagacaatattttgttcagtggtgtgcagacagaaatttcaccaagccgcaggatggcgatgttatagccccactcataacacctcaaaaaaaggaatggaacgacagtacttcagtccaaaatccaactcgcctccgagaagcatccaaaagcagagtccagctttttaaagatgacccaatgtgaatgtctgtagtcagttgtttacaaactccctctcctgcacaattcatttagaggcttcaatcatagaattctgcaaattaatgacaactcatgctttaattttgtattttgaatgtacacgcatgctgaagctaagtaacttttaatcaaagaaataagatggtattaggcaaatcttactatactatgaaaagcattaccttgcctatttttaatattattaaagcctttctccttcagtagtctattttcttagaataacaactcttttatctattctgaactctattttttttcttttttaagagacaaggttttgctctgttgcccagcttggactcgaactttcctgggctcaagcgaccctcctgcctcagccccccaagtagctgggactaaagtcatgtgccaccacacccagcttactctgaacttttatgacagatgattgttttttgtttttaatgtagaaatgagacaagggtacaaattggaactagaaattgacattgtcattgacaaacatggctaaaaacaaaacatcaaatcctgcccccgtgaagagttccctgtcacctcaagtttgaggatagtcctctaagagtgacctaagcataagtgaaagacacctcccctcacccttctagccccctacaaggtgccaggttggggtaaagagttggagatgatggccaggagtggcctccaacacgctggtgagaggcctgattaggttttggggaagatctgagagctctggcctcttcgtgagtggaacataaagccgcctcttgttgggagatcctaccccagtgacagaggaatcccccaaactaggctgtgccctggctccgtggcggctccagacccgggtagtgcctttgtcccctgaatactcactcccccggtccagagggccttcccactgcccagcctggagaaggcctcccctgacctgctctctcagtatcctggagagctggccagaggccatcacaggcatcatcctcagagctcctcagacctgggactttgtttttgctggttcagtgcattttgtgtatttaagagcaaacactagccaggcgtggcggcgtgtgcctgtagt

SEQ ID NO: 1469 - DNA, 2529 bp, Homo sapiens
gacgtggctccgcggccccggcttcccccggcagctcagcgaccaatgggcgcgcgagcggggccgcccgcagcttcccagcccgaggcccaggcgcgcccctctgctccggctcggggcgggcactggcggagggactggccagtcccctcctccgcgccggccccaaccctgtcgctgccgccgcgctccgagtccccattcccgagctgccgctgttgtcgctcgctcagcgtctccctctcggccgccctctcctcgggacgatggcgcgcggtggccgcggccgccgcctggggttagccctggggctgctgctggcgctggtgctggcgccgcgggttctgcgggccaagcccacggtgcgcaaagagcgcgtggtgcggcccgactcggagctgggcgagcggccccctgaggacaaccagagcttccagtacgaccacgaggccttcctgggcaaggaggactccaagaccttcgaccagctcaccccggacgagagcaaggagaggctagggaagattgttgatcgaatcgacaatgatggggatggctttgtcactactgaggagctgaaaacctggatcaaacgggtgcagaaaagatacatctttgataatgtcgccaaagtctggaaggattatgatagggacaaggatgataaaatttcctgggaagaatacaaacaagccacctatggttactacctaggaaaccccgcagagtttcatgattcttcagatcatcacacctttaaaaagatgctgccacgtgatgagagaagattcaaagctgcagacctcaatggtgacctgacagctactcgggaggagttcactgcctttctgcatcctgaagagtttgaacatatgaaggaaattgtggttttggaaaccctggaggacatcgacaagaacggggatgggtttgtggatcaggatgagtatattgcggatatgttttcccatgaggagaatggccctgagccagactgggttttatcagaacgggagcagtttaacgaattccgggatctgaacaaggacgggaagttagacaaagatgagattcgccactggatcctccctcaagattatgatcatgcacaggctgaggccaggcatctggtatatgaatcagacaaaaacaaggatgagaagctaactaaagaggaaatattggagaactggaacatgtttgtcggaagccaagctaccaattacggggaagatctcacaaaaaatcatgatgagctttgatagacactcaccagaatatggcagactgtcataggcattctgttattgtcttggattgttgctacaattgtctaatttacagcagttgtgatcccacaaaaagcaagtttatacctcagattggggtataaaaattgtttttcgctcagtatttactggaaaatggacatcactagtctttcagtaagatttctctcaaaacacgtgaaaaccttggtaaattgcaattctttctggggatatattggtacaacatgacttaaaacttttttttttctattaaaacttaaaggggaacaaaacttgaaaaagccctgttcttcagaaggtgagtgggttgagggaggcagtaatatgaagtgactgctgtgtattttaactaccagattttttatatttgccactgttaaatagttggaaaggggaaattctgattaagcgaaagtggtatcatcctaggtaagcttatttcagaacaagtctaatatttcagattctttcttttcgactttatactctgagttattacttactgtaagtggtgtatatgaaacctccatgcattttccagtatggatctgctaatatgcacagtaaatccatgtctttgtttgtttttctattaaaaagcaatcaagaaagataatgtgaaaaagaaaggaatttagaggtagggaaaagatgaatgtcagacatttgaagaactatagtaaaatgataaacactaaatatacttgagaaaactttcttaatatgccaatgaggtaggcctgatctttgaaatagtgaataggaatacaatgcatttcctcagtgatcactgattagaatgagttggtgggatccttgggaagccaaacggagcggagttctggatcatgtcccatccagtccagtgaatccacgacccgcagacctgtccccccgcaacagcttataccatggaatgaggacaaggtgatactctgagctgtggactgaactggcagacacaacctgtacagattgaaatttcaccttgtaaggaggaagtgaatgaaataaaggatccccctaaggattttctactgtgtcctgtggtgtttgacttcacagatgctatttgtgacattattcatatagcataaaacagtggggttggatcccatgaataacattataaaggttctggggttttttttcatccaattactagaatgttcagaatagactcatatttactaatttaataaatgtatgtacttaatgcctttaaaaaaaaaaaaaa

SEQ ID NO: 1470 - DNA, 1256 bp, Homo sapiens; identical to SEQ ID NO: 696

SEQ ID NO: 1471 - DNA, 1206 bp, Homo sapiens
ctttgggcctcatcatttacaaaagaagcttgggcccctgacagcatgcatctcctcttatttcagctgctggtactcctgcctctaggaaagaccacacggcaccaggatggccgccagaatcagagttctctttcccccgtactcctgccaaggaatcaaagagagcttcccacaggcaaccatgaggaagctgaggagaagccagatctgtttgtcgcagtgccacaccttgtagccaccagccctgcaggggaaggccagaggcagagagagaagatgctgtccagatttggcaggttctggaagaagcctgagagagaaatgcatccatccagggactcagatagtgagcccttcccacctgggacccagtccctcatccagccgatagatggaatgaaaatggagaaatctcctcttcgggaagaagccaagaaattctggcaccacttcatgttcagaaaaactccggcttctcagggggtcatcttgcccatcaaaagccatgaagtacattgggagacctgcaggacagtgcccttcagccagactataacccacgaaggctgtgaaaaagtagttgttcagaacaacctttgctttgggaaatgcgggtctgttcattttcctggagccgcgcagcactcccatacctcctgctctcactgtttgcctgccaagttcaccacgatgcacttgccactgaactgcactgaactttcctccgtgatcaaggtggtgatgctggtggaggagtgccagtgcaaggtgaagacggagcatgaagatggacacatcctacatgctggctcccaggattcctttatcccaggagtttcagcttgaagagctatcccactattacctttgaaaagcaaaaccacaacagcaaagatgctgattattcagtctgaaaatgttaagtgggtacataacattttcagggaaaggtgacttgaaacgtagttttaaattagaacgatagaggaaatgatattagtctagttattggtacacgtttgagaccttgtctcagctctgccactaactagccgtagaatgttaagttgtaaaacctttctccatctaaagattttcatctataaatgacggacccgacctagatgattgctaaaatcctttccactactaatattccgtgatgcattttctccaagtttgggtaaaagccctccatctaaa

SEQ ID NO: 1472 - DNA, 782 bp, Homo sapiens; identical to SEQ ID NO: 601

SEQ ID NO: 1473 - DNA, 2086 bp, Homo sapiens
ataagggctggaggtgctgctttcaggcctggccagcccaccatgcacgcccactgcctgcccttccttctgcacgcctggtgggccctactccaggcgggtgctgcgacggtggccactgcgctcctgcgtacgcgggggcagccctcgtcgccatcccctctggcgtacatgctgagcctctaccgcgacccgctgccgagggcagacatcatccgcagcctacaggcagaagatgtggcagtggatgggcagaactggacgtttgcttttgacttctccttcctgagccaacaagaggatctggcatgggctgagctccggctgcagctgtccagccctgtggacctccccactgagggctcacttgccattgagattttccaccagccaaagcccgacacagagcaggcttcagacagctgcttagagcggtttcagatggacctattcactgtcactttgtcccaggtcaccttttccttgggcagcatggttttggaggtgaccaggcctctctccaagtggctgaagcaccctggggccctggagaagcagatgtccagggtagctggagagtgctggccgcggccccccacaccgcctgccaccaatgtgctccttatgctctactccaacctctcgcaggagcagaggcagctgggtgggtccaccttgctgtgggaagccgagagctcctggcgggcccaggagggacagctgtcctgggagtggggcaagaggcaccgtcgacatcacttgccagacagaagtcaactgtgtcggaaggtcaagttccaggtggacttcaacctgatcggatggggctcctggatcatctaccccaagcagtacaacgcctatcgctgtgagggcgagtgtcctaatcctgttggggaggagtttcatccgaccaaccatgcatacatccagagtctgctgaaacgttaccagccccaccgagtcccttccacttgttgtgccccagtgaagaccaagccgctgagcatgctgtatgtggataatggcagagtgctcctagatcaccataaagacatgatcgtggaagaatgtgggtgcctctgatgacatcctggagggagactggatttgcctgcactctggaaggctgggaaactcctggaagacatgataaccatctaatccagtaaggagaaacagagaggggcaaagttgctctgcccaccagaactgaagaggaggggctgcccactctgtaaatgaagggctcagtggagtctggccaagcacagaggctgctgtcaggaagagggaggaagaagcctgtgcagggggctggctggatgttctctttactgaaaagacagtggcaaggaaaagcacaagtgcatgagttctttactggattttttaaaaacctgtgaaccccccgaaactgtatgtgaaagttgagacatatgtgcatgtattttggaggtgggatgaagtcacctatagctttcatgtattctccaaagtagtctgtgtgtgacctgtccccctccccaaagattaaggatcactgtatagattaaaaagagtccgtcaatctcattgcctcaggctgggttgggggagccccacagctttctggctggccagtggcaatctactggccttgtccagaggctcactggagtggttctctgctaatgagctgtacaacaataaagccattgtctagttctcctgggccagctggtgcctgtgaaggcagaggcaggaactcatccaagaggaccggccatgttgggttacagaagacatccctgcgtcagtctgcttcggcagacacagcctgagtttgttaaagttggtgacaatccacctcagtctctcaatgtgtgctattaatgaggcctctgagcttcctatccagcagtggtgaaggccttgccctgggtggcaagatacttgctctatggtcacagctcagccactggaagctgtgcgacctcaggtgagcaattcactgtccagtctccacttgtaaaaggaacgctggtgaatcctaatgcattcatattaaatgtctgttgtcaggctcagaagagccatgagcttt

SEQ ID NO: 1474 - DNA, 3999 bp, Homo sapiens; identical to SEQ ID NO: 683

SEQ ID NO: 1475 - DNA, 3936 bp, Homo sapiens; identical to SEQ ID NO: 717

SEQ ID NO: 1476 - DNA, 8285 bp, Homo sapiens; identical to SEQ ID NO: 784

SEQ ID NO: 1477 - DNA, 3436 bp, Homo sapiens; identical to SEQ ID NO: 886

SEQ ID NO: 1478 - DNA, 699 bp, Homo sapiens
atggccacagccgagtcccgtgcgctccagtttgccgagggcgccgcgtttccagcgtaccgggccccccacgccggcggggcgctcctgccgcccccgagccctgcggcagccctgctccctgcgccgcccgcgggccccggcccagcgacctttgcgggcttcctcggccgggaccccgggccggccccgccgccccccgccagcctgggctcgcctgcgccccccaaaggcgcggccgccccgtcggcgtcgcagcgccgcaagcgcacgtctttcagcgccgaacagctgcagctgctggagctcgtcttccgccggacccggtaccccgacatccacttgcgcgagcgcctggccgcgctcaccctgctccccgagtccaggatccaggtatggttccagaacaggcgtgccaagtctcggcgtcagagtgggaaatccttccaacctttggctaggccggagattatcctcaaccactgtgctcctggaactgaaacgaaatgtctgaagccccagctgcctcttgaggtagatgtgaactgcctgcccgaaccaaacggggttggagggggcatctctgactctagctcccaaggtcagaattttgaaacctgttcccctctctctgaagacattggttcaaagctggactcatgggaggaacacatcttttctgcctttggtaacttttga

SEQ ID NO: 1479 - DNA, 2723 bp, Homo sapiens; identical to SEQ ID NO: 721

SEQ ID NO: 1480 - DNA, 2116 bp, Homo sapiens; identical to SEQ ID NO: 451

SEQ ID NO: 1481 - DNA, 4078 bp, Homo sapiens; identical to SEQ ID NO: 687

SEQ ID NO: 1482 - DNA, 3572 bp, Homo sapiens
atcgaagctaaagggctgacagaagggctgtagcggcaagtgtgcgccaacacagctgcacacgcccagacacctgaggcgctgagaggaacttccccgcgatccgccccggctgcacagagcctcttctccccgccggggccccgcccagcctcacttcttttaaaagcagcagccagcagcgcgccggtggcgtgcggctcgaaaggccgggaggacgtcatcgacgcgctgtcgagcctccagcccgcccgggtttccttcgcagtcgcgcaccgacgctcaaacgcgcgctccaacccgcagcctcctcctgcctcaccgcccgaagatggcggctctcaaactcctctcctccgggcttcggctctgcgcctctgcccgcggatctggggcaacctggtacaagggatgtgtttgttccttttccaccagtgctcatcgccataccaagttttatacagatccagtagaagctgtaaaagacatccctgatggtgccacggttttggttggtggttttgggctatgtggaattccagagaatcttatagatgctttactgaaaactggagtaaaaggactaactgcagtcagcaacaatgcaggggttgacaattttggtttggggcttttgcttcggtccaagcagataaaacgcatggtctcttcatatgtgggagaaaatgcagaatttgaacgacagtacttatctggtgaattagaagtggagctgacaccacagggcacacttgcagagaggatccgtgcaggcggggctggagttcctgcattttacaccccaacagggtatgggaccctggtacaagaaggaggatcgcccatcaaatacaacaaagatggcagtgttgccattgccagtaagccaagagaggtgagggagttcaatggtcagcactttattttggaggaagcaattacaggggattttgctttggtgaaagcctggaaggcggaccgagcaggaaacgtgattttcaggaaaagtgcaaggaatttcaacttgccaatgtgcaaagctgcagaaaccacagtggtagaggttgaagaaattgtggatattggagcatttgctccagaagacatccatattcctcagatttatgtacatcgccttataaagggagaaaaatatgagaaaagaattgagcgtttatcaatccggaaagagggagatggggaagccaaatctgctaaacctggagatgacgtaagggaacgaatcatcaagagggccgctcttgagtttgaggatggcatgtatgctaatttgggcataggaatccctctcctggccagcaattttatcagcccaaatataactgttcatcttcaaagtgaaaatggagttctgggtttgggtccatatccacgacaacatgaagctgatgcagatctcatcaatgcaggcaaggaaacagttactattcttccaggagcctcttttttctccagcgatgaatcatttgcaatgattagaggtggacacgtcgatctgacaatgctaggagcgatgcaggtttccaaatatggtgacctggctaactggatgatacctgggaagatggtgaaaggaatgggaggtgctatggatttagtgtccagtgcgaaaaccaaagtggtggtcaccatggagcattctgcaaagggaaatgcacataaaatcatggagaaatgtacattaccattgactggaaagcaatgtgtcaaccgcattattactgaaaaggctgtgtttgatgtggacaagaagaaagggttgactctgattgagctctgggaaggcctgacagtggatgacgtacagaagagtactgggtgtgattttgcagtttcaccaaaactcatgccaatgcagcagatcgcaaattgaaatatggatatttgtaccaggctgcgtgtttttcattttaaacacacaagatttaattgaaaggacatcaataatcataattgtgtatttaacaggtggttttttattagttttcttgtgtttcagactttatgcagccatataaactgttctctaggcatgctgtgacattttaataaaaagcaaaaggagcatttataattatctcatttgttaaggctgagaaggttgtttttataataggtaattatattgaatgcattttcactgaatatggtatgtatgctaaattatatgaacctttccccaagaagggccctagaaattgatgtggctttcctcttaaatattaattattagtcctgaaagaaagataacatatgtgatttttgtggttaggagagttgctgtcatgattgttttttcttcagcctcctctgacttttcttttggggcttcagattttatgattacatcttgtccccctagaacatcccccttcctcccatactgcttttaaacagatgcccaagaaggcaagcaggaatgcctcttgtgggggagggcagggagaaataactagttcaaaccaactatctatctatgctttgcaaagactaaggcgtattataggaagagggctagaaacctaactgattcttctcagttttctcattttaaaacagcccagtattcctttgtatcctcaagggtccttgagaatacttctgttattgagaccctgtgggctacttgtactgtacctcctctcaagccaagaagggctgtgggataatttaccatgaatccttagtagcaatgacagcagagttaaaaaataaaaggtgttttactttcaggctcttgttttggttcagaggagattttaaatattgaatgacacttctacagaacaacggtttttcttctgccaaggctacttcctttaacgaagtgcctttaattcagccttatccaactagggaaaataatgttggacaagtctaggatttgaagagtcagtgaacttttagtgtcagggaataaacatggtgggtagattaggtttgaaaaaaacttccttagaggtatttattctcaatacctgacaggggcccatgggaatgacttcagaagcatcccggataatagatgggtaaaaagtctaggcaccctgaagaacaggtgagacagctggcctctggacagaggtaggcatagtacagtacgatatatcattcctctggtcctaaatatacaaacttattcatgtttttaggtgatgatggtcattgaaactcacttcttttcaggtgtagctacaattgtgtaatgtacaatattagagaaaggacaggctttttatgagtaacacacaccatatataaaacagcctttctggctgaccacatggttaaatgcataccttcccagtactggggggaaaaaatgacccttcttagaatgtgcaagttccatgagagtaatatattgatatgattttgaaaagaattgttgatagttacatcttcaaacttatcattccagtatgcatctttaagataatgtgattctaagtagatgactttatattcttgattaaagagtgctatacatgttaagaaatgcattaaggaatacaataaatattctaaagtgatgtaaaaaaaaaaaaaaa

SEQ ID NO: 1483 - DNA, 3357 bp, Homo sapiens; identical to SEQ ID NO: 725

SEQ ID NO: 1484 - DNA, 2014 bp, Homo sapiens; identical to SEQ ID NO: 692

SEQ ID NO: 1485 - DNA, 1834 bp, Homo sapiens
ttgggaagggtttccagaaggtgggaaatgtcacctgattcacactgaacttttgaaagctccccacccccaaggagccgcgcacaccctcgctcgcggccgccctcccacagccccacacactgggagaccgcccaccgcaaaccgcggagacccccgtctagatttaaagcgcggctgcgcccggcttctgacgtccattgaatcgcgcgggcggccggcggcgagcgcggggctgcgccgggatcgctgcgccctccgccgctggcctctgcgacgcgcgccgctcgcccgagccacccgccgccgcgccggctccccgcgccgctgcgctcctcgccccgcgcctgcccccaggatggtccgcgcgaggcaccagccgggtgggctttgcctcctgctgctgctgctctgccagttcatggaggaccgcagtgcccaggctgggaactgctggctccgtcaagcgaagaacggccgctgccaggtcctgtacaagaccgaactgagcaaggaggagtgctgcagcaccggccggctgagcacctcgtggaccgaggaggacgtgaatgacaacacactcttcaagtggatgattttcaacgggggcgcccccaactgcatcccctgtaaagaaacgtgtgagaacgtggactgtggacctgggaaaaaatgccgaatgaacaagaagaacaaaccccgctgcgtctgcgccccggattgttccaacatcacctggaagggtccagtctgcgggctggatgggaaaacctaccgcaatgaatgtgcactcctaaaggcaagatgtaaagagcagccagaactggaagtccagtaccaaggcagatgtaaaaagacttgtcgggatgttttctgtccaggcagctccacatgtgtggtggaccagaccaataatgcctactgtgtgacctgtaatcggatttgcccagagcctgcttcctctgagcaatatctctgtgggaatgatggagtcacctactccagtgcctgccacctgagaaaggctacctgcctgctgggcagatctattggattagcctatgagggaaagtgtatcaaagcaaagtcctgtgaagatatccagtgcactggtgggaaaaaatgtttatgggatttcaaggttgggagaggccggtgttccctctgtgatgagctgtgccctgacagtaagtcggatgagcctgtctgtgccagtgacaatgccacttatgccagcgagtgtgccatgaaggaagctgcctgctcctcaggtgtgctactggaagtaaagcactccggatcttgcaactccatttcggaagacaccgaggaagaggaggaagatgaagaccaggactacagctttcctatatcttctattctagagtggtaaactctctataagtgttcagtgttgacatagcctttgtgcaaaaaaaaaaaaaaaaaaaaagaaaaagaaaaaaagaaaaatatattgtccatactgtaaataagtgtatgcttatttatttggggggaaaactatacattaaaggacctttgtcctaaagctctctcccaggccaccttgttactcattggacacggagaggcattcattgtgaggtctactggatgaggcccatagttgagacttgtagacatttatttatactgtgtcatgttttataatttatacataaaatgtctggttgactgtataccttgtttttgaagaaatttattcgtgaaaggaagagcagttgttatttattgtgaggtctcttgcttgtaaagtaaaagctttttttccttgtaaaccatttaagtccattccttactattcactcac

SEQ ID NO: 1486 - DNA, 3390 bp, Homo sapiens
agactctcaggttgatgcagtgttccctcccacaactctgacatgtatataaattctgagctctccaaagcccactgccagttctcttcggggactaactgcaacggagagactcaagatgattccctttttacccatgttttctctactattgctgcttattgttaaccctataaacgccaacaatcattatgacaagatcttggctcatagtcgtatcaggggtcgggaccaaggcccaaatgtctgtgcccttcaacagattttgggcaccaaaaagaaatacttcagcacttgtaagaactggtataaaaagtccatctgtggacagaaaacgactgtgttatatgaatgttgccctggttatatgagaatggaaggaatgaaaggctgcccagcagttttgcccattgaccatgtttatggcactctgggcatcgtgggagccaccacaacgcagcgctattctgacgcctcaaaactgagggaggagatcgagggaaagggatccttcacttactttgcaccgagtaatgaggcttgggacaacttggattctgatatccgtagaggtttggagagcaacgtgaatgttgaattactgaatgctttacatagtcacatgattaataagagaatgttgaccaaggacttaaaaaatggcatgattattccttcaatgtataacaatttggggcttttcattaaccattatcctaatggggttgtcactgttaattgtgctcgaatcatccatgggaaccagattgcaacaaatggtgttgtccatgtcattgaccgtgtgcttacacaaattggtacctcaattcaagacttcattgaagcagaagatgacctttcatcttttagagcagctgccatcacatcggacatattggaggcccttggaagagacggtcacttcacactctttgctcccaccaatgaggcttttgagaaacttccacgaggtgtcctagaaaggatcatgggagacaaagtggcttccgaagctcttatgaagtaccacatcttaaatactctccagtgttctgagtctattatgggaggagcagtctttgagacgctggaaggaaatacaattgagataggatgtgacggtgacagtataacagtaaatggaatcaaaatggtgaacaaaaaggatattgtgacaaataatggtgtgatccatttgattgatcaggtcctaattcctgattctgccaaacaagttattgagctggctggaaaacagcaaaccaccttcacggatcttgtggcccaattaggcttggcatctgctctgaggccagatggagaatacactttgctggcacctgtgaataatgcattttctgatgatactctcagcatggatcagcgcctccttaaattaattctgcagaatcacatattgaaagtaaaagttggccttaatgagctttacaacgggcaaatactggaaaccatcggaggcaaacagctcagagtcttcgtatatcgtacagctgtctgcattgaaaattcatgcatggagaaagggagtaagcaagggagaaacggtgcgattcacatattccgcgagatcatcaagccagcagagaaatccctccatgaaaagttaaaacaagataagcgctttagcaccttcctcagcctacttgaagctgcagacttgaaagagctcctgacacaacctggagactggacattatttgtgccaaccaatgatgcttttaagggaatgactagtgaagaaaaagaaattctgatacgggacaaaaatgctcttcaaaacatcattctttatcacctgacaccaggagttttcattggaaaaggatttgaacctggtgttactaacattttaaagaccacacaaggaagcaaaatctttctgaaagaagtaaatgatacacttctggtgaatgaattgaaatcaaaagaatctgacatcatgacaacaaatggtgtaattcatgttgtagataaactcctctatccagcagacacacctgttggaaatgatcaactgctggaaatacttaataaattaatcaaatacatccaaattaagtttgttcgtggtagcaccttcaaagaaatccccgtgactgtctatacaactaaaattataaccaaagttgtggaaccaaaaattaaagtgattgaaggcagtcttcagcctattatcaaaactgaaggacccacactaacaaaagtcaaaattgaaggtgaacctgaattcagactgattaaagaaggtgaaacaataactgaagtgatccatggagagccaattattaaaaaatacaccaaaatcattgatggagtgcctgtggaaataactgaaaaagagacacgagaagaacgaatcattacaggtcctgaaataaaatacactaggatttctactggaggtggagaaacagaagaaactctgaagaaattgttacaagaagaggtcaccaaggtcaccaaattcattgaaggtggtgatggtcatttatttgaagatgaagaaattaaaagactgcttcagggagacacacccgtgaggaagttgcaagccaacaaaaaagttcaaggatctagaagacgattaagggaaggtcgttctcagtgaaaatccaaaaaccagaaaaaaatgtttatacaaccctaagtcaataacctgaccttagaaaattgtgagagccaagttgacttcaggaactgaaacatcagcacaaagaagcaatcatcaaataattctgaacacaaatttaatatttttttttctgaatgagaaacatgagggaaattgtggagttagcctcctgtggtaaaggaattgaagaaaatataacaccttacaccctttttcatcttgacattaaaagttctggctaactttggaatccattagagaaaaatccttgtcaccagattcattacaattcaaatcgaagagttgtgaactgttatcccattgaaaagaccgagccttgtatgtatgttatggatacataaaatgcacgcaagccattatctctccatgggaagctaagttataaaaataggtgcttggtgtacaaaactttttatatcaaaaggctttgcacatttctatatgagtgggtttactggtaaattatgttattttttacaactaattttgtactctcagaatgtttgtcatatgcttcttgcaatgcatattttttaatctcaaacgtttcaataaaaccatttttcagatataaagagaattacttcaaattgagtaattcagaaaaactcaagatttaagttaaaaagtggtttggacttgggaacaggactttatacctcttttactgtaacaagtactcattaaaggaaattgaatgaaattaaaaaaaaaaa

SEQ ID NO: 1487 - DNA, 2492 bp, Homo sapiens; identical to SEQ ID NO: 679

SEQ ID NO: 1488 - DNA, 1245 bp, Homo sapiens; identical to SEQ ID NO: 786

SEQ ID NO: 1489 - DNA, 5816 bp, Homo sapiens
attataacagccaatgcagccgccatccacgcacaagcaaagaagcatgtcccatttaaatacacccacgcagccccagcgcccttagccgatcggggcgctcagcccacacgcaccgctgctcggggcttggagatccgcgcaggctgggctcccggacccggcggaccgacgcgcggaggatcgggatccggcgctgtggggctggggtgggcgggggaggctgggcccggggcctctggcgcgacacccgcatgaggacgcgagtgaaatagaccaaggtggaatttccaagggaaaagcttcggggtggttttggtccatttctccagcgaagaagtagacatggcgagcgactccccggctcgaagcctggatgaaatagatctctcggctctgagggaccccgcagggatctttgaattggtggaacttgttggaaatggaacatacgggcaagtttataagggtcgtcatgtcaaaacgggccagcttgcagccatcaaggttatggatgtcacaggggatgaagaggaagaaatcaaacaagaaattaacatgttgaagaaatattctcatcaccggaatattgctacatactatggtgcttttatcaaaaagaacccaccaggcatggatgaccaactttggttggtgatggagttttgtggtgctggctctgtcaccgacctgatcaagaacacaaaaggtaacacgttgaaagaggagtggattgcatacatctgcagggaaatcttacgggggctgagtcacctgcaccagcataaagtgattcatcgagatattaaagggcaaaatgtcttgctgactgaaaatgcagaagttaaactagtggactttggagtcagtgctcagcttgatcgaacagtgggcaggaggaatactttcattggaactccctactggatggcaccagaagttattgcctgtgatgaaaacccagatgccacatatgatttcaagagtgacttgtggtctttgggtatcaccgccattgaaatggcagaaggtgctccccctctctgtgacatgcaccccatgagagctctcttcctcatcccccggaacccagcgcctcggctgaagtctaagaagtggtcaaaaaaattccagtcatttattgagagctgcttggtaaagaatcacagccagcgaccagcaacagaacaattgatgaagcatccatttatacgagaccaacctaatgagcgacaggtccgcattcaactcaaggaccatattgatagaacaaagaagaagcgaggagaaaaagatgagacagagtatgagtacagtggaagtgaggaagaagaggaggagaatgactcaggagagcccagctccatcctgaatctgccaggggagtcgacgctgcggagggactttctgaggctgcagctggccaacaaggagcgttctgaggccctacggaggcagcagctggagcagcagcagcgggagaatgaggagcacaagcggcagctgctggccgagcgtcagaagcgcatcgaggagcagaaagagcagaggcggcggctggaggagcaacaaaggcgagagaaggagctgcggaagcagcaggagagggagcagcgccggcactatgaggagcagatgcgccgggaggaggagaggaggcgtgcggagcatgaacaggaatacatcaggcgacagttagaggaggagcagagacagttagagatcttgcagcagcagctactgcatgaacaagctctacttctggaatataagcgcaaacaattggaagaacagagacaagcagaaagactgcagaggcagctaaagcaagaaagagactacttagtttcccttcagcatcagcggcaggagcagaggcctgtggagaagaagccactgtaccattacaaagaaggaatgagtcctagtgagaagccagcatgggccaaggaggtagaagaacggtcaaggctcaaccggcaaagttcccctgccatgcctcacaaggttgccaacaggatatctgaccccaacctgcccccaaggtcggagtccttcagcattagtggagttcagcctgctcgaacaccccccatgctcagaccagtcgatccccagatcccacatctggtagctgtaaaatcccagggacctgccttgaccgcctcccagtcagtgcacgagcagcccacaaagggcctctctgggtttcaggaggctctgaacgtgacctcccaccgcgtggagatgccacgccagaactcagatcccacctcggaaaatcctcctctccccactcgcattgaaaagtttgaccgaagctcttggttacgacaggaagaagacattccaccaaaggtgcctcaaagaacaacttctatatccccagcattagccagaaagaattctcctgggaatggtagtgctctgggacccagactaggatctcaacccatcagagcaagcaaccctgatctccggagaactgagcccatcttggagagccccttgcagaggaccagcagtggcagttcctccagctccagcacccctagctcccagcccagctcccaaggaggctcccagcctggatcacaagcaggatccagtgaacgcaccagagttcgagccaacagtaagtcagaaggatcacctgtgctcccccatgagcctgccaaggtgaaaccagaagaatccagggacattacccggcccagtcgaccagctagctacaaaaaagctatagatgaggatctgacggcattagccaaagaactaagagaactccggattgaagaaacaaaccgcccaatgaagaaggtgactgattactcctcctccagtgaggagtcagaaagtagcgaggaagaggaggaagatggagagagcgagacccatgatgggacagtggctgtcagcgacatacccagactgataccaacaggagctccaggcagcaacgagcagtacaatgtgggaatggtggggacgcatgggctggagacctctcatgcggacagtttcagcggcagtatttcaagagaaggaaccttgatgattagagagacgtctggagagaagaagcgatctggccacagtgacagcaatggctttgctggccacatcaacctccctgacctggtgcagcagagccattctccagctggaaccccgactgagggactggggcgcgtctcaacccattcccaggagatggactctgggactgaatatggcatggggagcagcaccaaagcctccttcaccccctttgtggaccccagagtataccagacgtctcccactgatgaagatgaagaggatgaggaatcatcagccgcagctctgtttactagcgaacttcttaggcaagaacaggccaaactcaatgaagcaagaaagatttcggtggtaaatgtaaacccaaccaacattcggcctcatagcgacacaccagaaatcagaaaatacaagaaacgattcaactcagaaatactttgtgcagctctgtggggtgtaaaccttctggtggggactgaaaatggcctgatgcttttggaccgaagtgggcaaggcaaagtctataatctgatcaaccggaggcgatttcagcagatggatgtgctagagggactgaatgtccttgtgacaatttcaggaaagaagaataagctacgagtttactatctttcatggttaagaaacagaatactacataatgacccagaagtagaaaagaaacaaggctggatcactgttggggacttggaaggctgtatacattataaagttgttaaatatgaaaggatcaaatttttggtgattgccttaaagaatgctgtggaaatatatgcttgggctcctaaaccgtatcataaattcatggcatttaagtcttttgcagatctccagcacaagcctctgctagttgatctcacggtagaagaaggtcaaagattaaaggttatttttggttcacacactggtttccatgtaattgatgttgattcaggaaactcttatgatatctacataccatctcatattcagggcaatatcactcctcatgctattgtcatcttgcctaaaacagatggaatggaaatgcttgtttgctatgaggatgagggggtgtatgtaaacacctatggccggataactaaggatgtggtgctccaatggggagaaatgcccacgtctgtggcctacattcattccaatcagataatgggctggggcgagaaagctattgagatccggtcagtggaaacaggacatttggatggagtatttatgcataagcgagctcaaaggttaaagtttctatgtgaaagaaatgataaggtattttttgcatccgtgcgatctggaggaagtagccaagtgtttttcatgaccctcaacagaaattccatgatgaactggtaacagaagagcacttggcacttatcttcatggcgttatttctaatttaaaagaacataactcatgtggacttatgccagtctagaggcagaatcagaaggcttggttgaacatatcgctttccctttttcctctccctccgcccctcccagtacagtccatctttcaatgttgcagcctggttgagaaggagagaaaaaggtggcaggaatttccaggagatccccaagaatgctgccttgtctgtggacaaagatggaccatgtgcccttcggaattagggatagaaacaaatattgtgtgctcttaacgattaagctgtgttatggtgggttttcaggtttttaccttttttctttacccctttactctgcaagaatggggaaagaatgcatactgcgaaaatgagtcttttaaattctgtctgcctactagttttaagtatatggtatgttgtaaaatttccaatgatgagagacagcacaataaatgtaccttatctccttaggctgaaggccataactacatagtggagtaatttaagaactctcttgccttcaccaacccaaaaggttgctttttgatagcaactggctaatgaatttttaaaaagagaagaaaaatactagttttcccctcttttgggaaatagattttaaatggctaaactactagccttaaaactactagtctaataaaatcaactaccacttttgtgaatctgacaggccacatttttatatggccctttacagaatggagtgtgttgaacaggatactaacgccattgagttgagctggcctagcgatggagggacactctaacacaactttccctcagctattatgcaacagatcagggaaaaagatgggatgacagatggggtcagacagaaagagcttctgggaaacaagcttacatagtcttttttaaaatgcacaaagcctcccagctaagaggtcacttggtttgggcttcattaggactgagactttgttgagttctttctgggacttggagagtggatgatattcaggctctgaacattcccagcgctctcccgagggtgccactttctcaagatgaaaactgtgactgaaaaaattaataataaatgtttctgagctgcctgtgttctccctgtgtgggtgagagaagggactagactcctaagcctgcctcagatacaagaggcatcattggctccaattttagagaacttgaaagcaaggctttggacaaaattttgagaccctaatcactttaccttcctccaaattacccaacatacggtaaacaacatttgtgcagaagtatgtatgtatttagttcaggttgacttgtgtccttataaactcttactcaaatgatttgaactttaaaaaaaaaa

SEQ ID NO: 1490 - DNA, 5426 bp, Homo sapiens
atgtgcaaaggacttgcagctttgccccactcatgcctggaaagatggacttgccagtttcaaaagtttcctgaagtctgaattcagtgaggaaaaccttgagttctggattgcctgtgaggattacaagaagatcaagtcccctgccaagatggctgagaaggcaaagcaaatttatgaagaattcattcaaacggaggctcctaaagaggtgaatattgaccacttcactaaggacatcacaatgaagaacctggtggaaccttccctgagcagctttgacatggcccagaaaagaatccatgccctgatggaaaaggattctctgcctcgctttgtgcgctctgagttttatcaggagttaatcaagtagtaatttagccaggctatgaaatcatcctgtgagttatttcctccataataaccctgcatttcccattaatctacatatcttcccacagcagctttgctcagtgatacccacatgggaaaaatcccaggggatgttgcttactctttttgcccacactgctttggatacttatctactgtccgaaggccttctttccccactcaattcttcctgccctgttattaattaagatatcttcagcttgtagtcagacacaatcagaatcacagaaaaatcctgcctaaggcaaagaaatataagacaagactatgatatcaatgaatgtgggttaagtaatagatttccagctaaattggtctaaaaaagaatattaagtgtggacagacctatttcaaaggagcttaattgatctcacttgttttagttctgatccagggagatcacccctctaattatttctgaacttggttaataaaagtttataagatttttatgaagcagccactgtatgatattttaagcaaatatgttatttaaaatattgatccttcccttggaccaccttcatgttagttgggtattataaataagagatacaaccatgaatatattatgtttatacaaaatcaatctgaacacaattcataaagatttctcttttataccttcctcactggccccctccacctgcccatagtcaccaaattctgttttaaatcaatgacctaagatcaacaatgaagtattttataaatgtatttatgctgctagactgtgggtcaaatgtttccattttcaaattatttagaattcttatgagtttaaaatttgtaaatttctaaatccaatcatgtaaaatgaaactgttgctccattggagtagtctcccacctaaatatcaagatggctatatgctaaaaagagaaaatatggtcaagtctaaaatggctaattgtcctatgatgctattatcatagactaatgacatttatcttcaaaacaccaaattgtctttagaaaaattaatgtgattacaggtagaggccttctaggtgagacacttttaaggtacactgcattttgcaaaaaaaaaaaaaaaaagtaatcttttagcaaccccagtattccttcactatttcgcttcctgcattagcaaattttacttacagtcaaaagtgcagatttatactcctgacgtgtctcattcacagctaaataataggccataggacttttggtaggtttaaacttttaattctgtatttcatgattataagtcttgctagaattttttctaatctttagtagatttgattaaataatgattcacagaatttagtaacagaatcaaactaagccatgtatgagggtaatcgagatgaggatattaactcaaaagaaatagggtgatttttaaaggattaataaaattctgaaatgttaagtagaagattacattgtctagtcttgtatttcctccttctgttgctctctttcattcacacactctcagtttctcatatttgtagctcatttatttggttatttcctaagaatattgaaagtgaagcaactatgtgactgtattcttcaggtaaacactgactgcgcttgttggattttccctatttttgtgacttcaagaataatatgccctgctgaatacatgccatttcacattctgaaactgggtagagtggttgggtgttctgccaacaattgctagtggtgtgaattcattcatatttgccagtattgctcacttcaaagaaactccttcatcaagcagtccagagctaggccagatcaatgctacaatcatgaagttctcattgcatgcaattgtgtaggattgacaaggaactcagataaaaatttccagggtgcacttccagaaccagcttcaacatatgtctacattgcccccaagttaataaagtgccaaccctttactctctcatacagccagaaatgttagaaatccaaaatcttggtgcattattttttcataaacgctaaaacatttgaagaaacaatttaattatttaaaattcaagtattttattcacattatttgcaatatccaaatgtttaaaaattcccagataattaactagctattacagatctcacctagagggttgatgttatgaagactccagtggactgtactcacaaattgactggacaccctatgaaagtgggtagacctctcagcggaaaataagaagggcttttacctacagggcaggacagggtcccatgagagcagttctgtggagatataaaaagaatggaagaaggaatgccttatagtgatattgtgacattatatctatatatctacatatatctatctatctatatctacatctatataatcttacatttaaaattgtattcctacacatattagaaactcttctaataaatgaagtaaaaaaattaaaaagaatacaaatattccagccccaaatgagaaatcaaacatattaaaattgttcaagaaaatttctttgaacacttctgaaagtttttggaaacttagaaaagagggaaaaaaatccagtgttactagtaatttccatggtaatacagataaaatacattcttttaattctgggaaattagaaaaagtggggtgatctttccaggaaaaacatgtgtaacatctgcttatcactccagctccctcctcctcctcctctccacgttcccttgagtaaatgtctgggaaagcatgaagcttgatgcaagaaccctgttgtactggcgttttcctcccctgtgaaaacgtaactactgttgggagtgaattgaggatgtagaaaggtggtggaaccaaattgtggtcaatggaaataggagaatatggttctcactcttgagaaaaaaacctaagattagcccaggtagttgcctgtaacttcagtttttctgcctgggtttgatatagtttagggttggggttagattaagatctaaattacatcaggacaaagagacagactattaactccacagttaattaaggacgtatgttccatgtttatttgttaaagcagtgtgaatagccttcaagcatgtgaataatcttccatcttccccgccacacatacacacacacactttttgtttctttcaggtagacaccttttaaaatgcagaactaactgaggcatttcagtaactttgctttcaaatcaataaagtcaaatgtatggaaacattttgtgccctactctccataccccgtgtactcaaattctctactgtatgaattatgctttaagtagaattcagtgccaaggagaacttggtgaaataaattattttaattttttttttatcctttacaaagccatggattttatttggttgatgtgtgctctgtacacaagccatttcaataggatggagctgttaattattttccaaagagtaatagacatgcaaaagtttcaataaaaactgggccattaacaaataaattaataaactaataagcattcccttctaggtttttgccaaactgcctatccaataacaaatttgagaatcgttgtaaaagctagttatatttcagagaaatgattttcattattgaaactgttctccctagcaggccattttccctttttcctgggagtttagcaagtttaggagagaatagtcatgaaaagaaagggaagaaaggggagaagggaagaggttaaaaagtaagtgctcagacctatgaacgtaatccctttgctacaaatatttaagagcagctcagcttggttgaaactgagttttgtcatcttccatatttgcaggaaggtattttctgacttgcaatgcagctagatgtaaaattttattttatcatcctagaaagccttgactagaaaaatgaataaatattgagggtttcctgtccatatctggcttgcatgtgccagaaagcagagaatagaaaatgtaatctccaacatccaagcatcgaaacccaaggggtaggcaattctatgtaggttttggacatgaagtttggtgcatcttggtttatgctggctcaactgctattaaacctctctggcttatagtctcttcattctattagacaagcacgtatcgaacacttgcttcgcacaaggctctttagttaacaatttagcagctactgtttgtgttaaacacacttttcaccaaataggttctgaggcaaacgagagcaatgactatttaaagaaaggctttcccagcatcacttacacatcccaaaactaaaaagatcaactcttccaactgagaaaagactcctggctttgaatggaaacttacagcagagagtcacaggccacggcaacaacaacgacaacaacaaacatttggaatattattctcaactcacgttttaataatacatcttattatttttctagtagagaaactacaaatcagcctcttcaacatttatatacagtttaataagcctcttgcaagttacttgttctctcacctgaggtatttttttcctccccaccttgcccctgttcctcccttcctcttctccctttgcaagaggaaatatttaacatatttgggtccaacttcaataatgtaataattaatacattaaaagcatttaacttcctttctagaaaaatgcacaggctaaggcatagacaaaacaaagagaaatgctgagaaatttgccactggagacaagcaatctgaataaatatttgccaaaagttctttttatgtcatatagtgtcaggatttgaaggagctatttttttttaatgttgcaactagcaactcatcttcggaagacacagccaggagaatgaagtagaagtgaaaggtttataaatccatttgtaagcatttatcccatatattttaaattcaagaaaaattgtgtttatctttagaattttgtattcaatactttatgtactatgtgactcatgcttctggataaataaagcaccaaatatgtatctgtaaccacaatcacacatattatattaaatatatatctatataacagccaaaaaaaaaa

SEQ ID NO: 1491 - DNA, 3936 bp, Homo sapiens; identical to SEQ ID NO: 717

SEQ ID NO: 1492 - DNA, 4594 bp, Homo sapiens
gagatcgagagcgaacgaggcagccgccggcggagaggagggagcgggcgagggccgggcaggaggagcgggcgcggcgcgggcgaggctgggacccgagcgcgctcacttcgccgcaaagtgccaacttcccctggagtgccgggcgcgcaccgtccgggcgcgggggaaagaaaggcagcgggaatttgagatttttgggaagaaagtcggatttcccccgtccccttccccctgttactaatcctcattaaaaagaaaaacaacagtaactgcaaacttgctaccatcccgtacgtcccccactcctggcaccatgaaggcggccgtcgatctcaagccgactctcaccatcatcaagacggaaaaagtcgatctggagcttttcccctccccgggtaaactcgggggccaggactcttttgaaagcatagagagctacgatagttgtgatcgcctcacccagtcctggagcagccagtcatctttcaacagcctgcagcgtgttccctcctatgacagcttcgactcagaggactatccggctgccctgcccaaccacaagcccaagggcaccttcaaggactatgtgcgggaccgtgctgacctcaataaggacaagcctgtcattcctgctgctgccctagctggctacacaggcagtggaccaatccagctatggcagtttcttctggaattactcactgataaatcctgtcagtcttttatcagctggacaggagatggctgggaattcaaactttctgacccagatgaggtggccaggagatggggaaagaggaaaaacaaacctaagatgaattatgagaaactgagccgtggcctacgctactattacgacaaaaacatcatccacaagacagcggggaaacgctacgtgtaccgctttgtgtgtgacctgcagagcctgctggggtacacccctgaggagctgcacgccatgctggacgtcaagccagatgccgacgagtgatggcactgaaggggctggggaaaccctgctgagaccttccaaggacagccgtgttggttggactctgaattttgaattgttattctattttttattttccagaactcattttttaccttcaggggtgggagctaagtcagttgcagctgtaatcaattgtgcgcagttgggaaaggaaagccaggacttgtggggtgggtgggaccagaaattcttgagcaaattttcaggagagggagaagggccttctcagaagcttgaaggctctggcttaacagagaaagagactaatgtgtccaatcatttttaaaaatcatccatgaaaaagtgtcttgagttgtggacccattagcaagtgacattgtcacatcagaactcatgaaactgatgtaaggcaattaatttgcttctgtttttaggtctgggagggcaaaaaagaggtgggtgggatgaaacatgttttggggggggatgcactgaaaatctgagaactatttacctatcactctagttttgaagcaaagatggacttcagtggggaggggccaaaaccgttgttgtgttaaaatttattttattaaattttgtgccagtattttttttcttaaaaatcgtcttaagctctaaggtggtctcagtattgcaatatcatgtaagtttgtttttatttgccggctgaggattctgtcacaatgaaagaaaactgtttatatagaccccattggaaaagcaaaacgctctcactgagatcagggatcccaaattcatgggacttatataagaaggacaattaatgctgatttgggtacaggggaattatgtgtgtgaatgtcatctacaattaaaaaaaattagcacatccctttacttacttgttatcagtggattctcggggtttggacttaatgttgagctaagaagcattaagtctttgaactgaatgtattttgcatccctggttttggacgacagtaaacgtaggagcactgttgaagtcctggaagggagatcgaaggaggaagattgacttggttctttcttagtcctatatctgtagcatagatgacttggaataaaagctgtatgcatgggcattacccctcaggtcctaagaaataagtcctgaatgcatgtcgttccaaactaacactctgtaatttttcttttatgtcttattttccaagagtcctccattttttgcaccccctcaccgccaactctgttattcagtagagagaagtgtacggctttctgattggtgagtgaaaaagtaacttgagacacgacctaagttgaagagtttagacttgctgagttttagaagtgatggaaattaagagagcatttcaataaaatgtgacttggctgtctttggaagagaagtgcaaggctttcctttgaagaatttaaattagtccggtaggatgtcaggtgagactgtgtatgcaaaatgaatggcacaggtgatgccagggcctcttgcttgggtctgatgtcttggcacagggtaagtgaaggttaattccagaagagaggaatgacttgaaggcaaaggaaactaaggaaggaggttcagtgaggaaaataaggttgtccatgagatttgaatagatttttagttcccccaaggtttaaatacaaacatagtcaagcaaggtagtcatctttctgctggttgtgagggggaatctgaaaatggagttttagaggaaaagtcaacatctaactagtgaggaaaagtgcctaatacaattagaatctccctcactctatagttgcccagttgaaaggataaggaggaggggtggcttttatggacttccatgagagaaggaaagaaatatttcaggtaagcttctcagggctggccctttttgggatttggatgagaaattggaagtactaactactttctagcatatctttaagaaaattgattgttatttactcccagatcctcttgcagacccagaattatcaggaacatagctctgtgattcatgagtgtccccatactgatgaattggagcatccatatggaaagcaaaggcagaattatcccagctgtattattttgatcttttggatgcaggtgccttaatgaagctctcaaaatattttaggagctgctcagggagtgttgggtggaactgtttggactacattgttttctcttagattatgtgatttttgttgggcactggcaaaaggtgtgtgtgtgaatgtgtgcatgtgtgtgaatgttgtgtgtgtgtgtgtgtgtgtgtgtgtgtgtgtgtgtgtgtgtgtttgcagacatgcaaaactgcagctgaaataataccttagatttctaggtaagtctttccacatttcaataatgggtaagagtagaaccagggccgggtatcaattattgcttgctgtttgcaaccaggcataaaatcactttctcaaatcatccaccgttcctattaaatttatgccggaaactctccttctgtgagtataactcctgcagttcctatagcagataagatataagaaagtgcctcctagtgctcctccgcccgcttgtttgctaaaattccctttctctctaagtccaccattttcaagatttgtagatagtgtattagttaagacagctttgtcgatctggccagatgttttttctcctttgtccaaaggccagagaccatcccaggaagagtggtgggtggtttatacactggaaatgttgcgtttatgctttttaaaaacacacgttaacttcagaggaaggatgggcaaatctggtctagctgggtgaaacccttattttcccagagatgccttaacctttgttggttttggctttagggttcagagtcacttttgttcccttctccattctggagagggacttcccctacatagagccctgatttttgtggctgtggggattggaggtagcattcaaagatcagatgtgcttttcctcactttggagatgaacactctgggttttacagcattaacctgcctaaccttcatggtgagaaatacaccatctctcttctagtcatgctgtgcatgccgcttactctgttggggtctatataaatttgttgaactcttacctacattccaaagaagtttcaaggaaccataaatatatgtatacatatacatatataaaatatatatattaaaataaaattatcaggaatactgcctcagttattgaacttttttttttaagaatactttttttttaagctgagaagtatagggatgaaaaagatgttatattgtgtttgactattttccaacttgtattttcatataatttatattttttaaaagctgaaaatttagaagcaagatgaaaaaaaggaaaagcaggtgctttttaaaaatcagaactgaggtagcttagagatgtagcgatgtaagtgtcgatgtttttttaaaaaaaaatgcaaaaaaattcttatggcggagttttttgtttgtttattttagtagctgatgctggcacatcattttgctggagagttttttatatactgtagcctgatttcatattgtattttaaactgtgtgaaattaaaaacaaagaatttcattcataatgct

SEQ ID NO: 1493 - DNA, 2404 bp, Homo sapiens; identical to SEQ ID NO: 760

SEQ ID NO: 1494 - DNA, 1798 bp, Homo sapiens
ctctccccgcccccgcggggcggcgcgcactcacccacccgcgccggagcggacctttggcttggcttgtcagggcttgtccaggagttccgctcctctctccaaccggggtccccctccagcgaccctaaagcttcccagacttccgcttcaattcctgtccgcaccccacgcccacctcaacgtggagcgcagtggtctccgaggagcgccggagctgccccgcctgcccagcggggtcagcacttcgcatcaaggcccaagaaaagcaagtcctccagcgttctgagcacccgggcctgagggaaggtcctaacagcccccgggagccagtctccaacgcctcccgcagcagcccgccgctcccaggtgcccgcgtgcgccgctgccgccgcaatcccgcacgcgtcccgcgcccgccccactttgcctatccccgggactaagacgggaatcctgtgaagcagctccagctatgtgtgaagaagaggacagcactgccttggtgtgtgacaatggctctgggctctgtaaggccggctttgctggggacgatgctcccagggctgttttcccatccattgtgggacgtcccagacatcagggggtgatggtgggaatgggacaaaaagacagctacgtgggtgacgaagcacagagcaaaagaggaatcctgaccctgaagtacccgatagaacatggcatcatcaccaactgggacgacatggaaaagatctggcaccactctttctacaatgagcttcgtgttgcccctgaagagcatcccaccctgctcacggaggcacccctgaaccccaaggccaaccgggagaaaatgactcaaattatgtttgagactttcaatgtcccagccatgtatgtggctatccaggcggtgctgtctctctatgcctctggacgcacaactggcatcgtgctggactctggagatggtgtcacccacaatgtccccatctatgagggctatgccttgccccatgccatcatgcgtctggatctggctggccgagatctcactgactacctcatgaagatcctgactgagcgtggctattccttcgttactactgctgagcgtgagattgtccgggacatcaaggagaaactgtgttatgtagctctggactttgaaaatgagatggccactgccgcatcctcatcctcccttgagaagagttacgagttgcctgatgggcaagtgatcaccatcggaaatgaacgtttccgctgcccagagaccctgttccagccatccttcatcgggatggagtctgctggcatccatgaaaccacctacaacagcatcatgaagtgtgatattgacatcaggaaggacctctatgctaacaatgtcctatcagggggcaccactatgtaccctggcattgccgaccgaatgcagaaggagatcacggccctagcacccagcaccatgaagatcaagatcattgcccctccggagcgcaaatactctgtctggatcggtggctccatcctggcctctctgtccaccttccagcagatgtggatcagcaaacaggaatacgatgaagccgggccttccattgtccaccgcaaatgcttctaaaacactttcctgctcctctctgtctctagcacacaactgtgaatgtcctgtggaattatgccttcagttcttttccaaatcattcctagccaaagctctgactcgttacctatgtgttttttaataaatctgaaataggctactggtaaaaaaaaaaaaaaaaaaaaaaaaaaaaaaaaaaaaaaaaaa

SEQ ID NO: 1495 - DNA, 5672 bp, Homo sapiens
aagcaccactgcagcagaccttgttaattttttttttttttctttccacacaacagttgtgcctcattatccggtgcctggctcggaatttttttttttttttttctttttggagggtttgaagtttctgtgcttcagtgactgttacagaagaagaggtgttagtgttgccatgaggtcttgattgtctgcatttatgaatgaaactgacctaaatcacctgttacctccagtttccagattgtttgaacttctctggccgcacaatacaggaaggaagactaaagcagcaaagggacctacagcgtctgcagcatgggctggttaactaggattgtctgtcttttctggggagtattacttacagcaagagcaaactatcagaatgggaagaacaatgtgccaaggctgaaattatcctacaaagaaatgttggaatccaacaatgtgatcactttcaatggcttggccaacagctccagttatcataccttccttttggatgaggaacggagtaggctgtatgttggagcaaaggatcacatattttcattcgacctggttaatatcaaggattttcaaaagattgtgtggccagtatcttacaccagaagagatgaatgcaagtgggctggaaaagacatcctgaaagaatgtgctaatttcatcaaggtacttaaggcatataatcagactcacttgtacgcctgtggaacgggggcttttcatccaatttgcacctacattgaaattggacatcatcctgaggacaatatttttaagctggagaactcacattttgaaaacggccgtgggaagagtccatatgaccctaagctgctgacagcatcccttttaatagatggagaattatactctggaactgcagctgattttatggggcgagactttgctatcttccgaactcttgggcaccaccacccaatcaggacagagcagcatgattccaggtggctcaatgatccaaagttcattagtgcccacctcatctcagagagtgacaatcctgaagatgacaaagtatactttttcttccgtgaaaatgcaatagatggagaacactctggaaaagctactcacgctagaataggtcagatatgcaagaatgactttggagggcacagaagtctggtgaataaatggacaacattcctcaaagctcgtctgatttgctcagtgccaggtccaaatggcattgacactcattttgatgaactgcaggatgtattcctaatgaactttaaagatcctaaaaatccagttgtatatggagtgtttacgacttccagtaacattttcaagggatcagccgtgtgtatgtatagcatgagtgatgtgagaagggtgttccttggtccatatgcccacagggatggacccaactatcaatgggtgccttatcaaggaagagtcccctatccacggccaggaacttgtcccagcaaaacatttggtggttttgactctacaaaggaccttcctgatgatgttataacctttgcaagaagtcatccagccatgtacaatccagtgtttcctatgaacaatcgcccaatagtgatcaaaacggatgtaaattatcaatttacacaaattgtcgtagaccgagtggatgcagaagatggacagtatgatgttatgtttatcggaacagatgttgggaccgttcttaaagtagtttcaattcctaaggagacttggtatgatttagaagaggttctgctggaagaaatgacagtttttcgggaaccgactgctatttcagcaatggagctttccactaagcagcaacaactatatattggttcaacggctggggttgcccagctccctttacaccggtgtgatatttacgggaaagcgtgtgctgagtgttgcctcgcccgagacccttactgtgcttgggatggttctgcatgttctcgctattttcccactgcaaagagacgcacaagacgacaagatataagaaatggagacccactgactcactgttcagacttacaccatgataatcaccatggccacagccctgaagagagaatcatctatggtgtagagaatagtagcacatttttggaatgcagtccgaagtcgcagagagcgctggtctattggcaattccagaggcgaaatgaagagcgaaaagaagagatcagagtggatgatcatatcatcaggacagatcaaggccttctgctacgtagtctacaacagaaggattcaggcaattacctctgccatgcggtggaacatgggttcatacaaactcttcttaaggtaaccctggaagtcattgacacagagcatttggaagaacttcttcataaagatgatgatggagatggctctaagaccaaagaaatgtccaatagcatgacacctagccagaaggtctggtacagagacttcatgcagctcatcaaccaccccaatctcaacacaatggatgagttctgtgaacaagtttggaaaagggaccgaaaacaacgtcggcaaaggccaggacataccccagggaacagtaacaaatggaagcacttacaagaaaataagaaaggtagaaacaggaggacccacgaatttgagagggcacccaggagtgtctgagctgcattacctctagaaacctcaaacaagtagaaacttgcctagacaataactggaaaaacaaatgcaatatacatgaacttttttcatggcattatgtggatgtttacaatggtgggaaattcagctgagttccaccaattataaattaaatccatgagtaactttcctaataggctttttttcctaataccaccacctaacagagaacacaggtgaatgcagatgttcactttagcagacttaatgtttcctatgagatttcactgtacaggtttgtctttcttctttgcctgagaaataaaaatgtcatttgccatattgccatctaaaggagaaaaactgcatcagcaaagccattgtattgaactaaaagtttaaaatgaactgcatggatttactaagctgatgaatattccaaaacgtggttggattcaaggatatattttgtctaccggccctcatgtttgtatgtacttgaggagtaaaatgagtaaaatgatactgaatgaaatgttctgtggaaatattaaaaaaaaaaaaaaacataagccatccatcatccagaagaaaaatggaatacactgatctactactgatgtcttctttcagctttgatctaaagatgtattttattaaaactataatttaaatgtaccatgaaaaatatgcagtaaaaattagttgttttctaagctagagtaggatttgtcttacaattattgtgctatgtagtttttgttttaaaaattccaatggtgtgctgctttctttggacattttattttcaattctataagagggatagatgacattgttctagaaacacatatacatcattaagagtgaatctctaaaaccaggatataaattatgctttatttctctgagaaaatcaaacaaatggaagctgttcacacctccccttctttaagcattatctaaattaatttttacttgcataatgttcttagaaaaaaaaacagaacatttaagcaggaaaaaaggaagaaacaagttgatttttaagtgcattttactataatgaatcaatgaagggaaaaggaactgcatatttcatgaaaataataagcattgtcttaatatactgttaatagaaaatgtgtcttaattccgtgcttgaatccctgcatgatatttgagactaagatctctcttatgattctaccaagaattatatctgtgtcacttaatttttttaaaagagagagatcaataactattcagagcaacatgttaaaggcaaagtttccaatcatttacatctgtatcaggtgcctcttacctttccttatttaagacaattatttgtacaagaaacacatgactcttttcatatcaatgggagggacttttctacaaagtattttccaggatgcaacccacatttaaacaatgtaaaattctttgtttcctgcaacaacttacaaaataaggtaaaagactaaaattcaagatttgcttccttcattgtcctaagacgattcgttgagaatcactgactttgagatatttaaaactttcagcattatactgtggtttcttttgcactgcactcacctattcaggactcctcccccaggttcctcatcatgcacaaaaatgcaaagaaaacatcttattagtaattaatgaagcaacattgaaattctaactctagctgtctttggattctaattaactcagcatcaatttctcacctcagactacagtgaatttttatttcctatcagctgaaatatttcacagatggaagctcatgtttcagttttaatgactgccttgaataaacaagttgttgccacttgtttcaaacaaaagcctaaaaataatctacattcaattttaggctccattgactaatatggtgttgcttttggaagtactgtatatcctcacatggaagccaaattgttaaattatttgaaggacacaccactgtacagaaagtagtgtttcaaatataaatcgaagaacaaagagtgctccaaaaaataggtcattcttttattttcataaagtatctaaactgtactaacattcagtgttgtgtttcattctaaatttgcagctgaaataaatttatttgcgatagcagaaatatcttattattcatcctcagaaataaaggatttgaagggatagagattatatgataaatttatagaagactttcagaatttgaatgcattttgtttagtgttatgaaatgacaatagaaaaaagtctcgacttcaattaaaagttacacaaacaaacaaatctacaggcatgtctttatataccatcaggtctaagttttcaaagaaaattgtagatataacttgcagataactcattacagtcataatctctgcccatgtgtattgagagggggcagtttgcacgaaaaagaattattggcccatttaataattcagctttaaatagactttgtcatatgcatgaatcatcagagatgaaactgtttgagagactcatgtgaccttacgaaaattacaacagcagtcttaaagtatgaaaaagatgcatcacagcagagacattatggcccagttgatatcaaatgtaaaatgtaaatgcatgtaaatgcacacttcattttatgtattatttagtaatttgcagtggtatgtgtttaatatttttgctacctacacattaggcaaaaaaaagatgtaaataatttgggagaaaaagaggaagaacagtgtaaaataaaactttctataagtactccatttcaatgtgttcaacatcatcctaaaaggcaagattttcccacgcaggtgacaaggtggtttatgtactatttaagggcggaaggtgcgtgcccgttcaataagcatgttttttgccaggtaggaaatatgttccatatctttacttatcattgcatttcagatgggaactagaaaaactggagagaaaaatgtaatgaaactgctgctgtaaattattccttttagcatgtattcacttgctaaatacacatttcttcaaaataaaaaaaaaaaaaa

SEQ ID NO: 1496 - DNA, 3877 bp, Homo sapiens; identical to SEQ ID NO: 703

SEQ ID NO: 1497 - DNA, 1399 bp, Homo sapiens; identical to SEQ ID NO: 676

SEQ ID NO: 1498 - DNA, 8087 bp, Homo sapiens; identical to SEQ ID NO: 712

SEQ ID NO: 1499 - DNA, 5460 bp, Homo sapiens
gggcttcgctcgccgcctcgcgccgagactagaagcgctgcgggaagcagggacagtggagagggcgctgcgctcgggctacccaatgcgtggactatctgccgccgctgttcgtgcaatatgctggagctccagaacagctaaacggagtcgccacaccactgtttgtgctggatcgcagcgctgcctttccttatgaagaagacacaaacttggattctcacttgcatttatcttcagctgctcctatttaatcctctcgtcaaaactgaagggatctgcaggaatcgtgtgactaataatgtaaaagacgtcactaaattggtggcaaatcttccaaaagactacatgataaccctcaaatatgtccccgggatggatgttttgccaagtcattgttggataagcgagatggtagtacaattgtcagacagcttgactgatcttctggacaagttttcaaatatttctgaaggcttgagtaattattccatcatagacaaacttgtgaatatagtggatgaccttgtggagtgcgtgaaagaaaactcatctaaggatctaaaaaaatcattcaagagcccagaacccaggctctttactcctgaagaattctttagaatttttaatagatccattgatgccttcaaggactttgtagtggcatctgaaactagtgattgtgtggtttcttcaacattaagtcctgagaaagattccagagtcagtgtcacaaaaccatttatgttaccccctgttgcagccagctcccttaggaatgacagcagtagcagtaataggaaggccaaaaatccccctggagactccagcctacactgggcagccatggcattgccagcattgttttctcttataattggctttgcttttggagccttatactggaagaagagacagccaagtcttacaagggcagttgaaaatatacaaattaatgaagaggataatgagataagtatgttgcaagagaaagagagagagtttcaagaagtgtaattgtggcttgtatcaacactgttactttcgtacattggctggtaacagttcatgtttgcttcataaatgaagcagctttaaacaaattcatattctgtctggagtgacagaccacatctttatctgttcttgctacccatgactttatatggatgattcagaaattggaacagaatgttttactgtgaaactggcactgaattaatcatctataaagaagaacttgcatggagcaggactctattttaaggactgcgggacttgggtctcatttagaacttgcagctgatgttggaagagaaagcacgtgtctcagactgcatgtaccatttgcatggctccagaaatgtctaaatgctgaaaaaacacctagctttattcttcagatacaaactgcagcctgtagttatcctggtctctgcaagtagatttcagcttggatagtgagggtaacaatttttctcaaagggatctggaaaaaatgtttaaaactcagtagtgtcagccactgtacagtgtagaaagcagtgggaactgtgattggatttggcaacatgtcagctttatagttgccgattagtgatatgggtctgatttcgatctcttcctgatgtaaaccatgctcacccatatcccactatacaaatgcaaatggttgcctggttccatttatgcaagggagccagtactgaattatgccttggcagaggggagactccaaaagagtcatcgcaggaagaagttaagaacactgaacatcagaacagtctgccaagaaggacattggcatcctgggaaagtccgccttttcccttgaccactatagggtgtataaatcgtgtttgcaaaatgtgttatgatgtgtttatattctaaaactattacagagctatgtaaagggacttaggagaaaatgctgaatgtaagatggtcccatttcaatttccaccatgggagagcctaaaaataaattatgacatttagtatctaaggttagaaaaccacgcccacatgctaatatgggtgttgaaaactaggttacttataatgcaaggaatcaggaaactttagttatttatagtataatcaccattatctgtttaaaggatccatttagttaaaatcgggcactctatattcattaaggtttatgaattaaaaagaaagctttatgtagttatgcatgtcagtttgctatttaaaatgtgtgacagtgtttgtcatattaagagtgaatttggcaggaattcccaagatggacattgtgcttttaaactagaacttgtaagacattatgtgaatatcccttgccaattttttttataataagaaaacatctgactaaagtcaaagaatgatttcttatggtttattttgatgaaagttcttttaacatgtcttgaatgtacacataaaggaatccaaagctttccattctaacttaatctttgtgataacattattgccatgttctacaaccgtaagatgacagttttcaatgtagtgacacaaaagggcatgaaaaactaactgctagctttcctttcatttcaaaagtccaagaatttctagtatatttggattttagcttctgttcaaagcaaatccagatgcaactccagtaagtggcctttgctcttttttgtaccaaagagcccagatgattcctacagtccctttcttctctaacatgctgtggttccttaaatatgagtaatttctctaagatataacccaggtgctttgagaagctgcattaaggtgttcaggccctcagatatcacatggtacacttgattagtaataaaaccagagatcaatttaaattgctgataggtcctgtctcagtgtgtggcattgactgttttcaggaaaatagatacagattaatatgagttatgcgtgtaggttgtgtatagattgagaagatagatacttctcaatctagtagtttgatttatttaaccaatggtttcagtttgcttgagcatatgaaaatcctgcttaatgtgcttaagagtataataaatgtgtacttttgtcctcaaacctagtagctgggttttaacactcatggacatggtcttaatcaatggagttaaataaacaaattcagcaagttattaaatctgacatggtaggagaggggagatgtgtcctgcttattaaatgtgttggtccattgaaagttacatggattgccaatttttaaaacactaaagttgaataaaatgcatgaacaatagaaaaatgctgaacattattttggatgctagctgcttggacattaactgtgttatttctgctttgagatgaaaatatatatttatctttgcttattttatcccagatgtgttctgaatatccttcttcataaatcatggaaaactcactgctgagatagtaaaccatgaaatcgccttttcagttggtgccatgtatctgacagttccatcttggaaggtttcaaaattaccttttaaaatgatctcagaagtctgtagattctcaatgatactgaaagctttgcacctctttggtagaaaccaggtctatttagaaaatggctttatgataaatgttgcctcctgagtgataatgaagtgttcctggatattgtattgtaatttaatgtgcttaccacactgccacattttaatgagtcagagaaaaattaatttttcttcaatacaataatagaacaagtagcctattctcttaaaaagtatgtgaaaagaaaattatgaaaaaatatgcatacctaatgaagtattggttttagtaagaattaaatacatttcattgagctttaaagtactttggagaaactttggggcacgttttcctactctaattcaactaaagttataaataaagagaaaaactcattcagaaatcatggattttaaaaatattttactgcagccaagttttcatttcaaaatgtaatttcagtttggagcttttaggcattatgtatatttaaaaaatatattcttcaaaaatgcattttggcatggtgggatggatgttgcaaaagatatccggagcctccagtctgtcattaactgatatggtaaatcacctctcttctttgggtctcaattttttatttatctatatggtaaactcagagatcactccttaggggtgagtcctattgcaatatgaccgacaaagaagacaaaatagcattgaaactaacccatacaaaatatccaactctggattctgtgaataagtatcttgaccataaaaagtcattgctgttcttgtttctaatgtaaatagtgtccattagtaaaagtgaaattcagtcttaagtagggtgaattggatcaccatttacacaagagatggctttttcctttgcttgaataaacattttggatcacctccaaagaatgaaaaccagtagtacgttttagtcatattagtcaggatgagaaactataagatgtgtgtaacatttggaaatgcaccaaagtgagcgtttaaatcttctcattttattgaaaactaagagcagaaaatgtaaaatgctcatgaaggttttgaatgccaaaagatattttagaatcaatttataaaggggtaattcattaattacactttaaaattggaaagtgggataagaaatctaaagtaaaccagcttatctttgaaacaatattattttgaaattggctttaaaataaaaccattcagattgaaattctaattagctcatttgtggagtttgatcacacaattcataatgttgctgctttccattaactagtcttgaaatgcctttgtttgtaaaaataaaataatggtactttcattttataacaaggtgtttttttcaagaaataatccatgctaaaatggatatttgtgatcctgaaatgtttactaagcattgtaaatttatttataactgccatctccaactacatccttatgatgtttttaacaataaaattaaaacaactgttaaactaaaaaccacaccgttttccagtacttgatctctgagctacaatactcactaaatataattttccaatcaaaatattctattctatattctaagggttaatatgtgattatagtgtccacttgccaccatttttttaaatcaatggacttgaaaagtattaatttagatggatgcgcagatataccctcagttcagtcatagattggagtttgcatataataatgtaaatgtatgtcgacactattctaaatagttctattatgactgaaatttaattaaataaaaaaggttgtaaaatgtgatgtgtatgtgtatatactgtatgtgtactttttaaaataggtgtatgtcccaacccttttttatacaggtttgaatttaaaattacatgatatatacatatactttattgttctaaataaagaattttatgcactctcaaaaaaaaaaaaaaaaaa

SEQ ID NO: 1500 - DNA, 3549 bp, Homo sapiens
acatctggcggctgccctcccttgtttccgctgcatccagacttcctcaggcggtggctggaggctgcgcatctggggctttaaacatacaaagggattgccaggacctgcggcggcggcggcggcggcgggggctggggcgcgggggccggaccatgagccgctgagccgggcaaaccccaggccaccgagccagcggaccctcggagcgcagccctgcgccgcggagcaggctccaaccaggcggcgaggcggccacacgcaccgagccagcgacccccgggcgacgcgcggggccagggagcgctacgatggaggcgctaatggcccggggcgcgctcacgggtcccctgagggcgctctgtctcctgggctgcctgctgagccacgccgccgccgcgccgtcgcccatcatcaagttccccggcgatgtcgcccccaaaacggacaaagagttggcagtgcaatacctgaacaccttctatggctgccccaaggagagctgcaacctgtttgtgctgaaggacacactaaagaagatgcagaagttctttggactgccccagacaggtgatcttgaccagaataccatcgagaccatgcggaagccacgctgcggcaacccagatgtggccaactacaacttcttccctcgcaagcccaagtgggacaagaaccagatcacatacaggatcattggctacacacctgatctggacccagagacagtggatgatgcctttgctcgtgccttccaagtctggagcgatgtgaccccactgcggttttctcgaatccatgatggagaggcagacatcatgatcaactttggccgctgggagcatggcgatggatacccctttgacggtaaggacggactcctggctcatgccttcgccccaggcactggtgttgggggagactcccattttgatgacgatgagctatggaccttgggagaaggccaagtggtccgtgtgaagtatgggaacgccgatggggagtactgcaagttccccttcttgttcaatggcaaggagtacaacagctgcactgataccggccgcagcgatggcttcctctggtgctccaccacctacaactttgagaaggatggcaagtacggcttctgtccccatgaagccctgttcaccatgggcggcaacgctgaaggacagccctgcaagtttccattccgcttccagggcacatcctatgacagctgcaccactgagggccgcacggatggctaccgctggtgcggcaccactgaggactacgaccgcgacaagaagtatggcttctgccctgagaccgccatgtccactgttggtgggaactcagaaggtgccccctgtgtcttccccttcactttcctgggcaacaaatatgagagctgcaccagcgccggccgcagtgacggaaagatgtggtgtgcgaccacagccaactacgatgatgaccgcaagtggggcttctgccctgaccaagggtacagcctgttcctcgtggcagcccacgagtttggccacgccatggggctggagcactcccaagaccctggggccctgatggcacccatttacacctacaccaagaacttccgtctgtcccaggatgacatcaagggcattcaggagctctatggggcctctcctgacattgaccttggcaccggccccacccccacgctgggccctgtcactcctgagatctgcaaacaggacattgtatttgatggcatcgctcagatccgtggtgagatcttcttcttcaaggaccggttcatttggcggactgtgacgccacgtgacaagcccatggggcccctgctggtggccacattctggcctgagctcccggaaaagattgatgcggtatacgaggccccacaggaggagaaggctgtgttctttgcagggaatgaatactggatctactcagccagcaccctggagcgagggtaccccaagccactgaccagcctgggactgccccctgatgtccagcgagtggatgccgcctttaactggagcaaaaacaagaagacatacatctttgctggagacaaattctggagatacaatgaggtgaagaagaaaatggatcctggcttccccaagctcatcgcagatgcctggaatgccatccccgataacctggatgccgtcgtggacctgcagggcggcggtcacagctacttcttcaagggtgcctattacctgaagctggagaaccaaagtctgaagagcgtgaagtttggaagcatcaaatccgactggctaggctgctgagctggccctggctcccacaggcccttcctctccactgccttcgatacaccgggcctggagaactagagaaggacccggaggggcctggcagccgtgccttcagctctacagctaatcagcattctcactcctacctggtaatttaagattccagagagtggctcctcccggtgcccaagaatagatgctgactgtactcctcccaggcgccccttccccctccaatcccaccaaccctcagagccacccctaaagagatactttgatattttcaacgcagccctgctttgggctgccctggtgctgccacacttcaggctcttctcctttcacaaccttctgtggctcacagaacccttggagccaatggagactgtctcaagagggcactggtggcccgacagcctggcacagggcagtgggacagggcatggccaggtggccactccagacccctggcttttcactgctggctgccttagaacctttcttacattagcagtttgctttgtatgcactttgtttttttctttgggtcttgttttttttttccacttagaaattgcatttcctgacagaaggactcaggttgtctgaagtcactgcacagtgcatctcagcccacatagtgatggttcccctgttcactctacttagcatgtccctaccgagtctcttctccactggatggaggaaaaccaagccgtggcttcccgctcagccctccctgcccctcccttcaaccattccccatgggaaatgtcaacaagtatgaataaagacacctactgagtggccgtgtttgccatctgttttagcagagcctagacaagggccacagacccagccagaagcggaaacttaaaaagtccgaatctctgctccctgcagggcacaggtgatggtgtctgctggaaaggtcagagcttccaaagtaaacagcaagagaacctcagggagagtaagctctagtccctctgtcctgtagaaagagccctgaagaatcagcaattttgttgctttattgtggcatctgttcgaggtttgcttcctctttaagtctgtttcttcattagcaatcatatcagttttaatgctactactaacaatgaacagtaacaataatatccccctcaattaatagagtgctttctatgtgcaaggcacttttcacgtgtcacctattttaacctttccaaccacataaataaaaaaggccattattagttgaaaaaaaaaaaaaaaaaaaaaaaaa

SEQ ID NO: 1501 - DNA, 2768 bp, Homo sapiens
ggagctttgctgaaactgcacaaaaaatcgagccggggggttccctggtccccggcgatggggcggggagcgctgcgccgggggagggggcgggcgcggcggcgcgggccccgccgaggggggacacctggctgaggcacagctgccgccgtgcctttccgcgcgagcccagagctccgatccctgcgcgggctcgagagctcgccccgaacgggggtcttcctcctccgccgttgacaggttttgacctgtagcagagaaccaattctggagaacagcctcacttctttgattgaatacttacataatgcattggaacatgacatgagattaaggtttaataatgatagaatgaagaccacaataaaagagacctctacttagctcagcaattcttacctttcttacctatttgatgaagatgtcttttgaaaggtgtactgcaaggaacaaaatgtttgtaaattctccttttaccaaggtggataattactgtaccttcctcatggaaaaagttttatttaaagtgttatttctcattgaatactatcaaaaaggaaaaaaaaatgacctaaacttttgagatagatttggctctaggcctactctaggtgcggtacttcactatagtttataaaagatggtccctgtcagcaaagaactgtaacctgtatgagaatattatactaacatacaagaaacaagtagagaataatggaatgtaaactctggcttgctaacttaagtgtggtagaagcttgaaggaaatgtggacttaaacttatcagagaagacttataagaggatatgaaaggtgtaaattttgataccaccattgccgccttcccctcaaaaaaggtgagaactgactaaactactggtacttagaccatgtggagaaggaactgaaaatggaaacagaaacacgtctgtacagagcagagtgtcagataatagctcattttagtagagggcaataaatgccacatgagatgatcacctcagcagaaaactgggatgtggagacgctggtagcggggccaggaaggctccggacggagcaggttttctggaccacagacacactgccccggcgccctccgcaggccgctcctccccaggcccatgacagtgccccgctggtttctgccgcgctgccggactggagctcagacggccttcgccagcccccccaacccacgcagatccctgctgacctgggcaactccccaccctcgctgaaggttcgaggaccaccccgctttcccgagaggagccgggcggcgggtacttatctccgacctccggctagtgggaaaggccgcgcgaccgcccgtcctccaactacagggaccgcacgaacagcgactgggaaactgccactagaaaaagatgactgtccaactaaaacctgcatacacagctacatccttccctggaagagcacagtggaactagatcctagtacagatagcacagggattgtcaacattcttgtcacactgaaatttccttctactgatctccaaacttctaaaaatttgctgttgagaccagctgaaatgtttgaaagaagcaactaaagaaagaaactttgaaagaagcttccaaaagaagcaaccaagtctacaaaggcacagtttgactcaaatggatccaactgattagcaaatggaaaataacatggaggaatatattttgcatgacaagcatagcagctccaagtcatccctaatgaagccaaaaatttaagtgcaacccagagaatggatggttcagaatcttttttttttttgagatggagtctcgctctgtcacctaggctggagtgcggtggcatgatctcggctcactgcaagctccgcctcctgggttcacgccattctcctgcctcagccttccgggtagctgggactacaggtgcctgccaccacgcccggctaattttttgtatttttagtagagacggggtttcaccgtgttagctaggatggtctcaatctcctgacctcgtgatctgcccgcctcagcctcccaaagtgctggaattacaggcgtgagccaccgcgcccggcccagaatcttttttaaattttttattattattattttttctgagatggagtccggctctgtggccaggctggagtgcagtggcacaatctcagctcactgcaacctctgactcccaggtacaagtgattctcctgcctcagcctcctgagtagctgggataacaggcacgtgccaccacgcccagctaatttttgtatttttagtagagacggggtttcaccatgttggccaggatggtctcgatctgcctaccttggcctcccaatgtactgggattacaggcgtgagccaccgtacccggcccagaatctttgccttttgtttgcatagtttaatcttctaaaccagttgctttcccagaaaaggtgacttaaagtcatagcctttgtgttcatcaccatactctccatagttttacaaattattcagtttatttttaaaaggggtaatttttaaaatttttatttttaattccgaagcattccttttaatacattctcttgagggaaaaaaaaaatcacacatagtgattgtgtgtggtagtgattatgtgtggcctaagtggcaattgatcaataccccaatctcaagcctgtacattgttactggttgactggttggttgcctggtgggctttttgtccttccagatgtttttctaccttctgccttttccaataaagcttccattat

SEQ ID NO: 1502 - DNA, 3519 bp, Homo sapiens
gttgttgtgatcccatggctacagaggatcaggagttgacatagatactctttggatttcataccatgtggaggctttcttacttccacgtgaccttgactgagttttgaatagcgcccaacccaagttcaaaggctgataagagagaaaatctcatgaggaggttttagtctagggaaagtcattcagtggatgtgatcttggctcacaggggacgatgtcaagctcttcctggctccttctcagccttgttgctgtaactgctgctcagtccaccattgaggaacaggccaagacatttttggacaagtttaaccacgaagccgaagacctgttctatcaaagttcacttgcttcttggaattataacaccaatattactgaagagaatgtccaaaacatgaataatgctggggacaaatggtctgcctttttaaaggaacagtccacacttgcccaaatgtatccactacaagaaattcagaatctcacagtcaagcttcagctgcaggctcttcagcaaaatgggtcttcagtgctctcagaagacaagagcaaacggttgaacacaattctaaatacaatgagcaccatctacagtactggaaaagtttgtaacccagataatccacaagaatgcttattacttgaaccaggtttgaatgaaataatggcaaacagtttagactacaatgagaggctctgggcttgggaaagctggagatctgaggtcggcaagcagctgaggccattatatgaagagtatgtggtcttgaaaaatgagatggcaagagcaaatcattatgaggactatggggattattggagaggagactatgaagtaaatggggtagatggctatgactacagccgcggccagttgattgaagatgtggaacatacctttgaagagattaaaccattatatgaacatcttcatgcctatgtgagggcaaagttgatgaatgcctatccttcctatatcagtccaattggatgcctccctgctcatttgcttggtgatatgtggggtagattttggacaaatctgtactctttgacagttccctttggacagaaaccaaacatagatgttactgatgcaatggtggaccaggcctgggatgcacagagaatattcaaggaggccgagaagttctttgtatctgttggtcttcctaatatgactcaaggattctgggaaaattccatgctaacggacccaggaaatgttcagaaagcagtctgccatcccacagcttgggacctggggaagggcgacttcaggatccttatgtgcacaaaggtgacaatggacgacttcctgacagctcatcatgagatggggcatatccagtatgatatggcatatgctgcacaaccttttctgctaagaaatggagctaatgaaggattccatgaagctgttggggaaatcatgtcactttctgcagccacacctaagcatttaaaatccattggtcttctgtcacccgattttcaagaagacaatgaaacagaaataaacttcctgctcaaacaagcactcacgattgttgggactctgccatttacttacatgttagagaagtggaggtggatggtctttaaaggggaaattcccaaagaccagtggatgaaaaagtggtgggagatgaagcgagagatagttggggtggtggaacctgtgccccatgatgaaacatactgtgaccccgcatctctgttccatgtttctaatgattactcattcattcgatattacacaaggaccctttaccaattccagtttcaagaagcactttgtcaagcagctaaacatgaaggccctctgcacaaatgtgacatctcaaactctacagaagctggacagaaactgttcaatatgctgaggcttggaaaatcagaaccctggaccctagcattggaaaatgttgtaggagcaaagaacatgaatgtaaggccactgctcaactactttgagcccttatttacctggctgaaagaccagaacaagaattcttttgtgggatggagtaccgactggagtccatatgcagaccaaagcatcaaagtgaggataagcctaaaatcagctcttggagataaagcatatgaatggaacgacaatgaaatgtacctgttccgatcatctgttgcatatgctatgaggcagtactttttaaaagtaaaaaatcagatgattctttttggggaggaggatgtgcgagtggctaatttgaaaccaagaatctcctttaatttctttgtcactgcacctaaaaatgtgtctgatatcattcctagaactgaagttgaaaaggccatcaggatgtcccggagccgtatcaatgatgctttccgtctgaatgacaacagcctagagtttctggggatacagccaacacttggacctcctaaccagccccctgtttccatatggctgattgtttttggagttgtgatgggagtgatagtggttggcattgtcatcctgatcttcactgggatcagagatcggaagaagaaaaataaagcaagaagtggagaaaatccttatgcctccatcgatattagcaaaggagaaaataatccaggattccaaaacactgatgatgttcagacctccttttagaaaaatctatgtttttcctcttgaggtgattttgttgtatgtaaatgttaatttcatggtatagaaaatataagatgataaagatatcattaaatgtcaaaactatgactctgttcagaaaaaaaattgtccaaagacaacatggccaaggagagagcatcttcattgacattgctttcagtatttatttctgtctctggatttgacttctgttctgtttcttaataaggattttgtattagagtatattagggaaagtgtgtatttggtctcacaggctgttcagggataatctaaatgtaaatgtctgttgaatttctgaagttgaaaacaaggatatatcattggagcaagtgttggatcttgtatggaatatggatggatcacttgtaaggacagtgcctgggaactggtgtagctgcaaggattgagaatggcatgcattagctcactttcatttaatccattgtcaaggatgacatgctttcttcacagtaactcagttcaagtactatggtgatttgcctacagtgatgtttggaatcgatcatgctttcttcaaggtgacaggtctaaagagagaagaatccagggaacaggtagaggacattgctttttcacttccaaggtgcttgatcaacatctccctgacaacacaaaactagagccaggggcctccgtgaactcccagagcatgcctgatagaaactcatttctactgttctctaactgtggagtgaatggaaattccaactgtatgttcaccctctgaagtgggtacccagtctcttaaatcttttgtatttgctcacagtgtttgagcagtgctgagcacaaagcagacactcaataaatgctagatttacacactcaaaaaaaaaaaa

SEQ ID NO: 1503 - DNA, 1345 bp, Homo sapiens; identical to SEQ ID NO: 792

SEQ ID NO: 1504 - DNA, 3970 bp, Homo sapiens
aacacttaaggcttccgggcatgcgcacagcgttgtgcaaatgaatgccttccactgaaccgaggcactgttatagaagaatggaagaagatacagattatagaatcaggtttagttctttgtgtttctttaatgatcacgttggatttcatggcactataaaaagctcaccaagtgactttattgttattgaaattgatgaacagggacagttagttaataagaccatcgatgagcctattttcaagattagtgaaatacaacttgagccaaataattttcccaaaaaaccaaaactagatcttcaaaatctgtccttagaagatggaagaaaccaagaagttcatactttgattaagtacactgatggtgaccaaaatcatcagtctggttcagaaaaggaagatactatcgttgatggaacttccaaatgtgaagaaaaagctgatgttttaagctcctttttggatgaaaaaactcatgagttactgaataattttgcctgtgatgtaagagagaagtggctttctaaaacagagctaattggactacctcctgaattctcaataggcagaatccttgacaaaaaccagagggctagtttacacagtgccattaggcagaaatttccatttttagtaactgtaggaaaaaacagtgaaattgttgtaaaaccaaatcttgaatataaagaactttgtcatttggtatctgaagaggaagcatttgacttttttaaatatttggatgcaaagaaagaaaattccaaatttacctttaaacctgatacaaacaaagaccacagaaaagctgtccaccattttgtcaacaaaaagtttggaaaccttgtggaaaccaaatctttttctaaaatgaattgcagtgctggtaatccgaatgtggtggtaacagtaagatttcgggaaaaagcacacaaacgtgggaaaaggcctctttctgaatgccaagaaggaaaagttatatatacagcttttaccctacgaaaggaaaacctggaaatgtttgaagcgattggttttttagctatcaaacttggtgttattccttcggattttagttatgcaggccttaaagacaagaaagccatcacctatcaagcaatggttgttagaaaagtgactccagagaggttgaaaaatattgaaaaagaaattgaaaagaaaagaatgaatgtctttaatattcggtctgtagatgattccctgagacttggtcagctcaaaggaaatcactttgatattgtcattagaaatttaaaaaaacaaataaatgattctgcaaacctgagggagagaattatggaagcaatagaaaatgttaagaaaaaaggctttgtgaattactatggaccacagagatttgggaagggaaggaaagttcacacagaccaaattggactagctttgctgaagaatgaaatgatgaaagccataaaattgtttcttacaccagaagacttggatgatcctgtaaatagagcaaagaagtattttcttcaaactgaggatgctaaaggcacactttcattgatgcctgaattcaaagtgcgtgagagagcattgttggaggcattgcaccgctttggcatgaccgaggaaggttgtatccaggcatggttctctttaccccattccatgcgcatattctatgttcacgcatataccagcaaaatttggaatgaggcagtatcttacagacttgaaacctatggagcaagagtagtgcagggtgatttggtctgtttggatgaagacattgatgacgagaatttcccaaatagtaaaattcacctggtaactgaagaggagggatcagctaatatgtatgcaatacatcaggtggttcttccagtacttggatacaatattcagtacccgaagaacaaagtagggcagtggtaccatgacatacttagcagagatggactacagacatgtaggtttaaagtacctactctgaaactgaatataccaggttgctatagacagattttgaaacatccctgtaatctctcataccaactaatggaagatcatgacattgatgtcaaaacgaaaggttcccacattgatgaaacagctttgtctcttttgatctcttttgatcttgatgcttcatgctatgctaccgtttgtctgaaggaaataatgaagcatgacgtttaaaactgatacccttggtataaccatatatatgtcactctttgaaggaaagggggctaaaatgtcttaagcaccttccatgtgttaggaacttcataattgttatctcttttaattttcacagcatcctgagaagttaggatttgatactgtaattttatagaggatatgtaagtgtcagggtccaaatttaaggtccatgtgaccccaaagcctgtgttttttttctattatatgtttcagtgacctttattctgtgtcataaagttacaatcttttaaaaccattaggaatatatataatactgcaagataacatttaagaaaaaaagttgtgaatattcatatcctccagctccttgcttagaacactagtaaaattaggtcgcagtgaagcaaatgttggagagaaagatagatgaagcattttgctaattattattgtccccctttcctgtttttgaaattattgatcagaacaatatacaagggaaatgccatacctctgtttgtgatagataccccagagtagttattacctctttgtgagataagtaatctttgatgaagattgaaatacaatttctcatccaatttttatatcttggcatacgctgaccctcttgaccatttgtaattttttcatattatctaaaacaggtgttagagtcagacagattcattcttagattctagctctgacacttactagtgattttgagtatgttgttgatttttttgtgtgtggttactgatagaatcaagacaattacaacttcataaatgacaaataataggattatctccacattttctgttgctggaggaacaaaacattgtgcccatttgaaaattttaatttttgttggtttaactatcccacattataaatcatccttcaccattttatatcagttaaatatgggtgtgttggggaggaatgactggcatgtagacatgtattgatttaggaagatctgagcatttctttcattgttggtaagatataatgatgaaatttaaaaagcagtatggagcattatatatcagtaatgtgatatatatacttaagccagtttaaccattttgggaaatgttagcattaggaaataaaatccaaaagaaggaagagaagctatatgcaatgcaaaatttgcttattgcaatattttcatatacagacactaaaaacagttttcaaagtccagcattacgtaactaaagtaagtaaaatgatgtgtatcaacttgatggtaaaatatgtagttatttaaaaaagcaatgaacaatttagtttcatgagaaaatgttgccccctaaaagtagaacacatatgttacaactgcaataatactctgaattcatctttcacaaataagagacatgttagcatagtgattaaaagcacagatattggagacaaactaacccagtttgaaccctggcactgccacgtatagcactgcagccttgggaaagttatttaaactcatgggcttcagtttcaacatctgtaaaatgggcatgttaacattgcctacctcataggattactgtgagaattttctaagttaatatatgtaaagcaactttaaaaagtgcctggcacttagttattgttaagtaagtgtctgcagatgcaagtttggaagagaaaagcaaataaatgaaaatcccttcctgttaagatgatggggtatttggattttttttaatactaaaaagttttttttgttatatgttttggcaataaataattctcaatacacaaaaaaaaaaaaaaaaaaa

SEQ ID NO: 1505 - DNA, 117 bp, Homo sapiens
atactctggtttctcttcagatcgtataaatctttcgccttttactaaagatttccgtggagaggaacaactctgagtcttaagctaattttttgaggccttgttccgacaaggcta

SEQ ID NO: 1506 - DNA, 5490 bp, Homo sapiens; identical to SEQ ID NO: 740

SEQ ID NO: 1507 - DNA, 2187 bp, Homo sapiens
gtcctttctagacagccccctcctccaggctcagggacctgtctggctgtgagctcccaggaggtcccaggggtgtgacctccctccctccctccctccctcttcccttcaccccaggccagcccagggccagctataaagctggcccagcctggctctcagcacacccagctgcctgagaccctccttcaacctccctagaggacagccccactctgcctcctgctcccccagggcagcaccatgtggcccctgtggctctgctgggcactctgggtgctgcccctggctggccccggggcggccctgaccgaggagcagctcctgggcagcctgctgcggcagctgcagctcagcgaggtgcccgtactggacagggccgacatggagaagctggtcatccccgcccacgtgagggcccagtatgtagtcctgctgcggcgcagccacggggaccgctcccgcggaaagaggttcagccagagcttccgagaggtggccggcaggttcctggcgtcggaggccagcacacacctgctggtgttcggcatggagcagcggctgccgcccaacagcgagctggtgcaggccgtgctgcggctcttccaggagccggtccccaaggccgcgctgcacaggcacgggcggctgtccccgcgcagcgcccaggcccgggtgaccgtcgagtggctgcgcgtccgcgacgacggctccaaccgcacctccctcatcgactccaggctggtgtccgtccacgagagcggctggaaggccttcgacgtgaccgaggccgtgaacttctggcagcagctgagccggccccggcagccgctgctgctacaggtgtcggtgcagagggagcatctgggcccgctggcgtccggcgcccacaagctggtccgctttgcctcgcagggggcgccagccgggcttggggagccccagctggagctgcacaccctggacctcagggactatggagctcagggcgactgtgaccctgaagcaccaatgaccgagggcacccgctgctgccgccaggagatgtacattgacctgcaggggatgaagtgggccaagaactgggtgctggagcccccgggcttcctggcttacgagtgtgtgggcacctgccagcagcccccggaggccctggccttcaattggccatttctggggccgcgacagtgtatcgcctcggagactgcctcgctgcccatgatcgtcagcatcaaggagggaggcaggaccaggccccaggtggtcagcctgcccaacatgagggtgcagaagtgcagctgtgcctcggatggggcgctcgtgccaaggaggctccagccataggcgcctggtgtatccattgagccctctaactgaacgtgtgcatagaggtggtcttaatgtaggtcttaactttatacttagcaagttactccatcccaatttagtgctcctgtgtgaccttcgccctgtgtccttccatttcctgtctttcccgtccatcacccatcctaagcacttacgtgagtaaataatgcagctcagatgctgagctctagtaggaaatgctggcatgctgattacaagatacagctgagcaatgcacacattttcagctgggagtttctgttctctggcaaattcttcactgagtctggaacaataataccctatgattagaactggggaaacagaactgaattgctgtgttatatgaggaattaaaaccttcaaatctctatttcccccaaatactgacccattctggacttttgtaaacatacctaggcccctgttcccctgagagggtgctaagaggaaggatgaagggcttcaggctgggggcagtggacagggaattgggatacctggattctggttctgacagggccacaagctaggatctctaacaaacgcagaaggctttggctcgtcatttcctcttaaaaaggaggagctgggcttcagctctaagaacttcattgccctggggatcagacagcccctacctacccctgcccactcctctggagactgagccttgcccgtgcatatttaggtcatttcccacactgtcttagagaacttgtcaccagaaaccacatgtatttgcatgttttttgttaatttagctaaagcaattgaatgtagatactcagaagaaataaaaaatgatgtttcactctg

SEQ ID NO: 1508 - DNA, 708 bp, Homo sapiens
ccccgcaggctgagggcaggtgggaagcaaacccggacgcatcgcagcagcagcagcagcagcagaagcagcagcagcagcctccgcagtccctccagagacatggatccccagacagcaccttcccgggcgctcctgctcctgctcttcttgcatctggctttcctgggaggtcgttcccacccgctgggcagccccggttcagcctcggacttggaaacgtccgggttacaggagcagcgcaaccatttgcagggcaaactgtcggagctgcaggtggagcagacatccctggagcccctccaggagagcccccgtcccacaggtgtctggaagtcccgggaggtagccaccgagggcatccgtgggcaccgcaaaatggtcctctacaccctgcgggcaccacgaagccccaagatggtgcaagggtctggctgctttgggaggaagatggaccggatcagctcctccagtggcctgggctgcaaagtgctgaggcggcattaagaggaagtcctggctgcagacacctgcttctgattccacaaggggctttttcctcaaccctgtggccgcctttgaagtgactcatttttttaatgtatttatgtatttatttgattgttttatataagatggtttcttacctttgagcacaaaatttccacggtgaaataaagtcaacattataagctttaaaaaaaaaaa

SEQ ID NO: 1509 - DNA, 2907 bp, Homo sapiens
aaaaaaaaaaaaaaactacggcggccgagaaggggcgagtacagcccagtcctgaggtcgcgggaggctgcgaggactgcaaaagggtggagtcggcctcgcccccgcccaggccccgcccctgccgggaacccactttcccagtcctaggcggcggtcagatccttgcaagcatggtcgcgccggggcttgtactcgggctggtgctgccattaatcctgtgggccgacagaagtgcaggtattggttttcgctttgcttcatacatcaataatgatatggtgctgcagaaggagcctgctggggcagtgatatggggcttcggtacacctggagccacagtgaccgtgaccctgcgccaaggtcaggaaaccatcatgaagaaagtgaccagtgtgaaagctcactctgatacgtggatggtggtactggatcctatgaagcctggaggacctttcgaagtgatggcacaacagactttggagaaaataaacttcaccctgagagttcatgacgtcctgtttggagatgtctggctctgtagtgggcagagtaacatgcagatgactgtgttacagatatttaatgctacaagggagttgtctaacactgcggcatatcagtctgtccgcatcctctctgtctctcccattcaagcagagcaggagctggaggaccttgttgcggttgacttgcagtggtctaagcccacctcagaaaacttaggccatggatatttcaagtacatgtcagcagtgtgctggctctttggacgtcacctttatgacactctgcagtatcccatcgggctgatcgcctccagctggggcgggacacccattgaagcctggtcatctggacggtcactgaaagcctgtggggtccctaaacaagggtccattccatacgattctgtaactggtcccagtaagcactctgttctctggaatgccatgatccatccactgtgcaatatgactctgaaaggggtagtatggtaccagggggagtccaatataaattataacacggatctgtacaattgcacattccctgcactcatcgaagactggcgtgaaaccttccaccgtggttcccaggggcagacggagcgtttcttcccatttggacttgtccagttatcttcagatttgtctaagaagagctcagacgatggatttccccagatccgttggcatcaaacagcagacttcggctatgtccccaacccaaagatgcccaatactttcatggctgtagctatggatctctgtgatagagactcgccttttggcagcatccaccctcgagataaacagactgtggcttatcggctgcatttgggggcccgtgctctggcttatggtgagaagaatttgacctttgaaggaccactgcctgagaagatagaactcttggctcacaaggggctgctcaatctcacatattaccagcaaatccaggtgcagaaaaaggacaacaagatatttgagatctcctgttgcagtgaccatcgatgcaagtggcttccagcttctatgaacaccgtctccacccagtccctgaccctggcgatcgattcttgtcatggcactgtggttgctctccgctatgcttggaccacgtggccttgtgaatataagcagtgtcccctataccaccccagtagtgccctgccagcccctcccttcattgctttcattacagaccagggtcctggacatcagagcaatgttgctaaatgactgtttcagtatgatcagaacttagatataaggatgggtccttcagattttagcatttaggagtttcaataataaccattgcttttaaaggaaattaatagaaagcctcattgaatggctttcagctagcacatggctgtttctatattctgatgagcccaggcttataggtaacttgaaatgcttgctttttgttccctagttggtctaagggtctgtattggactaattctgaactacagacaaattggacctcaatgtcatttacttccctcatattaatgggagtgaaatgtctaatacttttgcccctttttatccagagttgtgggaatctcaggattggaagagattttaaaggccacataggccagctagtgttcatgtgttctttataaaatttctcccatccaagtactaaccaggcccgaccctgcttagcttccgagatcagatgagatcaggcgcgttcagggtgatatggccgtagacgtctttacaaaattcctgacaggtggttactgaatctctctatgaactttccattcaaaactttccaagtttttccttatgtggaaccgaaatctttctttctcccgtgaaactttactactatcagataattgaagacagatctctttgtattctcttcaagcccaaaccaattctgttccttcaatctaaatagtggtaatatgaatgtttaagaaatgaaataagaaacatgtgcaggcactttggaaggtgctaagtgactgccctaaggaatgaaaagcaagggccaggtgggagtagcccagcgaaggcacttgggctgccaggaacaggaggcgtgggaaactctggcttaggaaaacatgaacacaggggcaacagaggcaaactgttgttcgagttaaatataaatctcaggctctttaaaggtaaaaggtttaaggataatccatttggaagaagaaaagagtgaggctgaaagtaaagccacatgacaagcatataaaaaaaaatgcagatgatacaaatatgaaagaggccttcagtgtttgtttattaagaatcttaatgcagtttactgatggattaaaaacagctaacattgtctgaaaattatgttacctataagaagttggaaataaataaaagcataatcactagtgatgtg

SEQ ID NO: 1510 - DNA, 2032 bp, Homo sapiens
tccatattgtgcttccaccactgccaataacaaaataactagcaaccatgaagtgggtggaatcaatttttttaattttcctactaaattttactgaatccagaacactgcatagaaatgaatatggaatagcttccatattggattcttaccaatgtactgcagagataagtttagctgacctggctaccatattttttgcccagtttgttcaagaagccacttacaaggaagtaagcaaaatggtgaaagatgcattgactgcaattgagaaacccactggagatgaacagtcttcagggtgtttagaaaaccagctacctgcctttctggaagaactttgccatgagaaagaaattttggagaagtacggacattcagactgctgcagccaaagtgaagagggaagacataactgttttcttgcacacaaaaagcccactccagcatcgatcccacttttccaagttccagaacctgtcacaagctgtgaagcatatgaagaagacagggagacattcatgaacaaattcatttatgagatagcaagaaggcatcccttcctgtatgcacctacaattcttctttgggctgctcgctatgacaaaataattccatcttgctgcaaagctgaaaatgcagttgaatgcttccaaacaaaggcagcaacagttacaaaagaattaagagaaagcagcttgttaaatcaacatgcatgtgcagtaatgaaaaattttgggacccgaactttccaagccataactgttactaaactgagtcagaagtttaccaaagttaattttactgaaatccagaaactagtcctggatgtggcccatgtacatgagcactgttgcagaggagatgtgctggattgtctgcaggatggggaaaaaatcatgtcctacatatgttctcaacaagacactctgtcaaacaaaataacagaatgctgcaaactgaccacgctggaacgtggtcaatgtataattcatgcagaaaatgatgaaaaacctgaaggtctatctccaaatctaaacaggtttttaggagatagagattttaaccaattttcttcaggggaaaaaaatatcttcttggcaagttttgttcatgaatattcaagaagacatcctcagcttgctgtctcagtaattctaagagttgctaaaggataccaggagttattggagaagtgtttccagactgaaaaccctcttgaatgccaagataaaggagaagaagaattacagaaatacatccaggagagccaagcattggcaaagcgaagctgcggcctcttccagaaactaggagaatattacttacaaaatgcgtttctcgttgcttacacaaagaaagccccccagctgacctcgtcggagctgatggccatcaccagaaaaatggcagccacagcagccacttgttgccaactcagtgaggacaaactattggcctgtggcgagggagcggctgacattattatcggacacttatgtatcagacatgaaatgactccagtaaaccctggtgttggccagtgctgcacttcttcatatgccaacaggaggccatgcttcagcagcttggtggtggatgaaacatatgtccctcctgcattctctgatgacaagttcattttccataaggatctgtgccaagctcagggtgtagcgctgcaaacgatgaagcaagagtttctcattaaccttgtgaagcaaaagccacaaataacagaggaacaacttgaggctgtcattgcagatttctcaggcctgttggagaaatgctgccaaggccaggaacaggaagtctgctttgctgaagagggacaaaaactgatttcaaaaactcgtgctgctttgggagtttaaattacttcaggggaagagaagacaaaacgagtctttcattcggtgtgaacttttctctttaattttaactgatttaacactttttgtgaattaatgaaatgataaagacttttatgtgagatttccttatcacagaaataaaatatctccaaatg

SEQ ID NO: 1511 - DNA, 2646 bp, Homo sapiens; identical to SEQ ID NO: 674

SEQ ID NO: 1512 - DNA, 3275 bp, Homo sapiens; identical to SEQ ID NO: 568

SEQ ID NO: 1513 - DNA, 4916 bp, Homo sapiens; identical to SEQ ID NO: 732

SEQ ID NO: 1514 - DNA, 5288 bp, Homo sapiens
aaccaaacaacccccaacagccaagcatacatctctaattttattattttggtcttttcgttggattttccctttcttctttttttcgggttatcgctcagttttgagcagaggtttacattttttaaaaatttgctttccagcccgccttgatcttctaagtgcgagttcatcgtctgagaaaaaaaaaaatctctggttggcgtttttgtttcttttcttttctttcttttctttcctttttttttttttttaatttttttcaagggggaggagattttccacaagaaaaggttgttttcatgtttgggattcaggaaagcatccaacggagtggaagcagcatgaaggaagagccgctgggcagcggcatgaacgcggtgcggacgtggatgcagggcgccggggtgctggacgccaacacggcggcgcagagcggggtgggtctggcccgggctcactttgagaagcagccgccttccaatctgcggaaatccaacttcttccacttcgtcctggccctctacgacagacagggccagcccgtggagatcgagaggacagcgtttgtggggttcgtggagaaggaaaaagaagccaacagcgaaaagaccaataacggaattcactaccggcttcagcttctctacagcaatgggataaggacggagcaggatttctacgtgcgcctcattgactccatgacaaaacaagccatagtgtatgaaggccaagacaagaacccagaaatgtgccgagtcttgctcacacatgagatcatgtgcagccgctgttgtgacaagaaaagctgtggcaaccgaaatgagactccctcagatccagtgataattgacaggttcttcttgaaatttttcctcaaatgtaaccaaaattgcctaaagaatgcgggaaacccacgtgacatgcggagattccaggtcgtggtgtctacgacagtcaatgtggatggccatgtcctggcagtctctgataacatgtttgtccataataattccaagcatgggcggagggctcggaggcttgacccctcggaaggtacgccctcttatctggaacatgctactccctgtatcaaagccatcagcccgagtgaaggatggacgacgggaggtgcgactgtgatcatcataggggacaatttctttgatgggttacaggtcatattcggtaccatgctggtctggagtgagttgatcactcctcatgccatccgtgtgcagacccctcctcggcacatccctggtgttgtggaagtcacactgtcctacaaatctaagcagttctgcaaaggaacaccaggcagattcatttatacagcgctcaacgaacccaccatcgattatggtttccagaggttacagaaggtcattcctcggcaccctggtgaccctgagcgtttgccaaaggaagtaatactcaaaagggctgcggatctggtagaagcactgtatgggatgccacacaacaaccaggaaatcattctgaagagagcggccgacattgccgaggccctgtacagtgttccccgcaaccacaaccaactcccggcccttgctaacacctcggtccacgcagggatgatgggcgtgaattcgttcagtggacaactggccgtgaatgtctccgaggcatcacaagccaccaatcagggtttcacccgcaactcaagcagcgtatcaccacacgggtacgtgccgagcaccactccccagcagaccaactataactccgtcaccacgagcatgaacggatacggctctgccgcaatgtccaatttgggcggctcccccaccttcctcaacggctcagctgccaactccccctatgccatagtgccatccagccccaccatggcctcctccacaagcctcccctccaactgcagcagctcctcgggcatcttctccttctcaccagccaacatggtctcagccgtgaaacagaagagtgctttcgcaccagtcgtcagaccccagacctccccacctcccacctgcaccagcaccaacgggaacagcctgcaagcgatatctggcatgattgttcctcctatgtgaaagaattgccttgaagaattgtattaatgaagaggttggattctgctacagagagtaatctgatacaagtcccagagtggaacttttaactcaggcctttttaagaggaatcacaataactgcagatttttaaacaaacaaaatcaccgaccttgcaaatactgaaattggaagagggatctgcaagtgcagggtgttggttaaagttgtacctcccaagtatttgggggatatatttattctgtattgacaaaagcaaatccactttttctttttcttttttttttttaagcttaattctgcaatcatttgtcttttataaaccgtaaagctctatacaagggacactataaataagactccatgttttaatttatgatgtttttaaagctgtgtaaaggaagaatgaagtggtgatatttacaaaaaagtaaaaaaaaaaaaaaagaaaaaaaggaaaaaaaaaaaagcttgtatgggacagaataggaatgccagttagattttttagaaaaactaagggtcggcttttgcgccttaaagcatatcaaatggtagttagctcagacagtgcattttcaatatctaacttaacatgccaccccttagcagtgcaagcttatttatctcttttgtattgttgtcttaagcaactgtgtaaataaatgcagcctggaaagttaaaacgcgatgtaagtgatcacatttttccctctactcgaaaatccagtgcctctagacagattgttaaaactgcatatttaaatctgatctcattctctccttttacttaagtcagtttcttctgaagccgatggcctctcgagagcttggtggcacacatactgtgtgagaatctcctttgagacttcatggaacagggtccaggcacagaattccacactctgccctccagttaacaagccaaaacctcacgtacgctcccccatttgcaagtttaaagtttactcgtcctaaatgcagacttcatacctatcttccaaaagttgataaaagcaacgtggcaggtattttcgattttcccattccagatactgcctctatcagtcgacccttaccatttgtaacataatagattgaaacaacaggttaagtgctttggaattaagagttaaagggaaccgggggtggagaaaggaaaagaaggttgagacctccaaaacatagttttctgttctatgggaatttttgctctcattatctgggaagtgttcttaaaaataagaattaatagcaaagatgcagcaaagctctgaggatgcatttgcctgatatttttttctttgctcttgtgtttttgtatgtagttataaatactgtagattttttttttgtgattttttgccaaagttgttgttctatttatacattttaatgtcttaagacattttttcaatatcacaaaaagattttactgcgtattttgcaaagaaaaaaagctcactacctttagcttgcacatacttgcaaagttaattaaaaggctttttgttttaaaggggattttgtaaaatatccatataaataatgtatttatctttcgaatttgtacattgcttttcccttcttcctcttccttccacccccaatttattttattgtgtatgtttgctacgtgaaaagtgcgtatttgtttggtcacctacacttgtattagctgtttcaatgtgatttttaaacatttcatttatagttatttttagtattgttataaaccatgcttcagtttttttaatttccacccaaaagtcattgtctatttttgtattatttgtaagttaagaagttttttccaatatatggcaaaaaaaaaaaaatagtagcatattattcttgtagtatttagttcagtagatttaaaaaaaaatgtatcctttgctttggaagcttacaaaacaaccctaatgctgttttactctattaatatgcatggaatctctccctttggagtgacgcattttgtgcattaaattctagggagaaacttcatagaaatcaatgaacatactttctttcttaagtctgcttgtatatttcctctgtctttcacataaatataaaccagcagattggatgccttaacaatgcaaatcatattcatttcacttgtacattgtaactgtgcaccagaactgtcagtcatcactaacattctaagaaaaaagaaaaagaaaaaaagaaaaaaaaaaaaacaaagaaatcgaaaagcacaaaagaactgttttgttaccttaagacaatgtaactttttctagtagagcaagaaatcatttacaacaatgctgcaactgtgcatgcccccatatggattttgcaatggttttcactaggctgtcaagagtgcgatttttatgggttggggtgggtgggggaggggagttgtgggagggtaggggagggaggaaagctgtttttcatggtgagaaataataatgatgactaataataataaaaaaaactggaaaatgtaagcaaggtggacgcattgcttctcggtactcagaaaggttatctgaatttgcgtggtaagcgctggcctgaagatgtacacaagttaaagccatattttatctggtgagccccttaactgtttctgaaggaatgaacggtcagccgggaaggtgtccggcttagaccttgacaacagacactacccatctgtcagccatgtgcagtggttagaactcttcttgaaagtccaaagagcctttaaaatgtgtataatttgtgttttgttgcttctatttctattgattagatgaaaagacattctggccctctgatcctctttcttctccacaaaagttttacaaataaaagatgttcccctaaatacagaatatggctttaagaagaaaatgaaatgaagaattaaattaagatttcagtgttgggggaaaaaatacagcttctggatgactggattgcataacattgccctggcctcacattgtactaggatgcagcttaaatgaagtcatctctaaatctactaacctttcaccttcttatcaaaactttttgaatagacacacactgtacagttcaattgttagagaacctaactactgtagagattgttaaattttttttttttttttgcaaaaattcaagctgtaaaaacttttcaactttcacaatatttaattaaagttacttcctgtctgtgatggcaaaaaaaaaaaaaaa

SEQ ID NO: 1515 - DNA, 341 bp, Homo sapiens; identical to SEQ ID NO: 799

SEQ ID NO: 1516 - DNA, 5576 bp, Homo sapiens; identical to SEQ ID NO: 723

SEQ ID NO: 1517 - DNA, 951 bp, Homo sapiens
cccgccccgccccgcccggctgctccatggcgctgtgcgaggccgcgggctgcgggagtgccctgctctggcctcgcttgttgctcttcggggactccatcacccagttttccttccagcagggtggatggggagcatcgctggctgacaggctggtcagaaaatgtgatgttctgaatcgtggattttcaggttacaataccaggtgggccaaaattatccttccaagattaatcaggaaaggaaacagtttggacatcccagtagcagttacaattttctttggggccaatgacagtgcactaaaagatgagaatcccaagcagcacattcccctggaggagtacgctgcgaacctaaagagcatggtgcagtacctgaagtccgtggacatccctgagaatcgagtcattctcatcacgccgaccccactttgtgaaacagcctgggaagaacagtgcatcatacaaggttgcaaactaaatcgcctgaactctgttgttggtgaatatgccaatgcgtgtttacaagtggcccaagactgtgggactgacgtacttgacctgtggaccctgatgcaggacagccaggacttctcatcttatttatcagatggactacatttgtctccaaaggggaatgaatttttgttctcgcatctctggcctttgatagagaaaaaggtctcttctctacctttgctgcttccttactggcgggatgtagcagaagcaaaacctgaattaagtctgctgggagatggagaccattagccaatcacaggagacccaaatctgcttgttatctacagaactcaaagttgtcaatacgtagaggtacgcttttttcctcaggcttaaacctttgccactgatattaataataaaagtattagatgatttttcaaaaaaaaaaaaaaaaaaaaaaaaaaaaaaaaaaaaaaaaaaaaaa

SEQ ID NO: 1518 - DNA, 7420 bp, Homo sapiens
tgaataaattattcggcatttagcttatcattctgaatttcactttttgctttttggtgctctgaaacttgcagagagaggtggagtgctaaggggagggtaggggttgtgatactttgcacacacatccctgtcattgttctgcctaaagagacagggctgggttcaaggccacatgtgctcctgtcatcctccacatttctgctccaagtgcaatccggagtgtcagctctccatctgtctctgcctggcaggcgcacgcgcccagcaccctgcctccggcgatgccgccccagcccctctgatggccctcctctctgctgccactcattccagaacaggaggcatgagcccggaacgcgcttgcttttaggagacagccactttctgtgtggtacgctggattcaaggatgcctgatcgtactgagaagcactccacaatgccagactcacctgtggatgtgaagacgcaatctaggctgactcctccaacaatgccacctcccccaactactcaaggagctccaagaaccagttcatttacaccgacaacgttaactaatggcacgagccattctcctacagccttgaatggcgccccctcaccacccaatggcttcagcaatgggccttcctcttcttcctcctcctctctggctaatcaacagctgcccccagcctgtggtgccaggcaactcagcaagctgaaaaggttccttactaccctgcagcagtttggcaatgacatttcacccgagataggagaaagagttcgcaccctcgttctgggactagtgaactccactttgacaattgaagaatttcattccaaactgcaagaagctactaacttcccactgagaccttttgtcatcccatttttgaaggccaacttgcccctgctgcagcgtgagctcctccactgcgcaagactggccaaacagaaccctgcccagtacctcgcccagcatgaacagctgcttctggatgccagcaccacctcacctgttgactcctcagagctgcttctcgatgtgaacgaaaacgggaagaggcgaactccagacagaaccaaagaaaatggctttgacagagagcctttgcactcagaacatccaagcaagcgaccatgcactattagcccaggccagcggtacagtccaaataacggcttatcctaccagcccaatggcctgcctcaccctaccccacctccacctcagcattaccgtttggatgatatggccattgcccaccactacagggactcctatcgacaccccagccacagggacctcagggacagaaacagacctatggggttgcatggcacacgtcaagaagaaatgattgatcacagactaacagacagagaatgggcagaagagtggaaacatcttgaccatctgttaaactgcataatggacatggtagaaaaaacaaggcgatctctcaccgtactaaggcggtgtcaagaagcagaccgggaagaattgaattactggatccggcggtacagtgacgccgaggacttaaaaaaaggtggcggcagtagcagcagccactctaggcagcagagtcccgtcaacccagacccagttgcactagacgcgcatcgggaattccttcacaggcctgcgtctggatacgtgccagaggagatctggaagaaagctgaggaggccgtcaatgaggtgaagcgccaggcgatgacggagctgcagaaggccgtgtctgaggcggagcggaaagcccacgacatgatcacaacagagagggccaagatggagcgcacggtcgccgaggccaaacggcaggcggcggaggacgcactggcagttatcaatcagcaggaggattcaagcgagagttgctggaattgtggccgtaaagcgagtgaaacctgcagtggctgtaacacagcccgatactgtggctcattttgccagcacaaagactgggagaagcaccatcacatctgtggacagaccctgcaggcccagcagcagggagacacacctgcagtcagctcctctgtcacgcccaacagcggggctgggagcccgatggacacaccaccagcagccactccgaggtcaaccaccccgggaaccccttccaccatagagacaacccctcgctagacgtgaactcagaactgtcggaggaaagacaacacaaccaacgcgaaaccaattcctcatcctcagatgctcaaagttgttttttttgtttgtttgtttattagatgaattatcctatttcagtacttcagcaagagagaacctaactgtatcttgaggtggtagtaaaacacagagggccagtaacgggtcgtaatgacttattgtggataacaaagatatcttttctttagagaactgaaaagagagcagagaatataacatgaaatgatagatttgacctcctccctgttattttcaagtagctgggattttaaactagatgacctcattaaccgatgctttaccaaacagcaaaccaagagattgctaattgctgttgaaagcaaaaatgctaatattaaaagtcacaatgttctttatatacaataatggaaaaaaaaaaaagaggaaaaccctcaagggcatgagcattggatacagcagtagacattttaacaagaagatgaatggcgtccgtgggttgctaactgaactttgaagacccgctacaaaacgcgcagatgtgcagcagattggaaggagacacagatgttcggtttttttcctgtttctgaaaagaaataataatatccaggtcaacagaatgaaaaatgaaagatgatttgcaatgggatgtatgaatacagcagcaagaaaaaaaaatgccataatacaaaaggctccatatatatatatatatatatatatatacacacacacacacgcacatatacacacacacacacacacacacacacacacacacacacacacacacacacacacaagtaagagactcagcctgcagttaattagcattctggcagttttgacatcagccagctgccctaaataacccttcaacgtttcttcacttttgcaaggttccacagagtaagacattgggtctattccagctcattcattttatattgaaaaaaataattttaaaaatggtggcttcagctccagcccctttccaaaatttttcaaccccaccctgtttggatttttaattaaaaactagtagttctcttggtgttaaaacacttctgtcctgtgaggtttcccaatggtgtttttcttgtaaatgtgttggacaaatgtgaagatgcattgtagtttaaccatatgcccacatttagtctctttattcctagttggtgagaaacctgtatctttctatgctgcttttatatctgtatgtattagtgatatttctctagtagttaaaaaaaaaaaaaggaaaaaaagactctttttggttgtcctcaagaaaagaaaagaagaaaagctatctttcggagctgctatttcactctcttataggatttttttttttcctgaaaaccagcatgcttcacggaatgctaacatattggtgtttttgtaagagggatgtacataaatgtattttgcactgtcacaatgactccctaggcatgctttttgtttttttttttttttttttgagcaaattctttttaaatatgctagagccatttcatcaagtttagctgtagcatagagtagtcgtggaatttttcttttttttttttttaaatcattattagggacttttttaaaaaaataaaataacaagatatcctactttaaaaaaaaaggacagtgcatgcatattgctgtaaggtcgtttaagtatttctaattttacaaaagtaaaaatcattagagctccaaatgctgaggtgtagattgacagctttaacactgctgaatgccaggttatacagtattcttacaaaaagggaagtcagccaaagactgatctgatggaccaaaatcggaattttgaaaagcaccagtactactttccaaatgatcagcaggttaaacatgttcagcaaggtatagtatgaatccattaacccttcgttgtccagggtccagaccagaactacttgttagttttgaaaacagtagcccaggatgtggttgtgtgctttaggaaagtcagcagtgctgcaggctgtgtagacaaccaaagtttacaaggctgggaagacacttctccaaatacatatacaccaggcatttctttaaaatcaaaaacaatccattagctttggggcggggggtggggggagggttaaatgtaggccttggaaacagttttaagtggcttttaagtatctgcatagaggcaatcctaaggtttgctttaagtctcttaaatctaacatttttaaaagcatttcttccctgtattttcatatacaagttggttttaattttgtttgggtggtgttattttttttaaatgactttttagtttagaaagttctgatgagcaaataaatacatctatctacatgttggaagtccatctgccagcacacctgcttaaagtgaaatgaaagcacataaccaggctctgaatgggttatattttatcatggtgctcccagaatcctttgacctcactctgctttctagtctgcttgtgacactggacagtcctttcttacagagctattatatgttctaggctacgaagggttaaataatcccaaaaatgaggtatgtcatacccacacgtctttatctctagaagctgtgatgtatgtgaaacagcactgttattcttaacactagtgtgtaaaataaggattagtacagtacgtctcattactttttaattcagggcaccctgagtgaaaacaaatacaaaaaaaaatccctaactctgagctctatctctgattcctcttcctccttcccctcttcctcctcttcctctcctcctgttttgctacattctcctcagtggcaaaaagtttcactctacctctgacagcatgtatattgcaccagtagctaacaaaaactggtctagtcaaaccaaatgggcacaaaagaaccaggataccaaaagttaagctcatacagctgcaaaccatatcacttcttggtaacaatgcagacctcataaacctaaagaagagaaagaaaagaaaacttttgttactttccttttttgcttgtcacttatatacaggctatgtgagaatataatttgtaggtataacacattaagaaaaagttatcttcattggatagaattgaatggtggtcgctgataggaatagggcgtcctctagctcttatctctgtctcttactcttttctctttctctttttctctgtcatgagactgtgtgtgacagggccacctgtcttttttttttcttaaattttttttttttttatgtgtaggtgcatgtcttggggatttaaaaatttcaaggctggtttacttatgcaaagcatgcctacgtctggaatacttagggaaagaaagcgactccatgttgtccgaattcctcaagggacagaaaaaaaattggagactgttgaaatgcagatttgaagtaatttttttaaaatattattttgggttctgcgacattgtgaaaaattaaagttgttgtgcaatacttaattcagacatgtaccacaagttaatggtagactaacactggggggtggggtctaggcatcatgcttttgtcagcatactcttgagcttttaagtctactatgtctgaactgtggtttcttgtttatccttttttccttagttggactgtaatgtatggtctgtcaacctgtgaatctttaaagtatgattcaggtattgttgtattctttactgtgtaataaaaaagttgaaaaaaatctggatcctctgtctccctcgtccccggtgtgccatggttgcccaccagtgaccccagcctgaggagtccatcctccatggtgctgaatcaaatctgtagagtttattcagctacaaagcgtggctctgtaacaggagttggcttatccatgcgtgttgagtagggaatgatgtcagaactttgcaaaagtcgagctcattcataaggggatgtttctcaggcaggaggagtaggaagagtgggaggagaattactaccttccataggaaaggagagcttggcttgcctagattagctgctgcatagatagcagaggcccttttggctgtgttttgataaaattagaaatgagtacctaaatctggatcactctgctcagagaggttcgtgccaacctcatgaggctctgactcttgtcaggttgcttggctgccttgtgcatacccgaatggcagatcagctgacatgacatggaactgctctatctgccttgtcccctctcctctaattaaaagtcgctaccattgtcactcttggttatgtagttaatatccactgtggctatctccaacttgctgggacatccagttatctcctctgacacatattttttcattctctagttacaaagtttgttagagtttgaaaaacaaacccttctcccctaccctgtgaatgctgttagtttttatgtgtagttttcaaaacacagattatcttatatactgtgttgtagcagaaattcctgtttcctctgaatgttctgactttatagaccaaaataatcgttgcaaaaaatcaaggatggcacagcaggtgcatgagcccgtgtctggagaaaggttatgaaggtgaatgctggttacatgggagggtgacttggagccctctagtttccttcttgtgccagctgggttcctgtttcaaggccaggcttctctaacttgtcttcctgggaaatgtagcttttccaagaatttggtagtgcacaccaggaaaaactaggtatcagaacagatttttttttaaatagtggaaacaccctcactcccacactttggacagttagggttggatatttaatttcatagttactctttttttccacagaagaaaggccagcctgacccaagttgcctatttttaatgtgttactgcatcttattttctcttcaaagtgaaaaaggccagaaactagcagatagaaatggaacccgttgacttagttcccttataagaagttcttgcaaacacctctgtgacgttttcattcaagtggatatgttggacaaataggaaacagttttagtttacgcgaacagtatgagacttccaggtggtggacgccatttttttagaagtgttgatgatgtatttgataacattataaaagtatgtgtctcccgtgaaagaacattgagctatttccctggaatggatggggaagaaatgagcaaaggagtgctgttctgtatgggtgtctatacccttattccaaggtgaataaataaagttgtgtttgcctaatcatg

SEQ ID NO: 1519 - DNA, 6930 bp, Homo sapiens
gaccgttgcttggcagacactggatggttatgagcctgaacaagctgaaaaggggcaggaaaagaagtggaggcagcattcttcctatttaaagctgcatcgcttgaaaaaagttttcgcagactgtgctggagctggtgctgaaaaagggggtttgcagaggctgccctggggctggtgctgaaagaagagcccacagctgacttcatggtgctacaataacctcagaatctacttttcactctcaggagaacccacatgtctaatatttagacatgatggcaaactgggcggaagcaagacctctcctcattcttattgttttattagggcaatttgtctcaataaaagcccaggaagaagacgaggatgaaggatatggtgaagaaatagcctgcactcagaatggccagatgtacttaaacagggacatttggaaacctgccccttgtcagatctgtgtctgtgacaatggagccattctctgtgacaagatagaatgccaggatgtgctggactgtgccgaccctgtaacgccccctggggaatgctgtcctgtctgttcacaaacacctggaggtggcaatacaaattttggtagaggaagaaagggacaaaagggagaaccaggattagtgcctgttgtaacaggcatacgtggtcgtccaggaccggcaggacctccaggatcacagggaccaagaggagagcgagggccaaaaggaagacctggccctcgtggacctcagggaattgatggagaaccaggtgttcctggtcaacctggtgctccaggacctcctggacatccgtcccacccaggacccgatggcttgagcaggccgttttcagctcaaatggctgggttggatgaaaaatctggacttgggagtcaagtaggactaatgcctggctctgtgggtcctgttggcccaaggggaccacagggtttacaaggacagcaaggtggtgcaggacctacaggacctcctggtgaacctggtgatcctggaccaatgggtccgattggttcacgtggaccagagggccctcctggtaaacctggggaagatggtgaacctggcagaaatggaaatcctggtgaagtgggatttgcaggatctccgggagctcgtggatttcctggggctcctggtcttccaggtctgaagggtcaccgaggacacaaaggtcttgaaggccctaaaggtgaagttggagcacctggttccaagggtgaagctggccccactggtccaatgggtgccatgggtcctctgggtccgaggggaatgccaggagagagagggagacttgggccacagggtgctcctggacaacgaggtgcacatggtatgcctggaaaacctggaccaatgggtcctcttgggataccaggctcttctggttttccaggaaatcctggaatgaagggagaagcaggtcctacaggggcgcgaggccctgaaggtcctcaggggcagagaggtgaaactgggcccccaggtccagttggctctccaggtcttcctggtgcaataggaactgatggtactcctggtgccaaaggcccaacgggctctccgggtacctctggtcctcctggctcagcagggcctcctggatctccaggacctcagggtagcactggtcctcagggaattcgaggccaaccgggtgatccaggagttccaggtttcaaaggagaagctggcccaaaaggggaaccagggccacatggtattcagggtccgataggcccacccggtgaagaaggcaaaagaggtcccagaggtgacccaggaacagttggtcctccagggccagtgggagaaaggggtgctcctggcaatcgtggttttccaggctctgatggtttacctgggccaaagggtgctcaaggagaacggggtcctgtaggttcttcaggacccaaaggaagccagggggatccaggacgtccaggggaacctgggcttccaggtgctcggggtttgacaggaaatcctggtgttcaaggtcctgaaggaaaacttggacctttgggtgcgccaggggaagatggccgtccaggtcctccaggctccataggaatcagagggcagcccgggagcatgggccttccaggccccaaaggtagcagtggtgaccctgggaaacctggagaagcaggaaatgctggagttcctgggcagaggggagctcctggaaaagatggtgaagttggtccttctggtcctgtgggcccgccgggtctagctggtgaaagaggagaacaaggacctccaggccccacaggttttcaggggcttcctggtcctccagggcctcctggagaaggtggaaaaccaggtgatcaaggtgttcctggagatcccggagcagttggcccgttaggacctagaggagaacgaggaaatcctggggaaagaggagaacctgggataactggactccctggtgagaagggaatggctggaggacatggtcctgatggcccaaaaggcagtccaggtccatctgggacccctggagatacaggcccaccaggtcttcaaggtatgccgggagaaagaggaattgcaggaactcctggccccaagggtgacagaggtggcataggagaaaaaggtgctgaaggcacagctggaaatgatggtgcaagaggtcttccaggtcctttgggccctccaggtccggcaggtcctactggagaaaagggtgaacctggtcctcgaggtttagttggccctcctggctcccggggcaatcctggttctcgaggtgaaaatgggccaactggagctgttggttttgccggaccccagggtcctgacggacagcctggagtaaaaggtgaacctggagagccaggacagaagggagatgctggttctcctggaccacaaggtttagcaggatcccctggccctcatggtcctaatggtgttcctggactaaaaggtggtcgaggaacccaaggtccgcctggtgctacaggatttcctggttctgcgggcagagttggacctccaggccctgctggagctccaggacctgcgggacccctaggggaacccgggaaggagggacctccaggtcttcgtggggaccctggctctcatgggcgtgtgggagatcgaggaccagctggcccccctggtggcccaggagacaaaggggacccaggagaagatgggcaacctggtccagatggcccccctggtccagctggaacgaccgggcagagaggaattgttggcatgcctgggcaacgtggagagagaggcatgcccggcctaccaggcccagcgggaacaccaggaaaagtaggaccaactggtgcaacaggagataaaggtccacctggacctgtggggcccccaggctccaatggtcctgtaggggaacctggaccagaaggtccagctggcaatgatggtaccccaggacgggatggtgctgttggagaacgtggtgatcgtggagaccctgggcctgcaggtctgccaggctctcagggtgcccctggaactcctggccctgtgggtgctccaggagatgcaggacaaagaggagatccgggttctcggggtcctataggaccacctggtcgagctgggaaacgtggattacctggaccccaaggacctcgtggtgacaaaggtgatcatggagaccgaggcgacagaggtcagaagggccacagaggctttactggtcttcagggtcttcctggccctcctggtccaaatggtgaacaaggaagtgctggaatccctggaccatttggcccaagaggtcctccaggcccagttggtccttcaggtaaagaaggaaaccctgggccacttgggccaattggacctccaggtgtacgaggcagtgtaggagaagcaggacctgagggccctcctggtgagcctggcccacctggccctccgggtccccctggccaccttacagctgctcttggggatatcatggggcactatgatgaaagcatgccagatccacttcctgagtttactgaagatcaggcggctcctgatgacaaaaacaaaacggacccaggggttcatgctaccctgaagtcactcagtagtcagattgaaaccatgcgcagccccgatggctcgaaaaagcacccagcccgcacgtgtgatgacctaaagctttgccattccgcaaagcagagtggtgaatactggattgatcctaaccaaggatctgttgaagatgcaatcaaagtttactgcaacatggaaacaggagaaacatgtatttcagcaaacccatccagtgtaccacgtaaaacctggtgggccagtaaatctcctgacaataaacctgtttggtatggtcttgatatgaacagagggtctcagttcgcttatggagaccaccaatcacctaatacagccattactcagatgacttttttgcgccttttatcaaaagaagcctcccagaacatcacttacatctgtaaaaacagtgtaggatacatggacgatcaagctaagaacctcaaaaaagctgtggttctcaaaggggcaaatgacttagatatcaaagcagagggaaatattagattccggtatatcgttcttcaagacacttgctctaagcggaatggaaatgtgggcaagactgtctttgaatatagaacacagaatgtggcacgcttgcccatcatagatcttgctcctgtggatgttggcggcacagaccaggaattcggcgttgaaattgggccagtttgttttgtgtaaagtaagccaagacacatcgacaatgagcaccaccatcaatgaccaccgccattcacaagaactttgactgtttgaagttgatcctgagactcttgaagtaatggctgatcctgcatcagcattgtatatatggtcttaagtgcctggcctccttatccttcagaatatttattttacttacaatcctcaagttttaattgattttaaatatttttcaatacaacagtttaggtttaagatgaccaatgacaatgaccacctttgcagaaagtaaactgattgaataaataaatctccgttttcttcaatttatttcagtgtaatgaaaaagttgcttagtatttatgaggaaattcttcttcctggcaggtagcttaaagagtggggtatatagagccacaacacatgtttattttgcttggctgcagttgaaaaatagaaattagtgcccttttgtgacctctcattccaagattgtcaattaaaaatgagtttaaaatgtttaacttgtgatcgagacctacatgcatgtcttgatattgtgtaactataatagagactctttaaggagaatcttaaaaaaaaaaaaacgtttctcactgtcttaaatagaatttttaaatagtatatattcagtggcattttggagaacaaagtgaatttacttcgacttcttaaatttttgtaaaagactataagtttagacatctttctcattcaaatttaaagatatctttctcctcttgatcaatctatcaatattgatagaagtcacactagtatataccatttaatacatttacactttcttatttaagaagatattgaatgcaaaataattgacatatagaactttacaaacatatgtccaaggactctaaattgagactcttccacatgtacaatctcatcatcctgaagcctataatgaagaaaaagatctagaaactgagttgtggagctgactctaatcaaatgtgatgattggaattagaccatttggcctttgaactttcataggaaaaatgacccaacatttcttagcatgagctacctcatctctagaagctgggatggacttactattcttgtttatattttagatactgaaaggtgctatgcttctgttattattccaagactggagataggcagggctaaaaaggtattattatttttcctttaatgatggtgctaaaattcttcctataaaattccttaaaaataaagatggtttaatcactaccattgtgaaaacataactgttagacttcccgtttctgaaagaaagagcatcgttccaatgcttgttcactgttcctctgtcatactgtatctggaatgctttgtaatacttgcatgcttcttagaccagaacatgtaggtccccttgtgtctcaatactttttttttcttaattgcatttgttggctctattttaatttttttcttttaaaataaacagctgggaccatcccaaaagacaagccatgcatacaactttggtcatgtatctctgcaaagcatcaaattaaatgcacgcttttgtcatgtcagtggtttttgttttgtgaaattcctttgaccatattagatctatttcatttccaatagtgaaaaggagatgtggtggtatactttgtttgccatttgtttaaaagatacaacggataccttctatcatgtatgtactggcttataaatgaaaatctatctacaacattacccacaaaggcaacatgacaccaattatcactgcctctgcccttaaaaatgtcagagtagtattattgataaaaagggcaagcaatagatttttcatgactgaataaactgtaataataaaacatatgtctcaaagtgtatcacatatgaatttagcctaattgttttcagtttcattctcaatatttagtttacaacatcattttcccctaaactggttatattttgacctgtatatcttaaatttgagtatttatatgcctaaatacatgtgtgagttttgtttgacttccaagtccaaactataagattatataagttcatatagatgaatcagaaatatgtggtaatactattaagtcacaaacactaacaatttccaactatagaaataacagttcttatttggattttgggaatgctaccaata

SEQ ID NO: 1520 - DNA, 12416 bp, Homo sapiens
cttcttctcgctgagtctcctcctcggctctgacggtacagtgatataatgatgatgggtgtcacaacccgcatttgaacttgcaggcgagctgccccgagcctttctggggaagaactccaggcgtgcggacgcaacagccgagaacattaggtgttgtggacaggagctgggaccaagatcttcggccagccccgcatcctcccgcatcttccagcaccgtcccgcaccctccgcatccttccccgggccaccacgcttcctatgtgacccgcctgggcaacgccgaacccagtcgcgcagcgctgcagtgaattttccccccaaactgcaataagccgccttccaaggccaagatgttcataaatataaagagcatcttatggatgtgttcaaccttaatagtaacccatgcgctacataaagtcaaagtgggaaaaagcccaccggtgaggggctccctctctggaaaagtcagcctaccttgtcatttttcaacgatgcctactttgccacccagttacaacaccagtgaatttctccgcatcaaatggtctaagattgaagtggacaaaaatggaaaagatttgaaagagactactgtccttgtggcccaaaatggaaatatcaagattggtcaggactacaaagggagagtgtctgtgcccacacatcccgaggctgtgggcgatgcctccctcactgtggtcaagctgctggcaagtgatgcgggtctttaccgctgtgacgtcatgtacgggattgaagacacacaagacacggtgtcactgactgtggatggggttgtgtttcactacagggcggcaaccagcaggtacacactgaattttgaggctgctcagaaggcttgtttggacgttggggcagtcatagcaactccagagcagctctttgctgcctatgaagatggatttgagcagtgtgacgcaggctggctggctgatcagactgtcagatatcccatccgggctcccagagtaggctgttatggagataagatgggaaaggcaggagtcaggacttatggattccgttctccccaggaaacttacgatgtgtattgttatgtggatcatctggatggtgatgtgttccacctcactgtccccagtaaattcaccttcgaggaggctgcaaaagagtgtgaaaaccaggatgccaggctggcaacagtgggggaactccaggcggcatggaggaacggctttgaccagtgcgattacgggtggctgtcggatgccagcgtgcgccaccctgtgactgtggccagggcccagtgtggaggtggtctacttggggtgagaaccctgtatcgttttgagaaccagacaggcttccctccccctgatagcagatttgatgcctactgctttaaacctaaagaggctacaaccatcgatttgagtatcctcgcagaaactgcatcacccagtttatccaaagaaccacaaatggtttctgatagaactacaccaatcatccctttagttgatgaattacctgtcattccaacagagttccctcccgtgggaaatattgtcagttttgaacagaaagccacagtccaacctcaggctatcacagatagtttagccaccaaattacccacacctactggcagtaccaagaagccctgggatatggatgactactcaccttctgcttcaggacctcttggaaagctagacatatcagaaattaaggaagaagtgctccagagtacaactggcgtctctcattatgctacggattcatgggatggtgtcgtggaagataaacaaacacaagaatcggttacacagattgaacaaatagaagtgggtcctttggtaacatctatggaaatcttaaagcacattccttccaaggaattccctgtaactgaaacaccattggtaactgcaagaatgatcctggaatccaaaactgaaaagaaaatggtaagcactgtttctgaattggtaaccacaggtcactatggattcaccttgggagaagaggatgatgaagacagaacacttacagttggatctgatgagagcaccttgatctttgaccaaattcctgaagtcattacggtgtcaaagacttcagaagacaccatccacactcatttagaagacttggagtcagtctcagcatccacaactgtttcccctttaattatgcctgataataatggatcatccatggatgactgggaagagagacaaactagtggtaggataacggaagagtttcttggcaaatatctgtctactacaccttttccatcacagcatcgtacagaaatagaattgtttccttattctggtgataaaatattagtagagggaatttccacagttatttatccttctctacaaacagaaatgacacatagaagagaaagaacagaaacactaataccagagatgagaacagatacttatacagatgaaatacaagaagagatcactaaaagtccatttatgggaaaaacagaagaagaagtcttctctgggatgaaactctctacatctctctcagagccaattcatgttacagagtcttctgtggaaatgaccaagtcttttgatttcccaacattgataacaaagttaagtgcagagccaacagaagtaagagatatggaggaagactttacagcaactccaggtactacaaaatatgatgaaaatattacaacagtgcttttggcccatggtactttaagtgttgaagcagccactgtatcaaaatggtcatgggatgaagataatacaacatccaagcctttagagtctacagaaccttcagcctcttcaaaattgccccctgccttactcacaactgtggggatgaatggaaaggataaagacatcccaagtttcactgaagatggagcagatgaatttactcttattccagatagtactcaaaagcagttagaggaggttactgatgaagacatagcagcccatggaaaattcacaattagatttcagccaactacatcaactggtattgcagaaaagtcaactttgagagattctacaactgaagaaaaagttccacctatcacaagcactgaaggccaagtttatgcaaccatggaaggaagtgctttgggtgaagtagaagatgtggacctctctaagccagtatctactgttccccaatttgcacacacttcagaggtggaaggattagcatttgttagttatagtagcacccaagagcctactacttatgtagactcttcccataccattcctctttctgtaattcccaagacagactggggagtgttagtaccttctgttccatcagaagatgaagttctaggtgaaccctctcaagacatacttgtcattgatcagactcgccttgaagcgactatttctccagaaactatgagaacaacaaaaatcacagagggaacaactcaggaagaattcccttggaaagaacagactgcagagaaaccagttcctgctctcagttctacagcttggactcccaaggaggcagtaacaccactggatgaacaagagggcgatggatcagcatatacagtctctgaagatgaattgttgacaggttctgagagggtcccagttttagaaacaactccagttggaaaaattgatcacagtgtgtcttatccaccaggtgctgtaactgagcacaaagtgaaaacagatgaagtggtaacactaacaccacgcattgggccaaaagtatctttaagtccagggcctgaacaaaaatatgaaacagaaggtagtagtacaacaggatttacatcatctttgagtccttttagtacccacattacccagcttatggaagaaaccactactgagaaaacatccctagaggatattgatttaggctcaggattatttgaaaagcccaaagccacagaactcatagaattttcaacaatcaaagtcacagttccaagtgatattaccactgccttcagttcagtagacagacttcacacaacttcagcattcaagccatcttccgcgatcactaagaaaccacctctcatcgacagggaacctggtgaagaaacaaccagtgacatggtaatcattggagaatcaacatctcatgttcctcccactacccttgaagatattgtagccaaggaaacagaaaccgatattgatagagagtatttcacgacttcaagtcctcctgctacacagccaacaagaccacccactgtggaagacaaagaggcctttggacctcaggcgctttctacgccacagcccccagcaagcacaaaatttcaccctgacattaatgtttatattattgaggtcagagaaaataagacaggtcgaatgagtgatttgagtgtaattggtcatccaatagattcagaatctaaagaagatgaaccttgtagtgaagaaacagatccagtgcatgatctaatggctgaaattttacctgaattccctgacataattgaaatagacctataccacagtgaagaaaatgaagaagaagaagaagagtgtgcaaatgctactgatgtgacaaccaccccatctgtgcagtacataaatgggaagcatctcgttaccactgtgcccaaggacccagaagctgcagaagctaggcgtggccagtttgaaagtgttgcaccttctcagaatttctcggacagctctgaaagtgatactcatccatttgtaatagccaaaacggaattgtctactgctgtgcaacctaatgaatctacagaaacaactgagtctcttgaagttacatggaagcctgagacttaccctgaaacatcagaacatttttcaggtggtgagcctgatgttttccccacagtcccattccatgaggaatttgaaagtggaacagccaaaaaaggggcagaatcagtcacagagagagatactgaagttggtcatcaggcacatgaacatactgaacctgtatctctgtttcctgaagagtcttcaggagagattgccattgaccaagaatctcagaaaatagcctttgcaagggctacagaagtaacatttggtgaagaggtagaaaaaagtacttctgtcacatacactcccactatagttccaagttctgcatcagcatatgtttcagaggaagaagcagttaccctaataggaaatccttggccagatgacctgttgtctaccaaagaaagctgggtagaagcaactcctagacaagttgtagagctctcagggagttcttcgattccaattacagaaggctctggagaagcagaagaagatgaagatacaatgttcaccatggtaactgatttatcacagagaaatactactgatacactcattactttagacactagcaggataatcacagaaagcttttttgaggttcctgcaaccaccatttatccagtttctgaacaaccttctgcaaaagtggtgcctaccaagtttgtaagtgaaacagacacttctgagtggatttccagtaccactgttgaggaaaagaaaaggaaggaggaggagggaactacaggtacggcttctacatttgaggtatattcatctacacagagatcggatcaattaattttaccctttgaattagaaagtccaaatgtagctacatctagtgattcaggtaccaggaaaagttttatgtccttgacaacaccaacacagtctgaaagggaaatgacagattctactcctgtctttacagaaacaaatacattagaaaatttgggggcacagaccactgagcacagcagtatccatcaacctggggttcaggaagggctgaccactctcccacgtagtcctgcctctgtctttatggagcagggctctggagaagctgctgccgacccagaaaccaccactgtttcttcattttcattaaacgtagagtatgcaattcaagccgaaaaggaagtagctggcactttgtctccgcatgtggaaactacattctccactgagccaacaggactggttttgagtacagtaatggacagagtagttgctgaaaatataacccaaacatccagggaaatagtgatttcagagcgattaggagaaccaaattatggggcagaaataaggggcttttccacaggttttcctttggaggaagatttcagtggtgactttagagaatactcaacagtgtctcatcccatagcaaaagaagaaacggtaatgatggaaggctctggagatgcagcatttagggacacccagacttcaccatctacagtacctacttcagttcacatcagtcacatatctgactcagaaggacccagtagcaccatggtcagcacttcagccttcccctgggaagagtttacatcctcagctgagggctcaggtgagcaactggtcacagtcagcagctctgttgttccagtgcttcccagtgctgtgcaaaagttttctggtacagcttcctccattatcgacgaaggattgggagaagtgggtactgtcaatgaaattgatagaagatccaccattttaccaacagcagaagtggaaggtacgaaagctccagtagagaaggaggaagtaaaggtcagtggcacagtttcaacaaactttccccaaactatagagccagccaaattatggtctaggcaagaagtcaaccctgtaagacaagaaattgaaagtgaaacaacatcagaggaacaaattcaagaagaaaagtcatttgaatcccctcaaaactctcctgcaacagaacaaacaatctttgattcacagacatttactgaaactgaactcaaaaccacagattattctgtactaacaacaaagaaaacttacagtgatgataaagaaatgaaggaggaagacacttctttagttaacatgtctactccagatccagatgcaaatggcttggaatcttacacaactctccctgaagctactgaaaagtcacattttttcttagctactgcattagtaactgaatctataccagctgaacatgtagtcacagattcaccaatcaaaaaggaagaaagtacaaaacattttccgaaaggcatgagaccaacaattcaagagtcagatactgagctcttattctctggactgggatcaggagaagaagttttacctactctaccaacagagtcagtgaattttactgaagtggaacaaatcaataacacattatatccccacacttctcaagtggaaagtacctcaagtgacaaaattgaagactttaacagaatggaaaatgtggcaaaagaagttggaccactcgtatctcaaacagacatctttgaaggtagtgggtcagtaaccagcacaacattaatagaaattttaagtgacactggagcagaaggacccacggtggcacctctccctttctccacggacatcggacatcctcaaaatcagactgtcaggtgggcagaagaaatccagactagtagaccacaaaccataactgaacaagactctaacaagaattcttcaacagcagaaattaacgaaacaacaacctcatctactgattttctggctagagcttatggttttgaaatggccaaagaatttgttacatcagcaccaaaaccatctgacttgtattatgaaccttctggagaaggatctggagaagtggatattgttgattcatttcacacttctgcaactactcaggcaaccagacaagaaagcagcaccacatttgtttctgatgggtccctggaaaaacatcctgaggtgccaagcgctaaagctgttactgctgatggattcccaacagtttcagtgatgctgcctcttcattcagagcagaacaaaagctcccctgatccaactagcacactgtcaaatacagtgtcatatgagaggtccacagacggtagtttccaagaccgtttcagggaattcgaggattccaccttaaaacctaacagaaaaaaacccactgaaaatattatcatagacctggacaaagaggacaaggatttaatattgacaattacagagagtaccatccttgaaattctacctgagctgacatcggataaaaatactatcatagatattgatcatactaaacctgtgtatgaagacattcttggaatgcaaacagatatagatacagaggtaccatcagaaccacatgacagtaatgatgaaagtaatgatgacagcactcaagttcaagagatctatgaggcagctgtcaacctttctttaactgaggaaacatttgagggctctgctgatgttctggctagctacactcaggcaacacatgatgaatcaatgacttatgaagatagaagccaactagatcacatgggctttcacttcacaactgggatccctgctcctagcacagaaacagaattagacgttttacttcccacggcaacatccctgccaattcctcgtaagtctgccacagttattccagagattgaaggaataaaagctgaagcaaaagccctggatgacatgtttgaatcaagcactttgtctgatggtcaagctattgcagaccaaagtgaaataataccaacattgggccaatttgaaaggactcaggaggagtatgaagacaaaaaacatgctggtccttcttttcagccagaattctcttcaggagctgaggaggcattagtagaccatactccctatctaagtattgctactacccaccttatggatcagagtgtaacagaggtgcctgatgtgatggaaggatccaatcccccatattacactgatacaacattagcagtttcaacatttgcgaagttgtcttctcagacaccatcatctcccctcactatctactcaggcagtgaagcctctggacacacagagatcccccagcccagtgctctgccaggaatagacgtcggctcatctgtaatgtccccacaggattcttttaaggaaattcatgtaaatattgaagcgactttcaaaccatcaagtgaggaataccttcacataactgagcctccctctttatctcctgacacaaaattagaaccttcagaagatgatggtaaacctgagttattagaagaaatggaagcttctcccacagaacttattgctgtggaaggaactgagattctccaagatttccaaaacaaaaccgatggtcaagtttctggagaagcaatcaagatgtttcccaccattaaaacacctgaggctggaactgttattacaactgccgatgaaattgaattagaaggtgctacacagtggccacactctacttctgcttctgccacctatggggtcgaggcaggtgtggtgccttggctaagtccacagacttctgagaggcccacgctttcttcttctccagaaataaaccctgaaactcaagcagctttaatcagagggcaggattccacgatagcagcatcagaacagcaagtggcagcgagaattcttgattccaatgatcaggcaacagtaaaccctgtggaatttaatactgaggttgcaacaccaccattttcccttctggagacttctaatgaaacagatttcctgattggcattaatgaagagtcagtggaaggcacggcaatctatttaccaggacctgatcgctgcaaaatgaacccgtgccttaacggaggcacctgttatcctactgaaacttcctacgtatgcacctgtgtgccaggatacagcggagaccagtgtgaacttgattttgatgaatgtcactctaatccctgtcgtaatggagccacttgtgttgatggttttaacacattcaggtgcctctgccttccaagttatgttggtgcactttgtgagcaagataccgagacatgtgactatggctggcacaaattccaagggcagtgctacaaatactttgcccatcgacgcacatgggatgcagctgaacgggaatgccgtctgcagggtgcccatctcacaagcatcctgtctcacgaagaacaaatgtttgttaatcgtgtgggccatgattatcagtggataggcctcaatgacaagatgtttgagcatgacttccgttggactgatggcagcacactgcaatacgagaattggagacccaaccagccagacagcttcttttctgctggagaagactgtgttgtaatcatttggcatgagaatggccagtggaatgatgttccctgcaattaccatctcacctatacgtgcaagaaaggaacagtcgcttgcggccagccccctgttgtagaaaatgccaagacctttggaaagatgaaacctcgttatgaaatcaactccctgattagataccactgcaaagatggtttcattcaacgtcaccttccaactatccggtgcttaggaaatggaagatgggctatacctaaaattacctgcatgaacccatctgcataccaaaggacttattctatgaaatactttaaaaattcctcatcagcaaaggacaattcaataaatacatccaaacatgatcatcgttggagccggaggtggcaggagtcgaggcgctgatccctaaaatggcgaacatgtgttttcatcatttcagccaaagtcctaacttcctgtgcctttcctatcacctcgagaagtaattatcagttggtttggatttttggaccaccgttcagtcattttgggttgccgtgctcccaaaacattttaaatgaaagtattggcattcaaaaagacagcagacaaaatgaaagaaaatgagagcagaaagtaagcatttccagcctatctaatttctttagttttctatttgcctccagtgcagtccatttcctaatgtataccagcctactgtactatttaaaatgctcaatttcagcaccgatggccatgtaaataagatgatttaatgttgattttaatcctgtatataaaataaaaagtcacaatgagtttgggcatatttaatgatgattatggagccttagaggtctttaatcattggttcggctgcttttatgtagtttaggctggaaatggtttcacttgctctttgactgtcagcaagactgaagatggcttttcctggacagctagaaaacacaaaatcttgtaggtcattgcacctatctcagccataggtgcagtttgcttctacatgatgctaaaggctgcgaatgggatcctgatggaactaaggactccaatgtcgaactcttctttgctgcattcctttttcttcacttacaagaaaggcctgaatggaggacttttctgtaaccaggaacattttttaggggtcaaagtgctaataattaactcaaccaggtctactttttaatggctttcataacactaactcataaggttaccgatcaatgcatttcatacggatatagacctagggctctggagggtgggggattgttaaaacacatgcaaaaaaaaaaaaaaaaaaaaaaaaagaaattttgtatatataaccattttaatcttttataaagttttgaatgttcatgtatgaatgctgcagctgtgaagcatacataaataaatgaagtaagccatactgatttaatttattggatgttattttccctaagacctgaaaatgaacatagtatgctagttatttttcagtgttagccttttactttcctcacacaatttggaatcatataatataggtactttgtccctgattaaataatgtgacggatagaatgcatcaagtgtttattatgaaaagagtggaaaagtatatagcttttagcaaaaggtgtttgcccattctaagaaatgagcgaatatatagaaatagtgtgggcatttcttcctgttaggtggagtgtatgtgttgacatttctccccatctcttcccactctgttttctccccattatttgaataaagtgactgctgaagatgactttgaatccttatccacttaatttaatgtttaaagaaaaacctgtaatggaaagtaagactccttccctaatttcagtttagagcaacttgaagaagagtagacaaaaaataaaatgcacatagaaaaagagaaaaagggcacaaagggattggcccaatattgattctttttttataaaacctcctttggcttagaaggaatgactctagctacaataatacacagtatgtttaagcaggttcccttggttgttgcattaaatgtaatccacctttaggtattttagagcacagaacaacactgtgttgatctagtaggtttctatttttcctttctctttacaatgcacataatactttcctgtatttatatcataacgtgtatagtgtaaaatgtgaatgactttttttgtgaatgaaaatctaaaatctttgtaactttttatatctgcttttgtttcaccaaagaaacctaaaatccttcttttactacac

SEQ ID NO: 1521 - DNA, 121 bp, Homo sapiens
  misc_feature (1)..(2): n is a, c, g, or t
nnactctggtttctcttcaaatcgtataaatctttcgccttttactaaagatttccgtggagagaaacgagtgtgagtctgaaaccaattttttgaggccttgcgttttttagcagggctt

SEQ ID NO: 1522 - DNA, 9663 bp, Homo sapiens
ataaattcattgttccacctcctcgcatcttcacagcgctcgcgctgctctcggcgctcgcagctgccgactggggatgacggcgggcaggaggagaccgcagccgaagggacacagacacgccgcttcaccagctcgcctcaggctgcccccctgcatttttgttttaatttttacggctttttcccctctctttcttcccttcctcctggtcccagcagagccaaggaaacccacaaaataagaaaggaagtgggccccggagcttggaacctccacagccggcttgtccagcgcagcgcgggggcgggaggctgcgcgcaccagttgccagcccggtgcgcggtacctttccttacttttcttgaaacagcgatcgtgcctgcatttggtggttttttggtttttgtttttttccttttcccgtatttgctgaatctccactatccgactttttttttttaatcttttctttccccccccccccaccccacctctttctggagcacgaatccaaacattttcccaagcaacaaagaaaagttcgcacgctggcaccgcagcccggacaggctggcgctgctgccgggcccccctccctccgacacttgactcaatcctgcaagcaagtgtgtgtgtgtccccatcccccgccccgttaacttcatagcaaataacaaatacccataaagtcccagtcgcgcagcccctccccgcgggcagcgcactatgctgctcgggtgggcgtccctgctgctgtgcgcgttccgcctgcccctggccgcggtcggccccgccgcgacacctgcccaggataaagccgggcagcctccgactgctgcagcagccgcccagccccgccggcggcagggggaggaggtgcaggagcgagccgagcctcccggccacccgcaccccctggcgcagcggcgcaggagcaaggggctggtgcagaacatcgaccaactctactccggcggcggcaaggtgggctacctcgtctacgcgggcggccggaggttcctcttggacctggagcgagatggttcggtgggcattgctggcttcgtgcccgcaggaggcgggacgagtgcgccctggcgccaccggagccactgcttctatcggggcacagtggacggtagtccccgctctctggctgtctttgacctctgtgggggtctcgacggcttcttcgcggtcaagcacgcgcgctacaccctaaagccactgctgcgcggaccctgggcggaggaagaaaaggggcgcgtgtacggggatgggtccgcacggatcctgcacgtctacacccgcgagggcttcagcttcgaggccctgccgccgcgcgccagctgcgaaacccccgcgtccacaccggaggcccacgagcatgctccggcgcacagcaacccgagcggacgcgcagcactggcctcgcagctcttggaccagtccgctctctcgcccgctgggggctcaggaccgcagacgtggtggcggcggcggcgccgctccatctcccgggcccgccaggtggagctgcttctggtggctgacgcgtccatggcgcggttgtatggccggggcctgcagcattacctgctgaccctggcctccatcgccaataggctgtacagccatgctagcatcgagaaccacatccgcctggccgtggtgaaggtggtggtgctaggcgacaaggacaagagcctggaagtgagcaagaacgctgccaccacactcaagaacttttgcaagtggcagcaccaacacaaccagctgggagatgaccatgaggagcactacgatgcagctatcctgtttactcgggaggatttatgtgggcatcattcatgtgacaccctgggaatggcagacgttgggaccatatgttctccagagcgcagctgtgctgtgattgaagacgatggcctccacgcagccttcactgtggctcacgaaatcggacatttacttggcctctcccatgacgattccaaattctgtgaagagacctttggttccacagaagataagcgcttaatgtcttccatccttaccagcattgatgcatctaagccctggtccaaatgcacttcagccaccatcacagaattcctggatgatggccatggtaactgtttgctggacctaccacgaaagcagatcctgggccccgaagaactcccaggacagacctacgatgccacccagcagtgcaacctgacattcgggcctgagtactccgtgtgtcccggcatggatgtctgtgctcgcctgtggtgtgctgtggtacgccagggccagatggtctgtctgaccaagaagctgcctgcggtggaagggacgccttgtggaaaggggagaatctgcctgcagggcaaatgtgtggacaaaaccaagaaaaaatattattcaacgtcaagccatggcaactggggatcttggggatcctggggccagtgttctcgctcatgtggaggaggagtgcagtttgcctatcgtcactgtaataaccctgctcccagaaacaacggacgctactgcacagggaagagggccatctaccgctcctgcagtctcatgccctgcccacccaatggtaaatcatttcgtcatgaacagtgtgaggccaaaaatggctatcagtctgatgcaaaaggagtcaaaacttttgtggaatgggttcccaaatatgcaggtgtcctgccagcggatgtgtgcaagctgacctgcagagccaagggcactggctactatgtggtattttctccaaaggtgaccgatggcactgaatgtaggctgtacagtaattccgtctgcgtccgggggaagtgtgtgagaactggctgtgacggcatcattggctcaaagctgcagtatgacaagtgcggagtatgtggaggagacaactccagctgtacaaagattgttggaacctttaataagaaaagtaagggttacactgacgtggtgaggattcctgaaggggcaacccacataaaagttcgacagttcaaagccaaagaccagactagattcactgcctatttagccctgaaaaagaaaaacggtgagtaccttatcaatggaaagtacatgatctccacttcagagactatcattgacatcaatggaacagtcatgaactatagcggttggagccacagggatgacttcctgcatggcatgggctactctgccacgaaggaaattctaatagtgcagattcttgcaacagaccccactaaaccattagatgtccgttatagcttttttgttcccaagaagtccactccaaaagtaaactctgtcactagtcatggcagcaataaagtgggatcacacacttcgcagccgcagtgggtcacgggcccatggctcgcctgctctaggacctgtgacacaggttggcacaccagaacggtgcagtgccaggatggaaaccggaagttagcaaaaggatgtcctctctcccaaaggccttctgcgtttaagcaatgcttgttgaagaaatgttagcctgtggttatgatcttatgcacaaagataactggaggattcagcactgatgcagtcgtggtgaacaggaggtctacctaacgcacagaaagtcatgcttcagtgacattgtcaacaggagtccaattatgggcagaatctgctctctgtgaccaaaagaggatgtgcactgcttcacgtgacagtggtgaccttgcaatatagaaaaacttgggagttattgaacatcccctgggcttacaagaaacactgatgaatgtaaaatcaggggacatttgaagatggcagaactgtctcccccttgtcacctacctctgatagaatgtctttaatggtatcataatcattttcacccataatacacagtagcttcttcttactgtttgtaaatacattctcccttggtatgtcactttatatcccctggttctattaaaatatccatatatatttctataaaaaaagtgtttgaccaaagtaggtctgcagctatttcaacttccttccgtttccagaaagagctgtggatattttactggaaattaagaacttgctgctgttttaataagatgtagtatattttctgactacaggagataaaatttcagtcaaaaaaccattttgacagcaagtatcttctgagaaattttgaaaagtaaatagatctcagtgtatctagtcacttaaatacatacacgggttcatttacttaaacctttgactgcctgtatttttttcaggtagctagccaaattaatgcataatttcagatgtagaagtagggtttgcgtgtgtgtgtgtgatcatactcaagagtctaaaaactagtttccttgtgttggaaatttaaaaggaaaaaaatcgtatttcactgtgttttcaatttatattttcacaactactttctctctccagagctttcatctgatatctcacaatgtatgatatacgtacaaaacacacagcaagttttctatcatgtccaacacattcaacactggtatacctcctaccagcaagcctttaaaatgcatttgtgtttgcttatttgttttgttcaagggttcagtaagacctacaatgttttgtatttcttgacttattttattagaaacattaaagatcacttggtagttagccacattgagaagtggttatcattgttaatgtggttaatgccaaaaagtggttaatattaataagactgtttccacaccataggcaataatttcttaatttaaaaaatctaagtatattcctattgtactaaatatttttcccaactggaaagcacttgattgtacccgtaagtgtttgagtgatgacatgtgatgattttcagaaagttgttgtttttgtttccatagcctgtttaagtaggttgtaagtttgaatagttagacatggaaattattttataagcacacacctaaagatatctttttagatgataaaatgtacacccccccatcaccaacctcacaacttagaaaatctaagttgtttgatttctttgggatttcttttgttgtgaaacactgcaaagccaatttttctttataaaaattcatagtaatcctgccaaatgtgcctattgttaaagatttgcatgtgaagatcttagggaaccactgtttgagttctacaagctcatgagagtttatttttattataagatgtttttaatataaaagaattatgtaactgatcactatattacatcatttcagtgggccaggaaaatagatgtcttgctgttttcagtattttcttaagaaattgcttttaaaacaaataattgttttacaaaaccaataattatcctttgaattttcatagactgactttgcttttgacgtagaaattttttttctcaataaattatcactttgagaaatgaggcctgtacaaggctgataacctatatgtgatggagatcacccaatgccaagggcagaaagcaaacctagttaaataggtgagaaaaaaaataataatcccagtgccatttgtctgtgcaaagagaattaggagagaggttaatgttacttttttccattttggaaataattttaatcaagtaactcaaatgtgacaaaatttatttttattttttgtggttatattcccaacaacattaaaaaatactcgaggcataaatgtagttgtctcctactctgcttctcttactatactcatacatttttaatatggtttatcaatgattcatgtttccctcaaatagtgatggtttacacctgtcatggaaacaatcctagagagctcagagcaattaaaccactattccatgcttttaagtagttttctccacctttttcttatgagtctcactagattgactgaggaatgtatgtctaaattcctggagaagatgatatggattggaaactgaaattcagagaaatggagtgttcaatagataccacgaattgtgaacaaagggaaaattctatacaactcaatctaagtcagtccactttgacttcgtactgtctttcacctttccattgttgcatcttgaattttttaaaatgtctagaattcaggatgctaggggctacttctttaaaaaaaaaaaaaaaaaagaattcgtctgaaaatgctcaggtttgtaagaatctaatctcacttacataactaagcactccataataagttttattaagtacaaagggagccagaaaaaatgacatttatttcttctagatcagaaaaatttaaattaagccctgccttgctgtttagaaatatgtgggcattgttataatttattcaataaatttatgttcctttgccttcctgtggaaacagttttatcccactaaactaggaattaggggataaatcacaaacaaaaaaaaagttgcagcactgaaaaaaagtaatttattgtttttgcaactggtatgtgaatttgtgtgataaaattatttattcttatttaacaaaaatatgttcaaatttttctatatttaaaatgttttgctgttgtcctactttttaatttatgcttcatgtttgtgtataaagtacacttttacactttgtgagtttacataatatacagcactggttgcttttgtatttttttacagaaagctttctgtgtgaagcaggtgtatatgtatatattcctcatgtattcttattctgatactatcatttttctttccaaggaaattttaatctgtcatgaccaatagtgttcattacttgtgcctatgataataggttttttacatcacattaacactattttttccaagtcacaaataagaaaaacacttattcaatgaaacaaggtgcaagttttaaatttgggtacacaaatagcctagaagcttcctacagacgctaagacacagccaataatcagatcctttcacttcatcgagaaacttggacaagtcgatattgatgtattagatgaaagttgtctacacacaacttctgagggatacaaacgataataaaaccaaatgttgtctgtttctcctttagaaacacctcctaaaattaatatcatttagtctctagtgtctgtaggattctacagatgagcacaaatagattgggtttgtataacaaatgctaatagtcataactgtttctacaaatatggggtgtccattaagagaatgtgatgttttcctactgctgttgaatcccatggggtgattataggacttgaaataggcagagtcacctctgatgacatcagcttgcctctgtgatttcacagtctgatcctggcaacaagacaaagcacccttggacacacagccaatctctggttgtgatatttccccattgattccttccttgttaacaaggtcattttaatggttcaggtgaggacagcagccagattcaaagtccagaatttgtgctgttacatagagttcacactgtcaaataacattgaatttaataatgatcaaatttttctagtagtctttggcagagtgtataatctcattggcatgattggtgaatattactaatctctttataatgaaagatgctttacaaataccttatatttgctaacatttcaaaactactaaataaatgaaatagccatgtgtacagaaatggtcatttaaagctttaatagaaccaaattcaagacaatgtatcatttagacacacagaaaaggaacttgtatgttttccctattatttttctcatttgccaacaatctatagttttaggttatcaaacagatagatcaacttaactggctagtacattgaaaaatcttcctaagaatcctttgttagcataatctatagagataatttctcaaattatatcatcatgatgcatataaactctataatgtataattgtgtttcatttatttaatgtatgagaacatattgaaatacaaaaccatgcattagccaaaaaattggaatacaggtagtgttcagatcagcaaaacattcagtctggtaaatgcctgcctggggctatgatatcattctcaatgcaggttttatggaaaaactaaaagaatatgttgttagatgatgttggttttgaaaaaaaaaagacattaacatacacattagttagcccagttaattgcattctactaatatagttgcacattagcaataattttgctgtctctggtctttattttgtggcttcaactaactggaccatgtggactgtaaaggtcaaatggaaaaaacgagcagtggcccctcatcctgtaaggtactgctacatcagagtgacctaaaagtctaacactgtgaggaaaactgtgatttgtaggaaaaaaaaaaaaaacaaataaaaaacagggcatgctttttaatttttttccactttcctttggcacacccaatgaacaattctaatttttattgaggtgctaacatctttcgtgaccgactgtcaaatgtggtatttttgagttactatttttctacatgattttacagtttgcaagaaagacctctaagctttgtgtcacggtagggcacaacttgatactcaaaatttgaaaaataagcacatccaatgattgttttgaccaacagtggtcagtgacgtaaactgcatgtgcatctgaggacatttaaggggtcattaaaatttgaggagcatcaggccggagtagcagacttttagatgagtcatatttcagcattcactaagtcctcagcattccattcaaactgtcgtgtatatttggcctgattttttttcaagctttgcaataatttatgttattggtaaacacttggtgactatatctcagccttttctttaacaactcacaatatattagaaacacgtctacctatactgagagtatatttacaatagaagaacatactgtatgtgactttgtaaagctagacttttgattaagaaatatataatctctggatgctatttttgcattatacactcaggcacaacgtaaaccttgatggctcatcttgctacaattacgagttgaaaaacactacttacgtatttgtatgacctattagtcagaggaaatcatacatatgctttgtaaatagactttgcagataactaaatagactgaagaaatatgttgcatttgatagaagcaattgcataaatatttggtttctatattagagtctgtgagtaaagtcaagtaataaacctaagtaggtataacagatttttaaaccttgaaacttgctttgatggtagagaaaatcattgaagatttacatactgtatataagatgtaaaatgtacgctgcttattaccctcaattttccagaagcaatggtatataatgcagttgaaaaaccaaaaatcttggaaaactaagacgggtcttgtttaaaatgtctctcagctttggcaaccttcaaatcttaatcaactatttaaagcattactgtgtcttgtagcctgcattccacaacagctctgttattcaggtaaaagacttgaactgagccgtttgggacctatactgtaatattttcattgaggaacaatatcctattttgtaaagcatttccctatgtgtgactttaaactgtaaaattaaacactgcttttgtgggttcagtgggcataataaatataaattgtaaactaggttaaagta

SEQ ID NO: 1523 - DNA, 11733 bp, Homo sapiens
cgccgctgtgcccaccccctcgccggagagagtgctggtaactccttccccagagtctgattacctgctccgcgaggccgcggacacgtgcggagagccgactgacactcgcagccccctcgggaggcccgacgcgactgggcccctcaggtgcaatgattctggactgagacgcgcttgggcagaggctatgtaatcgtgtctgtgttgaggacttcgcttcgaggagggaagaggagggatcggctcgctcctccggcggcggcggcggcggcgactctgcaggcggagtttcgcggcggcggcaccagggttacgccagccccgcggggaggtctctccatccagcttctgcagcggcgaaagccccagcgcccgagcgcctgagccggcggggagcaagtaaagctagaccgatctccggggagccccggagtaggcgagcggcggccgccagctagttgagcgcaccccccgcccgccccagcggcgccgcggcgggcggcgtccaggcggcatggagaaggacggcctgtgccgcgctgaccagcagtacgaatgcgtggcggagatcggggagggcgcctatgggaaggtgttcaaggcccgcgacttgaagaacggaggccgtttcgtggcgttgaagcgcgtgcgggtgcagaccggcgaggagggcatgccgctctccaccatccgcgaggtggcggtgctgaggcacctggagaccttcgagcaccccaacgtggtcaggttgtttgatgtgtgcacagtgtcacgaacagacagagaaaccaaactaactttagtgtttgaacatgtcgatcaagacttgaccacttacttggataaagttccagagcctggagtgcccactgaaaccataaaggatatgatgtttcagcttctccgaggtctggactttcttcattcacaccgagtagtgcatcgcgatctaaaaccacagaacattctggtgaccagcagcggacaaataaaactcgctgacttcggccttgcccgcatctatagtttccagatggctctaacctcagtggtcgtcacgctgtggtacagagcacccgaagtcttgctccagtccagctacgccacccccgtggatctctggagtgttggctgcatatttgcagaaatgtttcgtagaaagcctctttttcgtggaagttcagatgttgatcaactaggaaaaatcttggacgtgattggactcccaggagaagaagactggcctagagatgttgcccttcccaggcaggcttttcattcaaaatctgcccaaccaattgagaagtttgtaacagatatcgatgaactaggcaaagacctacttctgaagtgtttgacatttaacccagccaaaagaatatctgcctacagtgccctgtctcacccatacttccaggacctggaaaggtgcaaagaaaacctggattcccacctgccgcccagccagaacacctcggagctgaatacagcctgaggcctcagcagccgccttaagctgatcctgcggagaacacccttggtggcttatgggtccccctcagcaagccctacagagctgtggaggattgctatctggaggccttccagctgctgtcttctggacaggctctgcttctccaaggaaaccgcctagtttactgttttgaaatcaatgcaagagtgattgcagctttatgttcatttgtttgtttgtttgtctgtttgtttcaagaacctggaaaaattccagaagaagagaagctgctgaccaattgtgctgccatttgatttttctaaccttgaatgctgccagtgtggagtgggtaatccaggcacagctgagttatgatgtaatctctctgcagctgccgggcctgatttggtacttttgagtgtgtgtgtgcatgtgtgtgtgtgtgtgtgtgtgtgtgtgtgtgtatgtgagagattctgtgatcttttaaagtgttactttttgtaaacgacaagaataattcaattttaaagactcaaggtggtcagtaaataacaggcatttgttcactgaaggtgattcaccaaaatagtcttctcaaattagaaagttaaccccatgtcctcagcatttcttttctggccaaaagcagtaaatttgctagcagtaaaagatgaagttttatacacacagcaaaaaggagaaaaaattctagtatattttaagagatgtgcatgcattctatttagtcttcagaatgctgaatttacttgttgtaagtctattttaaccttctgtatgacatcatgctttatcatttcttttggaaaatagcctgtaagctttttattacttgctataggtttagggagtgtacctcagatagattttaaaaaaaagaatagaaagcctttatttcctggtttgaaattcctttcttccctttttttgttgttgttattgttgtttgttgttgttattttgtttttgtttttaggaatttgtcagaaactctttcctgttttggtttggagagtagttctctctaactagagacaggagtggccttgaaattttcctcatctattacactgtactttctgccacacactgccttgttggcaaagtatccatcttgtctatctcccggcacttctgaaatatattgctaccattgtataactaataacagattgcttaagctgttcccatgcaccacctgtttgcttgctttcaatgaacctttcataaattcgcagtctcagcttatggtttatggcctcgattctgcaaacctaacagggtcacatatgttctctaatgcagtccttctacctggtgtttacttttgttacctaaataatgagtaggatcttgttttgttttatcaccagcacacagattgctataaactgttactttgtgaattacatttttatagaagatattttcagtgtctttacctgagggtatgtctttagctatgttttagggccatacatttactctatcaaatgatcttttctccatcccccaggctgtgcttatttctagtgccttgtgctcactcctgctctctacagagccagcctggcctgggcattgtaaacagcttttcctttttctcttactgttttctctacagtcctttatatttcataccatctctgccttataagtggtttagtgctcagttggctctagtaaccagaggacacagaaagtatcttttggaaagtttagccacctgtgctttctgactcagagtgcatgcaacagttagatcatgcaacagttagattatgtttagggttaggattttcaaagaatggaggttgctgcactcagaaaataattcagatcatgtttatgcattattaagttgtactgaattctttgcagcttaatgtgatatatgactatcttgaacaagagaaaaaactaggagatgtttctcctgaagagcttttggggttgggaactattcttttttaattgctgtactacttaacattgttctaattcagtagcttgaggaacaggaacattgttttctagagcaagataataaaggagatgggccatacaaatgttttctactttcgttgtgacaacattgattaggtgttgtcagtactataaatgcttgagatataatgaatccacagcattcaaggtcaggtctactcaaagtctcacatggaaaagtgagttctgcctttcctttgatcgagggtcaaaatacaaagacatttttgctagggcctacaaattgaatttaaaaactcactgcactgattcatctgagctttttggttagtattcatggctagagtgaacatagctttagtttttgctgttgtaaaagtgttttcataagttcactcaagaaaaatgcagctgttctgaactggaatttttcagcattctttagaattttaaatgagtagagagctcaacttttattcctagcatctgcttttgactcatttctaggcagtgcttatgaagaaaaattaaagcacaaacattctggcattcaatcgttggcagattatcttctgatgacacagaatgaaagggcatctcagcctctctgaactttgtaaaaatctgtccccagttcttccatcggtgtagttgttgcatttgagtgaatactctcttgatttatgtattttatgtccagattcgccatttctgaaatccagatccaacacaagcagtcttgccgttagggcattttgaagcagatagtagagtaagaacttagtgactacagcttattcttctgtaacatatggtttcaaacatctttgccaaaagctaagcagtggtgaactgaaaagggcatattgccccaaggttacactgaagcagctcatagcaagttaaaatattgtgacagatttgaaatcatgtttgaatttcatagtaggaccagtacaagaatgtccctgctagtttctgtttgatgtttggttctggcggctcaggcattttgggaactgttgcacagggtggagtcaaaacaacctacatataaaaagagaaaaagagaaacttgtccatttagctttcataagaaatcccatggcaaagggtaataaaaaggacctaatcttaaaaatacaatttctaagcacttgtaagaacccagtgggttggagcctcccactttgtccctcctttgaagtggatgggaactcaaggtgcaaagaacctgttttggaagaaagcttggggccatttcagccccctgtattctcatgattttctctcaggaagcacacactgtgaatggcagacttttcatttagccccaggtgacttactaaaaatagttgaaaattattcacctaagaatagaatctcagcattgtgttaaataaaaatgaaagctttagaaggcatgagatgttcctatcttaaataaagcatgtttcttttctatagagaaatgtatagtttgactctccagaatgtactatccatcttgatgagaaaactcttaaatagtaccaaacattttgaactttaaattatgtatttaaagtgagtgtttaagaaactgtagctgcttcttttacaagtggtgcctattaaagtcagtaatggccattattgttccattgtggaaattaaattatgtaagcttcctaatatcataaacatattaaaattcttctaaaatattgcttttcttttaagtgacaatttgactattcttatgataagcacatgagagtgtcttacattttccaaaagcaggctttaattgcatagttgagtctaggaaaaaataatgttaaaagtgaatatgccaccataattacttaattatgttagtatagaaactacagaatatttaccctggaaagaaaatattggaatgttattataaactcttagatatttatataattcaaaagaatgcatgtttcacattgtgacagataaagatgtatgatttctaaggctttaaaaattattcataaaacagtgggcaatagataaaggaaattctggagaaaatgaaggtatttaaagggtagtttcaaagctatatatattttgaaggatatattctttatgaacaaatatattgtaaaaatttatactaaggtcatctggtaactgtgggattaatatggtcgaaaacaaatgttatggagaagctgtcccaagcaaactaaattacctgtacttttttcccatttcaagggaagaggcaaccacatgaagcaatacttcttacacatgcctaagaacgttcattgaaaaaataaatttttaaaaggcatgtgtttcctatgccaccaatacttttgaaaaattgtgaaccttacccaaaaccatttatcatgtccattaagtatatttgggtatataattaggaagatatttacatgttccatctccacagtggaaaaacttattgaggctaccaaagtgtgccaagaaatgtaagtccttagagtaattagaaatgctgttttcctcaaaagcatgagaaactagcattttcatttcttatttactccctttctatatcaatgcaattcacaacccaattttaatacatccctatatctcaagcatttctatcttgtactttttcagaaaataaaccaaaaataatcctttggtctctctatcttctgacctttgtaagcaacagaaatgtaaaaacagaaggggtccaatttttacacgtttttttctcaagtagcctttctggggatttttattttcttaatgaagtgccaatcagcttttcaaaatgttttctatttctcagcatttccaggaagtgataacgtttagctaaatgagtagaagtggacttccttcaacatattgttaccttgtctagccttaggaagaaaacaagagccacctgaaaataaatacaggctcttttcgagcatctgctgaaatactgttacagcaatttgaagttgatgtggtaggaaaggaaggtgacttttcttgcaaaagtctttctaaacattcacactgtcctaagagatgagctttcttgttttattccggtatattccacaaggtggcacttttagagaaaaacaaatctgatgaagactaaagaggtacttctaaaagagatttcattctaactttatttttctgcgcatatttaactctttcctagcacttgttttttgggatgattaatagtctctataatgttctgtaacttcaatattttacttgttacctaggttctgaacaattgtctgcaaataaattgttcttaaggatggataatacacccattttgatcatttaagtaaagaaagcctagtcattcattcagtcaagaaaaaatttttgaagtacccagttaccttacttttctagattaaaacaggcttagttactaaaaaggcagtcctcatctgtgaacaggatagtttcgttagaagtataaaactcctttagtggccccagttaaaacacacataccctctctgctgctttcaaattccctagcatggtggcctttcaacattgattaaattttaaaatcctaatttaaagatcaggtgagcaaaatgagtagcacatcagtaattcagtagacaaaacttttgtctgaaaaattgctgtattgaaacagagccctaaaataccaaaagaccaggtaattttaacatttgtggaatcacaaatgtaaattcataagaagctctaattaaaaaaaaaaagtctgaagtatatgagcataacaacttaggagtgtgtctacatacttaacttttgaagttttttggcaactttatatactttttttaaatttacaagtctacttaaagacttcttataccccaaatgattaagttaattttagaggtcacctttctcacagcagtgtcacttgaaatttagtagggaaggatattgcagtatttttcagtttccttagcacagcaccacagaaagcagcttattccttttgagtggcagacactcgacggtgcctgcccaactttcctcctgagtggcaagcagatgagtctcagtaattcatactgaaccaaaatgccacatacactaggggcagtcagaaactggctgagaaatcccccgcctcattcgcccctctgctcccaggaactagagtccagttaaagcccctatgcgaaaggccgaattccaccccagggtttgttataacagtggccagtctgaaccccatttgctcgtgctcaaaacttgattcccacttgaaagccttccgggcgcgctgcctcgttgccccgcccctttggcaggagagaggcagtgggcgaggccgggctggggccccgcctcccactcacctgccggtgcctgaaattatgtgcggccccgcgggctgctttccgaggtcagagtgccctgctgctgtctcagaggcatctgttctgcaaatcttaggaagaaaaatgtccctagtagcaaacgggtgtcttctgtgcataaataagtacaacacaattctccgaaagttcgggtaaaaagagatgcggtagcagctgccctgtgtgaagctgtctaccccgcatctctcaggcgctaagctcagtttttgtttttgtttttgtttttttaaagaaaagatgtataattgcaggaatttttttttatttttttattttccatcattctatatatgtgatggtgaaagatatgcctggaaaagttttgttttgaaaagtttattttctgcttcgtcttcagttggcaaaagctctcaattctttagcttccagtttcttttctctctttttctttgttaggtaattaaaggtatgtaaacaaattatctcatgtagcaggggattttcatgttgagaggaatcttccgtgtgagttgtttggtcacacaaataaccctttctcaattttaggagtttggattgtcaaatgtaggtttttctcaaagggggcatataactacatattgactgccaagaactatgactgtagcactaatcagcacacatagagccacacaattatttaatttctaactctctgtggtccctagaaaaattccgttgatgtgcttaggttaaagttctgaagatacccgttgtacccttacttgaaagtttctaatcttaagttttatgaaatgcaataatatgtatcagctagcaatatttctgtgatcaccaacaactctcagtttgatcttaaagtctgaataataaaacaaatcccagcagtaatacatttcttaaacctcacagtgcatgatatatcttttcattctgatcctgtgtttgcaaaaatatacacatgtatatcatagttcctcactttttattcatttgttttcctattacctgtagtaaatatattagttagtacatggaatttatagcatcagctacccccaggaacagcacctgacaggcgggggattttttttcaagttgttctacatttgcataaattatttctattattattcatgtatgttatttatttctgaatcacactagtcctgtgaaagtacaactgaaggcagaaagtgttaggattttgcatctaatgttcattatcatggtattgatggacctaagaaaataaaaattagactaagcccccaaataagctgcatgcatttgtaacatgattagtagatttgaatatatagatgtagtattttgggtatctaggtgttttatcattatgtaaaggaattaaagtaaaggactttgtagttgtttttattaaatatgcatatagtagagtgcaaaaatatagcaaaaataaaaactaaaggtagaaaagcattttagatatgccttaatttagaaactgtgccaggtggccctcggaatagatgccaggcagagaccagtgcctgggtggtgcctcctcttgtctgccctcatgaagaagcttccctcacgtgatgtagtgccctcgtaggtgtcatgtggagtagtgggaacaggcagtactgttgagaggagagcagtgtgagagtttttctgtagaagcagaactgtcagcttgtgccttgaggcttccagaacgtgtcagatggagaagtccaagtttccatgcttcaggcaacttagctgtgtacagaagcaatccagtgtggtaataaaaagcaaggattgcctgtataatttattataaaataaaagggattttaacaaccaacaattcccaacacctcaaaagcttgttgcattttttggtatttgaggtttttatctgaaggttaaagggcaagtgtttggtatagaagagcagtatgtgttaagaaaagaaaaatattggttcacgtagagtgcaaattagaactagaaagttttatacgattatcattttgagatgtgttaaagtaggttttcactgtaaaatgtattagtgtttctgcattgccatagggcctggttaaaactttctcttaggtttcaggaagactgtcacatacagtaagcttttttccttctgacttataatagaaaatgttttgaaagtaaaaaaaaaaaatctaatttggaaatttgacttgttagtttctgtgtttgaaatcatggttctagaaatgtagaaattgtgtatatcagatactcatctaggctgtgtgaaccagcccaagatgaccaacatccccacacctctacatctctgtcccctgtatctcttcctttctaccactaaagtgttccctgctaccatcctggcttgtccacatggtgctctccatcttcctccacatcatggaccacaggtgtgcctgtctaggcctggccaccactcccaacttgacctagccacattcatctagagatggttcctgatgctgggcacagactgtgctcatggcacccattagaaatgcctctagcatctttgtatgcatcttgatttttaaaccaagtcattgtacagagcattcagttttggctgtggtaccaagagaaaaactaatcaagaatataaaccacattccaggctgctgttttctctccatctacaggccacacttttactgtatttcttcatacttgaaattcattctgctattttcatatcagggtacagacttataagggtgcatgttccttaaaggtgcataattattcttattccgtttgcttatattgctacagaatgctctgttttggtgctttgagttctgcagacccaagaagcagtgtggaaattcactgcctgggacacagtcttataagaatgttggcaggtgactttgtatcagatgttgcttctcttttctctgtacacagattgagagttaccacagtggcctgtcgggtccaccctgtgggtgcagcacagctctctgaaagcaagaaccttcctacctattctaacgtttttgccctctaagaaaaatggcctcaggtatggtatagacatagcaagaggggaagggctgtctcactctagcaaccatccctccattacacacagaaagccctcttgaagcaaaagaagaagaaagaaagaaagcttatctctaaggctactgtcttcagaatgctctgagctgaatgctcttgctcctttcccaagaggcagatgaaaatatagccagtttatctatacccttcctatctgaggaggagaatagaaaagtagggtaaatatgtaacgtaaaatatgtcattcaaggaccaccaaaactttaagtaccctatcattaaaaatctggttttaaaagtagctcaagtaagggatgctttgtgacccagggtttctgaagtcagatagccattcttacctgccccttactctgacttattgggaaagggagaactgcagtggtgtttctgttgcagtggcaaaggtaacatgtcagaaaattcagagggttgcataccaataatcctttggaaactggatgtcttactgggtgctagaatgaaaatgtaggtatttattgtcagatgatgaagttcattgtttttttcaaaattggtgttgaaatatcactgtccaatgtgttcacttatgtgaaagctaaattgaatgaggcaaaaagagcaaatagtttgtatatttgtaataccttttgtatttcttacaataaaaatattggtagcaaataaaaataataaaaacaataactttaaactgctttctggagatgaattactctcctggctattttcttttttactttaatgtaaaatgagtataactgtagtgagtaaaattcattaaattccaagttttagcagaaaaaaaaaaaaaaaaaa

SEQ ID NO: 1524 - DNA, 2303 bp, Homo sapiens
gaaggaagccaagagcctataatagcgatcctggggaaaatttcagcagctggggccatgtaatttaaaacctctgaaaagtgtgctgcggtccgtgcacagcattagtataacgtgagggctgaatgcagcccattctctggagaacttcctcacacaccgcagcaaagagaagactgaaagacaaacctgggtgcagccagagaggtccagatagatgagcttgtggcatccattccccaagttcagcctagggactccacgtaccccagctgggtctcattgttccagaactgcattagttaagattacccagacttggatttcaaaggaatactttcattgttccgtctgtaacacgaagtaattggggccagctggatgtcaggatgcgtgtggttaccattgtaatcttgctctgcttttgcaaagcggctgagctgcgcaaagcaagcccaggcagtgtgagaagccgagtgaatcatggccgggcgggtggaggccggagaggctccaacccggtcaaacgctacgcaccaggcctcccgtgtgacgtgtacacatatctccatgagaaatacttagattgtcaagaaagaaaattagtttatgtgctgcctggttggcctcaggatttgctgcacatgctgctagcaagaaacaagatccgcacattgaagaacaacatgttttccaagtttaaaaagctgaaaagcctggatctgcagcagaatgagatctctaaaattgagagtgaggcgttctttggtttaaacaaactcaccaccctcttactgcagcacaaccagatcaaagtcttgacggaggaagtgttcatttacacacctctcttgagctacctgcgtctttatgacaacccctggcactgtacttgtgagatagaaacgcttatttcaatgttgcagattcccaggaaccggaatttggggaactacgccaagtgtgaaagtccacaagaacaaaaaaataaaaaactgcggcagataaaatctgaacagttgtgtaatgaagaagaaaaggaacaattggacccgaaaccccaagtgtcagggagacccccagtcatcaagcctgaggtggactcaactttttgccacaattatgtgtttcccatacaaacactggactgcaaaaggaaagagttgaaaaaagtgccaaacaacatccctccagatattgttaaacttgacttgtcatacaataaaatcaaccaacttcgacccaaggaatttgaagatgttcatgagctgaagaaattaaacctcagcagcaatggcattgaattcatcgatcctgggtctttgagatgaaaccctgcaagtagacttacgtgaatgatttttgctgtgccgcttttttagggctcacacatttagaagaattagatttatcaaacaacagtctgcaaaactttgactatggcgtattagaagacttgtattttttgaaactcttgtggctcagagataacccttggagatgtgactacaacattcactacctctactactggttaaagcaccactacaatgtccattttaatggcctggaatgcaaaacgcctgaagaatacaaaggatggtctgtgggaaaatatattagaagttactatgaagaatgccccaaagacaagttaccagcatatcctgagtcatttgaccaagacacagaagatgatgaatgggaaaaaaaacatagagatcacaccgcaaagaagcaaagcgtaataattactatagtaggataaggtagaaattgttctgattgtaattagttttgtattttctatactggtgttagaaaacatatgtttacatttgattaactgtgttgcctatttatgcagggtaatccagctaaaggaagctttctttaattataagtattattgtgactattatagtaatcaagagaatgctatcatcctgcttgcctgtccatttgtggaacagcatctggtgatatgcaattccacactggtaacctgcagcagttgggtcctaatgatggcattagactttcataatgtcctgtataaatgtttttactgcttttagaaaataaagaaaaaaaacttggttcatgtttacatgcctttcgatagctgtttgtgcatacttaaagatgatcaaaatgattttatacaaatgctgttataataaaatgtcattccctacccctctactttttttcagtaagtcatcttatacattaaataaatttccatttctgatttctgtgcattccaaaaaaaaaaaaaaaaaaaaaaaaaaaaaaaaaaa

SEQ ID NO: 1525 - DNA, 3196 bp, Homo sapiens; identical to SEQ ID NO: 719

SEQ ID NO: 1526 - DNA, 934 bp, Homo sapiens
ctctctggctgctccggcatatttgagaaggtctgtttccctggtccttctgggtttccaccaattggcaagaagggatcagcctgtcctagagatcactcctctgccaaagatcccaacaagacaacatggctcccaagaagcctgagcctaagaaggaggcagccaagccagctccagctccagctccagcccctgcaccagcccctgccccagctcctgaggctcccaaggaacctgcctttgaccccaagagtgtaaagatagacttcactgccgaccagattgaagagttcaaagaggccttttcattgtttgaccggaccccgactggagagatgaagatcacctacggccagtgcggggatgtactgcgggccctgggccagaaccctaccaatgccgaggtgctgcgtgtgctgggcaagcccaagcctgaagagatgaatgtcaagatgctggactttgagacgttcttgcccatcctgcagcacatttcccgcaacaaggagcagggcacctatgaggacttcgtggagggcctgcgtgtctttgacaaggagagcaatggcacggtcatgggtgctgagcttcggcacgtccttgccaccctgggagagaagatgactgaggctgaagtggagcagctgttagctgggcaagaggatgccaatggctgcatcaattatgaagcctttgtcaagcacatcatgtcagggtgaagcagagtcttccaggtgcctggcccttggctttagccataccagggtgagttaaagagaggccccggctgggtgagctgagatggagtcctcgacttatcaccacaccactgccccaaggaccttacaggccctccctgttaataaacagctctaacacggccaggctgggctctgggattctgaaaaaaaaaaaaaaaaaaaaaaaaaaa

SEQ ID NO: 1527 - DNA, 1994 bp, Homo sapiens; identical to SEQ ID NO: 552

SEQ ID NO: 1528 - DNA, 2756 bp, Homo sapiens
atgcagttaggggagcagctcttggtgagctcagtgaacctgcctggcgcgcacttctacccgctggagagtgcgcgaggcggcagcggcgggagcgctggccacctccccagcgcggccccctctcctcagaagttggacttagacaaagcgtccaagaagttttccggcagtctctcctgcgaggcggtgagcggggagcccgcagccgccagcgcaggggcccccgcggccatgcttagtgacaccgacgccggggacgcatttgccagcgctgcggcagtggccaagccggggcccccggacggccgcaagggctccccctgcggggaggaggagctgccctccgccgctgcagccgccgccgccgccgccgccgcggctgcggccactgcgcgctactccatggacagcctgagctccgagcggtactacctccagtcccccggtcctcaggggtcggagctggctgcgccctgctcactcttcccgtaccaggcggcggctggggcgccccacggacctgtgtacccggctcctaacggggcgcgctacccctacggctccatgctgccccccggcggcttccccgcggctgtgtgcccacccgggagggcgcagttcggcccaggagccggtgcgggcagtggcgcgggcggtagcagcggcgggggcggcggcccgggcacctatcagtacagccagggggctccgctctacgggccgtaccctggagccgcagcggcgggatcttgcggaggactggggggcctgggggttccaggttctggcttccgtgcccacgtctacctgtgcaaccggcctctgtggctcaaattccaccgccaccaaactgagatgatcattacgaaacagggcaggcgcatgtttcctttcttgagcttcaacataaacggactcaatcccactgcccactacaatgtgttcgtagaggtggtgctggcggaccccaaccactggcgcttccaggggggcaaatgggtgacctgtggcaaagccgacaataacatgcagggcaacaaaatgtatgttcacccagagtctcctaatactggttcccactggatgagacaggagatttcattcgggaaattaaaactcaccaataacaaaggcgcaaataacaacaacacccagatgatagtcttacaatccttacacaaataccaaccccgactgcatattgttgaagttacagaggatggcgtggaggacttgaatgagccctcaaagacccagacttttaccttctcagaaacgcaattcattgcagtgactgcctaccaaaacaccgatattactcaactaaagattgatcataacccctttgcaaaaggcttcagagacaactatgattcatcccatcagattgtccctggaggtcggtacggcgttcaatccttcttcccggagccctttgtcaacactttacctcaagcccgctattataatggcgagagaaccgtgccacagaccaacggcctcctttcaccccaacagagcgaagaggtggccaaccctccccagcggtggcttgtcacgcctgtccagcaacctgggaccaacaaactagacatcagttcctatgaatctgaatatacttctagcacattgctcccatatggcattaaatccttgccccttcagacatcccatgccctggggtattacccagacccaacctttcctgcaatggcagggtggggaggtcgaggttcttaccagaggaagatggcagctggactaccatggacctccagaacaagccccactgtgttctctgaagatcagctctccaaggagaaagtgaaagaggaaattggctcttcttggatagagacacccccttccatcaaatctctagattccaatgattcaggagtatacaccagtgcttgtaagcgaaggcggctgtctcctagcaactccagtaatgaaaattcaccctccataaagtgtgaggacattaatgctgaagagtatagtaaagacacctcaaaaggcatgggagggtattatgctttttacacaactccctaaagagttattttaacctcaaaaattagctaactttttgcagatggacttggtggtgttttttgttgtcttctttgcctaggttgccaaaaagatgtttgccttccaccttgatgcatcctgttttgtgcaattctctaaaagaaggtgccaaagctttttgattgctgcaggtaactgaaacaaacctagcatttttaaaaaataagattaatggaagactttaaggtattttaaaattcgaagggtatccaaggttctgtatttatttattggggagacactaacccttcaaagaagcaggctgtgaacattgggtgcccagtgctatcagatgagttaaaacctttgattctcatttctatttgtaaattcttaagcaaatagaagccgagtgttaaggtgttttgcttctgaaagagggctgtgccttccgtttcagaaggagacattttgctgttacattctgccaggggcaaaagatactaggcccaggagtcaagaaaagcttttgtgaaagtgatagtttcacctgactttgattccttaacccccggcttttggaacaagccatgtttgccctagtccaggattgcctcacttgagacttgctaggcctctgctgtgtgctggggtggccagtgggactcaggagagagcaagctaaggagtcaccaaaaaaaaaaaaaaaaaaaaaa

SEQ ID NO: 1529 - DNA, 3808 bp, Homo sapiens
caggtgatttttggtggggcggggacatgaaaaaaaagttaaaatgtccttataaagacaaaatctttttctttcctggctgatgatttgtcattctagtcacttcctgccttgtgaccacacacccaggcttgacaaagctgttctgcagatcagaaagaaggggttcctggtcatacaccagtactaccaaggacagcttttttcctgcaagatctgttacctaaagcaataaaaaatggccagaggatcagtgtccgatgaggaaatgatggagctcagagaagcttttgccaaagttgatactgatggcaatggatacatcagcttcaatgagttgaatgacttgttcaaggctgcttgcttgcctttgcctgggtatagagtacgagaaattacagaaaacctgatggctacaggtgatctggaccaagatggaaggatcagctttgatgagtttatcaagattttccatggcctaaaaagcacagatgttgccaagacctttagaaaagcaatcaataagaaggaagggatttgtgcaatcggtggtacttcagagcagtctagcgttggcacccaacactcctattcagaggaagaaaagtatgcctttgtcaactggataaacaaagccctggaaaatgatcctgattgtcggcatgtcatcccaatgaacccaaacacgaatgatctctttaatgctgttggagatggcattgtcctttgtaaaatgatcaacctgtcagtgccagacacaattgatgaaagaacaatcaacaaaaagaagctaacccctttcaccattcaggaaaatctgaacttggctctgaactctgcctcagccatcgggtgccatgtggtcaacataggggctgaggacctgaaggaggggaagccttatctggtcctgggacttctgtggcaagtcatcaagattgggttgtttgctgacattgaactcagcagaaatgaagctctgattgctcttttgagagaaggtgagagcctggaggatttgatgaaactctcccctgaagagctcttgctgaggtgggctaattaccacctggaaaatgcaggctgcaacaaaattggcaacttcagtactgacatcaaggactcaaaagcttattaccacctgcttgagcaggtggctccaaaaggagatgaagaaggtgttcctgctgttgttattgacatgtcaggactgcgggagaaggatgacatccagagggcagaatgcatgctgcagcaggcggagaggctgggctgccggcagtttgtcacagccacagatgttgtccgagggaaccccaagttgaacttggcttttattgccaacctctttaacagataccctgccctgcacaaaccagagaaccaggacattgactggggggctcttgaaggtgagacgagagaagagcggacatttaggaactggatgaactccctgggtgttaaccctcgagtcaatcatttgtacagtgacttatcagatgccctggtcatcttccagctctatgaaaagatcaaagttcctgttgactggaacagagtaaacaaaccgccataccccaaactgggaggcaatatgaagaagcttgagaattgtaactacgcggtagaattggggaagaatcaagcgaagttctccctggttggcatcggtggacaagatctcaatgaaggaaaccgcactctcacactggccttgatttggcagctaatgagaaggtatacactgaatatcctcgaagaaattggtggtggccagaaggtcaatgatgacattattgtcaactgggtgaatgaaacattgagggaagcaaagaaaagttcatccatctctagtttcaaggacccgaagattagtacaagtctgcctgttctggacctcatcgatgccatccaaccaggttccattaactatgaccttctgaagacagaaaatctgaatgatgatgagaaactcaacaatgcaaaatatgccatctctatggcccgaaaaattggagcaagagtgtatgccctgccagaagacctggttgaagtgaaccccaaaatggtcatgaccgtgtttgcctgcctcatggggaaaggaatgaagagggtgtgaggcccaatggggctgggtgggaggcggtgcactcactcctgactgcccggcacagatgctccagggatgattcaagccattccaaagttcaacttggtgacactctataagattccaaaaagcacatattagtgcagccaagtagcctctcctgtatttaacaaaaagtgcttcattctttgcaggaggcccaacctcctatatataggtttctattcttgatttatttgcttcttcgaaaatctagaggaaaagaaagaagttattttccaggtacccttctcgcttttgccattagccaaggatagaagctgcagtggtattaattttgatataatctttcaaaccagcttcatgtggcttcccttttctttgttcaagatgagggccaggaggggaaacatcacacctgccctaaaccctgttcctggaggtcagcatttgatctgttgcaagcccctctttctgtcccctcttcctaccctgcctcccttgactttgctcctcacacttttggaaccatgccttccgggggggcccatctcttctggccgtccttgtctctgggccacttggagtgtgtgataaatcagtcaagctgttgaagtctcaggagtctctggtagcctgcagaagtaagcctcatcatcagagcctttcctcaaaactggagtcccaaatgtcatcaggttttgttttttttcagccactaagaacccctctgcttttaactctagaatttgggcttggaccagatctaacatcttgaatactctgccctctagagccttcagccttaatggaaggttggatccaaggagggtgtaatggagcatcaagccactcggcggcagcatggagctataactaagcatcctttagggttctgcctctccaggcatttagccctcacattagatctagttactgtggtatggctaatacctgtcaacatttggaggcaatcctaccttgcttttgcttctagagcttagcatatctgattgttgtcaggccatattatcaatgtttacttttttggtactataaaagctttctgccacccctaaactccaggggggacaatatgtgccaatcaatagcacccctactcacatacacacacacctagccagctgtcaagggcagaatgaatctatgctggataagaaatggtggaactgcgttatgaagagctaatttactggacaaagaattccaaagcaaaaccagaacagtatgaatttgagcaggtctcataggttgagcaatttccccctaaaccaactgaaggctaaaaagcaacaggccattgtgaaccaatgcaagacgccctctatcatggtgaaaagctccatcaatgaggtatcttctttagtggtggtatgtaatggaacttagccatttttcaaagcaattgaaatgcattgctctggatctgttccttggcagtggactcagaaagccaacatgtggctcctcccagcccataaccagtatttttgctgcttctgaatacaaattggttggttttgacttcagattgaacttactgtagcctcagatgatttcccccctccgcctccaggaagaaagaatgttactgccttaataaaaaatgaaaagagaatgatgctcaaaatctttccaaataaaatgttccctataaaaaaaaaaaaaaaaaaa

SEQ ID NO: 1530 - DNA, 1177 bp, Homo sapiens
tcaccacggcggcagccctttaaacccctcacccagccagcgccccatcctgtctgtccgaacccagacacaagtcttcactccttcctgcgagccctgaggaagccttctttccccagacatggccaacaagggtccttcctatggcatgagccgcgaagtgcagtccaaaatcgagaagaagtatgacgaggagctggaggagcggctggtggagtggatcatagtgcagtgtggccctgatgtgggccgcccagaccgtgggcgcttgggcttccaggtctggctgaagaatggcgtgattctgagcaagctggtgaacagcctgtaccctgatggctccaagccggtgaaggtgcccgagaacccaccctccatggtcttcaagcagatggagcaggtggctcagttcctgaaggcggctgaggactatggggtcatcaagactgacatgttccagactgttgacctctttgaaggcaaagacatggcagcagtgcagaggaccctgatggctttgggcagcttggcagtgaccaagaatgatgggcactaccgtggagatcccaactggtttatgaagaaagcgcaggagcataagagggaattcacagagagccagctgcaggagggaaagcatgtcattggccttcagatgggcagcaacagaggggcctcccaggccggcatgacaggctacggacgacctcggcagatcatcagttagagcggagagggctagccctgagcccggccctcccccagctccttggctgcagccatcccgcttagcctgcctcacccacacccgtgtggtaccttcagccctggccaagctttgaggctctgtcactgagcaatggtaactgcacctgggcagctcctccctgtgcccccagcctcagcccaacttcttacccgaaagcatcactgccttggcccctccctcccggctgcccccatcacctctactgtctcctccctgggctaagcaggggagaagcgggctgggggtagcctggatgtgggccaagtccactgtcctccttggcggcaaaagcccattgaagaagaaccagcccagcctgccccctatcttgtcctggaatatttttggggttggaactcaaaaaaaaaaaaaaaaaatcaatcttttctcaaaaaaaaaaaaaaaaaa

SEQ ID NO: 1531 - DNA, 1439 bp, Homo sapiens; identical to SEQ ID NO: 753

SEQ ID NO: 1532 - DNA, 967 bp, Homo sapiens
ggggacagctaaggtctccaggctgctgatgaagtgagggaaagtggaggagagtcggcgccgagatgggcggataaaaggagcgaccgctcagcagcgagagggagaggcgagagtaaggcgcccagacaccatgtggacaaggggaggagagaaatcagaggtggcgcgcgaaggctgagcgcccaggcagccagagcccagatcggaagagccgagtccgggcagaggggtccgcgggctctggaggtgctggacgggtgcgatccgagagcagaccggggccctcgcgagcctctcccggcccctgcccgcgatgagcgaggccagccgactgtgctccggctactacagcctcaaccagagcttcgtggagcccttccagtgcccccggcgcggcgagggggcagcgctccagtattgctgcggcttcgccgacctcaagtactgctgcagcgagccgggcagctacttcccctacaagcacagctacatgtggagcctcagcattggtgccttgattggactaggaattgctgcccttgttttactcgcctttgtcatcagtgtctgtgtcctttgctatttatttctgtatacgaaacctcaaagattagacactggccttaagcttcaacacttagaggcttcttccactcaagaaggcaagtcaaatggaaaaaccaaagccctcaattcaaatgcagcatcaaatgcaacaaatgaaacatactatgaagctgatgatataattcaagaaaaaacaatggatgcaacacaaatccacattgcttattaactaaaaattctgtgttttaaatgcttactggagagatgggacaataaaaataaagcgtgcacttgaaacggtttgtaatattgcttttcaaaaattcgtcactcacaaagcaagacacagctgcatttttgatcattcagttactttattaaacgcacattaaggttt

SEQ ID NO: 1533 - DNA, 3341 bp, Homo sapiens
ggaaggcagaagcaatctctgccgagagagtcagccgagcggccgcgcggagaggaggggcgggcggtccccaggcgggcgggtgcagggcgcagggcgccgacctgctggagagggggcccgggcgcgaggcggagtcccggcgcgcagccaggctggtggaggcccccggcaggctgcagattccctccggctccgggagccgcagcaggaccggccaggaggcgccatggaggggagccccatcccggtgctgacagtgcccaccgcgccctacgaggaccagcggccggccggcggcgggggtctgcggcgacccaccggcctcttcgagggccagcgcaactacctgcccaactttatccagagcgtgctgtcgtccatcgacctgcgcgaccgtcagggctgcaccatggtggtgggcagcgacggcaggtactttagcaggacggccatcgagatcgtggtgcagatggccgcggccaacgggattggacgactgattattggacagaatggcatcttgtcgacacctgcggtctcctgcattatcaggaagatcaaggcagctggtggaatcattctaacagccagccactgccctggaggaccagggggagagtttggagtgaagtttaatgttgccaatggaggtcctgcacccgatgttgtctcagacaaaatctaccaaatcagcaaaacgattgaggaatatgctatatgtcctgatctccgaatcgacctatctcgactaggaagacaagaatttgacctagaaaacaaattcaaaccattcagagtggagatagtggacccagtggatatctatcttaacctccttcggaccatctttgactttcatgccatcaagggtttgctgactggacccagccaactgaagattcgcattgacgcaatgcacggagttatgggaccttatgtgagaaaagttctgtgtgatgagctgggggccccagccaattctgcaataaactgtgttcccctggaagactttggagggcagcaccctgacccaaacctgacatatgcaacgactcttctggaagcaatgaaaggaggagaatatggatttggagctgcatttgatgctgatggggaccgttatatgatcctaggccaaaatggcttctttgtgagcccttctgactccctggccatcattgctgccaacctctcttgcattccatatttccgtcagatgggggtccgcgggtttgggaggagtatgccaaccagcatggccctggacagagtggccaaatcaatgaaggtccctgtatatgagaccccagctggatggagattcttctcaaatctgatggactcaggacgttgcaatctgtgtggggaagagagctttggcactggctctgaccacctccgagagaaggatggcctgtgggctgtcttggtctggctctccattattgctgcccggaagcagagtgtggaggaaattgtccgagatcactgggccaaatttggccgccactactattgcaggtttgactatgaggggttggatcccaagacgacatattatatcatgagggacctggaggccctggtcacagacaaatccttcattggccagcagtttgctgtggggagccatgtctacagcgtggcgaagacggatagttttgaatacgtggaccctgtggatggcactgtgaccaagaaacagggcctaaggatcattttctcggatgcatcacggctcatcttccggctcagttcctccagtggtgtgcgggccaccctcagactgtacgcagagagctacgagagggatcccagcggccatgaccaggagccacaggcagtgctgagccctctcatagccatcgcactgaaaatatcccagattcatgagagaactggccggaggggacccactgtcatcacctgaatagaggaaagatcactcaccagggccaaagagagtgctcagcgggagatgcttcactgatgccttcttgctacctgtttgtgcctcttatgactttggaaaaacaaaagatattttgcttttgggggatagagggtgggtgggaaaagaaaaaaaatccatttggttttggttttgtcctattcctccaaatgcagcagggcctttagttgtctgttaaagctgcactataatttggtatctacattttatcacacaaaggaacctccccttttgacaacaactgggctaggcagctgttaatcacaacatttgtgcatcacttgtgccaagtgagaaaatgttctaaaatcacaagagagaacagtgccagaatgaaactgaccctaagtcccaggtgcccctgggcaggcagaaggagacactcccagcatggaggagggtttatcttttcatcctaggtcaggtctacaatgggggaaggttttattatagaactcccaacagcccacctcactcctgccacccacccgatggccctgcctcccccatcccatccccaacatccctgtaccaccttctctcacatcttctaaagctttgtacaaatcacaatggtgcacttccaacaaaatatatcaataggtgttttcctctcttattttgtaaatagtattattttagctattaagctggataccttctttcaaattcagccattcagttgtaaagttgggaagaagtttcttgacaagactctgcaattaaatgcttaaaatttggaggggatccttccttgattacatcaagtatgttggtacatgggtttatacaagttcctcttgagaaggcaaaaagaccaccatgtgtgagagctctttgacttggccaataggggcctatcttaatgcacttgtttggacacatttctgatcttatttgtaaaggctgcaaaaggagaggatgaaatgctgtaaaagtaggaaatgaagtggaagctggaagaaaatgtaattggtggtacagctatgggccagatggtggaggggagggtggggacccctgccggcaagcagagtgtcacagctggctttcctcacttgggaaaagggtactgccggtctagcagcctcctctgtactcagccaggacacccagcgcgtgggacctgtttgtgtctgttttgcttccttgggaacggcacagtcactcaccctgccatttgcggaaatgacctggtgcactttgactgttaagcaatgcgttattgctgtagtcaaggttagtgcaagcaaggaaacattcccagtaaggtatttgtttccattttctgtctgtgcttctgtcagaaacttgctaggacatttagtggccaataaaaaagaaattcctaatttcaaccttaaaa

SEQ ID NO: 1534 - DNA, 6055 bp, Homo sapiens; identical to SEQ ID NO: 204

SEQ ID NO: 1535 - DNA, 3854 bp, Homo sapiens; identical to SEQ ID NO: 230

SEQ ID NO: 1536 - DNA, 2345 bp, Homo sapiens; identical to SEQ ID NO: 803

SEQ ID NO: 1537 - DNA, 3282 bp, Homo sapiens; identical to SEQ ID NO: 216

SEQ ID NO: 1538 - DNA, 4815 bp, Homo sapiens; identical to SEQ ID NO: 218

SEQ ID NO: 1539 - DNA, 1738 bp, Homo sapiens; identical to SEQ ID NO: 809

SEQ ID NO: 1540 - DNA, 6860 bp, Homo sapiens; identical to SEQ ID NO: 213

SEQ ID NO: 1541 - DNA, 8169 bp, Homo sapiens; identical to SEQ ID NO: 210

SEQ ID NO: 1542 - DNA, 3587 bp, Homo sapiens
agcctctgtgcggtgggaccaacggacggacggacggacgcgcgcacctaccgaggcgcgggcgctgcagaggctcccagcccaagcctgagcctgagcccgccccgaggtccccgccccgcccgcctggctctctcgccgcggagccgccaagatgggggacaagaaagatgacaaggactcacccaagaagaacaagggcaaggagcgccgggacctggatgacctcaagaaggaggtggctatgacagagcacaagatgtcagtggaagaggtctgccggaaatacaacacagactgtgtgcagggtttgacccacagcaaagcccaggagatcctggcccgggatgggcctaacgcactcacgccaccgcctaccaccccagagtgggtcaagttttgccggcagctcttcgggggcttctccatcctgctgtggatcggggctatcctctgcttcctggcctacggtatccaggcgggcaccgaggacgacccctctggtgacaacctgtacctgggcatcgtgctggcggccgtggtgatcatcactggctgcttctcctactaccaggaggccaagagctccaagatcatggagtccttcaagaacatggtgccccagcaagccctggtgatccgggaaggtgagaagatgcaggtgaacgctgaggaggtggtggtcggggacctggtggagatcaagggtggagaccgagtgccagctgacctgcggatcatctcagcccacggctgcaaggtggacaactcctccctgactggcgaatccgagccccagactcgctctcccgactgcactcacgacaaccccttggagactcggaacatcaccttcttttccaccaactgtgtggaaggcacggctcggggcgtggtggtggccacgggcgaccgcactgtcatgggccgtatcgccaccctggcatcagggctggaggtgggcaagacgcccatcgccatcgagattgagcacttcatccagctcatcaccggcgtggctgtcttcctgggtgtctccttcttcatcctctccctcattctcggatacacctggcttgaggctgtcatcttcctcatcggcatcatcgtggccaatgtcccagagggtctgctggccactgtcactgtgtgtctgacgctgaccgccaagcgcatggcccggaagaactgcctggtgaagaacctggaggctgtagaaaccctgggctccacgtccaccatctgctcagataagacagggaccctcactcagaaccgcatgacagtcgcccacatgtggtttgacaaccagatccacgaggctgacaccactgaggaccagtcagggacctcatttgacaagagttcgcacacctgggtggccctgtctcacatcgctgggctctgcaatcgcgctgtcttcaagggtggtcaggacaacatccctgtgctcaagagggatgtggctggggatgcgtctgagtctgccctgctcaagtgcatcgagctgtcctctggctccgtgaagctgatgcgtgaacgcaacaagaaagtggctgagattcccttcaattccaccaacaaataccagctctccatccatgagaccgaggaccccaacgacaaccgatacctgctggtgatgaagggtgcccccgagcgcatcctggaccgctgctccaccatcctgctacagggcaaggagcagcctctggacgaggaaatgaaggaggccttccagaatgcctaccttgagctcggtggcctgggcgagcgcgtgcttggtttctgccattattacctgcccgaggagcagttccccaagggctttgccttcgactgtgatgacgtgaacttcaccacggacaacctctgctttgtgggcctcatgtccatgatcgacccaccccgggcagccgtccctgacgcggtgggcaagtgtcgcagcgcaggcatcaaggtcatcatggtcaccggcgatcaccccatcacggccaaggccattgccaagggtgtgggcatcatctctgagggcaacgagactgtggaggacatcgccgcccggctcaacattcccgtcagccaggttaacccccgggatgccaaggcctgcgtgatccacggcaccgacctcaaggacttcacctccgagcaaatcgacgagatcctgcagaatcacaccgagatcgtcttcgcccgcacatccccccagcagaagctcatcattgtggagggctgtcagagacagggtgcaattgtggctgtgaccggggatggtgtgaacgactcccccgctctgaagaaggccgacattggggtggccatgggcatcgctggctctgacgtctccaagcaggcagctgacatgatcctgctggacgacaactttgcctccatcgtcacaggggtggaggagggccgcctgatcttcgacaacctaaagaagtccattgcctacaccctgaccagcaatatcccggagatcacgcccttcctgctgttcatcatggccaacatcccgctgcccctgggcaccatcaccatcctctgcatcgatctgggcactgacatggtccctgccatctcactggcgtacgaggctgccgaaagcgacatcatgaagagacagcccaggaacccgcggacggacaaattggtcaatgagagactcatcagcatggcctacgggcagattggaatgatccaggctctcggtggcttcttctcttactttgtgatcctggcagaaaatggcttcttgcccggcaacctggtgggcatccggctgaactgggatgaccgcaccgtcaatgacctggaagacagttacgggcagcagtggacatacgagcagaggaaggtggtggagttcacctgccacacggccttctttgtgagcatcgttgtcgtccagtgggccgatctgatcatctgcaagacccggaggaactcggtcttccagcagggcatgaagaacaagatcctgatcttcgggctgtttgaggagacggccctggctgccttcctgtcctactgccccggcatggacgtggccctgcgcatgtaccctctcaagcccagctggtggttctgtgccttcccctacagtttcctcatcttcgtctacgacgaaatccgcaaactcatcctgcgcaggaacccagggggttgggtggagaaggaaacctactactgacctcagccccaccacatcgcccatctcttccccgtcccccaggcccaggaccgcccctgtcagtccccccaattttgtattctggggggaggagccctctcttcctgtggccccaccttggcccccaccccctccactatctcctgccgcccccactctggctggcttctctcccctgccccaaacctctctcctctctcttttctgtgtcagtttctctccctctcctcacccctctatccattcctcccgccccagccacctccctgggctcttttttactccccttcagccccccggctgatgccatctctggttctggacaattatcaaatatatcagtggggagagagaaaaaaaaaaaaaaaaaaaaaaaaaaaaaaaaaaaaaa

SEQ ID NO: 1543 - DNA, 3028 bp, Homo sapiens; identical to SEQ ID NO: 774

SEQ ID NO: 1544 - DNA, 3516 bp, Homo sapiens; identical to SEQ ID NO: 807

SEQ ID NO: 1545 - DNA, 4370 bp, Homo sapiens
tggggccgtcgtgccccgccccagtgcggccggggcgcgggttcgagctgctgctcggcaagcctgggtgtctagggcatgagcggagtgtggggggccggcgggcctcggtgccaggaggcgctcgcggtcctcgcctcgctgtgccgggcccggccgccccctctcgggctggacgtggagacttgtcggagcttcgagctgcagcccccagagcggagtcccagcgcggcaggcgcagctgtgctggatgccctggaggaacaaggaggcctccagtccctcttctgctaatccccccttggaagccctccagagccccagcttcagaggcaacatggcggacaagctgaaggaccccagcaccctgggcttcctggaggcggccgtgaagatcagccacacgtccccagatatcccagctgaggtgcagatgtcggtcaaggagcacatcatgcgtcacacccggctgcagcggcaaactacagagccagcgtcatccaccaggcacacgtccttcaagcgccacctgccaaggcagatgcatgtctccagtgtagactatggcaatgagcttccaccagcagcagagcagcccaccagcattggccgcatcaagcctgagctctacaagcagaagtcggtggatggggaggatgccaagtctgaggccaccaagagctgcgggaagatcaacttcagcctacgctacgattacgagaccgagaccctgattgtgcgtatcctgaaggcttttgacctccctgccaaggacttttgtggaagctctgacccttatgtcaagatctacctcctgcctgaccgcaaatgcaagctgcagacccgggtgcaccgcaagaccctgaaccccacctttgatgagaacttccacttccctgtgccctatgaggagctggctgaccgcaagctgcatctcagtgtcttcgactttgaccgcttctcccgccatgacatgattggcgaggtcatcctggacaacctctttgaggcctctgacctgtctcgggaaacctccatctggaaggatatccaatatgccacaagtgaaagcgtggacttgggagagatcatgttctccctttgctacctgcccactgcaggcaggctcaccctcacagtgattaagtgtcggaacctcaaggcgatggacatcacaggctattcagatccctatgtgaaagtgtccttgctctgtgatgggcggaggctgaagaagaagaaaacaaccataaagaaaaacactctcaatcctgtctacaatgaggccatcatctttgacattcccccggaaaacatggatcaagtcagcctgctcatctcagtcatggactatgatcgagtgggccacaatgagatcataggagtctgtcgtgtggggatcactgctgaaggcctgggcagggaccactggaacgagatgctggcatacccccggaagcccatcgcacactggcactccttggtggaggtaaagaaatccttcaaagagggaaaccctcggttgtgatttcattcacgtggatgctgcaagcagagagactgccacctggagttaggatggcagggccgagctgctagcttcgacagtgagagctcgtgcccatctccgaaaccacctccaacaccatgagatgtgcagccaaataacacaaatgggactcagcaatgttctctttgcacttgttcaaccgtctaaacagtgttgtgcagtcgcagtggcggcagcagcggcagccgtccgtcactccagagtcttacctgctcctgtgtaggtcaaagctgagacacttgtcatgtggtcagatctgtcttagtcttttgtgtctcccaaggtgatgtttttgtggtttttcactttttatgggtctgctggtaagaaaagggaaaaaaaaaaagagtaggaaaagacaaagggtggaaagcccagaagttggttctagaaaatacaaggtacagttttttggaaagaggtggattgagtttctgaaatgctgcgtctccagcaagctccacaaccctggaaaaggaggaggcgtggtgggactgcggctgcattttcagtgccctgcaggaatggggtgaatccatggaagagcctttgtgaggtgaattactagtctttgaagctcttcgctggcaggacataaaccacgctgggaccctcagtcccgtgttgaaatcacaagacctctgaggcgcttgtgagccttcagctgatgtgcagggttcctcgctccccttcctcgctggctttccccatgaattgaaaacgtcttgattcctcatgggaacttagtcactttctttaggaatgattcagttcagccgaaactaaacacgccatatgttttctgatgcgccacagttaatgatcacatttgtttgaaaacaggatctttgtcctcagaaataatcttgattgtaaagtaagagagaaacatatgttctggaatgatttctgcattatacatagctttataattccatgaagtatcaagctgctgtttaaaatgcctaaacagattaaagaaaaacctagattaaatgttcttttccaaatggggagttttgaaatccaaatagcagtttgagtccatctttctatgaagagtatgtttttgattgaaaccgagtcagcgtaagcctatttcagcccctttggctctttgacaatattcatcttaaactttagttctataaattactaagtacttcagtgttgtttgtttcagtggttgtgagggtttcttgtttcctttagatctttaccttaggccaaactcagtttaggaaaaaaaaaattgtttgaactattctgtgttgtaatagcacatttctgttgagttaatagtggtcttcccaccaacccctaaaaccaggttgatttgctcaatctcagtttgtataaccccagtaagcgcatggaggtgagtttctacttcgacttgtggcgacacagtgccagtttcctgagctgtgtgtactacttgcaagaggcaagtctgctgaagaaccccttcttttaacagtggaaaatcaagaacagaaaatctgttcacacacctgtgtcttattctttatatatgctacatggtagaggagcagcgaccaataaagtatccctcattttaaaccaagttgtcagatttctctgctgatagaacgctgcatagtatcttctagccctaaaaatgaccaggttgggcatgagttaacaggatattgtggcaaaaggaattttctgcttagaaaagtaaatgtagataaacctaaactccaccctgtactgagccttaggctagggactcatgtgtaaagatgacttttctccccagatatcttgtcattgacaggccttcctagtctggtagtcctacatttgggtgttctcctgagagtgagaaaaaacccaaggtcatgacaagattcctggcaggtgacagacttcattatgattctgactctagactgaccccatcaagatagtcgtttccgtcagtgaacagatgctgaaggccttgccattacaaaggagacaactgagttccctgggtcataaggagtccagaaattagtgtgagaaggtccttctggaagtgaactcaaaattcatgtccagctgtcatcgttaaacccttaggcaggtgagtataacccattctaacctcttggagaagggagtgtgatcaatgtgaatcacaatagtattgctcatctgagacattcctcttatatccaagcagctatctcccatgagtgaacatcccagtggtttcagaaaatcatgtcctgaacagattctagccagccccacaccaccctggccaactgcaaccgctgctgctctagcagtctgggtcaattcctacaggcttgggagcccaccccagggaggcttttatctcctgcagcctcatccccagcaccctcaaggtagactactcctcagcctgaatcatgaatgaaacctgaacatctgccaacttcattatctagcccagtatctcttccctcacagagaagaagaaaatgaaatacaaagttgatccatttgttggctttctctggccggagaaacctctcgggttgttgctgtgagctttgatgaagttgtgataaccagggccatttgcacataggtttttttaaaaaacatgaaaagttcccttctcctttatttagcagtgtttccgggctgaaagacgccctcctccccctctgcgcttacccaggacgttaattaattgcactgtcatttaaaatattatgttgttaattactcgtttgtgtcttcccacccgtgtcacagcctggagtttttattcaattaaatctctgtctcttgccca

SEQ ID NO: 1546 - DNA, 3885 bp, Homo sapiens; identical to SEQ ID NO: 814

SEQ ID NO: 1547 - DNA, 2925 bp, Homo sapiens; identical to SEQ ID NO: 205

SEQ ID NO: 1548 - DNA, 4445 bp, Homo sapiens
gtcagcgctgcctgagctcgtcccctggatgtccgggtctccccaggcggccacccgccggctcccatcgtgacctccagccgcagcgcctcccacgccggccgccgcgcgaggggagcgctcgggcgcgccgggtgtggttgggggaaggggttgtgccgcgcgcgggctgcgtgctgtgcccactcaaaaggttccgggcgcgcaggagggaagaggcagtgcccgccactcccactgagattgagagacgcggcaaggaggcagcctgtggaggaactgggtaggatttaggaacgcaccgtgcacatgcttggtggtcttgttaagtggaaactgctgctttagagtttgtttggaaggtccgggtgactcatcccaacatttacatccttaattgttaaagcgctgcctccgagcgcacgcatcctgagatcctgagcctttggttaagaccgagctctattaagctgaaaagataaaaactctccagatgtcttccagtaatgtcgaagtttttatcccagtgtcacaaggaaacaccaatggcttccccgcgacagcttccaatgacctgaaggcatttactgaaggagctgtgttaagttttcataacatctgctatcgagtaaaactgaagagtggctttctaccttgtcgaaaaccagttgagaaagaaatattatcgaatatcaatgggatcatgaaacctggtctcaacgccatcctgggacccacaggtggaggcaaatcttcgttattagatgtcttagctgcaaggaaagatccaagtggattatctggagatgttctgataaatggagcaccgcgacctgccaatttcaaatgtaattcaggttacgtggtacaagatgatgttgtgatgggcactctgacggtgagagaaaacttacagttctcagcagctcttcggcttgcaacaactatgacgaatcatgaaaaaaacgaacggattaacagggtcattcaagagttaggtctggataaagtggcagactccaaggttggaactcagtttatccgtggtgtgtctggaggagaaagaaaaaggactagtataggaatggagcttatcactgatccttccatcttgttcttggatgagcctacaactggcttagactcaagcacagcaaatgctgtccttttgctcctgaaaaggatgtctaagcagggacgaacaatcatcttctccattcatcagcctcgatattccatcttcaagttgtttgatagcctcaccttattggcctcaggaagacttatgttccacgggcctgctcaggaggccttgggatactttgaatcagctggttatcactgtgaggcctataataaccctgcagacttcttcttggacatcattaatggagattccactgctgtggcattaaacagagaagaagactttaaagccacagagatcatagagccttccaagcaggataagccactcatagaaaaattagcggagatttatgtcaactcctccttctacaaagagacaaaagctgaattacatcaactttccgggggtgagaagaagaagaagatcacagtcttcaaggagatcagctacaccacctccttctgtcatcaactcagatgggtttccaagcgttcattcaaaaacttgctgggtaatccccaggcctctatagctcagatcattgtcacagtcgtactgggactggttataggtgccatttactttgggctaaaaaatgattctactggaatccagaacagagctggggttctcttcttcctgacgaccaaccagtgtttcagcagtgtttcagccgtggaactctttgtggtagagaagaagctcttcatacatgaatacatcagcggatactacagagtgtcatcttatttccttggaaaactgttatctgatttattacccatgaggatgttaccaagtattatatttacctgtatagtgtacttcatgttaggattgaagccaaaggcagatgccttcttcgttatgatgtttacccttatgatggtggcttattcagccagttccatggcactggccatagcagcaggtcagagtgtggtttctgtagcaacacttctcatgaccatctgttttgtgtttatgatgattttttcaggtctgttggtcaatctcacaaccattgcatcttggctgtcatggcttcagtacttcagcattccacgatatggatttacggctttgcagcataatgaatttttgggacaaaacttctgcccaggactcaatgcaacaggaaacaatccttgtaactatgcaacatgtactggcgaagaatatttggtaaagcagggcatcgatctctcaccctggggcttgtggaagaatcacgtggccttggcttgtatgattgttattttcctcacaattgcctacctgaaattgttatttcttaaaaaatattcttaaatttccccttaattcagtatgatttatcctcacataaaaaagaagcactttgattgaagtattcaatcaagtttttttgttgttttctgttcccttgccatcacactgttgcacagcagcaattgttttaaagagatacatttttagaaatcacaacaaactgaattaaacatgaaagaacccaagacatcatgtatcgcatattagttaatctcctcagacagtaaccatggggaagaaatctggtctaatttattaatctaaaaaaggagaattgaattctggaaactcctgacaagttattactgtctctggcatttgtttcctcatctttaaaatgaataggtaggttagtagcccttcagtcttaatactttatgatgctatggtttgccattatttaataaatgacaaatgtattaatgctatactggaaatgtaaaattgaaaatatgttggaaaaaagattctgtcttatagggtaaaaaaagccaccgtgatagaaaaaaaatctttttgataagcacattaaagttaatagaacttactgatattcctgtctagtggtataatatctcaggaatcttggctgagggtttggaactgtgggtagagtagagggccaggagtccagtaatagaattcttgcaccatttctggaacattctagctctgggaggtcacgtaaccttcttggggtagttcagtggtttagtggtttataatccaggtgtgcgtcagaatcatctgaggaactttgctaaaatacaaaaatctggcctaagtagctccagatctaccttcataaaggaatctgaccactcctggatttggtaatttccaagttctgaaaattttacttaggatttaataactattaacatctgtccctacataggttttctttcctacttatataccttatgttctcttcattctaaccttcatcagtaatagggaaatgttttaattttatttttttagttgaagggtaatgtaccaaaaaatatagttcagtgaattaaaatgaacacacatgtgcaaccatcaattcaggtcaagaaatagaagattgtagcacacaaaagcctactcagccattctcccagtcactacttccttccttacccctgggttatttttgaaatgacacttgatgtatttccctctgttgctgttatgagaacattgctacagccaagtgttgtgtttctgtgtgcataggttgatacttaattatctccccactttttaataaacttttaatttggaaataattttagattgacagaaaagttgcaaagatagtgaggaaagttcctgtctactctttgctcagcttcccttaatgttaacattttatatagcaagatgcatttgtcaaagctaacaagttaacattggtacaatcactgttaattaaactgcacacaatattcagatttcaccacttttccactaatattctttcattgttctaggattcaattcaggagaccacatttcatctagccctcttttttaaaagtaaatacttttcagcacttacaggagttaactgagctggggcatcatggtgtatagacgccctgacactggtcatcttggaattcatttagtttgtcagtgggtgccctgacattctgtcacaacatcaatttgggaacatggcattatatttttatctttgaacttttttctttttggatgacatttgattaatgcgtcatcttggaacacattatcttttttcttggttatgtgatcaggaagattaatcagtttttcctgttcttggtataattcctgcttttcacatacctgtcccttacagttctctatatatacccttcccttattacacagagagaaatatctatctatactttttacacaaaatatacttcaaaagaaacaaaacagccacaattattaactttttaaataaatgagaatttaattatatcctaaaaaaaaaaaaaaa

SEQ ID NO: 1549 - DNA, 1312 bp, Homo sapiens; identical to SEQ ID NO: 813

SEQ ID NO: 1550 - DNA, 2080 bp, Homo sapiens; identical to SEQ ID NO: 816

SEQ ID NO: 1551 - DNA, 1837 bp, Homo sapiens; identical to SEQ ID NO: 806

SEQ ID NO: 1552 - DNA, 4774 bp, Homo sapiens; identical to SEQ ID NO: 808

SEQ ID NO: 1553 - DNA, 2544 bp, Homo sapiens; identical to SEQ ID NO: 220

SEQ ID NO: 1554 - DNA, 8278 bp, Homo sapiens
tgttgtgcgggttaatacaacaaactgtaacaagtgtacctggtatggacttgttgtccgggacgtacattttcgcggtcctgctagcatgcgtggtgttccactctggcgcccaggagaaaaactacaccatccgagaagaaatgccagaaaacgtcctgataggcgacttgttgaaagaccttaacttgtcgctgattccaaacaagtccttgacaactgctatgcagttcaagctagtgtacaagaccggagatgtgccactgattcgaattgaagaggatactggtgagatcttcactactggcgctcgcattgatcgtgagaaattatgtgctggtatcccaagggatgagcattgcttttatgaagtggaggttgccattttgccggatgaaatatttagactggttaagatacgttttctgatagaagatataaatgataatgcaccattgttcccagcaacagttatcaacatatcaattccagagaactcggctataaactctaaatatactctcccagcggctgttgatcctgacgtaggaataaacggagttcaaaactacgaactaattaagagtcaaaacatttttggcctcgatgtcattgaaacaccagaaggagacaagatgccacaactgattgttcaaaaggagttagatagggaagagaaggatacctacgtgatgaaagtaaaggttgaagatggtggctttcctcaaagatccagtactgctattttgcaagtgagtgttactgatacaaatgacaaccacccagtctttaaggagacagagattgaagtcagtataccagaaaatgctcctgtaggcacttcagtgacacagctccatgccacagatgctgacataggtgaaaatgccaagatccacttctctttcagcaatctagtctccaacattgccaggagattatttcacctcaatgccaccactggacttatcacaatcaaagaaccactggatagggaagaaacaccaaaccacaagttactggttttggcaagtgatggtggattgatgccagcaagagcaatggtgctggtaaatgttacagatgtcaatgataatgtcccatccattgacataagatacatcgtcaatcctgtcaatgacacagttgttctttcagaaaatattccactcaacaccaaaattgctctcataactgtgacggataaggatgcggaccataatggcagggtgacatgcttcacagatcatgaaatccctttcagattaaggccagtattcagtaatcagttcctcctggagactgcagcatatcttgactatgagtccacaaaagaatatgccattaaattactggctgcagatgctggcaaacctcctttgaatcagtcagcaatgctcttcatcaaagtgaaagatgaaaatgacaatgctccagttttcacccagtctttcgtaactgtttctattcctgagaataactctcctggcatccagttgacgaaagtaagtgcaatggatgcagacagtgggcctaatgctaagatcaattacctgctaggccctgatgctccacctgaattcagcctggattgtcgtacaggcatgctgactgtagtgaagaaactagatagagaaaaagaggataaatatttattcacaattctggcaaaagataacggggtaccacccttaaccagcaatgtcacagtctttgtaagcattattgatcagaatgacaatagcccagttttcactcacaatgaatacaacttctatgtcccagaaaaccttccaaggcatggtacagtaggactaatcactgtaactgatcctgattatggagacaattctgcagttacgctctccattttagatgagaatgatgacttcaccattgattcacaaactggtgtcatccgaccaaatatttcatttgatagagaaaaacaagaatcttacactttctatgtaaaggctgaggatggtggtagagtatcacgttcttcaagtgccaaagtaaccataaatgtggttgatgtcaatgacaacaaaccagttttcattgtccctccttccaactgttcttatgaattggttctaccgtccactaatccaggcacagtggtctttcaggtaattgctgttgacaatgacactggcatgaatgcagaggttcgttacagcattgtaggaggaaacacaagagatctgtttgcaatcgaccaagaaacaggcaacataacattgatggagaaatgtgatgttacagaccttggtttacacagagtgttggtcaaagctaatgacttaggacagcctgattctctcttcagtgttgtaattgtcaatctgttcgtgaatgagtcggtgaccaatgctacactgattaatgaactggtgcgcaaaagcactgaagcaccagtgaccccaaatactgagatagctgatgtatcctcaccaactagtgactatgtcaagatcctggttgcagctgttgctggcaccataactgtcgttgtagttattttcatcactgctgtagtaagatgtcgccaggcaccacaccttaaggctgctcagaaaaacaagcagaattctgaatgggctaccccaaacccagaaaacaggcagatgataatgatgaagaaaaagaaaaagaagaagaagcattcccctaagaacttgctgcttaattttgtcactattgaagaaactaaggcagatgatgttgacagtgatggaaacagagtcacactagaccttcctattgatctagaagagcaaacaatgggaaagtacaattgggtaactacacctactactttcaagcccgacagccctgatttggcccgacactacaaatctgcctctccacagcctgccttccaaattcagcctgaaactcccctgaattcgaagcaccacatcatccaagaactgcctctcgataacacctttgtggcctgtgactctatctccaagtgttcctcaagcagttcagatccctacagcgtttctgactgtggctatccagtgacgaccttcgaggtacctgtgtccgtacacaccagaccgtcccagcggcgtgtcacatttcacctgccagaaggctctcaggaaagcagcagtgatggtggactgggagaccatgatgcaggcagccttaccagcacatctcatggcctgccccttggctatcctcaggaggagtactttgatcgtgctacacccagcaatcgcactgaaggggatggcaactccgatcctgaatctactttcatacctggactaaagaaagctgcagaaataactgttcaaccaactgtggaagaggcctctgacaactgcactcaagaatgtctcatctatggccattctgatgcctgctggatgccggcatctctggatcattccagctcttcgcaagcacaggcctctgctctatgccacagcccaccactgtcacaggcctctactcagcaccacagcccacgagtgacacagaccattgctctctgccacagccctccagtgacacagaccatcgcattgtgccacagcccaccaccgatacaggtgtctgctctccaccacagtcctcctctagtgcaggctactgcacttcaccacagcccaccatcagcacaggcctcagccctctgctacagccctcctttagcacaggctgctgcaatcagccacagctctcctctgccacaggttattgccctccatcgtagtcaggcccaatcatcagtcagtttgcagcaaggttgggtgcaaggtgctgatgggctatgctctgttgatcagggagtgcaaggtagtgcaacatctcagttttacaccatgtctgaaagacttcatcccagtgatgattcaattaaagtcattcctttgacaaccttcactccacgccaacaggccagaccgtccagaggtgattcccccattatggaagaacatcccttgtaaagctaaaatagttacttcaaattttcagaaaagatgtatatagtcaaaatttaagatacaattccaatgagtattctgattatcagatttgtaaataactatgtaaatagaaacagataccagaataaatctacagctagacccttagtcaatagttaaccaaaaaattgcaatttgtttaattcagaatgtgtatttaaaaagaaaaggaatttaacaatttgcatccccttgtacagtaaggcttatcatgacagagcgcactatttctgatgtacagtattttttgttgtttttatcatcatgtgcaatattactgatttgtttccatgctgattgtgtggaaccagtatgtagcaaatggaaagcctagaaatatcttattttctaagtttacctttagtttacctaaacttttgttcagataacgttaaaaggtatacgtactctagcctttttttgggctttctttttgatttttgtttgttgttttcagtttttttgttgttgttagtgagtctcccttcaaaatacgcagtaggtagtgtaaatactgcttgtttgtgtctctctgctgtcatgttttctaccttattccaatactatattgttgataaaatttgtatatacattttcaataaagaatatgtataaactgtacagatctagatctacaacctatttctctactctttagtagagttcgagacacagaagtgcaataactgccctaattaagcaactatttgttaaaaagggcctctttttactttaatagtttagtgtaaagtacatcagaaataaagctgtatctgccattttaagcctgtagtccattattacttgggtctttacttctgggaatttgtatgtaacagcctagaaaattaaaaggaggtggatgcatccaaagcacgagtcacttaaaatatcgacggtaaactactattttgtagagaaactcaggaagatttaaatgttgatttgacagctcaataggctgttaccaaagggtgttcagtaaaaataacaaatacatgtaactgtagataaaaccatatactaaatctataagactaagggatttttgttattctagctcaacttactgaagaaaaccactaataacaacaagaatatcaggaaggaacttttcaagaaatgtaattataaatctacatcaaacagaattttaaggaaaaatgcagagggagaaataaggcacatgactgcttcttgcagtcaacaagaaataccaataacacacacagaacaaaaaccatcaaaatctcatatatgaaataaaatatattcttctaagcaaagaaacagtactattcatagaaaacattagttttcttctgttgtctgttatttccttcttgtatcctcttaactggccattatcttgtatgtgcacattttataaatgtacagaaacatcaccaacttaattttcttccatagcaaaactgagaaaataccttgtttcagtataacactaaaccaagagacaattgatgtttaatgggggcggttggggtgggggggggagtcaatatctcctattgattaacttagacatagattttgtaatgtataacttgatatttaatttatgattaaactgtgtgtaaattttgtaacataaactgtggtaattgcataatttcattggtgaggatttccactgaatattgagaaagtttcttttcatgtgcccagcaggttaagtagcgttttcagaatatacattattcccatccattgtaaagttccttaagtcatatttgactgggcgtgcagaataacttcttaacttttaactatcagagtttgattaataaaattaattaatgttttttctccttcgtgttgttaatgttccaagggatttggagcatactggttttccaggtgcatgtgaatcccgaaggactgatgatatttgaatgtttattaaattattatcatacaaatgtgttgatattgtggctattgttgatgttgaaaattttaaacttggggaagattaagaaaagaaccaatagtgacaaaaatcagtgcttccagtagattttagaacattctttgcctcaaaaaacctgcaaagatgatgtgagattttttcttgtgttttaattattttcacattttctctctgcaaaactttagttttctgatgatctacacacacacacacacacacacgtgcacacacacacacatttaaatgatataaaaagaagaggttgaaagattattaaataacttatcaggcatctcaatggttactatctatgttagtgaaaatcaaataggactcaaagttggatatttgggatttttcttctgacagtataatttattgagttactagggaggttcttaaatcctcatatctggaaacttgtgacgttttgacacctttcctatagatgatataggaatgaaccaatacgcttttattaccctttctaactctgattttataatcagacttagattgtgtttagaatattaaatgactgggcaccctcttcttggtttttaccagagaggctttgaatggaagcaggctgagagtagccaaagaggcaaggggtattagcccagttattctcccctatgccttccttctctttctaagcgtccactaggtctggccttggaaacctgttacttctagggcttcagatctgatgatatctttttcatcacattacaagttatttctctgactgaatagacagtggtataggttgacacagcacacaagtggctattgtgatgtatgatgtatgtagtcctacaactgcaaaacgtcttactgaaccaacaatcaaaaaatggttctgttttaaaaaggattttgtttgatttgaaattaaaacttcaagctgaatgacttatatgagaataatacgttcaatcaaagtagttattctattttgtgtccatattccattagattgtgattattaattttctagctatggtattactatatcacacttgtgagtatgtattcaaatactaagtatcttatatgctacgtgcatacacattcttttcttaaactttacctgtgttttaactaatattgtgtcagtgtattaaaaattagcttttacatatgatatctacaatgtaataaatttagagagtaattttgtgtattcttatttacttaacattttacttttaattatgtaaatttggttagaaaataataataaatggttagtgctattgtgtaatggtagcagttacaaagagcctctgccttcccaaactaatatttatcacacatggtcattaaatgggaaaaaaatagactaaacaaatcacaaattgttcagttcttaaaatgtaattatgtcacacacacaaaaaatccttttcaatcctgagaaaattaaaggcgttttactcacatggctatttcaacattagttttttttgtttgtttctttttcatggtattactgaaggtgtgtatactccctaatacacatttatgaaaatctacttgtttaggcttttatttatactcttctgatttatattttttattataattattatttcttatctttcttcttttatattttttggaaaccaaatttatagttagtttaggtaaactttttattatgaccattagaaactattttgaatgcttccaactggctcaattggccgggaaaacatgggagcaagagaagctgaaatatatttctgcaagaacctttctatattatgtgccaattaccacaccagatcaattttatgcagaggccttaaaatattctttcacagtagctttcttacactaaccgtcatgtgcttttagtaaatatgatttttaaaagcagttcaagttgacaacagcagaaacagtaacaaaaaaatctgctcagaaaaatgtatgtgcacaaataaaaaaaattaatggcaattgtttagtgattgtaagtgatactttttaaagagtaaactgtgtgaaatttatactatccctgcttaaaatattaagatttttatgaaatatgtatttatgtttgtattgtgggaagattcctcctctgtgatatcatacagcatctgaaagtgaacagtatcccaaagcagttccaaccatgctttggaagtaagaaggttgactattgtatggccaaggatggcagtatgtaatccagaagcaaacttgtattaattgttctatttcaggttctgtattgcatgttttcttattaatatatattaataaaagttatgagaaataaaaaaaaaaaaaa

SEQ ID NO: 1555 - DNA, 2993 bp, Homo sapiens; identical to SEQ ID NO: 818

SEQ ID NO: 1556 - DNA, 3216 bp, Homo sapiens
cctcagaaaactgatttatccttgggaagggtcagtttcttcattaggacaatgaagaaaaatccagctgtcccttccaaggggaggtatcatgagcagtatcaaggggaacaagctggaggagcaggaccctagacctctgcagcccataccaggtctcatggaggggaacaagctggaggagcaggactctagccctccacagtccactccagggctcatgaaggggaacaagcgtgaggagcaggggctgggccccgaacctgcggcgccccagcagcccacggcggaggaggaggccctgatcgagttccaccgctcctaccgagagctcttcgagttcttctgcaacaacaccaccatccacggcgccatccgcctggtgtgctcccagcacaaccgcatgaagacggccttctgggcagtgctgtggctctgcacctttggcatgatgtactggcaattcggcctgcttttcggagagtacttcagctaccccgtcagcctcaacatcaacctcaactcggacaagctcgtcttccccgcagtgaccatctgcaccctcaatccctacaggtacccggaaattaaagaggagctggaggagctggaccgcatcacagagcagacgctctttgacctgtacaaatacagctccttcaccactctcgtggccggctcccgcagccgtcgcgacctgcgggggactctgccgcaccccttgcagcgcctgagggtcccgcccccgcctcacggggcccgtcgagcccgtagcgtggcctccagcttgcgggacaacaacccccaggtggactggaaggactggaagatcggcttccagctgtgcaaccagaacaaatcggactgcttctaccagacatactcatcaggggtggatgcggtgagggagtggtaccgcttccactacatcaacatcctgtcgaggctgccagagactctgccatccctggaggaggacacgctgggcaacttcatcttcgcctgccgcttcaaccaggtctcctgcaaccaggcgaattactctcacttccaccacccgatgtatggaaactgctatactttcaatgacaagaacaactccaacctctggatgtcttccatgcctggaatcaacaacggtctgtccctgatgctgcgcgcagagcagaatgacttcattcccctgctgtccacagtgactggggcccgggtaatggtgcacgggcaggatgaacctgcctttatggatgatggtggctttaacttgcggcctggcgtggagacctccatcagcatgaggaaggaaaccctggacagacttgggggcgattatggcgactgcaccaagaatggcagtgatgttcctgttgagaacctttacccttcaaagtacacacagcaggtgtgtattcactcctgcttccaggagagcatgatcaaggagtgtggctgtgcctacatcttctatccgcggccccagaacgtggagtactgtgactacagaaagcacagttcctgggggtactgctactataagctccaggttgacttctcctcagaccacctgggctgtttcaccaagtgccggaagccatgcagcgtgaccagctaccagctctctgctggttactcacgatggccctcggtgacatcccaggaatgggtcttccagatgctatcgcgacagaacaattacaccgtcaacaacaagagaaatggagtggccaaagtcaacatcttcttcaaggagctgaactacaaaaccaattctgagtctccctctgtcacgatggtcaccctcctgtccaacctgggcagccagtggagcctgtggttcggctcctcggtgttgtctgtggtggagatggctgagctcgtctttgacctgctggtcatcatgttcctcatgctgctccgaaggttccgaagccgatactggtctccaggccgagggggcaggggtgctcaggaggtagcctccaccctggcatcctcccctccttcccacttctgcccccaccccatgtctctgtccttgtcccagccaggccctgctccctctccagccttgacagcccctccccctgcctatgccaccctgggcccccgcccatctccagggggctctgcaggggccagttcctccacctgtcctctgggggggccctgagagggaaggagaggtttctcacaccaaggcagatgctcctctggtgggagggtgctggccctggcaagattgaaggatgtgcagggcttcctctcagagccgcccaaactgccgttgatgtgtggaggggaagcaagatgggtaagggctcaggaagttgctccaagaacagtagctgatgaagctgcccagaagtgccttggctccagccctgtaccccttggtactgcctctgaacactctggtttccccacccaactgcggctaagtctctttttcccttggatcagccaagcgaaacttggagctttgacaaggaactttcctaagaaaccgctgataaccaggacaaaacacaaccaagggtacacgcaggcatgcacgggtttcctgcccagcgacggcttaagccagcccccgactggcctggccacactgctctccagtagcacagatgtctgctcctcctcttgaacttgggtgggaaaccccacccaaaagccccctttgttacttaggcaattccccttccctgactcccgagggctagggctagagcagacccgggtaagtaaaggcagacccagggctcctctagcctcatacccgtgccctcacagagccatgccccggcacctctgccctgtgtctttcatacctctacatgtctgcttgagatatttcctcagcctgaaagtttccccaaccatctgccagagaactcctatgcatcccttagaaccctgctcagacaccattacttttgtgaacgcttctgccacatcttgtcttccccaaaattgatcactccgccttctcctgggctcccgtagcacactataacatctgctggagtgttgctgttgcaccatactttcttgtacatttgtgtctcccttcccaactagactgtaagtgccttgcggtcagggactgaatcttgcccgtttatgtatgctccatgtctagcccatcatcctgcttggagcaagtaggcaggagctcaataaatgtttgttgcatgaaggaaaaaaaaaaaaaaaaaa

SEQ ID NO: 1557 - DNA, 1321 bp, Homo sapiens
cttttcccggcacatgcgcaccgcagcgggtcgcgcgccctaaggagtggcactttttaaaagtgcagccggagaccagcctacagccgcctgcatctgtatccagcgccaggtcccgccagtcccagctgcgcgcgccccccagtcccgcacccgttcggcccaggctaagttagccctcaccatgccggtcaaaggaggcaccaagtgcatcaaatacctgctgttcggatttaacttcatcttctggcttgccgggattgctgtccttgccattggactatggctccgattcgactctcagaccaagagcatcttcgagcaagaaactaataataataattccagcttctacacaggagtctatattctgatcggagccggcgccctcatgatgctggtgggcttcctgggctgctgcggggctgtgcaggagtcccagtgcatgctgggactgttcttcggcttcctcttggtgatattcgccattgaaatagctgcggccatctggggatattcccacaaggatgaggtgattaaggaagtccaggagttttacaaggacacctacaacaagctgaaaaccaaggatgagccccagcgggaaacgctgaaagccatccactatgcgttgaactgctgtggtttggctgggggcgtggaacagtttatctcagacatctgccccaagaaggacgtactcgaaaccttcaccgtgaagtcctgtcctgatgccatcaaagaggtcttcgacaataaattccacatcatcggcgcagtgggcatcggcattgccgtggtcatgatatttggcatgatcttcagtatgatcttgtgctgtgctatccgcaggaaccgcgagatggtctagagtcagcttacatccctgagcaggaaagtttacccatgaagattggtgggattttttgtttgtttgttttgttttgtttgttgtttgttgtttgtttttttgccactaattttagtattcattctgcattgctagataaaagctgaagttactttatgtttgtcttttaatgcttcattcaatattgacatttgtagttgagcggggggtttggtttgctttggtttatattttttcagttgtttgtttttgcttgttatattaagcagaaatcctgcaatgaaaggtactatatttgctagactctagacaagatattgtacataaaagaatttttttgtctttaaatagatacaaatgtctatcaactttaatcaagttgtaacttatattgaagacaatttgatacataataaaaaattatgacaatgtcctggactggtaaaaaaa

SEQ ID NO: 1558 - DNA, 2344 bp, Homo sapiens; identical to SEQ ID NO: 815

SEQ ID NO: 1559 - DNA, 927 bp, Homo sapiens; identical to SEQ ID NO: 232

SEQ ID NO: 1560 - DNA, 2000 bp, Homo sapiens
gcgcccagaacgccccggccatgggcatccgaggcatgctgcgagccgcagtgatcctgctgctcatcaggacctggctcgcggagggcaactaccccagtcccatcccgaaattccacttcgagttctcctctgctgtgcccgaagtcgtcctgaacctcttcaactgcaaaaattgtgcaaatgaagctgtggttcaaaagattttggacagggtgctgtcaagatacgatgtccgcctgagaccgaattttggaggtgcccctgtgcctgtgagaatatctatttatgtcacgagcattgaacagatctcagaaatgaatatggactacacgatcacgatgttttttcatcagacttggaaagattcacgcttagcatactatgagaccaccctgaacttgaccctggactatcggatgcatgagaagttgtgggtccctgactgctactttctgaacagcaaggatgctttcgtgcatgatgtgactgtggagaatcgcgtgtttcagcttcacccagatggaacggtgcggtacggcatccgactcaccactacagcagcttgttccctggatctgcataaattccctatggacaagcaggcctgcaacctggtggtagagagctatggttacacggttgaagacatcatattattctgggatgacaatgggaacgccatccacatgactgaggagctgcatatccctcagttcactttcctgggaaggacgattactagcaaggaggtgtatttctacacaggttcctacatacgcctgatactgaagttccaggttcagagggaagttaacagctaccttgtgcaagtctactggcctactgtcctcaccactattacctcttggatatcgttttggatgaactatgattcctctgcagccagggtgacaattggcttaacttcaatgctcatcctgaccaccatcgactcacatctgcgggataagctccccaacatttcctgtatcaaggccattgatatctatatcctcgtgtgcttgttctttgtgttcctgtccttgctggagtatgtctacatcaactatcttttctacagtcgaggacctcggcgccagcctaggcgacacaggagaccccgaagagtcattgcccgctaccgctaccagcaagtggtggtaggaaacgtgcaggatggcctgattaacgtggaagacggagtcagctctctccccatcaccccagcgcaggcccccctggcaagcccggaaagcctcggttctttgacgtccacctccgagcaggcccagctggccacctcggaaagcctcagcccactcacttctctctcaggccaggcccccctggccactggagaaagcctgagcgatctcccctccacctcagagcaggcccggcacagctatggtgttcgctttaatggtttccaggctgatgacagtatttttcctaccgaaatccgcaaccgtgtcgaagcccatggccatggtgttacccatgaccatgaagattccaatgagagcttgagctcggatgagcgccatggccatggccccagtgggaagcccatgcttcaccatggcgagaagggtgtgcaagaagcaggctgggaccttgatgacaacaatgacaagagcgactgccttgccattaaggagcaattcaagtgtgatactaacagtacctggggccttaatgatgatgagctcatggcccatggccaagagaaggacagtagctcagagtctgaggatagttgccccccaagccctgggtgctccttcactgaagggttctccttcgatctctttaatcctgactacgtcccaaaggtcgacaagtggtcccggttcctcttccctctggcctttgggttgttcaacattgtttactgggtataccatatgtattagtcccccagtgctccagaacagcgggagcactgtgctgtgctcctttcagtttcttttgggtttgtttttccctctttcctt

SEQ ID NO: 1561 - DNA, 1980 bp, Homo sapiens; identical to SEQ ID NO: 819

SEQ ID NO: 1562 - DNA, 5358 bp, Homo sapiens; identical to SEQ ID NO: 805

SEQ ID NO: 1563 - DNA, 1846 bp, Homo sapiens
aaaagtgcctttgttggcctgggctcaggaatccagagaaactggtcaggaggaggccccagtgacaaaaacccctccctctgcccccgcccctctgccagagccatataactgctcaacctgtccccgagagagagtgccctggcagctgtcggctggaaggaactggtctgctcacacttgctggcttgcgcatcaggactggctttatctcctgactcacggtgcaaaggtgcactctgcgaacgttaagtccgtccccagcgcttggaatcctacggcccccacagccggatcccctcagccttccaggtcctcaactcccgtggacgctgaacaatggcctccatggggctacaggtaatgggcatcgcgctggccgtcctgggctggctggccgtcatgctgtgctgcgcgctgcccatgtggcgcgtgacggccttcatcggcagcaacattgtcacctcgcagaccatctgggagggcctatggatgaactgcgtggtgcagagcaccggccagatgcagtgcaaggtgtacgactcgctgctggcactgccgcaggacctgcaggcggcccgcgccctcgtcatcatcagcatcatcgtggctgctctgggcgtgctgctgtccgtggtggggggcaagtgtaccaactgcctggaggatgaaagcgccaaggccaagaccatgatcgtggcgggcgtggtgttcctgttggccggccttatggtgatagtgccggtgtcctggacggcccacaacatcatccaagacttctacaatccgctggtggcctccgggcagaagcgggagatgggtgcctcgctctacgtcggctgggccgcctccggcctgctgctccttggcggggggctgctttgctgcaactgtccaccccgcacagacaagccttactccgccaagtattctgctgcccgctctgctgctgccagcaactacgtgtaaggtgccacggctccactctgttcctctctgctttgttcttccctggactgagctcagcgcaggctgtgaccccaggagggccctgccacgggccactggctgctggggactggggactgggcagagactgagccaggcaggaaggcagcagccttcagcctctctggcccactcggacaacttcccaaggccgcctcctgctagcaagaacagagtccaccctcctctggatattggggagggacggaagtgacagggtgtggtggtggagtggggagctggcttctgctggccaggatagcttaaccctgactttgggatctgcctgcatcggcgttggccactgtccccatttacattttccccactctgtctgcctgcatctcctctgttccgggtaggccttgatatcacctctgggactgtgccttgctcaccgaaacccgcgcccaggagtatggctgaggccttgcccacccacctgcctgggaagtgcagagtggatggacgggtttagaggggaggggcgaaggtgctgtaaacaggtttgggcagtggtgggggagggggccagagaggcggctcaggttgcccagctctgtggcctcaggactctctgcctcacccgcttcagcccagggcccctggagactgatcccctctgagtcctctgccccttccaaggacactaatgagcctgggagggtggcagggaggaggggacagcttcacccttggaagtcctggggtttttcctcttccttctttgtggtttctgttttgtaatttaagaagagctattcatcactgtaattattattattttctacaataaatgggacctgtgcacaggaaaaaaaaaaaaaaaaaaaaaaaa

SEQ ID NO: 1564 - DNA, 3801 bp, Homo sapiens
aggtaggtcccccgctccgacagggctcttacgccatatgtgacgcaaattagcttacgagccgggggtggaggtgtcgtcagcacccgcctgcggttggccgcgttgcagcgagaggggcatgtagaccccgcctcgtagggaggtggggagcggcaagccccgcctcagcccctctggcaggctcccgccagcgtcgctgcggctccggcccgggagcgagcgcccggagctcggaaagatgcggcgcccgcggcggcctgggggtctcgggggatccgggggtctccggctgctcctctgcctcctgctgctgagcagccgcccggggggctgcagcgccgttagtgcccacggctgtctatttgaccgcaggctctgctctcacctggaagtctgtattcaggatggcttgtttgggcagtgccaggtgggagtggggcaggcccggccccttttgcaagtcacctccccagttctccaacgcttacaaggtgtgctccgacaactcatgtcccaaggattgtcctggcacgatgacctcacccagtatgtgatctctcaggagatggagcgcatccccaggcttcgccccccagagccccgtccaagggacaggtctggcttggcacccaagagacctggtcctgctggagagctgcttttacaggacatccccactggctccgcccctgctgcccagcatcggcttccacaaccaccagtgggcaaaggtggagctggggccagctcctctctgtcccctctgcaggctgagctgctcccgcctctcttggagcacctgctgctgcccccacagcctccccacccttcactgagttacgaacctgccttgctgcagccctacctgttccaccagtttggctcccgtgatggctccagggtctcagagggctccccagggatggtcagtgtcggccccctgcccaaggctgaagcccctgccctcttcagcagaactgcctccaagggcatatttggggaccaccctggccactcctacggggaccttccagggccttcacctgcccagctttttcaagactctgggctgctctatctggcccaggagttgccagcacccagcagggccagggtgccaaggctgccagagcaagggagcagcagccgggcagaggactccccagagggctatgagaaggaaggactaggggatcgtggagagaagcctgcttccccagctgtgcagccagatgcggctctgcagaggctggccgctgtgctggcgggctatggggtagagctgcgtcagctgacccctgagcagctctccacactcctgaccctgctgcagctactgcccaagggtgcaggaagaaatccgggaggggttgtaaatgttggagctgatatcaagaaaacaatggaggggccggtggagggcagagacacagcagagcttccagcccgcacatcccccatgcctggacaccccactgccagccctacctccagtgaagtccagcaggtgccaagccctgtctcctctgagcctcccaaagctgccagaccccctgtgacacctgtcctgctagagaagaaaagcccactgggccagagccagcccacggtggcaggacagccctcagcccgcccagcagcagaggaatatggctacatcgtcactgatcagaagcccctgagcctggctgcaggagtgaagctgctggagatcctggctgagcatgtgcacatgtcctcaggcagcttcatcaacatcagtgtggtgggaccagccctcaccttccgcatccggcacaatgagcagaacctgtctttggctgatgtgacccaacaagcagggctggtgaagtctgaactggaagcacagacagggctccaaatcttgcagacaggagtgggacagagggaggaggcagctgcagtccttccccaaactgcgcacagcacctcacccatgcgctcagtgctgctcactctggtggccctggcaggtgtggctgggctgctggtggctctggctgtggctctgtgtgtgcggcagcatgcgcggcagcaagacaaggagcgcctggcagccctggggcctgagggggcccatggtgacactacctttgagtaccaggacctgtgccgccagcacatggccacgaagtccttgttcaaccgggcagagggtccaccggagccttcacgggtgagcagtgtgtcctcccagttcagcgacgcagcccaggccagccccagctcccacagcagcaccccgtcctggtgcgaggagccggcccaagccaacatggacatctccacgggacacatgattctggcatacatggaggatcacctgcggaaccgggaccgccttgccaaggagtggcaggccctctgtgcctaccaagcagagccaaacacctgtgccaccgcgcagggggagggcaacatcaaaaagaaccggcatcctgacttcctgccctatgaccatgcccgcataaaactgaaggtggagagcagcccttctcggagcgattacatcaacgccagccccattattgagcatgaccctcggatgccagcctacatagccacgcagggcccgctgtcccataccatcgcagacttctggcagatggtgtgggagagcggctgcaccgtcatcgtcatgctgaccccgctggtggaggatggtgtcaagcagtgtgaccgctactggccagatgagggtgcctccctctaccacgtatatgaggtgaacctggtgtcggagcacatctggtgcgaggactttctggtgcggagcttctacctgaagaacgtgcagacccaggagacgcgcacgctcacgcagttccacttcctcagctggccggcagagggcacaccggcctccacgcggcccctgctggacttccgcaggaaggtgaacaagtgctaccggggccgctcctgccccatcatcgtgcactgcagtgatggtgcggggaggaccggcacctacatcctcatcgacatggtcctgaaccgcatggcaaaaggagtgaaggagattgacatcgctgccaccctggagcatgtccgtgaccagcggcctggccttgtccgctctaaggaccagtttgaatttgccctgacagccgtggcggaggaagtgaatgccatcctcaaggccctgccccagtgagaccctggggccccttggcgggcagcccagcctctgtccctctttgcctgtgtgagcatctctgtgtacccactcctcactgccccaccagccacctcttgggcatgctcagcccttcctagaagagtcaggaagggaaagccagaaggggcacgcctgcccagcctcgcatgccagagcctggggcatcccagagcccagggcatcccatgggggtgctgcagccaggaggagaggaaaggacatgggtagcaattctacccagagccttctcctgcctacattccctggcctggctctcctgtagctctcctggggttctgggagttccctgaacatctgtgtgtgtccccctatgctccagtatggaagaatggggtggagggtcgccacacccggctccccctgcttctcagccccgggcctgcctctgactcacacttgggcgctctgccctccctggcctcacgcccagcctcctcccaccaccctcccaccatgcgctgctcaacctctctccttctggcgcaagagaacatttctagaaaaaactacttttgtaccagtgtgaataaagttagtgtgttgtctgtgcagctgcaaaaaaaaaaaaaaaaaaa

SEQ ID NO: 1565 - DNA, 3148 bp, Homo sapiens
atggcttctcacgcttgtgctgcatatcccacaccaattagacccaaggatcagttggaagtttccaggacatcttcattttatttccaccctcaatccacatttccagatgtctctgcagcaaagcgaaattccaggagaagaggacaaagatactcagagagaaaaagtaaaagaccgaagaaggaggctggagagaccaggatccttccagctgaacaaagtcagccacaaagcagactagccagccggctacaattggagtcagagtcccaaagacatgggcttgttagagtgctgtgcaagatgtctggtaggggccccctttgcttccctggtggccactggattgtgtttctttggggtggcactgttctgtggctgtggacatgaagccctcactggcacagaaaagctaattgagacctatttctccaaaaactaccaagactatgagtatctcatcaatgtgatccatgccttccagtatgtcatctatggaactgcctctttcttcttcctttatggggccctcctgctggctgagggcttctacaccaccggcgcagtcaggcagatctttggcgactacaagaccaccatctgcggcaagggcctgagcgcaacggtaacagggggccagaaggggaggggttccagaggccaacatcaagctcattctttggagcgggtgtgtcattgtttgggaaaatggctaggacatcccgacaagtttgtgggcatcacctatgccctgaccgttgtgtggctcctggtgtttgcctgctctgctgtgcctgtgtacatttacttcaacacctggaccacctgccagtctattgccttccccagcaagacctctgccagtataggcagtctctgtgctgatgccagaatgtatggtgttctcccatggaatgctttccctggcaaggtttgtggctccaaccttctgtccatctgcaaaacagctgagttccaaatgaccttccacctgtttattgctgcatttgtgggggctgcagctacactggtttccctgctcaccttcatgattgctgccacttacaactttgccgtccttaaactcatgggccgaggcaccaagttctgatcccccgtagaaatccccctttctctaatagcgaggctctaaccacacagcctacaatgctgcgtctcccatcttaactctttgcctttgccaccaactggccctcttcttacttgatgagtgtaacaagaaaggagagtcttgcagtgattaaggtctctctttggactctcccctcttatgtacctcttttagtcattttgcttcatagctggttcctgctagaaatgggaaatgcctaagaagatgacttcccaactgcaagtcacaaaggaatggaggctctaattgaattttcaagcatctcctgaggatcagaaagtaatttcttctcaaagggtacttccactgatggaaacaaagtggaaggaaagatgctcaggtacagagaaggaatgtctttggtcctcttgccatctataggggccaaatatattctctttggtgtacaaaatggaattcattctggtctctctattaccactgaagatagaagaaaaaagaatgtcagaaaaacaataagagcgtttgcccaaatctgcctattgcagctgggagaagggggtcaaagcaaggatctttcacccacagaaagagagcactgaccccgatggcgatggactactgaagccctaactcagccaaccttacttacagcataagggagcgtagaatctgtgtagacgaagggggcatctggccttacacctcgttagggaagagaaacagggtgttgtcagcatcttctcactcccttctccttgataacagctaccatgacaaccctgtggtttccaaggagctgagaatagaaggaaactagcttacatgagaacagactggcctgaggagcagcagttgctggtggctaatggtgtaacctgagatggccctctggtagacacaggatagataactctttggatagcatgtctttttttctgttaattagttgtgtactctggcctctgtcatatcttcacaatggtgctcatttcatgggggtattatccattcagtcatcgtaggtgatttgaaggtcttgatttgttttagaatgatgcacatttcatgtattccagtttgtttattacttatttggggttgcatcagaaatgtctggagaataattctttgattatgactgttttttaaactaggaaaattggacattaagcatcacaaatgatattaaaaattggctagttgaatctattgggattttctacaagtattctgcctttgcagaaacagatttggtgaatttgaatctcaatttgagtaatctgatcgttctttctagctaatggaaaatgattttacttagcaatgttatcttggtgtgttaagagttaggtttaacataaaggttattttctcctgatatagatcacataacagaatgcaccagtcatcagctattcagttggtaagcttccaggaaaaaggacaggcagaaagagtttgagacctgaatagctcccagatttcagtcttttcctgtttttgttaactttgggttaaaaaaaaaaaaagtctgattggttttaattgaaggaaagatttgtactacagttcttttgttgtaaagagttgtgttgttcttttcccccaaagtggtttcagcaatatttaaggagatgtaagagctttacaaaaagacacttgatacttgttttcaaaccagtatacaagataagcttccaggctgcatagaaggaggagagggaaaatgttttgtaagaaaccaatcaagataaaggacagtgaagtaatccgtaccttgtgttttgttttgatttaataacataacaaataaccaacccttccctgaaaacctcacatgcatacatacacatatatacacacacaaagagagttaatcaactgaaagtgtttccttcatttctgatatagaattgcaattttaacacacataaaggataaacttttagaaacttatcttacaaagtgtattttataaaattaaagaaaataaaattaagaatgttctcaatcaaaaaaaaaaaaaaa

SEQ ID NO: 1566 - DNA, 2652 bp, Homo sapiens; identical to SEQ ID NO: 227

SEQ ID NO: 1567 - DNA, 4344 bp, Homo sapiens
gggatgccgaggagccggggcggccgcgccgcgccggggccgccgccgccgccgccgccgccgggccaggccccgcgctggagccgctggcgggtccctgggcggctgctgctgctgctgctgcccgcgctctgctgcctcccgggcgccgcgcgggcggcggcggcggcggcgggggcagggaaccgggcagcggtggcggtggcggtggcgcgggcggacgaggcggaggcgcccttcgccgggcagaactggttaaagtcctatggctatctgcttccctatgactcacgggcatctgcgctgcactcagcgaaggccttgcagtcggcagtctccactatgcagcagttttacgggatcccggtcaccggtgtgttggatcagacaacgatcgagtggatgaagaaaccccgatgtggtgtccctgatcacccccacttaagccgtaggcggagaaacaagcgctatgccctgactggacagaagtggaggcaaaaacacatcacctacagcattcacaactataccccaaaagtgggtgagctagacacgcggaaagctattcgccaggctttcgatgtgtggcagaaggtgaccccactgacctttgaagaggtgccataccatgagatcaaaagtgaccggaaggaggcagacatcatgatcttttttgcttctggtttccatggcgacagctccccatttgatggagaagggggattcctggcccatgcctacttccctggcccagggattggaggagacacccactttgactccgatgagccatggacgctaggaaatgccaaccatgacgggaacgacctcttcctggtggctgtgcatgagctgggccacgcgctgggactggagcactccagcgaccccagcgccatcatggcgcccttctaccagtacatggagacgcacaacttcaagctgccccaggacgatctccagggcatccagaagatctatggacccccagccgagcctctggagcccacaaggccactccctacactccccgtccgcaggatccactcaccatcggagaggaaacacgagcgccagcccaggccccctcggccgcccctcggggaccggccatccacaccaggcaccaaacccaacatctgtgacggcaacttcaacacagtggccctcttccggggcgagatgtttgtctttaaggatcgctggttctggcgtctgcgcaataaccgagtgcaggagggctaccccatgcagatcgagcagttctggaagggcctgcctgcccgcatcgacgcagcctatgaaagggccgatgggagatttgtcttcttcaaaggtgacaagtattgggtgtttaaggaggtgacggtggagcctgggtacccccacagcctgggggagctgggcagctgtttgccccgtgaaggcattgacacagctctgcgctgggaacctgtgggcaagacctactttttcaaaggcgagcggtactggcgctacagcgaggagcggcgggccacggaccctggctaccctaagcccatcaccgtgtggaagggcatcccacaggctccccaaggagccttcatcagcaaggaaggatattacacctatttctacaagggccgggactactggaagtttgacaaccagaaactgagcgtggagccaggctacccgcgcaacatcctgcgtgactggatgggctgcaaccagaaggaggtggagcggcggaaggagcggcggctgccccaggacgacgtggacatcatggtgaccatcaacgatgtgccgggctccgtgaacgccgtggccgtggtcatcccctgcatcctgtccctctgcatcctggtgctggtctacaccatcttccagttcaagaacaagacaggccctcagcctgtcacctactataagcggccagtccaggaatgggtgtgagcagcccagagccctctctatccacttggtctggccagccaggcccttcctcaccagggtctgaggggcagctctggccagtgctcaccagggccagcagggccctaggctggggtcgtacagctgaagtggtgggtgcattggcctaggctgagcgtggggcagggaattatgggggctgtgccccagggtgggtgtctggcacccagctgccagccttctgtcctgggcaaactactccctacttaagggaataggccaggctccatccggaggcagggaccatgccaggaggagcccctgtggtcacggcatcctgtggtgtccatgaggtaccacagctccactcctggctggaacccagcaccctctgtgggaagccagcactagctctcatcccccatccgggagataccaccagtcctggtccccttttgccaacacctgctggtcagatgtccccctacccccaccccactgtcctccaaggctacaggacccctgcttctgacacagtgagcaacaagcctgggtttccctgctggcagacggcagatccctcaggaaacctgctccacttgtcagggtctcttcggagacccaggatttagggtcacatgctgcaggcagggctgtggcccagctgggtctgacaaggacccagctgtcacatcgtgaatatttaaatgtcctgtcactactgtcccattttgcaaaggctgcttgaggctttaggtgaactagaggtgactgtcttggtgatgaggccagcatagcggccctcccccaggcgacaaggaccaaggtgctgctaaggccactctagcgcccagacaccccagtagctgagctctgctcctatggctacagagctggggcagaagctgaccccatttctggaggaagatccgagtttgtgaccgtcctccactcccctctattgtcactgtccccagctttgctccagtctgtcacttgcagcctggagctcagcctcaccagttaggtgaggcagagatggctgcagggccaacactggcagagcctgggagtccttcggaaggggaccagggcgtctgaagtgctcagtgcccccactactctgaggccgactccagctactctgaggccgactcaatctctcggctggaagcagtgttttcccagagcttggcccttgctgacctcgctcactgggcccatcttcccacactgctcttagaaggacacccctaccggtagcagccccaagctgagggggctccctttttgaccttcactggcccgcccttcactgtctccagcaggagttcctagggcttggcctgccttgctccacagtacggcggaggcagccctgcttgtcactgaggagccctagacaaggccaatgggttcatcaatgcccactggctctctgccaaagccaaaaaggtgtcaggcagtctccagcgtgctggccgggtctcggatgccacccctgctcactgagcctgcatgggccttgcccccgaccctgtggtctctgggattggggtcggcttaccctgtagcacagacagggactcctgctgccctgggagctgtctcaagcaaaatctcttgtcccagaggtgcccatgtgggtccgctgtgtcccctgtcatcatccttgttttttctcattttggccaagggcaggctccctgggacaggcagggaacaactgcggagatattagtgattcataggtttgtacagtgttttatactttgcaaagcactttattagctcacacctgtccactcacatgaaactcgtgttaggccctgggaggccgacggtaactctcaccgtgccctcagatgaagcacagagaggttgttacttgcccgggccatccagtgggctggctgggtcttgtgtccccatctgtggacccctctagggtctgagatgagatgagaagtgtctcctgtatccacctcttcctggcctcccttcccccacttcctggtccctgtccactcctcaggttggtgctctcacttcttgaaagctctaggcacccccgcctcccgccaggctccccattggctcctggcaggccagctgagaatgaacaggagatggaggcaggcagcccaggctgcagaggtgagggatgtggggccaggcccagagggctcagcctagaggcttccaatctcagattctcctgcctgtggtcatctgtttgtccatcaccccaggacagggcagacagaggggcaaagcactgggggccccagagcctagcttcccctcagcctgggggacatcacagcatttcagtgtcagtcacattttaaactgatcagcctttgtataatgttttttaaatcatttctaaataaaacagaaatacagagtgaaaaaaaaaaa

SEQ ID NO: 1568 - DNA, 10796 bp, Homo sapiens; identical to SEQ ID NO: 812

SEQ ID NO: 1569 - DNA, 2816 bp, Homo sapiens; identical to SEQ ID NO: 212

SEQ ID NO: 1570 - DNA, 4886 bp, Homo sapiens
gcgcccagcctcgccgccgccgagcgcccgacgcgccacgccgcgctgggcagctggagagctggcggcggagcgggccgggagcggcgggggcggcgccgaggccgcgggcggggggaggagggccgcagccccggagaggggaaaaggcgggccggacggcgccagcagccagccccgaggacgcgagcggcaggtgtgcacagaggttctccactttgttttctgaactcgcggtcaggatggttttctctgtcaggcagtgtggccatgttggcagaactgaagaagttttactgacgttcaagatattccttgtcatcatttgtcttcatgtcgttctggtaacatccctggaagaagatactgataattccagtttgtcaccaccacctgctaaattatctgttgtcagttttgccccctcctccaatgaggttgaaacaacaagcctcaatgatgttactttaagcttactcccttcaaacgaaacagaaaaaactaaaatcactatagtaaaaaccttcaatgcatcaggcgtcaaaccccagagaaatatctgcaatttgtcatctatttgcaatgactcagcattttttagaggtgagatcatgtttcaatatgataaagaaagcactgttccccagaatcaacatataacgaatggcaccttaactggagtcctgtctctaagtgaattaaaacgctcagagctcaacaaaaccctgcaaaccctaagtgagacttactttataatgtgtgctacagcagaggcccaaagcacattaaattgtacattcacaataaaactgaataatacaatgaatgcatgtgctgtaatagctgctttggaaagagtaaagattcgaccaatggaacactgctgctgttctgtcaggataccctgcccttcctccccagaagagttggaaaagcttcagtgtgacctgcaggatcccattgtctgtcttgctgaccatccacgtggcccaccattttcttccagccaatccatcccagtggtgcctcgggccactgtgctttcccaggtccccaaagctacctcttttgctgagcctccagattattcacctgtgacccacaatgttccctctccaataggggagattcaacccctttcaccccagccttcagctcccatagcttccagccctgccattgacatgcccccacagtctgaaacgatctcttcccctatgccccaaacccatgtctccggcaccccacctcctgtgaaagcctcattttcctctcccaccgtgtctgcccctgcgaatgtcaacactaccagcgcacctcctgtccagacagacatcgtcaacaccagcagtatttctgatcttgagaaccaagtgttgcagatggagaaggctctgtccttgggcagcctggagcctaacctcgcaggagaaatgatcaaccaagtcagcagactccttcattccccgcctgacatgctggcccctctggctcaaagattgctgaaagtagtggatgacattggcctacagctgaacttttcaaacacgactataagtctaacctccccttctttggctctggctgtgatcagagtgaatgccagtagtttcaacacaactacctttgtggcccaagaccctgcaaatcttcaggtttctctggaaacccaagctcctgagaacagtattggcacaattactcttccttcatcgctgatgaataatttaccagctcatgacatggagctagcttccagggttcagttcaatttttttgaaacacctgctttgtttcaggatccttccctggagaacctctctctgatcagctacgtcatatcatcgagtgttgcaaacctgaccgtcaggaacttgacaagaaacgtgacagtcacattaaagcacatcaacccgagccaggatgagttaacagtgagatgtgtattttgggacttgggcagaaatggtggcagaggaggctggtcagacaatggctgctctgtcaaagacaggagattgaatgaaaccatctgtacctgtagccatctaacaagcttcggcgttctgctggacctatctaggacatctgtgctgcctgctcaaatgatggctctgacgttcattacatatattggttgtgggctttcatcaatttttctgtcagtgactcttgtaacctacatagcttttgaaaagatccggagggattacccttccaaaatcctcatccagctgtgtgctgctctgcttctgctgaacctggtcttcctcctggactcgtggattgctctgtataagatgcaaggcctctgcatctcagtggctgtatttcttcattattttctcttggtctcattcacatggatgggcctagaagcattccatatgtacctggcccttgtcaaagtatttaatacttacatccgaaaatacatccttaaattctgcattgtcggttggggggtaccagctgtggttgtgaccatcatcctgactatatccccagataactatgggcttggatcctatgggaaattccccaatggttcaccggatgacttctgctggatcaacaacaatgcagtattctacattacggtggtgggatatttctgtgtgatatttttgctgaacgtcagcatgttcattgtggtcctggttcagctctgtcgaattaaaaagaagaagcaactgggagcccagcgaaaaaccagtattcaagacctcaggagtatcgctggccttacatttttactgggaataacttggggctttgccttctttgcctggggaccagttaacgtgaccttcatgtatctgtttgccatctttaataccttacaaggatttttcatattcatcttttactgtgtggccaaagaaaatgtcaggaagcaatggaggcggtatctttgttgtggaaagttacggctggctgaaaattctgactggagtaaaactgctactaatggtttaaagaagcagactgtaaaccaaggagtgtccagctcttcaaattccttacagtcaagcagtaactccactaactccaccacactgctagtgaataatgattgctcagtacacgcaagcgggaatggaaatgcttctacagagaggaatggggtctcttttagtgttcagaatggagatgtgtgccttcacgatttcactggaaaacagcacatgtttaacgagaaggaagattcctgcaatgggaaaggccgtatggctctcagaaggacttcaaagcggggaagcttacactttattgagcaaatgtgattcctttcttctaaaatcaaagcatgatgcttgacagtgtgaaatgtccaattttaccttttacacaatgtgagatgtatgaaaatcaactcattttattctcggcaacatctggagaagcataagctaattaagggcgatgattattattacaagaagaaaccaagacattacaccatggtttttagacatttctgatttggtttcttatctttcattttataagaaggttggttttaaacaatacactaagaatgactcctataaagaaaacaaaaaaaggtagtgaactttcagctaccttttaaagaggctaagttatctttgataacatcatataaagcaactgttgacttcagcctgttggtgagtttagttgtgcatgcctttgttgtatataagctaaattctagtgacccatgtgtcaaaaatcttacttctacatttttttgtatttattttctactgtgtaaatgtattcctttgtagaatcatggttgttttgtctcacgtgataattcagaaaatccttgctcgttccgcaaatcctaaagctccttttggagatgatataggatgtgaaatacagaaacctcagtgaaatcaagaaataatgatcccagccagactgagaaaatgtaagcagacagtgccacagttagctcatacagtgcctttgagcaagttaggaaaagatgcccccactgggcagacacagccctatgggctcatggtttgacaaacagagtggagagaccatattttagccccactcaccctcttgggtgcacgacctgtacagccaaacacagcatccaatatgaatacccatcccctgaccgcatccccagtagtcagattatagaatctgcaccaagatgtttagctttataccttggccacagagagggatgaactgtcatccagaccatgtgtcaggaaaattgtgaacgtagatgaggtacatacactgccgcttctcaaatccccagagcctttaggaacaggagagtagactaggattccttctcttaaaaaggtacatatatatggaaaaaaatcatattgccgttctttaaaaggcaactgcatggtacattgttgattgttatgactggtacactctggcccagccagagctataattgttttttaaatgtgtcttgaagaatgcacagtgacaaggggagtagctattgggaacagggaactgtcctacactgctattgttgctacatgtatcgagccttgattgctcctagttatatacagggtctatcttgcttcctacctacatctgcttgagcagtgcctcaagtacatccttattaggaacatttcaaaccccttttagttaagtctttcactaaggttctcttgcatatatttcaagtgaatgttggatctcagactaaccatagtaataatacacatttctgtgagtgctgacttgtctttgcaatatttcttttctgatttatttaattttcttgtatttatatgttaaaatcaaaaatgttaaaatcaatgaaataaatttgcagttaagatctttaaaaaaaaaaaaaaaaaaaaaaaaaaaaaaaaaaaaaaaaaaaa

SEQ ID NO: 1571 - DNA, 2021 bp, Homo sapiens
ggcccggacgggacgtgcgcgctcaaaggttgcccgtctctgacgcccgcatttcctggtctggagccggctgagccacagcagggtcgccgcggggtcccggggccgtgctcccctgcccctcccgggagcgcgcggggcggggcggggcggggcgggaccaggcgggcgagctgggccctcgcccctccctcgggcggtcacctgggcacgggcgctgcaggtgtcggggcctcaaccttgcggagccgacagccatcgatcctcgggtggcctcgaggtggtggcagggccgccccctgcagtccggagacgaacgcacggaccgggcctccggaggcaggttcggctggaaggaaccgctctcgcttcgtcctacacttgcgcaaatgtctccgagcttactcacatagcatattggtatatcaaaatgaaatgcaaggaaccaaaaataacataattgaaggcagtaaaagtgaaattaaataggaagatcatcagtcaaggaagacccactggagaggacagaaaatgaagcagtgttttatcatgtgtatttcagcaggtcttcttgaaatttaactaaaaatatgactgctctctcttcagagaactgctcttttcagtaccagttacgtcaaacaaaccagcccctagatgttaactatctgctattcttgatcatacttgggaaaatattattaaatatccttacactaggaatgagaagaaaaaacacctgtcaaaattttatggaatatttttgcatttcactagcattcgttgatcttttacttttggtaaacatttccattatattgtatttcagggattttgtacttttaagcattaggttcactaaataccacatctgcctatttactcaaattatttcctttacttatggctttttgcattatccagttttcctgacagcttgtatagattattgcctgaatttctctaaaacaaccaagctttcatttaagtgtcaaaaattattttatttctttacagtaattttaatttggatttcagtccttgcttatgttttgggagacccagccatctaccaaagcctgaaggcacagaatgcttattctcgtcactgtcctttctatgtcagcattcagagttactggctgtcatttttcatggtgatgattttatttgtagctttcataacctgttgggaagaagttactactttggtacaggctatcaggataacttcctatatgaatgaaactatcttatattttcctttttcatcccactccagttatactgtgagatctaaaaaaatattcttatccaagctcattgtctgttttctcagtacctggttaccatttgtactacttcaggtaatcattgttttacttaaagttcagattccagcatatattgagatgaatattccctggttatactttgtcaatagttttctcattgctacagtgtattggtttaattgtcacaagcttaatttaaaagacattggattacctttggatccatttgtcaactggaagtgctgcttcattccacttacaattcctaatcttgagcaaattgaaaagcctatatcaataatgatttgttaatattattaattaaaagttacagctgtcataagatcataattttatgaacagaaagaactcaggacatattaaaaaataaactgaactaaaacaacttttgccccctgactgatagcatttcagaatgtgtcttttgaagggctatgataccagttattaaatagtgttttattttaaaaacaaaataattccaagaagtttttatagttattcagggacactatattacaaatattactttgttattaacacaaaaagtgataagagttaacatttggctatactgatgtttgtgttactcaaaaaaactactggatgcaaactgttatgtaaatctgagatttcactgacaactttaagatatcaacctaaacatttttattaaatgttcaaatgaaagcaagaaaaaaaaaa

SEQ ID NO: 1572 - DNA, 8278 bp, Homo sapiens; identical to SEQ ID NO: 1554

SEQ ID NO: 1573 - DNA, 1447 bp, Homo sapiens
gggtccaggctgcggcgcgtggggagcgggcggagcgggggcgggggccgagcgcggggcacccgggggcctcctgtataggcgggcaccatgggctcctgctccggccgctgcgcgctcgtcgtcctctgcgcttttcagctggtcgccgccctggagaggcaggtgtttgacttcctgggctaccagtgggcgcccatcctggccaactttgtccacatcatcatcgtcatcctgggactcttcggcaccatccagtaccggctgcgctatgtcatggtgtacacgctgtgggcagccgtctgggtcacctggaacgtcttcatcatctgcttctacctggaagtcggtggcctcttaaaggacagcgagctactgaccttcagcctctcccggcatcgctcctggtggcgtgagcgctggccaggctgtctgcatgaggaggtgccagcagtgggcctcggggccccccatggccaggccctggtgtcaggtgctggctgtgccctggagcccagctatgtggaggccctacacagttgcctgcagatcctgatcgcgcttctgggctttgtctgtggctgccaggtggtcagcgtgtttacggaggaagaggacagctttgatttcattggtggatttgatccatttcctctctaccatgtcaatgaaaagccatccagtctcttgtccaagcaggtgtacttgcctgcgtaagtgaggaaacagctgatcctgctcctgtggcctccagcctcagcgaccgaccagtgacaatgacaggagctcccaggccttgggacgcgcccccacccagcaccccccaggcggccggcagcacctgccctgggttctaagtactggacaccagccagggcggcagggcagtgccacggctggctgcagcgtcaagagagtttgtaatttcctttctcttaaaaaaaaaaaagaaaagaaaacatacaaaagaaaaggcaaaaccccacatgcccacctcctctggcaacatgggggtcacagctctgcccccaggctgtcgtctcgtcgaggagcccctccctcaggtgcccacctggggctgctggaccctcgggctgcaagcactgctgctgggatgcagcctccccaggaagtcaatgtgaggcccgagacccctcaagcggtgagggcccctgttgaacatggagggttcctaaccccaaactcgtgccagaagaacccccaccccacccaggagctgaggctgatggagccctagggtgggggctgggcttgaccaggaacagcagagccaggccccaaggcatagggcagggcacatggtggtgacgagcaggcagtactcttgtaaagggggctcttgggcaaacagtcccaaaggctcccccaggtatcatcaagttggtaaataaacaggaacatggccctcaaaaaaaaaaaaaaaaaa

SEQ ID NO: 1574 - DNA, 3350 bp, Homo sapiens
ggagcggagcctccgcctggggggccccccatccctggctgtcccccagctgcgcgtccccgccccacccccgcggctgagccaccaccggtgcagtggtctccgcttggcggagcgagccttgagcttcgttccacagcttctttgcatcttggatttcggggcggccccctcccccacctctctctgcctttttgtaccccgctttttttctgcgttctgctcggtttttgtagccgtctgtttttgcaccccatttcgttttgtttctagacggtttggtggggggtgaagctgcattcataccccttcctcttgttattctcccctgctctgacagcaccccttttcatcgcagttggggggcctaggatcggtgcatcttccgccgcgctgccagcaccccgcagcgcgtggtcgtgcaccccggaatctgcagcagctgcatatctgaggggggtctcctttgcccgcgccgccttcgctccccgtgcttttgggtgtgtggagggcttcagcgcgcggcgcccccgcttctccgcaaccccccgccccgcgcccggactcgccccgcgccaccaagatggtcatccagaaagagaagaagagctgcgggcaggtggttgaggagtggaaggagttcgtgtggaacccgaggacgcaccagtttatgggccgcaccgggaccagctgggcctttatcctcctcttctacctcgttttttatgggttcctcaccgccatgttcaccctcaccatgtgggtgatgctgcagactgtctccgaccatacccccaagtaccaggaccgactggccacaccgggcttgatgattcgccccaagactgagaaccttgatgtcattgtcaatgtcagtgacactgaaagctgggaccagcatgttcagaagctcaacaagttcttggagccttacaacgactctatccaagcccaaaagaatgatgtctgccgccctgggcgctattacgaacagccagataatggagtcctcaactaccccaaacgtgcctgccaattcaaccggacccagctgggcaactgctccggcattggggactccacccactatggttacagcactgggcagccctgtgtcttcatcaagatgaaccgggtcatcaacttctatgcaggagcaaaccagagcatgaatgttacctgtgctgggaagcgagatgaagatgctgagaatctcggcaacttcgtcatgttccccgccaacggcaacatcgacctcatgtacttcccctactatggcaaaaagttccacgtgaactacacacagcccctggtggctgtgaagttcctgaatgtgacccccaacgtggaggtgaatgtagaatgtcgcatcaacgccgccaacatcgccacagacgatgagcgagacaagttcgccggccgcgtggccttcaaactccgcatcaacaaaacctgaggccccttcctcccaccccatctctctcctgtggatgctcctggaatgtccctgaccctgcctgatccctccctcacccaccccaaaggtatttttgataacagagctatgacttgtctgagcctcacatccttttccttgacttctcaacccagcctgaagtccattgcggttccgtcactcgcctttcccaccaacttctcccaacctcagatcagtcagacagggagctgggctaagatggccacggaggagttaggagcctttctagttctggtttagctgtgagagctatccactctcctgcctgcatatcccctgagagttataggaagtgcccactgacccacccacccacctacaccccccgccacacacacacacaaacgtgcacacgcgtctcatttgacccctttgcttccagagatgaatgtggcactccctccttccattcctaagctctagccaccgtcccttgatctctcatactttctccctgtctacacagtcgccatcttggtgactttgaatttatctggctcctgggcaggtcttctcctcctctccatccctattccctcctctgaaatgcacccctttgtaattgaggacaaggtggttctgtggccttttccctctttgctggcacgttctgcttctcaccctctggtgactctgtgagctgggaaatgagggactggaagtgaggcctgtgttgacccttcctgaaaatcctctagcagcccccgacttcagcagtttctttctttgtttttttgagatggagtttcgctcttgttgcccaggctggagtgcaatggtgcaatctcagctcactgcaacttccgcatcccaggttcaagcgattctcccgcctcaggttcccgagtagctgggactacaggcatgtgccaccatgcccggctaatttctttctttctttttttttttttttgcattttttagtagagatgggggtttctccttgttggtcaggctggtctcgaactcccgacctcaggtgatccacctgcctcggcctcccaaagtgttgggattacaggcgtgagccaccgcgcccggccttcagtttcttcctaggccgttctgtcacccaaatagctgctacccagaggggcggggttgacctaggctgaatatccactttgtttttatggatggctcccttcccccattcgccttcccagaatatccttcaagttccacttcccagggagctctgggggaggggcggccattctggctccgtccccagtggccaccttggaaacatcggctggctttgggactattccacctccttcccctgagcccagatctgcccccaccatcctttctctggcttcttttagcaagttatcaactaatcactaactccttccttttcctctgcatgccagcctgaaaattccaaatctagcctctgaatgtcttggctccatctcttcagacccctttgcctttaaaaaaaaaacaaaaacaaaaacaaaaaaacccataatgcccacagaatgtcaaatgaggggcctcctgcctcctgctctgaatattctgtagctgtagaggcattttaaccctttgtcctccagcatcccttcacttcctcatcctctctaacctcctttttctttttttaatgctgcagcctccacactccacccacaggtggacccttccctttttctctagctggatctgtgtttcttcccttcgggcccccatgttttcctgcacccgccctaccatggtctctctctgcagttatttaatgcctgtgtcagatctactgtaaaaagaggattaagtaaaataaaatgagagcaattatatatataaatatatatcatacacagagaaaaaaaaaaaaaaaaaa

SEQ ID NO: 1575 - DNA, 6968 bp, Homo sapiens
agctgacctgtcctggacgcagcataactaacgaagctgctgcaggatgagaagatggcagcgcggctgcttgcaccaccaggccctgatagtttcaagcctttcacccctgagtcactggcaaacattgagaggcgcattgctgagagcaagctcaagaaaccaccaaaggccgatggcagtcatcgggaggacgatgaggacagcaagcccaagccaaacagcgacctggaagcagggaagagtttgcctttcatctacggggacatcccccaaggcctggttgcagttcccctggaggactttgacccatactatttgacgcagaaaacctttgtagtattaaacagagggaaaactctcttcagatttagtgccacgcctgccttgtacattttaagtccttttaacctgataagaagaatagctattaaaattttgatacattcagtatttagcatgatcattatgtgcactattttgaccaactgtgtattcatgacttttagtaaccctcctgactggtcgaagaatgtggagtacacgttcacagggatttatacatttgaatcactagtgaaaatcattgcaagaggtttctgcatagatggctttacctttttacgggacccatggaactggttagatttcagtgtcatcatgatggcgtatataacagagtttgtaaacctaggcaatgtttcagctctacgcactttcagggtactgagggctttgaaaactatttcggtaatcccaggcctgaagacaattgtgggtgccctgattcagtctgtgaagaaactgtcagatgtgatgatcctgacagtgttctgcctgagtgtttttgccttgatcggactgcagctgttcatggggaaccttcgaaacaagtgtgttgtgtggcccataaacttcaacgagagctatcttgaaaatggcaccaaaggctttgattgggaagagtatatcaacaataaaacaaatttctacacagttcctggcatgctggaacctttactctgtgggaacagttctgatgctgggcaatgcccagagggataccagtgtatgaaagcaggaaggaaccccaactatggttacacaagttttgacacttttagctgggccttcttggcattatttcgccttatgacccaggactattgggaaaacttgtatcaattgactttacgagcagccgggaaaacatacatgatcttcttcgtcttggtcatctttgtgggttctttctatctggtgaacttgatcttggctgtggtggccatggcttatgaagaacagaatcaggcaacactggaggaggcagaacaaaaagaggctgaatttaaagcaatgttggagcaacttaagaagcaacaggaagaggcacaggctgctgcgatggccacttcagcaggaactgtctcagaagatgccatagaggaagaaggtgaagaaggagggggctcccctcggagctcttctgaaatctctaaactcagctcaaagagtgcaaaggaaagacgtaacaggagaaagaagaggaagcaaaaggaactctctgaaggagaggagaaaggggatcccgagaaggtgtttaagtcagagtcagaagatggcatgagaaggaaggcctttcggctgccagacaacagaatagggaggaaattttccatcatgaatcagtcactgctcagcatcccaggctcgcccttcctctcccgccacaacagcaagagcagcatcttcagtttcaggggacctgggcggttccgagacccgggctccgagaatgagttcgcggatgacgagcacagcacggtggaggagagcgagggccgccgggactccctcttcatccccatccgggcccgcgagcgccggagcagctacagcggctacagcggctacagccagggcagccgctcctcgcgcatcttccccagcctgcggcgcagcgtgaagcgcaacagcacggtggactgcaacggcgtggtgtccctcatcggcggccccggctcccacatcggcgggcgtctcctgccagaggctacaactgaggtggaaattaagaagaaaggccctggatctcttttagtttccatggaccaattagcctcctacgggcggaaggacagaatcaacagtataatgagtgttgttacaaatacactagtagaagaactggaagagtctcagagaaagtgcccgccatgctggtataaatttgccaacactttcctcatctgggagtgccacccctactggataaaactgaaagagattgtgaacttgatagttatggacccttttgtggatttagccatcaccatctgcatcgtcctgaatacactgtttatggcaatggagcaccatcctatgacaccacaatttgaacatgtcttggctgtaggaaatctggttttcactggaattttcacagcggaaatgttcctgaagctcatagccatggatccctactattatttccaagaaggttggaacatttttgacggatttattgtctccctcagtttaatggaactgagtctagcagacgtggaggggctttcagtgctgcgatctttccgattgctccgagtcttcaaattggccaaatcctggcccaccctgaacatgctaatcaagattattggaaattcagtgggtgccctgggcaacctgacactggtgctggccattattgtcttcatctttgccgtggtggggatgcaactctttggaaaaagctacaaagagtgtgtctgcaagatcaaccaggactgtgaactccctcgctggcatatgcatgactttttccattccttcctcattgtctttcgagtgttgtgcggggagtggattgagaccatgtgggactgcatggaagtggcaggccaggccatgtgcctcattgtctttatgatggtcatggtgattggcaacttggtggtgctgaacctgtttctggccttgctcctgagctccttcagtgcagacaacctggctgccacagatgacgatggggaaatgaacaacctccagatctcagtgatccgtatcaagaagggtgtggcctggaccaaactaaaggtgcacgccttcatgcaggcccactttaagcagcgtgaggctgatgaggtgaagcctctggatgagttgtatgaaaagaaggccaactgtatcgccaatcacaccggtgcagacatccaccggaatggtgacttccagaagaatggcaatggcacaaccagcggcattggcagcagcgtggagaagtacatcattgatgaggaccacatgtccttcatcaacaaccccaacttgactgtacgggtacccattgctgtgggcgagtctgactttgagaacctcaacacagaggatgttagcagcgagtcggatcctgaaggcagcaaagataaactagatgacaccagctcctctgaaggaagcaccattgatatcaaaccagaagtagaagaggtccctgtggaacagcctgaggaatacttggatccagatgcctgcttcacagaaggttgtgtccagcggttcaagtgctgccaggtcaacatcgaggaagggctaggcaagtcttggtggatcctgcggaaaacctgcttcctcatcgtggagcacaactggtttgagaccttcatcatcttcatgattctgctgagcagtggcgccctggccttcgaggacatctacattgagcagagaaagaccatccgcaccatcctggaatatgctgacaaagtcttcacctatatcttcatcctggagatgttgctcaagtggacagcctatggcttcgtcaagttcttcaccaatgcctggtgttggctggacttcctcattgtggctgtggtggtgaatgccttggtgggcgccatcccctccatcatgaatgtgctgctggtgtgtctcatcttctggctgattttcagcatcatgggagttaacttgtttgcgggaaagtaccactactgctttaatgagacttctgaaatccgatttgaaattgaagatgtcaacaataaaactgaatgtgaaaagcttatggaggggaacaatacagagatcagatggaagaacgtgaagatcaactttgacaatgttggggcaggatacctggcccttcttcaagtagcaaccttcaaaggctggatggacatcatgtatgcagctgtagattcccggaagcctgatgagcagcctaagtatgaggacaatatctacatgtacatctattttgtcatcttcatcatcttcggctccttcttcaccctgaacctgttcattggtgtcatcattgataacttcaatcaacaaaagaaaaagttcggaggtcaggacatcttcatgaccgaagaacagaagaagtactacaatgccatgaaaaagctgggctcaaagaagccacagaaacctattccccgccccttgaacaaaatccaaggaatcgtctttgattttgtcactcagcaagcctttgacattgttatcatgatgctcatctgccttaacatggtgacaatgatggtggagacagacactcaaagcaagcagatggagaacatcctctactggattaacctggtgtttgttatcttcttcacctgtgagtgtgtgctcaaaatgtttgcgttgaggcactactacttcaccattggctggaacatcttcgacttcgtggtagtcatcctctccattgtgggaatgttcctggcagatataattgagaaatactttgtttccccaaccctattccgagtcatccgattggcccgtattgggcgcatcttgcgtctgatcaaaggcgccaaagggattcgtaccctgctctttgccttaatgatgtccttgcctgccctgttcaacatcggccttctgctcttcctggtcatgttcatcttctccatttttgggatgtccaattttgcatatgtgaagcacgaggctggtatcgatgacatgttcaactttgagacatttggcaacagcatgatctgcctgtttcaaatcacaacctcagctggttgggatggcctgctgctgcccatcctaaaccgcccccctgactgcagcctagataaggaacacccagggagtggctttaagggagattgtgggaacccctcagtgggcatcttcttctttgtaagctacatcatcatctctttcctaattgtcgtgaacatgtacattgccatcatcctggagaacttcagtgtagccacagaggaaagtgcagaccctctgagtgaggatgactttgagaccttctatgagatctgggagaagttcgaccccgatgccacccagttcattgagtactgtaagctggcagactttgcagatgccttggagcatcctctccgagtgcccaagcccaataccattgagctcatcgctatggatctgccaatggtgagcggggatcgcatccactgcttggacatcctttttgccttcaccaagcgggtcctgggagatagcggggagttggacatcctgcggcagcagatggaagagcggttcgtggcatccaatccttccaaagtgtcttacgagccaatcacaaccacactgcgtcgcaagcaggaggaggtatctgcagtggtcctgcagcgtgcctaccggggacatttggcaaggcggggcttcatctgcaaaaagacaacttctaataagctggagaatggaggcacacaccgggagaaaaaagagagcaccccatctacagcctccctcccgtcctatgacagtgtaactaaacctgaaaaggagaaacagcagcgggcagaggaaggaagaagggaaagagccaaaagacaaaaagaggtcagagaatccaagtgttagaggagaacaaaaattcagtattatacagatctaaaactcgcaagtgaaagattgtttacaaacttcctgaatattatcaatgcagaacagctgtggagactctaacctgaagatctataccaaacgtcgtctgcttaccacgtaacacagctgcatcttgagcagtgacctgccaagggcaaaggaccccgctccctagacttacagattttctaatgcttgggcaggtggttactgcatgttccacatcagtcaatgcaacttaggacaaaactaaccagatacagaaacagaagagaggctgccgggaccagcatatttccgttgcagccaaatggattttattttttcattttattgattctcagaagcagaaagcatcactttaaaagttcgtttgttcatgcaaactatatttgcattcttacattagttaagctaagcagcaaaaagaaaacacacacacacactcacatttagcccatgtcatttaattgtcagtttctttgacataaagcgcatcttctccacatgggcttcacgtggtttggagatgggtgggggaaaacaatcaggtttcttcaggctgaggaggacttgctcaggccgattccaaacattgtgctcgttcaatgcgtagaaatgatttgcatgatggcatgccgtgatcagaagtcatgcatgagatccatacaccacaggacactactaatctagtcccttgcactgggtcagcctttggacaggacccagccctgcaccgttcactgtatttggagaaaatggtaagagttccataccggctacaattctttgagttcttaaaagtccttcatacaccttctgggtagggaaacaaccaactaattgactaacaccaccaacaacaaaaaacaaacccaatccaacaagcagatggatccgttgcgtgtatatgtttaacagacatctctaacatacagccattgttgcacattttgcaagatgaactatttaatgctgctctgtgtccagtacatgggggagactttgatcccaaatggcttgtactatttatgtcactgtaaaaccaaatcctagggctaaaaaaaaaa

SEQ ID NO: 1576 - DNA, 3233 bp, Homo sapiens
cagcagccagctccccagcaccgcacggcggggacgcgagcgcgcccccgacggcagcccggacgccgagcacgggtcacctgcggcgccggcccgggcgccgaccgaggttcaacgcacggcccggggacccccaggcggggccaacgccgccgtcgcccccggcctcgcggggagcaggaagagccaacatgctggccccgcgcggagccgccgtcctcctgctgcacctggtcctgcagcggtggctagcggcaggcgcccaggccaccccccaggtctttgaccttctcccatcttccagtcagaggctaaacccaggcgctctgctgccagtcctgacagaccccgccctgaatgatctctatgtgatttccaccttcaagctgcagactaaaagttcagccaccatcttcggtctttactcttcaactgacaacagtaaatattttgaatttactgtgatgggacgcttaaacaaagccatcctccgttacctgaagaacgatgggaaggtgcatttggtggttttcaacaacctgcagctggcagacggaaggcggcacaggatcctcctgaggctgagcaatttgcagcgaggggccggctccctagagctctacctggactgcatccaggtggattccgttcacaatctccccagggcctttgctggcccctcccagaaacctgagaccattgaattgaggactttccagaggaagccacaggacttcttggaagagctgaagctggtggtgagaggctcactgttccaggtggccagcctgcaagactgcttcctgcagcagagtgagccactggctgccacaggcacaggggactttaaccggcagttcttgggtcaaatgacacaattaaaccaactcctgggagaggtgaaggaccttctgagacagcaggttaaggaaacatcatttttgcgaaacaccatagctgaatgccaggcttgcggtcctctcaagtttcagtctccgaccccaagcacggtggtgcccccggctccccctgcaccgccaacacgcccacctcgtcggtgtgactccaacccatgtttccgaggtgtccaatgtaccgacagtagagatggcttccagtgtgggccctgccccgagggctacacaggaaacgggatcacctgtattgatgttgatgagtgcaaataccatccctgctacccgggcgtgcactgcataaatttgtctcctggcttcagatgtgacgcctgcccagtgggcttcacagggcccatggtgcagggtgttgggatcagttttgccaagtcaaacaagcaggtctgcactgacattgatgagtgtcgaaatggagcgtgcgttcccaactcgatctgcgttaatactttgggatcttaccgctgtgggccttgtaagccggggtatactggtgatcagataaggggatgcaaagcggaaagaaactgcagaaacccagagctgaacccttgcagtgtgaatgcccagtgcattgaagagaggcagggggatgtgacatgtgtgtgtggagtcggttgggctggagatggctatatctgtggaaaggatgtggacatcgacagttaccccgacgaagaactgccatgctctgccaggaactgtaaaaaggacaactgcaaatatgtgccaaattctggccaagaagatgcagacagagatggcattggcgacgcttgtgacgaggatgctgacggagatgggatcctgaatgagcaggataactgtgtcctgattcataatgtggaccaaaggaacagcgataaagatatctttggggatgcctgtgataactgcctgagtgtcttaaataacgaccagaaagacaccgatggggatggaagaggagatgcctgtgatgatgacatggatggagatggaataaaaaacattctggacaactgcccaaaatttcccaatcgtgaccaacgggacaaggatggtgatggtgtgggggatgcctgtgacagttgtcctgatgtcagcaaccctaaccagtctgatgtggataatgatctggttggggactcctgtgacaccaatcaggacagtgatggagatgggcaccaggacagcacagacaactgccccaccgtcattaacagtgcccagctggacaccgataaggatggaattggtgacgagtgtgatgatgatgatgacaatgatggtatcccagacctggtgccccctggaccagacaactgccggctggtccccaacccagcccaggaggatagcaacagcgacggagtgggagacatctgtgagtctgactttgaccaggaccaggtcatcgatcggatcgacgtctgcccagagaacgcagaggtcaccctgaccgacttcagggcttaccagaccgtggtcctggatcctgaaggggatgcccagatcgatcccaactgggtggtcctgaaccagggcatggagattgtacagaccatgaacagtgatcctggcctggcagtggggtacacagcttttaatggagttgacttcgaagggaccttccatgtgaatacccagacagatgatgactatgcaggctttatctttggctaccaagatagctccagcttctacgtggtcatgtggaagcagacggagcagacatattggcaagccaccccattccgagcagttgcagaacctggcattcagctcaaggctgtgaagtctaagacaggtccaggggagcatctccggaactccctgtggcacacgggggacaccagtgaccaggtcaggctgctgtggaaggactccaggaatgtgggctggaaggacaaggtgtcctaccgctggttcctacagcacaggccccaggtgggctacatcagggtacgattttatgaaggctctgagttggtggctgactctggcgtcaccatagacaccacaatgcgtggaggccgacttggcgttttctgcttctctcaagaaaacatcatctggtccaacctcaagtatcgctgcaatgacaccatccctgaggacttccaagagtttcaaacccagaatttcgaccgcttcgataattaaaccaaggaagcaatctgtaactgcttttcggaacactaaaaccatatatattttaacttcaattttctttagcttttaccaacccaaatatatcaaaacgttttatgtgaatgtggcaataaaggagaagagatcatttttaaaaaaaaaaaaaaa

SEQ ID NO: 1577 - DNA, 4184 bp, Homo sapiens
atttaagggcccgcctctcctggctcacagctgcttgctgctccagccttgccctcccagagctgccggacgctcgcgggtctcggaacgcatcccgccgcgggggcttcggccgtggcatgggcgccgcgggcctgctcggggttttcttggctctcgtcgcaccgggggtcctcgggatttcttgtggctctcctccgcctatcctaaatggccggattagttattattctacccccattgctgttggtaccgtgataaggtacagttgttcaggtaccttccgcctcattggagaaaaaagtctattatgcataactaaagacaaagtggatggaacctgggataaacctgctcctaaatgtgaatatttcaataaatattcttcttgccctgagcccatagtaccaggaggatacaaaattagaggctctacaccctacagacatggtgattctgtgacatttgcctgtaaaaccaacttctccatgaacggaaacaagtctgtttggtgtcaagcaaataatatgtgggggccgacacgactaccaacctgtgtaagtgttttccctctcgagtgtccagcacttcctatgatccacaatggacatcacacaagtgagaatgttggctccattgctccaggattgtctgtgacttacagctgtgaatctggttacttgcttgttggagaaaagatcattaactgtttgtcttcgggaaaatggagtgctgtcccccccacatgtgaagaggcacgctgtaaatctctaggacgatttcccaatgggaaggtaaaggagcctccaattctccgggttggtgtaactgcaaactttttctgtgatgaagggtatcgactgcaaggcccaccttctagtcggtgtgtaattgctggacagggagttgcttggaccaaaatgccagtatgtgaagaaattttttgcccatcacctccccctattctcaatggaagacatataggcaactcactagcaaatgtctcatatggaagcatagtcacttacacttgtgacccggacccagaggaaggagtgaacttcatccttattggagagagcactctccgttgtacagttgatagtcagaagactgggacctggagtggccctgccccacgctgtgaactttctacttctgcggttcagtgtccacatccccagatcctaagaggccgaatggtatctgggcagaaagatcgatatacctataacgacactgtgatatttgcttgcatgtttggcttcaccttgaagggcagcaagcaaatccgatgcaatgcccaaggcacatgggagccatctgcaccagtctgtgaaaaggaatgccaggcccctcctaacatcctcaatgggcaaaaggaagatagacacatggtccgctttgaccctggaacatctataaaatatagctgtaaccctggctatgtgctggtgggagaagaatccatacagtgtacctctgagggggtgtggacaccccctgtaccccaatgcaaagtggcagcgtgtgaagctacaggaaggcaactcttgacaaaaccccagcaccaatttgttagaccagatgtcaactcttcttgtggtgaagggtacaagttaagtgggagtgtttatcaggagtgtcaaggcacaattccttggtttatggagattcgtctttgtaaagaaatcacctgcccaccaccccctgttatctacaatggggcacacaccgggagttccttagaagattttccatatggaaccacggtcacttacacatgtaaccctgggccagaaagaggagtggaattcagcctcattggagagagcaccatccgttgtacaagcaatgatcaagaaagaggcacctggagtggccctgctcccctgtgtaaactttccctccttgctgtccagtgctcacatgtccatattgcaaatggatacaagatatctggcaaggaagccccatatttctacaatgacactgtgacattcaagtgttatagtggatttactttgaagggcagtagtcagattcgttgcaaagctgataacacctgggatcctgaaataccagtttgtgaaaaaggctgccagtcacctcctgggctccaccatggtcgtcatacaggtggaaatacggtcttctttgtctctgggatgactgtagactacacttgtgaccctggctatttgcttgtgggaaacaaatccattcactgtatgccttcaggaaattggagtccttctgccccacggtgtgaagaaacatgccagcatgtgagacagagtcttcaagaacttccagctggttcacgtgtggagctagttaatacgtcctgccaagatgggtaccagttgactggacatgcttatcagatgtgtcaagatgctgaaaatggaatttggttcaaaaagattccactttgtaaagttattcactgtcaccctccaccagtgattgtcaatgggaagcacacaggcatgatggcagaaaactttctatatggaaatgaagtctcttatgaatgtgaccaaggattctatctcctgggagagaaaaaattgcagtgcagaagtgattctaaaggacatggatcttggagcgggccttccccacagtgcttacgatctcctcctgtgactcgctgccctaatccagaagtcaaacatgggtacaagctcaataaaacacattctgcatattcccacaatgacatagtgtatgttgactgcaatcctggcttcatcatgaatggtagtcgcgtgattaggtgtcatactgataacacatgggtgccaggtgtgccaacttgtatcaaaaaagccttcatagggtgtccacctccgcctaagacccctaacgggaaccatactggtggaaacatagctcgattttctcctggaatgtcaatcctgtacagctgtgaccaaggctacctgctggtgggagaggcactccttctttgcacacatgagggaacctggagccaacctgcccctcattgtaaagaggtaaactgtagctcaccagcagatatggatggaatccagaaagggctggaaccaaggaaaatgtatcagtatggagctgttgtaactctggagtgtgaagatgggtatatgctggaaggcagtccccagagccagtgccaatcggatcaccaatggaaccctcccctggcggtttgcagatcccgttcacttgctcctgtcctttgtggtattgctgcaggtttgatacttcttaccttcttgattgtcattaccttatacgtgatatcaaaacacagagcacgcaattattatacagatacaagccagaaagaagcttttcatttagaagcacgagaagtatattctgttgatccatacaacccagccagctgatcagaagacaaactggtgtgtgcctcattgcttggaattcagcggaatattgattagaaagaaactgctctaatatcagcaagtctctttatatggcctcaagatcaatgaaatgatgtcataagcgatcacttcctatatgcacttattctcaagaagaacatctttatggtaaagatgggagcccagtttcactgccatatactcttcaaggactttctgaagcctcacttatgagatgcctgaagccaggccatggctataaacaattacatggctctaaaaagttttgccctttttaaggaaggcactaaaaagagctgtcctggtatctagacccatcttctttttgaaatcagcatactcaatgttactatctgcttttggttataatgtgtttttaattatctaaagtatgaagcattttctggggttatgatggctttacctttattaggaagtatggttttattttgatagtagcttcctcctctggtggtgttaatcatttcatttttacccttacttggtttgagtttctctcacattactgtatatactttgcctttccataatcactcagtgattgcaatttgcacaagtttttttaaattatgggaatcaagatttaatcctagagatttggtgtacaattcaggctttggatgtttctttagcagttttgtgataagttctagttgcttgtaaaatttcacttaataatgtgtacattagtcattcaataaattgtaattgtaaagaaaacatacaaaaaaaaaaaaaaaa

SEQ ID NO: 1578 - DNA, 1542 bp, Homo sapiens
acaattactctacagctcagaacaccaactgctgaggctgccttgggaagaggatgatcctaaacaaagctctgctgctgggggccctcgctctgaccaccgtgatgagcccctgtggaggtgaagacattgtggctgaccacgttgcctcttgtggtgtaaacttgtaccagttttacggtccctctggccagtacacccatgaatttgatggagatgagcagttctacgtggacctggagaggaaggagactgcctggcggtggcctgagttcagcaaatttggaggttttgacccgcagggtgcactgagaaacatggctgtggcaaaacacaacttgaacatcatgattaaacgctacaactctaccgctgctaccaatgaggttcctgaggtcacagtgttttccaagtctcccgtgacactgggtcagcccaacaccctcatttgtcttgtggacaacatctttcctcctgtggtcaacatcacatggctgagcaatgggcagtcagtcacagaaggtgtttctgagaccagcttcctctccaagagtgatcattccttcttcaagatcagttacctcaccttcctcccttctgctgatgagatttatgactgcaaggtggagcactggggcctggaccagcctcttctgaaacactgggagcctgagattccagcccctatgtcagagctcacagagactgtggtctgtgccctggggttgtctgtgggcctcatgggcattgtggtgggcactgtcttcatcatccaaggcctgcgttcagttggtgcttccagacaccaagggccattgtgaatcccatcctggaagggaaggtgcatcgccatctacaggagcagaagaatggacttgctaaatgacctagcactattctctggcccgatttatcatatcccttttctcctccaaatatttctcctctcaccttttctctgggacttaagctgctatatcccctcagagctcacaaatgcctttacattctttccctgacctcctgattttttttttcttttctcaaatgttacctacaaagacatgcctggggtaagccacccggctacctaattcctcagtaacctccatctaaaatctccaaggaagcaataaattccttttatgagatctatgtcaaatttttccatctttcatccagggctgactgaaactatggctaataattggggtactcttatgtttcaatccaatttaacctcatttcccagatcatttttcatgtccagtaacacagaagccaccaagtacagtatagcctgataatatgttgatttcttagctgacattaatatttcttgcttccttgtgttcccacccttggcactgccacccacccctcaattcaggcaacaatgaaattaatggataccgtctgcccttggcccagaattgttatagcaaaaattttagaaccaaaaaataagtctgtactaatttcaatgtggcttttaaaagtatgacagagaaataagttaggataaaggaaatttgaatctca

SEQ ID NO: 1579 - DNA, 1312 bp, Homo sapiens; identical to SEQ ID NO: 813

SEQ ID NO: 1580 - DNA, 3280 bp, Homo sapiens
gtcgggggccgaagcgcctcccgcagggagtccccgtgaggccgcgctgccgcgttacccgcagcggccgggggtccggggagtgcggggctccgagacagagccaggcgccccccagcggtcggcgcgggccccatggctgggccgggcggagcggaaccggtgaggtgaagccccggggccggcagccggaggcgcgtggccggggcgccggctccatgggcagcggcacacggcggcgcgatgatggacgttaacagcagcggccgcccggacctctacgggcacctccgctctttccttctgccagaagtggggcgcgggctgcccgacttgagccccgacggtggcgccgacccggtcgcgggctcctgggcgccgcacctgctgagcgaggtgacagccagcccggcgcccacctgggacgcgcccccggacaatgcctccggctgtggggaacagatcaactacggcagagtcgagaaagttgtgatcggctccatcctgacgctcatcacgctgctgacgatcgcgggcaactgcctggtggtgatctccgtgtgcttcgtcaagaagctccgccagccctccaactacctgatcgtgtccctggcgctggccgacctctcggtggctgtggcggtcatgcccttcgtcagcgtcaccgacctcatcgggggcaagtggatctttggacactttttctgtaatgtcttcatcgccatggacgtcatgtgctgcacggcctcgatcatgaccctgtgcgtgatcagcattgacaggtaccttgggatcacaaggcccctcacataccctgtgaggcagaatgggaaatgcatggcgaagatgattctctccgtctggcttctctccgcctccatcaccttacctccactctttggatgggctcagaatgtaaatgatgataaggtgtgcttgatcagccaggactttggctatacgatttactctaccgcagtggcattttatatccccatgtccgtcatgcttttcatgtactaccagatttacaaggctgccaggaagagtgctgccaaacacaagtttcctggcttccctcgagtggagccagacagcgtcatcgccctgaatggcatagtgaagctccagaaggaggtggaagagtgtgcaaacctttcgagactcctcaagcatgaaaggaaaaacatctccatctttaagcgagaacagaaagcagccaccaccctggggatcatcgtcggggcctttaccgtgtgctggctgccatttttcctcctctcgacagccagacccttcatctgtggcacttcctgcagctgcatcccactgtgggtggagaggacatttctgtggctaggctatgcaaactctctcattaacccttttatatatgccttcttcaaccgggacctgaggaccacctatcgcagcctgctccagtgccagtaccggaatatcaaccggaagctctcagctgcaggcatgcatgaagccctgaagcttgctgagaggccagagagacctgagtttgtgctacaaaatgctgactactgtagaaaaaaaggtcatgattcatgattgaaagcagaacaatggagatgaaataaacaaggcaaaatagaggtggaaacagaaggaagtcatttgctgagtctgcagaatggaatgcagcttctgtcctttcttgggatgtctaaaacatgacaaacagggtgatctgttgtacacactatcttatgagggagatggtgacttctccttttttctgtggatcagtgctattgtgtgttctcagtttaagatagcagatcatctcagcagtaagcacaccaacagaactgagttccagaaaggaagcagtttctggtgctttgcatatgtccaaatccatgcaagtgggagaaagttccagtgcacacttcccatgcttctgagtctaggcgttgtggtgaatatgcaggaatcattcatgagacagaatgtattttgttgtatgacagaaggcttttccaagcaaactgcggtgagcgtagtgttgaatatgttgcatgtccatgttagaaaacagaatccagtcatcagctaatacaaatgatttcccagagcagtgtttgtttcaagcttctgtcaaatagtttggcttttctgcagggtctctgtgatttccccacctatgtacttttctgtgttaactcacttattatggtataactcaggaacaggtctcaggatggagagaagcatacaacatgagcaaagctttttctcgtgctctgaagggtcttgagaggggagtgggatgccttctgtgaggatttttatcgcagtgaagctcaagtggtacccaactgcgttgtaattaacatgattattggcatgtttttgactctcattttctacaaggctgcagtgggcccacccatgggctggcccataactgtatgttatgtggaagaagtgtgggaatgatgggttttccatgaaatgtgatgcttctggagatggggcataaacatgttcattcttgttgagctgcattgtgttaaaccaaattgtgtgaagcgaggtcacctggaccactcttgggaaatgcttcagaacaccagtctgttccttctagagaatttgtttttgtgttctatgtatcttaaatcaaatgtgtgcctaagcaattctgtcctctgattcccacccctacccaccaaaaaatggtagacatgaaaggcaggtgaggaaacagaaaaggtctctttgcagatatatattttttaaatggcactatgtagtaattaagagctaaggagacagaaagacagtagatgagaatagaagagtacctgtacctacaaggggaaaaatgaatgcaattctttatttgataagagtgaactgaaagagaatattattttcctacaataaagcaagctgtcctctcacaggataaagtggaattctgacatggattatggacttcttctaactcccattgacattgcttcttaccagacatggggaaaagctacctttcctgaaaggggaggagggcactgtcctttcagacaaagcttgtacaaattcctgaaccgcaaatttgctgaagtgaccgtatatattatattcataatttaaatgattatttatggtcagatacatattgttaaacttgaaaatgttttattacattacatcaaataaagtttatttgtagctgaaataaagcaacgtaagtaacaatttttaattaaaaaaaaaaaaaaaaaaaaaaaaaaaaaaaaaa

SEQ ID NO: 1581 - DNA, 3687 bp, Homo sapiens
tccaccattttgctagagaaggccgcggaggctcagagaggtgcgcacacttgccctgagtcacacagcgaatgccctccgcggtcccaacgcagagagaacgagccgatcggcagcctgagcgaggcagtggttagggggggccccggccccggccactcccctcaccccctccccgcagagcgccgcccaggacaggctgggccccaggccccgccccgaggtcctgcccacacacccctgacacaccggcgtcgccagccaatggccggggtcctataaacgctacggtccgcgcgctctctggcaagaggcaagaggtagcaacagcgagcgtgccggtcgctagtcgcgggtccccgagtgagcacgccagggagcaggagaccaaacgacgggggtcggagtcagagtcgcagtgggagtccccggaccggagcacgagcctgagcgggagagcgccgctcgcacgcccgtcgccacccgcgtacccggcgcagccagagccaccagcgcagcgctgccatggagcccagcagcaagaagctgacgggtcgcctcatgctggccgtgggaggagcagtgcttggctccctgcagtttggctacaacactggagtcatcaatgccccccagaaggtgatcgaggagttctacaaccagacatgggtccaccgctatggggagagcatcctgcccaccacgctcaccacgctctggtccctctcagtggccatcttttctgttgggggcatgattggctccttctctgtgggccttttcgttaaccgctttggccggcggaattcaatgctgatgatgaacctgctggccttcgtgtccgccgtgctcatgggcttctcgaaactgggcaagtcctttgagatgctgatcctgggccgcttcatcatcggtgtgtactgcggcctgaccacaggcttcgtgcccatgtatgtgggtgaagtgtcacccacagcccttcgtggggccctgggcaccctgcaccagctgggcatcgtcgtcggcatcctcatcgcccaggtgttcggcctggactccatcatgggcaacaaggacctgtggcccctgctgctgagcatcatcttcatcccggccctgctgcagtgcatcgtgctgcccttctgccccgagagtccccgcttcctgctcatcaaccgcaacgaggagaaccgggccaagagtgtgctaaagaagctgcgcgggacagctgacgtgacccatgacctgcaggagatgaaggaagagagtcggcagatgatgcgggagaagaaggtcaccatcctggagctgttccgctcccccgcctaccgccagcccatcctcatcgctgtggtgctgcagctgtcccagcagctgtctggcatcaacgctgtcttctattactccacgagcatcttcgagaaggcgggggtgcagcagcctgtgtatgccaccattggctccggtatcgtcaacacggccttcactgtcgtgtcgctgtttgtggtggagcgagcaggccggcggaccctgcacctcataggcctcgctggcatggcgggttgtgccatactcatgaccatcgcgctagcactgctggagcagctaccctggatgtcctatctgagcatcgtggccatctttggctttgtggccttctttgaagtgggtcctggccccatcccatggttcatcgtggctgaactcttcagccagggtccacgtccagctgccattgccgttgcaggcttctccaactggacctcaaatttcattgtgggcatgtgcttccagtatgtggagcaactgtgtggtccctacgtcttcatcatcttcactgtgctcctggttctgttcttcatcttcacctacttcaaagttcctgagactaaaggccggaccttcgatgagatcgcttccggcttccggcaggggggagccagccaaagtgacaagacacccgaggagctgttccatcccctgggggctgattcccaagtgtgagtcgccccagatcaccagcccggcctgctcccagcagccctaaggatctctcaggagcacaggcagctggatgagacttccaaacctgacagatgtcagccgagccgggcctggggctcctttctccagccagcaatgatgtccagaagaatattcaggacttaacggctccaggattttaacaaaagcaagactgttgctcaaatctattcagacaagcaacaggttttataatttttttattactgattttgttatttttatatcagcctgagtctcctgtgcccacatcccaggcttcaccctgaatggttccatgcctgagggtggagactaagccctgtcgagacacttgccttcttcacccagctaatctgtagggctggacctatgtcctaaggacacactaatcgaactatgaactacaaagcttctatcccaggaggtggctatggccacccgttctgctggcctggatctccccactctaggggtcaggctccattaggatttgccccttcccatctcttcctacccaaccactcaaattaatctttctttacctgagaccagttgggagcactggagtgcagggaggagaggggaagggccagtctgggctgccgggttctagtctcctttgcactgagggccacactattaccatgagaagagggcctgtgggagcctgcaaactcactgctcaagaagacatggagactcctgccctgttgtgtatagatgcaagatatttatatatatttttggttgtcaatattaaatacagacactaagttatagtatatctggacaagccaacttgtaaatacaccacctcactcctgttacttacctaaacagatataaatggctggtttttagaaacatggttttgaaatgcttgtggattgagggtaggaggtttggatgggagtgagacagaagtaagtggggttgcaaccactgcaacggcttagacttcgactcaggatccagtcccttacacgtacctctcatcagtgtcctcttgctcaaaaatctgtttgatccctgttacccagagaatatatacattctttatcttgacattcaaggcatttctatcacatatttgatagttggtgttcaaaaaaacactagttttgtgccagccgtgatgctcaggcttgaaatgcattattttgaatgtgaagtaaatactgtacctttattggacaggctcaaagaggttatgtgcctgaagtcgcacagtgaataagctaaaacacctgcttttaacaatggtaccatacaaccactactccattaactccacccacctcctgcacccctccccacacacacaaaatgaaccacgttctttgtatgggcccaatgagctgtcaagctgccctgtgttcatttcatttggaattgccccctctggttcctctgtatactactgcttcatctctaaagacagctcatcctcctccttcacccctgaatttccagagcacttcatctgctccttcatcacaagtccagttttctgccactagtctgaatttcatgagaagatgccgatttggttcctgtgggtcctcagcactattcagtacagtgcttgatgcacagcaggcactcagaaaatactggaggaaataaaacaccaaagatatttgtcaaaaaaaaaaaaaaaaa

SEQ ID NO: 1582 - DNA, 1312 bp, Homo sapiens; identical to SEQ ID NO: 813

SEQ ID NO: 1583 - DNA, 2344 bp, Homo sapiens
cgcgggccaccccgctctcctcgccgccgcggcggcaggcgcggggccgcgccgcgaggcctgatccctgcagcgcgggcaggcggcgtcgcagagcggagctagctggatgcgtccggactcctgcaggtgagagtgattttccagtgattgctttggcctgtacaaccagagaacaggattcttcccttctttttggccaccaaatgcctatgtgcaccacacattccagtgtgctgagaagggcagagcttcttggatgatgatggacgtcccaccgggcaggatgaaggcagagcgtgtggcatctccacctcaagggtgcagcctgatcttcctcttctcccttgccagccagcactctgccttctgtatccaccatggtgtttggtgagtttttccatcgccctggacaagacgaggaacttgtcaacctgaatgtggggggctttaagcagtctgttgaccaaagcaccctcctgcggtttcctcacaccagactggggaagctgcttacttgccattctgaagaggccattctggagctgtgtgatgattacagtgtggccgataaggaatactactttgatcggaatccctccttgttcagatatgttttgaatttttattacacggggaagctgcatgtcatggaggagctgtgcgtattctcattctgccaggagatcgagtactggggcatcaacgagctcttcattgattcttgctgcagcaatcgctaccaggaacgcaaggaggaaaaccacgagaaggactgggaccagaaaagccatgatgtgagtaccgactcctcgtttgaagagtcgtctctgtttgagaaagagctggagaagtttgacacactgcgatttggtcagctccggaagaaaatctggattagaatggagaatccagcgtactgcctgtccgctaagcttatcgctatctcctccttgagcgtggtgctggcctccatcgtggccatgtgcgttcacagcatgtcggagttccagaatgaggatggagaagtggatgatccggtgctggaaggagtggagatcgcgtgcattgcctggttcaccggggagcttgccgtccggctggctgccgctccttgtcaaaagaaattctggaaaaaccctctgaacatcattgactttgtctctattattcccttctatgccacgttggctgtagacaccaaggaggaagagagtgaggatattgagaacatgggcaaggtggtccagatcctacggcttatgaggattttccgaattctaaagcttgcccggcactcggtaggacttcggtctctaggtgccacactgagacacagctaccatgaagttgggcttctgcttctcttcctctctgtgggcatttccattttctctgtgcttatctactccgtggagaaagatgaccacacatccagcctcaccagcatccccatctgctggtggtgggccaccatcagcatgacaactgtgggctatggagacacccacccggtcaccttggcgggaaagctcatcgccagcacatgcatcatctgtggcatcttggtggtggcccttcccatcaccatcatcttcaacaagttttccaagtactaccagaagcaaaaggacattgatgtggaccagtgcagtgaggatgcaccagagaagtgtcatgagctaccttactttaacattagggatatatatgcacagcggatgcacaccttcattaccagtctctcttctgtaggcattgtggtgagcgatcctgactccacagatgcttcaagcattgaagacaatgaggacatttgtaacaccacctccttggagaattgcacagcaaaatgagcgggggtgtttgtgcctgtttctcttatcctttcccgacattaggttaacacagctttataaacctcagtgggttcgttaaaatcatttaattctcagggtgtacctttcagccatagttggacattcattgctgaattctgaaatgatagaattgtctttatttttctctgtgaggtcaattaaatgccttgttctgaaatttattttttacaagagagagttgtgatatagtttggaatataagataaatggtattgggtggggtttgtggctacagcttatgcatcattctgtgtttgtcatttactcacattgagctaactttaaattactgacaagtagaatcaaaggtgcagctgactgagacgacatgcatgtaagatccacaaaatgagacaatgcatgtaaatccatgctcatgttctaaacatggaaactaggagcctaataaacttcctaattcagtatggaaaaaaaaaaaaaaa

SEQ ID NO: 1584 - DNA, 2289 bp, Homo sapiens
ataaggggcgcttggcgcgcaacgaccccaagccgcagctttgaagcctgagcggccgaactcggcagctccaacccaactcggcttaactccgcctcaccgagcccagtccaagactctgtgctccctaggtttgcaacagctctctgatcatcttcttcaattcctgctaggatgccgtggcaagcatttcgcagatttggtcaaaagctggtacgcagacgtacactggagtcaggcatggctgagactcgccttgccagatgcctaagcaccctggatttagtggccctgggtgtgggcagcacattgggtgcaggcgtgtatgtcctagctggcgaggtggccaaagataaagcagggccatccattgtgatctgctttttggtggctgccctgtcttctgtgttggctgggctgtgctatgcggagtttggtgcccgggttccccgttctggttcggcatatctctacagctatgtcactgtgggtgaactctgggccttcaccactggctggaacctcatcctctcctatgtcattggtacagccagtgtggcccgggcctggagctctgcttttgacaacctgattgggaaccacatctctaagactctgcaggggtccattgcactgcacgtgccccatgtccttgcagaatatccagatttctttgctttgggcctcgtgttgctgctcactggattgttggctctcggggctagtgagtcggccctggttaccaaagtgttcacaggcgtgaaccttttggttcttgggttcgtcatgatctctggcttcgttaagggggacgtgcacaactggaagctcacagaagaggactacgaattggccatggctgaactcaatgacacctatagcttgggtcctctgggctctggaggatttgtgcctttcggcttcgagggaattctccgtggagcagcgacctgtttctatgcatttgttggtttcgactgtattgctaccactggagaagaagcccagaatccccagcgttccatcccgatgggcattgtgatctcactgtctgtctgctttttggcgtattttgctgtctcttctgcactcaccctgatgatgccttactaccagcttcagcctgagagccctttgcctgaggcatttctctacattggatgggctcctgcccgctatgttgtggctgttggctccctctgtgctctttctaccagcctcctgggctccatgttccccatgcctcgggtgatctacgcgatggcagaggatggcctcctgttccgtgtacttgctcggatccacaccggcacacgcaccccaatcatagccaccgtggtctctggcattattgcagcattcatggcattcctcttcaaactcactgatcttgtggacctcatgtcaattgggaccctgcttgcttactccctggtgtcgatttgtgttctcatcctcaggtatcaacctgatcaggagacaaagactggggaagaagtggagttgcaggaggaggcaataactactgaatcagagaagttgaccctatggggactatttttcccactcaactccatccccactccactctctggccaaattgtctatgtttgttcctcattgcttgctgtcctgctgactgctctttgcctggtgctggcccagtggtcagttccattgctttctggagacctgctgtggactgcagtggttgtgctgctcctgctgctcattattgggatcattgtggtcatctggagacagccacagagttccactccccttcactttaaggtgcctgctttgcctctcctcccactaatgagcatctttgtgaatatttaccttatgatgcagatgacagctggtacctgggcccgatttggggtctggatgctgattggctttgctatctacttcggctatgggatccagcacagcctggaagagattaagagtaaccaaccctcacgcaagtctagagccaaaactgtagaccttgatcccggcactctctatgtccactcagtttgacatcgtcacacctaaatgctgtctggtcccctgcacaataatggagagtactcctgaccccagtgacagctagccctcccctgtgatggtggtggtggatactaatacagttctgtacgatgtgaaggatgtgtctttgctatttcttgtctattttaacccgtctgcttctaaatgatgtctagctgcttaccaactttaaaaaatgatattaaaagaaagtagaaaaataaaaaaaaaaaaaaaaaaaaaaaa

SEQ ID NO: 1585 - DNA, 805 bp, Homo sapiens
atgatgatcctgcaggtttcagcgggcccccggacagtggctctgacagcattactgatggtgcggctcatatctgtggtccagagcaggaccactccagagaattccgtctaccaggaacggcaggaatgctatgcgttcaatgggactcagcgcgttgtggacgggctcatctacaaccgggaggaatacgtgcattttgacagcgcagtgggggagttcctagcagtgatggagctggggcggcccataggcgagtacttcaatagccagaaggactttatggaacggaagcgagccgaggtggacaaggtgtgcagacacaagtacgagctgatggagccactcatccggcagcgccgagtccagcctagggtgaacatctcccctccaagaaggagccccagcagcaccacgacctgcttgtctaccacgtgacagatttctacccagacagcattcaagtccgatgcttcctgaatggacaggaggaaacagctggggtcgtgtccaccaacctgatccgtaatggagactggaccttccagatcctggagatgctggaaatgaccccccagcagggaaacatctacacctgccaagtggagcaccccagcctggacagtcctgtcaccgtggagtggaaggcacagtctgattctgtgcagagcaagatgctgacaggagctaggggcttcatgctggggctcatcatctgtggagtggacatcttcacgcacagaaggaggaagaaagttcaacaaggacctgcataaacaggcaatattcctgctttgatttcctt

SEQ ID NO: 1586 - DNA, 9805 bp, Homo sapiens
gcggcggcggctgcggcggtggggccgggcgaggtccgctgcggtcccggcggctccgtggctgctccgctctgagcgcctggcgcgccccgcgccctccctgccggggccgctgggccggggatgcacgcggggcccgggagccatggtccgcttcggggacgagctgggcggccgctatgggggccccggcggcggagagcgggcccggggcggcggggccggcggggcggggggcccgggtcccggggggctgcagcccggccagcgggtcctctacaagcaatcgatcgcgcagcgcgcgcggaccatggcgctgtacaaccccatcccggtcaagcagaactgcttcaccgtcaaccgctcgctcttcgtcttcagcgaggacaacgtcgtccgcaaatacgcgaagcgcatcaccgagtggcctccattcgagtatatgatcctggccaccatcatcgccaactgcatcgtgctggccctggagcagcacctccctgatggggacaaaacgcccatgtccgagcggctggacgacacggagccctatttcatcgggatcttttgcttcgaggcagggatcaaaatcatcgctctgggctttgtcttccacaagggctcttacctgcggaacggctggaacgtcatggacttcgtggtcgtcctcacagggatccttgccacggctggaactgacttcgacctgcgaacactgagggctgtgcgtgtgctgaggcccctgaagctggtgtctgggattccaagtttgcaggtggtgctcaagtccatcatgaaggccatggttccactcctgcagattgggctgcttctcttctttgccatcctcatgtttgccatcattggcctggagttctacatgggcaagttccacaaggcctgtttccccaacagcacagatgcggagcccgtgggtgacttcccctgtggcaaggaggccccagcccggctgtgcgagggcgacactgagtgccgggagtactggccaggacccaactttggcatcaccaactttgacaatatcctgtttgccatcttgacggtgttccagtgcatcaccatggagggctggactgacatcctctataatacaaacgatgcggccggcaacacctggaactggctctacttcatccctctcatcatcatcggctccttcttcatgctcaacctggtgctgggcgtgctctcgggggagtttgccaaggagcgagagagggtggagaaccgccgcgccttcctgaagctgcgccggcagcagcagatcgagcgagagctcaacgggtacctggagtggatcttcaaggcggaggaagtcatgctggccgaggaggacaggaatgcagaggagaagtcccctttggacgtgctgaagagagcggccaccaagaagagcagaaatgacctgatccacgcagaggagggagaggaccggtttgcagatctctgtgctgttggatcccccttcgcccgcgccagcctcaagagcgggaagacagagagctcgtcatacttccggaggaaggagaagatgttccggttttttatccggcgcatggtgaaggctcagagcttctactgggtggtgctgtgcgtggtggccctgaacacactgtgtgtggccatggtgcattacaaccagccgcggcggcttaccacgaccctgtattttgcagagtttgttttcctgggtctcttcctcacagagatgtccctgaagatgtatggcctggggcccagaagctacttccggtcctccttcaactgcttcgactttggggtcatcgtggggagcgtctttgaagtggtctgggcggccatcaagccgggaagctcctttgggatcagtgtgctgcgggccctccgcctgctgaggatcttcaaagtcacgaagtactggagctccctgcggaacctggtggtgtccctgctgaactccatgaagtccatcatcagcctgctcttcttgctcttcctgttcattgtggtcttcgccctgctggggatgcagctgtttgggggacagttcaacttccaggatgagactcccacaaccaacttcgacaccttccctgccgccatcctcactgtcttccagatcctgacgggagaggactggaatgcagtgatgtatcacgggatcgaatcgcaaggcggcgtcagcaaaggcatgttctcgtccttttacttcattgtcctgacactgttcggaaactacactctgctgaatgtctttctggccatcgctgtggacaacctggccaacgcccaagagctgaccaaggatgaagaggagatggaagaagcagccaatcagaagcttgctctgcaaaaggccaaagaagtggctgaagtcagccccatgtctgccgcgaacatctccatcgccgccaggcagcagaactcggccaaggcgcgctcggtgtgggagcagcgggccagccagctacggctgcagaacctgcgggccagctgcgaggcgctgtacagcgagatggaccccgaggagcggctgcgcttcgccactacgcgccacctgcggcccgacatgaagacgcacctggaccggccgctggtggtggagctgggccgcgacggcgcgcgggggcccgtgggaggcaaagcccgacctgaggctgcggaggcccccgagggcgtcgaccctccgcgcaggcaccaccggcaccgcgacaaggacaagacccccgcggcgggggaccaggaccgagcagaggccccgaaggcggagagcggggagcccggtgcccgggaggagcggccgcggccgcaccgcagccacagcaaggaggccgcggggcccccggaggcgcggagcgagcgcggccgaggcccaggccccgagggcggccggcggcaccaccggcgcggctccccggaggaggcggccgagcgggagccccgacgccaccgcgcgcaccggcaccaggatccgagcaaggagtgcgccggcgccaagggcgagcggcgcgcgcggcaccgcggcggcccccgagcggggccccgggaggcggagagcggggaggagccggcgcggcggcaccgggcccggcacaaggcgcagcctgctcacgaggctgtggagaaggagaccacggagaaggaggccacggagaaggaggctgagatagtggaagccgacaaggaaaaggagctccggaaccaccagccccgggagccacactgtgacctggagaccagtgggactgtgactgtgggtcccatgcacacactgcccagcacctgtctccagaaggtggaggaacagccagaggatgcagacaatcagcggaacgtcactcgcatgggcagtcagcccccagacccgaacactattgtacatatcccagtgatgctgacgggccctcttggggaagccacggtcgttcccagtggtaacgtggacctggaaagccaagcagaggggaagaaggaggtggaagcggatgacgtgatgaggagcggcccccggcctatcgtcccatacagctccatgttctgtttaagccccaccaacctgctccgccgcttctgccactacatcgtgaccatgaggtacttcgaggtggtcattctcgtggtcatcgccttgagcagcatcgccctggctgctgaggacccagtgcgcacagactcgcccaggaacaacgctctgaaatacctggattacattttcactggtgtctttacctttgagatggtgataaagatgatcgacttgggactgctgcttcaccctggagcctatttccgggacttgtggaacattctggacttcattgtggtcagtggcgccctggtggcgtttgctttctcaggatccaaagggaaagacatcaataccatcaagtctctgagagtccttcgtgtcctgcggcccctcaagaccatcaaacggctgcccaagctcaaggctgtgtttgactgtgtggtgaactccctgaagaatgtcctcaacatcttgattgtctacatgctcttcatgttcatatttgccgtcattgcggtgcagctcttcaaagggaagtttttctactgcacagatgaatccaaggagctggagagggactgcaggggtcagtatttggattatgagaaggaggaagtggaagctcagcccaggcagtggaagaaatacgactttcactacgacaatgtgctctgggctctgctgacgctgttcacagtgtccacgggagaaggctggcccatggtgctgaaacactccgtggatgccacctatgaggagcagggtccaagccctgggtaccgcatggagctgtccatcttctacgtggtctactttgtggtctttcccttcttcttcgtcaacatctttgtggctttgatcatcatcaccttccaggagcagggggacaaggtgatgtctgaatgcagcctggagaagaacgagagggcttgcattgacttcgccatcagcgccaaacccctgacacggtacatgccccaaaaccggcagtcgttccagtataagacgtggacatttgtggtctccccgccctttgaatacttcatcatggccatgatagccctcaacactgtggtgctgatgatgaagttctatgatgcaccctatgagtacgagctgatgctgaaatgcctgaacatcgtgttcacatccatgttctccatggaatgcgtgctgaagatcatcgcctttggggtgctgaactatttcagagatgcctggaatgtctttgactttgtcactgtgttgggaagtattactgatattttagtaacagagattgcggaaacgaacaatttcatcaacctcagcttcctccgcctctttcgagctgcgcggctgatcaagctgctccgccagggctacaccatccgcatcctgctgtggacctttgtccagtccttcaaggccctgccctacgtgtgtctgctcattgccatgctgttcttcatctacgccatcatcggcatgcaggtgtttgggaatattgccctggatgatgacaccagcatcaaccgccacaacaacttccggacgtttttgcaagccctgatgctgctgttcaggagcgccacgggggaggcctggcacgagatcatgctgtcctgcctgagcaaccaggcctgtgatgagcaggccaatgccaccgagtgtggaagtgactttgcctacttctacttcgtctccttcatcttcctgtgctcctttctgatgttgaacctctttgtggctgtgatcatggacaattttgagtacctcacgcgggactcttccatcctaggtcctcaccacttggatgagttcatccgggtctgggctgaatacgacccggctgcgtgtgggcgcatcagttacaatgacatgtttgagatgctgaaacacatgtccccgcctctggggctggggaagaaatgccctgctcgagttgcttacaagcgcctggttcgcatgaacatgcccatctccaacgaggacatgactgttcacttcacgtccacgctgatggccctcatccggacggcactggagatcaagctggccccagctgggacaaagcagcatcagtgtgacgcggagttgaggaaggagatttccgttgtgtgggccaatctgccccagaagactttggacttgctggtaccaccccataagcctgatgagatgacagtggggaaggtttatgcagctctgatgatattcgacttctacaagcagaacaaaaccaccagagaccagatgcagcaggctcctggaggcctctcccagatgggtcctgtgtccctgttccaccctctgaaggccaccctggagcagacacagccggctgtgctccgaggagcccgggttttccttcgacagaagagttccacctccctcagcaatggcggggccatacaaaaccaagagagtggcatcaaagagtctgtctcctggggcactcaaaggacccaggatgcaccccatgaggccaggccacccctggagcgtggccactccacagagatccctgtggggcggtcaggagcactggctgtggacgttcagatgcagagcataacccggaggggccctgatggggagccccagcctgggctggagagccagggtcgagcggcctccatgccccgccttgcggccgagactcagcccgtcacagatgccagccccatgaagcgctccatctccacgctggcccagcggccccgtgggactcatctttgcagcaccaccccggaccgcccaccccctagccaggcgtcgtcgcaccaccaccaccaccgctgccaccgccgcagggacaggaagcagaggtccctggagaaggggcccagcctgtctgccgatatggatggcgcaccaagcagtgctgtggggccggggctgcccccgggagaggggcctacaggctgccggcgggaacgagagcgccggcaggagcggggccggtcccaggagcggaggcagccctcatcctcctcctcggagaagcagcgcttctactcctgcgaccgctttgggggccgtgagcccccgaagcccaagccctccctcagcagccacccaacgtcgccaacagctggccaggagccgggaccccacccacagggcagtggttccgtgaatgggagccccttgctgtcaacatctggtgctagcacccccggccgcggtgggcggaggcagctcccccagacgcccctgactccccgccccagcatcacctacaagacggccaactcctcacccatccacttcgccggggctcagaccagcctccctgccttctccccaggccggctcagccgtgggctttccgaacacaacgccctgctgcagagagaccccctcagccagcccctggcccctggctctcgaattggctctgacccttacctggggcagcgtctggacagtgaggcctctgtccacgccctgcctgaggacactctcactttcgaggaggctgtggccaccaactcgggccgctcctccaggacttcctacgtgtcctccctgacctcccagtctcaccctctccgccgcgtgcccaacggttaccactgcaccctgggactcagctcgggtggccgagcacggcacagctaccaccaccctgaccaagaccactggtgctagctgcaccgtgaccgctcagacgcctgcatgcagcaggcgtgtgttccagtggatgagttttatcatccacacggggcagccggccctcgggggaggccttgcccaccttggtgaggctcctgtggcccctccctccccctcctcccctcttttactctagacgacgaataaagccctgttagaggatgcggctctctctgtccccttcctgtcctgccttcctgggtctcgtaccacacaccagaccctaaaccgcaggctgctgtgtgtggctgagaaggacccaggagtccaaatcccgtgtcctgggactcagcatccagcatgggtgcttggagccgttgtgaggagctctgcgtcctgtggggagcacccttcacgtggccgtgcggcacagagaagcagggcccacctgaaagtgcgccgagacctcgggacggaggggatggggagggggacacagtcgtggcttgtgcagcccgccagtgtcagcgaatgctcactcaggcaagctctgtcctccctggacaccgtcagccccacaggaaccgagctgggaagtgttcttgctgtggttgtgatttttaattgcaacacctctcattcttgtcacttctatatacgtgatgtagaaaaaatggaaaaccagaaaaatggggaaggaaatgttcacataactttaaaaaatcaaacctgtgaaagaaagatgtcagctttttgccacgtgtctttgtggcttatgcgaggagactccctgtgcagccctgtccggtccaggtggacgtagacggcccctggctctgctgctcttgaccaagtgcctgaccgccaggccctcacacccaggctcctgggcactgtggtgtgaggcgaggcctcgggatccatcaccgcaggatgctgtgaaaagtactcgcgatggcagccaggtagcaagcccttgccagtggagagcactggatgtcatggtggcaaacaaggcagccatttgctgtcctcctcccacgagtggaaggggtttccaaggaagccacagggcagctgaccacgtgcttgtgtgaggcattttcagtctgttctgcatatgattctcagggcacactctgtggtatgtgaaataggtttccttccacatacagcagaagagaggcaaaggctggtaggaaggaggaagacattggctgggggcttggatgtggggccgtcagggcaggagggaggaagccccagctggaatgaaactcagagcaagtgaccgagggaggacacggctcctgccactgaggccgggcacctgatgcccagcactgtcctggcgccagacacagggagcaggcagtcaagtgaggtctgacccccatggccacgctcaggagagaaagaccatgctcaggacactgtccaaggtgcacaagatgctgggaggtcccttgtttggtgaagaaagggagcatttagagcagttgatggtggtgtgtcctccgtgttctgaaattccagatgatctgtgttggattcttggcttctaccccatgattctcctcaaagaaattgtgtgtgatgtgtgtgtgtgtgtgtgtgtgtgtgtgtctgtgtcacaggagatgcagtgcctgtacaggtgtgttcagtgtgtggatgtcattaacccatagggctatgcaacaaaagacacatttaatagaagtaaaacacacaagaccgctgcctggtctcggggttcagcatgattgtgaccaaacctttttatagaatttccttacctgaaggcacaacactctgaaactttaaagataacagagtattttattccaatagaataaaccaggaatctcggactgtgcatgtgatcactgtgctcctgttgcaaagtagaaggatgtgtattttgacactgacgttttgtctcttgttccccagcccccagcccatgttatcttgggtgtcgaatgtgtccattccatgcagaaccacagccatttccccaggcagtgttgggtcgagaatccacttttctaaacccacacagcctagctggcttgtctagactcttctaggcattggaattgatgaaaactacagggagcggggaaaggagacattatgtcttgttttcctgactttgggttttgtttctcactgtgtcttctccggctatcatatatgtcccctgaatctcatagtgagctgccaaatttgaagtgcatcacccagttgtctgcatctggaaccagtcaagcagtggctgtagtttgaacaagttatgtgtgcatgtaacatatatacatatatacatatatacaagtatgtgcatgataatgtatatcttcgtactttttgatacaatgtattcatttgttaatttttaattatatttgatataaatcaaaggtttgttgcaaaactttatatttaagaagtgttaaaaaaaaaaaaaagtcccaaccatgcaacacaactgggacctacttaaaaagaaattctgtgattgactagtttgctgcctgagtcatatttatcagccaaactttggattctgctgttgtttctacaatgacattttgtatgaagcaaagtccttgaattaaaataaaaacttagcaaaaaatcaaaaacaaaaccccaaaaaaaaaaaaaaaa

SEQ ID NO: 1587 - DNA, 1711 bp, Homo sapiens
caccgagcctggctctactgcaggcgctgggggttggggtgggggagaggcccagggcacatgatgccgcccccagcccgcccagcacatgacccaggcaggccggcggggtcctggcacacccgagccgcgtccgcgaacacagcccatggcctccccgcgcctagggaccttctgctgccccacgcgggacgcagccacgcagctcgtgctgagcttccagccgcgggccttccacgcgctctgcctgggcagcggcgggctccgcttggcgctgggccttctgcagctgctgcccggccgccggcccgcgggccccgggtcccccgcgacgtccccgccggcctcggtccgcatcctgcgcgctgccgctgcctgcgaccttctcggctgcctgggtatggtgatccggtccaccgtgtggttaggattcccaaattttgttgacagcgtctcggatatgaaccacacggaaatttggcctgctgctttctgcgtggggagtgcgatgtggatccagctgttgtacagtgcctgcttctggtggctgttttgctatgcagtggatgcttatctggtgatccggagatcggcaggactgagcaccatcctgctgtatcacatcatggcgtggggcctggccaccctgctctgtgtggagggagccgccatgctctactacccttccgtgtccaggtgtgagcggggcctggaccacgccatcccccactatgtcaccatgtacctgcccctgctgctggttctcgtggcgaaccccatcctgttccaaaagacagtgactgcagtggcctctttacttaaaggaagacaaggcatttacacggagaacgagaggaggatgggagccgtgatcaagatccgatttttcaaaatcatgctggttttaattatttgttggttgtcgaatatcatcaatgaaagccttttattctatcttgagatgcaaacagatatcaatggaggttctttgaaacctgtcagaactgcagccaagaccacatggtttattatgggaatcctgaatccagcccagggatttctcttgtctttggccttctacggctggacaggatgcagcctgggttttcagtctcccaggaaggagatccagtgggaatcactgaccacctcggctgctgagggggctcacccatccccactgatgccccatgaaaaccctgcttccgggaaggtgtctcaagtgggtgggcagacttctgacgaagccctgagcatgctgtctgaaggttctgatgccagcacaattgaaattcacactgcaagtgaatcctgcaacaaaaatgagggtgaccctgctctcccaacccatggagacctatgaaggggatgtgctgggggtccagaccccatattcctcagactcaacaattcttgttctttagaactgtgttctcaccttcccaacactgcactgccgaagtgtagcggcccccaaaccttgctctcatcaccagctagagcttcttcccgaagggcctttaggataggagaaagggttcatgcacacacgtgtgagaatggaagagccccctccagaccactctacagctgctctagccttagttgccactaggaagttttctgaggctggctgtaaagtaagtgtaaggtccacatccttggggaagtagttaaataaaatagttatgactgaaaaaaaaaaaaaaaa

SEQ ID NO: 1588 - DNA, 2880 bp, Homo sapiens; identical to SEQ ID NO: 114

SEQ ID NO: 1589 - DNA, 2120 bp, Homo sapiens; identical to SEQ ID NO: 110

SEQ ID NO: 1590 - DNA, 1912 bp, Homo sapiens; identical to SEQ ID NO: 125

SEQ ID NO: 1591 - DNA, 4024 bp, Homo sapiens; identical to SEQ ID NO: 113

SEQ ID NO: 1592 - DNA, 5190 bp, Homo sapiens; identical to SEQ ID NO: 44

SEQ ID NO: 1593 - DNA, 3381 bp, Homo sapiens; identical to SEQ ID NO: 108

SEQ ID NO: 1594 - DNA, 4053 bp, Homo sapiens; identical to SEQ ID NO: 120

SEQ ID NO: 1595 - DNA, 3134 bp, Homo sapiens; identical to SEQ ID NO: 112

SEQ ID NO: 1596 - DNA, 1529 bp, Homo sapiens; identical to SEQ ID NO: 551

SEQ ID NO: 1597 - DNA, 3157 bp, Homo sapiens; identical to SEQ ID NO: 118

SEQ ID NO: 1598 - DNA, 4380 bp, Homo sapiens; identical to SEQ ID NO: 157

SEQ ID NO: 1599 - DNA, 3218 bp, Homo sapiens; identical to SEQ ID NO: 117

SEQ ID NO: 1600 - DNA, 2774 bp, Homo sapiens; identical to SEQ ID NO: 122

SEQ ID NO: 1601 - DNA, 2869 bp, Homo sapiens; identical to SEQ ID NO: 109

SEQ ID NO: 1602 - DNA, 4006 bp, Homo sapiens; identical to SEQ ID NO: 152

SEQ ID NO: 1603 - DNA, 2193 bp, Homo sapiens; identical to SEQ ID NO: 137

SEQ ID NO: 1604 - DNA, 5384 bp, Homo sapiens
caggctcagaggctgaagcaggaggaaggaaggactggaaggaaaaagagacaggttagagggaaagaggcttgggaagaaaacagcagaaaagaaactgctcattacacttacagagaggcaagtaacggtggagatgaggacagagggaaccaagactctgaaagacaaaaaatacaaatagagcgaaagaggaaaaaaatgtcaagaagaacatccatccggagaaatgaagagaatgaaagttttaaactgcagagccgttctgtgcttttccggcacaaaattatatcgctgattttaagcccttttgcatttgccagccgttgacattaagaggcatgtttaacggtgccaacagcatctccttttccttctcctcttcctcttcttcttcttcctcctcctcctcctctttttcctcctcctcgttctcctcccatcagcaagaagacaaaccgaggacagtcttgaaatatcgaaatttcctctttgggatttgccagcgccaagactgtcggaataaaggacgctgactattgtattattgttattttattaattagtcagtggaaagattacagatgaggaaaggggacgcctgtcacccttcctgtgctaagatttaaaaaaaaatgaggctggattgcgggaagctctaaaatgaagcaaaaggagtaagatttttaaagacagaaagccacaggagcccccacgtagcgcacttttatttgtattttttcagatttttttttgtttcgtggtggtgggggaggtgattgggtggctgactggctgcgggaagctacttcctttccttttggagatgattgtgctattattgtttgccttgctctggatggtggaaggagtcttttcccagcttcactacacggtacaggaggagcaggaacatggcactttcgtggggaatatcgctgaagatctgggtctggacattacaaaactttcggctcgcgggtttcagacggtgcccaactcaaggaccccttacttagacctcaacctggagacaggggtgctgtacgtgaacgagaaaatagaccgcgaacaaatctgcaaacagagcccctcctgtgtcctgcacctggaggtctttctggagaaccccctggagctgttccaggtggagatcgaggtgctggacattaatgacaaccccccctctttcccggagccagacctgacggtggaaatctctgagagcgccacgccaggcactcgcttccccttggagagcgcattcgacccagacgtgggcaccaactccttgcgcgactacgagatcacccccaacagctacttctccctggacgtgcagacccagggggatggcaaccgattcgctgagctggtgctggagaagccactggaccgagagcagcaagcggtgcaccgctacgtgctgaccgcggtggacggaggaggtgggggaggagtaggagaaggagggggaggtggcgggggagcaggcctgcccccccagcagcagcgcaccggcacggccctactcaccatccgagtgctggactccaatgacaatgtgcccgctttcgaccaacccgtctacactgtgtccctaccagagaactctcccccaggcactctcgtgatccagctcaacgccaccgacccggacgagggccagaacggtgaggtcgtgtactccttcagcagccacatttcgccccgggcgcgggagcttttcggactctcgccgcgcactggcagactggaggtaagcggcgagttggactatgaagagagcccagtgtaccaagtgtacgtgcaagccaaggacctgggccccaacgccgtgcctgcgcactgcaaggtgctagtgcgagtactggatgctaatgacaacgcgccagagatcagcttcagcaccgtgaaggaagcggtgagtgagggcgcggcgcccggcactgtggtggcccttttcagcgtgactgaccgcgactcagaggagaatgggcaggtgcagtgcgagctactgggagacgtgcctttccgcctcaagtcttcctttaagaattactacaccatcgttaccgaagcccccctggaccgagaggcgggggactcctacaccctgactgtagtggctcgggaccggggcgagcctgcgctctccaccagtaagtcgatccaggtacaagtgtcggatgtgaacgacaacgcgccgcgtttcagccagccggtctacgacgtgtatgtgactgaaaacaacgtgcctggcgcctacatctacgcggtgagcgccaccgaccgggatgagggcgccaacgcccagcttgcctactctatcctcgagtgccagatccagggcatgagcgtcttcacctacgtttctatcaactctgagaacggctacttgtacgccctgcgctccttcgactatgagcagctgaaggacttcagttttcaggtggaagcccgggacgctggcagcccccaggcgctggctggtaacgccactgtcaacatcctcatagtggatcaaaatgacaacgcccctgccatcgtggcgcctctaccagggcgcaacgggactccagcgcgtgaggtgctgccccgctcggcggagccgggttacctgctcacccgcgtggccgccgtggacgcggacgacggcgagaacgcccggctcacttacagcatcgtgcgtggcaacgaaatgaacctctttcgcatggactggcgcaccggggagctgcgcacagcacgccgagtcccggccaagcgcgacccccagcggccttatgagctggtgatcgaggtgcgcgaccatgggcagccgcccctttcctccaccgccaccctggtggttcagctggtggatggcgccgtggagccccagggcgggggcgggagcggaggcggagggtcaggagagcaccagcgccccagtcgctctggcggcggggaaacctcgctagacctcaccctcatcctcatcatcgcgttgggctcggtgtccttcatcttcctgctggccatgatcgtgctggccgtgcgttgccaaaaagagaagaagctcaacatctatacttgtctggccagcgattgctgcctctgctgctgctgctgcggtggcggaggttcgacctgctgtggccgccaagcccgggcgcgcaagaagaaactcagcaagtcagacatcatgctggtgcagagctccaatgtacccagtaacccggcccaggtgccgatagaggagtccgggggctttggctcccaccaccacaaccagaattactgctatcaggtatgcctgacccctgagtccgccaagaccgacctgatgtttcttaagccctgcagcccttcgcggagtacggacactgagcacaacccctgcggggccatcgtcaccggttacaccgaccagcagcctgatatcatctccaacggaagcattttgtccaacgagactaaacaccagcgagcagagctcagctatctagttgacagacctcgccgagttaacagttctgcattccaggaagccgacatagtaagctctaaggacagtggtcatggagacagtgaacagggagatagtgatcatgatgccaccaaccgtgcccagtcagctggtatggatctcttctccaattgcactgaggaatgtaaagctctgggccactcagatcggtgctggatgccttcttttgtcccttctgatggacgccaggctgctgattatcgcagcaatctgcatgttcctggcatggactctgttccagacactgaggtgtttgaaactccagaagcccagcctggggcagagcggtccttttccacctttggcaaagagaaggcccttcacagcactctggagaggaaggagctggatggactgctgactaatacgcgagcgccttacaaaccaccatatttgacacggaaaaggatatgctagtcaattctacaggacttacctgaagcagcatgatttgcacaaagtcgaccaacaaaagcatcaacttttcaacttcattatcttggccatccagttagtcatgtgtaactgagtattagatttcggatggagtcatcatggccaattataggacctaattgctctcagcaggcctgagaaatgagttgaaatgtgcagaactgtagaaactttagaggcaacagattttgcctccccgatcagtgtgtgcctgtttacagcactatctatctttctctctccaaatgtcactgagccctttagatgtttatattcaccacgagaagccagtcataaagataaaggaaatttgtgcattataaatgcaatatcactgttttaaacttgactgttttatattatttttgtgtgatcaagtgttccgcaagctattccaactttacaagagaaattgtgattatgttcttttcacctgtgggttataaaaaatgttgtattctgaagacccacaaaatatcaaagacattctgtagtttatacaccgtgttgcaaagtgtttactgtactatttcaaagcttctaaataaatataaaatatatatattatattatataattttcctaaaatgtggtacaactcagttggtttttaaatggatgcatacagtccacatcatacaataaaataaaaggtaattcagggtcccaaagacaaacttactaagaaaaaatcattaatagttttctcccaatttccatatcttactcaaccgtgtttttccttgtttaaaagaaaatgatgctctaagctacaaaattttgtcaaaaactcatattgaattttcaatgccaaagatgtagctattgatgttatcagacagagcactgactatgtactatcaaactatctaacaatctgcataagtctgattctatttctatgactttgaatttagaatcacttaaagcttttataaagaatcgataaattcacctgtatttgttgttagaaaaaaactgggtgtctgtacattttgtggtgtaaaatatgtaattgaagattactattttaagaagtcatcagtcatatcactcacacagaattttattttacatagttttgtgacttaattacacatgaatataaaatctataattctatatgaatatatagagatatagaaacatctgaactggtaaagaataactataaaatatgaaagctctaaatttaaaataaatttagagatagaatcatggtacattattgtttcagtattccatgtaaaaattttatagcttaaatgtagtcagtgtttgattaatgaaaaaattcttcatgagtcagccttcaaaagttaagcttgccttttacttttatgtcaacaatattaattattaaatttagtaagacgcaaaaaaaaaaaaaaaaaaa

SEQ ID NO: 1605 - DNA, 3757 bp, Homo sapiens; identical to SEQ ID NO: 145

SEQ ID NO: 1606 - DNA, 918 bp, Homo sapiens; identical to SEQ ID NO: 52

SEQ ID NO: 1607 - DNA, 10258 bp, Homo sapiens; identical to SEQ ID NO: 123

SEQ ID NO: 1608 - DNA, 1588 bp, Homo sapiens; identical to SEQ ID NO: 144

SEQ ID NO: 1609 - DNA, 3714 bp, Homo sapiens; identical to SEQ ID NO: 1417

SEQ ID NO: 1610 - DNA, 1600 bp, Homo sapiens; identical to SEQ ID NO: 121

SEQ ID NO: 1611 - DNA, 1992 bp, Homo sapiens; identical to SEQ ID NO: 124

SEQ ID NO: 1612 - DNA, 3534 bp, Homo sapiens
cttcgctttcagagcatcctcactccgcccagttcggtgccagctgcgtgggctccagcttcgatcgttttccttggaatgctccaaaactcagcagcgactaagggaattccattggaatttgccgggcgtgctctcaccccgcacggcacccgcgccgtcagtcctcggatcccatcacttcagcccgaagattgcaactttgcagagacgaagaaatagcatggcatgaaacatggctcagttctattacaaaagaaatgttaatgctccctatagagaccgcatccctctaaggatagtaagagcagaatcagaactctcgccatcagaaaaagcctacttgaatgctgtggaaaagggagattatgccagtgtcaagaaatccctagaggaagctgaaatttattttaaaatcaatattaattgcattgatcctctcggaagaactgctctcctcattgcaattgaaaatgagaacttggagctcatcgaactactcttaagctttaatgtctatgttggagatgctctattacatgctatcagaaaagaagtcgtcggagctgttgagctgttattgaaccacaaaaaacctagtggagaaaaacaggtgcctcctatactccttgataagcagttctctgaattcactccagacattacaccaatcattttggcagcccatacaaataattatgagataataaaactcttggttcagaaaggagtctcagtgcctcgaccccacgaggtccgctgtaactgtgtggaatgcgtgtccagttcagatgtggacagcctccgtcactcacgctccagactcaacatctacaaggccttggccagtccctctctcattgcactgtcaagcgaagatccttttctcacagcctttcagttaagttgggaacttcaggaactgagcaaggtggaaaatgaattcaagtcggagtatgaagagctgtcacggcagtgcaaacaatttgctaaggacctactggatcagacgagaagttccagagaactggaaatcattcttaattaccgagatgacaatagtctcatagaagaacaaagtggaaatgatcttgcaagactaaaattggccattaagtaccgtcaaaaagagtttgttgcccagcccaattgtcaacagctgctggcatctcgctggtacgatgagtttccaggctggaggagaagacactgggcagtgaagatggtgacatgtttcataataggacttctttttcctgtcttctctgtgtgctacctgatagctcccaaaagcccacttggactgttcatcaggaagccatttatcaagtttatctgccacacagcctcctatttgacttttttgttcctgctgctgcttgcctctcagcacatcgacaggtcagacttgaacaggcaaggtccaccaccaaccatcgtcgagtggatgatattaccgtgggtcctgggcttcatatggggagaaattaaacagatgtgggatggcggacttcaggactacatccatgattggtggaatctaatggactttgtaatgaactccttatatttagcaacaatctccttgaaaattgttgcatttgtaaagtacagtgcccttaatccacgagaatcatgggacatgtggcatcccactctggtggcagaggctttatttgctattgcaaacatcttcagttctctgcgtctgatctcactgtttactgcaaattctcacctgggacctctgcaaatatctctgggaagaatgctcctggacattttgaagtttctattcatatactgccttgtgttgctagcatttgcaaatggcctaaatcaattgtacttctattatgaagaaacgaaagggttaacctgcaaaggcataagatgtgaaaagcagaataatgcattttcaacgttatttgagacactgcagtccctgttttggtcaatatttgggctcatcaatttatatgtgaccaatgtcaaagcacagcatgaatttactgagtttgttggtgccaccatgtttgggacatacaatgtcatctctctggttgttctactcaacatgttaatagctatgatgaataattcttaccaactgattgctgaccatgcagatatagaatggaaatttgcacgaacaaagctttggatgagttattttgaagaaggaggtactctgcctactcccttcaatgtcatcccgagccccaagtctctctggtacctgatcaaatggatctggacacacttgtgcaagaaaaagatgagaagaaagccagaaagttttggaacaatagggaggcgagctgctgataacttgagaagacatcaccaataccaagaagttatgaggaacctggtgaagcgatacgttgctgcaatgattagagatgctaaaactgaagaaggcctgaccgaagagaactttaaggaactaaagcaagacatttctagtttccgctttgaagtcctgggattactaagaggaagcaaactttccacaatacaatctgcgaatgcctcgaaggagtcttcaaattcggcagactcagatgaaaagagtgatagcgaaggtaatagcaaggacaagaaaaagaatttcagcctttttgatttaaccaccctgattcatccgagatcagcagcaattgcctctgaaagacataacataagcaatggctctgccctggtggttcaggagccgcccagggagaagcagagaaaagtgaattttgtgaccgatatcaaaaactttgggttatttcatagacgatcaaaacaaaatgctgctgagcaaaatgcaaaccaaatcttctctgtttcagaagaagttgctcgtcaacaggctgcaggaccacttgagagaaatattcaactggaatctcgaggattagcttcacggggtgacctgagcattcccggtctcagtgaacaatgtgtgttagtagaccatagagaaaggaatacggacacactggggttacaggtaggaaagagagtgtgtccattcaagtcagagaaggtggtggtggaggacacggttcctataataccaaaggagaaacatgcaaaagaagaggactctagtatagactatgatctaaacctcccagacacagtcacccacgaagattacgtgaccacaagattgtgatacttgaaggaggaagcgtttaccatacacatacgtattttccgtagtgctctgggtgggggaaaatgtttaaattgtattagcaaatgctaacttacactttatagcgtttatcagctgtggcatattacctgtaacatgtttaaataaggcaaaggcaatcaaaaacctttttgttttgtagcctgcttttgctttcacaatttgtcttacaattgtttttgttaataaataaatgcaccttgtattcttgtactgttgcaataaaaaaaaaaaaaaaaaaaaaaaaaaaaaaaaaaaaaaaaaaaaaaaaaaaaaaaaaaaaaaaaaaaaaaaaaaaaaaaaaaaaaaaaaaaaaaaaaaaa

SEQ ID NO: 1613 - DNA, 8704 bp, Homo sapiens; identical to SEQ ID NO: 162

SEQ ID NO: 1614 - DNA, 2562 bp, Homo sapiens; identical to SEQ ID NO: 119

SEQ ID NO: 1615 - DNA, 2890 bp, Homo sapiens; identical to SEQ ID NO: 75

SEQ ID NO: 1616 - DNA, 1047 bp, Homo sapiens; identical to SEQ ID NO: 73

SEQ ID NO: 1617 - DNA, 1594 bp, Homo sapiens; identical to SEQ ID NO: 111

SEQ ID NO: 1618 - DNA, 7185 bp, Homo sapiens; identical to SEQ ID NO: 160

SEQ ID NO: 1619 - DNA, 2816 bp, Homo sapiens; identical to SEQ ID NO: 132

SEQ ID NO: 1620 - DNA, 3187 bp, Homo sapiens; identical to SEQ ID NO: 1414

SEQ ID NO: 1621 - DNA, 2431 bp, Homo sapiens
atcttttggtgtccggacatggccttggcactgtagcatgtggacagccagtgccatggatttcagaacctgcattgccagttgactgcctgctttgtgctacgtgcaggcctgccgcgccctgatgattgctgcctcggtcctgggtctgccggccattttactgctgctgactgttcttccctgcatccggatgggccaggagcccggtgtggctaagtacaggcgggcccagctggctggtgttttgctcattctgctggctctctgcgcccttgttgccaccatctggttccctgtgtgcgcccaccgtgagaccaccatcgtgagctttggctactccctgtatgcaggctggattggtgctgtgctgtgcctcgtgggtggctgtgtcatcctctgctgcgctggagatgcccaggcctttggtgaaaaccgtttctactacactgcgggctctagctccccgactcatgcgaagagtgcccacgtataagagggctgcccggctgcccacagaggtgctgtagatgctgggcccagggccctaggtttgctcgtcacagtgtggggaagcccattcctctgccaggctctaaagccaaaggtctagaaaagcatcctgtctggcattttgtagtcttaacttctccccatttcccccatcttttggttgccttaaaagaaatctctagctcagataatgcccagacatttttttcccttggtgttgcccctattagctcttttcttgggcattcttttgctgtttattaaaaatatattatatatattttgtttctttaaatttcaaatgttttgcaaacatcactgagttaggtgggggtggggaagagaaatacaagatacttttttttttttttttttttttttttttttaaatagggcctcactctgttgctcaggctggagtgcggtggtgtgatctcggctcatgtagcctcaacctccccggctcaagtgatcctcctgcctcagcctcccaagtagctgggactacaggcgttcactactacacccagctaatttttaagttttttatagagatgagggctccctatgttgcccaggttggtctcgaactcctggactcaaagtatcctcccgcctcggcctcccaaagtgttgggattataggagtgagccaccacaccggccaagatgcttttcaaactgatacagatgacaatgggagcctcataaagatggcttttgtttcttcccttcaaggtcatttacttgtacgagacagaaaaagatagcattggggacatgggatgggggagggagggcaatagtggaacgaactttccatgggaaactttcccttttgtaagttgagggccaggggtagggatattttttagtttgtgattttacatttatctgtacatactttttcaagattgatcatttttataaccatggttttcctgaaatcctcaattcatcaatatgaaggaaatgaaccacatagactttatgcaataaataacagtgcaagtgagtataactctaactgatgttccacaaaacatttttgatttcaggtttgtatgatgtagtttttaatcgtacattttcatatgcttcaaactaacacatttttaaagctttcccccacttttctctctatttgtattgttagccatcttgaagtgatgttgtttaacataaattgtactgttgaatttggctttacgggtgtaaacactgatggtatatcagtatctgagaccccaaactctccaaatactgatggtgcattttattcttgaagtgaaatctgtgcaataaaataacagactgtctgcaaaactggccttcaatcttctgttgtatccagaggtatcattattgatttaaaaaaatctcattaatctctactggtaatttatagggaatctgatcagtgattcaagaacaagtaattctgcattgccttgaataattaaaaagttatattttattcacggtattgcagtggtaatttgtggtcatgaaagcataacctcagtgctctctaggtttcttaagtggggtgactttatggcatctttaatcatcgatcaatgggcagcaatcagaaacaaagttctcagcattatgcagttaatgtccttcatctacttctaacacttagtaaaggaattgattggctaggtataaaaagagaattaacgaaacctattttattggatctttaagtaataatatctaaatacatttcgttcaaacatacatatgtagctgtttggacattttggacaaagacacattgagttgatttttatttgtttttctgttccagaaacttcatcaagttacgggcctggtctaagaaaacacattgcaatctattttggcagacttctttcaaataaaatactaatttcattagctgatagta

SEQ ID NO: 1622 - DNA, 2114 bp, Homo sapiens
gagagatgtgggttacaaagctgccatctagaggctagaggctcctttctgcagtgtatataatgcaagtctgcagccagcagagctcacagttgttgcaaagtgctcagcactaagggagccagcgcacagcacagccaggaaggcgagcgagcccagccagcccagccagcccagccagcccggaggtcatttgattgcccgcctcagaacgatggatctgcatctcttcgactactcagagccagggaacttctcggacatcagctggccatgcaacagcagcgactgcatcgtggtggacacggtgatgtgtcccaacatgcccaacaaaagcgtcctgctctacacgctctccttcatttacattttcatcttcgtcatcggcatgattgccaactccgtggtggtctgggtgaatatccaggccaagaccacaggctatgacacgcactgctacatcttgaacctggccattgccgacctgtgggttgtcctcaccatcccagtctgggtggtcagtctcgtgcagcacaaccagtggcccatgggcgagctcacgtgcaaagtcacacacctcatcttctccatcaacctcttcggcagcattttcttcctcacgtgcatgagcgtggaccgctacctctccatcacctacttcaccaacacccccagcagcaggaagaagatggtacgccgtgtcgtctgcatcctggtgtggctgctggccttctgcgtgtctctgcctgacacctactacctgaagaccgtcacgtctgcgtccaacaatgagacctactgccggtccttctaccccgagcacagcatcaaggagtggctgatcggcatggagctggtctccgttgtcttgggctttgccgttcccttctccattatcgctgtcttctacttcctgctggccagagccatctcggcgtccagtgaccaggagaagcacagcagccggaagatcatcttctcctacgtggtggtcttccttgtctgctggctgccctaccacgtggcggtgctgctggacatcttctccatcctgcactacatccctttcacctgccggctggagcacgccctcttcacggccctgcatgtcacacagtgcctgtcgctggtgcactgctgcgtcaaccctgtcctctacagcttcatcaatcgcaactacaggtacgagctgatgaaggccttcatcttcaagtactcggccaaaacagggctcaccaagctcatcgatgcctccagagtctcagagacggagtactctgccttggagcagagcaccaaatgatctgccctggagaggctctgggacgggtttacttgtttttgaacagggtgatgggccctatggttttctagagcaaagcaaagtagcttcgggtcttgatgcttgagtagagtgaagaggggagcacgtgccccctgcatccattctctctttctcttgatgacgcagctgtcatttggctgtgcgtgctgacagttttgcaacaggcagagctgtgtcgcacagcagtgctgtgcgtcagagccagctgaggacaggcttgcctggacttctgtaagataggattttctgtgtttcctgaattttttatatggtgatttgtatttaaattttaagactttattttctcactattggtgtaccttataaatgtatttgaaagttaaatatattttaaatattgtttgggaggcatagtgctgacatatattcagagtgttgtagttttaaggttagcgtgacttcagttttgactaaggatgacactaattgttagctgttttgaaattatatatatataaatatatataaatatataaatatatgccagtcttggctgaaatgttttatttaccatagttttatatctgtgtggtgttttgtaccggcacgggatatggaacgaaaactgctttgtaatgcagtttgtgacattaatagtattgtaaagttacattttaaaataaacaaaaaactgttctggactgcaaatctgcacacacaacgaacagttgcatttcagagagttctctcaatttgtaagttatttttttttaataaagatttttgtttcctaaaaaaaaaaaaaaaa

SEQ ID NO: 1623 - DNA, 4267 bp, Homo sapiens; identical to SEQ ID NO: 126

SEQ ID NO: 1624 - DNA, 7047 bp, Homo sapiens
agcctcagacgctgcgtggagcggcggagccggagggaagcaaaggaccgtctgcgctgctgtccccgccccgcgcgctctgcgcccctcgtccctggcggtcgctccgaagctcagccctcttgcctgccccggagctgtcccgggctagccgagaagagagcggccggcaagtttgggcgcgcgcaggcggcgggccgcgggcactgggcgcctcgctggggcggggggaggtggctaccgctcccggcttggcgtcccgcgcgcacttcggcgatggcttttccgccgcggcgacggctgcgcctcggtccccgcggcctcccgcttcttctctcgggactcctgctacctctgtgccgcgccttcaacctagacgtggacagtcctgccgagtactctggccccgagggaagttacttcggcttcgccgtggatttcttcgtgcccagcgcgtcttcccggatgtttcttctcgtgggagctcccaaagcaaacaccacccagcctgggattgtggaaggagggcaggtcctcaaatgtgactggtcttctacccgccggtgccagccaattgaatttgatgcaacaggcaatagagattatgccaaggatgatccattggaatttaagtcccatcagtggtttggagcatctgtgaggtcgaaacaggataaaattttggcctgtgccccattgtaccattggagaactgagatgaaacaggagcgagagcctgttggaacatgctttcttcaagatggaacaaagactgttgagtatgctccatgtagatcacaagatattgatgctgatggacagggattttgtcaaggaggattcagcattgattttactaaagctgacagagtacttcttggtggtcctggtagcttttattggcaaggtcagcttatttcggatcaagtggcagaaatcgtatctaaatacgaccccaatgtttacagcatcaagtataataaccaattagcaactcggactgcacaagctatttttgatgacagctatttgggttattctgtggctgtcggagatttcaatggtgatggcatagatgactttgtttcaggagttccaagagcagcaaggactttgggaatggtttatatttatgatgggaagaacatgtcctccttatacaattttactggcgagcagatggctgcatatttcggattttctgtagctgccactgacattaatggagatgattatgcagatgtgtttattggagcacctctcttcatggatcgtggctctgatggcaaactccaagaggtggggcaggtctcagtgtctctacagagagcttcaggagacttccagacgacaaagctgaatggatttgaggtctttgcacggtttggcagtgccatagctcctttgggagatctggaccaggatggtttcaatgatattgcaattgctgctccatatgggggtgaagataaaaaaggaattgtttatatcttcaatggaagatcaacaggcttgaacgcagtcccatctcaaatccttgaagggcagtgggctgctcgaagcatgccaccaagctttggctattcaatgaaaggagccacagatatagacaaaaatggatatccagacttaattgtaggagcttttggtgtagatcgagctatcttatacagggccagaccagttatcactgtaaatgctggtcttgaagtgtaccctagcattttaaatcaagacaataaaacctgctcactgcctggaacagctctcaaagtttcctgttttaatgttaggttctgcttaaaggcagatggcaaaggagtacttcccaggaaacttaatttccaggtggaacttcttttggataaactcaagcaaaagggagcaattcgacgagcactgtttctctacagcaggtccccaagtcactccaagaacatgactatttcaagggggggactgatgcagtgtgaggaattgatagcgtatctgcgggatgaatctgaatttagagacaaactcactccaattactatttttatggaatatcggttggattatagaacagctgctgatacaacaggcttgcaacccattcttaaccagttcacgcctgctaacattagtcgacaggctcacattctacttgactgtggtgaagacaatgtctgtaaacccaagctggaagtttctgtagatagtgatcaaaagaagatctatattggggatgacaaccctctgacattgattgttaaggctcagaatcaaggagaaggtgcctacgaagctgagctcatcgtttccattccactgcaggctgatttcatcggggttgtccgaaacaatgaagccttagcaagactttcctgtgcatttaagacagaaaaccaaactcgccaggtggtatgtgaccttggaaacccaatgaaggctggaactcaactcttagctggtcttcgtttcagtgtgcaccagcagtcagagatggatacttctgtgaaatttgacttacaaatccaaagctcaaatctatttgacaaagtaagcccagttgtatctcacaaagttgatcttgctgttttagctgcagttgagataagaggagtctcgagtcctgatcatatctttcttccgattccaaactgggagcacaaggagaaccctgagactgaagaagatgttgggccagttgttcagcacatctatgagctgagaaacaatggtccaagttcattcagcaaggcaatgctccatcttcagtggccttacaaatataataataacactctgttgtatatccttcattatgatattgatggaccaatgaactgcacttcagatatggagatcaaccctttgagaattaagatctcatctttgcaaacaactgaaaagaatgacacggttgccgggcaaggtgagcgggaccatctcatcactaagcgggatcttgccctcagtgaaggagatattcacactttgggttgtggagttgctcagtgcttgaagattgtctgccaagttgggagattagacagaggaaagagtgcaatcttgtacgtaaagtcattactgtggactgagacttttatgaataaagaaaatcagaatcattcctattctctgaagtcgtctgcttcatttaatgtcatagagtttccttataagaatcttccaattgaggatatcaccaactccacattggttaccactaatgtcacctggggcattcagccagcgcccatgcctgtgcctgtgtgggtgatcattttagcagttctagcaggattgttgctactggctgttttggtatttgtaatgtacaggatgggcttttttaaacgggtccggccacctcaagaagaacaagaaagggagcagcttcaacctcatgaaaatggtgaaggaaactcagaaacttaactgcagtttttaagttatgctacatcttgacccactagaattagcaactttattatagatttaaactttcttcatgaggagtaaaaatccaaggctttactgctgatagtgctaattggcattaaccacaaaatgagaattatatttgtcaaccttctccttataaataagttcagacatacatttaataacatagggtgacttgtgtttttaggtatttaaataataaaatttcaagggatagtttttattcaatgtatataagacaggtagtgcctgatttactactttatataaaatagtacctccttcagttactgtttctgatttaatgtacggaactttatttgttgttgttgttgttgttgttgttgttgttttaaagcagtccaaatttggaccttagcaatcatgtcttttgtataggtacttaatgttaatacatattacactacagtttacttttcagaatactaaagactttataactgcatgaacttggatttttttaatcactcatatggtagaattttataaacacatacatgataccatccaaattcttgcttttaataacaaaggtacaatattttgttttagtatgaaaatctggtagatcctattacacttctgtttatattaaatccacaatattttattacatttttaacttgtataaattttaggtcaaatccttcaagccaacctatactaaaaattagttccataatcacaaatggctcttttgtgtaattgtttaatttcacctgaatatcataatgcttaaagccatatggagttggaaattatttccaaagcatatttattccattgttttagtctggctatttacagtataaaaaaagcatttttattaaaatactgtgtagttctttgagatagttgcttatgcatatagtaagtattacattcttagagtagagcagagtttttagttagtattaatttattttcctccattcatgtacttttccttatatttccaaaactgttactgagaatgggtcaagatcagtgagaaatctttacagttgacaggaacctggaccccttaccccaactttatgagtaatgcttggaataaaaactcttaaggcaactcactgatttacttctagcaatagcatgatgttacaggaatattacctctgtttaagcaaggtaatgtgtaaaatcagtctcggctgtcagaataacttctaaaaggtatttttataagcagttcaagttactgaaaaccttttaaacctttctgaagttcgttagtataaattacttttctaggattattaataaaagccacataggtggcaagttgtagttttatatggctctgtagagtggtgaaccttctagaggaatatatgatttattcacagttcctcaaggcctggggatgatgatcagttatacctatttttgtgcaattacatcatgttgtacattagaaatggagagtttaatagctctttaactgctgtcctcattaggtaatgataaatatttcccttaaataattgactattttgctgtgttttaaaaatgattgaaatttatcttgccatatctcataatttcatgcacaagttgactgagctaatcttgagaatatattcgtaaaataggagcacatttagttgaggtatacaaggtaggactctagacaaaaccttctattttagctttagtgaatttcaaaagtaatgggtcttggagtatagatttttattagtagcttgaaagagcttaatcatatgcagtaagtatttttattaccaataaatttaaaattttttaagaaaaatatttttatcctagggccaagtgttgcctgccaccaatcagtaagttagtctataacaaattttaccctaacagttttaccacctagtaacagtcatttctgaaaatatgttggatagaaagtcactctttggcaaaagtgttagaatttgcttttgtgccatctattccttttatggcatctatcttgaaagtaatcttgtattggagattgaaagatgctgtaatttagaaattaacatgatatcttaaattacctttatgaaatatagttttgtataatagcatagattttccttcaaaaaatgaacatttatatatctacaaaaatatggagaagagtaatttgaaagcctactttctgaagaaaatggtgggatttttttttatcatgattaaatatcaaaaaattgccctatgaaaactttaaatctctaaaacatttgaaatactaccatatttgtgatttattgagaataaaaatccattttgaaatgtaaaatttttatgatctgattcagttttaagaaaacatgaatgaactagaagatattaaaaacatttgacattggtaagaaatattgatactgatattgatttttatataggtatttatttcagaattgatattttgagaaaaatacatgtgagtcattttttctgtttctcttttctcttaacgattatcactgtaattctgaatctgaaaggtaaaacaattagtcaaaatattattgccatcattctacctgtgttatgaaactacttattcatagttaattctcattaacacttacatttccataaagaaaactcaagtattaataaaagagactttactggcttaagagggctgtgaaagatttttgatagtgaatcatgaccctaagggagagatttgtgtgataaaagtattgtatataatagatcagcgatttttgtaaggcaaacagaatttgtaagttggcagatcttcctaagttgcaaaatgtaatgatgagcttggtggagaagaatgagtcgttcttggaatacctatgtgcagccactacccatctcaatgtcaccttgtttgcattcttggatagcttgtatatgtagtagtttgatgaataatttaaagaaaaacacctaaaatttgaaaaatgattgtaggatcaaaaaaggcagatgaaattacttaatactcagtgttttggagagtattccttttagtttgttggttggctggtttgaacgatagaaatatgcagcatgcaatatatgcttatatttcattttaatttctgatatataatgaacttcttgggagaggtactgaatctttgatgttttttgtcattgttctcaagtgcaatataacaatgtaaccaaatctagataatttcaaagttgtcattaatttagtaagcctaatataaacaaatatttgtattatttttgttagcaggaaagagtgattaagtgaggttatttacccctaaatggtccattctgcattgtatttcaggctggaaatgaattattctttaccagttttgaaacactttgaaatatcctaaggtaacttggaagctgtgtagtatatcaaattaatttgctacctaataacatagaaagtaaatatctttgtggtcacccacattgggtgagacagaaaatgaatctgttctaaaatttgtaatttgctaacttgatttgagttagtgaaaactggtacagtgttctgcttgatttacaacatgtaacttgtgactgtacaataaacataagcatatggtaccaaaaaaaaaaaaaaaa

SEQ ID NO: 1625 - DNA, 3577 bp, Homo sapiens
agcttcacagctgggagagcgcaggaaggcgccgggaaggaaagccagcccaccagcgtctgggtgggctgcgccgcgcggctggcggaccttcccgggttggagaagtgcgcacgtccgcacctcaccctgcggctgacatctcctgcccaggagatgggcgctgaagcttgagcgcctgagtccctggagccacacctgcgaacaccctttgcttctattgagctgtgcccagccgcccagtgacagaattccaggacaaagagatcttcaaaaatcaaaaatgaggttcacatttacaagccggtgcttggcactgtttcttcttctaaatcacccaaccccaattcttcctgccttttcaaatcaaacctatccaacaatagagcccaagccatttctttacgtcgtaggacgaaagaagatgatggatgcacagtacaaatgctatgaccgaatgcagcagttacccgcataccaaggagaaggtccatattgcaatcgcacctgggatggatggctgtgctgggatgacacaccggctggagtattgtcctatcagttctgcccagattattttccggattttgatccatcagaaaaggttacaaaatactgtgatgaaaaaggtgtttggtttaaacatcctgaaaacaatcgaacctggtccaactatactatgtgcaatgctttcactcctgagaaactgaagaatgcatatgttctgtactatttggctattgtgggtcattctttgtcaattttcaccctagtgatttccctggggattttcgtgtttttcaggagccttggctgccaaagggtaaccctgcacaagaacatgtttcttacttacattctgaattctatgattatcatcatccacctggttgaagtagtacccaatggagagctcgtgcgaagggacccggtgagctgcaagattttgcattttttccaccagtacatgatggcctgcaactatttctggatgctctgtgaagggatctatcttcatacactcattgtcgtggctgtgtttactgagaagcaacgcttgcggtggtattatctcttgggctgggggttcccgctggtgccaaccactatccatgctattaccagggccgtgtacttcaatgacaactgctggctgagtgtggaaacccatttgctttacataatccatggacctgtcatggcggcacttgtggtcaatttcttctttttgctcaacattgtccgggtgcttgtgaccaaaatgagggaaacccatgaggcggaatcccacatgtacctgaaggctgtgaaggccaccatgatccttgtgcccctgctgggaatccagtttgtcgtctttccctggagaccttccaacaagatgcttgggaagatatatgattacgtgatgcactctctgattcatttccagggcttctttgttgcgaccatctactgcttctgcaacaatgaggtccaaaccaccgtgaagcgccaatgggcccaattcaaaattcagtggaaccagcgttgggggaggcgcccctccaaccgctctgctcgcgctgcagccgctgctgcggaggctggcgacatcccaatttacatctgccatcaggagctgaggaatgaaccagccaacaaccaaggcgaggagagtgctgagatcatccctttgaatatcatagagcaagagtcatctgcttgaatgtgaagcaaacacagcatcgtgatcactgagccatcatttcctgggagaaagaccatgcatttaaagtattctccatcctcccaggaaccgaacatatcatttgtgaagaattattcagtgaatttgtccattgtaaatctgaagaaagttattcttggtactgttgctttgggagacagtctaggaatggagtctcccactgcaacttgtgaactccatcattcatccaggactgagatgcaaatgtcacagtaatgcaagcaaagtatcaaagaaaaacaatgaaattgacctagttcagatacagggtgctccttgtcaatactgagccatttatacctttgaaatattaaaatcactgtcaatatttttatttttaactctggattttgaattagattatttctgtatttggctatggatctgatttttaatttttttaaatttcagtcaattctgatgttactgagatgttttaccatccttacaatgtaaaccacatgaactacgtgacctctgcaagacaaagcggctttctaatagagagattagtaaatatgtgaagaaaaagacctgcatttggcaggaagatgtatgctttgaatgcaaaagaaatttagagtcaatttgctgaaaacattacatgctcagcttggttttggacaagcctgtccattgggcaggacctagctgttgtaaagaattggtcttaatgttgaatgtattttggttgctgatgtttataaactgagaggtcacaaagaatctatcactaaaaatttttacaaaactgccaaaaatataattcttagtggaagacaatactccctttaaagagagtttgccactcccctaaactccaggatttataaagcaaattactccaaggtttataaagcagattacctcttgcccttgggtgctatctagcagtaaaagataaatttgttgaatattggtaattaaaagactccacataagtccattaactgctttccacccagcttcaaagcttaaaaagagctcaggcttttccaggaagatccaggagggctaattagaaatcaacttgtggttgaccgcttgtttcttgttattaccaaaacaggaggggaaaaaattaactgctccaaatttaaccataaatcaattcatgtttaacgtttctcattaaaatccagtattatattatcatatctctctttacttcccagtataagatttttgaaaatcctgaataaaccagtatcgttactggcacctgaaattaatttgtgaatttgcaacagtaatcagagttaccattatttaatttgtatgctaaatgaggaggtacattgaaaccctccaaatctccagtctcatctatgtcatattttgccactgcctttcagaagtgatttagttgtggaaagataataaattgatttgttatggttacatatttagcgcacccagagaaaattaattatatttctacagagaaaatgaatttgggatactaaagtagtttaagtctcctttactgaatgtaagggggggatcgaaaagaaggtatttttccaatcacagtgttatgtagtattgttctatttttgtttacaaacatggaaaacagagtatttctggcagctgtggtacaaatgtgataatatattgctaaaatattttagatgttattatgctaatatagtaggggttgaagaaaacaaaatagcttattatagaattgcacatagttctgcccaaattatgtgaaatgcttatgcttgtgtatatgtataaattaatacagagtacgttaaaagcaaaaagatgtatatttgcatatttttctaaagaaatatattattcatcttttcattc

SEQ ID NO: 1626 - DNA, 3359 bp, Homo sapiens; identical to SEQ ID NO: 139

SEQ ID NO: 1627 - DNA, 4543 bp, Homo sapiens; identical to SEQ ID NO: 1423

SEQ ID NO: 1628 - DNA, 1831 bp, Homo sapiens; identical to SEQ ID NO: 1421

SEQ ID NO: 1629 - DNA, 4234 bp, Homo sapiens
acacctgtctgagggggcggcggcggcggcggcggcggggcgggggctcgtagcgcctttgacacccgaggaaaagagggaggagggagagcgcgtttcatcatcggcggcggccacttataaaaacttctaggcgcgcactcgctggctcagtctccgctccgcgaatctcctccggccactgccgccgcggtcgcctctcacccgcccggccgctccagcccgaggcgccccgaccccgcgccactccgcgcccggccagccgcccgcagccatggggctcctgcccaagctcggcgcgtcccagggcagcgacacctctactagccgagccggccgctgtgcccgctcggtcttcggcaacattaaggtgtttgtgctctgccaaggcctcctgcagctctgccaactcctgtacagcgcctacttcaagagcagcctcaccaccattgagaagcgctttgggctctccagttcttcatcgggtctcatttccagcttgaatgagatcagcaatgccatcctcatcatctttgtcagctactttggcagccgggtgcaccgtccacgtctgattggcatcggaggtctcttcctggctgcaggtgccttcatcctcaccctcccacacttcctctccgagccctaccagtacaccttggccagcactgggaacaacagccgcttgcaggccgagctctgccagaagcattggcaggacctgcctcccagtaagtgccacagcaccacccagaacccccagaaggagaccagcagcatgtggggcctgatggtggttgcccagctgctggctggcatcgggacagtgcctattcagccatttgggatctcctatgtggatgacttctcagagcccagcaactcgcccctgtacatctccatcttatttgccatctctgtatttggaccggctttcgggtacctgctgggctctgtcatgctgcagatctttgtggactatggcagggtcaacacagctgcagttaacttggtcccgggtgacccccgatggattggagcctggtggctaggcctgctcatttcttcagctttattggttctcacctctttccccttttttttcttccctcgagcaatgcccataggagcaaagagggctcctgccacagcagatgaagcaaggaagttggaggaggccaagtcaagaggctccctggtggatttcattaaacggtttccatgcatctttctgaggctcctgatgaactcactcttcgtcctggtggtcctggcccagtgcaccttctcctccgtcattgctggcctctccaccttcctcaacaagttcctggagaagcagtatggcacctcagcagcctatgccaacttcctcattggtgctgtgaacctccctgctgcagccttggggatgctgtttggaggaatcctcatgaagcgctttgttttctctctacaagccattccccgcatagctaccaccatcatcaccatctccatgatcctttgtgttcctttgttcttcatgggatgctccaccccaactgtggccgaagtctacccccctagcacatcaagttctatacatccgcagtctcctgcctgccgcagggactgctcgtgcccagattctatcttccacccggtctgtggagacaatggaatcgagtacctctccccttgccatgccggctgcagcaacatcaacatgagctctgcaacctccaagcaactgatctatttgaactgcagctgtgtgaccgggggatccgcttcagcaaagacaggatcgtgccctgtcccctgtgcccacttcctgctcccggccatcttcctcatctccttcgtgtccctgatagcctgcatctcccacaaccccctctacatgatggttctgcgtgtggtgaaccaggaggaaaagtcatttgccatcggggtgcagttcttgttgatgcgcttgctggcctggctgccatctccagccctctatggcctcaccattgaccactcctgcatccggtggaactcgctgtgcttggggaggcgaggggcctgcgcctactatgacaacgatgctctccgagacaggtacctgggcctgcagatgggctacaaggcgctgggcatgctgctgctttgcttcatcagctggagggtgaagaagaacaaggagtacaacgtgcagaaggcggcaggcctcatctgaccccaccctgggccactgccctgctccagagagtggaccttgactcttccacacctgcctatactcactaatgttaacacgtcatttcctttttgtatttttaaacaagaaagaaaaccccagtcctcatttgccttccctacctcttcctcccagagtcctccccacagttcctaagggccactgtgtacccgggctgtgtgggccagaactggggggctgagtcttccctggccccttggaagaggcccccagatgcccaggctcacttcagtgttgagtcctccattgaggatgcccactgaggcagccaggcccctcaccagccctggggggaatcctaaacagagagagaaaaagggtatctgcccttcttgccaggcagctccactctcccgctgactgcccacaccctgcagagtggcaggggtgaaaggaagaaggaagtggctgagttattaatagccagagccactgggagactggggagactggctgtaacccccttcacacctgggtttggcatcagcacagactacgggaggggctggctccctccccctcagaccctcacttcctgtacctagaggccattctggatgctgccatgttgggaagtacagtctctgcccattacctgcatgcaggcaccagagcagggactgagaaaccccaaggatgggtcatctaagtgctgtccatatgaaccctggactttctgtccttagatcctcacatgttatccctgtctttctggggtacgtttcaaactgaggaagctacaacacagtgaagacccaaggaaggcctatgaaaaggtcctgatgcccaacctcccaccccttcaatgtggggacgagaccccctcatctcagagtaatgggaagaacctcccacatctccctggcagcagatgaggtggcttcacatgcacttccctgtctggacttcagcccgtattccgaggagtagagaggcagaagagatgtcagcaaagcaagtgatgaagcagagtggatgtccactgtcaccaagctggatggcaagctgcggcccacaaaacagccagtcaggttggctttcctggtttcagacatgctcataccattcccattttctcagcctcttctcactgcctccagagaggtgggtgcctgggttgagagacacagctgctacgtgatagatgttgagagacagaagccaacgaaggaggtcattcatcaacaaatatatttattggagaccgactttgtgcaaagcaatgctaatcagggttctccatggagcttccctcagctcttacctcacctccctccatttacattagggccttctcccagggtgtgctcggtgggcagtgtgggactgggggtgtgggagttggtgagagcaggaggagaggtggggacagcaagaagccacagattggcatgaaggatcctgacctgactatccatgccatccatggcccccagactgactctgcacctggccctttgccagacagctctgtctccccatgtcctctggaacagctgggcatgggtcatggccattcatgacccttaagtgccacccttcttggaagaccccctccagaagcatactggaagccacctctggaaaagcctcatatggtgatatgccaaaatatttatgtcaatgtccaaacaaagtccaatgccatgagactgaagtctttgtggaaaccactgttacagacaagcttatttccaaagccacctcatttccaaacatctcactcaggaagggaggctcaatgtaacctcaggggccagttttagcatttgaaatggttctgcttggaaaatgatgccctgcaactaaccctggtctttcccatggcaatttaaccacatttggaaggcactgccttcagctgagtttatgaacaatgaatgccaaccttcaggttctagaagattggttgcactcccaaacctttattctattatattactattaaaatattctaattttgctattgaggtaaaaaaaaaaaaa

SEQ ID NO: 1630 - DNA, 3440 bp, Homo sapiens; identical to SEQ ID NO: 143

SEQ ID NO: 1631 - DNA, 1863 bp, Homo sapiens; identical to SEQ ID NO: 165

SEQ ID NO: 1632 - DNA, 2645 bp, Homo sapiens
aggcaaccatgtggttccagctgaattttttttttccctctctctttcttcactcctttttctttccaaacagggaaaagtgttccacgaagcggtagcgcctttccgcctcgcgttttcctccctgaccctggtcccggctcccgtccgggcgccagctggtggggcgagcgccgggagcccatctgcccccaggggcacggggcgcggggccggctcccgcccggcacatggctgcagccacctcgcgcgcaccccgaggcgccgcgcccagctcgcccgaggtccgtcggaggcgcccggccgccccggagccaagcagcagctgagcggggaagcgcccgcgtccggggatcgggatgtccctcctccttctcctcttgctagtttcctactatgttggaaccttggggactcacactgagatcaagagagtggcagaggaaaaggtcactttgccctgccaccatcaactggggcttccagaaaaagacactctggatattgaatggctgctcaccgataatgaagggaaccaaaaagtggtgatcacttactccagtcgtcatgtctacaataacttgactgaggaacagaagggccgagtggcctttgcttccaatttcctggcaggagatgcctccttgcagattgaacctctgaagcccagtgatgagggccggtacacctgtaaggttaagaattcagggcgctacgtgtggagccatgtcatcttaaaagtcttagtgagaccatccaagcccaagtgtgagttggaaggagagctgacagaaggaagtgacctgactttgcagtgtgagtcatcctctggcacagagcccattgtgtattactggcagcgaatccgagagaaagagggagaggatgaacgtctgcctcccaaatctaggattgactacaaccaccctggacgagttctgctgcagaatcttaccatgtcctactctggactgtaccagtgcacagcaggcaacgaagctgggaaggaaagctgtgtggtgcgagtaactgtacagtatgtacaaagcatcggcatggttgcaggagcagtgacaggcatagtggctggagccctgctgattttcctcttggtgtggctgctaatccgaaggaaagacaaagaaagatatgaggaagaagagagacctaatgaaattcgagaagatgctgaagctccaaaagcccgtcttgtgaaacccagctcctcttcctcaggctctcggagctcacgctctggttcttcctccactcgctccacagcaaatagtgcctcacgcagccagcggacactgtcaactgacgcagcaccccagccagggctggccacccaggcatacagcctagtggggccagaggtgagaggttctgaaccaaagaaagtccaccatgctaatctgaccaaagcagaaaccacacccagcatgatccccagccagagcagagccttccaaacggtctgaattacaatggacttgactcccacgctttcctaggagtcagggtctttggactcttctcgtcattggagctcaagtcaccagccacacaaccagatgagaggtcatctaagtagcagtgagcattgcacggaacagattcagatgagcattttccttatacaataccaaacaagcaaaaggatgtaagctgattcatctgtaaaaaggcatcttattgtgcctttagaccagagtaagggaaagcaggagtccaaatctatttgttgaccaggacctgtggtgagaaggttggggaaaggtgaggtgaatatacctaaaacttttaatgtgggatattttgtatcagtgctttgattcacaattttcaagaggaaatgggatgctgtttgtaaattttctatgcatttctgcaaacttattggattattagttattcagacagtcaagcagaacccacagccttattacacctgtctacaccatgtactgagctaaccacttctaagaaactccaaaaaaggaaacatgtgtcttctattctgacttaacttcatttgtcataaggtttggatattaatttcaaggggagttgaaatagtgggagatggagaagagtgaatgagtttctcccactctatactaatctcactatttgtattgagcccaaaataactatgaaaggagacaaaaatttgtgacaaaggattgtgaagagctttccatcttcatgatgttatgaggattgttgacaaacattagaaatatataatggagcaattgtggatttcccctcaaatcagatgcctctaaggactttcctgctagatatttctggaaggagaaaatacaacatgtcatttatcaacgtccttagaaagaattcttctagagaaaaagggatctaggaatgctgaaagattacccaacataccattatagtctcttctttctgagaaaatgtgaaaccagaattgcaagactgggtggactagaaagggagattagatcagttttctcttaatatgtcaaggaaggtagccgggcatggtgccaggcacctgtaggaaaatccagcaggtggaggttgcagtgagccaagattatgccattgcactccagcctgggtgacaaagcaagactccatctcaaaaaaaaaaaaaaaaa

SEQ ID NO: 1633 - DNA, 3452 bp, Homo sapiens
gtctcagttcccgagcctgggagcaaccgcagcttctagtatccagactccagcgccgccccgggcgcggaccccaaccccgacccagagcttctccagcggcggcgcagcgagcagggctccccgccttaacttcctccgcggggcccagccaccttcgggagtccgggttgcccacctgcaaactctccgccttctgcacctgccacccctgagccagcgcgggcgcccgagcgagtcatggccaacgcggggctgcagctgttgggcttcattctcgccttcctgggatggatcggcgccatcgtcagcactgccctgccccagtggaggatttactcctatgccggcgacaacatcgtgaccgcccaggccatgtacgaggggctgtggatgtcctgcgtgtcgcagagcaccgggcagatccagtgcaaagtctttgactccttgctgaatctgagcagcacattgcaagcaacccgtgccttgatggtggttggcatcctcctgggagtgatagcaatctttgtggccaccgttggcatgaagtgtatgaagtgcttggaagacgatgaggtgcagaagatgaggatggctgtcattgggggtgcgatatttcttcttgcaggtctggctattttagttgccacagcatggtatggcaatagaatcgttcaagaattctatgaccctatgaccccagtcaatgccaggtacgaatttggtcaggctctcttcactggctgggctgctgcttctctctgccttctgggaggtgccctactttgctgttcctgtccccgaaaaacaacctcttacccaacaccaaggccctatccaaaacctgcaccttccagcgggaaagactacgtgtgacacagaggcaaaaggagaaaatcatgttgaaacaaaccgaaaatggacattgagatactatcattaacattaggaccttagaattttgggtattgtaatctgaagtatggtattacaaaacaaacaaacaaacaaaaaacccatgtgttaaaatactcagtgctaaacatggcttaatcttattttatcttctttcctcaatataggagggaagatttttccatttgtattactgcttcccattgagtaatcatactcaactgggggaaggggtgctccttaaatatatatagatatgtatatatacatgtttttctattaaaaatagacagtaaaatactattctcattatgttgatactagcatacttaaaatatctctaaaataggtaaatgtatttaattccatattgatgaagatgtttattggtatattttctttttcgtctatatatacatatgtaacagtcaaatatcatttactcttcttcattagctttgggtgcctttgccacaagacctagcctaatttaccaaggatgaattctttcaattcttcatgcgtgcccttttcatatacttattttattttttaccataatcttatagcacttgcatcgttattaagcccttatttgttttgtgtttcattggtctctatctcctgaatctaacacatttcatagcctacattttagtttctaaagccaagaagaatttattacaaatcagaactttggaggcaaatctttctgcatgaccaaagtgataaattcctgttgaccttcccacacaatccctgtactctgacccatagcactcttgtttgctttgaaaatatttgtccaattgagtagctgcatgctgttcccccaggtgttgtaacacaactttattgattgaatttttaagctacttattcatagttttatatccccctaaactacctttttgttccccattccttaattgtattgttttcccaagtgtaattatcatgcgttttatatcttcctaataaggtgtggtctgtttgtctgaacaaagtgctagactttctggagtgataatctggtgacaaatattctctctgtagctgtaagcaagtcacttaatctttctacctcttttttctatctgccaaattgagataatgatacttaaccagttagaagaggtagtgtgaatattaattagtttatattactctcattctttgaacatgaactatgcctatgtagtgtctttatttgctcagctggctgagacactgaagaagtcactgaacaaaacctacacacgtaccttcatgtgattcactgccttcctctctctaccagtctatttccactgaacaaaacctacacacataccttcatgtggttcagtgccttcctctctctaccagtctatttccactgaacaaaacctacgcacataccttcatgtggctcagtgccttcctctctctaccagtctatttccattctttcagctgtgtctgacatgtttgtgctctgttccattttaacaactgctcttacttttccagtctgtacagaatgctatttcacttgagcaagatgatgtaatggaaagggtgttggcattggtgtctggagacctggatttgagtcttggtgctatcaatcaccgtctgtgtttgagcaaggcatttggctgctgtaagcttattgcttcatctgtaagcggtggtttgtaattcctgatcttcccacctcacagtgatgttgtggggatccagtgagatagaatacatgtaagtgtggttttgtaatttaaaaagtgctatactaagggaaagaattgaggaattaactgcatacgttttggtgttgcttttcaaatgtttgaaaacaaaaaaaatgttaagaaatgggtttcttgccttaaccagtctctcaagtgatgagacagtgaagtaaaattgagtgcactaaacaaataagattctgaggaagtcttatcttctgcagtgagtatggcccgatgctttctgtggctaaacagatgtaatgggaagaaataaaagcctacgtgttggtaaatccaacagcaagggagatttttgaatcataataactcataaggtgctatctgttcagtgatgccctcagagctcttgctgttagctggcagctgacgctgctaggatagttagtttggaaatggtacttcataataaactacacaaggaaagtcagccactgtgtcttatgaggaattggacctaataaattttagtgtgccttccaaacctgagaatatatgcttttggaagttaaaatttaaatggcttttgccacatacatagatcttcatgatgtgtgagtgtaattccatgtggatatcagttaccaaacattacaaaaaaattttatggcccaaaatgaccaacgaaattgttacaatagaatttatccaattttgatctttttatattcttctaccacacctggaaacagaccaatagacattttggggttttataataggaatttgtataaagcattactctttttcaataaattgttttttaatttaaaaaaaggatta

SEQ ID NO: 1634 - DNA, 7110 bp, Homo sapiens; identical to SEQ ID NO: 150

SEQ ID NO: 1635 - DNA, 887 bp, Homo sapiens
aggcgggccatggcggatgtccccggggcacagcgagcggttcctggtgacggcccagagccccgggaccccctggactgttgggcctgcgctgttcttgtaacagcccagaatctgctggtggctgccttcaatcttctcctgctggtgctggtgctagggaccatcttgctacccgctgtcaccatgctgggcttcggcttcctctgccactctcagttcctgcgctcccaggcacccccttgcaccgcgcacctgcgggaccccggtttcacggccctactggtcaccggattcctgctcctcgtgccgctgctcgtgcttgctctggccagctaccgccgcctctgcctgcgcctccgcctagccgattgcctcgtgccctacagccgagccctttatcggcgtcggcgcgccccgcagccgcggcaaatccgggcctcaccagggtcccaggccgttcccacatcaggaaaggtctgggtctaatgaccctcgagtcaagaacaaccctgacggctgccctccctcttattcggcccaaggacttgaagcccggcatcttccgacctgccctgcccccacccctgcctgagcggagtcctagcatccccttgggagcagcagcgtcagtggacccagtgctgagaaaagcccccacatcccggaaaacccactttcctttcacgacccacatctcaatcctgaacatctaggctggaacctgcacacctccccctcagctccgtcgtgaatgggacaacaatctcgtgccctcgttttatggtgcagcttctctagtatttctggggctggggggcggggctggaggggaaggagtgtccacgcatcaataaagatttaacgaactgaaaaaaaaaaaaaaa

SEQ ID NO: 1636 - DNA, 11457 bp, Homo sapiens; identical to SEQ ID NO: 148

SEQ ID NO: 1637 - DNA, 2364 bp, Homo sapiens; identical to SEQ ID NO: 147

SEQ ID NO: 1638 - DNA, 3318 bp, Homo sapiens; identical to SEQ ID NO: 133

SEQ ID NO: 1639 - DNA, 3058 bp, Homo sapiens
ggggttggaatcccgcttctcctcggcagcagtaggctcgcaagtcgctggggttaggtggggcaagagtttcgccggcgcatcagcgctgcttcggactgtttgcaacgtgtttccagcgagctgggagcggggttgtgactgcgagtcgtctgggggagggggacttgtttttcttttcctctagagacctcggcttgcaactggatcaaacgctgtcgaaaggatgtaaataggcagagcaactgttaccaagaaggccaccacccccacccaaaggcagtgaggagtgtggggcttcgtctgggctcccccgagtctcaacagtaatcaacagtcaggtgttgattgcaacttttcaaggtcagccaccgggagtagcctattccctctaggaaccttggagggcataccttgctgggactcaacttggctgagaaatgcacaagatgccaaaggaggaaggattatagggggcgtgtgtgtgacccccaagaccgatcttccgctatcaccctaatctccggttccccgctacccgggcgggggtgagtatgtgacatgtgcctaactctcagcagcaacttcggcagcaggtgtcgatcctaactaagcaggagctgcggctgccgggtgtgccctcaccaagccatgcgagccccgggcgcgcttctcgcccgcatgtcgcggctactgcttctgctactgctcaaggtgtctgcctcttctgccctcggggtcgcccctgcgtccagaaacgaaacttgtctgggggagagctgtgcacctacagtgatccagcgccgcggcagggacgcctggggaccgggaaattctgcaagagacgttctgcgagcccgagcacccagggaggagcagggggcagcgtttcttgcgggaccctcctgggacctgccggcggccccgggccgtgacccggctgcaggcagaggggcggaggcgtcggcagccggacccccgggacctccaaccaggccacctggcccctggaggtggaaaggtgctcggggtcaggagccttctgaaactttggggagagggaaccccacggccctccagctcttccttcagatctcagaggaggaagagaagggtcccagaggcgctggcatttccgggcgtagccaggagcagagtgtgaagacagtccccggagccagcgatcttttttactggccaaggagagccgggaaactccagggttcccaccacaagcccctgtccaagacggccaatggactggcggggcacgaagggtggacaattgcactcccgggccgggcgctggcccagaatggatccttgggtgaaggaatccatgagcctgggggtccccgccggggaaacagcacgaaccggcgtgtgagactgaagaaccccttctacccgctgacccaggagtcctatggagcctacgcggtcatgtgtctgtccgtggtgatcttcgggaccggcatcattggcaacctggcggtgatgtgcatcgtgtgccacaactactacatgcggagcatctccaactccctcttggccaacctggccttctgggactttctcatcatcttcttctgccttccgctggtcatcttccacgagctgaccaagaagtggctgctggaggacttctcctgcaagatcgtgccctatatagaggtcgcttctctgggagtcaccaccttcaccttatgtgctctgtgcatagaccgcttccgtgctgccaccaacgtacagatgtactacgaaatgatcgaaaactgttcctcaacaactgccaaacttgctgttatatgggtgggagctctattgttagcacttccagaagttgttctccgccagctgagcaaggaggatttggggtttagtggccgagctccggcagaaaggtgcattattaagatctctcctgatttaccagacaccatctatgttctagccctcacctacgacagtgcgagactgtggtggtattttggctgttacttttgtttgcccacgcttttcaccatcacctgctctctagtgactgcgaggaaaatccgcaaagcagagaaagcctgtacccgagggaataaacggcagattcaactagagagtcagatgaactgtacagtagtggcactgaccattttatatggattttgcattattcctgaaaatatctgcaacattgttactgcctacatggctacaggggtttcacagcagacaatggacctccttaatatcatcagccagttccttttgttctttaagtcctgtgtcaccccagtcctccttttctgtctctgcaaacccttcagtcgggccttcatggagtgctgctgctgttgctgtgaggaatgcattcagaagtcttcaacggtgaccagtgatgacaatgacaacgagtacaccacggaactcgaactctcgcctttcagtaccatacgccgtgaaatgtccacttttgcttctgtcggaactcattgctgaaggacagtacttggttgggtcagatttatttgtttgattttcatatcccgtgaaagtttttaattcatatttttccttatagggaaaaatgcaaaaaagaaacaataaagaaagaaatattaactactgtagaactgattttacaaattaatatttgtgctttgaaaaaaagtttctatttagttatttaagaagaatgagaaggccaatagttttagattattttatctggtatggtgctaatattttatttgaaaaaagttactgcaacttaacttaaaattgctaacgttttttcttcttttaaaaatacaattattgtatattgattatagcaatgtgattttgtaggttattttatatttgagttgtgattgaaagtatgttgtatatggtattgtgagatgatttgtacttggaagcattcacaaagtagcaccaaataaattacactttattctttaaaaaaaaaaaaaaaaaaaaaaaaaaaaaaaaaaaaaaaaaaaaaaaaaaaaaaaaaaaaaaaaaaaaaaaaaaaaaaaaaaaaaaaaaaaaaaaaaaaaaa

SEQ ID NO: 1640 - DNA, 3177 bp, Homo sapiens; identical to SEQ ID NO: 130

SEQ ID NO: 1641 - DNA, 2290 bp, Homo sapiens; identical to SEQ ID NO: 129

SEQ ID NO: 1642 - DNA, 2255 bp, Homo sapiens; identical to SEQ ID NO: 1052

SEQ ID NO: 1643 - DNA, 1260 bp, Homo sapiens; identical to SEQ ID NO: 78

SEQ ID NO: 1644 - DNA, 8223 bp, Homo sapiens; identical to SEQ ID NO: 43

SEQ ID NO: 1645 - DNA, 4105 bp, Homo sapiens
ctcttgacccccccgccagagaaggaggaccctcccgcgccctttcggagcgtcggtggcccggctccggctctgcgctccatcctcccagccagcaggtgcccccagacccccggctcctcctccgccgccgtcacagcctcgtcctccgcctctggctcctccgcttcctgttgccgcgatccgggccgggagctgcgggcgcccgggcgcccgaggcttcccggtgcgctccgccaggtcagtcatcgctagagggttattattgacatttactcatcataaaatgtgatgtcagcctaccagctcggagtgcagttcctggtttccagtttacaacattgaccagttgctaacatgttatctctgaggaacttggaatgataaatacagccatacttaaatagaagattcttggccgtgtagataaggaaaataagataaggcaatatttttgaactattctataatagaaatgaggatatatacacaaaatgacccagtgctgttttcttagggtgcatcctttgtttttctggttttggtcttttcatcacaggatggcattagctctgtgtctgcaggtgctgtgcagcctgtgtggctggctctcgctctatatttctttctgccacctgaataagcaccgaagctatgagtggagctgccgcctggtcaccttcacccatggagtcctctctataggcctctccgcttatattggcttcattgatggcccatggccttttacccacccaggctcacccaatacacctctccaagttcatgtcctgtgtctcaccttgggctacttcatcttcgacttgggctgcatctggcgctttgcatggaggaagagcatcaagaagtaccatgcttggagaagcaggcggagtgaggaacggcagctgaaacacaacggacatctcaaaatacactagccaaggcttgctccagattatggattgggttaagtcagccatgggaaccaggttggaaatatgactgttacataattacacttataacaaacttaggtttcaataaagggctaaatgtattgatcaatttggtcagtcttcaagccgagcatataccagtattaaaacactaacttctacagtagcacagttgtagaaagtgagaatactccatggtagttgggaataagtgagaactgtgaagtgagtacaactggcatttgttttcatttgtggtgaccctgggtcctcctgtccctgggaggtttgatgttcaggcagtttagaaaggaactcgaaaaagattagtgctatttcttgttcctttgagaagtaactctttcaataaacacttatttctgctttccatatagcaatttatctaagtttaccccatttactataaagtgaggggcttacaggaagagacacgcctttgacattctgaacattagatcggggaattgggtcgcttaaacagaggggcataggagggtgagagtgaaactggcagtgagggggagggctacttactgaacctcctataccaactgtgccagaggtgcccaagaccactgccaggttctgtaattctctgggaagactcagtggactcagcatatagtcttacttatagttttgatttattatagtgaaaagatacaaagaaaaatcggtaaaaggaaaaggcacctgagacaaagtctagggtaaagcaagcacaagtttccagagtcctctcccaatggaatcacacaggatgcacttaattcccctagcagtgatttgttacgacatgtgaatgagttgtctactggacaaggtcactacagactcagtgcccaaagtttttactgaggacaggtcatctaggcaggctttccctggcagatagcaaaattcaagactctcaaaaggaaagcaggtgttcagcataagccatattgtttgcacaagcagttcagacacagtaagccagtcttatcagttaattgtgggagcccctccaaaatctaagttcccaaatgccggccagtggccaaccctgtaatcaggcctctccaaggatagcagtttaggcctgctatgttaactcttttctgcacaaaacctatagagttagggctttggatctgagatgaatgaagtgtgggtagatttactgagtcctgttatatgggttctgccctaccaggaaaactatgccagttctcagggcttttgtgcattaatctcctaggcatttgaggctatgactaaattccatagggatttatcatgtggattccactgtgcttgagatggcagtttagatttcagctctgctgtacatattgcaaactagagccaaagactttaaagtgtgtactggcctcagggggatgaggttaatttttttttttcattttagatactttcccttttagtactcctcctacttttcttatttttactaaaaaggtaccactctatgaacaaactaataaaacaaggccagtcttggaaggaaaaaaataataattcttagtgtgacagtctccaagagaagcaagaatataagcttagaacaaggggttaagaatccagaattcctgggttcttttaactaattttgctactcacttgccactttggagagctactcactcactttggataggttacttgtttcttctttgcctgagtttaaacctattgtgaatgaatgaaataccctgtagtatatttcataaatacattatgtggcattttattaatggaggtctttaatgtagggcttttatggaaatatgaagtatttatgtatttattgattatttatttttaccatgttattgaagtcaatggtgtttgattagctcagtgggtgagcaagcatatggtgctactggagtcaaggctggtcagtaggaagcatcagtccattccatggccactggtaatctaacgtaatgaatggtgtcttttgttgttgttgttgttgttgttgttgtttgagacagagtcttgctctgtcgcccaggctggagtgcagtggtgtgatctcaactcactgcaacctccgccttctgtgttcaagtgattctcctgcctcagcctcccgagtagctgggactacaggcgtgtgccaccatgcctggctactttttgtatttttagtagagacggggtttcaccatgttggccaggctggtcttgaactcctgacttcatgacccacccgcctcggcctcccaaagtgctgggattacaggtgtgagccaccgtgcccagccatgagcggtcttgaaaatgaaaaatggtcttggccacagaaaccaggtatgagggagtggttggaatggtataaagtcatcactgttagggaaacagtaactttaaatgcatgttaacagtgggtctttaaaaatgaatgtcatttggttaaagagttttgctgggcattgagataatctgacagcatctccacttcctgttttttttcttaatctccactttttttttttctatgatgagcgcccctaaaatgctggtaagcttctttccaacaaaattgcggtcaaagtaggatgctggggaatgctgattttagcaaaagcttgtagaaaagagtggcctggcacatgagcttaaaaaaaagaaaaaaagctggctcttgaattttggcacagtgcaacctgttccataccagacaaatgaacaggcttaatctggtaccaattctttttctctcttactcctcagaagtgaagggactgcagatcttgttgttttggggacactttcatggaactgtatgtaggtttttttgaatggtgagaaatctgaataattggtaaggggaagggaatccctcatttcagcttttcttgatgttgttactaataactatgaaaaaacttctgagagaacaatgtgaactgaagatgactcagcagttaagacaatgctaagttctgaaaccacaggtaaatgaagggctaattaatgtgtggtatacttggacaaaatgaagtactcatttgcactggattactgtgtaatgataacgaacactgttcaagaacgatttatatttccataagatttgtactaaattttataaaagtaaaacaactttttat

SEQ ID NO: 1646 - DNA, 2237 bp, Homo sapiens
ccctcggcggctgctgcgccgcgctcccggcgcactcggagcccggcggggaccgggaggcagagacggggcggccgtggctccgagggcgggagctgagccgggccccgggaccgaagtttggcggcggctccgggaggcagagcgggctccccgggcgacttccaggcccctctcgcgtcctcgccccggacccgtgggcagccggggggaacggaagccgcggccgggccaactccgaggcggggacgccgcgacgggaacttgaggcccgagagggatgtgaaggcccaaaatgaccctcttaccgggagacaattctgactacgactacagcgcgctgagctgcacctcggacgcctccttccacccggccttcctcccgcagcgccaggccatcaagggcgcgttctaccgccgggcgcagcggctgcggccgcaggatgagccccgccagggctgtcagcccgaggaccgccgccgtcggatcatcatcaacgtaggcggcatcaagtactcgctgccctggaccacgctggacgagttcccgctgacgcgcctgggccagctcaaggcctgcaccaacttcgacgacatcctcaacgtgtgcgatgactacgacgtcacctgcaacgagttcttcttcgaccgcaacccgggggccttcggcactatcctgaccttcctgcgcgcgggcaagctgcggctgctgcgcgagatgtgcgcgctgtccttccaggaggagctgctgtactggggcatcgcggaggaccacctggacggctgctgcaagcgccgctacctgcagaagattgaggagttcgcggagatggtggagcgggaggaagaggacgacgcgctggacagcgagggccgcgacagcgagggcccggccgagggcgagggccgcctggggcgctgcatgcggcgactgcgcgacatggtggagaggccgcactcggggctgcctggcaaggtgttcgcctgcctgtcggtgctcttcgtgaccgtcaccgccgtcaacctctccgtcagcaccttgcccagcctgagggaggaggaggagcagggccactgttcccagatgtgccacaacgtcttcatcgtggagtcggtgtgcgtgggctggttctccctggagttcctcctgcggctcattcaggcgcccagcaagttcgccttcctgcggagcccgctgacgctgatcgacctggtggccatcctgccctactacatcacgctgctggtggacggcgccgccgcaggccgtcgcaagcccggcgcgggcaacagctacctggacaaggtggggctggtgctgcgcgtgctgcgggcgctgcgcatcctgtacgtgatgcgcctggcgcgccactccctggggctgcagacgctggggctcacggcccgccgctgcacccgcgagttcgggctcctgctgctcttcctctgcgtggccatcgccctcttcgcgcccctgctctacgtcatcgagaacgagatggccgacagccccgagttcaccagcatccctgcctgctactggtgggctgtcatcaccatgacgacggtgggctatggcgacatggtccccaggagcaccccgggccaggtagtggccctgagcagcatcctgagcggcatcctgctcatggccttcccagtcacctccatcttccacaccttctcccgctcctacctggagctcaagcaggagcaagagagggtgatgttccggagggcgcagttcctcatcaaaaccaagtcgcagctgagcgtgtcccaggacagtgacatcttgttcggaagtgcctcctcggacaccagagacaataactgagcgcggaggacacgcctgccctgcctgccatctgtggcccgaagccattgccatccactgcagacgcctggagagggacaggccgcttccgagtgcagtcctggcgcagcaccgactcccacgcacccggggaaggacaccctcactcccacaccccgggaagaacactagaacatcagcagaggggccctgcccctccgcctgcagccgtgaaaggaagctgggtcatcagcccagccccgcccaccccagcccctatgtgtgtttccctcaataaggagatgccttgttcttttcaccatgcaaataacatgcccagcaaaaacttgctttatgggtctgcctggagaaaaaaaaaaaaaatacaaacagcagaaacagcaaaaaaaaaaaaaaaaaa

SEQ ID NO: 1647 - DNA, 5061 bp, Homo sapiens
gggcagggcggctcggccgcctctttctctcgctgcccccgcccctcctcctcctccctctccccgagtgctagcccgggcggccgccgagcttggcgctctctcgcctcgctgcctcctcccccgcgccgcggaccctctcccctcccttgcgttgcccccctctcccgccgcctcctcccgctctcctctcgctctcctcccgcctccttcttccaggcgcggccagcgggggcaagagcgaggtggctgcgaggaggcgtcactgaaagccctgacttggggaaggctgcgggctcggagccggagacgccgagctggggccgggtgagttgggaatcagactcttgagttgacagctggcctatggtttctgcattttgttaagaagcacctcatgcaagcgagggacctgggactgctcacagccaggtggcatttttctgaagttgttcattaagacttcccagcattcctacagatataaataggtgaggccgcaggcggtgctctgggtccgggagcgctgtccccagcatgaacgcggccggcggcgggagtgaatgactgcagctgcgacttccttcccgggccgcccgagcctccttccccaccgactttcttgttttgattaactccgtggactcctgactctttcttcgcccggaacatcaatatgtgtcatgtcattgtcacctgtcgctcgatgctctggaccttgctgagtattgtggtggcttttgccgagctcattgccttcatgagtgcagactggctgatcgggaaagcgaggagccgcggcggcgtggagccggcgggcccgggcgggggctccccggagccctaccaccccaccctgggcatctacgcccgctgcatccggaacccaggggtgcagcacttccagcgggacacgctgtgcgggccctacgccgagagcttcggcgagatcgccagcggcttctggcaggccacagctattttcctggctgtgggaatctttattctctgcatggtggccttggtgtccgtcttcaccatgtgtgtacagagcatcatgaagaaaagcatcttcaatgtctgtgggctgttgcaaggaattgcaggtctattccttatcctcggtttgatactctaccctgctggctggggttgccagaaggccatagactactgtggacattatgcatctgcctacaaacctggagactgctccttgggctgggccttttataccgccattgggggcacagtcctcactttcatctgtgctgtcttctctgcacaagcagaaattgcaacctctagtgacaaagtacaggaagaaattgaagaggggaaaaatctgatctgcctcctttagtttggaagagacaatgccattttctcccttgagtaatcttgtgaaacagtccacagtttcatcatttgagtcaagtggagaactaacctttacctaccaaagccacgttccacggcccgaggcttaaacaggaccaatgagaggccacatccagctacgcaaagttactggacatgcggtctgcagtgcacattataaggaatggaacatgaaaatagtatataatcctagacctggagttgccaagttctgtcagactccatctcccccaggttcaatgaaggataataatctaaatcattagggcagcagtttctctggtaacggaagagaccgtccgccagatctgcaggctgtttctgctccaacactgcttgcttgtgagcatctctgcctcagaatggggttttgggttggagttcttgttttcctctgttctttcaagttgtctccaacgaacagaaaactataaacttactggggacaggatgtgtgctaaagggcacagcaagacactgtcttttgcttagctgaccaaaggggtcagcagggatggcgtggagtcatgctgtggaacttattctaggctgaatcctagggtaaggtggatcaactgaactgtcactccagagattttagaaatttgagtaaagaaacaataaggacctatacaatcatatgagaacaaaaatatgaaatcttgctagtgaagacgtattttttcttcttcccagcagccaggctagcaccagttctggcccagtctcctcttcttctggagatcacatgtttttcttctaaggttaggattgtgctttgactgcgaaaggaaacctcactgtttcctccttccagggactgaggtctccaagctagctgtggcttatgcagatgttcactgggaggacctgccagaatctcggcacttggggggagacctttactcccagtttggtgaccatgctgtagtcagctctatttccaatcccgacagtagcagaatggcattctacaacaaaaagaagctagttatgggagttaagtttttgtagttactggtgttgatcctgaaagcagactgagataacattaaattgctgcaactgaagaactgcagccaagaccttaattccaggaaagcacagaggacaaagttaattcaaaaagaggcgctagatcaaggtcacagcactgcctacacctgtttacaaaaagaatcaaataccactatgaataaggattcaggggtttttaatctactttccataaattaccaatatcactgattcaggaagatagtatctcagaatgaccagagcagcacagaaacaagctactctgacattatgggagcttcaaaattgtatcatgatacagaaacactccttagcactttaagaaagtgagatggaactgccagatttctggaaggagaaaaagtgtaggtatttgggttcattaatctgctcacttgaggactttgttttgaaaaagtaccttctgtggacaaggtattgtgctaccagctatacaaccctgacttcagagtttgcaaccttgccctgagtgaatcatgttaaagctgtctgagtctaaagcaccgtatcttggtgcagaacagataattatacagagatggaatgggacaaccgcagttttactacattctggtgtttggcctatatgagaaaccatcttctcacagattaagggctaagggcaaaaggggtgggaggtgtggaactagccttaatgagtttcccattcctgaaccaaaattcaaagtgagtgagatgtaaatcctgtgattttggtgaagaaaaaaacgggtatcttcatagcagcctaggaaaccttaaccatatctctaacaccacacagaaagaggctggaggagccactggacaaagcttctgtctctgtgtgtacatttataatgttctaaccaagtctcaaaccttgatgaaaaacacaaaatttttccataaacttatcagaagactcacttttctttctttcttggatagagaaaccattttctgacactaggtttacaatctcagtgtccttacaagttaagtcctaagctcacaggatcctccgagcatgtccatcacctgctctttggctaaggtggcagtgtacctctagatcaacctgggaacagtcacaagggagtgtgacttcttggccataataaactcactcgatagtgtttatgttattaatctgaatgcaacagaagacaaaagcacaggcatgcacacacacagaaccccaaaccactaaaaactacctaaacactgacttagtaaatagtaaaaaggtaatgttgggacttttaaaccttgaatccattagccaggcttgggatgaaaggaccatctaaaatcatgctagtctaaaccatgctcttccacacagctgtttaaaaaccactgggtatgaggaatatgctagaaagaaatgttaaaaatagattgttggctcacacttatttttctaataaataggaccattattactaccaggaaagtcttatttattttgcctgaaattggcttaaagaaagtctcatgacgggatgggatgggctgcgcttctcaatgaactctgaggcagaaatatttgccttggattctgtggattctttaaacctgtgtgctaataattcaaacaatgttgcattaattgtataagggtttttgtatagttttcaaacatctgtggtgtaatgatctttgttaaacatatattctgtaaagtgccatagtctttttttatgtgtagcatatttaaaaatatatatgtatattatacatacacaagtttgtgtgaaagatgtgcaataacaaaggtgtatgtatgttttgttgttttgttttggaaactggacaggagtcaaaacagggatgtttgtttctgttttggcaaggagagttccacatttttgccttcatggcttattcagtaacccataattttaatgctacacaaatcttatgtgaagaaaagactggtatgaaatcattttttcctgggtctaaaataatcgctagtgttatgtcaaagttaagcccgcacgccaggcccagttaatgctagtctttcatgtgaaatgtgaagctgccatgttgccttttctcttagtaggataactagtagctggtacataatcactgaggagctatttcttaacatgcttttatagaccatgctaatgctagaccagtatttaagggctaatctcacacctccttagctgtaagagtctggcttagaacagacctctctgtgcaataacttgtggccactggaaatccctgggccggcatttgtattggggttgcaatgactcccaagggccaaaagagttaaaggcacgactgggatttcttctgagactgtggtgaaactccttccaaggctgagggggtcagtaggtgctctggagggactcggcaccacttgatattcaacagccacttgagccaaatataaaattgtatttacagctgatggactcaatttgagccttcaaacttgtagttatcctattatattgtaaactaatacattgtctagcattgatttggttcctgtgcatatgtattttcactatgtgctcccctccccagatcttaattaaaccagattttgcaattcattcttattctttcaaaaaaaaaaaaaaaaaa

SEQ ID NO: 1648 - DNA, 2358 bp, Homo sapiens
cccagcaggcagtgcagcctagagacgctgacaaaggagcggaggagcagtcgcagctgctttccgaggaagccggtgttgccgagattgccaaaatgctttggagtttttaactgaatctaagaaaagtccaaaatagatttgagactgtaaaaacagaaactgcagcaagggggattcagtgccaatgcatcaacaaaaaagacaaccagagttagtggaaggaaatcttcctgttttcgtgttccccacggagctcatattttatgcagatgatcagtcaacacataagcaagtgttgacactgtacaatccctatgagtttgccttaaagttcaaagttttgtgtactactccaaataagtatgttgtcgttgatgctgcaggtgcagtaaagcctcagtgttgtgtggatattgtgattcgtcatcgagatgttcgatcctgtcactatggtgtaatagacaaattccgtctccaagtttccgagcaaagccaaaggaaggctttgggaagaaaagaggttgttgctactcttctcccatcagcaaaagaacaacaaaaggaagaagaggaaaaaagattaaaggaacatttaactgaaagtttattttttgagcagtcgtttcaaccagaaaacagagctgtatcctcaggacctagtttactaactgtcttcctgggagtggtgtgcattgcagccctgatgctgcctacactgggggatgtggaatcgctggtgcctctctacctccacttaagtgtgaatcaaaaattagtggctgcttatatcttaggtcttatcacaatggccatacttagaacatgagcaaggatttcaattgacttctgaagtaaatctgtcttgaaaatatgaatgtggactgccttttatctctatttcactccattaacatgcaacaaactattgaatgatttcaaataattgcaaatgtataatatatattttaaattataatttaatttgaaggactgcagaacattattttacagacagcaaggatgcttctgagtgacacctaggaaattatttgaagaaattctttttatatctatacctgttgtgtaagaaactttaaaacatttgttattttctcacctttttttctaattcactttgattgctaggggtcatgtatgcttcgaagttacaggactaaaagagcaaactgaccggcctaaaactaaaatgacatttattccctagctacaaacatcagcgttattatgttaattataccttgccctctatcattataaatggttgccatggtgtttctaaaaataagtgttttaccattaatgtgtagagggcaaacaaagcataaagtactaagggatcatgcttatcctagggtctcacagaagagaggacatatttaattaatcttgtgaattacagaacaggttgtggtccagacaccaagaatcataggggtttttttttaaaaaacctaatagaagtagggtgacctctctctttggtctaagagttctaaaggaaggtaggcatctgtttaattagttggttcaccctggctttacctctggttaatgctttgtgttaataggaaggaaaaatcactttatcttttcttccaagcccctccctgcctgacttacccagactgggattaccagataccaggtgatttatgtggagatgatttttcacctttaaactctaagccaagtgtaagaaactcttgatagctatgtctattttatatcagtcactgagacttttttttaagtttttatttattattaagacaactttgccaaaaaagtcccctaagcacaactatttacatttctttatagcctcttctgatctctaacacatatgcagttttaactgttattttcatagtaactgatcttttgtctaaggatttttacctgaaagcacaatgtattgagtctcttgaaaatcatctttcagatctttttacagaatgaacttatgcactgctactgtagtattctcaaggaatatatgtaaacacaaatgtatgcctgaggttggtttttgcagaaaacagtctctgcttctaaaaacttctatgtctagtcttccataggaaatcctcactgtttaaccatgtgaggagcctaagtcattaaacggatcatgtctgtacattgtgtaatgaatgaaaagcacataaatgtaatctactttgaactttgtaaaaatgatgtgtggaggctattcttgtttctccatctcaagtcctgtgtgtgcacgtgtgtgcaagtgcacatgtgtgtgtgtaataacacattgtaaagaacagaaattactttaaaaaataaacagaaatggagacctga

SEQ ID NO: 1649 - DNA, 3098 bp, Homo sapiens
tgggaagttcgcgcaagtgcggctctgcagggaggagggagggccgaggggaaggccctcgagagagtggagggcaacagtggccacggttcctctgtacttcgtttcttccctttatagaattgagagattgctgagcctaaatacatgttgctgcattgcctccgagaatggccggacctatccccactctcaccaaaacagagtgtgggactcactgctccctcgcctactagagcagagccactgccagaaggaaggggacaagacccagcaggacaccttctttccacgctttccagcctgtgggagcggcaggggcaacagagagaggatctggagccaggattaatgactcatttatgaagcatcttattctgcgaccgaggctcagtggtcagtggcgacgtaaatggctcgactccccgctggcattcgcttcatcatctcattctccagggatcagtggtacagagccttcatttttattttgacatttctgctgtatgcaagttttcacttatctcgaaagcctatcagcatagttaagggtgagctccacaagtactgcactgcttgggatgaagctgacgtcaggttcagcagccagaacaggaagtctgggtccgctgccccccaccagctccctgacaatgagaccgactgtggctgggcaccgtttgataagaacaactatcagcagctgcttggggccctggactactccttcctgtgcgcctatgccgtggggatgtacctcagtggcatcattggggagcgcctgccgattaggtattacctaactttcgggatgctcgccagcggagccttcaccgccctgttcggcttagggtatttctacaacatccacagtttcggattctacgtggtaactcaggtcatcaacgggctggtgcagaccaccggctggcccagcgtcgtcacctgcctcggcaactggtttggaaaaggaaggagaggtttgattatgggggtctggaactcccacacctccgtgggcaacatcttggggtcattgatcgctggctactgggtgtccacatgctggggcctgtccttcgtcgtgcctggagccatcgtggcagccatggggatagtgtgctttctcttcctcattgaacatccgaacgacgtcaggtgctcctccaccctggtgacgcactcaaaaggctatgagaatggtacaaacagattgagactccagaagcaaatcttgaagagcgaaaagaacaagcctctggacccagagatgcagtgcctgctgctctcagatgggaagggctccatccacccgaaccacgtcgtcattctccccggggacggtgggagtggcacggccgccatcagcttcacaggggccttgaaaattccaggcgtgatagagttctcactgtgtctgctgtttgccaagctggtcagctatactttcctcttctggctgcccctgtacatcacgaatgtggatcaccttgatgccaaaaaggcgggggagctctccaccctgtttgacgtgggcggaatctttggtgggatcctggcaggtgtgatctcagaccgactggagaaaagggcctccacctgcggcctgatgctgctgctcgcggcccccacgctctacatcttctccaccgtcagcaagatggggcttgaggccaccatcgccatgctgctgctcagcggagccctggtcagtgggccctacacactcatcaccaccgccgtctccgccgacctggggactcataaaagtctgaaaggcaacgcgcacgccctctccaccgtgacggccatcattgacgggacgggctctgtaggagcagccctgggccccctgctggctgggctcctctccccgtccggctggagcaatgtgttttacatgctgatgtttgcagatgcctgtgccttactgttcctgatccgcctcatacacaaggagctgagctgcccagggtcagctacgggggaccaagttccatttaaggaacagtgacaccccaccccagtcccgtggagggggtctgggcccacccttcacaactgcctttcaaggacagttcagacaaagggccctgcatggaaagagtgacctccctttgccttttgcacacgcacctggaaaagacacagaagccaacctgagaacccctggtgctattttaaaggagacatattgctgaacagcagtgagaaaagtctgcaggaactgctgcctgagccaagccagagaaccgaagacccggccggccctggcctcacaggcgtgtgcccatgcagccacccaaatgcacgcgtgacaacaaggccgggagggtggggggggtgcacaggtagccccgaccctctcaggcattccagccacagaacatcaaagtgagcgagtactgcgctggctgtggcttcagagaacctgtatgtgccacatggaaaaacaggacaccagagcccaccagacagtgccggccagcagagaagcagagagccagcgccacacaacatcaagaaggccgacaaccaggttggaaaccaagacggagctcagacccaccacatcgccccagaggcttttccagcacccatgatgtttcggactgacctaaaaactaattgtcgagaagccaagggtgaggaggcaggaagcacctccggttggaggcacccaggcttgccagccacagagcgccccaaagtcaccgtcatcccagcccctggccttcctgctgccctccggggccatggcactgctgttcagctcaggcacaggggcacagcagaggtttgggaagcggtctccccaccggcactgggattggcgggtccaagcccagcaaccggcttcgctccacaacacacaccacacctgggactgtttttaatacatagcaacagactgggttatttatttaagatgtgtattgtgtcatatgaagtttaagagacataaatggcattttgttatttattaagacaaactccaattgttctctggctgtttttttcagttgtgtctagcaaaatacttatctgccctttgaaataaaatgtttttgtttaaaaaatctcagaacactcaaaaa

SEQ ID NO: 1650 - DNA, 3641 bp, Homo sapiens; identical to SEQ ID NO: 161

SEQ ID NO: 1651 - DNA, 6364 bp, Homo sapiens; identical to SEQ ID NO: 168

SEQ ID NO: 1652 - DNA, 2810 bp, Homo sapiens; identical to SEQ ID NO: 135

SEQ ID NO: 1653 - DNA, 4909 bp, Homo sapiens
tagacgcaccctctgaagatggtgactccctcctgagaagctggaccccttggtaaaagacaaggccttctccaagaagaatatgaaagtgttactcagacttatttgtttcatagctctactgatttcttctctggaggctgataaatgcaaggaacgtgaagaaaaaataattttagtgtcatctgcaaatgaaattgatgttcgtccctgtcctcttaacccaaatgaacacaaaggcactataacttggtataaagatgacagcaagacacctgtatctacagaacaagcctccaggattcatcaacacaaagagaaactttggtttgttcctgctaaggtggaggattcaggacattactattgcgtggtaagaaattcatcttactgcctcagaattaaaataagtgcaaaatttgtggagaatgagcctaacttatgttataatgcacaagccatatttaagcagaaactacccgttgcaggagacggaggacttgtgtgcccttatatggagttttttaaaaatgaaaataatgagttacctaaattacagtggtataaggattgcaaacctctacttcttgacaatatacactttagtggagtcaaagataggctcatcgtgatgaatgtggctgaaaagcatagagggaactatacttgtcatgcatcctacacatacttgggcaagcaatatcctattacccgggtaatagaatttattactctagaggaaaacaaacccacaaggcctgtgattgtgagcccagctaatgagacaatggaagtagacttgggatcccagatacaattgatctgtaatgtcaccggccagttgagtgacattgcttactggaagtggaatgggtcagtaattgatgaagatgacccagtgctaggggaagactattacagtgtggaaaatcctgcaaacaaaagaaggagtaccctcatcacagtgcttaatatatcggaaattgaaagtagattttataaacatccatttacctgttttgccaagaatacacatggtatagatgcagcatatatccagttaatatatccagtcactaatttccagaagcacatgattggtatatgtgtcacgttgacagtcataattgtgtgttctgttttcatctataaaatcttcaagattgacattgtgctttggtacagggattcctgctatgattttctcccaataaaagcttcagatggaaagacctatgacgcatatatactgtatccaaagactgttggggaagggtctacctctgactgtgatatttttgtgtttaaagtcttgcctgaggtcttggaaaaacagtgtggatataagctgttcatttatggaagggatgactacgttggggaagacattgttgaggtcattaatgaaaacgtaaagaaaagcagaagactgattatcattttagtcagagaaacatcaggcttcagctggctgggtggttcatctgaagagcaaatagccatgtataatgctcttgttcaggatggaattaaagttgtcctgcttgagctggagaaaatccaagactatgagaaaatgccagaatcgattaaattcattaagcagaaacatggggctatccgctggtcaggggactttacacagggaccacagtctgcaaagacaaggttctggaagaatgtcaggtaccacatgccagtccagcgacggtcaccttcatctaaacaccagttactgtcaccagccactaaggagaaactgcaaagagaggctcacgtgcctctcgggtagcatggagaagttgccaagagttctttaggtgcctcctgtcttatggcgttgcaggccaggttatgcctcatgctgacttgcagagttcatggaatgtaactatatcatcctttatccctgaggtcacctggaatcagattattaagggaataagccatgacgtcaatagcagcccagggcacttcagagtagagggcttgggaagatcttttaaaaaggcagtaggcccggtgtggtggctcacgcctataatcccagcactttgggaggctgaagtgggtggatcaccagaggtcaggagttcgagaccagcccagccaacatggcaaaaccccatctctactaaaaatacaaaaatgagctaggcatggtggcacacgcctgtaatcccagctacacctgaggctgaggcaggagaattgcttgaaccggggagacggaggttgcagtgagccgagtttgggccactgcactctagcctggcaacagagcaagactccgtctcaaaaaaagggcaataaatgccctctctgaatgtttgaactgccaagaaaaggcatggagacagcgaactagaagaaagggcaagaaggaaatagccaccgtctacagatggcttagttaagtcatccacagcccaagggcggggctatgccttgtctggggaccctgtagagtcactgaccctggagcggctctcctgagaggtgctgcaggcaaagtgagactgacacctcactgaggaagggagacatattcttggagaactttccatctgcttgtattttccatacacatccccagccagaagttagtgtccgaagaccgaattttattttacagagcttgaaaactcacttcaatgaacaaagggattctccaggattccaaagttttgaagtcatcttagctttccacaggagggagagaacttaaaaaagcaacagtagcagggaattgatccacttcttaatgctttcctccctggcatgaccatcctgtcctttgttattatcctgcattttacgtctttggaggaacagctccctagtggcttcctccgtctgcaatgtcccttgcacagcccacacatgaaccatccttcccatgatgccgctcttctgtcatcccgctcctgctgaaacacctcccaggggctccacctgttcaggagctgaagcccatgctttcccaccagcatgtcactcccagaccacctccctgccctgtcctccagcttcccctcgctgtcctgctgtgtgaattcccaggttggcctggtggccatgtcgcctgcccccagcactcctctgtctctgctcttgcctcgacccttcctcctcctttgcctaggaggccttctcgcattttctctagctgatcagaattttaccaaaattcagaacatcctccaattccacagtctctgggagactttccctaagaggcgacttcctctccagccttctctctctggtcaggcccactgcagagatggtggtgagcacatctgggaggctggtctccctccagctggaattgctgctctctgagggagaggctgtggtggctgtctctgtccctcactgccttccaggagcaatttgcacatgtaacatagatttatgtaatgctttatgtttaaaaacattccccaattatcttatttaatttttgcaattattctaattttatatatagagaaagtgacctattttttaaaaaaatcacactctaagttctattgaacctaggacttgagcctccatttctggcttctagtctggtgttctgagtacttgatttcaggtcaataacggtcccccctcactccacactggcacgtttgtgagaagaaatgacattttgctaggaagtgaccgagtctaggaatgcttttattcaagacaccaaattccaaacttctaaatgttggaattttcaaaaattgtgtttagattttatgaaaaactcttctactttcatctattctttccctagaggcaaacatttcttaaaatgtttcattttcattaaaaatgaaagccaaatttatatgccaccgattgcaggacacaagcacagttttaagagttgtatgaacatggagaggacttttggtttttatatttctcgtatttaatatgggtgaacaccaacttttatttggaataataattttcctcctaaacaaaaacacattgagtttaagtctctgactcttgcctttccacctgctttctcctgggcccgctttgcctgcttgaaggaacagtgctgttctggagctgctgttccaacagacagggcctagctttcatttgacacacagactacagccagaagcccatggagcagggatgtcacgtcttgaaaagcctattagatgttttacaaatttaattttgcagattattttagtctgtcatccagaaaatgtgtcagcatgcatagtgctaagaaagcaagccaatttggaaacttaggttagtgacaaaattggccagagagtgggggtgatgatgaccaagaattacaagtagaatggcagctggaatttaaggagggacaagaatcaatggataagcgtgggtggaggaagatccaaacagaaaagtgcaaagttattccccatcttccaagggttgaattctggaggaagaagacacattcctagttccccgtgaacttcctttgacttattgtccccactaaaacaaaacaaaaaacttttaatgccttccacattaattagattttcttgcagtttttttatggcatttttttaaagatgccctaagtgttgaagaagagtttgcaaatgcaacaaaatatttaattaccggttgttaaaactggtttagcacaatttatattttccctctcttgcctttcttatttgcaataaaaggtattgagccattttttaaatgacatttttgataaattatgtttgtactagttgatgaaggagttttttttaacctgtttatataattttgcagcagaagccaaattttttgtatattaaagcaccaaattcatgtacagcatgcatcacggatcaatagactgtacttattttccaataaaattttcaaactttgtactgttaaa

SEQ ID NO: 1654 - DNA, 2499 bp, Homo sapiens; identical to SEQ ID NO: 1426

SEQ ID NO: 1655 - DNA, 660 bp, Homo sapiens; identical to SEQ ID NO: 1425

SEQ ID NO: 1656 - DNA, 73 bp, Homo sapiens; identical to SEQ ID NO: 1428

SEQ ID NO: 1657 - DNA, 2278 bp, Homo sapiens; identical to SEQ ID NO: 1427

SEQ ID NO: 1658 - DNA, 1940 bp, Homo sapiens; identical to SEQ ID NO: 681

SEQ ID NO: 1659 - DNA, 3353 bp, Homo sapiens; identical to SEQ ID NO: 1430

SEQ ID NO: 1660 - DNA, 4286 bp, Homo sapiens; identical to SEQ ID NO: 1429

SEQ ID NO: 1661 - DNA, 782 bp, Homo sapiens; identical to SEQ ID NO: 704

SEQ ID NO: 1662 - DNA, 1944 bp, Homo sapiens; identical to SEQ ID NO: 730

SEQ ID NO: 1663 - DNA, 1743 bp, Homo sapiens; identical to SEQ ID NO: 691

SEQ ID NO: 1664 - DNA, 2672 bp, Homo sapiens; identical to SEQ ID NO: 728

SEQ ID NO: 1665 - DNA, 781 bp, Homo sapiens; identical to SEQ ID NO: 773

SEQ ID NO: 1666 - DNA, 2895 bp, Homo sapiens; identical to SEQ ID NO: 705

SEQ ID NO: 1667 - DNA, 1393 bp, Homo sapiens
agccctttgtttatggcctgatctagctaaggcttctagacttcaggagcttaagaatcgtccggagggctgggcgtggcggtgcaggcctgtagtcccacccactccgaaggctgcggagggaggatcaacttgagtctgggaactcagccaggaattcaagaccagcctgggcaacacagtgaggccccctacccacatcctctccgtccccgcaatctccttccatcccagggtgttgctgaaaatgtcagatgcaaatttggatagcagcaagaagaatttcttggagggggaagtagatgatgaggaaagtgtgattttgacactggtgccagttaaagatgacgcaaatatggaacaaatggaaccaagcgtttcttcaacttctgatgtcaaactggagaagcctaagaaatacaatccaggtcatctacttcaaacaaatgagcaatttacagctccacaaaaagctagatgcaaaataccagcccttcccttgccgaccattttgcctcccattaataaggtgtgtcgggacactttgcgggactggtgtcaacaactcggtttgagtactaatggcaagaaaatcgaagtttatctgaggcttcataggcatgcttaccctgaacaacggcaagatatgcctgaaatgtcacaagagaccagattacagcgatgttcgaggaaacgcaaggcagtgaccaagagagcaaggcttcagagaagttatgagatgaatgagagagcagaagagaccaatacagttgaagtgataacttcagcaccgggagccatgttggcatcatgggcaagaattgctgcaagagctgttcagcctaaggctttgaattcatgttccattcctgtttctgttgaggcctttttgatgcaagcctctggcgtcaggtggtgtgtggtccatggcagacttctctcggcagacacaaagggttgggtacgcctgcagtttcatgcaggtcaggcctgggtgcctaccactcacaggaggatgatttctctcttcttgttacctgcctgcattttcccatccccaggcatagaagataatatgttatgccccgactgtgctaagaggaataagaagatgatgaaaagattaatgacagtagagaagtagcagcaacctgtttgaatacaatgtactaaaggagggatgtactttcagatcatgtaacctattacgaaggagtggaagaggagacaatttgaatgaatcctcatgatctacaaaacaaaatcatagtgactaggactccacagtgaagatggttgactagtgacacagccccatctaaagaatccctttctgtatgtctgaaaacccattaaaataaagtcactgcaattggccttgtaaaaaaaaaaa

SEQ ID NO: 1668 - DNA, 2646 bp, Homo sapiens; identical to SEQ ID NO: 674

SEQ ID NO: 1669 - DNA, 1538 bp, Homo sapiens; identical to SEQ ID NO: 695

SEQ ID NO: 1670 - DNA, 5140 bp, Homo sapiens; identical to SEQ ID NO: 699

SEQ ID NO: 1671 - DNA, 1779 bp, Homo sapiens; identical to SEQ ID NO: 698

SEQ ID NO: 1672 - DNA, 3189 bp, Homo sapiens; identical to SEQ ID NO: 1468

SEQ ID NO: 1673 - DNA, 1077 bp, Homo sapiens; identical to SEQ ID NO: 700

SEQ ID NO: 1674 - DNA, 1017 bp, Homo sapiens
gagtcagtgtcagcccgaaggctgaaggaaaaagagcaacagatccagggagcattcacctgccctgtctccaaacagccttgtgcctcacctacccccaacctcccagagggagcagctatttaaggggagcaggagtgcagaacaaacaagacggcctggggatacaactctggagtcctctgagagagccaccaaggaggagcaggggagcgacggccggggcagaagttgagaccacccagcagaggagctaggccagtccatctgcatttgtcacccaagaactcttaccatgaagaccctcctactgttggcagtgatcatgatctttggcctactgcaggcccatgggaatttggtgaatttccacagaatgatcaagttgacgacaggaaaggaagccgcactcagttatggcttctacggctgccactgtggcgtgggtggcagaggatcccccaaggatgcaacggatcgctgctgtgtcactcatgactgttgctacaaacgtctggagaaacgtggatgtggcaccaaatttctgagctacaagtttagcaactcggggagcagaatcacctgtgcaaaacaggactcctgcagaagtcaactgtgtgagtgtgataaggctgctgccacctgttttgctagaaacaagacgacctacaataaaaagtaccagtactattccaataaacactgcagagggagcacccctcgttgctgagtcccctcttccctggaaaccttccacccagtgctgaatttccctctctcataccctccctccctaccctaaccaagttccttggccatgcagaaagcatccctcacccatcctagaggccaggcaggagcccttctatacccacccagaatgagacatccagcagatttccagccttctactgctctcctccacctcaactccgtgcttaaccaaagaagctgtactccggggggtctcttctgaataaagcaattagcaaatcatgtaaaaaaaaaaaaaaaaaa

SEQ ID NO: 1675 - DNA, 2221 bp, Homo sapiens; identical to SEQ ID NO: 678

SEQ ID NO: 1676 - DNA, 1743 bp, Homo sapiens; identical to SEQ ID NO: 691

SEQ ID NO: 1677 - DNA, 8228 bp, Homo sapiens; identical to SEQ ID NO: 768

SEQ ID NO: 1678 - DNA, 1136 bp, Homo sapiens; identical to SEQ ID NO: 1435

SEQ ID NO: 1679 - DNA, 1852 bp, Homo sapiens; identical to SEQ ID NO: 713

SEQ ID NO: 1680 - DNA, 3054 bp, Homo sapiens
attggctgaggccgataccacgcgccccgatacccggcgcaggagccacctccctgagccccgcggaccacgcctcagtccgcctgcgctcctcagcctgacggtccgcctttcggggctcctcagccttgtcacccgctcttggttttccttttctcttcatctttggctcctttgaccactcgaagccgcgcagcgggttccagcggacctcacagcagccccagaagtggtgcgccaagcacagcctctgctcctcctggagccggtcgggaactgctgcctgccgccatcatgtctactgcaaatcctgaaactccaaactcaaccatctccagagaggccagcacccagtcctcatcagctgcaaccagccaaggctatattttaccagaaggcaaaatcatgccaaacactgtttttgttggaggaattgatgttaggatggatgaaactgagattagaagcttctttgctagatatggttcagtgaaagaagtgaagataatcactgatcgaactggtgtgtccaaaggctatggatttgtttcattttttaatgacgtggatgtgcagaagatagtagaatcacagataaatttccatggtaaaaagctgaagctgggccctgcaatcaggaaacaaaatttatgtgcttatcatgtgcagccacgtcctttggtttttaatcatcctcctccaccacagtttcagaatgtctggactaatccaaacactgaaacttatatgcagcccacaaccacgatgaatcctataactcagtatgttcaggcatatcctacttacccaaattcaccagttcaggtcatcactggatatcagttgcctgtatataattatcagatgccaccacagtggcctgttggggagcaaaggagctatgttgtacctccggcttattcagctgttaactaccactgtaatgaagttgatccaggagctgaagttgtgccaaatgaatgttcagttcatgaagctactccaccctctggaaatggcccacaaaagaaatctgtggaccgaagcatacaaacggtggtatcttgtctgtttaatccagagaacagactgagaaactctgttgttactcaagatgactacttcaaggataaaagagtgcatcactttagaagaagtcgggcaatgcttaaatctgtttgatcctcctggcttatctagttacatgggaagttgctggttttgaatattaagctaaaaggtttccactattatagaaattctgaattttggtaaatcacactcaaactttgtgtataagttgtattattagactctctagttttatcttaaactgttcttcattagatgtttatttagaaactggttctgtgttgaaatatagttgaaagtaaaaaaataattgagactgaaagaaactaagatttatctgcaaggattttttaaaaattggcattttaagtgtttaaaagcaaatactgattttcaaaaaaatgtttttaaaaacctattttgaaaggtcagaattttgttggtctgaatacaaacatttcacttctccaacaagtacctgtgaacagtacagtatttacagtattgagctttgcatttatgatttctccagaaatttaccacaaaagcaaaatttttaaaactgcatttttaatcagtggaactcaatatatagttagctttattgaagtcttcttatctaaacccagcaaaacagattcaaagcgaacagtccaatcagtgggtcatatgtttattcaaaatattttatcttttagctagaatccacacatatatatcctatttgattagggtagtaattaggataactaaaattctgggcctaattttttaaagaatccaagacaaactaaactttactaggtacataagcttctcaatgagtcaccattcttcttttttgtaaaaacttttttctttgaaatgctaaacttggctgtatgtcaaattgtgcaaaatattggtattaaagaatgctgcaacttttttatgtctcttagaggttaatcagagtatctgaagggaattgtttttataaaaacattgaaatattagttacttgctataaatagatttagtctgttatatttccttttgtaaagtaaaatatgtccagaagagtcaaagtagttagttttggttatttctaaaccacaaaagttgtttaataagtatatcttaagaatgtgctagagttaaaagttagcattgtttctagattagctggtgtcttcattttacattgtgacaaacagctagagcatcagagcccttttgctataccacagtctttcgtttccagcctttgtcactagtctttgaggaggtttgctcctagaactggtgatataaagaatgaaagtagctgtatgagcagagcagttcaagggccaaaccctggaacggtagcaatgggatataatacctttctaagggaaaaagttgtatcagtaccatttgatctgccatggacatgagtttaaagcggctttctggcccttctttcagtgacttcttccctaaaatgtagaaattctaacttaatgtagttactgtgagccatattactagtgccccctagggtctataattccttaaaattttcattctgaatctgaaggagagagtcttttaactttagaattcccaagagggctttattacacctcagaaattgaaagcactatgaatttgtccatttaaaaatgatctgtagtttttttggtgctataacattctgacacatatcattctgtgattaaatctccagcttactataaatgatatctatattctaaagagctacttctaattattccaatatgaccttaaggaaaagtaagggaataaatttttgtctttgttggagtgaagcatttaaaagagtaagggtaaaaaagataaagtcctgaacctttcaaaatggaaaattaattctaaacttagaaatatgcttctgcctattgctgatactgtctttgcatacatgaataaaaataaagtttttttcttcaaaaaaaa

SEQ ID NO: 1681 - DNA, 3280 bp, Homo sapiens; identical to SEQ ID NO: 746

SEQ ID NO: 1682 - DNA, 2520 bp, Homo sapiens; identical to SEQ ID NO: 714

SEQ ID NO: 1683 - DNA, 1599 bp, Homo sapiens; identical to SEQ ID NO: 398

SEQ ID NO: 1684 - DNA, 2858 bp, Homo sapiens; identical to SEQ ID NO: 1464

SEQ ID NO: 1685 - DNA, 5260 bp, Homo sapiens; identical to SEQ ID NO: 718

SEQ ID NO: 1686 - DNA, 8463 bp, Homo sapiens; identical to SEQ ID NO: 702

SEQ ID NO: 1687 - DNA, 2974 bp, Homo sapiens; identical to SEQ ID NO: 680

SEQ ID NO: 1688 - DNA, 2098 bp, Homo sapiens; identical to SEQ ID NO: 394

SEQ ID NO: 1689 - DNA, 3980 bp, Homo sapiens; identical to SEQ ID NO: 675

SEQ ID NO: 1690 - DNA, 3989 bp, Homo sapiens
ggaacatcggcggctgcccgggtgacttggttatatgtcacagaataacattcgagaatgggacatggaatgaggcgacggccccagcaagccccagcagccccagccccagccccaggcccagcagcagcagcagcagcccctgctctcccgccgcccggagaggctctgcagccatgaagccaaccgtcccgagccttcaataccccaggtcccaaactacaggctgtcgatgacgatcccagactggctccaggcgatccagaattacatgaagaccctacaatataatcacacagggacccagttctttgaaattaggaaaatgagaccgctgagtgggttaatggaaacagcaaaagaaatgacccgagagtccttgcctatcaaatgccttgaagctgtcatcctgggcatctacttaaccaatgggcagccttccattgagcggttccccatcagctttaaaacctacttctcaggaaactactttcaccacgttgtgctggggatttactgcaatggccgctatggctcattgggcatgagccgcagggctgagctgatggacaagccattgacttttcggactctgagtgacctcatctttgactttgaggactcttacaagaaatacctgcacacagtcaagaaggtcaagattgggctgtacgtcccccatgagcctcatagcttccagcccattgagtggaagcagctggtcctcaacgtctcaaagatgctgagggctgacataaggaaggagctggagaaatatgccagggacatgagaatgaagatcctgaaacctgcaagtgcccactctccgacccaagtgagaagccggggaaaatccctgtcccccagaaggagacaggcaagccccccgaggaggctcggccggcgagagaagtcgcctgcactgcctgaaaagaaggtggctgatctgagcactctgaatgaagtgggctatcaaatccgaatttagccaagccataccggccagcaagagggtttctgtggtgcttctctctgcactttacccagcatcttcaggaggaactgcaactatttattaagaacttgtgaattttatttttaaggattcacctggaaatagaatctgagtgggtggtaaccattagctttaaaaaattcactaaaaggcaccatgaaaaggctgaagtaataagccccactggggttggactatgtccctcactcaagatcttaaggataaccgtaactgaagttttatatttttccatttacctactttcttttacttgctttgaacattatgcctcaccaatagtaaatgttcatgaaataatctcttgaacttttggtatagtaaggtaactctaacagtattactgtctttttcagcaataacagaaagcaaaaatgggtgggttttttttaagcagttattacctcagcattttgacatcagatatgcaaacttaatggcgttttgtttttttatattctatttgtattctttccccagtatttcccatggggatctccacaagtttggagttttttcctggtgcacacacgtgaggagatttaaggtactatatgcaagtgttttactaaaaagcactgaaattcttctggcaatacaagaaccattttcaggatcttggagttacttccttcttaatctttcttaaagcattcactgatgtttttgttttttcaaaatgaaacaaaaatatcacattgagaagctagtctatgttctgtcactaacatttaaactttgcagactctaacaaaaagcacaagaggtcacgtactattatacaaatttagcggtactggatttacctctgacattaacacactcaggcagagaccaggagtgatcagcaggtcttcagaaccaaaaaacctttctgttcacatttcatctgatttttaaactgaggcaggctttgattcttctgaaggatgccaagaatcaaactaagggaggactcactgttaaagatgtgttctgatgtcttatattaagaccaaatgtgacatgatgtgattatcttccagtactttgcttttaggtaccatttcatgacattttaggaatgagtattggaaaatataaagaattagaaaagcagcactttttttttaatggaaaagtcttcggtccagtgttacaccttatagtgtaattcagtccctaagcacagaatgaatgtctggcctgcatatggtagttacagtgtaacctctggctgcagaccacacaggacaaccctaacagcctagtcttgtatggtgtaaatatcaagagtacagcttcaatttcatttgctttatcttagcaacaatgccaactcaggagagcagacggccgatttcagtgaagtctggtagtcaacagatgttatttcagtctcagtgcatctcctctggctttctttgactgaaggtgtttataggaaggaagttaaaaaaaaaaaaagctcattgagattctttaccaattctttacaagatttctgggggtgacagggaaagcaaaaggacttcaaagcaaaagggtgcacaagagcttacttcaccctgaaaatcagtattattaatgaaaagtactgttttcttaaagaagtcgaatgtcctttagatgaacaagaccaagtatacatctccattagattaaaatgtagcacagggttaaaaattatcagtttaatctctttaagaacagtattatcagagtttaaaatgagttagctctgtttatctacacacagcaaacccattcgcagcctcttggccacatgtattcagatgtttgaaatagtgaatcatttcattttcattctaaaacaatactgacttagccatataccttctgtttgtcaatctgaaacttgcttacatctaataagtagacctcttataacactgcaaccattctaagagttggaatttatttttgccaagtattaagtactgttacatctaaaatacagaatgtcaaatggttgcatagcttgtttcccacaacaaggaggaaaagaacaggaatacaaactctgtaatatgctgataaagaagccttagaactgccaactggcttgatggttcaattagtaagctaatttctcccacacccgctccttgatttttagactaattttcccaaagcaaggtttagtcacacaaacttgaaagtacatttaaaatgttcttagttgtcatcctacttttattgcctatggaatatgctaatttctaaaaaaaatacgggagaggcaccaaacccctaaattctagtgcaataatttaaaaaacaaaaaacaaaacaaaacaaaaaacatgttatatgcacccccctcccaaagctgattttaagactggctagaattcaaaatataaaaaataaaactatgaagtgatttgaaatcggttttaaaaagttgttagtgcaagagaaattttatgtttaagccatcatggcaatatatgcaaagtttaaatgaatgacagaaatcttgattttagactgtatgttgtgctgttttgagtacactttatttcggagatatttagtattttctatacactctgaaatcatgagcatttcactttttctaagtcaattatttcataaggattttattaatagatattggtaaatagaactttggaaatcttaattcagaattcttactatacctgagtcttttgtaagctatagttttatgtacaaccttgtacagtttttttgacatacaattcagaactttgtttattctcttggactttgttctggccaatacattttttttaaatctttaagaagaactgtgattgttttagtgggtatttttctaattaaatgaaaacttgtataatggtattttagagaatgccagtaagtgcatgtttcaagttaatgtttttctcatcacttgtatgtttctaacacagcatgggactttaataaaaccatcctggaaacttaa

SEQ ID NO: 1691 - DNA, 5049 bp, Homo sapiens; identical to SEQ ID NO: 1460

SEQ ID NO: 1692 - DNA, 3476 bp, Homo sapiens; identical to SEQ ID NO: 715

SEQ ID NO: 1693 - DNA, 368 bp, Homo sapiens; identical to SEQ ID NO: 716

SEQ ID NO: 1694 - DNA, 2098 bp, Homo sapiens; identical to SEQ ID NO: 394

SEQ ID NO: 1695 - DNA, 2234 bp, Homo sapiens; identical to SEQ ID NO: 797

SEQ ID NO: 1696 - DNA, 4353 bp, Homo sapiens
acccactcccgctgccccgtccggcccgcgccgcttcctcgcagcagctgctcccggctccgcggccgcagcccgcgtggacgctccgagcgccccccgacggacgggaccggctccctggcggtcgggcgagcgggcggcaacgctgcccggccggcagcgctggggttaagtggcccaagtaaacctagctcggcgatcggcgccggagattcgcgagcccagcgccctgcacggccgccagccggcctcccgccagccagccccgacccgcggctccgccgcccagccgcgccccagccagccctgcggcaggaaagcatgaagggagacaccaggcatctcaatggagaggaggacgccggcgggagggaagactcgatcctcgtcaacggggcctgcagcgaccagtcctccgactcgcccccaatcctggaggctatccgcaccccggagatcagaggccgaagatcaagctcgcgactctccaagagggaggtgtccagtctgctaagctacacacaggacttgacaggcgatggcgacggggaagatggggatggctctgacaccccagtcatgccaaagctcttccgggaaaccaggactcgttcagaaagcccagctgtccgaactcgaaataacaacagtgtctccagccgggagaggcacaggccttccccacgttccacccgaggccggcagggccgcaaccatgtggacgagtcccccgtggagttcccggctaccaggtccctgagacggcgggcaacagcatcggcaggaacgccatggccgtcccctcccagctcttaccttaccatcgacctcacagacgacacagaggacacacatgggacgccccagagcagcagtaccccctacgcccgcctagcccaggacagccagcaggggggcatggagtccccgcaggtggaggcagacagtggagatggagacagttcagagtatcaggatgggaaggagtttggaataggggacctcgtgtggggaaagatcaagggcttctcctggtggcccgccatggtggtgtcttggaaggccacctccaagcgacaggctatgtctggcatgcggtgggtccagtggtttggcgatggcaagttctccgaggtctctgcagacaaactggtggcactggggctgttcagccagcactttaatttggccaccttcaataagctcgtctcctatcgaaaagccatgtaccatgctctggagaaagctagggtgcgagctggcaagaccttccccagcagccctggagactcattggaggaccagctgaagcccatgttggagtgggcccacgggggcttcaagcccactgggatcgagggcctcaaacccaacaacacgcaaccagtggttaataagtcgaaggtgcgtcgtgcaggcagtaggaaattagaatcaaggaaatacgagaacaagactcgaagacgcacagctgacgactcagccacctctgactactgccccgcacccaagcgcctcaagacaaattgctataacaacggcaaagaccgaggggatgaagatcagagccgagaacaaatggcttcagatgttgccaacaacaagagcagcctggaagatggctgtttgtcttgtggcaggaaaaaccccgtgtccttccaccctctctttgagggggggctctgtcagacatgccgggatcgcttccttgagctgttttacatgtatgatgacgatggctatcagtcttactgcactgtgtgctgcgagggccgagagctgctgctttgcagcaacacgagctgctgccggtgtttctgtgtggagtgcctggaggtgctggtgggcacaggcacagcggccgaggccaagcttcaggagccctggagctgttacatgtgtctcccgcagcgctgtcatggcgtcctgcggcgccggaaggactggaacgtgcgcctgcaggccttcttcaccagtgacacggggcttgaatatgaagcccccaagctgtaccctgccattcccgcagcccgaaggcggcccattcgagtcctgtcattgtttgatggcatcgcgacaggctacctagtcctcaaagagttgggcataaaggtaggaaagtacgtcgcttctgaagtgtgtgaggagtccattgctgttggaaccgtgaagcacgaggggaatatcaaatacgtgaacgacgtgaggaacatcacaaagaaaaatattgaagaatggggcccatttgacttggtgattggcggaagcccatgcaacgatctctcaaatgtgaatccagccaggaaaggcctgtatgagggtacaggccggctcttcttcgaattttaccacctgctgaattactcacgccccaaggagggtgatgaccggccgttcttctggatgtttgagaatgttgtagccatgaaggttggcgacaagagggacatctcacggttcctggagtgtaatccagtgatgattgatgccatcaaagtttctgctgctcacagggcccgatacttctggggcaacctacccgggatgaacaggcccgtgatagcatcaaagaatgataaactcgagctgcaggactgcttggaatacaataggatagccaagttaaagaaagtacagacaataaccaccaagtcgaactcgatcaaacaggggaaaaaccaacttttccctgttgtcatgaatggcaaagaagatgttttgtggtgcactgagctcgaaaggatctttggctttcctgtgcactacacagacgtgtccaacatgggccgtggtgcccgccagaagctgctgggaaggtcctggagcgtgcctgtcatccgacacctcttcgcccctctgaaggactactttgcatgtgaatagttccagccaggccccaagcccactggggtgtgtggcagagccaggacccaggaggtgtgattcctgaaggcatccccaggccctgctcttcctcagctgtgtgggtcataccgtgtacctcagttccctcttgctcagtgggggcagagccacctgactcttgcaggggtagcctgaggtgccgcctccttgtgcacaaatcagacctggctgcttggagcagcctaacacggtgctcattttttcttctcctaaaactttaaaacttgaagtaggtagcaacgtggctttttttttttcccttcctgggtctaccactcagagaaacaatggctaagataccaaaaccacagtgccgacagctctccaatactcaggttaatgctgaaaaatcatccaagacagttattgcaagagtttaatttttgaaaactggctactgctctgtgtttacagacgtgtgcagttgtaggcatgtagctacaggacatttttaagggcccaggatcgttttttcccagggcaagcagaagagaaaatgttgtatatgtcttttacccggcacattccccttgcctaaatacaagggctggagtctgcacgggacctattagagtattttccacaatgatgatgatttcagcagggatgacgtcatcatcacattcagggctattttttcccccacaaacccaagggcaggggccactcttagctaaatccctccccgtgactgcaatagaaccctctggggagctcaggaaggggtgtgctgagttctataatataagctgccatatattttgtagacaagtatggctcctccatatctccctcttccctaggagaggagtgtgaagcaaggagcttagataagacaccccctcaaacccattccctctccaggagacctaccctccacaggcacaggtccccagatgagaagtctgctaccctcatttctcatctttttactaaactcagaggcagtgacagcagtcagggacagacatacatttctcataccttccccacatctgagagatgacagggaaaactgcaaagctcggtgctccctttggagattttttaatccttttttattccataagaagtcgtttttagggagaacgggaattcagacaagctgcatttcagaaatgctgtcataatggtttttaacaccttttactcttcttactggtgctattttgtagaataaggaacaacgttgacaagttttgtggggctttttatacactttttaaaatctcaaacttctatttttatgtttaacgttttcattaaaattttttttgtaactggagccacgacgtaacaaatatggggaaaaaactgtgccttgtttcaacagtttttgctaatttttaggctgaaagatgacggatgcctagagtttaccttatgtttaattaaaatcagtatttgtctaaaaaaaaaaaaaaaaaa

SEQ ID NO: 1697 - DNA, 3721 bp, Homo sapiens; identical to SEQ ID NO: 737

SEQ ID NO: 1698 - DNA, 2105 bp, Homo sapiens
gtctgtgacaagcagggaacaaggcaacggacggcgcaacccagccccggctgacggacgctggcgactcagacatggacagtagctgccacaacgcgactaccaaaatgttagcgactgctccagctcggggcaacatgatgagcacgtccaaacccttggctttctccattgaacgaatcatggcgcgcaccccagagcccaaggccctgccagtcccccacttcctgcagggagccttacccaagggggaacccaagcactctctgcatctcaactcgtcgatcccctgcatgatccccttcgtgcctgtggcctacgacacgagccccaaggcaggagtgacgggctccgagccgcggaaggccagtctggaggccccggcggcgcccgcggcggtgccctcggctcccgcattcagctgcagcgacctgctcaactgcgcactgagtctcaagggcgacctggcccgcgacgcgctgccgctgcagcagtacaagctggtaaggccgcgtgtggtcaaccactcttcattccacgccatgggcgccttgtgctacctgaaccgaggtgacggcccatgccacccggcagccggcgtgaacatccacccggtggcctcctacttcctcagttcccctttgcacccgcagccaaaaacgtatttagccgaaaggaataaactggtggtcccggcggtggagaaatacccttctggagtagctttcaaagacctgtcccaggctcagctgcagcattacatgaaagaaagcgcccagcttctgtcggaaaaaatcgcgttcaaaacctcggatttcagccgaggctctcctaatgccaagcccaaagttttcacttgcgaagtgtgtggaaaggtctttaatgcgcactataacttaacccgtcacatgccagtgcacacaggagccagacccttcgtttgcaaagtgtgcggaaaaggtttcaggcaagcaagcaccctgtgcaggcacaagatcattcacacgcaggaaaaacctcacaaatgtaaccagtgtggcaaagcatttaatagaagttccactttaaacactcatacccgaatacacgcgggctacaaaccgtttgtgtgtgaattctgtggcaaagggtttcatcaaaaagggaattacaaaaaccacaagttgacccacagcggggagaagcagttcaagtgcaatatctgcaacaaggctttccaccaggtttacaacctcaccttccacatgcacacccacaacgacaagaagcctttcacctgccccacgtgcggcaagggtttctgcaggaactttgacctcaagaagcatgtccgcaagctgcacgacagcagcctggggctggcccgcacgccagctggcgaaccaggcactgaaccgccgcccccgctaccgcagcagccgccgatgacgctgcctcctctgcagccgccgctgccaaccccggggcccctgcagcccgggctccaccagggccaccagtgatcgaggctaagggtcctcccagcctcagccgtgcccccacgctgaggcagcggcagactagagctcctggtccgagttcgtctgcagaccccagggcatgttgggccccacacttcagggccgaccagaagcctctgcatcccctggcctttcgcctcttgcatgcacctgctaaatggttttgtgtattatattctatataggcactaacaattatgaaaaatttggagggttttgcttgttttctgtttttctttttctttttttttaatttggaaagacttttcatcttgggtggagagatggtgtttattttgttttgttttgtttaaacaaatttctgctatatttattgagatctgtattattctacccgggaatgctgcatcattttaattttattattgtatatatttccattgtgttgattctccggtctcaagatgtctgctggatgttgatcatttcctctttccctgaagtaacaaaacactgtgtgtatgtcatatatacacgcatagatgtgtgcgcccataggggtacattccacattcgtgagcacacacccatacacattagataagggtggttcattatggatga

SEQ ID NO: 1699 - DNA, 348 bp, Homo sapiens
ttctctgagatctgcttttactgaagtggatcaatgatgaaactagccaaatctgagcatcagaaggctttccggtctacctgatgcatgatctctacagttctgagaagcagaactataaaacaatgtaaaacaataagggcatatgtctggtgtgtgtgtggggggtgtgtgtgtgtgtgcacgcacacgtgtttataaaggtagcagttgtaggaatgaatgagattgggggtgagggggtgcatatgtatgtctatgaaagcctaatcatttctgggcaatgatgtaaaggttttacgactgacctttgtaactatgaagttttctacacttgacctgagctca

SEQ ID NO: 1700 - DNA, 520 bp, Homo sapiens; identical to SEQ ID NO: 706

SEQ ID NO: 1701 - DNA, 2195 bp, Homo sapiens; identical to SEQ ID NO: 1463

SEQ ID NO: 1702 - DNA, 7442 bp, Homo sapiens; identical to SEQ ID NO: 754

SEQ ID NO: 1703 - DNA, 2379 bp, Homo sapiens; identical to SEQ ID NO: 734

SEQ ID NO: 1704 - DNA, 3337 bp, Homo sapiens
gaaacacaggctggaagcaagacctgacctgagggagttcttcagccttaacctaaggtctcatactcggagcactatgacatcgccccagctagagtggactctgcagacccttctggagcagctgaacgaggatgaattaaagagtttcaaatcccttttatgggcttttcccctcgaagacgtgctacagaagaccccatggtctgaggtggaagaggctgatggcaagaaactggcagaaattctggtcaacacctcctcagaaaattggataaggaatgcgactgtgaacatcttggaagagatgaatctcacggaattgtgtaagatggcaaaggctgagatgatggaggacggacaggtgcaagaaatagataatcctgagctgggagatgcagaagaagactcggagttagcaaagccaggtgaaaaggaaggatggagaaattcaatggagaaacagtctttggtctggaagaacaccttttggcaaggagacattgacaatttccatgacgacgtcactctgagaaaccaacggttcattccattcttgaatcccagaacacccaggaagctaacaccttacacggtggtgctgcacggccccgcaggcgtggggaaaaccacgctggccaaaaagtgtatgctggactggacagactgcaacctcagcccgacgctcagatacgcgttctacctcagctgcaaggagctcagccgcatgggcccctgcagttttgcagagctgatctccaaagactggcctgaattgcaggatgacattccaagcatcctagcccaagcacagagaatcctgttcgtggtcgatggccttgatgagctgaaagtcccacctggggcgctgatccaggacatctgcggggactgggagaagaagaagccggtgcccgtcctcctggggagtttgctgaagaggaagatgttacccagggcagccttgctggtcaccacgcggcccagggcactgagggacctccagctcctggcgcagcagccgatctacgtaagggtggagggcttcctggaggaggacaggagggcctatttcctgagacactttggagacgaggaccaagccatgcgtgcctttgagctaatgaggagcaacgcggccctgttccagctgggctcggcccccgcggtgtgctggattgtgtgcacgactctgaagctgcagatggagaagggggaggacccggtccccacctgcctcacccgcacggggctgttcctgcgtttcctctgcagccggttcccgcagggcgcacagctgcggggcgcgctgcggacgctgagcctcctggccgcgcagggcctgtgggcgcagatgtccgtgttccaccgagaggacctggaaaggctcggggtgcaggagtccgacctccgtctgttcctggacggagacatcctccgccaggacagagtctccaaaggctgctactccttcatccacctcagcttccagcagtttctcactgccctgttctacgccctggagaaggaggagggggaggacagggacggccacgcctgggacatcggggacgtacagaagctgctttccggagaagaaagactcaagaaccccgacctgattcaagtaggacacttcttattcggcctcgctaacgagaagagagccaaggagttggaggccacttttggctgccggatgtcaccggacatcaaacaggaattgctgcaatgcaaagcacatcttcatgcaaataagcccttatccgtgaccgacctgaaggaggtcttgggctgcctgtatgagtctcaggaggaggagctggcgaaggtggtggtggccccgttcaaggaaatttctattcacctgacaaatacttctgaagtgatgcattgttccttcagcctgaagcattgtcaagacttgcagaaactctcactgcaggtagcaaagggggtgttcctggagaattacatggattttgaactggacattgaatttgaaagctcaaacagcaacctcaagtttctggaagtgaaacaaagcttcctgagtgactcttctgtgcggattctttgtgaccacgtaacccgtagcacctgtcatctgcagaaagtggagattaaaaacgtcacccctgacaccgcgtaccgggacttctgtcttgctttcattgggaagaagaccctcacgcacctgaccctggcagggcacatcgagtgggaacgcacgatgatgctgatgctgtgtgacctgctcagaaatcataaatgcaacctgcagtacctgaggttgggaggtcactgtgccaccccggagcagtgggctgaattcttctatgtcctcaaagccaaccagtccctgaagcacctgcgtctctcagccaatgtgctcctggatgagggtgccatgttgctgtacaagaccatgacacgcccaaaacacttcctgcagatgttgtcgttggaaaactgtcgtcttacagaagccagttgcaaggaccttgctgctgtcttggttgtcagcaagaagctgacacacctgtgcttggccaagaaccccattggggatacaggggtgaagtttctgtgtgagggcttgagttaccctgattgtaaactgcagaccttggtgttacagcaatgcagcataaccaagcttggctgtagatatctctcagaggcgctccaagaagcctgcagcctcacaaacctggacttgagtatcaaccagatagctcgtggattgtggattctctgtcaggcattagagaatccaaactgtaacctaaaacacctacgcctctggagctgctccctcatgcctttctattgtcagcatcttggatctgctctcctcagcaatcagaagcttgaaactctggacctgggccagaatcatttgtggaagagtggcataattaagctctttggggttctaagacaaagaactggatccttgaagatactcaggttgaagacctatgaaactaatttggaaatcaagaagctgttggaggaagtgaaagaaaagaatcccaagctgactattgattgcaatgcttccggggcaacggcacctccgtgctgtgactttttttgctgagcagcctgggatcgctctacgaattacacaggaagcgggattcgggtctctaagatgtcttatgaatgcaggtcagagggtcacatgttaacactagagtctgtcgagaggtaggatttgacactggttttctcactatttttgggagattctgcacgagtcacgcacccccttcacatgacgctatgtactttctcacagggataataaagttagagcactctcgttgca

SEQ ID NO: 1705 - DNA, 4510 bp, Homo sapiens; identical to SEQ ID NO: 1452

SEQ ID NO: 1706 - DNA, 4105 bp, Homo sapiens; identical to SEQ ID NO: 690

SEQ ID NO: 1707 - DNA, 396 bp, Homo sapiens; identical to SEQ ID NO: 722

SEQ ID NO: 1708 - DNA, 1979 bp, Homo sapiens
ggagcctgagccctgcggaacctcggcgctcggccccaccccgcccgtacctgcacttatttattgttgttatttcttaccgcggagccccgcagtcgggtcctcccgcccgctcccgcgcagcgctagcattctccagtccctcagtcccttcccgcgcggtgcgccgcagccgaggcgatgcgcctcattcagaacatgtgcaccatcgccgagtaccccgcgccgggcaacgccgcggcctccgactgctgtgtgggcgccgccggccgccgcctggtcaagatcgccgtggtgggcgccagcggcgtgggcaagaccgcactggtggtccggttcctcaccaaacgattcatcggtgactatgaaagaaatgcaggtaatctctatactagacaagttcagatagaaggtgaaaccctggctcttcaggttcaagacactccaggtattcaggtccatgagaacagcctgagctgcagtgaacagctgaataggtgcattcgctgggcagatgctgtggtgatcgttttctccatcactgactacaagagctatgaactcatcagccagctccaccagcacgtgcagcagctacacctgggcacccggctgcctgtggtggtcgtggccaacaaagctgacctgttgcacatcaaacaggttgaccctcagcttggactgcagctagccagcatgctaggctgctcattctatgaagtgtctgtcagtgaaaattataatgatgtctacagcgccttccacgtcctctgtaaagaggtcagtcacaaacagcagcctagcagtacacccgagaagcgaagaacctccctcattcccaggcccaagtcacccaacatgcaggacctgaagaggaggtttaagcaagccctctctgccaaagtgaggactgtcacctccgtctgaagcaggaggagcactcaagggggtttggtcttcccaggaagagggcctgaggttctcctagtgcaggaacgttgaatattggcaatgattcctggttccagaaagggctggagcagaagggccaagagggcctgtggaactgctacagaaaaggaagtgttgttctgagcagggggacaggattgatgaggcttgaaagagcccactgagccactctctgaatatgtgaaatgtactctgtgtcttttcctttagagtggggagggggcataatcgtttcggtttctgcattcaactaccttgtaaatggtggtccgttgcagtttcaccaaatgtattgatgtgatttacagtgggaatgaaagaacagattaagcattgataggctttcttttttcccccttttttcttttttctcttttcttctttcttttcctctttttccccaagaggaagaattgcttttctcttaccagtatgatttgtaactctggaacactattcttacagaatgcctttctaacctgaaggatacccagatttctttctttatgtacaagatggaaaatcccctacccctcaaaaacaggttgagtttatgggccagaatattttgtataccagacattggtaagctctcatggtttacaggaaggctctggttccccctcacaggatgagcatgctcagttgggcgtgtgtggaggagctgtgaacttcacgctcttcaaccccagactttgactgtatagttttttgtttttttaactgttccatcaggaaaaaaatgtgtcagttgattttggtgtgacttgtgtaaatggttcatggcaatgacgttgggttgcttcctaggcctggctgagttgtgcctaagggtggctgaaatactaaaacacttatcttacagcaagtgaacaggggctacctgccacatcccctccacagatgcactttaaaaagccactcatgctttggcttaaactgtaattaatttattttatgtacaataaatcgcatttgaaaaagaaaaaaaaaaaaaaaaaaaaaaa

SEQ ID NO: 1709 - DNA, 3369 bp, Homo sapiens; identical to SEQ ID NO: 1440

SEQ ID NO: 1710 - DNA, 1536 bp, Homo sapiens
acagagcttcaaaaaaagagcgggacagggacaagcgtatctaagaggctgaacatgaatccacagatcagaaatccgatggagcggatgtatcgagacacattctacgacaactttgaaaacgaacccatcctctatggtcggagctacacttggctgtgctatgaagtgaaaataaagaggggccgctcaaatctcctttgggacacaggggtctttcgaggccaggtgtatttcaagcctcagtaccacgcagaaatgtgcttcctctcttggttctgtggcaaccagctgcctgcttacaagtgtttccagatcacctggtttgtatcctggaccccctgcccggactgtgtggcgaagctggccgaattcctgtctgagcaccccaatgtcaccctgaccatctctgccgcccgcctctactactactgggaaagagattaccgaagggcgctctgcaggctgagtcaggcaggagcccgcgtgacgatcatggactatgaagaatttgcatactgctgggaaaactttgtgtacaatgaaggtcagcaattcatgccttggtacaaattcgatgaaaattatgcattcctgcaccgcacgctaaaggagattctcagatacctgatggatccagacacattcactttcaactttaataatgaccctttggtccttcgacggcgccagacctacttgtgctatgaggtggagcgcctggacaatggcacctgggtcctgatggaccagcacatgggctttctatgcaacgaggctaagaatcttctctgtggcttttacggccgccatgcggagctgcgcttcttggacctggttccttctttgcagttggacccggcccagatctacagggtcacttggttcatctcctggagcccctgcttctcctggggctgtgccggggaagtgcgtgcgttccttcaggagaacacacacgtgagactgcgcatcttcgctgcccgcatctatgattacgaccccctatataaggaggcgctgcaaatgctgcgggatgctggggcccaagtctccatcatgacctacgatgagtttgagtactgctgggacacctttgtgtaccgccagggatgtcccttccagccctgggatggactagaggagcacagccaagccctgagtgggaggctgcgggccattctccagaatcagggaaactgaaggatgggcctcagtctctaaggaaggcagagacctgggttgagcagcagaataaaagatcttcttccaagaaatgcaaacagaccgttcaccaccatctccagctgctcacagacaccagcaaagcaatgtgctcctgatcaagtagattttttaaaaatcagagtcaattaattttaattgaaaatttctcttatgttccaagtgtacaagagtaagattatgctcaatattcccagaatagttttcaatgtattaatgaagtgattaattggctccatatttagactaataaaacattaagaatcttccataattgtttccacaaacact

SEQ ID NO: 1711 - DNA, 6463 bp, Homo sapiens
atcctgggctcccagctggagaggcggaggcagctccagggggctggaagtggaagcgcagcggcagaaggagagggagagagaaagagagagaggctaattaaaaaaggatactccgagggaagagagcaagggcggtgcgccgccaaggaccaactagcggcggagcttcgatcttgcctaggcgcggagagctcccaacctgggctggaaccttgcccagcacaggtggctgctacaccccatgtaaaaagcggaaaataaaatgaagattttccagcgcaagatgcggtactggttgcttccaccttttttggcaattgtttatttctgcaccattgtccaaggtcaagtggctccacccacaaggttaagatataatgtaatatctcatgacagtatacagatttcatggaaggctccaagagggaaatttggtggttacaaacttcttgtgactccaacttcaggtggaaaaactaaccagctgaatctgcagaacactgcaactaaagcaattattcaaggccttatgccagaccagaattacacagttcaaattattgcatacaataaagataaagaaagcaagccagctcaaggccaattcagaattaaagatttagaaaaaagaaaggatccaaagcccagagtcaaagttgtggacagaggaaatgggagtagaccatcttcaccagaagaagtgaaatttgtctgtcaaactccagcaattgctgacattgtaatcctggtcgatggttcatggagtattggaagattcaacttcagactggttcggcatttcttggaaaacctggttacagcattcgatgtgggctcagagaagacacgaattggtcttgcacagtatagtggtgaccccagaatagaatggcacttgaatgcatttagcacaaaagatgaagtgattgaagctgtccgaaacctcccatataaaggaggaaatacactaacaggtcttgctttgaactacatttttgaaaatagcttcaaaccagaagcaggatcaaggactggagtatccaaaattggcattttaatcacagatggaaaatcccaagatgacattattccaccatctagaaatcttcgtgagtctggtgtagaactgtttgccataggggtgaaaaacgcggatgtgaatgagctgcaggagatcgcctctgaaccagacagcactcatgtgtacaatgttgccgaattcgatctgatgcacacagttgtggagagtctgaccaggactctctgctctagagtggaagaacaggacagagaaattaaagcctcagcccatgccatcactgggccgcctacggagttgattacttctgaagtcactgccagaagctttatggttaactggactcatgccccaggaaatgtggaaaaatacagagttgtgtattatcctaccaggggtggaaaaccagacgaggtggtggtagatggaactgtatcttccacagtgttgaaaaacttgatgtctttaactgaatatcagatagcagtctttgcaatctatgcccacactgctagtgaaggcctacggggaactgaaactacacttgctttaccgatggcttctgaccttctactgtacgacgtgactgagaacagcatgcgagtcaaatgggatgcagtgcctggggcctcaggttacctgatcctttatgctcctctaacagagggcctggctggggatgaaaaagagatgaaaattggagagacccacacagatattgaattgagtgggttgttgcccaatacagaatacacagtcacagtttatgccatgtttggagaagaggccagtgatcctgttacgggacaagaaacaacattggctttaagtccaccaagaaacctgagaatctccaatgttggctctaacagtgctcgattaacctgggacccaacttcaagacagatcaatggttatcgaattgtatataacaatgcagatgggactgaaatcaatgaggttgaagtcgatcctattactaccttccctctgaagggcttgacacctctcacagagtatactattgctattttctccatctatgatgaaggacagtcagagcctctgactggagtttttaccaccgaggaagttccagcccagcaatacttagaaattgatgaggtgacgacagacagttttagggtgacctggcatcccctctcagctgatgaagggctacacaaattgatgtggattccagtctatggggggaagactgaggaggttgtcctgaaagaagagcaggactcacatgttattgaaggcctggagcccggtacggagtatgaagtttcactattggccgtacttgatgatggaagcgagagtgaggtggtgactgctgtcgggaccacacttgacagtttttggacagaaccagctacaaccatagtgcctaccacatctgtgacttcagttttccagacgggaatcagaaacctagttgtaggtgatgaaactacttctagcctgcgggtaaaatgggacatttctgacagcgatgtgcagcagtttagggtgacctacatgacagctcaaggggaccctgaggaagaagtcataggaacggttatggtgcctggaagccagaacaacctccttctgaagcctctgcttcctgatactgaatacaaagtcacagtgactcccatctacacggatggcgaaggcgtcagcgtctccgctcctggaaaaaccttaccatcctcggggccccagaacttgcgggtgtccgaggaatggtataaccggttgcgcattacgtgggaccccccatcttccccggtgaaaggctatagaattgtctacaaacctgtcagtgttcctggtccaacactggaaacgtttgtgggagctgacattaacaccatccttatcacaaacctcctcagcggaatggactacaatgtgaagatatttgcctcccaggcctcaggcttcagcgacgccctgacaggcatggtgaaaacattgttcttgggtgttaccaatctccaagccaaacatgttgaaatgaccagcttgtgtgcccactggcaggtacatcgccatgccacagcctatagggttgttatagaatccctccaggataggcaaaagcaagaatccactgtgggtggagggacaaccaggcattgcttctatggacttcagcctgattctgaatataaaatcagtgtttatacaaagctccaggagattgaaggacctagtgtgagcataatggaaaaaacacaatcacttcctacacgaccaccaacttttcctccaaccattccaccagcaaaagaagtatgtaaggcggccaaggctgacctggtatttatggtggatggatcctggagcattggagatgaaaatttcaataagatcatcagctttctatacagcactgttggagccctgaacaagattggcacagatggaacccaagttgcaatggttcagttcactgatgatcccagaacagaatttaaactaaatgcttacaaaaccaaagagactcttcttgatgcaattaaacacatttcatacaaaggaggaaatacaaaaacaggaaaagcaattaagtatgttcgagataccttgttcactgcagagtcaggtacaagaaggggcatcccaaaggttatcgtggttataactgatggaagatcacaagatgatgtgaacaaaatctccagggagatgcaattagatggctatagcatttttgcaattggtgtggccgatgcagattactcggagttggttagcattggcagtaagcccagcgcacgccatgtcttctttgtggatgactttgacgcctttaagaaaatcgaagatgagttaattacttttgtctgcgaaacagcatcagcaacctgtccagtggtacacaaggatggcattgatcttgcaggatttaagatgatggaaatgtttggtttggttgaaaaagatttttcatcagtggaaggggtttctatggagcctggtaccttcaatgtgtttccatgttaccaactccataaagatgccctggtttcccagccaaccaggtacttgcacccagaaggattgccctccgactacacaatcagttttctattccggattcttcctgacactccacaggagccatttgctctttgggagattttaaataaaaattctgacccattggttggggttattttagacaatggtgggaaaactctaacatatttcaactatgaccagagtggggattttcaaactgttactttcgaaggacctgaaattaggaaaattttttatggaagctttcacaagctacacattgttgtcagtgagactttggtcaaagtggttattgactgcaagcaagtgggtgagaaggcaatgaacgcatcagctaatatcacgtcagatggtgtagaagtgctagggaaaatggttcgatcaagaggaccaggtggaaactctgcaccgttccagttacagatgtttgatattgtttgctccacatcatgggccaatacagacaaatgctgtgaacttccaggcctgagagatgatgagtcttgcccagaccttccccattcctgctcctgttctgaaaccaatgaagtggctctgggaccagcgggcccaccaggtggtccaggactccgaggaccaaagggccagcaaggtgaaccgggtccaaagggaccagatggccctcggggtgaaattggtctgccaggacctcagggtccacctggacctcaaggaccaagtggtctgtccattcaaggaatgcccggaatgccaggagaaaaaggagagaaaggagatactggccttccaggtccacagggtatcccaggaggcgttggttcaccaggacgtgatggctcaccaggccagaggggccttccgggaaaggatggatcctcgggacctccaggaccaccagggccaataggcattcctggcacccctggagtcccagggatcacaggaagcatgggaccgcaaggcgccctgggaccacctggtgtccctggagcaaagggggaacgaggagagcggggtgacctgcagtctcaagccatggtgagatcagtggcgcgtcaagtatgcgaacagctcatccagagtcacatggccaggtacactgccatcctcaaccagattcccagccactcctcatccatccggactgtccaagggcctcctggggagcctgggaggccaggctcacctggagcccctggtgaacaaggacccccaggcacaccaggcttccccggaaatgcaggcgtgccagggaccccaggagaacgaggtctaactggtatcaaaggagaaaaaggaaatccaggcgttggaacccaaggtccaagaggcccccctggaccagcaggaccttcaggggagagtcggcctggcagccctgggccccctggctctcctggaccaagaggcccaccaggtcatctgggggttcctggaccccaaggtccttctggccagcctggatattgtgacccctcatcatgttctgcctatggtgtgagagctccccatccagatcagccagagttcacccctgtccaagatgagctggaagccatggaactgtggggccctggagtctgatagcctcaggagaaatttgaagaccaactgcaagaactcttaaggaatcttgtttgagaaaatgttgttatgtggtttgtatgctacttttggggggcagggctcatttcagcagcctaaatctcctccttggataatgttaatattattattattattaacaaaaaatatatatttttaaaaagttcccttaatctatgacatggtagcaatgatttccctttggtgtcttaatggcatgtcagataatttgtttttccagagaagagagctcaaagaggaattgggaaaaataaattgaactctggaatcttctctctcaagtcctaaaatgaacaaacagatatgattgtgtttgagggaaatatgtccctagcaggaaaagaattcaaagaggttcaaagaatatgtcacttactcctacttgctgtaggaataaccttgctgataagaaaaaaagggacaatattggagaaactacctcttgtttaattgatctgtccaactctgagatcacttggtaactggtttcatgtgtatccaaaaatcagcatttggatttaagctttctgaatttggtagtttaagaaacagatttagtttttcaatggttttaactcatgtgaaataatgattttccaccagctctgatgcaaagagatataattttaatgaacgatttatccagcagtgtgttccaggggttgcctctccttatctacggggattactttgtacatgcagataagttttcgcaaacctatttccattttcttttgtaagcaaataaaactttaaaacaaaaaa

SEQ ID NO: 1712 - DNA, 3651 bp, Homo sapiens
aatcagcgatcagactccggagtttggcccgggagctggggagctcaccgatcccccgcccagcagttctggccgctgtcccggtgcgcacggacgtggctcgagtttcctctgctctccgctctcgcccgctagctctcctcccttccgctcctgcttctctccgggtctcccgctccagctccagccccacccggccggtcccgcacggctccgggtagccatggaggaccccacgctctatattgtcgagcggccgcttcccgggtaccccgacgccgaggccccggagccttcctccgctggggctcaggcagcggaggagccgtcgggggccggctcagaagagctgatcaagtcggaccaggtgaacggcgtgctggtgctgagcctcctggacaaaatcatcggggccgtagaccagatccagctgactcaagcacagctggaggagcggcaggcggagatggagggcgcagtgcagagcatccagggcgagctgagcaagctgggcaaggcgcacgccaccacgagcaatacggtgagcaagctgctggagaaggtgcgcaaggtcagcgtcaacgtgaagaccgtgcgcggcagcctggagcgccaggcggggcagatcaagaagctggaggtcaacgaggccgagctgctgcggcgccgcaactttaaagtcatgatctaccaggatgaagtgaagctgccggccaaactgagcatcagcaaatcgctgaaagagtcggaggcgctgccagagaaggagggcgaggagctgggcgagggcgagcggcccgaggaggacgcagcggcgctggagctttcgtcggacgaggcggtggaggttgaggaggttattgaggagtcccgcgcagagcgtatcaagcgcagcggcctgcggcgcgtggacgacttcaagaaggccttctccaaggagaagatggagaagaccaaggtgcgtacccgcgagaacctggagaagacgcgcctcaagaccaaggaaaacctggagaagacgcggcacaccctggagaagcgcatgaacaagctgggcacgcgcctggtgcccgccgagcggcgcgagaaactgaagacgtcgcgggacaagttgcgcaaatccttcacgcccgaccacgtggtgtacgcgcgctccaagaccgcggtctacaaggtgccacccttcaccttccacgtcaagaagatccgcgagggccaggtggaagtgctcaaggccaccgagatggtggaggtgggcgccgacgacgacgagggcggcgcggagcgcggggaggccggcgacctgcggcgcgggagcagccccgacgtgcacgcgctgctggagatcaccgaggagtcggacgccgtgctggtggacaagagcgacagcgactgagccgcccccgctgccacccaccccattcctcgctccttccgaacttcctctttcgcattctctctcggctcgagctggctgagatttttctaaattgaaaacacgcccccctccccacacctccaggaactccactcccagtcttagagctgttaggacccgatggggaggcagcccccgcagtggacaacccccgcttggacacagtccgagtggaatgggaagggaatggtcaatccctgtcctggttgtccaagtcgggatctcagaggaaattgcagtgattccacggttaggcccccctgggggggctgccttcccctcagcctctccccacaccacccacccagctgctgtcattccgctcactgagctcttcttcattctcaccctgatccctgggggactcaaagccaaaactgcccaaagaggaaagattgaatcctaaaggggatccctgcccccatgggaggccccctactagaaggacgtgaaagcagcttttgggggaaactgaggcagtggggaagacagagcagaatgagccctcaccctggctgggggtccagcacaggctgtatctgcagagggtcccagaggaacgctggagccaagagaagccctgggaaggaggggtggggaacgacatgcatgtgagggatggcacactgatgtgtttatgcacctgtacacaggagcgcatggccatggctttggaaaggagaatggaaaaatagaagaaggtcggccgggcttggtggcttatgcctgtaaccccagcactttgggaggccgaggtgggcggatcacctgaagtcaggagttcgggaccagcctggcaaacaccccatctctactaagcgaaaacccatctctactaaaattacaaaaattagctgggcatggttgcgcatgcctgtaatcccagctactttggaggctgaggtggggagaattgcttgaacctgggaggtggaggttgcagtgagccaaggtcgcgacactgcactccagcctgggtgacagagtgagactccatctcaacagaaggaaaaaaaaggaaaataggagaaggtggaaatgggtgaagagagaagtcccctcactagctgcatgagaaatctatcttactgtggttctccatgggcagcaggaccatttttcagaatcaagagggaggacagtgtgagaaggcgatgatccaaagaagacagagaggtcagccccacccgatccctcaaatgggctcttggaggcacccccaggggcagcccatttctcaaagtccagaaaattagggtcccagaagggggcagcagcaggctgggagttaggagggagagcagggtgccggccctgccaccaagttgagagctggaggggaggtggggagagaacatcacagagcagccagccctggttcactcctggcagtttcttctcaagctccttccctaggagcatggtggcacgtgcctgtggtctcagctacttgggaggctgaggcgggaggatcgccagagcccaggagtttgaggctgcagtgagctatgagggtgcctctgtgctccatcctaggcaacagagtgatacgctgtttaaaaaggaaaaaatccttccctagagctagtatcctaaagctgcagagctagcccagacctcattggtttccttgtccttggggtgcttttcctgaatctttgcgggtgaagggagtgttgctcccagtccagaggcctgattctgtttggactgggttctcaagacacgaccaggttctcaagacacgagtccccttgttcctccccattaaagggggtttgtcagaagcaagaacagcccctctccccagtcacagcctgaagggaggccccgagagcttcctccttccccccacctgctccttaccttctctgccctgctttttagaactgcagttcattgttttaagggattgggggagggagcctggggacacaaaccttttatacaatacaaagctttgctttttttttttttttcttccttttccctttctcggttctcttctctcctctgaatggctgaagacccctctgccgagggaggttggggattgtgggacaaggtcccttggtgctgatggcctgaaggggcctgagctgtgggcagatgcagttttctgtgggcttggggaacctctcacgttgctgtgtcctggtgagcagcccgaccaataaacctgcttttctaaaaggaaaaaaaaaaaaaaaaaa

SEQ ID NO: 1713 - DNA, 2561 bp, Homo sapiens
attcatatcatttttcttctccggccccatggaggaagtgagaaagttggcacagtcacgccgggcttcgcaggaccaggtcactcagtgacagatggacaatgcaagaatgaactccttcctggaataccccatacttagcagtggcgactcggggacctgctcagcccgagcctacccctcggaccataggattacaactttccagtcgtgcgcggtcagcgccaacagttgcggcggcgacgaccgcttcctagtgggcaggggggtgcagatcggttcgccccaccaccaccaccaccaccaccatcaccacccccagccggctacctaccagacttccgggaacctgggggtgtcctactcccactcaagttgtggtccaagctatggctcacagaacttcagtgcgccttacagcccctacgcgttaaatcaggaagcagacgtaagtggtgggtacccccagtgcgctcccgctgtttactctggaaatctctcatctcccatggtccagcatcaccaccaccaccagggttatgctgggggcgcggtgggctcgcctcaatacattcaccactcatatggacaggagcaccagagcctggccctggctacgtataataactccttgtcccctctccacgccagccaccaagaagcctgtcgctcccccgcatcggagacatcttctccagcgcagacttttgactggatgaaagtcaaaagaaaccctcccaaaacagggaaagttggagagtacggctacctgggtcaacccaacgcggtgcgcaccaacttcactaccaagcagctcacggaactggagaaggagttccacttcaacaagtacctgacgcgcgcccgcagggtggagatcgctgcatccctgcagctcaacgagacccaagtgaagatctggttccagaaccgccgaatgaagcaaaagaaacgtgagaaggagggtctcttgcccatctctccggccaccccgccaggaaacgacgagaaggccgaggaatcctcagagaagtccagctcttcgccctgcgttccttccccggggtcttctacctcagacactctgactacctcccactgaggcggctccagccccagacaacagcccaggcatctccttgggctgggacttcttacccaaagcacatgcttagcttatctttctttccatttacagtctctttcttcctttctaatcctatctggggagctcctggccaggataatatatttgcagataattctggaccagagacttggtgcggggttaacaccttcatccagattgggtgccagcatacattttctggtgggccttaacatccctcctgcttttaggagaattcacagaacctactgttcctttcagatgaccttttggaaaatagttccctttgccaacagaaacatgccagaaggaatcttctcatcttttatctaactatatgtacagctctcccctcccttgtccttgaaagtaggatatagcgaaaggcgagtccaggagctcaggaagaagagatgcactatatgtttacacaattaattcatcccttaatttaagtcattttcatgtgtgtgagtttgctggttgtaaatactttgtcctaagagatttatctttatacagattttctagaaatgtttaggttactaaaacagggtgggcaaactctctaaactggtacaattttataggtgaaagaaaaaattccctcatttaaacccaatcagatgcctcagagggtagccttgatttgttcttacagttaagaagccctgcagagcacaaacttcagaaacccggcttcctgtgctaagtctttcccaatctctacccctttcttctcgggccaccctctgtttaaaatttgtgctgggttattcagaacctaaaagtattattcaaaccaatttcttccttccacagttatcttagctggatataatgtattttcagctcaattgttaatgtgatggatggcacaatgaatgtatattttgtgttattcgtgaatagtcttttgcatgtcgcacaatgtttgatgtccccaaagtaccacactgagttctatcagttatcctttgtgagcctatgatattccccatttcctgtacaatcatgaacagctctgagatcctggagtgatatgatccagagcagagtttacgggtcttaggatgtctgtaataaataaatatactcaagtttcaggtatgcttaagcatccgtgtatttggctgggctacaatttgttaattcctatgaagttggcacatttcatgaggggaaagggagaagggtggtaaatattttcaaagagatgggccttttcttgaataaaagttaataacagctcctttattataatcaaagctcataatggaaaaaaagactgatgaagaaatttatgaagcagatttatttttgaaacaaacatggatacttcctgggtcaagtgctaaccttttcacctccaactggatgttgacgtatatataaacagaactcccttcaaaagccaaaaaaaaaaaaaaaa

SEQ ID NO: 1714 - DNA, 2657 bp, Homo sapiens; identical to SEQ ID NO: 750

SEQ ID NO: 1715 - DNA, 8080 bp, Homo sapiens; identical to SEQ ID NO: 751

SEQ ID NO: 1716 - DNA, 2244 bp, Homo sapiens; identical to SEQ ID NO: 1457

SEQ ID NO: 1717 - DNA, 2934 bp, Homo sapiens
agcgctgcgggctgcgcgagtcccggggcggcgagtcccggcgctgtccgcgtctgtgtcggtcccggcgaccgcgcctcttaaaggcccccgacccgacccgccccgccccgcctctggccccgcgcccggccgccccgcagtcccagcagtctgctcgaggcccggggctgcgggttcctcagcggaccgaggaggctgggaaagctacaggagggtgtccagaagccacaagccatggctgtggggaacatcaacgagctgcccgagaacatcctgctggagctgttcacgcacgtgcccgcccgccagctgctgctgaactgccgcctggtctgcagcctctggcgggacctcatcgacctcgtgaccctctggaaacgcaagtgcctgcgagagggcttcatcactgaggactgggaccagcccgtggccgactggaagatcttctacttcttacggagcctgcacaggaacctcctgcacaacccgtgcgctgaagaggggttcgagttctggagcctggatgtgaatggaggcgatgagtggaaggtggaggatctctctcgagaccagaggaaggaattccccaatgaccaggttcgcagccaggccagattgcgggtccaagtaccagctgtgcgttcagctcctgtcgtccgcgcacgcgcctctggggaccttccagccagacccggcgaccatccagcagaagagcgatgccaagtggagggaggtctcccacacattctccaactacccgcccggcgtccgctacatctggtttcagcacggcggcgtggacactcattactgggccggctggtacggcccgagggtcaccaacagcagcatcaccatcgggcccccgctgccctgacaccccctgagcccccatctgctgaaccctgactggtaaacaactgctgtcagaaaagggctgggcttgggaaggggaggtggaggccaggtgtccccagacctctaacccttgcccctagcagcctcttctttgtggagcctctcagtgtgggcagccctcgcatgctggggtcgggccagctctccccgaaaggtcttgacctgaatgatggccggggaagcctgcgtgtgcccctttcagagacggagcacctgagatgtgggaggtgcagcatgttcccctgggcccctcagaaagtcgagcttggaggccagcctggatctgtctctcccttcccctcctgggaccattctacctgtgttctttgaccctcggagcagggacaggcaagacaactggcaagcttgcagctgccctgatggtgcaggtgcagggaggtgaccatgtaactctgaccaatctgggaagtggagggtgggctcatgggccgtgctctgcccctgtctgctgctcccagtctctcgctctgcctgcctgctcagaagaggtggctttggcccagaggctcaggccgggactgagatggacagacccagggtggggtggggtccaggtcgggtgtggactgtcctcactgtcagtggagccccagaagctagatgggtaccaggtggggttaggttcccagaggactgagggaatcctgtacaggatgtcccagggtagatggggagcaggattgggacctgctctgacagctggacacatgagccctggatgagtatggtagggggtttgaagaatcccctgtccacctcccaaatccaggcccggccccctctggcttggagagcattccaagcccccaccccacccctagaactgccattcccaagacctctgtctcccagccaaccacccttggaacttgcctcttgtcctgctggaaagatagcagtgttctcctgacttcgccctactgcatgcagccaaataaaaggtgtgcccagtctaacctgtgccctgtggtttctggaaggaaaggcagactttaggtggtcctgcctggacctgcagatggtacaatggcatggcttctgtctaaggtacagaggggttggcatttcaggaaccaggccatcacagaaacaggttcatgggcagacccctcagtgagctgcaggtatctcacctggcagccgtccagtactgctggcttcctctggaggcccagccacaggctggggttggggtgtgtggacatctctgggcagctcttgagtccaccttgtgccagatcagcagtgccacccaggctctgcctcctggtgttactctttgccaacagctttacggacattggatgaagccgaagcatttagaatggtgcctggcacacagttggtgcgtgatatggttaagctttgtgtccccacccacatctcatcttgaatggtaatcctgggtgtttagggagagacctggtgggaagtgattggattatgggagcggttttcccccatgctgttctcatgatagtgagtgagttctcacgagatctgatggttttacaagtgacggtttccccggctccctcctgccgccatgtgaagaaggtcgttgcttccccttcaccttccaccaccatgattgtaagttccttttttcttttcttttcttttttttttttttttttttgagatggagtctcgctctgtcgcccaggctggagtgcagtggcgcaatctcagctcactgcaagctctgcctcccaggttcgcgccattcacctgcctcagcctctggagtagctgagactacaggcgcccaccaccatgcccggctaattttgtttgtatttttagtagagatggagtttcaccatgttggccagggtggtctcaatctcctgacctcgtgatccacccacctcgacctcccaaagtgctgagattacaggcgtgagccaccgcgcccagcgattgtttcttgaggcttccccagccatatggaactataagtcaattaaacctctttccttttataaatca

SEQ ID NO: 1718 - DNA, 3897 bp, Homo sapiens
acgcccaggtcgcccgcatcccgctgccgcaggagagagacagcgcgccccggccctgctccccaggcttcgcccgggcgccctcaactctgtccccagagactgagcacctgtcctccgcctcggcctctgctgagagccctctcctctggagcacacaccacccctgcagcccaagaagagtcccagccccacgccggctaccaccatggcggagaccaacaacgaatgtagcatcaaggtgctctgccgattccggcccctgaaccaggctgagattctgcggggagacaagttcatccccattttccaaggggacgacagcgtcgttattggggggaagccatatgtttttgaccgtgtattccccccaaacacgactcaagagcaagtttatcatgcatgtgccatgcagattgtcaaagatgtccttgctggctacaatggcaccatttttgcttatggacagacatcctcagggaaaacacataccatggagggaaagctgcacgaccctcagctgatgggaatcattcctcgaattgcccgagacatcttcaaccacatctactccatggatgagaaccttgagttccacatcaaggtttcttactttgaaatttacctggacaaaattcgtgaccttctggatgtgaccaagacaaatctgtccgtgcacgaggacaagaaccgggtgccatttgtcaagggttgtactgaacgctttgtgtccagcccggaggagattctggatgtgattgatgaagggaaatcaaatcgtcatgtggctgtcaccaacatgaatgaacacagctctcggagccacagcatcttcctcatcaacatcaagcaggagaacatggaaacggagcagaagctcagtgggaagctgtatctggtggacctggcagggagtgagaaggtcagcaagactggagcagagggagccgtgctggacgaggcaaagaatatcaacaagtcactgtcagctctgggcaatgtgatctccgcactggctgagggcactaaaagctatgttccatatcgtgacagcaaaatgacaaggattctccaggactctctcgggggaaactgccggacgactatgttcatctgttgctcaccatccagttataatgatgcagagaccaagtccaccctgatgtttgggcagcgggcaaagaccattaagaacactgcctcagtaaatttggagttgactgctgagcagtggaagaagaaatatgagaaggagaaggagaagacaaaggcccagaaggagacgattgcgaagctggaggctgagctgagccggtggcgcaatggagagaatgtgcctgagacagagcgcctggctggggaggaggcagccctgggagccgagctctgtgaggagacccctgtgaatgacaactcatccatcgtggtgcgcatcgcgcccgaggagcggcagaaatacgaggaggagatccgccgtctctataagcagcttgacgacaaggatgatgaaatcaaccaacaaagccaactcatagagaagctcaagcagcaaatgctggaccaggaagagctgctggtgtccacccgaggagacaacgagaaggtccagcgggagctgagccacctgcaatcagagaacgatgccgctaaggatgaggtgaaggaagtgctgcaggccctggaggagctggctgtgaactatgaccagaagtcccaggaggtggaggagaagagccagcagaaccagcttctggtggatgagctgtctcagaaggtggccaccatgctgtccctggagtctgagttgcagcggctacaggaggtcagtggacaccagcgaaaacgaattgctgaggtgctgaacgggctgatgaaggatctgagcgagttcagtgtcattgtgggcaacggggagattaagctgccagtggagatcagtggggccatcgaggaggagttcactgtggcccgactctacatcagcaaaatcaaatcagaagtcaagtctgtggtcaagcggtgccggcagctggagaacctccaggtggagtgtcaccgcaagatggaagtgaccgggcgggagctctcatcctgccagctcctcatctctcagcatgaggccaagatccgctcgcttacggaatacatgcagagcgtggagctaaagaagcggcacctggaagagtcctatgactccttgagcgatgagctggccaagctccaggcccaggaaactgtgcatgaagtggccctgaaggacaaggagcctgacactcaggatgcagatgaagtgaagaaggctctggagctgcagatggagagtcaccgggaggcccatcaccggcagctggcccggctccgggacgagatcaacgagaagcagaagaccattgatgagctcaaagacctaaatcagaagctccagttagagctagagaagcttcaggctgactacgagaagctgaagagcgaagaacacgagaagagcaccaagctgcaggagctgacatttctgtacgagcgacatgagcagtccaagcaggacctcaagggtctggaggagacagttgcccgggaactccagaccctccacaaccttcgcaagctgttcgttcaagacgtcacgactcgagtcaagaaaagtgcagaaatggagcccgaagacagtggggggattcactcccaaaagcagaagatttcctttcttgagaacaacctggaacagcttacaaaggttcacaaacagctggtacgtgacaatgcagatctgcgttgtgagcttcctaaattggaaaaacgacttagggctacggctgagagagttaaggccctggagggtgcactgaaggaggccaaggagggcgccatgaaggacaagcgccggtaccagcaggaggtggaccgcatcaaggaggccgttcgctacaagagctcgggcaaacggggccattctgcccagattgccaaacccgtccggcctggccactacccagcatcctcacccaccaacccctatggcacccggagccctgagtgcatcagttacaccaacagcctcttccagaactaccagaatctctacctgcaggccacacccagctccacctcagatatgtactttgcaaactcctgtaccagcagtggagccacatcttctggcggccccttggcttcctaccagaaggccaacatggacaatggaaatgccacagatatcaatgacaataggagtgacctgccgtgtggctatgaggctgaggaccaggccaagcttttccctctccaccaagagacagcagccagctaatctcccacacccacggctgcatacctgcactttcagtttctaagagggactgaggcctcttctcagcatgctgcaaacctgtggtctctgatactaactccctccccaacccctgttgttggactgtactatgtttgatgtcttctcttacttactctgtatctctttgtactctgtatctatatatcaaaagctgctgctatgtctctcttctgtcttattctcaagtatctactgatgtatttagcaatttcaaagcatagtctaccttccttatttggggcaatagggaggagggtgaatgtttcttctttctcatctactcgtctcacactgagtggtgttagtcactgagtagaggtcacagagatgacaaaaggaaaaatgggagctagagggttgtgacccttcatacacacacgcacgcacgcacacaaacatgcacacacgcatgcacacacacaaagccttaagcagaagaatgtcttagcatcatgagacagagaaatagactcttcctccctcctctttcacatatagcacaggggaaggtaaaatggaagggctgctaattgagacatataattttc

SEQ ID NO: 1719 - DNA, 5656 bp, Homo sapiens
aatgcgaaacgtaattaacccggaaaaaagagccgagggacgggagagaaggagggggcactgggggagaccagagcgaggggagcgagaggcgcggagagtttggcaggcagacccagaaatccctggagcgcggcggacccggcggccggaggggcgaccccgcccgatgtaacgcgccccgcccgagccccggcccctgcacggggggggtgatgtgagcagagcccaggaatgccttatgtggatcggcagaaccgaatctgtgggtttctggacatcgaggagcatgagaacagcggcaagtttctgcggaggtacttcattctggacacccaggctaactgcctcctctggtatatggacaacccccagaatctggcaatgggggcaggagctgttggagctttgcagctgacctacatctcgaaggtgagcatagctaccccaaaacagaaaccaaaaactccattttgctttgttatcaatgccctgtctcagagatatttccttcaagccaatgatcagaaagatatgaaggactgggttgaagccctgaaccaagccagcaagatcaccgttcccaaaggtgggggcctacccatgaccactgaagttctcaagagcttagcagctcctccagccctggagaagaagccacaggtggcctacaagacggagatcattggaggggtggtggtccacacacccatcagccagaacggtggggatgggcaggaagggagtgagcccgggtcccacaccatccttcgaaggtctcagagttacatccccacgtcaggctgccgtgcttccactgggcctcccctcattaagagtggttactgcgtgaagcaagggaatgtgcggaagagctggaaacgtcgcttctttgcacttgatgactttaccatctgctacttcaagtgtgagcaggaccgagaaccactgcgcaccatatttcttaaggatgttctgaagacccatgaatgtctggtcaagtctggtgatctcttaatgagggacaacctgtttgaaataataacaagctccaggaccttctacgtacaggcagacagtccagaagacatgcacagctggattaaggagattggcgcagctgtccaggccctcaagtgccaccccagagaaacgtccttttctagatccatttctttgacccgacctggaagctccagcctttcaagtgggcccaactctatcctgtgcagggggcggccacctttggaggaaaagaaagccctctgcaaagccccctctgtggcctcctcctggcagccctggacacctgtcccccaggctggggagaagctgcttccacctggagacacttcagaggactccttgttcacgcctcgtcctggggagggcagcgctcctggggtgctgcccagctcccggataaggcacagatcggagccccagcaccccaaggagaagccgtttatgttcaaccttgatgatgaaaacatacggacctctgatgtgtgatggagcacagtgccatgggagggagggagggagggaggacttgagagaaggaggctgtgactcagtttctctaccttgttggagggtagtcagaggcctttatgtcactcatattcctgtggatgctctttgggagggaggggcccatccagctgggctgtgtgtgtgtgtgtgtgtgtgtgtgtgtgtgtgtgtaatatcaacgcagtgtatttaatttggggaagtcactaggttagaactgtaggcatactcagtggagaggaagctacctattctattctaactattctgaggtcttcctggagagggattgttttagcagctcctctccagagggggctggaagtccagtttcaccaatgaccaagttttatttccttgtccttgttttagttttttcattttgttttcagtccaggtgcctcgcagctcttttggaatgggccagcattagtctaattttaagcgctatgtgttttgtacccttgcaaacttgctttctctttcttcttgctgttgccctttgaatgaagccttgtgtgcttgcatgatcagaccctgtaataggatgaatttccatgcacttaacatgaagagatacaaaaagaatctagagagagatatatatttttaatgaaatagaagcttggcatagaaacattgatttagatgttatgagttgctggccagagattcctcagataaaagagcctagaaaattgagttttgagcgggcatggtggctcacgcctgtaatgccagtagtttgggaggctgaggcgggtggatcacctgaggtcaggagttcgagatcagcctggccaacatggtgaaaccccgcctctactaaaaaatatgcaaaattagccgggcgtggtggtgcaggcctgtaatcccagctactcagaggctgaggcaggagattcacttgaacccaggaggtggaggttgcagtgagccaagatcgcgccattgcactccagtcagggcaacaagagtgaaactccgtctcaaaatataaaagaaaattgagtgtcccacccaaattttagggcgtacctccttccatttgataagaagatgctatttccagtgtccctgggagaattcttccatccagtttatatggtgaattgccaccagcgttccctaaaggaagagagaacttagcttatttctgtctgtgacttttatcagctagatcagttaattgtatttttaaattaaaaattagtaactagaggaagagactaagagaactatttttacctgagtaaatgctctcctcttcttgtgtccaaatctaatgcagaggtgaaaacacttgatgagaaaatcctttgtggcttgaggggaatcatgtttctttcaggacgtgttgtttccctgaagtctatgtcacactgagaactttttctgactgcactgctttggagctattcatttaaattgagtttggcctagttttcctggtataaaacaggaaatctacattgttccctctttctctcccttccatcccttcccctgcctttcctatacacgctggtgtgcttttgccctcagaaattcttggtttgggagttatgtatttttgagtgatcgaggttatgacatacttggagcggcatgatttcaagaagccattccaaattcttatagctccttagctctggttttactctcgtattttccccaagaaaattttttggctattcaaagaaagcacaaaatatgtgatgtggaactcatgaaaatagggacttttgatatctctttaaatattccctgactcacggaaaagatgtcctcttttggtgtatacattgtgaaaatctacccatttatctctctctctctcttttcttttaaataaattatctgataaggccggcaaggtggctcacgcctgtaatcccagcactttgggaggccgaggcgagcggatcacgaggtcaggagatcgagaccgcggtgaaaccccgtctctactaaaaatacgaaaaaaaaattagccgggcgcagtggcaggcgcctgtagtcccagctacttgggaggctgcggcaggagaatggtgtgaacctgggaggcggagcttgcagtgagccaagatcgcgccactgcactccagcctgggcgacagagcaagactccatctcaaaaaaaaaattatctgataggttactattgctaaattaattggccattataataagctgatttgtttcttattcagcaagatctcttttgagaatgtgacaaattaaacatacatagaatccatatggtattatcctgataaagggaaacgaggacactaagactgtcaaatggaaatcttcttgtcaattggcaaacacttgggaattccacattagagcattgcttgtttttaattttttttttttaatttttaaaagacagggtctcactctcttacccaggctagagtgcagtggtgtgatcatagttcatcataactttgaatctctgggcttaagcaatcctcccatgttagcttcccaagtagctaggactacagggttgtgctaccacgcctggctaatttttaatttttttttatctacagagcctggctatgttgcccaggctctctcaaactcctggcccaagtgatcctcctgccttggcctcctaaagtgttgggattacaggtgtgagccactgcacctagccagaacatcgttaatgtagttcaatatgagataaattattatcttcaatgaaacaagctctaaaagcattccattcctaaattgtatttcaaacttcctattttgttgatatttcttaacttctggccagttttggaccataatcttttaatgtgaaccaaagatggtacgtatttgaccaaagcagttagttttaaatgtataaaattgaaccaaatggaaaaaataggttggggatgcagtatagattagtgactaagtgcataggctctggagtaaatctgagtttttttttttttaaaggaactaaaaaatgtactgcattttctttgtggaataaaagccttgcctgagttgtgctattttcataaggcttttgaagtggtcttgacccactgtgtgtaacagtatttcaggtggtcctccccatggctgaataatgccatccattattctttaatttttatttttagaaacagtgtttcactctgtcacccaggctggagtgcagtggcctgatcatggctcactgcagcctggacctcctgggctcaagtgatcttcctgcctcacagcctcccaaagtactcagattataggtgtgagccaccacgcctggccaccatctattacttttgaaatcttcaaaagacttgcttactcaatgtcagctgatggttggtaaaaataatttggcctttagtgttaagtgagacatcataagggtattgaggtatacattatggagattgatgtcaggtcagaatattggagttatacatctatttctgagttgaatactcagctcccacgagaaagaaagtagttttaaggtccagcttcttagtctacttgaagcaaattttttttcttttatatttctgaatataaatatactcttatatgggctaaaaagaccccatgaataaatagcaggttcagtagttgaggagtggagtttagtaggtttgttttcagtataaattagataacatgtggaggtcacagcattttggaaattgagtgtccccaagtgagctttgtttataaactttcaaaatgtcggaagtggacaggtttgttaaatcttgtctgccagcacccttttcttcctttgttccttttcctctctgtgttattgcctgcggcagccagtccttcatactagatagagttcagataaagcaaacgtttggcaaaaacatactgtttgacctcctccccctctgcttatgaaggggtagcatgattctgtgttttaaagcagtgatgtttcagctgtgaaatgcactcgctgtaagctctaggctgagtgcatggaaactgttacgcttctcattttatgtgatctcctaattggtatgtagcaaaaattttctaaaactgttttgtggcttgttttgtaataaaaccatgtgaaatactgaaaaaaaaaaaaaaaaaa

SEQ ID NO: 1720 - DNA, 3525 bp, Homo sapiens; identical to SEQ ID NO: 775

SEQ ID NO: 1721 - DNA, 1300 bp, Homo sapiens
agcaaatgcttccagtcccaggagcacaaacatcacatggtgtgtgggatacaagaggctgctgagaattacaggaagttattccaggaaatattgaacacatcgagggagaaacttgaagcagctaaaagcatattgactgatgagcaagaaagaatggcgatgattcaggaagaggaacaaaattttaaaaagatgattgagtctgagtatagtatgagactccggttgttgaatgaagagtgtgagcagaatctccagagacagcaggaatgcatatctgacttgaacctgagagaaacccttctgaatcaagcgatcaagcttgccaccgagctagaggagatgttccaggaaatgctacagagactgggccgtgtggggagagagaacatggagaaactgaaggagagtgaagccagggcttctgaacaggtccgcagcctcctaaagctcatcgtggagcttgagaaaaagtgtggggaaggcaccttggcattgctcaagaatgcaaaatactccttagaaaggagcaagtcactgctgcttgagcatctggagcccgctcatatcacagacctgagtttatgccacataagaggactcagcagcatgttcagagtactccagagacatttaacattggatcctgaaacagctcatccctgcctggcactatctgaggacctgagaactatgagattgagacatgggcagcaggatggggctggcaacccagaaagattggatttcagtgccatggtgctggctgcggagagcttcacctcagggaggcactactgggaggtggacgtggaaaaggcaaccaggtggcaagtgggcatataccacggctctgcagacgcgaagggcagcacggccagagcttccggagagaaagtcttgctcacggggtcggtgatggggaccgagtggactctctgggtcttcccccctctgaaaaggctcttcctggaaaagaagttggacacagttggggttttccttgactgcgaacacgggcagatatcattctacaatgtgaccgagatgtccctcatttacaatttctcccattgcgccttccaaggagctctcaggcctgtgttttccctctgtatcccaaatggagacacaagtccagactccctcaccatcttacaacatggtccttcttgtgatgctactgttagcccttaatcttctgtgtgtaaaatccaagaccacgagacaccagaaagttggagaacaagactttgaaagaatttgtgtaaactaacccaataaaaagcgttccagg

SEQ ID NO: 1722 - DNA, 4074 bp, Homo sapiens; identical to SEQ ID NO: 1431

SEQ ID NO: 1723 - DNA, 2802 bp, Homo sapiens
ccagcagcaggaggcgcgcgaggcaccacggcctggcggccgagagtcagggaggaacctcatttacataacggccgcccctctgtctcctggcgggggccggagtcccgcccctcgtccaacttgaaatctgttgggtcacgggccagtcactccgacctaggcaagcctgtggtggagctggaagagtttgtgagggcggtcccgggagcggattgggtctgggagttcccagaggcggctataagaaccgggaactgggcgcggggagctgagttgctggtagtgcccgtggtgcttggttcgaggtggccgttagttgactccgcggagttcatctccctggttttcccgtcctaacgtcgctcgcctttcagtcaggatgtctgcccgtggcccggctatcggcatcgacctgggcaccacctattcgtgcgtcggggtcttccaacatggcaaggtggagatcatcgccaacgaccagggcaatcgcaccacccccagctacgtggccttcacggacaccgagcgcctcatcggcgacgccgccaagaaccaggtggccatgaaccccaccaacaccatcttcgacgccaagaggctgattggacggaaattcgaggatgccacagtgcagtcggatatgaaacactggccgttccgggtggtgagcgagggaggcaagcccaaagtgcaagtagagtacaagggggagaccaagaccttcttcccagaggagatatcctccatggtcctcacgaagatgaaggagatcgcggaagcctacctggggggcaaggtgcacagcgcggtcataacggtcccggcctatttcaacgactcgcagcgccaggccaccaaggacgcaggcaccatcacggggctcaatgtgctgcgcatcatcaacgagcccacggcggcggccatcgcctacggcctggacaagaagggctgcgcgggcggcgagaagaacgtgctcatctttgacctgggcggtggcactttcgacgtgtccatcctgaccatcgaggatggcatcttcgaggtgaagtccacggccggcgacacccacctgggcggtgaggacttcgacaaccgcatggtgagccacctggcggaggagttcaagcgcaagcacaagaaggacattgggcccaacaagcgcgccgtgaggcggctgcgcaccgcttgcgagcgcgccaagcgcaccctgagctcgtccacgcaggcgagcatcgagatcgactcgctctacgagggcgtggacttctatacgtccatcacgcgcgcccgcttcgaggagctcaatgccgacctctttcgcgggaccctggagccggtggagaaggcgctgcgcgacgccaagctggacaagggccagatccaggagatcgtgctggtgggcggctccactcgtatccccaagatccagaagctgctgcaggatttcttcaacggcaaggagctgaacaagagcatcaaccccgacgaggcggtggcctatggcgccgcggtgcaggcggccatcctcatcggcgacaaatcagagaatgtgcaggacctgctgctactcgacgtgaccccgttgtcgctgggcatcgagacagctggcggtgtcatgaccccactcatcaagaggaacaccacgatccccaccaagcagacgcagaccttcaccacctactcggacaaccagagcagcgtactggtgcaggtatacgagggcgaacgggccatgaccaaggacaataacctgctgggcaagttcgacctgaccgggattccccctgcgcctcgcggggtcccccaaatcgaggttaccttcgacattgacgccaatggcatccttaacgttaccgccgccgacaagagcaccggtaaggaaaacaaaatcaccatcaccaatgacaaaggtcgtctgagcaaggacgacattgaccggatggtgcaggaggcggagcggtacaaatcggaagatgaggcgaatcgcgaccgagtcgcggccaaaaacgccctggagtcctatacctacaacatcaagcagacggtggaagacgagaaactgaggggcaagattagcgagcaggacaaaaacaagatcctcgacaagtgtcaggaggtgatcaactggctcgaccgaaaccagatggcagagaaagatgagtatgaacacaagcagaaagagctcgaaagagtttgcaaccccatcatcagcaaactttaccaaggtggtcctggcggcggcagcggcggcggcggttcaggagcctccgggggacccaccatcgaagaagtggactaagcttgcactcaagtcagcgtaaacctctttgcctttctctctctctctttttttttgtttgtttctttgaaatgtccttgtgccaagtacgagatctattgttggaagtctttggtatatgcaaatgaaaggagaggtgcaacaacttagtttaattataaaagttccaaagtttgttttttaaaaacattattcgaggtttctctttaatgcattttgcgtgtttgctgacttgagcatttttgattagttcgtgcatggagatttgtttgagatgagaaaccttaagtttgcacacctgttctgtagaagcttggaaacagtaaaatatataggagcttaaattgtttatttttatgtactactttaaaactaaactgaacattgcagtaatgttaaggacaggtatactttttgcaaacaaatgcataaatgcaaatgtaaagtaaagctgaaattgatctcaaaaaaaaaaaaaaaaaaaaaaaaaaaaaaaaaaa

SEQ ID NO: 1724 - DNA, 4883 bp, Homo sapiens; identical to SEQ ID NO: 1444

SEQ ID NO: 1725 - DNA, 2738 bp, Homo sapiens
agagtgccgagcagcgcggtgggtgcggctgtgagacggcaggagacttctgccccgcggtgcacgcgaccctcgagacgacagcgcggctactgccagcagcgaaggcgcctcccgcggagcgccccgacggcgcccgctcgcccatgccgagctgagcgcggcagcggcggcgggatgctggcgctgctggccgccagcgtggcgctcgccgtggccgctggggcccaggacagcccggcgcccggtagccgcttcgtgtgcacggcactgcccccagaggcggtgcacgccggctgcccgctgcccgcgatgcccatgcagggcggcgcgcagagtcccgaggaggagctgagggccgcggtgctgcagctgcgcgagaccgtcgtgcagcagaaggagacgctgggcgcgcagcgcgaggccatccgcgagctcacgggcaagctagcgcgctgcgaggggctggcgggcggcaaggcgcgcggcgcgggggccacgggcaaggacactatgggcgacctgccgcgggaccccggccacgtcgtggagcagctcagccgctcgctgcagaccctcaaggaccgcctggagagcctcgagcaccagctcagagcaaacgtgtccaatgctgggctgcccggcgacttccgcgaggtgctccagcagcggctgggggagctggagaggcagcttctgcgcaaggtggcagagctggaggacgagaagtccctgctgcacaatgagacctcggctcaccggcagaagaccgagagcaccctgaacgcgctgctgcagagggtcaccgagctggagcgaggcaatagcgcctttaagtcaccagatgcgttcaaggtgtccctcccactccgcacaaactacctatacggcaagatcaagaagacgctgcctgagctgtacgccttcaccatctgcctgtggctgcggtccagcgcctcaccaggcattggcacccccttctcctatgcggtgccagggcaggccaacgagatcgtgctgatcgagtggggcaacaaccccatcgagctgctcatcaacgacaaggttgcgcagctgcccctgtttgtcagtgacggcaagtggcaccacatctgtgtcacctggacgacacgggatggcatgtgggaggcattccaggacggagagaagctgggcactggggagaacctggccccctggcaccccatcaagcccgggggcgtgctgatccttggacaagagcaggacaccgtggggggtaggtttgatgccactcaggcatttgtcggggagctcagccagttcaacatatgggaccgcgtccttcgcgcacaagaaattgtcaacatcgccaactgctccacaaacatgccgggcaacatcatcccgtgggtggacaataacgtcgatgtgttcggaggggcctccaagtggcccgtggagacgtgtgaggagcgtctccttgacttgtagccgccttctcctctgtccaggaggccgggatcaggctgttgccatggaagttcagggccatagactgccccacttaaactcttgtcagtctgggctcagggttcccagagctcattccccaggaatctctaagaccagggctggggcagtgtctgtcactggcttgtttgttccctaccaatattctgttgctgtttgaagtagtgccagggtcccctgggaagatgcccccaagacacctgccccaagtgggtggatatctgccttcctgctgcaagtggaggcaggtccagcagcccctcttcagagcccctgtaaatgctatcgcagcctgagtcctgccgccttccagttccttggtgtcccgtgcaccccttctgtctgtcccctttcatggctgtgcagccgtcccgctggagtggccatgtcccttgtgcattgagtgcatccccgctggtgactaagctcgcagcaagcggctaccccccgatctgcaaaagggcctctccctttgtgttctatacattgtgaatcttcccgtctgaagaacgcccagcctgcccagacaaagccccgccttccccaaagcagaggggctgtctgtgtctccagaaaggggacatcgggggggaggggggctcagaaaggagaagggctgtgatctccggtcccttcccccatcatccttccttagactgatgctttgactgaatcatcactagctatggcattaaaaggcctctcttctcatctggtgccaaaggttccgttgcagctttttacaaccatccggtgtggtttggaggatttgttttttttttttcccaacagaaaagaacagccattagaagaaggctcccattttctgatgttccgccccactgtgaagagtgtgctcgttttaaattcatgttgattcttgtaagcactggactgtcttcatcaagtatttccctacagaactcctcaagaaaacagagatcatttggctagagattgtctgagtgactccaagctactcactgtattggacgggagtagtaatttattttaaagataaagtgactaagtggggaaatttataaagctaaatattatatattttatttttcatacatgtttgaagtgcaaatctgtggatattccatttgtaggaccaagtcgacatgcccatcctgacattgtatgctacgagaactcttctgatgatggaatttcgattaaagtgcactgaaagatgaaaaaaaaaaaaaaaaaaaaaaaaa

SEQ ID NO: 1726 - DNA, 468 bp, Homo sapiens; identical to SEQ ID NO: 776

SEQ ID NO: 1727 - DNA, 1641 bp, Homo sapiens; identical to SEQ ID NO: 677

SEQ ID NO: 1728 - DNA, 2583 bp, Homo sapiens
atcagggagcccgggaaggggaaaggggcgaaatggttctatggtcacatgccgcggggtctggtgggaggagcggttgcccagcggcctcttggcgcttcctgtttccggttcccagagtggggcacagcgaggcgctagggggaacgctggcctctgaaactagctctgggaccggggtctgcggccggcccctagctggccccgtctcccatccccagaagggtattcactggggattctgagctttggctactccagtttcccacgacacgatgttccctttctacagctgctggaggactggactgctactactactcctggctgtggcagtgagagaatcctggcagacagaagaaaaaacttgcgacttggtaggagaaaagggtaaagagtcagagaaagagttggctctagtgaagaggctgaaaccactgtttaataaaagctttgagagcactgtgggccagggttcagacacatacatctacatcttcagggtgtgccgggaagctggcaaccacacttctggggcaggcctggtgcaaatcaacaaaagtaatgggaaggagacagtggtagggagactcaacgagactcacatcttcaacggaagtaattggatcatgctgatctataaagggggtgatgaatatgacaaccactgtggcaaggagcagcgtcgtgcagtggtgatgatctcctgcaatcgacacaccctagcggacaattttaaccctgtgtctgaggagcgtggcaaagtccaagattgtttctacctctttgagatggatagcagcctggcctgttcaccagagatctcccacctcagtgtgggttccatcttacttgtcacgtttgcatcactggttgctgtttatgttgttggggggttcctataccagcgactggtagtgggagccaaaggaatggagcagtttccccacttagccttctggcaggatcttggcaacctggtagcagatggctgtgactttgtctgccgttctaaacctcgaaatgtgcctgcagcatatcgtggtgtgggggatgaccagctgggggaggagtcagaagaaagggatgaccatttattaccaatgtagattgcactttatatgtccagcctcttcctcagtcccccaaaccaaagctacacagccagatttctcaagcagtctcaactccagtccctcatctcacccttactattgctcttgctttccagtttgcttttgatttgcatcttctcactagtaaaactgccttccctttgttccttattttctgttttttctctagagaggtacagttgtaagtcagagttaatataatagggcctgtgaaaacagaggcttttgcattgtctcttgacatcagaagttacaataggcatatgggcaaaatggtgtagcaggctcactggccgtttgttttttaaacacattttcacaagtttttgagacactggatttctttaattaaaaaaaaaatgccaagaaacattatttatacagggttgattgctttcatgttgttattctgtaccctatagtagcctccatgagaatctggtatttcttgctgcttggaactactttgcagtgattacttggttgcagtccaagtactctcgtttagtctgagcctggagatgttctagacttgcttctcccacctctgagattaggacaggaaaaatgtgaaatttcccaattacaggattatacggtaccatcacatcatttgtggaaattggggtgactgtatagctgggattgggctaaggactgtggtcttatctgtccacatacagccaaaatgcctatccagaaatccagttcgttggaaaggaaaattggtactcctgtgccacaggggttccagaaaagggaagtcactttaccttgcggtggtgggatcctgatgtctttcatccatttgtagtaaaagctggtaaagcttttcttactcctggttccctaccagtatttctaaacatgtcgcactttctccacaggcatgtggttttgacctttttttcaatcttctagaaagggaacggaagcagaagtgggacatcgagggctctgctgtcctctgcgctgggtgtggaatgctgctgcacctgtcccttctgctggctcagggaagtgtcttcttgcccacatttctgtggggaaaggtttttaatcctctgatgcttccatcttcctgtttaggccatgtgcccagaaacctggactgatctttctttaatagtgaacccctgggccactgaagagtaacatggctccactggacacaaaagagggatggaatcaacaggcagggggccttttataagccttaggaaaagaaaatgaaactatttcatctttggacttttcaatactattggagtgatttttttctttctaaacagggaaaataatgttacaaaagcatcttttttgttatttgtttgcatccctcccccacaccctggtgttttaaaatgaagaaaaaaaaccatcaccttttgtacaaaaactcttaatgattaaaaaacaaacaaaacataaaaaaaaaaaaaaaaaa

SEQ ID NO: 1729 - DNA, 4909 bp, Homo sapiens; identical to SEQ ID NO: 707

SEQ ID NO: 1730 - DNA, 3690 bp, Homo sapiens; identical to SEQ ID NO: 1445

SEQ ID NO: 1731 - DNA, 3011 bp, Homo sapiens; identical to SEQ ID NO: 771

SEQ ID NO: 1732 - DNA, 3050 bp, Homo sapiens; identical to SEQ ID NO: 1453

SEQ ID NO: 1733 - DNA, 4729 bp, Homo sapiens
cgagactcagccagaggagtacggattaagtggccgaagaaagaggagtgaggcaggggagcgaggcggacgctccgagcgcatcggactcacctgggccggcggcgagcggcgagtacgagtggactcttgccctccgcagcatgcgccccgcctgctaagtcgccgccgtctcgccctcacctagcaccgccaatcccgcctggatggagtcccctctgggttcccattggctcctgtgagtgcttgggtgtcgggagcctgtttttggcgaggggaaccaacttttgaagttcgcccagaagactgcgttccagccccagttccccggcagcgggacccggcgaagacgcgaccgcggcgcgagtcaccatgggaagcaaaggtgtctaccagtaccactggcaaagccacaatgtcaagcacagtggtgtggacgacatggtgctactgtccaagatcacagagaactccatcgtggagaatctgaagaagagatacatggatgactacatttttacatatataggatctgtattaatctcagtcaaccctttcaagcagatgccatattttggggaaaaggaaattgaaatgtaccaaggagcggcacagtatgaaaacccaccacatatctatgcccttgcagataatatgtacagaaacatgatcattgacagagagaaccagtgcgtcattatcagtggtgaaagtggtgctggaaaaacagtggctgccaaatatatcatgagctacatctccagagtgtctggaggagggaccaaagtccagcacgtgaaggacattatcctgcagtccaacccgctgctggaggccttcgggaacgccaagaccgtccggaacaacaactccagccgatttggaaaatactttgaaatccagttcagtccaggtggggaaccagatggtggaaagatctccaacttccttctggaaaaatctagggtggtgatgaggaacccaggagagcggagttttcacatattttaccagctcatcgagggcgcctctgcagagcagaaacacagccttggcatcaccagcatggactattattactacctgagcctctcgggctcatacaaggttgatgacattgacgacaggcgggagtttcaggaaactctgcacgccatgaatgtgattgggatctttgcagaagagcaaacgctggtgttgcagatagtggcgggtattctccacctgggaaacatcagcttcaaagaagttggcaactacgcggctgtggagagtgaagagtttttagcttttcctgcatatctgctagggataaaccaggaccggttgaaagaaaagctaacaagccggcagatggatagcaagtggggaggcaaatccgaatccatccacgtgaccctcaacgtagagcaggcctgttacacccgggatgcgctcgccaaggccctgcacgcccgggtctttgatttcttggtagattccatcaataaagccatggagaaagaccatgaagaatacaacattggcgtcctagacatctatggctttgaaatattccagaaaaatggctttgaacagttttgtatcaattttgttaatgaaaaactgcagcagatttttattgaactgacattaaaggcagaacaggaagaatatgttcaagagggaataagatggacacccattgagtactttaataataaaatcgtatgtgacctcatagagaacaaagtgaaccctcctggcatcatgagcatcctggatgacgtgtgcgccacgatgcatgcggtgggtgagggggcagatcagacgctgctccagaaacttcagatgcagattgggagtcatgagcacttcaacagttggaaccaaggcttcatcattcatcattatgctgggaaggtatcctatgacatggatggcttttgtgaaaggaaccgggatgtgctttttatggatctcatcgagcttatgcagagcagcgagctgcctttcataaagtctttatttccggaaaatctgcaggctgacaagaaagggcgcccaactactgccggaagcaaaataaagaaacaagccaatgaccttgtgagcaccctgatgaaatgtacgccccactacattcgctgcatcaagccaaacgaaaccaagaagcccagagactgggaggaaagcagggtaaagcatcaagtcgaatatttgggtctgaaagagaacattcgagtgagaagagctggctatgcctatcggcgcatcttccaaaaattcctacagaggtatgccattctgaccaaagccacctggccttcttggcagggagaggagaagcaaggcgtcctgcacctgctgcagtcggtcaacatggacagcgaccagttccagctggggaggagtaaagtgttcatcaaagcccccgagtctctatttcttttagaagagatgagagagagaaagtatgatgggtatgctcgagtgatacagaaatcatggaggaaattcgtggcccggaagaaatacgttcaaatgagagaagaagcctcagacctcttattgaacaagaaggagagaaggagaaacagtattaacaggaactttataggggattatattgggatggaagagcacccagaactccagcagttcgtgggcaagagggagaagattgatttcgcagacacagtcaccaagtatgacaggaggttcaagggtgtaaagcgagacctgctccttaccccaaagtgcttgtacttaatcggacgagaaaaagtcaaacagggcccagacaagggcctggtgaaagaagtcctgaagcggaaaatcgagatagaacggatcttgtctgtgtccctcagtactatgcaggatgacatttttattctccatgagcaagagtatgacagtttgcttgaatctgtcttcaaaactgaattcctaagcctcttagcaaagcgttacgaggagaagacccagaagcaactacctctgaaattcagcaatacgcttgaactgaagttgaaaaaggaaaactggggcccctggagtgcagggggctcccggcaagtgcagttccaccaagggtttggggacctggctgtcctcaagcccagtaacaaagtgctgcaggtcagcatcggacctggactgcccaagaactcccgtcctaccagaaggaacactacccaaaatacaggttattccagtgggactcaaaatgccaactacccagtgagagctgcccctcctcccccaggataccatcagaacggagtcatcagaaaccagtatgtgccatatccccatgctcctggaagccagaggtccaatcagaaaagcctgtacacctccatggcccgcccgcccttgcctcggcagcagtctaccagttcagaccgagtgtcacagacgccagagagcctggatttcctcaaggtcccggaccagggagctgcaggggtcaggagacaaacaaccagtcggcctcccccagcagggggcagacccaagccccagcccaagcccaagcctcaggtgccacagtgcaaggctttgtatgcctatgacgctcaggacacagacgaactcagctttaatgccaatgacattattgatattatcaaagaagatccttctggctggtggacgggtcgactacgaggcaagcagggcctgttccccaacaactatgtgaccaagatctgaggtgcccgtgactctgacacatggggcagaggagctccaggcacagaccaggggaggggatatttaggggctccccttacaatccacaatgagcaattgcttctccaaggcctggagctattctggtaccttccccatggaggacactgaaaaggctgggttggggacagggagtatcactccataagtgatcctaaaaggtagcctcttcataggaacccaggaggacaaaaccaccatgcattaagatttatttattgtatttaaacctggtgagaggacaagtgaggtctgctcagaccttgtaggcttctatcaaaacagcaccctgcttgctcaccaggcctagagaatggctgtaggtggccgctgacaagtgcctttagttgaagagcacatttctttcatctctcttgtccatacctgatagacacattcctctctgccaccttccttcagggaggacccgccctctgcagactgggcttagcgtgagcaggcacttcccatgtacgtgccaagggtaagctggcctgctgagcccagggcgacagaggggcactggtttacactttgccgggaccatcagggccgccaagcaggtcaggggctgggggctgggggctgggctgctggctttgctttctctgggtcttcaattagaatgtggctggcccatattggtttgtgtttaaatgctgtacttactacaagaaggatcttttttcaagctgtacatttataaaaacagatcatatactgtatatataaaaatcttgagatggtagaaacatgtatgaatgtactaagtagtattccactgtactcattcataaggtaggttttcttacaaaactcacaccaggtacttaaagatgtgctctgcttttttccaactacggagtgtcactgctttctaggtcagtccctgcagactcttctcaactctttccctataggaaacttactccgcgtcctgcccccacctcctaaataaataaaggaatcggcgaacaaaaaaaaaaaaaaa

SEQ ID NO: 1734 - DNA, 987 bp, Homo sapiens; identical to SEQ ID NO: 848

SEQ ID NO: 1735 - DNA, 2707 bp, Homo sapiens; identical to SEQ ID NO: 1438

SEQ ID NO: 1736 - DNA, 1097 bp, Homo sapiens; identical to SEQ ID NO: 1146

SEQ ID NO: 1737 - DNA, 5231 bp, Homo sapiens; identical to SEQ ID NO: 795

SEQ ID NO: 1738 - DNA, 2373 bp, Homo sapiens; identical to SEQ ID NO: 767

SEQ ID NO: 1739 - DNA, 2922 bp, Homo sapiens; identical to SEQ ID NO: 769

SEQ ID NO: 1740 - DNA, 2560 bp, Homo sapiens; identical to SEQ ID NO: 742

SEQ ID NO: 1741 - DNA, 6052 bp, Homo sapiens
cagccgccggcggcgctagcacctcggagtcgggcggccggagcagcggagcgcagcgcggcgcagggaacggcactgggggtggggagaccagcccggccgagccgagggccaccccctggtcctctgccctcgcgccccgctagggccaggtgcacaaaaagctttaaacaagttaaaatctaggcaacagactccctgaagtgttgactgcccaacttaatcatgactgtgattcaaaaatgttaataaataaaccaaggtgtagatcatggggaattcatatgctgggcaactgaaatctgctcgatttgaggaagctctccacaactccatagaagcctccctcagatgtagtagtgtggtaccacggccaattttttcccagctatacctggaccctgaccagcatcctttctcatctgcagatgtcaaacccaaggtggaggatctggacaaagatttggtaaaccgctacactcaaaatggaagtctggatttttctaacaatctaacagttaatgaaatggaagatgatgaagacgatgaagaaatgtctgattcaaacagcccaccaattccctattcacaaaaacctgccccagaaggatcttgcactacagatggtttttgtcaagcaggaaaggatttgcgtttggtatcactgtgtatggaacaaattgacatcccagcaggattcctcctggtgggggccaagtctcccaatctgcctgaacacatcctagtttgtgctgtggacaagcgatttctaccagatgatcatggaaaaaatgcacttttagggttttctggaaattgtatcggctgtggagaaagaggatttcgatatttcacggaattttccaaccacattaacttgaagctcaccactcagccaaagaagcagaagcacttaaagtactacctagtcagaagctcccagggtgtactgtctaaaggacctcttatctgctggaaagaatgtagaagccgacaatcctctgcttcttgccactctattaagccaagctcttcagtgtcgtcaactgtgaccccagaaaatgggacaactaatggatacaaatcaggattcactcagacagatgctgctaatggaaacagtagccatggagggaagggcagtgcatccagctccactccagcccacacagggaattactctttgtcaccacgacctagctatgcatcaggagatcaagctaccatgttcatttctgggccaccaaagaaacgacaccggggatggtatcctgggtcacctctcccccaacctggcttagttgtacctgtccctacagttcgccctctttcaagaacggagccccttttatctgccccagttccacagaccccactaactggaattttacaacccaggcccattcctgcaggggaaactgtaattgttcctgaaaacctgctgagtaactcaggagttagaccagtaattctgataggctatggcactttaccctatttctatggaaatgttggtgacattgttgtgagtcctctgctggtgaattgctacaagattccacagttggaaaacaaagatttggaaaaattagggttgaccggcagccaatttctgagcgtggaaaacatgattcttctgacgatacagtatcttgtgcggctgggtcctgatcaggtacctctcagggaagaatttgagcaaattatgctgaaagctatgcaagaatttactctgagagaaagagccctgcagataggtgctcagtgtgtccctgtgtcaccaggacaactcccctggcttgctagattaattgccagcgtatctcaagacttggttcatgtggttgtgacccagaactctttggcggagggcatttcagagaccttaaggactctcagtgaaatgagacactatcaaaggctgccagattatgtggtggtaatttgtgcatcgaaaatcagaggaaatgaattttgtgtggtagtgttaggtcagcaccagtcccgagctctggcagagagcatgctcaccacaagtgagtttttgaaagaaattagttatgagcttatcacaggaaaggtcagtttcctggcatcacatttcaaaaccacatcattaggcgatgacctagacaagctgctggaaaaaatgcaacaaagaagaggagacagtgtggttacccctttcgatggagaccttaatgaatgtgtgtcaccccaggaggctgctgctatgattcccacacaaaacctggatttagataatgaaaccttccacatttatcaaccgcagctaacagttgccagaaaactcttatcccaggtgtgtgctatagcggacagtggcagccagagcctggacctcggtcacttcagcaaagtagacttcatcatcattgttcccagatcggaggtgttggttcagcaaactcttcagcggattcgacaatcaggtgtccttgtagacttgggtctggaggaaaatgggacagcccatcagagagcagaaaaatatgttgttcgtctagacaatgagattcaaaccaagtttgaagtttttatgaggagagtgaaacagaacccgtacacactgtttgtgctagttcatgacaactcccatgtggaactaacgagtgtcatttcaggctctttgtcacatagcgaacccagtcatgggctagctgatagagtcattaattgcagagaagttctggaagctttcaacctcctggtgctccaggtcagctccttcccatacactctgcagacccaacagtcccgcattagctctagcaatgaggttcactggatacagctggatactggggaggacgtgggctgcgaggagaagctgtactttggcttgagtgagtacagcaagtctctgcagtgggggatcacgagcccacttctgagatgtgacgagacttttgaaaaaatggtgaacacactcttggagaggtaccccaggctgcacagcatggtcgtccgctgctatcttctcatccagcagtactctgaggccctgatggctctcaccaccatggcgtcactccgcgaccacagcacaccagaaacactcagcattatggatgacctcatcagctccccaggcaaaaacaaaagtgggaggggacacatgctcattatcagggtgccctcggtgcagctggcgatgttagccaaggagcggctacaggaggtgcgcgacaaactgggtctgcagtatcggtttgagatcatccttgggaacccggccaccgaactcagtgttgcaactcactttgtggcgcgattaaagagttggagaggaaatgaaccagaagagtggatccctcggacataccaagatttagacggtctaccttgtattgtgatattaactggcaaagatcctcttggagaaacctttcccaggtctttgaagtactgtgacctccggttaattgactcaagctatttaactcgcacggccttggagcaggaggtgggtctggcatgctgctatgtctcaaaagaggtcatccggggacccactgttgccctggacctcagcgggaaggagcaggagagagctgctgtcagtgagaatgactccgatgagctgctcatcgacctggagcggccccagagcaacagcagcgctgtcacagggacctcgggttccatcatggagaatggagtgagctcttccagcacagctgacaagtcccagaagcagtccctgacccccagctttcagagcccagccaccagcttggggctggatgaaggggtctccgccagctcagctggagccggagccggggagactctgaagcaggaatgtgactccctgggcccccagatggcgagcagcaccacctccaagccgtcatcatcatcctcaggacccaggaccctcccatggccgggacagcccatcagaggctgccggggcccacaggcagccctgccaccagtggtgatcctatccaaagcggcctacagtctcctgggctcccagaagagtggcaagctgccatcctcctcctccctgctgccccacgccgacgtggcctgggtgagctccctgcggccactcctgaacaaggacatgagcagtgaggagcagtccctctactacaggcagtggaccttggcccggcagcaccacgctgactatagcaaccagctggacccggcctctggcacccgaaacttccacccccgacggctcctgctgacagggcccccacaggtgggaaagacgggctcctatttacagttcctcaggatcctcttccgcatgctcatcaggctcctggaggtggacgtgtatgatgaggaggagatcaacaccgatcacaatgaaagcagtgaagtgagccagtcagagggagagccctggcctgacatcgagagcttcagtaaaatgccttttgatgtcagtgtgcatgaccccaagtacagtttgatgagcctggtgtatactgagaagctggcaggggtcaaacaagaagtgataaaggaatccaaagttgaagagcccaggaaacgggaaactgtatccataatgctgaccaaatatgcagcctataacacctttcaccactgtgaacagtgccgccagtacatggacttcacctctgcctcccagatgtctgactccacccttcatgccttcacattctcttcttctatgctgggagaagaggttcagctctatttcatcattcccaaatccaaagagagtcattttgtcttcagcaagcagggcaagcacctggagagcatgcggctgcccctggtttcagacaagaatttgaatgcagtcaagagccctattttcactccttccagtggtcgacatgagcacggactcctaaaccttttccacgccatggagggcatcagccaccttcacctcctggtggtcaaagagtatgagatgcctctgtaccgcaagtactggcccaaccacatcatgctggtgcttcccggcatgttcaataatgcaggcgtgggtgctgccaggttcctcatcaaggagctatcatatcacaacctagaattggagagaaaccgcctggaggagctaggcattaaacgccagtgtgtctggcctttcatcgtcatgatggatgactcatgtgtcctatggaacattcacagtgttcaggagccatccagccagcccatggaagtaggagtttccagtaagaatgtgtccttgaagactgtcttgcagcacattgaagccacaccaaaaattgtccactatgcaatcttgggcatacagaaatggagcagcaagctgacttctcagagcctaaaggccccattctctaggtgtcacgtgcatgatttcattctcctcaacacagacttgactcagaatgtgcagtatgacttcaacaggtatttctgtgaagatgctgactttaatctgagaacaaacagtagtggcctgctcatctgccgctttaataacttcagtctcatgaagaaacatgttcaggttggagggcaaagggactttatcattaaaccaaagatcatggtgtcagagagcttagcacccatcttgccccttcaatacatctgtgctcccgacagtgaacacacactactggcagcccctgcacagtttctcctggagaaattccttcagcacgcctcatataaactcttccccaaagccatccataacttcaggagtcctgtgctggccattgactgctaccttaacattggaccagaggtggccatatgctatatcagctccagaccccactccagcaatgtcaactgtgaaggggtgtttttcagtggactccttttgtacctctgtgactcttttgtaggtgctgatcttaagaaatttaaatttctaaaaggtgctacactgtgtgtcatctgccaagacagaagttccttgcgccaaacaattgtccgcttagagctagaagatgagtggcagttccgcctccgggacgagtttcaaactgctaacagcagtgatgacaagcctctctactttcttactggacgtcatgtatgagcttttgaa

SEQ ID NO: 1742 - DNA, 2005 bp, Homo sapiens; identical to SEQ ID NO: 701

SEQ ID NO: 1743 - DNA, 3138 bp, Homo sapiens; identical to SEQ ID NO: 1153

SEQ ID NO: 1744 - DNA, 2395 bp, Homo sapiens
atatagagcaggcgccgcgggtcgcagcacagtgcggagaccgcagccccggagcccgggccagggtccacctgtccccgcagcgccggctcgcgccctcctgccgcagccaccgagccgccgtctagcgccccgacctcgccaccatgagagccctgctggcgcgcctgcttctctgcgtcctggtcgtgagcgactccaaaggcagcaatgaacttcatcaagttccatcgaactgtgactgtctaaatggaggaacatgtgtgtccaacaagtacttctccaacattcactggtgcaactgcccaaagaaattcggagggcagcactgtgaaatagataagtcaaaaacctgctatgaggggaatggtcacttttaccgaggaaaggccagcactgacaccatgggccggccctgcctgccctggaactctgccactgtccttcagcaaacgtaccatgcccacagatctgatgctcttcagctgggcctggggaaacataattactgcaggaacccagacaaccggaggcgaccctggtgctatgtgcaggtgggcctaaagccgcttgtccaagagtgcatggtgcatgactgcgcagatggaaaaaagccctcctctcctccagaagaattaaaatttcagtgtggccaaaagactctgaggccccgctttaagattattgggggagaattcaccaccatcgagaaccagccctggtttgcggccatctacaggaggcaccgggggggctctgtcacctacgtgtgtggaggcagcctcatcagcccttgctgggtgatcagcgccacacactgcttcattgattacccaaagaaggaggactacatcgtctacctgggtcgctcaaggcttaactccaacacgcaaggggagatgaagtttgaggtggaaaacctcatcctacacaaggactacagcgctgacacgcttgctcaccacaacgacattgccttgctgaagatccgttccaaggagggcaggtgtgcgcagccatcccggactatacagaccatctgcctgccctcgatgtataacgatccccagtttggcacaagctgtgagatcactggctttggaaaagagaattctaccgactatctctatccggagcagctgaaaatgactgttgtgaagctgatttcccaccgggagtgtcagcagccccactactacggctctgaagtcaccaccaaaatgctgtgtgctgctgacccacagtggaaaacagattcctgccagggagactcagggggacccctcgtctgttccctccaaggccgcatgactttgactggaattgtgagctggggccgtggatgtgccctgaaggacaagccaggcgtctacacgagagtctcacacttcttaccctggatccgcagtcacaccaaggaagagaatggcctggccctctgagggtccccagggaggaaacgggcaccacccgctttcttgctggttgtcatttttgcagtagagtcatctccatcagctgtaagaagagactgggaagataggctctgcacagatggatttgcctgtgccacccaccagggcgaacgacaatagctttaccctcaggcataggcctgggtgctggctgcccagacccctctggccaggatggaggggtggtcctgactcaacatgttactgaccagcaacttgtctttttctggactgaagcctgcaggagttaaaaagggcagggcatctcctgtgcatgggtgaagggagagccagctcccccgacggtgggcatttgtgaggcccatggttgagaaatgaataatttcccaattaggaagtgtaacagctgaggtctcttgagggagcttagccaatgtgggagcagcggtttggggagcagagacactaacgacttcagggcagggctctgatattccatgaatgtatcaggaaatatatatgtgtgtgtatgtttgcacacttgtgtgtgggctgtgagtgtaagtgtgagtaagagctggtgtctgattgttaagtctaaatatttccttaaactgtgtggactgtgatgccacacagagtggtctttctggagaggttataggtcactcctggggcctcttgggtcccccacgtgacagtgcctgggaatgtattattctgcagcatgacctgtgaccagcactgtctcagtttcactttcacatagatgtccctttcttggccagttatcccttccttttagcctagttcatccaatcctcactgggtggggtgaggaccactcctgtacactgaatatttatatttcactatttttatttatatttttgtaattttaaataaaagtgatcaataaaatgtgatttttctgatgacaaaaaaaaaaaaaaaaaaaa

SEQ ID NO: 1745 - DNA, 7553 bp, Homo sapiens
agatgccaccaccactgccaagcagctgcattcctcgccgggaaattcctccaggcaagagaacgcagagacgcccgcccgcagtccgggggaggacgcttcaccaggtgctggccacgaacaggaggctttcctgggtgtgaggggtgcgccagggtcgcccacccaggagcggcccgcgggaggactaggcgaggcccctaacggagcccccagtgtgtgtgccgaagaaggctccctggggccccgcaacgcccgcagccagccccccaagggcgcgtctgatttgccaggtgagcctccggccgagggcgcagcgcacacggccagctccgcgcaggcagactgcacagcccgccccaagggtcacgcccaccctgctaaggtgctaactttggacatctacttgagtaagactgagggggcacaagtggacgagccggtcgtgattactcccagagcggaagattgcggtgactgggacgacatggagaagaggtccagcggccgtaggtcggggaggcggagggggtcgcagaaatccaccgactcccccggcgcggacgccgagctccctgagagcgctgccagggacgacgcggtgttcgacgacgaggtggcgccaaacgcggccagcgataacgcctcggcggaaaagaaagtgaaatctccgcgggcagccctcgacgggggcgttgcctccgctgcgagcccagagtccaagcccagccccggtaccaaagggcagctccgaggggagtcggaccggagcaaacagccacccccggcttcgtcccccacgaagaggaagggcaggagccgtgccctcgaggccgtgcccgccccgcccgccagcggcccccgggctcccgccaaggagtccccacccaagagggtgcccgatcccagcccagtcaccaagggcactgcggccgagagcggggaggaggcggcgcgggccatcccccgcgagctcccggtcaagagcagctcgctgctgccggagatcaagcccgagcacaagaggggcccgctccccaaccacttcaacggccgggcagagggaggtcgaagcagagagctgggcagagcggccggagcgcctggagcttctgacgccgacggcttgaagcccaggaaccatttcggcgtgggcaggtcgacagtgaccactaaagtgaccctccctgccaagcccaaacatgtggaactaaatcttaaaacccctaagaatcttgacagtttgggaaatgagcacaatccatttagccagccagttcacaaaggcaacactgccaccaaaatctccttatttgaaaacaaacggacaaacagtagcccaagacacactgacattcgaggccaaaggaatactcctgcctctagtaaaacgtttgttgggagggcaaagctgaatttagccaaaaaagccaaagaaatggagcaacctgaaaagaaagtaatgccaaacagtccccagaatggtgtgctggttaaggaaactgctatagaaaccaaagttaccgtctcggaagaagagattctgccagcaaccagaggaatgaatggagactcttctgagaatcaagctcttggtcctcagcctaaccaagatgataaagcagatgtacaaacagatgctggctgcctttcagaaccagtggcttctgctctgattcctgtcaaggatcataagctcttagagaaggaggactcagaggctgcagacagcaaaagccttgtacttgaaaatgtaaccgatacagcacaagacatccccaccactgtggataccaaagatttacctccaacggccatgccaaagccacagcatacattttctgactcacagtcccctgctgagtcatctcctgggccttctctttcactgtctgcacccgctcctggggatgttcccaaagacacatgtgttcaatcacccataagcagtttcccatgcactgatctaaaagtgtcagaaaaccataaaggatgtgttttgcctgtgtctcgtcagaacaatgagaaaatgccacttttagaacttggaggagaaacaacccctcctttgtccacagagcgtagtccagaagctgtgggaagtgagtgtccatccagagtcctcgtccaggtcaggtccttcgtgctccccgtggagagcacccaggatgtgagctcccaggtcatcccagagagctctgaagttagagaagtgcagttgccaacttgtcacagtaatgaacctgaagtggtttccgttgcaagttgtgctcccccacaagaggaagtactgggcaatgaacactctcattgcacagcagagctcgcggcaaaatctggcccacaagtcataccgccagcatcagagaaaactctgcctattcaggctcaaagtcagggcagcagaacacccctgatggctgaatccagtcccaccaactctcccagcagcggaaatcacttagccactcctcaaaggccagatcagactgttacaaatggccaggatagccctgccagccttttgaacatttctgctggtagtgatgatagtgtatttgattcttcttctgatatggaaaaattcactgaaattataaaacagatggatagcgcagtttgtatgcccatgaaaagaaagaaggccaggatgccaaactctcctgctcctcactttgccatgcctcctattcacgaagaccatttagaaaaggtgtttgatcccaaagtgtttacctttggtttggggaagaagaaggaaagtcagccagaaatgtcaccggctttacatttgatgcagaaccttgacacaaaatccaaactgagacccaaacgtgcatctgctgaacagagcgtcctcttcaagtccctgcacaccaacactaatgggaacagtgagcctctggtgatgccggaaatcaatgacaaagagaacagggacgtcacaaatggtggcattaagagatcgagactagaaaaaagtgcacttttctcaagcttgttatcttctttaccacaagacaaaatcttttctccttctgtgacatcagtcaacactatgaccacggctttcagtacttctcagaacggttccctatctcagtcttcagtgtcacagcccacgactgagggtgccccgccctgtggtttgaacaaagaacagtcaaatcttctgcccgacaactccttaaaggtcttcaatttcaactcgtcaagtacatcacactccagtttgaaaagtccaagccacatggaaaaatacccgcaaaaagagaaaaccaaagaagatctggattcacgaagcaacctacacttgccagaaactaaattttctgaattgtcaaaactgaagaatgatgatatggaaaaggctaatcatattgaaagtgttattaaatcaaacttgccaaactgtgcaaacagtgacaccgacttcatgggtcttttcaaatcaagccggtatgacccaagcatttctttttctggaatgtcattatcagacacaatgacacttagaggaagtgtccaaaataaactcaatccccgacctggaaaggtagtgatatatagtgaacccgacgtctctgagaagtgcattgaagttttcagtgacattcaggattgcagttcttggagcctctctccagtgatactcataaaagttgttagaggatgttggattttgtatgagcaaccaaattttgaagggcactccatccccttagaagaaggagaattggaactctctggtctctggggtatagaagacattttggaaaggcacgaagaagcagagtctgataagccagtggtgattggttccatcagacatgtggttcaggattacagagttagtcacattgacttatttactgaaccagaagggttaggaatcctaagttcctactttgatgatactgaagaaatgcagggatttggtgtaatgcagaagacttgttccatgaaagtacattggggcacgtggctgatttatgaagaacctggatttcagggtgttcctttcatcctggaacctggtgaataccctgacttgtccttctgggatacagaagcagcgtacattggatccatgcggcctctgaaaatgggtggccgtaaagttgaattccctacagatccaaaggtagttgtttatgaaaagcctttctttgaaggaaaatgtgtggaactagaaacaggaatgtgtagttttgtcatggagggaggtgaaacagaagaggcgactggagacgatcatttgccgtttacgtcagtggggtctatgaaagttctaagaggcatttgggttgcatatgagaaacctggatttaccggtcatcagtatttgctagaagaaggagaatacagggactggaaagcctggggaggttacaatggagagcttcagtctttacgacctatattaggtgatttttcaaatgctcacatgataatgtacagtgaaaaaaactttggatccaaaggttccagtattgatgtattgggaattgttgctaatttaaaggagactggatatggagtgaagacacagtctattaatgtactgagtggagtatgggtagcctatgaaaatcctgacttcacaggagaacagtatatactggataaaggattttataccagttttgaggactggggaggcaaaaattgtaagatctcttctgttcaacctatatgtttggattctttcactggcccaaggagacgaaatcagattcacttgttttcagaaccacagtttcaaggtcacagtcaaagttttgaagaaacaacaagtcaaattgatgattcattttctaccaagtcttgcagagtttcaggaggcagctgggttgtatatgatggagaaaatttcactggtaatcaatacgtgttggaagaaggccattatccttgtctgtctgcaatgggatgcccgcctggagcaactttcaagtctcttcgttttatagatgttgaattttctgaaccaacaattattctctttgaaagagaagacttcaaaggaaaaaagattgaacttaatgcagaaactgtcaatctccgatccctgggattcaacacacaaatacgctctgttcaggttattggtggcatatgggttacttatgaatatggcagttacagagggcgacagttcctattgtcacctgcagaagtacctaattggtatgaattcagtggctgtcgccaaataggttctctacgaccttttgttcagaagcgaatttatttcagacttcgaaacaaagcaacagggttattcatgtcaaccaatggaaacttagaggatctgaagcttctgaggatacaggtcatggaggatgtcggggccgatgatcagatttggatctatcaagaaggatgtatcaaatgcaggatagcagaagactgctgcctgacgattgtgggcagcctggtaacatctggctccaagctaggcctggccctggaccagaatgctgacagccagttctggagcttgaagtccgatggcaggatttacagcaagttgaagccaaatttagttttagacattaaagggggcacacagtatgatcaaaatcacattatcctcaacactgtcagcaaagagaagtttacacaagtgtgggaagccatggtcctatatacctgaacaaagaaggaagaagaatcttctggaggtccttccagccaccttatttcttaaaaaggacaatgctgatggaagaccagactggaaagtggatcgactcctccttcattgattctaaattcaaccttaaatcatgctgccatgactcagagaacttactcatcgtttcaaaagactatcatagctttaaaccaataatttgtcctcctttcatttcttgcctttcatttttggtagctgcttaaacaggttgcctaattagcagcttttgggtgattttgtaaaatgttatatcaagatttcaagactgtgtacattttaaattatttccaaagatagtgacaggagagaactggaacaaatttaccaactttgtggacctacaaagcccttacactttaaagggtaagacaaaggcttaagtttgaaaggtagagaactgtttagcatctgagaagaaatactttattaggcctgtaattttggttcttggccttaaacactttctggaacctttaaatatgctgcatagcacaatgggaaagccttaggtattcacacatttaaggaactctaaacaaaatactattttcctttagttcatattaaaaattaatacattttaaaaatttaatgtcaaagtctggtaacatttgttagtaggatttgagttattattttttgagacaggatctcaggctggagtgcagtggcacaatcacggctcactgcagcctctacctccccaggctcaggtgatcctcccacctcagcctcccaagtagctgggactataggcacacatcaccaagcccagccaaattttgttttttttttgtagagatggggtttcatcacgttgcccaggctgatctcgaacctctgggctcaagcaattcactcgcctcggcctcccaaaatgctgggattacaggcctgagccactgcgcccagccaggatttgaattattttaactcatccatgggctgccctagaatgtcacaaatgagggttgtttaatgcctttcttatagctgctactggaacactattatgacctaatttatgagccatccttactcatctacaagtgctgaagcaatgttacatacttttttgctaaactcagattttttagcctaatttcttgtcctcctatccacctgcatccacacatggcctgcatggggctgccttccctgcagtgttctgcagccatgcttcagggtatagctgttggtggacagcctcaggtcttgggggcactatagccactaaacgaggtgtgaaaggctcaagaggatgaccagcaattaattatccccagaaagtgaaggaaaagagacctttagggatgttgctggtcaagtcttgatttgaccggagtcaaatcaatcttcaagcaatcttggaatcctcaactgcagtaagcatttcaaaatgcaaacaaactgcttaacaactgacaagacaccagcccatacgctgctcttccaacagtgggttctagctttgaacaaaagtgctaaacatttccttgaatatattcttcctctttttgtcctcatcactcaatactggtgctcttgtcacaggtagaacagcttgtttcttttccatctattcaagtgtgtttctaattctaaaatgctgatcttctctggagtctatggtaggcaattatggtcactggaatagtttgtcttgttttaaaatattattggtgcatgtacaacagcatccaacatatctgtcttgttcctagatatatagctctgattttaggccttttgtgcataccattacaatatggtggggtaagacattctacagtagcctgtgctgaactgatctcttaaataaacttgcttctggttaactatgttgatgaaa

SEQ ID NO: 1746 - DNA, 519 bp, Homo sapiens; identical to SEQ ID NO: 743

SEQ ID NO: 1747 - DNA, 4978 bp, Homo sapiens
ggtttccggagctgcggcggcgcagactgggagggggagccgggggttccgacgtcgcagccgagggaacaagccccaaccggatcctggacaggcaccccggcttggcgctgtctctccccctcggctcggagaggcccttcggcctgagggagcctcgccgcccgtccccggcacacgcgcagccccggcctctcggcctctgccggagaaacagttgggacccctgattttagcaggatggcccaatggaatcagctacagcagcttgacacacggtacctggagcagctccatcagctctacagtgacagcttcccaatggagctgcggcagtttctggccccttggattgagagtcaagattgggcatatgcggccagcaaagaatcacatgccactttggtgtttcataatctcctgggagagattgaccagcagtatagccgcttcctgcaagagtcgaatgttctctatcagcacaatctacgaagaatcaagcagtttcttcagagcaggtatcttgagaagccaatggagattgcccggattgtggcccggtgcctgtgggaagaatcacgccttctacagactgcagccactgcggcccagcaagggggccaggccaaccaccccacagcagccgtggtgacggagaagcagcagatgctggagcagcaccttcaggatgtccggaagagagtgcaggatctagaacagaaaatgaaagtggtagagaatctccaggatgactttgatttcaactataaaaccctcaagagtcaaggagacatgcaagatctgaatggaaacaaccagtcagtgaccaggcagaagatgcagcagctggaacagatgctcactgcgctggaccagatgcggagaagcatcgtgagtgagctggcggggcttttgtcagcgatggagtacgtgcagaaaactctcacggacgaggagctggctgactggaagaggcggcaacagattgcctgcattggaggcccgcccaacatctgcctagatcggctagaaaactggataacgtcattagcagaatctcaacttcagacccgtcaacaaattaagaaactggaggagttgcagcaaaaagtttcctacaaaggggaccccattgtacagcaccggccgatgctggaggagagaatcgtggagctgtttagaaacttaatgaaaagtgcctttgtggtggagcggcagccctgcatgcccatgcatcctgaccggcccctcgtcatcaagaccggcgtccagttcactactaaagtcaggttgctggtcaaattccctgagttgaattatcagcttaaaattaaagtgtgcattgacaaagactctggggacgttgcagctctcagaggatcccggaaatttaacattctgggcacaaacacaaaagtgatgaacatggaagaatccaacaacggcagcctctctgcagaattcaaacacttgaccctgagggagcagagatgtgggaatgggggccgagccaattgtgatgcttccctgattgtgactgaggagctgcacctgatcacctttgagaccgaggtgtatcaccaaggcctcaagattgacctagagacccactccttgccagttgtggtgatctccaacatctgtcagatgccaaatgcctgggcgtccatcctgtggtacaacatgctgaccaacaatcccaagaatgtaaacttttttaccaagcccccaattggaacctgggatcaagtggccgaggtcctgagctggcagttctcctccaccaccaagcgaggactgagcatcgagcagctgactacactggcagagaaactcttgggacctggtgtgaattattcagggtgtcagatcacatgggctaaattttgcaaagaaaacatggctggcaagggcttctccttctgggtctggctggacaatatcattgaccttgtgaaaaagtacatcctggccctttggaacgaagggtacatcatgggctttatcagtaaggagcgggagcgggccatcttgagcactaagcctccaggcaccttcctgctaagattcagtgaaagcagcaaagaaggaggcgtcactttcacttgggtggagaaggacatcagcggtaagacccagatccagtccgtggaaccatacacaaagcagcagctgaacaacatgtcatttgctgaaatcatcatgggctataagatcatggatgctaccaatatcctggtgtctccactggtctatctctatcctgacattcccaaggaggaggcattcggaaagtattgtcggccagagagccaggagcatcctgaagctgacccaggtagcgctgccccatacctgaagaccaagtttatctgtgtgacaccaacgacctgcagcaataccattgacctgccgatgtccccccgcactttagattcattgatgcagtttggaaataatggtgaaggtgctgaaccctcagcaggagggcagtttgagtccctcacctttgacatggagttgacctcggagtgcgctacctcccccatgtgaggagctgagaacggaagctgcagaaagatacgactgaggcgcctacctgcattctgccacccctcacacagccaaaccccagatcatctgaaactactaactttgtggttccagattttttttaatctcctacttctgctatctttgagcaatctgggcacttttaaaaatagagaaatgagtgaatgtgggtgatctgcttttatctaaatgcaaataaggatgtgttctctgagacccatgatcaggggatgtggcggggggtggctagagggagaaaaaggaaatgtcttgtgttgttttgttcccctgccctcctttctcagcagctttttgttattgttgttgttgttcttagacaagtgcctcctggtgcctgcggcatccttctgcctgtttctgtaagcaaatgccacaggccacctatagctacatactcctggcattgcactttttaaccttgctgacatccaaatagaagataggactatctaagccctaggtttctttttaaattaagaaataataacaattaaagggcaaaaaacactgtatcagcatagcctttctgtatttaagaaacttaagcagccgggcatggtggctcacgcctgtaatcccagcactttgggaggccgaggcggatcataaggtcaggagatcaagaccatcctggctaacacggtgaaaccccgtctctactaaaagtacaaaaaattagctgggtgtggtggtgggcgcctgtagtcccagctactcgggaggctgaggcaggagaatcgcttgaacctgagaggcggaggttgcagtgagccaaaattgcaccactgcacactgcactccatcctgggcgacagtctgagactctgtctcaaaaaaaaaaaaaaaaaaaagaaacttcagttaacagcctccttggtgctttaagcattcagcttccttcaggctggtaatttatataatccctgaaacgggcttcaggtcaaacccttaagacatctgaagctgcaacctggcctttggtgttgaaataggaaggtttaaggagaatctaagcattttagacttttttttataaatagacttattttcctttgtaatgtattggccttttagtgagtaaggctgggcagagggtgcttacaaccttgactccctttctccctggacttgatctgctgtttcagaggctaggttgtttctgtgggtgccttatcagggctgggatacttctgattctggcttccttcctgccccaccctcccgaccccagtccccctgatcctgctagaggcatgtctccttgcgtgtctaaaggtccctcatcctgtttgttttaggaatcctggtctcaggacctcatggaagaagagggggagagagttacaggttggacatgatgcacactatggggccccagcgacgtgtctggttgagctcagggaatatggttcttagccagtttcttggtgatatccagtggcacttgtaatggcgtcttcattcagttcatgcagggcaaaggcttactgataaacttgagtctgccctcgtatgagggtgtatacctggcctccctctgaggctggtgactcctccctgctggggccccacaggtgaggcagaacagctagagggcctccccgcctgcccgccttggctggctagctcgcctctcctgtgcgtatgggaacacctagcacgtgctggatgggctgcctctgactcagaggcatggccggatttggcaactcaaaaccaccttgcctcagctgatcagagtttctgtggaattctgtttgttaaatcaaattagctggtctctgaattaagggggagacgaccttctctaagatgaacagggttcgccccagtcctcctgcctggagacagttgatgtgtcatgcagagctcttacttctccagcaacactcttcagtacataataagcttaactgataaacagaatatttagaaaggtgagacttgggcttaccattgggtttaaatcatagggacctagggcgagggttcagggcttctctggagcagatattgtcaagttcatggccttaggtagcatgtatctggtcttaactctgattgtagcaaaagttctgagaggagctgagccctgttgtggcccattaaagaacagggtcctcaggccctgcccgcttcctgtccactgccccctccccatccccagcccagccgagggaatcccgtgggttgcttacctacctataaggtggtttataagctgctgtcctggccactgcattcaaattccaatgtgtacttcatagtgtaaaaatttatattattgtgaggttttttgtcttttttttttttttttttttttggtatattgctgtatctactttaacttccagaaataaacgttatataggaaccgtaaaaa

SEQ ID NO: 1748 - DNA, 2463 bp, Homo sapiens; identical to SEQ ID NO: 770

SEQ ID NO: 1749 - DNA, 3313 bp, Homo sapiens; identical to SEQ ID NO: 693

SEQ ID NO: 1750 - DNA, 3784 bp, Homo sapiens; identical to SEQ ID NO: 711

SEQ ID NO: 1751 - DNA, 1803 bp, Homo sapiens; identical to SEQ ID NO: 1161

SEQ ID NO: 1752 - DNA, 1870 bp, Homo sapiens
acaggaagccacatcaaaccctggggcctttgctgggcctctccatctgcccagttactgggaggtagatagccccaggaaggaatccagtcaggcctgggcaccaggccaggagtggataaagctagaaagagacaccacagaagagaagatgtttgaacagctgaagccaatcgaacctgtacagaagacgctcccatgggtgggcgaggtagctgccaccctgcaggaagccatgaagagagattgctggagggaggcacgggtgaagaagaagccagtcacctttgaggatgtggcagtgaatttcacccaggaagagtgggactgtctagatgccagccagagggtcctttaccaggatgttatgtcggaaacctttaagaatctaacatctgtggccagaatctttctgcataagccagagctaatcaccaagcttgagcaagaagaggaacagtggagagagtttgtccatctcccaaacacagaaggcctttcagaaggcaagaagaaagagcttcgagaacaacatcccagtctgagagatgaggggactagtgatgacaaggtcttccttgcatgcagaggggccggccagtgccccctatctgccccagctgggactatggacaggacccgggtgcttcaagcatcccaggctgggccaccctttttttgctacacctgtggcaaatgtttcagcaggcgctcctacctctatagccaccagtttgttcacaatcccaagctgactaacagctgcagtcagtgtgggaagttgtttcggagccccaagtccctcagctatcacagacgcatgcatcttggggagaggcccttctgttgcacgctctgtgacaagacctactgtgatgcttctggactaagtcgtcaccgccgcgtccatctgggttaccggccccattcatgctctgtgtgtgggaagagcttccgggaccagtctgagctcaaacgccaccagaagatacaccaaaaccaggagccagtggatggaaaccaggagtgtactttgaggattccaggcacccaggctgaattccagacacccatcgccagaagccagaggtccatccaggggcttttggatgtgaaccatgcaccagtggccaggtcccaggaacccatatttagaactgagggtcctatggcccagaaccaggcatctgtacttaagaaccaagcacctgtgaccaggacccaggcacccatcactggaaccctctgtcaggatgccagatccaactctcatccagtgaagccctcaagactcaatgtcttctgttgcccccattgttctttgacttttagcaagaaatcctatctctccagacaccagaaggcccacctcacagagccgcccaactactgcttccattgcagcaagtctttcagctcattttccaggctggtcagacaccagcagacccactggaagcagaagagctacctttgccctatctgtgacctctcctttggggagaaagagggccttatggatcactggaggggctataaaggcaaggacctgtgccagagcagccaccataaatgccgggtgatcctgggccagtggcttggcttctctcatgatgtccccactatggctggggaggaatggaagcatggaggtgatcaatctccccccaggatccatacccccaggagaagaggcctaagagagaaggcctgcaaaggagacaaaacaaaggaggcagtgagcatcttgaaacataaataaatggcctttctgactgagctctttctttgtgtttagttttcctgaggactgacctctggggtaatgaggctggagtagagggagacaggtgcgtggataaggaaggaa

SEQ ID NO: 1753 - DNA, 12926 bp, Homo sapiens; identical to SEQ ID NO: 739

SEQ ID NO: 1754 - DNA, 2620 bp, Homo sapiens; identical to SEQ ID NO: 1441

SEQ ID NO: 1755 - DNA, 9309 bp, Homo sapiens
atgccgccgctcctggcgcccctgctctgcctggcgctgctgcccgcgctcgccgcacgaggcccgcgatgctcccagcccggtgagacctgcctgaatggcgggaagtgtgaagcggccaatggcacggaggcctgcgtctgtggcggggccttcgtgggcccgcgatgccaggaccccaacccgtgcctcagcaccccctgcaagaacgccgggacatgccacgtggtggaccgcagaggcgtggcagactatgcctgcagctgtgccctgggcttctctgggcccctctgcctgacacccctggacaatgcctgcctcaccaacccctgccgcaacgggggcacctgcgacctgctcacgctgacggagtacaagtgccgctgcccgcccggctggtcagggaaatcgtgccagcaggctgacccgtgcgcctccaacccctgcgccaacggtggccagtgcctgcccttcgaggcctcctacatctgccactgcccacccagcttccatggccccacctgccggcaggatgtcaacgagtgtggccagaagcccgggctttgccgccacggaggcacctgccacaacgaggtcggctcctaccgctgcgtctgccgcgccacccacactggccccaactgcgagcggccctacgtgccctgcagcccctcgccctgccagaacgggggcacctgccgccccacgggcgacgtcacccacgagtgtgcctgcctgccaggcttcaccggccagaactgtgaggaaaatatcgacgattgtccaggaaacaactgcaagaacgggggtgcctgtgtggacggcgtgaacacctacaactgccgctgcccgccagagtggacaggtcagtactgtaccgaggatgtggacgagtgccagctgatgccaaatgcctgccagaacggcgggacctgccacaacacccacggtggctacaactgcgtgtgtgtcaacggctggactggtgaggactgcagcgagaacattgatgactgtgccagcgccgcctgcttccacggcgccacctgccatgaccgtgtggcctccttctactgcgagtgtccccatggccgcacaggtctgctgtgccacctcaacgacgcatgcatcagcaacccctgtaacgagggctccaactgcgacaccaaccctgtcaatggcaaggccatctgcacctgcccctcggggtacacgggcccggcctgcagccaggacgtggatgagtgctcgctgggtgccaacccctgcgagcatgcgggcaagtgcatcaacacgctgggctccttcgagtgccagtgtctgcagggctacacgggcccccgatgcgagatcgacgtcaacgagtgcgtctcgaacccgtgccagaacgacgccacctgcctggaccagattggggagttccagtgcatctgcatgcccggctacgagggtgtgcactgcgaggtcaacacagacgagtgtgccagcagcccctgcctgcacaatggccgctgcctggacaagatcaatgagttccagtgcgagtgccccacgggcttcactgggcatctgtgccagtacgatgtggacgagtgtgccagcaccccctgcaagaatggtgccaagtgcctggacggacccaacacttacacctgtgtgtgcacggaagggtacacggggacgcactgcgaggtggacatcgatgagtgcgaccccgacccctgccactacggctcctgcaaggacggcgtcgccaccttcacctgcctctgccgcccaggctacacgggccaccactgcgagaccaacatcaacgagtgctccagccagccctgccgccacgggggcacctgccaggaccgcgacaacgcctacctctgcttctgcctgaaggggaccacaggacccaactgcgagatcaacctggatgactgtgccagcagcccctgcgactcgggcacctgtctggacaagatcgatggctacgagtgtgcctgtgagccgggctacacagggagcatgtgtaacatcaacatcgatgagtgtgcgggcaacccctgccacaacgggggcacctgcgaggacggcatcaatggcttcacctgccgctgccccgagggctaccacgaccccacctgcctgtctgaggtcaatgagtgcaacagcaacccctgcgtccacggggcctgccgggacagcctcaacgggtacaagtgcgactgtgaccctgggtggagtgggaccaactgtgacatcaacaacaatgagtgtgaatccaacccttgtgtcaacggcggcacctgcaaagacatgaccagtggctacgtgtgcacctgccgggagggcttcagcggtcccaactgccagaccaacatcaacgagtgtgcgtccaacccatgtctgaaccagggcacgtgtattgacgacgttgccgggtacaagtgcaactgcctgctgccctacacaggtgccacgtgtgaggtggtgctggccccgtgtgcccccagcccctgcagaaacggcggggagtgcaggcaatccgaggactatgagagcttctcctgtgtctgccccacgggctggcaagggcagacctgtgaggtcgacatcaacgagtgcgttctgagcccgtgccggcacggcgcatcctgccagaacacccacggcggctaccgctgccactgccaggccggctacagtgggcgcaactgcgagaccgacatcgacgactgccggcccaacccgtgtcacaacgggggctcctgcacagacggcatcaacacggccttctgcgactgcctgcccggcttccggggcactttctgtgaggaggacatcaacgagtgtgccagtgacccctgccgcaacggggccaactgcacggactgcgtggacagctacacgtgcacctgccccgcaggcttcagcgggatccactgtgagaacaacacgcctgactgcacagagagctcctgcttcaacggtggcacctgcgtggacggcatcaactcgttcacctgcctgtgtccacccggcttcacgggcagctactgccagcacgatgtcaatgagtgcgactcacagccctgcctgcatggcggcacctgtcaggacggctgcggctcctacaggtgcacctgcccccagggctacactggccccaactgccagaaccttgtgcactggtgtgactcctcgccctgcaagaacggcggcaaatgctggcagacccacacccagtaccgctgcgagtgccccagcggctggaccggcctttactgcgacgtgcccagcgtgtcctgtgaggtggctgcgcagcgacaaggtgttgacgttgcccgcctgtgccagcatggagggctctgtgtggacgcgggcaacacgcaccactgccgctgccaggcgggctacacaggcagctactgtgaggacctggtggacgagtgctcacccagcccctgccagaacggggccacctgcacggactacctgggcggctactcctgcaagtgcgtggccggctaccacggggtgaactgctctgaggagatcgacgagtgcctctcccacccctgccagaacgggggcacctgcctcgacctccccaacacctacaagtgctcctgcccacggggcactcagggtgtgcactgtgagatcaacgtggacgactgcaatccccccgttgaccccgtgtcccggagccccaagtgctttaacaacggcacctgcgtggaccaggtgggcggctacagctgcacctgcccgccgggcttcgtgggtgagcgctgtgagggggatgtcaacgagtgcctgtccaatccctgcgacgcccgtggcacccagaactgcgtgcagcgcgtcaatgacttccactgcgagtgccgtgctggtcacaccgggcgccgctgcgagtccgtcatcaatggctgcaaaggcaagccctgcaagaatgggggcacctgcgccgtggcctccaacaccgcccgcgggttcatctgcaagtgccctgcgggcttcgagggcgccacgtgtgagaatgacgctcgtacctgcggcagcctgcgctgcctcaacggcggcacatgcatctccggcccgcgcagccccacctgcctgtgcctgggccccttcacgggccccgaatgccagttcccggccagcagcccctgcctgggcggcaacccctgctacaaccaggggacctgtgagcccacatccgagagccccttctaccgttgcctgtgccccgccaaattcaacgggctcttgtgccacatcctggactacagcttcgggggtggggccgggcgcgacatccccccgccgctgatcgaggaggcgtgcgagctgcccgagtgccaggaggacgcgggcaacaaggtctgcagcctgcagtgcaacaaccacgcgtgcggctgggacggcggtgactgctccctcaacttcaatgacccctggaagaactgcacgcagtctctgcagtgctggaagtacttcagtgacggccactgtgacagccagtgcaactcagccggctgcctcttcgacggctttgactgccagcgtgcggaaggccagtgcaaccccctgtacgaccagtactgcaaggaccacttcagcgacgggcactgcgaccagggctgcaacagcgcggagtgcgagtgggacgggctggactgtgcggagcatgtacccgagaggctggcggccggcacgctggtggtggtggtgctgatgccgccggagcagctgcgcaacagctccttccacttcctgcgggagctcagccgcgtgctgcacaccaacgtggtcttcaagcgtgacgcacacggccagcagatgatcttcccctactacggccgcgaggaggagctgcgcaagcaccccatcaagcgtgccgccgagggctgggccgcacctgacgccctgctgggccaggtgaaggcctcgctgctccctggtggcagcgagggtgggcggcggcggagggagctggaccccatggacgtccgcggctccatcgtctacctggagattgacaaccggcagtgtgtgcaggcctcctcgcagtgcttccagagtgccaccgacgtggccgcattcctgggagcgctcgcctcgctgggcagcctcaacatcccctacaagatcgaggccgtgcagagtgagaccgtggagccgcccccgccggcgcagctgcacttcatgtacgtggcggcggccgcctttgtgcttctgttcttcgtgggctgcggggtgctgctgtcccgcaagcgccggcggcagcatggccagctctggttccctgagggcttcaaagtgtctgaggccagcaagaagaagcggcgggagcccctcggcgaggactccgtgggcctcaagcccctgaagaacgcttcagacggtgccctcatggacgacaaccagaatgagtggggggacgaggacctggagaccaagaagttccggttcgaggagcccgtggttctgcctgacctggacgaccagacagaccaccggcagtggactcagcagcacctggatgccgctgacctgcgcatgtctgccatggcccccacaccgccccagggtgaggttgacgccgactgcatggacgtcaatgtccgcgggcctgatggcttcaccccgctcatgatcgcctcctgcagcgggggcggcctggagacgggcaacagcgaggaagaggaggacgcgccggccgtcatctccgacttcatctaccagggcgccagcctgcacaaccagacagaccgcacgggcgagaccgccttgcacctggccgcccgctactcacgctctgatgccgccaagcgcctgctggaggccagcgcagatgccaacatccaggacaacatgggccgcaccccgctgcatgcggctgtgtctgccgacgcacaaggtgtcttccagatcctgatccggaaccgagccacagacctggatgcccgcatgcatgatggcacgacgccactgatcctggctgcccgcctggccgtggagggcatgctggaggacctcatcaactcacacgccgacgtcaacgccgtagatgacctgggcaagtccgccctgcactgggccgccgccgtgaacaatgtggatgccgcagttgtgctcctgaagaacggggctaacaaagatatgcagaacaacagggaggagacacccctgtttctggccgcccgggagggcagctacgagaccgccaaggtgctgctggaccactttgccaaccgggacatcacggatcatatggaccgcctgccgcgcgacatcgcacaggagcgcatgcatcacgacatcgtgaggctgctggacgagtacaacctggtgcgcagcccgcagctgcacggagccccgctggggggcacgcccaccctgtcgcccccgctctgctcgcccaacggctacctgggcagcctcaagcccggcgtgcagggcaagaaggtccgcaagcccagcagcaaaggcctggcctgtggaagcaaggaggccaaggacctcaaggcacggaggaagaagtcccaggacggcaagggctgcctgctggacagctccggcatgctctcgcccgtggactccctggagtcaccccatggctacctgtcagacgtggcctcgccgccactgctgccctccccgttccagcagtctccgtccgtgcccctcaaccacctgcctgggatgcccgacacccacctgggcatcgggcacctgaacgtggcggccaagcccgagatggcggcgctgggtgggggcggccggctggcctttgagactggcccacctcgtctctcccacctgcctgtggcctctggcaccagcaccgtcctgggctccagcagcggaggggccctgaatttcactgtgggcgggtccaccagtttgaatggtcaatgcgagtggctgtcccggctgcagagcggcatggtgccgaaccaatacaaccctctgcgggggagtgtggcaccaggccccctgagcacacaggccccctccctgcagcatggcatggtaggcccgctgcacagtagccttgctgccagcgccctgtcccagatgatgagctaccagggcctgcccagcacccggctggccacccagcctcacctggtgcagacccagcaggtgcagccacaaaacttacagatgcagcagcagaacctgcagccagcaaacatccagcagcagcaaagcctgcagccgccaccaccaccaccacagccgcaccttggcgtgagctcagcagccagcggccacctgggccggagcttcctgagtggagagccgagccaggcagacgtgcagccactgggccccagcagcctggcggtgcacactattctgccccaggagagccccgccctgcccacgtcgctgccatcctcgctggtcccacccgtgaccgcagcccagttcctgacgcccccctcgcagcacagctactcctcgcctgtggacaacacccccagccaccagctacaggtgcctgagcaccccttcctcaccccgtcccctgagtcccctgaccagtggtccagctcgtccccgcattccaacgtctccgactggtccgagggcgtctccagccctcccaccagcatgcagtcccagatcgcccgcattccggaggccttcaagtaaacggcgcgccccacgagaccccggcttcctttcccaagccttcgggcgtctgtgtgcgctctgtggatgccagggccgaccagaggagcctttttaaaacacatgtttttatacaaaataagaacgaggattttaattttttttagtatttatttatgtacttttattttacacagaaacactgcctttttatttatatgtactgttttatctggccccaggtagaaacttttatctattctgagaaaacaagcaagttctgagagccagggttttcctacgtaggatgaaaagattcttctgtgtttataaaatataaacaaagattcatgatttataaatgccatttatttattgattccttttttcaaaatccaaaaagaaatgatgttggagaagggaagttgaacgagcatagtccaaaaagctcctggggcgtccaggccgcgccctttccccgacgcccacccaaccccaagccagcccggccgctccaccagcatcacctgcctgttaggagaagctgcatccagaggcaaacggaggcaaagctggctcaccttccgcacgcggattaatttgcatctgaaataggaaacaagtgaaagcatatgggttagatgttgccatgtgttttagatggtttcttgcaagcatgcttgtgaaaatgtgttctcggagtgtgtatgccaagagtgcacccatggtaccaatcatgaatctttgtttcaggttcagtattatgtagttgttcgttggttatacaagttcttggtccctccagaaccaccccggccccctgcccgttcttgaaatgtaggcatcatgcatgtcaaacatgagatgtgtggactgtggcacttgcctgggtcacacacggaggcatcctacccttttctggggaaagacactgcctgggctgaccccggtggcggccccagcacctcagcctgcacagtgtcccccaggttccgaagaagatgctccagcaacacagcctgggccccagctcgcgggacccgaccccccgtgggctcccgtgttttgtaggagacttgccagagccgggcacattgagctgtgcaacgccgtgggctgcgtcctttggtcctgtccccgcagccctggcagggggcatgcggtcgggcaggggctggagggaggcgggggctgcccttgggccacccctcctagtttgggaggagcagatttttgcaataccaagtatagcctatggcagaaaaaatgtctgtaaatatgtttttaaaggtggattttgtttaaaaaatcttaatgaatgagtctgttgtgtgtcatgccagtgagggacgtcagacttggctcagctcggggagccttagccgcccatgcactggggacgctccgctgccgtgccgcctgcactcctcagggcagcctcccccggctctacgggggccgcgtggtgccatccccagggggcatgaccagatgcgtcccaagatgttgatttttactgtgttttataaaatagagtgtagtttacagaaaaagactttaaaagtgatctacatgaggaactgtagatgatgtatttttttcatcttttttgttaactgatttgcaataaaaatgatactgatggtgaaaaaaaaaaaaaaa

SEQ ID NO: 1756 - DNA, 3979 bp, Homo sapiens
gaacccgcctgtcagccagcctttcgagctaattagctcagcatacaacaaagataagtgagcctgggaagagggccccctgaggggtctttagattctgggaaatgtctgattggcagatgttaaaagggattccttggtaatccagtgcatcaatgagctgcagaaattcagcccaggactgcaagaattcaggcatgaggacactctgtacaggaggctcacacaggcagacccaagatggacagaaccttggaatctctgagacacatcattgcccaagtcttgcctcacagagatccggctctagtcttcaaagacttgaacgttgtgtcaatgttacaggaattttgggaaagcaagcagcagcagaaggctgcattcccaagtgaaggtgtggtggtctatgagtcactgccagctcctgggcctccctttgtgagttacgtgaccctcccagggggaagctgttttggcaactttcagtgctgcttaagtagagccgaggccaggcgggatgcagctaaagtggccctgatcaactccctcttcaatgagctgccctctcgcaggatcaccaaggaattcattatggaaagtgttcaggaagcagtagcctccaccagcggcaccttagatgatgcagatgaccccagcaccagtgttggggcctatcactacatgctggagtcaaacatggggaagactatgctggagtttcaggagctgatgaccattttccaactattgcactggaatggaagcctaaaagcccttcgtgaaacaaagtgttcccgacaggaagtcatctcctactattctcagtattctctagatgaaaagatgcgcagccacatggccctggactggatcatgaaggagcgggactcaccaggaattgtctctcaagagctacgaatggccctgaggcagttggaggaagccaggaaagcaggacaagaactacggttttacaaagaaaagaaagaaatattgagcttagccctgactcagatctgcagtgaccctgacacttcctcacccagtgatgatcagctgagccttacggccctgtgtggctatcactagcaaggccaagccccgggtaccctcagtgatggcagaggccagattaacattaggaatctcagtgcagaggtcctcagaggctccagcatctctagtactacctgaaggctctcctaaccctctccacacattccatttacagagtatgagagtcgtaggacccttacaagacccaacaagccactcgatgcatttttctatcacattctcaatagttccagctcaggatgaaaggatagacacaaaattgtttgaaaaacattttccaggcctggctccaacctaaagcctgactgtcacgtgccttgcttgattttatatatattgtttcaagaatagtccaatatagcattccccaaatgaacagcagccagaattaggtgaagtagcatgatagcagtgtttaaaaatacttaggattaaataaataatatggattgttttaaaaaatatccaaggatcagagtctctttctaagctttgtaagctaagcaatagtttatgtcctactagatacactgcaaactacagtggggattttatctggacatcccaccatcaaagatcttgaaatagtaatagtatgaaaatactagataaaattaatgtttaaaatgtttttgtaacaataatttttaaaacccacactcttccatatatggggataaatatcacctagaaaagtagcctcactcttattcctcaagaattaatatccaatgtttatgagtcttgcaatcaattttgttcatttttaatttgcaaatcgataacctgaactaatttgttcttattttttgccactgcaaacatatatctacagagagaaaaattaatggcattttaaaggttaaaacattttgaaaaattattagcatgtaacaaagaatgcttgcatttgattagtttcaccagcatttgagagaaggaccctttagctctgtttgttgttcaagaacataagcaaccagtagctcaaatgtagtatcattattaagtttaagtcactggaatcttctttaaaggaaggataagacattgccatctctatttaactcatccatatgggtcaatcaactgattagaaaatcaaaaaacaataaaaactttttttttttttttttttttagtagagacgggatttcatcatgttgcccaggctggtcttgaactcctgggctcaagccatctgcctgcctccacctcccaaaatgctgagattacaggtgtgagccaccatgcctggcctaaactaatttttagatagttcctggtcactcaaatttaagaatgtcagcaatgtcaattttaaatgctcataggtctttccatatctgtaacatgaaaatgattattctgcattttattcagtagtccaaattaaagaaaatgtttttctcaatttaaaataatttctttttcttttgtttatgcaagtgcatacatgcttcactgaaagcaaaaccattataattacattaaagtttataaaatatgatattttaacctcatatctaataagtatgtacaaaggtaaccatcactccttaaatccacatgaaaactactgtaactgatcatgtattttggaattagacttgataataaaagattatcatgtatcacatatctcacaccaggggaacaattagctacataattgtcataccttaatatcttttaaaggtaacagtaattttcaacacattttattttaaaatattattttaacaaaagttacattcctctccacaatgaggctaaatgtcacccacgaaagaactttattcccttatattcctgaaaagaaatcagaattaacatttttatgttgaataaattttaaaatttaggaaatgttctatttaaagttaatttctttcataaagccattactctttacattgtcatttccaaaaagccacaatttcccatgctggatgtgatgaaagttaggcacacctttactgcattagcagcctttgacaatgacttcctcaaactgacaccatcttaattagatgcagggacagggatcagatgggacaatatcaaatttactttgtgccctacaagttaaaaactgcacccattctgtaaattgaatatagaggttctcccttggccactgtcagcttttcttgactggccaaaactgcccattcttcctggaatggtatgaaagcttcagcaaaataaataaaagtcagaatctttgctggtccctttaatgctgatttgatagtaaatcaatttcagctgagacataagggctgtcagtctatcatataaacatctttaactatagcctagagaaaagagggttgaagagcaaagcagattttttttttccttttctatatcttgttctgaacaacacactgtgataaaggggactagagtggaagattccctatttaaacacatgaagctctgggtcctagccttttttggttataagccctttgagaatctgataaaagctgtggatcatctcctaggaaaatagaacaaaacatacatattcacattacacagttccagagtatgtggaccccccaaagtccagagattgccctaggggatctttagattcttgtttagaactgttgattttgaacacaacatacactgtcaaactttacatcagggatccaacataactcagacatagcccaggtagcctgtttctaacacaactgtcataatcctgaaatccaaaattgcactgtgtttgacatgagatagtttaagttccacaaaatccaaatttaccatattattgtttttaaaaaagcagtttagagcaaactgtcactaaacttggataaatgggtcagaaagtacagatttaataaagtcgtacctctaatgttcaaaaaaaaaaaaa

SEQ ID NO: 1757 - DNA, 1575 bp, Homo sapiens
tcccacccccagcctggggcctctgggagccttggtcctgagcagccaacacaccagcccagacagctgcaagtcaccatggacgctgaaggcctggcgctgctgctgccgcccgtcaccctggcagccctggtggacagctggctccgagaggactgcccagggctcaactacgcagccttggtcagcggggcaggcccctcgcaggcggcgctgtgggccaaatcccctggggtactggcagggcagcctttcttcgatgccatatttacccaactcaactgccaagtctcctggttcctccccgagggatcgaagctggtgccggtggccagagtggccgaggtccggggccctgcccactgcctgctgctgggggaacgggtggccctcaacacgctggcccgctgcagtggcattgccagtgctgccgccgctgcagtggaggccgccaggggggccggctggactgggcacgtggcaggcacgaggaagaccacgccaggcttccggctggtggagaagtatgggctcctggtgggcggggccgcctcgcaccgctacgacctgggagggctggtgatggtgaaggataaccatgtggtggccgccggtggcgtggagaaggcggtgcgggcggccagacaggcggctgacttcgctctgaaggtggaagtggaatgcagcagcctgcaggaggccgtgcaggcagctgaggctggtgccgaccttgtcctgctggacaacttcaagccagaggagctgcaccccacggccaccgtgctgaaggcccagttcccgagtgtggctgtggaagccagtgggggcatcaccctggacaacctcccccagttctgcgggccgcacatagacgtcatctccatggggatgctgacccaggcggccccagcccttgatttctccctcaagctgtttgccaaagaggtggctccagtgcccaaaatccactagtcctaaaccggaagaggatgacaccggccatgggttaacgtggctcctcaggaccctctgggtcacacatctttagggtcagtggccaatggggcacatttggcactagcttgagcccaactctggctctgccacctgctgctcctgtgacctgtcagggctgacttcacctctgctcatctcagtttcctaatctgtaaaatgggtctaataaaggatcaaccacatggggttctgcggtgataatgagcacatagtgaggggtcagcaaatgtcagaagttacctgggacagccgggcacgatggctcacacctgtaatcccagcactttgggaggctgaggcgggaagatcacttgagttcaggagtttgagaccagcctggccaacatggtgaaaccccatctctaccaaaaatagaagaattagctgggtgtggtggcacgcgcctgtaatcccagctacttaggaggctgaggcaggagaatcgcttgaacccaggaagtggaggttgcagtgagctgatggtgccactgcactccagcctgggtgatagagcgagactctgtctccaaagaagaaaaaaaaaaaaaaaaaaaaaaa

SEQ ID NO: 1758 - DNA, 5445 bp, Homo sapiens
aaagcgccagctgaggggccgctgcgggtggagtgcggcggagtcggcctcgcgaccccagcttgatccgccgcctgctgcaccgcgcctccgccgcgttcctgcgcgtcccgagccccgacggccgcgtgagtcccgtccgtgcggggaaggcagggccgggtcggcgccgcctgtggagaggacccggcggccgggcctgcttggagccgggcgcggtggcagcggcggcagcggcggcgacttccgaggcccgggctagacagcgcagggccatggctgaggcggccccggccccgacatctgaatgggactccgagtgccttacatccctgcagccccttcctcttcctacacccccagcagcaaatgaggcacacctgcagacagcagctatctctctgtggacagtggtggccgccgtgcaggctatagagaggaaggtggagatccacagccggcgactcctacacctggaaggtcggacagggacagcagagaagaaactagccagctgtgaaaagacagttaccgagcttgggaaccagctggagggcaagtgggccgtgctgggaaccctgctgcaggagtacgggctgctgcagaggcggctggagaacttggagaacctgctgcgcaacaggaacttctggatcctgcggctccctccaggtattaagggagatatcccaaaggtgcctgtggcatttgatgatgtctccatctacttttccactccagagtgggaaaaattagaagaatggcaaaaggaactttacaagaatatcatgaagggcaactacgagtctctcatctccatggattatgctataaatcaacctgatgtcttatctcagattcaaccagaaggggaacataatacagaggaccaggcagggccagaggaaagtgagattcccacagaccccagtgaagagcctggtatttcaacatcagatattctgtcttggattaaacaagaagaagagcctcaggttggggccccaccggagtccaaggagagtgacgtgtacaaaagcacttatgctgatgaagagcttgtcatcaaagctgaaggccttgctagatcctcgttgtgccctgaggttccagtccctttctcttctccaccagcagcagcaaaggatgctttttcagatgtggctttcaaaagccagcagtctacatccatgacaccttttggacgtccagccactgacctgcctgaagcctctgagggacaagtgacttttactcagttgggtagctatcccctcccacctccagttggcgagcaggtgttctcatgccaccactgtggcaagaatctcagccaagacatgttgctgacccaccaatgtagccatgctactgagcaccccttaccctgtgcccagtgccctaagcactttactccacaggcggacctcagcagcacctcccaggaccatgccagcgagacaccccccacctgcccacactgtgccaggacttttactcacccatcaagacttacctaccatcttcgggtccataacagcactgagcgtcctttcccctgtcctgattgccccaagcgctttgctgaccaggctcgactcaccagccaccggagagctcatgcaagcgaaaggcccttccgctgtgcccagtgcggcaggagcttcagcttgaaaatcagcctcctgctccaccagcggggtcatgcacaagagcgccctttctcctgccctcagtgtggcattgacttcaacggccactcggccctgatccgccaccagatgatccacacaggcgagcgtccttacccctgcactgactgcagtaagagcttcatgcgcaaggagcacctgctgaaccaccggcggctgcacacaggcgagcggcccttcagttgtcctcactgtggcaagagcttcatccgcaagcaccacctaatgaaacaccagcgcatccacaccggggagcggccctacccctgctcctactgtggcaggagcttccgctacaaacagacactcaaggaccacctccgttcaggccacaatggaggctgtgggggtgatagtgacccatcaggtcagccacccaacccaccaggtcccctcataactgggcttgaaacttctggcctgggtgtcaacactgaaggtctagagaccaaccagtggtatggggaagggagtggagggggagttttgtaaatccaaatctctgtggcttcatgcttgtatatgctcacagcagggcacaaaatccaagagaaggtctgtgagccccatccaacacccacagtaattattatctggcacatcaatgaatttggggtcctatacacttgactagagacatgcttgtgttttggaatttcacacccttacaagaataccacattttgaaacccagaaagacctggaaaggagcccagcatgtccatcttttcaaagatacaacaaaagcagaagttacaagaatattgcggagaggttggaaagcaggatttaacctctagttctcttgttctcagagaacagcaggttgatagtagattatgtctctaggtagagacagatacatgagaagagcctccaaaactggaagcccatcataaggcatgagaatgtttaactataaagccttttattagttctttgatagctaagatggttgttggagaaagtgcttaagccactgtttatgttgctgcctcctctctcaaaaccagccaagatctgttcacacacctctgtggctgtctttccctgaaacatggtaactcaagactgcctgcctaggtttcttagattaattattcacataaattttgtttaatattggttgaacaagaaatctgactttaaaagattattaaggagaatattccttaactatactggcttgatttgaaacaggctcttattgccatttaaactgccagaaatctttgccaaggtcctggttaaaaaaattggaaacggttttcttagccccagctttaaaagctagagatctcagagaaatagctggcttaacaatgacagaacagcttaaaatttgtgcctacaccatgttctgagagtcgttcacatcaaattcttatcttttccaagccagtaagttggcttctccattcctggtgtctgatattcttgacaatcatcagcaacaaagatcacagcactttccagaagcatggagcttcagaaagtgccagtgaactcttggtcctcagtagtgagatgataacagtgttataatgcagcttccttgagccatcagagagagtgtatgttcaccctatctggctgtatcccattggcagtggacagattgaggaaattcctagatcactgagagctaagcaccatgcatagacaacagtttgttcttgcctgtgttgcttttagggactttgactaccacatgttcttttcttggggtgatttaatcacctgggagcatctgagtctgctcctaagtggctttgcaactgggcctaagttctgtttcctttatggatctcaaattttcatctgcacaatgaggctgttgaaaggaaaaaaagtgagcctctaggaattattcaaaaaaagtctgtgatacattccttttcctgccaaagttctgtctctgtctttggcttctgtccaggcaaagctaaataagacagcaaagtcaaagcagataaattcttgttgaaacttgactaaaatttatttgatttgttgttttactcccacttggaatcctgaggtagaagacagaatgcagaagtcttacatcttgggcaggaaactggtttattcctatactcttgtttcctctgcttcttcctgaggtctagaacaaggtctggaaatgtttagacaggatattttcttgatgaagtgataaggaaaggacccatttttttgctcatcacctagcccatccttcactctctctagttatgcataacaacactagaagaaggtgttagcccagctaactttgcttctgggaaggctatgtctgaacatgttgctctgtaggataatcacacttagaaaacatctgctccatgacattcacaataccagggaccatgggagacacaagaaatgtgtgtctgctgtcataacttacagtgaaaaagcccaataatacagaacaagacatgatgggcaataccctagcatattgggattaagagctttctagccagaatctggacctataccatgggaaaatttaggggtgctgggaatcccaaagccaaggttctggcttcattggcaacccactaggaacttgaatgtgagattcagctctagtttgcaccttgatttccccagtgaaaagggagaagagccaaagtattgtctaggtgctgagttcccttttctgagtggatttcaagcatttgccagggtatgctggaggagggactcctaaagtaggtgagatgtgggactaggtaacactttaaatacttttttactcaaagatttgccaagaacacagcttattagtgaaagagacctgtggattgaaatggctgcagatagatcccgcagtcccttctgaaaggaactgtgtagccagcagggacctaaactttggcaaaaagtgaacacaattcaaatacgaatgaaggaagagccctcagatggaacgaaaggcgatgtgcaaggccatcccagagagacggaagcaggtgcgatactaagcctcagcccaagaataaaagagagttcaactgttactcttttctttcatcaatcccctatcagttagaactgcaggccagttccaaagagtgtttgcttaagattcaaaagtgggtaagtaaaatggatcagtgggaaggataaggtgtccaacagaaagtgtggaggagaaactcttggcctatcaagtgctcctgagagaaaccatgcaatttaacacttcagttaaagaaatacatgagaactgcttgtcatgaccagacaagataggaaaggggaaaccccagaaacgtgctcttcatctgtcagccttttggaccaagaagctgtcactatcacacataagcaccattcccttagagtggatccaggtgttgactataaccagatttactctttgcttactaggttttccattgtcaccattggatgaacctctggtttagccacagttgtgaaaataaatggaagttggttgattgtctagaaagtgcaagaagatggccctgctccttttctgctgaacatttagtattggaaactcctacttcccttttcattaataatgtgtgcaagtttcctattagcggggaaggtgtggggctctgctgggcttctcttgagcatatctgagaagtgatgttcatgtctatctcaaccaggaccagaccctgtgacttactcggtaataacagtccacacaagcctcgttgatattaaaaaaaaaaaaaaaaaa

SEQ ID NO: 1759 - DNA, 859 bp, Homo sapiens
ggcgtctctgggaaggcagtggattgttggtctgcgtggaacttctcaggtggacaccagagcatggaacacatccacgacagcgatggcagttccagcagcagccaccagagcctcaagagcacagccaaatgggcggcatccctggagaatctgctggaagacccagaaggcgtgaaaagatttagggaatttttaaaaaaggaattcagtgaagaaaatgttttgttttggctagcatgtgaagattttaagaaaatgcaagataagacgcagatgcaggaaaaggcaaaggagatctacatgacctttctgtccagcaaggcctcatcacaggtcaacgtggaggggcagtctcggctcaacgagaagatcctggaagaaccgcaccctctgatgttccagaaactccaggaccagatctttaatctcatgaagtacgacagctacagccgcttcttaaagtctgacttgtttttaaaacacaagcgaaccgaggaagaggaagaagatttgcctgatgctcaaactgcagctaaaagagcttccagaatttataacacatgagcccccaaaaagccgggactggcagctttaagaagcaaaggaatttcctctcaggaccgtgccgggtttatcattgctttgttatttgtaaggactgaaatgtacaaaacccttcaatgggatgtgtgttttattaactgcttcaccagtaaattttgcatgatggctaagctaacataaaaaaagaataataataacttggaagttttagtttacaaaacagagattccttcaacactggacacgtcgagcattttgtagcttaattaaacctcatgtaaggccaaaaaaa

SEQ ID NO: 1760 - DNA, 399 bp, Homo sapiens; identical to SEQ ID NO: 491

SEQ ID NO: 1761 - DNA, 3782 bp, Homo sapiens
acccgcctctgcgcgcccccgggcacgaccccggagtctccgcgggcggccagggcgcgcgtgcgcggaggtgagccgggccggggctgcggggcttccctgagcgcgggccgggtcggtggggcggtcggctgcccgcgcggcctctcagttgggaaagctgaggttgtcgccggggccgcgggtggaggtcggggatgaggcagcaggtaggacagtgacctcggtgacgcgaaggaccccggccacctctaggttctcctcgtccgcccgttgttcagcgagggaggctctgcgcgtgccgcagctgacggggaaactgaggcacggagcgggcctgtaggagctgtccaggccatctccaaccatgggagtgaggcacccgccctgctcccaccggctcctggccgtctgcgccctcgtgtccttggcaaccgctgcactcctggggcacatcctactccatgatttcctgctggttccccgagagctgagtggctcctccccagtcctggaggagactcacccagctcaccagcagggagccagcagaccagggccccgggatgcccaggcacaccccggccgtcccagagcagtgcccacacagtgcgacgtcccccccaacagccgcttcgattgcgcccctgacaaggccatcacccaggaacagtgcgaggcccgcggctgttgctacatccctgcaaagcaggggctgcagggagcccagatggggcagccctggtgcttcttcccacccagctaccccagctacaagctggagaacctgagctcctctgaaatgggctacacggccaccctgacccgtaccacccccaccttcttccccaaggacatcctgaccctgcggctggacgtgatgatggagactgagaaccgcctccacttcacgatcaaagatccagctaacaggcgctacgaggtgcccttggagaccccgcatgtccacagccgggcaccgtccccactctacagcgtggagttctccgaggagcccttcggggtgatcgtgcgccggcagctggacggccgcgtgctgctgaacacgacggtggcgcccctgttctttgcggaccagttccttcagctgtccacctcgctgccctcgcagtatatcacaggcctcgccgagcacctcagtcccctgatgctcagcaccagctggaccaggatcaccctgtggaaccgggaccttgcgcccacgcccggtgcgaacctctacgggtctcaccctttctacctggcgctggaggacggcgggtcggcacacggggtgttcctgctaaacagcaatgccatggatgtggtcctgcagccgagccctgcccttagctggaggtcgacaggtgggatcctggatgtctacatcttcctgggcccagagcccaagagcgtggtgcagcagtacctggacgttgtgggatacccgttcatgccgccatactggggcctgggcttccacctgtgccgctggggctactcctccaccgctatcacccgccaggtggtggagaacatgaccagggcccacttccccctggacgtccagtggaacgacctggactacatggactcccggagggacttcacgttcaacaaggatggcttccgggacttcccggccatggtgcaggagctgcaccagggcggccggcgctacatgatgatcgtggatcctgccatcagcagctcgggccctgccgggagctacaggccctacgacgagggtctgcggaggggggttttcatcaccaacgagaccggccagccgctgattgggaaggtatggcccgggtccactgccttccccgacttcaccaaccccacagccctggcctggtgggaggacatggtggctgagttccatgaccaggtgcccttcgacggcatgtggattgacatgaacgagccttccaacttcatcaggggctctgaggacggctgccccaacaatgagctggagaacccaccctacgtgcctggggtggttggggggaccctccaggcggccaccatctgtgcctccagccaccagtttctctccacacactacaacctgcacaacctctacggcctgaccgaagccatcgcctcccacagggcgctggtgaaggctcgggggacacgcccatttgtgatctcccgctcgacctttgctggccacggccgatacgccggccactggacgggggacgtgtggagctcctgggagcagctcgcctcctccgtgccagaaatcctgcagtttaacctgctgggggtgcctctggtcggggccgacgtctgcggcttcctgggcaacacctcagaggagctgtgtgtgcgctggacccagctgggggccttctaccccttcatgcggaaccacaacagcctgctcagtctgccccaggagccgtacagcttcagcgagccggcccagcaggccatgaggaaggccctcaccctgcgctacgcactcctcccccacctctacacactgttccaccaggcccacgtcgcgggggagaccgtggcccggcccctcttcctggagttccccaaggactctagcacctggactgtggaccaccagctcctgtggggggaggccctgctcatcaccccagtgctccaggccgggaaggccgaagtgactggctacttccccttgggcacatggtacgacctgcagacggtgccagtagaggcccttggcagcctcccacccccacctgcagctccccgtgagccagccatccacagcgaggggcagtgggtgacgctgccggcccccctggacaccatcaacgtccacctccgggctgggtacatcatccccctgcagggccctggcctcacaaccacagagtcccgccagcagcccatggccctggctgtggccctgaccaagggtggggaggcccgaggggagctgttctgggacgatggagagagcctggaagtgctggagcgaggggcctacacacaggtcatcttcctggccaggaataacacgatcgtgaatgagctggtacgtgtgaccagtgagggagctggcctgcagctgcagaaggtgactgtcctgggcgtggccacggcgccccagcaggtcctctccaacggtgtccctgtctccaacttcacctacagccccgacaccaaggtcctggacatctgtgtctcgctgttgatgggagagcagtttctcgtcagctggtgttagccgggcggagtgtgttagtctctccagagggaggctggttccccagggaagcagagcctgtgtgcgggcagcagctgtgtgcgggcctgggggttgcatgtgtcacctggagctgggcactaaccattccaagccgccgcatcgcttgtttccacctcctgggccggggctctggcccccaacgtgtctaggagagctttctccctagatcgcactgtgggccggggccctggagggctgctctgtgttaataagattgtaaggtttgccctcctcacctgttgccggcatgcgggtagtattagccacccccctccatctgttcccagcaccggagaagggggtgctcaggtggaggtgtggggtatgcacctgagctcctgcttcgcgcctgctgctctgccccaacgcgaccgctgcccggctgcccagagggctggatgcctgccggtccccgagcaagcctgggaactcaggaaaattcacaggacttgggagattctaaatcttaagtgcaattatttttaataaaaggggcatttggaatcaaaaaaaa

SEQ ID NO: 1762 - DNA, 2941 bp, Homo sapiens
actcggtgtcaccacaggaggagactcaggcaggccgcgctccagcctcaccaggctccccggctcgccgtggctctctgagcccccttttcagggaccccagtcgctggaacatttgcccagactcgtaccaaacttttccgccctgggctcgggatcctggactccggggcctccccgtcctcccctttcccgggttccagctccggcctctggactaggaaccgacagcccccctccccgcgtccctccctctctctccagccgttttggggaggggctctccacgctccggatagttcccgagggtcatccgcgccgcactcgcctttccgtttcgccttcacctggatataatttccgagcgaagctgcccccaggatgaccacgctggccggcgctgtgcccaggatgatgcggccgggcccggggcagaactacccgcgtagcgggttcccgctggaagtgtccactcccctcggccagggccgcgtcaaccagctcggcggtgtttttatcaacggcaggccgctgcccaaccacatccgccacaagatcgtggagatggcccaccacggcatccggccctgcgtcatctcgcgccagctgcgcgtgtcccacggctgcgtctccaagatcctgtgcaggtaccaggagactggctccatacgtcctggtgccatcggcggcagcaagcccaagcaggtgacaacgcctgacgtggagaagaaaattgaggaatacaaaagagagaacccgggcatgttcagctgggaaatccgagacaaattactcaaggacgcggtctgtgatcgaaacaccgtgccgtcagtgagttccatcagccgcatcctgagaagtaaattcgggaaaggtgaagaggaggaggccgacttggagaggaaggaggcagaggaaagcgagaagaaggccaaacacagcatcgacggcatcctgagcgagcgagcctcagcaccccaatcagatgaaggctctgatattgactctgaaccagatttaccactaaagaggaaacagcgcagaagccgaaccaccttcacagcagaacagctggaggaactggagcgtgcttttgagagaactcattaccctgacatttatactagggaggaactggcccagagggcgaagctcaccgaggcccgagtacaggtctggtttagcaaccgccgtgcaagatggaggaagcaagctggggccaatcaactgatggctttcaaccatctcattcccggggggttccctcccactgccatgccgaccttgccaacgtaccagctgtcggagacctcttaccagcccacatctattccacaagctgtgtcagatcccagcagcaccgttcacagacctcaaccgcttcctccaagcactgtacaccaaagcacgattccttccaacccagacagcagctctgcctactgcctccccagcaccaggcatggattttccagctatacagacagctttgtgcctccgtcggggccctccaaccccatgaaccccaccattggcaatggcctctcacctcaggtgcctttcattatctcaagccagatatcgcttggtttcaaatccttttgaacacgttcgacaaaagcagtggagaagaggaagacctggagcaataaaagacaaatgcaacattttaaggcaatggtttcacatggttacatatcaaaacatcccaattctttagtgctgatcatcgaggagctagaacattccatttgcttgtgtgcgtgcgtgcgtgtgtgtgtgtgtgtgtgtattgagatttacccagactggtttgggcaagcagactgttctaaaatataatagaataccctaaagtataacatgtcgatgttcgatgctgatacttctacaactttaaaactgctcatttcatgaagcaagaatggaggaatccttgactcttacacactggaaattgaaataaagataaatgcaaccatttttaggaagctagactagctgtaaaggacctcctaaataaattatttgttactgtatcctcatttgtaatctagttgtcaataaatggcccggacatgtcttgctaacaggatatgggctaccaggaagaaggacttgtttccctttcctgtgtggggagaggtgtgtgacgtttttccagttcacatttatttggtagcccacctgggttggaggaagggcacggtggagagaaagtgacatgcattcacatatctgcttatcagtgtgcaatactgtgtacctcatggatgctttggcaatgcccaaggcgatataagcaaaatcagaagtatatttttgcaggtgcttttattttcacagcccataattcatagtgatagagtgcagtgatgtttgccatttgctggacaaccaacacccgggttgctcctttgattagagaccagatcagataattatgcttttaaactgattacgtttacattcttctcttttctatgaaaggcagggcaagaacagaagtgttcacatggctctcatgtacttttaaattatacaatgatatccaatattaaaagattataggaactgaggtttacatacgtttgtgtggtgacattttagaatgtcaataaatttgctttttgagatgttgagaggaacaagaaggtggaaggcagtgttatttatttctttctattcttggaaccacgaatgaggtaggcacaaatacattccttttagagttaagaactatgacgtagcgagttagtgagactagacatagtaccgaatttagttcatgcattggtcttagagggtgatggaacaagagaagtactatctttgtgttgcagcctcaaccaacaacaatgtgttgtaaaaatgtctttcatgtaaaaagtgcagtaaatatttactatttataatgaataaacagttatgaaaacttgaa

SEQ ID NO: 1763 - DNA, 4688 bp, Homo sapiens
accccgtctcggccatgggcgagcaccccagcccgggccccgcggtggccgcctgcgccgaggcggagcgcatcgaggagctggaacccgaggccgaggagcggctgcccgcggcgccggaggaccactggaaagtcctgtttgatcagtttgaccctgggaacacaggctacattagcacaggcaagttccggagtcttctggagagccacagctccaagctggacccgcacaaaagggaggtcctcctggctcttgccgacagccacgcggatgggcagatcggctaccaggattttgtcagcctaatgagcaacaagcgttccaacagcttccgccaagccatcctgcagggcaaccgcaggctaagcagcaaggccctgctggaggagaaggggctgagcctctcgcagcgacttatccgccatgtggcctatgagaccctgccccgggaaattgaccgcaagtggtactatgacagctacacctgctgccccccaccctggttcatgatcacagtcacgctgctggaggttgcctttttcctctacaatggggtgtcactaggtcaatttgtactgcaggtaactcatccacgttacttgaagaactccctggtttaccacccacagctgcgagcacaggtttggcgctacctgacatacatcttcatgcatgcagggatagaacacctgggactcaatgtggtgctgcagctgctggtgggggtgcccctggagatggtgcatggagccacccgaattgggcttgtctacgtggccggtgttgtggcagggtccttggcagtgtctgtggctgacatgaccgctccagtcgtgggctcttctggaggggtgtatgctctcgtctctgcccatctggccaacattgtcatgaactggtcaggcatgaagtgccagttcaagctgctgcggatggctgtggcccttatctgtatgagcatggagtttgggcgggccgtgtggctccgcttccacccgtcggcctatcccccgtgccctcacccaagctttgtggcgcacttgggtggcgtggccgtgggcatcaccctgggcgtggtggtcctgaggaactacgagcagaggctccaggaccagtcactgtggtggatttttgtggccatgtacaccgtcttcgtgctgttcgctgtcttctggaacatctttgcctacaccctgctggacttaaagctgccgcctcccccctgagggctggaggcccaaggtcggggaggggagggaaaagcagcacccacagggagcgcctgcgaggtttcttctcatcaccagctcagctaggccgggcagacaaggacagaagactctgggccactgtaatgtttgtgtttagatttggacacacagtggagacccttttctgaaaggcatctggcggaggagttgatgtggctgctgtcgtttttctcggctgctctgatgacatcgggccagggtgaaggtctggggtggggtgtgagagtggccctccctcacctgggctgggcttcttccatggggccagggggtgccccctcactgctgcggattgagcagcagcttcttcctcctcctctaccctcagagaccctaagagacatgggaaggctcgaaggttgttgcgtccaggcatggcccctctctagctcagaaataattgcaggccatgtggtgtctccttgacacctgctgtgtctggggctccagtaagaagagggcctactggacatgtcagctgtgacctggctgaaaccagggtgccctcctgggctggttggtgtgcaccggggcatgatctgttgtgcctgggttgggcagagcagggagcctgtaggctctaggacccctcttgtgctgggggtacccagtgagagggacccatgcagggggaataaacttcattccaagttccaccctggagaagacagacccaggaccagcttcagacttctccctccctttcttccaggatattggcatctcacacgggtgccccagcctccatgcccagccttgttttagggtctttttctttccttttgctgccctgacactactttgtgcctctctttggttatggagacagtgttttgaaacattcatgcgtgtgtgtgtgtgtgtgcgtatatgtgtgtatgtgatgggaaaggtaactgaggcacgacagcgcctgcagagaaggcatggaggatgcagggggcccatgtgggcatccgtgagaggtggcagaccgtggtgtgctgtggttgctgaatgtccttgctttgacaaagcctgcccccttccttcccatctcctgtcccttccacacctgcccctgagcatcactgaccggtggcagaatggccctgctggagggagagctcaagccctccaaggatccctggatgctgaggtttgccaggttcagctcttgtttccgtctgagatggccttcatatccaaaaaggttccatcctatctcccttaggagagaaagagctttgggggcgcaagagaggctggggtaggaatgttgaggccatgtgtccatttaagttagggggacaggaggctacaggaagaggaattccagtttagttggaaaactttgcctcaggagaattgttgggtgcatggatgaacctcagagggagggcagccagtagcctcggaggcttggatgcgggagagaacatggtggttatcaaatccaccccaccccattacacaggtgagaaaacaagatggagggaatgaccctcctaacaggagctggtgcaggccccgaatggagggcatgaggatgacctttgacaaaagatgacactccctttatcgtgctcttggaattctcaaccactgacagcccagaagaacaaagaacgccaggcctgggaggaggcaggggggctgggcgtgtccagaaacaggggcaggagtgtgggaacggtcttcctccagcctggtgcccatcctggcccttgagtgtagcagggtccagggtcagtcaggccaggcatttggggtcttgggccacagtggcttcccatcctggtgactacatgtaaatgggctcactcactcactggcaggcgaggcccagccataccgcatcttggcccactgctaaatagattgccctggcctcatccacatatgtagttccctaggtcctgctcccctgcaccagtgccatgctgagggccgcagcctgtggcactgtgggcccacgcctttggcggtgttgcgtcagcctggggcgtcttgtgtgtgccctgcccaccgttctctgccctagtgatagaaagatgtagatggaagtcagtgcctcagaggaggaggctctgaggctgtggagctgggctcagggaagaccaggggaggatgcagaaggagtcaggacattgctgcctctgcctgggctgcagccgcactaagctgagcgatgaggtcctttcctggagggatggagaatcccctccagattcctgtcctggcccctggggattctgtggtgtgggtggaatgagcagagtgccacctctgtctggtatgacctggagagggggcttcctctcttaggggtgagaaagcattgaactagaagattctagaaatccctcatagaagcactcagctccctcggggactcccagggaagcttgttactgagaaggacagtggaggcggaatcgtgtctcccaccatgttaagtgtgtcctctgctgccaaggaccctcgtctacaccttagaccaccagccccagctgttctctgtcagcacacccacctccatcccctctcccaaccatgacttccaagcggggccacagggtggggtcatagggtcacttcacctgacccaggcctctccccaggtcaggaggcagctgtctggtcagaggggttctctttgtggcatctggctttctcctcagcaggtcccaccaccctctcagcagcacttccccatggccaaggctggccgtgtcctctgtgcctctttccttgtctgaggtggctgccagcccagggggtggtgtgtaaatcttcaggctggtggaggtaggttggccttttatccacaggatacagaaactgaaagctggggaatccccaaacagcagccatagactcactggctctcattaaacgggagaggaatcacagaaactggggaagggaaaacaaaccttcaaaggagaaatttcgctttaatgacaccattcatcattcgttttttaattaggaaaagctccctaatgaggctcttttgccagctaataggactctcgatttccatgagaaccattcttgcccagaggattaggggagctgttgctcaccacaccaggatcttcccccagcgtccaatttaatttgcaaatacgtaatgcagattccctgggtgccgtgaaagcctttcctggcatcattcatgttgctccccgtgctggctggaaagcacggttctcctctgccttaaaaacagtgcccaacagtgaactgcccctccgaggacttgagtaagtggaaaaaacaaaacacagactgcaatgtttgtttctaagtatttttgtattgtgtacattctgtatatttttgttgtaacatattatttgagcacagattccattaaatattttttttctttttccaagcaaaaaaaaaaaaaaaaaaaaaaaaaaa

SEQ ID NO: 1764 - DNA, 3285 bp, Homo sapiens; identical to SEQ ID NO: 689

SEQ ID NO: 1765 - DNA, 2391 bp, Homo sapiens
gggtcggttagtcgtcgccgtctgaggtgttccctggctttgtctcgccgtcgttgccgccccgtccctgccttcgtgccccccgccttggcccctgcccagccgctctccctgtcctcctccccttaaccacccccacggtttctgccgtcggggcccgggggccgggcggatgatgccgtcggagagcggagctgagcgcagggaccgggcggctgctcaggtggggacggctgcggccacggcggtggccacggcagccccggcaggcggcggccccgacccggaggccttatcggccttccccggacggcacctgagtgggctgagctggccacaggtgaagcgactggacgctcttctgagcgagccgattcccattcacgggcgcggcaacttccccacgctgagcgtgcagccccggcagatcgtgcaggtggtccgcagcaccctggaggagcagggactacatgtgcacagtgtgcggctgcatggttcagctgccagccacgtgctgcaccctgagagtggcctgggctacaaggatctggacctggtgttccgggtggacctgcgcagtgaggcatccttccagctgaccaaggcagtggtgctggcctgcctactagacttcctgccggccggtgtgagccgggccaagatcacgccactgacactcaaggaggcatacgtgcagaagctggtgaaagtgtgcacagactcggaccgctggagcctcatctcactgtccaacaagagcggcaagaacgtggagctcaagtttgtggactcggtgagacgccagtttgaattcagcatagactccttccagatcatcctggactccctgttgctctttggccagtgctcgtccactcccatgtctgaggccttccacccaacggtcacaggcgaaagcctgtacggggacttcaccgaggccctggagcacctgcggcaccgtgtcatcgccacgcgcagtcccgaggagatccgaggtggtggcctcctcaagtactgccacctcctggtgcggggcttccggccccggcccagcaccgatgtgcgcgccctgcagcgctacatgtgctcccgcttcttcatcgactttccagacctggtggagcagcggcgcaccctagagcgctacctggaggcccacttcggtggggcagatgcagcccgccgttacgcctgcctggtgacactgcaccgggtggtcaacgagagcaccgtgtgcctcatgaaccacgagcgccgccagacgctggacctcattgccgcactggcgctgcaggcactggctgagcagggcccagctgccactgccgccctggcctggcgccctccaggcactgacggggttgtgccagccactgtcaattactacgtgacccccgtgcaacctctcctggctcacgcctatcccacctggctgccttgtaactgactcagaccctggccagaagggaagggactgggcctcacggggtggggtggggcctccaagagtgtgtggaggacatgaccagaggcgcagaatgtgccaggaggcccagcactgcagggttgggcctttgattgaacagaccagactttcccgagcacgaggcccctgtgggcttaatgccagcctggggctctcagcaggaggaccctttggttattgcatcacacttttggaccagcatgccggtggggtgcaggcgccatttgtcttggaagtcaatttccttcaggagacaaagcaagtttggggtggtagccttaatgcccagcaccttggattgattcccatggtctaagagggtctttttgactaaggccagcctgtggtgatcccagcagctttggagggcctgcagcccacacactgactgatacatggtatgttacagggacttgtcactttggatcaggctgggccactacagggcctgatgggccaacttgggtaatcactgggaggagggaaactgaggcccgaggcagatacctgggtttggggagggctgggtttagcccggttctctgaactacatacccccagctgtgaagccttcctcttgaggggttgaggtgggcagtatacaggagccaagcagcccagggtgggtcgcagcccaggccccttccagggtgccactcctttcccccttgtgttgcaaggagccctcctgcctgggagcttgttctttggaaggtgctgagcctgaatttgccacagtcaagtcaacgttcccaccccactggcttggttacagggctctcacatggggtaggggagccatactcccacccccttgcgtattcccctgggtttgttgatattttgcactcttaacacctgccaataaagacggtctacactgaaaaaaaaaaaaaaaaaaa

SEQ ID NO: 1766 - DNA, 456 bp, Homo sapiens; identical to SEQ ID NO: 789

SEQ ID NO: 1767 - DNA, 2959 bp, Homo sapiens; identical to SEQ ID NO: 709

SEQ ID NO: 1768 - DNA, 2521 bp, Homo sapiens
aaacgagtggagacacgaggaccagcgcgagcggtcccggtgggctaccctccccctgcgacgaccccccctcgctctgaccgactggtcccctaaacggtggcggcggtttttggtcgttgggccccgggatttaggaccaacatttgaagacccgaaggggaactgcaaccatgaatgaagaaaatatagatggaacaaatggatgcagtaaagttcgaactggtattcagaatgaagcagcattacttgctttgatggaaaagactggttacaacatggttcaggaaaatggacaaaggaaatttggcggtcctcctccaggttgggaaggtccacctccacctagaggctgtgaagtttttgtaggaaaaatacctcgtgatatgtatgaagatgagttagttcctgtatttgaaagagctgggaagatatatgaatttcgacttatgatggaatttagtggtgaaaatcgaggttatgcttttgtgatgtacactacaaaagaagaagcccaattagccatcagaattcttaataattatgaaattcgaccagggaagtttattggtgtgtgtgtaagcctggataattgtagattatttattggagctattcccaaggaaaagaagaaagaagaaattttagatgaaatgaagaaagttacagaaggagttgtagatgtcattgtttatccaagtgcaactgataagaccaaaaatcgtggttttgcatttgtggaatatgaatctcacagagctgctgctatggcaaggaggaaactaattccaggaacattccaactatggggccacaccattcaggtagattgggctgacccagagaaagaggtggatgaggaaaccatgcagagagttaaagttctttatgtaagaaatttaatgatctcaactacagaggaaacaattaaagcagaattcaataaatttaagcctggtgcagttgaacgggtaaagaaacttagagattatgcttttgttcactttttcaaccgagaagatgcagtggctgccatgtctgttatgaatggaaaatgcattgatggagcaagtattgaggtaacactagctaaaccagtaaataaagaaaacacttggagacagcatcttaatggtcagattagtccaaattctgaaaatctgattgtgtttgctaacaaagaagagagccacccaaaaactctaggcaagctgccaactcttcctgctcgtctcaatggtcagcatagcccaagtccgcctgaagttgaaagatgcacttaccctttttatcctggaacaaagcttactccaattagtatgtattctttaaaatccaatcattttaattctgcagtaatgcatttggattattactgcaacaaaaataactgggcaccaccagaatattatttatattcaacaacaagtcaagatgggaaagtactcttggtgtataagatagttattcctgctattgcaaatggatcccagagttacttcatgccagacaaactctgtactacgttagaagatgcaaaggaactggcagcccagtttacattacttcatttggactacaatttccatcgcagctcaataaatagtctttcccctgttagtgctaccctctcttctgggactcccagcgtgcttccttatacttcaaggccttattcttatccaggctatcctttgtcaccaacaatatcacttgctaatggcagccatgttggacagcggctatgtatctccaatcaggcctccttcttctgaagaaaatactaacattagtatgaaaatttgtgtaaatttgtagtatgaaaacttgcaaattaaaatattgttttattttagaatcgggtttgcatatttggttttaaaaaggtatttattccaaagtactaaacatcagctataattcagaataacatggagttgtagaatttataaaaatgcaaagtttaaaaagttattcagtggtttctcttgataaaggtacagcaaactactattctttttaaacttctaggattttcttctactttctgagtgggcaatagaacctagtcatttatgtttttttttttttttgcataattttactaaatagtatttcacaaatattaaagcacttgaagacaatggttatagtagatttgattaccaaggatcactatctgtactggagattagaacaattatatgaccagaagcatctaaccattatgtaaaaagaaatgatgagacaaaaagattaagatacaaattttgtgcagtactaaagaaaaagcagtctaccattgtggtccttgaaaataactatagatatttttgttatttgttagacacaaattataattttgttgttaatgtatttaagcattttatagttatgctttgtgtttttgatattctttgtattgttaataacaagtgttatgggtttttaatgttgaaatcatgtgttaatttttgtacttgaattcaaattttttgacattaaatatgtgatgcttcta

SEQ ID NO: 1769 - DNA, 2008 bp, Homo sapiens
gctgaagtgccagggtgcttgtgaagtctaagcccttgtctggcatttgtcaggaatataggctgctgtatgtttccaggaaacttctaggacagaggctattcaacaagctcatgaagatgaccttctatgggcattttgtagccggggaggaccaggagtccatccagcccctgcttcggcactacagggccttcggtgtcagcgccatcctggactatggagtggaggaggacctgagccccgaggaggcagagcacaaggagatggagtcctgcacctcagctgcggagagggatggcagtggcacgaataagcgggacaagcaataccaggcccaccgggccttcggggaccgcaggaatggtgtcatcagtgcccgcacctacttctacgccaatgaggccaagtgcgacagccacatggagacattcttgcgctgcatcgaagcctcaggtagagtcagcgatgacggcttcatagccattaagctcacagcactggggagaccccagtttctgctgcagttctcagaggtgctggccaagtggaggtgcttctttcaccaaatggctgtggagcaagggcaggcgggcctggctgccatggacaccaagctggaggtggcggtgctgcaggaaagtgtcgcaaagttgggcatcgcatccagggctgagattgaggactggttcacggcagagaccctgggagtgtctggcaccatggacctgctggactggagcagcctcatcgacagcaggaccaagctgtccaagcacttggtagtccccaacgcacagacaggacagctggagcccctgctgtcccggttcactgaggaggaggagctacagatgaccaggatgctacagcggatggatgtcctggccaagaaagccacagagatgggcgtgcggctgatggtggatgccgagcagacctacttccagccggccatcagccgcctgacgctggagatgcagcggaagttcaatgtggagaagccgctcatcttcaacacataccagtgctacctcaaggatgcctatgacaatgtgaccctggacgtggagctggctcgccgtgagggctggtgttttggggccaagctggtgcggggcgcatacctggcccaggagcgagcccgtgcggcagagatcggctatgaggaccccatcaaccccacgtacgaggccaccaacgccatgtaccacaggtgcctggactacgtgttggaggagctgaagcacaacgccaaggccaaggtgatggtggcctcccacaatgaggacacagtgcgctttgcactgcgcaggatggaggagctgggcctgcatcctgctgaccaccaggtgtactttggacagctgctaggcatgtgtgaccagatcagcttcccgctgggccaggccggctaccccgtgtacaagtacgtgccctatggccccgtgatggaggtgctgccctacttgtcccgccgtgccctggagaacagcagcctcatgaagggcacccatcgggagcggcagctgctgtggctggagctcttgaggcggctccgaactggcaacctcttccatcgccctgcctagcacccgccagcacacccttagcctccagcaccccccgcccccgcccaggccatcaccacagctgcagccaaccccatcctcacacagattcaccttttttcaccccacacttgcagagctgctggaggtgaggtcaggtgcctcccagccctgcccagagtatgggcactcaggtgtgggccgaacctgatacctgcctgggacagccactggaaacttttgggaactctcctcgaatgtgtgggcccaaggcccccacctctgtgacccccatgtccttggacctagaggattgtccaccttctgccaaggccagcccacacagcccgagccccttggggagcagtggccgggctggggaggcctgcctggtcaataaaccactgttcctgcagctgagaaaaaaaaaaaaaaaa

SEQ ID NO: 1770 - DNA, 3282 bp, Homo sapiens
agtacgaagacgaccgggctctcaagatggcggccccatgcggaaacagctccagggagcagccatgttgcttcctgaacaaagcctctgaagatgcggaacgggcaaaaccgcccagtacggaacggcgcagcctcgggagcccggtgtggtgctcgcggacaggaagcaggagagtttgccaatagggatgtgacagcggttcccattaagcggtgatggtggttttgggacctgataatcgagctgggagtcagaggcgggatgtgtgcggtgaaggatgttttgatacccccatataaaataatctgtctgtcatgggagcccccacgtcctctgaaatagttcagctctgtctgcatgacttgtcctgggactgaggaaaatttaccagtcatctggccttttggaagagcaaaaaatgatgaagtcccaggggttagtatcattcaaggatgtggctgtggatttcacccaggaggagtggcagcaacttgacccttctcagaggaccctgtacagggatgtgatgctggagaactacagccacctggtctcaatggggtatccagtttccaaaccagatgtcatctccaagttggaacaaggagaagagccatggatcataaagggagacatatcaaattggatctatccagatgaatatcaggcagatgggagacaagacaggaagagtaaccttcacaactcccagtcatgtattttggggacagtttccttccatcataagatactgaaaggagtcacaagggatggttcattgtgctccattttaaaagtctgtcaaggtgatggtcagctgcagagatttctagagaatcaagacaaactcttcaggcaggtcacatttgttaacagcaaaacagtgactgaggcatcagggcataaatataatccactggggaaaatatttcaagagtgcatagaaacagatatatcaatacagagattccataaatatgatgcttttaaaaagaacttaaaaccaaatattgacctaccgagttgttataagagcaattcaagaaaaaaacctgatcagagttttggaggtggaaaatcatctagccagagtgagcccaattctaatcttgagaagattcacaatggagtaataccttttgatgataatcagtgtggaaacgtttttagaaatacacaatcccttattcaatatcagaatgtggaaactaaagagaaaagctgtgtatgtgttacatgtggaaaagcctttgctaagaagtcacaactcattgtacatcaaagaattcatactggaaagaaaccatatgattgtggtgcatgcggaaaagccttcagtgagaagtttcatcttgttgtacatcagagaactcatactggggagaaaccttatgattgttctgaatgtggaaaagccttctctcagaaatcgtcccttattatacatcagagagttcacactggggaaaaaccctatgaatgtagtgaatgcgggaaagccttctcccagaaatcacccctcattatacatcagagaatacatactggggaaaaaccctatgaatgtagagagtgtgggaaggccttttcccagaagtcacagctgattatacaccacagagctcatactggagagaagccgtatgagtgtaccgaatgtgggaaagccttctgtgagaagtcccacctcattatacataaaagaattcacactggtgagaaaccctacaaatgtgctcaatgtgaggaagccttcagcaggaagacagaactcattacacatcagttagttcatactggggaaaaaccttatgaatgtactgaatgtggaaagacattctcccgcaagtcacagctcatcatacatcagagaacacatactggagaaaaaccctataaatgtagtgaatgtggcaaagccttctgccagaagtcacatctcattggacatcagagaattcacacaggagaaaaaccttatatatgtactgaatgtgggaaagccttctctcagaagtcccaccttccgggacaccagcgaattcatacaggagagaaaccttacatatgtgctgaatgtggaaaggccttttctcagaagtcagaccttgttttacatcagaggattcatactggggaaagaccctatcaatgtgctatatgtgggaaggccttcatccagaagtcacaactaactgtacaccagagaattcacacagtggtaaaatcataatgaactggccacagaaaagccttagtattagctcaagccttaataattactagaaacccaattaatttgataagcttggggacaacatcccaatagataaaaatttttaagggaatttgtttctagtttggtgatgcctaacttttccagcaaagatgatggaaaatagttatataaatgaagaacatttttaatatggcatgtaaagcttttaaagttatgaactcagtgatcagcacagcaagttaagcatacagaatattgtcaagttgcatattccttatactacaaaatgataatcagccattgtgaaactgctaatattagcttgtcataattatggccataaactaatttttctataaaagacgtggaagaaagcttaagtaaacaataaaataaaacctatacactattttaagaaggggcttgagcatgacccctaaagctacatgtaaagttcttgtacaaaaaatggaatgataggttgatcagattcagtaaagttgatctgtatgcattttcccatctcaagcatataagttgacctgcatctctggaaggaccttgagattgatgcattttgagcaggtctcccttttactcttcccaactgggaacttggagctgaaaaacattggcactgaggccagatggccttgggtttaatcctggctcagtgcctcacagattgtgtgactttaggcaaacatacttctcctagctgagtattttttatcagtaagtacaaatacaatgcagagctcattttcagttaatattagtactttttaaatctttactctctatcttgaagcattagatgttaagactaatgtgtaaaaaccacgtctgagcttgcttttccctctggacactctgcttttgattgcctatccctataagtggctcattttactgtcttctgatcctggtggccttatttttgctatgttaaggttgtgttttttaatacttggatttattttcatatacttacataaaccgtggtgattgcacataaagaccctgaaaaaaaaaaaaaa

SEQ ID NO: 1771 - DNA, 3108 bp, Homo sapiens
gcctctggctcctcagggcattcccggcggctccgggtttggcaacgaggacgggggagtgcgactgcgtctcgggcagcatggccgagaagcggcacacacgggactccgaagcccagcggctccccgactccttcaaggacagccccagtaagggccttggaccttgcggatggattttggtggcgttctcattcttattcaccgttataactttcccaatctcaatatggatgtgcataaagattataaaagagtatgaaagagccatcatctttagattgggtcgcattttacaaggaggagccaaaggacctggtttgttttttattctgccatgcactgacagcttcatcaaagtggacatgagaactatttcatttgatattcctcctcaggagatcctcacaaaggattcagtgacaattagcgtggatggtgtggtctattaccgcgttcagaatgcaaccctggctgtggcaaatatcaccaacgctgactcagcaacccgtcttttggcacaaactactctgaggaatgttctgggcaccaagaatctttctcagatcctctctgacagagaagaaattgcacacaacatgcagtctactctggatgatgccactgatgcctggggaataaaggtggagcgtgtggaaattaaggatgtgaaactacctgtgcagctccagagagctatggctgcagaagcagaagcgtcccgcgaggcccgcgccaaggttattgcagccgaaggagaaatgaatgcatccagggctctgaaagaagcctccatggtcatcactgaatctcctgcagcccttcagctccgatacctgcagacactgaccaccattgctgctgagaaaaactcaacaattgtcttccctctgcccatagatatgctgcaaggaatcataggggcaaaacacagccatctaggctagtgtagagatgagcgctagccttccaagcatgaagtcggggaccaaattagcctttaactcataaagagagggtagggcttttctttttccatatgtcaattgtggtgttcccagaatgtatagcagttataaaaataggtgaaagaattgttagcttgtaaatactgagagattggtgatttatataaggtaatctgttagtcttaaaatagttaaaagtttgtatttttagattattatgtagtaggttagatccctcttgttttgacttccactgactcattctgaaccccctaagcacccaggccagaggcaagaacctgggctgtaactgccacctgacaccgctgactggctaaatgctttgcagaaagtgatgaccttacaccacaaccagcttctccaggtcatatgtgccttacctccagagagtctttttttttttttttctgagatggagtttcactcttgttgcccaggctggagtgcaatagcatgatctcggctcactgcaacctccgcctcctgggttcaagagattctcctgcctcagcctccccagtagctgggattacaggctcatgccaccatgcccagctaatttttgtattattattattgttttttagtagagacggggtttcaccatgttggccaggctagtcacgaactcctaacctcaggtgatccacccacctctgcctcccaaagtgctgggattacaggcatgagctaccacacctggtttggagagtcttaattaaggaaatttccctaatgttcatttattttctaaatccagaccgtgtttcagaataatccttacttgagagtagccattttcttgcctgtacttgtcagaactagaggaaatagccaagactaatgaaaaagattactctaacccttaaaagacttttaaattcactactagagtggtcattttaaaaatacatccatgttttaacttatttgagccttctttatgagtaaatgattcctccttgttctgtctttcaaaccagctaaatatttgtcacaaaagtgcttttttctcactgttgcctattttcatatatcaggttttaaatagttttaattttttaataaaattttctctacgttctatatgcaattgttatatatctatttgaatagctgaaggactaaaatacttttttaagagataacttcaggaaaccattatattttactatctgcatgctgttaactgtggtacactgtgaaatatgttgattacaaacccattcattacatagtataaggaattcacagtatattgactatatagtgtctaatgatcttgggcagatactgtcaaacttacaatatctatatagatgtaggtctttttaaatttacctagtcattcttctatcatgtatattgatgctgaaagaggaactggtcagctcctctggacaacaaattcttagtctataatattaggagacatcttctgttttgcaaatgtctgtgaatctgagcaacctggcattctgcttactggccagaaagctggcgggtgacatttgtaacatttcctctttgagactctgagttcacctagagaagtctaagcataacagctttctttcccagcacgagcctttatagctctctttagctcaaccactctgtccatccagccaatggatgtcccttcccctgtaccccaatttcaagcttattttaggaagccttgaactaccatgtatcctggctcctagctgagtttattagaggtatggagcagtgcaacttaaactcaagttgcacttacattttgaattttaaaatgatggttttatctgttgtgtgaagtggttcacccttgaggaccaggagcctccatatcctgactgaaaaccttttctgagacttagagtaacagtgcttttggttccttgagttctcctgtctccagataccaaatgaccttgacttttctgccttgtgaattcgtagtccaatcagctgaaattaaatcacttgggagggacgcatagaaggagctctaggaacacagtgccagtgcagaagtttctccaggtggcctccctttccaacaatgtacataataaagtgtatgcactttcactaataaaaaaaaaaaaaaaaaaaaaaaaaaaaaaaaaaa

SEQ ID NO: 1772 - DNA, 1395 bp, Homo sapiens
cattagacccggtccaattgctggggctgcagcgctgcctccgagaccgcgaggtgggtggagcgggtcttcctggaagggtgcgataaggccgggcgaggtgcctgggatgcttctccccttccgcgaggaagagatctaattgggtagggcgggtgtagactagcctgccgagccgcccgctggcacctgcagcctcctgggcgcccgccgggccccggcgagaaagttgttaaagggagcgaggtggttgttcctggggtccgaggcgcgcctctcacgccctgcccaacagaagccgcagtcccgtggggtctggagacgcagtttcctgttaatgacaataaatccctgctccccctgcctcagacatctacgcagcgaaatcgagcctggccttgagggtccacaccgcgagggaagatgcgtgcgcccattccagagcctaagcctggagacctgattgagatttttcgccctttctacagacactgggccatctatgttggcgatggatatgtggttcatctggcccctccaagtgaggtcgcaggagctggtgcagccagtgtcatgtccgccctgactgacaaggccatcgtgaagaaggaattgctgtatgatgtggccgggagtgacaagtaccaggtcaacaacaaacatgatgacaagtactcgccgctgccctgcagcaaaatcatccagcgggcggaggagctggtggggcaggaggtgctctacaagctgaccagtgagaactgcgagcactttgtgaatgagctgcgctatggagtcgcccgcagtgaccaggtcagagatgtcatcatcgctgcaagcgttgcaggaatgggcttggcagccatgagccttattggagtcatgttctcaagaaacaagcgacaaaagcaataactgaaaaagactgtcctgtcagcgatgactttatacatcaagggggtcttgttttgctagagagtttggggtttggtttgtggatttcattgtgatttataataaggcttattttcacagaataaaataaagcaaaacgagggaggattttattgggggaagtgcagcaagaactgcctggtgtgaagtctgttcagggaacagccgggctgtcttcctggtcagggattgtctttcactttctttttgcgtgctgtgttctttgcattgcaggaggcagagtccagctccagttatctcaagtagagggcgtttctggtcgtcaggatacatgcggggcggaagggagacagaaagacataatacacaagaacagaaagcagcagacagccaggacccttggcccggaactagatctaggatggcctctgagactcagcagctggagtctgtagatgttcagctgagttgaaaaaaaaaaag

SEQ ID NO: 1773 - DNA, 778 bp, Homo sapiens; identical to SEQ ID NO: 446

SEQ ID NO: 1774 - DNA, 4131 bp, Homo sapiens; identical to SEQ ID NO: 436

SEQ ID NO: 1775 - DNA, 2168 bp, Homo sapiens; identical to SEQ ID NO: 404

SEQ ID NO: 1776 - DNA, 5239 bp, Homo sapiens
gaaaaaaacaaacaaacaaaaaaaatcaccattccttttaatagcttgagcctgtaccagaatgataagtggaaattagtcctcaaagtaacctcagctgtttcattattgtgtgcctcgagcatctggttattcaagctcctcccacggttcgtattgtgcactcaggcttggcctgtaacattgaagaggagcgctactccgaaagggtctacactatccgggaaggagaaacccttgagttgacttgtctagtcacaggacatccacgtccacaggtggaccaaaacagcaggaagtgcctctgacagattccaagactcaagtgtcttcaatgagactttgaggattacaaatattcagcgacaccaaggaggccggtattactgtaaagcagagaatggcttggggtctccagcgataaagtcaatcagagtggatgtatactatttggatgatccagtagtaactgttcatcaaagtataggtgaagctaaagaacaattttactatgagagaacagtgttcctccggtgtgttgccaattccaatcctcctgttcggtatagctggagacgtggccaggaggtcttgctgcaaggatctgataaaggagttgagatttatgaaccattctttacccagggtgaaacaaagatcttaaaactaaagaatcttcgacctcaggactatgctaattatagctgcattgcttcagtgaggaatgtatgtaatattcctgataagatggtgtcgtttagactgtccaataaaacagcatcaccgtcaattaaactcttggtggatgatcctatagttgtaaatcctggagaggccataacattagtatgtgttacaacaggaggagagcctgcaccttctctcacctgggtcaggtcctttgggactctgcctgaaaagactgttttgaatggaggaactttgaccatacctgccatcacctcagatgatgctggtacttacagctgcattgccaataataatgtgggaaaccctgcaaaaaagtccaccaacatcattgtgagagcattaaaaaaaggacgattttggatcacaccagatccttatcacaaagatgacaacatccagattggccgtgaggtgaaaatatcttgccaagtagaagctgttccttctgaggagctaacatttagttggtttaaaaatggtcgtccattaagaagttctgagcggatggtcattacacagactgatcctgatgtctctccgggaacaacaaacttggacatcattgatttaaaattcacggattttgggacgtacacatgtgtagcatctctgaagggaggaggaatatctgatatcagtatcgatgttaatatatccagcagcacagttccacccaatctgactgttccacaggaaaaatcaccattggtcaccagagaaggagacacaatagaactgcaatgtcaagtaactggcaaacctaaaccaatcatcctttggtctagagcggataaagaagttgcaatgcctgatggatcaatgcaaatggagagttatgatggaacactgaggattgtgaatgtatctagggaaatgtcaggaatgtacagatgtcagaccagccaatacaatggatttaacgtgaaaccaagggaagccttggtgcagctcatcgttcagtatccccctgcagtggaaccagcattcttggaaatccggcaaggacaggatcgaagtgtcactatgagttgcagagtactgagagcctatccaatacgggtgctgacctatgagtggcgcttgggcaataaattattacggacgggtcaatttgactctcaggaatacacagagtacgctgtgaagagtctttccaatgaaaactatggggtttataactgtagcatcataaatgaagctggagctgggagatgcagctttcttgttacaggaaaggcctatgctccagaattctattatgatacctacaatccagtatggcagaacagacaccgtgtttattcttacagtctacagtggacacagatgaatcctgatgcagtggatcggattgttgcataccggttgggcatcaggcaggctggacagcagcgctggtgggagcaggagattaaaataaatgggaatattcaaaagggagaattaattacatataacttgacagagctaattaaaccagaagcttatgaagtccgactgactcctctcaccaaatttggtgaaggagattcaacaattcgtgtgatcaaatatagtgctcctgtaaatcctcatttgagagaatttcattgtggatttgaagatggtaatatttgtttgttcactcaagatgatacagataattttgactggacaaagcaaagtacagcaacaagaaatacaaaatatactcctaatacaggacctaatgctgaccgtagtggctccaaagaaggtttttatatgtacattgagacatcacgacccagattggaaggcgaaaaggctcgacttctcagccctgttttcagcatagctcccaaaaacccttatggacccacaaacactgcatattgtttcagcttcttttatcacatgtatggacaacatataggtgtcttaaatgtttatctacgtttgaaagggcaaacaacaatagagaatccactgtggtcttcaagtgggaataaaggacaaagatggaatgaggctcatgttaatatatacccaattacttcatttcagctcatttttgaaggtatccgaggtcctggaatagaaggtgacattgctattgatgatgtatcaattgcagaaggagaatgtgcaaaacaagacctagcaactaagaattccgttgatggtgctgttgggattttggttcatatatggctttttcccattatcgtcctcatctctatcttaagtcctcgaaggtgaccttatcctggcagaggctataaaagattcaccaggcactggcatgaagaaagagtctttgtaaatggacattgaacaaacaaactaccaaagattcctccactgactactgactcaaaaataaaataataaaaacaaatttttttaagcactggggataaaaagacatcatggaagtataacttattccagactaaacataaaagataatcttgacctgagtagagaagagaccttcaggtgcttttgtggctaaaaagattacagcgtcatctggttgaactctggaaaaaaaaaaaaaaatgaaaaaaagaaaaaaaaaagagctatagaaatccttgtcaaagcacaaagtcatggctggttttgtttcaaatgaatagtttgcttgttaccatggaaacctaatggcctgccaacaaaaacctcactgtaaacagggtacgtgaagagctggcatttattttccttacgagaaggttttcgtagagaattaaataaatgtaggcccttttacctttggctgttacccttccttgaaaataacccgaactcagaattatttaaagcattcatgtttctccccaccttatccccatcccacctttattattattatttttctcccatggctaagctagataactgtatgctgtctctttttgcatgcactactatccaggatggtaaacctgggcttacatgttacacaggcttatcggagtttgcttgcggccacttgaacacccaaactacgtcatctgttccaatgaagaaaccaaaccaccatcttttataaattgccatggaaaccaagtgccttcaatgaaacaagcctgaataattttcaactcagaagcttgcactgctaagagtggtttgtgtaaaactattttataaacaaactacagagcctaaatgtgcaaattacaggcaagacaacaaagccgcttctgaagaagaaaggaccgaagctgctgcgtaagcccatgcagacaagatatttgttgtttaacctcctagacagccatggcctttcggcttattgtccattagaaaatcacttccattgagaccagacatggagcaacactttttttcttccaggttattaaatgggtcaaccagagcaaaaggttattaagaatacttagtgcagaaggtggtaaaacacaaaagtgatttttttactctaacctccatttgaaatgaaattggccctagctttagagggaacaagaaaatgtttgggattgcagtgcatactaactctacagtggaactgggcctgaaaaatctggctttattctaaactctgagggtaatatgcctctgccctttagtcagactctgtgcaaattgtgaaatattattttattattttaccaagattataaaaacacttttacaaaaaaacaaaaacctgtaaaaataattttgagctacctgacgacaaatcatatctttaaccagccagttttccaatgcattgtaaatttcacttaaacctgttggttatgaaaatttgaagatcattttccttaaattatctcagcttttaacttcatttaaaaagacttttgtctaagaagaatattattattatatgttctttcaacaccccaggattaaaaaaactgattatgcaagcaattggaatataagtattaaattatagcatttgcaaatattaatataaaagcacaacaaaatgtagtggaaaatgacaaagcttgttttttaaaacaattctgtagaaatgtttgtgcaaattcagtaattcaacttaaaatataattttacagctatgttcaataaagcctctttccaggtaaggtatgacaagcagtatgtgtgtttgttgagcaatgttcacttatcactaaaatgaaattagttatacaatttattggttaccatgggataaatcttcagtgctccacataccttaatgtctgcagaaagaaattttaataggaactccctgatgcactcccctatattgtaatacatgcagaaagcagttaaacctttgaaggtaaaatatgaaacatatatgaacctggaatttaatgtctattttcagtcagttcaaaaggggaccagtttgaatatttaggtagtgatggaattgatctgaaccaagtcctttaaattaaacataataaacaaatgagtttcataacttatttgaatgaattagacatcttaaaattttttcagagtttcacagtaacccatatactttatcagaccaaagagattcaagtacacaatatctggggcatttcttttacgttttacaaaa

SEQ ID NO: 1777 - DNA, 1163 bp, Homo sapiens
ccgtgcgggaatgggcgtggcctgggcggggcgggcgctaggacccaccggagcgccgtgaacgtcaccgagcggcgccgaggccccgggttgagcgggaggcgcgatcggtccggtcggtggctccccgcggcggggccgggcccgatctcgggcgggaaccgagcgcagagccggtagcgggaaggatgaccacgctcacacgacaagacctcaactttggccaagtggtggccgatgtgctctgcgagttcctggaggtggctgtgcatctcatcctctacgtgcgcgaggtctaccccgtgggcatcttccagaaacgcaagaagtacaacgtgccggtccagatgtcctgccacccggagctgaatcagtatatccaggacacgctgcactgcgtcaagccactcctggagaagaatgatgtggagaaagtggtggtggtgattttggataaagagcaccgcccagtggagaaattcgtctttgagatcacccagcctccactgctgtccatcagctcagactcgctgttgtctcatgtggagcagctgctccgggccttcatcctgaagatcagcgtgtgcgatgccgtcctggaccacaaccccccaggctgtaccttcacagtcctggtgcacacgagagaagccgccactcgcaacatggagaagatccaggtcatcaaggatttcccctggatcctggcggatgagcaggatgtccacatgcatgacccccggctgataccactaaaaaccatgacgtcggacattttaaagatgcagctttacgtggaagagcgcgctcataaaggcagctgagggggcacctgccaccccactgatgcccaaactgtcagactttgggggatccccgcctagggcagtgctgcatggctgccctgattccaagtgctcttatcgcctctgtgtgtggatcgcccgccccagcccggggccgctcaggtctgcttggaggatgcctcccccaggagggcagtgagggatgccgcaacctcgacttctcagcctcctggggttccgccggccaacactgtctgtctcaaatactgtgctgtgagttgtttcaataaaggggccccaagggctgggctgaaaaaaaaaaaaaaaaaaaaaaaaaaaaaaaaaaaaaaaaaaaaa

SEQ ID NO: 1778 - DNA, 3049 bp, Homo sapiens
ataacgctacctgccgagcaagccgagtggagggaggcaaaggccaggctgaggatcagggtggcccgggtggcagcggggaggcgctgcatgctggaggctgtgctgagtgcccggtgcaggtgagccggtcctgcggagttgtgccgagtgcctgctgcagaccgaggctgggccaagatggtgtctgtgtttcgaagcgaggagatgtgtttgtcacaactgtttctccaggtggaagctgcatattgctgtgtggctgagctcggagagctcggattggttcagttcaaagatttaaatatgaatgtgaacagctttcaaaggaaatttgtgaatgaagtcagaaggtgtgaatcactggagagaatcctccgttttctggaagacgagatgcaaaatgagattgtagttcagttgctcgagaaaagcccactgaccccgctcccacgggaaatgattaccctggagactgttctagaaaaactggaaggagagttacaggaagccaaccagaaccagcaggccttgaaacaaagcttcctagaactgacagaactgaaatacctcctgaagaaaacccaagacttctttgagacggaaaccaatttagctgatgatttctttactgaggacacttctggcctcctggagttgaaagcagtgcctgcatatatgaccggaaagttggggttcatagccggtgtgatcaacagggagaggatggcttcctttgagcggttactgtggcgaatctgccgaggaaacgtgtacttgaagttcagtgagatggacgcccctctggaggatcctgtgacgaaagaagaaattcagaagaacatattcatcatattttaccaaggagagcagctcaggcagaaaatcaagaagatctgtgatgggtttcgagccactgtctacccttgcccagagcctgcggtggagcgcagagagatgttggagagcgtcaatgtgaggctggaagatttaatcaccgtcataacacaaacagagtctcaccgccagcgcctgctgcaggaagccgctgccaactggcactcctggctcatcaaggtgcagaagatgaaagctgtctaccacatcctgaacatgtgcaacatcgacgtcacccagcagtgtgtcatcgccgagatctggttcccggtggcagatgccacacgtatcaagagggcactggagcaaggcatggaactaagtggctcctccatggcccccatcatgaccacagtgcaatctaaaacagcccctcccacatttaacaggaccaataaattcacagctggcttccagaatattgttgatgcctatggtgtcggcagctaccgggagataaacccagccccctacaccatcatcactttccccttcctgttcgctgtgatgtttggagactgtggtcatggaaccgtgatgctcctggctgcactttggatgattctgaatgagagacgcttgctctcccagaagacagacaatgagatttggaacaccttcttccacgggcgctatctgatcctacttatgggcatcttctccatctacacgggtttgatctacaatgactgcttctccaagtccttgaacatctttggctcttcttggagtgtccaacccatgttcagaaacggcacatggaatactcatgtaatggaggaaagtctatatctgcagctggacccagccataccaggagtgtattttggaaatccatacccgtttgggattgatccgatttggaacttggcttcaaacaaactcacatttctgaactcgtataaaatgaagatgtcggtgatcctgggaattgtccagatggttttcggtgtcatcctcagccttttcaatcacatatacttcagaagaactctcaacatcattctgcaatttatccctgagatgatttttatcctgtgtctgtttggatacctggttttcatgatcattttcaaatggtgctgctttgacgtccatgtatctcagcacgcccccagcatcctcatccacttcatcaacatgtttctgtttaactacagtgactcttccaacgcacccctctacaaacatcagcaagaagtccaaagtttctttgtggttatggctttgatttctgtgccgtggatgcttctgattaagccgtttattcttagagccagtcatcggaaatcccagctgcaggcatccaggatccaagaagatgccactgagaacattgaaggtgatagctccagcccttctagccgttctggccagaggacttctgcagatacccacggggctctggacgaccatggagaagagttcaactttggagacgtctttgtccaccaagccatccacaccatcgagtactgcctgggctgcatttcaaacacagcctcctacctgcggctctgggccctcagcctggctcatgcacaactgtctgaagtgctctggactatggtgatgaacagcggccttcagacgcgaggctggggaggaatcgtcggggtttttattatttttgccgtatttgctgtcctgacagtagccatccttctgatcatggagggcctctctgctttcctgcacgccctgcgactgcactgggttgagttccagaacaagttctatgtcggggatggttacaagttttctccattctcctttaaacacatcctggatggcacagccgaggagtaggctgagggctgcacctcccacggtggtcaccatgccaatgaaggaagttcagtcttgtctttgatatcagcccctgcaaggcgctcaatgggaaggttgttcttggctcacctgaagcatgaaactgtgtattatttggacgtcagcctgtggatttgatacgacttaaccacgtcagaggaaggactttggcaagtgatattgtcttcatgtggggtattaattctcaaataataaagtaattgacaaatgaggggagaatgctaaacagatgtcttcttgcaatattttaaatattgtatttgagaaaataaacatctgagtcattcaaaaaaaaaaaaaaaaa

SEQ ID NO: 1779 - DNA, 9708 bp, Homo sapiens
ttccccagcagctgctgctcgctcagctcacaagccaaggccaggggacagggcggcagcgactcctctggctcccgagaagtggatccggtcgcggccactacgatgccgggagccgccggggtcctcctccttctgctgctctccggaggcctcgggggcgtacaggcgcagcggccgcagcagcagcggcagtcacaggcacatcagcaaagaggtttattccctgctgtcctgaatcttgcttctaatgctcttatcacgaccaatgcaacatgtggagaaaaaggacctgaaatgtactgcaaattggtagaacatgtccctgggcagcctgtgaggaacccgcagtgtcgaatctgcaatcaaaacagcagcaatccaaaccagagacacccgattacaaatgctattgatggaaagaacacttggtggcagagtcccagtattaagaatggaatcgaataccattatgtgacaattaccctggatttacagcaggtgttccagatcgcgtatgtgattgtgaaggcagctaactccccccggcctggaaactggattttggaacgctctcttgatgatgttgaatacaagccctggcagtatcatgctgtgacagacacggagtgcctaacgctttacaatatttatccccgcactgggccaccgtcatatgccaaagatgatgaggtcatctgcacttcattttactccaagatacaccccttagaaaatggagagattcacatctctttaatcaatgggagaccaagtgccgatgatccttctccagaactgctagaatttacctccgctcgctatattcgcctgagatttcagaggatccgcacactgaatgctgacttgatgatgtttgctcacaaagacccaagagaaattgaccccattgtcaccagaagatattactactcggtcaaggatatttcagttggagggatgtgcatctgctatggtcatgccagggcttgtccacttgatccagcgacaaataaatctcgctgtgagtgtgagcataacacatgtggcgatagctgtgatcagtgctgtccaggattccatcagaaaccctggagagctggaacttttctaactaaaactgaatgtgaagcatgcaattgtcatggaaaagctgaagaatgctattatgatgaaaatgttgccagaagaaatctgagtttgaatatacgtggaaagtacattggagggggtgtctgcattaattgtacccaaaacactgctggtataaactgcgagacatgtactgatggcttcttcagacccaaaggggtatctccaaattatccaaggccatgccagccatgtcattgcgatccaattggttccttaaatgaagtctgtgtcaaggatgagaaacatgctcgacgaggtttggcacctggatcctgtcattgcaaaactggttttggaggtgtgagctgtgatcggtgtgccaggggctacactggctacccggactgcaaagcctgtaactgcagtgggttagggagcaaaaatgaggatccttgttttggcccctgtatctgcaaggaaaatgttgaaggaggagactgtagtcgttgcaaatccggcttcttcaatttgcaagaggataattggaaaggctgcgatgagtgtttctgttcaggggtttcaaacagatgtcagagttcctactggacctatggcaaaatacaagatatgagtggctggtatctgactgaccttcctggccgcattcgagtggctccccagcaggacgacttggactcacctcagcagatcagcatcagtaacgcggaggcccggcaagccctgccgcacagctactactggagcgcgccggctccctatctgggaaacaaactcccagcagtaggaggacagttgacatttaccatatcatatgaccttgaagaagaggaagaagatacagaacgtgttctccagcttatgattatcttagagggtaatgacttgagcatcagcacagcccaagatgaggtgtacctgcacccatctgaagaacatactaatgtattgttacttaaagaagaatcatttaccatacatggcacacattttccagtccgtagaaaggaatttatgacagtgcttgcgaatttgaagagagtcctcctacaaatcacatacagctttgggatggatgccatcttcaggttgagctctgttaaccttgaatccgctgtctcctatcctactgatggaagcattgcagcagctgtagaagtgtgtcagtgcccaccagggtatactggctcctcttgtgaatcttgttggcctaggcacaggcgagttaacggcactatttttggtggcatctgtgagccatgtcagtgctttggtcatgcggagtcctgtgatgacgtcactggagaatgcctgaactgtaaggatcacacaggtggcccatattgtgataaatgtcttcctggtttctatggcgagcctactaaaggaacctctgaagactgtcaaccctgtgcctgtccactcaatatcccatccaataactttagcccaacgtgccatttagaccggagtcttggattgatctgtgatggatgccctgtcgggtacacaggaccacgctgtgagaggtgtgcagaaggctattttggacaaccctctgtacctggaggatcatgtcagccatgccaatgcaatgacaaccttgacttctccatccctggcagctgtgacagcttgtctggctcctgtctgatatgtaaaccaggtacaacaggccggtactgtgagctctgtgctgatggatattttggagatgcagttgatgcgaagaactgtcagccctgtcgctgtaatgccggtggctctttctctgaggtttgccacagtcaaactggacagtgtgagtgcagagccaacgttcagggtcagagatgtgacaaatgcaaggctgggacctttggcctacaatcagcaaggggctgtgttccctgcaactgcaattcttttgggtctaagtcattcgactgtgaagagagtggacaatgttggtgccaacctggagtcacagggaagaaatgtgaccgctgtgcccacggctatttcaacttccaagaaggaggctgcacagcttgtgaatgttctcatctgggtaataattgtgacccaaagactgggcgatgcatttgccctcccaataccattggagagaaatgttctaaatgtgcacccaatacctggggccacagcattaccactggttgtaaggcttgtaactgcagcacagtgggatccttggatttccaatgcaatgtaaatacaggccaatgcaactgtcatccaaaattctctggtgcaaaatgtacagagtgcagtcgaggtcactggaactaccctcgctgcaatctctgtgactgcttcctccctgggacagatgccacaacctgtgattcagagactaaaaaatgctcctgtagtgatcaaactgggcagtgcacttgtaaggtgaatgtggaaggcatccactgtgacagatgccggcctggcaaattcggactcgatgccaagaatccacttggctgcagcagctgctattgcttcggcactactacccagtgctctgaagcaaaaggactgatccggacgtgggtgactctgaaggctgagcagaccattctacccctggtagatgaggctctgcagcacacgaccaccaagggcattgtttttcaacatccagagattgttgcccacatggacctgatgagagaagatctccatttggaacctttttattggaaacttccagaacaatttgaaggaaagaagttgatggcctatgggggcaaactcaagtatgcaatctatttcgaggctcgggaagaaacaggtttctctacatataatcctcaagtgatcattcgaggtgggacacctactcatgctagaattatcgtcaggcatatggctgctcctctgattggccaattgacaaggcatgaaattgaaatgacagagaaagaatggaaatattatggggatgatcctcgagtccatagaactgtgacccgagaagacttcttggatatactatatgatattcattacattcttatcaaagctacttatggaaatttcatgcgacaaagcaggatttctgaaatctcaatggaggtagctgaacaaggacgtggaacaacaatgactcctccagctgacttgattgaaaaatgtgattgtcccctgggctattctggcctgtcctgtgaggcatgcttgccgggattttatcgactgcgttctcaaccaggtggccgcacccctggaccaaccctgggcacctgtgttccatgtcaatgtaatggacacagcagcctgtgtgaccctgaaacatcgatatgccagaattgtcaacatcacactgctggtgacttctgtgaacgatgtgctcttggatactatggaattgtcaagggattgccaaatgactgtcagcaatgtgcctgccctctgatttcttccagtaacaatttcagcccctcttgtgtcgcagaaggacttgacgactaccgctgcacggcttgtccacggggatatgaaggccagtactgtgaaaggtgtgcccctggctatactggcagtccaggcaaccctggaggctcctgccaagaatgtgagtgtgatccctatggctcactgcctgtgccctgtgaccctgtcacaggattctgcacgtgccgacctggagccacgggaaggaagtgtgacggctgcaagcactggcatgcacgcgagggctgggagtgtgttttttgtggagatgagtgcactggccttcttctcggtgacttggctcgcctggagcagatggtcatgagcatcaacctcactggtccgctgcctgcgccatataaaatgctgtatggtcttgaaaatatgactcaggagctaaagcacttgctgtcacctcagcgggccccagagaggcttattcagctggcagagggcaatctgaatacactcgtgaccgaaatgaacgagctgctgaccagggctaccaaagtgacagcagatggcgagcagaccggacaggatgctgagaggaccaacacaagagcaaagtccctgggagaattcattaaggagcttgcccgggatgcagaagctgtaaatgaaaaagctataaaactaaatgaaactctaggaactcgagacgaggcctttgagagaaatttggaagggcttcagaaagagattgaccagatgattaaagaactgaggaggaaaaatctagagacacaaaaggaaattgctgaagatgagttggtagctgcagaagcccttctgaaaaaagtgaagaagctgtttggagagtcccggggggaaaatgaagaaatggagaaggatctccgggaaaaactggctgactacaaaaacaaagttgatgatgcttgggaccttttgagagaagccacagataaaatcagagaagctaatcgcctatttgcagtaaatcagaaaaacatgactgcattggagaaaaagaaggaggctgttgaaagcggcaaacgacaaattgagaacactttaaaagagggcaatgacatactcgatgaagccaaccgtcttgcagatgaaatcaactccatcatagactatgttgaagacatccaaactaaattgccacctatgtctgaggagcttaatgataaaatagatgacctctcccaagaaataaaggacaggaagcttgctgagaaggtgtcccaggctgagagccacgcagctcagttgaatgactcatctgctgtccttgatggaatccttgatgaggctaaaaacatctccttcaatgccactgcagccttcaaagcttacagcaatattaaggactatattgatgaagctgagaaagttgccaaagaagccaaagatcttgcacatgaagctacaaaactggcaacaggtcctcggggtttattaaaggaagatgccaaaggctgtcttcagaaaagcttcaggattcttaacgaagccaagaagttagcaaatgatgtaaaagaaaatgaagaccatctaaatggcttaaaaaccaggatagaaaatgctgatgctagaaatggggatctcttgagaactttgaatgacactttgggaaagttatcagctattccaaatgatacagctgctaaactgcaagctgttaaggacaaagccagacaagccaacgacacagctaaagatgtactggcacagattacagagctccaccagaacctcgatggcctgaagaagaattacaataaactagcagacagcgtcgccaaaacgaatgctgtggttaaagatccttccaagaacaaaatcattgccgatgcagatgccactgtcaaaaatttagaacaggaagctgaccggctaatagataaactcaaacccatcaaggaacttgaggataacctaaagaaaaacatctctgagataaaggaattgataaaccaagctcggaaacaagccaattctatcaaagtatctgtgtcttcaggaggtgactgcattcgaacatacaaaccagaaatcaagaaaggaagttacaataatattgttgtcaacgtaaagacagctgttgctgataacctcctcttttatcttggaagtgccaaatttattgactttctggctatagaaatgcgtaaaggcaaagtcagcttcctctgggatgttggatctggagttggacgtgtagagtacccagatttgactattgatgactcatattggtaccgtatcgtagcatcaagaactgggagaaatggaactatttctgtgagagccctggatggacccaaagccagcattgtgcccagcacacaccattcgacgtctcctccagggtacacgattctagatgtggatgcaaatgcaatgctgtttgttggtggcctgactgggaaattaaagaaggctgatgctgtacgtgtgattacattcactggctgcatgggagaaacatactttgacaacaaacctataggtttgtggaatttccgagaaaaagaaggtgactgcaaaggatgcactgtcagtcctcaggtggaagatagtgaggggactattcaatttgatggagaaggttatgcattggtcagccgtcccattcgctggtaccccaacatctccactgtcatgttcaagttcagaacattttcttcgagtgctcttctgatgtatcttgccacacgagacctgagagatttcatgagtgtggagctcactgatgggcacataaaagtcagttacgatctgggctcaggaatggcttccgttgtcagcaatcaaaaccataatgatgggaaatggaaatcattcactctgtcaagaattcaaaaacaagccaatatatcaattgtagatatagatactaatcaggaggagaatatagcaacttcgtcttctggaaacaactttggtcttgacttgaaagcagatgacaaaatatattttggtggcctgccaacgctgagaaacttgagtatgaaagcaaggccagaagtaaatctgaagaaatattccggctgcctcaaagatattgaaatttcaagaactccgtacaatatactcagtagtcccgattatgttggtgttaccaaaggatgttccctggagaatgtttacacagttagctttcctaagcctggttttgtggagctctcccctgtgccaattgatgtaggaacagaaatcaacctgtcattcagcaccaagaatgagtccggcatcattcttttgggaagtggagggacaccagcaccacctaggagaaaacgaaggcagactggacaggcctattatgtaatactcctcaacaggggccgtctggaagtgcatctctccacaggggcacgaacaatgaggaaaattgtgatcagaccagagccgaatctgtttcatgatggaagagaacattccgttcatgtagagcgaactagaggcatctttacagttcaagtggatgaaaacagaagatacatgcaaaacctgacagttgaacagcctatcgaagttaaaaagcttttcgttgggggtgctccacctgaatttcaaccttccccactcagaaatattcctccttttgaaggctgcatatggaatcttgttattaactctgtccccatggactttgcaaggcctgtgtccttcaaaaatgctgacattggtcgctgtgcccatcagaaactccgtgaagatgaagatggagcagctccagctgaaatagttatccagcctgagccagttcccaccccagcctttcctacgcccaccccagttctgacacatggtccttgtgctgcagaatcagaaccagctcttttgatagggagcaagcagttcgggctttcaagaaacagtcacattgcaattgcatttgatgacaccaaagttaaaaaccgtctcacaattgagttggaagtaagaaccgaagctgaatccggcttgcttttttacatggctcgcatcaatcatgctgattttgcaacagttcagctgagaaatggattgccctacttcagctatgacttggggagtggggacacccacaccatgatccccaccaaaatcaatgatggccagtggcacaagattaagataatgagaagtaagcaagaaggaattctttatgtagatggggcttccaacagaaccatcagtcccaaaaaagccgacatcctggatgtcgtgggaatgctgtatgttggtgggttacccatcaactacactacccgaagaattggtccagtgacctatagcattgatggctgcgtcaggaatctccacatggcagaggcccctgccgatctggaacaacccacctccagcttccatgttgggacatgttttgcaaatgctcagaggggaacatattttgacggaaccggttttgccaaagcagttggtggattcaaagtgggattggaccttcttgtagaatttgaattccgcacaactacaacgactggagttcttctggggatcagtagtcaaaaaatggatggaatgggtattgaaatgattgatgaaaagttgatgtttcatgtggacaatggtgcgggcagattcactgctgtctatgatgctggggttccagggcatttgtgtgatggacaatggcataaagtcactgccaacaagatcaaacaccgcattgagctcacagtcgatgggaaccaggtggaagcccaaagcccaaacccagcatctacatcagctgacacaaatgaccctgtgtttgttggaggcttcccagatgacctcaagcagtttggcctaacaaccagtattccgttccgaggttgcatcagatccctgaagctcaccaaaggcacaggcaagccactggaggttaattttgccaaggccctggaactgaggggcgttcaacctgtatcatgcccagccaactaataaaaataagtgtaaccccaggaagagtctgtcaaaacaagtatatcaagtaaaacaaacaaatatattttacctatatatgttaattaaactaatttgtgcatgtacatagaattctttctgtattcagatggtgctaattcagactccagactgaattttaattcaagttctttctcaagtctataaataatattaaactgattatttcattctaaaaaaaaaaaaaaaaaa

SEQ ID NO: 1780 - DNA, 1898 bp, Homo sapiens; identical to SEQ ID NO: 1465

SEQ ID NO: 1781 - DNA, 779 bp, Homo sapiens
ggcacgaggcagtgtccttcaggcatcagaaactaagcaaagagtatggaaagagatcacagggctctccgttctatggtgacaaggggaataaagcaggacaaaaaaagtggagatttcacattaggtaccatcttctgctctctgctctctcttcctctatcttggagcctacctgacattccttgaccacctcgtttatgcggaatgtttggtgaccttggtgttcctgagacagttcacaaacccagcaaatgacttttccatcctccttacagaagatctggagtttttttccgtggtgctcacagacatctctcttctgcccctcctgtgggctcatcttgacctctttgactctctcaactatgttggccagatgccgattaggtcggaggttcccaggctggaatctggtctgacacacaggacagctgctttcccctcttgagatgatcactgactccttgatctttgcagtgatgcaggcttggcagaagctgtggccacaatctaggctcagaggttctgtcaggagctccaggcagatggggcaggtcacctccttctctatgtctacctttactgagaaatccattgcactgctcccttggcttccttctgtcttgactcttgaagttcttggtcacaaactcctgcagtgctgagaatgttgaaggggacagggtaagaaaagaaggaatagaaagaatactgcttttacagagatttagaacaggacaaaacattaatatttaacaaaaaaaaaaaaaaaaaaa

SEQ ID NO: 1782 - DNA, 4915 bp, Homo sapiens; identical to SEQ ID NO: 1467

SEQ ID NO: 1783 - DNA, 4033 bp, Homo sapiens; identical to SEQ ID NO: 755

SEQ ID NO: 1784 - DNA, 2512 bp, Homo sapiens; identical to SEQ ID NO: 733

SEQ ID NO: 1785 - DNA, 1602 bp, Homo sapiens
gggcgggcgcggccagagcaagtgccaggcgggaacagagggactgggcgcgcctcacaactcaccacctcgcccgctggtccttcctggctcgcctggctctgaagctgcacctggaggggaaacctcagaacagtaggcgggattgcctagtaaatatctcccattcagggaggcccaggtcgtgtgacgtcgacagttgctgggtagatgaggccaacacaggttgcaagaagaggcggggtttagaggcgtgaaactccgcagtgctcagccaagcagggagcaacgctaggaagggcgggcagaaagggcacgctcttgtgggtgactacaggttaggagaccgttgaacctggaggggccctaggatggaccccgtggaaagattcagagactgcgccctctccctggcgccgccttcccctacacgcggcgggtatattctgttgcagttggcccaggacctgtttccaagactctgccccctcgcacttccgtccctcctggttttgtaaagtgatgctcataggaacccccaccccgcgtgacactactcccagctcctggctgacttctagtcttctggttgaagctgcgcctttagatgacacgaccctacccacccctgtttccagcggatgcccgggcctggagcccacagaattcttccagtccctgggtggggacggagaaaggaacgttcagattgagatggcccatggcaccaccacgctcgccttcaagttccagcatggagtgattgcagcagtggattctcgggcctcagctgggtcctacattagtgccttacgggtgaacaaggtgattgagattaacccttacctgcttggcaccatgtctggctgtgcagcagactgtcagtactgggagcgcctgctggccaaggaatgcaggctgtactatctgcgaaatggagaacgtatttcagtgtcggcagcctccaagctgctgtccaacatgatgtgccagtaccggggcatgggcctctctatgggcagtatgatctgtggctgggataagaagggtcctggactctactacgtggatgaacatgggactcggctctcaggaaatatgttctccacgggtagtgggaacacttatgcctacggggtcatggacagtggctatcggcctaatcttagccctgaagaggcctatgaccttggccgcagggctattgcttatgccactcacagagacagctattctggaggcgttgtcaatatgtaccacatgaaggaagatggttgggtgaaagtagaaagtacagatgtcagtgacctgctgcaccagtaccgggaagccaatcaataatggtggtggtggcagctgggcaggtctcctctgggaggtcttggccgactcagggacctaagccacgttaagtccaaggagaagaagaggcctagcctgagccaaagagagagtacgggctcagcagccagaggaggccggtgaagtgcatcttctgcgtgttctctatttgaacaagcatttcccccagggaagtttctgggtgccccactaagtagaataaagaaaaacggttataaataaaaaaaaaaaaaaaaaaaa

SEQ ID NO: 1786 - DNA, 5801 bp, Homo sapiens; identical to SEQ ID NO: 761

SEQ ID NO: 1787 - DNA, 1255 bp, Homo sapiens
gggacagaggcctcagagagccacccaatgagtccacagcagccatggacagtccgtgagggggagggtgtgcctgcagggggcgtggccccatgccgcccgccacctgcatgcgcactgggccgaccaatcagcgaggagcgcgggcagccggggcggctgctgctctcgtgagaacagaggacccaggccctcggaggagcttcgcggtgccagcctctgcaggtcctctgagggagcaacatcagggctccctcaggttcagaggtcgcctctagcttcccaggccagtcagccacggagcccgtgggcaggaagggcagcaggatggctgccaaggaccagttggaggttcaagttatggccgcccaggaaatggagcttgcaggaaaggatccagtaagtcatgagcatgaggaaagaaaacctgttacagagacaaaggagggagatgtaactgatgagcatggggaaagaggatcttttgctgaaacagatgaacacacgggggttgataccaaggagctagaagatattgcagctgacattaaagagcatcttgctgcaaagagaaaaaggattgaaaagattgcaaaagcttgcagcgaaataaagaacagaattaaaaatgttttgagaacaacacaactaaaaaggcagaaacgtgattatagaatttctctgaagttgccgaatgtccttgaagagttcatcacagatgagcagaaagatgaggaaggagatggagaaaaggaagaacaaattaaaatatttcaagagcaacaaaagaggtggcaacaagatgggaaaggaactgaaagagattgagccaccacacgagcaattcacaaagctgcagcaagagttggcacttattcagatgtatcttcaacctctgttattctggtgactgacaaaagaacttgaacctatgttatatgatacatgcataacttgagctacactaaaccacatgacagtgtttagttaattcttgtataaattagtatatctcttctattattagtctgtttgttaaatgccagaccacgtttctatgatctgttgaatgaaccctagacagttctgtgagaaagcagcaattgcacagttacatacacagtcaattaaattttaacattaaagataatttagttttaggtttggcctctgtggatctgtatcagttccaaaatgtggaaagcacgggcatggaaaagtacatttttctctaataaaagaagacaaaccctta

SEQ ID NO: 1788 - DNA, 2898 bp, Homo sapiens
gggttggttccaagtctttgctattgtgaatagtgccgcaataaacatacgtgtgcatgtgtctttatagcagcatgatttatagtcctttgggtatatacccagtaatgggatggctgggttctagatccctgaggaatcgccacattgacttgcacaatggttgaactagtttacagtcccaccaacagtgtaaaagtgttcctatttctccacatcctctccggcacctgttgtttcctgactttttaatgattgccattctaactggtgtgagatgatatctcattgtggttttgatttgcatttctctgatggccagtgatggtgagcattttttcatgtgttttttggctgcataaatgtcttcttttgagaagtgtctgttcatgattttttttttagacaaagtattagatcagatatttttggggaaaaatgctttgtgattgcttgttttgaatggtgagcattgtattttgttttaagttgttttctggttgttattacagctatgaagtcttacactccatatttcattctcctgtggagtgctgttgggatagcgaaggctgccaaaatcatcatcgtgccgccaattatgtttgaaagccatatgtacattttcaagacgctagcctcagccttgcacgagagaggccaccatacagtgttcctcctctctgaaggcagagacatcgccccatctaatcattacagcctccagcgctacccagggatctttaacagtaccacctcagatgctttcctacagtccaagatgcggaatattttctctgggagattgacagcaatcgaactgtttgacatactggatcactatactaagaactgtgacctgatggttggcaaccatgccctgatccagggtctgaagaaagaaaaatttgacctgctgctggtggaccctaatgatatgtgtggatttgtgatagctcatcttttaggggttaaatatgctgtattttcaactggcctttggtatcctgctgaagtgggtgctcctgctccattagcatacgtcccagagtttaactcactcctcacagaccgcatgaacttgctgcaaaggatgaaaaataccggtgtttacctcatttccagattaggggtcagctttctggttcttcccaaatatgaaaggataatgcagaagtacaacctgctgccggagaagtccatgtatgatttggttcatgggtccagcctgtggatgctgtgtactgacgtagcactggaattcccaagacccactctgcctaatgttgtttatgtaggaggaatcctaaccaaaccagccagcccactaccagaagatctccaaagatgggtaaatggtgctaatgaacatggctttgtcttggtgtcttttggagctggtgtcaagtatctgtcagaagacattgctaacaaactggcaggagctctggggagattgcctcaaaaagtgatttggaggttttctggacccaaaccaaagaatctaggaaacaacactaaactcatagaatggttaccacaaaatgacctgcttgggcattcaaagattaaagccttcctgagccatggtggtttgaacagtatttttgaaactatgtatcatggtgtgcctgtagtgggaattccactctttggagaccattatgatactatgaccagagtacaggcaaaaggcatggggatattgctagaatggaagacagttactgaaaaagagctctatgaagcactagtgaaggttatcaataatcccagctaccgtcagagggctcagaagctttcggaaattcacaaggatcaacctggtcaccctgtcaatcgaactatctattggatagattatattattcgtcacaatggagcccatcacctacgtgccgctgtccatcagatctccttttgtcagtattttttactggatattgcctttgtgcttttgcttggtgctgccttgttatactttctcttgtcttgggtgacaaaatttatctacagaaaaatcaaaagtctgtggtctagaaataagcatagcacagttaatggacattaccacaatggaatcctcaatggcaagtacaaaagaaatggccatattaaacatgaaaagaaagtgaaatgagccaacagcccaggtgatagaaataaattggttcactcattgaatttttattgctattatttagtctaacagctactaaaagtaaaacatcagtaaacaattctaacatgcccttatgagatctactaatgaaattctgtggaattaagatggctgtaaaaagcacaaacctaaaatgcagaaatgtattttattcaaatactgatgtagagagttttggcactgaaccttttagaagccttaattatttaaatcaattcagtgactgtgtcagaccttagttttaaatcttgatatgtgcgtgtcccggatcaggaatggtttcatttttcttaataatgtgtgtgtgtgtatgtgtgtgtgtgtgtgtgtgtgtttgtgtgtgtgtgtgtgtgtcctaattaagagaatttttactggctgcttgttacatttgttgagggtacaacacactcaagaataaagtaaaaggatagtcaggatccagatgtttcttttctagcatttaatgtgtgtgaactcagaacactaccatgaaagaacacttccccccaaaactggatgcagaggaagaaaaaaaaaaaagaaatggcacagttttttgtatttttttttttagttattttttgttgttgttgtttgtattgtttttcttttctgatagagtatggccacttctgggggaaaaacatgtaattaagtaaatgtatacattggttttcacgttttacttttgttttcccactaccaataatttt

SEQ ID NO: 1789 - DNA, 1008 bp, Homo sapiens
caagctccttttgatattccctgccccagagctcatgaccagaacccagagctgatttaaaatattttgaaaaatggaggaggcagactgctcccagcagcctgtcaatggctgctcatctgtccatggagatggttacaggcaggtgtagtcaaaatgattgattccttgggtttgggggtgaataggctgggaaatttctgagccttttttttttgtcacagtgccctcaagttgaagtgatgagctggatttctttcttgttccatactgggcggcatgctcctcccatctccaccccttggtttgggggcttccagctcattggcaaaatctctctagttgccttcctttcaagctggagcctgacttttccccaatgtacattttttttttctccacaaagagttccttctctaatgtccccatctggtattaagtgcactttaaagaaaggggcagggtggattttcaagaggtgggaagctctaaggcttgaccgtgaggggtcttctcccagccattctcagcccatatgcagcaccctccatactgaagaggactgttgttttagtttcagacggtcctttccttccacatggtgctaaggtggttttctaggtaactgcagggatggaggtcactagccattccaaaccaggagagaaagtctggtgtcctgatatccagtcttttctaggaggaagaccaagattctccagcggcagggcagcctatcacccaacttctaagtcaggaaaggaagctgagtgggaatgccagctggtaagcgcaggctgcactggcccatgactccttcaaggaaaagaggccctgctcctttacctgctgagctccttttagcagttagggagaactgcagggggaaaaataccagtggagtgtggaataaatccaaagcagtgatttttaaatgtttttcaaaaacaaatcttacatagaaccccaatataaaaaataaagtaatgcagacctgggcagtttgca

SEQ ID NO: 1790 - DNA, 3142 bp, Homo sapiens
agcgtgggagcattctccacaatgcattttttcatgccagagaaaaatctagaaaaaaatgaataaaacgaagaaattctttccccttggtatctgtagctaacttgcctaagtgttctttcccacagtttaagtcttcagtccatagttcataagcaaaggggtgtagcgagctctgatcttgccagaagagagaataagtgagctaccccacggtggacattctggccatctgaaatgagtcgatgcatgtggcttttgtctaaaggctacaaataaaatgtaaccactttcttctttgagtagttgatatagcaaatagttgaaacagaagttttgattggcaaatcaggatgtggtagatactttaacaaagagtagaactattaccagttttatgtgttgctgtttgtatctctttcacagttttgataatatcacatcctggaaagtgaaacagaaaattattattccattttaaatgactaaatttgctttcatggtatttacagtgaaagagtaaattagaaagtgaatggatgactgttcatgagaaaaagcagggtaaaaagattttatttaattaattgaaaatattagggtcaaaacataggcttatgttatgttttgtgaattgtgctgtgttgtagacatttgatgagtcctaacatagaattgatctagctcttgaaataccatttttgattgagtataaatgggatataggcaccttacaacttcagaattcgaggaagatgatgtgaatcttccaattttatctatttgattcaaatggtatgttttttcacatttctcataatttccacgtcaactcccatgatgatcatgcaggaaagcagcatgattgcacttcttgtagtgcataccatcactaaaacatagttactgtctttctgtggtcttaagaaaaattcagaaacagcataccaatgtacatataagataaataagcttatgtggtacagtaagtgttctgttctgagaaataccttgattcgtatcctaatgtctgatgttattggtagttctcaaacttccccaattctgctttcatctaaattcatcttatctatctattgttaaataatctatcagtccatttttatctatcatctatatatctgtctttatcaatcattcgtctgtaatctatctgtgccgtttggcataagagacagaagggcatagcagtggaaactcaaaggagttacctccatgtgaatggacagtggtgatggtgatctgtgaggtggtgatgtatagaaagaaaaactataagagagcatgccctaactcagggaccttgtccagcaggcactctggccttgttatactgtgcttgaatatgaaaaaaaaaaaaatcaaaatagtgctgacattctttgtcttctgggtctgagaaaacttagagtagatatgatgactctgccatttcagtcttttgtatttccacatttagagctcagttttaattatgtagaattatttctccagcctgtgttaaactagaccatggattggcaaactttttttgtaaattgccaaatacacattttcagttctgaaagccttgtggtctttgttgcagctaatctactctgctgttgtgttatgaaagcagccataggtaatttataattgaatgagtgcgctgtgcctttcttccaataaaactttacaaaagcatcctgtgggctggagtttaccctttgggaaaccagagcattggctaaactggaacctgaaaaaataatcacatcaactcagccacatggtaataatatttagagtattatttcaacattttcattttcataaaaatttttttagctcttttgtcaaattccatctgtgagtgatacaaatgactaccacgtgccattaacatcacctaaacagtgcaaaacaagcatagtagaagtaattggaatgatataaaccccttgctgtaatagttatagttgataaattatgtttcaaaattgaacctatttcttccaaatttcatctataaagttccaaggagttccaaaatcttgcctgccttcttttcccagttagcagtattgtctctgagcagccatggtggtatccatcctccttggacaatgaatttagcctattttgacttcatttgagcagttgtaattgtttcaccacatcagagtaagattactacatgccagagctattctttaactcagcttgtaaaaacatgatagcatcaacaatatacatagcaaatgaatgccatctttaatccaattaaatggtttttacaaatttgctcttgtttgttgatgctatctgcattgcagtaattaaaggtgaggtaaaaagaatgaataaactgccaagttaaaattaaatttgggcaatttctcttttgcagtaatgtatgtatatttactcaaaacatatgccaaatttagtgttgaaaggctcattcaaatcaattgggaaagcacgtaaatgaacaattcataaaagaaaagcattgcaaatggccaagagcatagaaaatgtgctcaatcttaccagtcattataaggaaataatgaaatttgtgtatatatgaaatacttaaaatatatataaaataaaacaattatttgccttttttcacctatcagattaacagattatatgtgttaacaaggtggggagaatttacaactcctgatatgttaaaatctttcaggaaggtagtagaaaatatatgtaagatggaaattagcacttttgaccaacaattttagttttagatatttacctataaggatataataggaggtgttcaaagatgcatgtaactcaatgtagtattaattataattgtaaaatagtaaataacatttttgtcaaatcataatgttaggaaaattagtgatggcacatttaaccaattgaattatattcagttctgaataccgtgatgcatgttcaaattaattgatacaaaaatccaacaactttagcagtttgtttaccagttattgagtaccaactgtgttcaacattgttatttcactcatatgaaatgataaatgtatgtgcttgttatgatacggtcaataaaaccacttttataggaagaatactcgcaaaaaaaaaaaaaaaa

SEQ ID NO: 1791 - DNA, 9847 bp, Homo sapiens
atgtctctgctttgcgttggagtcaaaaaagccaagtttgatggtgcccaagagaaattcaacacgtacgtgaccctgaaagtgcagaatgtcaagagcacgaccatcgcggtgcggggcagccagcccagctgggagcaggatttcatgttcgagattaaccgtctggatttgggactgacggtggaggtgtggaataagggtctcatctgggacacaatggtgggcactgtgtggatcccactgaggaccatccgccagtccaatgaggagggccctggagagtggctgacgctggactcccaggtcatcatggcagacagtgagatctgtggcaccaaggaccccaccttccaccgcatcctcctggacacgcgctttgagctacccttagacattcctgaagaggaggctcgctactgggccaagaagctggagcagctcaatgctatgcgggaccaggatgaatattcgttccaagatgagcaagacaagcctctgcctgtccccagcaaccagtgctgcaactggaattattttggctggggtgagcagcacaacgatgaccccgacagtgcagtggatgatcgtgacagtgactaccgcagtgaaacgagcaacagcatcccgccgccctattatactacgtcacaacccaacgcctcagtccaccaatattctgttcgcccaccacccctgggctcccgggagtcctacagtgactccatgcacagttacgaggagttctctgagccacaagccctcagccccacgggtagcagccgctatgcctcttccggggagctgagccagggaagctctcagctgagcgaggacttcgaccctgacgagcacagcctgcagggctccgacatggaggatgagcgggaccgggactcctaccactcctgccacagctcggtcagctaccacaaagactcgcctcgctgggaccaggatgaggaagagctggaggaggacctggaggacttcctggaggaggaggagctgcctgaagatgaggaggagctggaggaggaggaggaggaggtgcctgacgatttgggcagctatgcccagcgtgaagacgtagctgtggctgagcccaaagacttcaaacgcatcagcctcccgccagctgccccagggaaggaggacaaggccccagtggcacccaccgaggcccccgacatggccaaggtggcccccaagccagccacgcccgacaaggtgcctgcagctgagcagatccctgaggctgagccacccaaggacgaggagagtttcaggccgagagaggatgaggaaggccaggaggggcaggactccatgtccagggccaaggccaactggctgcgtgccttcaacaaggtgcggatgcagctgcaggaggcccggggagaaggagagatgtctaaatccctatggttcaaaggcggcccagggggcggtctcatcatcatcgacagcatgccagacatccgcaagaggaaacctatcccactcgtgagcgacttggccatgtccctggtccagtccaggaaagcgggcatcacctcggccttggcctccagcacgttgaacaacgaggagctgaaaaaccacgtttacaagaagaccctgcaagccttaatctaccccatctcgtgcacgacgccacacaacttcgaagtgtggacggccaccacgcccacctactgctacgagtgcgaggggctgctgtggggcatcgcgaggcagggcatgcgctgcaccgagtgcggtgtcaagtgccacgagaagtgccaggacctgctcaacgccgactgcctgcagcgggctgcggagaagagctccaagcacggggcggaggaccggacacagaacatcatcatggtgctcaaggaccgcatgaagatccgggagcgcaacaagcccgagatcttcgagctcatccaggagatcttcgcggtgaccaagacggcgcacacgcagcagatgaaggcggtcaagcagagcgtgctggacggcacgtccaagtggtccgccaagatcagcatcaccgtggtctgcgcccagggcttgcaggcaaaggacaagacaggatccagtgacccctatgtcaccgtccaggtcgggaagaccaagaaacggacaaaaaccatctatgggaacctcaacccggtgtgggaggagaatttccactttgaatgtcacaattcctccgaccgcatcaaggtgcgcgtctgggacgaggatgacgacatcaaatcccgcgtgaaacagaggttcaagagggaatctgacgatttcctggggcagacgatcattgaggtgcggacgctcagcggcgagatggacgtgtggtacaacctggacaagcgaactgacaaatctgccgtgtcgggtgccatccggctccacatcagtgtggagatcaaaggcgaggagaaggtggccccgtaccatgtccagtacacctgtctgcatgagaacctgttccacttcgtgaccgacgtgcagaacaatggggtcgtgaagatcccagatgccaagggtgacgatgcctggaaggtttactacgatgagacagcccaggagattgtggacgagtttgccatgcgctacggcgtcgagtccatctaccaagccatgacccactttgcctgcctctcctccaagtatatgtgcccaggggtgcctgccgtcatgagcaccctgctcgccaacatcaatgcctactacgcacacaccaccgcctccaccaacgtgtctgcctccgaccgcttcgccgcctccaactttgggaaagagcgcttcgtgaaactcctggaccagctgcataactccctgcggattgacctctccatgtaccggaataacttcccagccagcagcccggagagactccaggacctcaaatccactgtggaccttctcaccagcatcaccttctttcggatgaaggtacaagaactccagagcccgccccgagccagccaggtggtaaaggactgtgtgaaagcctgccttaattctacctacgagtacatcttcaataactgccatgaactgtacagccgggagtaccagacagacccggccaagaagggggaagttctcccagaggaacaggggcccagcatcaagaacctcgacttctggtccaagctgattaccctcatagtgtccatcattgaggaagacaagaattcctacactccctgcctcaaccagtttccccaggagctgaatgtgggtaaaatcagcgctgaagtgatgtggaatctgtttgcccaagacatgaagtacgccatggaggagcacgacaagcatcgtctatgcaagagtgccgactacatgaacctccacttcaaggtgaaatggctctacaatgagtatgtgacggaacttcccgccttcaaggaccgcgtgcctgagtaccctgcatggtttgaacccttcgtcatccagtggctggatgagaatgaggaggtgtcccgggatttcctgcacggtgccctggagcgagacaagaaggatgggttccagcagacctcagagcatgccctattctcctgctccgtggtggatgttttctcccaactcaaccagagctttgaaatcatcaagaaactcgagtgtcccgaccctcagatcgtggggcactacatgaggcgctttgccaagaccatcagtaatgtgctcctccagtatgcagacatcatctccaaggactttgcctcctactgctccaaggagaaggagaaagtgccctgcattctcatgaataacactcaacagctacgagttcagctggagaagatgttcgaagccatgggaggaaaggagctggatgctgaagccagtgacatcctgaaggagcttcaggtgaaactcaataacgtcttggatgagctcagccgggtgtttgctaccagcttccagccgcacattgaagagtgtgtcaaacagatgggtgacatccttagccaggttaagggcacaggcaatgtgccagccagtgcctgcagcagcgtggcccaggacgcggacaatgtgttgcagcccatcatggacctgctggacagcaacctgaccctctttgccaaaatctgtgagaagactgtgctgaagcgagtgctgaaggagctgtggaagctggttatgaacaccatggagaaaaccatcgtcctgccgcccctcactgaccagacgatgatcgggaacctcttgagaaaacatggcaagggattagaaaagggcagggtgaaattgccaagccactcagacggaacccagatgatcttcaatgcagccaaggagctgggtcagctgtccaaactcaaggatcacatggtacgagaagaagccaagagcttgaccccaaagcagtgcgcggttgttgagttggccctggacaccatcaagcaatatttccacgcgggtggcgtgggcctcaagaagaccttcctggagaagagcccggacctgcaatccttgcgctatgccctgtcgctctacacgcaggccaccgacctgctaatcaagacctttgtacagacgcaatcggcccagggcttgggtgtagaagaccctgtgggtgaagtctctgtccatgttgagctgttcactcatccaggaactggggaacacaaggtcacagtgaaagtggtggctgccaatgacctcaagtggcagacttctggcatcttccggccgttcatcgaggtcaacatcattgggccccagctcagcgacaagaaacgcaagtttgcgaccaaatccaagaacaatagctgggctcccaagtacaatgagagcttccagttcacgctgagcgccgacgcgggtcccgagtgctatgagctgcaggtgtgcgtcaaggactactgcttcgcgcgcgaggaccgcacggtggggctggccgtgctgcagctgcgtgagctggcccagcgcgggagcgccgcctgctggctgccgctcggccgccgcatccacatggacgacacgggcctcacggtgctgcgaatcctctcgcagcgcagcaacgacgaggtggccaaggagttcgtgaagctcaagtcggacacgcgctccgccgaggagggcggtgccgcgcctgcgccttagcgcgggcggtcggccgagcggcactgcgcctgcgcggagggcgctgggcggggagggacggggcttgcgccttggtgggacctccccaggggcggggctcggggggctccacgccaagggtgggctgcgcctacgcccttgactcagctttcccttttggggaattaggaatggaggatgccccgccctctcgggaggccacgcccaagggcgcgacgaaggaaggagccacatccccaacttgaggccacgcccccagcacctagggggcattttgagctgggatgggggaaacctcgtccctatggaggaggccacatcccggggctctggtaccgggaggcaccacctcatgtcccctggaaaagccataagatgggacccagacccctgggaccccagaccaattgccaagtatggaaatctcagctccctcgagggggggccctgggcaaggggtagggctctctggagcgcccctctaggtggcctggggactggagggaccaggatgctggttggagggccccggaataccggagtccctttagatatttgtgcaaaaaataaatggggggaggggggaggatgggatttcaaaagcacatgcgcccttgggcgcccaaaccctgggggccgaggggacggctctggttccccacgctgcccctacttccctttgggagtttgcctctccctctcccccaacaaacccagtcctcatatcatagagttcaacacacccatttgacagatggcaaaactgaggcttaaagagctgcttgagacttggccaaggttccaggtgccataccctctgtgcccctcccttaggcctgtgtgccccatggaagggtgggctgagatcgggatgacctgacacagctccctattgctgctaattccccctcggcctcctccaaggggtgggaattccaggccaagacccctacttcgcctttccttctccggctgccaagcaggacctttgccctcagccctttctcctgggatctccatgggggatgccatgagggcctcccaccacaaaagagaatttgggatcccctggtcccaggtttctccatcccttcttccttttccagaattttccaaataggaaagaacagaaggagaccagaaactctaggggggagaaagagaatgagagaaagagaatgagagagagagaaacacaaacacagtgacacagtgagagcttagtctccaagagcctattcattgattcaaacacccaagccacaggatacctcagatggccctcttgccagctggaagctctttctccaatgagcaaagttacagtgacctggctggagttacctggtgcacataggaccttaggggaaagttcagcgtggactacacttgctctgggatctgcttttccacatgtgtgtatggcacgcctttttctgctggattgggaaggacaagattttgctgtgctagggagaaatgaaaacggggtgagctgagtagctgggtttctggaggatagaacatcagatggggaggctttccgaggtgaagaatgagagggaaccacttactagagagaaaagagctccaggcctggggaacagcacgtgcgaaggccaggagagaagaactgttgaaacaacgagaagggtggcacggctggagctgagccagcaagggggatcgtgaggagccttggggttggggagatctgcagaagcatcagaccaggcagggcctcgtacgcagtcctgaggagttttacttttattctaagacagttggggagctccaggagctgttttaagttggggagagactggattccagcctgcaaaagctgttttgtgaagactaaaaccagtgaggagaggtggaggtgctttggggacactgaaatggattcttggaaagattctgaaggctgtgttgaaaagacacctatagctgtggggacatgactataatcccagcatttggggagaccgaggctggcagatcacttaaggtcaggagtttgagaccagcctggccaacatggcgaaaccccatctctgctaaaaatacaaaaattagctgggtgcagtggtgcatgcctgtagtcccagctactcaggagactgaggcgggagaattgtttgaaccctggaggcagaggttgtagtgagtcgtgatcacacaactgcactccagcctgggcaacagaacaatactccattccctcccctctaccccaccaaaaaaaaaaaaaaatcctgcccttagatgagctctagggctgctgagtacagttgtcccagttgcacagtgcccaagggtttggcattgctaagaaggccacgtgcaaatcctagatattgagtgttgtatgtttgtgacgttggtttcccgacatgtgaatggcccaagtgtctggaagaagtggcgccactttctaatttgcttggagatgttgcatgtcccttaaattcagacaggtgcaggtaactggaggttctgaaccaaaggttaaaatgcaaattctcatacagggttgggaagttgtagccagggataagcttatgtgactgttatatggactgaggagcagatgtgaatttcgaaccatgacatggctgagggtaggggtcgggtggatggatgattcagggttgtaacccatagagcccaaaggggaagtgatctgtgacctggggtgagggtgatctggaagatttttggatggctggaaagaaatggggaagtcgagctgcctgagagagccaagttatttcccaaaagattccttaggagtctttctgttcaagacctccgtgtgtgtgtgtgtgtgtttagggttccccagcaatggcccaggcatgtgaaggaaacaagcttcttcagggaatatttgttgaatgagttttcctgactcccaggctagaactgtttttgcaatttccaccctcttttctttcccccagagaactcctattcgtccttcaaaacccatcacggaaacccctcttggagaaaaccctccttccttcccctcaggactttcccagccaccgtctctcctccagtccagcctgatgccatgggactgggggtttctctgtccagctctgtttctcccagactggggtctgaggactctcaggacccccaactttacctagcacaggctgggcacaagtgggtgacagggagtctacgcctagtggaattatgtattggggcagggtcagtgtgagaatacacatccgcatgcatgtctgtccatgtctgtccgtaccaaccttccccttccacacggacctgggcacataggaggtgtctgagcctgacacatgggacagagagtggacatggctgagacacggacagagaaaagacaaggagtccagggggctgaaagccttttgaaatcaggaagttcctgtattggcagaacaaagcccagagaggagcagggctttcctcaacgccacccagcaagtggacacagagcccggccttggatgacacctccagggttctgaaccctggacctcgctttatgcaaggagctggccccacatttccatgaatcggggaaacagcacaagaaggttggcctgtggcagggcaagggttaaaggggtgacattgagggatgcctcagagtcaaagtcccctgaccaagaggaatagagtagaaaacacagagacagagggtgagatcacgccccgatgaggacggagagagacagagatggagagagacatagaggtggaaatatacagagaaagataaatgcagagaccaaggcagggagtgtcgggggaagtaaagagggtgtcctgaagaaagaaggatctgttcactcttaccagtctgtcctcgaatgatttgcataaaatgaggaggtgcctgtccacacccccaattcctctctcaggccccagagcctgagacctcaccatgcccccatcagagatgcaaaaaactaaacacccaactagaaatccttgggacctctctcggctgggatctcagagcctttctgtcccctacccctaccccatgtgctgtcgattttgcagatggggacaacctggggcctcccggaactctgccaccctggggaagttgggggagggccttagtcccggatcacaaccccgtctgctccccagaatcctttcctaagaatcgttgaggaccaaagttgtctttgctgacacgtgttgcttttctctttgccttttattgtttcagagaaaaatcaagttgactgtgtcaagtaacaccccaccccttacccccgtccagccatagtggctctctggagacacaggtcacaggcggagggtcccctgatcatccccaaccacacagccagggggacttgacccctgtccacccctgtctcgtgctccctcagacccccacaaaccggccaagcagtccggggaggcttcccctccacacaactcttagcatgtgattgcagatgtgaaatcaaaacgttgtttgttttttgttttgttttgattctaccccgtcggtccagtgtctgcacagacgccttcatttctctgtaaatatgtgacttggaacaaatgtttaacacaaacgagaagtggtcatgaatgcatggtgttgagatgttttgcactattctgactttttggtctctgtaaaaatattttattaacagcagacattaaaaaaagaaaaaccacacacagccttggaaaaaaaaaa

SEQ ID NO: 1792 - DNA, 2089 bp, Homo sapiens
cgccgccgcgccggctgcatcctcgcctccacctcgctcaccccctcctccccgcactttctcggcgctccctccctctcggctcgcacagctcgactccgcgctctcctcgccggccgccgccgcccagcctgcgcccgccgtccccccagtgcctgggcacctgttggaggcagagccaggggtgctgcatgaggggccgcaggggcgatcgcatgaccatcaacatccaggagcacatggccatcaacgtgtgccccgggcccatccggcccatccgccagatctctgactacttcccccggggaccaggacctgaagggggcggcgggggcggcggggaggcccccgcccatctggtccccctggctctggccccccctgcagccctccttggggccaccacgcctgaggatggtgcggaggtggacagctatgactcggatgatgccaccgccctaggcacgctggagtttgaccttctctacgaccgggcctcctgcactctgcactgtagcatcctcagggccaagggcctcaagcccatggatttcaatggcctcgccgacccctacgtcaagctgcacttgctgcctggagcctgtaaggccaataagctaaaaacgaagactcagaggaacacactgaatcccgtgtggaatgaggacctgacttacagcgggatcacagatgacgacatcacgcacaaggtgctcaggatcgccgtctgtgatgaggacaagctgagtcacaatgagtttattggggagatccgcgtgcccctccgccgcctcaagccttcgcagaagaagcattttaacatctgcctcgagcgccaggtcccgctggcgtccccctcttccatgtcagcggcgctgaggggcatctcctgttatctgaaggagttggagcaggcggagcaggggcaggggctgctggaggagcgtggccgcatcctgctgagtctcagctacagctcgcggcgccggggactgctggtaggcatcttgcgctgcgcccatctggctgccatggacgtcaacggttactcggacccctacgtcaagacgtacctgaggcccgatgtggacaagaaatccaagcataagacgtgtgtgaagaagaagactctcaacccagaatttaacgaggagtttttctacgagatagagctctccactctggccaccaagaccctggaagtcaccgtctgggactatgacattggcaaatccaatgacttcattggtggcgtgtccctggggccaggtgcccgaggcgaggctcggaagcactggagtgactgcctgcagcagccggacgcagccctggagcgctggcacaccctgaccagtgagctgccccctgcggccggggctctgtcctcagcctgagtggacagcagtgtcccggcacaggcccatcgagccgggtccagtacccaaccttcgcacgagtgtgttgcacgtttacacagggtgggctgcccccaccctgcactacctatttttgtgagtctccgtgacccgggtctgtctgctcatgaggggctgcggagttctatattcacatatgcaaacctcctgcctgactcgctagtccctgcaaatatgcaaaccccccatcatctgcacacccgggcagtgctcagagcccggccccaggcccccgcgctcctcactcctgcctctccacgctgccccgtccctctcccccaacagggaggaggtcggattaggggaggttcagaggaggagaatgtctcaaaaaaaaaggacaaaaaacaaacccagagccactcctttaatacagaaacttcattgaaaaaacctagccctgtacagctgcccttttaaagaggtggccattgcagggtctctgcctccccagcaggtggcagatgctcccggccactcgtttaaataactgtcccctggagggggccggggtttgaaggcagggcccctgccaccctcctgggggacacccgtgcatgtttacgccttttctggttgtgtcagtggccggagcatggcagctgggcatcaataaacacctccgaggaaaaaaaaaaaaaaaaaaaaaaaaa

SEQ ID NO: 1793 - DNA, 2802 bp, Homo sapiens; identical to SEQ ID NO: 1451

SEQ ID NO: 1794 - DNA, 2428 bp, Homo sapiens
acctggccgccatgcgcctctcctcctccccacctcgtggcccgcagcagctctccagctttggctccgtggactggctctcccagagcagctgctcagggccgacccacacccccaggcctgccgacttctccctggggagcctccctggcccaggccagacatccggcgcccgggagccccctcaggccgtcagcatcaaggaggccgccgggtcctcaaatctgcctgcgccggagaggaccatggccgggttgagtaaggagccaaataccttgcgggccccccgtgtccgcacagccttcaccatggagcaggtccgcaccttggagggcgtcttccagcaccaccagtacctgagccctctggagcggaagaggctggccagggagatgcagctctcagaggtccagataaaaacctggtttcagaatcgccgcatgaaacacaaacggcaaatgcaggacccccagctgcacagccccttctcggggtctctccatgcgcccccagctttctactcaacgtcttctggccttgccaatggcctgcagctgctgtgcccttgggcacccctgtccgggccccaggctctgatgctgccccctggctccttctggggtctctgccaagtggcacaagaggccctggcatctgcgggagcttcctgctgcgggcagcctctggcgtcccacccccctaccccaggccggccttcgctgggaccagccctgtccacggggccccggggcctgtgtgctatgccacagacgggggatgcattttgaggaggcacctctgactcccacactcgcggtcttgctgatcgcacctggctcctacctggaggactcagttgttctgtttacatcctggtggcacctctcaccctgacccacacaaaggttctggagattactggagaatatatataaatatatatatgtacgtatatatgtaaatacacatatacgtatatataaatatatatatacatatgtgtgtgtatatatatatatatttttttttttttttttttttttgagacggagtgttgctctgtcacccaggctggagtgcaatgacgcaatctcggctcactgcaacctccgcctcctgggttcaagcgattctccagcctcagcctcccgagtagctgggattacagacacccgccaccacgcccggctaattttttctatttttagtagaaatggggtttcaccatgttagccaggctggtctcaaactcctgaccctgtgatccgcccgcctcggcctcccaaagtgctgggattacaggcatgagccactgcacccggccctgagaatatatttattaaagccacctcttcactgaaagttaccgaaagagtcggtttaggaaggaaacgaagggtcagtgaacagagtcaaatgcagaagtgggcttgtcatgggtagggctttcggcgtacgataaaaggatcatttgttttttaaaaggggttggaaaaactggttttccagttggaaacagtaaaggttgtaagctttgtgtgtacaaaagaaaacagggaatgcaggtgtgtttatagcgttgtggttcaagtccctcttaacaagaactccaaagctggaaagcaggagggaacaaaggtgaacatgaaggcgaggatgctggggccctgcagtgcgctctaggctgtgcgtgagccgggactgtacccacagcttgctgagggctgctcttcttgggccagggaaagcagggcagccgggacctgcggctgtgcctggactgaagctgtcccgcaggtccccaccctccaacacgtgctcacctgtccccctcctcgcagcagcctcgggacaaaacaatgactcaaggacagcacttctcgcagaaggtctggaagtgcccagaatgggaggcacggaagcccctcccggggaggactcccgcgttgatggaccgttcttggtgcagactcctgactgcgtgcatgaaacctgagacaagtgcaattccttccatgtcgccccagagtgcccaggaggcaggcagtgcggggtgcccaggcagacgggttcagcctgcagaactggaggcgacctgtgaaacccacccgggcaccccaacaggaacagaagcgtggtcctgcggctgcgtccccagcgagtttcactttccccttgctcgtttctcccttgttgtaagtgtttacaactggcatgtgcttttaaacgtcaggtaagaggggaacagctgctgtacatcgtcctggcgagtgacaatgtgacagaagcctgggcgaggccctcggagggcagcagctggacaggggctactgggtttggcctggacagcactgatttgtggatgtggatgggggcacgttgtccgtgataaaagtacaagtgcccctcacaaaaaaaaaaaaaaaaa

SEQ ID NO: 1795 - DNA, 767 bp, Homo sapiens
gccgccccgcgagaagaagagcgggaagaggcggacagcgaggccaagatttcagctgcgggacggtcaggggagacctccaggcgcagggaaggacggccagggtgacacggaagcatgcgacggctgctgatccctctggccctgtggctgggtgcggtgggcgtgggcgtcgccgagctcacggaagcccagcgccggggcctgcaggtggccctggaggaatttcacaagcacccgcccgtgcagtgggccttccaggagaccagtgtggagagcgccgtggacacgcccttcccagctggaatatttgtgaggctggaatttaagctgcagcagacaagctgccggaagagggactggaagaaacccgagtgcaaagtcaggcccaatgggaggaaacggaaatgcctggcctgcatcaaactgggctctgaggacaaagttctgggccggttggtccactgccccatagagacccaagttctgcgggaggctgaggagcaccaggagacccagtgcctcagggtgcagcgggctggtgaggacccccacagcttctacttccctggacagttcgccttctccaaggccctgccccgcagctaagccagcactgagatgcgtggtgcctccaggaccgctgcgggtggtaaccagtggaagaccccagcccccagggagaggaacccgttctatccccagccatgataataaagctgctctcccagctgcctctcaaaaaaaaaaaaaaaaaaaaaaaaaaa

SEQ ID NO: 1796 - DNA, 1394 bp, Homo sapiens; identical to SEQ ID NO: 735

SEQ ID NO: 1797 - DNA, 466 bp, Homo sapiens; identical to SEQ ID NO: 731

SEQ ID NO: 1798 - DNA, 1665 bp, Homo sapiens
ccggaggagtcacgtagctctgcgacatccgcagcctcatttaccagagggagccagggctgcagcctcatctgtttgcggatcagaacccgagctgtgcttgtggctgcggctgctaactggctgcgcacagggagctgtcaccatgcctcactcgtacccagccctttctgctgagcagaagaaggagttgtctgacattgccctgcggattgtagccccgggcaaaggcattctggctgcggatgagtctgtaggcagcatggccaagcggctgagccaaattggggtggaaaacacagaggagaaccgccggctgtaccgccaggtcctgttcagtgctgatgaccgtgtgaaaaagtgcattggaggcgtcattttcttccatgagaccctctaccagaaagatgataatggtgttcccttcgtccgaaccatccaggataagggcatcgtcgtgggcatcaaggttgacaagggtgtggtgcctctagctgggactgatggagaaaccaccactcaagggctggatgggctctcagaacgctgtgcccaatacaagaaggatggtgctgactttgccaagtggcgctgtgtgctgaaaatcagtgagcgtacaccctctgcacttgccattctggagaacgccaacgtgctggcccgttatgccagtatctgccagcagaatggcattgtgcctattgtggaacctgaaatattgcctgatggagaccacgacctcaaacgttgtcagtatgttacagagaaggtcttggctgctgtgtacaaggccctgagtgaccatcatgtatacctggaggggaccctgctcaagcccaacatggtgaccccgggccatgcctgtcccatcaagtataccccagaggagattgccatggcaactgtcactgccctgcgtcgcactgtgcccccagctgtcccaggagtgaccttcctgtctgggggtcagagcgaagaagaggcatcattcaacctcaatgccatcaaccgctgcccccttccccgaccctgggcgcttaccttctcctatgggcgtgccctgcaagcctctgcactcaatgcctggcgagggcaacgggacaatgctggggctgccactgaggagttcatcaagcgggctgaggtgaatgggcttgcagcccagggcaagtatgaaggcagtggagaagatggtggagcagcagcacagtcactctacattgccaaccatgcctactgagtatccactccataccacagcccttggcccagccatctgcacccacttttgcttgtagtcatggccagggccaaatagctatgcagagcagagatgccttcacctggcaccaacttgtcttcctttctctcttcccttcccctctctcattgctgcacctgggaccataggatgggaggatagggagcccctcatgactgagggcagaagaaattgctagaagtcagaacaggatggctgggtctccccctacctcttccagctcccacaattttcccatgatgaggtagcttctccctgggctctccttcttgcctgccctgtctcctgggatcagagggtagtacagaagccctgactcatgccttgagtacataccatacagcaaataaatggtagcaaaacattctaaaaaaaaaaaaaaa

SEQ ID NO: 1799 - DNA, 15584 bp, Homo sapiens
gggggcctgggatgctgccgctgagctgacccgctggacttgggttgtggcagacggatggcgaacgtgcaggtcgccgtgcgggtccggccgctcagcaagagggagaccaaagaagggggaagaattattgtggaagttgatggcaaagtggcaaaaatcaggaatttaaaggtggacaatcgaccagatggctttggggactcccgggagaaggttatggcatttggctttgattactgctactggtcagtcaacccagaggatccccagtatgcatctcaagatgtggttttccaggatttagggatggaagtactgtctggagttgccaaaggctataacatatgcctttttgcttatggacagacaggctctgggaagacatataccatgctggggaccccagcctctgttgggttgacaccacggatatgtgagggtctcttcgtcagggagaaagactgtgcctcactgccttcctcctgtaggataaaagtaagttttctagaaatctataatgaacgggtgcgggatctgttgaagcaatctggtcaaaaaaagtcctataccctgcgggtcagggagcatccagagatggggccctatgtacaaggtttatctcaacatgtagttaccaattataagcaagtaatccaactcttggaggagggaattgcaaacagaatcacagcagccacccatgttcatgaggccagcagcagatcccacgccattttcacgatccactacacgcaggcaatcctggagaacaacctcccttctgaaatggctagcaagatcaaccttgtggacctagcaggcagcgaaagagcagatcccagttactgtaaggaccgcattgctgaaggagccaatatcaacaagtcccttgtgactctaggaattgtcatctccaccttagcccagaactcccaagttttcagcagctgccagagcctcaacagctcagtcagcaatggtggtgacagtgggatccttagctctccttctgggaccagcagtggaggggcaccctcccgaaggcagtcttatatcccataccgagactctgtgttgacctggctgctgaaggacagccttggaggcaactctaaaaccatcatggttgccacggtgtctcctgcacacactagctacagtgagaccatgagcacactgagatatgcatccagtgccaaaaacattatcaacaagccacgagtaaatgaggatgcaaacttaaaactgattagagaactcagagaagagattgaaagactgaaagccctgctgctgagctttgaactgagaaacttcagttcattgagtgatgaaaacctgaaggagctggttctccaaaatgaattgaagatagaccagctgactaaagactggacccagaagtggaatgattggcaggccctcatggagcattacagtgtggacatcaacaggaggagggctggggtggtcatcgactccagcctgccacacttgatggccttggaggatgatgtgctcagcacaggtgttgtgctctatcatctcaaggaagggacaacaaaaataggaaggattgactcagaccaggaacaggacattgtcctgcagggtcagtggattgagagagaccactgcactatcaccagtgcctgtggtgtagttgttctacgacctgcccgtggggcccgctgtacagtcaatggccgggaggtcactgcctcctgccgtctgactcaaggagctgtcataaccctggggaaggcacagaagttccgattcaaccacccagcagaggctgctgtcctgcggcagcgaaggcaggttggagaggctgctgctggtcgtggctcgttggagtggctggatttggatggagatctcgctgcctcccggctgggtctctcccctttgctttggaaggaaaggagagcgcttgaagagcaatgtgacgaggaccatcagacaccgagggatggagagacatcccacagggcccagattcagcagcagcagagctacgtagaggatttgaggcatcaaatcctagcagaagagattcgagctgcgaaggaactggaatttgaccaagcttggattagccagcagattaaagaaaaccagcagtgtctgctcagagaagagacctggctggccagcttgcaacagcagcagcaagaagaccaggtagcagagaaagaacttgaggcatctgtggcacttgatgcttggcttcagacagatcctgagattcagccatccccatttgtccaaagtcagaaaagggtggtgcacctgcagctcctgcggagacacactcttcgggcagcagagcggaatgtccggcggaaaaaggtctcattccagctagagagaatcatcaaaaagcagaggctgctggaggcccagaagagactggagaagctcacgacattgtgctggctccaggatgacagcacccaggagcccccataccaggtcctcagccctgatgccacagtcccacggcctccatgtagaagcaaattgacgagttgcagttctttgagcccccaaagactctgcagcaagcacatgccccagctacacagcattttcctaagttgggatccctctaccacattgccacctaggcctgaccctacacaccaaacatcagagaaaacatcatcagaagagcatttgccacaggctgcttcctaccctgcaaggacagggtgcctccgcaagaacggcctgcattcctcaggtcatgggcagccctgcacagccagagcagccttggccaggaagggagcctcagctccagacgcttgcctcaccatgagtcccaactctgttggcatccaggaaatggagatgggggttaagcagccccatcagatggtgagccagggcttagcatctctgaggaaatcagctaacaaactaaagccaaggcatgagccaaagatcttcacctctactacccagaccagaggggcgaagggactagcagaccctagccacacacaagctgggtggcgaaaagaagggaaccttgggacccacaaggctgctaagggagccagttgcaattccttgtatcctcatggacccaggcagactgctgggcacggaaaggcagtcaagactttttggacagaatacaaaccaccttctccaagcagggcatcaaaaaggcatcagagggttctggcaactagggtcagaaatattaccaaaaagtcctctcacttgcctcttggcagtcctttgaagagacaacaaaatacaagggacccagacaccatggtcccactcacagatttcagcccagtaatggatcattcaagagaaaaagacaatgatttatctgacacagatagcaactactcattggattctctctcatgtgtctatgccaaagccctgatagagccactgaagccagaggagaggaaatgggatttcccagagccagagaactctgaaagtgatgacagccaactatctgaggactcactggctgagaagaggtaccaaagccccaaaaacaggctagggggcaatcgtcccaccaacaaccgtggccaacccaggaccagaactagagcttctgtgaggggcttcactgcagcctcagacagtgacctacttgctcaaactcataggagcttctccttggatagcctgattgatgcagaggaagaactgggggaagatcagcaagaagaacctttccctggttcagctgacgagatacccacagagactttttggcacctggaggactctagtctgcctgtaatggaccaagaggcaatatgcaggcttggtcccatcaactacagaacagcagctaggctggatgccgtcctgccaatgagcagttcgttttaccttgatcctcagttccaaccccattgtgagctccaaccccattgtgagctccaaccccattgtgagctccagccccattgtgagcaggctgaatcacaggtagagccaagctactctgaacaagccgactctctccaaggcatgcagctttcaagagagagcccactgatgtccatggattcctggttttcctgtgactctaagatcaaccccagcagccccccaggaatagtgggttctttatgtccaagtcctgatatgcaggaatttcactcctgtaagggggagaggcctggatactggccaaatactgaggaactaaagccatcagatgcagaaacggttctgccatatagctccaaactgcaccaaggcagtactgagctcctctgcagtgcaagagatgagcacacagcctctgctgctgatacgtctaggctgtctctctggggaattcaaaggcttattcaaccaggagctgatggcacctttcagggcagatgtatccctgacatgacccagcagggcagctctgaagcatcccacaattctagcgtatcaaacgtgctggctgcctctgccaccaccttgactcatgtaggcagcacccatgaaagggattggtctgcccttcagcagaagtacctccttgaactctcttgtcctgttttggaggccataggagcacccaagccagcttacccctaccttgaggaagactctggttccctggcccaagcttctagcaaaggaggagatactctattgccagttggccctagggtatctagcaatctgaatctcaacaactttccagtccatctgtccagaatcaggcgtttgagggcagagaaagaacaggacagtttaaatgccaaattagaaggtgtttcagatttctttagcactagtgagaaagaggcgagttatgacgaaacttattcggcagacttagaatcattgtctgcttctcgatctacaaatgcacaggtctttgcaacagagaacgcgataccagattccatgacagaagcatgtgaagtcaagcagaacaacttggaagaatgccttcagagttgcaggaaacctggactgatgacttcctctgatgaggattttttccagaagaacgcttgtcacagtaatgtcactacagccaccaaagcagaccattggtcccaaggctgggctcctctcaggaaaaatagtgcagtccagccagggcaattaagtcccgacagccactacccactagaggaagagaagacagattgccaggagagctctaaggaagcagttagaagacacataaatgtttcctttgcccttccttcaggtccagagctataccttcactctgctccctggaatccattgtcatcttccctgcagcccccactcttggaaacattctatgtgaccaaaagcagggatgccctgacagaaactgccttagagattccagcttgcagagaagtaagggtaccctccccaccccccagggaagcctggggctttggtcacaaccaccaagctctccaaggtgcttatttgaagaataatttgccagtgctgttacaaaaccagaattctaagattgcctcatctcagcaggtcacagctgagataccagttgatctgaataccagggaagtcatcagagaatcaggtaaatgccctggaaatattacagaagaaagccatgattcagtttattcttctgttactcagaacagacattttctcccctctaccagcacaaaagtatgtgaatttgaaaaccaagttgtaattttaaataaaaaacacagttttccagcacttgagggaggagaggtcactgctcagtcctgttgcggtgcttcctcagacagcactgagtctgggaagtctctcctctttcgtgaatctgaggcacgagaggaagaagagctggatcagaatacggttctgaggcagaccatcaatgtaagccttgagaaagacatgccaggggaaagtgctgtttctttgaaatccagatcagtagatcgtagagtaagcagcccagtgatggtggcccagggtggtggcccaacccctaagtgggaagggaaaaatgaaactgggcttcttgaaaaaggtcttcgtcccaaagatagctcagaagagtttaagcttccaggtacaaagcctgcatatgaaaggttccagttagttgcatgccctcaggaaagaaaccccagtgaatgcaagtcacaagaaatgttaaatcccaacagagaaccttctggaaagaaacagaataaaagagttaataatactgatgaaatggctaggctaattaggagtgtaatgcagctggaaaatggcatcttagaaattgaatctaagcagaataagcaggttcatgcttcccacacaccaggaaccgataaggagttggtgttccaggaccagaaggagcaggagaagactgaccatgcctttaggccagacagctctggaaaccctttgccctctaaggatcagccatcttctccaagacagacagatgatactgtctttagggatagtgaagctggagcgatggaggttaacagcattgggaaccatccccaggtccagaaaatcaccccaaaccccttcaggtcaagggaaggtgtacgagagagtgaacctgtgagagagcacacccacccagctggatcggacagacctgccagggatatttgtgattctttagggaaacacacaacttgcagagagttcaccaacacttctcttcacccacagagaatgaaagcattggctagagctctgccattgcaacccaggctagagaggtcttctaagaataatggccagtttgtaaaagcatcagcaagtctcaaagggcagccttggggcttaggaagtcttgaggaattggagactgtgaaaggttttcaggaaagccaagtagctgaacacgtaagtagttccaaccaagaagagccaaaagctcaaggtaaagttgaagaaatgcctatgcaaaggggaggcagccttcaggaagaaaataaagtgactcagaaatttcctagtctcagccagctttgtagggacacgtttttcaggcaggaaactgtcagcccattactaagccggacagaattctgtacagctcctcttcaccaagacctgagtaataccttgcccttgaattctccaaggtggccaagaaggtgtcttcatgtacctgttgctctaggcatctcttcacttgactgtgtgctggatctcacaatgttgaaaattcataacagtcccttggtaactggagtagagcatcaggaccagagtacggagaccagaagccacagccccgaaggaaatgttagagggcgttcctctgaggcacacactgcctggtgtgggtctgtgcgatccatggccatgggatctcatagtcaatctggtgtaccagagagcattcctctggggacagaggacaggatctcagcaagcaccagcccccaagaccatggaaaggacctcagaatcaccttgctgggtttcagtaccagtgaagattttgcttctgaagccgaggtggctgtacaaaaagaaataagagtcagttcactgaacaaggtctctagccagcctgaaaagagggtcagcttctccttggaagaggatagtgaccaagccagcaagccaaggcagaaggcagagaaggagactgaggacgtcggactgaccagcggtgtttccttagcacctgtttccctgccgagggtgcccagtccagagcctaggctgttggagccctctgaccatgcatccatgtgcctggccatcttggaggagatcagacaggcaaaggcccagagaaagcagcttcatgactttgtggccaggggcacagtcctttcttactgtgaaactttactagaacccgaatgttcttcaagggttgctggcaggcctcagtgtaaacaaatagaccagtcatcatcagaccagaccaggaatgagggtgaagcaccgggatttcatgtggcatctctatctgctgaagcagggcagatagatctgttacctgatgagaggaaagtccaggccacatctctgtctgcagacagctttgaatctctgcccaatacggaaactgacagagagccatgggatcctgtgcaggctttctcccatgctgctcctgctcaagacaggaaacgtcgtactggagaactgaggcagttcgcgggagcaagtgaaccatttatatgtcactctagttcttctgaaatcatagagaaaaagaaagatgcaaccagaacaccttcctcagctgatcctttggccccagacagtcctcgttcttcagcacctgtggaggaggtcaggagggtagtatcaaagaaggtagtggctgccttaccttctcaggccccttatgatgatcctagagtgactctgcatgagctaagtcagtcagttccgcaggagactgcagagggcataccccctggcagtcaggacagcagcccagagcatcaggaacccagaactctagacaccacatatggagaagtttcagataatttgttagtgactgcacagggagaaaaaacagcccattttgaaagtcagtctgtgacctgtgatgttcagaattctacaagtgcctcagggcctaagcaagaccatgtccaatgccctgaggcttctactggctttgaagaaggtagggcaagtcccaaacaagataccattctgcctggagctctgacaagggttgcactggaagctcccacacagcagtgtgtgcagtgtaaggagagtgttgggtctgggttgacagaagtctgcagggctggcagcaaacattccaggccaattccactgccagatcaaagaccaagcgcaaatcctgggggaattggggaggaagccccatgtagacacccaagggaagctttagatggccctgtcttctcaaggaaccctgaaggcagcaggactctcagcccgtctagagggaaagagagcagaactcttccttgccgacagccatgcagttctcaacctgttgctactcatgcttattcctcccattcctctactttactgtgttttagagatggtgacctagggaaggagcctttcaaggctgccccacatactatccacccaccctgtgtagtaccttccagggcctatgaaatggatgagacaggagagatctctaggggacctgatgtgcacttgacacatggccttgagcccaaagatgttaacagggaatttaggctaacagagagcagcacttgtgagccttctactgtggctgctgtcctatctcgagctcaaggctgcagatccccttctgctcctgacgtgaggacaggttccttcagccactcagctactgatggaagcgtggggttaataggggttcctgagaaaaaggttgctgagaagcaagcaagcacagaacttgaggctgcctctttccctgcaggcatgtactctgagcccctgaggcagtttagggacagctctgtaggtgaccagaatgcacaggtgtgtcaaaccaatccagaaccacctgcaacaactcagggaccacacaccctggatttaagtgaagggtctgctgagagcaagttggtggtagagccacagcatgaatgtttagaaaataccactagatgttttttggaaaagccacaattttccactgagttgagggatcacaatcgcttggattcccaagccaagtttgtagcaaggttaaaacatacctgcagcccccaggaagacagtccctggcaggaagaagagcagcacagagaccaggcttcaggtggtggagaaggcttcgcccagggtgtgaatccccttcctgatgaagatggcttagatggctgtcagattttagatgctgggagagaggaggtggctgtggccaagcctcctgtgtccaagattttatcacagggcttcaaagacccagccactgtgtccttgaggcaaaatgaaacaccgcagcctgctgctcagaggagtggccacctctacactggcagagagcagccagcacccaaccacaggggctcacttcctgtgactacaatcttctctggccccaaacactccaggtcctcccccacaccacagttctcagttgtcggctcttctcgttctcttcaggagctgaacttgagtgtggagcctccttcccctacagacgaagatacacaggggcctaacagattgtggaacccacatctcaggggctattcctcaggaaagtcagtggcaagaacatctctgcaggctgaggacagcaatcagaaagcctcatctcgcttggatgatgggactaccgatcacaggcacctgaagcctgccacccctccttatccaatgccttccactctctcacacatgccaacccctgatttcacgaccagctggatgtctggtactttggaacaagcccaacagggaaagcgagagaaactgggtgtccaggttaggccagaaaattggtgctctcagatggacaaaggaatgctgcactttggctccagtgacatcagtccctatgcgctgccgtggcgtccggaggagcctgcacgtatcagctggaagcagtatatgtctggcagtgcagtcgatgtttcctgcagccagaagccccaggggctgacactatcaaatgtggcccggtgctccagcatggacaatggcctagaagaccagaactcccctttccactcccacctcagcacttacgccaatatttgtgatctgtcaaccacacacagcagcactgagaatgcccagggttcaaatgaggcctgggaagtattccgagggagttcttcaattgccttaggagacccccacatcccgacgagccctgaaggagtagcccccacttcgggtcatgacagaaggcctcagttcaggggcccttctggtgaagcagactgtctgaggagtaagccccccttggccaaaggaagtgctgcaggtccagtggatgagattatgctgctgtatccatcagaggcaggctgccctgtgggacagaccaggacgaacacattcgaacagggcacacagaccctcggcagcaggcgccactggagcagcactgacatctcctttgctcagcctgaagccagtgcagtatcagcctttgatctggcctcatggaccagcatgcacaatctgtctctccacctctcacagctcctgcacagtacctcagagctgcttgggagtctctcccagccagatgtggccagaagggagcagaacaccaagagggacatcccagataaagccccacaggccctgatgatggatggctctactcagaccactgtggatgagggcagccagactgacctcaccttacccaccctgtgcctccagacttcagaggctgaacctcagggagccaatgtgatccttgaagggctaggctcagatacctcgactgtgtctcaagaagagggagatgtgccaggggtacctcagaagagagaggcagaggaaacagcacagaaaatggctcagctcctctatcttcaggaagaaagcactccctacaagccccagagcccttcaataccctcatcccacttgaggtttcagaaagcccccgttgggcagcatcttccttctgtgagcccctcagtttctgatgctttcctgcctcccagctcccagccagaggagtcatattgcttagttgtcagcagtcccagtcccagctcccctcattccccagggctctttcccagtacttccgagtatcctggggactccagggtccagaagaagctgggccccacaagtgctttgttcgtggacagggcctcctccccaatcctcactcttagtgccagcacccaagagccgggtctttccccaggctctttgaccctctcagccccttcaactcaccctgttgaaggccaccagaagcttgactccagcccagaccctgttgatgccccaaggactccaatggataattattcccaaaccactgacgagttaggtggctcccagagaggtagaagttccttacaaaggagtaatgggagatccttccttgagttgcactccccacacagcccacagcagagtccaaaactccaatttagtttcttagggcagcaccctcagcagcttcagcccaggacaactatcggggtccaaagcagactgctgccaccaccactgaggcacaggagccaaaggctgggcaacagctttgtgcctgagaaggtggcttccccggagcattgcccactgagcggtagggagccaagtcagtggcagagcaggacagaaaatggaggtgagagttcagcatctccaggggaaccacaacgcactctggaccgaccttcttcatggggaggcctccagcacctcagcccctgccctgtctctgagttgactgatactgcagggctccgaggttctgccttgggcctccctcaggcctgccaacctgaggagttactgtgcttcagttgccagatgtgcatggcccctgagcaccagcaccacagtctgagggacctcccggtgcataacaaatttagtaactggtgtggggttcagaagggctcacctggggggttggacatgactgaggaggagctgggggccagcggtgatctcagctctgaaaagcaggaacagagtcccccacaacctcctaatgaccacagccaggattctgagtggtccaagagggagcagatccccctgcaagttggggcccagaacctctcactcagcgtggaactcacagaagcgaaactgcaccatggctttggggaggccgatgccctgctccaggtgctgcagagtgggacaggggaggcgcttgctgctgatgaacctgtgacatccacctggaaggagctctatgcacggcaaaaaaaggccattgagaccctcaggagagagcgggctgagcgacttgggaacttctgccggacgcgaagccttagccctcagaaacaactgagcctcctgcccaacaaagatctcttcatctgggatcttgacttgcccagcagacgccgagaatacctgcagcaactgaggaaggatgttgtggagaccaccaggagcccagagtcagtgtcaaggtcagctcacacaccctctgacatagagttgatgctgcaagactaccagcaggcccatgaggaggccaaggtggagattgcccgggcccgagaccaactgcgggagcggactgaacaagagaagctgagaatccaccagaagatcatttcccagctattgaaggaagaggataaactacataccttggccaattccagctccctgtgcaccagctctaatggaagcctctcgtctggcatgacctctggctataatagcagcccagccttgtcaggccagctccagttcccagagaatatggggcatacaaacttgcctgattccagggatgtatggataggggatgagcgaggaggccattctgcagtgaggaagaactctgcctacagccacagagcctccctgggcagttgctgctgttcaccatccagtctgtccagcttggggacctgcttttcctcctcctaccaggatttggccaagcatgtcgtggacacttctatggctgatgtaatggctgcttgttcggataatttgcacaacctcttcagctgccaggcaactgctggctggaactatcagggtgaggagcaggcggtgcagctttactacaaggtgttttctcccactcggcatggcttcctgggggcaggtgtggtgtcccagccgctgtctcgtgtgtgggcggctgtcagtgaccccactgtgtggcccctgtattacaagcccatccagacagcaaggctgcatcagcgagtgaccaacagcatcagcctggtgtacttggtgtgcaacaccaccctgtgcgcactgaagcagccacgggatttctgttgtgtctgcgtggaagccaaagagggtcacctgtctgtcatggcagcccagtctgtgtatgatacatccatgccaagacccagcagaaaaatggttcgcggggagatcctgcccagtgcctggatcttgcagcccatcactgtggaagggaaggaagtcaccagagtcatctacttggcccaggtggaacttggtgctccaggcttcccacctcagctcctgagctctttcatcaaacggcagccactggttatagccagactggcttccttccttggtaggtagcatctcaccgtcaagatggtgctgctgagatgcaggcccaggctgctcaagagagacactgtggcagctccttgttactttccataccacagtgcaggaaaagctgatgctacctgctgtggccgattggggcagacagcactggcccagggatgctagcaaagcccagtcagtacttggtcacagctggcaccagtgcagagcaaacggcctgagctcctggcccagactatccagagtgaatgcagctccgctcaccttttggatttctcacctttctttcctgtttctgggactctgcggcagacaggacacttaaggaccaggactgggcacagccagcagagccggggactgcagtgctttggcaaggtgcttccgcaggctggtagggaagcaggcagccactggccaagactctgttctgaatctacctcctctagcattcagctctactgtgtgatgggacgttaaaaataccaaaacagaaagagggtttaaaaaacagctgcacaaaccagaacaccgattcagaatcttttctccctcttgagtttttgcaaaatactttattattgatttttgctttttttctccctttccctcccaggagaagacatttgggtcttggcctgaggcaggggtgttgagcgatgatgctctgatatggagctgtcactctagagctcggtcagatggaagacactatagaaccaggttggacagatttggggtcagggttggaggctgagttcttttgaggactggttggagtggcagccagatggtggctgctgacaaggcaagaggaatttcagagattaaacattgtcctttgaggaagggagaggaggtgaatgaactcccagaggaggtgagtggcttgttgggaggaagctcagttccagaacttacctcagtgcacttgggaggggtggagtcctgagcattccatgatttctgccctggccccacctatcctaggatggggtgggatggagagtgggttcagttttcttgtactttagcctggctgaacatgaactttgtgtttacctggaagtggtaggggtgggagagattctcatctttagttctggtgcccaaaatctttggtagatggagggaactggggattcagaagatgtggtaaaggtctatttctgtagtgtggcagagatgtgtttttctaaagtgtttgcagggcatttttccctcttacctcagattaagttatttatatattgttgattgaaggttttttaaaattgcttttaaacttctatttctcgggtaaattttttggtgacatgatatatttaacaccctatttatatactcctacctcttttcatataaatctcttactaagactactgaccaaaaaagaacattttaaaattaaaagtcctctgtgtacttta

SEQ ID NO: 1800 - DNA, 3968 bp, Homo sapiens
aagggcgaggggcggggcctgcgtcgcgctgcgggcacgtcgccgcgcgtcttcagtatttaatgtctctgtgttccacccgcctgggctagcacgtgggggagctgcggaagcgcggcgctgcgggccgggccgcggggcacagccgggggccggcggcggcgcgcggactccgcatcccgcaccccgatggtagccgaggagctggtgtaattacttcaagcctccaggatggcaatccagttccgttcgctcttccccttggcattgcctgggatgctggcgctcctcggctggtggtggtttttctctcgtaaaaaaggccatgtcagcagccatgatgagcagcaggtggaggctggtgctgtgcagctgagggctgaccctgccatcaaggaacctctccccgtggaagacgtctgtcccaaagtagtgtccacaccccccagtgtcacagagcctccagaaaaggaactgtccaccgtgagcaagctgcctgcagagcccccagcattgctccagacacacccaccttgccgaagatcagagtcctcgggcattcttcctaacaccacagacatgagattgcgaccaggaacacgcagagatgacagtacaaagctggagctagccctgacaggtggtgaagccaaatcgattcctctagagtgccccctttcatccccaaagggtgtactattctccagcaaatcagctgaggtgtgtaagcaagattcccccttcagcagggtgccaaggaaggtccagccaggctaccccgtagtccccgcagagaagcgtagctctggggagagggcaagagagacaggtggggccgaagggactggtgatgccgtgttgggggaaaaggtgcttgaagaagctctgttgtctcgggagcatgtcttggaattggagaacagcaagggccccagcctggcctctttagagggggaagaagataaggggaagagcagctcatcccaggtggtggggccagtgcaggaggaagagtatgtagcagagaagttgccaagtaggttcatcgagtcggctcacacagagctggcaaaggacgatgcggcgccagcacccccagtcgcagacgccaaagcccaggatagaggtgtcgagggagaactgggcaatgaggagagcttggatagaaatgaggagggcttggatagaaatgaggagggcttggatagaaatgaggagagcttggatagaaatgaggagggcttggatagaaatgaggagattaagcgggctgccttccagataatctcccaagtgatctcagaagcaaccgaacaggtgctggccaccacggttggcaaggttgcaggtcgtgtgtgtcaggccagtcagctccaagggcagaaggaagagagctgtgtcccagttcaccagaaaactgtcttgggcccagacactgcggagcctgccacagcagaggcagctgttgccccgccggatgctggcctccccttgccaggcctaccagcagagggctcaccaccaccaaagacctacgtgagctgcctgaagagccttctgtccagccccaccaaggacagtaagccaaatatctctgcacaccacatctccctggcctcctgcctggcactgaccacccccagtgaagagttgccggaccgggcaggcatcctggtggaagatgccacctgtgtcacctgcatgtcagacagcagccaaagtgtccctttggtggcttctccaggacactgctcagattctttcagcacttcagggcttgaagactcttgcacagagaccagctcgagccccagggacaaggccatcaccccgccactgccagaaagtactgtgcccttcagcaatggggtgctgaagggggagttgtcagacttgggggctgaggatggatggaccatggatgcggaagcagatcattcaggaggttctgacaggaacagcatggattccgtggatagctgttgcagtctcaagaagactgagagcttccaaaatgcccaggcaggctccaaccctaagaaggtcgacctcatcatctgggagatcgaggtgccaaagcacttagtcggtcggctaattggcaagcaggggcgctatgtgagttttctgaagcaaacatctggtgccaagatctacatttcaaccctgccttacacccagagcgtccagatctgccacatagaaggctctcaacatcatgtagacaaagcgctgaacttgattgggaagaagttcaaagagctgaacctcaccaatatctacgctcccccattgccttcactggcactgccttctctgccgatgacatcctggctcatgctgcctgatggcatcaccgtggaggtcattgtggtcaaccaggtcaatgccgggcacctgttcgtgcagcagcacacacaccctaccttccacgcgctgcgcagcctcgaccagcagatgtacctctgttactctcagcctggaatccccaccttgcccaccccagtggaaataacggtcatctgtgccgcccctggtgcggacggggcctggtggcgagcccaagtggttgcctcctacgaggagaccaacgaagtggagattcgatacgtggactacggcggatataagagggtgaaagtagacgtgctccggcaaatcaggtctgactttgtcaccctgccgtttcagggagcagaagtccttctggacagtgtgatgcccctgtcagacgatgaccagttttcaccggaagcagatgccgccatgagcgagatgacggggaatacagcactgcttgctcaggtgacaagttacagtccaactggtcttcctctgattcagctgtggagtgtggttggagatgaagtggtgttgataaaccggtccctggtggagcgaggccttgcccagtgggtagacagctactacacaagcctttgacccccatgctgcttcctgagagtctttttttgcactgttgaaattgggcttggcactcaagtcaaagatgaacatcggaataacaaacattgtcctctccagaaagtcctttctttctccatactgtagtcctattgagaagacatttcgtctctgagaaaaaaggatggaactatgggttctcttcgcaaagccaaaggatagtgtttaacaagccagctggcttatgctggttctcagctgtttaaaaaaaaaaaaaaaaaggaatagaaacagtttcaaccagattgtcctattccccctgttccattcccctcttcttccttctatctccttccccggcaaaaaccaaacaaactggcagacaggccagggatgtatgttgcttgcttgagagggtttcttttacttcaaaatctttcttcagggagcaagacatgaactgactaattggtatccactacttgtacagcttacataaatgagttgatgatatttaaccagtttttataaacttcatttaggtctctaaacacagactttttaaattgcaactgtaaatatgaaatggtcatcacatctgaccttggtcagtggggaggggaactggtatcctgccaagcctggttgtaatttgtaaccattttctatttgtgcaaactctgtaaatatgtgtttaaacaaatgtaatattttgtacaagatacactggagaacaaagggaactcaagattcttccagccacatgtcacctgtaggtagaagtaaactctgcagtgcagcttctgctcttggcccctctggccagggcccctgtggcttcctgcacactggacaggtgactgtatggtagagactgtgatctgggaactttttgctgtacaaatctgtttaaaaaaaaaaaaaagtaactcattgaattaacttgcagtggtgtgtttgattcttttttagactggcttcagcattgtgcagtttaaaaataagtaagtaacttacataaatcttcaattgtatgaactgca

SEQ ID NO: 1801 - DNA, 782 bp, Homo sapiens; identical to SEQ ID NO: 601

SEQ ID NO: 1802 - DNA, 1206 bp, Homo sapiens; identical to SEQ ID NO: 1471

SEQ ID NO: 1803 - DNA, 1994 bp, Homo sapiens; identical to SEQ ID NO: 552

SEQ ID NO: 1804 - DNA, 3275 bp, Homo sapiens; identical to SEQ ID NO: 568

SEQ ID NO: 1805 - DNA, 1815 bp, Homo sapiens; identical to SEQ ID NO: 544

SEQ ID NO: 1806 - DNA, 1461 bp, Homo sapiens; identical to SEQ ID NO: 561

SEQ ID NO: 1807 - DNA, 473 bp, Homo sapiens; identical to SEQ ID NO: 541

SEQ ID NO: 1808 - DNA, 5566 bp, Homo sapiens; identical to SEQ ID NO: 264

SEQ ID NO: 1809 - DNA, 3150 bp, Homo sapiens; identical to SEQ ID NO: 569

SEQ ID NO: 1810 - DNA, 3519 bp, Homo sapiens; identical to SEQ ID NO: 1502

SEQ ID NO: 1811 - DNA, 3897 bp, Homo sapiens; identical to SEQ ID NO: 549

SEQ ID NO: 1812 - DNA, 2301 bp, Homo sapiens; identical to SEQ ID NO: 536
